United States Patent Application Publication US 2007/0083945 A1 - sequence listing, part 14

SEQ ID NO: 89802 - DNA, 292 bp, Glycine max
ttgaatgctctattcaatggagttgacaataatatcttcagactatcaacacatgcacagtggccaaagatgcatgggagatcctgaaaaccactcatgaagaaacctccaaagtgaagatgtccagattgcaactattggctacaaaattcgaaaatctgaagatgaaggaggaagagtgtattcatgacttccacatgaacattcttgaaattgccaatgcttgcactgccttgggagaaagaatgacagatgaaaagctggtgagaaagatcctcagatccttgcctaa

SEQ ID NO: 89803 - DNA, 253 bp, Glycine max
  unsure (1)..(253): unsure at all n locations
agcttggttcgaggtacttacccgttgattatcgaataacgatgaagaacgaatgaagaactgtcaagaacggttcaaacctttgcgagattcctcacggaaaacgtttcggaaacgtttcggaagcgcctcggcttaaattttcttccggaaacaatttttcaagccaattcaaagaaatagaaatgcctaaggggctggacccctttcttcttgctttccctccctattnatagcacaataggggaggtgg

SEQ ID NO: 89804 - DNA, 298 bp, Glycine max
  unsure (1)..(298): unsure at all n locations
tcttatccaaggctcatcttggtggngaagttccttcttccatggcttattccctagtggatggcgcctcctctcacctcttctcctttgtcttccgctgcatctccatggtggaaaatcaccattaaaggacctcattgaagctcaaagatccagcctccgtagaagccccacaaacaagcttccatcaagtggtaatcagagcacaagagcttcaagtaggtgctccttaaacctccattaattttttgctttaccttctcttccattgttttttcttcattttttctccatgtat

SEQ ID NO: 89805 - DNA, 299 bp, Glycine max
ccctcttcccccatagaaagagtggggtggctctaaatatttgtggcttaagtatggctattctcttaaaagttatttataaatttctagtcttggacctatccccatgtgagttaaatcattaattaatttaatttgcacttgtattaggccccgattttgcctttttggtcatggatggtcccatggaatatctttcaagggtgcgggaaagtccttgggatttaattttgaaccttgatgggctaatttaaaatccatgtctgggggccaaccaaactcaactttttatatttttt

SEQ ID NO: 89806 - DNA, 298 bp, Glycine max
tctcccccaattttctataaatagggggagtattgttttataaaagggttcagccccttaggcacttctctctttctcgaaatagctgaggaaaattggttccgtgaagaaaatccaagccgaggcgcttccgtaacgtttccgtgagtgatttcgcgaaggtttttgaccgttcttcgacgttcttcattcgttcttcatcgttcttcagtcttcaacgggtaagtacctcaaaccaagctttttaattcattctatgtaccagtggtggttcacatttggtttcatgtatttttat

SEQ ID NO: 89807 - DNA, 301 bp, Glycine max
  unsure (1)..(301): unsure at all n locations
tgagatgaggaagtgttgaagggtgaaactttctgtttttattgntgaccacagagtggtacctggagatatgtcgcgggggtcaggagaccttggggacgtcaggtggggtgctattgcccaaaaccaagcttgaccaatcccgacccaacccgggcatagtcggtcagtgagaacctgtgatgtacctaaacaggcgagctcctgacagtcaacagataaaaggaaaacaagaccacaaagcaaggaggcttgtggtggctggccagctgtgaattttgtgtaatatgtggattgtggc

SEQ ID NO: 89808 - DNA, 319 bp, Glycine max
tataaaatcctcaagcttaatcaattgaaaattgacggtgtgagattttccctttattctactaggggaaattttccttggcacccttaatcatgttcaattttttggtaagtttaggtcttttaatccaaaaaaggaaacttggttaccatgtgagagtaatttggataaatgaaaatagttttggttgttatatgcatgactatatcgatgcttgtttgcaacaatgtattataaaaaagtgcctaccacatagagagtggctatgcaatttggaatgcatcaagaagtttcagattgcgtgattgcattctctggg

SEQ ID NO: 89809 - DNA, 317 bp, Glycine max
aatactaaagctcgcatttttaacgaaggtggtttacaaaaccgccgtttatgatgttgtactaacaatgatgttgactacgacgacggtctaaaaccatcattgaaagccctatttaactgtcattaaatagtatttttgcagaagtgcctaaactagtgtagcttaaacagtcaaaaaatgttcatgaaccaagataaaaaaaaaatcacatgcctatactacaatatagagcttattagatgaataaaaagaataaaatggtttactactttaggaaccacatctctttcacttccaccattcaaaatttaaaa

SEQ ID NO: 89810 - DNA, 242 bp, Glycine max
  unsure (1)..(242): unsure at all n locations
aaaacacacgattttgacttttattgaagacaaaacaggcgcgggggaagtatanggaaacaccacgcgacacaagacgacggaacccggcactaaccaactaacaccatcaaccacccgcatggataagcaaagaaacagccgggccaacaaaaaccaatcacgcgtgcagcaaacagcattgtcacaaccgacaacacataatgacaagcatgcgcaacacagccagagcgtgacaacac

SEQ ID NO: 89811 - DNA, 331 bp, Glycine max
  unsure (1)..(331): unsure at all n locations
agcttcgacctatgtgcatgaattgtgtgccttctcaactgccgntaagaagtggagacaataccttcttggccatcaattcatgatcttgactgatcacagaagtcttaaggagctcatgactcagattgttcaaactccagaacagtaaatgtattttgccaggcttatggggtatgactaccccattcaatatcggtccgggagcactaatttggtagctgatgcctttatccgcttgaaggagggatcaaaacgaaccatgttatttctatctcggcccttcccgaacatttttaaaaaatgtaaacacccttttaacaaacccccc

SEQ ID NO: 89812 - DNA, 293 bp, Glycine max
tctcaataaatacttatagatgattaaaatttatatgcaaattaatgaatcaaatgtgattagaagtgtatatatatgtataccatgttctttgagcccagttgccaagttgttagtctttctcccaagcctgttcatcccggtaagaactgaatttactctacctgaaaaatcaagacattaattcagtatttcagtgttgtgaatataaacatacctttattgaatacctgatgaacaattatcttttctctcgttttctaattaaacaattgatcaaattattttctaat

SEQ ID NO: 89813 - DNA, 352 bp, Glycine max
  unsure (1)..(352): unsure at all n locations
agcttgttaaacgangncgtttcatcatcatttacattgcagatcgttaattcaaatcaaaagactttctgcttacccctttggaaaaaaaaggaattagatatacatgaaaggtgttaaaatatgggagatagaataatgaaggtgcatcggtcaatgaaaaaaagatataatgaaggtgcatagacgctcgtttatttgaattcatgtatataaagttatgctctgttggaaattattgtgaaccttttccattattagcccaaaactttttgctttcaagattcaaattcatttgaaatggtgaacttatgcgatttgcttgcacagatcaacattttgaataactttt

SEQ ID NO: 89814 - DNA, 296 bp, Glycine max
  unsure (1)..(296): unsure at all n locations
tgtggccacgaacaacaccgacttttttttttttccaccgcttgaaattnttatcatcaagcttgatggagataagatgttttagtttgacatgagaagaaggaaacgcgccgtcgttgcgaaacggagacgccatagatcaagatcactggatcggaaaaagagtagctctagataccatgatagaatatcataaaagagaatgagagagagtaaaggctatttctcatatattgatcttatctgaaataatgaatacaatgctcttatatagagcagcaacaaactattgcata

SEQ ID NO: 89815 - DNA, 351 bp, Glycine max
agcttcacagatgttgcatttcggttttagctcctcttattgaagaacgatatgcacttcttgcattgtaaatttgcttgattgtggtgcaactattgacattgtgttccttcaacgttagcaagatgttttttggtttcaccatcgactttgtcatatcagtaataattttcttttcatccttagtcaatcgcccagcgtattaatgtccaactaaggacttggccaattcatgattgtgaatcccacagatcaacttcaccatccaaccttcccctccatgcactggtttcccacgaagcctgaagggacaaccacatttcctactcccagtgtctcttttaatgaatt

SEQ ID NO: 89816 - DNA, 296 bp, Glycine max
ttggccaatgctgtcatttagagggtcaattttatcttggaagtcataacctctacacttgaagagttgggttacgagtttgggcttttatttttgtaattagttagttaggtagttagttgattagttagttagttagttactaacactctatatatcagtgttatttagtttgttagtgatcgaaattcactagaacttcattttgtacaaaacttgttgtgtaagctttctctttttctctcaattgttcttcattcttcttcatctcttcacttatgttccatcattttctt

SEQ ID NO: 89817 - DNA, 345 bp, Glycine max
agcttaaacattcaacgatgttcgtttttatatattacgggactcaatcagacatccgatgtaaaagttattgtcctttgaattggctcacaggttcaaaattcaattttgagcgtgtcgatatatttcaggactcaatcagacattcgagttaaaaactattgtaccttgagttggcttagaggttcaacattcattatcgagcgtcccgatacattacgggactgggtcggacatcccagttaaaacttatcgtcgtttgaatttgctctgagcttgaaattcaatttcgagcgttatgatatattacgggactcaatccaacatccgagtaaaaaggtaatt

SEQ ID NO: 89818 - DNA, 301 bp, Glycine max
  unsure (1)..(301): unsure at all n locations
ttaagccaatccatacgacaanaactncattttcggaggngcgatagagacccgtagtatatcgagacgctcaaagttgaatgcttaatcttttagccaatgcatacgacaataactttttactcggatgactgattgagtcccgcaagatatcgaagcgctgaaaatggaatgtttaagctgtgagccaatatctcacgagagtaactttttactcggatggccgattgagtctcggaatatatcgacacgctcgaaattgaatgttgaagctctaagcctatgcaaacaacaataacgt

SEQ ID NO: 89819 - DNA, 252 bp, Glycine max
agcttctgaatcataatggttgaatttcaacaaagaattcatccagaagaaaacatggtcttgtctccaaggcttaaaacttagaggaatgctagcaacacactctctattacactggttcttacacaccctgtactattggttaaagtttcttggaaactacaaaatcattagtgaagctcataaaataagaagtcagactcacaaaattttgtgatttccaataaattttaactaaaaatagtgtggtca

SEQ ID NO: 89820 - DNA, 289 bp, Glycine max
tgttatccaaggctcatcttggtggtgaatctccttcttgcatggcttattccctagtggatggcgcctcctctcacctcttctcctttgtcttccgctgcatctccatggtggaaaaccaccattaaaggacctcattgaagctcaaagatctagcctccatagaagccccacaagcaagtttccatcagaaaccagacgtcttgtctttttgctcagcgaaccgctccgttaagcgaaaagaacaaaacattcttagtgggtgtaacgtcaactacacccactcttg

SEQ ID NO: 89821 - DNA, 344 bp, Glycine max
  unsure (1)..(344): unsure at all n locations
agcttgggcgttgtttttctttcttttgagctcgnaaacgagatacatgcccacgtggttctgttgtttttgttgtaaaccatgtgggttagagggcatattttatttagaaaatttgctttttgtttatcatgtcatgtgctgccatatatataataatataataataaggaattagctgcttagtgtttgagttgacgtaccacaagatttattttgtatttggtttgatttcattatttcaggacaatgcgattgcctgtataaattggatcaaaatttggtatattattcgaaaagtgttgaatttgaattccaaattttagtattataagcgtaataac

SEQ ID NO: 89822 - DNA, 299 bp, Glycine max
tatgctgcaaatatttacaatagaccgccttttccttagcagtaaaatcaaccacagcagaacaattatgacctttccagcaacagatacaaccctggatggaggaatcaccctaacctcagatggtccagccctcagcaacaacaacaggagcctgctcctttcttccaaaatgctgctggcccaagcagaccatacattcctccaccaatccaacaacagcagcaaccccagaaacagccaacagttgaggcccctccacaaccttccctagaagaacttgtgaggcaaatgactat

SEQ ID NO: 89823 - DNA, 340 bp, Glycine max
agcttttgcgtgaatcagaaagatttctctcttcatacaaaagacaattaattattaggcttcggaggttgaaatgttgaacccttttcattgattcccaccaacgacccttttgaaattgtccatatataagcagtactgattaaatttttacaagcattattagctgtataatactttaaaatatcctacaaaaccttagggtttgtgcgataggcaaaaaataaattgagatcaaaattttaaattaaaataaaatatataaaaacctcaatattattccatttcactctttatttttattatcttttcacacaaacgaacatatccctagaaattt

SEQ ID NO: 89824 - DNA, 296 bp, Glycine max
tgtaatatatgtgatgtgcttctcatgcctagtattatcagattcagttccatatgcgatcgccaagaaacagaaataagaaagatttggatgcacccaagagctaagacaacagggtaatttacttactcgagcctcttatgttttggttgagattcatcgaggacaagtaatgcaacaaaaccaaacataaataagcgaaggtacaccaaatttcaacaaaacgtcctgtaaatgtatgatccccacatgcccaattccctactgtttacatttctagaaaaagtatgagttaa

SEQ ID NO: 89825 - DNA, 347 bp, Glycine max
agcttgtcacttaagtaagggaaattcattataatagtataaaccccggctctaactaaataaagaatatgattaaaaaaaaattgtggccaaaacaatggtatgcaagttgtaagacttttataatactatctaaaagtcgatgatgtcttaacccttgccttgactatctatctataaattggagtatccttcaagtctatcccctagagtattaaacataatctcattttttttttacaaatgttaattgtttgttaaaaaaatcaaccttatgatatttttttttcttctctttttatcacctaatcaatcttataatttcaatataatatcatgcctgttta

SEQ ID NO: 89826 - DNA, 302 bp, Glycine max
  unsure (1)..(302): unsure at all n locations
taacaaaggacgtttagcagnactaaatattttgaatctccctagctagcatggtggaacacacaacacaagacaattcttcaattttttcctattcatcaagcctaataatattctcactaaccaaaggaacactactcactactactctctagtgttttcaaattcaatagctatgggtggtaacaggcaaaggaaatcttccaccttcaagtcagttttcaacattttcaaatctagcaataggcaaagaggaggagggcactatgatgctaattatgatgatgcaccaaagcaatgga

SEQ ID NO: 89827 - DNA, 352 bp, Glycine max
agcttatgacaacaaagatgccacattcttattttaccaggccagagaattaggacgcattgtcaagggttaagcccgagctatggtacagacacacaatggtgcaaaatactcctaatggttatgatgaaggatgggtgaaaatttcacaacagagaactgatcactttgaaatagagggtctataacccttatgccatgtttataagaatcacggatgacgagtcgcaaattgacgagatcttttattatcaaaacactctagccattaattgaccatatcctattaatcaaagaaaaacctgtcaagtctattttgcccaccaccttgaccgcattatattaaactata

SEQ ID NO: 89828 - DNA, 303 bp, Glycine max
ctgaatcgattactctcatactgaaatgcgttaccattttgacaatctcagaatatattctcaacagtgacactccattgcgaggttcttgaatggctatcaaaggcctatgtatatatgtgactatgagacgctattttgttgagagttggtcataacaaacaaggtctttttctcttataaagaaaaataattttatatctcttacatataccttaaccacaactctagtgattaagaaagagactaatttgagagctccatatgatcaatctcactctaaatagcaagattccctcttct

SEQ ID NO: 89829 - DNA, 362 bp, Glycine max
catgcaagctttatatatgacttcagaggcttttcttttttgagagatcccaactaaacattgtctaatagcttgggcgctttacccatgacacgttctaccccgacatacatgtataatatcatacatgagaatgcataattaattaaagagattttattccatgaacataaaagagttcacatgggtaaaaggttcacatccatgttaatcatcaaattaaaaacttatcaaataagggtatgaaaacacctctgacccaaaacaaggtcgtccaatttttaacaaaaggaaacaagttaaatagcgaaataacatatagtaacatattcagaacattacacaaataatatagaaactca

SEQ ID NO: 89830 - DNA, 304 bp, Glycine max
taacaaccttagaaatcaagtgatcataaattccattatatagggggagtaaacgcacattttatctatatacaattgtttgttgcttgcttgaatcttgatttcaggtattgtattgtcataatcaaaaagggggagattgtagatgcaaatgcctttggtgttttgatgatgatcatgatgatatgatgcaattgatgcaaatgggcttttcaagattaaaattcaagataatacttcaagattacaagtcacaacttcaagatgatcactagtaaattaggaagggaattcctaattgaat

SEQ ID NO: 89831 - DNA, 256 bp, Glycine max
agcttttaaactttagaaaagatattttgcttgacaaatgacctcagttatcttaagaaggggtgaattaatttcccactaacaaacttttaacccccttctaaatgataggctccaaatgtagaagtagaagcaacaatcaatttaataatgttctttatacatgcaagacaaaattgattgcaataatataaatgagataagggaagaaagaaatgcaaactcaatttatactatttcggccactttccgtgcc

SEQ ID NO: 89832 - DNA, 294 bp, Glycine max
  unsure (1)..(294): unsure at all n locations
tgtaggattatggggtacccatcacgtgttgtactaggtggcagncgggcgatggtgcacaacaagtttttcacatccacatagcgcgcataaacccaccatcccctgttgcccacctccatccgagctcacgtactcccacgtagcccatatcctcgtttctctcaacaccgggtccccatcaatcctcccaagcttccacaacatccaagcaaaacaacattcaaacagcacaaactaccacagccaagaaaacagggcaaaggcagaaaactctgctcaaacaccaaccaa

SEQ ID NO: 89833 - DNA, 294 bp, Glycine max
tcctcggggccatttcctgcgaatgcaaacatttggaaagatagttttaccagtgggacactactcttaaaacaaaaattattttactacctcctcccataaatacaaacatcaatgtaaatttagagcaagcttatgcgcatatttccctacgaacgttcacttgcacaagacatcctattaactaagaaaaatgcacccatatacaatcaaggtagcttcattacctagattatttacatgtacttccaaggtgtatttgttatttacatcacacacgcctccttggctaaa

SEQ ID NO: 89834 - DNA, 346 bp, Glycine max
agcttgtacctacgcgcatgatttgtttgccatctcaaccgccggtaagacggggagacaataccttcttggccatctattcatgatattgactgatcacacaagtctttaggagctcatgacccagattgatcaaactgcggagcagcaaatgtattttgccatgcttatggggtgtgactactccattcaatatcggcgccggagcactaatttggtagctgatgccttatcgcgcttgaaggagggattcaaaggaaccatgttataactatccgcacccttgcctgacatttttagatgaattgatgaatccattaaaactagaaccatcctttattaattc

SEQ ID NO: 89835 - DNA, 348 bp, Glycine max
agcttctttacaaaaaagacatactatattttcagtaaaaaaaactcttaaaagtacttatgacttgtatccaaaacaggtctatatatatatatatatatatatgacttgtatctattagtattttttacttcctctcttctttcagaacttacaccccatctttgggatgtttgtttaatatttttcatcttttttttttgttttggttcttgacatacaccccattgaccctattgattgtgatttggtttctgtttcagtatattcttttgttggtgttaagagtgtaggcaatatggtttttgtgttttagaaactttgattaatctttgaatttaatttcct

SEQ ID NO: 89836 - DNA, 299 bp, Glycine max
tcgtctgattgagagagaattttggcaattttctccctgatagttacgtacaagagtttctaagtgaaaaaattataatctattttgcatctaaaatatacaatagtaataaatagagaaaaatagatttgtgtacccggatgcgcattctcaaagcaataattcttcaacagtgtgaagactttacgataaatggagaaaaataaatttgctatcaactcttgatgagtggaactctaaaaagtaaatttttcttctacttttcaagtctaaaactagacttaaacttttctaatttg

SEQ ID NO: 89837 - DNA, 339 bp, Glycine max
gacttaaaatttttattcatgtgtatcctccacgtgtaatgcacgtggccaatttattacctaagctctgcataggtgtccaaacataattcatgacacgatattttctctataatgtcacatacaatatatataaaacctctatgatcgattcttgttggtcactaacgttgttatatgccagatggcatgcatctaagctgcgacatctgttacataattttggcatcctattcattcatacttgtaagaaaatgataattacactcacaccctttatttgatacgttctcgctctatattttatctgcatctgataataatttcatattcctacat

SEQ ID NO: 89838 - DNA, 295 bp, Glycine max
ttgacgattaatgagaagtccatattttttatgaggtcactgcaaacatcgagaagggagggtgaaaaaaatcgtttgagagctagacaacatggagttcagtggggccatcttggtattttgtttcctctatctgcattagttgcttatgctaattgttgcttctttttgttttctttggtcttgtaaggccaacttctccaaggtgttgaccgcgcagaacaaggttttctccttgattttttcttgttattttatttttgacttgaatttgctcgtttcgtcagattgttaa

SEQ ID NO: 89839 - DNA, 287 bp, Glycine max
tgagctcactgttgctgtcccacaaagcttcacgaaatttggcgtggccgtgctcttccttgcgagccctcttggtttcttgatcaaaggctcttgcgtagctgcattttcttctcgaaacccgacacacgcttttcggacgtctgtagcgaccaacttgaatttttctttggcaagtcttgcttttcctagttcgggttttatagctcggacttcttcatcctcttccggagcttcgaaactctcttcgttgataatctttaacttggagagccaatctaaccctt

SEQ ID NO: 89840 - DNA, 346 bp, Glycine max
agctttgcagattttgtttttgccagtgaaaggatcaatgtgggtccgaaaagaggcaaatttgatcatcctactaagacgactgagaaaactggggcaaataaagagggtgaggatgagggagaaacccatgctgtgactaccattcctgtacggccaagtttcccaccaacccaacaatatctttactcagccaataacaaactttctcctacccaccacccagttatccacaaaggtcatccctaaatctaccacaaagtctgtctaccgcacttccaatgacgaacaccacctttagcacaaaccaaaaaacaccaaccaagaagtgaattttgctgcgaga

SEQ ID NO: 89841 - DNA, 292 bp, Glycine max
tgagatgaggaagtgtgtagggtttaacttcttgcttttattcgttgaccacagagtggtacctggagatatgttgcgggggtcaggagaccttggggacgtcaggtggggtgctattgcccaaaaccaagcttgaccaatcccgacccaacccgggcatagtcagtcagtgagaacctgtgatgtacctaagcaggcgagctcctgtccgtcaacagataaaaggaacaaagaccactaagcaaggaggcttgtgtggtggctggccacctgtgaattttgattgatatat

SEQ ID NO: 89842 - DNA, 328 bp, Glycine max
  unsure (1)..(328): unsure at all n locations
agctttcaactggttaacatccttctatgtttcttacttgtttgaccttctttgcgttattcttcacatctctacttgataccaaagaaagggttttcgttttatgtaatattctgccgtatgcactttacccatttgatatatgatatagctatttttatttatagnaaatgatcattcccaattgtaatggtaccatcaagggaactaattactggattcgcatttgcattagaaattgactgaaaattggcgtattgccatactgacgagatgagaagtgggctattagaaaggaaaaacatttctagaaaggcggcaacaatga

SEQ ID NO: 89843 - DNA, 299 bp, Glycine max
gcttgaaataagtgggtattttgtcgtaccaggttctgttgactataagcaaatcaagggatgtatgatttgtttgctcacttaccaactcttaatcgtctagcaaacaaatatgtgatctaaacacttagtatgatctctcaagcttttcaaggagcttcgagagcttttcaaactatcccaaaagcttttttttacaaaagaatttgaatgctagtgagttggttcatgctatatgtcttcgaagcttctgatattgataggtcttttttaacaagggtttattgacattaaattga

SEQ ID NO: 89844 - DNA, 70 bp, Glycine max
aatcacgagctgcagctgtttgtattgagtgtttctagtacccacttatgtaactgtctttgctatggga

SEQ ID NO: 89845 - DNA, 290 bp, Glycine max
tggtctaggtcggcttggagaaattacccttctgctttgaatttctccttccgatcgttttggaagtgtgatgtttcgtccaaggtcttgactttttcttgaaggctgatcctaaacaagctacctactcgtgtagctctagtaaggagggggattatggtggaggatgatgggcttttaactcttgagaacccccaaacacgactgcgacaccggaattaattatgtaatataaatgttcctacccacattttttattaatcaagttacgctcactttcttaaaaaatt

SEQ ID NO: 89846 - DNA, 342 bp, Glycine max
  unsure (1)..(342): unsure at all n locations
agcttgaccattntccatgaaaatctgattttgtacatcaaagagagcaaagcgcgcaatgttctcaagtacaccatttacatgaaagctagcaccataatttgtactcctcttggtggtagcctttccatgacgtggtattgttgagcgtaacacttggctgtgtggaggctttagcagaacttccagatttggaattgggactactccaagtcttgcttgtactgaccaaactccattcttacggaattggggggagcgcggctggatcaaagaatgtgagtgattgatgatgatgaaagactatgcaaaacctatacagacaaacatttgcactacggc

SEQ ID NO: 89847 - DNA, 293 bp, Glycine max
tgaagggtatatgactttcgaacgtgacgtttttgttttacatgagagagacggggctagaacagatattagtggcatcgttgactatccaatgaggcagaggccaacagttccacggtgtgacttatgtctccaataacgtgtttataaattgtaaactaaaatgacatatgctgacccttataacaactgtaaatgactcatttttttagcgcccatgaatgaaataaaatatcacttgcagaatgtgtctatctgcatcttaggtttcaagcattgggtattgatggcgt

SEQ ID NO: 89848 - DNA, 356 bp, Glycine max
  unsure (1)..(356): unsure at all n locations
cccaagctttttgatagaggtaaaacctttttatcttaccatttttncttgcatcttcttattcctttaacattctttatttcatcttctttttaccttctcttttccatgcatatattctttctttgaggtgaaagcctactagcgcttctcctccttttttgaaaccttgtgtggctagtccttcttcaaagtctcttgccattgctccttcttttaagtttttcaccattgctccatttccaagatcgctctaattaacattctgtgtaatccaccgaggtaatgctctaattttctctcatttccttataacgcttccttttcctattccttttaacatttccttttcctat

SEQ ID NO: 89849 - DNA, 304 bp, Glycine max
tagtggcccatggtttcgtttcatctccgatgcccttttaagaagcatttccatttgatatagcccattctttattatagtgtggagttggatcttcaaaagggaaggacagcccttggcctagaaaatctagtgcccctactatagttgtggaagcaatgctttccaagattattttgatgatgtcaaagactcaagtcaagaatcaagagtcaagcaagtttcaagaatcaaatagtcgttcaatcaaagcaagtgtcaagaatcaagatcaagattcaagattcaagtaaagaatcaagat

SEQ ID NO: 89850 - DNA, 292 bp, Glycine max
tcacgatgcagtctcgatagaaatgggctccttaacattgaggaaccttgcatgatgatgattccctactgacaccaagaaatgttattgtagaccctacatactaattatataacatggcgtggactactcatggattcctattatgatgaacggcgaacgctacaatattatagcacatagtcccatactaaagatcaatgatattaacttatagggaggaaaatactaaacactgttacggagccacttactccaaagtcccacgataccacacttctactatatatat

SEQ ID NO: 89851 - DNA, 289 bp, Glycine max
agcttgggattgcatatgggtttctatttctactttcctatgctgactctacatacataaaacagccccaccatcccaattttgcaaaatcatatacatatatcattggggcatttcaccgagcacttgatgggcgcatgttaggacataaattgaagaaaaatgggggaaatgtggaatccccctattgttcaaaataaaaaaaaggctcaaggcctcttattcaaatgcctactgccaaaaaaagcatgcttttaaaaccaattgggttccaaatttgtgcaaaatg

SEQ ID NO: 89852 - DNA, 292 bp, Glycine max
tgagatttctgcttcatcatgaatacccatttcatcttggagtaatcatcgatgatggataggaggtaccttgccccttctaatgtgatgcggttaaacatgattgtgagatatgtaggtgaccatatacatatgtcaagcagttataaactccctttgagtttaacagctgttaaagcttgagaaataagaaagaaaattgcaataatggaataaataatgcaatataaatgctcccaaccacatttttcatttatcaagttacgcttacaatcataaaaaatttctaccc

SEQ ID NO: 89853 - DNA, 196 bp, Glycine max
agcttgttatcgattacacacatgttgtactcgattaccggaggagtttttcagaaaacattctcaacagacacatcttttaatctgattgtaaaacggccatcaaaggctaatctatatgtgacttgagacacaaattctacactagtgtttcacaacaaacaaaggtcttatcctcttaaaaggcaaaatcgtt

SEQ ID NO: 89854 - DNA, 292 bp, Glycine max
taagagtctatggatgtatacctttccgttttagttttctagtctaataaatacctagcgagggtaaagtcatgataaacaaatgaatggtggggtgtttatgtagaataggctaacccaattgcaatagtccttataacactcactgagacattatgtctcacccttttaagttccttttttttttttaacaaatgggtgatgatgcgagttgcatagcattaagtcttggcatattttatggctatatgaaattgcttttatatgatgtatgacacccatgtttgaatgg

SEQ ID NO: 89855 - DNA, 356 bp, Glycine max
agctttgagccaaaatcctgtctcttcataaaccttgacccagggtgagaatgtcaatccttaccctcggaagcaaaaaaagaatagaggggaaatttccaatcaaagaaaaagagaaggaaaatttccaatgaaagcaaaaaaagaaaagaaggaaaattccccaatcaaagagtgggagaaagcaaaaaaagaaaagaaggaaaattccccaatcaaagagtgggagaaagcaaaaagaaaagaaaggaaaattcccaatcaaagaatgggagaaagtaaaaaaggaagaagaagaaggaaagaaagctcctcatcaaggatcaaaagaaaacagaagaaatgtgcagagaggt

SEQ ID NO: 89856 - DNA, 298 bp, Glycine max
tttgtcactccacccaaatcttgctttcaaattcaccaaagctaacacccctgacaatcatgtatacttagtgcatccgacatacaattgtttctttgaatcattatctaacttttcataatatggtgcatgtgtttgcctaaaaccctcttgtccaagatcgcgtagcatgtcttctatacgatcactgacttcttcatgaactccaacatttcgaggggttgatgacatttctgataactcaccatgccatatccatcttctataagtaggacagataccatcacatatcagatgt

SEQ ID NO: 89857 - DNA, 353 bp, Glycine max
  unsure (1)..(353): unsure at all n locations
agcttatagaanatataataaaagttttatgattattgaagattctatacatgtttcctttgatgagtctaatgccattcttccaagagactatgaagaaacatatgctccagttgcaagattagaagccattagaatgctcttagcatatgcatccataatgaattttaagctctatcaaatgaatgttaaaagtgcttttctaaatggtttaattcaagaagaactatatgttgaacaacccccaggttttgaaatcccggataaatcaaatcatgtttataaattgcaaaaggctctttatggtttgaaacaagcccctagggcgtggtatgaacgtttaagtaattttc

SEQ ID NO: 89858 - DNA, 299 bp, Glycine max
ttgcttccacagtataagggaaaagtctctttttgggtgcttaatgtttgaatgagtaatagtgtgaaaccattctagataatcatcaatgcacatagataaggcatcaacaaccacaaacaaactttgaaactcaataggaaagacattaccatgacatcattgatgatgttggtctacatcaatgcaagaaggaatagggcgtgcaacctgatgaggtacatgaggaatcctctagacatggtagaattggcacgagacctacttaggtagattagtgttgtacatgggccaaatag

SEQ ID NO: 89859 - DNA, 343 bp, Glycine max
  unsure (1)..(343): unsure at all n locations
agcttgccgcaggtatctttctcatttatgccctaactcttttagactggtgatccctaggctcttgaccctgacttgataaaacctctttttaacgaaggcgtttgacttgatcccatgttttataaagagaaacaaaatccagcgcgaatcaaaanntcgacatctatcatgggtggaatggatgaatgcatgaagaaatgcatatgccacagaggcaatttatgaatacgggagcccaggaaattgtctcctttttagatacaacgtctcgggatagcacagtgcccgacgtatgtatttaagaaggtgatgcggaccctccggtagttttccaaagaga

SEQ ID NO: 89860 - DNA, 296 bp, Glycine max
ttggaacgagaaaccaagaaggcccgaattttagaacacgaccaaagcaaagttttgaggggctttatagggcagcaatagtgagctcaagctccgaagaggtgaaaggaatcatcacgggtcaaaggcatgatcttgaaggacgagctaaaggcttgccttatgttgaaaagaaatttgtcccaaaagttaagcgagactgaagggaatatgtgggccatcatcgatgagtgcaaagagaagctaaatctagcggcgactcacgagaaaaggctagaggatgagtacgccaagat

SEQ ID NO: 89861 - DNA, 345 bp, Glycine max
agcttgatacctagtgaattttgggccaatacgagccaaaatgagagcttagatggagatgtttgttcataggaaactgaatgggttaccattagagaaacataggctaataagcaacctatcataacttttgatcatcctatactagaaatgaccaagcatttgaatcctttgtatgttaaagcctcgataaaatggtaaaactttatccaaagcatttgtagatagggggcaattttgattatcatgtcgtcgaccacgttgaagaagttaggtaaaaggcatgagtagttcattcctacaaatatccagatgatcaattttacgaaaggagtcactctagca

SEQ ID NO: 89862 - DNA, 287 bp, Glycine max
tgtaaaatagtcatactattttgtggatttttttcagagcttcgaatgtgcttacagtattgtgttagtgcacgtttctgagcagtagatgatcagcagtggagacatgtagtttttgttcagcatctgttccatttgaatcccctgaagttggtttctgccaaggtgaaaattctactagtggtgatgctaagaatcacaggttattgaaccattggtttcattgaaaatattttaaaggctcattattattagtgtgtagatattagacgacaaatgtcgcccat

SEQ ID NO: 89863 - DNA, 346 bp, Glycine max
agcttattagaacttcttcttgactttttgcagtcatcacaaagccatccgctgtggatatatacatattgctagggcacggggtgtaaaaagataaatgcttaggttggggtgccatgtggtcggtacccccaaaatccaaaatccaagatgggttataggtattatttgaagcattaagtgcgaaagaaaaaagagactcacctgacgtacctaaatgtgccagagaacaactacatgttgaggactgatctcatcttctctacttcatcctgcctaagttgaatcacgcctactctattatcttcactggttgcagcaactatgtgtgctagtcctccttttc

SEQ ID NO: 89864 - DNA, 294 bp, Glycine max
  unsure (1)..(294): unsure at all n locations
tcacttcatgagagggatggctcgtctcttctatgcccttggncggaggaggatatgattcattttcctcttccatgcgatatgtggtgatttttgtttaacttgtgaccgcttttaatcctcgatttgttactaccacaaattatcttttgctagtttaaatttactaagatattttttgggaccaaagttttacatattctaattttattaggacaaaaaaaaattctttcagaacagaactaatgttttatctattctgtaaggaatttaacgtattctaacctcttattt

SEQ ID NO: 89865 - DNA, 380 bp, Glycine max
  unsure (1)..(380): unsure at all n locations
ccaacctttggtttggtggaacacaccatgaccctttcttttatcctcataccccntgatgtttcacattcctttataggtgaaacggatgcctcttgccccaacattaatggcggtctaatgccacaagggtaaccccgtggggtcttcaaccaacaatttacaccttaacttcaacctgcctcgaaatatgtgcaagaattgcacgccatgactaccgccatcccgaaatggcgaccataccttctcggacacaaattcacccatttaacggattatcgcacttgaaggagttgatgacacaaattattctaacactagagcagcaatattatttggccaagcttttggggtacaattatacgatccagtttaaaagt

SEQ ID NO: 89866 - DNA, 237 bp, Glycine max
ctcccacccttttgaaaaattcctgcttcaaaattgaccttactcaaacaaggatgggtgagggttctcgcatatgaatttctaattcccacgtggcatcttttcctgatgcacctgcccatatcaccttgaccaacgaaaactctttccctcttaagtgttgtgttcgcctatccccgatcctcaaaagcatgtttcatatgtcaaattcttctttacttgtacatcaccttgacc

SEQ ID NO: 89867 - DNA, 300 bp, Glycine max
  unsure (1)..(300): unsure at all n locations
gaaccaaaatcctggcaatggggtgggtaactgatgtacccccacttaaccaggtttcgactttctcgctaaccggcatggtcgcttaaccggccaagtgagacggtggttttctcaaagcgtatcgcttagcaaaccctcccgcttacccaaacttcaaattcaatttttttagagatttaaagttgggctancacgtggatccggacgcttagcgagatctacagatcaaaaacctaccacgcccgcttagcaaaaatcatgcatctaaagtgcagaaaacaggcgctgagcggacaa

SEQ ID NO: 89868 - DNA, 255 bp, Glycine max
gcttgaccaatcccgacctaatccgggcataatcgggcagtgagaacctgtgatgtacctaaacatgcgagctcctggcagtcaacatattaaaggaacaaagaccacaaagcacggaggcttgttggggctggccagctgagaatcttgtgtgatatatgggtttttgcctctggtaatcgattaccaagggtgggtaatcaattactaggcttaaaaatgaagacaggaggctaagatggtctctggtaatct

SEQ ID NO: 89869 - DNA, 332 bp, Glycine max
  unsure (1)..(332): unsure at all n locations
atgtagccactaatctttttatgacggtaataagatttcttaattatgatgccaatgggggcactttgggtaaaaaacactaagtttttaacacctataacacatttgttctatcctttttttatcaataaatatctgtatattattttttatattattctttctatgaaaggagcatattgaatttttaaagaaagatttttcatgaaagataatatttcaatatctcgctattttaaacattctatcaatatntattattctcttcatctctctttgtggtatattatattacctatcatatanttttgtctttttttttctctcattaa

SEQ ID NO: 89870 - DNA, 380 bp, Glycine max
cacatcctgttcacatgtggatgaaacttgttgacgttctatacctatcatgctttaatttctacgcaacattttaaattaaagaaactagcatccccgaaatctttatgaagaaattcttgcaatcgaagatgagaggtgattgattagtttgtgttgtaaattattatgtgagctacagtcaagagttcattaattcattaaacgtatgtacttgtctcatagaaaagttgaaatgaactataaatttttagggttaattaacattttaatccctgcaaaatacatattttttactcctaaatagcacctataaattttttctacttcttcctatcacttcataacaattataaattataatacctatatttctctct

SEQ ID NO: 89871 - DNA, 155 bp, Glycine max
gcaaaaatcggtcgatcaacccaatgcactgactgctcaaccgtgcaaaaaaactgccccttatatcagtgttcgacccaccgttggcaaaaaatagtgcctgactgactgcttgtcatctatatctacatctttttctgtgcactctttgttag

SEQ ID NO: 89872 - DNA, 373 bp, Glycine max
  unsure (1)..(373): unsure at all n locations
cgcttgagctttgagcacccacgagacttttatcaccctagnacctatattgttagtagggtctctttagcacacttcaaaaacatcgtaggggtgtttgtgggtccagcgaagggtttccggctctattcaaaacaatgtgggacaatgtgggtgtcgagggagcaatttccaacagatttcatgcgggaggaaaaagagaatagccatctcaggaaggaggagggccaggttttcgagcgcgcgggttgtgaaatgtcaagttttaacttataaacataacaacatcggttttttaaggataaccgatgttaactaaatatagttaacgtcggttttggaaaaattgatgttaacatcaaatagattacat

SEQ ID NO: 89873 - DNA, 345 bp, Glycine max
  unsure (1)..(345): unsure at all n locations
nagcttgtgcanagatnacttatcccaggatctttttaagaatttgggaaaagatggtctccttaattggaacctcctaaagtggtgcttttggaaaaatgagtttggtagggatggataccctgaacctggtttctacttcttcacttgatatttgactccattatgatgagtatataatacctagaagtggattgattgcctattagtaggagcatcggcctaatcaacatttaaatatttgacaatttgtgtagaccctatagtttaatagatgattcattgtatgagactcctataatgtatttaaggatacaaatcatagaattcctatggccatcactt

SEQ ID NO: 89874 - DNA, 383 bp, Glycine max
ctatgatactaagcttgtgggttaagtctcacgattgtcactgctctgcacaattgttagccgtggctatactaaacatcttgccaaacaaattcaggttcagcataactcgcctgtgctttttcttccatgctatatgtagcacagtgattgatccagtaatgtttgatgagttggaaaatgaggccgcaattatactgggccaattggagatgtattttccccttgctttctttgacatcatgattcacttgattgtgcatctggtccgagaaatcaaatgctgtggtcctgtttatctacagtggatgtacccggttgagcgatacatgaagatcttaaagggtatacaaagaatctatatcgtccagaagcatatattg

SEQ ID NO: 89875 - DNA, 362 bp, Glycine max
  unsure (1)..(362): unsure at all n locations
agcttgtcgtgccatcaccataccggcctaatatcattcctaactcatacctatcccttaacatgacttgggccacccatcaagaggcaccaaaataacgtgggtgcatcggaggagcctncatataagccattgtcacaatttctaatgcttgaaaagatgtttcaatgactcttncacagcttccacatanggtgtagaggatggacaactcactagtatatctttttcacccgacactataaccagctgtccttccaccacaaactttaatttctagtgcaacattgacgggaccaccccaacagaatggatccaaggccgacctagcaggcaattgtaggcggggtttatgtccatta

SEQ ID NO: 89876 - DNA, 383 bp, Glycine max
actcagcttgacaagcgttggggtctgttgttgaacgtggtggtgcgagttgtagcagtacccaaaccttcaggtcataccgccacttgaaaaccacaaccatctttcaaaaccctgtgttgtgcgtcaagttctcccactatgaaatcctctaagccaccccaacccttcgcatctaggatgacaccatgtcaagatccacacctaggatgatgatgttttatgcatcaacttcaagatcctcattatatttgctaattatttttaaaataaaaagtccatttattacgtgaaaccctaactcagacttggagaacaagtggcattacaagtggttggttgacatgtaaagttaacagtcacatcaacacctaatggaaccc

SEQ ID NO: 89877 - DNA, 198 bp, Glycine max
cagatttatttgagtacaagagtagagtgtgaaatgctgacaagaggaagaggaattccccttctggtgtagaaactatcattctttggttttaatctaatttattgatagggtttatttgtaatggctggataaacaccctcgttggggatttctaatgaattaggggtgtaaatacctaatatctaattgactgtg

SEQ ID NO: 89878 - DNA, 338 bp, Glycine max
cagctggtctcatagaggtccaggaaagacatgcggccgaaaaacttgttccgcccggagtaccacagtcaccggtttatgaagcgtggacaccaacagcgcttcgaagccatcaagggatggtcgtttcttcgggagcgacgcgtccagcttagggacgacgaatatactgattttcaggaggaaataaggcgccggcggtgggcaccactggttactcctatggccaagtttgatccagaaataagccttgaattttatgccaatgcttggccaacaaaagaaggcgtgcgtgacatgagatcctgggttaagggccagtggatcccgttcgatgc

SEQ ID NO: 89879 - DNA, 351 bp, Glycine max
  unsure (1)..(351): unsure at all n locations
attttggaaaggtttaccaaggggactcttcttttaaaaccaaaattgcataccaccttttcttataaataccaacattaatggaaatttaaaaccagcctaatcccctattttcttaccaacgttcacttgcacaagaaattctttttaactaaaaaaaatgcacccatatacaatcaaggcagcttcgtcacctaaaatatttacctgtactttcaaagtgatttgttacttacatcacacacatnctcttggctaaatttacatacatgcatactcaaagcattttggggtaccaaaaattgcacatgtgcacatcttggtatttctaatacctatacatacacaaac

SEQ ID NO: 89880 - DNA, 133 bp, Glycine max
cttttttattacaatttttgtagcgaatattcaggccgaaaaacttcaattcctacaattgtatatcgggccttatcttatatccgccaaccgaaaacccttaattgttttcgggggggaagtggtggctggc

SEQ ID NO: 89881 - DNA, 256 bp, Glycine max
ttcagaatcagaaaagaatgaggccaggtttcagaagagaaatcctgaagacttcacagggaagtattggaaagacttttcaaaaacaaacatagcacatttttttttcaagagtttttcttaaaattttctaagttaccagaatttttactctttggtaatcgattaccaagttccagtaatcgattaccagttggcaaattttgtttttaaaagctttcaactgaatttacaacgttccaattatatttcaaat

SEQ ID NO: 89882 - DNA, 192 bp, Glycine max
ataattggaaaacaaaaagctctgagcaaatctaacgacaaaacgttttctcggatgtctgattcagtccccgaatatatcgagccgctcgtaattgaaaacggaagctccgagaaaattaaaatgacaataactttttactcggatgtccgatagtgtcccgtagtatatcgtgaagctcgacattgaaaa

SEQ ID NO: 89883 - DNA, 218 bp, Glycine max
acaaaaacaaaagctgaaagaaaacacacaagcaaagtttgaggtgctttatatggcagcaatagtgagctcaagctccaaaaaggtgaaaggaatcatcacgggtcaaaggcatgatcttgaaagacgagctaaaggcttgccttatgtcgaaaagaaaattgtcccaacagttaatcgagactgaagggaatatgtgggccatcatcgatgagtgc

SEQ ID NO: 89884 - DNA, 274 bp, Glycine max
tttgaaccccacatgggcttggggaaaaataacaaccacatggacaacttaatggatgtcaaagaaaacccggggaagttcgggctaggatataagcccacacgggctgacttgaggagaagtgtcatagaaaggaggagaagggtcgcaggcctgcaagtaaggccacaagcgggggaggtccctccttgccatatcagtaaaaagtccgtgagtgtgggcttcagacttgaagaacaagtcgccgtgatatatgaagaggtccctcaagaat

SEQ ID NO: 89885 - DNA, 393 bp, Glycine max
ttgaataatgtcaaccaacgttttcacctcccactttatatacttttagctaaactaatactttatgttagtatctttattatattttaaacttgttataattaccatccaaatcatttgtatctatttcaataatttaagctatatccacaatacaaatcatctatttcatataaaattaaataaattaaaatacatttcccattttcatgaatttatagggacatatattgactacattatgtccttttaaaagcttgaagctagaacaataataaatttccaattatttttaacaaaggtgttatcatagtgcacatgaacaccaaaactcacttaatcaaaatttacaaggatctcacttaattttaaaatgccaagactaaagcaaat

SEQ ID NO: 89886 - DNA, 143 bp, Glycine max
gtttttccttttgttaagggctttgtgtctttggttttgaaattataatacaaggatctttcttcatctgttcctacgtctctacccattctcattcatttgcatggttacttctttatttccgaaatggcagatccgatgac

SEQ ID NO: 89887 - DNA, 314 bp, Glycine max
tttggtgcataaaatactctggtggcttttgtgttgaatccttagtataaaaccacttttccttggacggaacaagtttttcataacagattttgtactctaacttgatttatttatactttagaagtgtccgatcgtatgagaatatctcctgcaaaatgaatctcgcccacctgaaaataaatgagagtgtgaaatattattcttttatggtgtgtcagaacatgattatgtcttattttcgtctgatactgtagacgcattatgtatgtacaacatgatctgatttcacattgaacacaacttttaacttt

SEQ ID NO: 89888 - DNA, 316 bp, Glycine max
ttttattggtgaccacaaaagggtacctggaaatatttcgcgggggtcaagaaaaccttggggacctcaggggggtgctattggccaaaacccaactttgacaatccccacccaaccccggcctaatcggtcaatgagaacctgtgatgtacctaagcaagcgagctcctggcagtcaacagataaaaggaacaaagaccacaaagcaaggaggcttgtggtggctggccaactgtgaactttgattgatatgtgggttatggcctctagtaatcaattaccaagggtgggtaatcgattacaaggcttaaaaatg

SEQ ID NO: 89889 - DNA, 317 bp, Glycine max
aacccgccttatggattgtatatttttggaagtgcccaagagggcgctaattgctatatatcacccccattttttacttaaaaccaccacatgctctttatatggagattctctttccggaacgcgtatgaaactttaccaaattcataacaatgctaaggtttctatccgtaatggtacgaaaccttacggattacgtaaacataccttttttccttccggaacgttacagaactttaccgattgcgcactaacacttccttttaatttccgggctatcacggaactttacgaaatgggctacaaagcttcttttg

SEQ ID NO: 89890 - DNA, 373 bp, Glycine max
  unsure (1)..(373): unsure at all n locations
ntccctctggttgctctgctagggtttccaagcattagagagtatgtgaagggattataatctcaatttcactatctttgtgcgagaggaatttctctctctacaaacattattttgcaaatcccaacaataggaatgtgcaaaaatgagttttgaaggtggtgtccaaatttcaggatgattcaatggttaacaagtctaagatcatagttttattgcgatagatttgcgtgtatgcggtaaaaagagagagtttttggagatgaagaagggagaacaattttgaaagagagctctattttactccctattgaaataaataaacaaaacatcctttntattttctaaaacatatttatttatttaccttaaa

SEQ ID NO: 89891 - DNA, 369 bp, Glycine max
  unsure (1)..(369): unsure at all n locations
ngcttcatccacaatatatacaatcaatcaaatttttataccaagaagtctaactcccccaaaaataaaaagaagtaaacctaacagtcttgacctagataccccccacccacaaaaaagtatatacgtcttaatcaaaggagtcgtctgctatgatgaagagtcgtcactattcgctatccctttagggtcgctctcctctgtagagtctgcctcagatgctgacataaaatcctctggagaatcaacatcagggagtgggtcctcatcatcctctggtaagtcagggacatccataacaggttcaggaggtaactcctctgggtcctcttcaagatcctcttcagaggatgacacctctatcactta

SEQ ID NO: 89892 - DNA, 382 bp, Glycine max
aaaactaagctaatgatcttgtttatgttcgtataacttgaggttcaacaattgtattattatattgattatgctctgattggttaccaattttgtctgaattttttttattggtgatatatgagcattttgatcaatttatgaatcggcttatgcaacaaaattatgacccaatcaattcggaaacccctgatgaccatattaattgggtgttggaggagccaccatcattcttaacttgtgaagagatggaggctttacataatgatcttgcaaacatgttcattcaatcaacttcatatgatattggtatgtttcttaataacattaatatatattagggatcacttatgtacttatgttaaaggctaatttgaatcta

SEQ ID NO: 89893 - DNA, 212 bp, Glycine max
tgacaacaaatgccattttacgggacacgaagagccccgaaagatcatccctttcttactttgcaacattttggcaacacggtgcccccatgtatgcatttaagaaggtgatacggaccttccgacttcccgcaatatagacataaatgcgtaaaagtgcatggttgatagcacaaaagaggaacatacaagcatggaaatattatcaaaca

SEQ ID NO: 89894 - DNA, 374 bp, Glycine max
  unsure (1)..(374): unsure at all n locations
cctntgaaacgtgctgtttttcaccttctcgctaagccaatctatcttcttaacgagcgtccgttgatgtgccatcattttcttctattttctaaaccctttttgcaccattttaattattgattggtcttaattgtcaattaattaagcaattttattatttgggctcatttagctaatttgatgttttaatcaattcaggaataatgaaacatgggcttaatccggattttggttgtggacttgaagagggcaaataaagcagcgcttaccttagttaatttctaattaggaaatttcgcaattttattttatgttgttcagtgtttatttcgttttgggccagaatattgtaatatggcccagtgactttg

SEQ ID NO: 89895 - DNA, 343 bp, Glycine max
agcttatacttgctctatgcaataaaaaaactatgctttagcatgataataaaaactcaaaaatagaaaattatatcaatcttggcctcgtcttgtaagcatttcaagaacgaaaaagtaatttattaacaaaaaagtgaatgttccatatacccgtcttgctggaaaaacatcattcttgtaacccttaaagtcatagtttggaatatctactgcttggccacgcttcaacttgtccatgacacgtagcaattgctcagtatcaaaagcttctgattatatcaacaacatgcattaggaataaagtagctatagcagtctaagaaccatcattcatatatat

SEQ ID NO: 89896 - DNA, 360 bp, Glycine max
tctatacagagtagtacaaattttgggcaaatcctcctcactttatagtgaaatgtaggtggggaaagagaaaactaagcataacaaataggatttgaaagcacaagccttaagtataataatggagctttaaatacttaataactggccaatgcccactccaatccatttgtaggtcaagcagacttatccaagtcccaccattcagacaatagaaagcgacgtatatatacctgccatgttattctcttagattctggccccaatacattaacaaatcattctcctatgaacaatgaacaatgaacaagagaattagaacctttacataagtgtaacttcttttcatgtttcaagttt

SEQ ID NO: 89897 - DNA, 276 bp, Glycine max
atggcacaaccttattattattccccacctttaatttggaagggaaaataatcaccccccaacctcttgtgccacaaaaggaccatggcttaaaccatctgattccaaattcatgatgctcactcacccgctcccatactgctctgaatatcccacagaaaatacctggctcattgcttccattactataacaacataacagcacgaaatacatatatgtcctcagacacaaaagaagacgatttagacactcgattataatgtatgtgtctaaat

SEQ ID NO: 89898 - DNA, 380 bp, Glycine max
aatattccattcgccaattcacaatgacagaaatgaaatattttaatggtgaaacgacacggacctatatcttccttatatcatgagggactgtcatttctcggaaaaccttgataactttataagaagtcttattcatatgaaccatgtacaggaataaacatgttattggtaacatcaagaaccaaaaatgtgtcaacatatggtccaaaatttgccggctgagttagccaaaaaaaaaagtacgaagttgacggcttttttacaaaaaagggacaaaaatttacattttttttatcggatgtatgttttaaaaaaatacctaagagtggataagtcataacaggtgagttagaagtcgtaacatttggtatcactcc

SEQ ID NO: 89899 - DNA, 345 bp, Glycine max
taattcatgtaaaatggagtttgtaaccttattggcacgaacatattcgaaaagtaacatctgatacatgaattttgaatctgaaaggtttgttcacataaaggtgttgcttctcagctaacttggtatgagagtaaagaagattagattcatcaaattggataaccttccttttaatagcctttttaacttgtgttgatatgcattacacatttatattatttataacttatatgttgtctaaccaatatagaaaccaagcctatatagcctatagcctatattgctttaaaaatgggaccaaagcaatggacattgtattctttcagtagatatgtagtaact

SEQ ID NO: 89900 - DNA, 234 bp, Glycine max
  unsure (1)..(234): unsure at all n locations
acgctcaaggtcaaattttatggtcatgtgatgctagggctcaagattcattccctctattttaaatcaacccaatgtttccaaaatatgttcttttatcaatttgtgcattcatcctagtccatttcgggcgtccggggaaatttcacagcattcacccttcaggtgtagacacattnttcaaaaattggttatgatcaattgaattttttcaaagaaaagttggaaatcatc

SEQ ID NO: 89901 - DNA, 352 bp, Glycine max
acactattttttgcaacttcatgcccactacaatagtatcttttgcgtactttctttgatttgaacttttgattatttgctcatagcaccttaccaacaagttgttggcaaaaaagaaaaagatgtgttatctatatctactatgatccttgtatagagggaggaagggtgatggcatccatatggtaaaaactattctatagataacttttcatcttccactttttgctgctaattgcatgttcttttccccgtgttattcctgtgcttcaaatttgggtgatacttttggtatccatgttataattgaatatatttttatttgacatcttgggggaaattactttaactt

SEQ ID NO: 89902 - DNA, 219 bp, Glycine max
gacgcgtgctgcctaaggacgacaaagtttactgatttccaggaggatataaggcgccgacgggggacatcactggttacccccatggccaagatcgaaccagaaatagtccctgagttttatgccaatgcattgccaacacaagagggcgtgcgtgacatgaagtcctgggtaaggggtcagtggatcccgcttgatgtcgatgctatcggccagctc

SEQ ID NO: 89903 - DNA, 164 bp, Glycine max
ccccaacataaactcgggccatcattactgctgcatcggacaggcaagcttgcccagagaaggagtccacggaggaaatgcttaccacctcaaaagactggaaagcggtactcctctgtggcctccacataaggcatagaggatgggcagctcaccaagatgtc

SEQ ID NO: 89904 - DNA, 396 bp, Glycine max
ctttgatgatatggtctttaccgacaaaaggatcaaagtgagtctaataagaggcaaatctgttcatcatactttgataaatgccaaaaaaactagggcaaatgaaaagggtgaggaggaaagagaagcccgtgctgtgactgccattccaatatagccaagtttcccaccaacccaacaatgtcattactcagccaataacaaaccttctccttacccaccgcccagttatccacaaagtccatccctaaaatcaaccacaaagcctacctaccacactttcaatgacaaacaccacctttagcgtaaaccaaaacaccaaccaagaaatgaattttgcagcgagaaagccttagaattcaccccaattccagtgtcctatgctggcttgctcct

SEQ ID NO: 89905 - DNA, 295 bp, Glycine max
ataccaatatcctttcttctaatcttcccacgaatgatacaaaataataaatgggtcttaaggtaactatataggaatcaacaattaatgttatccttctttttataactacgtattattttaattgtttatgttaaaatccatcaaaattgaagaatttatatcaaatgattcttattttccaatcatttaaatatatatattatgtcaattttgatgtatatcgattaagaattaaatcatcttgggttaatataagatctataaatatcatctatataataagaatttttta

SEQ ID NO: 89906 - DNA, 307 bp, Glycine max
  unsure (1)..(307): unsure at all n locations
agcttttttttgatgaatcaagttgattccagttgttttgatgatggacaaaatgatggccaaaagcccaagaaaatgatttcaagattggagtcacttatttcaaagaaatcagagaagttgatttcaagattcaagagaagatgaattcaagattcacgagaagaaatccagaagacttcactaggggagtattgaaaagatttttcanagaacaaacatagcacagttttgtttttcaaaagagtttttctcaaaattttctaagttaccagagtttttactctttggtaatcgattactagtt

SEQ ID NO: 89907 - DNA, 293 bp, Glycine max
acatggctcccgatcggaaccagcttcagggtatgacttaacgaaaagctgagtccattaaggaatatgccgcaagatggggagatctcgcagcccaagtcacaccgcccatgacggagagggagatgatcacaattatggtagatacgttacccacgttctactatgaaaagctgataggctacatgccagctaacattgcggatctcgtcttcaccggagaaaagattgaatccggactacgaaaaggcaagttcgaatatgctgccaatatggcccccaacaacaacaaa

SEQ ID NO: 89908 - DNA, 374 bp, Glycine max
tctgttttcaatttcgagcgtctcgatatattacgggactctatctgacatccgagtcaaaagttattgcggtttgaatttgatgtgagactccgttttcaatttgtagcgtctgaatatattatgggactcaatcagacatctgacttgaaagtttttgcggttttaatttctaggggcatctgttctgaatttcgaatgtctcgatacattatgggactcaatcggacatccgagtaaaaagttattgtcgtttgaatttgctacgagattctgttttaaaattggagcatctcgatgtattacgggactcaattggacatacgaataaaatggtattggttgttgaatttgcccagagcttccgttttcaa

SEQ ID NO: 89909 - DNA, 343 bp, Glycine max
  unsure (1)..(343): unsure at all n locations
agcttgtccttggtttagacatgatttatacattatttangacttgtaggatccaatttgggcaattttggatgagggcaagggtgatttccaaaatctgcacttatatgcaaaattttgctggtaaaaggtgcagcataattttgtgtttgtgcaaaaaatgcttatgcatggctggttgtggaaaagggtgtacatattgggttctggacgtttcctagtagatcccaacggttaaaatataaatttatgtactagggacctccagtaaaattttcgagtcgatccaacggtgaacgaattggaacgaagagaatgttactgggatatttgagtaaaaaaa

SEQ ID NO: 89910 - DNA, 264 bp, Glycine max
aaacaatttgaaaacagctttttaaaggtttgatttgaattttgatcatggaatcgattacccgatgtttgtaattgattaccaacaacggaactttagaaaacactttgaaaagtcatgaccctttaaaatataactggataatcgattaccagaaaacctgttatcgattaccaaggaagaatttcagaaaaaactttttgaaaagacacatctcttcaaaccattttgaaaaggcacgaagggactatatatgtgtgtggc

SEQ ID NO: 89911 - DNA, 260 bp, Glycine max
  unsure (1)..(260): unsure at all n locations
ggggtcaagaaaaccttgggacgttcagtggggggctattggcccaaaaccaacttgaaccatccccaccccaccccggcatagtccgtcaatgagaacctgtgatgtacctaagcangcgagctccttgcagtcaacagaataaaggaaaacaagaccacaaagccaggaggcttgtggtggcttgccagctgtgaattttgtgtaatatgtggattgtggcctctggtaatcgattaccaaaggtgagtaatcgatta

SEQ ID NO: 89912 - DNA, 410 bp, Glycine max
  unsure (1)..(410): unsure at all n locations
agaaaaaaaaatgaacctgaatcgtgacaccctaacnacccttggccaatctgactcccatatacctagcccagggtgttattggaaccctacctctcgaaagcaaaagaaatgtggtgagggaaatatttccaatccaaacacgaagcaagataggaaagaaagaaaatgttccatcaaacggaaaaaaaaaagaatgggtatccccatccaagagtgggagaaagcaaaaagaaaaagaaaaaaaatcccactccacgaatgggaaaaagaaaaaagagaacaagaaagggataaatgttcccgatcaaaagaaaataatatgcatataggtctttggaccggacaatatctgaacaatacagaaattgtcccaaatgaataaaaagaaggaaagggaaccatgacct

SEQ ID NO: 89913 - DNA, 195 bp, Glycine max
  unsure (1)..(195): unsure at all n locations
tttaaaatggggtttaacatgtttcggtgtatatgggttgtgacctgtgacatatcatgcgtcttttaaattttgtttttctcaggtgttgaaantcttattattctttaattatgtgcagaatctctctttaaattgctttggatgtcaacaaagcagtatgtttcttttacatgacactgaatccaacgagaa

SEQ ID NO: 89914 - DNA, 294 bp, Glycine max
  unsure (1)..(294): unsure at all n locations
tgtgcttggctgcactaatattttgtgtatctttggaaccaatggcttggagtaatattaattatatccctaaaaatttattcaccttacttgttacacttataataatctactaatttcttttctctttctttcctttttagggtatcatccatcatatttattatgttcccttnttttcttcctatatctctctctctctagctagcaaatatctctggactttttttatttctctctaggtcttattattctctccattattaattacctatttttctatcaatttttatc

SEQ ID NO: 89915 - DNA, 177 bp, Glycine max
ggtggttgttctgaattaaaaaaattacaaaaaggtccttcagtttggtggttgttctctctttggtgattcactcaatttggagtgcttcttagtccaatagctcttaaggtggttggccccttgcttcttgactcaaattcttcaagggatggcaccaatcctcctttccaattc

SEQ ID NO: 89916 - DNA, 395 bp, Glycine max
  unsure (1)..(395): unsure at all n locations
tgacacttatactccgcttttatccatgctcatcttggtggtgaagctccttcttccattgcttattccctagcggttgacgcctcccttcacctttttttcctttgtcttcccgttgcatcttcctgggggaaaatcaccattaaagaccttattgaagctcaaaatccaccttcatagaagcccacaagcatactgggactaagtctatttggtgttctattcccctaggagaggtaactcacgggatatctctttgggaaatacatcgccaaattcctgtaagagttcttgaacctttangggaatggtctcaagtgggggaattgtggcagtgctaagggaagtctcccttgagagaaggtagaaagattgcttgagaagaagagctctct

SEQ ID NO: 89917 - DNA, 319 bp, Glycine max
  unsure (1)..(319): unsure at all n locations
tgtgacttttaggtaacaagattcactgggagactcattacttgaaatacaccctacagccactaagttggcaattcagctttcacaagctggctgcaaagtactatggacctttcaaagtagtaaaaagagtgggcaaagtagcatacaaactngagttacctgctggaacaagaatacatgatgtatttcatgtttcgctgctaaaagaacatcatggtcctgacatagcatcacaagaactaccactgtacaatgaggagggtgaatttgtaccacaaccactagtagttctagatagaagaatgaagaaaaaggg

SEQ ID NO: 89918 - DNA, 373 bp, Glycine max
  unsure (1)..(373): unsure at all n locations
atatggttttaccgaagtcagaacttgcttcacttgtcttgaatgnttcttaggctgatgggaaatctaaatctctggcaatgttacctttttagcgatatttcgtgaactccccaagatccctaagttgtcttaaaaaattgtttgaagctttcaaatgttggtttaaaaaagtcggaacttgtttttctaggctgatggatattccaggtctttctcaagcaatattgctcgacttcaccaacatccctaagttgtatttcaaactattgtcttgtttagtggtactcaagttttgtttttgtcgggaataaattttcttgcaacaagctaaagcttaataagcttcagcttgaggggagtgttgagaatc

SEQ ID NO: 89919 - DNA, 272 bp, Glycine max
  unsure (1)..(272): unsure at all n locations
ttttttgatccaaaaaaaaaattaccctaaaggagaaagaaaaaaaattgcaactttccccactttgaatatgcttgtctcagggtgggcaatttgttaaaccagacataacaaatttggaaaatcatgtntttattcataagcctatcacaaataattttaacgtgttatttgactattgtagtggtttgatttgcacaaaaatattatgaagaaataacaaaagttaggatgtgagttggagacacacaacacttattttcctcctattg

SEQ ID NO: 89920 - DNA, 341 bp, Glycine max
cttaactagaatgttggattgattctttcttggacactaaagtaccatatttaggagaatcttacctttagtaaaccatacagtattaagagggttagtccggctcacaaatctaaatattactaataaattataaggagttagtttttctattttcaaaagttaaataatccaattgcttaattcaacacaaattttcaactaaaattatattttaatacaaaattaaccaagactttgttatgtaagaaaattaaggaagagggatggggtttcgatctcaaagactaagaaaacatttatagaagtatttatatttaccttagtccaactcagcatca

SEQ ID NO: 89921 - DNA, 361 bp, Glycine max
ttgaatactcagcttttcttgcgagcttatcaatgtctggcccattgtctattatgtgggggcctcttctatattggtatgaatgcactccttagggttgtcgcagaacgtttaggtgggggacctttggtcgaagacagatccctttggtggaaaacaaacctatgggtcaataacagaggggagtaaaccattgtacgccggtaaaaatggcgcgaaaggcttgcggataagttttccggaagacccgtctagggttcttccggaaggtcccgaagaacattttcccgaaagtttcccgaagaagtgttctttccgaagtaaccaaacgtttttttggagaacccttcttccggaagac

SEQ ID NO: 89922 - DNA, 282 bp, Glycine max
caaaagccagagatgattcagatgagtcacttgtttcagaatcagaaagttgattcagattcagagagatgattcagattcagagaagaatcaggagacttcctagggaagtattgaaaaagatttttcaaaaaaaccaaacattagcacaagtttttgtttttcaaaagagtttttctcaaaattttctaagttaccagagtttttactctttggtaatcgattactagtttcctgtaattgattaccaatggcaaagtttgatttcaaaagttttcaact

SEQ ID NO: 89923 - DNA, 372 bp, Glycine max
actcaagcttaacatatgaccacttcacggttgtggatactacttacatgttctttttggggcctatttcatgttgaagcccttggaagaaagaaggttgccctattttgtgtggatgaattctccagatttacctgggtcaactttataaagaaaaataaacccctttgaagtattcaagaagttggtcttagacttccaagagaaaaaaacttggtcatcaagagaattaggagtgaccattggcaaaagtttgaaaacggcaagtttactgaattctgcacatctgaaggcatcactcatgagttctcttcagccatcacaccacaacaaaatggcatagttgaaaggaaaaaacagactttgcaagaa

SEQ ID NO: 89924 - DNA, 388 bp, Glycine max
cactattaatactcaccttgacttatcacattaaagatgttttgtctgtctaacaaattgttgacacttgaagtgttagttattcatgtgacacacatgagaagaaaaacctgatctgtttttgaaagaatgttattgcgaatggggagttttcaagtttacatatattcttgctcccacggcattcgacatgtgcatgtgtagaaatcatttcgtaccagtttttagataacatgttctaaatccaaagctttattcaagcctattgtgacaactaaaattgtccttactgagagaaaacctttaacaccctaaaaattacaactcatagtataaaaagttctatgttgtgtgatctttaaaaatatgatttatattaaaaattaat

SEQ ID NO: 89925 - DNA, 92 bp, Glycine max
acaagatcagaaaatgtgaattttccatctcttccccaaaccatgctaatagatagatcacttctttcagtgatcttggactcttcatcaag

SEQ ID NO: 89926 - DNA, 375 bp, Glycine max
ttaaaagtttaaaatagtgaagcaagtcaagcaaccaattcttgactcagactttaccctttactgatcaatttcagaagatgctaatgagatcactccagcaagtgcttcaagtgctaatcctgtgaaatgcattgaaaagtttacagtataattatagataaacagcaatatttccaagaatttcataattctagtttcaactttcaatgcagaaaacaaaaaatcttaacacattgccatataaatcattaccagcagcataggtactagactctggattattagaactataacgccaccttccatcactttggctcagagcctgccaattaatgcaggacatgaaatcacattgcacatgacagttcaaat

SEQ ID NO: 89927 - DNA, 356 bp, Glycine max
  unsure (1)..(356): unsure at all n locations
agctttattctacacctgaaaaagaggatgagttttttgcataaaagagaattcttcctgatcatgagggcgctaacacaaattttcatgcagggggaccttcttttaatagttctgacttgcagcagccctttattcctctttccttttcaccctaaagcattcccaacaaaaagaaggaagaagggggataagagatcttggagaccttcaggaaagtagaagtgaacataccactactagatgccctcagaaaattccaagatatgccaagtttctaaaggagatatgcacccacaaaaggaagctcanaggcaatggaagggataacatgggcagaaatgtgtcagcattga

SEQ ID NO: 89928 - DNA, 374 bp, Glycine max
  unsure (1)..(374): unsure at all n locations
ntctttggaccttgaacaagccatcaactcctctttcagaactatgctatgtgctcgcgactggtccctttcttcccttcgcaacttgagttcactattgctacaccataaagctccgcgaaatttgttccggccatactcttccttgcgagccctcttggtctctcgttcaaaggctcttgcggtaatagcattctcttctcgtaacccggcacactccttccgaacgtgtgtagcaaccaacttgaacttctccttggcgagttttgcctttcctaactcgctcttgagagcttggacttcctcgtcctcttccggtgctttacaattctcttcgctgacgacttttaacttggcgagccaatctaaacctc

SEQ ID NO: 89929 - DNA, 332 bp, Glycine max
caactgtatttggaaaacgaattattttttccagagaaggattctaattccattaagactaaaaagggctcttaaatatgaagggaattgcatttataggtaccataacgttatcccacaacattacatttaaattgccttcataagaaatgactccctgggtatacgattgcccgaggatgggaaacgattaccagtggcccataacaattcacaacagccattaagatttaaagtaaaaatatgccaggtgtaatcaattacacatatattgtaaatcattacccaccaggtactgaacgttttaattcaaatatctaagccttgctatt

SEQ ID NO: 89930 - DNA, 323 bp, Glycine max
  unsure (1)..(323): unsure at all n locations
agcttagcaagatgaagtagctttttatcctcttctcttggccacccaatctatacacaaaaagcatcaaaatgaaaaatcactccttagaaaaatatcaccaccattaataaccatagtgggacctactccctatcaataacaatcttaaaaaaagagaggctcttataccccaaagaaagactttgttaattcaacgattacctaactcacaggaatagacagggtttctggngttaggagcaacaacactngaagactgagcattagatgacccttcactcttcttggctcttggtgtctctgcatcaccacccctgata

SEQ ID NO: 89931 - DNA, 53 bp, Glycine max
  unsure (1)..(53): unsure at all n locations
gctntgttctaatattcataacctccacgagacaacacgtgggtggggggggg

SEQ ID NO: 89932 - DNA, 320 bp, Glycine max
ttttgggatccattccagggggtttttttttgggaaccttcatggatgggatgaaccttggtggttggtaatacctaagaatggcctgggaaaactcctgcccaatcattggggacacattggaatcctcgtggtcccctaccccccagtgtccgaacatgacgactttcgagaaggccgacagctttagcacattctacatattgggaagcaaactcaatacactcttcagcaatatacctttccacaatcgaaagcttgggtcggtgttgattcttcgtatacccctttaacactttcatgtaacgttcaattggata

SEQ ID NO: 89933 - DNA, 232 bp, Glycine max
tgttttgatttcttggaaatgttgtttttcgcgtgtgggaatgatctgtatcgttggtatatgatgtgcatttttggattggaaagatttggaagcccttttgaaactatttttgttgaatttcaaaaatttgcataaccaatcacgcttaagcacagaaaaatcttgcttaaacatgttagggtatagagaagaaccttgcctcttaacaaaatttcgctttattgagaat

SEQ ID NO: 89934 - DNA, 340 bp, Glycine max
  unsure (1)..(340): unsure at all n locations
ttcaaaaccaaaatcataatgggaccccccatttgggttccaatggcccttttcaaaagcaaaatcaaattggaaccacccctttgggttccattggcccctctcaatattcaaaatcaaaaattggaacatgggcttttggtttccaattgccacccctcaataagcaaaatcaaaaatttggaccacccccctatgggtttcaattactcatgattgaaaaaatgtgatgtttgggatatatgctatattgatatatgcttatgatgtaaccttacacaaatagaaattgcaaaaattaaaagataaatctaggtattngctgatgttgaaaacctct

SEQ ID NO: 89935 - DNA, 331 bp, Glycine max
acttggagttatggtttctggcctggacaggatattttttggtggaccacttgatgatctatgatgagtcctagacaattttggtttcagaaaaacctttcttggtatggatgcacctctctttatttttatccgttttgggtgatattgtgcacaactttgtgctccttctaaaatggattgttatttatgatgaaaaaatagtctattagacctgaatgttactggcaaagttgcgcctagggctaatttgacatatgatcagattcactctagagacgaggataatattatttttctttaaatagaacttcgatgtatgagcacatgc

SEQ ID NO: 89936 - DNA, 385 bp, Glycine max
tgcttatagagctttgtaggggttgtaaatgatttaattgattaaataagtagaattatttataattcttaaatggaaagagattaaaatagtacatatttattgaaataacacactcgacaaatagtacatagaatttattaatgaaaaaataattattttattcaaatataaaatttcaaaaaaatgcatttgactattttatcaaaataagaaattttgaaaataaagaaattcaatttctttatccaaatacaaaattctgaaaataatgaaatttaatttgtttatccaaacatagaattttgaaaatgaaagaatttcacatgaagcatttgaaatttttagaattctaaaattagaattttaaattgcctcatccaaa

SEQ ID NO: 89937 - DNA, 395 bp, Glycine max
  unsure (1)..(395): unsure at all n locations
gtgacacctantttactcacgcttgagaagtttttttntcctgctattgtggccacttacatttatctcagttgtggtttttcaggaaggaaacttttgtaaaatctttggtctttgatttcaatgggtcaaggccaattaatatcaagaaaaggagactttttctcttccagaattttaatccccattttatgtacaatggttttcttaaggtatgataaaaaaggactggatcaaccaagtggacttagacctccacaagaattatgattccatacatacaaaaattaccaccatatgcatcttgagtatatgtggccatgcgaatttgaggtttaattttaaaatgttatatttttgtccaaatattgtagatgtatatggtgattattgca

SEQ ID NO: 89938 - DNA, 353 bp, Glycine max
  unsure (1)..(353): unsure at all n locations
tttaaataacaacaacgagattttttaaaatcacttccaattctttctttgtgctgctaacatattggcagactctttttattgtttgccatgtttaataatggggatgatatgaaactagagagaatacaaacatgaaattgattcatatgagattagaaagcttcaggttcatagaaagtgatattgagagagaaggtaaagaaaatgagacaaaaatcagagtgaacttatagatttgagatctacaaangtattttcactatgttatttgaaaagttattcacacattgaatagcaaataattagatctctgtctaacccaccaattngccagtatcatcaactaaatt

SEQ ID NO: 89939 - DNA, 368 bp, Glycine max
  unsure (1)..(368): unsure at all n locations
ccacatgagagaatatgaaatttttgtactgtngacatnctacttaaatgaatctaaaatctttaagggtctcttttgagtgaaatcaaaagttcatagagtactattctgagagaccaaattctcccattcccatgtagaccagcagaatctggctgaataatgattttgaacttgcaatctccagttgaaggatctttgtcagtgacaacagaaagaccggggaatttgcatgcactgtcaatctggtcattcacttggaagtaactattgaatgcataagaaagattaccacgagcatctaaaccaccacatgaagcttgatatccaagacttgtgcaatctgcattttgacaagcataagacac

SEQ ID NO: 89940 - DNA, 300 bp, Glycine max
ttggccttaatatcttttttgggccaagggggccaattcaacactccctttttttgggccctactgggcccttcaacaatggtactgaaaaaatcaaactttagctacccaacaaagacccctaacatctatcaaactgcttgttatgaaagttgctaagatgtttattgatcacatcattaataaaatataatatcaaatagcttaataaattttgaaattcaaaattatcacctcaatcaataagttatttgttttgccttttttatttcggattatccccttttcaaatgcctcttc

SEQ ID NO: 89941 - DNA, 379 bp, Glycine max
ttctaatcctgagggtttatggtgcttccttgtggatttcaatatcattataagccaggattttgaacaggctcatcttaaaggagtgtgggcacatataatggctctggtttcaatgattggatatcagacatggaaattcacgacattaacaactttggtagcagatttacttggtgtaggccaaatggatatgtgaggagtaggctcgatagatgcttggtttcagaacagtggctacttaaatggcctgattcttcacaacaagtactccacatggattattcttatcactgtccaattattttgaaaacagatctggtggattggggccctaagccatttagggtgatggactgttggcttaaacataaagagt

SEQ ID NO: 89942 - DNA, 292 bp, Glycine max
  unsure (1)..(292): unsure at all n locations
aactttttacaactcattcccccatttttctattttctccccaatcttcatcccctgttcccgtctgggcttaccttctctaccacaaatacatggctgttccaatggcgatgatcatggtagggctaacacttaatccatcccaggctccactcataagcaggctgaacttgaagacttgctttagagctctcatctttgtgaaatgttcctctttttcttcaatcctattattgattttcatgaatatgattatgcctangattgaaaatggatcagggtatggattcct

SEQ ID NO: 89943 - DNA, 234 bp, Glycine max
tgctattgcccaaaaccatgcttgttccattccgacccaccccgggcattattggtcagtgagaacctgtgatgtacctaaactagcgagctcctggcaagtctcagataaaaggaacatagacctcaaagcatatacgcttgtggtggctggccagctgagaaatttggtgatatgaggattatggcctctggggatctattaccaagggtgggtaatctaatacaaagctta

SEQ ID NO: 89944 - DNA, 266 bp, Glycine max
ttatcttgttcatgaatttaaggacattatcttaccaaccttccaatttttgacgtgagtctctctctttgaactccttatttaattgtctaaagcgcagcgaaaaaatccctaattacttaaagtggtgagaaaaacaaccaagtacttcttttaatcaaacattatttacaagttcttttgttcgaaacgcttagtattccgaaatcacattgattttggaaagacccacttaactcatcccctgcaatccatgatttttttca

SEQ ID NO: 89945 - DNA, 251 bp, Glycine max
  unsure (1)..(251): unsure at all n locations
tcaaaaaatctttggtgtacaagcctgagagaactcttgggagaaccccccagcaaacctacttaggtgtagctggatcattaaatggcttatgaactctatacttgaaagaaggattttagtgccataccttgaaaccggaaactttagcatgatctgtttgttatattattaactgtggatgcccctagcttagtgcatgagtangactaaaacaagcacctctcccaccaaatgttttcagatttaaa

SEQ ID NO: 89946 - DNA, 318 bp, Glycine max
gctttttttctgcatgtcatattcttaatttttgccctataaaattttataacccctatgagctatggaaaaagaaaccaacctgaatatcttaaagtggggagggcttgcaaggaaacaccctattattagaaaaagaatatggaccaaaaccgctgatgagctttggtgatattctatgcataatatactatacattttggtagtcattcgaagtgcgaaaatttctaaaggactatatggaatctataatgctctttcttaaaaatattttcctttgaaaataatagtctaaatttgctgtatacttcttgtcta

SEQ ID NO: 89947 - DNA, 368 bp, Glycine max
  unsure (1)..(368): unsure at all n locations
gacagcaacctcgtgcctcttatgcacgtgggtggggttaagacngggnnnnngatgttcaccaaagcntttaatggggttatggatggttatgtgaagtgtgggcttgtgggtgaggctagaagggtgttcgaggagattgaagagcctattgttgtgtcttggactgtggtgttggaaggtgtggttaaatgtgagggtgtggagagtgggaaagtagtgtttgatgaaatgcctgagagaaatgaagttgcttggactgtattaataaaagggtatgttggaagtgggtttacaaaggaagcttttttgcttcttacagagatggtttttggtaaccaacagggattgagtatggtagaaagggc

SEQ ID NO: 89948 - DNA, 362 bp, Glycine max
agcttaatcaattgaaaattgacggtgtgagattttccctaaactctactatttgccattttccttggcacccttaatcattgtcaatttggtggtaaagttaagtcttttaatccaaaaaaaggaaactgggtaccatgtgaaaagtaatttggatgaatgaaaaatagtttggttgttatatgaatgagtatttcgatgcttgtttgcaacaatgtattataaaaaagtacctaccacatagagagtggctatgcaatttggaatgcatcaagaagtttcagattttgtgattgcattctctggcaccaaagctattgcattgaaaaattagtgcatacccaaaattactttaaaaaatt

SEQ ID NO: 89949 - DNA, 374 bp, Glycine max
tatgaagcctattttgcaatgttatcccccacatttcagtagtttctctactacaataccatgttatgaaaataatgcacgaattctaaaatgcaacactaagcaaaagggtcaatttgtaagttcatatagcaattcaattctaatcgaaatataacatattttatatatattcatattccccaagagtatacttctcaaatataattttattttcatcaaacggtatgtgtgcacaaactttcaacaccaaataatataaaaatgactctaagagcccatactcatggaggataacctcccaaaccaaaattgacattaaagaaaatagaaaccctcaataccttgagagatttgaagtcttccagagttta

SEQ ID NO: 89950 - DNA, 300 bp, Glycine max
ataacggctttttcttttgcgagaatcctcaccgaaaacggtacagaaacggttctgaagcgcctcggcttatattttcatttacaggaacaattcctacaagccattccatagacagagaactgcctaaagggctggacccctttcctttttgctttcctccctattcataacaaaataggggaggtggttgccagtcaactcgcccacgctagcaggtgtgcttcctccagaaccaaccgcctcctggaggaaactattggaggggccatatgggcctgggtgctactagccccccat

SEQ ID NO: 89951 - DNA, 124 bp, Glycine max
ccaccctgaaccatcttcctgcttaaaaacttgattcggagtaacttctctttcaccatattagctgttcttttctcaatttggacatgtttaccacccttgaaaataatcttaaccccacccc

SEQ ID NO: 89952 - DNA, 311 bp, Glycine max
gggggtagaattaccttcattaattcagtcttaacaaccttacccatctatttggttttcttctttcaaaatccttaacctgggggggcaaagaatacctctattccaaagaattttttatggggaaagcccccagacttcctcaagattccttgggtgaggtgggacaccatttgcctacctaagaataaaggggggttagggatcaaagatttgactaaatttaatgaggctttgcttgccaaatgggagtgggaagtggcaaataatcagaatccattctggaccaaaattctattgtccaaatatgg

SEQ ID NO: 89953 - DNA, 226 bp, Glycine max
  unsure (1)..(226): unsure at all n locations
ttttcccagcaattcaaagaaaaaaaagtgcctaaagggctggaccccttcctttttgctttcctcccctatttatagcaaaataggggaggggggtgccgctcagctcgcccaagcgagcagggttgcttcctccaaaagcaaccgccttctggaagaatcttctggagggcccaaatgggcctgggtgctatntgcacccccatttntactaagtacaccccct

SEQ ID NO: 89954 - DNA, 307 bp, Glycine max
aaaataataattacccgaaacacaatacgttagattatcagaagggttgtgaaaaaatctctggatccatgataagcagcaaaattgatgagtatgagaaaactatggttttgtgttttttcttaaccaaatcactattttccttttggaaccttaggattctcgtcagatggagcgaaaaaaatataatttctgattttggtgtattagggacaacaactttgctttaagttttaacatgttttcgcttatcaagctcatattaatttctgatgatagtccaataggctcaccaaattagatcact

SEQ ID NO: 89955 - DNA, 268 bp, Glycine max
ttattccaatcacccattattaacatgccttgtgggaagattcaagaacgtgttccatttttggacccttcgaatgacaacaacccaattgggttgttcaacaatagaacatctttctttcaagaatagcccatttaagaaattgcccaattttaccatactagctgaaaaaattctccaacttcatagtgagctggcccaggaaataaggaagattgaatgtgtctccatggcgggcaacacggggccaaacaacttcatcataatc

SEQ ID NO: 89956 - DNA, 296 bp, Glycine max
  unsure (1)..(296): unsure at all n locations
cgtctgctaaatttgtgtcactcatgcacaaattcattttgatttaattcttttttctttttcggcctcccccatatttttggtggagtagtccaaaaaaatgtcaatttttttctttattttttntgtgataaaaaattaatgtagaaagagagagaganaaaagaaagcactctgcccatgtggatgtgaagtgtgggctttctagtcagccttattatttgtataattgttcttccatatatcagtcattaattcccctaccttcaaaatctcctaagtatcacattaatgaa

SEQ ID NO: 89957 - DNA, 249 bp, Glycine max
gagtggcatgcgagagttagcgtcggggatcatggaaaatgccagtgattgacggggggctgagggtgcctttgtgagagtgagtgatggaagcttgcttgtgggggcttctatggaggctggatctttgagcattaatgaggtcctttaatggtgattttccaccatggagatgcaacgaaagacaaaggagaagaggtgagaggagacgccatccactaaggaataagccatggaagaaggagcttc

SEQ ID NO: 89958 - DNA, 312 bp, Glycine max
cagcacattagtacataaaacaccaacatgggttccaatcccttgtctgcattgactttaacaaaacccacaccaatcccaacccaagaccacgacgaccaagactctccttcatcaaaatgtcttcttttcttcagcaccgactcttgttcttcaaccccattcttctctttccacaaagccctcttcatcactctcatcctcatcacctctattgccttatcaacatccttcgccttcgcctttctctacttctcttcaaaaccatcaacttctcctctcctcgtggctcgtcctctgtccaaactcaaa

SEQ ID NO: 89959 - DNA, 383 bp, Glycine max
taagcctggattcctaaaaggatgatggaaaggtggattatgtttattataacttcgtttgtcaagcgtttatgacatgtatcaagtcagctttcaagtccagtcttattgcttgggctctgagtagagtgtataactttggccccacatttcgcgcagagattttcacactttcaggctattggccggttttggatgggtgaacctgagattgctgttgcacagttgaaatgtttatgaaacttgaactcactcgagcgcgatcgcgattatatccaaatgtgatatttgttgtgggagtggtatgcttatcagctgaatgttgatacaaattttattttggtaggccaatgaacttggtaaatttttagtgcaatgttgga

SEQ ID NO: 89960 - DNA, 319 bp, Glycine max
  unsure (1)..(319): unsure at all n locations
atattccgannatatattatatcaaaaaccaactgattatgctggcttaaaataccgataggatatcttatcatgtattttgataatatattctatcaaatacaaactaattaggtaggctaacaatactaatagaatatcttatcatatattctatcacacccccacactcgaagcgagaggtcgatgaacacgaacactaagactgtctcaaactggacccaagaccaccgacacntaatttttttcttcataattcttgtgatatccaaacggcttcccacgttgttgttggtctgaatgagagaaatttgagtca

SEQ ID NO: 89961 - DNA, 355 bp, Glycine max
taactcctagttcatgaacaagtgtttttactcacggctttaatatatcaaataaccttattttcataatggtacccaacccgcacttatagcctcatgttaaaaggatctctctgaagtttagggttgcaaagatcatagaggattatacgaagcaataaatataacttccttatttgccattgcgatatacaacatttttgtataaaggcttgacccattttttagtgagcttaacactataattcaatattctaggtcaccccttcacttgatcttggggctctaaatgaaaatagcaggagatgagcatttatgtgaatggtcacccaaccttcttctgcagttcttgcac

SEQ ID NO: 89962 - DNA, 335 bp, Glycine max
agaattctctttttatacctaaaatttttttggtttggttttcttcatctgtttatgtggggatatattatatagaaactttaaaatgattcaaatttcttggtatagcatctactacggtgcccatagacatgatgtataaaaatcatcattctacatcggttattagaacaaccgatgtacaatggtttatgatactattacaattttggcagcacgtgatgtagaaagtatgacattctgcttcggttataggcacaactgatgtagaatggtttagaaagattaacattctacaacggttcggcgttaataaccgatgtagaatgttcact

SEQ ID NO: 89963 - DNA, 366 bp, Glycine max
  unsure (1)..(366): unsure at all n locations
tagtcacgcagctgcagctttttcattaacgtgcagagatcgtcaggacgagaccgtctttcaaactctcaagtgaagaaacaaaaccctggcaagccaccatgaaaggcttccaatctcgacggacaaatcctttatccgcataagcaacatcttggcaagaactaagtactataaaagagtaaaaacaacaacgtgtaaggaattggntacttgagtttagttgagtcatgtttttaggcatgaaatgcatgagacgagtacctgaagattggagaactttccaagtaagtcagaaccagcagacatgaactgattccgcgcccaattgtcccattcatcacttccatccaaacacagaagaca

SEQ ID NO: 89964 - DNA, 374 bp, Glycine max
  unsure (1)..(374): unsure at all n locations
tgctccttggaatactacaaatacttcatttataataataatttatacatngaagtgaaattaaagaagcaagtataatcttaaaagaatgaatttgaagatgaaagagaagtgagaaccttttcgccggcgaaggacttggagacgaaatgagcgtggtcccagcgcgtggtggacttgcggaggcgcttgacgagaagtgcgccaccaaagagtagcaaagtcttaagggccaaccctcgagcacggttccatccattcgcatccgaatccgaatccgtacccatctttcttctacgcttttcttttatggaattggaattagttgcggcgcaatctgagtgtgagtggaacaacaaccacaactagaagaa

SEQ ID NO: 89965 - DNA, 359 bp, Glycine max
tgcaagcttgtttgttgtgcttctatggaggctggttctttgagcttcaatgaggtcctttaatggagattttccaccatggagatgcagtggaagacaaaagagaagaggtgagaggaggcgccatccactatggaataagccatggaagaaggagcttcaccaccaagatgagccttggataagaagtttggagaggattcttcaatggaggaaaagaaagagggagagaaagaaagaagggggagcacgaaattgaaggaagaaaaagggagagaagttgaactttgagttgtgtctcacaagactctcattcatcaaagttacaataagtgttacacatgcttctatttatagac

SEQ ID NO: 89966 - DNA, 374 bp, Glycine max
tctgcatgtctagagatttttagagagagtaaggtccacgttctttagagttttgagattttgctgtgtgaagacctgcagagaacaaagcttgaagaggaagtcgtcctgagagcatgagatgagtctgtgagtgattgtgaagttctagaagtggaggagacatcctcaccgcttgtatttcttcaatccttcatttttctcttttctttgttgaaggtacttgatggttcttcaatcctcaccgctaaatcctctgttggttcttccttgtaggtacttgatgtaaatacctgtatatctatttaatgatgttttgtgtgttcattgtgctatcaaaacttcattctaacatgtttttgccttgatcacgt

SEQ ID NO: 89967 - DNA, 242 bp, Glycine max
ttcttgatgttgatggtgaggtatggggagttttggtgagctaaattgaaaatgggagaattccaatttttggccaaacctattttaataaaatcaccatcccataatcggtaacttttggatcggctttccggtgggtctgggggaatttctaaaacaatatacacattctgaaccgtgggattgtagtataacatcttgagtatgatattttttttttactgaagcagaaaatttgagct

SEQ ID NO: 89968 - DNA, 371 bp, Glycine max
  unsure (1)..(371): unsure at all n locations
ggacctataaaactcaactttcttcactctnctttttcaataagctctacactgcaatttttacagaaaggacctgggtccctacatttctcatgaatgtgaggaacatatttacctattaatgcttgcacatttctacccatgctaatcctttcaatgcctttgaacttcccttttgaggtgcacagctcctttataaacttggcatatattggaatctgctttgaaggaatctagcaaaagtatgttcacctttacttttctaaaggtctctaaaatctccttttccactacttccatctttttgtttggaattgctctaagtgggaatgaaaaagggataggaggctgctgcaagtcggaattactaa

SEQ ID NO: 89969 - DNA, 338 bp, Glycine max
  unsure (1)..(338): unsure at all n locations
agctnttggtgatgccttggacattgatcctgttcatgtccttagcataatctccactgctgtagttcttaaacgatgccgtaataaatcaaatccagcaggtaaaagctttctggaggatgcgctaccgcacgacagaatcaacgcttctgcttggtataatcttggccctcttcacaagctgagggtacagcatcatcattaagtgaagctgccgaatgttttcaagcagcacactttctttgaagaatctgcacctggtgaaaccttcagatgactcattctatgatggctggtatactgggagaagcaaaagagcaagcatgtttcttttagag

SEQ ID NO: 89970 - DNA, 360 bp, Glycine max
tcttcaagtcctcattattgggtatcaactgaagacccttctttcaatactctctagcttcagcccacatatctagcgaaagaaaagccttggaagctctaataattgcctaatcacaagtggcatcacttttaaacatcaaaccaagcaattataattacaataaacaaccaaaaaacctcaaacacaaataccttaatatttgaagggcacaacttgagggcctcattagaatctgtgagagcacgtctaagattccctagaagcaaattcacatgtgctctatttgcaaaaagaatagaggtctcagagtcactcaaggctttctgatcaattgcccttgtgtagcaatcaatggca

SEQ ID NO: 89971 - DNA, 298 bp, Glycine max
ggggtgacagtccttattgattattgaaaacattgtcctattaaggctggagatgaacctgagatgattccaaaatgaaaagaaaagaaaacagggtggcaattatgagccagaagcttttaatgcttaagttatccttaggttcaacgtgatagatatactattcaccttctctagacaaattttctttgtattcaacaccataccttttcggtttcagtaaaaagaagttgcaaccatttcattgcattattattattattattattattattaatattattattattattattat

SEQ ID NO: 89972 - DNA, 250 bp, Glycine max
ttgggggttcttctgataaaactttttgacgggcaaacaccctttccaacaccctttttcttggccccaacggaattgccaaaatgggttaaaacgtgaaggacgatgaccgcagcgaaaacaaccgcttgagatgctcacggaggtttgcagtatttgcagtgcaacctcgccaaaacaaatgccggtgatgtggcaagtgcttaagatgatacaaggaattaatgacagtgcttcaatggaggatact

SEQ ID NO: 89973 - DNA, 354 bp, Glycine max
  unsure (1)..(354): unsure at all n locations
tataatttttttgattggtttaaccaatgaaaatatgaagaaatttatattgggggccaaacaatggtatggcaaggtggaaggaacttttattattccttaatctaaaagtcgattgatggccttaaaccccttgcgcttgtgactatggtatcctataaatttgtaggaatcccttccaagtctatccccctaaagtattaaaacataatctcattttttttttacaaatgttgattggtttgtaaaaaaaatcaccctatgatatttttctttcttctctttntatcacctaatcaatcttattattccaatataatatcatgcatgtttagctcgttcggagttgaaatc

SEQ ID NO: 89974 - DNA, 380 bp, Glycine max
tagaactcctttcttgtatgtggatttttatcacaaggaccattttttatatatctttcctatatcatgcacagcctcaatatatagatcgtcacttaaccaagaggaaacacatacgtcactactatactctcttagtggtgatcaatattccaattgcttatcgggtgggaaacaacgcaaaaagtaaatacttccaccttcatgtcaggctttcaacattttcaaatctaaccatttgcaaagaggaggaagggactattgatgctaattatgatgatgcaccaaagcaatggaccatagtttggcctattgatgaagacagaagtcgctggagggtggctgatcctgtattgacctcatagccacagcttttattg

SEQ ID NO: 89975 - DNA, 313 bp, Glycine max
tttctcaaaaaacctctcaagggaattttcttcagaaaactttctaagggagcctccttatctataataaaaacctggtgtacactttgtggtactttgaataatgagaatcttgtgaaacatactttcaaattccacttctatacctcttttattccttcaatttcgtgctcccccctctctctttctcttcctctttcttttcctccattgaagcatcctctccaagcttcttatccaaggctcatcttggtggtgaagctccttcttccatggcttattccttaatggatggcgccctctctcacctatt

SEQ ID NO: 89976 - DNA, 392 bp, Glycine max
  unsure (1)..(392): unsure at all n locations
gcttatgtagaccgtgatactccaaaacctttgaaaagacaaaattatgtgacttcaaccaatatagattcaaanacttgggttgaatctgttctttctttgcataactgaagaaatatgaagcttcatagtattcctcttcaaaccatggagtatactttggagagggtggtggaaagggagaacgagcaaccctctttcctctatagctaggcaagcctcctttggttgtctccttcactttctctttctttgccttggtcttgggtgcagaggtcatgtgccttattgacttcatgtgtttgatcctttgttcacctattaatggaggttgaggatgaaaggtgacaatgattagggctttgagggggtgaagaatgagaaaaaaggat

SEQ ID NO: 89977 - DNA, 241 bp, Glycine max
catgacattcttttctatttttgggaattgatttttatttgaatttttttttgcctcctttttttttggggaaaacacaaaatggccctttttttggggaagaccatgatacttctaagaacctcttctatcttttaccaatcttcttcgggactcccttaaaatgtatgttttggttgattacttgaaaattttgagtgatgacaatggagccatttgactttaatcaatcaactaaaat

SEQ ID NO: 89978 - DNA, 393 bp, Glycine max
  unsure (1)..(393): unsure at all n locations
cttgttgttgctgccccacagagcccctcggaacttgttccggccgtgctcttctctacgatccctcttggtctcttgttccaaggccttggcagtagctatatttgtatctcttaattcggcattctcctttcggattttaagagctgctgatttgaacctttctttgactgtttgggcttgctcgagttctgccctaagggcctgcacctcttcgtcttcctccagtgcctcaacttcctcccttntagcggttcaaaaaacacaggagccaatccaaaccttgcatgtgggctttcaaccaccttcggtagccaccgataggcccattgttactgcccctgagttctttatccttcttttgcaccacctcccatgccttgcggaccttct

SEQ ID NO: 89979 - DNA, 156 bp, Glycine max
cttggagaagatgcttccatggaggaaaagaaagagcgagaaaaagagagaggggggagcacgaaattgaatgatgaaaaaagggggagaagttgaactttgaggtgtgtctcacaagactcccattcatcaaagttacaacaagtgttacacatg

SEQ ID NO: 89980 - DNA, 384 bp, Glycine max
  unsure (1)..(384): unsure at all n locations
gaatactcagcttctcaggaagctacctannctatatatagantgatgtggattatttatcgcaacttcgatgaatgagagtcttatgagacaccactcaaagttcaacttctctctctttttcttacttcaatttcgtgctcccccctctctctttctctctctcattcttttcctccattggagcatcctctccaagcttcttatccaaggctcatcttggtggtgaagctccttcttccatggcttattccttaatggatggcgcctcctctcacctcttttcctttgtcttccgctgcatctccatggtggaaaatcaccattaaaggaccccattgaagctcaaagatccaacctccatagaagccccacaagcaagct

SEQ ID NO: 89981 - DNA, 372 bp, Glycine max
  unsure (1)..(372): unsure at all n locations
tagcaccatatgaggccttggatttgagcttggaggaagaattttatgaatganacggacactggtagggaacagacaccgaaatatttttttgcgtctacaaagtagcctcttgatattctggaagttaaatattgcaaatgatccaaagttttttaacaaatacacacacttgacctctatttatagcctgagtgtcacacaaaattggagggaaattcaaatttcacttgaatttgaaattgaatttgtggagccaaaattttactaattatgattagtgaattttagttatgggtcagcccactaatccaagatcaatttcaagaatctccactaagtgggcttaagtgtcatgaggcatgttaagca

SEQ ID NO: 89982 - DNA, 374 bp, Glycine max
  unsure (1)..(374): unsure at all n locations
taacanatttaggtggatgttgtatctgttctattnggcatttttaattgntcgagtttgatttgtctgctttgttaaataatttgcatgattgtggtattcttaactgatactaacatggttttttgcttacaaaagttatcaattgggctgttgcattggaattgaccattattggcttcgattgttgtactttttagatgattatcatagtcaaaaacacattattgtgttgttggccaatgtggaaattaatggagatcagtgtatactgtcatatagagtttgttgttttgcctgtttatcccatggattttactatataataaaagaaaagcccaatgaaatccctgtctatacttccaaggtatata

SEQ ID NO: 89983 - DNA, 375 bp, Glycine max
  unsure (1)..(375): unsure at all n locations
ntggccctggcctctcttatctttctctctttgtgattctttatccgagccactgtaggattttcaggcggtggacaaactgcatagtcttcttctatcggttcccaaagatctagtgcttcaagatgggtagtcatccctgcagcccataggtcgtactcctcaccatcaaaaactggtggtggtattatgtgtgttgcgtctgcttccattatggtttctctcaactcacagatccctcaagatgatgactctgataccaatttgttgaatattagatcaaaaacagagaagagcacatatatttatgaaggatacatagttgttattcatttgctcttggttagagttaaatatacaaaacaaaaaatccct

SEQ ID NO: 89984 - DNA, 343 bp, Glycine max
agcttcaagctgttcaattgcttcaaaatggttcttttaaaggcaaaaggctgtgtgggggtccacaaaggaacataaaccacaaagtctggccacaggggccaattttttattcatggcccgttgggttaccacgttatccaaggcatctagtttaaccttcaactttttagtctcgcctgatgaggatgaatttgtggctacttcatgcactcctctaatgataatagcatcacttctggcactaaattgctgggagttggaagccatcttctcattaaatttctggctttagcaagggtcatgtctccaagggctccaccgctggcagcatctatcatac

SEQ ID NO: 89985 - DNA, 303 bp, Glycine max
taaaaccaaacctcgatggtggtgcgaatctttgatgggactccgggggaagtgatggaggaaaatgacatttccattcataattgcccccacacttgcaacgtggtggttcacagtatggatataaatccttcctatagcttgcctctttgggaaagacctgtggattcatgccctgagagtgggcccttccacgcttcaccaaaaattgacgttcgcaatgggtggacttttagtgatagtgtcggggtgaagaagacatgttaatgagctgcccctcctccgcaccatacgtaaaagcgg

SEQ ID NO: 89986 - DNA, 245 bp, Glycine max
  unsure (1)..(245): unsure at all n locations
aaataattccctagttgattttcttttttgggcctttaaaagagcggcaaaataatttaaggagagttttttataagcacaagcaagagtctgatgcaactacttgagtagagtcatctaataataaagctccatacctataagtagtccaaattacactacaaaattcagagtcaaaattaagcaatatcattagtaaacgctacaatatcattagtcgntgatttagttgtctctctcgagaa

SEQ ID NO: 89987 - DNA, 271 bp, Glycine max
ctttccttcgacctttaagtggcaatccttttaatctccgaaatcattaactctcttgctggttcttatcccaaatgaacttttggttcaaagcaggcatgtataatacacccgtgcgtattaactaacctggttgaggaataatatataataagcccagaaaatcggcataatcttaaatcatgggtctataaaaaactttatgacccaaccgtggtttggagacaggataaaaacgctaaccattaatacataatcaatgttttacctc

SEQ ID NO: 89988 - DNA, 340 bp, Glycine max
  unsure (1)..(340): unsure at all n locations
atttgacttgttttggtgctttaaatgggggatatttgctcaatattggggggcattttgggttggtttcttgcttgaatatgtttaattggggggttggatgggatggccctanggctataatgcattttgaaacaatggggcatgccacatttgcccccgtctcttgctattgatgcctaaacgcgcgcccaccaaatgttccgtgaaatgcctcaatggcattaacgcgtgacttttgtaaagaaacaacccatggggcattttggtttgcacatattttctattttttgggacatgcattcattcccgaaaaaggctagagtaattgccccacata

SEQ ID NO: 89989 - DNA, 292 bp, Glycine max
gaatgtcccatgagtccagaaggaagccatagttaatcatttgcctgcatagcagcccggtgattatcaaagccaatcatgatagagctccgactctaaaaaaaaggtataatggagcctggaccactcaatagtgcaatttctaagctcacaacaaacctcttgacgcaacaaaattgaagtcttaaccaaagcagataaagccaacttccctcagctaatatcactcaaagtagaccacaaaaaacacatcaagctcaccaagttcacaaaatttgagatgtgatttctg

SEQ ID NO: 89990 - DNA, 394 bp, Glycine max
tactaagcttgataaccaaactggtgacatgaatattcttttacaaacatttctatcattcataagtttccctaaattgaatttttaatgaccaatgcatgactaatttaaggggagaatattttcataccttgaccataaactgtaattaaattaaatagtattagacgattaattgataactaagagttctaaattataatagaaattagggaaaaacgatatataactcataatcaagatttttatctatttatacatatttctcttgaaatgttatttaatttatacgatttagattattagagaatactacctgtctttaagacatgatatttgaactttcaaattcatgatcttacaacataaagtttatttgttcttgcgccaatat

SEQ ID NO: 89991 - DNA, 402 bp, Glycine max
gatccttgagtcacctgagctgcagctctccccattttctattaataggggtgtagtgaatgggaaaaatggtcaactcttctggtaatttgagaatcactttgaattaatgaaaaaaatttgtttcgtgaagaaaatcccagccgaggcgcttctggtacgttttccggggtgatttcgcgaagattttcaaccgttcttcgacgttcttcgttcggtcttcgtcgttcttcggtcttcaaccgataagttcccgaaatcgaacttttcaattcattctatgtacccttagttgtcctcatttgttttcacgtgcttttattttcatttcatttacttttcgtacccccttttgacgtgctttagtcatttacttaagtcattttctcgcctaatcaaaaa

SEQ ID NO: 89992 - DNA, 397 bp, Glycine max
tactcacgcttcttagcctcggctgatgaagataaattcgtggctacttcatgcactcctctaatgacaatagcatcatttctggcactaaattgttgggagttggaagccatcttctcaattaaatttctggcttcaacaagggtcatgtctccaagggctccaccattggcagcatctatcatatttctctccatgttactgagtccttcataaaaatattagaggagaagttgctcagaaatctggtggtgagggcaactggcacatagttttttaaatctctcccagtattcatataggctctctccactgagttgcctaatgcctgaaatatcctttttgatggtcgtggtcctagaagcagggaaattgttttctaagaatactctcttga

SEQ ID NO: 89993 - DNA, 273 bp, Glycine max
agcttgctctatatttacattggtgtttgtatttatgggaggaggttatatgccatttttgctttaagagtaatgtcccactggtaaaactaactttccaaatgtttgccttcgcaagaatggccccgaggaagcttgcctcaaagaagtccaagaaagacaaggcggccgaaggaactatttcccccccggagtacgacagtcaccgctttaagagcattgtgcaccaacagcgctttcaaaccatcaagggatggttgtttctccgggagc

SEQ ID NO: 89994 - DNA, 133 bp, Glycine max
actcccaccgggactccccacaataggatattttataatcatgataagaagactgcccgatttggaaatggatggaggaatcttacacggtcacaaaatttgtttattgcaacttctccctttgttgtatttg

SEQ ID NO: 89995 - DNA, 236 bp, Glycine max
ggaaccctattatacctattgcggactcaaaaagaactttgctatatactcgggcggttcacttctctgttatgtggtagagggtggaataacggaggaatatctaacttaggtgcatgtcgctagggacatccaagctcctactgtgccccacaagatcatcataatatacaggtactaactctcatatgaaatcccttaagacatgagtgtttaggcctcataaaggagctcgg

SEQ ID NO: 89996 - DNA, 318 bp, Glycine max
  unsure (1)..(318): unsure at all n locations
taccttggtacttggtggcattgagggaatttacctgccaagaaaataatggggtgatataaggaaggttctttttaaacctaatgaaatggaaatggtttggcctggtttttaatactccggttttattggccgctgcaatgttatcagcatcatttggtattgcataaaggcatgttttggtatcttgtaatttataaaagaatagntctctttctattgattcatgttaatgtacaaaatataaccaaagattggtctaatgggtaaaaaatgaaatgcaccatgctgatgcagtggccataccttgtggacact

SEQ ID NO: 89997 - DNA, 305 bp, Glycine max
tcttcacttgtcctccaatcaaaaagttaattgaatcatagcctccaatcacataaagttgcaaggcttaagccattgccttgataaatgaagatgcatattgctttcatccttttaacttcctttcatacccagtcttaaacatgaaaggatatgactaattagaggccacaagctctagatatttgcaccattgttcaacccacgaaactcatcgcttggacccaccaccaggaaaactttcgatcaagggatccccgggcctaggatccaccgtcgtcatcttactcgtctgagtcagttac

SEQ ID NO: 89998 - DNA, 303 bp, Glycine max
accctcggaagccaaaaaagaatagaggggaaatttccaatccaagaaaaagagaaggaaaatttcccatgaaagccaaaaaagaaaagaagggaaattccccaatcaaagagtgggagaaagcaaaaaaagaaaagaaggaaaattccccaatcaaagagtgggagaaagcaaaaagaaaagaaaggaaaattcccaatcaaagaatgggagaaagtaaaaaaggaagaagaagaaggaaagaaagctcctcatcaaggatcaaaagaaaacagaagaaatgtgcagagaggtctttggacc

SEQ ID NO: 89999 - DNA, 384 bp, Glycine max
  unsure (1)..(384): unsure at all n locations
nttgtcactccacccaaatcttgctttctaattcaccaaagcttacacccctgacaatcatgtatacttagtgcatccgacatacaattgtttctttgaatcattatctaacttttcataatatggggcatgggtttgcctaaaacccttttgtccaagatcgcgtagcatggtcttctataccgatcacttgacttccttcaatgaaactccaaacattttcgaggggttgatgacatttctgataactcaccatgccatatccatcttctataagtaggacagataccatcacatatcagatgtgttctaatgtcatccaaagattgttgtcgaccattcaaacatttcacacatggacagaagtataccccacgaaagtct

SEQ ID NO: 90000 - DNA, 379 bp, Glycine max
  unsure (1)..(379): unsure at all n locations
ctaagcttgctttcacagtataaggganaagtctctggttgggtgctttatgttcgaatgagtaatattgtgaaaccattctaaataatcatcaatgcacatagataatgcatcaacaaccacaatcaaactttgaaactcaataggaaagacattaccatgacatcattgatgatgttggtctacatcaatgcaagacggaatataggcgtgcaacctgatgaagtacatgaggaatcctctatacatggtagaattggcacgagacctacttatgtagattagtgttgtacatgggccaaatagaagataggtgctaaacatggttgtatattaggttacctgtctatttatagaatgtcacgatccccacttgact

SEQ ID NO: 90001 - DNA, 136 bp, Glycine max
agcttgccgaattatccgacccatggacgcctttaatttaatatagtggagaaaccttggcttatggcccacgccggctctaaaacattttcaaccaaaggaaagaggaaaatcgcccggttttaaggggaaaaaa

SEQ ID NO: 90002 - DNA, 284 bp, Glycine max
  unsure (1)..(284): unsure at all n locations
tggtatgatgcttccatggagggtatgtaangagggacacaattatagcggngggagcacgggctttatagggcaacaatagagagctcttgctccttagaggttagatgaaatatcacgggtcaaaggcatgatcttgaaggaccagctaaaggcttgccttacgttgaaaagaaatttgtcccataagttaatcgagacttgatggaatatgtgggccatcatcgatgagtgcaaaaagaatctatatttagcggcgactcacgagaaaaggctataggatg

SEQ ID NO: 90003 - DNA, 353 bp, Glycine max
tctcaaggaagttttctcaagaaagcttctcaaggaagctactctttctataaataaaaacatgtgtacacttgttgtactttgatgaatgggaatcttgtgagaccaactcaaagtcaacttctctccctttttcatccttcaatttcgtgctcccccctctctctttctctccctctttcttttcctccattgaagcatcatctccaagcttcttatccaaggctcatcttggtggaaagctccttcttccatggcttattccttagtggatggcgcctcctctcacctcttctcctttgtcttccactgcatctccatggtggaaaatcaccattaaaggatctcattga

SEQ ID NO: 90004 - DNA, 268 bp, Glycine max
gcttgccttatgcaaatttccagtatgctgcgtagacttactctagatctatttgtcactaccttgtgccaaacattttaaagttctctctggggaggaaatggttcactgtcggcattgtgagacttaaggctggaaaatctcttagctgctaaaactttgtagactatgaaactgtagcggaaataaaaggcatgccacacattgcacctctattgtagatacctgaaggtatgtgtcgggacctggtaccgggccatttgaagtc

SEQ ID NO: 90005 - DNA, 185 bp, Glycine max
  unsure (1)..(185): unsure at all n locations
attcctcatatgtagggctaatgcgactntcattcatccaacttcgatccatctatataataactctgatactcacaaagtcattccatgcatcanaatctcacttttcattatanggtgtgagcctatcccattcaagaagactgtnttttatggtagcttcatacatctagggtaagtctctt

SEQ ID NO: 90006 - DNA, 322 bp, Glycine max
  unsure (1)..(322): unsure at all n locations
ataaggatgcccatattcataccaatcaaatgatattgaactttgcnactgtatgctcccatcgcctaggtaatttatgtatgtacctaggctagatcgttcttatttatcaacaatgttcaaaatgtctttataattgtcattcatcagtcattcggcgtccgggaattacagattacctcagtgaaccatttcnaaatggatgactgactttcaaaaagtgaatgtttttaaactgtgtttactaacacatnttctttttactttctactgctttccattgctctttttcatctttttcatcattttcttcatattcttc

SEQ ID NO: 90007 - DNA, 174 bp, Glycine max
gaaatattgggggttttgagggggttatttataacccccttttttttttatataactcacagggattattgaggaccacatctacttagttttttttttttatataccggcaaggaacttgtgcggggaaaaataaataggggggggagggtgtgatcatctagttggtttttt

SEQ ID NO: 90008 - DNA, 144 bp, Glycine max
tctggacaataaaaataagacaatgatttctaaaaacatacgcaaatgatcttttaaaaacatggtttatttattcagagttacactgacatagattattgaactattgaaatgtaactaatgaactttaacataccaaagaac

SEQ ID NO: 90009 - DNA, 326 bp, Glycine max
agatgtaatatgtcctctccgaatggaaagggatgaagttgatcatcttaggaggtttgtatgattatcatgtatagtgcaagagctaacgacttgataaatcatcttgttgagtttcagaattacatttataaaaagaacacggggttgatattataatctagtttgaatgaaagttctcactaactaatatcctcagctaaaataagatgcttccacatgtattgccggactaaagactgacctgctagtagcaactgtgtgtatggatgaaaaaaaaaacgcaacatacctggtcaacaataggggctcacaggttttcctgc

SEQ ID NO: 90010 - DNA, 172 bp, Glycine max
  unsure (1)..(172): unsure at all n locations
tttaaactctgaactttgaaactctgaagtaagtactcccaccttatactactactctgaagctctaaaatctagagcaactactcctcctttatctactatctctgaagagactgactactccaccccttatactagctacccatgcaanacatgaatcaaaaaatctctc

SEQ ID NO: 90011 - DNA, 149 bp, Glycine max
tatcgacaccataggtgtatcattaccatactggttactttcattaatttgaaataaacgtttaagcttgtatcattacatatcgtgtatcatacaccgctgaaatgttaacacactcgtactcttgcatttaaactaatgtttaaaca

SEQ ID NO: 90012 - DNA, 147 bp, Glycine max
ttacagatttatattataatatttcagtatttgtgaaatatccttagattttttaataaagtatcatagccaaatattaattatataatggaaactatatttaaataatctcacattatataattagaattatacatcttaatatta

SEQ ID NO: 90013 - DNA, 223 bp, Glycine max
atatcctagctgatgagcgactttcaatactttatatctgccccacagtggagcaacaaatgctgccttccaccttgagcacccagtgtatcttcattagacaaatctctgtgctaaaattccttcacttagatctgaatttggccataaataattcctattcagttttatgtctacgcctctcatcctctaaaacttcactgctatacattcatatctcctg

SEQ ID NO: 90014 - DNA, 321 bp, Glycine max
  unsure (1)..(321): unsure at all n locations
actcctgtttatgcgcatttattcttagaggtcaattgcatacatctctacacaccaatttttcttttgcaacctgagaaatcaggtatttgatttagagaacatangttctgagatatctgagatctgttgtntggtctcaaaaacatatgctgaataatactcactgaaggtgaaatattactatagttaaaaatcttacacatctgaattactacttgtagagtcataaagtctgatgcttgataatgccaaatgctaagatctgctgcatgtaataagtcaaactaaaggcatctaggaatacatacctagttcttg

SEQ ID NO: 90015 - DNA, 227 bp, Glycine max
ccttgagtaacatgtctaaccgcagaatcattatcgattacacatcatgcatttatggtccacgatcctcagcaacttctatataataaaggataaatacaaatattataataattataatgtgaggaattagaacaaaaaataagtataaatacatattgatgttatataagcttaatataatttactatatatgaaaataaaataatagtaaatcaataaaataa

SEQ ID NO: 90016 - DNA, 266 bp, Glycine max
  unsure (1)..(266): unsure at all n locations
tttaacaaatatattaaatgattgtataagattaccgcctagtttgtagagaactttaacttattcacatgaatgagtgagttattgattacacacaaaatatagtacttgtgaattacacacgctttgagttaatgttgatttactcacaaatatagtcaatttgattactataacatgagatnatttgattactagactagtgagaaagtcgaactgtatttttgataatgttaaacgttgacgcttataatttaacgacttac

SEQ ID NO: 90017 - DNA, 187 bp, Glycine max
  unsure (1)..(187): unsure at all n locations
tactttcggcacctactatatgctgacttgccaacgctgntattgaatgctgcgacatctttcacaccttatcacacattctgatagggtgggtgtcatgtgaccatatcgtcgtccagatgtatcgtaagccatgcctctattttcttttgaaatgcgaacaatccatcttgctatggctggactc

SEQ ID NO: 90018 - DNA, 254 bp, Glycine max
  unsure (1)..(254): unsure at all n locations
tcctaatgaatatgagccgattacatactcctgcaacaataaatattacaccatttctgatgacataaatgccataacttggtcacataacacgctgctaattagaccagaaaggtatgatttattctcaaagctaaattaattacatacagaccaacactcccacttggtgagaatcacatacatcttatttgataaagacatattcgccttgccagcttggaagtgcngattaatctgataaaacatcacag

SEQ ID NO: 90019 - DNA, 229 bp, Glycine max
gcgccgccaccgtcaggaatacattcggagctgttataagggtttggtatgaccctcaatgtaccccgctacacgctcttctatacgctattctccaacctttatgctgcatctcaataatgcatttgcccacatgctcaactcgcatggcctccgttgatactaatgacacaggttatgctgcttgaatgaggcagatatgcattacatttatatgtgtgacgtatca

SEQ ID NO: 90020 - DNA, 134 bp, Glycine max
ggtataagattactccctcaaagctaaatttacaccatgccccggatcacagactgccctgctccactcagtgaactgccatagctgcggtataaattagctctctcaagctaatttactttttccacggttca

SEQ ID NO: 90021 - DNA, 263 bp, Glycine max
ttttggtctaaaaagctttttataaattcggaaacctcaacacctgagattcttactaatattgaagtgagttaaggagaatctcactgatttcatctagtcttttttgaagaatcatttgacatactgtgtttctgagactggatctttttttagatttggtatggctaactattctcttgcttaccgaatctgttttgaatataggacgcttctaatgtgcgctttttttccagacggcgactttgtgtgtatcgtggctt

SEQ ID NO: 90022 - DNA, 353 bp, Glycine max
  unsure (1)..(353): unsure at all n locations
gctatggcacttcactctctgctgaaactgcctacccatgcttatggaagacctcacacaaagaccctggatgaccagcttgctgaaaatatgtaaagatgtaagctaagagagagatccctttggtagaacatattttgtttatccattatgaggttcttgaatggtgataacacctagtgggattctatgatagtgatgaatactatatcattgatggttttggtcaagttctcatgctgagtgctgcttgctgacccattggtccagtnggattacatggaatgctgtgctaactgatgacagacaactatctctgggactgcgtagttggttatattgtcatatggtta

SEQ ID NO: 90023 - DNA, 308 bp, Glycine max
actgaatgaaattctccccctaaagattaatttgaaagttaagccagatgcccatctaatattggctatactggaagagggcacatcctaagctcggccagagcctctggaaacttaattattataaggagaaacagagctacattatgtgatcaacagatagctgaaccatattgaacaacttgtgagaaggctaataagtgacgggctatgaagctaatgaaatcttcactagagtgatgaacaccttttgtaaacaataaatgcttacatcctgcacattattgattcttcgagacttatgaggt

SEQ ID NO: 90024 - DNA, 188 bp, Glycine max
gtatggctacctgaataatgtgggaattaccttcctttgttgttgaagaaaccagtgacactaacaaggttgatttgaacaaattgtgacctatctgtatgctgatagcaaggagtggaaatcgcaagagattgcattagtgaaaagcttcatctattaagcttcgccaaccgaattttttcttcttg

SEQ ID NO: 90025 - DNA, 383 bp, Glycine max
agctttgataacacaatacaatagtatgtctctttctcaaagagggtttaaactaaaaccaaatttcctactaaagactacacagtgtgttgtacatttaaaatgcttcaacttgttcttcctagctttcaaaatgcctcttaaaactctcacaaacaccatattagtgggccgcacataactaatacaactttggagcaagttggttcactttcaagctgtcatgatatgatagtagacataaccattctgaggttctcattctaaagagcctttctaatggtcattctgaagaaccatcaaaattgtcattctaatgtttgcttataatgaatccatactctgatgaactcccttgattaagctcatattgatatctcatt

SEQ ID NO: 90026 - DNA, 278 bp, Glycine max
  unsure (1)..(278): unsure at all n locations
atccccctcattaagaaatatctcccttcttcctctattgcccttagttgaatacacccttgtgtgggtctctatttgggtcttaaccatttcatgcaacttctttacnaactctgacctagattccccttctttatttataaaagaagtgtccagtgggaggggaatgaagtctaacggtgttaagggattgaacccatataccaccctctaaggggatttgttggtggttctattaacacccctattgtaggcagaatctacatgaagaagatact

SEQ ID NO: 90027 - DNA, 338 bp, Glycine max
ccttggcgaattacctgaataccacatttcaatattgaacaaaggaaaattatttgatgcatccacaatggaatgccgaaccttaatccctaatttatatagtgggacatgtggtgaacctctgcctcagataaaggcagcatgtgatcattcctctggtacttcttcaacagccaaacgataaaggccactaaaccaagaatcacaagattaaaattgtgaaagccatactgggcacataatttcattaaggttatattagtagaaaacaacctgtctgtcaaaaaatactacaggatttgggatctcgacgcaagaaagcaataacccttttggtt

SEQ ID NO: 90028 - DNA, 354 bp, Glycine max
actcaggactcacgagaagaaatgcagaagcaacaagtcaagactccatatatgatgaatattaaatatattcttcaaaaacaaaatagcaagttttgttttacaaaaagaattttctcaaattttctaagttaccagagtgattactctctggtaatcaattaccagttattagtaatcgattaccagtgaccagtttggttttcaaaatgttttcaaatgagttataacgttccaaaatgatttcaaatagtgtaatcgattacactatattagtaatcgattacaagtgaatctaaacgctggaattcaaatgcaattgtgaagagtcataacttttcataaaatacattg

SEQ ID NO: 90029 - DNA, 356 bp, Glycine max
cactaaaactagcgctccacactgttagtcaactatcaaggatccccaaatcactaacgatagtccccggatgaaaatacggtatgaccagcccacttaaagaggcgaatacttggataggctctcacatggtgtaaagggtaataccggttttttacaagccaagaccaagtgtggtgctataataggatagatgttgtgaaggccaaccaattgttagacattgtgagcaaccagcatgctaatggaagtgttaatggaaatctcatcaatttgggagaggactaccctgttctcataaatgaagagaatcatcctcaacatctctatgttgaatgctttcatccattcctctt

SEQ ID NO: 90030 - DNA, 409 bp, Glycine max
agtcacgagctgcacttctcggccttctgcaagcaacatttgaaagttagttttaccagggggaacgtactcttaaaacaaaaaatgggattattaccctcctcccattaattccaaccttcatggaaaattaaaagaagcctatgcccctaatttcctaccaatgttcttttgcacaagaaattctattaaccggaaaaatgcacccatataccaatcaaggagctcccgtacctataataattacacgtatttccaaggtgtattttgtacttacatcacacacattttcttggctaaattcacatacatgcatacccaaaagcattttggggtaccaaaaattgcacatgtacacctcttggtatttctaatacctatacatacacaaactttatgatgaatcttg

SEQ ID NO: 90031 - DNA, 464 bp, Glycine max
actaagctatgctgcgacattataatagacttcctcagcaacaataccaacttcagcaaaataattatgacctttcaagcaacagatacaatccaggttggaggaatcatccaaatctgagatggacaagtcctccacaacaacatcagtctatccctcgtttccataatgctactggtctaagcaagccatatgtgtcttctccaatgcaacaacagtagcaatagtcacaacaaagacaacaagcaactgaggctcctcctcaaccttccttataagaagtagtgaggcaaatgaccatccacaatatgcaatttcagcaagagacaagagcctccattcagagtctgacaaatcagatggggcagatagctactcagttgaaccaagctcagtccctaaattctgaaaaatttccttcatagactgtgcagaatccgaaaaatatgagtgccatcaccttg

SEQ ID NO: 90032 - DNA, 403 bp, Glycine max
  unsure (1)..(403): unsure at all n locations
agcttgttcgcacatcgttcgcgtgtatgatatccactcatcatggcnngaagtggaggagaccttcaatcctataatgcaacatggcagacaaaagtgggcatataacttgaatggccattattgtcaatgcgaaaggtattctaccgcttcactatccatgttcacacattattgcagcttggggttacgtgagcatgatctactaccaatatatacatgttgtttagacaaatgagcacatcttataaacatactccgcacagtggtggcctcttgggaatgaagcggttattcctccatctgatgatgcatgaacacttatccctgacccaactacaattctttgcaaaatgtcggtcaaaatcaactacgattaagaattggatggattgcttaaacc

SEQ ID NO: 90033 - DNA, 489 bp, Glycine max
  unsure (1)..(489): unsure at all n locations
cgacactatgaaactaagctaggcaaaggtttcaatctggctctaccagagccaactactcttttgcatcttcagtatcttctgggtcaccaacccaggctgggtcatccacccaaaaaaccaaaattgaagggtcatcgacccaaatcatctcagtcaaacctgagtcatccactcagaaatctcctaaatcggcaaccgccaaacaaacattgtccgactatgctngctcaattcaaacaattcaggcccttcaagaaataggtctgactaaattcccaaaaataattaaaaaatcttgggcagagattaccttagaatctgacgacgattctgaaacaaatttacaaaacatgatccaagatgttccaatgaccaaaatatcaattctaaagggaaacaaaccctagccaaaactcagacaccacccaccaaacaaactaacaattatatttacaaaaacaaattntcaacttttatgtagatgga

SEQ ID NO: 90034 - DNA, 352 bp, Glycine max
agcggcttttttttatccgtactaagattgtcatgatttttttttactctatctacagagggaagacaaatacagggggagtggatggtgaaatgaacgagaggcttctagtcggagaacaacacctggtttcatacagaacttagcggggtgaatgacttcacgaactgcttgatgagtgtgacgctggttacgggaaagggttatccacagatatggaagggtgaaagctccagaagactccctggtcgatcgacatatgtatctttgaacgacgaggctataagcaatggcaatcaagacaccttttcttacattcggaagatgaacattccttcgacaataaccagtt

SEQ ID NO: 90035 - DNA, 323 bp, Glycine max
  unsure (1)..(323): unsure at all n locations
atattgtagccgatgctctttctcggcgtcatgcattactttttatgcttgaaacaaaattgattggtcttgaatgtttgaaaagcatgtatgaaaatgatgaaacttttggagaaatttttaaaaattgtgaaaaattttcaaaaaatggtttctttagacatgaaagctttcttttcaaagaaaacaaattgtgtgtgcctaaatgttctactacgaatttgcttgtttgtgaagcacatgaaagaggtttaatggggcattttggggtccaaaagactctataaacattacaggaacatttntattggcctcatatgaaa

SEQ ID NO: 90036 - DNA, 394 bp, Glycine max
agcttgattccagggagatacttgacattttcctgccaataacaaccagtaaattacttaatattgattgaaaaaatattgcatacacaatgagaatgaaatgcatggctagcctagcccttacattggttttgttgataacatctgtgagcttctccccacttggtaatttttcctcgaatacccacattctcacttcatctgattacatccgagaattcattaattaaaatgggaaaagtaacattcaaatggaaattttatttttttgctggtgatggaggagggggttgaaggagatatgattcctttggcaagggcaattcacacttgcatgttatcattcatctctctagcagcacaacttgggacatcaaattgaaaaattaagtgc

SEQ ID NO: 90037 - DNA, 463 bp, Glycine max
  unsure (1)..(463): unsure at all n locations
tgtaaaaataccatgggatctcatcgaagagccaaaaattttaatttcgatgattacaatnttttttattaaaatttgactaatacaattttaccgtgatttccaatatatttctaatataagttccattaaaacctttatattttgaattcttttactattggcctaagagcaattagattgaatcttaccatatgaatagaatttgaactcaacatataaagactaacaaatcaaacaaaaatttaagagttttgtgaggaataggggaatagggatggtagtttgatcctaatctaatggatacctacaaatttttcataatgtataagttgtttttttatctattaaatacatttgcactactaaaaatagtgtattccatgacgcgcatttaaagttgatcatcacanaactatctttgtttgggggcggtggtatttttgtaaatactggcaacatt

SEQ ID NO: 90038 - DNA, 389 bp, Glycine max
  unsure (1)..(389): unsure at all n locations
agcttgaggttggtcccttagntgatcgtgtcatctcaaaggggagttgngttgatccctcaacgaccgatccagacacgggtgacttagacaaatgcggggtgtacatcgaagaaaatcctccccgcctgggtgccctaggaagagtttataagggatccaccatcgttcacaacatccctttgtgcctgatcaaatgaaggtccgtgttgaagaaagtaaagatgctgatgctcccgttcctgacccactgatgaggttaacttaatgggacaaacacttaacaccttccttgcttggccgacacatctcgtgaagcgttatcaaaacaggtattttgctttcattaaatgcttcttttttcaattcaactgttcactgtaattgcc

SEQ ID NO: 90039 - DNA, 428 bp, Glycine max
  unsure (1)..(428): unsure at all n locations
tatagaaactcaaccgtgcagtgaactntcttgctacgggatttttggcatggattattggtatacactangactcacaggcangtgggacaaaagttgttcgtgcgaattgacaaacttcagttagggactcttcttatttcttactttaatatgaaaatccatcattatttttcggtaacaataaataagccatgattgttattactcgtttgagtttctaatttcttttaatcgacaatttaaaaaaccaaataagtataggataattaatttttttcctctggtgggtggatagcataatcaaactattatcacattttattttctaatcaaatattgattagagaaatcaatccagatattttggaaactaacataaaatattttatatatgatattctaaaatttcaattttattaataaca

SEQ ID NO: 90040 - DNA, 376 bp, Glycine max
actatggtgcacctactccttctattagggactcgttcatccctagctccctaatctgttgtttaactttgtcgcctattcagaaaggtatgaataagggcttttctatggggatatttgaatgaaattcatcatgagataattgactagaaatcgcctttggtttgatagactctccctaaacctgcaaatatattatgggataataagctgggcccatacgccgttgtatcctaggaagtacctctacgtaataagcttcgtcttaaaaagactggccatgacaggtttatcattactgcctttgacctttggcaaccgatattgtgttgtgggaggtaacttcgactggattaactcaacatcctctatttgc

SEQ ID NO: 90041 - DNA, 402 bp, Glycine max
agcatgtatcatcttccattgggatatattattaatgggtcatcaagcaacagtggaaatgaacctgtacgtgctaccagtgtggacgtctcattcaattcagtagagtctaaaattatcttcgctcaacctttatttgcttcaggttcacactagagcgatgatgccaagcccatggatggtccaaaacgatgctacaacttgcataagcgggttggtttgacaggatttaattgtcgatgccgtaacctcttctgttctgaacatcgctacttcagacaagcataattgcccatttgattatcgcactgctgcaagggatgccataacttaagcaaatccaactgtcaaggcctgagaaacttgttaatatctagatctgttgtctttaacgttcatgct

SEQ ID NO: 90042 - DNA, 453 bp, Glycine max
  unsure (1)..(453): unsure at all n locations
ctaacctagtcttgataacatgctgtgtatgcattcctttttttgttgttaaagntgcatnacatccatcctctatctgtgattcagctagacactcttacgcatcaagctatcaagattgtgtcaatgaggttgagcagggctgagccaccactgaggaaagaggtggtggaatacatgctacatgtagattcacacatgtggagtatgagaaggagcacagctaatttcttcagaataaccaaagttctatgagggttgttagcctttggaaggtggtttgatcagatatgcaattggaaaaaccctctcacatccatactcattcatatccttttcataatactggttctttatccagagctaatactttcaacaattttcctttaccattttttggttggaatttggaatttccgatggaggcctagacacccttcttatatggacaca

SEQ ID NO: 90043 - DNA, 391 bp, Glycine max
  unsure (1)..(391): unsure at all n locations
agcttccctttctttggccaatgctgtactcttttggcaacgatctccttggcaatttgatgctcaaaaacatcaatatctatcactccatcagtaggtctgcccagatatttgttaatcacagcatgggagaatctaacacactttcctctgacaaacactctttgataatcatcactttttctgtttgatatgtcagagggaatgttgacaatgaattccctgactaagccttcattagcatctcccaacttgctgacagtcttcagcagtccagcagccttgatgaggtccatgatctccttgcaatccaaggcagctcttcccagttctctntccaaggccagtcttcgttgatacacgaatttccacctttcagcattgccaatgg

SEQ ID NO: 90044 - DNA, 414 bp, Glycine max
  unsure (1)..(414): unsure at all n locations
gcgtctcaatatattattggcctgaatcagacatccgaatcataagttatggctggttgactatgccatgtgcttccatgtttaattatgagcatctcgatatattatgcgcctgaatcgggcatctgagtgaaaagttatgtcatatgagttagccgagagcttcgttgttcgatttcgagcgtctcgacatattattggcccgaatcggacatccgagtcaaaagctatggcagcttaaactttccatgtgcttccatgatgaattttgagcatctcgatatattatgcacctgaatcggacatctgagagagaagttatgccatatgagatagccgagagctttcgctgttcattatcgagcgactcgatatattattggcctgaatcggacatccgactcacnaagtatg

SEQ ID NO: 90045 - DNA, 387 bp, Glycine max
  unsure (1)..(387): unsure at all n locations
agcttagtgcatggagttntagggttttactttctgagctttgtattactgttcacgtgaatgcattttccattttctgctttcaattgcaatttcgtttctgttccttcttctgcctttagctacatttacgttttcttcctttaacttcatttatgttttctgcctttagtttcatttaatgtttctgcttttgttgaacttatggaaggctaaatttctaatgttgtttcccccagaggatgaagcataattctctttgaggttctaattttaatgttgttctcctatcggtttcccttcacctaataacccacatgcgttctgttaatctgtgcacacttcgtgttcgattaattgccattgtgcttaaattatgttcgtgct

SEQ ID NO: 90046 - DNA, 431 bp, Glycine max
  unsure (1)..(431): unsure at all n locations
nttagtgcagctaacataaccacattagcttgagttgaccaaaatatcccatggtattggcatcattactgttaaaagaagacacatttgctttcttgtttaaatgacttcattcccatgatagatatttgatagaacagaacatttgaagaataaatattattacagaatcaaacaaacattatttagttatacactatcagacaaaattctagacttatctgctcttatagtgacaaaaaatgcatgatatctatagcatatgtctagaggcaactaatagaaaatgccaaaacttatttatattttgtcccttgaggatgaggatgaggattgactattgagtaaagagatatctgctatacaacttgtacatcatagactcaggaatataataatcacatagaagagcacatagagttaanaagaaa

SEQ ID NO: 90047 - DNA, 402 bp, Glycine max
  unsure (1)..(402): unsure at all n locations
agcttcatccgatgcggtgctatgtgtgatcctgatgccggaaacgaagtcgcctctggttgtgcttgttgaggattatatttgttagctctgagatgtgctaaccgctccgataaggtctccatctttgcctcgactgtcgctgcaaatttcgcaaatagttcctccatttttttcgatgatagagcttttaatctcgtgccttccgccatatgtctgaacttgtgctcaatgaaagcactaatgataccttgctatcgagggcttgggaacttccatgcttcgcgcgtcctgtgaaagctcgaaggagctcgtagagagtaagagaaaacacgagtttagagagaaattgagagaagaaggaactcgagagggagaaaagaagtttctggattnttctat

SEQ ID NO: 90048 - DNA, 469 bp, Glycine max
  unsure (1)..(469): unsure at all n locations
tcctccgcgtnttcctccatacctagaacttcaaaccttctattcttactcaattcttcaccaaatcacgtcccgtaaagcccaatcttcctctttttcactcctctttcacttccaccgatccaaatccagaaaaacttcatcaaatggcagagccatcaaagaagagaaagggatcatcctccaccgctaccgctgcttgccatcgccgtcacggcccatccggagcacccacagcacctattccttcttctttgtcatctccaagatcatcaacactgttttcatccgatgatcaacgtctacggtacctttctcagttttcttctagaataatcttagaccctaagtacctagatgtagagttctttaatgatgaaacatttgattgctatcaagtgtttcaaaattctggtcttggtgatttcatgtcatttaaattgccatattatcctgaacttgaaaggtc

SEQ ID NO: 90049 - DNA, 408 bp, Glycine max
ttaatcacctgcagctgcgacttactatacctatagttcaaatttttttttaatcctacacttttttaaaggaaagtgatacgaagggataacatccatatactatccagaggatgtaaataacatgctgaaatttctagcaagcttatctaaaagattaatgtacaagtctaaattgttagtcgttttatccatcaagtaaaattttagtatggttaagagacatatcaaattcacatttatgaaaaagataataattaattttcaattcttaagtacttgtaccatctcacaatgacataaatcctataactcactacgtatattcatatttttgtgggacaacaaaagaaaatatataattagtaattttctgaggcccaccaaaagttaaaaattcctggcatg

SEQ ID NO: 90050 - DNA, 446 bp, Glycine max
  unsure (1)..(446): unsure at all n locations
tattggtgcaagaacctatntcaaggggtatgaaaaagttttttgataattttatgaaacagngaggtatctttccccaagagattccgaagggcatggaacacacactgccttaactgcagctggtaatgtggtgaaaaatgccaacctttatggccaggctggaggtacagcaagtggaatgaagtatacctctagaattgcagtttataaagtatgctggccaaaagggtgtgctaactctgacatattagccgcggtggaccaagcagtttctgatggggttgatgtattgtcactctctttagggagtgatcccaaacctttntatgatgatttaattgccgtagcttcatttggggcaaccaagaaaggggtgtttgttgcttgctccgcangcaataaagggccctctccatcaacagtttcaaatggtgctccatgga

SEQ ID NO: 90051 - DNA, 393 bp, Glycine max
agcttattcatatttcttcctaaaatagtgattattttatttatggagacaacaaatcaagggcacttgatcaacaagcccaacaagtgatattaaatgataccaaaatatcacttgccttttgattggatacttttggttatttttgcctatgatagaaaacttttgattgaatttttgatgattgttattgattgaattttgattggctttgatgaatgttcttgattgtgtttgatgattgttcttgaatgagtactaattggccttgatgattgttctttatgattgtttttgattgagttttgattgtccttgataattgtctttgagagttacgttgattattgataacttttgatgaatctttttatttggactaaatatgtattt

SEQ ID NO: 90052 - DNA, 440 bp, Glycine max
  unsure (1)..(440): unsure at all n locations
ntntcgcggaagagagaagacagaatgcttccgaaagaggtataaatgtttttatgtttttaaatgaagggcaaaatngacctttcaataaattgctgggtgcaccagcaatattgctgggtgcacctagcaaactccgaaacaaagtggtcgaaaatggagcccacacaatgcttttgcaaaatccctaatttcccctccgaacaaagatggccggccaatggcatatgaagagtcgcgcctcaccgtggcatagatcagcaatgtcatatggttcgagggtgccactgcatcggcaatggatgacttttctatatattaatgcgagcgtgaaatcaatgacgaagataggcttgtgctcttcgtcgtggctctcctttgcttcccccattgaaggatccccacgacccttagccaccacaacggtgatgttctgatga

SEQ ID NO: 90053 - DNA, 397 bp, Glycine max
  unsure (1)..(397): unsure at all n locations
agcttgtaattttttccttggcactttctggtaagatgatattnnccgtttcttggtaatttccttctcatctaaaaaggaatcataaccgatgccaatctgtctaatttctcatctctcttatcaaaaagacgaagtataattgatgcccctttgtcctgtattctattaaattccaagaaggggaggacagaaatttattcggtttgcgtgttaatattgtcatccttacattgcatattgngaaatcttttggcaaataaaccttattatatggttacaggtggatatatcatcactattgtgctatggtgatggccctcgtgagtctcacttgggagattaaaggacaaccagactgtgcaaaaaagcaggttagtttcctagccctgcgcat

SEQ ID NO: 90054 - DNA, 397 bp, Glycine max
tcaatatatagagataacgaacagactagactagagtcgttgacttgagtatgtttgagtggcttaaataataattcaggaatgaagactatagagaacaagtacaggatattcttggtacaaggtaaccgactcgatgggacttttcacatccattctttgttttatttttaaaagaattcacagcttcaacatgtacctaaccatgtgatagaaaatatcatttagtttagagagagagatgagcaaataattacagtagtatataaaaaaagaagaagagggacctgaagctgagtttgaagacctttaatatgttgaacggccaaatcgagcatgtcagcatagctggtttgctagaattaaagagaagaaggtgagttagacagaagagagt

SEQ ID NO: 90055 - DNA, 471 bp, Glycine max
  unsure (1)..(471): unsure at all n locations
tcaagcttgctgggggggcttctatggaagctggatctctgacgttttgtttttctttattggagacnngccaccacggagatgcagcggaagacaaacgaaaataggtgagaggaggcgccatccactacggaataagccatggaagaaggagcttcaccaccaagatgagccttggataagaagcttggaaaggatgcttcaatggaggacaagaaagatggagagaaatatatagtggggagcacgatattgaacgaagaaaaagggagagaagttgaactctgagttgtgtctcacaagactctcattcatcaaagttacaacaagtgttacacatgcctttatttatagactaagtagcttgcttgagaagctttcttgagaaaacttccttgagaagcttgtttgagaagacttgcttgagaagctagagcttagctacacacacccatcttataactaagctca

SEQ ID NO: 90056 - DNA, 461 bp, Glycine max
  unsure (1)..(461): unsure at all n locations
cttttgtaagaatggaggaggagaggaaaatagattttcatttttntntgcccaacgaactnttcttgacaaagccagtgttgaacaaaaactcttaaaaagatgttgagaatgattgaatgaatcaattatgaaattcgtgttatggtcacatatttatagccatttgatggctcttgaagaaatcatgttaaaagttatgactcttggcaatttcttcaaaactagtcactttaaaagttgtgactttctttaaaactagtcactttaaaagttgtgactcttgactatttctttaaaaaccagccactctaaaagtcgtgactttctttaaaactagtcactttaaaagttgtgactcttggctatttcttcaaaaaccagtcacttctaaaactggatctcttggaatttattttcaaaactagtcactagtaattgttaccataatggtgtaatcg

SEQ ID NO: 90057 - DNA, 396 bp, Glycine max
agcttgtcggcaaaaactttgatgacgaatgacaatatattgtaaccaacacgctcgaagaagtaccacaatgcggtggcataaacgagcaccgcaaccgctccacgccaattcatccacaacaccacatcaacaactaagcctttgccgagaacacgatgaaaggatgagaaactaaagcaatgccaagattgtcagaagaatgaagaatgaaggggttagaatcatcaatgacagccatggccatgagagaaaaaaaaaaagagccaaccagacatccgaaaagtccccataaaaaatgattcataaggggatgacttatccagttatataagaacttaatcatcaatgatatccatggccatgagagaaaaaaaagaatcaaccaggcatccg

SEQ ID NO: 90058 - DNA, 468 bp, Glycine max
  unsure (1)..(468): unsure at all n locations
tcatattcaaaacaatntcccgactctaaatatttttgttttataatatgatgagnacaaatttgttttttaaacagacttttacttcaaccctcacaaattnttaacaccaacaaaacatcaaatacaaagctaacttaattataaaaaaattataataaaaacttcatattcaaactttattccggcgtaaaaaaaattacttcaaaaaatttaatttcatgccacacacatttgattgtgaacttcaaaccttgaaggctgacttgaagaataaaaggttcaacaattatcagaaaacggagagcaaacaattttaaaaactgagcaatttttaaaatgcacagcaaatgtgggagaagcgcctatntaaacctgatgatctcgccagtgccactggctatatcagtgatctcgccagtagcactggctatntccttgtcatctcgccaataccactagctatat

SEQ ID NO: 90059 - DNA, 385 bp, Glycine max
taacttgtgatattataactatatatttgttttttaccatcacccccacctgttaaacaatgcgataattcactcctcatgcgttgtacatgtttggatcacgtgatgatcttaaaccttgtgtttgtgagagcaaatgactacgtgaaatactttaataaaccttgtgatggaggactttgagacacaattttttgataggatgtaacattggaacaagagcttttattttaattgcatgacagactaaacatgtcattttactttatttgataaactcgaacagtcttgtttaagacataaatatttctaacaaatcttattcggtaacaagtgaaacgaatgtgaacattacccacgtggactgatgtaccattctattgaa

SEQ ID NO: 90060 - DNA, 458 bp, Glycine max
  unsure (1)..(458): unsure at all n locations
tgaatagcagatccagtgcactcagcataatcatgttcattcctttgttccctanaaaatttgtgggattgagtaactaanaagtaatgacaaaattgattagtttattaattaatggatgcctttttttatcggttaatgaatatgtacttgttgcatgcattactctaagtaagttggcataggaaaaaataaataaaaaagaagcacaatcattactctaagtaataattatgtccacttcaagatggagttggatggaattatggaaaacaaagtaagaaaagatcaagagaaaataaagtgatggatataatattgtaatgaaaagattaaaaagagaaaataatgcaaataatatgaaagtgtaaatagaagtatcanggttctaaggatattaaggcccttctccaccccactaagcatcaacaaaaccactcctttctttatccaagaat

SEQ ID NO: 90061 - DNA, 399 bp, Glycine max
agcttgctttaagttcaatgacccatagattatcatcaaccctcatcacgttcctagctctgaggtttaatgggaattttaccacagttcaagataaagaaagcattttccaataacaatctcatccaagaatcaagctatgagtgaccaatccataacaagcatgaagtatagaagtaaaagctaacattgaagaacaagatgaatatataacactatttcaaaagagatacatgaaagcataaggttcgaatacaatctaaccccaacaatgaagagtttagctattcatctccatgaataacatccaaaagcaagaaagatggaagaacaatggaagtagagaattggagataataaatttagtaaaggagatgttttttacaaagtaaggaacgt

SEQ ID NO: 90062 - DNA, 454 bp, Glycine max
  unsure (1)..(454): unsure at all n locations
ntacttgtctctaaagaccttgagttgnaaagtccttggatttatgttgcttgcttctcatgttattcacattgttggccctatctaccatgctcatagtaatcctaatgcctctctagcaagcgctcacaagtatgtgctttgtgtttctattcttcatcatctttgaattaacaaatgtttatatattttattttttgttttggttcattgtcattacacttgattgagacatttgtattttctaactgattcccatgaatacattgagggttgcaagtgaaaacaacattcagtatatagcatttccaaccatatcatgtggtgtctataggtagtttactacttggatttggcaagcctccatatttggtagtcagtcaagtagactactcggatntagacaatctgattgatttaattaaggtaaaaggaaaactctatcttctagtag

SEQ ID NO: 90063 - DNA, 400 bp, Glycine max
agcttgactatgaaataagctaaacaatgcttttatgaaggtcatcggtcattttcattggcctaaattaaatcagacttatttgatatttactcttgtattttcaatcatgtgttgctgactaatgtttttttgtctgcactctgcagatttctgttgacctcactatctagtgtagacgtacctgtcttatgctctcctgtgccatttcaaaattctgctttgtcttctcttgacgtatgtccttggctcaatatagattttgtttatttgtatggtaacttttaaaaacctttgaccaactttgtgcatgtggtgactagctagatcaagtttatattgagctcaagttagactgtctcttctgctctcatgtttgctttgttgtatggtaactctt

SEQ ID NO: 90064 - DNA, 472 bp, Glycine max
  unsure (1)..(472): unsure at all n locations
ggacacataaaactcagcttgatgggttgaaagaaatacatgtnngctttatctttatggggagaatgggaatgtatgtatacatgattttgatgatgtcaaaagaagaatcaatcaaggctcattttgcttcaagattaatacaagattgtttcaacaaaaaaagccttgattcaagatttcttcaagatcaagccttgcctcacaatgaaaggtttcaagtcattcaaggcacatgtaatcgattaccaatacatgtaatcgattaccaatggtttgaaagtgtgtaatcgattacacatcatatgtaatcaattaccagagactctgaacattngggaattcaaatttaaatgaagggtcacaactgttcaagaaaaacaattgtgtaatcgattaccctaattctgtaatcgattaccagagaagatttcaaggaatatcgccaacagtcacatcttttcattagatt

SEQ ID NO: 90065 - DNA, 393 bp, Glycine max
agcttgaagatagttataccacgccatcttgtgcttagcacgtatgcatcttgttaattgaggaagttgtctcttctgcgctaagcgcaagattggcgctttgccaaatatcacttactcgtgctaagcgccagaatggcgcttagcacaacgtcaaggtcagaaagccccttttaagcctaatttgcacagaattgaaatggggcgaaaagaactggtcactactcagaggcctgaagagtgtgaatttcagagagcatttagcagagcaaggggccaagtcttcatcttttaaggagattaatgattttttgagtgattgtgagattcctagaggtccatgtcataacctctaggaatatcgcatggaccaacaagacttgctcttgattt

SEQ ID NO: 90066 - DNA, 394 bp, Glycine max
  unsure (1)..(394): unsure at all n locations
ggaatttgacacaacgcaactgtttaatagacatcaagtgagccaccccattagttaagcatttttagctagaagcacgccttaaaagaaaactgatagcagttaacctgccaaaaacagaagcacagaatttaagggaaggcaattanttttgggtgggactgtgggagagaccaagttcttgagtactacttatgggaagacaccatngtatatcattcttgctctttctgatcccagatacccatagatctagtgttggaggacgaatattcaacaaaatttccaactgtcagttatatgttgaaccaatatctatcaacaatttacgacaaattgtcatgcttgaaagtatccaaaattataattaggatagcacgaaacaacatagttc

SEQ ID NO: 90067 - DNA, 385 bp, Glycine max
  unsure (1)..(385): unsure at all n locations
agcnttgttgaggtccatgtaatccatgatatttttccatttgccattagatttcttgaccatgacaacatttgatagccatgttgtgtatcatacttctcggatgaactttgcagtgattagctttctgacttcttcttgaatggtaattcaccttcttctactttcgtcttcttcattgctaccaatttagcatctcgacatattgacaatacattgaaatgatagtttggatctatgccagacatatcgactaacaaccatgcaaatagattagcattagcattcaatactcgaactacaagtgattgctcaatttctttaaatagagctcctagaaaggttgcttgcctctattccaatcctagtttgtggggtctgggtt

SEQ ID NO: 90068 - DNA, 344 bp, Glycine max
  unsure (1)..(344): unsure at all n locations
tggtagagttcacggagaaccatggaatggttgtgctattatatattcctacacccatcgatgtgaggagaagtgccctagaaaggaggggcagaagcatgggccagtcgcaaggactgcaaatgaaaggggttcccttgtgtcacatcaacgaaagctttgtcagcacgggttggatgtgtgaaggtcangtcaccatgacacatgaagaggcccctcaagagcaaccaaaccgggtgcattcgtgccctcctgagttcgagttgggaaactggcgaattgtcgaacaacctggaatttctgtgacaaacacaatgtaattcgttagtcctaaccctattgtt

SEQ ID NO: 90069 - DNA, 372 bp, Glycine max
  unsure (1)..(372): unsure at all n locations
acatcaatggtaagaagtggctgcaagaaattaagatacaatcacatcagaatttaccagggaaatgaactcattatacccaactatcattccatatttcaagataagtaaggaccataatatattactcttacataatagcctcccaaacaggggggtcacagattgggacatctggacccaactacctggtggccctatttggggaaagaagaattgcttggttttccccaataaaattggctggtctatctatatttcatccaccaaaaagtgaatgaacaagaaagagatgtgactctctgtctggataaaattcttgataagcacttataagtgaataacataaaanaagtttaaataaaataaacc

SEQ ID NO: 90070 - DNA, 352 bp, Glycine max
tgcttgagaaatcatccattactatttttctatttaacttgagaaaccttcccttcacatgactgttgagaacaaaccctttagaagaacacctttagttatctgaacttagctactaatggtttctttgagtgtgctgtaaaagacatgactaaattcagaaacacagagaatgtgtgaaacataagcctacagttgaagttctctaaacataaaatgcatattcagactaacaccactagaaggagagttgttcaaaaccaagaaagacaatcatgttgtctatgccgaaaagtccaaatatcaaaagttgtatatgatcagaagcatcatgctgggagtagctttagtt

SEQ ID NO: 90071 - DNA, 265 bp, Glycine max
acaattatgcactttgtacacaacaaccacttataggaatggccaagcagggaggacaacgggtaggcgaaatggaggtttgggccttggaaggatttggtgttgctcatattttacaagagatgcttacttataaatctgatcatattaaaactcgccaagaagtactcgggactacgatcattggaggaacaatacctaaacctacagatgctccagaatcttttagattgctagttcgagaattacgatctttagctatgga

SEQ ID NO: 90072 - DNA, 411 bp, Glycine max
ctgaggcatgcaagcttatgcacggaaaatgtaataatgaaattgatatgctttataaaacaccacatcctaggttaccatgcattacgtaccatgttcaactattttgtttaaaacgaaacgggtgtatgatcccaacatgggtggcttgcggtggctaacacatgaaacaaagaatgtagagtgaagtttcacgcttccccctgtattgttattgttctgtaaaggaaaacgccaggatgagcacacatgaaaacaaatggtatgcaattctgcagactataacggttgttgaacgcatatgcatgataatgccatgactcatgcaaaatgagatgctggaatatgataacggacaaatgctggataggtcaattatgatgctatgaagagaggcttatgcgatgcatg

SEQ ID NO: 90073 - DNA, 371 bp, Glycine max
  unsure (1)..(371): unsure at all n locations
tctatcctttcatatgtgcatcatgtatcatcatgtaagagtaaaaataaagtttctaatttctttagagtttaaaattatctgttttaatcgattacaagctaaacctaatcgattacacaagtgtttgtagcttgtagagaagtttctcgtttcggtttaatcgcgtaccaggtgatcataatcaattacttctcttttaaaagtgtttttggaagtgaacaagaacactntaatcgattacatcaagagtctaataaattacattgttcttgaaagtttttcaggtttaggaagaacactttcatgataattgttattcaagagtacaaaatgcatcataaagtagatgagaagtagcaatgtgcctc

SEQ ID NO: 90074 - DNA, 393 bp, Glycine max
agcttgctattatgagtgggaataagggaatatatattctattttagtgagagaaataaaaaggttgtggcgatgtgaacttctaagagagtattggaaagaaatgtacaagacaaacgaattttgggctctttgtgctctatatttgacggcccaaagtgccctaaaaccttattaccattcgatcaaatttaaattagaattagatataaatgattttttttcctttctaaaatctaatgcaatcttaaataataattgttataattaattaattaaatccagaataaaatatgttcttcattcttataaaataaaaatgttgaaattcgctttaaaaattttagtgttttcgtcttacaaaattgaataggcacttttactaaatgtgat

SEQ ID NO: 90075 - DNA, 373 bp, Glycine max
  unsure (1)..(373): unsure at all n locations
atcttaaattatagatatcaagtaattcttgttggactctaattaagttgaaccttctttagctttcgttttgctaaattaaaagactgattaaacgtgaaattagttaaaagatgtatttaaaaataaaatgtttgcctcgatttcattttgaaatcgtaatcaaattatataaatgaaaatggccaattaatccatttgatgcggtaagcatgcagaggtcatggtattaacgtgatgatgtacgtactgtaatcataaacaaatcgctcactcctccctctttccctgtttcttcctccatctttntctcttatctttctctgtctttctaaagcaaaccctaaactctattctcagtttgctatctctc

SEQ ID NO: 90076 - DNA, 393 bp, Glycine max
gctgcacttattgctaaatgactaaatttgtttatttctttgatatatgaaataaacatgttacttccaaagccattcaagttacataattaaccttttttcagataataatgataattaatatctaatcatcatcaatgagtcatgaacacttaataccacatccaatctaaaatcttaacacactaaatacttcattgttgatagtgaactattcaaataaactataagtgacattaattcttggtcgtcttctctaagaatgtattttgagaaaattaaatttaacttttctctcacaaactcaacgtgtgttatcaaatgatacacctattagattgcactgttccagactagtttaattataaatacaaaatccttcatatttttttt

SEQ ID NO: 90077 - DNA, 482 bp, Glycine max
  unsure (1)..(482): unsure at all n locations
gacactatagaactactaacgcttctagccaaatggacttaccttgaattaattcctttgtttttctctttgagcctatgttcccctttctttgttttgaagctcattacaagccttaagtggaaaaccataatatcaccttacccttaatgaattttggagctttggaattgttttgggaataagtgtggggggtatgtttcattggaagatataattttttgccatgcttaatattttattttggccatgcttgatgtatatatatattgcctagttcttgctttaatcttcaaatatgtattgtttaaaaaaaatgaaaaaacaaatttcaattgctgcaaattccgcaaattcctattgttaaaaaaaaagataaaaatagagagaagtgaagttgaataaatgaggtcttgttatgaggactttatttgtgagccttggttgattntgttgatattagaagggttgggtttactact

SEQ ID NO: 90078 - DNA, 377 bp, Glycine max
agcttcctcggtacaaacgctgcccatccttcgttaaccgttggatcctctcaaaacttggcttgctactttaaaagacacttgtccatgatctgtcaggtgggatctttgagaagatgtttggagtcttagaagcttccggtccccagagcatttcttatttaaacattttagcctttgctttcgtgtatttgaaagaaaaacgtcatttcttcttctttctttcttccaaagcccttactaaagtttctagaactttttccatgacacacagcgctccattaggcaccacaaaccatcattgttctccatcgataacccacaccgtgaggaacccttctcctgagcggaatcttccaacttggcttgcgggtccc

SEQ ID NO: 90079 - DNA, 451 bp, Glycine max
  unsure (1)..(451): unsure at all n locations
gcccggacaatagtacatgaccctaaagcacattatattctttattatgatggntaccaaatatcatcaaaataaacaactacaaatctacctatgaaatcccttaagacatgatgcataagcctcataaaggtgcttggtgcattagtgagcccaaaaggcatcactagccattcatacaaaccaaacttggtcttgaaagcagttttccactcatcaccctctntcatcctgatttggtgatatccacttttaagattaatttttgaaaagatgttgtgatgtaagctccattggagcttgtacgcctangatcttcttcatcaatggattcctttgcttcttgaaagatgaatggcagcggaatggagaaggaagagagagaggagacgccatttcaaggagaagatgagtctagaaaaagctcaccaccataggaggccatggataa

SEQ ID NO: 90080 - DNA, 453 bp, Glycine max
  unsure (1)..(453): unsure at all n locations
cgaaacactagctctagaaaagacaccgcattganatagatttttcaccacnccnaacggcgcatcaaagtaacatcgggaaaaaaaaatcgtataccgacaaaaaaataataccaagaattatgcttctttctgttagatatatttaacgttaaaatgagctaatgattccatacaccaattgataaatcattaacggaacgtttattgatcttatatatgctacctccaggctgtctataatgggtttgaatattataactagcgcaccccattgcccagaggttcttcgctatgcgaacgtatgagggaaggatattgtatgcggtcttacccttaaatattattaataaatcacaagtagaataaaagaattcactaaaaatatccagtcatggttataaaactgatgattaatctaacaaataaaatataaaagctttatacaaaaat

SEQ ID NO: 90081 - DNA, 392 bp, Glycine max
  unsure (1)..(392): unsure at all n locations
agcttgcttctacaaatattanattatatgttgtctacactaaaaaaaatctacatctgncactgactataatgattggaactgcacatggacttatgttttctttgtaccaccctttatgcatcaaatcttcaagttgattttgaatctccttggactcttaaggatcattcctatatgctagcctattatgcattgaagctcctggaatgagatcaatttgatgttctatgcctatcataggaggtcgaccacgatactcctctttgggaaagacattttcaaactcatgtaacaaagaagaaatcttattgggaagagacttgcaacctttaaatgactatctttattgaaaagtaacagcattggtttttcagatgcatagtcttttt

SEQ ID NO: 90082 - DNA, 452 bp, Glycine max
accttagaatactacgcttgagccaaatcctgactaccataaaccttgtctcattgtgtttgtcaatccttaccttcggaagcgaaaagaatagataggaaatttccaatcaaagaataggaaagaaggaagatttccaatcaaagagaaagcaaaaaaagaaaagaaggaaaattcccaatcatagagtgggagaaagcaaaaagataagaaagaaaatttccaatcaaagaatgggagaaagttaaaaaggaagaataagaaggaaagaaagctcctgatcagggatcgaaagataacagaagaaatgtgcagaaaggtctttggaccggacaatatctcaataatacagaattgtcaccaaatgaacaaaaagaatgaaaggaaaccaccacctataatggtcttcttcctttgattaccaaccaaaatcccgtgcgctagcgactttt

SEQ ID NO: 90083 - DNA, 393 bp, Glycine max
agcttacttgtagagattcctttatgagattgaccgatactagctgtgttgatccattgcgatagtaccgcggctattgcaaaaattgagaaccgttattacaatggtaagaaacgacagatacattgtaagcacaacactgttagagaattaatctcaacaggagctgttagagtggatcacgtacgcactgatgataatttaacagatcctgtgatgaaaggattagctagagagaaagtccataacacttctataagaatgggactattgcccttactgtgatgatcattcatgatggtaacccgacctaaatgatcggagatcccaagaactaggttcaatgggtaataacaagttatgacgtgatatgcgatgaacatgttgtattag

SEQ ID NO: 90084 - DNA, 465 bp, Glycine max
  unsure (1)..(465): unsure at all n locations
tatcccatgcttctntggccgtcgttgcgtnggatatcttctcatatgtatcttcatccaccgattgataaatgagaaagagagctttcttgtctctctttcttgactccttcaacgtctcctttacaccttggcttagcgaggcttcatcttgctcctcgaagccattctctacgatatcccacacatcttgagctcctagtagcgccttcatcttgatactccaattatcatagttgttctttgtgagcatcggcatttggaaaggaaaacctccattcgccatcttttgaggatcttgaagctctgataccaatttgttggaaataaggctttntatgtttaggaaaagtgtttaggaatattggagactctgaatagaaacttgataggaaggagaattctttatggaggagaaaactctgtatttttgctcgatacaaatgtgtaggattacatctctat

SEQ ID NO: 90085 - DNA, 393 bp, Glycine max
agcttatgaagccatgaacaacgctggatatcttgattccgacatgattgttattctaaatgacaacaagcaggtctccctaccaactgctaatctcgatggtcccataccacctgtaggtgctttgagtagtgctcttactaagttacgatcaaacagacctcttagagaactcagagaggttgctaacgtgagcaatacaattctcatgtctctctatgaaggacttgcacagttattaaatgagatttttgcagggagtcactaaacaaattggcggcccaatgcatgagttatctgcaaaagttgatgaatatgcgcgtggcatgatcagcggttctggatcaacactattcgaagagctaggactttactacataggtcctgttgatg

SEQ ID NO: 90086 - DNA, 352 bp, Glycine max
  unsure (1)..(352): unsure at all n locations
ctatttcattggagtcctattttgcccacacacaaccttcttcttgaaccactaataatgtttattggggctagttcaagaagcttctattctcgacgattggtctttactaaaaaaaacactgcttctttaanagaaaatcccacattcaattattcctttcaccttcaacaattaaaaaagaaacccacaaatatctctccaatacatgactatatttgggtaaatataaaagctctatacattggatcatagaagcaaaaaccacantgagagagaaacggctttgatttaaggtatggacaatctgcacttaaacttctattacatcacttaatattaaaatacaccg

SEQ ID NO: 90087 - DNA, 383 bp, Glycine max
agcttcaagtcaaatatccaactagaagattatgttcgaagactcccaagagcgcaatgggtgggctaggaatgaacaaacattttgtgataatcatggttttccttaagactttagagaatgatctccctatttatgtatgattcaatatatcattcaaagtaccaactcataataagattgcaacataaagaagaggttaattcatgtactagttggtctactcctcaagatgtaactcttaagctaaattgaaaaggtcattctctttcaattcacaaagcctattgtagtgtctattccttgaccactatgagacattcatgatgggattcactcaatatcccaaacaacaaattaggaaatattgttttgagaaattt

SEQ ID NO: 90088 - DNA, 436 bp, Glycine max
cgcttcatcctcttagtgctggaccttgtcatatgaccttgtcataagaccttcaatcccatgttaaggatcattatacaggctggttgcacctctatcaaatggtttccaccaaaaatatttcaatcggagaagtagatcgatgatttagatcttgcacatatatagtaagttgaagagttttctatccattctagttgtagtaggattatagacattcagtgcatctttctgtcaatgtttctattaattcttcttgaataaaattgatacccaatcagctaagtgataaatgtacattatgtaaggttagctagaatcaatgtcatgaaataagacattatttcatttataagataataagagaagaaatgtgttcagaaaataataaacagcatcatattgtattcaaaatataaaaattgcatcatattgt

SEQ ID NO: 90089 - DNA, 419 bp, Glycine max
  unsure (1)..(419): unsure at all n locations
atcctcagagtcacctgccgcatgcaagcttgtgaagtgctgattntcatcctctcgctaaaccaatcttctggcttagcaagcaatccgccaagcgcaacactccacgactgagcgtgaggaagaatctggaaaaaagatgaattgtgcatgttcactgagtgaagggtcatcccgctaagcacaccgcttcagtccatctgctgagtgagaaaagcgcatgctaagccaaaattcactaatgcgcgctaagcggttcagagttgtattaagcgcgcaagcacaaacaaagccacctatttaagcctgaaatcagattttagaggggggtttggccttttcttgaagcttttgcatgcctagatatttctagagagagaaaggtccaagttccagagagttttgagattttgttgtgc

SEQ ID NO: 90090 - DNA, 455 bp, Glycine max
  unsure (1)..(455): unsure at all n locations
gagatctangaaggataaagcggctgaaggatctatttccgctctctaatatgacagccaccgctttatgagcgctgaacaccagcagcgctttgaggccatcaagggatggtcatttctctgggagcgacgcgtccagctcagggacgacgagtataccgatttccaggaagagatagttcgccggcggtgggcatcactggtcacccncatggccaagttcgatccagacatagtcctcgaattttatgccaatgcttggccaacagaggagggcgtgcgagatatgagatcctgggtgaggggtcaatggatcccgtttgatgcagatgctatcggccagctcctgngatatcctttagtgctggaagagggtcangagtgcgagtatggctagaggaggaaccggtccgatgggttcgatgaagaggtcatcgcccatttgctatgtatac

SEQ ID NO: 90091 - DNA, 401 bp, Glycine max
  unsure (1)..(401): unsure at all n locations
agcttgaagaaacatcctttgatgactctattcttctctatccacttgacctcattgatgaggttgaccatcgctattctttcataactctaacatcgtgttgcaattctaccaccactcttcccgtattaaatgtaacctttaattaatactagagaacatacttaaaacatgcttggtaatgaaaaactacaactaatactttttttaaaaaaagaattaaaacanctttttaaccttgaaaaagaggggtattagcctagatccttgctatccaaggtgtggtctggaggtggaaacactctcacatgcattgctgacgtgtgaggaaatcatgagatggtggttagcatgtccccttacaacaagggtggaggagaatgaggaaattgacatattgg

SEQ ID NO: 90092 - DNA, 464 bp, Glycine max
  unsure (1)..(464): unsure at all n locations
ctaagcttaacttagcttatggctttgaacttgaacccaaatactcttttacatnaccntgtgcttggttctgtggcttcagttgtccataagtcatcaagaagaggtgtggaaatgtagctccaaagtaagccccatcaatgtctagatagacttaaggaaatgttggagtaaaatttaaaccacaattacatatagcccaaacagagtgacatatatcataccacaagtcatatattcatcagattttaaaagatcaacgatctacacgaagaatgcagaagccaaacaaataacaaagtaatgtcaggcaatttaaaaataaactgaaatatcagaatgatcaaacttccttaacttcgagagagaaagaaaggttaaagacaactgctgctccaaagattttacaattccaaaaagttgtacacttcctgcagcattctctgaacatatgtatgccaacc

SEQ ID NO: 90093 - DNA, 404 bp, Glycine max
  unsure (1)..(404): unsure at all n locations
agcttccacaacatccaagtaattcaacatccactcatcacaaactaacaaaaccaagcaaaacagggcaaaggcagaaaactctgcccaaaactcaaaccaaaaatcacagctttttctcacttaaagaccccagtaacatttccttcgttccaattcattcaccgttggatcgacttcgaaaatttactggaagtccctagtacataagtctacattttgaccgtngggatctgctagaaaatatccaaaaccccatatgtactacccttttcacaaccaaccatacacaagcatttttctgcacttatacaaaattctgctgcacatttcaacagcaaaattctgcataaagtgcagatttcgaaaaccactcttgccttcatccaattttgcccaaatcg

SEQ ID NO: 90094 - DNA, 456 bp, Glycine max
tcaggttgctcattgactccagattgctgcaaagaaagacatagatctgtatggtgatctgcagaagaacatagaccacagactcttgcaacaggtgtagatttctgattcatggcaagctaagttactaggttgaccaaggcatcaagttctccttcaagttttttattttcagtagataaagatgaattcgtggccacctcatggactcctctaatgacaatagcatcatttcttgcactgaattgttgggagttggagccatcttctcaatcaaattcctagcctcaacaggggtcatatcaccaagagctccaccactggcagcatcaatcgtactcctatccttgttgctaagtccctcatagaaatatcgaagaaggagttgctcagaaatctggtggtgaggacagcttgcacacaatttcttgaatctttcccagtactcacacaagc

SEQ ID NO: 90095 - DNA, 116 bp, Glycine max
agcttcaaaaggagccataccaatactggcttggttactattgttgtaagtaaactcaatcaatggcaaacaatccatccagctaccttgttgctctataatacacacccgtagta

SEQ ID NO: 90096 - DNA, 480 bp, Glycine max
  unsure (1)..(480): unsure at all n locations
tgacctatgaaactcagcttctgaggaagcctcttaatgaagcttctagagaaagctcttgattctgtctctgtaaaacgcttcctggccttcattaaccgttggatcgtctcgaaatgtggtctgcaacttcacaaaacacgcttccatgatctgacccgtgggatctttgagaaaatgtctggagtgtgctaaaagcctcttaatgaagcttctggaggaagcctcttaatgaagcttctagagaanactacatgaagctgcctcggtagaaacgctgcccagccttcgttaagtgttggatcctctcgaaatttggttttcaacttcacaagacactttaccatgatttaaccgctgggatctttgagaaaatatctggagtgtgctagaagcttccgttcccgagagcatctcttatttaagcatttcagcctctgctttcttgtagcttaagaaaaatgccatttcttcttcttt

SEQ ID NO: 90097 - DNA, 378 bp, Glycine max
agcttgtcaaaacccagtgaaaacatgcccctggtccaaggctcgctaaacccaaggttcacccttggtgagcccttctttggctaagttccatatccacaagaactcaatgtactcaaggtctaccctcaacaatcttttctattattatcttttatctgcgcacgaatacaattcttataaaaaccaaggtcccttcttgttaccaaaaacccaaggtctacccttggtattcacgcctacaaaacccaaggcaccccgttggtctgctcattcgcagcaactacaaatgccaaagtccaaggtctagggttcatgagtcaagaccacctacccctaaactggctggcaagggcttaaccaagtgcagatcaaact

SEQ ID NO: 90098 - DNA, 470 bp, Glycine max
  unsure (1)..(470): unsure at all n locations
tatcgntgtgtgcggcacatgtggttgtgaccataacaattctttattaactatgcttgtgaccataacaatcctaaattaactatgccagagagaaaatggcgtctaagtgtatcctcctcttggagacattgtggatagagtgggcacaagactaaagatacgatctcatccttcttttacttttgttgagttatatatagaagtgatcaacttctggttctcttttttatatttttttcagaagaattttacggtatcaagatttatcttcttttaaagggttgaggtgccgcgaggtattaaatttgatttagttatgttttacaaaagcagggtttatatactaagttctaagatttatttattatgtttggagtcaccaaaaattcatacaacattntcatcaataaactaattaaagagnttttaaattaaattaatcaaattcttaactttgataggtacgt

SEQ ID NO: 90099 - DNA, 397 bp, Glycine max
agcttctatagaaggatcgttcctattttctctactatcgcatcacctctcaatgagctggtgaagaagaatgtggcatttacctggggtgaaaaacaagagcacgcctttgctttgctcaaagaaaagcttactaaggcacctgttctagctcttcctgacttttctaaaacttttgagctacaatgtgacgcctccggagtgggagttggagctgtattgttacaaggtgggcaccctattgcttattttagtgaaaaacttcatagtgccaccctctacctccccacctatgataaagagctttatgccttaataagagccctccatacttgggaacattaccttgtttccaacgacattgtcatttatgtgtgatcaataattcacttagtac

SEQ ID NO: 90100 - DNA, 461 bp, Glycine max
  unsure (1)..(461): unsure at all n locations
tgtccataagctcaatntcatagtagtaggggatgtgtttgctttcctacccctcaagggcattggatagaagactccaagaagattgggccagagatgcaagagaaggccctatggttctcatgatccttatggtggatttcgggcccatgggctaagtatgagcccacttatcttcgtacatattagattaaggtttaattattttttggccttgtatttacggctccataatgtaggtagagtatcctagaaatgtaggatttttcagcccttgtattttagggcacctagactagtttttgtattaggggtagccttataatttcacatgcattaagtgaatatttgatgtgtgtgttgggaaataaatttaattgaattgggagaagcctaatccaattaaattttagaggggaaggtgagcattntcttgctacaccccagtttctagctacacc

SEQ ID NO: 90101 - DNA, 397 bp, Glycine max
agcttgtgatatttttactatatatgtgtgtgtcttcttttatctctacctgtttaaaaatgtgataattcactcctcatgtgttgtttatgtttggatcatgtgatgatcttaaaccttgtgtttgtgagagcaaatgactaggtgaattactttaagaaaccttgtgatggaggactctgagacacaatattttgataggatgtaacattggaacaagagtttttattttaattgcatgacgtatcaaacatgtcattttactttatttgataaacttgaacagtcttgttttaagtcataaatatttctaagaaattttatttggtaacaagtgaagcgaatgtgaacattacccacgtggactgatttacgattttattgaataaaattgatt

SEQ ID NO: 90102 - DNA, 466 bp, Glycine max
ggaatagcagatccagtgcactcagcataatcatgttcattctctatgttccctaaaaaatttgtgggattgagtaactaaaaagtaatgacaaaattgattagtttattaattaatggatgcctttttttatcggttaatgaatatgtacttgttgcatgcattactctaagtaagttggcataggaaaaaataaataaaaaagaagcacaatcattactctaagtaataattatgtccacttcaagatggagttggatggaattatggaaaacaaagtaagaaaagatcaagagaaaataaagtgatggatataatattgtaatgaaaagattaaaaagagaaaataatgcaaataatatgaaagtgtaaatagaagtatcagggttctaaggatattaaggcccttctccaccccactaagcatcaacaaaaccactcctttctttatccaagaatgcccata

SEQ ID NO: 90103 - DNA, 399 bp, Glycine max
agcttagttcctagcttagcccatatatgttttctagaagtggctaaggaacttagcatctttatctgacacaatggtcctaggcaaaccatggagtctcacaacttccctaaaaaagagttttgagatatgggaagcatcatccaccttgtggcatggtataaagtgtgccatcttgctaaacctatccaccactacaaagatagagtctacacctctttgggttctagggagcccaaggacaaagtccatactaatgtctacccaaggtgcagatggaatgggtaagggtgtgtatagcccatgaggcatcaccctagacttggcttgtaaacaagccacacacctagtgcaatgcttatggacatctttcttcatatggggccaagagaacttttc

SEQ ID NO: 90104 - DNA, 464 bp, Glycine max
  unsure (1)..(464): unsure at all n locations
tagagaggaagcttcaatgaaggaagagaatgatatagagttgtggcatgggaattgaaggagattagagagagaagttgaactttgaagtgagtctcacaagtttctcatttatcaaagttataacaagtgttacacatgtttttatttatagcctagcacatgggaagcttccttgagaagcaaggaaggtagcttccttgagaagctagaggaagaaagcttccctgagaagctagtggggttactcacactcctccaatagctaagctctcctccatgccaaaaatacatgaaaatacaatgggaaacttccttgagaagcaaggaaggtagcttccttgggaagcaagcaagaaaacttccctgagaagctaggggggctactcacacccctcaaatagctaagctcacccncatgacaaaatacatganaatacaaaaaaaaagtccatactacaaag

SEQ ID NO: 90105 - DNA, 393 bp, Glycine max
agcttattgaacctagaatacaatacttctttattggagataacagctaactgtccaattgaaaatggctactacttaacgaataaaacagaaatagttacaattaaaggtgcaacacaacctatgttaatgaaccaccaaactggatgttcccctctatgtgacttgacactctaccatattacaaaagagtggatgaccataacaaaatacaaaaatactggactagacgaccaaaacaaaatacaagaatactcagttatattattctttgttacttctttaatatatatcaagtcaaaccagttcaactagtaagactctgattcaaccaatgacccattaacgcagcgcctcagccggtttaatgactgattttattcttaaaacatt

SEQ ID NO: 90106 - DNA, 459 bp, Glycine max
tggaatccctatctaacacaatgctcctaggctattcattttactttctacctctttgaagacctatcaacaaccaaaaaaatcaaattcttgcccctcttggaccttggaataccaagtacaaaattcatggaaatgtaagtccaaggggaggtatgaattggcaatggagtatacaaaccatgatgcatgactttggacttcgccttatgacacacaatgcaattagaacaaaacttgataacattatgcttcattttaagccaaaagaaatgttcatgcaaaatgttcgaagtcttttcaactccaaaatgtcctattaatccccctttatgagcttcacaaattatgagtacacacaagaacataatttgttatttttaaacaagtattagtcatgcctaaagaaacattgatgagaccctgtctcacacaaatcaattaatgtagagaagtcat

SEQ ID NO: 90107 - DNA, 395 bp, Glycine max
  unsure (1)..(395): unsure at all n locations
agcttacataaacattcattagtccaacacacactcaacaaatagtcatcatccgtccatagattcaatcaatcatgctcaatatgatgcatgcacctgacctcaactctcaaatgtaatgtggtaccatccccaaggaatagcctaagtgtgtccacacgacactctcatttatgaaaactangcagtaaatgttgagatcaccctgtcatgctcaggaaactcccctctcccccttggtgatcagcctgagtctcaagggagttccaaaccgagtgacatgcccccaagtacaagtattcctcctcatgagaaactacaagtacttactgaaaaagtttatactattttcatgtcatatgaagtatgaaacatgggcaccatcaatgtaccga

SEQ ID NO: 90108 - DNA, 408 bp, Glycine max
  unsure (1)..(408): unsure at all n locations
aaacaaccaatggagagaattttgccattactggagttattttggatgccattggtgttaagagtactattaactcaatagaaataagctatatctctctatatagagaaagcacttacttattggaattgtatattttatcattggccattcaatatgagtgttttctatggaacttttcttctattctttgagttgtatgatgaacggtcacaccaatagtgaaccatcacaacctgtcgcactggaatcactgagaaggaaattgttcaccacatctgacgaattagagaaactcanatgcaatagggaaatagaagggaanaatgaaaaccctatatatagatcggggaanaacatgtgaccttgatcaatganggaacacatngatngtgacaatacaagtgg

SEQ ID NO: 90109 - DNA, 450 bp, Glycine max
  unsure (1)..(450): unsure at all n locations
tgtatntaanaatgtcttacaaatacttttaattatatatttgtttctttattcctttattaatatatatgtgaggggtagagggtgtcacacaaccaatgaaaaacttttcctggttcgcttttcaattgctgaggtaagcatgttatccttgataatttgatgtcttggtagaagaacggttcattagtatgggctttgattgtttggcgcttatcttatttttcagtttggttgacaaaattgtgagtgttcttatccatcttttgtctggtatgatatacctttatttttcagtagtcctatttttttttacaaaataataaaatttttgaaaatcttactcttctatgatcattatagactcatgctttccattgtcaaatattggaaatatctaccaaacatatatatatatatatatatatatatatatatatatatctatat

SEQ ID NO: 90110 - DNA, 398 bp, Glycine max
  unsure (1)..(398): unsure at all n locations
agcttaatacaaaagtgggtcactctcaaaagagactgttcgattaagctgagaatctagaaggggggttgaatagattctntgaaaatctttacctattcgttcttaacaccgattaaaaacatccccttaaatcaatcaaagtttcttcaaaaattctttagaaataagaaactattatttgggcccttaagatcaattccacaaccaatatgattacaaaactcagagtaatagagaatatgagaaatacataagactttatactggttcagtccaatctggatctacatctagttgttctaaatccttttagaacttccactatacagaaaacataagtacaaacatttttcacacacaattctttaatacaaaacanatctttctcttgaatc

SEQ ID NO: 90111 - DNA, 411 bp, Glycine max
  unsure (1)..(411): unsure at all n locations
tgngttcctagggcctagaatgcattcgggcactcattttttatccttcatgctgtccctatacatataaaacagtcccacaacccaaagctcacaaaaccatgctcatatgtcgttgaggcatttcaccgagcacttggtgggcgcatgtttatgcacgaatatcaagagaatggggacaatgtggcatgcgccattacttcagaatacaccctaggccaaggccatcccttacaacccctcaattcaacaaaaacaagcaacaatttgaggataaatccctcatgtttcttagcaaacacatgcaatttagagcaccaaaatacatcaatggaaagctagaaagcccaagaatgaggtacttacttgttggagacgaataatagagcaaaacggaatcaaaaacgccac

SEQ ID NO: 90112 - DNA, 402 bp, Glycine max
  unsure (1)..(402): unsure at all n locations
agcttangctaagtttagcctaccacccacatactgttggctatattgaacagactatttagtcgctagaggacctattgagggtgtgtgtcttataacaaaagggaagttgggagaatattgtgtcgttgatagagttcaactataacaatagttttcattctaccattgacatcactccttatgaagctctgtatggcagaaggtgtangacacccttatgctggctagaaccaggagagaacctcaccttatgacctaaagtggtacaacaaaccactaagaatgttaagttgatccaagagaggatggggactgcttatagtatgcagaagagctattatgaaaaaatgaataaatacttggaattcgaggttggtgatcatgtattcttgagagtca

SEQ ID NO: 90113 - DNA, 401 bp, Glycine max
agcttattgcttaatggagatacacactgttatattttgctctaaccaactaacaaggactctggaaatgattttatatacgacattacatatagatattaaaaaagatgatggagcttataaaccaagagggggggtgaattggtttctaaatcaaatcaaacttaaaaaactagaggtaaaaaaaattgaagatcatatcacagatatttgataaaccaatatataatcaatcacccttaacacaaaatcctttgtcaaatttctttctcgaaaagatattttctttaaccttcagtaaattgatcaagactagaatgagaaagaaagataagatcgagagaagatgtacaccaatttttatactggttcactctctatctctagaaaagctaatccag

SEQ ID NO: 90114 - DNA, 465 bp, Glycine max
  unsure (1)..(465): unsure at all n locations
tccattcacaatttagaaaactttggtatgttaacatntattttattaccatcgatccttatcccatccagttgttgttccaatcctccctcattctgaaccccatgaaaccttacaaacccatacctatttccccatttatcccttctctttggtaggagtatttcccacactttgagaagaagtaagttgtaagattcacatgtccatacccatgtttcccnctcctctctttctctttctcactctagccactctcataatacgcttatgaacttcttggcaatgtaaggaggaagaaattcttaacaatgatactatgcaagaaaagcattaaaatacttgatttttttcattgacggatttgaaaggtaaagaggaatggagctgcatgattttttaagccaaaaatgaccatcaagttgntggttaaatcatgaccacttaattngatcccactaaatc

SEQ ID NO: 90115 - DNA, 361 bp, Glycine max
cagcatgccagctacaatgactgatccaaaacagaaattttcttttatacgtcatcactaacaaacaacatcataatgaaatagccatacgcattcctacgaagaatctggaccatcagagagggaaaactctcctattaactatcaaccttatatagatactcccaaccctaacaatattaagccccacggataaacaaatttaacaatacattagtaaaggaaaagggagaggtataatatgcacaagaagttttctgcgagtcctaaaaccaacaaaactcctgttggaaatttcaacattaaacgagagaaaatgaaatatccgggcataccgaaaagctatgaaaattaggcatca

SEQ ID NO: 90116 - DNA, 454 bp, Glycine max
  unsure (1)..(454): unsure at all n locations
ccagctgatatcataaccccaccctaataaccaaaattctgcttancttttttgtaatccgcacgctcttttcccttccgtgctcttgcagtagaaatttactgagttttactgactaggaactctcttcattccctttgtagcttggatatatgctcaccatggaacgggtgtcaaattataatatcataatattaactatacattacttacggcatagatagccgaaagntaactagttagcacacaacgggaatccattactttggatcagaatattcaaagaattcaaaatgcttacaactcaaattgttacgattataattcttttttattttacaaatgttttgcttgaataaatcaatttaaatttttataactttaaattctatgattggataagacaatttaattttcttcatatgtaagatcctaatgtcatatattaaatata

SEQ ID NO: 90117 - DNA, 225 bp, Glycine max
tatattttcgaaaaagataatttgttcttaaaaaaacttgtaaaatattccctttaaccaaacctgtgcatattaataaggaattctttctaagatcctaactaagtacatcgttcttcttgcatttctgaattcttgacttgaatcgcgctcatcttcggcatcatcaatgtggcgtccctaaataatgaatggattaattgtaatgattaatataacaaaaac

SEQ ID NO: 90118 - DNA, 455 bp, Glycine max
  unsure (1)..(455): unsure at all n locations
taacaaaaggcatgcgaagngngtggaattcctagagcaattcccttatgttatcaaacataaaaagggaaaaggtaatattgtagttgatgctctttctcggcgtcatgcattactntctatgctngaaacaaaattgattggtcttgaatggttgaaaagcatgtatgacaatgatgaaacttttggagaaatttttaaaaactgtgaaaatatttcagaaaatggtttctttagacatgaaggctttcctttcaaagaaaacaaattgtgtgtgcctaaatgttctacaagaaatttgcttgtttgtgaagcacatgaaggaggtttaatggggccatttggggtccaaaagactctataaacattacaagaacatttttattggcctcatatganaaaaggatgtgcacaaatattgtgaacattgcattgtatgtaaaaaggcacagtct

SEQ ID NO: 90119 - DNA, 409 bp, Glycine max
ccttactctgtctttgacagagatgtaagctatgcttttgttttactcaagaccccatcaccttgctgtgtttgtacatagtatttcataatattgaccattctaaaactcctaggcatgggagttttaccggtgcctttgcttcttttatgagagaggaggatgcattttggctagtggtggcattgctaaaaagagccgttcatgctccaatggaaggcttgtatcttggaaccattctgtttcactaatttatttgcttagatcattgatggtgtcaatgtattatccctgccttatattagacccataaacatattctatgatgaatgaactggattatcataaattgcatgattcttgttaatatatatactcttcgatgatataactttattacaaaataact

SEQ ID NO: 90120 - DNA, 453 bp, Glycine max
  unsure (1)..(453): unsure at all n locations
tgacaagaataatacctacattagacttatatatgctttatattgttctattacaaccatgctattatgttaaaacattaacactattattattgaaaaaccacaccatgtngtgatataattgatgaatagcatggttgatatactcacgcttttttatgacaaataaaggatatagatagtgctatcaacggaaactacctcaatgagacacccttattatctgtatttaatttttatggataaaaaaacttctaatttttaacaagcgatatcaccattaaaaaaaatctcttttatcggaacaagcactggacaatgaaaaccataattgataaaccgaccaatacaaatcacatggattcgacgatatagcattttggaaattctctcattgtactgtataatatacatataacgaagctgttcataatggaatattgattcgtaaaa

SEQ ID NO: 90121 - DNA, 327 bp, Glycine max
ataagcgccacttggagccctaaagcatcccaacatgagttcaagatacatgttagtgagatctcttgttctgaattcagtactttggcgcattccctacttacatctagcactttgtaatgagatcctctgttagaaatatctatccctcatgatgccaggtcgattaacttatatgagtaaatcactcgtgcatatcttgtatgatctcattttgagtcatacctaaaagcgcatattcatgtgtgagggtgtgtatactagatctcttacatcagtcgctccttcatgggttacttgataaagtacccacagtctccttgcatt

SEQ ID NO: 90122 - DNA, 397 bp, Glycine max
aacttcaacatacaatatcgagcgattcgatttattacgagactgaatcaaacatccgagtaaaaagttattgtcgtcttaatatgcacagagcttcggtattgcattcggagcgattagatattttacgggactcaatcagacatcacagtaaaaagttattatcgtattaacttgcttagagcttcgatattctattccgagcgactcgatatattacgggactcagtcagactaccgagtaaaaagttattgtcgtctgaatttgctcatagctgcgaattcaatttggagcgtctcgacatataacgggacttcaatagacatccgactaaaaagtatatgtcgattgatgttcctcagagcttctgtatgcaaattcaagcgtctcgatata

SEQ ID NO: 90123 - DNA, 468 bp, Glycine max
  unsure (1)..(468): unsure at all n locations
ggaccataaaactaagcttgacaattcnacacaataccttttactcgaatttttttgagcccgtatatatccagacgctcgaaattgatgttgaagctctgagcaaattcaaacgacaataacctttttactcagatgtcggatagagtcccgtaatatattgagacgctcgaaatggaataccgaagctctgagcaaattcaaacgacaataacttttttactcggatgttcgattgagtcccggtatatatcgaaacgctcgaaattgattgttgaagctctgagcaaattcaaacgacaataaatttctactcggatgtccgatagagtctcgcaatatatcgagaagctcgaaatggaaaaccaaagctctgagcaaattcaaacgacaatatacttttactcggatgtcttattgagccccattatttatcggaacgctcgaaatgcataaccgaagctctga

SEQ ID NO: 90124 - DNA, 400 bp, Glycine max
agctttaagccaattcatacgacaataactttttactcggatgtctgattgagtcccgtaatataacgaaacactcgaaattgaatgtttaagctttgagccaattctaacgataataactttttactcggatgttcgattgagtctcgtaatatatcgacacgctcgaaattgaatgttgaagctcttagcctattcaaacaacaataacgttttactcggatgtccgattcagtgacgtaatatatcgggacgctcgaaattgaaagttgaacctctgagccaactcaaacgacaataactttttacttggatgtctgattgagtaccgaaatatatcaagacgctcgaaattgaaagttgaacctatgagcctattcaaacgacaataactttttac

SEQ ID NO: 90125 - DNA, 430 bp, Glycine max
  unsure (1)..(430): unsure at all n locations
taaacattcaactntgagcgtctcgatatataactggtctcaatcttacatccgagtaaaaaggtattgccgtttgaattggctcagaggttcaaaattcaatttcgagcgtctcgatatatttcgggactcaatcagacatccgagtaaaaagttattgtcgtttgagttggcttataggttcaacattcaatttcgagcgtcccgatatattacgtcactgaattggacatccgagtgaaaagttattgtcgtttgaatttgctctgagcttcaacattcaatttcgagcgtctcgatatattacgggactcaatcagacatccgagtaaaaagttattgtcgttggaattggctcataggttcaacattcaatttcgagcgtctcgatatattacgggactcaatcagatatccgagtaaaacgtta

SEQ ID NO: 90126 - DNA, 333 bp, Glycine max
agcttctataggtagaaaactataatattttgtgtctagataacgcaacggtctatattcataaggaactaaaaaactaacaatacttctaacggagatttgactgagccaatgcatctactagaaggcagctaacatataaagaaagacatatgttatacttatcacaaccaggaggaaaaagattcttgtgaaagacaacgcaaacctaaaaatcaacactttcttatttaatacaatgtatcaatacccttcttattgcttaacattagagtacctcgtagaaacactctgcaaccattgtataaaggatatactggaggagaatctcat

SEQ ID NO: 90127 - DNA, 271 bp, Glycine max
gtccccgcatacatcctttgagagaagataagctcgcttagaggctgagccccttcccctcagccctacatacctatttgtcccaaatccgggggagaaagaggcaacacagatgctcctgccgaggtgcgagtctcatttggaagctttctatggtgaccatatcatgtagactgtcacgtattagaccattatgaccgcatggtcgaggtcactgtgatcctctctaaagcctgacaatatgctctggattgccaaaccatgctgtggg

SEQ ID NO: 90128 - DNA, 396 bp, Glycine max
  unsure (1)..(396): unsure at all n locations
agcttgtagaattcaccccaattccagtgttctatgctgacttgctcccatatctacttgataatttaatggtagccataaccctaaccaaggttcatcaacctccatttctccgagaatacgactcgaacgcaacgtgtgcttgtcacggaaaagccccggggcgttccattgagcattgtagggctctgaagcgtaaggtgcaaggtctaattgatgcgggctggctgaaatttgaggagaatcgcgtgtaaatcctgacattgacaagagatgccacacatggggcaattttgaaggcggctgttaagtgtctctaatgactcatcangatntccatgtttatgccattattgtaaaccacagttacaatggtaaatgaaatggataaagttg

SEQ ID NO: 90129 - DNA, 454 bp, Glycine max
  unsure (1)..(454): unsure at all n locations
tgaaccacaaccggtgagagtgtgaccttaaactgtgagtgaacgactagntgcgagtaataatctttgcatgaatctctgaattttagaatgaaatgtataaacgagaacatgatgaaggccatgattgtacatacacaagccttttgaccaaaaaagcttaccctgaatgataattatatcctttgcaccctttttgagctgaatgatattgtcaaaaatttgaatcctgaacttaaataagtatctccagataccttgtttagattctaggagagcatatagttcaaggaaaatttaccccaaatttgggggagtggaactaattgggatgcaaagaaaaagagaaagcatcaacacacacaacaaataagttgtatgttaaaaaaaatgagaaagaaaagaataaagtgtgttgatataacaaggtcaaaagcaaatgatagtaaaaagc

SEQ ID NO: 90130 - DNA, 404 bp, Glycine max
agcttaacagacctgcaattctcacaccggtcgatgctaccactcccgacactggacaatacttgtctatgcttggggctcgactgactagtcaccctcctacttgtcaaggccactatccctgacatcagacaagctccctcgatacggaacaatctccttcaacactagacaacctctttcacccgcaagttagcttagagcttgtggcttatgtattgtccaaggtccacaaaatacatgtggcatcctacgtggcacttcgagacatatgtcaaccctctatgtcagccctgacacaagagcatggacgtccgacccttagcagccaggcaccccaaccaagttatctctaacctcttaatatttgaatatattgttacctttttatctcttggcaggta

SEQ ID NO: 90131 - DNA, 409 bp, Glycine max
  unsure (1)..(409): unsure at all n locations
tggggaagaagaatggagggttgagaaatggggtgggttattgaaaagaagggaattangagagaaaagagggggaggggtcttgaacaccctgaaatattactaattataaattgatgtttaattgtatttatcatgttatttgactatatggttgacttgaatgagttgaagtatggcttgaattagtcatgtgtgaatttcttgatgtggatgttgagttatgtggagttttgttgagctaagttgaaattaagagatttcaaattttacctaaacctatttcagtaaaatcgtgatcccggattcaataaccgttggatcatcttcaaattttggctggaggttcctaagacaattctccacagtttgaccgtttggatttggaatataacaagttctgatgtct

SEQ ID NO: 90132 - DNA, 404 bp, Glycine max
agcttcttaaggcctcaacatccatgtaattcaattctaccttctcagcctgcagattcgaataatagacattaacacaacaaattaggctatcaacaattgagtgataactgttgaaaaatatattaaaaattctaaaacacactaaaataactgccaacaaacctaaaaaaatggcaccactcatcttgtattgtggttacaaaaataacaaatttgtctcttatttcaaagtaattcaagaaaaatagccattacaagcaatcagtaactcttacaatcatatcaagtaccacaccagtaaattataaattatgttataaatgaaaaagaagcaaacacagtcagcatagcaatatattattgcacccaattgaaaatctcacacaagggtatgataatta

SEQ ID NO: 90133 - DNA, 389 bp, Glycine max
  unsure (1)..(389): unsure at all n locations
tgagccgagagttaaacaagaacactntntagtcaataaggatctcttttctaagaatcctagagtcatgagacctcttcactgtctcctttgtaatcttggagttctcataggcttctaaacgaatctccttaagttcttgcaattgaagcttcctttccatacccacttcatcaaatgtcatgttacaacccttcaccgcccaataaacacgttgctcaatctccaccgaaaggtggcatgccttaccaaaaaccaccctatagggaganatccccaaaggtgtccggtaagcggtcctatgggcctatagagcatccttaagtagcttgctccaatcctctttgttgggctgcactagcttctgcaacactttgtttatctctcta

SEQ ID NO: 90134 - DNA, 395 bp, Glycine max
  unsure (1)..(395): unsure at all n locations
agcttgatccctcgcaaattgaagataggatatttgccctgtattcagctaaggactacttttcttagcgcccttatgttcaatacgttcgataaataaattatttttttttgctatatgcatgagagtaacaatgctatttgtcacacaaatgtgtgacaccctctaccccgctcatatattttaataaaggaataaaactcctaatattaatgaaatgtttcttntaaatattttttaatacgagcctcttcaatgggtaaaatgctcacattcactttcttctacatcatgattaaacttgtccaaataattaataaagtcttatcggttcaaagaagaccatctaatgttcatacaatggatatagaacccattcctagtgaacaccttat

SEQ ID NO: 90135 - DNA, 267 bp, Glycine max
tttctaagcttgtttgcaacaatgtatgataaaagagtgcctaccacatagagagtggctatgcaatccggaatgcatctaaagttgcagattgcgtaattgcactggtggcgccaaagctactgcattgaaaaatactgcatatctgaaattactttataagatcgcacacaatattacttggcaagatagcactctaaagctactttgtcattcatgacctcatgtatgaaaagcacctacagatggttatgatgctgatgctgc

SEQ ID NO: 90136 - DNA, 403 bp, Glycine max
  unsure (1)..(403): unsure at all n locations
agctntntaccaaaagtttggtcataccttattgaaattctacagatgtgagttcttgattaccctatttaattggcatcatctaatttctgtcttttcaattatataatgataatctcgaacgctttgtcagatgtttaattctttgtcacttaattatgtgagatctaatctatatcatgtagattcctcttcaaatactctttgctctgtctgtaaagggacttggtagctttgctccattgatgtttttctgctgctttactttgcattttcttttgctaagggagatcaattatccttcatattcctcatctccttgtacttttctttccatcatgatngaatttgttacccctctgaaatctgatatgaagaggaatggaaagaaggatattaatat

SEQ ID NO: 90137 - DNA, 465 bp, Glycine max
  unsure (1)..(465): unsure at all n locations
nttagatcctatgtnntattttttaatggtnttgtgtctatagtagtattcacgaagtattcccttctttgataatagattttttaaaagatttttctgatcttggtggtcttgcagtccacttgataacaatgactttggtggaaataacattccagaatcttatggcaacatctcaaaattgtcaaaattggtagtgcattttgtgattccatgtttggatgtatgatgccaattacaagtagtggagcttaggtgtttgagcctttattttaatgtatggtgtgaaataccagtctacatgcgattcttgtatatagatctttcaattggagaaaaacattgtaaggagattaaaaataaaggtcaaaacatttaagtacaattataaatattgcttctcataaatgatatttaaacagttcaccactttgtatatcataaaagaatgtcgtacacaccata

SEQ ID NO: 90138 - DNA, 226 bp, Glycine max
aaaaaaatacaaagcacccaaaacacctcgtatatcttgagagaaaagactaaaagtgctgagcgataaactcatctattaaacgatgataccttaactagtgagcaaacatacaacacatgttgatgattttctgagagccaacaatgacctggcatgaccaagaataccgaggtttaagccaagcttggataagagcctgcaggggaagagccagaagtaaaca

SEQ ID NO: 90139 - DNA, 413 bp, Glycine max
  unsure (1)..(413): unsure at all n locations
aaagtggtactctcataaagtttttgctttccaattctactcaagactacacaatgtgtgtagtttggaatgctcaacttgtcttatgccttcaatttgcttataaactcccaagaaaaccattgtagtggactccacactcctggagtaagtanggttcacttttacaactatcatgaagtgacaatatacatccattatgaggaacctttctaatgggcattctagtgtttacaaagaatgaatccatgttctgatgaagattanattggtgttccattctgatgtagtgtgactttatcactcttaacacttcttcaaatcttcaaacattctgaagttgattacttcaaaaagacttagtagaatctcagttgttggtgtgttaatgttttgccaacgtcaaactgagt

SEQ ID NO: 90140 - DNA, 397 bp, Glycine max
agcttgacacagttctgccatcattgttgtttacttcaaaagacagggactgtccactgatgcatgaatctttatgatgtacaggtgtgtttataaattactgccttacgatgatattatgaatattcacttcctactacttctggggttgacgtcgtgataaccaccttaaagactacaattacaactaacagtggatttgattgctgatcacacacaaaatgtatttgataggattctaacaaagatagggtgtactgtcccaccaacatctatatattgcatgcaaaaaggaggtaagaagctgcattcattataccaagcactgtcataccttaagggtgtatggaggtctttgttttccgcatcagagaatgaataaccaagttattcttat

SEQ ID NO: 90141 - DNA, 434 bp, Glycine max
  unsure (1)..(434): unsure at all n locations
tccacaacatccaagcaaaacaacattcaaacagtacatgttatttagccaagcaaaacagagccaaggcagaaaactctgctcaacacatcaaccaaaatcacagcttttctcacgtaaagaccacagtaacaattccttcgatccaattcgttaaccgttggatcgactccaaaattttactggaagtctatagtgtataagcctgctatttgaccgttgggatatactagcaaacatccagaactcattctgcactagactttccacagccaaccacacacaagcatttttctgcacttgtgcaaaattctgctgcacaatttcacagcaaaaattctgcataagtgcagatttcgaaaatcacccttcctctcatccaatcttgcccagatcaaatcctacaagtcccanatcatgtatcagacatgtct

SEQ ID NO: 90142 - DNA, 394 bp, Glycine max
agcttattgtaattgattacatagttctttttgatacaatgatttgattcttttaggagtctctactttaatcgattaattggtgatataatcaattacttctcttttaaaagtgtttcagaagtgaccatgaacactttaatcgattacatcaagaatctaattgattatattattcttgaaagtttttcagtttttgggacgaacactttaatcgcttgaaatggtaatataatcgattacttcttcaaaataatcgattacattgtatatttaattgattacagacggttataactgttttctctattaatagtcaccttgtgttctcacttctaataacttctgaacgagctagaattaagagttgatattagtaaaagaaagaagagaa

SEQ ID NO: 90143 - DNA, 465 bp, Glycine max
ggtaatggggccaaggacaaggtatggaaaaatatggaattagtggttgaatcccaaaggaatagagaagcaatggggaataagtgcaaattaagaaaacataagacaataaaaaagaagtaaagataaaatttaaacataaagagtagaaccaagagtctcatcattcttttcttattcactcaactttactgtctttctttttctttttcgatttttttttttgctctgtagccttttgagaaacagcatcatattcagcatgtccaacatttaaccaatatgcaatgtatatcaagtatggctcaaaatatatcatgaagcatggccaacaaaacatgttatccaatgaaacaaaaacccccacacttattcctaaaacaattccaaagctccaaaattccttaaggatatggtgatatcatggtttttcacttaaggcttgtagtgagcttcaaaacaagg

SEQ ID NO: 90144 - DNA, 399 bp, Glycine max
  unsure (1)..(399): unsure at all n locations
agctatatggttatacttatcaaatttactttatttcaatatcgatatcaattgcaataatatatctttatgttttaactacccatgacattgttgtactcaagttggtattgcgtaagtatttaataaaattatttactcaaatgcaacttgaatgacaaattaattgcttaagaaaaaatgtgttgtgacaataacgattgccctaaaagcaaaatttttcattaatggacctctggtgaaacccaaaatctgatttgcttttcaagatttacacaacgacatctttcgactcgtgcactcgaggtcaaatacgttaaagccttacaaacaatgtctagaaaanatatagagaaagaaaaagagataaataagccatataaagtatcagatagctta

SEQ ID NO: 90145 - DNA, 451 bp, Glycine max
  unsure (1)..(451): unsure at all n locations
tgtagaattagacatctagtgtgaagtgtgtatgtatttttatctattgtgattngataatgatctatagcatatgatctcatatgcccaagaacaatgataaattttgatatcattttagaatttgagtttaatctttacttaatccaagtaaatgtctagagaaaaatgaagtgtggatatttctatgttatttgatatttaattatatttttaaaaaagtattttagtaagttataatttttttattaaaatatttattctagaaaaataacgtgacatacaatagcaaatacttttagggtttgttaatgcatacttgtttgttttttagaatgagtattttaataagttataaattcaattttctttaaaatatatccaaggagtaacttaataaatattatttctaacaattagtgagtataaattagcanatacctataattaa

SEQ ID NO: 90146 - DNA, 400 bp, Glycine max
aacttcatgaggagatgtatccacattgggtttatgtagatacctcgattgctaaccatatactatatcaatatgcaatggttctcccacttattgatcctgtatgaatgcaggctgatacaacatgggcactaacagttctagggtatatggcaaaattctttttgtgaatattatggtaagcaatgacataagaatctgatttgcttggaatgctggatgctgtatgaccccctatgcatagttttacagattttcttccttctctcgaatgggttatttattactgttgggccgatctgttaaactgagctgtatgtgataattctcaaatgtttctttcacctgatacatttcacatagatggatacatttaaaggttatctttcattattaattg

SEQ ID NO: 90147 - DNA, 418 bp, Glycine max
  unsure (1)..(418): unsure at all n locations
acacatgaaactaagctgtaaaggactcaccttatgcgccatcttaagtttgtttaaggngatngacaccaagaactctccaactcgattgctcaagaagattcctattcgaggcagagagcacataattactggttgacagatgcggtgatactaattcagaattttcccatgcttcttgtaacatccccaaaaaagaaatatagaaatattatggaaaaatagtttgcattagagaaatatagtttagatgagatatgagctntgtttcatcttctatttgtaaacatattaggttcaccttatatttataagataaataacataagataagatattagtattacttaatatttatatcttatatgtaagataaaataagatatataagatgcaaccaaatgatagataattaagt

SEQ ID NO: 90148 - DNA, 398 bp, Glycine max
agcttcttggttggaaagaaaaatgtacctatctatatattgcagtatgctgatgatactgtttttgtgggtgaggctacttgggagaatatatatgtttaaaggctttacttagaggctttgaattggcttctggcctatagattaattttgctaaaagtcagtttgggatcataggaggtggagttaattgggctctggaagcaactcatatcctgaattgtagacaaatggattatcctttttactatctaggcattcctattggggctaatccttcaagccaactggtgtgggagcctctcatcaataaattcaaatctaaattatccaaatgggcccaaagagatatatccatggctgggaagatcacccttataaattctgtcctgaatgct

SEQ ID NO: 90149 - DNA, 337 bp, Glycine max
  unsure (1)..(337): unsure at all n locations
taatagaagggaacattccaatcatagaataagagaacgataacttccaatgatagcaaaaaaagaatataagggaaatntccaatcaaagaaaaaaaagaaggaaaattccccaatcaaagagtgggagaaagcacaaagaaaagaaaggaaattcccaatcaaagagtgggagaaagcaaataggaaagaaagaatattcccaaccaaagaatgggagatagtaaacaatggaacgaaagaaagttcttgatcaaagaaactacaagaaatatgcagagaggtctttggaccggacaatatctgaacaatacaatattgccaccaaatgaacaaa

SEQ ID NO: 90150 - DNA, 385 bp, Glycine max
agcttgcaaactaagtgctcacctttagtttatgagaatccttcaggctgtttcatgtaaaccttttcctctagatgaccattaaggaatgtcgttttcacattcatttgatgtaactcaaagtcaaaatgagctacttatgccataattattcagaaagaatctttcttaaatacaggaaaaaaaggctctgggaatcaattccttttctttgaatgaaccctttggcaacaagtcttgccttatgtctctcaatgttgccttgtgagtctttcttggttttaaaaacccatctacatccaatggcttttacaccactaggcaactgtacgagatcccagacttggttaaacgccataaaaccatctcatcttttatggattat

SEQ ID NO: 90151 - DNA, 457 bp, Glycine max
  unsure (1)..(457): unsure at all n locations
ggcctaattaactggaaattgagagataatgattattaatttcacaaaatgaaaatactaagtatttattacctatacttaatagaaaatacttatattactacaaaataaccataaattgggagagtttgatacaatttatgcaagttttatacacaaaagttagtcgttttcaccgactaacaattagttaggtagtttcgatgttgctgctctgacgcaacacaatagatcgggaagaaccctaaccaaacaagaatccaatggctacggagttaaggcaacagacagtgcacctttcaaagcactgttggtcgtcattttgcctaaagaaaatgttgtcatctggttntgttcgttgcataatagaccaaacaactacctcaaaggaataattaacaggtcaatgttggttttcaatacattngtattagcattagtcgggaacctcaatatt

SEQ ID NO: 90152 - DNA, 359 bp, Glycine max
  unsure (1)..(359): unsure at all n locations
agcttgtaggattatggggtacccatcacatgtggtactaggtgggggtcgggcgatggtgcacaacgagttncacatcacaaacgcgcataacccccatccctgtgccacctccaatgacttaccgtcctccacggtagccatatcctgtttttctcacaaccaggccccaataatcctcccaagctttcacaacatncaagcaaaaacaacatttcaacagcacaagctatcacagccaagctaaacagagcaaaggcagaaaactttgccaaaacaccaaccaaatcacatcttttctcacttaaagaccccagtaacaattccttcgatccaattcgttaacccgtggatcgact

SEQ ID NO: 90153 - DNA, 371 bp, Glycine max
ctcttgcgacaggtatagatttctgattcaaggccagttgggttaccaggttaaccaaggtatctagcttaccttcaagcttcttggtttcaactgatgaagatgaattcgtggctacttcatgcactcctctaatgacaatagcatcatttctggcactaaattgctgggagttggaagccatcttctcaattaaattcctggttttagcaggggtcatgtctccaagggctcccccactggaagcatctatcatgcttctcttcatgttactgagtccttcataaaaatattggagaagaagtagctctgaaatctggtggtgagggcaactggcacatatgcttttaaatctctcccagtattcatat

SEQ ID NO: 90154 - DNA, 400 bp, Glycine max
agcttgtggcgagtgtgaatgccttgctgatggcgttgtggggacagaggtattataaccctatgacgaagatgattgttgggaagaaaggggttggggggaataataagcctatgtttgttcagtttgtgttggagcccttgtggcatgtgtatcagggggccttggaaagggataatgggctggtggagaatgttattaggacctttagtttgtcggtgccgcatcgggagctgcataacaaggatgtcaaggttgtgctgcaggcggttatgagccgctggcttccgctttctgaggcggttttgtccatggtggttaggtgtttgccggacccggtgacggcgcatgcatttatgatatccatgttgattcccaagaaggaggttatcggggatgt

SEQ ID NO: 90155 - DNA, 438 bp, Glycine max
  unsure (1)..(438): unsure at all n locations
atcccaaaaaaatagaanatatgtgattttttattgaacaaacacaaatgatatgagaacatataataaagtatggaaaaataaatggttacaatgagtatgggaagagaatgacgtacccgttgtgggagaagaaaatatttgagagtggtgagagactccagaatcattgatagtttgcggtcattgagattgtgaatgggcgttacaaatgaaaccaagttttttaaataaaaggataaggatgagtcaattacgatttgaaagtaagtgtggttatcttttgagtcaattacaatttaaaaaataaaaagaaaggtaaaaaggaagaaattgcactagaagaagccacatgtcaaaaacataatgagtcagttacgatttaaaatgtatagtatattgatgattgatattgattagaagaaanaaattgattta

SEQ ID NO: 90156 - DNA, 375 bp, Glycine max
atgcaagcttgaataggaagtgttgaaggcgttcttctgctttattgtgaccacagagtggtacctggagaaatgcccgggggcaagagaccttggggacgtttgttgggtgctattgcccaaaaccaagcttgaccaatcccgacccaacccgggcatagtcggtcagtgagaacctgtgacgtacctaaacacgcgagctcctggcatcaacaaataaaaggaacaaagaccacacagcaaggaggcttgcggtggctggccagctgtgaactttgattgatatgcgggatatggcctctggtaattgattaccaagggtaggtaatcgattacaaggcttaaaatcgaagacatgaggctaagatggtctct

SEQ ID NO: 90157 - DNA, 405 bp, Glycine max
  unsure (1)..(405): unsure at all n locations
actgaagcctgccgccacggagttgtccgacactgctcttgngaggngtttcaagttacttattgagagagcacgaactgaagagcctatggttgatacatggacggagatgaaaaagatcatgacgaagcggtatgttccggctagttactcaagggactagaaattcaagctccaaaaactaacccaaggcaacaagggggttgaggagtatttcaaggaaatggatgtgctcatgattcaagcaaatattgaataagatgaggaggtaactatggctcgatttcttaatggtttgactaatgatatccgtgatattgttgagctgcacgagtttgttgaaatggatgatttgcttcacaaagcaatccaagtggagcaacaattaaaaaggaatggagtggc

SEQ ID NO: 90158 - DNA, 401 bp, Glycine max
  unsure (1)..(401): unsure at all n locations
agctngaagattttttgaagaagttatggcttttgtttgctcaactccctngagcgacatttgtattggttgttatcttgggtgttgcatcttatcacatttgatatatgtctttcattatgcatcatcacagtgtgggtgaagaaaagtttctttataggaaaaaactctctattttaatcgattacagagctactgtaatcgattacaacaagctgtctgaagctcgtagagttaagtctcgtatcgaacacaatagtattttaatccaatacacagttgtttgacacaatggctgatttattcaagagtttctactttaatcaattaccaagtggactaatcaattacttctctctcatacaagtgtgtaaagtgaacaacaacactctatttaattt

SEQ ID NO: 90159 - DNA, 447 bp, Glycine max
  unsure (1)..(447): unsure at all n locations
agctttgcctcatctaaaaccattttttaggtccaacgccttgaatttggttgttccgcttnnacgggggaaatggggattttttaaaaaagcctaatatcaacacgtaacctctttaaaaaaccaaaagatcattaatggtccaatgccttaatgtgttctctcctttcaaaaagaatcataagatcgtttaatggtccaacgccttanatgaccttttattcaatcaaaatatatcatgcaaaaaagataaaaacaatttaaccaacgtttaattctcatagaactacgtaggtcttatatccttatcacaattgaggaatacgtacgagcaagggaaacacccttgtcgaccacaaaaagataaaaatattaaatgcacaaataggcatatagacgtaaaagggaacatataacaaattgaagtcatgtttgcacacttgatta

SEQ ID NO: 90160 - DNA, 402 bp, Glycine max
  unsure (1)..(402): unsure at all n locations
agcttgtagaatggctagacataatacatggtagggtttggtttggttcaaggataaaaagggatgccccacattatttccatgacacaaatgcaaaaatgatgatttggaaattttatgcaaaactggtcatgcatgcacctatgcggacactcaagtgtcaaatttttatggtcatgtgatgctagggctcaggattcatttcctctattttaaatcaacccaatgtttccaaaatatgttcttttatcaatttgtgcattcatcctagtccattttgggtactcgggaaaatttcacagcattcaccctgtaggtgtacacacattttnttcaaaaactagctatgatcagcaaatttttttttttttcaaataagagttggaagtcatctcttttcac

SEQ ID NO: 90161 - DNA, 413 bp, Glycine max
  unsure (1)..(413): unsure at all n locations
ctaagctttatcagctatttggggtgagctcccccttctgttattttctagggatgcgcctctctcacttttctctttgtcttccgctgcatctccatggtggaaaatcaccaattaaggaccctatttgagctcaaagatccagccctccgagaagccccacaaacaagctttcattcagtggtattagagcacaagagcttcaagtaggtgctccttaaacctccattaattttttgctttaccttctcttccattgatttttcttcattttttctccatgtatctactcaaatgtcttgngctaaatattgttaacatgcttcttttattttcacctattaacttgtatacaacctaatttatttctatgctcaaattcttgctctgtcttgaacataattgtgttagtt

SEQ ID NO: 90162 - DNA, 377 bp, Glycine max
agcttgacagatagggttatgtatctgaatctaatgtctcaaacatggtatgctgccaactatgcctttaactgttagaagtgtttttctctattttgctagtatgctatggatacttgatataaaggaattagtcctacaagttttttttcaatgaaattgtctttaatgaaaaaaaattgtcctacaagtgtttttaaaatgtcttaaatgtcacttttatgagtaatttttaatgctatatggtatgagttttgatatttatataatagacattttctaccttaataaattatataactattcataattattctttaatgttgactactttttattcaaacacattaactcgttttaaaatgtaaaaatacctt

SEQ ID NO: 90163 - DNA, 357 bp, Glycine max
agcttgcggactataccaacgacctatctctgccgtgtttctgtctcggcccggatttaatgcgggttgaacacctgcttcgactcccaactgtactggtatgttttgccagagctttatactccatagtgtcgtggaggttaacatgacctccgagatggaagccatgtagaacttgtaaagccgaaagatcggccctcatactgtttctgcacgccctctccattatccatttttctggatcgagtgttaaaggggtgccttcggagtttcctagttatgatgaaatgcataaagaaataaacaacggtgaggatgccaccaaaacatgaatatgcaaatggatgatccgagcac

SEQ ID NO: 90164 - DNA, 456 bp, Glycine max
  unsure (1)..(456): unsure at all n locations
cgcttgttagggtcattcaacaatgganactggtctgtattctttgatcttgataggacagggctaagntgtcgtactatcacgaggaatcggggtgggataatttactagtagtatgtttgtcttaatgcggtcctggttgagtttattccaaaaagaggaatctgaggacgatgcttgatcaggattaggctaaactatcatgaggaatcggngtttagcatgtcatgagacaccataggaacacatgagcattgttagatagagaatttccttttagcaccaggcacctattatgaagaccaacgtgttttctacttgtttttacaagtcatttctctcgcgtgattgtcctttttgcgtagatangttacatagctgttcatattcacacttagaatttcacaccagacacctattcactgaaatagcttaccaagtaacaccaatttcttg

SEQ ID NO: 90165 - DNA, 365 bp, Glycine max
agcttgggactaccaacgccgacgcctccgtcgtgataattttcgagagattaataatactaatactttttttaacagacgagcatgggcctatgatagcacatttggttgacggaggctaatgctagtggcatagagagaaagaacaattatggatgatggtatgatgcgatgtgtcacataggaaagatatggtgtacgctgcttgcttggaatattaagagagacactatgtgactatatgacaaacaagcaaggggtatctggatgagagtgctgaacgatgaacgaatattgtaaggcgggtggaccgaatatagcataaccatcagggcggggccaaaaccctcttgcctttcttaact

SEQ ID NO: 90166 - DNA, 230 bp, Glycine max
ctattcaatgcttacccatatgtggtggagcctcatgcattgctcactctccatggactgattcttgcgtaaccatcaagcatcatcttgttgttcaacacacaatctgcgcttatgaagacattcaccacacatactgtgtgaccgcctcaaccaagttcactcccctggtcgggctagattgctcttaccaccggggcttttcaaaaatgacctgctatttccacact

SEQ ID NO: 90167 - DNA, 399 bp, Glycine max
agcttgtaagagtataactctattattttatagctacctatggttagtctgttatggttaggttaactgtgttagttagttagttagaatctctgtatgcataaatacagttgtaaacagagattcagtaactaattgtaaaatctcttgtcataataatggatctactttctctctcttatatgttcctctcccaaagctttataaactcaaattaagtcatatctctagttcatgttggattaaacctccacacttgaggtgcaattaaggacggccccaaagaagctgcagctaaggcaggctaggggtgacagcaattaaggcagattccaacaatttctaaagcattagtcttagaatttggctttggacctaactcgacccaacaaaaccaac

SEQ ID NO: 90168 - DNA, 450 bp, Glycine max
  unsure (1)..(450): unsure at all n locations
gatcgtatatttattggaggaccttaattgatgttgatcattnatagnnaagatgttggctagagagaaaatggaaaattatttgagaggatctaaatttagaggaaaaaaaatgatgatgcgatctatctgaaaaggttaacacgtgccattcagacattaataattatatgggttaattgttacaaaatataactaggactcatgttgcttatcaagcacatagtatttaggataaaattaattttaaaaaaaatattttatacattgggatttaagagagaaattggttacgagcattaaattattntttttacaatattacttatagtttatgaaaaataagaaaaagagcaaaatatactgataattagatgaggtttgtgaaagcgtgaaaaaaaataagagagaagaagtatttgtgtaatttaacgaaatctcaagagatat

SEQ ID NO: 90169 - DNA, 313 bp, Glycine max
  unsure (1)..(313): unsure at all n locations
ncaagcttttntgttcgatgttgcctaaaaaatttacaatgcagttcggctaggtttcttcgtgcgaactgaaccgaaattgtgtttcggccgactggcatggtctcattttgtcgggcaagaaaacattaacccacctcggcataaaaaacatgattcaccgatattgacaggaaaagaaaaatgctaatcgacgtccgccaagaaagatgaccgaccgaggtctgaaaaagaagcatgaccggatgaatccggtcgaacatttcctaacagatatcatccaagtattattcagggatttgatagaaaaaac

SEQ ID NO: 90170 - DNA, 331 bp, Glycine max
agctttaactaaatgagggtaaattactttgtcactcctcgaactctgtaaaaactggcactattttaaggcctaatgtgattctccttaataggccaaaatacattacaggtcgcatttattcttgttatttaagaaacacattatactttttatttaacactgaaagaaacacgttattctatgcatttttgtaaggaggtacttgggatattaaaaaggttaatgtctcaaatttcaagaaattagagagtgtcgtcttatttgttattaaaaatattactcggatctttctctccattacttattttaaaatctctcaatttatata

SEQ ID NO: 90171 - DNA, 440 bp, Glycine max
  unsure (1)..(440): unsure at all n locations
tgngaaggcggcagntggaccaatcacctctcttttagtttttattggccaaagccctcatcagggaggcagcatgatcctaacgcgccgactgtatccaaacatgaaaagctgcatcaccgcaaagagtttcttgcctgtatagatcatactccacgacggagataattcaacaagaaaactatctttcactgacccagttgcagttctttacacctgccaacttcattggagcaacatcacgtgcttcatgctcttgaactcttgatgcagctgctgcctctatctggcgcctgagactttgcgaccataacttacttttcctaatgtgctcagtggccttatacttgctagacgctattcttcatatatattctgtatctagttaaatacaatgaagtcatatgggagaatatgagatatcaatcatatcatgatgc

SEQ ID NO: 90172 - DNA, 344 bp, Glycine max
agcttctcaaggaagttttctcaagatagcttctcaaggaagctacctagtctataaatagaagcatgtgtaaaacttgcggtaactttgatgaatgagagtcttgtgagacacaactcaaagttcaacttctctccctttttcttccttcaatttcgtgctcccccctctctctttctctccctctctcttttcctccattgaaacatccttccaagcttcttatccaaggcccatcttggtggtgaagctcttttttccatggcttattccttaatggatggcgcctcctctcacctcttttcctttgtcttccgctgcatcttcatggggaaaaatcacca

SEQ ID NO: 90173 - DNA, 282 bp, Glycine max
catagcaaccgctggagaagttccggcgtctaatcttgagaggctccagatattataatcctggagaggacatccgagcgaaaagatatgaccatatgaatctctcgagagcttccggcgtataattttgagcgtacccttatttgaagcgcctcgagacgacattcgagtgaaaagatttgaccatatcaatctctggagagcttccgatgttcatatatgagcgtctccatatatgatcatcccgaatcggacatccgagcgaaaagatatgaccatatg

SEQ ID NO: 90174 - DNA, 403 bp, Glycine max
  unsure (1)..(403): unsure at all n locations
agctntcttgagataacttccttgagaagcttctttgagaaaacttccttgagaagctagagcttagttactcacacccctctcataactaagctcaactccttgagaagcttccttaagaagattcctaaagaagcttgagcttagctacacatacctctttaatagctaagctcacctccttgagatgagaagctagagcttatctacacaccccctataatagctaagctcacccccatgacaaaaaacatgaaaatacaaaaaaagtccttactacaaagactactcaaaatgccccgaaatacaaggctaaaaccctatactactagaatggccaaaatacaaggcccagacgaaggaaatacctattctaatatttacaaagataagtgggctcata

SEQ ID NO: 90175 - DNA, 461 bp, Glycine max
ctcagcttgcttgtacagattgggcaaatacgcgcttggagacattgaattgcgtgtttgtatgggatggccttacgcctaggctgagttctgaaatgatggggcaagccacattgcccctatacgcttgctgtttgttcccaaaagtgcgcccaccaagtgctcggtgaaatgcctcaatggtgttcgcgcataaatctgtgaatgtggcttatagatggggtttgagcatgtatgattgccactctttggatgtggggacagcttgccgaagttagggtaaacgcctcaacatgacttaagcctatggacccaagcctttgatctttgaatgcagcaaagcgtgaaagtgagagcatgttggtgaggtttcccctttatggcagcacttgcgttgggctgcaccatgatgatctctttgtacctacatggtgtgaaaatgtcactcaccatgtacatgt

SEQ ID NO: 90176 - DNA, 391 bp, Glycine max
agcttgtgccgatcccacatgcttggagcattttttttaacagcgtgaccttgactagtcttcctatgattttactaagggggatgtttgttatatatgatagtggaaatgttaaaagcctcatttttattatgtgggataaagcatgttgatctgaattctgaaataaaagagatatggttgttcatttttccctcaaaattaatgtatctaatatctatttgctttggttttattgtagagatgagtacttctaatcatagcacaaaacaagaggatgaagccaaacctctatggagatatgtttcacatataagaaagactgttattggtggaaattttgagatcaaatgcaacatatgcgaagttccattcaatggatcttacacta

SEQ ID NO: 90177 - DNA, 463 bp, Glycine max
  unsure (1)..(463): unsure at all n locations
tgtggctaagagaatacagaaggtgatgtcgtgccatattttggatgactgtctgcattcattgaaggtagacacttattacatggtgtactaatatcaaacgaggtagtggaggaagctatgagaaagcaaaacccatgccttgtgttcaaggtagattatgagaaggcctatgactcagtatcatggaattntttaatgtacatgatgacaacgatgggttttagtcctatatggattcggtggattgagggatgtctagcctcggcgtctatctcgatactggttaatgggagcccaaccaaggagttttcccccaaaggagggctacaacaaggagatcctcttgcaccgtttctcttcaacatagtagcacaaggcctaaatggtttgatgaaggaagctcgtgatagaaaattctacacatgattttcagtgnggagagataaagtggatgttacca

SEQ ID NO: 90178 - DNA, 401 bp, Glycine max
agcttagccctagatgggatggaccttttttgtctcagagaggatcaatagcaatgcctataggttagacctcccacaagagtatggagtcaacaccacttttaacatttctgatttaattccttttgcaggtggagccaatattgaggaggaggaaccaacagatttgactaatcctcttcaagggggaggggatgatgcaacccttccaaggaagggactagtcacttgagccatgaacaagaggcttctataggattgggctaaggctgctgaaaaaggccatagggttttcatgaacctcatggtataattttgagcccatgggccaaggttaggtccacttatatttgtacatatttttcatactctaatttatctcaagactattgttcgatgat

SEQ ID NO: 90179 - DNA, 454 bp, Glycine max
  unsure (1)..(454): unsure at all n locations
agaccactcaagcttcaccacacatggtacaacctgtgacctgcaaacagattatgtgttgtttttcttttaacagnntagttggcagcttaccaagtgattctattaggatctcaagttgcttagctccaacctgatttgtgccaacaaagcatcgcgagatgttagctccaataagctcttctttgtgagattgatggggttctgtcccctcagaatagcatgatcattggctgacatgttctctacgagctcagatgcttcttctggggttttcagctttattttttccccaatagaagcatctagtaattgcttggtttgtggtctcaggccatctatgaacatattcagctggattggctcggagaatccatggatgggagttcttctcagtaagtctctgaatctctccaatgcgtcactcaaggattcattatggaattgatgaaat

SEQ ID NO: 90180 - DNA, 401 bp, Glycine max
agcttgaaggcaagctttcgatgccactttctcttatctgcaggattttgagcttgctttgacatccaaaagatgagttaaatgcattgacacaagtggacgataaatctagttcaatcatattctctgatgccactgaaaattcccttagctttttgcatgactcaaggttgaaatatctaagagagcttatgtggttcttgctggtaatttttctaagggaacagtaagctacagacaatctctcaagcctgttgagagagaaaatagatggagtcacactagtcaactgaggacaaaaattgatatccagcacttcaagatttgtggcttctgaaaggtctggcagctccttcagttttcagaaccagagacttttaacttcttttaaattcatcaaa

SEQ ID NO: 90181 - DNA, 468 bp, Glycine max
  unsure (1)..(468): unsure at all n locations
actcaagcttcaagaatcttactgcactgcaatatctgagtgtagaattgtccagtcagcttcacactctaacggagcctcccccatctcttgaaactcttgatgccacaggttgcgtattaattgaagactgtacttgttccctcaattgctcacaattcagggaaataggagagatgtcgcttttgaatgcttgaattgatgaacttctcgcacagctatggggttaaatgcacgtattaatgcgatgaaatctgcgtaccaacatttatctgcaccggatcaaaattacaataattacagtcgtaagtacagattttatcaggtgaagtatgtgtatcccggccgaaaaattcccgaatggttcgagtatcagacaagagatgattatataatgatcgatctcccttctactccacgatcatctcaattgngcttcattttcagcttcgtcatatcttaccctct

SEQ ID NO: 90182 - DNA, 398 bp, Glycine max
agcttgagatgaagaagtgttgaacggtgattcttcctgcttttattgttgaccacagagtggtacctgtagatatgtcgcgggggtcatgagaccttggggacgtcatgtggggtgctattgcccataaccaagcttgaccaatcccgacccaacccgctcatattctgtcagtgagaacctgtgatgtacctaatcaagcgagctcctggcagtcaacagataaaaggaaaactagatcacacagcattgaggcttgtggtggctggccagctgtgcattttgtgtaatatgtggattgtggctctggtaatcgattaccaaaggtgagtaatcgattacaaggcttaaaattgaggacaggaggctaagatggtctctggtaatctactaccaac

SEQ ID NO: 90183 - DNA, 322 bp, Glycine max
  unsure (1)..(322): unsure at all n locations
cacgaacantggtatcatctctttctccatcagtgggggcaccacttgagtttccagatccctccacctttgggtgtattctttgaaatattcgagtgcctttcttcacatattatgtagctgcattctatccggagccatatgagaattgtattgatactggctaacaaacgcaaccattagctccttccaagaatggacttaggaaggttctatattagtgtaacaggtgacggctgccccactaagactctcctagaagaaatgcatcaacaacttttcatcttttgcgtatgcccacattttcctgtagtacaccttt

SEQ ID NO: 90184 - DNA, 397 bp, Glycine max
agcttgcttgagaagcttctgggttgttttatctttgagcttcactaaggtctttctatggtgattttcagccatggagttgcagcgaaagataaagaaaaaaaggcgagaggagaccccatccacttaagaataagccatggaagaagaagcttcaccactaagaaagtgccttggataaaaatcttagagagaaagcttccatgaaggaagaaaatgagagacagagagacaaagaggcatggaaattgaaggagaatagggagagaagttaaactttgaagtgtgtctgatcgaagtcgtacccgaatcaaataaacattaaaaatgcaatatctacgaagtgatcctaggtcgtctcccaatgaacaatggtcaaccaaatgttcataacaga

SEQ ID NO: 90185 - DNA, 460 bp, Glycine max
  unsure (1)..(460): unsure at all n locations
ntaagatctcgtagctcagtgaggacttcagtgttgagttttatgaggtatcccatcgcgggggtggagacggtgtatgttcatcgggaatgagaggcgacaagtcttgcttgcgcacccactgagcctccatatctttccgatatccaaaagatgtaacacaccaacaccaatagaaaaagaccatttaaccttgacaaaaaggttcatcgtctatggagacattgaaattctggagaaataaagtaactagatgaggatacggaagaggtgcattggcccgtaatgccttatgcatttagtactgaacaagatgggcccagtcaatttgacgaccaatttgaagagcccacaacaacattaaatcctccttagaggcatgggcaagattagtggacctatgaagctaaatttgacaaagaacatagcacatgatgcaacactcatatgtaaatgaccc

SEQ ID NO: 90186 - DNA, 393 bp, Glycine max
  unsure (1)..(393): unsure at all n locations
agctnttctctctcctcactcagccaaagcttatattcagaagccttttctctccctctctcacgtagctttcttcttcttcattctccattgaagcttcaagcaaagcttcaacctttggccaccatttctgccctaaatcgtgaaaggagagcatttttggagtcgtgaagtgcgtggctacgagtgggacttcgaaatttcaggtttgggtggacttctttccctcttgattttcgtgggtatggggttttgggagatatgaggggtagttttgttagttttctgctgtgtgatgattatttgtgaagacatttgttgaaagcttgtcgaaattgccatgtttgggtgagttagacatacccattctgttttagggtttttgtgatgatg

SEQ ID NO: 90187 - DNA, 443 bp, Glycine max
  unsure (1)..(443): unsure at all n locations
tacggacctatgaaactaagctaaaggtaatttcttgagggaaactntgtaattttagtttctctttttatttctaanggaaaattctcattctcttctcccaaacatgtctcatgtatgagactcattgaatagaagcaagtgtgctaatgctcttctctttgcaattttgaaatcctacttcaaggtatgggggttttcttctttttctcatgcttattgtgtgttgatggtgctgcaccacacgttgngagtcctaaataatgatttatggttttagaaaattgattggctaagaggttgagtgtcatacatgatgcatacaagctatntgttagattgttgcgatgacatgttacacaaaaattgggattgagatttattgggactttgtgcgataaacttaaaattatattctgaaattagacattncgggcttatga

SEQ ID NO: 90188 - DNA, 379 bp, Glycine max
  unsure (1)..(379): unsure at all n locations
ctactacaattagaactgggtagtgtactctgtttcttacttcgatattatttcccatttgtaaaaaaataacggtttttgcttaagaagttgtaaggaggcacacctgagtacctttgtaaaaggaagatccctattaaagttaaatcaccaatgaaatccttttaccccacacaatttacataccttcttgccatcttacattgcactatggaaacaaaaggtcgaatacgaacctcaacttttcaaaataaaaggtcaaatctgaacctcgaatttttcaagccagcgaaaggttgaatctaaaccttggcttcttcaacccaacaataggtcaagtttgaactttatctttntcaagcaaacatgaggctgaatt

SEQ ID NO: 90189 - DNA, 384 bp, Glycine max
tctcgaccgggatcttaagcaccgcggctgcagctttaatccgaacagcgtgagattctttacttaggcaacaacgttttatgtaatgctcaatacacattttagatttaaatgatgcgagagacaaaagcttgcgtaattataatccgggcattatcttactaacgaccccattctagcttgtcatgctttacaaaatactggaatagttgctgtgattcttcaattgatgagagagaagccagatgtcattttgatgccatcctatcgcttatactaatgcagcgctagtgtgcttacacttcctatacatatgatccctctatttttctacatacacaccggtttatctgtacagcaccctctaacctcatttttgcgcat

SEQ ID NO: 90190 - DNA, 278 bp, Glycine max
ctggactacccaacatgtcagcgaataccacgcactccgcgatctgttacagagagcggattccgcccaaacctgttattgcgaagcttcgctcggagacacgcactcatctactccggaaacgccctcctttagcgatgtggagcacaaatgatggccgaagagtgtagctttgcttggagcatcactggtgaatgaataacaccaagatggcaacctgagggagagagagagctgtctgaaaagcgtgggggctgcacgtagatagataagagctt

SEQ ID NO: 90191 - DNA, 389 bp, Glycine max
  unsure (1)..(389): unsure at all n locations
agcttgcaaattaaacatcattacattttttttctcaattngccaattccagcttacaaagagtggttctggctcaactctttcgtctgatcctgaaaaaaagttagacagaaagaagcaagtgtttatcaaaatccaccaagtagttgggacacaagccaagtccaaattacattacaaatacaaacttgtgatatttggcaaattctacacttttcataaaacagacatctttcttgcactcgcaagtgtcaattattgggattaaggaagacttagaaccgatttggtacaagcatatagtcaaaaatgatgctaactctaacaaaagttgaaggcaaagaatactaatcacacacacaactcaggccaaaatcgaagtggttggt

SEQ ID NO: 90192 - DNA, 457 bp, Glycine max
  unsure (1)..(457): unsure at all n locations
tgtagcctgttccagggtcaatgtttgctaaataagtatttataggaggaatctgggctgtactgtagaacatgaattgtcattggtcaagattacaatttttcttttaaaaaaacatatgatcatttaagaaagtcatctgatttttttaaaaagtaattcacaccaataagattatttttttttactgaatcacactgataagatttaattntcaattattccttcttactttcatatgcctttttattatacatagagagaagaaatcaaattataccggtataacttcgataattatttcatcatttttataaatctagaatgtgatttttattattctaattattgaattatatctatatattatcgatattattttgcctaaattgaatattaataaaaaaaagtaatgaaatgaattatattttaatatattntaaaatatataaatata

SEQ ID NO: 90193 - DNA, 193 bp, Glycine max
tgatgagtagacaaagattgtattctgatatgagatcatgataaaaaaaaggatctgaaaaaaggattcaattttatcaaactaagcagatggatatactaggatgatgacaactttattccttttacgcagctacaatacttacatttcatatttatatgcatcacctatgtcgactatatttaatgatatt

SEQ ID NO: 90194 - DNA, 289 bp, Glycine max
  unsure (1)..(289): unsure at all n locations
atgtcattgttgtgttttattcaaccactctttaaaacaatgattatgcatatatgatttaccacctatattattgatggaaaaaataccctcaacatatttctaacactctagttagttataaaagnaatggatgatgaaagatcctaatgacaccaacttatgattatctcataattacaatattttaaaaacatataccaaaaaccttattataataaccctacagaaaaatttctgctaacattaaataaattgctaacaatatacttaatacaagtgtccttct

SEQ ID NO: 90195 - DNA, 363 bp, Glycine max
gagatgagctgcctatagctgaattgaagaaatgatcttatccttttatgaaatctaggttttttactatacttacagaaatcttttacactcaaataacataatgggagagttgatcaattataccagttatcacaaaagtagcgtttcacgactaaatgacaactgtctcttactgttcaggctttttccaaaagcatgtgctatggtgattggcctggcattggagctgaaactgtcacagagacctatttgacaagcaattaatagttaatgcacctcctacgcactctgtacaggaggaatactacgcgtccctactgtgagacttgctagacgtccctatgggttagtagttcaatt

SEQ ID NO: 90196 - DNA, 491 bp, Glycine max
  unsure (1)..(491): unsure at all n locations
cttacccgaaacgtcgtcgtattcgtcggtagaaaaggtgncttagtctttgttcttcttcttcatcgncntcttcgtccctctcgacgtcngagaaggcgcgaaaagtggatgtcggcgacttcaatgagaaagaagcgtgaaatttgaggaacaatgaanggatcgagggcgaacgacagataaacttgtggagaagacctacaagcctccttgaagagttctttggccgaaagagagagagagaagcatgaataagtctagatcgatatagatagcaatacaacccacgaccacaccgggttgtctataacgttgttgatagaataagtacatcgttttgttaaaacgatgtcgtcacaatcatgtacttgcattcacacggtgtccanaatgatgtgtacgccacatacatcattctgcanaacgttgtaaataatcactattactaaatgcattgcttaaatacatcgtttggaccacgatgtgat

SEQ ID NO: 90197 - DNA, 463 bp, Glycine max
tactcagactcagatttgctgtgtgcgatgactttcttatgttgacatctagatacatcttcatgatggctaatggagcaatatcttggagaagtgcaaaacaatcattagttgctacttctaccatggaggctgagtgtatttcattatttgaagcgacatcatatggtatatggataaaacgtttcatggccggtctccaagtgattgattctatatctagaccgatcaagatatagtgataattcaactactggttttctggctaataacaatataagtggaagtcgtagcaaacacatcgacattaaatatttagtcatgagggaacatgtcatagcatatgaaatcatcattgaaaacatatgtactggactaatgattgtatatccattgacaaaaggcatgcacacacagtcatctaacgatcatgctaagagtatgagacttgattctgtcatat

SEQ ID NO: 90198 - DNA, 165 bp, Glycine max
cttaaccattcaatccaccttatatctcctgcatggttccttgcatcaaccataaggatgttggaaattcgttcttctttttaggagatgatgaaagtgttgttgtttgtcagtcatgagtccgatgcactgagctggggatttgatgcccgtggtgcataatac

SEQ ID NO: 90199 - DNA, 403 bp, Glycine max
  unsure (1)..(403): unsure at all n locations
tagtagactctaattcttgtttcacttgcctctctcattgtgttcatcatttctcagttctcccatgttggctaagtttacatatctttaaatttcacattaactgtttaaactgaatgaattcttggttaaatatctgtcttcgtttgaacctgaatatgtaagttagatctttggtttgtctgctattttgtgctcgaacctaccataaatattcaaactttagtgagacacccaaatctaaggactgtcacctatgtagttgtataaaacatgctaccatgaacttgccatagattctatgggcgtgaattatttctgttcttgtaaccatgtcagggatagatctttaccatagtgattgagcaatatgctgtaatagtcttacatgtcatcncaatct

SEQ ID NO: 90200 - DNA, 536 bp, Glycine max
  unsure (1)..(536): unsure at all n locations
gctattcttacggctacgaatggcgttccatttatctgaactattatgatatggagcactaaaattaattctctaatatnatcttctcttatgaaatcactgatattaatgtctttatctccattaacacattatcgacgttgtcaatattgatattatattttcaccatgtaataacaatgaagacaagaatagctntaaagggttttcattccatcatacttttttaactgcgatttaatctttataaataagagtttatctgaaaattgtgagaatatttattaacgtttaaatacagcgaatgacattgacaactcttttaatccaagcgatactaatttgacaacatcttgaacggtaacttacactnntcttttgcattctcatcgatattctcttttgaaacaatnttgtcttaatatagtaaatataaatatgacactatttcatagatattagattttgtctcacatctacatatggaactactacttcctcactatctccgtaagatttacatatatgagatggac

SEQ ID NO: 90201 - DNA, 234 bp, Glycine max
  unsure (1)..(234): unsure at all n locations
atagtctgtcagtgagaacctgtgatgtacctaagcaagcgagctcctggcagtcaacagataaaaggaaaacaagaccacanagcanggaggcttgtggtggctggccagctgtgaatnttgtgtaatatgtggattgtggcctctggtaatcgattactaagggtgggtaatcgattacaaggcttataattgaagacaggaggctaagatggtctctggtaatcgattacc

SEQ ID NO: 90202 - DNA, 149 bp, Glycine max
  unsure (1)..(149): unsure at all n locations
tgaagctgcagcttaatatagtaanaccattctgtaacctgcaacggatagatcaactatctattntctaattaccaccacatttaattctgattaacatttgaagaatatgatagtataattataacattaatatttaaaaacaataa

SEQ ID NO: 90203 - DNA, 339 bp, Glycine max
ttgattcaatttaatactgtgaaacattttggccctggcatcgatacatctctggaatcgataccaaagagtaatctcttgaaaaacttttaactaaattttggccaacctttgctcttcagagacattaacactgcttgatatccatcttgatatcttaatttcttggctgaataagcttgaaagcatggattctttgcatataaaacatcagctgatctttgctataatctcccctttgatgatgacatcctgaatcagacactattacaaatgatgccgtccacaccttactccctattttggatgatgctacttaaggatgttttatgaaattct

SEQ ID NO: 90204 - DNA, 160 bp, Glycine max
ctgaattgtcgggcagaacttgggactagggggtatgcaaacactgacatccacaccggcttagatgaactggtgactacagcactctgatccaataagacaaccacagagtggtggtgcattattggaaatgtatgcttgataacagtgtatatcagta

SEQ ID NO: 90205 - DNA, 303 bp, Glycine max
ttatacggaaaaggcttctgggaaaaacagctgttgtaaaaatctagccgttacttctgcttttaacttgactaatggagcttgaggggtgactttgacaggggccttgtattatgaaacttggcactcacaccacatataaactttgctaataacctcaactggacatactgttcagaatgcttctggactatctagtctaaggaacagtaacaagctaaaggtagccaacattctattataatcaaagggaacaatggactgtgctttagaaccctgttgtctagactaattagatgtatt

SEQ ID NO: 90206 - DNA, 333 bp, Glycine max
  unsure (1)..(333): unsure at all n locations
attcacatgtctagattntaagagagcgcagatgctagacttatcccaatgatcttgtatcatacaagtagctttttcactatcttntcctcttaagttgcttttgaccttattctaacagcacaatttattcttttctttctcttgttttttaacatacaacttatttgttgcgtgtgctgatgcttaacccttttcttttcattctaatagactctcctcncntaaatttagaggaaattntccttgaaccatatggctctctaanatctaacaagggatcaggagataattatttaagtcaggggtcaaattnttgacatatcattcagc

SEQ ID NO: 90207 - DNA, 264 bp, Glycine max
tgaaatgaggagttgatcaactctactcacacagccatacctcattaaactgtgatatgaggccccaaaatccacggggagtttacttttacaccctttgcctaaaaggtcctattcgttatcttgtgtcttttgacatcaacgtttccattcaaagacttcagctgtttgctccttaactcattggcaagttaaatacctacacttaagctacttttcatctacacaatctacttctgctaggaattatttacttaagttcat

SEQ ID NO: 90208 - DNA, 177 bp, Glycine max
gacttcctgggtaaacaacagcctgttgtcaaaactagaagcccgtctctcttctgcttttaaatttactaaaggagcttgagggagggacgttgtcactggccctatgtattatgaaattttgccctactcccccttaaaagtttgctataagcctcatggactactgtcagattg

SEQ ID NO: 90209 - DNA, 203 bp, Glycine max
cttatccactgccaggaactaacagtagtggttggcagttttgatccccatttccacccagcaagagatgaaatatcaaatggatgatccctagcgcctcatgcaattatgcagtatctcgctacattatttctttttaataaccatgttcaaattgtctttataaattgtgcttctccaaaccaatttcggcgtccggggaa

SEQ ID NO: 90210 - DNA, 490 bp, Glycine max
  unsure (1)..(490): unsure at all n locations
gcagctatggngatatcatatgacttgatattaactcttctataacttnacctggtaatgaatgaagatatttggtcacatactacatggagatgacatgatgatgggccaactgattctgatgatgaattcactggatgctatcctgcgactatatattctgtgtgtcttatgaacttangctaatacctttatttctcttcacccaacttgtgggatataggacggacccactctgtgtgaatatctaaaatagggcatggaatttattccatttctttcatactactacattacatccattcanatgtgancatgctatcacttataagcttaacactaaaatttactgtttatttgtctaatgtatgctaagagtaactgaataatgaaaagtagaatcaactgtgctatttctgagtatgctctgcttagttgcagtctctacactctgctcaatgtaacctacggtgtacctgatactgcttat

SEQ ID NO: 90211 - DNA, 359 bp, Glycine max
tcctgaatgcgtcagtgtgtttccaacttgcatatctataccacctcaaccttttgtcctcaggaacagacccatgaacaatttcaaggccaaagtcaactttattgaaaatccaatttgcacctatttctaacatcttacctataatctgacacattggtgataacttacaacccacatgcacaatgtgctagtgaaaccaaaaacccaattcaatgaaaggagaaaaggatcaagttctcaaagttgatgagtatcactacactcataccagtgcttattgttctaaccaagcttgacctcacttgatcatgtttgggcaaagcagcactataggatggagcctgtgctaaatggat

SEQ ID NO: 90212 - DNA, 107 bp, Glycine max
gagaagctagagcttagctactcacacctctctcataactaaactcaccttcttgagaagcttccttaagaagattcctaaagaagctagagcttagctacacatac

SEQ ID NO: 90213 - DNA, 403 bp, Glycine max
  unsure (1)..(403): unsure at all n locations
agtgtgataatttcggagtgtcatcctgatcaccattcaagtccaccatgcgtncctgatagaagaactgcatgcacaagatgntataatctgtgagtagtggacccaatgatttaagccattggacacctaacactacataggcaccagaaatggngaggacatggagatcgacagcnnactgcatcgactgtatgtcaatgagagtggcttcacacaagcttgtgcataataagtgttgaatgtntcctaccatgcacccacaaggaaatggtgtatcacgacaagacatattcaattgcgtcaccagctcttgttgaatgaaattgtaggtgcctccaccgtctactatcaccaccacctggcgaccggaatacgagcccgacaaccataaagtttcagt

SEQ ID NO: 90214 - DNA, 420 bp, Glycine max
  unsure (1)..(420): unsure at all n locations
aaaagcctgtatggttcaccccaaattccgttgtcatatgctatacttgatcccctatccagtcgataaattcaatggtagccattaccccaaccaaggtttctcaacctccatttctgctagaatacgacttcgaacgcaacgtgtgctngtcacggaggagcccccgggcattccattgagcattgtatgacctcgaagcataaagtgtgaagtttaatgaatactggctggctgaaattgaggagaatacttgttgaatctacattgaaagcactccatcattgtgaattatgaagctgtgttagactcattagatttcaagttatgccatatttaacccagtacatgctaatgaatgataagttatatttgtcctatctctacaaccatgttgcttttcacttactggatgggtgc

SEQ ID NO: 90215 - DNA, 481 bp, Glycine max
  unsure (1)..(481): unsure at all n locations
ctgcacttgaattttaactttcatgagaaatcttacgtctaaagattcttaggcttctttctctcttgaagacaaaaaacttcgatcaaaaaagttttacctcgaccttatcgtatgtatcttccatgagacaaatagtggcttgttcatcgcctgaactactactcttctcattgnctgagtcatctcaagtgaccatcagacttttcttcttcctatcctcagaatntcttttttttctcatcangggaaaatcacccttcatgtgtccaagctntctacattcaaagcagatgatctcattggtttccctcctatctctcatttgaaatcttaatcttcatttgagtagggtagaactttctttctctcatcattgcttgaattctnacatgtacccttatgtgcctgcttctacatcaagaatgactcatgcttctcctgtctctttgatcttatccttcattgagaggtgacttct

SEQ ID NO: 90216 - DNA, 239 bp, Glycine max
aacatgcttctataatacaacttttctacacgcattatcacaagcatcctaataaccaaactgttcgactcatgaaaatacttacacataaacccacatacagattgcctagaagcgggataccatcaggtttctatgctcagcactgtataaggggatacccgaagtatacctatctcaaatcatgaccaccggtgatgaacctggatccataatggggctactagacagtatgttgc

SEQ ID NO: 90217 - DNA, 427 bp, Glycine max
  unsure (1)..(427): unsure at all n locations
atacttctgatatttnttaagacgntaatctataaacttattaaagaaagggtaaanaatcttattattatttaaatgtctaaattttaatacataataatttaaaaaaatatttactatttttacacataaaattaaaattaaattatctttaaattataataaccttaaccattatcatancaacaataaacacataattaattttatatttttttttagtagtatcttaaccattacactaatattaacacaaataattctatgctaagtaaccntaattattattataataataatatagatgatcaagattatataattacattaactaactcttatatatatgtatatgaaaagtgtcanaggagagggactagatgtcccctcttcattttgtctaattcaagtaacattnntaaaatat

SEQ ID NO: 90218 - DNA, 177 bp, Glycine max
  unsure (1)..(177): unsure at all n locations
tatatcgagtactcgaatcgaaacccgtgctcgtagaaattcaaacaacaattactctttactcngatgtccgattgtgtccggagttatcagacgctgaattagaaagaacttgagaaaatccacgatataactnttaactcggatgtgcgacttagtcccgtaatatatcgagat

SEQ ID NO: 90219 - DNA, 153 bp, Glycine max
tgatatagaagaactctattattcaattattaaacaatgccagactcgttacgctatatgttctagacagctacaggctaagtagtagatcactactttttttaccttatataggaagatctacagcctatttgaggatcggcttgactctac

SEQ ID NO: 90220 - DNA, 205 bp, Glycine max
  unsure (1)..(205): unsure at all n locations
tggaagatcttcattngttccttatcatttccttttgaatccttgtcatgaatattcatatngtctanagaatctgcaatatcatctagcatattctttctttgacaaatagcattagattcatcannaggtacatgaatggattcctcgatattccatagtctnttattatatatcctgcatgctctgctttgtaatgaatatc

SEQ ID NO: 90221 - DNA, 142 bp, Glycine max
cattactgatgttgatgcgaacgcattcatactctgatgaatatcctcgatgaagactccgatgatatctaactctgattgagagcaacctcatcactcttaacacttcttccagctttggagcagtcttaagtcgagtact

SEQ ID NO: 90222 - DNA, 363 bp, Glycine max
ctcagctggacttagctgatttgggcctctaagactatcttaaactgctggtgacattaaaccatgaaccatgacatccctggacaaagctttctcaatgaatgacatcatcttattgctattcttcataaaactggttgagcatatgagacacctatatccaaacactcatggactctccaaactcaatctgaatctgttaccaatactccaatacctacttagacgaatcagtttcctgaccacgaaatgttgtcttgtttcagaataattcctcataaaccatattgtgaacttatctggaagcgtcatagataatatcgatgtggatacctgttatcacacctgacagagtttactata

SEQ ID NO: 90223 - DNA, 554 bp, Glycine max
  unsure (1)..(554): unsure at all n locations
ctgcagctcaacccagcacacaaatctaagtgctaatacccctcaattaatggattntctagggttgagaagtgaaattgagaatgaggtaaatntgaagcanactctcacctcacacaagttcataacatcaatntaaacttgtccaaactggatttacacctaaaatntcaccgaatcanaaattgactcttcaacacccaaatttaccctagaaatggctctttggtcactttggtcatttgtttntctctctagcacagcctaacctttctcatgagtcctaaatggcatttcaagctaagaataactcactctaacctctaaatactaccaattccagaattggcctttcggncctaannaaatcactctttttccactcataacaccacattctcactttctaaccctagggtaattctacccttcatctctaacnagttttcataagccatntcagcacatgaacatcacaagcatcatcatanaaaccttanaacagaatgggtatgttaactcatcaaacatgggcattcacatgcttcacaagt

SEQ ID NO: 90224 - DNA, 184 bp, Glycine max
gctcaggggagtctcaacggcttcattactcatgtcccgggtggccgcatttgatgcaggtctatccgtgcattctttatcccctttacggctagcattgttatacgcctcgctaactcacataagaaattcacgacggggaggttctccgtattcggtagagaatcgccgtggcgtgcgaccc

SEQ ID NO: 90225 - DNA, 436 bp, Glycine max
  unsure (1)..(436): unsure at all n locations
ctccacatncacaaatcacgtataacccatcatcccctggtgcccacctncaactgagctcacgtactcccacgtagcacttatactcggtcctctcaacgccgggtccccatcaatcctcccaagcttccacaacatccaggtaattccacatgcaaccatcatggactatacaaaaccagcacaacagggcagaggcagaanactcttgccaaaacacaactcanaatcacagcttttcacatacaaataccccagtaacatttccttttgatccaatctgtaaccgntggaccgactcgaaaaatatactaggaagtctctagtacataagtctacattatgaccgttgggatctgctagaaaatgtncagaaccccatatgtactaccctnnttacaaccagccatacacaagcatttttctggacttatac

SEQ ID NO: 90226 - DNA, 379 bp, Glycine max
  unsure (1)..(379): unsure at all n locations
tgagagaccatacaagtnttctaacgatatctaattatgtgggccattaagtctatcatatgctgacaatagccgagaagcccatgaatctcttcgggggcggagtaggtgtctgccatcgccttggccttggctaacaatcggggaagttcttgactcccgttcaaggtaagagcaaaccgatccatccacatggttgcctctcggtgtaaagagtcgatcacacttcctctagccttctttttccgcatatacttgcgcatactcatacgcgaatctatgctcgtgggccgtggctagacccagctcttcttggtacttggcgatgatagctaacatgttggtctctgtctcgcatagacgctgagacaagcttctt

SEQ ID NO: 90227 - DNA, 416 bp, Glycine max
  unsure (1)..(416): unsure at all n locations
aaatgatcgacacgacttagtggtaaccacacaactaatgctaatgttgacactaactaaacaaaatagctaacactaaacatagcattaaataaagctgaggctaagctggcgcaagtagcatatgtcacaaagtagtgttgtgtcatcgtggctgctactcattgaactaaaatcatcacccanatccatattggtctcaaaacatagaatctctcgtctacatttgtctctccgaaatcgtggcctttgaaagtgtataggatgaggatgaatgacataattgacatcgaacancaaggaaaacaaataaagtaatcaaccgttgtgacagatattctnttgctggtcaaatacctacaagtgttcttanaataagaagacacanactatttaacctcttacgttatgtatac

SEQ ID NO: 90228 - DNA, 325 bp, Glycine max
  unsure (1)..(325): unsure at all n locations
tggtcaagtggcttgtatataccacaatggccttcatcatatcaacatttatgaatatcattctataattcagagaatgatacacaaatcattgctctatgctagtcgttctctcaacaaataagttcacactctcaccgggttatgggtcaagcttctctttcacaatcaatctgtctactgactaacatttctaagggcaagcttacattcttgttctttctttgcctagcatacacaattgctcagactcatgataaaacacaagctntattccaatcatgcatgcaatccataatcaccatttcaaaactactggcatttc

SEQ ID NO: 90229 - DNA, 336 bp, Glycine max
tttgccaattcttagcgaaatatttactatgataaatgttgcacggctagtgggcgcttataacttacatatatttgtatgtacctataattattctatatacaatctcaatcaagaaaatactcaaatgaaaactctcctctcctctcttctaaacaatcgatcattccatacatctaggagacatataagttaccactgcttacatgcaaccaaatacataatagcactcgtcatcttatcagactgcatcctttatttgtataactatcgacttgtttgtttgtgtgtatatgattcttctagctgttgtgtgtatacagaaagaacatcgtg

SEQ ID NO: 90230 - DNA, 283 bp, Glycine max
gccctttaaaggaaagctacccaaaggagttgcaagaaagatgctgaatgtaatataattgaacttaaatttacaccagagatggacatagcttacacccatataaagaggagatactgtgactttgctatgttagatggacatagctacagagctttatttgactcttatctcagagctctttgtaagaaacgacttgtcttgatgaacattgatatgtaagaaatatgttacagatgaaaaactttattttataaagattagtatgtactaggcattgtac

SEQ ID NO: 90231 - DNA, 508 bp, Glycine max
  unsure (1)..(508): unsure at all n locations
atgcctttgatgtcatggctntaaaaaaaatatatagagaataaagagatagtgatcaancaaatatttgtttgagatctgtataaaaaaaaatgtgaaatcaaataatatttcacctgngtctctcaaattaactaaagaattaatagtaaaatatttattaaaaatacataaacaaagagtngcgactggcgagcagcacagcgacatcaagctctcggctgcttttgtgaaatgtggggatggatcanatanggcanggaagaggaagatttcatggcangaccaggtggctttgagggttngatctatatataaagtacagtacactgaatctatacccttttgngaacgtgtattctgccttgatagtatgcaatagaattttaaccttcattntctagtntatgttntactntgtaaagataaaatataccttatagaatcatatgttcaatatatatattagatgaagtggagaaattctgtccctaatcatatatatctt

SEQ ID NO: 90232 - DNA, 304 bp, Glycine max
  unsure (1)..(304): unsure at all n locations
tcccagtaacagagtgtatagaccgcataactgactcaacaagtgtgttctcattgcgatccaactcaaaagagtgtncattctcagcaatatgaacaagcaactggccctgatggactatacttncagtcacgctggaactcatcttattcaccaatcaatacaagaatcacaacctcttcttccacccaaaaagggaaccaatcaaatagcatacaaagagttcaaaacacaccctaaccaatagctgaaacacaaaacaccaccaaagcagatccaacaccctgtttttcaccacacaata

SEQ ID NO: 90233 - DNA, 277 bp, Glycine max
  unsure (1)..(277): unsure at all n locations
ctgcagcttattattattccttcttaatttctatttcataagtgttatggagaaacttcttcanacagagcctaagtaattttggtgggttaagaacagagagttccttatatgaacataagaatcttcaagccaaagcaccataatgaagcaaaggatacaaaagaaatattattatttatagataatccatatacaaaagntgcccacaatntaggtcaaaggaaacacaagattgaacttactggaacatacacanncacacattcatcttaaa

SEQ ID NO: 90234 - DNA, 292 bp, Glycine max
  unsure (1)..(292): unsure at all n locations
gtacaatgagttggggagacaatgacgcatgtatatcaccataaagggtattatgctggatgtagagatacttaacagaacgaagagaaccaatgtcatcacgaagaatttcactgagtacggtggagcgaatgcttattatattcacagcaataaagcttgccangtgtatttgatgtgaattgtgcaactaatacaactacagtgagccggactttaacaacacgaggtctattatcaatgcaagtgatgcctacccaagatgaacagactgacgtggatggatccacat

SEQ ID NO: 90235 - DNA, 401 bp, Glycine max
  unsure (1)..(401): unsure at all n locations
acttgtgttaaagtggctgtcaattctcttgtgattngcaccacctattgaccngctttaatttaaagaaattaanggttaataaagtgaaaactctatgattgtggctgcctcatggctgaccaacgagttgcataatattccatatcgttatgtagctgtaatctagcttaattaggtatgatgacaccatcaattcattgtatcaattctagctataatacggttaatgacaccatacatcgttgtattggtgatcattcacttgtgtaccaacttgatgtcctcctattataggctgcacattctataagataagaccttgatntgaattttatcaccttctaatgtagagtgatcctctactacttagtgatcaagaatggttataaagaacacac

SEQ ID NO: 90236 - DNA, 497 bp, Glycine max
  unsure (1)..(497): unsure at all n locations
tagctctcgtgttgatcttgatacttggatatcgtttgaatcaaactgttatttcattctctaatgtatcaaaacatcatgatcatatggaatcattcaaacattcaagtcagagtccttgcttctacactttacacttggatctccgattcaggtgcgtaacatatctagactttcttaattgcacacagaagctctcggnaaatttaaatagccatcacttttgactctagtgtatgcgttacgactatgatatcttgagacgctcaaatatgaaccatgggagctcacgagagaatttcatgtgcttcacattaactcggatctccgattcagcacataatacatcgagacgctcgagattgaacatgtatgctctccgcacaatcaaacgacgatatctatngactatggtgatgtgtgaactcatgatatatctaacgctccaattaacacggaagtctcagaattaaaggcatactttacttgatgccgat

SEQ ID NO: 90237 - DNA, 447 bp, Glycine max
  unsure (1)..(447): unsure at all n locations
tgaaatgaaactatctacaagatttagctcgttattgatatatacgttaatgatgcccatcgaaccaggactagtaatgtaagacacatcgtctcacagagcagagaattaaaaataacttgagataataacccacattgtattggaagacaaaccagaacaaacaatagcttgtgtgaataaataacaaagatattggcataacaccacgcaacagtggcatanacaattgaaaagacatttcgagcacatgctaagtataagcatacattacatgtgcatgtgtgcatgtgctngaggcccctttcactgggaggctgantgcacacaatgcaagagcagccaggtctgtgacgtggatgcttagttgtggcctgcacagatgctgggagtgctcaccctctccaggagtatattatattcttcggaaatcgtacaaaaattaga

SEQ ID NO: 90238 - DNA, 434 bp, Glycine max
tatggattatcaaatgctttatagtggataaggatgatagagagtgcgggtctatcctttctctatatttataaaaaactaacatgcgcgtaaaagaactaattagtttacattgtgataaataattcgcttagctagtatatgaatctctgaatttcattactcaattacatgtgtgttcggtaaaagcgtttcgttttcattactcgatgcggcaaattttaattggagccttttttttgggaaatttaagtggtacctaaacattgaattgtaatgacacagcggagactggtgttgatttttctatgcaatagtagcatgattacataatagctcgatgggcgataccacattccatatcagtgacttaataatgagaactatatatcgaatatggttaacataacggtagacatctcatatatttttat

SEQ ID NO: 90239 - DNA, 51 bp, Glycine max
atcaatctacacttttttgtgcaccatccccttccatggcccattgttttt

SEQ ID NO: 90240 - DNA, 382 bp, Glycine max
  unsure (1)..(382): unsure at all n locations
agccttcatatagcgacacacaactcccaccgcatatgaatatcggccttgttggtagtacttaactccaaaactctgagacgggagctaccttctcttataaacttgatacttcagccccttcctaggtggttcacggatgcatcancatattaatttcttaacacttctggttgtgtaccttgcttgagagaacaaagataccattcctctgtgtcgcttcactttccatttcccagtgatatgacatgagtcccatatctggcatatcaaattcacgagacatggacnntcttgagtctcannacacattgggtattgccggaaagatanggcatcacataaagacaataatacacatcccatattaaagttaacataa

SEQ ID NO: 90241 - DNA, 293 bp, Glycine max
ctttccttctggtaactctactagatcatatgtccgatcttcaactaaggactacacttcttctttcatgactcgcatccatttctccatatcatctatctcaatggcttcttggaaactctgaaggctcccatcattagtgagatcgacatattcatcagaaaaatgcctctttgatggctgggtgactctagttgacagccctacttgggatacatcttcgtctggatagtctccattggtgatctttccatcatcttgagtagatgctctatccgagtctgctccatctg

SEQ ID NO: 90242 - DNA, 387 bp, Glycine max
tgctgattacatctcccttttacaatctctgactatcaaacgctgatacatgctgtgttggccaaaccgttatatgagccactatccatttagttaattcattgaatatggaaacatgccaactaaggtgctgagctttctttttgttgttttttactataactaagccatctaagtgtcttttgagtctaccttgcttatgtctttcatgcttattgtgaatatccttgaatttgcttgtaaacatatggctacttcatctcattttaggcttcgtattcctgctcttgctccttgtcggagttcctatagaaatggcgcctcctcgaaattgatcagaacacggaaatgactagagctatgactaaagactcaattgctgataca

SEQ ID NO: 90243 - DNA, 207 bp, Glycine max
  unsure (1)..(207): unsure at all n locations
tacaaaaaggagaagtggttcagagaaaataccatattacaaagcaatggggatgtcttctncacctctcagaacctataaaataactctataacctataatctacctacaagttaggacatctgctttcttgctcagctatatctttgttctctgcacacaattcacagtcaattcagacctctctcacgtcatcacactcatttt

SEQ ID NO: 90244 - DNA, 384 bp, Glycine max
  unsure (1)..(384): unsure at all n locations
tcatacaccttcatggaatggtcaacgatattttatatcattcatagacgaatactncatatatgcatactngtttcttatacatgaaaagtcacaatctctggatgtgtcaaaacaataaagttgaagttgaaatcanatcaacaaaagaatcaagagtgttagatctgatcgtggtggtgaatactatgacagatatgacagttcaggtgaataacatccggngccttttttcacagtacacccatgccaggtcacctatcatgaatggcgtggctgaaagatgaaacanaactcttaaggatatggtangaaacatgattngccattctaactttactagagtcactctgggaaggcactaaagactacaacttacattct

SEQ ID NO: 90245 - DNA, 235 bp, Glycine max
ggggcttgtttcctagcttgaactgtcatcctctttccctacctcttaactgtgccgaatattctgctcgaaatgatcctccgatttctcctcgtgatattctcttgccctgtctcatagatttcgactttatgagcggatcctgcttatacttttatatgattgcggatgaagtgctccaatttgattgtgaaatattaactgatcctttgtcattatgatccatttccctaaa

SEQ ID NO: 90246 - DNA, 355 bp, Glycine max
  unsure (1)..(355): unsure at all n locations
attgnacatcggcttattgtgcagtaaaacatattgcaagaatagacctgctaatataatgagagaggtgacaaattgagaaattactttaaaggtgtgataaatatctattatgttcgagatcacatgatagggtatanagtaatatatttaaatattttcttttctgtaacaacaagaaaattactccttttcttcataaactatttcttctgcatcttaaccaacaggctaagatataatagtttctcattataatatgatatgagataatgttatatacatggtaaaaatgtagcgttgtacttatcttattgacatttctaaataagattaaacattggtatttatatca

SEQ ID NO: 90247 - DNA, 463 bp, Glycine max
  unsure (1)..(463): unsure at all n locations
tatatatactcttaacactgctactataaggagaatcagtagaatacaacactattgagaacgtaactgggcatattcctgtaattaattacattacctcaccaacaacagtcaaggaagttccaactggaagtacccgttcaattctgttgagtccaagcatatgaaaacatggtctcatatatgtgaatttacaaaataagcagcttagtgaatccatgccttggactatttttagaataagaagtatacttctgatgacagctagacacacgacagcatattcataatttgctaaatacacaggcccggtgctggnatagaagcataaaaaacttgtggaaacttatggtactgatgcacgaaggacagtacactaagtcactaacangtactcgcttaatcttaagtggtgtgctcaaagttaacatcacaagaatggaatgtacaacaatactcgtct

SEQ ID NO: 90248 - DNA, 114 bp, Glycine max
caatttgatagtgataattcagttaaaccatctgcttgtcttattccacacgaaagaggtttttgcaatgaggtgagcgataatccagctttacctggatattactcacgatta

SEQ ID NO: 90249 - DNA, 526 bp, Glycine max
  unsure (1)..(526): unsure at all n locations
ctgcagctatctgtggcagatatgagtgataatgactttncactccatctgccaactttccatcataacaccgcatattttgcatactggatcatcacacttaagtgtntctcgcaacaaccattccaatttccatacttgcatgaagtattcattgggaagtggataagatgtacctaaacaaaatcanataagataattaaactataaatatagatctgaaactatttattatacttatgagagttgaaacaatatacctggaaatcaaatagtcatctcataagatggcttagaaaattcacacaatatttcagctctcttccatctctcattagatggacaacatttgtattctctatcacgaatagtgaaactcgcanaagcacgacgatacctaagagcactctcaagcatgatataagtagaattcaccgagtagcacatcaacctcagcccacttagtataatacctctacttgacaaacattcgtaatacattttctgctcgacctctacatattat

SEQ ID NO: 90250 - DNA, 219 bp, Glycine max
tctcatatactcataagtatttggcgctatgcctcttttagacgtatgcaaaatattatccataaagcccactcatagacatatactgaacttttatccaggatggtctcttagccgctgctatacacacgctatctaggacgaataaggccattaatatgtgagaatcacttgaattgtactcaaaggggtcagctattatggcagcaaaaattttgt

SEQ ID NO: 90251 - DNA, 428 bp, Glycine max
  unsure (1)..(428): unsure at all n locations
tattcacatcaaatggaagagattagagagataaatcaacaattcctacataatttaatcccacaatatacctatacatagtatgtatcaatcatcagaataaaagctacacaaacaatcacaacaaataaatggctttaaaaatggtgacaatttaaaacttcataaaatcttgatactaatcatagcaaccgccactgtattgtggacaatntggatcaaagacttgttggatcacaagaatatttgactctactanaaataatatgctcatatgatgatccaactaaatttattaaaattgaatctaatatctatgtgcacaatgatcaatacatgtgcacaaacaccatcaacttgcgctcacatgctatattttgtgttgcttaacactgactcctttgcgagcagatgagattgtgtctcat

SEQ ID NO: 90252 - DNA, 355 bp, Glycine max
gctcttactatccgcgatgctatccttcatataccgctgagtgggcttatagcctagaccatactttccacgattttctttggcatttattaggctagttatgccgccgctgtctttgcctaaacccatatccggttcgtaaccgttcccaacataacatcggccatcattaatgctgcatcggacaggcaaggctgcccagagaaggagtccacggaggaaatgcttaccatctcaaaagactggtaagcgggttctaatgactcctctgcggcctccacataacgcatagaggatgggcagctcaccaagatgtcttcctcgcctgatacgatgaccagaatgcccttcacta

SEQ ID NO: 90253 - DNA, 392 bp, Glycine max
  unsure (1)..(392): unsure at all n locations
ggggagcacgaaatttaaagaatataatagggagagaagtggaaccttgaagtatatctcacaagactctcattcatnccaagttacaacaagtggtacacatgtttctatttatagactaggtagccttcttgagaagctctcttgagacaacttccttgagaagcttctttgagaaaacttgcttgagaagctagagcttagctacacacacccctctaataactaagctcacctccttgagaagcttctttganaagattcctaaagaagctagagcttagctacacacacctctctaatagctaagctcaccctcttgagatgagaagctagaacttagctacacaccccctataatagctaagctcacccncatgacacaatacatg

SEQ ID NO: 90254 - DNA, 149 bp, Glycine max
gtattaccccccttttacttaaggaccccttctatttttggtatttttttctaacgtacaaacttacgaattcgtacgatcttattttcttcgcagggtatgaatctacggatatgtattactctttttagcttcgaaaaatatgaaac

SEQ ID NO: 90255 - DNA, 328 bp, Glycine max
  unsure (1)..(328): unsure at all n locations
acatggtggtagcaagaactatgctaaatctgggaacatctggtaaatatgatgttgagtaaaggactaagatacttgtttgtaccattggtgagagaactggctcaccatactaanaaacatttttgacgacacggcttctacaccggttgtgagagacctatcttanaaaacatgtngtgacatttttgtaatgccgaatctatacaaggcagtttcaaaaccatcttcaatgagctgtctaggatggtatctatacaccatctacaatgatgtgtacaataaataaatagacaccatgggtttggtggaccgctnctgtttaaac

SEQ ID NO: 90256 - DNA, 258 bp, Glycine max
atcagtgaaatgtagtgatttcttccactttctcagctcaaacttgttttctgaagaatgctgatgagggtaataagaactgaagtactcatgggcaaagagtataaatcttgtgtgaattttggcattgcttgggacaactctatcatatagtttgttcaacactaacattggaagctgattcttaagccacattcagtcacactggatacttttgctacacattcttgagtcttagatcgtcatcttatgttccat

SEQ ID NO: 90257 - DNA, 376 bp, Glycine max
  unsure (1)..(376): unsure at all n locations
actgagctcagctactatgctctgacattatcatcacctagttgttctcttctaatgacacggcatgtgtaagacttactttcaacctcaaatacactaaacaccttgcactttatcaaccatgtgggctgtaaacatgttatgaaatcaagcacatgactcaattgtaagatcatgatagctaggcctcatcacctcatcagcttagcttggtaccctactattacagtttgaagaacacaacaacctaactacaggagagtaattatgaatgcctctgctggtaagatgcaaaatgacaaggcaatgagtgtgtgtcatgtgtctgtgtctagagctnatgtttgatatatataagatcctctacttactgcac

SEQ ID NO: 90258 - DNA, 73 bp, Glycine max
atcccgactcaacccgggcatagtcggtcagtgagaacctgtgatgtacctaaacaggcgagcttctggcagt

SEQ ID NO: 90259 - DNA, 403 bp, Glycine max
  unsure (1)..(403): unsure at all n locations
tcctcttcggactcgtgcgtntctctcactctctaatttactattattnnatattattntgaaaacaactgaagtatgctcttttctttgagacacacgtacggcanagaaataagaattntctttgatcttgcagcatgaagtttctgcagttaattgtagagttgtagctgaactgaatgagggtatctgtgtctgaatttctggttcttactctttttttttgtgtgtgtcagtgtattttcccagctgatatggtcctcacacacaatcaaattctattatggtggtggctgatgagtgtngacagaataatggttgggaacaaggattacatatagtttgaaacgagaaatagaatgtgtaacattcgagagttgtatggacccttagaattactaat

SEQ ID NO: 90260 - DNA, 279 bp, Glycine max
tttcacccattataaaccccccgcctttttggatcttttcgaagtacgaacctacaattgaacatccttgttcttcgaagcacttgttttactacgaatgtaggaactactaatggcacgagcttcattgattccggtgaacgaacttccgatggcatatatgtctttgtttcgcagtccaaattcacaatgctatgatggtgcaaccctacaagacaacacagtgctgtatcagcacgtcccgacaaaaggataagtgcccctactgttttatgaata

SEQ ID NO: 90261 - DNA, 344 bp, Glycine max
  unsure (1)..(344): unsure at all n locations
ctgcagctgatcactgcagcagaggtgttcttattttcacctcggagaattttggaggccaagtggctgttctatgcacccatttactaagacaccccctgcttttttgggattttttttaagtaccgaactacaattctaacgaacttgtttctttcgaatgtacggaacctcgccgattacatatatcaatccctctttgacttacggaatggtacnggaacctcactaattgtgcaacgaatgcttccaatttgatttctcgtgtgtcacggaaccttacggattgtgcataatatttcttttgctttcggcatgcccagaatctacaaattgctaatgat

SEQ ID NO: 90262 - DNA, 271 bp, Glycine max
  unsure (1)..(271): unsure at all n locations
ctcagctgctntgcttgagaaataattaattctttgttatatgaacaatcacaaatctgttggtgcaaagtaaacaaagaattaatccatggtgagcaagactcatagattataagatttccatatcagtgcgttggatttttacccagattaaggacattacaatattgtatgtcctgctcatattgatagatcatatatatcacgggagttagctgactccctacatcattcaaaatggatagagaaacaactgacaaatcacgctatg

SEQ ID NO: 90263 - DNA, 321 bp, Glycine max
ttattaatgaaaaatattatttattcgatattacgtcaaaaaatgcattgacttttatcaaatagaaatttgaaataaaaatcaattcttatcaatcaaaattgaaaaatgaattaattgttatcaacaaaatttgaaagaagaattccatgacattgaatttagaattaaataaatttaatgctatcaacaacctatgaatttgaccctatttcaaaagtatttggcatctattaaaaacattatctctatttaatgtgtattccctatttaaaagactactttagtataatacattgtctcatcataaacgtatggaaa

SEQ ID NO: 90264 - DNA, 125 bp, Glycine max
aggagaggagagcctcaggaatggagagaaagaatgacagcatgagatcttgcagaatttctgatgtgaattgctcgatcgaatgatgaaaaaaaacctctgagatgaaactcaaatatgatgtt

SEQ ID NO: 90265 - DNA, 376 bp, Glycine max
  unsure (1)..(376): unsure at all n locations
cacgagctgcagctagatagtattacatatatgattctttatacaccttctgttaagataataagaatgtgagtgatgatagctgttaatcacatatatagatttttattaacttttagtttggctggatatatcaacattagaccaatactattccaaatttaaaaattagtaattaataataaaaaaattatctaaattatgttttttaaagtatcttgacataatgacacgactctatgtgtcatttaaagtatcttgacataatatgtgacgttctatttctcaccctcttttgttaatgggatctatctacactcacccacatgaataaagcagctgggttnttntttttagttgtgtggcactatctgag

SEQ ID NO: 90266 - DNA, 239 bp, Glycine max
tatggacggactgtcatgtttctacgttgattcaaataacgattttggttaaacaattttctccctccccatattggcctataaaaattgtgaattataccttttcccccatatcttggacacgagtatgtaatgtgacaatattacttttatttaaaacttaacatgcaaaaatgtataacctgtacactatagtatgacacttatgtataattaaaaccaaattgagctgcctgtat

SEQ ID NO: 90267 - DNA, 168 bp, Glycine max
  unsure (1)..(168): unsure at all n locations
atatttactgacctattagttatttgctgactcctatttcagtcctatatacgatgtggctgctctaatatcaatacagatgctatatangtggagaataattatgcgaatatctaatggttggatatttttaaacttaatggatccaacataattattggatctcta

SEQ ID NO: 90268 - DNA, 221 bp, Glycine max
ctgacactgcaaaactgatgtcatcatcaacatcatagaaactgtattgtttcatttagtgctcaaagtcaagattatttatggtcattctgattagagattttgccttacgaaagatatcaaattaggatatgaatgatcagacgatacgctgctcttatatctttgttcctaagatgtattactgtaacacacagaagactgtatttgtatacatatat

SEQ ID NO: 90269 - DNA, 145 bp, Glycine max
gacatgtgacaccttgctgaccttaatgatgcactaaacaaaatattggaaactaagacaatgagatctattatgacatatgaatttgatctacctcatgtaatgatctagcacatgaggaagggggggctctgcaattgacgct

SEQ ID NO: 90270 - DNA, 409 bp, Glycine max
  unsure (1)..(409): unsure at all n locations
gaacctgtgacgtacctaaacaggcgaagctctggcagtcaacccataaaagaacatagtccatgaatcaaagatgcttgtgtagcggctggccaactatgtatcttggatggtatctgaaatttatcctctagtaatcgattaccaaaggtgtgcaatcgatngcanggcttaataatggagacaagaaataaatagcctctgtaatcgataccaagtgtgtgtatcgatacacggcttaaaatgcaacaaatgtaaatggctctggtatcgataccaagggtgaatcattaccagggataggtctggatcataccattaggaatcatactatgaattgagattcctgtcaaggctagaatcgtgttagactgtatcatactactttgtatcataccgaagaatcctg

SEQ ID NO: 90271 - DNA, 169 bp, Glycine max
ctatatgaaacatcatctttggttgtctgtcatagcacagtatgcattacttattcatgtacatattctattgttctacaagcaagttatatccgcatgaccttagagtagacgtccaaagaatcttgcatttcctggaaaaagaggatctatttgacaattcttaaaa

SEQ ID NO: 90272 - DNA, 261 bp, Glycine max
ctctttggtctaatccactaccagactattgcgaattgatcacacacgtcgactaaagcttgtacagagatcttcactcgtggttaattgaatactgatgatgtgaatcgatacactattcaattgagaccatggctcatactcatgagtctctacgttaatcattaccaagcgattgaatcgatacatcggtctcgaagcgtcccagtctgatcaagaaacttgatcgaatgatcaagagtctatcgatacattgtcttg

SEQ ID NO: 90273 - DNA, 226 bp, Glycine max
  unsure (1)..(226): unsure at all n locations
gatgatgaccaaggtgatgaacctatagttcgngagactaaagaacaactcatgtgaatcaacagaacctcgtatgtgaatcatgagcgagtcaagaggtcgagaattaagaagaattcttgactcttgaagaaaggctacaatcaagaatcaagattcgagattcgagatctcatgaatctagagcaagattcaagactcacgattcaagaatgaagataagact

SEQ ID NO: 90274 - DNA, 446 bp, Glycine max
  unsure (1)..(446): unsure at all n locations
aaaataactactttgtctttttatacaaaattctgtaatgccatgactatttggttgaagtgatacctttgctcaaaggcttgcacaaactgatcaattatataactttagtgagcatggcaacacccttttagcatttagaattgaaaattttcttaaaataatcactatcatttatattctagttactcaaaatgatatganaatcattatttacagaaatcaaagaagggtntagatgaaaaagaaaggatacaannaaaactttccctattaccctgagggctnntttttntaaattgatggttagaccgaagaagcaatatttgtgactaaatatataaagatattatancattaaaagtcaaagataaaaaacttcctattactctaagcttttcttacttaaattgagaatagtatagttctacatcttgccctatctg

SEQ ID NO: 90275 - DNA, 421 bp, Glycine max
  unsure (1)..(421): unsure at all n locations
cgatcttaatcaccgcagctgcagccttcatgtctatgattctagagagaggaggtccactttcacagagttctgagagatcttgctgtgagaagatctgcagacaccatagctcgacgaggaagttgttctgagatcatgacacgagtttgcgagtggttgtgagatcctacacgtgaaggagacatcctcatcactagtatttagcaatctatcatcctgatcttctctatgttcganaagaggcttctttggtatggaaatctaacatcctctagtggatcgttccttgacgtacttgatgataaacttttctatctattgaatgacgtcctatgaggtatctcgactatcagctatgcattctagtatgcctttaccttgatcacgtagatgcatgctctattaggcgcattcaaca

SEQ ID NO: 90276 - DNA, 286 bp, Glycine max
ttttgatatatatatatcactattttgatccacgggtacgacaacgacgtcgaatatttacaaataacggtgaacattcaagacgggaatttttaattaatagcgaaacacttaataatgacgactgtcaagggtaaagcatgaacaaataatctgtcaatatgccaccggtctaaagatgacctcgttagtctccatggatgaaaactaacacatatgtcaacgtgaactcctatatacgaaatcgacgtcgacgctgtgattttcgacattctacattaaataa

SEQ ID NO: 90277 - DNA, 377 bp, Glycine max
  unsure (1)..(377): unsure at all n locations
catttagtggattttcgacggttgagaagtgaanatgagaatggggttattgtggagtaaactctcatctcaaacaagtctataacaataatttaaacttgctcaaactggttttacgatgaanactccaccgattcaaaatttgacccctcaacacccaatttaccctagaaatggctcttggtttcacctttgtcactcatttttttctcatttgctctgcccaagctttcctacaagtcctaatngacattntaaactaggatcaactcactttagaactcaatntacaataaacccaacattagtttctctaaccctcaaaatctcacacttttctacctacaacgattgcatnctcacatttaacccctaag

SEQ ID NO: 90278 - DNA, 346 bp, Glycine max
  unsure (1)..(346): unsure at all n locations
gagtgccacaaaattggttaaagagcttttgctaatgaagcaattgcttggtaccgaaaattatgagcctaatcgactcagtccaggtggtccagaccctcttcatcactaatgaatgtgcaattaatgcatgaaaacttgagaatcatagattcatgcaacaggaaaaggaaagattgttattgtcactgcatttaccttcccacgtacgcattccnttttagaatangagtccataaatcatnntatcgcatanaatgaattatttgaccatntttagttgattcttaagaagaatcacaaagagggtangtggaatgatcctacaatattctctgtcgtctgt

SEQ ID NO: 90279 - DNA, 215 bp, Glycine max
  unsure (1)..(215): unsure at all n locations
acacattcacatattacagctgtcctcactcaaataccccagtgacattttcttcgttccgattcgttaaccgttggatcgacttgaaaaatttactggatgttcctagtacagaaatatacanttttactgttgggatctgctagaaaatgtccagaacccaatatgtactaccttttccataaccagcaatgcacaagcattttctgcacatg

SEQ ID NO: 90280 - DNA, 314 bp, Glycine max
  unsure (1)..(314): unsure at all n locations
tttttttttgatagatctattttttttttttttttatatttattttttcattatctttttttattttttttatactgttttgctttctttcttttcttttttttctgttttttttttttacttttttttttttgtgtngtttttcttattttttatctttttattttttattttactttttatttataatttattttttattttgtttctttaatttttttttttgtttttttttacttatttttttcttgttgtatacggttttattttttttttttgttttttcatattttttttctttttttgtttatttt

SEQ ID NO: 90281 - DNA, 235 bp, Glycine max
tactcttcccagcggctcgcacgtacgtatcgctattgccaacttggagagctgattctataataactaaaatagtgtggttatatacttgtaactcttctgaaataagtttcgtagacttcaaattatactgtcacagcattgctataacagaagcttatcaaaaaggtggccgctgcttatctactacgtattacgaacttctgccacagttaaattcctaaataaatttttt

SEQ ID NO: 90282 - DNA, 383 bp, Glycine max
  unsure (1)..(383): unsure at all n locations
ctaatgtataagccatataatctggcccataatctttagcaattcttgctctcttacctcttcgaggctctatatctgtgttctggttgtgcaagattttcactactaatagcaagaagataattggatgaagtacctccactactcccttaattaaaaggaaatgtattttcataaaaatcagcatcatttgactctatgatcacttttgcgtttatgtcataaaacctatacgctttgctattaatagcataaccaatgaacacacattcataggctctactngcaagtttaaccctcttaggatctgggatccttacatangccagacatccccaagttctcaaataagaacanattgattggtctttctttaatatctc

SEQ ID NO: 90283 - DNA, 346 bp, Glycine max
  unsure (1)..(346): unsure at all n locations
ctatatgatgcgctctatgagaggttggatcaaatggagaatagagatcataatgaagaagaaaggacgagaagagggaatgatggtgttcctataacaaaccgaattgatggtattaaactcaacattcctccatttaaaggaaagaatgatccggaggcctacttggagtgggagatgaaaatagagcatgtattctcatgcaacaactgatgaggacaaaaaggtgaagcttgccgcacggaattntccgactatgctcttgtgtggtggaacaagctacataaggagagagcaagatatgaagagccaatggttgatacatggacggagataaaaagatcat

SEQ ID NO: 90284 - DNA, 339 bp, Glycine max
  unsure (1)..(339): unsure at all n locations
gaccctcttaatggccacatcacaagatggaaatggtggcgtccttcctctatcattcaccatgggtgaacgtgagacgttgacagcgtggtcatgattnttggcacacttgcgtgaacacgtcactgataaanatggtatttgtctcatttctgatcgacacgcgagtataaagtccgctgtcgctaatgaagcacttggttggcaaccttctcacggttatcatgtctattgcgtgcgacacatantcaagcacttcaatcganaattcaataacgccaaacacaaagaaatgttgcagaagctgggtaagatttcatatttaatggtcacgcttat

SEQ ID NO: 90285 - DNA, 471 bp, Glycine max
  unsure (1)..(471): unsure at all n locations
tggagatgcagcgcaagacaaatgagaagaggtgagaggaggcgccatccactacggaataagccatggaagaaggagcttcaccaccaagatgagccttggataagaagcttagagaggatgcttcaatggaggaaaagaaagagggagagaaagagagaggggggagcacgatattgaaggaagaaaaagggagagaagttgaactttgagttgtgtctcacaagactctcattcatcanagttacaacaagtgttacacatgcttctatttatagactaggtagcttccttgagaagctttcttgagaaaacttncttgagaagcttctttgagaaaacttccttgagaagctagagcttagctacacacacncctctcattactaagctcaccttcttgagaagctttctaagaagaatctaaagaagctaagctagctcacatactctctatagctagctacctct

SEQ ID NO: 90286 - DNA, 400 bp, Glycine max
  unsure (1)..(400): unsure at all n locations
cctgtgatgtacctaagcangcgagctcctggagtccacagatgaaaggaacaaagaccacaaagcactgatgcttgtggtagctggccagctgtgaaacttgactgatatgtgagatatggtctctggtaatcgattaccaacggtgggtaatcgattacaatgcttaataatgaagacaggaggctaagatggtctctggtaatcgattaccaaggcgtgtaatcgattaccacgctcgaaaacgaagtcaggaaacttagggagcctctggtaatcgattaccaacctgtgtaatcgattacacagagggatgggccactggtaatcattaccatgcatgtgtaatcgcatacacagtgcattattgcatatttcatgtcctgaggctgtgtaattc

SEQ ID NO: 90287 - DNA, 146 bp, Glycine max
  unsure (1)..(146): unsure at all n locations
atatggtataccatatataatatgtcatcacaatatgtacatgagatatcatatttcgttcaaatggttacttggatgatattattngtaatttattntaatataataaactacccacatatattatcaaatatcaaatattacta

SEQ ID NO: 90288 - DNA, 376 bp, Glycine max
tcacagttcacagtcaagtatataataagctctcatccgattaaactattcattaaaccacgccctatatctgttgaacggatttaaaaagctagaagaacaacacaatattgaaactaatacagtacaccagtcatgccctcaatgctaaaacacactggcagcaatcatgtgttttgagttagttagcagtaacataaatggcagcacacacagtgttttggtaattaattggcagaaacagctaagagagataataacaagagaagaagaactgaatgaatgaatgactgacttggaattatagccacttccaggttgcagcatctcaggagccatcctgcagacatgagaaaggtgggacaacatgtatatt

SEQ ID NO: 90289 - DNA, 83 bp, Glycine max
tgactctatgggtgtgtatggggactcctacatataaggattcgcatggggtatttgcgtgctgtttgtgatataatgcatat

SEQ ID NO: 90290 - DNA, 394 bp, Glycine max
  unsure (1)..(394): unsure at all n locations
cagctgcgcccgactgatccaacgnttccatcaccggaaataggttgcatcagcaaacacccagaccgtgtgcggaagagacggccagagacatcagacaggcgacaaaatatgcggcaatcatcagcaggtaaggggagttaatatactgcaatggttttgacgccagcttgaccaccatatcattcgcgccgatatgggtcattgtagcggcanatccacacagcatcataatcatcatgccgaggtcgccgccgcggctcattagtaatattttaacgtattcaacgatatccgtggcgctgtagcctgntgaaagcctgctggacagtaacacttttgtgcccataatggcactgataatcagcaataacaggccaccgaccaatacaca

SEQ ID NO: 90291 - DNA, 518 bp, Glycine max
  unsure (1)..(518): unsure at all n locations
acgttcaataactgctgggaatcgattactatatatgtgtaatcgattacacagtgcanagtttgaattcacatttaatagctgttgaaatcatttttggccactggtaatcgattacatnctctggtaatcgattaccaaagagtatatctcttgaataagactttntaacttanatttcttggccaaaccttntgctacttcagtagactttagacactgtcttgatcatccatcttgaatatctttaatntctttgtcttgaataaagctttgagaagcatgtgatcctttggcatcatcaanacattcagcttgatcctttgtctataatctccccctttttgatgaatgacaatccctgaatcaagacaagctatatacaagatgatagcacgttcacacaacccttacttcccctatctntttgcatgtatgcctaactntanggatcgatttntaatgatagaattctaatggattnntaattgattctaacccaagttctaagttctctc

SEQ ID NO: 90292 - DNA, 287 bp, Glycine max
  unsure (1)..(287): unsure at all n locations
gcaccctgttgatattctttgcatcatcaaaccatgtattcgtacattcacattctcccccttttgatgatgacaatcattatcaagtgaattcttttcagcatcatcaaaacccattttgaaagctttntgatgatgacaatcattatcaggtaattctctctgcatcatcaaacctgcataattcacatctccccatttntgatgatganactatctatnggtatgagaaaaacacaagatatctatctgtgatcataacccttacntatctatcttatttatct

SEQ ID NO: 90293 - DNA, 196 bp, Glycine max
  unsure (1)..(196): unsure at all n locations
aaaacatatttnnttctcttcaaaataaaattatgagtttagtttatcnattggactacagtttgaacacacttatttaagttatagtttaagaactcaaaaaaggtttcatgccgctagtacaaactaaactcttgaactgaaataattaactgcttaaattcccaaagtttggttgttcatacttcagcgttga

SEQ ID NO: 90294 - DNA, 353 bp, Glycine max
  unsure (1)..(353): unsure at all n locations
taaatccaaataaataaattaaaaagtactgtggtgtatcgtcatcatcaatacaaaacactaaactgagctgggagtaatttaattcattagcatcctctcacaagttctcaattaagtgcaacacaaactgcaaccatggtggtggtgggttagcggtttaatcctatatcaatttgagatatgaacaaattaatatataatagtgccaaataaatttatgttcactattatctcataaagtngagtcacaccacactcactttctaagttgtgttcctatctaagaagcaaacaatatttaattgttcacataatatacttatgttttcacttagcttcttgtgctaaat

SEQ ID NO: 90295 - DNA, 412 bp, Glycine max
  unsure (1)..(412): unsure at all n locations
ttggttggtatcttggttggtgcatcttnagtatattgatatctgtattgcatcatgcatcatcattggttgtttgagaaaaagttctaagttagaaaagtttcttcaaaggcataaactctctgttttgatcgattacagcctcattgtaattgattacaacaaagtgtctaaagcctgtagacttgagtctcgtatcgngttaatcgattacaactatctcataatcgattacatttgtngntngagagaatgactgaattattcangacctctcgcttaattgataccaagtggataatcgatacttctctctcataagtgttagaagtgacaagaacactttatcatacttangcatctatcgatgcattgtctgagtattcagagcctggatactcttaatcatact

SEQ ID NO: 90296 - DNA, 501 bp, Glycine max
  unsure (1)..(501): unsure at all n locations
cgcttctacaatcctctccaagcttcttatccaagacacattcttgttcgtgaagctncttcttccatggattattccctagtggatggcgcctctcctcacctcttcgcctttatcttccgttgcatctccatggtggaaaatcaccattgaaggacctcattgaagctcagagatccagcctccatagaagctccacaagcaagcttccatcaagtggtatcagagcacaagagcttcaagtaggtgctccttatacctccattatatttcagctntaccttctcctctattgttggttctgtcattttctccatgtatctcctcacatgtcttgtgctaaatggttttaacatgattctttagagttccaccattaaacttgcataaaactagattgatttctatggtcaaattctggtcttgtctgaaccataatgtgtgagttaagtccttgagtctgcttgtatttttgggtgaactaaccataatctacaaaca

SEQ ID NO: 90297 - DNA, 438 bp, Glycine max
  unsure (1)..(438): unsure at all n locations
taagctccccacccagcaacacagaatctaagtgtccaacacccttccattctatgggttntctanggtttgaaaagtgaaatntagaatgaggtaaattttgaagcaactctcacctcacacaagtccatagcatcaatctaaacttgctcaaactgaatttacacctaaaattccaccgaatcaaaatttgactcttcaacacccaattttgccctagaaatggctcttggntcactttggtcatttgttcttctctctagcacagtccaagctttctcccaagtcctaaatgacatttcaagctaggattaactcactntaacctccatttaccacagaattcagacttaaccttncaactctcanagcctcactctttntccactcataacaccacattctcactntccaatcctagggtaactctacatttca

SEQ ID NO: 90298 - DNA, 309 bp, Glycine max
  unsure (1)..(309): unsure at all n locations
ctaagcacgcgctgcacttaataatgcaacttctttctgttagactccaacaccagttggacatagggcaccccaaattatatgtactcatttacaagtaatatcttaatgcttaaattctactgtaagaaacangttcaatacaatgtaaactttttaacatacctctgacttcttatcaaacaactcaattacacaaatacaattacttaaccaacaactacaaataacttttaccactacaaccaacaaaccctccctctatactacaccatgctacggccataaataagcatactcatatcacat

SEQ ID NO: 90299 - DNA, 302 bp, Glycine max
  unsure (1)..(302): unsure at all n locations
gagatgcagcagaagaccaaggagaagaggtgagagaaggcgccatccactatggaataagccatggaagaaggagctttaccaccaagatgagtcttggataagaagcttggagaggatgcttcaatggatgaaaagaaagagggagagaaagagagagggaggagcacgaaattgaatgaagaataagggagagaagttgaactttgagttgtgtctcacaagactctcattcatcaaagttaccacaagtgttacacatgtttctattatagactangtagcttccttgagaagctttc

SEQ ID NO: 90300 - DNA, 126 bp, Glycine max
  unsure (1)..(126): unsure at all n locations
gctcgcaagaccctggctctagctattnggatctaaccccgttattattcactccagtccagagactcgggatgtctcacattcgtcactgcgcatatcatcatgaactccgtcttcttattcttc

SEQ ID NO: 90301 - DNA, 331 bp, Glycine max
  unsure (1)..(331): unsure at all n locations
attcaagcttgttctgacgacgtaatgcatctcgtaatactcgagaatctnctgcagacccttcccacccaggtgacacataaataaatcttaaatctgaaccacaagtggctgacacatttgtagagacatcacgcattctattacgatacttatgtctctcatcatgagatactgtaaccagaatatgagtctcatcaagtgctccaatgcatctctacaaacaagacaattnttctagattctaagagaattgtataattaactaatctcttctaacaattgatgaacttacctcanaccatctacactttgttgcttngcaccttct

SEQ ID NO: 90302 - DNA, 221 bp, Glycine max
  unsure (1)..(221): unsure at all n locations
tatctgctctaatctttgtgaacgttccgcatgattaattctgagtatccttcttcattttaagagacatctggatcatgttataccnaaggccgtggagtagatttgtttcttgtgtatacgtggatgatnttacttgcactaatgataagatttcttatgaggtgaacaatttctctcaaagaactttgatatgaaggatatgggagagacatcttatg

SEQ ID NO: 90303 - DNA, 121 bp, Glycine max
ttttctactgtgtaaaaccacatgacagggctttatactgctttgtttactaagtattaattgtgaatcattctgtttaaagctgttactatagtactatccggtcatctaatatcttatt

SEQ ID NO: 90304 - DNA, 332 bp, Glycine max
  unsure (1)..(332): unsure at all n locations
atgcaccaatgagttcgactctatttatgcatcaattggaaaataattcaagacattgtnccgctttattagactgatcaagtgcgtgatcaaaaggatgccccgtcattataaacatatattacaatatctcccaacatanatgaanatgaaatattcggctttccctaaataccctctcaaaaactaatcatatgtcaaatnggaaaccttatcagctacctcacagtatatgttcctgaaatgaaaaggtcttgtcctacatttatcatataatagataaatgcgctcagtggacaaaggtgaaacgagttaacatcatgtggcatgat

SEQ ID NO: 90305 - DNA, 285 bp, Glycine max
  unsure (1)..(285): unsure at all n locations
tctaagtatatgcgcaacttttaaacatatatatccaatagtttttttttaatcctgtactaacggactccttccncattgagaagtaatccctgagattaaatagatcaaggagtaattaattcggtactttgtattagcataaacacatcggttgaccccatgataatggtggtatgttgtactgatatattattcacaccctaatctatacaactaagaataccaatataataaaacttcagaatctgacaatataatgatttaaactataacaccgtgtca

SEQ ID NO: 90306 - DNA, 281 bp, Glycine max
tttgtcactatattctaaccaaactaaaaattaacctctcgtgataaaataataaataataaataagatatatctatcgtagtatttcatatgtacaaaaaacccatatttatatattactcaaatctactaagcgtaaaacttaacctgatattaaaaagaccattattttaatctttgagtttaattctattaaataataatatcataattgcattcatatttaccataaaagattgatgaatgtaagggtctaatatttaaaaatactcaatatccat

SEQ ID NO: 90307 - DNA, 182 bp, Glycine max
aacaaatcaaacataacaatacaattatagttgttggttgaatacctcacccactcaagtgtatcacaacattatgggctgttctctaatgaaacactctggccttttaccactctatattcccttgagttattatgcaattcaagagattatgggcacaacaaagaacaattcaccaatat

SEQ ID NO: 90308 - DNA, 334 bp, Glycine max
acagagtggacctggagatatgtcgcgggggtcaggagaaccttgggacgtcaggtggggtgctattgcccaaaaccaagcttgaccaatcccgacccaacccgggcatagtctgtcagtgagaacctgtgatgtacctaagcatgcgagctcctggcagtcaacagataataggaacaaagaccactaagcaaggaaggcttgtggtggctggccagctgtgaatttgtgtgatatgtggattgtggcctctggtaatcgattaccaacggtgggtaatcgattacaacgcttacaattgaagacaggaggctaagatggtctctggtaatcg

SEQ ID NO: 90309 - DNA, 210 bp, Glycine max
  unsure (1)..(210): unsure at all n locations
atagancgatatctagatatagatatatagatatagatcataccatcgagctccgcgcgagtgtgtatatatggaatcaaatctgccgaatcactcagtgtatgatcttctacatcctaagggcttccgttccttcatctggctatgtcttcatgtacatcagactgaatgactctataaaatacggcctacttcacatggtcnggaacg

SEQ ID NO: 90310 - DNA, 360 bp, Glycine max
  unsure (1)..(360): unsure at all n locations
aagatctgggacctaccacaaactgcaaactatctttcttttggcaaagatggangctggggcaagaaattttcttcccattagtccttggatgcaactgtgattgtgtacccatatcagctagatcttgatgggtattcaagacatccttcatcttgncttgaatgttaaggagcgttccaatcacactgtcacaaacattnttcttcacatgcataacatcaatacaatgcctaacgtgaagatcacaccagtacggaagatcanagaaaatggaccttntcttccatatagcaactctgactttnnatcttctttggtctntccaaatacagtattcaggtgttgaacccattgata

SEQ ID NO: 90311 - DNA, 296 bp, Glycine max
  unsure (1)..(296): unsure at all n locations
ctgcagctgacttggagtgatttagccctggttcactttagntattatntcaattcaattaagaaagagaaatcccaaagagaaaacgtccgaatgatctttttgtnttatttactaaaagatatcttttattattatattattantttacctcttnttggnttccaaccgggttacagcatgaacgaacggtcggatttcattttaacagaaattaacggatattacaattcaaatgatcggtgganattttatttattnnttttgattatgcgagaaaatgattaagtaatgac

SEQ ID NO: 90312 - DNA, 228 bp, Glycine max
accgcatcttaagtcacctgggctgcagctgtttaggagatatgctcttcttatgccttcaaaaagcaagtgtgctgtctgagactgctcaatgtggttgggtattcgctttacggtcttagaaatgtcactatactcttcatttttactaaatggtctccaggtgagtcataaacataactttgttgtgtgtcctccacttttgccgtgctattattacacaagatg

SEQ ID NO: 90313 - DNA, 383 bp, Glycine max
  unsure (1)..(383): unsure at all n locations
tactcagctgacttgcgggtngatatagccttactttcactttagttattattcaattcaattaagaacgagaaatcccaaagagaaacgtccgatctgattttccgctttattntactaaaaggtatttttcgattattatattattattntacctctctttttatttccaacgtggttacggcacaaccgaacggtgggaattcattttaactgacattaacggatattacaaatcaaatgatcagtggaaatttaatttatttttgattaggcgagaaatgacttatataaatgactgaagcacgtcanaagggggtacgaaaagtaaatgatacgagaataatagtacacaaaacaaatggggaccaccacgggtacat

SEQ ID NO: 90314 - DNA, 135 bp, Glycine max
gttttgcccctggtactaatcaccctggttttttttgggatttttttcggacgtacggactttcgaattggacgatcttggttctttcgtatgcacagaccctacgatatgtaacatccttttggcttcaaaagt

SEQ ID NO: 90315 - DNA, 114 bp, Glycine max
cgtatgcaatcatacgcgctctttacttgaatacattggaagtgataaacaaaggctgccgataataataaatataaaaacgagttataatctactactttggccaaaatatat

SEQ ID NO: 90316 - DNA, 282 bp, Glycine max
  unsure (1)..(282): unsure at all n locations
gagtcgtctacatanttatgtacacttctgtgacaccacgtgagacacccaagagctccttcttattacctttgttcaaanaagatatatatatcatatatgcgttgcacacgtgtcaaagcacctcgcctcaatttccttatattcatactatctattcctatatatggatagtttctgtttgcggtcgtcctaatcgatcatcagtccataaatcatattataaacatgataatatagcgcttgtctaatctcttccatatgacaaaactactccacccc

SEQ ID NO: 90317 - DNA, 248 bp, Glycine max
ttctgggaatacataagaccctgactcaaatcagctcataaacccccagcacttcatataaaggcaaatggcagcaatcaatcaaggaagcaaaaattcagggctctgtgaatggacaaagcactacatctgagcccaaaaatagtcccaaacaaaccatagagaaccaagccactgaactgtagctattgcctgatgctgtatatgactgctaggcggtccacctctcaatatgctactttttgaat

SEQ ID NO: 90318 - DNA, 392 bp, Glycine max
  unsure (1)..(392): unsure at all n locations
ctagcttgataatgccaaaggaaatcgtgggaagtatgggttaggctataagcccactcaggcggatatgaagagaagcatcgctggaaggaaaagcagtggccaagctcgcagttgagacagaaagtgaggaagcccgcctgcccataagagaagcttatagcgcgggttgggagacaaagcaagtggcgtgatatacaagatatgttccagacattggattggacgacatgccctcctgattcagctggaaattgggagtggggaacccctgcattacgcacgacataatganacctttcnggttaaagcttatagtgggctagcttagagtttcctttgtaagcttgtgtcttgtttgaatatatacagacttctcattgtctcgctta

SEQ ID NO: 90319 - DNA, 460 bp, Glycine max
  unsure (1)..(460): unsure at all n locations
acacgacactctaacttanggaactgtgctgagttcatcnggtaccacnctgntgtgcacgtaataacccccttcccatatgtgatcagcctgngatgcccaaactgttccctaccaggtgacaagcccnctctgtacaaagtacacttgaccacaattactctattttctgtgtcgtatcagctaggatcatggccaaaagtaagtgccaaagaccatggaccaattnaaggggcnnaacattccctcaaaaatgcttagattctctaaccacgctagttacccacgtctatgccattcgacaaggtcagtggnctntnncctcatgacatacactccatacgacgtatgaacgtggccaaaagctagtgccaaagaccctggactgtcatgcacagtgcccctcacgaacatacacaacatgcacatgccaatgcattttcaacatcaatctacattg

SEQ ID NO: 90320 - DNA, 439 bp, Glycine max
  unsure (1)..(439): unsure at all n locations
cttgacaacttcaagtgttatggagtgcttgactacactatgacaactcatcaaattatcataagagggagggagagaggctaaccaaatcatcaccaaatcttcatcttccatcttgacaccactatcgcgtagctccattagaacaaagttgagctcatcaagatgattctttagtggcacacattcccttatttggaggccaaacaaacattattccataagcaacttgttggagattgatttagtcgtgaagaatttcttccatggttattaaactctcgagtcaactcgttaactctcgcaagtttacgagttcacttacccctctgcgaggngacgtcgtgtgtaaactctattattagtagactttgggtagacgttataaactctaagtgaactcgtgaactctcaagttaccactggatcaacagtctgc

SEQ ID NO: 90321 - DNA, 280 bp, Glycine max
  unsure (1)..(280): unsure at all n locations
catatctagtcaaggtctgagagaccatacaagtttcctaacgatttctaattatgtgggccattaagtctatcatatgctgacaatagccgagaagcccatgaatctcttcnggggcggagtaagtgtctgccatcgccttggccttggctaacaatcggggaagttcttgactcccgttcagtgaagagcaaaccgatccatccacatggttgcctcttggtgtaaagagtcgatcacccttcctctagacctctttttcgcatatacttgtgcatac

SEQ ID NO: 90322 - DNA, 351 bp, Glycine max
  unsure (1)..(351): unsure at all n locations
cgagttgantnntagccttaattcactttagttatntaatcaattcgattaagaatgagaaatcccaaagagagaacgtccgattgattntccgttntattttactaaaagatgtctttntgattattatattattttttacctctttttgatttccaacgtggttacggcacgaccgaacggtcggaatttattttaaccgaagttaatggataatacaattcatacgttcggtggaaatttattttattcttaagttaagcgagaaacgacttaagtaaaatggcttaagcacgtctacagggggtataataagtgaacaatacgagaataaaaggcacganacacaat

SEQ ID NO: 90323 - DNA, 455 bp, Glycine max
  unsure (1)..(455): unsure at all n locations
gtctatacattccagtccactcaattcatacaactctcattcatttcaaacacaaccattcgtttcaaacaaaacacaccactgaatatcaagttcaatcagttcactattcaaacaagccttttgtacaaacaatcaacactaanataactgaatntaaatgactgannattaaataacttanacataaagcaaactaaataactaaccaactaaatgttcatgaattgcataaattaaaacaaaatagaatttaaacatcctgctcatcctgtggctgatcttcatttaaatacagcactgaagcagctggtacatcctanagaatggatngctctggctctatagctggtactgatggcatagtgtcctcagatatangtgtagaggatggctctggcatgggaccttgtgaagatacctnnctctgagccatagatgtatctgcacaactg

SEQ ID NO: 90324 - DNA, 387 bp, Glycine max
  unsure (1)..(387): unsure at all n locations
tttggtggtttcaactcactatanacttaactctagagattcaactacaaaaattntaccaaatcaaagattcaattaccaatttttgttttagaaacctaactaataatttcaaataattcagagacctaaccgataatttaacactttataaatttagatcgtatcattaattaactatatattaactnntttttatcactgaaactattaactattcactaatcaagacanataaagtctctgcgagttctttaaacaacgtatatgcatgacatgatngaatcatnngtcatatatattagtattgctatcctaatcgctcacatggnntcagtcaagtcattatngctatcttcatcagtgagatggggtcactcgctgcat

SEQ ID NO: 90325 - DNA, 273 bp, Glycine max
  unsure (1)..(273): unsure at all n locations
actcgcctggtgcttttcttccatgctatatgtagcanagtcattgatcctgtcaagcttgatgagcttgaaaatgaggccgcaattatactgtgccagttggagatgtattttccccctgctttctttaacatcatgattcacttgattgtgcatctggtcagagaaatcaaatgttgtggtcctgtttatctatggtggatgtacccggntgagcgatacatgaagatcttaatagggtatacaaagaatctatatcgtctagaagcatct

SEQ ID NO: 90326 - DNA, 213 bp, Glycine max
  unsure (1)..(213): unsure at all n locations
ttattattattattattattattattattaattatacctacgacagaattaaaatattaaaaagctttaattcttttatgcatgcattatntatattatatattaaaccatgatagaagttacaatcttacatggcttttaacatagtaattaaacatcataagaataataanaaacttagttaaaaccataaaaagacttacacgattgact

SEQ ID NO: 90327 - DNA, 195 bp, Glycine max
tcttcacaacatctaattataggaacacttaatatcaatttaagacctataccaacattatttgatcaaagagaaataacattttatttcccaatgaatagaatactagatttgtccaaatagaaataggaaattgagtttcgtctaatagacagtgaacctatgctcaccccaatcaatgatacttcaactcac

SEQ ID NO: 90328 - DNA, 308 bp, Glycine max
atctctcaatcttgaggatcaaaacacctgctgataaaggactttacacctttggtgtgcctcctgaaaaggatctttctctatatctcaccctgtcttcaacccattcagaaatcacttgccaaatattcggacatactcctttaccctcaatagtgatttgccaatgattaaacagacttactgttggaaactattgactgactcgtatgcattttatttgcaccccctactacgttcatcctctcttttgcgaccctatgacccaatacactattctctctatattcattctcagtatcaacact

SEQ ID NO: 90329 - DNA, 276 bp, Glycine max
  unsure (1)..(276): unsure at all n locations
tcgncgacatcataagccagccaatagaagaagatattcaagatctcttcgttgaagcaatcaatttcatacctgacccccaagaaaagatagttattctggataaactcaagactacattataggtaaaacctagacacaaggatgttatcacacacaacagatttgatgtttgttacatactcaagagattagaaaattcttctaccaaaccaacgactattcaagatctccaaacagagataaacaatctcaaaagaaaggtcgaagaatttc

SEQ ID NO: 90330 - DNA, 220 bp, Glycine max
  unsure (1)..(220): unsure at all n locations
cttgaatacaacatagattgcatctggaaagtcttgagaatggatnggaaccatgattcttagtcttaatcctaaaaattcttaacacttaagaaaggagtaattcatcatcatcatagatgtcaaaatataactaattatataatacaatgctcaacatgctatgcatngcagtcaatatacaatgctcaacacgctatgcattcttagtcctattcct

SEQ ID NO: 90331 - DNA, 368 bp, Glycine max
  unsure (1)..(368): unsure at all n locations
ggatcattcttttctttatagggaggaagtgtgagtntaataccatcaattcggttttgtctangaacaccatcattccctcttctcctcctttcttcttcattatgatctctgttctccatttgatccaacctctcatggagcgcatcatctcgttgtttcattaacctctccatatgttgcatcaaagcttgcatttggaattgcgaaagccaccctccatcattaggatttgttcctgccatctcanacaaacaaatcaaacgtaacaagacaatnatagnnntgtgttgaatacctcgcccactcaagtgtatcacacaattatggcttttctctaatgaaacactctcgccttttaccactct

SEQ ID NO: 90332 - DNA, 225 bp, Glycine max
  unsure (1)..(225): unsure at all n locations
tataattagagcttggcaactcctagacccttgtggacttcttctggtccactgggagacttgcgggtgcaatccctacatacaatagatgaaatcagaaatcagntgagcgatgtgcatacttacctatgtcatgatgacatgaccttgccggagggaaccggcaaccctgtatgactacagaggcccgtaaccagagctggataccccacggccctgttggac

SEQ ID NO: 90333 - DNA, 393 bp, Glycine max
  unsure (1)..(393): unsure at all n locations
acacatgttgagttttattcatatnattagagtgtatctctcttatcttagtgagagcgattctcctaaattcttgagtgattcaagaacaccctgtctgtatcataagactttgacaacctctgtgtgttgccctcgctggaaagagngattctttccttcctttcatcttcacccttgttctttcataccacaattccagataatccacctctgcccagaattatctcgtggccataactcccattttacgcactcaaattaagtgattcttgagcctaaattgactttanaaacgagacctttcacctcattttggaatcacctcatttggagccctgtagcttcagttattggcatttctatatntcttgtcagccaccacttaaccta

SEQ ID NO: 90334 - DNA, 366 bp, Glycine max
  unsure (1)..(366): unsure at all n locations
ctacaacttgcaaactaagaaactcatcattagtcgagatgttaaagttgatgagtacgcttctttggaatgggatgaagaaaaagtggagaagaacattcttatacccgctcaactacctcaagaagaagctgaggaagaagacccaggtgaaccaccttcacctccaccacaacaataagatcaagaactatcatcactagagtctactcgaagatgaagtagatctttggtggacatatatgaaacctgtnacttggccatacttgaacctggaaagcttgaagaagcgtcanagcaagaagtatgggtcagggcantggaagaagagatacagatgatcgagaaaaaccacacatggggagt

SEQ ID NO: 90335 - DNA, 220 bp, Glycine max
  unsure (1)..(220): unsure at all n locations
agatgcaacatatgtggtagggcacatgagtcaagcatgtgcatggtccaagacgatgtatccaaagaagtcaactatatgactaatcaagggttctattaaagaagacctncagtacacaattaggggggaagnttctctcaaggccaaggttggagatccccaccccagaataacttcaacagagatcaatgagtttcatctaatcggccctccaatc

SEQ ID NO: 90336 - DNA, 353 bp, Glycine max
  unsure (1)..(353): unsure at all n locations
atctcaatagacgtatatgccggcaacattttatatttaaatgataatataaaattattttgtattttgaatgcattaccatcttacttaatatatgtaccaatttattaacatctgtagtcatgattaaccatttttcaatattgtcatttcatgtaaaagattctctgtggacgggaccccaataagggagttcaagaatntggagacaaaaggtgttgcattcccaaagagccaacccatgagaatatactctagtctttggaacgctgaggattgngccacaaggggtgggcttgtgaaaacggattggagcaagggctcattcacaagctcatacagaaacttcaatt

SEQ ID NO: 90337 - DNA, 273 bp, Glycine max
tactcacacctatatactagctacccatgcaaaaactgaaatcaaaagatctctcaagactactaatgcctgatcaggctaaccttctataatgcaatcagccaagaaacacattatatcaaaaggacactgcaggtaaatactagtagaacctagcttttactaccatcttgacctgttgttgacgcttcagagtgtattcacttgtagatactgggtatacatttgaagcttcaacttgtcgtcaatagagacgtgtaataatgctgcagt

SEQ ID NO: 90338 - DNA, 433 bp, Glycine max
  unsure (1)..(433): unsure at all n locations
tctccttcttttccctatanatagggggaagggggggaagaacannaattgttctatccctctggtattngagaatcacttaanattagtgagaaaaatggtttccgtgaagaaaatccaagccgaggcacttccgtaacgcttccgagacatttncgtgagtgatttcgcgaagattntccgcccgtcttcgttcgttcttcttcattcttcggtcttcaaccggtaagttcccaaaatcgaacttttcaattcattctatgtacccttaatggtcctcatttgtttcgcgtgccctttattntatttcatttacttttcgtacccccttttgacgtgctgtagtcatttatttcaagtcatttctcgcctaatcaaanataaaataaatttatcccgatcattcgtatggaacatcttttaattatgttaa

SEQ ID NO: 90339 - DNA, 235 bp, Glycine max
  unsure (1)..(235): unsure at all n locations
ctgaccggatcttagtcactgagctgcactgtgattcatctctctttcacaatcttgactataagcgagattacatgctgtgttggcccnatgtcatatgggccantttaccatttagtctaaattcattgaaataatgtgaaacagtgcagactagagttcttgagctttttgttggtttttttacttcaacagaccatctaagttcttttgagcctactagcttatgtctttc

SEQ ID NO: 90340 - DNA, 279 bp, Glycine max
  unsure (1)..(279): unsure at all n locations
cacgttctcagtcaaaattcccaacacaggattttagccctcccttacaagggagccactttcacananaggagaatggtttcagagataataccagattacaaaacaatggggatgtctcctacacctctaagaacctagaaaataactctaaaacctagaatctacctaaaagttaggacattngcttccttgctcagctcttcctttgttctctgcacacaattcacagtcnattcagacactcttcacgtcatcacactcttttttttttctatg

SEQ ID NO: 90341 - DNA, 407 bp, Glycine max
  unsure (1)..(407): unsure at all n locations
aatatgtcttcttctcaagaatggacgcaactggtctgtcttgtaacagtttccttctcctctcagccctgttccttcttagtgtagcttctatttctaagtccaaaggaactaaagttcctataggagatctatgcataaacagtactaacagagcagtggttatccagttcaattggagaagataaatataaattaaagaacatatattcacagaaacaatcaaagaataacaaataaagattagacacctaataatgagctaacttcccaaataaaaagaagttccttggcnacgacaccaaanacttgttcgcaaccggcaagtaaaccggatagtacaagtagtataaaacgggtagagtattgaactctctgggaacttgtgtatctggcaactatttcat

SEQ ID NO: 90342 - DNA, 103 bp, Glycine max
tggatatattttcagtatgctaggaggcttattgacttctgttgctttgacatatgggatgtgggttcaccattaatttggagccatgttttttatgagatat

SEQ ID NO: 90343 - DNA, 377 bp, Glycine max
  unsure (1)..(377): unsure at all n locations
attatttaattaagatgtagaatacctacttaattaaaatatatatcttattaaaatagcaggagtactggattaggaattttttgcataatttctatctaccatatgtaaatctcaggaaaaaaaaaaaaaactatcattgctaattggacaggaacttaagaaacaggactaggaggttggatcacctattcacctacctacctcatngaatttcgaggtttgttcctgtgattgacaggcatatttattacttccatttatnntggctactcgctactcgtttcattctttttattaatatnttagtattaatatttaattgtcggtcacaatataataaacatatttctttcttttttacacttggtagtaat

SEQ ID NO: 90344 - DNA, 329 bp, Glycine max
  unsure (1)..(329): unsure at all n locations
tgtaactggacttgtttggatgaagtggcggtgtttgtggaccataccatgaactgagcggcatcggttagtacgaggttaccggtagtgagaagggaaagggtagagcggttttcgttgaccggctggtcccggtttggcatccaaacaagggtgtgaggtggttgtgtgtaccatatggcaaagcagtatgcgttatcctctacagggtaaaacccagcagtgaattgccctttggtgatgacactattacatcttctttgaatntctccacggagagggagaatgaagatgagtgctgaaaattattgaaaattagagaaacgaga

SEQ ID NO: 90345 - DNA, 355 bp, Glycine max
cggtcttagcatggctccttctctgtatttagggcggctcttttttttcttattcgtcactctagtaaatccatgagactatgagtcaaatcacctcgagagctttagcagatcatcatatgttgaaagaaaatactaggttgtaaaaaaataatccctaaataaaaggctataaaatgctcaatttgaaaattatatgtgcaaggagttgtttagacaatattgggactttatgccattcatatctttaagttattttaaatgaaattgaaaagatgaaaatcaactgctcggaatgtggcctgttacactgcagcacttttggtgatgtcacatctatgctatgccgtgttca

SEQ ID NO: 90346 - DNA, 261 bp, Glycine max
  unsure (1)..(261): unsure at all n locations
ctgtcaatataacacatacttatgagaccatcaattaagaatgcttatgggattaatgagtaagagaaatgctatgaaataaaactttacttatgctagaatttgatcagaccatccagcccatgtggtctatcctctgaagaatgcatcccaacgatccatatactttactagatcgtagtcgtcccttagtgaatcccatctgagtatagcaaacatggacccgactaagtgttactgtataacanaatggagagcgaa

SEQ ID NO: 90347 - DNA, 328 bp, Glycine max
  unsure (1)..(328): unsure at all n locations
ttcgattcattctatgtacccgtagtggtccacattgtgtntcgtgtcttnttattctcgctttgatcactttatataccccctgttgacatgcttaagccattttgcttaagtcatttctcgcttaacttaaaaataaaataaatattcaccgaacatttgaatggtttaatcgntaacttcggttaagatcaattccgaccgtacggtcgtgccgtaaccacgttggtaatcaaatagaggttacacatattatattaatcaagaaatatctttcttagtaaaataaagcggaaaatcaatcggacgttatctctttgggaattct

SEQ ID NO: 90348 - DNA, 331 bp, Glycine max
  unsure (1)..(331): unsure at all n locations
tctacttatgtggcagggcgggtntccttcactttcttgtttccaacgcgagctctgaccactgttcttncttcccgcgatgctgtcttttatgtccgtctgagtgggcttatagcctaaaccatacttcccacgattcccttgggtttttatcaagctagttatgccgccattgtctttgcctaaacccatcccgggttcatacccgttccccaacataactcgggccatcattaccgccgcatcggacagacaaggttgcccaaagagggagtccaccgaggaaatgctgaccacctcataagactggaaagcggtttctaacgattct

SEQ ID NO: 90349 - DNA, 243 bp, Glycine max
  unsure (1)..(243): unsure at all n locations
ctctttcgattcataaatatttagcttaactattttcttttttattatcctttacaggctggtgagacattgagaatacagccactcgactgtgcatattacaaattgcagatggtgtatacctgtaagaagctactattaantatgttgttttctcttaaatcttattcacactaaatggaatttatcatcttnattggttaaatatgagtatataggtcataagtatttcagtgttcacgg

SEQ ID NO: 90350 - DNA, 369 bp, Glycine max
  unsure (1)..(369): unsure at all n locations
tgtagaagttactgccatctgtcaggataccatcatatggtcttggtaataatacaatctcntttggcaattattgttgtaataattgaaaaagagacctggccaactcggatgctcctggactttcggttatgtcttcaactgcaccaaagacattgttcaataggttataggaatatcatggccattgttgtaaacctaacactatgcagccagatgcatgttctcatattctntaactctctttccttccccttttctccttttatcagaattgcaaanagagtaaaacattattttccttgtgttgaggattcctcatcctcctgctacgccttttattagcannagtattgtacttaaccttac

SEQ ID NO: 90351 - DNA, 207 bp, Glycine max
aagagagggagcccatcctaggatagccagaaagactcccaccaaatgcttgatataagctgaaagatctgtatggagaaaaaaagaagaaggggagccgaattgatgaataaagagggaaagaagtggaacctttgaagtgtatctcataagactttcattcatcaaagttacaacaagtgttacacatgcttctatttacatact

SEQ ID NO: 90352 - DNA, 278 bp, Glycine max
  unsure (1)..(278): unsure at all n locations
tagtttatctcttctatcttagggagagtgattctcctaaattcttgagtgattcaagaacaccctggctgtatcaaatgactttcacaacctttgtgtgttgccctcgctggaaagagtgattattttcttccttatcttcacncttgtactttataacacgaatccagaaaatccacctctcgccagaagtatctcgtggccatacactccatttacgcactcaaattaagtgattcgtaagcctanattgaatttcaaaacgagacctttcacct

SEQ ID NO: 90353 - DNA, 455 bp, Glycine max
  unsure (1)..(455): unsure at all n locations
gcttttcttacactntgcccacgtgtattgataactcttcattggatgttcatgcagatggcaagcaacaanaacctttctaaagccatttataagctagtttgggcgatccagccagccaattttttcgtcattggagagaagaccattgaaatcctcatagatgcatcaagagagagaagtatctattgccagggttcanagaagattccatgagtctcttcttatgtctctttctgtgtacccatagaatctagtaagcctccaaggtggatgggtnttctgatgaatctagacattgatgaagttagaggagaaagtgactatcacaagggtccttctagagtagggtcagaccaccactccctaccattacatctagagcaagacaagaatcaaaaccaataatatgttttatttccctcatatgttgagtatgaactaaagtttcacat

SEQ ID NO: 90354 - DNA, 352 bp, Glycine max
  unsure (1)..(352): unsure at all n locations
ttcaattaagaaagagaaatcccatagagaaacgtccgattggctctttttcttggtttaatttactaanagatacttnttgattattntacctttntttggtgtccaacgtggttacggcatgaccgaacggtcggatttcattntaacannaaataacggatattacaaatcanatgatcggtggaaacttatttttatttttgattaggcgagaaaatgacttaagtaaatgactaaagcatgtcataagcgggtacggaaagtaaatgaaatgaatataatagcacacgaaacaagtggggaccaccaatggtacatagaatgaatngaaaagtcgattccggaacta

SEQ ID NO: 90355 - DNA, 337 bp, Glycine max
cttgcttatctaacacggtcaccctggagagacaatggccaatctcccctacgtggcaagagacactcaaaaattaaaacaagtggtctcaaaacacctgcaaaaggcttgtaggcgaacgggtcgctatgaaaccttaatgagatatctctagaaacatgataaacctcgagtcgggcgaatagtgtcattgtgctgaacgaaatgggcatatacagccaaggcatgattgaatcaatgccgagcgattcgaagcgtttggactcactggtgagctatttgatccctcgcaaccattgaaaccacaccgccaccccagatatatgcgatggacacc

SEQ ID NO: 90356 - DNA, 278 bp, Glycine max
  unsure (1)..(278): unsure at all n locations
gagaagctagagtntagctacacatacctctctaatagctaagctcacctccttgagatgagaagctagagcttagctatacacaccctataatagttaagctcacccccatgacaaaaaacatgaatatacataataatagtccttactacaaagactactcagaatgccccgaaatacaatggctaaaccctatactactagaatggcaaaaatacaaggcctatacgaacgagaaaactattctaatatttacaaagataagcgggctcatactt

SEQ ID NO: 90357 - DNA, 243 bp, Glycine max
  unsure (1)..(243): unsure at all n locations
atataatncaacatataagacacaataacttattccaaatatttaaagattaagtaatctaattaataaanagtaaattatccctaaattatggttttntaaaaagtatcctcgacattaatgacacgtactcttatgtgttcattttaaagantatcttgacattaatcatgtgtaccgttctattttctcacccttnctctggtgatgtgnatactattctacacttcgacaccaacaatg

SEQ ID NO: 90358 - DNA, 440 bp, Glycine max
  unsure (1)..(440): unsure at all n locations
acctataaatctcagctcttatgagttctattactatgggtataananattgtgataacatctatatgcatgcccaactattaaatgttgcgagtataatctcctctattattttccaacacccttgtttaaagtggttcggtaattatatataatgaaatggaaactntatgcttctatatttatgattctatcgagttcaactgactatataccaatatttntgtggtataaatgcactttaaccatcttaattattactaataaaatgacatctaagacagatcgattagaatatctttcatcacattatntttaaaaaaatatatattttaaaacgattcttagaacaacntattcaaaaacttatttcttaatatggttttaagaaatcgtatagaatcttcaattggtaactttttggttaaaaaacatataaa

SEQ ID NO: 90359 - DNA, 347 bp, Glycine max
  unsure (1)..(347): unsure at all n locations
acaaatattatggaaacatcacatttacattnaaggtaacatgtagaagtgcattctatatttgagcaacactaggaacttaaactctggactatagtggagaaagtaccttctcggaaacattntcataactggcctngcttatgagagagaaagctaatatgaaaacatcagcaccacgattactcaaaggtcgtatctaatataatcttctggacctattcacttattagataataaaatctaaaagactcacatccagatggcaagagaaaacacataccgagtgccatatctaatacaggctcatacaaccattgctgaatgcaaacgtgcctatctttcac

SEQ ID NO: 90360 - DNA, 166 bp, Glycine max
ctagctctgaccggcgcagaagtagtctcctcaattgaaatttaactaggcgtattgcacgtaaccctgataaacaaaagccgaagaaacacaccaacaattgaggcttattgcacatatgactaacttgaaaggaagatatatgtcaaagctactgaggacacta

SEQ ID NO: 90361 - DNA, 302 bp, Glycine max
  unsure (1)..(302): unsure at all n locations
attatactactttgangaacgggaagcctatggcaaatggagagagtcagaatgagggaggaacccatgctatgactgccatttctacatgccaaatttccaccagctcaacaatgtcaacactcagtcaatatcagctctctcattaccaccatcctatcaaccaagaacacccaatcatccacaaaggccaccccctaaacaccaaccatggaaagaagtttctacaaagaacctgaggatcaccccaatttggtgcgtatgctaacttactcctatctactcataatgcatggagccat

SEQ ID NO: 90362 - DNA, 74 bp, Glycine max
  unsure (1)..(74): unsure at all n locations
gctctgagcaaattcaaacgacaatagctctntactcggacgtctgattgagttccgtcacatatcgagacgct

SEQ ID NO: 90363 - DNA, 256 bp, Glycine max
  unsure (1)..(256): unsure at all n locations
atgaaacggagctcatttaattcaaagacaaaacttttactcgatgtcataagtccgtatataatgaaacactcaattgaaatggaagctcgtatcaaattcaaacgacaataactttttactcagatctccaatagagttccgtatatatcacgacgctctcaaatgataatggaagctcgtatcaaatttcaacgacatntacttttaactcggatgtctgattgtgtccccgaatatattcagatgctccaaa

SEQ ID NO: 90364 - DNA, 434 bp, Glycine max
  unsure (1)..(434): unsure at all n locations
tcatggattatcaattatctattattaatgtatatctatattcccttatcaatactttattgtggagtaaaatatcaagttntatatacttgacataacatattgccgcaattctattcaattatcaatgatccattatattaatgaagttcacaatagattcctctgtttctttaataaaagcatataattctaaggcagatagtttcgttaatttatgtcttgctcagtcagtggtctgggatgccatggtgccttcacaaaagaagacacatgtatgtcgtccaaaacctttgtattgtgagaagctcatgagagacctatgcactattcttcacgacaacagtcttatntttctgcttcttctgaagaagatcttctttttgaaagtgacacgccaatgtatcggttgcatatgacatggaacattctca

SEQ ID NO: 90365 - DNA, 270 bp, Glycine max
  unsure (1)..(270): unsure at all n locations
atctacctatatcttatgaaaactatatgtcatctggtcttacacananataacaccatccaagcaaactttaactgagtaaagactagttctcttcttcttccataccaatatggtctcctcactcagaatcaaattaatacttctaaagtcatgacctctttttatctaagcaaattattatatttatttctnctaatgatatagagaattctccattcccatcttcacaatcaatttcccttccaccgggcaccttnacctaacacc

SEQ ID NO: 90366 - DNA, 305 bp, Glycine max
  unsure (1)..(305): unsure at all n locations
ctagttccgctcctgaatatgacagccatcgttngaggagcgctgagcaccatcagcgcttcgaggccatcaanggatggtcatttctccgggagcgacgcgtccagatcatggacgacgagtataccgacttctatgaggagatagttcgccggcggtgggcatcactggttaccctcatgaccaagtttgacccagacataatcctcgaattttatgccaatgctnggcctacagaggagggcgtgggagatatgcgatcctacgtgaggggtctgtggatcctgttcgatgcggatgctctc

SEQ ID NO: 90367 - DNA, 418 bp, Glycine max
  unsure (1)..(418): unsure at all n locations
tgaattattctatcatcttcaactgattaaaagtgttcttcccaacatctagataactttcaagaacagagtaatcaattagattctcgatgtaatcgattaaagtgttcttgatcacttttgggaacacttttaagaacaaagtaatcgattactatcacttgntaatcgaataaagcactaatcaatcatatgcaagaacctttctcgagtgaatgagagtcttcttgaacttaagagaaattacaacttatnttcaccatagatcttaaaacgataaatttgttgttttctgcactatctcttctctcttcatctgctaccatttgctttagtcaaataccgtgactctcctagatctcttatgtgctccaactgttacggcgtctgcnttgttgctatgtcacctgattttatc

SEQ ID NO: 90368 - DNA, 336 bp, Glycine max
  unsure (1)..(336): unsure at all n locations
ctcagcttagcttgtcaggaagcttctcaggaagtntctctagttagttacttaggctataaataaaagnatgagccacacttgaggtcactctgatgaatgagagtctcgtgagacacaactgatagttaacttctcatcctcttatactacttcaattgtgagctccctcctctctcttgctctatctctatcgtttgctccatcgaagcatgctctccaagcttgttatacaaagcacaatcttggaggcgaagctccatcttccatggcttataccatagtggatagcgcctgctctcaccttgtctccttgatgcttcactgatctccatg

SEQ ID NO: 90369 - DNA, 386 bp, Glycine max
gaaatactctgagtcaaaaaggatcacgaaagcaagtagtgaccgatttgaaaaaactatcttcatggataatatatatttccaaaaaaacatatacttattgtcctggacatgatcactattagggattgagtcattattagtgtcttcaaccaaaacccctttgtgttttatattgaattgattacacggtcatactctgttattatagttaatatgatttgcttcgcatcttgaaaataaaataaatggactctaatattaaatctactagtaaaaaaaaacctgctgctatttgggtttgatgacaacaatctttatctatgcttatataaaaatgtatctcccatcttgtaacatgcatgtgttcatctatcgtatacatt

SEQ ID NO: 90370 - DNA, 397 bp, Glycine max
  unsure (1)..(397): unsure at all n locations
ctgaaaaattcggctntggtcagagtctctgaagatggttagttacttgtgttacaagcatntacgtantagtttatgagaaatgcagtntcattcgggcaatgataaattatgtgtttatgactctatgcatgtattcataagtaaagaatctagtttaatgcaatttcctcttatagcttattagttgtgtgaattagtccctttctctgattagtttggacttttggatatagtggttcttttaccctgcatgttgagcaacatgcaaagctctatttggttgaaaacttctaatggttatgacacttctttatttattgttattaaattcttntagggtatagtggggcagaggaggcctatggtcttaattaagttactttttaacttaata

SEQ ID NO: 90371 - DNA, 537 bp, Glycine max
  unsure (1)..(537): unsure at all n locations
gctatgtgtcttgattcatcaattctaaattccacatacaantctatggtacacattngtaaatggtgagacataaataaccatttaagcacattggtataccatcctataccaanaatggatgtacaatattactaatctaatctaatcaagtcaagggtgcacatcgtcaaatgttcaaacataaataatattacaantnttaannctttttgctaatctaatataatctaaaatgtaatccaatcttactaataattaatctaatctaatggtagtaataactaanatatattnnttttcattttttatttacaagtaaaaatatttaaaatttttggttcaccaanttatgantaaattaatatctttaaatattgtccaatttttaaaagataataaattaatatacaatattacatannattttgccagataattatctttgttatcaattaatgtagaacaacactaatntttcatagatatactaaaatatctatgtctatctaattattatctatattaatcatctac

SEQ ID NO: 90372 - DNA, 549 bp, Glycine max
  unsure (1)..(549): unsure at all n locations
gctagagtagtaanagacattcttccacacctcgtgagcttgtggtggagtataagagagtacacattactcagttntagcctgttatcagttgataatttagtcaattagtgcctaacaactntgtaacagctgccaactaacttatgttagttaacagctaggtcagttggcagttatccaactatatattcatctttgtaattagttacagctgagttgaataatattgattttctcaatgtcaatctcctcttctctctcaaattctcttatcagagcctttcctagatccattcanagggccatcatcatgttatccatgcatcaagcccaaaagtgtnggccgtgagggagtgtattataaaaagcccaagtcccacattggctagagataaggccangatagagtatataagtgaggggcaaccctcaccctatgagctagctnttgngattgagttangcccanacctacactctaagacagcccctactataactccaannatataagaatcataagaactgnnataatcaagtattcta

SEQ ID NO: 90373 - DNA, 465 bp, Glycine max
  unsure (1)..(465): unsure at all n locations
catcaaaatcttcatgatntacatctctcccctttttgatgatgaccaccacctgtanggtaggagcaacaacaaagaaaaaatatctattcgcatataggttacttccccttggttntgcaatgatggcttatatgagacagttgaagatttcatattcttcatatgtaaacaaattgtctcataaacaatagaataatnttcttactantttatcctttatctttctcttcccccttgcaacatcaaaacaatcatgatagagagagaagatgttcccttgttgcatgtatagaatcaagtgatccaaaggcataaacaatattaatataatcagcaaacagtccataccatcatcaaccaatcaatacatcatctcaatattcaatcaatataatatatcactcttccatatttataaaatcaataattaattaattaattaatcaatcactcattacttat

SEQ ID NO: 90374 - DNA, 354 bp, Glycine max
  unsure (1)..(354): unsure at all n locations
cactcaaaggtatggagttgattacaatgatgtattctcttcaatggttattcacangtccataagaattctgctatcaatggttggccaagttgatctataattagaccaaatggatgttaaaactgccttcctgtatggagaactggaagaaactatntaaatgagacaacctaacggatttataatagaaagaaacgaagactttgtgtgtaaattgaacaagttcctatatggtctaaacaggctccaggcagtggataaaagatctatgagtcatgactcgcatcaagtcaaagaagcaatntgataactggtctatttcagtctgctcatatataatntgcattctat

SEQ ID NO: 90375 - DNA, 298 bp, Glycine max
taccatcttgtatttttttcaaaaagaagtttcattagaaagattttttttttttgcaataatttattttaatattatatttgtgtgtgcgctaaagctattttcagctgatagttgaaggggcttttcttttaaggtgtaaaaaccatcaaattaagttaactttttaaatgtattttttatacacaactagaaatcaaatcttaattgatatacttaaaagaatttagttatctgtatcttctagaataaagaattttgttaacgtagacattctatttcattaaaacattttaat

SEQ ID NO: 90376 - DNA, 300 bp, Glycine max
cctgcaagcatgcgaactctaaaacaaagggactttccttttattaataccttcgacagccctgttgagcctcgtaaccccttccttggaatgaagctcactacaagccttaagtgaaaaaccatgatatcaccatatccttaaggaattccggagctttggaattgacttgggaataaaagtgggggggtcttgattcataggacaaccagttttggtggctatgctacatgaagtattttgggccatactcggatgacatcgtatattgggtaaatgctggacatgccgaaagaaaag

SEQ ID NO: 90377 - DNA, 293 bp, Glycine max
agcttggagaggatgcttctttgtttgttaagaaagagggggagaaagagagaggggggagcacgaaattgaaggaagaaaaagggagagaagttgaactttgagttgtgtctcacaagactctcattcatcaaagttacaacaagtgttacacatgcttctatttatagattaggtagctttcttgagaagcattcttaagaaaaacttccttgagaagcttctttgagaaaacttccttgagaagctagagcttatctacacacacccatctaaaaactaagctcaccttc

SEQ ID NO: 90378 - DNA, 314 bp, Glycine max
aaaactcagcctttaatgaccatattattccaaaatggctattaattgggtttttgtaaagccttaccaggaccttcctggggatgtgttttaaagaatccaattttttgcgaaggaaaatgccttcacaaaacatcacgaaaagctagccaaatgggcccttaaagaaaatggtatattttgggccaagaacccaacttaaccgagtttttatttttcaccaaagcccctgatgacaaaagttccatgcctaacaacggggtcaccatatgggccgaatcttaacactttgcaagtgtcaatgacgccaatcc

SEQ ID NO: 90379 - DNA, 295 bp, Glycine max
agctttaccccacagcagatggtaccactcaaatcatgagtgtggacgaagggtctccagtctgagccctgacagtctaccaagaaagcctagacaacatattcaatgtagattcgtgcaacgacacttctgatagaggcccaaagcctactgaagaactcgtcaagctacaactcggacccaaactcgggtagtgcatgtagctcaacagggacctcaccagccatgagcacagacgcatagttgatgtcttacataggaacacagacctatttgcttgacaaccatctaacat

SEQ ID NO: 90380 - DNA, 239 bp, Glycine max
tctttaaccaattttgctcttttaccttttacagggtctatatctggttctggttgtgcaagattttcactacttatagccagaaaataattggatgaagaacctccactatcccttaaatttaaaagggaaattttatttttattaaaaatcaacatcattttgactctatgatcacttttgcgtttaggtcataaaacctatacgctttgctattaataacataaccaatgaacaca

SEQ ID NO: 90381 - DNA, 167 bp, Glycine max
gaccatgaaactaattaattcctcaaaggtttgtcaccttttttacccggggaaagggagaacgaccattagaactgtgtggaacaccggtcaaattacatttcctaagaatgttggaagaactcataaatgaaccaatgggccaagcttgggtggtaaaataaacg

SEQ ID NO: 90382 - DNA, 291 bp, Glycine max
agctttttataacatgtgctttatcccattacaagtttcctcaggttaaagttatttattgttttttcataatagcttattgtaattcagatgtaaaatattaaataggttgggcatatacattgattgcctttatcattttaaagtttttcttttttgtgtaatgatggcttttaaatgggtaaaacaagttagttctagtctcctagatcattgaagtttgaacaaaccctacccataatgcatccatccgtccatttgccaccacataaaactggtaaaaatcctctc

SEQ ID NO: 90383 - DNA, 287 bp, Glycine max
tatagagattatgaacgcttacggcttggtttttccaaaaattttgaaggaacaagccattgaaaaaaatttattttgctacgctcaacactcaacaaagtacactacttcactatatccccgaacattggaaatgctgagctgcatccttaactgagcactgattacaagttacaggccttcactacattcatcttcttgttgaattttgcccacttttattttgtacccataaaaattgacattgatgttgaaagaatggaagacaatttgaaatggtaaaatgt

SEQ ID NO: 90384 - DNA, 289 bp, Glycine max
agcttgtaggattattttgttcccatcacatgtggtactaggtggcggtcggtcgatggcgcacaacaagttttccacatccactatgcacccataaacccaccatcccctgttgcccacctccatatgagctcacgtactcccacgtagcccatatcctcttttttctcaacaccgggtccccataaatcctaccaagctttcctaacatcaaagcaaatcaacattcaaacaacacaagctatcacagccaatcaaaacatatcaaaggcagaaaactttgccaaga

SEQ ID NO: 90385 - DNA, 235 bp, Glycine max
gaggccctttatggggaattttcacccatgagaatcagcgccagaaaaaagaaaaaaaggtgaaaggaggccccatcccttaggatatatccactggaaaaagaactttacccacaaaaagaaccttggataataagcttaaaaaggatgctttaatggaagaaaagaaagaaggagagaaaaagaaaagggggagcccgaaaatttaaggaaaaaaaagggaaaaaagttgaac

SEQ ID NO: 90386 - DNA, 288 bp, Glycine max
agcttgaccaggaattatcctattggggcggaggtagaatagtggatgatcctggtgcggagatgatggcacagcggaagaactaggatctgcagtttctttaggagatgataccatggataaacatagcgtttggaaatgatttcgtaaatctgacaacgcttttgggagatgctggctaaaacactgaatgccaggctcatatcaatgtgaatgaataatggtaaggggccgtgtgaaacaacggtttaatttgctttgtggtgaacgtgctattaatggtaactg

SEQ ID NO: 90387 - DNA, 292 bp, Glycine max
agcttcttatccaaggcacattcttggtggtgaagctccttcttccatggcttatttcctagtggatggtgcctcccctctcctcttctcctttgccttccgctgcatctccatggtggaaaatcaccattgaaggacctcattgaagctcaaagatccagcctccatagaggccccacaagcaagcttccatcacaagtcgttacaataacaagtcatgtgcattgccaagttgcagatgacatttaatgagtattgttttccaaaattatccttgacttcctctttcaag

SEQ ID NO: 90388 - DNA, 283 bp, Glycine max
tcctaatggtttctaattattgggccatttaatctatcatatgctgacaatagctgaaaagtccctggatctcctcgggggcggaataggtgtctgccattgctttggccttggctagcaattggggaagttcttgactcccgttcaaggtaaaagcaaatcagtccatccacatcgtttcctcttgatgtagcgagtcaatcacccttcctctagcctccttttccgcgtacacttgggcaaactcgtccgccactctatgctcgtgggccgtggctagatt

SEQ ID NO: 90389 - DNA, 218 bp, Glycine max
agcttggaaagtttgcttttttggacgaaatgaaatctagaggggggagccactcattgaacgacgaaaatgggtatataatcttaactttgagttttgtctccaccgaccctctatcctcgaagtttattcattgcgcttcacatgcttctatttattcaccagggagtcttccttgagaagcttcttttctaatcctctctttataatctattgct

SEQ ID NO: 90390 - DNA, 287 bp, Glycine max
agctttaacatgctgatatctttgtctcaacacatgggggggtacatcctttatgggacaagtggagggtacatctacttgggtttgactgagaacaagaaagggtacatctgttgtggatcagttctagtggagggtacatgcactaggtcaaagaaaacaagggagggtacatgccttgtggatctttgcttgtaaaaggattattacaaggttgaaagaaatctcatggaccgcaggtcgcttggggactggatgtaagcacgggttgttgccgaaccattata

SEQ ID NO: 90391 - DNA, 256 bp, Glycine max
accatatctttggacaaattggcgctaaggaggaaattcaacgaccccacttggactggatgtattactatatatcatatacgcttaattgaggttttcatacctggaatataggccgttttcaaaaaactacctaaaattcattcttttcccttagatacctgaaaaatactgcgttacattatactacctatcattagtccacattcattaagtgatgatgtggcatatggaaagcctcgttattacgcctaat

SEQ ID NO: 90392 - DNA, 296 bp, Glycine max
agcttgttcatcttgagataataggtggtcatcctcatttgaagttgatggtgcaacatatttctttggcctaacaggaactccaatatttttacagcttctaatgttatgattggtttggccacaccttccacatgtaaactcagccaatttcctctttagcttatgtcctgtgacattgtcctcatctacggatctccttctatttttctttggccttcctctttggacccttttatgtggtggaacagggtgtgtatattgtgtctgggcccaatattgtggtccttggactg

SEQ ID NO: 90393 - DNA, 295 bp, Glycine max
  unsure (1)..(295): unsure at all n locations
agccattagaagagaatgagcatgtgattggaattatgtcttaaaacgtttttcagtttgtcagattgattgtgaaggaatgcattaatcgtatcccgttgaaagtgtgatccttaaattttgaaagaaatggctatcatttagtactgatttttgcgagaatctttgaagtatggattgaatgcatgaaattgaggatgatgaaggccatgtttgattgtgatagccacttanccaaaaagctgaccatgtgcttgaatgaattatcccttgtacccaggatgagttgaatgaa

SEQ ID NO: 90394 - DNA, 295 bp, Glycine max
agcttgtgactcttggcaatttcttttttactagtcacttaaaaagttgtgacttttgaaagaatcttcagaaacaaatcacttgaagaattgtgacttttggaaatgtatttttcgaaaccagtcagtggtaatcgattaccattaatgtgcaatcgattacacatcaacagatgtgactcttcattttgaatttttaaaattaaaacgtttagaaacactggtaatcaattacaagtattgtgtaatcgattacacaagttgaaaatgtttaaatacaagttgtaactcttga

SEQ ID NO: 90395 - DNA, 309 bp, Glycine max
  unsure (1)..(309): unsure at all n locations
gactcaagcttctatagaaggctcgnncctaatttctctacaattgcatcatttcttaatgagctggngaagaagaatgtggcatttacctggggtgaaaaacaagaacaagcctttgctttgctcaaagaaaagcttactaaggcacctgttctagctcttcctgacttttctaaaacttttgagctagaatgtgatgcctctggagtgggagttggagctgtattgttacaaggtgggcaccctattgcttattttagtgaaaaacttcatagtgccaccctcaactaccccacctatgataaagag

SEQ ID NO: 90396 - DNA, 313 bp, Glycine max
ccggatcttaagtcacctgagctgcagctgccatcaaacaacttgattatatggattctaatcaatcaatgcatatttcatttttgcttatccactttggactttgctttttgtggccttttagagggaaatgcagaaaggattttcccatgcactaatgaagaaagaagcatattctcaactcaactacccaacaaaagggataagagactgtccgttgagacttgagaaggttctttctattgtatttttcctaccctgaatttttttatgattaccactttacctttgcctctttgaagagccaaagcct

SEQ ID NO: 90397 - DNA, 266 bp, Glycine max
gtgggaaaatttttttaggggttcaagaaacctggtatttataaaaagtggaacctttttaaggatctgttatagtctttgtagaaaattttcagcttatagatatagatgatagctttgtagataattttagagataaattgtaacttatagataaaagctagaagataattgtactttgtagataaagtgtgacattgtagataattaactacttgtcaatagataaagatattcaagtattaatatgaaagagataacctgtc

SEQ ID NO: 90398 - DNA, 294 bp, Glycine max
agcttgtagccattagaagataatgtgtatgttattggaagtatgactgaaaatgttagtcagtttgtcagattgattgtgaaggaatgcattaaccgcatcccggtgagagtgtgatccttaaattttgagagaaacgactatcatttagtactgatttttgtgtgaatctatgaagtatggattgaatgcatgaaattgaggatgatgaaggccatgttttattgttatagccgcttagccaaaaagctgaccatgtgttggaatgaattatcccttgtacctagtttgagc

SEQ ID NO: 90399 - DNA, 271 bp, Glycine max
cacacaacaaaatttctcaaaactttttggaacttggacctttctctctctagaatctctaaacatgccaagctctgaatcccaacccaaactcccttcacaaaatctgattttaggcttaaataggtggctttgtttgtgctcgtgcgcttagcgagattatgatccacttagcgcacattaatgaattttcgcttagcgctcttttctcgctcagcagatgggctgaagcggtgtgcttgatgagatgaagcggtgcgctcagcgaacc

SEQ ID NO: 90400 - DNA, 296 bp, Glycine max
agcttaggattgtcaaaagctttttttttgtgagataaaacacaatctatcaaatcaccatctggactctgcaacaaaataacaaaacccccaacatcactaaaccacaagaaacaaacagaaaagaataaatacataaataacagtgtgtgtcactgtcatcagtcaccataggttgtagagaaagaaaaaaataaaatgaagatgcctgaattgtcttgacgggaggcttgttgattttcttcaagtgagctctgactctcctcaacttgagcaactcatgatttggcctaaaa

SEQ ID NO: 90401 - DNA, 294 bp, Glycine max
gcttttaaaaatagactccccactagagcctatctttcaagggaaagggggatcatttcaggtaatgtctggcccctatggggggaaaaacaagaagaaggaaggcatctctttttcaattgccagaaaataatagggctttggtgggagtccatgaggtggatccaggccatgggacctctcccagcttctccactggaccattttattcagttttgtgatggatttggagcagagaaaaaccataataactgctgtggatggtgggttgctttgacaagtaccatatggaaa

SEQ ID NO: 90402 - DNA, 292 bp, Glycine max
agcttcagggtcaaatatagtattacccccgaaaccacagcctgaatgtattaatcaaaattgggacgttgaaaaaaagaaagagaaaaaatagtgaaaggattgatacgatatgcagtccaattcaaaataaaaatttgatgttaatttgttttcttccttattatatatatcaaggtagaatggttatttataggtatattttcttaatccacaatctttggtatgaaacattttgagtgagaaagttaacaaacttttgagtatatagttggaaattggaattatagat

SEQ ID NO: 90403 - DNA, 291 bp, Glycine max
tagttttatcatttttaattaaatctaattatcttaaaccaactgattatatttaataaaataggtaaattgggaattttaaaattcagattattatgcaaaataaatatttactaaaataaatgtattattatacaacaatttaaattttaaaacatatattcacccaaaaaatgatgttaaataatttaagtaatataacacaaatacttaaatttaataatatcattttcttaataaaaaaattaaattataaagtaatatcatataaattaatttaataagataaat

SEQ ID NO: 90404 - DNA, 292 bp, Glycine max
agcttctctggaatttaatttttgtatttgggctaagcgcatagactcactaagagcacaaacctctatggaatttaattctttcgatttgcgctaagcgtggccatcactgcaattaaggagcattctattcactaagcgcccctcggcccgctaagcgagagttgcaagaccaatcagagctatagaatgcactaagcgcatatcttcgcgctaagcccaaaaacttctctagattgtttttattttgaattgggcttaacgagcagacacgctaagcgtatgggccttt

SEQ ID NO: 90405 - DNA, 288 bp, Glycine max
tgctaaaagatattatgggccctaccaaattttggaacacattttcaaggctgcttataaactcaaactgcctgatggtgcatgtattcaccttgtattctattgttccttgctcaaactgtttcattattccaccaaggaagacctcactttgcccttgcctttaccagctacctccactggcaattaacccatcattactcctttagtgattttcagcactcattaggatcctgatttcgttgactccaagctttaggtgttggtccagtgggagggattatcacc

SEQ ID NO: 90406 - DNA, 291 bp, Glycine max
  unsure (1)..(291): unsure at all n locations
agcttatgcctggtatgantttttggtttcggnggttttctaattattaatatttttcaatttgttacttatagcttctgccgatggaagagctacgggagagacgtcttactgaccctcgtttaccaatgtaagttttattgcgaagaaaaacttggttgaggcaatattgttcaatatgactatataaaggccacacatgaaagtaaattatgttttttgatctattgggatttgggtcatacaacagggaaacccatatccttcccattaatccatccttgcttcaga

SEQ ID NO: 90407 - DNA, 207 bp, Glycine max
atcttaaaagtgccctaaaatgaacatgccccaattatggaaaagataatatattatgctcaatatttaaaacataaatttgaaatcaatgaacagaagcatttgcttccactaccaatttgacaacattttggaatacaaattcctaatcctagcaaattggacaaaaaattaaggaaacataaatgcacatcagatcatattttt

SEQ ID NO: 90408 - DNA, 291 bp, Glycine max
agcttgtatcagttaaggcttttttgtatacattttttataccagttttctcatcgagtatgttcatgtctaggaatatctcttattccttacaatatatggctgcaatttaaacgtgaaagctagatgagaaggattcatgtaattggtaagcattattctaattggctaagactactgggtgttttttatttatttattaaagcatagttttatttagttttctattagaactttattcaggagttaaattaatattgtgtggacttacattgcgtggacagtggactt

SEQ ID NO: 90409 - DNA, 301 bp, Glycine max
acactattaaatacttcaacttaactttcactggcacaaacccatttcactttcatacctatttatattttaacagacccttggagggaggacaaagggcattgtgtgatacaaaaaatgaatccttttagcataaagtgaatgtaagggaaaaggactgaatgcactcctttcaggaggaacaaagggcacgtaagtggttttacttacttttcttcgtaggaagagttttttttggtgttgtcccttgtgttgcaacttttgttaagtgagctgttgcaacttttggtgtcaatcatca

SEQ ID NO: 90410 - DNA, 289 bp, Glycine max
agcttgaaaaaaaggttcatttttaactcgagtcgagcttcaagataaactaactattaaagagccgagtcaagctgaactaagttcggctcaactcgactcatttctagcccaagtggtagtgatagcaatgctgatagtgattttggtggtgacaattatggtggtggtggtggctacaatattggtggcgacgatggtgataataacaatgattatggtggtgataacaatgctagtggtgttggtgataatggtggtgacaatggctgtagtggtagtgatagtg

SEQ ID NO: 90411 - DNA, 283 bp, Glycine max
  unsure (1)..(283): unsure at all n locations
tatcgtattgaatacacttttatttntgagacaatggaccgattcttcaagaggcttttctttatttgattaccatatgatataatctattacttctctttgaataaatttttcaaaagtgaaaaagaagactttaatcgattactttgaggatctaattgattacattgttatcgaacagtttccagtttctgggaataacacattaatcaaataaaagataatctaatcgattacttcattgaattaattgattaaattgtagatttaatcgattacatgc

SEQ ID NO: 90412 - DNA, 290 bp, Glycine max
agcttgccaactttgaactttttttcaagtttccaaccagaaaaatcagcctcagttaatgtatgatattacatgatgcttgctttaatttaattttgttttgtttagtttctctatttgtagatttcattgatgtcacttgggaaaatatgatatgatgacatgacagagttattatcactttgccttgttttatgagattttagattaatgaagtattcaatttatgttcttaatgtaaggtgtgaattaatctttgttccttgcaatgtttcaagtcttcctttatt

SEQ ID NO: 90413 - DNA, 286 bp, Glycine max
attctcagcttggtgaactaactttaacctttgggaaatttttttgagggaggaggtttcagtacctaaaggaaagttttgaaaatggcacattgcatctattgggttactgaatgatggtggagttcactccagacttgatcaattgcaagtgattatttggggttggagatgtttttccttcttgagtatacagtttattctttctaactaaatatttttgtacagatgctgcttaaaggagttagcgagcgaggtgttaaaagagtccgtgttcatattctta

SEQ ID NO: 90414 - DNA, 287 bp, Glycine max
agcttgggtctgcgaattttttcaaaattgtgacagtgcgatgaatgtcggagtgtcatcctgatcaccattcagttccaccatgcgtccctgatagaagaactgcatgcacaaaatgttataatctgtgagtagtggacccaatgatttaagccattggacacctaacactacataggcaccagaaatggggaggacatggagatcgacagcgaactgcatcgactgtatgtcaatgagagtggcttcacacaaacttgtgcataataggtgttgaatgttcccta

SEQ ID NO: 90415 - DNA, 269 bp, Glycine max
ctgagcgaaatcctcaaaaatatctccatttttttgctcgcagaaggcgaccaatggttgttttcagaaatcttatttctgggggaatggctggtctcttttcaacaaaacaatgttttgcattgagtgctgtgggttcattgcactgtacattggtcattgatgatcgatttttttctagctcaaaatgtaacgagctcttgttttgtgatgacatcttaatgaatatgattgcttattgtctaaaagcaaaaatattttgtgcatat

SEQ ID NO: 90416 - DNA, 294 bp, Glycine max
agcttataatatatcgatactctcttttttttacatcgcaaactctcgggaaattcaaatagtcataacttttcacacggatgtccgattcgggcacataatatgtcgagaggctcgaaattgaacaacgcaagcccttgagaaattagactggtataacttttcacacggaagctctcgtgaaattcaaatggtcataacttttcacactgaggtccggttcaagtttataatatatcgatacactcgaaattaaacatcggaaactctctataaattcaaatgttcataact

SEQ ID NO: 90417 - DNA, 276 bp, Glycine max
aagatacgagtgaaaagatatgtccagagcaatttgtggagaacttccaacgtttaaacataagaggcacccgatatgaacatccgggagaagacatacgagcgaaaggatatgaccagaggaatcgatggagaacttccggcgtataattacgagctaaccgagaaacgaagctccctgagagaagatacgagcgaaaggatatgaccatagcaatcgctggagaatttccaatgtcaaaatatgagaggcgccatatatgaacagcccgaataa

SEQ ID NO: 90418 - DNA, 200 bp, Glycine max
ctcctaaattctggagggaaacaagaacaccccggctgtatcaaaggactttcacaacctttgtgtgtcgccctcgctggaaagagtgattctttccttcctatcatttccacccttggtctttcaaaccacaatttcagaaaatccacctctgcccaaaaattatctcgggaccataactcccattttacacacacaaa

SEQ ID NO: 90419 - DNA, 293 bp, Glycine max
cttctggtcctcctcatagttgttgcttgagaaaacattctctattttcatctcccactccaagtaggcctccggatcattctttcctttaaatggaggaatgttgagtttaataccatcaattcggatttgtctaggaacacgatcattccctcttctactcctttcttcttcattatgatctctattctccatttgatccaacctctcatggagcgcatcatcttgttatttcattaacctctccatatgttgcatcaaagcttgcatttggaattgcgaaagtccccctc

SEQ ID NO: 90420 - DNA, 295 bp, Glycine max
agctttacacatacacacactacacacatatttatatgctctaatatgcttttacacataactcataatcatgtatttacttcttctatcttattatgattatgttttaccttagtcaaaatttaaagagggagattgttaggtctaaatggtccacagaccactggatgacccattcccaccttggattttgatgattataaaggtataaattattggtagactaatgatttattgttaagtgaacatgacctactacataaatgagcacacttggtattaaattgtattctac

SEQ ID NO: 90421 - DNA, 281 bp, Glycine max
aattcatcatattacccatcaatctgttccatattcctctgaaatattaatgttcatgtttttcaatgttttctgcatatctagtctgggctaccagtaataaaactgtagggtatcattatcaacattcacaggctccggttcttgctcttgaacccttgaaattgtgtcccttctcttcctagtagacatttgtaattacaagcattgagggaaagaaaaagattaaaataaaagagggaaaatgaattgaaaacaatgtgggagacaagaaaatatat

SEQ ID NO: 90422 - DNA, 296 bp, Glycine max
agctttctaaagttttctggttttcctaaccttgaaaacaaaacttgggctattcatccttttcattcttttctccctttgccaaaaagaattcaccaaggactaaccgcctgaattctttttgtgtctctcttctcccttttccaaaagaacaaaggactaaccacctgaattcttttgtgtctcccttctcccttgtcaaagaattcaaaacgacacagtctgagaattcttttgattctttccattcccatatacaaaagatttcaaaggactaaccacctgagaattctttt

SEQ ID NO: 90423 - DNA, 287 bp, Glycine max
ttgactagttcaaaataaacaggtaatttcataaacctgaattggataagaatggaggtttcaaatgcttgaaagcattcaaaactcttatttgagaaaaaatccatatctatgaattttgggtctataatggaaccaaaagaaaagaggtttgtgtaccgtataccttgttcctctgatgagaacaatgatccagagggaatggaggaaagcattgaggtttcctgtgccccaaaatgttgttgactccgactcgaagtgcctttccgctttttcgatggttctgc

SEQ ID NO: 90424 - DNA, 313 bp, Glycine max
  unsure (1)..(313): unsure at all n locations
gacctgcaggcaggcaagctccctcgcggctcacnatgagaattttttctcacagaggcgtactttggagaaagctttctacaagaggcggctttgagaagctagatccttatctatccacccctctataaaacaaatgaacttccgaaaaaataattaccgacgaaaataacgcaacaaaaaatcaaacatcaaacataattactaataatacatagatatatatatcagggtgctacaccttttgccttgcatggataccgaacttctactggggcaacaccgcattccttggtttatggaacggaagcgg

SEQ ID NO: 90425 - DNA, 241 bp, Glycine max
  unsure (1)..(241): unsure at all n locations
agcttgctctaaatttacatttttttttgtatttatgggaggaggttatatgccatttttgctttaagagtagtgtcccactggtnaaattaactttccaaatgtttgccttctcaggaatggccccgaggaagcttgcctcaaagaggttcaggaaggacaaggcggtcgaaggaactatttccttccggattacgacagttaccgctttttgaacactttactcaccatggcttctaag

SEQ ID NO: 90426 - DNA, 293 bp, Glycine max
tcagcttcaacatcaaaccacttccaaggtgctggttctacttcacatgtacttgatggggcctatgcaagctgaaagccttggaggaaagaagtatgcctatgttgttgtggatgatttctccagatttacctggatcaactttatcagagagaaatcagacacctttgaagtattcaaagagttgagtctaagacttcaaagagaaaaggactgtgtcatcaagagaattaggagtgaccatggcagagagtttgaaaacagcaagtttactgaattctgcacatctgaag

SEQ ID NO: 90427 - DNA, 291 bp, Glycine max
agcttaaggtagttgtacattttgtgaatttttttgaagttcaattttttagttccttatgtacattaattaaaaagtgaaaaaattaattagtaatcttaaaataaattaaaaaatgggaaaatattttaaaaaaaattaaattgattaaaaacacagtgaataaataattactacatctcaattatataatacacataaattaaaatactacgataattgagatgagagacagagagacatacataataaacaaaacataataaaacgagaataacagaacgtactaac

SEQ ID NO: 90428 - DNA, 289 bp, Glycine max
aaaaccccagcctaaaacatgtggaggtttgtttgtgaattttggatctttggaaagccaaaaaaagtttgcctcttcagggccgggaagactcctaaagttgaaaagctagaattggggcacacagatgtttgggggccagccccagtgaaatctgttggaaactcacgctattatgtcacttttatcgacgactctaccactaaggtatgggtttattttcttaaaaataaattcatgtgttttctgtgttttaaaggtagaaaacagaagttgaaaatcagacagg

SEQ ID NO: 90429 - DNA, 292 bp, Glycine max
agcttattggattattgtgttcctcttcatatgaggcactaggtggcgatcgggcgatggcgcaaatcatctctcccacttccacaagtcaagcataaacacaccattcccagttgcccacctttaaattgagctcacgcactcctacgtagcccttattctcgttcctctcagcaccgggtccccatcaacccctctaagctttcacaatatccaaacaattcgatttcattcatcatgaaactaccctaaaccaaaaaaacagagttgaggcataaaactctgcccaaaa

SEQ ID NO: 90430 - DNA, 255 bp, Glycine max
taccgaaagcttcttgggccaatgtgaatttgaaacttggaccccaattaagtagagcgaaagcacgggttaatgaggttaatacatatgagccttttctattggactagctcatcgatgtcctccccataggtatttggatgaaacaacctgaacccaaagcttattagggtgatgaagcacatcccaaataagctttccaagaaattccacattctggaaatgagcccttcttactcccagacaaccatcttt

SEQ ID NO: 90431 - DNA, 290 bp, Glycine max
agcttcaccggatgacgccgttttaacatttcctaaccgacgtcatgcaaatttcgttcagggattgaattgaaaactcgttaggcgacatctgtcgtgaagtagcgaccgatatttttcagccgacattgcacaattctttttagaaaagctcgctggtcgataatggtctttttacggcagagtaagttttcttgttttggtgttgcataaaaaagttacaatgtacttcggctaggtttttcgtgcgagttcaaccgacattttgtttcggccaggaaaacattagc

SEQ ID NO: 90432 - DNA, 286 bp, Glycine max
tctttggtagaccccgatcgggcatctttttctgccgagggcgaccgtcatttttttcgatccatttcggggaatgatatttttttgccgaaaagggctaatgttttcctggccgaataaatgggaaaatgcccgtttcggccgaaacgaaaagtcggttgggctcgcacaaaaaaacctaaccgacctacattttaaattttttatgcaacacccaaacaagaaaacttcctgtgccgtaaaaaaaaaaaaaacatttcatgaaagcgagcgttttgaaaaacaa

SEQ ID NO: 90433 - DNA, 288 bp, Glycine max
  unsure (1)..(288): unsure at all n locations
agcttaaactattgctttttttttttgncaaccagagccagaggactcaaactactaaggttagtctcagacatagcccgggttggatgcaactgtttaaagctctatttcgatgcacaaacattgattgtacactacactccatgtaatcaacaccagccattgcaaaagcttcaacttactaattgaagtaccttgattaaatgccttgttaagagaaaactgacaaatgatttatcgggacaaaatatattgaagcctatggtacattataagtaccacaatgtt

SEQ ID NO: 90434 - DNA, 277 bp, Glycine max
tttataagggggccccatttttctatcggttttttattatgaaggatccgtggctcgggggttctaaatgaaatttcagtttggtattatgagtcaaattcctactacttgtgaaaaaaaaactaagaatttatgcctattggccacttattttgcgaacagtgttttttattatgaaaacagctaggatagaagattacaaagttgggtatgaaggatttccctgatcaataacaagaaaggaggaaaaaactaaaaagtgatattcataattcgg

SEQ ID NO: 90435 - DNA, 287 bp, Glycine max
agcttgccacctagctcgcctaggcgagcagggttgcttcctccagaagcaacagccttctggaggaatcttctggagggcccaagtgggcctggttgctatttccacccccatttttactaagtacaccccctgcctttttttggtgattctttttttgtaaagttacggaaacttacgaatttcgtaacgatacttgttttctttccgtaatgttacggaaccttgtggattacatagtcatcccctttttgacttacggaatgttacggaacctcactaattgt

SEQ ID NO: 90436 - DNA, 277 bp, Glycine max
tactccagctttttggagtaaaaacatgggacccactcattttatttcaaaaaggaagtcgtatctagtcaaaggctgaaaaaccatacaagtttcctaacgatttctaattatgtgggccattaagtctatcatatgctgacaatagccgaaaagcccatgaatctcttccggggcggagtaagtgtctgccatcgccttggccttggctaacaatcggggaagttcttgactcccgttcaaggtaagagcaaaccgatccatccacatggttgcc

SEQ ID NO: 90437 - DNA, 296 bp, Glycine max
agctttgaatgcacctactttttaacctattaagcactaattaaacctgatatttctgaatcttatgaactcttaattgcattattgcaatgcacaccatacacaaagactaataagccagaacaagatccaacttttgtcaatactgaggatcaaagctatatgatgttgtcagtcccctcatcaaacaggtataagcctaagttaagtccaaggaattagtattttaacaatttctccaagagtcatatatgtttgcacaaattgttagttgaatctcatcaaaagggaaagct

SEQ ID NO: 90438 - DNA, 279 bp, Glycine max
gttttcagaaagttcttaggaagctcttaatctataattttaagcatgtgaaacacttgttgtaactttgatgaatgagagtcttgtgagacacaactcaaaggtcaacttctctcccccttttcctccttcaattttttgctcccaactctctctttgtctctctctttcttttcctctattgaagcatcctctccaagcttcttatccaaggcacattcttggtggcgaagctccttcttccatggcttattccctagtggatggtgtctcctctct

SEQ ID NO: 90439 - DNA, 295 bp, Glycine max
agcttcttataatgtgaaaattctatatatttatggagaacatggggtatggaggcacgtaagcatgtgaataccacaagtcattttctccaattcaagggcttgattaattgctctaggaaaaaagcatacatctagtatattgtttggtttgcagctgtttgaagcatttggcagaacagaaattttggtttacgttgggttgaccatgttcactggttaacctattgtcacttatactcttatttatgcttgaagataacacctatcagtagatcctcatattagtccttga

SEQ ID NO: 90440 - DNA, 301 bp, Glycine max
tcagcttggaggattatggggtacccatcacatgtggtactaaggggttgtccggccaaggtgcacaacaagttttccacatccacaatgcgcgcataaacccaccatcccctgttgcccacctccaactgagctcacgtactcccacgtagcccatatcctcgtttctctcaacaccgggtccccatcaatcctcccaagcttccacaacatccaagcaaaacaacattcaaacaacacaagctatcacagccaagcaaaacagagcagaggcagaaaactctgctcaacacatcaacca

SEQ ID NO: 90441 - DNA, 273 bp, Glycine max
gcaagcatgcaagcactaaaactacaacattaatttttttctgataccacttgacggaccttgaggcctcaacaatactaaacagggataggccaacaatacacaagaaaccacaacaatcaatctaacaaagttctttaaacatgcaagacacaatagattgcaacaaaataaacaagaaaagggaagagagaatgcaaacacaggtttatatggagccggccacaaacccggcctacgtccagtactcaagcaacccacttgagagttcca

SEQ ID NO: 90442 - DNA, 280 bp, Glycine max
tttcaacccggagagctgccatattggaagctttttctttaaacgggttaccgcctatcttccaaaaaggaatcgaatctaaaaaagggctgtaaacagcaccccttgtctttcgacttataatagagtggggcattcaggttattatatgctatcggtcctcaacaaggaccagttttttattcgggaccaaggaacttggatcatttaaacagagccttgcctacactttaccaatatttgaaacttcgctatcaggaaagaccggtgctgtgcatcc

SEQ ID NO: 90443 - DNA, 288 bp, Glycine max
agctaggtttccgaaagggactcttttttttatcagcaagacgcggcaagagctgatcaaggctagcggcactcatttacgcatgagctctgcgcaccatccgcagagcgaaggacaaacagaagagctgaacaggatagtagaacaccaactcagagcttacgctcacaagaggccaaaccggcgggggaaagctatggccatggattgaggggccccataacacatcgtggaatgccggcactgggacgactccttaagaggccacattagggaagaagcccttca

SEQ ID NO: 90444 - DNA, 282 bp, Glycine max
gtcatgactttacatcctgaccaaactttatcccccccttttctctatcaacggttactggcggaaaaaccccctggtaccgaggagccctcgttacaccaccaccgggcgcaaatttataaacccgttttccactttcactatcggtcgcctcctgcgcgtacgggacaccagttttatccactatcccacctggccgaaccatacccaatccttccgtatactcgggagccttattcggttgctgggctggcgccatacttgccggaaccgccgtttttg

SEQ ID NO: 90445 - DNA, 294 bp, Glycine max
agcttggttcccaacgctcttttcaagctctcccaaaacctaaaggtaaatctaggatctctatcagatactatgctagatggcacactatgtaacctaacaacctcacttatatacaaggtggtcaaattctccaaggaaaatctgatattaatgggaatgaagtgagcaaacttagtcaatctgtcaacaataacccagatagagtctaagcctctaggggttctaggtagtcctaccacaaaatccatggaaatattgtcccacttccactggggtatctctaagggttgt

SEQ ID NO: 90446 - DNA, 298 bp, Glycine max
ctattggattatgggggacccggcatatggggttctaaggggggaacgaacgaaggggccaattaaatcttccactttcacaagttaaggtcaagcctaccatccccagttggcccccttttacttgagctcacgcactcctacgtgcccttatactcggtcctttaaggactaggtccccatcaacccctgcaagcttttacaatatccaaacaattcgatatcatttgccatgaaactaccctaaaccaacaaaacgaagtagaggcagaaaactcttttcaaaactcattcaaat

SEQ ID NO: 90447 - DNA, 304 bp, Glycine max
accatccaaaccccttacgctttttacatggcaccgccaacaggggaccatcaacgacgtaacccacaagacaaaacacaagtaccagcaagaaaaaaaccaaccacgaaaccgggcgcccatcaaaaaacaacgccaacacgaccacacaaaagcgacctgcagcagactggagcaacgacaaaactgcaatacagcagtcatcaaccaaggataaagggggaaaaaacggaaaaatacgacaaacggggtggctccaaactcacccctacaaatgcaaaaccaggtggacctgggggaaccc

SEQ ID NO: 90448 - DNA, 292 bp, Glycine max
  unsure (1)..(292): unsure at all n locations
agcttgcacaacaagttactaaatttgtttttgnacaaaatgaagtaactaactaactaacttccactaatgtatatagttactactcaaaaggaagggatgggccttgatttggcccatctaacctacctaattaaactaattacacaaagcaaagcccaaattcgcagcataattattcaagtgcaaaggttctgacttccaagcctaatttcacccttgaaatggaagaattggcccaagcttatttgtcaataaatttaagatatttttcttagatttctagggacta

SEQ ID NO: 90449 - DNA, 284 bp, Glycine max
tgctccgcttgctgatatttatcatgcagacttttctgatgatgaccgaggaacaattagggatcaacttgaaacttatgtgcttcaagtgagaagaaatgcttctttttccacttgtgaagatgttcaaagtttggctatgaagatggttcaaactgagaaacatttggtatttccattggtttataaacttattgagctagctttgatattgcggtgtcgacagcatccgttgaaagagctttttcagcaatgaagattatcaagtctaaattgcgcaataa

SEQ ID NO: 90450 - DNA, 291 bp, Glycine max
agcttgttgatgaaaggaggtatgactatgttgttgtaatgctttggtccttgttgataagcatagtcactaagagtcctccttggtggtctgttttcttctcctcctcgatcaaccatgtcatcttttacaagtggctttttagttgaaggataatcaatagaagaagactcacttggtggtttagtggttgtttttctttttcttcatgttcttactttcagtcttggtaatttcctaatcaaatggtaatttatatacaagaaatttacctcgcataaaggaaaaata

SEQ ID NO: 90451 - DNA, 248 bp, Glycine max
tttttggtgattaccaagatgatgaccaaaagtcccagaaaatggatttcagattgaggtcaccagttccagaaccagaattatttccaggttcatgagaaaaaaatcagaagattccagaatcaagagaagtttgatttcctggattcagaaaagaaatccagaagaattcccagggaagtattgaaaagatttttcaaaaaacaaacatagcacaattttgttttttcaaaagagtttttctcaaa

SEQ ID NO: 90452 - DNA, 290 bp, Glycine max
agcttgtaacggaaaatgtttgtgttgaggaaaatatcaactgctgcaaccaaacaactgctgagccattttgtatttgtgatgatagcttgtccgaggaaccaaaactcggtaatgtgtaaattactgttcttgaaagcaagaatatttatacttttgcaaaaaagtacgttttaccggaaatgtctagaatttggccaagcagtatgtgctcaaggtttaatgtggtggtgacgaagctcgtatactaccgaaaaggtcttcaacattttatgagtcaaggttgttac

SEQ ID NO: 90453 - DNA, 281 bp, Glycine max
tggattaatcatggatcgggttagtccgttttacacttttttacgaatttaatattttggtctacccccgccagccaaacaagttgattcacgggtctattttttttaaaagaaaaactataattttaaaataaatatatttttttctcttaaaaaatagtcaattacactcaattatatatatatattaaaaaaagtcttaataaatctctaattaatactcaattacaaaagttttaacacaactaaataaattttcaacataaatgtaaatgcaaaga

SEQ ID NO: 90454 - DNA, 289 bp, Glycine max
agctttgaacaatatacttggcctttatttaactgtctttgggcttggcggtcacgctcaacaaagtactttcgatacctactgtacgttgatttcaccaatgctgttatgggaatgttgcgacaatcctttaaaaccttattgatacattctgagaggttcgttgtcatgtggccatatcgacgtccttctctatcataagccatcgtccatttttcctttgaaatgcaatcaatccatgtggctatggctggacttagttcaagaaatttttctaaattttgataaa

SEQ ID NO: 90455 - DNA, 284 bp, Glycine max
tgttgagttattgtgggatgtgactaaattttggcttctagatgtacaagtatcctttcttcataacatattttcatgtgaatgaaataatatcaggtgaaaaatgtttaaacatctctatactacaattgtggatgatgtaagtaatttcaatttcatagtctcctttcattatgtaataattaattttttttatgttttatttgattaacaatttacattaaaactattcaaaataggtttatggatgactggagtacaagtttgggtcatattttggtgta

SEQ ID NO: 90456 - DNA, 289 bp, Glycine max
agcttgtcgcatcctgccctttggcaagagggcgatgcgtgactcacgggtgcgtgttccaagaaaggaatacgcgcggagtcgccaccaacgtttatttgaggaaagtgtcggaaaaaccggaaaagacgtgatctacgaattctttgtgaaaggttcgagagttgtatttacgcacagggaaagtattagcaccccacgcgtccgtcacaagagacgacaacctttaatcaaatgtgcaaatatgacatcaatttatattcttttccctttttacgttcttatgtct

SEQ ID NO: 90457 - DNA, 270 bp, Glycine max
gaaaatgatgaaggacaagccctttaggccgaacttggaaaaacctaagtagtccaaaaaaagttcaagtccatagccatcaaaatctgaaaagaatatgatgaactaagggacgtcaatatggccaccgctgaagccttggaacgagaaaccaagaaggcccgaaaggaagaacacatgccagcaaaagggcagcaatagtaagctcaagctccgaagaggtgaaaggaatcatcacgggtcaaaggcatgatcttgaaggacgagcta

SEQ ID NO: 90458 - DNA, 288 bp, Glycine max
agcttaatcgacctaaagaaatttgttactttttcttgtctatttgggacaatcacatatttggttttctgatgtggtgattgatttaatgcagacaggtatggagttggtactaaattcctcggatgaagaatttttggttgccatgttattctcactctcaaaattggcttgcattttaattccttgtatctcttatcaagtacgtaccttcttatcctattatatgattttctgatgtggtgaacattttctcaatgccgttgttaatatccctttaaatgacaa

SEQ ID NO: 90459 - DNA, 272 bp, Glycine max
tgcagagaaaaattgggcttaatcatcatttttaaactttctattcatgaaacaaattctaagttacttacaaaagaaaatatgaaaagtgaacccggaagccacaaaacccacaacaagaacagatttttgaaacactgatgttgtcactagtgactattggattgggattttgagagaatattttgacaaaaacaatcttaaagattttaaaagattatgtgggattgtattgattttgtgggattttaaaagattttttttaaaagatt

SEQ ID NO: 90460 - DNA, 415 bp, Glycine max
  unsure (1)..(415): unsure at all n locations
cacatacactttcctcacgatgtactagatcaatcgacgactgacaatatacaacccaagaacagatgannattgatcgttcgatcccatcgcaggcacctataaagacacctgcaagcatgcaagcttgcaaatgataataggttagatgatttaagagggaacacgctcgaaaagtatcttgaacctgaaaacaaagcacgtcatcgattctcatataagtacataataaagctggaatgtaaaaagcacaaacaccagacaacaatttagcatagccaaaaagatgtctcaacactaagtactatcattcattgaaaaaaaaaataaatgctcggtacaggcttatattgtgtgtctgtctgcgctagaatatgcaaaaacatcttaacatatcatagattatcccccaaga

SEQ ID NO: 90461 - DNA, 352 bp, Glycine max
  unsure (1)..(352): unsure at all n locations
ctcaagcttctggtcagcaccttcacccataagataactttcacaagccagtttctgtgagggttggtttttttccactgaacaattgacctctgtctcttttctctttttataaatcacaactgtgattgccacccattccaaaccggcttggaaactattcctgcatccataattaatttaagaaggaaaaaaataatataacataaaaggtttttcctaccggtctttatttacattgtttcccctgtccactttagtgaaaagctttntaagcctaaacaacaccaacataactcttcgaatcatatccttgaaacaattaataactaatttaattattaacacgtgg

SEQ ID NO: 90462 - DNA, 313 bp, Glycine max
actgcagctgcaactttttgcagccccatctttgactttttcctcaatagctttctgagaaattaccatgatacagatattgactcaaatagtatataactagaaagcaccaactctttaaaatgactgccaaaccagtatcaaacacattcttgaaaaccctttgaataatactagacttacaaattattactcattctgagatacttgtgccaatacaagatgcaacaacgcttaaaaagagtcctattgtaatctacatcgatatacgctgaacctatgaaatatggtgaccttactcttaacttggtat

SEQ ID NO: 90463 - DNA, 294 bp, Glycine max
agcttgtaaacattgaagctgtgatatctgcctttgctctttggcaccggacttgcatgaaatatgaattattatctagcgaacgaatgattcaaccacgtattgggtagatggaaaccattttgtctgcagataacagagcatcgttcttacctaagttttgtgtattcttattaccattgatccgaggagcatgtatcaatgctgatctaacaccttgtcaagtgaaggccccgtctaatcattttacacatcatagagagagagagatttgtccctgcatatgtctctgaa

SEQ ID NO: 90464 - DNA, 294 bp, Glycine max
aactcagcttttaaaaaacacttatcacaccacaagggttgaagcgcactttctggtgacaagacccttttctttctttttattatccacaatcgacgcttttgaactcccataaaccgattgtcaaaaatacacttcaaaagtgtgaagctgagattttcggtgaggtcctccactgttcgaaaagacggatctcctttggttcaataacgaaattggatagaccgcagtcatgacacttaacaaattggaatgaccattgggcgcgatcaaaggaattctcgacctttgaca

SEQ ID NO: 90465 - DNA, 293 bp, Glycine max
agcttgataaattcatgctattccctttatggttgtcaaaacggtcggggaccggccaatacactctagacaggaatttttctgatcattgccctttattacttagatccaaatgcgttgattggggacctaaaccttttacgatccttgatagttggctcacagattcatccttcagggagatcgttcatcaaagctggtcttccaatcagcaaagtggttggggaggatttatactaaaggagaaaattataagactcaaagctaacatcaagaattggaaccgagatcat

SEQ ID NO: 90466 - DNA, 287 bp, Glycine max
  unsure (1)..(287): unsure at all n locations
aactaagcttaattgaattctgctaatgcaccttcgtttttggcattttaccgncggggctcaaagtcagggggaaagacataaaggctgatcctgaaaaagagcaagccatctttggagatgccaacccccattataaaaaagaaaggtcatgggttcttgggaaggatgaaatacattgcttggttcatatcccatttaactgctactagggttgctcgaatgcccaagcacatatggtgactcacaccacttggtctcccaaatggattcaatcaagggtatat

SEQ ID NO: 90467 - DNA, 286 bp, Glycine max
agcttgcttctacaagctcttctctctcattgatcctgagcttttgtggttaggctaagcgcgtcctgtgtgctaagcctgagggtcattctggtgaggttgagctatgcgccccatgctgcactaagctcaggccctcttctgttttgaaaattgtagacttaggctaagcccagcatgctgcactaagcctaatttgtagaaaaacattttttgtgtcttcaggctaagcgctcgtctatcgcacttagcccatgaataaatttgcataaggcgcgctaagccc

SEQ ID NO: 90468 - DNA, 308 bp, Glycine max
tgacactacaaaataccccagccttcaactaaatttacaacattccaattgattttcaaatggtgttaatcgattacaatggtttggtaatcgattaccagtgtgcttgaacgttaaaattcaaattcaaatgtgaagagtcacgtcctttcacaaaaaagctttgtgtaatcgattacactgatttggtaatcaattaccagtgatagtttctgaacaaatcaaaagatgaaactcttcaaatagtttttgactttttcaaattggttttaagtttttctaaaggtcataactcttctaatggttct

SEQ ID NO: 90469 - DNA, 320 bp, Glycine max
ttatagtctacctgcatgcaagcaagcttttggcatcttatcattttatctgttttgtatccgcccttttatttttacatttcggattatacgaaagcattgctcaaatattaaattgctaacacatcttggatacaaaaattatttgctcctaggatattgatcttccttgtacctccatttactaaagtatcctttgatcatgaaagtcactttgagaaggcatctagctcatcgtcatacaggttataacaagtcaggggaagctgtcaactatgtcataacacgacatgtcactgtgggtaaaaaaacccatcctc

SEQ ID NO: 90470 - DNA, 289 bp, Glycine max
agcacgcaacctagctggatttttcactgccccaactctaatcaggcacaagcaacacactccatatactaaaagctaccaaacactcctacgcggcatcgctagaaattgagagtcgtcaaccctctacaagagaagagcttaccttaccacactaaagcacaaactttactgacgctaccacatgacgactgacacatctcaacaacccatataactactcccaacatggggaactaacacatacgacgtaagataaccaacgacaattaacaaaaaaattaaagaa

SEQ ID NO: 90471 - DNA, 217 bp, Glycine max
ttttctggaagggggaccagaaggatccaaacgaaataaatggagaataaccctttgaataaaaacccccacttgggaacaaataccataatttttttggtaaaaccaaatatacccccacctgggcaatctcattaagtgacttttcatgaaaaattaactcttgaaaaaaccttccaagaatcatctaaaagaaccactttgcattcaacaagac

SEQ ID NO: 90472 - DNA, 293 bp, Glycine max
ctgcagcatgtgactcttaccttttttttggtccctaccactttatttcattaaacaacaccctcaaatcctatcaaaattctggccttattttgttatctgtgtaacattacttatgttgaaattactgtttaaagtaaattatttgatagtgtacaattttagggtaacctgttcaattctaagtctctatcaggattacaaataaaagcaagtcatttatgaataatccttatccttactactctaaacatgacaactacacaagacaagtttcattgaccactactttt

SEQ ID NO: 90473 - DNA, 285 bp, Glycine max
tgctggtggctatgagggatagaaagaactttttgttgtatgaatgaagtttacagggctggggcgtttgctcaattactgtgccatttttggagccaactttgtgttatagccgttaccggatattaatgtcgctggggttttccatttattcatgaaacctaaccacatttaatttcctttaaaatgtcatgcaaacagaaagccatctaatgggaaaatgtaatggcataatatgcattctttaatttttattcaccacagggagatgggaggccattttgg

SEQ ID NO: 90474 - DNA, 281 bp, Glycine max
agcttgttagataaaactttcttgagaagctagagtgtacctacacacaccaatctgaaaactaagcggacctgcttgagaagcttccttgagaaactagagcttagctgcgcacccctataatagctaagctcaccccaatgacaaaaaaacatgaaaatacattaaagatcctactacagagactactcaaaatgccctgaaatacaaggctaaaaccctatactactagaatggccaaaatccaaggcccaaaagaagaaaacaaccgattctactat

SEQ ID NO: 90475 - DNA, 225 bp, Glycine max
aaagggaatgtgggaagaacaagaaggtccaaccctctggcatgcgagaatcaaccaaaaaaagtgacaaaaaatggtcccgtgaaaaaaaatcaaaccaaagcccttccctcacgctatccaaacaaatccgcgagcgaaacatacgaagattttgccgccgacttcagacagcccgcaacatccttcggaccgcaacccggaagcacccaaaatcgaactgtt

SEQ ID NO: 90476 - DNA, 268 bp, Glycine max
agcttacaatgccagatatatttgaagcaccaacatcaatggtgcagagaggagaagggaccaagagaagagttgtgaagcctgcataccaggttgattacgtgtaaggggcaaaactggaagatcgaactagcgaaatcagcccaaaatcccgcttgtagtggatgctccctcataggcagtcatgcatatcaaaaccgctattagattccttttggatagaaataatacaaatatgttaaggggaaatcttctatatatagctatg

SEQ ID NO: 90477 - DNA, 294 bp, Glycine max
agcttgtcaaaaagggaagcatgttaaaaaaactcttcaaagtaaaaatgttgtttctacttcaaaaccttttgaacttcttcacattgatttatttggtccctctagaactatgagttttgggtggtaattactatgtgtcgcaacctacccttcggcgggagggcgacgcgagactcgcgggatgcgtgttccatgaaaggaatacgcgcagagtcgccaccaacatttatttgaggaaaacgtcggaaaaaccggaaaagatgcgatctacgaacttttaagtgaaaggtt

SEQ ID NO: 90478 - DNA, 217 bp, Glycine max
aacaaaatcaggttaacgataactcgcctgggctttttcttccatgctatagttagcaaagtcattgatccactcatgtttgatgagttggaaaatgaagccgcaattatactgtgccagttggagatgtattttccccctgctttctttgacatcatgattcacttgattgtgcatctggtcagagaaatcaaatgttgtggtcctgtttatctac

SEQ ID NO: 90479 - DNA, 294 bp, Glycine max
agcgtatcatcatagacagtgatggatgttcagcgcaacgcaaacacgcagaggaataaatgacgccaaacgaaaagagaaagaaagaccttgacggccggcacgtcaaggacataggaagcacacatcattcgaagaaaagcaacatatcttttggaaacaagaaattgatgctaagagtttattttccaaaataaccgataaaagaatgaatggagttgtcgaaccaatgaaagaacataatttggaaacgttgggcctacttgtgtaaaccccaagccttagtaacataaa

SEQ ID NO: 90480 - DNA, 293 bp, Glycine max
agctttgcgccgacaagatgatcattttcagagtgaagaatcgaggcgagggaggatgagcttcgcatgctcaatggtgttctattactgataaccataggtctgtcactttcaggggattttcaatcattttcttgatagctttactcgtttttgacatataaacaaacaaccagagctcctggaacttgatttggtccttggaaaattggttgaggacaacattaacactttgaattaatgaaaatcggattaaggctcttatttaggttctccacctgataatttaatta

SEQ ID NO: 90481 - DNA, 205 bp, Glycine max
ctgtttttgccttttaaaagttgacttgaaactttggctcatttggagcaaccatttgagggtgttagtcttaggacaaaagagttttcaaacttgttgaggtcaaattatcttaagacaaatatctcttggtatgatgttgcttgatggtcttaaaatgatttcctttgaattgtaaaccctttggacgaagtagatatgcatt

SEQ ID NO: 90482 - DNA, 296 bp, Glycine max
agcttcatgatgaatcaagattgatttctttatgttccgatgataataaaggtgatgacaaaaagctcaaaggtcaattcatgataatcaaagaatgagttcaagatgtttaagatgttcaagattgaatcaagaacacttcaaggttcaagaggaaatttgatttcaagaatcaagattcaaggttcaagcttccaagaatcaagatcaagattcaagactaaagattcaagattcaagaatcaagagatgacttaatcaagataagtatgaaaaagttttttcaaaaactgagt

SEQ ID NO: 90483 - DNA, 296 bp, Glycine max
tcaagtgtgtggattacataaagctatttattgcctaaagattgtctcctaaagcctgatttaacaaactaaaagcaacttttcttagtttaaagttttcttcaagtaaatgtgatccttctctctttggttttttagaacaagtctgtgtctacattttggccaatgtaaatgatataattgtcatgggtaacaacatcaaattgattcattcacttgtttcacaacttaattttgttttctctctcaaagatcttggtgatttggactattttttaggtattgaataaatcttg

SEQ ID NO: 90484 - DNA, 292 bp, Glycine max
agctttagccataaaaacattttcaaaggtcaaacccacagagaaggcaagacaaacaggctgtgtgatcgtcacaaacataaaggtcacagcttcaaaatctaacataactacatctgttcgtagcacaacaacaaaagtccacaacatcgaaatcagacaaaggtgacacctttttttcgtccaaagcaatataaaaaccaaagccggaaaaaatcaaacaaagaaaggtcttgcatgggcaaagcgccatccgcctcagcaccgccattagcctgtcccaaaaatcacc

SEQ ID NO: 90485 - DNA, 283 bp, Glycine max
tctattggaaatggtcaattttggaaaggttttcttaaatggtttgaaaagggggctggcctacgaatcaactttgctaaaagtcaatttggaactattgggaaatctgaagattggggcatatctgttgctgccttcttaaattgggttatgctcaactttcctttctgctatcttgggattcctattggagttaatccgagaagattggtggtgtgggaacctattatcagaaaatttgaggctagactcaataaatggaaatagagaagcatctctatgg

SEQ ID NO: 90486 - DNA, 293 bp, Glycine max
agcttaaacaatgatctttgttctgtttttgattactccgggaatcattcacacttccagcgcatatagttatccgacgctcgatacccatcagatgttcaataattcagaagcctccgcctaccttgatttatggaactccctctatcatccgcgcactatacaattgcgggaaggctctgctttcacgatcagcagcaaatgagatccgcaacggtataagatgggagtggagcttccatggagaatgaataagattagaatgggaatctgatggaaagagagggctttct

SEQ ID NO: 90487 - DNA, 105 bp, Glycine max
agtcttgtagtgattatattggttctctcgtcatatagtggtacctaggtgcgcgatcgtggcgaatggttgctaagtcagactctctcactatccacataatct

SEQ ID NO: 90488 - DNA, 291 bp, Glycine max
agcttaacacctctcacactttatagatatgtctcctctaaatatattctttcttttcacaacaatgaactaactatatatctagatagagaatgaacctggtgtgctatgttatgaatcacaagaacagatcttgtgtacttcattaaaccatggtcacgataatatgctttcagatacactggcggcaaagcagtatgccaatcatttgcgatcaaggcctgatttccatctccatagcaaactccaccacaaggaacatgccaaggaacctgaaaatcattaacttcg

SEQ ID NO: 90489 - DNA, 279 bp, Glycine max
tggttcgagggacttacccggtggagaacttataacgatgattaacggccaagaacggtcgaaaaccttcgcgaaatttctcacggaaaacgtttcagaaacgtttcggaagcgcctcggcttatatttttttcacggaaacaatttttccaagcaaattcgaaagagagagaagtgccaaaggggccgaacccttttcttcttcacttcctcccctatttatagcaaaatatgggaggtgggtgccgcccagctcgcccaggcgagctcagcttggcc

SEQ ID NO: 90490 - DNA, 291 bp, Glycine max
agctttgcatcaggatcagtttcagcattctgcatgagatggcggcttaaagcccaaccaactatcttctctgcatctgcaatatagcaaaaatgttatatgagatatttaagcagcaaatccttaagcacatactggtagaaaatactagtatgtgctttcgatacaagtcacaagtgtttttgagatcttttctactggaaatatagagtttttttcagtagagaagctcttaaaagagcttctagccttgtatccaaacaggctctaagtgtctaatccttaatgcac

SEQ ID NO: 90491 - DNA, 291 bp, Glycine max
aaacctcactttcagcctgaacaatccccaacttttaatggtaactccacattttatgtggcccttcttagatctttttttaaacttcatcaaaataacgccccaaatacaaccttttttatcgggtgtactcttaattgcgccaacaacaaaaaaactttttaaaaagacaacatttgtattgtgtcatagaaaaggaaatcgatataaccaacacattttttactaaaagcttcaataggctgatgtccagaattcaaataagtaatacttcaaaggataatatatttt

SEQ ID NO: 90492 - DNA, 290 bp, Glycine max
agctttaaccgatcgtttaattcgttatctcgcctaataaatgataaaatgaatttcaaccgaccatttgtgttgtaatgtcgcttaatcactgttaaagcaaaatctaaccgattgttcacactataacctcaattaaataaaaaaaaggcaaaataattattaaataattcaaatatcttgaaaaaaaaataaaatcaaaaattaaaaaaatcaatcggacatttttcttttaaaattttcttgaatgaattgacttataaccaaagtgaaactaaagcttaaatcaa

SEQ ID NO: 90493 - DNA, 249 bp, Glycine max
tctacttttggatttgccttaaaaaaaaatctttggatctatctttcttctgctccctgcctgaaaacatgcatgtatagcctggtaattggtcaatgtctttgctaaagtttatctgggctgttgactcgaagcttttctaatttattcaataagatgcatgaataatttaatcataaatcataaattccatacatgatgtaattattcatgtatcttattgaatatatagatcttatggttatttca

SEQ ID NO: 90494 - DNA, 203 bp, Glycine max
agcttaggtttccttctatgatcttccgaactatgtccctcgccgccaaggatctcttcagaaaaatgttttgtagggactcttctagaaggttctttgcagaacaaaccttgagtactacttgcttcttcttcttgtaaaagttcagttttttttttttgggggggggggggggggtttttatccctacaactcacttctac

SEQ ID NO: 90495 - DNA, 272 bp, Glycine max
tatgctgcaaacgtttattataaacctccatagcagcaaaaccaacaaccaccaaattattattaactttcaagccacaaataccattcaagttggaagaatcattccaatctgaaaaggacaagcccttcacaacaacaataatctatccctcatttgcagaatgtcgctggtccaagcaagccatatgttcctcctccaatgcaactacaacaacaacaaagacaacaagccatatgttcctcctcaaccttccttagaagagtttgtga

SEQ ID NO: 90496 - DNA, 235 bp, Glycine max
agcttcatgatgaatcaagattgattcatagagttatgatgataacaaagatgatgacaaaaaagctcaaaagtcaagaacacttcatgttaacaaagatgatgacttcaagaatcaaagaatgagttcaaaattgaatcaagaccccttcaaggatcaaaaggaaattggattccagaaatcaggtttcaagaatcaagttccagaattcaggaacagaattcagaattcagaa

SEQ ID NO: 90497 - DNA, 283 bp, Glycine max
gaaatcaggggccgccctttttcttagaatccttttacggggggggaggtgggccctgttctcaaaatggtcaaaatccaaatgttccaaactataatgctcaaaatcaggatgatcaaaattatcaaccaccaaatgcttagactcaccaataacagaatgcccaagatgctcaaaaagtacaaaatgatgtcttactaatctatgaaatgtcctatctatctcaagatcaaagggttgtaagtcagatgaattgcctcttgtcatacactatattcaacat

SEQ ID NO: 90498 - DNA, 300 bp, Glycine max
actcagcttcaccttcaatttcgagcggctcgatttatgacgggactttttttaaccatcccaataaaaagttatttggcgtttgaattgggctcaaaagcttaacattcaaatttcgagggtctcgatatattgcgggacttaatcaaacatccgaataaaaagttattgtcggttgaattggctccgaacttcaacaattaattttcagcgtctcgatatatgacgggactcaatcagacatccgagtaaaaagttattggcttttgaattggctcagagcttcaacattcaatttcg

SEQ ID NO: 90499 - DNA, 293 bp, Glycine max
agcttcaagcatttttaaaactttttaactttgaggatcagatcagagtcctagaatgtaacttgaataaaaaagttcattgttaacagttgaaccatttgatgctagagaacttcattatctttgattcactgggttcactggagcagagttggctttaacattttacaaagtcttcaagccattgttgacaatgaaattaatatccagtagacgatcaaatctttcaacatttttatcagtacaaatattggcttcatgtgaatatctttatatatataaagtacatgtgc

SEQ ID NO: 90500 - DNA, 286 bp, Glycine max
aacataattcacaacattttaccaatcattgggtattatcacttgtccctaggatttaatcacaaaaacatattctataccttcacattaaatcacatgttcataacaaaacatctcaagtacaacacaacatctctcacacacaattcaatacccaccatcacatagcaagtcacaatgatcattacacagacgttatgcaacatatatactaagactcaatcctatattgaatgtggtatcttatcaatgaaaaataacgctagggcacctaggattacataat

SEQ ID NO: 90501 - DNA, 294 bp, Glycine max
agctttattcaaacagaattttccattaatgtcaaagaattgggtgtcgaaaaagcataacaagactttctgtgattggtttaaagatacaatctttgcaaatgacaatgcttcagaaacattaaaaaagctagcatatgggcctaaaagaaatgttataacttggcaaggatacgacataaacaagtatttattttacacaaaagcacaagatgacaaaagtacaatgcagaacaacgggatcaccctaagggctgaatctcaacacttcgcaagtgtgaatgacgccaatcc

SEQ ID NO: 90502 - DNA, 288 bp, Glycine max
aaactcacgctttttgcccgaaaacaaaataattaattaccatatattaaaagttgtttttcgtgcgcaccgcgaaaatacgttagggtgttcacacctgtataccagtggaaaattatgtcacaatgccatggtaatctcgggtgattttttggataggaccagcaccctaccaaaacaaaattagaatacaaaccctcttcactaacttggactattggttggtgttgaacaccaacccggggatgaacattctctgccgggctttgccttattaaaagggtggaa

SEQ ID NO: 90503 - DNA, 320 bp, Glycine max
  unsure (1)..(320): unsure at all n locations
tgatcatctaaactgcacgcgtgcgatctcgctatatcggagaacttgaatttttggctncgcagagacagagagggaaatatgtgaacacccatttacctaggggaattttgcgatccgctccgagtcaactaccctaatttggcactaggtttgatcacatgttaattgagcttgattacagaaatgatccaacaattgaatcagctcggctaaaggtctggttttcgatataaccaaccgggccgagcctagtttaataacactgaatgggagggctccttacttagtattgaaaatcttgctttcaatttgatagt

SEQ ID NO: 90504 - DNA, 323 bp, Glycine max
ttttgtccttcacctttaaacactttttaaaatgttctaccgcctttttattggctccttctcgctttttattggggccaaccctggaattcttttttgtaaaaacactgaccttcaaaaggtcttcttctccctttcaaaaggaaatcgaaagaatcgtttttactcggtccaaccgcccttaagatgactctttcatttcgaatcacatatattatctttgcaccaaaagcgatgcaaaactaattttaaccaaccgtttattttctcataagaactaacgcctagtgctaattctcctctatcacacattgagggaatac

SEQ ID NO: 90505 - DNA, 289 bp, Glycine max
agcttctagccaaatggacttaccttgaattaattcctttgatagcccttttgagcgttgtttccctttccttgttttgaagctcactacaagccttaaatgaaaaaccatgatatcaccatatccttaaggaattttgtagctttggaattgttttgggaataagtgtgggggtttttgtttcattggataatatgtttgttggctatgcttcatgatgtatttttgggccatacttgatgtacattgtatattggttaaatgttggacatgctgaatgaaatgctgt

SEQ ID NO: 90506 - DNA, 282 bp, Glycine max
tccggctggtcaattgctctaggttgctgtattgaaaggcaaaagtctgtatgggggtcagcaaaagagcacaaaccacatactcttgcgacaggtacatatttatgattcaaggccaactgggttaccaaattaaccaatgcatctagtttgccttctagcttcttagttttggatgatgcagctgagtttgtagctacctcatgcactcctctaatgactatagcatcatttctggcgctaaacttctgggagttggaagccatcttctcaattaaattt

SEQ ID NO: 90507 - DNA, 291 bp, Glycine max
agcttttatgtgaaaggatgtgactcttcacatttgaatttgaatttcaacgttcaaaggcactggtaatcgattaccaaaacattgtaattgattacagctttttgaaatcaattggaacgttgtaaattcagttgaaaactttttcaaatccattttgctattggtaatcgattacaataatctagtaatcgattaccagagagtaaaaactctttggtaaacatgttttgagaaaaatccatgtgctactcagtttttgaaaaaaccttttcatacttatcttgatta

SEQ ID NO: 90508 - DNA, 285 bp, Glycine max
gcttgatgggaaaaaacggggtatggtcagttttcctacttttgtttggtgaccacagaatggtacctggagatatgttgggggggtcaagaaaccttggggacgtcaggtggggtgctattgcccaaaaccaatcatgaccaatcccgacccaacccgggcatagtcagtcagtgagaacctgtgacgtacctaaacaagcgagctcctggcagtcaaccaataaaagaacaaagtccacaaagcaaggaggcttgtgtggcggctggccagctatgtatcttg

SEQ ID NO: 90509 - DNA, 290 bp, Glycine max
agcttcacatagcacaaggattattctaaatcttacattttaatatataaatgcataccacgccatttatttatttatttttgggtaaagaaatgggagcaaatatccaaggattgtagggaaaatgcattagatacctgaattgggcaaattgaaggtagtgatatggagtttcgagcttccacctcgggataaactgggaagctgcacacatacttcattaactgataagtgacaaacttattgtgaggtacatgggcagaaaacagatatctttaccaagttgtgaa

SEQ ID NO: 90510 - DNA, 277 bp, Glycine max
ttcaaaatgaaagaattctaatcccttttctttaaaatccctgcaattttgaaatttcttatccaaaacaacaagtaaagacaaatggcaaattttaactgttataccggtacaactggcaactggcacctgggaagggaaataactcaagttgaagctaacaagctttaatttgtccagaatttcatgatgaaactcaaatcttttgttaccaaattcagtttatatgctgtagtttgtgtgttgccgggggaggggggattttctactctaattt

SEQ ID NO: 90511 - DNA, 290 bp, Glycine max
agcttgtcaacctgaaatctttttctttattacagaataacctaagattaggagtaccaatgagatatctaaattttttcttaaaatcagttaagtgtaaacaagtgccaaagctagaggtttgttgagtcttttttttatagttttttttactctactctagagtcattctaagtttctctttgagtcctagcttgtttctatgtccttttcattgctttaattgttgagtaatccttgaaaaattgtcttgttaaaactccattggtttagctttcatttcatttttt

SEQ ID NO: 90512 - DNA, 273 bp, Glycine max
tttctggttttctaaacatttttttacttgggctattcatcctcttcattcccttctccctttggccaaaagaattcgcccaggactaaccgcctgaattctttttgtgtctctcttctcccttttccaaaagaacaaaggactaaccgcctgaattcttttgtgtcttccttctcccttgtcaaagaattcaaaacaacacagtctgggaattttttttattcttccctttccctaatacaaaagtgttcaaaggactaaccgcctgagaat

SEQ ID NO: 90513 - DNA, 286 bp, Glycine max
agcttaagagttttattttttttaaaactaaacactaataacttaaacaattataaaaattcccacactctgaactaagtcactaaaaacttaaacaaatattaaaattgcccacacccactcaagggtgtagatgtatcttgttaatgaaaaaataaaagcggaaattttgaatgcttattatgtactatttgattattagtatgagttaaccttgcggatgtattatgggatataaaaatatatatatatatatatgttgcgaatgtgatgtggacgtggaagc

SEQ ID NO: 90514 - DNA, 194 bp, Glycine max
acctgataagaaattcccaccccttcgaaagaattattccatgaatatatttcccacccacaaattgcaacgtcttgcttttggctcagggtaacccttcccaaaacctctcattctgtaacctacaactaattatgagtgcttttttccgaatacataatcattttatgaaagaaaggatagaatctaccaaa

SEQ ID NO: 90515 - DNA, 289 bp, Glycine max
agctttggcctttgggtttttctcacgggagagaaaagaaccaagcatcagcctttgggttttttggccaaaacaaccaaatgaaaaaataaaacacagaaagataggagacaaaagaacccataaatcatttttcagttcaaccaacgggcaaatcaagcaacaaccttttgattttccgaccaaaacaataggacaatgatggattccctcattcccgtccagcatttggagaacaacagcaccaaagcattatcttggattgcagtggaataatagagaatgaaga

SEQ ID NO: 90516 - DNA, 268 bp, Glycine max
acaataaagggggtctttaaaaaaaaacaggtaatatagataaattggcccttggtaaacaatggaacactattcataaagtgtggctggctctatttccaacaatattggttttggttttcatgagtgtccaacagcatcattattgtattactttgcttttaacagaggccagacagctgcttctgcaattaagttgacatttgagaataaaatcatgtaatgtaattcatgcccctctattcatgtgaatacttaaatacacgca

SEQ ID NO: 90517 - DNA, 295 bp, Glycine max
agctttgaacaaaggaaatggcatcatgcaaaaaaatgtgaaacaacaccacaaaatgcctgcattacctttcacttacccttgtctcaattttggtgtggtattgaccatcactcaaaatgactttttattcatcctccaattcgcaggatgacaagatgtgaatgcatgcatgcttatgatttggatgtttaagtgcaacaattaagcaggtgttatcgtgttcaattttactaaaacgcttacggcacccagttgatcgggccaaatggcttcgaattcagtaggcaagatc

SEQ ID NO: 90518 - DNA, 277 bp, Glycine max
atatgccgaacccataaactcttcacccttcctttctaacaactggccaacattgggcaaaacagcactttcccttatcacacctcaaacaaggttttaaaaaaaaccaccaacctttcatttcatgactaaaactaatacacacattcttcaatcattcatcaattaaaacatcttccacgtaaatgaagagataaaacacatacgtacaaaaactaacaaactaataactaacattcactaataaaaaaaaacactgacacacatattttaatct

SEQ ID NO: 90519 - DNA, 293 bp, Glycine max
agcttcttatccaaggcaattcttggtggtgaagctccttcttccttggcttattccctagtggatggtgcctcccctatcctcttctcctttgcctttcgctgcatctccatggtgaaaaatcaccattgaaggacctcattgaagctcaaagatccagcctccatagaagctccacaagcaagcttccatcaagttatgctcgagatcttccgtggttcaatttcgggcgtctccatatgtgatgtgcttgaatcggacctccgtgtgaaaagatatgaccatttgaattt

SEQ ID NO: 90520 - DNA, 244 bp, Glycine max
caaagctagtaacagtgctctgggtcaaacacccacattatctacatgaaagaagctgagagtatttcgggatttacaaaggaacgtaatttggaaattccgaccacgccaatgtgaccggggttcagtgtacgttacgaaaataacatacatttcatgaaaggattatgtttacaaagtctctttctctaaggtttttcaaaggaagcataagacaagcaatggcggttccaaagtcaaaaaa

SEQ ID NO: 90521 - DNA, 292 bp, Glycine max
agctttataggacacaaattttcctatataaaacaattagtatagaataaaggataaacaaaatcttgtaatagtcaaaatcataataataaaagactgcttaataaataataaatttatgaaaaaataaataaataaataaagaattcacccaaaacaacctgcgaatcaaaccaacagaaaaagaaacattttctctttctttcctttcctcttctcccttcacattctttgaagggaactttgcgtgaaaatttatatataatcagcaattacttcattttgacaaact

SEQ ID NO: 90522 - DNA, 270 bp, Glycine max
  unsure (1)..(270): unsure at all n locations
attttcttttcccaaatgaagccattggcggtttattttttaattggggggcattgtgcactttaacaacttttgcacccacattttanatcaactggttcatttctttttttaaaatttcttttcaatttttgtgtattattttttgttggattccaaaactttttggaaatacctaaatgggatagtttttatgttcccccacttttattttacaaggggaatcaatagttttcccacattggtaaaggctttttgtaatttatttca

SEQ ID NO: 90523 - DNA, 283 bp, Glycine max
agctcaggcctatagcacctcatgatttgggaacccaatcgttggactagaaaaaagatgaaaagccataggagacatgccatgctagcccatccatcagactgccccaattctaggaaacccattaccaaaagtttgatggagcacaaataaaccccaacttaagtagctaatgtagcccacatgtgtacttcacttccaaccacatatgaaacacaaagtttattccatgtaaggacctcaccaaagcttcaactcactcaaatcatctctaacaagggtt

SEQ ID NO: 90524 - DNA, 237 bp, Glycine max
aactcaagtaacctcgggggagattgacaccccttatttcccccacctaatcaattctcaaaattggaaccctccgacaaactggacaacatcacttatatattatttgctgaaaatttaattttttgacaaaccgccataatgatatttttctagggtataatataacgcttgtctgttatttaaaactttaccccaaaaaaaataataacgttttatttaactccttggagggaa

SEQ ID NO: 90525 - DNA, 263 bp, Glycine max
  unsure (1)..(263): unsure at all n locations
agcttggtgncttgaggagttatcctctaactcatgtgtttcaccttgcaagttcaaatgtttttaacctaagcacaaagtcacaaacccaattcaatctagccttaaatatattttttatccttaatatatatctgacttttgcatttgatccctaacaaatttttttttacaatggatccctaatatttcaaaagttttgtgcgagatccctattgttaaaagggatttgttaactgctgatgtggccattaactcgacac

SEQ ID NO: 90526 - DNA, 305 bp, Glycine max
tctttaagagacactctttaacactccagcgttacaattcatcatgggttatcaattatcttttattaatgtgtggccatattcccgtattttttctatattttggagaaaaaattccagatttatatacttgacctaacaggttgccttaattctattcaattatcaatgatcctttatattaatgaactttcgaatagattcctttgattgtttattgaaagcatataatcctttggcagataggttccataatttaggtcttgctcactcaaaggtctgggatgccatggggccttcaaaaa

SEQ ID NO: 90527 - DNA, 292 bp, Glycine max
agcttgtctgagcagtttgaattaaactgaagaaaacatgtgggccatcatcgaccaatacaaggaaaagctaaacctagcagcgactcatgaatagaggctagaggacgagtatgccaaggtatcagtcctacaagcggacagggaagcaagggaaagggtgatcgattcattgcacagagaagcaatgatgtggatggacaagttcacctttactttgaatggaagtcaatagcttccctgactgctagccaaggccaaggcaatggaggatgggtactcagctcccaag

SEQ ID NO: 90528 - DNA, 209 bp, Glycine max
  unsure (1)..(209): unsure at all n locations
cttgggggggngaaccggttttcatttaaattgtcaaaggctttgaacagagttaaaaaacccaaaggctttgtagaatttttcgaaaccattgggttgtttcaaaaggcttaaatcctaccaaactgattgaatttcatcttaaaataattggggcacatgggacacttacccttaataagaaggcgtaaaccaccttgaactttatc

SEQ ID NO: 90529 - DNA, 290 bp, Glycine max
agcttcaacctttggtgcccatttctgctccaaatcgtgaaaagagggcattttccgagtcgtgaagcgcgtctctatgtgtgggacttccaaatttcacgtttgggtggacttctttctcctttgattttcgcgggtatggggttttgggagatatgatgggtagccttgctaggtttctgctttatgatgaatatttgtgaagaaacttgttgaaagcatgttgaacttgccatgtttggatgagttaaacatacccattcagttttagggtttttatgatgatgctt

SEQ ID NO: 90530 - DNA, 276 bp, Glycine max
tgcttggggagcctttattggaggctggattttgagcttcaatgaagtcctttaatggggggttttcaccatggagatgcagcggaagacaaagggaaaaaagtgaagccccatccactaaggaataaaccatggaagaaggagcttcaccaccaagataaggcttggataagaagcttggaaggatgcttcaatggaggaaaagaaagaaggagagaaagagagaggggggagcatgaaattgaaggaagaaaaagggagagaagtttaactttg

SEQ ID NO: 90531 - DNA, 288 bp, Glycine max
agcttgttgatactatcgatctggatgcaatggggttttataggctgaccctgatctgtctggccaacttatcttgcactattgaagaaagcgaaatccttatgttcatggagttccccaacagggcccttaactgatacttttaagcaccttgtaacgcattccatatctttgtgtgaattgatccctgatgaacgtcgagcaacgtatgtgatgcctgctgcccatgagtggaggtggcgtccatatgtgatggaaggactgatattgttggaattaaaagtgcac

SEQ ID NO: 90532 - DNA, 269 bp, Glycine max
tttatggtgttggaaaatatatttttactttcttttatcaaaaatggggagcatgggaatggctggcttcctgattttgatgatgttgttataattaactaagcatgattcatttctttccaacattaatacaaaccattgtttaaccaaacaaaccccctgatttcttattgcttcaggaatcaagcgttccctcacactgatgggaacactgtttttaacgcacatgtcaattaataccacctcaatgtagataataccaatggtta

SEQ ID NO: 90533 - DNA, 290 bp, Glycine max
agcttctgttgtcataaagctcattggaattccctgaattaaggagccacacactactatgtttttttttttttttactgggaataataaataagattttgtgctttatcaaaaaaaaaaaatctgtggggctgtaggcaagggtggaatttattcgcccatggttttctttatggtttcattaatatacgatgttgttctttccttacatgaagccaagcgttttttaaggcagttacttgccacatacggcattgattagagagagtatcctacttagttggatttca

SEQ ID NO: 90534 - DNA, 253 bp, Glycine max
agtttctttaataaggtacttaagctataaataaaaggatttggaacacttgggggaactttgatgaatgaaaatcttgtgagacacaactcaaagttaacttctctcccttttttcctccttcaattttgtgctccctcctctctctttctttctctctttcttttcctccatcgaagcatcctctccaagcttcttatccaaggcacattcttggtggcgaaactccttcttccatggcttattccctagt

SEQ ID NO: 90535 - DNA, 289 bp, Glycine max
agcttgcccagagaaagaattcatggaggaaatgcttaccacctcgaaagactggaaagcagtttctaatgactcctctacggcctccacataaggcatagaggatgggcagctcaccaagatgtcttcctcgcctgatacgatgaccagatgcccttccactacgaatttcaacttttggtggagtgtagagggaacaactcccaccgagtggatccacggacgccccaacagacagttgtaggggggttaatatccattatttggaaggtaacttgacaggtgtgag

SEQ ID NO: 90536 - DNA, 274 bp, Glycine max
tttacaaaaaggttcatttttcaagttgaaatatggaagtaaccgtcctgcaaaattggggcaaaagatgaatcgagtcacatcactgcttcgtctactgccaaacatatttaggattgttgatgtccttgttacttccagtttcaccttgacaaagatgtcatggaccatgttgaaaatctaaattgattcaaccccatatcctgcgtaaaaattcgcaatacttcgactgtacatcattcgcatgcatccatgcttttcattggttgcattg

SEQ ID NO: 90537 - DNA, 287 bp, Glycine max
agctttgagccaattctatttacaataactttttactcggatgtctgattgagtcccgtaatatatcgagaccgtcgaaattgaatgttgaagctctgagccaattcaaacgacaataacgttttactcggatgtctgattgagtcccgtaatataccgagacgctcgaaattgaatgtggaatctccgagccatttcaaacgacaataactttttacttggatgtctgattgagtcccgcaatatatcgagaccctcgaaattgaatgttgaaactctgagccaaa

SEQ ID NO: 90538 - DNA, 254 bp, Glycine max
cagcctcacgaaatatttccggaccccattcaacatcccagaaaaaaggtattggccgttggattggctcaaggcttcaactttcaatttccagggtttcgatatattaccggactcaatcagacatccgtgtaaaaacggtattggcggttgaattggctcaaaggttcaacattcaatttcgagcgtctcgatatgttacgagacccaatcagacatccgagtaaaaagctattgtcgtttgaatttggtca

SEQ ID NO: 90539 - DNA, 270 bp, Glycine max
agctcgaaagtggacaatgttttctggccaaaaacacaaatggtcatgaattagtaacacagaaatacctccacaggggcataacaatttcggggaattgtataactcatcatcaatggtattatattctaaaagaaccatcttgtgccaaaatccactttaaacggcacataaagaaagcttgcttcatgttataacttaaaagagagcactatgtcactctaacaacaagcaatggaagattgtaattaccattcacatctattttct

SEQ ID NO: 90540 - DNA, 303 bp, Glycine max
acacttaaatacccaagcttgtaactattactgacgtgaatcggactttaccctacacaaatattaacattttaaatttgaaaaagcctcagttgtcacaaattaaagcgcgtaatggatatttacagcaccggaaattggaaataacaaactgccaagagatgaccactgggaaagaaccctagagaaatggcgcagtaaaagcctgaagaataggcgacctagggatccccaaaaatcctacagttgtgctgaacaacattgacatatgcatttcaaaacaaaatgccctatcacctctaa

SEQ ID NO: 90541 - DNA, 388 bp, Glycine max
  unsure (1)..(388): unsure at all n locations
tatactcattcggattaagccctatgaactntctcatattcagcagcttactggatttagcttgtgtggcttccctttaaatactttggtgcttcccttttatcatctagattaaatgtatgccactatgctcccttgctttacaagattgttggcctgattcagggatggaacaagaagtctttatcttatgtacgtaagctagagttgatcaaagcagttattcaaggaattatgaatttctggatgaggatttttcctttgcctcaatctgttctggaccgaatcaacgcttcgtgctgtaattttctgtggagcaaagcggatattggcaaaaacaagcctttggttgctaggccagtaagttgttctccaaaacaagaagggg

SEQ ID NO: 90542 - DNA, 334 bp, Glycine max
cacagactcgtgacccacattttgccttttgtttcttgcatgccgtgctcccccctcgatgtatctgacccgcgctcttttcgagcattgaagcgtcctctccaagcttcttatccaaggctcatcttggtggtgaagctccttcttccatgacttattccctagcggatggcgcctcctctcacctcttctcctttgtcttccactgcatctacatggtggaaaatcaccattaaaggacctcattgaagctcaaagatccagcctccatagaagtcccacaagcaagcttccatcacctatgatgccacaaccaagaataatctatcttact

SEQ ID NO: 90543 - DNA, 407 bp, Glycine max
aacgacattaatctttaactcggatgtctctattgagcccttatttatcgagacgctctaattgaaaacgcatgctctaagaaaagtcatacgacaataacttatactcggatgtccgattgagccctataatatatcgagacgcccaacatatgaaaacggaagctctaagaaatgtcaaacgacaataacttttgactcggatgttcgatagtgtcccgtaagatatcgagacactcgtcattgaagacggaagctattagaaaaatctaacaacaataacttttaactcggtggtccgatcgagccgcgtaatatatcaagatgctcataatcgagaacggaagctttaataaaagttcaacgacaataactttggacttggatgtccgattgtgtcccgtaag

SEQ ID NO: 90544 - DNA, 345 bp, Glycine max
ctggcctggctggttcttacccacttcttaaaaatatttttggtgctggaaaggcgatctatttaccaatatgaaaccaaaatttaagaaatgagatattttttggggggaaaaaagggaacctaaaaccccaatcttcaatcttttcaccaattcattcttaccaaaaaattggagggtagcagcttggtcttctcttgcttctttgcggcatagcctctccaatccatttccaccaaaaatttgaacataaaaacagtttcctccatgatattgtaaaagcaagaactcatcaagcaccactgaattgtctttcagaaattgtgacccaccattggtcatata

SEQ ID NO: 90545 - DNA, 423 bp, Glycine max
  unsure (1)..(423): unsure at all n locations
gtaattgtttctcttttcccactgtagggatgtagatttctggaacgttcctcacaatcaaatatctgcaccctccaaacaaaacaactcaatatnttttttgactatgaaaataaattgaagtgacgaaagaataaaaagagtattcaaacaggacctggattcatcacatacagtgtagacccgaactgcaggggactcgtccttgtaacgaggcatttgagaactaactgttcagagggaaaagaaaaataaggttcatgggaagagagtaaacgcaatcgtggaaactagggttaggttaggaatttgagaaatcagcacacattatacgatcaatgcatgtgtaaaattgagcaatttgattaaggacgaacgaatcaaggcttggttatgtataaacagcaaaagttacgcggtggg

SEQ ID NO: 90546 - DNA, 390 bp, Glycine max
gatcctcctttaatgtcttaaccttacttatctgccccactctttttaatggacgctctctaccattaaaagctcttatctggacctggttgtgcttgactaccactactaacagcatgataatgattggatgaagcacctccactatccctcaaattataacgaatattattatcataacagtcaccatcattggactctgtgatcacttgtgcgcttaagacaccaaaactatacgctttgctctttatagcttaacccatgaacacacattcttttgctctacttgctcgtataaccctcttaggaactgagaaccttactttggccgcacctcccctcagtctcaaatcagaccaatatggttgcatgttctttaatatctcataa

SEQ ID NO: 90547 - DNA, 428 bp, Glycine max
  unsure (1)..(428): unsure at all n locations
ntgaatcccagtccatactctcttcacaaaatctgatttctgcataaataggtagccttggtcgtgctcgtgtgcttagcgcacttatggaccgcttagcgcacattagtgaattntggtntagcgcgtgccttttcttcttagtggatgaattgaagcggtgcgcttagtgagatgaagcggtgcgcttagtgagataaagtagtgcgcttagcgaacttgtacagctcatcttcttccagagtcttcctcgtgcttagcccatgagtgttgcgcttagcggacgctcgctaagccagcagattggcttagcgagaaggtgaaaaacaacactttccaaagcttgccaaattatcttgaaattgagataaaatgattattaaacacacaaaaatgaaaatactaagtatttattgcagaagcaaatc

SEQ ID NO: 90548 - DNA, 355 bp, Glycine max
tttatttggttctcgaatggctatcaaaagcctatatatatgtgacttgagacacgaatttgctaagagttttcaaaaagaaaaggtcttatccttctaaaaagcaaaatcgctttatcctcttacaaaatccttggcccaaacacttgtgattcaataaggaattatttgagtgctcaaattgttcaatctatctctttctagagagatttcttcttctcttcttctttattctgaaaagggtttaagagaccgagggtctcttgttgtaaaagaattctaaacacaaaggaaggattgtccttgtgtgtttagaacttgtaaaagggaattacaagatagtggaactctcaac

SEQ ID NO: 90549 - DNA, 374 bp, Glycine max
  unsure (1)..(374): unsure at all n locations
atctctaatcacctgcgcatccacttttctaaaatttctaacggtaattctttcaggcttctgggaaacaatntacaggttttcatgtaatccattacgcaactattatttgaaagggcatgacttttcaaattgaatttcagattctttgtgatgggaatcgattacccactcaattttaattttaaacccctttaataagctgatctgccaacttgttttatagtaattgattacattgcctggtaatcgataccaaagcctagatgactttaaatcatttgtttagctcaaggcttgatcttagtctatcttgaacaaggctttgtatgtcaaacatccttgtttataaattgaatcaattcttatccttt

SEQ ID NO: 90550 - DNA, 374 bp, Glycine max
tgctacaaccagatttgttgttaccaaattcgctaaatatatgaacagaatatgattaattaatattataaactcgaaaaaaaaatatgaagaatagacgaattagataacaatgtgcctaaaagtgataactaaggaagttccaacactaatagttccaacacttacaattccaatattttgaataccaatattagcagtatttcaaatcaaaccaaagaactctacaatttttttttattgattgtgattggtttagtttgattttgatcagatctataaatctaaacccgtgacccaacccgtatatgaacagttttaatcggttcgattgaatttgatccaaatacataatgaactaaccccaactggtc

SEQ ID NO: 90551 - DNA, 271 bp, Glycine max
atttattttggagcggtactcttggaatagtatagcgtttggatagaatttggtaatcttacaaagctattgtgatatgctggctaatacacgattgcccttctcatatcaatgtgaatgaataatgagaaagggcttgtgaagcaacaagacaattcgctgtgtggtgaacgagctattaatgataagtgattcgttggggcacgtacacattagcctggctgctattgatttctagcagacgaaagcctgtcttgccactccctgatta

SEQ ID NO: 90552 - DNA, 319 bp, Glycine max
tgttagagaacttgttcatgaattgataatgcctcactctatcctatatgaccttctaaggcaagcgtgtccactcaccttattgaagaagaggcgatttaacttgacgcatagcacttgctccaatgtgccacgatcatgcgccaggaccacttttgagccgatgaagatgatgttggtgactccatcaccatgccacgtttgtatgcatataaactctctgctgcttagcatgatatctcatgtctcacttttacagtcttgtttctttcactgagtctttagtaaacgtcacacggccttgtatgactcatttacc

SEQ ID NO: 90553 - DNA, 305 bp, Glycine max
tacatgggccttcggtaagtatagaccttatctcaacaggaaagcttgatgacgctgggatgacaaacccataccgtgccgacagataatagcctaataaaagaagcatggttgttgcttgaggtaataaggaaaactcttgtaccttatgtaaggaaagatatgcaaaggggaggcaactattactcacgatacaaccaacgaattgtggcgtaagatattgggtcacacaagtgataacaaacacttgaatactgcgaagatcgtcttgcaagtaaactacacaaaatgtctttccaaagatc

SEQ ID NO: 90554 - DNA, 424 bp, Glycine max
  unsure (1)..(424): unsure at all n locations
tgagtgacanaatgttatatgatcagcatgccagatattttatctatttctgttactgatgggtatgcttcacaaaatcaaaatacattaagaacttgtgataataacacattaatccaggtattaccttgcaattcatgcacatcaaacaaccatggcttgaaagtaatatagctgattggtccattatgccatttttcagacccaaatattcgttctcaatcaacctataaagacaaaagtaacattagaggactgatctaatatcaccagacaattaagaaatgactcagtatcatatctatgatcgcaatgaatgataggatgaggatctaattccttttaagctttggtggcatcttaactttcaaactcgattttgagctttggtagcaatctaacatttcaacttcaatggtaacat

SEQ ID NO: 90555 - DNA, 290 bp, Glycine max
cagttcagccacgctgaatcactttgttcagttataaaaaaaggaaattaatgaacaatgttacatcgtattgttgcactacattctagaacatactaaaatgaagactattcattcacttttttttttgtcttgtaacatattagttctggtgatgctcccatgccatcgaccttttaattagtttgttattcacaagaatatgcgatcttaagcttggatttaaaagtttcgaatgcttagttaaatgaaaatggatcttgcaggttgcacaacaaacaccaacaact

SEQ ID NO: 90556 - DNA, 358 bp, Glycine max
tttcttcttatgatattatgccatatgcattatttagataatcattttccatttagaatcccacgcacagtactacgtgggtggtgtgtatcgtatgagaaattactaatggtccaagactatatgattcctattaatttttataggacacctacttgagtgtcattaactttgtctcatacattgaaaaacttaaatgtgtcacatagatattgttgaggaacatgaacaaatgggaagccctgaactacctaatgaatcttcgatcatatggagagtttgtttacctgcattcaaaagaataacctcttctatggccttatcctttagagcttcattgacttaaagctttgatttc

SEQ ID NO: 90557 - DNA, 295 bp, Glycine max
  unsure (1)..(295): unsure at all n locations
aaattggttttttttactntntttaaactttttttgccatggtggggctaataaattgcgaccttccattggaaaggtttaaccttaaattaaaaaattcattccccccaactggtttaaacttaggggctattgtctgtcagggtcacaaatacacgtgacagctagtgacctttaatacacacttaccctttatataccctgaccaagagaccgacttcttgccttatagtcaactttcaactgcaggtttttttaacacttattattcaatataatgatatgctgtactttt

SEQ ID NO: 90558 - DNA, 385 bp, Glycine max
atcggaagatatataacataaagtagactcccactaaactaaggtactatcaggaattacacccatatgagcagtgtgctcatgaaaaactttaagtgtcatacctttagtaagtggatcagctagcatgcaatgagttcctatatgttctatgcaaatctgtattttctgaagtttttatttaacaaccaaatactttatgtcaacaaacttttacttggttgaatccttaataatactgctaagatattgtcccaataaacacccgatgactacttaatgttgacgacaacaggtaaatcagttataataatttagcaatcataaattctagtatgatgtttcatagcaaaatattaaatccaccaacatggttaaatgtgga

SEQ ID NO: 90559 - DNA, 148 bp, Glycine max
cccccttttaaaaggacttttgaaccaaaatgtttctgagtgggagatgaaagttgagccagtctttgcttactacaactacaacgaaaaaaaaaaaaagatcaaattttcctccctggagtttgagggacatgccttattgtggtgg

SEQ ID NO: 90560 - DNA, 439 bp, Glycine max
  unsure (1)..(439): unsure at all n locations
tcctcgggccatttctgcgaagcaacattggaaatgtattntaccagggatgctctcttaaacaaaaatggatacaacctcctccaataaatacaaacatcaatgtaaatttagagcaagcttatgcgcatacttctttacgaacattcacttgcacaagacattctcataactaagaaaaatgcacccatatacaatcaaggcaccttcgttacctagattatttatatgtacttccaaggtgtatttgttacctacatctcatgcacttccttggctaaatttacatacatgtgtactcaaagcatttggggtaccaaaaattgcacatgtgcacattccggtatttctaatacttatgcatatacaaactttgtgatgaatcttggctatctactcaagttttttttttcccaagtgtttttactacctaaagccg

SEQ ID NO: 90561 - DNA, 352 bp, Glycine max
  unsure (1)..(352): unsure at all n locations
ctggtttncttatgggagccttccgtttttgttattaattttcccaattttgatcaaaaagttgacttaccccgactggtctgtcccaaaaggggaaagggtgagaagcaacccttgctggaaaggaatttggcagtggcttattacattcttgggttggggccattcccataaaaaacactttaagggagttaaacttacattccaaaacccaattcaagccctcggaatatggtttttatggcccaaaactatcatgagttaactggtcccaccataactgaatcattagtgtattggtaaattgagtattgggactcttctccaactttcataccttttgatagtcttt

SEQ ID NO: 90562 - DNA, 442 bp, Glycine max
  unsure (1)..(442): unsure at all n locations
gagcacgctcgataagcccaactttaagaaatntattaacaaagacataatggcgcttagcgtgacatgcacgcttagcgcccaacaaaaacacaaaaatcctaagtgtctgatacacagtactcgcttagtgcacatccgcgcttagcgagttcaacagataactcaataaagaagatgaacacgcttagcgcgacagctgcgcttagcgcgttcatctggaaatccagaatcttcaacagaaacgatgaactcgcttagtgtagcaaggcgcttagcgcgttcatcgtgatttccagaaaactaagggcttctcaccccttctcataggcctttattgggccatcaaaccctaatcaaaacaagcatattgtgactacagtacaaccctaaagctattctaactaacaactaacctaacactaagcataaacagaaattc

SEQ ID NO: 90563 - DNA, 304 bp, Glycine max
gcgaaacaagatcaatggctgggattctcgtcctgggatgatataaattaaggattaggcaggggttgtaccatcgtgatcaaaaagattatatgctgattgttaacagtcatggttgatcaaaaagaacatcacgctagtgatattgaaaggcagctaaatctcatttggagataagcggaagaatgatgaacgaatattgcttcgtgttcaatgatgataccatgtataaaactcttaccgaacttggaggaatatctcagtttatgattcgatcctctcttacttcaaactgagtgtttca

SEQ ID NO: 90564 - DNA, 418 bp, Glycine max
  unsure (1)..(418): unsure at all n locations
gcgattaccagattagattatcagaaagtattctcttcagtcacatcntttatttggttcttgaatggctatctaaggcctatcttatgtgacttgagacaccaattagctaagacgttttcaatatgaaaatgtcttatcctcttaaaaagcaaaatcgatttatcctcttacaaattccttggccaaaacacttgtgattcaataaggaattatttgagtgctcaaattgttcaatctatctctttcaagagagattacttcttctcttcttctttattctgaaaagggtttaatagaccgagggtctcttgtgtaaaacaattcaaacacaaaggaaggattgtcctcgtgtgtttagaacttgtaaaggaatttacaagatagtggaactctcaagccggttgcttggagactc

SEQ ID NO: 90565 - DNA, 261 bp, Glycine max
tgcaccctgcaccttggaacctgtcaaagccttatatctacaccccgaaaaaaaaagatgagataagtgcccaaaagaggaagcttctgatagggagcctacaaaaattttcatgcaggtggaccttcttctagtagctctaacttgcagcagcctcctatccctctttcattcccacctagagcaattccaagcaaaaaaatggaagatgtggaaaaggagatcttggagaccttcatgaaagtagaggtgaacatacct

SEQ ID NO: 90566 - DNA, 261 bp, Glycine max
  unsure (1)..(261): unsure at all n locations
cttttctttttcattttctttctaaagcaattccacatgtcatnttttaattggagcaaaaagggcccacctttacctttgacttgaccatatactcagccataaaagaagaaaaaaaattggacctttctggatgctgaaatcctaccttggtttgcgtgctgcctctctggttccaggtcttcacatttctctgcactcgtcacggcccgttttcaaggtaggcaatatatatcaaaacactcagaatgagaccctgag

SEQ ID NO: 90567 - DNA, 312 bp, Glycine max
actccttctctccatctaactcattcaccgaataaagagcgattgggagcatcacttgacccacaggtatgtcacgactagctgggtaactagaaacaaatccatagatatgctctcccatttccattccggaatttccaatggcttcaattctcctgatggtcgttggtgctcaaccttagccttttgacatgtcaaacatcttgctacatattcagctacatctttcttcatgccatgccaccaaaaacttctcttcaaatcttggtacatcttagtcattcccggatggaaactaaaacgacttttatg

SEQ ID NO: 90568 - DNA, 361 bp, Glycine max
  unsure (1)..(361): unsure at all n locations
ccgcttagatngatgttatggactggtgtgaggtgagagtntgtttcaaatttacctcattctcaatttcacttttcaacctagaaaacccattgaatggagggatgttggacacctagattctgtgtngcttgtgtttgaagcttggttntgggttagacatgattgatacatgatttgggacttgtatgaattgatctgggcaaaattggattgaaaggaaagtgtgattttcaaaatctgcacttatgcaaaatnttgctgtcaaaataagtgcaacaaaaatttggctttgtgcagaaaaacgcttgtgtgtggttggcttgtgaaagagtattgcataatgaattctggatgtttg

SEQ ID NO: 90569 - DNA, 366 bp, Glycine max
  unsure (1)..(366): unsure at all n locations
agctngtatcaggtaatgctcgggnngaaaatttttatacctgntntctcatcgagtatggtcatgtctaggaatatttcttattccttacaatatatggctgcaatttaaacgtgaaagcctagatgagaagggattcattgtatttggtagcattattctaattggctaagactactgggtgttttntatttatttattaaagcatagttttatttagttttctattagaactttattcaggagttaaattaatattgtgtggacttacattgcgtggacagtggactttcaccatatcacgtgtttgcacaattgccctaacttgatatatatactatttatttaatatcaaatttcaagagt

SEQ ID NO: 90570 - DNA, 424 bp, Glycine max
  unsure (1)..(424): unsure at all n locations
tagctntcactgcaacaaacccatttcacatgcatacatataaatattntagcagacccttgaaggaggaacaaagggcattgtgtgatacaaagaatgagtccttttagcataaagtgaatgtaagggaaagggactgaatgcactccttcaaggaggaacaaagggcacgtangtggttttacttacttttcttcgtaggaagagttttttttggtgttgtcccttgtgttgcaacttttgttaggtgagctgttgcaacttttggtgtcaatcatcagatttttatatatattaaatatcaatccatattttcttgcagattctcagaggaagaaatcacttcctcgcattctagagttagagttatacaccacattaataagataatgatattaaatataatggttgaattattttgaaa

SEQ ID NO: 90571 - DNA, 378 bp, Glycine max
  unsure (1)..(378): unsure at all n locations
acctctatatcacctgcggcatgctgcttctagggaatttattgtccgatnnttttgtcttacatggtctcaaaagaagagttaattgcttgctcaaggtccaaaagacacttgtctcaacgtatatgcgatacagagacaccccttgtctcttttcttacccagggcccataattacttttctctcaaccgcacccacgatcactgggtggcggataaatatccccagtgtacgccaaaaaagaggctacaggaagggtgatcgacccttatcacccagaggccaccctatggatggaccgatttgctcttacccttgaacggagtcaagaactttcccgaccgtctgggaacctgtattgtccttcaatcttgact

SEQ ID NO: 90572 - DNA, 428 bp, Glycine max
tgcacaacatgattctaaatttgtgtatgcacaacatgttgtagctcactaattcaccaactaaatccactactatatacagtgactactctacaacggaatgatggaccttgattaggcccatttaatctatctaaattaacttattacacaaggcaaagcctaaattcgcggctcaattattcaaacgcacatgttctgactgtcacactcaatatacccctccaaatggaagaataggcccaagcgtatttctgacaaaattgaagctctgtttcttatctttccagggacaactaacctactccatttggagttctgcagtgagctataggacctgtaaatgctaatatgtcacgttagcataaaatacaacatataagctacagtttcaattaagctcgaacatttgtcttaaaccaaaatta

SEQ ID NO: 90573 - DNA, 298 bp, Glycine max
tgatattacatgaagcttgctttaatttaatcttgtattgtttaatttctctatttgtagatatcattgatgtcacttgtgaaaatatgatctgatgacatgacagaattattatcactttgccctcgtttaagaaattttagattaatgaagattcaatttatgttcttaatgtaaggtgtgaattaatctttgttccttgcaatgtttcaagtcttcctttattcatcatcccttccatttggtggtttttcaggatatactgtaatgccgggtctgagaattcatggatatgcct

SEQ ID NO: 90574 - DNA, 384 bp, Glycine max
ggacctataaaactcagctgtcacctgctctaccttggaaactcttgttgtgaagattcggagcataatgcgaagactcgaatatggcacagtgcatcttactgtgttactgagtgatggtggagatcactccacacttgatcatacgcatgcgattacttgtagttggagatgtacttccttcttgagtatacagttaactctttctaaataaatattattgtacagatactgctcaaatgaattaccgagctaggtgtaaggatactccgtgtccatatactacctatggcccgcatgttacggatggcacaagcgcggggttcgaggaaccctaaacaacgatcttgcacgacttcgtgagatatgtgttgattctatgat

SEQ ID NO: 90575 - DNA, 356 bp, Glycine max
  unsure (1)..(356): unsure at all n locations
agcttaacttccctatnaactttttcctttctcttacctgggattacatggaccctcctattgtgccttgcaatattattatcctgtaaacaaacaatagccttattacatatatacctacccaattgaaatcattgggggctagggaccaagccaatcgttttattagtcatctatgtaaaggttaaactaattacttcatccatataaataacactcatttaggaattagtttctgtaccaaaaaaacaaaactttagttcatataagagcacatagggattaaaatctaaattttttagacacttaaaaaacataataacaatttaacaccaagaacccattgtgtattaata

SEQ ID NO: 90576 - DNA, 409 bp, Glycine max
  unsure (1)..(409): unsure at all n locations
ttgatgtttctcttcttcgatgaaatcaatttgagtttctatgctatatatatatantttttaaaaaaacacattctttttaactttggaaataaaatgcgttattttttttatttatagttattttttaagaccatatttgtattaactaatttaactagaaccgagtatgaggaacgagacgcacactgatccttcaatatcagttaatgtcagtcaacaatatatttcagattaaaatgcagctaggagaaagtcaaatatgacgcaaccacatagcacagatcacaacgaaagaacttggattcctcctccaaacggcttcctaaaacgcaacttagatgctgctattctcaaagagataaacacatttggaggtggtctttgtatcagaggagaacatggaagc

SEQ ID NO: 90577 - DNA, 282 bp, Glycine max
  unsure (1)..(282): unsure at all n locations
aattccgctagtcgcaccattgtttagaacccaattcttgaaatgaggaaaaaaaataataattttatttgaatagtgagaaaaagaactagaaacatattgtagattaaaacttctccctccacaggggtgtttcttctttcacacttcttcacaaaggatttctccttttacanagagctaatgcccgatctacagaagataaggggctcctctctcctaaccttctttccttgggaatatctaataaacccctctaactaactaactaactaatcaata

SEQ ID NO: 90578 - DNA, 332 bp, Glycine max
tctagactcctagaatgcgtagaacatactgcagaattaatcgccaccctaggatacgggcaatctccaccattcatgcggaggaggatcagtataaataagggtaggagccttcactcctactaaacccaagtagagagctctctctgagacagaagaaattagctcgggaaggcgttatcatcgagcgagaacgagccaccgcacaatgaggcaatccaagtagagagcctctctgacacagaagataaacggcgggacaaggcactatcctcaagcttgagtgagccaccatatggggactcagtccaaatagagagccgctctgagag

SEQ ID NO: 90579 - DNA, 215 bp, Glycine max
ttgaaatttaaatggcaccaatgggatctatccaaatatacctctcttgctttctgaataaaaaaaagaaaaattgtgggcaaatttgggatgtcaagatgaggatttggagacgattgaaaaatatttgttaatgagaacctaaaactctaaaacaaaactttgggttgcatgtgaagtgtttatggtttggtgctatatgaatccaagtggag

SEQ ID NO: 90580 - DNA, 447 bp, Glycine max
  unsure (1)..(447): unsure at all n locations
gcttcctcaaaacccttaatctctctatgtcatacattcatatgttnttgtctggtaatcctatgagcaaatcgaggcttcagttgcttgatgtttcttccatgctcattgcttcgtaagcatttgcttttaacttttacaatggtttcctctccttaatctattgaagcatcacagattcacagctgcgttcttttctaatatgtaggaagtatgaggaagttaatccacccggtgttgacaaattctatagcatcactaataacacttatgaaaaggcagaggtaagtaaatatgttgttcgtttattcttctttttttgcttcgttattttccacttacttgggtttccgtggttattggtgataacattggttgtagagatggaagctaaaatacttgcgtcccttaaatttgaaattggaaatcctactgcaatcacttttc

SEQ ID NO: 90581 - DNA, 298 bp, Glycine max
tctgctcctcaaaaggaaaaagaaacgtattggggcagttccaagtccccttgtccgacagggaaaaatatgttgatgtctaaactggtaagggaaaaaaatggttttatatagaaacgcttgatcataaattataaaccaatctttcatttattggttttcacaccttcaaaaaagtctttgttgtatccacatctttaatacattttgtaaagattacattgtataaattcccgatggagggagatcttcagtccttcttctcttctttgtaggtccttctgccatccattgcaat

SEQ ID NO: 90582 - DNA, 432 bp, Glycine max
  unsure (1)..(432): unsure at all n locations
ccctgacgaggatgtcccatatgttcttaagactggactgattcatttgcttccaaagtttcattgtcttgcaggtgaagacccgcacaaacattngaaagaatttcacattgtctgctccaccatgaaacccccagatgtccaagaggatcacatatttctgaatgcttttcctcattcattagagggagtggcaaaggactggctgtattaccttgctccaagatccatcacgagctgggatgaccttaagagagtattcttagaaaaaattttccctgcttccaggaccacagccatcaggaaggatatctcaggtattagacaactcagtggagagagcctgtatgagtactgggagagatataagaaactatgtgccagtttcccccaccatcagatttcataacagcttcttctccaatattttta

SEQ ID NO: 90583 - DNA, 401 bp, Glycine max
ggtaatagagcacaagagcttaagtttttctcctttacctccattatttttgcttaccttctcttcattgtgtatctcattatatcccatgttctcctacatgtctgtgataaatgtttgatcatgattcttagagtttccacctataaacttgcttaaagcttgattcgatttctatggtcaaatatcttgtccttgtagtgaaccatgaattgtgttgtgttatgccctttgagtttgtcttgttatttttgtgactgataccttaaccatataactcttacaaaaatattaaagtataagaaaacctcttaaatctagagtgactcgtcacctaattgtagtttgcatataagtcatgtatagtcatgatacttgttacaatagatttcttatgttgt

SEQ ID NO: 90584 - DNA, 213 bp, Glycine max
ccaatgattataagagggtacttctatctcacaaggtaaatcatactttaattgagcttcaaactatctgacatgttggaaaatcaagatttcagtccaaaatgtcaaaaaacagtttgggattacctgcagcgttcaacatctgtcaatgatggaagggaaaaaggtcttttggaacctggtcacctctatttcaatgacactctcactgtc

SEQ ID NO: 90585 - DNA, 324 bp, Glycine max
atggattatggtgtactctgtatatgtggtaccatgttgttatcgggcgagggcgcatatcactgagacacttccacaagttttacttgaacccaccatgcccagtagcccaccggtgggtgagcttacgagatcctacgtaaaccatattcctagctcgtctgagacgcgggtgctcatgtgccgactcaagcatgcacaatgtccacgcaagccgaatccatttatacatgaactaccctagaccaagaaaacagggcttaggcagaaaaatctgctcataacacagttctcacgttacagctttccttactcatatatacc

SEQ ID NO: 90586 - DNA, 246 bp, Glycine max
tgccactattatggtaagtgtagccagttttgttccctctacactagggaccttgtcacaatgctaccaacacacttgcactgtataacagcagctagttaagaaggaaatagccatggcaaactagacatggatttgggaataaactgtagaaaaactcaagctgtccaactgagctgaaagccttagctattccaaggagaaaaaactcaggaacaagccataaaactgacatatgaattacag

SEQ ID NO: 90587 - DNA, 421 bp, Glycine max
  unsure (1)..(421): unsure at all n locations
tganaatggctttatatgatacatgtcatgggttgggtttgttgcaaggataaaagggatgcctcacatatttttcatgacacagatgcataatgagatttgaaatttatgcaaactggtcatgcatgcacctatgtggacgcttcagtgtcaatctttatggtcatgtgatgctagggctcaagattcatttcctttatttaaatcaacccaattgtttccaaaatatgttcttttatcaacttgtgcattcatccaagttcatttctggcgtccggtgaaatattcacagcattcacccttcatgtgtagacacgtttctttctttgtcaaaaatcaggtatgatcaatgaatttttttttcaaagaaagtaggaaatcatctcttttcaaaagcatgtggggtcttaactagacaact

SEQ ID NO: 90588 - DNA, 286 bp, Glycine max
attatataacataatattaaggctataatattttccataccttaatatgaccgttagtcttaatttaattattgtaaactcggctattaattattatgtaaatttaaattgatgatttgtatttcaatatgtcataccttgacattacttaaatcattcaaaattgtggaaaatgatgataatactcttgatcaatcaatgtagtgtattcttaaagctaaaaaatcaccaaaaaaaaaaaaattctacgacggctattaatataactgtcttagaattttgtaca

SEQ ID NO: 90589 - DNA, 241 bp, Glycine max
ctttcatacacactctattgtttcaaatagatccttgtattctttcttctcaaattgatactagttcaactaaagaagacacgatcgctattatgactagaaacattaacgttgtatatggtctgaaacacaaatatgaatccactttatactattacataagaaagttcttattggagatgaccattgtacctcacatataagttttatgatagggagtgttcttgcattttccaggcac

SEQ ID NO: 90590 - DNA, 364 bp, Glycine max
  unsure (1)..(364): unsure at all n locations
agctagctctaaatatatattgatgttngnnttttgggaggagggtatatgccatctttgctttaagagtaatgtcccacttaaactaactttccaaatgtttgccttctcaagaatggcaccgaggaagcttgcctcaaagatgtccaggaaagacaaggcggccgaatgaactaattccgccccggagtacgacagtcaccgctttatgagcgttgtacaccagcagcgtttcgaagccatcaagggatggtcgtttcttcgggagcgacgcgttcatcttatggacgacgagtatactgatttccatgaagaaataaggcgccggctgtgggcaccactggttacttccatggcccaattt

SEQ ID NO: 90591 - DNA, 401 bp, Glycine max
  unsure (1)..(401): unsure at all n locations
gaatactacgctagcccaatgctatgttntctattcaaacttancttctgtttacctgataatgcacagatttcatcattaaatctaatggaaatgttctagagacaacgttaaccataaaacatgatttatttacaaaatttactctcaaataaccatatattggggaactatacatgctttggaaaatgatttctatacaaaagttagtcctataaagagactaacagacggtcagctccctttaccgacatcagagattcaatttatgaggcacgccgttgggacattctttgggtggctgacacatcgtgtgaaacctatagctaatgaggtatagtgttgttcctctcaatattaattgcaacaacatttttcttgaaagcttcacaattgaaatt

SEQ ID NO: 90592 - DNA, 320 bp, Glycine max
  unsure (1)..(320): unsure at all n locations
aactaggggcggttttgagtacgaaagggagcggtttaggagcgctgtacaccatcaacgcttngaggccattaagggattgtcgtttttttggagcgacgcgtcnanttaaggacgacgagtatactggattncaggaggaaatagggcgccggcggtggacattactagttactcccatggccaagttcgatccagaaatagtccttgatttttatgccaatgcttggccaacagaggagggcgtgcgtgacatgagatcctgggtaaggggtcagtggatctcgtttgatgccgacgctatcggccagcttctggga

SEQ ID NO: 90593 - DNA, 297 bp, Glycine max
agtacatgatccaacattaagaatcaataaacagaagtttcaattcaatgaattagcagccgatgtgagggcattggaaatcaaatcttcccttatgtgcgcaataaagccttcgaaggctatcaactacatagtaacacattctggtaattgctgagatagaatcttcaatggagcaggatagaaataagttggtgcaagcactataaagcctccaaaaagccaaagaagaaatcatgtgtatgcagggtcctatccagaaaactgaaaagattgagtatgagttaatgaagaaag

SEQ ID NO: 90594 - DNA, 282 bp, Glycine max
  unsure (1)..(282): unsure at all n locations
agcttttctcttatatttgccttcgatgcngtattctgtctgcacatacaaaatgcctttggatgataatgtttgtaggtccaacaccggcttgatagaatacacacccacacctatagcaactacaccccccgctgtaagctggggaatctttttacgtaccacatatgtcactcacttgaactctgtcgatacgcgttcaattgcaatatcagcaccgaaagctgaggacgaccctctctatccttatctgactaacagaaagtctcctcaccatattgc

SEQ ID NO: 90595 - DNA, 429 bp, Glycine max
  unsure (1)..(429): unsure at all n locations
atgagaaatctaacanacattgtgttgttatgtttttcattnttaattgttatgttagttttagggggacatgtatttaggtaaaatgtgtaataacaactatttgttatacgaagtggctgatattgtaattgttgctttgcttttgtaatatcagcttttgtaatagcagcttttgtagtatgaagtggctgatattggtagggctgatattgtaattgttgttatgctgaagaatttgtagtacgaagtaatttgttgctactgtcaattacccatttcaattaaatataatttgttggtgaaatttgttgctgaaatttgcagtttattaaatataatctgttgttgtataactctttgaagatattgaagtagcactaaactacgtggtactactccaacttcnaattcaacacagtgtataat

SEQ ID NO: 90596 - DNA, 350 bp, Glycine max
  unsure (1)..(350): unsure at all n locations
ctatggtgggccgtattttaatttcttggtccttggtttacctcattggtcatgaatggatggaaattttttaacccaatatttggagtgaagcaaaaccttgccttttaattattccttaacatggtcatgaattatncttaaaggctttgatctaaaccttttcttgaactttacgttttcctatgattggggctattctaaattggagtttggtgattgaactgctggctgaaattttgatcctaagagaattttcaactcctaaaactatggtaaacaagcctagtgtgttaacatacataggaaagttgaagtaagcctaaggaatcaacatccatgcttaaatt

SEQ ID NO: 90597 - DNA, 439 bp, Glycine max
  unsure (1)..(439): unsure at all n locations
agctttaagggcgatgaccttaaattatcttaaggtgtggatatggngccccctgagagcgaggatgcgtagtcctctaaaagcgagggcgtgtagccctctgaagttcaggacgtgtcgcctttttaaggcgagggagtgtagtcctatgatggcaaggacgtgcaatcctctaaaggtgagggcatgtccccctttgaaaatggggaacatgtagtcctctgatggcgaggacgtgtagtcctctaaaggtgaggacgtgtagtcctacaaaggtgaaggcacatgaccctttgacggcgaggacgtgtagtcctctgaagtngaaggtacatgaccctttgaaggcgaggacgtgtagtcctctgaaggtgaaggtaactagtacccaaggtgagggcgtgtagccctctcaaggcgaggacgtatagtcctctgg

SEQ ID NO: 90598 - DNA, 434 bp, Glycine max
  unsure (1)..(434): unsure at all n locations
acccaaacatgaaagcantgatcgaattactaattgtttgacacacattacttgtttagcgcacagtcgtgcttacgaggtcatatcattaaatcattcatcataaaagatgaactcccttaacgggacagggccggcttatcgaggtcatctatatatccagatattcctcggaaagtgatgaactcacttancgcattcatcgccatatccaaaaaaattggtgtcggatcaagtggccttggaataattaagaaggggggggggttgaatcaattattaatgaacctttactagttaactatctatccttcttaatgttactagaactaatgacgcttttactataatgttaagacagtaatgaccagacctaaaaacttaaccactagtaaaagtgataattaaagggcacaggcgaaattaaagagtgt

SEQ ID NO: 90599 - DNA, 447 bp, Glycine max
  unsure (1)..(447): unsure at all n locations
ntgcttccacaatcaataacaatatgattggtaaattactttcctcatatacatacatatatagctcatgcctgagattcacactccccaggtcttcatacaacacaagtctaataaaaacaataatgtcatttatcaataacagacgtatcacattccattattcaaagaacattagttttccttgaaaaccacatgcaatagggacatgcatacatccctatattcaggttccctgaccccaactatggtattaaaaaccctaaattataataaactcccctcacctatcgtgagttctccgtcaattcctctctgcgatgcttatagccctctctcgttcatgtttgtcaatccaaatgcaaggttctatataccaaattgaaggaaatttagtatagatttcaaaaacaagattaataactacattcaggttccattacccct

SEQ ID NO: 90600 - DNA, 360 bp, Glycine max
  unsure (1)..(360): unsure at all n locations
ctgctctactttatatatgatggtttttcagatgtccctatgccagtntggatctccagaaatactttgcgctatttggtgttgataccccaagaggaaagttggttggttttgcttgaggtagagttttgaatgtgaagacccaaagttatgagggcagatgggtgtacattcaaggtctgaaaaaagctgggggttaatgggattggtgaatttttgtanaagatnnnaccttattatgtattattcatatcccaccgcccctcaggcctttttgagcagatgatgttagcaaagatgcatgagctcatgaggatacatgaagaagactatgctatgcttaaggagtgctttgtgtta

SEQ ID NO: 90601 - DNA, 434 bp, Glycine max
  unsure (1)..(434): unsure at all n locations
agaaactcaacttcttattggatattttactccaaagntgatgcatctacaagtgagagtaagttgcagaaagtaaagaaaagttgtacaagctatttaagcattattctttcaaggagcaaaatactacgaccacccaaggcacacctatntccaacattgtgaatgaacccaagtcttctttctctcaactgttgtttaatgtaagttttttttatgtctattcaattaacaattaatttttttactgaattttattatcattattggtttaatgatttcattttgtttggttaggaactaaaaatgcacaatcagtagcttgtttgtaagattgggaagtctcaactagaagtttatttggaggaatcaaatttggatttcagttaccatgaaaacttggatgtattacattggtggaaggataataacaa

SEQ ID NO: 90602 - DNA, 265 bp, Glycine max
  unsure (1)..(265): unsure at all n locations
tgaatgttttcttcaaacttaatggttgcatcaggccacaattctctggtgcttgaatcttccccaaactctctccaggtattaacattcccattctaaaactttgtagaaaaattggtgcggtggcttacaagcctgaagtgcctgaagggagttgatttttctctattttttatgcccccccgccaaaaaaangctggngggaagtatacttgtagtggacctcttcctagttggagagtggcaccacgaatcctattacact

SEQ ID NO: 90603 - DNA, 337 bp, Glycine max
atttaatgctgctaatgctggctaatttatcatgcttcagatcctacaatcttctttgtcatacagtcctttgtcacgttaccctaaactatgcatgctatcttttaatcttattagaagtaccctctatcaagcacctaacccctaaaagaatgtaaagatgaataatgcatatgaagttaatataaaagactatcggatagaaaacacatgttgcattaataaatagtgagaagtacattatacatcggcttggctttttaggcctgtcaaaccctaactagggggttagcctctcatggtcattgaaggccttccactggaatgagggtataag

SEQ ID NO: 90604 - DNA, 437 bp, Glycine max
  unsure (1)..(437): unsure at all n locations
gacactatgaaactcagcttgagccattcatacaaatacttttactcggatgtttgatatagtcccgtgatataacgagacgctcgatattgaatgttgaagctctgagctaattcaaacgacaataactgtttactcggatgtctgattgagtcctgtcatatatcgagacgctcgaaattgaatgttgaagctctgagccaattcaaacgacaataactttttacacggatgtctgattgagtcccgtcatatatcgagacgcttgaaattgaatgttgaatatctgagccaatccaaacgacaataactntttactcggatgtctgattgagtcccgtaatatatcgagacgctcaaaattgaatgttgaagctctgaggaaattcaaacgacaataactttttactcggatgtctgattgagtcctgtcatat

SEQ ID NO: 90605 - DNA, 364 bp, Glycine max
  unsure (1)..(364): unsure at all n locations
nagcttgaatggaagctctggtctcttgnatttctgcatgttttgcatagtcatttgcctcacaagttcttcgagggaaggttgtggaggggcctcaactgttggttgtttctggggttgttgttgttgttggattggtggaggaatgtatggtctgcttgtgccatcatcattttggaaggaaggagcaagctgctgttgttgttgctgagggctggaccatctaaaattagggtgattcctccatccagggttgtatctgttgctggagaggtcataattattctgctatggttgattttgctattgagattgaggaggtctattgtaaatattcgcatcataagcttcaggctgctcaatt

SEQ ID NO: 90606 - DNA, 428 bp, Glycine max
gccttgagaagattcctaaagaagctagagcttagctattcgcgcctctctaatagctaagctcacctgcttgagatgagaagctagaacttagctacacacccactataatagctaagctcacccctatgacaaaatacatgataatacaaaaaaaaagttcctactacaaagactactcaaaatgcctcgaaatacaagggtaaaaccctatactactagaatagccaaaatacaaggcctaaatgaaggaaaaaacctattctaatatttaaaaagataagcgggctcatacttagcccatgggctaaaaatataccctaaggctcatgagaaccctatggccttcccttagatctctggcccaatctacttggagtcttctatccaatgcccttgcggggtaggattgcatcacttggcatatg

SEQ ID NO: 90607 - DNA, 345 bp, Glycine max
agcttgcctcaaagatgtccaggaaggatatttggccgaaggaactagatccgttcctgagtatgacagacaccgctttatgagcgctgtacaccagcagcgcttcgaagccatcaagggatggtcatttctccgggagcgacgcgtctagctcaaggacgatgagtataccgatttccaggaagaaatatgtcgtcggcgatgggcatcactggttacccccatggccaagttcgatccacaaatagtccttgaattttatgccaatgcttggccaacaaaggagggcgtgcgtgacatgaagtcctgtgtgaggggtcagtggatcccgtttgatgcatatgc

SEQ ID NO: 90608 - DNA, 429 bp, Glycine max
  unsure (1)..(429): unsure at all n locations
atctcagctcatacttgtaatacctctagttcaacacccgtgcaacctaaggcacttacccagagggaagctccccaagttccaactccgaacacgactcgaccggccggtaattccaacacgacaaggaacttccctccgaggccatttccggaattcaccccactcccaatgacgtacgaagatcttctgccatccctcatcgccaatcatttggccgtggtaactcccggaagggtcctcgaaccccctttcccgaagtggtatgaccctaacgcaacttgcaagtaccatgggggtgtcccggggcattccgtcgaaaaatgcttggcccttaaatacaaggtccaacatttaatggatgctggatggctgactntccaagaggatcggcccaatgtgagaaccaacccgctcgcctatcatgga

SEQ ID NO: 90609 - DNA, 281 bp, Glycine max
  unsure (1)..(281): unsure at all n locations
gttgacaagcacttcctatctttttgagccccacagattggtgatgttctcatatttgtaaaccatacctcgagcagtggttttccttattcttccttattcaccatcaccaatcctgaatcactataaccaaacacttctccttctatattcttcttactgcaaggatataaaatgccaaaatccaaggggccnnncncatacntnntaatttttttttttgctcacaatgaggccgccttggtttctcataacctgttgataatctacacaattgttat

SEQ ID NO: 90610 - DNA, 284 bp, Glycine max
atacataaactatgtattggcttatgagctataaagaatggactctgtacggataccaatattgattaatattgctaaaattcagaaacgtagatattatttacatacacaaattagagagactccaatgaaatgttacatgagtaacatatacctaaaattttagattgacgatatattgtttaaaaattaatatttgatatttcttaagtgtatgagttgcttaagagaataattaagtgtggagtagcgaaatataattttaaataaaaattcataaaaaa

SEQ ID NO: 90611 - DNA, 303 bp, Glycine max
  unsure (1)..(303): unsure at all n locations
cccgggggatgatgctgtncataagtttttttaatggttttcggagtttttgttttgcctaagcacctctaagtcttgttagaattccaaagaaaatctactgaagtatcctatgcgattaataacttggatgaaactgacgttttgtattaacgcgattcttagaggattctccctactgccaatatattgttcattgtacatttttgataacctctccttacactacatcaaataacaaataggcatcaatatgcttagtataatttctattattttgaaaaacataaaacttactattaa

SEQ ID NO: 90612 - DNA, 235 bp, Glycine max
ttttagaaaatgtcctcaaaaccccaattgtttggagatgtaccttttccattgcttattttcgttggtctacattgttatgtgtgtacaacgagagctcctttgaggcactttacaagagagacactacaaatcctgactgatttatgcctcattttaagatctcatacctgcttgactgcatgctgctaatcacactattaacgactgaatgtctacatacatcagagcatag

SEQ ID NO: 90613 - DNA, 416 bp, Glycine max
aactgtcttgaaatctttttatgctggtatccaacctttcctaaatagtttgattgaacacctgtaccacaagacaggatctgcggattcaacctaaatgaccatattgcgttcacttcttcttcattgtccggatcgacagcccgaaaattattcagtgaaccatgcccggccaacctcttgactaatgaatggagcatgttggggaagaaacttgtcatagctcagaaaaatccttatgtactttagaaacagctttcgtgggttttgatcgaaggtcttgggtgttaatcaaagtgctccctggccttctgatcgagcgattggcaacttcttcagcataatcttgtgggattattaatcccatttcttgttcgaaagtggcattgagccacaactggagaagtcacatatgc

SEQ ID NO: 90614 - DNA, 421 bp, Glycine max
  unsure (1)..(421): unsure at all n locations
agagagaaagggtcatgttctatagagtttgagagaatttgttgtgtgcagattcttatataccagagctggaagaggaagccgtcctgagagcttgcgatgagtttgtgagtgattgtgaggtcctagatgtggaggagacatccccactacttgtatttctgcagatcttcattctcttctcttttttgtaaaggaagcttcccagttatggaaagctaaatcctctattggatcttgcttgtaagtacttgatgtaaaattctttttatctacttaatgatgtnttgtgtgttcactatgctatcagaacttcattctaccatgctttttccttgatcacgtagatgcattgtgttttaggatcattcaacagtggaaactggtctgattcttataacttgataggacagggctagtt

SEQ ID NO: 90615 - DNA, 290 bp, Glycine max
taaaaaaaatgttcttggtaatcaaggggtgttttactcaactaatcgaaactcactactttatattcaaattggctatcattctgaccagcccaattgattataacatacgcgtgtgattgggtttcacttttataaagaacgcatctgaattctacacctttaaaacttgtatcaagcatctctcaatttatttgtatggataaaatatcccaaaatagcttacgctcctacccttccttttaacctggcagacctgctcaaccacttcctttgtacactgccttacc

SEQ ID NO: 90616 - DNA, 431 bp, Glycine max
tctctattaatagaacaatattttttatggtccctataaacataaattgtctccttttaatttctcatttatgaaaacgcaccatatgtgatcctttggttttttttattagaacaaacgcctccttttgatctatcgtttataaaaatcaagatcatatttgaaacatttgcataaataaaaagaagacaatttatttattaaaaactaaatcgaaacatttttatacttacaaatgcatcacacaaatatataagtattattctcattaaaaaaattataattgtgttttctaatattcaatgacatataatagataatatattaataaatttgcaagactcagtcattttacatgccatcaagaagttcttatatatatatatatatccaatttggtccaatgtttatacaattttgtgattggactg

SEQ ID NO: 90617 - DNA, 390 bp, Glycine max
  unsure (1)..(390): unsure at all n locations
agacacctgcggcatgaagcttctttggacctcgaacaagcaatcaacttctcttttanaanttctatgtgctcgcgactggtccctttcttcccttcgcaacttgagttcattattgctaccccatagagctccgcgaaatttgttccggccattctcttccttgggagccctcttggtctcttgttcaagggctcttgcggtaattgcattctcttcccgtaacccggcgcactcctttcgaacgtgtgtagcagccaacttgaacttctccttggcgagttttgcctttcctaactcgcttttgagagcttggacttcttcgtcctcttccggtgcttcaaaattctcttcgctgacgacatttaacttggcgagccactctaaacc

SEQ ID NO: 90618 - DNA, 434 bp, Glycine max
agatggaccattacaagtgcttgaattattattgacaatgcttacaaagttgagctgcccggtgagtataatgttagttccaccttcaatgtctctgatttatctctttttgatgcagatggagaatccgatttgaggacaaatccttctcaagagggagagaatgatgaggacatgaccaagagcaagggcaatgatccacttgaaggacttggaggacctattgatgaggacatgccaagagcaagggcaaggatccacttgaaggacttggaggacctatgacaagggctagagcaaggaaagccaaggacgctcttcaacaagtgctgtccatactatttgaatacaagcccaagtttcatggagaaaagtccaacgttgtgagttgtatcatggcccatatggaggactaaatgacaccactttattta

SEQ ID NO: 90619 - DNA, 185 bp, Glycine max
ggatgctgtttcgattgtccaaaacccctatcgtgttacattcaccggttttctactcggtcatataacggagggaagcctccattatgaccgtatcctgtaggtcaatttacgacactaaatgttcgtttaaatctcatatgcacaccaacaaacataaaacccaggtaaaaacactcaaggaa

SEQ ID NO: 90620 - DNA, 422 bp, Glycine max
  unsure (1)..(422): unsure at all n locations
tcaaactttngagtcgatcttcaatcanatgcaacaattattctatttatccatgctagacatcatcatgcaagagatggatattatgaccaaaagtgttcaaattggtattattgaattatacctcctagaattgttatcccttgaccctggattntctgaaaaccaatacaccacactgctgcaccaccctgtaacgatagttcaccatagcatttagtgagatacatagagtatataaaaattgaactataatttaccctgaaatatctatgagacgtgtctaaaatgttctcaacactttaaggtatcagatttcaattgaaaaatgacatgtaatgagaaatggaagaaaagttgtcattttttntactgataatgcactcacaagaaagatagcaagacacaaggaatggtaatat

SEQ ID NO: 90621 - DNA, 326 bp, Glycine max
ttgacttcggacgaagcagtgagtgcgtgcatgcatgacagaattcccttccagaatctcctattcgctagcgcgttaagcctcgcttatcgggatgaaatctcgttaagcaccattgagctctacttgtgagacatcaactttagcacttcttaacataactccttttggcctgaaattgaagagaaattgacattaattccacacacaatgcttttactgagcaccaaatagatccaaacagattgtatttactatcctacaaaaagaaccattaatggtggaaaatatatacattttgctaaagttctctattcaaaatttag

SEQ ID NO: 90622 - DNA, 427 bp, Glycine max
  unsure (1)..(427): unsure at all n locations
tatgctgcanacatctacaatatacctcctcaacctcattctgcaaatcaatcatagcagaacaattatgaccactccagcaacagatacaatcccggatggaggaatcaccctaatctcagatggtctagccctcaacaataacaacaacagcttgctccttccttccaaaatgctgctggtccaagtagaccatacgttcctcctctagtgcaacaacaacaacaacaacagcatcaacagaaacaacaatccactactgaggcccctcctcaaccttcattggaagaattagtgaggaaaatgacaatacagaacatgcagtttcagcaggagactagagccttaattcagagtttaacaaatcagatggggcagatgaccacccagatgaaccaagctcaatcacaaaactctgacaagatgc

SEQ ID NO: 90623 - DNA, 342 bp, Glycine max
agcttctgcaattaattttttctccttctttatcacataacaggattgcttaatgctacaaaaaggtatgttacctctactttataaatgtttccaatatctacttttctggctcttaccatttattgttggaaatgctcttggaaggaatggaatagggatatgctgcttctgtaaatctaaattaccagtggaagattcacctgcatagaaaattgctacgtaactcactctttaaaatattgtcatcatctctttcttggatatagtgatgttgggcaggtttatttgcggacgatgaaggtgctactggttgaggtccttgacactgatttcctgacc

SEQ ID NO: 90624 - DNA, 396 bp, Glycine max
attcactctcttctatccatactttttatataatctcaatatttttatcacgccattccgatttctgtatattcataagaacttgattgagagacattatacaagcttaagaaatagaaacaatgataaacatttatatctaacattgataaatatttatcatttaaaatcacatacaacacatcatttatatctatgcacaatataaacattttaaaatttcaaaataagatttcacaaaaaaaaaatatcataataggacaatgaaacaaaatctgatttggttttaggacaacgaaaagtaacaattccataagctgaaaattaagctttaagagaaggtctactgagagctcttacttttgtaaaagctaaaaaaaattaataagcaaacac

SEQ ID NO: 90625 - DNA, 342 bp, Glycine max
aagctgcctcttaattttctagaaggcgtattttgtcgaagtatcagaaaccgaacccgcagagatttttctaatattaacagctatgtggatcaaaaagacatataaccagatatgggccaccccccatgcggaagtgttaaatggtccagacgagcgaggactctcctttataatttggaaactcggcaactcatgggcgggatgactatatttcctcacaacgcccttgaagtcaaaatttggcccgaaaatactgacgaacattataaacatagataggctcacgtcactatcagtataataccttgggtaaaaataactcgtgaggagctcattatt

SEQ ID NO: 90626 - DNA, 404 bp, Glycine max
  unsure (1)..(404): unsure at all n locations
taaattcatatacgaacatatacgaataattctatattattgtatagtacttcaatactttnttaattagattatattaactttatactaccattaattctagtacatattctcatgaagggtaagtttgtctatttttttatatgtgattggtcctagtgaaattaaaattaatttaattaattttcttaaataaagtgttgaattcaaattttatggattgacaaaaaataattataattaggagagaaaattctactattaaatatgatcagtcaaattattttgatatattatagtatgatgaataaactattttaaaaacttgagtaattaaatggaacttgtaattctttattgattaaccntataaaanaaattattttcaaaaacaatattaaaac

SEQ ID NO: 90627 - DNA, 155 bp, Glycine max
agtcaaactgatcagtttaaaatttacaaaaaatgagtatgaaaaccgagctttataaaaatcaaatttttgttagtcaaactgatcttttacaaatccaaaattatttttgacaaactgtccagttaaaaactcaatccgtagacaaacaaaaa

SEQ ID NO: 90628 - DNA, 204 bp, Glycine max
ctgatttctcacctgactcatgatttattgacatatctttccattacactgacatgattttcggctagtctatatgaagacgaagcataacttacaccacaactctattccctcagacttccaccaattgtttataagtttttagatatgtaatttatttataataggcattataatatcatcattaattattagtatgtaact

SEQ ID NO: 90629 - DNA, 360 bp, Glycine max
  unsure (1)..(360): unsure at all n locations
ttctattaataggggggtttatttaaggggaaaatgtccgtccttccgggaattcgagaatccctttgaattagtgaaaaaaaattgttcccgggaaaaaaatccaggtcagggggcttccgtaccgtttcgtgggtgatttcgcaaagatttcaaccgttctcgacgttcttcgttcatgcttcgccgttctttggtcttcaaccggtaagtttcccgaaatcaaacttttcaattcattctatgtacccttagtggtcctcattngttttcacgtgcttttattttcatttcatttactttccgtacccncttttgacgtgctatagtcatttgcttaaggcattttctcgcctaatc

SEQ ID NO: 90630 - DNA, 419 bp, Glycine max
  unsure (1)..(419): unsure at all n locations
ctcatttattttatatagtcgtatctagtcaagatcttagagaccatacaagtttcctagcggtttctaattatatgggccattaagtctatcatatgctgacaatagccgagaagcccatgaatttcttcgggggcggagtaggtgtccgccattgccttggccttggctaacaatcggngaagttcttgactcccgttcaaggtaagagcaaaccgatccatccacatggttgcctcttggtgtaaagagttgatcacccttcctctagcctctttttccgtgtatacttgggcatactcgtccgcgaccctatgctcgtgggccgtggctagacttaactcttcttggtacttggcgatgatagctagcatgttggtctccgtctcgcataaacgctgagacaagctccttttgga

SEQ ID NO: 90631 - DNA, 212 bp, Glycine max
  unsure (1)..(212): unsure at all n locations
cttccttattttgnctctttccttatgtggaaacacaacttatgcgctngtttatgtggatgacattatcctcactggaaataacagtgttctaattcagcaacttatttcacagctaaactctattttctctcttaaacatcttggcaagttggactacttccttgngattgaagtccagtataattccgcaggttctgtcatgctttctc

SEQ ID NO: 90632 - DNA, 424 bp, Glycine max
tccataaggctctgatccctacaacggtcacattcatgatgtctataaatcaaggagcaagcacagcttcacataatgtaaaaattcttaagggtttcctagactatcaattatagaaaaccaacaggatcttgaaatttatgattctcacaaacaatcaataaagaataatagataatgatgtgtacctttctccataggaacttctctctagtgcactttgatttccttgaaaatgagagaaataggatttcacttcctttggcctttcttttctgtctctctccgttcatgatggctatgggtgagaaaagagcactttctggtcaggaaggggaccttatttcacgttagtgggtattaagccccttttataaccactactctcatcaagtagcagttaacctaaaaacttctcctatta

SEQ ID NO: 90633 - DNA, 181 bp, Glycine max
gacatacaatcaatgtctcatccatcctaacaaactcgatgatcatcccatgccaatctaaacactataacaactgcttctacctccacacgccaagcccaataatgcatcattccaatatgacaccattagaccttcacacaggcaaatttttactcgatatgctattaataaaatactc

SEQ ID NO: 90634 - DNA, 440 bp, Glycine max
  unsure (1)..(440): unsure at all n locations
ngctgaggacgcttcaatggagganaagaaagagggagataaagagagaggggggagcacgatattgaatgaacaaatttggagagaagttgaactttgagttgtgtctcacaagactctcattcatcaaagttacaacaagtgtacacatgcttctatatatagactatgtagcttccttgaaaagatgtcttgagaaaacttccttgagaagctttcttgagaaaacgtccttgagaagctagagcttagctacacacacccctctcataactaagcttacctccttgagaatcttccttaagaagattcctaaagaagctagagcttagctacacatacctctntaatagctaagctcacctccttgagatgagaagctagagcttatctacacaccccctataatagctaagctcacccccatgaaaaaatacatg

SEQ ID NO: 90635 - DNA, 309 bp, Glycine max
ccaaagggcgggaaggaattgaaacccattgttcgctcactgaatcacaactaacacattaagctccatcttctgtttctcatcactttaaagcagctcaataataaaattatttttcccactaaacctcttttctcttaattgctcaaattcaatcctaaaagattatgtttttaaaaataacgcctttatattaccgaccgttctaaaaataaaatagctaatagtattggatcatataatcatctttcctggacacaaccttttatcctattttcttaattgaacaaaattattataacctcttta

SEQ ID NO: 90636 - DNA, 433 bp, Glycine max
  unsure (1)..(433): unsure at all n locations
cgagtctgtcagaataaaatttcatacttaaattcgccgactctttattttagttagaagcatgttcttagacaaaagtacaatgataaaatacgaacaatcgggactaacaagatttttgagaatcagcatgagagcgcgttttttctgctccaactgatcagcataggccatatgagctagaggagtaactgcctcactcacatttcttgtatttgccaagatatcattatttgtttcaccatccaaagacccacttgaagcaacatcaaccccctcatctaattcttgatgggatgcaacactggcgtcactcttcttttcaaatgaccgacgaagaacatcagccacctttaccgttttgttgccaattgattatccttctaattcctattaaatngattaatatagatcatcaatcgccaattctcaa

SEQ ID NO: 90637 - DNA, 314 bp, Glycine max
gcaagctcgcttctactgatacctcttcacaacaattattgtaatgaagccttttttatggaatgcctacttctactactcaaccgcctcccaataacttagtctcattaaaggctctaagtgcttggaacaggaaatgttgtatcacaatgggcggacaaaaggaccataataaacttttaaactgtataagtgataatttgaatccctgtggagctatgaggccgttgtatttatttatcaatggagtcctttgcttttaaagttcattggcattgtaatggagacggagaaagatgattggagattccact

SEQ ID NO: 90638 - DNA, 440 bp, Glycine max
  unsure (1)..(440): unsure at all n locations
tcatatcacatatatgctccaactagagagggagtattatattacataatattctattatttattattagataacaattagggatttattccttattactctcattatctgattgatcctatgtaatcaatatggatcatatttgctcattattattaaaggctttgtgtcgtcatccaaaagacataatttctatgcataatctataaaactcaatttgctctcactgttaaagccattgttctgataatggcagaacaatggcactgcattcagtaccctgaattctatgtcatgtttggcattntgtaccaaacttcatgtgttgccactccacataaaaattcagttgccgaaagaaagcatctccacattttaaatgtggctaggagtcttttatttcaggcaaatttgcctaaagcattctggtcctatgccgt

SEQ ID NO: 90639 - DNA, 417 bp, Glycine max
  unsure (1)..(417): unsure at all n locations
atttctatcgtctcgacatatgacgggattctatcagacatccgagtaanaaggtagtgctggttgacattgctcagagcatcgggattcaactacgagcctctcgatatattacagggactccatcagacacacgagtaanaaagttattgtcgtttgaatttgctcagagcttcaatatttaatttcaagcgctccgatattttacaggactcaatcggatagccgagcaaaaagttattgtcgcttgaatttgctcagagcctcggcattcaattgcgagcgtctccatatattacgggactaagtctgacatccgagtaaaacgttattgtcgcttgaatttgctcagagctttcggcatcaatgtcgagcgtctcgacatatttcgggactcacttagacatccgagtaaaa

SEQ ID NO: 90640 - DNA, 310 bp, Glycine max
aatggtgggaagttgccatggggaatggatagaaggggattgtgaaggtttgagaaaatatatagagaacgagctgacaacggtgatgccaatggaagattaaaagctggcaatgtattgtagtgaaaattttgcttaagccttttttccattaacttaagtgagaaatagactgaatgtagcatttatctcctagggggctgggcttaagccaagttttttctagtataagaaaattatgcatataaagagaattcgcacataaatgaagtttgctatgcataattggacttaacctttaaaaatgact

SEQ ID NO: 90641 - DNA, 365 bp, Glycine max
  unsure (1)..(365): unsure at all n locations
nagctgtaagattatatggtacccgtcatatttgtactaagtggcgatcgggcgatggtgcaagtcgactctccacatccacaaatcacacataaatccaccatccccaattgcccaccttcaactaagctcacgtacttccacgtagcccttatcctcgttcctctcaactccgggtccccatcaatccctccaagctttcacaacatccaagcaattcaacatctaacatcatgaactatcaaaaaccaagaaaacagggcagaggcagaaaactctgcccaaaacacaaccaataccacaactttccttactcaaataccccagtaacattctcttcgttccaattcgttcaccgttggatc

SEQ ID NO: 90642 - DNA, 426 bp, Glycine max
  unsure (1)..(426): unsure at all n locations
ctcaagcttgctcatggtatgcgagacagagaccacatgtatccatcttaacaaataccagaagaattaatctagccacagcccacgagcacaaagtggtggacgagtatgcccgagtgtacgcggaaaaggaggctataggaagggtaattgactcgttacatcaagaggcaacaatgtggatggaccgatttgctcttactttgaacgggagtcaagaacttccccgattgttagccaaggccaaagcaatggcggacacctactccgccctcgaggagatccacgtacttctcagctattgccagcatatgatagacttaatggcccatatgattaggaaccgctaggaagtntgtattgtcactcagatcttgactagttataactttctgaataagatgagtttatcccgagtttttactt

SEQ ID NO: 90643 - DNA, 302 bp, Glycine max
  unsure (1)..(302): unsure at all n locations
agtcacctgcagctgccagctggatcatgattatgttcagcnnnctttttatatggttgctaaagcccacacactatcttctctgcgtctgcgatatagcacaaatgttatatgagatatgacagcggcgaatccttaagcacgtactggaatagaacacatgtatgggcatcctatactcatcaccagtgcctttggagaacttttctaccggaaatatagagattttttcagcacagaagctcttaaaagagcttctagccttgttccaaacacgctctaagggtctaagccttaatgca

SEQ ID NO: 90644 - DNA, 400 bp, Glycine max
  unsure (1)..(400): unsure at all n locations
ntcaatgccatgatcaacacctcgatcggacaagtatttctcaatatattatgtggcctttctaggatctttctagagccgtcataaaaatagcaccagaaatacaacattttctaaaggtttcctctaatcgcaatatagaatagaaaaactataaaataagacaacaattgtagtgtatcatagaaaaggaaattgatatatagaacacactttacactaaaagtatcaatatgttgtagtagagaattaaaataagttatagtacaaaggataatatattttcaattcgatggcataaaatacccacaaggaatgccgcaaagaagcccgataacctgagatgggcgtgtctagatttaaatatacaaataacaattcaaaaggtaaaaattaataa

SEQ ID NO: 90645 - DNA, 348 bp, Glycine max
atctttcttctgctccccgcctgaaaacatgcatgtatatgcctgtcaattggtcaatgtctttgctaaagttatctcggctagtgactcgaagcttttctaaattattcaataagatgcctgaataacttaatcatagatcatacattccatacatgatgtaattattcatgtatcttattgaatatatagatcttatggttatctcatataattagttaattaactggtgattatattctgaccaagcctggtgattatttcatacgattagtgaattaactgattgtgtgttatatgttatgtattaatttttcataatggagatgaattctagacaattcatgt

SEQ ID NO: 90646 - DNA, 444 bp, Glycine max
tctcggctcatgctgggaacgcctctggttcaacacccgttgcattctaatgcacccacccagagggaagctccccaagttccaactccgaacacgactcgacggccggtattcaacacgacaagaacttccctccgaggccattgccggaattcaccccgctcccaatgacgtacgaagatcttctaccatccctcattgccaatcatctggccgtggtaactcccggaagggtcctcgaaccccctttcccgaagtggtatgaccctaatgcaacttgcaagtaccatgggggtgtcccggggcattccgtcgaaaaatgcttggcccttaaatacaaggtccaacatttaatggatgccggatggctgactttccaagaagatcggcccaatgtgaggaccaacccgctcgccaatcatggagggggagcagttaatgcag

SEQ ID NO: 90647 - DNA, 353 bp, Glycine max
tttttcaaaatttacttcataacgaggcaaaggtctgaaagaacattccaagtttcctaacgaatctctattattgttggcccttaaattctatcatatggctgacaataacccgaaaagcccatgaatctcttccgggggcggagtaaggtgtctgccaatcgccttgggcattggcttacaaataggggaagttctttgactcccgttcaaggtaagagcaaaccgatccatccacatggttgccttttggtgtaaagagtcgatcacccttcctctagcctcttttttccgcatatacttgtgcatactcattcgcgattctatgctcgtgggccgtggctagacccaac

SEQ ID NO: 90648 - DNA, 440 bp, Glycine max
agaccaagtttcgggacaccaaaaggcacatttgttgccttagccatccacacattcgttccagaggcaccacctttagcgcttacagacaaccctaacccactccaaacttttcccattaaacaccttagtccccaacaatatcaagaacgacgtgcaactagtttatgctattactgtgaggaacggtatcataccggtcacaaatgtgcccacaagtttcttctctttttaactgaagaaccatccttagacctacccactgaccctgaacctttcctagacccacctacttcaacccaaccaactaatgctgaccccttttatttttgttttttgtttcaagccattttgggcagcagctcaccataaaccctcaaattttaggcattattttaggtttgcttgtcaccatactggccagtggcagtgtgcataac

SEQ ID NO: 90649 - DNA, 269 bp, Glycine max
  unsure (1)..(269): unsure at all n locations
tgttttttacccaatgaagctcaatttaatctttccttcaagaaattttcatttatgaggctttcttcaagaagcttnctctggcttctttgaaaaagtttctcaagaagcttctttgagaagctagatccttatctacccataccccttctatataactaatattcaacctctcttgaaaaataatttactggattaaattaacaatcacanattattaatcacaacatctacacaataattattaataataatatagatatactatc

SEQ ID NO: 90650 - DNA, 433 bp, Glycine max
  unsure (1)..(433): unsure at all n locations
tctttctactgactaacaattcttattgcaagttcacattcttgttctttctttgtctaacatacacactngctcaaactcatgataagaaacacaaactccatcaaaatcatgcactcaattcaaaataaatacatacacccattttcataagtcaataaaagtgttttactgccatgtcatcaaaatcaagccaaactgttcaaaatgctttagaaaaagcaaaccaactatccataaataaaactaacaaaagggaattattgtactaaaaccatgaccataataataataatttaaaaggcaacaacaaaagaaacacaaatttatcaggaatatcaacattcttgtcagtatgagccacagcttccttagcagtccatccaggaggaanagtcagaaccatcatctatgttgcaagatggtgaattag

SEQ ID NO: 90651 - DNA, 339 bp, Glycine max
  unsure (1)..(339): unsure at all n locations
actccctcggggactttttttttttcaacagactttgcacaaatctgcttctctataacagatgggaatgacttaacagcaccttggcgatatttctttatgcctcatacatgcagaagaccaaatctttgatgccatattctgactacatcctctttggaggatagacatgtggaggagtaactgggttcttgaggtgtgcataggtagcagctgtcctttgatctgctgcacttcattagaacttcactcttctcatttgtcancaagcattctgactgtgagaagtttacattgaatacttcatacacagctgactgatgctgatcaatttgcagt

SEQ ID NO: 90652 - DNA, 120 bp, Glycine max
aagaagcaacagtcaatttaataacattctctatacatgcaagacagaattgattgccttaagataaatgagataacggaagagagaatgcacacacatctttatactgatttgacaaag

SEQ ID NO: 90653 - DNA, 357 bp, Glycine max
tgtagaatggctattctttatacatgtcatgagtcgctttgtttcaacgatataatggatgccccacattattctcctgacacaaatgctaaaatgatgatttggaaatattatcataactggtcatgcatgcacctatgttgacactcaaatgttaacttttttggtcatgttatgctaaggctcaggatacattttctctattttataaaaacccaatgtttccaaaatatgttcttttatcaacatgtgcattaatcaagtccatttatgcgtcggggaaattttatagtaatcaccttctggtgttacacggtgctgttttctctaaatcggtttaacaagaatttttttcaa

SEQ ID NO: 90654 - DNA, 342 bp, Glycine max
  unsure (1)..(342): unsure at all n locations
agctagtcaacctgatattcttntttcttattttgtataacctaagaatacgagtaccaatgagatatctaaatttttacttaaaatcagttaagtgtaaacaagtgcctaagctagaggtttgtagagacttttttttatagttttttttactctactctagagtcattctaagtttctttttgagtcctagcttgattctatgtgcttttcattgctttaattgttgagtaatccttgaaaaattgtcttgttaaactccatgggttaactttcattcattttttatggccttgttaatggtatctctttgttccttgttgtggggtgccatataggatt

SEQ ID NO: 90655 - DNA, 412 bp, Glycine max
tgaagttttctggttttctatacattgaaaacttgtgctattcatcctctttattcccttctccctttgccaaaaagaattcgccaaggactaaccgcctgaattctttttgtgtctctcttctcccttttccaaaagaacaaaggactaaccgcctgaattcttttgtgtctcccttctcccttgtcaaagaattcaaaacaacacagtctgggaatattttttattcttccctttccctaatacaaaagtgttcaaaggactaaccgcctgagaattcttttgtatccccattcacaaagtatcaaaggtttaatcgcctgagatctttattcttcccttcttaattattctaaggccactcgatccaacaccctcttccacaatgacaggggtcttcaagaaattatta

SEQ ID NO: 90656 - DNA, 349 bp, Glycine max
agcttgcatgtggggcttctattaggctggttctttgagcatcaatgaggtcctttaatggtatatttccaccatggagatgcaacagaagacaaaggataagaggtgagaggaggcgccatccactatgaaataagccatggaagaaggagcttcaccaccaagatgagccttggataagaagcttggagaggatgctttattggaggaaaagaaagagggagtgaaagagagagaggggagcacgaaattgaatgaagataaagggagagaagttgaactctgaattgtgtttcacaagactctcattcatcataagtaccaccagtggtacacatgcttttattat

SEQ ID NO: 90657 - DNA, 287 bp, Glycine max
aaatcgacctgtcccaacctgtggtatgcttctttgcaccacaccagactttgccctcatgcacaatctaaacattgacagccgaacttatgctgcaatatcacaataacgtctgacctagcagcaagtcaccacacagaacaatatgaccttcaacaacagtacatcccagtggagaaccatctcatctaatggcgattcttcaaacacacagcacacaacttattaaaatgtgtggccagcgaccatcgtctcatcatcacagcacacataacgcctaaacacaa

SEQ ID NO: 90658 - DNA, 421 bp, Glycine max
actcatcttatgactttacagacaccttatagcatcacactttgatctattactgggtgacggcaacgaccgaatacaagtatacattaattatgcatcaccattaaatttgatattaaaattagatcaaattatatattctttattctactaatacctctctaattttttatactgaaatccttataaatatctaacgtcaacaaaatatcatatgtaatctctctttaaaaatttgtttttattattcatgatctattcaacccttttattttaaaattcgctaataatttttttattaatattgatgttttaacattctttattatcctatatgaattttggaaggttgtgagaaaaaaaagggatagatgaaaggcgggttaagcgtgttgatatagatgctcaaaattgtaatgaa

SEQ ID NO: 90659 - DNA, 340 bp, Glycine max
  unsure (1)..(340): unsure at all n locations
agcttgtattgtacatgtntttctctaataattaggatatgcctgcactttacaagtatcctagggctcttcattcctagaccctagtagacattcctttctctgagactctaagagtggattcgggtcatgagcatcctttattccaagacccttgtagacatgcctttctcactctgcttttctttcctttttcatgtaatatggctaagtacgattaccaatccatcaaaagaaaaaaaagttgttaatgttgaagtggcacaagattgggctccttctcctcccatcaacactgtgtccgacgagaggaaggatcttattttttctctctcacgat

SEQ ID NO: 90660 - DNA, 404 bp, Glycine max
taagctccttcaactgcacaatgctcttaatatttgaatattatccttgtggaaccttcacccgacgaagacactgacaaaaacttatcttctcctttttggaaaaagtatgacaagctgggggcaagtaaattttcttcccatcagaccttggatgcaactgtgatcgtatccgcatctcagctagatcttgacgggtattcaagccattcttcaccttgccttgaatgttaaggagcattccaatcacactgtcacatacatttttctccacatgcataacatcaatacaatgtctaatgtctatatcagaccagtacaaaagatcaaagaaaatggacctcttcttccatatgcaagtcttacttttatccttgttttgggtttttccaaatacaatattc

SEQ ID NO: 90661 - DNA, 295 bp, Glycine max
tttcttctacctctgatgggcggctttcttttgttttcccctccccggggttatgcggatttcttcactttgatgtgatggggcttctttaaaatattgcttaatcttttatatcatgttctttgttccatggtttcttccattactcctttgcatgtcgattgttatgtccccttattcccttaattgatggatacaggcttcaattttttgatcaggaacatactaaagcttttgattttattctaaaaaaagcagagatttttatcacaacacgtgcgatttttttggttaa

SEQ ID NO: 90662 - DNA, 324 bp, Glycine max
gtcatggaaggaggagcttctccaccaagagagtgccttggataagaagcttataaaaaaagcttctatggaggaagagaatgagagagagagaagggggaacactatattgagggagaacaagaaggagagaacatgaattttgaagtgtgtctcacaagtttcacattcattaaagttgtgataagtgttatacatgtttctatttgtagcctaggtcactaactaatgtgaatctaagaggaatattccaaggatatgccacaagcatcttagcatattccctttaaatgccacaagaatgaaaggtgtgactctagcaca

SEQ ID NO: 90663 - DNA, 427 bp, Glycine max
acgaaggagactgagtttggatattatagaacaatgctagtcgcagcgctctgggtcaaacacccacatcactacatgaaatagctgagagaatttcgggctctacaaaggaacgtaatttggaaatttcaaccacgccaatgtgaccggtgttcattgtatgataccaaaattacatacattccatgaaaggataatgtctacaaagaacttttctctaaggtttttcaaaggaagcataagacaagcaatggcggtgcccaagtcagaatagatgcggagactagatgaaactatcaagaaacaatcgtcgaaccatgattacctcgaaagaaaacgaaagatcagattatggttttcgttctctaccgaaaccacaagccaagttggaaattctgcttccgttgaaaggctcctctcggtgtgg

SEQ ID NO: 90664 - DNA, 387 bp, Glycine max
gtgactcacttctacttccgactattcatctaagtcagatatacatataagaatgcataatcaactaaacatgaattgtactcacattatacataagtgagcccttgtgattaaatagggtcacatttcgctataatattagtagataaaacttattaaaaacatatccgacttagaacaaggccgccatagtttacaaaagaaatattgttaaatcagcgagggaaaataaactattataatatcatactatttgaataataattcatcttcaatgtcacattctatcataacattgtatgccagagttgtctagcacgaggttgtttaaagtcattcacctagacatctattcccacgaacacaatgttcaagataatcactaga

SEQ ID NO: 90665 - DNA, 411 bp, Glycine max
gatacatactgaatgagctagtatgtatttccacattcgactagagacacacacaccttcccagcaggatactaccccaattctgaaggagatcgaggaactggtggaacaatattcatcattattcaaaccattagtgggccttccaccatcgagaaacactgatcatgccattaatatcatacccgaagtagccccagtgaacgtgagaccatataggtatccccactttcaaaaacgagaaatcgaagactagataagctctatgttgagtaagggcttcatacgcaccagtgccagtccattttcgtccccagtgttactcgtgaagaataaggacgggtcgaggaggatttgcatagattagatggcccttaacgccataaacatacgagatatgctccccatacc

SEQ ID NO: 90666 - DNA, 392 bp, Glycine max
tataacctttacttaatattatatgatagattatgagtattatattataaacttattattatatgacttattaataacgagttggtttgagagatattaaatataatcttctctttaagtaagttattgaagctttaagacttgtggttataaaaaaaaaccttagttgttaagatgagaaaattctttcaaaagggatcaacctgtattctttaaatggaaattaatcatccatagacgataataaatatctagattcacttacaataatatataataataattaaaaaatgcggaacggcttactaaatgatatattcgtactaaaatagacgggggcatatggtacctaacatttattcaattttggcatttgacccaaattgatatgg

SEQ ID NO: 90667 - DNA, 358 bp, Glycine max
  unsure (1)..(358): unsure at all n locations
aagcttacgctgaacataaattcttaaaatnttattgttggacacttggtccacttagcgcacagacatgcttaacgggcttcataactatgttcattaacaaggatgaaccgcccttacgcgacatggtcccgtttgcggcgtccaattggaaatacaaaattttgacagctgcgatgaacaggcttatcgcacaagcacgcttaacacgttagtcacgattttcagacaaaccacagggttcttcacccctttcagccacattgaccctaatgggcttctaaggtacataaaatcctacattgactaaccctaaaactaataaccttaacctaacatcatacaactaagaaaacaa

SEQ ID NO: 90668 - DNA, 413 bp, Glycine max
  unsure (1)..(413): unsure at all n locations
gtgtgaaccaaatgcttaccactactaaaggagaagccttcatggtgtctcatataaacctcatcctctaaatcactattaagagaggccatgttcacattcatttgttgtaactcaaggtcaaaatgagcaactaatgccaagataatacgaagagaatctttcttatatacaggagaaaaagtctctatgtagtcgaattcttctttttgagtaaatcccttagcattgagtcttgccttatatctctcaatgttgcctaatgaatccgttttgatcttaaagacatttacagccaatggcctttgccccattaagaaactctacaaggctctcaacctcattactctgcatgtaaatcatctcatccttcttggcatcataccatanatttgactctttacaactatgga

SEQ ID NO: 90669 - DNA, 177 bp, Glycine max
  unsure (1)..(177): unsure at all n locations
gtggctgaaatttatataatgaaatttaacaaaattggaatataaaatctgaaattaaaatgactgaacataaatcataaaataattgaaataaactaaaatgttcgagatgcacaaatttaaatgtcctgctcctgtggntgctcctatgcatgctcattaaggtccaacacctga

SEQ ID NO: 90670 - DNA, 322 bp, Glycine max
actcacaagtcagtatgacagatcttgtgagcacggaagatgacgtaaatctccgcgtctcaactggcttgtcgggcgcgattgacgaagggcgcaggagacaacgatagtctctgcgtgctatcaagcttttcgtcttacagatagcaaaaaggtttattcggataaccactctggtatctccgcccgtcaacgtgacttaaaagtcaatatgacagatcttgttagcgcggaagataacgtaaatcttcccgtgtcaactggcttgtttgtcgctattgacgaatggtgcaggagactacgttagaatctgcctgctatc

SEQ ID NO: 90671 - DNA, 354 bp, Glycine max
agcttaccaccatagattcttggttatttcctgtagaggatgcttcaatggagggaaagaaagagggatagacagggagagggggggagcttgaattgaatgaaaaaaagggagagaagttgaactttgagtttgtgtctcacaagactcttattcatcaaagttacaacaagtgttacacatgcttctatttatagactaagtagcttccatgagaagctagagcttagctacacacacccctctaataactaagctcacctccttgagaagagaagctagagcttagctacacacccctatattagctaagctcacctccaggaccaaattcctgaaatttcaaaaaaaagt

SEQ ID NO: 90672 - DNA, 416 bp, Glycine max
taaagattcagcttctacattagtggtcttagcaagctttcatcaagtagttatcaaagcacaagagcttcaagtaggtgctccttataccttcattaatgtttagctgtaccttctcctccattgttgtgtcttcatttttatacatgtatctccttacatgtcttgtgctaaatgttggtaacatgattcttttagaatttccacacattaaactcgctttagaagctagatttgattttctatggttcaaatatcttgttcttgttctagaaccatgaatagtgttgagtttaaattccttttgagtttgtttagctattttgtgtggctgaaacctaaaccataaaattcttatcaaacattatagtgataaaaacctcaaaatctagagtgacttgtcacctgtgtagttt

SEQ ID NO: 90673 - DNA, 361 bp, Glycine max
agcttctgttgtcatatatcacattggaatttttgaattaaggagccacacactactatgttttgttttttttcttactgtgaataataaataagatttcgtgctttatcaaaaaaaaaacatctgtggggctgtatgcaagggtggaatttattcgcccatggttttctttatggtttcattaatatacgatgtttttcctttccttacatgaagccaagcgttttttaaggcagttacttgccacatacggcattgattagagagagtatcctacttagttggatttcatgtccatttgttatctcatgttcacgagggtccttttttttttactactgaatattttggtctatcctct

SEQ ID NO: 90674 - DNA, 397 bp, Glycine max
  unsure (1)..(397): unsure at all n locations
ntagcttctcaaggaagcttctcaaggaagtttctctattaagttacttaggctataaataaaagtatgtgtaacacttgtggtaactctgatgaatgagagtcttgtgagacacaactcaaagtttaacttctctccctcttttcctccttcaattttgtgctccctcctctctctttctctctctctatcttttcctccatcgaagcatcctctccaagcttcttatccaaggcacattcttggtggcgaagctccttcttccatggcttattccctagtggatagcgcctcctctcaccttttctcctttatcttccactgatctccatggtggaaaatcaccattgaaggacctcaattgagctcatagatccagcctccatagaagcttcac

SEQ ID NO: 90675 - DNA, 345 bp, Glycine max
agcttatgaagaattcctaacaagcttggttttaagcacctcgtaacctctgttgaacatccccagaccaatggtcagacaaaggcaccgaataaagccatcctcaaggccctacgcaccactctcaactagtttaagggtctatggaaggaggaactccccattatacattgggcatatcacccagacaacgaccaaggaaactcgtttccaactcacatatgggacatacgccataatccccgtcgaagtcgaggaactgttgacaagggggctattgttttatgaacaacacaatgaagagaacatgccggtggaactagagacaaaggacaaagtcttaga

SEQ ID NO: 90676 - DNA, 420 bp, Glycine max
gcttaacatcagaccaccttcagtgtgctggaactacttctcatggacttgatggggcctatgcaagttgaaagccttggaggaaagaggtatgcctatgtcatccacaacagagtcacacttagaagagggactccaaccactctgtatgaaatctggaaagggaggaagccaactgtcaagcacttccacatctttggaagtccatgttacattttggcagatagagagcaaaggagaaagatggatcccaagagtgatgcaggaatattcctgggatactctacaaacagcagagtatatagagtattcaattccagaaccagaacagtaatggaatccatcaatgtggttgttgatgatctgtctccagcaagaaagaaggatgtcgaagaagatgtcagaacatcgggagacaat

SEQ ID NO: 90677 - DNA, 327 bp, Glycine max
ggaatggctagatttatgtaatgaagtttttatattttgatggcttttcttttctgttgtaggttatctgtcaatttagagacaggtgtgtaattttgacttttaataatataaatacatttcaacttttgtgtgggtgagacacacaagtattattattcaaatatatcttagtctcaactgagtcatttgtttatggtggtttactcatgaacatatgatcatatatatgttattgttgggaatggtttcgggatgcactctaactatgataaacctttacatgtttattatataaggaagaaaaggtccaatatatgatataaa

SEQ ID NO: 90678 - DNA, 384 bp, Glycine max
tctttgtaccttgtgtttgaaggcttcacactgctcaatggtatgtcccgaaacccactttataggccagctgcatgggattgaccaataggaaaaagagtggtgaccttcccagctcacacaccatttggtgcttacaaaaattgtcaagtcgcataagcatatatccggtgaactcgcagttttttctgaaaattcctccttgggtttatgtttgtgttagggttgggatttccaggtagttgaagctgtgtatgaaatggattttgtgggggaagcctttgtggttgaatgggtggtctctattaaataggcgtccgactggaaagaggtccgatattggctgagtaatcgtactggtgcggggaatattggtaagtgggg

SEQ ID NO: 90679 - DNA, 352 bp, Glycine max
  unsure (1)..(352): unsure at all n locations
agcttattacaacttcttntattatactctgtatataatcaaattacggtggaccccaaggatcaggagaagacgaccttcacatgaccttttggtgtctttgctttagaggtgcatgttggcaatttttgtaaatatggtggagaaaaagttcgaggtattcatggatgatttctcggtatatgggccttcttttgaatcctgcttgaagaacttggagatggtgctacaaagatgcatggaaacaaacctagttctaaactgggagaaccacttcatggtttgagaaggcataatcttgggcaaaaaatttcagcccgagagattgaggtagaccgggccaagattgatg

SEQ ID NO: 90680 - DNA, 276 bp, Glycine max
  unsure (1)..(276): unsure at all n locations
ctgtctcggtcctttgttacttttgtgtgtggagttttattcagtccttggtcatgtccttgatcgggttctcttttctgctttaaagtgaacgttagatgagtgttgcattgacaaggtcaggattatnactaaaagctaaaaagtctaatgcgctgagtttggttgactctcatgatcaaccttgttgatgaatgaactaagaggtttaaagctaaataaaaaaacttctttttcctacaatacttgataattttagagctgaaacatatgata

SEQ ID NO: 90681 - DNA, 467 bp, Glycine max
  unsure (1)..(467): unsure at all n locations
agcttggcctaagagtacagctctgatatttctagtttatcatgtagccttagtaactcaagaagagggcaaattgaattcatttaaagtcattttctgcccaacctttaatcccaaaggaattaaatatatccatattctacttagtaaaagggagagtttatatattccaaaatcttgatcttgcatactctgcatacataagtaataacactaattataaaagtaacttatagtagtagtagtagcaaatcaatttcaagattaacggttataagtgagtgcaccggtgatttttatactggttcggcctccagaagtaactcgagatttttcaatacgaatagcaattatagagataaatctaattatgtttacactgttgacaactgtacaaggacatccttctctagacctacacttacccaccaagccaactgattatagaaacgccgntgacacgctcg

SEQ ID NO: 90682 - DNA, 342 bp, Glycine max
  unsure (1)..(342): unsure at all n locations
actaagcttgtatcgttacacaagtcttgtaaccgantaccagatgttatnttcataaaataatttccaagagtcacatctatttcaatggtttatgaatggccaccaaaggtgacctggaaacacgaatttaaagagaggttttattggcccaaaaggtttatcctctcaaaagaataagaggttttctgaactgaaatgtccttatattctcaaaaagattccttggtcaaccacttgcatattcaataaggaaatttgattgatcttcattgcacaatctatctcttttaagaaagatttcttcttatcttcttcctatttctgaaaagggattaagag

SEQ ID NO: 90683 - DNA, 478 bp, Glycine max
  unsure (1)..(478): unsure at all n locations
catgcaagctgggcaacacaattcctgcacagaaactgttctttttatctatntggntaataatataatatcaagcaagataggatttggctcacaaaaagacacatgatatcccctgcctgctgaaatttctattctaaatactttagccccaacttaaaatgcttgataaacttctgaaacattgttttctgcagtctgcatgagaatattctcatttctggttaatagtaatatacattgttgattcatacgtgctaattatttctcatttaaatttaaaattctaagattgaaagttttatggtgtgattctcattaacgagagcataattaacccttcagagggcagaggaagcttgctctcctttctcaagagcagaggatgggctacatctctatctgcaggtgttgcggaagaaggaatntatcgggcatctatagcttatgtcttcgtctgcccatacacctcactgac

SEQ ID NO: 90684 - DNA, 386 bp, Glycine max
  unsure (1)..(386): unsure at all n locations
gcacttagatctaagctaatccaacntaatgtcggataattggacatanaaattatgttttaatctgtcaaaaggatcagcataccacaggcttaactacagatatgttctggaagacgttctgtgatcaagcatgaataaacttgttaatctccaaaatagaatgttaattttcatagaaggttaatttggatggtcagtgcttacctctctaatttgcatggcacgtattgccacatcaattggaataaccatatctgtcttaggtaatacaatctgatatttaattcttgatctgccaattgatatcacttgtcaaataaatctatgtacctgacatacccccttatgagtttatatgatcagaatatgacccacacttatat

SEQ ID NO: 90685 - DNA, 310 bp, Glycine max
  unsure (1)..(310): unsure at all n locations
tacattatttacatgacacactatgcacaaatgatgatttggaaactatatgcaaaactggtcatgcatgcacctatgcggacactcaagtgtcaagattttatggtcatggtgatgctagggctcaggattcactccctctattctattctaccgactgttgccaaaatatgtgcactaatcaagttgngcatgatgccagcccatcaagcacgtctgagaatcacagagttatacaccaagacgtcgactctgttccttcaatgaaatccttgcatgttttctgtaccttccgcaattcctagataca

SEQ ID NO: 90686 - DNA, 300 bp, Glycine max
  unsure (1)..(300): unsure at all n locations
aaatggcccccgaggacagcttggcctccatagaaggtctaaggaagaggacaaggcacgccccgatgaaaactaagttcccgctcccgtgagtatgaacagtcannccgctttatggatgcgctgtacanccagcacgttgcttcgagagccatcacagggatggtcagtttcttccgggagcgacgcgtccagctcagggacgacgagtatactgatttccaggaggaaatacggcgccggcggtggcaccactggtactcccatggcaagttgatccaaaatatcctgagtttatgc

SEQ ID NO: 90687 - DNA, 206 bp, Glycine max
acaccacctgacactctgcaatgggaagggtcgaattatgatccgcgggcacgatgttgctgatgagcaacaccatccatatttggctcagggtggtatgttggacgcacgatcacacccctcctgttgagtcccgaaaatctgccccggatacaacaaggtggggatggcccctcaccgaaccatcaaacggtcccccctggcaa

SEQ ID NO: 90688 - DNA, 360 bp, Glycine max
  unsure (1)..(360): unsure at all n locations
agtatatccgaggccaaactctcaactgttataatatgctccagtgctnctgtttgattttcgggtgtctcaacaggtttctgaccttacaaggagatctggaggaaacgttatggatgnttgtatctgtgatgggcttcaattttcaacaacgacggtctcaacatatcataaaaatatattcgacatccaagtcgaacgctatggccatccgaacttgcgtcggcatttgatatccactttcgagctcaatgatatattattgtgcccaatcggacatccaagtcaacaatttcgtgtgtcagacttttcccgagtcttncttgttggcttctggggtctcaataggttcatggccta

SEQ ID NO: 90689 - DNA, 335 bp, Glycine max
  unsure (1)..(335): unsure at all n locations
actagcttgctcgtatcgatgacacaatacaatttgtttctctgaagcggaatccgatgccgacacaaattctgatgggcataactttcgactcggttgtgcgatatatttttatgatatgttcagaccgtcgttgttgaaatacgaagcccatcgcagattcaaacggtcatacccttttctctggatctccgcataatgctggaaacctattgtgaaaccaanaaagcaacaaggaagactcgcgcgaactgttacgggcaaacattttgactcacatgtccaattgagggccataatatatcatgtatctcgaacgtggtaatcgaatgccg

SEQ ID NO: 90690 - DNA, 473 bp, Glycine max
  unsure (1)..(473): unsure at all n locations
agcttaagcccttaacaaatgatgagacatgctgagttgtgcactatgtgacaggggtagaaaggtctaaggagttagatatgaacccgagaaccaatgataacaacaaagttaaactaattaaagaaacatgcacctttcaacttgacattaaagaggaacatgttactcaacttgacaatgaactctcaatggaagataagagcaacgtacaagttatctaggcgcatgctgacatgttcgcatggtccacgaccgacataccagggatagatccggcctcccattggcatagattattcatatgtcgagatgctaaacccatagcttagaggaaaagaaagatgggagaagaanagtgttaggcagtgcgacaaaaggtctccaaatcgatggtagcccaattcataaaaaaggtataatatgccacatggctatcaaatgtagtcatgatcagaaaccaaatggtaaat

SEQ ID NO: 90691 - DNA, 288 bp, Glycine max
  unsure (1)..(288): unsure at all n locations
tattcacgttgcgggatttgaggtcagtaagctaatctatggaactgacgaagntaatcatagtttttctgtgaggactttntgccgaaagaagtgacaatcaatctctgtttggtcaggaagggtggngggaatcagaagtgggcatgaaaggctgaaccttaagtgggtatggagggatagtgataggtgcaagagcaattggtggtgactggggacaaagatgagttctaatggaaggattcaattgcgagacaattagcccaagataggaaagcggctggtttt

SEQ ID NO: 90692 - DNA, 466 bp, Glycine max
  unsure (1)..(466): unsure at all n locations
agcttggcatcggaggtgctttaaatcctatattctttcgaagcatcttaatctcagcttcttgggtctcctataaaaaaggcgaaaggttggtgtgattaaatggcaatatctgcaatttacatttcatcctacatatcaaatattatcaccttggtttttgcttgcaggttactctcctccacttccttagcatgaatcttttcctcaagcttagtgtagaactggccaccaaaataacatttttttaaaactgagcttatccaaaagaaaccctcatgtaacacaaaaggcagaagcaagtaataattatttacctcttttcttctctcagctcgctcatcacacttgaaactgaatccatattctggaagtgctcccaccctgcgaggttcggcatcttctgcggcaggacttacaagtggattaaggataaaccatanatacactggccactctcagtaac

SEQ ID NO: 90693 - DNA, 421 bp, Glycine max
tatttgtggcgtcgtcgcccattgatatttgatatagtaaatatgaaagggcactgtgattctttttaataaataaaattggtgattttgataataaatattctaaaaattatatttattgtaattttaattaattggcagcgtaactttttaaaatttatattattctttaggcaacaaaaatttaaaaggaaataataacgttctggtctaagatagaaatattctttaaagtcaaagaatactaaaaaaaaaaatacttatatttctttcatttcaaacgaataattgaggattcgaatttgtgaccttcgtcatatgcgagagagactctgtcttgctttattcgaccaacccttcgcaatttttataatggaatacttgatatgaataataatcctatagatgagttaatgcatgt

SEQ ID NO: 90694 - DNA, 428 bp, Glycine max
  unsure (1)..(428): unsure at all n locations
agcttggcatgtaccaggagaaacggaatttatttcatactacgctaaaaaacttctgaattttgattaagctctgtctgcacagaagaggacattgcaactggtgtagctcgaagagatgacgcttaatgcatatgacacgatgttgcacaagcagaaggtgatggcctatcatgacatgaagttgtcgcaaaagaacttccaatcaggccaggaagtcctgctctttaattcatgactcaagctatctccaggtaaactgaagtccaaatgggctagacctctcactatcaaagaggtaaagccctatggagcagtggcntagatggatcctcagttagatcatctagagagaagttgtgtggtgaatggcaaacattgaaattgtatcatggagggaacatagataggttaaccatcatgctaca

SEQ ID NO: 90695 - DNA, 398 bp, Glycine max
atgaaagatcattctagcagttcaattgttttagctggagcaaataacgtgtgcatttcattcaaatcagaactattcaacgtgatgctcttacgcgtgtagtacggatatctagcaatgtttatgggaagactgaagtcgcacactatgttactattaaagaagtgatcctttcgcatctatttaatctttaacctttactacctaactacacatacttatagatgctattgattgctatactatgcacgaacatgagccatatatattgatcattgtgtcacgtgaaacatttgaatccatataaagttcccattatgttataaacattggacatcatatgaaatcatcatttcttacatttttttatataagtacattgtagaactggtttcacg

SEQ ID NO: 90696 - DNA, 192 bp, Glycine max
  unsure (1)..(192): unsure at all n locations
agctntagaggatcttatattcaagtggccttctagtggagatggagttttagtaagcttctctgattctatggttatgagcttgctaatgcccttctattatccagtaatgttgctgctttacaatgcatgcggcagctgcttgcttacctccctctctctctcctcttcccaccctctctctccccaccc

SEQ ID NO: 90697 - DNA, 245 bp, Glycine max
cacaaacatatatttcttgtggattaaggaaagaaaagaaaactagaggagcataagcagaacaagcacttctctaaactgcaataagatcaaagcatacctgaactcttaaataaaagaaatatccggcgtattctaccttccaaacgactatacataggctcgactctgcacactacaatgccattcataccaacaccctccctccctctcctgcatccatcccctcgccctaccctcccctt

SEQ ID NO: 90698 - DNA, 472 bp, Glycine max
  unsure (1)..(472): unsure at all n locations
agctagacaatcaacttagattatgtgttttaaaataattaatatagntatatataatattaattcttaatatatattcaatacacatattaatttacataataaattgtgtaacaatttattttgatctagtaatataaatttttatatatataaatttttattaaacttattttttttaataatatatttttttacatatataaattttaaataaaaattatagatttaataaaaaaaattatatatgtaaaaaaaatattagatcaaaattaattatataaatttatatgtgcattaaatatatattagaaattttagtattatatataataatattaattattttctaacataattgatctattactttagttaattctagcttcatgtcaggtcaaagaaaatgttatttgcatacatttctatatactttctacgagatgaaagtattataaattancaaaaattc

SEQ ID NO: 90699 - DNA, 427 bp, Glycine max
aggtgtgcttctttgggcccatgcatactgtctgttcataaaactctggggtgtaaaagcaagaatgaatttatgttggtcatactttgattgtttttgtctgttattattcagctaggtaggaccaaggtatttctcagggctggtcaaatttgcattttagactctagacgtgcagaagttttggacaatgctgcaaagtgtattcagcgtcgactgcggacatttattgcacgccgggatttcatctcaatccaagctgctgctctttctcttcaagcatgctgcaggggtctgctttattgacatttaataaaaatataaaataattcccctttaattactttttataacttgcggccaaaatatatatttctcagatggtggtttttcttgaatataatgcactcacttaaaatgtgcttga

SEQ ID NO: 90700 - DNA, 369 bp, Glycine max
  unsure (1)..(369): unsure at all n locations
agctttgagcanantcgaacgacaatacctttngactcggatgtcggatcgagtcacggaatatgtcgagacactcngaattgaataccgaagttatgagcaacatcaatcgacaataaatttttactcggatggcggattgagtcacgtaatatatcgagacgctcgacatagaataccgcagctctgagcaaattccaacgacaataacttcttactcggatgcccgattgagccacgtaatatatagagacgcttccaactgaataccgaagctctgagcaaatccgaacgacaataaacttttcactcgctgcccgatcgagccaccaatcttcccagacgctccgaatcgaatactcaagctct

SEQ ID NO: 90701 - DNA, 412 bp, Glycine max
  unsure (1)..(412): unsure at all n locations
atcttaaattaattaaaataataatctataattaaataaaatataaacttaatttacactttcaataaatatatatatatatatatatatatatatatatattaaactgtattaatttaagaatatgatcatatttataatcgtttatagtaaaaaatgaattatcattaaacaattcaataattatatacatcactaaagtacacctcacaataccaaagacatgtacagacaaatgaaaatattgagtgacgcttcatccgcatcaatctttagacacaaaatctacgaatcanacaaagaacaacaatggcttccattcacataaattgatcagagacaccaacaacttattntncaaatcgaaattttttcgaggtgtatgcaagagctcatatccaatctggcaaac

SEQ ID NO: 90702 - DNA, 497 bp, Glycine max
  unsure (1)..(497): unsure at all n locations
tactaagctcgttggtcaacatagtcatcgagattcctaaccaaatcttgtttcttaagttgntcccactccacacaacacccttatctacaagtaatccaaaaaataaccaaaacttgtaattggcatactcaccagaacatcaaggagggcaaggggagacctttcagagtcaaaagtgaagtgattctctcgctgcacattctcttcaatgggtattcaaatgtaactgctcatctgtttaagaattttgtgaacaaaaggcgggcaattaaagatttctaaaatatttgattgattaatacaaggctgtttaaggacagacgcgggattaaacggagatactgtgtcaatggttcaatcatagttgaattgtgattgaaccgtcttatatctcttaatatatatatattttaagaataaaacatatataataaaaaaatagaatctaaacgatactaatagttaatgagaaagctatgtttatgagtaaaact

SEQ ID NO: 90703 - DNA, 413 bp, Glycine max
  unsure (1)..(413): unsure at all n locations
agcttatatgatgatgtggtccccgagtttgtttttgtcacctcttttctttagataagaagntaaaatccagcatgaggcaaatacgcttgtatgtggccatggttcagtcatagaaagcttgtgtgaaaattcatagacttcaatctaacattttaatcttttagggcacatttacgaatcaggttttttttttttcacgtgatcagaatatgataaattaattatgtatcctacttattctatcatgttataattcattttacgctacattaatacaatataataatattatcttattgttcatcttatcctattagtttcacatatttttttatcttgagggaggaaccagattaggaagcaccctgatagaataagtcgtctctaatctatgtcgcccctaattatct

SEQ ID NO: 90704 - DNA, 496 bp, Glycine max
  unsure (1)..(496): unsure at all n locations
tagtaaccactaacaagtacaaaccaaccgaaagaaaaantgtttatgtttagaagagagaaaaagtaaataaacatgtagaacaccattccaccaccaaataacacgtcaattaaagaaatgtgattggacagattatatatatatatatataggagagagatcaaattacattaactgtaactgtgattaagtattataccgctcaataatttttaattggataatattgtcttaaaacctataatgggattgaaattgtatttcacttagatcatatatacaaaattttatattaatccaaaattatttgttacctcattcattcagattaaaattgacctaatataaacttttcaaaatatattaaaatatagatcggttgattaccttattatggttcaattgtgacaaanattcacacaaattatcttgataatatgtagatataattcaatggtggatttataaaaanatcacattctacataaaagta

SEQ ID NO: 90705 - DNA, 415 bp, Glycine max
  unsure (1)..(415): unsure at all n locations
agctttntaanacaaacaatagtgctgtttcttatttaaatgntntgccatctttgttatccataaaaaatccacctattattgtgaagctttttaaatggagtaatttcttcttatattcaatccaaaaaaatttcttctttgatttaatttaaatgtttttttatcttttattttctataaaaaaaattccttattattatgacattctttttaaacggaataaagtgtccttaaattaaattcaaataattgctactttgatttgatttaaattttttgtcatcttttattcttcaataaaatatttctattagtacgaagactttaaacgaaataatttaaccctacattaaactcaaataacatggtgcttgatttgattaaatggttcgtggctttattctcataagat

SEQ ID NO: 90706 - DNA, 460 bp, Glycine max
agcttataaatatgtatgtaagctttatatttcaagatattcatttcaatattgtttaagcaactcatagaaatattctgctaaacaaatgttgaaatgttgcaagaccaaattagactttcttctttaatcaagacaagttatttcacaaaactaattactaaaaatgagtgttttacaaaattatttgtttttcatggatgatttttaccatgtaggatataggaggcatcaccctaattggtaccttatgtttttgtctgctctataacaggatgtgcttatccaatacactccatctttggcaaatattgtgtgttgacttaaccaatgctaaactgaataaaaatattatgtttgggatctagccattaaacatgtatttaacattagagataaagcataccaagatggtattgtaaatatgtagctacaaataatccaaccaaagtatgggaat

SEQ ID NO: 90707 - DNA, 141 bp, Glycine max
gcaagagaaattttttctccgaaggaaaaaggaggctggcggggaaaagaaccacacgccggttagaggagggggaacgagccccccggaggagggggggcacccgacaataccgccggaaaaaaaaaggggggggataaa

SEQ ID NO: 90708 - DNA, 365 bp, Glycine max
  unsure (1)..(365): unsure at all n locations
ttaagcgactgaggcatgcaagcttgcacccagcttgccagggagctatgttgcttccttcagaagtaaccgccttctggaggaatattctggaaggcccaagtgggcctggntgctatttgaacccccatttttactaaatacacccccttgctctttntttgtgattctttttccgtaacgctatgaaattttacgaatttcgtaacgatgcttcgtttctttccgtaatgttacgaatccttacggnatacgtaatcatcccttttttgccttccagaatggtacagaactttatggattgcgcactaacacttccttttaatttccggcatgtcacggaacttcacgaattgcctaacgat

SEQ ID NO: 90709 - DNA, 401 bp, Glycine max
  unsure (1)..(401): unsure at all n locations
tctagaattcaaaggcttagattctaagagagcacaaatactagatttatccaaatattctttccaatacaattagcttactcactagcctttcactctaatttgtctttgaccttattacaacaacacacattntctttgattgctcttttttttttaacacacaacttattttttgtgtgtgctgatgctntaccttttactttacatcccaatcaactcccccaaatttggggtaatttgccttgaactatctgctctcctagaatctaaacaaggnatctggagatattcattcaagctcagggttcaattctgaatatgaatttagctcacacagggtgcaaaggatacaactattactcaaggtaagcttcttgtctaatcggtttgtttataca

SEQ ID NO: 90710 - DNA, 467 bp, Glycine max
  unsure (1)..(467): unsure at all n locations
taagctagaatgcagcatgagattaagatcgcttttaaaacaaaaacaaaaacaaactccaatgattgcatgcttaaatttgtttaaatggcccaaataactaacacgtaatacagaacactggcatgccatctgaagatcaacccccaaaacaaggttcagatcaaaacagccatgcccttctatcaccaatgaaacagctggtaaatcacaaaaaacatatattcccaccaatttttcaggaaacattttctacacaatacagaatcaaaagccaccacttttgtatttcaaagatctcatttcgatggcagatgccactttcacaaaacagcatacagacaattatcccatcccagtaattgagatctcatgaagaccaaataganaagctcagctatcatgaatggtagcaaaacaaacgtagaaaactttacaacanaaaacgggtcaggcaagcaactcat

SEQ ID NO: 90711 - DNA, 464 bp, Glycine max
taagcacctgcggatgcaagctatcaaatcatacagcgtttgtctgttcttttcagcactctgaactggaggacaatcctgaccggaatcttcatatccattctgcttacggaaaggcattctctctttaccccatttctggcccttctctttgttggatattccattccactgaaatgtttcctgaaacactcagtttacatttacaagtcaattgaaatatcatgacaaaaataatagcatatctccaacaataccaaagagatgaatcctttgccttctccaaagttctcacaatattacagaactgacatgcaattacaactgtgcaccaaaatctgattagttaatcaatactagaacgtttacaacttcaagctattcttaagaagggttcttcttaattaacatatgctcttaacatatatatatatatatatatatacatacatatatatatatat

SEQ ID NO: 90712 - DNA, 371 bp, Glycine max
  unsure (1)..(371): unsure at all n locations
tgtatggatgaacgcatcttcatcgaagtgaatgttgacaatattgaaatccacttatatgcctcttcaaatgatatggatatagcccttgngttggttaacgatgttctagaatatgagagaaagtggttacgcactgaatgtatggataagtttttgtatcatggttctggtttctctccacctgtagctctgtttgggtctggtgctgagataaaacatttggaacttgagaaacgttccttgagtgttgatgtgtgtcatccaaacataaatgaaattgatgacaaggagctcttgatgttctttgagaagaatacctctggttgcatctgtgctgtgcacaaattcacaggccatacgagggatga

SEQ ID NO: 90713 - DNA, 315 bp, Glycine max
  unsure (1)..(315): unsure at all n locations
agcttgcatcaagaaagcgttgctatgattttgctgtgctttcagaactgaaatatggatattggtgctatgaaggagcatgcaggtacgaatcttgtagcctattttgtactacttttactttgggactgatcacatgttattaaataggcaaagaggatggcctacttgtagttgttagtcaaggtcgtaagtgtncatcccccccttccaccgtactcactgcagatgcttatataccctctcccattcacgacacccccctctgctaaacttgaggatggcctacctatagttgtcaccgttcccatcact

SEQ ID NO: 90714 - DNA, 231 bp, Glycine max
  unsure (1)..(231): unsure at all n locations
tctgcatgtctagagagttctagagagagaaaggtccaagcttcatatagttcgagagattntgttctgtgaagatccacagagaccaaagcttgaagaggaagccgtcctgagagcttgagatgattttgtgagtgattgtgaggtcctagaggtggaggagacatccccactacttgtattcttgaaatctttcatctttcttttctctttgtcgaaaggaagcttcca

SEQ ID NO: 90715 - DNA, 418 bp, Glycine max
  unsure (1)..(418): unsure at all n locations
agctaatcacagtcagtcgcttatttcgttgcgtttncgctaacatcattgcgttgcggcagaaatggagtttcattgacctaagcaaacctcatgcaatctaacgccatttctttacggcaggagcagcgttaagggtccattcaccggtaggccctaattctttggaatggaggaggacctctttcagttatgccggttaagagccaggcttagcgagagttgcaggtattttgttctgcaaaacttactaagtggccctatctccgcgctaagccatgttggatcaagtggcctcagaataattaagaaggggggtcgaattaactatgaacttttctggactaattaacatctatcctctcttatattactagattcaatcatgatttactactaaggtatgagaaagtcaaga

SEQ ID NO: 90716 - DNA, 372 bp, Glycine max
  unsure (1)..(372): unsure at all n locations
cgagggttaaagtctcacgaatgtcatgtgctcatgcatctaattgntagtcgnggctatacgagacatcttgccaaacaaagtcaggttcacgataactcgcctgcgctttctcttccatgctatatgtagcaaagtgattgatccagtaatgtttgatgagttggaaaatgaggccgcaattatactgtgccacgtggagatgtattnttcccctgctttctttgacatcatgattcacttgattgtgcatctggtcagagaaatcaaatgctgtggtcctgtttatctacggtggatgtacccggttgagcgatacatgaagatcttaaaagggtatacacagaatctatatcgctcggaagcatctat

SEQ ID NO: 90717 - DNA, 436 bp, Glycine max
tcaccaccggtgcaaatatcataatggagtacaaccttactttctgatcaacagacatcttctcaggaggattggtttctattagttgttgcacagccgcgaccaatacttgaaagcctgtagcaaaatggattatatgtaatattcttatctcatatttccaaatgaatatgtgcctttccttgagcgtatcctttaatataatctatgccaaatcatacagtattctgtaaacatttgtatgtttgtttaatatcttacaaagttaggtccatgttctcagattccagtatgatgaaaatatgtatagtgtaacgagtaaatagtctatggactaatagtgtaaagtgtttgtacagtcattcaatcacataatgcacgttgttgacctttataagaactaccttacatgctcacatatcatgatttgctaaca

SEQ ID NO: 90718 - DNA, 479 bp, Glycine max
  unsure (1)..(479): unsure at all n locations
agcttgcttgtggagcttctacggaggctgtgatctttgagcttcaatganggcctttaatggtgattttccaccatggagatgcagtggaagacaaaggagaagaggtaagaggcggcgccatccactagggaataagccatggaagaaggagcttcaccaccaagatgagccttggataagaagcttggagaggatgcttcaatggaggaaaagaaagagggagagaaagagagaggtgggatcacgaaattgaaggaagaaaaagagagagaagttgaactttgagttgtgtctcacaagactctcattcatcaaagttacaacaggtgttacacatgcttctatttatagactaggtagcttccttgagaagctttcttgagaaaacttccttgagaagcttctttgagaaaactttcttgagaagctagagcttagctacacacacnctataaagctaagctcacncccatgac

SEQ ID NO: 90719 - DNA, 219 bp, Glycine max
taagctgggtgagactacacgtgagatgaagacgatgttttcttctgtgaacgcggaaacggggggaggttgtgagattcctacgaaaacgtacggaaacgttcggaagagctcggctatattttcttacggaacaattttttcagcacattcaaagagagatgaaggctaaagggcgggatgccttttataatttctccctattataacaaactgggg

SEQ ID NO: 90720 - DNA, 473 bp, Glycine max
  unsure (1)..(473): unsure at all n locations
agctgggctaccataatattcaggatgatttattcttatgacttactaagtaaaggctcaaatcacgagatacctttattcgaaaccatgtgatttctgaaataatgagatttaaatatattttgaaaatgcgtggggattgtgagagattttcaaagtgaaaggttgtgactcttcaccaaggatcatgagatgtgactcctcatgaatagntgtgagatatgactcttcatcaagagtcgaagaacgtatctctttaaaagattaaatctcttcactaaaagacatgagatggtctataaatagaactaatctacatgcaaaaaaaaacaaaatataacaccacccaacaatttctttatatccatatcatcttctttcttccctcgggtgtagaaagacntaaggaaactattgttctgtaaactatcattgacgatacgcttgccgtaggtggcacatcatatcaacag

SEQ ID NO: 90721 - DNA, 433 bp, Glycine max
  unsure (1)..(433): unsure at all n locations
tctcctttctgcnaaaaccttgtctggtttacatataatcttatgtacgatcagaaaggaaacggtatttaaattaagataaatctcatctacaaaatataaagaaacaagatcaaattcaaagtgagtaaatggtgagcaacattagctaagatcaaatatttgataatttgcatggtaaaatctttgtgactatgagtgacaaaaatctaacaatcttggtacatataaaacatcatagaaaatgaaaaaaaaatacatatgcaagacaaataaatcagggcaaatgatcatactagtcaaactttcttgcaggagacattattgcggaatacacatatgaaagtccaaactccacagatcccttcaaataattcgtatcatatattcacaaagaagcatctaattataggtgatattattgcttatcaat

SEQ ID NO: 90722 - DNA, 253 bp, Glycine max
agcttgagatgaggaagtgttgaagggtgttactttctgcttttatcggtgaccacagagtggtacctggagatatgtcgcggcggtcaggagaccttggggacgtcaggtggggtgctattgcccaaaaccaagcttgaccaatcccgacccaacccgggcatagtcggtcagtgagaacctgcgatgtacctaagcaggcgagctcctggcagtccacagatataaggaacatagaccacaaagcaaggag

SEQ ID NO: 90723 - DNA, 170 bp, Glycine max
actagctgaccttggttaaatgatgaacatgattgagactttatgtattgatttgcgcaagattggatgaggggaagtgtggttgtcgaaatttgcattctgtgcagatttttgctgtgaaattgcgcagcacgattttgcacaagtgcagaaaaatgcttgtgtgtgga

SEQ ID NO: 90724 - DNA, 453 bp, Glycine max
  unsure (1)..(453): unsure at all n locations
cacgcacgcaagcttcaaaggagcttacatcatgcggattctcattctattcatctaggngatgntcttttgcttcctctatctttttgatcggcgaactctctgtaattacttcttcttcatcttattcttcatgtatatcctccattgtctagcggttcggtgctgcttacagcacattcataaaaaataaaccgattaaatcttagatttacactcgttcttgcatttctatgggtcaaactttgtagatctactctcgaatcatgtttttgtggtgattttaggttctatcacttttcattcataatattcttgtgctgaaccttagatctaaatcttattccaaaatatcgattacaacaaaaacacaaaaatataacgggaacatactctaatcatgttagcttacagtcatgtctagtcctaataattgtcacactatgttctaag

SEQ ID NO: 90725 - DNA, 352 bp, Glycine max
ggattttagagcgactgagctgcagcttcacagagcttacaattaacttcatatagcagaaacctagcaagactaaccatcatatctcccaaaaccccatacccacgaaaatcaaaggagaaagaagtccacccaaacctgaagtttcgaagtcccactcgtagacacgcacttcacgacttcggaaatgccctccttttgcgatttggagcggaaatgggcaccaaaggttgaagctttgtgcgcaacaatggtggatgggagaaaagaagaagaaggctgcgtgagagagagggagagctcctgaattcttttgttctgctgagcgaggagagagaacagctttcggttt

SEQ ID NO: 90726 - DNA, 431 bp, Glycine max
ctaagcttacagatgatggacctccagactctatccttatgtgattagtttaatgagatggtagcctggctcgggacccaaccttcgcttcacagggaagacgaaggtcccacagcccaggtacctcaacatatggaggatgagtcatctgaggccaccatcccaaagccatttgatataggagaagaggaagaggagacacaggtgagacaggtagttgttaccactcctgagcgatcccttgaggctacttcaaagccttctacaccagtgtgaaacctaccctcacctcagccttgcagagacccctccactcctcttctagagatgccaaaggactcgactacaccagtcctagctatggacacttcgtctccaactacctcagtgcttcagctgacacatgaggaggacggtctgaacatggtacc

SEQ ID NO: 90727 - DNA, 136 bp, Glycine max
  unsure (1)..(136): unsure at all n locations
agcttcaatacttcttttcagactctgnctttcataatcgcgttgagtctcctttttgnggagtatcgcgttgaagccctctttaaggccgattactgacacggctggtctatctctactctcacacacttctctc

SEQ ID NO: 90728 - DNA, 96 bp, Glycine max
tggactcatgagtggtaagttgaggtctaagtggatcgtctcttctgtgtactaacgttttccttatggtacagtgagatcaaaagcgaccctaca

SEQ ID NO: 90729 - DNA, 469 bp, Glycine max
  unsure (1)..(469): unsure at all n locations
agctnttgatgaaaagatgagactcttctcatttgaatttgaatttcaacgttcagatacactggtaatcgattaccaatatattgtaatcgattacaccatttaaaaaacatttggaacgttgcaaattcagttaaaagctgttgaaatcaaactttaccactggtaatcaattataggtaattggtaatcgattaccagaaagtaaatactctggtaacttagaaaaatttgggaaaacttttcttgtaaaacaaaattgtgctatgtttggtttttgaaaaatctttttcaatacttcgcttgtgaagtcttgacttgttgctttttggtttcttctcttgaatcttgaattcatcttctcttgaatcttgattcttcttgatgtcttttctttaatcttgaacttggtgactcaatcttgacatcattcttttgggctttttgtatcatcaaaactacttgaatc

SEQ ID NO: 90730 - DNA, 413 bp, Glycine max
  unsure (1)..(413): unsure at all n locations
tctagccaaatggacttaccttgaattaattcctttgatagttcctttgagccttgtttacctttccttggtttgaagctcactacaagccttaagtgaaaaaccatgatatcaccatatccttaaggaattttggagctctggaattgttttgggaataagtatggtgggttttgtttcattggacaacttgttttgttggctatgcttcatgatgtatnttgggccatacttgatgtacattgtatattgcgtaaatgttggacatgctgaatgaaatgttgtttctcaaaggctatagagtaaaaaaaaaaaatattcgataaaaaaaattccgaaaaagaaaaagacaagcaatatagttgagcgaataagatcttaaatggcacaagaatgatgaaactctcggctct

SEQ ID NO: 90731 - DNA, 490 bp, Glycine max
  unsure (1)..(490): unsure at all n locations
atccttaagcgcctgaggcatgcaagcttaggctgtcaattgcttatattgtttacagaagggaaaaggtctgtgtggtgatcggcaaaggagcataaaccatagagtctggcgacaggtgctgattctttattcattgctagttgngttaccagggtaaccaaggcatctagtttaccttcaagcttcttagtctcacctgatgaagatgaattcatggctacttcatgcactcctctaatgacaatagcatcacttctggcactaaattgctgngagtttgaagccatattctcaattaaatttctggcttcagtaggggtcatgtctccaagggctccaccactggcaacatctatcatacttctctccatgttgcagagtccttcatacaaatattgaagaagaagctgctctgaaatctggtggtgaggacaactgcgacatatatttttaattttcccccagtatcatataggctctctccact

SEQ ID NO: 90732 - DNA, 509 bp, Glycine max
  unsure (1)..(509): unsure at all n locations
tccttaagaagattcctaaagaagctagagcttagctacacatacctctctaatagctaagctcacctccttgagatgagaagctagagcttagctacacaccccctataatagctaagctcacccccatgacaaaaaacatgaaaataaaaaaaaagtccttattacaaagacaactcanaatgccccgaaatacaaggctaaaaccctatactactagaatggccaaaatacaaggcctagacgaaggaaaaacctattctaatatttacaaagataagcgggctcatacttagcccatgggctcgaaatctaccctaaggctcatgagaaccctagggcctttccttggatctctagcccaatctacttggagtcttctagccaatgcccttgtggcgtaggattgcatcattcccttcaccttggaaaggatntgacctcaaataccgagggttctcatactctgngctgcttccctcaacacctgtaaaagaacaaaacacacg

SEQ ID NO: 90733 - DNA, 422 bp, Glycine max
  unsure (1)..(422): unsure at all n locations
agctntgcctcanaacanagtctttccaagtcatccaaggctgtggtaatcgattaccaagcagtgtaatcgattaccagaagacaatattgaaaaaacaacttttaagaagggttntgaaatttgaatttaaaagttgtaatcgattaccattgatgtgtaatcgattaccaacaacgaaactcttgaaattcaatttgaaaagtcataacccttcaaaatataactgtgtaatcaattaccagaaacctataatcgattaccagtgaagaattctagaaaaagcttcttgaaaagacacatctcttcaaaccattttgaaaaggcacgaatgcccaatatatatgtgtgtctgacctcagaaggcaagagagagatattctaagcgaccttcattgccaaaagctctctcaacaactctt

SEQ ID NO: 90734 - DNA, 425 bp, Glycine max
  unsure (1)..(425): unsure at all n locations
agctctgtgcactaagcccaatttcttctctggaatntcatcttttggaggtgggtgatgcaatcctccctaggaagggaccactcactagagccatgagcaagaggctccaagaggattgggctagagctgctgaagaagaccctagggttctcatgaacctcagggtagatttctgagcccatgggccaaggttgggtccaattatctttgtacatattagactaggatgtcattatatttggtccttgtatttagggctccataatgtaggtagggtaccctagaaatataggatttttcagcccttgtattttagggcacctagactagtttttatattaggcgtagttntggaatttcacatgcactaagtgaatatttgatgtgtgtggttggaaataaacttaattgaattggtagaa

SEQ ID NO: 90735 - DNA, 420 bp, Glycine max
aatatagattgtctaataaaataaatatgaatatatacttctttcgctgtggctaatgaaaaatatttacttatactcctccagattgaatgaattcaaatataaatttgaacattctaaaaataataattatttaattacaaatagaaacaataaaagagcatcaatattagttattaacataaattgtttatatagaactaaatttcagctaatttttaaaattaataatgttaagttttctttacatgcataataattattttacgcttattaaatacatatcccactaacattaattgtgactgtatttattgtttcttttaatatacatattatataaaataatattcagtgtgtggctaaaatacgaactttgaattattcttaattaaatggaatattatgtaaatgaatatt

SEQ ID NO: 90736 - DNA, 465 bp, Glycine max
  unsure (1)..(465): unsure at all n locations
agcttgtaggattatggggtacccatctcatgtggtactaggcggcggtcgggcgatggtgcacaacaagttttccacatccacaatgcgcgcataaacccaccatcccctattgcccacctccaactgagctcacgtactcccacgtagcccatatcctcgtttctctcaacaccgggtccccatcaatcctcccaagcttccccaacatcaaagtaatacaacattcacacagcacaagctatcacagccaagcaaaacagggcaaaggtagaaaactctgctcaaaacaccaaccaaaatcacagcttttctcacttaaagaccccaataacaattccttcgatccaattcgttaaccggtggatcgactccaaaattctactggaagtctatagtacataagcctacattntgaccgttgggatctaccagcatacatncaaaacgattctgactactctt

SEQ ID NO: 90737 - DNA, 387 bp, Glycine max
gtgcgagattcctcacggaaaacggtacggtatcgtttcgtttgcgcctcggcttaaattctcttcacggaaacaacttttccaagcaaattcgaaagagagagaagtgcctaaggggctggaccctttccttcttcacttcctcccctatttatagcaaaataggggaggtggttgccgcccagctcgcccaggcgagcagggttgcttcctccagaagcaaccgccttctggaggaatattccagagggcccaagtgggcctgggtgctatttgcacccccatctttactaaatacacccccctctgctgctttttgctgactcctcctccccaaatgcacggcatctctcgactcctctaacgatctatgcttctcttcgcctc

SEQ ID NO: 90738 - DNA, 300 bp, Glycine max
aactaagcttacgtcaatttcgagcgctcgtagtacggacttatatacttcgagaaaagtattgccgttgaattgacagagataacaatcaattcagcggtcgatatgtacgggctaatcaacatcgagaaaaatttatgtcgttgattgctcagaattaacatcaattcagcgctcgaatgtacggactaatagacatccgagacaacgtatgtagtcgaatggtcaacctcacattaatttggcgctcgatatctcggaccaacagaatcgctaaacgtatgctttgattgctcaact

SEQ ID NO: 90739 - DNA, 475 bp, Glycine max
  unsure (1)..(475): unsure at all n locations
agcttagaacaatatactcggccttcattttattgtctttgngctngcgaccacgatcaacaaagtactttcggtacctgctatatgttgacttgaccaacgttgttgggtatgttgcgacaatccttcaacaccttattcacacattctgagaggttggttgtcatgtaaccatatcttcatccagatgtatcgtaagccatgctccatttttcctttgaaatgcgatcaatccatgttgctatggctggactcaattggacgaaattttctaagttctgatcaaacacatgcttgcaaggagtgtacgctgcatcaaatttgttaccatcaaaagttgtaggtagatatgaaactaaaattaacttcatgtataaaataaaccttacccaatttcttgaacatctctntntcgttcgcnngtgttgaattgcaattaaaattgctcgctatgtgcggacgcagtacacatgat

SEQ ID NO: 90740 - DNA, 482 bp, Glycine max
  unsure (1)..(482): unsure at all n locations
gaagacctatanaacctatgtnttggtttgcgtancattattattattgcctataagatgaatagaanaatctttatgttgatgtgatgtgaggattatacatatgcaaataaaantactatcatatttcagaaagtgaaatttgaaatgtaaaatcatactacctccgtaaacataagattcatactttgtaattaagaaagttaatttatttaattaataacatcaaaattgttaataatttataatatttttttaaaattatccttaaaactattggaacatattatctctttttttccatttaatcattttcttcgatcctcataagagagagaatgtacttatctttgtattaatttataacattncgtggaaaataattaaaggtatttcgatcaaataataattaatacaagagaaaatgtaaaaataaacctataaaatgagataattttttgaataaaaaaaaagcttatatt

SEQ ID NO: 90741 - DNA, 458 bp, Glycine max
  unsure (1)..(458): unsure at all n locations
agctnggaacaccaaacagtagatcgcgcttttttattggcacaggcacaggcaagctgaaagtcaatagaatcctagccagacgtatatgcttccccataacaaccaacaactggtggctaaaatatctcatagccttgggaaaaaggaaactgcattagctcaccccctttaacaatttcagctaactcgtactatgatcctatccaattctcatttacaaagattgacaaaggttatatttgtggattttatttcttcattacaatgcccccaatcagtgtaacaggccttaccacaaacattctaggcgtcccatatttgtaaaatctaacaaaaatcattaatcatatcagattgacactgtcattcttgctatacaagatagcaacagctctcaccttctacttgagtagaagctggagataaggcgcccattcttctaaaaatttgatgtc

SEQ ID NO: 90742 - DNA, 328 bp, Glycine max
tacacttgcactcgctttacggtatataccacattaatttactgtgacttgtttcaatccttcaggtttttatcaacgtcccacggcgcgatcttgctttctataccatgatcatatcccttgttgtcttccatgaccaaaagcacatttgtttgtgctgtaccattcaacgcctccgatactctattaagttatgccactgctcaacaatgccattgacaacttctcttctctctcttgctttcattatgacctcaccttctatgtcttttatcaaacattacataggtatatttactctgagcagagcccgctcagatggtggctc

SEQ ID NO: 90743 - DNA, 450 bp, Glycine max
  unsure (1)..(450): unsure at all n locations
agctnttagcttcaatgcaaggaaacattcttattttaaggacctaaattntggttntagaagtagaaaagcatgaaaattaggacttgctcatgagagttcttactcgaatttgggctgccccgtgattgatactttgcgcctaggtagcgtggaaaaagcttttcaatagaatgtagatatatgtgtgaatataggtaccatggaaaacaccttgcaacggtgtgtatatatgtgaacatagggcatgaaattctttgcaaagggtgactgaatattgaggtcgcttcctaaatgaatgtatgatagcatggaattcccttttgaatgcaagtgtggcataatgtaaatagcttgccaatatgcataagtgtgagtgaaacaataaaagtttgtatgatatatatttcaaatatgtgcaggtagctggtaatagcacatgcttaggat

SEQ ID NO: 90744 - DNA, 452 bp, Glycine max
  unsure (1)..(452): unsure at all n locations
actaagcttcatgcttcatgatgatgaatcaagattgattcaagatgttttgattatatcaaagatgatgacaaanagcccaagagaatgatttcaagattgagtcaagacgaattcaagaattaacagaaagattcaagagaaagttagagaaagcttcatcaagaagattcaagattcacgattcaagaataatcaagatccagattcaagactcaaagattcaagaatcaaaagaagactcaatcaagataagtattaattctttttttgaaaacattgagtagcacatgaagttttcacaaaatcattaccaaagagtgttactctctggtaatcgattaccatattgtagtaatcaattaccagtgttctaaaatgttaacatttctcaaaatcaaaatgaagagtcacatctgttgatgtgtatcgactacacctttatggtaatc

SEQ ID NO: 90745 - DNA, 474 bp, Glycine max
  unsure (1)..(474): unsure at all n locations
agcttgtgcatatcaaatcactcccgcattttatctctagcatgcattgtatgtgggtctcgtcctttgtcacgggaagccggaaggtccatatcaccttcttaattgtacacatggggcactgcgcccccaaatgcgcaagtaagaagagataattttccgggctctcgtgtccgtaaaatgcattcatatcatgcatcgcataagcatctcttcataacatcataatggacatatcctgcatttgtccgttatcatattccggcctcacattntgcatgagtcatggcatcatcatgcatatgcgttcaacaaactttttgatctgcaaaattgcataccatctggtttcatgtttgctcatccttgcgttttcctctacaaaacaaaaacaaaaaagggggaagcgtgaaacttcacactacattcttagtttcatgtgttaggcaccacgagccaccatgtcgtgatcat

SEQ ID NO: 90746 - DNA, 137 bp, Glycine max
  unsure (1)..(137): unsure at all n locations
attgaaatattttccgcaggatattaaggagacagctttttctctttangaaagtgagctggatttgtacgcaatgaaactggcaattgtggttgaaaaacttatccagctgaatgaagcttttccgcccaaaccgg

SEQ ID NO: 90747 - DNA, 397 bp, Glycine max
gcatgcaagcttgtggtagaagatactattaccctgagatttctgcgaccgctccaagcacagaagaggaatttatgctttttaatacccacaattctcttaaaaaaggttcagttgcaactgtagcttattgtgtggagtcttcaggttggagctctagcagttcaatctgacttagaggcaaggggaactaatacaagagacggcccaggtgaagaagcttgcaaattttcttaagcaggtgagttaacttcttttatgtgatggaagaatttaattataaataggaaacatcaaaaagaatggagcaaagaaatatgttgctaggttatatcttgtttacttgcccgcctaaagaaatttccttgaccatagctgagagtctagattaattcat

SEQ ID NO: 90748 - DNA, 396 bp, Glycine max
ccagaccttataattccttctagcgttttagggcaaaccagacatgtgtaactgatgcaccataacaactcagcatatgataacccaaaggttgagatgtaatagactcctcaagagacttttttgacaactaagcagccttgtcggcatgttgaacatattaagtcccacctttgattaatgggaagagaaatgctgctacatatatagttgcacactctaatactactatgcaccaacaaagcttgtgcgataatctctccttctttgttgaatacacgatatttattctctagactcaaacatctaattcatcagacataataattatttaagactgacttctcttaataaatgtttgttcatatacactaacttacaaattgaatctatgat

SEQ ID NO: 90749 - DNA, 462 bp, Glycine max
  unsure (1)..(462): unsure at all n locations
agcttgttcaacanatcaaatccatattatattgaactggcgatccggtgactgatgttgcaggaaattttttgtgcaggagattatacctgaaaggaacattctggtaattaatataaactagaaaaagttgagtagaagtaaccaagagaggccagatagccagaccagaaccacccagagttgaaagcctgtgaaaacagtgacaaaaaaataagaacagaggaactaaacagtaaaattcttaaataaaggaaattataaatacttacttattcttgacaaaattgaccttgactcggggtaattctgagaacccaggccaaattgtttcatttggtgtgccaagaattctgaaaatctgcaagtaaattaataaatgctaataggcctacgccacttgaagaggcacgaaatgctgaaagaccaaagtgagagcaagaacttatccctacaagtcta

SEQ ID NO: 90750 - DNA, 406 bp, Glycine max
  unsure (1)..(406): unsure at all n locations
tgcagtctttctccacanantgtgtaatgcaataattcaatctgntgttgatacattgctaagcactttggcttgtgcaatggaatcagtatacgaacaagaaacagtttatgctcttccttcaatggcagtgcaaaaccattaatgatgcgtccaagaatctccaagaactcagcaatcccattgtgcttctcagtctcaaatataaaattaaagaacacattattgatggccttcctgatgaaagggcgatgtgccatgaatttgccatacatgcggtgcagcgccatcttcaagtactcacgctccctcggatcctcatagtcaaacaaatccagcagcttcaaaatgaaggacctggcaatgcatctcttcggcagctttgcatctagctcaggagatgcca

SEQ ID NO: 90751 - DNA, 460 bp, Glycine max
  unsure (1)..(460): unsure at all n locations
agctnttatgcaaaaagattaaaactatgtctgaagttgcgcccactgcaaggagggctaatacaaattgatattcatagactacattatcttgtccaataaagtgtgtgtctatcctcctaacctcaaggctcttcgatttagagttaaggtaggaaataattaatgtaaggggatccaaaagaacttgtataattagcatttgttttgtacggagacaaacgaattntgctgctcatggcttagctaaaggagcaagttcctatgctggttcccattactttggtgattttccatcttgtattgctgatctgattctgaagggaataatataagtatgtttctctaaaaaacagaaacataacttgcaaaataggaggaaggaggcgttgatgagaccaaagacaaaagacaacacatagataagggagacatgaagaagaaaagaaataatattgat

SEQ ID NO: 90752 - DNA, 438 bp, Glycine max
  unsure (1)..(438): unsure at all n locations
tctcagatgcanatggaccctgaagctgctaaagattatgctatgaaacaagagcgtcaaagggctgaggtatatcatcatccctgagaaataagagatcaagataattttcttaacatatgctgtttactgatatatcttgtatcttcatgattaaaatggaaaaattatttctattaatccttctctcacttcccaacttgctacaggaacgcatgacgctgaaacacaaaaaccataatccgtgggctgcacgtattatccagcgtggtttacataaccaagatgaaggaactcgtgctgccatacatgaacaacttcaaaggcatgctgaattgactagaaaaatgaagtctatgaagggtagcagcagtagcagtgaagatagcagtgatgaggatgaggatgacaactctgctggttctgatcaggataggg

SEQ ID NO: 90753 - DNA, 362 bp, Glycine max
cgcacatactatgcacaacactataactcccatgagaggactacgtcagctgctacccgagagcgacgaaaacaaccatccggaattgccccaactgtgatatcccaacaattattcaagcgctcctaacgagagcggcgccctaaccatgccccaactgatctcttcaccttcaacatagaacaaaacaccactttccttgcgtgacaaacacacactacgaaggcaggctccccgactcggctggctccgacactggcagtcatcactaactaaacaaggactaaacccatggcccaaagtctccttggacacctaacatagaaccagcacaatccattgacacacaccaactacccacc

SEQ ID NO: 90754 - DNA, 445 bp, Glycine max
  unsure (1)..(445): unsure at all n locations
tgcttctntcattntcaagnttggctctctgcatgttcctcttcttcttgctgctaaaccttgcccatttcagcctttgtttctccaactcaaatgcttgtgtatggtagcttattcgctgctcctccaactgcttcatcctattcctcatccattgtttcttgtcccaagcactcttacctacgtcttggaacatgccagtcacttcagcactcagttgctgcatcgcctgtggtgacagagaattggaaacccctcctcctactttccttgccctcttcctcattgtccttccatcactctcatcctcaatgtcttcatgtccatgccccacatgacccctcgaaccacctttctccaaatcatcgtcatgctcatccgaatcatcctgcggttcatcatcatcctcatgcttatcatcatcacccttctccncattttccac

SEQ ID NO: 90755 - DNA, 338 bp, Glycine max
agcttgtaattagagatgtaatctatttcttatatatagcattttcccatgaggttttttgttggagaggttttaatgaggcatacccgaattttacattgaatataagtattctttttatcattattaccgactttatagatctgagtagaccaatttgtttctcagactaaatacccaatctgaggcataaataatctgaatagactgaagataactaaattaattggataaaaaaacagaccaaaaaaagattaagctgcttagctaaaaatcaagatcaaaactaaacctagagatttggctcaaattcaatagctaataaaagctgtctaaaa

SEQ ID NO: 90756 - DNA, 76 bp, Glycine max
gagagagaaagaaggggcgagtgcagcacaccagatcctctactaaacgcacaacaacgacgatgcaaaaaaaaaa

SEQ ID NO: 90757 - DNA, 426 bp, Glycine max
  unsure (1)..(426): unsure at all n locations
agctttttctaaaagattattgtttttgttatcgcacatgcatatttgntatcttgtgacagggacaggattgttttaagcaatggtcaaataccgagccaaatccaagatagagatgaattgaggtaaacggtaacgtggccacaatttgctgcgcaatgtcatttcctgcttttaggtacttagggacatgcacgagtggaggctagcctcgtgatcaacaaatcgccatcccacgtccagctccggacaagtgagaagcgctactgngaggcagcctagtatcctttaaattcctacttattattgntgntgcttctttaaggngatggtcggatgcctaatttaccctagaggcttcgagtaagcgaacgctgacccatagagagcgcgtacctcttgtttttcaataaaaatgcaggctta

SEQ ID NO: 90758 - DNA, 304 bp, Glycine max
  unsure (1)..(304): unsure at all n locations
cgagcttagctacacatacctctctaatagctaagctcaccttcttgagangagaagctagagcttagctacacaccccctataatagctaagctcacccccatgacaaaaaacatgaaaatacaaaaaaagtccttactacaaagactactcaaaatgccccgaaatacaaggctaaaaccctatactactagaatggccaaaatacaaggcccagacgaaggaaatacctattctaatatttacaaagataagtgggctcatacttagcccatgggctggaaatctaccctaaggctcatga

SEQ ID NO: 90759 - DNA, 421 bp, Glycine max
agcttagacaaaggaagtggcatcatgcatcaaatgtgaaacaatactacaagatgcttgcattacccttcacttacccttagtgcttatctcaaattggtgtggcgttgaccatcactcaaaatgactcttcattcatcctccaatttgcaggatcccggatgacaagatgcaaatgcatgcatgtttatgattaaacgttaaattcaacaattaaacaagtgttatcgggttcaattttaattaaacgtttgctgaaccccgttgatcgagccaaatggctccggattcattgggcaagatcaagagtgtatgttcttaaggacaataagaagtaaaagacacaacacaggaggttaagatgcaaatcattaacccatttattaatgctgcaattatgtgttacaaaagatcttaagac

SEQ ID NO: 90760 - DNA, 395 bp, Glycine max
tttgcatcctaagaaaaccaataatgtttgtagcccaacctcattacaagccaataaaagttcttctgattcaatttgtgtatttctaactttatggtaagagatgaagtacaaatattggacctcttgttagttgttattgctaaatagcttaaacacatatgattgagttgtgttgcttactaacatgttctcttctctagttaagcatctttccatgaaatttgtctcctacctagcttcaattagttgtgttgcttactaacatgttttctcctctaaaaaactgcatgtcttgtgataagcaattgataaagacattactgttcatttgttatcaagcgattaatactctgagaaccatacacctttgtacagcattatttgatgtctta

SEQ ID NO: 90761 - DNA, 494 bp, Glycine max
  unsure (1)..(494): unsure at all n locations
atccttagagtcacctgaggctgcagcttgaccgaaggaaacaattgcataatgttcacagagtcacagntccaaggtaaggaccatgtgagagagcaggaccatcacaaacggaataaacacctacaatcacaagagaaaaacaaacaaaacatgagaattacactacccaacatgaaaagattataaccccattatacacaggcacttcattctacacaataatgacgatatttattntatccataagagtgacaaaaaaggtaaccccgcaatttccgataaacttaaacttaaactctatggtttgaggtagagcaactgaatatgatactactgggtatctaaaccaataaaatttgaattagaacagtataaactgcatgtattagaacaaaataatgatttgaagaacaaaaattgttgtggataaagtaaattggtacttagaacgaagcatacagagaatgataaggatcttatgacggaaatga

SEQ ID NO: 90762 - DNA, 334 bp, Glycine max
gtcgatgcttcaaatggactacttgaggagtcacctgaggatggattcaatggcgaaccacctggtagagaaccattttcaccctcactctcagtcaccactggtatcttgacagaggctggtcctttcatctctttctcgagttctctctctttacgcaatgcaagaaactgggtatccaaggatttcgccgcagctagccaggcagaaacaatcagcagaagtatcccctccaagtatggtgctgaattagctagtgacacaaaagtcaagatcataaattgctggataagggcacctccagactcttccaatggattgcacacaacatcaa

SEQ ID NO: 90763 - DNA, 336 bp, Glycine max
  unsure (1)..(336): unsure at all n locations
catgcgctgttgatacaaacaaaggctatacttattttcggaaacattggagggaccagattgaactattgcacctatgacaagagtctatgccattgcgagagctcttgatcattggaatcattatttgcgntctaatcactttatattgcatttagatcatgagtcattgaagtatatcaatgggcagcacaagttgagtccatggcatgctaaatggcttgatctcttcaaatctttaatttctctcaaaaacaagatggaagagaatgtggggtgatgacttcaggaggatgcttaattcattctgaactcgtacttggttgaacttgaaga

SEQ ID NO: 90764 - DNA, 475 bp, Glycine max
  unsure (1)..(475): unsure at all n locations
agnctaccctataaagntctctaaaagtgtctgttgtacttggtgtctcaataaaaaacaatgcttcttggcagtccatggagatgcaccacttccttgaaaaataggtcaacaacatggcaagcatcatcaatcttcttgcaaggtataaaatgcgccctctttgaaaacctgtaatccacaacaaaaatggaatccttgtcatttcttgtatgtggtaatcctaaaacaaagcccatagacaaatctatccaaggacaatcaggaataggcaaaggagaataaagtccatgatgcttgatgttagacttagagttcttacaaacaatgaaattctcaaaattnttttttacatcatgtttcatatgaggccaaaagaaatgctcatgcagcaagtctaaagtctttcgaacaccacaatgctccattaatcccnctctcgcgtgcgtctttaaccgcaattctcttatggatc

SEQ ID NO: 90765 - DNA, 450 bp, Glycine max
  unsure (1)..(450): unsure at all n locations
tggccgggtgtntgctccacctcactcgacggaaattaccttcttgtgatagcgcccatggtccaagagcccacagacgtagccaccctctcgaatgaagtggattctccggcggtaaaaggagctaaaatgaaaggagatcttcatagaaagacggtgactttggaagaggctcatgagttccttcgtctcatccaacaaagcgagtttaaagtaattgagcaattgaataaaactacggcaagaatctctctgctcgaactggtcataaacttcgagcctcatcgtgcactgttgataaaagtcttcaacgaagcccacgtagcacacgacatctcagttgagggttntaaaggcatcgttaatcatataaccaccaataactatatcgcgtttgcggaagaagagattcccgctgaggggagaaggcacaacaaggctctacatgtg

SEQ ID NO: 90766 - DNA, 451 bp, Glycine max
  unsure (1)..(451): unsure at all n locations
agcttaggatgattcgccacacagaataatattctttgataaaaacctaagcgtccgaacctacccttcgacgggagggcgacgcgagactcacgggagcgtcttccaaggaaggaaaacgcgcggagtcgccaccaatgtttatttaaggaatacgtcggaaaaaccggaaaagacgtggtctatgaactttaagtgaaaggtttgggagttgtatttacgcacggggaaggtattaacaccccacgcgtccgtcacaaaggacggcaacctttaatcaagtgtgcgaatatgacttcaatctatgttacgttcttatgtctttttatgcctttctatattcttcatctttttgaggccgacaagggtgtttcccttgctcttacgtatncctcaactgtgattaggaaatcagacctacgtagttctttgagaactaagctttggttaa

SEQ ID NO: 90767 - DNA, 398 bp, Glycine max
tatagcacaatcaactaccacagcataatgttttttatattacaattcttaatgatacatttatatggttagccaagtggacaaaatgacccaataatttgataagaaccttcggacattgtcaccgcactgattaaaaacttaataagaagagcaacaaactaaggtagagctcataccttgctaactggcagcgtagaaagcttcgagctttgagcacccatgactgttccaagagcagtgtaggggtttctttgacccacaatttcaacagaaatgtaaggctttcttcgacttttctttgataggaggatctgtgggttccagagagcggttcacgacagtattgaaatgaatgtggggcaatgtgtgtgtcaaccgagcgtgttccgatagat

SEQ ID NO: 90768 - DNA, 337 bp, Glycine max
agctttgacatctcaacctatcacataattttcttgttgtgagctgaacttgactggattgataggcttgcgcacattagacttgccaaataacagattctatggggatattgggttgaatttcccttccatttgtgccaatttagtcgctgcgaatgtctcaggtaataaattgactggtgtgattgaaaactgctttgatcaatgtctcaagttgcagtacttggatttgagcaccaacaatctgagtggaagcatatggatgaagttttcgaggctcaaagagttttctgttgcggagaaccatctaaatgggactatctctctggaagctttt

SEQ ID NO: 90769 - DNA, 466 bp, Glycine max
  unsure (1)..(466): unsure at all n locations
agctngnagggacggctcggctacaataattcattggttcttctaggattcaaagatttagattccaagagagcacaaatcctagacttatccaaatgatcttttccatacaagtagctntctcactatcttttcctattactttgcttctgaccttattataacaacacaatttttttttctttcctttnttcttaacatacaacttatttgttgtgtgtgttgatgctttacccttttctttacatccctattaacttcactcccccaaatttggggtaaatttgccttgaaccatatgctctcctagaatctaagcaaggtatctggagataattatttaagttcaagggctcaaatcttgacaatatcattcagctcataaagggtgcaaaggatacagttatcattcaaggtaagctntttggtcaaaaggcttggatatgcacatcatggtcgtcatcat

SEQ ID NO: 90770 - DNA, 332 bp, Glycine max
ttttttatggcagacattatttaactataccttgcttcattcacatgatgctgcttcttttgtcaattaaatgaaaagggtgggtagcatttgatccttatgattccagatctaagtgaaagttgtgccaaaatttttctaaaaatattttaactgataacattcaaatgaagtagcttcattcgacaattaaatgaaacgagtgggcagcacttgatccttatgatctcagatttaattgtacgcgttgcttgaagtttttataaaaagtatattttgtctttttaactgatatgtcattcacatggtggtacttcatctgtcagtaaatg

SEQ ID NO: 90771 - DNA, 469 bp, Glycine max
  unsure (1)..(469): unsure at all n locations
agcttataagaacaaaatagcctctatcttttccaaatatgcatgtgaattaggacgcatcaacaagaatcaagccaaggctattgtgcaagcaatcaatggggcaaaacacaccaaatgattatgatgatggatggctcaaattctcacaaaggtaaactcatcactttcaaattgagctttcaaaactatcatgacatgtagagaagaatcaaggatttcaagtcacaaaatgtcaagaactcttattttcaaaacaattacccatttcttgaacatatcctataattcaaagaaaaacatgcaaattcgtacgtgcacacaaaattgacccataatattaaactgaaaatccgacgaaactaacaacattaacatattaacacaactaacatnataacaaaaccaacaaaactagcanaaccaaagaacactcccgcccatacttaaacaaacactgtcctcaatg

SEQ ID NO: 90772 - DNA, 462 bp, Glycine max
  unsure (1)..(462): unsure at all n locations
tcttaaaganaaatccatatgagttatatattggaaganaacctaacatttcacatcttcatgtgtttggatgtaaatgttctatgctaaacaatggcaaagataatttaggaaagtttgacactaaatccgatgaaggtattcttcttggctattaattgtaaacgaaagcatttagaatttataacaaaagaactatgattattgaagaatccattcatgttgcttttgatgaatctaatgcaattttgccaagaaacgatgtactagatgatatttcaaaatcattagaagaaatgcatattcatggagaagatcacaaggcaaaggagatggaaataatgaagattttcacattgatgaaataaaaatagatgctgatcttgaagaagtggagagcttttatatcatctcttgacagatattgggaatatcaaagggtaacactaacactctctaata

SEQ ID NO: 90773 - DNA, 293 bp, Glycine max
aaaaaaaaaaggggaatgtctctgcagcgaaaaacagaaacagaaacgggaaccattgtgcacaaccgaaaggagagagagagaaacaacacggcaacgccaagggccccaaacaaggcaagaggaaacagagcgggaagaacggcaaaaccagggaaacaaggcgcccccaacgggggaaccccacacgcgaggaggaaggagaaacaaggggggagccgcagacagagaggaagaccgcgaccaacaaaccgggcggggagcgcccccccccaccggcgaagcaggcacgc

SEQ ID NO: 90774 - DNA, 429 bp, Glycine max
agcttatggactctgaaagcaaggctgtgttgatggcatgggagaatccgctgatggaggctcatgctaaggcggtttgttccggtggtggccacgtactcaatattgggtttggtatggggctcgtggattcggccattcagcgatatgcacctgcttcacacaccattgttgaggctcatcctgaggtttatgaacgcatgcttcgctccggttggggccagaaggaaaatgtcaagattgtttttggacgatggcaagatgttctgcctcagcttgaaacatatgatggtaattgctattcgtctaatctttatcttcataaacgtcaatgctcgattgcagcattacacatactattacaattgattggatattcttctctgaaaaacatagcaatggtactttatacccgtaagtttctaactt

SEQ ID NO: 90775 - DNA, 447 bp, Glycine max
agcttgatgaacaaaagagaagtgttgtgtataatgatagtaagctggaagcagaggatgtggctctgccccagagaaagagaatttccttgagtaaaatatccgagacatctgtgtggatcactggtgaaagtgggtctatctatgagaggctttggaatggaatggaatgcgtgattgtccctcatgacttgcccgtatcagcaggaagtgccatatcaatttttgtcatcaatcagacgattcttgctctatcagaagcaggaaaattgtatcaggttagaagcatctgttaagttagaagatacatgccaagcatcatactatgttaaatgttctcatcaactgtagaacttggattttatccttatatttctctgggcatatcaactctctttcaagtatgtagtcccggtcaatctctacctgacatgtaaccacattttt

SEQ ID NO: 90776 - DNA, 332 bp, Glycine max
actagcttttaggaagaccgattcatatactttgttttgttgaacatttttcttccaataatcttgattgttaaatggtaggcagcatctttagaatttggactgatttacatgaaccaaagatacttaaaactaagagtaatgaacatatgcaaatgcaatatgacctttttggcaagacaactggttacactacctcgagttgcgtatactgaaaaagttatatatactaggaaaaaagaacagtgtacctcaagtgtagaaatgagttaagattatgtcaaatgacgacagaaaatttataacctaagatgacaacatgaaatagaaaa

SEQ ID NO: 90777 - DNA, 186 bp, Glycine max
agcttgccacccagctcgcctaggcgagctcttttgcttcctccagaaggcaccgcggcgccttctggaggaacttcctggaaggcccaagagtgcctaattgttatttgtacacccttgtttactaaatacactccctgcctttctttcgcgactctctttccacgtcgttactctcactctacg

SEQ ID NO: 90778 - DNA, 468 bp, Glycine max
  unsure (1)..(468): unsure at all n locations
nttaatgaaaggatatgactcttacaatcgatcgtgcaattttctttctgatacactgggaatcgattaccaatacctttgaatcgattacaccattttgaaatcaattagaacgttgcaaattcagttgacagctcttgaaatcaaactctaccacttgtaatcgattacaggaaactgtgtatcgattaccagagagttaaaactctcgtaacttataaaatttcgagtaaaactcttttgaaaaacacaaatgcgctatgtctgttgtttgaaaatcattcaatacctctcttgcgaagtcttcttgatttcttctcttgaaacttgaattcatcttctcttgaatctcgaatcaaacctctctcgattcttgaatcttcttgactcctctccttgaaacttgaaactaacctgatcctgaacctgttgactcaatctcgtaatcaatcttcgcgactttgtatc

SEQ ID NO: 90779 - DNA, 448 bp, Glycine max
agcttagcttaactcttctatgtctaggcttacttcttcagattgcaaagaaaatttggtccctatgagatggcattctgctcaaataaatctaatcttagaatattcaagcttttatcaagaaaacaaaataatggtgaggctttgtccctaaaacattagacaagaaattggtttaaacttagctggtaggagaactggtaatggtatatatatgaaggggcatttgtcgtggcacaaagcaaagtgccagcagaaatcaacagcatagccactgctaaaagcatgtcgcaatatctacaatctacatactgattaaaagtgaatggcaaaaaatcagacccccatatatgcgagcaccctgtaacgcctccatttaaaacagtaattagacacttggaacatattacaaagacagatcctagttactgcaacactctggaaatag

SEQ ID NO: 90780 - DNA, 295 bp, Glycine max
tttaatgtcatctatcattgtttattggtggtctttcacttcatgacaatgcttattctgaggtactattcctacttaaagatgttgctatttaaaggtcgcttattttcagagaacgctttcttttttaattgttatttttcttgataattatgaattcttcaccttttcaatttatttttaattaagaaagatctgtgcaacacaaagagaatatataacaaaaatcgtttttagtgtttacgggataaattaatctttaaaacagggaatatgattaatgtgacagtcaaaa

SEQ ID NO: 90781 - DNA, 466 bp, Glycine max
gacactataaaactaagcttaaggctaacgctgctgtctctggtgtaaaaggaggacgtgtatgtctcgtgagggccatggcaacttacaaggtgaagctgataactccagagggagagcaagaatctgaatgcccagatgatatatacattcttgatcaggcagaggaaaatggcattgatcttccctactcatgcagggctggttcttgctctgcatgtgctgccaaagctgtgagtggcaaactggaccagtcagatggcagcttccttgatgacgaccaaattgatgcaggatgtgttctcacctgcgtcgcttaccccacctcagatattgtcaatgagactcacagggaggaagagctcactgcttaaataagaactctcatctgtactttaaatgacaacatatgtttgatgcattttggcttcgcaaatctattgactaaataaatcttgcagtgagt

SEQ ID NO: 90782 - DNA, 393 bp, Glycine max
  unsure (1)..(393): unsure at all n locations
agctntaaaagttgcggtcactcataacttttcttanttgattgccgagaaaactaatggaaaaacgagagtgtgtaatgatttttgcttttcgtcttgcatgaacatccttcagtaaaatgaacatttctctctatatgattaactttggattttgagtcataccgcatccaaatctagacatacatgactttttatactggtaaagcttataattttcttttatacgataagtataagttatgcaatagctttataaattctctatagaagaaaacaatgtaaacttgagttctaatacaaattcttaatcagataaatatatctatgtataaatttgcgttgagttggattacatcgaatttcaaaatgaaatctaaaatctgattctat

SEQ ID NO: 90783 - DNA, 455 bp, Glycine max
tgactggatgtaagatacatcttcttcaacctttgtcattcttgactctcatttattgaagcgcatatccacttgcaattccaaagtatcaaacctctcaccaacaaaggtttgaagaccatcaaacctttccataatcttcgaaagaagagatgaatcttctccttcatgtccttcttcaccaacatttctagcacccttcttcacccaagagccatcatgctcctttatataaccaaaggatgctatgactgaagcgcctataaggaatgatctcttgattggaacataaggttcagaatcaagagggatgttgaagtgttgaaggaaaagggtaacacgatgaggataaggcaatgcggcattcaatcgcaatgccttatgcatgcgatatctaacaatgtgtgcccaatcaatttgtaacccttatgaatgccgacatgacaatgagatct

SEQ ID NO: 90784 - DNA, 393 bp, Glycine max
  unsure (1)..(393): unsure at all n locations
agctttagggctggataactatataacatcttctatgtctctagtttaggctctctactctttctcctttattttcggttttggcaattccagctctgacgnttagttttatcaatataatttcgttcttcaatctataatctcgctctctattgaccaatggaaggctacgtctccagaggcgttttctcttgaggatcagacacagntctctttgaggntctattattactgttaaattcttttcagcttttcctcttcactaattactctgaatttgttgctattaattcatgcatgcttagtgcttgattaattgtctctgcgcttaatttacattcatgcttaatgatcgcttatgagtacttgctgtatgtgttgcttaatcacata

SEQ ID NO: 90785 - DNA, 328 bp, Glycine max
tattcaaggcactctcttggtggcgaagctgcgccttccatggtttattccctagaggacaggacctcctctcacttcttctcccttatttcgctggatctccataattgaaaatcaccactgaaggacctcatctgagctcaaagatccagcctccatagaagcctctcaagcaagatgccatcaaacactttctcatagaactactgcttcaatgtgggccaaaatccttctttattcatgcactgcgcgcttggtaattgaaatgcgcctaggcacggcatgaccttctcgcttaaccgtgggtattgcctcacttaagcgaggc

SEQ ID NO: 90786 - DNA, 430 bp, Glycine max
agctttcaagatttcatcaatgatgctgattaaatggctgaagctgaagaagatgatggaaggcgtcatagaataaaagaaagggtgatgcggctgagagaagcagcttttcgcatggaagatgccatcgatgaatataacatctcctgtgaggataagcaacctgatgatcctcgatgtgcagctttactatgtgaggctgttgacttcatcaaaactcaaatccttcgccttcaaagtgcgtacaagattcaggatgttaaatcccttgttcgtgctgaaagagatggtttccaaagccattttcctttagagcaaagacaaaccagttctagaggaaatcaagatataacatggcagaaactttgaagggatcctttctttattgaggaagatgaggttgtggggcttgatggcctagaggatattg

SEQ ID NO: 90787 - DNA, 330 bp, Glycine max
  unsure (1)..(330): unsure at all n locations
ctaagctgaaacgcgcgcaagcagcgtcaacaaatatcctctagctgacacgcgcactagccggattacaccctagcgagggggcacgctgagcgccctacaagcccaaagccacttagagctataaaanagagcagccaaagggagaacacacacacaaacccccttctagggtgcatttattcttcttttttacccctctctattgaaagcctcagacatgagggtaaccttattaggctggaggctaaagcaagcgagatgagattcttactattataagaaacaggtttcttcctattcctcccacctattcgcaatcatctcaat

SEQ ID NO: 90788 - DNA, 467 bp, Glycine max
  unsure (1)..(467): unsure at all n locations
agctntaaccgatcgtttaagccgttttctcacctaataaatgataaaatgaatttcaaccgatcatttacgttgtaatctcgtttaatcactgttaaaacaaaatctaaccgatcattcacgctgtaatctcggttaaacaaaaaaaaagcaaaataataataaaataaccaaatatcttgaaaaataataataaaataatcaaaatatctttgaataaaataatcaaaataatcaatcggacgctcttctttggaaatttccttggatcaattgactaataaccaaagtgaaactaaggctaaaatcaactcacaaatcaagctctgtctgcaaaaaatcactaaaaaccgttntaagggccaacgccttaaatgatcctctntgcttttatcgattaacatggatcgttcaaaagcataaaatcaacatgtaactttacaattggcgaaactacgtacgtctga

SEQ ID NO: 90789 - DNA, 452 bp, Glycine max
  unsure (1)..(452): unsure at all n locations
ctataaaactaagcttggtgattagttttgccgacaaaggatcaaagtgggtctaaattaggcaaattcgattatcctgctttgatgaataggaagcctgcggaaaatagagagaataagaaggagggagaaactcatgttgtgcctaccattcttacatggccaaattttccattagcccaacaatatcaatactcggccaatatcagtccttctcattacccaccaccctaccagccatgaacgcccaatcatccacaaaggccatcgccaaatcgtgcacaaaatccaatcgatgcacatccaagaccaaacaccacccctaataccaatcaaaacaccaaccagggaaggaactttccagaaaagaagcttgtagaattcaccccaattccaatgtcatatgctgacttactnncctatctgctcgataatgcaatggcagtcataac

SEQ ID NO: 90790 - DNA, 419 bp, Glycine max
agcttcatagggccgaaagggatgtttctttttggatagcatgatactagaggacaagttgaaggattgtcaaaggtcgaagaggatgttgaccgaacaactgagtaagactgaagagaatatgtcgacaatcatcgaccagtataaagagaagctgaacctagctgctagccataagcaaagactagaggatgagcatgcaatggtattagctctgcatgtggaaagggaagtaagagagagagagcgatagaatcattgcatggaaaagctatgaaacggatggatagcgtcactctcactttgaatgggagtcaagaactctcaagactgttagctcgagcctaagcaatggcgaacgtatactatctccaaggaagtcataggcttttgactattgcagatatgatcagtgatct

SEQ ID NO: 90791 - DNA, 413 bp, Glycine max
  unsure (1)..(413): unsure at all n locations
agctaanattcattcacacacgccggtatccattatcagatnctatctcggagaaaaccggctgtgaagtaggccacttgatcatgaaaaatcgcttaagtcccaatcgggcaaaataacctcataaatccctttcttcacaaatatataaaggagaccactaagccttatgagcaccaaagaataaagtggacttagacttcagcgcatagccncttataagtaatgttttttatcttgcctagagtttgcaaacttagggtatataaagttcgtgcgagctagtcaaagcttgtctctatgctttctaggtggagtttttccactaccttttctaagatattttctctcttagttctgtgggcgcactactttaccttatcttaggaactagatatctcatcttactttac

SEQ ID NO: 90792 - DNA, 314 bp, Glycine max
agcttgagatgaggaagagctgaatgttttttcttctgctcttatagctgaccacagagtggtacctggagatatgtcgcggcggtcaggagaccttgtggacgtcaggtggggtgctattgcccaaaaccaagcttgaccaatcccgacccaacccgagcatagtcggtcagtgagaacctgtgatgtacctaagcaagcgagctcctggcagccaacagataataggaacaaagaccacaaagcatggaggcttgcggtggctggccagctgcgaaacttgattgatatgtgagatatcggctctggcaatc

SEQ ID NO: 90793 - DNA, 385 bp, Glycine max
  unsure (1)..(385): unsure at all n locations
nttcgattcgntctacgtacccatggtggtccacactgtgtttcgcgtatcttcattctcatttcatttactttgtataccccctgttgacgtgcttaagccattttacttaagtcatttctcgcttaacttaaaaataaaataaatttccaccgaacgtttgaattgtattatccattaacttcggctaaaatgaattccgaccattcggtcgtgccgtaaccatgttggaaatcaaaaaaagagttaataaatactataataatacaataaacatcctttagtaaaataaagcggaaaatcaatcggacgctctttctctgcgactcttcactcttaatcgaattgactcaatatctaatgagaaactaacgctaaactcaac

SEQ ID NO: 90794 - DNA, 469 bp, Glycine max
  unsure (1)..(469): unsure at all n locations
cgatccttagaagcgcctgctgcatgcaagcttctttctgcatcttacttgcttcttctatctcttatcataatccaaggaagtagtgctttattntcatactttgaaccttaggatagacgatttcttgctttgttagcttgcattgctgtttaggttagggtttctagctttagggtttgctattttaggatttgggttgagttgtaagcccattaggggcaatgctgctaaaaagggtgaggacccctctgtttctgctggaaatcgctatgaacgcgctaagcgcgcctgctgcgcttagcctgttcatcgcatatgaaaattttttggaattccagatgatcgcgctaagcctgaccatgtcgcactaagcacgttcatccttctaatgagtttcagcaatgagtatgctaagcacgtctgtgcgctaagcgtcactagtgtttcagacacttagaattttata

SEQ ID NO: 90795 - DNA, 335 bp, Glycine max
ctcatctatggtatgtgcagaaccacgtatttattgagtctcaaaacgattatcttagattcaaaaggattgatctcattaatgaagcagggtctaattttctattcaaatttacattggtatgtgttaatacagggggatatgatacacataagtgtgaaaaaggaacactttattgttaggagtttatgttgaagcaaggaagtacctatatgatgaacaatctcaaggtaggtgctaatccgcgccaatacaaagattgtgatcatgcctacaagctacaatccatcggttgtacctttatcatagagcaagctattctagatgttcccatg

SEQ ID NO: 90796 - DNA, 436 bp, Glycine max
  unsure (1)..(436): unsure at all n locations
agctntgtccgcaaagatcactgtatatctttnttaaggtccaacaccttaaacagtcctctttgctcttatcggttaacatggaccgctcaaaagcataaaaaatcaacacatcactttactgccttttgaaagaactacgtaggtctgacttcctcttcgatggaggatacgtgggagcaaaagccccgcttttgtcgacctcaaaaataaaaagagacaaaaaatttagatacatgatttcacacaactctaatctaaggctgttgtcctttgcgacaaacgtgaaaggtgctaatacccttctcaagcgtaaacataactcccgaatctggaatattctttatgacagatttcctctgggttttctaacgtctttctcttaataaacgctgcgggngactccgcgcatcttccctccatggaagacgcacct

SEQ ID NO: 90797 - DNA, 486 bp, Glycine max
  unsure (1)..(486): unsure at all n locations
gacactataaaactcagcttgaggattatggngtacccatcacatgtggtactaggtgtttgtcgggcgatggtgcacaacaagttttccacatccacatagcgtgcataaacccaccatcccctggtgcccacctgcaactgagctcacgtactcccacgtagcccatatctttgtttctctcaacaccgggtccccatcaatcctcccaagcttccccaacatcaaagtaatacaacattcaaacaacacaagctatcacagccaagcaaaacagggcataggcagaaaactctgcccaaaacaccaaccaaaatcacagcttttcacatacaaataccccagaaacattgtcttcgctcccattcgttaaccggtggatcaactcgaaattgttactggaagtctctagtacataagcctacattctgaccgttgggatctactagtaaacatccagaactcattctgcactactctttccac

SEQ ID NO: 90798 - DNA, 234 bp, Glycine max
actctctacgaacgcagatatgtctcttgtctttactcactaacctctcctgacactacattctggtgcgccctaatcttcatcgactacactatgttacatcaatactgaacttgtaaactcactgattccttcggactgactcacttactctttcgctaattcatcattaatctcttccaaacgtgatatattctagacggtctcacaatcatacacttacgtaatcattat

SEQ ID NO: 90799 - DNA, 389 bp, Glycine max
agcttatttgaatattgatacttgagtgtcttctctcatctatatagatgaaaaaataaaaacatgtttgttgtattgtcttttattttttcacataacacgtgacaaccagatacttcttggtagcacgtttgatacgtcatgtaagttatcgttttcttcattgatcataaccaagttgtcgtgagagcatcctacctatagtatcagggtaagggtatgtactcccatgatgtcacccaaataaataaatgaaatatgtaagtcatcaatgatgacatgtcaatgaggcgatcatgctcgatgtagtgaaccaaacatgtagtcaaaagataggaccacgagtgtgcatgcatgtcttcacccgtaggaatactatctgtttgtga

SEQ ID NO: 90800 - DNA, 325 bp, Glycine max
actagcttaatggatcttctttctgcattctcagttgttaactatgagtcattggtctgaactttccaaaagtgcagaacagtagaaggtctttgattctgaattgtcgtacctttggtcattccctgcttaaacatctcagaactttgttaataagatcttcattaggaaatatctttcctaatgatgcacgatgatttactatatgtgtgaatctcttttgcatactctgcatagtctcattttgattcattctatacaattcatactcatgggttagggtatctattctagatcattttacatcagttgttccttcatcggc

SEQ ID NO: 90801 - DNA, 350 bp, Glycine max
  unsure (1)..(350): unsure at all n locations
agcttgcctcaaagaggtccaggaaggacatggctttcgaaggaactagntccgctccggagtatgacagtcaccgctttaggagcgctgtacaccagcagcgcttcgaggccatcaagggatgggtcgttctccgggagcgacgcgtncagctcagggacgaccagtatactgatttccaggaggaaatagggcgccggcggtgggcatcactgggtacttccatggccaagtttgatccagaaatagtccttgagttntatgccaatgcttggccaacggaggagggcgtgcgtgacatgagatcctgcgtaaggggtcagtggactccgtttgatgccgacgctatc

SEQ ID NO: 90802 - DNA, 278 bp, Glycine max
  unsure (1)..(278): unsure at all n locations
ctagatgantatgggtgggtataacagcgctggaaattgtgttgtatgtactcattgcattctgatagatgtagtgtacaatatataagccaacgctgtctaattctgtaggacgaaagcacgcgagggtctacttgaatgcaaggagcttggtttatcacaaaacgaatcaaagaagctttcgccgattgtggatgcaaattcatcaaatcacgctgaattttatctgaattctatttattagcacactagactatggtcatatactgaaccctaat

SEQ ID NO: 90803 - DNA, 299 bp, Glycine max
actaagatactaagcttgtctagcgctatgcgagacggagaccaacacgctagctatcatcgtcaagtaccaagaagagttaggtctagccgcggcccacgagcataggattgcggacgaatatgcccaagtatacgcggaaaaagaggctagaggaagggtgatcgactctttacaccaagaggcaaccatgtggatggaccggtttgctcttaccttgaacgggagtcaagaacttccccgattgttagccaaggtcaaggcgatggctgacaccactccaccctcgaagagattca

SEQ ID NO: 90804 - DNA, 426 bp, Glycine max
  unsure (1)..(426): unsure at all n locations
agctntgcgtgtgattcacgaaagatgatgtgttttatgacaaaagataaaatgttctacaacatttaatttattagttgnggatggatgggtgccaattcaactagattgatcctaatccaaagnttcttgcatgttctatatgtacgtggtttcagcttatgaattgcatgcgaagcttttgccacgtagagtgtgaaataacattcggtattctctcctcacgtatataaaaaggctacatatagtgaacaccctcgaagcatttgagactaactcttagagagaaaaaaaaatggctgatacaggtggaggagatgcagtgagaccagtggtaatatgtgataacaagtgtggctgcacacttccatgcactggtggtccacttgcaggtctcttaagntcatgatctcaacaaagtaactt

SEQ ID NO: 90805 - DNA, 436 bp, Glycine max
  unsure (1)..(436): unsure at all n locations
tactgganacacccgattgctcttnccaagttccacttcaaggcttgtaaggttttccttttcctttccaatacctactgcttctacaagaacgccaagtccaacagtagacttcatagataaaatgtattcttctagagaagatctgccctccacatatgactgacaaacctgattatatagataaaatcaatgtgagactgaagcatgtaaatgtgacaactataatgataagaaaattaccattggcaacacaagttcaaataatcattggtacatcacaatagcataatattaataactcaatcagctattccaccttaattaccattgtatctatactctanaaagcatgtcatattaacanagtaagatactctgtaaataacaaagctttcactttccaacattaaatggactatgcgaaaacaagcta

SEQ ID NO: 90806 - DNA, 353 bp, Glycine max
  unsure (1)..(353): unsure at all n locations
agctntcattnttcaatttcgagcgnctgtttacttcatccgcatgaatcgaatttccgtgtgacaagntttgaccatttgaatttctcgagagctctcgctgttcaatttcgagcgtctcaatagagtatgcgcctaaattggacttctgggtgacaagttatgaccattataatttttcgagagcattcgttgctcaatttcgagcgtctcgatatattatgcgcctgaatcggactttcgtgtgacaagctatgaccattnttatttctcgagagcttccggatttcaagttacagcgtctcgatatgtgatgcgcctgaatcagacttccgtgtgacaagttatgacca

SEQ ID NO: 90807 - DNA, 257 bp, Glycine max
  unsure (1)..(257): unsure at all n locations
aagcttntcgatatattatgcacctcgaatagacttacatgtgatatgntattttctattgaattgctggagagcttccgttgtgcaatttcgagcgactcgatatactatgcacccgaatcagacttccgcatgacaagctatgaccatttgaatctacggagagctttcgctgtgcaatttcgagcgcctcgatataatatgcgcccgatcaggacttccgcgtgaaatgtatcaccatcagaacttcttgacag

SEQ ID NO: 90808 - DNA, 71 bp, Glycine max
tacgctgccctgcccctcacttccatcctctccccttctcctctttccatcccctcgtaccccactccctc

SEQ ID NO: 90809 - DNA, 330 bp, Glycine max
tgtgtcacacgtgaacaatcttagtaccaagggccatatgtttgtgattgtaagcaccaacatggaatggtatcgtcattaccatgagcaaaggcatacattttccaatcgttttgtgagagaggtgtctgaccatgttgacagtcaccgcgtatgcgaagaacccgcaacagagctgcaagcagtggtgttgatatgacgtgaaaccttggacgcttaaaactgacatgcttatgttaatgataggacaatgagactcgaatggcccatgcggcttcctcacatagtaagccttggtgatcagtgagaatatgttgactgctattacac

SEQ ID NO: 90810 - DNA, 447 bp, Glycine max
  unsure (1)..(447): unsure at all n locations
agcttgctaacccatggaagctcctatatatctccacacttnttggggagggccattcttggatggccttgattttctcagggcccacttggaccccatttctaccaactacaaaacctaagaaaactatattatctacacaaaaggtacacttctttatatttgcatagagggtgtttttcctaaggactgaaagaacttgtctgagatgtcctaagtgatcatctaggctcctactatacactaaaatatcatcaaaataaacaactacaaatctacctatgaaatcccttaagacatgatgcataagcctcataaaggtgcttggtgcattagtgagcccaaaaggcatcactagccattcatacaaaccaaacttggtcttgaaagcagccttccactcatcaccctttntcatcctgatttggtgataaccacttttaagat

SEQ ID NO: 90811 - DNA, 421 bp, Glycine max
acagcagattttagtaatgacccactaacctagtatttttatatcttaatgccattaacctagggaattaaaacaaactaaatggctgagtgtaactgaaattgttggcaaccaaaagtcacccccaacagccaacaagtcagtcaccatttggtctcccaaaaggctgatgcctatggtgccaattgtggcccttattacaacttgaactaaagccctgttacttgattaacccaaaacatatttttggtcagccaactttacaaggattgcgccattatttagacaaactaaacactctaaaattgaaataaagtggtgtcatttagtcctccatttgtgccatgatacaactcacaaccttggacttttctccttgcaacttgtgcttgattcaaatagtatggacagcacttgctga

SEQ ID NO: 90812 - DNA, 466 bp, Glycine max
agcttcgaagctcgcagaagaattatatgttgcaccattgtttactggaactcagtctcggagtttctcaaagcaagtcaccagtaatgatgtgtcaggtgactatctctggattccaagaggaagatttccctggcatggaccgtggcaatgatacaggaaccaatgaggatgattggcaactcttataaatgcgattgctggactatgacatggattcaaagtacagggtcaaaaatttgttgcatgattctcatgggcctaattgccactgcaagtttggttgatccctggcatggcgctccccactcttcaaacattgtttaatagtcgtgtagaaagtaatctaaactcattatgattctttggcttaaatcatttgctcatttgttcataatagctaaccaggtatttgttgacattacaacggctagcttgatcatattttgtcctcgaccctcttatt

SEQ ID NO: 90813 - DNA, 416 bp, Glycine max
  unsure (1)..(416): unsure at all n locations
acacacatggaaatggagtcatccatttttatgantagaacaataagagttccttatcccaagatatatcttctgccgaaaaccaaacaacagactttggtcatgtgaaaagctctgtagagtccattccagaagcgaaaactggatctgtagcatccttctctccttataccaacgtatggtatcctcaactcactcatattgtctctcttcatgtcctaacagtgcatgactttggcatgattcgctcgtctccataattatcaggttggcttatatgcaccatcggcgcaggatcaatctcttaagcaacctagctatactacgcatactcgttccagcctgttttgcctggatttaacgacgtctcgaacatccgtcgcaccgccaagaatggtaatcccatacgctcccct

SEQ ID NO: 90814 - DNA, 225 bp, Glycine max
aaaaatgtgattattcacttctcaaggcgtggttattgttggaacatgggatgatcctaaaccttgggttgtggagcaatggcttggtgaattaccttaagaaaccctgtgatggaggactccagaccaatatttgatggatggacatggaacaagagttttattttaattgcatgacgtatcaaacatggtcatttactttatttgataaacttgaatagtcct

SEQ ID NO: 90815 - DNA, 383 bp, Glycine max
  unsure (1)..(383): unsure at all n locations
tanatgtccacctgcaactgctggagcggattggaaagaatataattcatggtctatatgcacatattgatgaattgaaattgtataagactgataaacataaataaaagctgtatgaactatgtataacttgaacaaacattaagacatggagctactttgcatgcagaaatgtatatagagaattgatcactgaattctgataaaagctgagatcgtcttaaattattcatatcttctgagatttcgttcaagtacattgcantcgattgccattcgcattacgcttgaaaagatatatatctagctcaattctttggcctattgcctataaagagataagagataaagataataacgtgatattgatataaaagaagtat

SEQ ID NO: 90816 - DNA, 248 bp, Glycine max
ccatgcgctgagcgcaccactcttgcagttgagcgcaccattcttgcggttgagtctgagaagaatctggcagaaggatgaactggacacacgtgcttagagagggctccatctcgttacggtaccgcttgtatgcatccgttagtcgagaggacgcgcgcttagccgtatctacttatgcgcgctaagcgggccagagttgctctaagcgtgcaagcaccaacaaggccgtctatcttagtctggaa

SEQ ID NO: 90817 - DNA, 271 bp, Glycine max
  unsure (1)..(271): unsure at all n locations
aacagaagcccgtagcacactcaaacgacaattaactttttaactcagatggttcgaatatgtctccgtagtatatccatacgctcgtaattgaaaacagaagctcggagcaaatccaaacgagaacaaccttnaactcatatgtccgattgagcgctcaatatatcgagacgctcgaaattaaaacagaagctctgagactatcaaaggacaataactatatctcggatgctgattaagcccgaacatatcaagatgcctgaatcgaaac

SEQ ID NO: 90818 - DNA, 436 bp, Glycine max
  unsure (1)..(436): unsure at all n locations
agctttcgagaaaatcaaatggtcataagctttctctcgaatgttcgattcggcgacataactcatctagacgcctgaaatcgaacaacggaagctctcgagaaattcgaatggtcataagttttcacacggatgtccgattcggcgacataatatatcgagacgctcgaaattgaacaacggaagctcttgagaaattcgaatggtcatcacatttcactcgaatgcccgattcgggaacataatatatcgagacgctcgaaattgaacaacggaagctctcgagaaattcgaatggtcataacttttcactcgaatgttcgactcgcggacataactcatctagacgctcgaaattgaacaacggaagctctcgagaaattctaatggtcataagttntaacacagatgttcgattcggtgacactatatatcg

SEQ ID NO: 90819 - DNA, 461 bp, Glycine max
agcttattagcgacatttataaaaacacagtgtgtttattataaaattagagcttatctcttttatcttagtgagagcgactctcctaaattcttgagtgattcaagaacaccctggctgtatcaaaggacattcacaacctttgcgtgttgccctcgctggaaagagtgattctttacttcctttcatcttcaccctcggtctttcataccacaattccagaaaattcacctctgcccacgattacttcgtgggcataactcccatgttacgcactcaaattaagtgattcttgagcctaaattgaatttcataacgagccctttcacctcgctgtggaatcacctcatttggagcctcgtagctcagatatctccacttctatatttctgtcacgcaccacttaacctacgttgtaccattccattcatccattttatgtccagaaccacttattaaga

SEQ ID NO: 90820 - DNA, 459 bp, Glycine max
  unsure (1)..(459): unsure at all n locations
agcttctaccttctctataagnatatatgtgatctttttctaaggattnttgtccctttaaatgggatggngatattatttttaaaatatttttgtgcatttaaacatttatatattgttcgaaaaataattttgaacatttctataataacttgtataagttggtaaaatttactgtaatattttttattaatactggaatatttattttctagaagtagaaccataactttctatggtaagttgagaaagccgccgaatctaacactatatgaatgaaaaaaaaacatttcatttctttnttctttaatattctatttacgntttaaaagaattaatagaaattttttataaaaaaaatcaatatttatcatattattaattaattcttattaacttanagtgcgctgtgcacatcttaaaaagtatatcaactgagtatattntagatttaatact

SEQ ID NO: 90821 - DNA, 318 bp, Glycine max
  unsure (1)..(318): unsure at all n locations
tgagatgaggaagtcgcgaagggtgaaacttactgctcttattctttaccatagagnggcacctggagatatgccgtggtggcaggagaccttgtcgacgccaggtggtgtgctattgcccaaaaccaagcttgaccaatcccgacccaacccgtgcatagtcagtcagtgagaacctgtgatgtacctaaacaggcgagctactggcagtaacagatataaggaaccaagatcacaaagttcggaggcttgtggtggctggcagatttgatcttggttgatgtgtgagacacggcctctggtaatcgattccaagcg

SEQ ID NO: 90822 - DNA, 461 bp, Glycine max
  unsure (1)..(461): unsure at all n locations
agctntagatgagttntacaaagagcacatttcttattatgaagaatgtaagatatatctgtttgccaaaaatagagaaagaaaaacaagaaattttaatcaagatgtattaagaatcaagaagggaaagttttgatctcaaatcaagatattcaagagagataggagagttatttttataagcttttcaatgatggacaaggataggctcgtaatatgaaaggactataaatccaagagaatgaacaaaatttggcttactgccatggaatttgaattggagaggtaaaacaaatcctcaagacaatagacaatggtaaaattgtgggtccagaataaatggtatttctattgaaatttggaagtgtataggaaaagaagggatcatttagctcacctaagatatttaatgaaactttgagatctacaaagatgccagatgagtggagaaacagcacttc

SEQ ID NO: 90823 - DNA, 447 bp, Glycine max
  unsure (1)..(447): unsure at all n locations
agcttcttcttaatgaaaccgtttattatggtactcttaacatccttctgaaaaagcgtaatgtttttgtgagcaacacaggctaaaatgattcttataacttcaagtctagcaacatgaacaaaggtttcagagaaatctataactttttgctgattatatcctcaagctactaacctagctctgttgcatactacttttccttgntcatccaacttgtttctgaagattcatcttgttccaatggtgctcttgttttctggcattggaacaaatgtccagacatcatttttgataaactgattcagttcttcttccattgcgactatctagccattntctatcaaagctttgtctatagttctaggtttgatttcaaacacatggtctttgaatgatgatctagttctaactncttcagcctaatctcagatgatatgatcttat

SEQ ID NO: 90824 - DNA, 295 bp, Glycine max
cgaagtgagaaagtgtggaagagtaagtctttctacttttattcgttgaccacagagtggtacctcaagatatgtcgcggtggtcaggagaccttggggatatcaagtggggtgctattgcctaaaaccaagcttgaccaatcccgacccaacccgggcataattagtcagtgagaacctgtgacgtacctcaacaagcgagcgtctggcagtcaaccgataatagaacaaagaccacaaagcatggaggcttgtgtggtggctggccaactatggatactgagcgatatttgga

SEQ ID NO: 90825 - DNA, 400 bp, Glycine max
  unsure (1)..(400): unsure at all n locations
tataatcaccttaattttcaagagagtatcagntgttacttgttagcttaagaagaggaaggcgttatcatttggcataaccaattctgattgcaagtaccttaaaaaaattagaagactaaattggcaatatcataaatgaatattgatgaaagttaaggatttaatgattcaattcaaagctgtttaaagtatgtacccaatatacaaccaaatagaacttgcacttagccaacactcgtcgattacttctttcataatttatccattaagcggctcttcatatttatcaatcccaaataagttttccatatctaccaagtgattaaattaatttgaaggaattataagcaaggatgcctcaagactgttcacatggaaagactgtattccttttctc

SEQ ID NO: 90826 - DNA, 387 bp, Glycine max
gcttctagccaaatggacttaccttgaatttatttctttgatagcccttttgagcctttgttcccttctcttgttttgaagctcactacaagccttaagtgaaaaaccatgatattaccatatccttaagggaatttggagctttggaattggtttgggaataagtgtggagggttttttgttcattggacaacttgttctgctggctatgcttcatgatgtattttgcgccatacttgatgtacattgtatattggtttaatgctggacatgctgaatgaaatgttgcttctcaaaggctaaaaaaaaaataaaatcgaaaataacaaatatcggaaagacagaaaaaaataaaaacaagcactaaagttgagcgactactatctt

SEQ ID NO: 90827 - DNA, 422 bp, Glycine max
aacaagcttggaacaatatatttgtccttcatttaactgtctttgggcttggcggccacgatcaacaaagtactttgggcacctatgttaaacaaatggcctcagttatcttaagaaggggggggtgaattaagatattccaaactatttcccctaattaaaaatctatttcactttttactcaagttatgaattcccttaatgacaatcttcttaaatattaattcaaatgaaacaatttgaatatgaatataaagaaataataaataaaggagattaagggaagagaaaatgcatactcagttttatactgtttcgtgcacacacttgtgcctacgtccagtccccaagcaacccgcttgagaagttcactatcttgtatattgcttttacaagttctaacacacaaggacaatccttcc

SEQ ID NO: 90828 - DNA, 474 bp, Glycine max
  unsure (1)..(474): unsure at all n locations
agcttgtgtaagagggcatgaccattgtgtcatcctctagnttcttcacaacactaacatattacattcttggcatgttctacaccaaccactctctccatatggatttgcaaaatcctaattaatttcaaaggatgaaaaatagaaagggaaaagaaaaatatataaacccgaaaatgaaaaagggaaagatatataaagtagcattacattacattagtagtgctcaagtctctgcaagcaacttcagttctttccatgattgaattagccaagtgcatattggacttttccatagcatcaacaatgatgtaagctccatgtggagcttgtaggccttggatcttcttcatcaatgaattcctttacttcttggaagatgaaagacaacagaatggagaaggaagagagagaggaaacgccacttcaaggagaagatgagtctagaagaactcaccaccataggaggttatg

SEQ ID NO: 90829 - DNA, 422 bp, Glycine max
  unsure (1)..(422): unsure at all n locations
ntatacatctgaaacatggtacgaaaatagtgtactacatgtatcgtcgntttctaaaaccacatcacccttacagacgactgaaaaaagcttttaatggaagtcaagagcacaaaactgcaccgataccattgactgtgtagcaggtcttccagcgggttgaacacctgaatactgtatttggaaagacccacaagaaggataaaaataagacttgcttgtggaagaagaggtacattctctctgatcttccgtattggtctgatctagatgttagacattgtatcgatgatggagaaaaatgtatgtgacagtgtagatgtgacgatccttaacattcaaggcaagacgaaagatggtttgaatacgcgtcaagatctaaatgacatgggtataccatcacaggtgcatccaggtctgat

SEQ ID NO: 90830 - DNA, 448 bp, Glycine max
  unsure (1)..(448): unsure at all n locations
agcttatatccacaaacataatcnatatattctgattactgtgatagggaagctagaatgctcgggaaagcaaggcacccaaatctaatatcattgaaaggatactattggactcctcaactacaacttttagcaactgagtttgcaccaaatggtagcttgcaagccaagctacatgaaaggcttccttcaagtcctcctctttcttgngctataaggctcaaaatcttgcttggaacagcaaaggggctagctcatttgcaccactctttccgtgcaccgatcatccactacaacataaagccaagtaacattttgcttgacgaaaactacaacgccaagatctcagattttgcgttggctcgtgttctgacaaagctggacctgcatgtgatgagcaacaggctccagagtgcactatgatatgtggcaccagaattagcatgcc

SEQ ID NO: 90831 - DNA, 464 bp, Glycine max
  unsure (1)..(464): unsure at all n locations
agcttataagttgtacatgttccttctatttcgaanagtctgttaagtgtgagtcaatttgctaaagacaactttgttttctttgagtttcatcctcatttgtgtcttgtgaaatctcaggagaccaataaaattctcctacaaggaatggttggtgatgatggcctatgttcttttcacaacctcaagcttcaaggcaatctttctctgctgatgtccacttctgcatttgttccaaatgatgagtttcctacttcagctgctactgtcaataatacttctaatattgtttcaaattctaatgttacctctttcagtagtgctaatctttgacatgctaggttaggacatcctaatgagcatgtaatgaaaattgttctcaaacaatgtaatatttctcaattgaataaaaacatcacagagttttgctcctcttgctgtataggaagctcataggtaccctc

SEQ ID NO: 90832 - DNA, 408 bp, Glycine max
  unsure (1)..(408): unsure at all n locations
ggataaaatcaaatttatattctttccttatagtcttcttcctatttatttttggtaaaatgcattgaaagcgtaatatataccatattataactattatacgaattcagaaaatataatttggcgcgagaaaaccggagagtatttaattgtaaacaataaatttattaatgcaccaaaaagaaaaacatgctggcttttagcaattgcgcaactttctttatgataggcttataattgtaattcttagagcacaattntaattaggatttataaatacttctcgaatattaatattcaggcgatcaaaaaagaaagatatgttcagcttgatacaacatatcanaattntaaaattaaaatcacactataattataattatgattataataactcttaaaaagaag

SEQ ID NO: 90833 - DNA, 450 bp, Glycine max
ggagatacaacattgcactaagaaagtatgaatcaatccaattaaatgaacaaaggctgctattaggtatctcatctcttggctatttcaaggagctatgcgcacagacaataacaagaagaatgaagctaagaaaatcgtgaatgtcaactgataattaattaaaacattaacagaacaagtcctacataagcgtactaatgcaatctataaatatattgcattttgttaaagacttatcaatcctgaatacttattcctgtctcgattataagtaaaaaaggacatatgtcacatttattaaggaaattaggtatcttcattaaagtgtgcgagcttcaattaaaaaatgagtgttttgcctaaattatctttcatttaaacttgatatcaagcataaaaatggttttggcatactaaacgacaataatttgatatagctcataaata

SEQ ID NO: 90834 - DNA, 356 bp, Glycine max
  unsure (1)..(356): unsure at all n locations
agcttattgcgaaggacactagtcttatttggatggagagaagaaaaccattgttgctaatgatgaatggcgggaagccaaaattcaagtgtgtattatttaactaaaagagtttctgtgcaagccagtcttttgctctttatttgcgattctgcttttatttctttntcttttttcttgcaatcttatgctagcttctctagactttgcttttaatcatagcatctcattattgattttctttttcgctgatgataattgcgagtggctatcaatcattttactaaattcttgctcagctgatgcagttctgttctatctcattatgtcccttcttgtncttcatttttcgcacg

SEQ ID NO: 90835 - DNA, 237 bp, Glycine max
tgaaaatctcttttcctcgcaccatggggtcgaactcagcacacgatctaacggaaaggctcatcaagccacggccacgtatggaagtacccagctcgccacaatcggctcacataacggagtgagtcacatccttctttgtctactgacaacacataaattgtgccaatctacaaataaattgacgactcgcgacgatcatacgctaccttcagtatcactttgactctcgcacga

SEQ ID NO: 90836 - DNA, 299 bp, Glycine max
  unsure (1)..(299): unsure at all n locations
ccattctagtacctaacatgtgtgattatgatacgttaatttctanaatacacaatacccttaatctaaccgacaagcaattntnggatgaaatatactaccggtatcctctcacatatgcaggtaatcaatatcagtctcaatgtatgtaactaaaagatgatgctgatgttaacataatgctaatgtgtaatcatgaattctcgtatgtcggtccgtttgagttactatgtagcatagctataaccccagatggatcttaaactcacttcaatctactatgaccgttactcatgatg

SEQ ID NO: 90837 - DNA, 246 bp, Glycine max
cacattagacgcacaagagacaattatcccatccacgcaactttgcgttgtgaatacaatgcatctttcaacgaatgtggtgcagataacatgaaatacacaaatataaaaatttattgtcgaaccaatgccaatatttgtacaatcgtggtttttatgtgtacaataaccatacaattaatggcacgggttcatcctatatcatctaaacttttgtacatctgatgttttaactatacaaaatat

SEQ ID NO: 90838 - DNA, 298 bp, Glycine max
  unsure (1)..(298): unsure at all n locations
aactganagtggagtactgctgcacatttgatcaacttgctgatactttaaccaaacccctcaaatgggagagggttataatgttaagggacagaattggattgattaacctatgagatcacaataagggagggcgtgagagttaatttgtttgtgtggtgtgattgattgtcattgatatatacattacaaatttaaattctgtgtagtgctatcaagaggaacgtgtgcttttttgttgcaatgctcttctttattaaaatgttccattttccctttcgttaaaactattcttggt

SEQ ID NO: 90839 - DNA, 302 bp, Glycine max
  unsure (1)..(302): unsure at all n locations
ctcactatagncaccggaatttatatcataccggcatagttaacataacgctgacatcatctataagagggcaaaaacatccttttgaagatattccctatgatgatttcaatacggcactaacttctattaccattatcttcgaaaagttaccttgtggagattattctatatatacaatattatctttggtggctacactgtctacaaaagttttttccctaataagcaaattgagtgaatggaaaaatgaaatatattttacctctggtaattagtgtaaaaaacgaattatacttact

SEQ ID NO: 90840 - DNA, 189 bp, Glycine max
  unsure (1)..(189): unsure at all n locations
acttctgctttattgttaccacagagtggtacctggagatatgtcgcagaggtcatgagacctttgggacgtcatgtgcggtgctattgcccanaaccaagcttgaccaatcccgacccaacaccggcatagtcggtcagtgaaaacctgtgatgtacctaaacaggcgagctcctggctgtaacagat

SEQ ID NO: 90841 - DNA, 339 bp, Glycine max
  unsure (1)..(339): unsure at all n locations
ataataaactcacccctcacaattnttgtaccgtgtggttggtacctatgatgatcacgaactctttgtcgtgggagaagaatgatagcagtaaagtacgatnagtgagattcttttgtggagccgacatgataaccgtgggattattntgggagagagttgtatnnttgtaatcaactccttcatagctagttccataanttctttgtggaatgaggatgacatcanatntaatatatatatgaacaacattaccctctattatgtgagtgatgtgtactgagtactatatatatatatatatatatatatatatatatatatatatatatatatata

SEQ ID NO: 90842 - DNA, 252 bp, Glycine max
  unsure (1)..(252): unsure at all n locations
tacacaatacccttagctaccgacagcaattttggatgagattactaccggtagcctctcacatatgcaggtaatcaatcntctgttcaatgtatgtaactaanagatgatgctgatgttaacataatagtaatgtgtaatcatgaattgtcgtttgtcggtccgttagagttattatgtagcatcgctagaaccncacatggtatttaaacttacttcaagctactatgacccttactcatgatgccctgc

SEQ ID NO: 90843 - DNA, 235 bp, Glycine max
  unsure (1)..(235): unsure at all n locations
tggcatataacctcctcccatatatacaaacatcaatgtgaatntagagcaagcttatgcgcctatttccttacaaacgttctcttgcacaagacatttaacctgaaaaatgcacccatatacaatcaaggcagcttcgttacctagattatttacacgtacctccaaggtgtatttgntacctacatcacacacatctncttggctaaatcacatacatgcctactcaaagcat

SEQ ID NO: 90844 - DNA, 426 bp, Glycine max
  unsure (1)..(426): unsure at all n locations
gcagcttctgtctcattagatcttatttctttgaaaactcttgtntaattgaagcttgtatcgtgatgatgttaagnttaaggaatttcacagtacaactggacatgtaattggattgatgacttacaattaaatggtgcgataaattgtcacatataattaattaattgaccttgtcacaccatattgattgatctctgagggttggtgaatgacttgtattatttgtaacctgtctaacgatatatatattcatatttaatatatataattttaggaaaatatatataagaataaatttcaatattattactataatattattgtaaatatctctacaaaatatctgttataaattgttgtattaaaatatataaacatttgaaactttaaaattaaatattctgttccttaagatctatatta

SEQ ID NO: 90845 - DNA, 272 bp, Glycine max
  unsure (1)..(272): unsure at all n locations
tcacaatagagtatgatatactatcactgtctaactacttctaagtcagntagggagattagacagaagatatgactaagctacagtttactagatgtgtagtctacttctatagttggctcaagtacatgaaatgcaaataaagtaggctataatcagagaatgtgtagtatactacattgcctaacttaattcttaaccaactgtccttatcgtcaagggttgtataatataatcaaatgtggagttagagcctatacatcagttttgta

SEQ ID NO: 90846 - DNA, 274 bp, Glycine max
  unsure (1)..(274): unsure at all n locations
ctcacactctagagtaagagactctgaagtaggtgccttcgaagctcacatcatgcctgaagatcaaccacggangggtgactctngaagactattctagctcgatcgtgctccaattctntacaaccatcgcacgaccggaagttcaagctcacaacatcacatatcctcattccttgattcagatgattcgaggaaatttgtttcatggttttccaaaagaagacccttacgcacaccttgctacttatatagaaatctacaatactatgaa

SEQ ID NO: 90847 - DNA, 333 bp, Glycine max
  unsure (1)..(333): unsure at all n locations
atcctctgagtcacctgcggctgcagcttaatggatgcaacaatatgggtgcttatatgatgctntgactggtgctgccatgttatcaactgagactacattgctactatggcagaggaagattgagagtaagaggaaacatacaatatctaaccttcctgatggttntggattgggtgatcacattcaattgctgcagatatatgagtgctgngatcaaactgattctgacattggttggtgcaaagataatggcttgaaggtgtgaggtgtagtgcgttatgtgacaccagaaggataaggtgagggcaagaagcgagtcttcatgtgtct

SEQ ID NO: 90848 - DNA, 227 bp, Glycine max
  unsure (1)..(227): unsure at all n locations
cctctacctctcttaatatggatgaatacatgtctntgcanactgagtnntgaaatntcaaanaggatcactatgcagatcatatgaagtngcanactgagcttttctatcttacatatctntntagaannataaacanaggagagaatgatcttaatcactctcttagtgtgcanaagcatactagcgataagactggttaggggtataacaagcaaactaccttt

SEQ ID NO: 90849 - DNA, 341 bp, Glycine max
agcgtctattcttcctgctacttcagatgggaaaaaggcttatgtggaaataacagccttcttatcaagaaactaccaggccctgtctactctctactttctaacttgacacatggagcttaaggggggacttatgtgcagggccctttgtattatgaaaatatgtccctcataccacttataaattttcctataagctcaactggactattgtccagaatgatctggactatctaatctaagcaacatgacaagtcaaggtagcctacatcttgttcatcaagaacatggatatccttgagcctgtttctaactattagttactagatgtctcaactttc

SEQ ID NO: 90850 - DNA, 257 bp, Glycine max
tttttgtagagacttaatggacggagtaatgaatggaacgcgacgcctacctttgacttcaggtctactaagagtcacttggagtatgcaataaatattagtggccttctactaaaaccttctagctgactcacgtgtaagccgttaaaaaattgagatattgaacctatatacaaatgtttaaaccgctgaattgataaacgtattaaaacgctatcctatcgtgctttgggaggcttctataaggtggcttattt

SEQ ID NO: 90851 - DNA, 195 bp, Glycine max
tcacagctttttctcacttaaagaccccagtaacatttccttcttccaattcgtaaccgtggatcactcaaaatttactggagtctctatacatagtatacttttaccgtgggattactaaaaacattcaaactcatctgtctactctttcacaaccagcaattcataacatatttctgcactatgccaaatctg

SEQ ID NO: 90852 - DNA, 460 bp, Glycine max
  unsure (1)..(460): unsure at all n locations
ctccctgttaatcatcgcttagaattaactaatgaagattatattctaaatattatcttatagaaatcaattattgaaagtaatcgagttatatttgatgggaaaaaatattgtgaatttctgtactaattgattntcttataagtatggtgtaanatagaagattcggggccaaggtttaatttattcttttggttttatggcctaccaacccaatcgtgccaagtccaagttcgttnggcactaaagttgggtttaatctatgcgtagacttcatttctccaaattcanagggtaaccttcagttggagttgaacagatttatagagagaaactactttgtcctattccttacataccatttatgctggtgtatcctgttgatatgcatgataactgaaaacatagctctctattatagtatctacaatacatatcattcatatcagaacatacaata

SEQ ID NO: 90853 - DNA, 422 bp, Glycine max
  unsure (1)..(422): unsure at all n locations
caagtcacttgaagaattgtgacttttggaaatgtatctttcgaaatcagacattggtaattgattaccattaaggtgtaatcgattacgcatcaacagatgtgactcttcattnntgaatttgaanattaanatggttagaagctctggtaatcgattacaagtattgtgtaatcgattacacanagttaanatgaaattaaaactgttaaacacaagttgtaactcttgaaatttgaatcttaacattntaaacactgggtatcgatactacctttgggtatcgataccaaaagtaaactcttggtaatgatntataaaacttgtgtgctactcaatgttggaaaacttttatactatctgatgagctttctgatcttaatctgagtctgagctgatctgaatgatatctgatctgatct

SEQ ID NO: 90854 - DNA, 292 bp, Glycine max
  unsure (1)..(292): unsure at all n locations
tctctgataacccctttactntggggatctttccaatatcttctagcatcaagtcaagacaatgtgcagcacatggagtccaaaatatttttggtctcgtgacttgtnnaaatttacctaanaagaccaanatcaataaactcgtatgagtagtgtaacaattaanagttataactacaanaaanaaacttcattaagtatgatggaattctcacccgccaacatataattacttccattgtccgtcaccacttgaataacattcttttcttcaatcttctcaacaaagcta

SEQ ID NO: 90855 - DNA, 292 bp, Glycine max
  unsure (1)..(292): unsure at all n locations
acggtgaagaacattcacggaattggtcacgtttgaagattcttttggcaatattacacttgggagaggattgagatangatgacccattatcaccctacctttttatattgtgtatagagaaactctcatgcctcttgaggcatttttagaggaaaggagatatttatggtattaaggtgtgttagggcgcccaaatctctcacatctcttatttgatgatgattggtttctattttgctgggctactaaagaagtaactcattctcttcaacaaatacttgacatctatg

SEQ ID NO: 90856 - DNA, 208 bp, Glycine max
tatgagcctccgtaaagcgacacacaactcccaccgcatatagaatatcgggccttgtattggttagatacctaacactctccacaagactcttgaagaccgtggagtctaccttctctccttcatcaaactgtgataacttctagccaccttccatacgagtgttcaccggagtgcgactcaacatatcatacttcttcaacacttc

SEQ ID NO: 90857 - DNA, 180 bp, Glycine max
  unsure (1)..(180): unsure at all n locations
ccataagatatggtacttccacaccttcatccataactttntcactcttactcttctttgcatagctttctatttntagtagatgaagatgaatctgtggccacctcatggactcctctaaggataatagcatcatttcttgcactanattattgggagttggaagccatcttctcaatc

SEQ ID NO: 90858 - DNA, 348 bp, Glycine max
cctcttatgtgagactaacttaaacagagtctcgtacgcaaatccctcatttaagactagactcagctcaagtagcttacgaatagttagcctaatgtagcctatgcttcgtccgcagatacctcatttaagactatgcctaatctaaacaacattattgtaacaacataattaagaccacaacttaactcgcagatccctcatttaagactaagtttcgatcttgcttcaatcaagttctaaggcaatagtacatttccaatgctaaagcacctaactatgccacaattggggatccaccataagcatcctacataagcattgaataatctgtgacacagaaacaca

SEQ ID NO: 90859 - DNA, 348 bp, Glycine max
  unsure (1)..(348): unsure at all n locations
taagatcacaatacgttgaggattatntaaataaaataatatgaaaagattaattatttaaatataaacattcaacatatatacatataaataaaacatacacatatacacatattgataaaatngaaataagtaaataaaatattattaatattataataaattttacattaaaaaattgaaacaaacaaacaaataaaatgctaaaatctatatataaatattatatatctaaaacataaaggccatgaatcgaccagtcacactcactcatcctctaataaaagaggatacacttgaatctatataaaaacttcgaaaaaaaatactgaataaatattacactta

SEQ ID NO: 90860 - DNA, 457 bp, Glycine max
  unsure (1)..(457): unsure at all n locations
gcttctatccaggcacattctnggtggngaagctccttcttccatggcttattccctagtggatggtgcctccnctctcctcttctncttngncttccactgcatctccatggtggaanatcaccattgaaggacctcattgaagctcanagatccggcctncatagaagctccacaagaaagcttncatcacttgccaatcgtctaacanatcctcaagtgtctttgaggtctatcanggaactactaaatattgatcatctcatgagatgaataaatggtatgtggtgcaagtacttgacgacctcgtgaggatgagagtagtaactcaattgtgaactggtgatcataacgaacataaggacacattgtagcatnnttattggattttgtgtgtatgggttanggggcangcatttcttcctacaccattcatatatcttctacacccatcatt

SEQ ID NO: 90861 - DNA, 199 bp, Glycine max
  unsure (1)..(199): unsure at all n locations
gcataaatntctaattgcataacatatgattcatggatatgatatangcattctttctttctttacantttaagccactagccaaaaagctatcccgatatatattgggtttatcattcgcacgtcctttgagccaaacacttcatantttgttggaacactaaacctangataaaaatntcctaccttaacttatctt

SEQ ID NO: 90862 - DNA, 385 bp, Glycine max
  unsure (1)..(385): unsure at all n locations
gagctatctgattaactacatatagtccttgtccactctttaaataaagcgctctttctcggtgattctgtactataaagaactgcatgcatcaatatgtggtcttttaataacataaagtataatgtatgtaaattaattaatgtataccggttagatcgtacgcagcatgcataanggttatttacaaaacaacanactgatatntactctgacctaactcgtaactagtatttgataaaataaaagtatcattgtacgtcacaagctaattacataatgacaacttgatcacaacttttgatcatcgacttacatgactgtcaattcaaatatctttttaaatatgtattggatacacattattatattttataataattta

SEQ ID NO: 90863 - DNA, 242 bp, Glycine max
gcagctgagttggagctacctcatgcactcctctaatgactatggcatcatttctggtgctaaactgctgagaagtggaagtcatcttctcaattaaatttctggcttcagcacgagtcatgtctccaagggctccaccactggcagcatctatcatacttctcttcatattactgagtccttcataaaaatatcggagaagaagttgctcctgaatctgatggcggcggcaactggcacat

SEQ ID NO: 90864 - DNA, 269 bp, Glycine max
  unsure (1)..(269): unsure at all n locations
tcactcctactctatctctagctgcatgtcttttctttcttcctcctcacgttgggcctttaggggganacaccataactaaacgcgccgcaagggatccctatcgcaccagatccatatctataacgatgggtgatcaagaggagatgcaggaacagatgatagcccgcatgtcggctctgaaagaacaaatggcctccatgatggaggccatgttaggtatgaaacatctcatggagaaaaacgcgccactgccgccgctgtcagtt

SEQ ID NO: 90865 - DNA, 422 bp, Glycine max
  unsure (1)..(422): unsure at all n locations
tcaattaaaacagagagacttgccttctaaagaagtttctaactctagaaaatttcttctcactcactcatgataatgcatgatgcatanatgatatgttaaagactaaggtgcaacattcaatataacaaccaatacaaatgccattcaagagaagtgggcatgtaaaagaacaaacttcttcaagatcttctncaatcttcaagcttaactcttcatgtngctcatgtngctccncatatctctaacaatctccccccttttggctnntgatgatgctaactcgaatatgtcattgagtacatttggagggtctgagtgttgagagtagagacttgcttttcttagtcattcctgaanatctttacactttacgaaagatcaattcanatcatcatcatcatcatcatcatatatcatac

SEQ ID NO: 90866 - DNA, 62 bp, Glycine max
acatgacaattgattgtgcttcacttactgttatcctacgtaattaaaatatctcattgaac

SEQ ID NO: 90867 - DNA, 256 bp, Glycine max
  unsure (1)..(256): unsure at all n locations
tcctctctcctcttctccattggtcttcgctacatctccatggnggaagatcaccattaaaggacctcaatgatgctcaaagatccagcctccatagaagccacacaagcaagctgtcatcactagtatcctgtagattcccagtaattattactgtngtgtcttcaaagtaaatattggatgcctaatctaccctaaggggggtcgagtaagtgaacgctgacccttagagagccatacttatgtcttcctaaac

SEQ ID NO: 90868 - DNA, 496 bp, Glycine max
  unsure (1)..(496): unsure at all n locations
tagctatggaatgacagagaagctcgtagaaggaagaaagctttgatttgcttggtgatgagagaagaaagcttttggtttanataaaaaggtttccccttttccattattgtattcaagctctgccacatgtgccctattgataggagcaaaggggcccactttctctctntntgactgtgacccatactcagtcacaaaagtgagaaaaatctgaccttngaaacgctaaaatcctgcctcggcttgcgtgtcgttctctgatccagttctcgcgtttttgcgtcgacgggcaatttccaaacaagcatatatttcaaacgctagatgaaccccagcgtgttagagttgtttcttgatttaagctcacgcaaacatattttactaataatacgaataaccataactccagtatggttcttgcttattagcaaccgattcttgccccgtattctctcaccagacgttatgcttcactgatatctattatatatca

SEQ ID NO: 90869 - DNA, 201 bp, Glycine max
  unsure (1)..(201): unsure at all n locations
tgcaaatgatacattaaacaagcaacgaagattcttatcanatgaagagtgtaggtccattttttgtctttantaaattcagtttataatggaaagttgaaggaaggtacaacaaagaacatcgccacattcgactgcgtttcaagaaaggtcatacaacgtatatggtgtcaacttacggaaaccggagaaacattgcac

SEQ ID NO: 90870 - DNA, 288 bp, Glycine max
  unsure (1)..(288): unsure at all n locations
ctgcagctgcttgagagcacgttcttgagaagctagagcttagctacacacacgcctctaataactaagctcacctccttgagaagcttncttgagaagattcctaaagaagctagagcttagctacacatacgtgtntaatagctaagcttacctcctagagatgagaagctagagcttagctacacacccnctataatagctaagctcaccccatgacaaataacatgagaatacaaaaaaaaaaagtccttactacatagactactcaatagaatggccaaatac

SEQ ID NO: 90871 - DNA, 120 bp, Glycine max
gcgtcgtcggaaatcgaatgggcgtgccaccacctatattcactctttcatcttcatgagagactacagctggagaggattgatgatgctgacagaggtggactcttgtgattgaccctg

SEQ ID NO: 90872 - DNA, 241 bp, Glycine max
tttttaccagcgtgtactaaactttggaacacattactactagtattaggatgctggtgttccattaatatgctatatcgcgtctgatcacacaccatcatttttatcgttgaataaatattggccgtggggtatctccctcattgcatgcgtatttgttgaaaacctttgtttaataattatataattcctgaggtgtgtaaaactgttttcacatacattattgtagttttcaaaaaac

SEQ ID NO: 90873 - DNA, 540 bp, Glycine max
  unsure (1)..(540): unsure at all n locations
atcttgagtcacctgcggcatgcagctgctgattacatctncctctntctcaagcanattcttcttgatatcatcaaaatcttcatgattacattcntcccctttttgatgatgacaaccacctgtaggttaggagcaacaacaaagaanatatctatttgcatatangttactcccccttggtntacaatgatggcttatatgagacaattgaagatntcatatntttcatatataanaagttgtctcatanaacaatagatagattttcttactaatttatctcttatctttctctccccctttgcaacatcaaanacaaatcatgaatagagaggagaaagatgtaccactttgtgaaatgttgagatcaagtgatccaaaggcattaaacaatcatcaatataatcaagcaaaacaagtcaatacacatcaataacacaatcaatcaatcatatcaatattcaatcaataataaataacatcactactatccataattctatataaaaaaataattcaaatcaattcaattcaatc

SEQ ID NO: 90874 - DNA, 484 bp, Glycine max
  unsure (1)..(484): unsure at all n locations
cttatcctagcatggcaactatctgctctcataaagtggctcttnctatgactccacgcgtnctcacacatgcgcatcatcgacatcatcgtacccccattattatggctctcgtcgaaaaccgtgttgtcctctgtgcaaaggaggctagaagcatagtcaaaactgggtgccattgcaagacctcgaattgaaactcaactaccctcttnctncanattcttcacgcctataaaaaatacgaaacttattttcagatattgatnggtctggtacagtgntgtaggaagtggagttctttatgacctgtaaaggagagatacatctgtgaaatagaatataaacgcttcggaatgcttacttcatttgatgctntactaatttttttattttaatcagcctatcacatgaatgtgagtgattaactgtactagatattagtgctggttctaatgacttacgaataatttaccgaattattcta

SEQ ID NO: 90875 - DNA, 176 bp, Glycine max
  unsure (1)..(176): unsure at all n locations
aataacccacatactacaatnntataacattctcacaaataaatattgtccgaatagtggattcttagatgccgaaccagggcataaaccaagctatacatggtatagtattttagcttcacatatattggtcaaggaagacatctagtggagaataagtgatggtagctctataa

SEQ ID NO: 90876 - DNA, 218 bp, Glycine max
  unsure (1)..(218): unsure at all n locations
gctatcttgaagaagtatataatagcttctcatccttagagtgtgcgcccatcttgcggcagtacatcttgagatgggttttgggacaggtcgtccctttatacttgtcgaagtccggcactttgaacttcggggggataacaacgtcnggcactaagcaaagatctgtcatgtctgcgaacggatagtccccaaatccttccacggctctcaatctt

SEQ ID NO: 90877 - DNA, 146 bp, Glycine max
  unsure (1)..(146): unsure at all n locations
gaccaccgagtggtacttggagatatgtcgctggggtcacgagaccttgtagacgtcangtggtgtgctattgcccataaccaagcttgaccaatcccgacccaactcaggcatatttatgtagtgagaacctgtgatgtacctaa

SEQ ID NO: 90878 - DNA, 234 bp, Glycine max
  unsure (1)..(234): unsure at all n locations
atcacaaaatgtcaagaggcatnntttttgaaacaattacccatttcttaaacatatcctataattcanagaanaacatgaaagtcgtacatgcacacagaattgacccanaatattaaacttgaaacccaacgaaactaacaacatttacanattaacacaactaacanatttaacaaacccgacaaactagcagaaccaaataacactccctcccatacttaaccacacatt

SEQ ID NO: 90879 - DNA, 210 bp, Glycine max
cttaaggctactgtttactatcaggatttgctgtctatgtatttcatcaatatatgggattctagtcttggcataaactattgtattctttttaaatccctcttaggacgattttttattatctgattaaggaatactacggtgcaagaattgatactgttgatgaagactaaatccgtttatacctgatatgtgcctgaatctttatta

SEQ ID NO: 90880 - DNA, 323 bp, Glycine max
aatacacaaaaactggtttttttactgtaaggtaacgtaaaggcaataatatgtaaccatgtatcatgaatttacatatcatctttagtaatttatgcccggaagaaaaaatttatcatcattaataaattcaccattatattactataactgtgaataatatcttgaaatcatatatattataataatatattaaatattgatactatagataacattacgttattaaatcacaattatatattaaaagtatcatttaaaatacctgtaaactttaccctagatgaatgtattttcttaaccaatacaatgttagatattgt

SEQ ID NO: 90881 - DNA, 431 bp, Glycine max
  unsure (1)..(431): unsure at all n locations
ttcttaacaatcttcttggaggaatcctttccctctntattccttcccctggcctntgaagacaaggccttactatccttctctntctttaagttttctaattnttcttcctcatccctcttatctttcatagttagttgatctttggccacctgtaaaggtgtttgaggatgcaacacanatntagtgtcaagatgggtgaaggtaatctcattagttaggccattataattgatctttctataaattgcacggcctcctaaagatatgtctgcctcatggaactattacaataacttattctatatgtccatggagaaggaccttacttgtggtaactatcattccttgctatgaccatgaagtataggttggtgggatgaataggtacttgaactactgtctcacaatgacagacacttccatgaaac

SEQ ID NO: 90882 - DNA, 503 bp, Glycine max
  unsure (1)..(503): unsure at all n locations
ctgtgttctaaatntagctgcagttggcctgtttgtgttgttatcanntttcatgttccttccttaacaatataataaactatttaaaacattatatatatatatatatatatatatatatatatatatatatatataagggganttttatattatatactatgcttattaaaaaacaaataagaaaaagaaacactcgtggttcaaaataaatgtctaacacactaaaaagaaaaaaaatacttaanatanatgganggtctgttggctcaatttctcncacccttattttactattatcttagaagtgagggtggaacttaagacttttaggtatatataaagttagatgggagagtgggtcatgggccacattcttataatgctttctttatttaattgtaacattatttagcattttcttttatttttaatatctattagtttattaaaatactaatacatataattataactaaatatntacaaattataactttaac

SEQ ID NO: 90883 - DNA, 228 bp, Glycine max
  unsure (1)..(228): unsure at all n locations
ttagtgtaactaataattacagacaatctattaatagaagccttggtggcanatntcatattccacctaagagatattgttgtgatatattcaatatganaaatcactanttggaaacacccaaaaccattggaagttatgccataatcgctattgacatangcaagacccacggaggcgcacttgatggcactgtaaagcttttttatctctaagaattctctctct

SEQ ID NO: 90884 - DNA, 160 bp, Glycine max
  unsure (1)..(160): unsure at all n locations
tcatgatgattcacattagaatatctaaggacttttctcagcttcatctntatgcatcttcaaatagtgtcaacttcagcgctctaatgaatccacattcattgtgattcatatggaagacatgatattgcttcatgtatcttctaatggttgcaacttt

SEQ ID NO: 90885 - DNA, 298 bp, Glycine max
  unsure (1)..(298): unsure at all n locations
gcagctatctttacctatctatctccagatgtcttngcgaagattctatggataatcaacatgaagttctaattcaagatgttntcttttgtgcatgggcataatgcaatcactctatgtctagcaatgattttattaagatgtccctacctttgagttctacctaaaattatcctctctcgagcgactaatccctaanactgatgcatataaaaccttcaatgtatgtctactaaggattaccctctntcaagcgccaaacccctaaagatgatgcaaggatgaagcatataataca

SEQ ID NO: 90886 - DNA, 263 bp, Glycine max
  unsure (1)..(263): unsure at all n locations
gctgtccacctattactatcttgtcactgtgcatctattgantgagagataggtatattactcttctaatgtagtcgacgactaanaaaaatgtaacagacagtgatgcttaagccattcagatcaagtcattttgaatctcatcattactatcatgcatctcacagagaatgagaatcaggcatcgtaatgcatagcacaacataacattaagagaaaacatgtcttctatagccaaccaagggtaaaatgtatttatattt

SEQ ID NO: 90887 - DNA, 305 bp, Glycine max
agttatgtatttcagatagattatatagacgttgcattttgcatactgtagtctagccttacttttgctacaaatattgtaataataactattcttagttgaaggtagactgtgaatgagcactatatgtatatgtgattaaaacattgtgtattaatatataataatctggctgttgcttatgcacataactctatcatctgtcaactcgctaaaacgtgatggtctagacaatattcccttcctattgtataaatatatagctctactctatctcaataaacatggagaatcttagatattta

SEQ ID NO: 90888 - DNA, 267 bp, Glycine max
  unsure (1)..(267): unsure at all n locations
atcttcagtcacctgangatgaagctcgctggggctctatggggctgatcgtgagctcaatgggttcttcatggtgatttacaccatggagatgcatcggaaggtgtcataccctaatttcgtccggggattattacttgatgacattcaacctttggttagctgctttgagatacttggcatcctttgttgcacaataaatgaagtcccaagacgtcttataaatcanaaggaagcaggcttgcgcgatccgtgaaatttcgtagt

SEQ ID NO: 90889 - DNA, 315 bp, Glycine max
tagctctagaagtttataagctatagaacatcatcataataacatctaactgtgacttgtaagaagctataaacacttaagtcactttctcctcttattcttcatttgtctcctcttcttcttctgtctcataacatctttactttactgaattgggactcttttgtatctagaggcccttctttcttcttgcacgcttgcacagcagtcagtccttcagagataccgaccccactatggaacgaaaaccagacgcaaaattaatgatgttcttagagtaccttatgtaagcaacattaatggatggatattatt

SEQ ID NO: 90890 - DNA, 293 bp, Glycine max
  unsure (1)..(293): unsure at all n locations
atgcatactgctccgtgttgtctactcttcttctatgtctaccatttcatgtgtgcagtcctgaactngaccctcccactgaacaccctctaatatgccttggttaaacattaaaacatggcaccttcttagcttctttctagcagttgggaaatggagagcacctttgagctcatgtatctanttttcaatattcaacctagcatgcccatgttcctttgcttcttttagatgaaagtgacagggaagattggttagtgttacttaatagcgtttcaagaagatggtggagt

SEQ ID NO: 90891 - DNA, 227 bp, Glycine max
  unsure (1)..(227): unsure at all n locations
gagctgcgatatgaatctggcaatataattcaagcgtcccanganacctcagacttgcctctctgtacggggttctggcatctcaaggatagccttcaccttttcngggtctacctctatccctttctggcttacaatgaaaccaagcaatntccctgatttgaccccaaaggtacacttagcggggttcaaccttaattgatatttcttaagcctttcgaacaact

SEQ ID NO: 90892 - DNA, 199 bp, Glycine max
agctcctttcgtcctttattgactatagaagaatacacccttgtgtggatctctatttggttcttaaccctctcatgcgactgcttacaaactctgacctagattccccttctatatgtatacaaaaagcgtcacgtgggaggggaacgaagtcaaatgacgtgaggggatcgaactcatacacaacctcaaaagggga

SEQ ID NO: 90893 - DNA, 339 bp, Glycine max
  unsure (1)..(339): unsure at all n locations
atgacgattctttcatctttattntcaaaaactcagtcatggaatgctagcttaattcagattngacattacaggctgcttatatttgttgtggtgganttcgaagaccggacaaaagaaccaatttgcttttggtaccccatcctttttatgaagttagacttaaaacttgtgcgattatactgtctactgcattaggtatgggaatgcatactgagacattttctacctactacatgttgtaactattatcaatggcataaacatgtatgttgtacaattaatacttacatcaactgacatgctgatgtgagtcttgtcccttctaaaatgtactgt

SEQ ID NO: 90894 - DNA, 275 bp, Glycine max
  unsure (1)..(275): unsure at all n locations
acttctggatgaagcaagtgagctngcccaaggtgagctgctgtgcaacctccaccccttatntccaataaatangcatgatgcggatgaggagaatagtccaacacctgatatcaagaagttctctgtgtaactagttataaagaggagaaagaagaagaanaatctacgtcgaggcgaatgcataacgtttacgtgatcgattccgtgattgttattcgttcatcgacgagtaagtgtctatctttgaagttgtgaattcattctatgcaccc

SEQ ID NO: 90895 - DNA, 194 bp, Glycine max
tcaaagagaaagcacaaagaaaagagggacaatctacaatcaaagagaaagcacaaagaaaagaaaattcccaatcaaagaatgggagaaagtaataaggaagaagaagaatgaaagaaatctcctgatcaaggatcgaaagacaacagaagaaatgtgcagaaaggtctttggaccggacaatatctgaacaa

SEQ ID NO: 90896 - DNA, 283 bp, Glycine max
  unsure (1)..(283): unsure at all n locations
ctgcactctatgtntaattaatactcaagagcaatgtattgatagtgtatatgaaaagggagaatttcctactctgtaaaggtgcctgacaggttgtgatatactagtctgtaaccataacattntggagttcttacaatngcatttaacccgtcatattttcatgcagtgtcatgtntgagaggctcgccaaggatgggagggagttngaagagaaaaccttggaacatgtgcatgaatatgctgatgcangtctaaggaccttgatcctacatatcgtgaa

SEQ ID NO: 90897 - DNA, 239 bp, Glycine max
  unsure (1)..(239): unsure at all n locations
tagaattatatgttttataatcctgacataatataacanatacaccattaatatttaaaactattggaaaatattcaagtctcacatcgattaaaagtaatcccacattataatatatgagtgangggcaaccctcaccccttgagctaacttttagaagtcagntaggtctctcacattattcattctgatacggtatcagagcaaactctgatcctgngaccacgcgaattcttaat

SEQ ID NO: 90898 - DNA, 231 bp, Glycine max
  unsure (1)..(231): unsure at all n locations
ctgcagctgttacccatgtngaattgcttacatagagctggcatataccacttatgttctccttatgaagttgtntatgggtttaacccactaactcctcttgatctcttgcctatgcctaatgattctgttttaagcataaagaatgtcaagcaaaggtggactatgtgaagaagcttcatgggagagtcaaagatcatattgagaggaaaaatacaagctatgctaaac

SEQ ID NO: 90899 - DNA, 317 bp, Glycine max
actcttcttctatgacttgtgaacaccctgtggtttatggtctaaccttatgcacttttacaactctgactaattcccttttatgataaaaaggtcagggacgggaagagcaatgagtgggatgactctaacacctcaaagggatgctggggtcatacccctctgagtgcatatttctcatctaacctttgcccttatacgatcttatgcatatatcattataggcctcctattggtttatcattagaataacatgctacaatgctagaaaacatattttatcagatgcgcgttatatattattgtagcaatagata

SEQ ID NO: 90900 - DNA, 327 bp, Glycine max
  unsure (1)..(327): unsure at all n locations
gctctcgatatattatgcacctgaatcagaatntctcgagagcttncgttgntcaatntcaagcttctccgattattatgcaccttaatcagacttcagttngaatagntatgaaccattgaatgtctggagagcttncattggttaatttcaagcttctcgatatattatgcacctgaatcagacttccgtttgataagttatgaccatntgaatttatggagagctttcgttgtgcaattccgagcgtcttgatatattatgcgcctgaattggacttccgtgtgatatgttatgaccatttgaatttctcgacagctntcattg

SEQ ID NO: 90901 - DNA, 435 bp, Glycine max
ttattagctgacctgtataataacacagtgagattattcagatatagagttatctctttatctagggagaggattctctaaatctgatgatcacgacccctgctgataaggcttccacccttgggttgcctcctggaagaaggatctttcttccttatctaaccctgttctttaaaccacaatccagagaatcacctctgccacaatatctcgtggcataactccatttacgcctcaatcagtgttctgagcctaatgaattcaaacgagacttccctcgttggaatacctattggaccctagcttcagtttgcattcttattttgcagccacacttactacgttacaccctcatcattatgccaacccctataaaccacaaatacccctatttcatcttcctaacattcgcattcataagtaatctaacatcta

SEQ ID NO: 90902 - DNA, 255 bp, Glycine max
  unsure (1)..(255): unsure at all n locations
ctatgactaccanatgtttcttagccatttgtcgttgaaacagatgctgctggcgtatgcatatgggctatactcactcaacagaatcacctcattgccttcttcaacaaaccctattgctncanactcctncattcatncacttatgttcaagaacttacagcgattacagttgccgcttagaagtggcgccagtacctggtgggccatccatttacgcatttgaccgaccaccgaaaccttaaagaactcatg

SEQ ID NO: 90903 - DNA, 214 bp, Glycine max
  unsure (1)..(214): unsure at all n locations
attctaggtctagaccatgatcaaagttgattccactataagagcccgattcattannagttaatcaattgatgaagttgtgtaaatgggaacccgtnttatctctntntntatgaggatgttacttacgaaggctctatgtacgtgtnntattttagtgtaatntctttgtaaccacgggaatatactgtatatgggaagctgttcatatttt

SEQ ID NO: 90904 - DNA, 316 bp, Glycine max
  unsure (1)..(316): unsure at all n locations
acccgacgaagacactgacgnatacttatcttcttcttcttggacaaagtatggcaggctgtgggcaagtaaattatcttcccatcagaccttggatgcaactgtgctcttatacccatatcagctagatcttgacgagtattcaagccatccttcgtcttgccttgaatggtaaggagcgtcccaatcacactgtcacacactattttctccacatgcataacatcaatacaatgtctaacgtcaagatcacaccagtactgaagatcagagaatatggacctcctcttacatatgcaactctgactattatcct

SEQ ID NO: 90905 - DNA, 292 bp, Glycine max
  unsure (1)..(292): unsure at all n locations
ngcttctgtnngtgcgaaaaacaccgccctgtgaatcatattgttgcaataaatcagcaacaactctggtagcananatcccgaagaggtatntatttgttaaanaatgaanaagaacagaagagaaagaanaagaaatcagcaacaactcttgtagaanaaatggcagaagataatntaaaanaaatgataaagaagagagtagtaaccttaagttggcatcgacggaggagccctcgaagacgatcaccgtagaaatctttgattttgatatcgaanacatcaagatgac

SEQ ID NO: 90906 - DNA, 199 bp, Glycine max
  unsure (1)..(199): unsure at all n locations
acacttgagtgcacttgaaagtgagtgaaatacttgattggtgaggatcgtatntntcttgcatcaataatggatttccatgccttcttgtcttcttgaatggaaaacttgtgtattcttgttattgttcccaatggaggacatcattgtcgataatcaaagcattgtctcattcccttgtgatgaagtttattggaac

SEQ ID NO: 90907 - DNA, 302 bp, Glycine max
  unsure (1)..(302): unsure at all n locations
atacaagctctatcttctaatcgatcactcacttaactctccctctctggtttggagtataagcttcacttganaataagatatntaattgtatgagttctcgagttaatcccaactctctctctccttttggcagtcaaaaatagccaaagtgcgtatagaaaccaaaaattatacacaagctcataatcatccaagcagttttatccatacaacaaacaaggaggacaataattcatacatatactacgcaaggaagaataataattatcatanactataatataatgtcagataattta

SEQ ID NO: 90908 - DNA, 324 bp, Glycine max
  unsure (1)..(324): unsure at all n locations
tcatttcagatttttttgttctgtactagctgtctatagtattataatgaaatgaaacgnagtgatacacccgattggggatatggtgcaccgcgcgacctaataattttcgttgcctactggctatatatattgatgaatctctttttattctgacattcaatccactttggaagatgcatctttggatacatgctaacagttgaacaagcatttattagttttgaaatcaacatatcatccattatatagttgacttaaaataaacactctggaactttatttattttataaatttgtacatgctgaatatgaatattatat

SEQ ID NO: 90909 - DNA, 142 bp, Glycine max
  unsure (1)..(142): unsure at all n locations
tcttgatggtcttgntactgcatggcgcgctatcctaatttctgtgacattaattcttttgattggtgaggtgagaaagttctgtccttatatgagtttaagtataatacattcatgtcacagattaagtgcttgtgtcgtt

SEQ ID NO: 90910 - DNA, 242 bp, Glycine max
  unsure (1)..(242): unsure at all n locations
tttgaaatgctataataagctagttatatggtattcttcagacagattangaataagggtatatgcacacacacatgcatctacaaaatgaagttcatatttttggttatgaacctcacanatgaagttctcatcactaatatctaagctctacatntttcannaataatntgctccagattnttgcttatgcacctacaaaatgaagttcagccaaacaacttgttatatctaacaatatg

SEQ ID NO: 90911 - DNA, 227 bp, Glycine max
ggctacttgtgacacatcaaccttgccttcatgcaacctgagcatgacagctgagctcatgctgaatattacaatgagctctgacctcacagcaaatcaccgcaagacatatgaccttcagcacagatcgaccctgatggtgaatacctacctagaggccagcctagaacacagtgagctgttctcttcaatgggtgccaacgacatactctcccatcacacagaca

SEQ ID NO: 90912 - DNA, 265 bp, Glycine max
  unsure (1)..(265): unsure at all n locations
tgatctntggatagattctcgagatctcttcgtaggtttctgtaagctattaagagaatagatgagttagatagaagctcatgatacgctcttttaaaagattcaaggtcatcgaaatttaccttatcttcctagtctgattcagaaccccttagaagtgtatccgccatcagacatatgatggcttcttcatcatcttcatgagacaagggttcattcaggtctttccacgtgctcataagacctttcttttatatagtcttaa

SEQ ID NO: 90913 - DNA, 158 bp, Glycine max
  unsure (1)..(158): unsure at all n locations
gcccaaaactagtcagtaaggcattttatactacttaaccanactttattgactttaaaacaaaatttggcagctagttgctcttaaaacaatgtatgcagctataccttacaaatttgcaagaacactaccctattaaaactcagtatcttcatgga

SEQ ID NO: 90914 - DNA, 307 bp, Glycine max
  unsure (1)..(307): unsure at all n locations
cacatattggattatttcaatatatgcctgtaaagtagagggaactgtgaagaagtataatagtaacttaattatatacatatatatatcgacgagacttccaacactatattatactattagcattataaatngtagccacagccncaagaaatgaaagatgtaatggcaactgtctctctgctgtatgtgtgtgtgtatgttactacaacgaatgaatccaaacactgccctcactgagcagaaaggtaattaattatcaagtacctacctgttcacatgtgtgctcattaatcatcgtacaaac

SEQ ID NO: 90915 - DNA, 466 bp, Glycine max
  unsure (1)..(466): unsure at all n locations
actccggggtctgnncttctatcaacgtttgtcccttttatacctgtgaacataagagagacaacacaaccaaagatnttagatctagtanatctggttggaaccaaaccaaccttcaaatggaagttntctgtgcanaactcttgtagttagtctattcagcaaanatactatagtgttngcagcctccgcccatagctcctttggcaactgcttatcatgcaacatacacgttgtcatctncatgaatacttctatttntctctcactcacgccatttttgtgcagagtgtaaggaccggtgagttgtgctcaatgccagctccttcacaaaacttatcaaacatatcatgtctgtattcttcccgttgcagaccttattgttgaacctgaatacttgatctcacaatgcttaattcaatatatacacctcgctggttaaaataatcacaaactattaacatat

SEQ ID NO: 90916 - DNA, 433 bp, Glycine max
  unsure (1)..(433): unsure at all n locations
ctcacttaattatgcagcggagaatgcatggtttagctatattctacttctacttgtgtngactaatacatagagataatgaatcttaatctttcagcatacatacattatctacaatgcgaagtttaatatgtctattgaacacacataaacggaaagaatattgcttctatatttgaggtatatatctgacaatcatgtagaaagagatagatatactatcgcttttatcatatacatgatagaaatattcttatgtttaaataatgacattgaatttaatattctacaacgctctaaactatgccctcttattaatcaattaaattgcatcattatatgctatatataacaaaatatgatatttcagcctaatatacagcattacaatcatattagggctttgaatagattataaagcacaaactaatct

SEQ ID NO: 90917 - DNA, 229 bp, Glycine max
  unsure (1)..(229): unsure at all n locations
tgtcaactttaatggttcaaagtatatgtgtcgattatatagaagaccgtatgacacttatcatgatgtgatgtttaatagagatttggtaacttacacatcctatatattatatattaatacattaattacattaagtaacatacataaactggcattaatttatggaaattaattatcattntaatgaaagtacattaactaataagtataaaattgtgaataccat

SEQ ID NO: 90918 - DNA, 478 bp, Glycine max
  unsure (1)..(478): unsure at all n locations
agcaccgagctgcagctgtgtggcgatgaagtctcgatgcctatttangtgtggttggaagctaacctgtccccttttntctattaaagaaatngatnttataaaataaactaacgataataataaatatatactctgaagaacactacacacttanataaataaattgatgtcaatcatatcatataactatacggntttctagtattaacatcttccctaacaatgacctagtacaaacaaatatttttttttcaaatataatatgactgaccacttgcccagctgctgtaagagatgatagtgagcattagttgcccatcatttgtgttagtcagctaactcaatgcatatcatacaagatatggggtgcaccattagcagtaaagtggagtctagataatactngaagcattaagggtgttgagtgattgtatgtcatgagaatatgaaatgtatatgataagactgcacatat

SEQ ID NO: 90919 - DNA, 115 bp, Glycine max
  unsure (1)..(115): unsure at all n locations
taatatatactctaatcatgcaaagatatatntgttctagctactatcagttatacactcacatggatatgaacttctatactatataaatacctgagatatcatacatactata

SEQ ID NO: 90920 - DNA, 205 bp, Glycine max
  unsure (1)..(205): unsure at all n locations
tctagaggagactactgngatgatagtttatgtgatataatccctatggaagcgacgcgcactttcgacgatataccatggaaatttgacaagaaagtacttcacaatggtctcaccaacgaaataagccctcaccatggaagctaaatgtcaaacttgttccatgaatgtacaagtgctggggatcatgtcaataaactcaatg

SEQ ID NO: 90921 - DNA, 276 bp, Glycine max
  unsure (1)..(276): unsure at all n locations
tagtctatatatagaagcatgtgtcacacttgntgtatctatgatgaatgagagtcttgtgagacacaactcaaagatcaacttctctctctttttcttgcttcaatatcgngctcccacctctctctttctctccctctatctttacctacattgaagcatactctctaagcttcttatgcaatgctcatattggaggtgaagctccttcttccatggcttattccctagtggatggcgcctactctcacctcttctcctttgtcttgcgctgca

SEQ ID NO: 90922 - DNA, 348 bp, Glycine max
  unsure (1)..(348): unsure at all n locations
ttcatctatctatctatatgaatgacgtgaagggtcaatgtacaatgttccataaccattcactaaataagcataagccaatagaataaaaaaaaaagcaacgcacgcgcagttcataatntgaaggagaaaagaaaacaataatataaagttagaacaccaatttcaattcgatgcatatacatagactcaaaattgtcataactcagcgtcattgcagattggaatattctcgaaagcacggatnntcacagaaatttaatatatgtgtagtgaaacaacttattannaatcaattcacaataatntcacatcggaagatcaatnggtccatcaatcacagtcaat

SEQ ID NO: 90923 - DNA, 175 bp, Glycine max
agctaacaattggtactgctaaggtccttcttttattggaatcctctatgagacatgctcctattatgtcagcatgactggtatggtagggaacacttgttatgggatgccagtggtttgaatctggtggtttgatagtcatgcgtgagttgtgactgtatgggatgtcatgaat

SEQ ID NO: 90924 - DNA, 219 bp, Glycine max
  unsure (1)..(219): unsure at all n locations
gttcaaaatcagaatgttcaatactataatgctcaaaatcatgatgttcaangataccaaccacataatgctcatactcaccaataacagaatgctcatgatgctcataacgtacaaaatgatgcctaactaatctatgaaatgtgctatctatctcaggatcaaagggttgtaagttagatggatcgcctctagtcatatactacattcagcatgcac

SEQ ID NO: 90925 - DNA, 359 bp, Glycine max
  unsure (1)..(359): unsure at all n locations
ccgcgatcttaagtcacctgggctgcaagctcgagaagtgtgaggtcaagccctaaggcagagctttgaagagcccgagtagtcgaagagaagttcaagtccatagccatcacagtctgaanagagtatgatgaactaanggacgtcaatatggccaccgctgaagccttggaatgagaaaccaagaaggcccgaaaggaagaacacgtgccagcanagttttgaggggctttatagggcagcaatagcaaactcaagctccgaagaggtgaaaggaatcatcacangtcataggcatgatcttgaaggacgagctaaaggcttaccttangtcgaaaagaaaattgtcccaacagtta

SEQ ID NO: 90926 - DNA, 187 bp, Glycine max
aaaaaaaaaagatcctaatggaaaaaaaaaaaaatccccaatgaaataaaagactcgaaaacaaaattcaagctgccaatttacatcattccatcaaaaaagactacaatgtttctatacacaacttcctacatttcccctcaacaagaacccataaccacccacaaacctaactcagagtttctac

SEQ ID NO: 90927 - DNA, 215 bp, Glycine max
  unsure (1)..(215): unsure at all n locations
ataaacctggacatcntttagaaatgcttgntaagtcaagacaggtagaaatccagtgtcttcattngggacctacttgctcagtaaatctgtgagggaaaaattcacagccttcgtcttaacatcattggggttctgaatccattcacactgaataagaattccttgaagaccattataatgtcttctgaaattgatgaacttatggaaatacg

SEQ ID NO: 90928 - DNA, 233 bp, Glycine max
caagcgacgagatgcagctgtcaactcgtttttgccaccgcctgtgttaactacaagaaattgggtgagttgctaagactaattaaacgcttcaacaattcaataggctatttttcttcaaggtcaaggtttgaacttttacttcagagacaaaactgtaaaaaaattaattttggcaatctctttagcttaagttttgtattagctttttatatattgctacacagaaatta

SEQ ID NO: 90929 - DNA, 195 bp, Glycine max
  unsure (1)..(195): unsure at all n locations
tcttccaccttctcaaatnttccacanaaagcaaacgagaaattatttgcaatgcttctttgatttggataagcattaaggtctcatngaagggtaaatcatacgaagtggtaacctctgatcacccatattgcgaaacccagctcggtgtagaatatttcacacactattaaatccacagtgcanaccactact

SEQ ID NO: 90930 - DNA, 353 bp, Glycine max
  unsure (1)..(353): unsure at all n locations
tctctgagtcacctgcngcatgcaagcttgatacacgcagagactaacgtcgtcttctgcgaccttcgtctatcgcgggcgacaagcctcgtgacacgttgagatgtacgtcatcttccgcgctcacaagatctgtcatactgacttttgagccacgctgacgggcagaaatacccgagtggttatccgtataaactatatgttgtctggaagacgaaaagcctgatagcacgcagagactaacgtcgtcttcagtgcccttcgtcaatcgcggccgacatgcccgttgacgcatggagaattactttatctttcgcgcttacaagatctgtcatactgacttttgagtcacg

SEQ ID NO: 90931 - DNA, 97 bp, Glycine max
  unsure (1)..(97): unsure at all n locations
tcatcatcgtgatatgcatgtcatggaaatgatntgnggcattccttttatttctgagccacctgctaagcanatatcccgacatccatcatgtctc

SEQ ID NO: 90932 - DNA, 192 bp, Glycine max
  unsure (1)..(192): unsure at all n locations
cttatacacataattgatgcccagatntctaaagatgtagataaaagtattagaaangaacacaaaacattgtgtataatttntaacgtgtacattattngatatatcattagtttaaaaaattttatacttgtattatctgggtcattgttntgtattacataggtaaagaattctactcatgtaaaacac

SEQ ID NO: 90933 - DNA, 181 bp, Glycine max
acccactcattaatacaactagcttatgctagcaaatcggtcatattagtttcctgacgctttcaatcgtaaatgccttattgaggccacgcttcttctgatgatgagatggcttctgatctgacgatgaatattcttcaccctgaagaggatcctgcattgcaagatagaccaaagttga

SEQ ID NO: 90934 - DNA, 161 bp, Glycine max
gcactaagcacgcgctgcagctgaaggtactaacagttgttggtggtcaagataaggagcccacatttttcatgaccatatgcaagatgatgagttgaaacttatgccaactggtatgcatgccctatgggacactaagagtccattctaggcatgtgagc

SEQ ID NO: 90935 - DNA, 276 bp, Glycine max
  unsure (1)..(276): unsure at all n locations
tgtgtactgctggttatggatgatccatagaagttatactatgtntactggtggatatggaggaaccatcgaacttgtataaacgcacgtgagcctcaaatctaagacttcttctggtagtttttcttatattaggacttatgatgatagataaattgctagcacatgctccaacaacactggcccctgcccggaatgtctggacactgatatataccacgagcttggaagatggtagacatgtggtgagtatgtcctgtcattcgatgcaccata

SEQ ID NO: 90936 - DNA, 137 bp, Glycine max
ttttgatcacctatctataataggccctaaaggctaacgataaggacgtcactattctttcgccacttactgaggattgtctctgtgccatcaaatcaagaaaacttcgaatattctctaattcttagtgacattgc

SEQ ID NO: 90937 - DNA, 245 bp, Glycine max
  unsure (1)..(245): unsure at all n locations
agtgattatctctctacatcatgagaccaagctcanataattctaactctcttcattttctcgtcatcgcataactatatcaatacaaccatcatctttaattactaaatatattgcattcgaaaacttggctatatccacaaattgtattatgggaaacccttaatccaaattgaacaggcatagagcatgccacagaacaagtctaagaagacaatgtgcataatcctcatgacatgcttcat

SEQ ID NO: 90938 - DNA, 262 bp, Glycine max
  unsure (1)..(262): unsure at all n locations
catgctcgcncatgcgagctaattctgttttttttttttgtgcaaaaaatctgactacacccncttttgtcatatntatatantttaaactcatatggccacaaataagaataggcgtattcaaatataatagacaaataaataacagcatgaaatataaaggtactatagtgccttctagtagcgcttctttaacgtcttgagtcaaacgcaggatgatggtatattaatcatgggttcagcacctgctcgtacctgccct

SEQ ID NO: 90939 - DNA, 277 bp, Glycine max
  unsure (1)..(277): unsure at all n locations
gtggcgctgatcttgctgcataggtntgtctctgctctntatagaagancgctgtttcatcccattaccattgatgcatgttgtgcatgtatgtgtatggctgtttgattctgggcgggtacaaagtactacaactacaaaggttggactatagaagaagtggtagtcacgttgagagagatactgatattatggactatacagatgaatgaagcagctgtggctgctcttgttgagaattaggactcaattgagacaacttgtgatacatagacca

SEQ ID NO: 90940 - DNA, 195 bp, Glycine max
  unsure (1)..(195): unsure at all n locations
tctagagaatatagatgtatcagaactntgatttaacatagtaaatgatggccaaagagaagaaacgcagaaataacaccagtatccctctctcttctaaagagaatagacgatggccaactaagaattactaaactaccanactctaatgaaagtagagctgccatattcaagttgatcaccaattatctcaat

SEQ ID NO: 90941 - DNA, 232 bp, Glycine max
  unsure (1)..(232): unsure at all n locations
gatcatcctgctctgacgaatgagaaaatcgcggcagatgaagaggatgataatganggagaaacctctgttgtggctgtcattcctacacaaccaaataatccaccagcccaacaatgtcattactcagccaatatcaacccttcttattactcaccacccaatcatacacaaaggtcattcctaaatcaaccatagatcctgcatgtcgcacaacccatgccatacacca

SEQ ID NO: 90942 - DNA, 128 bp, Glycine max
  unsure (1)..(128): unsure at all n locations
gtgagtttgtgacttgagtgttttgtgagccaccttgatgtcacnctaacatcaagtgttggacctgagtgtgtagaagtgatctctattgttcagagagcaatctctggtgtgtatttgatttaatt

SEQ ID NO: 90943 - DNA, 210 bp, Glycine max
  unsure (1)..(210): unsure at all n locations
aaagagggagagaagtggaactttgaagtgtatctcataagactctcattcatcaaagttacaacaagtgttacacatgcttctatttatagactaggtagcttccttgagaagctttcttaagagcacttncttgagaagcttctttgagaaaacttccttgagaagctagagtttagctacacacactcatctaanaactaagctcac

SEQ ID NO: 90944 - DNA, 163 bp, Glycine max
gaactacataacaattcgccacaagttattgacaaactaatttatacctacaacctgtagagtatgggctctgaatatagccaccgcttattttgattttggaacaccctaatatttacgaggacttgtcgatctcctgctatacttcttatagaagtaatta

SEQ ID NO: 90945 - DNA, 334 bp, Glycine max
ggcatttcttgtgactttgattcagaaattgcaaagctatccttcaagaaaatgctactcatgcaatcgtccgtcttgaatcgcaaaacgacaaaccgaattttaccatctattctcttgcggaatacactctgcagcacctactctgaactgtacaatctccatcttctcggaaatgaaggaaatgtgtgatgagtgctctactcttgtcctgatgataatattgttggataccaaccttccacatccactctacatatgacaaatccccatattatgacttgggaagacactctttcacgagatccttcacgcattctttgcacttatggta

SEQ ID NO: 90946 - DNA, 507 bp, Glycine max
  unsure (1)..(507): unsure at all n locations
tgtccaccatatgcnttcacaattttccttggctcanaagtagtaattgacatcaaatgctggannatttgaatatatgaaaatcttaagttttaccacatcaaactctcgggcaatcaatgatgttcatgcaaattatggtttccgcaaccacacactccaatattccaaatggacacaaccatgtcacgcaatggtttccttgagaaacaccannatggtgtttgattatgacttcattgactatgtacgaattttcttttggccagccattatttgccttcananataggtcttaattgattaatacaacacatcaagggtgacatanngttttagccccctcccactaatatagaagtcacatacttcaactntntaatngtcatgaagccaataatatcatgttggttagtcatatagacaaaaaatcatganattcaactannatgactaataaantcaatcatattttttcaatcgaatatataatctatcacactctaa

SEQ ID NO: 90947 - DNA, 393 bp, Glycine max
  unsure (1)..(393): unsure at all n locations
tatcttgtctatgaccttcactcncacaatattatagcatctcgcaacatcgtctnttatgaagaccatntgtcgttatttcatgagaaccaagcctcaaacaccacacatacctctctttcccaactccattttcgagcaaccccgaaaatttgactctnctatcacacccattgtcaacccgtcttcttcacatgctcacgaccctcacctacgacgatctacgagaccgaagcatgcacccaccctacctccagaactaccatggggatctcacttctctcacttgtaccacctcgcccaatggtggtatcctctaactccgnnctgctactctcgctctctcttcgctcgcactcgcatgtcatttcgatctactgacctaagctatct

SEQ ID NO: 90948 - DNA, 291 bp, Glycine max
  unsure (1)..(291): unsure at all n locations
agctntaggcttatgacctagccttnctcatganatanagacaataataaagaactatggccagtcaccttgaagataacaaatattntcttctctttttcctctcaaatgcctgtttccaaatattanaactagtagaaaataacagagatttgctcatatagttaaagtccaattcttctagtagctaggctattagatgctatcatctaagagtccaattcttgcagtagcatcatcctgaanatngaccaggtcattaagcagcacactccactatcctaaataaaa

SEQ ID NO: 90949 - DNA, 391 bp, Glycine max
  unsure (1)..(391): unsure at all n locations
acatacacaaagcgcgcataaacccatcatnccatgttgcgcacctacaactgagctcacgtactcccacgtagcccatattctcgtatctatcaacaccgggtccccatcaatcctgccaagcttgcccaacattcaagtagatcgacaatcaaacaacatatactatcacagccaagaaaacatggcataggcagaatactgtgcccaatacaccaaccaagatcacagctnttctcacttaaagacgccagtaacagatctcttcgatgccaattcgttaaaccggtggatcgactccaaaaatgtactggaagtctctagtacataagcctacattctgaccggagggatctactagagaacatctagaactcattctacattactc

SEQ ID NO: 90950 - DNA, 295 bp, Glycine max
  unsure (1)..(295): unsure at all n locations
tgcagcttgctgtctgagttctgaacagaaggtccagttcctagagtttgagagatgttgtgtgtaaagatctgtagagactatagctngaagcaggagccggtttgtgagcttgagatgagtntgtgagtgattgtgagatcctagaggtgaaggagacatcctcagcacttgtatttttgaaatctttcatcttgttcttctcttgttgaaagaaagcttcctggtatggaaagtaaatcctctggggatcttccctgtggtcatgatgtaatatattctatctattaatgat

SEQ ID NO: 90951 - DNA, 237 bp, Glycine max
ttattactagaaaaacgccacctactgctaaagatttgtgtcagcaaactgtactttcaaaaacacttactgacatccaaatattacccaccaccaatgcgcattctatgccgaagagtagaggacatttctaagccttgtgacatttatacgataactccatgttagcaaatggcctatcccagacaacttgttgacttatatagcttatacctgatgtgctaatttttactttaa

SEQ ID NO: 90952 - DNA, 146 bp, Glycine max
  unsure (1)..(146): unsure at all n locations
atacatgtatagntctgcaatatcttaacatgtntagaataattaatatatagaacaagactcttatatcagcgtttatagtacgtgcgtgctatcatatgatatattctatcccgatctaacatgtggaccatatggtggtagac

SEQ ID NO: 90953 - DNA, 514 bp, Glycine max
  unsure (1)..(514): unsure at all n locations
ttcgtagtaccttgagacatatatccataacgacatanatctntaacgacaatgtcattngataccgtctttactatacatatctcattntccaacacatcgcactgatttccagtgaaggctcgattccactcttgctgtttaaaccttcaacatctccttcaccactatcttgctgccaataaatcacatgaaggaagcatatnntatactttctaaattcagggacatatncatggagcaagcatctngctaaatatcctttttctatngcctatatcatacatcaatgaacatttttattcatctcgaggcaaacttccaaacatgctnttgaattattcaacatgattcaganatatatgaagccgttgacaataatngtcttctgtataattaacaataaaccacagctcttaagattgatgctgtacctatatttcttggcacaatctatntattgatgccttgctattcttactgccatctatatactcaccattntgcaagttaa

SEQ ID NO: 90954 - DNA, 411 bp, Glycine max
  unsure (1)..(411): unsure at all n locations
tctctgaagttcactctccaggtattcattgccatcgattnnttttcagggtatgatatactattaggatcatattgcggcatgaataanaaaaattgagtataaagataacatttataatgtcatataatcccacttcattgataaaattgcattgtaataatagtccttcgactgcccaattttatcngagccatttgatagtgttcattctactatggtcctctcttggctaaattcctttggtgagccattctcgactcatgttcagaacaataccatctaattcaactcattacatgccagtttccaatcaaacatgattgattattntcacataatgaacaataaaatgaatatatcttaatatatactaataagtcaatttgcaatcaacatgaatgattcata

SEQ ID NO: 90955 - DNA, 320 bp, Glycine max
  unsure (1)..(320): unsure at all n locations
gagtctgtggtctatgttcttctgcagatcaccatacagatctgtgtccttctttgcagcaatctggagtcaatgagcaacctgaagcttatgctgcagacatttataatagaccccatcgagcagcaaaccaacaacaacaaaataattatgatctttcaagcaacagatacaattcaggttggagagatcatccaaatctgagatggggcaagtctctacaacaacaacaagctatcccntctttcgaaaatgttgctggtcaagcaagccatatagtcctcccccaatacagcagcaacaatagcagcaacaacaac

SEQ ID NO: 90956 - DNA, 226 bp, Glycine max
tgtatgtatacatgattttgatgatgtcaaaagaagaaccaaacaaggctcatttgcttcaagagtaatacaagatggcttcaacaagcaaagccttgcttcaagaattacttaagatcaagcctcgccttataacaaagtgcttttaagccattcaaggctctggtaatcgattaccaggtagtataatcgattaccataagacagggttgagaaatagctgttg

SEQ ID NO: 90957 - DNA, 335 bp, Glycine max
  unsure (1)..(335): unsure at all n locations
agcttctattatgaagctgatactctgttctgatatncaaacacatagtacatttgtacttgataatatagttatcagatcacctaagataggatcatcttatcactgcttatctatatatnttaaatatcccttgattctaggagttagttgttcacaattgttgtcactttgttatgcatacatgtaaacattcaagagatatgcacactcagattattcccatcgtccttctcgtncttctccgtctgcgattgtgacaacactccttgcccccacgacagtccctactttcgcatcttcaccacggggaattaattaacattgacttagat

SEQ ID NO: 90958 - DNA, 511 bp, Glycine max
  unsure (1)..(511): unsure at all n locations
tatggctctatcaatcatttctgatttctcctttgagcttagagatntagacatcctttcttctnctttaagagcttctgcacaaccatgttgaatcaagatagcttccatcttgattctccataacccgaaatcgttttcccctgagaacttctcaatgccatactnntgtgttcccatctntcttgatcttgatgccccacggtgggtggccacttgtggttcttctagtctattagacttgcattagatcaaanaagaanaacaagaaccagcgcccaccaaagaaaccaggagttctatccatatatatgtggttaacagtgtgcctacatccatgagaaatgacaactcatcatcatcacattgatcatgaaaatctagttcaatacaagcagtaactaactttgatctctctcgattctttctaacaaaatctctcttaatctcctagctctctatctctttngaacttcttaattttcttgcnnaactttgttctctatacatg

SEQ ID NO: 90959 - DNA, 387 bp, Glycine max
tgcagctgtcacttatctacgggccgcgttgcttttttttggcggcctgctttcttctccttagcttgcagagaagatgcaacaaattggatctctctctttcactcctcggttcacttattaaacgaaattggaacttaatgcagcgtctgatttatgctgagacagactacgatttgcatgagtatattcccgattattgatccgaaagctaaggcgaccagcaagccgaaaatctttgtcagagtcttgaggaagcagctccgtcatcttgagtagtcatgccaatttggaagattctgggatctttcattaattcttatttctggagcattttgtgcgctatcttattattgatcgattgatttggcatatctcatgaatgct

SEQ ID NO: 90960 - DNA, 410 bp, Glycine max
  unsure (1)..(410): unsure at all n locations
agcttggttcgaggtacttacccgttgaagatcgaagaacgatgatgaacgaatggagaacgtcgaagaacggttgaaaacctttgcgagattcctcacggaaaacgttacggaaacgtttcggaagcgcctcggcttagattttcttcacggaaacaatttttccaagcaaattccaaagagagagaagtacctaaagggctggggatccttttcttcttcatttcctcccctatttatagcaaaataggggaggtggttgccgcccagctcgcccaggcgagctcagctcgcccaggcgagcagggttgcttcctccagaagcaaccgccttctggaggaatcttctggagggcccaaatgggcctggttgctatttgcacccncatttntactaaatacacccccct

SEQ ID NO: 90961 - DNA, 414 bp, Glycine max
  unsure (1)..(414): unsure at all n locations
agcttgagcctaagctacacatacctctctaatagctattctcacctccttgagatgagaagctagagcttagctacacaccccctataataactaagctcacccccatgacaaaaaacatgaaaatacaaaaaaaggtccttactacaaagactactcaaaatgccccgaaatacaaggctaaaaccctatactactagaatggccaaaatacaaggcccagacaaaggaaatacctattctaatatttacagagataagcgggctcatacttagcccatgggctcgaaatctaccctaaggctcatgagaacactagggccttcccttggatctctagccaatctacttggagtcttctacccaatgcccttgcggngtaggattacatcatcaattttgacagaaataatt

SEQ ID NO: 90962 - DNA, 411 bp, Glycine max
  unsure (1)..(411): unsure at all n locations
agcttgagcaaattctaacgataatagctttttactcggatgtncgaattaatcccgtaatatatcgagacactcaaaattgaaaccaaaagctctgagcaaattcaaatgacaataacttattactcagatgtctgattgtggccagcggtatatcgagacgttggaaattcacaatagaagctctgagcaaaatcaaacgacaataaatttttactgggatgtccgactgtgtcccatagtatatcaagacgctcaaaattcaaaacaaaagctctgagcaaattcatacaacaataactttttactcggatgtccgattgtgtcccgtataatatcgagacgctcgtnnnttgaaatagaagctctgagcatattctaacgataatagctctttactcagatgtccaa

SEQ ID NO: 90963 - DNA, 411 bp, Glycine max
  unsure (1)..(411): unsure at all n locations
agcttattcttatggcctgcctnctgacttttattttcgtgccaccccggaagagttaagccaagcccctacttttgaggggcaactcccaccttatgaagactatcccaagcaagacgatggggaaggagatacccatcttggccccctgctccacctcaaagatccatccccgcatgaactaccccagccgaacatagtccgccataccccagcctcacccacacccgtgaaagaatctgttccctttgcggaagataagggaaagattgaggtgcttgaagagaggttaagagcagtcgagggcctcagtaattacccattctcggatttggcagatttatgtcttgtgcccaacatcgtcatccctcccaagttcaaagtaccagactttgataagtacaaagggac

SEQ ID NO: 90964 - DNA, 408 bp, Glycine max
  unsure (1)..(408): unsure at all n locations
agcttatgcacggaaaatgtaattatgaaattgagatgcccgaagaaacaccatttcctagttaaccatgcattaagtaccatgttcaattattttgtttttaagtgaaacgggtttatgatcccaacatggttggctcgtggtgcctaacacatgaaactaagaatgtagtgtgaagtttcacgcttcccccttttttgtttttgttntgtagaagaaaacgcaaggatgagcaaacatatgcaattttgcagaccaaaaagttttgtgaacgcatatgcatgatgatgccatgaccatgcaaaatgtgaggctggaatatgataacggacaaatgcaggatatgtccattatgatgttatgaagagatgcttatgcgatgcatgatatgaatgcattttacggaca

SEQ ID NO: 90965 - DNA, 403 bp, Glycine max
agcttgatgatgtcgagaagaaatcacatgtttgtcatcagcaaaaagggggagaatgtgaatgtatgtatacatgattttgatgatgtcaaaagaagaatcaaacaaggctcatttgcttcaagattaatacaagattgtttcaacaaacaaagccttgattcatgatttcttcaaaatcaagccttgcctcaaaacaaaaggtttcaagtcatccaaggcacatgtaatcgattaccaatacatgtaatcgattaccaatggtttgaaagtgtataatcgattacacatcatatgcaatcaattaccagagactctaaacgttgggaattgaaattttaaatgaagagtcacaactgttcaagaaattaactgtgtaatcgattacactaatgctgtaatc

SEQ ID NO: 90966 - DNA, 405 bp, Glycine max
  unsure (1)..(405): unsure at all n locations
agcttttaacatcattctgntcagtctctttattaagaataaacaaagaattagtggctgaattccaatccctacaatatgaaggctcaaaatttcaattgtgaactagatgctgaattatttttagttatttatttttaattgatgatgcctaaagccaaatttatgcttagaattagaaacatacttagaacttgattgcgtcttgaagtttctttttctattaattattttaaaaaaatttaattataaatttagcatgtgtatagtgcatacaagcacataatttgtggttactcagagtaaaagttgaaggcaaccacttcattccttgttgtcaaatttatacttggcattgccgcatagtgggaaataggactaagaaatggtcattagatcatacat

SEQ ID NO: 90967 - DNA, 412 bp, Glycine max
agcttgcctcttttgtgacttattgctacaatggcatgtcggcatggcatccctacatcaaagttgtaaaatcagcacacatgtaggttacaaatgaaaaaaagaaaaaatatacagaacacaacctgttagttgccaaactctacaagtgcatgtccattcagctaaattgacctcaactttttccccccacatgtggacctcatatctcacgcccatgttatcactacaccaaattggagtccattgattagcaaaatgaatctccttttctagtcttttgtattgaactggacataatggtccaggttttccagaaagtttaaccttgtgggcagccatggttctcgtgatgtaacatctaatttgttcaagcatggtgagaataggcttgctcctatactgcaaaatc

SEQ ID NO: 90968 - DNA, 399 bp, Glycine max
  unsure (1)..(399): unsure at all n locations
agctntgatttgtgcccaaaattggcttatatttgataagcaaaatgtcaatgatttgcaagttgaattagatgaaacaaaaaatagtgaatcaggtatgaaaactcttgattttttttcaattgtttacaatatcaatatgaattaatatcctgttctaaagagattttgattaaatttttaaaattgtgtgggtttgctttaaatactactactgttggactactagtggattgctagaagaagttaagaccactagttcttatgataatattttcaacttagtttataatgttatttattttttttttgcacattttcaacttattactaatacagtaattgattttgatcttatggttgatcaacaaactacactgttgtttttagttttagact

SEQ ID NO: 90969 - DNA, 401 bp, Glycine max
agcttctaccactctgatgtgcaaagcatttcctttgtcataaaacaattttcactgaagtgattctagtctttggcattgtgatccatagactcttgggcgcaattaggagagatactcaaagttgcattcgctataagcaaaaccaggcggaaaaccaaggtagatctaaagtatattaaacaaggaaaggacaaacccctctaaaaatatgtcactaggtttaacaaggaagctagggaaatctttggcatcctcccgggcatcatccttatgttggtaaaaaatagagtaaaggaaggctcattgttccatatctcaatttccaagtttcctcttgaggaattcctcagacgagtagagaagtatattaattatgaaagtacgatagagacaggaag

SEQ ID NO: 90970 - DNA, 389 bp, Glycine max
ctctttcccaatagcctgggttgcttaaatcggcccttctttgcctacattgtctaaaaatctgtaaagtgggtgtcaaagtgtacccgaattctgcacaagacaagctttaaataagctctgaattcgcgacgttgcgcttagcgccaccctcgcgcttagcgcgggtaagtggattcgagcttagcgccagttgttgctagtcggtgaaaacgactaacttttgtgtatattgaatcaaacttctccaatttatagttgtttcgtaatattataagtactttatgttaaatataggtaatagatgatttatacttttgttttgtgtgtttaataatcaatttctctcaatttcaggttttcaggttaattaggaaaattggaaaaag

SEQ ID NO: 90971 - DNA, 411 bp, Glycine max
  unsure (1)..(411): unsure at all n locations
agcttcatcgtaacctgcgaactcactctccggttncactgctacctntctcttctttttcctttatgttctctcaaccttcacttaaacgaataacctaaaagaacaggtaaaaaaaaaaaacttaaacctttcgatctttgttgatgttggtgttggttttgaatttcgaccaccgcgtgcgccaccgtgcgcggcctgcgatgttgccggcgccaccgggagctacaacaacaaccgtcgtggtgagaatctcgcgctacagatcgcgcggcgagcattgataaagaagaaaaaaaccacgtgggtcccacaccgatggaagctcagaagaaaacccaaacccaaaccaaactcacccgaacccaatcctctctgcttcggtgttcctctcccaccaccaccacgcgt

SEQ ID NO: 90972 - DNA, 410 bp, Glycine max
  unsure (1)..(410): unsure at all n locations
agcttagacatgacaatggngcgaggcanggacgaatattgtctctccaaatccctgacccccgactccccaatatccgtcgggttaaaatttattatctcatccccgtacccatttgggtatcgggtatccncgtccccgtccatacccgattaaattagaaaaataatttttttgtaaaaaaatattaaaaatatgattttagaaaaaataaattgattgttaaacatttatttttaactacttatatatcaataaatttattatcgcgcatgtgtctacgaaaatcgttaagaaaagaatattaaattatgtaaaaattctaaaataaaattaactagtaataaataaaattaagactaacacatttgtctagtgtaattccattgttttttaagggaaataaaata

SEQ ID NO: 90973 - DNA, 210 bp, Glycine max
  unsure (1)..(210): unsure at all n locations
agcttgtagaatggctagacatgatacatgtcagggtttggtttggttcaaggataaaagggatgccccacattantttcatgacacaaaatgctaaaatgatgatttggaaattttatgcaaaactggtcatgcatgcacctatgtggacgctcaactgtgaaatgtctatggtcatgtgacactatggctcacgatatgattcctata

SEQ ID NO: 90974 - DNA, 441 bp, Glycine max
  unsure (1)..(441): unsure at all n locations
gatccttaagtcacctgcngcatgcagcttanacatctttntggtgtgatggtgaaagtcgggtaaactttgttattcggtgatgtattggcatttgatgccacttataagaagaataagtatcatctacctgttgtgggtttttctggtgttaatcacaacaatcaaaccatagtttatgacacaatccttgtaacaaatgcaaccgaagagacgtatgtttggttattagaacaatttgtgcaagccatgaatagtaagaaactatcaacaacgattactgatggtgatattgcaatgagaaatgcataagaaagatacttttcaaaacatgcctaggttatgtgcttggcacttgatacgtaatgcaaaagccaatgtaaacaatccttgcattttgccaatgtttcaaagatgtatgataggtgacttacaagtgaa

SEQ ID NO: 90975 - DNA, 406 bp, Glycine max
  unsure (1)..(406): unsure at all n locations
agcttcgttcaccagctcaaaacctatgtctgtcaattntcctacatccttgccttctcttctttgcctcattatttttcgttggcctgaatctgattctctatgtcctcttctttctggaaattaatactcacactaattaatcaaattagccctaattacctctttgttctatttaatcacttatctaagtcnttgtatctgcacaattttttaattctttttttacattttttagattttagttttactcattttagtccctgcccgtctatttttaatctagttttagaaactaaaatttaaagattgtgattaaactttcaaaactttagaaattaatttggtgaattacttttaacactntaatattggtttctaatgatattttatttttactctaatt

SEQ ID NO: 90976 - DNA, 405 bp, Glycine max
agcttgcggactataccttcgaccgaacactgtcgtgtttctgtctaagctcggattcaaggcgggctgcaacaccggctccgcttccctaactgtactggaggcggttgcggtggctttatcctctatggttttctggagttttaacatgacctccgagatggaagccatttgatcttttaaggtccatagatcggccttcatcttgtcctgcacgccctcttcattatccatttttctggatcaagtgttataggggtgccttggtgttttcttagttatgatgaaattcctaaagaaataaacaacggtgagtatgccaccaaaacatgagtatacaaatggatgatcggagcacttggatccaccccaagattttagataacgtaatgagtccagaatttc

SEQ ID NO: 90977 - DNA, 403 bp, Glycine max
agcttcatgatggatcaagattgattcaatgagttttgatgataacaaagatgatgaccaaaagctcaaaagtcaagatcacttcatgataacaaagatgatgacattccagaatgagttcaagattgagtcaagaacacttcaaggatcaagaagaaatttgatttctagaatcaagaatcaagattcaagattcaagaattattcagatcaagattcaagactcaaagattcaagaatcaagagaagacttaatcaagataagtattaaaaagtttttcaaaacaattgagtagcacaaaaagtgttcacaaaatcattacctaagagttttactctctggtaatcgattactagattatagtaatcgattaccagtggttttaaaatgttaagattttca

SEQ ID NO: 90978 - DNA, 398 bp, Glycine max
agcttagaacaatatacttggccttcgttttattgtctttgggcttggcgaccacgatcaacaaagtactttcgacatctactatatgttgacttgaccaacgctgttattggaatgatgcgacaatctttcaacaccttattcacacattctgataggttggttgtcatgtgaccatatcttcgtccagatgtatcgtaagccatgctccattttttctttgaaatgcgatcaatccatcttgctatggctggactcaactgacgaaatttttctaagttttgatcaaacacatgcttgcaaggagtgtacgctgcataaaatttgttaccatcaaaagttgtaggtagatatgaaactcaaattaacttcatgtataaaataaaccttacccaatt

SEQ ID NO: 90979 - DNA, 410 bp, Glycine max
agcttcattaagaggcttcctctataagcttcctcgtggcttctttgagaagctttctcaagaggcttctttgagaagctagatccttatctatccacacccctctattaactaaattaacttccttaaaaataattacagatgaaaataacgcaacaaataatcaaacatcaaacataattactaataatatatagatatatatatcagggtgttacaccgtgtggtgttagctggaatatggatgccaaagtggcaagcgcatccgccatctgattttcctctcggggaacatgatggaaggagatctcatcaaaggaaccagccaactccttgatataggcttggtagggtatcaacttggggtctctagtttcccattcccctctcagttggtggatcaccagtgc

SEQ ID NO: 90980 - DNA, 406 bp, Glycine max
agcttcaataataacatagaattcccaagtatatgtagatagtttctgcattctaccagacaatttttttttaaaaataagcaataggatgcttgttttggcttaacacaacaccaactcccctccctgaagcatcagtttctaatacaaaaagtttattgaaattaggaatagccaagacaggtgcagaagtcatggctatcttaagtttttggaaagcctgggcagtagcttgaccccatttgaaagagtccttcttcaatagaacagtcagaggtgttgcaatggtagcataggtcttaacaaatcttctataataacctgtaagtcctaggaagccccttaatttctttagattcataggctctggccaattctgaattgcctctaatttgtttgcatccat

SEQ ID NO: 90981 - DNA, 390 bp, Glycine max
atttttacacgacaccaaattggcatgcgcttggggactggagtaggtgaattgattgcccaatttgaatcaaaggtcaaggtaattcgatctatacaagagaaatggcatcaacacaaaagaagacatgcagtagaaagatcacaaaatccatgacacttaataacaacaccatcaacaccgatgtcaaacatgtctacttctcttgtcgttccaactattgatgtcatgatggtgggaagaaaggcacatgttgtgatgacaacatcattcattaggtaataaatcggtctagaaattcatgatatcatgtaccaagtctccaaacaacttaccaatattgccaaaccaatggtacaaaatgagtccaccatgcaaagggattgaata

SEQ ID NO: 90982 - DNA, 414 bp, Glycine max
agcttgagtgagagagtgcaagtgggttcgagggtcacttctgtaaacacaaaggcaaacacacttttaagcagaaattctaggagggtcaaagaaagtcgaacagaaatagaaaactaagcgaggtttgagggagtcattgaattcaaaccttcgagggaatccacaacttggacaaagatgaacgtaagtaaagaagaaggttacacgcgattgagaggaagctaattagtgattttgggaataataagtaagattattcaaagacggtcttatataaaaatcgtctttgtactagcaatacaattatgacggtttttgtcaacctgtcgttgtactccttgttcaaaggttaaactcactattgaaaatggatattcaataatcgtcatcatatacattcgttaaaattac

SEQ ID NO: 90983 - DNA, 410 bp, Glycine max
agcttattaacaacatacacctaggaagataatggtttatttatgcattatcaatcaatatcaagactacttgcatcgcataacagcttgccttaatgtcctaccgcacattatggtatatcggacattaaggatacaaggcatatcacgagcatcaattactttcatacaatcatatgaaaaaaaagcaataattccaacataaacaactaaataatcacaagaaatcacacagagtgtacaacacactggttgaaaggtttgacctgctttgataccactaaacctgacaccctctaccccgatatacatatttatataataaaatacatgcaaaagtggaattacataaaagagattttattttctgagcataaaatagttcatgtatagtaaaggtgcacatccat

SEQ ID NO: 90984 - DNA, 358 bp, Glycine max
agcttgtaatcgattacacacatactgtaatctattaccataagagtttttcagaaaacattctcaacaatcacatcttttacttggttcttgaatggccatcaaaggcttatatatatgtgacttgagacacaaatttgccaagagttttgtagaacacaaaggtcttatcctcttaacaagcaacaatgtgttatcctcttacaaattccttggcaaacactgtgattaataaggaataatttgagtgctcaaattgttcaatctatctctttcaagagagatctcttcttctcttcttctttattctgaaagggattaagagaccgatggtctcttgttgtgaaaggatttctaa

SEQ ID NO: 90985 - DNA, 410 bp, Glycine max
  unsure (1)..(410): unsure at all n locations
agctatgccaatttggtttttgccggagaaatgatcaaaatgggtttgaaaaaaaggcaaatttgatcatcttgctttggtggataaaaagcttggggcaaatggagagaataagaaggagggaggaacccatgttgtgactgtcgttccaacatggccaactttcccaccagctcaacaatgtcaatacttagccaaaatcaacccttctcattacccgccaccctattagccaagaacacccaatcatccacaaaggccaccccttaatcagccacaaagcccgcctgccgcacaaccgatactagacaccacccttaacatgaaccataacaccaacctgngaaggaattttccagcaaagaagtctgtagaatttatcctaattctagtgtcatatgctaacttac

SEQ ID NO: 90986 - DNA, 407 bp, Glycine max
  unsure (1)..(407): unsure at all n locations
agcttgtcaaaatatttttttccagtaaacttcacactcaagtttacaaataagctctcattngattagaacttatagaataaatgcttagttaatttgtttaccaaaacacgccataagtctgaattacaaaacctggaaaagaagctataaagaaattaaaaggtcagtcacctgtaatttagtaaaaagtcatataaagcatgtacattgttgttgccactaaaaaccagcaaagattctgggctattatcaacatcagataatgaccttaatcgccgagtctgttatttcaaataacaagcaccgattaatataaatgatgcacagggaaaaaaaagcattcgaattaattgatagacaaactcacagaacaccataatatacacaaaagagacagccaatta

SEQ ID NO: 90987 - DNA, 403 bp, Glycine max
agctttcctttgtttccttccgttcttatcttttgctcctatggcctacggctggattaaccgtgttggtccactaagcacacaatttgtatagctacaaatgcattaagtaggtaattaaactatttacatgactaagacagttgcacttgcacccgaaggtaatatttgtttgcatatgtgtgaagttaagtgcaagattgggactttttttgcttctgaagtgcaacattgagactgaaacactttctcttttttttatacaaatgctgaaatgcaagactatccctgaagaaacgagcgcctccaattagaaaattaactgctccttgaccccatgtattcgatttggaaattgaaaaaatataaactaatatattttatagttaatactactatattg

SEQ ID NO: 90988 - DNA, 385 bp, Glycine max
  unsure (1)..(385): unsure at all n locations
agcttaagctccttcaactgcacaaggctcttaatatttgaagagtatacttgtggaaacttcacccgacgaagacactgacaaaaacttatcttctccttcttggacaaagtatagcaggctgggggcaaataaatttttttgctatcaaaccttggatgcaacagggatcgtatgcccatatcacttagatcttgacaggtattcaagccattcttcgtctttccttgaaagttaaagagcgtcccaatcacactgccacatacattnttctccacatgcataacatcaatacaatgtctaacgtctagatcagactagaacgaaagttaaaagaaaatggacctcttcttccatatggaactcttacttttatccttctttt

SEQ ID NO: 90989 - DNA, 404 bp, Glycine max
agcttcataccttctgaactaggatgaaaatacatagataagtagtgatcagtagccttatttgttgtagatattactcactatcaacaaacaacaaaaaattcagtatttcaagatgaatatgtacatattcagttcaaaacatgtttggaatattttcatatcataccttctaatgcttttctaacgtctagaaagatcagaacattgacatcccgcctcatacatggagaaagatcagtacacaagagaccaatcaaagtaccagaacttactgcaactaaggaaataactaaaaacttctaaagattatgctacacattagtacttgaaaagacgaggtcgttttcttcaaagaattgagcaaaatggttcatgcaagaactgtaatattctatacaaat

SEQ ID NO: 90990 - DNA, 406 bp, Glycine max
  unsure (1)..(406): unsure at all n locations
gcttactgacatgagctaaaaaagatttatatggtcataacctacttttataagcccaaataaactccatataagttcttccaaacactcccatactcggatccaatttatgtaattacgtaaaaattgacatgatttcctgttagactcagttttttttggtttcactttagtacttcatctctaaaccacaaggtgcatgttgaacacttttttttgtctgattgcagttatttgaaatggttcaacatatggttttctttgaactgctgcttgatatatcaagcatttcttttattntttttccatttgtggtcattgacaattttgttgggttataagttaataattttgcccgttttaaattcacatgcttttacccttccactgatttatgtcacagact

SEQ ID NO: 90991 - DNA, 408 bp, Glycine max
  unsure (1)..(408): unsure at all n locations
agctttataagttgcggtctgggagacgaatgtcatttgtcgcgatatgtgaagatgatgttccaagaactttggatttggtccgaccattcccttctgatttccagctgggaaattggcgggtggaggaacgccccggcatttacaccacaagcataatgtaaacctttacggttttaaaagctctatagttgggcctaggctttagagttttcattttgttaaggctttgtgtcttttgtctttgaatttataatacaaagatctttcttcatctgttcctggtctctacccattctcattcatttgcatgtttacttctttttctaaaacggcagatccgatgacgagtcccccgaaggtactaatacctgngacccgtctatcaatttcgagcaagaaatgaac

SEQ ID NO: 90992 - DNA, 408 bp, Glycine max
  unsure (1)..(408): unsure at all n locations
agcttaacaaccaaacactcttgatgtaatgattctatctatctatntaatggtatttcagtattattgtcttttttatgtgcttattatcaatgttggggcttgatcacccatgctcatggtatgtgacagggtttaggcattgagaaatgtttaacttttaagaattgaaaagatcatataaataattcatctcttatgatagaatgatgttatttaacatattttatgcatctttgttcataatgcaatttgtctaattcatctcttaagggattaggggagaaattaggtaggttaagctctttcatgtgaggaaacacgacctgaatatgcaagtagatgcaggtgataattgaaataatactgaatagaaaaaaatcattaacgttacatcaagaataattt

SEQ ID NO: 90993 - DNA, 402 bp, Glycine max
gcaagcttgaccaggaaatattggattgggtcgtatgtttaattctggttgttcctggtgcggagatgatgggacagaggtgaaaccagagcttaagtttcttttggggaggtagccatgacaacagacgttggatgattctaaattctgagagctgttggggaatgcagaaaacgagattaacacgagaatataagtttgaatgaggaatgtagagggacgtgtgaagcaacggtcgaatttgctttggttcagtagtgaacgtgctattaatgttaagtgattcgtttgggcacgttcagatatcagtagttgctacaattcctctagcagacaaatgcccagcttgcccctcagtttttcaaactgttttgcatccaatgcctttgtgaaaatatctgc

SEQ ID NO: 90994 - DNA, 406 bp, Glycine max
  unsure (1)..(406): unsure at all n locations
ttctaagggagcacanatcctatacttacccaatttgtcttttcaatccacttagcttactcactagtctttcacttgactntgttctaacaacacacacactttatttgaacttttttttttttgaacacataaaacattttattaatttgcagggtgtggtgttggttcttaccttttaaattatccatcaaacaaacacccccaaatttggggaaaaattttcttaaaccaatgtgctatcctaaaaccaaaacatggtaaatggagatgacaattcaaagctcaaggttcaatttgacaattacaattcagctcaaagatgggtgcaaatgatatcattattgataaacatgtaagcttttggtcaagtggcttgtatatacaacaatggccttcatcatat

SEQ ID NO: 90995 - DNA, 403 bp, Glycine max
agcttcattgtaagaactgtggttagcacttgttgcagatgatgagagtgatgagcattatgactgcgacagcgacgaagtctatttcgttgaagccattgtgaagagacggcaccgtgaggcgccatttggcggatgagattccgatctctagcgacagtggcattggaaagcatggaccatatgtgacacggaggtagctgaagtcgccgccggcgacgggcatgtctactacaaacttggtgtatcataacgcggagtggagggcgcagaagccggcgatggcaatttaaataagagtaaacaccaaattcaaattaaatactagtagtatcttagaatttcattaatttatctacactattcatgcatttgtcagtaaaaatcttttttattttaccta

SEQ ID NO: 90996 - DNA, 409 bp, Glycine max
agcttgtagggttaaagtctcacgattgtctcgtgctcatgcaataattgttagccgtggctatacgagacatcttgctaaacaaagtcaggttagcgataactcgcctatgctttttcttccatgctatatgtagcaaagtcattgatcctgtcaagtttgaggagttggaaaatgaagccgcaagtatactgtgccagttggagatgtattttccccctgctttctttgacatcatgattcacttgattgtgcatctggtcagagaaatcaaatgttgtggtcctgtttatctacagtggatgtacccgattgagcgatacatgaagatcttaaaagggtatacaaagaatctatatcgtccaaaagcgtttattgttgagaggtacattgcagaagaagccattgg

SEQ ID NO: 90997 - DNA, 390 bp, Glycine max
  unsure (1)..(390): unsure at all n locations
agctntagcgtcacgacatccgatcatagtcatggtggaatttagcgcgatcatactgcacctattatgagtgatgattcttaagaagccattaataggaacttggcgtgcgtgactatgagcctttttgcatattttatgagtgggagagcacttttgagggtcgttaacaatattgtataccatgaagacctatcgtgatctagtttcgtataggatgcctagacgtgctctgagtatgagcgggtactcaccatatattgcgggctatgatgtaagtgcactgttgtatacctttcttcgttcacaatggaatcactcagtattttatgtggatcaattctacttcttatttttattatataactgagaatagatcattcttatgct

SEQ ID NO: 90998 - DNA, 397 bp, Glycine max
agctttgagatggtatttggccttagaattaattttgctaagagccaatttggtgcaattggccaatctgaggagtggtgtagtcttgctgctgactacctgaattgtggccccctgcagtttccattcatctacctagggatgcctataggtattaaccctagaaggaaggtggtgtgggagcctttattcagaaaatttgaggccaaattgaacaaatggaaccagagaagtatttctatggctggcagaattactttaattaatgctgtcttgacagctttgcccttgttttatatgtcttttttcagggccccttcagcagtcattaagaggctcactgccattcaaagacaatttctttggggtggaaatgtagaaggaaaaaagatagctt

SEQ ID NO: 90999 - DNA, 409 bp, Glycine max
agcttcacaacttgtttctgtcttcactattttattcttgtttggttgctcaaattaaatgtattgttctaattttttaacattgctatttttctttgtaggggaaaacacacccaactcaattttttttgcttttgatgtccaccccaacccaattatgtgtgtttaagttgtattaacagtgtcatttgttatattttgtgaaaactgggaatttcattctgtgattgtctgtttgtgtactgggctggctttattgcagaagcaaagtagacactctcttgttttgtaatttccttttctctcactctggtgtcttaaagatgaaaatgtatgtttctaccagttttgtttgttttcaaaattaatacactaatttcaattgaactttctctcttatattgggata

SEQ ID NO: 91000 - DNA, 406 bp, Glycine max
agcttccttgagaagctagagcttatctactcacacccatctaaaaactaagctcacctccttgagaagctttcttgagaagctagagcttagctacacacccctataatagctaagctcacccccatgacaaaaaaacatgaaaatacaaaaaaaatcctactacaaagactactcaaaatgccctgaaatacaaggctaaaaccctatactactagaatggccaaaatacaaggcccaaaataagaaaacaacctattctactatttacaaagaagagtggacccaaccttggcccatgggctcaaaaatctaccctaaggtttatgagaaccctaaggccttctttatcaactctagcccaatcctcttggagcctcttgctcatggctctggtaactggtcc

SEQ ID NO: 91001 - DNA, 400 bp, Glycine max
agcttacccctatggcttgcctccggacttctctccccgtgccgccctggaagatgtgagccaagcccctaccttcgaggggcaacttcctccttatgccgattatcccgtgcaagacgatgaggaaggagatacccatctcggccccctgctccacctcaaagatccatccccccatgaactaccccaaccaaacatagtccgccacgttccatcttcacccgcacccataatcgaatccattcccttcgcagaggatcagggaaagattgatgcccttgaggataggctgagagtggtagagggcctcggcaattacccattctcggatctagcggacctatgtctcgtgcccaacatcatcatccctcccaaaatcaaagtaccagactttgataag

SEQ ID NO: 91002 - DNA, 365 bp, Glycine max
atcccgtgcccttcttctgcctacaatttgtctaaaaatctgtaaaagtgtgtgtcaaagtgtacccgaattctgcacaagacaggctttaaataggctctgaattcgcgacgttgcgcttagcgccaccctcgcgcttagcgcgggtaagtggattcgagcttagcgccagttgttgctagtcggtgaaaacgactaacttttgtgtatattgaatcaaacttctccaatttatagttgtttcgtaatattataagtactttatgttaaatataggtaatagatgatttatacttttgttttgtgtgtttaataatcaatttctctcaatttcaggttttcaggttaattaggaaaattggaaa

SEQ ID NO: 91003 - DNA, 423 bp, Glycine max
  unsure (1)..(423): unsure at all n locations
atcctcagagtcacctgcggctgcagctttaccaatgactacctgattaatcctttatagcccttngagccctgtttccctttccttggtttgaagctcactacaagccttaagtgaaaaaccatgatattaccatatccttaaagaattttggagctttggaattgttttgggaataagtgtggcgggtttttgtttcattggacaacttgttttgttgactattgctcatgatgtattttgggccatacttgatgtacattgtatattggttaaatgttggacatgctgaatgaaatgttgtttctcacaggcaaaataaaaaaaaaaaaaaattcgaaaaaaaaaaaacaagaacagcaataaagttgagtgaataagatcttaaatggcacaagaatgatgaaactctcggttctactc

SEQ ID NO: 91004 - DNA, 403 bp, Glycine max
agcttgttaagatattgtagaaacaagagggaattggtttgacatgctattactatattctccacttcttatctaaccttggaaaggctccacaaagagaaagcccatattagaaatatgtttatttctgatgaatggatcctaaacaagttatctaaggagcctacagggaaagaagttgcaaaggtagtgctcatgccttctttttggaatagtgtggattacactcttaaagtcatggctccacttgtcaaagagattcttcttgtggatggagaaaggaaaccagccatgggctatatttatgaagcaatggacaaggaacaagaaacaattatcaagtctttcaacgaccatgaaagccagtacaaagatgtgtttgcaatcattgataaaaagatgg

SEQ ID NO: 91005 - DNA, 410 bp, Glycine max
  unsure (1)..(410): unsure at all n locations
agcttcaacgatacaagtaagttcgatactttcttttctctttttcttgtcggaactttagggtagaacaccttacatttagctttagatttttagggttttaatgcnttttcagaaatagtttaagcttacgactttatatacgtttgtactgtattcattattntgggaacattgaatgtctgatatgtcttttagaggcttgaaaaatgcaagaaaatgaactgcatttctgcattttctggaaaacacaatgaactcactaagcgagcatgctgcgctaagcgagttcatcagtattcattgaatatacgcattcctggaagaactcgctaagcgcgcctactgcgctaagcgagttcatcttttaaggatgaacactcatcctcttgctgagatgcctgtggcta

SEQ ID NO: 91006 - DNA, 412 bp, Glycine max
agcttattaagaaaatcgtccgatcgttagtttgattaatattaaattgagatttgattttcttatataatgtctcgatttaaatctgatggataaaaaaaatacgattaaaaataaatatttttatatactaaccaatataatgatgaaaaagaaaactcattaattatttttatagacgcattattgaatgacatcatagatttttatatactaagcattttctgatacatgtttgtctgtttttttaacatatttttggcatgagccgagccaagccaaagccaaacgaggagccacgccactaacatcttcctcgctgaaacgacgacaattaaaattatctaaccttcaacgccagttcgctgcatccaacgagaacagcgcgactacaattagatccaaccaaacc

SEQ ID NO: 91007 - DNA, 385 bp, Glycine max
agcttagcggaattggacctgccctgtaatatttttatagaccgtgctgaacagacgctaatctaatcatgccactcggaccaacgaaaaaactggggcaaatgtagacggtgaaaataaaggaaaatcccctgctgcgactggaatttctacatggcctaacttcccaccatctcaagaatggcattactcattcgaataacaactttttccttacccaccactcacgtatccaataaggcctttcctaaatcaaccacaaagccttgttaccgtactagcaaagacgagaatcacctttaactattcctataacatcgaccaagaaatgaattttcgctcgagaaagcctgtagaatacaccccatattcagggacctatgct

SEQ ID NO: 91008 - DNA, 410 bp, Glycine max
  unsure (1)..(410): unsure at all n locations
agcttttaatgataaganagctaagaaggtctacattacatgggataaaaatgatatggatgtagaagcaagcttcatgatgaatcaagattgattcaaagaattttttatgataacaaaggtgatgacaaaaagctcaaagatcaagaacaattcatgataacaaagatgatgatctcaagaatcaaagaatgagttcaagatgttcaagattgaattaagaacacttcaaggttcaagaggaaatttgatttcaagaatcaagaatcaagattcaaggttcaagcttccaagaatcaagatcaagattcaaggctcaagattcaagaatcaagagaagaattaatcaagataagtatgaaaaagttttttcaaaaactgagtagcacatggattcttctcaaaacatg

SEQ ID NO: 91009 - DNA, 401 bp, Glycine max
  unsure (1)..(401): unsure at all n locations
agcttagattgattcagtctaactatggattcttgtttaataatataggctacatcataaaacacaaaagcatgatcgattagagaaacatctttatatacatcagttggtttgttagaaagatccaacgtctttacctactgctgtcaatcttaattaattgcatttttactatttttagcctagacttagtttaattccggtctaaatcatcaattatcaatgtttctttcaacaatgccttatttatgaatttaaccctgtctaagactagttccctgagtttgatagtcggattcatccattttaattttaaatacttgacgattcggtgcgctttctggcanaccagatttcccttgaacatatttgtataaagaaaaattggaccaaaagtaact

SEQ ID NO: 91010 - DNA, 414 bp, Glycine max
agcttgaagaggtttctttgaaatattacttgggtgtagcctacaaaggcttagagaatactagcttgagcctgtagaggcttagagaatacttagtggatcctgcagaggtttaaattactaggttgggtgttgcatgtacaggcaagtaaagaatactaagtggaacttgcaaagttcaagaatactaggttaagaatactaggtgtggagagtttaaaataatgaataccatggttgtgtgtttggtcttagtggaaaaatcctaaacttgtaggtactagatgttgcccatgttgggatgaactagtataaatgatttcatgtattgtatccttctttactatttctcatttattttctcccattgttggcttatcattaagttttgaaaaatcttgtttacaaaagatt

SEQ ID NO: 91011 - DNA, 400 bp, Glycine max
  unsure (1)..(400): unsure at all n locations
agctntgctagaacaccgcctcatatgctgataacaccacatatgatggaccatcatgttggatcagcaccagttgttacagcctcgccctgggaaaggcaaaattcttacttgggagggtcccctgaggcttctggttttcgcttgngttctctaagaagtggaggttttcatggttcctggcaaatgcatccactggattttccttctcacaacatgttttctcatgttggggggaatggcaccgaactgacaaccaatgctgggcaaaactctcctaagcagctatctcatgttttcccagtgagacatcctatgtcttcaatgtcaaaatttgatgcttccaatgaacgtatgagaaacctttatcaccgtaaaaatgaagcaagcaccaacaatg

SEQ ID NO: 91012 - DNA, 393 bp, Glycine max
agcttctagtctcaattttgagcgtctacttctattctccaattcaaccggacattccagttactagttatagtcggatgaataccctgcgcgctcacatccacactttggagcgggacgatatattccaagactgagacggacattcgtgcacatagattatgccaatacaatttgctctaagctatccaactgagtggtgagcgtcttgacacagttcgcatctaacgggacatactgttacaagttctcgacgtttgcattagatcagagcatagattacacttatgccacgcttcgatccatatcgggcctcatcctgacttccactgtatcatgtataagtccccgaagaataaaaaatacatgcatgtctagattttatgcagctca

SEQ ID NO: 91013 - DNA, 413 bp, Glycine max
  unsure (1)..(413): unsure at all n locations
agctncacttattcttgaaattctcctctttttttttattttatcagnttatgattactgctgctagttattattactttggctctctgtntaaatgttactttcctacctgcaaccaagatcacccaaacatactcccccaaatttgggacaaatttgtcttanaccataatgctctcctataacctaaggaaaggtaaacggagatcaaaattgcatttaagctcagggttcaaagactcattcaatcatattcaacctcaaaatgggtgcaagggtttaatcattcatgaacaaggtaaggctatttggctaagtggctaaatcaaatcaatcatggccttcatcatttccaaatcatgcattcattcagtattcaaagattcatgcaaaaattggtacttgatgctagt

SEQ ID NO: 91014 - DNA, 410 bp, Glycine max
  unsure (1)..(410): unsure at all n locations
agcttgtaaacctgagtctcgtatcggttaatcgatttctactatctcataatcgattacattgttggttgaaaaaatgactgatttattcaggactctcggctttaaattgattaccaagtggattaatcgattacttctctttcattaagtgtttagaggtgaacaagaacactttaatcgattacttagggcatctaatcgattgcattgttcttgagttatttccagatgctgggattaactctntaatcgattacttagataatctaatcgattacttcattgaattaatcgattatgctatagatttaatcgattacaggcagttataattgttttctctataaataaccaacttaagttcacatctaaaaatcaagagatcaatagaggatcctcaatacatc

SEQ ID NO: 91015 - DNA, 412 bp, Glycine max
  unsure (1)..(412): unsure at all n locations
agcttcatatcattntctagtctaggcagcattgatattatgtcttganttttcatgttttattttttaatatgaatttgaagctattccaatgaaaaatctaactgttntagaaagaaaaaaaatcttgaaactatatantaacttttatatattttattaacgtatccaagacgtatcgtatctttaattttaaaaanttgtcgtatctccgtatctgtgtcatatcgtatccgtatcgtatctcatatctaggcttcatagctcaacactaaaagcttatacgaaaagtaatgaagaatccaaactgtatggaatgaatatcaatatctaattcagaaaacggaggaccaaattatagcatagcaggcccatcattgtaaaagaaaaaataaaatcaatattcaaatat

SEQ ID NO: 91016 - DNA, 409 bp, Glycine max
  unsure (1)..(409): unsure at all n locations
agctttcaaaattttaaatgtgtttacatgtttattcgcttatctatcatggcagctacgttgtcaaaatatctgagcaaaaactgataaagaattaaacttatagaaggaaacaaaaataaagagatatttatgactaatccacatattagtcatttattgttattttgatatttgatttgatatgatgattattttttaacagaagtatatatgatgattaacaagttatatgtttggttaggttcaacaaggctttctgaactttctatagtagcagcttcatccagcttctaaccacttggcctcttggctattctttaatacagaccgggttatatgggttggattttgttgtattttgtttntggtgtattatgaaataagaacaaattacaaggtacggcta

SEQ ID NO: 91017 - DNA, 411 bp, Glycine max
agctttacatgcatgttcacaccatattttctatacttcgatcaactgatgcaatctatttgattgaaaagataatttatattactcttctaatgtagtcgacaactaaaaaaaaaatataacagaaagtgatgcttaggccaatctaatcaagtcattttgaatctcggcattactatcatgcatctcaaagagaaggagaatcatgcatcgtaatacatagcacaacaaaacattaaaagataacatgccttccaaagccaaccaaggctaaaatgtattcatatttggtgaactttttcaaaataataacacatatatataaacatggtggaacaatctgaccacatgcacaacacattccacacattatttctgaaaatgagtggcaagggaatataataaagcatt

SEQ ID NO: 91018 - DNA, 407 bp, Glycine max
  unsure (1)..(407): unsure at all n locations
agcttcaagtttctaccaccctatctcctattctctttctgaaattaaaagccaagctcagtttctggaattaataagcaaaattatctcatcctccctgggcttgagggatgattattaatgtatactggtctgtatggggcagcctcatatgttggtcctacttcgattattagtgtatactggtctgttgctcgaaaatttgggggaaataggaggggtttttataataactagatttataatagtaatggtcgggtaataattctaggatggaaaaattagtaagttgctttgtgggtggngtttttataataactagatttataatagtaatggtcgagtaattattctangatggaaaaattagtaagttgctttgtgggtagggttttttttggagcgtt

SEQ ID NO: 91019 - DNA, 398 bp, Glycine max
agcttttaaagttttggtttgaaatttgaattttataagatagggagatagtaacaactatttctcggtagttaaaaggcatggagataatttgataactaagatggtggagaatattgcattaaataaatttgcagttttcaattttgtttttttttttttgcttaaatttgtttatttaagaggattgttagactaacttttcatgagagaatgacactcgtaaaactttccattttatggggacagctttatttagattattattatagattatagattagtgcaaaaaagatatatcgtgcttgcacctgaaagttacctgtatatgtacttagttggatatatttgttcttgttgaagttaacataaaatataataattaagaataaaaatat

SEQ ID NO: 91020 - DNA, 385 bp, Glycine max
agcttgaacagtcaatttcgagcatctctatatgtctctggacagaatcagacagccgaggtaatagacatagatgtttgagtgcggctatggcttcttcattcattgggatccatgccgaacattaagggactgactctgcctgagcaggataagatgtagctgaagagtgagaccattgcaatagcactcaatattgggcgtattgttcttgacacggactcaagtttactttcttgctcaaagatattgtcgttggaggcttatagagctgtaccatttataaataacgcatcttatatgtggcgtgacttaatgaggcgtctaattataaggaaggtgactctagaacttgcgaaaatcttcagctattgggtgctagcag

SEQ ID NO: 91021 - DNA, 405 bp, Glycine max
agcttgaaggtaaactagatgccttggttaacctggtaacccagctggccttgaatcagaaatctgcacctgttgccagactctgtggtttatgctgctctatcgaccaccatacagatctctgcccttctgtgcagcaacctggagcaattgagcagcctgaagcttatgttgcaaatatttacaatagacctcctcaacctcagcagcaaaatcagccacaacagaacaattatgacctctccgacaacaggtacaatcccgggtggaggaatcatcccaaccttagatggttgagtccttcacaacagcagcaacaacaaccttattttcagaatgctgttggcccaagcagaccatacgttcctccatcaatccagcagcaacaacaacaacagtagcagc

SEQ ID NO: 91022 - DNA, 413 bp, Glycine max
agcttgaagaggatgctttaatggaggataataaagagagaaggggggagcacgaaattgaaggaataaaagagggagagaagtggaacattgaagtgtatctcataagagtttcatttatcaaagttacaacaagtgttacacatgcttttatttatagactaggtagcttccttgagaagctttcttgagaaaacttccttgagaagcttctttgagaaaacttccttgggaagctagagcttagctacacacactcctctcataactaagctcacctccttgagaagcttccttgagaagattcctaaagaagctagagcttagctacacacacctttctaatagctaagctcacctccataagatgagaagccagagcttagctacacacccccaataaaagctaagct

SEQ ID NO: 91023 - DNA, 394 bp, Glycine max
  unsure (1)..(394): unsure at all n locations
agcttcttttttcaattactagcatctcgatatattacgggactcaatcggacatccgagtaaaaagntattggcgttttatttttctcaaagcttcagttttcaatttcggacatccgattcaaaagttattgtcgttcgaatatgccgagtgcttctgttttcaattttgagcgtctcgatattntacggggctctatacgacattcgagttaaaatttattgtcgcttgatttttcttagagcttcccttttcaattacgagcgtctcgatatactatgagacacaatcggacaccctagttaaaagttattgtcgtttgaatttgcttagagcttctgttttcaattacgagtgtctcgatatattacgggactcaatcggacatccgag

SEQ ID NO: 91024 - DNA, 400 bp, Glycine max
agcttctacttatgtggcagggcgggctttcttcactttcttgtctccaacgcgagctctgaccactgtccttccttcccgcgatgcttctttttatgtccgcctgagtgggcttatagcctaaaccatacttcccacgatttccttgggtttttatcaggctagttatgccgccattgtctttgcctaaacccatcccgggttcataaccgttccccaacataactcgggccatcattaccgccgcatcggacagacaaggttgcccaaagagggagtccacggaggaaatgctgaccaccacaaaagactggaaagcggtttctagcgattcttcggcggcttccacataaggcatggaggatgggcagcttaccaagatatcttcctcgcctgacac

SEQ ID NO: 91025 - DNA, 403 bp, Glycine max
gatcccagagtcacctgagctgcagctttctcataggaaaaaagttttttttttttatgacttaggctcaattataaccaaatattaaggttgatttcaggattaccacatccagtgagcctagcatgcatccctgtggcccatttaagcatctggtacccatgcatgcactaactggcaataaccaactcctacacaaatctgtgggctgcacaaataaactgccgcattatgctctggctgtaagttttcactaactaattattggtatgcttttacccaaaggatatcttagttgggaacacatattaagtgtgaagactgtgggagataatttaagtttaatccttatagaatacacttttgtggagagatgataaactttaagtctaactaatcacta

SEQ ID NO: 91026 - DNA, 387 bp, Glycine max
agctttgagtatagactcatcactcttattgtgtgcatgttcaagagtgtagctaaattgtaggcttaaagactcggcaaggtgatacaccaagtgattgatgacacctaatttgtggtcatccaaaataggcatatcctgcatgaggtctttatgggaatgatcttgttgaggaagcatgactaagtggcattgaaatgattttgttcaaggttgatttcaaaaggcatatgactccatgaattggaattttcttataacgaaaatggaagaaatgggttttctaaggaaatggcatgtatgaattcaaaaatgcctgtaaactgcaacattttttttattataaatgggagtccatctaaggaatttgtgtatggccaaggtctt

SEQ ID NO: 91027 - DNA, 403 bp, Glycine max
accttgagaatggagaattgcacaaagcaattactactcatggcttcaaagacgaagggttaaaacacatgaacgaaaacgcaattcatggggctccgaaaaaggggttaataatggagaattgcactaatcaatcactacgcatggctccaaactcgtatgtggaggacacatgaacgaaaactcaattcattgtgcttccaacaaggggttgagaatggagaattgcactaatcgatcactacgcatggctccaaactcgaaggtggaggacgcatgaacgaaaactcaattcatggggcttcgaacaagggtgagaatggataattgctctaataaatcactacgcaaagctccaaactctgaggtggaggacacatgaactaaaagtcaattcatgggg

SEQ ID NO: 91028 - DNA, 411 bp, Glycine max
  unsure (1)..(411): unsure at all n locations
agcttntattctaatttagaaatccatgaatgtactctaatgtctgaggtttatgggattaagatggtcattgaccagtccctattttatgatttaacccaattgccaagcgaaggtgtaccatttgaaggtgcactgattgacgattggaagtttgatttctctgtacatgatgtccgccggttggtttgcaccaaccaagcggatatgaccggaaggcttcttgccggttcattggcttttgaaagccgcatcctccattaccttattgttcgcatcttgcttccgagatctttaaaccttgctcaggtttctaaagaagatctcattgtcatgtgggcctttcataaaggtttaaaaattgattgggcacatcttgttagatattgcatgcataaggcattgcgattg

SEQ ID NO: 91029 - DNA, 383 bp, Glycine max
  unsure (1)..(383): unsure at all n locations
ccctggatggtcatacattagtttatggtttgtctttgccctatacgtggtcaagtgtgtttgcttttgttgagcggtgaagccttgtgttatggctcctgcttaatgagtaagcactatnccagattgtctattgaatgtcttccagtcattgtctatcttctgctgaagtatcttccggcatgtttcattgaattgcgccttcattaagcacttgtattgctcatcccacgctggaagtgtcgagccaccttctctcttgtggaggggctgctaaacatcttgaccagangcattggttgttcctaacatagactcagatgctgtttctgccgatcgatctggtcaaaaccatctttgggtcaagatatgtattgttaagc

SEQ ID NO: 91030 - DNA, 436 bp, Glycine max
agcctctacttatgtggcagggcttttcttttctttatcttcgatgcctccaacgccgaacttttgaccattgttcttcctgtcccgcgatgcttcgttttcatagtccgccttgagtggcgcttatagcactaaacgcatactctcccaccgaattcccttgggtattgtatcacagctaatctatggccgcccgctgtttttttcctaaacaccattcccgggatcaataacccggtgccacaacatagactctggcccatcattactcgctgcatccggacagagcaatgctgcccacaagagggaagttcacaggaggaagatgctgaccactctcacaagactggaaagcagattctaacgattcttctgcagcttacacataaggcatggaggatgggcagcttaccaagatatcttcctcgcctgacac

SEQ ID NO: 91031 - DNA, 399 bp, Glycine max
  unsure (1)..(399): unsure at all n locations
agcttaccttgaattataattgtatcctntgcaccctttgtgagctaaattacattttcaaaattgaaccttgaacttgagtgaatatctccagatactttgcttagattctaggagagcatatggttcaaagcaatttgcctcaaatttgggggagttaaccgggatgtaaagtggaaggtaaagcacatcagcacacacaacaaataagttgtgttaaaaaaaacaatcaaagaaagtgtgtgatgtgccatcattttcttctatattctaaaccctttttgcaccattttaattattgattggtcttaattgtcaattaattaggcagttttattatttgggctcatttagctaatatgatgtttttaatctaatttcaggaatgaatgaaacatt

SEQ ID NO: 91032 - DNA, 410 bp, Glycine max
  unsure (1)..(410): unsure at all n locations
agcnttgggtttgatacacagtctttcctctttgggctcatcatatttcaggcacttttcaaaattatgcgtctttccactctacaataataaaaattctagaagattatctattattatttggtagctttttttattccgcgagaacaacaagattatctttaagattatttatcttcccttcgaatttgatattaaaaatttaaaaaaaaattattgcaaacacaatccccattcaatgaaaatatttacgcgatcatgtcattaaataaaataactttggtaataataaaaaaggatcaccgatgacataatctcaaccaacatgtgatttatcgtaaaaataaattaacatgcgatcttttcttatgagaacaaatcgaagaatcctttcggaaagaatatactat

SEQ ID NO: 91033 - DNA, 409 bp, Glycine max
  unsure (1)..(409): unsure at all n locations
agctttgaattcatgctatgcacccttaggtgtccatccttgctttgcatgtctttatcttcattcttctaccatcggcgatattattctttgttttaagcaagtttcgactgatcgtttaagccgatatctcacttaatcaatgttaaaatgaatttcaaccaattgtttgtgttgtaatcttggttaatcacctttaaaataaaattcaaccgatcatttgtgttgtaagctcggttgatcatcaaaaaataagtttcaaccagccatttactgcgaaagttatctttcacatgagttgaaaaataatcaagtgaaaccaaagctaaaatcaactcataaacaagctntttgtccacaagacaatcacttgaatccattcacaggttcaacgccttaaacagtattt

SEQ ID NO: 91034 - DNA, 410 bp, Glycine max
accgggatctctaagcacctgcggctgcaactaaacattcacttctacgtctgatatataatgggactcaatcagacattcgagtcaaaagttattgtggtctgaattcgcactgaggcgcaacattcaatttcgagcgtctcgatatatgacgggactcaatccgacatccgagtaaaaagctattgtcatttgaactggctcagagcttcaacattcaatattataggtttcgatatatgacgggactcaatcagacatctcgagctaaaagatattgtcgttcgaatttgctcacacggttaacatccatctatctagcgtctcgatttattacgggactcaatcagacatccgatcaaaaagttattgcccgttgaactatattcagacgattaacattcaatttc

SEQ ID NO: 91035 - DNA, 402 bp, Glycine max
  unsure (1)..(402): unsure at all n locations
agcttcacaatataatattctgttgctggttttgggcaaataccatcattcacttagaattgcctttagttacttttgagtntgaatgctacatacttacaaacatttatcatcaagtttctattcccccaatgttgaagtaactgatactgcaaaaccgcatatatatttttttatcatgcaaaaccgcatatgcatttcataccttgtcaaanatattaaattaaacagtttaatttagtttctggccacttcatgtatcttgaacatttcaagaaggacaaataagttgaatgtcaatctatcatattgtatcaaaccaagtcatttacttcatttgagtaaaccaagaaagcaaatgttagtcgtcttttatgactaactnttgtatagaaaagtttt

SEQ ID NO: 91036 - DNA, 403 bp, Glycine max
agcttctgatggttcaatgtttgaagcagataggtcatgtggtggcagtcacaggtaggtaggagtgttcaacaaaacttgttcagattctaactaaactcgaattgattttttcccgaactaattcaagaaaaaatgagtacactattttataaaaccaattcggtttaattaatcgaattgattttcatttaaattttctttttatttgaaaaattaatttaaaactaatccaattcaaaatcaattttttaaaatcaatttaattctgaaattgtttttaaattattttaactattttcaaaactaattcagtttgatttttttatcaaactaatttttgcacaagaaatcaaacctattacctttccttatttctcttttttcttaaccacccaaccaa

SEQ ID NO: 91037 - DNA, 412 bp, Glycine max
  unsure (1)..(412): unsure at all n locations
agctngacatcggttattgaaagaactgatgttaatataacatacaacatcgatttcttttattaaaatcgatgttattttttaggattttttttaatatgctgtctatttttttaataaccacaaaattaacctacaaattttaatagcagaaccacacaacatataattttcattctgttttaaaacaatttctttcccataaatttcatcataaatttattatttactatgaattaaaagaatatttaatgttgaggagacatggattgtaaaaaatgtaaagtaactaaactacaattacgaaattgcctaaacatcctaggtttcatttttaactttcaaataatattttttccactcgatgcacagcgccttcaatctctgtggttctaatggtctagcatcattg

SEQ ID NO: 91038 - DNA, 417 bp, Glycine max
agcttctcccaggtgcatcttctgccttggttagctgtcttcgaagctctacataagaagggttctgtatgatctcttaagtactcggacgccggagggatcatgggaagaataagacaacatacaccagttaataactaattcaattgaatcgtcctcaataattgatatataaataataaatttctaagaatttaatggttatgcgtgtaaaataattttacccgatcatctaatcacaaatcactatttgaattactttaagataattattttaaaagtcaacaaacttatcatatatggtagcttgtgattggataactacgttggcagtgcataattctttttctcactaattcctaaacccatttttaataaacacaactagttatttcttatatcttcaaacaaacccta

SEQ ID NO: 91039 - DNA, 415 bp, Glycine max
agcttacctgtcatctatgattatatcattagcacccatctttgagctaaactgtaatggtattgaactgtgagtcttgagttgtaattcctatttaccttgcttaggttttaagagggcacgttggtttaagacaattttaccccaaatttaggggagtttgttagatagttaatgtttaaaggtaagaaacaaacaacacacacaacaaataaataaataataaaaataaaaataaaaaagaaaagagttcaaataagtgtgtgtgttgttagaacaagtcaagtgaaaggctaatgagcaagctaagtatattaaaaagattaattggttaattctaggaattgtgctctcttagaatttaagcctttgaatcctagaaaaaccaatatttttgtagcccagcctcattaca

SEQ ID NO: 91040 - DNA, 415 bp, Glycine max
  unsure (1)..(415): unsure at all n locations
agcttagactgagttcagcctaccatcgtcagactgatggccaaactgaacggaccattcagtcgttggaggaccttttaagagcatgtgtcttaaaacaaaagggaagctgggagggttttctttccttgatagagttcacttataacaacatttttcattctaccattggcatgactccctatgaagctaagttaattcaggaaaggatgagaactgctcagagtaggcagaaaagttatcatgataagaggaggaaagatctggaattcgaggttggtgatcatgtattcttgagagtcactccatggactgnggttggtcgagcattgaaatcccaaaaactcacacctcactttattggtcctttccaaattcttaagaaagttggccctgtggcataccaaattgcact

SEQ ID NO: 91041 - DNA, 327 bp, Glycine max
agcttggacatgtgtgttctatcatgtgttataaccctcgcaatgtcacgatcctattacacaattgggccggagtcagactcgaactgagactgcaccagttatcactagcctctgtaatgaatcaaatttaactctagaacgagcgatcatatacactcaataaacaccttgttgactctacaagacatgcgtgcgtttagattttcaactccctgacactttccctcagctggttgcatttccacatcttgtgatccactagataggatgtccctgttcatattatggatgtatctcgctaactcgcgcttagaccaaagtgcg

SEQ ID NO: 91042 - DNA, 411 bp, Glycine max
agcttgcataactctaaaagaaaaagagattagtccatcttatatcttgagattgagacaaatgccaacaaaaaagctacccttcttaagaactttaaggagttggaaaacaaactgaaagatcttcaaaaggatcagaaggagctaaatgaacttcataatcatcaaaaggaagaaagatatgatctttggagagagtgtacacaagcacacaaagattatgaagacctcaaaatgagtaataatcttttggtggaatgtgaagaacacaataaatttatgggtttcttgaataatgagcttctgaagtatcaagtatttaagggtcaacctcaagatgttgtaaaacttcatgaggaaataagaacctcaaagactacattatccaaatttgtcaatgggacaaataat

SEQ ID NO: 91043 - DNA, 395 bp, Glycine max
agcttggattggatatgctacggtggacggtcattactaaaacgtcaacgagaagaacctgtctaggtggatgttttcagagcgacttgtaacaaaataagaaaaaaagtgttggtgataaataccatgtactccctctaatgatataagctcattcatatcagtgccgtgacgtaagaagttgataggttctggataggctccctatgtcttatggaagagaccaatacattgtcacttagagatgattatttgacttgtgcttctatataaatttgtcacaatatacgcgtagtattaatgtatatgagcgctgcttacactcagaggatgactgaggcaaggcttgaaagtatgttatatagaatatccagactaattaaccagttacgcgc

SEQ ID NO: 91044 - DNA, 407 bp, Glycine max
  unsure (1)..(407): unsure at all n locations
agctnttatccatggcctcctatggtggtgagcttcttctagactcatcttctccttgaagtggcgtctcctctctctcttcctttctccattccgctgccattcatcttccaagaagcaaaggaatccattgatgaagaagatcctaggcctacaagctccaatggagcttgcatcacattattaccaaagcattaggaaggcatcaatttcagattttgcttggcaagctgggcattcgtaatcctcatgcaccaccttgagggggggggggtaataccgtatatcccaatggttgtattcaaggcataatcatcgggattgttctccatgggttaactaatctcgtattcccttatttattggaaatattactcaatcaaatcaaggatatccacgacagatga

SEQ ID NO: 91045 - DNA, 409 bp, Glycine max
agcttcccgaagaaggagaaggcaagagcgtccttgccaacgtgacagaagtagttaatgaggatggtgagggtgatgtggcaaggggcaacgtcagactccgttctggcgcataggaaaattgtgacggggaagcacttcgccttctcgaggaaggtgacgactcggttgagcatgatgggggcatgtgggagggcatgagttgagaaggcatgtgaaagaagatagccaccagaacactctcttcatctttcgctcagacccagcttccttcgaaccataacaacgcatgactccatagtcgttgacgttcaacctgacgatcgtgcttcggggagtgagggaggacgaggagagcagctttaagttatactacgatggcttcaacgatgaggggctccacccacta

SEQ ID NO: 91046 - DNA, 303 bp, Glycine max
cattgttgccaaacacatctcatttttaaggttagcgaccaccatatttttgaatattaagtagctaataaagttgcactgtgctgaaacatattaaagtggcttaataagtggatcaaagtatctaaattgtgaaaatcaataatgcctcaatgtgcaatttatacagatattcactgacttttaccaaaatgaacatgtgacgtctgcatttgaatttatttaagtataccttttagctgactgaagttaaacttactttaattgagtactttattttaacgtaatttagaatcttacctc

SEQ ID NO: 91047 - DNA, 293 bp, Glycine max
  unsure (1)..(293): unsure at all n locations
atattctacacaactctatgtctatccagaactcattcttaaacttatctctattatatctcagaccccaccttgcagccgtggtggactactgtctcagctgattcaaaatggttgaatcgcaaacatactttgcaanctttacctcgtactatatccattctctgatcagactcgatcacgtcaggtgaaaacctgggctgactccataggcgagattttatctgacttctcattcaaataactacatgaanattgatgtgagataatgatgaaggtgtaggtggtcagtg

SEQ ID NO: 91048 - DNA, 320 bp, Glycine max
acatttttgtaacactcgcggtctagtatggaatctcatgttagaacccggtcagcttcccagtagggagaaagctctgttttgaagaattctgcacagacggtgtctaggacatttttaaattactaagatgggtcttatgttgctaatctaaatactagattggttcagaactttacaatctaaatcgtaaatgtcctgtgtctggagggatgattaccagcaatacttagacaagaactcttctatgtgacttgttattccagcgctgttggtggtgaaataatcgatgctgacgtaagtgctagcaatctctttcc

SEQ ID NO: 91049 - DNA, 337 bp, Glycine max
ctcatcttgcattgctcctgcaatatcaagggctaaagagaactacatatcttataagaaaatgggcaataaagggaaataggaaaacctgcggacgcttctatatgcattccacaccacatgattatagcaaaaacctttcttccacaccatatcacaagcatctaataacaaaaccgctacaaaacatgtaaaccctttctaacaaaacaccaaagatttgtcaaaccgagatacccaattcggcaatcactgtcaattatgatatatgtgatacccacagtctactcattttagacatcaccaattcattaagatcaaatcataatgtactacg

SEQ ID NO: 91050 - DNA, 443 bp, Glycine max
ctcagctaaaattacaaaaagtagtcatgttcagcttttatctgtaattctctatgcttacattctgttgtgaaaagcagctgcaatatgatcacacaacaataatgtgaccaagttattttactgtttcaacataagtaatgatgtgaatcaacacgtttacatgataatagtgagatcagtgtcttacttcactgaatgttatagattgcgtcgagcattgaacagaaccaaaacatctataatattatgaaaaacgaaagaactttgaggagatgaaggagaaaaattatcagcctggctcggtctctgtgcacaaataaagaacacagaaaattgtgtcttatgcatgacatgctatgaaaacaaatcaccctgcaaactaaacatcttgtctcatatggactttttggtggtgaatatctacaagcatatatccctat

SEQ ID NO: 91051 - DNA, 115 bp, Glycine max
  unsure (1)..(115): unsure at all n locations
gcttctcgtgagactatctctcccgtgcgggtctcttcggaccctntntcttcggctctcttcggctccaggtcatcatcgtcatcgacgacagtgagggtgatgcggatcgggt

SEQ ID NO: 91052 - DNA, 146 bp, Glycine max
acgcactagacggctcactatctatcgtctgtgtaaatttgaagtcctttggactcattaacaggactcctctcttgtcactcagattttgtatccagatggcagtccgaaacttctcgctgtatgcttggttgcactattggcat

SEQ ID NO: 91053 - DNA, 216 bp, Glycine max
  unsure (1)..(216): unsure at all n locations
gtgagagtaccgantgtgagaatgatatgaatagtgaattgatgatgaatntgacaagatgtgaataatgaaatgatgaanagttgaatgagaaatgcatgatgagttgatgaatgaattgattanatganatggattgattaatgataaatgaattataatgatgtgaacaatgattgattgaatgatctaacatacatgcttaatgaatgacat

SEQ ID NO: 91054 - DNA, 282 bp, Glycine max
ggatttactttcattaaggtagtctatgcaattatttccatgattggagaaataataataactttcttgacaaacaaacgagttatataattggtgaactgctacatgattagaaatataagtcatcagttttggtactgcccattattaatctaatatgtacataacatatatatctactcattctactgactaaactaatgtactcactctattaattactacttcattatatattaattatcctatatttttattacttcatctatttttctggtaaat

SEQ ID NO: 91055 - DNA, 310 bp, Glycine max
actacgattactcccggtggggttgtgcagtgtggtctgtgtgttgaggaaggtcgaaattttctgtccttgtatgatctgctcataaacgctttacttcaaattcgttagaagtgatgggaatattgtctggagcggcaagactcatttctaaaaaatatgcaaagtgtttgataactttgataggtaagatcttttctatgttaatatatattttctcttagtgacacttctttgaattttggagtgatattctatggtaatgaatttatctcttcgtgactaatcagtatcttttctttattcaata

SEQ ID NO: 91056 - DNA, 311 bp, Glycine max
cttatgagtggcaggaaccttgtgcagtttcttgacacgacaaaatccacaacttagcaggcttctaccttctcaacctttaggcgagggaaaaactctatcaccatctcttactactaggagtttctttattcttatttatcttgctgatctataaggtaattgcttatcttaattggccattagacattgtgttagatggggagggtttgttggtttgagttgtggtcattatttgagttgtggtaattctgttgctgattagaagtcagatggatgtctaaaaacattctttgactgaactgttcttc

SEQ ID NO: 91057 - DNA, 359 bp, Glycine max
  unsure (1)..(359): unsure at all n locations
tatggagtctaaggattattcctatcttaaataaatcttatcacacatggagagttgattcattacacagtttatacacaaagtagcgtattaccgctacaatgtctcatgctctatagtcttggataaagcgattactttccaatattgatagtcattgcatcctgcatatccctcttggacntcttttatgactttctctattcttcggcatgatattgtgggagtggcttatggacggttgtacctatacattaatgtgggacctcttagactctccatgtgagtatacgcttcatctttatttgacattataactcttcaaactgaagctttacataatctctttttctctttga

SEQ ID NO: 91058 - DNA, 393 bp, Glycine max
atactggtcacttctaaatgcaaattaaagtactgtcgtcaacatactcaatttcagagagaagaattataattcttatttgtggctgccggacacaatttttacgcatttttttatattctagaaaaaatacaattttaaaaaacacaatgaggaataatcaaatatttcttttgaatataatgtctccaacttatattttaatatgataattttcatgcatacataaaaatgtaggatacattattctcttatctatatttactcattaaaaaggttatgatcacaaatacttttatgaataaaataaatatttacttgaaaaaaaatattgacatgctccccacactgacacgtattgtatatgtgtctaatgctacatcgataatataa

SEQ ID NO: 91059 - DNA, 225 bp, Glycine max
ttgcaacagacgtccttaatgataatacacttgctgtcaagcaagttcacataaaattctgacaatcacataactgcctaggtgaaaaataggtcattgatgggaccattcatcagcatacttgtgcatcaaataaaaaagctccctaagtttagcctaacaaagacaaaaaaagcaggtgtcaaaaaaaatgtactaatagtacatttggaaaatacagtcact

SEQ ID NO: 91060 - DNA, 206 bp, Glycine max
aacatggtcttttatctgataactctgattatcagtcctacttggggatcacctggtatactctctaagggggccttttcattctgctttcatctttatttttctcttcacactgtctgtgccctgaataacgtaatcttggcatcacctcactcacttgtattatatctatcagagacttaccacccctaggaaccacaccgcta

SEQ ID NO: 91061 - DNA, 58 bp, Glycine max
aactggctagacactcgtatacttagaataacttagccagaatatgtgctaacctaca

SEQ ID NO: 91062 - DNA, 374 bp, Glycine max
  unsure (1)..(374): unsure at all n locations
actagaggtctactctattcctactcctctgagacgcatttacagattctactgctggccaattgtactgatcttaagttcacgataactgcatnagctaatgattctatgtcaatctgtctgtctgacctaaaggtgagtaggtcttaattgctgttttntgtgtgaaccaacatatatctacaacataaagtgagaaactaaaatcaagtgatgtccctattgtagtttgcataaatcatgctagctgaactgctatagatctatgtcgggattatttctgtcttgctaccatgtctaggttaatcttagcatattgatgtcaatctgtaaagctactgctgcattaagttatgacatctacttagtctaat

SEQ ID NO: 91063 - DNA, 382 bp, Glycine max
ctgacgcgatctatacgcgctgcactgatgactctgtaagttaccttgattttgactcgtgtaattacctcgactattgcccatcgacatcgggaaatatggcttgaatctaaagttcgagtattcacgatgttatataccgatcgacgcgtgaaattatacttaatctcgagtcgtgtattcaccttcacttatcccgatggctcggtaagtaaccttaattccaagtccaggtattcactatgtttataccgaacgctcgggaatatggcttatctagagtcattattcacgtcgattaaccgacgctcgggaattactttatttaacttggtattagcttctttcccatgcatcggaattactgaatcaagtcagtatc

SEQ ID NO: 91064 - DNA, 298 bp, Glycine max
gccccctttaaaaagtcgttcccagctatccttatgatgaagacagctcttgaactgcacccacaaaaaatttgctttttcctgagacagacaatcaggttgtggtcaagagagaaagcaaggttcatctgttatactaactattcatgcatggcatatatgctctgttattagcaaaaatgtatgaatgccagctggacccaggacatacctctctgcttctatccactccagaacttagtccacttatttataaagctagactttctccatatcactagagattacacacactctt

SEQ ID NO: 91065 - DNA, 293 bp, Glycine max
actgttgaagaaatccctattccctcttctaatcagttatagaggtctaatcatcacatatcaaaaaattacgaacctaaatcttttagagcgtgaaccttaaacacaaatttctcttaatttaaaaattagggcggggcataccttaataccgtccagtgactaattaagaaattataaaagtgcgcaatatatttatttcctaataaaaaatgcctacgattcttaccttacctgattaaatgactgttttattgtacaacgatgagacatccctgtgcttctcgtaaaat

SEQ ID NO: 91066 - DNA, 454 bp, Glycine max
  unsure (1)..(454): unsure at all n locations
atgactcttcacaataggatttgaatttctatgttcagatacactggtaatcgattaccaatatcttgttatcgattacaccacttttaaatcaatnggaacgctgcanattcagttgaaagctgttttgaaatcaaacttgccactggtgattgattacaggaaactggtaatcgattaccagagagtaaaaactctggtaactttattatttttgagagaactctctctgaaaacanaatnggctatgtatgtgtttgaaaacacttttcaatactcccttgtgaagctcttgattcttctcttgatcttgatcatctttctgaatctgaatcaactcactgatcttgatttttggtcttctgtactaactgaatattcttggcttttatcacttgcatataaacactgatcactgatctctatgagctgtctcatgagtatatcattgcta

SEQ ID NO: 91067 - DNA, 257 bp, Glycine max
tataacgctgtctttgatttgataaatattcttttttttattaaaaacactgataaaataattattttagtctgaaaatgagaaattataattctatataagagtatattagccctaatcccatcagggctatagaaaaacaacatagggatatcaccactaattacgtgtattaaggacatcaattggtgcacctgctcaacagaaattaatattataattagccaaatattctgtttaactacatattcactaaa

SEQ ID NO: 91068 - DNA, 322 bp, Glycine max
ttcgagcagtaccatcgtacattattactatcgcggattatataactgcatgactttttcggaccttcgaggctgctatggtatgtatatgctacactgctgaagccatatctataatatttgtttggcgagcgggaacattttgtctctatttatatacgctctctataaccatttatattaaagagaatcggaaaatctctatcttggtgtataaggaattgtgacaaaattgtgagtgaaaatgtcttctaaattatgtatttataatgtggagtatgtatgaatataatgagaatggtagtaagcaaatgttatatta

SEQ ID NO: 91069 - DNA, 371 bp, Glycine max
  unsure (1)..(371): unsure at all n locations
cttaactaagacttgtctttaatcctatgccttagatctagacaaggtaccctgcaaccccaaaataaaattaaggaaaaatatatgagcacttttgccctaataaagctgctcctggacggccgggggtgcaatacttctatctaacacttcaaccttatttaaattgagacttcttggttttctaagtttcctcgataacgtggggcgactcaccatttctttttgagacacttttgctttcccgcactccgcatgttatcgngactttttattatgctctcttctcttactttgttttcatattggataacttgcatgtattggttgggtggctgctatctgtacatcgagtagaaattttgttatca

SEQ ID NO: 91070 - DNA, 291 bp, Glycine max
  unsure (1)..(291): unsure at all n locations
tgcagcttaccttaggtgtcatcatgtgtcccctatctctatcataatctttnntntcgtagttactctgacgggatctngacttctatatctgtctccaggttaagttgagctnttcttagtgacttgtgtttgtggtatcgtaatagggggattttacacttccttctgaaaaaccttganaatgagacagtgtanaagntatatttntataaaaatgatgttattnttgtgatcttcgctaaacctcgatcacattggcatgggtagaatttcaaaatgacattttct

SEQ ID NO: 91071 - DNA, 226 bp, Glycine max
agacttaaatttaaacttagactcacttataacggcctggactagagactgaactctcagcctcctctttatctatggcccctcttcctttttcttgactctcactttcagtatggggaccttctgtatcggagcgcctctttttgtctgtctggaacctagctttgtaacactctaccccctctcacacctgagttttattctaggagctgagcatagatagtga

SEQ ID NO: 91072 - DNA, 220 bp, Glycine max
acgtggaaaatgccatgcttatgcttttctgagaggaatatatatatatatattaagaagcgcttacagacacatacagtatcgtcaatctagagaaaatgcggaaaacattagctttactttttttatttgcattagataaatgtcattggcacatagcgcgtctatttattatgactcatgacaacatgtgacaaagaatacaactcatgcttgcata

SEQ ID NO: 91073 - DNA, 358 bp, Glycine max
gccggtcttatttcctgtcactttctactaaagtactactgaaatttaaacttgcagctataaacgactgcccctgccgcttgtactgcgttattggcctcaactaggctcacatgtgtcacttgtaatacttgctcgtgttagcagttggttgaaatatatgagtacagatcccatttcaaaagtgccaccttcgttgtctcatgaaatgaggctgatactgattctatgcacaaacaatgtatcttatcgaaagctaaatttttctcaaaacttctttgcttaaatcccgtcttatgtcgttaggatgttctccccactaacaagtatctcaacctttattatttaaaactctata

SEQ ID NO: 91074 - DNA, 311 bp, Glycine max
ctgaccatttctatgaaactcttgctgacccaatgtttataatactaatggctgtgagatcgctcctatgacttactatacgggaagcttcatggtgaatttggtattaggctaatctccagatgatatgttcaagatgtaacggatgctttgatcatttgcgatgaacttcattcttatactatgacaaaatgtggcttaagtgaattgaacatgagatataggaagtgaccccttactaagggtttttaatgtatggtgataaatttagttgtgtgctgatgatttcctccgctaagtctatgtaaaag

SEQ ID NO: 91075 - DNA, 143 bp, Glycine max
  unsure (1)..(143): unsure at all n locations
cttactctgctcacgcaactgacattgtctctccgcagctttttgttgctagggtatactaactactcacattcttatattatangtagtatccgcgtgttttctaaccatccgggtaaacgtcccacataactgggcatata

SEQ ID NO: 91076 - DNA, 215 bp, Glycine max
cacagtaaattaaagtctttctattaacaaaatgtctgagaacaatttaatttaatcccactgtgggacaactattgagaatatataacggattcttccaccttgaatgataaaaatcctctaaataaatggaacctacgtaatgaagtatgaaatgtcaaaaaacaaaaatcattaccatcttggtaaaaataccaaaaagtgtctcaatgtat

SEQ ID NO: 91077 - DNA, 269 bp, Glycine max
  unsure (1)..(269): unsure at all n locations
agtttcaactgaactggcttattctcatctctcctttgcaagatcgcagcaacactgatctttgttttcgccctttcaaaaacgaagactccgctgatctttggctcttctcctgcaagatcaaatgaccagcgaatctttgatcttcttcctaacanaggtcaaggctacgctccatctttgttccatccaagataaagttacgctgaacttgctaccatgagncatcttgtgtcaggaggcattctggtgcgaacagaaggcttttg

SEQ ID NO: 91078 - DNA, 212 bp, Glycine max
  unsure (1)..(212): unsure at all n locations
aatatgaatcatacacttttgaatcaatggaacgtgtaatcttngaaacttttcaattcattgctctggtatcgatacataatctgtatcgatacagagagagaactcttggtaacatatttagaaaaatctgtctactcattttgaaaaacctttctactatctgataagtctctctgatcttaaatctgagctgatctgatctgatcttg

SEQ ID NO: 91079 - DNA, 241 bp, Glycine max
  unsure (1)..(241): unsure at all n locations
gtttttgggatggttctgagtctaacagctggcctttctggagcagtggttccttgctgttcatgtaaaagtgagactttgtgnagaaccaaacttgtgttattgcaactccgatcggtctgcaagacttatcagttttttaaaggctcaaaagaatgcttgatctaacgtcgtttccacctatgaattaatgacgctaggcaattctaggggtgttataaaatatcatttggctctggaa

SEQ ID NO: 91080 - DNA, 454 bp, Glycine max
  unsure (1)..(454): unsure at all n locations
cactcaagatgagctctgcgtaccacccgctgactgacgatcaaatgtaggtcatgaaccggtgagcgaatgtacctcaagccttcgtcaccaaagcacgactgggccgttctgattgggtgatggtctacatacctctctacacagcaccaaatgctcctatgagacacttcggaaaaccacccaatttctcatattggctgtacacccgcttgctctacattaccactctatattgaaataaatctttcttctttatanactcatatttgtttgaaacatagaattgaattacaatatttgtccaacaccccatgttaccaatctgaattatatagagtagtccatataccatatgagataatcagcgaattagtaattggatacatcttatcacaaaaaatgacattgagagtgataaaccactttccaatatcacgatcgcgtctacaat

SEQ ID NO: 91081 - DNA, 310 bp, Glycine max
cctagccatgacataacttcctaccatcatttggaaggaactttggaagaaacatatgtgctcttccttcaaagtggacacatgaggtgtcttgggaaaacacctaactccttatgatcttccccctatgcgaatactacaatactacaaacacatcataagcttgctaaaccaaggttctactacaactctttactcttttttataacaacctgattcttctctctgatttattttttaaattcacctttttattcccctttctttttctacttcagaatcctcttcaaatttgattcctttttctttt

SEQ ID NO: 91082 - DNA, 219 bp, Glycine max
aaaaatgttttgaaatgttaaagtgcacttgcaaaaaagaatgaatttgtgggaaaaaagacctgggaaaaaattgaaagatctttttaattattacctttttaaatatagatttttttttaatcatagggaaataattttgtataaaatatggttaaggaaataaatatgtttattatcattgataagaggaataagtcttttttaaataatataata

SEQ ID NO: 91083 - DNA, 350 bp, Glycine max
  unsure (1)..(350): unsure at all n locations
tttttcacccccgggatcaaatgctnatataacgagaaattggtctgaaaaatcaaccgagcctccgaactttcgtggggatttacgaagtttcgccgtctcacttcttattcgtttcgcgtcttggcttcaccggaagtccctaaatcaactttaaatatctatgaccctagtgtctttttgctttcgtgcttcatttcattcttactttcgaccccctttgcgtgctaacattcttagtatttctggctatcaaaaaataactcccccccttgatgtaaccctatttgtaaagattcaccgttgttcctactttggaccaagaggtatttattttataaattctttta

SEQ ID NO: 91084 - DNA, 144 bp, Glycine max
ttggagtttgagctcaagatatagcatatcttctcatgtaacacctatgaggaggcccaaacattgaagctagcagctgcggaattctcggattatgctcttgtgtggtgtaacataattgcaacggagagagagctagaaatg

SEQ ID NO: 91085 - DNA, 289 bp, Glycine max
aatcagtcactaagtaatcgattaccattaaagtgtaatcgattacacatcaatagatgtggctcttcattttgaatttgaaaattataacgtttagaagctctgataatcgattacaagtattgtgtaatcaattacacaagtttaaaaatgattaaaattgttaaacataagttgaactcttgaattgaaatcttaacgtttaaacactataatcattactacctttggtatcgataccaagagtaaactcttggtatgatttgtgaaacttcttgtgctctcatgt

SEQ ID NO: 91086 - DNA, 238 bp, Glycine max
catctcattgggctactgatgatggtggagtcactccaactcgacacttgcaggatatttgggttggactgtttccttcatggtattagttatacttttaactaccacttttgacatttggtgcttatggagtttcgcagctgatgtgtttatgaactccgtgtccatattcttacaaatggccgtgatgttttggatggctcaagtgtggggtttgtggaaacccttgaaaatgatc

SEQ ID NO: 91087 - DNA, 440 bp, Glycine max
ggatgcttaagacatgctttttgtcctgattatgaaactattcagaggttagtcctttaagacttgataatactataatgcgtaatcttcctacacctatattataataatgtcgctgttagacatcagaattggcagcttgacagcagttacttcacttcttgaaaaattttatggtgatcttaaagcaaatttgtacgtttggagggtgggagtgaatattgtattgacaaaagcaaatcaattaagaccttcttatgcaagctttgaggtaaatattctctgttacgtgctgagtgtgaccttaccttatagatattaactattattgaccgcataaatcttccgatctgaccctgtctggataactgatttggagggactgatataaaccaggattattggccatctattgttctcaaagacacaaagacaagaat

SEQ ID NO: 91088 - DNA, 124 bp, Glycine max
  unsure (1)..(124): unsure at all n locations
atctgtatcaaagctagaatggatctcttattgactcanatccatgtgcaacaccaccatcataaacccttagtcaccaccacaacaacgaatagtaacctagctctatcaaaatctttttatt

SEQ ID NO: 91089 - DNA, 346 bp, Glycine max
  unsure (1)..(346): unsure at all n locations
tctaatttaagcttctataagaaaccatttttcctttcaatttgcttaactactaagggctttcgtgttaacaaacactcatcaaacagaaatgaaatgtcggttttcttgtcaattatatgagttctcagatggctattaaccctattatattagctgcaattaccgtttgccacaatatagaaattgttcatcacaaggctactttctttaaactatttctcttctactcctttgtgagggctcggcaanaatggtcaagccttctccaaagataaaactatttcaatcccctatacnnaaatcattcaatttctgttgagattacagttttaacagaactttt

SEQ ID NO: 91090 - DNA, 360 bp, Glycine max
  unsure (1)..(360): unsure at all n locations
atcctctgagtcacctgcngcatgccaagctgtgctcgaggcctngacctcataattgtcttatcactgtgtntgatccattctgagagtttccagggcttcttgccacttcatttanactgtagcagccattgatgatgacttctcttccacttccaaagntntccggcttgtcctatagctgctagcctcttcgttacaactctccaagggtatcatctggttataacccattaaaacttaattgaaaacacacattatcatcatcagagaaatagaatctagcagacatacctttcgtgcttcatctaaaaatgtaactgactccctgccctgaccaataacaactccaggagtgaa

SEQ ID NO: 91091 - DNA, 379 bp, Glycine max
  unsure (1)..(379): unsure at all n locations
tcgttctgactaaggatcgaagttatttattatctacatcatagaacacaagagcatgattgattagagaaatatatctatgtacatcagctagtntggtagaaagacccaacatttctacctactgctgtcacttttacttacgttgcattntattagttttagcataaaaatttagattaaattctgtttgaaattatcaatcatacatgttctctcaacaatgcttcatttatgaacttaactcaggctaacattagttccctgtgttcgatactcagattcatccgttntaatttttaaatacttgacgatctggtgcgctcttcgagaaaccggatttccctttgaatatattgtatgaagaanaagtggaaca

SEQ ID NO: 91092 - DNA, 312 bp, Glycine max
  unsure (1)..(312): unsure at all n locations
agctntcctttaagttggttctctacccttatgcattgttggactatgtcatctaggtccctanatggaaggagctcaacctagtccctcacttccatattaagcccattaaggaacctagcaatacttgttctttcctcctccataagcccagctcttaaaagaagaagtatcaatttgtttcctatactctacaacactcatactcccttgtctaagccattggagcttgtccataagctctctttcatagaagatgagatgtgcctcttcctatggccttttcagtcattccaccctctactggagatg

SEQ ID NO: 91093 - DNA, 522 bp, Glycine max
  unsure (1)..(522): unsure at all n locations
ctaccagctggtcctaaaggaatctattatatgcataaggttcttgntcttaatcgncaccttattctactggcggnagtctacacacaacctcatggtcctatctttcttctttactaacaacactggtgctcccataggagatacactgtgtctcacanactgcttctccaaagactcctctaactatntcttaagctcggctaactctataggagacatcctataaggggctatggatataagtccagcaccaggtaccaggtctatggaaaactctatctctctcttgggtggtagaccaaatatatccttacggaacacttcatgatactctntgacaatagggagatcacacatggaaacctttgtctctatttccaggttagacaagatcatgtacacttgagcatcttnctgtacagttgtcacaactcggttggaagagaaaacaacatatccttactcactccagaatcatcagacaccacaagtttatcagaacaatntaacaagacatgg

SEQ ID NO: 91094 - DNA, 199 bp, Glycine max
  unsure (1)..(199): unsure at all n locations
agcttgtaacaacaggagatgaacatttcatagattctacgatagngcggcgcgacatcaatggtggtgggagggagtgacgttgatcacaattctagagtggggctagaacttaacgttttcaaggagtgaacatcaattacactctgttctgttgttagtattaacggaacacctcatttcatattgaggaaaaaac

SEQ ID NO: 91095 - DNA, 316 bp, Glycine max
cttaatttaatattatataaataagcgagatatgatataaattatcaccagtattgaaatgtacccgatgagattaataaatacaatattaaacataatataattaattataaataagtaaatctactataactgaaggatataattgggaggtatatatcatttacttaattaattatattatttaagcacaaatgataatatgatatgaatacaatagcatttacagtgtaaaaatgtacttattatttacaatgcaataacatatagattacaggtactattatttacaatacatatattttacagtaacttg

SEQ ID NO: 91096 - DNA, 276 bp, Glycine max
  unsure (1)..(276): unsure at all n locations
atgggattgctntacttgagctattcgattccagtgcaacccattcttttatatcctgttcgtgtgtagggaaacttaagctgtctgtgtcttctttaaataatgatctggtggtagagaccccaactagtggttctgtgttaacctctantgtgtgtttgaattgtccctcggaaatttctagtagaacattcttgattgatctgatttggtntccttgagccaaatagatgtattctggtatggactggtatctccaacccatacttgtaaact

SEQ ID NO: 91097 - DNA, 372 bp, Glycine max
  unsure (1)..(372): unsure at all n locations
gactcaatcctatatgcaatatggtatcatatcagttgttaacctcgctggacgcttatgagtacatgacaagacanaccacgtctagtaagttaggtcactctcactangtaaaatcatanggagactatctgggattatgctgttttgtgagaacgttcccaccatgtgggatcaatatangcttataggagcacttcaaccgagtgttttaccctcaggcctacactccgagagtctatanggtctctcctttgattaggtgcacccaaaaactttacatgttactttatttgaatgtaaaacacacactcttattgtctaaaaaatttattcgcacttatgataaatctcagtctctatggtccatcc

SEQ ID NO: 91098 - DNA, 202 bp, Glycine max
  unsure (1)..(202): unsure at all n locations
gcccactttntctcttgatgtgactcatacttattacacgaagagaaaatattatctttttgaaatgcctaaatcctacctcagtttgcgtgccgcttctctggttccaggcccttgctgttttctgcactccgtcgggcccagtttcgatgttagcaatatatatatcaaaacgctcacaatgaaaccccgagcgtgggtc

SEQ ID NO: 91099 - DNA, 119 bp, Glycine max
actcaagaaaagtttatggcccattatgagaagatgtcataacattcactagtgtgtggcttgtacaaccaatctgggtgatgctattgacacccttacccatccatctgaccttggta

SEQ ID NO: 91100 - DNA, 340 bp, Glycine max
  unsure (1)..(340): unsure at all n locations
cttccatgttcaatttttaacatctcgatatattatgcagctgaatcgggcatctgagtgaaaagttatgccatatgagttagccgagagcttccttgttcgatttccagcgtctcgacatattattggcctgaatcggacattcgagtcaaaagttatggcagtttagactttccatgtgcttccatgtagtaatttgagcatctcgatatattatgcacctgaatcggacatctgagagaaaagttatgccatatgagatagccgagagcttncgttggtcattttcgagcgactcgatatattattggcctgaatcggacatccgagtcaaaagtat

SEQ ID NO: 91101 - DNA, 93 bp, Glycine max
  unsure (1)..(93): unsure at all n locations
atcaattaactatggagcaatataaaatctggtagaatntctcctacaatttgtgccaagatcaacttcaaatttaactctccaatagcatat

SEQ ID NO: 91102 - DNA, 378 bp, Glycine max
  unsure (1)..(378): unsure at all n locations
tcgattatattaaccctatagtttgacctatttgtgaaagtgaaaaactcttcaaccccatatagtcgaatagatactttaagatagtccaactattttgggaaacctatctcaattttgagatacanaggtcacaatttagtctactatattagcatatattcaactatttngatgcataattgagagtggtntaanaactggtatgaaaagttaattcacagggccattataatgaatcaacgaatgctaatcaatagagcatgttgaatacatatcctagtctaggatgcatgtatgcatgacttcacataaacagtcaagcatttatgcaataacaatcattctaatcaagaatagtggttcatttaaactcat

SEQ ID NO: 91103 - DNA, 346 bp, Glycine max
gcagacggcgtttgatacagtacacatgtgaacagttcctaagtcatatacactaatgtaaacttcttcctgcggtatttgggtgtagattctatctatactatcggctgtcagatgtgattaccattgatgaactctgctgcacaaaccgcgttggatcttgatttggaatggacaagaaacttgcgaatgcatagacaatcgtgtgattataaaaatcatgatttagaattccactgatcagcgagctagcgccccaaactcctagtgtgctgctttaagtatagaaaagggctgtcactccttatgaggtggtggatgatagagattttaacttagataagac

SEQ ID NO: 91104 - DNA, 371 bp, Glycine max
  unsure (1)..(371): unsure at all n locations
atctctgagtcacctgccgcatgaagctntgagtataagaaaacaacttgtgttcttttttataataaaagattaccaaatgcagcttgttaatactaatgcacatgcaaatgtgctaatggctattgtataaacacatttatgcaccgactctaagatgaataaatatncatcaacacgtgaactagcatgagaacagaatgagacaacattagagcatcataaatatcaataagagacaagcaaatatagcagagccaacggagaacgacatatatttcaatggtgaacctcatttgttcaacccaaagacaaatggatgtgagatgtatttgatagttacatagaaagggattatctctattttgagt

SEQ ID NO: 91105 - DNA, 302 bp, Glycine max
  unsure (1)..(302): unsure at all n locations
tattttattgtgctatggttttatttctttcgagatactgcctcatgtggnacanaaccatcaaattcgaagaagtcactcattctatcatcatcaaatggcgtgacactaacaatgaccttactaacaacattactgtaaaatttaacggcaggacgtatttgcaatacttatgtaaaagatagggactaatatgctacacgggtacaaagtcagggactaaaatgcctaattactcgtcttgttatcatcaaatgacgcggcatcagacatgtccacgtgtcatgccacgtcatccttta

SEQ ID NO: 91106 - DNA, 251 bp, Glycine max
  unsure (1)..(251): unsure at all n locations
agctntactcatgtacagtacaccaactgagatatttttccgtagtncattcaggaacccaaagaccaaccttcgaatgaagaagtgtctagtcctgcacaaatacagataaacaaactagagtaagcatatgtttgattngatggtagatcaagagaaaccaggaacaatcttcatatggaactagtattactttgagtacagagattaataattcacacatttgtttattgataagcaatcatggtctt

SEQ ID NO: 91107 - DNA, 417 bp, Glycine max
  unsure (1)..(417): unsure at all n locations
ctcaagcttagacctatgaatactntctgataaagctaggcatctatcacctcttcacctctatcaaacatcctcagaccaacggtcaggcagaggcagccaatagagttatccttatggccatgagaaccaaattgacaagtctaaaggtctatggaaagaggaacttagaatactntgagcctaccatcgttcaccccaaacaatggctaatgaaaatccttattgattcacatatggcacatatgccatgatccccatcgaagtaggggaactgtggacaaggagactattgttccaacaacaacaaaatgaagaaaacatataggtagaactcacgacaatagatgaagtctaagagatggccaggatcagagaataaactacgaagctctgagtgatnaagagatataatac

SEQ ID NO: 91108 - DNA, 373 bp, Glycine max
tatgcctatgttgctgaggatgatttctctagatttacctgagtcaactctatcagagagagatcagacaccttcgaagtattcaaggagttgagtctaagacttcaaagagaataagactgtgtcatcgagagaatcatgagtgaccatggcagagaggttgaaaacaacaggtttactgaatgctgcacatctgaaggcatcactcatgagttctttgcagtcattacaccacaacataatggcatagttgataggaaatacaggactttgcaagaagctgctagggtcatgccttatgccatagaacttccctataatctctgggctgaagccatgaacacagcatgctacatccacaacagagtcacac

SEQ ID NO: 91109 - DNA, 274 bp, Glycine max
  unsure (1)..(274): unsure at all n locations
atagatatggaatttgtattgaatgaattagtctacgcatgatgtttgatatatnttaagttttcttatatccatgcttagtgtggatcaaatatgtttgataaatggattgatctcaaagtttcttataagcantgagttcaacacaatgtaatcaattacaaggtttgtatcaattacagtggtagaacaagtgacaatactcacttctactttaaaattggaaaaaaagcatcgaactaatttgattaccaactttctgtaatcaattaaa

SEQ ID NO: 91110 - DNA, 381 bp, Glycine max
  unsure (1)..(381): unsure at all n locations
tggattatatcctggtaatcaatctagctacatcaagcctaantaatgaaaagggtaaacaagcttgcttgctgcacattacangtacagcaattggagttataactaatcctaanagtgacatctagaagaataacacaatgatgacanatggtttatatacacacacacacacatattatttatatttatatttgttgcatgatgatgttctacacttgaggaaaatgagactcttggcctaactccgtttgagaaaaatcttgatatttggagaccactctggcgggntgtgagcgcagtgatttgtaagttgnaccatcttcaactttgacctaattttttacatttgctgataagggttccaattcatatgaatgc

SEQ ID NO: 91111 - DNA, 105 bp, Glycine max
ctgccgctgcagctgtgcaataaatcactcctcatctatcttatctgcgtttttttttcccctcctacgtggtttctggaaaaacatactaacgcccgcaggatc

SEQ ID NO: 91112 - DNA, 325 bp, Glycine max
  unsure (1)..(325): unsure at all n locations
atgagaaactgggcaatganaggtgaaaagaggagaacccatgctgtgactgccatttctatacagccaaagttcccaccaacccaaaaatgtcattactcagccaataacaaacctncttacccaccacccagttatccacaaaggccgtccctaaatcaaccacaaagccttgctaccgcacttccaatgacgaagaccacctttagcacanaccanaaaacaccaacaaanaggaaatttgcagcanaaagcctgtagggttcaccccaaattcccgtgtcatatgctanacttgatcccatatccactcgataattcaatg

SEQ ID NO: 91113 - DNA, 172 bp, Glycine max
gaagtggtggatttcaccctctctgctagccaatctggtggcttagcgagccatccgctgagcgcaacaatcctttgctaaccgcgaggaagaatctggaataatgatgagctgtgcttgttcactgaacgaaggtccatcccgctaagcgcactgcttcagtccctccact

SEQ ID NO: 91114 - DNA, 252 bp, Glycine max
  unsure (1)..(252): unsure at all n locations
caagcttgtacgctcatttatctcgtgtatgaaaagcgcaccacaaggtctgaagtagaagagagctacaaccctataacgcaacaggggaggcaaaaatgggcattcaacttgactggtcgtcattgacaatgcaggacgtattgggcgcttcactatccatgtacacacattagggcancttgtggttacgtgagcatgaactactaccaacatatagaagcggttatacaaacgagcacgtttaaaagc

SEQ ID NO: 91115 - DNA, 384 bp, Glycine max
cttctaacaatacacacatcacacgccgtgtttgtcagccaccacacacccacacatgctcatgatgaattttgattcaaaatttacactaaataaatctgcatgccaatacacactggaattcttgttgtctagtttaatttccgcggacaacttactttttaatattcacatatatactaacacttaattttcccaataataaactaaatcatttaactatgttgggaatcaaaatacctcctttaatttttgattaattcccattttattcctgatattaacccttataacctaattcccgatatttaactacatatttctattttttttactcaatttttttgccaaaccttattctctggcttagtgttcttctaacat

SEQ ID NO: 91116 - DNA, 377 bp, Glycine max
  unsure (1)..(377): unsure at all n locations
aacgaagaacaatagctgggcgaatttctctctttttggaaaanagncgggaattctgaaaatgtaagatcacgacatcacatacctgtctataggaaagtagctccgaatgcagctaattatgacctttgttaggtatgcccggctatttaatctcatcttaggtccttgcagcacgatgtgaattctttgctataaaggttcctatcggtgttcataagatgcttatcaagtgggaccgattcctgtgttgtttattgaaatgaaatgatttttaagtcagtccatattagcgaccctttaaactctgactaatagagtttcagcccttcatgagtggtaatacgtcatttattctgtcttgaaacctctaattt

SEQ ID NO: 91117 - DNA, 490 bp, Glycine max
  unsure (1)..(490): unsure at all n locations
ttatattaagtgcttnttatagagtctcttactgtttattcaanatctctccgaggactgaaactcaatggttgttattctctcatggaatcgctcgngatgtcagaagaaacaacacaacaaatcttgtcttcatgagagttagacctatataaaaatgtggaaagcatgtcttcaaacatgataacgtttcaatgttgagagagatatcgttagatgattacgtcaaactcttatctttgtcgatgcttccaccattcctagaaaggttgagtgcttataactgcattaatctaaatttcactgaacaactagtgttacaacacatgttacagagccacataccctacttacaccaacaatatcttaatgaatccttacttcactactaganaaaacatctttaacaacggttcttggagatattcaacgacagttntgaaccgtctttaaagtcaacattatgaanagtcttgattttcaagatggt

SEQ ID NO: 91118 - DNA, 286 bp, Glycine max
acctgctgctgcaagcttgaggcaactggatgcgttggtcaactgttacccagtggccttgaatcagagatctgacctgtcgcaagggtttgtgcgttgtgctcctctgctgaccaccatacagacctatgcccttccatgcagcaacctggagcagatgagccagctgagcttatgctgaaatatttaaatagacctctcaactcacagcataatcccccagcagacaattatgactttccagcacaatacaccctgatggagaataccctacctcaatggtcag

SEQ ID NO: 91119 - DNA, 395 bp, Glycine max
  unsure (1)..(395): unsure at all n locations
ataaatggataaagcatgcatactcttttatccaccacacttttaatagtctcccagtcttttcttgtcaagattttctgtcttcttctcaagttccttctttcttatgtgttcttttttattttatttttctaatcaagacacctcatattgtttctgttcagactgtctacctatggaaaaatatgtattagaagaggtcaaccttaactgaatcagattatttcttggttttgcgctgagggtatcctatttcacacacatacaaaagagtgcaaacactacttanatcatgtaagccagaatttaagttatgctttccgttgcggttctctcacgacccatgatattgtgggaaatagcaacaaatgtagctataattcattatggatagt

SEQ ID NO: 91120 - DNA, 165 bp, Glycine max
  unsure (1)..(165): unsure at all n locations
atcctctgagtcacctgccgcatgcaagctttggantgtcaagaagtgccttatgaatccttctctgcttatgccaccagtacctggaaggcctctcatcttgtacatgacaatcttagacgagtcgatggcgtgtatgctgtggcaacatgacgaattcggaaa

SEQ ID NO: 91121 - DNA, 116 bp, Glycine max
  unsure (1)..(116): unsure at all n locations
tagagcttagctacacatacctctctaatagctgagctcacctccttgagatgagaaactttagctgttctgtncacaccctatgattgctaatctcacccccatgacaaaaaaca

SEQ ID NO: 91122 - DNA, 269 bp, Glycine max
aagatgaaagaaatataaataatattcgttaattgctgcggcccgacacaggaagatcaaattttttctaacggcatttttttatatatttctaaaaaatatacaattttaagataccattgtggaataactaaaattttcttttaatataattttttactattcatatttaaaattgataattttctgacatctataaaattgaaggaagaattatctcctttatctaaatttacatcatctaaaaaggttatgggatcacaactact

SEQ ID NO: 91123 - DNA, 216 bp, Glycine max
  unsure (1)..(216): unsure at all n locations
gcttntctctctaagtttctctctctcactatngtgtatgatagccctgaatntcttttattgcaggagaagttttgtgtcacgagtntcttttatcatgtcaaactcacgtttgtcctcttctgggaagaatcattgatagccctgaatttctgtcctcataaggctatattggtattgtgtattaccttgtacatcccagctttcatattcatc

SEQ ID NO: 91124 - DNA, 448 bp, Glycine max
  unsure (1)..(448): unsure at all n locations
tcatcttaccttctggtcctcctcatagttggtgcatgagaaaacatgctctattntcatctcccactccaagtaggcctccggatcattctttcctttaaatggaggaatgttgagtttaataccatcaattcggttttgtctaagaacaccatcattccctcttctcctcctttcttcttcattatgatctctattctccatttgatccaacctctcatggagcgcatcatctcgttgttcattaacctctccaaatgttgcatcaaagcttgcatttggaattgcgaaagccccactccatcattaggattagtacctgacatctcanacaaacaaatcaaacgtaacaagacaattatagttgttgtttgaatacctccccactcaagtgatcacacaattatggctttctctaatgaacactcttgcctttacactctaatcc

SEQ ID NO: 91125 - DNA, 398 bp, Glycine max
actcctctttcagaactatgctatgtgctcgcgactggtctctttcttcccttcgcaacttgagttcactattgctaccccatagagctccgcgaaatttgttccggccatactcttccttgcgagccctcttggtctcttgttcaagggctcttgcggtaattgcattctcttcccgtaacccggcacactccttccgaacgtgtgtagcggccaacttgaacttctccttggcaagttttcctttcctaactcgcttttgagagcttggacttcttcctcctcttccggtgctttcaaactctcttcgctgacgacttttaacttcgtatatgaactttcagccattcgtggtacccaccaatgatgccattacgaatgcctctaagctcttgatc

SEQ ID NO: 91126 - DNA, 275 bp, Glycine max
  unsure (1)..(275): unsure at all n locations
cagtcaccgctttaggagcgtngtacaccagcagcgcttcgaagccatcaaaggatggtcgtttcttcaggagcgacgcgtccatctcatggacgacgagtatactgatttccatgaggatatatggcgccggcggtgggcaccactggttactcccatggcccagtttgatccaaaaatattccttgagttntacgccaatgcttggccaacagaggaaggcgtgcgtgacatgagatcctgggttaggggtcagtggatcccgttcgatgccg

SEQ ID NO: 91127 - DNA, 294 bp, Glycine max
  unsure (1)..(294): unsure at all n locations
cacctgatgcatgcaagcttcccaagttttaagttcttcctcaanactgttctaagcaaagttcccaatgtcctattaaaaactntcgttggccattcagttgtgggtgacaagtggttgaaaataacaatttagtgtccaacttgccccacaaagtcctccaaaaatggcttaggaacttagagtccctatcactaacaatgctcctttggcaaccatggagtctcacaatttccttgataaacaaatcaacccacatgggaagcattatcaacttttttacatgggataaaa

SEQ ID NO: 91128 - DNA, 364 bp, Glycine max
cccatactgccctttcataaaataagacatatcgaatctgatgtagagtttattacacaaccaaattgggggttgcatgaatatgactttaatcactttggtgacaaaagacagatccactaggaaaaagattgcaacctattacagcccatacagattcatatcttgactccctcacccctaatatagacacttttagaaattatgtgtccttttatagaccttttaattctaatgctaattatttttcatactcccttttaatatttctctccaactttatggaacaataagggataagaataaaaaagtatttggatgttggcaataatgactacttatggattaactattactacttcgt

SEQ ID NO: 91129 - DNA, 360 bp, Glycine max
  unsure (1)..(360): unsure at all n locations
gagatgacctgtgctgaatggccacaatctttccgatctaaaacacaaaggtcaggacaaaactcttggacaagggattggtgtgttacaaaagaacattgccaantccaatacccaagttgctgttagaaagaatatcacatgactccaacaaggccttatgaaatttgtgtacaaatagccagcataggccccttcacactggaattgggtcggttgttgggtgtgtctcgccggggacctctcctttgatgattcttgaaatggacctaataaccctgttgatacccaacattttagttgaacaaggttaagactaagatgtctcacctttttttttcaagctttaccgggggaact

SEQ ID NO: 91130 - DNA, 391 bp, Glycine max
  unsure (1)..(391): unsure at all n locations
accagcttaaataatctgaattctaaagaatggggagaaagagacttgttgtcggctgaacanaacttggatgtatcctcttgtattcaagattgtcatcatcaaacaggaggagattgtggaagcaatgacttccaagattattttgatgatgccaaagaatcaagagtaaaaataaacttcgagaatcaagtttcatagaatcaagattcaagaataatcaagcttcaagattcaatcaaggttcaagaatcaagattcaagattcaagaataaccaagatcaagattcaagactcaagattcaagaatcaagagaagactcattcaagataagtactacaaacgtttgtcaaaacattgagtagcacaagaattttcacataatcttt

SEQ ID NO: 91131 - DNA, 152 bp, Glycine max
gtgtacacttgttgtgactctgatgaatgagagtctcgtgagacaccactcaaagttcaacttgtcttcctctttcttacttcaatatcgtgctcccccctcgctctttctctgcctctttttattctccattgaagcatcctcttccagct

SEQ ID NO: 91132 - DNA, 349 bp, Glycine max
  unsure (1)..(349): unsure at all n locations
agctcgcccaggcgagctcaggagcttcctccagaatgctccgccttctggggaactttctgtaaggcccaatagngcctggntgctattcgaacccccttgtttactaaatacacacactgcccacctttgttgctgtttctttttgcgtaacgttacggaactttacgaatttcgcaacgatgctcgttttctttgcgtaatgttacggaaccttatggattacgtaattgatcgaagccgtgcccgaatcacattaacatgaatatgcagtaacttggaagtgatcctaggatcggttccaacgagcagtgacaagccanatgttcataatatacttgcagtaaca

SEQ ID NO: 91133 - DNA, 249 bp, Glycine max
  unsure (1)..(249): unsure at all n locations
cttctctctctctcgaattagctgaggaannatagttccgtgaagaanatccaagccgaggcgcttccgtaacgtttccgtgagtaattaccgcgaagattctcgaccgttcttcaagattcaccgttcattcttcgntttcttcagtcttcaatgggtaagtacctcaaaccaagctnttcaattattctatgtacncatggtggtcacatttnngtgatggattttattcttggtttggctactttt

SEQ ID NO: 91134 - DNA, 418 bp, Glycine max
  unsure (1)..(418): unsure at all n locations
ctcagctctccacagtcctaaatgacatttcanactaagattatctcactttatcctccaatnaccactaaatccagatgtagctnttcaaatccttaaagcatcacacttttccactcatatcactacattctcactttttaaccctaagttaactctacccttcatctctatcagatttccatcagcaaatgtcagcacacaagcatcatcataaaaccctaaaacagaatgggtaagcttgactcacaccatacatgacaagtttagcatgctttcaacaaattccttcacaaataactaccataaggcaaaaacctagtaaaactacccatcatatctcccaaacactcaatacccacgatattatgtgagaaagaagtctacccaaacctgaaatctgaagtcccacaatgta

SEQ ID NO: 91135 - DNA, 89 bp, Glycine max
tcaaaaaatagaacatttacaattgacattgatgtgatagaacaaaagtgttttaccactacagtaaacagtgaagagtggttatggca

SEQ ID NO: 91136 - DNA, 388 bp, Glycine max
  unsure (1)..(388): unsure at all n locations
tcatacaagtagagttgatctctgttatcttagtgagagagattctcctacattcttgtntgattcaagaacacccttgctggatcaaagacttcacaacctctgtgtggtgccttcgctggaataagtgattctttccttcctatcagtctccaccgcttgttctctccaaccacaattccagagaatccacctctgtccataattatcttgtgaccataactcccatgttacacactcaaattaagtgattcttgagcctaaattgaatttcaaaacgagaccttcacctcgtttggatcacctatttggaccctgagcttccgtattgccattctatatatctgtcagccccacttacctacgttttacatcccattattcattt

SEQ ID NO: 91137 - DNA, 142 bp, Glycine max
  unsure (1)..(142): unsure at all n locations
acgcttcgattgctgcgatcagcgagataacaagcatcttccgcaccaatcagtggcaaaacagtaaaatcgggaagcaaataaggagaanaacgagagaaagaaagagccgtacagatccaggaatgcatcttcgtcctcc

SEQ ID NO: 91138 - DNA, 280 bp, Glycine max
  unsure (1)..(280): unsure at all n locations
gaaaaataaaggaaagatcatatttgatgtggacatccccacagatagagttttcagattatagcttacacagaatgttagcataaatatagttcaaatggctgaaatattttacttcttagaattcattcattatattattacctaattaaagatcctggtgacanatatgatttgtntaaatgacatcaaaagtggatgaatttgagtgtaaatctatattgtatgtttgacttcgaaatggtgagaacgaacagaggggtcatgtgataaattattg

SEQ ID NO: 91139 - DNA, 327 bp, Glycine max
  unsure (1)..(327): unsure at all n locations
accggatccttaagcacctgcggctgcagctagcgtggccttaacgtntttagtgtttttgcgacaagctgatttggagtcatttagccctagttcactttagtattagtcattcactcagaaagaaaatctcaaaagagacgctcgatctgattttttgtttatcttactaacagaatatttttgagtatatattattatttaaccctctnttgggttccaactggtcccggaaacgtttcggacacgttacggaagctccttcggcgtggattctcttcaccggaaacgaattttttcactaaattcaagtgatctcaagatatc

SEQ ID NO: 91140 - DNA, 301 bp, Glycine max
  unsure (1)..(301): unsure at all n locations
ctgcaagctgaagaaaaagaacanattcttcttgctgtgtgaactctgcaaatggaaaaaagactctatttgatgttaaagagacatgaatgtgacggttaagtttgtccaaatgacacttggatagacttaagttgacaagcttaattgacaacacacatgactaatggccagcatggtgaagcggccaggcataccatttatttgcatatgccttttgaaattaacccaaaatgactaggtgatatgtgcaaacggcaaaacttttttgtaaactggtaatcgttctttacattcaaat

SEQ ID NO: 91141 - DNA, 117 bp, Glycine max
gccattttatggaggcgctatttacactattgaccttattcattttttacaatctcataccccttatgggtacgtcagttaccagcatgaaaaaacgttgaggaataatcgctggta

SEQ ID NO: 91142 - DNA, 190 bp, Glycine max
  unsure (1)..(190): unsure at all n locations
gtcacctgcngcatgcaagctngtattgatcccacatggttggagcattcttgctaacaacgttacctgattggctccctatgatnttacctagtgagagtgacctaacttactagtgtgtggtctgtctagtcatgtactcttaagcgttcaacgagggttntcactgacatgataccacattgcatat

SEQ ID NO: 91143 - DNA, 426 bp, Glycine max
  unsure (1)..(426): unsure at all n locations
gctctgatccttaagcaccgcggctgcaagctgaaggtgcttcatggggaaagaagatggnaattaagatgggagccgaaatgaatgaagaaaagggagagaaagtttgactctgagtcgtgtctcacaagactcttattcttcaaacttccacaagtgtacacatctttatttatgactaggagctctctgagagtttcttagaaacttcttggaagcttttgagaaacttcttggaagcagagcttgctcacaacccctctatactaagtacctcttagagctccttagaagatctaagagctgagctactcactacccttatactagtccctcctggagaaagctgactactccccccttttactgctcccctgacaactgaatcaaaaaagcctcttcaactttaatgccgaacagtaacct

SEQ ID NO: 91144 - DNA, 302 bp, Glycine max
ttagattggagccatctattttgtgtttgactctcaccactatgtttttcgcgtgatccatactgcttccctaattcttgtctttttcacccgagtcatgccttggaactccttggagtaccctcgcgtcgtggtcactgataccccgtgcgatgaaaagcgtgatgctttcgtctatggagctcctctcttggggtagccaagctggcttatggcgagaacgggattataattaatacaaccccttgttcccatcaagggaacatgtggacatgcttcgcatgaacatagaatacttgatt

SEQ ID NO: 91145 - DNA, 136 bp, Glycine max
  unsure (1)..(136): unsure at all n locations
agcttgtgatgtccactgaaatggtatccacagtagtgtgttcttactatgagagcagggattgtagcatacccgcatatgaagcggcaatagaatntggcgaggcccacaaagcttctaacaacttngatagaat

SEQ ID NO: 91146 - DNA, 333 bp, Glycine max
ctccaggactctggtgggggtgaagacatgtgaagtaaggattgaggccttttgctggagcttcaattaaaaaagatgtatttgtcaaaaattgacctatcatataattgacactgaaataaatataatcatgtgagctttgcatacaacaaatactataaaaaataataatccttaatggattgcctatatgtttgccggtgacaaacatataatttgattaacagctaactaatatatattgatggtaaaatataatagtatcttcccataaaaacatgaaatgtttattaaagaattaaccctcctataattgatcataataatataatt

SEQ ID NO: 91147 - DNA, 327 bp, Glycine max
  unsure (1)..(327): unsure at all n locations
agcttagcgtaagctntcgcactaagcgtgtgtntcatggtgtcttttcgcgctaagcgtgtgttgcacgctgagcgagaatgcgcgcacggcacgtcttgcatgttaagcgggctttccaattcttttcattttttcttcaaggtgtnttcttccagtttttgcatcaatttttcctctaaagcacttgaaatctagtcttttagatatttctaatcaaaaatagcaaagatgttaaattctctcattattcattaacaacaataataaagtagagaattacgcccacttattaatccagattgactatcacattagcttatattt

SEQ ID NO: 91148 - DNA, 322 bp, Glycine max
  unsure (1)..(322): unsure at all n locations
atcttgataacctttgtagaattgtgagcctttatacctctcagctgctgatattgagggggangcactctaaactgcctgccctagtagcaccatagcactcctcacctgaactatatggtccaagactctatcttcatacaccaaaagagcattgatataactaagcaacaaaacattctctgtcaacacttttcatacaacctctagatggcatangtggtcatgacatgtggaaccatattaccaatatatcatctaaaaacactaacacctatttccttaaagcatgttggaaaatatggttcatcacacactgaat

SEQ ID NO: 91149 - DNA, 331 bp, Glycine max
  unsure (1)..(331): unsure at all n locations
atcctctgagtcacctgccgcatgcaagcttctntanacatatggcagtaactttgtatctattaactactacatttatgaactgtgcatttaccatagaacanaatgaacacaaaaataacatgtgccatccaacatactgaaattttctagttgtgactatgagtctcatcacaattctgagcgcaatatgaagaagatgactttntcttcatctttatataaggtttaaaaccattctaagatcccagtcatttttaacatgcatatatttcgcatacacagcgtaataatgatttgttgtggcaatgtcatgtattggtatgatata

SEQ ID NO: 91150 - DNA, 396 bp, Glycine max
  unsure (1)..(396): unsure at all n locations
tatctatttgttaaggatatanngnnaggagttaattgagacttagaggtgcatatcagtgctttatacttactgctttgatttggttagagtgtgtatactacataaagcgtatattgctattaattaattaacattgaagatattatagtgttgttgtgatatgattttgaagactattcgagtcgatgtatatgtatatgggttatgtcttggcaacattgctatgaatgtataatatgatatatgagtataagtgaaagatgtaatgaattgtgagctatgaattatacaattacataactgtaagaccctttaagaggcaacaagtcatgcgtgatgagttaaaacgaatttgataacaattgactaantatgtgtattgcatagtttata

SEQ ID NO: 91151 - DNA, 178 bp, Glycine max
  unsure (1)..(178): unsure at all n locations
agcttagcatgtgccaggaaaatgctctgatcggngcatatgtgtttatntcatatgttataatttcaagaataatatagttggtttatgctctctgctctagtgtgacttcttttcattcagaatgagcgaccttgntntcagttgagattgacttatcattatttttatcactgag

SEQ ID NO: 91152 - DNA, 333 bp, Glycine max
  unsure (1)..(333): unsure at all n locations
tggaagagaagaggttctaatgcacactcggattttgctcgacaaagccggaataacagcgtgatctctcaagtgggggggtgtgggctaacaaaaatgagtatgatcgcgtatcgttcgctttgaagttgaaattgttctgaaataggtagagaatcatagtggtgctaatatcctaaggaacagggctcatatttatttatctctactttgccacggcggagcgaggttaatgataatttgcggtcgtgtgagaaactggatgttggttccctcgacaaattccncatcgatattggatggaacctctacctacctgcttgtaatgctcga

SEQ ID NO: 91153 - DNA, 404 bp, Glycine max
  unsure (1)..(404): unsure at all n locations
agcttgcttcaacagccctatcactaccttcttctatcaattcaccaatgaatatattgcttcatcagaaataatagcttctgtggaatctaccactccttcagatattattcttgttagttcaacaacagcagtttcctgtgcttcttgtgagaacgaaattctgatctgttccagaagtcttggaattgtctcgtagagtgtaatttccacattgattggatagaggctcgcantggaaccagagagagaacttatgttaactaggcaagcagctacccactcttattgtgaangggaatgctggacctgangattccgcgaagcanatcaatgaactgcaaggagtttattttgtggcagaattgctcacaatcgagtagccttgtcaataatcggatgct

SEQ ID NO: 91154 - DNA, 183 bp, Glycine max
  unsure (1)..(183): unsure at all n locations
agctngtagaatggctagacatgatacatgtcanggcttggtttggttcaaggataaaagggatgccccacattatntncatgacacanatgcaaaatgatgaattgganactntatgcaaaactggtcatgcatgcgcctatgcggacgctcaagtgtcaaaattttatggtcatgtgatgc

SEQ ID NO: 91155 - DNA, 429 bp, Glycine max
  unsure (1)..(429): unsure at all n locations
atccttaagtcacctgcngcatgaagcntttaaatggataaaggctcacattcactntcttctacatcatattcaaatttggccaaataaataataaagtcatctcgactcanagaanatcatataagtctcatacaattaatatagaacctatatcctaatgtcacattctatcagagcgtggtgttcccgtgtcctctagcatgaggttcttcttagtcatccacctattcatctgctcccccgaacacaagttcaagatcatcacaggatccaaacacaacaacacacaaggagtgaagtatcacattccttgcttatagagaaacaagatatttaatatccatatttataaatgagataccacttgcttaaccatagctcacgtactttcactatttatcattcaaaatcacttttcaatattaa

SEQ ID NO: 91156 - DNA, 466 bp, Glycine max
  unsure (1)..(466): unsure at all n locations
gagctagcattgtttggctatgatgctgatgggtgagaagaattcaaatcctgatatatatagagatgaggagcccaagctggagtntgaagatcccactctgtatcattatgctatattctcagataatgtcatagctgtgtctgtggtggtgagatctgtggtgaagaatgcagtggaaccatggaagcatgtgttccattgttgtaccaacaggatgaatgtttgggcaatgaacggttggtttaagatgaggcccattgaaaggggtgcattcttagaggtgaaatctggggaagaatcacattcttaaattatcatatgtccgatcttgaagcacttgagtcaccaaatgtagcacggtctggagaataagctgatatgcccaatgtgcaacatgaaaatgccagtcctgtcatgttgataccttcatttattgcagaatgtccctaatgatagactactt

SEQ ID NO: 91157 - DNA, 225 bp, Glycine max
cacctgggatgccctaagcattttgcccttcttactgcattggctttttatcaaagacccttccttacctttcacattacaacatgcttgctgtaatgcagatcatcagcaaattaaacctaagtcaccgcaatttcatgaatttaaaaagccgtttttcaacaactgtaagccttcaaattgtgtaccccaatctatgtttctcttctacattctttcttttcc

SEQ ID NO: 91158 - DNA, 358 bp, Glycine max
  unsure (1)..(358): unsure at all n locations
cagctttcattatccatgtccctggggccacattggacgtgtattttattctattcatcactcttataccccttttgacggcgaaccatttacttaatcattttcgcttacttaaaaataaatatgtttcaccgatcgttgaattgattatctgtaacttcgntaaaatgaattcgaccgttcgtcgtgccgtaccacgtggatatcaaaagatgtaaaaatatttatataaaaaatgctttattaaataagcgaaataatcgacgtttctttggattctattttaatgatgatatactaaggaactaagtaatcactgctatcagctctccaaaaagtttgaagtgctttattctat

SEQ ID NO: 91159 - DNA, 192 bp, Glycine max
tgatgtggtccgccttgttatgcttttttatcatctcagaagattcgcgcctcgtgtatttaaacccctgttcccgtcacgcggcccatgcacgccttgacttctggaactcctggggttttcatgcttcacaaaatggctcgggaaaaggcttgtcctttgcagaaggctatacatgaacttgccctcttt

SEQ ID NO: 91160 - DNA, 144 bp, Glycine max
tgtgaaatgggtatgtgtttgggatctccaacctcagagtgcttctgtgatgcctgtcatgcgacatagcactatgttggttcgagacaggattgttgataggcggaggatgataatgctgtgcataacacattggacaataac

SEQ ID NO: 91161 - DNA, 409 bp, Glycine max
  unsure (1)..(409): unsure at all n locations
agcttctagcacaatggacataccatgaattaattcttttgatagcccttntgagccttgcttctctctccttgatttgaagctcactacataccttaagtgataaaccatgatattaccatatccttaatgaatatntgcgctttggaattgttttggaataatgtggggggagtttgtttcattgacaactagttttgttggtatgctaatgatgtatattgggcatacttgtgcacattgtatattggataatgttgacatgcttataaatgtttttttctaggctaatatatataaaataataatatcttcattatatttttaagaaatacaaacgctttgttggtgattatattataggaaaaatgaaaactttggttacctaggaaaataatttctttttatt

SEQ ID NO: 91162 - DNA, 214 bp, Glycine max
  unsure (1)..(214): unsure at all n locations
cttccttagtgtatatgtgacctctatttacataactttttttcgagttctctgaagaatcttgacttctatatctttctccaggntaggttgagcctttcttagtgtcttgtgttttgggatcgtaatagggtattnttacacttccttngaaaaaaccttgnaaatgagacgttgtaaaagttatatttttataaaaatgatgttatttttg

SEQ ID NO: 91163 - DNA, 373 bp, Glycine max
  unsure (1)..(373): unsure at all n locations
cttctccgctcacaccaggaacgcctctagntcagttcctgtgcagtctatagcacccacccagagggaagctctccaagttccaactccaaacacaactcgcccggccagcaattccaacgcaataaagaacttccctccgaagccatttaaagaattcaccccactcccaatgacgtatgaagacctctttgccgtcctcatcgccaaccaattgggccgtggatacttccggaaagggtcttccatccccctttcccaaagtggtatgaccctaacgcgactngcaagtaccatggtggtgccccggagcattccattgaaaaatgcttgccctttaaacacaaggtccaacattngatagatgcgggat

SEQ ID NO: 91164 - DNA, 347 bp, Glycine max
  unsure (1)..(347): unsure at all n locations
agcttctcaaggagggtgagctagttattataggggtgtgtgtagctaagctctagcttctcaaggaagttntctcanagaagcttctcacagaagttttctcaagaaagcttctcaaggaagctacctagtctattaatagaagcatgtgttacacttggttgaactttaatgaatgagagtcttgtgagacatactncanagttccacttctctccctcttttaattccttcaatttccgtgcctccccctctctctttctctccctcttcttttcctttattgaagcatncttcccagcttcttatcaaggctcatcttggtggtggaagctccttcttccatg

SEQ ID NO: 91165 - DNA, 206 bp, Glycine max
ctcattttaaaggggtgataaaacaaactttccataactgtcttctttaatacagctctacagataccaagaattaaaactttaagaagatatgctataaaagttaggaaaaagcacgtatctgtggcatctggcactcaactacaccctgattccttttgaatcttcagtgaaacggccctctggtagatcttcaaaaactgtta

SEQ ID NO: 91166 - DNA, 166 bp, Glycine max
  unsure (1)..(166): unsure at all n locations
agctngaaatgaacaacagaagctgtctagaaattcatatggtcataacttatgacacagaagtccgattcatgcgcataatatatcgagacgctcganattgaacaacgaaagctctcgagaaattcaagtgggcataacatttctaaaccggatgtccgattca

SEQ ID NO: 91167 - DNA, 300 bp, Glycine max
  unsure (1)..(300): unsure at all n locations
ttgccttgatgaataccaatgggcnttctaaagccaattgtgtaagagcttcctgataaaagaaaacacaattngagaataagattgaactatatgctggatattccaataantgggagagagataatgattatcaaactgtgtgattgggnttgaattcatttgaagacgaataggtttactttcaaaggaaatctaaacttcanaatatgagagatggtcctctttaaggtttaaagtgcatcaactatgatgatataaaactgtttaccacttgctatgtgtgaccacactttatat

SEQ ID NO: 91168 - DNA, 412 bp, Glycine max
  unsure (1)..(412): unsure at all n locations
tatgtcgcgggcgggcttccttcactttcttggctcctacgcgagctctgatcactgntcttccttgcggcgatgcttcttttcatgtccgcctgagtgggcttatagcctataccatacttcccacgatntccttggggttttatcaggctatttattccaccattgtctatggctaaacaccatcccgggttcataaccagtcccaacataactctggccatcattaccggccgatcagacagacaatgtcgcccaaagaaggagtccacggaggaaatgctgaccacctcaaaagactagatagncgtgttctaacgattcttctgcggcttccacataaagcatggangatgggcagctnaccaagatatcttcctctcctgacacgatgaccaagtggccctcacta

SEQ ID NO: 91169 - DNA, 437 bp, Glycine max
  unsure (1)..(437): unsure at all n locations
agcttatacaaccaattaagcacagcgcatgtatgtttctatgtgtctgagatatggttatatcatgcatgctggttccattacgtcantgtgaaacaatcatgcttcttcatttatttatttcactggtgtaggttaccagactacatgtatgcgagtgatgtaacccttcacaagtagtagtagcagtattgttttaatgtgaagaatggtgagagaaagaaaaaaaataatgtttcttttccaacaaccatctgttgctagtggtgccataaattggacttgaagccccatcttttatgtccatttacattgatagtgaacatacacttgctagggaggcttctttttggacttatttttctctgtactcctccttccttctgtttcactgagcaacactggttaatcttcttaaagttaactattctcttccc

SEQ ID NO: 91170 - DNA, 375 bp, Glycine max
acgggaacagagcgtgatacctaacaaagttagcgaaagagcacctctttgatcttatttgttataaatgacagactgattcctaaagttatcaaagtgacaagtcaactcggttcaccatggatttcatctgggttgggttgataataatcaaatcatcctaattatatgtaatagtggactgctcacatgaactcaacttattccgattagatccaacaacattggctcgtagataagggatttactttaaaaataaacacttactatattttaatatatagatcatagattataattattgatccttaatatagaaactatttagtgccacacattatctaaactttagtgaaatatttatattttaacatt

SEQ ID NO: 91171 - DNA, 409 bp, Glycine max
  unsure (1)..(409): unsure at all n locations
atccttagagtcanctgccgctgcagcttataatatcaataatattttgaatgtttggcatcaacccatcgacagaagagaaaaatattgattttgaaaagagccgcttcaaacaagactaggtgtatggcatcatgttggcagtcatgtcatttgtattataagcaagggcactttantattttataaagagaacattgataaggagaggtactaacctggagtgctgcatattggagataaacacatataagctctcacatgaggaggagccaagctcttgaaaaactcacttcattcttccttgtaggaagtggcttctctctcctcatcacattggcttttaatcaacaattcatacccagaatctacttgcagctctcttttttttctctttttctggctaaca

SEQ ID NO: 91172 - DNA, 463 bp, Glycine max
cgcaagtagttaaaggtagaacagccgacaatatcttatgatttctttacataagagcccatgagaaggtttatctctataatgagataaccacgacgtggcatgatcaactcattaatatgcgatatgttcatgaaagctaaaaagtattaatttacaactcacactttcatctttttctatgaaaattacgctcaaggtggtatgatcccttcatagtggtgaaagtattctcatatggagttctttatgtaaaaacaataatggggacaccttcttgatcaatgaccacatagttaagcattatatggaggcattgcttcataagcaatatattatgcatttccgaggtgaagttcctgttgaactcatctagctatgatggatacaagcctctcaagaagatgctggaaaatatcctcttcatccatatttatttcaattctggagtattagtcttttc

SEQ ID NO: 91173 - DNA, 68 bp, Glycine max
taattaaaaatctatctttacttttacttaaggtatgaaatcccttaatgacaatcctcttaaatatt

SEQ ID NO: 91174 - DNA, 319 bp, Glycine max
  unsure (1)..(319): unsure at all n locations
acaagactcggctgtgatcgaggtaaatatacaatcagtgcagatgagaatgctatagatacatttatagagcttgcatatgagccttaaataaatgctataactcgacaaggatgcgacttaaacgagtattcattttacacaaaagcacaagatgacaaaagttcatcgcataacatcaggtgtcactctaaaggctgaatctctacacttcgcaagtgtcaaagacacccatcnctgtgtagcttccatcccgaactttgggttcattgatgaaatttgggagcttaactatgagacattcgcggttcgtgttatc

SEQ ID NO: 91175 - DNA, 148 bp, Glycine max
  unsure (1)..(148): unsure at all n locations
tagaacatgtgtacacttattgtaccttgatgaatgagattcttgtgagacatacttcanagattcacttctctccctcttttattccttcaatatcgtgctcccccctctctctttctcttcctctttcttttcctccattgaagca

SEQ ID NO: 91176 - DNA, 292 bp, Glycine max
  unsure (1)..(292): unsure at all n locations
atccttgagtcacctgcngcatcaagcttgcacatngctgctngatagaagaagagcaagatggtaaaccttggtacttcgatatcaaacggtacatcgaagacaaggaatacccgtaagatgcctctgacaacgaccaatggcagccgttntttcctaagtgggaatatcctgtacaagaggaaccatgatatggttttgcttcgatgtgtgaatgctagagaggctgagcaaatgctggtagaagtgtatgaggggctccttttgaacacatgccaatggacatgccttg

SEQ ID NO: 91177 - DNA, 273 bp, Glycine max
  unsure (1)..(273): unsure at all n locations
tctatggaaaactctatctctctctcgggtggtagtccgaatatatcctcaaggaacacttcaagaaactctttgacaatagggaggtcacacatggaaacctttgtctctatttctaagttagacaagatcatgtacacttgatcatatttgtcataccctaatttcgttcggggattattacttgatgatatgcaacctttgattggccacttcaagataatnggcacccttntttgcacgatatgtaagtcccgagacacgccgggaatc

SEQ ID NO: 91178 - DNA, 143 bp, Glycine max
tcggtcccctcttcgatctatgcagcctatgcaatcactattttacttatcatgcattctactatcatccgtatagctacatgaaccattctgaataacatgatgagaagatctgcaaaaccagcatcgactttttggtcttt

SEQ ID NO: 91179 - DNA, 314 bp, Glycine max
tgagaattacaatggtaattggtaccctttatgtctatggtgcccaatgcacacactatcatgctttaatgataaggatttatataaaaaaattaaagtactactctaccgtgctaaaaaatgctgcacttcactaacaatgaaagatatacccaataatgcccaatatatgtactacattacctgaactttttatgcctcgaatttatctctgctatcactgtttatctattctctgtaataacttcattctatgcaataataaagatctcatcgtaagaaaagtgttgatcaaaatatttaattaaaagata

SEQ ID NO: 91180 - DNA, 256 bp, Glycine max
  unsure (1)..(256): unsure at all n locations
gcttatcgtaatggatgacagaggtgtgttngagacaatgactttatttattcaagagtctctattntaatcgattaccatgtgatataatcgatcacttctctttctataagtagttaagaagtgaacaagaacactctaatttattacttggagtatctaatcgattacaatgttcttgagttgtttctaagagtttggaagagcactttaatcgattaaaaagaaaactaaacgattactttattgaattaat

SEQ ID NO: 91181 - DNA, 189 bp, Glycine max
ttccagcttagcccaggttgaaagttctatttagctgctatggttataagaaactaaattcgacccgcaacggttagataaaaacaaacttatctgaaaaattcatgaaggggaagcttttccacttttaagatggcttggtataccttccacttaaccaaaaaagccgcctttatcctccccgtttaa

SEQ ID NO: 91182 - DNA, 326 bp, Glycine max
  unsure (1)..(326): unsure at all n locations
gatccttagagtcacctgcggctgcagctgcnacaatataactacgttttctaaatgactttttgttacaagaactgaaaattctcttgttgtgacttgtccaccatttatgacatgaatacgttactcttgggccctttaaaaaaaaaaaggttcctaatttctttatatggttcctccagaatgatcgacgtacatcctctcctcgttacaggttttcttcttctaaaacaaaacattttgtgtaaacatttggacccccccatcattatttttttaaattaccaaatccctttctataccctgcctcttgtttctttcaattc

SEQ ID NO: 91183 - DNA, 277 bp, Glycine max
atcctctgagtcacctgccgcatgcaagcttgccttgcccattgattatatatgacggactcatggtcactatgaatgacaaactacttgggataaaagtagtattgccatgttttcaaagcccagactaaggcatacaaactctttatcataagtgaatagttaagggtaggaccacttaactcttcactaaaataagcaattagatgccttactgcatcaacacaacttcattccaacatttgaacatcacactcaatttaaaagatttttaaag

SEQ ID NO: 91184 - DNA, 283 bp, Glycine max
  unsure (1)..(283): unsure at all n locations
agcttatgggaatcagagtgttcnagatgtttgatgatacaaaagagatgacaaggtgtgacaatagctcaaggtcatcaagaagagttcagatgtcaagatgaatcagaacacttccagatcaaaggaaagttgattcagattcagagatcaagattcaaaaatcaaatttaagagataagattcacgcacaagatcatgaatccgagaaggcttatcatgataagatgaaaatgaaaggttttctcaaaattgagtgcacatgtttttctcaaacaagtta

SEQ ID NO: 91185 - DNA, 274 bp, Glycine max
  unsure (1)..(274): unsure at all n locations
tcataagtgtggacagagggcttccaatctgagccctcaccgtctaacaagcaagcctagacaatgaatntgacatagatctgtgagatgacacctatgacagagngcctaaacccatcgaagacctcattaagttgcagctcggaactaaacccgagcagtgtatgcactcgagtatggacctcaccagtcatgagcaccggcgcatcgtcgatgtgctacagagaaatgtggatttgttgctngcaaccatctgacatgtcagaatcatcct

SEQ ID NO: 91186 - DNA, 290 bp, Glycine max
ttttgaaatttgtcacggccatgctcttccttgcgagccctcttggtttcttgttcaagggctcttgaggtagctgtgtttacatctctcagttcggcattctcctttcggatcttaagagctgctgatttgaacctttctttgactgtttgggcttgctcgagttctgccctaagggcatgcacctcttcgtcttcctccggtgcctcaacttcttcctctttagcggttctcaaactcgggagccaatccaaaccttgcacatgggctttcaaccacttacagtagcc

SEQ ID NO: 91187 - DNA, 391 bp, Glycine max
  unsure (1)..(391): unsure at all n locations
atatctctaagggctaccgtgtctacaacttgcaaactaagaaactcgtcatcagtcgagatgttgtagttgatgagtatacttcttgggaatgggatgaagaaaaagtggagaagaacgttcttatacccgctcaactacctcaagaagaaactgaggaagaagacccaggtgaaccaccttcaccttcaccacaacaacaaagatcaagaactatcatcaccagagtctactccaagaacgataagatctttggtggacatatatgaanacctgtacttggccatacttgaacctggaagctttgaagaagcgtcaaagcaggaattatgggtcaaggcaatggaagaaagatacanatgatcgagacaaacacacatgggagttagta

SEQ ID NO: 91188 - DNA, 323 bp, Glycine max
cttgtgactcttggcaatttctttaagactatttacttaaaaagttatgacttttggaaaaatcttcagaaacaagtcacttgaagaaatgtgacttttggaaattcatttttttgaaatcagtcactggtaaccgattatcgttaaggtgtaatctattacacatctacagatgtgactctctcattttaaattttgaaaattaaaatgtttacaagctctggtaatcgattacaagtattgggttatccattacacaagttaaaaatgatttgaaaaatggtttatcactagttgtgattgtcgaagtttgaattctaaca

SEQ ID NO: 91189 - DNA, 376 bp, Glycine max
  unsure (1)..(376): unsure at all n locations
tattgtgctaacaagcaatggggcaaaacacaccaaatgattatgaagacggatggctcagattctcactaaggtatactcatcactttcaaatagagctctcacaactatcatgacttgtggagaagaatcgcggcaatcaagtcacaacacgtcatgaacttttattttcagaacaaatacccaattgttgaacatatcctattattcaaagaaaacatgctaagtcgtacgtgcactcacaaatgaccgataatagtaaactaaccattcgtcgaagctaaccaccctaacacaataacacaactaacagatctacanaacctacaaagctagcaataacatagaacactccgctccatacttaaacaacaca

SEQ ID NO: 91190 - DNA, 308 bp, Glycine max
attgactacagataactgtttagaaagacatttttttatatggttatcagcaaaagaacatagaccacaaacccttgctacaggggtatgtgctgatgcggattctgattcatggcaagctgagttactaggttgaccaaggcattaagttttccctcaagctttttattttcagcagatgaaaatgaatttgcggccacctcatggactcctctaaggacaagagcatcatttcttgcactgaattgctgggagttgaaagccatcttcgtgatcaaattcctaacctcagcagaggtcatattacc

SEQ ID NO: 91191 - DNA, 386 bp, Glycine max
  unsure (1)..(386): unsure at all n locations
ttaacgatgatatcatttgcacccatctttgagctgaattataattgtcaaattgaaccctaagctttgaaattattatctccattttctagactcatcttttccttgaagtggcatctcctctctctcttccttctccattccgctaccattcatcttccaagaagaaaaggaatccattgatgaagaagatcctaggcctacaagctccaatggagcttacatcaccattgtatatacaagccacttgaccaaaagcttacctatttattaacgatgatatcatatgcacccatctttgagttgaattataattgtcaaatngaaccctaagctttgaaatattatctctattaccttgctaggtttaggagagcacatggtta

SEQ ID NO: 91192 - DNA, 316 bp, Glycine max
  unsure (1)..(316): unsure at all n locations
ttcgaaaacttccttgagaagctagttcttanctacactttcccctctcataactaagctaacctccttgagaagcttccttaagaagattcctaaagaagctagagcttagctacacatacctctctaacagctaagctcacctccttgagatgagaagctagagcttagctacacaccccctataatagctaagctcacccccatgacaaaaaacatgaaaatacaaaaaaaagtccttactacaaagactactcaaaatgccccgaaatacaaggctaaaaccctatactactagaatggccaaaatacaagg

SEQ ID NO: 91193 - DNA, 349 bp, Glycine max
caacatcaaaaagccaatgaactcgggaatcaacacagatataacaatggagtagaaagatataaatatcagagtataaggcataaccatccaaactcacaaataataaataatcaaaccataatccaaataaatcagaacgtcaaaaaccacataatgtcaaagcagaaaaggctgaaatccaaattccacaagatgaagaaagtacttaacataagaatttaaactctaagaaactgaatagccaaaatacacggcttataaaagacatataactagaaactaaactctaagaaggcggaggtggtggtagaagatcgaaactctgacgaatgtatccaacatcctc

SEQ ID NO: 91194 - DNA, 324 bp, Glycine max
tggatagtgtttcctaggagatttttctggttattctaatgtgtctatttttggggtaggggatgcttaagtcatgcttttgtacttgattaatgaagctagtcagcgttttggtcctttaagacttgtataatactataatgctaatctttcctacacttattttataatattttgcttttagactttgaatttgcaacttgacagtagttacttcacttcttgaaaaatttaatgttgatcttaagcaaattggacgtttggagggtgggagtgaaattgttattgacaaaagcaaatcaattaagacctttttagtgcaag

SEQ ID NO: 91195 - DNA, 305 bp, Glycine max
cttaaatctcggcttttattgcggtttttatacaagtttttgttcgcgaatgtgatatgatgttcccctcttcggattggtccgaccgtgccctcctgatttccagctgggacattggtgagtggaggaacgccccggcattttcgctacacgcataaagcagagctttaccggtttaaaagctctataattgggcctaggctttagagttttcgttttgataaggctttgtgtattttgttcttcgaatatataatacaaggatctttcttcatctgttcctggggtctaccgattctcattca

SEQ ID NO: 91196 - DNA, 354 bp, Glycine max
acactataaaactactaagctgatatttacaacattattttttcctaacgctttttttgtagaaaagaacagcactaaaggaggaaattcaccgtaaccacattgagatttcccatcaagttgacattttcgctttcttaatgactataaagaaatatacactcccattcactttaggctcgattgaaacaccccctcgataggtgtcttaaattcttatggcagcgctatttgtttccatatacaatttcccactcactggtattgtcatcaatcaaatttttggcaagtcatttcccatcaaatccaaagatataattgcataattcatcatggatcattagggcttttacg

SEQ ID NO: 91197 - DNA, 420 bp, Glycine max
  unsure (1)..(420): unsure at all n locations
gctgtgctcgaggtcttgacctcataattgtctcatcactgggtntgatccattctgagagtntccagggcttctgccacttccatttaaactgtagcagccattgatgatgacttctcttccacttccaaagttttccggcttgtcctatagctgctagcctcttcgttgacaactctccaatgggtatcatctggttataaacccattaaaacttaattggaaaacaaacattatcatcatcagagaaatagaatctagcagacatacctttcgtgcttcatctaaaaatgtagctgactccctgcctgaccaattaacaactccaggagtgaatttgagttgctttggtgcaggaagtgacattggagataatggaccactcatttcatccgcaggtgtttcaaggatcgagagttt

SEQ ID NO: 91198 - DNA, 309 bp, Glycine max
tggattgattcgttctgactagggatcgagttttagtaatttaggctacatcatagaacacaagagcatgattgattagagaaatatatctatgtacatcagcttgtttgttagaaagacccaacatttctacctactgctgtcacttttacttacgttgcattttatagtttttagcataaaaatttagtttaaattctgtttgaaattatcaatcatacatgttctctcaacaatgcttcatttatgaacttaactcaggctaacattagttccctgtgttcgatactcagattcatccgttttaat

SEQ ID NO: 91199 - DNA, 304 bp, Glycine max
tctcgaacgtgatcaatacattcattggtttatattgaaggatgaagttgtggtgcgtgatctgttttggtgtcacccaaatgcagtaaagttatgcaatgcatgtcatctagtgttttttatagacagtacctacaaaacaaacaggtacagactcccactacttgactttgttggagtgacaccaacggcgatgacattctctgctgggtttgcatatctggaggctgagcgtgttaataatattgtatgggctttggaacgatttcgaggcctatttttaagacacgatcgcctccctctt

SEQ ID NO: 91200 - DNA, 396 bp, Glycine max
  unsure (1)..(396): unsure at all n locations
aagcttgaataaacatgacacanacaatcaacatgaattattctttcattntttcttgtagagatttctataaattcttgtaaagatacaaaactctcanaacaccttatataccttgaagtgagatattcgtctataagacgatcctacacttagtcagtgtgcaatcttccaacaaatcttgttaatttgtttagaaccaacagtggcttggtaggacaaagaatactgggtttaagtcaagcctgnggtagaccttgcaagtgtaagagtcaatagtgacagagaacaataattgtaactttgataagttaatggaaacttggtgattgtcaagaattggacgtagtctcaagattgagatgaaccaatataaaatctttatgtgtattctta

SEQ ID NO: 91201 - DNA, 314 bp, Glycine max
tgtatttagagaatctttttttattttatttttatgtcattttttgtgcattacagatagtaatcaaaattgctgctggaaatggtgttggaaaaattctagttagacagtaagtatcttaattggtttattttatatattaattttgttgtaatcgattacactatgatgataatcaattaccagtgacttattttgaaaaataaattaccaaaagtcacaattcttaaagtgacttgtttctgaagatttttttcaaaagtcacaacctttaagtgactagttttcaaaagagtcacaacttttaaagtaac

SEQ ID NO: 91202 - DNA, 465 bp, Glycine max
  unsure (1)..(465): unsure at all n locations
agctngcttgccanaagcattcgaaatccttactactgcgggttattaagaaactcgtaccagacaaaagtcaccagccaaaatgaacgatcagctcaccaaggagtattactcttctttcccttgtcaatctctgaccttcttactaactctcattttcatactacaatctaaagcaaaaaccacatttatgcctcaaaaattcattgtttgttcttctcatcctcgtacccagatgcccttcccctccgtccaatgagatatggttctggggaggtgttctcactggacatgttcagaccctgataagatcgatttgccaaaaattccgctcctgatctcgcactccctttcattagaacgttagagttattccgcaactgcagtgccttttctgttgcatatactagagctagagtatctctttcttcttcaacattttctgatgaaatacaagcttagtga

SEQ ID NO: 91203 - DNA, 296 bp, Glycine max
ctatctatttcttgagtatgcatcaagtttttatccatcatcataacaattgtataaagaaagcatgcgaaaaagacattgatcgtggttagtttaaaggggggattagggcctcatttaatacaaaataaaaataaaggtaaagatatgtgcacttcaatttttgaattgcaaagattttgatgcctcaattaaagcaggatctattacacatgcttgtagtttttcattgataggtcatttataaacatgattttatgaattttccatgggacttgcggttcattgatttaaca

SEQ ID NO: 91204 - DNA, 361 bp, Glycine max
  unsure (1)..(361): unsure at all n locations
atattctttctataatatggtttgatcacccatataatgtttatagggcaatgagtngaaaaatgatgattttctaaatgagtgggcgacggtatcctaataaattcaatactatacatagattgacatttaattagctaaagacttcttgcatctcttatcttaatgcggcttggtattctatctctgcaaagacatttgagagaaacagataaataaactaggcccttcatgcgggaaaccaaatataggatgccggtggaaacaaggatntcataanatagagaaaatcaattctcttatatctataagtagtttgatatattaagccccaacataatngcaatangagcctatcttc

SEQ ID NO: 91205 - DNA, 325 bp, Glycine max
agctctcatggatttccagttctggattgtttttttattcaaactctttgagaattaattttgagcaagatcaatgatgtgcagtttgggaaatgtgcatgttgtaggcaccttatagatcccaaccaacagggaaatgaatcatttatatggttatggctgaaaacaataacctctagcattctacagttgaccaatgctcttggcaattgaaccgaccgactgttattgcttaaatctatgactttgagagcattataatatatgtttgaggaatagggccaaccaatttgtttcctttcagaaccaaaatttcaagagattg

SEQ ID NO: 91206 - DNA, 369 bp, Glycine max
  unsure (1)..(369): unsure at all n locations
acctgcagctcaagcttgggtgattaggatacctttgtgatgactgatggtgttaatgagaaaggctgatattcggtgagtaatgacactgttgagttgctaggaaatttggacatgtagaaaccacaggcacaacatgggttccttccttcttatcattctctctatttgccctaggcttttatttgtcaagcaggatgatcaaatntgcctcttttctgacccacttcgatccttttgccaacgaaaactaaacctacaaagcctgaaggtgtgtaacccactaccttctcatagtagaacactggtaaggggtctactatcatntgtatcatctctttctccatcattgggggcaccacttgagct

SEQ ID NO: 91207 - DNA, 320 bp, Glycine max
ttgaaaagtgttgtttctcaccttctcgttttgtcaatttgctggcttaatgagcgtccgctaagcgcaacactcacgagctaagcgcgaggaagactctggaagaagatgagctgtacaggttcactaagcgcaccgcttcatctcactaagcacaccacttcagttcttctgctaagcgagaaaggcatgcgctaagataaaattcactaatgtgcgctaagcggtccataattgcgctaagcgcacgagcacgaacaaggccacctatttaatcctgaaatcagattttagagggggagtttggactaggattcaga

SEQ ID NO: 91208 - DNA, 311 bp, Glycine max
gagaatagtgatttaatatatatattccatcaccaatgtgaactagaaatttatatatttaatcatttactatgagcgggtctgatcacgttataaaaatagaacccgccgcttaaacatattgatgacgcgaaatcttgattaaatatggattatgtttaaccgagacacttacaacatccagtccaatataaatagcatggatcgtttcgtatattagaaatgaataattaactccctcaaatgaagaactgtgcatcatcatttattattttgcacgagaagtgacttcctaatattttaagcatcct

SEQ ID NO: 91209 - DNA, 346 bp, Glycine max
aatcgaaccttgctagcactatcaaaccccaccagatctaacaaggaaggggagagctttaagccagaacttctacccaaggaactgctctactaacaaactggaccctataggaaccaccatcggtgagacttgcataagaagaactcggccctagaataacctttgcccctttaatgggtaaaatgggggaactctgagcatctggggctgctgacgcaaagagaggcgctggactacattatgaagggacgtcaactgttccaacctaagctatcctttaaatcgatgcgcatctataaacgaaaagaacccacaattcaccttaaactacatctcttcaagc

SEQ ID NO: 91210 - DNA, 477 bp, Glycine max
  unsure (1)..(477): unsure at all n locations
cagcttcggcatcagcatagcataactcctcctcctcgatatagctatgttcttcataggcatggatcatgtgggaccgaacaacagcataagcccgtgcaactctggctgttccctttatgacacccatagcataagacccactgcttcatacaaatgcacctttctgccccggcaacgcgtgctttcattccatgtccatctctctcaattacccggacctacattntctctaaccttcttgtactgtataactccactattctaaaaaagagaatatgcccaactctaacagagcatgtggtcaccttgataagagccaacatacatacatgtatctaatctggatgtttcattacctttttttcccacatatttccatgggatgcatggaagtttgttatatatagatgtcacgtgtgtatagagagtatgacaatactgtnntgtctgtaagaattaaaaaaattattataa

SEQ ID NO: 91211 - DNA, 317 bp, Glycine max
  unsure (1)..(317): unsure at all n locations
taatatgacttccttgatgaattccgcttttctctcttaattttggcncagaatgcaaaatcaattagttcgngcgtattattgccaaattgggcaatcatattgccattactaggtgactttgagttgggggagttcctatttaacatcagcattacgcattgacctattttcattgctatactggggcaggattttatcacatttgtatttttttaatctaccaatttgaaatgctgagttgagtatttataaaaataaatatttaggccaacatgaaaaatatatgggggcctcattatatatgccaagtttaa

SEQ ID NO: 91212 - DNA, 326 bp, Glycine max
  unsure (1)..(326): unsure at all n locations
gcttcgtcctcaaatccctctaggtggactttgtttaattgagatagtcctcttatgtctagactaacttatactgagtatcgtctgtagatccctcttgtaagacaagactcagctcaagcagcttacgaaaggttagcctaatttaacataagcttcatgcgtagatccctattgttagactatgcctatactaaacagcattattgtaacagcataattaaaaccaaaacttaatccgcagactcctcttgtaagattaagtcttgatcctgcttcaatcaagttctaacgcaacagtacatatnccaatgctaaagttacct

SEQ ID NO: 91213 - DNA, 345 bp, Glycine max
actatacaacactcaagctttaagctgttcaattgcttcagattgctgttcaaaagggcaattgtctgtgtggttgtcggcaaaggagcatataccacagaatttggtgacaggtgcaaatttttgattcatggccagttgggttaccgggttaactaaggcatctagtttaccttcaagcttcttagtctcagctgatgaagatgaattcatggctacttcatgcattcctctaatgacaatagcatcatttctagcactaaattgctaggagtttgaagccatcttctaaattaaatttcaggctttcatatggttcatgtctccaagggctccaccactggg

SEQ ID NO: 91214 - DNA, 383 bp, Glycine max
  unsure (1)..(383): unsure at all n locations
gtatctggagatatgtcgcgggggtcaagagaccttggggatgtcatgtggggtgctattgcccaaaaccacacttgaccaatcccgacccaacccgggcatagtcagtcagtgagaacctgtgatgtacctaaacaggcgagctcttgacagtcaacccgataaagaacaaagaccacagagccaggaggctttgtgtggtggctggccaactattaatcttgagtgatatntggaatatggcctctggtaatcgaataccaatggtgtgtaatcgattacaacgcttataaatgaagacaggaagtcaagatggcctctggttatcgattaccaagggtgtgtaatccattaccaggcctacaaatggtgtcaggatgttg

SEQ ID NO: 91215 - DNA, 310 bp, Glycine max
ttgcagatttggtctttttcagtgaaaggttcaatgtgggtccgaaaagaggcaaatttgatcatcctactaggacgactgagaaaactggggcaaatgaagaaagtgaggatgagggagaaacccatgctgcgactgccattcctgtacggccaagtttcccaccaacccaacaatatctttactcagccaataacaaactttctccttacccaccacccaggtatccacaaaggccatccctaaatcaaccacaaagtctgtctactgcacttccaatgacgaagaccgcctttagcacaaaccaaaa

SEQ ID NO: 91216 - DNA, 218 bp, Glycine max
  unsure (1)..(218): unsure at all n locations
atactcatctggcaaccactttcatgtttctgcaaattgcatacgcagcttatatttcgaacggacctgacttttgaatttgaattctcagactttccattgctcggtaatcgattaccaaacatccccggtatctccgcattaccacgtntctacacattgcaaaatacacaaaccccttttttaataagctatttctatctaaattggcgcttttg

SEQ ID NO: 91217 - DNA, 468 bp, Glycine max
  unsure (1)..(468): unsure at all n locations
agcntaactcactcattcttaacaagnttagcttgctttcgtcanatctcttcacaaataactatcacaaagcatcaaccaagcaaaactgcccatcatatctcccaaagccccatacccacgaaaatcaagtgagaaagaagtctacccaaacctgaaatttcgaggtcccacacgtagagatgcgcttcacgactccgaaaatgccttcctttcgcaatttggagcagaaatgggcaccaaagggtggagccttaatggagtttcaatggaggatgaagaaganagaaaaagcaacgtgagggagagggagaaagcttctgatatgtgggctgagtgaggagagagagagttgctttttggtttaaaagggcttttctcttttctaattatttattttaagctatgccacatgtcttcatttgagtggagcanaagggcccacttttctcttgatgtgactcatgc

SEQ ID NO: 91218 - DNA, 310 bp, Glycine max
ttgagccaaaatcctgaatcaccataaaccttgacccagggtgagaatgtcaatccttaccctcggaagcaaaaaaacaagagaaggaaaatttccaatcaaaggaaaaaagagaaggaaaatttccaatcaacgagaaagcaaaaaaggagagaaggaaaatttccaatcaaaggaaaaaagagaggaaaggaaattcccaatcaaagagtgggagaaagcagaaagaaaagaaagaaaattcccaatcaaagaatgggagaaagaaaaaaagagaagaataagaaggaaagaaagctcctgatcaagg

SEQ ID NO: 91219 - DNA, 306 bp, Glycine max
ttataagcgcgggtctgggggacgaaggttttgtggtcgcttattacgaagatgatgttccaagtacattggatttggtacgaccatgccctcctgatttccaactgggaaattggcgagtggaggaacgccccgacatttacgcaacgagcataatgtaaacctttacgattttaaaagctctatagttgggcctaggctttagagtttttcttttggttaaggctttgtgtattttgtttttttaatttataatacaaggatctttcttcatctattcctacgtctctacccattctcatccat

SEQ ID NO: 91220 - DNA, 473 bp, Glycine max
  unsure (1)..(473): unsure at all n locations
agcttggtggattatgttgtacccgtcatatgtggtactaggtggcgatctggcgatggcgcanatcaactctcacacttccacagatcatacatgaacccaccatccccagttgcccaccttcaactgagctcacatactcctacgtagcccttatcctcgttgctctcagcaccgggtccccataaacccttgcaagcttgcacaatatccaagcaatataattccaattaccatgaaactgccctaaaccaagagaactaggcagaggcagaaaactctgcccaaaacacattccaataccacaactttccctactcaaataccgcaagaacattctcttcggtccgattcagtgaccggtggatcgactngaaaatgttactagaggantccagtacaaaaatctacattttgaccggtgtgatgcgctagaaaatttccagaacatagtatgtactaccgtttccata

SEQ ID NO: 91221 - DNA, 316 bp, Glycine max
tagtgatgcaagtgcttttaccaagaatttgtttgatttctataacttgaagataaatttaacaaacttagttaaaggcaataatttgaagagcacaatgaacacaagagtttatactcaagatgctgactataggctgaagtttatttggatggatcacataatttttgggctaaagaaccaattaaggcccattgcctattttcctttgaatattgggattgtatttatgtataaaagacagatgactcttgatatctttcaggtcaatttatatgatttttaagcttcccaagttattatagtggttagtgag

SEQ ID NO: 91222 - DNA, 317 bp, Glycine max
cactcttgaatctggagcagtttttgtagatacatgtggtgagacgtttcggatttgggttggggattacacaatgatattgatgagggacatgacatttctatacttattctcagaatttccttgctggttatccattacgaacattgcgcaagtgcattacaaatgctagagtgtggttggctgcccttttagaaagccattttgataactggacgtttgctaatagatcccaccggccgctattgtagcttatgcaccttggacttcctggaaacactttgggtcgagacaacagttgacctttgggttcgcat

SEQ ID NO: 91223 - DNA, 299 bp, Glycine max
tggaaccaatatttttccaatctctagtatcttcattaactaaatgattagccatacaaacactactttttgagcaaaacaacttatagcaaaaacaatacactttatctaaatcctttgaatacactagtcatcttcgatcatatttttctccatttggcattactttttggtagtaaaatgaagaaaaatgtctattattttcatcttttggatactgcatatcattatatctaattggaccattgtcaacaattaaatctctaaagttttcatcaatatttgtccattgtcttgga

SEQ ID NO: 91224 - DNA, 349 bp, Glycine max
tatactggacagaggcattggtttctttgacaaaaaatcttcataaatagatgcatccaaaccagtgactaaacaaccttaagaagaaagggaactatattgacgaattctaaggaagaaccatccaaagagtcaaatcattggagatccttcaaccaaagtctagacaagagggattctctgacatcaaggttacacaactttcatttcagaagtggaacctaagcatattgatgatgctatataagatgagaactgggtaaaagccatacaagaggaacatgaactattccaacaaaatgacgtctagaagcttgtagaactaccacaaggaaagaaagtaatgggt

SEQ ID NO: 91225 - DNA, 335 bp, Glycine max
caacactcaagcttatgctgcatacatttacaatagacctccttttcctcagtagcgtaatcaaccacaacagaactattacgacctctccagcaacagatacaaccctggatggaggaatcaccctaatctcagatggtctagccctcagcagcaacaatagaagcctgctccttccttccaaaatgctgctggcccaaacagaccatacattcctccaccaatccaacaacaacaatagccctagaaacagccaacagttgaaggtcctacacaaccttacctcgaagaacttgtgaggcaaatgactatgcagaacacgcagtttaaccaag

SEQ ID NO: 91226 - DNA, 338 bp, Glycine max
  unsure (1)..(338): unsure at all n locations
tctataattgcatattngntggctgatttgacatgctttgactngcanatcacattctcacatagcttacttttttaataaaaaaattacatgctactaaaatcactaaataaaattacagtttgacttggtctacaggttattaaaaacagattcatcatgttaataatatagtttgtaataattcattttgaaaaaaatgtgtgcaaaagtgactcatatgagtcaatcagcccatatatacacacacatataaagaggttgttaatataatacctctatgacccaaactaaaccatgactgctgtaacctttagataaacttttttcctgaacat

SEQ ID NO: 91227 - DNA, 325 bp, Glycine max
caagccccgacaagacaagacacactgctgtcttcttcaacaagataaacaaataaatctattctaaagatacatctaattataacagatacttgatttgatttagtgatggctgcactttttgatagagaagtgtagaattatacttgttgattattaatggctaaagttgtaataaactttatatacatatttaaatttgtaacaaattacagagctgttaacttaaaattcagagataaacttaacattcgatttctgtggtagttttaaataataggtataccagatttggggtttcaccaacgttaatgccattggtagt

SEQ ID NO: 91228 - DNA, 429 bp, Glycine max
tctgaatagatctaagatgcaatgtgaaagattggaatttttctgagtggaaaccttcttgtctagtgaagatctgtgtgtgtccaataaaaaacacataaactcttgctattgaaagttcaacagtggtttgaaatgggtgctgccagtggtggtactaaactagcagtggctaagtgtaaagtttatcgggagtgctgccaagttgttgaaatgcagtggtttactggtccaacagtgactatttgtgatgatgaaatctcatcttgaacggtgaagactgaatgtaccccaaggttgggcgttaaatagtataaaaatctctgtgcgttattcgtcctcaatctcttttggcactaattatgtgggttgatcggctcactacttatgtttatcattataacacaaagtgaagtgacacacatacca

SEQ ID NO: 91229 - DNA, 324 bp, Glycine max
agctcggacttgatcatggattagtaggctgaaccgtagctaaaatttactaatcatttttagtgaaattttggctccataatttggctccacaaattcaatttcaaattcaagtgaaatttgaatagaaattcaaatttccctccaattttgtgtgacacttaggctataaataaaggctatgtgtctgcatttttttcaactttgatcatttgagaattacactttaaagttcagacctcatttgaggcacaaaattttgtgccccttctctccctctccctccactcatcttctcctaccttcaagctattatccatgtaa

SEQ ID NO: 91230 - DNA, 399 bp, Glycine max
atcattggtatcatctccctctccatcatttggggcgctaactgagcttgcagaatcctccatctttggaggattcttagaaagattcatgctccatcttgcacatgtctcgcagctggattccattccgagccatatcagaattgtactgatactgcctaatgaaggcaaccattatgtctcttctagaattgactcaagaaggttccagattatgttaccaactgactgtttccctacatagacttttctagaagaagctcattaacaatttttgatttatcgagatgcccccatttcctgctgacattttcagtgattctgtggcaagagtcctagactattaaatccgcccttgaactcaaggatacacgttggcttaaccatgttgcatgcgca

SEQ ID NO: 91231 - DNA, 320 bp, Glycine max
actaagctggttcgaggtacttacccctgaaatttttaacgagattttttttgaagaacgtttgagaacggctgaaacctttgctaaatttctcacggataacgttactgaaatgtgtcggaagcgcctctgcttatattttcttcaaggaaacaattttttccagcatatttcaaagaaatagaatagcctaatggactgaacccttttccttcttacttcctcccctatttataccaaaatatgggagatggttgccgcccatttctgtccaggcgagccagggtgcttcctccagaagcaacaaccttctggaggaa

SEQ ID NO: 91232 - DNA, 332 bp, Glycine max
  unsure (1)..(332): unsure at all n locations
ctaagctcttagccttgaaccatacttgaatgggctttttgtntaattatttgtattatataaaaatagatttggactggagaaaatgagacagcttaattatagaaagatcgattaatacagttcaaatgaaaatactgggcacctggggccttagtatatgggtaatatgtaccgaaaataaaaggcactcatttttatatttgttatcagtgaagagttttctttcttcagaaaagacgtgctaacaattaatgagtcaaagaatttttgtgtgacgagaccacttggctaacccatattacattcagactaattgagatactctttta

SEQ ID NO: 91233 - DNA, 301 bp, Glycine max
tgagttatcccagttttcttattgaatgtttttatgaactcaatcctaacaacgatgtcatttccctttaaccatgcccaagaagcagagggagacatccatatgaaatttaaaaaatgtaaatcattgttcagaacgatttgattctcattttccttgatcaatcaactccaaccccgaggttctgctctatgcctattcgcaattcataaaattggcacggatacactcatatgtatactctctttcaaatcacataaggttaaattaatgtgtagaatcctgaactattcgataattc

SEQ ID NO: 91234 - DNA, 292 bp, Glycine max
gcttgttttgtaaggtttttattttcggttttcatttaacccaaattctctggctcacacctctgaacttgcaattggaggtctgaagccctccctttcctatcatgcatccttttatcgaccctttttgaggaactttgtgaatcactttcaccccattttcttctagagccaaattgttgctgcctgatgtactccttccacttttcaagggtgtcctccacagaatcactttgaccactgcgtctattacgcgatttcctctttctggagtcattccgaaaccaacaaa

SEQ ID NO: 91235 - DNA, 458 bp, Glycine max
  unsure (1)..(458): unsure at all n locations
agcttcaagatcgaaaactaaccagttgaagctctatgaacgatgaagaacaaacgaagaacggcgaagaacggcaaagaaacttacacggaatcgatcatggagacatcttgaatgcattacggaagcgtcttggcttggattttttccttccttcttcttctcctcactaagtttaagtgatttctgagctatcaagttgttgaacctttgaaaatcccccttttcacgccattttataaggaaaggagggaggtggttgccgcccaactcgcccaagcaagctaggttgattccacctgaagcaacctccttctggcaccttctagatgggcctagatgctangcacacccccctagtttgataagtgcacccctatttttggtgttttggctgattccattccaaaacctcgcgaaactttatggattacgcggtggcgagtgtcaagcatctc

SEQ ID NO: 91236 - DNA, 307 bp, Glycine max
tcgcacccttcttccttgcaattccaaggtatatatatgatatttcattttgtagttcaatctatgcatactctatcaatcttctcattcgtatgtatttgcatcatcttcgttttaaattaaacttattttaaagaaaaaaagttatttactgtttagagaattaaaagaacagttgctaagaaacagtgggtgtgaaagggtagtaacttgtaaaatctttctcgctttttgttcgcaaaggttgcatactttttgacccaccaaagctaaatgggtgcaccagttgactacagtgtaaaagcta

SEQ ID NO: 91237 - DNA, 307 bp, Glycine max
ttttctgaaattcttcactggtaatcgatttcaggtttctgataattgattacacagttatattttgaagggtcatgacttttgaatttgaatttcaagagttccattgctggtaatcgattacaaacatccggtaatcgattacaagttcaaaattcaaattcaaaaccctttttaaaagctatttttctaaattgtcttttggtaatcgattacactgcctggtaatcgattaccagagccttggatgtcttggaaacactttgttttgagacaagacttgatcttgagttaatcttgaagcaag

SEQ ID NO: 91238 - DNA, 316 bp, Glycine max
ttggtgtgaagccatttttgcaaatggattgctgatcggctcccacaccgttcggccctatgcacggctacttgcgcaccgagggtgacataagtcctttcttaggtcgtgcacatctacacatacctcttttgtccctgatctcgcctccatgttacgagaagctagagcgtagctgtacactccctatattaactaagctcacccccatgtcattaatctttttatttcttactaatgtcctcactactaaaactactcataaagccgcctaatacgaggctaaaaccgcttactactataatggcaaaaatac

SEQ ID NO: 91239 - DNA, 310 bp, Glycine max
gcttgaacaccagagatttgttggaggaatcttattctggaggctgctgcatgtacacatcttcttgtcgaatgccatggacaaagacattgatcacatacggctgctgtatgggccatggatacgtgactgccaaattgagaagaaacttagcgagtcatatgctcaataactggtgaataagcaacttgaaatctgcggatattgcttgacggcaatgtagagtgaggctgtgatttacatgatgacgaatagggaaataggtcatatggaaatctgtgctcattgtacaccacatccttagatatgt

SEQ ID NO: 91240 - DNA, 299 bp, Glycine max
  unsure (1)..(299): unsure at all n locations
tccacctttataacatattaatcggttatctattttttccttttttcatagntcaataaaggtcaacatcgagttgaattatagtgtgtttggattctcagtcacacaattcaattaaaatgtgaatcacaaaagtaactcttagttatttttgatatatcttgacgcgaaaatttaattaagcgtgaattacatatattaatccaaacacgcatttcatgtcatatagtgtatttgtttttacatttcacattttggaacgtgatttttcacatctcagaagtggttttaagaagtta

SEQ ID NO: 91241 - DNA, 371 bp, Glycine max
  unsure (1)..(371): unsure at all n locations
cataagtcattttaagaattcgatttgactgatgataccctaagttaaagtgctcatatctactttaaagttagcttaactaataatagacaacttcttttgatgtctctgatccacaatatccaatatcatctaattctcaaacctaattcctaatcagcggggaagaccctagaagtgttacaatcttttgatggttcttttgatttcttattggtcgatagtatacatttttttttacggtgatacagtacacaaccagtaaaattatatagggttttaggtttacatggntgtgtaactgcaacctgtccaaaaatcaattcaccaagagatgcataatcttgccatgttattttaaacactcattt

SEQ ID NO: 91242 - DNA, 325 bp, Glycine max
caaactcactaaactaagatacaggccacttaaaaacttattactacatttttttatatttacaccacttaattagtaactttctgaacttataagaactttctgaattcatatatagaattttataaacaacaaattagtgaaataaattagtaatgtattaaatatcttagtttagttaatcaaaataacaagttatatatttaaagcagataaaaattgatttcgttaatacgtcaaaaaaactcaatagcttgaaaatgccacaacagaaattaagattttttaggtaatacttagaatgtgtcaggtaaaataaacttat

SEQ ID NO: 91243 - DNA, 331 bp, Glycine max
aatactcaagctttattcaagacaaagaaattaaagatattcttgatggatgatctagacagtctctagagtcttagaaagggtatattaaataggaagggaattccaattgaagtagcaaaaggtttggccaagaattttaagttaaaaagtctttttcaacaaatttactctctggtaatcgattaccagagaatgtaatcgattaccagtggccaaaactgatttacaacagctattaaaatttgaattcaaagtttgcactgtgtaatcgattacacatatatggtaatcgattaccagcagtttctgaactttttaattcaaattt

SEQ ID NO: 91244 - DNA, 312 bp, Glycine max
  unsure (1)..(312): unsure at all n locations
gcttaagcatgattaagcttaagcatatggcgagccaatctaaggggaaacctgcataacgtgtatgaatgacttccacatggaattcaattagtnatttccttagtgtataagaattatgagatgcataaatacgttcttaggttatgttaagattaagtatgaataccttgcacttaaatgatgttattgaatggtattgactcaacaaagattgggaagactcggatcattcggcaatggtgtgcggaaactttgctggagtgacttgatgataattacaaattatagtgtgcaacgatatgaaaccct

SEQ ID NO: 91245 - DNA, 315 bp, Glycine max
taactacctacatggtattccagtcttctaccaaaacctgcaagagcaattttttttatctagatcgaccttgaatgcaagtgggtattttttgaacctcaaattttggaccaccaccccaaaccacactccactttgaatatgccaacacctcttgatctaatctcttcatgggccttggacacactttttgaccctttgccttttgtttctctcctaattttctattttttgcaaatctagtcattgtatacactcttatccattctaacatatctacgatgggatgctccctagctttcaaaatcctaccaa

SEQ ID NO: 91246 - DNA, 412 bp, Glycine max
  unsure (1)..(412): unsure at all n locations
attttttagaggaaattaataatattatattgtttntcttgactctccgaatcatcatgataaatgaatcctgactcatctagaatttgattaataaattatttgcactaagagttaaactcacattatattcaaataatttaatcttaattctaatatattaatcacctatatgtcatcacttttctttaataagcttatatgtgttcaagttaaaatcttcaaagagtataattttatattctagacttgatcagtaataatagtatcctaacctagattttgtccatttataagctaatgatgcgtaggtaacttttgtattactggaatgtgatgcactcgcggctgagttggaattaacttgacccattgcatctatatctnttcgtttcatgaaggaggaccattc

SEQ ID NO: 91247 - DNA, 318 bp, Glycine max
tttgagcgctgtaggcaaaagcaaatcttttctatgtagacttgctgcaagtcagtaaaaagataggcaaatgagtggaataggactatgcattttaaaatgtaaccattacaaatttgaaataatctcatgaaacaacacaatctctaactatgttagcatcatataaaaattaaaagtcgtcgtgggagcatatcaaatatcaatatctataacaatatttgagtaaacattgatgcatttttcaccagtatgttgagttgtagtgaacttgtagatgttcttaaaccatatatatatataacctataaaaacttt

SEQ ID NO: 91248 - DNA, 354 bp, Glycine max
  unsure (1)..(354): unsure at all n locations
accggatcttaatcacctgggctctgcttggaaatgattctatacaaaagtagtcgtataaagcgactaacaagtttctagaaatatcattcccttcgacatcaatgttgtggcgggagggactaccaccgaccacaaatcatcaaagagaaaaactctagatgaggtttcactatcatcaagcaagtcggggacttatcatgatcacaaattcgcctccacttcctatagtcccacggacccgggtatagggccttttttcaactcaccgtgtgtgcaaaaagtgttggtgcttgtgtgcatcaaatgaataaatatctatctcatgcatacatntaaaaacacattaaaagc

SEQ ID NO: 91249 - DNA, 328 bp, Glycine max
tgcctaattaacttgaaattgagagaaagttattattaaacacacaaaatagaagtactaagtatttattacctatacttaacagaaaatacttataacactgcaaaataacaataaattggaagagtttgatacaatttacacaacttttatacacaaaagttagtcatattaaccgactaacaactcccccaaatttacagttttgcttgtcctcaagcaaaaagagaacagtttacttgtcctcaagtgacaataacatggagtgactatgtacaaaggtgtatgcaacaaaagttactgattgcatgataagagaatgaagcat

SEQ ID NO: 91250 - DNA, 308 bp, Glycine max
tgccacaccgaagagtttaagggaaaagattacaagcttgccacatgcggtaagttctgtgtatcataatattgccaaaatttatgctcatttggttttataacttcaaaattggaatacgtttatgagcccactcacttattaatatatctaacactatcatacttgatatatcttgccatctcaacaaagacaatggacagctaagcaaaatctaacactcataactttcatatacaaggcaaggatgttaccccaaagggattcaagtttctgcataagaggttagacaaaaaaaaatttaaata

SEQ ID NO: 91251 - DNA, 408 bp, Glycine max
  unsure (1)..(408): unsure at all n locations
tttattgacanaagtgcaacaattacatattattcaagaaagggaggataaatggtagtgaaaagggagtagtgggggagtgtatcgcgttaaatatgcttataaattattaaaaatgatgaacgataggagggtggaggagggtataagaaaagtttggaacaaattggttcctttgaaggtgacttcttttgcatggaggttgcttcaaaatcgtataccatcttgtgacaacttataccgaaggggaataatctcacaagaacatctgaaatatgttttttgtgaagctgaaatggaatcttcgcttcatttatttctcacttgngatgtaagctacaacgtgtggtgtgtgattctcaaatggctacgaatctctctagttatccatagagatattgttaatca

SEQ ID NO: 91252 - DNA, 310 bp, Glycine max
tgaaagaaaattagttttttatgtaagtattgttagaaactaaatggggatagttaaggttgattaatggtgatctagatttcatagaattagaaaaggggtaattaagtcataagagtttaaagtggagggtattttagtaaatgactatataactagtttaaaaatagaattttagtttaattagttggtgactaattaaaatgtctaattatatgatatagaatagttaaaatagttaaagttgtaacaacccgaaaaaaaattacaaccagaaaaaattttgtgttgtgtcatctgtgcatatatg

SEQ ID NO: 91253 - DNA, 308 bp, Glycine max
ttctagcttttcattgttgtattttgattttcttttggtgatctaaaatgtgggaatgtgctcaaatatgtggggcaattttggtttgttttcttgcttgattgggttgaattgggggtttgtatgggatggccctaggcctataatgcattttgaagcaatgggacatgccacattgtccccgttctcttgctattgatgcctaaacgcgcgcccaccaagtgttcggtgaaatgcctcaatggaattggcgcgtgatttttataaggaaacaacccgtggggcattttggtttgcacatattttct

SEQ ID NO: 91254 - DNA, 326 bp, Glycine max
cacttcttcgtctttcttaaggacttcatcctcttccccacttgaaatctttagttcgggagccaagttatcccttgcatccgagccttcaaccatttatgatatccaccaataacaccggtgatgcttcctctaagctccttatcctttctttgcaccacattccatgcttttcggactcgacgaagcatttttgcatagtggtcattgaagccacgtgctatgaaaggcatgatactctttttcgatggtgcccctctcatatgatagcctagttgtcttatggcaaagttgggattattattaatacaacccctcgttcccat

SEQ ID NO: 91255 - DNA, 312 bp, Glycine max
tgccactaaaggccattttcgtgcacttttttcacctacattagcttattatatacatgcgtagtagagcaaatattggaccttcaaaaacacaccttgattatcaaaatgttgggtgcacacaaaaggatttccaaaattgtttgggagatttgaagaccttgattaaagattccaatgcatatgtcttttttgataacttgaagagaaagcaagaagcagatttctcattttaatatgcatactaggtagacgatgaagatcgactgaaacatgttttgggaaaatgatatttgtgggaaaaaagtcttt

SEQ ID NO: 91256 - DNA, 164 bp, Glycine max
  unsure (1)..(164): unsure at all n locations
catgtgcctgctgaaaagactcttgtctaaggtcatgaatcatatcctccaagtgatctgttgattttacatcaaaatggatagatagggacccactctgcangtntgtgaatgcaccatgtcatatacacggaccgtcatacttgttaattccatcacacaat

SEQ ID NO: 91257 - DNA, 309 bp, Glycine max
tctgagtgttgctattgtcatgtcctatcttacccacgtaccattgtaagttgcatatttaggaccagtttggataatgcttataggagaagaaagtaagaggtaaaatgaatcaaacttctctttcaagttaaaattaacttatgcgcgtcaagttttggaaaagttaggtaacagaactactacaaaagttgaaccgtataaactgattttaatttatggaaaatattgattcattttcttctcttacaaggacttgtggagaggtttatccaaaatagacttttctcacatttcaattttctgaat

SEQ ID NO: 91258 - DNA, 370 bp, Glycine max
  unsure (1)..(370): unsure at all n locations
acactcactatcataggtaatctcacccccatgtcgaagatacgtgagaatacaaaacagaccctactacgnagactacttctaatgcctcgaaatacaatgcttacaccctatactacgatgatggcctaattactttgcccataataaggaaaaacctattctaatatttacaaagaagagtacaccctatctaagcccatgcgcttagaaatctaccttgatgtgtatgagaacactatggcctattttaacatctctagccccatcctcttagacaactcgatactataccctcgcggngtaagatagatcatcctcaaatcgtaggtgacattttaaatgatatattaaagacattcctacactg

SEQ ID NO: 91259 - DNA, 294 bp, Glycine max
tgtctttcgataatcttgctccttctacgttgctcggtttctgaatgctttgaacgctgtgggttcaccctcttccccgtgctgggttcatccaccttgactgtcaagtcacaacgtgataataaataattgtgttaaaaattgccaatcgaattgcggaatgcaatcgaagaggtgaaaagataataactttgagacacccatcaatgaatcaatcgataaaccctggtgggtgttgcacaaccaaaccaatcacagagagagagagagagaaacctttgaagaggtgttatt

SEQ ID NO: 91260 - DNA, 479 bp, Glycine max
  unsure (1)..(479): unsure at all n locations
gcttctcacaatcactgatatgatcttagaagttgtcagtgatgggtaccagatgtgagaagggagaaagaanagtcttcacacagaanaaaacaatagtgtgtcttattttctttctcctttaaaacaaggaaagccgtacttgctgaagaagatcctatagcagccacctcttgtgtggccccctgatggggaaacaacccaatctggtcgtgtgattgtcaaagcttcattcaattgaataaagagagctgttttgctacatctacaagaccaaacaagagttggtgcgcttgtttnaattggtgtgcctctctctttcatttaggtattgttttntaatcacctcattcatcattgaccggtacagaaagtccttgtgcagattgttttttcccatgaaagccattttttagttcatattattataacatggttgtgactntgaatngaagtaagtaattggaaaagtgagtact

SEQ ID NO: 91261 - DNA, 327 bp, Glycine max
tcaagctcggagctagctctttttcactttagaataattcctttgaataatttttaacatgctctcaacatttctctcttcctaaatttttaattctcacttgtgatattaccccaaaaaaatgaactaagtctttccactagaaaataataataataataataataataataataataataatgttttactcatctttccactagaaactagaaataacaataataataattctccaacaataataataaggttaaattaattttttaatttattatttaagtttaatttagttttctaatttatttttgtttaatttagtcatat

SEQ ID NO: 91262 - DNA, 418 bp, Glycine max
  unsure (1)..(418): unsure at all n locations
catcaagcttgtggttctttctattctctcaacctatgtgaaagaaagaagagagtgagagaagagaaggtgctcctcatctcaccgctctttagntcttcttccttcaaactcgaatgacccatttctattgttntcgtactcttgcaattcctgaggaaagatacaagctttgctcttctgctcactggatcgggttccacgaattcaagggtaggttcanaagggggtgtgttgatctgcaccaagatgcttaatttacgttgaaaaatccattcatttgcgagacttagcttcgaagatgaaccatntagttgaaagctcaatgaatactcaaagggtctctagagttcaagctccactagtaacctcgacgacgttgtgcaaggacgacccaatgttggtgaggaacgatggc

SEQ ID NO: 91263 - DNA, 319 bp, Glycine max
tataagctcatttgattagcataaaaactattttgatacacattcttattttgtttgtgaattgtcattgtcacactatttcttaatattaaaaattatttgaatcatatcaactttacaattatttgctgaattatttttattttaattatataatctaatttaaacaaaatttcaagtatatatgatgagttttaaataaaatattttatttgtatcatgttttgtggtcatgcaagcgaaagatatatacatccaagttatttttgtataaatagaaaaataaatgttaaagaaaattataaagaaaaaacacttt

SEQ ID NO: 91264 - DNA, 366 bp, Glycine max
tatggctcctttggatttaaaaaatgtctggatgaatactttattctattgcgggcccaaatggagtttcgtgtctcccatattttctgagatagtaatgtatgcgctaactatggtgtagaattactctattatgttggaagataaactctgaatatggttgatgtgtacaacgggagatacttggtattgcaaggacagaaaaataaaggtaaccctttgtatttggatggacaagccttgaagagaaaccctgactgccaagtgaagtaaaaaatgaagttttctaatattgtacaaatgctgggagatacattcgtaggaagacgagttcgttcactttccaactgatcgaaggatatttct

SEQ ID NO: 91265 - DNA, 319 bp, Glycine max
tccaagggggtctctggcatcacatttttttttgaaccattgttctttgagtttctttacgacaacatggtccatacatctgactgacacatgtagagccttgttgtgccctctcccctcaatgggaatttttttttccgcaaacgcgatataattattggtggttatatgattaacaatgccttcaaaaccctcaactgagatgtcgtgtgctacatgggctttcatgaggacttttatcaacagtgcacgatgaggctcatagtttatgagcaattctagtaaagagattctcatcggagctttattcagttgctca

SEQ ID NO: 91266 - DNA, 438 bp, Glycine max
  unsure (1)..(438): unsure at all n locations
ggatcttcaaaatctctcagtcnttctactaccaaggaacttcagaagaggatcgtatcatggtagcttccttctaccttgatgggcctgcactcagctggtttcagtggatagtcacgaacggagttatcacttcgtggccagctctcctacaagcaatcgaatctcgcttcgccccctcgatctacgatgacccacacggagctttgttcaagttgattcaacaaggtacagctactgagtacctaacggaatttgaaaagctagcaaatcatatcaccggattgtcaccatcggttcttctcaactatatcatctctggcctgagtccctaaatacgtcgtgaggcacaagctttctcacatgtatttttacctaaacctacaactcnttggttgtcttcatgaagacaaatataacgatcaccggaaacacatc

SEQ ID NO: 91267 - DNA, 316 bp, Glycine max
actaagcttctgtttctttacttacggtggcttttttgctggttttgcacttggcctaactgacaaaactattgtttcagcttacttctcggcttcgagccgtagtcattgccccagattatcggcttgcccccgagaaccggctccccagtgcaaatgaggatagcttattggctgttaagtggcttcaaactcaagccttgagcaatgagccggacccatggttgagctatgtggctgattttagccgggtcttcatttcgggtgactcggccggaggaaacatatctcaccacttggcggctcggcttgggtt

SEQ ID NO: 91268 - DNA, 435 bp, Glycine max
  unsure (1)..(435): unsure at all n locations
aacatgtncatgttgaaaacgtcatatcacaagataatgatattaaacacaacacagtgctatgtctctgtcagtttattggacgaacgaaacctgagtaaattgattaaatcttagcttttctaagatagcgagattcaatgtattcaaacttattgtgtaaacactctttgagtgattaaaatacattttgtatcaaacatatattgtttattagagtcaggagtggcttattgacaaagaatacttgggtcttaatctcacggggggattaagagtagtgtccagagtggcttatagatactcattatattcagaagtgacatacagaatacgtggttattatcaaagaatngattactggaactattcatggtttaattatgttacgatgtatgttgacaaagtgttactgaatccccattgtcgtactga

SEQ ID NO: 91269 - DNA, 326 bp, Glycine max
tgcttctacaatctccccctttttgatgatttctaacctaaaatcaagaaacacatacaagctctatcttctaatcgatcactcacttaattctccccctttgtttttgagtttaagcttcacttgaagttaagttatttaattatatgagttcttgatttaatcccaattttctctccccctttgtcatcaacaaaaaagccaaagtgcgtatagagacataaaatcatacacaaactcataatcatccaagcattttaatccatacaacaagcaaggaggaaaataattcatacataaactaagcaaggaagataataattcat

SEQ ID NO: 91270 - DNA, 302 bp, Glycine max
  unsure (1)..(302): unsure at all n locations
tctgcattttatacatttaaatnngnntgtcatcttcgggactggttggatgagtttgttcaactattttgcttgatgttgggacggcatagtatttagtctactgatgaaaagcttttgtacgttttttcgtttgttcttgaatagttctgtatattcaactttatttctatgtacatattgcgggtggtgtaaataagccatgtcgagttaagctcttgaaagtttcggcttaaattgtatgaagatttcaaactttgatttctttggttaaatgagtcaaattaaggggaaagaaagct

SEQ ID NO: 91271 - DNA, 310 bp, Glycine max
ttgtgcaaagtcaaattataataacccttttttgggaagccggaacagaatcccgtcatatatcgagaagctcgctattgaaaataaaagctctgagcaaatttcaaacgacattaactttgtacctcggtgtccgattgttgcccgtactatatcgagaccctcgtaattgaaaagggaagctcttagaaaaatgaatcgacaattacttttaattcggatgtcggatagagccccataaaatatcgagacgctcgaaattgagaacagaagctctgagcaaatttaaccgacaataacttttgactcg

SEQ ID NO: 91272 - DNA, 314 bp, Glycine max
gcttctcaagcaagttttttttagagtggtatctttatcacaagagcttctagtcggctccccctaaacctgtattaattttcagctttaccttctccttcatagctgtatattcattttttatccatgtatctactcatattgtcttgtgctaaatgctgtaaacatgatattttagaatttccaccgattaaacttgctatagaagctagatttggtttttctatggacaaaaaggcttgttcttgttcttgaaccatgaattgtgttgagcttaggatactttgagttttgtatagtaatttttgtgactg

SEQ ID NO: 91273 - DNA, 448 bp, Glycine max
  unsure (1)..(448): unsure at all n locations
gcatgctagcttgtggcacgtntcatagaagtgctttataacttaagcactcanaaatggtctgtttggtctttattggaggctggtgttacctctccaaagacttttttctcctctttttgttatgtcactcacccttctgtttgaagtagctcgccaaagtaaattgcagtctatacagaataggattagtagaatagaaacactgcaggtgtaagttattaaaatagcgcttagtgatcacttaaccgttaaatattttataggttaaaatatgtttnttttctttgtaatataccaatgtttatttttcgtccgtgcaaaaaaatagatatntatttttcgttcttactaaaatataatatattattctttcatttgaagttaggtgtgaatgactttaaatctatccgaacctatgtgtattnnttttaaagnnttaaattta

SEQ ID NO: 91274 - DNA, 313 bp, Glycine max
tgagatgaggaagtgttgaagggtgaaacttcctgcttttattgttgaccatagagtggtacctggagatatgtcgcgggggtcaggagaccttggggacgtcaggtggggtgctattgcccaaaaccaagcttgaccaatcccgacctaccccgggcatagtcggtcagtgagaacctgtgatgtacctaaacaggcgagctcctggcaatcaaccgataaaaggaacaaagaccacaaagcaaggaggcttgtggtggctggccagctgtgaactttgattgatatgtgggttatggcctctggtaattga

SEQ ID NO: 91275 - DNA, 337 bp, Glycine max
tgttggaaaaagtgggtgtctataaattaactagacgaaacatgtaaggttatgagaaataaagctaggcttgtggccaaaggttactcaccataggaaggtatggattatactgacaccttttttccttggcttgtgtagaggaaatacacattttactatcttttgctgcccatcatggtatgatgttgtatcaaatgaatgtgaaaagcatgctcctcaatggacatattaatgaagaaatctatgtaaaacaaccccttgtgattgagagttctatccaccctcatcatgtattcgaacttcaaaaagccttgtatggtttaaagcaagctcc

SEQ ID NO: 91276 - DNA, 317 bp, Glycine max
accctcaagcttgtatctgtggattcacttttgatctcaattgtaccataaggaaaaacattagtcaccacaaaaggaccaatccactttgacctcaacttaccactcatgagtccgagcctagagttttacaataagactttttgtccaaccacaaagtccttcttagctatcaagctgtcatggaacttcttggtcttctctttgtagaatttggaattctcataggcttctaaacggatctcatctagctcacttagttgcaacttcctttcctctccagcctggtccattgagaagttgcaagtctttacagc

SEQ ID NO: 91277 - DNA, 248 bp, Glycine max
  unsure (1)..(248): unsure at all n locations
taaaacaaaatgacatacaacctccttccattaatacacacatcaatgtagattagagcagcttatgcgctatttccctacaaacgttcacttgcacaagacattctattaactaagaagaatgcacccatatacaatcaagggtgctgcattacctaaattatttacatgtacctgcaagtgtatntgttatatacatcacacacgcctccttggcttaatttacatacatgcatactcaaagcatt

SEQ ID NO: 91278 - DNA, 301 bp, Glycine max
ttgcacgtatcagtcaagtgtatggaccatatcgtaacaacagtgctcatcgataatggttccagtttaaacgtgatgcctaaaagcactttggagaaattaccattcaatgcttcccacttaaagccgagttcaatggtggttcgtgccttcgacggcacccgccgaaaggttaggggagagatcgatctcccagtacagataggccctcacacctgtcaagttaccttccaaataatggatattaaccccccctacagctgtctgttggggcatccgtggatccactcagtaggagttg

SEQ ID NO: 91279 - DNA, 404 bp, Glycine max
  unsure (1)..(404): unsure at all n locations
tgatcatgtattccgaaatatagggggagaaaacggatgcaccttttatctatatacaattgtttgttgcttgcttgaatcttgatttcaggtattgtattgtcatcatcaaaaagggggagattgtagatgcaattggctctgatngtttgatgatgatcatgatgatgtgttgcaattgatgcaaatgggcttttcaagattaaaattcaagacaatacttcaagattacaaggcacaacatcaagatgatcactagaatattaggaagggaattcctaattgaattagcaaaggtttggccaagtgattataataaaaagtgtttttcaaaggttttactctctggtaatcgattaccagaggatgtaatcgattaccagtggccaaataccgtttacaac

SEQ ID NO: 91280 - DNA, 323 bp, Glycine max
gcttcaagactcaagatcaagattcaagattctttaatcaagagaaggcttaatcaagataagtatgaaaaggttttttcaaaaactgagtagcacatggatttttctcaaaacatgtttaccaaagagtttttactctctggtaatcaattaccagattgttgtaatcgatgactagtagcaaaatgaatttgaaaaagttttcaaatgaatttacaacgttctaattgattttaaaaaaagaagctgtaatcgattacaatgttttggtaatcgattaccaatgcctttgaacgttgaaattcaaattcaaatgtgaaaag

SEQ ID NO: 91281 - DNA, 332 bp, Glycine max
attctcccaaagatgcaaggcacataatctatgaggtgcaccaagcatgacttcctgtaaagctggaataagttcctgaaaaaatgcagcagtgtagtaaattgcaaatcacaccatgcagcactagaataagtccctggcttatgtcattaaatgcaattaaatttctaacttatgataataattgcaaatcacaccatgtcataccttttgcatgtctgacatgaaattccatccattatgtatgtaatccccaagatcttcatgcaatataagttaaaaccatttccaattgttttgtgtcaccacaacataagcaataacaaagatgt

SEQ ID NO: 91282 - DNA, 338 bp, Glycine max
cctatcgactcctcaagcctttttgctgagtttgacacgttctttgctttttttggcctaaaattgatttatgggttgttttctctcctatctttctacgttttcttttttcatttggtttatttgatggtggctgagtattgttcttcctttgcaagacaaaagcttcaatttttttgcgtcttctgtctttgttttgtgttataatgacttttcgcaggacaaaaggttaaatttttttgtgttcttgaaccttctccgacataaagttgtcaccgagagcaaatagtgttcggcatttgaaggacaggtttgtgatgtattttatttctcctttt

SEQ ID NO: 91283 - DNA, 462 bp, Glycine max
  unsure (1)..(462): unsure at all n locations
acccatcacatgtggtactatgtggcggtctggcgatggtgcacattattgtttttccacatccacaatgcgtgcataaacccaccatcccctgttgcccacctccaactgagctcacgtactcccacgtagcccatattctcgtttctctcaacaccgggtccccatcaatcctcccaagcttccacaacatccaagcaaaacaacattcacacagcacaagctatcacagccaagcaaaacagagcaaaggcagaaaactctgccaaaacaccaaccaaaaatcacagcttttaccactcanagaccccagtaacaatttcttctttccaattcgttaaccggtggatcgactccaaatatttactggaagtctctaatacataacgcctacatttgaccgttgggatctactagcaaacatctcgaactattcttgactgctctttccacaaccagcaa

SEQ ID NO: 91284 - DNA, 340 bp, Glycine max
ctatccaccactcaagctctgatcccctttgttccggaaacctttcttttctcatgtgcactcaaagccaatctccgggttcgaagacaaccttctttctccctttgttggcttgtttagcataacttttatttttcctctcaatttgatctttgactctctcatgaagcttcatcacatagtccgcctttgcttgaccttctttatgcttaaaaacagaaacattaggcttaggcaaaagatcaagaggagttagtggattaaaaccataaacaacttcaaaaggagaacaattagtggtgctatgaacaactctattgtaagcaaattcaacatgggg

SEQ ID NO: 91285 - DNA, 444 bp, Glycine max
  unsure (1)..(444): unsure at all n locations
gcttcacaatcgaaagatctaatccaaggtgaatgtttcataaatgggattccgttacttgtactattcaattccaatgcaacccattctnttatatcctgttcatgagtagggaaacttaagctttttgtattttctttaaataaagatctagtggtagagaccccaactagtggttatgtgttaacttctaatgtgtgtttgaattatcctgtggaaatttctggtagaacattcttgattgatctgatttgtttgcctttgagccaaattgatgttatcctgngtatggattggttatcttccaaccatgtcttgttaaactgttttgataaaactatggtgtttgatgattntggagtgagtaaggatatgatgtttatctctgccaaccaagttatgacatctntaanagaagatgctcaagtgtacatgatcttgtct

SEQ ID NO: 91286 - DNA, 320 bp, Glycine max
tctcctttcttttcctataaataggggattttggaagaacattaattttcaaccctcctggtatctgagattcacttaaaattagtgagaaaagttgtttctatgaagaaaatccaagttgaggcgcttccgtgacgtttccgtgggtgatttcgcaaagattttcaatcgttcttcgttgttctttggtctgcaaccggtaagttcccgaaatcgaacttttcaattcattctatgtacccttagtggtcctcatttgttccgcgtgcttttatttccatttcatttacttttcgtaccccttttgacgtgctttagtc

SEQ ID NO: 91287 - DNA, 269 bp, Glycine max
ttattccctagaggatggcgcctcctctcacctcttctgcttagtcttccgctgcatctacatggtggaaaaacacccattaaggacatcattgaagctcaaagatcaatcctccatagaagccccacaagcaagcttccatcaagtggttatcagaacacacgagcttaactatgtgctccttaaacctccattaaatttttttggtttaccttctcttccattggtgattcttcatatcttcctccatgtatctcctcacatgtctt

SEQ ID NO: 91288 - DNA, 330 bp, Glycine max
actaagctttttgaaatttaacattttgaattgggtttatcgagcagattcgctaagtgcaggggcttttaaaacccaaacgtcatttggacacactaagtgcaccatacaaaactgccaaagattataaggtacctgccttatgcagttacaatttcactcttgttgtgcattaaggacattcactgcatctgccctcaccttgcttcatctccctgcacctttgctattctttgcattcatgtacacaaactaagaaagtttctttactttactttattttcgttctaagttttcaaccttaggatagataacttaatgattgttagg

SEQ ID NO: 91289 - DNA, 381 bp, Glycine max
  unsure (1)..(381): unsure at all n locations
cctcaagcaagcaacttgaatcgatatttatattctgtaatctattaccaaaggaggttgtcattataacacttctcaacacaccacatctttattatctgtctcttaaatggccatcaangggttatatatatgtgacttgagacacgaatctaacaagagtttctcagaacaaaaaggtcttatcctcttataaagcaaaatcgtttattctcttacaaattccttggccaaattacttgtgattcaataaagaattatttgagagttcaaattgttcaatctatctctctcaagagagatatcttcttctctccttctttattctgaacagggattaagagaccgatggtctcttgttgtgaaagaattctaaacaca

SEQ ID NO: 91290 - DNA, 306 bp, Glycine max
tgtgggtagtgcactttttggacacccttctagtatctatcaacaatgacgaggataatagtgatccatgggatggcggtaggtgagtaataaaatccatagataggtcttcccatactcttttcgggattggtaatggttgcagaagtcccgccggccgatgagtgcttgtctttgtttgttggcaaaccttgcactcccgaacaaaacgcctaatatcttgccataggcccgaccaaaagaaactggattcaagccgatgggtggtctttgcgacgcccaggtgagcacccaaaggtgtagcat

SEQ ID NO: 91291 - DNA, 314 bp, Glycine max
tattaaatcctcgagcgttttttatatgtcttcatttttgatcatctgttcattagaacccttgcaagaatacccatcatatctccccaaatccccatacccacgaaatttaagagagaaagaagtcctcccaaatctgaattttcgaagtcccactcgtaaccacgcacttcacgacttcgaaaatgcccttcctttcgcgattggagcagaaatgaacacccaaggttggagctttggtgggcaacaatggtggatgggagaaaagaagaaaaggctgcgtgagagagaaaaactgtttgaaatttgtgggg

SEQ ID NO: 91292 - DNA, 413 bp, Glycine max
  unsure (1)..(413): unsure at all n locations
catgcaagcttaactctttcttattttgataatgcccaactgagggaagtctcttttatgtggatcaaatcatttctaatgatgtatgtgtctcctcttctttagcttaataatgtccaggattttgactctaaataaaagatagagctaattattattatttattgttagaggaaattaaatcatttttattgttagagcttaataatgtccagcattaagttttgttatcctcctatatatgacaacttttgatctgactgttgttaaattaaaagattagattaaattacaatattatatacgtgctatatttattgaatcaaccacttgatacatgaaacatagntcttatgtcaggaatcaagatctataanaaagaaaacaaactgtaccctaaaatattctcatta

SEQ ID NO: 91293 - DNA, 309 bp, Glycine max
tagtaactaatagcactctggtttcttctttctggaacacaagtctaaatccactgaattcagtaaaactagaacgaggaagatcaaatattaatgtcacaaaaggaaaggattgatatgtaccatcaatttcaatgcccttaggaacaaaaggaacagaaccagtagcaatgatgatattttttgcagttactattttgtctgaagagccaactttcaccttttgaggaccctgcacagattgataaataaagcagcaaaccaaaatgtcaaaattttctttttgccttttcattatagcttgactaa

SEQ ID NO: 91294 - DNA, 308 bp, Glycine max
tcaacctagaggagattataccattccaagtgttggagaagatcaacgacaatgcctacaagattgacttgcctagtgagtataatgtaagtgccactttcaatgagtctgatctatctctttttgatgcagatggaggagccttggatttgaggacaaatccttttcaaggagggagtgatgaggacataaccaagggcaaggaccatgaagcacttgaaggttccatgaccagaggcagacttaaacaagcccaacacatcatagagacaaggctggtcatttgtatagctgtcattgatgatgat

SEQ ID NO: 91295 - DNA, 379 bp, Glycine max
  unsure (1)..(379): unsure at all n locations
agctnttcatcaataacaactagcaagaaaattagagaagtgaggcataaagtccgaaatgccataaagtccttctgattatatatactatcaataacactttatctcatgccataaagtcagaaatgcataaatagaatcagaaggactttctcatgcttgaagtgaggcttggctacaaaaataattggttgttctaggattcaaaggcttagattctaagagagcacagatnctatacttatccaagtagtcttttcaatacaattagcttactcactagcctttcactttaaattgcacttgaccttgatacaaccacacacactntctctgattggttctatctttctttttctttgtttaacacaacttattt

SEQ ID NO: 91296 - DNA, 317 bp, Glycine max
tctttgagaaaactttcttgagaagctagtgcttagctacacacacccctctcataactaagctcacctccttgagaagcttctttaagaagattcctaaagaagctagagcttagctacacatacctctctaatagctaagctcacctccttgagatgagaagctagagcttagctacacaccccctataatagctaagctcacccccatgacaaaaaaaacatgaaaatacaaaaaaaaaagtccttactacaaagactactcaaaatgccccgaaatacaaggctaaaaccctataccattagaatggccaaaa

SEQ ID NO: 91297 - DNA, 315 bp, Glycine max
acactctcgaagactcatgcttatggcgggacatcttgactaggtttccattctgacattcatcacagattctgccttcttgtattctcatattgtgaatgcctataacatcacctctgtcattgatagtcttcgtgcctctcacgagcagatgtcctaaagtttgattccatatcacgaccttatctacttcggaagagccacatgttgacgagtgactggtttcttgacgcgtccagatgtaacatttgtgctctgcaatggtggcctggattaaaaaataacaatgctgatttggaaacaaacattctgact

SEQ ID NO: 91298 - DNA, 301 bp, Glycine max
tctaaactttatacaagaatgaagctctgttaccacttgttggacaagtggtctcagatatcttaagaagggggggttgaattaagatatcacaaactatttcccttattaaaattttatttcactttctattcaagttataaattcccttaaaaatgaacttcttaaatattgattcaaatagagcaatttgaatatgaatataaaacaataataaataaaggagtttaagggaagagagattgcaaactcatatttatactggttcggtcacacccttgtgcctacgtccagtccccaa

SEQ ID NO: 91299 - DNA, 366 bp, Glycine max
acacacttctaccaaacccaagatacctccttggtcaacttactcgcagcaactatgacaaccatcgtccaaggtctaacttcaacaaaatgaactgccaccacactattcggcaagacctttaattaggtcaaagtcatacttactcctcataaccattagaggagttagcttgcaggtcaagacgattcaccaccagattgcatgacaagaccttcaattaggtacaactcacatttactcctcataaccatcagataaggaagcaggtcaagcgacctacccccaaactggttcgcaagaccttcaattaggggcaagtcaaacataactcctcacaaccatcaggggagaagctccacaaac

SEQ ID NO: 91300 - DNA, 327 bp, Glycine max
actcaagcttttcgcaaagcttacggtaaaatctaggacttagccatggtataagtctccacagaggccattgcctccctcgcccagtattatgatcagctgttgagatgcttcacctttggggacttccagttatcacccatggtggaagaatttgaagaaatcctaggatgtcctctagggggaaggagaccatacctcttctcagggttttatccctcattagctagaatttctaagatagtccatatttcggcgcaggaattagaccgcagaaagtaagtcaaaaatggggtggttggagtaccgagaaaatatttggaggca

SEQ ID NO: 91301 - DNA, 430 bp, Glycine max
  unsure (1)..(430): unsure at all n locations
gagtgtatggtgaaaatgaaaaagaaatctgtgaacaggaatagagtntttatatagactgtgttgatataaatagagggtntttaatgcgtgtgtgtacaaaaaaaggttgtcgcgtataaggatgtaggtgtacaaagaaaagcttttctcatagatagcgatgaatgtatagtttttgccaacatagaaaaatgaaacaattaagaaaagagaaagaaagacctcgatggtcggcatggtatggtcataggaagcataaataattcgcagagagcaaacatatcttntggaaacaagggactgacgctaagagtttattntccagaataactaagataagaatggatggattcgttgaaccgatgaaagaaccataatttgaaatattgggtctacttgtgtaaatccaaagccttagtatcacaat

SEQ ID NO: 91302 - DNA, 318 bp, Glycine max
tctacttatgtggcatggcgggcttcctttactttcttgtctcaaccgcgagctttgactatcgcccttccttcccgcgatgcttctctttacatctgcctgagtgggcttatagcctaaaccatacttcccacgatttcctttggcatttatcaggctagttatgccgccgttgtctttgcctaaacccatttcgggttcgtaaccgttccccaacataactcgggccatcattactgctgcatcggacaggcaagcttgcccagagaaggagtccacggaggaaatgcttaccacctcaaaagactggaaagcggt

SEQ ID NO: 91303 - DNA, 434 bp, Glycine max
  unsure (1)..(434): unsure at all n locations
ccacgagtgtatgttgaataatgatataaaaatctgtgaacaggaatagagtttttatatagactgtgttgatataaatagaagggttttaatgcgtgtgtgtacagaaaaggtttgtcgtgtatagggatgtatgtgtacaaagaaaagcttttctcatagatagcgatgaatgtatagtttttgcaaacatagaaaaatgaaacaattaagaaaagagaaagagagacctcgatggtcggcatgttatggtcataggaagcataaataattcgcagagagcaaacatatcttctggaaacaagggactgacgcttagagtttattttccacaataactaagataagaatggatggattctgtgaaccgatgaaagaacataatttggaaatattgngtctacttgtgtaaattcaagccttagtatcacaat

SEQ ID NO: 91304 - DNA, 339 bp, Glycine max
ctatcaacactcaagcttctacttatgtggcatggcgggcttccttcactttcttgtctcaaccgcgagctttgactatcgcccttccttcccgcgatgcttctctttacatctgcctgagtgggcttatagcctaaaccatacttcccacgatttcctttggcatttatcaggctagttatgccgccgttgtctttgcctaaacccatttcgggttcgtaaccgttccccaacataactcgggccatcattactgctgcatcggacaggcaagcttgcccagagaaggagtccacggaggaaatgcttaccacctcaaaagactggaaagcggtttct

SEQ ID NO: 91305 - DNA, 291 bp, Glycine max
aagcacctattaactgcatccttaatgtgaacatcatgctttctccatgcagaacaaaaccctactaccacattctatcgtggacacaacacaagaagatgccacgtgctctaaagtgaacaaaatcaaatcatccatcaaataaatgcaagcacattcataacagccacatcggttgacttactgattcaagtaaggtcctaaggagacttcgcgatagagatttcttgacccacgtttctatgtactgttcacaatcttgacgtgtggtctttgcgcaacgtatagact

SEQ ID NO: 91306 - DNA, 331 bp, Glycine max
tgaagcttatccagctatctagggaaggccctacttttttatatttggcttttgcagacaacctactttttttgcaaaggcggaagagagctaagtgggaattttcaaaaccattcttgatttgttttgtaagagctcaatgcaaaaaattaacgtggataaaacacatgttttattttctcaaaatgttttgtagcaagtgaaggagcatttaagtgaaggattgggtttccaaaggacggaggatttgggtaattattcaggggttcctatattacacaaaaaggagaactagaatacataccaatttattattgataagatgaatatt

SEQ ID NO: 91307 - DNA, 336 bp, Glycine max
  unsure (1)..(336): unsure at all n locations
ttcttccctgggtttattcctataggatggcgcctgctctcacctcgtcttcgttgacctacgctgcatctacatggatggaaatcaccgttggaggacatcactcgaacctcaatgcatcattcttcatccaagccccacaagcgatctctcatcgagtggatgtcagagcacaggagcatacactaagtgctccttagacctccttaatttttctgggtaccttctcttgcctcggagttctacatttattcctccatgtatctcctccatgtatagtggataatcatataacatgagtctttnagtgtccaccgttaaactcctatataagct

SEQ ID NO: 91308 - DNA, 287 bp, Glycine max
tctttgagattgtaactttttgaattgggtttatcgagcagatgcactaagtgcaggggctattaataatccacacgtcatttggacacactaagtgcaccatacacaactgccaaagattataacagacctgccttaagcagttacaatttcactcttgttgtgcattaaagacattaactgaatttgccctcaccttgcttcatcaccctgcacctttgctattctttgcattcatgtacacaatataagtacgtatctttactttactttaatatcgttctaag

SEQ ID NO: 91309 - DNA, 478 bp, Glycine max
  unsure (1)..(478): unsure at all n locations
agcnttcacctttggtccttctcatagttgttgcatgagaaaacatgctctattttcatcntccactccaagtangcctccggatcattctttcctttaaagggaggaatgttgagtttaataccatcaattcagttntgtctaggaacaccatcattccctcttctccttttttcttattcattatgatctttgttctccatttgatccaacctctcatggagcgcatcatcttgttgtttcattaacctctccaaatattgcatcaaagcttgcatttggaattgcgaaagcccccctccaccattaggatatgttcctgccatctcaaacaaacaaatcaaacgtaacaagacaattatagttgttgtttgaatacctcacccactcaagtgtatcacacaattatgggctttctccaatgaaacactcttgccttttaccactctaattccccttgagttcttaagcaattcaa

SEQ ID NO: 91310 - DNA, 309 bp, Glycine max
tgcacttgttcacccttcctgagtttgagttggcaattatggagtatatcttacatgatgttgaagagctttgtgtagctcatgttatgcataatgacactcgtaaagctgttttagttaaccacagttagttgtaacagacttcagacacttacatctaacttctaaggttctggaatttgttgtacagacttcagacacttacaaatctgacaaatgtctctgtagctatatgtggaacttatgtagtcagataccttaggaatcagttcagaaatacaaaatcaaaaattaagtaactttccaaat

SEQ ID NO: 91311 - DNA, 311 bp, Glycine max
tctgaccaacagtattatccagcaatggcttttgtgacggcgctgtcattgcatagccatacgctccgcgattggtttatatatccagacagtgtgcgtgcactagctttttattcttcaacaacgcatacatatgggcctaacttatccgttataacatgcccgcgagacgatcgtgacaagtccctcttgtggactgtttgccaaaatgaaaaacgtacaatgtattagttcagagtcgcccttttggctgaaatttcacgaatcctttgagatactgtcgccccatccagtgtttttaacacttatta

SEQ ID NO: 91312 - DNA, 373 bp, Glycine max
  unsure (1)..(373): unsure at all n locations
gacatttggcatgttcttcatgcacctcggcccaagaaaacaattatcccacatctataagataaaaanaacattaatcaccgatattgatcggaaaaaatgctggttgacgctggccaggaaagatgaccgatcgaggtctataaataaaagaatcaccggatgacgccgatcgagcattttctaattgacatcatccaaatattattcatggattggatagaaaaaacaatagctgataccagtcgttatgtagtcccgactggacatctttagccgacaatgcacagtatttttttacaaacgctggccgataatatatctttacggtagaggagggtttgttgtcggtgtcgcctacgaaatatacaat

SEQ ID NO: 91313 - DNA, 298 bp, Glycine max
tcctctaccgtaaaaaaaatattatcggtctgtgtttttaaaaggaattgcgcaatgtcggcagaaaaatatcagtcgtggctatataacgaccgatgtcaggtatttttgtttcaattcaatccctgaataatttttggatattgtccaataagaaatgttcgatcggcgtcatcaggtgatgctttttattttagacctgctggatcggtcatctttcctggccgacatcgactaatatttttttttattatcgtcggggaataatggttttttggcccaggtgggctgatgtttt

SEQ ID NO: 91314 - DNA, 423 bp, Glycine max
  unsure (1)..(423): unsure at all n locations
atgactaanaataatgtgtgtgttggaaaaggatatcgtgactacgaactttttgtacagaatgtttcacaattgatcaacggaaatgcatctactcttgctcatatgattaattcctatgatatatggcatgccggattatgacatatgaattccacttatgttgtgcaacgactatgcttaatcaacatgcatgatcatcaaacacaaaaatgtgatgtatgtgttgcatcacatataactagcttgcttaacttaattcattcaaatcttgtcgatttaaaattcactatgcctacagaaggcaagacttattatgcaacctttatagacgacgtctctcgatatactatagcttgtttgattacgcataaagatgaagcatttaacatggtgttatcctataaagctgaacaatgtaca

SEQ ID NO: 91315 - DNA, 317 bp, Glycine max
gactcactcttatataattagcacattcaaaggagtaacttcagaatgtgattttcacaaattaccttaagcatagaaggaggtcccttgccctctaatgccaggtcccttagtccttattatgtccctatgctcctattatcttggtctgacatgccatggctatatctcacttaaccattcaccacaaattccttgccttcaaacactcaaacctcgcctctaaggttaagaccttcctggactgcctaaaccacctgaccgtggtttacatgaccccaactatgccccttccttccgcacgaactcacatcaaa

SEQ ID NO: 91316 - DNA, 303 bp, Glycine max
tatccctagaggggatggaccttttcaggttttggagaggatcaataacaatgcctataggttggaccttccacaagagtatggagtcaagcaccacttttaacatttctgatttaactccttttgcagggggagctgatattgaagaggaggaactaaccgatttgaagtcaaatcctcttcaaggggaaggggatgatgcaatcctccctaagaagggaccaatcactagaaccatgagcaagaagctccaagaagattgggctagagttgctgaagaaagccctacggttctcatgaacc

SEQ ID NO: 91317 - DNA, 300 bp, Glycine max
  unsure (1)..(300): unsure at all n locations
tttttcctaagggggaatatcctgttcaagaggaaccatgatatggctttgcttcgatgtgtgaatgctagagaggctgagcaaatgctggtagaagtgtatgagggctcctttggaacacatgccaatggacatgccatggcctggaagattctaagagtagggtattactggctcattatggaaaatgaatggtgcatccatgtganggaagtgccacagtgccangccttcaccgataatgtcaatgctctgctcgtacctttgaacgtcttagcagcgccttggtcgtctctatgt

SEQ ID NO: 91318 - DNA, 326 bp, Glycine max
ctcaagcttggctaactctataggagacatcctgtattgggctatggatattggtctagcacaaggtaccaggtctatggaaaactctatctctctctcgggtggtagtccgaatatatcctcagggaacacttcaggaaactctttgacaatagggaggtcacacatggaaacctttgtctctatttctaggttagacaagatcatgtacacttgatcatatttgtcataccctaatttcgtccggggattattacttgatgatatgcaacctttgattggccacttcaagataattggcacccttttttgcacgatatgtaagt

SEQ ID NO: 91319 - DNA, 335 bp, Glycine max
tctgggcccttttcccaaactctctataatgttggagaaatgttcatctacagcctatgtggggaaaacaacgtaatgtttccaaacttggagggctcttattaaggcatataaatctttatcacaggggggtatttgggggtgcactattaagttttcactaaataagcaataggtgccacctttgtacaatacagctccaacttccactccagagacatcatactctagctcataagttttagaaatgtcatgaagagctagaacaggtgccttagtaagattttctacgagcaaagcaaaggcttgctcttgattttaccccaggtaaatgc

SEQ ID NO: 91320 - DNA, 315 bp, Glycine max
tcttggacgcctactccggatacaaccaatttagaatgcattctctagatgaggagaaaatgacattcatcactaaaaatgccaactattgctacagggtcatgccattcggtctcaaaaatgcaggtgcgacatacaatgactaatggaccgagtcttcaagaaacaaatcagatgaaacgttgaggtatatatggatgacatggttgtcaagtctcaaagcataccctaacatctggcggacttggaagaagtattcagggaactatgcaaatacgacatgcgcctcaaccctgaaaaatgtacttttggagt

SEQ ID NO: 91321 - DNA, 379 bp, Glycine max
  unsure (1)..(379): unsure at all n locations
tgctcttgacgccacatgatgtatctctctgtggagcttgtaggtcttggatcttcttcatcaacgaagacctttgcttcttgaagctnattggcagtcgaatgcacatagaacaaagatgattggatacgcctcttcaatgacaatatgagtggagagagacggagacaaggagcatgaaatgttgtgcctcggaagatgactgaactttgacgtgttattctccaatgatcaaagttgataaaatgcacacacatggccctctatttatagcctaagtgcacacataattggagggaaatttgaattccacttgaatctgaaattgaatctatggagcccacattcattattatgatgagtgaatttagctatggtc

SEQ ID NO: 91322 - DNA, 331 bp, Glycine max
ctcaagcttcttagtttcagatgatgctgatgagtttgtagctacctctttttctcctctaatgactatagcatcatatctggcgctaaactgctgggagttggaagccatcttctcaattaaatttctggcttcagcaggggtcatgtcttcaagggctccaccactggcagcatctatcatacttttctccatgttactgagcccttcataaaaatattggagaagaagctgctccgaaatctgatggtgagggcaactggcacatagttttttaaatctctcctattatttatataggctctctccactgagttgtctaatacctgaa

SEQ ID NO: 91323 - DNA, 340 bp, Glycine max
tatccaatactcaagctttatgggacaatctggtgtgtcccaaagcttgttgatgcagattcattcccaacacggctcacctgactcataactggcattatcattggattggtctacactcattccgcttttacgccacatgtatacgtggcgaactacttaatgacctgtaacagtgctgtgaaaggaaaactgctctcttgtgtaagaatgacgtaccatactaaagtccaaacaggggagctcatttacaacatttcttctctaatctgaaggtgtaacaacatcatcttcttccctccagaatatcgcattgtacattgggagatcaaaatatcaa

SEQ ID NO: 91324 - DNA, 284 bp, Glycine max
  unsure (1)..(284): unsure at all n locations
agcttatgatgtcccaaaccaagatcattnttctctgccattcatggaccagatgttggaacagctaactaaacaagtgttttattgtttcttggatggctactccgggtataatcagatagcagtagaacgtaaggaccaagaaaaaaatgcttttacatgccctttcgatgtcttgcttataaaaagatgtcattatgggtatggaatgccctgccaccttctatagatgcatgctagctatggntgtgatctggtagaaaatgcattgaatggtcatggat

SEQ ID NO: 91325 - DNA, 301 bp, Glycine max
  unsure (1)..(301): unsure at all n locations
tgtttaaaagagaagcatgttaaaaaatcttttcaaagtaaaaatgttgtttttacttcaaaaccccttaaactagttcacataaacttatttggtccctctaaaactatgagtttgggtggtaattgctatggcttacttatagtagatgattactcaaggtttacatggactttgtttttgaaatccaaaaatgaagctttttatgcttttcacaaacttgcaaagattattcaaaatgaaaataaaagtatgattggntcacttctttacttaactacaagtagagtagatattatgc

SEQ ID NO: 91326 - DNA, 434 bp, Glycine max
  unsure (1)..(434): unsure at all n locations
acactctgttccattctgtgcataaccacatatcatcgcattccatgatactatgtcccttctaaaaagcctggtcaacattagcaagctgtcttccatgcttccacactctgcataanagctaataagtgaattaccaacaaactgatcaaccttccccaaaaacttgattgcacatgcatgaaaacttttcccgattccaagggaagttatatttgcagctgcacaaatcacacaaggaaatgtagattcatttggtataaatccttctctaagcatgccaataaaaaaatccacagcttcttcactgtggcccatttggctgcacccaccaaccatcgcattccatgagacaacattttctctcaggcatctcatggaaaacctgcaaagcatcttcaaacctccctctcttcagatatcaacaaattaga

SEQ ID NO: 91327 - DNA, 305 bp, Glycine max
tcaaggctaagtcttttgttgctccccctatatctaacaagaacgctcaccttcgggaggcacataggtcgcgaaaacttgaggctaacccgtcggaaggaggagaggccaaatcaactacagtagacctacctagagccactaatctaagtatgcacttagatgctattccaccattctccaacactttgggaagagagttgtcatagttcaagaacccctttatccctagcatcatggaggtgacttttccttccaactggaagaactttactattaagaggtacaataacaccatagaacca

SEQ ID NO: 91328 - DNA, 171 bp, Glycine max
cttttggggcgttgtgacttttgaattgataccgttccccccttttttgcacattgttttcaaatttgattccttatcctggaacccattatcaaaatttgtactgtatactgccctaacaataggaaacaattttgttctttcaagaatggattctgaaaggttccaaat

SEQ ID NO: 91329 - DNA, 397 bp, Glycine max
  unsure (1)..(397): unsure at all n locations
agctngattacctncttcttcactacatcaagtaatcaatgggtgagtcttctttgtggntgtcttacttggttagcaccatcttctaaatntattcgatgcatacatgtggatgggctaataccacgaatgtccgccagggtccagcctatatccttcttatgcttcatgagaattgataacaacttctcttcttactcatcaacaagggaggcatatatcattactagaaaacttttgctatcatctaagtaagcatattttaaatttgatggcagaggcttcaattctggtgtggatggatggatagtggtagaaagagatggtttctcagccttgtcctcataaagaaagtcagaggtatgtgtactccctgaaacatagttagttctatctg

SEQ ID NO: 91330 - DNA, 311 bp, Glycine max
tcactttgagacgcatcagcggtggctagttaagatgttcctcagggaggcgtcagatggctgattgaggagaatagtgaggaggatcctgttgaggacatgtatgatgtcctcaaagggatcgtgctattatatataggacccctctaactactaacctctcaccctacctttttgtgtaattccttatcaaggttggatttagtggtgaatgctatgagactaggtgttttcccttttaatgtgtatgtatgggtaggccatggttttagaattttgcatgcatatttagttagcagttttcatcacat

SEQ ID NO: 91331 - DNA, 265 bp, Glycine max
  unsure (1)..(265): unsure at all n locations
tcttgcgtagccgctcttggtgctcagaatattccaaaaacaaatccctcttattactagctattttgaattctttagtttgtgaatgtacaaccttcaaattattgttcgttcccctctttgagaatgagaaggatcttcataggacttcatccagctgatgtttgcccnaatgttaaaacttcagacccctctattatattgctttcttacatacttttttgccattccttatttatgcatgttttcagaatttatatgttta

SEQ ID NO: 91332 - DNA, 299 bp, Glycine max
ttgatcaaaatcaaatgtcaataacttttttctcgaatgtccgaatgaatcccgtaatatatcgagacgctctgaaaacagaacagaagctccgagcaaaatcaaacgacaataactttttactcggatgatcgaatgtgtcccgtagtatatttagacgctcaaaaatcaaaacagaaagctttagaaaatcaatcgacataactttttaccggatggtcgaatgtgtcccgtagtgtattgggagcttgaaattcaaaaaagaggctctgagcaaaaataaacgataataacttttt

SEQ ID NO: 91333 - DNA, 293 bp, Glycine max
ttagacggactctaccaagctctacgaaccacggacggagatagatctatacataggcttgctaacggtcgagagaggaagactccatatctggatcaagtgaccagcgttgccgacaaaaacgccaactcttagtgcatgacaaagatataaccgaaccgcgtaatgcgcatgttcacaacttacttactgatcgataccgatatgactctggcatgctacaccctagagaagacgaccggaactatcattcctatctggccattcaaaagcaccaagtaaaggaaccggtg

SEQ ID NO: 91334 - DNA, 290 bp, Glycine max
tgttcatgcgaccttgcaaatctccttgttaatgggccgggcgacttttgagctgaaaggggttattaaaatttctaaacatctggaaaaaagtttgaaaaaaagaaccaagtgatttggataaaaggaaaaaataataaaaatcatacaagttggaaagaaaattattgtccaagaaacaaaaaagtgaaagggaagtgtgcttgttatttggctcaaaatttgttctataattggtacctattttataccaatcttaattttgaaatttcaattgaaaaattaatgtg

SEQ ID NO: 91335 - DNA, 336 bp, Glycine max
tttgacaagttattgttacttccatgaataatgataatgcatcacgcttaattatatgcatttgcttattctgatcattgtgtgttgtgtgattattacttccatgcaagtacatgaatcatattttgtgtgagagtgaaatgatgggcagcagcaccaactgaggtgaggttatatttccttttttttgtctttatctttgttagtgtggtatatagtttttattttatatgtttgaggtttacatgtggtaaatataaaaatagaaaggtctgctgattgcttaggaattccttgttgttcaatgcattccttttgaacctcacaaggtgctta

SEQ ID NO: 91336 - DNA, 421 bp, Glycine max
actacattttgtagcttcaaaatggaaagtttcccttttagatacggaaatattttaagctctccaacctttaatccatattgcagtgtgcttatgacaaaggcggactaaaattgaagaatttgtagtgtggttatttgtgcaggcctcttcaattttgtcccactgatgtctaggtgttgtaaattaatcaaaattccaaagtcctcacgcaatttagtaagtaacgaacaattggataacaaggtctgcatattgtacaacttgcatgatatgtctagcaatctgtcaattctagtgttagaaagatctaagtatcaaagggtaattaaatttccaagacaattaggcaactcaatgatattagaatactgtgacaaggacaacacccttagttgtcttaatgttagtaacaagtcat

SEQ ID NO: 91337 - DNA, 323 bp, Glycine max
  unsure (1)..(323): unsure at all n locations
tagctaggcatgactaaaggctggatcaattcttctataacgacatcccacatagncgtatgtacaccacggagattcagcggaaggcatacgcacatcatgatatgggagacaccactcactaaggaatatacctagggagattgagctttaccaacataaactcgatttggatcataaaccttaatatgatgctattatggtagaaaagaataatggattgcgggagccctactttgattgattgaaagacggccagaaatgaatccttgatgatatctctaagaaattcattcatcaatagtcaacaagtgttgccatgc

SEQ ID NO: 91338 - DNA, 327 bp, Glycine max
  unsure (1)..(327): unsure at all n locations
ctgcccttgttatttgcctgggtacctaggatgttgatgggagaagatttttggaagaagggtcttaacatctatgttctcctgctgttgccaatggtgctggcacaccaacccttacattttntgtgtgtgggtgccaattagggtgggaccgggtttaaagtttgtgggaactctgatctttcagagccattgctttgtgatgaggaacccgggtgtgtcaaggttattccttatatagatgatatatcgattttccattccaaagtgaacatattgagagaattttaagacatattgtattaggtatatgatatatcctagaat

SEQ ID NO: 91339 - DNA, 317 bp, Glycine max
ggacctaagcacgagctgcactgccgtgatggcaccactcttatttttcactatcttcttcctcagatcctcccacagccattcctgtgattcataaaacctcataagtaaagcccaatcacaaacttcctttgttaaacaggaaagaacaaactcatactacccccttctcatatatcattcatgtaatattttgagtcgaacttctatgcatcatcaatgtaaaaatctttacacagtcggacaatcagaaaagatgataacggcgactcttaagataattatcatagaagtcaatatatctgatcgtacatgac

SEQ ID NO: 91340 - DNA, 290 bp, Glycine max
tccctttctattgctgacgtcacccctacaatttctgcccacttacccctgattaattacctgaacacgacagctttttgtctggtataacgacaaggtcaatgctgcctgaacaacgctgtctgggatatgttgttgcaaaaatttgtgaatgtataccactccacttctttgctgaagtatacgttgtgagatgcggaagtttatcctatcatatgagattgtgcaaatgctctaatcataaattgataaaaaaaattgtgaggtattataccttctgatttataaaa

SEQ ID NO: 91341 - DNA, 417 bp, Glycine max
  unsure (1)..(417): unsure at all n locations
gcagctgcagcttgaaatttactcagctttttctattttcttgaatatgagctnggctnttcttggccactttcaactcatatctcaagtgaggcacttgttccctcaactcaatctcttgtactttcagaatctttgcttcttcaaaaacttccctttttctctttggacttgataccttggccgattgaaaaacagaaatgttagctttaattgcatttatctgctcttctagctctttcttccctttctccaaacatgataacctggttgcttaactcattttctaaggacataacctccttgaactcgttcttgttagcttcaaaaattccttctagtttatctgctttcgagatgttggtgctggcagactctatattcctactggcatcatctgagtcccaacttcagcga

SEQ ID NO: 91342 - DNA, 355 bp, Glycine max
  unsure (1)..(355): unsure at all n locations
ttattaaatagggatactataggttgttttttttttatggntggcctgcgttggggtgaggatataacctgcaatctattctggttttttattatttagggaaagggtctgtggttacataaatatttacattatgctctacttctactatactatgtcttttctaatagtggctttagtttaagattattggtaaatgaccatctaccataattggtattgtgaattagggcatttggactttatctagggcacctgactaatgaacagtgatggggatagtgaattgattggaaagttctaaggattttgtgactaggatgctttgcgaatagatcggttgggataattggat

SEQ ID NO: 91343 - DNA, 406 bp, Glycine max
aagcgacgcagctgcagctgtgcttattatatctaaatcttcttttttatttatttaaaaatatttttttaccttttgcatactgtgcattttcctctagctggcactacatttcaagacatgtccacgatcgactttgactattatacagtgaacatgatgcttcttattttttacaccaatgaaatagaagcacaattatcacaaatcagatagataaggtcccaaaagatataccatttaaggggtcattttttctaaaagttctttaaaaaaattgaagaaattatttcatattttaagcaagaatgaattgtattataggtaaaaaaaaaattttccttgccaaatttaatgcaatctactttaaagcttcaatatgaaattaaatagataatattggatc

SEQ ID NO: 91344 - DNA, 430 bp, Glycine max
cgtgacctatgaaactaagcttctattatctggttaaggtgttcgcaaaccgcgattattattgatattgttattgaaaacgaccaagagccaaaactacactgaaagaaagccaaagaaaagcgaggaaaaaagagagaaagaaagaatcaatccatcctagatagaagaacaaaggaaaatataaaagaaaaataagttctttggaccacacaatgtctgaacaatgtgcaaaattgtcggaaaggaaaaaataaaataaaagagcaatagtaacttggtttagacacggcggatgtgtaaagtgatcacctgctttagttacaaaccaagtctttgtgtctgccttctctatttgcacttaacaaaagagaaagggaaataaaagggaaaggccagaacaaccaaagccaaattttctaccaaattc

SEQ ID NO: 91345 - DNA, 412 bp, Glycine max
  unsure (1)..(412): unsure at all n locations
agcttgtcatgactaatggatggtataattcttncttacgttcttttcacataatcttatgttcaaccacctttatgggaaaagtatatacaccaatcttcttttagatgaaccaactcaaaaagttttttatttaaggattttatttttagtaaatatcttccatatagctccttatatctttttattttcccatttgcatatgccttgctttttttttccacgttacatgctttgttaaatgtagtgacaacaaataatttttctaagatgattacattntcaaaattaatttataactagtattttactcattgcattgtaaaaaaaataaatgtttattttatacaataaaaaactataacttataataaataaatattttcaaatatataagctatattataattaa

SEQ ID NO: 91346 - DNA, 378 bp, Glycine max
  unsure (1)..(378): unsure at all n locations
actgatccatttgcttccatagttttatggacttgcaagtgaagacccgtacaaacatttgaaagaattccatattgtttgctcccccatgaaacccccagatgttcaggaagatcacatatttttgaaggcctttcctcattctttaaaaggagtggcaaaagacttgctttattaccttgctccacggtccatcactagctgggatgacctcaagagaatattcttagaaaaactntgtcttgctttcaggaccacgaccattagaaaggatatttcaggcattagacaactcagtggagagagcttatatgaatactgggagagaattaagatactatgtgccagttgccctcaccaccagatttctgagtaact

SEQ ID NO: 91347 - DNA, 409 bp, Glycine max
  unsure (1)..(409): unsure at all n locations
agcttgtcgaagcaggtatggttatgattattangttcacagggtttgctgtgcctgcgatctgcggtggctatagaaatggcatacaagataaacctataagcattgaagcataactcgatgcatattaaatagccaaagaagccttttaacttataataagaatctatatcaaggaaaatgctacatgtatgtagacattgttgattttcccgatacttgcacctgatggcatataatatagccacgtattagttatttacctttagttctttcattggttgcatacattttctgttttctgtttctcaggttgctgatcttaaactctcagtggatcacttggaaaaagaaagagacttttactttgcaaaactaagggatatagaaattctctgtcaggcttcag

SEQ ID NO: 91348 - DNA, 414 bp, Glycine max
  unsure (1)..(414): unsure at all n locations
ctctctagcttttattaagacactctcttgtggtgaagcttcttcttccatgacttattccctagtggacgacgcctcctttcacatgttctcctttatcttccgctgcaactccatggctaaaaataaccattgaaggacctctataaaagcttctcgagcaagcttccatcaagtggtatcagagcacaagagcttcaagtaggttctctttaaacatccattaattttcaggtttaccttctcctccattggtgtttcttcattatttttctccatgtatttcctcacatgtcttgtgttgaatgttgttaacatgattctttagagtttccaccaattaaactttctatagaagctagatttgatnttctatggttcaaatatcttgctcttggtcttgaaccatgaatt

SEQ ID NO: 91349 - DNA, 398 bp, Glycine max
  unsure (1)..(398): unsure at all n locations
nnagctttctttatgcatctatttttttattaagttatccaatttcatttaacttgagaactatctatttttttaacttacattaaataatctatcaatttgctaaataaacagccacttttttaatacttttaaaaatctaacaactttttaaaaatctaccgaagcttcttaatttttttactatcctttttttttttaaatatcaaaactgcgtgttttgaaacaccaacaacgtcctttattgaaattttttcagtttttaaacaagaatgattgctattttttctttctcttttactatcttatcatttttattttaaacttctatgcatgtgtgtgatttgagatataaataatagtatacttaagtgtaatcttcctttgacttctttctt

SEQ ID NO: 91350 - DNA, 404 bp, Glycine max
tgccaaagaactggttgcattatgctattttttggtaatggaaatgaagagagcaatttggacagtctggtcaaggccataattggagtatctgttactagtcaacctgaagatacaaaggtcaacaaggccaaacagaagcgagacaaaaaagctcgacaagaagcacaaagggagtagagaatccaagcagagcagagtgacattataagtatccaacttcaatattgagcacacataaaactgtgataagctgatatttaatattatatcactgtactccttttttatgattattgttcaatttttatcttcttggcctgtaggtttaccagcaatccattggaagctgttgtatcctagattgggcaaaggaaacaatggttctacaagttgtatccatt

SEQ ID NO: 91351 - DNA, 424 bp, Glycine max
  unsure (1)..(424): unsure at all n locations
agcttcgagccaaaatcctgactcaccacttactttgancccaggagagaatgtcaatccttaccctctgaagcgaacagaatctaacggaatattccaatcatagaaaaggaaagaatgaagatctccaatcaaaaagatagcaaacaagaaaagaaggaatattccgcaatccaagagtgggagatagccaaaagataagaaagataattcccattcaataaatgggagaaagtaaacaaggaagaataagaaggaaagaaagctcctgatcaacgatcgaatgataacacaagacatgtgcagaaaggtctttggaccggacaatatctgaacaatacagaattgtcaccaaatgataaaaaagaatgaaaggataccacgacctacaatggtcttcttcctttgattaccaaccaatatc

SEQ ID NO: 91352 - DNA, 420 bp, Glycine max
ttatggggtacccatcacatgtggtacttagtttttgtctgacgatggtgcacaacaagtctttcactttcacaatgcgcgcataaacccaccattccctgttgcccacctacatctgagctcacgtactcccacgtagcccatattcttttttctctgaacaccgggtgctcatcaatccttccaagttttctccaacctcaaagtaatacaacattcacacagcacaagctatcgcaacccaccaaaacagggcaaaggctgaaaactgtgccctataacaccaaccaaaatcacaggttttcttacttaatgaccccaattacaatttcttctaatcaattcgttaaccagtggatcgactccaaaattctattggaagtctatagtgtatacacctacattgtgaccgctgggatc

SEQ ID NO: 91353 - DNA, 218 bp, Glycine max
tacacaacatctgaccctaatatactcccttcttttatgtataaaagaagcgtcaattgggatgggaatgatgactaagggtgttaacggatagaacccatataaaacctcaaaaagggattgcttggtggttctatgaacgccccttattgtaggcaaattctacatgatgaagatactcatcaccaaactcatggttgccttttataagaaccctt

SEQ ID NO: 91354 - DNA, 407 bp, Glycine max
ttgtgatatctgttcgtggattattgattaatcaacggtctgtttcgcgaaccgtggacttgataatgggcaattcacgaacgtcgataagaaagatttaatggtcagatattatttcctaagccatgtgcggatttggactttgttagctttttctgggctttttaccaattttttttacaaactatgatcccttgcaatgcacggataatttagcaataaaagagaaaaagaaaaaaaagtgaaagcgggaaaaaaatgataaaaaataaaaaattgtccaatcattaacatgtaatgacgcgtgaatattttttatataggtatagataagtagatggattattaacgataaactgtgtttattttttttggtagttttatttgaaaaatattctatggatatt

SEQ ID NO: 91355 - DNA, 406 bp, Glycine max
  unsure (1)..(406): unsure at all n locations
naagctaancgngttgaagtcctattctctttggctgaanactcagagtggtcaatacaacaaccagatttcaaaaatgcattcttgaatatagatacaaaagtgtaatggaatctccttctagcttcgatcagaggcattattattgttacaaggaatggaaactaaaaaaatccttgtatggatcaatcaatcacctagacaacggtttgataattgtactcaatctatgaagaaacaaggatattttcaagggtagattgatctcattttatatccaattccatgatatccttgacaaagtaggaaactaagatattcatgaattaataataacagaaaaaagcacatttgttgaaccaaagaaaaataaataaaataacacctcaagcaaaacctgtcaagt

SEQ ID NO: 91356 - DNA, 402 bp, Glycine max
  unsure (1)..(402): unsure at all n locations
cactctactctacattcttgattgatttgttaacaaggaagcattaatatattcattacgaaaacatcatactggaaagaaactgccgtgatgtgaaccaaaagatccttccacctaagcataaagatcctgggagtgtaactactccttgttcaattggaaaagtcaatgggggaaaagctattattgacctgtgagccagtatcaatttgatgccactctccatgtcacaagattgggagaattggaaataatgcccacttcaatgactntacaattagctgaccgctccattaccaagccatatggagtaattgaagatgtgttggtcagagtgaaacattttatcttcccggcagaatttgggtaatggatatctctgaagatactaacatccctgta

SEQ ID NO: 91357 - DNA, 427 bp, Glycine max
  unsure (1)..(427): unsure at all n locations
aagcacctgagctgcagctgaaaatggagctgcttgccatttagtttaacgggtgatgnaatttgggttggaccaaagtgttcggcacgtggcttacattgtacgttacgggcaaaacgttgatgaactataccataatgttaaggatcttggacttgaaaaagagaggatagaccatcaacgtgacgaaacggaaaaaaatctacacagaactgaaggcacggttaaagaatggtttcagaaagtggatgagattgagactacggtggtagaagttaggaatgacgaggctcactgttatggaggcagtaacactaagcaagttccaccagtagccttgtctgccatttgcttgtgtgttntcaatcctgttaggatatgttagaacagaattacaaattctgttatttcaattatcagtataaat

SEQ ID NO: 91358 - DNA, 377 bp, Glycine max
  unsure (1)..(377): unsure at all n locations
ctcagctttacttgcatcacagatcctgagattcttgtgctcattggaatctctttctgcacttggaaaaattaatccctctaagcttcatggaaggccaaaaatgatttgctggggttcggtgaacagctatcttttgtccttagcacaaggctggggaagcaaagaggagggcctacgattgtactcttgtgttatggcaaatgagaaagcccaagatgaagcactgtgcttggttccttctgaagagaatggtcatgaccaatcaaattgccgcataggcactaccctttattttgaattgcatggtcccaatgcccanagcaaggaacataatgcagatgcagtttcccctagctcaacagttatacacatgc

SEQ ID NO: 91359 - DNA, 393 bp, Glycine max
agcttccaaggcaattcttggtggagaatcccttctttctgtgttattccctaggggatagaagtcatgtctagtcatgaaactttttcacctatcgtaggtttgtcataaaatgtcatgtctagtcatgatacttgtcacataagatttcttatgttgtgctgaatattattttcttggttctttgtctactcatttgctcatgagtgtatgacattcttttaacctactatttgatttgagtcaaatctttcatgttaattaatccttaacatgttcatgctaaatttttagagagtctttgattgtgaaccttttcttgaactcttaaggttccttatgattgtgtctatagtgaattcgagttttggtgaatgaatcgctggctgaaat

SEQ ID NO: 91360 - DNA, 378 bp, Glycine max
tagttaatggtatttcacgcgcgtataaatagtaggaaattgaattgctggattgagctactgtttaatgctaattgaatttatgggaaaaaatgttaagggtgttattgcaagtgtgtcttgcatggtgctggcaagtatgttaacaaccaaaccatcaagcatcatgtttgttaatggttgttgcagtggtcataattttcttgattgtttctgacatcaccccctttttttatcagtgctggcaaagattcatccacacagaacatatctaatgcaacaaagagtgtggagaaagaagctgctgcttggaaattggagggtgataaaaacaatcctgatagttttgaaacatcattagcagtatatgatgacaat

SEQ ID NO: 91361 - DNA, 371 bp, Glycine max
  unsure (1)..(371): unsure at all n locations
ctttaaatggaaacatgcacactactattaattcttgggtgagttctaccattagggggggagcacagttgataatactttaccaccaaacatgaaccacaagggctacaacaccaataggggtttcttttctgatttgaatttgaaccctttatagattgatttggagtttttgaaatttggacactgctntaattgaatcaattcttggcacatatgttgtatagcacgatatagaatgatcatactacttgttgctcccttttgattctactcatatatgtaaattaatgtgtgcacttcatatatatataagaaaatcgcgttaatacaaaatcaaagaaaaagtgctcgcttatgaatcctacttt

SEQ ID NO: 91362 - DNA, 317 bp, Glycine max
  unsure (1)..(317): unsure at all n locations
tgaccaccacggggcacttaacgcgtgtagctcgccaccaatctttgtctttctgcactaacgagcaaatgcgctaacgagccttcagaatcttgaacgcccaggggcccttttaacacttaagttggcccaaattttgagagagacagccagagagatgaaaaaaatagagcaagagaggaagctaatacgacagagcctcggccttcaagaacgcttaaggtttaggagtgantttatgattctagaggtggaggagacatccttcaccatttgtaaccttagtcttttcttcaaaaatctatcctttgtgctga

SEQ ID NO: 91363 - DNA, 413 bp, Glycine max
  unsure (1)..(413): unsure at all n locations
agctttatggataagaggctaattctcactttatatggnctccatcaacaacaaactcattcgttcattccataatcagagattcatgcaaaaatcattacttaatgctggtcgttccctcacaatttaagatcacacactcaccgtgttgtggttaatgagtatcttcacaatcaatactgttaaacaaattaacattttcatttatgatcctagtccatgttctatctcttctaatcactgcatgcttatctaaaacatatgatttacacattgcaattcactcaaatgatgtaatcgatcaatgcaaaccaacaagcactgaatttttcaaaatcatacatcaaaccactagataaaatgaaatatactggtcatactagcttatagcaagctaccatgcacaccaaaaa

SEQ ID NO: 91364 - DNA, 419 bp, Glycine max
  unsure (1)..(419): unsure at all n locations
gtgtaccccaccattatttcatagnataacactttttatgtgtctaccattaatgggatcatcatcttcttcgtcattggaggtaacactcgaactgccaagtctcttcacctttgggtgtattctttgaaagaattgtgcccttttttacccatgttttatagttgcatcctatccggagccctatgaaaattgtattgatactgcctaacaaaagcaaccactaggttctttcaagaatggaatcgggaaggttccaagttagtgtaccatgtgacagctaccccaataagaacttcttggaagaaatgtatcactagtttctcattttttgcatatgcttccgacaatacatctttatatggttcttgtggcaagtagtccttttgtacttgtcaaagtctggcacctttaacttg

SEQ ID NO: 91365 - DNA, 420 bp, Glycine max
  unsure (1)..(420): unsure at all n locations
agaactatataaatcaagaacagctttgtcttccttgttcttgtgatgacatccactccacaacgtttgaaanataggagaccttcaatctttacccacgaggcggacaaaaatgggcagttaacttgaatggtgattattgtcaatgctgaagggattctgcgcttcactattcatgttcacatattattgcaacttgtggttacttgaagcctgaactactaccaatatatagatgttgttcatacaaattgagcacactcttataaagcttacttccccacaattggtgagcctcttgggaatgaaagcaggtattccttcttttaatgacgcatggacacttatccctgacccaactacaattcgtgcgataggtcggccatcatcaacaagtgatatgaatgagatggattgcgt

SEQ ID NO: 91366 - DNA, 419 bp, Glycine max
  unsure (1)..(419): unsure at all n locations
catangccccactcgatgtctccatttctgttgatctttatttgtggcactcttatgaacgatttcctacattcatcaataaagaattcattaacagcgagtatcaactatggcaataaacaacaaggatgtcatacttgaatggctctaagtttcccatattccatcaattccttaatgtgccttcagtatttctcagggacgatttttcaatccgctcatgtaaggtttcatactttctaaaatgctcccttttagtcaagcatttatatcaccgcccagcatcatttataatagcaaacacaaccttctgtcctttctctgggatagtttatttttgcttcaatgaaagataaatatttaaaaagatccaattcattttaagtatgctaagatgcatgttcaaatggataaagtta

SEQ ID NO: 91367 - DNA, 203 bp, Glycine max
ctcctccatatcctcgtttacgttgttgtatctttcataaaatttacgacgaaatgggatcttaaattcaatataaaaatattgtcagatctgtgtcgcatacttttaaacttcactataaatattttctatcatttatcagtgccaagactgtcattgatatattatggatcccctattcaccccccccctatttgaataaa

SEQ ID NO: 91368 - DNA, 415 bp, Glycine max
  unsure (1)..(415): unsure at all n locations
agcttcaatacataaccttngttatctattcatttttacnccattacagttactaatattgtgatctaacaaattaattggttttgtatgtaaataaagggttggtttggtggttgaacggaaaaacaatattaagtcttgaattcaaatctctcacactaatattctaacaaaaactatgcaataacatttattgatattaaattaaaattggccttctgtaaatctgtaacttttcaggtgtcttccatatttttcaaatcacatctagtgaaaaatgtggaggcatttgttttattcttttactgggtgaccaaaactaattacactaataaatggtcctctacaagttcctgcttgtcgatattatctctcgtgagtcccatgcgaagcaattctgaatcaataaagttat

SEQ ID NO: 91369 - DNA, 428 bp, Glycine max
  unsure (1)..(428): unsure at all n locations
gccgccatgaagttttccaactatgctctattttatttttggcctcnaaataataaaaaaggggggggggtggaattaattattaatgtaccttgactaattaaaacttatccttcttaatgttactagatatcaattatgctttactactaagttatctaacttataaaaaagtatagcgtataagtaaagtgcacaaccaaaatcaaaaagtgttgggaagaagaatacaaacacaagaattttatactggttcggtcacaacccgtgcctacgtctattccccaaacaaccaccggttcttgagatttctttcaaccttgttaaattcttcacaagcaaagatccacaagggatgtaccctcctttgttctctcttgacaaccaagtggatgtacccttcacttgaactgatccacaagagatgt

SEQ ID NO: 91370 - DNA, 407 bp, Glycine max
  unsure (1)..(407): unsure at all n locations
taacttactcggggccattcctgttaaggcttacattnggaaagctaagtttaccagtgggacattactcttaaagcacaaatggcatataacctcctcccataaatacaaacatcaatgtgaatttagagcaagcttatgctcatatttccttacaaatgttctctcgcacaagacattcttttaaccgaaaaaaatgcacccatatacaatcaaggcagtcttcgctacctatattatttacacgtacttccaaggtgtatttgttacttacatcacacacatctccttggctaaattcacatacatgcatactctaagcattttggggtaccaaatattgcacatgtgcacatcttggtatttctaatacctatacatacacaaacttcatgatgaatcttgac

SEQ ID NO: 91371 - DNA, 425 bp, Glycine max
  unsure (1)..(425): unsure at all n locations
tgtgatgtttggtaatgttntcttactaattggggttattttgattttgtattgaattcttttataataaaaatcacccctcacaattattgtactgggtgggtggtacctgtgatgatcgccaacctggatatgtgggagcagaatgtcagcagtaaagtatgagaagcgagattcttttgtggagcagccgagccgacatgatgacgttgagattattttgggagagagttgtgttttgttaatcaactcctccatagctgattccatgatttttttgttgaattaaagatgtaaatcacaaatttaattatatgtatgaacaaatttactttccattatgtgaatgatgtgtactgagttactatatatatatatatatgtattcacttaaataatggtgcgttgtttggtgaatgtatatc

SEQ ID NO: 91372 - DNA, 414 bp, Glycine max
  unsure (1)..(414): unsure at all n locations
agcattgattattttatgatatngaatttcttattcatagagtattctaatatcgacctaaaggagcactttatgtttaccaaaggagcgccctactacatggagtacacttggttaattcggttgtttagcatggagtagcactctacgttatatcaaggggagagcccctactacatggagcacacttgattatttttcaaaagatatattttcaaccaatgagtgtgccttgctttgttgatagttcaataaatgcacccactttcatgggaaaaagagagtatatttagcaatagagtagtcctatgtttcttataattaggaacaagataaagttgcattttgtttcttatatataggactggaggtagtatattacaggaatctgaacatatttaagctttgatattt

SEQ ID NO: 91373 - DNA, 371 bp, Glycine max
catgtgagcaagctgattctttggacccttgaagcacaaatgatccaatataaatccacacccaagtgttaagcaaagaacaaacttttggggcataaccaccatgatgggcagaaataatgtaaatgctatgaaaacaaagaagactccactagcaagaaacaaaccataatacacaagcgctttgccaaaaggcacattgctagtggcagactggaaattgccaggtagatctctcacacctttttaaaccctaaacaataagaaacaaactgtgtaaccacttgaggacataagttcacgcaaaaatatcagtatttgttattttgtataaaaggctttctggacagcatgttctttcatcatgatgt

SEQ ID NO: 91374 - DNA, 311 bp, Glycine max
ccatcaacttaagaaacccccacaccaaggaaaatgactaaccacaccagaagtaagaaaattaaaatcacattttggcaaatcaagattaagaaaaccaacaattgtaatcaagggcaacgaagctgaacttggtttgcggggcatctagtcactggtttagagccatttggataccaacactactattggaaagaaggttgtgttggaacacctccattttgaaagagagaagagactttaatattttagggcactgatgaaaattaaatatttaaataaatggttattattagctttaccggaagaaa

SEQ ID NO: 91375 - DNA, 417 bp, Glycine max
agctctgccggaaatcttgacccaagattttttttttgtcgacattgtgcaattattttaattttcaccaacgccgggcaattatttggtttagtacgatcaagcaaattattcttgttgatttcgctcaataatatgtttaccatcgaactcgcctgtggtatttcgcgggaactcaaccgccggtgtgtttttggtcgacattggcctgcgttgataaaagaggcaaataaaaatatagccgaccttggcagcaaaaaaagatcctcgtctaacatggataataaacaattctagccgacatcggccaagaaagaatactggtcgctgtatcccgaataaaatcactggatgaagccgatcgaacatttccttatcgacatcatccaaaattattaagggaatggacagaaaatc

SEQ ID NO: 91376 - DNA, 309 bp, Glycine max
aacaccctggctgtatcataggactttcacaacctttgggtgttgccctcgctggaaagagtgattctttccttcctttcatcttcacccttgttctttcaaaccacaagttcagaaaatccacctctgcccaaaattatcttcgggccataactcccgttttacgcactcaaattaagtgattcttgagcctaaattgaatttcaaaacgagaactctgacctcgttttggaatcacctcatttggagccctgtagcttcagttattgccatttctatatttctgtccagccaccacttaacctacat

SEQ ID NO: 91377 - DNA, 350 bp, Glycine max
ccatgttcttagaatgtgccaaatcagaatgatcagaatcataatgctccaaatcaggatgttcaaaatcaccaataacagaatgcacagattcaccattaatggaatgctcatgatgatcaaaaagtataaaatgatgcctaactaatctatgagatgtcctatctatctcaggatcaaaggggtgtaagtcagatggattgcctctagtcatacactacattcaacatgcacaactagttgccttgtcatgtaaataaaggtgcagggttgaactacaactaccctcacgtgatatccaaatgacttgaaattttgtgagcaaccttataaaattgatgagaagatag

SEQ ID NO: 91378 - DNA, 354 bp, Glycine max
ggatctttgagcctttatgttggcctctaatggtgaatttccaccatggagatgcagcggaagaacaaaggaaaaaaggtataaggggcgccctccattaaggaataagccctggaagaaggggcttcaccaccaagatgaacattggataaaaaacttggagaggatgcttctatggaggaaaagaaagaaggagagaaagagaaaggggggagcacgaaattgaatgaagaaaaagggagagaagttgaactttgagttgtgctcacaagactctcattcatcaaagttacaacaagtgttacacatgcttctatttatagactaggtagcttccttgagaagatatcttga

SEQ ID NO: 91379 - DNA, 377 bp, Glycine max
  unsure (1)..(377): unsure at all n locations
acgcagcagcaagcnnaaaagcaacaggtatcacagaatgctctatatatatgcttgaagaaaggatacaccgcaactctgtcttgttcttgtctcgcgacgaaaggagatggccaaagtaccgggaagagaaagagaaaaatgctaatcaaacgcagccaaaaacaggaaattgtttatggccttgggacactgcactacggctccatacagtgtgcgggaattggcggaatactctttttgacttgcggccaaagttgacaggagaatgcaaacacgacacaggttttctcttcacgccgaatcttaattacaaatatatgttataatcgctaatgaaatatcaccgcgatgattaagaaaaaacattatacaat

SEQ ID NO: 91380 - DNA, 359 bp, Glycine max
tcgatctacatcaagaagaatagtgacctccgttttcacaaattattcgtttcactttctcatctattttatgtgaatgaagctaacttgtttgaaatcttgaggacaggcgggaatgctgcaacaagtgctttatggaactgtcaaagatccaaatgactctttcaatactgataccgtaatcatgcagacttttatgtagctttcctgactaattatgtaaattgaaaacaatattgtagaattattgtttttaatatagaaaataagggaagactcttgctggtctctatttcagaatttttgaaatccaattgacattgaaaataacattcttatgtgggaaaagacaagttgcg

SEQ ID NO: 91381 - DNA, 399 bp, Glycine max
  unsure (1)..(399): unsure at all n locations
agctntatatagagaataatctttattctttatactttacatgtntgcatttattagtatcatctctatttaaactctctaattatttgctgtatataatcgaattaatatatgtcttatattctatgtatataatatttaattattcatttatgttatttaattttacaatatatattatatttaatgaatatgaaatttaatcttactgaacaggcaatcttactaataatatatcaactatagtatttattcaacataaaatacagtgaactttaatgatataattaaatactatgtttattaaataaaatatttttattaaacttaataaatacaacatatctctgttcaacttatgatattcaaataaccctatatatgtaatataatagactt

SEQ ID NO: 91382 - DNA, 374 bp, Glycine max
tctcttgacactatcaaaatcttcatgatttacattctcccccttcttgatgaagaccaccacctgtagggttggatcaacaacaaagaaaaaatatctatttgcctactagtttactcccccttggttttgcaatgaatgtctatatgagacagttgaagatttcatatttttcatatgtaaacaaattgtcttataacaataaataatttttcttactatttgatcttttatctttctctccccctttgcaacatcaaaaacaaatcatgaatagagaggtgaaagatgtttccacttgttgcactgttgagaatcaagtgatacctcaaggcttttaacaatcattcaatattaatcacgcataaacaagt

SEQ ID NO: 91383 - DNA, 410 bp, Glycine max
  unsure (1)..(410): unsure at all n locations
ngctataagtgaaaaaccatgattttctttattcttaaagaatnttggagctttggaattgttttgggaataagagtggggggtatgtatcattggaagatataatttttggccatgcttaatgtttgattttggccatgcttgatgtatctgcatattgcctagctcttgctttaatcttcaaattcgtacttgtaaaaaaaaatcaattgctgcaaattttgcatattcgaactgttcaaaaaaaaagaagtgaagttgaataaatgaggtcttgttatgaggactctatctgggagccttggttgattttgttaaattagagggtttgggtttactacttgtgcttaatatccacttattccccattgctcctctattcctttgggatttagctacatattccatat

SEQ ID NO: 91384 - DNA, 424 bp, Glycine max
  unsure (1)..(424): unsure at all n locations
ggatccttaagtcacctgctgcatgcngctaaccatgattacatttattttttctcccaactgccaatggcgatttaaattaatacaatgattaatgcaaactgctcgcaagaatcattgtattcaatctcaaacgggaatctaatgttcactcacgacgaacataatttgtatagcatatatcatttctcataatggctgcgaacaagttataaaaacattgtgtacaaacataaaaagttttcaaaaaaacatttgtacttgtgatgatgagcacgtcctaaaaacagagtaacaatccaataaacaactgaatgaccacctacatcaatcatcattaccaaaaacattatatataaattttgctcacctatatcaatcatcaactagaatgcttaaacatgtgacatacaatagttgattg

SEQ ID NO: 91385 - DNA, 416 bp, Glycine max
gcttcccaatatccaagcattcatttcttttcttcagaactaccctagaccaagaaaatatggcagactcctatcaatttagtggattttcaaggtttgagaagtgaaaatgagaattgggtaattttggggtaaactctcattgtcaacaagtctataacattaatttagacttgctcaaactgatcttaatgcgaacactccaccgattcaagatttgacccctcaacacccaatttaccctagaaatgactcttgctttcacatttgtcactcattttgttctcatttgctcttgcccaggctgtcttactagtcctaattgacattgtaaactatgatcaactcactttagccttcaattaccactaaccccatatgtaactgttcaaaccctcaaaatctcactttttccc

SEQ ID NO: 91386 - DNA, 434 bp, Glycine max
  unsure (1)..(434): unsure at all n locations
tccctcgtaatcaactacatgagaattgtgatcgattactatcttctgtttatatttacaacagccattagaaatatgaattaaaatcttacaatgtgtaatcggctacacatgtatggtaatcgattaccagcagttacagaacgttttaattcaaattttaaagcctgtaatcgattacacaagtcgtgtaatcgattaccataagagcttttcaaaaaatattttcaagagtcacatctgtccaaaaggtttttgaatgaccatcaaaggtctatttatatgtgacttgaaacacgaatttgcttagagtttttcagaacanaaaggtcttatcctctcaaaagtaaaattatcttatcctcttaaaaattccttggtcaatacacttgcaattcaataaggaagtattttgagtgctccattgttcaatc

SEQ ID NO: 91387 - DNA, 404 bp, Glycine max
agctatagccttaggttgtttcatgttgtatcatcccttatctctaacaaaccttccctaacaaagacaacaagtctatagtggaacacattggttgattcactgctcaacatggtagggctagccaaaatgaaaattataaaatataattatttccatcatcttaataagaactgcatttacatgatattcttccttgccgcctcattctatttagaactagacaaacatgaatatccgtggatagacatgaaaaggtgctttcataacatgttttatagaacctaacttgaagttacaatagcttaatgaattttgaacaagtggatgtctattattgactgcatagaaagattcataaagccaagtaccaaatctatagtacaacttctaggatcttaata

SEQ ID NO: 91388 - DNA, 391 bp, Glycine max
  unsure (1)..(391): unsure at all n locations
tagctntttcctcctatatattatattnatgtgttcttgggctnccattttggtctggcattgcggctcagattacatcgccctactttttctttttttggtggatcaaacgatcatgcgtataattcgatttgaatcatagatgcatacagtgttgagctttacatcgtgctgtgtctccaccctcagggatgggttgaacatcgatcccagagaatctacgaacattaattcatatgtgaatttgagtttacagacttaaaatcgcgttcaactcgtgaagttatgaaaatatcttaagtcttgcttatgtaaactgtatttttagagttgcttttatcatctaacatacttgtaagaaataattatatccaatataaattgattgtac

SEQ ID NO: 91389 - DNA, 392 bp, Glycine max
ataatccggtacctatttatttctttgtttatagggcacaaaagggcaacatcgagctgaattataatgcgatttgaatctcagtcacaccattctattcaaatgggaatcacagaagtgacgtttaggtattattgatatatcttgacgcgaaaatttaattaagcgtgaattacctatattaatccaaacccgcatttcatgtcatatagtgtatttgtttttacatatcacattttggaacgtgatttttcacatctcaaatgtggttgtaagaagataataattataatttcttatattctaatagtgatttcttacttctcaaggaatctccaaatatgctaatattttccagcttgagtgtggctcaattgagattgaatttattg

SEQ ID NO: 91390 - DNA, 432 bp, Glycine max
  unsure (1)..(432): unsure at all n locations
ttaagtgacctgaggctgcaacttgtgtgacaccgaattgacattttttctttttattcatcactcataggnacgttacatatttgcattgcgctacgcacacgtcatttctttaaacctaaagccccttattagtgctgatgcttccacttttatggttatttttaaaataactagaatccaacttgaattactgagaatggctttgaataattaagaatattttctttggttgcaggtagtaggttgagccaacaagctacaaagttaattattcttgaatgataggcgtcacagttgactctacactgttgcgtttggattgtcactgctctgatcccactcgtgcctcttgttattgaccgtatatatcatagttgtacttgttatgactcacaccaacgataattacacggttatttatatatcaat

SEQ ID NO: 91391 - DNA, 407 bp, Glycine max
  unsure (1)..(407): unsure at all n locations
gctgacgcagcactacanatctgctgttccctccgttttgttatttccttttaccccctcaaaatatgcgaacctagttaggagaatttaatggcgccttctctttaatatacattcgaactgggatctgacggaccaaagaataataaacataatcttctcttccgggaaaaacactcctcttactctttggttcctcggagccgacacttccttgaagagtgcaatttttgatcacctagacaacaaagtgcatcattggtgctttcatcgatcatggacccttccgatattatgaacgcccttcaatccaaaatggacgctcaggcaaccatgttccgagaacttatgtgcgacactctctgatcccactcccgatcgattcagacaatgttacatcaacaccc

SEQ ID NO: 91392 - DNA, 331 bp, Glycine max
  unsure (1)..(331): unsure at all n locations
acaaatgagtatgccaatacttcataaatttcatgataacctaaatgaggaaaggtgaaatctattgaaaagaatgttcacaagtccataaggaattatgaaaactcggaggcaagtaaacataacttatgggctgaatgtgaaggatatatganatgcttgaaattcgagattgaatttctacgagagactctattcaaatttgttggaagcactgagaaacttaacaaaatattaagatacaacaaatgtccaactgacaaatataggaatggatataaaggaaagaaatatgttcatgataaagaaactatagtatgttatttttgtg

SEQ ID NO: 91393 - DNA, 218 bp, Glycine max
tgagatgatgaagtcgtgaaaagagaaacttcctgcctcttttgtttaccacagagaggtacctggagaatttcgcgggggtcaagagaccttggggacctcaaggggggtgctattgcccaaaaccaaacttgaccaattccgacccaaccccggcataatccgtcagtgaaaacctgtgatgtacctaagcaggcgagctcctggcagtccacaga

SEQ ID NO: 91394 - DNA, 415 bp, Glycine max
  unsure (1)..(415): unsure at all n locations
atgcagcttttcattgaaaagagtatgatatcttnttattaatatacttcagaaaataatcataaactgctaatcttcacattaataataaatttgctttttttaaacaaaaaacttttttctaaatttcagctaacattcgcaaactaagtgaaaaaaattctcaacaactttctttaacaaaaactactgaaatgagtggatctaagctatattccaaacgttaaagaagagactggattccctgcattcaaattttaagcaattttcagtcaccgaattagaattattagataaatttttacgactcaaatcccaaatgcgtattttatgttcgatttgttgaaatataatgagtcgttctatgcaacggttccaaatgcatgaagaanatccaagtgcaaggaatccaaat

SEQ ID NO: 91395 - DNA, 434 bp, Glycine max
ctcaagctttacttacagggagtagttcgggcttagcgcaacaggcgctctattctcactttcaaaagaacaaaacccgcaaaagaatggcgcttaacgctttctgccccgcttagctcagcttaaaaactcaagttacaaatggatctggggcttaacgcaggatagcacacttaccggtgctataataaaaattttccagaaaagaagtggcgcttagcgcatcatccacactaagcctactggttaaagttcaattattgtgaagatgtggggcttatagtagtgatgtacgcttagctgaactattcatccaaccaatcaggggtctctgcgcttagcgaaagcaagctcgacttatcgcgtgaagactgagcgcttatcgcaaggtctgcgtttagcagatagacaattgcaaaaaaatttctaagtct

SEQ ID NO: 91396 - DNA, 357 bp, Glycine max
ctgcagcttataccatgaacattgatcttttgtttttgtttagccataacccgaatatagggaacataaattcttcttccatcacaccccaaactatatatagatctgcatgattaaaacaaaaaaactccccagtctttgcttgcctgccaacaaaccctttcaaacaaagaactaatgcctatcctgatcaactcgattctttcgcatttctaaaagctgcacatcgcctcattcccataatgtattataactgggataccctcttgggccctgtgatgaaaccatagtgtacttcgcgctgctggctgcgtatatacttcatccacccaaccaaataaattatatcgttaaaaa

SEQ ID NO: 91397 - DNA, 391 bp, Glycine max
gtaatagaagattactcaatagggtcaattctctcttgttagcctcaactggggctcaagtttgtaaatatttttaccccttatggggtttacccccaaaaatattttatcttattttatgaagcttggggtctctttgaatttctttttatcgacttaagaccccttttggttgttgggagttgtgttaacctttctgaaatatttccaattggtatggttctattataatgtatcatgggaagatatagcgtgttgccatgaaccttatattgtttatttcttgaacctatataattaacaccctctcgttgtggaaatttggcattctctgaatcctatcgttctttttatttattttacaagatttgtgtttcccctggggttcgga

SEQ ID NO: 91398 - DNA, 414 bp, Glycine max
aatcactcctacatcttatctctagcatgctttttttttctttacccactcctcacgtttggttttttatggaaaaacaccataacttaacgcgccgcaagggatccctatcgcaccaaatccaaatctataacgatgggtgattaagaggagacgcacgaacagatgaaaagccacatgtctgctcttaaaaaacaaatggcctccatgatggaggccatgttatgtatgacacatctcatggagaagaacgcgggcactgccgccgctgtcatttctgctgccgaatcagacccgactcttttggcaactacgcaccatcctccctcaaacatattatgacggggaagggacacactggggcacgatggcagccctcacctgtgatacaaccgagcggcttacccttattga

SEQ ID NO: 91399 - DNA, 417 bp, Glycine max
  unsure (1)..(417): unsure at all n locations
ttagaaaatgattcttatacacaagtgagncgtatgaagctgactacattgtccaacctaaagctttataaaccttatgcatggggtggttacatagctccctttgccaatttaacagggattcctactcaggggtttttgttttgtctcttttttttaaaaaaaaaaatatacttttgcttggagaggggtagcaaggggtgaattagtgtttgagatgaagaaacttggccacgtgtcatttcaaatcttgactgaagactcttatagtttggatttttggacaaaacctctgataaacatgctctagaatgggttttntcttttcttttttttattaactacctaacttttgcctaagccaccactttgggttttcaacctaccaggcgagaacttcttattgccccctagttc

SEQ ID NO: 91400 - DNA, 412 bp, Glycine max
  unsure (1)..(412): unsure at all n locations
agcttctagcgtacccgctattgttgcttattatatcccanaaacaaatccctcttattactagctattttgaattctttaggtcctgaatgtacaacctttaaattgttgctcgttcccgtatttgttttttgctaaaaagaaaatttatctgaaacaattcaggctgaattggtatcgttattattactcgaaccataaggaataacagctaaacaagtaatttaaaatgcaacttttaaattatgtggtatttttttaattacaattttacttcaatatctaatcttgttaatctacttaggtcgttttttaaatataaatatgaatttaaaggtgatctactgataatataaagtacttgctaatcacatattatgatacgtatcattttaaatcttaacttaatttt

SEQ ID NO: 91401 - DNA, 246 bp, Glycine max
  unsure (1)..(246): unsure at all n locations
ctacctggacatttaaattacttcacttttttttttcttaagacncctaagatatgataatgcctacagctagatcaccgcggctctcttttacatatctaagtatttggcaccgctgagtgcggctcaatatcagggcaccatgctccaaacctttaattacacttgcctaccatattgaaaacccctttcatcatcttggttaaggtaaacctatataaacatcatatcttatcagtcttacat

SEQ ID NO: 91402 - DNA, 423 bp, Glycine max
  unsure (1)..(423): unsure at all n locations
gagtcacctgcggcatgcaagctttatcggtggttagncatctatatattctctcaacataatccaagnggattggcaccccatatggatcaaatgcaacaccgatggtgcttctcatggtgctcctggcagagcttcctgtaagggtatttcttcataatactcatgttagtgcactgggctgtattgccttgcctctgggttctggaactgataccactatgtttctttttaagacggttgtatgaaaccatcttaaaaggtgcataataaaaaaccatctttataatagtgcagagctcatgctgatatgacaacaattgatattgttcatgttggtttaagtcgatggtagaacgtgattccttactggtggtacagtcttttaaaatttttatttatttacctgctgtcgcacatgaa

SEQ ID NO: 91403 - DNA, 372 bp, Glycine max
tgggattaagaaggtcattgaccaatcccttattttcgacttaacaaaattgcctattgaaggtgtaccttttgagggtgcactgattgatgaatggaaatttgatttctctatgcatgatgtatgccagttggtttgcaccaaccaagcggatatgaccggaaggcttcttgccggttcattggcttttgaaagtcgcatcctccattatcttatagttcgcattttgcttcctagatcttcaaaccttgcctaggtttctgaagaagacctcattgtcatgtgggcctttcataaaggtctacaaatggattgggcacatcttgttagatatcgcatgcataaggcattgcgattgaatgccccattacc

SEQ ID NO: 91404 - DNA, 397 bp, Glycine max
agcttgtatagttcctcaattttggttattttggatgtaaatttggaaataaatcttgctgtatggctaacgttgtctctaagttttgaattgcaaaaagcagcagttgggctaagcgcatatccaccgctaagcacagctttagcgcgcttcgcgcaaaagagaatctggcagagcatcagtgtggcgtccctaaattaatgactggtttaatagaaataaattaaataacaaaaaccatgggaaagtgtttttttcttctttgtctttgtcattgctttctcttttcaccataactagggttagaaggaaaatcctcactataaaggcctgaatggccaggtcacaactctattcggaggcatttctttcttaccgctcataattctctaaatta

SEQ ID NO: 91405 - DNA, 402 bp, Glycine max
tgaaggcaaactggatgcgttggtcaacttggtaacccatttggccttgaatcagaaatctgtacctgtcgcaaggatttgtggtttgtgctcctctgctgaccaccatacagacctttgcccttccatgcagcaacctggagcaattgaacagcctgaagcttatgcagcaaatatatacaatagacctcctcaacctcagcagcaaaatcaaccacagcagagcaattatgacctttccagcaacagatacaaccctggatggaggaatcaccctaacctcagatggtccagccctcagcaacaacaacagcagcctgctccttccttccaaaatgctgctggcccaagcagaccatacattcctccaccaatccaacaacagcaacaaccccagaaaca

SEQ ID NO: 91406 - DNA, 403 bp, Glycine max
cgccactaaaggccacgtgcgtgcacgcacattatctattttatcttagaacatacaagcgcggagagcaatcttggaccgtcaaaacacacacagattttcaaaatgatgggtgcacacaaacagagtgccaataatgattgggagatttgaagaccttgatttaagaatacaaagcctatgtcgtgttagaaaacttgaagagaaagcaggatacagacttcgtactttaatactcatactaggtagacgatgaaaaaccactgaaacatggactgggaaaaagatatttgtgagaaaaaaggctatggacgaggatgtgaattgatatgataccacatatgatacatatacgtttccaagatgttgacaccatttaccatattatacctccattgacaat

SEQ ID NO: 91407 - DNA, 403 bp, Glycine max
  unsure (1)..(403): unsure at all n locations
agctnttanctcgttcttcaagatcatgcttttgacccatgangattcctttcacctcttctgagattgagcatactattgctgccctataaagcccctcaaaactttgccttggtcgtgttcttcctttcgggccttcttggtttctcgctccaaagcttcagcggtggccatattgacgtctcttagttcatcatactcttttcagactttgatgggtatggactagaacttctcttcaactacccgggctctttcaagctctgcctttagggcttgtacctcatcactttcttccgaagctttaacctcatcgtctctcacagactttagatttgggagccaatccaatccttgtgtccggactcttagccacttatgatagccgccgatgcttccatta

SEQ ID NO: 91408 - DNA, 418 bp, Glycine max
tctacttatgtggcagggcgggcttccttcactttcttgtctccaacgcgagcattgaccactgttcctccttcccgcgatgcttcttttcatgtccgcctgagtgggcttataacctaaaccatacttcccacggcttccttgagcatttatcaggctagttatgccgccgttgtctttgcctaaacccatcccgggttcataaccgttccccaacataactcgggccatcattaccgctgcatcggacagacaaggctgcccaaagagggagttcacagaggaaatgctgaccacctcaaaagactggaaagcagtctctaacgattcttctgcagcttccacataaggcatggaagatgggaagcttaccaaatgtctttctcgcctgatacgatgaccaagtgcccctccacta

SEQ ID NO: 91409 - DNA, 348 bp, Glycine max
cattaagtttgggactttcacctgggataggcaataaggatgcttgctgcctttggaaaatactattggcatggaattcatcaaggaaccggctgatatctggctctagtaacttccacacctgttaatgaattctaagtttaatccatccgggctgggctttctcactttcacaatcccatacaaccgcccttatttatcctcatggaaactccccaccaacatgtcgtattgttgctgtccaataccatgaaatctgattccattaagatctagtctgccctgctcaggttcactgaatcttgtcatgaagaacctacggacttcctctctcactcttatcggatc

SEQ ID NO: 91410 - DNA, 367 bp, Glycine max
atgacaatggcataaactaacggccctcaaactccaaagataatgataaagatatgtatcaaacctgccagatgaataaattatggtggctggggaaacatttatagaacaacaatttatgagagtattcaagaatagcttaacgggtccactgccatggaaggtaccagtctaattaataggagaatgccttgctgcatagtatccttgccttgtggggacacttcttaaatactctcacatcttgttgttccacaaagctccactatcatcatcatatcatattcctgcaagtttgacacgtcatcttttattatcatcttttgagtctgactactattctctaccacattttcgcacacctatc

SEQ ID NO: 91411 - DNA, 310 bp, Glycine max
  unsure (1)..(310): unsure at all n locations
tgacctactctaaaccacgcccaaatcccttcaaaaaataagggaaccatggattaaaaattttcattggcgctgagaacaaacccattgccattttcggactaactataccaatgttgacccaatatcccaaccaagaagattttctccatccagaccctttaccgaatcaccagccaacggaccgggccaacagaccaaatntcaaacaccgaaccctctcaaaatctctcttaaaggcctaagacactttttatagattgaaacaaaactagtatattaattacaccctaaaaatacttgacaaagc

SEQ ID NO: 91412 - DNA, 419 bp, Glycine max
  unsure (1)..(419): unsure at all n locations
agcttcttatccaaagctcatctaggtggtgtatcttcttcttccatggcttattccctagtggatggcgcctcctctcacctcttcttctttggcttccgctgcattttcatggtggaaaatcaccattaaaggaccttattgaagctcaaagatccagcctccataaaagccccacaagcaagctttcatcaagtggtaatcaaagcacaagagctttcagtaggtgctccttaaacctccattaatttttttctttaccttctctttcattgttggttcttcattattttccatgtatctcctcacatgtcttggttctaaatgtgttaacatgattctttagagatttcaccgattaaacttgctatagaagttagatgtgattttctatggttcanaattcttgttcttggtct

SEQ ID NO: 91413 - DNA, 335 bp, Glycine max
  unsure (1)..(335): unsure at all n locations
atctattttttactattaatggggtagaaatgaatattgatgcctgcaatttggaagggtgtagcccgactaaacatgggtggagttcgcaagttaaaaaatctcctgatgggtcagcaagaagcgacttataaggatgctcttgccccacaagaatttgggaatcccttgggtagtgtttaactgctaaagaaaaatgatcgtgtacctcataacctactttgtcacactgaggtctatcaaccatgcacaggtgactaacgatgatntacaaattgtgtatggtctacaattacgtattcaaatgaaatgggtacttctgattaaagacatca

SEQ ID NO: 91414 - DNA, 421 bp, Glycine max
  unsure (1)..(421): unsure at all n locations
agctntttggagtataaacatgggaccaactcattttatttttaaaaggaagtcgtatctagtcaaggtctgagagaccatacaagtttcctaacgatttctaattatgtgggccattaagtctatcatatgctgacaatagccgagaagcccatgaatctcttctggggcggagtaagtgtctgccatcgccttggccttggctaacaatcggggaagtncttgactcccgttcaaggtaagagcaaaccgatccatccacatggttgcctcttggtgaaagagtcgatcacccttcctctagcctcttttttcgcgtatactggagcatattcgtccgcaatcctatgctcgtgggccggggctagacctaactctttttggtactcggcgatgatagctagcatgttggtcttcgtct

SEQ ID NO: 91415 - DNA, 426 bp, Glycine max
  unsure (1)..(426): unsure at all n locations
ttgaaccatacaaggacaacccttcctttgtgttcagattgctttctacaagagaccctnggtctcttaatcccttttcagaaataagatgaagagaagaagaaatctctcttgaaagagatagattgaacaatggagcactcaaataattccttattgaattgcaagtgtattggccaaggaatntttaagaggataagacaattttggttttgagaggataagacctttttgttctaaaaaactctaagcaaatttgtgttccaagtcacatataaatagacccttgatggccattcaaaaaccatttgaacagatgtgactcttggaaattattttttgaaaatctcctctggtaatcgattacaagatttgggtaatcgactataggctctaaaatttgaattaaacgttctgtactgctgg

SEQ ID NO: 91416 - DNA, 414 bp, Glycine max
  unsure (1)..(414): unsure at all n locations
agcttgaacatacaaacttgtattattttctgagaatnggncactacgttttttgagctgaaatgtttactgaattttctagatatctggaaaaaaattctgataaaataaccaagcgatttggattaaaggaaaaaataagataaatcacacaagttggaagaaaaattattgtccaggaaataaaagtgaaagggaagtgtgcttgttgttttgactcaaaatttgttctataattggtgcctattttataccaatcctagttctgaaatttcaattgaaaattactgtgaatacaagtgccaaaactagaggtgtcttgtgtcttttttttagtgtttctactctactctagagccattctatgtttctctttgagtcctagcttgcttttgtgtgcttttcatttcttta

SEQ ID NO: 91417 - DNA, 424 bp, Glycine max
  unsure (1)..(424): unsure at all n locations
tacctatgtggcagggcgggcttacatcaccttcttgtcttctacgcgaactctgaccatttgttctccttcccgcaatgcttcttttcatgtccgcctgagtgggcttatagcctaaaccatacttcccacgatatcctcgggtgttgatcaggctacttatgccgccgatgtcttttcctaaacccatcccgggttcataacccgcccccaacataactcgggccatcattaccgctgcattggacatacaaagctgcccaaagagggagtccacggaggaaatgctgaccacctcanatgactggaaaagcagttctaacgattctactgcggcttccacataacgcatggaagaagggcagcttaccaaaatatttatctcgcctgacacgatgaccaagtgccccttcactacgaattt

SEQ ID NO: 91418 - DNA, 395 bp, Glycine max
cgcctctctccatgtctcaagatacactactctacatttacatctctttcttctctcaaggtactcactctcatgatagttatctcctaatagtacgtgtttggcaccacttattttataaaaaaacctatctttgtcaacttctgtatagaaattttgataacaaagcaattattttctcaaaaaaatgggatccaaatgtgtgaagaacttttcattcgatgctccaactacggaaaatgtcgtcctaaggttcgatcttatttcactttcttagacgatcaattttatttctacagcaattcaattaatgtttttcgcgatttgtaaataaacataatataatagcaggacaacgctaagaagaggtatttggtgatgaacattgttgaaca

SEQ ID NO: 91419 - DNA, 412 bp, Glycine max
  unsure (1)..(412): unsure at all n locations
agcttcttagtattcaatggtgcttaccttgtatctgttgtttctcacttctcagctgtcatgtttagttatgattacttgagaattgtttgtaaaaaattaatccaaatacagaaaaatatacatgttataacttatatggtaaggcagacaggagttgctcttggaatagaagttgatgacaaaatgccacagcacgagtattatgaatattttggtccagaatatacccttcatgttgccccaagtaacatggaaaacaagaaatcctggcatttacttgaagaaattcgatctaaactacttgaaaatctttccaagctgcagcatgctcctagtgtccaatttcaggataggcctcctgattctgatcttggagaggtaaacctctactgccatatattntacttta

SEQ ID NO: 91420 - DNA, 414 bp, Glycine max
  unsure (1)..(414): unsure at all n locations
tgaattatattgcagaagaatatgctttgttttttacaataaaagccaaatagtaaaattttacgccatagtcagaaagaaactatactggccaatatttatcatcattaattcatcaaatcatttatagtttttgctacccaacattaatattattaggggtataaatggaaaaaagcaattaataatacattgaaaggctaaaataacacttcttttttcttcttacaagacacttgttatgggatggagggagtatgattaatacaatctgcacaagctgattngctatgattaaatgaacaatttgtttgctgacttccttgtaacactcttccttcctggatggttctcaaatataagaatgtccaactaacaagtaagaagaatcttgaagagcatcccaaccaaaaa

SEQ ID NO: 91421 - DNA, 416 bp, Glycine max
  unsure (1)..(416): unsure at all n locations
agcttctntcaccgcttcagattctgccatatattcttgttccgnagacgacaaggcaacagtggactgtataatcgcacgccaacttatagcactacttccaagcgggaaaatataaccactcaaggaccttctacgatcaagatcaccagcataatccgagtcacaatatccaatgacttgaccattgcattcaattggtgctttgccaaacactagacccagattatgtgaaccccttagatatctgagaatccattttactgcttgccagtgagactttcctggattagccatataacgattaacgacactcactgcatgtgctatatctggtcttggacaaaccatagcatacatcagactcccaactgcatttgagtaatgaactcgagacatgaactctttctcctttt

SEQ ID NO: 91422 - DNA, 402 bp, Glycine max
  unsure (1)..(402): unsure at all n locations
tcagacagctntatatgggttaaagcaagcaccacgtgctttgtttatctaaatagaagcctattttgtgaaggagggatttgaacgatgcgatcatgaacacactctctttgtcaaaacaggaggaggtgaaagaattttaattgtgagtttgtatgttgatgacttaattttcactgggaatgatgcatgcatgtttgaaagctttaagaagtccatgaagattgagtttgatatgacagatttagggaagatgaaatatattcttggtgtagaaattcaacaaaattcagaaggcagctacttaagtcagaagaaatatgcttgtgaattacttgagaagtttgggctgcagaattgcaattcagtaaagaatcctatagtgcctggttntaagttgtc

SEQ ID NO: 91423 - DNA, 413 bp, Glycine max
agctatgaaaacaaatgaacagcatggatgttattttattgtcctagacaggcgctaaaagattcacaccaatcatgatatataccaaagagacttcgttcataaataatgggaagagtatctggggagtctattgtaaccacattcatgacccatacattcatatctctcgaagctatagcaaatctggaaaccacaaacggtgaaagatgccaagcaaagtgggacatattatcaagtgaagatctaattcagagtaacaattgaaaatcaaaacagggactttagctcaccctccatagatagatctcatatcaatgacattgcgtacatatgaccatctaattcccatcccggctagataagccttggacattacacgtatccaatgttcataatcagcagggaaatct

SEQ ID NO: 91424 - DNA, 369 bp, Glycine max
tatcaacccttcttgccattaatgtcatagagatgtagatttttcaatcttgctcaaacctttccataatactctctctccacatagaaataaatctcattcatatcatcactctatggttttatataattctgttcaatcttcatccaacacttatatactttgaatgcatgcatgcaaaaatactgtacaaatacttatctaacacagaaacacacgcgttataaattggtccgcaatctaaaaccctgcctaagtgaaggcagatacataagtttagttcagaaaatagtcataaacggaccctgaaatccaatatcttagtgcgcttgcttttctattgaagcagaatctgaaagagaaataaca

SEQ ID NO: 91425 - DNA, 406 bp, Glycine max
tctagctcaacatcatttttcttctctggtgcttgaactacttcacatggatttgatggggcctatgcaggttgaaagccttggaggaaagaggtatgcctatgttgttgtggatgatttctccagatttacctgggtcaactttatcagagagaaatcataaacctctgaagtattcatagagttgagtctaagacttcaaagagaataggactgtgtcatcaagagaatcatgagtgaccatggcagatagtttgaaaacagcaggttcactgaattctgcacatctgaaggcatcactcatgagttctctgcagccattacaccacaacagaatggcatatgttgaaggaaaaacatgaccttgcaagaagctgctagggtcatgctccatgccaaagaactt

SEQ ID NO: 91426 - DNA, 419 bp, Glycine max
tagtgtggcatagcatttggagttcctatgaactagttatagaagggttaagatggtggattggcgatggacccatgatctccatatgacaacaaccttggcttagggatgtggataattgttctctaggttctgcacctcttaaagctattgcataattaaaagtgtaggatcttctcatcccaaactcaagagaataggactccaccttcataaaaaccttggtatctcaccaagaggcgcaaaagattctatagattcctttgatggaggaggcccaagaagataaaaggattggtgatactcaaaggatggaaattacactattaggagtggatatcatttgtatatgacacactttggggataattgtcagttccaagttcttggggattggcaactcatatggaatatggaag

SEQ ID NO: 91427 - DNA, 400 bp, Glycine max
agcttaagattggttatgttagtattatcttctcttcagatcgcttgagtgcatgatgtgattgatcctattgctttaaatgatattgatgatagcaatgagtggttattgggagaattggaaggagaagaagctggtaatgatttggtttttgatgatgatgattttgaattcttagatgttgctgaggcaactggggctggtgaacctttacaaaatacaaggagtcaaacacatataaacaaggcagcagctgcacttgcacctacaaatgaaaaaggaaaaaaggtggtggaagtggaagaagagaatgaagatgagggggaagaagagtacaattctaatgctagtgagagtgatggatttcaacaacacaatgattcggatcttgaagaggatg

SEQ ID NO: 91428 - DNA, 410 bp, Glycine max
  unsure (1)..(410): unsure at all n locations
actagatcctttaattntaggggatatntttttattcttgtatatgaagaaaaatgaaagatatcaataattgtatgctatatcataccgcttaatttttttttatgtacaaatgattaaaaaatgatttttttagaataggttttgaaaagatatttgattcgatatcggtagtttgttatgttattgattttaaatttaatttaaatctttattatctttggaattaggggtgcaccaaaaagaaaaaattaaagaagaatacaaaaaacaatctttttaaagaagataattaggggtgtattagattaagatttcaaaagatttttttaaaaaaatattgtggtattcaattaanaattggtaataatataaataagttgtatgatatttaattaaagttcttaaga

SEQ ID NO: 91429 - DNA, 431 bp, Glycine max
  unsure (1)..(431): unsure at all n locations
agctngagtgaagtaaacattctaaacatttacttatatagtgctanaatgggttggacatatacattatctttaacattgccatgtagcttgcacaaaatatatgaatcccactttagttatttttataaaacttaaaaggttaaatgtctaaagctattgaaccttaaattaaccctttgttcccattaactttctttctacaatattataagaataattaaattaagacatgttaaaaacggcattggataatgatgtcttgcaagggcaacctatactgagaagacagggagggccaatcacaaaaaataaaacacatccaataaatttttttgctgaataaatacatccaacagaaatataccattaatttttatacaaaatatttataattngatgtttcaatgttacattacattattagtcta

SEQ ID NO: 91430 - DNA, 424 bp, Glycine max
  unsure (1)..(424): unsure at all n locations
tctcttggaagntcatcatttgatttgacttcttcttgatgatcttcattggttcctttatcatttcctttggaatcttggtcatgaatattcatatgttctaaagaatctgccatatcatctaacatattctttcttgacaagatagcattagaatcatcaaaggtaacatgaatggattcctcgatattcatagctcttttattatatatcctatatgctctgctttgtgatgaatatccaagaaaaataccttcatcagattttgcatcgaattttcctagattatctttactattattaagcacaaagcacttgcaaccaaaaacatgtagatgagaaatatttggttttctaccattatataactcatatggggttttctttaaaatgggtcttattaaggccctattcatgatgtaac

SEQ ID NO: 91431 - DNA, 440 bp, Glycine max
ggaccgagagcaccgcggctgcagcttggtatagtgctcgtgcgggtgttttgtgtttctgtgccaacgtatagcgctttgacttttgttgtctcactgacttgcccaaagcaaattttctacagaggttgcacatcttattcatagtctttaatcacaaaattataagtcttggttaccaagtgcgaatacaaaataaagtgggggtatattgtcaattcttaattaaataggggactaccttaattattcaaactatctagcagttttttgttggtgccaatgggaagctacaggaagaatgataaagtggatctttgttaccagatgaaattcaggcattagcaatatattcgcggaaataattgtcatactattcaatcattaattcttaaaataaatatagttggctaagttttttattattctctaattagaat

SEQ ID NO: 91432 - DNA, 496 bp, Glycine max
  unsure (1)..(496): unsure at all n locations
tctattatctccttaacnnacactctaataattaattacanaacccaaaaggattgattgtgcactcgagacccnaactaacttacttcttcaggacgacctctaacaaaaattttctattatagtttactataaatattccagaaatgccaatattggtatcaaacaagtggttgaaagaaggggattctatacatcccatgaaaaacccattcaaagcaatttctttgcactccagaaaatgaggaagaataacatgtcagagttcataccaagaggaagtaattctcaatcttgtgaaagtatcatgctctggctctttcctcaaaaagtcagccgctattggatcaagcttgacaccatgcaggtcaccagaaacactatgagagcggatcatactcggtgtaaatgccatctgctcttcattggcattaacatgattaggtaaaggctcaaatgggattttaccttctggaccctgcatacaagtgatttc

SEQ ID NO: 91433 - DNA, 409 bp, Glycine max
  unsure (1)..(409): unsure at all n locations
cctgcagcccgtcaacttctcccctattttgctataaaaaggttgaggatgaatatttgatgggcncagccttcttggcacttcgtattctcttatatatattgaggaaaattgcttctgtgaaaaaaatccaagccaaggcgctttcataacgtttccgtaacgtttccgtgggtaattactcgaagattttcaacccgtcttctacattcatcaatcattctccgttctcttcggtcttcaactggtatatacgccaaaaccgagattctcaattcattctactgacccgcggtggtccccacttgtttcatgtacttatattctctttttatttactttcctaccccttttgacggccttagcatctatttaatctttctccctcatcaaaaaaaaataattcccc

SEQ ID NO: 91434 - DNA, 411 bp, Glycine max
ggaagaaaagaaagagggagagtaagatagtgttgtgtgatgtaaaagaaggaagaaaaagggagagaagttgaactttgagttgcgtcccacaagattctcattcatccaaatacaacaagggctacacatgctcttatttatagacaaagtagctcgcttgagaagcattcctgaaaaaacttccttgagaaactccgctgagaaaactttcttgagaagctagagcttagcttcacacaccctctcataactaagctcacctcattgagaagcttgcttaagaagattcctaaagaagctagagcttagctacacacacctctctaatagctaagctcacctccttgagatgagaagctagagcttagctacacctcgcctataatagctaagctcacccctatgctc

SEQ ID NO: 91435 - DNA, 405 bp, Glycine max
agcttataaatacctaacaaacacaactccttctcttttttagacctgccactgcgaacagcgtataaaaactgccatcgactattgcctgcacaaaaaaatgggtaattaactcaccatttacgcatatatatgctacatgagtatgcccaacagaaaataattccaattggaactgaactacactacgtacacataaaaaatgtgtcaagcatgaccatagatcataaatcataaccaattaacaaagttgttgccgttatattaaaaccacaatatacaacgcttggtttgtatcgtggtctatgataacactagggactaaagttcacagaactttctcttataaaattccaatagacatctcaagcgtgaaatttagaataagtagagtccaataataat

SEQ ID NO: 91436 - DNA, 342 bp, Glycine max
taaaagaataccataattaatcagctgactttattagaatcatcaatatcttggtgaactcaaaagcatttagccatcccacacagaaaaaaacagcccagtggtgaacttaacaaaccatattccttttgcccatgagtggaaatttaacctctgatttaatatatgagatatgattttttttatctagaataggcatacaaaattagtttgtgaaattataaacattgatcatattttgttgataaagaaatgctgatatcgatatttatctgtaattgaaatttacattttcatgatggatacaggatcatggcttcttcacttgccctaccttctcct

SEQ ID NO: 91437 - DNA, 410 bp, Glycine max
ctgagctgcagcttagaaaatggctcacaactcttttttttttatgaaattctatcaatagacctgcaattgttaatggagagggttaccactactggaaaacccgaatgcaaaattttattgaggcgaatgacttaagtatttgggaagccatacaaatagggccatatatacccactacagtagaaagaattacaatataaggtgacacatcatgtgaaagcttaacaatagaaaaacctatagatagatggtctgaagaggatataagacgagtacaatacaatctagaagccaaatacataataacatctgccctgtgaatggatgaatattatagggtttcaaattgtaagagtgctaaggaaatgtgggacactctacaattaacacatgaaggaactacaaat

SEQ ID NO: 91438 - DNA, 426 bp, Glycine max
gcttgagaatatggttgcagccattggtcaatatggaccacattttgtttattcctagctatcatgacatcagaggttcactcctcaagacggaagttgaatatactgaaaatatgatgaaaggccattcggagcaatgggtcaagtatggttgtactactatgtctgatgcatggactgatcggaaacaaagatacatcattaattttttgattaactctcaagctggtaccatgtttttgaagtctgtagatggctctgattttgtaaagacgagtgaaaagctttttgagttgcttgatgccattgtggaggaagttggagaagagaatgtgttcaagtttgaaccgataatgggagcaactatgttttagcgggtaagttgttgcaggacaaaaggaaacatatttattggactccttgtgc

SEQ ID NO: 91439 - DNA, 358 bp, Glycine max
atccttatcatcacagagtgacgtggaactttttgatatatcaatcagcttataatcacatgccgttgttctgctaggaactaactgcatgcatcttaaacagcaacaaagaccgttctaggttgcgacgaacaactaaagatttggacatgacaaaccaccaagctatgaccgaacccataccgcaattggtgacttacaaactcgccttaacaccttgtcttcgagactgaggatgattgcactgagagcctattgcaagaacgctaccttataccctgcagccatcatatctggcaaatatggactttgcattctgagcttccaccagaccccgatgaaccataagagctcccat

SEQ ID NO: 91440 - DNA, 390 bp, Glycine max
tgctacctcagacgtcatttggcctgtgttcttggtgcaggccatctttcacttcacgtgtctgctgatgggaaatggaggaacaaccactatgtctgtgcttcctgattgagcaactctcttcacttttttctttttcttctcctccatcaacttggtttctagatattcataacccccacgagacaacacctgaggggaagaggttttgttctggatgacctatgtcctttttcgcacaacctataaaaattaaatgttattgaaaggtaacattacaatgtataatagtcagtgaatctaaagtttaaaacaatgaaaatcagaaacttaactcccacgaagggtctctacgagtctgacaaaattggtccacttctccttgctaat

SEQ ID NO: 91441 - DNA, 436 bp, Glycine max
ggatcctaagcacctgcggcatgcactttatggtgttgagaatattttcttgtttgttatcatcaatataggggagaatgtgaatgtatgtatacatgatcttgacgatgtccaaagaagatatatactatgcttcatttgtttcaatattaatacaataattgttttaacaaacaaagcctttgttcaagaattctttaagaacaagccttgcctcacaatgataggtttcatgacattaaaggcacatgtaatcgattaccaatggtttgaaagtgtgttatcgattacacatcgtatgtaatctattaccagagacttctgaacgttgggaattcaaattttaaatgaagggtcacatctgttctagaaaaacaactgtgtaatcgattacacttattctgtaatcgattaccagagaggatttctaggaata

SEQ ID NO: 91442 - DNA, 349 bp, Glycine max
atgcgagtggtagcctataaatgagccagcattcaagtcttgagtttagattgaacgcttttgacacttgctagtggcgcgaaaaataccattgaaatgcaattgataccgaagaatattacctagcttacgttgggaagcgtgaaaagcgatacaaataatctttttttaaataagtgattgcgtataagcaactaatacgttgaaattaaagttaaactgttcgggtgacgattgggttcaattcttaacaaaaactaagtgtttatcggactgtaattattttttgtcaaacactagactaggtagagatattttcaagaaccggaggttataactaaaaaaaaaa

SEQ ID NO: 91443 - DNA, 327 bp, Glycine max
caagagaagaatcattcaagataagtatgaaaaagtcttgtcaaccactgagctgcacccggattcttctctaaacatgtttaccacaaagcttttactctctgggaatcgattaccagattgctgtgattgattaccacaaagcaaaatggttttcaagaaagcgtgtcaacctgaaccttacaacgttccaattgatttcaaatgtgtgaatcgattacaatattttggtgatcgattaccagtgtgcttgaacgttgaaattcacactctaatgtgaagagtcacatttctttcacaagaaatctttgtgtcatcctttacact

SEQ ID NO: 91444 - DNA, 416 bp, Glycine max
  unsure (1)..(416): unsure at all n locations
tctcctacgtgtgaaacactattatataatgagtttttgtttttttcctccatggatccnccggcctacttgagaacttatccactgaagaaaacattctaaagacactaattccaaaagatgccattgcggaagatggtcccaatctatctctttatatcggtggaacgttgtttatgaaaagaaccatccgagttccctattatgaaagagaggatggttgaagtctatcacccaccattaaagaggtagatcaagggatttttctctttgaattctttcatcatttttgaatatgacggcaagagtatcttgaatttcttgaagccatacatgacgatcaagcttcctggaaaataaggcttcgctgaagagatcagcaaaaattcgtaaacctaaaggagagcccaaagaag

SEQ ID NO: 91445 - DNA, 396 bp, Glycine max
agcttctcggccgtgattgactaaggcttttatgacgacgttggtctctgcgtgctatcaggctttttgtcttacaaacaacaaaaactttattcggataaccactcgggtatttccgccagtcagcgagactcaaaagtcagtttgacagatcttgtgagcgcggaagatgacgtaaatttccgcatgtcaacgggcttgtcggccgcgattgatcgatggcgcacaaaacgacgttagtctctgcgtgctattaagcttttcgtcttacagacagcaaaaagtttatacggataaccactcgggtatttccgcccgtcagcgtgactcaaaagtcaatatgactgatcttgtgagcgcggaagatgacgtaaatcttctcgtggtaacgggctt

SEQ ID NO: 91446 - DNA, 392 bp, Glycine max
  unsure (1)..(392): unsure at all n locations
ggataacacgcagagactaacgnncgctttgtgaccttcttcatttgcgggccgcaagcctgttgacacgtggagatttacgtcatctttcgcgcttacaagatctggcatatttgagtntttggaatcaccgctcgacagcggcgggaaaataactccgaggtaggtaattccttattaaacttttttgttgtttgtaagacgaaaagcctgatagcacgcaaagactaacgtcgtcttctgcgcccttcgtcaatcgcggccgacaagcccgttgacatgcggtgatatacgttatcttccgcgctcacaagatctgtcatactgacttttgagtcacgctgacgggcgaaaatacccgagtgggtatccgtataaacttactgctgtct

SEQ ID NO: 91447 - DNA, 363 bp, Glycine max
tctaacttatcaagaagaagctctgtacctccgtttgacaagggctcaatatctaagaagcggggttgaattaaaatatcacaaactatttcccttattaaaaatttatttcactttctattcaagttataaatacccttaaaaatgaacttcttaaatattgattcaaatagagcaatttgaatatgaatataaaacaataataaatataggagtttaatggaagagagattgcaaactcatatttatactgggtcggtcacacccttgtgcctacgtccagtccccaagcaacccgcttgagagttccctatcttgtaaagcttattacagatctgaccacacaagcaacccttctttggt

SEQ ID NO: 91448 - DNA, 448 bp, Glycine max
agcttgcctgacaaatgatacctctgacgtcttgatattggaccctaatcatcaccctctggaaaatagtgacatacactcaccctctatgacgtccatttgcattagatcacaattgtggattgcaacgatgaggctggcatatcactctctccctaatgcccactaaccatagatagttctgatctttctactacggtacaaagcctatttaggtcggacacacaacatcagaagagggctttagcgtacccctttttgtttatggtggcagggcaactacccttaagtgctaacgccgtggagccaaaacctataaatctggcgactctgccggagctggctgatgtgacgcaatgagacaactcaaacttgatcgacgcttctatatatcgcctcattatccgcaaaatgcgtatcttgtcggcttcaaaatccctcttccatg

SEQ ID NO: 91449 - DNA, 363 bp, Glycine max
tacatgaagcttgcctcggtaaaatggttcccatccttctttaaccggtggatcttcttcaactttgggatgcagcttcacaagacaattttccactatctgaccattgggatctttgaaaacatgtctggagtgtgctagaagcttccattcccgagagcatttcttatttaagcatttcagcctttgctttagtgtagcttagaaaaaacaccatttcttcttctttctttcttccaaagccatttctaaggtcccaagcactttctccatcacccacagccaccattagccaccacaaaccatcgttgttctccattgaaaccccacaccgagaggaacccttcaaccgaaacggaatct

SEQ ID NO: 91450 - DNA, 441 bp, Glycine max
  unsure (1)..(441): unsure at all n locations
acctcagagtcacctgcggctgcagcttttgttaaccacgaggatgtttttatttttataaaatctgngaaccggaataaagttnttatatagactgtgttgatataaatagagggtttttaatgcgtgtgggtacagaaaaaggtttgtcggtgtataagggatggaaggtgtacaaaagaaaaagcttttctcatagatagcgatgaatgtatagtttttgctcacatagaaaaatgaaacacttaagaaaagagaaagaaagacctcgatggtcggcatgttatggtcataggaagcataaataattcgcagagagcaaacatatcttttggaaacaagggactgacgctaagagtttattttccagaataactaagataagaatggatggattcgttgaaccgatgaaagaacataatttggaaatattgggtctac

SEQ ID NO: 91451 - DNA, 419 bp, Glycine max
  unsure (1)..(419): unsure at all n locations
tactatgtgcatggcnggcttccttcacttcctgtctaatttttagctnagacnaacgccctttcttcccgcgaagcttctctttacatccggctgagagggcttatatactaaaacatacttcccacgatatcctttggcatttatcaagctagttaatgccgccgttgctatgcctaaacccatttcgggtcgtaaccgttccccaacataactcgggccatcattactgctgcatcggacaggcaagcttgcccagagaaggagtccaccgaggaaatgcttaccacctcaaaagactggaaagcggtttctaatgacttctctgcggcttccacataacgcatataggatgggcagctcaccaagatgtctttctcgcctgatacgatgaccagatgcccttccactacgaattt

SEQ ID NO: 91452 - DNA, 308 bp, Glycine max
  unsure (1)..(308): unsure at all n locations
cgagcagcaccganngcccccggaagggaacccctacttatacggacccgagggaccaggaacagtccgggggcagaacccgagacgaaggcgggtgcatgcccaaaccaacagccaacccgaccaaccggacagagaacggggaacccagaggacccaacggggagcgtggccccccagaaaaacaaacccccacnggagcggcgctggcggccacggacctagagtaaaggaaaggcccggaaacaaaccaggggggaacgatacaagccaaagggaacggacaaaaggccggaacgaaccagggg

SEQ ID NO: 91453 - DNA, 400 bp, Glycine max
  unsure (1)..(400): unsure at all n locations
agcttgtgattggagatgatcagggagcgcttgnggcttatcttatatgctgcatcctgcatactgatcaagtagtatctgagaagtggattctctctgggggcaaagcagcttctaaagaaaaaatctctctggatgaattcaaagggtgtccccaagatgaagcagaagcaaacattctaggaaaagaccatgagttcttttctatagctcaggagcatagacccaaagaagctgtttcacaagaagaatttcacgattttgatttgagtaaaagaaagaagaataactggtggaagtgctttgtcaacctcacgaaaagtggtgaaagaaatgtaaggtccaaattgaatgcagggacaaattaaactcgaataataaaggtgaagcggaataaaag

SEQ ID NO: 91454 - DNA, 342 bp, Glycine max
  unsure (1)..(342): unsure at all n locations
ctgcagcttgtgctattcaatcactcctacatcgcatcactagtgatgcattcttttttctttaccctcccctgacgttcggtttgttaggganaaacacctatactctacgcgcgcgcaaggattcctatagcaccagatccaaacttataacgatgtgagatcacgaagagacacatgtaccgatgaaagcctacctgtgtgctctgaaagaacaaattgccctcctgatggaggccatgttacgtatgaatcacatcctggttaataacgcggacaccggcgtcgcttgtcttatccgctgacgaagcagacccgtctctccttgcaactacgcaccat

SEQ ID NO: 91455 - DNA, 403 bp, Glycine max
  unsure (1)..(403): unsure at all n locations
agctttctnatgagagtttgttttcttttttgttagcccgactctagcaaaatttgcctctttgtgaatgttcaagctgcttgtgacgaaatgcaatggggtgaggagggcccaccttcatcgctggtaaaaattgctccacattagtcaatagaagaccttgaaaatattgctgcagtaagcatgggcatgtcaatatatctctcctatcttcataatctcatatgctctataacaggttctgctttgattgtatgttgccttgactcttcacttggatggactggtatctttctgcttcatcactaatttcaaattatagccactagctggaacctaaatcttctaattgcacaacgagcctgtttggatcaaagctataagtccttttgacagctttaat

SEQ ID NO: 91456 - DNA, 421 bp, Glycine max
ttgatatggtggaatatggaggtcttcccctgtttagttttgtataaccaacaggctcattacaagacatatgccaccacctatagcaatggtggctatacgatctttagcaatttcccacacattatcaacacggtaacttgatacagttatcaaattgaaagtcaagagaaatatcataacaccatagtcataattcttcttgatatgggggatgaacctcacataagtagtcgtagctcctgccaaccaaaaataatggctcagcaacaacatttgggaatctccaatcacaggacaaaatacttgattacaagttctttactttttgaagatgaggattacaagttatcacatacatgacgagaaaaaaacttgatacaaggtcttcatttgtaaggaggatttccatttagactat

SEQ ID NO: 91457 - DNA, 377 bp, Glycine max
  unsure (1)..(377): unsure at all n locations
agcttgtggtgaaagagtcattttttgttttatttattgnaaggacaacaaaaaacgaggttgtatgaaaaggatattctgatcaagaactttttgtacagaatgggttagaagagcatatcggaaatgcatctacttatgcttatatgatttattcctatgatgttgggcatgccggatgtggacatatgacctccacttgtgttgggcagcgactgagattatcaacagcttgatattcaaacaaaaaaatgtgatgtccgcgttgaatcaaatttaacgtaatcgctcaacttaattcattcagatcttgtagatttaaagtagactatgcctagagaacgtaagacttacttctgtaccgatataaaccacat

SEQ ID NO: 91458 - DNA, 371 bp, Glycine max
cctataaaactcaagctgatagtaggcacagacagaaacaagcatatatttcttcacatatacctctagcatagacggaggtcccctgtcctccaattccacgacccttacatcttattcattacctatgctcctaatatcttggtctgacttgccatggctaacactcacttaacccttcaccactaatcccattcctcctaacactctaacctcccctctaaggttaagaccttcctgtactgcctcaaccacctcaccgttgacaccatgaccccgactctgccgcttgcttacccacgtactcacatcgaactcgaagttctaaggctcgatggccactaccccttggcgatacaaacctaccccgc

SEQ ID NO: 91459 - DNA, 392 bp, Glycine max
  unsure (1)..(392): unsure at all n locations
agcttgaaggttagtacacgacctaatctttatttttcgnctntacctaaaccagnctctgtattcatttaaaatgcatgaagatagatcagctggagaataattggatttgtctaataaactgattctagatcttgaaaatatccatgttaccattgatgatgaggatcaagctttgctattgcttgcttttgcctaagatgtactcccatttcaaagatgactctactgtttggaagagactctgtttctcttgatgaagtacaggctgctctgaattcaaaggaattgaatgaaagaaaggaaaataagtcatctacaagtggtgaagggctgatagcaagagggaagaccctctataaagatagtgtatctaataagaagaagcaaaa

SEQ ID NO: 91460 - DNA, 425 bp, Glycine max
ttcttctcgaggacatcgacttcttctccgacgactacttattctcttacgatcaaatcaacctctcccctattccaaatcgccctctacgcactactccgacgggtcgttcatgaattagactaatggtcgttactggcggtttaaaccgccactagtcctcattctaccagttcaataaccattacagaaattgtggacacaaatgcaccttaatggaagttcacataaccactggaataaccgacgctaaatattttctttcagaacaagcaccttcaacttagtattttcttgaaactaatgtttctctacatgcaaattgatcaaacaacattcaacatcatcagaaaataacacttaacaatcaacaagataagttacgcaacacacaacaatacgttatttaagacacattcacttaa

SEQ ID NO: 91461 - DNA, 412 bp, Glycine max
  unsure (1)..(412): unsure at all n locations
agctntaatagtatgaatttgcttgctcttctttatatctagnnggnatttgtatgttttgatacacatcaaaactccgttttttgtacaaaaatttagcataaattatgaaggacacttgtgttgtgtttcccaaggcagctaatccaaatcaaggtagtcttaatatattgttgtcacaataacttatcaccaatggtgagtagtatgatcaagtcaatggccaagaattattatgttaagtgcactgttgaaatggatttagctaggagagacctttaactcaatgggatgatgtctcattattaaccaaacaccatgccaattagcttcatttgattntgttgatataatgatactangatatcaagatcaacccatnttaacccttcaatctcatagcataattata

SEQ ID NO: 91462 - DNA, 415 bp, Glycine max
  unsure (1)..(415): unsure at all n locations
tctggatccaatttataataatatatatcctcttatcaacacggcgattattataactctctgtaataaaaagaaagaaactttggatgattgaactctttaaacaaagtaatactttatccaccaagttataaatgggggctttacttcgtgtatggattttttgctcttttcaatttcaccttcccaaattgggtctatgattgcttggagttccaacaaaaggttaaaaacatcaaaacactattaaaatgcactgccaaaccataaaacagtctanaaattgatacaaccagagtttgaattgacaagtgtaacatcccagtttttcctaaataaatttaaaaagctttttagtaaaattaaataaataaataaatatagagcacattataagatgagtaccctatgtata

SEQ ID NO: 91463 - DNA, 412 bp, Glycine max
  unsure (1)..(412): unsure at all n locations
agctnttttgttcggtgttgccaaaaaatttataatgnagggcggctaggagttttcgtgctatctcaaccgaggttgtgtttcggccgacattggcatgttctcatgcactcggccaagaaaacattatcccacatcgaaaagaaaaaaaaaacattaatcaccgattttgatcggaaaaaatgctggttgacgtcggccatgaaagatgaccgatcgaggttctaaaataatagaatcaccggatgacgccgatcgagcatttcctatatgacatcatccaaatattattcaaggattggatagaaaaaacaatagctgataccagtcgntatgtatgcccgactgacattcttcagccgacaatgcacagtatttttatacaaacgctggccgataatatatccttacg

SEQ ID NO: 91464 - DNA, 412 bp, Glycine max
gacctatagatactcaagcttcctctaccgtaaaaaaaatattatcggccagtgtctttattaggaattgcgcactgtcggcagaaaaatatcagtcgtggctatataacgaccgatgtcacgtatttttgtttcaattcaatccctgaataatttttggatattgtccaataggagatgttcgatcggcgtcatcaggtgatgctttatattttatacctgctggatcggtcatctttcctggccgacatcgactatcattattttttatcagtgtcggcgaataatgttatttggccgaggagggctgatggttttcgagccgagtaaatgataacacgccagtgtcggccgaaacacagcttcggttgagctcgcacgaaaaaacaaaacccacctacgtttgaagttt

SEQ ID NO: 91465 - DNA, 410 bp, Glycine max
  unsure (1)..(410): unsure at all n locations
agctagtaagaatattgggtacctattacttgnggtactaagaggcggacgggcgatggtgcacaaccagttgtccacatccacaaagcgcgcataaacccaccatcccctgttgcccaccttcaactgaactcacgtactcccacgtagcccatatcctgttttctctcaacaccgaggggcccagtaatccttccaagctttcccaacattaaagcgaaacaacatttaaacagcacaagctatcacagccaagcataacagagcaaaggcagaatactctgtctaaacaccaaccaaatcacagctttgctcacttaaagaccccagtaacaattccttcgatccaattcgttaaccgttggatcgactccaaaactttactggaagtctataatacataagcctac

SEQ ID NO: 91466 - DNA, 409 bp, Glycine max
tgcccagataatgagtctactgacgacattcttttctctctaaagactggaaagccgggtactaatgactctctttccggctccactaaggcataaggatgggtactcaccagaagttttttcgcctgatacgatgaccagatgcccttccactacgaatatcaacttttggtggagtgtatagggaacaactcccactgagtggatccacgggcgccccaacagacagctgtagggggggttaatattcattatttggaaggtgacttgacaggtgtgagggcctatttgtactgggagatcgatctctctcctaacctctctgcgagtgccgttgaatgcacgaaccaccattgaactcagctttaaatgggaagcatttgaatggtaatttctccaaagtgctctt

SEQ ID NO: 91467 - DNA, 336 bp, Glycine max
  unsure (1)..(336): unsure at all n locations
agcttgcccagagaaagagtccttgtgttgttattcttaccacctcaatagactggatagcagttttcaatgactcctctgcggcctccacataaagtataaaggatgggcagctcaccaagatgtcttcttcgcctgatacgatgaccatatgccctttcaccacaatattctatctnttgtgggagggttgagggaacaactcccactgagtggatccacgggcgccccaacagacagctgtaggggggggggggttaatatccattatttggaaggtgatttgacatgtgagagggcctatttgtactgggagatctaactttccctaacctc

SEQ ID NO: 91468 - DNA, 399 bp, Glycine max
  unsure (1)..(399): unsure at all n locations
cccagaggggatggacctttnaggtttgtttattataataacaatgcctatatgttggaccttccacaagagatggatcagcacacttttacatttctgatataactccttttgcaggtggagctgatattgaggaggaggaactaacaaaattgaggtcaaatcctcttcaaggggaaagggatgatgcaattcttcctatgaagggaccaatcacttgaaccatgagcaagaggctcctaaaagattgggctaaagttgttgaataaggccctataggtcttatgaaccttatggtagatttctgagcccatgggccaaggttgggtccaattatctttgtacatattagactaggatgtccttatatttggtccttgtatataaggcatcatattg

SEQ ID NO: 91469 - DNA, 416 bp, Glycine max
  unsure (1)..(416): unsure at all n locations
agctntagcctttgagtattcaccatgttgtcttctctatctttatacattttccctttttgggcttgggtgaagacaaactttaactatgacattgagtgcacttggagagtcttgagatcggattggagactttaatccttagtcctatcctgaaaatttcttaacacttataagagattaattcatcatcattatcatatatctcaattcatcaacatatattaataatgcagtgctcaatgctatgcaatgcaatcaatatgcaatatgcaatagtgtatattctcccccttttggcattaaccaggccaaaaagtgtgattatacagaaaatagaactcacaagtaaaaaaacaaaataaaaccatatttaatttagcataaagcattacataaccattaatcaaaagaca

SEQ ID NO: 91470 - DNA, 427 bp, Glycine max
  unsure (1)..(427): unsure at all n locations
ccttgaactcgcttgccttactgcccactctttgatgggcttgttttgttgtgcctcttaccctttgatatttgtattgcatatgcctcatcatgggttgcgtgaaaaaaaagttcaaagctaaaaaattttcttcagagggcaaaactctttgntttaatcgattacagagttgtcgtaatcgattacaacaagtgtctgaagcttgaagagttgagtctcatattggtttaatcaattacagtagtctcataatcaatttcactattgtttgagacaatgactgatttattcaaaattctctgctttaatcgattaccaagtgggttaatcgattacttctctctcgtttagttgttcaaaggtgaacaaaaactctttaatcgattacctagagcatctaatcgattacattattcttgagtta

SEQ ID NO: 91471 - DNA, 270 bp, Glycine max
gaaacgcttgcaggctgaaaaaaagccaccatgaagcacgaagtacccctcaaagcgggctagccttatagctataaggataggacacagctatccactactgtgaccacagtaagaataaacattggccgatattccatgtactcatagatagaaaggtcaatccttatagacgcgctgagattctaatatttgaaacagggcactttgcgagatgaaatccatcctcacgagattcatctatgcagatgttggcgcatgttatgactt

SEQ ID NO: 91472 - DNA, 399 bp, Glycine max
  unsure (1)..(399): unsure at all n locations
agcttatncggcccttcattagcaaagccttcatagttaaatattgcatgcccagcagcangaggaaggccagcatcagccagctgcatgcgcaccgctgccatctttataagagacaccatccttggagtccatatccgctcacctggggaggatggagctctagatgcacgcttacatgcagcaagtgactaaccagcaggcgggtaatcacacgggtgaggtgtagctaaacgagagcttctacaggtacacccaacaccaggcaagccaggacctcagtccttatccgtgacctacccccgaacaatttaaggccacaattgcctggcccgaagatgagcccaattatgagataggggcaaaaccatgaagggcccctggggaccatgatggagc

SEQ ID NO: 91473 - DNA, 277 bp, Glycine max
ataacctatcaattaaaatatcctttcttaaagcaaatctattagctttttgtgggacaaatgaaaaaatataccaaaaaggcaatcggaaactttttgagtttgattaagtcgttagcagaatttaatcctcgtatgcaagagcatgttaaacatattaaacatggtgaccttcataatcattacttgagtatgactatatagaatgaacttatagaattggtaacttctccaaaaaaaatattatactaaaaaagctaaagatgcaaaatatttt

SEQ ID NO: 91474 - DNA, 430 bp, Glycine max
  unsure (1)..(430): unsure at all n locations
ctgagctgcagctttggtatcgatacatgattggtaattcattaccttgacaagtttgacaaaatcaaagatgtacttcttccatggtttcaagtttttctaaaagttataacctcttccaatgggatgttcttctgacccagacaatgaaggaggtctataaaaagcaagaaccttgaatctgcatctcaattaacctgtttcattatattctttttacaaccctttgaatctctttgaacatcttcttgaacttcttctttttttttctttgccagaagctttctaaaagttttcttgggttccaaactgatgcaagctccattggagcttgtangcctaagatcttcttcatcaatggattcctttgcttcttggaagataaatggcaccggtatggagaaagaagagagagaggagacgccacttc

SEQ ID NO: 91475 - DNA, 268 bp, Glycine max
ctaatagatgcttctctatccggaagacattatactgacactgcctaacgaaagccaccactatgcccttctcagaatggactcaggaatgcttcacgttaggggaccaggcaatagctatcccagttagacttctttggaaggaatgtattagcaattccttattttttgcgtatgcccgcgtcttccgatacatacatccttagatggttcatgaggcaagtatttcccttgtacttgtcaaagtccaacaccttcggacttggga

SEQ ID NO: 91476 - DNA, 413 bp, Glycine max
  unsure (1)..(413): unsure at all n locations
agctagaaggactacgttacactgatgattttggtcagnaagacatttactacatcacaggagaaagcaagaaggcagtggagaactctcccttcttggagagactcaagaagaagggctatgaagttcttttcatggtggatgcaattgatgagtatgctgttggacaactccaggagtacgatggcaagatattggttcaactacaaaggaagggttgaagctagatgatgagactgaggaagagaaaaagaataaagaggagaagaagaagtcatttgatgaactctgcaaggtcatcaaggacattctgggagacanagtggagaaggttgttgtctctgacagaattgttgattccccttgcttgttggtgactggtgaatattgatggagtgcacacatggagagga

SEQ ID NO: 91477 - DNA, 418 bp, Glycine max
  unsure (1)..(418): unsure at all n locations
tgtgtttcttcatcgcaatctccattntctatgccttctgtgattctgaaaattctgtatctggcctttattgtgtcccgaatatccaatttcctggctattgtggagtttttgcaatggtggtatcaacattggcatcagtttttgactctgtcagcttggtcgtgttcttctggtgttgcttcccacctatgtgtttattatacatgtccttgctattacattcacaaattacagttttatcataccttgcttttctttgcaggattactcgaatgaccagccccattattggatatccttaaagaacaatggtcaactttcctaaccttaactctttcttgcataacatgaggtgaaacaaaactcaacaggtgcaacttatcccaaagatatattgaatatcaacaacttgagt

SEQ ID NO: 91478 - DNA, 345 bp, Glycine max
acccccaggaggcacataggtcaagaaaactcgaggctaaccccggccgaaggaggagacgccaaatcaacaacagcagacctacctagagccactaatctaagtatgcacataaatgccataccaccatcctacaacactttgggaagagaggggtaataacacaagaaccccatgacccccagcatcacggaggtgacggctccctccaactggaagaactctaccactaagaggtacacaaacaccatcgaaccacacagcacccggggtggagatacccaggaagcatgacaccacggaaattgaatcctatgtaaggaactcgaaacacaaaggcaaccc

SEQ ID NO: 91479 - DNA, 402 bp, Glycine max
agcttctatagaaggatcacttcttattttctacttttgcatcacctctcaatgagttggcgaagaagaatgtggcatttacctggggtgaaatacaagagcaagtctttgctttgctcaaataaaagcttactaaggcacctattctcgcttatcctaactttttctaaaacttttgagctaaaatgtgatgcctctggagtgggagctggagttgtattgttacaaggtgggcaccctattgcttattttagtgaaaaacttcatagtgccaccctcaactaccccacctatgataaagagctttatgccttaataagaacccttccaacttaagaacattaccttgcttccaaggaatttgtcattcatagtgatcatcaatcacttaagtacattaga

SEQ ID NO: 91480 - DNA, 414 bp, Glycine max
ctcagcttgtactgtgcatcaaactgttattgagcttgaaatatctatgtctcctagacatttaattaccttttgttgattcctgtgcacacatggttactcgtgttgttagtctttccattcactcggataagactttgatatttaattggtaattgtactaaggatgtcctcctctacaagtgcttatattgtgaaactatttctatgtgatggctgtgctggaaatggctttggtaatttatgcttaattattatttataaggagtatgttagtgaattataactattaattgtcataaaatacatttgttctgtaacttactaaatttatccttttaaaaggaagtgtatgctaataagtgagtataatacttgttaactcacacgccatttttaaaagaagaaagttac

SEQ ID NO: 91481 - DNA, 417 bp, Glycine max
  unsure (1)..(417): unsure at all n locations
agcttaagtactatgatgattcaacatctttgtggtttgtgaccactggtggtgaattgggccaccccagttcgcaaaccgtggcggaattggtctagattgagaagtacgacgatgcttacaagttggtgtatttgccaagtgtgtgcagtgattgttatcatcaatgcagcgatattggaatatacccagatcaatatggtaagcgtcttgctctaagttctgagccatacaaagtgcagttctagcgatgttgggcatgtgaatgagaacaagcgtcttgtgttctcacttctcattaatggagcctaagttttaaatatcctatgaatgtgcaattctccccttgcagttgcagtagtatagaatttccctcgaaatattanagcaaatcataatgtggcagttcaataaatg

SEQ ID NO: 91482 - DNA, 312 bp, Glycine max
aagcacacttggacacaaaattaaagattccgttccatacaatgacattctatttctacatcctctgttagaggtcctataatataatggacactctctttcactcttatatttctttcgagaatacactttttttcacttaaattatagcaatcatgtaaaatgaggaataactaatacttaatttgaattgctaataaagctaataggggatctgtaaaataactctcccttgattattctggattctattgaagcaaaccacactaattagctgacataactgcattgtttacaagactggcacttgct

SEQ ID NO: 91483 - DNA, 409 bp, Glycine max
  unsure (1)..(409): unsure at all n locations
agcttgaaaccacgtatagcacaatcctctgtctcatcataatgaaaccccactttacaattcttattgatactcttatatgggtagccaaatggacaaaatgacccantaattttgataagaaccttctgacaatgccaccggacttgtttagaacttaataagaagagcatcatactagggtgagctcataccttgttaactggcagcgtaaaaagctttgatctttgagcacccacgactgttccaagagcagtctatggttttcttcgacccacagttccaacaacaatgtaggggtttcttcgacttttcttcgataggaggttctgtgggttccagcgtgaggtttccgacaatattgaaatgaatgtgtggcaatgtgggtgtcgaccgagcggtttccggc

SEQ ID NO: 91484 - DNA, 440 bp, Glycine max
tatagaaactcacgctcgtcgtaattgattacatagttattcgagacaatgattgattctttcatgagtctttcctataatcaactagcatgtgctataatcgatcactcctcttttaaaaagggtctcataagtgatcaacaacactttaattgattaccttgaggatccaatcaattacattggtcttgaaaagcttccagtttttaagaagaacactctaattgattgcaatgatcacataatcgattacttctttaaaataattgattacattgtatatttaatcgattacatgtggttataactattttctctataaatagacacattgtgttctcacttttaacaacttcagtatacataagtttattaagtgcataattatacgagctgaaataagtgaaagaaaaaagaaaagtgcttagaaatagtgactc

SEQ ID NO: 91485 - DNA, 408 bp, Glycine max
  unsure (1)..(408): unsure at all n locations
agcaagctttgtggaagttattactgttcttttttatatcnagaggggaatcttccagtgttgtaagtcaaggatttttttttgaattatctaattagagtaataatttttttgttagaataaagtatctatgtctaggttaagtttaatagagcaagcaaatagatttttgttttatttttatcattcacaaaatatctaattgaagtaataattgttttatttagaaaaaaaatttgaacgtgaagtttaagcgtattaatttttgtaattaggttttttactttgaagttattttaattatgtttaattattttcaagcctttgttgatggtgttttaggccttacaaatatttacctgatttccttctagtttttttaagctagaatgaaattctaatctgtag

SEQ ID NO: 91486 - DNA, 415 bp, Glycine max
ttgagggtgcgcagcccaccatcctttcattgtatagctctgattatgcgcctaccatcatgattatcgtcttccatttcattattgggggttccacctgtgccgccatatcccttcaccttttgggcgtgttctttgaatgatccgtccccctttttgcacatgttctgttgttgcatcctattcggaaccatatctaaattgtactgatactgtctatcaaaggcaaccattatgtccttccaagaatggactcgggaaggttccaagctagtataccaggtaacagctaccccagtatgacattcttggaaagaatgtatcagcaattcctcatcttttgcgtgttcccccatattctgacaatacatctttagatggttcttgagacaaatagtccccttgtacttgtcaa

SEQ ID NO: 91487 - DNA, 435 bp, Glycine max
  unsure (1)..(435): unsure at all n locations
gatccttaagacacctgcngcatgcaagcttgacaacatctanacattaacttttattttaaagacgctatatctgtagcttattacgagacgtgcactctttggtggtgatcagaaattctcgatgatacttctgaatctttagatgatatgcacacctataatgaagggcccattggcttaggaaatggaaaatgtgtttaatatgataaatctgtaacaagttcacatgcctatttttcataagagtggacacacttcatcagatcattctcttgataatattatccgtgacatatcaaatggggtaacagctcgacactctctcaacatgcatgccctaatacgaatcttgattcttttatagaacctataaactcaagtgatgccataatcgaggaacatcggctcattgttatgcaacatgagtcatat

SEQ ID NO: 91488 - DNA, 329 bp, Glycine max
  unsure (1)..(329): unsure at all n locations
cgccctctgnagtcactagcacaatacacaaaatgtcgcacgtgttctatatgacacccctactcgctaatgagagcttccatatgaggcacttgaatgaccagcattaaatctcatgttgaactgccatgctgaagcatcaacactctttaagggttcttgagtcacacttcagcacaaatcaaaagtgtttgtgcgcatagaaggagctcgccaccataagggtaacaagccaggcttctaagataaacagatgcggagtagctttatgacctagaataatcccttacttacttgcgaaatctcaaaaatcacactataaagacggg

SEQ ID NO: 91489 - DNA, 185 bp, Glycine max
actatcttatattagaaagtgaagaaagaatatatgatattgctcttaagctcattttgtgtgctaaaaaaagataatgttaaaacttcattagaatatgaggagtaatatttatgtataaaagatatagacgtaatagttcaaaactaaattattacgattacaattatacttttagcatctaa

SEQ ID NO: 91490 - DNA, 412 bp, Glycine max
  unsure (1)..(412): unsure at all n locations
tcatgagaattactgctgcagacagnattattatagctctccctaagactgataatgcttaagagtttatgatgttagtgggagagcactcccaagcaatgataaatctcttgttgggacattaatgagtatactgaccaccatgaagtttgatgattcacgtactatgcacgatcatgtcattgagatgacaaacgttgcagcaagacttaagaccttgggaatggctgtgaatgagaacttctttgttcagtttatcctaaactcattaccatctgagtatgactcattccaaatgagctataataccctgaaacataaatggaatatgcatgaatngcatagtactgtagtttatcatgaaacgatgcttangaatcaaggaagttactcagttcattatgtaaaccac

SEQ ID NO: 91491 - DNA, 419 bp, Glycine max
attacggacctatgatactaagcttcgagatgtgagaccttcctgactatgaggtgccgtttgctcccgtctagagactagagagctgcttctagaactactattacttgtagtaaataccatatggatagacaaaatttacgatgtcatctgatcacagaccaccatgggatacactgtgtatactaagtctatagtcttctacgatagctagtttactacgtatatgaaagataatttatgattgtgtgatggtgcatagaaataaactctattttattcttcacttgtactttctaaaaattagttcttaaaaatgactctataaaatagattataagaactaaaaaacatgaatgcctgttgccacctttctccacaattgccttgtgagtattacttgtttaaggcagcgctga

SEQ ID NO: 91492 - DNA, 384 bp, Glycine max
catgataaaacatgctctattttcatctcccactccaagtaggcctccgaatcattctttgctttaaatggaggaatgttgagtctaataccatcaattcggttttgcctaggaacaccatcattccctcttctcctccattgttctgtattatgatctctatactccattggatccaacctctcatggagcgcatcatctcgttgtttcattaacctctccaaatgttgcatcaaagcttgcatttggaattgcgaaagccccactccatcattatgattagtacctgacatctcatacaaacaaatcaaaccgtacaagacaattatagttgttgtttgaatacctcacccactcaagtgtatcacacacttatggcttttc

SEQ ID NO: 91493 - DNA, 285 bp, Glycine max
  unsure (1)..(285): unsure at all n locations
catgagaattactgttgcagacagnattattatagctctccctaagactgataatgcttaagagtttatgatgttagtgggagagcactcncaagcaatgataaatctcttgttgggacattaatgagtatactgaccaccatgaagtttgatgattcacgtactatgcacgatcatgtcattgagatgacaaacgttgcagcaagacttaagaccttgggaatggctgtgaatgagaacttctctgttcagtttatcctaaactcattaccatctgagtatgac

SEQ ID NO: 91494 - DNA, 204 bp, Glycine max
  unsure (1)..(204): unsure at all n locations
gaagagctgtactctgctgatcatagatcacaatgggatntctacaatgaacatgctgctgacgtattnctatagattagagattctcacgcattgcattagtatcacatacaattatgaaacatgtttgctggntttcaagaggagtttcttaatcgtcacagaaccttatntcttatgttattggatctatctaatgcagca

SEQ ID NO: 91495 - DNA, 220 bp, Glycine max
gtcacgcgctcactattattttggtaatctgcagtcttaatatggtagtagtctgattgctgattaggtaactacctaatctcaaacttagaaaaactcaattagggatgtacatgagttgcataaagataactgcaataaatttgatgtgagtgaatttatttctgtttttgcaactattgtatgatgataatctttaccatattgatgagcaatcttc

SEQ ID NO: 91496 - DNA, 310 bp, Glycine max
  unsure (1)..(310): unsure at all n locations
tctnttccctataaatatggggaggagggaagattatttatgtccaaccctcctggtatctgaggatcacttgaaattactgaaaacaaactcatttccgtaaagaataatccagccgatgcgcttccataacgcgtgcgaaacgattacgtgggtaattatgtgaagattatccgccgtctttcgttcgctcttcttagttctatcatcttcaatcggctagttcccgtaaattatctcttctatatatattatgttccctcagtaggtgctccgctgtttaaacataactataattcgattatacata

SEQ ID NO: 91497 - DNA, 118 bp, Glycine max
  unsure (1)..(118): unsure at all n locations
cgatatttatcatcatggctaggttctctatacacatatatacatagaccaatcacacgcgcataggatcaaatatatatagatatatcttattaaagatnattccatcatgtacaat

SEQ ID NO: 91498 - DNA, 412 bp, Glycine max
  unsure (1)..(412): unsure at all n locations
aagctttctttctataaatagaagcatgtgtaagacttgttgtaactttgatgaatgagagtcttgtgagacacaactcanagatcaacttctctccctttttttcttccttcaattacgtgctcccccctctctctttctctccctctttcttttcctccattgaagcatccttccaagcttcttatccaaggctcatcttggtggtgaagctccttcttccatggcttattccctagtggatggcgcctcctctcccctcttctcctttgtcttccgctgcatctccatggtggaaaaccaccattaaaggacctcattgaagctcaaagatccagcctccatgaagctccacaagcaagttttcatcagatatagtttattcagagttgagaccaaagagtacttgtgc

SEQ ID NO: 91499 - DNA, 442 bp, Glycine max
  unsure (1)..(442): unsure at all n locations
cgtcgttgaatgtcgaatacatgttatacaagacagcacattgttaaagaaagtttnggaatcaggtggtgcactactacatacatcagcacaatcgacaatttcagactcatcagcaccattttgctttgccttctcacactcattcaagaatgtattgaatgcatcttcaacatatttaactgcgtccggaacactcatgttctcagttaacttgtcggggtatatactctttctatgatccccattcagagttgctgccatttgtaccaattcttcttgaaattcactcaacttggccttttcttgagcaggagcttctcgtagttntacaggttcaggcaatttcactgcaaaaattagaaatttaaattgtcattaatactactatatgtcaattaaggaaacaataatctgtccattctaagtgagtatattacta

SEQ ID NO: 91500 - DNA, 243 bp, Glycine max
atattcctcttgacttctttgtagagaactttaagtattccatgactgccaccaatggtgcttttcatcaaacaaaacattgaattcaataaaaaacttatgccattccacttaaacacaaatcatgtgcataaccgaaaacaattggcgaccatatctcttgcaacataaacaaagcacctacttgtacacttgccactcgtatgagggccatatttacagcctttgctgttcctgtgctca

SEQ ID NO: 91501 - DNA, 430 bp, Glycine max
  unsure (1)..(430): unsure at all n locations
cttcttgagcttcttgtggagtctctgcttccagcggcagatcggatttgagagaatggcgcggctccagcgagttcggcctttggcagtggcggcgaggacgcggtcagcggaggcgcggacttcgatggcggcggtagggttgctgttgctgctggacgagtggaggagcttggaggattataggcgctgttcggttatggaagtccatgagggagtgagagcgaaggacgtntggtgtgtgatttggcggcgcttattggtaacggaatggaggtttgagtgcaaagacaaagagtccatgatgtgcgaatgaagggatataattggaatgttttggaaacagagaagattgattgatcgaaaatacttctccacgaggatgaagatgatgatattcacaattcagagtattataaagagaaagaga

SEQ ID NO: 91502 - DNA, 414 bp, Glycine max
ggttgattggaattatctgttggttgttatgatcaagatgtggtttcatcacaaatgggtggattcgatgaaactttgccttgggtctacgcaattctcagtaatggctaatgaggattctttgggacctatttctcctatgagagggctaaggcagggtgaccaattgtcaccttacctgttcattatttgcactgaaggtctttcttcccttctaaaaaaatctgagaggagtggtgagttacatggtatcaaggtgtgtaaaggagtccctgtcctctcacaccttttacttgttgatgattgttcttgctttgcacggtaaatgatattgagcatattgccttgaaagctattctagattcctatggtgaaaattctgatcaagcaatatataacctgatatcagagatc

SEQ ID NO: 91503 - DNA, 440 bp, Glycine max
  unsure (1)..(440): unsure at all n locations
cgcccagctcgcccaggcgagcaaaggtgcttcctttttattcaacagccttctggagggcccaagtgggcctggttgctatttgcacccccctgtttactaaatgcaccccccttcctatttttttgtaattcttttttccgtaacggtacgaaactttacaaatttcgtaacgatacttattttccttccgcaaggttatgaatccttacggattatgtatttaatcttttttagctttcgaagaagttacggaaactcacggattgcgcaaaaacacctcttttcgatttccgccacattacggaatttcacgaatcacgcaagcctgcttcctttcgatttctgagacgtctcgggacttcatttattgcatgtcatctagtaataatcccctgacaaaattaaggtatgacacccncgttatgtgttttatcttt

SEQ ID NO: 91504 - DNA, 249 bp, Glycine max
tcgggagatctattttacctacaattgtaaggttaaggagatataaataatatctatacttttacatattccgtcactactttattattttaaacatgaacaattacttttatattataatctatctattcaaactagctgcttctaacatcccaacatctccctcaacctcttctcaacaccagagcccttattccactttttgaaccaacctctcagatccaggatcaaccttctcccatacccact

SEQ ID NO: 91505 - DNA, 404 bp, Glycine max
  unsure (1)..(404): unsure at all n locations
ctctcttctctctctgcttgctctctcttctcttctctctctctcctctctctctttttcgntntaggtttagagttctactctgaattcgttttagtctcttttttgttttggaagaataattctagttttctttgttttctactgattaatggaaggctaagtctccagcgttgttttctcttgaggatcaagcacaactctctntgaggttctattattactattaaattctgatcaatttttcctcttcaccaattactctgtatttgttgctattaattcatgcatgcttagtgcttgattaattgtctctgcgcttaattatgttcatgcttaatgatcattcatgattaattgggggatgtgttgcttaatcatataatgaatgccttatgttaaat

SEQ ID NO: 91506 - DNA, 308 bp, Glycine max
  unsure (1)..(308): unsure at all n locations
caacatccaactctgactcgttctgaaatctatgtggatgtgcttgcacatgtgcacacataataatcataanatttcaactagaaagaaaaactaataaatatccattatgtatggcataatatatntntaacttncaaagaacaatcctgcggctgtgagcttanagtgagttcctgagttaagctngagccaatgccatgaacttgatttcttttatggctgaatngaagttgggtctagaatcacttctagcctcaaatggactatatggacccaggtggaaactgagagtatgggaaactatg

SEQ ID NO: 91507 - DNA, 226 bp, Glycine max
aaggagagaagttgaactttgagttgtgtctcacaagactctcattcatcaaagttacaacaagtgttacatatgcttctatttatagactacgtagcctccttgagaagcttctttgagaaaacttccttgagaagctagagcttagctacacacacccctcttattacttaactcacacttcttagaagcttccttaagaagaatctaaagatgcttgagctta

SEQ ID NO: 91508 - DNA, 394 bp, Glycine max
acgctcaacaaagtactttcgacacctactgtacgttgatttgaccaatgttgttatgggaatgttgcgacaatcctttaaaaccttattgatacattctgagaagttggttgtcatgtggccatatcgacgtctgttagctctttggcaagtgtaccaaattgctcgtagtaataatttctcggtaagccgagtgttgtaccacagggattttgttgcacttatgtgaagtacttttcagtttgcaaattgtaaatttagtgtataaaattaaaggcaatttaaatctatgtagctacttctaaattaaagaaaactaaagcaataaataaagaataaagtctataaaatattactaaaatctaataacctaagtacctacttctaataaaat

SEQ ID NO: 91509 - DNA, 436 bp, Glycine max
ccctgaaggttgtcacatgttctctcctatctctatatactccgccttttgtgctttgatgatgccaaacttgaatatgacattgagcgcctctggagggtctgagtcttgtgactggagacttggcccttagtcttatcctgaataattcttaacacttaagaaaagattaattcatcatcatcatcatatattgtacttatatatactactaatattaattcatttatcaatgcttatgcaatggaatcaatatgcaaatatgcaataatgtatattctcccccttttggtattaacaaggctaaatagtttgattatacacaatacagatcacacacaaatagaagggaaatagaaccatatttcattaatcatagaacattacataaccatgtatcaaaagacaaataaaaacttaactatcatgggtaaat

SEQ ID NO: 91510 - DNA, 114 bp, Glycine max
gacatcttttgtcttgaaaggaattgccatgacacgtttattgttactatctttgatatttgggaattgatattgggttgcgggaggtaattccgattggattaactcaccatc

SEQ ID NO: 91511 - DNA, 367 bp, Glycine max
  unsure (1)..(367): unsure at all n locations
cgagctcgagcaatgcaactgaataactttaactctgatgtccgattgagtcgcatgatatatcgagacgctccanattgaagactgaagtaacanattcanacgaacataactttgtacttggaatatccgatgagtcccgtaatatatcgagacgctcgataatgataacagaagctctgagcaaattcanacgataattactntattctctgatgtccgattgagctccgtaatatatcgtgacgctccagatctaatatagaattttgtacacattcaaacgatataatctctactcggatgtcgatgagtctgaatatgtcacaatactgttactggatgtctgactgagtccgtatatatc

SEQ ID NO: 91512 - DNA, 428 bp, Glycine max
  unsure (1)..(428): unsure at all n locations
ctgagccaattcanacgacaataaatnnttactcggatgtctgattgagttcaataatatatcgagacactcgaaattgataccgaagctctgagcaaattcaaaagacaataactnnttactcggatgtctgattgagtctcgtaatatatcgagacgctcgaaattgaataccgaagctctgagtaaattcaaaagacaataactttttactcggttgtctgattgagtctcgtaatatatcggaacgctcgaaattgaatatagaagctctgagcaaattcaaacgacaataacttttttttcggatgtctgattgagtcccataatatatcggaaccgctcgaaatgaatgttgaagctntgagcaaattcaaaacgaacaaataacttttactcggatgtctgattgagtcccgtaatatatc

SEQ ID NO: 91513 - DNA, 154 bp, Glycine max
tagcctcttctcttgattgctagaaatgtcgaaaaatcaccagccttcacttctacttttaggattcagtttactctttttcatactcactcacgtatctaacagtttatatctttccgggggccattgtcatgattatttgttcatacttttc

SEQ ID NO: 91514 - DNA, 420 bp, Glycine max
  unsure (1)..(420): unsure at all n locations
tgaaagaatatggaacattggaacattattaataattattatttgatgaagctctattacggaaaaactttgtgcttgtgtacgaaatacttgatgaagttattgtgattttttctttggtgggtgtaaactaagatgagttaagaatacccaaggcctcactcgtgtacaacgttgatgacctcaatgggggcaatacaagccacaatctttgcactctgtattgagaaagattggagccaatggaagttgggctggaatattangcttctaacttcagcgttttcggtatgctaatttcataattatataacaatggatggtgaattaatataccaataattaattattaatatattataatattgtggcagggaattgcggtctctggattagnttaattagcactgcttggtgtgt

SEQ ID NO: 91515 - DNA, 442 bp, Glycine max
  unsure (1)..(442): unsure at all n locations
cttgaatctcgaagngnncttgattctatcttgaatatcttgaactctttctttgattgacttttgagctttttgtcatcacctttgtcatcatcttttgttatcatctttgttatcatcaaaacatatttgaatcaatcttgattcatcatgaagctttgcttttacaatctcccccttttttatgatgacaacttctgaaatcaagaaacacacacacacacactttttcctagtcgatcactcacataaatntccattctccccctntgtttttgaatttatgcttatcttanaattaagttgattactcatgtgagttcttgatttaatctccctatttctctcccnncttggcatcaacaaaaattcaaagtgcgtattcaaattgaagtattcaatataactaaacatccatacaacattcatggaaaaaatatca

SEQ ID NO: 91516 - DNA, 404 bp, Glycine max
  unsure (1)..(404): unsure at all n locations
gctcttagtacgcgctcacttacttattacctaacttcgcaatgttataacagtggtaagccttatctttatatgacactacagttggctgagactaaaacttgtttattgtactgacactgatgacagtctttcttatagaaaagcccatccaatctaccttgaacactgtggttcaattttaataaagctatatatgtatgtgggtcgacaacactatcatcaccaactttacttgatcactctaagaacatgggcacaatattgtctctctctgatacaattactcctatatgtatttgtgggaacacgtttgcattgtgctgacttgttgctctcactgaaggctactttgccatgtacanggatatttctttatctacttgttggtgtgatattcctgt

SEQ ID NO: 91517 - DNA, 388 bp, Glycine max
ctcctgtgccttactgcaccacgcccaatcccacactagtccctcgtctcttcacctctgttcctgcacaaatccgatatgccccatcaccgtatgaggatcctgtcggtgccttgttcaaactcactcacacgggttcagtgctaacatacctgaatgagttcgaagacttggctaataaaattatcggcttgccgacccccttcctgttgccttgcttcatctcgggtttgacatcggagatgcgccgcacagtccaggtccaccaccctatgactgtggacaatgccgccggccttgcgaagatctaggagcataagctatcgaaccttcgtctgcctccaccgcggctgcgaccccaccgttggtaagctcaccgacagcccct

SEQ ID NO: 91518 - DNA, 470 bp, Glycine max
  unsure (1)..(470): unsure at all n locations
tcttttggatcttgaacattcaactcactcctctttcanaatcatgctacgtgctcgcgactggttcctctcttcccttcgcatcttgagttcattgatgctaccccacagagctccgtgaaatttgttccggccatactcttccttgcgagccctcttggtctcttgttcaagggctcgtgcggtagttgcattctcttcccgtaatccggcacactccttccggatgtgtgtagcggccaacttgaacttctccttggcaagtttcgcctttcctaactcgcttttgagagcttggacttcttcgtcctcttccggtgcttcaaaactctcttcgctgacgacttttaacttggcgagccaatctaaacctcgtatatgaactttcagccattcatggtaaccaccaatgatgccattacgaatgcccctaagttcttgatctttccttaacggggtttcccatgcct

SEQ ID NO: 91519 - DNA, 189 bp, Glycine max
  unsure (1)..(189): unsure at all n locations
tgtatgtatacatgattctgatgatgtcacaagaagaatcanacaaggatcattttgcttcaagattaatacaagagtgtntcaacanacanagccttgattcaagaattcttcatgatcatgtcttgtctcacaatgaaaggtttcaagtcattcaaggcacatgtaatcgataccaatacatgtaat

SEQ ID NO: 91520 - DNA, 421 bp, Glycine max
  unsure (1)..(421): unsure at all n locations
aatagtctttaatgaagtnaaanatnattatttgcttagatatattatattttggaggagatggtgatagcgtgttgttaaccaatcaaaatacgattgttcttgactttactacttaaatttcacgtttcgtttgtatgaacacaaataaaaattgaaatgttatacacaggggcggaactacttgtagcattgccccccagaatttttgttaatattttttaatgtataatattaaaataattaagatgattgtttatattgagaatttaattaaccgtaaggatatttaatttctatttatctttattcgcatttcttaataaaatattctattcttatttataatatttattgaaaaatattgaattttaaaaaataatactttatttcattttataggaaatattggacctcttta

SEQ ID NO: 91521 - DNA, 281 bp, Glycine max
  unsure (1)..(281): unsure at all n locations
atatatagactaacaatgctgcgatcccgatntattcatcttcattgattatgcagaaatattatattgattggcttggcatattgatcacnatgctactcattcaacaatatcatatattttgtttgtgaaaccggcatcaatcttaatngctgattgcgatcctatattgacatctacaatatatactcatatatgcaaatatctttgctaataatatatgataaaactgtttaattataaatactgataaatataagtaaacagtgctgagtgtatta

SEQ ID NO: 91522 - DNA, 367 bp, Glycine max
cgagacactatacaatactatactcggaacggtcgagttctagatcaatgggtaaaggatgttagatctctcaatctctgcggatattctatgaggcaacataattcatcacccattttgttttagcaacctcatcatttgttgccaaaaacacatcatcttcatcactttttaatacattatcttaagagttggcgccatttttgttcatatctcttaatttattcaagtcctccttcatctgtttgctcctcacttgcacatgacctttctcatcgcaatagtagcattgtatgttactcatatctcgttgcggacgcgactgcaattttgatcttcctcttggcccatcatgtctacttgaatg

SEQ ID NO: 91523 - DNA, 443 bp, Glycine max
  unsure (1)..(443): unsure at all n locations
gctccacattntggattaagatattgattattccttgtcttttcatctctattgatatttcaaaatagtaaattattgtggagaccanagataaaaaaggtccacacacctgtagcttagcttggctcaaagctgatcatgtcaccggtatccagattgcaaatgttgacataaatgtcattcacatatctctcacttgtcttactttagagttgactagactctgtttgtcagacactgatattntatcctgttttgatgtctttcaattatnggttttcattnttaagttgtttaatttcatatcagttgcaagtatatatntatcaatatatgtcaccaagtatcactgatatttattaataantcatatatangtgaggctgtgtttgttgatgacattccattcaccaaaaantgcctacatggagcatatatctata

SEQ ID NO: 91524 - DNA, 440 bp, Glycine max
  unsure (1)..(440): unsure at all n locations
ctcgacaaaattggctctcaaatactaaatattgtaaataataagatattaatcatgtgaggtataataattaataataaagaaaacatcatagtccatgctatctatattagttttcgtcaaattatttatatgcaaattatttaataatttagagacaaaatgcttataattgtatattattctaaaaatattttaatcaacattgaaatttttttcataaaattctgttaaaaatgaaagaaataaattgtgatcgagaactaagaacaattgactaatcgttttatacaattgattgatgcagaaaatatatgcctataaccaccttgagggaaacatcatcttacataaaatnggcttaaaanatactagcgcttatattgagtcttttgtttataatcaagaacagtatataatagacacctttttacatataa

SEQ ID NO: 91525 - DNA, 420 bp, Glycine max
acactatgaatactcagctttctgttcggtgttgcctataaatttacaatgtacgtcgtgtttggtttttcgcgcgagctcaaccgaggctgtgtttcggcccacattggcatgttcccatgcactcagcccaaaaaacattatcccacatcccatagaaaaaaatgaaacattaatccccgatattgatcggaaaatatgctggttgacggcggccatcaaagatgaccgatcgaggtctaaaaataaaagaatcaccggatgacgccgatcgagcatttcctaattgacatcattcaaatattggtcacggattggatagaaaaaacaatacctgataccagtcgttatgtagtcccgactgacatttttcaaccgacattgcacagtattttattacatacgctggccgataatata

SEQ ID NO: 91526 - DNA, 447 bp, Glycine max
  unsure (1)..(447): unsure at all n locations
agcttgcggataattagctgcgacaactntgtaaggtnttgcttactttgtcgtaggagcccacgttctgtgctnttggcggttgacgcacacctcatctcatgaataattctactagtaatttcgatatgtcgcagttttcaaagagatacgttattctttctagacaatgcaatattgaatattagtgtttagtagcactatgttttattctttttagacaatgcaatgtgaagtgaaattgtgattgaatattagtgtttagtagcactacgttttaacacgtntcattttcacgtgtgttctagtaagtgatgttttcttatgattttagtgaagcaagattttccgtcgctaacttttactttatctacatgcataaacaaatgtgagctaacgtcactgagatctgagaatacatgtntgaattgaactcccacaccctca

SEQ ID NO: 91527 - DNA, 275 bp, Glycine max
  unsure (1)..(275): unsure at all n locations
tctctgagtcacctgcggcatgcagcatcacatgaagctacatcacttacantgaagtgagtagatcattttctataagatgganagatgaactanagcctacgtgacatctgctacactctatgtggcacatgaactntgtcacatataaccaagatatggtaagctcagctctatttgttggatggacgaaacttacagagttctatgggctcactagacatcatcatgtcgccatgacccactatggatagagagttgtccttctcaccatc

SEQ ID NO: 91528 - DNA, 451 bp, Glycine max
  unsure (1)..(451): unsure at all n locations
cgtcgacactacgtgacacttatctcatgggtctaggttgtttgtgcgacatggtggcagaggaagatggatcgtggatctcgtgggttagtgtggcagagggtgggggttggctttgggtggtgctggaaatggtgaatctggatagttcaacaatgaggggaaggagaagggtgagaacaatttggtgagggggcaaaagagaaattttgtatgagctggtagtgccaatagcaatccccttcaaggtagaaggaaaaattgtgccaaacaagaaggaaaagttagtagtgccatttttagaacagttgcaaattcatgaatganatactatttcatgagacttagagtgtaaacacgagctcacatacaagagtgaaacattatggagatagagagcttgacaattcctactttgacactttaattntattngctcctaatagtctta

SEQ ID NO: 91529 - DNA, 396 bp, Glycine max
  unsure (1)..(396): unsure at all n locations
gcagctgcaccactcccagcagcagtgttctcaatatcacgctctggagatattggaagccaagggctgatgttttcccccgctttataaacacccttgttttttggtgattattcgtacgtacaaacttacaatgcgaacatgttgtttttttgtatgtacaaacctacaatacgtatatgctttttgcttcggaacgtcgaacttacggttggcctacacttcttaatatcggatgtacggacttacggttggctaaatgtntctttacttccgatgacggacttataatgctatatggtcaagacctcagggcaacgaggcgatccacacgaggcctcgtgaataggatacagtgcctcttcttgcttatgaataaagaataaataaactatc

SEQ ID NO: 91530 - DNA, 430 bp, Glycine max
  unsure (1)..(430): unsure at all n locations
tacacaatnntattttctcaaacttgagttgtagaatactatattctaagtcttttctgacttgatgattgaaatgatgcatgtttatgtgtgtatccctacaatgccataatcaagaatcaccaatcttacttactaaaccactaagttcatgaaatgatgcatgtttaatgttttaacatatagatatcacctatccttttgctaatatggacaattgtcacaaagttgactaatgctcaagaggttatgctttagtccatcaacatataaaacattctttatttgtgtcttgtactgattttcaatgtttccttctcccataatattccctttattgttgtcttcaaaagtgatgtatcctctntcttttgatacaaagtcagtaagtttgaacttgtcacccatcatgtgcctagaccaaccacta

SEQ ID NO: 91531 - DNA, 435 bp, Glycine max
  unsure (1)..(435): unsure at all n locations
tatgaagcctatttggaatgttatcccncaaatttcagtagcatctctactacaataccagttatgaaaacaatgcacgaattctaaactgcaacacttagcagaagagtgaatttgtaaagttcatatagcaattcaattctaatccaaacataacgtattttatatatattcatattccccaagagtctacttttcaaaaataattttattttcatcaaccggtatgtgaatcaaacaaagtaaaaaactgtgtgaagtatgtcaaagctgaaatttgtaaaacagcatgtgtgcacaaactttcaacaccaaataatatagaaatgagtctaagagcccatactcatggaggataacctcccanaccaaaattgacattaaagaaaatagaaactctcaataccttgagagatttgaagtcttccagagttc

SEQ ID NO: 91532 - DNA, 266 bp, Glycine max
tcaactgtcagatatttaacgatttggaatatagaaaaaaaagtcctgtaattgtatgatgctcagactagtaccttcaacagcccatcacagacgtgcgtgaatatctactaatctaaatcgtattaatatctacaactacaaagcttctattatgtgcggcatacaacatttcctaaagatgaactcaaatttgccaatttttttaagctagctgtcaggtcagatgctataatttgagacttacaaacaagtctgtacttgtc

SEQ ID NO: 91533 - DNA, 463 bp, Glycine max
  unsure (1)..(463): unsure at all n locations
aganagagagagagagagggaggagtgatcatgaaattgatagaggaatatagggagagaagttgaactntgaagtgtgtctcacaagactctcattcgtcaaagttacaacaagtgttacacatgcttctatttatagcctaggtagcttccttgagaaacttccttgagaagctttcttgagaaacttccttgagaagctttcttgagaaacttccttgagaaacttccttgagaaatctctttgagaagcttccttgagaagctagagcttagcgacacacacccctctaataactaagctcacctccttgagaagcttccttgagaaacttccttgagaagctagagcttatcgacacacacccctctaatatctaagctcatctccttgagatgagaagctagagcttagctacnaccccctataatagctaagctcatccccatgccagaatacatg

SEQ ID NO: 91534 - DNA, 257 bp, Glycine max
ttgaaaaatttgttttaataaatttgacatgattgataataagaaatgtatgtaacatgattaagaataatagtttgtcgtgaaagaaaaagagtattatcttgtaaagaaatagtcattttaaatataaataaaaattaagttatatggtggagccctacataaagaactctagcattttcattatgaatatttcctctcttcaatgttcctttctttcaaatttcgttccgtcacaacagaatagccagtcgact

SEQ ID NO: 91535 - DNA, 422 bp, Glycine max
  unsure (1)..(422): unsure at all n locations
cgcttctcttatatcctccttttgatgatgacaactntgatttcaagaaacacacacacgcgcacacactatgtgctagtctatcactcacatnnntntccattctccccctttgtttttgagtttatgcttcacttgaaattaagttaattacttatgtgagttcttgatttaatcactaattctctccccctttggcatcaacaaaaagccaaagtgcgtaacaagtatgaaacatacatatactactaatcattcacaagacaatcatggaagaatataaaccaatcatgaagcaagaaatatgaatagatcaaatatatataaaaaccacatagtcttataacataattcataattgttcaatcataccatgcanataaagattactaaataattaaatgtctaataatatagacatt

SEQ ID NO: 91536 - DNA, 268 bp, Glycine max
ttgttaatcagcctaataataatttttctttaatagaagacttttaatattctaagagaatcaactgataatagatagactaataatatttaatgaacgatctatatttaatagtaagatagatagatctatttgtgaaaaatagctgcctttcagccagctcatttggatcagccagccaattgatcaaccatgttataatctgaataataaactcaatactgatggccaatataaatgctataattgcataaactatcgattaaat

SEQ ID NO: 91537 - DNA, 392 bp, Glycine max
  unsure (1)..(392): unsure at all n locations
tcttgcgtagctgctcttggtgctcagaaaatcccagaaacaaatacctcttattactagctattttgaattctttagttcctgaatgtacaaccttcaaattgttgctcgttcccctctttcttttctgcaaaaaagaaaatcaaatgctgtcaaaacatggatgaagtcctaagaaaatcaatatcaaagaaaacatggatgaaatcacaattaaaaagcacaactacctatctttcagagtcctttggttaatttgtcttgtctccttatgtggtggggttttgtttaataatcttatacttttgccttccaacanaaaacttatcactaatcctctnttcattaatccaatctgttatgttattgtataaaagatcatgggttcttca

SEQ ID NO: 91538 - DNA, 336 bp, Glycine max
tctctgtgaacttcttcttcttctttgtacaaaatgctttctgaagttttctggttttctaaaccgtggaaacttgagctattcatccttctcatatccttctccccttgccaaatagaattcgccaaggactgaccgcctgaatgttttttggacctctcttctctcttttccagaagaaggaaggactatcccgcccgattcttttgagtccccttctcccttgtcaaagattccaaatgacacagtccgagaagtctgtcgattcttccccattcctaatacaaaagtgtgtaagtgttaacttgcctgagaattcttgtgtatccccattct

SEQ ID NO: 91539 - DNA, 416 bp, Glycine max
  unsure (1)..(416): unsure at all n locations
tatgtttcatcctgatgaggtaccatctctttattagagaccacaattgcagcaataataattgaagttcacttaaatcaattntttaaatagactatttgaaagaaaaagttgttgtcaatcacatctgattgaaaattcacgtctaagagtagtaagattgccatagaacatgttacatgcaaaatataaggactaggagcacaatttacatttctcaatnttttttcttaaaacttctacattgtttaaagcggtgcaggtccatttattaccaagcttcataagatngaaaatttcaattgagactaaatgaaagtgtcttaaagcactatggtcttggacttgacanatccatcatggtcataggtacccataactgaccacaatatatatgcacaatcattcttagacac

SEQ ID NO: 91540 - DNA, 480 bp, Glycine max
  unsure (1)..(480): unsure at all n locations
ctattacgtgacctatgaaacttagcttgcacatgagttctttatatatggtttatttaattacttgttttcaatataagactacatgtgtttattaattattgtgtgcaaactacatgtgtttattaattactgacagtgtaagagtttgttgctgctcattgaattataacatcactgttgtatgactaattaaaatcaactaatgttntgatgcaacaagatcattcaaccacgagatttcagctttacactaaatgcatgtatactttatgcaatgtttatacttagaatcttaagcacgtgtggtgtaagtcaaagttagtgtgactttgtattaaatcattttttatggttgaatggtatggcgctgtaatggtgcatcttntttatttgagtcatgataatcaacttctgaggctattatcatgcaggtatcatcaatttgcaattatgatattntaaaaatgacaagcttca

SEQ ID NO: 91541 - DNA, 268 bp, Glycine max
  unsure (1)..(268): unsure at all n locations
acaaatagtaaagtacacagcctagttgggtaatatcatatataagtttcaatatgactatttgagaaaccatgcanggaaagcaaatgatattgctgagaanggtaaatgaattatatntctctcataagcataagtttaaatcaacttttagataatctaaatgacactctgagagggctagacaaattagtttattctactcttaactngtgtgaactatttaatttaattttctncttattaattatgtaacaagtagtattta

SEQ ID NO: 91542 - DNA, 368 bp, Glycine max
  unsure (1)..(368): unsure at all n locations
cgtagaatggctggacatgatatatgtcaaagtgttggtttggccagtggtacaaagataaangggttgtcccacattatttccatgacacacatgcaacaatgatgatttggaaattttttgcaaaagtggtcatgcatgcacccatgtggacactcaaagcataaagttttatggtcatgtgacactagggctcaggattcatttttcctatttaagtcaacccaatatttccaaaatatgctcctttatcaattcatgcattcatccgagtccattttgggtgttcaggaaaattntcacagcatttacccttcaggtgcatacacattttttttcaaaaacttttgtttgatcggtgaatcttt

SEQ ID NO: 91543 - DNA, 131 bp, Glycine max
  unsure (1)..(131): unsure at all n locations
atatgccaattgccagacttcgttacatttcggcgtctgtatatactgactcatcgacatcanaanaaagtatgcgttgaattgctagagctttgtctcaattcgagtgcttgaaaatgttggactcaatc

SEQ ID NO: 91544 - DNA, 443 bp, Glycine max
gcagactttagtaatgacccactaacctagaagtataataacttaaagccattaacctatggaattaaaaaaacttcatggctgagtgtaactgaaattgtggcaaccaaaagtcacccccaacagccaacaagtcagccaccatttggtctcccacaaggctgatgcctaggctgccaattgtgcccttattacaacttgaactaaacctaactaaagcccttttagttgattaacccaaaacatatttttggtcagccaactttacaaggattgggccattatttagacaaactaaacactctaaaattgaaacacagtggagtcatctagtcctcctccatttgggccatgatacaactcacaaccttggacttctctacttgaaacttgggcttgaatcaaacaagatggacagcacttgttgaagagcttcttggatt

SEQ ID NO: 91545 - DNA, 87 bp, Glycine max
aacaacgtacgacatatgctgtgttgatcctacccctcaatgatacaccttatggtttcttatgaacactctgctttaccacttatt

SEQ ID NO: 91546 - DNA, 210 bp, Glycine max
  unsure (1)..(210): unsure at all n locations
tcttagtctcaaatgatgtatatgagnttgtggctacttcttgcactcctctaatgactatggtatcatttctggctctaaactagtgngagttggaaaccatattctcaactaaatttctggcttcagcaggggtcatgtctccaggggctccaccactggcagcatctatcatacttctctccatgttactgagtccttcataaaaaa

SEQ ID NO: 91547 - DNA, 416 bp, Glycine max
  unsure (1)..(416): unsure at all n locations
atatacaatattactatttctcaattctaattcttgggcttctttttattgatcaattgtttgtatcttatgctaaataaacccacaaaatcctttttttccctaattgcatgttttgtatttgatgtttgagaaaatgtgtgaattgaatcatgttaggagttttcttttaatgttgtaaaatctcactgacattntgatgtcatggattgtttgcctgcttttagaaaaaaatggtacataacggttcatgtcaaccttttcaaaatttgagcaacattttcagcaaagaaggtgatatgtgtcatgaccatgtaattggtattntgggtcaaaggtgaacattntagtgattagcaaatgaatntaggcaagtcaccttcacctttcagccgaaacattcctgtaacaaatat

SEQ ID NO: 91548 - DNA, 392 bp, Glycine max
  unsure (1)..(392): unsure at all n locations
atatatgaaaaagattaagtctataaatatgtgtaataaagacaaactggtatgataattaacataaactcttatnccaagatatatgccacatagaaaacgtacataatattgaatanaatattgatcaagtacttaaagaaggttcataatcttaatcatctagaananaagatctctttngactancggtcagattggataatatttttcaagtatacttataaaacaagaaatantgggggaaacaaactanacttctctcatttaaatcaaatcacgtatttcaattttatagagtcggatgagatattgtgttaaacaacataagataatatgttagtttaaataatgaaatatacttattattattattatttattataatacta

SEQ ID NO: 91549 - DNA, 437 bp, Glycine max
  unsure (1)..(437): unsure at all n locations
gacctataaatctaagctcgactctgtgatacattggctacctcgcggtcagttattgttctctcgaagattacatgttgtatgtgcctgtgattgtactaattatgcattgtctacagaattgtgaaaagatttgatgctctagcatttattcttgatatgtatttactttgtataagatatgttgattagcaagatgcagtggaaactagtgtaatcaaatggtcttctagaatggtaacagactccttcactcgcctcctttccccaagcacacacacatataaaatttgtagatgttgatgcaacttgaataaatgatatgattgcctatatgtaaccatgtggcagtactaactgatgttcaggacttataatttaattttcactatgaaaatatattatccncatctggtatgctangagacatgatctat

SEQ ID NO: 91550 - DNA, 436 bp, Glycine max
  unsure (1)..(436): unsure at all n locations
gctcttacattaatcttatctatctatcngcctatttttctggagtaaatagatgatatgataatatctcttttctctttctaatcacttggccgacgtgtatatgaatattgcatgtgcttcaagctttaagacttgactttggatgaagactgaagaggatatagtacatataaaatacttaagtataagtatcatttaaatcttgagaaaatattaaatgtagtaaatagtatgaagtatataaatttatcaaagtttaatttttcaccatttaattctaattaattatttcttacttgttctattagtatgtggcaataatttatgtgattaagtctttattcgaatatatttcatcttattagctgttgatattttacataatctagaacttcttcattcttgcaactgtattctttgaacaaagcttaat

SEQ ID NO: 91551 - DNA, 331 bp, Glycine max
  unsure (1)..(331): unsure at all n locations
cacaatccaaaggcttcattctgtctccatnntttgaagcccttaataaggcctcatctctatctctactctcccataagattatgatatgaagtaggactcatacccacagaggaccactacactatcaattttcaccactttatccatagtggggcatataatattcacatcaccataattccaaacacaattctcaatggcccgcttcgaagaatgacaaccagctgaaaatctctgataattatcaaaagccattaaagctttcagaaacatttcctaaaaatgaccgccaccttacaagacaattctaatcattctccacctacat

SEQ ID NO: 91552 - DNA, 238 bp, Glycine max
  unsure (1)..(238): unsure at all n locations
gtttcctctnctgccactcccgtattgcaatctgtatcgatgccatagagcttaacatctggtgagccattgaagatgggccttcatttctcccctccgttcaaagaggttcaatatatggtactttatcaaangaatgcctctccctcctggaacgtaaagatacacggggcgttgaggattgactacctgttcattgctaacttgaagccaaaaacctagtctcatgtcgcctatg

SEQ ID NO: 91553 - DNA, 397 bp, Glycine max
  unsure (1)..(397): unsure at all n locations
atgcattanctgactcanatcttgattcagagactatatattatatagattagtctcttggaggaagnctctttatgcccttcagatggtcttcggaaaggacaagtgagtgctaagttttggattaaacattttatgttgatatcagtgctgaggtaatgtatttatattagttattcttttaaattgtaggcactgaataatttatggagtgtctacgtagactgtgataaactggaccttgctgctgactgctacatgaatgcactcaacatcaagcatactcgagcacatcaggggttggcacgtgtatatcatctataaaatcaccgcagagcagcatatgatgagatgacaaagctaatagaaaaggcacggtgtaatgcatcagcttatg

SEQ ID NO: 91554 - DNA, 243 bp, Glycine max
tatccctctcgcctgagaacttttatattagctcaaattagaattcggggcacaacttaagataccatatatgtctaacacatacaccacacaacgaatcattgttagccagtgttttaataactagactgaactggccagtctgactaattcaaccattaatcatatcattatccaacctagtcagtggtcaggtcatataaactgttcaatccatataatcctagagattgacaatgcagc

SEQ ID NO: 91555 - DNA, 331 bp, Glycine max
ttgtgctcccattttctctcctctaatgactatgggatcattactggctctaaactgttgggagttggtaccgatattctcaactcacatgtctgtctttaaacacatgtcttaatccacaggctacaccgctggcatctggtatcctacctctatacatgttcggcgacccatttttacctactacaacttcaagtcgtttattacttaccatgtgatggcaaaaggtacataatatatcaagcataaaaagcgtgtaaacgccactacactgaaattcagcacaaaaagccgctacactcaccttataaaattggaagcgaaaaaaaaa

SEQ ID NO: 91556 - DNA, 251 bp, Glycine max
tgtctataaaatgctgctccctaacttgctaaattgccatgccagagatggacctttctgcagcattattaaacacaccattatctttacaaaacctccttggcttcctatagccttgagaggtgtccaattgttggcctatgcaggcttactacttggacatatgtgccctcttcttgtgagtctaacctcccctcgcagagtgtatctctgttccgattaataaagatcgaatccgcatattaccactc

SEQ ID NO: 91557 - DNA, 332 bp, Glycine max
  unsure (1)..(332): unsure at all n locations
gaccttaaaactaccttctcgctctgcggatcttcttagctaacacccgtttttctaaagcaaaaccaagatgagaactcacctattttcaactccgaacgctactcgaccggccggtatattcaacacgacaaggaacttccctcatagaccgatgccggaattcaccccgctcccaatgacgtacgaagatcttttaccatgccttatcgncaattcatttggccgggtaactcccggaaagggcttctaaccccttttccgaagtggatgaccctaatgcaccttgcaataccttggggtgcgccgggcattcattctaaaagcctggc

SEQ ID NO: 91558 - DNA, 267 bp, Glycine max
ttacgctttactactaacttgtgaggatgtagagaacaaagaccgtttcttatacgaaagcgaagctaatactgaagagcacggccgaaattatagagtgtagggaagaatacgacattcaccagatttgttcttgttcagtcacaaccagtgcctacgccctatcccctagctaccaaccggttcttgagaattctgtcaaccttgcagaatcctttacatgccgaagatccacagaggatgtaccctccattgatactctgaata

SEQ ID NO: 91559 - DNA, 434 bp, Glycine max
  unsure (1)..(434): unsure at all n locations
cttaagtcacctgcngctgcagctataatatgaatatggctgagacaacaagactgtgatgtgtagtcaatctactactggaaaaatatagactaatagacaatttagctgtctttactaaatatattgtgaaattcgaagacgaagtgattgcgacatcgcctaacaactgaatgcgatgttattcttttgcttttcgtaatgtaccttatctgttatggcggttaaatccctataaagtcaatgtgtattccatggtcaaaataattatttaattgttgacttcaacctacgctactagaagacagattctatttcttgatctctcctcctttagcgtttngatgaacaggacggcatatttttggttttgcgccacataaataaccctcatgttacgactccacctaataaacccactgtctaactaaaag

SEQ ID NO: 91560 - DNA, 452 bp, Glycine max
  unsure (1)..(452): unsure at all n locations
gacacgtatagaatactcgcgcaagctagaccctaatttgatgacaaagaagcaagtgaagattataatatttgactactttntatatttggcatcaaagtccagtctatgtgtcacaatctgagacaatttatcacattgcatagtctatgtgacattaaattgtcaataatgcacctcactaatagcgttacttttaaatttaacaacaataattaatttgtaaaacatatgcaaaagtagaaactattttttacatttcacaaagataatgactaatttacaaaaggaatcaaaagtcaatgaccaaaatgtctatttactccattaatttatccaaaagttgatttttaacttgtgtacaagntaattttaacaaaaggaaagagaaaatctcatgtttctttctaaatttcttctcctataagaacttcattactcatacttaatgt

SEQ ID NO: 91561 - DNA, 283 bp, Glycine max
ctatgatgcgctctctacctcttcttgctcgtgattctgggaatacatagaccttactaaatccctcataaccccagcacttcatagggataaccaaacttagtaggtctaactcatatttttcttacctcttcaatgtgtttcattttcatgattctacatgctgttaaggtgtacagatcttatattcaccataactgtatgagtaattatttatgtaatttgtctgcttacatatggtagtagtcttattgctgtattttggtaacaactaacttcaaaa

SEQ ID NO: 91562 - DNA, 429 bp, Glycine max
  unsure (1)..(429): unsure at all n locations
tctgggttaccagcctacacatgccgtctagagaagggtcgccttagaatggagagaaagaagcctagcccatttacaagggcggngactgtagatggagagggtccttatctgccacattagcaagagctttatcaacgcgaggtggatgcatgagaatcaggttgttgtgctagacgaagaaaccaactaagagcagccaagttgggtgcagccgtgctccccgggttttgaattaaagaattggtggatcatggagtgacccgagatttcagtgttaaatccagtgtaatccagtagtttgaaccctattgctgggcctaggctttagggtctacttcttttgttgggcatacctcttgctttaatgttcccgcaatattaaatatacgaccctttttattgatatgctctctctcgcactttcgt

SEQ ID NO: 91563 - DNA, 448 bp, Glycine max
  unsure (1)..(448): unsure at all n locations
gcactctctnggtagtgaagcttctccttaattggcttattctctagtggatgatgtctcctctcacctcttcttcttttatcttctgcagtaattccatggctgaaaatcactattgaaggaccttattgaagctcaaagattcagcctccatagaagcttctcaagcaagcttccatcaagtggtatcagagcacaagagcttcaagtaggtgttccttaaacctccattaatttgcagctttaccttctcctccattgttgtttcttcattnttcaccatgtatctcctcacatgtcttgtgctgaatgttgttaacataattntttagaatttccaccgattaaacttgctatagaagttagatttgattttctatggntcaaattccttgttcttgttcttgaaccatgaattgtgttgactntacgttcctttgagttttga

SEQ ID NO: 91564 - DNA, 391 bp, Glycine max
  unsure (1)..(391): unsure at all n locations
aaagatgtgtgctatcatctggtatcttgctgnaaacatctttaggatctgacaggccaaattggatcatgcagggtggctcaattatgatatttcgctaataatattgaagttggtgttaaaaaaatcaaacacgatataagtcactacagaataaaagccagaagacaatagcagtatatcacatgctatattaaacacagaacagatagaagtgatgaaaagatggatatatcgagtaaccaaattgaacagtaaggagaacgcatattcgatgaatagaaagagaattacgtagatcagcatatagaacagaaatagtgagaaactagaatcctggaaagatacattcttttatatgtttactcaatcgtttgacgaaaatggtagt

SEQ ID NO: 91565 - DNA, 317 bp, Glycine max
  unsure (1)..(317): unsure at all n locations
cacaccatatgaatataattgatggatggctgcatatctcacagaggtaaaatcatcactttcnattgactttcaaactatctacatgtgagaaaatcatgattcaagtccaaatgcaagactttatttcaaacaatacccattctgaacaatctatattcaagaaaacatgcaagtcgacatcacatgaattgcccaaatttaactgaaatttgcaactacacataacaatacacactacaattacaaccacaacttcaaacaagacactccccatctaacaccatgtctatggctcataagataacattatataa

SEQ ID NO: 91566 - DNA, 458 bp, Glycine max
  unsure (1)..(458): unsure at all n locations
gcccattaacctgaaattgacagaccatgattattaattgcacaaaatgaagatactaagtgtttattacctatacttaacagaaaatacttataacactacaaaataaccataaattgtgagagtttgatacaatttatacaagttctatacacaaaagttagtcattttcaccaactaacaactcccctaaatttacagatatgcttgtgctcaagcgaaaagagaacaactcacttgtcctcaagtgacaatgacatgcagtgactatgtacaaaggtgtatgctacaaaagttactgattgcataataagagaatggagtaaaatgacctcatcacttgtctttcacaacgtatgcagntatccaaagagaagaatgaaatgtaacctgaacaataagatggagttaggcataagacagatatcaacgaaagtagcttataccacagtctcacg

SEQ ID NO: 91567 - DNA, 330 bp, Glycine max
  unsure (1)..(330): unsure at all n locations
ctgcacttttaaaatctaaactaactactccatcttttatactactactctgaagaaactaactactaccccctatatactaactacccatacaaaaaactgaatacaaaaaaagtctatacaaacactaaatgcccaaacaagctaacctatctatgaaggcaaaacaagccaacaaaaanaactatctaattacaaataacggcagctaccatggctcaacactaagtatgaactaggccttctgatttaccatcactgagctttacaagcctgggaagatgatattcaaacgataaggtaacgtgaactgtacataacggcgcattc

SEQ ID NO: 91568 - DNA, 286 bp, Glycine max
  unsure (1)..(286): unsure at all n locations
aatttgtccctgtcgcaagagtctatggtttatgctcctctgctgaccaccatacagacctttgcccttccatgcagcaacctggagcaattgagcagcctgaagcttatgctgcanacattttacatagacctnctcaacctcacagcataatcaaccacagcagaacaattatgacctctccagncatagatacaatcctggatggaggaatcaccctaatctcagatggtctaagccctaacaacaacaacagcaagctaactccttctttcaaaatggtggt

SEQ ID NO: 91569 - DNA, 256 bp, Glycine max
atcttattccttaatcaaataactattgtatccttatgtaatataatcattcagtggttattgttctaatatattaataaatatgttatttcttgttcctggataacttattgggatatatgaatctgctcttgagaaaaattccatattttaggctgttcgcatacttcactctttttcaactataaatattcaccactcaaaaaaaaaaaaagtttcctatttttagccctttcttattatggcctccattatc

SEQ ID NO: 91570 - DNA, 176 bp, Glycine max
  unsure (1)..(176): unsure at all n locations
gcatacatntacagaccgacacgtttaaattgaatctattcgtatgcttttaagaaaacaaattcctcttcacctcccatctntgttctatccttctgctnttaagtctaaactattaactatgggatatatttcaagtttaatttgcaatattcattcacagatatgcagaatca

SEQ ID NO: 91571 - DNA, 418 bp, Glycine max
  unsure (1)..(418): unsure at all n locations
gctattaactaccattatgtattaactataaagtgtttatgtaagttaaaccaagtgggaaaaaaatgaaattaaagcaagtgagcacaataaagaatttcacaatggagaagttagagaaattatggtttaagtcctcccaatccttgatcaaagttcaaatttttattaagaaaaatatttacatttaatatttgatcaaatacgaagtaaaactatgtcaaaaatacatatgaaaaagaaaaacttacatgatgagatttcttatttttcttattctttntctttctcttttggnacctacacagtacacacccttttgagtgtcaatgaatatctncaacacatattctttctggctagattccagaacaagtactactcttctcaacacatatcttctgacattaaaacatga

SEQ ID NO: 91572 - DNA, 315 bp, Glycine max
atccctcttgtaagactaggcctagacttttttgcttattgtacaacattaattaaaccgaaacttaatctgcagatctctcttggtagactaatgttcgatcctgcttcaatcaagttcttaggcaatagtacatttcccaatgctaaagtcacctaactatgcacacaaatggatgatcggaccaaaagcatacaaacattaagcattgaaggaagcattgaacatagaaaacataatcaattagatattaggtatttacataagctattcattagaaatcccaactagggtatgtagccagcccttacaaaa

SEQ ID NO: 91573 - DNA, 286 bp, Glycine max
  unsure (1)..(286): unsure at all n locations
tctcagcccctttttccnctcncttgtcctcctgcttataaanccataggaactatcatgctgggctttctccttctaacccactctaaaagagtaggtcattggtgctatactcttaaactctactccctgataaactttgagctgggctaacgccattcattttggagggattgcctcttctaaggcacttaaaggatccaatctctaccaaggatccaagaatcttcttcccaactaggagtccccaataaggatacctgggaaatagggaacaaaggacctt

SEQ ID NO: 91574 - DNA, 445 bp, Glycine max
  unsure (1)..(445): unsure at all n locations
cgagaatattcaaacatgtaagagcgagacaaatggctttttggaaatgggcagcngagatcttacacacatcaaagaagaatatgcttcaactattagtttgtgttaaaagcaattcaaatgatggcattttgatattctctgttaaactagtagcttgaanaatacaatagaaacatgggcaccgagagacatttatcaaaatagtatataagtataccttgaatgattaacaattntcttgactcttacttaaataacatactcaatttgcatgatccacttcttcaatccttttaattagcattaacaattatagttntagaatcattaacaattttcttgacttttacttanatgacattattcgtaaactaaatgacactcgtagcacacattcaacgatatttttcatttttttgtcatagaactaaacactcatctc

SEQ ID NO: 91575 - DNA, 312 bp, Glycine max
  unsure (1)..(312): unsure at all n locations
ctaaccctcaaaatctcacacttttccacctacaacactaccattctcacatttaactctaagctaactctccccatcctctctaccagttttctatctaaattttaagcacacatatatctcaaaacatcattattgaaacctaaatcaacatgggcagttttgcttacatcaaacatgtcaagtttagcataattacaacaatntccttcacaaacaactaccctaaagcaataacctagtagaactacccattatagctcccaagaacccaacacccatagatttcaagtgagaagaagtccaccctta

SEQ ID NO: 91576 - DNA, 113 bp, Glycine max
tcgacgcgcacacaccttaacatagatgcgtctaaaaactgtcttaggacaatcctacttagggaaatcacactgcccctgacaccggtaatcacaaaatatgatcccttctg

SEQ ID NO: 91577 - DNA, 342 bp, Glycine max
  unsure (1)..(342): unsure at all n locations
cttgtatatacctcctccagtattggttgaaaatcagttctataactagactcaacatcaatatcattttattattataaacgacgtttggttacattaatacattcaaatgtgatacaataaaagtgaatactttcgtatcccttatccaacaacaagaaactatgtgagatgggtcaattagtatacatgaattgtgctcaatgtttggggtttgattttagaaatcactaatcttaattataatatatactccacatatcttataatagggataggatccatntacatcacgtatatagttaattgactacaccaagtctaactgctaattttattgat

SEQ ID NO: 91578 - DNA, 165 bp, Glycine max
  unsure (1)..(165): unsure at all n locations
tcacactacattgaacatctgtatatgatattaacaatgacatctattctgtgacctagaatatctatataaagacacatctaatancatgtgcgagcgacttattttaaccatgagcgaggtgccgaacctaaccaatacacccaaatgcacatagaggagcat

SEQ ID NO: 91579 - DNA, 343 bp, Glycine max
atttcgagggtctcgatatattaccggagtcaatcagacatacgagtggaaagtgaccgtcgattgaatgtgctcagagcttcgataatcaatatcgagtgtctcaatatattacgcgactcagtcacacaaccgagtgaaaagttattgtcgtttgaatttgttcaaagcttcgggattcaatttctagcgtctcgacatattacgggacttaatcagacatccgagtaaaaagctattgttgtttgaatttgctcaaagcttcggtattcaatttcgagcctctcgatataatacatgaattcatcagacaccccagtaaaaagtattgtcgttgaatttg

SEQ ID NO: 91580 - DNA, 441 bp, Glycine max
  unsure (1)..(441): unsure at all n locations
tgaaggtgggactatcttactctcagagttttcaagaactctcaagagtttctaagaagctctaagaagctactagctataatagaacatgtgtacacttattgtactntgatgaatgagagtcttgtgagacacaactcannagtcaacttctctcccctctttattcttcaatntcgngctcgccccttctctctttcttgttctccattanagcatcctcttcaagcttcttatcaaagcattcttggtgggaagctcttntctttgcctatcctatggatgtgcctccctctctttctctttgcttcactgatctcatgngtaaacaccatgaggacctatgaagctaagatcccctcataaactcacagcatgtgcgtccaaatatgactgtatagatgttataacaaacatgaannttttctctttctttcatct

SEQ ID NO: 91581 - DNA, 183 bp, Glycine max
agacacattacacactgactgccgataccaaagggataaattatgtagatatgtcttagtgaacctagtcaatgtgcatagttatcccaaaaggctagtgtggtctgtagaaatttatgaatgattcggagatggacatgcttcagcttactccattttgcgttggacagccgaagttattat

SEQ ID NO: 91582 - DNA, 366 bp, Glycine max
  unsure (1)..(366): unsure at all n locations
gctactccagcgtatgaccaccctggaaaccactcttctactacagctttccccaccacactcttctccaccttcttcatcatctgtgaaccagtcccattcctcatcacatcttctgcgagtgaagttggaagttccacgatttgatggaacgaacccctctggctagattttcaagattactcaatttgttgagtaccatgccacaccagaccacgagcgtctcactattgcctccttctatatggaggaccctgccttggcgtggttccaatagatgaccctgaatggccaaatctcttcatggccaggattcctttttgcccttgaggctagtntcgccccgtcccactatgatgatcccat

SEQ ID NO: 91583 - DNA, 67 bp, Glycine max
gttgaattgctctgagcattaacattcaatttctagtgtctcgatatattactggactcaatcagac

SEQ ID NO: 91584 - DNA, 269 bp, Glycine max
ttactcgcatgtttggttgagtcccgattatattggacgctccaaattgaatgttgaagctctgagcaaattcaaacgacaataaccttttactcggatgtctgagtgagtcccgtaatatatccagacgctcgaaattgaatgttgaagctcagagcaaattcaaacgacaataactcttttctcggatgtttgattgagtccacgaatatatcgagacgctggaaattgaatgtttaagctctgagcaaattcaaacgacaataacc

SEQ ID NO: 91585 - DNA, 226 bp, Glycine max
acctactattttaactataaaaaaaaatattattaggaagatctatacctataattgcaaatttatatattgagtaacgtgaagtgaaatactgagagcccgaaattttgtagcatatgagggtatgtgaaggtaatataggagtttatttggaaaatatgctgctgttttgcccaagtgtttaaatgcactatttgacattatctataactgacttggatatctt

SEQ ID NO: 91586 - DNA, 322 bp, Glycine max
  unsure (1)..(322): unsure at all n locations
cgttatgccctataggtatccccattaccttaaacagagattgnaggcaaatttcggccatgctcgaggcaaatctcatacaacccagccacagcccattttcctccccaattcttctcgtcaagaacaaagatggctcatggaagtgttgtgtggactatcgcgccttgaatgctgtcacggtcaaagaccgtttccccatgccgacaatcgatgaacttttggacgatctggggcaggcgtcgtgcttctccaagctcgatttgcgttagagatttcatcaaatccgcatggccgacgaagatattcataaaacggcttt

SEQ ID NO: 91587 - DNA, 389 bp, Glycine max
atctctgtgacaagaaaactggcaggaaagggaaagaggaaaccctgtgtactgcattctatcagcatcccaccactgaatgtatactagccaatactaccttctcttgccaccaccaatatcccaaaggcatcctaatcaacaaaagctgttacaccaaccatgctaacaccacttagcacaacaaacccaccataaggattttgagccaaagcctgagatcacccaatccgggcatatgcaactgtctgatcactgatatcaaggacctaaccaccaggtctacctcttttcaagatcacttaccacggcctgtgtgagaccccacccatgtaccacttaccaccaaccacaaagattgccaaactgtgatccaatcggcttctatg

SEQ ID NO: 91588 - DNA, 331 bp, Glycine max
  unsure (1)..(331): unsure at all n locations
gagccgttctaagagcctgagatgagcttgtttgtgattgtgagatcctggaggtgaaggagacatcctcaccacttgtatttntgcaatctttcatcttgttcttctctttgtataaagaagtcttcctggttatggaaagctaaatcctctgttggatcttccctgtaggtacctgatgtaaatatatttctatctatttaatgatgtttagtgtgttctctgtgctatctgcttttcactccagtatgcctttaccttgatcacgtagatgcatgctttgttagggtcattcaacagtggaaactggtctgattctaaagtcctttga

SEQ ID NO: 91589 - DNA, 414 bp, Glycine max
  unsure (1)..(414): unsure at all n locations
tcacagacattgatttcaatgttggaaagtctgatcgcaacacgataaaagtcactggaaagcagaagaatgtacgtatttttctcaagtttgaattttcacgctctccttctctctgtttctagatatgtatgaagaattagtaaagctgattcctattgttctttggtgcaaaattgaaaaatactttcatattagtgatattacttttaagactagaagtctagaatgaatggctntgtcgctgttaatgatatcctttcattatttctccaagtgaattgagttgcaaatgttagcaattaataattaaacttggtagcattatgcacttatccagctcacggttgtgatactggtgcatacattggcagccattgtcctgcgttagagtctcctattttgttctctgga

SEQ ID NO: 91590 - DNA, 297 bp, Glycine max
aatgctgtctgctacaagcaccatagcttaagaggctcggaaatcagtatgacagtacctcccatagattttgagatgatacatctattttgcatgccattcaatcatttaaggtttgggcagatcctgcttgaagcaccttactggagggaattggttgaaacttctagacaagatattactctatgctgcctcttaaacacttcattgctaatgggttctgctgatcaaggttgtggactggctcaagttaaggtcaccgtgctatgttcagagtcagatatggggatctgcccc

SEQ ID NO: 91591 - DNA, 391 bp, Glycine max
  unsure (1)..(391): unsure at all n locations
cgacttcttgttccaatcgcgagcgctgacctccgctcttgcttcctgcaatgcatttccttatgtccgcttgtgtggagttatagcctaacccaaacttcccatgtgttcctctggcgcttatcaagctggttctgccgccgttgtctttgcctaatcccattccgggctcataaccattccccaacatcacccgggccaccattactgctgtatcggatatgcaaggattcctaaagaaggaatctactgaggcaatgcataccacctcaaaagactggaaggctgtttctaatgactcctccgcggctgtcacatatggcatagaggatgggcaactcaccaagaatgtcttcttgcccgatatgataaccanatgcccctctactac

SEQ ID NO: 91592 - DNA, 225 bp, Glycine max
  unsure (1)..(225): unsure at all n locations
atcatgcgcttaaagtacatantggctcaatattatccctggaaataccatgtctgaatccttcttggtacatttcattttgtgcaccctaccttaacagtatacacccttcaaaatcctcctacaccacacataaggatgaatgatctattaatgaattgatgaccatgtgtgtccaagagaggaaaaattgataatggaagagggtgagaaggaaaatttgat

SEQ ID NO: 91593 - DNA, 314 bp, Glycine max
attcttcgcgttaactgactcaggttgaattgatttatttggagactctactattttgaacacctaatttcatcgtttaaagtggtcaggaaaagtttattttctacaagttcttcaacaaacttgttttataaatgtaaagtttagaatacccatccttttgaattaccttaatatgttgagaattagtcctatgtgaaggttatctgggatgataaaccatattgtacatggggtgggggatcggagttacttgccatgtgacttgtctgaagaaagtcaacttctttatatgaattaaaataaaagtttct

SEQ ID NO: 91594 - DNA, 420 bp, Glycine max
caatgctgaataatatggacagagttgacatccttgtctctatcatcctctcacaatcacatctaggcttattcaacttacaccggaagtgagcgaagacattggttcgattgcttaagcgacctgcgctactgagttttttttttacttccaagatcgttcaaattatagatctctcgtcctacacgtcggtgagggtgctgtaaacaactagtaaagcatataagttcaaaatgataaacaaacaagcatttgactgactgtgatatcaagcaaaaatatagacattcgtatgacctcattctatcattcctgaaaagtttgacgttttgacatatacataaattatcaagaatatcagtcgtttgacttaatctatgagactgaaaaaatccttcaaatgtttctcgagaatcaact

SEQ ID NO: 91595 - DNA, 328 bp, Glycine max
ctgcacttcctacctgtatttgttagatgaacaaatatcagcgtcagttcacaatatctcacaatgggtttacagctgatgcaattgggacagatctgaaagttgaccaacaaatgggatatatatcatcagtcattatcttaagaaaatccatgcttcatagtaaacgcgggaaatgtttgtacaacttttcatcttaccacctccttgttgctgctgatcttacctgtggcctggtactatgaccgactgtcaacagtgcaaatacgttgtaagggttgatgtatacgcataataggatctggcttaactctatatgagttgatat

SEQ ID NO: 91596 - DNA, 332 bp, Glycine max
  unsure (1)..(332): unsure at all n locations
cacggcgccaccgttttttcagagaccccaccgtttgtcgtgcaaccattcatgctgccgcaacaccaccaacccctccgaactgaagctagggtttccaagctagcgtatgaaacaacgatctctccctcgagcttttcgattcccttcaatttttcatgtttccaactgaacaaaattagggtttagtttggtgtgtgtgatgaagatcgaggaattggatgatggagagtgttgtanggactatgaacacaactgtcatacgcagattgtgagcattgatgcaagagagcgttggttggagcacgtgcttggatcttgttctaccccac

SEQ ID NO: 91597 - DNA, 458 bp, Glycine max
  unsure (1)..(458): unsure at all n locations
tgcagctctattagctgaccatttatcataagacaagtgagtttattcagacnatagagnntatctctcttattctagtgagagtgattctcctanattcttgagtggatcaagaacaccttggctgtatcaaaggactntcacaacctttgtgtgttgccctcgctggagagagagattctatcccttcctttcatcatcacgcttgttctgtcanaccgacaatgcagaanatccacctctgcccgaattatctcgtggcataactccatttacgcactcaatagtgatctgacctaattgattcaaacaacctccctgttggacaccattggccggactagttgcttttttttccccctaccagtacatctatctttgcgacctttaacccaatagccctttctcttctatattccattctcagttactaaaacaatacctgcccgggtatattc

SEQ ID NO: 91598 - DNA, 343 bp, Glycine max
  unsure (1)..(343): unsure at all n locations
tgtcgcgttaaactctaaaacatctttggtttgtaatatctcaaatagggctaagcgtgcaggcacaggctaagcgagtcatgcattcccggtaagcctgtggtgctcgctaagcggattntgcaggaaatttcctcctgcaaaactctctaagccctatgtggcatgctaagcccaataatatctctgaagttgcaatntcatttttgggcttagcgcacaagtttgggcttagtgcgcaaaaaaaaaaatcaaaatttcttggacttctaatttggtatgtctcctacgcagcaagcttagtgcgcactttacacgctagccttagtgttcctcaatgttt

SEQ ID NO: 91599 - DNA, 353 bp, Glycine max
  unsure (1)..(353): unsure at all n locations
tcttctttcatcatgtcttgatatgcaaactcaatctgaatgctggtaatggatctaacttcgttcacttgaccaacataatggtggtgagatcatggttatatttatntctagaatgaaaattaaaagaatataatataaataaaacatctataattaaaatanatttatgaaaaataacaagttaggatacatgatatattaaatataataatgttctattatgactttatataaaagcaaacactggcaaaaatgtttgatgaaaaatctactcataatcatataatataataccttaacaaatgtgatactatnatntaaataattataataaaatgaattatccatat

SEQ ID NO: 91600 - DNA, 153 bp, Glycine max
ttcccatacttcaaaaattttacttgtaccactaacacagaactggagcataagttaacctaccatcggccaccataacataattctacagataacaaaaatgtttactaacatgggacgaaatgacttcaatttgttgatgggtatccattc

SEQ ID NO: 91601 - DNA, 199 bp, Glycine max
  unsure (1)..(199): unsure at all n locations
tcattcgttcggatcttaatcactgangctgcagcttatcctatatccctctgtggactaggctttatttatacagcccttctaggttagacaacttaactaagcttcatctcgatcctcttgtggaataacttacttaacagttaccaagttagacaatttacctagcttgtccttaatcctcttgtgactgacttaa

SEQ ID NO: 91602 - DNA, 337 bp, Glycine max
agttcacatcacaacgcgctaaccaccatcctgtgcccctcacgactactctccagagcaatctgttttaaaccggcccaaatctccagtccacatcagaataaatcacgcaatatcgcaaaacagcaagaaaacttgccaacaccaaataacttttataaacctaacatctcgccatcgtaacgtgacgataattatgagcttaaaaaaaaattgacgtggcacacactcaactattgatatttccacacaaacaattttgctagcaattggcattcagaattgtaggcattaacactccttcattgcaaactcagcattgtattgtaacagacta

SEQ ID NO: 91603 - DNA, 352 bp, Glycine max
aatatttcgtaagaaattagccgagcgcttcatacgcgtcgaacgtttcggggtatttgtgaaatttgcgcgctttcatcgtcttcgcgtcttcatcttaaccggaagtcccgaagtgactttaattctttatgtccttggggcccactgttccgtctatatgtattaatacttcgaccccttttgctgattatcatattaagcattctcgcaataaaattaataatccacgtcttgatgtacttgtatttgtaaagaatcgcgtcgctgcgaaccgtcaccaaagagtaatatattatataaaaattcttgtaataacaatataactgcgtccttggtgtctctatgatgc

SEQ ID NO: 91604 - DNA, 314 bp, Glycine max
  unsure (1)..(314): unsure at all n locations
gatagtgggggaaatgttgatctttgtgtgatgagtcgatgagattatgttgtttacttgactgtagantactaccattgatagaggagcccactcaaacatgtaaaggacaatccaatggggaaattcgtttatgagtcaatcttcatagattggatgactacacagagtantacctgagggatggatcgatgacttgctgttcttgagggatgacctgatttgtgtgcgtttcacggccacttgcatctgacaatggagactactggtgggaacctccatgacatgtgggggtctccacattatcactaatg

SEQ ID NO: 91605 - DNA, 96 bp, Glycine max
tgccatagctgacaaaggaagactacgtcagctactcaaaggaggattcggcagtattgagcactagtgctgcaaaattgcccgtacaatgaggat

SEQ ID NO: 91606 - DNA, 316 bp, Glycine max
  unsure (1)..(316): unsure at all n locations
cttgaaccatgagttgtgttgagtttaagtttctttgagttttgtcttgctatnttttatggctgagacctaaaccataaaattcttacaaaaacattaaagtagaataaaacctcaaaaatctagggtgacttgttcacctattgtagttttgtcatagaagtcatgaaacttgtcacataagatatcgtatgttgagctgaactttattnttcttgtttctttgtctaacctcattgttcatgagtgtatgaaattcttttagcctattatttgatttgaggtcaaatcctttccaacgtggaggggatgatgc

SEQ ID NO: 91607 - DNA, 413 bp, Glycine max
  unsure (1)..(413): unsure at all n locations
taagcaccgcggctgcagcttactttggcctctatattgtgctgaaaactgctatttcactccactcaagagcctcggatcatttttcttttagggaggaatgttgagtttaataccatcaattcggttttgtctaagaacaccatcattccctcttctcctcctttcttcttcattatgatctctattctccatttgatccaacctctcatggagcacatcatctcattgtttcattaacctctccaaatgttgcatcaaagcttgcatttggaattgcgaaagccccactccatcattacgatatgttcctgccatctcaaacaaacaaatcaaacgtaacaagacaattatagttgctggttgaatacctcactcactccagtgtatcacacaantatgggttttctctt

SEQ ID NO: 91608 - DNA, 337 bp, Glycine max
  unsure (1)..(337): unsure at all n locations
agcttggtactctattgagtgatgggattatttgttctatactttatataagaggcttgcgtcagtgacatgttgtttcgatgcaaccatctatattaattctanttaatgttctactcataatatgtgttgcacaaggcaccacatcggctcatatctgaatattaggtaaaatatataatgcaatataacatatgtgtatgaggaatgagtgaccaacaacttctaaatcaaaaaattatctgttatttaccaagagtaataatacatttattatattgttcattgacggagaataatatatcacgagatagactgctgcgttattaaacatact

SEQ ID NO: 91609 - DNA, 323 bp, Glycine max
  unsure (1)..(323): unsure at all n locations
gagaggtattcccacttattatcactgcatgttggattgtgtagagaacttctgatttagataataacccactgcatgtcaagggtggtgaagttggcatcctatcttttatcaatgattgcgaagatatacttatactatcctttcattgatattgaaagctctttgaattgattctttggccctatccattgcttcatanatgaaacacatagcangttgtttttttcattatccaccaacctcaacacacttactagagagcccatagcctttaaagcataaacaacatcattcaaaatgatggcgtaaaatacatatgt

SEQ ID NO: 91610 - DNA, 139 bp, Glycine max
tagagagacgtatagattaaaactagaatagttttaaaggttgaaaatggactagaatttaaacatcatagagagattttgtggttggggatggacaagatgaagttagatgttgatatccatcctgctctagacaaga

SEQ ID NO: 91611 - DNA, 356 bp, Glycine max
  unsure (1)..(356): unsure at all n locations
gcttatgctgctaatatatacaatagacctnctcaatctcagcagcanaatcaaccacagcagaacaattatgacctctccagcagtatatacaaccctggatggaggaatcacgctaatctcagatggtctagccctcagcaacaacaacagcagcctattccttccttccaaaatgctgctggcccaagcagaccatacatttctccaccaatccaacaacaacaacagccccagatacaacgaacagttgagacccctccacaaccttccctcgaagaacttgtgaggcaaatgactatgcagaacatgcacgttcaacaagagaccacagcctccattcagagcttaaccaa

SEQ ID NO: 91612 - DNA, 219 bp, Glycine max
  unsure (1)..(219): unsure at all n locations
catcttattctacatgtatatacctcatattcttgcgggttggtaatggttagagtagaatcaacaaaatacactgattaaatcttagatctactcttgaattttgactattgttgattgaattctagatacatttgttcatgtattctngtcattcttagaatatcttntgaattttgagtctaattcatgcatcgtattagttcataacattgtcta

SEQ ID NO: 91613 - DNA, 295 bp, Glycine max
aaacaattaaatttgatgaagctcaagtttcaaatgaaataataaatcatgaacattggatgaacactgaaagacattcctttgatgttttgaagttacaaaaaggttatctccttcaatgattatggcttaagaaccagctgtcattcaaaaacaagttaatggaccaatctttggacaagctcacaacccaatacaagagcctattaaaaggatccactcgagtgcatcatgcacctgataagttaaacctaatggtgcaagatgatgcactggggattggtttcataatgat

SEQ ID NO: 91614 - DNA, 426 bp, Glycine max
  unsure (1)..(426): unsure at all n locations
tgcagctgatttctatcagctaaagaactagttcctttcctgttactcaatactcacggcataataaaatgacaactctatacgatatcaaagtaccttaatataaaattcaggcttgcgaaagacactactcaaatgtgacagccggaaacttaaagtatacacaagtacagaacaagaaatccacttttagcacaacaggcacaacagcgaccttgtacgaaaattgggagggatgcanagaaatcaccaatgcatgaagtggcctgtcacccacttctggagatagataatgctntntataagtcactactcaaccgatcggcttcattatgaattattaaagataattcatgaacttaaagaagctggccctggtgtggcatccacttctcatcattgacagaattctcatagctattctcc

SEQ ID NO: 91615 - DNA, 62 bp, Glycine max
ctataagtagttgtgacatattgaacgattagttgtaaaattttgctggcattggccaaaat

SEQ ID NO: 91616 - DNA, 357 bp, Glycine max
gcaacctacacgttcaacttaccattatcatgcgccatgagtttctttacgtgaaggccaatcaagtgcattgcacaagacatgagatgctttttcacgtgaactcaaacgcaaaggcatgggattcactctcactaatgacagatgcatgacaccaaagcctacttcatgtgaatgagtcattactaaggctgtttctctcatgttggaacttctctttccagtccctctctcattcttcttttgttggtgcggagcttatttctctttctcacataccaccttttccatccttctttgcatctctttatttacttttttgtgaagcaatataacatgcccaaattggacctattg

SEQ ID NO: 91617 - DNA, 318 bp, Glycine max
  unsure (1)..(318): unsure at all n locations
agaagagatagattgatgctctgccatgttcggtntctgcaacagatctctgatgtacttactctgagtaagcactaaagacttatcaggaagaatttttacttccacttccagaaagtagtccactagaccaagtttgttgagagaaaatttggaattgcgctgagatgtgagatattgaatcacgtgatcagaactacagnaattataatgtcatctacatatactagatgataaaaagtatgagaagcagtcttgtagatgaacaaagaaggatcgcatttacttgcaataaaaccaaactgaatgagagtggac

SEQ ID NO: 91618 - DNA, 306 bp, Glycine max
  unsure (1)..(306): unsure at all n locations
agctngctctccctctttctaatcttcacagggcatgttcttataagctctagataccatgttaactattacactcttacagaaaaaatgaattgaatggcttattcacttctcaattgattacagtatgaaccttgcttatatagcaggttaataataactgcttgttggttataaaaaaacaaacttaaccaaccttataactaccagtttacagctntttaaaactttgaattattcctaacaaaatcatgccacccattantgaatgtcgctttccctgaaagggattagttagtacaaaaa

SEQ ID NO: 91619 - DNA, 307 bp, Glycine max
  unsure (1)..(307): unsure at all n locations
aatcatgctcagtgtgatgcatgcagccgacctcaagtctcaaatgcaatgtggtaccattccaagaaaatagcttaagcgtgttcacacgacacgctcacttaaganaactatgcagtaagtgtngaggtcatcttgtcgtgcatatgcaactcccccccccccncccacggtgatcagcttgagtcttaagggagttgcaaatcgagtgacatgcccccaaatagaagtattcttctcatgaaacactacaagtgcttactaacaaagcttatactattttcatgtcatatgaagtatgaaacat

SEQ ID NO: 91620 - DNA, 74 bp, Glycine max
atcctcgttaaacaactcatgcccgttaatgtaccattacccatgcttgtgaaatacctctattattaacataa

SEQ ID NO: 91621 - DNA, 350 bp, Glycine max
  unsure (1)..(350): unsure at all n locations
taccatatgagctattaaaatagaaaacaacatccaattctaactcgttttgaaatctatgtggatgtgcttgcacatgtgcaaacataataatcataaaatttcaactagaaagaaaaactaaaaaatatccattatttatggcataatatatttttaacttccaaagaacaatcctgcggctgtgagcttaaagtgagttcctgagttaagcttgagccaaggccatgaacttgatttcttttatggctgaattgaagntgggtctagaatcacttctagcctcaattggtactatatggacccangtgggaactgagaagtangggaaactatgtgtagaaaataac

SEQ ID NO: 91622 - DNA, 373 bp, Glycine max
  unsure (1)..(373): unsure at all n locations
agctttaaggaagctacctagtctataaatagaatcatgtgtaacactngttgtaactctgatgaatgagagtcttgtgagacacaactcanagttcaacttctctccctttttcttccttcaatttcgggctcccgcctctctctttctctccctctttcttttcctccattgaagcatccctccaagcttcttatccaaggctcatcttggtggtgaagctcttttttccatggcttattccttaatggatggcgcctcctctcacctcctttcctttgtcttccgctgcatctccatggtggaaaatcaccattaaaggaccccattgaagctcaaagatccagcctccatagaagctccacaagcaagc

SEQ ID NO: 91623 - DNA, 339 bp, Glycine max
catgaacccaccattcccaggtgcccaccttcaactgagctcacgtactcctacgtagccttatctcgtactctagaccggtccataacctcagttccctatcagaattattcaactattctcctatcagaaatgggagagagagattgccaaaacgcaataccagcttctactatacccgacattttcgtctgtcgtacatgatgataaaatactgagtctaactaactctttacatggctgtaaatgcgaccattgctacttctacagatgcacttttgctacaattggcaatgcgtttgtgcatggataatcttacaccattgtatgtccagctaa

SEQ ID NO: 91624 - DNA, 391 bp, Glycine max
  unsure (1)..(391): unsure at all n locations
gcttctttgagaaaacttccttgagaagctagagcttatcttcacaccccctataatagctaagctcacccccatgacaaaaaaaacatgaaaatacaaaaacaagtccttactacaaagactactcaaaattccccgaaatacaaggcttaaaccctatactactagaatggccaaaatacaacgccaaacgaaggagaaacctattctaatatttacaaagataagcgggctcatacttagcccatgggctcgaaatctaccctaaggctcatgagaaccctanggcctacccttggatctctagcccaatcaacttggagtcttctacccaatgcccttgcgggataggatagcatcagttnttctaagtgaaagtgtcatgaggaca

SEQ ID NO: 91625 - DNA, 206 bp, Glycine max
  unsure (1)..(206): unsure at all n locations
acttattttagattaacttttatacactctatccananttgtcggaggcattgaaaaactatacatgttgttaagaattaacatatgcccatctagtagatctagacatggatatgaaggagaaaattatcatcataatgatnaaactgttgttagcttattatatggaaagactggacacatggcatacaaatgtagacatatgc

SEQ ID NO: 91626 - DNA, 315 bp, Glycine max
  unsure (1)..(315): unsure at all n locations
taagtcaccggcaggctgcaagcttnagtatgcccgagcattcatcctcttgatatgttgttgaagnatnggcgatcagaaattccattccttggattacggggttgaaccaagctcaagcttttacaaacaatgttcatcaagtccagttgaaatatggaagtaaccatcctgcacaattgcggcaaaagatgaatcgagtcacatcactgcttcgtctactgccaaacatatttaagattattgatggccttgttacttccantttcaccttgacaaaaatgtcatggaccatgctgaaaatctaaattgatt

SEQ ID NO: 91627 - DNA, 336 bp, Glycine max
ttctaatgactggtgtaaatattatcagctgcttgtactgactacaatctcatgaatagatacatgccttcaaaatattaaaatattttaaagcgttagaatgttggcatgtatcatactcttggtatgatactaaagaatctttgaaatatttacttaatcatggcaactttgcgttcactgatccttcatactaattctgagagactgaatctgatctgctgataactaaaggctgacttgctaactgaagcatgaactgcttcaactaagcttcttacattcacttttgtgaatatctgataacacaaaatttcatacgccctctatcccagt

SEQ ID NO: 91628 - DNA, 298 bp, Glycine max
  unsure (1)..(298): unsure at all n locations
agcttcaagagatcatncncttgacaacattatcggtgatatctcanaaggggtcacaactatacattctcttatagatctatgcaataatatggcttttgtgtctatgattgaacctcanaatctaaatgaagccataatagatgatcattggatagttgctatgcaagaagaactaaatcagtttgagagacacaatgtgtgggaactagtagagaaacctagaaactaccccatcataggaacaaaatgggtatttaggaataatttagatgaacatggcctaatcattangaat

SEQ ID NO: 91629 - DNA, 210 bp, Glycine max
taaaataataactactttcaccttcaattttatatgaaagagcccaatgggtagcagagatttgttttctattcctctctctaaaaatgacttgtaacagaaaaattaatactcatcctttctttctcttcatttttcaaccaacactctaattaagtattaagacatggagtcgagatggaagagaaaaaaaacagacaataaagagat

SEQ ID NO: 91630 - DNA, 391 bp, Glycine max
  unsure (1)..(391): unsure at all n locations
catcaaatcttatgattacctctccctttttatgatgacaccattgttgtaggagcacaacaagaaaaatatcttttgcatatagtttactaccccctggttttgcaatgattacttatatgagacagttgaagaatttatatttttcatatgtaaacaaattgtctcataaacaatagataatttttcttactattttatcttttatatttctctcccnctttgtcaacatcaaaaacaaatcatgaatagaggagaaagatgttaccactcgntgtaatgtatgagaatcaagtgataccaaaaggcattaaaacaatcattcaatgttaatcacagcaaaacaagtataatagcacatcaatcaaacacaatcaaatacaatcaatca

SEQ ID NO: 91631 - DNA, 321 bp, Glycine max
tcagctttattattacataattgagttattctgttactgtttcattcatttattcgctattttttccatatattcttttaagaacccatcaacaattgttacatatagcagaccaaaattccattaacatggataaactgcaaaaactcattataaattaagaaaaatggaattgctaatagtaacaaaaaaggcaaatcacctcatcagttagttcaggttgaatataatggataaattttataagaaacttaattgtaacattctgttatatttgacaaagacacatgagtccatatcagcttcattttctctttcata

SEQ ID NO: 91632 - DNA, 325 bp, Glycine max
tctaaaccatttggtcagatcttgtcatgccacaatctcttggatcttcgattcacttatattatattgtgaacctgtttcagaagacttgcttgtgccactgatgctacacttcggctttctagatattctaagcagtgctagttggaaagaaaataagacgaatataagattgtatatgttaataaatatatttataagtttataggattaaaagtatgatttaatattcctctgattaaaatttctattattatatacagagtgtgtttttttcttctccacatatgaaaatgaaatatttatttatgattaaaataaatat

SEQ ID NO: 91633 - DNA, 331 bp, Glycine max
ccggatccttagcactgcgctcagcttgcattagttaccgcaaagatcagtgtctaaaaacaattgatcatctacttgagaataaaagctaggcaataagagatgagacggaggaggaacccatgttgtgacggtcgttcctacatggtcaaatttccaccagcttcacaatatcattactcagccgatatcggcccttctcattacccaccaccctatcaaccaagaatgctcaatcatccacaaaggccacccctaaatcagccacaaagcacacctgccgcacattcaataccaaacaccacccttaacgcaagccaaaacactaact

SEQ ID NO: 91634 - DNA, 74 bp, Glycine max
tcttttctccacagagtatgagctcccacaagctcgtgaattgttcgcctactcttctgcagctctctggtctc

SEQ ID NO: 91635 - DNA, 298 bp, Glycine max
  unsure (1)..(298): unsure at all n locations
tacatcatgtgttccagaaaaaccataatgaacttcgtgttcctctaagatcaaggtagagatatcagctcctaatttatataatccttgtatcaataaatattaattattagcttggtaacttttttctcctctccctgatctcctaatgccctctttgtcaaggcatctttgcaggtccctttgactatatcctgcatcacggntatgggagctaccaggctgcgaaacttattgaacagcctcagcctcagcctcagtagagtctgattcaatcaaaatgttggtgagctctctg

SEQ ID NO: 91636 - DNA, 178 bp, Glycine max
  unsure (1)..(178): unsure at all n locations
tgcagctgagatggtagactgatacatgtcaggttggtttgtgttaatgataaacggatgccccacattatttccatgacacaaattgcaaaatgatgatgtggaaactttattgcaaactggtcatgcatgcacctatgtggacactccagtgtcaaatnttatggtcatgtgattc

SEQ ID NO: 91637 - DNA, 242 bp, Glycine max
  unsure (1)..(242): unsure at all n locations
ttctctcccctttgttacatatataggccaaagtgctgcaaacatgaataatntaatcatacacaaagcataatttgtaaacanacattaaagaatcttgaacataccataagaaaaaccatgaatanaccaaatggaaatgcanaccacttagtcatataacacanaccatanatatcatgttcagtcatactaagcanatattaaaagaaatactaagttntcaaatgtcataataatat

SEQ ID NO: 91638 - DNA, 338 bp, Glycine max
  unsure (1)..(338): unsure at all n locations
atccttaagtcacctgcggcatgcannagctgtgaatngccatggttggatgagttatacatacccattctgctctanggctttgtgatgatgtttatatgctgaaattgcctatggaaacttgtagagacgaagggtagagttaacctacggttggaaagtgagaatgtggtgttatgagtggaaaaagagtgatgctttgagagttggagggtaagtctgaattctgtggtaaatggaggttaaaatgagttaatcctancttgaaatgtcatttacgacatgtgagaaaagttatgctgtgctagagggaaaaacacatgaccaaagtgaacaaa

SEQ ID NO: 91639 - DNA, 66 bp, Glycine max
aatggttaaataaaagctgaattagatgctggaagtttgtcaattggctgccagttgaattacata

SEQ ID NO: 91640 - DNA, 256 bp, Glycine max
  unsure (1)..(256): unsure at all n locations
tcataaaacacataaagcatggtgaaataacgaaggcatatggccggtcaaacaaaggccatgatattgtcttgaaggagtaacgangaatagtgtgaataccaatagcgagtcttatctctctttttttctccctcacacttcctgaatgttctatctcttccacgtttccttacttacccttcctaatttttgcnttctcttttataagagctggttttttcttcttataaaatccactagttaaactatatac

SEQ ID NO: 91641 - DNA, 407 bp, Glycine max
  unsure (1)..(407): unsure at all n locations
tacttgtcgtatgatcccacgtgcggtgcttttggcggttgacgcaaacctcatctcatgaataattctactagtaatttcgatatgtctgcagtttcaaagagatacgttattcttctagacaatgcaatantgaatattagtggttaaaagcactatgttntattctttttatacaatgcaatgtgaagtgaaattgtgattgaatattagtgtttagtagcactacgtcttaacacgtttcaatttcacgtgtgttctagtgagggatggtttcataagatattatatgagcaaggattctccgcngctacatttactttatctacatgcataaacaaatgtgagctaacgtcactgagacccgagaaacatgtttgaatgaactcccacaccctcaaatattg

SEQ ID NO: 91642 - DNA, 226 bp, Glycine max
  unsure (1)..(226): unsure at all n locations
cttaagncacctgcggcatgcaagcaggagagactattgtcncgtagatagtattaattcttgtgtcaacagangngcgaagcaagttatgattgcaaatgagtatataactgtcaccatggtttagaaacatattaatgaatctgtgaacatacccaangtntcttataaaggaacacaatatagaccatgagcattgctaacctgcaatggttgtacaatatgt

SEQ ID NO: 91643 - DNA, 80 bp, Glycine max
caacatcctgtaaatgtttatacctggcgcctcaatgacaatccctaatggtttgccaactagagtggtttttataatca

SEQ ID NO: 91644 - DNA, 276 bp, Glycine max
  unsure (1)..(276): unsure at all n locations
tttcatgaatttaccatggtcattggtcgtggtaagtttacaacgctcgttgccaaatctttgacactatcgatagagggttgttgacattttattgtggccatgttgtttaccatggtcgtggtaaatgtaccatgaccataatcaagttcagtgtcttcaaatgcttatacaatcctacaantttcaactttttcactcaattgtgcacatgtacttttgccatattaaactaacgtcctaacatgagttatgcacagaaaatgcatgcaaaat

SEQ ID NO: 91645 - DNA, 173 bp, Glycine max
  unsure (1)..(173): unsure at all n locations
aattcaaaatttaatagctattgaaatcattntggccactggtaatnattacatcctctggtaatcgattaccagagagtaaatctctttgaaaaacacttttaacttaaatttcttggccaaaaccttttgctacttcaattgaaatcccttcctattaatatacatcttct

SEQ ID NO: 91646 - DNA, 239 bp, Glycine max
  unsure (1)..(239): unsure at all n locations
taaaaaaaaacttttctctttccttttattattattntatttaagccatgccacatgtccccatttgagtggagaaagaagggcccactttctcttttgattgtgacccatacttcaccacaaaaagtgagaaaaatctgacctttgaaacgctaaaatcctgcctcagtttgcatgccgttcctctgggtgcaggttctcgcgtttctctgcgtccgtcgggccagttttcgaaagta

SEQ ID NO: 91647 - DNA, 247 bp, Glycine max
  unsure (1)..(247): unsure at all n locations
ctaagcttagctgtcaatgctccggtgctgcatggagggcaaggtctgatggtggtatcatatgagcacaaaccacagacccttgtgacaggtacagatntctagttcaaggccagctgggttaccaagttaaccaatgcatccagttttgctttaangcttcttagttcagatgatgcagctgagtttgtagctacctcttgcactcctctaatgactatagcatcatttctggcgctaaactgat

SEQ ID NO: 91648 - DNA, 378 bp, Glycine max
  unsure (1)..(378): unsure at all n locations
agctntgcttctacattntccactgccattcattgaccagatgcttgaacgcctgacagagaaatctcactactgtttccttgatggtttttctggttatatgcaaatcactattgctcctgaggattangaaaaaaccacattcacctgccccttcagcacttttgcctataagaggatgcctttcggcatgtgcaatgcccctggtaccttccagcggtgcatgatcagtattnttagtgaattttttanaaaaatgcatagagatgtttatggatgattttactgtatatggatcctcttttgatatttgtttggatagtctggaaaaggttntgaatagatgcattgaaactaaccctattctaaaatttgaaa

SEQ ID NO: 91649 - DNA, 278 bp, Glycine max
  unsure (1)..(278): unsure at all n locations
ctctactctcacctgatgaantcgtggctacttcatgcactcctctaatgacaatagcatcacttctggcctttattgtgggagttgagccatcttctcaattaaatttctggctttagcaggggtcatgtctncaannggctcaccactggcagcatctatcatacttctctttcatgtngtgagtccttcataaaaatattggagaagaagctgctctgaaatctggtggtagggcaacaagcacaaattnntttaaatatctcccagtattcata

SEQ ID NO: 91650 - DNA, 354 bp, Glycine max
  unsure (1)..(354): unsure at all n locations
tatattgtntaacagtatgaagaatttactcctaacgagataattatttttcttatatcataaaagtttactatagttaaaagtgatgttatctcttaagttttacttgtgtaatatggaattctatttttacaacatgaaattctatactcaaaaaatattgtttttcaccaatgatgcaatttagcttaatattgaaatcaaaaaagcatttatacatgtgtntagttgtaaatagtttcaatctttattagttttgaaatattcaccaatgagccatctaaaatattggctcaataaaataagtatatttaaatatacttatcttataattactattaaaactactacttt

SEQ ID NO: 91651 - DNA, 331 bp, Glycine max
acttcagcatggatcatctcaaggccgaatttcgtcatgatactagcttacacggacttttccctatatgtgacatgtagacctatatgtctttatatcagcagatataaggcactcttattgtctaacgagttcattctacttactgtgacctcataaactaggcaactaccaatgaatcaattgatgctactactatgctgctacttgtaatttcttgaatatgcctgcctgctgcctgcatacctgctttctacttcacactatctgtgctcatattgacatcttgtgtgataatggtgagatgtcatagctctttatactgatacca

SEQ ID NO: 91652 - DNA, 301 bp, Glycine max
ctatactactattgatcttattctgaagacacctcaatgtgctcgtcctctttttttgaaaagagataatgcgcaaactggtagtctagaaacattcaaaactgtgatcattaaccactccatttaagcctggtatgctgctctagggggttgtaaattatcttgctcacaaactacataacttttattaccaatttatgtatgataaaacatgggttcactgctcatctctctctctctctctatcgaccatgtcgacttgcggagcggcccaagctaccctcatgtgcataacactgtg

SEQ ID NO: 91653 - DNA, 256 bp, Glycine max
  unsure (1)..(256): unsure at all n locations
ccatcatatctctcaaaccccatacccacgaaatttaagagagaaagaagtccacccaaacctgaattttcgaagtcccactcgtagccacgcactttacgactncgaagatgctctcctttcgcganttggagcaganatgagcaccaaaggttgaagctttgtcggcaacaatggtggatgggagaaaagaaaaaaaagctgcgtgagagagagggagagctgtctgacattttgtggggctgagtgaggagag

SEQ ID NO: 91654 - DNA, 445 bp, Glycine max
gcttgcacgtgtattgactgtatattgaagattctttttttttaatgtcttatccttccggcacgggagtttcactaggtcccatgtcaaccctctaacatggcaactaataaatatgaattacgtaaggatagggtcatcaagtcttttttctaattgaatccagctagtatcactttcggacagaatccttcttatcacggtaatgcgaagggatgaataaattaagagggttttgttctcttacaagggtgattaaattgaataacgttataataaaaaaaatattattattttaattctcgtttgtgagttgtacttcatatatgcaactgaactttattcataaaatagataattgtcgtataaatacagatatgcttctattaatatatacggtaaatataattttgaaggcttacgaatttggtccaattttttttat

SEQ ID NO: 91655 - DNA, 310 bp, Glycine max
  unsure (1)..(310): unsure at all n locations
agcttgaatattacttgggtattttcatttgctgacttgtttgcattgatgaagaacaatggtttgtgtgccaatttaacaagaagcatctagtttgataatgcacacttcatgtcactgtgcattttggaggcatgccacataacttattcataatcgtntagttaaaagtagagtttcactttaataatatacttaatactgaaaaagtcgtataagatattggagtgaaactctaatttttaattatagaatggtacgaaaagcttgtaaagaattgcatcntaaatttttagcaagtctcattaat

SEQ ID NO: 91656 - DNA, 220 bp, Glycine max
  unsure (1)..(220): unsure at all n locations
acctcccatctntaatggagtgggtaccactactggataacccgcatgcaaatctctatagaggcaatagaagttaaatattgggaagccatagaacaaggaccttatgttctctctataatggccggaagtgcaacaattgaaaaacctatagcatattggactgacgaagaaagaagactagtacaatataatttaaaggccaaaaatattattacat

SEQ ID NO: 91657 - DNA, 310 bp, Glycine max
  unsure (1)..(310): unsure at all n locations
agctntgtagcatagggactaaagngagngagctttggacatcttgtcctatggctacagacggaggagctggagtggatgatgaanggatgtcctccattctaactctatttcccgatgccatctgtaactaaaaagaactcaaaattccttataccaaaattgttccagtttaacaacagaaatatacgctgaaattaacaataggcgcttagcgggatacaactcgctcaacgcgcccttagaaacataacatatcggcttagctggagccaagctcacttatcccaatagttattgtgacgaaatg

SEQ ID NO: 91658 - DNA, 194 bp, Glycine max
caccagcccagtgggaggtcatttcggtgtgaaggggaccttagctcgtttaaccgctgccttctcatgacccaacatggcgaaagatgtgaaaagatgggtgcaggagtgttccatatgccaacaacaaaagtactccacccatcgaccttatggcttgttgaatccgctgcctatcccttctcaagttggga

SEQ ID NO: 91659 - DNA, 217 bp, Glycine max
  unsure (1)..(217): unsure at all n locations
agcttcccatgtgctaggctataaatattaacatgcgtaacacttttcgtaactttgatnaatgaaaaacttatgagaaacaattcaaagttcaacttctctctctaatctccttcaattgcgacacctcgcccnccccacccgccctctgtctatatctgtcatattctcttcttccattgaagcttcctctttaagcttcttatacaagccactc

SEQ ID NO: 91660 - DNA, 428 bp, Glycine max
  unsure (1)..(428): unsure at all n locations
gcttcaagagtggtatgatacaagtcgtatcgttaagatagttagcactgatagttctacttaaaacaacttctacctactgagatgcatgattacatatgaagataagactaaatcacaatcatacaatgtcatcatgattgncatgtaaaaacaaactttttagcttaagctaatcttcatgtgcttctcatcttacacaacttggtgcttaggtgttgaatgccangatatacagtaatagctagagagagtgaacctaatatatctgttagcatctacacatctagttattccatctataagatctctatgaactctctgaatatatacaccaaatacacacaagtgggaatacacaactatattgataccatatgatgtggacagttgtgaccctatcatcacgattgtaaattaacgcccaa

SEQ ID NO: 91661 - DNA, 81 bp, Glycine max
  unsure (1)..(81): unsure at all n locations
actcatgcttgaaatgcccgaagccagtgttgatatagctggatgataatgactggacacaagattgagttccccnagtac

SEQ ID NO: 91662 - DNA, 401 bp, Glycine max
  unsure (1)..(401): unsure at all n locations
ttgccaccttctgactgtgtggggatggggattgacactcactcatgtacatttccnctactgttcttagtaacaacccttagttagtattggtggtacttaccctaatattgtatgacaactgtgtagtatgacagtgctaacattaactggaacttactgacttatgttacattaatacaaaactttacaaatttctaaccttatcttttcttctgtctattgatcgtatgatcaagtattaaacataatggccccccttatccattaactaaggtggcgacaggttataaaactagtccctgatactcccagagatttaaagacactaactacattttgatataacaacaattaatctgttgaaaggtgagaacactgggctatccagatatagttaa

SEQ ID NO: 91663 - DNA, 311 bp, Glycine max
gagagagggggagcacaaaattgaaggaagtacacaggagagaaagtgaactttgagttgtgtctcacaagactctcattcatcaaagttacaacaagtgttacacatgcttgtatttatagactagggtgcttccttgagaagctttcttgagaaaacttccttgagaagcttctttgagagaacttccttgagaagctagagcttagctacacacacccctctaataactaagctcacctccttgagaagcttccttgagaagatttctaaagaagctagagcttagctacacatacctctctaatagc

SEQ ID NO: 91664 - DNA, 448 bp, Glycine max
  unsure (1)..(448): unsure at all n locations
ttgtcccctggcgctactacattcacttgtgatctttgtccaccatttcgctntgnnaccatcagacaatgctcattgtacgaagtatctacacttttcatggcaatgataagacgatctcgacaaggggagagagtcatntcattctcacaagatgctcgtntaagccctntaantggggatggcggtgcccccaggtatgtnttttcatggacttcaccattcagtatgtttgggtgactngttttgaatgggctcttacattttgtttttgtagggctcctttgagagagttgcacttgtacaatatcnaaagaatggataatgcatcccttggtgcatcatttgcagcatgctcttctcttcttgattagggaaattgttggctcgtaanttatttacttcaactctcgctctttccttcttttcattataagcaatgctcact

SEQ ID NO: 91665 - DNA, 167 bp, Glycine max
  unsure (1)..(167): unsure at all n locations
tgtgatctacattctacggctatctaatanggaataatcttaactatttgtttaataccgacaagggcatttattctgcttctagttcaactaatatttgtgtgcactaagatactctatttttcttgtctgtatccatgggtatgctacttgcagcacacgatcta

SEQ ID NO: 91666 - DNA, 404 bp, Glycine max
  unsure (1)..(404): unsure at all n locations
gtcacctgcggcatgcaagcttgtgactcttggcaatttctataacaaactagtcatttataaagttgtgactcttggaaaaatcttcagaaaaaagtcactcgaagaattgtgactnttggaaatgtatntttcaaaatcagtcattggtaatcgattaccattaaggtgtaatcgattacacaccaatagatgtgactcttcattttgaattttgaaaatcttaacgctttaaatcattggtaatcgattactaccttctggtaatcgattaccaaagagtaaaactctttggtaatgattttgtgaaaacttcttgtgctactcaatngtttgaaaaactcttttaatacttatctttgatgagtcttctcttgagacttgaatcttgatcttgaatattc

SEQ ID NO: 91667 - DNA, 350 bp, Glycine max
  unsure (1)..(350): unsure at all n locations
caattacaacacataacactgttaatgaaccatctaatcagacaaactatagaagatggacgatatattgttacacacaattgacactccactatactagacgatactagtagtggtgtccaatcacttctttcaatgtcatccactcttccttctaacaatcttcaccttagttcaataagagtcctaaattagatgtactactatctaatatgagtatnntacgttaagtagatccaaccagtgatgaacttggtcaacancangcttgtgacatatagtcgatctcttctataacttctgatacaatctctctaaacgatgaagggattgatgcatatgttagctta

SEQ ID NO: 91668 - DNA, 351 bp, Glycine max
  unsure (1)..(351): unsure at all n locations
tgttggtttatatatattgagttaactactatgtcatcaatgtacacttctatacccttgccaatagaatcatggaagatggggttcattgccctttggaaggtgttctacngctggcaagtgcacccgatcgtgcaagtggtataaaacgggtagtgaataccgagtatcgaactctcggggaactcgttttacttggtaaagctgtggttcantaattaaacacctttggatgaaagattggtgcgtggtatgaacaagtatgccactaaactattcaacaataaatcacgtgaatagtggtgtgtgaagacagataaagaatgtgttggncntcttactggatgactg

SEQ ID NO: 91669 - DNA, 136 bp, Glycine max
  unsure (1)..(136): unsure at all n locations
catctaatntctgtctcttcaattatataatgataatctcgaacgctctgtcagatgtntaattctttgtcactcaattatgtgagatctaatctatatcatgtagaatcctcttcanatactctntgctctgtct

SEQ ID NO: 91670 - DNA, 402 bp, Glycine max
  unsure (1)..(402): unsure at all n locations
ctctatgctagtacccatgggcgtgagagggggtgtcgaaaagctgccttaattgtggtaaaccctatcanggccggtcttggtggttgtttttcgatgcgaccgcccacggcccatgactaaagggggcccaaaaagaaatctagatagctatagtgtgaggaggaaaaaaaattcaatgacttttagtggcaactatatctcgtcggctttctaaaactccgttaattcttaaattntaactttttcaagcatactacaccaacaaaactaaatgtttattcgcatgtaatattctatatctgtatgtatatatgagcacagaaaatgttttgtatgtaataaaatgagcttgtaaacaattgcctatcattcaattcaaatcaccctgattcataaagt

SEQ ID NO: 91671 - DNA, 235 bp, Glycine max
  unsure (1)..(235): unsure at all n locations
acttatgattacagaggggggattgatgtctgtgagtcaagtcacacgacaattaaatcgttctgtaacctntttccctcaattatgtatattgcaggattagatgatggngatgacgactcgcgttgggtgaacaacaagatggactctattacttgtgttcaatgaataacgcgcacaaagtaaataccatcanagctgccttcacttcaaacacctcangtattttgtgaca

SEQ ID NO: 91672 - DNA, 336 bp, Glycine max
agcttttcaattccttctatgtacccgtggttggctattatttgtttgatgtatgtttatacttgggttcattcgctgtctatacccccttttgacgtgcttcagtcatatatttaagggatatctcgcctaatctagaaataaaataaatttccaccgatcatttgaattggatcatccgctaatttccgttaacatgaattctgaccgttcggtcgtgctgtaaccactgtggaaataacacaagagggtaaataatactataataatcaaaaataccgtttaagaaaataaagcgaacaaatcaatcagacggtttctctttgggatttctca

SEQ ID NO: 91673 - DNA, 212 bp, Glycine max
  unsure (1)..(212): unsure at all n locations
gatggatcgggtacatctctgcttcgtctactgtcaaacacatttancgactgtaatgttcttgttacttccagtttcaccttgacanagatgtcatgtgaccatgttgaaaatctaaattgattcaaccccatatgctgcgtaaagattcgcaatacttcaactgtgcatcattcgcatacatccatgttcgtcattggattctttccttg

SEQ ID NO: 91674 - DNA, 340 bp, Glycine max
  unsure (1)..(340): unsure at all n locations
agcttttatccaggcactctctnggnggtgaagtttctccttccatggcttattccctagtggatgacgcctcctctctcctcttctcctttgtcttccactgtaactccatgactgagaatcaccattgaaggaccttagtgaagttcaaagatccagcctccatagaagcttctcaaccaagctttcatcactatgggaccttggaagtctcctaacccgatggattcccaacaagctttttctataagtggaatactattggggaatctattctttgtaatgcgaatctgctctaacattcttctgngcatattccagattattaccacactcatat

SEQ ID NO: 91675 - DNA, 413 bp, Glycine max
  unsure (1)..(413): unsure at all n locations
ctttgagcctttgttcctttccttgtttngaagctcactacaagccttaagttgaaaaccatgatattaccatatccttaaggaattttggagctttggaattgatntgggaataagtgtggtggggtttttgttcattggacaacttgttttgtngactatgcttcatgatgtattttgggccatacttgatgtacattgtatattggttaaatgttggacatgctgaatgaaatgtttgttctcaaagggcaaaaaaaaaacaaaaaaaatcgaaaaannaagnaaaaaaacattaggtgattaataaatcttatggccaagatgataactctggttatcttatgttaattatctactctttattctattttttctaatgcctatccttgtcttatcttggataccctatc

SEQ ID NO: 91676 - DNA, 272 bp, Glycine max
  unsure (1)..(272): unsure at all n locations
tgatattaactaccgacgtttatattgaatcttgtgacattgagttttccgggctatgatcaattatgtaattctatgttgtgatggacttactaccaacctatgatggtaaaaatataagtgagtccaatatcggaggcaatgacaacatgcaaatatttacggttcgaagcctaanaaataagcaacgatactattacaaacgcttaggagtaaatggcaatgacacaccacacaatctattaactaaatgcatatgggaaaatggcatc

SEQ ID NO: 91677 - DNA, 203 bp, Glycine max
  unsure (1)..(203): unsure at all n locations
gctcgtactacaataaaacangngaatgaactacgtttatttccttttcttgaatcgagagtaaggaataatattataattgatgagtgacaactgtttgtacacaactntctcacttcacatttcacaacaaatccttgttcctttatctcggngggttgtttttgttatcaagaaatcaattcgaatatgtctaacctctt

SEQ ID NO: 91678 - DNA, 306 bp, Glycine max
  unsure (1)..(306): unsure at all n locations
gcttccatgtgctaggctatanaaattacatgcttacacttttcgtaaccttgataaatgaagaacctatgagaaacaattcaaaggtcaacttctctctctaatctcctttcaattccacacctcgcccccccccccccccctgtctntgtctctntgatattctcttcttccattgaagcttcctctttaagcttcttatccaagccactctcttggtggtgaagcttctccttccatggcttattctctagtggatgacgtctcctctaacctcttctcctttatctttcgctgcattgcatg

SEQ ID NO: 91679 - DNA, 306 bp, Glycine max
  unsure (1)..(306): unsure at all n locations
tggggactgggagcagaaggcccactctttcaatgtgatctcaaacaaacgaatagctcattcattgtccatanaactcttagtgggactgtcaaccagcactgaaggactactactttaagtttatgacacaaaattntgatccaatccaaaacagcagtaactatccccaacaatcacttcacctggagcaagttactatcaatctatcttgtgaatcacatacactgtgttaataaaagatgcacagacattacacactaaaaaattatgtattttcaaagcacaaaactctctatgaataaa

SEQ ID NO: 91680 - DNA, 192 bp, Glycine max
ctcttggaatttcttgttatatggttcaacaagcttttgaaatttctcttttttggttcaagggaaaagattattgttagagaaatggttgtgtataatgtgtgacctttgggtttctaacatatcaatgtcctcctagatcttttaacaactagatgtgagccctcttgaggactgaaccaccataaactc

SEQ ID NO: 91681 - DNA, 337 bp, Glycine max
gcgcatgagcgggcttattggaaaaacccacatcccacatcagcttatgataatgccacgatagaatatataaaagggaggcaaccctcatcctaggagttagggtttagggttgagttagactcaaacccacattctaagaggatttaagattcgtatggatgtacttccctctttctattctatcctaatgtgtctacttctagcaaactctcaccaaagatctttgtgcatgtaatgtgtctcatttgtccatgttcatggtcaagactcaagacaagggtagtaaacttgatcctagagctataaagtgtgcctctcgttgatacttctatgc

SEQ ID NO: 91682 - DNA, 245 bp, Glycine max
  unsure (1)..(245): unsure at all n locations
tctgcctcagttaccaagctacactgtgtctcttgtgtnaatggccccctgatcaatggcgtgtggaatacgtttattgatcatacagacggcatgcgctgctcanagtctcttgccaagacacggtcatttctctatatgctctcgctgcttcgtgaccgctgaactgaaacagtggatgcggcgattccatgcctatcatttgtgtatcggaagagccgacatataatggacggattatcact

SEQ ID NO: 91683 - DNA, 340 bp, Glycine max
  unsure (1)..(340): unsure at all n locations
taagggtatctcatcctttgtctttatgttctanacctcaaggacactcatgnatgcaaatntactttttctgttatgaattcacacgtaaattccactctttgtaaaaatgctcatatttggcattctaggtttggtcatatataagacaaagttttcaatcatttgaataataaaattagtttacaattctctcctaatttcttttctttctaatgttctatttttccacttgctaaacttagaagattatcctttcctaactctaacaatntatcttatttacctcttgatttactctaatgtgatatatggngtccctatgcccaccctacatatg

SEQ ID NO: 91684 - DNA, 151 bp, Glycine max
  unsure (1)..(151): unsure at all n locations
tctctcttttatatatcntagtgcttaaggcattgcagacaatgattattacattgtctatgcttctggcannagcatatatatataactcaagctagttggttagtagctagtaacagatactatatatgcagcttcagttgtattttga

SEQ ID NO: 91685 - DNA, 351 bp, Glycine max
  unsure (1)..(351): unsure at all n locations
agcttaacgtgaaaggaacaagtacttcactgacggtaatttatgcttatatataagannatntttcttgtttccagaatttgtggaagttgtgtgattaattaataatcagtgtacccaagcttttatttatactgtttacatgttttctagtccaagatgatccctaacttgactctcaaattgcagaacgcattataactatacagttaatacctaattactcatttatcacatgcttaatatctgtaactactcttactgcttatctgtttttgaatttggtgtcatttatgattataacacttgtttcttgtataatggcctgactatgtcatgtcatatattata

SEQ ID NO: 91686 - DNA, 200 bp, Glycine max
  unsure (1)..(200): unsure at all n locations
cttgcttcttcttttctgtcaatatttataaagagtttatcttttatcatttctaggaattatatattaacgtgngacttacgtatagttatggtgtcaatattntcttgtacaatatcngattgtctgaactntgattgctacgagaaacgatggggtgaaattcatgatatacgtgccactgcttaacactggtatct

SEQ ID NO: 91687 - DNA, 384 bp, Glycine max
  unsure (1)..(384): unsure at all n locations
actactctagtcttgagtaataagtcatttaccgtatacactaggcaatattagagagacaaaatagacaaacatntatgcgcacattcacaaggacaaccttcttctcgtgcgttcacgcacactattatctaagctagggtggcaaattaacaagaaacccactcttgcatttaccccatttcatacgggacgtgtccttctttntatttccctctctctctctctntaacttctncttgccactttttgtaccaaccgtaactacccaaccacgctntnaatatttgtataaaataacatatattaatgaacttattatatcccataccatcatatntatagtatttataaacaacttcactttantcaccgagtaccata

SEQ ID NO: 91688 - DNA, 496 bp, Glycine max
  unsure (1)..(496): unsure at all n locations
cgtcttcttttaattttatactccttactntntcttacatggcacacaccccaactattcattgctatgtatctttggttctaaatgttttccttacacttgggatacacgacgcaacanattcgaccctaaaacccttccttgtgtgtttgttggatatagtgatatacgtaaaggacataaatgctntcatccttctagtaagaaattctntacctcacaacatgttggttttgacgagtcattctattccatatagactaatcatcatcataccaatntctttctctacacagcatgtagtaagcataattgatacttgggctacctcatactaactcaaatcttgtgcagacctaacagcaataacaacagcttctgcttccgctccgccatgcctcaaatctttaatgcaatctctagcctttacaacttctattgcatctnttggtaaccagacaaccctcattgctgacatgagaccttgatcacacac

SEQ ID NO: 91689 - DNA, 286 bp, Glycine max
  unsure (1)..(286): unsure at all n locations
atccttaagcaccgcggctgcagcttaacgtttaatgactcctcggtatcattattaaaangttggngtttcttacataaaaagtgaaacatggcaatcttaaaaagctatagtcattagagctatangnttgaaacagtggatttatctgcagctgatttcaggggtcattagagctattctcatagtaatgggacttcactctttcacgttggagctgtagtatgtgtcatatattgatccanacattaactattaccacccttgatacttatataaatatatg

SEQ ID NO: 91690 - DNA, 354 bp, Glycine max
ttagcttcaatgcaagataacatactcatgactaggaacccaaagattgtgtttaaaattagaaaagcatgaaaatacggacttgcttgtaagaattcgggctgccccatgattggtactttgcacctaagtaacgtgggaaatgcttttcaatggtatgtagatatatgtgtcaatataaggggcataaaattcctcgccaagtatgaatacattttttcttaaatgaatgtatgatagcgtggaatgccttcttgaatgcaaatatgtgcaggatgtaatttgctctccaatatgcctataaataaatatgagtgaaacagtaaaaattgtatggtgtgcttacatgtatgt

SEQ ID NO: 91691 - DNA, 197 bp, Glycine max
  unsure (1)..(197): unsure at all n locations
gagaagttcaagtccatagccatcanagtctgaagagagtatgatgaactaagggacgtcaatatggccaccgctgaagccttggaacgagaaaccaagaatgcccgtaaggaagaacacgaccaatacaagtnttgaggtgctntatagggcagcaatagtgagctcaagctccgaagaggtgaaaggaatcatta

SEQ ID NO: 91692 - DNA, 393 bp, Glycine max
  unsure (1)..(393): unsure at all n locations
agcttcaatggagcttacatcattgnccttggatgttttatttntacttttatcagatgttcacacatgtgcgcagaaggaagctggttatgaaccaaattggaattatatatgtgcagctgtggtgatgccaattttcaagtgtacaggtctctaatttttgtgtgggcttggtgctgataaaaagtaaagttgaagggtgattatatgaaggcttggtggtgggttactacttactagtgcctcttattttcttcataaggtttaaggggttaggcgttttttgtttatatcggcctatagaatatatgtatttttggtttacatttatgagtatgatggattaatttactttctaaaagtgagtggtgatcacttatttagaagatcact

SEQ ID NO: 91693 - DNA, 216 bp, Glycine max
  unsure (1)..(216): unsure at all n locations
agctaatctagctgctagccatgagcaaagactagaggacgagcatgcanacgtatcggctctgctagtataaagggaagcaagagagagagtgatagagtcattacacggagaagctatgatgtggatggataggttntctttcactctgaatatgagtcaagagcttccaaggcttgtagccaaagccaatgcaatggcggacgtgtactcaac

SEQ ID NO: 91694 - DNA, 311 bp, Glycine max
  unsure (1)..(311): unsure at all n locations
agctntagtggacctaattcttctagacggaatctttttttgtttgtcaacaaagaactgtgttaagatccttatgaaagttaacttccctatatgaggaggtaatcttgataattatggacaaccattaaaagatagttgttgtagagcttttaagcataccaaactgttgaataattttggcggagggtaatcttgataattctggcagtaattttggttaaagacctttgaaagatatgtgttggagagattttaagcatatcatagtgttaggcaacattctaagacgagtgctacgatcctaattc

SEQ ID NO: 91695 - DNA, 235 bp, Glycine max
  unsure (1)..(235): unsure at all n locations
ttgctctggctanatgcaattattgctactacttatattattccttaatcaacataattatagtatccttatgtaatataatcattcagcggttctcgttctaatatattaataaatatgttatttcttggtcctggataacttatcgtgatatatgtatctgctcttgagaaaagatccatatgttaggctgntcgtatacttcacttcntttcaactattaatattcaccact

SEQ ID NO: 91696 - DNA, 211 bp, Glycine max
gcgcgtgcaagcatgattaatatgctgtctcaagaagctttttgtggcttctttgagaagctgtctcaagagactagattgttatctatccacaaccttctattaactaaatgaacctccttgaaaataaatacggatgaaaaataacagttcgaatagccggacatcctacatcactactgataatatatatatatatatatatatatat

SEQ ID NO: 91697 - DNA, 228 bp, Glycine max
  unsure (1)..(228): unsure at all n locations
tgttgtaatctggnttaatcactggtaaaacataatctaacctatcgttcacgctgtaacctcggttaaacaaaaaanaaagcacaataagaataaaataatcaaaatatcttgtaaaataagaataaaataatcaaaatatatttgaataaaataataaaaaaaatcaatcggacgtttttctttggaagttctcttggatcaatngactaataaccaaagtgaaac

SEQ ID NO: 91698 - DNA, 287 bp, Glycine max
  unsure (1)..(287): unsure at all n locations
agctttatgcatccagntgtgcttacacgattgactacgacaagatcttcctcactgttgcagaggctgttgcatattattctccaaagctggttgaggacccttgaaaaatatatataaatttttttgttggtctacaaaaaaaaatgtggacgcatctatatatgaaatgttgtaagggaatagaaatatagaccacaagttttgagtttacttgagttagctagtgaatgatatatgacaagaaacgtgtgaaggatgagaattcatatgacattggtcactac

SEQ ID NO: 91699 - DNA, 261 bp, Glycine max
  unsure (1)..(261): unsure at all n locations
taactagctgtcgaacctctgagacangctaacttacagcantatggtcaacataataanaccaaaacttantctgcagatctctctcgtaagactaagtttcgatcctgcttcaatcaagttctaaggcaatagtacattatccaatgctaaagtcacctaactatgcacacaaatggatgatcggaccanaagcatacaaacattaatcattgactgaagcattgaacatagaanacataatcaattagatattacgta

SEQ ID NO: 91700 - DNA, 400 bp, Glycine max
  unsure (1)..(400): unsure at all n locations
agcttanagaggaagcttcattgtgttgttatattgtgatagacagaggggggagcacgacactgaatgaggaaaagagggaaagaagtcgaactttgaagtgtgtctcacaggactctcattcatcaaagttataacaagtgttacacatgcttctatttatagcctacgtaactttcttgagaatctagagcttatctacacatacccctctaataaataagctcacctccttgagaaacttacttgataagattcctagagaagcttgagcttagctacacacaccccttataatatctaatcttaccccatgccaaaatacatgataatacaaaatagtctatactactaagactactcnnaatggcctgaaatacaaggcgaaaccttatactac

SEQ ID NO: 91701 - DNA, 371 bp, Glycine max
  unsure (1)..(371): unsure at all n locations
gctttgatctaccaccaccgcagccaccatcatcttagttttctattactcttaacantacaagtactttgttttctagctgtgtatttggccatgtaatgacatctggatgaattattatttctttatttgcatggtttgattgaacaattatgaattatgttatatgactatgtggggtttatatatgtgatatattcatgtttcttgctccacgattggcttatattcttcaatgtatgtcttgtgaatgattaatagtatattattgtcttatacttgatacacactttggctctgtgttgggatttcagaatgaaacccgcacatgcttgtgagtgttgaaaaatatatataaaaagcgaaaaatg

SEQ ID NO: 91702 - DNA, 138 bp, Glycine max
ttccatcagtattctacgctctacaaccgttcttcatcgctcttcacgcttcaacgggtgagtacctcataccttacttttcaattcattctatgtacccgaggtggtccacatttggattcatgtatctatattctc

SEQ ID NO: 91703 - DNA, 140 bp, Glycine max
  unsure (1)..(140): unsure at all n locations
gatgtggagaactagtttgcaccatcgttcgacctccctataccacatgtgatggaccccatatcctacagcttgaatgngaagtgtaaaggggaaacttttgctttattcgtgaccatagagaggacctggagatatgt

SEQ ID NO: 91704 - DNA, 414 bp, Glycine max
  unsure (1)..(414): unsure at all n locations
agcttaanagcttctcttgaagtgctacgttgattttgaacatcttagagcatctncaatgagaaatggntacatgaattgtttaactttaagcaatgttgcttaatattgtaaggccccactgatctatatttaatataaaaatattataagaatttttctttntatattaaaantaaatttttggtgcanttgcgacaccttatacaaacctaattatataaaaataataaattagttgcacattntttttaaaataataatgagccataagttgtgtaaaaaaggtaattaacaatagataataatttaattattgaatatgcattattnttttttgtaattaggctaattaattatatgtaagaaatccgaaccaaataatgacgaaacaacatatcatgaaatgtgtca

SEQ ID NO: 91705 - DNA, 150 bp, Glycine max
  unsure (1)..(150): unsure at all n locations
acatagatgcgaaactacacttcatcagagatgtgattgaatctgagaaggtgaaggtcgataatggttcaacagaagaaaacccggctgatatgtntacaaaatccctctctagtgtcaagttcaagcactgcttggacttgataaatt

SEQ ID NO: 91706 - DNA, 376 bp, Glycine max
  unsure (1)..(376): unsure at all n locations
agagacttctcanactatntatcttctctctctagaggctctctaactntctagctntctcactctaagaagtgaattcactcttgtcttggatggtaagaatgaaggcctctacccttatttatactactcctcctccacaatgaatggtggagattacttgtatcctanggtggagaataattctctagaatgctccacacattctangagtctctacactcttctactcccttccatatccttccatactcttccataaggttccacacatatccagaatattctagaggtttccacaaacttccacaagcttctagagagttctacactactctatagttctttatgacgttctagaaaattctacactttt

SEQ ID NO: 91707 - DNA, 386 bp, Glycine max
  unsure (1)..(386): unsure at all n locations
gcttggaaggtgcttaatggggaaagaatttggatataaagagagatgggggagcacgaaattgaatggaagaaaaaggagagaagttgaactttgagttgtgtctcacaagactctcattcatcaaagntacaataagtgttatacatgcttctatttatagactaggtagcttccttaagaagctttcttgagaaaaattccttgagaagcttctttgagaaaacttcctttataagatagagcttagctacacacacccatctaaaaactaagctcacctccttgtgaagcttgcgtgagaagctagagcttatctacacaccaccccncaataactaagctcacctncttgagaagagaagctagagcttagctacataccc

SEQ ID NO: 91708 - DNA, 344 bp, Glycine max
  unsure (1)..(344): unsure at all n locations
acattcgcttagcgcatcatgtttagtggctaagcatggtgcacttatgctaagccctattctttgcagccaaatcaatggtttaattgagctaagcgcaacgcatacgcactaagtgaacttccttgcggcctggatagcgctaagctagcaaccactcgctaagttcatgcccccttgtacacagggtgcagtatattcgctaagtcgactaagagtgcagcttaatgagagttgcaggttttcttatctgcacacgtcgcttagcgtgctgctnttcgctaagcgcagttttatgtgtaaaannaaaaatgggctagcgaaacgacccgctaagcgagcgt

SEQ ID NO: 91709 - DNA, 274 bp, Glycine max
  unsure (1)..(274): unsure at all n locations
tcagctttcgcnagctacgggtaaatctgggacctagccatggtagaagtctccatatatgccatnngcctcctcgcccagtatttngatcagccgttgaagtgcttcacctttggggacttccagctatcacccatggtggaagagtttgaagaaattctgggatgcccactgggaggaaggaagccatatctttcctctgngttctatccctccatgacaagagttgccaaggtagtgaaaatctcagcacaagagttggacccatgtaagc

SEQ ID NO: 91710 - DNA, 412 bp, Glycine max
ttttggagagcaacaattaacacgacggacttgccgatacccaaaagggggattaattctattgaattattatgtcttaagtggaaacctaagtacaatgctgttatagttttatccacaagagggtctaagtatttgtatgttgagaaaattttatgaattgtatacggtaagaatggatcatgcattcatgcataaactcacaattattgttgttgtgagcatgcgcgtaagtctatttactagtgtgggaaggtcagctgagcgatttcacgtgtgatcaaggtcattgcaaacattatgccatagtagctactaccttgatatgcttatcctaacaatgtcactaattactccataatcagtattgatgttaatctcctcaaatggttatggcatgtcttgcatgtat

SEQ ID NO: 91711 - DNA, 212 bp, Glycine max
cacaacaacagctatccccaccacactcttcttcaccttcttcttcatctgtgaaccagtcccattcctcatcacatcttctgcgagtgatagtggaagttccacgatttgatggaacgaacccctctggctagattttcaagagtacatcagattttgagtaccatgccacaccagaccacgagcgtctcactattgccttcttctatatg

SEQ ID NO: 91712 - DNA, 381 bp, Glycine max
gatccttaagtcacctgcggcatgcaagcttagggctcgcgtctgacatataacattatgtgtgttcgacggcggctatccataacaacaaagcgatgtttacaagaaagatgcttacgttaacatctgatttctacagcaaactgatgttaacttatcatacactatcatcgccaccaaggattcattctgggagttactcttattccgtaggtgcagagactttatatttaatctttatgaaggagacactatagacaagatcctgctcccacaacaacaatcatatgtcaccatcttggaccactgtcaaacaagagaaagaataacatttcatatgttcaaatagcatagaactgctgaaatatatagttcatatta

SEQ ID NO: 91713 - DNA, 326 bp, Glycine max
  unsure (1)..(326): unsure at all n locations
agcttanacattcaatntcgagcgtctagatatatttctggactcattcaaacatacgagacaaatgttattgtcgattgaatttgctctgagctttagcattcaattactagcggctcgatatattacggactcatccacatcccataaaaagtattgtcccttgaattggctcagagggtaaacattccatttctagcgcccncatatattacggcactgaactcgacatcccacttacacgatattgtcgtctgaatcggctcagagcttcaacattcaatatcgagcgggtggatctattacccgactcaatcctacatccc

SEQ ID NO: 91714 - DNA, 247 bp, Glycine max
  unsure (1)..(247): unsure at all n locations
actcgcatgtctgggtgagtcctgtattatatcgagacgctcgangatgaatggtgaagctntgagcaaattcaaacgacaataacactttactctgatgtctgaatgagttccgtatatatcgagacgctcgagatgaatgtgaagctatagcaattcaacgacaaactttttctcgatgttgattgatccgtaatatgagacctcgaaatgatgttaagctttgacacatcaacgaaatactttt

SEQ ID NO: 91715 - DNA, 237 bp, Glycine max
acatattagtcgaagaaataacgctaactaatatttttagaacatttattcacaaatataataaatataatctatcttaggtgaaattgattacatgaattacctcaataaaatttttacaaaataacatttaatattatctggaaagttaaaaccgctgaacaacgttgatagtaatgactggaggtaagtacccctgaaacatattctttcttgcttatgctcattgatctgaat

SEQ ID NO: 91716 - DNA, 312 bp, Glycine max
  unsure (1)..(312): unsure at all n locations
aaaacagggcagaggcggaaaactctgtccaaaacacagaccaatgccacaacttttcttatttcaataccccaaacacattctttttgngnnnnagcgttcaccgttggatccactcaaaaactttactggagggccctagtacttattctaaattttgaccggtgggatctcctanaaaacgtccagaacccaatctgtactactctttccacaaccaggaaatacacatcatattctgattgcacaagcaaaattctgtgcacatttcacagcaaaactctgcgtaaaatgcaaattttcgaatcacac

SEQ ID NO: 91717 - DNA, 339 bp, Glycine max
  unsure (1)..(339): unsure at all n locations
acatacataggaagaaaatcattgtggtttatacttggattgcttcttattttgatacaaaagggaccgttctgtntttgttctcacacaacgttttaggttcataccacagcctgtgtcgtcaacttcaaaccaaagtatcactttcttatcttttatagatgttctcttagcatggcttgcatttggcctctctctgcacttttgtagactccgtgatttcttctggtcaagaggaaaatttggactaccaatggaagaaattgggttttcacaccattctcgcaaataatatgacccgctgcaacacattcgaaagagttagaatagtcttctatc

SEQ ID NO: 91718 - DNA, 370 bp, Glycine max
  unsure (1)..(370): unsure at all n locations
gcttgccacccagctcgcccaggcgagcagggttgcttcctccataagcaacagccttctggaggaatcttctggagggcccaagtgggcctggttgctatttgcacccccatttttactaagtacacccccttgcctttnttttggtgattcttttttcgtaaagttacggaaacttacgaatttcgtaacgatacttggtttctttccgtaacgttacggaaccttgtggattacataatcatcccctttttgacttacggaatgttacggaacctcactaattgtgcaacgatgcttccatttgatttccagtgtgtcacggaaccttacggagtgtgcatcaatattntcttttgtttcttgcatg

SEQ ID NO: 91719 - DNA, 395 bp, Glycine max
  unsure (1)..(395): unsure at all n locations
atcttttacatatccaactctcttgtatgacatttagatanangcgatattaaacggcgcatcttagtttatatcatatcatttgtgcctcatgcatcatcatgtgtgagtgaaaagaaaantttcaaagttagaaaatttcttcagaagataaaactctgtgttttaatcaactacaatcttatagtaatcgattacaaaagttgttttaagcttacagagttatatctcgtatcgcgttaatcaattacaagcttatccgaatcgattatacagttgcttttgagacaatgattgatttattaacgagtctttggtttaatcgaataccatgtgatataattgattatttctctctctataagtgtttcagaagtgaacgataacactttaat

SEQ ID NO: 91720 - DNA, 216 bp, Glycine max
  unsure (1)..(216): unsure at all n locations
tgaaagaaattcaagcattataatcataaatanatcgattaagaccaacgaaatattcaagaaagttagcatgtcaatcaaatatgtatgtgaagcaagaaagaacactatggtggcctattgggcgatggtttgtcatgaaagganacgatgatacacaaacactattggaaccgatgttgaagatcaccaacgatgtctttctaaagagtgtat

SEQ ID NO: 91721 - DNA, 307 bp, Glycine max
  unsure (1)..(307): unsure at all n locations
atgctagtcaacctttaccttcatctattgtgcaggataanngtttnacactttgtggtggagctcatgggtcaagcttgcgtattcccactaaaaaaacatctcatgaaattaattagatgggaaaccagcctagacaaaactttaatgcacgcggatattttggtatttaacatggccaaccttaccagcagcataatcaatggagaaatcaccctggtaatcagttcaataaagaccagggtgggctacctaacaggccacaacaacaagggcctagtttatctgagagaataacaaagctgga

SEQ ID NO: 91722 - DNA, 246 bp, Glycine max
  unsure (1)..(246): unsure at all n locations
gagagttttatatgagatatactctcacattccacanaatacaatattataagtacctaactctcatctccttcatccttaaatccaacctacttttctgttccccttcagactcttcccttcccttcccttcattcattctctgtgtacaccaaaccaaccaatccccttctcttatcttatagagtggagtatgttactcgcatcttctttcttgtcatcaagaaattagccaagaattcaagt

SEQ ID NO: 91723 - DNA, 360 bp, Glycine max
  unsure (1)..(360): unsure at all n locations
agcttncacttagccatgtgatatctgcntcagattatatcatttaaatcaaaggcgatcaagttccagcaaataatcattcacaaaatggtgtctttactagtctgaatgacaaatttggtgacagggagtctgtaaaggttttgaaccanacaaagaatggggataatagtagtcaatcaggttcatctaatcatttacagaaagatgccaatggctctcaatcacgtgaagacagcggtgctaagagtgtttctgcttacagatcttcttcgcatcctataaccgcaccatcccctttgtatggtctgcctgaattctctcatcttggttggggccactggtttacattaacggacc

SEQ ID NO: 91724 - DNA, 368 bp, Glycine max
tccgctgatactccttctagtactacacggccccgacactaagacccacgtcgcgtcaacttatgtgcgaacacccaccctcgactgaactaggttccagctacgttgaacaacactctcctcggctttcattccttaattttatgtttcactgacaaataggaatttggggtgtataaatgagatgatatgaggaaggcagaaaagtaagaatgtactttgcaaaacttgtgacagtctgattgttccccacttgtatggctgtccaatgagtattagggggacttgcagttgttttttttttaccccccccccacatcattttcctgaaaagttggtgatggtatgtgcaacaaggtataatgtgg

SEQ ID NO: 91725 - DNA, 348 bp, Glycine max
  unsure (1)..(348): unsure at all n locations
agcttctatataagctgaaccattttatcaataatgactagttgagttgtattcagaaaattagagtttatctcttttatcttagtgagagtgattctcctaaattcttgagtgattcaagaacaccttggctgtatcacaggactttcacaaccttcgtgtgttgccctcgctggaaagagngattctttccttcctttcatcatcacccttgttctttcaaaccacaattccagaaaatccacctcttgccagaaatatctcgtgggcataactcccattttacgcactcaaattaagtgattcttgagcctanattgaatatcanaacgagacctttcacctcgt

SEQ ID NO: 91726 - DNA, 455 bp, Glycine max
  unsure (1)..(455): unsure at all n locations
agcnnttgttagtttcaccaaagaactaagctagctaatgttagtgtagnctctctnttcaatcatgttcttgtatatgcaaaactcgaatctgagatgctggttaatggatctaaactccgtttcacttgaaccaacataatggtggntgagattcatggtttatatttatttctagaatgaaaacattaaaaagaattataaatataaaaattaaacatctattaattaagatattaacatttattgaaaaaattaaacaagtttacgtatacatgagtaatatctagaatattaataattggttctattattgacccttataataataatcagagacatgtcacaaaatgttntgatgaaaaacctctctcattaattcatataaatattattcctttacacaatgtgatacttcaatttagataattattattatatggattatcaaaatt

SEQ ID NO: 91727 - DNA, 138 bp, Glycine max
gctaaatctattctaggattatttgactcacttaggaaggacattggaaccaagcaattatggataattaaattggaagcatgaataggcttattcccacacagaaagagttaattatggtgttatcagtgaagcata

SEQ ID NO: 91728 - DNA, 447 bp, Glycine max
  unsure (1)..(447): unsure at all n locations
agctngcttctacaaaggatagaaaaatatactctttttctgtcatgtgnngngagcaaccattgnctangtaccatgattggtgtttccttcctgctatcaaggagatctacaacaaacaatattttgctctcaggtacctaaatctttntgggttcttatttttcttgttaccttgtgggtgctgataagcactgggcaaaccctntgatgggttgccctcttcagggaggtccttgcacttatgagccttatgacccacttttccatactaataggaaacattgacttctttatcattcacaacctttttgccttcgaaaccatggctagattcgcctttggcgttccttgcaccttaataattcttttaagggccttatgaccacanataaatttgcctaagctatctctgaacgttctatctcttatagagtattcatcttg

SEQ ID NO: 91729 - DNA, 451 bp, Glycine max
  unsure (1)..(451): unsure at all n locations
agctntataagcgcgggtctgggagacgaagttcaagtggtcgcaatatacgaagatgatgttccgagtacattggatttggtacgaccttgccctcctgatttccaacttgggaattggcgagtggaggaacgccccgacatttatgcagcgagcataatgtaaacctttacggttttaaaagctctatagttgggcctacgctttagagtttttcttttggttaaggctctgtgtattttgttttttaaatttataatacaaggatctttcttcatctgttcctacgtctctacccattctcatccatttgcatgtttacttcttttctgaaatggcagatccgatgacgagtcccccgaaggtactaatacctgggacccgcctatcaacttcgagcaagaaacgaatcanacggaagatgaagggaacgaggatgtgggacttcccc

SEQ ID NO: 91730 - DNA, 343 bp, Glycine max
tatttttttgcgagtgggcttatggttttctggccgaataaatgggaacatgccagtttcggcagaaacgaaacatctgttgagcttgcacgaaaaaacctagcccgactacattggtaagttttcatgcatcaccaagacgagaaaaattcccctgccgggaacattaatcattatcggccatcgagcgttgtttataaatataaacattccgtatctatgtgaaaaatattagtctgggccatttcacgaccgatgtcggctattgaggtctctattcaatccctgaatgaaatttgcatgatgtcgagccggaaatgtttgatctgctgcgtgccgagat

SEQ ID NO: 91731 - DNA, 476 bp, Glycine max
  unsure (1)..(476): unsure at all n locations
agccttgtcagaagaactcgtagttnntcatgatgaaaaattcttgtatcttggggcatgtcactcggtttggaacttccttgagactcangttgatcaccatgggggggagttacttgtgcatgacagggtgaccttgacacttgctgcctagttttcctaagtgagagtgtcatgtggacacgcttaagctatttcttgataaatggtaccacattgcattttagagttgagttaggtacatgcatcattctgagcatatatgatttgaattatagaaaagttgatgactagttgttaagtgtacgttgaactgatgggttattaagaatgattatggtcattgttattggtttcttgttaatcattgtcttttgatgtttgttaatcttttataataaactcaccttcttcaattttgtaccgtgtgattgatgcctgtgatgatctcgaactttcgttcgtgggagcatatg

SEQ ID NO: 91732 - DNA, 485 bp, Glycine max
  unsure (1)..(485): unsure at all n locations
agctgtctcagcatttatgcgagacggagactctcttgctatctatcatcgccaagnaccaagaagagttaggtctagccatggcccacaagcatagaatcgcggatgagtatgctcaagtatatgcggaaaaagaggctagaggaagggtgatcgactctttacaccaagaggcaaccatgtggatggaccggtttgctcttactttgaacgggagtcaagaactttcccgcttgttagccaaggccaaggcaatggcagacacctactccacccccgaagagattcatgggcttctcggctattgtcagcatatgatagacttaatggcccacataattagaaatcgttaggaaacttgtatggtctctcagaccttgactagatacgacttccttttttttgaaataaaatgagttggtcccatgtttctactccaaaaagcttgtgcaaatcanatcactcctacactttatctctagcat

SEQ ID NO: 91733 - DNA, 422 bp, Glycine max
  unsure (1)..(422): unsure at all n locations
caaactccaataaaccttgtgacacttgttattttgccaaacaaaagaggctaccttttcctgatagcattattgtttcttctcagcgttttgatttgctgcacatggatatctggggcccttatgcttatccttcattacttgggcacaaatattttcttactattgctgatgataaaagtagatatacatggatcatntttctaaaactaaaatcaaaagttgcaaatcatatcaaacaatttgtatctatgattgaaactcatttttctgtcaaaattaaaagcattagatcagacaatggccctgaatntgcactgaanaatttatatgcttccaaaggcattctccatcagacctcttgtgtggagacaccccaacaaaatgggattgtggaaagaaaacatcaacatcttcttgtt

SEQ ID NO: 91734 - DNA, 460 bp, Glycine max
  unsure (1)..(460): unsure at all n locations
ctgcagcttatgatttgacatgactntcccttataattgggactcaactcttgggaaaattgagtggactntgacaccattttctcagataattgtgtttggttccattcaccaaatggttcatacaatccacaactagacattataattgtaatttagtttggaaacttctacttttagagaagctcanaatcctttatccgcttattcttctagacccacttcctatgaatatgttgaggcaacataggaatctcacccattcccctataagcaacacttgctcccaacaagagagtattcttgattgtttgagagattgccctcatgcgttggaggtttggactcatctatcccttatttcaaaacatggcttattggttttgaatggaaaacttggttgaaaagtcaacttanatccttgcatgggttcctctttgcactatcccatggtggatct

SEQ ID NO: 91735 - DNA, 466 bp, Glycine max
  unsure (1)..(466): unsure at all n locations
caagcttgagggtacagtcttttattgttcttgtctttgcaacaatagntagtcgtggctatacgagacatcttgccaaacaaagtcaggttagcgataactcgcctgtgctntntcttccatgctatatgtagcaaagtcattgatcctgccaagtttgatgagttggaaaatgaggccgcaattatattgtgccagttggagatgtattttcccctgctttctctgacatcatgattcacttgattgtgcatctggtcagagaaatcaaatgttgtggtcctgtttatctacggtggatgtacccgattgaccgatacatgaagatcttaaaagggaatacaaagaatctatattgtccacaagcatctattgttgagaggtacattgcagaagaagccattgtaatttgttcataatacttatagaaagctnacctgttggccttcctgagtctcggcatgat

SEQ ID NO: 91736 - DNA, 467 bp, Glycine max
  unsure (1)..(467): unsure at all n locations
agcttcacctttnnggcctcctcatagttgttttatgagataacatgctctattctcatctcccactccaagtaggcctccggatcattctttcctttatagggaggaatgttgagtttaataccatcaattcggttttgtctaggaacaccatcattccctcttctcctcctttcttcttcattatgatctctattctgcatttgatccaacctctcatggagcacatcatctcattgtttcattaacctctccaaatgttgcatcaaagcttgcatttggaattgcgaaagccccactccatcattaggatgtgttcctgccatctcaaacaaacaaatcaaacgtaacaagacaattatagttgctgtttgaatacctcactcactcaagtgtatcacacaattatggtttttctctaatgaaacactcttgccttttaccactctaattccccttgagttctt

SEQ ID NO: 91737 - DNA, 409 bp, Glycine max
  unsure (1)..(409): unsure at all n locations
ctcgaccggaccttagcaccgcngctgcacttggtacatactcttttttttcataccatgacgattgataatcaaaattactcttaaaagtttgacttttcaattggtttaagtcttctaaagtgataactcttctgaacggttggcttgaccacacatgaatagtctatataagcaaggctttgttttgcatgtcaatgatgttgaacacttatttcatacaatcctttacaagccgtgaatctctttgaacttcttcttcttctttgtaccaaaagctttctgaagttttctggtttttcaaaccatgaaaacctgcgctattcatctttccattctcttctccctttgccgaaaagaattcatcaaggactaaccgcctctattctttatgtgactctcttctccc

SEQ ID NO: 91738 - DNA, 411 bp, Glycine max
  unsure (1)..(411): unsure at all n locations
agcttatcaatacattngtagaggtcatccattcatttattatcactgtcaatgtttggatttgtgtaaaagaacttcggatttagataataacccactgcatgtaaagggtggtgaagttggcaatcctatcttttatcaatgattgcaaggatatccttatacttcccttcattggtattgaaagctctttgaattgattctttggccctatccattgcttataaatgaaacccattgcaggtttttttttcattatccaccaacctcaacacacttacaagaggccccatagcctttaaagcataaacaacatcattccaaaatgatggcgtaagaatacatatgtggcttgcttccccttgggctctttagctgccttagacttcaaccattcatctgaagtaaaca

SEQ ID NO: 91739 - DNA, 452 bp, Glycine max
  unsure (1)..(452): unsure at all n locations
agcttgttaacaatcatagatgatatggagaggattctttcgttgacatccacatccaggtacacatcaacaaacctatcaggaaacaagacctaataagtgtgccaagtcatgagaagttgtatgcaaggctttaaaaaacgatccgcaattagcaattgtccgcaatttaaaactttggctggcttattagtttcagcanatacaatatagaacagaaacactataccagctccaagctttcttttctttacaattttcaaataccataaatcatattctcaacgggatcaacagtcatcatatataagaggctaaaaaacaaaagcagaagatgcaaaaaaacaaaagctgttctaaaaccaaagcaattcaacgggaatgagaatgtcttccattttcaagagagttttttttcatatttatgatttatgaggacttctacaaagttc

SEQ ID NO: 91740 - DNA, 324 bp, Glycine max
  unsure (1)..(324): unsure at all n locations
tttacacccccctttttactaaatgcaccccccttctctattttttttggaattctttttccgtaaccgtacgaaactttacgaattttgtaacaatacttattcttctttcgcaaggntacnaatccttacggattatgtatttactcttttttggctttcaaagaagttacggaaactcacggattgcgcaaaaacacctcttttcgatttccgccacattatggaatttcacggattacgcaagcctgcttcctttnggatttctgagacgtctcgggacttcatttattgcatgtcatcaagtaataatccccggacgaa

SEQ ID NO: 91741 - DNA, 365 bp, Glycine max
  unsure (1)..(365): unsure at all n locations
agcttgtaatcgattacacatatactgggatctattaccagagcagattttcagaaaatattctcaacagtcacatctttttatgtggttcttgaatggctatcaaaggcctatatatatgtgacttgagacacgaatttgctaagagnttttcaaaacaaaaaggtcttatcctcttaaaaagccaaaatcgtttattctcttacaaatcccttgcccaaatacttgtgattcaataaggaattatttgagtgctcaaattgttcaatctatctctttcaagagagatttcttcttttcttcttcttcattctgaanagggattaagagaccaagggtctcttgttgtgaaagaattctaaaca

SEQ ID NO: 91742 - DNA, 469 bp, Glycine max
  unsure (1)..(469): unsure at all n locations
agcttgaaccanaaccggtgagagtgtgaccttactctgtgagtgaacgactagcttggagtaataatctttgcatcaatctctgnaatttagaatgaaatgtataaatgagaacatgatgaaggccatgattgtacatacacaagccttttgaccaaaaagcttcccttgaatgataattatatcctttgcaccctctttgagttgaacgaatttgtcataaattgaaccctgaacttaaataattatctcctgataccttgcttggattctaggagagcatatggttcaaggaaaaatttaccccaaattcgggggagtaaagtcagttagaatgcaaagaaaaaggtaaaaaattagcacacacaacaaataagttgtatgttaaaaaaaaaagaataaagtgtgctgatgtaccaaggtcaaaagcaaatgaaagtgaaaagctagtgagcaagccaagcgcatg

SEQ ID NO: 91743 - DNA, 419 bp, Glycine max
  unsure (1)..(419): unsure at all n locations
gaactcatccaacccttgtattgacttctttgaaagcctnttcactgctaacactntcccatccataagtgtgccctgtaaaataatcttctgctagtgttagaaaggttttaaggaaaataaaagttcctgataccatttttttcatcaccctgtatactgggccaaatccaccttctctgagcttatttttggttgagaagttntcagtggcattagctaaggctgacaaagcgaaagttggcaaatcaatgtcttctattatctgtttacttttgtaatgcttgttgtaaatttttcttgcagcccctgattggttggaaaataacagtacataaacccttggcatgacgtataatatgtaaaatttntggtgcctattgcctgtattaaatgcttaattntatcaatatacttac

SEQ ID NO: 91744 - DNA, 487 bp, Glycine max
  unsure (1)..(487): unsure at all n locations
gcaagcttctaaagtagtataatgaagctggctacgatgaggagttaatatctgacctccaatactaaatgccgattcagaagctacagtggagatcggaatagctaacacaccccttgcaattgcttgtagtggtggatactttaactcattcaatttccaccacattaagatatcaaaatctgaacttcttggcaaaacttcttcctctaagtaatgatctaactctgttttcatagttaaggttcttgccattttctttctttcaatgtatctatcataatcacacaatttactctttccatcactaaccacatcttgtgattcaaaagaactagtagaatcttgatgctttttggcttgatattccgaaaccaaatcataacacaagtttcggatcctattaacttgagaaaaaaaatcaatgggataaatngattcaaagtaaaactcaagcaactccattttgtatcttggatctaaaaca

SEQ ID NO: 91745 - DNA, 419 bp, Glycine max
  unsure (1)..(419): unsure at all n locations
taatacaaggatctttcttcatctgttcctacgtctctacccattctcatccatttgcatgtttacttctttatttctgaaacggcagatccgatgacgagtcccccgaaggtactaatacctgngacccgcctatcaacttcgagcaagaaacgaatcatacggaagatgaagggaacgaggatgtgagacttcccctagaattagaaaggatagtcgcccatgaggaccaagaaatggggcctcatcaagaagaaacagaacaagtagaattgggaattggcagtggaaaaagggaagtaaagataggcacaggtattaccgcacctatccatggagaattaataaccctgctgagagactaccaagacatctntgctttggtgtaccaagaatatgctctggttgagtctgacatt

SEQ ID NO: 91746 - DNA, 446 bp, Glycine max
  unsure (1)..(446): unsure at all n locations
agcttcgaaagaaagngatgaggtacaagccttttatgcagatcttganagagcccgggtagtcgaagagaagttcaagtccatagccatcaaagtctgaaaagagtatgatgaactaagggacgtcaatatggccacagctgaagccttggaacgagaaaccaagaaagcccgaaaggaagaactacgtgcagcatnagtttgaggggctttatagggcagcaatagtaagctcaagctccgaagaggtgaaaggaatcatcacaggtcaaaggcatgatcttgaaggacgagctaaaggtttgccttaggtcgaaaagaaatttgtcccaacagttaagcgagactgaagggaatatgtgggccatcatcgataagtgcaaaaagaagctaaatctagcggcgactcacgagcaaaggctagaggatgagtacgccaagatatc

SEQ ID NO: 91747 - DNA, 468 bp, Glycine max
  unsure (1)..(468): unsure at all n locations
agcttctntgagaaaacttccttgagaagctatatcttatctacacacccnctataatagctaagctcacccncatgacaaanaaaacatgaaaatacaaaaaaaagtccttactacaaagactactcaaaattccccgaaatacaaggctaaaaccctatactactagaatggccaaaatacaacgccaaacgaaggaaaaacctattctaatatttacaaagataagcgggctcatacttagcccatgggctcgaaatctaccctaaggctcatgagaaccctagggcctacccttggatctctagcccaatcaacttggagtcttctacccaatgcccttgcgggataggattgcatcagttttcctaagtgaaagtgtcatgaggacacgcttangttatttcttgtgaatggtgttacattgcatttgagagttgagttangtgcatgcatcattctgagcat

SEQ ID NO: 91748 - DNA, 429 bp, Glycine max
  unsure (1)..(429): unsure at all n locations
agcttaaagatgcccgagtcattcatccctatgagatgttgntgaagtattggcgatcagaatttccattccttggattacggngttgaaccaagctcaagcttttacaaaaaaggttcatcaagtcaagttgaaatatggaagtaaccatcctgcaaaattggggcaaaagatgaatcgagtcacatcactgcttcgtctactgccaaacatatttaggaatattgatgtccttgttacttccagtttcaccttgacaaaaatgtcatggaccatgttgaaaatctaaattgattcaaccccatatcctgcataaaaattcgcaatacttcgactgtacatcattcgcatgcatccatgcttttcattggttgcattgctcattgcattctttccttganaaataaaataaaataaaatgaacttatc

SEQ ID NO: 91749 - DNA, 451 bp, Glycine max
  unsure (1)..(451): unsure at all n locations
agctngaccacaatcaacatagctttcactttcttcacctaaaccgagtntaattgacatggatcaacctccttatggcatccccaaaaggtgtaaatggttaaccactattgtagtcaatatcacatattccaaaataattttctctgtatccttactaaaaatgaaacctactcactagccaaaacaccataaaaaaaatactataccacaactaccacatgaaataaattatcatcttttattttgactaaaaagcatgaggtattttgcaagtagctaaatataagcttcatgtccattgcttgcagaanagaatatcataataaataataatatataggtaaaataaatcagtcatagtgttgatcacttagctgttttttattcagtggtagtggcaatccatgccaggatactntgntacatgccacaccttatagtcataatc

SEQ ID NO: 91750 - DNA, 273 bp, Glycine max
actccccacgagactcttgaagatcgtggagtctaccttctcttcttcatcaaactttgataacttcaagccaccttccataggtgtgttcacgggatggcaatcaagcatattaaatttcttcaacacttcttttgtgtacctttcttgtgagacaaagataccattctccgtttgcttcacttccattcccaagtaatatgacatgagtcccatatctgtcatatcaaactcacgagacatggactccttgaagtcttcaaacaaatttgg

SEQ ID NO: 91751 - DNA, 492 bp, Glycine max
  unsure (1)..(492): unsure at all n locations
cctgaggcatgcacgcttaaatttttttgtgaacctcagccttctccgatgtccctctttttttgggttttatgatntttcgcaagacaaaatctttcattnttttgcgttttccctttattttggtttctgagttctcacactacaaaaagtttaaatttttttattttattttctgacttctcacaataccttcgttattgtatgcagagaaggtggaagaagacaaagctgtgatttttatctacataaagcttcgatttttatctcaaacagggttgttttttttattctttgactatgttttgtttgtttctttgtttctcacaatacaaaagctntcaattttttgtgaacctcagccttctctgatgtcccactttntttttgggttttatgatttttcgcaagacaaaagctttcatttttttgggtgttctccctttattatgtttcctgagttctcgcactgcaaaaaacttatatttttta

SEQ ID NO: 91752 - DNA, 428 bp, Glycine max
gtggtcttagttttctgtcaactcgcatgtgtgtgttccgtgcgcaccacgtgaagtggcacaaactaaacttttttcccatccactcatcacttgttctcgcacattttatcgtcctaaagagatcacaaaactttttgctcataagaaacgaataggaaaaaaggatgcccttgtctacaataaattgctcttgttgggtcctttgtctctcacattatctttagtactcactcactcactactctccctctccttcacttcagcagttcaccctctcataattcaaccctcatgcttataaggtattattgtctatgtgctgtcattctcacactgtacaactttgcttgagcaagccaattgtactgtgctaccactcactcacacacacacacgaacacaaacacatacggtggtgcatcata

SEQ ID NO: 91753 - DNA, 483 bp, Glycine max
  unsure (1)..(483): unsure at all n locations
agcttatggtagtataggcatatcatccttcaatcaagtatttgttgtccctaaatgaacacattntctctcttaagcttgtgtctaaagaatgtgatcattgaggcattaaatgcatatactttttcatgctgagaaaccactcttcatcgttggcaagttgaacactatagcaggacaccacttccttntgggccaaagcaggtttatgtagtagagtactctctttgatggtgattgaggaatttcagagcttgacttcatttattcttcataggttttgagagatcttaggagaatgtctttacaaaatagatctcagacacaaagtattaaatgaagttttaaatgtcatatttaatgtcatgagatcataattctatcttgttatcgtgtgaaacatttcgtaaaacatgttttgatagcacataagacacaacttttaactnttgtatttatntacatctaatcaaaatcattaag

SEQ ID NO: 91754 - DNA, 440 bp, Glycine max
  unsure (1)..(440): unsure at all n locations
gctgcatcatcatctnccacactgttcatcttcattccatattcatctctttctccatagatgagcaccaagcttggtaaggaggagtatttccttctggactcaaccatggccgttccaagtagtatcaatcttcaaatttcatggataccctttgcatgagcctctaaccttttcaatctctgtgcatgtgccttaaatcagcaaactcactattttttgtaaaattatgttgaaggtagttgctgttttgtttgggtttctcaacttgcatgcgtggttttcttcatgttttttatttcctaattctttgaggatgatcctatttcaaaggagactctgcctattttgttntagaatatanaaattaagttttcccattgaaatcaagaccagattagaaggggcaatggctttaaatgcaattagcatatgccact

SEQ ID NO: 91755 - DNA, 468 bp, Glycine max
  unsure (1)..(468): unsure at all n locations
agctggtggtgtaaccaattctgtttcttattaaacataatttctggctnttanaaaacaaaaaaatataaatgattntaaaaacccactatgatagaaagaagtgtgttaagaagaaaacattntccactcaaaatcttggtagtaatgcttatgactaacggatcaaatttttgtctacattgtacagaatgacaaagtcgtgtcatacacccactatgtacagcatatttagtctcttggacacaccataatcttcaatctactagatcatgcataatacaaataaaagtaacaaaaaatgactactttgtcataaaatcaaactttctaatattatgaaatttagcagatgacacagcctctgggattctcttcgtaacttgagacatagtaactttgagtatactgtgatgtcatatgataataaaggggataaggttcatggagctntagaggaacaggtac

SEQ ID NO: 91756 - DNA, 473 bp, Glycine max
  unsure (1)..(473): unsure at all n locations
agcttcagtggagaatgaataatacaaaagcttcttgagagatggagagaactgcttctgaatttctgctctggctgagtgaggagagagaaaagctttctggttgtaaataaacaaggttttcccttttatttccattaatttattcaagctctgcacacatgtccctatttgattggagcaaaagagcccactttctcttgttgactgcgacgccatactccgtcacaaaagtgagataaatctgacctttgaaacgctacaatcctgcctcggtttgcgtgccgaacctctgattccagattctcgcgtttctctgcgtgcgtcggcgccaattttcgaaagcaagcaatatatatatcaaaacgctcagaataaaaccccgcgcgtggttcagaggttggattcgtcacattccatgttgcacgcaaaacgacgattnttaaactaattaattaagaattaacccataa

SEQ ID NO: 91757 - DNA, 471 bp, Glycine max
  unsure (1)..(471): unsure at all n locations
agcttgttgaaatagccatgtttggatgagttagacatacccattctgttttagggttttgtgatgatgtttatatgctgaaattgcctatggaaactgttagagacgaagggtagagttaacctatggttggaaagtgagaatgtggtgttatgagtggaaaaagagtgaggctttgagagttggaaggttaagtctgaattctgtggtaaatggaggttaaaatgagttaatcctagcttgaaatgtcatttacgacatgtgagaaaagttaggctgtgctagagggaaaaacaaatgaccaaagtgaacaaagagccatttctagggcaaaattgggtgttgaagagtcaaattttgacttcggtggaatttaggtgtaaattcagtttgagccaagttagctggatgttatggactggtgtgaggtgagaagttgcttcannattacctcattctaaatttcacttt

SEQ ID NO: 91758 - DNA, 471 bp, Glycine max
  unsure (1)..(471): unsure at all n locations
agctntggaaacaagtgctaagatcttctttgtatcttctatngaaagaaacgcagagctccaaccagctatggttcaagagacaatagtagagggaaaaatggaggctctagatgttgcaatgcttcagtctattattgaagtatcattgcaagggtctgatgctactgaatcaagtactattgaaacagaccttggggttgcacctttacagctttgtccagtcacaactaaagatgaagctattgttgatgagttgctttctcaaactatgtctgaagcagacatctcaagactggaaaacatctatggggcaactaattaagtttgtntcttttgatgcaatgaaggttagactagagatcaagaaaagagttgatactgtttctacacctcaactcttaactaacatcttcaacaaaatgcatcaacatctgagcagacaagacggagacctcaattgattggtgt

SEQ ID NO: 91759 - DNA, 464 bp, Glycine max
  unsure (1)..(464): unsure at all n locations
agctttgagactatngnacccttgatagtagtttactcttgtgtacaacagacgtggaaagcaagttntgattgcaattgagtatattactgtcaccatggtttagaaacattttaatgaagctgtgaacatacccaaggtatcatataaaggaacacaataaagtccatgagcattgtaagcctgcaattgttttacaatatgttaaaaaccattaagtggaagaagctagttcaacaacattattgttaagtgagaagggataccaatcattggcacaacataagaatagagcaacaattaaaataagtggaactctctgcagagagtagatattcaatataagaaacaaagcttcaatctagaaatactttattctccattaagctcaataaggactacaaaaatccaactaccaaagaaacaatacagtngacatagaaataataatagatacttagcac

SEQ ID NO: 91760 - DNA, 425 bp, Glycine max
  unsure (1)..(425): unsure at all n locations
ttctctacaagcttcaaacacttgtgttatcgattacgatcaacctgtaatcaattaaaacaaagagttttaactatagaggaaatcttctaactntagaacttttcttctaacccctacatgatgatgcatgatgcacatatgaaatgatagagactaagatgcaacacacaatataacaatcaatacaaatgccactcaagagagttgggcatgtaaaaaataaaacatcttaaagctcttcttcaagcttcaaggctaagttttcatgttgctcctcctatctctaacaatattttcatggcacaaaacatatatatatatatatatatatatatatattaaattgaattatattattttcaattaaaaagggtttctacaacaattaaattaaaattgtatcanaagaaattactactaag

SEQ ID NO: 91761 - DNA, 456 bp, Glycine max
  unsure (1)..(456): unsure at all n locations
agcttgcccagagaaggagtccacggaggatatgcttaccacctcaaaagactggaaagcggtttgtaatgactcctctgcggcttccacatacggcatagaggatgggcagctcaccaagatgtcttcctcgcctgatacgatgaccaaatgcccttccgctacgaatttcaacttttggtggagtgttgagggaacaactcctactgagtggatccacgggcgccccaacagacagctgtagggagggttaatatccattatttggaaagtaacttgacaggtgtgagggcctatctgtactgggagatcgatctctcccctaacctctcggcgggtgccgtcgaaggcacgaaccaccattgaactcggctntaagtgggaggcattgaatggtaatttctcgaaagtgctcttangcatcacatttaaacttgaaccattatcgatgagcac

SEQ ID NO: 91762 - DNA, 470 bp, Glycine max
  unsure (1)..(470): unsure at all n locations
agctngcttggcatcttgattatgtnggccggaacttctttattatctgaatcaataatgatctggcttcacgagtatgaagaaacttcataggggctgcttagcttcgccagtatatattcttttttcttttaacaaagataggggtctattaaacttgtctaaaagataaaagctctcaattgtatgtatgcctaaaaaactaatttgttcacaccacaataaggttcatgcgtctttcctgtaatcgctccccaattcatcgtggaacatacatacatagattacaacttcattctaataccttcttacctgaatttcttgtcaaatatctgatatgttggttaatacatcgcggaataatattttatattattcaacaattggcctttacttattatagctctgattatgtagcatatactcttgtacagtataattttgctacagaattgtttgcattcagtatc

SEQ ID NO: 91763 - DNA, 477 bp, Glycine max
  unsure (1)..(477): unsure at all n locations
agctntccgcaatgttataaaattaatacaggaacgcaatttttcatgagaggaagtgtntgttgcttcgagagaaggtaagcggggccatggatgaactggaattgggttggccatggaatttggaatattggaaatgataaacttgagagaatgaaatgatgctaatgaggaggcttgtttgatgtgagcatgaaaatatatgactcatgcaatcctatttatagatagatgccagaatgaattaatgctgatccaattaggatatcatagaatcacaacttgttcttcactgaaacaaggattttttattagtagtacatgagaaaagggcaatgaagaagaaaaatacctataacctattactttgctagtagcaaacacaagtgagaacatatatagaaattaaagtattagattctattgtgcattggcatttcaagcagctaacataaatattggtaccatcgaagagat

SEQ ID NO: 91764 - DNA, 502 bp, Glycine max
  unsure (1)..(502): unsure at all n locations
agtcacctgcggcatgcaagcttccatcaagtggtaatcagagcacaagtatttctagtangtgctccttatacctccattaattgtttttcttgaccttctcttccactgttgtttcttcatttttctccatgtatctcctcacatgtcttgttctaaatttttttaacatgattctttagagtttccaccgattaaacttgctatagaaactagatttgattttctatagttcacatttcttgttcttgttcttgaaccatgaattgtgttgagtttaagttcctttgagttttgtcttgttattttttgtggctgaaacctaaaccataaaattcttacaaaaatattaaagtagaagaaaacctcaaaaatctagagtgacttgttcacctattgtagttttgtcatagaagtcatgtctagtcatgaaacttgtcacataagatttcttatgttgngctgannatttatttcttgtttctttgtctaactcatttgg

SEQ ID NO: 91765 - DNA, 465 bp, Glycine max
  unsure (1)..(465): unsure at all n locations
agctttgagccaattaagactatattatcttttttctctgatgacnganggaggcccgtcatatatttagacgctcgaaattgaatgttgacgctctgagcaaattcaaacgacaataatattttactcggatgtttgattgagtcccgtaatatatcgagacgctcgaaattgaatgttgatgctctgagcaaattcaaacgacaataactttttactcggatgtctgattcagtcccgtcacatattgagatgctcgaaattgaatgttgaagctctcagccacttcaaacgacaacaacattttactcggatgtctgattgagtcccgtaacatatcgagacgctcgaaattgaatgttgaagctctgagccaattcaggcgacaatcactttttactcggatgcctgattgagtcccgtcatatatcgagacgctcgatattgaatgttgaagctctgagc

SEQ ID NO: 91766 - DNA, 331 bp, Glycine max
  unsure (1)..(331): unsure at all n locations
agctagacgcgattgacagtatattgagattcttatctcaggcttgaatccttctgcaagagagatgcactatgttccatgtcaaccatctaacaaggcaactaacacatatgagtttcgtcacgataggacactcacgcctttactctgattgaatgcagctaggatcactttcgtacactatccttcttatcacagnaatgctaagagaagagttatataggatggattcgttttctttctatggcgaataaattgaataggtgtctgatgaagacagtatcatcaccatactattggtaagtgagttggacttcgtgtatgcaactta

SEQ ID NO: 91767 - DNA, 473 bp, Glycine max
agcttagcagccaactcctaaggatcaggccttattagtgaaaacctggaataggcacacaaattttccccctcttctagaattacaggggtcatcaggaatgtgttcaaagtatcctcatcaaatttcaccaagtgacctctcaccctcacttgcttaggtgatttatcctcggggtcatagaggttcgcgtaaaattccttcacaatagcagcatctatgttgctgtcaataaaatcagtcaactcctcatcctagtgtcttctctcgtgttcctccttgaactcgtcaaactcggtgtaataaactaccacattcctctccggtagtagtttcctaggcaccacaatatcggtatacctctcccaagcttcttgagatgtgaacctagaccgatcaaatctaacttgggaaggtgtagaaggagccttccttttcttagatgccatctgcaaaaatataagacaaaacac

SEQ ID NO: 91768 - DNA, 422 bp, Glycine max
  unsure (1)..(422): unsure at all n locations
agcttncnaggatgcattgtgaatacaaaattgaacgtggtgttccttttcctgctgagaacctatgacatccagccatctccctttcatatcctctctacatggtgccagaggttggattgaaggttccatgaagatgctttctcatgtttctccatgaagttcgatcgaggaactgagtggccaatcaactggctcattgtactggcaatattacattacctctaagcgaccttagttcaagataaaagtcttgctgctttgctgaaccatctttgtatattacataaccctaagtcttggttttctagtgtacttagctcgatgtcttgtgtttggcaagcattaataaaaacacttaggcatgcaaattgaaagagttatgcacccaggcaatgttatcacctgttactattcatcca

SEQ ID NO: 91769 - DNA, 451 bp, Glycine max
  unsure (1)..(451): unsure at all n locations
agcttcatgatgatgaatcaagatggattcattggagtttgatgataacaaagatgatgaccaaaagcccaagagaatgagttcaagattaagtcaagattacttcaagaatcaagagaaatttgatttcaagattcaagaatcaagtttcaagattcaagtttcaagaatcaagaatcaagaataatcaagttgaagattctaaatcaagagnagactcaatcaagataagtactaaaaagttttttcaaaacattgagtagcacatgaatttttcacaaaaccttttaccaaagagtttttactctctagtaatcgattaccagtttattgtaatcgattaccagtagcaaagattgttttcaaaaagctgttaactgaatttacaacgttccaattgatttcaaaatggtgtnatcgattacaatgatttggtaatcgattactagta

SEQ ID NO: 91770 - DNA, 456 bp, Glycine max
  unsure (1)..(456): unsure at all n locations
agcttctgcattgtgacanggcatgtgagatttccggcggaaaaccatttctctatgctagatctgtcatangtttggcctgtgcacaaagtcactggatcttctaacaagtccaagctgatggggcatctgaacaagtgaggaatggtaatttcaatttgggcttcgttcatggaaagaaaactgaaaactgaagggaagattattatttccaaagaccagagaaagaagcaaaatcagcggttactaattgctaaaatggaacactctcaattcaacaaaatggcagaaaaatcaaaagtaggggggatgtttctggagatatgatgttgggggcagcttaaagtttgaggctttaggagtggccaatacaaggcaagcatattttttttttgaggcactaactaaaacagtaatgccatagagatggtgtcagaagtacgatacctctttttt

SEQ ID NO: 91771 - DNA, 240 bp, Glycine max
ttattatgtaagaaataattttgagtcttatttgacatgtagttcgttgacagacaggactggatatgataaattgacatgtaactcttatcgcaagatatattccacatagaggacgtacgattaaatgagcatagtattgaacataaacttaaagaggcttcatcatgttcatcatttagaaaaaaagatttctttcgactacggttcagattggatgattgctttcaagtatactca

SEQ ID NO: 91772 - DNA, 467 bp, Glycine max
  unsure (1)..(467): unsure at all n locations
ctgcactaaaaaaatggctacaattttatttataaggaatctatcatagacctcaattttaatggagagggttaccactactggaaaacccgaatgcatattttatggaggcaatagatctaaatatctgggaagccatagaaatagggccttatatacccaccacagtagaaagaagttcaatagatggtagttcatcaagtgaaagcataaccatagaaaaacctaaagatagatggtctgaagaggatagaaaacgagtacaatacaacctaaaagccaaaaacataataacatctgccctaggaatggatgaatatttcanggtttcaaattgtaagagtgctaaggaaatgtgggacactcttnnattaacacatgaaggaactacatatgttaaaagatctangataaatgcactaactcatgagtatgaattatttagaatgaatgcacatgagaatatt

SEQ ID NO: 91773 - DNA, 472 bp, Glycine max
agcttctactctaccatttagcctcgccaatttgtgatctatttatgggtaacccattaatccattaaaaaacttatttaaaaatatgatccatccattaacattttcttcattgatgaatatccatcccaaaaaattgaaacttaattattttaatttacaaaattatatttttaaaaattcataatactgtctaaaataataacaagttcaaccgatgtcagtcgaggttgttttaagttgacctctaccgatggtaattttcggcaaacataaaccaatactattttcaatcgagtttttttttgccgacattggtcaggtgttttttcaactaatgccgaacatatgtttttcatttgacttaatcaagactgttatttggcagatgttagctatgtttatatttattcaaccttgacctgtaatttttcgaccaatgttaaccctgtcttttttgtcaatatagtga

SEQ ID NO: 91774 - DNA, 455 bp, Glycine max
  unsure (1)..(455): unsure at all n locations
tcttagtcacctgcngcattgcaagctgactctaaattacatagatgttggatttatgggaggatgttatattctcattttgctgtaagagtaacgtcccactggtaaaactaactattcaaatgtttgccttcgcaggaatggccccgaggaagcttgcctcatagaggtccaggaaggacaaggcagcagaaggaactatttccgctccggagtatgatagtcaccgctttatgagcgcggtacaccagcagcgcttcgaagccatcaaggggtggtcgtttctccgggagcgacgcgtctagctcatggacgacgagtatactgatttccaggaggaaatagggcgccggcggtgggcaccactggttactcccatggccaagtttgatccacaaatagtccttgagtattatgccaatgctttggcaacaaatgagggcgtgcgtgacatg

SEQ ID NO: 91775 - DNA, 468 bp, Glycine max
  unsure (1)..(468): unsure at all n locations
agcttggtgagaagcgnggtcactaaatccaacttcttcaatggcttctttcaaggcttcatgatattaacnncatttcaattttcatgcaaagacgtgaaccttcaaataatatctctttccataaccacgtggtacagcatgcaaggatgactaccaaccaagtactagcaacaaatcatcaaaagttacgataaaaagatcaagtagaaaattgaagccagaccatcggtacattattagtattatcatatgagaggaaaatcattttcacacatactacttactgtgtttgaattcaagttttgaacgtggatatttcttatttttcatgtcaaattcatataaaaatgtaaaagttacaaatacttgtttcaaactaggcatggatccgtagttgaaaacgctaaaccagacacgtgcttaaatttataatggttatgaaaaggaaagagagaatgagtaatg

SEQ ID NO: 91776 - DNA, 478 bp, Glycine max
  unsure (1)..(478): unsure at all n locations
tagctaaacattcaactttgagcgtctcgatatattatttggatctactctcacacccnaggaagaagttattgccgtctgaattggctcacacgtacaaaatcaatttctagcgcgtcgttattttacgggactcaatcagacatccgagtaaagagttattgtcgttcgaataggactataagttcaaacattctatttttagcgtcttgatattttaaggtactcaattaaacattcgagttaaaagtttttgtcgtttgaattggctcatatggtcaacattcaatatccatgcatctagatatatttacggcgactcaatcatgacatccggagttaaaagttattgtcgcttgaattggctcataggttcaacattcaatttcgagcggttcgctatattacgggactcaatcaaacatccgagtaaaaagtaaatagccgttggattggcctatatgttcacattcaattt

SEQ ID NO: 91777 - DNA, 380 bp, Glycine max
gatgcctcacattatctccatgacacaaatgcacaaatgatgatttggaaactatatgcacaactggtcatgcatgcacactatgcggacactcaagtgtcaaatatttatggacatgtgatgctgggctacgaatcatttctccatgttagtcaacccaacattaccaaaatatgttcttttatcaattagtgcattcatccgagtccatttccggcgtccgggaaaattattacaagattcacccttcaggtgacacatttattttcaaaactagtatgatcagcgatctttttaaaaaacagtagaagtcattcttttcatagcatgtcagttttcagctaaccaactattctcctcttatcttcattctttagcga

SEQ ID NO: 91778 - DNA, 458 bp, Glycine max
  unsure (1)..(458): unsure at all n locations
agcttatgctatatgaattgttgtgctatctatatacgcctcgctgcatgctagangccaagggcgatagaggatgtctagatacaccctcttagttgtggttaactctaacatggccatccttgcagcgtaaatatcaatgcaaccacccatggccactaacttgatgagtgtcccaaacaattctatacttctgatccgtaagtgaggagatattgtgcatgacttttactgcaagctcaacacggaggatttctagatctcatctccttctctaattttaacttttcaagcatactacaccaagaatacgtattgtagatgcgcctgtcatttttctactccatgtgcatatatgaagataggagatgcttatgatcgttataaacgattacggaaacaattgcactatgattacttacaatcaccttggatcataaaataacagcttgtctatt

SEQ ID NO: 91779 - DNA, 377 bp, Glycine max
  unsure (1)..(377): unsure at all n locations
atcctctgagtcacctgcngctgcagcttacagtcaggcccattaatgattttttatctaggaaggaacgtacgacctccatcgttataggcaagacaccactacttgactactctgatgcatgccttagagatgcagtgaactatggtatatgctatgccctccacttagcgccatttatacccaccaccgtggaaaggaccgccacgggtggaagctctccgttgaaacaacctagagatagatgatctgcctacgatataagacgaatcctttttaactcagaagccggaaacataagtacatctgccctgagaatcgatgaatatttcacgggttcatattgattgagtgcacctgagatgtgtgacactcta

SEQ ID NO: 91780 - DNA, 423 bp, Glycine max
agcttcttatgacaagaactctcttggtggtgtatcttgttctgccatggctgacgccgcagtgagagactcctccatatgtgctgtctcctttaggttgccgtggcctccgtgactgattatcaccatcgattgaccttagcgtggatcaaagatccgccctctatagactcgtctgacccgcgcattcatcgctatggtgaccgaggatgactgcaaacccgagggactcctctctgtctgtatatagaaggacgatactactgccgaacttatacagcggggagcgactgtgctgtatcttcctcctgagcacatacaggattataacctcactcatgatggcgtcttctcttcaaccaatgaggaagcctttgcctcatctggtgaacttatggacttccggaatgacaagtaccaagt

SEQ ID NO: 91781 - DNA, 337 bp, Glycine max
aattccatcaatagacctccaatctttaatggagagggttaccactactggaaaacccgaatgcaatttttatttggggcattagatctaattattgggaaaccctaaaaaatagggcctattatccctccaccggagaaagaagtaccatgatggtttttcattcagcgaaagcataactatataaaaacctatagatagatggtcttgagaggatagaaaacgagtaccatacaacttataagcccaaaacataataacatctgccctgcgaatggatgagtatttcaggggttcaattgtaaaatgctaatgaatgtggacacttttcattaca

SEQ ID NO: 91782 - DNA, 446 bp, Glycine max
  unsure (1)..(446): unsure at all n locations
agcttccatgtgctatgctattaataaaaacatgcgtaacacttttcgtaactttgataaatgaataacttatgagaaacaattcatagttcaacttctctctctaatctccttcaattaccacaccttgcccncccccccccccctctctctctctctctcatattctcttcttccattgaagcttcctctttaagcttcttatccaacccactctcttggtggagaagcttctccttccatggcttattctctagtggatgacgtctcctctaacctcttctcctttatctttcgctgcaattccatggctaaaaatcactattgaaggaccttattgaagctcaaagattcagcctctatagaagcttcataagcaagcttccaacaagtggtatcaaagcacaagagcttcaagtaggtgctccttaaacctccactaattt

SEQ ID NO: 91783 - DNA, 410 bp, Glycine max
agcttgacaaactatagaaaatataactagaattgttctatataagggagactgggagcagaaagcccactatatcaacgtgatctcaaacaaatgacaagcttattcattgtccataaaactcttaggaggactgccaaccatcactgaacgactactactatatgtttatgacacacaatcttgactcaatccacagagcaatatctatgcctcacaatcacttctgctggagctagttactatcaatgtatcttgtgaatcacatacagtgggttgataaaagatgtccataaattacactctaagagattatggtgtctaaagcacatatacctctattattaaaaagtgtgcatcaacatctaactgtccacaagacatactacacttacttttatcagtataaa

SEQ ID NO: 91784 - DNA, 474 bp, Glycine max
  unsure (1)..(474): unsure at all n locations
agcttctcanagaagcttctaaggaagttttctttatagcttctcagggaagcttctcaaggaagtttctcaaggaagctacctacgctataaatagaagtatgtgtaacacttgtggtaactttgatgaatgagagtcttgtgagacacaactcaaagttcaacttttcttcctcttttcttccttcaatttcgagctcccccctctctctttctctctctctttcttttcctccattgaagcaccctctccaagcttcttatccaaggcactctcttgatggcgaagctccttcttccatggcttgttccttagtggatggcgcctcctctcacctcttatcctttgtcttctactgcatctccatggtggaaaatcaccattgaaggacctcattaaagctcaaagatccagcctccatagaagctccacaagcaagcttccatcatgtggtaatcagagcacaagagcat

SEQ ID NO: 91785 - DNA, 393 bp, Glycine max
  unsure (1)..(393): unsure at all n locations
ctatcaagttcaaggaattgagagacaagttacgagtgacatccttgacaaatctgaattaaggagggatgttgatgtatgatgtaattcacctagttagttagtagtcaggagttagttagtttgacagctatgaaggttatttgtagttccatgtgtagtgtatataaaaataatagtgatcatgaatgagaagaataagagtgtgcagaagttttaattcagaattctaagttccctctatattctaaatcaattccttcatcttctcttattctctaagatagagngagtgagtgcatattgtgagtgtgtgtgaagagctctattttgtccaacagttgtttcacgtaatgagaacaagctcaatgtgaatgttgggtcatatgtacc

SEQ ID NO: 91786 - DNA, 481 bp, Glycine max
  unsure (1)..(481): unsure at all n locations
agcttgcaagaggattggtaagggtatctcatccaaggcctttatgtcctatacctcaaggacactcatgattgcaaatntactctntctgttatgaattcacacgtaaattccactctntgtaaaaatgctcatatttggcattctaagtttggtcatatataagacaaagttttcaatcatttgaataataaaattagtttacaattctctcctaatttcttttcttctaattgttctatttttccacttgctaaacttagaagattatcctttcctaactctaacaatttatcttatttaccttttgatttactctaatgtgatatatggngtccctatgcccaccctacatatgaggggcagagatcttcccttacattggtagatgactgctcaagattcacttggttatttctacttaaacacaaatctgaagcttcagtttatgtgaaacaattnttcaccatggttcaaactc

SEQ ID NO: 91787 - DNA, 241 bp, Glycine max
  unsure (1)..(241): unsure at all n locations
agctnttcagtcagcacctgagattggcttgttattttggctatttctgatgntccttccggggcggagttgtttgaaataacggttgaggtatttccctgaattgtgacagacatagatttctccttttaaaaaagcactatcggcatgcacaaaaaaatctttaatcgtatttcttgtgtcattaattggttgatgttcagaatggttttctcgctggctggcgcgcctcagaaagtaa

SEQ ID NO: 91788 - DNA, 181 bp, Glycine max
taaaaccaaggattcaggctgtttatatacctagccaataaactgctgtgatactgtgaaagtgtcagacaatgccaatgaacaaaagaattaataatcaatccatcatacatagctattatggattatatgaagtagaatatacgctagttgtgtctttgaaagagtagtctcgacaggt

SEQ ID NO: 91789 - DNA, 460 bp, Glycine max
  unsure (1)..(460): unsure at all n locations
agcttagccggannacatttcttcttttaatttgtgggataatagcaaacaattaagattgcgaaggtaagaattctagggcattagacaggatcaaaccaaaacatagggaataagaatcgccgcatgtaaatgcccatgatagggcaagatatgctagatagggcctacaacgaacatcttagccgacccataagtgaaaagatntaacttcattcattatatgatgaattttacgggaagtttaatatccatcctcattggagcacaagttgcacataaacaatggctgagaacatgagacataaatgttagggtttttagaaggaaatcctgtcatcattcccaagttattgatattttaagttctttattttaaaattactttattttataaattttaagtctaattagatttgtattatatatgttggacaatacatttcaaataattcttaat

SEQ ID NO: 91790 - DNA, 472 bp, Glycine max
  unsure (1)..(472): unsure at all n locations
agcttaggaacccanactntntatcttcaatgtctgaaaacatactcatgactaggaacccaaaanttggttttaaaattagaaaagcatgaaaatagggacttgcttgtaagaattcgggctgccccatgattggtactttgcacctaagtaacgtgggaaatgcttttcaatggtatgtagatatatgtgtaaatataagggggcataaanantcctcgccaagtatgaataattnttttcttaaatgaatgtatgatagcgtggaatgcctttttgaatgcaaatatgtgcaggatgtaattagctttccaatatgcatataaataaatatgagtgaaacagtaaaaatttgtatggtgtgcttcaaatgtatgtcagtagtttgtgatagcaaatgtttaggatataaattangtgtaaagtttgacgcaacactttgagcatganagtgtgttttctttttcataat

SEQ ID NO: 91791 - DNA, 468 bp, Glycine max
  unsure (1)..(468): unsure at all n locations
agcttcaatggagcttacatcattgtccttgtttgtattagntntacttttatcagatgttcacacatgtgcgcagaaggaagctggttangaaccaaattggaattatatatgtgcagctgtggtgatgccaattttcaagtgtacaggtctctaatttttgtgtgggcttggtgctgataaaaagtaaagttgaagggtgattatatgaaggcttggtggtgggttactacttactagtgcctcttattttcttcataaggtttaaggggttaggcgttttttgtttatatcggcctatagaatatatgtatttttgttttacatttatgagtatgatggattaatttactttctaaagtgagttggtgatcacttatttagaagatcactcttatttattagtaagtcattgataatagttaattaagagtttattttgaggttaaattatataaaaatatataa

SEQ ID NO: 91792 - DNA, 417 bp, Glycine max
  unsure (1)..(417): unsure at all n locations
gatccaagcaccgcggctgcagctatgaccatngaanttctcgagagctttcgcngatttattcgagcgtgacgatatgtgatggtcctgaatcaaaccttcgtgtgataacttgtgaccatttgaatttctcgagagctgtcgctgctcaatttcgagcatctcaaaatatgatgtgtcctgaaaggacatccgagtgaaaaacgtcgacaattttaattacttaagaggttgcgtggtgcaatgtcgggcgtctccatatgtgatgtgcttgaatcggacatccgagtggaaagttatgacgcattctaatttctcgagagcttccgttgttctatttctagagtctcgatatatagtgcgcctgaatcggacctccgtgtgagaagttattaccatttgaattcttcagaggat

SEQ ID NO: 91793 - DNA, 439 bp, Glycine max
  unsure (1)..(439): unsure at all n locations
agcttctacctctctcagggcatgaattcagttgttacattcacgactaccgcttcaactgaatggctgggattgacatcacaatagatcgctcgagctaattcttcgatcgctaatgtcttctttaggtcaatagccatctcactcatgagtggcctctctttgggatattgagaaacacaagccattgctatatctcaaggctttccaagctgaagtaatagtcataagtctgcttctaaccttgagtcaactatgggcctgatatcctctttctcaatcaaggacctaacccttccacttatgtgaccctgttcttgattactttccattactggttggngtgagaatatttccaacagaacaactccaaagctaagacatcgctnctctggttaatctactgaatttgtggtagctgccacaacaacatgcaacc

SEQ ID NO: 91794 - DNA, 468 bp, Glycine max
  unsure (1)..(468): unsure at all n locations
agctnggatnntcctttagtagggaacctagtcttcctaagatggagccaaacccagtcaccctgtcgcaacctacccttcggcgggagggcgacgcgtgactcgcgggatgcgtgttccacgaaaggaatgcgcgcggagtcgccaccaacgtttatttgaggaaaacgtcgganaaaccggaaaagacgcgatctacgaacttttaagtgaaaggttcgggagttgtatttacgcacggngaaggtattagcaccccacacgtccgtcccaagggacggcagcctttaatcgaatgtgcaaacatgactttgattnttacgttcccttttatgtctttatatcctttataccctntntatatttttctcttttttgtggtcgacaagggtgtttccctttgctcctacgtattcctcaatntgtgatgaggaaatcagacctacgtagttctttcttatcaagtga

SEQ ID NO: 91795 - DNA, 393 bp, Glycine max
agcttacatggagcctcataagaagcaatgtcatgaaatcatctcacatttgatatcacgctgactaaaggtcttggcactcatgtagtggagcttcctttcacttgaggagcatgttctcttatgcttgagaggagtgaatgtgagatgtacctatttgaatgtctcgccaaccagtctggtggtagaacgtcttgggaacttggacctatgactgtggtcgtcatagtatttaatgagtgacctaaccaaaggggtgccttgtgtgttgtatagagtgtgcaccactggtggaccttgtgttgatgtaccatgggttgactcgcgtgctttataccgaaggcgaaccttgtgtttttgatgttcctgcagactgttattcctacgtagata

SEQ ID NO: 91796 - DNA, 315 bp, Glycine max
  unsure (1)..(315): unsure at all n locations
agtatgatagtcaccgctttaagagcgcggtacaccagcagcgcttcgaagccatcaaggggtggtcgtttctccgggagcgacgcgtccagctcatggacgacgagtatactgatttccatgaggaaatatggcgccggcggtgggcaccactgggtcttccatggccaagtttgatccagaaataatccttgagttttatgccaatgcttggccaacagaggagggcgtgcgtgacatgaaaacctgngttatgggtcagtggatcctcgtcgatgccgacgctatcggccagctcctgtgatattcgttggt

SEQ ID NO: 91797 - DNA, 508 bp, Glycine max
  unsure (1)..(508): unsure at all n locations
atacttccagtcacctgcggcatgcacgcttgaggatagagacttctcanactatntatcttctctctcatagaggctctctaactttctagctttctcactctaagaagtgaattcactcttgtcttggatggttaagaatgaaggctcctacccttatttatactactcctcctccacaatgaatggtggagattacttgtatcctagggtggagattaattctctagaatgctccacacattctangagtctctacactcttctactcccttccatatccttccatactcttccataaggttccacacatatccagaatattctagaggtttccacaaacttccacaagcttctagagagttctacactactctagagttctttaggacgttctagaaaattctacactcttctagaaagctctagaattttctagaacctcttcaattaaggagggatcccaacanaatgaaacaaaataagagtggtaaatttttatttgtta

SEQ ID NO: 91798 - DNA, 468 bp, Glycine max
  unsure (1)..(468): unsure at all n locations
agctnggagaggatgcttcaatggagganaagttagatggagttatagagagatgggggagcacgaaattgaaggaagaaaaagggagagaagttgaactttgagttgtgtctcacaagactctcattcatcaaagttacaataagtgttatacatgcttctatttatagactaggtagcttccttaagaagctttcttgagaaaaaatccttgagaagcttctttgagaaaacttcctttagaagatagagcttagctacacacacccatctaaaaactaagctcacctccttgtgaagcttccttgagaagctagagcttagctacacacacccctccaataactaagctcacctccttgagaagagaagctagagcttagctacatacccctataatatctaagctcacccccatgacaaaatacatganaatacaaaanaaagtccctactacanagactactc

SEQ ID NO: 91799 - DNA, 466 bp, Glycine max
  unsure (1)..(466): unsure at all n locations
gatactcagagncacctgcngcatgcaagcttgtcacaatataatcccattttgtactatcctagtgaacaaaggagtgcgaatagaccatatgtgtccttggtgcatgaaggaggaggagacaataacccatgctttgattgcttgtaaagaccaatatatttggtttgccaccaatgtgggagcttgtccatcaccatacataacataatttgggccatggattagtgaagatattgttcagatcatgccgaatttcacaacgagggtgtttgcactggtgtgggctctatggaggagagaaggaaccaatgggctttctcaaaatcaaatgtctgcatgtgcttcttgaatgccatttttgaaatgaattcccaaatgttggcattggcttggaagacgcgtaacccacatggcaactcctaccaggcacaagttcagagggataataaaggtctcactctta

SEQ ID NO: 91800 - DNA, 487 bp, Glycine max
  unsure (1)..(487): unsure at all n locations
gatcttaagcgaccgctgctgcaagctgttatagggggntttgtggtggatgatatttatcattgnaagntcttagtaccttatggagagcaacaattaacacgacggacttgccgatacccaaaagggggattaattctattgaagtattatgtcttaggaggaaacctaactacaatgctgttatagttttatccacaagagggtctaagtattgttatgttgagaaaactttatgaattgtatacggtaagattggatcatgcattcatgcataaactcacaattattgttgttgtgagcatgcgcgtaagtctatttactagtgtgggaaggtcagctgagcgatttcacgtgtgatcaaggtcattgcaaacattatgccatagtaactactaccttgatatgcttatcctaacaatgtcactaattactccataatcagtattgatgttaatttccctacatggattatggcatgtcttgc

SEQ ID NO: 91801 - DNA, 471 bp, Glycine max
  unsure (1)..(471): unsure at all n locations
agcttcngattgtcaattgcaccatgttccattaatagtagagggtgccacttttgttgagtggntntattagtatttttttagttgaaataaaggtccaaacttgtgttaaagtgactctcaattctctttggatttgcaccacctatgggcttgttttaatttaaagaaattaaggtttaataaagtcaaaactctatgaatgtggctgtctcttggctgaccaacaagttgcacaatcttccatatgtttttgtgtcttaattctagttttaattaggtataatgacaccatcaattgttattattaattctagttttaattaggtttaatgacaccatcaattgttgttatgggtgatcagtttatcttctcacttgtgtaaccaacttgatgtcattcctatttataggctacacattttctaataaaaaatagaccatgaattgagtctaattaccttctaaagt

SEQ ID NO: 91802 - DNA, 427 bp, Glycine max
  unsure (1)..(427): unsure at all n locations
tgagaggtgcatcaattatcgtacacgtcacgtttatatcttcgattccttaagaataaatttctttagtgttaatttatctggcgatataggcataccctcacgtcgtttgtatgaatgcatgcatcgtcataacttcataatgaaaatgttattattgaagatatccaagcacgaagatgctattacagtacttagcacactaaatatatatatatatatatatatatatgtatatatatttatctatatatatatatatgatactaatactactaataataattatatcagagcagaagaactattagtgacctcagacttcaatcaccaactcatagttactaagattgctctatagctaactggggactctgcatttattaagtgaactcattatattatacngatatgtatttatttcttt

SEQ ID NO: 91803 - DNA, 459 bp, Glycine max
  unsure (1)..(459): unsure at all n locations
agctngaccgaatgtaagatacatcttcttctttctttgtcattcttgactccatttcattgaagcgcatatccacttgcaattccaaagtatcaaacctctcaccaacaaaggtttgaagaccatcaaacctttccaaaatcttcgaaagaagagatgaatcttctccctcatgtccttcttcaccaacatttctagcacccttctttacccaagagtcatcatgctccttaatataaccaaaggatgctatgactgaagcgcctataaggaatgatctcttgattggaacatagggttcagaatcaagagggatgttgaagtgttgaacgaaaagggtaataagatgaggataanggcaaggggcattcaatcgcaatgccttatgcatgcgatatctaacaagggtgtgccaatcaatttgtaacctttatgaaaggccacatgacaatgagatct

SEQ ID NO: 91804 - DNA, 457 bp, Glycine max
  unsure (1)..(457): unsure at all n locations
agctntagngaatgtaactaactttatngcttaccttaatgataatggttatgcttgaaatgctcggttaatgaaaattggagtgctgctaatgcttttatgtatcaattttatttattaacttattttcatgacacttctatgcaggagggtgtttggtatcatcatgcacaaccaaaatatntaatgcttgtatattggattcctgaaagtccaagcactattcctgcaaatgccacacacagggtgggcgttggttcatttgtcatgaatgaaaaacaagaggttttcccccaccatcaatcacaatatagtgcaactatatagttcacaatcatgcttatacttaattggaaggaatctcttattgtttgagggctatatctttgacaatactgtatgcctgcctgtcctgtatattgataaatgatccatcatggttaagatgaaaaaactt

SEQ ID NO: 91805 - DNA, 477 bp, Glycine max
  unsure (1)..(477): unsure at all n locations
agcttncataacatccaagaaatntaacatccaaacatcatgaactatcaaaactaagcagaaacagggcagaggcagaatactctgtccaaaacacaaaccaataccacaactnttcttattcaaataccccaatcacattctntttgttccaattcattcanccgtggatcgactcaaaaattttactggaggtccctagtacataattctaatttttgaccgttgggatctcctagaaaacgtccagaacccaatctgtactactctttccacaaccagcaaatacacatcattttctgcatgcacaaagccaaaattctgctgcacatttcaacagcaaaactctgcataatagtgcaaattttcgaaatcacacttgcccttgtccaattttgcccaaattgaatcctacaagtcctaaatcatgtataaatcatgtctaaaccaaggacaagcttcagaccaaagcaactc

SEQ ID NO: 91806 - DNA, 404 bp, Glycine max
  unsure (1)..(404): unsure at all n locations
tgatgaaacagagaagttatccatttaactgaaatatcgcctctgatggcatatgtttccccagctgactgtttagatgtcctacctcttcttcagctgccttcctccgatttcttttcatttcaagcagacatttgacctcagcaactttaatctgtagaacatgatgcacgcccctgagccaaaaaggcatatacaactatataattaaaaacccacataatgtaagaagaatacctctatgcagtgactaatagctataataattcaaccagcccattgtaagctattaacattggaactggcgacaatttatgggttaactattatattgaatntaccacatggaacaactacatagaaaatattaaacatggagattgcttgctatagcatttgtcatg

SEQ ID NO: 91807 - DNA, 510 bp, Glycine max
  unsure (1)..(510): unsure at all n locations
tgatccttaagtcacctgcggcatgcaagcttgccacccagctcgcccaggcgagcagggttgcttcctctataagcaacagccttctggaggaatcttctggagggcccaagtgggcctggttgctatttgcacccccatttttactaagtacacccccttgccttctttttggtgattcttttttcgtaaagntacggaaacttacgaatttcgtaacgatactagttttctttccgtaacgttacggaaccttgtggattacataatcatcctctttttgacttacggaatgttacggaacctcactaattgtgcaacgatgcttccatttgattttcagtgtgtcacggaaccttacggattgtgcatcaatattttcttttgttttctggcatgtcccggaatttcacaaattgcctaatgatgggtgccaaggacctcacaaggaccaaacaaaagtcgcatgtcatcaagcaaatgtccccggacgaaattacggtatgacag

SEQ ID NO: 91808 - DNA, 419 bp, Glycine max
atattaaatgttgcatcttagtttatatcatatcatttgtgcatcatgcatcatcatgtgtgagtgaaaagaaaatattcaaagttagaaaatttcttcagaagataaaactctgtgttttaatcaactacaatcttatagtaatcgattacacaaagttgttttaagcttacagagttatatctcgtatcggtttaatcaattacaagcttatcgtaatcgattatacagttggctttgagacaatgattgatttattaaggagtctttggtttaatcgattaccatgtgatataattgattatttctctttctataagtgtttcagaagtgaacgataacactctaatcgaataaaaagataatataatcaattacttcattgaattaatcaattatcttgtagaattaatcgatta

SEQ ID NO: 91809 - DNA, 467 bp, Glycine max
  unsure (1)..(467): unsure at all n locations
agctntaactganacactaagtaagtntccaactcaattgcatgctagtcaacctttaccttcatctantttgcaggttacaggttgcacactttgtggtggagctcatgggtcaggcttgcgtattcccactaaagaaacatctcatgaagttaattagatgggaaaccagcctagacaaaattttaatgcagggcggatttctggatttcaacatggccaaccttaccagcagcataatcaatggagaaatcaccctggtaatcagttcaataaagaccagggtgggctacctaacaggccacaacaacaagggcctagtttatctgagagaataacaaagctggaagaaactcttgctcagtttatgcaggtgtcattgactaatcataagagcacanagtcagtcatcaaaaatctagaggtccaagtaggccagctagccaaacaacttgtatgaaaatctt

SEQ ID NO: 91810 - DNA, 475 bp, Glycine max
  unsure (1)..(475): unsure at all n locations
agcttatgctgcaaacatntacaataaacctctctaacctcagcagcaaaatcaaccacaatagaacaattatgacctctccagcaacagatacaatcccagatggaggaatcacccaaatctcagatggtctagccctgaacaacaacaacaacagcctgctccttccttccaaaatgctgctggaccaagcaagccatacgttccttcctcaatgcaacaacaacaacaacaacagccacaacaacaacaacaacagagacaacaatcaactgagaccccttctcaaccttccttagaggagttagtaaggcaaatgacaatacataatatgcagtttcagcaagagacaagagcctccattcagagtttgaccaatcagatggggcagatggccactgagttgaaccaagctcagtcccaaaactctgacaagctaccttctcaagctgtgcagaatccgagaaacgtgagt

SEQ ID NO: 91811 - DNA, 330 bp, Glycine max
  unsure (1)..(330): unsure at all n locations
cggatcctaagcaccgagctgcactggaggaggattcctcattttactaagaacgggatctacggtggactaccaccttgcgctagctcagaatgatataaatctccgcaaacccacaatttgcttatagatacccacggcgctacaattgcaaacagacatccatgtcatagagactagtccgacaaattgaatttagggaatcctcaacacagtgatgccatatgagcacggattacctaagaggtcccttattcagacagataccanatgatgtcagatgacaggaccacattagtgattttaccatccaataaataaccaggacat

SEQ ID NO: 91812 - DNA, 471 bp, Glycine max
  unsure (1)..(471): unsure at all n locations
agctnggataatnntctattgacttaaattgatatacctaatttattcacgttgtaagttggaatcaagttcattggatttaccgatcctattcggatccatatccaattgtccactcctgccatcaataataatgttcactaggttaacaaatcgcaaaggaagataagaacaagacaaattctttgttataagaaataaaanatccttgctctaaaatgtgtttctccgaaaatntctgtttatagttacaccttcctaatttagaatgtgtacctttcctagaaattcagctatataaattattagaactttgtctacagtctgtttccgactaaaacaagaaatatagaaaggtaatctgctagtatgtctcgtccatgatcattactagtataattgattatcattcttagttcatctcatggtatgaacatatantaagtatctagttatacttatccgagcact

SEQ ID NO: 91813 - DNA, 125 bp, Glycine max
  unsure (1)..(125): unsure at all n locations
agcttcaagctgctcggacgcttcatgtcgctgtatggaanggcnaatgtcttcatggtggtcaagataggatctcatatcacanagccattgaacatgctcaaatctctgatgatacgccaaca

SEQ ID NO: 91814 - DNA, 406 bp, Glycine max
  unsure (1)..(406): unsure at all n locations
tgaggcatgcaagcttgaatcggacatccgtgtgttaagttattaccatctgaattnctcaagagcttncgtcgggtcaattctagcctctcgacatattatgcgaccgaatcggacatccgtgtgataaggtataccccttgaatatttcaagagcttccgttggtcaattttgagcgttgcgatctgagatttcctgaatatgacatccgtttgaaaaggttataccaagatgaagttctcaagagcttccgctggtcaactttaagattctcgacatattatgcgcccatatcggacatccgtgtgaaaagttatgaccatctgaatttgccagagtgtccgatgtttaatatcaagcgtctccatatattatatagcctgaatcgggcatcctgtgaaaaga

SEQ ID NO: 91815 - DNA, 430 bp, Glycine max
  unsure (1)..(430): unsure at all n locations
agctngcnnctacttaggattgaattatagactctttgcccgncatgtgttgtgagcaaccattgtctatgtaccatgatcggtgcttccttcctgctatcaaggagatctacaacaaanattattctgctctcangtacctaaatctttctgggttcttatttttcttgttagcttgagggtgctgataagcactgggcaaaccctttgatgggttgcccttttcanggaggtcctcgcacttatgaaccttatgacccacttttccataaaaataggaaacattgacttctttagcattcacaaccttcttgccttngaaaccatggctagatttgtctatggggtttctttgcaccttaataatatatttaagggcttcatgaccacaacataaattgcctacgctatctctgaaggtttctatctc

SEQ ID NO: 91816 - DNA, 442 bp, Glycine max
  unsure (1)..(442): unsure at all n locations
cttatagcgccggtctgggagacgaattttcattttgtcttaatatacgaagatgatgtgtcgagtacattggatttggcaccaccctgcccttctgatttccaacctgggaaatggcgaagggaagaacgccccgacatttatgcaccgagcataatgtaaaccattacgggttttaaagctctatagttgggcctacgctntagaagttttcttttgggtaacgctatgagtactttgttttttaaatttataatacaaggatctttcttcatctgttcctacgtctctacccattctcatncatttgcatggttactttctttctgaaatggcagatccgatgacgagtcccccgcaggtactaatacctgtgacccgcctatttacttcgagcaagaaacgaatcaaacgtgagatgaacggaacgacgatgtgggac

SEQ ID NO: 91817 - DNA, 344 bp, Glycine max
caccatcttggtgagggaagcactgtgtgcttaggggctgataagttttcaccatcaagtggtattttcagctttattattacataattgagttattctggtaccgtttcattcatatatccgctattttttccatatattcttttaaaaacccatcaattggtccgacctgccagataaaaaaataccaccgcaccggagttgagatgcccaaaacctaaatgggaatcgttggcacatggaacacaatggtgatgcaagcacactgaacgtggtaacaatgcacacaacttggtttttattatgcacgatcgcaaaagacaataaaagtgagctcctccata

SEQ ID NO: 91818 - DNA, 384 bp, Glycine max
  unsure (1)..(384): unsure at all n locations
ccggaatatatcgagacgctcgaaattaaatccgaagccagtagccaattcgaaccgacataacctttcactcggaagttcgantgagtcccgtaatatatcgagacgctcaaaatttaaaaccgaagctcgtagcanattcgaacgacaataacaattcactcggaagtccgattgagtcccgtaatatatcgagaagtttgaaatttaagaccgaagctcgtagcaaattcgaactacaataacttttcactcggaagtctgattaagtcccgtaatatatcgagacgctcgaaatttaaaaccgaagccagtagcatattcgaacgacaataacaattcactcggaaggtcgattgagtcccgtaatatatcgagacgctc

SEQ ID NO: 91819 - DNA, 230 bp, Glycine max
attttaactacttggattcaaaattggggcttgacaaggaaagtgatgaccatttcagccactatttttatatttgtcttagcttattttacctttcttgactcttattttctcaccttaacttagatatactcttatgcaaataattgggcttaattgacaattgttgcttattatatggatgttgtgcttacttgacctatctgttcatcattcatcttcctctcttc

SEQ ID NO: 91820 - DNA, 173 bp, Glycine max
taacttctcttgagactttgcctatgcctaatgcgtctgtgatgaagcatgaaagagtgtctagctatggcggactatgtgaacaatcttcatgacagagtctaatatcacattgagaggaagaaaataagctatgcttatcgatcccacagacggagaaagaaaggtgtctt

SEQ ID NO: 91821 - DNA, 404 bp, Glycine max
  unsure (1)..(404): unsure at all n locations
tgatgataacaaaggtgatgacaaaaagctcaaaggtcaatcacattatgagttcaagatgttcaagatagaatcaagaacacttcaagattcaaggatcaagcttccaagaatcaagatcaagattcaagactcaagaatcaagtatcaagagaagacctaatcaagattcaagattcaagaatcaagagaagacttaatcaagataagtatgaaaaagtnttttcaaaaactgagtagcacatggatttttctcaaaacctgtgtaccaaagagattttactctctggtaatcgattatcagattgttgtaatcgattactagtagcaaaatgaatttgaaaaaggtttcaaatgaatttacaatggttcacttatttcaaaaagctataatcgattacaat

SEQ ID NO: 91822 - DNA, 464 bp, Glycine max
  unsure (1)..(464): unsure at all n locations
aaatgggtaaaatgctcacatttatcttgttctacatcatattcaaacttgtctaaataaataataaagtcatcttgactcaaagaatgtcatctaagtctcatacaattaatatagaacctatatcctaatgtcacatcctatcagagcgtggtgttcccgtgtcctctagcatgaggttcttcatagtcatccacctattcatctgctcccccgaacacaaaaatcaagatcatcacaggattccaacacanacagcanaccgggagtgagttatcatatttctaactactagagagaaacaacacaacatatagtagccaaatacaatntacttagcatatctcacattatttcatcactttgtcattcatcaatcacacctttcaatcatcattcactatacacaggaatcacatatttctatcaagacataatatcacatcatttcataataaacaata

SEQ ID NO: 91823 - DNA, 333 bp, Glycine max
tgcagcttacttagaagaacctttttatctttatttagctacacacaccgctctaatagctaagctcaccttctagagacgacaagcaagaacatagctacacaccttctataataggctagctacaccccatgacaaaagacatgaaagtacaaagaaaattccttactacaaagactacttgaaatgccccgcaatacaaagctgaaaccctatactactagaatggtcataatacaaggcccaaactaaggaaaaacctattctaatatttacaaagataagcgggctcatacttagcccatgggctcgaaatctaccctcaggctcatg

SEQ ID NO: 91824 - DNA, 288 bp, Glycine max
tttttgaaagcagcgccatgctcatcctccactaacatgaaggccaccggcccctcctttccttatagagaggaatgtggtgtcaaatccaccaattcggctatgcctaagaacaccatgataccctcttctcctccatacttcttcattacgacctatattctgcatcagatccaacctctcatggagcacaccatctcactgttccattaacccctccaaaagttgcatcaaaactcgcattcttaatatcgaacccccactgcatctttcgatgtattgctgcca

SEQ ID NO: 91825 - DNA, 225 bp, Glycine max
catcttcaacatatttaactgcgtccggaacactcatgttctcaattaaccttgtcggggatatactctttctatgatccccattcagagttgctgccatttgtaccaattcttcttgaaattcactcaacttggccttttcttgaacaggagcttctcgtatttttacaggttcaggcaatttcactgccaaaatttagaaatttaaattggccttaatactac

SEQ ID NO: 91826 - DNA, 292 bp, Glycine max
ggctttccgctggatctccatgggggaaaatcaccattaaaaggacccttatttgaagcttcaaagatccattcctccatagaagccccacaagcaagcttccatcactactggctggatggacagaactcggacatttttatggactcgttgcaaatcatcaagtgaccatgactcattttggatagagtattttcttcctcaccatcttcaaaagttgctctgaaccaaaagtttatcctaaatggcactccttgcactgccaagttactaactcaatcacttttaaagt

SEQ ID NO: 91827 - DNA, 367 bp, Glycine max
gcttgtaatcgattacacatatactgtaattctattactttatctatatttcagaaaatattctcaacagtcacatctttttatgtggctcttgaatggctatcaaaggcctatatatatgtgacttgagacacgaatttgctaagagtttttcagaacaaaaaagtcttatcctcttaaaaagcaaaatcgctttattctcttacaaattccttggccaaattacttgtgattcaataaggaattatttgagtgctcaaattgttcaatctatctctttcaagagagatttcttcttttcttcttcttcattctgaaaagggattaagagaccaagggtctcttgttgtgaaagaattctaaacac

SEQ ID NO: 91828 - DNA, 341 bp, Glycine max
  unsure (1)..(341): unsure at all n locations
acttttttaagtttaagaagcgctataaaaaaaaattcgttgaaatcttaaatgtcatgtanaatcgtaagactaggaccaaccaaatttcataattgatgataattcgttgagattcataattattttatacattgctaatcacgtacttatttactacccattgatgatatttctcttttgcaaattatcctctntctacctttcatggagttcatcagtaaagatgcaagcatataacantgatatataattatagaacataaactaactaatattaatgttctccatgtgaacagattcacgggtatatatatatatatagcagctagatgagaaga

SEQ ID NO: 91829 - DNA, 293 bp, Glycine max
  unsure (1)..(293): unsure at all n locations
aataatttggggtaaaaagaagccactattgacttgagccttcaataacttaaaaaatacatgaagtttgattcatattattattgaacccacctttgcataaggtaagcaatatcagcagcctcgggcttttggtcttctttctggttaccataaatttgacatggtaaaacataagtgaacttaagatctgcctgggcacgtgcctcangggataattcaaagccatgtgtatcagttacttcctcacaacctattgcagcctccaaatctatattatgggaagaaaaaaa

SEQ ID NO: 91830 - DNA, 462 bp, Glycine max
  unsure (1)..(462): unsure at all n locations
gagcgacgcagctgcagcttanaaataaatagtggagggaatatgaggctctctttttctctgaagtgtatcatatttaaatgtatatgccaagagttttgctctaactcttagtattgattttcacgatatgagaagtagccatgggaaaaaacttcatttggttctgctggcatagacacaagacagataggagacaaacttcaacatgtcactttttgtgttagtgtccatagtaagttgctagtaataacatatcctaacctaagggataacttaagtcacaaaatgtagaataaacccattttctatgttcaaataaaatctaagaattttgattctaattaatatatattcttccctcactcctactaacntaaaattagtttttgtttaaatagtttttaaactaagaaacgaaaacacatgagtacacaccatatgtagcagaacaaccatcga

SEQ ID NO: 91831 - DNA, 359 bp, Glycine max
  unsure (1)..(359): unsure at all n locations
ttttttcttatgangaccaatttttttttgttaaaacaacaccgcaacaatattatttttcgctttggtaaaaaagtttgggaactgatttttaaccatatatacctatatggttatattacaaacattattcatatacttgcacaagaaaagttttccttgaaagaggagcggtctgtgatgtagtactcatgatcatagcaatgaatattaattttttattaaccgtgtctctaaatatagttaaatattaatttgcatgacacccacaacaagaacccaaaaatgagaataatggtttgatagtttttgctcaaatttgcagcaaatgcaacggtacttgacaaaattgaaagcct

SEQ ID NO: 91832 - DNA, 380 bp, Glycine max
  unsure (1)..(380): unsure at all n locations
agctntcaaccaaaataaaaactattaactttttattaaaagctaaaacataaacataaacataaatctaaagactgaaacataaacataaatctaaattataaaatgtactaaagacgagataataataaaattgttcaaaaagcatggaaataaaaatcttgatcctatcaatatgatcatgtgcatgcttattcaggtccagtgctggtgcagatgatggatcctgagaaagaggccggtccaacactggtgcagatggctcaagctcangctaaggagatggctctggtactacaacatcctcctgaacaataactagatcagtctcaaaaatgaaaggctcaggtggagtgggctttaaggcctctagaatgtca

SEQ ID NO: 91833 - DNA, 299 bp, Glycine max
  unsure (1)..(299): unsure at all n locations
ttttttattttcaaagcttttttttttccccaccaaaacagccagctttggcagccacatgggcaaacaccccaagatttatgatgatggtcaattctaccaagaaaatatcctttcaattggctttcaaactatatgaatgtaaagaaaataaggatttcagtccaaaatgtcaaaactttactttcaaacaatacccatttcttgaacatatcctaaattaaaaanaacatgcaagtcgacgtgcacacaaatgaccaaatattaaactgaaatcgacaaactacacattacaaata

SEQ ID NO: 91834 - DNA, 327 bp, Glycine max
tgatacttgcgttttaactgatatgcctcaacataaaaatgttatttgcttgaagtgggtgtataatatcatgcacaaatcaaatgggtcagtggagagacataatgccaggttagtggccaatgactacactcaagtggattggcaagattacctatacacattgtctccagttgccaagctaaccacagtgagacttctattggccttagctgctatcaataaatggtatcttaagtaattagatgtgaataatgctctcttgcatggtgatttgaatgaagaggtgtacatgatgcttcctcaatatatgcaataacctaacct

SEQ ID NO: 91835 - DNA, 325 bp, Glycine max
  unsure (1)..(325): unsure at all n locations
gagaagttcaagttcatagccatcagagtctgaagagagcatgatgaacttagggacgtcaatatggccacaggtgaagccttggaacgagaaaccaagaaagtccgaaaggaagaacacgtgcaagcgaagttttgaggggctntatagggcagcaatagtaagctcaagcttcgaagaggtgaaaggaatcatctcaggtcaaaggcatgatcttgaaggacgagctaaaggttcgccttaagtcgaaaagaaatctgtcccaacagtgtagcgagactgaagggaatatgtgggccattatngataagtgcaaagagaagct

SEQ ID NO: 91836 - DNA, 411 bp, Glycine max
  unsure (1)..(411): unsure at all n locations
agcaagcttcttgtcgaatacaagcgtctgtgtttttgttggtctcaatgagacatccatgtcaaatgttatagcggcttgaatatgctccacctttcgcgactctcgatatttaagacaaaaattattgccgctggaatatccctggagcattggtctttcatctcgagcatctcgatatgttatgagcctcaatcggaaacttgagtcaaaagttattgcaatttggattttccagcagactccttgttcaatttcgagcgtctcgatatattatggaccgcaatcaataataatgtcagaatttatgggaatctatatttgctgggagcttcgatgttcaatttcgggcgtctcaatatattatgggactcanacagacatccgagtcaaacgctatgctatgttgat

SEQ ID NO: 91837 - DNA, 263 bp, Glycine max
aatttgggggtggtgggttcttgggagctataatggataagtctactaaggtattgctttaccgtaattgtttgtgaaggaaatttgtgtaatatgctaaacttgacatgtttaatgtaagcaaaactgcccatgttgattaagggttcaataatgatgttttgagatatatgtgtgctttaaatgtagatagaaaactggtagagaggatggcgagagttaccttacagttaaatgtgagaatggtagtgttgtaggtggaa

SEQ ID NO: 91838 - DNA, 479 bp, Glycine max
ggatccttaagcgaccgcaggctgcagcttcataagcagcttccatcttgtggtatttttagcacaagagctacaagtaggtgctccttaaacctccactaattttcagctctactttctcctccattgttgtttcttcggatctctccatgtatctcttcccatgtcttgtgctgaatgttgttaacataattttttagaagttccaccgattaagcttactatagaagctacatctgactttctatggttcaaattccttgttcttgttcttgaaccatgaattgcgttgagtttacgttcctttgagttatatattcgcatattatttggctgacacctaaaccatataattcttacaaaacatataaagtagaagataacctcagaaatctagaatgacatattcacctattgtatgtttcgcataatagtcatgtctagtcatgaaacttgtcacataagataccttatgttgt

SEQ ID NO: 91839 - DNA, 263 bp, Glycine max
taaaacgatcccgcattaacaattggccggcatttaaaactttggctggcttaataagtttcagcaaaatacaataaaaaaacaaaaacacttaaacccagctccaaagctttttttttctttacaatttccaaataccataaatcatattctcaacgggatcaacagtcatcatataaaagaggcaaaaaaacaaaagcagaagaggcaaaaaaacaaaagcagttcaaaaaccaaagcaattcaacgggaatgagaatttc

SEQ ID NO: 91840 - DNA, 234 bp, Glycine max
cccataacatacactagtatacctgcccagttattatcatcaccagtagcatcagcctgccccgaaccctttatattaggatcatccatacacaacatgtcaaaaaggtgcgctacatactcaactactagaaggggaatattgtgttgtgtcactactccgatttgaactgtcagcttgtggagatggcgcaacatgtgccactttctcaacatgtggaggatttgccacaat

SEQ ID NO: 91841 - DNA, 439 bp, Glycine max
  unsure (1)..(439): unsure at all n locations
tttgatgatatggtcttcaccgaccaaatgatcaatgtgtttcttataagangcaaatctgatcatcatactttgataaatgccaaanaaactatggcaaatgaagagggggagatgatgcaagctccatcggagcttgtaggcctacgaatcttcttctcaatggattcctttgcttcttggaagataaatggcatcggaatggataatgaagagagagaggagacgccacttcaaggagaagatgagtctagaagaagctcaccaccatatgaggccctggataagagcttggatgaagaatgagaataatgatgaagagggagagaagagccgaaatttgttctctaatgnccttgaaatctgaagtttatattcaatgttcaaattgagataattccacacatgacccttttttgcctaaggtcacacacaatat

SEQ ID NO: 91842 - DNA, 476 bp, Glycine max
  unsure (1)..(476): unsure at all n locations
cgcaagcttgtaaacttatgcttagcttgagtttgtttatnttattaaacaaacgagtntgatggagcatntagcaagttgaactcgagaagttcacgaataacttgactcatttacatctctatctagaaatacttttgaatttttaattaagtgtcgcattatatatagattgttaacatagtggtaataaatgacatttggttatagtgataactattatttatggtgatgaaaattgaatgaaaaataattttcaattatagaaataagaaatattatattttatatttgaaatcactattactttatttattatatttattaagttgaaattcaaacaaataatattataacagtaacaagcaacaatataatataacagaattgaaaataaataaacatatgaanattaaattagtttttcataagaatcaaattaaaaattttgattatgttaatatatagatactaac

SEQ ID NO: 91843 - DNA, 363 bp, Glycine max
acacaccccccttattgcttagctcaacctcctgagatgagaaactggagcttaacttcacaccccctataatagcttagctcactccatgacaaaatacatgaaattcaaagtcctcttcagaactcttaaatgccctgaaatacaaagggctaataacccttatactaactagaaatgggcccaaaatacaagggcctaaaaagaaaggaaaacacctacttcttatatttttcaaagaagagtggacccaaccttggcccatgggctcagaaatctaccctgaggttcatgagaaccctaaggccttctttattacctctagcccaatccttttggattcttaatccaatctcttggggg

SEQ ID NO: 91844 - DNA, 301 bp, Glycine max
tcccagggcgattttgcgcctggacaagtatagttccttagctcagccttcacaagcacctcataatgatgttgaagtggtcaaggtgtttcaacatcatcatctgaaccatctgttgccgctcttgctgaaactcaaccaccaatattgccattgccagtaactacacgacccagttacaagggagtcttcttctcttgagctatcagtttcttgcatgcagacacacccttgttataagtttgcttgcgatttatgatttatacaaccagttacatggtgagagacataatccataaat

SEQ ID NO: 91845 - DNA, 302 bp, Glycine max
ttttgctccgaaaaaagaaacttcaaaattctaaacatttcctccctcttgctaaggcttccatccacccaaagcacccttgattcacccggaaaggtaagcaatgaaatgggaggaagctggctatatacaattttcatggggagtagcctgggcaaaagtatggaaggtagtgttgtaccaccattcagctaaagagagccaatgaacccaatgatgaagtctatctgaacacatacacccgaaataagtctccaaacacctattaacaaccttagtctgcccatctgtttctgggtaat

SEQ ID NO: 91846 - DNA, 463 bp, Glycine max
agcttgtgagtgaagaaaaagcacgttgaatagtcttgtattattttatggggtcagtcattgatcttggaagcaaacagagctgattgtcaaaatctcataaaggactacctatagaggattctgattggtagagtattttgaccaactaggagtttagtgaaatgtcactatgtgaagtgtcatagtgtgagagctttcgagaagtcaataatcaaggatgttatagataacactatggaattttgaataccattggtgggattcatgtttcaatccatatacaaatttctagagtttgcgaaccatgtgaaccccatcatcggaggaaaaaccttcagttgtgtcaaataaatcttttcctctagatcaccatttaggaaatcttttttcacattcacttgatgtaattccaagtcaaaaatagcaactaatgtattattgtgtataatgagtctttcat

SEQ ID NO: 91847 - DNA, 290 bp, Glycine max
  unsure (1)..(290): unsure at all n locations
ggaaatgaattttcctagctgaggacaatgactcaagacactagaaaactgcagtaaagcaagcagtcctagttccaacagtatgggaaataggagatggccaatttttatttttttgacagttaattaaacgtgttggagaaagtttggtggttggttccaacgttatcacctaatcacatgttattagtcataaaatgactacttggttggccctcgctcancccatggaaacgtgacactctgttctaaccccgcaagtgcaccggatcgtgcaagtagtattaaat

SEQ ID NO: 91848 - DNA, 444 bp, Glycine max
  unsure (1)..(444): unsure at all n locations
acctgaggcatgcaagcttgtccctcacttccatattaagcccattttggattctatctatgcttgnnctttcctcctccctaagtccagctcttaaatggagtaagtccatttcgtgtctatattcttcaatactcatactcccttgtctaagcctttggagcttgtccataaactccctttcagagtaagagggaatgtgcttcttcctaagggcactcttaagattattccaatactctactggaggatccncatgaatccttcattccataacaagggaagtccaccaatagagagcctacccttgaaagctaagggtagccaatggaacttttctttcttcgctaatatgatggcaagcaaagagttgttcaaccttcatttcccaatctaagtaggcctcaccattatcttttccatggaaatatgggaggctaatgc

SEQ ID NO: 91849 - DNA, 329 bp, Glycine max
ctttttaagcgaagggcgttgacttgatcccatgttttactagaaggaaaccaaatctaacgcgaatcaaaactccgacatctatcatgggtggaatggatgaatgcctgaagaaatgcatatgatacaaatgcaatttttgaacacgggaacccgggaaaatgtctccttcttagatacaacgtcttggggtagcacagtgtctgacgtatgtatttaagaaagtgacacggaccctctgttggtttgctaaagagaggggatcaagacagaacctatgcatgatgcatatgcgaaaggcataacacggggatgtacatagtatgata

SEQ ID NO: 91850 - DNA, 446 bp, Glycine max
  unsure (1)..(446): unsure at all n locations
tgcttgccacccagctcgcccattctatctatgttgcttcctccaaaagcaacaaccttctggaggaatcttctgcagggcccacatgggcttggttgctatttgcaccctcatttttactaaatacacccnctgcctctttttggtgattctttnttcgtaaagttacggaaacttacgaatttcgtaacgatacttgttttctttccgtaatgttacggaaccttgcggattacataatcatccctttttttgacttacggaatgttacggaacctcactanttgtgcaacgatgcttccttttgatttccggtgtgtcacggaaccttacggagtgtgcatcaatatattcttttgatttccggcacgtcacggaatntcacatattgcctaatgatgggtgccaagcacctcacaatgaccaaacacaagttgcatgccacc

SEQ ID NO: 91851 - DNA, 369 bp, Glycine max
  unsure (1)..(369): unsure at all n locations
tctggcgaccagtgcagaatttttatttcaaggcccactggggtaccacgattatcaaggcatctaagttaccttcaatcttcttagactcaagtgatgaagatgaatttgtggctacttcatgcactcccctaatgacaatagcatcatttctggcactaaattgttgggagttggaagccatcttctcaattaaatttctggcttcagcagggtcatgtctccaagggctccaccactggcagcatctatcatacttctctccatgttactgagtccttcataaaaatattggaagagaagctgctcaaaaatctggtagtgagggcaactggcacactagatttttnatctcttccaatattcata

SEQ ID NO: 91852 - DNA, 406 bp, Glycine max
  unsure (1)..(406): unsure at all n locations
agcttctcaagcaaacttncatcacaagcttctttttgacctcttcaaagggttcacaaatgacactggttaagggccgggtattggagttctctatagtacatggaaccgagtgtttgccctaagagtattgaacataggaaggctgtgaagaagaagatgatgaagaagaagagtttagtgaagggagtagtatatggtcgtcgtctgcgttgaacagagagaacgaggaagttgttctaagatgcaataattaaaaattaccacaaatggttaaaatgacgcacctatttaaggtccaattagaatgcgatacgtggcagatagcgtttgttagtaacacaattcgtgaataaattttaagggagaccaatattatatatctgagacatatagggggacaaaa

SEQ ID NO: 91853 - DNA, 458 bp, Glycine max
  unsure (1)..(458): unsure at all n locations
agcttgtaatcaattaaatcgatacgatactcttctctacaagcttcaaacacttgtgtaatcgattacgatcaacctgtaatcaattaaaacaaagagttttaactatagaggaaatcttctaactttagaacttttcttctaacccctacatgatgatgcatgatgcacatatgaaatgatagagactaagatgcaacacacaatataacaatcaatacaaatgccactcaagagagttgggcatgtaaaaaataaaacatcttatagctcttcttcaagcttcaagggctaagtttcatgttgctcctcctatctctaacaatattttcatggcgcacaacatatatatatatatatatatatatatatattaaaatgaatcatattattctcaatttaaaagggtgtctacaacaattatattaaanatgtgtcacaagaaattactactaagc

SEQ ID NO: 91854 - DNA, 174 bp, Glycine max
tactatatatgttttcaggacacgttatcataaccaaaatgctataaatataccaagtgtctggccattgggcttaagaacatagtattattgcttactacaacttcagaggaaaagtgagttactggtaattgatctcctcgaagggaatttcttcttcacaagagacataat

SEQ ID NO: 91855 - DNA, 328 bp, Glycine max
  unsure (1)..(328): unsure at all n locations
agctagcccanagaaggagtctacggtatgttttcttctctcctcaaaagacaggaaagcggtttgtaataactcctatgcagcttccatataccgtcttgaggataggctgcttaccaaaatgttattccctgccgatacgatgaccaaatgctctttcactcaaaattccatctttcggcggtgtgtagtaagtacaacaccaacatagtgtaatcaactggacaccaacacacatcagaagggatggtgaactaccatcaacgaaagtgactagacacgtgtatggcttctatgtcttggagacttaactcgtcctaaaatctac

SEQ ID NO: 91856 - DNA, 377 bp, Glycine max
tgatgagggaaaaacaaataaattgtgatataatttcaatatctagccataagacacacgaattgcagtaatcaactaattaaaagtgcatgcctcttggtcatcattacactaccacatacatagatgcatccctaacaatgcgtaacatataaccaaaagatataaaaatggagggtttatagatttaatggtttccacatgaggttcaacccactttgcagcttatgccttttttcttcggggcctaaaataaacagggaagacattgaaatgaagaagccatatgatttgcttgtagtaataaagaaataaaataaacctttgttttgtaataattaacatgtcaaagaaataatgtgttgctgtactattca

SEQ ID NO: 91857 - DNA, 302 bp, Glycine max
acattacaaaattatcttttagttaacctaaaagaataataagatttagaagctccctatgctggataataaatgaataatttggttggaaattgaaataagaaggataaatagcgaaagtgactatttatggggaaaaagggtaatgcattttaaaattttaatttttagggtggaaaatagaatatgtaagtttttgtatttttacaacttcccatgcacgtccaggtggcaccactggagcggattaactgggccacaggtaacccaagtttacttagaagcggaacagcgtgcgaccc

SEQ ID NO: 91858 - DNA, 386 bp, Glycine max
  unsure (1)..(386): unsure at all n locations
aaaatctcattggacactaaatttgatcacagaagttgtcatttgaatttgagaatgattatccttaaaaatataactcttagacattagtacccaattnttattgaaagaacaaagactataaacatactctatatccatataaatctatacatagtttgacagctcgaatccaactttcattatcccattaaatccatctacactgtaagtaatagtgccacacacacattttcttttacatagattatatatgtagaagtttatattatgttaaaatcatttattatctcgctgatatacattaaaatcactgtgatataaaaaatttaaaatatattaaactatgagatcatcttatttttttttggtatcgcttaaattta

SEQ ID NO: 91859 - DNA, 417 bp, Glycine max
  unsure (1)..(417): unsure at all n locations
agctnttgtgatgattgatgtctcgcttctaatctatttatccctatcacngaactcttggagaaggattgggtcgttggtactatatactaataattaaaataaccatgtcctgcgggaaggtataatagggctgcacattctctacccaagacgncgtcatctgcttctaattatatctcttcattactttcgatgatccttaagtgctttcatcatattcatgtacttttccatcatgccaaatcatgctgcttcaaatatactctttaccatacgtggtatttttaaactttaatttatgcgttctaagtataaactntcgttcatatgccagatattacattttgttattggatgataatgataactctttatgcataacagatttntaatagtatgcacaattcatttatc

SEQ ID NO: 91860 - DNA, 269 bp, Glycine max
atctcaatttcctctcatttcacaataaatgcatgtataaaatagttaaaattttaaaaacaaattagaacataattggataaataataattaatgtgatcttaaacttttgtaatgacaaataaatagaaaaaaattcaaaatccaacacttaaaaaaacggatgaagtgtaattaaaagtttaattggatctattaattattaaaaagttcaatccaatcatttaattggttaaaagactagagttatatttttttcattcaattag

SEQ ID NO: 91861 - DNA, 470 bp, Glycine max
  unsure (1)..(470): unsure at all n locations
agcttgaagtgagaaagtgtggaagagtcattcatcctacttttattcgttgaccacagagaggtacctggagatatgtcgcangggtcatgagacctcggggacgttaggtggggtgctatttcccaaaaccaagcttgaccaatcccgacccaacccgggcatagtcagtcaatgagaacctgtgacgtacctaaacaggcgagctcctggcagtcaaccgataaaagaacaaagaccacaaagcaaggaggcttgtgtggtggctggccagctatggatcttgagtgatatttggaatatggcctctggtaattgattaccaagggtgtgtaatcgattacaaggcttaaaaatgaagacaggaagttaagatggtctctggtaatcgattaccaagggtgtgtaatcgattaccacgcctataaatgggatctggaagttgagatggcttctggtaatcgattacc

SEQ ID NO: 91862 - DNA, 359 bp, Glycine max
ttgggtttctcgaatggcaccaccatgaacttcaatttgggatctaacgaagggtggatcctctctataaatattaacatctctaacctctcaccttttatttttaattgatttgaaacaatgaatattcctgaaaaataactaaaaatggactttgactctttcatatgttaagattcaaactcacctcctagagtttggagacacacccctcttaatttttcttctcccttgtgagggtttgaagcttatcccatgccacattagcagatgttgcatgataaatcttctcaaacgcatcatcatctaatgcttcatagataaagaagagaaatttcttggctctttttcttgaattc

SEQ ID NO: 91863 - DNA, 418 bp, Glycine max
  unsure (1)..(418): unsure at all n locations
agctagaatcggacatccgtgtgataagtttgaccatttgaatntctcaagagctntccgtgttcaatttcgagcctctcgacatattatgcacccgaatcggacattcgtgtgaaaagtcatgatcatttgaatatctcgagagtttccgatgtttaatttcgagcgtatcaatattttataaccgtgaatcggacctcagtgtgaaaagttatgaccatttgaatttgacgagagcttccgttgttcaatttcgaatatcactatatgtgatgcgcctaaattggacattcgagtgaaatgttatgaccattttgatntctcaagagattctgntgttcaaattcgagcctctcggcatcttatgggatcgaatcggacattcgtgtgaaaattatgacctcttgatatctaagag

SEQ ID NO: 91864 - DNA, 303 bp, Glycine max
cacgagcctataatcactgatgagtatgctcaacgttctgcggaaaaagatgcctcaggaagggtgatcgaatctttacaccaagaggcaaccatgtggatggaccggattgctcttaccttgaacgggagtcaagaacttccccgcttgttagccaaggccaaagcaatggcagacacctactccaccccccgagagattcatgggcttctcggctattgtcagcatatgatagacttaatggaccatatgattaaaaaccgctaggaagtttgtattgtcgctcagatcttgactacctat

SEQ ID NO: 91865 - DNA, 349 bp, Glycine max
ttagcacgcgctcactgttaatagcctttttattttatttgaccaaacatagcacacttccattactttttttcttttctaacctgatttcctgccactgtgtgattttcttatttttcctgttgcaaacacttgttctttttagattttttttcaggtctataaatcagtaaatttcatctcaaatcaagtatcagccatggtggagttaaaaacatgtgcaaactgacagcaccaattaacctaaataagatttgttatgtgtaagctgatgtacattttgttgtatgctcattttttataccatcagaacttaaatttttatccaattgcccatacaacacttttt

SEQ ID NO: 91866 - DNA, 425 bp, Glycine max
ctgcagctctaagcaacttccatacaagctttttttttcctcttcaaagggttcaaaaatgacactggttaagggccggttatcggagttctttatagtacatggaaccaagtgtttgccctaagagtagtgaacataggaaggctatgaagaagaagaagaagaagaagaagagttatgtgaagggagtagtatatggtcgtcgtcagcgttgaagagagagaaagaggaagttgttctaagatgcgataatttaaaattaccacaaatggttaaaatgacgcacctatttaaggtccaattagaatgcgatacgtggcagttagcgtttgttagtaacaaaattcgtgaatatatttaagggagacccatattaaaattgagaaaatagggggaaaaattacaatttgtctataataaaacta

SEQ ID NO: 91867 - DNA, 400 bp, Glycine max
attcattgagcggcattcgaattgatagttgctctttaatcttaatctatctatgtgtacgccatacatcatcatgtagaggtggaaagatattttctaatgttagaaacttctttagtgcataaacctccttgtgttaatcaattaccttctatctataatcaatttcacaagtctttttgagaagcttgcagagagatcttccgtctggtttaattgactaccgagtattagtaatcgaatataccgttctgctgagaccatgtatgttttctacgatctctgctttaatcgatcacatgggtataataatcgactacatcattcttgaaaatgttcctataagcgatcaagaacacttctattcaattatatatagaaatcttatcgatctcttctt

SEQ ID NO: 91868 - DNA, 402 bp, Glycine max
  unsure (1)..(402): unsure at all n locations
gacctataaaactttgctattgcacctctttcttgcttttctttntccttggtttttgtattcacaactctggggnnnngnacatgttctttttttcttcaatccttgatgtcatatttataggtagagagaagctcgtaattgtggagaagatcttcaacattgaataatatgaccgttttgcagattgatcttgtttcttggaataaattgatcctgtgtgtttctgtctaatatgatcaaaacttttcatatctgtcattcataacttaatatgggtgttagactcataaaaggaaatataagattgattcacaaatatattccttttaaacaaaatcatataaactagtataaatgaataattcaaataaaattctctattcaatcggtgtttggatg

SEQ ID NO: 91869 - DNA, 439 bp, Glycine max
agcttataatgtgataggaataaaatattattatttataagctatataaaattatgagtggtttaatatcactattaacttaatcacttaagttgtcactatgcaatagtcttactattgtttatatatatatatatatgttaaattcttaataatctgatctcggtcctatagatttatttaattaacaatattattatgcatatttatttttattaagttacataaataaatagcctaatctatcatgtttaataaactctttgataagcctaaatatagtgtatttaaataaataagcttattttaaaattcaagtccaacctttctactaaagaaggaagctcagccataagtcccactcctaatgttaacgtaaaataaattatattcttgttctatatataaacccactcttaattgtgtttgatatgttcct

SEQ ID NO: 91870 - DNA, 314 bp, Glycine max
attaatctatttatccaaacatggtctaaaaaaataaatttggacatcaacttaagtgggttggtgctaaatatttaaagaatattgtgtcgctcatagtgatcctatttacctatttagattgaaataatcgcttccaagatattatagactctcatttctaattaagaatctaatctcaagatacatataaaatcaaaataagatttaattttggtatatgattttatggggtatggaaggaattaaaaaatgcaattttttcattggatggaatgtactttatccgaactcatgtataaatagtctaaact

SEQ ID NO: 91871 - DNA, 263 bp, Glycine max
agcttcaccaccaaaagagtgccttggataagtagcttacagaggaagcttcaatgaaggaagagaatgagagagatagagtgatgcaatcctaccccttaagggcattggatagaagactccaataagattgcgtccgagatgcaagagaatgccctaccgttcttatgagccttatagtagagttcaagcccatgacatgggctaagcatgaactcacttatctttgcatattagattaagggttcattattttcggccct

SEQ ID NO: 91872 - DNA, 280 bp, Glycine max
atgtaaatcttaattctattgctctgagtaaatacaccttttaaagtgaaacaaaatttgtgtgtaaactgaggattgggctgttttctaggagaaggtatgcattccataataattataagtggtacaagaataatgtttcttccattttatctatgcaagtattttttttttattgtttatcttcagctctttactaatactagtatatgctgtttaatttcaacgtatatagttagaaagagcataaagagtgcaaaagacatagttcgttttcctt

SEQ ID NO: 91873 - DNA, 449 bp, Glycine max
  unsure (1)..(449): unsure at all n locations
aagcacgagctgcacttttactacattgaatatactctgttcacatatatctatcaaagacaacacatacatgattaccacctggaaaatccctcactccttgcatgcacttcgaatcttgtcaagtgcttcgacacgaagggatgagtttgtgtctatatcttggagatctatgatggggacactgaagtttgagccatttggtgtggtttcagtgtggtcctccaccttggcatggtggaacatgcgtggtatctctgtgatcccagaatctaagaggcctttcacaccaatttttgttttatcaaagtccttgacttcagctattctgtcacaagtggaatcttttacctgttttaactctaactgatatgaagntgtggtcacctgcatactgggaaacttgcagaaactacaagttctctctgtgctacaaaaatgagataact

SEQ ID NO: 91874 - DNA, 214 bp, Glycine max
atgaacaagttgagcaccatttgagtgaggataaagattcataaacttgagttttaaaggtttaggttaaagtgtgacgtcaatttttcttatgtggttgttcatagcttataggtaaaatctcccctgtgatttatccccttcaattgcataataattagtataagagtagatgatttaacttggtgatcgactcagacgagttagatagtaa

SEQ ID NO: 91875 - DNA, 473 bp, Glycine max
  unsure (1)..(473): unsure at all n locations
caagcttgggttntagttcgtattctaaggatattttccttattctttaagatatcagattgctaccggtgagtcaaccactcaaccacattgtactgttaaggaccttattcttgggagaagattgaacctaattattggtgaggttatggacctgtgactgagtgaatgctgaaagtacaatagggtaaaatagatgtaagtaaaaaaacgttgcgtgaaccttgctgccagtggaggtaatggtataccattttaattagggtaaaatagataaaataccattgaagaagtantttttgatgaatgagaaacaaataaagaaattataaaatgataaccaaaganaattttcgttcattcttttnntggtcaataccttcattatctcaccatgactggtaataaaatatatcacatggtgagcagaaaacaatatagccctcttagatttacaacaaaactgaagtcac

SEQ ID NO: 91876 - DNA, 254 bp, Glycine max
acaaaccggccatgaaccaacacctctatcaaaagcattgaattgtatagcccgagagattcttttcttggctctaaatagcagatactaaacaaaaaaatactaataccaagggggtctagctcaattggttgagcagggtgtgtaaatgttgtaaatctcctgataccatgctcaattcctatggattaaaaaaaataccaatgagacgccttaagttatgaattataccataagggaagcctactaatgcc

SEQ ID NO: 91877 - DNA, 195 bp, Glycine max
accatcggtacattattagtattatcatatgaaaggagaagcattgtcccacatactacttactgagtgcgagtacatagattcaacgcggatatttgttatttctcatgtcaaactcatatataaatgtgaagttacaaaaacttgcttcaaactaagcatggatccggaggtgagaacgctaactccacacct

SEQ ID NO: 91878 - DNA, 235 bp, Glycine max
  unsure (1)..(235): unsure at all n locations
atttaacccgcctgttccatcatactccatgcccaagatgcatcctccaaatccaatagatgaacgccgatctcctctaaaaagcttcttcaatgaaccctgcacgaattggaacttcaccttcaatgctaggtccacctcatttacaacagttctatgatcaacaactccaccatcaacatgctcaaacttttggactccctggtcagcctgagaatgaatcgncatccaagcc

SEQ ID NO: 91879 - DNA, 413 bp, Glycine max
  unsure (1)..(413): unsure at all n locations
ctgcagctgtnaatggcagacattatcatgtttagtttggataggntcaagggtataagggatgccccacattatttccatgacacaaatgcaaaaatgatgatttggaaactttatgccaaactggtcatgcatgcacctatgcggacactcaagtgtcaaatttttatggtcatgtgatgctagggctcaggattcatttcctccattttagtcaacccaatatttccaaaatatgttcttttatcaatttgtgcattcatccgagtccatttcgggcgtacgggaaaattttcacagcattcacccttcaggtgtacacatttnttttcaaaaactaattatgatcagcgatctttttcaaatacaagttagaagtcatctctcttcaaaagcatgtcggtttttcagct

SEQ ID NO: 91880 - DNA, 302 bp, Glycine max
tgacaatcttggaccagtccatggggtggatgccggggcaacatgacgaatcctggaagaaagaacgcgttggttactacctaagtaaaaagttcacgacctgcgaaatgaggtactccttgctcgaagaacgcgttgcgctttattatgggcatcccatcgcctaaggcagtacatgctgagccatactacctggttgatatccaaaatggacccggtaagtacatccttgaaaagccagctctcacgggacgaatcgcccggtggcaagtactgctatccgagtttgatatagtctacgt

SEQ ID NO: 91881 - DNA, 365 bp, Glycine max
  unsure (1)..(365): unsure at all n locations
aaccacagagtcttgcgacaagtgccaatattttattcaaggccaactgngttaccacgttaatcaaagcatctaatttaccttcaatcttcttagactcagttgatgaagatgaatttgtggctacttcatgcactcccctaatgacaatagcatcatttctggcactaaattgttgggagttggaagccatcttctcaattaaatttctggcttcagcagggtcatgtctccaagggctccaccactggcagcatctatcatacttctctccatgttactgagtccttcatcaaaatattggaggagaagctgctcatatatctggtagtgagggcaactggcacatatgtttctaaatctct

SEQ ID NO: 91882 - DNA, 302 bp, Glycine max
tgcgatattattccgtgtaaccccccccttacgaattaatattattcactactcgtttgggtaagcaaagaaatttgtgggtcaacaaaaatcatttacgcgtgcaagatacatcattgtcataattgaacacacataatgacctgcatgcgtattacaatttgagcgtgaacaacacattggttgacttcagtacacattttgaaactagcagtcgctcgacaacacatgggttgacttgactacacattagcgacaacacattggctgacttgaattcactttacgcgtgcttatttttt

SEQ ID NO: 91883 - DNA, 454 bp, Glycine max
  unsure (1)..(454): unsure at all n locations
agcttgtgggaatttgggatagtgatnttgtttgagatgtngangatagaaaaagtactaccggatntgtattttttatgggtgattgtgttattacatggagttctaagaagcaaggcattgtgacactttctacttgtgaagccgagtatgtagttacaacttgttgcacatgtcatgccatttggctaagaagattgttggaggaacttcagttgttgcaaaaggaaagcacaaagatctatgttgataatagatctgcacaagagcttgccaagaatccggtgttccatgaacgaagtaagcatatagatacaaggtaccatttcattagagtgtgcattacacagaaagaagtagaattgactcatgtgaaaactcaagatcaaattgcggatatattcaccagcctctcatatntgaagatattctaagactgcgagcaagacttggt

SEQ ID NO: 91884 - DNA, 486 bp, Glycine max
  unsure (1)..(486): unsure at all n locations
ggatccttaagcaccgcggctgcaagctgaaaaagcttgagaattntgtgtttttatgcgcaactaacttgagtggaatttgtattgattggtgtattatgtgttgcatcttagtctttgtcatttcatatatgtatcatgcatgatcatgtaggagtaagaagaaagtttctgaagttagaaaatttcttctaatgttaaaactctctattttaatctattacagccttactataatcgattacacaagttggtttaagctggtagagaagtgtctcgtataagtttaatcgattacaagcttgtagaaattgattacttattttttttttgagacaatgattgatttattcatgaatctctgctttaatcgattaccatgtgatataattgattacttctcccttaaaaagtgtttcacaagttatcaagaacacattaatcaattacattgaggatctagtcgattacatcgttcttaaaagt

SEQ ID NO: 91885 - DNA, 350 bp, Glycine max
accacagagaggtacctggagatatgtcgcgggggtcaagagaccttgtggacgtcaggtggggtgctattgcccaaaaccaatcttgaccaatcccgacccaacccgggcataatcggtcaatgagaacctgtgatgtacctaagcaggcgagctcctggcagtcaacagataaaaggaaaacaagaccacacagcaaggaggcttgtggtggctggccagctgtgaattatgtgtaatatgtggatcgtggcctctggtaatcgattaccaagggtgagtaatctgatacaatgcttataattgaggacaggatgcttatatggtctctggtaatcgattaccaacgg

SEQ ID NO: 91886 - DNA, 312 bp, Glycine max
  unsure (1)..(312): unsure at all n locations
caaaannactccgaatggcttttgtgtagaatacttcaatataaaaccacttttccttggtcaaagcatgtctttcacaactgaatgcgtctcttgatgttgttttaacaattttttaactttaggttcatttattattcataggattcgacaaatcataagagaatgtctctccaaaatgaatctcacacacagaaaaataaataaagtgtgaaatatcattttttaatgttgtatcaggtcatgacttggtcctatcttcatctaatacttttgacgcatgatgtatacaacatgatctgatatcgcata

SEQ ID NO: 91887 - DNA, 387 bp, Glycine max
  unsure (1)..(387): unsure at all n locations
agctatgatttnctttgttccgganaccttttttttctcatgtgcacccaaacccaatcttcgggttcgaagacaaccttctttctccctttgatggcttggttaacatagcttttacttttcctctcaatttgatctttgactctataatgaagcttcttcacatagtccgcctttgcttgaccttctttatgcttaanaacagaaacattacgcataggcaaaagatcaagaggagttagtggattaaaaccataaacaacttcaagggttaagaaagaagaatcatcggatgacgccgatcgaacatttcctaatagacatcatccaaatattattcanggattgaatagaagatacaatatccgacatccgcccgtgttaatc

SEQ ID NO: 91888 - DNA, 312 bp, Glycine max
atcgagacgctcaaaatggaatgttgaagctctgagccaattcaaacgacaataactttttactcggatgattgattgagtcccgtaatataatgtgacgctcgaaattgaatattgaacctttgagccaattcaaacgacaataaatttttactcggatgtcctattcagtgacgtaatatatcgggacgcttgaaattgaatgttgaacctctgagcaaattcaaacgacaataactttttactcggatgtctaattgagtcccgaaatatatcgagacactcgatatatcgagatgctcggaattgaat

SEQ ID NO: 91889 - DNA, 387 bp, Glycine max
aactatacaggatgtcactcacgttgatatacacaagcaatagccaacactctttctaatcccttttctctctatctctctcttatccttctttcaaaccctttccttcatggagactcactgggtctcgaagaccagcactaacactttcacaattcaatatgtgatacaaggctgaaacatttcagtacggttaattgcacgtgatcacatcgagggttcccaggtcatgttgaatgcaagaaacttcctgaacccttttaaaaaccatgcttactttctttatggtacagaaagtggtaaagaaatgaagcattgacaactgccacacctacactaaatatcaagtcattacctgtacctcgatccacaagcagtattacaaca

SEQ ID NO: 91890 - DNA, 286 bp, Glycine max
ctcttaaaagtgatgtgaatgcaagctaaagaattctttaatggtaagaatgtcatttttcttgaaaataagcctgtttgaaaaacaccacaatgatggttcttatacgcaattcaaggttatttagaagcaaactggtttctcttatacagagcttcaccttcactattactattcttcaactatagttgaggatatccaagcgaaatcataagagaggctcaatgtcttaccaagtaattgcagtatctataagcctcttaagcaactatattacacgttatcc

SEQ ID NO: 91891 - DNA, 142 bp, Glycine max
  unsure (1)..(142): unsure at all n locations
aggcaacgcaaaaaaaaacagcgacgcgagacaacaaaagaagaaaccggcaaaaaanaagcacggccccaccaaaaaaaaaaaacggccaccaacaacaaaaaacgaaacaacccgacaacagccaaaacaccacgaagag

SEQ ID NO: 91892 - DNA, 388 bp, Glycine max
atggagatgcctctgctactggttgtgctctactatggtttacaatgcattatttatatgggtgcgcatgatatatgaaggctcgctctcaatgttttcataaagccgactgttctgcgcctgagattatcacctgttttcgttgggataggtgtcgtatttcattaaatcctcttgatgacctctattgtgcctccatatacatccccttacacattataattaatgttaaattatcttctagtggaatagacactgcacttcgcgaataatgtctttaatctgctcgtcgcttccctttaatcaaaaatatgggacaaatcttccatccatccatgaaaaccttcatggtccttttgttaacctcacacactctttaggacatttt

SEQ ID NO: 91893 - DNA, 440 bp, Glycine max
  unsure (1)..(440): unsure at all n locations
agcttgtggtggtcattctctacgccatttttcatctttgtcttattgtaaangacggtcaaagctcttaagacagcaatgtaaagatgtatggtatgataatagcaaagcaaattgaaatagaatatgtatattggtatttcattgatcctttgcatgatataatataatacatgtacaaagaatgttctataccaattctaaggcatgacagacgtgatccataatcagtggcttctgatntattctatgcattataaggtaaataaatatagaatcaaggtaacataggaaagtaaatatatacacagcatatttgcaatcatgtagaagatatttcctaatactccccctcaagttggtgagtgaatatcgtgaagtcccaacttgctgcgcaatgtcacaaattgatctcttcccacagcttttgaaacacatct

SEQ ID NO: 91894 - DNA, 440 bp, Glycine max
  unsure (1)..(440): unsure at all n locations
aataaatacgtttggaattggattgggcaataacaatcttaccatttcatgaatcactgagataaatggagtcagatgaagacgaatttgttttctacggaacgccgatagagcgtgaggacgattcaatcagtcgcaagaagaggccattgctgagtcctcaggtcagctccgagctctccctgcttggaagcaagaggtaagcatttactctttccacagaaattctgttatgttatgccagcgttaattgattgggattggttgtgagtgcacactgcaaaatactgagggttttggttctgtttctcactgtgaaattgaaaaattgaagctggttgtgtttgtatcaaggatcgggttgagtttctgaattctagcgctagattcgttgaggagttncaatttgttgctaacagctatgttcccagagatattcg

SEQ ID NO: 91895 - DNA, 151 bp, Glycine max
cccttttttttggtattggttttatatgaaatatgaaaagttggggaaatttatattaaagcctcatgccttaaaatatactggttttatattatttaatttggcttttactatatttaattttaataaaaaaaaaaattcaaatctggtg

SEQ ID NO: 91896 - DNA, 348 bp, Glycine max
  unsure (1)..(348): unsure at all n locations
gagactattcgaatatattcgccagtagatcattggagcccacaaactgtgtggatcaagttggctcggaataatcaatataggcgggcagaattaattattaatgtgtctcgactaattaaaaactatactccttaatattactagattcaattagactttactactangttataagaaagtgcagaatagaaacaatatcttagacaaaagtctagtgttaataaaaagtacacatctgaaaactaatagtgtgcggaagaatacaataacacaatttttatctgtgtcgcaacacctggcctacattcatccccatgcaccacctgtcatgagatttcaataacc

SEQ ID NO: 91897 - DNA, 255 bp, Glycine max
aaaaaatgatggcacctaatccacgcaaatatattgtttaaccccgaatattcttttccccaaatttggaacaaaacttttagatagtgaaaaagccaccttaatctaagttattagtctaaacaattccaatgggttctctactactaatccaaatatagcctaaaagatatgacaacttctaaaacttcataaaaaagaaactaattcaaaatagcctaaaagatatgaatagctctaaaaatgcataaaaag

SEQ ID NO: 91898 - DNA, 435 bp, Glycine max
  unsure (1)..(435): unsure at all n locations
agcttgcttctacagattngattacactatcttatctctattntnctcgacatgcataacatccatacaatgtctaacattgagatcggaccagtatggaagatcaaacaatattgacctcttcttccatatgcaagttttaatttttttccttctttggggtctttcaaaatatagtattgatatcctcaatccgctcaagaacccattgaccagttactggtatcagtgcaattttatgctctcgacttccattaaaaagttttttcaatcgatggtaaggatgaaaaggtttcagaaaacattaatgtcgagtgcatactattttcttccatgtatcagttgttcataacttacgtcttcttcacagatagagcatgcacgatgccccttaacactgtattcactcaaattcccatatgttggacagtaatt

SEQ ID NO: 91899 - DNA, 424 bp, Glycine max
  unsure (1)..(424): unsure at all n locations
atcctctaagtcacctgcngctgcagcttgacaaccgacgcctttcaagtttgtcgngnngaagatgcaagaaagaaggagttcatgatgtcgtcaggatcatctattagggtcctatggaggtcccgatggtcacaatgtcaatataggccctntcattgttacgtgtcatttcactttctgccatgctgaggagtactataagtttagtttgtgtgtgatgattggacagcgaacaccgagctggcgactattctgtgcaatctacctataaatggctgatgcaaaagttcactacgtaatgtgatatgcatgcccctgagaactcgcaccttctatggagcatcaaaagtctcattcacgccaaatcttttgctaggtgtgcttggtggaactatcttcccacccgcatctaactccactc

SEQ ID NO: 91900 - DNA, 264 bp, Glycine max
  unsure (1)..(264): unsure at all n locations
ccacacaannatgcattaaaagattcaccaccggaagctacgttatcaaatatagatcatcacaagtcaagagtgaactagttccaacaatatttgaattaaaagacaacctaaacacattgtttccaaatgaaaacaaataacctaatttgtccaaataagaaactgaaaccaaattttgtctaaatgacggtacaacaagagtgtctttcaaatccaaataanaaccagtacataataataatctaaaatgccctatagctt

SEQ ID NO: 91901 - DNA, 454 bp, Glycine max
  unsure (1)..(454): unsure at all n locations
acctcagagcaccgcggctgcagcttctgaatcaanatggttatctttgttgtctaccanccaaaggagagttctagtgtggtgggggccatgccacctccagacaaggaggaaaagcttatgtgtttggtcatggggattaatttctgtgaagagaggttatggttatcccaagacatgagatgaatcttccaattatccatatcactaccccaaacaaagtccctgcatattttctcaatctcattacacatggagataggaagggttgtagcttgaactctatataaggaaggttgaaaaggcatgattgggccagaggttatgtgcttcgccatagataaatttcgacccttccaagcaatgagcttgctattaaccaccaagggggataagtagtgagcacttctctttntgtgtgtgaccatataccctatataagaggagaagtcat

SEQ ID NO: 91902 - DNA, 485 bp, Glycine max
  unsure (1)..(485): unsure at all n locations
gatccttaagcacctgggctgcagcttatgaatttgaatataaatatatattttaaatngantntccatattatgattcggtaaaatgttctcctattattaaaaacataagaggatgtagtagatgtatgttaggagagtgaagttaaccactttaggagagtattcaaaaatgagagtgaattaatttctaaagttattatcactcttttaaaatatgtatacatattattttgtgaatcaatttttttgttattagactcaaaagaaagaatataacattttattcttgtcaaaaataattattggttaggttttattaatttttcggttaaactctgaaatagtcggagttttnttttttcctctaatgaatctcaagattaaaacaaagaacagaaagaatataaattcttattccgtgtgaaatggtctttgatattttattttttacaattactatttcaattgactagaatgataaa

SEQ ID NO: 91903 - DNA, 416 bp, Glycine max
  unsure (1)..(416): unsure at all n locations
gcttgcacatattcatcattgagggttgtttgtcttatcaactagagcngagagaacggagtgtcccactgattagtcaccgaacattataacagagccaattgagagaggcccgagttatgtaagcatttaaatcactctagaccttgaaccaacgccatgtaatcccgtccatggagatctgagcaagctggaattacaactttcgtggggtggtttggactgagaaataatgttcctatcttggtgagccaccctaccggatcctcactggtgaatggaggaagattgacttgcttcgtcaccaacctcaagtctactggtcttgaagatccatggcgaggggtctgagctagagataaagaagatcttaataatcacggaatggatgtttgcacctggaacacaatgacttg

SEQ ID NO: 91904 - DNA, 176 bp, Glycine max
aacactctattgacaagaacttcatttggaaatatttttcctaaagatgccagatgatttattatgtaggtaaatctctcttgcatgtccttgataagttcatttggattcattctaaataactcatattcctgaattaaagtatttatcctaaatctttttacatttggtggccc

SEQ ID NO: 91905 - DNA, 432 bp, Glycine max
  unsure (1)..(432): unsure at all n locations
gcttcactctctgaatggcccttgcattttttctctttctgtgactatcccaaccacagatatcactaccattcacacaaacaatcagccatccattcatgtagaaacaatttttgacattcaagaactccaataagtgggtctaacgctcaatcagacacttgttcaatgaaccacataccatatatcctaaacttatcaaaaccttctggagacatgcagagtttgtcatcaagaagactatagcatccaacgttctgggagtgaatgtagtgttgtccaacgacactattgccaangcaacaagatttttgggtgaacgcagtacttatcaggagggatgggagaagaactatgactctcatgtcacaagaatactctatcgggagaatgctgacaacggtggtgactataaaatgattgtgtacaacc

SEQ ID NO: 91906 - DNA, 443 bp, Glycine max
  unsure (1)..(443): unsure at all n locations
cacgcagctgcagcttcgcacacaaaaggaccctgatcaatgtttatggcaagannngccacagcaaagtggcacttcgccacgtcagatctacagagctggagaccttggaattaagagaaactcaccgcagtgaactggttattgacccccccaacgaataatagttagaggcatgaagatctagtgtagagtccttagtttataagtgtaatttcactgtaatgaacatcctctgaataaaaaaaaataatataatctcaacattattttaagagcttgtaacatcctttgtatagacttttggttcatttgtgaactctcataaatagaatcttgaattctctctcttttctctctcttttcctccattgttgntcttttaagggtctatctcgatccgtcatgatcaaaatgagctaaaattcattgttggtgagtga

SEQ ID NO: 91907 - DNA, 307 bp, Glycine max
  unsure (1)..(307): unsure at all n locations
aaaagtttcaaaaactggaagatgtatgtcctgccattgaaaaaaaattactaagtgactaaagttcttttaagcaatgaaaaggagctccgtgaaaggcttgtgggttttagtttttctgctttccgaactagcatgtccaatcaagaagcaaatcccaaatctggttggtggtatcctgttggactagcacagatggaacaattgattggtttagatcangaacatttacgtgaccagttgaaagtcattgcaccagaagttaagcatgagaaaagtacttcttagattttagatcttgtttctt

SEQ ID NO: 91908 - DNA, 444 bp, Glycine max
  unsure (1)..(444): unsure at all n locations
agcttttgcnaggaagaagaagaagttcttatagattctatttgttgtaaaanaatatatggaacaattggttgtaaaggttgtaagtattgtaatgaatatatctccaaaaagcaagtcagggcttgcttttatagactcttcaagtctggtcaagaaaaccattagaagagttataataacctttagaaaaaactgaaaaaccattggaagcgttacatctttttgattttgttcaaaacttgtcactggtaatcgattaccaaatccttgtaatcgattacacaaagcaaatttgggaaaggatgtgactcttcacaattgaatttgaatttcaacgttcaaacacactggtaatcgattaccaatatcttgtaatcgattacaccactttgaaattaattggaacgtttgaaattcagctgaaagcttttgaaaacaaac

SEQ ID NO: 91909 - DNA, 328 bp, Glycine max
  unsure (1)..(328): unsure at all n locations
gccgggggaanggaccttggtcaaaggtcacttttaatattcctatcccaaagggaggtaacacacttatctaaaaaaataatattagaattaatcattttaacaaaaagcagttttacctttttttttttgcaaactctactttatccctttataattagttctggaaagtgcaaaaatccatattaggaatggctaagctcatggatagcacctcaaggcctgttcaagttgtcaaattagtgatattaagtagtcatcaaagtgcttagattaaaaaataagggtaggccttgcaatccattggtccaagcgtttcacctacaat

SEQ ID NO: 91910 - DNA, 436 bp, Glycine max
agcttgtcacaatataatcccatttgtacattattctagtgaaaaaggagtgcaaatagaccatttgtgtccttggtgcatgaaggaggaggagacaataacccatgctttgattgcttgtaaagtccaatatatttggtttgccaccaatgtgggagcttgtccatcaccagacataacaaattttgggccatggaattagtgaagtattgttcagatcatgccgaatttcacaacgagggtgtttgcactggtgtgggctctatggaggagagaaggaaccaatgggctttctcaaaatcaaatgtctgcatgtgcttcttgaatgccatttttgaaatgaattcccaaatgttggcattggcttggaagaggcgtaacccacatggcaactcctaccaggcacaagttcagagggataataaaggtctcactc

SEQ ID NO: 91911 - DNA, 463 bp, Glycine max
  unsure (1)..(463): unsure at all n locations
agctntgatggtgttgagaagaaatcacatgtttttcatcatcaaaaagggggagaatgtgaatgtatgtatacatgatnttgatgatgtcaaaagaagaatcaaacaaggctcattttgcttcaagattaatacaagattgtttcaacaaacaaagccttgattcaagatttcttcaagatcaagccttgcctcacaatgaaaggtttcaagtcattcaaggcacatgtaatcgattaccaatacatgtaatcgattaccaatggtttgaaagtgtgtaatcgattacacatcatatgtaatcgattaccagagactctgaacgttgggaattcaaattttaaatgaagggtcacaactgttcaagaaaaacaactgtgtaatcgattacactaattctgtaatcgattactagagaagaatttcaaggaatatcgccaacagtcacatcttatcatttgga

SEQ ID NO: 91912 - DNA, 409 bp, Glycine max
  unsure (1)..(409): unsure at all n locations
agcttanggctgacaattgctttatgttattatgttagtccaaggtgcgcctctagttgagtggctccattgttatctctatggtgtgaacatctgtccccgcttttgagaaaaagactatgacaacctatttggacttgcacacccgattggctggtttatattgagggaaattcttgattgtagaagacaaactctaagattgtgtgtgtcacgtggacgaccaacaacaagaacatgtccccatattgaaaatcgtatgtgacatactgcgactcgtgtctaatgacaccatgaaatgcgtttattatgtctagtagtatataactgcaggacaccattctctgatgatagggtgaggcgtattgttgtgactgcgagaaacgactacattgctgctctgtgatac

SEQ ID NO: 91913 - DNA, 403 bp, Glycine max
  unsure (1)..(403): unsure at all n locations
accactctttcaccaacttcacataaccatcctcaaaaaccattagttgaggactctaaatagtgtgggtccgcaatcaatactaacattcctcaatactatagtccataggtcaataatctaagatacttctantttgaacatattgtgtacaatccgaccatgtactcaaccaactaaaagtgacaagatatcggtcaagccatttggtaattgtacatacattacatgtttagataaatgttagcttagaagcaagatatggattgatataatatgttcaccgaacacctttaatgtagaacctatccttcatttctaaatgatagagtacgatcaattaactaattagaaatcatcacacttctcaattattaagattaattatatcatacataaaaag

SEQ ID NO: 91914 - DNA, 325 bp, Glycine max
taagaagtgaaaatgaaaattgggtaattttggggcaaactctcatctcaatcaagtatataacattcatttaaacttgctcaaactggttttaaggcaaaaactccaccgattcaaaaatttgatcccctaaacacccaatttaccctagaaatggctcttgctttcatttttgtcactcatttttttctcatttgctctgcccaagcttttctacaagtcctaattgacattctaaactagaatcaactcactttagactccaatttccactaaccccaaatttggcttctctaaccctcaaaatctcacatttttctaccta

SEQ ID NO: 91915 - DNA, 319 bp, Glycine max
  unsure (1)..(319): unsure at all n locations
agctaggagcctataatctatctgcctgtcatcntatgacgcgngtgggagggtcatatatgatgtctgtctctgcttccccctgcgagaaagtacatggtacatgtatctgctgcagagaagatgctcttctactactatgctcacaataactctgtaggtatccatctatacaactggagagaagatctctgtgtaatcaaatccttgtatctgctgaaacccttacaccacatgtctcgccattgatcttcttctaccggcgaaatcttcctctaacctatagacccacctattctgcagtgccctctttccttct

SEQ ID NO: 91916 - DNA, 467 bp, Glycine max
  unsure (1)..(467): unsure at all n locations
agcttatgaagacttacgtttaaacttttttatgtaganngantngntnaaagntacattaagtttatgttaatcgatcgaatatctatcaattattcataatattacgaccctaattttaacattattgttatcaacattatattaatttgagtgtaattggactcaaaactttaagtaaaatattatatttgagtttataaataaataaaaaatataattaaaagaaatgagtctattaaaattcaaaagtaatcaatcaaatttgttaattaaaattaatcattaatatataaatctgacaaatccttatttaanatatgatttgattatgttctaataaataaaanataagaaantaaattcactaaatctcacacatcgttctttccatcttattttaaatattggtaatttaatttattattttttattctcaaccaaatttatcctaagttcttaataca

SEQ ID NO: 91917 - DNA, 245 bp, Glycine max
  unsure (1)..(245): unsure at all n locations
ttaccacacaattagggattgcctttatattattntttttttgctgtattcttgcgttactttccgtttatatctgattttacaactgtcctaagggctagcaaaacccatgggattaaggaataacaactcttttcaattgccattttaaagggataactaccctcttgacattaccttgtacaagtattatactaactagaattgggtgaaattggttgaaatatattaactgaattatgggg

SEQ ID NO: 91918 - DNA, 422 bp, Glycine max
  unsure (1)..(422): unsure at all n locations
ataacatccaagaaatttaacattcatcatcatgtactatcanaactaagcaaaaacagggcagaggcagaaaactctgcccaaaacacaaaccaataccacaacttttcttattcaaataccccaatcacattctttgtgttccaattcattcaccgttggatcgactcacaaattttactggagggccctagtacataattctaaatattgaccgttgggatctcctagaaaacgtccagaacccaatctgtactactctttccacaaccagcaaatacacatcattttctgcatgcacaaagccaaaattctgctgcacatttcaacagcaaaactctgcataataatgcaaattttcgaaatcacacttgcccttgtccaattttgcccaaattgaatcctacaagttctaaatcatg

SEQ ID NO: 91919 - DNA, 325 bp, Glycine max
  unsure (1)..(325): unsure at all n locations
aagtgacttttttttttttgaaaacggggcaataaaaggggagatgaggaaaaacccagccggatggcttcctgtacaggcaagtttcccaccaacccaacaatatctttactcaaccaaatacaaacctttttcttacccaccacccaggtattcacaaaggccatccctaaatctaccacaaagactgtctaccgcacttcccatgacgaacaccacctttagcacaaaccaaaaacaccaaccaagaagtgaattttgcagcgagaaagcctgtagaattcaccccaattccagtgtactatgctgactngctcccatatct

SEQ ID NO: 91920 - DNA, 154 bp, Glycine max
tatgagctcttagagatgttaaacatacgggtagcgcataaggccactaacatcacgtttgtctacacacagatatgattctgacaagatgaaagacattgcacccgatgaaatatgtcatgaatataaatccgtcctaggagactgatatgac

SEQ ID NO: 91921 - DNA, 385 bp, Glycine max
  unsure (1)..(385): unsure at all n locations
agctntgtcattacaagattgttcaaactcatgatttcgcatgttacctactaatctggacaaattaagatttcaatgtatcttgacgcgttgcaggctgttatattaaattacacagatttcttttcattatcagaatgaatttacatacagaaactttgttttcttgactcatattgtttcttatttacgagcgtaatagtaggctaatagctgcatattaggattctaactcaccttgttttttcttagccctctccttcatcatggaaaaagaatactaactaagccacataatttatgcagcgcgtacacgcatttatacatcctaaccaaatgacagcacataaaaattcaattgatacatccttaccctagccaaatg

SEQ ID NO: 91922 - DNA, 212 bp, Glycine max
cctcaactcgaaatatcgtacaaaatatgctaatcaattatcatgcatgctaaatcacaattcttcagaattaaacatgctaaaatgggtgttttatgaatgctgaatgttcagaatgcaaactacatgtgcacacagaaaacaaacaaaagtgatgcttatgtacatgaacgagtactccctaatgggcttaagctaatatatactcactt

SEQ ID NO: 91923 - DNA, 409 bp, Glycine max
  unsure (1)..(409): unsure at all n locations
agctntaactgaaacactaagttttttnctttctaatagcatgctagtcaacctttaccttcatctattttgcaggctacaggttgcacactttgtggtggagctcatgggtcaggcttgcgtattcccactaaagaaacatctcatgaagttaattagatgggaaaccagcctatacaaaattttaatgcacgcggattttctggatttcaacatggccaaccttaccagcagcataatcaatggagaaatcaccctggtaatcagttcaataaaaaccagggtgggctacctaacaggccacaacaacaagggcctagtttatctgagagaataacaaagctggaagaaactcttgctcaagttatgcaggtgtcattgactaatcatatgagcacagagtcagtca

SEQ ID NO: 91924 - DNA, 251 bp, Glycine max
cctacttttctttttccctttagactcttcccttcccttcccttcaatcattctctttggacaccaaacccaccaatccccttttcttatcttatagagtggaagttggttacttgcatttttctttcttgttcatcaagaaatttagccaagatttcaagtcaaccaattttatctggcccacatttagctagcactacccttttatcttcttaactttggttctcattttccctgcaagccatgggggg

SEQ ID NO: 91925 - DNA, 467 bp, Glycine max
  unsure (1)..(467): unsure at all n locations
agcttgttctanattacattgatgtttgtatgttaggaggttacatgccatttttgctttaagagtaatgtcccactaaaactaactttccaaatgtttgccttcgcaggaatggcaccgaggaagcttgcctcaaagaggtccaggaaagacaaggcggccgaaggaactagtttcgccccggagtacgacagtcaccgctttaggagcgttgtacaccagcagcgtttcgaagccatcaagggatggtcgtttctccgagagcgacgcgtccagctcatggaggacgagtatactgatttccaggaggaaatatggcgccggcggtgggcaccactggttactcccatggccaagtttgatccagaaatagtccttgagttttacgccaatgcttggccaacagaggaatgcgtgcgtgacatgagatcctcggttaggggtcagtggatcccgtncgatgccga

SEQ ID NO: 91926 - DNA, 485 bp, Glycine max
  unsure (1)..(485): unsure at all n locations
ctctgagtcacctgcggcntgcaagcttcttatccaggcaantcttggtggtttatctccttctaccttggctaattccctagtggatggtgcctcccctctcctcttctcctttgccttccgctgcatctctatggtgaaaaatcaccattgaaggacctcattgaagctcaaagatccagcttccatagaagctccacaagcaagcttccatcattttctaagttaccagagtatttactctctggtaatcgattaccagtttcatgtaatcgaataccagtgaccaaatttgatttcaaaatgtttttaactgatttgcaatgttccaaaatatttttcacatagtgtaatcgattacctgtgtatctgaacgttggaattcaaatccaattgtgaagagtcacaactcttcataaaatgcattgtgtaatcgattacatgactatggtaatcgattaccagtgataactcttgaataaaag

SEQ ID NO: 91927 - DNA, 438 bp, Glycine max
  unsure (1)..(438): unsure at all n locations
agcttgagctcactggtgctgctcctacattttctctctgaacttgtttcggccccatgcttcctttcaggccctctnntgttcctgttccaatgcttcggctgtggccacattgacgtctctcaactcattgcattctttatggaccttgatggccattgtcttgaacctttccttgactgcttgtgcctattcaagtttggcattcaaggcttgcacctcttcactctccttatgggtttcagcctctttctcacttgaaacctttagctttgggagccaatctaactcttgcatccgagccttcagccacttgtgatagccaccgacgatctcattgctgcttccnctaagctcattatcctttctttgcaccatgctccatgcctttcgaaccctttgaaatatccttgcattgngatcactaaaccctgtgcg

SEQ ID NO: 91928 - DNA, 477 bp, Glycine max
  unsure (1)..(477): unsure at all n locations
ctgcagcttaggctgctcgattgtttcaggtttctttatggaanggcgaaagtctgtatggtggtcagcataggagcacaaaccacaaacccttgcaacaggtacaaatttctgattcaaggccagcagggttaccaagttaaccaatgcatccagtttgccttcaagcttcttagttttagatgatgcagatgggtttgtagctacctcatgcactcctctaatgactatggcatcatttctggcgctaaacttctgggagttggaggccatcttcacaattaaatttctggcttcagcaggagtcatgtcttcaagggctccaccactggcagcatctatcatacttctctccatattactgagtccttcataaaaatattggagaagaagctgttctgaaatctgatggtgagggcaactggcacatagtttcttaaatcgctcccagtactcatacaggctctcttcactgag

SEQ ID NO: 91929 - DNA, 322 bp, Glycine max
  unsure (1)..(322): unsure at all n locations
agcttacacaacagcggtttgtntttttttctttggaaagaaagggacgaatacagctgcttacttgcagcgcgctcctgggcgtgcaggatgtggcggagctcatcgatgttgtatcatcttcggggtcgcagtctcgaacgtgtgcagagcagcaacgcgctatggtgtttagaatttgcacagcttcagtgtagcggcgcataagatctgtccacatcccgtgccgatgcgtcgcgattgcgggcatgcctaccgccatgttgaaccgcaccgctactatcatgcctgtctcggatgggggccgcgccgctttgctctg

SEQ ID NO: 91930 - DNA, 406 bp, Glycine max
  unsure (1)..(406): unsure at all n locations
agctntgcggatntggtcttcgctggcganatgatcgaagtgngtctatatagaggcanatctgatcatcatgccttgataaatgcanataaaaactgggcatgtgaagagagtgagaatgagggagatacccatgttgtgactgccattcctatacagccaagtttcccaccaacccaacaatgtcattactcagccaataacaaactttctccttccncaccacccaattatccatagaggccatccctatatcgaccacaaagcctgtctaccacacaaccaatgctaaaccccacctttagcacgaaccaaaacaccaaccaaaaaagaatnttgcagcanaaagcctgatgaattcacccaaattccggtgtcatatgcctaaactgctctcatatctact

SEQ ID NO: 91931 - DNA, 286 bp, Glycine max
  unsure (1)..(286): unsure at all n locations
cgtgtcttagcacgcgctcagctttcacaatcctnactagcctctgcatgggtctctntttagtgaaaacctcgtcaaacgcttaggagtacatgacaggacatgcctcacaatgggtaagtcaggtcactctcactaagtgaaatcatagggagaccagtcacggtcacactggtttgcgagaatgctccaaccatgtgggatcgacacangcttaaagaagcactcanaccggatgacccccaaggcctacactccgaagaagtcgtcagggtgatgtaatctc

SEQ ID NO: 91932 - DNA, 511 bp, Glycine max
  unsure (1)..(511): unsure at all n locations
actagctatactactattatcttcagctgtaaagcttgggattctaagtttgattactacgccattcttaanattatgggcagaaacatctnccanaaaaatctagaanatactcaacaccattaatgaccattntgtaatatggtaaactactaanaatggacttgggtttccatctaagatcaatgtaattgattaccaataccttataatagattaatttaatcatacataaccatctaagaaagttagaagcattgtaacaaattaccaaaattttcgaattaaatacccagaatttttgtatcgantacagagaagttacagatgttctttctaatataaaagcaatgtagtcgatcacccaaagggttgtaatcaataattcgacanatctcacttagaatgagaagtanacctctatgaatcaatcttgaattgagtaatngatacacacatgcattngtatctattaccaangtcatanatagttcaatgaacttctaatctt

SEQ ID NO: 91933 - DNA, 163 bp, Glycine max
agacgctcgaatgacgtgaactcgagcaataacgacatacttttctgagttgatgagccgcattatggacctgaatgaagtaagcttgacaatcaacgacatacttttctcgtgcgatgagtcgataatcaacgctcaatgatgtgaacttagcattcacaca

SEQ ID NO: 91934 - DNA, 180 bp, Glycine max
  unsure (1)..(180): unsure at all n locations
atataaataccgctatatctgcctctagagaagaccttggattcatgcgctgngagtggtcccttcaacgcttcaacagaaatagaagttcggagtgggtggacttttagtgatagtgtcgggtgaagaggatatgttagtgagctgcccctcctccgcaccgtacgtagaagtggcgga

SEQ ID NO: 91935 - DNA, 459 bp, Glycine max
  unsure (1)..(459): unsure at all n locations
ttttttgcacaatctttggaaccaagtaatttggctgtattgcaaacttgtaacgaccaaattaacaactgaaataaggaaataatattttgaacaaaatcattntaaatctagagatggatatggagaccgcctagtcggtatctaatttggtcataatggaaggaagacgaccaaaagtaaggtgaccgatatttttggcatatgcgactgagtatgtaatcgctattccatgaccgactaatatttcggtgctaaatgactagtggttttacccaccatttttatgttactggttcggtccctaataagaactgannacaattggcaattagagacagattatgtggctctaaatgactttttgtatgaaggaataaacaagtgattttatatgattatataaatactcataaacagttgtacccaaataatctactaactaacatgatctctcat

SEQ ID NO: 91936 - DNA, 263 bp, Glycine max
  unsure (1)..(263): unsure at all n locations
agagagtgacagtataaaatgttgttctctatcttgatctgatncttatctctcattcatgtattaatcaattntcanaaaggttgaagatatatctttgtgaaagacagaactttaatgaaggatcttgacaaatggtggattattaatatngattggagttgattatgaaaagtttgtgatatgatccgtacaaaatatgcctttgtaacttttggtttataagttcattttggtttgaaaaccaattcaccccccccccc

SEQ ID NO: 91937 - DNA, 382 bp, Glycine max
  unsure (1)..(382): unsure at all n locations
acctccaatctntaatggagagggttaccactactnggaaacctgaatgcaaatctttattgaggcaatagatctaaatatctgggaagccatagaaatagggccttatatacccaccacagcagaaagagtaccatagatggtagttcatcaagtgaaagcataactatataanaacctatagacagatggtctgaagaggatagaaaacgagtacaatacaacttataagcccaaaacataataacatctgctctgggaatggatgaatatttcanggtttcaaattgtaagagtggtaaggaaatgtgngacactcttcgataacacatgaaggactacagatgtanaagatctaggataaatgactaactcatgagta

SEQ ID NO: 91938 - DNA, 460 bp, Glycine max
  unsure (1)..(460): unsure at all n locations
ctatgtggctgtctggcgatggtgcacaacaagntntccacatncacaaagcgtgcataaacccaccatccactgctgcccacctccaactgagctcacgtcctcccacgtagcccatatcctcatatctctcaacaccgngtcctcatcaatccttccaagcttccacaacatccaagcataacaacattcaaacagcacaagctatcacagccaagcaaaacagggcataggcagaaaactctgctcaacacaccaaccataatcacaagctttctcactttaagaacccaataacgaattcttcgatccaatcgttaaccgttgatcgacttcaaatnttactggaagtgatagacataacctcatntgaccgtgggattgtacaacatcagactatttaatactcttccaccacaaaacatacattttgactggcaatctgtgacattacagaaat

SEQ ID NO: 91939 - DNA, 289 bp, Glycine max
  unsure (1)..(289): unsure at all n locations
gctctgcagtaccgttcatactacacatngcactaagtttggttaccaacctcatctagatgtaaaacacaatcaattgaagggaaagggctattagtgagggtaggggtaggaaacagattattattgcaagaaaattcaatctcagaccatgaacaacttataaagtaaaaaatattaaaaagaaatattgtaggagagatatacatatacatgggtatntatgagtgaaagtatctcatatacttggtccttntccaccttcccttgcagcaccttcatactacac

SEQ ID NO: 91940 - DNA, 362 bp, Glycine max
  unsure (1)..(362): unsure at all n locations
gtctctctgaccttttaacaccccatttttttatagaaataaaaggatatattaaataataagttaaaaatatgaaattggataataataagagcaataataatttgtctaaaaatgttattattcttgatacgagtaaataagttatttataatgtaaacctcccaactgctcacatccagttatatgtgtcaaaactgtgctagtaagggacatttgaatacgaaattaagagttatcatactcttanataatacacatcgtctcatgcanatcaagcttagaaggacgctccccctctatcactctttacctttctattaaatcaattctctgtttttttttttttgcgctctacggaa

SEQ ID NO: 91941 - DNA, 327 bp, Glycine max
atatagaactaaagcagaataaagagaatatgaaagctttatatgctcacaatgagcagaggctgtgtcatcttgcggatatgaaaataagtgactatccactcttttggttgtgcttcattaccaccaacaatcgacaatgacaaatgtatacctaatggatcagcagtaaccaaagaaaaaaataaatagctaattattgactaatggcttcagttgattatcaacacaccatctaggaatgctaatattctctgagcaattatctcatactctctgtgaaattgtttgtgctttcccactgggaatatccttctatgacatata

SEQ ID NO: 91942 - DNA, 407 bp, Glycine max
  unsure (1)..(407): unsure at all n locations
gtccaactatcatcacatgatccttactgggcatagaataagtgttttctttcaactngagatcttaacananacacttggtagagtgcaacanaactgtctattggtcaacctacacanttcttctgtttgcaggttgcaggttgcaagtngtaccatctgtggtgaagtcatgaaacacgaaaatgtattcccagtgaagaacacactcaagaagttcactatatgggagatcaacagagacaaggatatactcaaggaggattntcaggcttctagcanggtccttataaccaacaaggacagtggatatcacaccctggcaatcaattcaacaatgaccagggtggaccttctaacaggcgaatccaacaagggtctaatatctttcagaggactactaagct

SEQ ID NO: 91943 - DNA, 230 bp, Glycine max
  unsure (1)..(230): unsure at all n locations
tatattagaaggagtagagttaatcacanatgatgaaacggtaacaattatttatgatatactctgttcatcaagtcatacagacatccgagtccattgtggcattcgggaaaatctttcattgttctcaccctctaggtgcacatttntnttccaagaaacctttcgtgttctgatccatgaatctccaaagaacactggcgataanngtcttttcaaaagaatggtag

SEQ ID NO: 91944 - DNA, 121 bp, Glycine max
cctgcaatccaccgaccatctgcagaacaccctacacttgtctcgagcgcatgtctacagacccatgataagtgattcatctgttcctttgatcatcttttttttgaaacatacccgttga

SEQ ID NO: 91945 - DNA, 205 bp, Glycine max
  unsure (1)..(205): unsure at all n locations
tattaagacaactcttcctatgatcaataatgctaanaagtttatgggattagtgggagagtgctctcagatagctgatatagttcttgctgggacattaatgagtacactgaccaccatgaagtttgatgggtcacgtactatgcatgaacatgtcattganatgacaaacattgccagcaaatttaagaccttgggaatgact

SEQ ID NO: 91946 - DNA, 279 bp, Glycine max
tgctaattcttcttcttgcgaacatatgttaccattcatatgagaccaccctgtgtaagtgtcctctatatattaattaacaagattatcttaacaaagtgaaatagatttgaattactaaaaaaacctaccggaatcgaaaatatttgttaaaaataacaaaatcagtacttatgcattatatatcaaggaggaatttcggaatatactacagtactattaagcactttgttatgtactagttatttatttagaattacagtgaaacaactttaaaaa

SEQ ID NO: 91947 - DNA, 463 bp, Glycine max
  unsure (1)..(463): unsure at all n locations
gtcacctgaggctgcagctggtctaatataccaaatagatgttggccaatagttcttgttgtatgngaagaagacgaaacattgcagatctgcacacattgcagaaaatctagatggaaagcanaatgtaataatggtaaaaagaatgtactancagatactctctcttgaaaccaacgttgcagaggttatttgtgtgttccacaatagcaaagtccatgagatgacacttcttaaatagcaacccaaatggatagtgaggcatccaagagtcgctaatgcatggaaaagctttgatcataatcaacctgaatttgcgttagaacctacaaatggtcgcctggccttgcagtgatgcttcagcacatgccaaccataataatagcatactatatggcggcgctctaatccatcaatcacctcctaggagtgatgaacatcttcttgatcttttatggcattc

SEQ ID NO: 91948 - DNA, 208 bp, Glycine max
  unsure (1)..(208): unsure at all n locations
tatcaatcattggtcaacaatggtattctaatccttaactccttacgtgaaaagatcctaagttctccattacatgttagattcttgcacattngacatagatacctgctttatgcttaatgacccaagataactaataactctcactctattcctagctttgagagtaatgggtgtttaccacaaccaagaaaagagatttgtagac

SEQ ID NO: 91949 - DNA, 241 bp, Glycine max
  unsure (1)..(241): unsure at all n locations
acactactcttataacacaaatggcgtacaacctctctccataaatacaaacatcaatgtagatttagagcaagcttatgcgcatatnttctcacgaacgttcacttgcacaagacattctattaactaagaaaaatgcacccatatacaatcaaaggagcttcattacctagagtatgtacttccaaggagtatttgttatttacatcacacacgcctcctttgctgaattacatacatg

SEQ ID NO: 91950 - DNA, 461 bp, Glycine max
  unsure (1)..(461): unsure at all n locations
tatgaagctgagtatattgcagcctcagaagctgcatgccaagcagtgtggctagatgccccgatgaagaaattgcaactggaanaatcatgtanagtgaagtttgtggtagacaataaatcttccattgatttagctaggcatccgacttctcatggaagaagtaaacacatagaaacaaagttccactttctaagaatgtcagcaatgagaaactgaagaatgaacatcgcagaactgaaattcagctggcaaacatactcactaagactttgaagctagaaatgttagatgttaagagatccattnggaatgttgtgtaatcaactttgaataaggggagtgtangaataatcanagttaaataggtgtaactgaagtagtagacaatggtgagttgttctataccacagagtacttcactgcttcagcaggcttttgacacatatttatctatcatc

SEQ ID NO: 91951 - DNA, 473 bp, Glycine max
  unsure (1)..(473): unsure at all n locations
cgcgacatatctccaggtaccactctgtggtcaacgaataaaagcaggaagttcacccttctacactttctcatctcaagctggtangattatggngtacccatcacatgtggtactaggtggcggtcgggcgatggtgcacaacaagttttccacatccacaaagcacacataaacccaccatcccctgttgcccacctncaactgaggtcacgtactcccacgtagcccatatcctcttttgtctcaacagcgggtccgcatcaatacttccaagcttccncacattcaagtaatacatcattccacagcacatgctatacagccaagcaaacagggataggcagaaactctgtcatacaccaccagatacagctttctactaanactcagaacaatccttgtcaattctaaccgtgatcactgaaattactggagcttatactaaccacatggacgtggactacacaaca

SEQ ID NO: 91952 - DNA, 274 bp, Glycine max
  unsure (1)..(274): unsure at all n locations
ctcagcgcacaactagcgctanactcatattcacttactcacgctagcgcgagggtggcgctaagtgcaacgtcacnggtttatagcctatntaaagcagtttggnnggagttgttagttgtcttatacgactaacttctgtatagaaagcattttccaaanacttgtatagttccgccaatttatggttatttagtagtagtttgtaaataaatcttcgtttattgttaaagctgtctctagaatatttccattggatttaatgatgaaatct

SEQ ID NO: 91953 - DNA, 229 bp, Glycine max
  unsure (1)..(229): unsure at all n locations
cacctccagtttcctcaaaccctgaaactcttattttgacttgtgcctcactatgtgaatctcaccctttttttctaggggtctctggccctttactgccgaccctctcctctacctttcttaatgcccgtattcttagntcgtctacaaatntagaggaactaaaactaaaacttggtaattntaaagggactaataacatggtttattcttctgatctatatattaa

SEQ ID NO: 91954 - DNA, 341 bp, Glycine max
  unsure (1)..(341): unsure at all n locations
aatgaaaatcttgcttctactaacataggtatatcctatcctaattctcgagatagacgtattaaaattccttggttacgtgtaatcaaagtgaaccttgtacaacattcactctcacacagctaattgtcactcaatgtatagtgtaattctttcacagatgacatattacctcatacaggttctatttctcagttaagctatgtgaaacaaaacacatacacctatttatataagggcttagaattatacgctcaacatacttaattcatacattcactgagtaaatttatatagggtgaactnacatnggctagtctttcatgatataacttcacata

SEQ ID NO: 91955 - DNA, 363 bp, Glycine max
  unsure (1)..(363): unsure at all n locations
gcatcttgggatgttccaacctttgatgacagctattcatgttctgctatccagtagattgaggaatgccaccattcttgctattcagtattcatagctgcttccatcaagaattggtggtcttgtcactggtcctccttctntctccatgttcatcagaatttatctccccagatctcactctgtgatctcgagtgttggctctgataccaatcgaaattctgataccacgggacagatgtcgtacatgatgtcacgacatcacgcttcagaacatgcagcntaagagtgtccgtatgaacagattatacaagtaatagcacaagagaattgttacncagttcggtgcaacctcacctacat

SEQ ID NO: 91956 - DNA, 307 bp, Glycine max
  unsure (1)..(307): unsure at all n locations
gcacgcgctgcagctctgaaacctgttgcataagcatctcaaacttttgatgtatgatgatacatgtntcttccttcgacaagagacccctcattacaatgaataagttgaagttgagttgcatccattacccggaaaccaattatcttctgccgtgtccgattatgttctgagattcttgtcaaactcaacaagagtcttggcttccactaaagggttgattctntgtaatcacgccacgagccacacaccaattgaactcttcatttgtaacccataaacaaaaacttggttacccattcccacc

SEQ ID NO: 91957 - DNA, 226 bp, Glycine max
  unsure (1)..(226): unsure at all n locations
ctagatattgtatgaccgatcaacattcaaaacagaagacaacttctcatagattatcccaatcaaagagcanaatccctttcctctcagagatatactagcacttcatacattaacatctactccttcttcctcttggagttgaacaacatattcaaaagtatggtctntgctaattaactagtgatattgaagatgaagattccttatctaaacaaattgataa

SEQ ID NO: 91958 - DNA, 255 bp, Glycine max
  unsure (1)..(255): unsure at all n locations
acacacacacagagacgcacacacacgcacatacacagacacgaaggcacacacacacactgncacacacacacacacacagtcacacacactgagacaaacacactcacactcacgcacacacacagacgcacatgacctgacacacacgcatagacaggggcacagacgcacacactcgcgcgcacacagaaacacgcacactcacagatagtgcgactcagacgcacacatacacactcacacgtacgcgct

SEQ ID NO: 91959 - DNA, 291 bp, Glycine max
  unsure (1)..(291): unsure at all n locations
gctactaaggcacctgttctagctcttcctgactnttctaaacttttgagctataatgtgatgcctctgcagngggagttggagctgtattgttacaaagtgggcaccctattgtcttatttagtgaaaaaattcatagttccaccctcaactaccccacctatgataaaaagctttatgccttaataagagccctccanacttgngaacattaccttgtttccaaggaatttgtcattcatagtgatcatcaatcacttaagtacatttgagggcacaagcaagtaaaca

SEQ ID NO: 91960 - DNA, 358 bp, Glycine max
  unsure (1)..(358): unsure at all n locations
ctttatgtacctgctatagaacataactctaatccacttatgtatttctagacaaggagattaatatgtcaggagttaatcatatttattctctcattcaatttttttggaaaacatgtatggtttatggacaacttgatacctttcttcctatatccttcttangtgggtaatctttcattttagagcattatttatgataaaaatcctaatctcaaattctaattcaaatatatctttaatctaatacattccaggatagatatatgcttttaatcaaacatatctacaattaaatagattgttcaacacattaacttagtcttttaaattgaagaatactatctttaaccaacta

SEQ ID NO: 91961 - DNA, 286 bp, Glycine max
  unsure (1)..(286): unsure at all n locations
tgcagctatcgnctgcaacacaaaagcatgtaagcctagactgtagtactgtacactaaactaatctaaagtgcctaatgacatcacaatatggaaagatatatatctgctaatattaaaacattgaattgaatcangaacagaggatttgcttcactaccagttgacacatttangaatacaattcctaatctagcaactggaccaaaaataaggaacataaatgacatcggatcatatttgtcgaataagatcaatcatcatttctacctttacttactaaacc

SEQ ID NO: 91962 - DNA, 286 bp, Glycine max
agctagcgctgtttgttcgggttcatataattttattgtctaacttgcgtgaagtcggaacttatgctgtacagagtttgaaaaatgtggcttgtatgatttaagccctaagaatagttgactggatggttcacggaccttctcatatctctgttaattacctgattcaagtgggctgtctatatgaggcgatgtttgatattggtgtgaaatctcagacaactgcttgattatcaagctttttgatttttataaaaaatgggactaggtgtgtgaaaaactttta

SEQ ID NO: 91963 - DNA, 136 bp, Glycine max
gtgcaccattccccgaccgacacctagtaccacatgtgatgggtaccctattatcctacaagcttgagatgaggaagtgttgaatggtgatactttctgcttttattgtgaccacagagaggtacctggagatatg

SEQ ID NO: 91964 - DNA, 170 bp, Glycine max
attgatactaggtcgtcactctagtgctcatcttagagaataaattcagagttacaccctcaactactctacctatgataaaaagctgtatgccgtaataagagccctctaaacgtgggaacatcaccttgttccaaagaatctgcactcatagtgatcatcaatcacct

SEQ ID NO: 91965 - DNA, 467 bp, Glycine max
  unsure (1)..(467): unsure at all n locations
caactagcttatattcgccaccatctcgatggatgacacacatattntctcattattttgtctttacggaaatctgncaaagaatgtcaaacctcttaaaatngagtatgcattatgcaccacttatttcaaaggattgtcatcttcatactcaatacctgagagaatattcctgaatatatctacctttggtctacagaatgtcagttattttttctcctaaccatgcatattcttgaagtaaacnctctattgtatgctaatcgtgtcgttaggtggctcaatttcggagttagcaagagataacaaaatcctacattcttctatgtccttacttatatatgtcaataaatcaaattaacaatgataagacaattactgtctctttacttactgttattgatgatatgttatttaacacttaaaatattcttacaacgcacgagacacttgcgagtagagttata

SEQ ID NO: 91966 - DNA, 242 bp, Glycine max
  unsure (1)..(242): unsure at all n locations
gttgagttagttacacgcagagataatggttgcaacaaagcaagttgcctattaataatgcttgtgttgagagggagtgttatgaacagaggataataacagaatgcagagacacagaggttataagcttaagacagagaccgatggagatntgttatcttctcacatctccttctaataaacaccacctattatagatatatgcgcatgctacaaacataagctaatatcagagtctctaa

SEQ ID NO: 91967 - DNA, 448 bp, Glycine max
  unsure (1)..(448): unsure at all n locations
tgctctagtgtgttggaacatgtttttaaatgagagagcatgatatgaatagcccatggttgatacattgacagagactatatacatcatgangaagcggtttgcgccagctacttactcaagggactngagattcgagctccacanactaacccacagcatcacggtggttgaggagtatttctacgacatggatgtgctcatgattcaacctaatattgaagaagatgatgatgtaactatggctcgatatcttaatggatagactaatgatattcgtgatatctgtgagctgcacgatgttgttgaaatgatgatatgcttccacaacaatcccgttgatcaacaattaaaatgaaagagtgctatatgagtttactactatgctctctagtggaagacaaggtagataatggggtgtactatatatttcacacctatccatcaa

SEQ ID NO: 91968 - DNA, 368 bp, Glycine max
  unsure (1)..(368): unsure at all n locations
atcactctgcaactcagaaaatagctnttgaacatctagatcagactaccaagaagctntaattctgatgagcatanttgattcaagttgaaccacagaaacaacattacactcaactaaactgcctcgagacaatgcatcaaccaccaaatgttcttgaccctgcttgtattctatgtcaaaatcaaattccatgagtgttactaaccatttctgctggaatgccgtagctaacctctgatccaaagtatacttgacggctctatgatcaagtctgatgacaaactccttaggtaacatataatgtcttcatctctgaactgaaagacaacaactagcaattcctgctcataagtggatagggacta

SEQ ID NO: 91969 - DNA, 413 bp, Glycine max
  unsure (1)..(413): unsure at all n locations
acatcacatgagaataattgaatgtactctgcaagaacaataagaattgtnttctggaacataanagcatgacataatatgactatgaataatgaattctagatgataaccacgcataatgtgccaaatatgatgttgntagaccactctgacacaacacttgtgctatatgacttattntgaagttttntctgctttcctacacgtggtttatcttcctagtactttaatagttgcagctattggatgtgataggtaccagtgcacgaaaaaggaatgcaccgactgagaataaataagttcagctgcctttatcctctttactatattatactattaatgatctatgtctactcatacatatggtatgacaatngatatgatgatacaactaatgggctgactaacatgat

SEQ ID NO: 91970 - DNA, 496 bp, Glycine max
  unsure (1)..(496): unsure at all n locations
gctaatctgtcacttttgngacttcatgacttagcctctttttcattctaaatngcagaatattcatcattaaatccaatggatatattctagagacaactntatccatacaagataatntatttacaaaaatcactaaaaaataaccataaatgggggaactgtacaagtnttggaaaatgatttctatacaaaagttagtcgtataaggcgactaacagaggccgtgttaccgtttgaagtagaggtcctctccttaagaaatttggcacaatctgngttaaaagagtcggaatgggcctaaagcgcatttgatcaactatacctatagaaagtangagattgccaaccatgagcccacggcgattatatcatagatgggagagaacacctcnacaagaaggatgccccgctctnggatcaatggctctaataataagaagggggtgaataatatcctaaccttactaataaactactctttacgattactatg

SEQ ID NO: 91971 - DNA, 397 bp, Glycine max
  unsure (1)..(397): unsure at all n locations
acaggtacagatntctgattcaaggccagctgggttaccaagttgaccaacgcatccagtttgccttcaagcttcttatgttcagatgatgcagatgggtttgagctacctcatgcactcctctaatgactatggcatcatttctggcgctaaactgctgggagttggaggccatcttctcaattaaattnnttggcttcagcaggggtcatatcttcaagggctccaccactggcagcatctatcatacttctctccatattactgagtccttcataaaatattggagaagaagctgttctgaaatctgatggtggnggcaactgtgcacatagttttaaatctctccagtactatacggctatctcactgagtgtctatacctgagatatcttct

SEQ ID NO: 91972 - DNA, 177 bp, Glycine max
  unsure (1)..(177): unsure at all n locations
ctcaagatcacttcatgataacanagatgatgacattcaagaatgaatncaagattgagtcaagaacacttcaaggatcaagaggaaatttgtttcaagaatcaagacgaaatttgatttcacgaatcaagaattaagattcaagaattatcacgatcaagaattcagactcataga

SEQ ID NO: 91973 - DNA, 119 bp, Glycine max
ttagcaaaatggcatggtgaataaatactgctagaacttgtagcgatcaaaatcagcaggggctacgcaagagtatagatgattataataaaagctcagaggtggattcaatcagtact

SEQ ID NO: 91974 - DNA, 272 bp, Glycine max
atacctggaaagactcccccaatacctggtaaactgaagatgctatggagaaaaagaaaggggccaatgagaataaagaaaaggacttgagggctataacttttataagtgacaggtaccagcttatttgacaggacttctgaagctttgaaactcttgaataactactcccccattaactactactctggagctctgaactgacttctcccccattaactactactctgcaatctgaatcaaaaaagcctctcaacacaatgctaatcagt

SEQ ID NO: 91975 - DNA, 241 bp, Glycine max
tgttgaaatgttgttgagaaaaagacccttagaaatttaaactacctaagctgtaactggaagaaataggagaaaaccaattgtcagattgactatattcagacataaagccctacttttcaggccaatgagaatatctgtgatgttgcccttacattctttatagttttgtacatatcaatcaattctagctggtagtaagtagctccaggtttatgatggtacagtctcctatatgtgt

SEQ ID NO: 91976 - DNA, 191 bp, Glycine max
  unsure (1)..(191): unsure at all n locations
gcactgtgatgtctatgagccatagaatctctagttctgtcatccaccactataagttgggtcagcaaatcttggttgtatacaacanggtgcatgtggtcattactatctagcanatacttagtatgctctagttgatccttccatcttctagaaaaagtgctactcacttcaccatacgactacattta

SEQ ID NO: 91977 - DNA, 381 bp, Glycine max
  unsure (1)..(381): unsure at all n locations
ctagctgtccctacctgcctattacatctttttcttcttcaaacatgtttctgtacaancataacaaaaaaacaaccttctgctgctgtgtgcttcatattatttttcaaagcataatgtctattattaatataattattgattcttgattgagcaaactatattcttatatattacaaggttataaatcattcatgatacaaagtcgaagttctaaatgacataaagttatacagcgtcatgccaccaatcactacaaaaagtggaagggatcaagttttttatactagttcagttcaacatgtgtataacagtgccaatgattggaacttgttagacaattgattgaatatgtaactaggtataatctgctatagtata

SEQ ID NO: 91978 - DNA, 456 bp, Glycine max
  unsure (1)..(456): unsure at all n locations
ctgcagcttcaaccttggtgccaatntccgctccanatcgcataaggaggtgcatttccggagtcgtgaagcgcgtctctacgtgtgggacttcgaaatttcaggtttgggtggacttctttctcctttgattntcgtgggtatggggttctgggagatatgatgggtagtctcgctaggtttctgctctatgatgattatttgtgaagaaatttgtggaaagcatgttgaacttgccatgtttggatgagttaaacatacccattcagttntaggggttttatgatgatgcttgtgatgcttatgtgctgaaattgcttatggaatactgttagagatgaacggtaaacatcacctaaggtagacagtgagaatgtggtgtatgagtggaaaagagtgcgcttcagagttggacgttaatctgattctgggtaatggaggtaaggagtaatctac

SEQ ID NO: 91979 - DNA, 293 bp, Glycine max
tttttttttttcacgctatctctcttttacttgctcatctgccaattggcttcttggagactgagtaacctacatcagtcctcacagtaatgatttgtaaatttactttaaggatctttttaccatttattatagataatctagattaagatagatcatattctattcaattataaatgtgagactcaccatggacttacttagatgtcatacatttatgttatgctcccttacaatcagactgaatcatgatgtggatgagagataacgtgatagtgcgtgtctactgtcat

SEQ ID NO: 91980 - DNA, 179 bp, Glycine max
  unsure (1)..(179): unsure at all n locations
taataccgagcgtgttctcattatgatggataatggacattactatgagaagtgattactcgtgcaaacactactatcaanaaacttttctaagacggtcatgaataggatacaataatggtcattgaccatcagagaatcccacatcgtataaacttaagattttcaatgacagatca

SEQ ID NO: 91981 - DNA, 377 bp, Glycine max
  unsure (1)..(377): unsure at all n locations
tctttaatggagagggtgccattactggaagacccgaatgcnaattttattgaggcaatagacctaaatatttgggaagccatagaaatanggccttgtatacccaccacagtagaaagaatacaatagatggagttcatcaagtgaaagttaactataganaaacctanagatagatggtctgatgaggatagaaaatgagtaccatacaatntaatagccacaaacataataaccatctgccctgggaatggatgantatctcaggggttcaaattgtaagagtgctaaggaaatgtgggacactcttcgattaacacatgaaggaactacagatggtaaaagatctacggataatgcactaactcatgagtatg

SEQ ID NO: 91982 - DNA, 332 bp, Glycine max
tttttttggatggatatataagggttatttattatactggtgggattcaaataaataatgatacgtctaagacactcctgggcagactttataaggtgagtctggcaaccacccttaagcaagaaaaagaagcaaggtcttttcgatgtgatcgaaaattatctttggatgaaatggataaaggtctgaccactttgctttttaccattcttttaccacgcatgggtgcttgtgagtcgagggatatttttttttgttctatgctaatgaagaaattagacgtttttagatataattaatgaaaatcttaaataaataaattcttattcaag

SEQ ID NO: 91983 - DNA, 193 bp, Glycine max
  unsure (1)..(193): unsure at all n locations
gtctgaagagagtatgatgaactaanggatgtcaatatggccaccaatgaagccttggaatgagaaaccaagaaggcccganaggaagaacacgaccacagcatagttttgaggggctttatatggcagcaatagtgagctcaagctccgaagaggtgaaaggaatcatcacgggtcataggcatgatcttga

SEQ ID NO: 91984 - DNA, 446 bp, Glycine max
  unsure (1)..(446): unsure at all n locations
gctatggagaatcttagtctctaaaaagtaatttcttccctcnaaagaatggtaagcttttcattngaatcacttatgaatgcagatgaggaagaccttacnttttcaatttatntaattgcgctcaattntatttaattacacttanataacttctgttatagcctttaccatttgaaagggttaatcctctaatgagctcgtntatattactggaatgaattattttgtattntcaagtactttntctatgtaaaaaaaaaaacttaaagtcttgtgttcaatggtaagcaattttgagttgttatatcaacctttggaacatttaacagtggatgggataatangctcaaaccctagaaatntaganatattaccggcaaaagttctattctttcattaagctatatatatcactatgagtaatgttgacatgcttcaaaaaa

SEQ ID NO: 91985 - DNA, 427 bp, Glycine max
  unsure (1)..(427): unsure at all n locations
acctgctagtcgacaggcatcattggcagctagccaagcatctctcanattcgcagaagtacctaatggctattctgctgtgtatgttggagacaaagaaaagcggttcatgaccgccatatcatacttgactctaccatcattccaagatctcttgtatcacgctgaataagagtttggatatgaccatctctcgngtggcacacaattccttgcaccgatgatttttccaacgctaacttctcactcgantcgacagtaaatctactgtgtggactgcatgaataggagaccttttacatangcttttctaacttgnnagatacccattcctataacgccgatgtataatatttttgagtgtagaaagctaactgccatatggcacacatttcgttgagagaaagaacgaaaactgctgtattgt

SEQ ID NO: 91986 - DNA, 241 bp, Glycine max
  unsure (1)..(241): unsure at all n locations
atacaangcactctcttggtggtgaagttnctccttccatggcttattccttagtggatgacgcctcctctcacctcttctcctttatcttctcgtgtaactccatggctganaatcaccattgaaggaccttagtgaagctcaaagatccagcctncatagaagcttcttaagcaagcttccattaagtggtatcagagcacaagagcttgaagtaggtgctccttatacctctactaat

SEQ ID NO: 91987 - DNA, 394 bp, Glycine max
  unsure (1)..(394): unsure at all n locations
catgcatcattgttatggactgcgacacttgtttatcntaatttattctttatgtgatataatttgttgtcagacgtttatccataattattaagtaattgttgtgttaagaaataaattagttggtgcaactaacatcaattacgcatgtatgatacatcgttgtcagaattgaaaagacatagtcaaatgcatgcatattaaagtttgagcgtgacacgacattgactgnacttgacacacattctgattgcatgatacagcttgacacacatggggttttttgaaccacaaacacaaaacatctgccgcgtctctatttttttataanaaaagtgaacaatgtagtaaaaccgctatattgtanacacagaacacactanaaatacacatc

SEQ ID NO: 91988 - DNA, 230 bp, Glycine max
acagaagctctgagaacattcacacgacaatatatcttaactcgggtgtccgattgtgtcccgtaatatatcgagacggtcgtaaatgatataggaagctcttagataaatcaaacgacaataacttcttactcggatgtccgatagagtcccgtaaaatatctagacgctcgaaatagagaacagaagctttgagcagattcaaacgacaataacttttgactccgatg

SEQ ID NO: 91989 - DNA, 414 bp, Glycine max
  unsure (1)..(414): unsure at all n locations
ctaagcttaacagatctagtatgaccactacctagaatanataactaatgtataacctaggaataanacaaaataatggctgatgaactgaaatgggaaccaaagtaccccaacagcacaagtagccccattggctccaaaagtgagcctangtgccattggccttatacacttgacacatcctttagggattaaccaaacatatttggtcaccacttacaggatgngccatatttaacaactaacacttaaatgaacaaatgtgcatttatctctcattggcctgatcaatacaactgacttttcctaactggctgatcaaagatggcacactgtgaaacttctggttcctgttacctgcatagctcaagcttagggacctgcctgctctgcatgctatatcatgataaaaac

SEQ ID NO: 91990 - DNA, 286 bp, Glycine max
  unsure (1)..(286): unsure at all n locations
aacttccttgagaagctagagcttagctacactcttncttctcataattaagctcacctccttgagaagcttncttaataagaatcctaaagaagctagagcttagctacacatacctctctaatagctaagctcacctccttgagatgagaagctagagcttagctacacaccccgtataatagctaagctcacccccatgacaaaaaacatgagaataacaaaaaaagtccttattacaaagactactcanaatgccccgaaatacaagggctaaaccctatac

SEQ ID NO: 91991 - DNA, 255 bp, Glycine max
  unsure (1)..(255): unsure at all n locations
ctatgcgtgaacgactagctgttaataataatctttgcatgaatctctngaatttggaatcaaatgtataaatgagaacatgatgaaggacatgattngtgtatacacaagccttttgaccaaacagcttaccttgcaaaataattgtatcctttgctccttttataagctgaatgattttgtcataaatggaaccctgaacttanatgtttatctnctgataccttgcttagattctaggagagcatatggttc

SEQ ID NO: 91992 - DNA, 190 bp, Glycine max
ctaagctctattccattgtgagaactatgaaacatattagaattctcatcataaattaactagtatattgaattattaagttagactggacactcaccgttgaccgcgaacggaccggtgtggccggtgatcagtcatcatggtttgaccgagcgctaatgaccactggttacagccactgggtccttga

SEQ ID NO: 91993 - DNA, 129 bp, Glycine max
  unsure (1)..(129): unsure at all n locations
cacgagctgcagcttaccatgnacacatacttttcgcgagcctttggtctttttatatcaacccgaatgaagtaaactctaccattaacgaaaaactttcccacgtgcaacttccagttctacaaactc

SEQ ID NO: 91994 - DNA, 267 bp, Glycine max
acatcattttacgctgatatgtcggactatcaactcggaaaagtatgcgttgatgctaagtcactcatcagcgtatattcggactataactcgaaaaatatgcgtgatgctaactcaatcattcagcgtattgtacgatatcactcggaaaagttgcgtgatgctaagtcacttatcagcgtatttacgacatcactcaaaaatatgcgtgatgtaagtccatatcagcgtattgtcgacataactcgaaagttgctgatgtaactc

SEQ ID NO: 91995 - DNA, 412 bp, Glycine max
  unsure (1)..(412): unsure at all n locations
actcgcctagatctcttttctgaacgcgtctcgaactcggaccttcattctgtcgagtcaaaggccgagttcgagtccaacgcgctgcaaggccctgttgtctctggaacgagtcanggaagcggcgagtacttncttcgagtcggaatcggaaagccaccgagtcaagcctacgtggttctcgacacgggaagcgacgtgagctggatccaatgcgcgccgtgctccgaatgctaccaacaatcggatccaatcttcgacccgatttcgtcgaattcgtactcttcgattcgctgcgacgagccggaagggtaagtccttgaacctctccaagtgccgcaacggcacgtgcctctacgaagtcttctacggcgacggatcctacaccgtcggagagttcgcgactgagact

SEQ ID NO: 91996 - DNA, 417 bp, Glycine max
  unsure (1)..(417): unsure at all n locations
acagatatacaatgaacaaattgngaatntactcaatcctatccagcagaaccttgaggtaggcgtatgctgctatcctctatggtacaaatattaatcgctgcattngtttatgntttttctntntctagttacttcatgattattaattataattatgacttggtccacatgattgtagatgaaggatgattccagcaatgccttgtatattgagaatctgattgacgaatacatcacttactatgatgatgtgcacaaatctctgatatgttgggtaaccaccacagcatatattttgtggatgtagataatgcatttatttgaagctgacagctcgttttgttgctgatatattggcaagcattgattgatcacttgccattatgactcattatttaatctctcactagtgag

SEQ ID NO: 91997 - DNA, 426 bp, Glycine max
  unsure (1)..(426): unsure at all n locations
atattantattataaattaaatatgatttatatatttgaagatatntatctattataaactctaattatataaaataaatatttattctatagtgtgcacatgttaaaatacttattaaaaaaaaaaaccacaattcaaatatttccaacgattgacattngacaaacatgttaaaaagacattctgtgaaatgatacgaacacactntntaaacatactttactntattagttaaaantgattgaaataccaaatnttaatggtnttactctntctttgagcatattgccatccacaggaaagaaaaaagaggaggcagggtgtgaaatagcacacagaacatgtcataatggcaggatcattatgtcattaactatacatatattaattaaatgccaacagacagtaatatcataacaatgtat

SEQ ID NO: 91998 - DNA, 438 bp, Glycine max
  unsure (1)..(438): unsure at all n locations
atatcagcaatccagtcattnatatcttctatgatatgagaatctgtattggtattattaatccccattctttctgaagagtatctgatgcaattgaagtccccagccaaacaccatcagggatcgagggaccgagattttctattgctgaggttctgccatagctgccgttttccagcagtgtcacaaggggcatatagaataataactactactctntgcatttgaggcaaccanactccaccccacataatgtgatcttaatctgaacagttaaattcaacctggatgtattattatccatttcataatatccccagcagcatgatagaagctgcattccaaccagacactntgtccataagattgacatgtacttgccagatattcttttggttcttgagacataaagacaacatgaactttccaccaactctg

SEQ ID NO: 91999 - DNA, 236 bp, Glycine max
  unsure (1)..(236): unsure at all n locations
ttatcttgaattggcttagaactcaaggagaattctacagtggaaaaaggaaagagtgtacaaattttttcttaanaaagaaacatatttgagaggtacacttgagtgtgtngagggtctatcttctttataactattattattcttattntgaatatgtcaggcagtggtgaacatcaattggatggcgcacaaagattcttgttggatgctctcaatgctcaaatgcaaagact

SEQ ID NO: 92000 - DNA, 437 bp, Glycine max
  unsure (1)..(437): unsure at all n locations
tcatcacacagcagaaacctagcaagactctccattcatatctcccaaaccccatacccacgaaaattaaaggagaaagaagtccacccacacctgaattttcgaaggtccactcgtagccacgcacttcacgactcctaaaatgccctcctttcgcgaattggagcagaaatgatggccaaagggtgaagcttttgtgggagcttcaatggagaatganggagaagaaaatggcaacgtgagggagagagagagctgtctgaacaagtgtggggctgagtgagagagagaaaagcttttggtttaaataagagggtttctcttttctattatgtattaagctntgcacatgtcctattgagtggagaaaaggccacnttccttttactgtaccacactcagcacaaagtgggaaatctgactttgaacctaaatct

SEQ ID NO: 92001 - DNA, 549 bp, Glycine max
  unsure (1)..(549): unsure at all n locations
tctcagagtcacctgcngcatgcaagcntgaatcttgattcctgaagaatcttaaactntctttgtatctgtccagtgctctattcttctntgatatctcccaagcattccaaccacaaaagcaatgtcaggtcttgtacacacatgtgcatacccaatgcttcctacaatggaagcatatggaatgtttctcttttgttccctttcaagcctcattttangacattgattcaaattgaatctatcacctttcacaatangtggcactgtgggtgaacaatctntcatccaaattntttctagaactntattaatataggccttctgaggcaagccgagaataccttgagatcaagttctatggatctctatgctaatgacatatgttgcctcacccatactcttcatgtcaaaattcttagaaaggtatggttcactttatgtaagatcccaaaatcattggttgcagaaagatatncatcacatataagaacaaatatnnnatttactccactgaccttgttgaatatgcatntatctatactattc

SEQ ID NO: 92002 - DNA, 206 bp, Glycine max
  unsure (1)..(206): unsure at all n locations
tcaaaacattatgaaactttggtgtaagggccattcatgcgcattcgtacgtgtaaacatatgagttataggtacatcttgtgctacctttttcttttttgtagggggtcngaactnctgttgtgcactatcaaacactaatcgatgatgcattgtgacccaattagaattataatatgcacatagtattttatggatatgatgct

SEQ ID NO: 92003 - DNA, 164 bp, Glycine max
gcttaacatgagttatgaatgtttgatcttcttctctgtgcaaagtaaatgaagagcacatcccaaccttgttgtagccctgaagggatttggattcaaattgccgataactcatactcacgctgattctatcacttttcttagagagtcatcggagatgagac

SEQ ID NO: 92004 - DNA, 193 bp, Glycine max
  unsure (1)..(193): unsure at all n locations
ctcatcttgncgctcccttcctccagctatcacactgtgagagtcataacactggagagacattataaggtgatgaccgtcgtgtttttggaatggaatttaatattgatgtgatagtctcctcttggttacatgaattctttatgtaatccagtcaccatcatatgcctctcttgtgttatggttctcaagt

SEQ ID NO: 92005 - DNA, 405 bp, Glycine max
  unsure (1)..(405): unsure at all n locations
tcacagtcacctgaggcatgcagcttctaaacttatacaagaatgaagctctgataccactnggtagacaagtggtctcagatatcttaagaaagggggttgaattaagatattacaaactatctccccaattaaaattctatntcactttctattcaagttacaaattctcttaacaatgaactcttaaataatgattctaatagaacaatttgaatattaatataaaacaataataaataaaagagtttaacggaagagaaagtgcaaacttggatttatactggttcggctacacccttgtgcctacgtncagtccccaagcaacccgcttgagagtccactatcttgtaaatcctntacagttctgacatacaggacaatccttctttgtgttaaaatctt

SEQ ID NO: 92006 - DNA, 211 bp, Glycine max
  unsure (1)..(211): unsure at all n locations
cggatcctggtggccccttgaagcgtgtagatgaacttctcaggtaaaacaattgatatatagctaccttgttctctntttcatctatagcagggcaatgattnttcgttgcttccctctgaggaagaaatagatctttttctatctgatttataagatcctttacagccctattcctgaggacggaagaaggaaagcctatgctgaaatg

SEQ ID NO: 92007 - DNA, 426 bp, Glycine max
  unsure (1)..(426): unsure at all n locations
ctaagctgctatcatgtatccanactcctttgatacggatatactcatattcattntcgtgaattgtctgctagtatattggaaaagctatagattaattaaactaaaccaaacctgcaatacacattatatntntgtttgtaaagagaataaatattgaaatggacatgttaaaacaattgcatattatcatacaaccatggctattcagtttccaattgattctgacaaacataagaatataaagaagaaaataaaaggtttgatgagaattctatatatacccacataccggaaccagtgactatgagtaggatcaattaactagtggataccctctaacanatgatagcagacatgcttaacaaggctcaagtggagaatgatgaaggccagagacagaggcactactaagaatattaattg

SEQ ID NO: 92008 - DNA, 404 bp, Glycine max
  unsure (1)..(404): unsure at all n locations
gtctctattctctatcttggtgagccaccgtagagggagtcgatctcaagacaagagtgaatttcactcttggagtgaggaagctagatagttagagagcctctctgagagagaagatcaatactttgggaagtctctatctctcagcttgagtgagtcaccatagaatgagtcaactttgtaaacacatccttcgtaccctactatcactttgtatagtggaagaatctccatattggagaantataatcgtgtggctccattactatcttttaatactaaagggcctatcttaacttacgaggcgggaaagtccgagtttcacaacaaagtctgtatataaaatacttcatgcatgtatgtgtcattatggaaaatactgncacaccttatgttgtgggaat

SEQ ID NO: 92009 - DNA, 408 bp, Glycine max
  unsure (1)..(408): unsure at all n locations
agcttggctctgaaccttgctatctncaatggngaatatggtcatgtctctngcctattcattctcttcattcaccaaccacaagtgaaactgcaacaccacctctagtgaatgatcatgtggagcctcanaccagaggttctgccacactgatgaagacccagaagtaatctaataagaaagaaatgctttccaaatgacctctganatagaacttttcgaaaacgtgaaggactaaaatgagtcttttgaacatatacgcaacataaacacaaaacatagggaccgaacgaaatttacctattgattctcttgttaantcatgaatgacttcgggagatagcgcatgtagaaaataagaatctattcttgagatgaaggactgagggctaataaagacatgctaac

SEQ ID NO: 92010 - DNA, 186 bp, Glycine max
  unsure (1)..(186): unsure at all n locations
acaccttcattgaaaggcaatttgtattacactatatttattgatgactntntctttaagttcanatcataggtggctgannatttttggatgttcaaagtcaagtagagaatgaaagtggtctcaaaattcataatttgaggtctgacaatggcatcaagtacacatctngcaaatttaatcaat

SEQ ID NO: 92011 - DNA, 335 bp, Glycine max
tgatcaacactcggactcttactactttaccacctcataaagctgccagcgaatgtcgctgggtatacaggattaagtacaacgccgatggctctatcaaatagtataaagcacgccttgtttctaaggactatacacaaaaagagggactggatttcttggacaccttctcacccgtggcaaagcttactactgttcgccttatattagccctagcagccctcaatggatggcatctaccactactcaacgtcaacaatgcctttcttcatggcaagcttcatgaggaggtacacatgcaacttcctccgagtctactatgataatcacaccat

SEQ ID NO: 92012 - DNA, 189 bp, Glycine max
  unsure (1)..(189): unsure at all n locations
catgcattctcttgacccttactacccactctgtcatcatgccgagactcaagaaagcaacaagtttagccttctcaatgtattcctgaaacaaatcaatggcttcttctgcaatgtacctctcaataatagatgcttctggatgatacagantttttgtatacccttttaagatcttcatgtatcgct

SEQ ID NO: 92013 - DNA, 273 bp, Glycine max
  unsure (1)..(273): unsure at all n locations
tcatggttatggcattgaagaattggtcacttcaacactcaagctctgaagatactatatccgaagaatataatgaaagtcttggcatatttgaaataaaataatgaagcttgtgaatgatgtcttcttacgaagcanaacatattaccgctttcaactgtataagcatggaaagctaagaacttgttggagttaatccacattgacattngcaaaccaataaggacattgtnactcaacaacactaggtacttcattcttttcattgatgac

SEQ ID NO: 92014 - DNA, 158 bp, Glycine max
gatgaatgattgccaagcagagctgtttgctttgtgcaaactaaattacttaactgacatgaagtttttgttttcactgcctgatatccaactgatatccaacttttaagttactccatgttgattacgtcaccgataacatttgatgtcccttgata

SEQ ID NO: 92015 - DNA, 438 bp, Glycine max
  unsure (1)..(438): unsure at all n locations
ctatttatgaagtcagagcttatctctaaagatctcaatcttatcatgatgcgaagacaccaagaatgtcttataatatctatcanaggctacattgagcaaacaacatcaaaatggttgtattgaagactctgagaatgataacattataatgatacaccanatatacaccagaaattaaacaaaccagactctgagatgactatatcataatgatgcattgaagtcaagatcatgaaagatttgttcattagaatggtagaataaccacatgttcttcatatgagatcacactagagagttggctcattgaaaacgtggattgacatataaatggaatacaagcacatcatgtctcgatatgtaccatacatattgaggcacataaaatactgagttgaagcatatcatttcatatgtgccaacacataatggacg

SEQ ID NO: 92016 - DNA, 198 bp, Glycine max
  unsure (1)..(198): unsure at all n locations
tcatgggtaaggagttatacaactgatggagatatattacacttagttagggatgctcttgaaatgagaacgagatatatggttagtttcatcatgaagtagatatccaattntagaagaagtcccacagatgttgtacttggaatgtgatttcaattcacaagctgttgagaatgaggatcactcanatgatgtacc

SEQ ID NO: 92017 - DNA, 56 bp, Glycine max
attcttgggggacactcatttttttttttaaccagggcctgcgaataaaaaataga

SEQ ID NO: 92018 - DNA, 315 bp, Glycine max
actaactcttaacgccaagctttatattaaattttctgggaacctccccacaaaccagaaaactatctctcttctggacaagatgcagctggggagtaatttttccataacctggagcactggatcatatacccttcactaatccgcaggattcaaccatctcgcttgcttgatgtaagacgtccatcacactgccaaacatttcttccatgctaataatcaatgttacgttaatccaccgacgagatcaaaaaaggccctgcccataagaatcgatttatctttttggtctccaatcatatgagtgcaaccctg

SEQ ID NO: 92019 - DNA, 354 bp, Glycine max
  unsure (1)..(354): unsure at all n locations
actgactaattctcaatcctcttatagacgaatatacaatcttggctcatatgccttttttctctcaagatanttcaaatnngtttgagagctattccaaactttacaagaatttacagacaancttttatagaaagaaattgaatatgagtgntnntagttttttcatgtcttcaaagtttttggtatttataggtcttcttcaacaaatggtgtgtgtctttaaatggatagaattcttttatttctctctgtgttgaggaatgtagcctcttgagcacttaatgctngatttanatgcacacacttcatcgtaatagaaaaccaatcttctttggctatcggttgaacact

SEQ ID NO: 92020 - DNA, 230 bp, Glycine max
  unsure (1)..(230): unsure at all n locations
ttgctagcaatggtttagtatctaaaagagtgttactcttgtgtatgatgtatctgggcacttctaattctggtattgtggaagggttttttaggcctgtaacaccatattcctttgtatctacattgatgattngctggtcaatatcacacagcatgtgctgcagccaaagtatgagatactcactgatgatgagaagaaagcactgctcaccaagcataatttggatg

SEQ ID NO: 92021 - DNA, 374 bp, Glycine max
  unsure (1)..(374): unsure at all n locations
acgctagtgaaaaaagaaacattntggttctcaccttcacaagttcctttcaaatgaaaccctggcaagtgtgttatcttacagatattatgaannatgtgntcanggacactacaactttgatacagagggtcagtgttcatactacaaaaccatgctgcactagaattagccatactattgtctacaagctttcgccacttgtgacangcatcacacttgatccatgtatcattgtactcaaacagtcactcttaggcttncccaggcgacttgtttgagatacatgagatgtaacatctaatgcatgctttgcttttaataatccttcaccaatttctatttccttggagatcatagcttcatcttcaaat

SEQ ID NO: 92022 - DNA, 458 bp, Glycine max
  unsure (1)..(458): unsure at all n locations
catagacctccaatctttaatggagagggttaccactactggaatacccgaatgcatatttttatcgaggcaattgacttatacatatgtgaatccatantaatagggccttatatacccaccacagtataaagaaccacaatagatgaaagcacaactcgtggaagcacaacaattgaaaaacctatagatagatggtctatagaggatggaagacgagtacaatataatntataaagccaagaacataattacatctaccctaggaatggatgaatatttaacggttcaaattgtaagagtgctaagganatgtgtgacactctacatgtaacacatgatggcacaacagatgttataagatctaggataaacacattaactcatgaatatgaactatgtaggatgaatgcatatgatagcattcaagacactgcaaagaagttcacacatatagt

SEQ ID NO: 92023 - DNA, 347 bp, Glycine max
acaataactacagggagatgatcgtgtcttatatatagacctctgaaccattccaaagaccatacaacattattaacatgttcaccctccaaatatgcatatccagtagagaatgtcatccccgttggtgtcaccccaacaatgtcaagtagtggaagtctgtacctatatgttttgtaggtattggctatcaaaaacaccaaataacatgcattgcataacttcattgcataagggtgacacccaaatagatcatgtaccacagatcatcctttaatctatgctactgaatatattgatcacgctcaataagcttcactgtgcatttcggtatcactctctctaat

SEQ ID NO: 92024 - DNA, 405 bp, Glycine max
  unsure (1)..(405): unsure at all n locations
atacccacgaaatntaagagagaaagaagtccacccaaacctggattntcgaagtcccactcgtagccacgcacttcacgaccccgaanatgctctcatttcacgatttgnggcagaaatgatggccacaggttgaagctctgtgtggagcttcaatggagaatgagggagaagaaaggcaacgtgagggagagggagagagaanggcttctgccatgttactgctgagtgaaagagagagagttgcttttggttttanaaggctttcctctttcttatatntattcagctctgcacatgtcctattgatggagcaanagggncacttctcttttgctggaccctctatcacaaaggaagaattgacttgaacctaaatctgcctcgtgcggtgttcttggtcag

SEQ ID NO: 92025 - DNA, 339 bp, Glycine max
  unsure (1)..(339): unsure at all n locations
ctgctttgggcttggcggccacactcaacatagtactttcgacacctactgtacgttgatttcaccaatgctgntatgggaatgttgcgacaatcctttataaccttattgatacattctgagagggtcgttgtcatgtggccatatcgacgtccttctctatcgtaagccatcgtccatttttcttttgagatgcgatcaatccatgttgctatggctggactcagntcacgaaattntttctaaattttgatcaaaaatgtgcttgcacggagtgtacgctgcataaaattagttatgaataacaacttacagtataaatgaaagtaaaataaacgt

SEQ ID NO: 92026 - DNA, 339 bp, Glycine max
cttcgcaccgagctgcagctttatgatctgagctgatctgactctgaactgatctgattctgatctgatctgatctgaatcacttctctgatctgactatcttgatgacttgactttgcatacttgcatatcttgacacctgatatatgaacttgtcacacgtgcaggacaggctaggagacatttgcttgaggttcaggactcctctgctgggaattcgaggctgctaacctatgaaacatgtgccataactgctcctaggttgaagcctaagtatcctgatagaccatggagggtcctaatagattcacctgttagccctattttggaggattgatt

SEQ ID NO: 92027 - DNA, 217 bp, Glycine max
  unsure (1)..(217): unsure at all n locations
tcatatntntaatggagaggggtaccagtactggaatacccgaatgcaaatcttcattgaggcaatagacttacacattngggaagacatagaagtaggaccttatgtacccaccatggtggctggaaatgcaacaatagaaaaacctanagaagagtggactgaagatgaaagaagattagtgcagtacaatttatagggataaaacatcattact

SEQ ID NO: 92028 - DNA, 183 bp, Glycine max
  unsure (1)..(183): unsure at all n locations
ctcatcacaagttgtgtaggaatagtgatagaatgcatagtatatgcatgaatgacttgaataactgattgagcaagtgtaatccttcttacaaaagctaagtatntagccttccatgacgccaatctttggttgccttctgcagaatatgatggtattgctcattntttctccttctatgga

SEQ ID NO: 92029 - DNA, 192 bp, Glycine max
  unsure (1)..(192): unsure at all n locations
agccatctgaanatataagatcaaacaacaaggttaaaaaaggattattccacananatagaaaaaatataactaaaactgaattgggcacttagcgcagcaaagtgggcttagcgtgccttataaaaatttactcatgggctaagcgcagcagactcgcgcttagcctaaagacacataannatattttct

SEQ ID NO: 92030 - DNA, 247 bp, Glycine max
  unsure (1)..(247): unsure at all n locations
tcctttctagtggaagccacagntttctccaaaatcttctttagttccctgctggaaacttcagcttgaccatttgtttgtgggtgatacggcgaggctactttgtgtgtgagattgtaatggctcaacaccttctgtagttggccgttgcataagtgagagccccatcactgatcaggaccctcggcacctcanagcgagcanaaatggtattcttcaagaacttcacctacaatttagcatcatt

SEQ ID NO: 92031 - DNA, 433 bp, Glycine max
  unsure (1)..(433): unsure at all n locations
tcataagaatagagatggtctctgtgatcatagcagcgccacacgaagntatanatctgaagggaagtggattagactggtggatgagaaaactagtcccactgatcatgaactcgatgaaacagatacgaatttgacattacgagaatcgttttgaagttgtagatatggataaaactgaacatctcctgatttgctgtnttgagtggacacagcattcttggtcagcggtagaataaaatacaatgaatgtctctgatattctattgctttcatggggtactgtgtcttcagggtgacctgtatggaatgtgggactcaactgattggacccagacatagattcctatgtgttagtgccgtgcctaaccaatcttcagacctgtttctttctcctcatccccttgggttcttgatgactgatagtggactc

SEQ ID NO: 92032 - DNA, 263 bp, Glycine max
  unsure (1)..(263): unsure at all n locations
agcacccactatctcgattctcgatagagaagaataatcgacanaattgatggatactntctactaatatcatgaagataaaanatggcgacaattattataaagattataaataaaaaataaaattatcagagcagaagacaaagtccttttttatagaaaacttgaatggatttgaatatctcaaagattagttgccttaaatatatntaagtgaaaagaggagagtttcaaatgttattaagcaatagtagagtgtatgg

SEQ ID NO: 92033 - DNA, 486 bp, Glycine max
  unsure (1)..(486): unsure at all n locations
ctgatacaagatgtaattatngtttttacactattcactcttatatttggggccaagccgagtcacatctattggtttcaagtattttgtacctttattgatgaatactctagatgtacctgggtttatttaatgaaagatcaatatgaacatttacctatattcatgtctttctttaatgaaatcaagacccagcttggaaaagtaattaagattcttgggagtgataatgccaaagaatatttctcctctaatctctctttgtntaaccacacanggcatttacatcaggccacatgttctcatacaccacaacanatatagtatggcagagagaaaaataaacacttagttgaaactgcatgtaccttatttcttggtgcanatgttcttgtcatcattgggtgatgacatcttatctcttgagatacanatcatactcattacattaccaatgaccctatttatgctctctcgatnttggtg

SEQ ID NO: 92034 - DNA, 93 bp, Glycine max
ccatattacataggtctctgactctacgcattctgcattaccatcttcaacaccggctaagtggtacactgtcccccacaagtttgttgatca

SEQ ID NO: 92035 - DNA, 122 bp, Glycine max
ggttaatgaattggaacagaggatatgtctctggtgtctttaagtgagaaaaagctgagattttggtttgagttttgggcagagttatctgcctttgccctgttttgcttgggttggtaatt

SEQ ID NO: 92036 - DNA, 374 bp, Glycine max
  unsure (1)..(374): unsure at all n locations
gagacgatatgcaaaagttgggacttgtgttactcgtttataatggaatgagcctaaacacttgagcttgagtgaaacaatgactatgaagctgtggctgatgattctttccttgatatctgtcattctcactagcttatttcagttgtgactctaatgcatatgttcctatctttgaaaagctgcatgtttgtaaaaagcaattgattgaagcattccatgatattcatttcatatgagtgaatttctttgtgaagcaaacaccatttggattgaccactatattttgtcacttgacgacaanggaactgttctttctttgcttaatgacaagcaanactgtgaagttggaagagtttgctagtcttcttata

SEQ ID NO: 92037 - DNA, 426 bp, Glycine max
  unsure (1)..(426): unsure at all n locations
aagatattatatgccaactttcacacncccatntgcaatgccagacgtcagttagtgatcctctccatgtatactctgcatgaccagagtaacagaccatattttgacatgcataactttgcacaagccaggaacctgcttaacagaaaaatttgactataaacataagttgaagaatgcataaatataaataacttgaaaagaaacacagctcagaatcataataaatacccaattcaaagaacagacctaatttatgagaacctacatgcataccctctaggtaacatgcaaaagcatatgaaaggaaagacacttattacccctaaaaaagaaatgttgctagttaccaaaagcaaaaggtcagtatatatattaccagaaaaaggacagttgtgtctttcaaattttggatgagcagtctac

SEQ ID NO: 92038 - DNA, 404 bp, Glycine max
  unsure (1)..(404): unsure at all n locations
agctnganacctatagcataatcacttgcattgacattaactcaaattcttgcccctatctggtgttgtaattactggtgcaaacactacatttgttttcaaatcattaaatgctctcatacattcttcattgaacacaaaagcaacatctttattcaacaaattgctcaacagtttggctactttggagaaatcttttatgaatcgcctgtagaaccctgcatgtcctangaaacttcttattcccttgacattcaggggaggaggtagtttctcaattacattgtccacctctttccctcttactgaaattntatgccccaacactattccttcttgaaccatgaaatgacatttctcccaattgagaactagattagattcttcacatctctgtaatactc

SEQ ID NO: 92039 - DNA, 357 bp, Glycine max
  unsure (1)..(357): unsure at all n locations
tagtccttattactcattatcagagtaatacaatgtaatcaatactgatcctattngctcattataaatagaggcttagtgtggtcatccaagacacacaacattacaacagttaaaccactgttataataaagaaacatggtaacctatcctaagagataatgaggaaataaggaaagcaattctaaaggataaaggataatccaaaagtcaaaaatatggttaagacaatattggatattcctgacattctaacaaactgattaaaaaaaattgctattattgtttgcacttcaagtggtaacagaattagcaaccaactacaacaaaaggctgtcatttaactaaatattaaca

SEQ ID NO: 92040 - DNA, 386 bp, Glycine max
  unsure (1)..(386): unsure at all n locations
tttgagaatgcactaagttatctattgcagcatggcggcagcttttggttcaagggccttgttttcattantaagtggcatgggtggaccaaatcaagcaacaaatgcactcacttctggacttttctttgcactngntcaaggtggacttttccaagtaggcttgaaggaaaagctaatgcctctttcacagtttttgtagtcccttgttattttgtacctccatttgatcagtgagaacaatgattgctcggctttccatttcggtaacatactaagtgaaagtgccttactgtttattggtatcatttataaaaaaaaatcttggggcaatcattgttgggcttctaatattanctatggttataaaatttggacatgactta

SEQ ID NO: 92041 - DNA, 467 bp, Glycine max
agcttataatatatcgaggcgctcgatattttcaacggaagctcttgagaaattcagatggtcataacttttaactcggatgtccaattcatgcgcatcacatatagagacgctaaaaaatgaacaacggaagctctccagaagttaaaatggtattaagttttcacactgaggtccgattcaggcttataatatatcggggcgctcgaaattgaacaacggaagctcttgagaaattcaaatagtcataacgtttaactcggatgtccgattcatgcgcatcacatatagagacgctgaaaaatgaacaacagaagctctcaagaaattaaaatgggcacaagttttgacactgaggtccgattcacgcttataatatatcgagacgctcagaattaacatcggaagctccgagaaattaaatggtcgtaactttactcggatgtcgattaggcgcatacatatca

SEQ ID NO: 92042 - DNA, 445 bp, Glycine max
  unsure (1)..(445): unsure at all n locations
agctagcttctacatattcttccactgagcctatttgtttgagactcagcaacaattcaaaaggactgtcaaccatggtaggttggaaacgcctaataaccgctgtccaaaaatcctcccaatttggatggtgtgcagaaaactcccaccattgataccgagttagcgctttcccttccattgctaccataaccgcctgcaacttttcctctccatacatccccttcaaatcaaaatacctctctactctggttgtccagccatacgcatctctaacttcctccatctatccactttgtgtcngcctccattgtgacttccgtgtgnttcaccttgaggaattgtgtcgctgtgttcgctgctctcttcttcctgtcttgcacgaatntcttgcactgcggcctgcacttcccttaactgttcaacgctcttctctattgtttca

SEQ ID NO: 92043 - DNA, 430 bp, Glycine max
  unsure (1)..(430): unsure at all n locations
agctttaaaagatcattcagtaacttatattctctgcagtaccgntcatactacacattgcactaagttttgtttaccaacctcatctagatgtaaaacacaatcaattgaagggaaagggctagtagtgagggtaggggtaggaaacagattattattgcaagaaaattcaatctcagaccatgaacaacttataaagtaaaaaatattaaaaagaaatattgtaggagagatatacatatacatgggtatttatgagtgaaagtatctcatatacttggtccttttccaccttcccttgcagcaccttcatactacacaacaaattggatgtaacacaagcaattgaagggaaggggctagtaatgagggtaggggtagataagagaatattagtgcaagaaaattcaatctcatgccatggacaact

SEQ ID NO: 92044 - DNA, 440 bp, Glycine max
  unsure (1)..(440): unsure at all n locations
agcttccatggaaggttgtgttccttttatttagttggagattntgatccctctggaaacccttcccacaagtttcacacaagaacctgtttgtagccatcacggtctttggtgataaggctatgacttgtgcttcacgatctgtgcaaatagaaaaaagattcacatattaaatcatttgtgtaactttnttcttttctcctgatgagaagttagctttgaatatacactacacaaaaaaaatcaaagaatctatgacaaaatttagtgacaacaattgctttttcattactaatactaattagtcaaaaaaatggagtgataatgtttctacaagttacatataaattattccattactatttttaatttttctagtagagatacctacgtataataaagctatatactccatataagagatattgatgaagagaaat

SEQ ID NO: 92045 - DNA, 474 bp, Glycine max
  unsure (1)..(474): unsure at all n locations
agcttgatgtgagaaagcgtggaagagtcagtcttcctacttntttttgttgaccacagagtggtacctggagatatgtcgcggnggtcaggagaccttggggacgtcaggtggggtgctattgcccaaaaccaagcttgaccaatcccgacccaacccgggcatagtcagtcagtgagaacctgtgacgtacctaaacaggcgagctcctggcagtcaaccaataaaagaacaaaaaccacaaagcaaggagccttgtgtggtggctggccagctatggatcttgagtggtatctggaatttggcctctggtaatcaattaccaatggtgtgtaatcgattacagggcttaaaaatggagacagaaagttaaaatggcctctggtaattgattactaagggtgtgtaatcgattagcggggcttaaaatggagacaggatgttaagatggcctctagtaattgattaccaatg

SEQ ID NO: 92046 - DNA, 472 bp, Glycine max
  unsure (1)..(472): unsure at all n locations
gcttctccggtagtggaatgtgggacaaagtttattttattataaatgcggatcaagctcctccttatatggtggtggcgtcaatatatcattctttttcttatattttatcacatcagtgatttaattaattaatccaattctactttcaattgtttaaatcaagttctcacttttataagtaatgattcagtctaacacttaatttatcatcaaatttttaacgtcattaaacatagaccgatcttgtttacagactaaagataacgtggtactagctagcatgctgatgtggtgctcgaaaatgaaattgcaaattgcaaaatgatattcaaggtgagatttgaatcactatctcatgctttntaccaagcacaagattcctaagacaacaatgagcttaatacgagtgaaaatatattcttataagtaatgtggaagactaaaatgccattattactactataatata

SEQ ID NO: 92047 - DNA, 442 bp, Glycine max
  unsure (1)..(442): unsure at all n locations
gcttagtaagccttggtttgaagggacgtgctagtatataagaaaatatcaaaagtatcttatcatatcttagattatccgctaggattagtttccctatttcctcattatctcttactattaggtcccatgtttccttatcttttcatgatttgcttcctttagtagttaggattatgatcaatataaataggggttagagctagttctacataacaaattcaacacactgaaatgttatctttgntaatatattaaatattgctgcatttcttatatctctctgtctcttccatacctgaaccccatatggtcaaaacaaccctagttttctgtccgacccttcattatttatttagaattaggttatgaccgcatcaccctataacttcttatctgtttggatgttatgcctatcggacacctgcacattttcttttat

SEQ ID NO: 92048 - DNA, 462 bp, Glycine max
actggatgcgctggtcaacttggtaacctagctggccttgaatcagaaatatgtacctgtcgcaagggtttgtggcttgtgctcctctgtttactaccatacagacctttgcccttccatgcagcaacctggagcaattgagcagcctgaagcttatgctgcaaaatattacaatagacctcctcaacctcagcagcaaaatcaaccacagcagagcaattatgacctttccagcaacagatacaaccctggatggaggaatcaccctaacctcagatggtccaaccctgtactacaacaacagcagcctgctccttccttccaaaatgttgctggcccaagcagaccatacattcctccaccaatccaacaacagcaacaaccccagatacagccaacagttgaggccctccacaacctttcctcaagaactgtgagcaaatgctatgcagaacatgcagt

SEQ ID NO: 92049 - DNA, 457 bp, Glycine max
  unsure (1)..(457): unsure at all n locations
ggatgcagcttgtaagcctacttctatggcttatctatttcatgagnttctaacagttttgtgatgaactcgcttagcctgcaactatgcgcttaacgaattcatacgatctgggttttcctatgtcgttctgggtgtgtagtgatgaattcgctaagccggcatgtcgcgcttagcgaagtcatgagtttaagtttgatattcttacttctctgagtttctgtttcatgagtctttgatcttcgccatgtagcaaagcttgatttttcccagaatctgttgctcgctaagcgcctgtacgcgctaagcgagcatcttgattttctattcgcttctatacttgggttagcgctagttgatgctaacccacgtgtcgtgtaactctgaggacctttgtatttatgctggctagcgcaactggcgtagcccagagactttattttcatattaggctacg

SEQ ID NO: 92050 - DNA, 290 bp, Glycine max
  unsure (1)..(290): unsure at all n locations
catggctcactaagccttattctattacatagagctaattgtgcttagcgagactcactcgcttagcgcgacacactaaacaggcttagcgccatcaggcgcttatcccaaattgactactggaacttaattggcttagcgagcaagctcgctaagcccaattccaaaatagagaagaaatagcacttagcgagacttactcgcttaacgcatgaacaaaaactcagaanactaaattgctttcggcttagcgagactgacttgcttagcccaggcttattcactaaaag

SEQ ID NO: 92051 - DNA, 483 bp, Glycine max
  unsure (1)..(483): unsure at all n locations
agcttgtgtattcctgcattctactattatatggaattgcccatggctntgcctgagaataacaattggttgaccacaacagcgctgggggcggcaacggacaatggtctttcaaataaacctgttgtacatgaacaaacattatatcatgcgctgaccgtgccaaacgaacaagcgaagtcattgcataattgttacactaactatattcaatgtacctgaacaaaatgatttccaaacacgtgaccgacacatatgatgcggtggccagaagagtcaggtggtggttgacttctaagagggaaaaatgtcatgctttgttgttgggacaacgatacaaggattacgttataccgtgaagcaatcacatatcccatgtctgttatatccatccacttgtccacactaacctgaatgaaccanacatacacatgtaagtaatttatacattggtattaaaaaaattaacctacaaacatacct

SEQ ID NO: 92052 - DNA, 374 bp, Glycine max
  unsure (1)..(374): unsure at all n locations
agctngaatgcatgcagcagccatagtgcttatcgattctattgnccgctcagcgcccaccactctacactcaaaaatgcgtgatgttagctaagtacgcccagagcccgagttagcgagagttgtaggttntctgatctgcatatctcaccaagtggtctaattcacgcgctaagcctgactctaaatttgaaaaaaaaaaagaagcttatcgcaagggttcgctaagtggaaggtcttgagaaaccaaacgtctctctggctagcttagtgcagcggcgcgctaagcgagaatgttgaaaactgctcaagtaagagtaacggtggatacactcacaattgccagatttcgtacacattgtctttgcattctc

SEQ ID NO: 92053 - DNA, 437 bp, Glycine max
  unsure (1)..(437): unsure at all n locations
agctntgatctaccaccgctgccaccatcattatcttagttttctattatttaatattactagtactttgatttccagccgcgtatttggctatattattattatatttgaacaatttactatttctttatttgcatgggatgtttgaaaaaatattaattatattatttgactatgtggcttttatatatttgatctattcatgggtcttgcttcatgatttggtttatatttttccatgaatgttgtgtggatgcttagttgtatttgaatgcttcaaacttgttacacactttgtgcttttgttgatgccaaagggggagagaaatagggattaaatcaagaactcacatgagtaataaacttaattttaagagaagcatacattcaaaaaaaaaaggcggagaatggaaattatgtgagtgtccactaagaaa

SEQ ID NO: 92054 - DNA, 453 bp, Glycine max
  unsure (1)..(453): unsure at all n locations
ataaatcgagtccttctagttctagtcctcttcatattatttattctgatgtatggggtccaacttcaataaattcaataaatggatattcctattatgtcatttttattgatttattatcacattatgtttgctggttgtatccaatgaaattcaaatccgaaatttccattatttttccagtttttaaatcctttgttgaaaaccaataaaatgtcaaaattaaaattttttatactaacaatgatgatgaatacattaagttacggtcgttccttctaacttatggaatgtctcatttaacaactccccatacccgtgaatattacggaatttttgaatcgtanaaattgttggacaagtggccttaataacttaaggagggtgaatacgttaaaaatttctcgttaattgactccttatcccctttaaatctatatgttagaatgttga

SEQ ID NO: 92055 - DNA, 481 bp, Glycine max
  unsure (1)..(481): unsure at all n locations
agcttccatcacgctaagggcgtggaccattttcgatctcttgnggtggtcgacaaaagtggggcttttgctcctacatatccttaattgcaatgagaaaatcaaacctacgtatttcttgcagaagtggtaaagttacatgttgattttatgcttttgaatggtccatgttaaccgataaaagcaaagaggaccgtntaaagaattggaccttataacggtttcaagtgatntttgcggacaaagcttgatttgtgagttgattntagccttagtttcactttggtttttagtcaattcattcaaggaaacttncaaagaaaaacgtccgattgatttttttgattattttattcanagatatttttgntattatattattaattttcccttttcgatttaactgagattaaaacgtgaatgagtcggtggatnttattctaatagngattaaacgagattaccactcatatgatcgggg

SEQ ID NO: 92056 - DNA, 468 bp, Glycine max
  unsure (1)..(468): unsure at all n locations
agctaatgtttcaatatatacaaattntaaggtgaaacataaaaggcagaggtagcagtaatgcaagaatccccttcaaacttattaacaaaggatgtcactacatctggaacttgcttggaccaaaaccattcatatgctttcggctgcttatttgatagttttttgctaattaaactctccagaggagcagatagctgaagtaaactagatcaataaaatatttaacaattttaaggcaactagggagtagaataaaatatcaaaactaaataaagaaagaaagaaataataagtaatgaaataaccatgaaacatatagaacanaagtacatcaaagatcagcagacagtctaactagttntcaagtatgcagtcattttatgaacatttcttacttaagctacaacacangtttctaccttanacactagaccaganattcaaacaatatgattctcatagtca

SEQ ID NO: 92057 - DNA, 432 bp, Glycine max
  unsure (1)..(432): unsure at all n locations
ctcattacaagcctagtaaagaccttcggattcagtttgtctgttcttgtctgatcttgactgtcctttgggtgatgatccttccttgatatctgtcattcttactagcttatttcagttgtgtttcttaataatcatgttcatatcttttaaaagttgcatgtcttgtgagaagttgttgattgaagcattgtatgtcattcatgtcatgtgattgaattctttggaataaaaaccttgtgaataaccactgtgattntgtcactcgaggacaagtgaactgttctttctttgcttgaaggcanccaaaactgtaaatattggggagtttgttagtcgtcctttacgactaactattgtatagaaaagatttccaaaatgtatatacatctcccaattgatgtgtatttctggtagacttgttaatatttc

SEQ ID NO: 92058 - DNA, 468 bp, Glycine max
  unsure (1)..(468): unsure at all n locations
agcttgcatttataatatatagtggccatgattaactcttaaagcanaagacagtacatcaattaagagctaattaatattctcaaccagctattctctgaagtcatgtgaacaattaagagctaagacatctatggtacttcaagatgcaaaacactagaaataacctctacattcaagttattcagaacacagtaatgcctgttggagttaaattttacttagaatatgaaagtagtcccatcctttaatttccatataaaagagacaaactaattacactcttcaatttgagatatctacatctgcactgttacatgattcaactntagcttaatcaccaatttgtctaagatttccctgaatgatacatcttttgtgagttcaataccctcataagaaacgtatgtgttggagacaaataagtatccttctatggaaaaaggacaattcttaaacgagtcagca

SEQ ID NO: 92059 - DNA, 463 bp, Glycine max
  unsure (1)..(463): unsure at all n locations
tgcaagcttaagttaaatgcatatatcattctttatttttctaatgtgaaacttnctactttacattacacacacatgtgctcgctgatctccaacactaacaatagaattatgggtactagtacattctaacatcgacaaacaaaggtaaagcgacatgcatactttaattacctgcatattaccaatcagcaatgcataaagaaccaatccgagggttgcaacaacaatggcgaccattatatctccaacatatgtgctagtaagaaggccttgacccaaagaactgcatcctccattcagaaaagcattaaccaaagggataattctagtgagtcatgagcagttagagaagacaagagaaaaatnaatctatgttatcatgttttgtagagaagtgagttgacttttggcctttgggaacttggattgatgatgcttaccgatgattaaaattaaatgt

SEQ ID NO: 92060 - DNA, 475 bp, Glycine max
  unsure (1)..(475): unsure at all n locations
agctttcagaaagtttggaattgaattttaattgctgtaattgattaccaccttggtgtaatcgattaccagtaacaaatttttttgaataattgggcttaattggtaattgttgctttgtagatgcaattgcttttgatgttntgatgatgatcatgatgatatgatgcaattgatgtaaatgggcttttcaagataatacttcaagattacaagtcacagcatcaagatgatcactagtatattaggaagggaattcctaattgaattagcaaaaggtttggccaagtaatttaaattaaaaagtggtttacaaaggttntattctctggtaatcgattaccagaggatgtaatcgattaccagtggccaaatatattttataacagctactataatttgaattcgaaattttagactggtgtatcgcttacacaattttggtaatcgattaccagcagttagtaaacgtttt

SEQ ID NO: 92061 - DNA, 404 bp, Glycine max
  unsure (1)..(404): unsure at all n locations
agccttctcccttatttgctatanatatgggttgaagtgaagaagaaaaggttcagccccttaggcacttctctctctttcgaatttgcttaggaaaattgtttccgtgaagaatatccaagccgaggcgcttccgtaacgtttccgtgagaaattacgcgaagattctcgaccgttcttcaagattcatcgttcgttcttcgttttcttcagtcttcaacgggtaagtacctcaaaccaagcttttcaattcattatatgtacccgtggtggtccacattttgtttcatgtattttcattctcgttntcatttactttttatacccctttntgacgtgcttaagccatntatttaagtcatttctcgcttaatctaaaaataaaataaattttcaccgatcgt

SEQ ID NO: 92062 - DNA, 423 bp, Glycine max
  unsure (1)..(423): unsure at all n locations
agctntatctctaccactctgcaggtctacctcttccttcatatntggaaatgagaattctggcccacagttggttgtggttagcaactagatcccaaatccatcttcccatcaatgctgcattgaatttggccagatcctttatccccaaacctgcatcactctgtggaagacagatcacttcccatcttacccaacggattctcttgagctgttgggttcccccccacatgaagtttctttgaagagattccagcttatctaccactcttttggggatcttgaaaaaagataagagataaatacggagggcattcaagacagacttgatcaatgtgaccctaccacccatagataaattcgtctgatccacttggagagcttagcttcatacttagagtatatatgcgtccatactaccct

SEQ ID NO: 92063 - DNA, 214 bp, Glycine max
  unsure (1)..(214): unsure at all n locations
agcttctagagaanactacatggagcggtctctgtaaaaacgctgcccagccttcgttaaccgttggatcgtctcataatttggtttacaacttctcaaggcacttttccatgatataaccgttgggatctttgaaaaaatgtctggatgggcgctaaaccttccgttcccagaaccttcttttatttaaacatttcagcctttgctttcgtgt

SEQ ID NO: 92064 - DNA, 472 bp, Glycine max
  unsure (1)..(472): unsure at all n locations
agctngcatcacttttaccttttcatttccatcgtactctngcttcaaaaactgcccaatcttgttggtgttnttagtgtcattattctaatcaacatagtggatgatattgctccaaacaagattgctcttgcctttgactttctctatctcctctcgtgattntttttatttgagcaaccgttgattatccggtaggggtggaacttcgtatatgtctttaatatcttcccatagatcacaagcatcaagataggtttccgttctaatagcctagaggtggtaatgttttccattgaatagtgaaagcctatgaagcacggacaccctagtcccttaccgtgttcggtgtccgacacgcgtccgtgtcagtgttcgataccgacaccgacacccgtactacgtttatattatggacattacaggtgtgcacgtgtccgtgtccgtatcgtgtccggtgtccgtgtcggtg

SEQ ID NO: 92065 - DNA, 410 bp, Glycine max
  unsure (1)..(410): unsure at all n locations
agccttggaccttgcttttcaaggccaagcactgttcgatcgagtggcctgtggtccccccatggtatgcgcaggtcgtgctanggttataccattttgggaatggagactggaagatctttcccgggaccacgacgaccaattggttggcgatgagagatggtaagagttccccatatgtcattgggatcggggcaaaaatttgtgcccgccttggcgaaaagttccttgccgtgtttgcgccaaagtgaacattggccgggtgaggccgagtcggagctggagcccgaagagctcccccctgtgggggtgtgggcgcccttggttgggtgtgtgctgtatcagaagaggcctcggcgcgagccannaaactcgggtgatgttgtgcatattggtgggtatcgcgcggg

SEQ ID NO: 92066 - DNA, 467 bp, Glycine max
  unsure (1)..(467): unsure at all n locations
gcttcctgaaatttctgtctggaattcattgtcatctttattttgtaactcagaaaagataaaagtgtcctctgagacatttagtcgcctaagaagatggtgattactagaatcttgtactaccattttatttttntaatttacatgcttctttttaatagcttcaaatacaccttagagtgttgattctgacttggccttcctaacttgttcagctaccaagccggcattcacttttgtggcccaaaatccctttcctacgctttgcatgacctanggtataataagttgctttataatttggcattcttttccttcacggcattgatttggtgaataagactctactaatatattttttggggggttagctgaatcacataaagaacatggagtcgaactacttaataagctggaagctggtatagatgagtttgaactgatactataggatangaatcgagatg

SEQ ID NO: 92067 - DNA, 482 bp, Glycine max
  unsure (1)..(482): unsure at all n locations
agtgcccttaatttgaagcaatatttggctttcccataatgtatttcctgacatttcttttgccttgatagttcatggaaatcaagttctgaaggagagtacttgtttccaccttatcactttntgcaaagcgcttttcaatttcagtaagaaattctttggcactagttatatcatctgaatcaatgctcctaaagacctcaggaatgcgatgcttaatgatcataagactcatgcgatttaagtgatcccacttctcatgaagtttcctctgttaagagatggtggaatttgtatgagaagggggtttctcaatccttaatgcgaggtctagatccatgcagccaagaacaatttgaatggtttctttccagtcctntaaatatgcaccattaagaactggaaccgaattcaaattagcagatatagaagcaaccactgtnaagatcacaataaataatacaataagctcacataaaatg

SEQ ID NO: 92068 - DNA, 408 bp, Glycine max
agcttcagaattcaatatctagcgtcgtaatatattactggactcaatcagacatccgagcgaaacggtattgtcgtatggattagctcagagctccagaactcaatttgatcgtctcgatatattacgggtctcaatcagacatctgaggaaaaaagttattgtcgtttgaatatgctgagagcctcaacattcaattttgagctgtctcgatgtattacgggacgtcatcatacatccgagttataagttattgtcggtcgcatttgctgagagcttcaacattcatttttgagcgtctcgatatcttactggactcgatccgacatcctagtaaaaagttattgccggttgaattagctcacagatctacaattaatctcgagcgtttcgggtattacaggactt

SEQ ID NO: 92069 - DNA, 344 bp, Glycine max
  unsure (1)..(344): unsure at all n locations
gctttgagcaattcaaatggacattacttttcactctgaggtccgattcaggcgcataatatatcgagacgctcgatattgaactttggaagctcttgagcaattcaaatggtcataactatncactcggaagtccgattcatgcgcataatatatcgagatgctcgaaattgaacaacgagagctctctagaaatataaatggtcataactttcaacttcgaggtccgattcaggtgcatactatatcgagactcactacaatgaacaacggaacctctcgagaaattcatatgatcataacttttctcacggaggtcagaattatgcgcataatatattcag

SEQ ID NO: 92070 - DNA, 357 bp, Glycine max
  unsure (1)..(357): unsure at all n locations
gctgtgagccaattcaaacgaacaataacttttactcggatgtttgatatagncccgtgatataacgagacgctcgaaattgaatgttgaagctctgagctaattcaaacgacaataactttttactcggatgtctgattgagtcctgtcatatatcgagacgctcgaaattgaatgttgaagctctgagccaattcaaacgacaataactctttattcggatgtctgattgagtcccgtcatatatcgagacgctcgaaattgaatgttgaatctctgagccaatccanacgacaataactttttactcggatgtctgattgaggcccgtaatatatcgaggcgctcgaaattgaa

SEQ ID NO: 92071 - DNA, 246 bp, Glycine max
aacttatgtaactggacaattttttgttgttaggatctgaggcaaagtagctagatgctattactgtttggcagcctactcactcaagaactccacagttaaacgcgcttgacttggaatggtaataaaatgggtgaccttgtgagaagtctcctgaaaagcatgcgagtgagaataaagcccgctaaaaagttttgcgggataagtcaatgatgctgagaacattctgccatatcagagctattg

SEQ ID NO: 92072 - DNA, 458 bp, Glycine max
  unsure (1)..(458): unsure at all n locations
agcttctntaaaggtatcatattcaatattattctctattctgatcttgcataagaaacaagccctttaacatagttcaacatcattctgaggtaaaataattctccagctcgagggggcacaaactgcaatcttccattagaaaatcctttatttcggggacaccattcatgttctttatccttccaaacaaaattaattggtaacttaattatcgtaacataactcctttgcttgtagatatttcttgttagcatccatccaggccaaaattaaatttggtttggtgaatacatggattgttaagaacattatctagtgactcagattcatcanaaattactccctgctcatctggcaaatgaagtggaagcctttcaaactcaagatcctcaagttgcttacatgcagaaagatatctcaatcataatacatgcttattcatcaatgattagatc

SEQ ID NO: 92073 - DNA, 410 bp, Glycine max
  unsure (1)..(410): unsure at all n locations
agctntctagctnttcattggtgtattttgatctccttttggtgctctaaattgtgggagtgtgctcaaatatatgggacaattttggtttgttttcttgcttgattaggttgaattatgggttggtatgggatggccctacgcctataatgcattntgaaacaatgggacatgccacattgtccccgttctcttgttattgacgcctaaacgcgcgcccaccaagtgttcggtgaaatgcctcaatggcattagcgcgtgacttttgtaaggaaacaacccgtggggcattttggtttgtacattattttctattttggaatatgtattcattcccgaanaaggctagagtaattgccccacatatatcctacgcctagaaactaaaattntatgcaaaaagaatacaa

SEQ ID NO: 92074 - DNA, 392 bp, Glycine max
  unsure (1)..(392): unsure at all n locations
ctgcaagctttgggcaatcaaggtgagntatatcttttcttattgacaaatagncccatgatgagcttatatctcattgtgtgcaaaggaagaaaggctgcataaagacaaatttgaaagtgttcatttaagtttggcctctcaaaataagaaaagaaagaaaactatcggtgctcttagtcaaaagaacaaaagaacgatgaagaatttacttgctacttctacaagaagttgggacacttgaagaaagattgtccaacgtacgttggatggtgttaaagaaaggaaatatcttggtcttgttgtgtgaaaccttcattactgagatccttctatgatttgatattagaatttgtcatcaattgttggccgattttaccaaatatcctatg

SEQ ID NO: 92075 - DNA, 474 bp, Glycine max
tgcaagcttctattatgtggagggcgggctttcttcattttcttgtctccaacgcgagctttgaccactactcttacttcccgcgatgcttctattcatgtccgcctgagtgggcttatagcctaaaccatacttcccacgatttccttgggcatttatcaagctagttatgccgccggtgtctttgcctaaacacattccaggttcataaaccgttcgccaacataacctcgggccatcaatactgctgcatcggatagacaatgctgcccagagaaagagtccacggacgaaatgctgaccacctcaaaagactggaaagcgggttctaacgattcttctgcggctttcacataaggcatagaggatgggcagcttaccaagatgttttcctcgctgacacgataccaagtgcccctccctacgaatataacttttggtgagtgagagggacaactccactgagtggatcac

SEQ ID NO: 92076 - DNA, 422 bp, Glycine max
  unsure (1)..(422): unsure at all n locations
agctngaattgtggtgtccattccattgctttgtgatggtatcttaaataaccgattaggtcactttaatattaccaattcaagaattgattttggtacgaataacacgtatcttttatatatagaaggtgttttttgagctgaaaaagattatgttgattggtatttttttttagtatttatatatagtagttgtatatctaagaatcaatctcaagattattaattatattagaataagtttgcattaatctattcatacattttttttttggaaaaggtgatccatgcatttgattgttgaatattcaagaatttttgtaattaacaaagttctttgcatgaattattttcttgtagatcaatgataactgctaaataattgtgaattaatagtagctaaatagtaaaattttcgctta

SEQ ID NO: 92077 - DNA, 458 bp, Glycine max
  unsure (1)..(458): unsure at all n locations
agctngaatngtcagaatagggtacaattttgagagaccaaagctacatattnttgcacagacttcgagaatagtgctctggaggcagtagagaggcagcagctaagcaaggaagctagggttcatcactttgagagattagagagtgtttgagtgattgtgagatgccaagaagaggaggaggggtcccccttcctgtgtaagaaacaattgctctgtactttctgtctcatttgtattanggttccttgtatggctggctaaaaactctagttggggatttctaatgaacagttgatgtaattacttttcatatctaattaattgtgttttgtgtgtttaatgcttctttcaatgcttaattattgcatgctcttggcccgatcacccacttgtgtgtactggtaggtgactttagcattgggaaatgtcctgttgccttataacatgatagaagc

SEQ ID NO: 92078 - DNA, 477 bp, Glycine max
  unsure (1)..(477): unsure at all n locations
agctnntatagatcattgatacttcanattcatattgtttgttctaatatgaaattgttatgtctttatagtattcttttaaaattatatggtccaaggctatttgtttgaaagataaatgctggcatgattaagtggttgaaattntgtaacatgtatattgtaacttagctactgtagttttaagtatgaagaattgtttgaaaacttgatgctctgtgcactatggtaatgtatgtntgttactttgtttagactaaaatgtgcataacactntngtgtgttgatgttcaagatttacttttcttgtacattggagggataacagtttatcagcagttgtgaatgtgcctattgaaaactaattatcattaatcattcttgagagccctacaaattatgccctgctcttgacggagaatttgtgataatttgattcataaatctgcatttacagttgcaagatttgatccaata

SEQ ID NO: 92079 - DNA, 347 bp, Glycine max
gcttgcctgtccgatgcagcaataatgatggtcctatttatgtgggaacggtaccaacccggaatgggtttatgcaaagacaacggcggcataactagcttgataaatgccaaaggaaatcgtgggaggtatggtttaggctataagcccactcacgcagattgtaagaaaagcatctcgggaaagaagaccggcggtcaaagctcacggatgagacaagaaagtgaatgacgcccgccctgccacataagtagaagctttataagcgccggtctgggagaccaaggtcatgtggtcgcgatatacgaagatgatgtttcgagtacattggatttggtacgaccatg

SEQ ID NO: 92080 - DNA, 271 bp, Glycine max
cagatcctgaacgaacaacatatcctgctttatatactcttcatgtctggtcaagaagaccattcagaagagtataacttttataaaaactttataacccatttgaaacagtcaaaccctttatgcagacgtacatcttttgatttatcacaaacagtcacttggtatccgataccaaataagtgtaatcgactacacaaagctctcgagtgagaggatgtgaatcttccctataaaatcgatttcaacgtccacggcactggtaatcgat

SEQ ID NO: 92081 - DNA, 396 bp, Glycine max
agctagaaacataggttgactacaccttcttttctttatccattaaggagggagatacacaatatgatttttgcttgaaataatgaaggattacaaaatatgatgtattgattgtgaagtgatgccttaagagtgtttaatcatccaaaataggataaatgattctagatgtacatgtgatggattatgcctctgaaagatgaagttgaaaatgcgtttagagggtaagaaacttaatgctggcatttcaaaagagtcaaggaccacctctatagagatctaaagtggttgttaggtgaaaaagctcatggtagtgaatggattcgacatttaacatgctccctcttgtatcgcagtatgagcttgagaattggacaatgcacacaatctcaccta

SEQ ID NO: 92082 - DNA, 456 bp, Glycine max
agcttgttgcaaagaccaagaatgatttgattgtatataatattacaatctaattatctaatggtcatatccttcatgggggttgatttgtactctaaagaattaattgcaattgatcaaccaaaaatagtttttgccaattctaaattcctctaatattaaaattcggatttgaataaagagagcaatcattgataatagacttagtgtaagattaaacgtcttatgtgagtgacatgtgggttattaaggattaataattaaataattatttgttatggattaagttgtaaatcggtcatgggcttaagtggagcagtttctagatacaactcctatttgatgggagtagtggttataaaaggatcaatagccactaacgtgaaataagatcccttcttcaacattagaatattctctcaatcctagtcgtcatctcacaagacagaaagaatt

SEQ ID NO: 92083 - DNA, 447 bp, Glycine max
agcttcaagtggataaatagtggctcgttgtatactctgctaataaccaaccgaagcgtactatttttattttcaaacaaagcatcgataaaaaaaataggttttactttgtcacaagtacaaatgtccttctttagcaagtcttttttattatataaggatgtatgtctttatacatttctcaccaaacaaataataatgaataaatatttttctctcaatgcaacatcaatgaaaatatatctattatatatatatatatatatatatatatatatatatatatatatatataataagaatttatttatagaatgatactcaagaacaaccttatatttattctctttaacaatattaaataacatcattcaatctaatcgattcatataaatgactcttactttattaattaaccatgatattcttgagagagacatttatcta

SEQ ID NO: 92084 - DNA, 263 bp, Glycine max
acatattcacttgtatgacttgcaatgcaacttctctgcgctcagcaattgagagcaacaaaaagtaactatccatgaccgacagcgaataacagttaatataacatatttaaaaaaaacaagacaaacaattgtcacactcagggagaattcatctatcggcggaaacatcgaaggaaaaactgtccagagacattttatgcctaaagcgttaatggacaaaagggagcatgaaataattaacaaaaaaatcatattattct

SEQ ID NO: 92085 - DNA, 446 bp, Glycine max
  unsure (1)..(446): unsure at all n locations
agctnttatccaattccatatttgatgcttatcaaataactaagtcacatttaaagtaaccagcaacaatgaatatcgaatcccaatcaaaatatggaaaataagaaaattatgtacttgggtcattcaaatgggtgcccctggccatgtactttagataatgtaaccaatcagttgtcttaatttcttaattttggaaaactttagatcgcatgcatgggaaagaaagcgaaagttgtgcagaacacaaattaagaagagaggtgaggagtcaatataattacatgtgtatataatacatcatatacggtagtttcaaaatctgcttatatcttcatgtcatgctgatgaggagagctatctcaacctttctcttgtggacccactctcttgctcagattcaggcacaacaaactccacattaatntcaagagtagggtcagata

SEQ ID NO: 92086 - DNA, 474 bp, Glycine max
  unsure (1)..(474): unsure at all n locations
agctngtgcatcanataccctgatgaggatgtcccatatgttcttaaaactggactgatccatntgcttccaaagtttcatggccttgcaggtgaagacccgcacaaacatctgatagaattccatattgtctgctccaccatgaaaccaccaaatgtccaggacaatcacatatttctgaaggcttttcctcattctttagagggagtggcaaaggactggctatattaccttgctccaaggtccatcacgagctgagatgacctcgagaaagtattcttagaaaacattttccctactttcaggaccatgaccatcagaaaggatatttcatgcattatgcaactcagtggagagagcctatatgaatactgggagagatataaaaaactatgtgccagctgacctcaccaccagatttctgagcagcttcttctccaatattnntatgagngactcacgaacatggagatc

SEQ ID NO: 92087 - DNA, 472 bp, Glycine max
  unsure (1)..(472): unsure at all n locations
agcttaagctccttcaactgcanaagactcttattatttgaagagtatccttgtagaacctttacccaacgaagacactgacaaaaaattatcttctccttntggacaaagtataacaagctgggggcaagtaaattttcttcccatcagaccttggatgcaactgtgatcatatccccatctcagctagatcttgacgggtattcaagccatccttcgtcttgccttgaatgttaaggagcatcctaatcacactgtcacatacatttttctccatatgcataacattaatacaatgtctaatgtctagatcagaccagtacagaagataaaaaaatggatctcttcttccatatgcaagtcttacttttatctctcttttaggtctntccaaatacagtattcagaggttgaacccactagtatacctgcttaccactcaatggtatcagcgcaatatcgtgctcttgac

SEQ ID NO: 92088 - DNA, 396 bp, Glycine max
atgcagcttatatgttagtattacgaatgagagattgtctatatttctgtcgaatgatgatcgacatacgatacctaagcctttaatttgaaatcccgcatccgacatattaattaaggatgcctttaacactgggtgtctaataccttgggcaatacaaacatgcttatataccacaacatataatgagcttatttttatacccgtcatagataaattccatgatatcaaacaatgataaaagccacaatataactggatatttatactgaaacactgagacctttacctgtccgctacactatgatttaatagaattaagcccatttcactgacacctcaaattaaatatgtttgaacagaatcgctgacacctacaaccgttgatagagatta

SEQ ID NO: 92089 - DNA, 329 bp, Glycine max
tctccctctctctctcgtcgctattatctcttctatctccaccattgaagcttcatcgaagcttcaacctttgcacaccttttctgctccaaatcgcgaaaggaagcccatttcggagtcgtgaagcgcacctctacctgtgggacttcataatttcaggtccgggtagacttcttctcaccataaattactcgtgggtattgagtcttgggagttatgatgggtacgtttactaggatcatgccctatgaactgtttattgtgaagacatttgatgacagcattgttaacttgtcatgctttgtatgacgcaagcttacccattctgc

SEQ ID NO: 92090 - DNA, 452 bp, Glycine max
  unsure (1)..(452): unsure at all n locations
ggatcttaaagcacctgcggcatgcaagcttgngntaaaatagttgtaacattctattaatattagtgagttgcccacttgttaaacaacctattattaatagctcaactaccgttagtttgtgtgtgattctattcaattcgttttagaaaaactccttgtaatctaaaactcatcttgataaataaattctgagatttctgtgtatcatttctgtgatactttacacaacatcaatcttatccacaatgaataaaatcgtctaaaacaatacatattatctaagactaacaaaaattatttccaattattaaataaaatctggtacatctcaaaaaattataactttgtacaatgaggatgttcctaaataaccggacaaaaatattctaacattcaaaataatgtaagtgcctccaaccacacgttcgctaagtcacatgcgcttccca

SEQ ID NO: 92091 - DNA, 363 bp, Glycine max
  unsure (1)..(363): unsure at all n locations
ctgcttctcttgaagatatgattcctattctattttnattccactcctttttcattcttccacataaaaactgctcctttcaatgtatattctgatgttcttattagaaaatgcacaactgtgctgtgaatatgctatcaagttccttttttggggggtggcgggaatgaaaactgactcaatattgttcatactttgatgttgagatatcaactataaggctgatgatttgttgccaccgcttcatcttctggttgacagttcgcgacgtttggctaatgctctttaacaaaatctgacaatatcaacatatggtggcggagatgccactgcttcaagatggtcgatcttcgttttcggcta

SEQ ID NO: 92092 - DNA, 428 bp, Glycine max
  unsure (1)..(428): unsure at all n locations
agctntgagcaaattccaacgacaatatctttttactcggatgtccaaatgaatcccgtaatatatcgagatgctcgaaattgaaaacaaaagctctgagcaaattgaaacgacaataaattttactcggatgtccgattgtgtcccgtagtatatcgagacgctcgtaattaaaaacggaagctcgtagcaaattcaaaagacaataaatttttaattggatgcctgtttgagtcccatagtatatcgaggcgctcgtaattgaaaacggaagctctgtggaaattcaaaagacaataaacttttactcggatgttcgattaagtcccataatatatcgagacgctcgtaattgaaacagaagctcgttggacatatcaaccataataactttctactcagatgtccgattgagtcccgtagtatat

SEQ ID NO: 92093 - DNA, 449 bp, Glycine max
  unsure (1)..(449): unsure at all n locations
agcttactgaaatcctntagaagagtaaaaattcagatgattcacgggaaaaatctcaagctactcaaaattcatgtgtataaaataattacaagaactataacaacttcatatatcataagcttttgaacaagcttaaaagtaaaagatttctgagtaggacctatgcatttcacatgtattgatccttanaaaccttctaatatgaaggataagggtattttgtgtcttcagaagattatagcattgcatctcttcaaaaggctcccataggaagcctattcagaagggttaaaaagtcanaagtccttcagaaaagagctcaggacttcattcaaaacttctcttcaggccgaaaacaataaccttggatggagaacgcaatanatgacacacgagcctaatattaatactactaattgaagcaatgttgccataaatatgacatg

SEQ ID NO: 92094 - DNA, 315 bp, Glycine max
  unsure (1)..(315): unsure at all n locations
agcttgctcgagntntggttttggttttattttctcggtcgcggccactaaacattgtaaaataggagaaatataaaatagtgcgcgcgtgtatatcttattctattctatttatgggaagacaaactctaaaatattaatntttgttaccaataagattagagaactgtctcttatgttttttcttaatgttggtgcctggattgacataaacatttgtctnttttccagccaaaccataaattagagttagaattagaatgtaaatagaggaagggtcccggtacaagagttttttttaaaacgacgattaaa

SEQ ID NO: 92095 - DNA, 434 bp, Glycine max
  unsure (1)..(434): unsure at all n locations
agcttcatgatgatgaaccaagacagtttgatgatgccaaaagcccaagtgattgaatcaagattgattcaagacttcaagcatcaagaatccaatccaagattcaagattcaagagaagaaatcaagaagcaacaattcaagacttcatataggataagtattaaaagaattgttcaaagaccaaatagcacagttttgttttacaaaagaattttctcaaattgtgtaagttaccagagtgagtactctctagtaatcgattaccagtgaccagtttggttttcacaatgttctcaaatgatttgtgacgttccaaaatgagtttcaaatagtggaatcgattacactatattagttatcgattacaagtgaatctgaacgttggaattcagatccaattgtgaaggagcacaacttntcataaaatacatt

SEQ ID NO: 92096 - DNA, 451 bp, Glycine max
  unsure (1)..(451): unsure at all n locations
gcaagcttncatatattaatgagtataaacccatactactttgcaataactataagtgaacagcaacactataagttgatgcagtggctgcacatatgcttcacagggactttcgatcaattgctctgtttaagggtttcacatttttgtgccaagtcttgtgtaaaatcatgttgcagattcaaggtttgaatattaaaataacaaaggaaaaaaaatacttttcaatctatccgagaggtagtacttgtaatttgtaaaagcagtaattgaaatcagtaacaacttctcttagttgtgtcttactcagacggattaaaagaactaaacataattgaaatgttgttgtacaaatggctacccaaactaattgatgtncttttttcgaaagtattttgttggaatcttgtaactcattatattatgcagcaagctcagttcaaactccact

SEQ ID NO: 92097 - DNA, 425 bp, Glycine max
ttgtctcaaccgcgagctttgactaccgctcttccttcccgcgatgcttctctttatatctgcctgagtgggcttataacctaaaccatacttcccacgatttcctttggcatttatcaggctagttatgccgccgttgtctttgcctaaacctattccgggttcgtaaccgttccccaacataactcgggccatcattactgctgcatcggatatgcaaggctgcccacagaatgagtccacggaggagattcttaccacctcaaaagactggaaagcgggttctaatgactccgctgcggcttccacataaggcatagaggatgggcaactcaccaagatgtctttctcacctgatacgatgaccagatgcccttcactacgaatctcaactttggggagtgagagggacaactccactgagt

SEQ ID NO: 92098 - DNA, 390 bp, Glycine max
  unsure (1)..(390): unsure at all n locations
tacacgtnctcccttataggatttccgtnctcgccttcaaagggctacgcgccctcaccttcacaggactatgcgccatctctttgagagggctacacgtcctcaccttcagagggctacacgccctcaccttcatagggctacatgtcctcaccttcatagggctacacgccctcaccttcaaaaggctgcacgccctcgtctttagaggactacgcatcctcactttcagagttctacactttctcaccttcatagggctacacgccctcaccttccgagggctgcacgccctcgcctttaaaggactacacgttctcacctttagagggctgcacgttcttaccttcagaggactacacattcttaccttcagaggactatacattc

SEQ ID NO: 92099 - DNA, 471 bp, Glycine max
  unsure (1)..(471): unsure at all n locations
tgcaagctttggaganaaacatgggaccaactctatttatttgataaaaagaagtcgtatccagtcaaggtctgagagaccatancaatttcctaacgatttctaattatgtgggccattaagtctatcatatgctgacaatagccgagaagcccatgaatctcttcgggggcggagtaggtgtctgccatcgccttggccttggctaacaatcggggaagttcttgactcccgttcaagggaagagcaaaccgatccatccacatggttgcctcttggtgtaaagagtcgatcacccttcctctagtcctcttttccgcatacacttgagcatactcatccgtgattctatgctcgtgggccgtggctagacctaactcttctggtacttggcgatgatgctaacatgttggctctgttcgcataacgctgaacaagctcctttgaccttgacagcaataactctcttca

SEQ ID NO: 92100 - DNA, 397 bp, Glycine max
  unsure (1)..(397): unsure at all n locations
tgcaagcctgcctcaagtatctattttttattttactctngatgaaaaaacactttcccacttaagaaanaaatccagcattttaattcttgctcactctgagattctgatgcccttcattttatcagattactttttaaatcatcacatgcaatatcactatattatntgcattgatgctttgattaatatctatcaaaacattgattagatggctctagagtcttttttctttttaaacttgcatcatgctgaaatcgttgtttaagagtggttgatagaaatttactgggaagtattaccggaattaaattcttatctaaatcattgtgatgttttataagaataatttggaattaaaaaataacataaatgaaatttattctttaagtgaaat

SEQ ID NO: 92101 - DNA, 437 bp, Glycine max
  unsure (1)..(437): unsure at all n locations
agcttggtaatcgattacacccncttggtaatcgattactagaagccgtcatagcttcctgaccttggtttcaagcctggtaatcgattacaccccgtggtaatcgattaccagagaacatcttagcctcctgtcttcatttttaagccttgtaattgattacccacccttggtaatcgattactagaggccataacccatatatcacacaagattcacagctggccagccaccacacaagcctccttgctttgtgggctttgttccttttatctgttgactgccaggagctcgcttgcttaggtacatcacaggttctcactgactggctatgcccgggttgggtcgggattggtcaagctttggtttgggcaataacaccccacctgacgtctccagggtttctgaccccgtgactatntcaggtaccactctgt

SEQ ID NO: 92102 - DNA, 450 bp, Glycine max
agctttaagtaatattaagtattttttatacatgaccttaattaagacgtgctctcaatccgggagtggacggttaatatgattactggtgattagttagatggctggaaactagaaagtttttctgccactagcattgtgtttggtgcaatgcatacatcgttatgttgttgtcttcttcaaagcttcatacttttatttgatatttgatgatcattgacaagaagagacacaagaagcgctgaaagtgataagataaagagcaataaagatatactcttctctgtttctaaactaccttcagctcaagatttgaggagatatgactttctggtagttgtttggtaggtaacgtctctcgaaataatgtttgcagttaaattgaagataagacctatttgactgtgaccctgctttagcagtgggtgatatccagatatcatgatatga

SEQ ID NO: 92103 - DNA, 466 bp, Glycine max
agcttcaagaataatggcctcaacatacttcttatttccagaaggaaattcaatcaatagacctccaatctttaatggaaagggttaccactactggaaaacccgaatgcaaatttttattgaggcaattgacttaaacatttgggaatccataaaaatagggccttatatacccaccacagtagaaagaaccacaatagatgaaagcacaacaagtggaagcacaacaatagaaaaacctagagatagatggtctaacaaggatggaagacgagtacaatataatttataagccaaaaacataattacatctaccctaggaatggatgaatatttcacggtttcaaattgtaagagtgctaaggaaatgtgggacactctacaagtaacacatgatggcacaccagatgttaaaagatctatgataaacacattaactcatgactatgaactatttacgatgaat

SEQ ID NO: 92104 - DNA, 426 bp, Glycine max
  unsure (1)..(426): unsure at all n locations
agctntatttctaactntcagattatatttttttcactggatgcaaagcgccttcaatctctgattccaatggtctaacatcattaaaatactacatgataaaataaaacataagttaataatataatacccatcataacaaaatcaaatttatttgaaataaacaattatcgtttcccaattattcttgaaacttcctaagattatagttgacatccaatgcatcacgtaatagccacactcagtgcttcctttttgtttattacactaaatacataatgaaagttagatattcaacgttaactacatattactgggcacagacatataatatatacaagtcgaagcattgtttaaatcacttactttaacaacaatacacctagcaccaaccttggatgtaagttgtggagtatcgtccagtca

SEQ ID NO: 92105 - DNA, 364 bp, Glycine max
  unsure (1)..(364): unsure at all n locations
agcttgactaggcgagttgattntagccttattttcaccttagntattagtcgattcgatgaagaatgagaaatcccaaagagaaaacgtccgattgattttccgctttattttactaaaagatgttttttttttatttccaacgtggttacggcacgaccgaacggtcggaattcattctaaccgaagttaacggataatacaattcatacgatcggtggaaatatatnttatttttaggttaagcgagaaatgacttaagtaaaatggcttanncnctcaaaatggggtataaaaagtaaatgaaatgagaataataatacatgatacacaatgtggaccaccatgggtacatataatgaat

SEQ ID NO: 92106 - DNA, 456 bp, Glycine max
  unsure (1)..(456): unsure at all n locations
agcttgaggattatggngtacccatcacatgtggtactangnggcggncgggcgatggtgcacaacatgttttccacatccaaaatgcgcgcataaacccaccatcccctgttgcccacctccatctgagctcacgtactcccacgtagcccatatnctcgtttctctcaacaccgggtcccaatcaatcctcccaaggcttcacaacatccaagcaaaacaacattcaaatagcacatgctatcacagccaagcaaaacagagaatagacagaaaactctgccaaaacaccaacgaaaatcacagcttttcttacttaaagaccccagtaacaattccttcgttccaattcgttaaccgttggatcgactcgaaaatttactggaagtcttagcacttaacctacatntgaccgttggatctactaaaacatccaaactcgtctgactgctcttc

SEQ ID NO: 92107 - DNA, 293 bp, Glycine max
gagaggttgtctcatccatcctctatgggtggactctcttttggttcagaactgatatataaactgtctttcagtgttaaagttggaaataaaattgacttagtttataatcacgattcggatctcttagcaatttggtgatatttgtttagtgacgttcttgtttagctattattttctaaaacgttctgcatcctaagtaaatctacttttggtagtcaacgtgaacgcataacgggactctgttaaacactcttgtctcgcgccccaatctgggacaaggtgcacatatt

SEQ ID NO: 92108 - DNA, 494 bp, Glycine max
  unsure (1)..(494): unsure at all n locations
cgtgcaagctngacacccttagtagaaaatactattggtcttatccacacctgctctgttcacatacgactgtagaaagtattaatccccaattactcttcagagctctttcctctattttaaagggatggacactacacccttttgggatgccttttactgagggccctctaatgaagatgtttatagatactctttcggatttgactctaacatggagtgttatgctcaaggaggattcttctaataaaggtattttggattgactcttttctaaccttacctcttctatctgacactcctttcttgcaagttacttttaaaatttgtatccttatatagaccttgaatgtaataattgtagatgtcattacatgaacactaacattatgatggtggacatngaatttgagtctttataaaactctctcatttatctaattgatgaaacaactcattaattgttacaactttaagcatatcaccttatcatc

SEQ ID NO: 92109 - DNA, 458 bp, Glycine max
  unsure (1)..(458): unsure at all n locations
tcctgactcaccataattctttgtctttgtgagaatgtcaatccttaccctcggaagcaaaaaaagaatagacgggaaacttccaatcaaagaaaaagagaatgaaaatttccaatgaaagcaaacaaagaaaataaggaaaattccccaatcaaagagtgggagaaagcaaaaagaaaagaaaggaacattcctaatcaaagaatgggagaaagtaaaaatatgaataagaagaatgaaagaaagctcctgatcaaggatcgaaagaaaacagaagaaatgtgcagagaggtctttggaccggacaatatctgaacaatacacaattgccacccaatgaacgaacaaagaaagaaagggaaccacgacctagaatagtcttcttcctttgattaccaaccaaaatcccgtgcgctagcgaccctttntttctcgccccgcactaaactaaaaaaaca

SEQ ID NO: 92110 - DNA, 398 bp, Glycine max
  unsure (1)..(398): unsure at all n locations
gtgttgattttcaccttctctctaatcctatctgctggcttaacgagcgttcgctaagcgcaacactcatgggctaagcgcgaggaagactctggaagaaaatgagttgtacaggtttgctaagcacaccacttcatctcactaagcgcaccacttcagttcatccgctaagcgagaaaggcacgcgctaagccaaaattcactaatgtgcgctaagccggccataagtgtgctaagcgcacgagtatgaacaaggccacctatttaagtatgaaatcagattttagaaggggagtttggagtgggattcaaagctntgcatgtctatggtttctagagagagaaacgtctaagttccagagaagtctaagagattttgttctgtgaagatctacaga

SEQ ID NO: 92111 - DNA, 406 bp, Glycine max
  unsure (1)..(406): unsure at all n locations
tcgacgggatctctaagtcacctgcaggctgcaagctgacttgaaaggagttttcccatattcttatcacagatggaaatntacctgtcatcttcttctcaatatctggttttctcaacagttatcgatctacgagtctttgccattgatgatcagcatttgggtcatgcacctattccttttcctcctcctgtactgccccccgtggatgccacttgccttttccaccgagctttccttctactctaggtctggtctggtagacatattaaataaaaatgaatgataataaatatgaagaagatgcacagtcttgaattaaataacaaaataacagtagcaaattaaatttaattgacagcacatgaataatgcattataacatacactaagcacaacgaacaaa

SEQ ID NO: 92112 - DNA, 471 bp, Glycine max
  unsure (1)..(471): unsure at all n locations
ggatccttaagtcacctgcggcatgcaagcttancccataatagtcatccctttttcatataatcccacctatttctgaattggttgtattcatatatcaaatatgttgtcttattgaactnttctgcaacacttgcccaactaagcttagtgaagtggttgtgaggtttatttccaacattcacctcttctatgcacactttcaacataatctcaatatntttatcataccatcttgctttctttcttttcacaggaactngattgagagacatttctcatacttaatgaagcaaacaaaagcataaccctaatccataacaattcaaaatttaatgagaagaaaaagacataatgaaaaattggtaacccgtgatgtaataaaggaagaaaagagatgctgaacgatgatctgaacagaaattgaacatggaagagagactgatgaacagaggaggaatgaacaacatg

SEQ ID NO: 92113 - DNA, 361 bp, Glycine max
  unsure (1)..(361): unsure at all n locations
agctntacatattatgtaagagctgtctctctatcatgttcagagngaatacttaaggcctctgaactacggtattgcattactttatcgttcatagttaccttaacagtggcagccaaatggaatactgactcgtatcagaggatgacaccttttgcatagcgacgccgtttgcctcctatgtggcatagagcacccatgttaagtagatcgatacactaataccgtcttttatttacacgtacacatgcattactgggcatctactgatatttgagtgtaccgtctttaacaagcttacactcttacttgtactttccgctgcgttgtccacccgtacttgacatgaacacgaccatct

SEQ ID NO: 92114 - DNA, 389 bp, Glycine max
  unsure (1)..(389): unsure at all n locations
gcaagcttctttgaccttggcaaattctaactcattcttcaagatcaaactgtctactcgtgattggtccctttcctctctctggagcttaagctcactgttactgccccacagagcccctcagaatttgttccggccatgttcttccctacgggccctcttggcctcttgttccaagttcttggtggtggctatatttacgtctctcagattggcattctcctctccgatcttaagagctactgacttgaacttttctgtgactgtttgggctttcttgagttctgccctgagggcctgcacctctntgtacttctctggcgctttaacttccacccctntagtggatctcaaactcgggagccaatccagaccttgcatgtgggcta

SEQ ID NO: 92115 - DNA, 459 bp, Glycine max
  unsure (1)..(459): unsure at all n locations
tgcnagcttaatgcccaatgggatttgcatcataatattatagatggactcacngatcatagcagcgccacatgaagttataaatctgaacggaattgatttatactggtggatgagaaaactagtcccactgatcatgaacttgatgaaacagatacgattntgacattaccagaatcgtttttgaaggcttgtaagattatggataaagaactgaaacatcatcctgatattgactgcttttgtagtgggactacagcagttactttggtcaagcaggtaagaaatataaattacaatgtaatgttctcttgattatttcttatctgctttttacatgtggtttactgatgttctttcacgggctgaaccttgttattggaaatgttggtgactcgagagctgtattgtgtaccccagatcatgaggattccttattgctgtcagntgaccgtgacc

SEQ ID NO: 92116 - DNA, 479 bp, Glycine max
  unsure (1)..(479): unsure at all n locations
agcttgtgaatgaaaaaaaatgtgattgcgatttgagcacccacaatcatgattcttgatagagagtaataatcgacaaaattgatggatactttctactaatatcatgaagataaaaaatggcgacaattattataaagattaaaaatgaacaataaaattataaaagccaaagacgaaggccttttttatagaaaatttgaatggatttgaatatttcaaagattagctgccttaaatatatttaagtgaaaaaaggacagcttcaaatattattaagcaatagtagagtgtatggagttaaaggcaaaaaaatatattaaaaggaaacaatgataaaggaagctatatgtgatgagaataaaaacaattgttgttgcaacctccatatgaagaagacgtagaacttgttatgacaccaactntaaccttaaccattctttctaataaaaataagtactcacaataaccatttctac

SEQ ID NO: 92117 - DNA, 465 bp, Glycine max
  unsure (1)..(465): unsure at all n locations
tgcagctntatggtgataatcttaaaaaattgattattataagatttccatttaaggatatattntaagatgctcaacccaccataaattaatacgcaataaattaataacttcaaaaatattcttgtctagacaaattaatatgattataatgattttaggagggtatatatatgtaggtatatatatatataaagagagatcagattatactattgggattttgagaattattatattagttttataactcgatatataatgtggattttatggatataatcatggaatatatttacatattatcaaaattatttgtggtagattttgttaaaataactacaaacaaagtatcaaatgagccttagtatatttgaaaatatttattacattacgtttaatccatatgaagaaatgatgttaaagtatatgaaatttatctatgtatatatgtgaaaagacttc

SEQ ID NO: 92118 - DNA, 293 bp, Glycine max
  unsure (1)..(293): unsure at all n locations
gcttgcttgtggagcttctatgaaggctgtttcttttatcttcaatgaggtctcataatggtaattgttcactatgtatatgcaactaaagactactgagaagaggtaagaggctgcgccttccactatggaatatgcctngtgagaaagagctacaccaccaagatgagccttgaataataagcttggtgaggatgttacaatggaggaaaacaaatacggcgataatgagagaggggggagctctaaatcgaatgattaatacagggataaaagaggtacttagaattatg

SEQ ID NO: 92119 - DNA, 311 bp, Glycine max
  unsure (1)..(311): unsure at all n locations
agctngaaggcgtgtaacccaccatcttctctcagtttaacaccagtaatgtgtctactatcattgttatcatctccctctccatcatttggggcgctacttgagctgccagatccctccatctttgggtgtattctctgaaagattcatgctccatcttgcacattgtttgcagctggattcttatcggagccatatcaaaaatgtactgatactgcctaaagaaggcaaccattaagtccttccgagaattgactcaagaatggttcagattagtataccagctgacgggttcctcaaaagactttcct

SEQ ID NO: 92120 - DNA, 349 bp, Glycine max
  unsure (1)..(349): unsure at all n locations
gaccttaagngactgcagcagcaagctgcctgccgagcaacagatatgatgtgttgtagttngnngggaacggaaacgaacccgggatgggattacgctaagacaactgtggcataacttgcctgatatatgcctaaggaaatcgtgggaagtatgggtcatgctatatacccactcaggcatatataaagagaagcatcatgggaaggaagagtggtggtcaaaactctcggttaagacaagaaggtgaaggaagcccacccttgcacataagtatgagctttattagtgcgtggctgtggactaatgttaagtggtcgttatatattaaaatggtgttccgagttca

SEQ ID NO: 92121 - DNA, 442 bp, Glycine max
gcagcagcacacgtatataatctatctatcattactaaagtaagaaagcctgaggatatgtcatccgtccgatcaaaataccaatcccacaaccaccattgattggctatagtaatattcttttgtgaaataataacttattcaacggagaacaggtattaatcattttacaacaaacatattgttataataaattgattattttactcccatcgagtgtttaatcaatgttaaaaatggatcattcaaatatatgtagacatatataataatattttatttaatttctataccaagatattatatttaaaaaaatttataaacaaaaatgtttgttcatgatgaactaattatctattcatatatatcattattacattaataggataaaagaaatacattcaatctgttcatatttaaatatttaactacataagtttga

SEQ ID NO: 92122 - DNA, 434 bp, Glycine max
  unsure (1)..(434): unsure at all n locations
gcaagctagctagattccacaatcctgtgactgttaatatacaactgggttaatgacggaagaatagtcactatctaaggattcaactactttatggaagtcaaagctgttgactatgaacttgatagttttattattaggaacgacctatgtctagttaatggccctgaggctaatattaaagacattgtcaatatctggagtcttaaaaataagtatttctaaattaaaatatattctcactattgtttttttntacttagtgaatccacttcatatggtcgattttttttgttcaaacatcattgctatcatgttattatgagatactttttttgttataaagtaggcatttaagtcatatctgctacaataaattttcttttttcggtgactactatgcgattgtctttaatgattcttggaattttgtt

SEQ ID NO: 92123 - DNA, 448 bp, Glycine max
  unsure (1)..(448): unsure at all n locations
accttagagtcacctgcggcatgctgctnaataccttggctattagcaattccttggcttgctccctagcgattcattcatcagctgtgcgatccctttgatcaaattgctcatgctcctagaatttctcaacaaagaaagcaaccaagcaatatgatctttctgacagcagctaccatgaagagcaaagaaaaaagcctaacacatccaagcctaaccagagccaagcagaacaacctttgcaatcatctctgcaatgcgctttctcttgttcctccacattatattctgtttagacttgttcactttatttgcgagcctatccacagaagatttcttctaccacggactcgtctcgttcgtgacataacggagtgggttcgctgtggctttattttgacgtcaagaagttgagcttcccagccacgagtcttggattctacactac

SEQ ID NO: 92124 - DNA, 449 bp, Glycine max
gcacctgaggcatgcaagcttgtacgcacatcgttcgcgtgtatgatatccactccacaatgtttgaagtagaggagagcttcaaccctataacgcaacgtggcggacaaaagcgggcagtaaacttgaatgatcgtcattgtcaatgcggaaggtattctgcgcttcactatccatgttcacatattattgcagcttgtggttacgtgagcatgaactactaccaatatatagatgttgtttatacaaacgagcacatcttaaaagcttactccgcacaatggtggcctcttgtgaatgaagcggatatttctccttctgatgacgcatggacacttatctctgactcaaccacaatttgtgcgaaaggtctgcctaaatcgacaaggtatagaaatgagatggattgggtctgaccatcttgacaccgaacaaaatgctgtatatgt

SEQ ID NO: 92125 - DNA, 463 bp, Glycine max
cccggatctcagagtcacctgcggctgcagctcttaactttaactcctaacttatagtctaaaagctttcaactaatttatcaactagtttaaccaaatataactatgttttaaaaagttgagttgacctaatcttgccccgtatactttgtgtctttattgggtcaagtatggacaatgataaatctgacctaactgggccatgctcacctttagagttttttatgagaacacttcaaacccaatccaattatgttttattgaattgggtcttaaaatacatcaaacacacctactaatcatggttgatggagcattcatatgtgataactaataaaacatcattattttaatattatcaagagataaatgttaaactaacttgataatattataatataaattgagaattatataataacatgatatattgctatttcgtacttgtttgtaaatttatgtt

SEQ ID NO: 92126 - DNA, 449 bp, Glycine max
tatgaactctgaaaaatatatttgtgtgttaatgaataagtatctcaagaataagatactttaatgaaatacattcacattttagaaggttaaattaaagttctacaataagaaataaaagtgcttaatgaacttcatgatcaccttgttgaatagaagtatgatctctggaaagaatgtgcacatgctcacacagattatgaggacttaaagataagtaaacatgatctttggatagaatatgaaatcatagaaagtttctaaaagttttaaatgaaaagcttttaaggaattatttcataaaagatcaacctcaagacgttgtaaaacttcatgaagagaaaccttatcatatttgttggagaaacaaagtgcctcgacaaactgtgaagggataacataagttctatggatatacttgtcatgggtataaaggaaaaatatgttat

SEQ ID NO: 92127 - DNA, 450 bp, Glycine max
  unsure (1)..(450): unsure at all n locations
agcttgttgcatagccgctctnggtggtcataatatcccanaaacaaattcctcttattactagctatnttgaattctttagttcctgaatgtacaaccttcaaattgttgctcgatcccctctttgttttctgcaaaaaagaaaatcaatatcaaagaaaacatggatgaagtcctaaggatgccatgtatatgtgtattttcgaagatattagatttatattccatcaagcatacattgactttggattacaggtaataaactttttataacatggttgccccaatctacatttaaaaaccacaccccccaatcttttagagccctgtggtaatttgactgtcttcttctgaggggggttatgttaataatttatactttcgctctccaaaaaaactgatgactgaccctctttctataacctattttgtttgtattgtataaaaaac

SEQ ID NO: 92128 - DNA, 168 bp, Glycine max
  unsure (1)..(168): unsure at all n locations
atcctaanagtcacctgcggcatgcaagctagaggagggtanataataatgggtgttactcttggtacaaaatggttatgtttgacttggatgctaaccgaatcattgacatcactggattaccgtggatgaagtttgataatcatctcatgtgtcatacatggactc

SEQ ID NO: 92129 - DNA, 312 bp, Glycine max
agcttataataccaaatatacgataatgatatccggccaaaggcaagcggtccagtcttgcgccaatttgatcatattgttccattatgtgcctcggatttgctaaaaaggtagcaattgcggcaaattcacttgccgcatctttatcatcattttatttcaaggcgcaggaacaaataatattgacaacgtgtgcttaaattaccacaccagctggatattattgtctctgcaaaatgctatccactctgcacccggtgatttatcgagtattatgtaattaatatgactaaaatcagctaactggacaaa

SEQ ID NO: 92130 - DNA, 458 bp, Glycine max
  unsure (1)..(458): unsure at all n locations
agcttcaccaagccacaatcactcgcacccacgcaacttaacacagcatcatcaccaaatctgtatgccacgtgcgcaccacttcactcagtcacctccgtgcaaccgcaagctaaacctatccattggcacacacccaccaaatgccatcacggattctacaatccgtaatgcattttgatgtataaaatatctaaaagaaattatacttatgcattntatcaactgtcattgaatacaaattaaatgttgatggaaaacttgtgagttgtgatttaaagcactatgtttgagacaactgaaattctaacatatcaactgctttttcgtaaaaataaaaaagcatttttgccactcctttcttctatttttctaaattgcatttctgcctacaaaggagagagtnattcttactagctcacaagatatgtngtgcataccatacannactttatact

SEQ ID NO: 92131 - DNA, 500 bp, Glycine max
  unsure (1)..(500): unsure at all n locations
acctcagagtcacctgcggcatgcaagctntacacacacacgtaaataanaaaaaattcaattttatgtccaatccatttacacaaacaacgaataaagaaaaccatgattcatgaagaaatgaaccaaaacagttattgttgctaactacataataaaaacacgtattgtgggtccagagtttgctggaatctgacattccgacaccaaaatttttcttccaaatagcctgatacctaatccttctctttttgagacatgttgttggtgttgtgttcacactctgaaactaagcacccctgacacccattacatatatcagaagaagtgagagagaaaatcatatatattattgagagagagaaaaaaataaataaaagtggtgttttcttctttctttctatgttctctatcgagtattggttccacacaagacaacttttcaagggaaggcagatatcacatttgcactaaaatactcttggagaagtaaaaaaagt

SEQ ID NO: 92132 - DNA, 166 bp, Glycine max
agcttccttgagaagaatcctaaagaaactagagcttatctacacaatcctctctaatagctaagctcaccttcttgagatgagaagctagagcttagctacacaccccctataatagctaagctcaccccgctgacaaaataattggaaataccaaaaaaggtcc

SEQ ID NO: 92133 - DNA, 257 bp, Glycine max
gcagctataggttaacattaaatcgttgattcttttaaatgactgaatataatttggggaaaaatctaccattggaaacctactcatgacaagaggctaaaggacttctaattgaggactataaatatttttgaactataaactccgaattgaaaataaaatattaccttaataactttaaaacctgtaaaaaaaatcccacttttacccattgctatatttttaaatggagcccaaccacccctttaaaaagaatc

SEQ ID NO: 92134 - DNA, 502 bp, Glycine max
  unsure (1)..(502): unsure at all n locations
ctgaggcatgcaagcttcatacaactttggtaatcgattacattgagaccgtaatcgactaanatagagagttttaacctctgaagaaaattttctaacttagaaacttttcttcacacacactatgatgacaatcgagataacaacttatacaaatgccaagataacaaccaagtgtgtgtgaagaaaagtcaagggagttaggcatgtaaaagccaaaacttctttaaagcttcttcaagcttttccttgagccttaagatatagcattaggtggttcaccgttttgctcatgttgctccccctatctctaacaatctcctcctttttggctttgatgatgccaaacttgaatacgacattgagtacatttgaagagtcttgagattggattggagacatgatccttagtcttatcctgaatagttcttaacacttactcatcatatatgtcaattcatcatcatgaatcatatgtatatataacaatgaaatgctcaat

SEQ ID NO: 92135 - DNA, 433 bp, Glycine max
  unsure (1)..(433): unsure at all n locations
agctngagagctattcttcgaggatgcttgtataaagataatgtataaatagggagggctgtgaggacagaattgatgagagtaacctttccagccatggataaaattttctggttccatttagacaatttatcttcatatgtcctgatcagcggttcccacaccaatctgttggtggacttttccccaatgggaatgcccagataatagaaaggaatctccatatgtctatagttcagaaattctgctgcctcatgaatccagttgacctcagctccaaagatcccaacttgactttttgcaaagttaatcttcaatctagatgccaattcaaaacccctcagtatagactttagagcgataacattattccatgaagcatgctccacaaattctgtatcgtctgcatattgcagaatattaacgctgctca

SEQ ID NO: 92136 - DNA, 171 bp, Glycine max
ctctgaagcgagaccaagagtcaatattaagatgttacactgcgaataccactctccccttgtcgatgatctcttgatagaaggacatgaacatgaacatgaacactgcatcgctgtatcataaagatctctcataatggtggggcctaatccacggtgagaacaactggg

SEQ ID NO: 92137 - DNA, 450 bp, Glycine max
agcttcaacgtgcaatattgagcgtctcgttatttacgggactcaatcatacatccgagtaaaaagttattgtcttttggataggctcacacattcaacattcaatttctagcatttcgatatatgacaggactcaattagacattcatgtaaaaatatattgtcgtttgaattggctcataacttcaacattctaatttgagcgtctcaatatatcaggactcattcatacatccgactaaaaaaagatcttcgcttgaattaactcaaagcttcaacattcaatatcgagcgtctctgtatatcacgggagctcatcagacatccgagtaaaaggtattgctgttgattgctcataaattacataaacttcagcgttcgcttataccggactcaacacaccctcaccaaatgtattgctcctgataggctacagctttacattaattc

SEQ ID NO: 92138 - DNA, 137 bp, Glycine max
  unsure (1)..(137): unsure at all n locations
tcaagcttgtggcaatcacattccaagtggccttatcctacagnacgaacccaggactntactatatattattctctcttcagttaacccttgtcagacatatttgaacgaaaattaaatggcgattttggaatgtt

SEQ ID NO: 92139 - DNA, 250 bp, Glycine max
  unsure (1)..(250): unsure at all n locations
agcttgtanaanagggaagcanngttaaaattctnttcatataaaaaccgtggttctacttcaaaaactcttgaactaattcatattgacttatttggtccctctagaactatgagtatgggtggtaattactatggcttaattatagtagatgattactcaagggtcacatggactttggttttgaaaaccaaaaataaagctttntgtgcttttcgcaaacttggccaggtgattcaaaatgaaaaaa

SEQ ID NO: 92140 - DNA, 310 bp, Glycine max
  unsure (1)..(310): unsure at all n locations
agcttcatgggaaaccagtggttgaagggcattgttggatggtgaagttgatgtgcgggagtcataatcatgaattgcgaagtcattagttggacatccatatgctgagtgattgactaaggatgaaaagataattattgctgatctgacaaagtcaatggtcaaaccaagaaacattctgctaacgttgaaggagcacaatgtctatagtngtacaacaatcaaacaaatataccatgcgagaagtgcatatcattctttcattataggaagtgatactgtaatgcccactcttattgaaccttttaac

SEQ ID NO: 92141 - DNA, 425 bp, Glycine max
  unsure (1)..(425): unsure at all n locations
agcttcttggctctatgtgttctattgcatggaatctggtacatatatctatgacttccttgtgttatggctagctaaaatcaaaagttttgttgaaatagtgaaatctgaacttccccataaatgctgttgatttgttttgttattctcaaacttatttgctattaagcatggtggcttattaaacatcagatacttctaactcattcaggatagttagcatgcactacaaaagtgtatagcataagggttttacttactgatatgtatctttntgtgcaggctaaacatatgttaataccttacatgccaatgttaatacctcctcaaaaatggaaagggtatggccaatgaaatgggtgtctctcttgtattgtatttaaaatgcctgaatntgctttgattgtatattggtataatttatt

SEQ ID NO: 92142 - DNA, 307 bp, Glycine max
  unsure (1)..(307): unsure at all n locations
agctntgatggtgtcgagaagaaatcacatgtttgtcttcatcaaanaggcggagaatgtgaatgtatgtatacatgattttgatgatgtcagagaagaatctaacaaggctgcttcaaatgataagcatttgcttcaagactaattcaagattgcttcaacaatcaaagccttgtctcaagattcactaaagaccaagccttgccttacaacaaagagctttcaagacatgcacggctctgcgaacctattaccaggaagtgtattcgattaccagaatacagggttgagaaatacctgtggaaaa

SEQ ID NO: 92143 - DNA, 441 bp, Glycine max
  unsure (1)..(441): unsure at all n locations
agctngtggtgcanaagaatacatctatacatatgaatttntgatggtgcagcctccaagactccattaagattccttgggtgaggtgggacatagtctgcctacctaaaagtaaaggtgggttagtgatcaaagatttgattaaattcaacgaggctttgcttgctaaatgggggtgggagatggcaaataatcaaaatcagttgtgggccacaattctattgtgtagatatggtggttggagggatttgatttctcatatgaactgcagtttagactctccttggtggaaagacctcaaggttatcttcaagcagcagcaaagcaacacaatttgtaaaaatagctttatttangccatatgtaaggacggtccatggaatacaaaccaagtacttattggcttgacaacaaaaaaacactcattggaatatatatgtt

SEQ ID NO: 92144 - DNA, 287 bp, Glycine max
agcttcaggctgctcaattgctctttgttgctgtatagaagggcaaaggtctgtatggtggtcatcataggagcacataccacagacccttgtgacaggtacaaatttcttattcaaggccagctgggttaccaagttaaccaatgcatcatgttggtcttcaagcttcttattttcagatgatacagatgagtttgtagctacctcatgcactcctctaatgactatagcatcatttctggcgcctaacctgtgggagttggaagccatcttcttaattaaatttt

SEQ ID NO: 92145 - DNA, 414 bp, Glycine max
  unsure (1)..(414): unsure at all n locations
agctatacttcatgagagggttcattcacctctacgatgccttttttttttcatgagatgattcatttncctcttccatgcaatttgtggtgatttttgtttaacttgagaccgtctttaatcctaacattattactaccacaaattattatatgtaagcttagatttactaaaatattattcgggagccacaatttacatatttaattttattaggacaaaaatatattctataggaacgaaattaaattcttttctaatttttaaagaaataaacattattttaccctatatttttaaaccctatttgggtttcatgaatagttttcttttttatgggtaaaagccacataaaagggggtgatattgtttgttgggcaaaacaagcctttttaaaaatttttttttccttct

SEQ ID NO: 92146 - DNA, 422 bp, Glycine max
  unsure (1)..(422): unsure at all n locations
agctttatccttgctccaaacaatctttagtatggtacctaagaacatatgtttatgggatttaaataaagaactcgcttctaagcatgtgatatgatggatatgcctctattatcaacattatataaggatattatatttttatattctaannagggaggtaatactatcatgagaatctatgtattgcatttaaattatctataattaatatcttaccaatataatttaaagatataaacgtgatacttgccaaactaaatataattattttcccgttgaaacattatgaaataatcgctcttgggtcaatgatatttaaattatattgctaataatttncatatgctttattataaactattttgtctttaactatatagaacttttcaaggccttttacatctatataggcaaccata

SEQ ID NO: 92147 - DNA, 478 bp, Glycine max
  unsure (1)..(478): unsure at all n locations
agctngtcattngagagttaagaccaatgtgtattttaactgcaatttaatcattaaattgattgtgttttctataagcatttaatgtacttctttcatcattgataattgatagtggcttccctcttaattagcaaaactgcaaaagcttaaattagttgatatgtttagttatttaagatttatatgaatgccattatgtctatcttatgaacatgtaattatgtacttgtatgcaacttcaaaggatctactaatctcttaatgcaagaattgataattaagtctctttatttaatgcatatataaatatgcaatttttataataatattaccatcatggaaacttacagtaggatattcactgtccattttcatggttgctaacttttgtatttgctcanaggtcgagaacctaactttcaaagagtatctaaagaccgtgtaaaatcaaaacacaatctatgttgtatactca

SEQ ID NO: 92148 - DNA, 445 bp, Glycine max
  unsure (1)..(445): unsure at all n locations
agctntagtcatgctgttgttcttaacatcttacaagtacagactaacacacacctttattagcaagagcccatctttgaaagctagaggattcacccacgggccattcaccttctctaacgcatggctcttcaaattcaagaacagaggccattctccttcaatctcctcaagaggcttgcaatacactattgcccatttatagtcataataatcctcaagacaccaaacatggacaccctgctctgacacaaccacataatggagcctcccttcagattccccaatgcaggcttcgggaaccatcatgaactccgatgctggaaccggtgccagaaccaaccaagacagctcattctcaacattaaaggtgaggacattgtcaccattgagccaatgcatgacacccnncaatgtatatcctccattattgatcantgtataa

SEQ ID NO: 92149 - DNA, 461 bp, Glycine max
  unsure (1)..(461): unsure at all n locations
tcgaccggaccttaagcaccgcngctgcagctgactggcgagttgatttatccttattttcaccttagttattagtcaattcggttaagaatgagacatcccaaagagaaaatgtccggttgattttccgctttattttactaaaaggtatatntttgttattatattattattttatctctttttgatttccaacgtggttacggatcaaacggttggaatttattttaaccaaagtttacggatcatacaattcatacgttcggtggaaatttattttattnttaagttaagcgagaaatgacttaagtaaaatggcttaagcacgtcaacatggggtataaaaagtaaatgaaatgagaataaaaatacacgaaacacaatgtggaccaccacgggtacatataatgaatcgatnagcttggttcaaggtacttacccgtcgaagatcgataacgatg

SEQ ID NO: 92150 - DNA, 436 bp, Glycine max
  unsure (1)..(436): unsure at all n locations
agcttcaagaatcaagtttcaaagaatcaagattcaagaacaataaagtttcaagattcaatcaagttntaagaatcaagattcaagaacaatcaagatcaagattcaagactcaagattcaagaatcaagagaagattcaaccaagataaaaactaaaaaagtttttcaaaacattgagtagcacaagaattnttcaaaaaatcttttaccaaagaggtttactctctagtaatcgattaccagaaggtagtaattgattaccaatagccagcattgttttaaaaactgatttacaaagttgtaatcgattaccatgagcatgtaatcgataccatggtttacacgtagatttcnatttcaaagtcacaacatgtgataaaccttttcaatcatttaaacttatgtatcgataaacactcttgtatcgatacaga

SEQ ID NO: 92151 - DNA, 489 bp, Glycine max
  unsure (1)..(489): unsure at all n locations
agctnttctcanacagatatcaatggatgatatgttntgtctaaggggttcgaaatcacattgtgcttagaaaaccagttcacgaaacttggatatagttgtgtagaagaaacttatagaaaaaactagtttatataaaagcagtaaagaaaacataaaaggttntatactagttcaccccaactctagggctacgtccaattctccttcaaaccttgaagggtcccactaatcaattctttggttacaactaagtattctctatgccacttctggctacaatgagcactctctaggctactcctagcactacccttaatcttcccctgagattaagacccaagtattctttgtcactgagccactcttggctttcacaaacaatatatgtttgatagagaaagtattctaatcactcaaagagtgtttacacaataagcttgaatacaatgaaactcgtaaacttagcaaagctaagaatcacttaat

SEQ ID NO: 92152 - DNA, 366 bp, Glycine max
  unsure (1)..(366): unsure at all n locations
caacaatagagaaattatgacactttcaagcaantgatacaatcccagtcggaggaatcatccaaatctgagatggacaagtcctccacaacagcatcatgttgtgccttctttctaaaatgtagctggtccaagccaaccatgtgttctctcctccaatgccgtaacaacaggtacagttacatcagagacaacaaacaactaatgtccctctctaaccttccttacataagatagttgaggtaaagaccattccaaatatgcttttctaccagagacaagagccttcatcagagtttgacaatcaaatgggcaattgttactcattgaccatactactccaaaattctgaaaatgcctcataaa

SEQ ID NO: 92153 - DNA, 407 bp, Glycine max
catgattgatacttgatttgtgacttgtaggaattgatttgggctagattgtatgagaggaagtgtgtatttcgatgtctgctcttctgcccaatctttgctgtgaaatagtgcatcataattttgcacaagtgcgaacaaatgcttgtgtgtggttggctgtggaaagagaaattcaatatgagttctggatgtttgatattatattacaacggacacaaagtacgcttatgcactatagactttcagtaaatatttgtgagttttccaacggctaactaattggatctgaagaattgttattattgtctttttgtgataaaaactgcgatttaggctatgtgtgatcttagtttctgcctttgctctgtttgctaggctagtatagctcgtgctgtttgaatgct

SEQ ID NO: 92154 - DNA, 456 bp, Glycine max
tcattatggatgctttgctttaacattctgatggcttctaatctagcaactggagcatatgtttcctcataatttatcccctcttcttgattatatcctttggcgaataacccagccttatttctaataactatgccgatttcatctaatttatttctaaacatccattctgtcccaatgattgggtagttttcaggtttctcaactaactcccaaacattatttctttcaaattggtttagctcttcttgcataactattatccaactttcatctattatggcttcaattaaatctttaggttccatcttaaatacaaagcatgttattgattaatcttgataaagtgtcttattgtaccccttttttatataccacaaatgtggcattgaataatctcttgaactttccctctcttgaagacatatttgtttgacttaactgagacttcctgct

SEQ ID NO: 92155 - DNA, 449 bp, Glycine max
agcttctatataagctgaaccattttatctataaactgaagttgagttctattcataacattagagtttatctctattatcttagcgagagtgattctcctatattcttgagtgattcaagaacaccttggctgtatcaaaggacttttacaacctatgtgtgatgtccttgctggaaagagtgattctttccttcccttcatcatcacccttgctctttcaaccacaattccagataatccacctctgcccagaattatctcgtggtcataactcctatattacgctctcacattaagtgattctcgagcctaaattgaatttcaaacgagacctataccttgttttgaataccttattggaccctgtgctcagaattgcatgttatattttgtcagccccactaaccacgtgttccttccatcatcatttatgctagacctcttatt

SEQ ID NO: 92156 - DNA, 288 bp, Glycine max
  unsure (1)..(288): unsure at all n locations
aagtcacctgcagcatgcaagcttctcacatntccacggcatccattatatatgatagcatgttctgaacacagggagcaccattacctcacataagaggatgtcttcctccgctgaccatccaccttttgtgaaatcagaactcatgttagtgtaccatctggaatttgattagatatctcgcctcggattgatagtccccacgaacccgacaagacctcttgtaccatgcatgatcaaaattctaaaaatgtagacaagtttaaaaagtttaccttcttctgcact

SEQ ID NO: 92157 - DNA, 310 bp, Glycine max
agccatgacgatacagattttgtctgtgattggatccaagtgggactaagaagaggaaaatacgatcaccctgctctgatgagcatacagcctgcggcaaatatagagaatgagaatgagggatgaacccatgccgtgactgtcattcctacatgggcaaaggtcctaccagctcatcaatggcaacactcacaccacaccgacctatctaatacacaacagcccatcaatcaagaacactcacatcatcacataagcccataattatccacaaaacctgttgcacgacatccaataccacacatcaccc

SEQ ID NO: 92158 - DNA, 494 bp, Glycine max
  unsure (1)..(494): unsure at all n locations
agctntattgcaagtccatgaatatgaatcctcatatttatattattccactctgaacacccatctaaaacagtgctgaagcaaccagaatcaagaggcacaccaacttgaagcatatttaggaaaatttcaaaggctttgttagaatggcccgtcttaacaaacactgaaagaagagctgaccaggaaatcaaagacctctcatccagttcaccaaacactctctcagcctctgtgacctttccatgttgcccatacattgtaataactgcatttccaagagatgttttacacataaaaccatacttaactgcaagcccatgtagttgcttccctacatataatcctacacttgaatcacacacactgatncaaatcgtaaacgtgtaatcacttggtttcaatccagatggtagcatatccacaaaaatccaaagcgccttatccctcaagccttcctttgcatattccaaaatcatataatttatgcactg

SEQ ID NO: 92159 - DNA, 442 bp, Glycine max
  unsure (1)..(442): unsure at all n locations
agctntaggatcaaactcttctccctcttatcttttttttcctttntcttgtacaaatgtcatggctctttcactggtgatgatcatggaaggctaagcactcaatcaatccacggactcactccaagcaaggctaaatttgagttctggtttagtatnttctaatttgtgtgaatgttcatctttttcttcaatcctattttcgattttcatgattatgaatatgattaggattgaaaatgaattaagctatggattcctttcctaatttcaaacttaatcacagattgcttggatgatattccaacctaatttgcaatctcaatgaatttagggattaattcgattgaactaactccaatgacattgatngaaccttcataacttgatcattgtttgcattggtttggtgaattggattgatgatctctaatctgtttac

SEQ ID NO: 92160 - DNA, 457 bp, Glycine max
agccttttctgaaattcttcactggcaatcgattatttgtttctggtaatcgattacacaattatattttgaaggatcatgacttttcaaagtgttttttgaattgtcgttgctggtaatcgattacatgattcaaatttcaaattcaaaaccctttttaaaagttgtttttcaaaattgtcttcttgtaatcaattacactgcctggtaatcaattagtagagccttgatctctaggaaacacttgttttgaggcaaaagcttgatcttgaattaatcttgaagcaatgcttgtttgttgaagcaaccttgtattaatcttgaagcaatgcttaacatttgaatgtttgttgaagtaatcttgaaagcaaccttgtttgattattctttggcatcatgaaaatcatgtattcatacattcacattatacattcacatatttaacattcactggaat

SEQ ID NO: 92161 - DNA, 384 bp, Glycine max
  unsure (1)..(384): unsure at all n locations
agcttgacctattatagaagtgtaaaactaattagttatttacatgctgntatggcatctatatatacacaagttagttggaataactaacttttaactaactaactaggttctaaccattaaccatgatcaagctaaactaagcatctaactgtgctaagagaacgctccaaagatttgtgtgaccaaaatccctgccatccaagactaattatatgatatctttgagaaagcgaagtcaaggtcaaaattataagttaatgtaataaaaatgtaaaatatatgatttaattgtcatgtacaccttaaaaattctaaacggtcctaaataccaaacatttcttaatttggaagaaatattttaaaaatattaccttacctttt

SEQ ID NO: 92162 - DNA, 437 bp, Glycine max
  unsure (1)..(437): unsure at all n locations
agcttcaaccttacatccctgtgtaaatgtantngtgatggctggtgttgttgtgtttgttgccattaacgtttgtgctatctgtgtaggtcgcattattgctgcttctctatggaggccgcgatgctgctgttgtgtgaagctcgcgtccccatccagtttcaacagtgttgctgctgtgtgaaactcatgctacattcatttgcttcaactataatcaattattgagttatataactcgataaattcatcaatntaatcgattattcataatttgttggcacgagtataataagaacaaaatagtagttaacacgattatataactctctgtcccattcattataccacccaattaacaatgaattctacttatttttttattcaagatccaacagcactctatttacttattattctctcaatattacattatt

SEQ ID NO: 92163 - DNA, 486 bp, Glycine max
  unsure (1)..(486): unsure at all n locations
agcttggttaggcatgacacatgactcaattatgggttactaatttaagggtaagacggttgaggtcaacctatatgacactttgtgtttaatgatgtaattagttatgagtcccacaaagagaaatacatcttgatttacccttcaacaattaatttgcacaaaatcttacctaatatgttgcccaagtagcttctcttttcttttctctattgtattttcttagaggggataattttacaattgacctatatatatttttatattctaaatatgatgtatgatttttccattgttattatataaaaaattaagaacacaagtggtaaagggctactcaatttgtttaagctttttcttacactntatttttataaataacataagaagttttatgactttctaatgtgtttgtctaaaatattttacttagcaatagtactttcttctttttaagagacaaatctatttatttttaaaaaaact

SEQ ID NO: 92164 - DNA, 321 bp, Glycine max
cggacctcaaggcacctgcggctgcagcttaagtatgccgaagcatatcatatgatgacaacctcaagaaatgggtacaaagattaaaaaatgtgtagaggtctagctatggaaatatataatcaatgcatacttatcatgaacctatttcggggttacatagagagaaagcacactcattgatatacatgaaaaatagtacactatgcaaaatgtacataagaaaactcataaaattgagaagatagaaatggctgtattgaaatggaaatgtcaaattcaaatatgactcttaactctgggttcttatcagacaaaaaa

SEQ ID NO: 92165 - DNA, 338 bp, Glycine max
ttaagtcacctgcagcatgcagcttctcttggttgaacaattttgcctattatttgtgggacagtggccatacaaatcatatgcatcttgtggaactaattctaagctatgtaagctataataaaccattatcatgagtgcgtatgatatctttatagactatgttggtgacctttattgtgcatgatttggcaatgtctcactatcagttgtagatcatcctttcattataacgacagaaaggataagatgcactatataattattttaagtcatccatgaattgtcattcatataatgggtctatttttgttttttaaaacaagcgggtgactttt

SEQ ID NO: 92166 - DNA, 431 bp, Glycine max
  unsure (1)..(431): unsure at all n locations
gcttgangattatggtgtacccatcacatgtggtactangtggcggtcgggcgatggtgcacaacaagttttttttttttcacatccacaatgcgcgcataaacccaccatcccctgtatcccacctccaactgagctcacgtactcccacgtagcccatatcctcgtttctctcaacaccgggtccccatcaatccttccaagcttccccaacatcaaagtattacaacattcacacagcacaagctatcacagccaagcaaaacagagcaaaggcagataacttttgtcaaacaccaaccaaatatcacagctttttccactcatagaccccagtaacaatttcctcgatacaattcttaaccgttggatcgactctcaaatttactggaagttacagtgcataagcctactttcgaccgtgggactac

SEQ ID NO: 92167 - DNA, 491 bp, Glycine max
  unsure (1)..(491): unsure at all n locations
agcttgatngcatgatgttaggttaattgttatttataatagtgttaggggttntgattngcataaaatgtatgtcattctgacatgttttggttaggatttgatggtctaatagaggcctaagttgaagggctggaaaagccctaatttttctggaaacggcgatgaacatgctaagcgtgccttgctgcgctaagcgagttcatcactttatgataaatatttgggtttccagatgaacccgaccctgttctgctaagtgagttcatcttttctgatgaatgattgaatgtttatgaactcactaagcgcggctgtgctctaagcgagtaatgtgtntcaaacacttagaanatntttcattggctttgtgttcgtggctaagcgatcttgcccgctaagcccaaggcatttgtgaatttctttatgtattgccatgcgctaagcgcgccctgtcgtgctaagcgcaattaactctatctttctgtaat

SEQ ID NO: 92168 - DNA, 410 bp, Glycine max
cggctgcagctgaccttaagactaactattttgtttatacacgagaagcgtgcctgtggtatattaataagcccatgccgatgtctttgcacaaaatgccgctaattacacatactatgaaaaacgctcgactgctcattcttaactggacacaaatcacactctgaagtgatcgcattccacaaagatatgacatgtagctactaaacaacgattttccgggcgataaaaagaaaggccctcatttaaaagtacttccttctggtagtgaaatcatcttgtttttgaataataaaccatatctgttacacagctgaggctaaatataactttggatgggaaaatacgaagaatataaattataaacatatcactctatgatataaaatgatcattatggctagacacgg

SEQ ID NO: 92169 - DNA, 200 bp, Glycine max
gctctatagagtgtcgcatagaatatgttaacacttctctactactcggagcctgatactctgactaaagacattatacttgtgaattataatcacctcggcactcgaacctctgatatgagtgttttatatatatctatgcaccggggtcaaaatacttattcaatttgatgtaatcgtcataccgttccatacatata

SEQ ID NO: 92170 - DNA, 445 bp, Glycine max
  unsure (1)..(445): unsure at all n locations
gcttgttcatcttgagataataggtggtctttcttatttgaagttgatggtgcaacatatttctttggcctaacaggaactccaatatttctacagcttctaatgttatgattggtttggccacaccttccacatgtaaactcagccaatttcctctttagcttatgtcctgtgacattgtcctcatctacagatctccttctatttttctttggccttcctctttggacctatttatgtggcggaacacggtgtgtatactgtgtctgggcccaatattgtggtccttggactggttcaataaaatgatgagatgtcttattataagcttctattgacagcactcatgacacatgtcctcaagctttcctcctttgngagatattgttgcaatggcatgtcggcatggcatccctacatcatagttgtataatcagcacacatg

SEQ ID NO: 92171 - DNA, 452 bp, Glycine max
  unsure (1)..(452): unsure at all n locations
agcttagctgaattcagatcgaatagaagttagtctatctcatccttggccagcttagcggaccaaatcagcctcagatgcaagggttgagcgctaagcgcttgagactcgcggcttagctcatgaatagagatgcccttagcgtgagacttgcacttagtgaaaggatctattttcagaagaaagttctctaagttatttttcagtcctttttccttgagattgagacccttatgttaagcattccaagatttgcttatatgctcctatgtacagattatatagcaagttccaaatgatttaaatgcataaaaaacaaagataacaaatactaatattgggttgctcccaggaagcgcttcttaacatcattagcttaacagttgtgggtctacttncagaacctcttgacctccttccattacctgtaagcaaacattgtgttctagagc

SEQ ID NO: 92172 - DNA, 415 bp, Glycine max
atatgcatgtgaattaggacgcatcaacaagaatcaagcctacgctattgtgcaagcaatcaatggggcaaaacacaccaaatgattataatgatggatggctcacattctcacaaaggaaaatcctactttcaaatgaccttcaaaactttctgacatgtagagaagaatcaatgattttaagtcacaaaattgtaagaacttttattttcaaaacaattacccacttttttgacatattctatagttcaaaaaaaacatgccaatgcgtccgtcccccaaaattccctaattttaactaaaatcctccaaaccaccctgttcaattaccctctaaataaataaaccccctaagtctttaaatcaatacctccccccccacatataaaaattttttttataaaaaaaaaaaaaa

SEQ ID NO: 92173 - DNA, 434 bp, Glycine max
  unsure (1)..(434): unsure at all n locations
agcttggtaatcgattaccaccccttgtgttatcgattactagaagccgccatagcttcctgaccttgttttcaagcctggtaatcgattacaccccgtggtaatcgattaccagagaacatcttagcctcctgtcttcatttttaagccttgttattgattacccacccttgtgaatcgattactagaggccataacccatatatcacacaagattcacagctggcctgccaccacacaagcctccttgctttgtggtctttgttccttttatcntgtgactgccaggagctcgcttgcttaggtacatcacaggttctcactgactggctatgcccgggttgggtcgggattggtcaagcttggtnttgggcaataacaccccacctgacgtcccaaagtctcctgacccccgtgacatattttcaggtacc

SEQ ID NO: 92174 - DNA, 465 bp, Glycine max
  unsure (1)..(465): unsure at all n locations
cacctgcngcatgcaagcttatggatggacactactttttgtgttttaacaaaagcgcacaacggaatcataaaatgcggagaaggatgaccctatggctgcaaactcgtcaatcccgagggtatggctcttgaaaggggggaaaagaacttttgaatgcaaaaacgccccccctttctgcattcttataatttggtgcaggggtggctctacttttctatcccattctgtctggacatctacctcgcgcaacttggtgtgatgcaggactaggcccttcctggtccatggactggttcaaaagtctgacgggatgtatatttagaactactatgtggtgtaatattattcattgtctatgcttcccccttttttataatagttgctttgcatgantgaaagaatcttacttcaacttgttaactcgctcctgtatgtaaatgataaaaacttgcatacccccct

SEQ ID NO: 92175 - DNA, 297 bp, Glycine max
tcaattgaggaagcttcgccaagtatccccattgaataacctttattcaaacctttcaaagttagtgagaaggcttaactaacaattatggaacttataatacctaaattcttatttgaaggcatatgtgataaccatagtgaattacttaacaagattggtagttgacttaatgtcattccagatactccccaagcctcggaaaatactttcaaaatggtaacaagaaatacctcctaattaattaatgttatttatgaagatagtgacctaaactcagaccacacaactgagata

SEQ ID NO: 92176 - DNA, 394 bp, Glycine max
  unsure (1)..(394): unsure at all n locations
caacnnccacctcttcattcgaccccatccctgacagcctaagactcacccaatgtccattcacacttcactaactcatggctccataaattcaagaacagatgccattcgtcttcatatcttctaataggcttgcactacaccacctgccacttatagtcataataatactgaagacaccaaacaaggacaccctgctctgacacaaccacataatggagccttcctttagattccccaatgcaggctttcggaaccatcatgaactctcatgctggaaccgcgcctaacaaaccatgacagttcattttaacataataggaggacacgcaacatgtgccaagcatgacacccacacgcatatcctccttatcgatcatgtaaacataacata

SEQ ID NO: 92177 - DNA, 388 bp, Glycine max
  unsure (1)..(388): unsure at all n locations
agcttntaactanattattatattatttttttgtatgtatgacaaagtctacaatacagtctaatattntatgatgatgattatatagctaagtgatgtgacagattaagcctacaagtttacaaaattgtcttatgtacaagatggattaaggtaacggagcacattatgctatctattgaaagcgttatttctttgatgtcagactgatattatagcaatctacagtaattttgatcttagagcaattagtaacgttagtactttgcttatacgtacagatcattccattgtataggaaacattacttaaacaaatggatataattcaatttcaaatgnggcacccgagcaactagttatatattatataatatatagtttctagc

SEQ ID NO: 92178 - DNA, 307 bp, Glycine max
agctagctcaaaacacatttgttgtttgctggtaatgggagaaggtcaagaggttcttatggtgagaaccataacatgagattgtcttgagaggtataagcgtcacgcaaatgacgtataataatcgcttcctaggaggcaatccatttttaatctgtgtagtgtttgttattacatgcattatatcattatgaacttgctttataatacttacatggagcatattcacctctctttgaatgtaaaattaatcgctttaatttcttgtgaaatgactaagtgtcaacttataaaaaaatctttttga

SEQ ID NO: 92179 - DNA, 486 bp, Glycine max
  unsure (1)..(486): unsure at all n locations
agcttgtaggattatggggtacccatcacatgtggttctatgtggcggtcgggcgatggtgcacaacaagttttccacatccacaatgcgcgcataaacccaccatcccctgttgcccacctccaactgagctcacgtactcccacgtagcccatatcctcgtttctctcaacaccgggtccccatcaatcctctcaagcttccacaacatccaagcagaacaacattcaaacagcacaagctatcacagccaagcaaaacagagcaaaggcagaaaactctgctcaaacaccaaccaaaatcacagctttttctcgcttaaagaccccagtaacaattccttcgatccaattcgttaaccggtggatcgactcgaaaattntaatggaagtctctagtacataagcctacattgtgaccgttgggatctactagcatacatccagaactcattctgcactagactttccacagccaaccacacac

SEQ ID NO: 92180 - DNA, 432 bp, Glycine max
tctaagcacctgcaggctgcagcttctaacttgtcaagaatgaagatctgatactttttgttggacaagtggcctcaaatatcttaagaagggggggggggggtgaattaagatattacaaactatttgcccaattaaaaattctactttgatttcaatacaagttccaagttcccttgaagatggatttctatacaatgattcacattaaacaactctgaatataaatgtaaagcaataatcaattaaagagtgtaagggaagagaaagtgcaaactcagatttatactggttcggccacacccttgtgcctacgtctagttcccaagcaacccgcttgagagttccactatcttgtagaattcctttcaagttctgaaccacacaggacaactcttcctttgtgttagatttctttacaacaagagaccc

SEQ ID NO: 92181 - DNA, 468 bp, Glycine max
  unsure (1)..(468): unsure at all n locations
agcttagtgttagtgtgaanaggcttagttgttgtaacttgctaagccttacatttttctatggcaatagcccacagaaaaaataataataagaaaacgagaagtaataatgtattagctttatttcccaagtcattatgtccccttaatttttttccactataagttttagtttgtgcttggctgtgacttgatacaaagaataaagttgtctaaccaaggaggtaatgtgaaaagtgtatggatctggaagcaagtgtgcaagaaatgaacacccttggtctcctatttttcccttaatcaactcacctgcacaggtgggcataactcatgatcctttgtgttacttctgaggaaagtatatgataatgtcaacccctgaaacctttggaggggagggaanatactatactgggaagctgtatggctaagcacaatgactggtactttagatactaacggttgact

SEQ ID NO: 92182 - DNA, 411 bp, Glycine max
  unsure (1)..(411): unsure at all n locations
agctngttaacccacggaagctcctaatatctcccacactntntggggtgggccattcttggatggccttgattttctcagggtccacttggaccccatttctaccaactacaaaacctaataaaactatattatctacacaaaaggtacacttctctatatttgcatagagggtgtttttcctaaggactgaaagaacttgcctgagatgtcctaagtgatcatctangctcctactgtacactaaaatatcatcaaaataaacaactgcaaatctacttatgaaatcccttaagacatgatgcataagcctcataaaggttcttggtgcattagtgagcccaaaggcatcactagccattcatacaacaaaacttggtcttaaagcggtttncactcatcacccttttt

SEQ ID NO: 92183 - DNA, 502 bp, Glycine max
  unsure (1)..(502): unsure at all n locations
ggatcttaacgcactgcggctgcagcttgcggactgactctatttatattattagctgctgcggcgtcattggcacttggaataaaaacagaggtgcagtcagtatttataattgctaaaaaagttaagatgaacctaccacgtcttattcggtttgaataatttctttcatatggagaattgtttaacaggataaaaacagtgagatgcattagcagcaagacaagaacacacgcgaattatgaatgctcttataatgcattaaaaagttatttcttcaaaatatactattgtcagatgtcatgtagaagctggatatatcagctcatcctgtcagtaacaacataaatgtgatgttttaatcaaaaaataaaaatgtaatgctagttttttctggaaattatgtatcagaattattgctggcctgcatcattaattncacattattgctgcttgagcatggcatacatgatataataaaatgacatcatcacatcctatt

SEQ ID NO: 92184 - DNA, 352 bp, Glycine max
tcagagtcacctgcggcatgcaagcttgtgtgtgtaacagacaagtgtgtgtttttgtgtattaggattcaaggactatcgtctgattgagcacactctctaagtcatcaatctgtctcttatataaccaagaccttcaagatccctgagacaacacccgacatcgaattatgctgatggttgtgctaaaatacaacgatcaagtggagaaaactccaccttactcagatggctcacattgtggattgagaacaaatatagctgctgagttatcaactggacacttgaaatagtacggtttgccataactattaaaatgatagaataaggcctatctgccaaaataagatac

SEQ ID NO: 92185 - DNA, 357 bp, Glycine max
cacctgcggcatgcaagcttatagatcaactaacgtgaattgttctatcttatctaggggtcctaagcgtttgagtcttgcatatacaattgtattagaaataagttttctgctatagtgtgattctattcagtttgaacaaaattgtctccaatgtaaaatacccataatgatcatggttcatataagataacacaagtagttcccatgggtttagctggttttgtggtgcaacatactatctctgtctctggagcagaagttttcacaacgagagaaatagtatggctacctaccatagggcattaaaatagatgggagtgtgacaccctctaccccgacatataaataataaaa

SEQ ID NO: 92186 - DNA, 437 bp, Glycine max
  unsure (1)..(437): unsure at all n locations
agcttggcgttaatcacctagctgtctcttactttttatgaattcatggcttcccgtaatggattgaagaggccttatgagttaagcacaacaccatttaagtatgaaaatgtgactgcaattcctgcagccatagataggaggacaaaaggagctgttacttcaatcaaagaccagtgtcattgtggtaagatatagaagtcatataagtactttgttatgctccataatcatcatcatttactcctttgggctcattntatgttccttttgaaatatttttatctcagtaatcatgtattaaatactcttcctcaatagtgctccgagttaatcaatcaacctatataatttgcatttaagatcctataaaagttcaaatggcggttgaattgaatgtgcctagaatgtgtgcaaccaataacaaacacacactt

SEQ ID NO: 92187 - DNA, 355 bp, Glycine max
gcttatgcgctctggtacaacatttagatcactctcaacttgttccacccaccacacacaatggatagcaaaatggttagaagcattgtcacatatcacgactgtgggtattagcaactctctgtatgactatcacatcctctaaaaatcatatcaactacattctgacccacatggtgtacggcttaagagatttatgtcatatttcgaaaagattataattgcatagagtgtaataggcatgcgacgatagtataaaaatcaaaatcaccttgatgtaattaatgactcttagataggtattattgaagttgatatacttaccatattcgaccggttggaatcaaatgattat

SEQ ID NO: 92188 - DNA, 364 bp, Glycine max
  unsure (1)..(364): unsure at all n locations
agcttatgagaatactatggccttcttcagtatctccagcctaatcgtgttggagtcttctatccaatgtccttgaggggcaggactgaatcaataatggatcttgatgcttttggggtttcattggggaagattagagattcatgtatgctctgtgttgattacagttcaatgctgtgctactctatatgtgggctcatcaattatcaagaatattaatttttatgttatatgctagacaatctatctctccatgacttcaacatttcttaagattttaatgaatataacaatataaanttgtgtaatccatcttgttgcatgtaagttgtccaacctacacttttagggaggcgagggaaaa

SEQ ID NO: 92189 - DNA, 273 bp, Glycine max
  unsure (1)..(273): unsure at all n locations
ccacggtcgtcatcgcaccgaaaatttttatggtcaagattgcctncacaatgtcatgaatagtgcactgacagtttttgtgggccaaattacgtgaacagtgtcataaatagtgcatcgaccatttttctggtaaaaaaatagtctatagtaacatgaacagtattctgacgcgcacagtgacatgaatagtggttgcaagaatccttatcatgggccgacaaatgtaccagatcgctcaagtagtataaaacgggcagtgaatattgagta

SEQ ID NO: 92190 - DNA, 317 bp, Glycine max
ttctatgctcctaaattatctctctttctctaacctctaaacttcattaatttttatgaaaaattcttattattgattaaaaaatttaaaaaaatattttattgagatattgaaaaaaaatgttggtcatgcatgattcttttttacgtctttttattataatctttataataatatttttttatttaatttttaattaacgcttaagatacttattacaattttttagaccggatgattgcgctttttataattttttctattgcataacacttggaaacactttttgaagcattgttctatttaaatgttaaaac

SEQ ID NO: 92191 - DNA, 467 bp, Glycine max
  unsure (1)..(467): unsure at all n locations
acgagcagcgcagtggtttgtcacttacaaacgtactcatttttcccttccgctttcagcgttatgctgtcctttccgctcgacaatacctcgttgtttgacgtgaagctgcactcctggaattgtgtcccattcaccttcaccacgttgtgcttcgtgttctcatagttgaaccctaccccattcattaacatcaacacagtgagtgttactatacactaataaaataattaatattcgctatattattattaatctatttataaattttattatttatcattaatgttttaaaaaatataattgaaacaacataattaaatgtcgttttacatttatatgaatctaggaatctttggtgtattntatcatttaatgtatgtatttgaactaataacatttgagattatagtacacatgcaaaagatctttatttgactntctctntagtcctaactctctttgct

SEQ ID NO: 92192 - DNA, 233 bp, Glycine max
  unsure (1)..(233): unsure at all n locations
ggctgcagcttaatgggcagaagaatcactgtttgtatcatcaaaaagggggagaatgtgaatgtatgtatacatgattctgatgatggcaaagaagaatctaaccaggctgcttcaaatgataagcatttgcttcaagaataattcaagattgcttcaacaaaccaagccttggttcaagattcactaaagaccaagcctttgccttaanacaaagtgctttcaagacatgc

SEQ ID NO: 92193 - DNA, 375 bp, Glycine max
  unsure (1)..(375): unsure at all n locations
gaaacttagaaaataagaataccttcttcacttcatatttgatctatgactaagaatgaaacaaacttatactatatcatacacattcctaatctaaaacattcaatacaaatgcatcattaatcaaacatgggtggcattgcaaaattatcaaaccaaaactaagggatgtcaagcttggtctaacaactggtaatacacagacattggggtggtatgctagctnttgggtcatattattccacatgattgtgaatntcanatcataggaaggcttctagtgatatttttggtacatgtcttctatagatgcatcggtagctatatgcaatgtggtacaatctcccttctacttgggtgctgatctttgactag

SEQ ID NO: 92194 - DNA, 280 bp, Glycine max
gcttggaggaagaaagagatgaatgaatggagagggagagaaagcacgacatttgtgctccaaatgagcttcgaaatctgaagtttaatattcaaatgatcaaagttgaaaaaaatgcacacacatgacctctatttatagcctaagtgtcacacacaattggagggaaattcaaatttcactcgaatttaaattgaattcgggagcaaactttgagccaaaattcctaattatattagtgattttagtatgggtcaccactatccagaacattccagat

SEQ ID NO: 92195 - DNA, 393 bp, Glycine max
  unsure (1)..(393): unsure at all n locations
aaacattctggtgtatctggcttcttattgcacgttgacaaagttagtgatccccacaaactcacgctagaagctgaaaaaaaagatgatgttggatgcatatctgctttaagtggtaatggcttgcaagaattttgttattgcagtcaagacaagctaaatgtgcaaagttgacaccaatctggatgtaattntaaatataccattttactatttgatatcgtttaacccgcttgtttgaactacgaactatntacatctgttaaatcacaattctattattcattaacaggactccatgcgttgggtggaagctttggtcccattcgaaaatggggaccttctcagcaccatacaccacgttggaatgggtgagaatnactgtagtataca

SEQ ID NO: 92196 - DNA, 443 bp, Glycine max
  unsure (1)..(443): unsure at all n locations
tgcagctcatgagtaaccaacaatttgatgatgccaaaagcctaaatgattgattcaagacttcaagatcaagcatcaagaatccaatccaagattcaagagaagaaatcaagaagcaacaagtagagacttcatataggataagtattaaaatatttttttttcaaaaatcaaatagcacagttttgttttacaaaagaattntctcatattttctaagataccagagtgattactctctggcaatcaattaccagttatcagtaatcgattaccagtgaccagtttgggtttcaaaatattntcaaatggtttgcaacgttccaaaatgattttcanatagtgtaatcgattacactatattagtaatcgattacaagtgaatctgaacgttagaattcaaatccaattgtgaagagtcaacagctttcataaaatacatt

SEQ ID NO: 92197 - DNA, 354 bp, Glycine max
  unsure (1)..(354): unsure at all n locations
agctgatactgaattgagtattgcgcacacattgcatgtctaatatgccatttagaggctcgaaaagtgcgaganaatgagttgtgttttctgcgttttctggaaaacgcgatgaactcgctaaacgcgcttaccgcgctaagcgagttcattttttgaggatgaacactcatcctcttgttgaactacctatggctaagcgaggctgaatcgcttagcccacagtacttaaatcaacttttttgttgatggccgcgcgctaagccaagctttcctgggccaagcgcgattggttgcggcatcctctgagctaagtgagcttcgcctacacttagtacgaattttgaagaggtt

SEQ ID NO: 92198 - DNA, 447 bp, Glycine max
agcttcaagtcatgtcatgattcacatgaactgttagtaagttgagtgtttttgtaaaagatggaaaatggatattcaaaattaaaagaaataagcagaaagcaacataatattctcaaaataaaaacagtggatggtggcagaaaaggtaacagacacagcaatggcccacaaatctaatttatccccacgaacaaaaggattcgtattcgtagaagcgaaaggaagaagagaagcgtgtcctgtaccttatcagcagcagcatctttgcccttgtctgccttggtcttctcagcctgttgcttctgtttctccaacctcttcctctcccatttctgcacacaaacacaaagtaatacttcaacgttaagaagatggatctcgagatccgacccgacccgaatagggtgaaagtggaagtacctacctggatgtagacgttttctt

SEQ ID NO: 92199 - DNA, 432 bp, Glycine max
  unsure (1)..(432): unsure at all n locations
gcttgaaataactcagtattctttgtcctacccattctctatnggctctaaacaaatcaaaagatttatggtttgtttgctcactaactaactcttaatcatctcatagaccgatatactatataagcacttagtcttttctctcaagctgttcaaggtgttttgaaagcctttcaaactatacaaaaatatacataaggctttctacaaaagaatttgaatattagcacataggttcataacccatgtcttcaaagcttctagtatttataggccttcttaaacaaagtttccgtgtctctaaacagatagatttcttcacttgagcttgtgtctacagattgtggtcattggagcatntaatgcttgcattaaatgcacatacttcttcatgttggaaaaccaacttggttagctntcatgtagaacact

SEQ ID NO: 92200 - DNA, 336 bp, Glycine max
  unsure (1)..(336): unsure at all n locations
tatgattatgtgaaggacatcataactatctttgggaagacaaaaaaatctacaactgagacaaacatatggaagaaaaggtccatattctttgatcttccatactggtctgatcttgatgttagacattgtatagacatgatgcacgtggagaaaaatgtctgtgatagtctaattggcacccttcttaacattaaaggcaagacaaatgatggtttgaagtgtcgcaacgcttggttgagatgagtatacaaaagcacgngcatccaatctcataaggtccgagaacatatntagccccggcatgtcacacaatgtcacaaacaagaagaggag

SEQ ID NO: 92201 - DNA, 362 bp, Glycine max
  unsure (1)..(362): unsure at all n locations
accatccatccacaatgccaatcattcatgttcaatatgatgcatgcacctgacctcaactctcatatgcaatgtgggaccatccncaaggaaataacctaagcgtgtccacacgacactctcacttangaaaactatgcaagaagtggcgagggcaccctatcttgcacaagcaactccncccatggtgatcagcctgagtctcaagggagttccaaaccgagtgacataccccctagtacaagtatgtctcctcacaagacactacgagtacctactaacaaagtttatactatctcactgtttatgaagaatgaaacatgggccccatttaatgaacgaccggggataattaaagattc

SEQ ID NO: 92202 - DNA, 181 bp, Glycine max
tcagaaagtatgcgtgattcctcaagtcacatcattcagcggcgaatatacggactatcaactcgaaaaaatatgcgtgatagccatagtcacatcattttacgccattgtacggatatagacatcataaaagatgtcgtgatggcccagttaaatatttcaagctgtaatacgagcaatt

SEQ ID NO: 92203 - DNA, 400 bp, Glycine max
  unsure (1)..(400): unsure at all n locations
aacatctggatctgctgcatgaacagcttctgctcccttcaccatgtaccttcaattcaaaataacaacttaattatcatctacacaggatttttctctctttcttgtctttttttttttttttactagataggccattacataatacatacaaggaacttaaattgtatttactcaaacgcatctgtaaaccatcaaataaaaaaaagtgaaatgtatatattagatatgaaatcaatattttttttcttctgattntgctatgcatatattgttcaacctatcaatgattttggatatttagatattttttaagctaatatgagacgagtattataactaaacggctaaatctaattgtttaaatatgatccatccctctcgattccacgtataacaa

SEQ ID NO: 92204 - DNA, 286 bp, Glycine max
ttggaaccttgggttgtgctaagtacgattgccgagatcaccattaatcagtcttagaactatagatcaaacattcttccagattatccacaaagaggatgaattatatggtactatgcgacgattaactatgattgaactttccaagaaaaacattctttaattagacctacaagggtctaccagtaagatgatggactacaacaatcttatagaggattgaaatatatgtatgaaagcgagccgggccaatgtatttcagacatgatttatggtatgatatgga

SEQ ID NO: 92205 - DNA, 325 bp, Glycine max
gaaaggagagagtgattttaatatccccctcttcttttatatatgatgaagttgaagttattctcataactttaatctacaactttgactgggtacattacctataacttgctttttgttcttattaggcttaaacgtaaactctagatctatgaacttactttatggtgtaaaccacggctactacactacactttgaggaagttcaaagccagcttaaagtcaattcaactttgataccaattacccatataaggactgaaacctctctgtactgcctatatcaacaatattacaacatcaactgcgtcaataatcatacata

SEQ ID NO: 92206 - DNA, 247 bp, Glycine max
  unsure (1)..(247): unsure at all n locations
catagatcggctaggacaaagaatgggcggccaaagagatttttgtgactccagctgaatcttgggataccaacgaccaatgagattangggattgcacagggcaaacacatctacataactagctccttgtgctttttttaaattaaatagatgtgtaaagagaattgaaaccaagtatagtacctgtgtgtaacaaccatgccaacttggcaacaaaccgaaaataagatgaagaaaaatagcct

SEQ ID NO: 92207 - DNA, 348 bp, Glycine max
  unsure (1)..(348): unsure at all n locations
ttctccctttgccaaaaagaattcgccaaggactaactggctgaattntttttgtgtctctcttcttcattttncaaaagaataaaggactaaccgcctgaattcttttgtgtctcccttctcccttttcaaagaattcaaaacgacacagtctgagaattcttttgattcttccctttccctaaagcacaagatttcataggactaaccgcctgagaattcttntgtttccccttcacanagtttcaaaggactaactgcttgagaactttgtcttaacacattggagggtacatcttttgtggtacaagtagagggtacatctacttgggttgtgtaactgaaaca

SEQ ID NO: 92208 - DNA, 367 bp, Glycine max
gaaaaagctggccttacacacctggcctcacacccaaattagatcgcctaggaccaaagaatggtcaggccaaagagattctttgggactaccaagctgaatctctgggattaccaacgagccaatgatgattagtgtgattggcacagggcaaaaacacatgtaacatatactagtctccttcctgcttttcttcaaaattagaatcagatgtcgtagaagagaatctgataaccaaagtatagtacctgttgttgtagacaaaccaatgccaaactatggcaaaccataaccgataaatatatgatggagagaagaaataagccctaataataaaggttatggctagaacaatttataaagtgag

SEQ ID NO: 92209 - DNA, 465 bp, Glycine max
  unsure (1)..(465): unsure at all n locations
tagtggaagttgtttcttcattggtggcaacttggtaacttggatatgtaagaatcaaggtccaattgtgttgtccactgttaaagcataatacatatcaattgcaagtttttgtgcttaactcctttggataatgaactaacttgaagactacaacatctatgagagtaaaattcctatcttctatgataataaagttggtttcggtctttcagaaaaacctacattgcattcaagggagaacatatagaaattaagcatcactttataagagaccatgttcagaaagggatagtggatttatagtttatacccactgatgattagcttgctaacatattcactaaaccttttactgaagaaaggttgattctattaagaagtcaacttggaatggactntataaacgattaagttaatatctatatgtcatccactgtcacttagtgtccattaaacccatcg

SEQ ID NO: 92210 - DNA, 419 bp, Glycine max
  unsure (1)..(419): unsure at all n locations
acctgaggctgcaactctatactggcacccatngtatttgtttanctcctgtagntccctnctagggatctatacaatagatggtgtttcttcttggttgttagccacgacaaagagagcattgtcatgaatggtaggcaaagacagattaacagtatagttctgcaatctatatatgatctgatgatgcaaggtagcagaatgggcctcaaatactcgntcaactccagtgatctagctttaaactttcatcctctgtgggagagcgggatctctcccactgatgttagaatttgggaaaatggtgagaactatacttccaacatggagactagtcaatttggttctgatcatagcattctcatagtgaacgtaattggagtctaatagagagactctggccgttacaagtagtcctc

SEQ ID NO: 92211 - DNA, 423 bp, Glycine max
  unsure (1)..(423): unsure at all n locations
agcttatgatacttgtttatgttctcttactaattgntcttattcgaatgttggattaatttcttctataataaactcacccctcgcaatttttgtaccgtgtggtttggacctgtgatgatcgcacacctttgttcgtgggagcagaatgacagcagtagtggacaagaagtgagattctttcgtggagccaccgagctgacgtgatgaagatgggattattttgggagagagttgtgttttattaatcaactcctccatagctggttccgtaattctttttgctgatttcaagatgtaaatcacaaatttaattatatgtatgaacaaatntatcttccattatgtgaatgatgtgtactaggttactatacctatatatatatatatatatatatatgtatatatatatatatatatata

SEQ ID NO: 92212 - DNA, 411 bp, Glycine max
  unsure (1)..(411): unsure at all n locations
tatataagnnntttttttttttttgtactttcttctttctcgcccaaacgcacgcaaaagtaacattaacgttgtcgtttggcgtcgggttctccgccattaccaaacgaaaccgcgttcatttaatttggactatgagacggtcacggtgggccccgcgcggtccacgggccatgtgggccccggcactgacgcgttagttatgacttttttttgttttgtttttggcagcgagaaagccgacctgggtggtgtcgccgccgcaaagataaaacagctgacggcggagctggataccgccaccgcaaacgggtcgacgcccgttaacccggacgagaggatccgaaccgggttcgcccacttcaagaacgagaaataccagngagtaatatggtcttctattattatttc

SEQ ID NO: 92213 - DNA, 464 bp, Glycine max
  unsure (1)..(464): unsure at all n locations
gcttgatagacaatgattggatcatcataatggtttatatacttcatcagtctatcagaaatgatgtctgaacacttgttcctaagccaaaaaacaagagcatcattggaacaagatgggtcttcataaacaagctggatgaacaaggaaaagtagtacgccacacagcttgggtagtggcttgaggatttaaccaacaaaaaggtgtagaatttacaataaactttgctcatattgctagaattgaagctataagaatcatgcttgcctttgctgctcacaaaaatattaagctttttcaaatggatgttaaaaagtgctttttaaacggctgtattaaagaggaattatatgtcaaacaaccttatgntttgaggatcaaactcttctagaccatgttntaaacttataaaggtgtgtatggtctgaaacatacaccacgtgcatggtatgacaaactaagc

SEQ ID NO: 92214 - DNA, 406 bp, Glycine max
  unsure (1)..(406): unsure at all n locations
ttcaatctaaacctttgtgttttttagttctcgaaatttacttttgtgagtgagcaaacgctagcgagaatactacagactggggaaagtgtgaagatcgctaggagggttgaaatttgtaaggatttactctccttttattcattatgctctcttatgtgactatatgattccccatgtttgtggctagataaatcctttaagctaggattgtgatgtagcatgtatctatgaatcgtaactctgtgtattntaattaaattcttgtttattcaatcaattggactattgtgtggaatttttctaatttgggactgatgattcacaaacctaattaattatttgttggtaacccactactcttaattaattgacccacacagtaattgaattcttgtgacattaa

SEQ ID NO: 92215 - DNA, 463 bp, Glycine max
  unsure (1)..(463): unsure at all n locations
agcttgttgtatgacatttattatatanaggccatgacggaaagggattgaaagctatagagcatgtgagaaaggaattctcacaatatcatatttgattaaacattaagaatgagtacagcattgctcttatttacagtgaatggttaaacactagagtgggcaactgattgccaactaattagcccatcttaaataataaactaactaatttaacaactattacattattaatatctctgttaacctgtttatagggctggttgtgttgaatgagtgaatgtaatataaatgccagcaatggggggatggtgaatgtcttgtcttttgttcattttgntgggattaatgttgtgtattgtccagaagcattggagtttctatggttattggggcttgtgttgaagctctatttgaagtgctgcttattttgatgggataaagggtatttgaatttggatct

SEQ ID NO: 92216 - DNA, 450 bp, Glycine max
  unsure (1)..(450): unsure at all n locations
agctagtaggaatgtttgctatacatttattcaacactntctgggcccaaaagagataccaatgtcatgtataacgtaatgaaatgtattagctaacattcactaataaaggtttcagcaccaggtgaatattatttagtcagatttttagctctctttttatttatagttttatttttgcctgaaagagatcatcataaatacacatgttgaaaaagaacgggaacacaagtgtacagatatcttcacctcaacactatttgtgtctttatcctaatatttatcacaccttactgnttttttaattatcagtcacccctcttactttaatataacatcattttcactgttattttgatttttaatatacattcgatcgtaacaaattatcagagtatcatatatcaaaattataccatactacttaaatattacaattatgtactaata

SEQ ID NO: 92217 - DNA, 386 bp, Glycine max
  unsure (1)..(386): unsure at all n locations
cagctcgcccaggcgagcaatgttgttttctccagaagcaacaaccttctggaggaaggatctggaaggcccaagtgggccagattgctatttacacccccctttntactaaatgcacccccctttatttttttggtaattttttttctgtaacgttacgaaactttacgaatttcgtaacgatacttattttccttccgcaaggttatgaatccttacggattacgtatttactcttttttagctntcgaagaagttatggaaactcacggattgcgcaaaaacacctcttttcgacttccaccacattacagaatttcacggatcgcgcaagcttgcttccttttgatttctgagacgtctcgggacttcatttattgtgcaac

SEQ ID NO: 92218 - DNA, 303 bp, Glycine max
  unsure (1)..(303): unsure at all n locations
gctacgaactctatcatatactatgctagatggcacaccatgtaacctgacaaccttacttatatacatagtgggcaacttttcaaggaaaatctgatattaatgggaaagtagagagcagactcattctatctattaaccatcacccagatagaatccaaatctttcaggagtgctaagaagtactactacataatccatggaaatatagtctcacttccactgggcatctctaaggttgtaacttcctgaacgctctcatgctcatcctacccctntgatgactacgcatggatacacaac

SEQ ID NO: 92219 - DNA, 390 bp, Glycine max
  unsure (1)..(390): unsure at all n locations
agcttatcctaacgttttattctttcatcgttatgnaatattgaatcaggtcgtctgatttctgaagaactggcgcaatgcaatttttgctgatctggaaagtgcccaataaaacccttgccttttttactttctgcaaaattgcttgcttttgtcctacccttcggaaaccatccacattaatgtaatcttcttttcacctagaagaatgagtaataatactctaatctgcagtcggaagcactgnttacaaatttgtacattattcttgaatacatgtcacttgtcattttctgcttgatggcgaaggattcacttttgaaaatattataagcacactgcactcacacgtgggtgccggagtttcgtcaaagagggatactctacaat

SEQ ID NO: 92220 - DNA, 421 bp, Glycine max
  unsure (1)..(421): unsure at all n locations
aaagattgggccttacccaaagtttgcatcacatctgaaaagaggggaatgtgcctgtgaacacggttgctagtaaagtccaaccttcacaaatccctcttcatgatcacggactccaccaagacatatcaaagtgtgtttattcatgccgactatgcggtgcctcacctatttgtgaaagaatgttgcccacacgtgaaagctttccaatgttgttgaccacacctggaccatcatctcctgtaatgcagtgcaagaatgttaactaaattgtattattcatctttagtattgaagatgaaanagagagccgatctatgccatgctgtcatatatgcaagggttaacataaacatagtaattcctgatctgataaagggatgggatacataattcctggagtaccattataattggctac

SEQ ID NO: 92221 - DNA, 451 bp, Glycine max
  unsure (1)..(451): unsure at all n locations
ataataactagantaatcaatttanatatgattcatcataatgaagtcatcaagcaataacttgaaaaagaaaatgggctacaatactgtcaatacatgttgctttcaatattggtcaagaatattatatttgaaagttgaaaccaaaggagataatattttagagaatgaatgatactgtttgagtaagaagcatgggtgaaaatgtgttacggctcaggatgtagttgacccagtccaacttagtcatgggttaggaagacttatactagaaataaaaaagaanaaaaggatcacgcagacggngtaaaaaaggaaattagtggggtagaagcagctttacaatntttacattntgtgggcagtggaaaggagcattgctcttggggtgggtattgcagttcttctttaatacatcatcttcaatcttcaatattatccactntctact

SEQ ID NO: 92222 - DNA, 481 bp, Glycine max
  unsure (1)..(481): unsure at all n locations
gcttctagagaaagctacatggagctgcctttgtattacgcttcccagccctttttaaccgttggatcttctccaaatntggtctgcaccttcacacgacaattgtccatgatctgaccgttgggatcattgagaagatatctggagtgtgctcgaagcttccgttcccgagagcattacttatttaagcactccagcctttgctttcgtgtagcttaggaaaaacgtcatttcttcttctttctttcttccaaagtcatttctaaagttccaagcactttctccatcacccacagccaccattagccaccacaaaccatcattgttctccattgaaaacccacaccgagaggaacccttcaaccaaagcggaatcttccaacttggcttgcggtttcggtagagaacgaaaaccctaatctgacctttcgtntctttcaaggaatcatgggtctatgcttgttctttgtagtccatcttg

SEQ ID NO: 92223 - DNA, 414 bp, Glycine max
  unsure (1)..(414): unsure at all n locations
atcacatatttnttttttggaaggcagtaagaatcacatataatagccgaataatatgcaagtntgaaataagaaataaaaacaaataactaaaagctgaaattaaataaattaaaacataaaaagaatattgtttattaaagaagaaagaanagcttaattganactaaacaatattctttctatgttgtaatctatttaatttcaacttttaattgaaagggcactaagactaagtcctgtggatgagaaaagacaataagactaagatgtattgtttaaataaaatattaagacataatatactaatgactatgggaataaggttcagatcatattgattgtaaaaaaaagagttaaaatctatcaattcttttcaaaccaagaaatttgtacaaataccctatgaaatat

SEQ ID NO: 92224 - DNA, 399 bp, Glycine max
  unsure (1)..(399): unsure at all n locations
acctgaaagggaggtgaaatttacattaaattcattaggaacgcttctaatgagcacatatgaaaactaagctagaaatatttacaatcctaccaaaaataaccataaattgggagatctatatacattntggaaaacttttctatacaaaagttagtcataaaagacgactaacacatatcttgagagaattctttgcaaagagaatcattagttgacccaaaaatgatatcatcaacaaagatatgtactaagagtatatcattcaattttattttaataaaaagggtagtatcaaccttacctcttgaaaacccttttctaaaggaattactcatacgttataccaagcnctggggcttgtntaaaccatataaagcctttttagttaaaaacatg

SEQ ID NO: 92225 - DNA, 441 bp, Glycine max
  unsure (1)..(441): unsure at all n locations
agcttgtccttgcgttagacatgattaatacatgatttgngacttgttggattcgattcgggcaaaatcggatgaaggcaagagtggttttcgaaatctgcactatatgcagaattttgctgttgaaatgtgcagcagaattttgtataagtgcagaaaaatgcttgtgtatggctggttgtgaaaagggtagtacatatagggttctggacatttgctagcagatcccaacggtcaaaatgtagacttatgtactatggacttccagtaaaagtttcaagtctatccaacggtgaacgaattggaacgaacgaaatgttgcttgggtctttaagtgagaaaaagctgtgacttttggtttgagttatgagcagagtttcctgcctttgccctgtattgcttggttttgttagttcgagatgagtggatgttgaactactt

SEQ ID NO: 92226 - DNA, 354 bp, Glycine max
  unsure (1)..(354): unsure at all n locations
gctgaagtaatgtataacctatatggtttatgtacacatacttttttcatctttatcttggctactcttataaaaatgacaactttcttactatctcctaattagcaccctgattttcaaaaaattatatgtactaagaatatgattagtgatgctattgtttttaatcaccgtattcaatgacgtattcaatgacaaatttataaatttttttagtgggggacaagaagtagcttaatgccgccaacgattgtgggactattatgacattacattgatatgttcatgtacagagggagacattaagatgtatnttttacgactaataagacattatgttggttgacgcgatgt

SEQ ID NO: 92227 - DNA, 318 bp, Glycine max
  unsure (1)..(318): unsure at all n locations
catgcaatcttggactgtgctngagagaacacacatgattaatgtgaacaaagatctttttctaaggctaaattgggcgttgaggagtcacattttgattcggtggaactttacgtgtacactcagtttgagcaagtatagattgatgttatggacttgtgtgaggcgagagtctgcttcaaatttacctcattctatatgtcacttttcaaacctataaaacccattgaattgatgggcgttggacacactagattctgcgtcgctgtgcttaaaagctagaatttgggtacacatgattgatacatgatctgggac

SEQ ID NO: 92228 - DNA, 459 bp, Glycine max
  unsure (1)..(459): unsure at all n locations
gcatgcaagcttatccagctacactggccctatatgcattttaatnggagacagattatgggctcaacccaaagaaactcaacatggatgaagctcatgtggcttaccctccaaagagcagcgccattattgctccaccctcgcccaaggctctcatcacacgtgtactcgtcatcatcgtcttctcgatatggagtatagctttgtgtgattttgtcttctcccctccctctttctattaatgaggatcctcgatataaaagacaaattatcgatactctaatttgtatttaatgatcctcacaaaggatgggtaagttaattggtggtattatcttggagtttgcacgtgaatatgtgagctttagtcgtgcacttgtgatacgctgtgaaacaattactgagttcacatatatgagtaatctttctacctgatgcacgacgtgagataatgttatg

SEQ ID NO: 92229 - DNA, 403 bp, Glycine max
cctgccgctgcagctgcttacattcctcccctatatctgtatctcgttggtttgtattttcaatcttaaccgatcattactgttgtaaagttgtctttaaaaagattggaagttgataaatgaaacctagagaaatccaactcatagataactttgtttttttgtttatcaaatatcacttgagatcatttcaaggtccaacgctctaacgattcgcttcgcgttttagaatttaaaatatcatttcaagctctaatgccttaatgaccttttgtcataattaaaataaaactttcaaaaacataaaattaatttaacacacaaacattcagacttatagaactacgtaggtctgaattcctcctcccacttgacgatacataagagcaaaggcgacaccctt

SEQ ID NO: 92230 - DNA, 294 bp, Glycine max
  unsure (1)..(294): unsure at all n locations
agcttcnagtattactgctaggaatgccatgcttttcttagaatcatctacgacgacgagcattccaactctcgtttacaaaccatagtcctcaaactcgtcgctaataacgagtcgacttaaaaaatatatgactgcagctctcataggacgttatttaagacagtcgaagtatatctaacgcagcgcatatggtaggccactctgtctggctctatactatgacgacaccaacgactataaagtgtctatccaaagagctgcattcttagacgaacccctatatttatgttt

SEQ ID NO: 92231 - DNA, 472 bp, Glycine max
  unsure (1)..(472): unsure at all n locations
agctntgagcatattcatacgacaattactctttactctgatgtctgattgagtcccgtagtatatcgacacgctcgaaattgaatgttgaagctcagagcatattctaacgacaataaccttttactcggatgtctaattgagtcgtataatataacgagacgctcgaacttgaatgttgaagctctgagcaaattcaaacgacaataacattttactcggatgtctgattgagtcccgtaatatatcgacacgctcgaaattgaatgttgaagctctgagcatattcaaacgacaataatcttctactcggatgtctgatatagtccccgaatatatcgacacgctcgatattgaatgttgaagctctgagctaattcaaacgacaatatctatattcttcgatgtctgaatgagtcctataatatatngagacgctcgaatttgatagttgacgcttgaacatattcaa

SEQ ID NO: 92232 - DNA, 426 bp, Glycine max
agctttgatggtgttgagaagatatcacatgtttgtcatcatcataaacgtggagaatgtgaatgtattttgatgatgtcaaaagaagaatcacacaaggctcattttgcttcaagattaatacaagattgtttcaacaaacaaagccttgattcaagatttcttcaagatcaagtcttgcctcacaatgaaaggtttcaagtcattcaaggcgcatgttatcgattaccaatggcttgaaagtgtgtaatcgattacacatcatatgtaatcgactactagagactctgaatgttgggaattcaaattttatatgaagggtcataacttgtcaagacatataactgtgtaatcgattacactaatcctgtaatcgatctccagagacgatcttcaaggaatatcggcaacagtcacatcttatca

SEQ ID NO: 92233 - DNA, 335 bp, Glycine max
  unsure (1)..(335): unsure at all n locations
gatctctaagtcacctgggctgcagctgatgttttactaccaatctcttgttactgtgtacttttacattcaacggaatgaacagataatacacgacattgtgcgacttctacgtatctggttagagtgggattaactcaccggtggaaatgtaaaaattaaaggtatgcttgggttcgattttcattctctcgtttaattcttctgaaatggctgttattatcacaagattaagaatctcacaacatgctcggcttgacttcttattcttttgctttcaagaaatanaaacacttattatgccctttccaacaaaaaataattgtgactcacta

SEQ ID NO: 92234 - DNA, 523 bp, Glycine max
  unsure (1)..(523): unsure at all n locations
ctgcacgcatgcaagcttcttcttcttcgttttcngtttttttatataattttaaaataaattaaagataattcattagggttaggacccttaaaaaaatgtttatctttagtgcctatcaaacgttgacacgtggcaatcaaagctactgcctaacggtcaacatccaattgtgacgtcgggggaccaacattgcaattttttataaaataaaggacccaattcgtgaattaaattatcgggggactaaatgcaaaattggacctaaagtaggggaccaaaagtgcaattttgccttttatttatatacccaaaggaaataggtactactagttggtgcatatntaatggtcaaataatgctaagagttttactagcagcttatcatggttgtatgttgtgtgttggtgtatcacccaaaggagaaacattaatatacattattgttatttgaatgaattatatgtatgaacgtgtctatatctcacaacgcttatgtgaatttattatgcagtacatgttt

SEQ ID NO: 92235 - DNA, 228 bp, Glycine max
ataccttaatggcatcatcatgctcttcaccgtgccacaaagactatcgatacaagagatccccatgtccctagactatagtcaactccattatactctccagagcacaatcgccaagtacaaccatcgactctattaccaattgatgagtatgtgatgagggttaacgctcccggaagatttcaccataggaccatgatcaaccacataagtgaacttgacactaca

SEQ ID NO: 92236 - DNA, 495 bp, Glycine max
  unsure (1)..(495): unsure at all n locations
agacttataggctgtcccacggaagtatgattgtggaggagtactacaagaagatggagatgacactagtgaggacaaacattgaagaggacactgaggacacaatgggtcattntctgagtggcctaaatcctgacattagagatgttgttgaattgcaagagtacgtggaattagatgacttgctgcataaggcagtctgggttgaacaacagtggaagaggaaaattgcagcaacaaggaactcatccaacaatttcgaccaaaattggaccaacatatccaagaaggcgggaggcaactcatctatggaaattcaacaatgtccagtgccgaaaccaaacgtaattctgcttcatcatccaacactggtactagaaacataaaatgcttcanatgcttangtagaggacatattgcttctaactgtccaaccaggaggaccatgagcatgaaggcagatggagcaatcgccaatgaatctgaaatcagtga

SEQ ID NO: 92237 - DNA, 432 bp, Glycine max
tgcaagcttccaatgtacaccaccacacagaactttatctatgaatcaatctggacattgctccgaaaaccatacagtcaatctttcttccatccagaggaatatgatgtcatgttatgacaataaaaaaaatagaacaactccttctacatccacatgccaagtcagtgatcgatattccaatatcacacagtttcacattcatataggtaatcttttattgttatgctattattagatatctacatagacacattttatttattattacatccttttcaaatcttattctatagtcaacttatatataggatgccatattgtgtggttattatgcagatgagaatacacaccaactaacactacacaggatcatcaatttgtcggccatgacctctcagattccaccgatgatgatctatataagacaca

SEQ ID NO: 92238 - DNA, 243 bp, Glycine max
  unsure (1)..(243): unsure at all n locations
agtcacctgcggcatgcaagctntaaccttccatggcaagttatcaccttttagctacaataggggtctttggaagcaaaattaagattacacagtggtggggatgtatcctccacctctaggagcctaaaaatcactctacaacctataatcctcttgaaagctgatcgtttttggtctctccttgccctgttttcctgtgctgcgtatctctattgcataagctctcaagcatatctctat

SEQ ID NO: 92239 - DNA, 471 bp, Glycine max
tgcaagctgctacacttacccttaagggaatgtgggtgggaatcaaatatggatttatggataattattcgattggagattcgttgttagggttctcttgtttctttgaatagactaagaactatgctagaaatcaattgtagaattctaattatgtttgggtgtttgatatcaattatttagagccccagaaagttgcaagatgaacaaattacaaacctaaattatatataattgcaaattgatgctaagcaccaattgttgtggggttaattattcttggaagaggcatagagcatgagagctatttgaactcctggcatcacgcatcaaattggtgccaagccttacatattctaatgctaaacttcaaacaagaagaaagacagccattctttgacctcctcgggataagaatgtgggtttctgcacttagcatgggatctctataaccttttcttgagagtgatg

SEQ ID NO: 92240 - DNA, 426 bp, Glycine max
  unsure (1)..(426): unsure at all n locations
gcctaacaagccaacttacaactgcaagcaccaagagactcatcataaagatgcacacgtcaaagttgagtatgtgaaaagattgtatgaccatgtgaaggtgcaaattgcaaagaataatgaaagctatactaagcaagccaactagaaatggaaggaagtggtacttgaccctggtgatgatcctggacattttatggcaaatgttttccaagaaagagggaatgatgagaattctgatattggccaaatacaggctaaaggcccaagtggagaatgacgaatgctcaagtggagaaggacaataccctctaatggagaatgatgaatgcccacacgcacatacattatcaatactattaattgtngctgaatgcccacactaatctgaaggcttaagttacataaatctttatatataatata

SEQ ID NO: 92241 - DNA, 405 bp, Glycine max
  unsure (1)..(405): unsure at all n locations
gactatgttcctaatcctgactcaccatataccttgacncagggtgagaatgccaatccttattctctgaagcaaaatagagaagtgaaatttcctttgatagcgtaatctaatagaacgaagtcttcccgatcaaagagtgggagatagcataaagatcagacaggaaattcccaatctatgaatggcacaaagtaaaaaagggaagggaagaaagttcttgatggataaaacatgaggtatatgcagagaggtctttggaccacacaattatctgatcaatacataattgtcacctaatgaacgaaaaaagaaggaaagggaaccacgacctataatagtcttctccctttgattaccaaccaaaatcccgtgcgctagcgacttttgtttctcgccccgcac

SEQ ID NO: 92242 - DNA, 426 bp, Glycine max
  unsure (1)..(426): unsure at all n locations
atcctctaagtcacctgctgcatgcaagcttctgaattatagttactcttctcaatattatttgttgtcatctgaacatactangtgccacatcgcgccaccacactattgtattcggttaagagtgatgggtattccatagcacaacttagcacacaactgaaatgcctctataccaccagcgaactcatggagttggattatttggtgttgagaagccgaatgcagcaaattctgaacatagctcttgtagcctcatacatttgtacaacaagggatactaaacaacatcaccatgaactccagaataagtactatcaatcaactaaacaacatagaccaacttctatgattaacaatttcacataccttctaaagcagaatatatctactccccttaactngaattatgagggcaatagaaac

SEQ ID NO: 92243 - DNA, 397 bp, Glycine max
actcgcagcatgcagcttataattttaacctgacacctttctcaactacctgaaccccaattgggaatgacatttatcaacaaaacccctgaactacctaatgcaaatgattgtctctagatgtcacgccaacactataatttcctcactcagctaatatgtcataatttatactaaacacgaattatctctccacataaccttacatactaagaatgagttttcaacgtttaagatcaccactaaagagtatttcatgctgatctgagacttactgacatagtactcccaccctgatatgatgacaagtccactacattggacatattccgttgaaaaagctaatgacgcgtcttaacattaaatccaaacacatatcttgacttcagatagtata

SEQ ID NO: 92244 - DNA, 312 bp, Glycine max
ggacctctaagtcactgcagcagcaagcatcacatttttgagaaccggaactattattgttcccacaccgactttgtatcagatgacgttgtatgtcgacaacaacaacatctgtcatactagcgacccgtgtttgtaatgcaagaatacaacatccagtggctataacacgaatagacgctgataaaaaggattcaacgatgcccatatcatagaacccgtcgatgtgttggtccattgcaacgacaggtcaccacgacacgccgttgctgttgtgcatatcaacgtcgggaatgcataacacccccattt

SEQ ID NO: 92245 - DNA, 471 bp, Glycine max
  unsure (1)..(471): unsure at all n locations
gctagtacttaagcaagccagtgggataattttaatagcacttgatgaagtaagtgcatcctctagataaatctttgttntagtttcttttcccatgacacaaattgtgtctgagtttgaggatattttctactgcacgtgttcatcctttttaagatacttttctttattttttcactttttttcaataatatttgtgattgtataatattcatggaagtgatgtggcctactgtcctgttgatcatgcatttgctattgtgacatccaattntgctttcatttatgtggacaaatgacaggtttttgttgaggtcagtttgagtaatgcctatctcattagctatgaatgtattccacaccagcttatcaaaagacaatttaaattgtgtatatggtgccagatacatgatagaaattatgtattagnttggntcatgatctatttatcctgacattgggaggggataa

SEQ ID NO: 92246 - DNA, 310 bp, Glycine max
  unsure (1)..(310): unsure at all n locations
agcttatactatggtagatagcattgctatgcttctcatagacattcgttgtgaataaccttcttcttcgtctgtatggaatcttcgaacggcatgcttgatgcggggatttggtnttgcataattagaatgggagaggaatgactgttccctgtctattactaagttagctctggcaaggaatgatatttttatgtctcattctgcgtttatcatatttgtgtctggaaagaagatcaatataacattgaatcattattatgactaaatgacaattagtaaggggtgatgaaataaaacaacactaatt

SEQ ID NO: 92247 - DNA, 418 bp, Glycine max
ctgcagcttatccagcccaatccccaatttttaatccgagccgagaattctctcccgactcaagtaaaaggaccacccgcagcagaaagagcatcggcccaacgcacaactgcagccgctccccggtcaattaataatacagcccctggcgcaagctataaatatgcacaacacccgcccccgagagataacttctcccttattcccatggcatactccgagttatggctttcattattggagaatcatttggtggtggtcatacccgggaaggtcttccagccactctaccccaagtggtacgacccgggtgccaagtgtgtgtaccatagtggagctcccggacacaatattgactcttgcatcccgttcaagtataaagtgcagtacctgattagtgccggctggctatgcgttc

SEQ ID NO: 92248 - DNA, 353 bp, Glycine max
  unsure (1)..(353): unsure at all n locations
agctngataacacgcagagactaacgtcgtcttctgtgcgcttcgtcaatcgtggtcgacaagcttgttgacacgcggtgatatacgtcatcttccgcgctcacaagatctgtcatactgactttagagtcaagctgacgggcggaaatacccgagtggttatncgtataaaatntttgctgtctgtaagacgaaaagcctgataacacgcagagactaacgtcgtcttctgcgcccttcgtcaatcgcggccgacaagcccgttgacatgcggagatttacagaatctttcgagctcacaagatctgttatactgactatcgagtcacgtcgacgatgctgaatacccgagt

SEQ ID NO: 92249 - DNA, 354 bp, Glycine max
gcttcaaggaatgaataagaaaattggaacttttaatgagagcgttgcacactttgatgaggaaacaagaagaggaagataattatgagtctcttaccaaagctctgagggaagaaacctcatgaacgcttgtatgaaatttggaagaagaaaaaaaaatggagtcctttctctcccttgaagaactcgtgcaaatgatggagaacgaatattccaagtttgactttgttgaaaaaatgaagatataagaattaacgctagtgagaaaatcaattggacaacaagaatgacccttgcctaggccatgctcagcgtgcccaatgctaccataaatgggtatttagcttttgaatt

SEQ ID NO: 92250 - DNA, 195 bp, Glycine max
aatcatggttatatctgcatcctgtgagatatagctagttcgtcacaatcccacataacatgcgagcccgagccataatatgttaagcttgtggtgcctacagagtgaacttctcacattaatcgcatagcgctcactgaccgctgttatgtttggaaacctgctgtgctagctgtattaatgaatctggcaacg

SEQ ID NO: 92251 - DNA, 456 bp, Glycine max
  unsure (1)..(456): unsure at all n locations
cttattgactatcacagacggttatatttgtgagccaatccaatccttgagttctgactctcagccacttatgatagccgctgatgatcccattactgcttcccctaagctctctgtcctttcttcatgccgcatcccatgccttgcgaactccttggagtaccctcgcgttgtggtcactgaaaccccgtgtaatgaaaagcgtgatgctttcgtctaatggcgcctctctcatggggtagccaagctatcttatggcgatgacaggattattatttaggcacccccttgtccatcaaggaacattagacactcttncatgaaaaagaacctgatcttccttcctcttctcaggagcagggacagacgccctcctgctaccggagatggcccattcagctttcttctctacgacgactgagacctgaacggaagacggcctacttcttgagaaaa

SEQ ID NO: 92252 - DNA, 304 bp, Glycine max
atgcgcaactctttggagtgtcatttatattggctgataatttgattggtacatctaagtacatttgatatctatattgccttatgcatcatcatagtgagtgtgaaggaaattttctaagttagaaaattactgcaactttagattatactgggctcaactccagctcagcgaatgaaatgcatcctataatacaggggtctgtggcttaccgagtcatcatttgtttaacaaatacatgtctcaaacatattgtgcttatcatagcgactattgcctagcgctactcaaatacaattgatat

SEQ ID NO: 92253 - DNA, 401 bp, Glycine max
  unsure (1)..(401): unsure at all n locations
agcttgtaaatcctcgtatggattgaaatatgctataatagcttggtatgaaagactaagtttattcttactctatatagntactctagagaaatagtggacactctactattcagaaaggcttagaaaaacgatctgctgattatacatatatatgtgaatgacatcattttttatgtaacctctgaaaggatgagcaaggagttttctgagctaatgaaaagagaatgtaaaatgagcttgatgggtaagttgaagttctttataggacttcaaatcattcaaaaagattatggaatttctatgcataaagagacatacattaacgacctattgaaatgttcataatggatgaagcgacacatatggcgtaccggcgaatctttcactattcatgacta

SEQ ID NO: 92254 - DNA, 488 bp, Glycine max
  unsure (1)..(488): unsure at all n locations
agcttcagagaggaggtataagggaagtggctagctcangnggagacgttaatagagccaggaagaaccctacgaattctatggaacccanacaaccgagacacaacagtatgccatccaccagcatgaaatcgtacgtggaagctgttaaacacaatcatactatgaaagggaaggagactgaggtgcctttgtccgggaagaatggttcagaagctcctgttgcatccgtaacgtttcagactgcaaatgagaatactaaatggttggatcaactttgggtgggtcgtctaaaaaacaaaagggatgtttgagagggcggtggaggaggttcacgaggtggtatgagcacacgtgaacgtgtcatattggggggatgacatgattatccttcacgacatggacgaagacaaagcagataagatcaacctcagagaacaatctaacggagagacacccttatactcaatccagaaatggacgccgga

SEQ ID NO: 92255 - DNA, 476 bp, Glycine max
  unsure (1)..(476): unsure at all n locations
agcttgttgtttcctcaaagatgaagtctttattatttccttgnttctggttttgctttcttccgggttttggggtatggtattctggaaaattgtaaaaggtaattaaattcctatactttatgcttatgctgtagaatgattagttttgaaaatataagaggtttttgtttttgctgtcttctgggttcagggtatatatagtattctgaaaaaagttagtagacatgttgccaagatgtataggattcaccattgagcccaagttcatagtttcatgacttgagttttttttattgtggatatgtagttctcctctgtctcctgngtcttgcactntgttttatttctcttttccatttaattaaataactaaagtaagtttctgttcattctgtatgccctggaaaatattgacttatttgttgataaaattatgaaatctggaatacctagtgaatcagtgtatgcttaat

SEQ ID NO: 92256 - DNA, 321 bp, Glycine max
agcttattcttcttatgacttttagtgtacgataacttgtaccatcttgtatacctgcgtatttttatgaagtttgcaatgtctttctacaatcttctagaatttaatatgattacttaatttcattaagaagatgcatagagaattaagattattttttcatattgtcatacaagtgatattttgtataacttttttaatgcttcttgcaatttcttgagaagatttatttgatacactttctatcttctaagttagttatgctccacaaccatgtctgcatagccacatccaagatccacgagacaatttgactggcta

SEQ ID NO: 92257 - DNA, 290 bp, Glycine max
  unsure (1)..(290): unsure at all n locations
ggcactgccttcccctaggcatcgcggaaagatttctggatgcttgtattatggattaccaaaacatacgcnttgcttatgctgtgaagagaatgatttcgaatgaatgaaaagcacgtgcatgtgccgacgcctgggattatggattatattattttagaaaataaggttatttacgtgatggcgatatgttttagttcacctctgatccatggctatggtcatatgagttgagccttcttcttgcggataggaactcatctccgtgtcccggttcatgcacgttgtga

SEQ ID NO: 92258 - DNA, 496 bp, Glycine max
  unsure (1)..(496): unsure at all n locations
agcttatattgattagtattcaaggtaatatgtatatcatgactatntagtgactctctctgcctttctgcaagggtctattatctctttaaattatctttgtcgactcatgataaggggtcctgcgcaagtgatacgatcttgttatatnttcttctgcataacctttaatctggctatactttacttttattatttcaagtatatcataatgcttcccttctcattacatcaggatggctatgttccataccattctgcgagaatagaaccatgtccagcagcttctttggatttctctaaaagagggaaaatcttcctggagatgctgaataattgcttggaccanatccaagctcacactaacgatagggtggtcatgcgctgcgacatcaacttcaacacctcttcctatggcaggaacttaaacacacttattggacgaacagctcatattgacttctnggaatctgacatttttgcanagttcataatg

SEQ ID NO: 92259 - DNA, 423 bp, Glycine max
agcttctacttatgtggcagggtgggcttctttcactttcttgtctcaatcgcgagctatgaccaccgcccttccttcccgcgatgcttctctttacatctgcctgagtgggcttatagcctaaaccatacttcccacaatttcctttggcatttatcaggctagttatgccgccgttgtctttgcctaaacccattccgggttcgtaaccgttccccaacataactcgggccatcattactactgcatcggacaggcaagcttgcccagagaaagagtccacggaggaaatgcttaccacctcaaaagactggaaaacgggttctaatgactcctctgcggcttccacataaggcatagaggatgggcagctcaccaagatgtcttcctcgcctgatacgatgaccagatgcccttccacta

SEQ ID NO: 92260 - DNA, 473 bp, Glycine max
  unsure (1)..(473): unsure at all n locations
gatccttaagtcacctgctgcatgcaagctttgctattattcacgtgttactgctaatgcgtgtggcgactgttaaggatagcaatatagntgatacacttccatttagcatattgtcatctcattgaaagttgcatccccgacaacaaagatttccttactatcatcgttcaagggatgtatgtgattctcacacttatgtgcttaagtattataggcaatggttgacatgttactattctttagtagtacattggaattcattgagtgagccatagtctcccgtttaagattgaatacaaccgataatacggacacgttggattaattgttgtattcaatcttgaattgtcccgctggacagctngggaagacaaattgctnttacctcattttgacatataagttaagtatggcgtgttatttattactagatttacaacaatgctatttgctctgtctctgggtgatac

SEQ ID NO: 92261 - DNA, 322 bp, Glycine max
  unsure (1)..(322): unsure at all n locations
tgacaataacaattgctccaccaccacaacgctggaggcggttaaggacaatggtctatcatataaacatgttgttcatcaacaaatataatatcatgctgtgaccgtgtcatatgaacaattcgaaccattgcataattgttatactaactatattcaatgtacctgaacataatgattttcaaacacatgaccgacacatatcatgcggagcccacaagaatcaagtggtgtgtaactcttaagacaagacaatgtcatgctttgatgtctggacatcnaaacaaggattacgttatatccgcgatgcaatcacatatcc

SEQ ID NO: 92262 - DNA, 437 bp, Glycine max
  unsure (1)..(437): unsure at all n locations
agctnttgacggactataccaagctctangtttcagttacggagaaagatctatatataggcttgctaagggtagagagaggaagactagagatttggatcaagtatagtgtgttaaggatgaagaaggcaaagtcttagtgcatgaaaaagatatcaaggaaaggtggaaggagtatttccacaacttacttaatgatggatatggatatgactctagcagtctagacacaagagaagaggaccggaactataagtactatcgtcggattcagaaacaggaagtaaaggaagcgttgaaaagaatgagtaacggtaaggcggtggggccagacaacatacctattgaagtgtggaaaactcttatagatagaggtcttgagtggctcaccgcactctttaacgaaattatgaggtcacaacgcatgccggaggaat

SEQ ID NO: 92263 - DNA, 476 bp, Glycine max
  unsure (1)..(476): unsure at all n locations
agcttcccatacttcacagccaatatttgatatataaccggtgaatatcacaagttgcacgaataaaggaccacagagataaaagttacggaggaaatatttggaacgtgaacggngatttttcatcatttatctctcgttgtggactagccacttggcttcattnttttgctgattttaacagtgaaagtaaccaaaacagaaaagttgtcatcaatttagtgcagtattgtgttaccgagtatcgtttagttctaccaaagagatttcattggctaaaatgaaagttcggttccttatcccttaataatatcatttccttcttttctacatattcagaaactaaataaagatgttcattctttcactactaaatttcaacgcattacactgtaacggacaaagtgtcatttaactaaatcaactcgtataaacttatatttatattactctgtttgaatgacgatgtgagaatc

SEQ ID NO: 92264 - DNA, 509 bp, Glycine max
  unsure (1)..(509): unsure at all n locations
agcttagctcacccaggcaagctgggcggcaagttcctcccctattttggctataaaagggcgtgggaggctgaggggaaggagttcaacacccttggcaagcatatttcacttaaaattagtgaaaagaaggagaaaaaaaaagaaaatcaaggccaaggcgcttccgtgacatttccatgatcaattccatgaacattctttgtcgttcttcatctgtttttcgttcttcattcagttagtgcttgctttaaggatttggatttgatttatggacccttaggggtcccctttattctttgtgcatcttcatctcctttttcggtcatncgtgatctttntatttgtttaaagtgagntttgattgatcgttcgtgccataatctcgtttaatcaccactaaagtaaaattcaatcgatcatttgtgtggaatctcactaatcaccgttaaatgaattacaccaatcggatgtgttgaatctcactaaccaatgttaaataagtttcg

SEQ ID NO: 92265 - DNA, 483 bp, Glycine max
  unsure (1)..(483): unsure at all n locations
agcttggatatgttgttggtctggcaacatagcagaacatatgtgctatggagaaatatgaagaggtaataattgtttaagtcaataatgcttctttaactatactatgccttctaatctgattaggaggtgctgattactagatttgatagaacatcaggaactagttgaaatatttactgaaatgcagaaaacactcgaactacaaactacatcaatcagtgacggacctaggtagtaattattttgttgaaaaaaacctaaggatatatctagtgttgttatttttccccctcctattnttataatatgatctcactgtcttcaattttntagttgtcgtcaattntttcttttattgactagtttctttctaggttgtgtccttttatgctcttattcggtggacatttcattctatcttatatgataaaatatgttnntggtttcttgaaaattatcacagtntggntntagtctcaa

SEQ ID NO: 92266 - DNA, 383 bp, Glycine max
  unsure (1)..(383): unsure at all n locations
cctgccgcatgcaagctngtcgcttgcatcaacacagaatttgtattcaagactcgtgcatgctatgtgttgctcacagtgtattgctctctatggttaacggagaatgacaggaggaaaaggttgcatattcgatctcttctgctaacaaaactaacatttgccgagaaataaagtgtattgcttgtctcatgtcacaagaaatgaagaaaatatatattgcttgaggcgagataataattctaaacaaattgaggcattgtgggagcatgactcacgggattcttaatgggcaaggtaaagtataattattgttaatatataatcagaaagtcaaaagaaatagagaagatgctgaaacctatcgtgagtganaagcaata

SEQ ID NO: 92267 - DNA, 151 bp, Glycine max
tcattgcttgcttgaatctcgcattcacgacttatattgccatcatcaaacaaggggagattgctgacacacttgactttgatgttttgatgacgatcatgatcatatgatgcgaatgattctagattaccagtccatcctcgagatgatc

SEQ ID NO: 92268 - DNA, 483 bp, Glycine max
agcttagagccaattcatacgacaataactttttactcggatgtctgtatgagtcccgtcatatatcgagacgctcacaattgaatgtagaagctctgaggaaattcatacgacaataactatttactcggatgtctgattgagtcccgtcatatatcgaaacgcttgaaattgaatgttgaaactctaagccaattcaaacgacaatatctttttactcggatgtctgattgaggcccgtaatatatcgagacgctcgaaattgaatgttgaacctctgagcgaatacaaacgacaataactctttactcggatgtctgatatagtctcgtcatatatcgagacgctcgaaccgaatgttgagctctgagctatataaacgacaattacttttgactcggatgtcttattgagtcctgtatatatcgagacctcaaaatgaatgttgagctctgaccattccaacacataacttttactcga

SEQ ID NO: 92269 - DNA, 439 bp, Glycine max
tgcttataaatcatgtgatcatcaattccatatcatttggtgagtaaacgcaaattatatatatatacattgcttgcttgaatcttgatttcaggacttatattgtcatcatcaaaaagggggagattgtagaagcaaatgactttgatgttttgatgacgatcatgatgatttgatgcacatgattcaagaatacaagtcacaacatcaagatgatcactagtattctaggaagggaattcctaattgatttagcaaaaggtttggccaagtaatttgagttaaaaagtgttcttcaagagatctactctctggtaatcgattaccagaggatgtaatcgattaccagtggccaaaaatggtttacaacagctactacatatttgaattcatatcttagactgtgtaatcgattacaccatattggtaatcgattacc

SEQ ID NO: 92270 - DNA, 388 bp, Glycine max
agcttccccttctcctcctctcctcagtatcttcttcctctccttcatggccacattcgtcaacacctccagccaccaccgcaacaccttcacgtggcctcaccttcactttgcgtcaccacctctggccatggtagcgtcaccggccatggacgggtggcctcaccttcaccttcgctggcgtcaacaatgaagcacatggtcaggtctccaaaaatggtctcgtatctgaccatggttgcgtctctggccatggacgcatatctcgtctccattacagttgcatgtcgcatctacgaccatggacatcgcttcggcttggtgtgttagcctcaacttgattgcatttggcgtctccattctttccctttactggtttgcttgaatc

SEQ ID NO: 92271 - DNA, 318 bp, Glycine max
agcttctggaggaagcctcttattgattcttttatatgacaactacatgaagctgtcgtggtgacaacgcttgtcagccttcattacccgttggatcttcttcgatatagggtatgcaactttacaagacacttgtccatgatctgacacgatggaactgtgagaatatatatggagtgtgctagaagcctcttattgaagctgctaaagagaactacatgaatctgtctttgtaaaaacgaagtccttgcttgataaccgctggatctaccgcaatcggttgcaactcacaaacacttttcatgatctgaccggagg

SEQ ID NO: 92272 - DNA, 357 bp, Glycine max
agcttctttcgcagatccctcatgtaagactatacctaaactaaacaacattattgtaatagcataattaaaaccaaaacttaacctacagattcctcatgaaggctaagtttcgatcctgctccaatcaagttctaaagcaacagtacatttcccaatgctaatgtcacctaactgtgcacacaagtgggtgatcaaaccaaaagcattcaaacttcacgcattgaatgaagctttgaacatagaaaacacaatcgattagatattatgtatttacatcagctgttcattataaatccccaactatggttgttagccacccattacacagaaaccctaccaatatatgagataaaa

SEQ ID NO: 92273 - DNA, 478 bp, Glycine max
  unsure (1)..(478): unsure at all n locations
tcacctgcggcatgcaagcttaaggaaataaaacataagaaagatatctaagagttggccggttgttctaagcaacacctgatgaagctcatatcatcttctagcctagtgatacgagtattcatcccatcaaagagagtatctatctcatcaaaatgctcacccacaaatgctcgaagatcgtggagctctgtgaggacttcagtcagcagagaagaagaagcatccctttgtggtggaggagatggggtacattcatcaagaataggcggtggcaagtcttgtttgtgaacccactgaccatcaacatccttccgataaccaaaggaagtaacaacactgacatcaatggagaaagacctcttaaccttgacatatggntcatcaaccaaaggaacattgatatgatgaagataacaagtaacaatgtgcggatacgagagaggtgcatcggcccgtaatgccttatgcattctga

SEQ ID NO: 92274 - DNA, 511 bp, Glycine max
  unsure (1)..(511): unsure at all n locations
agcttgcatgatntacattctccctctttttgatgatgacaaacatgtgatttcttcttgacaccatcaaagcttgcatgatttacattctctcccttttttatgatgacaaccacctgtaggttaggagcaacaacaacaagaaaatatccatttgaatatagttttactccccctttgatttgcaatgtttgcttatatgagacatttgaagatttcatagataaaaagttgtctcataaagatttcatatatctttcatctatctctccccctttgtcaacatcaaaaacaaatcatgaatagagaggagaaaaaatggtaccacttgttgtaatgtatgagaatcaagtgataccaaaaggcattataacaaccattcaatattaatcaagcaanaacaagtacaataacacatcaatcaaacacaatctataacataacacaatataaaaacaattatcaaagacaagtgatcatatatanaatataatcaatcaatcaaagtaac

SEQ ID NO: 92275 - DNA, 312 bp, Glycine max
caattcattagtgggctttccttctgtgtccaacatcatgggatgttcccagcctttgatgacagctttccaggttctgctatccagtgatttgaggaaggccaccatccttgctctccagtattcatagttggctccatccacaattggtggactgttcactggtcctccttctttcttcatgttcatcagaatttatctccctagatctcactcagtgatttcgagtgccggctctgataccatattgaaattctgataccaatagccagatgtcgcacacgatgtcacgacatcacgcttcataacatg

SEQ ID NO: 92276 - DNA, 448 bp, Glycine max
  unsure (1)..(448): unsure at all n locations
agtcacctgcggcatgcaagcttgaagacatgtaacccaccatcttctcttattagaacatcggtattgtgtccattatcattgttatcatctccctctccatcagtgggggtactacttgagctaccagatccctccacctntgggcgtattctttgaaagattcatgctccctcttacacatgttctgtagttgtattctatccggagccatatcagaattgtactaataatgcccaatgaaggcaaccattaggtccttctgggaatggatccgagaaggttccagattagtatatcaggtgacggntgtcctagtaagactttcctagaagagatgcatcaataatttttcatctttcgcatatgcgctcattttcttgtagtacattatcacgtgattcctggggcaagtaagtccctagtacttgtcgaaatcggcatcttg

SEQ ID NO: 92277 - DNA, 477 bp, Glycine max
  unsure (1)..(477): unsure at all n locations
agcttcaccttctggtcctcctcatagttgtggcatgaganaacatgctctattttcatctcccactccaagtaggcctccggatcattctttcctttaaatggaggaatgttgagtttaataccatcaattcggttttgtctaggaacaccatcattccctcttctcctcctttcttcttcattatgatctctattctccattngatccaacctctcatggagcgcatcatctcgttgtttcattaacctctccatatgttgcatcaaagcttgcatttggaatagcgaaagccccactccatcattaggattagtacctgacatctcaaacaaacaaatcaaacgtaacaagacaattatagttgctgtttgaatacctcacccactcaagtgtatcacacaattatggcttttctctaatgaaacactctagccttttaccactctaacttccctcgagttcttaggcaattca

SEQ ID NO: 92278 - DNA, 421 bp, Glycine max
agcttgaatcgattacacatatactgtgaatgattattatagcagatctgcagacaatatactcaacagtcacatctctttatgcggcttgtgaatgagatatcaaaggcctatatatgtgacttgagacacgaatttgctgagaattttttcagaacataatggacttatactcttatacagagaaatggtattatcctcttacaaattccttcggccagatacttgcgattcaataaggaattatatgagcgctctcattgattaatctatctctttcaagagagatttcttcttctcttcttcttcattcttaaaatggattaacagaccgacgatctgttgttgtgctataattctaaacacacatgatggattgctcttgtgtgttagaactagtaatagaatttacaagatagtg

SEQ ID NO: 92279 - DNA, 295 bp, Glycine max
  unsure (1)..(295): unsure at all n locations
agcttaaactttttttttaattaatnaatatatttacatctatattggattcgactctcttaccttagtttaaccgcactgtgcattgatacaagccgaataatctagaacacgaaagagagtataatgctgacgtggctaatggaagaaaacatatttaatggatatatttgaaaggacgaaaatgctctctgcttcttctgatctccccctcagcaggataagggagtctttccgttcacatatgacctcactctctatctctctttatgtcgctcatccaagaacctattcg

SEQ ID NO: 92280 - DNA, 466 bp, Glycine max
  unsure (1)..(466): unsure at all n locations
agcttgtttttgtgcttaatcactcaatgtattaaggtattaccttatcttaatcactcaagaatgactcttggcatctcatggaaatcgtgtacatcaagcccacaattagtattgtttccatttgaattctctactataaatggctaaagtacagctttgcaaaaaatggatattcttgtttttttatcacaactagtaaatactatcctaaacaccttgattactgtgctaatctccctagaattaagtgtaaccaaagtgaacctcacacagagatcactctcacatagagctaaattacactgtcactcagtgtacaacacacntttgtcatagaaagaagtttcgttcaggaagtttccatatctctgccaagctagactaaacaaattatgtacactaactatagacatatatagcatgggaattatgcacttaanattatataaagaataaattaaat

SEQ ID NO: 92281 - DNA, 489 bp, Glycine max
  unsure (1)..(489): unsure at all n locations
agcttaacgtggtgaggcttgtatattatttattcttagttaagttttattagaatattaatcacacatctttattttaaaagaacttataaaagggttggagcaatttgttggcccaaaataacaatatacaagtataggtattaaactcttatgagaaaaaaaatttatgcactgattgatatttacagtataataagttttatacaatcattcaattacaatcaatcatgtataatagaatttttgattcttaaaataattataaagtaattcaaacgataattctgtgtttaactaataatataaaattggtttacattatcaatgtatatgtattaaagtctaagagataaaataaagattgaatatgtgcatcttgagaaaataatgagttttaatatatatggttattttgactgcataattatgatttactatnattttatctgaaatttgatttaatcaatggttacataaaattcttaa

SEQ ID NO: 92282 - DNA, 493 bp, Glycine max
  unsure (1)..(493): unsure at all n locations
agcttaagctccttcaactgcacaaggctcttattattngaagagtattcttgtggaaccttcacccgacaaagacactgacgaaaacttatcttctcctttntggaaaaagtatgacaagctgggtgcaagtaaattntattcccatcagaccttggatgcaactgtgatcgtatccccatatcagctagatcttgacgggtattcaagccatccttcgtctcaccttgaatcttaaggagtgtcccaatcacactatcacatacattnttctccacatgcataacatcaatacaatgtctaacgtctagatcagaccagtacggaagatcaaagaanatggacctcttctttcatatgcaactgtntactttatccttcttttgggtctttccaaatactgtattgaggtcttgaacccgctgatatacctgctcaccaatcaatggtatcggcgcaacatcctgctctttgacttcattaaaaagctttt

SEQ ID NO: 92283 - DNA, 436 bp, Glycine max
  unsure (1)..(436): unsure at all n locations
gcttatacgggatgttgaaatttatcctttatttaagtttaaatatttttataattattactttgcttgtatcgtcattntgcattttaattgtttatactctgcgttgaaatttatgatttattgttaagatggatgaagatcaatggatgtatgacagtataatgtctgaagaagttaatatggattatcaaaatgaagaagaatatggtgtgaatgaaccacatgttgattgttcgaatgtgttcaatacttctcaagtaataatgttcatgatagtgagtgatntaataaaatgaatgtgttatagaaaattgaaattgtctggattgctctgtangtgtttgacagctgagatgatgtattgcggtgggctcgatccattgctcatganaacggatttgtggcggtcattataacgtntgacacaaacact

SEQ ID NO: 92284 - DNA, 417 bp, Glycine max
tagacaaatagaatactgcgcactacagctctatttctataccagttcgaacatgtttctcatacaaatctgtgcagaatattgaaccctgttcaaagaaaccagacatacagttcttatgcagaattgtgtgcgacaaaatagaagccttaatttatacatatagacaccaactatgaatctacgattctatgaactatgcagggtgacgtgagaaagactaatatcaattatcaagcactaattccatctccggggctaaatatcgttgatcccaagttggccacttgaaactgtgaagcatacttgttggaagcagcttctataactggcggttattcagaaatgtccagctgctcttgtccacctgcactcaccccaagcatttgctaaaatatatattaatacatatgcatc

SEQ ID NO: 92285 - DNA, 460 bp, Glycine max
  unsure (1)..(460): unsure at all n locations
gcttgatggtgtcgagaagaaatcacatgtttgtcatcatcaaaaatttggagaatgtgaatgtatgtatacatgattttgatgatgtcaaagaagaatctaacaaggctgcttcaaatgataagcatttgcttcaagaataattcaagattgcttcaacaaacaaagccttgtttcaagattcactaaagaccaagccttgccttaaaacaaagtgctttcaagacatgcaaggctctggtaatcgattaccaggaagtgtaatcgattaccacaagacagggttgagaaatagctgttgaaaaagggtttgaatttgaattttcaacatgtaatcgattaccatatgtttgtaatcgattaccagcaacgaaacttgggaaattcaaattctaaagtcataacccttcanattataactgtgtaatcgattacacacacattgtaatcgattaccagt

SEQ ID NO: 92286 - DNA, 422 bp, Glycine max
  unsure (1)..(422): unsure at all n locations
gtcacctgcggcatgcaagcttgccacccagctcacccaggcgagctcttctcgcccaggcgagcatggttgcttcctccagaagcaacagccttctggaggaatcttctggagggcccaagtgggcctggtttctatttgcacccccatttttactaaatacgccccctgcttttttttggtgattctttttttcgtaaagttacggaaacttacgaatttcgtaacgatacttgttttctttccgtaatgttacggaaccttgtggattacataatcatcccctttttgacttacggaatgttacggaacctcactaattgtgcaacgatgcttccatttgatttccggtgtgtcacggaaccttacggattgtgcatcaatattntcttttgttttccggcacgtcccggaatttcaca

SEQ ID NO: 92287 - DNA, 188 bp, Glycine max
agcttgtcagtcttgtcgtccatgcgagcattgttgcttactccgaaagcgcctcgcttatggacgactgaggcggagagacctggagggcatgatgacagtggacgccctgcttactactatacgcgacccacataagcatattggcaacggtttttgtatgacgacaccagacctagctagaatcg

SEQ ID NO: 92288 - DNA, 460 bp, Glycine max
  unsure (1)..(460): unsure at all n locations
agcttgccacccttctcgcccaggcgagcattgntgcttcctccagaagcaacaaccttctggaggaaggatctggaaggcccacgtgggccagattgctatttacacccccctttttactaaatgcacccccctttatttttttggtaattttttttctgtaacgttacgaaactttacgaatttcgtaacgatacttattttccttccgcaaggttatgaatccttacggattacgtatttactcttttttagctttcgaagaagttatggaaactcacggattgcgcagaaacacctcttgtcgacttccaccacattacagaatttcacggatcgcgcatgcttgcttccttntgatttctgagacgtctcgggacttcatttattgtgcaacaaaagacgccatgtatctcacagcggctaaccaaaggttgcatgtcatcaagtaataatcccc

SEQ ID NO: 92289 - DNA, 439 bp, Glycine max
  unsure (1)..(439): unsure at all n locations
agcttccatnggtgtcttgaaatctaaggcttatgaaggacatctattaatcaaatatgttgttgtgtttgcagcttctccccaaaaggtctttggcagtcctgcacttagaagcatgcacctcactctttccaaaatggtcctattcattctttctgccaaaccattctgctgtggagtgtgagggactgttttatgccttttgatgtctattttcctgcaaaactcattgaactgctccgaaacaaactccaggccattgtcagttcttaaaacttttaattttgtaccaagttgatttccaacaagagtatgccattctctgaattattgagaaacttccgacatatntttcacaacatacaaccatactcttcttgagaaatcatctatgatggtgagaaagtatgaagctccaccatgagttttcactctagat

SEQ ID NO: 92290 - DNA, 348 bp, Glycine max
atagtatccttgtggaaccatcacccgacgaagacactgacaaaaacttatcgtttccttcttggacaaagtatggcatgatgagggcaagtaaattttcttcccatcacaccttggatgcaactgtgctcttatacacatatcaactacatattgatgggtgttcaagccatccttcatgttgccgtgaatgttaccgagcagtccaatcacactgtcacaaacattgttcttcacatgcatgacatcaatgcaatgtcttacgtctagatcacagcagtacagaagatcaaagaaaatggacctctccttcatatgcacgctgactttatcttctttgggcctccc

SEQ ID NO: 92291 - DNA, 266 bp, Glycine max
  unsure (1)..(266): unsure at all n locations
agcttagttagtgtgctaactaatgtttataatatgatgtanggattaagtgggtctaacttatgtcttatatgtcatcaagaaaggaaactcttttccatcttttttgtgattgtatggatactaagctgatgtggcaatgttttattcgagtataaggttcaatacaacatcaattctttcataaccaattgtcgcaacctacccttttgcgggtgtcgcaacatgcccttttgcgggcgagcgaaggcgatgctcacaggtgc

SEQ ID NO: 92292 - DNA, 415 bp, Glycine max
ataatacaagagtcttcatagactatatccatttaattatcgcattgattaaatgcaaactacacggtacgatcgggagtaatttttctgagtgatgaattcgttgcttgctttccaaatacaccacctccacagcatattggacatgatagaaagtactttcttaatctttgacacaaaataaacatagcactttatttgtgtgctacatcaaactatttaagcttacggatagactaatcgagtctgttgatttgtctcttgcaccacatgggacaccatacatagtacatatgcgcagccatgcttcatagcaaaaatgttgctatgagcggaaaacactacggaagaccttccctaagaaatgtctaatcctatatggcgtcgcttacttatcaagaggagctcattgatc

SEQ ID NO: 92293 - DNA, 498 bp, Glycine max
  unsure (1)..(498): unsure at all n locations
tacctgccgcatgcaagcttctagagaaagctacatggagctgcctcttgtaanacgcttcccagccttttttaaccggtggatcttctccaaatgtggtctgcaccttcacacgacaattgtccatgatctgaccgttgggatcattgagaagatatctggagtgtgctcgaagcttccgttcccgagagcattacttatttaagcactccagcctttgctttcgtgtagcttaagaaaaacgtcatttcttcttctttctttcttccaaagtcatttctaaagttccaagcactttctccatcacccacagccaccattagccaccacaaaccatcattgttctccattgaaaacccacaccgagaggaaccctttaaccaaagcggaatcttccaacttggcttgcggtttcggtagagaacgaaaaccctaatctgacctttcgttntctttcaaggtaatcatgggtctatgctctgttcttgtaagtccatc

SEQ ID NO: 92294 - DNA, 491 bp, Glycine max
  unsure (1)..(491): unsure at all n locations
agtcacctgcggcatgcaagcttatcataaccatgtatgagtggattattatgtacctcatgaatatgtttgcaactcttagagataaattgaaaaattacagaggtgaagtgatgcctaagcccctataaaggtcggattaggaggttgaaaagtctgggaattgggtagctgcttggggaggagatggtgattttgaagtcacacatatgcattatggtaaacaaatagagttgttcatctaacttataaggattggttggcataccgtgcagacatgcagtggctgccatacaattcanaaattttaaggttgtggattatgtgaataattattattcaagggatacatatnggtgttgttatggacacaaggtggcatcaattaatggtatggatatatnggctagtacagagtttgatgagattcaaccaccanaatacanaaaggatcctggtataccaaagaaattgtaaggagagagcatgat

SEQ ID NO: 92295 - DNA, 421 bp, Glycine max
  unsure (1)..(421): unsure at all n locations
agctntgttgatttggtcttcgccgtgcaaatgattgaagtgggtcttaaaagaggcaaatctgatcatcttgctttgataaaaaaaaaaaaaactgtggcacgtgaagaggatgagaaggagggagaaacctatgctgtgactgccattcttatacgaccaagtttcccaccaacccaacaatgtcattactcagccaataacaacccttctcattacccaccacccagtcatccacaaaggccatccctaaaatcaaccacaaagcctacctatcgcacttccaatgacaaacaccacctttagcataaaccataacaccaaccaagaaatgaattttgcagtgaanaagcctgtagaattcaccctaattccagtgtcctatgctaactngctcccatatctacttgataattcaatg

SEQ ID NO: 92296 - DNA, 454 bp, Glycine max
  unsure (1)..(454): unsure at all n locations
gatccttaagcacctgcagctgcagcttgatactgaattgagtatggcacacttattgcatgtctgatatgccttttaaaggcttgaaaagtgcgagaaaacgagctgtgttttctacattntctggaaaaatgcgatgaactcgctaagcaagaaggctgcgctaagcgagttcatcaatactcattgtatataagctttatctgaagaactcgccaagcgcacttactgcgctaagcgagttcatcctttgaggatgaacattcatcctcttgctgaactacctatggccaagcgaggctgaatcgctaagcccaggtaacttaaccatttntntggtgatagccacgtgctaagctgagcattcctaagccaagcgcaattggctgcggcatccgctgagctaagcgagcttcactcactaagctcccataacttagtgaaatttttgcac

SEQ ID NO: 92297 - DNA, 487 bp, Glycine max
  unsure (1)..(487): unsure at all n locations
agcttgtangattatggngtacccatcacatttggtactaggtggcggtcgggcgatggtgcacaacaagtttttcacatccacaaagcgcgcataaacccaccatcccctgttgcccacctccaactgagctcacgtactcccacgtagcccatatcctcgtttctctcaacaccgggtccccatcaatcctcccaagcttccacaacatccaagcaaaacaacattcaaacagcacaagctatcacagccaagcaaaacagagcaaaggcagaanactctgctcaacacatcaaccaaaatcacagcttttctcacttaaagaccacagtaacaattccttcgttccaattcgttaaccgttggatcgactccatnattttactggaagtctctagtacataagcctacattntgaccgttgggatctactagcaaacatccagaaactcatctgcactgctctttccacagccaaccacacaca

SEQ ID NO: 92298 - DNA, 478 bp, Glycine max
  unsure (1)..(478): unsure at all n locations
agctattctcattattcagacacatttacactgaatatagagttgggcgcttagcgtagtgttccattgtctggcaagtgcaccgcatcgcgcanatagtataaaacggtaagaaccgagtatcgaaatctcggggaactagtgttacttggtaaagctacttcagtgaataggtgtctagtatgaaaagagatgtgtggattatgcacaggtatgtaaactaactattaaaaggaaaatcacatgagtaatgatgcgtaaagacaagtagacaacacgttggtcttcctaataggtgcctgatgttaaaaggatattctctacttaacaatgctcatgtgttctatggtgtctnctgaaatgctaaaccccaatttctcatgatagtctagccaaatcctaatcaagcatcattctcagattcctcttggtggactagactcaaccagaactgcattaagaaaatacatacacaact

SEQ ID NO: 92299 - DNA, 359 bp, Glycine max
ggacttaagtcacgcggctgcagcttgaacttttttgagccacctcttttctatctgaagacctgagggcaagagcttaagtttctcctccttctggtcggttgacgactaaggaggaattctgcccgataagcttgaattgataccataggcccattgttaacccacacactatttttgagggcttttaagccccatatgatctccccctattagggaggtgacctcacgccaaagcatggttaagacaactttagttcctaggtcaatgactttgccaccttcacagatgaggatgtgcgtctcccatactcgagattattaatttcgcacttcagcaagctgagatatacccatat

SEQ ID NO: 92300 - DNA, 352 bp, Glycine max
  unsure (1)..(352): unsure at all n locations
agcttcttctaagagaatataaaatcttatctagatatatctacaatcctaccaacaagaaccataaatcgggagagatatatccacttgtgaaaacttctctatacaaatgctagtcgtaaaagatgactaacaaactcccccaaatctacattgtctgcttgtcctcaagcaaagaaagaacacgatacttgtcctcatgtggcaaactcacactggttattcacaaggagtttgttccaaggaaatcaatcacatgacatgaatggcatataatgttctattcaacagcctcttacaagacatgcannctttcatagatatgaacactgatatcaagcatcacaagctg

SEQ ID NO: 92301 - DNA, 405 bp, Glycine max
agctgtgaatgctctatacaacggatttgactataatatcctcagactgatcaacactcgcacagtggccaaagatgcatgggagaccctgaaaaccactcatgaaggaacctccaaagagaagatgaccagattgcaactgttggccacaaaactcgaaaatctgaagacgaaggaggaagaatgcattcatgacttccacatgaacattcttgaaatcgccaatgcttgcactgccttgggagagaagacgacacatgacaagcgggcgagacagatcctcacatccttgcctaagagatttgacatgaaagtcactgccatagaggacggccatgacacctgcacatgagaggagatgaacgcattggatcccttcaaacctttgagctacgactctcggat

SEQ ID NO: 92302 - DNA, 384 bp, Glycine max
  unsure (1)..(384): unsure at all n locations
agcttgtgcattcaatatcctgataagggtgttccatatgttctaaagactggactaatacatttgttgcccaagtttcatggtcttgcttgtgaagatccacataagcatcttcatgagttccatattgttcgtttcaccatgaagcctcctgatgtccaggaagatcatatctttctaaaggcttttcctcattctctggagggagaggcaaaagattggctgtactaccttgctcccagagccattatcagctgggatgaccttaagaaggtgatcttggagatattcttccctacatctacgaccactatcttcagaagagacgatttatgcatcangcaacttagtggagagagcttgtacgaatactgggaaagattc

SEQ ID NO: 92303 - DNA, 455 bp, Glycine max
ccctcaactagcttgaaagaaagcttgaaggacctcattatgacttttatcaactcactatcaccctcaatctgccacacaccatatagctatcatattggtgcacctatgaccattacattttcgacaataagtgcttaacactattgattcttcaatagtgcaatggccaccatactaccatccacccacctatacacctcttaccatggcgaatttttcataaagtgacccacttattgacttattagctaatggtgcatcaaaatgctcaaccgcagatcttgttcaaacatgtctcagccccaaaattataacctagcttctcaaggaaatactttgaacattctagacactacaaacacccattaagtggtaaggtaagagggattcaacccacactctcttagtgacaaggttagttcaataaaaactacaatagttgaagataagct

SEQ ID NO: 92304 - DNA, 75 bp, Glycine max
cttctcacccttttttctttcaacgcctttctatgattccgccctagtggaaccatgagatcgctcctgatctta

SEQ ID NO: 92305 - DNA, 393 bp, Glycine max
tatgatgatatggaaagcattaaacatagatattaaatgggaaacatctaaacttatgtgttgatattgagaacaatcttaactatagtgtctggtaagaaagaaaaatccagactatcatgatattaatctatcatgaagactcttgagagacctaaagtaatgtagatacattcaccaccattgagaggttggtgacttgagcctattaataggcaatttggatgttgaaattgacaatccaagaaatcagtgacataaccttctttctaaacaattctctaaaactatcaactatcaactatcaactatcatctaatcaattaccaacagtggtatcagagatactttcggcatacattgtgcgtaagtatcttacctacctaccattcc

SEQ ID NO: 92306 - DNA, 444 bp, Glycine max
  unsure (1)..(444): unsure at all n locations
tatagagcttgctatgaanagttaagatcatttttaattattattggccttataagaggaaacgtggatactactctattttgctaagaatatggtagtccattcctaatcttctagatacatatgaatgatatcatatttggtgctactaatgactctgtgagatgatttttcccagcttatgccggccaagtttgagatgaacttgaatggaaaattgaagatctttcttggacttcagatcaagaaaatagatgaacgcatatacatacatcataccaagttcgtgaaggaactttgaagaagtcaagatggacgatgcagcccaataagacccctacatccaaccagttacttggactggcgaagaatanagccggtggtgaaaagaatacagaggaatgatagatctctttcatattcattgcgtcagacctgacatat

SEQ ID NO: 92307 - DNA, 328 bp, Glycine max
attcagggggaatgcctatttatcttattgggggacaatttacacatgtgaggaatgactacataagtgttttacctgttggaaaacactctatctaatggtttggcttattgccaataagactggaattggacaacagtgtaagatacgtcttactatgagctcgggaaaaactcatgtctatgcgaagtttgtaaataggaaaatgaagatgctgtaaatgtcttttggcttacattaaaaaggctaaaagatagatgaggtggttactagaaatgactatgtttgctctatctttgtaaattgtataatgacactagaaaaaaaa

SEQ ID NO: 92308 - DNA, 164 bp, Glycine max
gagaggggaaaaaaaatataaaagggatgatgacctgaaacgaaaaagaaaggcgggagaagaagaaggggaaaaagagaggtagaaggaaggagaagagagaaaagaaggaagagaaaagaagagggataaagggaaggcagaggagaggagaggaggggaag

SEQ ID NO: 92309 - DNA, 124 bp, Glycine max
ggatggcgccggctctacctcttctactttgatctgcgctgtattgccatggtggataatctcctgtgaatgacctcgttgaagcttaatgatccaccctctattgaatctctacaagcaagct

SEQ ID NO: 92310 - DNA, 394 bp, Glycine max
tgtgaaagcgttcacatagccctaggagcggctcgccgagtataccagaacaaaaccgccgagagaattacatattggcaccaccatcgatccgtctgcgaccgtatcataacagaatcgcctcggaaacccgaattttaattgagtccaccgcacttcaattgcatcgatctaaccgcgttacgtatgacgaagcattcgcagcgccagtcaagctctacacccttgggaatttgcaaggaagagacaaatagctaactctcgggtacatttatttaaatggataactgaaaggcccatcattggaatgctctatgatggatagcaccgactttaatacctgatcatcccttaacgggacatactgatagacatttttacaacggaaacagaa

SEQ ID NO: 92311 - DNA, 81 bp, Glycine max
tatgatactcaagcttctaatacttgtacatgaatgaagctctgataccacatgtttgacatgtggcctcagatatcttaa

SEQ ID NO: 92312 - DNA, 412 bp, Glycine max
ctcagacttgttgacactaagatactgccatggacaactacctcctatatgtttgcataattatgaatatgctaatatgcacaaaggctttagttgtttactcaccctcaaaacctataatgactgataatcatgactaatacaactttgatgcttaatttggcaatcaaattcgatgcctaactttgtcaatttacaatttgtctgatgttggatgacaataatgtacttggctgtatatacaacatttgttcataatgagagaaccttatatacctgtgtgagactgaatgcaaggattcctgaggacaagttgaattaatcattgtaatcaatctttgattgtccgattggacagatttgggagactcatatttttatggtgaaaacatgcactaatggtaacaataat

SEQ ID NO: 92313 - DNA, 243 bp, Glycine max
aagaaagcaacagaatctgaggtggcacaactatacacacagatggggtatcttaatacttacgaaacataaggtgtagtgaaaataaatataatgatttgattctaagataaacctagatataaatttagagatattacacgataatggtcatctttcaaacgtctatacacaatgactaatatagtccacaatatgatacagcgctactgagtcagatagagctctgagcagatggtcaca

SEQ ID NO: 92314 - DNA, 266 bp, Glycine max
aacgctgacttctcgtgctttaacttgcctttctggaagactagacacacccctctttctaccacctgcaaaaatcagcctctaatgtctactcaaaacactaaatgcccggatacaagctcaacctatactctataaggcaaaaacattgccggacgaagacctcctagtctatatttacaatagaggcgcttatctaggcctggctcggatatctctaagatatgagaccctaggccatccttgatctctttcagctacttgga

SEQ ID NO: 92315 - DNA, 285 bp, Glycine max
  unsure (1)..(285): unsure at all n locations
accctcanactaaccttggaatctggtttagagataaagttaatgaaactatgtattttgttatgatcttctcaatagactgctgccgacatgtatcatcgaaaccgtgccagtgccggaaggtagtacattatcaggccgatttatggctgcttctcccaaagaagactactaatacatttcttgcgttgtttgcgacgagagatagagtacaatgcttgcacgtggacatcttctcacatatttactctcaatatgtgccacaatgtttaagaatcgtcttac

SEQ ID NO: 92316 - DNA, 315 bp, Glycine max
tgcttttgtgaaaatcgtggcattctttttgtcttcaattattcaagccgcggaatgattggcgtatgctcctccaccacatttgagacgcgatagttgctactctgtcacaatcttcattcccactttatatcgagacccatgaactgatcgtcgctatgcatacatcaccaactgattctggagccccgccaataaaatgtctaacgctgatcaccaattctctattatcactgtatgctgagccccatgatatgatagtcgatcatgcatgactcgtcccactgtacctggagccccgtgaatatgattgcc

SEQ ID NO: 92317 - DNA, 403 bp, Glycine max
  unsure (1)..(403): unsure at all n locations
cttctggaggaagggcctggaaggcccaagtgggccntgtagctatttgcaccacctttatactaaatgcaccccccttctatttttttggtaattcttttttcgtaacgttacgaaactttacgaaattcgtaacgatacttattttccttccgcaaggctacgaatccttacggattatgtatttactcttttttagctttcgaagaagttacggaaactcacggattgcgcaaaaacatctcttttcgactttcgncacattacggaattaatctgatcgcgcaagcctgcttcctttctatttccgagacgtctctggacttcatttattgtgcaacaaaggacgccaagttcctcatagcggctaaccaaagtgtgcatgtcatcaagtaataattcc

SEQ ID NO: 92318 - DNA, 186 bp, Glycine max
ccatcttcctaagagtcactttctgatgtggatagtatgccattctctacagatattaaatgtcatgcatatcgctcgtaatttatatgttcaaaatttccatcaacattaagctcagaatgctgataatgcactgaaatgaccatatactcactattcctaataaatcaatgagaagttctaatt

SEQ ID NO: 92319 - DNA, 323 bp, Glycine max
tattcttatggtctgcctccggacattaccacctcgtaccaatcctgtgtattaagccatgcccctaccttctaggggcgactctcaccttatgaagactatctcgggcaagacgatgtggaatgagatacccatcttggtcccttgttccactctcagagatacattcccgcatgaactaccccaaccgaacatagttcgccatatatctgcctcacccaacccgataaataatctgtcccttctctaagatatggaagattgggcgctagagagaggttaagcatcgaagcctcgtattaccatctggattacggattatg

SEQ ID NO: 92320 - DNA, 461 bp, Glycine max
  unsure (1)..(461): unsure at all n locations
gctctctatgggctgatacaagcnccaagacatttggttgataggctaaaatctactctacttncagttggttttgcgggaagcaaatgtgactcttctctgttcatctacaagcatcaagtgcatattgtctatctctcaatttatgtagatgatatcattatcacaggtacctctacttctcttcttcagcaacaccaagctgcacattgctttctcccttaagcaaatgggtcatttggactattttatggagagatcaagtatttgcctaataactctataatgatgactcacagcaaatatatttgtgatttactccacacaactcacatggttgaagctcattctatttcctctcccatggtgtctaattgcaagctatctaagcatggtgctgatttgtntcttgatccaactctatacatatcagtggtgggtgccctaccatatgctacact

SEQ ID NO: 92321 - DNA, 189 bp, Glycine max
ggctcatactccagctaaaggcccggtggactaacattccattaggcatactgctgctgctgtaactctataggatacccggtccgactctattccccctatatgagctcactacaatgtactggccgtacgctatacatcgtcgtgactgtgaaaatcctgtcgttacccatcttattcgtcttgcat

SEQ ID NO: 92322 - DNA, 311 bp, Glycine max
ttaataaatagaagatggagacgccgctatcctattatccattgacataaacagtatcagcatggagtaaatcaccattgaaggacctcatagaactcaattatcaggctcatagagactcaaaacaactgcattagaggatatacacaaagctctaatgtgaggaagagccaagtaaaaacctcgattgagaaatcttcaagggagaagaaatctacctaggcatgataaaattataatggcaaatcaggatggcaggttacagctaggtattagcatggagatagcgtaatgaaataatagtatttata

SEQ ID NO: 92323 - DNA, 442 bp, Glycine max
aatttgctttgctaacatgtctactagatgagatcaaatatgaagtgaatgaagtattctagttctctaagttttctaagaacttacttctacttgaaatttggctagaagaatcgaattaatcgattgcctaacttggtaattgagtgcccaagctagtcttaatagagagaagaatctatagcttaggataatcgattacatcattttattatcaattaccaagctcttggaaaaaatgaaaagttctctgtgcagttctataatcaattaccatatgtgatagtcaattaccaagagagcacaaaagatacaaagatactccgactgaaatgaattaatcgattaccccatttgataattgatgataccagctttggaaattcaaaacaaagggtatgttaacgaattaatcgattgtctaattttataatcaattaga

SEQ ID NO: 92324 - DNA, 217 bp, Glycine max
ctgcagttctcactttggcgtattttgaaaattgtccctttaccacgtcgtgtcattatctaccaataaatgacttacacctaatgaagcccatagtcttcaaggactaaagtcagtatgtccatacaccccatagattttgagaagttacagtctattttggctgcccttcacataatttaaagtccggcatatccttctgtaaacccctaatgga

SEQ ID NO: 92325 - DNA, 460 bp, Glycine max
  unsure (1)..(460): unsure at all n locations
agcttgtcgttccgttccaccgcgcaacggatgtcctcttttctcccgttcccatcacaatgcccctgccactgcctcgcctctgcctnctacgacgaccgcagtgccggcgccaaacacaacggctgggactctgtgctgcaccagttctccgaggtcaccaatcaagtcaattcctactggaagtccctcgggaacgccgccgctgacgatcgcgtccacgtctactgtggcgacgaggattgggattgggatcgccggcatttctaggaaatcgacgagcaagagcgcctcctctcgattttcaaggtacacggatttcaatttgtgtcttctcgcgtgctnttaccaaagtttttgtgaaagncattattctaaatcaatgtcattgcgtttctttattcgtcgaaaaaagaactcaatntattagtggttctgaggaggtttcatatgtggaaac

SEQ ID NO: 92326 - DNA, 487 bp, Glycine max
  unsure (1)..(487): unsure at all n locations
tcctccacgttttcctccatacctagaacttcanaccttctattctcactcaattcttcaccaaatcacgtcccgtaaagcccaatcttcctctntttcactcctctgtcacttcaaccgatcaaaatccagaaaaacttcatcaaatggcagagccatcaaagaagagaaaaggatcatcctccaccgctatcgttgctgcccatcgccgtcacggcccatccggagcacccacagcacctattcctccttctttgtcatctccaagatcatcaacactgttttcatctgatgatcaacgtctacggtacctttctcagttttcttctagaataatcttagaccctaagtacctagacgtagagttctctaatgatgaaacgtttgattgctatcaagtgttacacaattctggtcttggtgaattcatgtcatttaaattgccatattatcctgaacttgtaaggtcttctactgcaattaaaaa

SEQ ID NO: 92327 - DNA, 517 bp, Glycine max
  unsure (1)..(517): unsure at all n locations
ttaagtcacctgcggcatgcaagcttaaggtccaagagtgganaccctgacttctgatctctatgtctaaagggatccttatgcttgtattgtaactggtgtaagatagtaatatctaattattttcactttacagtttacaggaccctattaggcacagtgaagggaatttttcattctcagttgttacttaagcgtgctatgtatttattatatattaccaatttttgttatttttttccttgaaatgcttcttcatgcccctataaatcttttcaaagggatgtataatgattcctcagcagcattccaaaatcctcaagatatccactcttaaagggaaaaaaaatgaaaagtgacttgttctcctgctcaattataaagggtcttgctaacttaggacattngattaaagaattaanagaaaaaaatatctattatataaattataggagaatgtaaaaaaaaaataaaatcatgtgtgacataattctacagatcccaatanaaagtttac

SEQ ID NO: 92328 - DNA, 473 bp, Glycine max
  unsure (1)..(473): unsure at all n locations
caacaatcataaaacttgttatcaatgtttctttttntatctgggattggaacgcaggcaaaacttaaaatgcggtttcttgattatttttgcagagctcttctatcagaattgaaatttcactttgataatctgttttgaaatccctcacaacatacaatccgaatctttattaggcagattactaagaaactttattgcgcaaaattactgagataaaactccaattctgattccagaacagcaccaaaagcagaactaagagaaacttgggatgttgccattggttgaggatttgatctgggaaatatattataagtatatttgtgtatctgttaggcattgaattctttgaacaggaatctgtgaaactcaccatagcctaagaggatggagtttgtggaagccaagatagcaccaccaagtgcatatctgttgaggcgaggcttattgctttggtatgaaacacaatt

SEQ ID NO: 92329 - DNA, 491 bp, Glycine max
  unsure (1)..(491): unsure at all n locations
agctnntgccgattannttttgtcggcgaaaggatctatgcttctctgagaagaggcaaatttgattatgctactttgatgaataagaagcctgcggcaaatggagagaataagaaagagggaggaacccatgttgtgactgtcgttcctacatggaaaaatttcccactagctcaacaatatcaatactcagccaatatgattccttctcattacccaccaccctaccagccaagaacacccaatcatccataaaggccacccttgaatcaaccacaaaacccgcctgctgcatatctaataccaaacaccacctttaacacgaaccaaaacaccaaccaggaaaggatatttctataaaagaagcttgtggaattcaccccaatttcggagtcatatgctaacttacttccatatctactcaaaaatgcaatggtagccataatcccagcanagattcctcaacctccattgtctcaacgatacaactc

SEQ ID NO: 92330 - DNA, 482 bp, Glycine max
  unsure (1)..(482): unsure at all n locations
ngacaaaggaaagggacaatttttcataccatctactatgtcattatagttataaatgatgcacagatgaattatgctaccacagaaaaagaaatgttggcaattgtctatgcacttgaaaagtttaaatcttatttggtaggctcaagagttatcatctacactgatcatgcagctattaaatacttgctcaacaaggctaattccaaaccaagattgataagatggatttttttgttgcaagaatttgatttggtgattcgcgataaaaagggatcagagaatgttgtagctgatcatctgtcaagattagtgaatgaggaagttacagcaaaagaagttgaagtgagagatcaattccctgatgaatcactatttttaataagtgaaagaccctggnttgctgatatagccaactntatagtngcangaatcatcccaaaggattntaattggtagcagaggaagaaattctgcatgat

SEQ ID NO: 92331 - DNA, 481 bp, Glycine max
  unsure (1)..(481): unsure at all n locations
ttaagtcacctgcggcatgaagctataatttggagacagnttactggttgtttatttctaatntcccaatattaaaattgaataaactctgatattatatcgaaatcatattagacctatctttctctcataagntagtttatgagaggaaaatagattaatcaagtcttataaagatgtattcatattcctaactattaatgtaagatattgtaacacgaataattttaatttgcttaaaatatattggttatggataagtcgatgtttaataattagtggggttttttttaaagctaatttctataatggattcgtatacacacaaaacagagccacacacatgcgttgggtggtatatgactttacataggtgagcccatgaatgtgaggccgtttgtatattaggttctatcatcaacgcaattttccagctataatgaatgtcttggtgagtcatgatgatcaattatatgtggct

SEQ ID NO: 92332 - DNA, 484 bp, Glycine max
cgcgattcagtccaaggtcaacttcagcttctcgcaaccattccctcttgtggtaatattatggcatacattcataagtcatcattgatgacttatacatcttccttttacaaaattattttggcataaaagatccagtgatatgtaagaatataatgactgtgaagattttagagactctcatacttagaatttcgtagttcagatttgaatggatttaccaaatatgattcaaaagaatgtaatggatttttaagattataaagaattatgtgaatttgtaaaaaacacttaaaactattgatgaagattcatgaattctgcctattaatattttaaataaaacttatattttacgaagaaccctaaacctattacataacaaattaattgtccctaacatattgataaacataatataaatataataggtttagttttcttgcatcaatcattttagtaccagtaaaattatatattatga

SEQ ID NO: 92333 - DNA, 450 bp, Glycine max
agcttgctaacccatggaagctcctaatatctcccactctttttggggtgggccattcttggatggccttgattttctcagggtccacttggaccccatttctaccaactacaaaacctaagaaaactatattatctacacaaaaggtacacttctctatatttgcatagagggtgtttttcctaaggactgaaagaacttgtctgagatgtcctaagtgatcatctaggctcctactatacactaaaatatcatcaaaataaacaactacaaatctacctatgaaatcccttaagacatgatgcataagcctcataaaggtgcttggtgcattagtgagcccaaaaagcatcactagccattcatacaaaccaaacttggtcttgaaaagcagtgtccactcatcaccctttttcatcctgagttggtgataaccacttttaagatcaa

SEQ ID NO: 92334 - DNA, 448 bp, Glycine max
  unsure (1)..(448): unsure at all n locations
gaccttgatactaagcttagcagaaagtcattggaaatgggtatattttcttgacttgtgagtgggtcaaagaagcacgccaggttaatataatcaccatttattcaccatgtgatatccataataagagacgtctatgggagtctgtaaagcagttgaaagatgcagcgacaggggggctttggtgtattctgggtgactntaactccatcagggaccttgatgaacgttttggtaattgccataggttacccacagatagtagtatcaatgaatntaatgaatggattgatgatttggagctccttgaggctccatggatgggtagaaagtttacgtggtacagacccaatggtgcatctaggagcatgttggacagggtttctgtgtcccccgagtggttggatacatggncttggcagctacaaactactcttgcaagaaactt

SEQ ID NO: 92335 - DNA, 426 bp, Glycine max
  unsure (1)..(426): unsure at all n locations
agctnggatagaccctatgcttcatttctattatggaagctaaacccttgctgggagaaccactccaagtccaaatactngggtattctcaaattcttcacactgtatatcatcttgaaggtgttcttcttactctcatctataaaccatgtatcaagcctattgagagtggatcgagagcactctccttgtttcctctgggaggacttggctttcttctgagctctggaagggttgctagccattntttagaagagaaatagagtttgggcgtagaagaaatgttgggttcaaaaatggctaattagaggaagttgtggtgtaacttgtgaaaggggttagggttgtcttttatagagaggtagtgatgttctatttggttaagggtggtggtgggagaaatgtaagaataatggttgtttatga

SEQ ID NO: 92336 - DNA, 465 bp, Glycine max
gcggattggtctatgccggcgaaatgatcgaagtgtgttttaaagaggagaatctaatcatcttgctttgataaatgcaaaaaaaaaactgcggcaagtgaagaggatgagaatgagggagaagcccatgctgtgactgccaatcctatacagccaagtttcccaccaacccaacaatgtcattactcagccaataacaaaccttctccttacccaccgcccagttatccacaaaggcaatccctaaatcaaccacaaagtctgtctaccgcacttccaatgacgaacaccacctttagcacaaaccataaacaccaaccaagaaatgatatttgcagtgaaaaagcctgtagaattcaccccaattccagtgtcctatgctaacttgctcccatatatacttgataattcaatggtagccataaccccagccaaggttcatcaacctgcatttttccgagaata

SEQ ID NO: 92337 - DNA, 405 bp, Glycine max
  unsure (1)..(405): unsure at all n locations
agctngatcaaaacaattatctaattattctttccactcacatcatacaattgctcattcaaatcattctcaaacactcatttcatgcaaaacaatccactacatatcattttcaatcaattcattgttcaaacacgcttttggtacaaacaaacaactcaaagtgctgaaatttatataattgaaatntaaaaaaattgaaatataaaatctgaaattaaaatgactgaacataaatcataaaataattgaaaataaactaatatgttcgagatgcacaaatttaaatgtcctgctcctgtggttgctnctatgcatgctcattaaggtccaacacctgagcagctggtgcagatggtgtggcataatcaagtatgggtgctanggatggctttgggatctggt

SEQ ID NO: 92338 - DNA, 465 bp, Glycine max
  unsure (1)..(465): unsure at all n locations
tcattggtgtantttgatctcctttttatgttctttattgtgggagtgtgctcaaatatatggggcaattttgatttgttttcttgcttgattaggttgaattaggggttggtatgagatggccctaggcctataatgcattttgaaacaataggatatgccacattgtccctgttctcttgctattgatgcctaaacgcgcgcccaccaagtgttcggtgaaatgcctcaatggcattagcgcgtgacttttgtaaggagacaacccatggggtattctggtttgtgcatatattctatttttttggaatatgtattcattcccgagaaaggctagagtaattgccccacatatatcctaggcctagaaactaanattttatgcaaaaagaacacataaggaggtgcatatnngggtaaagtaccctttttggccagcaatcagctatgggccacactacaata

SEQ ID NO: 92339 - DNA, 446 bp, Glycine max
  unsure (1)..(446): unsure at all n locations
agctngcttgtggggcttctatggaggctgtttcttngagcttcaatgaggtcctttaatggtgattttccaccatggagatgtagcggaagacaaaggagaagaggtgagaggaggtgccatccactagggaataagccatggaagaaggagctccaccaccaggatgagccttggataagaagcttggagaggatgcttcaatggaggaaaagaaagagggagagaaagagagaggggggagcacgaaattgatggaagaaaaaagagagagaagttgaactttgagttgtgtctcacaagactctcattcatcanagttacaacaagtgttacacatgtttcaatntatagactangtagattccttgagaagcttctttgaaaaaaattccctgagaagctagagcttagctacacacacccctctaataactaagctcaca

SEQ ID NO: 92340 - DNA, 482 bp, Glycine max
  unsure (1)..(482): unsure at all n locations
tgtccttggtttagacatgattgatacatgatttggtacntttatgattcaatttgggcaaaattggatgagggaaagtgtgatttcgaaaatctgcactttatgcagaattttgctgtcaaataggtgcagcagaattttggctttgtgcagaaagtgttgtgtatttgctggttgtggaaagagtagtacagattgggttttggacgttttctagcagatcccaacggtcataaggtagttntatgtgctagagacttccagtaaaattttcgagtcgatccaacggttaacaaattggaacgaagagaatattactggggtatctgagtgtgaaaagctgtgatgttgggcagagttttctacctctgcccggttttcttggctgtgttagttcatgatgctcggatgttgaattacttggatgttgtggaagctcgagaggattgatggggacccggcgttgataggaacgaggatta

SEQ ID NO: 92341 - DNA, 412 bp, Glycine max
agcttgtctcagcgtttatgcgagttggagtcctacatgctagctatcatcgccgagtagggagaagagttatgtctagccacagcccacgagcatataatcgcggatgagtatgcccaagtatacgcggaaaaagaggctagaggaagggtgatcgactctttacaccaagaggcaaccatgtggatggatcggtttgcccttaccttgaacgggagtcaagaacttccccgattgttagccaaggcctaggcgatggcagacacctactccgcccccgaagagattcatgggctgctcggctattgtcagcatatgatagacttaatggcccacataattagaaatcgttaggaaacttgtatggtctctcagaccttgactagatatgaattcctctctgaaataaaat

SEQ ID NO: 92342 - DNA, 373 bp, Glycine max
  unsure (1)..(373): unsure at all n locations
agcctagagaaaaactggactataaaaatagttgtttaatagctatgcaagatgtactgatagtataaaatatgattnttctaagctattacataatattaaatcttgactatctaaatataagtatatgattaacatttaattctcaataatattaatcataatattaaatggagaagaagaaataccaaattatcgcaataagaataaatattgataattgattgtatcaactaatcaagattaaaacacattcttttaaatggatacctagtattaaatcttgactatccatacctaattgtatgattagcacttaaatttctcactatcatgcaaaattgactctctcattgatggatggaaatgatta

SEQ ID NO: 92343 - DNA, 430 bp, Glycine max
taacaactaactcaaggatgaagggagcctccacctttcattttcaccgaccttattcactgtgaggaccattccttttgctcctttactctttttattgaactagggtcatttatatatatatatattgaaggaggttggaattcactatgcattcaattggcacaacctgcacaattagtatcaattcccctgccttttttcacattgtcacaattttaattcaatacaaattatgtgtcaaagaaattattcaattgggctcaacttacgaaactaaggggagattctctaaaaaaatttgggctcacaagaatgtcgatctatgcctcaacatttataaagattcagcatcattcatggatatgcatgtgacaacagaatacataagggatgttgctgatagggataatcacacacaccaaacgat

SEQ ID NO: 92344 - DNA, 200 bp, Glycine max
aacaggcatacatagctccaatcaaacatgctcaggctgaggcacgactttaaatcgaacacaagaagaaacgggagaccatcaccaaggaaaaagaccaaaactggtcacacgacactcgtacctaggaaagccaggcaggaagcgccaaggacactctgacgggcacaggcaaaaacccccccgcgcgcaccaaagcg

SEQ ID NO: 92345 - DNA, 357 bp, Glycine max
gacacataacactaagcttgattggatatgatgatggtacatatgaatttgatcttattatgatcgtcgactccacatggtgcctgaacccgatgctatgcttatctttattatgtaccacttgattcaatcgacatgtgtacgtacgagtaatgggtgctcaaattcaaacatattgatctaaactataaagcaaaaattgaacttaaacaaatcaatcgtctctataatttgtctgagtaatatatctttcaaactaatgcctgatgcggttcaatcttgggtatgtttctcttgaaatcaaaccctaacccaactcctttaatgtcatatgttatatatgtaacaacatgagtt

SEQ ID NO: 92346 - DNA, 513 bp, Glycine max
  unsure (1)..(513): unsure at all n locations
taagtcacctgaggcatgaagcnttgtttttagtaggggcaaantnttctatatgcttaattctcttagaaaaacggtagtcacatatcgtgagtgaaattaatttgtgatccctgtgaattgggagatactcatatctcttatccaagggaaaaaaaaatgcataaactaaagcatatcattagtgagcaggcaccgacgcacaactgttaatgacgttgatagcaatgggttgtcttttaaccaagaaaagaaagtgtttgtacgccacatgagcaggtatatattntgaaggaccacatagagaattccccacattgaagataacttggctggtcgctgcatccgtttntaagttgtacttatcnatggttgaaactctgaattataccatttatcattgttttccacgcgacttaatttgtctaaacactcagattaaaccatgaccaaaaatctggataagcttaaataagacgcttattgtagtatcaatatcatatatagtactta

SEQ ID NO: 92347 - DNA, 454 bp, Glycine max
  unsure (1)..(454): unsure at all n locations
atgattgttggcagcctaactctatttcttgcctagaaagtccttcgaattcaatttatgtgtttatttctgtatgatatgagatgaaatgcaaaggttgggactngtgttagttgtttatgatggaatgagcctaaacacttgagcttgagtgaagcaatgactgtgaggttttagttgatgatccttccttgatttctgtcatacttactagcttattttagttgtgactctaatgcatatgttcctatctttgaaaagctgcatatttgtgaaaagcaattcagtgaagcattccatgatattcagttcatatggttgaatttctctgtgaagcaagcaccattgttgagtgatcactgtagtttgtcacttgtggacaagtgaactgttctttctttgcttgaggacaagcaaaactataaatttcggggaagttgtaattgtcttatac

SEQ ID NO: 92348 - DNA, 507 bp, Glycine max
  unsure (1)..(507): unsure at all n locations
gtcacctgaggcatgcagctngcttttgtntccttctttccccgggagatanctcntggtcttgaacgcaaggagcaacccttaccatttcctcttgcagtaattccactttccttacttgggctttactcttaaacactaaccttgtttcattatttgctcaaaattctagcctatgctcacacagtgtccttctagatagatctcactctatgtccttaaagagtcatatctcatccattccaagacatcacaatagtttcacatcaccatgtgtcataactgaggatggaaccatgaacaaataatacaacaataacctaagatattcatggcatccacatcatcaatgacatgactcagaccaactcacaataatgcactatgtaatgaaatgcaatgttcttttctctttttcatatgcatgcggtaccaaaaataaaactgcgaaagaagatcatgaagacatgtagtaacggatccacatgatcacattactacactctg

SEQ ID NO: 92349 - DNA, 487 bp, Glycine max
  unsure (1)..(487): unsure at all n locations
tcctgaaggaactttctaagaaaatttntaatatattctttcatgtataatctagaatcttacacaaacacttgaccaaacctagtcgttccacctaagaatctggttatggagtttaatttgagaaagaacttgtttgaagcaaccagaagttatcattcctctaaaaggatatatatacttcatgtgacaaatgagcactttcgatactctgggacacgtgtgtcaagacactcttatgagatggggtatgagatatttcctcttcaacacattagagtattatttattgtcgcaagagaaattgatcaacggtggtgtgtctctcgattatcaccctaatatatgatgaagatgttgtatcttcaagaaacaaagtgagaccactctttccaaaagtgtccacctttggagtcatcaaacaacatctactagttcatgctctatatagaccaattaagccatccttttcttgtaagataaacta

SEQ ID NO: 92350 - DNA, 416 bp, Glycine max
  unsure (1)..(416): unsure at all n locations
agcttataatatatcgatacgctcgaaattattcatttttactctcgagananacaaatagtcataacttttcacacggatgtcggatacaggcgcataatatgtctagaggctagaaattgaacaacggaagctcttgagaaattcaaatggtcataacttttcacaagatgtccgattcaagcttataatatatcgattcgctccaaactaaacatctgaaactctctgaaaatcaaatggtcataactattcacacagacttccgactctggcacataaaatgtccataagctctcaattgaactacggaagttcttgagaaaatcaaagtggcttaactcttcacacggatgtgcgattcatgcaaatcacatatctagacgctcatattgtacaaccgaagctcttgagaa

SEQ ID NO: 92351 - DNA, 426 bp, Glycine max
acttatggacctcgaacatgcgacctactcctgaaacagaatcatgctatgtgctcgcgactggtccctgtcgtccattcgcgaccggagttcactattgctaccccatatagctcctcgaaatgagatgcggtcatactcttacttgcgagccatcttgggctgttgatcaagggctctcgcgagaattgcattctcttaccgtaacccggcacactacttccgaacgcgtgtagcatccaactgaaacttctccgtggcgagttttgcctttcctaactcgatattgagagcttggactccttcgtcctatttcggagctcttaaattctcttcgctgacgactttgaacatggcgagccaatctaaacctcgtatgcgaactttcagccattcgtggtacccaccaatgatgccattacgaat

SEQ ID NO: 92352 - DNA, 454 bp, Glycine max
  unsure (1)..(454): unsure at all n locations
agcttatccaacatacacctaaatatacttgtgtaattttatactatgnnagnggactctaccttggtgaaacccattacacaagtaaaaaaatattaatgaagtagaccatgtacttttcttcggaaaagagtacgctaaacatgtgtattggtttgtaggtcattgaattgaacagaaagaaaacaattgaaagtgatatgaaaatgaaccgtgcacttagaaatgatcattttgatatagtcactaattcaattgttatggacttttcatctcacataaaataatatttatttgagaacttgacccaataagtattggttgatacctttctattatggtctctataagtttattctcatggagagacatgagaatgtgatattcctatctgaaatattgaanatcactctcttaatatacatgagaatgtgatatttctattctattttat

SEQ ID NO: 92353 - DNA, 471 bp, Glycine max
  unsure (1)..(471): unsure at all n locations
atactaaccctaccgcagtcccaaaacccaatgtttatgcgcaaccaagttgttttatttctactattaccaatttgctagctgttaatgttgaatcatagcttcgctctctcatctgccattcctttcatcttctaaacctattctgtgtcctccagatttaaaacaaatttctcttacttgatttcaaaatcattcttctgtttagcttacaactcactcaactctatcattaccctntttctcaatatgcagaattaccaacatgcaaacatatctaatccagcaaatggcagcatcaatagccaagctagatccagtagcagtgagatgcctcgtctgccatttatttcatcttctaaattgattgtaccttctgcagacttaacagaagcatttgctcttggattcaacatgaatctactctntagcttatgattcacttaactctcgctttagccatttctacat

SEQ ID NO: 92354 - DNA, 439 bp, Glycine max
  unsure (1)..(439): unsure at all n locations
agtcacctgaggcatgcaagcttgatagttccacaatttatggttattttgtagtttatcttgtaaataaatattgttctatggtttatgctgtctctagaacaattccattggatttaatgatgaaatctgngcattttcaggtgaaaaagagactaagttttgaattacaaaaagtagcagttgggctaagctcaacagatgggctaagcgcatatccatcgctgagtgtagcttcagcgcgcttagcgcataggagaatctggtagagcatcagcatcaaagtcgcgcactaagcatgagatcagtgcgctaagcgcaacaggtaccttcagccaggctcaacgcacgactggcgctaagcctcaattcacttactcgtgctaagcacgagggtggcactaagcgcaacgtcgtgattttaaagcactattaaagc

SEQ ID NO: 92355 - DNA, 412 bp, Glycine max
  unsure (1)..(412): unsure at all n locations
gattaatttaacgaatttgaattgcttcattgcctatatctctgtctgggccattttgtcctccaagtatatgatttcgctgcatgttaaccagaacttcatatacattctggtttctattcacccaaatagggtttggttgctctctatcattcactaaccgtgttaggacattaacttcattttcaagaatattattattattattattaggtctttcttgcactggtatttcctgaattatatgtctattcccaagttggtttctaggaatggccaaagcatctcttattcgagttaggataccattcatctgttgaaaatttcattagtggatctcaacaaggatntaaaatcaatgccatgtgatttgtcaaagtattcaccatccatgaatactttggtctatttg

SEQ ID NO: 92356 - DNA, 437 bp, Glycine max
  unsure (1)..(437): unsure at all n locations
catcaagctggccgacaattgagcatattagcttcttgaaaacaaatctcccgtggaacctacctaagcgaaatggcttatagctcgaatcagacagcaaacaaattagcttcaatgtgcaagcacagacaaccaatgatgtgagggaaaacacaatgaggattgtggaaccgctttggttattcatgagagggaaagcagtcctgaatagaacagtgggcaagacagagagcaaaacaattcactctcatgaaatcttgccagctataatataattctcttttcctttttttaactcaaaaatcatcttacaagaatcctcgcatanattataaaattataggaggttcatttgtatgtctatatnnttttttcttggtattgttggctggcgcttatgggtgngaaatttcncccaaaactcaataacctatata

SEQ ID NO: 92357 - DNA, 333 bp, Glycine max
tcgaaccttctatctagctcggccagtcaagtagattattaggctatcaattcttcaaataggtaaaactgagtcataaaatatggtctatgacaagctaacaattgatacttaggcttacccaaaggctagcctagtctgtcttgctttcatctcatatgcctatatataagtttttgtttttataaaaaaataacatcattctatatctatgcatttatcgtatattgactatttaaattaatacttagatgccttttcattcttgcaaatatgttactattcctataagtgcagcaagatatataatttgggccctctaaattatactct

SEQ ID NO: 92358 - DNA, 456 bp, Glycine max
  unsure (1)..(456): unsure at all n locations
agctnganatcaganntttttgtagtagtnttttattnttcttaaagaagcctttgcatgcacgagagtctgaccttggctngaagcttntgcatgtttaggaagttctagagagagaaaggtccaagttccaaagatttctaagagattntgttgtgtaaagatctacagagacaagagttcgaagcggaagcctttctgagagcttgagatttgtttgtgagtgattgtgagatcctagaggtgaaggagacatcctcaccacttgtattnttgcaatctatcatgttgttcttctctgtgttgtaaaggacgtttccagactatggaaagctaaatcctctggtggatcttncctgtaggtacctgatgtaaatatacttctatctatgtaatggtgtttggggtgtctctgtgctatcntgctttcattccgnatgtctttacctcatcacg

SEQ ID NO: 92359 - DNA, 483 bp, Glycine max
  unsure (1)..(483): unsure at all n locations
tagtgagtaaaataaagtctagataagcaggaataattatttaaattatggctaattaaggaaagcaagctagctgaggaaagaaggacaaatcaaggaaaaaagactaattgaggaaataaggactaattaaggaaataagactaattgaggaaagcagaataattgaggaaagaagggctaattaaggaaatgagactaattgaggaaagaaggacaaattaaggaaatcagactaattcagaagcccgttaatctgcacctataaaagaagaagagagaagaaggagaagacacataaatttcaacataatataattccttatagaaggaaaaggctagaaggatgagaagcanacaatgagagccattccttccctcaatttcatttcttatcttttccccctttattaaatatttccctctcgcaattataaagcctccatgactaatngatctttgaaccaattatgctaacaatca

SEQ ID NO: 92360 - DNA, 362 bp, Glycine max
  unsure (1)..(362): unsure at all n locations
agctngnnctaagcgcagaagcattattatatgnntacataanncngcgtgacacgaccagcatcagcatattcctaacatgacatgacatcatgcacatgtcaatagcggacttcaaaaacagcttaccaagaaaatatactcacatgaaggcatgaacaacactatgatcaaaagctcccacttgatttgaggcggaaaaataggcgcacccacatcacacataaaatattatagaagccacatgagatgccttngtaaagacaaaccatacctgaaactgcgcacgcgaatcagcctctagttgggaatagaaatcacgttcctccaaagagaaatcaactctcttcagctctatatac

SEQ ID NO: 92361 - DNA, 219 bp, Glycine max
  unsure (1)..(219): unsure at all n locations
ctgtcaatattgcctatgtgaagccacctttgttctttttctccgccngaaggagctcccaattgaagggtttgatgggaacgtgagtattaatgctgattgtctcgggagttgatcttcttcatttgcatacttggaaacactggagttctgccatatgaccgaacgggaagaatgggaatgtccacgcgggacaggtgctcctcacgtcttcacgtc

SEQ ID NO: 92362 - DNA, 406 bp, Glycine max
  unsure (1)..(406): unsure at all n locations
agcttatgagaccaaaatataacaaagaacatttccaacaatctaattctcatgctaatctattaaatcttgtccaaaacacaaacgaattatacagaaatgtttctcataacatggggagtaaaacccaataagaattaaaccattgatataaaaactatatgcagacaatttcatgaatcatgcctacatgaaaccattgtatgtctagaggtctagctacattacatcctactaatagataatattattaagttagagagtatattcatttggtatattatagtgtcacattngtatatacaatactatcacgttgtaaattataatatttatatggataaatacattttaattagaacaatgctaaccatattcaaatgttaaagaatagaaagaaaagtat

SEQ ID NO: 92363 - DNA, 491 bp, Glycine max
  unsure (1)..(491): unsure at all n locations
ggacctatgaaactaagctaaggagggaattccaggggtggaacatgccatattcaaatcttgattggtgggacgaagtttcacacaatgtgagggaattgactacaattaagtgtttttacctgttgtgaaaaacacttcaatcaaaatggttttggccttagttgcacaagaagacatggaattggaacaacttgatgtaaggatagctttcttacatattgagcttgaagaagaaacctacatgactcangcagaaggttntgtcaaaatatgtgaagaagganaggtatgctttgctaaaatgtccctttatggccttaagcattaataaaatggcttaaaaaggtatgagtatgaatggtgtgtttacttgaagaaaattgagcatgatgttattgtctacttactcctctatgtaaatgatatgctaattaattgcaacaacaatgaagaaataaataaggtaaaggtgatgcttgagaatgaat

SEQ ID NO: 92364 - DNA, 462 bp, Glycine max
  unsure (1)..(462): unsure at all n locations
caagcttgggtagagccaaatgttgactttatttatactcgnaacttgttgaagttagtggaacttggtggttttcccagaagtggacatagtcttggtggttgagatgaactaatataacttcttgtatcttaactattcttgtcttctcctctgtgctttaaactgactcggtttgaatatgatttttaattatgaaaaactatttgttttacaaagagtaaggctatcatctaaactcatttgtgaaaatgtaatctatgtatttacacgctctatcattagatgacaacatttttaagaaaaaaaattaatattctaaaatcacaattcaaccccctttctttncaaaattgcctttacagtttggtaccagagctcaacctctaagggttgagcacctgctagtgtctagatgaaaagatcctggtggcagataacaacaacaacaacggtcaattc

SEQ ID NO: 92365 - DNA, 468 bp, Glycine max
  unsure (1)..(468): unsure at all n locations
gaggagaccttcaatcctattacgtctctgttgttgtattaaagcgggcaattaacttgaatggtcattattgtcaatgcggaaggtattctgcgcttcactatccatgttcacacattattgcagcttatggttacgtgagcatgaactactaccaatatatagatgttgnttacacaaatgagcacattttaaaagcttactccacacaatggtggcctcttgggaatgaaacggctatttctccttccaatgacgcatggacacttatccctgacccaactacaatttgtgcgattggtccgccaaaatcaacaaagataccgaatgagatggattgtgtcgaaccatctgagcaccgacaacaatgtagtacatgtggagccgaaaggcataacagacgtcggtgtccaatgcaattgaccatggagttgtcatatcattgattatgtatgtagtcgagtgact

SEQ ID NO: 92366 - DNA, 336 bp, Glycine max
  unsure (1)..(336): unsure at all n locations
agctatagagattaccgatctgtgattgttctgttccgntggcaacaacataactcatgtcaagatacaccaacattgagagattcccaatctgaggaggaatcttcccgtggattccagcatcacagaggtctatgtgagtcaaggagctcactgcacaaaggaaagaagaaattgccataccttctccaagtaaatcattgaagctcaagtcaagatatcgaagcttagagagattcccgatctgaggaggaatctttcccatgaatccagtaagagcgaggtcgaggcgagtcaaggaaatcactgtctcaaggaaagaaggaattgacatac

SEQ ID NO: 92367 - DNA, 419 bp, Glycine max
  unsure (1)..(419): unsure at all n locations
ngacggatgttggtgcatcgaggaacaatttctctttatatgtgggtcccaattggattcccaattttcaacttacctatttggaagtgacatcatggccgttaggtcccagctttccattgtggattcagtcacaaaacaaacttgaatatgttggactatctaacacggggattttcgattctatttccacacagatgtgggaagcactttctcaggttttgtatttaaacctctctcgtaatcatatccatggtgagattgggactacattaaagaatccaatatctatcccaactattgatctaagctcaaatcactngtgtggtaaattaccctatctttcaagtaatgtgcttcagttggatctttcaagcaattcattcttcgaatccatgaatgactttttattgtacgat

SEQ ID NO: 92368 - DNA, 398 bp, Glycine max
agcttgcacttcataacgtgcaatgctagtatataattgtttttctgagctgcttgaataatcctcaagggtaatcctctagtgctactcatctgccatggtagtggcttcaggcaattgagtagcggattcccttgatgatggtgaatcaggtgataatgaatcagagaaatgagtttcttcctcacgaatggatgcaactatcttgtctcgcacaaggtttcttctgctctcggccttgttccttcttaatgtagcttcaatttctaaatccaaaggaactaaattgcctatgggagatctatgcatataaaatactaacagaataacggttatccaattcaataagagaagacgaattggaattgtgaacaaatattcacatattatcaaagaat

SEQ ID NO: 92369 - DNA, 336 bp, Glycine max
tgcatctagggctacagacgagttgcaatagatacatacggacatttggaggtctattcatacaccttgccggcatggtcacaatatataatatcattcatagacgattactccatatatgcatactcgtttcctatacatgaaatgccacaatctctggatgtgttcaaaacatttaacgctgacgttgaacatcaactcttcaaaagaatcaagtgatgcatatctgatcgcggtggtgaatgatatggcagatatgacacatcaggtgaacaacgcccgaggagtttcgctacgttcctataggaatgtggaagaataccatattacaccatg

SEQ ID NO: 92370 - DNA, 483 bp, Glycine max
  unsure (1)..(483): unsure at all n locations
agcttaacactaagaaggcagaggccatgatttcagcttctgcctctggactcatttgtggagaaggcctgtgggctcttcccgcttccattcttgctcttgccaaagttaacccgcctatctgcatgaattttcttgcttcctagaacttgatcaactacatcaaaccaatgaatgccataattagttagttaattaatactactatatatgttagcaggtacacttcatacataaccaaaatgctataaatattccaagtgtctggccattgggcttaggaacattgtattattgcttactacaactttgtaggaaaagtcagttcctgttaattgatctctcggaagggaatttcttcttcacaggagtcataattaattcgagttattagcctacaacgtcaatgctacanataaattattaagagaactcgaaagttgctatgatataaaaaagtaaataattgtagggtgtgaatat

SEQ ID NO: 92371 - DNA, 470 bp, Glycine max
  unsure (1)..(470): unsure at all n locations
tctgggggacatcttgacttgctttccaatctgacattcaccacagattctgccttattctattttcagattgtgaatgcctctaacagcacctttgtcaataattttcttcatgcctcttaagtgcagatgtccaaatctttgatgccatattttgacttcattttctttggagaatagacatgtggaggagtaactggtttcttgaggtgtccataggtaacagttgtcctttgatctgctgcccttcattagaacttcactcttctcatttgtcaccaagcattctgactgtgtgaagtttacattgaatccttcatcacacaactgactgatgctgatcaagttcgcagtcagtcccttcaccagcagtactttgttcagactaggaagtccatcatggactagctntcccattccagtgatctttgctttagagccatctccaaatgtcacatagctagtggagc

SEQ ID NO: 92372 - DNA, 490 bp, Glycine max
  unsure (1)..(490): unsure at all n locations
agctntctccctaatntagatgcagataacagttcaccagctccttgcagtaggaaaaggggagagaaaataactggaagcggtatatatacagcacaagcaggtgttccctgaaatgcaaaacagttcagatctccaaaaacaatatttcaaaggctggccatacacacaattcagtatcatatacctctagatgcatacaaagaagaacctggaatacaataattggtattttcatgaaatgacctcctatgtcttgaaggctacagattctcccctgtggttgattttcgtctgtagaaaccactaaactcactgtccagtcaagatatccaatcgtagttgaagatgaactactagcttctcttgaatttctatgaatgactggattggaccactctgtacatacaaagaaagcatagcactcggcaatactgctaatatatangtcatataaccttatataaagctttcatgtcagcatcttaac

SEQ ID NO: 92373 - DNA, 484 bp, Glycine max
  unsure (1)..(484): unsure at all n locations
acactatgatactaagctctactaatggacttaacnataaaattacaagtattatctttttcttatcatagaggaaaactaaaattatgaattctgcgtaagagtctatctaatttgaattttggtagctggttgcagttagcttgatactacaagaaaaactggtttatttgcctcaacatataaactgtattgttcccccagatagtcttaagtattctggatcttattgctcatatttttatgtaagggtatcaataagtttatatccagtatgtantttaaataatgtatgaggggttgactaatcgatccttttctccatcaacagaataggcaaacagctttattttcggctacacaaacaaagaaggtccgttctttattttccatccttcataaagtctttctctgagataaatctccaattcatagtttataagttagattattaatgtttttgcacatagccatatcaccatat

SEQ ID NO: 92374 - DNA, 94 bp, Glycine max
  unsure (1)..(94): unsure at all n locations
agctngctngtggggcttctatggtggctggatcntttagcttcaatgagatcctntaatggtgattttccaccatggagatgcaccggaagac

SEQ ID NO: 92375 - DNA, 425 bp, Glycine max
  unsure (1)..(425): unsure at all n locations
tacgtgacctatgaaactaagcttaagaatngatggcctcatcaaactactagttccctgaacgcaattcaactaatctgcctcccattnttaatggagtgggttaccattattggaaaacccgcatgcaaatcttcatagaggctatagatttaaacatttgggaagccatagaaataaggccttgtattcccaccatggttgctggaaatacaacaatagagaagcctagggaagattggagtgaggaagaaagaagactagtacaatataacttaaaatccaaaaacataattacatatgccctangaatgaatgaatactntagggtatcaaactataaaaatgcaaagggtatgtgggataccctacaagtaacacatgaaggcacaacanatgttaaagatctaagataacacattaac

SEQ ID NO: 92376 - DNA, 397 bp, Glycine max
actaagctgctattgaataatggccaatcctatttgctctatgtacttgctcaatcataaggtcaacaatatagtgatccattgattctggccactctattgtttaaccagcatcatcaacatttggaaaaaagccactcttcttgtcaccttgagattagaaatatccataagaatctggaacaccatctaaatttattcggaaaatacttgattcccaacagatgccgatgcaattgaccctattggacatttcacaaggatagtggaactaatgtgaaaaccagatattttcgatctcaagcattgtttgcctttctataaaagggaatactgtgtggtggtagatgtggtacaacttataatgtgacacgacaagcagatctgggatgtattc

SEQ ID NO: 92377 - DNA, 478 bp, Glycine max
  unsure (1)..(478): unsure at all n locations
tgcaagcttgaatggctctaaaacttatagtttggcagaagatgagagtgctgggttggactgcagatgactggggaaaaaatggactgcaattgtcatgtgaagacaggagagggaggaatgcttgaacagagcccacatccgcagtctgttttagcctagagcttgttagttggtaccccttctgtctttgacactgacaatgacctttaattttntagcttcagcttgccttagtagaatccagtgtgccttttgattgcttacacattggctggtagtgtttaaaagatgaaaacactttattttgttgcaatgtcacagttgcaagttttttgttcaatgctttgcctgaacgtattctgatgtggctacatcacaaatggtgaggctactctatgttggtgccggtgagccacttgactgtatnctacccttcctctgcacctaaactgaccactgctgttgacacactgga

SEQ ID NO: 92378 - DNA, 438 bp, Glycine max
ccctcttcaggagagagttttctttatgatactctgccgcagaccaagatcttaggagtatttgggatctcaattctctttgacattcaaggtgagctttcaaacagtcagcatacgacccgtgtgcagtaggaagcaactagcattgacattgggtatcgtgctcgatcatgcaaatctgatagttgaaacatgtaaagccctttccatgtccacttaagttctggttgggagtgctgcacaagttgaattatgaaactcttggaaatgggtataattgtaagtcgcgaagggaagtatacagccaaaaggagtcaacttgatctatggaattgttaatacaactcggggtaaagacctcattagacgaaatgtatgtttctcggaattgaatgatcttaagcaaaagataaacttgattggctctatggcgggtaa

SEQ ID NO: 92379 - DNA, 275 bp, Glycine max
  unsure (1)..(275): unsure at all n locations
atcttaagccactgggctgcaacttactcgcatgccatttttctttcgtatgaacgctnaagactgacatgggggctcttggtatactcaaatggtcttaactatctactcgcatgtccgattcatgcgcataacatatctagactctccaatctgaactacaggtgttctccagaaattcaaatggtcatgactttacactcgcatgtccaaatcaacacatcgtgttttcagactccttaatttgtacctaggagctctctagaaatcaaatg

SEQ ID NO: 92380 - DNA, 453 bp, Glycine max
  unsure (1)..(453): unsure at all n locations
actaagctctacaagagatcacttgtgttctatgcttttgaatgtgtcttccataggaatctccttngaaagacatcntaaattcctgcaataagggttgaacactaggagaaacataaatagttaactgattagaattatcactctctctctcttgtgtatcactcttttcctcgggtgtatcactcttctttttcatattcctttgtggtgcctcactattttctttctcttgttctctcttttctctcattctgatttggtcatcacacacttttctaggggatagaggtttaagagtaaacgaggaagatctggctattcgtctgtaaggctcttctttgttacggttcaacaaacgttgcatttgtgtagtccacgcgttcaaaantaagcgctgagattcgtccaattgatgatatacaccaccattgtcaccagctcttgccatga

SEQ ID NO: 92381 - DNA, 229 bp, Glycine max
  unsure (1)..(229): unsure at all n locations
agctnttagactatattctaactggtttatcttgcagcaatgtatatcctatcttgtaccagtttgtgattaaagttggtttaatgtaatcaccataggaggccatgaataaaagcttgaaggtaggttaaaatgactggaggaaaagggataaacggaccacaaatttttgtgccttaatggaggtctgaaattagagtggtatttttcatatgaccaaggtggaaaa

SEQ ID NO: 92382 - DNA, 420 bp, Glycine max
cttccttgagaagctagagcttattttctacacccctctcataacaaagctcacctgcttgagaagcttccttaagaagattcctaaagaagctagagcttagctatacatacctctctaatagctaagctcacctccttgagatgagaagctagaacttagctacacaccccttataatagctaagctcacccgcatgacaaaaaacatgaaaatacaaaacaaaagtccttactacaaagactactcaaaatgccccgaaatacaaggctaaagccctatactactagaatggccaacatacaaggcccatacggaaggaaaacctactttaatatttaccaagataggcgggctcatacttagcccatgggctcgaaatctaccctaaagctcatgagaaccctatggcctacccct

SEQ ID NO: 92383 - DNA, 444 bp, Glycine max
  unsure (1)..(444): unsure at all n locations
agctgctttagatcttgagccggctaagaacgccttttgttgggacttctggttgagaaatataacagtctctggattgactactttgagaagttctggatgagattgaaaacaccatctcacgaaggcatgcctctgtagtgatgaaaattggtttgttctttcagttttactgtaacgatattgtcataaaaaaatccatgacagagcaaaactggagaaatatataagatctgttggaattcgtgattcctgataattgaattgtttnttgaattgagcaaatgcccattgaacctgctctggaaagatctctggtattgngccanagaaatcccagcattgaataaaccacgttggaaaattatgactgtgttatcttgaaatatatcaccatgagtgttgctctggtgtgtggtgccaatgtcttgtccaacattacat

SEQ ID NO: 92384 - DNA, 376 bp, Glycine max
tcttgagatgcctttcagttatctcattagaggctctggtatagtctacaatctcattagaaatatcgatagtgaaataatcaatgaatcttgaggtcaagactgcatatggaaattcataatccaccagtcaatagcttttcaacatgatatcttcaatcaacagtacccaattcatttgaatacttgatttcatcccatatataatctacaagtcgtcgttcgtgacttgagtatgactggtggatcttggtgctagaatatatgtaataatgtataccaacattgtgtcttccgctatcagaccaccaatacccaatctgttccttaacaatctttgtcggtcaagaagcatacctctgtatgtgggcatttt

SEQ ID NO: 92385 - DNA, 306 bp, Glycine max
  unsure (1)..(306): unsure at all n locations
gcatgcaagctataaagagataagcacatgactctacanatcagtttaaacngaattactcagtaagagcggggtcaaccagaagagtgggaatcggacacccaaaatgaccaataaaccattaaaagggagcattgtctaatttttaagcatgagcacaccaatatattttcctatacttctcttttataatataggatatagattgattacttttctatacttatagaagcattcgagtaacacacgtgaataggacatatataacattactctaatataatcttccttttgctgtgccaaaaa

SEQ ID NO: 92386 - DNA, 456 bp, Glycine max
  unsure (1)..(456): unsure at all n locations
actcagctggcccncagctcgcccaggagagcaaggtggctttcccataagcaaccgccttctggaggaagaatctgaaggcccaagtgggcctgattgctatttgcacccccatttttactaaatacacccccttgctctttnttggtgattctttttccgtaacgttacgaaactttatgaatttcgtaacgatgcttgttttctttccgtaatgttatgaaaccttacggattacgtaatcatcccttctttgccttccggaatgttacggaactttgcggattacccactaacacttccttttaatttccggcatgtcacagaacttcgcggattgtgcttcaatgctttctttgactccgacatgtatggaacttatgaattgctaacaatggtgcacgtacctgaagtggcaacataagttgatgcatcaacagggtcccagacaaatat

SEQ ID NO: 92387 - DNA, 466 bp, Glycine max
  unsure (1)..(466): unsure at all n locations
agctngtagaacgcctggactatgatatatgtcatggtgttggtttggccagcggttcatggataaaggaatgtcccacattatttccatgacatgcgtgcaacaatgatgattcaaaaattttatgcanaactagtcatgcatgcacctatgtggacactcaaacatcaagttttgtggtcatgtgatactaaagcttaggattaatttttcctatttaagtcaacccaatgtttccaaaacatgctctttntataaatcatgcattcatccgagtccatcttgggtgttcgggaagaatttcacagcattcacccttcaggtgtatacacattttttcaaacaaacccttttgtgtttgatcggtaatctttntcaagaaagactggagttatttttttcaaagcgtctgggctttagcaaaaaatatatattatctcgttgttttctgtttttgttcgcaatt

SEQ ID NO: 92388 - DNA, 465 bp, Glycine max
  unsure (1)..(465): unsure at all n locations
tatgcgactaagttacagntatttttactattctgaatcaaaatacatctcaatcattcatctgatctataaaagagctattaataacaaaagaaaatgagtgttttggagcaaaactagcagcagctgaggctcataggaagagtatttcatatgcatcacaggaaaaatgcgatgaagaatacctttatcatcagattttgcaatgttttcaggcaccaacggtctatgtgtagagatgactacttgggcagggcatgactgtataatttatgttgcccttggccgatgaattaagtctgcccttgactgtataatttatgctgacagcacaattttcctaattgctaaggcttatgttgttgtcaatgacacctgctatcatcaacttatgagccacttctatatataaacatgttaagggagggacctattatcccattactgtcaagaggcacctcaaga

SEQ ID NO: 92389 - DNA, 391 bp, Glycine max
  unsure (1)..(391): unsure at all n locations
agcttcagatgatcttcttgccatggtttcangtgncttgttctanaacagcatcaaactatcaatcattgtnacttaatttgaatttcttaaatcatagaaagtattcagttacatgcaaacttactttgaacaggtttcagagtgaattctggatatatcaatgcaaatgtcacaaaatattaagcattccaattggattcaaatgcatcttttatctgaaagaacgttcaggtcatgtgctacaagtactccacatgttctttatagaacacaattgtttattgaaagagcataatccatttaaaatatgctgtatagactacactgaacatttcttcacctattaatgagtactctataacacatcagtgtcatggaaccttcacta

SEQ ID NO: 92390 - DNA, 416 bp, Glycine max
gtatcttgccaatgacgatgatggtgctctcatatatggttatggagatcattggctggctaatctcatttctttaacccatctttccttccactccatatctaatctcaacacttctcatggctgcctccaaatgattgccaagctaccaaaacttagagaactaagtttaattcattgtagcctttccgatcattttatcctttcattgaggcacactaaattcaatttttctagttccctttccctccttgatctttctgggaataccttcatgtcatcaatgatactcccgtggctgtccaacgtcacttccaacctagcttgttgagcttgaccttagtagaaacctcttgagggttccacatcatcaaatcattttgcatggtcttcattcacttgacaccttgcctctc

SEQ ID NO: 92391 - DNA, 496 bp, Glycine max
  unsure (1)..(496): unsure at all n locations
agcttanggntngaagaaaactacatatacaatttgctttatgtagagntgggctcccagntacttattctcaacttgtactcaccttgtcctaagccttaacttgaaatggacctttctgcacacacagatcatgggcttctgaccctcgtgatgcaaaacgagcttggagggcttcaaattcaacatgacggcaactggatgcctcttcacgcctttctcatcaacactggggatcacttggagggaaaacaaaattcactcttacatgcaatttactaccatgctacccacttgcatgtgtgttcactatcaaactagtatttgtattctctgaatgtgttcttagcaaatacatatgactattaccgagccatgaaactctaaattcatccttcataaattcatcggatntaactcatttaaagtgagagatcaacactacaaaatataattacaacctattaagtaccgactccgatatgaacatactcat

SEQ ID NO: 92392 - DNA, 384 bp, Glycine max
atcttgtagttgacagctatctattcactagtttttctgtatcttgaaccaaatggacaaggaaaattatctcataatgcatttggattgagaattctaatcgagaaaaataatttattaaaaaaattaattttttttatctaaaattcattgtttgtatgtgttttttatgaagaatttaaatttctaaaattttaaaacataattttaaacaactaataatatgaaattttaattttcttttacaatgtgagaaattgaaattatattcttgacagaagaactctccaaaacgttctcttatattcattataaccttcatcttctctttcgtctaagagttaaaatctcattctcgaatttatgactcattatctttcaccc

SEQ ID NO: 92393 - DNA, 482 bp, Glycine max
  unsure (1)..(482): unsure at all n locations
agcttgtntaccacagttntaggagttcaatattcacttataatcaaaatttcagccagcaattcattcaccaaaactcaaattcacaatagacacaatcataaggaaaccttatagttcaagaaatggatcacaatcaaagactctctaagaattttgcatgaacatgttaagaactaattaacatgaaagatttgactcaaatcaaataataggataaaagaatttcatacactcatgaacaaatgagttagacaaagaaacaagaaaaataaaattcagcacaacataagaaatcttatgtgacaagtttcatgactagacatgacttctatgacaaaactacaataggtgaacaagtcactctatatttttgagggtntcttctactttaatgttcttcgaagaatattatgggttatgtgtcagccactaaaataacaagacaaaactcaaaggaacctatactcagcacaattcat

SEQ ID NO: 92394 - DNA, 479 bp, Glycine max
  unsure (1)..(479): unsure at all n locations
nttcgattcattctatgcacccatggtggtccacattgtgtttcgtgcattnttattctcgtttggtttactttttataccccctgttgacgtgcttaagccattttacttaagtcatttttcgcttaacttaaaaataaaatcaatttccaccgaacgtttgaattgtattatccgttaacttcggtaaaaatgaattccgaccgttcagtcgtgccgtaaccacgttggaaatcaaaaagaggtaaaaataatataataatcaaaaaaacatcttttttagtaaaataaagcggaaaatcaatcggacgttttctctttgggatttctcattcttaatcgaattgattaataactaaagtgaaactgaggctaaaatcaactcgcctagtcaagctcgtccacaaaaatagacttttgaagttggcatttcaatttctcactaagtaaaatggatcattgtcaatgtccaacgcctt

SEQ ID NO: 92395 - DNA, 491 bp, Glycine max
  unsure (1)..(491): unsure at all n locations
agcttattcagcgtggtggtggccananatttcatttatgtctttttcatgcagtactgctacttnagaattgacgtacagcagaataatgtggttcaggatgcctggtgatatgatcatgcactcagtgttagttgtcatcttatctacactgtttcagagctatcaaccccgataggacagctccatatgcccttgttttttccaaaacttgttttgacgtgtgtaacaccaccttatcaatcaatggccaacataaagccttcacttgtaaccaaatgagacgtgcctaagtgtatcctcacattttttagtgcattattcggtactccatacttttgcacgcatgctttggacatgttttcttcatgttatgctggagtacaactggaatgtattttctgactgattgaatactaggcaacacacatagatagcgagaggtcgtagaccattatatntctgagggttgacattatacatcctgttta

SEQ ID NO: 92396 - DNA, 463 bp, Glycine max
  unsure (1)..(463): unsure at all n locations
ntcanaantgttcanaaatatgaatgaattggattnnttttttatatatataaaaagctattgtgtgcagggtggcctaaggcccaacaaaagtaaattagaaagcaagactgtagggagtgttgttgtctgcatttcacattttgctttctgcacctcctattttaaattatcccaacattgtccttccttcctctaacacctatttcccctagactggaacttgttgacccacctccattaacatgtacactgcaaactctagcaatcatgctgaggggtacaatatataagaagagaaaacatgataaagatgtaaccatttcatagtagttgttttggaatgcaactaaactccaaaaatgtattcagaatacctgttctagaatgttataaatgtattctgaaacatgccatttagaatatattttncggaatatcagtgcattctagaaacagttgt

SEQ ID NO: 92397 - DNA, 456 bp, Glycine max
agcttatactacaaacatctacaatagaccttcttatcttctccagcaacaggtacaatcccgggtggaggaatcataccaaccttagatggtcgaatccttcacaacagcagcaacaacaacaacaaccttattttcagaatgttgttggcccaagcagaccatacgttcctccaccaatccaacagcaacaacaacaacagcaacagccccagaaacatcaaacaggtgaggctcctccgcaaccttcccttgaagaacttgtgaggcaaatgactatgcaaaacatgctagtttaacaagagaccatagcctccattcagagcttaactaatcagatgggacaattggctacatagttaaaccaacaacagtcccagaattctgacagaataccttctcaatctgtccagaatacccaaaatgtgagtgccattgcattgatgtcgggaaagc

SEQ ID NO: 92398 - DNA, 378 bp, Glycine max
  unsure (1)..(378): unsure at all n locations
tagcgtcaagtatccggttcgatggtgtctattgatgcttattattttttggtgttntgattccttatattgaggtgaaatttctggggatttgggtactcaattcagagactgagttctaggtttgctttctaggattttaggttggcttttgttgttctataatgtttagtgtgacttgattgtgaaatgaatatgatgatctttcctggtccgtatgacatgtcgaatgaacaacgtctgttgttgtgtttgaggtggaattatgcgctcaaattgtgtgcattccttattatgcttattcattataggtttatcgtangagatgcttagagtttcatatggttgtagctattgatgatagcaaagaaacattca

SEQ ID NO: 92399 - DNA, 460 bp, Glycine max
  unsure (1)..(460): unsure at all n locations
agctnntatgtgggatacccaatgtaagcattttttccagatcattaaggaaaaattgacaaccgctctagtgttagttttgcctaacccgagagaaccctttgaggtgtattgtgatgcatcaaagatgggtttaggaggagtgttaatgcaaagtgaccaagtagtggcctatgcttctagacaactcaagactcatgagaagaattatcccacccatgatctggagttggctgttgtgattnttgcccttaatatgtggaggcattacctgtttggctccaagttttaggtgtttagtgatcataagagcatgaagtactttgttagttagaaagagccgaacatgccgtcaaggaaatggttagagtttcgtaaggatttatgatttgagcttagctaccatcccggcanagccaatgtagtgggtgatgccttaagtaggaaatccctacatatg

SEQ ID NO: 92400 - DNA, 483 bp, Glycine max
  unsure (1)..(483): unsure at all n locations
tcttcttagggtgatcctgagatttgtaggccctangagatataatatacgtggatccttttatatttaagtatntgttttgcagccctagttgtgggccctaggtgaaatatatatttataaaaaaacacatcatttcattaaaaatgatgttttattaaattatatgaataacataactttgatgaatccaaaaagatatatcacatttttattcaatttacttttatgttatcatctatcatttaatttattttaaaaaagatgaatttatagttttttaaaccaatcttcacctcgattggattttatcatatttgagtaaacctttaaggaacccaacacattttttcataattttaatttacttatatcattttaaaatattaattctatatttataatttaattttatatttttgcctctcgaaaaannaaatgatctaattcaatggctatcattcatcgtcgacaacatataat

SEQ ID NO: 92401 - DNA, 469 bp, Glycine max
  unsure (1)..(469): unsure at all n locations
ngcttatattacatagctccatgcttgtatattatgttgatgttttcaacgagtaaataaatagtcaattgagtcagtgtagtggtcatattaacccacatggacagatttctcttttcccactaaccagacaattcaagctctaatggacttggggaataacttctatcaatgttgatatacttttctccatatacatgtgatttagtagataattatgttagtaatactgattttggggcaatgtacaacatgcatacatgtgagtaatatgcaatatgcagtctttcttgtattttagtttcttcgatntatgtcagatctatntcatttccttccattaagtaaaaaatgtgatgatattgggaatatcaatgttggcttatcaaccaaaccatcataccatatgtgatctgttcattcttttgtactntggtatatgtagtttggggttctctctgtgccctgt

SEQ ID NO: 92402 - DNA, 469 bp, Glycine max
  unsure (1)..(469): unsure at all n locations
nttcctgatgtaaatgactggggctaaaattatttatctgtatgcatggtaaatgtagttccaattattgctgataaatcacactcttagatgtgaaccatttttattcaggttgtgattgctgatgagtcgcattttctgaaaaatgctcaggcaaagaggacaactgcttctcttcctgtcataaaggtattagttcttgaaagccacaatcacatgcatacctctttctaaagttcatgcttaacagacatagaaaacatatatggaaaagataaaagatgaaggaagagaattgaaaggatagttaaacaaaagagaaaaggaaaaaagaagtccattgtgtgtacagaagcatctgcaaagggtctagtgctctatagtctaaacccatgttcctctcctccccaaaaggaagtctgatttcatacatggaacacttaaaagtaaattctgtgttggcttcagt

SEQ ID NO: 92403 - DNA, 381 bp, Glycine max
aatacctctgcactgtactcattaatactatttagccttctttctgcttccacatatctttgggtgctagcattgtcctggttggcagtttgagatttttaaacatcatctccttgttgaagctgacggtgattttcctcaatctgcaggggtcgagctttagagagggagtgtttttgtctagtatagactttggaatacttgtctggagtttctttagtgggttgggctacagataataaatcctccttattacaccccttaggtttcgaagttgggcctatcgttttgcttgtgtcaccagctctttgagagtggttgtgttgcacatccgagaaggctacagggtaagcatcctgcttactacacccctcctgtatg

SEQ ID NO: 92404 - DNA, 473 bp, Glycine max
  unsure (1)..(473): unsure at all n locations
tgccgcccagctcgcccaggcgagcaaggatgcttcctctatattcaacatccttctggaggaatcttctgtggggcccaagtgggcctggttgctatttgcaccccccctttttactaaatgcacccccccctttttactaaatgcacccccttctatttttttntgtaattctttttccgtaacgttacgaaactttacgaatttataacgatacttattttccttccgcaaggttacgaatccttatggattatgtatttactctttnttagctctcaaaggagttacggaaactcacggattgcgcaaaatcacctcttttccatttccgccacattacggaatatcacggatcgcgcaagcctgcttccttttgatttctgagacgtctcgggactctatttattgcatgtcatcaagtaataatctccacacgaaattagagtatgacagttgcgcctctttactta

SEQ ID NO: 92405 - DNA, 434 bp, Glycine max
  unsure (1)..(434): unsure at all n locations
agctntcattctgcagattagagttgtttggttcttcgatcttaactntagtttcaaaagtaatattagattagatgttttagttcaagtgtcaaagctataacttcgctagtatgagaggatcttgcatttaaggctgttttggagtgaatgacgggaatatagatttcaaagctaacatttagatgttttatgcttcttgtcaaagtcagaagtttgccaatataacaataacataacttagtattggaatacattgaggaccacacactctattttgttgttctttcataaaaacttcgtgccccattacccagaggctcttcgctatgcaaaggtatgggggaggatgtngtacgcagccttacccttgtatatacaaagaggctgtttccggattcgaacccatgaccaacaagtcaccaagacacaac

SEQ ID NO: 92406 - DNA, 417 bp, Glycine max
  unsure (1)..(417): unsure at all n locations
atcacatagacacacaaagggaactctgatatcaagaaagttaccatttattccaactcttgtcttccagtgctccttgatactgaatagaccagaacaaccacaagtaagaatcaagaaattgcatgcaaatcagcctaatcttaacacaatagtgatgctattcttacgctgggtgaggagagggatttccattattgtggctttaataggctggatcccacgaccattgcaatttctatgcataaaaccacatactattaaaggaacccaaacagtaaaagaagaagagcactaggttaaaaagtttgagctactttgaagtaccaaaaatactgctttgaaatcccttggggatttaaatacaacttganggcatggtatataccttgatcatanatcacacatattaattag

SEQ ID NO: 92407 - DNA, 479 bp, Glycine max
  unsure (1)..(479): unsure at all n locations
agcttcncaacatccaggtaatttattattcttatcatcacannactaaaaatcaagcaaaatagggcaaaggcagaaaactctgccccaaactcaaaccaaaatcacagctttttctcacttaaagaccccagtaacatttccttcgttccaatntgttaaccgttggattgactcgaaaattctactggaagtctctagtacataagtctacattntgaccgttgggatctactagcaaacatccagaactcattccgcactactctntccacaaccagcaattacatagcattcttctgcacttatgcaaaattctgctggcacaattcacagcaaaattctgcataaagtgcagatttcgaaaaccacacttcctctcatccaatcttgcccaaatcanatcctacaagtctcaaaacatgtatcaatcatgtctaaaccaaagtcaagcttcaaaacacaagcacacataatct

SEQ ID NO: 92408 - DNA, 437 bp, Glycine max
cttgaacaatatacttgcccttcatttaactgtctctgggcttggcggccacgcacaacaaagtactttcgacacctactatacgttgatttgaccaatgctgttatgggaatgttgcgacaatccttcaaaaccttattgatacattctgagaggttggttgtcatgtggccatatcgacgtccttctctatcataagccatcatccatttctcctttgaaatgcgatcaatccatgtagctatggctgaactcaattcacgatatttttctaaattctgatcaaaaatgtgcttgcaaggagtgtaagctgcataaaattagttatcaatacaaattttacgtatatatgatagttaaataaacctcaccatcaaatatcaaatctacccaaccttttcaacatgttttttggttgcattattgatttcgattga

SEQ ID NO: 92409 - DNA, 494 bp, Glycine max
  unsure (1)..(494): unsure at all n locations
agcttcagaccaaagcaacacanaatctatgtattcataacccctcaatttaatggattntcaaggtttgagaagtgaaattgagaatggggtaaatttggagcaaactctcacctcacacaagtctataacatcaatttaaacttgctcaaactggatttacacctaaaattccaccgaatcaaaatttgactcctcaacaccaaattttaccctagaaatgtctctttgttcactttggtcatttggttttctctcttgcacagcccaagcttcctcataagtcctaaatgacatttcaaactaggattaactcactttaacctccaaataccactaaatccagaattggccttccaactctaanaaaaactcactcttttcccactcataacaccatattctcactttctaaccctaggttaactctacccttcatccctagcagttntccataagcaatgtcagcacaccaacatcaaaagcatcatcat

SEQ ID NO: 92410 - DNA, 315 bp, Glycine max
aatgaatttagttgaatattccctttctgttcatgatctctgatgaagtggcgtttgatgtcaatgtgcttggaccttgaatattggataagattctttgacagatttataacactcatattatcacaccaaatgcaaatctttgtgtattttagtgagtagtcgaacatttgttgcttgacccaaatgatttgagaacaacatgcaactactaagacatacagaacttccaaggttgataaggcaattgtgctttgtttctttgaaaccatgacactagtgattttccaagaaattggtaggcatcactgatgc

SEQ ID NO: 92411 - DNA, 417 bp, Glycine max
agcttatcccatgcttctgtggtcgtctgttgctttggatatcttctcacgcgtatcttcatccaccgattgatacatgagaaaagagcccctcgcatataatttgactccttcaacggctcctttacaccttggcttagcgaggcttcatcttgctcctcgaagccattctctacgatatcccacacatcttgagctcctagtagcgccttcatcttgatactccaattatcatagttgttctttgtgagcatcggcatttggaaaggaaaacctccattcgccatcttttgaggatcttgaagctctgataccactttgttggaaataacggctcttatgtctaggaaaagtgttacgaatattggagacttaaatagacacttgataggcacgagaagtccttatggaagagag

SEQ ID NO: 92412 - DNA, 484 bp, Glycine max
  unsure (1)..(484): unsure at all n locations
tgtatgattatggggtacccgtcatatgtggtactatgtgtagatcgggcgatggtgcaaatcaactctcccacatccacaaatcacacacgaacccaccatccccagttgcccaccttcaactgagctcacgtactcccatgtagcctttatcctcgtccctctcagcatcgggtccccatcaacccctccaagcttcctcaatatccaagcaattcaatatccaaacatcatgaactaccctaaaccaagaaaacagggcagaggcagaaaactctgcccaaaaacacattccaataccacaactntccttactcaaataccccagtaacattctctttgttccgattcgtttaccgttggatcgactcgaaaattttactggaggtccctagtacataagtctacattttgaccgttgagatctgctagacnacgttcagaacccaatatgtactacctttctcataaccagcaatgcata

SEQ ID NO: 92413 - DNA, 402 bp, Glycine max
  unsure (1)..(402): unsure at all n locations
agcttctagcacactgcagatatcttctcatatatcccaacggncagatcatggaaaagtatcttgcgaagtagaaaaccaaatttcgagaagatccaacggttaacgaaggttggacagcgtnttttccgaggcagcttcatgtagttttctctagaagcttcattaagaggcttcctctagaagcttcattaagagacttctggcgcactccagatatcttctcatagatcccaacggtaagatcatggaaaattgtcctgtgaagttgaagaccaaattttgagaagatccaacggtcagatcatggaaaattgtcctgtgaagttgaagaccaaattgtgagaagatccaacggttaacaaagactgtgaagacgttttgccgaggcagcttcatgta

SEQ ID NO: 92414 - DNA, 369 bp, Glycine max
aactctgctacacatgcctatataatagctgagctcatcttcttgagatgagaagctagagcttagctacacaccccctataatatctaagctcacccccatgacaaacaatatgagagctctacttaaagtgatcactacaaagactactcaaaatgcgccgagatacaacgctacaaccctatactactagaatggccaaaatacaatgcccagacgaaagacatacctagtctaatatttacatatagtagcgggctcatacatagcccatgggctcgagatctaccctaaggatcatgagaaccctatggccatgccttggatctctatccgatctacttggaggattatagccaccgcccttgc

SEQ ID NO: 92415 - DNA, 498 bp, Glycine max
  unsure (1)..(498): unsure at all n locations
agcttgtcgctagagctgacccatcaactgctctaactctnttagactggtgatccctaggctcttgaccttgacttgatagaacctttttttaagcgaaggcatttgactttatcccatgttttactaaagtgaacaaaaatcggtgcgaatcaaaactccaacatctatcatgggtggaatggatgaatgcatgaagaaatgcatatgacacatatgcaatttatgaatacaggagcccgggaaattgtctccttcttagatacaacgtcttggggtaacaaagtgcccaacgtatgtattaaagaaggtgactcggaccgtccattggttntccaatgtgcgtgatgtatatgcgaaaggcacaacacgggaatgtacaatatgacaatattcacaaaatataagcaaaagggtacgtgacacttatgcatgggagtgtgaaaaatggcacgcagcgtgtccgctccgtgcccctattcaagggacctatatgga

SEQ ID NO: 92416 - DNA, 355 bp, Glycine max
  unsure (1)..(355): unsure at all n locations
accttatctcagctgctctagagagccaatctaactaccaatttgtctttttttccacttagcttactcgctagtctttcacttgactttgttctaaaagcacacacactttatttgaactactctctttttttttaacacataaaacattgtatcaattagttgtgtgtgttgttgtttctgaccttttatattatccaccaaacaaactctcccaaatatgggtcaaaattgtcttaaaccaacgtgctctcctaaaacctaagcagggtaagtggagatgactgnttcaaaactcaaggtacaatttgacaatttctattcaggatacagatgggtgcaaatgatgtcctca

SEQ ID NO: 92417 - DNA, 494 bp, Glycine max
  unsure (1)..(494): unsure at all n locations
tctaagtcacctgcggcatgcaagctnggcnacctcaaatgcactggaccaagttttaatgttgttgcatattacgccaaggtgaccatcgcaaccttgttggtctacttggctgctgcgtggaactataacatcctattatggtttatgagctcacacaaaatgggacccttcttgtcacttgctaggtcaaatgcctaagggccgtgaatggcttacttggactcatcgcctttaagttgcaccacaccgctgagggtctcgcttaccttcacttcatggctgtgcctcctatctaccatagagatgtgaagtccagcaacattctgctagatatcaagctgaatgccagggttcagattttggttgtctatgtggctcggacaatatgagtcatatctctacttgtgctcaggggacccttgtgtaccttgatcttgagtattataggaactacccattgattgataagagtgatgtttacagtcttggag

SEQ ID NO: 92418 - DNA, 428 bp, Glycine max
  unsure (1)..(428): unsure at all n locations
tgttccctgtatatagacaagatttgagttgagatgaactgaagaaagagagggcatatttagtactctagctagtcaaagaggtatatatatgtctaataacgaacctggtgctccataatatttgcatcccgtgtcctgttttgttgaatctctcccttcaacctaaaggtatatagtcagtcacaaaaagagtagtaacagggttaagtatatatatgtgtgttatgtcagctatttttcacatagcagtatatgctatatatatcgctcagagatcaaagctgatgatagttaaatctagtccaataggtctgatgcgagaacatattcattcatgcttaaagttgtgattaatggtaaactntatacgacacataaaagagctagaccaaaagaattgtagaaaaccatactcatcatgattc

SEQ ID NO: 92419 - DNA, 486 bp, Glycine max
  unsure (1)..(486): unsure at all n locations
agcttctaaactntatacaagaatgaagctctgataccatttgttatacatgtggcctcagatatcttaagaaggggggttgaattaatatattacatactgtgtccccaattaaaaattctactttgattctaatgcaagttccatgttcccttaaagatgaatntctaaatgatgattcaaattaaacaatctgaatgtaactggtaagcaacaataaataaaagagtttaagggaagagaaagtgaaacacagttgttatacaggttcggcanagtccgttgcctacgtccgatccccaagaaagccgctggggagttccactatctcgtaatcctttacaccttctgaaacacacaaggacatccctttctttgtgtgcagatgctctacaacaagagactctctgtctcttatccctttgatcagacagagaggaagaggaaatgatctttcttgtagagacagatgtacaatgaagtgct

SEQ ID NO: 92420 - DNA, 429 bp, Glycine max
  unsure (1)..(429): unsure at all n locations
aacttagctactgccagcttctgaaaatcctggaaagctgagcttattacacacacccttctaatagctaagctcacctccttgagatgagaaactagaaatcaactacacacacccctataatagctaagctcacccttatgcctacaatacatgacaatacacaaaagtccctactacaaagactactcaaaatgccctgaaatacaaggctaagcccctatcaacaagaatggccaaaatacaatgcccattagaaggaaaaacctattctaatatttactaaagaagagtggacccaaccttggcccatgggcttagaaatctaccttgaggttcatgagaaccctanggtcttctntaacagctctagcctaatctttttggagtcatctgttcataccctggggggtaagattgcatcatccc

SEQ ID NO: 92421 - DNA, 471 bp, Glycine max
  unsure (1)..(471): unsure at all n locations
agagtcacctgcggcatgcaagcttcaagcggtacgagaatgatngaaacatatgagtattattatcatcattataaaggggttaagttattaagttagttagctgttaggagtagttatattctcttacaaagtctgttagttagatacaatttataactatatattttctatacgaaaaacaattatattcgagtatggaactgtgggctagcttatcatagagatgaagacttgtattaatgatggattattttccactgataaaagaaatattaacatgatggatgcataaaaagcatatactgattgtttttgtggcatcaaatttatatctttgacccaaaggtatacatatatcttatggcaaagaaaagagaacgtataaatctccatgtgtattagtgtatgtgtaaaaaacatatactataaatttgtcgttgtcatcaagagatttatatcatataaatc

SEQ ID NO: 92422 - DNA, 472 bp, Glycine max
  unsure (1)..(472): unsure at all n locations
ntgctagctcagcaacagcctccttccgttcagaccatttgtgtttctttctgaatattaataagacaaaaagtaaagaacaaactgagatagattcaaacccatataactaaaatataggtgcattaattactgagtacaatccgagagatgggacagaaaactgaccactccatcccaaaatccagacttctccaaaggagtcaatatatcaacaggatcaacaagttcatattcgtcgatttttgaggagctgataatcaaagtatttgaaaaatgagtatattagtactaccaaggaaagacaaaacatgtcagatataaagaanaacatactccagatactaaatcttagataccatcattcccagattcttcacaagggccaggacccacaacctctgacacagctttctgttcaggttccttatcttgctcagatctacaacatgagagaatattttattaaaat

SEQ ID NO: 92423 - DNA, 424 bp, Glycine max
  unsure (1)..(424): unsure at all n locations
agcttcaaccctntccttcaagctctttctngttattcctaccaccccattcctgtggtgtttcactcagtctaactcttgtgccgagatcttgaccacttttgcttctcttgccatggaagggtagaatctggaaaacagatacggcttccttcctcctagcaagcatcccaagatcccttcaaactcttctatgagtggtaccaactgaaagtccccaaacctgaagcaccttagcaactggtcataatattgagagagggatgcgatggcttccacaaacacttctatcatggccaaatcccagatttttccatatgccttgcggaaggctngatgttgagcttggtccatccgctgccctaactctcgtagctaactagttctacgctcttgactttgacatgatgaaaccttttttaaa

SEQ ID NO: 92424 - DNA, 472 bp, Glycine max
  unsure (1)..(472): unsure at all n locations
cttcaattcattctatgtacccatggtggtccncatttgttttgtgtantttttattctcgnttcatttactttctgtacccccttttgatgtgattcagtcatttatttaagtcatttctcgcctaatcaaaaaataaaataaatttccaccaatcatttgatttgtaatatctgttaatttctgttaaaatgaaatccgaccattcggtcatgccgtaaccacgttggaaatcaaaaaagaggtaaaataataatataaatcaaaaaataccttttagcaaaataaagcgaaaaaatcaatcggacgtttctctttgggatttctctttcttaattgaattgactaataactaaagtgaaactaaagctaaaatcaacccgcagagtcaagctcgtccacacaaaaatcactaaaaaggatntganaagttcaatatctcagttnttcttaccaagtaaatggatcaatt

SEQ ID NO: 92425 - DNA, 425 bp, Glycine max
  unsure (1)..(425): unsure at all n locations
ggctgcagcttttctaactcatctctttttagtggcgtctnctctctctcttacttctccattccgctgccattcatcttccaagaagcaaaggaatccattgatgaataagatcctaggcctacaagctccaatgaagcttacatcatgtggtatcaagagcatcttcatctaggtgatgttcttttgcttcctctatctttttgttcggggaattctctntaattccttgctcttcatcttattctccatgtatatcctccattgtcttgtggctaggtgctgtttagagtatattcaaaaaaataaactgattaaatcttagatctacacttgttcttgcatttctatggttcacactttgtagatctacttttgaatcttgtttttgtgttgattttacggtgctatcaatttcattcata

SEQ ID NO: 92426 - DNA, 486 bp, Glycine max
  unsure (1)..(486): unsure at all n locations
ntgagccanaatcctgactcaccataaaccttgacctattgtgataatgtcaatccttaccctcggaagcaaaaaaaaagggagaaggaaaatttccaatcaaagaggaagcaaaaaaaaagggagagaaggaaaatttccaatcaaaggaaaaaagagaggaaaggaaattcccaattgtcgcaacctacccttctgcgggagggcgacgcgagactcgcgggatgcgtgttccacgaaaggaatacgcgcggagtcgccaccaacgtttatttgaggaaaacgtcggaaaaaccggaaaagacgcgatctacgaacttttaagttgaaaggttcgggagttgtatttacgcacggtgaaggtatcagcaccccacacgtccgtcccaagggacggcagcccttaatcgaatgtgcaaacatgactttgattattatgttcccttttatgttcttatatcctttataccctctttatatnttttc

SEQ ID NO: 92427 - DNA, 456 bp, Glycine max
  unsure (1)..(456): unsure at all n locations
agcttgaccagtccacataagtgatgtttatattctgtttggtattagaagcatatctccccaatgagtgaganaagtgtacaaaacctattaaaacatgcacacctcactgaataatgatacaataactgccacaaattttgtgtaggaaaacaattttgaaacactagagaaaaaacacatttaatagcatgaacaaacaatttataaagactaaggataagatcatgaacaaagcatgagccacaaacccaaggatcaggagggaataaaggatcatcaagaaacaatatggagttgcttccatttcaagaagagntgattcttctttctctggctgtgttcatctaatatcaataatattaggatccataatcaagttccattcatcatatagtgactgaataaaactaatcggataaagcctacatgtgtacctttttgactacatgtcta

SEQ ID NO: 92428 - DNA, 380 bp, Glycine max
aaaactcagctcgctgattacattctcccactttctcaagcatattcttttttcttcttgacatcatcaaaatcttcatgatatacattctccccttattgatgatgacaaccacctgtatgttatgagcaacaacaaagaataaatatctatttgcatatagattactcccccttggttatgcaatgattgcttatatgagacagttgaagatttcatatttttcatatgttaacaaattgtctcataaacaatagataatttttcttactatattatcttttatctttctctgccgctttgtcaacatcaaaaacaaatcatgaatagagaggagaaagatgttaccacatgtcgcaatgtatgataataagtgatac

SEQ ID NO: 92429 - DNA, 453 bp, Glycine max
  unsure (1)..(453): unsure at all n locations
gtaccggatccttaagcacctgcagctgcagcttgcttccacaatctcccctttttgggttgataacttctgaaatcaaggaacacatgcacactntntcctagtcgatcactcttataaatgctccccctttgtttttgaatttatgcttatcttaaaaataagttgattacttatgtgtattcttgatttaatcccacttctctccccctttggcttcaacaaaaagccaaagtgcgtatcaaataaatttaatttaaccatccatacaatggtcataaaaaatatcaaccaaatcatgaagcaagaagcaagaaccatgaaaccatgaagcatacaaccatgcatagataaattataaactccacatagtcaaaatacatacttaataattgttcatacataccatgcagatagggagatagttaattgttcaatagtataataatatag

SEQ ID NO: 92430 - DNA, 422 bp, Glycine max
  unsure (1)..(422): unsure at all n locations
tcaagcttatagcgcgggtctgggagacaaaggtcaagtgttcgttattgttaagatgatgtgccgagtactttggatttggtacgaccatgccctcctgatttccggctgggaaattggcgagtggaagaacgccccagcatttacgcaacgagcataatgtatacctttacggttttaaaagctctatagttgggcctaggctatagagttnttccttttgttaacgcgttgtgtcttttgttattgaatgtataatacaaggatctttcttcatctgctcctggtctctacccattctcattcatttgcatgtttacttgtttttctgaaacggcagatccgatgacgagtctcccgatgtactaatacctggacccgctatctacttgactagaatgatctaccggagatgacgaatg

SEQ ID NO: 92431 - DNA, 448 bp, Glycine max
  unsure (1)..(448): unsure at all n locations
agctngtcactatgttctagaataggatgtgttatgtatctantaaactgcttatgaggctagaaacacacgtctagcttgggatattatccttttcattaatgagccttttatataggctttttagacatacaacaactaacacaaagccaataactaactgtaatagaattagttattgactaattcacagcttaacaaatcaattataaactaactctaacatatcctccctgaaactgaattgtcaacaagtaattcagtttaatcatacaactttatcatccccaatctgctactaaaattagagaatgattctaacatctaatgctttgtcataatatcagagatctgctcttgtgacctacactgaaccaatttgaaacttcatctttgcaagggctgtgagatatgaaatctacatcaatgtgttgctctacatcaacac

SEQ ID NO: 92432 - DNA, 489 bp, Glycine max
  unsure (1)..(489): unsure at all n locations
ctattacgtgacctatgatactcagctaataagtccatctatggattgaaacaagcttcccgcctattgtatttaaaatttcatgaggtcatttcttcatttagctctgaagagaatctcatggatcactgtatataccagaaggtcagtgggagtaagatttgtttccttgtattatacgtagatgatattctgcttgcgactaatgataagggtatgctatatgatgtgaaacaatttctctcaaagaactttgatatgaaggatatgggagaggcatcttatgtcataggcataaagatccatagagaaagatctcgaggcattntatgcttgtctcatgagacctatatcaacaaagttttagagagatttaatatgaaagattgttcaccaagtgtagctcccattgtgaagggtgacatacttgctttgagtcaatgccccagaaatgattttgagcgggaacacatgannaatattccatat

SEQ ID NO: 92433 - DNA, 352 bp, Glycine max
  unsure (1)..(352): unsure at all n locations
agcttcaacctanaggagacttaccattccatgtgttggagaagatcaacaacaatgcctacaagattgactcgcctagtgagtataatgtaagtgccacttttaatgtgtctgatctatcntctttttatgcagatggatgagccttggatttgaggacaaatccttttcaagaaggatggagtgatgaggacacaactaatggcaaggaccatgaagcactctgagggcccatgaccagaggcagacttaaacaggcccaacacagtgatgaggacacaacacagggcaaggaccatgaaacactggaagggcccatgaccacagacagacttaaacatgctcaacacgt

SEQ ID NO: 92434 - DNA, 453 bp, Glycine max
ctttaacttcgataaagatgttataaaaattttttattgttgtttcatgctaacgatgatgttcttttcttgtgcatcttaacagacttgttctcatggaacagcatgcaattttatccactgtttttgtaatcctggtggagactattgctctatttggttattctgatgattatgagacttcaagggagcacggaaatttgagattgtcagaaacggattctaacaggtgtactctcacctttcttgttcctcattacaatttgcacgacatgattgattaacttggttactggacaaattgtatcctatgtagatgatagtaaattaagcacatgtgtggtcaatcttagcatgatggaggatagggcagtgtttgtgattggtgttgtaaataatagttgaaggctctggaacacgatgcaacttctatttactgtagtatttattgat

SEQ ID NO: 92435 - DNA, 400 bp, Glycine max
  unsure (1)..(400): unsure at all n locations
agcttgatcaaaacaataatctaacctttactattccattcaaatcatacaattgctcattcaaatcattctcanacactcatttcataccanacaatccactgtatatcattttcaatcaatatattgttcaaacacgctttaggtacaagcaaacaactcaaagtgctgaaattttaaataactgaaatttagaataaatgaatcataaaaactgaaattaaaataattgaacataaataataaaataactaaaaataaactaaaatgttcaagttgcaaaaatataaatgtcctattcatcatgttgctaatcttcattaagatccagtgctggagctactaatgaatcctagataggctgctctatctctgtgactggtgtagatggttgagtctc

SEQ ID NO: 92436 - DNA, 442 bp, Glycine max
  unsure (1)..(442): unsure at all n locations
ngactaggcgagttgattntagccttagtttcactttagttattattcaattcggtttaagaatgagaaatcccaaagagaaaacgtccgattgactttccgctttattttactaaaaggcatanttttttattattatattatttttttacctcttttttgatttccaacgtggttacggcacgaccaaacggtcggaattcattttaaccgaagttaacggataatacaattcaaacgttcggtggaaatttattttatttttaagttaagcgagaaatgacttaagtaaaatggcttaagcacgtcaaaagggggtataaaaagtaaagaaaacgagaataaaaatacacgaagcacaatgtggaccaccacgggtacataaaaatgaatcgaaaagcttggttcgagggtacttacccgtgaagatcgaagaacgatg

SEQ ID NO: 92437 - DNA, 432 bp, Glycine max
  unsure (1)..(432): unsure at all n locations
agcttgattagtagggggcctgatgcccttgcttgatgttactggtactccgtagaactgacagagacccgtaattagagcttgacaactccaagaccctgttggacttcttctggtccactgggtgtcctgcaggcgcgatccctgcaaacaatagatgaaatcagaaatcagttgagtaatgtgcatacttacctatgatgatgtgaccatgccggggggaacgagcaccctgtaggactacagaggcccgtaaccagagctggaaaccccagggccctgttgaacttctccgggtccactgggtgtctttgtgggtgcgattcctgcaaacaatagatggtatcagaaatcagttaaaccatacgtatacttacctatgtcacgatggcatgacctcgctggnggaacgagcaccctgtgggactgaca

SEQ ID NO: 92438 - DNA, 488 bp, Glycine max
  unsure (1)..(488): unsure at all n locations
ggaaggtaaactagatgccttggttaacctggtaatccatctggccatgaatcaaaaatctacacttgtcgccagactctgtggtttatgctcctctgccgatcaccacacagacctttgcccttctgtgcaacaatctgaagcaattgaacagcctgaagcttatgctgcagacatctacaatagacctcctcaacctcagtagcaaaatcagcaacaacagaacaattatgacctctctagcaacaagtacaatcctgggtggaggaatcatcccaacctttgatggtcgagtccttcacaacagcaacaataacaacagccttatttccagaatgttgctggcccaagcagaccatacgttcctccaccaatccagcagcaacaacaacaacagcaacatcctcagaaacaacaaacagtngaggctcctccacaaccttcccttgaagaacttgtgaggcaaatgactatgcanaacatgcatt

SEQ ID NO: 92439 - DNA, 427 bp, Glycine max
  unsure (1)..(427): unsure at all n locations
agctttngatgaagtgaaatggcctataatcttatagttcttctggaaattccttcttcggtataagagcaagaaatgaggcgtttgtccctctangaagcttcctaaaaaagtagaatntagtcatcatccacataatgtctgactntaaaacatcccaaaaaagctttaaaaatttgaagttgtaactatttggactaggacttttggatccatagcattcctagatttttgatctcacctcttcttcagaaaacacttgcttcatggatctacatataccctcaagcaactaacaaaaacaccatttaacctcacccgcacatcagcctgttgctaaaatctctattgaaagaaatgttattaatcccccattttagagtttcagggtcatcaacccactgccatccatatgtaagcctcttat

SEQ ID NO: 92440 - DNA, 481 bp, Glycine max
cttgattctatgtagaaagttaatgaaggcattggtgttcattctgtttggttaacaacaaaatttcttaatgatataaagtgttttggacttcatgaccactgattaatattgaaaaacggtgtacctataatgcttatgagaaatttagataggcttaattatacaactaatcccttaattgtatcatttaattgtttaaaaatattacaatcatacctttaccatcaattttgtcacattgattaatagtcacccttttcttttctttctttaactgttctacactcaaaagccatccgccaacctctgtacctagcccatgacaagcactaccacacactgcccctcatgacattaccaacattataccgccaactacaacaccactaacctttgcacccagcccatgacaatcatcactgccacccacgacataactaacatcataccaatatgatcagtcgtcattcttaagctt

SEQ ID NO: 92441 - DNA, 423 bp, Glycine max
  unsure (1)..(423): unsure at all n locations
agcattccaacttcctaacaacaaaagacctatctcttgctataccaaancaataaaagtgttaacgcaaaaccactccccctggcgacgacctcatgatttttttcatgaacatgaacatgaacatgcaacgctgcatcacaaagatctctcagaaatgtggcgcgcaatccacggtgagaagaactgggaagggcttctaaaacccatggaccctcttttgatgtcggaggtgatcctgtacagcgagctggcgcatgcctgccacgacgccttcgactacgagccattctctatgtactgcggcacatgcatgtgcgataaagctaaacatacatattctctcatttctatttcatgttntcttcatctggtatgcgaatgttcgatcaccacacacaatagtattctagtgagagagag

SEQ ID NO: 92442 - DNA, 427 bp, Glycine max
  unsure (1)..(427): unsure at all n locations
agctatgcttgcgaagaggcaggccagctcagacagggtcatgctttattttttctcataccaagaacgcattacgaacacctgtgtacatacgttcgccttgccatatgatgtattctttacaagacatgtttatcatgatgctgagccgatgatgatttaccgtcacatagggaatggacaagtgcgtttacacgttccgaccgaagagagcagagtgctatgtttaacccatngacctctatggtatcacgttncatcggacagacgcaatttattcttctggatggttacggagccatgactaaagatacaagtattttctacgtcaaacgggcatattagtctctacagccttgatagattgcgcgtgaccctgggacctcgagcctttccctatgctaggctcctatttgacgccgttccg

SEQ ID NO: 92443 - DNA, 484 bp, Glycine max
  unsure (1)..(484): unsure at all n locations
ggctgcagctttaaggaagttctcaaaagcttctcagtatgctcctagtctataaatagaagcatgtgtaacacttgttgtaactttgatgaatgagagtcttgtgagacatacttcaaagttccacttctatacctctnttattccttcaatttcgtgctcccccctctctctttctctccctctttcttttcctccattgaagcatcctctccaagcttcttatccaaggctcatcttggtggtgaagctccttcttccatggcttattccttaatggatggcgcctcctctcacctattttcctttgtcttccgctgcatctccatggtggaaaatcaccattaaaggaccccattgaagctcatagatccagcctccatcgaagctccacaagcaagcttccatcaagtggtatcagagcacaagagcttcaagtaggcgctccttaaacctcccattaattttttattcgccttctctt

SEQ ID NO: 92444 - DNA, 315 bp, Glycine max
  unsure (1)..(315): unsure at all n locations
tactaagctanacattcacttaagcctcacaatattacgggactcaatctttcatccgagacaaaagttatcgccgttcgaattgtctcaaggcttcaactttcaattacgagggtttcgatatatcacagagactcaatcatacatccgagcgaaacgatattgtcgaaagaattggctcagacgttcaacattcaattccgagagcattgattgttacgagacccagccatacatcctaggtaacacaataaaaacgtgaattttccttatactttatttccaagccctaactaaaggacaatgactggactc

SEQ ID NO: 92445 - DNA, 422 bp, Glycine max
  unsure (1)..(422): unsure at all n locations
ctgcggcatgcaagcttgtataacagaatgacaactgtaaattttattcttttcagaatgctggctcagcttatactctatttaaatggngtctgttaacacaaatgtccaatcctcaatatgttttatgaagaccccttataagtgcacacattacattagataggatgaaatgcctaatcttattccatgagaactgctgtgccataaaaacctccttaatcaaccaagcatataacacatatattatgagatagtgctttttgtgtgatattcaaatctgcaacaatagttactgttagctgagttgggaataaagaaaaggatatacatattaaattaagaacttctttaaattgaaacttgtaaaactagctgatgaacatcttttttaatgctgatangtactgggtgattctata

SEQ ID NO: 92446 - DNA, 441 bp, Glycine max
  unsure (1)..(441): unsure at all n locations
ggacctatgatactcagcttctcaggagatgagcttagttatgagaggggtgtgtgtatctattctctaacttctcaaggaagttntctcaaagaagcttatcaaggaagttttctcaagaaagcttctcaaggaagctacctagtctataaatagaagcatgtgtaacacttgttgtaactttgatgaatgagagtcttgtgagacacaactcaaagttcaacttctctccctttttcttccttcaatttcgtgctcccccctctctctttctctacctctttcttttcctccattgaagtatcctctccaagcttcttatccaaggctcatctttggggtgaagctccttcttccatagcttattccttagtggatggcgcctcctctcacctcttctccttggtctttcgttgcatcttcatggtggaagatcaccac

SEQ ID NO: 92447 - DNA, 456 bp, Glycine max
  unsure (1)..(456): unsure at all n locations
agctngacttcaacataaggatcacttctccttgtgatatctttcgcgggcaagtccttcgccttcacgaccctcacataaaggtactgcatttgctcaacgagatcataggtgctggtaagtctatcaccggaaacctttccgcctccaaggtggggcttggtctccttcaacagaaaatcttcaggtggaggcctctgcattnttccctcacttcagagaaccgagaaaccaaaattcaaaattataatccaaagccttcaacaaccgttcccaggagcctaaaaaagaggaaaacacactcaaatagccgttacaaacatgctctacttaaccgaggcacctaaaaattcgggaaaaattntaaaaacacacatcaaaagaagatattataatcgatgtaacagcagctgaaactcataaaatgtgcatcactcgtanaaacataanacgtta

SEQ ID NO: 92448 - DNA, 472 bp, Glycine max
  unsure (1)..(472): unsure at all n locations
gtgtggctgatttangggtggccttcgtggttgatttggttgtgggtaatgagaaggtctgatattggctgagtaatgacattgttgagctaatgggaaattaggccatgtagcaacgacagtcacaacatggattccttcctccttctcatcctctctatttgccccacgccttctatttgtcaaagcaggatgatcaaatttgcctcttttcaacccacttcaatccttttgccgacaaaaactaaatccgcaaagcttgaaggcatgtcacccaccattttctcatagtagaacactggtaagatgtctactatcatcgttatgatctccttctccatcatcgggggtgccacttgagttgccagatccctccacctttatgcgtattctgtgaaagattcgtgccccttnttacccatgtctatagttgcatcctatccagagccatatcagaattgtactgatactg

SEQ ID NO: 92449 - DNA, 367 bp, Glycine max
agcttgatgtatttaactaaataatatttagtcttatttaagggagtgcgtgcaatgtgatatgtgataagagtatgttattaatattcatataaaatagctaactaagtgtaatgatatatttatagaataagagaagttctatgtaaatttctaaagtggagtcatctttatataaaaaatcataaaatggaaggaaaattaggagtctcgattatacaatttataatgttgctgatcacaccactgaacgacagaaatagtggatctatcttctatgtcaggccaggtgccatcactaatcaagctcacgtcgtccctagtcttcgacttttcgtgaatggacaaggtcatacgcaaccctctc

SEQ ID NO: 92450 - DNA, 471 bp, Glycine max
  unsure (1)..(471): unsure at all n locations
ctttgaaatatttctttcatggcttcaatatctgaatgtngttatcataaggcttctctttgacacaaaaatgttgaggactttctgagagttcccattcttcaagtcctttatcatcccttttcattgtcaaacattttgaagagaatgatccaaaagcatctttgctggaggaacaactggagtcgtcgtcatcaaatgaatcagttatgcattcatctcctctacttgttctgctctcatcttcataagactggttattcagcatgcaactctcaaggccgttatatgtcataatccctttaaaattccattttatacattaaaactatgatttcaaaaggtgctatacttaaatttaacaatattacaatttacatgtggaaaaaatgagatcccnctgttattttcaaaataatgcaagaatatattccctctgccatttgacaaatcagcaatgcaggcaaacat

SEQ ID NO: 92451 - DNA, 458 bp, Glycine max
  unsure (1)..(458): unsure at all n locations
agctngctccagaacacaatgtttgcttgtgttattgggagaaggtcaagaggttctgaaggtgagaaacaaaacgtaagatcgcccagtgaggtaaaagcattaagctaatgacgttaaagaagggctccctgggaggcaacccagtttcaatttgtgttatttttggtttttcatgcatttgatcattggaaacttgttgtataatctaaacattggagcatatcaacctccctttgaatggtaaaattaaagggttcaatttcttgggaaaggactaagtttaaaacttataaaatctttttgaaaattagtccttttgctaagcacctgcttctcgctaagcgcataattgttcgtgcgttaagccacgagtttcaagcgcttagtgcacaacctttgcatctgaggctgataaattcgctanctagccaaatcaattgagtaaattcactaac

SEQ ID NO: 92452 - DNA, 434 bp, Glycine max
  unsure (1)..(434): unsure at all n locations
cctttatgagctctagagaatcttatgtttctgcctcggctaaaacgctgtccagccttcgttaatcggtggatcttctccgaatatggtctacaactatacaagacactttttcatgatctgaccgttgagatctttgagaaaagtctggagtgtgctcgaagctttcgttcccgagagcanttcttaattaagcacttcatctcttgctttcgtgtagcataggacaaacgcaatttcttcttctttctctcttccaaagccatttctaaagttccaagctctttcttcatcacccacagccaccattagccactacaaaccatcattggtctccattgaaccccacaccgagaggaacccttcaaccgaagcggagtctttcaactttgcctcgcggnttctgtaggagaacgaaacccctaatctacctt

SEQ ID NO: 92453 - DNA, 388 bp, Glycine max
  unsure (1)..(388): unsure at all n locations
agctggaggattgagggaccctgtgtctatatatactacgatatgggctacgtgggagtacgtgagctcagttggaggtgggcaacaagggatggtgggtttatgcgcgcatcgtggatgtggaaaactngttgtgcaccatcgcccgaccgtcacctagtaccacatgtgatgggtaccccataatcctacaagcttgagatgaggaagtgttgaagggtgaaactctctgcttttattgttgaccacagagtggtacctggagatatgtcgcgggggtcatgagaccttggtgacgtcaggtggggtgctattgcccaaaaccaagcttgaccaatcccgacccaacccgggcatagtcggtcagtgagaacctgtgatgtaccta

SEQ ID NO: 92454 - DNA, 357 bp, Glycine max
tgagcttttcttcttttctgcactcttgtcatgaggattccactctcacacactctccctctactctttctctgacataaacactcttctctacttcactctctcaactcctgccaaacccacatttccgcaggtgcgtgcgttactgattcattctatatattgtatcgatgttctcaccattctgatctctcttatagtataacattttgctgcattccgattgtgtttgttcttatttcggatagaatgagcgcctttggagttcctccttaggattcacaattagaaactatcaatttcttaaaaaattaatcaccgtccccggctggcatctgacttaacttataattgctt

SEQ ID NO: 92455 - DNA, 116 bp, Glycine max
  unsure (1)..(116): unsure at all n locations
ctgcaagctttgatcttctatggagtcactctgttcttataaatggacctgagcagagatttaaagagtaatgacatttggccttgcttngccccttcgcaattagctctatcttt

SEQ ID NO: 92456 - DNA, 373 bp, Glycine max
  unsure (1)..(373): unsure at all n locations
tgcctcanagaggtccaggaaggacaaggcggccgtttgttctatttccgccccggagtacgacagtcaccgctttatgagcgttgtacaccagcagcgcttcgaagccatcaagggatggtcgtttctccgggagcgacgcgtccagctcanggacgacgagtatactgattttcacgaggaaatacggcgccggcggtgggcaccactggttactcctatggccaagtttgatccagaaatagtccttgaattntatgccaatgcttggccaacagaggagggcgtgcgtgacatgagatcctgggttaggggtcagtggatcccgttcgatgccgacgctatcagccagctcctgggatatccgatggtg

SEQ ID NO: 92457 - DNA, 358 bp, Glycine max
  unsure (1)..(358): unsure at all n locations
agcttgatttgtgagtngattttagctttagtttcactttggntattcagtcaattcattcaaggaaacttccaaagaaaaacgtccgactaatttttttttattattttatttgatgatantttgattattttattattattttgtctttcttggtttaatcgtggttacagtgtgaacgatcggttagaatttattttaatggtgattaaacgatattacaacacaaatgatcggttgaaattcatttctatcatttattatgtgagacaacggcttaaataaacggctataatgctcgtaaagcggaagaaaagaaaactgatagttatcgatattatagtgaaagtacacaaaa

SEQ ID NO: 92458 - DNA, 433 bp, Glycine max
  unsure (1)..(433): unsure at all n locations
ctggttagtagcaaactcacctagcttgtcttcatgctntatgaagactctcccagaatctagaggtaaatctaggatctctatcagagactatgctcgaacgaacaccgtgtattctaactatctcactgacatacaagctactcaacctctctaaggaatatctgatgttaattgggatgaagtgagcagatttggtcaacctgtctacaataagccagatggaatctaaacctttgggggtcctatgtaaccccaccacgaaatccatcgagatgctatcccacttccactcatgtatctctaaaggttacaacatccctgaaggcttctggtgttctatcttagctttctgacatactacgcacgcaaggacaaacttcataacttctaatctcatacccggccaccacaacatatgcctcagatcctg

SEQ ID NO: 92459 - DNA, 79 bp, Glycine max
agcttgaaggagtgcaggctgtcactttttttactcatactccggtcccaacagagaaaccaccgcaccgcgttatgtt

SEQ ID NO: 92460 - DNA, 100 bp, Glycine max
tctcatgatctggagagagaactcgagccagcggtgatatttgtgttcagacgactgggagctgagtgctagagagaaggactacgctagcagtagagct

SEQ ID NO: 92461 - DNA, 491 bp, Glycine max
  unsure (1)..(491): unsure at all n locations
agctntctctnttctctctntttctctcaattgttcttcattcttcttcatcttttcacttttgttacaccattttcttcacaaaatttcatggctttgcattggtgatgatcatggagggtaaaaaattaatcaatccaaggatccactctaagcaatgatgaatttgagttctggtttggtttctatactctttgtgaatttttttctttctcttcaatcctattttcatttaaacagtgattaagtgagattacaacacaaacgataggttgaattttattntaacggtgattaaacgagattacggtatgaacgatcggtcaaaacttgctttgaacaaagaanaagatcaccaatcatcgaagaaggagatgaagatgcacaaacaataaaggggacccctaanggtccataaatcaagttaaaatccttataacaagcactaactggatgaagaacgaagaacggatgaagaacgaacgaagaac

SEQ ID NO: 92462 - DNA, 487 bp, Glycine max
  unsure (1)..(487): unsure at all n locations
ntanagcacagcaacacagaatctaggtgtccaacacccctccattcaatggcttttctaggtttgaaaggtgaaatttagaatgaggtaaattcaaagcaaactctcacctcacacaagtccataacctcaaactaaacttgctcaaactgaatttacacctaaaattccaccaaatcaaaatttgactcttcaacacccaattttgccctagaaatggctcttggttcactttggtcatttgtttttctctctagctcagcctaaccttcctcacatgtcctaaatgacatttcaagctagtattaactcactntaacctccatttaccacagaattcagacttagccttccaactctcaaagtctcactctttttccactcataacatcacattctcactttctaaccttaggttagttctacccttcgtctctaacagatttccatcagcaatttcagcatataaacatcacanacatcatca

SEQ ID NO: 92463 - DNA, 470 bp, Glycine max
  unsure (1)..(470): unsure at all n locations
agctntaaccaatttcaaacgacaataagtttttactcttatgttctaatgaatcccgtaatatatcgagacgctcataactganaacggaagctctgagcaaattctaacgacaataactttttactcggatgtccgattgagtcccgtaatatatcgaaacgctcgtaatagaaaacgaaagcacgtagcaaattcaaaccacaataacttttaactcggatgttcgattgagttctataatatatcgagacacttgaaattgaaaacagaagctctgagcaaattcaaacgacaataactttttactcggaggtccgaatgaatcccgtaatatatctagaatctcgtaattgaaaaaggaagctatgagcaaaatcaaacgacaataactnnttgattagatgttcgatggagtctcctaatatatcgagacgctcaataatgaaacaaaagctctgggcaaatca

SEQ ID NO: 92464 - DNA, 485 bp, Glycine max
  unsure (1)..(485): unsure at all n locations
ntatgttcttagaatgttatatcttgcccaactgattaatgtttctaatttgataaattcagtcttgaggatggagcaagatgttgagagtttgtctttcatgggcacacacacagactgcatgcgcaatatatatttatttatttttgttccttgtagctatctatcttttctttagagacactcctatttgagacactttcagacactaaggatagcttccctactccacatagtgagagacttgataatcctttcttgttgaagaaggaagtgtgaaagcaatgacttccaagattattttgatgatgccaaagaatcaagagttaagcaaaatctaaagattcaagaatcaagtttcaagaacaatcaagatcaagattcaagactcaagactcaagactcaagaatcaagagaagactcaatcaagataagtactaaaaaaaaagttttcanaacattgagtaacacaagaaattttcac

SEQ ID NO: 92465 - DNA, 426 bp, Glycine max
  unsure (1)..(426): unsure at all n locations
agctntngatgagtgannatggcctataatcttatagatcttctggaaattccttcttcggtataagagcaagaaatgaggcgtttgtccctctangaagcttcctaaaaaagtagaatttagtcatcatccacataatgtctgactttaaaacatcccaaaaaagctttaaaaatttgaagttgtaactatttggactaggacttttggatccatagcattcctagatttttgatctcacctcttcttcagaaaacacttgcttcatggatctacatataccctcaagcaactaacaaaaacaccatttaacctcacccgcacatcagcctgttgctaaaatctctattgaaagaaatgttattaatcccccattctagaagttcagggtcatcaacccactgccatccatatgtaagcctctta

SEQ ID NO: 92466 - DNA, 438 bp, Glycine max
  unsure (1)..(438): unsure at all n locations
tgattctatgtagaaagttaatgaaggcattggtgctcaatctgtttgtttaacaacaaaatttcttaatgatataaagtgttttggacttcatgaccactgattaatattgaaaaacggcgtacctataatgcttatgagaaatttagataggcttaattatacaactaatcccttaattgtatcatttaatngtgtaaaaatattacaatcatacctttaccatcaattatgtcacattgattaatagtcacccttttcttttctttctttaactgtactacactcaaaagccatgcgccaacctctgtacctagcccatgacaagcactaccacacactgccccttatgacttaccaacattaataccgcaactacaacaccactaacctttgcacccaggccatgacaatcatcactgccacccacgacattac

SEQ ID NO: 92467 - DNA, 451 bp, Glycine max
  unsure (1)..(451): unsure at all n locations
agctntatccttagatccctcttggtggactatgcttattttagacagccctcctaggtttagactaacttaaactaagcttcatcctcagagccctcttgttggactagactcagcttaaatagcttacgaaagtttagactaatttagcctaagctttgtccttagatccctcttgttggactagacttagaccaaacaacattattgtaacaacatatttaaaaccaaaacttaatccgcagatccatcatttaagactaagtttcaatcctacttcattcaagttctaaggcaacaatacatttcccaatgctaaagtcacctaactatgcacacaagtggttgatcagaccaagagcatacagaatttaagcactgaaagaagcattgaacataagaaacacaatcaattagatattaaagtaattacatcagctgttctttagaa

SEQ ID NO: 92468 - DNA, 415 bp, Glycine max
  unsure (1)..(415): unsure at all n locations
cggattaattcggtctgacaaaggatcgagggtttagtaatttatttataacatagtacacaagaacacgattgattagagaaatatatctctatgcatcaacttgtttgttagaaagacccaatatttctacctactgctgtcattntatttaccctgcatcttatagttcttagcatataaaattagtttaaattctgtttgaaattatcactcatacatgttctctcaacaatgcttcgattctaaacttaatttaggctaacattagttccctatgttagatactcaaattcatccattttaattttaaatactggatgatccggtgcgcttttcggtaacccccattgaaattccttgagacataaatgaacaaacagtaattgcaatggggagtcaacaaatgtattta

SEQ ID NO: 92469 - DNA, 261 bp, Glycine max
catggagaatgagaatccttaatgaatcagtgggactcacaccttgtacatccaggatgccaacgtatggatggattaacagaaagtacgatgtcagttgtaacctgacctacagactacttataagacaagctaaatatctagagatgtggaagcgaaagctgtcaagcaagacagagttgggtcgctcatactgaatcttgtcttgaagagacaataggatagtatctctatctaacgcgatcctagtgctcttatgct

SEQ ID NO: 92470 - DNA, 437 bp, Glycine max
  unsure (1)..(437): unsure at all n locations
agcttgtatacatgatctgngattttattattctcanaagctagaggttaggaaacataaacttcctcttcaatgtatccatttaggaaagcactttttacatccatttggtttaacttgaaatccataacatgagcataagaaagtagcaatcttacgtcctctattgctactagtgcatatgtttcaccaaagtctacaccctctttttgattatagcccttggctattagcctttctttattcctagtgatcaaaccatgttcatccaattttttttaaacacccatttatttccagcgatgttcatatttttagaataaggtatcaattcccatacatcattcctttttaattggtgcaactctttatgcatgaacattaaccaacacttgtctttgaagacagggttctacttaagacacacatgcatatgc

SEQ ID NO: 92471 - DNA, 458 bp, Glycine max
  unsure (1)..(458): unsure at all n locations
ntaatcgagtgtgcaacgtgactccaaaattattttcttttcccttgtatatatcattttattatgggggtcgacaagggtattgcccttgcttctacgtatcctcaggtgcgatgaggaattcagacctacgtagttctttaagttcaaatgtttgtgtgttaaattgattttatgtttttgaaagattccttttaattgcaaacaaaaagtcatttaaggcgttagaccttgaaacgatgttttaaattttgaaaagcggagagaatcgttaaggtgttggaccttgaaacgatcttttaaatttgaaaagcggagagaatcattaaggcattggatcttgagacaatctcaagtgatatttgataaaaagaagttagttatgagctggttctatctctggtttgtatattaactttcaatctctttaaagacaaatttacaacactagtgatcga

SEQ ID NO: 92472 - DNA, 413 bp, Glycine max
tagctttatgtccacaagaagaggctcatgtttcctacaactactgtccacaagtcaacgatgtagtacacaactcaaccctagttgaccaaaagtcatatgtcacattattaataacacaaacatatgtttgttaatggagggccctggcatcatacctattgaaataattctgctcccaacttggtttaattcttgttttggagctatagcacaaacaggagtggaggctacctctattatggaagaaacctttcctaaaccatatcatatactcttattccatcatattaacttggtactatggcatttgaaactgccacatctgagtctaattgatagtgaattttgactaagaatgattaccattcttcattgactcgtatttttatgagataatgacgaattaatat

SEQ ID NO: 92473 - DNA, 428 bp, Glycine max
  unsure (1)..(428): unsure at all n locations
tctangaggcttcttcgagacgaacgagccttatctattcattcgtctaatacaaactgacgatcgtcaagatgttgcgggtgagaatatcgcggccacacactcagactgcatgctcattacttatatatcatagatagatacatgagggtgtcacatttgctcctagggacacttcacattgagactcttgcatacagctttgatagcactccttctacacaattgaaagactcagatctccgtattggctgaggatcgaagagtgcatacacagacttcctcatgattgcatgcatgcctagaccatgctatggtgttacacaagtcagaatgatgacttgacacactacataagatttagacttaatactattagctacagaatcacatcgttatcagattgctgtacattgaccccgtggcat

SEQ ID NO: 92474 - DNA, 472 bp, Glycine max
  unsure (1)..(472): unsure at all n locations
agctngtttcaaaccatagatgaatttatttattttgcacaccatagactntgagtcacctgatacaaagttntctggttgcatcatataaattgtttcttcaatgtcagcatttagaaacgtagtcttaacatccatctgatgtagctctaaatcataatgagctatcagtgccattattgttataaaagaatcctttgaagataatggagaaaaggtttctttataatcaatgtcttcattttgggtaaatcctttagcgactagacgagtcttatatctcttgacattgccttttgaatcccttttggttttaaatatccacttgcaaccaataggtttcacactttcaagcaattcgatgagatcccaaacgtcattgtcttgcatagatntcatctcatccttcatggcatngatccaattttgagagttagaactatgcatggcttaacagaaagtaatcgaatca

SEQ ID NO: 92475 - DNA, 393 bp, Glycine max
  unsure (1)..(393): unsure at all n locations
ngtgctattccaagttcattaaccatacctttgagctagattttttccttcactccttcagctagggccatgtattctgcttcagttgttgaaagagcaacaactgattgttgtaccaaacaaagtaaacacatatcctgttaaggatttccttgtgtctacatttcctgcaaaatctgcatctacatagcttgtgattgttgcctcttgtgctgtcttcttgtaccttaatccaacttgcaaagatccatttagataccttagtgtccacttcatagcttcccagtgtgcactgccaggatctctcatgaatctgcttatatgcttacagcatgagccaagtcaggtctgctgcaaccattccatacattatgcttncaacaccacttgcat

SEQ ID NO: 92476 - DNA, 461 bp, Glycine max
  unsure (1)..(461): unsure at all n locations
agcttgattctaaagtggataaagattattttcttgtctnttctgatacatctaaagcatatagaatntttaatactagaactctagttgtagaagaacccatccatgttaaatntaatgatggactaatgtctgataagaagttatcaaatcttgaggatgatcttgcagatatgatcatttgtaactcctaaagaaaaatagactaagaattttgatgaattcttcctcatattgaacaaatctgatgcaatcctaccccccaagtgtgacaccctctacccctcacatatatactaataaggaataaaaattcaaatattaattaanagtattnttaaatacaatcctttcaaaagggtaaaaggctcacattcactttcttctacatcatanttcaaattgtccaaataaataataaagtcatcttggctcatacaaggtcatctatgacttcatac

SEQ ID NO: 92477 - DNA, 75 bp, Glycine max
cggacacttagaatactcagcttgtcaacaagtaactaaatctatcgtttgtaaaaatagtgttatatgcatttg

SEQ ID NO: 92478 - DNA, 394 bp, Glycine max
gcctgctgcatgctaactcgtgagatattgagatattgttttctctgaacgtgatgatagaaaagtgctaccatattagtattatttatgggcgagcatgtttttacatggagttctaacaagcacggcgttgtgacactttctacttgtgaagccgagtgtgtttctgcatcttattgcacatgtcatgccatttggctaataacattgatggatgaactacaattgtttgctaaggaaagcacgaagatctatgttgattatagatctgcacaagaactcgcctagaatctcggggtttatgaatgatatgagcatatagatacaacgtatcatttcattctagagcgcattaccgacaaagaagtctaattgactcatgtgaaatctcacg

SEQ ID NO: 92479 - DNA, 417 bp, Glycine max
aactcagcttcacattttggatcattctttacattagttattgttcttcttccttcaatcaagcaaaatagaatgggttttcgtttacctgctgttcgacgggcatctttcacggctagccaagcatcttcataatctgtacaagttccaaagggctatcttgcagtgaatgttggggaaaaacaaaagcggttcgtggttcccgtatcatacttgaatcatccttcacttcaagatctttcgaatcaagctgaggaagagttcggatattatcattccttcggtggcctcacaatttcttgcagcgaagatggtatccacgatattacttctcacttgaattgagaccactaatctcactgtgggagacttacatagaatagtagacattctacactctacgcatcatgtccactt

SEQ ID NO: 92480 - DNA, 177 bp, Glycine max
agctactaagcaagatacattgtcttctatgtgtttaagagtgatcacactcacatcccataatgtggaaatgcctacacaaacctccatcatcattatgaattcattgcttaaacaccccttgtatgtccgatataaaaactccacaacatataatattcacaacacatgcctaat

SEQ ID NO: 92481 - DNA, 476 bp, Glycine max
  unsure (1)..(476): unsure at all n locations
ggaacatntaacatgcatgagcttattagtatgttcgaatgtaactctactatactattattactgctgctacaaatttttgttagatagtctgttccagcaatttagcaactcccgaatatatataaattggcaagtttaagtgactcatatttacaaggatgaaaatagatgtgcaaacttcttggtaaacattgcatgtgatttgggccgcgttcagtgtaacatttcatttttcgtaaaataaatttaaaaaattatttgaaaataaattaaattttagaaaaatgatgagatttttataattaaataaataaaaataaataactctattaattaaaataatggtttgaaagaaaataaaaatgatcttttatttattcattagataggaaataaaatagagcttatgttataaaatataaaaataagagtaaataaaatgcctacgataccctagttataaatacacacgt

SEQ ID NO: 92482 - DNA, 441 bp, Glycine max
  unsure (1)..(441): unsure at all n locations
agcttaccaccataggaggctctggataagattttggaggaagaaggagatgaatgaagggagagggagagaagagcacgaaattntgtgctcaaaaagagctctgaaatctgaagttaatattcaaatgatcaaagttgaaaaaaatgcacacacatgacctctatttatagcctaagtgtcacacaaaattagagggaaattcaaatttcacttgaatttgaaattgaatttgtggagccaaactttggagccaaaatttcactaattatgattagtgaattttagttatggttcagcccactaatccaagatcaattccaagattctccactaagtgtgcttacgtgtcatgaggcatganaagcatgaaggacantgcacaagtgtgactatatgatgttggcatggggtgtagtaagcaaatgctcaccctcccct

SEQ ID NO: 92483 - DNA, 454 bp, Glycine max
ggtccttgactcattttctccttgaagagacgtctccaatctcctttcctccttctccattctgctgccattgatcttcaagaagcaaaggatttcattgatgaagaagatccaaggcctacaagctctacatggagctacatcatgtggtatcaagagcatcttcatctaagtgatgttcttttgcttcctctatcttttgtttggtcaattcactttaattccttgttcttcatcatattctccatgtatctcctccattatcttgcggtttggctctgcttatagtagattcacaaatataaatcgattaaatcttagatctatacttgttcttgcatttctatggttcaaatgtcatagatccacttctgaatcatcgttttgtgtcgatttaaggtctatcttctttaagacttaatcttcttgtgcggaacctttagatctcattttc

SEQ ID NO: 92484 - DNA, 440 bp, Glycine max
  unsure (1)..(440): unsure at all n locations
agcttctaaactntatacaagaatgaagctctgatacctcttgttggacaagtggcctcagatatcttaaaaagggggggttgaattaagatatcacaacttatttccccaattaaaaattctagttatctttctattccagttataaattcccttaataatgaatttcttaaatattgattcaaatagaacaatttgaatataaatataaaacaataataaataaaggagtttaagggaagagaaaatgcaaactcagatttatactggttcggccacacccttgtgcctacgtccagtccccaagcaacccccttgagagttccactatcttgtaaattccttttacaagttctaaacacacaaggacaacccttcctttgtgtttagaattctttcacaacaagagaccctcgatctcttaatctcttttcagaatg

SEQ ID NO: 92485 - DNA, 490 bp, Glycine max
  unsure (1)..(490): unsure at all n locations
ngaagaggatgctctaatggaggacaagaaagagagaaggtgggagcactaaattgaaggaataaaagagggaaagaagtggaactttgaagtgtatctcataagactttcattcatcaaagttacaacaagtgttacacattcttctatttatagactaggtagcttccttgagaggctttcttgagaaaacttccttgagaagcttctttgagaaaacttccttgagaagctagagcttagctacacacacccctctcataactaagctcacctccttgagaagcttccttaagaagattcctaaagaagctagagcttagctacacctacctctctaatagctaagctcacctccttgagatgagaagctagaacttagctacacaccccctataatagctaagctcacccccatgacaaanaatatganaatacaagaaaataagtctttcctacaaagactactcaaaatgccccaaaatacacg

SEQ ID NO: 92486 - DNA, 486 bp, Glycine max
cgcccagagaaggaatccatggaggatatgcttaccacctctaaagactagaaagcggtttctaatgactcctctgcggcctccacataaggcatagaggatgggcaactcaccaagatgtcttcctcgcctgatacgatgaccagatgcccttccactacgaatctcaacttttggtggagtgtagagggaacaactcccactgagtggatccacggacgccccaacagacagctgtagggggggttaatgtccattatttggaaggtaacttggcatgtgtgagggcctatctgtactgcgaggtcgatctctcccctaacctctcagcgggtgccgtcgaaggcacgaaccaccattgaactcggctttaggtgggacgcattgaatggaaatgtctccacagtgctcttaggctttacgtgtaaactggaaccattatcgatgagcaccttggctacgatatggtccatacactcgactgat

SEQ ID NO: 92487 - DNA, 410 bp, Glycine max
ctccccacaacgatggagaatgacagttctaaggtagatctttctggacaaatgaatagataccgctgtaatgctcgatccgaatgatacttggttaaggtactgttgagacaatccagtcgacagctctaatgatcattctatagccgtggtggacatgctcaatagcgccgtgcatcatgagtactttaccgtctgaatgtgtaaccatatatgactagagcatacttacagcataatggctacaagtgtcttagctacactaagaaatcttatcctaatcttctacattaatgtgctctcctctcttggaatatgtgcactcaaagtgaaccttgcacatagccactctcagagactaaatacagtgcgactcactgaacagtgctattcttgcacaaatggaaatc

SEQ ID NO: 92488 - DNA, 340 bp, Glycine max
tacggacacttgaaactaagctgcttcttgtgaatgggcacttctgggacatattaattgtgcatcctgcgacgccaagtgtctcgcagcgtgcgatccaaggttgtatctcatcaaatgactatgcccggactattttaggggatgacaggaaccaccatatccagcctaaatcgtttcgtcatggatatattgcttactgtctacatcttatccttaccttctgtctcttctttaccgttcttgtggcaccctgacattgtctcttacatggtatcctacattagcaatgactagatgctgtacatacactctatgtacatttactttgtgaattgat

SEQ ID NO: 92489 - DNA, 475 bp, Glycine max
  unsure (1)..(475): unsure at all n locations
gcttatcataaccatgtatgagtggattatattgtactctcatgaataggtntgcaactcttagagataaattgaaaaattacagaggtgaagtgatgcctaagcccctataaaggtcggattaggaggttgaaaagtctgggaattgggtagctgcttggggaggagatggtgattctgaagtcacacatatgcattatggtaaacaaatagagttgttcatctaacttataaggattggttggcataccgtgcagacatgcagtggctgccatacaattcaaaaattttaaggttgtggattatgtgaataattattattcaagggatacatatggtgtttgttatggacacaaggtggcatcaattaatggtatggatatatggctagttacagagtttgatgagattcaaccaccaaaatacaaaaaggatcctggtataccaaagaaattgataaggagagagcatgatg

SEQ ID NO: 92490 - DNA, 482 bp, Glycine max
  unsure (1)..(482): unsure at all n locations
gtcactccacccatatctggcctngacattaaccagacttatcactgccgacaacaacgtcaaggaattcttgcacccttgatacaaaggcttctttgagtcactctacaatccttcatacacaggggcatgtgcttgctaaaaagactcttgtccaaggtcacgaatcatatcctccaagcgatctcccatttctacatcaaatggtttggattgagccccactctgcatgtctgtcatttcaccatgccatatccacgtcgtataattcctcttaattccatcacacaacagatgctcccgtatgtcgtccagtatttgtcgtcttccattcaaaaaattgatgcatggacaataatatttcccatcttcatccggtcgacctctttctgcagcanattgtaagaactgctcgacgccttcctcatattctatgctgatgcgacttttattcatccaacttcgatccatctcagtaataa

SEQ ID NO: 92491 - DNA, 384 bp, Glycine max
aacatacattatcatgtccacacagactatgttgtatattcttataaagatagataaatctctcacagcaccttgaaattaagagaaaaagactaagtgttgatagcatatatgtcaataagatgaatctagattctagatttagtctctggagaacaatcattattctttatgcaccaagctgtattccaaagagaactttgtgtgattgcaaaagggtttaaaatttctataacacaattcacgctccttttttggatctttgccttacaatatacaaagcaggcccaacttctggtatctcttggcttctcacaacttttataatttaaagttacattcccttgacatggggcggtgagaatgcccttacactttctttgc

SEQ ID NO: 92492 - DNA, 346 bp, Glycine max
ctatggttaatgctctctctagaacatttccattggatttaatgatgaaatctgtgcattttcaaatgacaaagacgctaagttcttgattgcaaaatgcatcaagtgggctaagcgcatatacaccgctaagcgtagcttcagcgtgcttagcgcacaggagaatctggcagagcatcagcatcaaagtcgtgcgctaagcgcagcaggtgccttcaggcaggctaagctcgagactgggcctaagcccaatttcactgacttcgccctatgcgcgagggtggcactaagcgcaacgtcacaatttcagagcctattaaaagtctgtcctgtgtagaattaggga

SEQ ID NO: 92493 - DNA, 416 bp, Glycine max
  unsure (1)..(416): unsure at all n locations
agcttgtatactgaattgagtatggcacactctttgcatgtctgatatgccttntanaggcttgaaaagtgcgaganaacgagctgtgttttctacattttctgganaaatgcgatgaactcgctaagcaagaaggctgcgctaagcgagttcatcaatactcattgtatataagctttatctgaagaactcgccaagcgcacttactgcgctaagcgagttcatcctttgaggatgaacattcatcctcttgctgaactacctatggccaagcgaggctgaatcgctaagcccaggtaacttaaccatttttttggtgatagccacgtgctaagctgagcattcctaagccaagcgcaattggctgcggcatccgctgagctaagcgagcttcactcactaagctnccataactt

SEQ ID NO: 92494 - DNA, 464 bp, Glycine max
atgcacgcttctgcatcttcaaaagcaacctactctagactctaagctcttcaacggtggcaaatcagcatgatgatgaccattaagagaacaatatgtgtaagggcaaaccttcatggctgaagttgcctctgactcagttcccccatggctaagcatgaggtatgcaaggaactctgagtccttcaaagttgaagaacaagtggttctctgtgtgtgcacccatatctgcacacataacagccctggtggattttctagaacaagctctataagccttgaaactagtggttatggtcaatgttctcaccaaactcaaactggatgttcttgtcaaaacttttgcaagcttcttagcacaggaagctttggaatcactggataattgtctatgaagactcctaaaatcagaaccacgttgagtgtatctgtggcttaccgggaaaagctccttttttgatgtg

SEQ ID NO: 92495 - DNA, 390 bp, Glycine max
  unsure (1)..(390): unsure at all n locations
agcttgaagganaactngattccttggtcaactctattaactcagcttgccatgaatcagaaatctacacctgttgcaagagtttgtggtctatgttcttctgcagatcaccatacagatctttgtccttctttgcagcaatctaaagtcaatgagaaacctgaagcttatgttgcaaaaatttataatagacccccttagcagaaaaaccaacaacaacaaaataattatgatctttcaagcaacagatacaatccaggttagaggaatcatccaaatctgagatggacaagtcctccacaacaacagcagcttgtccctccatttctgaatgttgctggcccaagcaagccatatgttcctcctccaatgcagcagcagcaacaacaa

SEQ ID NO: 92496 - DNA, 463 bp, Glycine max
  unsure (1)..(463): unsure at all n locations
ngataaattanggatcatagttaggaacaaggccatattgattgctaaaggatacaaccaagaggaaggcattgactatgatgagacctatgcccctgttgctaggttggaagctattatattgttgcttccttttgcttgtataataaatttcacgttatatcaaatggatgtaaaagtgtttttctcaatggatatattgaagaaaagatatacgtggagcaacctctaggttttgtagacttcgatcatcctaatcatgtttacaagttgaaaaaggcactatatggattaaaacaagcacctagatcttagaattctctagttctatccagaaagagttggagatgtctatgatgagagaattgactttcttccttggacttcaagttaagacaatcaagcatggaaccttnntatgccaagcaaagtactacacataattgattaagaagttcaatat

SEQ ID NO: 92497 - DNA, 403 bp, Glycine max
  unsure (1)..(403): unsure at all n locations
agcttgtagctnttggcatattttttgtgttataatntaaatcactgcctgcctctaattatatcatgttttgaataaaattaagctacaacatgaccaataagacaagaacaacattgattagaaattactttttgttgtttattttttacttagaaattgtttacattgatttttaattntttccaaattgttgtagagatgagtgcttctagtcctagtcaagctaaataacaagatgatgataccaaacctttatggacctatgttataaagataaaaagtgtaggtggtggtggaaattatgcggtaaaatgcaatatttgtgaatttacctttaatgggtcttacactagagtgatggcacactcgttaaagatgacgggaaaagggagttagagtt

SEQ ID NO: 92498 - DNA, 425 bp, Glycine max
  unsure (1)..(425): unsure at all n locations
ngagatgaggaagtgtagaagggtgaaacttcctgcttttattcgttgaccacagagtggtacttggagatatgtcgcggnggtcaggagaccttggggacgtcaagtgtggtgctatttcccaaaaccaagcttgaccaatcccgacccaacccgggcatagtcggtcagtgagaacctgtgatgtacctaaacaggcgagctcctggcagtcaacagattaaaggaacaaagaccacaaaacaaggaggcttgtggtggctggctagctgtgaatcttgtgtgatatatgggttatggcctctggtaatcgattaccaagggtgggtaatcgattacaaggcttagacatgaagacaggaggctaagatggtctctggtaatcgattaccacggngtgtaatcgattaccaagcttgaaaaca

SEQ ID NO: 92499 - DNA, 466 bp, Glycine max
  unsure (1)..(466): unsure at all n locations
atcctctgactcacctgcggcatgaagcntgatactgaatngagtatggcgcacactttgcaagtctaatatgccatttagaggcttgaaaagtgcgagaaaatgagttgtgttttctgcgttttctggaaaacgcgatgaactcgctaaacgcgcttaccgcgctaagcgagttcattttttgaggatgaacactcatcctcttgttgaactacctatggctaagcgaggctgaatcgctaagcccaagtaacttaaatcaattnttttgttgatggccgcgcgctaagccaagctttcctgggccaagcgcgattggttgcggcatcctctgagctaagtgagcttcgccaacacttagtagaattattgaagagttgttgccgctaagcgcaaccttcaaggagcttagtgcanatccttgtagcacatgttgtgacatcctataatntctacccgggaattt

SEQ ID NO: 92500 - DNA, 479 bp, Glycine max
  unsure (1)..(479): unsure at all n locations
tgggcttttattctctgacattgtgcacattaagttagttatgaaagaattcagattaaatcaataaagttaggaccctatatttcactaagaaagggttacatatcgtaattcatggaaggaaatgtttaatctacaatataaccgccatgattcatgtgtaattaatttctagtgacaatatcaagtttaagttaacaagtgatggccatatttgnttgtcaaaataaagattatattagtagtatatgtgggagaatgttagcatatgaccattatgtaacgacccacctcgtcactacagtatccacactctaatatttgataatttcaatttttataaaaagaactcccttaattttttattatgaaaatagaagtgattttgtcacaacataaattcatccaacaacacgccattacttaagtgaatatgcataattacatagaaacaataattcggtacagtcatacacata

SEQ ID NO: 92501 - DNA, 289 bp, Glycine max
  unsure (1)..(289): unsure at all n locations
agctntaaagagaaaagcacatgacacatcattacagtgaanactgaattactcagtaagtgcgtggcacaaccagaggagtgggaattggacacccaanatgaccaataaaccattaaaagggacaattgtctaattttcaagcatgagcacaccagtaattttcctatacttctcttttataatatangatatagatagattacttttttatacttatagaagcattcgagtaacacacgtgaataggacatatataaaacatacttaatataatcttncttttgct

SEQ ID NO: 92502 - DNA, 397 bp, Glycine max
ttgcccccagctcgcccaggagagcaaggtggcttcctccataagcaaccgccttctggaggaagaatctgaaggcccaagtgggcctgattgctatttgcacccccatttttactaaatacacccccttgctcttttttggtgattctttttccgtaacgttacgaaactttatgaatttcgtaacgatgcttgttttctttccgtaatgttatgaaaccttacggattacgtaatcatcccttctttgccttccggaatgttacggaactttgcggattacgcactaacacttccttttaatttccggcatgtcacagaacttcgcggattgtgctacaatgctttcttttgactcccgacatgtcatggaacttcatgaattggctaacgatgg

SEQ ID NO: 92503 - DNA, 465 bp, Glycine max
  unsure (1)..(465): unsure at all n locations
gtaagcgcgaagtataaggagttctagaatatgctatctgtctagcagctcccctggtccttatatgaactcactgaggtacttgggcttgtgtgtgttgcgttctggtctgttattgcctctgctatttgtagtcatgatttcctcttggttggaattatcgtctgatgctgttatctgtgtgatatctggtattgctgttagtgagttgctatcatctgcatggttgtttttttatcggcaaacatatataaatatttcattatgttaatagtgatgaagtaccagaggtactntcgtcatagataggatcccatacatatggttccttagagaaaactaatacagtttaattaggaaccatattatggctaatacatctgctacagcctcaataaaaatctaccctctagtgatacaaaaagcctcgttcgtgtagcattcgatctgctatgatgcatgaag

SEQ ID NO: 92504 - DNA, 477 bp, Glycine max
  unsure (1)..(477): unsure at all n locations
agcttctatgttngaatcttattgtgtagtctacattcaaaatatttttaaaagataaacaaatgtatgatttgatacattataataataataataataaaatgattataatttatacttagttaaattggctggcctgctagatctaataagactttttgaatggcctaaaacttgatcttttttaatcaaagacttttataaaagtctaagtctcacctattcttgaaaaagtttgtgcctaatgtaggttaggccacaggtccctgtcgaaggcctaagcctatatttacccctaatcacaacacatacatgcaatccataatcaatctaaaatgagatgaaattttctttctttcacattctcttctcagagatgagaccaccatcgacaagcaacgaagaaattatcgaaacttatgcatatagcacatgaatatgcttatcaactcaatacaaaataatacatcatcactc

SEQ ID NO: 92505 - DNA, 462 bp, Glycine max
  unsure (1)..(462): unsure at all n locations
tagatagaaacattgaacacatgagaacaactctatttatataatanaaatatttacatcaagttctcagtgaaaattcccaacaaaggatattagccctcccttacaagggagcaactttcacataaaggagaatggtttcatagaaaataccagatcacaaagcaatggggatgcctcctccacctctaagaacctagaaaataactctataacctagaatctacctaaaagttaggacatttgcttccttgctcaacttttccttttgtctctgcacacaattcacagtccaattcagacctctttcacgttatcacactctatttttttcctatgcanaacaggcttataaaggctttttacctcaaaagcgcgcttagtgccactcttatgcatagtgcgagtaattgatatttggcttagcgccaacttgcgcttaccgcaaagaaaacaatccct

SEQ ID NO: 92506 - DNA, 267 bp, Glycine max
atcctctgagtcacctgctgcatgcagctgtgagaaatatgccttaagaaagcttcctctagatgttgttaaacttcattagaaaaatgatactctaaaggaaaccttacccaaatttttcaaaggaactgaatgttctgacaagttgttaaaatataagagtggttctgtgaacaaatctattcatggttacagatttatgaagtttgatcatgacgagtttgttgtcgcttttttttttttgtgggaaagttggacacaaaacat

SEQ ID NO: 92507 - DNA, 452 bp, Glycine max
  unsure (1)..(452): unsure at all n locations
tggcactggtactgtgaatctctgggctcttttatatggctagattttntagagggaaccacagagttgctttccacgtttcttcttctatatggtatagtttatgccccttcttagatgttataactgataactctcaatggcaaattggttggtaaaaacattgcgctttggactgacaaatggctctcccaacccctaagtgcatttgttgcatattcctgaatcctatcataccaatntaaattccacagtggcagactatatntataatggtgtgtagcgcattcctcaatcttttgagcaattatattccgacttgatgaatgaaattcagcacgtagttattcccatctcgcagctggaagaccacaatgtgtggtgtcctgcgacttcacgtcagttgacatttaaataagctcataacttttngaggcanactggatcacaag

SEQ ID NO: 92508 - DNA, 437 bp, Glycine max
  unsure (1)..(437): unsure at all n locations
agcttaaggcttctgttcctatagaaaccattctcatcttgctttcagtgggcacttaccaactcatttcgtccaccactctgcatgcatgcatgatgcaacacatatatattattcatactaactagnataatatttttaatattattccatatcatgatgattagataattaagttatattttgaaaaaaaatccaataaatattactatctaagacatagtcaataactttttcttatcccttgcataagattcatttcatattttttctcattaattatttgtttactaaaatatcataaattatgattaaagacgatgaataatttttgttaaaattaaagataaattcaatattaataattaagctaattaatttttttaataaacaaataaataattatgtcttataatagtacacagtgagaaaaatta

SEQ ID NO: 92509 - DNA, 441 bp, Glycine max
tcaaacgagaaattaggaccctaccgaaaatgataggatcttggcccacagtaacgatatctttggaatatatgtaaaaatgttcttcaacttttctatacatgagaaaatacttcggacaacgttcaacttacctcattattttgtaagacagaatcttggtcagcataaatgaaaatcacgagaccattgactagtactgcatacagatgcaaactgttgttcttggcaactgaaattagaggcaccggctgtacttgagtatattattcgaagaccaagaatgatgctataaatatataactgacattctacccatcacaaatgaatatatataataagctgttacttttaaaataatcattttagacataatagacttattattattaattatgattagatgatattataaaatttaatgcacgtctctatctctta

SEQ ID NO: 92510 - DNA, 407 bp, Glycine max
caagctgtgggctgagaacctatataacagaactctatgttttattcagggttttttatttccgttttggagaagagaataattttaggttttgcaattccagtttttactgttcatgcgcactattcacgtagcaataaaattcgttttctgcttcaatctgcaatttcgttttatgcttcaatctacaatttcgttttctacttcaatttgcaatttcgttttctactgattaatggaaggctaagtctccaacgttgttttctcttgaggatcaagcacaactctctttgatgctatgggattactatcgaaatctgaccagtttgtcctccttaccaattactttatatttgttgctattaatacatgcatgctcagagcttgattaattgtctttgcgctta

SEQ ID NO: 92511 - DNA, 496 bp, Glycine max
  unsure (1)..(496): unsure at all n locations
agaggatgcttcaatggaggataagaaagagataaggtgttgagcacgatattgaaggaataaaagagggagagaagtggaactttgaagtgtgtctcataagactttcattcatcaaagttacaacaagtgttacacatggttctatttatagactaggtagcttccttgagaagctttcttgagaaaacttccttgagaagcttctttgagaaaatntccttgagaagctagagcttatctacacacacncctctaataactaagctcacctccttgagaagcttccatgagatgattcctaaagaagctagagcttagctacacacacctctctaatagctaagctcacccccatgacaaaatacatgataataaaaaaaagtccctactacaaagactactcataatgccttgaaatacaaggctaanatcctatactactagaatggccaaaatacaaggcccaaaagaagaaaaacaacctattctaata

SEQ ID NO: 92512 - DNA, 419 bp, Glycine max
agctgtaagacttgtattaaaacgttcagaatttactggttatttattaccatatatgtgtaatcgattacacagcgcaaatattgaattcaaattttaatagctgttgaaaatcagcttaggccactggtaatccattacatcctctggttatcgattaccctaacgtaaatatgttgaaaaagactttttaacttaaatatcttggtccaactttttgctacttcaattggaattcccttcctatttaatataccctttctaagactctagagactgtcttgatcatccatctggaatatctctaattcctttgactcgattaagatttgaacacctgtgaaacttttcatcataacacattcagctgatcttttttactatggatatattgaacggatatggctagctggcgagtt

SEQ ID NO: 92513 - DNA, 473 bp, Glycine max
  unsure (1)..(473): unsure at all n locations
agattagtgatcattatggcccagtttattctctctcctttttttttcttttatgcactgatgttcccttttgacctaacgagctctttttgagaacccaataggccacaaattgtatttttttatttttttttcttttcatgtttccttcctttatttttctttcttttccttttcacattggtctttctttcttttctttttttttattattttctttttcttcttttttttttctttttttcttttcttctcttattattattattattatatatatattttttatttcttttcttttttactttttctttttttttttctgctgttttcttttattntctttggatccagacaaaattaggatctgacattgtcggaatcttatntggntcatgctgtctctacctaaagctagtangttggggattttgtgacagtgtgagtgaatgttgtttgatcatgatttgaca

SEQ ID NO: 92514 - DNA, 366 bp, Glycine max
atgactatgctgcgttgtgggactttttcaccaatgtagatctttaatttttggcccttacctaactagccacgatctttggattggacttctatatttatagctccatagggcttaacgtctgtaatagtaagggggccactccttctcaattgggattttcgagaaacaactataatcctgagttgtagagcaaaacttgttgtccaggcctaaatcctttgaagaggatattcttctcataatacctcttggttctttctttgtagagcttggatgattcttatgccttgagtcaaagatgagacacttcatggctcaatgagctcttatttctaataccactggtatgtggcatttctcttt

SEQ ID NO: 92515 - DNA, 482 bp, Glycine max
  unsure (1)..(482): unsure at all n locations
gagaagagaaaaatgaaggattgaagatatcttgttttgatgatgtctttctctctctagaatctctcacatgcagaagctccttgagaaaaatggccaaaatcccctccacaatctaatttcaggcttaaataggtggctttgtttgtgctagcacgcttagcgcgattatggaacgctcattgtgcattagtggatttcggcttagcgcgtgtttctctcgctcaacggatggactgaagcggtgcacttagctggatgacccttcactcagcgcaaatgcacaactcatccttcttccagattcttcgtcacgctcatccgaggaatgttgcgctcagtggatggctcgctaagccacaagattggcttatcgagaggatgaanatcagcacttcacanactcgcctaattaacttgaaattgagaggaaatgattattaaacacacaaaatangagtactaagtatttattacctatc

SEQ ID NO: 92516 - DNA, 205 bp, Glycine max
tagcttctcgacatatgacgcgctccgaatcggatatccgagtgaaaagacctgaccatttggatcaccggagcaatttcgatgcttaatcccgagcgtatttatatattataagccggtgccggacatccgtgtgataagacatgaccattcgaattgctcaagagcttccgttgttgaaccaaaagccccttgacatattatg

SEQ ID NO: 92517 - DNA, 405 bp, Glycine max
agcttgatcaaaacaattatctaatcattcctatccactcaaatcatacaattgctcattcaaatcattctcaaacactcatttcatgcaaaacaatccattatatatcattttcaatcaattcattgttcaaacacgcttttggtacaaacaaacaactcaaagtgctgaaatttatataattgaaatttaaaaaaattgaaataataaatctgaaattaaaatgactgaacataaatcataaaataattgaaaataaactaaaatgttcgagatgcacaaatttaaatgtcctgctcctgtggttgctcctatgcatgctcattaaggtccaacacctgagcagctggtgcagatggtgtggcatattcaagtatgggtgctaaggatggctttgggatctgg

SEQ ID NO: 92518 - DNA, 473 bp, Glycine max
  unsure (1)..(473): unsure at all n locations
ctagctttcattggtgtatgttgatctcctttttatgctctatattgtgggagtgtgctcaaatatatggggcaactttgatttgttttcttgcttgattaggttgaattaagggttggtatgagatggccctacgcctataatgcattttgaaacaataggatatgccacattgtccctgttctcttgctattgatgcctaaacgcgcgcccaccaagtgttcggtgaaatgcctcaatggcattagcgcgtgacttttgtaaggagacaacccatggggtattctggtttgtgcatattttctanttttttggaatatgtattcattcccgagaaaggctagagtaattgccccacatatatcctangcctagaaactaaaattttatgcaaaaagaacacaaaaggaggtgcatattgngtaaagttaccctttttggccagcaatcagctattggccacactacaatat

SEQ ID NO: 92519 - DNA, 343 bp, Glycine max
agcttgtaacttatacatattgaagctcttataccacctgttatacaagaggcctcagatatcttaagaacgggggagttgaattaagatattaccgactatatcccccattaaaagtctatttcactttctattcccattacaaattgccttactactgaactgcttaactattgatttaaatttaacaatgctgctctaaatattgaacactactaattaaaagagtgttacgaaagagaacgtgcttactcagatatatactggatcggccacacccttgtgcctacgttcacgccccatgcaacccgcttgagagttccactatcttgctcaaatcttt

SEQ ID NO: 92520 - DNA, 450 bp, Glycine max
agctgggtatcgattacacccgcttggtaatcgatttctctatactctcctagcttcctgacctcggtgtcaagccgtggaatcgattacactcccttggtcatcgagcaccagagaccatcttaatctgctgtcttcatttttaagcctgggaatcgattacccacccttggttatcgattactagaggccatatcccatatatcaatcagagttcacagctggccagccaccacacaagcactcttgctttgtggacattgctccttttatctgttgactgccacgagctcactcgcttaggtacatcacaagttctcactgactgactatgcccggagtgggtcaagattggtcaaactttggtttggacaataacaccccacctaacgtcacaacgtctcctgagcctcgcgacatatctccatgtaccactctgtggcaacgaat

SEQ ID NO: 92521 - DNA, 286 bp, Glycine max
agcttgccgcaacatctgaattcgatgtatggtatatccccgtgcggtgtgagttggaacatggacgctagagtggcaatggcatcaaccacctgattctcctctctaggaatgcgatgaaaggatatgtcaccgaagaattctatcaactctctgatgtatgcctgataaggtatcaacttatgatccctaatctcccattctcctctcaactagtggattacacgggctgattccccatataccttgagcaacttgatcttgaaaccgattgccgcttggttcc

SEQ ID NO: 92522 - DNA, 461 bp, Glycine max
  unsure (1)..(461): unsure at all n locations
agtaggatattcagaaattgttcaatctttctttgtgattgattntaactcagatcaaagatgtctcgatttagcattcatcaacaagtggaagaacttatgaatctccccctaaacttgcaaggaatgaatgcagcgaaccactcaaggtagcattgattcagaacagtgttgaaagcagccatgttaagaacaaagagtcttgttgctcccatgctggatatgctggactaacaatgtcatcttggccagagaaatatcgtggaggaattgagggatagacatttaatntgtgaagcttgtagcctctgatcaccccttctacatgttgcttccatgaaagaaaattcgtaggtcttatttgagtgtaacttgaagagaaaaaggtagtagatacatgattctctggatttgcggaagacatgcttcacgatcaaagagaagntctggataccatgtga

SEQ ID NO: 92523 - DNA, 336 bp, Glycine max
  unsure (1)..(336): unsure at all n locations
agctngaccaatcccgacccatctccgggcattgtcggtcagtgagaacctgtgatgtacctaaacaggcgagctcctggcagtcaacagataatttgaacaaagaccaccaagcatggaggcttgtggtggctggccagctgtgaaacttgattgatatgtgagatatggtccctggtaatcgattaccaacggtgagtaatcgattacaagggctataaatgaagacaggaggctaagatggtctctgcgaatcgatcaccaagggggcgtaatcgattaccaggcttaaaaacgaggcttggaacattgggaggcctctggtaatcggttacc

SEQ ID NO: 92524 - DNA, 434 bp, Glycine max
  unsure (1)..(434): unsure at all n locations
tttctatanataggggaagaagtttttatttttgtgttcaccncttangcacttctctctctttctaatttgcttagaacaatcctctccgttaataaaatccaagccgaggcgcttctgtaacgtttccgtgagtgatttcgcgaaggttttcgaccgttcttcgacgttcttcattcgttcttcagtcttcaacgggtaagtacctcataccaagcttttcaattcattctatgtacccgtggtggcccacacttggnttcatgtatttttattctcgtttcatttatcttttatacccccttttgacgtgcttaagccattatatgtaagtcatttctcgcttaaactaaacatataataaatttccaccgatcgngtgaatcgtattatctcgtaactctggtcgaaatgaattccgactgatcggtcgt

SEQ ID NO: 92525 - DNA, 354 bp, Glycine max
  unsure (1)..(354): unsure at all n locations
agcgtgtcttcctctcctagaggcagactcaactggtggtagcgcacaacacacagtcctccaatgggtgaaaaagaaaaacttatttggagacangaacaatagtacgaaccattactacgatcaacacgagcccacgacggagcggcacgagcgagcctatgataacggcgagggaggtcgactgagcgtgacataggagctactaccacacacatatgagagtggcagaatgcctangctgagatccttttgattggaatataaaaaaaatctccacgagccatgatgtgttcaaaaaaatccataaagagctctttcaagcttgacccaataaaaccagtggggaaaaaa

SEQ ID NO: 92526 - DNA, 429 bp, Glycine max
  unsure (1)..(429): unsure at all n locations
tctctactttaatcgattaattggtgatataatcaatcacttctcttttaaaagtgtttcagaagtgaccatgaacactttaatcgattacatcaagaatctaattgattatattattcttgagaggttttcagtttttgggacgaacactctaatcgcttgaaatgggaatataatcgattacttcttcacaataatcgattacattgcatatttaattgattacagacggttataactgttttctctattaatagtcaccttgtgttctcacttctaataacttctgaacgagctacaattaagagttgatattagtaaaagaaagaagagaagacnaagtgcttagaaacaatgtgactcacaacttctaatctctgattatgaagatcatattgtgaacagtgagtcgtgctttatcttgagttc

SEQ ID NO: 92527 - DNA, 386 bp, Glycine max
agcttgaacgtgtgtaacccaccatttttccttatataggctgtggttggcggcaaaattaaggcccgtccaaaatgttttgcaagggtataccaccaactgcttgcccttcagtggcatatcacaatgcaatgctcaaagtcggctagattgtggtggggaatttcatgtgtctcccccatggtttgagagacatgtgcatgatcagtctgaggttgtctactttcaatgagtatgggagcgatattattgacattctcactgggagtgtatgccacattgtgtggtgtatattggggaggcaagccatatggcgggaacgcatgcttgtttttttgagctatagacggccacctgtaccaccaaacttttgccttccaacctac

SEQ ID NO: 92528 - DNA, 410 bp, Glycine max
tataatagagggcggcgaaatttttattttgcttattctccctattttgaagggggacttcaaggactctcaacattcctcacaactcatcccatgaaagattttttagagctctcgcttcttggatagttgtgatcttaagttcccacaccttgggaaagttgtccagcacctttaagtttatctaagccttggagtacatctgtccaaaagcctttcaagtatgtagaagaacttgaagtcttcataacatgttgttcacagactctgcatacttcatgatgaaacgtttgtaatgactggtcaaacttgcagctttcctcagtctgacatcttcggtgccttcattgtttatactcaatgagtcccagatctctttagcagttctcagtttgcagatcttgttgtac

SEQ ID NO: 92529 - DNA, 439 bp, Glycine max
  unsure (1)..(439): unsure at all n locations
agcttcttatccaaggcaattcttgggggtgattctccttcttccttggcttattccctagtggatggtgcctcccctctcctcttctcctttgccttccgctgcatctccatggtgaaaaatcaccattgaaggacctcattgaagctcaaagatccagcctccatagaagctccacaagcaagcttccatcaagtggtaatcagagcacaagagcttcaagtaggtgctccttaaacctccattaattntttttgctttaccttctcttccatttttttttcttcatttttcatcatgtatctcctcacatgtcttgttctaaattttgttaacatgattctttagagnttgcaccgattaaactagctatagaaagtagatttgattttctatggttcaanattcttgttcttgaaccatgaattgtgttgagttt

SEQ ID NO: 92530 - DNA, 482 bp, Glycine max
  unsure (1)..(482): unsure at all n locations
acttaaccctntagccataaaccatgttctctgatatggtattttacccttaccctcggaagatagaatgaaaggatctcccaaaaagaagtttcatttactgttaagttgtgaatgcgcttcanaaagcaaaggaaaaagagaaaatttccaatcaaagattggaggaaagaaaaagaaaaagaaaattccgatcaaagatcagaagaaagcctaagaaaaaagaaagaaaagaaaattcccaatccaagattggaagaaaacaaaagaaatatacagaaaggtctttgggcgatcatgacaagcaagaaaggaaagaaaggaaaccatgacttgcgatacatgaagcggtccncttcttgactaccaaccaanatcttttgcgccggtgactctntcgccccgcgctaaacaaaaacaaaaatggaaaaggccgaaacacccacagccaaatttctcaccananacaccactcctgaaaa

SEQ ID NO: 92531 - DNA, 441 bp, Glycine max
  unsure (1)..(441): unsure at all n locations
agcttgtcctcatccatgcctatgatgtccgatttttgctcctatcttcaaggagctttcagttgaactcatcttcactatctttatctgatgggttcaagttttttggacccatgatgagcgaatctcaattgactttccattgaccttatttttcttccgatcaagatctctaaataatgatacaacattaaataattcaaaataaatttgaatgtatttgttttatcattattccctcaattcagcaatgactttatctttttttaagctttatcatttcggctatttaaaataattttcaagtgtcaacaaaagtattatagatatagtaattctataaataaataaaaaaatatatatgcccgttggataaattgatataaaactnttgctaaatgtaagacgatctacgtcattaatttaatgatactaagcaaa

SEQ ID NO: 92532 - DNA, 466 bp, Glycine max
  unsure (1)..(466): unsure at all n locations
atatgcaaaatggaaacatactcaagatgcttgcttcctttcactcgcccctagttcttactcaaattagtgtggtgttgacaatcacccaaaatgactcttctttcatttttcgatttgcagggtcctttgatgataagatgcagatgcatgcatgtttatgattgaatgttaaatgtaacaattaaacatgtgttatcatgttcaattttacttaaacgcttacggcacccgttgaacgagctgaatggctccggatttagcgagcgagatcgagagtgtatgttcttaaagacaataaatagtaaaggacacaacatcgcaagtagagatgcaaatcattaacccatatttattaatgctgcgattatgggttacaaaagatttgaagacttggagattcaagtgagtccttgaggatggctagacgttaagcccctaattgccccanngcgtatgcataata

SEQ ID NO: 92533 - DNA, 432 bp, Glycine max
agcttgtaatattattgtttaattcgcctgttccattattctcttgatatctttataggttacttcctcgttgacatcttttgtcttgaatggaattgccatgacaggtttattgttactgtctttgatatttggtagatgatattgcgttgcgggaggtaattccgattggattaactccccatccttaacttgccaatttgttatgacatttgttgatatatcacctatgatggcttgtttccaagggtaatctatatcctttctaatggcataagcatgaaacctatccaagaaaaggatattaattttgactcgctcactaatccggagaacttgtcttggatatgtttctgtctgtcccttgtaatgttgaaaaaccatttcctatgatgttcattccttcgagaataataatctttctaacggttt

SEQ ID NO: 92534 - DNA, 492 bp, Glycine max
  unsure (1)..(492): unsure at all n locations
cttaatggagganaagaaagagggagagtattgatatatgcggtagcacaaaattgaaggaagaataagggagagaagttgaactttgagttatgtctcacaagactctcattcatcaaagttacaacaagtgttacacatgcttctatttatagactaggtagcttccttaagaagctatcttgagaaaactttcttgagaagcttctgtgagataactttcttgggaagctagagcttagctacacacacccctctcataactaagctcacctccttgagaagattcttataaatcaagagcttagctacacacacctttataatagctaagctcacctgcttaagaagagaagctagagcttagctacacacnccctataatagctaagctcacnctcatgacaaaatacatgagataacaaaataagttcctactacaaggactactcataatgcctcgaaatacaagcctaataccttatactacta

SEQ ID NO: 92535 - DNA, 435 bp, Glycine max
agcttcttgaaataacactaaacttagttgtttgcctagacctactgttcactcaattattcctgattcactaatctccattctaatgcgcttagcagaacattccttctaacattaaatgaaccatagttaatgcttggaatatgggatggcgtatctttagattgaagatttatacccttgcagtgtggttccatggtcaatcccccttcccattaatgattttgtttcaccaggtgcatttgttctcttttcagagaatacttaattttatttcaattttttcttatttctcttttcgctgaatagacaatccttattatagttcagtatcttcaatcttggttaacaagtatgaactctgtaacatctaaaacatcgacttacatagagtattttacagtctgagctcctgtctttgcccttttaccccca

SEQ ID NO: 92536 - DNA, 492 bp, Glycine max
  unsure (1)..(492): unsure at all n locations
ctttntaaatcatggaaagagggggaaatgtatcatgtgtttcttttactagcaaaaataacacgggtcacgagaggaagctcaatatacaagtataaagacagaaaaaacatgaaatgaatatgggttctctctttaatttctccacctcttgacttctctggattttgacctggacatcaaagtccttacacctagtcgcacttctacatgcgcctgaagacattatgaatctatgataagttcacacatttcattattcttaaaagccacacatataggaatttttaattccttttggctattactaaacaatctctaattacatttaaagatcaatcttaaaaatacaaatgaatcatgtctttttccacatccaatcatggttgtgaaatgagaaaagagattttaaaaaaaatattctttntatactcatatatatataaaanaatcacataaaaggtaatctaattaatgaatggaaatatttct

SEQ ID NO: 92537 - DNA, 438 bp, Glycine max
  unsure (1)..(438): unsure at all n locations
agcttccacaacatccaagcaaaacaatattctaacagtacaatctatcacagccaagctaaacagagcaaaggcagaaaactctgccaaaacaccaaccaaatcacagcttttctcacttaaagaccccagtaacaattccttcgatccaattcgttaaccgttggatccgactccaaaatttactggaagtctatagtacataagcctacattgtgaccgttgggatctactagaaaacatccagaactcattttacattactctttccacaaccagcaaatacatagcatttttctgcacttgtgcaaaatcctgctgcacaatttcacagcaaaaatctgcacaaagtgcagatttcgaaaatcacacttnctctcatccaatctggctcanatcaatccctacaagtcccanatcatgtatcaatcatgtcta

SEQ ID NO: 92538 - DNA, 413 bp, Glycine max
  unsure (1)..(413): unsure at all n locations
cttcctgctnttattgttgacttctatagtgcgacctggagatatgtcgcgggggtcaggagaccttggggacgtcacgtggggtgctattgcccaaaaccattctttatcaatcccgacccaacccgggcatagtcggtcagtgagaacctgtgatgtacctaaacaggcgagctcctggcagtcaacagataaaaggaacaaagaccacaaagcaaggaggcttgtggtggctggccagctgtgaaacttgattgatatgtgagatatggtctctggtaatcgattaccaagggtgggtaatcgattacaaggcttataaatgaagacaggaggctaagatggtctctggtaatcgattaccatggggtgtaatcgatcaccangcttgaaaacgaggtcacgaagccatg

SEQ ID NO: 92539 - DNA, 370 bp, Glycine max
  unsure (1)..(370): unsure at all n locations
acctaagctactgctgctgcatcttgacaaagaagattttttcgacttcttcttcganaaaacctgcattaggcacgcaatgcccctccgcagattccctgccaaaccattgaacagactgatacaaaacgcaccacttgtacagcataaaaagatcatcaggctgtttctacctacacttgccaaaacaaatcaccatattaatgagttatactcaacgccagcccacgtgattcagcttttaatgctccatcactgctcattgcagtacctcccaacctccattagaatcaatgaattttgagctgacatgtaccccatggaatagtacatagtgcgtgcactcgcaacgttaaacattttatatatt

SEQ ID NO: 92540 - DNA, 459 bp, Glycine max
  unsure (1)..(459): unsure at all n locations
gcacagatttgggacactgctggncattatatgtttctctttntctactatgcattcagtttcttcaaaatgaattgctttctattattatgtgttttatgtgccacaatgtcactatgcttgtgttgagctataattatcatttttctattgatcatgattgagaatgcaaccaagatctgagaagtagtggttaagatctgaatagatattttcagaatcgagatanaataaagcagcatggttttttactataattaagccaaaagttgcatgtgggtgaattatggatctatggtccttcaagtaaattataatcatcaaatattttatcattngatggcttcttggttgcctcggttgttgcattttgctgcaacagaatanggagagtgtgtgaagagtnttaactcaacgtttgaataacggtctatgactgtgagttcagctgcaacatca

SEQ ID NO: 92541 - DNA, 393 bp, Glycine max
  unsure (1)..(393): unsure at all n locations
agcttgtgcaggaacggtacacgtatcatttttacgagttgaagattgtgtgtagcgttaactctcgagacatcaaagtcttccactgcaactggctcactatacaaagtgatgatcatcgtggatatgattttatctcggactacttggaaactcgtcgttggccaaacattgtgagactcaaggcttatatgacactgtattttgaagtgaaacagattctttccaccattcttcaagggctacttagcttaagcttcgaatttctgtctttgaattatattagggatgagatggacgctgcttccactcctgatcttccactggttaagaatttagttcagctaacgatttttcttangagggatgattccttactttttgaccttcatc

SEQ ID NO: 92542 - DNA, 471 bp, Glycine max
  unsure (1)..(471): unsure at all n locations
agccaataattccttagatatacacctttgctcataatgtcaaattatgttaccaaggaattagtataaataaagcaattgtaaggcacaatggagatatgaaaacttaagcttaccttccactcttaccttgtctggaggtgctggcctcgaatccaatttttctcttcgattttctgtatcaaatacacagcatcagtagtatacaataataccctanggtatatatattcaaaactagaagtgtataattgtcgacgatctggcctgtataatcgtcgacgacaaccatgacagtgctggtgtgcttcacgacggcaaccaacttatagagacaagcttaagggcgcaaaatgagtgaggtaatgcgggctagagtagagtgcaagtatgctagggaaaaagatgaaaattacttcagattaaagacggtgttataaaacccgtctttggataatgcagtcaacaacg

SEQ ID NO: 92543 - DNA, 422 bp, Glycine max
agcttcatagacctgcaactttcacacttgtataggttactgctctcgaaaccaaacaacacttgtccatgcgtggggggcttgacaaacttgtcaccctcctacttgtcaaggctattaccccagacattagacaaactcccttgacacgggattacctcattcaacactggacaccctctttcgcctgtaagtcggctcagagcttcaggggcttatatactgtccagggtccacaaaatacacatagcatcttacgtggtacttcgagacacacatcaatcctctatgtcagtcctagcacaagagcatgagcgtcctgcccttagcagtcagtctccctaaccaacagattatctttaacctcctattattcaaatacactggcatattttatctcttggagatactcaattttttac

SEQ ID NO: 92544 - DNA, 460 bp, Glycine max
  unsure (1)..(460): unsure at all n locations
gcttgtggctcaacaatgactaccttgaagtataacctcttgttctttnttcttanttgggtcaccgtagcagacaacaaggatttccgaaacttcaaatatttcatcatcttcattcagttcattgtcatcttcactattaacctcttcattactgctagtgtcatcatcctcttcactaaaaagattcacatatttctcatgtgacactntttttttcaactagagagaagtaactacataatttctgtcactccttcaataatgaaaggaaattttctgccaattcgtttctaacctaattagaagagtaaacaataccggtatcaatactccaaaacaatgcggaacccattaaaatattaaatttgaaaagaaatgcaaacctactcatgaggaggttagcatcctacttaatgttcagagttattaatgcaagcaacattatattaagaagcat

SEQ ID NO: 92545 - DNA, 412 bp, Glycine max
aactatagcttctaggatggactccattaactatttacgattgcttttaagtgaaacgaattctcaaactaaagagatttaattgaaaggatttggaaccagctttatcttatacgatggccatggttatgtgctagttaagtgcttctttcttatgcatgtgaaaagaaaactctctaattgtgatcttccaaaaataatgggtgttataaaaaaaatatttaattacaaatttgtgcatgtaaaacttacccaaaatttagaagcatgttagcccaacacactcaacagcgatgtgacaatatttttaagatatctttatccctatgtatcacataatagatatatttatcacatttttctacttctaaaactaaaattaattttcatctttataaaactaattttaatc

SEQ ID NO: 92546 - DNA, 482 bp, Glycine max
  unsure (1)..(482): unsure at all n locations
taagcttctaaccttnccacgaatctccggcttcaatccatgtaagtatattctccatanatngntngnctggaagttttggaatctgagctattaaatactcaaattctgttatgtactcatccactgttcctccttgtctcaactccgtcagctgctcatacacatcaccctctccgtgacctccataccttcctagcagtgcttctttcaacccttcccatgtcaacccttcattttcactccataaagagtngcaaaatggatcgtcgatccctccatgcacagctgagccaatctgatcttcactttcggcgtcgtttcttggatgcgaaagtagatctctgctcgcgagatccatcccgctggatccttgccgttaaacatcggaagttctactatcttcacagcgtgtcgaaattccgacaacaccgcacctccgcttncaccggaactgttaccacttgagcnctcattctctg

SEQ ID NO: 92547 - DNA, 295 bp, Glycine max
ctcagagtcacctgcggcagcaagctttgagaacactcatgttctactacattttctacaaaacctttctagagcctatctgattgaatcttctcctccttatacgtgattcttgagaattgaatcttgaactcggatgcctctagattcttgaaatgtcaccgactcaatcttgacaatatgcccacgggaattggactcggctccatctagaaacatgcttctcgactgtttgcctcatctctgtcttctcaaaacacttgaatcaatttgagcatcttcatcttgatcttat

SEQ ID NO: 92548 - DNA, 398 bp, Glycine max
  unsure (1)..(398): unsure at all n locations
agctttaccatttgatatgantattntaacacttattttgttgttgtaatttacttagcaaacttgtttatgactctaaactgaggtttcacgtgaagcaacactgaaatggccagatggggcctctaagttacataaataataaaatagagcaccatacacagaaatctgaatcattagatttcatattttatttaaagattagttctttgacttgtaatcgtcacagttggtcaagttcactttttttaaaatgtggactcgatatcctccttgacttatcctcctttattactctcattgattgttggctttctattactcacgatatctggttggagactcttctataaataacacagcctggcacattcaagtaaggggcatggcgcagcatg

SEQ ID NO: 92549 - DNA, 492 bp, Glycine max
  unsure (1)..(492): unsure at all n locations
ctaaccttatagggagccatgccaatggtagagtgataactgttgttattagtgaactntatcaatggaagaaaactctnctatgcttccttctgctctaagacacacgccctcaanaggtcctccaatgactgaatggtccgttcagtttggccatcagtctgaggatggtaggctgaacttagtctaagcctggttcccaatgctctattcaagctctcccaaaatctagaggtaaatctaggatctgtatcagatactatgctagatggctcaccatgtaatctgacaatctcacttatatacagcgaggtcaacttctccaaggaaaatatgatattaatgggaatgaagtgagcagacttagtcagtctatcaacaataacccagatagaatctaaacctctaggggttctacgtagtccttgagatagtatcctagagggatccacaactatacccccttgagatatcacatgcnctatgaaacta

SEQ ID NO: 92550 - DNA, 302 bp, Glycine max
aacttctatccaaatgtgattaccattgatttttcctttgatagcccctttgagccatggatacctctgcttggtatgagcagactacaaaccataaatgaaacaccacgaggttatcatatccttaaagaatcttggagctgtggaaatgactaaggaattaacgtggggggcttctgatttaatggacaacttgatttagaggctatgctaaaggatgtattctggtgcatactagatggacattgtatattggttaaatgccgcacatgctgaaagagatgttgtttttcaaaggccta

SEQ ID NO: 92551 - DNA, 386 bp, Glycine max
  unsure (1)..(386): unsure at all n locations
agcttgtaggattatggngtacccgtcacatgtggtactaggtggcgatcgggtgatggtgcaaatcaactctccacattcacaaatcacacatgaacccaccatccctagttgcccaccttcaactgagctcacgtactcccacgtagcccttatccttgttcctatcagcaccgggtccccatcaatccctccaagctatcacaacatccaagcaattcaatatccaaacatcatgaactatccaaaaccaagaaaacagggcagaggcagaaaactatgcccaaaacacattccaataccacaactttccttactcaaatactccaataacattctcttcgttccgattcgttcaccgttggatcgactcaaaaattatactg

SEQ ID NO: 92552 - DNA, 442 bp, Glycine max
agcttgaattataatgtcaatggtccaatagtttctacattaatgatataatttaaaataagataattatctaaaatctattgattattaaagatgaagttgtttaacccatttatatcttgattattaaagatgaagttgtttaacccaattatatcttgaatgaatttgaccaattcttttttcgaagtggtgttatatatgtttctatactacttttaattaggttattttggttaatgataatgaaaataaaatagagaaactaattaatcttaacaccactgcaaaaatgatatacaattacattcaaagaagtattaaaaccgcttttgaagccaacatcataaaattttttgactttgcacgacgatatcatagagaatctcattataataatttatcccgcctcataacttgcacatcacacaataataatact

SEQ ID NO: 92553 - DNA, 467 bp, Glycine max
  unsure (1)..(467): unsure at all n locations
actaagctataccacctagaaatgacaagtntactattatgatgactntctttctattcttntcttgcaagggactnttactataataagtagtttttgtttcgaacgaatattataagtctctgaaattacaagcctcttttttttcaatttttttataactggtttttagcattaagatcctttatgtttttcaacgaataatttactgaatttgctgattgaattaaaacgattgttttagaaataattagattattcttataaatcgttgaatctttcttagtttcgttcaattcatctatgttttgaatctaaatgtaatggcaggtgtattagaattctcttttatatttgataactagaagacaatcatgtttgaatattatcaaatcattatggaagacaaagtttctctccatttaaagcaagtacatctcattgttagtgatgtgggatatattatg

SEQ ID NO: 92554 - DNA, 461 bp, Glycine max
  unsure (1)..(461): unsure at all n locations
atccttaagtcacctgcggcatgcagcttgcaattggtcttcgcgggaattttctaagcgtatctgaaaagaggcaaatttaatcatcctgcttggatgaatgagaaaactggggcaaatgaagagggtgaggatgagggagaaacccatgctgtgactgtcattcctatatggccaagtttccgatcaacccaacaatgtcattacttagccaataacaacccttctccttacctaccacccagttatccataaaggccattcctaaatcaaccacaaaacccacctgccacacaaccaatgctaaacaccaaccaaggaaggaatcttgcagcanaaagcctatagaattcactctaattctagtgtcctatgctgacttgcacccatatccactcgataatgcaatggtagccataaccccaaccaaggttcctcaacctccattcctccaggatacg

SEQ ID NO: 92555 - DNA, 500 bp, Glycine max
gagaagcttccttgagaagttagagcttaactacattctcccctctaattactaaactcatctccttgagaagcttccttgagaaacttccttgagaagcttccttgagaagattcttagagaagctagagcttagctacacatacctctctaatagctaagctcacctccttgagatgagaagctagaacttagctacacacacctataattgctaagttcacccctatgccaaaatacatgaaaatataaaaaaaaaagtccctactacaaagactactcaaaatgccctgaaatataaggctaaaaccctatactactagaatggccaaaatacaaggcccaaaagaaggaaaaacctattctaatatttacaaagaagagtggacccaaccttggcccatgggctcaaaaatctaccctgaggttcatgagaaccccaagaccttctttagtaactctagcccaatcctcttggagtcttctatccaatacccttg

SEQ ID NO: 92556 - DNA, 414 bp, Glycine max
agcttgaagaaaagctcgaagatgttttgtcttttacatgcccaactcccttgagtggcatttgtgttggttgttatattgaatgttgcatcttagtccataacatatattttgtgcatcatgcatcttaatcgattaaaaagataatctaattgattagttcattgaattaatcgattaccttgtagatttaatcgatcataggcagttatgactgttttctctataaataaccaacttgtgttctcttaaaaaaaacaacggaataagcttctgaataaactaagatcacatcctattattagttaaagaaaagagataataaaagtgctttgaaaagtaactcacaccttcaaatcttgtggttgtgaagatcttttgtgataagagagttgtgtcactttcttgagttca

SEQ ID NO: 92557 - DNA, 174 bp, Glycine max
agctttccaacatccaagcaaaacaatattctttcagtacaagctatcacagccaagcataacagagcaaaggcagaaaactctgccaaaacaccaaccaaatcacagcttttctcacttaaagaccccaggaacaattccttcgatccaattcgtttaccggtggaacgacct

SEQ ID NO: 92558 - DNA, 413 bp, Glycine max
  unsure (1)..(413): unsure at all n locations
acttcctggctttattgttgaccacacagtggcacctggagatatgtcgcggaggtcaagagaccttggggacgtcaggtggggtgctattgcccaaaaccaagcttgaccaatcccgacccaacccgggcatagtctgtcagtgagaacctgtgatgtacctaaacaggcgagctcctggcagtcaacagataaaaggaacanagaccacaaagcaaggaggcttgtggtggctggccagctgtgaaacttgattgatatgtgagatatggtctctggtaatctattaccaacggtgggtaatcgattacaaggcttaaaaatgaagacaggaggctaagatggtctctggtaatcgattaccatggggtgtaatcgatcaccacgcttgaaaacgaggtcaggaagccatg

SEQ ID NO: 92559 - DNA, 433 bp, Glycine max
  unsure (1)..(433): unsure at all n locations
agcttcctcggggccatcccttctaagganaacatttggaaagnntagttttaccaagaaatgctacccttaaaacataaatggcatacaacccccctccaataaatacaaacatcaatgtaaatttagagcaagcttatgcgcatacttcttcacgaacgttcacttgcacaagacattcttataactaagaaaaatgcacccatatacaatcaaggcaccttcgttacctagattatttacatgtacttccaaggtgtatttgttacctacatcacacacattntctttgctaaattcacatacatgcatactctaaacactttggctatcaaaaattgcatacgtgcacatcttgtgatttctaatacctatacatacacacacttcatgatgaatctngactatctacaccataaagtgctacatttat

SEQ ID NO: 92560 - DNA, 440 bp, Glycine max
  unsure (1)..(440): unsure at all n locations
tatcatttctatttcttactaagtaaaagggatcattttcaaggtccaacgccttanaatgatcaccttttaagtaaaaaagaatcacttgataagaaagaactacgtagtctgatttcctcatcgcaattgaggaatacgtaggagcaaagggaaacacccttgtcgaccacaaaaagagaaaaatataaaaaagggtgtaaaggatataaagacataaaaagggaacgtaaaatcaaagtcatgtttgcacattcgattaaaggctaccgtcccttgtgacggacgtgtggggtgctaacaccttccccgtgtgtaaatacaactcccgaaccattcacttataagttcatagatcgcatcttttccggttnttncgacgttttcctcaaataaacgttggtggcgactccgcgcgtattcctttcttggaacacgca

SEQ ID NO: 92561 - DNA, 427 bp, Glycine max
agcttttgagtgctctttgatcaaaggtttatagataataactctcaagccataatagggatgatagaaatagatctaaatcaaacagcctccctgatctatattgcccctaatcacacaatgaaccttagtgacttcatacaaaacataaacctagaagtccaaacaataggatttggaagaaattttgagggacataactcgcacttagatattactttcattggtagaataaatgaccaaatatcccctagatacaggataaacactaatcctttagtgacagtcctatcatctgatggaattcaatttttgccaccagatatatcttattcctccagaaaccaatataatcaatggcaaatacatattgatgctggatcctctaggagtgcaataactacttctgcttctgccataatacaaa

SEQ ID NO: 92562 - DNA, 400 bp, Glycine max
  unsure (1)..(400): unsure at all n locations
ngttgccttagcaggcaagttatttgaagaaattttctacgttgtctatttggaccctctaaagacattgcctattgaggaacaacaaatgcataatgctgagaaggctaccatgatggagatagatggtgaaccactgacgatggtggtagcgatgttggtggtggcaccaagtgttagtggtgtggtggtggtagtgacaatgatagtggcagtgacattgatgggtgtggtggtggtagtaatgtcaactgtgatggtgatgtcgatggtggtagtaatgatggtggcagtggtagtgatattagtggtcatggtgatagcaaccagttattgcggtgacaattgataactattgttgcggtggcgattgacgtggtattggtggtggtggtgatga

SEQ ID NO: 92563 - DNA, 316 bp, Glycine max
agcttgctatagatcttgagccggctaagaacgccgcacgttgggactcttgtgtgagaaatataatagtctatggatcgactactttgagaagttctggatgagattgaaaacaccatttcacgaatgcatgcactctgtaagatgataattggttggttctttcagatttactgtaacgatattgtcataatagaatccatgaaagggcttctctggagaaaccttctgagctgctggaattaaagattcctgaatattgtaatgtttatcgaattgaacaaagccccattgaacctgctctggaaagatctct

SEQ ID NO: 92564 - DNA, 491 bp, Glycine max
  unsure (1)..(491): unsure at all n locations
tcaagcttcttgagatgcctntcagttatctcattagaggctttggtttattctacaatctcattagaaatatcgatagtgaaataatcaatgaatcttgaggtcaagactgcatatggaaattcataatccaccagtcaatagcttttcaacatgatatcttcaatcaacagtacccaattcatttgaatacttgatttcatcccatatataatctacaagtcgtcgttcgtgacttgagtatgactgttggatcttggtgctagaatatatgtaataatgtataccaacattntgtcttccgctatcagaccaccaatacccaatctgttccttaacaatcttgtcgggtcaagaagcatacctctgtatgtggccattctgctatagtcatccgtaaattccttaaacttgtagactccacccatgtctattcctgctattgctttccaaatngcaacatcaatcaccatctctacaccatcgatagt

SEQ ID NO: 92565 - DNA, 426 bp, Glycine max
agcttgagccaattcatactttattaacttttttctcgaatgtctgattgagtcccgtaacatatcgagacgctcgaaattgaatgttgaacttctaagctaattcaaacgacaataacatttttctcggatgtctggttgagtcccgcatcatattgagacgctcgaaattgaatgttgaacctcttacataattcaaacgacaataactgttttcacggattgttgattgagtcccgtaacatatcgagacgcttgaaattgaatgttgaatctttgagccaatttaaactactataactttttattcggatgtctgattgagtcccgctatatattgagacgctcgaaatagaatgttgaatctttgagctcattcaaacaacaataccttttactcggaatgttgatgagtcccgtaaatat

SEQ ID NO: 92566 - DNA, 415 bp, Glycine max
  unsure (1)..(415): unsure at all n locations
tctacattcaatntcgagcgtctcgatatgttacttgtacgctatgagacatcccacgcaaaagttgttgtcgtttgaattggctcaaagcttcaacattcaatntcgagcgtctcgttctattacgaggctcaatcagacatccgagtaaaaagttattgtcgtttgaattggctgagagcttcaacattcaatttcgagcgtctcgatatgttacgggactcaatcacacatccgagtaaaaagctattgtcgtttgaattgtctcacagcttcaacattcaatttcgagcgtctcgatatattacgagactcaatcagacatcccagtaaaaagttattgtcgtttgaattggctgagagcttcaacatctaatttcgagcgtctcgatatgttacggtactcaatcagaca

SEQ ID NO: 92567 - DNA, 318 bp, Glycine max
agcttcttggcaatcctcattccagcgatcagtttggtttttgcggtagagtttgaacaacggctcacaaatggcggtgagctgcgatatgaatctggcaatataattcaagcgtcccaagaagccccggacttgcctctcactaccgggatgtggcatctcaaggatggccttcaccttttcgggggctacctctattcctttctggctcacgatgaaaccaaacaatttccctgatttgaccccaaatgtacacttggcggggttcaaccttaattgatatttcttaagcctttcaaacaacttccgcaaggtgac

SEQ ID NO: 92568 - DNA, 379 bp, Glycine max
agttgatgttatccttacttttactttttttattattcaacccaagtgagaatgagaaatcctaaagagaaaacgctcgattcgatctgttcgcttgatattactaaaatatattttctattattatatgattatcttacctcttttttgatttccaacgtggttactgcacgaccgaacggtcgaaattcattctaaccgagattcacggatgatacaatgcacatgatcgggggatattcattatatttttcgaggaggcgagacataacttagggtaatgactgacgcacgtctgaagggaggatggatagcgaatgaaaacgagaatgctaatgcatgaagctgaatgtggacctccgcgggtacatagaatgaa

SEQ ID NO: 92569 - DNA, 409 bp, Glycine max
  unsure (1)..(409): unsure at all n locations
tatctgccatgacgttgatggagctcttaaaattgtctattgagatcatnggctgtctaatctcatntcttttacccatctttccttccactccatatctaatgttaacacttctcatggctgcctccaaatgaatgccaagctaccaaaacttagagaactaagtttaattcattgcatcctttccgatcatgttatcctttcatngaggcacactaaattcaaattttctagctgccttttcctacttgatctttctgggaataccttcatgtcatcaatgatactcccgtggctagccaacgtcacttcctacctagcttgatgagctgaccttattagaacctctctaaggtccacataatcaaatatttgcgatggcttcaatcacttaacaccatgaccttct

SEQ ID NO: 92570 - DNA, 398 bp, Glycine max
  unsure (1)..(398): unsure at all n locations
agcttgggtaacttagtcaattntttttgttgaaagttgagcgctaagccgagcctacctgagctaactgcatttcgttgcggcagccattgggctaagcgagcctagctcgctaagctcccatacttagtgaattttctgaatttcatggtgtcgctaagtgcaaccatgatgagcttagcgcacatctgttgcgacaatcgttaggcttagcaggtagtttccagctaagccgattatgcagaagcataattttctgcaacattcgctaagcagccccacatgtcgctaagcagtagtgtatattttgtgaaggcaagctaaacggaccatgtctcgctaagccgacaatgcctttttcagtttttgaatttgaataacttgtgttctgattaaac

SEQ ID NO: 92571 - DNA, 492 bp, Glycine max
  unsure (1)..(492): unsure at all n locations
tatcctttctttatagtttctttgggtaaccttgacttatatgtctntcttctagntagntcgagctnttcttagtatctcttgtgttttgggtatcgtaataagatgcttttacacttcctttgaaaatcccttgaaattgagatgttgtaaaagttacctttttataaaattgatgttgttttcgtgaccttcattgaaccccggtcacattggtgtgatcggaatttcaaaatgacgtctctctgtagtataacccacaacacccctaagttccttttattntgatagggatatttgaccttgaatgttgatattaaccatgtttttgaaatctatactaaatcgcttttgatntggtataaagaactctatgtttggacctacgaacgccaacatgagaggcctctgagcgacgcagagagggagttattataatntatggctttgatccataattggaatgaatacatctatattgataatgacatt

SEQ ID NO: 92572 - DNA, 399 bp, Glycine max
  unsure (1)..(399): unsure at all n locations
agcttccatcaagtggtatcagagcacaagatcttcaagtatgtgctccttaattntcagttttaccttctcctccattgttgtttttttcctccatgcatctcctcacatgtcttgttctaaatgttattaagatgattttttagaatttccaccgattaaacttgctatagaagctagatttgattttctatagttcacatttcttgttcttcttcttgaaccatgaattatgttgagtttacgttcctttgagttttgtcttgctattttttgtggctgaaacctaaactataaaattcttacaaaaacattaaagtagaagataacctcagaaatctagagtgacttgctcacctatagtagttttgtcatacaagtcatgtctatccatgaaac

SEQ ID NO: 92573 - DNA, 513 bp, Glycine max
  unsure (1)..(513): unsure at all n locations
actaagcttctaactctatacaagaatgaagctctgataccacttgttttacaagttttctcagatatcttaagaaggggggttgaattaagataatgcaaactatttccccaattaaaattctatttcaatttcaatgcaagttgcaagttcccttanaaatgaactcttaaataatgattcanatagaacaatctgaatataaatgtaaagcagtaataaataaaagagtttaagggaagagaaagtgcaaactcagatttatattggttcggccacacccttgtgcctacgtctagtccccaagcaacccgcttgagagttccactatcttgtaatccttttacaagttctgaacacacaaagacaatccttcctttgtgtttagagttgtttacaacaagagaccctcggtctctcaatcccctttgagaatctagaaagaagagaagaatagatctctctcgatagagatagatngtacaatctgagcactcaattaatttcttattg

SEQ ID NO: 92574 - DNA, 408 bp, Glycine max
agcttcttatccaaggcaattcttggtggtgattctccttcttccttggcttattccctagtggatggtgcctcccctctcctcttctcctttgccttccgctgcatctccatggtgaaaaatcaccattgaaggacctcattgaagctcaaagatccagcctccatagaagctccacaagtaagcttccatcaatgagggtgttccatatgttcttaagactggactaatacatttgctgcccaagtttcatggtcttgcaggtgaagctccttataagcatcttaaggagttccatattgtctgctctaccatgaaaccaccagatgtctaggaggatcacatatctctaaaggcctttcgtcattctttagaatgagtggctaaggactggttatattaccttgc

SEQ ID NO: 92575 - DNA, 359 bp, Glycine max
  unsure (1)..(359): unsure at all n locations
actaagctgctctacattacattgatggttgatatatgggaggaggttgtatgctcattttgttntaagagtagtgtcccactggtaaaactaactttccaaatctttgccttcgcaggaaatagtctctaggaagctngcctcaaagaggtccaggaaggacaaggcagccgaaggaactagttccgctccggagtatgacagtcaccgctttaagagcgctgtacaccagcaacgcttcgaggccatcaagggatgagtcgttctccgggagcgacgcgtccagctcaaggacgacgagtatactgatttccatgaggaaatatggcgccggcggtgggcatcactggttactccca

SEQ ID NO: 92576 - DNA, 438 bp, Glycine max
  unsure (1)..(438): unsure at all n locations
agctntgcctttagcgctngcacctcatcactttcttccgaagctataacctcattgtctctcacagtctttagatttgggagccaatccaatccttgtgtccggactctcagccacttatgatagccaccgatgatcccattactgcttcccctaagctctctgtcctttcttcatgccgcatcccatgccttgcgaactccttggagtacctttgcattggggtcactgaaaccccgtgtaatgaaaggcgtgatgctttcgtctaatggcgctcctctcatggggtaaccaagctgtcttatggcgaggacgggattataattaatacaaccccatgttcccatccagggaacattttgacattcttcgcatgaaaatacaatctgattcttctttcttctaccagggaaccattaacagatgccctccatgcta

SEQ ID NO: 92577 - DNA, 432 bp, Glycine max
  unsure (1)..(432): unsure at all n locations
gtgtctaatgtctttaaggcacattaaaactgctgcatctatgcccatatcaattaagggctggatggctacttgtacacaacctatatggacatatttgtatttacgggtgtgttcataaattgaatttttggaaagtaaatgaaattcttcccctatatcttgtcctaaaggaatataattntcaactggtttgattatgtaatcaaaattatgtttctttntaattgtctcgagaacatacagagtatcctgagggatttctggaatgttccagtcatccatgttttggtttatatcttcgaatcgaacttcctcatcgaagagattgtgttttggggagatctcatgggtctggttttcatgctcattgagcacgttattatnttttgacgagttcattgaggaagaggatgaagacgagttggatct

SEQ ID NO: 92578 - DNA, 337 bp, Glycine max
agctgtgcctttatggctggtacctcatgacttctttccgaagctttaacctcatcgtccctcacagtctttagatttgggagccaatccaatccttgtgttcggactctcagccacttatgatagccgccgatgatcccattactgcttaccctaagctctatgagctttattcacgccgcatcccatgccttgcgaactccttggagtaccctcgcgttgtggtcactaaaacctagcgcgatgaaagacgcgatgctctcgtctaatggcgctcctctcatggggtagccaagctgtcttatggcgagaacgggattactattaataccacccc

SEQ ID NO: 92579 - DNA, 417 bp, Glycine max
acaacaatgtctgcatatctttcccatgcctcttgtgaagtaaatcttgatctgtcaaatcgaacttgtgtgggagtagatgatgcctttcttttcctagaagccatatgcaaaatataagacaaaacacacaagattagcataggtttattctcaataaaatagaaaaattaaactgaaaacaaagttgggtgcttagcgcaacatgctggcgcttagcgtgccttatgaaattaacacaagcgctaagtgcaacaagctggcgcttagctcgaagacacaaaaacattttttcctgcataataggcttagtgcacaggggtacttagcctaagtctacaatttttagaaatagtagaggactggggcttagcgccacatgttggcacttagctcagcctcaacagagagacactg

SEQ ID NO: 92580 - DNA, 325 bp, Glycine max
  unsure (1)..(325): unsure at all n locations
agcttcccgccagcgcaaatgtgctgnaccctctgttgaaagagacctctgctgttatttgcatagaaacgaaccccctttggtacattgatcgtaaaacatgcccttgacggtaaatntgccttaactgctacatggaaagctgtgtcaaccctttacaacaaagagcgtgagatggattttgaataatcacaagaagttgagcggattcttttaatagaactgctcttgaaccaacaacgcataaatctcttttgtagacgctcctacgcggaacaaagtgtgggttataatctgagttaggtgctttttacccttttctaca

SEQ ID NO: 92581 - DNA, 482 bp, Glycine max
gattatggggcatagaaatatgcttctatattctctttgttgagggagagttatagaattaccctttttttgccattgcggacaagccaagaaatatctcattcttgcaccattttttttcttttctcttcttttcttttgtcaacaacaaaacacattgattctcaacggggaaccatacatatgtcatagatggaaaaagaaaagtagaatgtatcatgcataaggaagataaatattgcagctttttatggatgatatactaaaatatatatgggatattatctaaaataaaatacatattgtattgatatttggttttattttgaaaatttgtctcaatattctatcatatttgtaaatttaaattgatattgctcttgcgattgtcttatttgatgttagatataccacaattattacacatcttaatgtggagatatgtctaattctttatcttgtgaatataaatatacacctta

SEQ ID NO: 92582 - DNA, 358 bp, Glycine max
agcttcaacattcaatttcgatcgtctcgattattacgggactcaataagacatccgagaaaaaagttattgtcgtttgaattggctcacagcttcaacattcaatttttagcgtctcgatatgttacgggactcaatcagacatccgagaaaaaagttattgccgcttgaattggctcacagcttcaacattcaatttcgagcgtctcaatatgttacgggactcaatcagacatccgagaaaaaagttattgtcgattgaattggctcacagcttcaacattcaatttcgagcgtcttcatatgttaccggactcaatcagacatccgagaaaaaagttattgtcgtttgaatggc

SEQ ID NO: 92583 - DNA, 427 bp, Glycine max
  unsure (1)..(427): unsure at all n locations
acaaacgaccataactgtntactcggatgttttattganggctcgnaatatatcgagacgctcganattgaatgttgaagctctgagccaatacaaacgacatagaccttttactcggatggctgattgagtcccgtaacatatcgagacactcgaaactgaatgttgaacctctgagcatattcaaacgacaataaatttctactcacatgcctggatgagacgcgcaacagagagagacgctcgaaattgaacggtgaagctctgagccaatacaaacgaccataactttctactcggatgtctgattgaggcctcgaacatatcgagacgctccaaattgaatgttgaacctctgagcaactcaaacgacaataacgtcttactcggatgtctgagtgagtcccgcaacatatcgagacgctcg

SEQ ID NO: 92584 - DNA, 404 bp, Glycine max
agctgcgcaatgttgtggtcctgcgactatgtgtctctactcaaacatattccgggttggagggaggagaaatcataccgggcaaaagaatgcttaaacgtgtcttttggtcatttggtccatgcattaatcggtttgcatattgtaaactcatagtacaagtagatggtacatggctttatgggaagtatactgacacattattgatagctactacacaagatggagctaaccatatcttcccgagtgcctatgccattgcaaaaggggagacaacttcagcttgtggtcttttttttatttaaagaatttgagaagacatgtaacttgacaaattaacatttttctcatttcagatagacaccccttgagtggaactacctacaacaacccaagtgctcatg

SEQ ID NO: 92585 - DNA, 490 bp, Glycine max
  unsure (1)..(490): unsure at all n locations
catagtttaaatcagaagagaccatttnntatgacgttgacattttctgtctatgagaatctaagttcttctttttcaacttttcgagctcattattagcaagggtgcatnctttaatcattataacatnntcggtaagcgggtccttgaacttttcttctaaatctttagaagaatcttccatccaccggataccttttcgtccaataatgcctttacctcctcataatcaaaggtgtgttgtacatcactaggtgaagtggtttccatgacaaaatcaaataaataagcttaatgagttttctaagatcctcatgctctctttcaagatgttgaaaccgtttgtttagttntctataagctttagagatgcaagcagacgcagaaagatagtgattgtaccatctaattaaatcttttgtaaatcaaatattacctcttctgcatcaaagtatgcagtgtcatcacgctgaagattctcatgttgagt

SEQ ID NO: 92586 - DNA, 407 bp, Glycine max
  unsure (1)..(407): unsure at all n locations
agcttgccgtcgagctcgcccgagcgagcngtttgcttcttgacgacgtntnctgagcgcacccnccaaattaattagttcaccccncttccagaattgcctagaagggcatagatgctatgtacacccnccaatttgttgagtgcatccccattttgtgttattggttgatttctttccgaaacattgcaaaaatttacagattatgcagcgacgagtgttaatcattttagatcggttagccaaagtctatacattgacgaataattgcctccggacgaaattagggtatgacagtcgcccctctttacgtatcttgtattggagataaaagggaagtaaagataggacactaatctcgttagatggaccacaccatccaacccggcaatagcggaagttcaatt

SEQ ID NO: 92587 - DNA, 494 bp, Glycine max
  unsure (1)..(494): unsure at all n locations
agctgacggagaaagcgggaaagtagtcttcctacttttgtttttgaccacagagtggtacctggagatatgtcgcggtggtcaggagaccttgtggacgtcatgtggggtgctattgcccaaaaccaagcttgaccaatcccgacccaacccgggcatagtcagtcagtgagaacctgtgatgtacctaaacaggcgagctcctggcagtcaaccgataaaagaacaaagtccacaaagcaaggaggcttgtgtggcggctggccagctatggatcttgagtggtatctggaaattcgcctctggtaatcgtttaccaagggtgtgtaatcgattacaaggcttanaaatggagacgggaagttaagatggcctccggtaatcaattaccaaggttgtgtaatcgattacaaggcttanaaatggngacaggatgttaaggtggcctctggtaatcgattaccaatactgtgtaatcgattacacagagtaac

SEQ ID NO: 92588 - DNA, 419 bp, Glycine max
  unsure (1)..(419): unsure at all n locations
agcttcatgatgatgaacagcaattntgatgatgcgaaaagcccaaatgattgattcaagatttcaagatcaagcatcaagaatccaatccatgattcatgattcaagagaagaaatcaagaagcaacaagtcaagacttcatataggataagtattaaaagattttttcaaaaaccaaatagcacagttttgttttagaaaagaattttctcaaattttctaagttaccagagtgattactctctggtaatcggttaccagtgaccagtttggttttcaaaatgttttcaaatgatttgtaacgttccaaaatgatttcaaatagtgtaatcgattacactatattagtaatcgattacaagtgaatttgaacgttggaattcaaatccaattgtgaagagtcacaactttccataaa

SEQ ID NO: 92589 - DNA, 469 bp, Glycine max
  unsure (1)..(469): unsure at all n locations
tctacttatgtggcagggcgggcttccttcactttcttgtcttcaacgcgagctctgaccactgttcttccttcccgcgatgcttcttttcatgtccgcctgagtgggcttatagcctaaaccatacttcccacgatttccttgggtttttatcaagctagttatgccgccattgtctttgcctaaacccatcccgggttcataaccgttccccaacataactcgggccatcattaccgccgcatcggacagacaaggttgcccacaaagggagtccacggaggaaatgctgaccacctcanaagactggaaagcggtttctaacgattcttctgcggcttccacataaggcatggaggatgggcagcttaccaagatatcttcctcgcctgacacgatgaccaagtgcccctccactacgaatntcagcttttggtggagtganaaggcacaactcccactgagtgga

SEQ ID NO: 92590 - DNA, 353 bp, Glycine max
agctttgtgtaatcgattacactgatttggttatctattaccaatgattgtttctaaataaatcaaaagatgtaactcttcaaatgggttgtgactttttcaaaatggttttaaatttttctaaaagacataactcttctaaatggtcctcttgaccagacatgaagagtctataaaagaaaggctttgttttgtgcatttgataacaatccaatcaatcttatacaatcctttacaagccttgaatctctatgaacttcttcttcttctttgtgccaaaagctttccaaagtttttggttttctaaaccttgaaaacttgtgtattcattctttcatctctcctcccttgcc

SEQ ID NO: 92591 - DNA, 428 bp, Glycine max
  unsure (1)..(428): unsure at all n locations
aagcttagaccttgcgctaagcgctcagtcttcacgcactaagccgagcctgctcgctctaagtgcattgacccctgattgggtggctgaatagttcagctaagcgcacaataaagagtaagcccaacatcttcactggaatagaatcttaatcagagggcttagcgaggatgatgcgctaagcgccacttcttctttggaaaaagtntataggagtagcactaagcgcactatcctgaactaagccccaaatccatgttggaatatgagctctcaagctgggcttagcggagcaggatgtgctaagcgccaatctcttactgagtttgatatcttggaagagcgcttancgcgcctgtgtgcttagcctgaactactctctggaagttgaagctcgatggtacactaagcctcacatctcaagctaa

SEQ ID NO: 92592 - DNA, 424 bp, Glycine max
  unsure (1)..(424): unsure at all n locations
agcttgtcgctagagctgacccatcaactgttctaactctnttagactggtgatccctatgctcttgaccttgacttgatagaacctttttataagcgaaggcatttgacttgatcccatgttttactaaagtgaacaaaaatcggtgcgaatcaaaactccaacatctatcatgggtggaatggatgaatgcatgaagaaatgcatatgacacatatgcaatttatgaatacaggagcccgggaaattgtctccttcttagatacaacgtcttgtggtaacaaagtgcccaacgtatgtattaaagaaagtgactcggaccgcccattggtttttcaatgtgcgtgatgtatatgcgaaaggcacaacacgggaatgacaatatgacaatattcacataatataagcacaagggtacgtgaca

SEQ ID NO: 92593 - DNA, 491 bp, Glycine max
  unsure (1)..(491): unsure at all n locations
gagagcacanattttagacttacccaatgggtcttttcaatccatttagctnactcgctagtctttcacttgactttgttctaaaagcacacacactntatntgaactactctcttttnttttaacacataaaacattttattaatgtgttgtgtgtgttgttgtttcttaccttttaaattatccaccaaacaaactcctccaaatttgggtcaaaattgtcttaaaccaatgtgctctcctaaaacctaagcaaggttaatggagatgacaatttcaaagcttaaagttcaatttgacaattacaattcagttcacagatgggtgcaaatgatatcatcattgataaacgggtaagcgttttagtcaagtggctatanaacaataatggccttcatcatatccacatctatgaatttcattctaaaattcagagattgatacaaagatcattgctttatgctagtcattcacactctcaacaattaagt

SEQ ID NO: 92594 - DNA, 430 bp, Glycine max
agcttttacagctgcacaaaattatatgaaatattaacacttatagctaaagatacagaactactaaatctgataggctaacagaaacgtccctatatatcttacaaacttaaatatacgatcacctaatttgcccttgtctgtgcttatatacaaatccgatagtgccttgggcatcattggaattcatcacaatccagattttcttggttggaaagcaactcggctggcgatgcttgtatttatgcagaccaaaaacagaatatttttagcgaatatgaattaaaatatggataaaaatagattttcagttctgtgttttcttttaaaacaaaatgatatcttaagtccatgaatcaagaagtgacattaacttatttcaaagatatatctgaattgtggcctaaatgaaccattggttattatccat

SEQ ID NO: 92595 - DNA, 476 bp, Glycine max
  unsure (1)..(476): unsure at all n locations
atttgaataaatgatgtatcanattgttaattntattntcctactgggtagtgacattaattaatgatttgtgttcaaatatgttaataaataataacaatttatataattaatattttatataattatatgatcgtatataaaagtatagattatggttatacattggattctgcattttattatgaatgcagcaataataaatttatttatttatttatggttacatactttattatatacataaatatatttattttatgatttatttatcatataatatatatttccttatgtagattgtttattatatagtacataaatttatttattacaatatttattttatatttaatatgtttatatagatttgttcttatttaaaaatataataattataaattacatgtttcgatacaacatatatatatatatatatatatatatatatatatatatatatatatatatatatt

SEQ ID NO: 92596 - DNA, 424 bp, Glycine max
  unsure (1)..(424): unsure at all n locations
gcttctatataagctgaaccattttatcaatatacacaagttgagttttattcagttatttagagttcatctctnttatcttagtgagagtgattctcctatattcttgagtgattcatgaacaccttggctgtatcaaaggactttcacaacctttgtgtgttgccctctctggaaagagtgattcttcccttcctttcatcatcaccctttgtctgtcaaaccacaatttcagaaatatcacctctgcccagaattatctcgtggccataacttccattttacgcactcaaattaagagattcttgagcctaaattgaatttcaaaacgagaccttttacctcgttttggaatcaccttatttggagccctgttgcttagatattgcatttctatatttctgtccagccactacttaaccta

SEQ ID NO: 92597 - DNA, 460 bp, Glycine max
  unsure (1)..(460): unsure at all n locations
cggatgacgccgatcgaacatttgctaaccgacgttattctaatttcgttcatggattgaattgagaactcgttacgcgacatctgtcgcgaagtagcgaccgatatttttcattctacattgcacaatnctntttagaaaagctcgctggtcgataatggtctttttacggcagaataagttatcttgttntggtgttgcataaaaaagttacaatgtacttcggctaggtttttcgtgcgagttcaaccgacattttgtttcggccaggaaaacattagcccacctctgcaaaaaaaatatttgctaaccgtcttcatgcatatttcattcaacgattgaatagagaactcaatagccgacaacggtcgtgaaatagtcccgactgatattattcagccggcattgcgcatttctttgtaaaaaaacgctcgctggcagattatgttttntcaccatc

SEQ ID NO: 92598 - DNA, 319 bp, Glycine max
caataagcaaaccagtagacctggttggatacagacatacgacgagtctctgtgttcacaatattgtctttgcttaatataattactatcagcctctacggataacgcatcaaaataataaatctggaaccaatccaaataaccccatcttatatatggtgtaatttaaagacaaaaaaagtttactgatgatatactgtaaaacatatttatattattatataatttctgacatccaatcacgatcttaaaataactatacagtgtaagcttgttttctttctgagacataacttatatgctgtaataagatattctg

SEQ ID NO: 92599 - DNA, 273 bp, Glycine max
ccctagactatttgtcccctcgattatatttttcctcgtcctcctatataattatctagagggcattgatactgcatgtctgcaagtgacagctcttctacaatttctggtaataacatacattgttgccaccatggataacctacagttattctactgcaggaacaagataatcccaagacaaaaccaagtttctaatccttcttcgtcacaagagaatcaatgatagtgactgatgtgaacttacacattgaagcatcgccgacgaaatga

SEQ ID NO: 92600 - DNA, 460 bp, Glycine max
  unsure (1)..(460): unsure at all n locations
aatattaacatgatgcggaggctcacaatttctatcatttcctaggaaactagggaagataatgctttttcacacaacacttactccgctattctagcatatagntacattattaaactctatgactgtaatcaataattgttaaaacattagtcgattattaagtcagatatcaattctgacttaatcattatgctaaaaaggaactatgacagaactctaaatataatctcggtgcgttaaatactaaatggaggctcaagagtcaagtaccttcttatgttcttgaagtttcgttacggtggaaaacccatcaccacgaaaccatgaatgcagatacaggcatggttcaccatgtacacaantgttgttgatccacgatgtacatattcttggtgatgatttcttgaaaccttaacaacccttgtcgatctccctatctcattatctctagcaatgc

SEQ ID NO: 92601 - DNA, 376 bp, Glycine max
aagatacaccaaatttgagagattcccaatctgaggacgaatcttcccactgaatccagtataagagaggttgaggtgagttaatgaagtcattgtcccaaggaaagaaggaattgacataccttctccaaggaaataattgccgctcacgtccaagtaattcaaatgctttaaatcagccaaacaatgacttatctctccaccaaagctccatctcctataagcctcctcatcgaagagattattataattgtaatcatagttgtaatcatagtcatactcgaaagcataaggtgaagtgtggaggtgaagctgataaatatgggaagtgacgttgtggcagatgactccttaccactggcaacagttggtatga

SEQ ID NO: 92602 - DNA, 369 bp, Glycine max
agctataatacccttaatatttaagcaacatttgacattcccataatgtattccctgacttacttttccttgatacttcatggaaattaagtactgaagaaaagtactcgtttctgcttaatcgctttttgtaaagcgcttttcaatttcagcaaggaattctctggcactaggtatatcatctgaaacatgacccctcaagacctctggaatgcgccacttaatgatcataacactcatgcgatttaagagatctcacttctcatgaagtttcctcttttaaaggtatcggaatctgtacgagaagggggtctctcgaatctcagccaagaacaatttgcattgtctttttccaggcctttaaatttg

SEQ ID NO: 92603 - DNA, 468 bp, Glycine max
ctaagctgactgattacaatgggagttgctagccggtgtgggtgtgtcaacatcctgcacatggtgggatgaatcctcttttgacagaattaaggaggcaatgaagggtgaacctcaaatatatataaaacaaaatctatgtacacacacttagaaagaagtgtgaattggtgtggtcacaaacgtgtatatgttcctcaacttgaaggtgactaacaacaataatattgcatgcttaggaaattaaagccttataaaggattaatgtttttctaaaaaagaaaacaaattaaagacatcaagaatgtgacataaaaagaaagtagtagagagagagaagtcgtgtatgctgtgttgtgttagctaagatgatggggtgtatgagggtgtcaaaaacagagaaagttagttatgtgcatatatagaggaattgatgaggttgtacgtagagtcgtcaagcctggcact

SEQ ID NO: 92604 - DNA, 476 bp, Glycine max
  unsure (1)..(476): unsure at all n locations
gcttattatctacattntcaaggatgaaaaccgttatatttagctttagttnncgatnnnaagaaaatgtcttataattaattagcattccctttaatttctataagaaaaattatttgacaattaatccttgcttttcaagacatgaaattaagaatagtataaaagcttatagctacatgtattttattggctcgtattggtttaattttgattttcaaagataggagaatcatactatgtgtgcttccattatatatatatatatatatatatatatatatatatatatatatatatcttgatgctacctctgattgatgtgaagtttaggtcttgtctaatgccttatgtgtgtgtatgaatcagcttcacacctgcatatgaactatgtatcttttttctgtgtgtgtgtgtgtggagtaagcagcttcctcaagatgtatatatcataaagaaacctagatggggttatg

SEQ ID NO: 92605 - DNA, 360 bp, Glycine max
agccttggagaaccaagccattcagaatgctttatgaaatatagattggaatagaggtaacaatggcggttatgaccgacccaggctaaactgtgttgagggaagtaagctcaatgtttctccctttataggtagaagtgagccaaatgcctacctgtacatggaaatgaatactgagcacatatttgccctgctatgactacactgatgcgcagaaagtcaagctatcaacagctgaaatctccgactatgcccttgttcggtggcatatataccatatagaaatgtcgaaagaggaaaggcgaaatgtatatacatggactgagataaaaaggtgatgataataaagtatgtgcccac

SEQ ID NO: 92606 - DNA, 328 bp, Glycine max
tcgtctgacatggacgtgatattgtattatctttagcattcgcaagagctgagagcggtcatagttcaacatctagcgatattatgcaccatgatctggcatccgacattaaggtgagaacatatgaccacttcgagagcctatagtgatcatcgttcaacgccgagacgttatatacaccatgctccggcatccgacagacaagtgatgagcattggccatttgaataactcgacaactgtcaattgtcaatgttgagcgtatatatataccatgcgccgacatccgactgccgagtgaaacgctatggacatctgaagagctcgat

SEQ ID NO: 92607 - DNA, 497 bp, Glycine max
  unsure (1)..(497): unsure at all n locations
tcatgatgaatcaagaatgattcaaagaagttttgatgatatcttatgatgcaatcctccctaggaagggaccaatcactagaaccatgagcaagaggctccaagaagattgggctagagctgctttataatgccctanggttctcatgaaccttagggtagatttctgagcccatgggccaaggttgggtccatttatctttgtacatattagactaggatgtcattatanttggtccttgtatttanggctccatattgtaggtagggtaccctagaaatataggatttttcagcccttgtatttttgggcacctagactagtttttgtattaggggtagttntgtaatttcacatgcactaagtggatatttgatgtgtgtggttggaaataaatataattgaattggtagaagcccaatccaattaaattttatagggggaggtgagcatttgcttactacaccccattgtcacatcatatagtcacactttg

SEQ ID NO: 92608 - DNA, 214 bp, Glycine max
agctttaagagatcattccctcgtcaacatatttggcgacatactcaaaggggtaactactaaacattcatgacaagattggagttctattgtggctctgggtgtactgcaggccctaaccctgtaaatgaatccatgaaggctgatcacaggatagttgcgatgatacataaacataatgaagttgacatgccggggtgagcgagcatcctgt

SEQ ID NO: 92609 - DNA, 420 bp, Glycine max
  unsure (1)..(420): unsure at all n locations
tgaaatacaggacatccttgtcttatatattcataggacaaaacanaaaaaaataacagaatatactttcttatggatttacgtcacaccccaactattcaccaccttgaactaacatccatatatgacacaaactgctccctccaaacactcatgatcttatccccagcagtcaacattgagcaagcttaagcagcgatcaaacttgctctatagaactggctntgtgaacatatcagcangattgtgcaaagcgctgatcttatgaactatgattcttctttctgaccgaatgaagtgatatctaacatctatatgcttggctctatcatgatgaacctgagtccttgccaaacatatagcactaacgctgtcatagtacatgttaacatattcttgattaattcaagatcatctatc

SEQ ID NO: 92610 - DNA, 295 bp, Glycine max
agcttgcaaaaagcactgttacacatgacattgttctggcacaaagtcattaagctccataaaatgctctacagttattatggtattgtggcgccattaatagagatgacatccttgctgcgcgaatttggaactataatataacaatagacggagatttattctgggtggaaaggtatttggtccaggcctgatatacaatgattttgacactattgaggcccttttgaatacaccttcagttcccttaatctagcgaaacaaactcattcaagtcccaggcataatttgtgtc

SEQ ID NO: 92611 - DNA, 293 bp, Glycine max
atccactacccattggaatattctctctggaagtcggaaacttgtactatttttggactggatggaataacacgcgatccatgcttctaataggacagagtttaattgggaggatatgagtcaaaggaccttagtactccatacgaaatctcttatgcaagactaatctcacaaaaattcttgggaaatcccaataattgaaagttgtacaactgtgaccttttataaaaaacttatgtgggaaattctgcaactgacagtgacactctaacactaccttattgggacatatg

SEQ ID NO: 92612 - DNA, 441 bp, Glycine max
agcttgattagtagggggcctgatgcccttgctggaggtgactggtactccgtagaactgacagagacccgtaattagagcttgacaactccaagaccctgttggacttcttcgggtccactgggtgtcctgcaggcgcgatccctgcaaacaatagatgaaatcagaaatcagttgagtaatgtgcatacttacctatgatgatgtgaccatgccggggggaacgagcaccctgtaagactacagaggcccgtaaccagagctggaaaccccagggccctgttgaacttctccgggtccactgggtgtctttgtgggtgcgattcctgcaaacaatagatggtatcagaaatcagctaaaccatacgtatacttacctatgtcacgatggcatgacctcgctgggggaacgagcaccctgtgggactgacagaggcccgt

SEQ ID NO: 92613 - DNA, 489 bp, Glycine max
  unsure (1)..(489): unsure at all n locations
aactcgatgcctgggttaacctggtaatccaactttccatgaatcataaatctacacttgtcgccagactctgtggtttatgctcctctgccgatcaccacacagacctttgcccttctgtgcaacaatctgaagcaattgaacagcctgaagcttatgctgcagacatctacaatagacctcctcaacctcagtagcaaaatcagcaacaacagaacaattatgacctctctagcaacaagtacaatcctgngtggaggaatcatcccaacctttgatggtcgagtccttcacaacagcaacaataacaacagccttatttccagaatgttgctggcccaagcagaccatacgttcctccaccaatccagcagcaacaacaacaacagcaacatcctcagaaacaacanacagttgaggctcctccacaaccttcccttgaagaacttgtgaggcaaatgactatgcaaaacatgcattntcaacaag

SEQ ID NO: 92614 - DNA, 372 bp, Glycine max
actctgcagcatgcacagcttaaaactgttagcaatgcacactaattaattcacaatatcatgatcactgaaaatgaaataactaatatggataaggccgcaataagcaagaagttactctttgagtgatcattattacctgagaggatttttacgacagttatcattagctcaataaaagaagtagggggtctctgaagactcaattttcttttcattccacagaaatgagttcataatgagatagtaaaagtatcaattgaatgatagataaattaacaaggtcaccaagctatgattgcgacgcaccataccttgcaactcgcattatgcaatacagatggagaatagccccacatgataaattcaaga

SEQ ID NO: 92615 - DNA, 385 bp, Glycine max
tacaccacacgtactgatactaagcaataatattttgttgaaacacgcagctcaacaattaatagcttattagtggactcacttaaaaatagtgtcagagagactaaggatattccaaaaatattgtccaggaagaacaacttctgatatctataagtattaagtagttccacaacacaaatggcttgaaaaaaatgaggaaagactagaggctctctttgacaaaagatgcacagtatttggtggcataccttgagaataaccgcaatatctcacaatgtgatttagaagttgagtaagcatagactctaaaatgtgtttccacaaccacaaatccctgagaatattaaatagagagacactctccattaatattcacaaattt

SEQ ID NO: 92616 - DNA, 343 bp, Glycine max
agcttccacaacttcctaacagcaaaatcactatctctgaagcgaaaccaaaagtcatataaaagttgttacacgcgataaccactcacccctggtcgacgatcttatgatagaagtgcaagaacatgaacatgaacatgcaacgctgcatcagaaagatctctcagaaatgtggcgccaaatccacggcgagaagaactgggaagggcttctagagcccatggaccctcttttgaggtcggaggtgatccgcttcggcgagctggcgcaagcctgccacgacgccttcgactacgagccattctctaggtactgcggccatgcatgttcgataaagctaaac

SEQ ID NO: 92617 - DNA, 328 bp, Glycine max
  unsure (1)..(328): unsure at all n locations
agctcggacagggtcattgtttgttatttctgagaccaagntcttttcagtaagacatgtttacatcatttgaccttgtcaaataatgttnttttttaatattatgtttatatgttgtctgcgttgttgttgatgttacttgggttgggtttttgtttaaactcttaatgatgatttgaggtgcatgttgaacgaagacatgattgaaacactcttcatggtaaataatcataataatttcaaggagggttttggtgttgcgattagagataataataatcctcggcgtcaaatggttcattctgcttcttcaatgcccttggaaaat

SEQ ID NO: 92618 - DNA, 372 bp, Glycine max
  unsure (1)..(372): unsure at all n locations
tctatnacagnatgctgatgatacgttgttccttgcgaaagcaccgctcgcgaatgtaaaagcaatcaaggtcatgttgaggagctctgagttggtgtcgggcttgaagataaactctgccaaaagcaaatttggggcgatcggaaagtcttatcaatgggtgcataatgctaccaatttattaaattgcatattgttgactgcaccctcttcgtatatgggtatccctattggggtaaactcgtgagacacgagatacaatagttcacaagatgtgagagaaaactatctacatgaaaacaaagatacctatcttttggggaatgggtgaccttgataaagtcagtccttaactcagttcctatctctttc

SEQ ID NO: 92619 - DNA, 115 bp, Glycine max
  unsure (1)..(115): unsure at all n locations
gcgctgcagcttgattgggtanacattttgatcatcatttgggacttggaagaatagtatgggcgccatcggctgagaagaagagtgattttctaaaattgctcatatgccgaat

SEQ ID NO: 92620 - DNA, 347 bp, Glycine max
  unsure (1)..(347): unsure at all n locations
ggatattatgtgtataaatataaagntgtttctattatgttagtgcgcaactcggaccgatttagtgaagttcttatacttgtggagtcagatcgagtccatatgntntacatatttttattttagagtcangngtacgggagacctggaggagaaggaagaatacacaagacagccgagtgtttttctttttttacaaatgactctctacatcagatctattaaaagatgatgtaaaaaggcactataacattgattggaatcaaaccaatgtgaaaatgtctttgtcgtcgatttaagcacgacgagaaacaagcaatattttttttgggcaatgcttttacatc

SEQ ID NO: 92621 - DNA, 347 bp, Glycine max
catgcatgcttgacttcaacataaggatcacaactccctgtgatatctttcgcgggcaagtacttcgtcttcacgagcctcacatataggtacatgctttgctcaacgagatcataagcgctggtaagtctatcaccgaacacctttccgcctccaaagaggggcttggactccttcaacagaacatcctcacgtggaagcctctgcattattccctcacctcagagaaccgagaaaccctcattcataattataatccaatggcttcacaaccgtccgctgagccttaaaagagaagaccactcttatagcgtacaacatgctctactatccgatgcaccttatat

SEQ ID NO: 92622 - DNA, 428 bp, Glycine max
  unsure (1)..(428): unsure at all n locations
taatgagaaagtctgatattggctgagtaatgacattgttgagctaatgggaaatttggccatgtagcaacgacagtcacaacatggattccttcctccttctcatcctctctatttgccccaggctttttatttgtcaaagcaggatgaatcaaattgcctcttttcaaacccacttcaatccttttgccgacaaanactaagtccgcaaagcttgaaggcatgtaacccaccattttctcatagtagaacactggtaagatgtctactatcatcgntatgatctccttttccatcattgagggtgccacttgagttgccagatccctncacctttaggcgtattctttgaaagattcgcgcccctntttacccatgtctatagttgcatcctatccagagccatatcagaattgactgatactgct

SEQ ID NO: 92623 - DNA, 399 bp, Glycine max
agcttcatggtgaatcaaaggtgattcaaaggtgttttgatgataacaatcatgataacaaaagatgatgacaaaggtgatgacaaaaagctcaaagatcaatcaaagaacaactcacgtgaatcatagaacaactcaagtgaatcaagaaaaattcaagagttcaagataagaattaagaagaattcaagactcaagaagaaagtttagagtctagaatcaagattcaaggttcaagatctcaagaatcaggattcaaggttcaagatctcaagaatcaagatcaagattcaagactctagattcaagaatcaagagaaggctctatcaagataagtatgaaaagtttttctaaaaattgatagcacatgattttctcaaacatgttacaaagagttt

SEQ ID NO: 92624 - DNA, 493 bp, Glycine max
  unsure (1)..(493): unsure at all n locations
gggttcgaggtacttacccgttgaagatcgaagaacgatgattaacgaatgaagaacgtcgaagaacggttgaaacctttgcgagattcctcacggaaaacgttacggaaacatttcggaagcgcctcggcttagattttcttcacggaaacaatttttccaagcaaattcgaaagagagagaagtgcctaaggggctgaaccccttccttcttcacttcctcccctatttatagcaaaatangggaggtggttgccgcccagctcgcccaggcgagccaggttgcttcctccagaagcaacagccttctggaggaatattctggagggcccaagtgggcctgggtgctatttgcacccncatttttactaagtacaccccctctgctntttttggtgattctnttttcgtaaagttacggaaacttacgaatttcgtaacgatacttgttttctttccgtaatgttacggaaccttgcggatacataatcat

SEQ ID NO: 92625 - DNA, 337 bp, Glycine max
  unsure (1)..(337): unsure at all n locations
tgcagcttatctctnttcttgtgtaattattatattntgatttaagccctgtatttagctatgtttttatgacatttgaacactcagtattttttttattatttgatacgatgactgaacatgatgattatatttacttgctcttgcttgcttatgaatatgggctccaaactcaattactttaatgatatatggctagcggtatggaccgaccactggtattgaggtttatggatatctatttaactaatcatatgctttatttgaatattgcggatgattctctagttttgttgatgctatgaatgaagcattgtctttctaagtttgatgaatg

SEQ ID NO: 92626 - DNA, 485 bp, Glycine max
  unsure (1)..(485): unsure at all n locations
atgagtgatttagcttagtttactttggtttttattaattcattcaaggaaactgtcaaagaaaaacgtctgattgattctcttgattattttattcgaagatattttgattattttattattattttgccctttttcggtttagacgtggttactgcatgaacgatcggttggattntattttaacaatgattaaacgatattacaacacacatgatcggttgaaattcattttattatttattaggtgagaaaacgacttacataaatggttaaagcacgtcaaaaaggggtacgaaaaacaaaagatataaaaataaaagtacgcgaaacaagtggggaccactaagggtgcatggaatgaatngaaagatttgattntgagaacttaccggttgaagaccgaagtacgacgaagaacgaacgaagaacgatgaagaatggtgaagaatcttcacgatatcgctcacgganacgtcttggag

SEQ ID NO: 92627 - DNA, 227 bp, Glycine max
tgcactctgtcattaggataccactctcacacactctccctcttctctatctctgcaagaatcactcgtctcttcttcactctctcaactgctgccaaacccgcatctacgcaagtgcgtgcgttactgactcattcattgtattatatcgaagtttctaccaacatgttctctctttaagactagcttttcgctggataccgagtgtgttagggacttattcagat

SEQ ID NO: 92628 - DNA, 422 bp, Glycine max
agctatataagcgcgggtctggtagacaaatgtctagtgttcgcgatatgcgaagatgatgtttcgagtactttggatttggtacgaccatgccctcttgatttccagctgggatattggcgagtggaagaacgccccggctttcacgcaacgagcataatgtatacctttacagttctaaaagctctatagttgggcctaggctatacagtatttccttttgtaatgctgagcgactcttgtttttgaatgtgaatacaaggatctttcttcatctgttcctatgtctctacccattctcattcatttgcatgtttacttctttttctgagatggcagatctgatgacgagttccccgaaggtactaatacctgtgacacgcctatcgacttcgagcaagatatgaatcaaacggtagatg

SEQ ID NO: 92629 - DNA, 470 bp, Glycine max
  unsure (1)..(470): unsure at all n locations
gatggtaccctgantccaggaagaggtaactcgtangtctttggcaccacttgtgacccctaaggctaaattcgacccagagatagtcatggaattctatgccaaggcctggcccaccaaggagggggttcgggatatgcgctcgtgggtgaggggtcagtggatccccttcgatgcagacgccctcagccaattcttggaccagctattgatcttggaggaaggccagcagtgtgaatacaactagaggagggaccaggctttcagctttgacgaggaggctattgctcaactgttgtgtataccacggcaggatttcgtcaggaccgctacangataacaggtgcggatcagcaacatcctgcctagcgaccacaactctgacctctccttgctgaagtgtcagctagtgtatgccatcctgtcacggatgagggttcatgtggctcagttaattgcagacgccatct

SEQ ID NO: 92630 - DNA, 411 bp, Glycine max
agctttccattctcttggaagttcatcattgtattagacttcctctggaagatctttattgcggactatatcatctccttcggaatcttgctcatgaatattcatatgctctaaagacactacaatatcatctagcatatcttgtcttgacacgatagcgcttgattcatcaacggtaacatgaatggattcctcgatattcattagcccttttattagatatccatatatgctatgctgtgtaatgaatatccaacaaaaataccttcactcagattctgcatcttattttcctagattatctttaccattattgagcacaaagcatttgcatccataaacatgtagatgagaaatattatgctttctaccattatataactcatatggggttttctttaacatgggtct

SEQ ID NO: 92631 - DNA, 491 bp, Glycine max
gagctttatgcttatcagaggcatccagcctatctcttactctatttctcttacttgccatgtctgaatcagtattaacaggagaatatgctcgactactctctgtataagacatttgatttgtatgactaaccataactctcttggtttgaattacattgcaacaagagggactagcctccccattacatgttgcagcaagagaaatcttatgatgggatacatatgagcattgggtaacaatagatccttgagtctgtgatttgttgagggcaaaattcccatatgatgattgaattggagaagggggccgagaaactactttattatcgattggattacttgatggcaacaatgcgttttgacctgagagaataaggatagactgaaaaggtaattgatgatatgatgaatactaagcatatataattaataaagagtctaatggtcatctactaatatgttaaaacacttctacattgtgttcaata

SEQ ID NO: 92632 - DNA, 483 bp, Glycine max
  unsure (1)..(483): unsure at all n locations
tatagagcttctatggaggctggatctttgagtctttattaagtcctncaatggcgatatcccaccatggagatgaagcggaacaaacgagaaaatgtgaggtgaggcgccatccactatggaataagccatggaagaaggagtttcgccaccaagagagtgtcttggataagaagctcggagagggtgcttcaatggaggaaaagacagagagagagaaatatagaggcggaagcttgacattgaacgaagataagatggagagaagttgaactttgaagtgtgtctcactagactctcattcatcaaagttacaacaagtgttacacatgcttctatttatagactacgtagcttgcttgagaagctttcttgagaaaaattcctcgagaagcttctttgacaaaacttccttaagaagctagagcttagctatacatacccctctaataactaaactcaccttcttgagacgcttccttg

SEQ ID NO: 92633 - DNA, 200 bp, Glycine max
  unsure (1)..(200): unsure at all n locations
gcctgcttatatgtaagtacgcattgcacatattatagaatctcttttncagagcgatattctaacaatgatgataatctacacgagcagatcatactaacgcaaactcaagattcacgtcgtgatttctagtctggatgcttactgcgggatttgacggagtgtcgatatcgcgaaagttgatgcggattctgtgaggg

SEQ ID NO: 92634 - DNA, 411 bp, Glycine max
  unsure (1)..(411): unsure at all n locations
cagcttgctaacccatggaagctcctaatatcttttacactcgtttggggtgggccacactaggatggcctngattatctcagggtccacttggaccccattactaccaactacaaaacctctgaaaactattatgtcgcacgcggggggtacactactctatatacgcatagaggaggtgtatccttaaggactgaaagaacctgtctgacaggtcctacgtgatctactatgcacctactgtacactaaaatactatctaaatagaatactacatatctacctatgaaataccttaaacaagaagcatatgcctcattaaagtgcttgggccttagtgagccctaaagcaattctaggcactcatacaaaccacacatggtcttgcaagaaggttacactctaaccata

SEQ ID NO: 92635 - DNA, 271 bp, Glycine max
gcttccatgttcaattttgaacatctcgatatattatgcacctgaatcgggcatctgagtgaaaagtgttgtcatatgagttagccgagagcttcgctggtcgatgttcagcagctcgacatattattggcctgaaacggacatctcagtccaaaggtatggcagtttaaacttttcatgtgcttccatgtttaatattgagcatctcgatatattatgcacctgaatcggacatctgagagaaaagttatgccatatgagatagccgaga

SEQ ID NO: 92636 - DNA, 419 bp, Glycine max
  unsure (1)..(419): unsure at all n locations
gcaagcttaagtactatgatgatacaacatcacattggttngngaccactggtggngaattgggccaccccagttcgcaaaccgtggcgaattggatcaagattgaaaagtacgatgtatgttttcaagttggtgtattgaccaagtgtgtgcagtgattagaatcatcaatgcagagatattggaatatacctggatcaatatggtaagcgtcttgctctatgttctgagccatacaaagagcagatcgagcgatgttgggcactgtgaatgagaacaagcgtcttgtgttctcacttctcattaatggagtcttagttttcaatattcctatgaatgtgcgattttcctttgcaagtgcatagttatgatttcgttgaaatattaatgcaaatcaaagtggcaatttcaatatgttt

SEQ ID NO: 92637 - DNA, 457 bp, Glycine max
  unsure (1)..(457): unsure at all n locations
gccagtgctagcaccttaagtgatgattgtccataactcttacaacataaaccaccaaagtgtcccatatctagtcatgaaccagctaggaaatcagattctgtggcactcacaccaatttcctctagttcagtaacattaacgagcagcaaaagttcagaagaactgacaagacctttgttagagaatgacaaaccaccagaaactatagatttgcaagaacttagaactacttcattgcagaatgacaatactaatgaagctagtgaagctagtgaagagaagatgggagatatttctgtgagtgaatcacctccccgaaatgtggtgctggataaacaacatcgttcaattgaacgggatgattcaaggccaaagaaaaatgggagaanggaaaatattctggatttgataaagagggtgagagagaaattggaagaacacaagcgtaactttg

SEQ ID NO: 92638 - DNA, 385 bp, Glycine max
  unsure (1)..(385): unsure at all n locations
agcttgttaaagaacttagaanaaatcaagatcaagcttgttctcacatcgttcgcgtgtatgatatccattccacaaggtttgaagtagaggagaccttcaatcctataacgcaatgtggcgaacaaaagtgggcagttaacttgaatggtcatcattgtcaatgcggaaggtattttgcgcttcactatccatgttcacacattattgcaacttgtggttacgtgaacattaactactaccaatatatagatgttgtttacacaaatgagcacatcttaaaagcttactctgcacaatggtgaccacttgggaatgaagcggctattcctccttctgatgacgcatgaacacttatccctgacccaactacaattcatgccaa

SEQ ID NO: 92639 - DNA, 473 bp, Glycine max
  unsure (1)..(473): unsure at all n locations
tacctgcgtataaatgataatatcatttgcacccttctgtgaattgaattgtaatggtcaaattgaaccttaagctntgaaattgttatctctatttaccttgcttaggttttaattggtttaagacaactttgccccaaatttgggggagtttgtttgatggataatttaaaaggtaagaaacaacaacacacacaacaaatcaataaaatattttatgtgttcaaaaaaaaaagagaaattcaaataagtgtgtgttgttaaaacgaagtcaagtgaaaggctagtgaatggactaagtggattgaaaagacaaattgggttagtctaggatctgtgctctcttagaatttaagtctttgaatcctagaanaaccaataattcttgtagccaagcctcattacaagcctctganattccttctgattctatttatgtatttttgactctatggcatgagatgaagtacaaa

SEQ ID NO: 92640 - DNA, 414 bp, Glycine max
  unsure (1)..(414): unsure at all n locations
agctgtggggctgagaacatatataacaacactctaggttntatttttggggagtttttcgaataggagaataattttaggattttagaattccagtttttacttttcatgcgcactattcacgtagcaataaaatttgttttgtgcttcaatctgcaacttcgttttctgcttcaatctgcaatttcgttttctactgattaatggaaggctaagtcttcagcgttgttttctcttgaggatcaagcacaactctctttgaggttttattattactattgaattatgatcnagtttttctcttcaccaattactctgtagttgttgctattaatccatgcatgcttagtgcttgattaattgtctctgcgcttaaattatgttcatgcctaatgatcggtttctgtcatgaat

SEQ ID NO: 92641 - DNA, 390 bp, Glycine max
  unsure (1)..(390): unsure at all n locations
gatggacctttaggtttggagaggataatatcttgtctatggcnggacctcccagaagagtatggagtcagcaccacttttaacatttctgatttaattccttttgcaggtggagctaatattgaggaggaggaactaacagatttgaggtcaaatcctcttcaaggggaaggggatgatgcaatcctccctatgaagggaccagtcactatagccatgagcaagaggctccaagaggattgtgctaaagctgctgaagaaagccctacggttctcatgaaccttanggtagatttctgagcccatgggccaaggttgggtccaattatctntgtacatattagactangatgtcattatatttgattcttatatttanggctccataat

SEQ ID NO: 92642 - DNA, 435 bp, Glycine max
  unsure (1)..(435): unsure at all n locations
cgccctagcanactgtatcccagttatctgctgttgtcttgttatcatcaacttgtatccattcagaaacatcagcaccttctctcgtaatcccacgtcgactattgcatcctgaaccaagaatagtttctatagatcaaccttcacaagcacctcataaggatgttgaagtggttcatgtatcttccacatcatcatctgaaccatctgtgccagttcttgctgaaactcaaccaccaatattgtcattgccagtaacttcacgacccatttacacggtatacttcgtctcttgatctatcagtttcttgcatgcagacacaccctagttatagctgtgcttgtgattctatgattgtatacaatacagcaacatggtagagagatcaaattctcatatatctactggatcaatctcattatccgaagatgttt

SEQ ID NO: 92643 - DNA, 346 bp, Glycine max
agcttcctggccccttactctatcccagtttttttgatcccctcttcatatattggcctgcacttcctgtgcttattattatatcatcttctctttcgagataaatacaatagaataacattatgacaagtcccattgaacttttctcacatcctgtacatccgatgggtacgtgtgtgtacatcgatcagttacgtgataggcagctgttatattcactcgccttctttgcttatggacttactttttaatttgtcttcaaaaaatacattctcttatttacttaaaaaagaagagttgatcctcatagaaggggaatttaccatgaccatttatgttggaattt

SEQ ID NO: 92644 - DNA, 468 bp, Glycine max
  unsure (1)..(468): unsure at all n locations
taagctntatctagttcactagatgctgatcatgcagtcaggttgtgtctatttgatacatcaccataacaattgtataaagaaagcacgcgaaaaatacatcgatcgtggtgaagttttaaaaggggggttttgtgcctcggttaattaaaaaaataaaatataaataaagggaaagatatgtgcacttcaattttttattgtactatatattgatgcctcaattagagcaggatctactacaaattttgcttgtagttcttcattgttaggccatttataaatatgattttatgaatctgcatgagacttgtggctcattgatataacaagtatgagcgattgttacataaccactacatattttaagaagattcttctacaatggatcaagtctcccagataaatgtcacataagtggcgggtattatatatataaatgcaagcatatttctcttacaataatac

SEQ ID NO: 92645 - DNA, 386 bp, Glycine max
tacctgtcatcatgacgaatatctgacaagttctctcaacagatgtcggtgaaattaagcctctcacatggataaagaaaaatcataaacttatacattctacgccaacttggcaagccaagtcccaaccttatcaaatactaattttattgcttctatctgctattattattctctatttttcttatcttatctcttcttatccttatctttatactttatctttcttatctttcactattattatcttgatcctctatctttatcatctttaaattcaaatattgtattttcatccttaaatagtaatcatatcgtctatattctcttatctacattgaaacctcttatctattgctttcaattggagctgcttgcttgccaga

SEQ ID NO: 92646 - DNA, 469 bp, Glycine max
  unsure (1)..(469): unsure at all n locations
cgtatagttccctaatntatggttatttagtagttatttttgttaataaatcttgttntatggttaatgctgtctctagaacatttccattggatttagtgatgaaatctgtgcatttttagatgaaaaagaggctaagttttgaattgcaaaatgtagcagttgggctaagctcaacaattgggctaagcgcatatacaccactaagtgcagcttcagtgcgcttagcacaaaggagaatctggcagagcatcaacatcaaagccgcgtgctaatcgcgagatcactgcgctaagcacagcaggtaccttcagccaggctaagctcgagactgacgctaagcccaatttcacttactcgccctaagcacgagggtggcgctaagcgcattgccgcgaattcatagcctatttaaagtctgtcttgtgtagaattanggtacaactctctacagctnttgcacaccttt

SEQ ID NO: 92647 - DNA, 321 bp, Glycine max
  unsure (1)..(321): unsure at all n locations
aatggacatatctcgtgttttttcattngatcgcttgtttgagacccagtccactatgcttgaagtaaaggtcaccttaaatcctatgtcgcaatgcagcgaaccaccgtgtggcatatagattgtagggtcattatagtcgatgcgggaggtattgtgggcggtactattcatgttgaaacattattgcagcttgtggttactcaaacattaactacgaccataatatatatgccgtggacacaggtgagcacattgtcatagctgactatgcgcaatggtgaccactggtgaatgaagcggctattcctccttatgatg

SEQ ID NO: 92648 - DNA, 403 bp, Glycine max
atatacctagctttgatggtcgtgatccgctcttgtggttcttttagatcactcaactcttccaatatcaaaacactccggaagaagatacaatcacccgggcttatttgtatatcaacgacgccgccttaagctggtagcaatggatgtacagcaatggtctcatcgcatcatggaacgcctttctcgaagctctagaataccgatttgcgccttcctgttatgaagatccttaaagtgcactgttcgagttaatgcaaagaggcactggaaagcgaatatttgacctaattcgaacggatagagaaacgcgtgataggcctgactcctccattcctacagagctgtgtcatctcacgtatataccctgatattcgtcgagaacgccttgctctacaaccta

SEQ ID NO: 92649 - DNA, 342 bp, Glycine max
agcttgcttgtggcgtctactatggaggctggatcttcgagcttcaatgaggtcctttaatggtcgatttccaccatggagatgcagcggaagacaaatgaaaagaggtgagaggaggcgccatccactatggaataagccatggaagaatgagcttcaccaccaaaatgagcctcggataagaagcttggaaagaatgcttcaatggaagaaaagaaagagggagagaaagagagaggggggagcactaaattgaacgaagaacaacggagaaaagttgaactttgagttgtgtttcacaagactctcattcatcaaaggtacaacaagtggtacacatgc

SEQ ID NO: 92650 - DNA, 300 bp, Glycine max
  unsure (1)..(300): unsure at all n locations
agacccagtgacataaaaacatttattgaacttattttataagctngcaaaagctcacagaaatgagaaaatgagaaaatacttaccttgcgctgatgtcagactccaacggaggatgctcaaccttgctgtagtgataaaccccaacgacagtcacgaaccccagcggccacgatgatgacgagaacacggcggtcacaggttgcaaacgatggtgatacgtcttgcacgtgacggagaggagaaagggtttgtttgtgagactgagcgtgcggaggggatctggaaatcccctctggt

SEQ ID NO: 92651 - DNA, 317 bp, Glycine max
  unsure (1)..(317): unsure at all n locations
agctttgctctgggcattagcaccccacctattgccccaaggtgtcctgaccgccgctacatattttcatgtaccactctgnggtcaacgaataaaagtaagaagtctcacgctttcacacttgctcacttcaagcttgcaggatcatggggtacctgtcacatgtgcgtctaggcggcgggcgggcgatggtgcaaaacaactatccccctcctcagattacacatagattcaccatccccagttgcccaccttccactgatctcacgttctgctacaggacccttattctcgtgcatctgaacaccaggacccca

SEQ ID NO: 92652 - DNA, 467 bp, Glycine max
  unsure (1)..(467): unsure at all n locations
ttacaagacacaccaggtctaacaaactgcttatcttacttctnctctaactggttcttangctcagttaactctataggagacatcctataaggggctatgaatatgggtccatcaccgggtactaactctatagaaaactctatctctctctcggatggtagaccagatatatcctcagggaacgtttcatgaaactctctcacaacagggaggtcacacatggaaacctgtctctatttctaggttagacaagatcatgtacactcgagcatcttcttttaaagatgtcataacttggttggcagagataaacatcatatccttactcactccaaaatcatcaaacaccatagttntatcataacacgttaacaagacatggttggaagataaccaatccatacccaggataacatcaatttggctcacaggcatacaaatcagatcaatcaagaatgttctac

SEQ ID NO: 92653 - DNA, 424 bp, Glycine max
  unsure (1)..(424): unsure at all n locations
agcttaccaccatatgatgccatggattaattctcggangaagaaggagatgaatgataggagagggagagaagagcacgaaattctgtgctcaaaaagagctctgaaatctgaaggtcatattcaaatgatcaaagttgaaaaaaatgcacacacatgacctctatttatagcctaagtgtcacacaaaaatagacggaaattccaatttcacttgaatntgaaattgaatttgtggagccaaactttggagccaaaatttcactaattatgattagtgagatttagttatggttcagcccactaatccaagatcaattccaagattctccactaagtgtgcttatgtgtcatgaggcatgacaagcatgaaagacatgcacaaagtgtgactatttgatgtggcaatggggtgtagtaagca

SEQ ID NO: 92654 - DNA, 487 bp, Glycine max
  unsure (1)..(487): unsure at all n locations
ggtccttgactcattgtctccttgaagtgacgtctctaatcacctttcctccttctccattctgctgccattgatcttcaagaagcaaaggatttcattgatgaagaagatccaaggcctacaagctctacatggagctacatcatgtggtatcaagagcatcttcatctaagtgatgttcttttgcttcctctatcttttgtttggtcaattcactttaattccttggtcttcatcatattctccatgtatctcctccattatcttgtggtttggttctgtttatagtagattcacaaatataaatcgattaaatcttagatctatactcgttcttgcatttctatggttcaaattctatagatccactcttgaatcatagttttgtgttgaatttagggtctatcttcttttatcataatcttcttgtgcggaacctttagatctcaatnttcctgccaaatattgattagaaaagataacataa

SEQ ID NO: 92655 - DNA, 372 bp, Glycine max
agcttcttattcaaggctcatcatgatggtgtatctccttctttcatggcttattccctactagatggcgcctcctttcacctcttctactttgtcttccgctgcatctccatggtggaaaatcaccattaaaggacctcattgatgctcaaatatccagcctccatagaatccccacaagcaatcttccatcaaagtattgaaaagatttttcaaaaaaacaaacatagcacaattttgtttttcaaaagagtttttctcaaaattttctaagttaccagagtttttactctttggtaatggattaccagtctcctgtaatcgaataccaatagcataggttgatttaaaagctgttaactaaatctgcaa

SEQ ID NO: 92656 - DNA, 284 bp, Glycine max
tgaaagaccaccccccccgcggctagcgccacccccgcgcccccccgcacacacccccccccccgaccccacacccccgcgccccccggaccccccccacgagccccccccacccgccccccccccccccccacacccccccaccccacctccccccacccccgccgccccaaccaccaccccccacccccccaacccccctccccccccccccacacaccgcgcaacccaccccccccccccccccgcccaacccccccaacccccacgcccccccccccccc

SEQ ID NO: 92657 - DNA, 197 bp, Glycine max
atgttcttggctatctaacgattcgctccttcgccgtactaatttaagaaatgaccttttattgcatgatcaaaaggttggaactcatctgcagtgacatatattattcaatatcagcacatcttatttttctttgaaccaaagcaactttgcttggattaaagaacaaccactcccacatggaatctaaaagaaac

SEQ ID NO: 92658 - DNA, 432 bp, Glycine max
  unsure (1)..(432): unsure at all n locations
gcttgctntanatatacattgatgttagtatttattggatgttgttgcatgccatttttgttttaagggtagcatttcttgggtaaactaactttccaaatgtttgtctctccaggaaatggccccaaggaatcttgccttaaagatgtccattaaagacaaagcggtcgaacgaactagttccgctcctgtatatgacagtcacccctttatgagcgttgtacaaccatcagctcttcgaggccatcataggatggtcatttcttcgggagcgacgcgtccagctcacggacgacgaatatactgatttcctagaggaaatcaggcaccggcggtggacattacttggtactctcatggtccagtctgatcccaaaaatatccctgaattctatgcctatgtcttgccaacaaaggacggcgtgcgttaca

SEQ ID NO: 92659 - DNA, 448 bp, Glycine max
  unsure (1)..(448): unsure at all n locations
cgaaggaatggccatttcagtgctgaaagaattattgacttgcttaccaagntgagttgcccggtgagtataatgttagttccaccctcaatgcctctgatgtatctcttattgatgcagatggagaattccatttgaggacaaatccttctcaagagggagagaatgatgaggacatgatcaagagcaagggcaaggatccacttgaaagacttggagggcctatgacaatggctatagcaaggaaagccaaggaagctcttcaacaagtgctgtccatactatttgaatacaagcccaagtttcaaggagaaaagtccaaggttgtgagttgtatcatggccaaaatggaggaggactaaatggcaccactttgtctcaatcttagagtgtgtagttggactacaatatggcccaatccttgtatagttggctgaccacaaatatg

SEQ ID NO: 92660 - DNA, 439 bp, Glycine max
cctgaggcatgccagcttgaaccttgaatcttgattcttgattcttgaaatcaattttcttcttgaaccttgaagtgttcttgattcattcttgaacatcttgaacatcttaaacatcttgagcatcttgaactcattctttgattatcatgaattgacctttgagctttttgtcatcacctttgttatcatcaaatcatctttgaatcaatcttgattcatcatgaagctttgcttctacaattatatatatagtaaccttccattttgaacaagaagctgccaccaaaagctaatgcgtatatattatgaagtgctgagcaaaacatgcaagtctgaatgaagctaacatatgaaggaaaaatacacaatcaaaacatgcattcaccactataactaaatttggtagacatgacaaaataaactcatttggaaaatg

SEQ ID NO: 92661 - DNA, 471 bp, Glycine max
  unsure (1)..(471): unsure at all n locations
tgagccagctctctcttttaaggtgatggtagggattggttattacgtggcaactgaaggtatggtgcagaattggattattcangcgcaaggcaatatgtntcaattaccagtatatcttctctctatttctggagttgatcttattttgggtgctagttggctgaagaccattgggcctcatgtggctgattatgcctcattgaatatgatattnttacatgagaaataaattattacgttacaaggtgaagtggatcatgttccaatacaagctcatttacatcatattcgccgtatgggtaacacccattctattgctgaagtatatacaattaagatggtggatcctactgctcaagctattccattaccagagctgtcagatgacatggaacccgaattggctcttctattgtgaactatgcttcggtgttcgtaccccaacttcattgctgccccactgcactc

SEQ ID NO: 92662 - DNA, 411 bp, Glycine max
tgcagcttgttattttaatgattggacctgctgtattgaaacagaatgtcagctaatggagcaaatgaaaaatatgttttttctagatcatcctactcttttatttcctacatcatctgcaccaaatactggagattgagaagaacgctattattgttaagacgaaccatggctgaccactactaattagctagtgatcgtaggctttacaaatgtattatatgataaatatcctcaatacagggcttatttgcaagattcaatcattgagctgctatgaacagaaacagtcattctgctatgtggtgatagagcatacttaatatggatctggaataggaggtgctgtattgtgtgttcaaactccatgtacaaccagacttatatgtcattatcatgcaaataaaaatg

SEQ ID NO: 92663 - DNA, 363 bp, Glycine max
aagaacttagaataaatcgagaacttgcttgtttcatatcgttcgcgtgtatgacatccactcgcacaagtttgaagtagaggagaccttcaatcctattacgcaacgtggcggacaatagtgggcagctaacttgaacggtcattattgtcaatgcggaaggtattctgcgcttcactatccatgttcacatattattgcaccttgtggttacatgagcctgaactactaccaatatatagatgttgtttatacaaatgagaacatcttataagcttactccgcacaatggtggcctcttgggaatgaagacagctattctccttctaatgacgcatggacacttatacctgaccccattac

SEQ ID NO: 92664 - DNA, 334 bp, Glycine max
  unsure (1)..(334): unsure at all n locations
agctntatttcacacttggtcttggttaaatgtgcttggagaaaacttccatattcactgtaaccaatggtctactagactgaaggaagaaatgtcttatgggggtttgaggattgggtcttcagcttatgtgatatacttttagaagctgggtttggcaaaatctgcctttgtaattacctatcatttttcgtacatcttgtactgaagtattattaatactcaagattgttgcactgcaaaatataaaacgtaactacgtaacgttaaaaaaataaatataactcaatgaatcatttttttttttggaatgcagaaacttttatattattaa

SEQ ID NO: 92665 - DNA, 496 bp, Glycine max
ctaaaagagtactcaagctgggtgtatgtactcccaagcctatattccaaagagtctgtcaatgtctctccctcctgattcaagtccaaccgagaaaacattttagcatgtagactttatctatgaactatacaaaacacacgtcttctaaattgttctcaaaataattttaacttgtcgtgcctcacagtgattaaacttgtcaggtttccatagtggatctcatcacaatactcatcgcgcattaagtcgtctctcttaaaaggtcttacagttgtgtgattgtatgagtcataacttataactcaatgcacacaacatttcaatacacatgtatcttacaattcaacacatactcaatttatcacatacacccaatctcaataataatgttataatcccacagcaacatgttatcacaccttatgaatcatatgcacatcacacaatattaataaatacatggcacaaacacagactttacttatgaactatg

SEQ ID NO: 92666 - DNA, 328 bp, Glycine max
agcttcgcacttgataatggttacacatgaatatcgctaggcaacgacatttatggcgctcccaacaaaggtggagtatggacgattgccctgagggtccgcacttaggcaatcattaaactaatctctcaactcgaaagtggaggacacatgaacaaccctatgcaataatattcatgcggctcccaaaaaggatcaaaatggaggattgccttgaaggtcctctcttaggcaatcatggaacacagctccgaactcaaaaacggcggacacatgaaagaaaccgtaattcattcacgtggctcctgaacatgatgagaatggagga

SEQ ID NO: 92667 - DNA, 406 bp, Glycine max
agcttctcaatgaagctatcttgtctataaatagaagcatgtgtaacactcgttgtaactctgatgaatgacagtctcgtgagacacaactcaaagtgcaacttctctacctctttcttgcttcaatttcgtgctcccgctccctctttatctgcctctttgtttatctccatagaagcatcctctccacgcttcgtatccaaggctcatcttggtggcgaagcttcttcttacatggcttattccttactggacggcgcctcctctcacctcctttcctttgccttccgctgcatctccatggtggaagatcaccattagaggaccgcattgaagctcatagatgcagcctccatagaagccgcacaagcgggcttccatcacgtggtaatcagagcacaagagc

SEQ ID NO: 92668 - DNA, 368 bp, Glycine max
  unsure (1)..(368): unsure at all n locations
gatcctctgagtcacccgctgcatgcaagcttgcataccaaattatatatgatatatttttcttacaaatcatgtatgaagaacgaccattttggagtttgcatacttacattanaacggatgaggggggtgggggggtgacccnttttattatttcttatgcctttcagctcttctttgtttctctccatacactgaatatcatgtttaattcaatcttcattcctttaaatgccttttctttcgctttctattaacggaaccttgccttttctacacgatcttttcttctctactcttctccattctgttcttatctcgtttccaacttgcattacgctctggctcatcttgtactggtttatccc

SEQ ID NO: 92669 - DNA, 433 bp, Glycine max
tatatgctcttcataactcttagaagcttcttcatcttcttcattctctatccttggaaagtctcgtctccatgactccatctgccagaatatcaatgcttggttatgctttatacaaaatactatgcaatagcatgtcaatatgaacaggaagtgcctcacctgatcatcagaatgtagcagctgttctgcaacaaatagtatattattgtagtgtcctgatacacaatctttaccacttctctctgcaaaccctttgtatgtgataatttccacccgaaaacccttgctcatgaatagtttatccacccattgccttgtattggactgtgcaagggaccagaaaagaatctattcttcctttctatttctggaagaagaaaattatgttaataaactaattaaattatgtgcacactaaccttaattctat

SEQ ID NO: 92670 - DNA, 433 bp, Glycine max
catgcaagcttcgtgattgtactgctcttacttccttttcttccattgcttctttattcttcttccttatttcctcttattaggttgatgctgccttcttcttatttggttgctgacttttgtttttggtaacgattatttaatgataaatatttattgggtatatatatatttatatatgaatggtaaatattttgttaatgcttgtaggggtgtgctttgtttcagtcttggtacgtgatttctctcctcttcatattacgtgagctctctgtgcttggtcagtgattattaacttggtaactctaattgataggttaatgttagggtttaaaaattatatgtcattactagtggtatatatatagatatatgttacgttagttatgagtaattgatatatattatttcttttaaatttgtaatctacatg

SEQ ID NO: 92671 - DNA, 471 bp, Glycine max
  unsure (1)..(471): unsure at all n locations
nttcatctatntcactgaagcacctcataaaggttctctcctacgacggaaaggacatgttttggttatcctcaacatggacatcaccacgactgccaccattttgtggcattagcatcatagtgtttcatggccttttcttgtgactgtttgattgatgctgagagttttgagggtagattgtcacgtatgcactgcgataacttttgtcctatagaaaacaagggaaggaaaaattgcatgcatgcaaggaagaagtcttcgtttatgagaaaaattggatgattaaaccttgaattgaaatttaacacaatgttggggctttgtctctatgtgtaagagtatttcagcttttaatttgtttgcaattgtcaccacagacttaatatggattgaagctaagtatttaactggctcagtctatttagataaaagatcgtatctaactaactgctttattgtagtaatgtc

SEQ ID NO: 92672 - DNA, 290 bp, Glycine max
tgactgctatttgaccccattttctaaaacacccccttgctctattttggcgatacattttccgtaacgtgacgaaactatatgaatatcgtaacgatgcttgatctgtttccgtaaagatatgaaaccgtacggattacgtaatcatcccttctatgccttgcggaatgtgaccgaactttgcggattacgcactaacactttcttttaatattcggcatgtcacagaacttcgcggagtgtgctacaatgctttcttttgactcccgacatgtcatggaacttcatga

SEQ ID NO: 92673 - DNA, 393 bp, Glycine max
agctttataccagctgtagtaaaggccaacatcatgttatatgtccttatgttttgttggtaatttttaccatcagctgtattttggtcaaacagaagttgatgcagaagtttaagtggattctgtctcaatgaacgttcaactttaccatctccacaacataagctgaaccttgggcttgaactatttttacatttttctattctttcattataccacattttgcattacagtgactacattgcatgagctggtcaccaagatcaaaatactctgaaatggttaaattagatatgagtaaatgatggtaaccatcgattatatattgacaggaatatgtaaattataccatgatagataaaagtattttttggaatgactaatttaatttga

SEQ ID NO: 92674 - DNA, 369 bp, Glycine max
  unsure (1)..(369): unsure at all n locations
ctatttgtntattcgctctttgagagtcatagaattattgtattcattcaaactcttatttgtgaaagccaggagtggcttaatgttaaacaatactttggtgttcttagattcagggggagtcttacggtgtgctacaagtggcttgaaaaataattgtatagtcaaaagtggcaagacaaaatacttattctgtgatcaaaatctttattagtggaagaaccttttacagttgcgtaaaggagaaccgggcggagttttgttgagtgaaccaggataaaccaagtctttctacatctgtcttaagcaggcttatcaaggatgctcttaacttactatgtcactctttttacaccaagtctttatctg

SEQ ID NO: 92675 - DNA, 393 bp, Glycine max
accatagatgtgcacaactcttattcttgggtgcaaatttctttcgtcatccagtgtagcttgggaacatccatatctgacatcttggttcatttgagcattcttgagtaagcttcactaaggtaagggggatctttccacttcttgaacctcgatattgttacctttagaagctagacttcattgcaagttgtgacgatggtcaaattttccatacctatcgtcttggatggaaatgagtgaactgtcgattttattcgagtataaaggttgacactgatttctctggctgtacaaacttaggtgtaacctgctatttcacttatattgcggtcttatagccaaagttatgatcacaactagtttaaggatatttctatgcataaatttgca

SEQ ID NO: 92676 - DNA, 197 bp, Glycine max
  unsure (1)..(197): unsure at all n locations
tactgctacggacagggtaattcaaaaatgtcctatgncttaggggacatcccggcaacctatgatatgggaccggtttcgataaaactaagtagcgcctcacaagggtgggatttcatcattccgagtaaccgtttatctaataaacactcaagacctaccggatcattggaaacctttggatggctggatcgctg

SEQ ID NO: 92677 - DNA, 404 bp, Glycine max
gcatgcaagctgtgggactgaagcaacctaatacattatagagaaagagggagtgtggagaattgaaagcgcaaaacaaagaataattaaaaagagaggagaggagaccagtttattgcaaccggaaggagctggaagttcaaccgacaaaacctcgtcgttttgctgcattatctgctccgcattctccatttctctctcactcttgccttataggagttgagtttcaatttggttggaataagaaaagataagattaacaaacgggcaatctctctctgtcttctcttatcaacgacatatgataaactcacgcggagcacctcactcctcatgccatttcaaattgaaacccacgtgattattgtattagtcccttcacacaccaaacaaaacagacaaca

SEQ ID NO: 92678 - DNA, 384 bp, Glycine max
  unsure (1)..(384): unsure at all n locations
agctgcctcacagaggtccaggantgataaggcggccgaagggtctagttctgcccctgagtatgacagtcaccgctntatgagcgctgtacaccatcagcgcttcgaggccatcaagggatggtcatttctccgggagcgatgcgtccagctcagagacgacgagtatactgatttccaggaggagatatggcactggcggtggacatcactggttactctcatggccaagttcgatccacaaatattcctcgaatattatgccaatgcttggccaacagatgagggcgtgcgtgacatgaggtcctgagtaaggggtcagtggatcccgttcgatgcagatgctatcggccagctcctgtgatatccgttagtgctggaaga

SEQ ID NO: 92679 - DNA, 283 bp, Glycine max
ctggatgaaggagataccctaacctcagatggtccacgccgtggcaacgacgaacagcgcgtggtgcgtgcttacagaatggtggtggtcgaagcagaccattcgtttcttcacgtatacaacaacagcaacaacgtgagagacagccagaaattgaggcccctccacaaccttgccttgaaggacttgtgaggagaaagactatgctgaacatgcggtaacagaagagaccacaggctccattcaaagcttgactaattagatgggacatcatctacacaat

SEQ ID NO: 92680 - DNA, 488 bp, Glycine max
  unsure (1)..(488): unsure at all n locations
gtgtccagcaacaacgatgtttgtgcggccttgttggtacttttcttaaccttcaagttggacgatccgctcgacccgactaaagtgggaatagagtcaaacccattcccattgtttgctttgcagaggaggcgaactcaacgaagatcgaaagtgagggaggcatgagtggagaacgataaggaatttggttgaattgtanggactgaaagctaatcgaatttggagagagttcgggtcagtgatccacgacatctaagattgatatcacctttgcactacacgttcatgtaaattatttgtttacatattatattataatatttataatagttatttatattttttatgggtttaatacgagtgatctaatctggtaagttacgatactattattagataattacataagttaataaacagaaaccagatcgattcgttagagaataatanaaactctagcatggtatagacctacagcacattgt

SEQ ID NO: 92681 - DNA, 463 bp, Glycine max
  unsure (1)..(463): unsure at all n locations
agctttaatgggaatcatgacaatgaaagtgtgtcaaataccttagttggaaaataagtttatgatcgggtcaaggacatcttaaatatctttgggaagactccaaagaagccctcatctgagccaaacatatggaagaaaaggtcaatattctttgatcttccatactggaccgatcttgatggtagacattgtatattcatgatgcgtgtcgagaataatgcatgtgatatgtttattgacacccttccttacattaaaggcaagacataggatggtttgaagctgcggcaacaacctcggtgaaatgggtattccagagcaggntcctccgatatcacaccaacgacgaacgtatctgctccaacatggtatacatgttcactatagagaagaattagttgcattgcttctgagcttaagcccacacggactctctcaaataaaacctgtatctggcatg

SEQ ID NO: 92682 - DNA, 451 bp, Glycine max
tcttgagaaggtggatatgttaatagttggggttatcatttagatgttcttagaggatttccagtactcctgtgtgataggaaaatatataatatagtattccaattggtacttgttattttctacaaaagtagctgagatctgctagtgctaatgatatattcactttgtatagaattttgttatctatgaattggccagaagatcttaccttaagactgtcaatgtaattcggttcattggttatttatatgttcttttgtgccactgtcagtctgtgatacttgattaccttgccagcaagactatttgttcagatgatttggtagttgtctcaccagaagttggtggtgttgccagagcacgtagctttgctcaaaaattatctgatgctccttagctattgttgtaaaaggcgcatggcataatgtgctgaggatgattctctatg

SEQ ID NO: 92683 - DNA, 453 bp, Glycine max
  unsure (1)..(453): unsure at all n locations
ggatcttaagcgacctgagcatcagctctcccaattttataatatgggagaaggaagtagaataaggttcagcccncttatgcacttctctctctctcgaaatagctgaagaaaattagttccgcgaagaaaatccaagccgagactctttcgtaacggcttcgtgagtaattacgcgaagagtctcgaccgttcttcaagactcatccgtcgttcttcgtttcctcagtcttcaacgggtgaagacctcaaaccatgcctttcaattcattctatgtacccgtggtggtccacatcttgtttcatgtatgtatattctcgcttcatatactttttataccacctttcgacgtgctcaagccatgtatttaagtcatttctcgcttatctaaaataaaataaattccaccgatcgttgaattgatcatcccgtatttcggtaaaagaatccga

SEQ ID NO: 92684 - DNA, 487 bp, Glycine max
  unsure (1)..(487): unsure at all n locations
ccttaactatntattcactctctgtgtgttatngaatctctatattgattcaaacttctgtttgtgaaagtcaagagtggcttaatgttaaactatacttgggtggtattagattcagggggagtctgaaggtgtgccaagagtggcaatgagaatacttgtttgtaatcaatgttttgattagtagaactctctatagttgcgtaaagaagaactagttgtagctctatttgagtgaaccaatataaaccaagtggttctacgtctctcttaagtagtcttattaagtagtttgttagcttaccttgngaactatttctcaccaattgtttacctataaaccctcttccaaatatagatntataattactcgacaaccaaactggagtttcatcaacttgttttcttatagtggtgactctattgatatattttctaattgtgataagcttttcatttgacaagtatatattaataacacactatc

SEQ ID NO: 92685 - DNA, 437 bp, Glycine max
  unsure (1)..(437): unsure at all n locations
agcttnctcataagtcctaaatgacatttcatactatgattaactcactttaacctccaaataccactaaatccagatttggccttctgactctcaaaaactcactctttttccactcataacaccatattctcactttctaaccctaggttaactctacccttcatccctagcagttttccataagcaatntcagcacaccaacatcaaaagcatcatcataaaaaccctacaactgaatgggtaagcttaactcactcaaacataacaagtttagcatgctgtcgtcaaatctcttcacaaataactatcacagagcattaaccaagcaaaactgcccatcatatctcccaaagccccatacccacgatgatcaagtgagaaagaagtctacccanacctganattcgaggtcccacacgtagagatgcacttca

SEQ ID NO: 92686 - DNA, 459 bp, Glycine max
  unsure (1)..(459): unsure at all n locations
tctattgacagcactcatgacacatgtcctcaggcttcccttctttgtgagttattgttgcaatggcatgtcggcatggcatccctacatcaaagttgtaaaatcagcacacatgtaggttaggaatgaaaaaaaaactataaagaacacaacctgttagttgccatactccacaagtgcatgtccattcacctaaattgacctcaaccttattcccccacatgtggacctcatatctcangcccatgttatcaccacaccaaatgggagtccattgattagcaaaatggaattctttttctagtcttttatactgcactggacataatggtccaggttttccagaaagattaaccttgcgggcagccatggttctcatgatataacttctaatttcttcaagcatcgtgataataggctcgcatctatactgcagaattctggaatngaatacctcac

SEQ ID NO: 92687 - DNA, 361 bp, Glycine max
tatatatattctccctgtcgatcttgctcactgatcgtgatactgtgtatcttgaataaacttcttaatgagcgttgctcacactcatgtcgcaatatcttatatgtctgaagtcccgtgaatcactataattaatcgtttgtaatcatctttgtctggctaaatgcagtgcatacagagcactatacattctcaactggatctaccgctactttaccgagcctcactttgtccattggataagtattgattttctcttattctgtttaatggtactatattattgcttcacacttaacaaattataactactctctgattgctactatgcttgtggactttcatgcatatctcattcata

SEQ ID NO: 92688 - DNA, 432 bp, Glycine max
tcaacccttagtggagtgacacctttcacttctcctaggcgatgcttatatcatttatcttggtcatctgcaaattaagcagttcatgcactctctgctctagctacacaataaaaccaacaacccttattagtcaaaaagctaagccacacaaagaaaaaaaaaaatgtataaaatataaatctatcagcagaaaaagtaaggttgctccaatatatttggtgcatcaaatgtctttcagcatcttgttatcttgcaacaaaaatatacccttgcattggaccatatgtactatggtcctcaccccattttccgcatctaaatttgttattctattattattaacccctcaattcatagaagttatgagagcaaatgatccgacttcgatctgcatttcttgacaccatttatattttagcttaccaatat

SEQ ID NO: 92689 - DNA, 310 bp, Glycine max
agctataacattattgcatatgcatttattattttgtttataacgcgtaaggtgttcacttgtgtgtcttgtcggtcgacacaataatatataaatacaaacgttgagcataagtattgttatacgacaaaagaattgctatgacaagcattatatgaaactcttaaacaacaggttgatatggcataccccaaacactgcgaggtgaaagataaacacaagcggtcaagtatacagagcataaaatccacctacgatattgcacatgaccaaactatcagttaatgatcattgcataaggcctcaatct

SEQ ID NO: 92690 - DNA, 358 bp, Glycine max
actataatagcctatttatgccccttatattaagcgtgaacgacccacataaataatagtcagtattgaacatgacaattacactgaagagtttataactgagactatatattagtaacagttaaaaaaaatatttcaagtgctcagttctacaggaaagcactggtatcatcttatatgaggctacagaaaacgagtccatttcaatttaataagttgaagacgggtagtttctgcataataagctagtgacctccacatgccacatgttctcaacacctattcattccttgtcatcaatctaaacatatcctaaggaagatgcatacaagacatatagctgcttgatagaaataaa

SEQ ID NO: 92691 - DNA, 349 bp, Glycine max
  unsure (1)..(349): unsure at all n locations
tctgntctataagagtactatntattntcttctctttattgatctttgtgcaactccacaccacactcaactggattgtttatagaattgcaatcatgcatctaatatttgtccaacatatctctcacatatttcttttgagaaagaaaaattctaacatctgattacactacatctatacccagaaagtaatgtatcatgccaagatcagacattttgaactcatntatcatagactttgcgaattcttcaaacatgatggtacaatttccagcccatataagagcatcatcatataagcatactatgagcattcttcttttttcatcagatctaatacacaatgaat

SEQ ID NO: 92692 - DNA, 399 bp, Glycine max
agctttaaatcaacttactactggatatcattattatgtaatggtaatcgattaccagagagtaaatactctggtgacttagaaaaccttgagagaactcttttgagagacaatactgtgctatgatagatttttgaaagaacttttccatacttccgctgggaagtcctcttgatgtcctctcttgaatctttgaaattcacttctcttgaattcttgaatcttcttgatgtcttctcatgaatctcttgaaatgcacgttctcttgaattcttgcaatcttcttggattgcctctcaatgaatcttgaaactaatcttgatcttgagactggcgacataattctgaaatcattcgtttggattctttgggcttttgtcatcatcgaactacttggct

SEQ ID NO: 92693 - DNA, 437 bp, Glycine max
  unsure (1)..(437): unsure at all n locations
cgtgacagctttaacataagttgaatagtgatatctttataaagaagctcggtntgacaagatttataaagcttactgaaagagcttataaattataagaacgccatgatactttcatatgcttataattaaaaagagcttctacataaatatgtaccaaaaaataaaaccctctaaataaatggtgatcgatggttacctgaactgagacgtgtgaagaagcttggagttaatagactggggagaaacataggcaaagagcgaagaatccagtggatattctgatagattcagtcttcttttctttatagccacaactacagcttgagctaaacttgttagtggagctggaccagttgctttaacattcacgtaataatggctttccgtgtacgagagtgtgcaagagattagcattaaagccgcacgaattctca

SEQ ID NO: 92694 - DNA, 155 bp, Glycine max
gcttaacctctagtgcccgtttctgcctcaaatcgtgaaagattagcattttctggatcgtgaagtgcgtggctacgagtgggactctcaaaatacaagtttgggtggacttcttgctctcttaaatttcgtgggtattgtgttttgggagatat

SEQ ID NO: 92695 - DNA, 249 bp, Glycine max
  unsure (1)..(249): unsure at all n locations
cacccgtcgtaatcctcatcacaattctcttttttctccaacggcatgataaaagggcctatccgtcaccctgcttccattaacattctcaaaatcaaccacggagtttgaacctgaaaccaacccaccaacaacaactaccatgtagaatcaatcataccaggaaggaagaaaaattaacatcttagagaacnacaacagtttaaactgacaaaccactttaagttccataaaaaaaaagccaatggt

SEQ ID NO: 92696 - DNA, 487 bp, Glycine max
  unsure (1)..(487): unsure at all n locations
tatatatatatatatatataagggtggatgaaataatggaattaggagatattagaatggttggcaaaaagtgaaggatctggattatttgcatacgcaatctggtctggccaggaagattccatataaatgaatggttcaaaagaaagaattcactcgaatgagtcacacttttaattttaatgaacatgatatcagaaaggcgaaaataaaaaatacaactgaacangagactacacaagagaaaactacattattattaacttatatcagccaaaatggccataaacaagatgtgttctcttttagcataaaattgcacgtacaaaccattatgctgatgtcttttcatttgacttcctattttaaattatcctggtctcactataagcagtgttctgccaagtggtttctttacagaagtatgggtacagtagtcgtcatacgaagaatgattataatgatcttttgattcatggtggactat

SEQ ID NO: 92697 - DNA, 306 bp, Glycine max
tacattattgaacttttggctgaatttatgcaacatatgtatatatattttacgattcccatatggccctatcaaagctgattgcaacctgaagggtggacacttcctactttatcggtgccgcttatgttcatgagcattatgtgagaccttactatgggacgccccagtccatgatcatatggtacggtccaaggaaagacgatgcccttggtcagcgagatgatatccgactgctgcaagaaatcattctagagaagggacagagcatttggaatatattaaagggatttctatttgattata

SEQ ID NO: 92698 - DNA, 372 bp, Glycine max
  unsure (1)..(372): unsure at all n locations
cgtacttgttcttctntnttctatatgatggtatttgtggtttgattaggtctatggagtgtttanggggctccaaccgagttaagaattgccttccttaaccctttcactaccttaatttattttaaaaaaacctaatgtgatttcacgaccatgccatcaacgtaggtgatgcaatcctaccccccaactccccaagggttttagatagaagactccaaagaagttcgggctagagatgcttgagaaggccctacggttcttatgagccttacggtatatattgggcccatgggctaagtatgagcccacttatctttgacatatttaattaggattacattattcttgggcttcgatttatggttctta

SEQ ID NO: 92699 - DNA, 385 bp, Glycine max
  unsure (1)..(385): unsure at all n locations
atgccattttgctttaagagtagtgtcccattggtaaaattaactctccaaacgtttgccttcgcaggaatggcccctaggaagcttgcctcatagaggtccaggaaggacaaggcggccgaaggaactagttccgctccggagtacgactgtcaccgctttaggagcgctgtacaccagcagcgcttcgaagccatcaagggatggtcgtttctccgggagcgacgcgtccagctcatggacgacgagtatactgtatttcaggaggaaatatggcgccggcggtgggcaccactggttactcctatggccaagtttgatccanaaatagtccttgatgtttatgccaatgcttggtcaacagaggaaggcgtgcgtgacatga

SEQ ID NO: 92700 - DNA, 370 bp, Glycine max
  unsure (1)..(370): unsure at all n locations
tggagcttcaatggagaatgaagaatattagaatgttaacgtgagggagagagagggctgtctgaaatttctgttttgctgagtgaggagagagaaaagctttttggtcttaaataaaaggttttcctctttttctattattttattcaagctctgccacatgtccctatttgattggagcaaaaaggtcccactttctctttttgactgtgacccatactcagtcacaaaagtgagaaaaatctgaccttngaaacgctaaaatcctgcctcggtttgcgtgccgtttctctgattccagtttctcgcgtttctctgcgtccgccggggccagttttcgaaagcatgcaatatatatatcaaaacgctc

SEQ ID NO: 92701 - DNA, 391 bp, Glycine max
agcttgagatgaggaagtgtagaagggtgaaatcttctgcttttattcgttgaccacagagtggtacctggagatatgtcgcgggggtcaagagaccttggggacgtcaggtggggtgctattgcccaaaaccaagcttgaccaatcccgacccaacccgggcatagtcagtcagtgagaacctgtgaagtacctaaacaggcgagctcctggcagtcaacagataaaaggaacaaagaccacaaagcaaggaggcttgtgtggtggctgaccagctgtgaatcttgtgtgatatatgggatatggcctctggtaatcgattaccaagggtgggtaatcgattacaaggcttaaaaatgaagacaggaggctaagatggtctctggtaatc

SEQ ID NO: 92702 - DNA, 393 bp, Glycine max
  unsure (1)..(393): unsure at all n locations
ggctgctgttctcgtagttcctgtgagccctggggtttttggagtgaggnggaagagtttcgggtgaagaaaacgttccccctccacccctttatattttcgtacaggggttgctcttctttgctagctaacctgtacccttntttttttttaggggtgcattaaccatgtctcccccctcttatgggttagcgttttgcctaatttgagcctacttaagttagaattaggtgtcgattacttatttaaaacaaacaatagtaaaagaaactgcgaacgcataggatactgggctgccttgcagcgacgttctctgcttgtttagcgccgggaaggggtggcgctatgtcagtcacaatcctatactatattcgcttccattcctagtacctg

SEQ ID NO: 92703 - DNA, 313 bp, Glycine max
atcacctgtggtactatgaggtggtcgagcgatggttcacaacaagtgtggcacatccacaaatgacgtataaacccaccatcccctgttgtcctcctccaactgagctcacgcactcttctcgtagcccatagcctccgttcctctcaacgccgggtccccatcaaagctcccaagcttcccaacatacaggtaatgcaacatccactcttcacaaactaacaaaccaggcaaaacagagcataggcagaaaactctgcccaaaacccaaaccaaaatcacagctctctctcacttaaagaccccagcaaca

SEQ ID NO: 92704 - DNA, 320 bp, Glycine max
aatattctacatctttttgatacactcacataatgtgttgatatctactggcgagaaaaagaaaagaatcttgattctaacacttgtgttctgatgatgagaacatttgataacaagataatttatcattcatggtattgccacatcaaatgacataactaaccttgacagacctcatattatcaatatctagctctgatcccatactattaataacaaatataaaatctatctgatactgaaacaatacattacatcatcgtaatgataactttataatacctcgagttaggacacggtatataatatgtaatcagata

SEQ ID NO: 92705 - DNA, 285 bp, Glycine max
catcaacacaaactttactggagttatggccgtaatatcgaagccgaatgaagtgaactcgagccactcagctatttatatttttactcggatgtctgatcgagccctgcaatataacgagacgctcgaaatcgaatgttgaacctctgagcgaactcaaacgacaataattttatactcggatgtgtgatgagacctgcaaataacgagacgctcgaaaatgaatgttgaagcgctgagccaattgcaacaacaataactttatactctgatgtctgattgagg

SEQ ID NO: 92706 - DNA, 313 bp, Glycine max
ctccattcactcctccactagcctaatgaatcgaatgaccaaccgctagagtccttatgagccaccctctctccctcttcacagagacaataaaggactaaccgcctactcctctctctgacacttcacttcccagtaaacgaaagaactcaaaggactaacctccagagataccacttcgtcccccttacaaagatcaacaggactaaccgctaatgaatattggtcctaacacataggagggtacatccatctgtggcacaccgcagagggtacatctcttcgcggaccagttcaagcggacgggacaccc

SEQ ID NO: 92707 - DNA, 428 bp, Glycine max
tagcttactataatacaatgcatatcctcaatattaggcacaaatagagacaccatcatctgcatgttcttctttacggtgtcatagttttcatctctcgttttaagaatatctacgaatgttttactttctgggaccagtcttagagccacctgcaattccatatataatgcaaacttcttggccactatgctaaattgtgctacacttatttgaacgtcagatattcatgaggtcaagaatgtggtgcaaaagtgggccactatcagtggtcgtactatataggttaattggcatgcaaattcttcaacaaccattgcatggattaacaatagttgacaaaaacaatgagtgggtgtacctttgaagaaccgatgaagtccatcctgcctccgttgtaagtacatcataacctctacactactgct

SEQ ID NO: 92708 - DNA, 270 bp, Glycine max
tctagactcatgataaagtctatacgcaataatcaagattcacggttcattatctcaataatcaagtattatggctcaagatctcaacaatcaagattcaaggctcaagatctcaagtatcatgatcaagattcatgactcactatacaagaatctacagaaggcttattcaacacaactataataagcttttctcaacaactgaatagcccatgatttttctcaaaacatgttaaccaaagagctcttactctctggtaaccgattacc

SEQ ID NO: 92709 - DNA, 244 bp, Glycine max
cctatggtcagaaagcgagaacggggcgtatgaggggaaataaaacagtgaggctttgagagctggaacgctaaatctcggattctgtggcaaatgaacgctgaaatgggttaaacctagcttgaaatgtcattaaggacatgtgagacaggataggctgagctatagagaaaaacatatgaccaaagtgaaccatgagccatttctagggcgaaattgggtggtgaggagtcaaattttgatt

SEQ ID NO: 92710 - DNA, 474 bp, Glycine max
ctacttggatatggatggacccatagggaacaaatctcggtcgtcctaacaaatcttcggaggatccatctatcactgatagtctgtctggtctacgtgatttttataagttaacaggttaccataattgtatctctcattacttgggagaatctctattggaattaaatatatgttcttagaagcttccctattgggcattatatccaaagttcctttctctgtatcacattgataaagatcaaagagtcttcaaagttaagcttattgatattgcaaccacaaataatttactggtcagatattcaatgatacaatcattgcctatagtaacatcttataattaactattcgtgctttataagtctgtttgtagaaccttcttgagattctgagtagttttaatggataccaaatttgatcgattgtcctcatggaccactcctctgcaaaaaattatgtctttttaattga

SEQ ID NO: 92711 - DNA, 163 bp, Glycine max
ctcaacttagatagtcaccaattactttgactcgccgatctatgagctgtataatcgagacgctctaatggtaatggagctcaataacgttgtactgcatacttcttctcaatgtccattggtacgactcacatcagtacccctaaactttacggacgcttta

SEQ ID NO: 92712 - DNA, 376 bp, Glycine max
gaaaattctcaagaacttctctggatgttcttttgaagctcctaggttaaaatagtagcatgtgaacacttgttgaactttgatgaatgaaagtcttgtgagacacaactcaatgttcaacttctctccctcttttaccccttcaattttgtgctcccccctttctctttctctgtgtatttcttttcctccattgaagcatcctctccaagcttcttatccaaggcacattcttggtggtgaagctccttcttccaaggcttattctctagtggttggcgcctcctctcacctcttctcctttgtcttccattgcacctccatgggggaaaatcaccattgaaggacctcattgaacctctaagatccagccttc

SEQ ID NO: 92713 - DNA, 245 bp, Glycine max
  unsure (1)..(245): unsure at all n locations
atcaaaacanacatctaatcattcagtctactcaaatcatacagttgctcattcaagtcattcataaacactcatttcatacaaaacaatccattgcatatcatattcaactagttcactggtcaaacaagcatcttcgtcaatcaatcaactcaaagtactgaaatggtctaagactggaantacaaccactaaatattaaaccgaactaaaaagaacctaattaaatggtaactaaatggtca

SEQ ID NO: 92714 - DNA, 371 bp, Glycine max
tatgtaatattccaaatcttgaatatgaatttatcgctttgacgcatgtattactctcttttgttccatccctaactgtctttatataatggagaacaattatttcatactgaaacaggaaagggggatggatatatattatcacgttacatgatataatagataatgagagataagatagagacataattaatatattatgacggtatgataaggtggcatacaatctaagtgagcaataaccacgaacccttactacaatatgccatgtccctaatggtcggctattggaaaatcactctctaatctctacacatacctgacttctttaaaatatcccatagatgttcaatctacgagttctatatatg

SEQ ID NO: 92715 - DNA, 382 bp, Glycine max
aaacttcctgcttttattgtttaccacagagtgtgacctggagatatgtcgcggtggtcaggagaccttggtgacgtcaggtggggtgctattgcccaaaaccaatcttgaccaatcccgacccaacccgggcatagtcggtcagtgagaacctgtgatgtacctaagcaggcgagctccttgcagtcaacagataataggataacaagaccacaaagctaggaggcttgtggtggctggccagctgtgaatcttgcataatatgtggattgtggcctctggtaatcgattaccaagggtgggtaatcgattacaatgcttaatattgaagacaggaggctaagatggtctctggtaatcgattactaaggggagtaatcga

SEQ ID NO: 92716 - DNA, 302 bp, Glycine max
cctagtcatgtattggcatttatcctatgtctcgcaagctggccgcatccagagatggtattatacttacacaagtcctatctatgaagccatttctacaatcttaagcaaaaataccattgaagcgtttcaccgagcacttggggggcacacttttggaacaacataaaaatgggggcactgtgcttgccccattatttaaaacacaacctaggcctaaggcatgccctaaagccctaattaaagaaacaaatcataaatttgccccaattggcctcggatcggtgcatttatgaccatcc

SEQ ID NO: 92717 - DNA, 448 bp, Glycine max
gttgagggaggcactatgaattttttcactaaaataatcaatatggtgcccaccttgtaacaatacagctccaactcccactccagtggcatcacattctagctcataagttttagacaagtcaggaagagctagaacatgttccttagtaagcttttcttagagaaaagcacaggcttgctcttgttgttcacccaggtaaatgccacattctttgtcactagctcattgagaggtgatgcaatggtagagaaattaggaacgaaccttctatagaagcttgctaacccatggaagctcctaatatctcccacactgtttgaggtgggccattcttggatggcctcgatattctcatggtccactaggaccccatttctaccaactacaaacccttagaaaactatgatatctacacatgaggtacacttctctatatttgcataga

SEQ ID NO: 92718 - DNA, 246 bp, Glycine max
  unsure (1)..(246): unsure at all n locations
aacaactgacatggtggatatgtatatgngtgcgcctatagaaagaaattatccttagagatctaataataatatttatctatatggtgcctaattaaagtaattatctctagggaactactcataatatatatgtcatcgtagtgtgcctaattaaataaactatctgtaagacgctatgaataagatggtggagtctataacttatgacatttcgacattcctacctactttatggtattagag

SEQ ID NO: 92719 - DNA, 364 bp, Glycine max
  unsure (1)..(364): unsure at all n locations
agcttttctataancactaatacgagaagattattatataacaagagagcttctccataagctaatgagtagaagctttctcatattacttctccaaaagctaatgtttaacctatgcataaactagctttaggttatgaactaggtttaagtttagtttatgaactaggtttatttagcttgactctgtttcgaggggggtggcttctacgaatatagttggttgacaagagatacatgtgacagttaaaaaagcagaaacgagagagaggagtcttaatacagattaagaacttngggatattaaaggttcagtaccctatgagttaggtggcatgaagaatataaattatagtcatgtgaa

SEQ ID NO: 92720 - DNA, 430 bp, Glycine max
  unsure (1)..(430): unsure at all n locations
actatgacactcagcttctgtttcaatttgagcatctcgattgatactttacttcntcttcttccgagtgaaaagttattgtcgttcgaatatgctacgagcttcgtgtttaaagttcgagcttcttgctatattacgcgactcaatggaacttccgagtgaaatgatattgtcgttagaatttgcttcgatcttcgattttaaatttcgagcgtcttattatgttacgagactcattcagacttccgagtgtaaagttattgtcgttcgaatttgctacaagcttcgattttaaatttcgagcttcacgatatattacgcgactcaatctgactttcgagtgatatgtaatcttcgttagaatttggtacgatcttcgatttaaataatgagcgtctcgatatttacaggactcaatcgactttcatgt

SEQ ID NO: 92721 - DNA, 366 bp, Glycine max
ctcaactcacattcttgagaagttgccttgagaagctcacttgagatgcttcctttggaagattcctagagaagctggagcttatctacacacccctctaatagctaacgtcactctctttgagatgaatagctatagtttaactacacacaccccctataatagctaagctcagccccatgtcaaaagacatgaatatacaaaaaagttcctactacaaagactactcaaaatgccttgaaatacaatgctaaaaccttatactactagaatggccaaaatacaatgcccaaaagaaggaataacctattctaatatttacatagaagagtggacccaaccttggcccatgggctcagaaatcta

SEQ ID NO: 92722 - DNA, 408 bp, Glycine max
ctgatccaaatatgtttgaagttttagcattactgaaagcaacctctgcatcagtacacttcttaaaaaccactctttttttgctgctccctctatcaacttctgtttcagattcatttagaggtccaaatcgcctaaaaatcttatttaggtgcatttctgagggaacagaatccagctcagcaaagttcaacacaagctcagccggagaattctcatctgcacaaacaaaaggcttttcaggaaccacaacaagattgctgtctgaacattgtttcctggaataggacctacgagtataaactataataggtttttctggctcagcaggggcatgctgatagtctcttctgttgcttctccgcggcagcttttttcagaaccactctggatgcccttgtcagtcca

SEQ ID NO: 92723 - DNA, 466 bp, Glycine max
  unsure (1)..(466): unsure at all n locations
cctcganagttngttgattgttgatccgtatattaactacccctcattgagccaagtcttacttggaaaatatggaattatgccttcaaatgatatgcaattgtatcgagctaagagaaagatgctagaaacaaataatggtatacattttgtatcatacaatgatttgccaccatggatagttgtttttagacatagcaataaaggaagtatattgaaactatgtatggagtctaaggtgtctaagaacccccaatttaagaggatttttgtctgcatgaatacaatgaaaaaggtctttgtaagagggtgtatgccatggtttggtattgatggatgccacttaaaaggtccttttggaggtaacttaatttttgttattcaatagatgtaaacaggaggatgttccctattgttgtgcagtggtgagatagnaataaaaacaatggaggatttgtgatatact

SEQ ID NO: 92724 - DNA, 134 bp, Glycine max
  unsure (1)..(134): unsure at all n locations
agctntactttttgctctagactctgcggtgtttggaacatcatgatatggcttctgaaatctctttcttgcgtcgatcacaaagagccccatccggtctgagaacctgtcaccttctgatgtaatgaaaatca

SEQ ID NO: 92725 - DNA, 437 bp, Glycine max
gatctcaacttacgatgagttctacttagtggagtgctatccaatctcatattgattgatcaactagctcacttattggattgcctttggagtaccaaattgtttgatgcatagtatctacatactactaccgcaagaggcttatatatgtggtatgaccacttgagaaaaggaatgctgaaactcactcaataagataacaaatgattaatacgttatagccgctctattaactcttcctttgattatcaatacttctgttaggaaagagcacagatgttcaaagagaactcatgatgtgtcaaataatatgtcatctaatcgaaggataaatataatttaatctaccggctttcaactggatcatccttgcggaacaacacatttatggcatgctcaattattgaagaaacccttctttccatttcaatagcatg

SEQ ID NO: 92726 - DNA, 332 bp, Glycine max
tcgaccgcgtgtatgatatccactccacatgtgtttgtatctacatgttattttccaccctataacgcagacgaggcggaaaaagcgggcagatgacttgcatttgtatcattgtcaatgctttatgctttctacgcttcactattcatgttcacacataacagaggatcgccgccacgtgagcatgaactactatctataatagatgatgtttatacaaacgatcacttcatacaaaggtactccgcacaccggaggtcaataggaaatgaagctgcatatacctccatctgatgaggcatagacacatatccttgacccagcttcagttt

SEQ ID NO: 92727 - DNA, 445 bp, Glycine max
  unsure (1)..(445): unsure at all n locations
tgatggtctaaggaacaatctcaagatgtatttctctttatcaagagaatgaatccttaagagagttctcttccaaatatgttggatgcactaaaaatcttgacaaactattaatatacagtagatgcccttctgatagatctggacatggatatgagggaaatgtttatatttatgataaggaaactactatatgttatttatgtgaataaccggacacataacatccaagtgctgaaattcacctaagactgggctgtccactgctntcaaaaactaacaaaatgggacccaaaaagatttacgtacctggcgataaaataattcctattgtatatatcttcaacctacaacaaagatacactagtcatgggatctggacaatggctgcttacgtcacatgactggagagaagtgtatcttccaatgtctgatccctatgcat

SEQ ID NO: 92728 - DNA, 300 bp, Glycine max
  unsure (1)..(300): unsure at all n locations
tgttatatgccatctctgctctaagagtaatgtcccacaaaaactaactttccaaatgtttgccttctcaagaatggcaccgtttattctcgcctcanagaggtccaggaaggacaaggcggccgaatgaactagatccgccccggagtactactgtcaccgctttaggagcgttgtacatcagcagcgcttcgaagccatcaagggatggtcgtttcttcgggagcgacgcgtccagctcagggactacgagtatactgatttccagtaggatatatggcgccggctgtgggcaccact

SEQ ID NO: 92729 - DNA, 354 bp, Glycine max
cggaccttgagcatacgatctcacactagcatgctcaaatatactcagtataagaggcttcaggaaggttgatctattctttacaccatgaggcgaccatgtggatggatcgtgttgttctcaccttgaactggagttaataacatccccgcttggtatccatagcctaagcgatggcggacacctactcctccctagaagagagatatgggctcctcggctattgccagcatatgatagacttaatggcccacataattataaatcgctaggatacttgtatgggctctctaacactgactagatacaactattttttgaaataaaagaattggttccatgttctactctcaa

SEQ ID NO: 92730 - DNA, 432 bp, Glycine max
tctctgtgcgcgagctaccgggtcgatgtcctcatcattgtgcatgcacacacacggacatattcctttgaggttttcttattgtcatcctaaggcttgtctgtgcttctttagtacctccactagtctcttttcttactctttgtgcaatgtgctactaatgatggctagtgtctcatccttgccctctaaatagacatatttaagatgcacaggtaacggctctaattccacaataggtttttatttaatcaaagttcttggatcctctattttattttccagcacttcctttaaggaatctaggtgctggatgcattccccagctctccttatgctccgtgtagtgttttcctacattggtaaagcagctctatcctgcggtgtatgatcgggatttttcttatatactcctaatattccccctgacaa

SEQ ID NO: 92731 - DNA, 323 bp, Glycine max
tgacacttttaccaggcctaaccgagtttgcacccactgattatgcatactcaagcctcaacgcaggaacattaaactccataaactctctttaccaaatgcagctgatacaattccacattctccccactctctacaccatcttacagttccaaaccgctagtaaccccttgcacacgcaaactggaaacagtgatgatggagagcatcctttaaatgtgaccacctcaaggaaccaagcgaatgtaacaactggggtggttgatacaacagtgtccaatactatctacagtgatactcatctctcacagatacaagtggat

SEQ ID NO: 92732 - DNA, 481 bp, Glycine max
  unsure (1)..(481): unsure at all n locations
taagcatgacacttcanatatatgtgtatcaatattttgttagtttgagtaaaactaagtctaatttactcaaatacaaatttaagtttgcatcttgtggaggtaaaaaatatgattaaaagagattttttcttataaaaattaattctcatcaaaattggtaaatactctacactattctcatggtagcaattntttaattaaattcgacataaactctggtgtttgagatgaaaatgtagtgtaatagagatattcaatattaaggtctgtagcaaaaaaaaaaagtccagcctcgatctcgtactcatttacaccactcataatctcaagttgaaaaataattaaggcatgtcattcttatagtttaagataagatatctttgtcgcaaaaatattaatcaagagtcggttgaaatttcaaatgaatttatacttcgtggccgatgccaattaattatacacaatccaccatatcatc

SEQ ID NO: 92733 - DNA, 400 bp, Glycine max
tctaatgtatgagccatataattgtgcccatttatcttagcaattcttgctctcttaccactactaggctctacactcagtcccggctgcgcaatatatttactactaattatcttaatataattggatgaggtaccgccactatctcctctaatctaaaaggaaatttattttcataaaaatcaacatcatctgagtccacgatcactgttgcgtgtatgacatataacctatactctttgctattaatcgcataaccaatgaacacacattcatacgctctacttgcaagcttaaccctattatggtctcggatccttacatacgcctaacatccccaagttctcaaataagacagacttgattgtcgtatccttactatcctcacggagatgtctcg

SEQ ID NO: 92734 - DNA, 433 bp, Glycine max
  unsure (1)..(433): unsure at all n locations
agcttggagaggatgcttcaatgcacganatttttatatagggaaagagagagttgggagcacaaaattgaaggaggaaaacggggagagaagttgaactttgagttgtgtctcacaagactcccattcatcaaagttacaacaagtgttacacatgcttctatttatagactaggtagcttccttgagaagctttcttgagaaaacttgcttgagaagctagagcttatctacacacacccctataataactaagcttacctccttgagaagcttccttaagaaacttccttgagaagcttccttgagaagattcctagagaagctagagcttagctacacacacctctctaatagctaagctcaccttcttgagatgagacactagagctgagctacacacccctcatatagctaagctaccctatgcaaa

SEQ ID NO: 92735 - DNA, 253 bp, Glycine max
gaaccactctctctcacattaaagttctaccaacacatgtatggggcgtgtacatatatatgtcttatcacgcgtatgagaatggttctatagtacccttttgagatcctatccatagttatccatatcgatgaaccacttttgtgcgcaagagctactcatattttatatactactcatacgtatatcttcatttgacataacatctcctacaatgtcaatggcgttttagatactcttatatgtataatat

SEQ ID NO: 92736 - DNA, 448 bp, Glycine max
  unsure (1)..(448): unsure at all n locations
tgagcttgaataaaatgccttgctttaatgtatataggtaagataatggccgatgctatgtgcacccaccattattgctactgcacccagcatattatgtttatggacaaaaatacccccttggtaatattttaaaacaaatgtgcagcgcccctgatttctcttcttcttctctcacacgactgtgcacccagcgcctccctatattcttttctcacgcgactcttcttcttgacctcttcataggccactctgcttcttcttgtgtcattgacttcttcttcatcctcattagtctctgcgtagtgctttggagcattgcatcgacgacattgaagacgtgaattgtgctgtgctccaccgtctacgtcgatgtaagcctattctcccatcggtctggttcttgctctttnttggtttgtcatgtgttcaagttgatccacatacg

SEQ ID NO: 92737 - DNA, 270 bp, Glycine max
atgcataaaaattactctggcaatgcatgacatgtaaactaaatactttggaatgccatgtgaaagaataataatgcatgtacctgaacgagatatgtaagcattgagatcctgaatggcacatgaacctccttctcggctaaggggaatgtaacttcactcatgatgaataactcgtggtggttgcctggatacagatgaaagagagcgttaactatgtgaaatcaagtaaccacaagtgagaataaaagcaccacgacgttgcatact

SEQ ID NO: 92738 - DNA, 370 bp, Glycine max
cagatgaagatgaatctgtggccaccttttggactcctctaaggacaatagcatcatttcttgcactgaattgttgggagttggaagccatcttctcaatcaaattcctagcctcagcatgagtcatatcaccaagggctccaccactggtagcatcaatcacactcctctccatgttgctaagtccctcattgaaatactgcagaacgagttgcttataaatctggtggtgaggacagcttgcacactatttcttgaatctttaccagtactcatacaagctctctacactaagttgcctgatgcctgaaatgtcttttctgatggcagcggtcctacatgaagggaagaattttttctagaacaccct

SEQ ID NO: 92739 - DNA, 445 bp, Glycine max
  unsure (1)..(445): unsure at all n locations
agcttcatggtgaatcaaaggtgattcaaatgagttgtgatgataacaatcatgataacaaaagatgatgacaaaggtgatgacaaaaagctcatagatcaatcaaagaacaactcatgtgaatcaaagaacaactcaagtgaatcaagacaaattcatgagttcaagataagaattaagaagaattcaagactcaagaagatagtttagagtctagaatcaagattcaaggatcaagatctcaagaatcangattcaaggttcaagatctcaagaatcaagatcaagattcaagactcaagattctagaatcaagagaaggctcaatcaagataagtatgaaaagtttttctacaaattgaatgcacatgatgttcttaaacatgttaccaagagtattactttctggaatcgttaccgattggtgtatcgataccagttgcaa

SEQ ID NO: 92740 - DNA, 466 bp, Glycine max
actccgttgaagactgaagaattatgtttaacgaatgaagaacgtcgaagaacgggtgaaacctttgcgagatttctcacggtaaacgttacggaaacatctattatgcgcctcggcttagatatgcttcacggaaacaagttttccaagcaaattctaatgagagagaagtgcctaaggggctgaaccccttccttcttcactttcttccctatgtatagcaaaatatgggatgtggatgtcgcccatctcgcccaggcgagccaggttgcttcctccagaagcaacagccttctggaggaatattctggagggcccaagtgggccttggggtatttgcaccccattttactaagacactccctgtgcttttatggtgttctttatctgtaagctaccgaactactaagtttgatcgatcttgtcgcttccgattgtaccgaacctgtgatgaataattatcttt

SEQ ID NO: 92741 - DNA, 331 bp, Glycine max
  unsure (1)..(331): unsure at all n locations
agcttcnatcttccaccaccgttcttaccattatcttanaatttctattctaatattattagtactttgattttagccttgtattttggctatattattatggcaattgaacaatttactattaccttatctgcatggtatgtgtgaacaaatattaagtatgttatttgactatgcggattttatagctaatctattcatgattgttgcttcatggctcttgcttcatgatttggttgataattttccatggatgttgtatggatgcttagttatatgtgaatacttcaaagttgatacgcacttttgcttttgttgatgcaaaggggat

SEQ ID NO: 92742 - DNA, 426 bp, Glycine max
  unsure (1)..(426): unsure at all n locations
aaatgatgatggcgcttaacgcatccttctccgctaagctcaactagatagctcatcttacagaatgaatctggggcttagcgcatgatggcgtgcctagcgcaactataataaactttcacagagaggaagtggcgcttagcacatcattcatgctaatgccactgcttaaggtgcaacttacagtgaagatgttatgcttatcgcagcgatgtgcgcttagctgaaccattcagccaatcaatcagggttctttgcgcttagtgcgagcatgctccgctcagctcatgaagagatggcgcttantgcaatgttcgccataacgaataagcaatctgaaaatttttaatgcatttctgcttatctctccacactaattttaacatcccttttgttcattctaacaagctggatcaatctcatcac

SEQ ID NO: 92743 - DNA, 475 bp, Glycine max
  unsure (1)..(475): unsure at all n locations
agctngaaacaaggttttaaaanatggagtgtatccttggtttttttcccaatgtcaaggtctttgaaccataaacacaacataatcgcaaccacaaccacaatttaaaaccttgaactgaagctctaccagtcaaagaaaccaaacgatttcaaacaaacaaatgcaatcattatgggcaaaagggttgttatgtaggctccattatagatncaaatcacattgaaataatgatgtttaaaaaaaacaaaattccgataagaacatcaatggatctcagcagaatatggttatcttcaaattctgtaggaaatttcagatagataacgcagtttaaaattaacatcaccgatccattaaccctatcaactaagagaatgcacaaaagaataattaatataatcaattctttttcgtgtgaatcgagtaaaagctgaaaatttagaagaataaatagtgagagattaagaaagac

SEQ ID NO: 92744 - DNA, 400 bp, Glycine max
gcttgtaagataaatttattgagcttgttatctaatcaaaatgaaatctatccttcatctgggctctgtaacaaaagacgaataaccacgctgctatgatatcaccttaatgtggtgtcctggactgctatgatatcagcctgttgtgaaaatcagaactacctggatgcccaccagttcttcacccaattgaataagaaaattgtgaacctactttattacattttacacttctttggcatggccggcccgcctgttaaaattgggaagagatcctgcttttttctggctgcagaataggttaatttggttggggagtccttaaaacccagacctggtctcggatgtgaagaaaattttctgtctaaacttggcaaatgccttactcttccccactact

SEQ ID NO: 92745 - DNA, 425 bp, Glycine max
  unsure (1)..(425): unsure at all n locations
ataatagggggagaagtgaagtatattatggtttatcncccttangcacttctgtctctttcgaatttgcttagataaattgctctcgtgaagaaaatccaatccgaggcacttccgtaacgattccgtgagtgatttctcgaaggttttcgaccgttcttccacgttcttcatcgttcttcagtcttcaacgggtaagtacctcaaaccaagctttgtaattcattctatgtacccgtggtggtccacatttggtttcatgtattgttattctcgttttcatttactttttatacccgcgtttgacgtgcttaagccatttatttaagtcatttctcgcttaatctaaaaataaaataaatttccaccgatcgcttgaattggatcatcacgtaactttggttgaaatgaattccgaccgatcg

SEQ ID NO: 92746 - DNA, 429 bp, Glycine max
  unsure (1)..(429): unsure at all n locations
agctttgcatgctggaatcagttattctatctccgacaaccaatgggtgagtcccgtccaggtagtcccgaagaaaaccggcctcaccgtgataaaaaatgagaaggaagagctgtttcctactcnggtgcagaacagatggagagtctgcatcgactataggaggctgaaccaggttaccaaaaaggaccatattcccctgccattcattgaccagatgcttgaacgcctagcaggtaaatctcactactgtttccttgatggtatttctggttatatgcaaatcactattgctcctgaggatcaggaaaagaacacatgcacttgccccttcggcactgttgcctataggaggatgcctttcggcctgtgcaatgcccctggtacctttcatcagtgcatgatcaatatcgtcggagactttttaga

SEQ ID NO: 92747 - DNA, 449 bp, Glycine max
  unsure (1)..(449): unsure at all n locations
ctgttcaattgctccatattactgcacagaatggcttaggtctgtatggtggtcggctgaggagcataaaccatagagtctngcgacaggtacaaatttcggatttattgccacgtgggttaccaggttaaccaaggcatctagtttaccctcaagcttcttagtttcagctgatgaagatgaattcatggctactttatgcactcctctaatgacaatagcatcatttctggcactaaattgttgggagttggaagccatcttctcaattaaattcctggcttcagcaggggtcatgtctccaagggctccaccactggcagcatctatcatacttctttccatgttactgagtccttcataaaaatattggagaagaagctgctcagagaactctggtggtgagggcaactagcgcatagatttttaaatctctccaagtattatat

SEQ ID NO: 92748 - DNA, 278 bp, Glycine max
agctctcacaatattcaaacaattctattccatctatcatgaaactaccttaaacaaagagaaacagagtggaggccgaaatctttgcacaagattcattcaaattcacagagttttcctaccctcatacctcagcgaaatactcttctgtccgattcagtaaccattggatcggcttgaaaatttaactggggggtcctaatacagaaaaccataatttgaccgttgggatctgctaaaaaatgtcgtaaacataatatatactacctttcctgtga

SEQ ID NO: 92749 - DNA, 448 bp, Glycine max
  unsure (1)..(448): unsure at all n locations
tctccctcaattttctattatagggggagtattgaagtatatatatggttagccctcctggtaattcagaatcacttaatattagtgagaaaaatcggtttcttgaagaaaatccaagccgaggcgcttctgtaacgtttccgtaatgtttccgtgggtgatttcgcgaaggttttcgaccgttcttcgacgttcttcattcgttcttcgccgttcttcggtcttcaaccggtaagttccctagatcgaacttttcaattcattctatgcacccttagtggtcctcgttgttttntcgtgctttcatttacatttcatttacttttcgtaccccctgttgacatgcttaagccatttatttaagttatttctcgcttaatctataaataatataacattccaccgattgtatgaactagatcatccgttaatttcggttaaatgaatt

SEQ ID NO: 92750 - DNA, 203 bp, Glycine max
  unsure (1)..(203): unsure at all n locations
agcttcttgatatattatgcgcctgaatcgttatccgttctaanagtaatgacaatttgaatntctcgagagctgtgcgtntgtcaatttcgagcctctccatatattatgcgactgaatcggacttccgtgcgactagtcatgaccactctgaatatctcgagagcttccgttgatgtattacaagctttccgatgcattat

SEQ ID NO: 92751 - DNA, 306 bp, Glycine max
gcttctcgatatatatgcgcctgaatcggacttgcgtgtgatatgttatgaccattgtaatttctctagagctgtcgatgttgaacttcgagcatctagatatattatgcgcctgaatcggacatctttgtgacaagttatgactcattgaatatatcgacaccatacgttgttcaatctctagcgtctcgatttaatatgcacctgaatctgacttctgcgtgacatgttatgaacatctgaattccgcgtaccatccggtggtcaatttcaagcctctctatatatcatgtggctgaatcagac

SEQ ID NO: 92752 - DNA, 482 bp, Glycine max
  unsure (1)..(482): unsure at all n locations
ggacctcaagcacctgagctgcagcttgaaggatgcttcatggaggaaaagattatggagagaaagagagaggggggagcacgaaattgaatgaagaaataaagggagagaagttgaactttgagttgtgtctcacaagactctcattcatcaaagttacaacaagtgttacacatgcttctatttatagactangtagcttccttgagaagctttcttgagagaacttccttgagaagcttcgttgagaaaacttccttgagaagctagagcttagctacacacacccctctcataactaagctcacctccttgagaagcttccttaagaagattcctaaagaagctagaacttagctacacatacctctctaatagctaagctcacctgcgtgagatgagaagctagatcttacctacacaccncttataatagctaagctcacccccatgacataaaacatgagaataagaaaagtcct

SEQ ID NO: 92753 - DNA, 422 bp, Glycine max
taaaactcagcttgaggattatgtggacccatcacatgtggactatgtgttggtctatcgatggtgcacaacatgtcttccacatccacaaagcgtgcataaacccaccatcccctgttgcccacctccaactgagctcacgtactcccacgtagcccatattctcgcttctctcaacaccgggtccccatcaatcctcccaagcttgcccaacatccaagtatctcaacattcaaacaacacataccatcacagccaagaaaaacagggcaaatgcagaaaactctgcccaaaacaccaaccataaatcacagcttttctcacttatagaccccagtaacaattccttcgttccagttcgctaaccgttggattgactcgacaatttactggaagtttctgtacatatcctacatttgacc

SEQ ID NO: 92754 - DNA, 415 bp, Glycine max
  unsure (1)..(415): unsure at all n locations
cccgcatccttaagtgacctgcngcatgcaatcttgtaataaggctataactgatgattgttatatcgttgctagaacttataacaatgccacctccatgtgtcaagaagaggctacccttgctgaacgctacaaataactcttcttcaaagggatagaaagcacttcttaaatttcctaacagtgttgagttctttagtttggggtaaaatgaaaaatgtgtaaatgattttgtattttactttcttcaagcaaaacaaaacatgtatagcaaattattggagcggacattctaactatatgttggattgtcacacacatgacatggcctattcaaatgcaaattgccatagaaacgattactaccttggcctatctccatacttcttacatcattcaccgtgatgtcaaacca

SEQ ID NO: 92755 - DNA, 483 bp, Glycine max
  unsure (1)..(483): unsure at all n locations
cttctatgggtggaaatgagccgagccgagccaagaattattangctggagctcggctcgagttgaatacacaaggttgaacttggctctttacgtgtcataagatttattcaaaggcttagctcatcttaataaaagccttacttggcctatgagccgtttaaaagcttgcttaaagatgtctttgaacacttatttatttcaaaatctagtgaaatactctaccaagaaaggaaacttataaattgcatacaaagacaacgattgactctaactacgatgggtaagactatttggcgtagatacaagaactcatagaatgaaatgactcattaaagtgagaatgcaaacggacgtgcgttgaggtgaaatgcgtgcatatacgatacaacctagatggagctttgatgtctatttatattctatagactctgaagaggtataaagttcttatgtacaactatactgcttttataatactac

SEQ ID NO: 92756 - DNA, 340 bp, Glycine max
ctgcagctttccaaagttttcttatcttctaaacctagtaaacttgtgctattcattcttttcatctctttcaacagttgttctggtgcatcttctcttcatctttctaaaatttgttgatcaaaactttctcttccaggaaaagttctttgttcaaaaacttgtgctattcatctttttcattcccttctccctttggcaaaaataaatttggctaggactaactgcctgaattctttttgggctctcttctccttatgcaaaagaacggaacgactaacgcgcctaaatcttttgaggctcccttattccttggcaagaattcataagagcacagctg

SEQ ID NO: 92757 - DNA, 452 bp, Glycine max
  unsure (1)..(452): unsure at all n locations
ttgaactggccaaactcatggctcaatagggtcacaatatcagtttcgtgtccaccccaagaaacatagagcgtctccccaaactgtccccaaacctggcttcattcatcaaatttgtgaagcttccactgcccanagtggacaaacttccagaaaacgcagaagccaccactgatgtttcctacgacgtcgttcagtatctcaataaagcctacgacgaattggaagaacccttgacccgttttctcgaatcttccaaagttgattggctcttctacgacttaattcccttctgggcaggaactgtggcttctaaacttggtataaagagcgcctttacagcatttgactccaccgtgatgggctccttgtcctcctcagttctatgggtaagaatcgaccggacaaactatagtattaccgtacttcgccgtgatctcttttccactccc

SEQ ID NO: 92758 - DNA, 451 bp, Glycine max
  unsure (1)..(451): unsure at all n locations
tcctntacaacanagagaagagaaaaatgaaggattgaagatatacaagtagtggggatgtctcctccacctctagaacctcacaatcactcacagactcatctcatgctctcaggatggcttcctcttctcactctgttctctaccagtcttctcacagcaaaagctntgaaaactctctggaacttggacctttctctctttagaagtctctaaacatgcaaaagctttgataatttcccaaactcccctccaaaatctgatttcaggcttaaataggtggctttgtttgtgctagcacgcttagtgcaactatggaccgctcagcgtgcattagtggatttcggcttagcgcgtgcgtttctcacttattggatggactgaagtggtgcgcttagcgggatgacccttcgctcagcgcatatgcacaactcatccttctttcagattc

SEQ ID NO: 92759 - DNA, 254 bp, Glycine max
  unsure (1)..(254): unsure at all n locations
gcgcacaaaaatgagaaaatatgagaatacttaccttgcgttgatgtcagactccaacggaggatgctcaaccttgctgtagtgataaaccccaacgacagtcaccaaccccatcggcgactatgatgatgagaagacagcggtcacaggttgctaaccatggtgatacgtcttgctggtgagggagaggagaaaggttttgtctgtganacttaacgtgcggagtgggtctttgatgactgctctcctataat

SEQ ID NO: 92760 - DNA, 470 bp, Glycine max
  unsure (1)..(470): unsure at all n locations
agcttggtttgggcaatatcaccccacctatcgtccgcaaggtcttctgaccnccgcgacatatctccaggtaccactctgtggtcaacgaataagagtaggaagtctcacccttccacacttcctcacttcaagcttgtaagattatggggtacctgtcacatgtggtacttggtggcggtcgggcgatggtgctagtcaactatccacatccacgaatcacacataaaatcaccatccccagttgcccaccttcaactgagcgtacgtactcctacgtagcccttattctcgttcctctcaacaccaggtgcccatcaatgcccccaagcttgcacaacatccaagaaaattaacatccaaacatcatgcactatcatagacaagaaaacagggcagaggcagaagactctgccctaaacacagaccaatagcacagctttccttactcacatactccagtaacattc

SEQ ID NO: 92761 - DNA, 473 bp, Glycine max
  unsure (1)..(473): unsure at all n locations
ggacccttacaagacacaccangtctaacatactgcttatccaacaactcctctaactgtttcttaagctcagttaactctataggagacatcctataaggggctatgaatatgggtccatcaccgggtactaactctatagaaaactctatctctctctcggatggtagaccagatatatcctcagggaacctttcaggaaactctctcacaacagggaggtcacacatggaaacctgtctctatttctaggttagacaagatcatgtacacttgagcatcttcttttaaagatgtcataacttggttggcagagataaacatcatatccttactacactccaaatcatcaaacaccatagttttatcaaaacagtttaacaagacatggttggaagataaccaatccatacccaggataacatcaatttggctcatagggcaacaaatcagatcaatcaagaatggtctac

SEQ ID NO: 92762 - DNA, 353 bp, Glycine max
  unsure (1)..(353): unsure at all n locations
tatctagcgtctcgatatattacggcgctctatccgacatccgagataaacgttattggcggtggattattataagagcttcccttttcaattacaagctgtcttgatatattacgggacacaatcggacaccctagttgaaagttattgtcgntggaatttgctcagagcttctatattcaattaccagcgtctcgatatattacggtactccatccgacatcccagatataagatgttgcctttgattatgttcagagctgttgttttcaatatccagcgtctggatatactacgatacacaatcggacacccgagtgaatagttattgttgtggaattgcttagagcttc

SEQ ID NO: 92763 - DNA, 424 bp, Glycine max
  unsure (1)..(424): unsure at all n locations
gatcttgcacatgagtggcctatgcatgctgttgggtaccttgtattggccttatcatgggtctgttttctcgtgtacacatggagagagaaatatgattacttaatttattttataattntgcaagttttggtgcttctggttgtagaaacaacatggtcccaagagaggttgttatatattagttggaaggaaccaatattttctgggttgtttcggcatttcaaagggacaaatggagttcaaattggccttgtgaatgctcaaattcttgacataaatggagaaccattatatgagttctgttcttcttcaaagagagaatgatagacggtgttgagtcaactttctggttcttctgtgcacagattcattatttagaatctgtattggaatctttcttgaatgcttttaatttggagct

SEQ ID NO: 92764 - DNA, 468 bp, Glycine max
ctaagcttaacatcagaccacttccagggtgctggaactacttcacatggatttgatggggcctatgcaagttgaaagccttggcggaaagaggtatgcctatgttgttgcggatgatttcttcagatttacctgtgtaaaatttatcagagagaaatcagaaacctttgaagtattcaaagagttgagtctaagacttcatagagagaaagactgtgtcatcaagagaatcatgagtgaccatggcagagaatttgaaaacagcagattcactgaattctgcacatctgaaggcatcactcatgagttctctgcagccattacaccacaacagaatgggatagttgagaggaaaaacaggaccttgcaagaggctgctcgggtcatgcttcatgccaaagaacttccctataatctctgggctgaagccatgaacacagcatgctacatccacaacagagtcacact

SEQ ID NO: 92765 - DNA, 145 bp, Glycine max
gcatgcaagcttgccaacccatggaaactactaacattttctacactgtttggtgtgggcgattctgggatggactagagtttctataggccacttggacaccatttttaccaactaccaatcctaatataaagatattatctac

SEQ ID NO: 92766 - DNA, 445 bp, Glycine max
actcagctgtttcaatcgtctgtaagggtgatgaggttctacaaattgacgattctctgggtacactatttttctaccatgtgttagttgtatgaagcttgtgtcttcttcacagatggagcattcatgatgacccttgacactgtaaccgctcagatttccatacgctggaaattattaatggacagaaaacattgccatatttaaaagtctctttgtcaaatccatcaaacactaaaaccccctcgtccacaactttctatgtcttaatcaacgaacttagaaaacatcaatgccatttctggttgattttcgcttatcatgatttcatcacaggccgatatatatagacacattatgtattttgctttgcacaccaaggcaattgtaatactatagaatgcgctgactggttgatgctaattgcttatgatatttataatgg

SEQ ID NO: 92767 - DNA, 238 bp, Glycine max
tccggacctctaaacacctgcagcatgcaagcttgctccgagctactagagcatcgtgagatgagatctcacgacaactcgaaccgagaagtgagctagaatggttgcggaacgcctccaacaacttatgcagcttgagacgctcgctacacccctgagggtgagactgacagacgccaacaggaaaaagggctcgatcttgcctcaatcagatcattcggggaatgatagggtgatg

SEQ ID NO: 92768 - DNA, 344 bp, Glycine max
  unsure (1)..(344): unsure at all n locations
ctattttatgaggatggatagattatgtcttntcgtgaccaatgacaggtagcggcagtctattacaagcccagcacgccgtctggtaatcgaatatacgatgtatgaattcattacaggcggactgtacatgagtaatcgagcacactgattgatgatcaatgagcataacctatcctatgctaccttctagaagattatctatatacatgctcaaatacatactatatgtctaagtgaactactaatgcactaaatacaatcattctatcactatatacacaagagagcataaactctatcatatgctcaagaattccaacaagatacgcgcgaataatctg

SEQ ID NO: 92769 - DNA, 180 bp, Glycine max
atcttaatcaccgccgcatcagctgagtgaattgcaccaataccttttgcacctcctccatttcatccaccccacttgaattctattctcgcattatttaaacaggtgtatattctgacaacctataggagatcatataatcaacggaatactccttctaatttcaaaataataattgtt

SEQ ID NO: 92770 - DNA, 441 bp, Glycine max
  unsure (1)..(441): unsure at all n locations
actcagcttctatccaagctcatcttggggggaagctccttctttttggcttattccctagtggatgacacctcctctcacctcttctcctttgtcttctgctgcatctccatggtggaaaatcaccattaaaggacctcattgaagctcaaagatccagcctccatagaatcctcacaagcaagtttccatcaagtggtaatcagagcacaagagcttcaagtaggtgctccttaaacctccattaattatttggtttaccttctcttccattgttagttcttcattatttctccatgtatctcctcacatgtcttgtgctaaatgttgctaacatgattctttagagtttccaccgattaaacttactatagaaggtagatttgattntctatggttcaaatttctcgttcttggtcttgaaccatgaattatgttgag

SEQ ID NO: 92771 - DNA, 256 bp, Glycine max
tacacaaatccttccatactgatcttagaacagtgacctaaacacttgatgccaaaagctcctgaggttgtattatgaatactatgcctagtaccatgcgattctgctttaaaagatggcaccatatgcacgcttcattgtcaagtccttataaattactcgtaatctcagactgaacccagtttcaacaactttcatatttagaagagcacctgaccacatgtgtctccaaatgagtacaatagtatctttcaac

SEQ ID NO: 92772 - DNA, 416 bp, Glycine max
aacaagaaatatgcgatggatcacagatgacaatcctcctaatgaaatcaaacatcaatttacacaacctatacgacaaatagatatgagattaaacatcaattgtttaatttcatggattgatcaatgagcactctatatcaaacaacaacattatttagcccacaagacactataccaattactatacctatataccaaaacatacgtataagaactatcaatactcaatgaaatgccaaaattggatcaactaactaacactaatgacatagataatagcagttatatcacgatcctacattttctatgtttcagatcaataatagagacttgtctctgtgagatcatagcatcagacctagtacttacaagtatgcagatattatacaacccacactatgtcaaccatatgt

SEQ ID NO: 92773 - DNA, 443 bp, Glycine max
  unsure (1)..(443): unsure at all n locations
aaactaagcgtggagctctctaaactctgagaaccttctttattttttcatttctatcctttgacattctcgtgtccatgactccatctgccagactatcaatgcttggntatgctttatacaaaatactatgcaatagcatgtcaatttgaacaggaagtgcctcacctgatcatcagaatgtagcagctgctctgcaacaaatagtatattattgtagtgtcctgatacanaatctataccacttctctctgcataccctgtgtagtcgataatttacacccgaagacccttgctcatgaatagtctatccacccattgccttggattggactgtgcaagggaccagaatagattctatctttcctttctatttgtggaagaagatcatatcttaataaactaattaaattagctgcacactaaccttgatttctatgtct

SEQ ID NO: 92774 - DNA, 306 bp, Glycine max
  unsure (1)..(306): unsure at all n locations
agcttcgngattgtactgctcttccttcctttgttttcattgctttgctattcttcttccttatttcctcttatttgggtgtcgctgccttcttcttattcggatgctgacttttgtttttggtaagcattttttaatgataaatacttattgtgatatatatattcatatatgaatggcaaatattttgctaattggttgtaagggtgtgcttctgttcaatcttaggacgtgaattctcttctctccatattacgggagttctctgcgcttggctagcgattactaactcggtaactttaatcg

SEQ ID NO: 92775 - DNA, 445 bp, Glycine max
  unsure (1)..(445): unsure at all n locations
cactgaagcacctcaanaggtttccttctttacggataggacatgtttnggttatgctcatcatggacatcaccacgactgccaccactttggggtattatcatcatagtgtntcatggccttttcttgtgactgttcgattgatgctgagagtattgagggtagattgtcacgtatgcactgtgataacttttgtcctagagaanacaagggaaggaaaaattgcatgcatgcaaggaagaagtcttcgtttatgagaaaaattggatgattaaaccttgaattgaaatttaaaaaaatgttggggctttgtctatatgtgtagtagtatatcagtatttaatttgtttcaattgtcaccacagacttaattcggattgtaagttaagtatctaaactggctcagttctattctagattaaaatgatcngtatctaactaatac

SEQ ID NO: 92776 - DNA, 342 bp, Glycine max
agcttgttaaagcagaatataatataactgtatgttagcgaaattaaagtgaaagtacaaggtacaagtagggaccactatgggtgcatagaatgaattgaaagatttgatttcgggaacttaccggttgaagactgaagaatgacgaagaacgaatgaagaacagtgaagaatttccacaaaatcgcttaccgaagcgttacggaagcacttcggctcgatatttcttcatgaaaacgtgttttttgcccacaatagccgaaatgcattgcttaagtggtatgaatatttgttaaacagcaccacccctcccctatttatatgaaaaaagagaggtaattg

SEQ ID NO: 92777 - DNA, 477 bp, Glycine max
  unsure (1)..(477): unsure at all n locations
cactcccgcattttatctctagcacgcattgtatgtgggtctcgtcctttgtcacgggaagccggaaggtccatatcaccttcttatattgtacacatggggcactgcgcccccaaatgcgcaagtaagaagagataatattccgggctctcgtgtccgtaaaatgcattcatatcatgcatcgcataagcatctcttcataacatcataatggacatatcctgcatttgtccgttatcatattccggcctcacattttgcatgagtcattgcatcatcatatgcgttcaacatactttntgtttgctcatacatgatccttgtattttcctctacaaaacanaaacaaaaaaaaaggggaagtacgaaaattcacgttgcattcttagttgcatatattcggtaccatgaagccaaccatgtgggatcataaacccattctacttaaaaacaaaatgatggaacatggtacctaat

SEQ ID NO: 92778 - DNA, 431 bp, Glycine max
  unsure (1)..(431): unsure at all n locations
agctttactagagcatctgcattaatttcaatgtatatattatctttctttcacatgaaagattgggagtacttattttgtagcaaagtccattaaattagaattntgcactgaataaaataacacattgggtagaatctactggtaagagtaacttgtaatctttcttctagattatattgcgagtagtgtaacgatggattctaagaagatttcatgatataaaaaaaaatgaaagacaattaaaggaaacatgtaagatttattaccctgttcagcccttaaatttttgtccgttactcttgtatataatcaacaatggaaggtaaaaaaattctttattggggacaaaagcatagtccatatattttttgtgataagaaaaatattataatattttaccaaaggatataatctcttgaattttatat

SEQ ID NO: 92779 - DNA, 460 bp, Glycine max
  unsure (1)..(460): unsure at all n locations
gaagaggcatctntgtataacanataacatcataatattaacacataattgtatgaaggaactgcatcgatgttntctagacaatcctgaatgaacaaggttatacttatattattgaaattgaccatttctacataatttaagacaagcatgaaactccagccagtgtcttaccctccagataaaccaagataagctcttaactgggaaatgctccaaggaacactctctactttntccgattctctggctgcttgctccagtaaagcacaagaagaaatatgagcatcagcagattgccccattagataaatcctattacatagtaacaaaaaaaaggaaaagataaatctcagttcaatgtctatagatatcaattacaaagatgcttatactaaatgtgatgttctatatttttaactcttttaaaaataacaaataattcaattaagatatacac

SEQ ID NO: 92780 - DNA, 426 bp, Glycine max
  unsure (1)..(426): unsure at all n locations
tagagngaagcattgaacacatgagaacaatctcgtatagttaataaacatatgtacatcacgtgctcagtgacaatattccaacctgggcatgtagcccatttttataatggagctactttaacatataggagaagggtttcatagacaataccctattacaaagcagtggggatgtctccttcgcctctatgaacctagacaataactctaggacctataatgtacctataagctaggacattcgcctgcttgctcagcctttcctttgtgctctgacacaattccaggctacttagacctatttcgcgtcagcacactctttttttatcctgtgcaaagcatgcttataaaggcttattgacctcgaaggacagcttattgccactctcatgcttaatgcgagttaatgatattttgcttatc

SEQ ID NO: 92781 - DNA, 297 bp, Glycine max
  unsure (1)..(297): unsure at all n locations
tgaactatcctaaacccagaggacagggcagaggcagaataatatgcctaaaacacattcacatattacagctttccttactcaaataccccagtaacattctcttcgttccgattcgttaaccgttggatcgacttgaaaattttactggaggttcctaatacataagtctacantttgaccgttgggatctgccttgaaatgccataacccaatattaatacctttccattaccagcaatgcacaagcatttctgctatgaacaaaatctgtgccaattaacagcaatttctgat

SEQ ID NO: 92782 - DNA, 126 bp, Glycine max
  unsure (1)..(126): unsure at all n locations
tgccgncattgacaacagcgagacatgctgtgactcactgcccatgccgccattcatactggcgggacatgctgactaggaaagatgagcatctcgccagtcctttctgcgagacacgagcccatg

SEQ ID NO: 92783 - DNA, 487 bp, Glycine max
  unsure (1)..(487): unsure at all n locations
agcttctgaagaacaatttggaaggatagaatttattctgcatgaatggngtattcattggttcggaaattaattgtagcatcctttgattgatgtgcatttccaatgaagcaaactgattttccatcataagtgtacactatggcctatcaaaatatggtttgcattactaacaaattcaaattaatatatatggaaactgagacagagaaacagttgaaagacatanacttactgtaaccatgttgccataatctatattttgcgaggaaccttgagttaagatattctcttttgactttagaaggttatgaagttgtctgatgtccccactttggttgatttaaattaccttataaaaaaaatgtactacaagtaaatatgctaatcttgaaaataagaanaatatatctaaacaaggtgtttactatagcataatatncgtttatggaagtcacagaacaagttatgagtatgttaaagtata

SEQ ID NO: 92784 - DNA, 254 bp, Glycine max
ctactggatggagattggataagaaaactggcacaatccgaattcattatgaaaagagagtacaatctaacaaaatacactaatgacttatatggaatgaggggtttaagcaggattcaatatatgggcaataaccgcttcatggggaaaaactattaataccttatgtgattttagaaactaggttttctgcgacaaacttcttatttaaagctaagctgttaaaatgagaaaaatattaatctcactgaatg

SEQ ID NO: 92785 - DNA, 411 bp, Glycine max
agcctataagaagtaataaatgcttcacgattttcattctatatgatcgaactctttgagtgagatgcctcttgagcaaatggacactggtattgatctacaaagagttagcatacaaccttctctatggcactagatctatgacgtaccttaaatcaattggctgcataatgcttacaggtcgatataatatatgatgaatataatgccacaacatgacagatgtgtgaagtcgcaaacattttctgcataatgtcgaaggtatagctccttgttgaccatctacagcccttacgcttggttgaatatgattctcttagccccttcacatgcgatgagtgtaatagccaacatggtatgcacattgtacgggagtacacttgtgccttcatagatataaatttggaacat

SEQ ID NO: 92786 - DNA, 409 bp, Glycine max
  unsure (1)..(409): unsure at all n locations
cattaagttcgcgctaccactccaaagaaaattntagagaagtgtaaaaataagtagaagtaatatttaattggaagaagtgtgtagaactaagtagttgggagaagtgtgtagaactctcccttaatgtgtgtggaatctttcttgatgtatctagaactctcccttgaagcctacaaaagggggataggttgtcatttgtaaagtatccaacgaagccaaaacaaaaacatttctcaagtaataaaaactagcctttttttaaatattctcttcttctccatttctcttaaatacttcctataacctttccttttcaacagaaactgtgcctgtgggtgggcgagaaattagatagaatattgaaaaacacaacggaaaataaatattaatcactaatctaatgatg

SEQ ID NO: 92787 - DNA, 127 bp, Glycine max
tcatgcccagcttctttatatttgagattggctctctagttaaacagaataaatgctcacatcctcagtttggcagccacatggcattataattttcagacatgcacaatattagtcaataaatctg

SEQ ID NO: 92788 - DNA, 410 bp, Glycine max
  unsure (1)..(410): unsure at all n locations
tggaaatcatgtagttattaataaattaacacccacctggacccactcaaagtagctaactgtaacgcctcctgagtttgcaaatatgtctgggaggataacaacccctttcttcttcagaatctgcaagttaggaaggtagttaacaatagtgcatntcttctttcttggttgaagaagggaaggaaagagaaaatctaaactaacctcatcagcctctgggtcagttgggtgattagctgcttccacaataaaattggccttgatttcatatgcattttcccttcaaccgtaccaaaagatggataaaattataataaaaacaaattagccttagaccttttccttattatataattcaactattgcttatatgaggagacaattactaagctaacannagaaaatga

SEQ ID NO: 92789 - DNA, 484 bp, Glycine max
  unsure (1)..(484): unsure at all n locations
atccttagagcgactgcagctgcagcttcacgctatatgttacttcgcttatatagcaagcaatttcaatcgcggattcatcaatgtcaaacaaaaaagaaatgttgaaacaattgggtaagatataatttctaatatgatgttaatttatgtatcatatatacttaaaactgttgttgctaactaattttatgcatgcaacctacactccttgcaagcatacatttgatcaataattaagataaaatttcgtcaattgagttcagccatagcaacatggattgattgcatttcanaggaaaaatggagcatggcttatgacgaagaaggacatagatatggtcacatgacaaccaacctctcagaatgtgtaaataaggtattgaaggattgtcgcaacataccgataatagctttggcgaaatcaacatatagtaggtgtcgaaatactttgtgatcgtggtcgcagcccaaacaataaatg

SEQ ID NO: 92790 - DNA, 366 bp, Glycine max
  unsure (1)..(366): unsure at all n locations
agcaacataggttgttttttttnttaatgggcgtcttgacctacgccacgcttacttgatttgaggaattagaattttattataatctctagagaaatgtctggaatgcaactttgagacgctgggagtaatttctgaaatggaagacttgtggattgtgcaaagggtagagcatnttttgggtattgttgaaagaaacataaattcaaaagatgagtgtactagttactagcgggagtgaaaatagcaaaagccgaatgataaacaccaagatgtaatcctggtgttaaagaacgcaacagatttaattgtgagtcatctacaaattgatactataaaaacataaatacttctttatatgattga

SEQ ID NO: 92791 - DNA, 486 bp, Glycine max
  unsure (1)..(486): unsure at all n locations
agcttatacttcagcatatactngctttatcttctaacttatatagtgactngagtgtcggattcctttgttttacaagtcccccctcctgtcctcttgacaaaggcacctctcaaagccgacgtgtgaactctaggagcccaattcgaccacgtccaccctgatgtgtgcttgctccagatttaggtaagtacatttggcacccatcgcggtgccatggtacaacataccatgtggtctttcgtcaactctctcttgttcatccatggctagcactcgatttggcctcagatgcaagacccttctcgaagactcccatccttatcagatagctatgaaatacaccaatactctacaacaactctaaaaccgcatcacgaagatggagcaacaccatgaggaggagttgcaaagctaaggctgacctgaccagctggggctcgtgtagatgtcctanggcgaaaacactctactacacatttctga

SEQ ID NO: 92792 - DNA, 375 bp, Glycine max
  unsure (1)..(375): unsure at all n locations
agagggctttgtagatgccgctagtatggttttatttctcccacagtgatgtggttttttgtgatggggttggagtaaggaacaccagngccaatttgaggcaattaagggttggtcgttcctcaagtagaggcgggtccagttgagggaaagggagtatgctgaagtctatgaggaaattgccaggaggaaatagactcaacttgcggcacccatggctaagtatgatccaaaaatagtcatggagttctatgctaatgcattgcccacagaggagggagtcagagacaagcgctcctgtgtgaggggccaatggatcctctttgatgaggatgccattaatcaattcccggggcatccattggtcttagagga

SEQ ID NO: 92793 - DNA, 467 bp, Glycine max
  unsure (1)..(467): unsure at all n locations
agctatagaattactacaatntgatactcaacttatattaacgtgacaaacacaaactgtccattgctgaaaattatctccctttctttatgttttgtgtactcttaagtgtgaactgttattcgggaagctacatttatttttatcagctaaaaaacatgcatgattaaaacagtgggtataataaataccataaagtgaaagatgcataggtaatgtttactgcacggatcaagctgatctgtatggttgtacggatcaatatgacccgtatgagtcatacggatcaagtgtatccgtatgtttaaattatacttacggattaagttcattcgtacaaatcatatggatcaatcatagggcaattttggattaacanaaaatgttgggtgcataagtaataaagctggtgcacctagcatcacccactcgatagcgtagcagaggtgaccctacgtcctaacact

SEQ ID NO: 92794 - DNA, 380 bp, Glycine max
  unsure (1)..(380): unsure at all n locations
agacctcaacaatancattgtatcttgtttctatggttcgggcattatgggnnggggggncggatcaagaattctactctgcgtnggctatgaagnactacatgtctctgatgtttcaaatcgaaaaggaataaacataaaagtaaaacttttatttcactattatatccaatgttccacatgaggtttttttttttttaaactcttaatattatatatgcagagatttactaaatgttgagatatggagaaaagggatttactcatgacattaagagatgtcatcgttgagagttatcaccatcgatagttattgccttcaaggttaacataactcttnttttttttttacgtttgaagtttacattgctagaatattt

SEQ ID NO: 92795 - DNA, 409 bp, Glycine max
  unsure (1)..(409): unsure at all n locations
gagcttatagaggctctttggatctcgtgcctttcacaattctagaggcatgttcgtgagaacttgtcattacaattccgctttcaattatcatattgagaatctaccacctgttccaatggatagaaatgcctaatggtgctttgcctaataaaatttattaggaaaagggcgggagagtgtctagatcttctgtgttggagatttcactctatccacatatattaaaccagcttcagcgaagagttgcgcctcttctcctgatttaaataatttccagatcagttaaaccaagttggaagacaaatctgcatcatatttntctaacatacagcagctagacttactactgatacaaccaaagtacagctgactcagcaatgacatctatgatctatttgtaccatat

SEQ ID NO: 92796 - DNA, 367 bp, Glycine max
tctcgcacgtcagactaagagtagccttttgttaaaggacaagaggggatacctgcaaaataaaggacttcgacactgaagtaagtacgagagttaggtgagaaataaattttgtaaagggtgagatagaacctggtacttatagagtgaagtggaagctgtgggtccttatttgctgggattgttacggtgttgaacaacccttgcagataatgactagctagtagataattgtagcttacagataatgtgtaccttgtagataattgaatacctgccacgagataaagaggtcacagcatattcaaaaatgggtgcttagagataacctatcagtttgggagcccgcctacaaagcgtggaacgt

SEQ ID NO: 92797 - DNA, 411 bp, Glycine max
ggctgcagctttgcttaagtccttgggaaggggattcaaggaactgataaggaaaggatagtacccataggaatccccaacacttatgacaaggcatcaagaacaacattcaattttttggatcgatattgaatcgtgtatccataaccaatcaacctagaaagatacatttgttggtctgatttctacactacttgcgtcattaacttcttaaggcttcggtggtctgttaaaatcataaaggtgtggcccaccatatactggcaccatttcttcactgtcgccgtgatcgcagaaatttccctgacatatgtcgaggcatggatcaatttgagactactaggcttgctgaagaaagctactggataaccttgttgggacagcacgacacctatcccgacacctgatgca

SEQ ID NO: 92798 - DNA, 396 bp, Glycine max
  unsure (1)..(396): unsure at all n locations
ctatctatgggttagataatatgggttttattatgngcttattccnccctccctgtactatttttgatgacacatgatagattgggactagcctaagcatgatggtttgcttgttggctttcattaaaaaaaaattacctaattaatgtaactattgtaatgttttgngagagcctcatgatgtcagtagctctaacactttttcatgttaaaagggaaaaaaactcacaaggacgaaagtagtcttgaatataatcagttactttactttcaagacgaagattctacttattataatacttattaactaatcctaagcattgataatgtatatatttgttgtcataatttaaagttatatggccttatgtttgatatacgtaagctttttcattt

SEQ ID NO: 92799 - DNA, 437 bp, Glycine max
  unsure (1)..(437): unsure at all n locations
agctntgatgacctgatattcactctaagatgatctcatacagcttgaagtaagataaccggcccacaagcaaaatatgagcaaacataaggatcattgcttgctgctatgagacaaaaagattatgaaagcaggcttgattgtggcaacttaagatcgcccaaaccacagtgataaaactagcaagaacaacatctttagcttgcgggcgaacaactaatttgccaacaaccaagataagatccataggagaagcaagattaaaaccatgaccagttaagttatagatgataaccaagaccaaatctaatctccaacccaacttcttttaaaagagagcatactttgtgcaaagcaagaatggccaaaattctttgtaacatttcgtagaaatggaaagacattaaaanaatatatggaaaattcttggtgtatac

SEQ ID NO: 92800 - DNA, 205 bp, Glycine max
  unsure (1)..(205): unsure at all n locations
aagaataacatataatacttctcattaataaaatattaaccaagaatgattggaaatattatcttcactaattaaagaatattttctgatatattatcactcaataaagtataactaatatttgctttatatttgagttaaaaaatgtgtttttctttatatttacgctccgctgacgaatggaaagangggctactattttaat

SEQ ID NO: 92801 - DNA, 307 bp, Glycine max
  unsure (1)..(307): unsure at all n locations
atatcttaggtcccacactcctcaatttggctacgcctaagaacaataaaaaattagagtctgcgtgctgcaaaacacaataaaaattatatttaataatactttttttaaagatgcaggcaagaaatacttattctaaagataatttaatagatatacattgccaggtataactggtacgttntaattaatcataattaaaaaccattatattataaccagtggcgatatagttctaataatatatgtggaatgctagttatatacaaagagttcattttcgagtccaatttcttttttttttttg

SEQ ID NO: 92802 - DNA, 476 bp, Glycine max
  unsure (1)..(476): unsure at all n locations
ctgcagcttcgattgattcagcgtcggactttattcgggagtcaatcagacatccgaggtaaaagtaattgtcgtttgaatccgctcacagcttcagaattcaatttcgagctctctcgatatattacagcactccatcagacatccgagtaaaaaagttattggcgtttgaatttgctcaaagcttcggtatcgaattttgagcgttcctatatattacgggagtcaatcggacagtcgaataaaaagttattgtcattagaatttgctcagaggttcggtattcaatttcgaacatctcgatatattacgggactgaatcatacatctgagtaaagagttattatcgttcgaattagtcagagccttcgattcaattctagcgtctcgatatctacgggactcatctgacatcnagtaaaaactattgtccttgaatagctcaagcttcataatcattcgagcgtctgaatata

SEQ ID NO: 92803 - DNA, 233 bp, Glycine max
  unsure (1)..(233): unsure at all n locations
acgacaataactgttttactcggatgtttgtttgattccgantatatcgagacgctcgttttgttctgaagcctgagaaaaatcaaatgacaataaatttttacttagatgtctaattgagtccagtaatatattcagacgctcgagattgaataacagagctctgagcaaattcaaacgacaataacattttactcgggtgtgtgactgggtccctggatatattgagacgc

SEQ ID NO: 92804 - DNA, 480 bp, Glycine max
  unsure (1)..(480): unsure at all n locations
ttattcaagatactnntaaattcatataaatagttagattaaagatttgtgtacaagcaagagatatagcaacagtaatacaaatagtaattcacataattttgatatgaaaattagtatgctaattttataccaaaaaagttgacctcaacgcttccgtgcacatatctaacgtacataaatttatgtttctttcccgcttgtaactatttaatttaagggaagaaaactgttacttttttacaaaagaaaaaaaatgggtataaaccacacatatcttctataggaaataattctattttaagaggaaaatattatcataaatcatcttttactcaaaataattatactaaatattcaataagattattatattggaagctattaacttgtacagctcaaacttataatcgaagactttttgtaaatacgcatgtgagagggataaatgccgtatattaccagtacttagcacttact

SEQ ID NO: 92805 - DNA, 309 bp, Glycine max
ttgaaaacatgagagatttaatcatagatttttttaggataagtggtaattacatagatcataataacatatgtgaattttgggggcatcataactaatttaagtgacctcccttataaagaaatactaaagtggcctattactttctggtaattaatagttattttttataaaaaaaaatataaccgatgttcaatgacttatcaatttaataaattaaaaggaacaatattttaattattgacatgggtatatgtattaagataaagtgaagaattgatatccggattgctgaaccattttgtgaca

SEQ ID NO: 92806 - DNA, 364 bp, Glycine max
  unsure (1)..(364): unsure at all n locations
ttaccttactggaacaccccaatgcaaatntttattgaggcaatagacctaaatatttgggaagccatagaaatagggccttatatacccaccacagtagaaagaattacaatagatggcagttcatcaagtgaaattataactatagaaaaacctatagatagatggtctgaagaggatagataacgagtacaatacaatttaaaagccaaaaacataataacatctgccctgggaatggatgaatatttcagagtttcaaattgtatgagtgctaaggaaatgtgggacactcttcgattaacacatgaaggaactacagatgttaaaagatctangatatatgcactaactcatgagtatg

SEQ ID NO: 92807 - DNA, 467 bp, Glycine max
  unsure (1)..(467): unsure at all n locations
taagtcacctgcggcatgcaagcttgtanatggatatagatctaagatattagtgttattatgtacattattgcatggaaaccttcttgtgaagagaatctatatctgtcaagtaacaaataacagagatctttttttgttgaaagtgtaccaagtggttgacaaaggttgtaacaaggggaatagtgggtctaactgagccaaggtgtgaagtctagtgggttgtcggccaacagtggctggttgtgtttggaaactactcttgaaagtaaggactggcgtaactcaggttaggggaaccagttaaaaacattggcatcatttcttctctttcttacataattcatttgacaatgatcactgctttgttatactaaggagaaactccttgacaatactttacaataaccctatttttatgaagcctttagctaaatctttaaataagcttaattggcaaccttttt

SEQ ID NO: 92808 - DNA, 290 bp, Glycine max
  unsure (1)..(290): unsure at all n locations
aaacagatttgtaagctgtgtgcttagaacctatataacagcaccaagggtttagttttaggaactcttttcattttgggagaaagaataattttaggttttgcaattccagttnttactattcacgtagcaataaaattcgttntctgcttcaatctgcaatttcgttctatgcttcaatctgccatttcgttttctactgattaatggaaagctaagtctccagcgctgttttctcttaaggatcaagcatagctctctttgaggttttattattactattgaattct

SEQ ID NO: 92809 - DNA, 456 bp, Glycine max
  unsure (1)..(456): unsure at all n locations
gccacctgcggcatgcaagctatattaatttatgttttatttttgtcttctntattnatttatttataggcgtataattttgtgttttttttacatcccactccctcttctaagtttgtgttatctgattatggctcttataagcttaaagttaaaatgactaaaagaggaaaaatataaaatattaaaggatgtctactttctaagacggttactacattataatcgtcttacaagacagagtatgacaacattttctaagataattatgatgaaataatcgtcttagaatgtctactctnttaagatgattcttaaataaccgtcttagaatataagttttctaagatgggtattatatcagaaccgtcttanaaagtttacattntttacaacaatattttttgaaaccgccgttaatggaaattcattctacatgacattaactataacaac

SEQ ID NO: 92810 - DNA, 423 bp, Glycine max
  unsure (1)..(423): unsure at all n locations
acaaaaagcggggttgtcttgttcnttcatgacactcagatgatgatctcaagaatcatagaatgagttcaagattgaatcaagaacacttcaaggttcaaagagaaaatttgatttcaagaatcaagaattaagtttcaagatttgagttccaagaatcaagatcaagactcaagattcaagaatcaagagaagactcaatcaagataagtatgaaaaagttttttcaaaaactgagtagcacatgtgattttctcaaaatcttttaccaaagactntttactctctggtaatcgattaccagattgttgtaatcgattaccagtagcaaaatggtttttaaaagccttcaactgaatntacaacgttccaatggatttcaaatgttgtatcgattacatgattggaaatcgataccagtgt

SEQ ID NO: 92811 - DNA, 364 bp, Glycine max
agcttcacatggagctacgtcatgtggtgcttaagcatcttcgtctaggtgacgtccttttgcttcctctatctattcgttcggacatttcacattagacccttggtgttcatcttattctccacggatatcctccatcgacttgtgggttgacgctgattatagtataaccacaaacaaaagatcaattaaatcttacaatctcactcgcccctgctttttatgggtcaaactctatacacctactcttgaatcatggtctatgctgaatctaaggtccatcatttttagtcataacctcttggccgaccttagatctcaactttctgcaaaatcgatacaaaaaaaccaaaaaactaaggga

SEQ ID NO: 92812 - DNA, 373 bp, Glycine max
ctacggggatacgtgagctgagtaatgtggcaactggagatcgcggatttatatgtgatttgtggatgtggagagtcgacttgcaccatcgcccgatcaccacctagtaccacatatgacggataccccataatcctacaagcttgaagtgagaaagtgtggaagagtcagtcttcctacttttattcgttgaccacagagtggtacctggagatatgtcgcacgggtcaggagaccttgtggatgtcaggtggggtgctattgcccaaaaccaagcttaaccaatcccgacccaacccaggcatattcagtcagtgagaacctgtgacgtacctaaacaagcgagcctctggcagtcaaccgattaaagaac

SEQ ID NO: 92813 - DNA, 492 bp, Glycine max
  unsure (1)..(492): unsure at all n locations
cactaaccctagcgtatcatntattataataataggaatcttctaatttttgtaacctatnctattagngtanatnttcattcaagggcattgttttactgaaccagtttatttagtattcaatgaaatgattgttntacgttaatattacatcngttttactagntaatttccttttactcatatntcctctaaaaaaaaaaaaactnttactcatatttgaggtcatatatatgtaaatcgataccaaaataaaagcgaaggtagaatgacgataagagggcccagtaatatttttaatgtcaattgctacaaatagatcgactttattaaaataaggttttcggtaattatgattaattgattatcagttcattcggttgcttttattaataatattattattggnctattaagcaatatgttggtatgagaaaaaatttataatttttaaatatattgtaaatggaatgtcccttatatctcataatt

SEQ ID NO: 92814 - DNA, 483 bp, Glycine max
  unsure (1)..(483): unsure at all n locations
agcnttgaatctttcccatgtttcatattttatcagaaccttgcgaaaacgtagcaatggcggattntgcactgatgaatcttgacggaggaaagaaccttgcaatgaatttttcctccacctcttcctaagtgttaagactctnnttttggatatgattagagccatctctttgtcttaccagtcaaggagaatggaaaaactctaaggtagatagcttcaggatcttcgtcagatgctcccatggtactatataattccatgaaggtagaaaaatgtgtgtatggatcttcatgatctattccaacaaaaggatgtgaaccagtcagactaataagtcgtgttagtaaataatagccagtggtcactgcttcaacccacaaatgtctaggtgtagagttgtcattgagcatactcctgttcatttctgcaatgattattcttctctcacaacaccaatttttgacgtgtctagcagtgaga

SEQ ID NO: 92815 - DNA, 442 bp, Glycine max
  unsure (1)..(442): unsure at all n locations
gctgaagctgngcctttctctacgcttantaaatantttgctgcgaatctaaaaccaagtgcgcgattgttatgtctgcttccaccatcacattacagaagtatgtatgtgaatatatttattaaaaaccatccaatacggtaaaaaatctttgcttcataccaaaaaaatagccctcttagattatgcaactattgcattatatatataatatatcagatgtaacaaaagtactttgtaacacccgcatattaaaacatgctgagattatttgctatatattcgctcactgccatctaaaatatcaaaatggtgggtgcactcaggaacaaaaaaataatagcacatgttcaacgacttccacctcatctgccaactgactgatgcccacatctaaacctcccaagcgcccttaccgttaccaccacggtactcacattat

SEQ ID NO: 92816 - DNA, 357 bp, Glycine max
agcttatgctttctgaactgtaacctatctattttctatttccataagataaagtcaatagaccatgcattataaactactctaaggcctaataccagtattatgacaatttataaacatacaaaaatatacttatataaaataaaaaagcataaagaagggtggcagatgttcaatcaatggcgttaaatgatcccccctgctgatttcaacaatcagtcagcaagtcaactctgataagaaaagtggaacagagattaagataaagagaccattctcaaccaataaacaatatggaacttttttgtttatgtaacttcaattctatattctttcaattgggtacttgaattactg

SEQ ID NO: 92817 - DNA, 439 bp, Glycine max
  unsure (1)..(439): unsure at all n locations
agcttatcaaggtattggggtatctgaatgatcngtattcttttcaccttcgaaacttagactatgtggaagtttgcaagacaaggtaatatatggcactgaagataaccaccaaccttgtacacctgttgttaagaacccttctgagatgtttgtgttcactcaagggtgcctcccaatggatagatgggatgaacttaactacttttttgataaagcggggaagaaatcaattctccctgtggcgcgtatgtgtgttttgaactaacacgattctcctcgtcgacttgaaaggtatatctttaataacatcttaatacttattatttcacagctaaaactatctttggatttaatgctcttgctggaaaataatacacagtgttttgcataagacctggaactacccaatgccgctcctttatttattactgttgaa

SEQ ID NO: 92818 - DNA, 498 bp, Glycine max
  unsure (1)..(498): unsure at all n locations
tgcaagcnttctctcatagaagaatctacacactgtcatgtagatgtgaagcatcacacactctgtggcaaagaaactctgcaattctctgtccttaacaaaagcgaccatcaacacaatgaactctattgtgaacaacaacgattcagagaaagaatcagaggtgtcaatcagacactgatcatggagtgttgacccttgaagcatgctagcggtctcagatccatgtgctagcacagagagatctttggagtagaatatcatcaaagctccacaagttagagctatcgctgaatgaagaacacacatttatggctaacacagaatgaaaccattgatccaaattcactgcaaagactcttaactgctntcttactattaactcgattgagcctctacaccaataatagtagctgaaattgcaagcgccactttctattactatataagaactaagaacattactaacagatatgcataaggatcatgataaattct

SEQ ID NO: 92819 - DNA, 390 bp, Glycine max
  unsure (1)..(390): unsure at all n locations
cacctcttaacatcactcatnacttggttccaccacattaaggcatatccctcatactccaagaaggccagctngatcttcttctcttcaatgtagttgnagntgtagcaagcaaaaacttgctcaaccttcatctctcactcaagatacatttctggattacaagtccctttaaaagtagggatcttcacctntactcccttaatcctatcctctattttcctaccttcatatcttctatgattgcttctctccctatacctctcattcctgcctcattctcttcataccccttatcttctccatgagaagaattagatgatttgtcctctctttcttgttctatatgttcaatcctcatacttaaagcttcactactcctgcatattc

SEQ ID NO: 92820 - DNA, 473 bp, Glycine max
  unsure (1)..(473): unsure at all n locations
agctnnggattgctntgagattnggccattggttctttgcttttgatgtgaaccaaaaggtaaagcgtgtaataaacaagctagacggttactcgaatcctatccctttcttgcacctgttgaccatcagagtccttacacttggacctttagaagcgcaaataaagaccattttcgtttgaagctcaagggagatatactttggttaattaatgactgcagcgtaacatgtgcaaatattgcagaattaataccagtttagtgcaacttgtagttattccgaattaaattaatttcaactatatcccccgacttggatataggaactgtcaactaccattacaagttcattatcaaaacaactactcattcataaagntaatcactgtctctttgatcatacaactacttatagatactttgtttttttctttaactttggatgtggtgggcacagaaataccggccatttt

SEQ ID NO: 92821 - DNA, 416 bp, Glycine max
  unsure (1)..(416): unsure at all n locations
cacactaatttagtttttaactgagtgtctcacattctcttcttcttccctgctggatatgatttcagctgctgagctaaagtcgaatactacacagtgacactgcttgttgcagtgacaccaagaggaagcttcatcaaatacctcaattcaatgtgtagcatcaccttgtcctagggacacagttaaagcatctcctttcttactctaactttcacaccctcccaatgataaaattaaaatgtacttatttcttgtcaaatttgcaccttatatggcttgaaaaaggaaaataatgtaacttatgccaaatactcaaatgattcttcacctgcttaagtttctgtanattctaatgactaatntaatgctattaactaaattaactaactcaaaatatgtgtattaattaaaag

SEQ ID NO: 92822 - DNA, 430 bp, Glycine max
  unsure (1)..(430): unsure at all n locations
agcgccgcagctgcagctagacaccgtaaggtatctatttttttatctcctgagcaggacnaacaggggaaaaatatatccttatctgtgcttcctacacccacaaaatccagaataccattatttactcataaacacggtacaagatttaatgacgtggaacattaaactaccatatcacttcatcttacacagaacacgcttatgctgtcataacatgctttcgaaacatatcctgaaacatccacatctatctctattcacaagccttgaagctgcgttatgctaaatattaccataatggcgaaatgtataactgtaataaccggctgagatgcaccctcggaagatggtgccaagctggatagactctgaagaggaaagcctaactgacctgactattgagacataaggtaggaggctatgacta

SEQ ID NO: 92823 - DNA, 415 bp, Glycine max
  unsure (1)..(415): unsure at all n locations
agctngacaccacacactcaccccaatttcttggcctcaatcccaataaaggggcatggtccgcttctaaattaggtgaagatgtcattgttggatttgtggacagtggagtttggccagaaagtgaaagcttcaaagatgaggggatgactcaaattccttcacgttggaaaggccaatgtgaaagtatcatcaaatgccacaagaaactcatcggagctcagttttttaacaaagggttagttgccaaataccattatcccgcaacagttgagaactcaactcgagacacagaaggtcacgggacccacacatcaagcactgcagctgggagccaagttgagaatgcatcattctntggctacgccgatggaacagcgaaaggagtagcttctatggctagaatagccgtgta

SEQ ID NO: 92824 - DNA, 415 bp, Glycine max
  unsure (1)..(415): unsure at all n locations
ganataaattagcatatgcttcaatgttaaggacgactccacatttagatgcatcatcctttagtcgaagaattctatgtactatcattttacaatctatctcaaagctcacattctacattcctattcctatgatccataaaaaaagttaatatatttattggtttagaaacatcaaaaaattaatttttactatacaaagtaagattattaaaataaaaatattaaaagaagatttatttaaaattaattgtcaatggtgactttcccttcatgtcaagcaagatcacacacaaagaaatgattgggaagtacctcaatcttattcatcatacccgtgactaggtggcaaatccatcattagcatgtctgcttaacgttcggggagctctcatctatagtgaaattaaatcac

SEQ ID NO: 92825 - DNA, 433 bp, Glycine max
  unsure (1)..(433): unsure at all n locations
agctntattgaaattcaaatggtcatttcttttcacacggatgtccgattcggggacataatatgctgagacgctcganattaaacattgaaaattctcgagaaattaaaattgtcataacttttcacacggatatccgattcggggacataatataccgagacgctcgtaattgaacaacataagctctcgagaaattcaatcggtcataacttttaactcagatgtccgattcggtgatataatatatagagacgctcgaaattgaacaacggaagccctaaagaaattcaaagcatcataacttttcactcggatgtcagattaagttgcataatatatctagatgctctaaattgaataacggaagctctcgagaaattcaaaatggtcataaattntcaatcggatgtccgatcaggcacataacata

SEQ ID NO: 92826 - DNA, 351 bp, Glycine max
gaagaatctaacaaggctgcttcaaatgataagcatttgcttcaagaataattcaagattgcttcaacaaacaaagccttgtttcaagattcactaaagaccaagccttgccttaaaacatagtgctttcaagacatgcaaagctctggtaatctgattccaggaagtgtaatcgattaccagaagacagggttgagaaatagctgttgaaaaatgttttgaatttgaattttcaacatgtaatcgattaccatatgtctgtattcgttaccagcaacgaaactctggaaattctaatttaaatgtcataacccttcagattataactgtgtaatccattacacaaacatt

SEQ ID NO: 92827 - DNA, 469 bp, Glycine max
  unsure (1)..(469): unsure at all n locations
agcnttatacctcanactatttctaacatcattgtgccacaatgattgagacaagaacacctcctcccaagaaataaatagaacacgcaaacataacaacttatgataataattaaagttacaaacaatgcagattgtgctccaatttcttatttcttgtagagcatcgattcagtaacgattaggggcatgtgacgggctgcattgttgagagtgaacatgagtgcttgatgaagatgctccaatttgggagtgaacaaaactgcgactacaagcgtgtgatgtcaatgtgaaaggcttttcatgaatgagagtaggcgatggtactatacaaacatgagcttcacaaaatgtgttcttatctctatcgacaaaggcagtaggaggagaagggaggaccatgttagaattagagaggaagaatgtgtgctatggagggtgggggagggcggaatattaacaaagaatg

SEQ ID NO: 92828 - DNA, 341 bp, Glycine max
agcttgaagtgagaaagtgtggtatagtcactcttcctacttttattcgctgaccacagagtggtacctatagatatgtcgcgggggtcacgagaccttgtggacgtcaggtggggtgctattgcccaaaaccaagcttgaccaatcccgacccaacccgggcatagtcagtcattgagaacctgtgacgtacctaaacaagcgagctcctggcagtctaccgataaaagaacatagaccacaaagcaaggaagcttgtgtggtggcgtgcccactatggatcttgagtgatatctgcaatatggcctctggtatttaattaccaagggtgtgtattccat

SEQ ID NO: 92829 - DNA, 410 bp, Glycine max
gattggtttgctggcaaatgtcattgttggtttgaaaagaaggcaaactgatcatcatgctggataaataaaaaactggcgcaaatgaagagggtgagaatgagggagatacccatgctgtgactgccattcctatatggccaagtttcccaccaacccaacaatgtcattactcagccaataacaacccttctccttacccaccacccagttatccacaaaggccatccctaaatcaaccacaaaacccgcctaccacacaaccaatgctaaacaccacctttagcatgaaccaaaacaccaaccaaaaaggatatttgtagcaaaaagcctgtaagattcaccccaaattccggtgtcatatgctaacttggctccatatctactcgataattcaatggttgctataa

SEQ ID NO: 92830 - DNA, 381 bp, Glycine max
  unsure (1)..(381): unsure at all n locations
agctttaaccgactctccttcgcttccatcttctgtgtcattggcatgcacgctatcaagtaacataacgttgatcgagttggtcttgaacaccaaatattccatatntaatttttgtattagcagcatgtttaccaagaatatcttgaaattacctcccaatgaagattccatactctggccacattgtttggagtgatatttattaattcggccacttagctgcttattagaggcataccatgtagattgaatgctacatatctcctcaaattgcatgttgaacaaattgaggttttctttcatagactgtgcattgtgaggatctctaccttgcaaaaagtctagcaccatattccaagagcttcttgataaagtttg

SEQ ID NO: 92831 - DNA, 182 bp, Glycine max
  unsure (1)..(182): unsure at all n locations
ccatcattgttgttagtacttagntcgacaatgagggaaacactatagctggcagatccctacgtctttgagcgtattctttgacataactgtagccccgtatttgcacatgatatgagtggcatgctatcacgagacattctatcgacactgcctaaatgaggccgccattatgtccttct

SEQ ID NO: 92832 - DNA, 209 bp, Glycine max
aaagagcccattgctgtatgcatgctattttgtgaataattgcaaattgagaagaaaattgaattaactaaagtacaaagatgtgaagtgagagaaagaagagtagagagtaaaagaacttatgctttgctaaattgttgatattaagtttggaggaaattaggttctagataaaacattgtggctattctcccataggtttaatttgg

SEQ ID NO: 92833 - DNA, 360 bp, Glycine max
  unsure (1)..(360): unsure at all n locations
ccaagcttgtanaatggctagacatgatatattgttatggcttgtntaggttcaaggataaaagggatgccgcacattattttcatgacacaaatgcaaaaatgatgatttggaaactttatgcgaaactggtcatgcatgcacctatgctgacactcaagtgtcaaacttttatggtcatgtgatgctttggctcaggatgcatctccattattttaaatcaacccaatgatccaaaaaatgttcttttatcaatatgngcatgcctacaagtccatgtagggcgtccgaggaaattttcacagcattcacccttaggtgtagacacgtcttttcttaaaaatcgggttaatcaatgaa

SEQ ID NO: 92834 - DNA, 419 bp, Glycine max
  unsure (1)..(419): unsure at all n locations
agctcgcatctgcatgttctatatcaacctttatccatccagatgtgatcttttcatcttatgatatggtgctgcattaagaaaaaacaaaatgatgttaatattctttgtgtgactgataatgaagttagttgattaagggcagtatcatatatttacagataattccatttgcttatagcatgaacgaatatacgagagaataatatataatgaaggttgatgtatgaaaacctaggatatgctatattcaaaattgttgtgctacaaatgtctcataaccagatcatcgggtaggcgcatgtacatatgatggccagggcagtcgntgtaaacatatgtggtgatgagaggtggtcacttccactactcctcttactgatatagcacagctttgcaatacatatgttttgatgatt

SEQ ID NO: 92835 - DNA, 228 bp, Glycine max
tactgcctgcacatatatggtctgatcttctgaatcttcaatttccattatttcagtaatggaattgttggcttcctcaccagtcaatctattcattaccctatccttaaatatctggtacttcttctgtgtcatatgcaatcgaacctcttcatgaagtttgacatatagccgctgaaatgcagatggagatttaaggaatagagcatttctaagaccaaatatgag

SEQ ID NO: 92836 - DNA, 128 bp, Glycine max
  unsure (1)..(128): unsure at all n locations
cagctaaacacaacagagaggatcatacctgctactgtgaggagcaagcgcgagagctccgacnacaaccatgactcactacggtgtaaaactngtgagggagggaggcggagcccatgtgtgcgaca

SEQ ID NO: 92837 - DNA, 499 bp, Glycine max
  unsure (1)..(499): unsure at all n locations
agctntatntattattaatcccaccatgatttctctatnatacctttagatactaattnttttattatgaataagtgataaggtatattcttaaaattntgatttggataaattaatttagtttggcctgtaaaaaaatttagttgaagttgtgctgcaactcaaactagaagaaaattacagcaacttacagatttctgattcagtaaataattcaatcaataatggaaatgaaagtttgagaacctgngagatgcataagcttttcattgcaatcatttccatcagcttcgtttaaagcattttctatgtccattgcagtgaacatgtgcacagaatggcacccatctgatatccagatagtctgagacactgcanagtgcanaataataactaaatttagctgcagagagaacaaagtacaaaagataactgacttgtacaagaganaanattcagggttntntaatttatttctcttaaatacattcgatctaat

SEQ ID NO: 92838 - DNA, 393 bp, Glycine max
  unsure (1)..(393): unsure at all n locations
gatttcaagagaaaaccccagaagaaatttccagaagaaaacccaagaataagttacaaacacctaagaaaagtagaatttctcatactaccgtgaaagtgaaatattatcatattgacaacgcatacgtcctcactcctagcaagactagccatgccatactcgtcttacattcaggaaagnttatgactcattagtccattgcaaattaaggtgagtatcatatcatgatttcaatatcaagtcataaagattcatatgagactcaatanacataataacaaacaacaagcccattgttattggttagtatgtgcaaataanaatctctacgctggaatggggcttactcttaacttgatattcattttttcacactcaaatgttataatg

SEQ ID NO: 92839 - DNA, 405 bp, Glycine max
  unsure (1)..(405): unsure at all n locations
agctngtaatgaagatgaacataaacttatgttctcttatttctggtcagatttcactcattgctcaatccaactccttgcggcttggatttccaaccctgattactgccttgtgcaaggcccgaggagtcacctcagattctcttaccttcgagtcactcagcctagccattaatttggcctatattaaaaagaattgatggaacctgtatgacccttttgtcacttttccaaggacccaaaaattcaaggctagaatatatgaggacccatctctctctgctccccctacttctgctcttccttcaccaccagcagctccaattctttcatgtccctccacttggagctcagagcctttcatgtttatgctacatagcctgcaccagagccagctcctgatta

SEQ ID NO: 92840 - DNA, 485 bp, Glycine max
  unsure (1)..(485): unsure at all n locations
aactatggcatgatcattccatctagccatatcttttatgcacactangaagtgagaacatggtttgtattccataagaaaagaacaaaaaaaaatcacacctatcacaagtccctacttaattactcttgagaagtgatgcctcgagaaattactcctctaaaatagtcctctctcaagacattaacactcattttccatcctttggattcttggccgcttgccatatcgtcccattgcacttcacaaattatacaaatgggccaattgataacttatgacaaggcattgaaactcatggtatagtagagacatcacggatacaaacatgttatgactagaccaatcaaatctctataactcatggaagcacaacaaggtgagtatgttccaaatacaaacaactagagaaactatcaaacaattatgcgctcaaacattagacattcaacatggcaaccatatgatgcatagagaaacacaac

SEQ ID NO: 92841 - DNA, 430 bp, Glycine max
agctcgtcataataagctataagctctcgtgttatcttcgggcaaatacacatgtgtaaactgttaagcttctcacacaaagaatctgattttccaccatattctctattgatatctaatgtcaacaagagatatggccaatattgaccttataaggcatagacaatatgtaccttacaagtcggttttgttagggtaccgtagatcctacacttaatttctaatgttggatcaaagtctatattagatatgctatctgttattggatcacctatttttgttcacgctatagatgtctattcgcaatcttctaaacatgacggagtgttggtattgtgcaacaatcccacataaacttaagatatggattatatagtacttatatgttagggatggactcacttatcagccaatttatggcgttaattat

SEQ ID NO: 92842 - DNA, 394 bp, Glycine max
  unsure (1)..(394): unsure at all n locations
ctaagcatcgctctcaacgcatccaaagtngtcacaaaagagttatatcgataaggtcctagatagattcagcatgaaatatagtaaactaagagataccttgatagcttaaggagacaaatntagtctcaaacaatgccccaataatgaccttgaaagaatagagaagcanaagatttcttatgcatcaacagtatgaagtctaatatacgttcaagtttgcactcgtcccgatatagcatttgtagtaagagtcttgggcagatatttgagtaatcctagaatgcagcattggaaagcagcataacgtgtgatgcgtcatctaataagaacaaaatgatacatgctcacttatcagaaccctgagaatntggagatcattgggtactcagac

SEQ ID NO: 92843 - DNA, 400 bp, Glycine max
  unsure (1)..(400): unsure at all n locations
agcttggttntgggcaatagcaccccacctgatgtttcaaggtctcctgaccccagcggcatatctccaggtaccactctgtggtcaacgaataaaagcaggaagtttcacccttctacacttcctcaactcaagcttgtaggattatggggtacccatcacatgtggtactatgtggcggtcgggtgatggtgcacaacaagtttttccacatccacaaagcgcgcataaacccaccatcccctgttgcccacctccaactgagctcacgtactcccacgtagcccatatcttcggttctctcaacaccgggtccccatcaatcctcccaagctttcctcaacatccagggtaaacaacattcaaaccgcacaaactatcacagtcaataaaacagggt

SEQ ID NO: 92844 - DNA, 383 bp, Glycine max
  unsure (1)..(383): unsure at all n locations
gttagagctacctctagctttctctaatgactatggcancatgnctggcgctnanagctgggattggaggccactcttctcagattaaattctggcttcagcaagagtcatgtctccaagggctccaccactggcagcatctatcatacttctctccatattactgagtccttcataaaaatattggagaagaagctattctgaaatctgatggtgggggcaactggcacatagtttcttaaatctctcccagtactcatacaggctctctccactgagttgtctaatacctgagatatccttcctgatggttgtggtcctggaagcagggaaaattctttctaagaatactctcttaaggtcatcccagctcgtgatggacc

SEQ ID NO: 92845 - DNA, 473 bp, Glycine max
  unsure (1)..(473): unsure at all n locations
agcttgaaccaaaaccggtgagggtgtgaccttaatctatgagtgaatgactaactgtgagtgataatctttgcatgaatctctgaattctagaatgaaatgtataaatgaggacatgatgaaggccatgattgtacatacacaagctcttttgaccaaacaacttaccttaaatgataattgcatcctttgctcccttttggagctgaatgatattgtaaanaaatttgaatcctaaactatataaatatctcctgataccttgtttagattctaggagagcatatggttcaaggcaaatttactctaaatttaggggagggaagtcaattccagtgaaaagataaaggttaagcatcagcacacataatatataagttgtatgttaaaaaaaaagaataaattgtgttgtacaataaggtcacaagcaactttgaanggaaagatagtgagaaagctactgttataataca

SEQ ID NO: 92846 - DNA, 328 bp, Glycine max
  unsure (1)..(328): unsure at all n locations
acccaaatgtaatcttataagatgatagngcaaggtaaatctacaaaatgctaagcatttaatcagttccctcccattgtctgatcaaataattttcaatgtcccaatatttttctaagaagagggcattatatgaattgcattcacgcgctcatttttttactgactgatactctcacactgggcatgcaaaacttgaacttctcatagatgacattcccatctatctctctgatagacctctggtgattagacgtatctggtgaaaaggtagaataagatacagttatgccaccgatacagcaagcgcatgtttgattaaccattt

SEQ ID NO: 92847 - DNA, 454 bp, Glycine max
  unsure (1)..(454): unsure at all n locations
agctngtcgaggctctcgcgacggtctttctcttatacaagaagcttctcggagccatgggtacaataaccaaacaaattcactcacattacggtgctgcacacgtgccaacaactttgcctcgttgacgaactgcgtcttcccttgattcgatctatgcgataacttcttcaccgcaatctctctcccatcattcgatntcccctttatggtcccaaattgaattaaaaaaatatctcaaaattagaacaagtctcagacttttttgcttaccaagttaaaccataaattagtaacaacaatttatccatgtagaactttctcgaaaacttgtaagcctttctgggtacagagaattaataatagatctctcttaatccacagtaaaaattatatgcttaaactattagaaaaaacataagtcccaccacactctttagaaagatagcggtta

SEQ ID NO: 92848 - DNA, 285 bp, Glycine max
  unsure (1)..(285): unsure at all n locations
tcactcgcctcaatctatntgctaataacttagctatcaccttgtacatacatccaatcaatgagatgggtctgtagtcatcaaatgactggggatgtttaattttgggaatgagagctatggtctctatggaaactgccatgtacatggaattcatcaacaaaacttctgaactcagctattagcatatcccaaaattctttaatgaattngaagttgaaaccatcaagtccaagacatttgtccccatcacaactccatactcgttctttgatctccaaatct

SEQ ID NO: 92849 - DNA, 471 bp, Glycine max
  unsure (1)..(471): unsure at all n locations
tcaagcttgatcctttgagccaactatgatacttattcttggtccgngacttantcatatttaaagctcattatccctccccaatgatgtattttacgaagatagaacttcggtcctctctgacaaactcaatgcgtgttgtcaaccaaattacacttattgcgtaacttgacattttcaaaagtctaataatctaacagaaaaatatagttaaaaccttactttctaataaggcttgatgaataagaatttaatcatacttctaagtaagataatgagtcaaatccaaatttatagacttaatgttacttttagtccattatgtcttaatggtttttatttcgggacattaagttttaaaagtttcattttggtcctctatgtttcaaacagtttcggttagtcctccattaccttaacttaacattctaatgtttgattttaaaataataattaatatgtgccgtaaaa

SEQ ID NO: 92850 - DNA, 480 bp, Glycine max
  unsure (1)..(480): unsure at all n locations
gatgctgactagtgagaagaagtcttttttgttgttatggatnctctagaatctaacatgacatggatttagtgactctcctcctggctgcaaaccaataggttgtaaatggatcttgaaaaagaaactaaaacctgatggtactgtggataaatacaaagctcgccttgtagccaagggttttaggcaaagagagaatgtggatttcttcgacaccttttcaccagtcactagaataacatctattcgggtgctaatatctcttgctgctattcacagtctagtggtacaccaaatggatgttaaaactgctcttttaaatggtgaattggaagaggaaatctatatggaacaacctgaatgggttgtgaatcatggacaagaagataaagtctgcaagttagataaatcttngtatggcctataacaagcacctaagcagtggcatgaaaagtttgatacataatagtctcgaatggg

SEQ ID NO: 92851 - DNA, 322 bp, Glycine max
  unsure (1)..(322): unsure at all n locations
agcttatgagaccaatatatgacatataacgtgntctacaatctaattctcacactaatctatataagactccactattaattacggataaaaaaagagatttagcaataaagcattcctatgtggattataattaggacacaaacaataatgttgcatatttgttcttgtacacaggagtggagatggtattatttacaatttattcaagctttggttgcattgttttataataaaaaactacgatacactattaatgacacttagtaataataaaaaaattttgaaattagtgaatgacacttacaaatgataacatagc

SEQ ID NO: 92852 - DNA, 382 bp, Glycine max
  unsure (1)..(382): unsure at all n locations
gagaggaggcgtcatccactatggaataagccatggtagaaagagcttcaccaccaagatgagcctcggataacaagcttggagaggatgcttcaatggaggaaaagaaagatggagagaaagagagaggggggagaacgaaattgaaggaagaaaaatggagagaagttgaactctgagttgagtctcacaagactctcattcatcaaaagtacaacatgtgtgacacatgcttctatttatagactagggagcttccttgagaagctatcttaagaaaacttccttgagaagcttctttgagaaaacttncttgagaagctagagcttagctacacacacccatttcaaaactaagctcaccttcctgacaatatacatg

SEQ ID NO: 92853 - DNA, 471 bp, Glycine max
ctcgcccggatccttaagcgaccgcggctgcagcttatatatatcgatacgctcgtttatattcatcgaaaactctcgggaaattcatatagtcataactattcacacggatgtccgattcgggcgcataatatgtcgagaggatcgaaattgaacaacggaagctcttgagaaattcaactggtattacttttcacacggatgttcgatttaggccaatcacatatcgagacgcctcacatttgaacaacggaagctcttgagaaattcaaatggcttaacattaactcgaacgttcaattaggcgcatcacatattgtgacactcgaaattgaaaaccggaagctctcgggaaattttaatggtcataacattttacaccgaggtcctgatcatgtttatattgtttgattcactcgaaattaaaatcggaaactctctagaaatcaaatggcataactttccaccgat

SEQ ID NO: 92854 - DNA, 193 bp, Glycine max
  unsure (1)..(193): unsure at all n locations
agcttatgtacagnaggtgtatctgatctattcttttcgcaacacagaagcggtagctaaactactatccnctagatgagggccagagatatgatttcttccctccttctgtgcacaattaaccctaccaatttctctcttctcggttcttggtgccaccttgcacagtacactcgctttagaacttctacga

SEQ ID NO: 92855 - DNA, 259 bp, Glycine max
  unsure (1)..(259): unsure at all n locations
agctagtggatagctgttctcgtanttcccgttatctctggggatcttgaagtgagggggaagaagtttgggtgaagaaaactttccctctccacccctttatattttcgtacaagggttgcttcccgaagcgagctaacctgtacttctttttatttatttacgggtgcattaaccatgccttccccccctatatgggttagccgttttgcctaactttgacctactacatttaaaatattagttcgtttcttattta

SEQ ID NO: 92856 - DNA, 498 bp, Glycine max
  unsure (1)..(498): unsure at all n locations
agcttctaagaatagcctggataacactaacattatccatagaagcttccncaaagaagatggtgtcatccgcaaactggagaatattcactgggaccttattcttccctaccaaaaagctctgaaataagtttctagacactgcttccctcatcaaacctgttaacccttcagcaaccaagacaaataataaaggggccaagggatccccttgtctcaatcctctttgaggcttaaattcctcagtcggacttccatttacaaggatggatattgaagctgatgaaaggaagcctttaacccaaccaatccacctttcatggaaccccattcttctcatcatataaaataggaattgccaggacacagagtcataagctttttcgaagtccactttatacaccgagcaagaattgcttttgctgctagcctnctcaacaacctcactagcaatcaagactccatgtaacagctgtctacccttaacaaatgctgact

SEQ ID NO: 92857 - DNA, 477 bp, Glycine max
  unsure (1)..(477): unsure at all n locations
agctaactacacacacncctctaataactaagctcatcttcttgagaaactntcttggaaagcttnctgagaagatcctagagaagctagagcttaactacacacacctttctaataactaagctcacctncttgaaatgagaagctagagcttagctttttgtatcaagtgaccacagaataattaagaagaggggggtgaattaantattcctaaacctttactaattaaanaattactcttctaaggctttactaagtggtaagaaaataaggagtggaagataaacttaaccgaaagtaaaagcagagattaaatgcacagccgaaatttaatgagtagggaagaaggaaacaaacacacaaaagtntttatactggtttggatacaactcgtgcctacatccagtccccaagcgacctgcagtccttgagatttctttcaaccttgtaaaatcctnttacaagcaagatcac

SEQ ID NO: 92858 - DNA, 295 bp, Glycine max
  unsure (1)..(295): unsure at all n locations
tttgagctcccgcctgacagagngaggcttataattccatgaggatgatcaggggaagtgacgctgacgtcaaaagccagcctagagccatatcggggttgcactaccaaccactgatattctcaagcgacacgcttttgtttatgaaaacaatgggctctgatattagattgttgtgcaagcatgtgaatgcgctttaagacaaaaaattacatttgatttacctctgtggggatcaccttgagacggctcatagttgcacttgcatacatggagaacataaatctagcgcttc

SEQ ID NO: 92859 - DNA, 207 bp, Glycine max
gacccgcagcatctaacttattcagcgaaagcggcacactagtatcttttaccattgtacgtatcgtatcgttgtggatgtggacacatgtgcgatatggaactatacactcgtaattcttggatatggctaattcacgccagacaaatgagtcaggaagatagtcttttgcagatacggagaatagggatatctctcaatattcta

SEQ ID NO: 92860 - DNA, 395 bp, Glycine max
cgaatctccaccaactttaagtcctcacaagagctagtgtttctcttaattcacacaatgagtctcgtgaaaaatagtttgaattattacaacgtggatatgtaatatctcaacttttgcacatcatctcgtgcaatccaatcatacatgcacaatgtgaatcactaaggacgttattatgcttgtaatgtggatgggctaacaaagaaatcatggttcttctacgattcaaatactaggatctatgagagcatccattcccctaaattattaacataccacaattagtatttttcacaacaccaaccttatttgtttgctactcttttcaacacccttatattctgtgaaatgggtatattcttttttctcttgcaatgtataacttcatactt

SEQ ID NO: 92861 - DNA, 480 bp, Glycine max
  unsure (1)..(480): unsure at all n locations
agcttgcattacctcttagtaggtggtgtattctctattggagcttgaaggcctacgatcttcttcattaatggatttctttgcttcttggaagatgaatggccgcggaatggagaaggaagagagagaggagatgccacttataggagaagatgagtctataagaagctcaccaccatangaggccatggattatagcttggacgaagaatgagatatatgaaaggagaggaagcgaagagcatgaaattttgtgctctaaaagagctctgagatctgaagtttaattttcacatcatcaaacgtgaaataaatgcacacacatgacctctatttatagcctaagtgtcacacaacattggaggaaaatttgaattcacttgaatttgggagccaaactttggagcaaaatttcctaattatatttgtgaatttagtatggtttgccactaatccagacaattcaagatcttccttgtg

SEQ ID NO: 92862 - DNA, 372 bp, Glycine max
  unsure (1)..(372): unsure at all n locations
gtacttggagatatatcncnnnnncaggagacttgcggacgtcaagtggagtgctattgcccaaaaccaaacttgaccaatcccgacccaacccgggcatagttagtcagtgagaacctgtgatgtacctaaacaggcgagctcctggcagtctacagattaaaggaacaaagaccacatagcaaggaggcttgtgtggtggctggccagctgtgaactttgattgacatatgggatatggcctctggtaatcgattaccaagggtgggtaatcgattacaaggcttaaaaatgaagataggagtctaagatggtctctggtaatcgattaccaaggggtgtaatcgattaccatgcttgaaaacgaggtca

SEQ ID NO: 92863 - DNA, 228 bp, Glycine max
  unsure (1)..(228): unsure at all n locations
taccacgactagcatnatgcctcacattggttgtctatcttcgcactcatgcccggacggaaccaccttctagtccgtccgtgatggcgacaccgtccactccatagaaaatgtggtgcgcgctctgatggacatcgaccaccgaagcggggagcctggatcgcttctaccttgccttctacaacctatttgcgtgcaaggacgacaatacatgtgttctatttccag

SEQ ID NO: 92864 - DNA, 377 bp, Glycine max
  unsure (1)..(377): unsure at all n locations
ctctattncatctcccactccgagtatgtcctttatcattcctcctttccagggcggaatcgtgagtttataccatcaattcagatatgtctaagaacaccatcatatcctcatctccatcattcttcttcattatgatctctattcttcatatgatccaacctctcatggagcgcatcatctcttcgtttcaatatacctcccatatggtgcattaaagcttgcatatggaattgcgaaagcctcactccatcattatgattagtacctgacatctgatacaaacacatcatactgtacatgacaattattgtcgctgttagaatacctcacccactctagtgtatcacacattaacgtctnttctctattaaaca

SEQ ID NO: 92865 - DNA, 481 bp, Glycine max
  unsure (1)..(481): unsure at all n locations
agctnggctgtttggaatactaatgtcttatatgctagggttattgatagtacgtaagtatagccacccacgttggggaatttatgtaaattatgtgtcggttaatttgaaaatcgagataatactggataaatctgaaatcgtgtataacactttcagattgaatcaaatntcggggttcaaccaaaattgttcaatcgaatataatcagaagattataattcaagagttttgttttggtcttgtatgttttggcacccataatgctttctgaaccaaaatgattatttatgatcaaagaacaggtggtttttggcggttgatgaacatgtggtctttggcggctgatggaagttttatcttntttaagacctgccttttccttgaaagcacttgcatgttatttccaaaatttgcctaatccgacatctcgtattacataaaacaagcgtgcctttattgtaacatataaagagatcaa

SEQ ID NO: 92866 - DNA, 479 bp, Glycine max
  unsure (1)..(479): unsure at all n locations
atgtgcagntccagtcattctagtccctaaatttatggtacttgaaagatgtgcatagattgtanantttcaataactcacggccaagtatagacatcccatttctaggttagatgacttgttggatgaattgtctggtgcttgtgtcttccttaaaattgacttgaaaagtggatatcatcaaattaaaattagagaaggagatgagtggaaaacagcctttaaaactaaatatgggttgtatgaatggctggttatgcccttcgagttaaccaatgctcctagtaccttcatgagattaatgaatcatgtgttgaggaaatttataggaaagtttgttgtggtctaatttgatgatattcttatctatagcaaatcttatgatgaccatgttgtgaatctgacgtgtgttctggaagcacttatgagtgagaaattataggctaacattggataaatgtgtgttctatatggactat

SEQ ID NO: 92867 - DNA, 385 bp, Glycine max
  unsure (1)..(385): unsure at all n locations
ctatacgaccgaacgcatatgncacatnttagacctcactcccatagaagagaaaaggaaagaaagcctcaagaggctaacattaaactctcatacttccatgagacagacaatgtagaagctaatctacattgggaaataacggtagagcaacatcttaatgggaagacaatagaaaagcaagcccctaacgctagtttgcaagataaaactagctctataaagtgctataaatgtctcggaagatgacacattacttctcaatgccccaccacaaaaaccatgactatgaggggccaagacatctatactagccaatatgaggctactaattcaccctcctctagcgaaagtgaaaaagccaaaggggaagaatctatttaag

SEQ ID NO: 92868 - DNA, 196 bp, Glycine max
agcttgtctcagcgtttatgcgagactgagatcaacatgttatctatcatcgctcagttccaacaagagttaagtctagccacggacccaagcatagaatccggtgagatgcaaaatgatgcggacagatgctgaggacggtgataagtttacacacaaacgccccaagtggatggatcggggccgcgcttacctt

SEQ ID NO: 92869 - DNA, 423 bp, Glycine max
  unsure (1)..(423): unsure at all n locations
tgcgcctgaataggacattcgagtgaaatagttttatcatttgaatnnctcgagagctccctatggnnanattgagcgctcgatatattatacgcctgaatcgaacctcagtgtgaaaagttatgaccatttgaatttctttagagcatccgttgctcattttcgagcgtctctatatgtgatgcaccttaatcggacctccgagtgaaaagttatgaccatntgaatttctcgagagcttccgttgttcaatttcgagcgtctcgacatattatgcgcccgaatcggacatccatgggaaaagctatgaccatttgaatttctcgagagcttccgttgttcaatttcgagcgtctcgacatattatgcgcccgaatcggacatccgtgggataagctatgaccatntgaatttctcgagagc

SEQ ID NO: 92870 - DNA, 449 bp, Glycine max
tgctgcagcttaaataagagatcatttttccattcatagggggagaatggaatgagtgaacgttatatcttgcatatattctatcttgtatcttgatttcaggaattaaattgtcatcatcaaaaagggggagattgtataagcaaatactttgactctcatgttttgatgatgccatgtgatcatgcgctcctcaagtttaattcaagacaaaaatccaagaaattcaagatacatcatcaagaagatttctagtgatttacgaagggaattccaagttgaaacagcaagaggtttcgccaatgaatttaagcataaatgttcttacaagagatttactctctgtgtatcgattaccagaggatgtaattgattaccaatggccaaaacacttcctgaaacattttaaaataatttttaatatttttgaagcatgtaattgattacaa

SEQ ID NO: 92871 - DNA, 452 bp, Glycine max
  unsure (1)..(452): unsure at all n locations
gcttcttgttgttttctcttattgaagcncctacagagagctacatggatccgctcggtaaaacaatgcccaccgtttgttaaccgatggatcttctcaaaatttggtctgcaactccacaagacactttttcattatcggaccgctgggatgtttgagaagatgtctggagtgtgctagaagcctcttaatgaagcttctggaggaagcctcttaatgaaacttctagagaaaactacatggagctgcctcggtagaaacgctgaccagccttcattaaccgatggatcttctcgaaatttgagttgcaacttcacaagtgaatatgaaatgaggctggtgcttgtgtgataacgccattgagatgagatgatatctatgtngtgaatgacatggaaatacgattngctcattgatggtggaaatgcattggcatgtgcatgttgtgtatg

SEQ ID NO: 92872 - DNA, 338 bp, Glycine max
  unsure (1)..(338): unsure at all n locations
agcttgccgccacggagttatccgactattctcttgtgtggnggaacaagctacaaaaggagagagctagaaatgaagagccaatggttgatacatggacggagatgaaaaagatcatgaggaagcggtatgtgccggctagttactcaagggacttgaaattcaagctccaaatactaacccaaggcaacaagggggtcgaggagtatttcaaggaaatggatgtgctcatgattcaagcaaatattgaagaagatgaggaggtgactatggctcgattcctaattggttgactaatgatattcctgatattggtgacctgcatgagattgttgaat

SEQ ID NO: 92873 - DNA, 371 bp, Glycine max
  unsure (1)..(371): unsure at all n locations
ttagctgctcacagacgctntctcaaagaagcttctctaggaagtattctcaataaagcttctcaaggaagctacctagtctattaatagaagcatgtgtaacacttgttgcaactttgatgaatgagagtcttgtgagacacaactcaaagttcaacttctctccctttttcttccttcaatttcgtgctactccctacctctttctctccctctttcttttcctccattgaagcatcctctccaagcttcttatccaacgctcatcttggtggtgaagctccttcttccatggcttattgcttaatggatggcgcctcctctcacctcctatactttgtcttccgctgcatctccatggtggacaatca

SEQ ID NO: 92874 - DNA, 494 bp, Glycine max
agcttctcgagaaattcgaatggttataacttttcctctcaaatgtccgattcggagacataactcatctagacgctcgaaattgaacaacgcaagctctcgagaaattcgaatggtcataacatttcgcacaaatgtccaattctgggacataatatatcaagacgctcgaaattgaatagcggaagctctcgtgaaatacaaatggtcataaacttacacatggatgtccgatttgtgaaaataatatatcgagatgctccaaattgaacaacgaaagctatcgagaaattccaatggtccgaacttttcgcacggatgtccgattcggggacataacttatctagacgcacgaaattgaacaatggaagctctcgagacattcgaataggcattatatctcacacggatggccgattggcgaaatatatatccagacgctctaaattgaccacagaagctctcgagaacattgactagtcatattatttca

SEQ ID NO: 92875 - DNA, 435 bp, Glycine max
  unsure (1)..(435): unsure at all n locations
tttccgactatgctcttgagtggaggttgtgattatgctagtcgaagnggacgtgtgcattgtgaaatacatgataagtactttgtgatgttgttcctatggaggccagtcacttacttttggggagaccatggcaatttgataaaaaagccaatcatgacggttacaccaacaagatctctttcatttactttgtgtgttgcataaaaatgtacaatgtaggtcggctaggatttattgtgcgagcttaaccgacattttgtctctgccgaaactggcatgttcccatttattttggcaggaaaacattatcccatcttcgcagaaaaatatctgctatccgactacatgcatattacatccagggaatgaactgaaaactaaatatccgacatcggtcggaaatagccacgactgatatattcacccgacatt

SEQ ID NO: 92876 - DNA, 366 bp, Glycine max
  unsure (1)..(366): unsure at all n locations
cgtttaatatctgcttgtaatctattaccatatatgtgtgatcgattacacagtgcaatatttgaattcaaattttaatagctcgtgtaaatcaagtttggccactggtaatcgattacatcctctggtaatcgattaccaaagagtaaatgtcttgaaaaagcctctgtaacttaaatttattgtccataacttttgctactttcattggaattctctttctattaaatatactcttcctaagactctagaggctgtcttgatcatccatcttgaatatcttcgatttctttgtcttgaataaagcttngagagacatgtaaccctctggcatcatcaaaacatttatcttgatcctttgtctac

SEQ ID NO: 92877 - DNA, 475 bp, Glycine max
tcagcatacttcttatatccagtatgattattaatcaataagcctccaatctgtaatggatatggtaccactctcgaaaacccgaatgcaaatttttattgaggcaatagacttaattatttgggaagccatagaaatagggtcttatatatgcaccacagtagaaagaattacaatagatggaagcacatcaagtgaaagcataacaatagaaaaacctagagatagatggtctgaagaggataaaagacgagtacaatacaatttaaaagccaaaaatataattacatctgccctgcgaatggatgaatatttcaaggtttcaaattgtaagagtgctaaagaaatgtgggacactctacacttaacacatgaaggaacaacatatgttaaaagatctaggatgaacacattaactcatgaatatgaactatttaggatgaatgcaaatgatagcattcaagacatgcaaaag

SEQ ID NO: 92878 - DNA, 332 bp, Glycine max
  unsure (1)..(332): unsure at all n locations
tgcagctttaacaagagtcttgacagataactattatgtagcatattactaacaaaactacccatcatatctnccagaaccccatacccacgaatatcaaaggagaatgaagtccacccaaacctgaaatctcgaagtcccactcgtagacacgctcttcatgacgcccgaaatgctctcctttctcgattaggagcatacatgatggccaaagggtggagcttcgctggtgtttcaatggtcaatggacgagacagaaatagctatgttaggaagatggagagagagcttctaataatgtgtggctgagttgacagagagagagttacttc

SEQ ID NO: 92879 - DNA, 389 bp, Glycine max
  unsure (1)..(389): unsure at all n locations
ccttgattatgctcatntaatcttcctaattaaactaattacacaaagcaaagtccaaatgcacaacccaattattcatcataggcatatgttctgacttcctagcctatattgaccctcacaatggtagaattggaccaagattatttgtgacaaaaatgaatatttcgttcttagctttccagggagtactcatatgctccatttggagtgttgtagagtcctataagccctacacaaggcagatatgccaagtatgcacaaaaatcctaatataagccacaattatcaattgagctcaatcattcgccctataccaaaattgagttaatgtgggaaaatagtagtcaaagagaggtcacattagctaagaataatacaataatact

SEQ ID NO: 92880 - DNA, 345 bp, Glycine max
tagatgatctcaaaggttcttataagcaattagttcaacaatgtatagtcgattacaatggttagtaatcaatcatcggttattagagaaagcaacaaaaatcactttacttttaaaattggcaagaagcatcaaagttattgattacttgtttcagtaatcgattacataagccaggttcacaagaacgaaaactttatggctcgagataattgatctttgatgtgtagtaatcaattatattgcgtttgcaaactcaaggaactctctatgtgacaaaataatagattactacatttgataataaattattacagaacctagaagcttgggaagcttcctgtg

SEQ ID NO: 92881 - DNA, 434 bp, Glycine max
  unsure (1)..(434): unsure at all n locations
tgcagagcttggagtntcaagtgccaattcgtcttcttctttattccagtcttcttctggctgcaatacatcagtgagctttccttctgagcccagcatcttgagatgatcccagcctttgatgacagctttccaccgtctgctatccatagatttgaggaatgccaccatccttgatttccaggaatcatagttggttccatctatgacaggtggtctcgctactaaccctccttctttctccatgtgcatcagaatatatctccccacatctcactctgtgatatcgagtgttggctctgataccaattgaaattctgataccacgcggaaagatgtcgtacaagatgtcacgacattacacttcataacatgcaccttatatgtgtccgtatgaacagattctacactttagtatcacacgataactgtta

SEQ ID NO: 92882 - DNA, 338 bp, Glycine max
atgcatagccttgcttataagaacagggttgtatacaggtgatgcacaccataccacccccaaaccaatggacaggccaaaatttctacatggagacaagacattttaataaaattgtgcagccatactggaaagatagaattaccaggcttgatgatgctctgtgggcacatcggactgcctacaaagcacccataggaatgtctccttatcgtgttgtcttgggaaaagcatgtcatcttccagtgaagattcagcacacaagatactgtgcagagaagacctgcaacttctctatgcatcaagctggtgaggaaagatagctgcaactgagtgag

SEQ ID NO: 92883 - DNA, 273 bp, Glycine max
aatagttattgttttatctgggagctacagatcggggcaaatggcccctcttatgaacgtgggcttaaatgaataatttgttgtcgggatcaacttaatcgcatcaagagtaatttaggataaaaaaggaatacatatatctccaaattaaacatattgtaattatgtctacttgttgatgctaccaccgaggttggagaagaaaattttttttttagggatcccatcttattattaagctagcaaacttcttatttggtctttcatccatct

SEQ ID NO: 92884 - DNA, 436 bp, Glycine max
ccctagagatgactattttgaaaaaggtcgctcgtggataaatcttcatacggcttgtccaagggaaaaggagatgcattcgtgccaagacttggcttttttttattaaaagtggagttggaaaagaaagacggtatgtggtttggtgtgcggccttatggtgcatatggaagacaaggaatggttgtattttcaataatacaactttttgaagagaaacaagtgattggagatatataatttgtggcctggacgtggttgaggagtaagagtaagtcgtatgattactcaattcctttctagtctctaaaccatggtgcgtgcattgatgaggagatgcataaaaaattgcgtatgtatgtctattgcgtggcctctggtaaagatatttggcccgagaaccttactatcgtataacgatctcgcatttatgcct

SEQ ID NO: 92885 - DNA, 330 bp, Glycine max
agctattacttatgtggcatggcgggcttctttcactttcttgtctccaacgcgagctgtgaccaccgatcttacttaccgcgatgcttctcttaatatcctcctgagtgggcttgtagcctaaaccatacttcccacgattttctgaggcatttatcacgcatagtttgccgctgttgtctttgcataaacccattcctggtgcctaaccgttgcccaactaatctggagccattattattgttgcatcggacatggaggctttcctagagaaggattcccatgtgaaattcttaccatcttaaaaactggaagcagttctatgactct

SEQ ID NO: 92886 - DNA, 495 bp, Glycine max
  unsure (1)..(495): unsure at all n locations
ntgaagattaggtcttagccagtgaaaagatcgatgtgggtatgaaataaggcaaatntagtcatcctgcttggaccatgagaaactggcgcaaatgaagagggtgagaaagagggagaaacccatgctgtgactgccattcctatacggccaagtttcccaccaaacccaacaatgtcattactcaatcaataacaaacctcctccttacccaccacccagttatccacaaaggccatccctaaatcaaccacaaagcctgtctaccgcacttncaatgacgaagaccacctttagcacaaaccanaaaaaacaccaaccaagaaatgatatttgcagcgaaaagcctgtaggattcaccccaaattccggtgtcatatgctaacttgctcccatatctacttgataacgcaatggtagccataacccctgctaggttccctcaaacccccatttttctgaagatatgactcgaacgcaacatgtgcatatcat

SEQ ID NO: 92887 - DNA, 161 bp, Glycine max
aaaaacatacgacctaggtgaacacagagccatttctagggtaagattgggtgttgaggagtgcaatcttagctcagtggaccttacgtgtcaatctcaatcgaacaagcttaaattgatgtaatacactcgcgtgaggagagagtctggtccataattac

SEQ ID NO: 92888 - DNA, 355 bp, Glycine max
  unsure (1)..(355): unsure at all n locations
agcttatcaatgttcctgtgtaatcatgttctatctntgtctcacgaaccccttcatttttctctatgcaaatggagaaactctacattgttggtgacagatatggttggcatgacctcttggattacaccatctggcgtgatggagaagagtctcatgctgctgatgtcctacgtaacgttagagttttacctccatagtcagaaacttcatgcgttaatttcctttcttattcggcaactaatgtgagacttatataataactagtttgactcacatgattccatgaactntagttcttcgtagagtatactgaacagattttattgttaaccatctctgattgacagaaaca

SEQ ID NO: 92889 - DNA, 465 bp, Glycine max
  unsure (1)..(465): unsure at all n locations
agaaactaagcttgaacccaacgtacaacgatgactaggctcatcatcatcttgttgcgcttacgcataaccttcataagctgtaacnactaatcgtctcttaagattccctatcctaaatgaagtttgtttggggacaaatacctaatacaaaaaaactcaccaataagtctctattgagaatatgtttacatacattctatggtttagtgaatttggctctaaaggcctatagagctatatatctacaaaatgacttctcctctccccaacatagtcatgagttttgctactttagaaaagtaagccttctttcttcacgtaagtgcagtttttatttcttgatttctagttgtattgcttgtataagactcatgatgacaaattaatctctcatttccagaatgattcatgtcttctggagagcttagcacttcatatgcaaatatattgttgcatggcatc

SEQ ID NO: 92890 - DNA, 354 bp, Glycine max
ctgcaagcttatggaagatctttgatcttccgtttttaggactccacggaggccattgcctgggtctgccaatattactaccagcacttgaggagctttacctttggggacttccatttaacacccacattacaagagttagaagagatcctgcgatgccctctgggaggaaggaaaccatacctcttctcaggattctatccctccctagctagaatttctgagatcgtcaaaatctttacacaagaattatactgtggaaagcaagcctgaaatggggaggttcgggtactgtcgcaacctacccttggacgggaggttgacgcgtgactcacatgatgcgtgttacactaa

SEQ ID NO: 92891 - DNA, 271 bp, Glycine max
aaaaatttatgatgagaactagctcgcttcgaagttgggattagaagcttagacgattgattgttgtgcggttggatgcatgtcgtaatgatggtacgctcactaaatgcaatgtttcggaacaagcccaagtactcgtgcgaagactagtggaacaatcattgataaaccagtgccacgtaaagcaacgttctattttcttgtaataccaatagtgcggattatatttgcatcgatgctaattgctcgcccaaagacatgacactatgag

SEQ ID NO: 92892 - DNA, 394 bp, Glycine max
  unsure (1)..(394): unsure at all n locations
agcttngtgtatgacctaatgatgacttgtgctcctgtgacacaactccgaggttcaacaagcttcacatagcttctaacactgtgcaaaattgatcttgcaataacaattacaattagtaactatttttccagtattaggaaaaaaatcaacaaaatctaattcgcattacctgacaagagtagtctccacctgatacatagattgccaatggctccgcatgctgtaattgtactctactaggaggtaaacatatacgaccacatggtagttgcccttctctgactgaatggcataagaaacctcgtaaattgatgatatagttgaggtgtaggctaacgatctcaggtatacaacatctcagaggaatgaatgtattgcactccaccatgtt

SEQ ID NO: 92893 - DNA, 456 bp, Glycine max
  unsure (1)..(456): unsure at all n locations
tcaagcctttaagagatatatgctcctaagagatttgtgatcgatgcanaggaaagcccgccgttgtggtgttgtatagaagaaccaccaacgccgcgcgacacacagtgaagaagaccatgaagcggtaacctctctctctctactatttccccccttttcacttccacttagggttaggtttctctccctctctcttcaattctttaggatattctctttgtttctctcaaatcgaaactcctttggagagattaacaaaaccacaacaattactgtcatcgattcgttccacaattttctttccttttttatgtgttcgattntcttcaataaaatgctactgagccgcacgtcgatgcagtgcgcgtggaacacgcgaccgcacttatgtagcaagtggagcgcgttgtcgacgtcgtcgaactccgccgaacacaccgcacactgaaacgc

SEQ ID NO: 92894 - DNA, 372 bp, Glycine max
agcttcaagctgctcaattgctctacgttgctgcatggaagggcaaaggtctgtatggtggtcagcagaagagcacataccacatagccttgcgacaggtacagatatctgattcaaggccagctgggttaccaagttgaccaacgcattcagtgtgccttcaagcttcttagtatcagatgatgcagatgggtttgtagctacctcatgcactcctctaatgactatggcatcatttctggcactaaactgctgagagttggaggccatcttctcaattaaatttctggcttcaacaggagtcatgtttgcaaaggcttcaccactggcagcatctataatacttctcttcatagtactgagaccttcata

SEQ ID NO: 92895 - DNA, 462 bp, Glycine max
  unsure (1)..(462): unsure at all n locations
acctataaaactcaacttgttaggagctcttaatcatctttctcttcttattttctctaccacattagagcaagctcttnnttntgttcaaaatttaattctcatcctcagaagcttaagatattaaagatctgagcaatttcgaatagattcatcaaagtaaggggggtctatcaaattctcgaaccctaacctcgttgtctttggaaactaagtttcattgaatgttgttttgatgatcaaaattcgtagctaattccttggatggaactgcattatatgttgtgtttcttgaaattctaacgttaaaaatgagttccttgagcgtcaaaacttaatgtgagctctaaatttctctaagatcggagttttctagtaaaagttatgaacaaaacacgtttaatgaatcttatctatttcttagactacaactgtcatgaatataaagctggtgttatggct

SEQ ID NO: 92896 - DNA, 221 bp, Glycine max
attgcatgaggatcgggacaatgtagcatgctccattgctatacataacaacataagccttaagccttctcattctaatcctctactcatgaaaactagcttatcaacgaaccaaaactgcctcaccaaaataagcacattcttactatttggagcacctagagatgaataaaatataccactgggatgctgaatacatccaggattaatactcactctgt

SEQ ID NO: 92897 - DNA, 153 bp, Glycine max
cttaagacaccgcggctgcagctcttctatgagacaccctttttttactcactcccccctcagcatgagatcggtggatgatatacgcccccccatatgcattgatatccttattcgacaaatccattgacttctattctttggggattggaa

SEQ ID NO: 92898 - DNA, 437 bp, Glycine max
  unsure (1)..(437): unsure at all n locations
tagactgagttcagcctaccatcctatttctgttgtcattctgaacgaaccattcagttattgtttgacctcgaagagatgtgtcttacagcatgaatggaagcttggatagtnttcttccattgatagagttcacttataataacaagtttcactctaccataggcatgactccctatgaaaccttgtattgtagaacgcgtacgacacccctatgttggttagagcctcgagaatgcctcaccttatgaccataagtggtacagcaaaccactaagaaagtatagttaatttatgacaggatgagaactgctcagagtaggccgaaaagttatcatgatatgaggaaagaagatctggaattcgaggctggcgatcatgtattcttgagagtctctccatggactgtggtgggcgacctttgatatcccaaactc

SEQ ID NO: 92899 - DNA, 295 bp, Glycine max
  unsure (1)..(295): unsure at all n locations
gtctatctatggagcgcagactcactcttattaattcatgtttatcaacaaagtgtaccataattctatatatcaacaacattatntgattacggtagcagtgcacggttattgtattctatatataatggcacgtgattcgtaggacctatggttctgctagtctactggtttctaccttcgtatattagtacctcgtggtactcacagttattaatacaaattataatcttgctgataacaacacaagactactcatgagagagagaacggcagtggcncgcacaacatatat

SEQ ID NO: 92900 - DNA, 220 bp, Glycine max
tttgtttgcttttatctcgcttttatattatcatacaagtcgtatgtactataaatttatatgtggcacactttgttcttattactaacctttcatatcgtgggatatggatatgtgaattatataagctaagatactactagatgatcggacttaaactgggggttgaatatatttgtttaaatctgtatcaacacaagactctttaagctttataaaa

SEQ ID NO: 92901 - DNA, 299 bp, Glycine max
tgctctcacttagtcataacaaaacatatcgttatatagagtaatttaagagacataactgatgactaatatctaagataatacacaatgagttttttgcaatgattcagtcaactaataaaactgagatttacttttattgatacccacttttatactatccactacatccactattataatgatttaattgtctgatataagctgagtttatattatgataaattacttatgggttattatatattattaacaaagattagtacacgaaaatcatactaattgaatatggtatatta

SEQ ID NO: 92902 - DNA, 222 bp, Glycine max
  unsure (1)..(222): unsure at all n locations
ctagagatggccctatatggtctcaagtagtctccttgggctngggtcgcgaggntcactcaagctatggtatctnntgggtacaagcanagtcaaggtgaccatactctctntatataacactcccaagatggaaacttacttgctcttggctatgccgatgatataattattgcagcgatgatgagcttgaaaacatacttgatgagaggtagctgccaa

SEQ ID NO: 92903 - DNA, 325 bp, Glycine max
  unsure (1)..(325): unsure at all n locations
gctatgagacaaaaagaatatgagagcacgctngactgtggcaacttatgatcgcccaaatcacagtggataaactagcaagaacaacatctttagcttgcgggcgaacaactaatcttgtcaaccaccaagataagatccatatgagaagcatgattaataccatgaccatgtgagttatagatgataaccaagaccaatctatctccaccaacttttctaaagagacatacttgtgcaagcaagatgccacaatcttgtacattcgaaaaatgaaaacataaaaaaatatggaaatctggtgctacttgaggagttatcatct

SEQ ID NO: 92904 - DNA, 310 bp, Glycine max
aattgaaagcctacttcatctgaaaaactcggcacttcactacctatatttttataagaactggtcacaaataaaagaagactctgctgactgatcaatcaactgtgtttggactgatagagcccggttcttggtctattcaacagatgagttaatgaactgctctccaccaatataataatagtgtattttaaaatacttaaatataacttttattataaataatgtatatacatatgcagctctcctaaaaatattaaaacagttaactgtttttatcaatgagggttacccacttgttttctaaaaa

SEQ ID NO: 92905 - DNA, 374 bp, Glycine max
accagcaagtgagggtgggatctttttaataatgacaatatttgcgggacaataagaaaatggagggaaatagaggagaacttctagttaagatacatatttaaatgccaaacgttgaatgcctcttaaatgatgtactcaatccactaaagagcgaaaggaaagaaaaagcagacaaatactgatcaaaggaatataagaattgtcaaattaatatgtgtaaaatgccctgtaatattgcgtgtttctattgcaaatgctataacataatgatatgatgctagccaaggaaccaatgtatatgccactattccaaatgtgcgggaagtaattttaatcaaaatgtctaatttgcaaaaaaaattttaacaagt

SEQ ID NO: 92906 - DNA, 224 bp, Glycine max
  unsure (1)..(224): unsure at all n locations
acatagcacataatatctatggctaaacanatatatttctntaaataatgatatatgaacatctatctttntaaacacttaacanatactntntntttctctatctntatctccatgtcanatcataatacatantttnttcaaatttttctctcattaagtgttaantgacatattaagtggccaattataactttgtttctcttttgagaaaactaagtaat

SEQ ID NO: 92907 - DNA, 220 bp, Glycine max
  unsure (1)..(220): unsure at all n locations
tcatgcgggctatctactatctgaataagaattggacgtctcctcgaagagatctagatgaaactcattagagttgctgcatacagtattttattttataatatcattntntctactactctaagcaacttacnataatttttctccaatccaatacatttacaaattacataaatagaccccacaatctaatcctataaattatttcatatacaagtga

SEQ ID NO: 92908 - DNA, 224 bp, Glycine max
gggatggccaaaatgtgcgcatttggttgttctgctgatgagtgatggggttgatggatggcctagcctatagctttgaacatgggacatgccacttgtcccgtctctgctatgatactaacgcgcctcaccagtgtcggtgaatgcctatggattacgcgtgacttgtaggaacaaccatgggcatatggttgcacaatttctatttttggactgcattattc

SEQ ID NO: 92909 - DNA, 142 bp, Glycine max
agctaatattatatacaataaggaagaaatggaatctccagtgctaactctctcgattcataacacacaaacactattatttaatatgacagattatttaatcttaataaatatttactttcaaatcataagaattctataa

SEQ ID NO: 92910 - DNA, 155 bp, Glycine max
  unsure (1)..(155): unsure at all n locations
tagatacaatcccaagtggaggaatcatncaaatctgagatggacaagtcctncacaacaacaagagcctgtcccttcttttcagagtgctactagtacaaccaagccatatgttccttcctcaatacagcaacagcatcaacaacagtcacaac

SEQ ID NO: 92911 - DNA, 258 bp, Glycine max
  unsure (1)..(258): unsure at all n locations
ggtatcgataccaaaatattgtactcgatcacagctttntgaaattaattggaacgatgtaaattcaatatgaaaactttctcanaacacatttgctactagtaatcgattacaacaatctggtgatcgattaccatagagataagactctttggtatacatgttntgagaaaaatcatgtgctactcaattttngagaggaactcttcatacttatcctgattaagccttntcttgattctcgaatcttgatcttga

SEQ ID NO: 92912 - DNA, 240 bp, Glycine max
gcgacccacatgttgtagcaggtaccagactacatcactgatcgagactacatcaaattcacaggttaagctaaagtcataaaacctcatgctactaagagccaatactgctttaaaattgtggatagaaatggagaatcatgatcttgtgtgggctgtctgccatttttgtgtgccttataaaaaacagctctagtttttttcttctttggtcactactgttcgctctgtgccattaag

SEQ ID NO: 92913 - DNA, 333 bp, Glycine max
tgcaattgttttttacttttttactctccttttatgtcaatttttttttttttctaagtgatgatgatttccactaaagtgttcaccatccacatctcgggtataacataaataattattattactaaagtattgataatactggtctcagtatgtatatagtattgatagtagatagtactcatgtatttattttttaaactcattttatcttacagatgattaaacattctttttattctatactagatgaaaacatctccacatcagtattatagttacattggtgtgaggtatttttaagaaaaacacccacattgtgtctatcttcat

SEQ ID NO: 92914 - DNA, 215 bp, Glycine max
  unsure (1)..(215): unsure at all n locations
tgtaatctgtcaccatatgctangcagtnagcctcatcatgaactattctctgtactatctgtcaatncatatacatatatatatatatatatatatatatatatacatcctcacacactaaggttgacgatcctctttgtgtgcatactctcatactcaaacattctaagtaattctaaagagtctaaacgtctacncatttaattcatggaat

SEQ ID NO: 92915 - DNA, 394 bp, Glycine max
  unsure (1)..(394): unsure at all n locations
gctgcactacaaaactantagtgccacccaatacttctgactacctcaccttatgcttgtggtgcacgtatgtatatgtggggacactgatctagccgtgcttccctggagaacagcacttaagtgacccatgggaaccaccaacaccatacttatgcagtggatatttggaatttcatggcctcaatatatcaacacatggcagtggaaactaccttgtaatagttcataaaccaatggggcacctaacagccaacacaaggcctattcttgaatacgataatgtgagagacttgctattatgaagttcctgtcatcaaagagctaggcaccataagattaaagtcacgggacatggaaacatgcaaccgactagcacttgagcaccataaat

SEQ ID NO: 92916 - DNA, 183 bp, Glycine max
cacatcatatgattatgatgatagatggctcattattctcacaaaggtatactcatcactgtcaaattgagctttcataactatcatgacatgtagaggacaatcaaggatatcatgtcacaagatgtcaagaactcttatcttctaaacagatacacatttcatgaacatatcctatatctc

SEQ ID NO: 92917 - DNA, 181 bp, Glycine max
  unsure (1)..(181): unsure at all n locations
tgttgagcttgactccttcaattcnggttggccttggaccaccaccatttcctcctctcctttcttcctcatgacgttcacgactctctaatcgctcaattctttcatacaacctgctcgntgttctctctcaatagcctttgcatttaagcattgagagcatccaacaagaatctttgtg

SEQ ID NO: 92918 - DNA, 325 bp, Glycine max
acttgagacaccagcggatttttacgttttacctagaaaaatataatcggacatgtgtcgtcatttttccaaaaaatatatcaattattttttatatttataaaatatattttctttatgactacatctataactgactatatatcttccttaaaaaaaccaattgtttattatatttatggacataacagtcttttataatgtgacctatatcattttactaaaataattattttgtatgtttcaccccgtccttggggactgtccaatttttttgtttaaatttgcctatattaagataataaaaacattatacttttattct

SEQ ID NO: 92919 - DNA, 180 bp, Glycine max
  unsure (1)..(180): unsure at all n locations
agatatntcagcatgtctactatatgtattatgagcattacaagagcaacacagaatgcatcacgcgtggatatatacgtgttcaataaggtgtgtacgcctaactggcgaagaagccgaaagggcacttgtgcactgaagcatgatgaaataacgtgtacctcagaacaaacactcatc

SEQ ID NO: 92920 - DNA, 378 bp, Glycine max
acttaaaatactgctccattttttctatcctaaaattatacttatcatgaaaaaaaacacctctggtaggttaatctacttgtggaatgtatcacccattttgcccaggcttaaccctattgaatatatataataataacgctggggatcttaaaattatacatttatatttatatgcacccattgtcctggcttacatacatttatgtggcagatcaatccaaaattaatttactcaaatatgtggtctttctaaactcccatttaaaaaactacttattcctgatataaaagaacttaatctactaaaatatgctttcaatccaatgtgacagatgcagccacttcacctaaaatagccctgtaataccttcttct

SEQ ID NO: 92921 - DNA, 159 bp, Glycine max
tatatctatgtcgactatatttttgtaaagaaaatttatcgttgcaggggcgccgggtccgcaagcaggctacgaaagagaggtaagctatccggtatcaccacatttgtcagacacaggtgtcgaacttcaaatatgaatgaaatctgtaattaaatg

SEQ ID NO: 92922 - DNA, 232 bp, Glycine max
  unsure (1)..(232): unsure at all n locations
ccctaacccattaagatatgacccatgtggatacatataagatggccaataaggccaataagttcacccaactatcaatgcatgatagagtcaactatggaaaacaatgctttgaaatttntaatntaacgaagagcactcttacaacaaanaatatttcccttttctcatcatggagaagaccctttctgagttntgtctttggaatgacagtgcganctattaatagtca

SEQ ID NO: 92923 - DNA, 219 bp, Glycine max
  unsure (1)..(219): unsure at all n locations
taaaagtgaaacctatgtggaggtnaaattcttacatcttattcgtgacctcgaaggatgttctangtattcatgaggggcaattgccttgacatatctntatgaagcatcttactcgtgctagtttattgacacaaagcagattggtggctatgcactctctttcacgtaattaggtgtttggtaattatctgtatattataacatcatcatgatgaa

SEQ ID NO: 92924 - DNA, 261 bp, Glycine max
  unsure (1)..(261): unsure at all n locations
atgttcatgaaaaatcagccgaccgctacgaacgttccgaacgcttncggaggaattagcgaagtttgaccgtcttacgatcatgtcgtcctgtttcttatttcacggaagacctcaccagctttcattcttttgtccctgggggccattcgctatgatttatctccttcatactttaactccttcgaggctagcattatttagattctgtatgaaaaaaaaattcacgacgtgatgtcaccgtattggaaatgatcacgt

SEQ ID NO: 92925 - DNA, 237 bp, Glycine max
  unsure (1)..(237): unsure at all n locations
acctttgagggcgtgtgtnntagagaagataggaagctgtgagagtcttcttccatcgatagaattcacttataacaacagttntcactctaccattggcatggctcccaatgaagctctgtatggtagaaggtgtaggacacccctatgttggtcagagcccacagaaggccttaccttatgaccagaagtggtacagcatatcactaagaaagtaagttaatccaagaaaggatg

SEQ ID NO: 92926 - DNA, 206 bp, Glycine max
aacatctattcaccaacttgagggggggatcacgactaagcagctgcagttagttacaagaagttatttgagtagttagttggctatggcaattagttggtactagaagttatttgagtagctgagtgattactagaagttattagaagttatttaagtaagtatgttgggtacttaagatagatattttctatctttggataaat

SEQ ID NO: 92927 - DNA, 200 bp, Glycine max
  unsure (1)..(200): unsure at all n locations
gcggacttacaaagattgtcctatctgcgttggagtgacccatattgtctccattgaacctctccagngaatgggacctgtgtcactatcactagttntcaaatgtataacaaattagccatgcaagaactagttgggctcatagacatttgctaagtatttgtatgtaccgacctgaagggtctgatcatcactgtcta

SEQ ID NO: 92928 - DNA, 233 bp, Glycine max
  unsure (1)..(233): unsure at all n locations
ctatatttatcttttactcttattctataagtcttatatttgagtagaataaanaacttatgatgtgatactcttaagtcttgacatntgtttatatctgacagacggtcttttgagttaaactttgctctcgtgcttaattcataanattggtcctcatttgagttaaataaataagttaagatgtatttatgcttcacttaatatacagtatattataaattgaactcatt

SEQ ID NO: 92929 - DNA, 233 bp, Glycine max
  unsure (1)..(233): unsure at all n locations
ctacacgttgctatgccctaatataattatcgtctataatgtattntagtgngaaggaatgtataatttcatatgggcgtatactggcagatattatttatacaatacaggccatattgatgtatatactgctttcttattaagctttccctaattatattatattatatttattatttattattgaagcagaaagcttcctttatacgcctaactgaagattggatctcatg

SEQ ID NO: 92930 - DNA, 266 bp, Glycine max
acacattttgttgcataagtataatcaaggaatgaattctatttgattcataatgatacaatggaaccattatttctgtttgaacacaacatatacacgaccctctattaagggtgttgcagaaatatctaagagggttctagaatataggtcttacatacttgctaatacaccgacaattataagcatatgctattgcgtgattgactaacaacaaggactgtatcgtcatacaaaatatgtgttaaaggaagaacttattaaaa

SEQ ID NO: 92931 - DNA, 271 bp, Glycine max
  unsure (1)..(271): unsure at all n locations
gagagggagagagagagagtatcttgttgaagcacatattataatataaagagcacaagacatatagagatgataataataataataaatatatttgtattgtattatacacaattgagaaaaggtctaagcgtaacttgatctccatggatatcatttctctctttacgctgtgaaatgatggatgttccaatatttcttcatgggcccanatcctcaactaattaatttattgagaagttctatacgtactagaagacttcanaacatg

SEQ ID NO: 92932 - DNA, 268 bp, Glycine max
acattggtcttcttcgtctcccgtagtcttatttaggatcgatagacatgcccttagggtctcttgtgtttggcactcactcctctctatacagaatttttctcttgtaaaaatttaccatatacatgtcgtgctataaagatgaagtataacaaccactcaccactattttttatcattcactcaatgttcagtcacgctatactttcctttaataaaatgtcagcagctacatttcgttcaataaaacattagcatctaagatttg

SEQ ID NO: 92933 - DNA, 159 bp, Glycine max
  unsure (1)..(159): unsure at all n locations
tcacataatccttgcctcatcgcttgtgtctgatatcgtgtagttgctaaaccctanaagttgcattttatgtgccggtgcactgcgattcaaatttaaccttcttttgttaacttgttggaaataatgttaatatggtgacgctactgtggcttttat

SEQ ID NO: 92934 - DNA, 167 bp, Glycine max
  unsure (1)..(167): unsure at all n locations
ctagcatctcgatatattacagggctcaataggacatccgagntaaaagttattgtcatttgattnttctcagagccctccgtttcaattacgagcgtctcgatatcctatgggacacaatccgacatccgattcacaagtattggtcgtttaattactcagagctc

SEQ ID NO: 92935 - DNA, 207 bp, Glycine max
agccatcctctcactaaatttctggcttcagcaagagtcatgtctctcaaggctccaccactggcagcatctatcatacttctctccatattactgagtccttcataacaatattggagaagacgctgttctgatatctgatggtgtgggcgactggcacatagtttcttaaatctcttccagtactcatacaagctctcttcactg

SEQ ID NO: 92936 - DNA, 254 bp, Glycine max
  unsure (1)..(254): unsure at all n locations
actctcatccacttatgataaccgncgatgagtccattactggcttctctaagctctctgtgctntcttcacgccgcataccatgccttgcgaactccttggagtaccctcgcgttgtggtcactataaccncgtgcgatgaaaggcgtgatgctctcgtctaatggcgctcctctcatggggtagccaagctgtcttatggcgagaacgggattataagtaatacaancccttgttctcatcagggaacattt

SEQ ID NO: 92937 - DNA, 289 bp, Glycine max
gtctgcgataaaacatagaacgtgccgtagtactcagactaaataactcaaactacccagcacaagggtgagagtttcacgaatgatggctctgatcagcaaattgagaaagagagtacttggctcattcttatggctgactatgatatcggaattgtgactgcagattgtgaatgatattgctacaacatcagtgacacataaaggaagaggctatagattacacttatttttgtgaaacaagtagaaagggtgtctttatttccacatcatcaaccctaagccaaga

SEQ ID NO: 92938 - DNA, 294 bp, Glycine max
tgtgttcccatgaagagatacgcgcaatatggagcccctatctgtcttataaacacccacaaaccagaaagaagcccgtccagtcatacaaagcaacctaataatggaacctctccccagctgtaacaaaaaacacactgtagagagttgtagaagatcatgacatatttctctctacgagagctcgaattgctagaatgcttgaaagtctaattcactagaacaaataaagttgtgctaataacactgcctttggaaaaatgatttctcaaacaatgagttgattactaacct

SEQ ID NO: 92939 - DNA, 436 bp, Glycine max
  unsure (1)..(436): unsure at all n locations
atgcttttaaatcattatttagtgtatgctaagttatcgacttcagtacaggcacaaatggttagtcctaattaaaaaaaaacagaagcatttacgcttatcgataatcgattattttaataaataataaacacanattgaactaccganactaacaacaccaacaatattgctagaggaaatacatttattgtgtcttacatattgacacagngttccatcatcactactagaaatagattttacatggttattcgacttcacatgatattgaccatgtgaagaccacgtgaagatattgtatatggttataaatgtgtatgacaatcacatggtattaataccgtgtattatagatatagaaaactattatttaatcactcgattgaaaaactgatgtaggtagtacatcatctttaaactgtgtactatacac

SEQ ID NO: 92940 - DNA, 472 bp, Glycine max
  unsure (1)..(472): unsure at all n locations
agctcgagtgggatttccccagttatattattactataaagttccatgtcattgataaaaaaaatgtttatagttgggcagataaaaaagtctaatgaatgactaataatggcataacacatttgtaccaattctatcgcaggggttaaactaaaatctaatagaagtcgttatgttaaatattgaactacacaaaatgtcaaggtatatgtgctatgcaaaagtgcaggtctgcagcatcaaatcaattgtagaactataagtaaatggaatgaaagcaatgtggttccactatgacaaggagagtaacacaaatcctctataaatctcatgatgaatggagataaaaagaaataatgccattgatgaacacatgtaataataaaaatntatcacgactttgacatagaaatactacattttatagtttttacagaagaaagagtcattatatatttagcatatattatac

SEQ ID NO: 92941 - DNA, 339 bp, Glycine max
  unsure (1)..(339): unsure at all n locations
agctngaagtgggagttttaaagaacatttggtttctacatgcttaatttctttgagtgacattcgtattgcgtactatcttgattgacggatcttagcacattcgatatatgttctgcatcatacatcatcattgtctaagtgaaggaaattttctacagctaaaaaattttctcacaggaaaaaactctctattttaatcgattacaaccaactgtttgaagcttgtacagttgagcctccgatttggttaatcaattacatatatctcacaatacattaccctgttatttgagaccatgactaatttantcaagagtctctgctttaatcgattac

SEQ ID NO: 92942 - DNA, 444 bp, Glycine max
ttaagtcacctgacgctgcaagctctggggaataaatacatgaatgtatctataacataattcatgagatagattcagaagactatgtaagtatgagattttatcattgattataacttatttaaaagaattaattagtactattggcctataccaacaagatgtattttttttgtagtttattacttaaaaaatttatatttaagtgtgtttaactcgaaacaattatgagattaatgactctcaaatttggtttccaaagaagcatatgagtaaagatattacactctcaaaagtctcatgttgatttatgaggataatcaataatcttgaaagtagtaaattgaacaagtggatgatatcagaacaaatctctctcctaactagtgtgatgggatcaagaataacaaaatagaattagtggaatgtaaatcctatgcctac

SEQ ID NO: 92943 - DNA, 264 bp, Glycine max
agcttgtgccatcaaatataaaatatgcttacttggatgatagcaaaaattttctagtaattatatctgccttccttcctgataagcaagaggagaagctgttatctgttctcacgaagcataataaggatataggctggaccctggcggacattcctggtattagcccatccacatgtatgcatcgaataaatttagaggatggggctaaaccattaagacagccacagagaatactcaacccggtgattctcgatgttgtga

SEQ ID NO: 92944 - DNA, 359 bp, Glycine max
  unsure (1)..(359): unsure at all n locations
acttatgnggcagggcgggtttccttcactttcttgtttccaacgctagctctgaccaccggtctttcttcccgcgatgcttcttttcatgtccgcctgagtgggcttatatcctaaaccatacttcccacgattcccttgagtttttatcagactacacatgccgccattgtactttgctaaacccatcccgggttcataaccgttccccaacataactcgggccatcattaccgccgcctcggatagacaaggttgccccaacagtgagtccacggaggacatgctgaccacctcaaaagactggagagcggtntctaacgattcttctgcggcttccacatactgcatggaggatg

SEQ ID NO: 92945 - DNA, 451 bp, Glycine max
  unsure (1)..(451): unsure at all n locations
agcttatatgcaatgtggtaccatgtcagtgaaaaacctcgtcgggcgcctaggaatacatgacaagacaaaccacacaatagtaagtcaagtcactctcactaggtaatatcatagggagaccagtcagggtcacagtgttttgcgagaattctccaaccatatgggatcaacataaacttaaaggagcactcaaaccgtgtgacccccaaggcctacactccgaaaagaccgtcagggcctntccctcctgattcaagtcccacccacaaaatattttagcacacagactctatctatgaactgtacaaaacacatgactcctcaattgttctcaaaataattttaactcgtcgccctttaagggtcttatcattaactcggtggccttaaagggacttaacattaactcttccccttaaagggacttaacatcaacttcgtcccctaa

SEQ ID NO: 92946 - DNA, 424 bp, Glycine max
  unsure (1)..(424): unsure at all n locations
tagttcctaaatttattataattgaggaagcttcgccaagtatccctattgaaaaacctttattcaaacctttcaaagttagtgagaaggctaaacgaaaatttagggaacttagaaaaactagatccttaattgaaggcgtaggtgataaccatagtgaattacttaacaagattggtagtttacttaaggtcattccagatactcctcaagcctcggaaaatacttccaaaatggtaacaagaagtacctccaaattaattaatgttattaatgaagatagtgaccaaaactcagataacacaactgagataggatcagtgtcagaaaagaatataaatccaattaattccaaacactgganaacaccctccaagttatattatcaacgtccaactgcccttgacctactattagaggaaag

SEQ ID NO: 92947 - DNA, 436 bp, Glycine max
  unsure (1)..(436): unsure at all n locations
agctntacagcagaatttagtaatgacctactaacctagaattaaaataacttaatgccattaacctatggaattaaaaaataacttaatggctgagtgtaactgaaattgtggcaaccaaaagtcacccccaacagccaataagtcagccaccatttggtctcccaaaaggctgatgcctatgttgccaattgggcccttattacaacttgaactaaacctaactaaagcccttttagttgattaacccaaaacatatttttggtcagccaactttagagggattgggccattatttagacaaactaaacactctaatattgaaacaaagtggtgtcatttagtcctccttcatttgggccatgatacaactcacaaccttggacttttctccttgaaacttgggcttgtattcaaatagtatggacagcacttg

SEQ ID NO: 92948 - DNA, 441 bp, Glycine max
tccctcggaccttgaacaagcaactaactcctctttcttaactatgctatgtgctcgtgactggtccctctcttcccttcgcagcttgagttcactattgctaccccatagagctccgcgaaatttattccggccatactcttccttgcgagccctcttggtctcttgttcaagggctcttgcggtaattgcattctcttcccgtaacccggcacactccttccgaatgtgtgttgcggccaacttgaacttctccttggcaagtttcgcctttcctaactcgcttttgagagcttggacttcttcgtcctcttccggtgcttcaaaactctcttcgctgacgacttttaactcggcgagccaatctaaaccttgtatatgaactttcagccattcatggtagccaccaatgatgccattacgaatgcctctagttcctga

SEQ ID NO: 92949 - DNA, 446 bp, Glycine max
  unsure (1)..(446): unsure at all n locations
tagcttagactgacaactanaagttattattgtctcattagacctgagggagactgaanatatttatattatttcttataattttatttttaatttaaatatggaaaatgttagtgtatttttgtatgtttttaaatttaaaatagatatttacataatgttttgaaagaaataactttttttttaaatagctacatagttttttcataaattagtaactgtagtttataaaaaattacatttttatattagttattataaaaattaacccaaacttcttatattatgcaaattcattatcgactttttttttctctttgatagggaccaatgttaaacaaagttgaataatttattgatcaaattatttatattatataaataaatgagaaatgtatgatacatttcaaatgacattgctcacttattatttcaacaagaaaatt

SEQ ID NO: 92950 - DNA, 203 bp, Glycine max
gacactataaatctacgctgagatagaactgccctttggcgacatggtcttttgaggacgtgggaatatgaacaatgcgatcccctggatgtcgtcctgtgaagtgactgtcggagcctgcaatttgctagccaagaagatgccaaggttgattgtggagatcttcaatgaaaacgagcaagaaaattgtcttctggaagatg

SEQ ID NO: 92951 - DNA, 441 bp, Glycine max
agcattcaatcacatttttatttgtaatggacctgaccttctaatacttccatgggctattgcgaaatgtcgttgcttgaatgaatcttaattacactttccataaggatcgattctcattaagggctacatcggcaaaagattaaattaaatatgaatcaagcgtaattagtttatctcacttcatctatattctatattataaaagagaaccccaagaaaattactggcgtgacccttcttatagaatggcacctgtccctcttgctgggtttattgacattttgatgtgcttttggcttgttctgagcttttacacgtgggtgctttacttgtcgatttgttatcaacaagtggtttaccttgtaatttgtttgatcaacaacgcaattttagttcatgtgcctgatggctaacgtagcctccactctttgatgggca

SEQ ID NO: 92952 - DNA, 410 bp, Glycine max
  unsure (1)..(410): unsure at all n locations
tccatcaagtggtaatcaaagcacaagagcttcaagtttgtgctccttanacctccataaatgtttttgctttaccttctattccattgttgcttcttcatttttctccatgtatctcctcacatgtcttgtgctaaatgtttttaacatgattgtttagagtttccacctattaaacttgctatagaagctagatttcattttctatagttcaaatttcttgttcttgttcttgaaccatgaattgtgttgagtttaggttcctttgagttttgtcttgctacttttgtggctgaaacctaaactataaaattcttaccaaaatgttaatgtagaagacaagctcacaaatatctagagtgacttgttcacctattgtagtcttgtcatacaagtcatgtctaatcatg

SEQ ID NO: 92953 - DNA, 336 bp, Glycine max
gggagatgtttattttataatgttcagccctgctggtaattctagaatcacatgaaattactgaaaaaaattggttgcgcgaagtaaattcaagcccaggcgcttccgtaacgttttcgtgggcgattccgcgaaaattttcaaccgctcttcggcgatcttcatcgctcttcggtcttcaaccggtaagttcccaaaattgaacttttcaattcattctatgtacccttagtggtcctcatttgtttcgcgtacttttattttcatcccatttactttccgtacccccttttgacgcgctctaatcatttacttaaaccattttcttcgctaatc

SEQ ID NO: 92954 - DNA, 447 bp, Glycine max
  unsure (1)..(447): unsure at all n locations
tctaatcgcctgctgcatgctagcttcaacttgtgaatgattctctttcttgcttggcttcgccggaattgagactntggttcggacaaaacggagattcttgcgaacgggtatggggagagattgcattttggggggaaatggggctgaatatgcgaacagaatggattctcacctgcgtacgttctgagcttgtactatccctcgtgatggggaacacggatgggctcatatagagaagaaggggatttctcgatgcctaagattatgcttctggcgcgggtggtggtgtatacttcacactttttcattgatctcgtgaggacacatgactctttcattgctctcaacacaagataactcagcccccttatgggtgtttctatacttatttccctgattagaactatcttttactttaatctacaggtcatttcttactctctc

SEQ ID NO: 92955 - DNA, 457 bp, Glycine max
gcttcttatataggtttgcttctactgccacctcttcaacagcattgccatcaaagttgtccagcctattaatgtaatccatgactcttgaggggtctgccttgattgcagtgaggatcagcaaattttgcagattaaagtttccactgaaagcagaattttgtaagacaatcttttcaagaagctcaatcaactcatggggaagatcagcagtcataaaagctttcactgcagctgaaacttgatcaggactctggctttcaggcaaagcagtggacaccacttgatcaatcaactgccttctgaactcattctcaggattaagaactttctcccagaggtcagcatccatacgctccacgacatatctgatacaaacatcaagaaataacatgagtgtcccacactaacattatgaaatacaatgacaccttaatgaaggacagtacacacacct

SEQ ID NO: 92956 - DNA, 452 bp, Glycine max
  unsure (1)..(452): unsure at all n locations
ttgcattcattagaagagacttatcatgtgatttgaactctgactgaaatgttagtcactctggcagattgattgtggatgaatgcattgatctcatcccattaagagtgtggtccttaaatcttgagagaaacgactatcatttactactgattcttgcatgaatctctaaagtatggactgaatgcatgaattgaggattgtgaaggccatgttagtatgtgatatccacttagcctaatagctgaccacgtgcttaaatgatttatccctcgcacccagcttaagctgaatgaattattgattgattgaaccttgagcctatacagtgttatctcctactaccttgncttatgttgtatgagagcattatccatatgaagcttggttcaaagcacatctgtcccaacttgagggagtattatcaagtaaactgttccaatttggggaga

SEQ ID NO: 92957 - DNA, 459 bp, Glycine max
  unsure (1)..(459): unsure at all n locations
atcctgaccctgagagatataagaggcttgtttgatttctcatttaccttaccatcactagacctgatatctcctttgctgtgggagtggttagccaatttatgcagaatcctcatttggaccattggaatgttgtcatgcgtattctgaggtatgttaagaaagctactggacaagggttgttgtatgaagacaagggtagtacgcaactatcacgatattgtgatgttgattgggttggatgtcccatggataggagatctacatcaggttattgtgtcttcattggaggaaatctaatctcttggaaaagcaagaaacaaactgttgtcgctcggtccagtgcagaagctgagtatcgatctatggctatggttacatgtgagctcatgtggatcaaaccatntcttcaagaattaaggttttgtgaagagttgcacatgaagttgtattgtgata

SEQ ID NO: 92958 - DNA, 323 bp, Glycine max
ggaactctaagtcacctgcagcatgcaagctcgcttgtatagaataattaggacacatatcctctcaaactcaatctgtctctagatctatcacttctcaatgaaagataagaaaccttacatctcttgcagtgtggctcccactatcgtcctcagtgctaaacgtataccctagactctaaaagcttcaagctctctcatcatgtctaggggaagaaaagcctctagtttgagcaagccatcacaaagatcggcgcaaccctggcatcacactgacggcgatcctaccattcatatgaagaactgactttagattggctact

SEQ ID NO: 92959 - DNA, 418 bp, Glycine max
tgtatacttgtggttcctctattaattcctttgtttataatctattcaatgagcttaaatatgttattaaactaataggattcacacttaaaaaattggaaaaagtatactaaatttgcatgtgggactacctaaatatgtccttaaaataggactacctaaattcaaacctgttggaaaatatgcatgtgggaattctactcttgacctcttcaacaataaaatagctagtttttagattctaaatctttttggtatagcccatttcaatattcctgccagtttggtgatttttctatgtaggcatgttcaaactagttaaggtggagagataaacaattataatgcgtgcttgtacgcttgagacttatataactaaagaatcatatcttgatctcatgtgtcttattatggtatt

SEQ ID NO: 92960 - DNA, 418 bp, Glycine max
agactttaactcatatttcaagatcatgctttcaactcgcgactgatccctttcatctttatggagcttaagctcattgttgctgccccacaaagctacttggaacttgttgtgagtcgtgtgccttatttttgggccttctcggactctcgctacgaggcttcggcggcggcgatattgatgtcctttagttcatcagactccattcagactttgatggcgttgacaatgaacttctatttgactgctcgggcttgctcaagctatgctttaaaagcttgaacctcctcactttcttcaggagcttcagcctattactttctcataggccttagctttgggagccaaaccaaccctcgtgtccggactctcaaccacttttgatagtctgttgtgaacccattactgtttccactaa

SEQ ID NO: 92961 - DNA, 429 bp, Glycine max
agagaagacgaaaatgaaggactgtatatatacaagcggcgaggatgtctcctgcacctctagaacctcacaatcactcacaaactcatctcaagctctcaggacgacttcctcttcaagctccattcactacaagtcttcacacagcaaaatctctctaaactctctggactcggacccttctctctctagaatctctcacatgcaaaatctcttcgagaaaaatggccgaaatcccctcctatttctgattttaggcttaaataggtggccttgttggtgcttacgcgcttagcacaactctggaccgcttagcgcacattagtgaatttcggcttaccgcgcgttttcttgctcagcagatggactcaagcggtgtgcttagcgggatgagccctcgctcagcgaacacgtgcagctcattcatct

SEQ ID NO: 92962 - DNA, 351 bp, Glycine max
accttaagacaccgcagcagcaagctagatgatacctatcctccttatacatgttatgttatgcccgcatcctaatttgctacattatcttagcaaatacggcatgtcattccaaatagaaatataatgcttagtataatgaaatctacaatttgagttcaagaaatcaatcctttctctgatcttgtgtcttgacatttcattgaagagtcttatataccaattctttagttattcttgctttgaccacttattcgaatggcatctctaacagcgtaatctacttgtctttaattcctgtgcatcgtcatattgtctcctatgtcatgacaatagaatctcggaggcact

SEQ ID NO: 92963 - DNA, 282 bp, Glycine max
atcacacacgacaaataagaagggggaaggagaatcgaacaagaaagaagacggcgaatcaaatcgaaagaaggacgaacaacgggcggataacaaccttgctgaacgaaatgaagaagaagccccctcaaatactctagacaaacagtcgctacccacataaactaaaaaagcaaacggtgaaacccagcgacaacttagttcaaaacactatgcgctaacacggaaaacgaccaccgcacacatgttcccaagaaagcaaggtctttacatacttagaag

SEQ ID NO: 92964 - DNA, 446 bp, Glycine max
agcttgaagtctggggataagctagaatatgtttagtcttctatatgcctaactcgcttgagtggcatgtatattggttgttatctcgtatgttgcatcttagaacacatcatatatgttatgcatctttcatcatcataggaagtgtgaagaaaagtttcaaagtttgaaagctttcttcaagaggcaaaaccctctgttttaatcgatcacaggattgtcgtacttcattaccacacaatgtttgaagcttggagagtagagtctccgttcaatttaatcgaatatgagtaccttgctatcgataacactgttcgttgacacactgactcgattatacaagagtcttaatttactcgatacccagcggtgaatttattaatcttttttgttatagttaaaatgaacagaacacttaattgatactttgatatctattgacaaaa

SEQ ID NO: 92965 - DNA, 452 bp, Glycine max
  unsure (1)..(452): unsure at all n locations
tagaatggctagacataatacatggcggngttcggtttgtttcattgttaaaagggatgccccacattatttccatgacacaaatgcaaagatgatgatttggaaattttatgcaaaactggtcatgcctgcacctatgcggacactcaagtgtcaaattattatggtcatgtgatgctagggctcacgattcattttctctattttaaatcaacccaatgtttccaaaatatgttcttttatcaatttgtgcattcatccgagtccattttgggtactcgagaaaatttcacagcattcacccttcaggtgtacacacattttttttcccaaaaactagctatgatcagcgaatttttctttatagaaaagttggaagtcatctctcttcacaagcatgtctggttttcagctagaccacttaattttcttctttttcttcctttttttat

SEQ ID NO: 92966 - DNA, 384 bp, Glycine max
aaacactttatatctctcatataagtggcactgcccacttgtacaattcatatctaatatgcatcctacaagatcataatctcgaaagtctataatagcttaggaggtacctttgtgataccacaaacctactttgcttatgcccttaagattatgatcctcttaacaacagttaagagagagtcctcatgaatggactagtatcttgtacattagcacactcttaacacgatattcgatcaactcaatttctgacagaagagatcctattttacctctatttctcgatacgtccacctaattatctcttcatccaaatcaatgtatgctgaagtacccattatagtggatgcttattcagattttccataccaaatatcttat

SEQ ID NO: 92967 - DNA, 160 bp, Glycine max
gaggaggcgccaaccactagagaatcagccatgaaaagagaagcatcaccaccaacagagtgcctcggaaaagatagttaaagaggaagcttcaattgtcgaatacaaatagagggtggggggtgggggatatgcacacaatagtgctactgtaaaaact

SEQ ID NO: 92968 - DNA, 457 bp, Glycine max
cgattcattctatgtacccacgggggtccacatttttgtttgtgtatttttattcccgtttcatttactttttataccccctcttgacgtgcttaagccattttacttaagtcatttctcgcttaacttaaaaataatataaatttccaccgaacgtttgaattgtattatccgttaacttcggttaaaatgaattccgaccgttcggtcttgccgtaaccacgttggaaatcaaaaagaggtaaaaaataataatataataacaaaaacataccttttagcaaaataaagcgaaaaatcaatcggacgttttctctttgggatttctcattcttaatcgaattgattaataactaaagtgaaactaaggctaaaatcaactcgcctagtcaagctcgctcattaaaataggctcttgaagtgtgcatttaatctctcactagtaaaatggacattt

SEQ ID NO: 92969 - DNA, 468 bp, Glycine max
tatctctatgatgaatcaagattgattcatttatgttttgatgataacaaagatgatgatcaatgtgatgacaaaaagctctaaggcctatctaagaatgagttcatgatataatcaagaacacctccagattcaagatgagaagctgaagaacacttcacgattcaagagtaaagttgatttcaagaatcatgattcaaggatcaagctttcaagatctattatcaagatttatgactctagattcaagaatatagagaacgcttaatcaatataagtatgaaaaggttttttcaaaaactgagtatcacatggatttgtctcaacacatgtttaccaaagagatatcttactctctggtaatcgactccatatctattgagattgattaccagtagcaaaatggatttgatacagttctcatatgaatttacaatgttccaattgatttccaaacaacgtgtatca

SEQ ID NO: 92970 - DNA, 447 bp, Glycine max
ctacgcttgtcggatcgtgaaactcttatccatatttcttttatactcccgcttcacttacacgtcaataacacgaatctgccacctgtggagaccatgaagtccccaccaacaaatgaatctcaaaggtcacctatggcttccacaacgacaacgacaacgatggagcatcaaagtacagaaaccatgccgccaatatctttagagaagaagttggcggcaaaactcactccaatgaagtcacaaccattgtcagagtcgtcatggtaaattatcgccacttctacgatgtgctctacaaccccttcttcggtgtcgccaatggccttcaaattgccctagttgtcagagccgtccagaataccacccacaatacctctttcgtccttcaaaagcattccaatagcatcaaccagatttcttttgcatccgctggaatcacaaaca

SEQ ID NO: 92971 - DNA, 442 bp, Glycine max
  unsure (1)..(442): unsure at all n locations
cgtgcccttggtgttaagcacaaatcctcgttctttatgcaaagnctggaagccagctcctagggatctggatgtgaatgacaaaatctggagtgagtggtgtagtgctccccaagctccaagaccatcggggtctctaaaaatgactttagcatctcaacatcaaatttcatcagctttccttgcactctgacctatctcggggacttatcttctggatcatataaatttgcatagaattccttcaccagggccacatcaatgtgaccatcaggctgcttggtcaaggccttatgctagttcctcagctcgagctccttgcggaactcatcatactcagaaatgtataagatgacgctcttctccgaaagaatgttccgggagtgaacattctatgcatatctcttccangcgcgctcagatatgaatctagtggtatcat

SEQ ID NO: 92972 - DNA, 462 bp, Glycine max
agcttggaaaagtagattgggcctgtgtcagggtatgtgagctatgcgcctattgataattaagatattactaaactcatatattgctattcaccacatttaattttctttccctcaaatttggtgttaagggaacactacaacatggacaagagattgctgctaagaggcttgcacaaacatatggacaaggtttaaaagaatttaacaatgaggttatgttatgcgccgaacttcaacatcaaaatcttgttgaatttcttggatgttgcattaaagaagatgagaaattgctaagatatgaatatatggcgaacagaagcttacacttctttctttttggttagtgtctgtatatctacttgttaattgaatgaagaatttcattcctatgtgtcttgctagattaaagaagataaacatgacatttgacagattctaaccgatctatactttttgact

SEQ ID NO: 92973 - DNA, 445 bp, Glycine max
agactgtcgctggaaataataataaaatttgcaagctaaatgaatactaagtaaatgtgtgtcctgaagcacgaggatgatcatcagtttaacccaaatgtttaagatcataagctaagacaaaattctgtcaaaaaaaaatagtggaagacataatgtgcatattctacccatgacttcatcttatattgtaccgacccattaacctttttctttgcacatgtacacctttcatatattcacacaaaaatgctcctctaaacgcgaattgaacattaatttcttaagtacttatcgtgtccttatatatctgattcatcctctgatataaaacatcatcatcttgcatgggtaattcgctaatagatgattcaaaaactaaaatagaataaacgagctataaggacatgtagtcgctagcatgaccttatttctcttgcgtaca

SEQ ID NO: 92974 - DNA, 447 bp, Glycine max
  unsure (1)..(447): unsure at all n locations
ttaatgtacacatttccttaatatcttcttatgtgttttaagatctcagcggctacctaaattcaacttaataatcaaataatacccccacacaaagctctatataaatgaaaggtagttaaatgccaacacttcgatatttaaaaaaaaaaaacccttacatgacaccaatttgagaaaaagatcgaaaaagaccaaatactacatactatatactagaggagacaaattctgggaagaagataaagcacaaataaatggtaaaaataaaagaactgggcagaataaaaatgaaagaggggtagggaggttggtggaaaaaggtacactaaacattaattntctgctcttgtatcatcagcccaattgcatgctgcaccttctctttcgctttctacttgagggaccgcctgtatggacgacacgtggaaataacacattagtcct

SEQ ID NO: 92975 - DNA, 434 bp, Glycine max
tagcttgaatctcaggaatagctagaaattttcctaaagacgtctggcttgtacatgcccaactcctttcacaggcttttgcattggttgataactttgagtgtagcatattaatacatatgatattagttttcgcatcatgcatcatcatgcgaaagtaagttttctaaagtcgaaaattttcttttaaggcagaaacattatcttagactcatattgggttaatcgattttggtagaactttgatctattacatttgctgcttcgatacaatgacctgattcttcacagagctctttgcttttatctactaccagatgtattaatcagattacttctctcttgtttaagatgtgcaaaggtgaacaataacactgtaatcgaatacttaagcatctaatcgactagttcgttctagatggatttccatatgt

SEQ ID NO: 92976 - DNA, 380 bp, Glycine max
  unsure (1)..(380): unsure at all n locations
catcaaagacccgactggtaggngactagagatctctaaatcatcctcactctttctagactttaacttaaaaacttaagagtttaaccatgcctaggtatcctatgataacatctcattttttaccatttcaatagtttagaaacactacctaatcacataacatagcaataacattgtntaccacacacacatggtaaatttggatgttataatgtgtgcgtaccatcgcgaacattggctatgtctctcattctttctttgtattacattatatcatattatactcatactactatttgtcctctatggattcatatattactatattgtctctgcgttgacctctttacgcgctaatatatatgggcgttcatcaa

SEQ ID NO: 92977 - DNA, 455 bp, Glycine max
  unsure (1)..(455): unsure at all n locations
agcttgtctattctgcatttgatgagtgattaatctactcaatataantgntgtaattataaataattgcacttcattataaagagtttctatctgtaattttttaacacgtttaatcataaagtaaatagtatatactccaaaaaatggtggaaacaaaactaactatgattgacatgcgaattactggacttatagatatataacagcataatgacaaaaggattaacacaacanttgattcgggggaaaataaagagataaaattaacttgcgtgaaagacatggatgtatctttatcttgaaagacatacacctttgattaagggaatctaaattgttttacaaaagaacatgaatacatattcgnnnctttttgaagtatggttagagatacatgccaataactcttactttaatttgattccttccaccaaaaaatgctctaccaataa

SEQ ID NO: 92978 - DNA, 405 bp, Glycine max
  unsure (1)..(405): unsure at all n locations
ngcgatgatgctngcagcatatgctttgaagatactttccttatatatcctgccatncgaatatgcagctgtttcgctttcctctntccttttgacatagaattatatttttggatggctccatttgaaaaacatttgtttactccttttccttgcatttgctttcaggtcactaatcgctagcatgagttccacctgtagtgcattcttgaatggaacgtatcaatacgttttcatgtgtgtctttcacaaaacaaatatatttaatgttattcttacctctctgtagtcataagcgaatatattttcggatcaattggttcctgtgtatataaatggctcttaactttctgcattctcatgaaaacttagtatttgaagtctaataaatgccttgtcttggac

SEQ ID NO: 92979 - DNA, 432 bp, Glycine max
  unsure (1)..(432): unsure at all n locations
cttcaacacacaacaaaaatctggtgtccaaaatctctctttaatgggctttcacggtcgaaaagtgaaatttagaatgaggtaaatctgaggcaaactctcacctcacacaagtccataacatcaatctaaacttgctcaaactgaatttacaccaacaactccaccaacacaaaatttgactcttcaacacccaattttgccctagaaatggctcttggttcactttggccatttgtttntctctctacctcacgctaaccttcctcacatgtcctaaatgacatgtcaagccagtattaactcactttaacctccacttaccacagaattcatactcagcccttcaactcttaaatactactctatttcactcataacatcacatcctcactctctaaccctaggttagntctaccctcaaacttaaca

SEQ ID NO: 92980 - DNA, 433 bp, Glycine max
  unsure (1)..(433): unsure at all n locations
agcttgacgacctacataagagactatgtttacctaaatgaagactgaacatgcatatttatctaattgtattcataatttgttgctagtcgttcaacaacaattattaagtacttgttgcgttaagaaaaataatagttggtgcaaccataatcaattacgcatgtatgatacaacgctgtcttaattgacaacacataatgatatgcatgcatattaaagtttgagcgtgacacgacattcactgacttgacaacacattctaatgcacgatacagcttgacaccacattggtttattaggaaacataaacactacacatgttcacgcgtgtctatttntttataaaaaaagtaaattaatcatgtggtgagatccatctatatatatgagacacgatacacacttatatattacacatgaacttgatttc

SEQ ID NO: 92981 - DNA, 66 bp, Glycine max
gaagggtgtgtctgcgccggaccaacacgagagcactaacagacggatatatcgagaacgccgaag

SEQ ID NO: 92982 - DNA, 387 bp, Glycine max
agcttcctctgccgtaacaaagatattattcgtccatggtcgatagaaaaatgcgcaatgaacgctgataaatatccacccgggctatctaacaacattatgtacgcacatgtagtttcaataccacccctgaattatatatggatgatgcctatcaagaaatgttcggacggggtcatccagtcatgcttcttttagaggccccgatctggagtcgatcctaaccggacgacgtcggtagcataaatttcaaccatatctgagaaatcatgctatatttgcaaagaaggctatgacttctggacccagaagaaacatgcaatgggaccgaacacaatccgacgaaagaccttccccccacttgaattttaaggcataccacgtcaa

SEQ ID NO: 92983 - DNA, 373 bp, Glycine max
gagagagtcaagataaatcggaggttaatttatgcttgtctaacaagccaacaaagggagaaagaatgttgtcttcgaaccccgagattgggtttgtgtgcacatgataaaagaaaggtttccggaacaaaggaaatcaaagcttcaactcaggggagatggaccatttcaagtgcttgaaagaatcaatgacaatgcttacaaagttgagctgcccggtgagtataatgttagttccaccttcaatgtctctgatttatctctttttgatgcagatggagaatccgatttgaggacaaatccttctcaagacggagagaatgatgaggacatgaccaagaacaagggcaaggatccacttgaaggacttgga

SEQ ID NO: 92984 - DNA, 482 bp, Glycine max
  unsure (1)..(482): unsure at all n locations
ctaagtcgactgaggcatgcaagctaactccacgtgtggctacatacctataactttctaccttcgatactaacgcgattcttgaccaaatcacgccccgtgaagcccaagcngccgctttttcactcctctttcacttcaaccgatcaaaatccagaaaaacttcatcaaatggcagagtcatcaaagaagagaaagggatcattctccaccgctaccgctgctgcccatcgacggcacggaccattcggagcacccacagcacctattcctccttctttgtcatctccaagatcatcaacactggtttcatccgatgatcaacgtctacgggagccttctcagatttcttctagaataagctcagaccctaagctcctagacgtagagttctttaatgatgaacacgttgattgctatcaagcgtatcacaattctggtcttgttgattacatgtcatttaaattgcatattatcctgac

SEQ ID NO: 92985 - DNA, 123 bp, Glycine max
cagggagacactcggacgcaagctcattgccgaccaaataaaaaaggaaagaagaaaagactcaaaaacagggaaggaaaacgcataaagcaggaacacaatgaacgatatgaagcaacatgg

SEQ ID NO: 92986 - DNA, 390 bp, Glycine max
  unsure (1)..(390): unsure at all n locations
ncaatggagcttacatcacacagagatgtctctctctgtacatnttacaacggatgcaaaacatgatcaacgggagcaatggaaaaaagaaacaaaggattgtttatttcacatcttcgacctcactcccaaaggagagaaaatgaaagaaagcctcaagaggctaacattaacctcccatactttcatgggaaggacaatgtagaggcttacctacattgtgaaaaaaggatagagcaaaaactcaaaagaaaggctactttaaaaccttatggatctcattctcatccaaagaaagaccaacgactacgcatcttaggggcacgcaccttctaagccccaagatgataaggggaagacaatagatatacaaccccctaaagctagtat

SEQ ID NO: 92987 - DNA, 440 bp, Glycine max
  unsure (1)..(440): unsure at all n locations
agctcgtgcattcaataccctattgaggatgtcccatatgttctcataactggattgatccacttgttgcctatgtatcatggtcttgcttttgaataccctcataaccatatgaaagaattccatattgtctactccaccatgaaacctccagatgtccaacaagatcacatctttctgaaggccttttctcattcattggagggagtggcagaagactggctattctaccttgctcctaggtccattaccagttgggatgacctaaagagagttttcttaaagaaatttttccctacttctatgaccactactagcagaaaggatatctcatgcttcaagcacctcactggagaaagttatattaatactgngaaagactcaaaaattatgcgccagctgccctcaccaccagatttctgagcaacttcttcttcaat

SEQ ID NO: 92988 - DNA, 340 bp, Glycine max
ccacggagttatacaactatgctcttgtgttgtgtatcacgctacacaaggagagagcacgaaatgaagagccaatggttgatacatggatagagatgaaaaagatcatgaggaagcggtatgtgccggctagttactcaagggacttgaaatttaagctccaaaaactaacccaaggcaacaaggtggttgaggagtatttcaaggaaatggatgtgctcatgattcaagcaaagattgaagaagatgaggaggtaactatggctcgatttcttaatggtttgactaatgatatccgtgatatcgttgagctgcatgagttcgttgaaatggatgattt

SEQ ID NO: 92989 - DNA, 331 bp, Glycine max
tgctctattattggagatttcattattatttctgactgatcatctcatgcacagcggtccatgatgcatgggagatcctgaaaaccactcatgaaggaacctgcacagtgaagatgtccatatcgctactcttggctacaaaattctaaaatctgaagatgatggaggaagaatgtattcttgactttcacatgaacattcttgaaaatgccgatgctagcactgtcttgtgagaatgaatgactgatgaaaagctggtgaaaaagattctcatatccttgcctatgagatttgacatgaaagtctctgcaattgaggaggcccacgacat

SEQ ID NO: 92990 - DNA, 462 bp, Glycine max
  unsure (1)..(462): unsure at all n locations
tctcagattctttntgaacaacttgactatntcttcttaagtttcctttntcttcgagctataggtttggctttagaggagatagaaagtttgtgacaaatgaaattatgattgacgcctgacaagttaactgcactttatgcgaacaaatcaacattttattttaacaggtcctctatttttcttcgaagatctacatcaatttatttcccgatcttcatgcactattgagattgtttctcgagttgaaaaaagttaattcttcaattggtgtcggccttctgtcttcttcatttgatcttaggttaaagtccacccaattaattagtttcaagtcttctatgttatcaatgtttgcaatcctcgcatacttgttagagataaggttgtggggtttgactaggatacatttggcataacattctcgtgcttccttacatttggtttatagtaacatgatat

SEQ ID NO: 92991 - DNA, 432 bp, Glycine max
agcttaactccggaccacataacaacacatttctatttataaattcaatatacatataataaagtttgcagggatgaatttcaaatttttcgatatttatagagacaagaaacatattctacgctatgatttttagctagcagtgtcccttactaatgattattggttaaagatgattcatttaattttaatttttaaagaattattactaacaaattatttctgttcaaaaataatataaagcaaattacatgtgtcctcgaggtttaaggaaattacatatgtctctctctcatttgtaaaatctacacaatgttcccttgagatttgaggatattacacatgtttcctttcttgttttataacctacactaatccccttaatgttggtaaacatctgattgtacaagtcatgtgcttgacattttgatt

SEQ ID NO: 92992 - DNA, 377 bp, Glycine max
actcatcttctccttgaagaggcgtctcctctcttctctttcttctccattccgttgccattcatcttccaagaagcaaaggaattcattgatgaagaagatcctaggcctacaagctccaatggagcttacatcatgtggtatcaagagcatcttcgtctaggtgaggttctattgctacctctatctttttgttcggtgaattctctttaattccttgttcttcatcttatcatacatgtatatcctccattgtcttgtggtttggtgctgtttacagtagattcaaaaaaataaaccaattaaatcttacatctaaacttgttcttgcatttctatagttcaaatattgtagatctactcttgaatcatgtttt

SEQ ID NO: 92993 - DNA, 403 bp, Glycine max
  unsure (1)..(403): unsure at all n locations
tatatgcatgttnttattaatgcaattacttatcctttgttataataagcaatcatatatgattggtttgagtacactcgatttattaaacattacgaaaaacaactatatgacttatgtaaatgaatgtagcanaatcaaatatataaatagaaaattacattagacgatgttaatcaattctccttcatcatgatcattatgattagcatgaacgtcatcagtttcttcttctccgacaacgttaggagttatttgtgcggtcaaaggactaacataggtgtccatgtatgaatcatcatcttctacattgataccaattgttttgccctggagaaccacacaccacctttcatcataagggtctcgcacgtanaatacttgtctagcttgttctgccatg

SEQ ID NO: 92994 - DNA, 453 bp, Glycine max
  unsure (1)..(453): unsure at all n locations
gcttagtgttaggctcattccatcatatacaactaacacaagtcccaacctttgcatttcatctcatatcatacagcaatgaacatacaaaatgaatccaaatgactttctaggcttgtaatggggttaggctgccaacaaatgatggtttttctaggattcacaagcttatgttctaggagagcattcatccatagataaaccttcacttttcattcattcccacccatacttgccttttatttaagtactcagctttcattcatggaattacaacatacacacttattaatttcatttgtacttatagttcttctttgaacacaatatatacagagacattatgtgtatatacagaaatagtgtgtgcatgctatttacttngaccatttcaattcttacccaatgcctcccccaaattatgaacaaatttaccttgataattactccccc

SEQ ID NO: 92995 - DNA, 437 bp, Glycine max
  unsure (1)..(437): unsure at all n locations
atccttgcatcctttgtgttctatattacattttcaaagntgaaccttgaacttgaatgaacatctcctaataccttgcttagattctatgagagcagatggttcaaggcaatttgcctcaaatttgagggagttaactaggaagtaaagtgaaaggtaaagcacatcatcacacataacaaataaattatgttaaaaaaaaagaaaaagaaatcaaagaaagtgtgtgttcttgtaataaggtcaaatacaagttaaagtgaaaggctagtggataagctaattgtattgaaaagaatactcggataagtttaggatttgtgctctcttagaatctacgcctttgaatcctagaaaaaccaattatttttgtagccaagcttcactgtcgcaacctgccctttggcgggagggcgacgcgaggctcacgggtgcgt

SEQ ID NO: 92996 - DNA, 450 bp, Glycine max
  unsure (1)..(450): unsure at all n locations
tgcttaagtgtttnagctcatnccatcataatcaactaacacaagtccctacctttgcatatcatctcatatcatacagcaatgaacatacaaaatgaatccaaatgactttctacgcttgtaatggggttaagctgccaacaaatgatggttgttctaggattcacaagcttatgttctaggagagcattcatccatagataaaccttcacttttcattcattcccacccatactggccttttatttaggtactcagctttcattcatggaattacaacatacacacttattaatttcatttgtacttatagttcttttttgaacacaatatatacagagacattatgtgtatatacagaaatagtgtgcgcatgctatatactatgaccatttcaattcttacccaatgcgctctcccaattttgacaaatttacctgattattactc

SEQ ID NO: 92997 - DNA, 437 bp, Glycine max
actatacaatactcacgcttaccttgaattataattgtatcctttgcatcctttgtgttctaaattatattttcaaagttgaaccttgaacttgaatgaacatctcctaataccttgcttagattctaggagagcagatggctcaaggcaatttgcctcaaatttgagggagttaactacgaagtaaagtgaaaggtaaagcacatcatcacacataacaaataaattatgttaaaaaaaaagacaaagaaatcaaagaaagtgtgtgttcttgtaataatgtcaaatacaagttaaagtgataggctattggataaactaattgtattgaaaagaatacttggataagcttaggatttgtgctctcttataatctacgcctttgaattctagaaaaaccaagtatttttgtagccaagcctcactgttgcaacctg

SEQ ID NO: 92998 - DNA, 389 bp, Glycine max
  unsure (1)..(389): unsure at all n locations
agctntgataccatgccaagcactatcttttctaganattctagttgttaagtgaatgcacatagttggttttatgtatctaacaaatactaatgttttccatatttatgagcaccaatgcacaaaccttttattgttatattgtaaatttcataccctaatttcgtctggggatgatcatttgcaaacattcagattctcaccatccaaattgagctgcttggcacaatgtttcatgcaaatcgaaaggtttttcgacatttcagaagataatgcggaaaatactcaaaagggagggcaaatcgtcatttttgccttttttaacccctggctcgccagctagcctttggctcactgcgccaccaaatacttatggagaagtaccaact

SEQ ID NO: 92999 - DNA, 468 bp, Glycine max
  unsure (1)..(468): unsure at all n locations
actataaacctcacgctnaaggctantgaggatgagagagcgcaagtttgtttctagtggagctggatatttccattggaaagtacaatgataaggcgctttgctatgtagttcctatggaggccagccactcactcttggggagaccatggcaatttgataagagggctaatcatgatggctacaccaacaagatctctttccgcatcaaggcaaaaagatagtgctcaaaccattgagtccacaagaagtgtgtgaggattaaagaaaaatgaaagagaaaatttcttcaaaaaagagagaaaaagaaagagagcctcacacttgagagttcaaaaagtgaggacaaaacgagggaaacacacgagaggacaaagatgagtgaaacacttgaagtgagggggaatcttctagctacaacaacgtgtttcattcataacaacctctatactcgttgattgcaaaaat

SEQ ID NO: 93000 - DNA, 444 bp, Glycine max
  unsure (1)..(444): unsure at all n locations
agcttcttccnctcccagtaagacatatttagttgtcatgacattcctacatgcggctgctggcattactacccttctatgcagttgttgggacacattattatattaagttgagaaacataagaatgaatgagttgaataatgttaggggcttgatctgcatatatctgaaattgaacaattgtgcacagaaatcccatcaacagttgtattgcttgatcacttgggcttttgcaaaccatccatgtaagccatatcttctgatagaaatcatctccgaggcccaggtatggtcccattgttgaatattgtgttgagaaatgatgaacaaagacttttcttttctcaactcttaaatatgcttatattcgcacaagtgtttgattctcttctcatgagcacaacttcaaggtagctaagcatggataatatatttctttatta

SEQ ID NO: 93001 - DNA, 275 bp, Glycine max
  unsure (1)..(275): unsure at all n locations
agaaagtgtggaagagtcagnctttctactcttattctttgaccacagagtggtacttggagatatgtcgcgggggtcaggagaccttggggacgtcaggtggggtgctattgcccaaaaccaagcttgaccaatcccgacccaacccgggcatagtcagtcagtgagaacctgtgacgtacctaaacaggcgagctcctatcaggcaacccgttaaagaacaagaccactaagcatggaggctcgtgtggtggctggccaactatggattttga

SEQ ID NO: 93002 - DNA, 379 bp, Glycine max
agaatctaatctctataggagccaccgtattttattgtcttactcgctggttgaacgtggagtgatgcaaatcaaagggaaaggcaagtctgctataatgtagggaaccaagcaaggaaatctgtttatcattaaaggttccactttgacaagcttagtttcaactatatcataagctagaagtcctgcgtccaatgatgattctctatgtcatatgcgtctgggccacatgagtgaaaagagattggaaattttgagtaagggatacatggaaatcacaaggtgaaaccttttcatttttgtgagcattgtgtctatgggaagcatcacaagatgaaattccaaaaggcagtgcacactacaaaggccacattggatt

SEQ ID NO: 93003 - DNA, 348 bp, Glycine max
gaagcagcagctgattacaacttcttgtacatcgcagcgagcgcgacaaaatgacgaagttggtagccatgaaagtaccctctccaagagatcttaattaaggtcattcagagaaaatccgctgaagagtaaattgtctccactctctggagactttcttttcaaactatggtccattgatcagacacttggaacaaactactgcacaaagaaacaaagggactttgatgttaacacaagaaatctaatttgccactttcaaagtctacacactctaccatcataaaaaaaccaaattgatgtgaataaagacttccaaactaaatgggtgaccctgaactaacaagt

SEQ ID NO: 93004 - DNA, 461 bp, Glycine max
  unsure (1)..(461): unsure at all n locations
cagcatgcaagctngcagcttgtccttatggttatttatgtatgaatagctgcaattgcacctcttccttgtcatgcaatatatctgtttgcatttgggattccaattttcattatcagcggttaccctactcctcacgtgaagtggaacttgtgggttatccacaagctgctgcttacccttgtttatggtttcatactgtgcatgtatcattctacgtggagagaaaaggtacctggctagcgtcctggattgtatatctatttatctttaattagttttatgatagcatagtttatcttcctctttttgcagcaaggcctgcttactataantatgttaccattatgttcatcttgaatgcaattgcgctgtttgcttgtggcattactggaaacggcgctgcttttggtttctggatagattcttctattctatagcttggtagaatagtggatctc

SEQ ID NO: 93005 - DNA, 397 bp, Glycine max
  unsure (1)..(397): unsure at all n locations
gcaaacaataaataaacacacatgaattaatgggctggactcctcgcaacaggaacctaaagtgaaggcacaccacaaaacaactgcatacctgagggtacttgttatcttctttaaagcccgtagacttgtgtacacgtttataccaccaacgggcccataagccatctaatggctttggacctgcttcccaactggaaaattcaaaaactgagctgcacttctcatgtatgtatgcataaaacttgatgcatggaaaattatcaattactgaatgtcttcaacattttcaaaccagaggagatgaacaagaaaatatcgcataaaagacagacaaggaanaaatatgagcacaacggcctgcgctagcaaaatgaaaactctgcatacttgagca

SEQ ID NO: 93006 - DNA, 435 bp, Glycine max
  unsure (1)..(435): unsure at all n locations
agcttattataaactcaatgtcataatatatctgaacaatagaatacatatgccaacgtggcaattgggaaactaaaacaccatatctctaccaaaaaataagtacataatacatcataacagcagatgcagatactttcaatacttatcctataatatttggtctatacttcaaattctacaagtgtcagaaccttagttatgaaagtcaatggaggaaaacccacctaataatatatactttatccatantttaagaagtgtaacacaagaccgaaaaaatccctgatcagagcttctgaaatttctacaaacaactctaactataaacacagtacactaaccaatataataaaacccatataatagtatttaccatgcatttggacacattaagaaacattaattggtattatacatcatcctaatatgttt

SEQ ID NO: 93007 - DNA, 251 bp, Glycine max
aagtgccatggacaaagaagctctatggtgtttctattctcataccattcttgggaagggttcaagatcacaatcttccaaaggtttcaaccgtttaaactatggaatccttttcgggcattactggtgctaaaacaggaagaaacaatgcacgaattcatgggccattttgagaagcatgttcaaatggtgaaggggttggaggaatcatttctggtgcgaggtgtttcccaaggggttttattaataga

SEQ ID NO: 93008 - DNA, 97 bp, Glycine max
ttttttaaatatacaagggactgtctctgccctccccaaaaacgagcgcagcgatcccactataaaagtgtttaacttccgaggtatacgatgggca

SEQ ID NO: 93009 - DNA, 130 bp, Glycine max
taagcttgcatcaatactatgtaattataaattagtcaaagccttatcttttccatctccaacaaagcaagcaggccagctaataaacacagtgttcaacatatctgtcgatgactaatctatattaatc

SEQ ID NO: 93010 - DNA, 324 bp, Glycine max
  unsure (1)..(324): unsure at all n locations
tcactaattagaccatcagtaaaatccacaaaagtatattcttttcttatgggcaggggaaggggtgtaatgtaaagtatgcttaatccaccttatgcttcgaaatggaaacaaaatacttaccagccactccttatgaccctgtaacccttcatgcttgagtttcttaacagcaacaaccattcctgatccacgttttgaagctgtaagagtgtgttcatcaatccaccccttgtaaacataaccaaatcctccttcaccaagaaggctgtcggngcgaaagttcctggtggcattctttaccttgttaaaggtaaaggcctt

SEQ ID NO: 93011 - DNA, 425 bp, Glycine max
  unsure (1)..(425): unsure at all n locations
agctngagatgaggaagtgttgaagggttaaacttcctgcttttattgtngaccacagagtggtacctggagatatgtctcgggggtcatgagaccttggggacgtcatgtggggtgctattgcccaaaaccaagcttgaccaatcccgacccaacccgggcatagtcttgtcagtgagaacctgtgatgtacctaagcaggcgagctcctggcagtcaacagataaaaggaacaaagaccacaaagcatggaggcttgtggtggctggccagctctggattttgtgtgatatgtggagtatggcctctggtaatcgattaccaagggtgggtaatcgattacaaggcttaaaaatgaagacaggaggctaagatggtctctggttatctattaccaaggggtgttatcgattaccatgctataa

SEQ ID NO: 93012 - DNA, 465 bp, Glycine max
tagatcgggcatccgagtcaaacgttatggccgtccgtatatgcatggtcattccatttcaacttttaatcgccataatatattatgagcgtcaatcggatatccgagtcaaaactttttccggtcggaattcacccgagttttacatgataaattttgagagtcgcgataggttacttgcgttatttgaagatccggtggaagagttatggctgtttgtatttgcgatgggcttcatttttttcctaagagcgtctcgatatattatgagcttcaatcgcgaatctgagacaaatgttatggctgttcgaatctgcgtggtcagtccatttctactttcgagggagatgatatattatgggcctcaatcggacatccgagtcaaaagtcttgcccgtcgaactacaccccagtcttccatgactaattttgagcgtcgcgataagttgcttgccttattcggag

SEQ ID NO: 93013 - DNA, 477 bp, Glycine max
gaaactaagcttctattggagagaacacattattactccaaattctattttatgtcataaattgtgtatgtgcaggcatttttagcaacaactaccacacactcaaattaaaaaaagataaaaagagtgacaaacagaaaatgcagcaacatcaaaagcccacatcgccaacacattcaaatgaaatgtcaatagggcagataaatttttctacagcaagataaaataaagaacctcagttgaatccagaaaatgaagcttcgtgcgcccaaatgggaagaaacagagagaaaatagatgcgaaattggtacacgtgcaaataggtacacagagatgaatattgtagattgaaaaccccgtaattaagaagcgagtcacagatccgtgtcgaagtaatagttcaacattgaataataacaacaaccaatatatgagaaggggaaaaaggaacttacgagatgatggtcgatcccact

SEQ ID NO: 93014 - DNA, 479 bp, Glycine max
  unsure (1)..(479): unsure at all n locations
ctaagctctcacaagttccttcacaaataatcattacacagcatataactatcaaaaccacccatcatatctcccaaaaccccatacccacgaaatttaagagagaaagaagtccacccaaacctgaaatttcgaagtctcactcgtagccacgcacttcacgactccaaaaatgctctcctttcacgatttggggcagaaacgggcactaaaggttgaagctttgtatggagctttaatggagaatgagggaggaagaaaggcaacgtgagggagagagaaagctgtctgaaaaaaaagtgagggctgagtgaagagagagaaaagctttttggttntaaataaaaggttttcctctttttctattattttattcaagctctgccacatgtccctattngattggagcaaaaagggcccactttctctttttgactgtgacccatactcagtcacacaagtgagaaaaatctgacctt

SEQ ID NO: 93015 - DNA, 433 bp, Glycine max
agcttatgcaaacaagaagatatcttattcttaagctagatgagacaacaatgaacgttttctgtctaactgaataagcttccacatcttattctccaccgccacatagataatatgacttaacctctccatacaaatggcacaaatgtatagggatatgggatccccttgtctgatactcctaattcaattttcaagcttgtccctattccacaacatctaaaaaaaaggctgcatagatacaagaacaaatagaatggataaaaaaatcatgcatacccatctcctttagcgaataaacaatgaaattctagtgtaatctatcatctatatttccaagtcaatcctaatgggcatccaccctttcttttctcctctattattcattgcgcacaccacctcctgcgtatactaaaatcatctatattatgcc

SEQ ID NO: 93016 - DNA, 448 bp, Glycine max
  unsure (1)..(448): unsure at all n locations
ntaattcattatctctgaagacactgacttgcttncatttttctaatctagaactggaacaagtggagcaagacccagatttcataatgttgtctcgccaatttaaagctactgcaatggagcttatttctgttttggagctggtaaagctttgacctttaacacttctactaacattgactgaaaaacatgacatgctatttgagcattgagctctaaaaactctagtattcttttaagattggttggataatatcattatactccatgtttgaataaaatattttgtgttatagatatgaactttttgttttatagtgataaactatacgttttaagattttgggaatgccatcctttctgtgttgcatttgtattagttgcttacatttccttgctttattatagaaacaaaaaactggtggtaggacaacaagtcttttggaca

SEQ ID NO: 93017 - DNA, 435 bp, Glycine max
  unsure (1)..(435): unsure at all n locations
tagctataaaactatcattctaccctctgatcccttaacatacttaatgctttccctaattntttttacagcaggaccgactactttcaacccctcttgaacactaaggtttaaaatgtgagcacaacatcagatatgaaaaaattcaccaccacttactaaaccattagtatgcaaaagtctttccttcaaatagtcgtgcattttatcattggaagaagcatcatctagaattaatgaaaatattttctgctcaatccaccattcttccaaaaagaaccatatataactttagccatctcacgccccgagtgtggaggaggataatgagaaaaattaaccattntaccatacaacttccaatttgcatcaacataatgcgcagttaatgaaatataacctcagaagtacaagatgtncacacatcagatgtca

SEQ ID NO: 93018 - DNA, 309 bp, Glycine max
  unsure (1)..(309): unsure at all n locations
aaactaagctgattgtccctgtactaggggtgggtaaactagcctcagtctatggattggccggcggaacccgcgctccgcgcgggaaaccaatatttttaaacaatccatggttatgtcatatttttgggtccgccccgcttaatccgtggactatgcgggtttggctagcggggtccgcgggtttcccgcatagggttgatttgtgtgatccagttacattaggtgtgattntctctctttcactttaaacttttctttttcttctctaacagactcgtggatgtagcaggctaagaacatttttct

SEQ ID NO: 93019 - DNA, 437 bp, Glycine max
  unsure (1)..(437): unsure at all n locations
tgcttgcatgatttacatctccctctatctcaagcatantctgcttgatatcatcaaaatcttcatgatttacattctcccccttttcgatgatgacaaccacctgtgggttatggagcaacaacaaagaaaatatctatttgcatatagttcactcccccttggttttacaatgattgcttatatgacacaattgaagatttcatattcttcatattttataagttgtctcataatacaatagataatgtttcttactatctaatcttttatctttctcttcccctttgtcaacatcttacactaatcattaatatagaggagaaagatgttaccacttgttgaatgtatgaaatcaagtgataccaaggcattatacaacattcatattaataagcaaaacaagacaatatcacatcatcaacacatcaaatcat

SEQ ID NO: 93020 - DNA, 370 bp, Glycine max
cacagctccttccaaaatttggcttatcttggaacacgctgaaatgcatccaacagaggtatgtttacctctacctctctcaacgtttccaagaactctttctctgcctcttccatattcttgttggaaactgctcttggagggaatggaagagggggaatgtgctgcttctacaaatcataattacctgtggaagaagattcacctgcacagaacattgtacgtaaatgattgtcatcacctctttctggagtagagagaagtatggcacgttcatttgcagatgacgaaggagctacggcatgaagaccttgacactgctttcccgcctccatgaaatggcactgacacttatgggagtctggacagc

SEQ ID NO: 93021 - DNA, 455 bp, Glycine max
  unsure (1)..(455): unsure at all n locations
atcacctcattgagaattaatatgccatgattatgtgtctgtctttgatgaaagctgtctgtctctcatcaataaggacaggtataacatgcctcaatctgtttgctaataacttggctatcaccttgtacatacacccaatcaaggagattggtctataatcatcaaaggactgagggtgtttaactttgggaattaaagccagaaaggaagcattactgcctctagggaagctgccatgcacatggaactcatccacaaatcttctgaagactccccaaaattctttgataaaattgaaattaaagccatcaggcccaggacatttgtccccaccacaactccacactgcttctttgatctcatgtctgagaaaggggcaatcaagtcctccctctgcctctgngtaattgaggggaatcgtactccatcaagggtaggtctgaaataatgct

SEQ ID NO: 93022 - DNA, 269 bp, Glycine max
aaacttcctgcttttattggtgaccacagacggtacctggagatatgtcgcgggggtcatgagaccctggggacgtcaagtggggtgctattgcccaaaaccaagcttgaccaatcccgacccaacccgggcatagttcggcagtgagaacctatgatgtaccctagcaagcgagctcctggcagcacagataaaaggacaaataccacaaaccaaggaggcttgtggtacctggccgctgcgaaacctgactgatatgtgagatatgg

SEQ ID NO: 93023 - DNA, 455 bp, Glycine max
  unsure (1)..(455): unsure at all n locations
agcttaactaatcatatttactaagatgtatggtgtgatagaaaatactaggatgtttgtaacataagctgtaccaaataaggataattgattggtatatatgataagcaaaccgagggaaaaatgattagttcgagataatgtacttattggtagctggaccgtatcaagatatcaatagccccataatgattagaaccaaaccatgagatattatcgtggatggatcatctggcaaaccgaacaaaagaagtgctgctagggggattgctgattcagagcttatctgtgccagtaatatcctcccagaatttggatagcgcttggataggaaatctaccatctttccttcaaacaatcccccantataactggcaaccacaaacaaacccatgaggaaagcagttntctcatgggagaagccagtctgctctaaccacattggtgcatatgat

SEQ ID NO: 93024 - DNA, 405 bp, Glycine max
  unsure (1)..(405): unsure at all n locations
tgtgcaaatcaaatcactcccacatcttatctctagcatgcattctttctttctttacccactcctcacgtttggttttttaaggaaaaacaccataactaaatgtctcttaatagcatccctatcgcaccagatccaaatctagaacgatgggtgatcaacaggagacacaagaacagatgaaagccgacatgtcggctttgaaagaacagatgacttccatgatggacgccatgttacgaatgacgcagcttatggagaaaaatgtggccaccgctgccgctgtcaattcggctgccgaagcagacccaactctcttggcaactgcgcaccatcctccctaaacatagtangacggggagggacacactggtgcacgatggcaaccctcacctgagatacaac

SEQ ID NO: 93025 - DNA, 375 bp, Glycine max
attaatgttaatgaccatcataagttctgtagagaagttcgatgaactaaggggacgtcaatatggccaccaccgtagccttggaacgagaaaccaagaaggctcgtaaggaagaacaccgtcgaaaaaagttctaatgggctttatggtgcaacaatagtgagcttaagctccaaagagactacagggattagtcacgggtcaaaggcatgatcttgaatgaccagtttaaggcttaccttaggtcgaaaagaaatttgtccctacagttaagcgacgctgagaggaatatgtgggtcatcatgataatacaaagagaatctaacctatcacggctctgaaaaagctaaagatattacaccagatatatcggaa

SEQ ID NO: 93026 - DNA, 423 bp, Glycine max
  unsure (1)..(423): unsure at all n locations
ntatgcagggaagctaagtgtgaagtatgcaatcctgtatatgattgtcgctgcaaactgggtacccaccaatcacactttcactgttgccacaggtttgggtaaatttctgtatgctgttggaaccaagttcaaatttaattttggaaactatatttttgatcaaactgttaagcattcagaatcttttgctgtcaaattacccattgccttcccaactgtattgtgtggcattatgttgagtcaacattccaatatcttaaacaacattgactctgtgatgaagagagaatctcctctatccctgcattacaaactgtgtgaggggacacatgtcccagacattgtcttgacatcatggaaagctgctgcttcatgtgctgtgtccaacgatgctttgattgctgaactcaacgacacatg

SEQ ID NO: 93027 - DNA, 451 bp, Glycine max
agcttggaatgatctgcacaagctaaactcttcttgttggacaatgtctgcgtataaggtaaacacaaagcgtgatttgcaagtaaataacatgcataaggtttttattaatgtaataatgtagtacagacataagccaattattacactatcggagggaattcaattttacataagttctagaactgagaagttgacgactaccttgatgaggtatgaggggtcaatctgtcctaaaattaagctaatcatggaaaagaataaaaaagcatgtgaaccatggcgggcacattggtgcggagatgataatctgtttttgcttgaggcgtcaaaaggcatggaataatatgttgtcaatctttacaataaacatgttcttgtagaaagtgggagttaactggaatttcatgcactcaatccataacatgcatgtggatcaatggtattgaac

SEQ ID NO: 93028 - DNA, 396 bp, Glycine max
  unsure (1)..(396): unsure at all n locations
tcttactaaagcttattataacacagcctttctagtcttttcctatatatctaagncaaacttatgacataagttattatattactgaacttatagaatacacacttcactaagttgtttaaccctaatacaccggaagtccttaaacatctttgaagagtatttacgtgaaagaaaaaaaaatagtagctttatgtgctaactttcccattcatatacaagatgaaatgaacataccagcaatgttccctcgaggctgtgagtaaggggtgttacagtcagcgctattaagtatggaatctgcaccttatgcatatgcatggttacaaatacagtacttaacaattatctattgtctaaatttaaaatactataattcaaagtaatcgctacatt

SEQ ID NO: 93029 - DNA, 475 bp, Glycine max
atccttaaactcctgaagcatgctgcatatagtctattaaaatgccttatatataaatatataggctaaattaactaaatgatcataacttatttatgagtacggctcgccttaattatagataaaaacagaggcagatattatcatacaggaatgttttaaaacactttatgaattgatcttcactcttgcttagtcgagattaaactttagacacttgtgatataaattatgtcatgtattacctgtgcacttcgagaatccatattaagattgtatatgcataacctgttaaatcatactggaacatcatgaatccccatcattgcatgtggcgatgttcttaactgaacaagtgcactcacaccatgcatctgatcccatctgatcctatcacatgaaagtatctggaaatattactaaatcaccacatcacttctagaatcaagattataacatcttaatatatagtcaa

SEQ ID NO: 93030 - DNA, 467 bp, Glycine max
  unsure (1)..(467): unsure at all n locations
ttagaatactcacgctngagactttacttcacaattttgagcctaattttactttatccattgtaatgncggctctattatagtaatatattatatgcattatatgtaataagtttaacaaatatataatatttaataaatatggtattaatcatattattaaattatattctataattggtgtattaaatcaatataataagtactattttataaaataaaagattctctgttaatatatttatataattataccatttggatccgcctagtgatggatggttggggtaaaatcatagattcaaatcttagtgggaccattgtataccaaaaaacttatataaatattgcattaataacattcaacactatattaatactcttgtatttacgtctattatataaatactcatggagtatagtatcacaccaaccaatacacatacgtaccattattttttagttca

SEQ ID NO: 93031 - DNA, 459 bp, Glycine max
  unsure (1)..(459): unsure at all n locations
agcttgctaacccatggatgctcctaatatcttctacactttnggggtgggccattcttggatggcctagatcttctcagggtccacttggaccccatttctaccaactacaaaccctaagaaaactatattatctacacaaaaggtacatttctctatattttcatatagggtgtttttcctacagactgaaagaacttgcctgagatgtcctaagtgatcatctaggctcctactatacactaaaatatcatcaaaataaacaactacaaatctacctatgaaatcccttaagacatgatgcataagcctcataaatgtgcttggtgcattattgaacccaaaaggcatcactatccattcatacaaaccaaacttgtgcttgaaagcggattctcactcatcacactctgtcatcctganttggagaaaccactttaagatcaattatgaaaaata

SEQ ID NO: 93032 - DNA, 304 bp, Glycine max
  unsure (1)..(304): unsure at all n locations
cttccctcttgaccagctcgtgaacaacacgaagaatgatcaacttccgtgagtttcggagactaaatgaacctatagaataagcttagagcacggcccattggattattgcgtaagtttatcttaatcactcaattntgacccatgaatgacccttgctcaaccatggaaaacatgtacatcactaccaaatatggggtgcttcacttttgaattttttacttaacaaggctcaagcagagttctgctgaaaacggcgattctcgctctttatctattctatcaacctcgcagattctatcct

SEQ ID NO: 93033 - DNA, 336 bp, Glycine max
  unsure (1)..(336): unsure at all n locations
tatacaataacactntttttccaaccatgaattctcttctaactatcacgcaatcatggaactttttggtcttttctttgaagaacttatcattcttcttagcttctaggccgatttcatctaactcactcagttgcaactttctttcctcaccagccttgatccatattagaagttgcaagccttcactgctcactatgctttatgctcatattccactggaagatgacatgnccnttcaaagacaactcgataacgagacattcctatgggtgctttgtacgcagtccaatgtgcccagagatcatcatcaagcctggtactccaaatcttcct

SEQ ID NO: 93034 - DNA, 437 bp, Glycine max
  unsure (1)..(437): unsure at all n locations
tgtgctgcaactctcccttcttcttatattatgtcgaagagggaagatcaaaatcgttcaactctcttggtatttgcggatcacttgaaattattgagaagaaccgttttcgtgaagataatccaagccgatggacttccgtaactcgtctgagacattttcgtgggtgatttcttgaagattttccgacatccttcgtacgttcttcgtcagtcttcggtcttcaaccgtgaagattccgaaatcaaactgttcaaattattctatgtaccctcggnggagcctatttgtttcgcgtacttttattttcgattcatttactttctgcacccgctttcggcgcgctgtagtgatttatataagtcattttctcgccttatcataaaataaaataaattaccaccgatcgttggaaatgtaacatttgttaattttct

SEQ ID NO: 93035 - DNA, 283 bp, Glycine max
  unsure (1)..(283): unsure at all n locations
cactatacaatactcagctgggttncgggcaatancatcccacctgacgtcccanatgtcttctgactttctcgacatatctccaggtaccactctgtggtcaacaatatatgttggagagttcacccttcatcacttcctcaactcaagcctgtaggattatgaggtacccatcatatgttggactacgtggcggtctggccaagagtctcaacaagtttttacatccacgacgcacgcataaacccaacattccctgtagcccacctctaactgagcttac

SEQ ID NO: 93036 - DNA, 447 bp, Glycine max
  unsure (1)..(447): unsure at all n locations
agcttgaaggtgtgtaacccaccatcttttttattataacagtggtaacatgtccactatcattgttatcatctcctattccatcattgggggcactacttgaggtgccttatccctccacctttgtgtgtattctttgaaagattcatgctccttcttacacattgatgtaagctccattggagcttgtacgcctatgatcttcttcatcaatggattctttgcttcttggaagatgaatggcagcggaatggataatgaatacagagatgagatgccacttcaatgagaatatgaatctattaaaagctcaccaccacttgatgccactgattttagcttgtatgacaaatgagatgattgaatggagatgatcaaanaacatgaaatttgtgttctaagatctctgaatcttgacttaatatttacatgataaaggtcaaataa

SEQ ID NO: 93037 - DNA, 466 bp, Glycine max
  unsure (1)..(466): unsure at all n locations
ngaagcccttagttcttacgtttggtttgataatcttgctatgtttaacatgtttaatagatgaggcatatgtattgaatgtnttatactacacatgtgtgtgatatagtcttagtcattctcatgcttagtgattgatcaaatatgaagtggattaagtattcttattgtctaagtttcttaagaacttacttctacttgaaattnggctagcaacatcgaattaatcaattgcctcatttggtaattgaatgcccaaaccaatttcagaagaaggaaggatttccagcttaggataatcgattaccccatttgataatcaattacccaactcatggaaataaagagaagatctatgtgttattctataatagattaccacacatgataatcgattatccagtcagcacacaggaaacaataactctcagactaacacgaatataatcgatatcctttttcataa

SEQ ID NO: 93038 - DNA, 454 bp, Glycine max
  unsure (1)..(454): unsure at all n locations
cgctgtgcttgtnttatatatattcctttgatcttgagcaactaggtgtgacctactatgactcgagaaacataggtgatcacataacatgcagagatttaagaagtactaggttgcctcctagtagcgcttctttagcgtctcgagctggacgcgtgatgacttgtcngtcacagacctagaactttgcttacctttggctttggacttgatcgcctgctggtcgaccacgggtcgtatgcaacgcttcaacttttgtaaatgaactgaagggctttggagatggcggctgtgcgtctgttgcccgctaccggccatactcaagctgttgaggagtctcgccctgcgcctgcatgggtgcacaatacttcttgtttgaagctatgttagtatggggcctgatgaccttgctggtggcgacaggcactctgtgaaactgactgaagcccataat

SEQ ID NO: 93039 - DNA, 460 bp, Glycine max
  unsure (1)..(460): unsure at all n locations
tggagaanagcttgaagatgttttatctcttacatgcttaactcccttgagtggtattcggattggttgttatattgaatgttgcatcttagtccttatcatatcttttgtgcatcatgcatcatattgagtaaataagaagaaaaatttctaagtgagaaaagtttcttcagaaggcaaaactctctgttttaatcgattacaaccttatcgtaatcgattacacaagttgtccgaagcttgcagagttatgtctcgtatcggtttaatctattacaattttatcttaatcaattgcatagttgtttttgagatagtgactgatttattcacgagtctttgtcttaatctgataccatgtgacataattgactacttctctttctataagtgttttagaagtgaataagaacactctaatcaattactttgagtatctaatcgattacatgtttcttga

SEQ ID NO: 93040 - DNA, 393 bp, Glycine max
  unsure (1)..(393): unsure at all n locations
agctntatcttgtcgatgttgcctaaatttatattatgcagttcggctaggttacttcgtgcgaactgaaccgaagtggatgttcggccgactggcatgtgctcattgtgtcggtcaggaaaacattagcccacctcggcataagaaacatgattcaccgatattgacaggaaaagaaatatgctactcgactgctgccatgaaagatgaccgaccgaggtctgaaaaagaagcatgaccggatgacttcggtcgaacatttcctaacagatatcattcaagtattattcagggatcgaatataaataacaatagcccacatcggtaggtaaatagccgtgactgatatttatcggtcgacattgcgcaatttcttctacaaacgctggccgt

SEQ ID NO: 93041 - DNA, 467 bp, Glycine max
tcctctgccgtataaaagatattatcggccagtgtttgtaaatttattgcgcaatgtcggctgaaaaatatccgtcggggctatttaactaccgatgtcggctattgttttttctattccacccctgaattatatttggatgatgcctattaggaaatgttcggtcggggtcatccggtcatgcttctttttgaggcctccatctgtcgtctttcctagccggccgacgtcggctagcatttttttcgatcaatatctgtgtgaatcatgtttttttttgccaaggagggctaatgttttcgtggccgacaaaatgagaacatgccagtgtcggccgaaacacaatcccgcacgaaaaaccctagccgacctacattgcaattttttcaggcaataccgaccgacaaaacttcgtctaccatgaagaaatattatcggccactgttggtaaaaaaattccgcaatct

SEQ ID NO: 93042 - DNA, 349 bp, Glycine max
aagtcacctgaggcatgcaagctcaacatcagaccacttccagggtgctggttctacttcacatggacttgatggggcctatgcaagtcgaaagccttggacgaaagaggtatgcctatgtcgttgtggatgatttctccagatttacctgtgtcaactttatcatagagaaatcagacacctttgaagtattcaaagagttgagtctaaaactttaaagagaaaaaaactgtgtcattcatagaattttgagtgaccatggcagagagttttgaaacatcaagtttactgaaatctgcacatctgaatgcatcactcatgaagtctttgcaggcatttctccacaaca

SEQ ID NO: 93043 - DNA, 413 bp, Glycine max
tgcctaattaacctgaaattgagagaaaattattattatacattctttatggaagtactaagtatttattacctatacttaaaaaaatacttataacactacaaaataaccataaattggaaaagtttgatacaatttacacaaaagttagtcgtattcaccgactaacaactcccccaaatttatagttttgcttgtcctcaaccaaaaagagaacaactcacttgtcctcaagtgacaatgacatgcacgggctatgtacaaaggtgtatgcaacaaaagttactgattgcatgataagagaatggagtaaaatgccctcatgacttgtctttcacaaggtatgcgggtatccaaagagaagaataaaatgtaacctgaacaattagatggagctaatcataagacatata

SEQ ID NO: 93044 - DNA, 390 bp, Glycine max
agctctcataggcgacaacacgtgtagcctatttcctcagagaccactcacgaagaggaggttgtgccatgttactcacaacgctgcacaatacactaacgctccttattctattaatgctcaaacattagtactgctcatagatcatagatgtccaaacatcaccataaatcagaatgcacaaattcaccgtctcggaaagctctgaatgatcaaaaggtataaaatgatgcctaactaatctaagagatgtcctatccatcttcaagaccaaatggtagtattcagatggaatgcctctagtcatacactacatttcacatgcaccacattacgagccccgtcattgaaataaaagtgtaggttagaactacagctgcccttcaaata

SEQ ID NO: 93045 - DNA, 379 bp, Glycine max
ttaaaaccacgctcgtcccaagcatcttattaacctcactttgcttcggtacctagaaaagccttctttccttttctctccaagccattctaatgtccaagcacttctccatcaccccaggcacattaccccgaaaccgttgttgtcttcgttgaaactccacaacaagaggaacccgtcgattggagcggaatcttcccacttggctcgcggttgcggtagagaatgaaaccctaatttgacctttcattttctttcgaggtaaccatggttctacacttgtttcttgttagtctcatcctgtctttgcatcttttctgactttggaaccgccattgtatgtcttatgcttcctctgaatatccttatacaaagagac

SEQ ID NO: 93046 - DNA, 312 bp, Glycine max
  unsure (1)..(312): unsure at all n locations
gtactttgacttgtgtctcacaaaactgtcttcattgggaaacaacaagcgttacacatgtttctcgttagtggactatgtcgcttccttgagaatcttctttgaaaagactcttaacgaatcttgagcgtaatcttcacacacctcatctataagttatctcacctcattgagatgagaatctagagcatagctacgtaccctttataatagctaatctcacccccatgacaatatacatgaaatacaaaaaagtcctcactgcaagactacttcttatgcctcgnatataaggctatacactcttcttct

SEQ ID NO: 93047 - DNA, 374 bp, Glycine max
  unsure (1)..(374): unsure at all n locations
taggggcaggtaccagtaggtgctgggcccgcgatctatatatcatgatcccaggtccggctcaagacgttaaagaagcgctactatgaggcagcctagtacctttaaaatttctgcttcttattttccatctatcttcttaagttacattcgaatatgcctagcttatttgcaatccttggaattaaggaaatacacaagcctgacaagggggcatttaaatttttgccaaaaaaaaatgatcatgttagctagcctaggcgagcacccttggaccagataacataaaaaggggcaggggtgaagctttcttcacccgattatcttnctccgcaccttctaagaacgccaaggctacgggactcatgaaaacc

SEQ ID NO: 93048 - DNA, 441 bp, Glycine max
  unsure (1)..(441): unsure at all n locations
tcaagctacgcatagcattcttcatttctttttgtatcatcatcatcangataaatctcatttgatttttcatctaggactatcaagtttaatctatcaggtgcacattgcactcgagtagattctctataaggctcatgcattgggttcatacaatgttgaattggctttaatatagattcattgacctgatcttgaattatagttggctctcgaaccacaattagtggagttgatgacctttgttgtaactttataacattatagaaaggtatctcgatttccatctcatagaccagagttgattcattgggtaattgaacatcataaactcaattctctaaanaataaacttttatgtctgaatgtttcaaatgaacctacggggctaaaatgcttggatattgaaatgccgtgtttttggacctaaatccacgattg

SEQ ID NO: 93049 - DNA, 407 bp, Glycine max
aaaacagagattgaaatagcagcataccaagcagcacaacaaatctcattaagagatccttccggacccaatgcaatgaggcctaatccaaaacgggcttcttccaagtttcatccccttgttctgcaaaaaatccagttctaatattttctccttaatcaagtctcatttgaaataaatctagttctaatgtttcacaataaaagcaaaaatacaatgacattttcaaaaacataaaacctaataattaatttaattatttcaaatcagaatatataattattcaaattaccttaattactatatttaaaataatcttaattaccttaattaaaacatatactaataatgactataattatttcacattagagaatatacttattctaattaccttaattactata

SEQ ID NO: 93050 - DNA, 318 bp, Glycine max
atatgaccaccactcgttttggagcgctgagcaccatcagagcttccaggccaacaaaggatggacatttcttcaagagcgacacgttcagctcagggacgacaagtatatcgacatccatgaggagatagttctccggcagcgggcaccactggatacccccatggccaatatccacccaaacatagccctcgagtcttatgccaatgcctggcctacaaaggagggcgtgcgatatatgcgatcatgggtgaggggtcagtgaacaccgctcgatgccgatgcatctcagcccgccatcgggatatcctttaatgc

SEQ ID NO: 93051 - DNA, 465 bp, Glycine max
  unsure (1)..(465): unsure at all n locations
tgtcaaagtgttattcttctcttctntaatagtacactataatactatatattngaaatttcccttgaatatttttcttcttcataattaatacactacttttgagtttcttggcgacaaatagtcatggtatggacatggggtgaatctatctagcaaccaaatgataacattgcagtagcaattgatgttaacccactatgtttgaattgttggagtaaaagtaggataagttatcagaaagtcatgcaataggcagtgaaactagaatttttgatgctttcagtttggtatttgtacatgcgtactagtataatactgtttntgatttgactgttgtttattaatcttactttgattttgtttttaacttgctttcctgtagacagtgttgaccacccacgactttaacatgtaccatctgtacaactagaatctcattttgataaagtctctcagtataag

SEQ ID NO: 93052 - DNA, 226 bp, Glycine max
  unsure (1)..(226): unsure at all n locations
agctaataaaaaaaattatattaatagatttantttggaagactaatcgataagttaacttataaatgttaaatgacataaaacgactgatcgaggccgtacccgaatcaaataaacacgaaaatgccgtagctaggaagtgagtccaggtcgtttcccaacgagcagtgacaagcctaatgtgcataatatacttgcagcaacagaaacgatgaggggggggggg

SEQ ID NO: 93053 - DNA, 421 bp, Glycine max
  unsure (1)..(421): unsure at all n locations
ccgaacgaaccattcagactctagaagatctacttcgggcgtgtattatatagcaacaatgtagctggatggattgttngccattgattgagtttacttacaacaatagctaccaagccagtattggtttggctccttttgaagctcaatatggacgagagtgcaaaacttctatttgttggtacgatgatggagaagcaatacttcttggaccggaaatgctacaacggattaccgaacaagtgaaattgattcgagagaagattaaagcatctcaggataggcggaagagctattatgatagaaggaggaaaccactatattttcttgaaagagaacatgtatttntgaaggtntcttctgtaaccggcgtcggaagagctttctaatctatgaaggtgacgcccaagtatctaagttc

SEQ ID NO: 93054 - DNA, 427 bp, Glycine max
ttctcaaacttgagttgtagaattcttattactaagtccctcctgactagatgattgaaatgatgcatgtttatgtgtgtatccctacaatgccataatcaagaatcaccaatcttacttactaaaccactaagctcatgaaatgatgcatgttcaatgttttaacatatagatatcacctatccttttgctaatatggacaattgtcacaaagttgactaatgctcaagaggttatgctttagtccatcaacatataaaacatcctatattagtgtcttgtactgatcttcaatgtatccttctcccataacattctccttattgttgtcttcaaaagtgatgtatcctctcttttttgatcaaagacagtagtttgaacttgttaccattatgtgccctgaccaacactatccaataccatactg

SEQ ID NO: 93055 - DNA, 449 bp, Glycine max
cagagcgcctgcggcagcaacttgattggagttatttttacttattacactttgggtattagacaattcattcaatgaaacttccaaagaataacgcccactcgacttttctgattactcaatcatcatagcttccgttctttgattcaaccgatgcttcagcgataatgatcggtaaaatttttcttctacagtgacctaacgagattacgatacatacgatcggctgagattcatttcatcatctattatgagagaaaatggcttacactaacggttaaaagctcgctaaagcggaagataagaaaactgaatgcttgtgaaatggaagtgaacgtacacaaaacatgtacggaccactaacggtgcatagaatgaattgtaagattcgatatcgggaacttacccgttgcagacttaataactactaataaccgtgcacaactatg

SEQ ID NO: 93056 - DNA, 399 bp, Glycine max
  unsure (1)..(399): unsure at all n locations
tgaagagactttagaaaaactaaacgcacactttcaatttatcagntgagaaattcgattntcgatcatatattgctacggatggaaacacgttatcatggaaagcaatgagcttcagcaccatagggctttttagttatctacatttttaagaataaaatttaagctatcattttttatgaaataaaaaagagttaaatatgtttttagtccttacaatttagtgtgtgtgttttttttttcttttagtcattataattttttttttgtttttagtcattctaaattatgtttgttttatttttttctccttatgatgctttagattatgtctttttcattatttaaagggttgtctaaagtgctttaaggactaacaaataaacacatataatttat

SEQ ID NO: 93057 - DNA, 400 bp, Glycine max
taagtcgaccggatgcatgcagcttgctcagggcctacaatccttgaattatgagaaacaagagagatcgcttcgtgggtccatccggttattcaagactgttctttacaacaatggttaaattccatactcgacccgagggccttacaaagcccctaataagaatgaagaacagattgagaggatcattgttgtggagtagaagtccgcccaccaatacgatctaattgtactcaatgaagcatgccactgaacccaacacatgtcattgggatgtttcaaggacaaaatcccatgcatataatcttgtggaggtcgctaggaagaaaccccgtgattgctcctcatgtcgtggaaaaacttgcgccaatagaacttcaactctttcatgaacctaatc

SEQ ID NO: 93058 - DNA, 412 bp, Glycine max
  unsure (1)..(412): unsure at all n locations
tgatggagaagcactacttcgtggacctgaaatgctacaacagcacaacgaacacacgaagttgattcgagagaagataaaagcatctcacgataggcagaagagccattacgatcgaaggaggaaaccaccagaatttcaggaaggagaacatgtgtgtttgaaagtttctcccgacaccggggtcgcgaaatctctcaagctaggaagcggacacccaagcatctaggcccgcacaaatattgaagaacattgggcctgaagctcatcatatcggcttacctccgagtgtatcgaactggcaatcccgtggttcatgtccctcaactgagacgggccaacccacaatcctcacatatactctgcagtgacgaggcacangcgaaggatacctcactacaaagcacatctt

SEQ ID NO: 93059 - DNA, 456 bp, Glycine max
  unsure (1)..(456): unsure at all n locations
tataaaacnaccgctataaggtatancagctcttacgaaatgttgttttatttgncagcatgtcgctaataatgagttgacccaatttcttgtcttaaatttgagtgtaacaaacttttggttgatcgtattctgactttgatgctaatcatgcttaatttgagtctaacaattttttttgtcttaattaaagggcactttacgcttctaattaatcatactcgcactaaacaagatcggcttttacatttttagagctataacactatatgtccacacaaacatataataattcctagttatgaatttccagtgtgtcacataaaggagcttaatacggagaagatgagtagctctagcgatttggatgaagcttaattgaaagaaaaatgattaaacttatgtgggtctcacctaaatatactctaccttaccctatctatacatatactacag

SEQ ID NO: 93060 - DNA, 380 bp, Glycine max
  unsure (1)..(380): unsure at all n locations
nggaatagcatctgcgcacatatatagaatctcttattctgttcccacatgtcacaaacaggcacactctcccaatgtgacaaaatcatagacacatatcaccggggcatttcaccgagcacttggtgggcgcatgttcggacattcatcggcaacacgacggggacaatgaggaatgccccattgcttcagaagtcagcgtaagcctaacgccttcgcgttcacatcctcaactcaagaaatcatgcctcaaagccacccaaaagtgcctcacgaatatcaccacggtctcgccatttagagcactcaatgaggaagaaaacacactagtgggaagcgtacaactcatcgaatgaatactcacttgttggagtgagatg

SEQ ID NO: 93061 - DNA, 401 bp, Glycine max
  unsure (1)..(401): unsure at all n locations
agctngatgtgagaaagcgtggaagagtttcntcttcctactttggttggtgaccacagagtggtacctggagatatgtcgcggcgtcaggagaccttggggacgtcaggtggggtgctattgcccaaaactaagcttgactaatcccgacccaacccgggcatagtcagtcagtgagaacctgtgacgtacctaagcaggcgagctcttggcagtcaaccaataaaagaacaaaatccacgaagcaaggaagcttgtgtggcagctggccagctatgtatcttgggtggtatctggaaattagcctctggtaatcgattaccattcgtgggtaatcgattacagggcttataaatggagacaggatgttgaatggcctctggtnatcgattaccaatggt

SEQ ID NO: 93062 - DNA, 292 bp, Glycine max
  unsure (1)..(292): unsure at all n locations
tctagctcaatggacttacctcgaatttattcctttgttagcccttctgagccttgtatccctttccttgttttgaagctcactacaagccttaagtgaaaaaccatgatatcaccatatccttaaggaatnttggagctctggaattgttctgggaataagtatggggggtgtttgtttcattggacaacttgatttgttggctttgcttcatgatgtattttgggccatacttgatgtacattgtgtattggttaaatgttggacatgctgaatgaaatgttgattctca

SEQ ID NO: 93063 - DNA, 400 bp, Glycine max
  unsure (1)..(400): unsure at all n locations
gaggtacttacccgttgaagatcatttaacgattaagaacgaatgaagaacgtccaagaacggctgaaatctttgcgaaattcctcatggaaaacgttacggaaacgtttccgaagcgccttggcttagattttatttacggaaacaatatttgcaagcaaattcgatagagagagaagtgccaaagtgctgaacccttttcttctccattgcctcccctattatagcanaataggggaggtgggtgccgcccagctcgcccaggcgagccaggttgcttcctccagaagcaacagccttctggaggaatattttggagggcccaagtgggcctgagtgctatttgcaccnccatttttactaagtacaccccctctgcttttcttggtggatctttttc

SEQ ID NO: 93064 - DNA, 447 bp, Glycine max
  unsure (1)..(447): unsure at all n locations
acttatgagatctcacacttattatttatttaattgaacanttttctcaattgtctcttgatttcatttcaaacaaccaaactcactctaatgatatgtttggtaggaaaaaaacagaaatagagaaaaagaaaaacaccgacaacaatatgttctcttgtatttggattaagagacaaacnagaaggaaaaaaacttggctatagaaacaaaattttttcttcactgtcctctagtcagatttacattatctttctctccactttctttctattccaacatanggaaagtattatttaacacacatgatgggggtggttgcttattacttgactctatatataggaaatttatttagtatgaggtccacttgaaatggaattcttttccatatatattgttacaaacaaatgaaaaacaatgtattatcttatataataatatttc

SEQ ID NO: 93065 - DNA, 85 bp, Glycine max
ctgcagcttaaactctttccttccgaatggatttctgatggtatctgaaagtacatacgctggctagttccaaaatatatcctta

SEQ ID NO: 93066 - DNA, 377 bp, Glycine max
  unsure (1)..(377): unsure at all n locations
ctttggcatcatcaaaatcatgtattcatacattcacattcttcccctttttgatgatgacaatcattatcaagtgaattcttttcagcatcatcaaaaccctgcattattacaaatttggttgggctaaaaagcaaaaatgaggtgaaatttattatttatttgcactaattatgctaagctgggatacatanaaataacttanagtacanatctatgccaaaggacgtttgaggctagccagtgaatcaggaaaactctattntactaactaggttagacccangattgcaaaaaaaaaggatcacacacaagctttaaatcaatactttgtttcaagatgctaagctacaacatctagaagtgaaagggtatct

SEQ ID NO: 93067 - DNA, 345 bp, Glycine max
caattgagaagggacaatttgagcaactctactacacagtctatacataatctaactgctcaacggattacacctaaattctccaataaatttgatctcacactaacttgcctaaaaggatctgttactttgtcattgtttttcttaccagccagcttctatagtctaatgaattcagcagatactactttactcattccacaatcaattacttcacttaagcttctttttcatatacacccatctccttgacctagtaatcaccttatttacatttctagcattcccatactacagctattaaactaatgatggactactatcaactgcagtactctcacagtc

SEQ ID NO: 93068 - DNA, 82 bp, Glycine max
  unsure (1)..(82): unsure at all n locations
gtatctacgaagtgatcctangtcatctcctctttatcaatgatcaaacaaacgttcataacatgtaataataaaacaataa

SEQ ID NO: 93069 - DNA, 230 bp, Glycine max
cttatgcaaatacatctagcaaccaatcctgactgaaatcattgtaaccgctatgtccaattaacttacacattcaaccaagtgattccgattacttgctacttggctccgacactgtgacctgataaatgagtggacagtggcgactcttactgtgtgtaggagtgcttgctggagatctcgtgaaacacccctctaaagcttgggtgaacttcttgtgcacaacagtg

SEQ ID NO: 93070 - DNA, 469 bp, Glycine max
  unsure (1)..(469): unsure at all n locations
tgtcaccggcataatcattatcatattaactttactaacctaacatatnttctttgcttaaagcaaaaaccaatggtaggagttccaatacgatatttanagattctcttatcgacaattaagtcaaattctcttggntgttttcttaaacctatcacacatgcatacactaaacatgatattaggtctagacacaatgagatataggagtaatcctatcatagctctatattgggtacccttcttgattcctcatccattccagaaatgttggtggggtcttgtaccccacttttataccagaaaaggatagataatgtggaccgaaacacaaaactctataattcatgttttgaaaacaagaataaaaaatcctgaatcttatctagtggcacttcttaaacatacagacatcttgtgaacaatgtacaaggtgcacttcttatagaaaatctataaaatgcaactt

SEQ ID NO: 93071 - DNA, 321 bp, Glycine max
cacgtctcttggttttattcattgaataaaaaagactggttgactactccatggatttcataatttcctgcttactactatcgaagattgatatttttgacacttaccaatgcaaaaatacaaatgcgaataaaagctatttctaaatttgtcaatccctcatgtccaatgtattaactgagggcagtgaaactttctgaaagagggtataaataacactctgttttatggaccaaatcaaaaagacatgttgttcaagaggatgcttggaacgagacttctgtatattacttgaaagaggttatgctcttgacacttgta

SEQ ID NO: 93072 - DNA, 302 bp, Glycine max
  unsure (1)..(302): unsure at all n locations
aatgcatatacgtctatgtcaatggtagccaaattatcttncttgtgctatacgtggatgatatnattgtggcttctaatgaccttggcatgctccatgagacanagcatatgctaacagatattttgacatgaanggatcttgtgaagcttctttttgtgtggggattgagaatcatagagatagatcatgccatacactcaangtatctcaaaattcttacattgatagagtcttagagagattcaatatgcaaaattgtaaacctatagatgtccagttgtaaaggtgacaaattcaac

SEQ ID NO: 93073 - DNA, 171 bp, Glycine max
  unsure (1)..(171): unsure at all n locations
tcccgacccaacccgggcatagtcagtcagtgagaacctgtgacgtacctaaacaggcgagctcctggcagtcaaccggataaagaacaaagaccacaaagcattgaggcttgtgtggtggctgccagctatggatctngagtaatatttggaatatggcctttggtaatc

SEQ ID NO: 93074 - DNA, 245 bp, Glycine max
aaattggcgagtggaggaacgccccggcatttactcaacgagcataatgtaaacctttacgggtttaaaagctctatagctgggcctaggcgttagagctttcctttcgttaaggctctgagtctgtcgttcttgaatatataatacaaagatctatcttcatctggtcctacgactctacccattctcattcatttgcatgtgtacttccttttctgaaacagcagatccgatgacgagtcccc

SEQ ID NO: 93075 - DNA, 314 bp, Glycine max
  unsure (1)..(314): unsure at all n locations
tttttgtataacggatggagattgccccctctaacaaaagcaacctaaacagaactaggttattatatttacagcttccaccagcctttggtttgaatgtataagccaccaagaatgatgagctggtttttgtgtaattacttttatgcactggctatattgagatcattaagggcagaagaataattgatactcacgtctaaagtaggtaattacattgtaactttgttgcaattataactcagacatgctcaagttctangcaaactttgtcaccttatttcaatgcagataataatttatagattttacta

SEQ ID NO: 93076 - DNA, 252 bp, Glycine max
ccggatgctgattatgacttctatgtgatagtgcccgcaacaattgtcaagtgcaagtctgtgatccgcttgtaaataactgatatacgaccacgataatactctatcagaatattttataacatactgagtcagcaggcatgccgcaagaactacaaatacagtgacatctttagacattatttatttatgaaccaaagctgtcatagtatgcagacagaactctgaatgcatgttgatacatgaaggatt

SEQ ID NO: 93077 - DNA, 465 bp, Glycine max
  unsure (1)..(465): unsure at all n locations
tctgagtcacctgccgcatgcaagctngccttgcccctngatatacttgtgtgactcatggtcactatgaatgacanattccttggggataaggtagtgttgtcattgtttcaaagcccgtactaaggcatacaaatccttaatcataattgaatatgtaagggtaggaccacttaacttttcacttaaataagcaattggatggtcttcttgcaacaacacaaccncaatcccaacatttgaagcatcacactcaatntcaaaagaattttttgaaagttggcaacgcaagtatggnggcattagttagcttttgcttaagaacattgaaagcttcttctttgttctctccccatttgaaaccaacatatttcttgagcacttcattgagaggtgctgccaatgtgctaaaatccttcacanattgtccataanaatttactaagccatgaaaactcctcacct

SEQ ID NO: 93078 - DNA, 393 bp, Glycine max
  unsure (1)..(393): unsure at all n locations
tgaacatgttatggtttgctactgattttaattctttgacccttngaatgaccaaattggctttcgatgtcttcatgagacttgtagagaaatttatcctttacattcaagcactggtatcatgttanttggaccattacaacataatcaatccttatagcattgcagttntgttatattgtgaggacaaactgacatctctatcttcatggtcagtttctttcaagatccaagccttatntgcccatgacttctccatagaagatatatatatctntctcttagctntctacaaccactgagatcatcccanattcacttttgtagctcaagtagttttcaaattattgcacacatatgaaactgtcaaggcaaaccagcgtctttaacttc

SEQ ID NO: 93079 - DNA, 273 bp, Glycine max
  unsure (1)..(273): unsure at all n locations
atccatcaagggatctcatgttcaacattgtcttacaaccaaacaagacagtggagatcacactcctgtaatcaattcaacatagaccagagtggaccttccaacatgctacctcaacaanggctttacatttttcagaagacaacacagctagaggagactctaactcaattcatgcatgtaaccatgtcaaatcacataagcactgagtcaacattgaagaaccttgaagtccatgtgggccaactagccgaacaattagttgaaaagtca

SEQ ID NO: 93080 - DNA, 295 bp, Glycine max
  unsure (1)..(295): unsure at all n locations
tataactatacacaacaagctaactcgagtcattatctgtgcaagacttactctagctgatatgacctcaatgcagattgacaagctattgtacaaatgaaacatttctatcttctagacactacagttattggagttgagtgcttaaccctccaagcaatggtcagaaccaaattgaaatactcatttaataactattattgctaacaaatagtaaggaanaagtaatataaccagttttcccaatgctctatgaacataggatgagctcaatgatgtatataagtatgagaat

SEQ ID NO: 93081 - DNA, 251 bp, Glycine max
acctgagagtcaacactgaattgaaataattgttcttttcaagctaaaatggaacgctaaatgtttaaacacatatgaggaatgtgacataatgcagcaatctattttatctcccttatgactattacattgactgacgctgagaactccagctaccatttaatggttgctttcaacacttaagatagaagttgcaaaggaaatgttgtaatgaaatactaattaatatggtactctggatgcctaaggac

SEQ ID NO: 93082 - DNA, 110 bp, Glycine max
  unsure (1)..(110): unsure at all n locations
ctcttagtcacctgccgcatgcaagctngtaggantatggngtacccatcacatgtggtactatgtggctgtcgggcgatggtgcacaacaagctttccacattcacaat

SEQ ID NO: 93083 - DNA, 368 bp, Glycine max
actgcactaacagtgtgacttgaaagacttcagaacaagcacttgttaattgtgactttggaatgtattttcgaatcagcactggtatgataccataggctatcgatacacataaagatggaccttatttgatttgaaatctaacgtttaaacactggaatcgatactacctatggaatcgataccagagagaaactctttgtaatgaattttgacaacttctgtgctactcaatgtttgaaaacttcttaatacttattttgatgagtctctcttgattctgatcttgatctgatattctgaacttgaatctgacttgatctgaatttgctgaacttgctaacttgatcttgcatatcaaaaccttg

SEQ ID NO: 93084 - DNA, 390 bp, Glycine max
  unsure (1)..(390): unsure at all n locations
cataacgagacatgcactntgtcaagatgaagtcacaccttctttcaagcacgcctttgtatttatcataantcacaacaaatttgccgttagtggttaattcaagtaatgactaacttatcttatgtgtcatagtgaccatggaaaattgccttcatatctttttagncttaattcatagactaaatcttgagtcaatggaaattcttgaattacttagaatcggcaagcagaaaagggaagccactcatatgtgatcgctctcaacagttaactgttggattatatttggaaaacaatatttattcaaataaaaaccttgatgaactgttaaccactatctgaaatcgangctacaatctatgaacgtctgtttaacgttaaatttag

SEQ ID NO: 93085 - DNA, 268 bp, Glycine max
  unsure (1)..(268): unsure at all n locations
tgaaatgagtgaacattacatcatatcttgcatatacattgcttgtatcttgatntcacgaattaaattgtcatcatcaaanagagggagattgtagaagcaaagatnttgactctgatgttttgatgatgccatatgatcatgatgttttgatgccatatgaacatgcacttctcaagttaagatcaagacacaaatctaagagattcaagatacatcatctagaatatctctagtgatttagganggaattccatattgaaaaaca

SEQ ID NO: 93086 - DNA, 255 bp, Glycine max
  unsure (1)..(255): unsure at all n locations
catgtgggcatatcgacgcccttctctatcgtaagccatcgtccattttttctttgagatgcgatcaatccatgttgctatggctggactcagttcacaaattntttctannattttgataaaaaatgtgaatgcatggagtgtaggctgcataaaattagttatgaataaccaatttaagtattaaatgaaagtaaataaacgtgaccatcaaatatganatcttacccaatttcttcaacatttcttttttgt

SEQ ID NO: 93087 - DNA, 330 bp, Glycine max
  unsure (1)..(330): unsure at all n locations
tcttgagtcacctgccgcatgcaagctnttatnntgctttatatatcaatgaccagattgttattggccttatggctggccagcagcttaggggaatcaatggaatttgctcttataccantagtttagtttaaagtctgcatttgaagtctatgatagcatcatagtggttggcacatcaccattttcatataacctatacctcacaaccacacttacccttgaagtatggtcaaaagttgaataaactcatgaagcagcctcaaactagggtctaatttcactaaatgactagtctgtaaatcaatgttgtttctcataccactggca

SEQ ID NO: 93088 - DNA, 507 bp, Glycine max
  unsure (1)..(507): unsure at all n locations
tatatatgggcaagctcgtgacagatacgcttagtntattattattactattattatntgagtnttgaagcctattttattatggcatgtaactagctagctagctcatggtcaaatgcacgctagaaggccaggagttccctttgatgatttcccataggcgggtgacatgccaggattgatatgcanaatagtcttttacctaaccattcatgttcatganaacaaaatctgatcgttctanatagtctcatgcctctnttactnttatgatgcggtaaaccttggctatatatatcatttctatacattaactagctcttattatgtaacatcatattatttttataactataaatgatngaaagcacacaaaataattatataaagaananaagtaaatattagtgatagacttannacttgcatcgtgagtttgaataagtgcttaatntatcactcagaattagtatattanaatattnaatggcattaccgataaatata

SEQ ID NO: 93089 - DNA, 362 bp, Glycine max
  unsure (1)..(362): unsure at all n locations
aatggttatgttnatagaaagctcacatacattgtatgctaatgctatgtgactaatatcactgacttcgccaanatcttcacgtggcaatatcagtcttcaagatcttgcttcatgtctctaggccaaacacacttggtttggggaatatanccaggacgccaatatttcacagcctataccaatatagagaagctttganggattccttcatttgcattntggctgttgagtctcccatctactttgctaattcaacgtacctacaagaaaggttagataaagcgatctctgaattgtcaatctgtgaatggttagtacatttaanagaattttagaggcattttctgagtgattctgag

SEQ ID NO: 93090 - DNA, 404 bp, Glycine max
ctatatacatagccacgaatcatttattgtatggctcatagttctaaagtaaaaatgcggctcttatggtataagaaacttcaacctttttaaaacaaaaataaagaattttcatcattgaccaaagccatgcatcatttccttggcgatgcgattaaaactacagtatatcaatgagcatgcttggaacctctgataaaagcttattaagccctcattgaggacagtattttaaaaaatcattcaatatactaaacgacatcctaataccactgcatataagctaatagactagcttgattattttctcagctaatttttctttaatgacccctcaattgaactcaattcgccttcttcatgtaaaagtaatctaggggatggcggccatgctttaagagttc

SEQ ID NO: 93091 - DNA, 287 bp, Glycine max
  unsure (1)..(287): unsure at all n locations
aaacttccttgagaagctagagcttagctacacacacccatctaanaactaagctcacctccttgagaagcttccttgagaagctagagcttagctacacacactcatctaanaactaagctcacctccttgacanaatacatganaatacaaaanaaaagtccctactgaaattctgatatcgatgacagatgtcataccggatgtcacgacatcacgcttcagaaacatgcagatatatntgacagtatgaatagatanacaangtaatacacangagaaatgta

SEQ ID NO: 93092 - DNA, 288 bp, Glycine max
  unsure (1)..(288): unsure at all n locations
tacacaatagccacaacaaccttcacatgttacctatgctgaagtatgctactttagaatgatctgcgttgtgaagaagtngttgtattaatggagttgagctatctacactggtatatcatgttatcttcataagaaggaacctacatagaacaaaatccattcccagcaacatcagaatgcaattctgatgtaccttcanaagcttatcatattngttcttcagaatgganaacttcanaatgaattcanatttgtcaagtcaagtacaactggcatatctctact

SEQ ID NO: 93093 - DNA, 371 bp, Glycine max
  unsure (1)..(371): unsure at all n locations
gatgctcgcttctatatatgggatgatccacacttgctcaagatagaagctgacaatcttctacgaagatgtgtgacacaagaagaggccaagaacatattatggcattgccaaaattctccatgtgatggtcattatggtagagataggacggcggtcaagggtttgcactcttgattcttttggcccacacttttcanagatgctcatcagcatgtgcctctacagaatattacggagggtgaggtgttcgatggctggngattgattntganggtcctctcccttcttcntttggcaatgaatatatactanngtggtgtgactatgtctctaaatanggtgaagtagtggctaccccgcataatgat

SEQ ID NO: 93094 - DNA, 338 bp, Glycine max
  unsure (1)..(338): unsure at all n locations
tctactaaatatggcagattatcaacnattttcatggcttgatgtcaacaattacattagaatcacaataagaatcagattaccaaaaataaataaaattagtgaatccagaaaactactctctgacatacatgcttccttggatgcttccaagttgnaantttactaatatgtctttaggtatattntatctcaatatggtcttgcaacatacctataccatttacaccatttcatgtaacattatcagattattganggtctcatgcaagatgaagtataagaatncactgatgaacatatatgatgttctataaacatnttactttatcatgaat

SEQ ID NO: 93095 - DNA, 424 bp, Glycine max
  unsure (1)..(424): unsure at all n locations
caggactcgagtgctattatntagacctcttatttactttagtaaatgaagactggcacatttggttcttgannaaaatgtctctcattctattcaatcatcttataaattgtttatgggtaaagntgctaatggtggtcatttgaaagttgagggagaatgggatctcatttggagggttaaaattcacccaanggttaaactttttgttnggagggctntgagagaatgttaccancaagaatctgactattgaccaagaatattgattactaagcactcgtgttcagtgcaattctgatttatagaactattggcatgtcttcctgacctgcccagttagccttcaatattggaatgaagctgcgtttcattatacaatcaatgacacagtgtgtagtggtgaatctttaaanattatatt

SEQ ID NO: 93096 - DNA, 394 bp, Glycine max
tcggaatcgatactgaatattaaaaatggtcggaaaaatcaaccagccttcgaacgttcgggggattcggaaggttcgacgtcttcacgtcttattcgtcttatcgtcttcgcttcaccggaagtccctaatcgactttaattcatctatgaccttagggtctcgttgtttacggcttcattaaattattacttccgacccctttgacggctaaccattattaaagcattttcgctaactaaaaaaaataattccccgatcgttaatatatcatcgtatttcgtaaatgatccaccgtcggcgtgccgacccgtggaatcaaagaagtaatatatatatataaaaatctttagtaataagcaaaatcacaacgttctcttggatctattctatg

SEQ ID NO: 93097 - DNA, 241 bp, Glycine max
  unsure (1)..(241): unsure at all n locations
cgaccggggcgcccttccgacaaccgagccccgggccgaccggcagagacccacgagcgtgaacccccggggggcgccccggcccgttttatttatttcgcgccgncggccccacccccgcacgcaatgggcaggaaaccaccgggacccccgcccaaccaagccgggcgagccccgcctccggtctcggaccgaaagacccacaacccggccccatcccccccgggattgcccgtcggcg

SEQ ID NO: 93098 - DNA, 348 bp, Glycine max
tttttttgttgtacctagggacaaatttatgtactgaaggacaaggaacaaattttctattattaaatagttggaaagttgctgtatcatgtttttttcaaacggagaacagtactggagagtggtggcaaaattcttaaagagccattggattttaaagttaaactcacaaagaaatggatagatgtggcaactgaagtattcaaaacactgtactatatggagtctattgcaacaagggaagaaaaacatcagttaacatattgttgtaatctgttccggagcctatatttaagaataattagggcccaagtagtttttgtgatcatgagtaaaaatggcctttgg

SEQ ID NO: 93099 - DNA, 305 bp, Glycine max
atggatcgttatttgatatatatcagtggcaggcgagtagaatattgactttatccggtgaacaggagcataccgtccactatttgaccatcccgtgaagataaattataatactgaaattttattattacaaataaattttttctatgttttgagaaaaggatgaatacagagtaaaaaaatggaacatatttatatagatttaaaaataaaaaatttgacaaattaacggacaacagaagaaaccatccgacagaggaaggaacaattactttataggaggccaaatagtggaacagacgaac

SEQ ID NO: 93100 - DNA, 411 bp, Glycine max
  unsure (1)..(411): unsure at all n locations
actcataatcacatgattcatattgataagtgttcataatgccatcatagtccagcaaatagtttataacanataatatatcgaatgccttagcctagcccttagtttgtataatagtanatattagatagtatatcttatcagagatataaggttggtggtgaaagataaaaggaaggggaggagggggttcacatgttcgaatctctcccatatnaaanaaataaaaaacaatactaacatctaacttntgccaataaaaaataataatgtatcttatgccttagcctaaccctaatttggtaaactaacgtatgttaggtatgttggggatctattggtggagcaacatangtgaccattaacaaatttcccctttaccacttctcagttatccttccgtgatctgca

SEQ ID NO: 93101 - DNA, 111 bp, Glycine max
tggacatgcaactaagggatgctaaaaagtatttatcccacaaatccatgaccaagtttaaaacggtccaggggctataaaataatatggtggaacttttcactttttttt

SEQ ID NO: 93102 - DNA, 388 bp, Glycine max
  unsure (1)..(388): unsure at all n locations
gtttcagaaagcttcattggatgacaagaaggaagaactctctccacttcanggatcattanaacttatatatattcatgcgctatgttagctaataatgttatgcattnttatataataaaaataatcattgatagatgtgacaagaatactcactaataataaagtacactgccaacataacaccaacaacctatagaatcctgcctctttttttcgctgcacgagtgtattttggagaaaaatctacatcctcttcataatatgatggcgatatntgctctaatctacatattaacataagtaacaagctgctacaacctcatactgatagtctttctataatgaactgataggatattcatactttaatgttacattattattt

SEQ ID NO: 93103 - DNA, 437 bp, Glycine max
  unsure (1)..(437): unsure at all n locations
tcatgcacttagcgcaattctaaaccgcttagtgcgcatcggtgaatatcnggctaacgccagctttctcactcagcgaatgggctgaagcggtgcgcttagcgggatggcccttcgctcatcaaacatgcacatctcatncttcttncagaaatcttctcgcgctnagccaaggaatattgcgctaagcggatggctcgctaagccagcagattcgcttagcgatagggtcagaatcagcatttcacanactcccctaattaacctgatattgagagagaatgattattaaacacacaaaatggaagtactaagtatttattacctatcgttacccacaagtaattacaacactacanaataaccatanatnggaggagtgtgatacaattacacaacgtttatacacaannagtagtcgtattcatcgactaata

SEQ ID NO: 93104 - DNA, 221 bp, Glycine max
  unsure (1)..(221): unsure at all n locations
atcactcttctccatctatgtaataatattctaataagccactaaacatatnatatcacatgagaagacaggacatgtaagaagaagcttattctttatctaaaactgccactcattagtataaaaaatacagaatacagtacaagtaaaaaaaattataccagtaacacaaagactaatgaataacccaaaccctctgttccggacaaaaaaaaacaatg

SEQ ID NO: 93105 - DNA, 408 bp, Glycine max
  unsure (1)..(408): unsure at all n locations
atgatgatgtgttngctctagtctctcacttggagaccattagactaatacttgtttattgcagctcaacacaagtggataattcatcaaatggacatgaagtctatcttcttgaatggagtcctcaaggaagaagtgtacatcaagcaactgctgggatacaacgtgaaaggagaaaaagacaaagttctcaagctaaagagggcactntatggactaaaataagcattgagagcatggtacattcacattggcgagtacttccaagaaaataacttcacaaagtgtccacacgagcatgccctctatgttaagatcaaagatggagaatatttaattgtgtgcatatatatggatgactngatcttcatgagaaagaatctatatatgtttgcagagttcaagaat

SEQ ID NO: 93106 - DNA, 201 bp, Glycine max
gcaaaaaataacccaacttgcataggcaatttgatatggagctggtctagtgccatgctcagttccttagctttatttacaatgaaagatttggccctatgctcttaagacaactattctgcctgatgtggagggaacaactttataatttacctacaagtttatacaactcacttgcactatatctcttctgtgtagcct

SEQ ID NO: 93107 - DNA, 458 bp, Glycine max
  unsure (1)..(458): unsure at all n locations
cagagaccaacatgttagctatcatcttcaagtaccaagaagaagtaggtctagccacggcccacgagcatagaatcgcggatgagtatgcccaagtatacgcggananaagaggctagaggaaaggtgatcgactctttacaccaagaggcaaccatgtggatggatcggntngctcttaccttgaacgggagtcaagaacttccccgattgttagccaaggccaaggcgatggcagacacctacttcgcccccgaaaagatcatgggcttctcggctattgtcagcatatgatagacttaatggcccacataattagaaatcgttaggaaacttgtatgggctctcagaccttgactagatatgacttcctttttgaaatanaatgagtnggtcccatgtttctactccanaaagcttgtgcanatcanatcactcctacatctcatctctagcat

SEQ ID NO: 93108 - DNA, 179 bp, Glycine max
  unsure (1)..(179): unsure at all n locations
taataccacaatgaagatgggttgtgggtatgatattccatcataagacacgattatttgtcaatgtttgggctattggtagggatcccaatcactgngagaacccttttgagtttatgccacagagggttatcaaagatgggtagaatgaatttgatgtgaggggacaccattatcat

SEQ ID NO: 93109 - DNA, 404 bp, Glycine max
  unsure (1)..(404): unsure at all n locations
ttagagtaatatatatagtacaatntcttggagcacgagcataagatggtgagagctggtaagaaaaatgctgaataatcatatccagcgcacactttgcctctatgaatgcaatgttntgaagccctttataaatctcactggggtgaactcttccggattctcccaatagttactatcataatgaagaagtaacaatggtgaacacaactcaaccctagccgggatggacatgcttactacccttgttcacaccaattgttttgtaatggtattatcgatatatagctcaaactcattcatatcattttttatcatgacactgctattatagcaacatttgcgtaatttggttcaactttattcagtcagacatcaaatgacaatatcatttctccaagttg

SEQ ID NO: 93110 - DNA, 120 bp, Glycine max
ctgcagctacctaggtgctctacttatcttacgtcaacattggccaccctacttgggggcactcctctctccgtatctcgcggaaagagaggaatcctttggccttattcctaggaccgc

SEQ ID NO: 93111 - DNA, 412 bp, Glycine max
  unsure (1)..(412): unsure at all n locations
tgatatacctggatccagngtgtaacacgcctaaagtattaatcataatacacttttgattcttaaatatgaaannataaaatatttatacaacaatctcatgcgagagctaacatatanacattacnaacttgattccattgataatatcaatacaacttatttctcatagctttccattatcaagatatangaaaatacagacanaataanataactaagctacatataccatgacgaggcttcatgctccaacaaatngcaccatcacctatttcctgaanaagaaaganacttanaggggtgagtgatcgangccgtacccgaatcanataaacattaanaatgtagtatctatgaagtgatcctatgtcgtcttccaacgagcaatggtcaaccaaatgttcataac

SEQ ID NO: 93112 - DNA, 384 bp, Glycine max
  unsure (1)..(384): unsure at all n locations
agtcanaatcatggtaggtcacagtcttgaagaatgataaatctcaaatgctatatatgtggcatgaaaagacacttaacgaatgattgtctgcataagaagagtgaatgcaagaactcngaagcataaatctcttaagagtgtgttgctagtacatcagataatgcaaaagtcctgtgtagtgaaacaacaatttggttctagaagcggaagacaactcatgattattggatatttgattttcatgtgcaacttggcacatgactncactgtgagaatgattctgcacttatgaaactatcttggaaggattngtgttcatggggaatgatcatgcctcctggaaatgtgnggtcggaactatcacaatanaaatgtatgatg

SEQ ID NO: 93113 - DNA, 480 bp, Glycine max
  unsure (1)..(480): unsure at all n locations
tctatttgttattagcttactgattatgttcatatataatcgcattgaccccttggacaggatntagtgaaaatggtattccatgtattatatatatacatgtataattcgattcagaggaaataaaaaggtttttttttattatcgattatcttacttttactgggcgtttaacaatcatttaccttctctcagaaactaatcatttacctaaagtgtagttaagtagtattagatcaannatttgagtttgcttcttataagagaaaaactgccacatggagcagcaccagctataaagaaaagaactaccgtatataatctaatacnaattttatataatanaaaattatttaaaaaagttcaggaatngatgaatctaatatgtngtaattntcattttgctcttattcnnttgtataacttcttattgtgggactnggatgtannatgtctggcacttcactctctttgcgtcat

SEQ ID NO: 93114 - DNA, 206 bp, Glycine max
aaattgtagctctatataaaaggcattacatacttccattggatctttttcaaatcaataaattacacaatgattgtttcctatgagtgtcttctcttattttttgaaacttatgatccttggctacatcaatcaaatagtacttgcgtctcttctcattttttttctcttgaacaagaaaatgatatttctcaccatattcatac

SEQ ID NO: 93115 - DNA, 200 bp, Glycine max
ctctgatgcaattactttttgtattatacatacaatccttctgaaaatgtctatggaatctaattggctatctaacaagttcaactttgatataaatactgactttccatcctcttatgctgttgcttgcaattaagatattttctacttacatattgataccttactaatattaatagggtctatcgactcatttgcac

SEQ ID NO: 93116 - DNA, 59 bp, Glycine max
tttagcgagcatacatactataaaaataccctaaaaccgcattaatttgggtttgatta

SEQ ID NO: 93117 - DNA, 323 bp, Glycine max
atcttcctaatatctcccgaatgtgaaatggcataaccaccgtcaagagaaacattataggtcaagaaaactatgctcaagctatccgatactccttcagcacaaaaaagcatgtggttccaagtcccaagcatgaaccagtaagcttgcgatgctggtacaatatcgtcatgagcacttatgaaaaacacttattgttgtctgcgctgttactttactgttaaaagccccagccaaatataatcggctatgaacttcgaaccgcgggaaagcaatgcagcggttaggccaatgtatttgccaacacgtgacccaacgtgata

SEQ ID NO: 93118 - DNA, 165 bp, Glycine max
tctcttagtcacctgacgctgcagcttgaaataagtgggaagaatttaattctatttttaatctttcattatatatattcagccttgaagtgctgtcattttcaacatacatttacaatattgatgccaggatttatgcagtgagctaaataccatgtaactttg

SEQ ID NO: 93119 - DNA, 419 bp, Glycine max
  unsure (1)..(419): unsure at all n locations
tgagacacacctcaccaacgtgtagtcattgttgatgatngcatgaatgagacngtagttgaaaaaataaaggaagaacttaacttcatgcaatggagaccctgcaaccaacagcatgcagcagccccttatgtggacacattaattatgtgaacacaccaaaacataacctacaagcatcagtggttctcataaaacnataacattgtctcaagtctcaaccctctcactccacctcctataatagttggtgtccattcaccagtcaccaccaagaatggaagccagcgctggactggtcgctggttctcacaatcgcaacgagctagttgtcattcatgggcatgaagaggtaatatattgtgtagtgaataccatgcatgaactactagcaaaaaattcaaaaggtatttaatcat

SEQ ID NO: 93120 - DNA, 336 bp, Glycine max
cagcactgcgctgcacttaataaatattatcttactgctcatctttgaatgacaggatctaggaagtctctaacagtatatatttgtttacaccggttattctccagatatctaagtggataacctatgataactcatgtaatcttgcccaacaaatttttcaaaatcatggcccaaattgaaaattccatatagagttcactctactgatttacatttaagtgaacaacttatctttacagactgattaacgggctcctataagacatgactactatgtattctcagcaatatgcttacttcttaagcaaactatgcagtctcttactcctttgt

SEQ ID NO: 93121 - DNA, 456 bp, Glycine max
  unsure (1)..(456): unsure at all n locations
gctgcaagctaaaaattcgtatgagtactctcgcgatctctcgataatattagaatattaagcttatagaagaatattgatgagtatgtaatatcacaactttggtctggaacaactagacaaatgcttnctctgaactctctcttattttatattataatctgtccataatctattaaatctttctgaggattaataaaagtataatatctaatttttaatattaaatctcttaattttattaatactctggatttatatctttaccatatatataaacaaggtacggtgacaatgaattttatctgaaatttcaacctttaatatttagcgaaacgtggatatgtattgatgtttggggttgatcctgtattggatagagtgagacaccaatctatagcatcttgtgtccaagaaatgaaaattttgtcatctgagccatanacttcttactat

SEQ ID NO: 93122 - DNA, 371 bp, Glycine max
  unsure (1)..(371): unsure at all n locations
atctctgtatgcataaatacagttgtanacagagattcagtaactaattgtaaaatctcttgtcataataatggatctattntctctctcttatatgttcctctcccaaagctttataaactcaaattaagtcatatctctagttcatgttggattaaacctccacacttgaggtgcaantaaggacngccncaaagaagctgcagctaaggcaggctatgggtgacagcaattaaggcagattccaacaatttctaaagcattagtcttagaatntggctttggacctaactcgacccaacaaaaccaacttngtaggtgagaagtgtctctacttatatacactactntggccatatcatgaagtaatg

SEQ ID NO: 93123 - DNA, 350 bp, Glycine max
  unsure (1)..(350): unsure at all n locations
agtagacatacccattctgttttatggttnttgngatgatgttcgcgatgtttatatgctgaaattgctaatggaaatcttgtagagacgaaaggtagaactaacccaacgttagaaagtgagaatgtgatgttatgagtggaanaagagtgagactctgagaagtggaaagctaagtcggaattctgtggttaatggacgttagagtgagtcaatactagcttgaaatgtcatttanaacatgtgagaaaggtaggctgagctagagagaaaaatatattgaccaagtgaaccaagagccatttctatnggcaaaattgggtgttgaagagtcaaattttgatttggtg

SEQ ID NO: 93124 - DNA, 336 bp, Glycine max
ctccgctgcactaatgaaaaaggctttatttaattttctagcactacgtctgtttctcactgcgacaagtaccttatactaagacactgatccagtgtcagaccagacattttgtttataaaagtgggcccacatatctgtggctatccactaaataactgaggggctctacgccggggtttttatattgtgttatgtatctacctaaacaattatattaaacgatgcacaatatattactgcataataacgaaataaattacggccctcactcacatagatgtggaattactaaggtcataataacatttagcgtgtaaccacatataaagtaat

SEQ ID NO: 93125 - DNA, 470 bp, Glycine max
  unsure (1)..(470): unsure at all n locations
catgagaaccttcgttatanatggggtagataaattttttaataaaacttagtcgataacacatctcacatgtactcaattaaaaaaaaactcacatgcattaatatgatgataaaaaaatcaaatttaaataaaatattntatatattccagttatgataatgagtcttttattatgtaagagaaacaaaaacaatcaagctttcctagtatatgcatctgaatatatcgntaattntaaagtatctatgcattatanacactcatactctcgtacattattggtgtcacatactcaccattcaccaaacaanaaactcacatacanttatttatttcatgatntacaaaaataaggtccaagtaaccaacaagccttgcanatacccatcatcttcatatttatccctaatcaantacatttntaatggtgatatgaaatgggccattaatataatcacatctccatg

SEQ ID NO: 93126 - DNA, 142 bp, Glycine max
  unsure (1)..(142): unsure at all n locations
gggcatagtcagtcagtgagaacctgtgatgtacctaaacaggcgagctcctagcagtcaaccgattnaagaacaaagaccacaatacaatgaggcttgtatagtggctggccanctgtgaatcttgagtgatatatgggat

SEQ ID NO: 93127 - DNA, 457 bp, Glycine max
  unsure (1)..(457): unsure at all n locations
aacacaagtgntttaaagacttaagcataaggcttaagcataatatatttttggggcttaagtcggaaacttaagtgagcttagttntatattacatatntaaatatgattgtccaaatgtaacctaaatgtgattaactcgtcatatgagctaatatgagatttgttgaacaaaaaatgaactatactgaaatgtgtgaagctgatgntatgctattatcatctaattaaacttgcttatgaattaatatgagatgcatgaagttgttgtcatgctattactatgtcattaacttnttcttacaaactaatataagatgaatatgatatgttatgttgagtaactatatgtacatgaggacttatanacactaatatgtngaagtgctgatacatgtatgtcttaattatttgtagtagaatgctcataatatgttatcggtaatgcttgagtatg

SEQ ID NO: 93128 - DNA, 416 bp, Glycine max
  unsure (1)..(416): unsure at all n locations
tttccacatccacanagcgcgcataaacccaccatccnctgttgcccacctccaactgagctcacgtactcccacgtagcccatatcctcgtttctctcaacaccgggtccccatcaatcctcccaagcttgctcaacatcaaagtaatacaacattcacacagcacaagctatcacagccaagcaaaacatggcagaagcagagaactctgcccataacaccaaccataatcacagctnttcacatacaaatacnccagaaacatatccttcgttccaattcgttaacgcgttggatcgactcgaaaaatttactggaagtctctagtacttaagcctacattgtgaccggtgggatctactagcaaacatncaanactcattcagcactactcttttcacagccaatcacacac

SEQ ID NO: 93129 - DNA, 296 bp, Glycine max
  unsure (1)..(296): unsure at all n locations
agatatatgctcttaccctctcactccactagatatggcatacttctaagggctacgtgacaactgtaattaagatgacctctaagcccaattgattgtnngtttttgtgaaaggtcanaaagattactttatctagcatacttctgcataactaaataattacatcaacttatatttattacacaatgtgacgttacatttatgaagtgatttgcagagagaataataatacctatgaaggacatggaatggtcaaacaaatgagtatgcacattatagccaacatcacatgaaa

SEQ ID NO: 93130 - DNA, 274 bp, Glycine max
  unsure (1)..(274): unsure at all n locations
cttctaggcggatctcatctaactcacttagttgcaactttctttcctcaccagcttgatccataaagaagttgcaggtcttcacttgccagcatgctctgtgctcaatctccactggaagatgacatgcctcttccaagaacaacgccgataggagacatncatatgggtgctttgtaggcagtactatgtgccaaagagcatcatctagcctgggactccaatctttcctgcttggtacacaatcttctctaaaattctcttgatctcctta

SEQ ID NO: 93131 - DNA, 240 bp, Glycine max
gctgtagcagtaaacatgaataagataatgacacccacatttgagcatataaaatattagcatccagctgctcgaaaacgttattttaagaaattgtaataattggctatacattggtatctatagaaatatattgtatgagttacgatacaaggagaaatgagagttagataagatagttaaactattaatggagtacgttagtagagaggtgtcatttatatatatatatatatatat

SEQ ID NO: 93132 - DNA, 417 bp, Glycine max
  unsure (1)..(417): unsure at all n locations
aacagttagntggcagcttaccaagtgattctattaagatctcaacgtgcttagctagcaacttgtttngtgccaacaaagcatcgtgtgatgttagcttcaatacgctcttctttgtggatagatgggttctgtccctcagaatagcatgatcattggctgacatgttctctacgagctcaagtgcttcttctggggtttcagctttatatttccncatagaacatctattattgcttggttgtggctcggccatctataccatactcntnggattgctcggagaatcatggatggagtcttctcataagctctgatctctcaatgcgcactcaagatcattnggaatgagaaagaaatattgtgcttccttcacagctaatttgggaaattcttagaatttcacacttcttcagt

SEQ ID NO: 93133 - DNA, 215 bp, Glycine max
  unsure (1)..(215): unsure at all n locations
catgaagaacaggctagcacaccttgcttctntgagcacctagagactggcgctctaccaatcataaaaacataccctggtgngctattttgatcactcttgtcatcacactcattagaggctgaatatccaaacaatcttgcctttgatacctctcatcattaggaaacattatgccacacattaaagttcttttacataccttacaattcttt

SEQ ID NO: 93134 - DNA, 452 bp, Glycine max
  unsure (1)..(452): unsure at all n locations
ngcttctatataaggtgaaccattctattaattaactctatgttgactntattcagaagattatgagttatctcttttatcttagtgagagtgattctcctataatcttgagtgattcaagaacaccctggctgtccaaggactttccaacctttgtgtgtgcctcactaaaagaggaatatttcttccttcatctcacccttgtttttcaatcacaattcagagatccactctgccaaattattcgtggctaactccatttaccactcaattagtgatctgacctaattgacttaaacagacttcactcgttgaatacctattggacctgtactcgtatgcattcttttttgtcagcccatacctctttacatcctatcatttgcagacacttataacacaataccactattcatctcttatatcgattcatagtatcaacactatagctg

SEQ ID NO: 93135 - DNA, 355 bp, Glycine max
  unsure (1)..(355): unsure at all n locations
atccttgagtcacctgcggcatgcaagctntctgatgcatatatcctacttgagcgagngagttccatgttgcgtgcatntattgtagtgttttgtgcatacggttttcatactgaatagtaacactgattnttttcatagccgagggataggtcagcttcctccaaccgttatactacataaaaaaactggttcttatacatatgaaccgtaagaactggcgtcggaggtgctctcaacctcatttaacctctattattcaatctttgggtgctgagaanttaatgaatctgatgtccgttttactcgtgagacagccttgagagaactcttcttccattacatggaagcatgg

SEQ ID NO: 93136 - DNA, 431 bp, Glycine max
  unsure (1)..(431): unsure at all n locations
gagctctctggtggataaagcacataatggcatatccaaactactggttttactcgacacatcattgtcaactgaaataaactccagatatacactngcgaccccatctgctagagaaatcactaaatcttctaanatggaaattccatgcacagaaaatatacgcgaatcataatagcaaccctccctgataatagatggatgactggtgagtctcttagatcatagaattacttctaagagagggaggaaacattcaaattggtccttcaaattacacatgaccatagtagcctgccaaagagttttatttcaaattagtccctccctctaagttagaaaacagacaccatatatgccttttgagtcccactttctccaccatagacaaattggtatgtttaaatctaagggactagttggatataatc

SEQ ID NO: 93137 - DNA, 457 bp, Glycine max
  unsure (1)..(457): unsure at all n locations
agctgggaattcaattaanataatgttntattgcattatgtgaataacattntaaaaaatctttaanaaaatgttttacaactttttttttttcagtaaactcctttataatggataaaatattgagttccgttccgggtattganttttctaagataaatcacatatttgcaacagaaaatgatgcacacatatgacataccaacatgcctagtctgagttccgttccgggttattattgcctctcagctcccaatcactattgcagacaagttggacagctagacaacaaactcatgatctagcaaaaagaaagtcttgcaagcggtgagctacgttagccactgagcatacattgngaactngngcaattggctttgaatcaaatacgttatttggtataatataacaanatactctctttcactgactatataagtaaagcaattctgacaac

SEQ ID NO: 93138 - DNA, 527 bp, Glycine max
  unsure (1)..(527): unsure at all n locations
aagcaccgcggctgcagctgtatngatccaggaacanataattaaattctatatgataatgannattggttgggtgggaggcacttttgggccanaaaccaaaggtgggagaaactgctcaagaggttctttatgtggtctactgataccataaatatctaatgattnntatgtgttggcttttattaccgaagtagtaaatatgttttggtatcaaagatcaaaggataagatctttacctgatttgttntctagtctacttggtcctttgacactgtaaatcaaaatcttgcactaattaacttttcaagggtggttatnttaaaaattctagcagaagataaacgaacatactataatctcntagtntagnttctcctttgcattctgngagaagctaggtcgaaattttgtgtagtaactaaagatcctataccatgtcagatcaacttacagtctggtctgcaataaactatgtcacaactttgcatcttcgtcactctttgccaagtctacttacaacact

SEQ ID NO: 93139 - DNA, 440 bp, Glycine max
ctgaggcgtgcaagctcggttctactgttccaataaggaatcttcatatttgttctgcctattatctctaaggcacatgtaaactattgcatctatgcccatatcaattaagggcttgatggctacttggacacaaccgatatgtaaatacttgtatttacggctatgttcataaatatgaatttttgaaagcaaatgaaattctttccctatgtcttgccctagaggaatattattttctattgtctgattatataatcaaaactatatctgtctttaattgttcaggaatgacaacgtatccgagggattttgggatgtccagtatccatgtttgatgatgtcttcaatcggacttctataaaaagatgtgtttgcgcgacctatggttggcttatgctattgacaaatgtgttttggtgacatcttgaagagagatg

SEQ ID NO: 93140 - DNA, 310 bp, Glycine max
  unsure (1)..(310): unsure at all n locations
gaagctagagcttatctacacacacctctctaatagctaagctcacctncttgagatgagatgctagagcttagctacacacctnctataataactaagctcacccctatgccaaaaaaaaaacatgataatacaaaannaagttcttactacaaagtgtcataccctaatttcatccggggacctttgcttggtggcatgcaaccttcatttgaccattttgagggtacttgcacccatcgttaggcaatttgtgacatgccagaactcagaaggaaagcatcgtgcacaattcgtgaggttctgtaac

SEQ ID NO: 93141 - DNA, 392 bp, Glycine max
  unsure (1)..(392): unsure at all n locations
agcttcaccanaagttntaggacannaaatcattaattcattgtgtttcggttaattcaagttaggggtattatatgtaattaaatttaaacttttaaataaataaaaaattaaatgtactcatgtattactcggttcttcctcttcaataatctctcaccttgaagntagtgatctatttacaaaacctcaacattggtatgttcttctttcttctgaatggtgtaacattntcatccgatgaattttgtcctaaaagagatgacataagagagagaaatgagtaataagtgagtgtattaatttttatttattaaaaagtaaactttaattactatataccctatcttgaataattaaatgcaagaatgaatgacttttgcctaattttg

SEQ ID NO: 93142 - DNA, 441 bp, Glycine max
  unsure (1)..(441): unsure at all n locations
tcgaccggatccttaagcacctgcggctgcagctattaaatgaaaggaattanaattaatagtttgagaagtgaccacggaagagaatntcaaaatgactctgaattgttntgtgaacaaaatggcattaatcgtaacttttccgctccaagaacaccacaacaaaatgggattgtggtgaggaaaaaaaagtcccttgaggaacttgttagtgtttagctctactgagctttaaaagattggctaagaatttgttaaaacataagcacttagacaatgaaggaaagctggagttgctgcacatgatgtccaacgctatgtcaaggaataagatcgggctgcacaatgcacaaggcaagataaaatgtcaaatgaagaattgaagttgcaggatccacgatgtcggatacaatgtcctgacatcctgcccgagaatactgg

SEQ ID NO: 93143 - DNA, 314 bp, Glycine max
  unsure (1)..(314): unsure at all n locations
agctntagcaactctntctttntgtntagtcataacttctaatgctcttaatctttcctcatccanatcaactaactcatccgacatcatattccaataatggtcgattggaatgtccatttgtttttgaccctggctgattgcanatgtatttcgaccggaagtacaacatcgtgcccataagtcagtcgaaatggggtagtattagttgattccttatgagaatntctacatgcccataaaaattgatctaacgtttattccaatttctcggctttgngcaatgtgtttttaatcaagttgatacaatctta

SEQ ID NO: 93144 - DNA, 463 bp, Glycine max
  unsure (1)..(463): unsure at all n locations
gctaatgacgtcctcgtatgcctntctcaaccatgtatatttgtgttatctatataacanaacagaagaacannaaatccattattaaattcatgcagcagntgtgggttagttgctgaaaaggctttaaaccgtgccaaaaatccaaatatcaaattcttatttttttataataaatatccaattctattaatttcactgatgtgattaaagacttatctttttcggctgcaaagctgaactatctagtggtgttaaatggacacgtacgttgtcattataaaattggtaagaaacatactttccactgtcctntatcttattatctcataaaattccaaaacttttgctctcacaattcactcgttattntccccttgcttgtatgaatttaacaattgttgacaattcataaagcataaaccacaagcaaaccaatttggtagtgaaacttatcatctta

SEQ ID NO: 93145 - DNA, 415 bp, Glycine max
  unsure (1)..(415): unsure at all n locations
atcctcagagacacctgcggcatgcaagcttctcaaggaagctacctagtctataaatagaatcttgtgtaacacttgtggtaactntgatgaatgagagtcttgtgagacacaactcatagntcaacttctctccctttttcttccttcaatatcgggcatccacctctctctttctctccctctatctnttcctccattgaagcatcctctccaagcttcttatccaaggctcatcatggtggtgaagctccttctctcatggcttatctcctaatggatggcgcctcctctcacctcttctcctttggtcttcgctgcatctccatggtggacaataccattaaggacctcatgaagctaaagatcagcctcatagaagctcacaagcagcttcatcactacactcacattc

SEQ ID NO: 93146 - DNA, 455 bp, Glycine max
  unsure (1)..(455): unsure at all n locations
agcttactntatctataganactggataccttgacatttatcttacgacagcaatttcacgcacactctagaaggaaaataagtcgatctttctaactcgcaacataaaaggattagccaaaaggaggttatccncattttaccatgtctaatatcaagttngttcaattaanataaaaattttaaaattaattttttaattatttagcaattntaaattgagttcttaattaaattattnnntttaatgagttcttgaactttataattgttctttaattgaatccatgccattaacaataagggatctaataaaaaataaatatcatgttatgtcccaattaaaaaaaattattggtcanggcctaatataaaanatgtcaacctctgcatgttagcattatgaatattgcaagctagtattctcctcttttgtangtaatatttatcaagtt

SEQ ID NO: 93147 - DNA, 425 bp, Glycine max
  unsure (1)..(425): unsure at all n locations
agcttcctcgnggccattcctgcgaaggcaaacatttgtacagttagtttacaagaaatataacaatcattacaaacaagggccaaacaacacttctcatggcacgagtgtcaacatgcactntataaaataatcatatttgggtcgtgctattntatgacacatacgtatttgcacacataaaaantttgtatgaagcattttacgacacctatccatgtacatattttgacaaaccttntcatgctacatcctatatatatacacatttgttggaaggctgtcttttgtacctactcacaaatacacatattttgaaaaacactgttacgctacccatccaacactgtgtaaggcacttcatgctatatatattcatattatgcaagggcatttattcaactttctgcaaggcatttattaac

SEQ ID NO: 93148 - DNA, 401 bp, Glycine max
  unsure (1)..(401): unsure at all n locations
atgattaaacctagatgagtcatgagcatattactttgaaaagaaataatntaatttctggttgacatctttgagctaggccacttgtaagctnggtataggttgccactacaataagtctttccaaaaaaacacanttcaattggtttctaaaatgagatcaaatcccaatgaagatctaatttgtatcaagtgttntgtgtgctaaaccaagaataaagaatgattgaattaggctaaacanacagactttatttgagctcaatatttaaagactataagtcatacatttcgttaattagttcaacctggtttaggaattgatgtgaattacaagttataatgagttagaccaanaatgtcanattcaattggatcttcntaaatgaatcttaagctcg

SEQ ID NO: 93149 - DNA, 412 bp, Glycine max
  unsure (1)..(412): unsure at all n locations
agcttcagctttgtcctcaaagcttcatgtatactcttccataatcgcgaagngaacctcggatccctgtcagatacaatactagaaggaattccatgcaaccttactacttccttgatgtacaactccactaacttttccattctatacttcatattcactggaataaaatgagcagatttggtgagtcgatctactatgacccacacggcatcatgcccacgactagtcttgggtaaactagatacaaaatccatagatatgctcttccatttncattccggaatctgcaatggcttcaattctnctgatggtcgctggtgctcaacctttagcctttgacatgtcaaacatcttgctacatattcagctacatctttctttatgccatgccaccgaaaacttctcttca

SEQ ID NO: 93150 - DNA, 399 bp, Glycine max
  unsure (1)..(399): unsure at all n locations
agctngctccanagcacaatggttgcttacaggtaatgtatggaggtcaagaggttctgaaagtaggaaccaaaacataagatcacctagtgaggtaaaagcgtcaagcaaatgacgttaaagaagcgctttctaagaggcaacccacgtttaaattctactanttttattttttttgttttatgcatttaaatcatttggaacttgctatatagtctatacataggagtatatcatccaatctttgaatgcttaacataagggtttcaatttcatggaaaaaaggactgaaaaataacttagaanaatattttttgaaaaaaaatagtcctttcgcttagcgcaagcctcgcactaagcgcatctctggtcatgtgttaatctacgagtctcaagcgc

SEQ ID NO: 93151 - DNA, 373 bp, Glycine max
  unsure (1)..(373): unsure at all n locations
agcttgtatagttcccccaattatggttattttggtgtnatatttttaaataaatattggtttatggttaatgttgnctctagaatatttccattggatttaatgatgaaatctgtgcattctcaggtgaaaaagaggctatgttntgaatcgcanaaagtagcagctgggctaagctcaacagtttggctaagcgcataaccaccactaagcgcaacttcagtgcgcttagcgcagaggaaaatctgacagagcatcagcatcatagtcgcgctttgcgtgagatgaatgtgctaagcgcagcaagtgccttcaaccaggctaagctcgagactggcgctaagcccaatttcacttactcgtgctaaacgcg

SEQ ID NO: 93152 - DNA, 100 bp, Glycine max
aaaggcgcggaggaaatgaggagggaggggaagaataggaagaaaaaaatggaggaacagaagtgaagagaggagaaagagaagagaggggcaaaaaggg

SEQ ID NO: 93153 - DNA, 395 bp, Glycine max
  unsure (1)..(395): unsure at all n locations
gatgaacatanaacgaggattatattatacatctaatactactaaataatagaaaaaatgagaataaagcaaagttcatatagttacccgagaaatatctagcttgatatcaagaaaataatgttaatacaaaataaaanaaatatcaataaatattttacgaaagagaaaagatatctgtggagattacagttatttacttctatacttntccccgtgttttcattttgtgcttccaagctagagaagaaaaacattntctccccaagntntttcccctgcagtcgtgagtttatccaaataaatcaaagttcttggtcgtcttctgattcacctctcacacaatcttctttgtnatataaaatatgatagagaccacaaacaaactttcccat

SEQ ID NO: 93154 - DNA, 480 bp, Glycine max
  unsure (1)..(480): unsure at all n locations
acacttcttgcagagggcccctcaccaatccggatgggcattgctgctntatcccaagctctgctgttgcctgcttgatcattctcatgcacagnatttggtgatcttccatcagcagaactacccncaaaagccctccttgaggacatctggccatttctagaagcaccatatccagaatgatcccacccctcagacatgtcagatctccaagatggccctcttccnctcattcccaaagaatttccatcagattgggcaaatctttcgccaaatgggatgcgtccatcaccgcctctaccatacttggaactggagtagtcgttaaaaccattatacttgctagaaggcctattagatgacccttcataccctgcaaagtttctacgacctgatgatatggataaatctcgtgacatgtcttcaacaattctctcaagacctcgcactctggtctctagagtcaccatgctatcatga

SEQ ID NO: 93155 - DNA, 512 bp, Glycine max
  unsure (1)..(512): unsure at all n locations
tcttaagtcacctgccgcatgcaagctngacanatcaatgactcattcaagagggcctcctacaattagaatacaaggccaaccatgtcataggataggaagtctattaccaatgcctggaaaataacctanatntgcacaattatatatctttgaaacataaaatgaagttcanaataaaattaatactatgaggtaggtaacaacacaacatcaatagaacatgtctcatttacactgatctttattataacttctacattgatgtcctctaaattaattattcatttgaatatctatttttccagccaccataatgaaatngaagcacacattgtttcacgtttgggtcaaatgctggatgaaaacaatgtccatgcaaagagttcaggatgacaagagaaagaatgacagatagtcaagtgcataatgtcatgctgaaattgatcgctggtcgagaaaaagatggacgtacatataatgtnaccaactgttcagaaagtgttgactta

SEQ ID NO: 93156 - DNA, 490 bp, Glycine max
  unsure (1)..(490): unsure at all n locations
agtcacctgcggcatgcaagcttcaccggatgatgccgatcgaacatttcctaatctacattatccaactgntattcanggatggaatagaataaacaatggccggtgtcggtcgttatatggccccgactgatatctttcagccgacattgcgcaatttcttttacaaacgctggccgataatgttcttttatttacggtagaggaaatcttttgttttggtgttgcctaaaaaatttacaacgtacgacagctagggttttccgtgcgagctcaaccgaggtgtcgttccgatcgacactggcatgttgctcttctcatttaagaggataagataacgttcgcccaccccggcaaaaacaacaaaatataatatatatttatggatattgatcgaataaaatgatagcggacgtctgatgtacagatgaccgatcgatgtctaataaagaagcatcaccggatcacgccgatcaaactatttctaatc

SEQ ID NO: 93157 - DNA, 487 bp, Glycine max
  unsure (1)..(487): unsure at all n locations
gctcgataatcgattattggtattggtaattgattaattcatatatttttggctaaatatcaatacaaaatggtttttgtgctagtgttntcgtcttgtaattgattaacccaaatggtaatcgattagactatcaaaaacatgctttgcttccagaaacttatgaatcaagtgatcatgatgattatccttaagcatgtagaaggtatataaactactntaagcacacacatgcctatctagaacaatcaatacaaccncacatctattaaatgtgttttggcatgtaaatatcaaaatcaaacctaaactaatagataccaaattcttcgatctacaaatctcacctttttggttntgatatgtcaaaccaatcctcaagcataaacnaattccatatcncattattgcaatggtctttgtctaaagctactanacacttacaaaagagtagtacatcattctcaaatagaaatgtccaataaaa

SEQ ID NO: 93158 - DNA, 228 bp, Glycine max
  unsure (1)..(228): unsure at all n locations
agtcacctgccgctgcagcttggtctntgtcttaattattatacattatctttcttcatctgntcctggtctctacgcagtctcattcatatgcatgtatacttctgtctctaaaacggtagattctatgacgagtccctcgatagtactaattcctgtgacccgtctatcaacttctagcaaaatatgaatcatactgtagaagaacgagatgatgatgtgggactt

SEQ ID NO: 93159 - DNA, 364 bp, Glycine max
  unsure (1)..(364): unsure at all n locations
atcaagactccatgttgcagctgtcgacccttaacaaatgctgactgtctttcatcaacaagatgatccagaaccttactatcctattagataggatgttggcaatatctttgtaacacatcctatgagagatatatgtctgaagtgacttatagtttgaggatccttgatcttagaataagagcaatgaatgaagaattgaggcccttangaacagcagcattcacatgaaattctgctagaaatcttaagaaatcaggtttcagctctttccataactgcttgatacatctaaaatacagtccatcatgcccttgtgctttgcattagcacttgcccacacaacagaatatatatccttctc

SEQ ID NO: 93160 - DNA, 447 bp, Glycine max
  unsure (1)..(447): unsure at all n locations
agcttatctatcctcaagtcacgcgtgacctcatgaatgtaattccacatctggngatgaggccacgtggacacatgatgctccaagtaacagactacaggctatatctctctcattgggccgagctcgatacataatactactggatacanggaacagntagccagagaaacatagttacaagttaagtaaattaagaagacattaatggcttctcttgcaaccttagctgctgttaaccagctgactcaatggccttgctggaagttccctctctggaactaagctctctttcaagccctctcgccacactgtcgaatccaagaacatcaggttccatgcatttccataagattttaatattaatatatatatacacgcacgatgaggggtagaatatactcgtataacttaaacaattagtatatcaacttataatttgatata

SEQ ID NO: 93161 - DNA, 414 bp, Glycine max
  unsure (1)..(414): unsure at all n locations
gagttctacactactctagagttctttaagacgttctanaacatctacacttgtctagaaagctctataatatctagaacctctctaattgaggacggattccaacacaatgaaacacaataagagtgtacatcttttattatgtacccctcntgtgattgacacaaatataattaagcttaagggttggcaatgacttctcccaatatgaagtcattctcattcagaaaaaactgatggtcttgcctcacaattatgctaagtgggatgaactggagagggtccattgatcgagagattaattacaatcatgctacccattctcttcacaaaaaattaaatgggcacgagacttggaatttcctgttgaatgacgtgggagggtcagtaagagtaagattggatggctttatt

SEQ ID NO: 93162 - DNA, 332 bp, Glycine max
  unsure (1)..(332): unsure at all n locations
agctttgcaagctggcattatttattctatctcttctaccaatgggtgagtcccgtctaggtagtcccgaagaaaaccggcctcaccgtgataaaaaatgagaaggaggagttgattcctacacgggtgcagaaacagtggagagtctgcattgactataggaggctgaaccaggttaccaaaaaggaccattttcccctgccattcattgaccagatgcttgaatgcctggcaggtaaatctcactactggttncttaataggttttctggttatatgcaaatcactattgctcctgaggattangaaaagaccacattcacctgtccctt

SEQ ID NO: 93163 - DNA, 360 bp, Glycine max
  unsure (1)..(360): unsure at all n locations
agcttagttgaggagttgacaagaattccttcatcggtagacactaaaagcttaacaattntaggatgatgagaatgattctcttggataggttcaagttcttcatatataggacatatagtctcaaaattatgataactattangtgggagaacctagatactataagattataatcatcatcatacaatgtctattgtaagatattgtattatttatcatgtcatgtgcaatttggtgatgatgcctcaatctaaacaaaaaaggaaatttcagtttagtcgtgtattgtattgaatagttattaagcacaagcatctgaggaagtctctgntctcatgcttacnctctgtgtgacat

SEQ ID NO: 93164 - DNA, 494 bp, Glycine max
  unsure (1)..(494): unsure at all n locations
tcagagtcacctgaggcatgcaagcttctatanattttcatcatcttaatcagcaatctctttatctaagttcatttaagagatgcaataatntaagggggaaaatgaaatgttcctttccaatgtngaaactttcacgaacttaaanaagaaaaaaagagagagaagaagtttaacaggtgctgaccattagcacgaacagctcatattggcaaatcctncaatagtgatttctcattcaaaattttttcatataataataattaaagtacgtagtgttatggtgacaaagaaactaaatatataaaggtttatatattctatatatggtgaaatggatgtggtccttatatagtacaattatacaatgattnggattgatcactgatggacctgcatgcgtccaatgaatccaatntccggttaattaatagaatgagaagtaaagggggaagaaactgatctgcctttacggtacaatcagctggcttatg

SEQ ID NO: 93165 - DNA, 191 bp, Glycine max
ctattaggtgcaattcttttgttaactaagctacaggtggagagaatgattctggaagtcaagtcctatttagacattgccaaatacgaaacatatggggagacaatactttatatatccctcaacagtcaagacgaaagttattatatgatgtccattgcggcagcctatctaaaaaaaaaatcctcact

SEQ ID NO: 93166 - DNA, 387 bp, Glycine max
  unsure (1)..(387): unsure at all n locations
ctggtatccaaccaagcctaaatagttcgattgaacacctgtacgacaagacaggatctgtggattcaagtaaaatgaccatatnntcgtcacttcttcttcattgtncggatcgacagcaggaaaatcatcagtgaaccaggctgggccgacctctcgactaatgaatggagcatgtcggggaagaaacttgtcaaagctcagaaaaatcttcatgtactnganngaacagctttgtggattttgatcgaaggtcttgggtggtaatcgaagtgctctctggccttcgatcgagcgaatggcaacttcttcagcataatcttgtgggattattaatcccatttcttgttcgaaaagtggcgtaagccacaactggagaagccacat

SEQ ID NO: 93167 - DNA, 318 bp, Glycine max
  unsure (1)..(318): unsure at all n locations
agcttcctactcgagaatgtcttganatgctggttatttctctaccatatacttgatctgaaatttctacttaaatgtatgtctttatgaaaattngttanggtgttaattacaaggattaagcaatatataatttaagtgcaaggttctaaggccagagtattattttgaaacaataattgttttctcaggactaccttttaaatagtgtagtaccctatacctagcctatagatgaaatagtcagaaattatgcatataatggctaatctcacactgatcagtgtactatatctggctttatatgagcaagatatc

SEQ ID NO: 93168 - DNA, 339 bp, Glycine max
  unsure (1)..(339): unsure at all n locations
ttagataggactttataaagagaccaacaagtggtttatatagtgtttggaagaacaaaagtgatgtgttcaaaattaaagggatacaaaatataatttttttggaagactaaaaccgaacattgcannatttagagagagtaaaaatatatcttaccctattntnttctatnggatatatttatttccttttatatgcatatatttattttatttcatttctctttattttctatcaaacaatctgagtcatctcactttccatttattttctatgtgtgttacctttctttccttttccttttctattccttttctgtgctagactaaacatacaat

SEQ ID NO: 93169 - DNA, 233 bp, Glycine max
gcaagcttgtcaatatcctttttcatatgctgttgttttcatgtgagaccacaacacaacttttccaagttagaaatcttttattatcctcagtggctgtgcatgtgaacacggttcaatagtagcatatgatgagatttctctgttaacttgagagagcgtctcaataaatatatgttcatgatgatcgcattgcatgctgtcaaaatgtcaataatggttctgatgcttct

SEQ ID NO: 93170 - DNA, 406 bp, Glycine max
  unsure (1)..(406): unsure at all n locations
tattattggattctgtcgcgtgatatcctaaaatacnttttttaatataaaatacacctcatggctaagtttgtgaggaactgtaatttgttagaaacttagaattcatatatgaacatgtatttttacttntaaaaaaaatcagtactgtatccgctacacctagtcttgagttgtacacatgcacaaagtctatgtgcaanaccgttctagagttgtatacatgcttaaattaaactctataatacaatgaaattacatttcaccaagaatgctagagtagagataaaaccaacataaattgcacaacattggccatcaaagacacagttgcatacatgaccatgtcatcgatataatattaattattctcatattctcactccaccatatatatatatatata

SEQ ID NO: 93171 - DNA, 376 bp, Glycine max
  unsure (1)..(376): unsure at all n locations
agctngaccaatcncgacccaacccgggcatagtcagtcagtgagaacctgtgatgtacctaaacaggcgagctcttggcagtcaaccgatnaaagaacanagaccacanagcaaggaggcttgtgtggtggcttgccaactatggatcttgagtgagaatttgaatatggcctctggtaatcgnataccaagggtgggtaatcgattacaaggcttanaagtgaagatagaaagctaagatggcctctggtaatcgnataccaagggagtgtaatcgattaccaggcttaaaaatgggatcaggaagtcgagatggctttctggtaatcgatagcaaggggtgtaatcgattcccaggcttagaaatggagacat

SEQ ID NO: 93172 - DNA, 371 bp, Glycine max
  unsure (1)..(371): unsure at all n locations
agcttcatttggggcanatcacacagatcatccagtctagcacctcttggttggggttcccggcgttgatcacaatgttgtgtgatgcttanggggtgcgttctgacaccctgacctttgagtcactaagccctgtcacccnctgccttccgccgncagtcaccattcacctcagtcccgatggacccgcatactttgatgcttcattccatctactanggtcagtaggttatgttggatcgagtggcctcaaaataattaagaaggggggattgaattaattattcctaaacatttattgattaanaaattactcttctaaggcnntttactaaatgttaagagaatggggagtagaagagaaaactaac

SEQ ID NO: 93173 - DNA, 400 bp, Glycine max
  unsure (1)..(400): unsure at all n locations
ctgatcagcactcactctaacacacaagcaaccaccagctacctctctctcaacagcaaccaccagctacctctctctcaacagcaaccaccttctttttcaccttcaacacacaanatttacaagcaaccgtgaactggangcctcctttcaaccaccttcttttaaatcccactgaagctgaaaacgccaacatcactggcgcctccctctcacccaaatcgccacccgaggtggcgccttccagctacgaccgcagagctgcaggtgctgcagctacgtttgcagaagtgcangtgctgaagtcgctggcaaaccagcgcttcatgcacctctggatgcgccaatangacctgcgatatgcagtcctttgtcgccagtcacagtggcgacatgccac

SEQ ID NO: 93174 - DNA, 496 bp, Glycine max
  unsure (1)..(496): unsure at all n locations
acctcagagtcacctgcggcatgcaagctngtngctcgtgtgctgaagtgtgtggggatcatgttgtgtgttctatggaacatgatatttataggagtggagcgtagctgcgggttcttattagtaacggttgttataatctctgcagaatttcagcttatagataattatcggcagcttgtagataatgttagagataaagtatatcttatagataaaagctagaagataattataccttgtagataatgtgtggctgtgcagataattaattatctgccaaatagataaagatattacaatatatttaaatattaatagggtagagataacctgtcagtcacggagcccgactgttaagggccgagtgtccgcgctcctattgcanggctgacatggagggttgacacatgtctcacagtgccatgtaaggtgccacatgcattttatggaccctgaccctggacagtacatacgtctcccacagctctgatct

SEQ ID NO: 93175 - DNA, 498 bp, Glycine max
  unsure (1)..(498): unsure at all n locations
agctnggtgaggaagccatgaggatgctcttctggtcaccacanaaagtcccaggaatgtccagaagtaaatgttcactaagtgtnttctcatttaaggaataattctttntgttcgatgctcattatgtgacaatgtcaatgcttaaatctgaccatctagcgctaagtgtggatacaccaatgctaagcatggtaatcgaattctacttgggtccttnttggagtgctggtgctaagtgcccaaaaacccacacttgatgtggcacaagaaatttttggtgataccatttgccttcgtgttgtgatagagtggcatttanggcctaagagctagcgctaaatgcanaanactcagcanagaacanagtctntggacgtttggcgctaagtgtgaaagaacccatactatntagcgccattatctttgatntttcttctntaactnaacactacctttacttgcttcttcaaatctctttcttatctacaaacacat

SEQ ID NO: 93176 - DNA, 400 bp, Glycine max
  unsure (1)..(400): unsure at all n locations
agctntangctgcttagcatgaacccaattcattacagcatccttcggccgatcctttcggatctatacttggttggtagtaactnntttggtgttgaaatcaaatttcctcttccattgtgtcataaaatcattattatgtctatttatcatcatcaggcttctaaaagacaaaagtctgagccttcaactacctagcaggaatgatatatacactttgcattttgctgtttggatgctaacataatcatgaaatcggaattcattacgtttaaattaatgatggagataaaggctcanacttaattgataaatatgattcttaattatctttcagttttttttaacaaaaataaaaaaggaagtggaacaccatatcagccanatcagatacgagaat

SEQ ID NO: 93177 - DNA, 434 bp, Glycine max
  unsure (1)..(434): unsure at all n locations
atcctctgagtcacctgangctgcagcttggaccaggttaccaaagggtatttatcttctagcacttataanatcgtaatggatataaatattctaactcatttgattactacaacagataattccatcaatgaataatttaatagctaattgtgcaaaaagaacattcttgacattaacatggcagcttcaatcatacatatccagtctcaagtcttattgatcatgtggtgaagcaataggtataatgagcatgaatntgtaagttcaataaaagaacatgtttggtcttaccaataatgttgaaaaccacgtttacgggtggctcacagtatcattgatgcagtagcaatgttgtagagggtgagggatagcttgattgattctcgtatagctaatggtgatcattcacatatgaatgaaaggtaaatata

SEQ ID NO: 93178 - DNA, 538 bp, Glycine max
  unsure (1)..(538): unsure at all n locations
agctntcctctagtttagaactacaatatgattttggttttatccaactntatatttgaattaataatcaataatttaaaagttaaacacacttgttctactgccaaattttagattacttccaaccacgggaagggaaacctgccctttaggagctacgtttggaatttcatattattatctccatgtatctgggattggcgatgatctaattcttgagaagtggtgagtcctccttgttaaaatgactggttaaaatctatcgctgacatacatgcttcaatgaaatcttgcattctgcattagtaggtatactgcaaaagtaagtttgctcatgtaattatgaagctnttgtatcattggtgttgcattgaaaaatctgtccgttcatggngagtgactggtattccaactattcttttctttnnnttgtgaatgctgcanaatcaatngttgattacctgatattcgatctgcacagattgttgctgaattctactatatttcttattatcttgcatggtgagaagatataagg

SEQ ID NO: 93179 - DNA, 422 bp, Glycine max
atctctgagtacacctgcggcatgcaacgcttgcacaatttgtttttctcacactttattttttgtaataccatatacatatgtctttcctaatcagatcatatatatgatgcatgttaatgtgtgcagtcctacaatgtcacaatcctaaataatctattgtaatcaccaagcaacttagctcatgaaaagatgcatgatcaacattcaacatatagatattacctattctcttaccaaggtggacaactttaccagatatggcttcacttataagacaacaatgtttgttgatatcgaacttgacacacttatcacaaagttgactaatgcataggagattatgctctagtccatccacatatatcacattcattaattaagttgctgcgttgaattcctatatttccttcctccattac

SEQ ID NO: 93180 - DNA, 388 bp, Glycine max
  unsure (1)..(388): unsure at all n locations
agcttttatccaggctcatctnggtggtgaagcttcttcttccatggcttattccctagtggatggcgcctcctctcacctcttctcctttgtcttctgctgaatctccatggtggaaaatcaccattgaaggacctcattgaagctccaagatccagcctccatagaagccccacaagaaagcttccatcacgcgacgagtntaaaataatttgaanataattgagtagttgtgtgtattgcatagttcatangtaaagtctgtgtntgtgccatgtatatattaataatgtgtgatgtgtatatgattcacgaggtgtgataacatgttactttgngattataacatcgtgattaagaatgtgtgtatgtgaataagtaagtatgt

SEQ ID NO: 93181 - DNA, 391 bp, Glycine max
  unsure (1)..(391): unsure at all n locations
agcttgtggaaggtgaactntcanaatgctggagaactaaataataannaataaaatgcattctacatcggttctaaaaggaccgatgtaaaatgctaattctacatcgactatcctataatcgatgtagaatgttcaacattctaagacggtcgttcgcaaccgtagtagaaaantatttttctttntacgtcgtaactcgaatacccggtgcagaaagccttatttgtgggagtggttgtaactatcatggcttgcttagcgcccannagttcttcttgacaanaaaagggataaggaggttgcacgcattttggtttaataatataattcttgtaaacaagaagatgcaaatgtttgtctacttgaaggtgatccttcacagatgcga

SEQ ID NO: 93182 - DNA, 350 bp, Glycine max
  unsure (1)..(350): unsure at all n locations
agcttctaaggaagctacctagtctatatatataagcatgtgtaacactcggtgtaactntgatgaatgagagtcttgtgagacacaactcataattcaacttctctccctttttcttccttcaatatcgtgctcccnccccncccccccgcctctttctttctctccctctatcttttcctccattgaagcatcctctccaagcttcttatccaaggctcatattggtggtgaagctccttcttccatggcttattccctagaggatggcgcctcctctcacctcttctcctttgtcttccgctgcatctccatggtggaaaatcaccattaaaggacctcattgaagc

SEQ ID NO: 93183 - DNA, 354 bp, Glycine max
  unsure (1)..(354): unsure at all n locations
agctngaggctaggcccatatgattcttttgtaatatgtangatcaggcatganacataccttggcgattatggcgtggatcatgatgagaagaatgagcacgagcttaatgaactgctgggctcgggactaacatgtgtggaggaggaggactngtgacgagacccacttgtctcatcatatctgccaaatataatgatcgacatacttttgtcaagtgttaacttgttcaagatgtatattccatatggttctagattcaagaaactttactcttacatattaaacacctatatgtacatatctctttcaatgagatcatagacaaacctgcactattacattgagtaatgt

SEQ ID NO: 93184 - DNA, 454 bp, Glycine max
  unsure (1)..(454): unsure at all n locations
acatttgtgaaagttggttttaccaagaaatgctacccttaaaacanaaatggcatacaaccncnctncaataaatacaaacatcaatgtgaatttagagcaagcttatgcgcatacttctttacgaacgttcacttgcacaagacattcttataactaagaaaaatgcacccatatacaatcaaggcagcttcgttacctagattatttacatgtacttccaaggtgtatttgttacctacatcacacacantttccttgctaaattcacatacatgcatactctaagcactntggctatcannaaatgcatacgtgcacatcttggtatttctaatacctatacatacacaaacttcatgatgaatcttgactatctacacaataaggtgctacatttcatgctntnttcaagtggttttactacctaaagccgcatgcaaattcaagtata

SEQ ID NO: 93185 - DNA, 360 bp, Glycine max
  unsure (1)..(360): unsure at all n locations
atgagaaggtgcatctacacctccattatctttgtctaatgcttacaaggcaatctccaatntcaacagccctaaagatcccatgttcgacactggatggatctgaaagaatcatattcttngttctatatagatatacacatgagggccctcaccaccaacgagctgagaaataaaaaatatctcacctctgaatccgcttgctatatatgtaacactaggaggaatcttaaaatctttgctcccatgtatttctagactaccatcacgcttggaacatgtggaagataagataatgcttactcctatgaaggaaatacctgatgggttttctatgtggagagatatatagtgtaaagg

SEQ ID NO: 93186 - DNA, 402 bp, Glycine max
  unsure (1)..(402): unsure at all n locations
gcaagcttagtagaaatattanactntgaggagtatgctatctacatatagtatttnttaacatactctgtctttcaaacacattntattattagttaaaatttattaaaaattacaaaataaaaagaataatttattaaataagatataaaactcacttagatgagctgataacatttctatcaacacttttgagcattcgaggaggactcttgttctctattggcaagagctaaagcacgagacttggaaggaagaagctcaaggtgtggccagctacagcagctatgaagattcccaaattgaaggacatgacagcaagcatgaccaagtaaagtaagcttatgcggaagacatagaaggttgctcgagccaaccctcctattataggattagtcccac

SEQ ID NO: 93187 - DNA, 498 bp, Glycine max
  unsure (1)..(498): unsure at all n locations
atctcaagtcaccgcggctgcagctttantannaaattataaattctctcacttgctcaattttcttaagaaacgaacatgtgaatcatagcgatagctcctcatacaacaactaatatcatctatgtattacgacatgtttaatttctcaagcagcatacttaatgtggcaataacacttaatgaataaactcaatgtttaatcttggtccaaaacacaaattctctcagataaatcaatgtgcaccataatatgagaaaatatcacaatataagagtttcaactctaacctgtatgtatacaattataaagtggaaccaagtctcattctctctacatgatccttgaattaaacagtggcatgcccttagtcagaggatcaatgatcatcaactcagtgcttatatgctcaatgaccaatttattgtctttaactttntctctaatggctaagtacttaatgtcgatgtcttacttaacttccacttttgtattct

SEQ ID NO: 93188 - DNA, 410 bp, Glycine max
  unsure (1)..(410): unsure at all n locations
ccgatcgaatacactataatgatagagatntagagggtgtacaagtataagactgtacaactgaggatgacttaaaggaattaatngatactacttataccatcaagatgcatctactcttcgggagcctatcacataagaactccacatttaagcaagcaagacttggagtaggtatgggatgggtgaccttctatgaagtctcctattaagcatgtgagtgaaaaaaaatacgctaaaaagtctcatgttggtttgtggggtcaatcattgatcttgagagcagttgaagcaaattgtcgagatcttggaaacgttacctatggaggaatcttgatggtggacggttctaaccaacaacgatgttgagtggagtgtcaccatgtgaagtatcatagagtgcgagtcac

SEQ ID NO: 93189 - DNA, 535 bp, Glycine max
  unsure (1)..(535): unsure at all n locations
atcattagagtcacctgcngcatgcaagctntganactntntccaccgtggacatgccanacttataaataaannagttaaatatcattatgaacatgccaaacttcagttagaaagntgtgtgccttgagggtgaagctctatgtcatgctacgtttcttatttcaattatttcgtagcacgtggtcttggcgtaacgtatatagtagacaacatgcagagtgctggcagccaagaaaggtaatgggtgtatnttttctttcaagggctaattaagcagaattcagaaatggcgggcagaaaatgaagaggttctgcataaagcatgtgctntgaattaaaaaatgatcattctcaatgacgtgaaatatgaaaaagaaaaaacataatttgagtggtctanggaaacattgctagtcntgggactaataccatagtttgttttatcaaagttgacgtaaaatatatcatctatatcaatatgtccaatgctagcgtataaaacgctttttgtttaaaaatattcgctataaaa

SEQ ID NO: 93190 - DNA, 380 bp, Glycine max
  unsure (1)..(380): unsure at all n locations
agcttcccaaccaaattcctgatagaggcctatttaatacctatacccagccctctaatggtataggataagatattcatgtatgagctttcctattacccaactncatagcnttctttttgtctctggattccatattagcatagtgttgaatacaatcagaatgttctgtttcagcctccatgcctattctttttcccaaattctatagttgatgagcctcctccatcacctctgtgttacatataatcttactntttaaccttctctctgcttcaagatnggctctagtttgggccttgtcacatttatcaatagtggcagccaagtcattatcttcttcttgtagctgaaagtgaatcttcacaggttgcaacata

SEQ ID NO: 93191 - DNA, 376 bp, Glycine max
  unsure (1)..(376): unsure at all n locations
agcttcngaagaaagtgatgaggtacaagctctatatgcatatcttgaaagagcccgagtagtccaagagaaattcaagtccatagccatcaaagtctgaaaagagtatgatgaactaagggacgtcaatatggccacagctgaagctttggaacgagaaaccaagaaggcccgaaaggaagaacacgaccaaagcatagttttgaggggctttatagggcagcaatagtgagctcaagctccgaagaggtgaaaggaatcatcacgggtcanaggcatgatcttgaaggacgagctaaagggttgccttangtcgaaaagaaatttgtnccaacagttaagcgagactgaagggaatatgtgggccatcatcgat

SEQ ID NO: 93192 - DNA, 289 bp, Glycine max
  unsure (1)..(289): unsure at all n locations
gcttgagcaccatattttatgcaagtcgggcttgatattcatgtgatcagcacagctcaactntgttatactcctaatgcatatatgctttgagaattacattcttgggtaaaacccacaattatgtcacccttatctgattcttgttcccactaaaagcccttatacttttcttaatgacacataagtgagctcttgccacatggcaagttngaatcggatgcaaggtagtccatatatgtcanaagagctaaccgatgatatctgtgaaaatggaacaaaaccccta

SEQ ID NO: 93193 - DNA, 302 bp, Glycine max
  unsure (1)..(302): unsure at all n locations
agctngcctcanagaggtccaggaatgacaatgcggccgaatgaactaattccgccccggagtacgacagtcaccgctntagaagcgttgtacaccagcagcgcttcgaagccatcaagggatggtcgtttcttcgggagcgacgcgtccagctcacggacgacgagtatactaatttccaggaggaaatatggcgccggcggtgggcaccactggttacttccatggccaagttngatccagaaatagtccttgagttttatgcccatgcttggccaacagaggagggcgtgcgtgacatg

SEQ ID NO: 93194 - DNA, 481 bp, Glycine max
  unsure (1)..(481): unsure at all n locations
atcctctgagtcacctgcggctgcagcttagggggagtgctcgtctcgaaaatgggatattttgttgtacatgctttcagataggtgtcatcatcaaaagagggagaatgtgaatgaatatgtatgaagatcttgatgatgcccaagacagaagcgatacaagtttacttcaagtccaaatcaagatcatgtgaacgaaatatcgagagaaaaaacccgccttagtctatttttgttaaaagaatctcttaatgattgaaaagggttggcctcaaaacatacattttaaattaattataaaaaggtttaaaatattntaacatttctgaaaaaaggaatctttcctctgggtaatcgattactagaagtgtaatcgattaccagaagcanaattggtttaaaagctctccacgannagtgaaatttgaatttgaaaactgtagtcgattatcatttgtatgtaatcgatcaccaataaccg

SEQ ID NO: 93195 - DNA, 348 bp, Glycine max
  unsure (1)..(348): unsure at all n locations
atccttgagtcacctgccgcatgcaagcttctagcacaatggactgacactgaatatattactttgattgcccttgagagccttgattacctttccttgttttgaagctcactacaagctctgagtgaaaaaccatgatattaccatatccttaaggaattttggagctctggaattgtatcgggaataagtgtggcgaggttcttgtctcattggacaactagactagatggctatgctacatgatgtatttagtgccatactngatgtatcttgactattggatatagtctgacatcctgatgaatgtagttctcatacgcttacactgagtgcggtgagtccttt

SEQ ID NO: 93196 - DNA, 125 bp, Glycine max
  unsure (1)..(125): unsure at all n locations
aggagtgacattcttcacagcaagtgttgtacttctattgacaagtagaacgtccagtctacagcgttagtccananaggtttgggaaccatttctgctaagagcatgcatttcaccactattat

SEQ ID NO: 93197 - DNA, 424 bp, Glycine max
  unsure (1)..(424): unsure at all n locations
agctntagaatgtatatcattcacgtatctcctngtctcgnttctcacattctaatactatgctcaatattaaacattattgtacccaagtaaacttacgagcaaagtgttgaaataggattaagcgtaataaaatatctctagctagattaaatgcagacaagcaaagtaaaataaagctttattcaactgtatactaactacaagaggacagatccttattcttgcagatgagtcagtggaggactctgtatctcactctgactcaaggtccctagctacccttctactcattcgggacatacaggtatccacgtttgttgcatttgaaattaaggttatcatgtacacatcactgactattgtctcatgttgtggtagtcaaaacgtctaccatacaaagacactgngttctcttacaact

SEQ ID NO: 93198 - DNA, 441 bp, Glycine max
  unsure (1)..(441): unsure at all n locations
ctgacataattcttttttctttttttttaccgattgatgtgcagattgatcctgaaagttattcggctggagggtccaattcatgcttaatgaaagggacttaatgcacagaactggaacatcttaaactgatatagattatgggattttcaagtcgaacagatgaaatctcattggctaaatgtttaattcatctaatcaagggaaagcctccanagataaagacttcagatgggaattgcttggatgcagtgtttgtgcagtgaatttagatntcttcaacgttntcaaaagctagtccaattcaacaatctcgttttattatagatttcttcaacgttttcaatctatttattcttatttctcaactgttgtgtacggtttaattaaagttgactagttttaagcattcttgttttgaacccacaaagaaagtctagt

SEQ ID NO: 93199 - DNA, 417 bp, Glycine max
agtcacctgcggcatgcaagcttgagagacattataattaaataatattatttctgtgcccggatggacttgcatgtatatactataaatacttagagtgttgctcgaagaaccaagtcaaagaatacctatgttatgtccgacaatgttccgggtgaaagaatagttgtaataagttaatgcgcatatggaaactctgcgtcttgtcgatgactaactgcatccattatattcatgacgaatctggatttttctcttgtttttctccttaactaatgtatgatatcaagtcttctaacttgccttaactaacactaaaacgcagagatctttatctaggtttatacaaggaaataacacagacaaatcctcaactttagataaactcttataccgtctcatattagatgatacatt

SEQ ID NO: 93200 - DNA, 391 bp, Glycine max
  unsure (1)..(391): unsure at all n locations
agctntctnagntgtatggcttccaaaccttgaatactaaagtgtgctatacatctatttctttctcttctcactttgccaaaaagaattcgccaaggactaaccgactgaattctttttgtgtctctcttcacccttgttcaaaagaacgaacgactaaccgccttaattcttgtgagtctcgcttctaccttgtcaaagaattcaaaatgacacagtctgagaattctttagattcttcccgtttcctacaacaaaagatntcanaggactaaccgcctaagatatcttgtggttccacttcacaaagtttcaaaggactaaccgcctgagaactttgtcttaacacatcggagggtacatcctttgtggtacaagagagggacatcta

SEQ ID NO: 93201 - DNA, 229 bp, Glycine max
  unsure (1)..(229): unsure at all n locations
agcttacatggagctatatcaaagaagaagtccatatcaccacatgattcaaaaagagacctcatatgtaagttactcatttataccaatttaatgatgatcatgacgaccacaacatttcattcacaagattaatacgctactcanaagtacgttattgaagtgtgtttaaatgactcgtgctctcagaaatatataggtgggaagacctaatttaccataccattga

SEQ ID NO: 93202 - DNA, 446 bp, Glycine max
  unsure (1)..(446): unsure at all n locations
agctngactcgcaccanacatgacttgnntaacatgctttcatcananctcttcacagataactatcatatagcataaaccttgtaaaactacccatcatatctnccaaaacccaatacccacgaaaatttatgtgagaagaagtctacccaaacctgagattcgaagtcccacacgtagagatgcgcttcacgacttcgaanatggcttcctttcgcgaattggagcagaaatggtgaccaaaggttggagctttgntggagcttcaatggtggaggaagaagacaggaatagcaacgtgagagagagggagaaaagcttctgcactcttggctgagtgagtgaggagagagggaacgttgtcttttatgttaaaaggcttcctcttttttttttaaaaaaaaaggtatgcccatgtctctttgagtggagcaaaagggccactt

SEQ ID NO: 93203 - DNA, 384 bp, Glycine max
  unsure (1)..(384): unsure at all n locations
tcctgaagaatggatacactatctctctcattgtcatgaanagcatanaanatacacaaatggaagagagaaatatgaagganaatatgaaggaaatggaagatggaagctccaaccacctcacataatcctagggtgatgcccttctttgatcccaatgctaaaagtgtnctatatagcccaaaaatctctactttgtcttttctatgaaatgagtagctcacttagagtgacaatgctcacacagtgcgccaccacttttacattgaccaatatcatagattgtattatcataggggatttgggcatagtacgaaaatcatntgctaagagcctttgatactctntagcttcaacacatgtacatgacatctttgacaacat

SEQ ID NO: 93204 - DNA, 521 bp, Glycine max
  unsure (1)..(521): unsure at all n locations
ctgcagcttggaaatgttgtttcaccttctcgctaagtttatctgctggcttagcgagcatccgctaagcgcaacactcctgngctaagcgcgaggaagaatccagaagaagatgagttgtacatgttcgctaagtgatcgaggccgtacccgaatcanataaacataaaaatgcaataactaggaagtgatcctaggtcgtttcccaacgagcagtgacaaaccaaatgttcataatatacttgcagtaacagtaacgaatgggggggttngtttgntttgtgattaaagagcagaacaagtaaactggaatacgaaactactaatattaanaacgggttgtttcctctgattcagaagccattctctaatcctgggttatggagaatttgccctaacacnaaactctgaataatgaatncataacagaatccttccacgaatccaaggcttgctattaaaagagcactcanagcactgggcctatacatactctgcccaaacaaataacactgacacat

SEQ ID NO: 93205 - DNA, 535 bp, Glycine max
  unsure (1)..(535): unsure at all n locations
ttaagcactgggctgcagctacacaaaagcttntctttttcaaatgagattttatatttaaacatgattntaacagaaacatcttttatatatgttttgtgtaagttttactacaaacttaatattgagaaatatttttaataattaagtttatatattaaaatgatctaatatcaaatttccgaactcatttaaatcttaagcacgcgtagtaggtctaaaaaaaagttgtgattagtatgtagcggaaaactaaatttacgggacattctttatgttataggcncgagaatgaactctatgtaaggcccgagacatttacaaggagtccacattagaggtcagaagtttcttgacccataaaacaggtagagctgatgagattaatcatactttttggtgtaagaaaatatttcttaagaaagaatagattattacatgcaatatcacttaagttatatgagtaatcgcgttttttgaataaactaaattatgatatatcattaagctaccaattagtattttatcgccttgt

SEQ ID NO: 93206 - DNA, 236 bp, Glycine max
  unsure (1)..(236): unsure at all n locations
agctagaaccattgtcgatgagtaccttagttacgttatggtccatgcatctaattgacacatgtagagcntttgtgtgccctcttccctcaacgggaatctcttcttccgcaaacgcgatatagntattggtagttatatgattaataatgccttccaaaccctcgactgagatgttgtgtgctacgtgggcttcgttgaggcaagggaacgagttcttaacgggtgcggatgga

SEQ ID NO: 93207 - DNA, 527 bp, Glycine max
  unsure (1)..(527): unsure at all n locations
atccttagagtcacctgccgcatgcaagcttctaaggaagttntctcaagaaagcttctcatggaagctacctagtctataaatagaagcatgtgtaacactcgttgcaactttgatgaatgagagtcttatgagacacaactcanagttcaacttctctccctctntcttccttcaatttcgagctcccacctctctctttctctccctctttcttttcctccattgaagcatcctctccaagcttcttatccaaggctcatcttggtggtgaagctccttcttccatggcttattccctagtggatggcgcctcctctcacctcttctcctttgtcttccgctgcatctccatggtggaaaatcaccattanaggacctcattgaagctcagagaatccagcctcatanaagccccacaagcaagctttcatcagcaaccataatanaaagctttctggtttcccttccgtggatggtagcctactcagggggaaccacgaaatctggtgggggggtcttctctc

SEQ ID NO: 93208 - DNA, 451 bp, Glycine max
  unsure (1)..(451): unsure at all n locations
agctngacangctaccatagatgcaactatgtattctgtttacatgaagacaaggctaccacaccttgcttctttgagcacctagagataggttgtttaccaatcatagaaacataccctggtgtgctattttgatcacttttgtcatcacactcattagagtctgaatattcaaacnactntgcctttgcatacctctcatcattaggaaacattatgccaaaatttaaagntcctttaacataccctataattcttttgcctgccaagaggtgaggtgtctcttggttctccttatataagcttatcaagccaacacttttgaccaagtcaggtctagtgttgcataggtatcttaatgaccttacaatttgtttgatagtgtacattactagtagctacttcctcctcttcattgaactagttntgttggagggggtggattaaatac

SEQ ID NO: 93209 - DNA, 486 bp, Glycine max
  unsure (1)..(486): unsure at all n locations
agcttctatataaggtggaaccatttatcaataaacacaagttgactnttattcagaanactagagtttatctctcttatcttagtgagagtgattctcctaaattcttgagtgattcaagaacaccctggctgtaccaaaggactttcacaacctttgtgtgttgccctcactagaaagagtgattcnttccttcctttcatcttcacccttgttctttcaaatcacaattccagaanactcacctctgcccagaatatctcgggccataactccatttacgcactcaataagtgattctgagcctaaatgctttaaaacagactttacctcgtttgaatcactatttggaccctgtgcttcgtattgcattctatattctgtcagcacacttaactaatntacatccatcatcatttatgccaaacccctatagaccacgaatacccctatttcatcttcttaataatccgatntcatcaggta

SEQ ID NO: 93210 - DNA, 365 bp, Glycine max
agcttgttgcattttacctgtatcaatccttcatacatcaaagctaatgtgtcccacatttgttttgcacttctgtagctatggatcttcttatattctacctcggaaagggcacatagcaaagcgtttcgagctttagacttcaacaagaacctttgtctttaagagtctgtccaagaggttttagggacttcattcaactgatcatccagtggtatgtagttgtcatgttctacgaagtcccgaaggtctatatgaatagactcgaaatgagctatcatgtgtcccttccagtaactgtatttgatgcctttgaataatggtggcttgtttttggaatatcattcttccatacttatttgact

SEQ ID NO: 93211 - DNA, 275 bp, Glycine max
ttatctggtgggatgcaaatgggatcatcgctgatgaataactttatgtttttttggggggtaattatttttttatggtctgtcatacatggcttttactaatgaagttaaccatggggattatctggtttgtgaagcccatttttaagtatgttgaaggaggcataacttcgctatcagagatagacattggcaaatggagcttttttgaatttgttgggtttctgaaacaggatgttaagattaacggagatctaaaattatggtgggagggg

SEQ ID NO: 93212 - DNA, 320 bp, Glycine max
aaaaaacacccggggggtgtatattggagcttccaccgcatctcaagcagttagaggataaatgctaaggctggttccatttcaaggaatcttatcctccgaattgagtatcacaaaaaatggcctagcgctattaatccattaagcgtacacttttcattgaactgggaaactcatttaaactatctcgttccccctaaaatacacatgcattgatgggattacgagttattaccagatatcactgaataaagagcacaatatgctctgcggaaaacctgcggcgcctgtgatgagaaaaaagttcaaaagcatatgat

SEQ ID NO: 93213 - DNA, 377 bp, Glycine max
agctttgttgcatgcatgctctgtgtttctattcataacactgcaactcgagcttttggagatccaacacttgcaattccattgccgaagccaaatacactagctccaggaacaaagttaccacctgcggttgataaagtatgtgaaccacctacgttcatagtcacgtacactaagctctgaggcattcagttttgtacctgcatttgcctcataacctttgaagaaatatcttgctccaataagcttcctacatataggaaaaacgtcaatgtaattcatatatcatagacctttaaaacttaatgaaatttctcatgatgccagttaattcatatgcctaccgaaacatctatttataactgaagctgatacta

SEQ ID NO: 93214 - DNA, 367 bp, Glycine max
cactttttgccataatccaactctctcattgaatctcaatgcatttgggtatatgaattaattaaggagaataaatgaaataagaaaaaaattattgtttgatttgtaaatgaaactgaaatgaaataaatgtttttaataacgtttaatattgttttaagcaaaagtgtgggcaacaaaaggatatactttttagaataaaaaatacattttcttaatttgtcagtatatctttatgagcatttaatctgcaatattttgttctttaacgatatctaagttatctctattaaaaaaagatatctaagtaattaatgaacatacctcttctttttcttattccactaataggaagaaacaaattact

SEQ ID NO: 93215 - DNA, 341 bp, Glycine max
  unsure (1)..(341): unsure at all n locations
tttttggtatagaatatttatangntatttttatntntaaanngaaaatttgtagggaggatatgtaatgttgtaaacatttttaagcataatggtggtttgaacatataatataatgataatgtatttgaatatattaatttagttcaatcttagtgggaactttttagacaaatgtttaaaagaaaagcccatggtatactttgaaacttttaatttttattattaagtaaagttttatgataggcttggtaataaaaaaagagaagtcattgttaagataaattcttatttatgctctggggtctagaaaatataaataaatttacatgaataatttt

SEQ ID NO: 93216 - DNA, 312 bp, Glycine max
  unsure (1)..(312): unsure at all n locations
agcttgtgggttgaggacgcatgttactanaacgcaattcatggggctccgagatatgttgaggatggacaattgcactaagcaatcactacacatggctccaaactcgtgggtggaggacgaatgaacgaaaacgcaattcatggggctccgtaaaaggattgagaatggagaattgcactaagcaatcactactgacgactccaaactcgtgggtcaaggacgcatgaacgaaaacgcaattcatggggctccgaataaggatggagaatggagaattgcactaaacaatcactaccgacgacttccaac

SEQ ID NO: 93217 - DNA, 324 bp, Glycine max
tcaaataccgagattacctctcctatcaccccttgttccaattttgatgtgatattgatcaccactcaaaacgaaacttcacttatcctccgattcacaggatgacaggatgacaagatgcaaatgcatgcatgcttatgtttatgaagtttaagtgcaacaattaaacaagtggtattatgttcaattttacttaaacacttatggcaccccattgatagagccaaatggctctggattcaaaaatcgatagtgtattctaaaggcgtagaagacacaacacaggaagctcaagtgcaaatcatcaatccattggttattaat

SEQ ID NO: 93218 - DNA, 368 bp, Glycine max
agcttctaatttctatttccatatcaaaatccaattattaacgtctaggtcattaatgagcttaccattatttgactagaggatttctctaaattatacttatcctttctaaactttagcttaaaaatttaagagcttaaccatgcttaagtatcgtatggtaacatctcattttctaccatttcaataatctaaaacactacccaattgtacaacaaagcaataacactatctaccacacacatatggaaaattgggatgttacaagtgatgttcttcacagcaagtgttggacatcgattcaacaagtaaaatgtccagtttatagctttagcacaaaaggatataggaacttttttaaacaaaaa

SEQ ID NO: 93219 - DNA, 323 bp, Glycine max
ttcgatataagggggcccatgtccatggatacaaaggatctcatatgttcatggatccacccccaactccattatattcgtctgaatcattcaccatgtcaaactatccgctctgataccaatttgtgggaaactgagaggagtcaacattggagagattcaaaccaataaatctcgagaaacctcataattagtttgacacctcactttaaccctaaaccctaagggtcagggttatgcatcttctcctcacttatatggtggctaactatcctattcccacccaatgtgtgacgtcacctcacactcgtattctaataatc

SEQ ID NO: 93220 - DNA, 375 bp, Glycine max
agctttaaggtgtgtaacccactttattccataatagaacactagtaatatgtctactatcattgttattatttctttctttgtcattaagggaaacacttgggctaccagatccctccacctttgggcgtattctttaaaagattcgtgccccttttttgcacatgttctatagtggcatcttatctgaagacattatactgacactgcctaacgaagacaaccattaggtccttccaagaatggactcaggaaggttccaagttagtgtaccaggtaacagctaccccagtaagactttcttggaaggaatgtatcatcaattcctcatcttttgcatatgccaccattttccgacaatacatctttagatgg

SEQ ID NO: 93221 - DNA, 375 bp, Glycine max
  unsure (1)..(375): unsure at all n locations
tatattatttggatcttatgaaacggaatctaatggcatgtcttgattgatttaatgtcttggcttggtttctattcctaatgtattcttattctttttgaattgtaatatcacaaattaatgtcattgcgttatttaatccagttaagcattcaaattttcatttaaatttggtaatcctcatattaatactatntcttttccaccctttaaattacagatgcgttgattggtattaaggatttattcaccagatatccagctgaatagaagatgcacaaatatgctgctgcggaaaaactttgtgagcgcattggtgatgatgataaagtggttcaaaaataattatatgatctctttaaagtagcgatttta

SEQ ID NO: 93222 - DNA, 371 bp, Glycine max
  unsure (1)..(371): unsure at all n locations
agctttgaggagtttcaaacgacttttactntttactcggatgtctgatcgagtcccctaatatatcgagacgctctaaattgaatgttgaaactctcaacaaattcaaacgacaatcactttttactcgaatgtctgattgagtcccgtaatatatcgagacgctcgaaaatgaatgttgaagctttcagcaaattcaaacgacaataacttttttactcaaatgtttgatggagtcccgaaatatatcaacccgatcgaaattgaagttttaagttttgagcaatatcaaccgacaataacttttacctcaatgtctgattgagtcccgtattatatcgagacgctctaatatgaatgtcgaagctctc

SEQ ID NO: 93223 - DNA, 293 bp, Glycine max
cggacatccgagaaaaagtgttgcatttgatttgctcagagcatcaacatatcaattcgagcgtgtcgatatattactggactcaatcagacatcccgagtaaaagttattgtcgtttgaatttgctcagagcttccgtattcaatttcgagcgcctcgaaattatacatgactcaatcagacatccgaataaaaaattattggcgtctgaattttctcaaagcttcaacattctatttcgatggtctcgatatattacgggactcaatcggacctccgagtaaaaaggtatt

SEQ ID NO: 93224 - DNA, 377 bp, Glycine max
agctttagcttctttaggaatcttcttaaggaagcttctcaaggaggtgagcttatttatgagaggggtgtgtgtagctaagctctagcttctcaaggaagttttctcaaagaagcttctcaaggaagttttctcaagaaagcttctcaaggaagctacctagtctataaatagaagcatgtgtaacacttgttgtaactttgatgaatgagagtcttgtgagacacaactcaaacttcaacttctctccctttttcttccttcaatttcgtgctccccctccctctttctctccctctttcttttcctccattgaagcatcctcttcaagcttcttatccaaagctcatcttggtggtgaagctccttcttccatg

SEQ ID NO: 93225 - DNA, 401 bp, Glycine max
  unsure (1)..(401): unsure at all n locations
gaaacttcttgagaagttttgtttttttcttgaaagctagagcttagctcacaccccctctataactaagctcacctccttgaaagcntcttagaagattctaagaagcagagcttactacacatacctctctaaagctaagctcacctccttgagatgagaagtagaacttagctcacaccccctataataactaagctcacccccatgacaaaaaacatgaaaatacaaaaaaaaagtccttactacaaagactactcaaaatgccccgaaatacaaggctaaaaccctatactactagaatggccaaaatacaaggcccaaacgaatggaaaacctattctaatatttacanagataagcggggctatactttagcccatgggctcganatctacccc

SEQ ID NO: 93226 - DNA, 351 bp, Glycine max
  unsure (1)..(351): unsure at all n locations
agctttcccgatgctttaanggtgtgatccacgcccaggacataccccggctgtaataagattcgacagaaaccctctttggtaaaatgcttctaaaacaagccctctgagtaaatatgcctacaaccaagccttataatattataattatgtttcgagaaaaaaattatgccctgatactataaataatatataatcattaacgtcttattttaacctgaaaacatggtactctcaacttctcattacaatcactcttaagcattattttctattccctgagctcttaatagaaggcgaaaagtaatatctttgtcaaccatggctaattttagacaaaaatctattttt

SEQ ID NO: 93227 - DNA, 120 bp, Glycine max
tctcaccggatgccatgattcataattttcagcatgaccacgatgggggcgatgagtcctatgactgactctcctggataaaacatcacgctcaaacctgaatgcccaactataaaaaag

SEQ ID NO: 93228 - DNA, 353 bp, Glycine max
  unsure (1)..(353): unsure at all n locations
agcttctaaacactaaactccatcttattatcccaagattcaaaccaaacaacccaaaatcatcataaaataagaaaagtgagtgagcttcccttatgtacacaaacccaagattgactcttataagaaggaaggaaaatgagtgagctttgggttcgagagaggaactttcctctaatcccacaataaccaccgtacataagcatcaaccaaaccccaaagccaaccaaaaatagaatcaaaacctcttaaaatcaagctttttccttgaactttccatgggagctctataaaaacaaaaatgaagaatacgggaggaagaggaaaagcttaccacactaanggacactatg

SEQ ID NO: 93229 - DNA, 399 bp, Glycine max
ggctgtgatgatgccaaacttgaatatgacattgagtgcatttggagggtttgagtcttgagattagagacttgtttttgctcgtcaatcctgaaaattcttaagacttaagaaaagatcaattcatatcatcaccatcatcatatatcttagtatataattttactgatgctaatgtaatataatgcagtgcagtatgctagttcatctcccaaatgcttatgtaatacaatggaagcaaatatccaatacatatgtagtagttcatatctccccttacgcaaatatgcagttcatctcccccttttggcattaacaaggccaaaaagtttgaacttattcacaaaatagaacatacaaactaaagggaagataaatgatatcatctcattaatcatg

SEQ ID NO: 93230 - DNA, 376 bp, Glycine max
  unsure (1)..(376): unsure at all n locations
agcttgccgccatggagcttttctttatgctcttgtgtggnggaacaagttacaaaaggagagagcaagaaatgaagagccaatggttgatacatgggcggagatgaaaaggatcatgaggaagcagtatgtgccgactagttactcaagggacttgaaattcaagctccaaaaactaacccaaggcaaaaaaggggttgaggagtacttcaaggaaatggatgtgcttatgattcaagcaaagatcgaagaagatgaggaggtaactatggctcgatttcttaatggtttgactaataatatccgtgatattgttgagttgcaggaatttgttgaaatggataatttgcttcacaaagaaatccaagtagagcaa

SEQ ID NO: 93231 - DNA, 264 bp, Glycine max
  unsure (1)..(264): unsure at all n locations
catatttggatacttcccaaaagatctttctaggagacactaagtttttaaaacttcaaaaatatcatttcaaaagtatgttgttgtactttgggagacctttctagaagacactaaatcttttggaaaagtctttttaaaagtatgtttgcataattctcgaaatttgaaaaaggaattggtgtatttcgaaaaggttttcctagaataaggtgaacttataaaagaatntgatgcaaccttgagaagtggggcagcatggag

SEQ ID NO: 93232 - DNA, 304 bp, Glycine max
  unsure (1)..(304): unsure at all n locations
gttttcatatgtccgcggtaccgggtgaatacttcagggcgtatttaagcaaccaatacttttgataattgttcgtttnttccttggctcaaagtatccctgccacatcaatggatgaagcttattaagaacaacaattgccgtcaatcattttccacaatatgccatgtnngaattaggaagcatcaacacagaatcatagccaaggctattgtgcaagcaatcaatggggcaaaacacaccanatggttatgatgatggatggcttaaatttttacaaaagtaaactcatcactttcaaatt

SEQ ID NO: 93233 - DNA, 347 bp, Glycine max
atctcacctttacttactttaatgccaccgcacttgtaacataacgatgttcattcctctaaggggagctagaacatcaatatcttacaatccagccctagaatcaagggttgacactactcatacccattccatatcactaccacggcttgcagttgccgcatcatacacaccctccctatgaattgaagcctaacgatgactgccaccgtgtagatcaaccacttcaatctcctctggctgatcatttaactgcatttccacggaagaattcacactatcatatgtgatttaattgcatctacctggcccgccgaacgattacattataggctccacctgcctag

SEQ ID NO: 93234 - DNA, 396 bp, Glycine max
  unsure (1)..(396): unsure at all n locations
cccgtgatcctctgactcacctgcggcatgaagcttctcccctattgctatatatgggggagaagcgaagaagaaaagggttcagcctcttaggcacttctctctctctcgaaattgctgaggaaaattatttccgtgaagaaaatccaagccgaggcgcttccgtaacgtttccgtgagaaattacgcgaagattctcgaccgttcttcaagattcatcgttcgttcttcgttttcttcaatcttcaacgggtaagtacctcaaaccgagcttttcaattcattctatgtaccccggggggtccacattttgtttcatgtatttttattctcgntttcattttctttttatacccccttttgacgtgcttaagtcatttatttaagtcatttctc

SEQ ID NO: 93235 - DNA, 409 bp, Glycine max
  unsure (1)..(409): unsure at all n locations
gccacagggcacaacaaaggtttcacatacacaatgggcgcataaacccaccaatccctggtggccaccttcatataagctcacggactcccatggagcccatatcctcatttctctcaacaccgggttcccatcaatacttctaagctctcacaacattcaagcaaaacaacattcaaacatgacaagctattacaagccagcgaaacagaacatatgcagaaaactttggccaaacaccaaccaaatcacagcttttctcacttaaaagacccagtaacaattccttcgttctggttcattaaccggctgatcgactcgaagatttactggaagtctctaatcttaagcctaccttttgaccgctgggatctactancnagcatccagaactcattctgcattactc

SEQ ID NO: 93236 - DNA, 367 bp, Glycine max
agcttgtaggattatggggttcttatcatatatggtactaggtggcaatcgggcgatggtgcaagtcgactctccacatccacaaatcacagataaatccaccatccccagttgcccaccttcaactgagctcacgtactcccacgtagcccttatcctcgttcttctcaacaccgggtccccatcaatccctccaagcttccaaaacatccaagcaattcaacatccaaacatcatgagctatccaaaccaagaaaacagggcagaggcagaaaactctgcccaaaacacattccaataccacagctttccttactcaaatacccagtaacattttcttccttccgattcgttaaccgttggatcg

SEQ ID NO: 93237 - DNA, 409 bp, Glycine max
  unsure (1)..(409): unsure at all n locations
ttttttttcgtttatggagntaagcggatacagtgtcaaaggacaccacacatgtcctatttgtgagaaagacaccatttacattcaacttataccaggaaagaagatagtatacacaacgcactgaagatntttataaccttttcacccgtatcggcgattgaagaaagcatttaatggacaaaatgagattgaaagtgcacctaaacccttatgtggacatgaagtgtatgatcgagtgaaaggcatcaatactcatcttggtaagacacaaaaaagggatgcgtctgggaataacatttggaagaacaggtcagatatttttcatcttccttactagtgtgatctacatgtatgacattgtctaagtgtcatgcatgtagagacnaatgtgtgtgacagattgatt

SEQ ID NO: 93238 - DNA, 375 bp, Glycine max
agcttgcccttggtttagacatgtttggtacatgatttgggacttgtaggattcaatttgggcaaaattggatgagggaaagagtggttttcgaaatctgcactttatgcagaattttgctgttgaaatgtgcagcagaattttgtataagtgcagaaaaatacttgtgcatggctggttgtgaaaagggtagtacatatggggttgtggacatttgctagcagatcccaacggtcaaaatgtagacttatgtactagagacttccagtaaaattttcgagtcaatccaacggttaacaaattggaacgaaggaaatgttattggggtatttgtatgtgaaaagctgtgattttgagttgtgttttgggaagagt

SEQ ID NO: 93239 - DNA, 438 bp, Glycine max
  unsure (1)..(438): unsure at all n locations
tataagaacaaaattgcctcaatcatttccaaatatgtatgtgaattangaagcatcaacaagaatcaagccaaggctattgtgcaagcaatcaatggggcaaaacacaccaaatgattatgatgatggatggctcaaattctcacaaaggtaaactcatcactttcaaattgagctttcaaaaatatcatgacatgtagagaagaatcaagaatttcaagtcacaaaatgtcaagaacttttattttcaaaacaattacccatttcttgaacatatcctataattcaaagaaaaacatgcaaagtcgtacatgcacacaaaattaacccaaaatattaaactaacaaaccgacgaaactaccaacattaacaaattaacaaaaccaacataactagcaaaaccaaagaacacttccccccatacttaaacaacacat

SEQ ID NO: 93240 - DNA, 373 bp, Glycine max
  unsure (1)..(373): unsure at all n locations
agcttgcatattgctgcgcattttattgaatatgagagaaagagaaagagggtgttggttttgttattatggagagagaagcattcagagctcgaatgatatgatatcagatcaaaatgaaaaacaacaagcaaatgaaatggtttgctctttttaccgttttcaccctcctccatccacacacgtcttgtgtgtgttntctttttggattgagaaaatcaaggaaaaacccttcaaatttgtttgggtgtagatttaactggttgatattttaatataacatttaaatgatttagatgtaaattttaattatcttattgatgatgattacatatgtgaaaaaaaaaactacagctaagattaatatttcttt

SEQ ID NO: 93241 - DNA, 341 bp, Glycine max
acattatttgtcttgaatggaaatgccatgactagtttatttgcaactagtctttgatatactggtaagccgatatttgtgatgcgggaagtaatttcgattggattaactcaccatcctttacgtgacaataatgtatgacctttgttggtggatcacctctgatgtcctgtttcctacggaaagctatacctctctatgggttaacctgaaaccacccaagaaatgcatttattttgatttttcgaaaattcattaacttgcttggatttgtattttgttgaccctccaatggtggaaaaacattcctttaagctattctccgagataaaatacttcta

SEQ ID NO: 93242 - DNA, 378 bp, Glycine max
agcttcttttatgtctatagctttagcttaaattgcatatatataatatgcacattattctctcagccggtttggattcgcatgtacgccctgtgtagcattattttattgcgtcaattttgtgggaaaacaaattgcgaaattggaaccaagcatgcactctcatgtgtatgacactgatttgataattaaacatttcacattatctttttcattctcttttaatttactcttactttatttttttctatatttttttagtacacctttcacctttttttatcttttctttttaccttttttactggtttcttcaatccaagaaattagggatacataaattattttccatacttcaataagattgacattaattgg

SEQ ID NO: 93243 - DNA, 377 bp, Glycine max
  unsure (1)..(377): unsure at all n locations
agtctcacgattgtcacgtgctctttttcatttgttagccgngactatacgagacatcttgccaaacaaagtcaagttagcgataactcgcctgtgctttttcttccatgttatatgtagcaaagtcattgatctagtcaaatttgatgagttgaaaaatgaggccgcaattatactgtgccagttggagatgtattttccccctgctttctttgacatcatgattcacttgattgtgcatctggttagagaaatcaaatgatgtggtccttgttatctacggtggatgtacccggctgagcgatacatgaagatcttaaaagggtatacaaagaatctatatcatccacaagaatctattgttgagaggtacattg

SEQ ID NO: 93244 - DNA, 360 bp, Glycine max
agcttctcaaggattttttctcattaaagtttctcaaggaagctacctagtctataaatagaaacatgtgtaacacttgtggtaactttgatgaatgagagtcttgtgagacatacttcaaagttccacttctctccctcttttattccttcaatttcgtgctcccccctctctctttctctccctctttcttttcctccattgaagcatccttccaagctttttctccaaggctcatcttggtggtgaagctccttcttccatggcttattccctagtggatggcgcctcctctcacctcttttcctttgtcttccgctgcatctccatggtggaaaatcaccattaaaggacctcatt

SEQ ID NO: 93245 - DNA, 449 bp, Glycine max
  unsure (1)..(449): unsure at all n locations
acagctctataagcgcgggtctgtgggatgaaagttatgtgtgtcttatatgcgaagatgatgttccgagtacattggatttggtacgaacatgccctcctggtttccagctgggaaattggcgaatggaggaacgccccgacatttacgcaatgagcataatgtaaacctttacggttttagaaactctatagttgggcctaggctttagagtttntcttttgttaaggctntgtgtcttttgttttgaatttataatacaaggatctttcctcatctgttcctacgtctctacccattctcatacatttgcatatttacttctctactttttacaacggctaatccgatgagaagtcctcgaacgttctaatacctgggacccgcctatatcctcgaccaaacacgaatcaaacggaatatgataggacgacgatttgtgcccaccc

SEQ ID NO: 93246 - DNA, 270 bp, Glycine max
agcttcagggccccttttaaatatttttctcgagagtacagtcaaaggcttggctagtcttccatcgtccgtgacaaaccttacataatggcctgcggccacagaaaacgctgaactcccttcacactctgaggaagtggccaatctaccacactttttaccttagccagagctaacgcttcagccttctactgggtcataaggccaagatgattccacttgagtatcaccgaaaacacacttcttcttattggcgtcaaactatctttc

SEQ ID NO: 93247 - DNA, 374 bp, Glycine max
acctgctgcatgcaagctatccatagaaatctagttttctttaccttgattacttgtgctatacattcttctcatctcttctaccttagccaaaaagaattctccaaggactaaccgcctgaaaactttgtgagacattcttctaacttttactttagaacgaaggtttaaccgcctgaattctgttgcgtctcccttcttccttgtcaaagaattcaaaatgacactggctgacaaatcttttgattcttccctgttccttatacgaagagagtcaaaggactaaccgcctgaaaattcttttgtatccccattcacaaagtattaaaagtttaaccacctgtgatctttgtcttaacacaatggagggtaca

SEQ ID NO: 93248 - DNA, 373 bp, Glycine max
agcttaagctccttcaactgcacatttctcttaatatttgaagagtatccttgtggaactttcactcgacgaagacactgacaaaaacttatcttctccctcccgcccacccccccgcaggctgggggcaagtaaattttcttcccatcagaccttggatgcaactgtgattgtatacccatatcagctagatcttgatgggtattcaagccatccttcgtcttgccttgaatgttaaggagcgtcccaatcacactgtcacaaacatttttctccacatgcataacatcaatacaatggtctaacgtaagatcacaccagtacggaagatcaaagaaaatggacctctttttgcatatacaactctgacttt

SEQ ID NO: 93249 - DNA, 394 bp, Glycine max
  unsure (1)..(394): unsure at all n locations
aataggggcatatagagctggagacatcttggaattgatacatacggacatttgtgggccatntcatgcaccttcacgaaatggtcaaacaatatttatatcattcatagacgattacnnnnnagatgcatactttgttcttatacatgaaatgtcacagtctctggatgtgttcaaaaaatttaaagttgaagttgaaaatcaactcaacaaaaaaatcaagagtgtcagatctaactatggtggtgaatactaaggcaaatataacggttcatgtgaacaacatctggngccttttgctatgtacctagaggaatgtggaatcgtcccacaatacaccatgccggagtcacctatcatgaatggtgtggctaaaagacgaaatagaactctt

SEQ ID NO: 93250 - DNA, 378 bp, Glycine max
  unsure (1)..(378): unsure at all n locations
agcttgtgcctgtcaagtcaatcctttgtatgaaaaattttgccagtattntttcttgagataattaaaaacttataataattagggtaatcgataagaagtgagtccattgtaaattataataagttgttaattagaattaagagtttgttgtctagccactggtttggatgtagtaattccgtgcaaaattgtgaataatataatgcctacattgcctagtacaatattctgaaagagggtttgcaacttattgctcaaaagcttcatagtgggagaggaatagcagcttgatctgtgcaaagttgtagtggtagagggtgaattcactcactttttcattcaaaaagttgtattgtaatgttgatcatactaaaa

SEQ ID NO: 93251 - DNA, 297 bp, Glycine max
atgaactacacaaattaaataatgttttatataacatttagtgtatgtgagttagagcttggagactcattaagattaacgaagacttcgagactcaatgagcatgtattattacttatcgacttggttcccatattcagagaaacaactgaaactccattcggttgagatatggatatgtttcttagcaactgaatcaactttttgtggtcacaaacaaaataatgtaaatattcatgaacagcacttttgacatttattatcttatcagaattcacattattattattatctgat

SEQ ID NO: 93252 - DNA, 334 bp, Glycine max
ggaaaaaaatcttggtttattggttacactggctttattacctttccattgaatttaaaggatgaaaatctgtgccttttccaggggaaaaagaggctaagttttgaatttgcaaaaacaacaattgggctaagcttattagttgggctaagcgcctatccaccatgaaaagcgctgctacagcgtgcttagcactaaggagaatctggcagagcatcaacatcaaagccgcgcactaagcgtgagataagtgcgctaagcgcagcaagtgccttcagccaagctaagctcgagactggcgctaagcccaatttcacttgctcgcgctaagcac

SEQ ID NO: 93253 - DNA, 359 bp, Glycine max
  unsure (1)..(359): unsure at all n locations
cttttggtcaaaccaatttttcctatttggggagaatgtgggtgatgataaatggtagacaatacaaccaccagaaattgtcttaaccagaataaactgtaaataaataaaaagagaaaagaaatttcagaataaaaatgtgtgggctgttattngaagctaagtgccttatatgttaaaggaaagtaattgaagctggaataaaaagaacaagagttgatctaaggatgaatgctctcctagaacttaagctcttgcatcctacaanaaccatgaattgtntgcagccaacctcattacaagcctagaaaagtcttcngattcaaattgtgtgtttgtaattgacgtcatgagataaa

SEQ ID NO: 93254 - DNA, 345 bp, Glycine max
  unsure (1)..(345): unsure at all n locations
ctgcggcatgcaagcttttgggaagngaagaaactcggttataactccaagccccaaccgtcgcttgtgttttgatacacacgcggagagaaataaacaacaagattgttcgtcctcatataattgaatgaggcttagattaattgccctgaaagaacggctaaataattcctaccaaataattaaggcccccaatggggcctctcaatgtatatactaatacgtgggccttacatttatgtgcacattagatatccaagtcatagatcggcccctgtcgtgggacagactgaggaatagtcctgaatatgaaatgcgttattgtgattctacgcgtgaggcttg

SEQ ID NO: 93255 - DNA, 370 bp, Glycine max
  unsure (1)..(370): unsure at all n locations
agcttattgggttatggggcttctgtcatatgtgttactaggnggcgatagggcgatggcacaaaacaaacatcccatttccacaagcccaggcataagcacaccatccccagttgcccacctttaaatttagctcacgtacacgtacgtagccttctcctcgttcctctcatcaccgggtccccatcaacctctcaaagctttcacaatatccaaacaattcaattccatttgtcatgaaactaccttaaaaacaaagtgaaggcagaaatctttcacaagattcattcaaattccatagagtttttcctacccacatacctcagtaaaatncctttcggtctgatttggtaaccattggatcgccttg

SEQ ID NO: 93256 - DNA, 373 bp, Glycine max
agctttcacaatgtcaaatcattttatttccatttgacatgaaactaccttggaaaaaaaacagagtggaggcaaaaatctttacacaagattcattcgaattccacagaatttttctaaccaacatacctcagtaaagtcctcatccttgattcgttaaccattggatcgccttgaaaatttaactgggtattcctaatacagaaatataagttttaaccgttgggatctgctaaagaatttctagaacacgagatatactacctttcccatgacagcagaaactagcactgcacaaccagttttttatttttctgcataattggcagatttgctgcataactgggcagcttttttgcataattttgcagat

SEQ ID NO: 93257 - DNA, 378 bp, Glycine max
  unsure (1)..(378): unsure at all n locations
agctttaaaaactttcattctactctctgatcccttaacatacttaatgctttctctaattttgtttatagcaggactgactactttcaacccctcttgaacaataaggtttaaaatgtgagcacaacatcggatatgaaaaaattcaccaccacttactaaaccattagtatgcaaaaagtctttcctttaaaatggtcttgcattttatcattggaagaagcatcatctaaagttaatgaaaatattttcttctcaatccctcattcttccaaaaaaaccatatataactntagccatctcacgcccagagtgtaaaggaggaaaatgagaaaaattaagcattttactattcaacttccaatttgcatcaacata

SEQ ID NO: 93258 - DNA, 245 bp, Glycine max
aaaaccccaccagcaaactttcatcacatttccttgttaaacatcgcataacttttctaataacattctcattactatatgtgtgaatctcttttcatatattgataggttcatttttattcttctaaacaattcatattcacgggttagggtatttattctagatctttttatatcaggttgtccttcatgggttacttgaagggagtccacattctttggcatcttgtagttgatactctaaa

SEQ ID NO: 93259 - DNA, 378 bp, Glycine max
agctttggcagaaaccaggagattttttgggtttggtcaaatgtttggttataaagaggggccatctgattgggtagatttgttttacattttcacacttccatcccatttaaggaatccccacctattccctaatataccactgccattcaggtgctatttcattctttttatccttttatatattcttttaatgaataaattaattattaatgattctaatgataaaatagttaattgttattgtagggtatattcaactacgatttcaaaagattttaaaagaaaaaaaaattataaaaaagtatttaagtgtttaatacgatttttaaataataaaaataagtcttttgatattaaatcaagactattaagatt

SEQ ID NO: 93260 - DNA, 355 bp, Glycine max
aatgcatgcaaaaagagggggttcttccaagtgataaaccatggagcccctatattgcatggagaaaaatgaagcggctgaaaggaagttctttgggcacaggaaggaggagaagagttaagtgataagggataatgatggtgtgcaggtgatggggtactatgactcataccacacaaaaaatgttatggacttggaagacgtgtttgatacaccgtggaggaacctaccttgatgctagcttcacttggccctaatgatgatcataaagaactcactctatagtatatccagtggcctcaataaccacctcgagtcaggtactactacttcaactatatatactcattctcat

SEQ ID NO: 93261 - DNA, 309 bp, Glycine max
catgcaagctttctgatctttcaacatgttgttagctgggacccaaatcttgttaatgcttgtacttggtttcttgttacccctaactccaacaatcacgtcatttgcttgtagtattctttctaacattcccttgctcttctttctaacaatctcatactccaacaatctaatctttctttttcaattttagagacttgggcaattgttaggaatagtactaagggtctgctggaagcaaaggggtctataagaagcaagtcatatgaggcccaaaaggaaaaagcagcaacaccagcttattaaaaa

SEQ ID NO: 93262 - DNA, 324 bp, Glycine max
  unsure (1)..(324): unsure at all n locations
cttggtggtgaagctccttcttttttgcttattccctaatggatggcgccgcctcttaccttttctaccttgtcttccgctgcatctacatggtggaaaatcaccattaaagggacttcattgaagctcaaaaatccaacctccatataatccccacaagcaagcttcatcacattccctgcttaaacatcgcataactgtnctaataacatcttcattactatatgtgtgaatctctttttcatatattggatagagtcatttttattcattcttaacaattcatattcaccggttacggaatttattctagatcttttatat

SEQ ID NO: 93263 - DNA, 309 bp, Glycine max
  unsure (1)..(309): unsure at all n locations
aaaaaaccccaaaaaaanaaaaaaggagaaagatgttatnaaaggaagagagggggggaaaagaaaaaaaaaggccggagggacaaaaaaagaaaaggggaagggagacaggaggacagggaaagaggaaagaggaggaaaaaaaagagaaaacgaagaggaaagaaggaagagaaagaaagggaagaaaaaaaggggggagggaagaagggaagggaggaaaaaaaagaggaaaagaagaggggagaagagaaaaagaagaggaaagagaaaagggggaggagaagaagggaaaaagagaggggagaa

SEQ ID NO: 93264 - DNA, 296 bp, Glycine max
  unsure (1)..(296): unsure at all n locations
ctactagcctcgattnttttctcttaaatttatccttactattttatttgaaattatgattagggttaaattgaagatatgatgtggatcatggttcgtagtcatgcaagcgagaggcgtatacatcccaatttttcttgtttaagtagaaatattatgtctaggaaattttatagaaaaaacactctattcttgttttgcaatgtctctattattaacgtttccaacggcaaagatttctttattaattttcttcaattactcacgagtttgcttttttttgtgtcctttctttc

SEQ ID NO: 93265 - DNA, 277 bp, Glycine max
  unsure (1)..(277): unsure at all n locations
agcttttagctctaaaaatanttctataatcatttatcccgcattaaaatgaattccatatattaaggacgcctacttcaatcagctaaataaacatacctaagttattataaatttcttgcctcacggaatataaaatttagctgcttagacaacgaaatatgaaaatcaagcgtctcctatatctctaacaggttcatcttgccctactttaattattgtgcaaccacatatcatacacctcaatatatcatagataagtccgctccaacaacaa

SEQ ID NO: 93266 - DNA, 368 bp, Glycine max
agcttcagaattcaatttcgagcttctcgatgtattacgagactcaatcagacatccgagtaaaaagttattgtcgtttgaatttgctgagagcttcaacattcaatttcgagcgtctcgatgtattacgggactcaatcagacatccgagtaaaaagttattgtcgttggaattagctctcagcttcagaattcaattttgagtgtctcaatagattacgggagtcaatcagacatccgagcaaaacgttattgtcgtttgaattagctcagagcttcagaattcaatttcgattgtctcgatatattacaggtcttaatcagacatctgaggaaaaaagttattgtcgtttgaatttgctgagagc

SEQ ID NO: 93267 - DNA, 304 bp, Glycine max
acgtcaataaccttttacctcgatggctgaatgaagtccggaatacatcgagacgctcgaaaatgaattctggatctctgaacttattcaaacgacaataaccttttacctcgatgtctgattgagtcccgtaatacatcgagacgctcgaaattgaattctgaatctctgagctaattcaaacgacaataacttcttactcggatgtctgattgagtcccgtaatacatcgagacgctcgaaattgaatgttgaagctctcaacacattcaaacgacaataactttttttctcagatgtctga

SEQ ID NO: 93268 - DNA, 371 bp, Glycine max
agcttcagcacaagaagattatgtttgttaaatgatagaacctaaaatcaacacaaaacatgattcaagagtagatctataaaatttgaaccattgaaatgcaagaacaagtgtagatctaagatttaatcggtttttttatttgaatctattataaacaacacacaaccacatgacaatggaggagatacatggagaagaacatgaagaataaggaattaaaatgaattgaccgaacaaaaagatatatgaagcaaaagaacatcacctatatacagatgctctggatagcacatgacatatctccatgtggagcttgtaggccttggatcttcttcatcaatggagtcctttgcttcttgaagatcaat

SEQ ID NO: 93269 - DNA, 330 bp, Glycine max
tgagctgcattctctggcaaacgcaatgaactcgctaagcgagcatgctgtgctaataaagttcataaatactcattgcatgtaagcggttctctaaagaactcctaagcgcgcttaccgagctaagcgagttcatattttgaggatgaacactcatcctcttgctgaactacctgtggctaatcgacgctgaattgcttagcccaggtaacttaaccaaatcttttttgttatagacatgcgctatgccgagcatttctgatccaagcgcaattggatgcggcattcgctgagctgaacgagcttcactcgctgagctcccataacata

SEQ ID NO: 93270 - DNA, 335 bp, Glycine max
cccaaaagaaagagaattgtgagctcaagtttcacactactgaggccttgtcaagatgatgaattgcttccctgaaaccacacactaccaatttctttatggaaaggtctattgaacttacaaccgatgaatcttttttacacttgatgccggaccaaaaacatgcattagatttcccaggttaatttcctcctaaggcaccacccaattgtgcaaccttgtggcatcatctacaaacttcaattttatgccgagaagtgcctctgagttagggtcaatttgtctaactgctgatgatacctgaagaacgtaacaagaaaaatatttttgttgta

SEQ ID NO: 93271 - DNA, 344 bp, Glycine max
  unsure (1)..(344): unsure at all n locations
agcttgtgactccatagccatctgctttgatggtgttgttaacttagccacctacaataatttcttaaagttnttagaactttttgatatttttgtggagtttttacaggaaattgagtcagaagcacaagttgagttatgctcgcttaagcgtagcttgttgtgtgcttaaatgagccaagatagaatcatatggaggagacattgacatgcctcattcaagcaagccttcctcaatgcttgagtgagaagaatcttaaagatgaatgatgaagtcaagctcgcttaagcgtgacatgctatgctcctaagtgagccaagttagtgagcaaccttggattcac

SEQ ID NO: 93272 - DNA, 106 bp, Glycine max
aaccatcaagcttcaagaatccagattcttgaacgatcgagatcgagattcaagactcaactttccagaatgaagagaagactccgtccggaccaccgctgaaata

SEQ ID NO: 93273 - DNA, 383 bp, Glycine max
  unsure (1)..(383): unsure at all n locations
catgcaagctttaaataaagaaacaagaggtctcctctcttcagtnnaatcggacgaaggatagttagaagaaaaggttcttccactataatataaaatggtgatgaacctttaagaaatcgctaattctccttattcctccaaaaatgatattagaaatttaagtactttgcttgtcaattcagtttgcttctttgccaacttgatacttattatctggagtacttgtcattttctaattctcattatcttcaatggttatatgaaaatctatcaaatataactgagggagtgaagcttggacgaatgatcgggttcactcagaattatagcataaaaacagaatccccgctgtcaaataatatctcaaaatcctctcacta

SEQ ID NO: 93274 - DNA, 383 bp, Glycine max
acccccaacattattatgacgatgaaaatgaccaagatagtgatcctggataagataatatttcatttttttggaagacgtgtggtattttaacataatttattatggttgcgaattctttatgatctacatatggaatttgactaataatagggtcttcatttttttattatgatgcaaggaatgatttgtatggagccattgtgaaaaatcagaggttttatgagcctgtgattgtttcaaattgctttttctctagtaaaaatcattacttgctatgactgcatgatgggcttgttgggtctcttagacttgtgttctgtgaacattactttgagtacaactacatctagctattgtggtcattctagccacattgaagc

SEQ ID NO: 93275 - DNA, 368 bp, Glycine max
agctttccaaagttttctggtttttcaaaccttgaaaactgtgctattcatctttttcattcccttctccctttgccaaaaagaattcgctaaggactaacctcctgaattctttttgtgtctttcttctcccttttccaaaagaacaaaggactaaccgcctgaattcttttgtgtctcccttctcccttgtcaaacaattcaaaatgacacagtctaagaattcttttgattcttccctttcccatatacaacagatttcaaaggactaaccgcctgagaattcttttgtatccccattcacaaagtttcaaaggtttaaccgcttgagaactttgtcttaacacattggagggtacatcctttgt

SEQ ID NO: 93276 - DNA, 390 bp, Glycine max
  unsure (1)..(390): unsure at all n locations
ccttcttatgcctagccctataaatactcaaaaactcttaattttggaaaaattttgtagaattgaaattaagttgtgcttaaaaagaactttaacctcttctttggtttttgactaaaaaccaaattgattcttctcaaagaagctattcctttatggcaaatcctcctaccggttatcgattcttcatggattgtggcatcgntttgttcatcttcttcatcttttatatntttttgttcttgagttcttaaaaggccatcaatggtgttcaatttgcatccagaatgatccaaaccaagcattcatggcttggattgcatcattatcgtgtcaatgccgataataggaaaatcgtcccgttttgtgagttcatgacagtaatcataa

SEQ ID NO: 93277 - DNA, 342 bp, Glycine max
agcttgatcacataattggtatttttatgctctcttctattggatcgccttgcatgcttggctgcttcaacttcgcacacatgaataaagacttcggcacacgtgaagactgatgacaatcccccgtttttaagtctctgtccccaagatcttttcatagcatttgaagaataactattgtgccataccattagttcaaataatgagtggtagaataagaacaataggaaacaatgtttctttgtaattattaataacagatgagctacagtgccttttgaaataatgagtatgatactaccacagtaaaaaccactgagatcggcctatcagtgagagatt

SEQ ID NO: 93278 - DNA, 369 bp, Glycine max
agcttgcccagagaaggagttcactgatgaaatgcttaccacctcaaaagactggaaagcggtactcctctgtggcctccacataaggcatagaggatgggcagctcaccaagatgtctttctcgcctgacacgatgaccaaatgcccctccactacgaatttcaacttttggtggagtgtagagggcacaactcccactgagtggatccacgggtgccccaacagacagctgtagggggggttaatatccattatttggaaggtgacttgacaggtgtgagggcctatttgtactgggagatcgatctctcccctaacctcttggcgagtgtcgtcgaaagcacgaaccaccattgaactcggcttta

SEQ ID NO: 93279 - DNA, 353 bp, Glycine max
cttcatctctttccctggctgcatcaactgccggcatggatgatatcaccttaataagtacaaccccaaagctatacacatcactcttgtccgtgagcctgtagaattggaaatattgagggtcaagataccccacaaacccttgtggagctatggagacatggcttacatcattggggagcaatcttgatagcccaaaatctgctaccttaaccgaaacattaatgtcaagtacaatgttgttggtcttgacatcacggcggatgatgttagaaatatggagataggcccatgcaatagttgcctctatggcaatctgcattcgaataggccatgtcatgtgtgtgacattc

SEQ ID NO: 93280 - DNA, 377 bp, Glycine max
agcttcaagaattatggcctcattatattacttgtttcccgagggaaattctataaatagacctcccatctttaatggagtgggttactactactggaaaacccgcatgcaaatctttatagaggcaatagatttaaatatttgggaagccatagaacaaggaccttatgttccctctataatggccggaagtgcaacaatagaaaaacctagagcagattggactgaggaagaaagaagattagtacaatataatttaaaggccaaaaatattattacacctgccctaggaatagattaatactttagggtttcaaattataaaagtgctaaggatatgtgggatacactacaagtaacacatgaaggcacaacag

SEQ ID NO: 93281 - DNA, 434 bp, Glycine max
  unsure (1)..(434): unsure at all n locations
tcccgtaaccctctaaagcagatagagtccttctttcttctcacattcatgaacctaatggactccctctgctttctcgcagagtaggcttctcagccacaaccttagccacatgagaaaaagcattcgaatcacccaccgcaaaattcccgccattgttgctgtcttcttcgtcgccgaactcgtcatcttcttgggccatgtcggcccatgaaatcctctggctcggagtctccacattggagttattcacctccgccccgtccttccaactcccgagagaatgcgcgtcgcagatgtcgcagttatcctccacgtcgacgtncgtttggtcactggggatttcgttttgaggcgcttcacctgaaaccaaaggaacgaaatggtgtgagaaggaaaacgtttatacccagatggaaaaaacgagaatttcg

SEQ ID NO: 93282 - DNA, 379 bp, Glycine max
agcttttgggttgcgaaaaatatattttaacaaattattattacccaatggtccaaatataaatccaaaatgcaaacgcaaattgtagaaggctcataaacacaaaaaaaatttaagttttttgcagtgcgagaactcagtaaacaaaaataaagggagaacacccaaaaaaatgaaagcttttgtcttgcgaaaaatcataaaacccaaaaaaagtgagacatcggagaaggctcaggttcacaaaaaaattgaagcttttgtattgtgagaaacaaagaaacaaacaaaacatagtcagagaatcaaagaaaacaaacctgtatgaaataaaaatcgaagctttttgtagataaaaatcacagctgtagtgtcttct

SEQ ID NO: 93283 - DNA, 449 bp, Glycine max
  unsure (1)..(449): unsure at all n locations
tccagcttgtaaagaacttanaataaatctagaacaagcttgttcttcatcgntcgngtgtatgatatccagtccacatatgttgaaattgaggagaccttcaatcctattacgcaacgtggcgggcaaaagtgggcagttaactcgaatggtcattattgtcaatgcggaaggtattatgcgcttcactatccatgttcacacattatngcagcttgtggttacgtgagcatgaactactaccaatatatagatgttgtttacataaatgaacacatcttataaacctactccgcacaatggtggcctcttgggaatgaagcggctattcctccttctagtgacgcatggacactnatccctgacctaactacaattcgtgcgaaatgtcggccaaatcaccaaggataatgaatatgatggattgngacaaaccatcttgacaccga

SEQ ID NO: 93284 - DNA, 197 bp, Glycine max
cagcctaataatttgtttatcaattttattctttaaaatggcgagagcactcatgcagatagctatcacttctaatcccatcaaatgacacgcctcgagatattgttagcttttttttcttctattctccaatgaaaaccactaccgaatattttctacttatcaggatctttggtggccacctctccacagcaaca

SEQ ID NO: 93285 - DNA, 236 bp, Glycine max
catcttaaataacttatgaaagtctacactaatttaacttaagctttgtgctcagattcctctagtcggactagacttagaccaaacaacattattgtaacaacatatttaaaaccaaaacttaatccgcaaatgccttatttaagactaaggttcaatcctgcttcattcaagttctaaggtaacaatacattttccaatgctaaagcacctaactatgcacacaaatgggtgat

SEQ ID NO: 93286 - DNA, 367 bp, Glycine max
  unsure (1)..(367): unsure at all n locations
ctgcaagtatgcaagcttcttgcagataanagtgatttgttttctgatttttagagatacaaaagacttgtgggaaaacctttctatctcaccacttcatgacctgatatttccttttgcgttggagtggtgagccaatttatgcaaaatccttgtgttgatcattggaatgttgttatgcgtattcttatatacatcaaaagagctccaggtcaaggattactttatgaagacaaaggtaatacacaagtatctggttattgtgatgcagattgggctggctgtcctatggatatgagatccacatcctgatattgcgtctctattggagggaatgttatcccctgcaaaagttatattcaaactg

SEQ ID NO: 93287 - DNA, 324 bp, Glycine max
attgctgacacccactactaaccaattaatatatttagtacttcgctgggtaaagcaagtatatatgttggtccacacaaaaataattttacgccttgcatcataccatcatttgttattagtcgacaacccatcatgacatgcatgcgtattaaatgttgagcgcgactacacattgactgacttgactacacattctgaatgagacataaacacgaaacatgctcacgcgtgtctatttttttgtaacaaagttaagcattcgctcggtcacaaccctctatatatatatcagacacggctaatacattacacactatcttg

SEQ ID NO: 93288 - DNA, 364 bp, Glycine max
  unsure (1)..(364): unsure at all n locations
agcttcaacatcagaccacttccagtgngctggaactacttcacatggactggatggtgcctatgcaagttgaacgccttggaggaaagaggtatgcctatgtggttgtggatgatttctccagatttacctgggtcaactttatcagagaaaaatcagacacctttgaagtatttaaggagttgagtctaagacttcaaagagaaaaagactgtgtgatcaagagaatcaagagtgaccatggcagaaagtttgagaacagcacgtgtactgaatactgcacatttgaaggcatcactcatgagttctctgcagccattacaccacaacaaaatggcatagctgaaaggaaaaactggacttt

SEQ ID NO: 93289 - DNA, 357 bp, Glycine max
aactctcaaaggcccactctttttccactcataacaacacattcccagtttgcaaccctagggtaactctacatttcatctctaacaaggttccatgggcgatttcaacatacaaacatcacaaacatcatcacaaaaccttaaacagaatgggtatgtctaactcatccacacatggcaatttcaacaagctttcaacaaggttcttcacaaataactatcatgaagcagaaaactagcaagactacccatcatatctcccagagccccatacccacgaaatataagagagatagaagtccacccaaacctgaaggttcgaagttccactcgtagccacgcactttacgaccccga

SEQ ID NO: 93290 - DNA, 361 bp, Glycine max
agcttgagctggaggaaaaagactatcttttatagcttattctttttcgccacttcaccttcattccctatcctttcaccttttacacccttttgtatatttgagcccttcatgactatgaagggctaaacaatccactgttggggatcttcccaccaaactctcttgatgtaaaaactcttactatctatataatattactactagtttcattgttcttcctgtgttgatttccatgtatagatgtacttgggttgatcatccatttatatgttatgttaaggtttaagcattgggaaatgtggttaatccttataactaggaagatcatctaaaatgcttcattgctagggatagtgtg

SEQ ID NO: 93291 - DNA, 325 bp, Glycine max
tttttttatttatatacaaacctctattaataattttattaatgttttaccttattaaaagaatgttaaatcaatgcaaaagttcataatatatgatttatttattaataagaaacactagaagattatcgaacttgattagttttcaataaagctgctaaactcattaattttgataatattgctcacataaactaaaaaaaactgtattaacatataaaactacctaacaccacctaaattaaaatggtgatgaaattatttttctaaaaataactcacaatattttaatggaatcaattttatggagatcttaatttaacat

SEQ ID NO: 93292 - DNA, 378 bp, Glycine max
  unsure (1)..(378): unsure at all n locations
agcttcacgtgcacaacaatntattatatttaaaaattaaaaaagggtttttcttgttcacatcacttgtacaaatcagctgtattaatttttaagtgaactttcgtactgatcttctgcttaaatgataacaaaattgatgaattgatcatttaatagtagttttatgttgagtgtgtctcttctttttttctgtttgcctgggatccatttttgttgtataattctcaaattttactctatgaatcagttttttaacttcctcacttgtgtcttgcttaatctcttgggtttcggtttcagtttcttgagcagtatggggaagaaagcatgttggatataaaaggtgctgatgctaccaaagttgttcttgttatt

SEQ ID NO: 93293 - DNA, 101 bp, Glycine max
gatttttttccaaaatatcaacctgcttttggattggtattagcatgaattccagggcagattcacccttctcattcataagattataaatgaagcttgct

SEQ ID NO: 93294 - DNA, 343 bp, Glycine max
agcttgggaggattgatggggtacctcgtgtgagagaaaccaggatatgggctatttgggagtacgtgagctcaattggaggtgggcaacatgggatggtgggtttatgcgcgctttgtggatgtggaaaacttgttgtgcaccatcgaccgaccgccacctagtaccacatgtgatgggtaccccataattctacaagcttgagatgaggaagtgttgaagggtgaaacttcctgcttttattgttgaccacagagtggtacctggagatatgtcgtgggggtcacgagaccttggggaggtcatgtggggtgctattgtccaaaaccaacttgaccaattc

SEQ ID NO: 93295 - DNA, 297 bp, Glycine max
atctagaatcatcttacacacgagtataccactcaacgcttagtcttttttttctcgatatgttcaaagtgtcttgagagaattttctaactttacaaggatatatataaagatttttgtagaaataataatgaatgtgtttcgtgcaatattcttgtattcagtcttcaaaggctatagattatataggcttcatctttaagtattcattgtctcattacaggtagatattttcacttgatctctgtttgatgaatatgaccactgtgagcatttgattcttgcatcaaatgcatg

SEQ ID NO: 93296 - DNA, 358 bp, Glycine max
agcttgttacagccccccacgcatgctctgcatgttccacaaccacgacaaggttatgctcatgcatggctcaaaactgattaggctctttatagtgaggggagtgcactctatagtttgatttcgtcacgtttaacaattgagaaggcacttcctcctttgaaggagccacatgccttaaaacaacgcataaagacaaaccataggtttgctgggaaaggacacagggaacattacccttattaactcaatgacactttatgaagcagagaaatgaaggtcacctccaaacatgtcaatgccctcaccacttttgctagggacaagattaccaccaaacagatagagggcataatct

SEQ ID NO: 93297 - DNA, 384 bp, Glycine max
  unsure (1)..(384): unsure at all n locations
acctgcagcatgcaagctatgccacaanactttttcttgaaaccctcgcaaatactctgcttaattaatttcctgcttgaactgttcatagatctacatccatcccccgaccattttataatgattcacatagaacaatctatgactacaaaattatcaactcaatagagtgctatattagttatcttcgaagcattcacttataaagttacaattaactgctgctaacaaacttaaatctggtttggcttacaaacgagacaatcagaaattataaattttattttcactaatactaatactatctgaaaaaagaaattcttcgagcttcttctgcagaagctacttgcagacattatgtcacaagtttcttaatgctcctct

SEQ ID NO: 93298 - DNA, 331 bp, Glycine max
  unsure (1)..(331): unsure at all n locations
gagagaatcctagtcgngatttacgttttctggatctaaggcttctctatacagctagttcttcataatcatcccatcgtcctcctttcttaattggcatcgtccaacccatcggagtagtagaccccaccagattgctggcacaatcaatcacttgaaactcaagcagagacattgaggttgatgattagaatttttggatttttcatggagaatcgcggatctaatgtttcttcagaaaacaaagcctaatattcttttataaccaatctaaagacatcttgttaaaagaaacttgaattttttgtttctgtggaagtcccaacaaagc

SEQ ID NO: 93299 - DNA, 361 bp, Glycine max
agcttgcctctatgatgtccaggtttgacaaggcggccgaaggaactatttccgccccggagtacgacagtcaccgctttagaagcgttgtacaccaacagcgcttcgaagccatcaagggatggtcgtttctccgggagcgacgcgtccagctcagggacgacgagtatactaatttccaggaggaaatagggcgccggcggtgggcaccactggttactcccatggccaagtttgatccagaaatagtccttgagttttatgccaatgcttggccaacagaggagggcgtgcgtgacatgagatcctgggttaggggtcagtggatcccgttcgatgccgacgctatcaaccagtctct

SEQ ID NO: 93300 - DNA, 374 bp, Glycine max
agcttggaaccaaacgaaacactttttctgatactgctactgctactgctacagatggaagaaaactaacctataggtagctagcttgatagaatctgtcacttggaatttggttattagtccacgagagtccctctgttgatgctcagaattgaatattgaatatatttatatatacatctgaaaactcactagctaagttgtctgattaataatatcatttttcttcgcccgcatgcaaacaaattataaaagcaatgctgggccaaagataacaaaatgaaatttaaaagctacagtaaataaaactaatcacaacttttacttttttttttcttctttcattctttggatagaaaaaactctttgaaccg

SEQ ID NO: 93301 - DNA, 290 bp, Glycine max
tctcttcaactttttattctttaataatcaaaatctacttttgtaacctcaaaatttacaccagaatcataaaaaattatcttttttaagttttaaaacccatttatacaattaatcaacaaaaaacaacaattatgtatgagaactctaaagaaaatgtaagataattgctcacaaaataaagtgtgaaaaaatttatcagtaagacataatgtcccaatgaatgttgtgggaactctaaaggtgggttagatatttctatctaaataccccttttacttctttctcat

SEQ ID NO: 93302 - DNA, 374 bp, Glycine max
agtgccctcaatttagattctttataccctttttccaaaacggatgccctgacattgcttttgtctttatacttcatggaaattaagttctgaagaagagtacttttttctgccttatctctttttgcaaagcgttcttcaatttcagcaagtaattacactagttatatcatctctgcccctacagacctcaggagatcataagactcatgtgatttgagtgatcccacttctcatgaagtttcctttgttcagaggtatttgaatccatgggagaaaggggtttctcaatccttaatgcaagagtcaagaacaatttgcatgttctctttaccagaaccgaattcagattagcaaatgtagaaataacaact

SEQ ID NO: 93303 - DNA, 234 bp, Glycine max
  unsure (1)..(234): unsure at all n locations
ttcggcaacaaattaaaacgagtttttcaaagtagtcaaactcaagagctaaaaagacactcgagctaacacgtgctggcgtctgtgggccaatcaagccaagctcactangtaaaaataactatgtcctccttttcattgatgatttttcaagagaaacatgggtctatatcttaaataaaaaatcaaaagtctttttcgccttcaagaagttcacagctatagtggagaaat

SEQ ID NO: 93304 - DNA, 373 bp, Glycine max
gtatgtaattaaaaaacattttttctttatatggtagtatgatatgtaagaaaataaatgattttaatggggattgagttaagaaattgaaatttaaaattgtgtcgtgcattaataatgaaatgaaatctgaattaaataattaatataaataatcaaagatcaaattgtctcataatgagacacaacgatgacataaatttaaatttaaaattcaaaagtataccatacattaataatcataaaatcaaatcctaattaagtattttaatatgaaaaatagataataaaaaaatgtgttctaatgaaaatttaaaatgcagtaattttttttacaaccggtaatgagtaattttaaattttaaattctata

SEQ ID NO: 93305 - DNA, 347 bp, Glycine max
  unsure (1)..(347): unsure at all n locations
gatagatagattgatctcaaagattcttaaaagcaattagtccaacaatgtatagtcgattacaaagttgtagaatcaattattgattattagagaaagcaacaaaaatcactttacttttaaattnggccagaagcatcaaattaatagattacttggttcaggaatcgattacataagccagtttcaaaagaaggaaaactctatggctcgagataattgatttctgatgtgtagtaatcaattatattgcgtttgcaaactcaaggaactctctatgtgacaaaataattgattactaccattgataataaattattccagaacctagaagctcgggaagctcc

SEQ ID NO: 93306 - DNA, 335 bp, Glycine max
  unsure (1)..(335): unsure at all n locations
actttatttttctctcttaaatntatccttactattttatttggaaatatgattagttttaaattgaagatatgatttgtatcatgtttccgagtcatgcaagtgagaagcgtatacatccaaatttttcttgtataaatagaaaaataatgtttaagaaaattataaagaaaaaacactttattttttgttttgaaataatattattaataaagtattcaaatgtcaaaaatttctttattaatctttttaaataaatcacagntttattatttttctgtcattttatattttttagctatttcaacggttaattttatcgaatacttataatt

SEQ ID NO: 93307 - DNA, 360 bp, Glycine max
  unsure (1)..(360): unsure at all n locations
ttattaaactaatattagagatgattaaaaagaggatttaaatatttttatgattttggcttatataaggaaaaaaataaatagatgctaagagatgttttgagtgataataagaatgagcaagggttatgactcacttgtaccatttttttcccaatctccatcctaataaaattcctttcctagtttggtaggaacaatgatcacgatccattctagttgtgttgtccatgttcttcaactcttcaaagccctncagggtctctcaaattcctaaaagataagaataaaactgaagaatcatacttttatccaagatagagaccatatatatatatatatatatatatatatatatat

SEQ ID NO: 93308 - DNA, 375 bp, Glycine max
  unsure (1)..(375): unsure at all n locations
agcttcatggtgaatcaagatgttttcttagatgttttgatgataacaaaagatgatgacaaaggtgatgacaaaaagctcaaaggtcaatcaaagaataattcaagagttcaagatagaatcaagaagaattcaagactcaagaagaaagttaagagtcaagaatcaagattcaaggttcaagatctcaagaatcaagatcaagattcaagactcaagattcaagaatcaagaaaaggcttaatcaaaataagtataaaatgtttttctgaaaaattgagtagcacatgatttttctcaaaacatgtttaccaaggagtntttactctctggtaatcgattaccagattgttgtaatcgattaccagtaggaaa

SEQ ID NO: 93309 - DNA, 311 bp, Glycine max
atcctttcttatcttctactttagtgttaaaataaattcacttatgttatttcttacaactgctgtgaaggatcgggcaaatgagatatataatagggttgaagatcaaaagtctagtagaggaagaaatcaagatgctctattggctgcttgtctctacatcgcttgccgacaagaagacaaacctcgtactgtaaagggtactgcttatgattcttttaacatctggatgcttccctttatctttctgtatataaatgagcttccctgaacctatggatttcaactagataattgctctgttgccaatg

SEQ ID NO: 93310 - DNA, 373 bp, Glycine max
agctttgcaacatttgaagaagcttatctgaatcatatgactggattacattgtttgttacctacaaaaatcaaaatattaacaacatcattatctgtgaatcataacataattaacattcaatcaaaaaaatgtattatttacttttccaaatctatgaaggcgttgttttcaaagagaagcagctatagattccatggtttaggcttaggtactaacgtcaagaagaagttaaagaaggatgtatgagaatgagagaaagtgaggttgtgagttagtgtacccatgacggaaatgcaatgcatgcattgtatttatagaaaaaatctaatagtagcacaactcattcagtgatatcttagttgttgatttt

SEQ ID NO: 93311 - DNA, 353 bp, Glycine max
atccaaaaactgagttgtgaactggaggagagaaaggtaaaagagctgatgtaaaagagctgaggaaggggagctgaaatagatggtgcctcaaatccttcggccccagatttgtgagttccccgaagagtgaccgaagggtcatccaggttccaacaattctctctaatataaaccaaattaatggttgggcttaaggattcaaaggtcagagaatcagatgtgactccttgggccttgcataaagcagaaataagggctggagaacctagcctcaaggagtcatgttgcgcgatgagagacattaacctgagagatggatcccaagctcatattcatctgcatgacaagcc

SEQ ID NO: 93312 - DNA, 412 bp, Glycine max
  unsure (1)..(412): unsure at all n locations
ncaagctntggccaatttntgtcatttttatgtgtgtcaaattgagcccttggaagttgagagctctctttcactatnaatatatgggcgttacgaagttaagggctcttgtttnttgtgtaattaagtttacattaggggtagattatggtggtccctatatcaaggggcctgtcactttctcttctaaagtagttcaatctatattacttagtggaagttatttagcttagttagttagttaccttctttttgtaaaaaacagaattagttacttgttgtgcaaactttttcttttctctcaattgttcttcattcttcttcctcttttcacttttgttttacaattttattgaacataatttcgtggattctcctttggtaatgatcatggagggctaaacaattaatc

SEQ ID NO: 93313 - DNA, 271 bp, Glycine max
  unsure (1)..(271): unsure at all n locations
gcagatccgcagagaccaaagctggaagaggaagccgccctgagagcttgccatgagtttgtgagtgattgtgaagacctatangtggaggagacatacccactacttgtattactgcaatccttcattctcttctcttattcgttcaagaagcttcccagttatggaaagctgaatcctctattggaccttgcttggaagaacaagatgtaaaactctttatatctatataatgatgtagagagagggcactatgctttcaaaactacat

SEQ ID NO: 93314 - DNA, 368 bp, Glycine max
  unsure (1)..(368): unsure at all n locations
agcttntataatagacaataactttttgtgtgtgtgagttgattagaggttactgtacctatcatagagttgtcatcaattgtttatttttgtctcctacttgttatacgctaaacaaccaaagacttttagatttagaaaatcagggggttatttgtgtagaagttcaaaaggagttttgttccaattgatgggagatgggacacggtttattaagtgaacaatatgcttaacaaaacatgaacaaaaatgattgggaatatgtgattgaaacatgagtgctcttgacacattaagaatgtgttgatgtcatctctcaattctcccattttgttggggtgtggcaacacaactagttgatgcaaaat

SEQ ID NO: 93315 - DNA, 326 bp, Glycine max
ttttggaccattctcataaccttctacatcgactgagtgtctcttactcttctcggcgaccattcaatccattgacctcatgcttaacatgtagcaatgagatatgccagatgccccatctggcagttcatacttttctgtctcagatcacaaacagactggtcacatttgttcaactatatgcaacgcgagctcccttgagatgcttgacttgtctcacaataacttgacaggtaagccttctaaatgccttggaaccttttcttacctttcaggcttggatcttcgaagaaacgaccttattggaatgatacccataacatatc

SEQ ID NO: 93316 - DNA, 363 bp, Glycine max
agcttatgagaagtattgggacctttctcgggcagaggactccacggaggccattgcctccctcgcccaatattacgaccagcctttgaggtgcttcacctttggggacttccagataacacccacagtagaagagtttgaagagatcctgggatgccctctgggaggaaggaaaccatacctcttctcaagattctatccctccttagctagaatttctaagatcgtcaaaatctcgacacaggaattagactgtggaaagcaagtcgaaaatggggtggttggggtactgtcgcaacctacccttcgacgggagggcgacgcgtgactcacaggatgcgtgttccacgaaaggaatacgcg

SEQ ID NO: 93317 - DNA, 394 bp, Glycine max
  unsure (1)..(394): unsure at all n locations
ttagctngcgagtccaattgaaatggtttcgttctttttctatagncnatctaaaaaaaggttttggatgtaacacctattaaagaacattttcgaaaaaaaaatttatgatgagaagaagctcgtattgaagctgggattataggctcacaagattgattgttgtgtggatggttgcatgttgtaatgatggagcgcttacttaatgcttgtttcgtaacaagccctagtatcgtgcgaagactattggaacaatcattaaaaaaccagttccagtaaatgcaatgttctattttctttgtatacccacggtgcagaaaatatttgcattgatgcacattgcagccaatagacatgacactatgagaattgaagatattcagccatgttacgt

SEQ ID NO: 93318 - DNA, 368 bp, Glycine max
  unsure (1)..(368): unsure at all n locations
ncaagcttgggatatttataattcctttctccaatcaagaattgttatggttttgcggtatatttggaaaagacaaaacaaaaaactttggaatgaggtagatactactccaaacatcttaatctctctcactatgcaattcctccatgaatgaagtcatgctcaaaagacctctcaaccattaagagcaattcagacaattgatgcatactcatgatagacaaaaccacaaaagaagtaccgaaagatcaatatagatgcaacacttttcattgatgagaacaaagttggtattagtcactgtctacacagtgaggaaggaacattttttaaggcaaaaactatgcatgattcaggaagatcagaag

SEQ ID NO: 93319 - DNA, 440 bp, Glycine max
  unsure (1)..(440): unsure at all n locations
tgaagccacaaaattccatatgggtaagaataattgttttgtgtttgngataataattatgaaaggagttttttaacacaagcaatttgttgtaatttgtatcataatatatgtagctacttctcatgagaaaaatttatagaaagtttattttgattctatatttacttcaacttttttgacaatggccggattattatttcttaattgaataaggattttatgttgttgaatttgacaataatacatgtgttgaactatttatgggtttttattttatttacttgactacttagtactctcttttatatcaacattaatgtttattatgaatatggtgttttataactatgactcaatatgcatatttaaacgattaatcacatttcttagaaatttatattatgggaacttatattcttcatattcgtatcattggt

SEQ ID NO: 93320 - DNA, 366 bp, Glycine max
agcttgtacttctattattcatattcctatttcaaacatttgacataaatattgttaatggtacattgtaacgaacattatttattagttaataaataaaaaacctattaaaccaaatttacttacatcatccataactgtagaatggatatgttcaaacatttatcacctagaattatctcagttacatctacgtgtgtgatgaaaaagcaatctttgacattaggtatcccaaattttgccccatcccacgacaactcaattgacttttggtaaacatcaaacaagctcttaaccgattctctcaatggatcaactgtagccactgcttcatccatttcagtagatgcaaccggtttaggcaca

SEQ ID NO: 93321 - DNA, 434 bp, Glycine max
  unsure (1)..(434): unsure at all n locations
tctaatcctgcggatgcttggtgtttcctgtgtatttctacagtattagaagtatggatgaaagaattggttcctcccagaggtttgtgggtgttcatgacagtgctgggttcaatgagtggatagcagatatggaccttcacgaaattaaaagctttggcagtatatacacctggtgtagaccaaatggttctgcaaggagcagacttgatagatgtttggtatctgctcagtggataaataaatggcctgattcatctcaacatgtgcttaatagagattattctgaccattgtccaatcctcttgaaaactgacatgatggattgtggccccaggccttttcgagtcatggattgctggttgaaanataatcaatataaagctctggttaaacaagtgtggtgtggggaagtgcaatcctgctgggggagt

SEQ ID NO: 93322 - DNA, 282 bp, Glycine max
  unsure (1)..(282): unsure at all n locations
agcttggaaaacgttgtctcacctactctctaaccaaactgcnggctcagcgagcatacactagaagcaacattccggggcctatccccacgaagaaaacatattaatacgcaacgcccatgtatccttagggacctatgccattaacaatgccttcaaaaacctcaactgaaatgctgtgggctacgtcggcttccgcgaggcacagggaaccagatccccaacgggtgtagaaggagaccggcactggcacactatgtttggctgggcgaaccacacggg

SEQ ID NO: 93323 - DNA, 137 bp, Glycine max
acactggtgaccatgttgacataattgagagatgggacatgggcatgctcattgttagatacatataggcctactgccttctcattaaactctctactcaagaaaacaatcctaaaaacataccctaactgccccac

SEQ ID NO: 93324 - DNA, 380 bp, Glycine max
  unsure (1)..(380): unsure at all n locations
agcttnccgcatccgcacctggaaagttcttattacggccttccttaggcagtatcagtacaactttgacatggctcccgaccgaactcaattgcaaaacatgagtaaaccagaacacgagtcttttaaagaatacgctcaaggttggagggacctagcagcacaagtagcccctcccatggtcgagagagaaatggttactatgatggtggataccttgcctgttttctactacgagaagttagtgggctacatgccctccagcttcgcagacttggtattcgtcgaagaaaggatcgaggtgggctttaagagagggaagttcgattatgtctttctcacaggtaccaacgataggaggatccgagcaactggggcaa

SEQ ID NO: 93325 - DNA, 379 bp, Glycine max
  unsure (1)..(379): unsure at all n locations
tatcgattcgtgtgtgaaactcaacaaagatgatttaagggagattacagatgttgtaccaatatctgaggtggcaggagattagactactgatacattccgtagatgttcatggaagtttgctaatactccaccaaaagcataactatatatataccagttatgcaccttagagctagctcagatctctcttttaaaagatagaggactaaaaacataattatcccttatttttatttttattttatttggtggattgcattggaataacgccacaacaatttcaactgtaaatgtgagagactggtgaaattgaattttggtttaaggtgatnnttttaagtagatatactacttnctttttttcatctcgtataaa

SEQ ID NO: 93326 - DNA, 368 bp, Glycine max
agcttgcccagtgatcatttgattatcataatacagacctgatatgctcaactcctcatatgcagcccacattagaggatccattgagagtgcctgcttaaaattatgtatggcacttttccttctgttagtgtatctgaaaaagaaaataacacccaaagaaatttagaaaggtggatttatcaaatgtggcaagctatcatgacatacacacatacatacatacatatgtgttcacacacacatacacaaatatatggaattgactccagttacagcatccaatgtctttctatgaaatgtattttacattgattcaattgatgaaatacaaactatctatcatttttttgatgtcaaacttcgaa

SEQ ID NO: 93327 - DNA, 372 bp, Glycine max
  unsure (1)..(372): unsure at all n locations
gaactataatactcagcttctgcggctagcgtgcattagctcattcttctttatttgnctcttctcgcgctaagngcgctttttcctctcaacggatattcactaacttgcgcttaacaccattttcgcactaagcgagtgatgcaatcctccctatgaaaggaccagtcactaaaaccatgagcaagaggctccaagtggattgggctagagttgctgaagaaagccctacggttctcatgaaccttatggtagatttctgagcccatgggccatgggtgggtgcaattatctcttgacatattagattatgatgccattatatttggttcttttatttacggctccatatgtacgttggcaccctcaaat

SEQ ID NO: 93328 - DNA, 372 bp, Glycine max
  unsure (1)..(372): unsure at all n locations
agcttgaaccattgtcgatgatttctttagcaacgacatggtccatgcatctaattgacacatgtagagctttgttgtgccctctcccctcaacgggaatctcttcttccgcaaacgcgatatagttattggtagttatatgattaataatgccttcaaaaccctcgactgagatgttgtgtgctacgtgggcttcgttgaggcaaagggaacgagttccttaacgggtgcggatggagacgggacgtggcagactatgtttggttggggtaactcatggggggtcggatccttgaggggaaatagagggcctaaatgggcatctncttcatcatcttcttgcagaggatagtcggcatgaggagggagctg

SEQ ID NO: 93329 - DNA, 312 bp, Glycine max
  unsure (1)..(312): unsure at all n locations
tggagtcaacaccacttttaacatttctgatttaacttcttttgcaggtggagctgatattgaggaggagaaactaacagatttgaggtcaaatcctcttaaggggaaggggatgatgcaatcctccctatgaagaccaatcactagaatcatgagcaagaggctccaagaagattgggctagagctgctgaagaaggacctanggttctcatgaaccttatggtagatttctgagcccatgggccaaggttgggtccaattatctntgtacatattagactaggatgtcattatatttggtccttgtatat

SEQ ID NO: 93330 - DNA, 288 bp, Glycine max
gagaaaaaaaaaaaaagcaacgcaaaaaaaaaaaagagaaaagaaaagaaaaagaagaaaaggagagaggaaaaagaaaaagagaagggggggggggaaaagaagaaaaggagggaaaaaagggaagagaaaaagggaaggaagagagggaaaaaaggaaggggtaaaaagaaaaaaaaagagggaagggagaaaaaaaaaagaaaagaaaaagaaaaaaagagaaagagggaaaaaaaaaggaaaaagagagaggtaaagaagaagaaaaaaaagaagggagaaaaa

SEQ ID NO: 93331 - DNA, 253 bp, Glycine max
tttacactggcactataacatcaccaaggaatttaaatgagaaatctgtgcattttcaagggaaaaagacgctaatttttgaatagtcaaaaacaactaccgggctaaacttagtagggggggcaagcgcatatccacccatgaaagggctgatactgcgtgctttgcactgacgagaatctggcagcagtttaacatacaagacccgcactacacgcgagataagtgcgctaaacgcccaagagccttcacc

SEQ ID NO: 93332 - DNA, 258 bp, Glycine max
catttaccccccacctaagaggattgttggacaactaattatgttttctagacaatgagacaaacacaacagagcagacatcacacaaccgatacgcctgcgtgcaaaagtagagtacaaagttcactggaatacaagaacatactaacgaatggtcatgacaaacatgaaacaacatacgactgctgatgtttacaggtcacgagttaatgctatataacttcaccacgaaacacttttttatgtaacactagtact

SEQ ID NO: 93333 - DNA, 434 bp, Glycine max
  unsure (1)..(434): unsure at all n locations
gggaacggntacgaacccggaatgggtttatgcaaagacaacggcggcattggtagacaagtggcctcagatatcttaagaagggggggttgaattaagatattccaaactgtttcccctaattaaaaatctatttcactttttactcaagttatgaattcccttaatgacaatcttcttaaatattaattcaaatgaagcaacttgaatatgaatataaagcaataataaataaaggagattaagggaagagaaaatgcaaactcagttttatactggttcggccacacccttgtgcctacgtccagtccccaagcaacccgcttgagagttccactatcttgtaaattccttttacaagttctaaacacacaangacaatccttcctttgtgttagagatccttacaacaagaaactacagtctcttaatcc

SEQ ID NO: 93334 - DNA, 387 bp, Glycine max
  unsure (1)..(387): unsure at all n locations
ctcaatgcttgaatttgatggtgtcgcttttttgaatgatttaaggtttttttattttgttccaatatgtctccttttggatgacattgttgttgttcaatctatgctatatttcatgatttaatttacggttttattattttaatttatgcattttagaattttgcttatttatgttgaatttaatcacgtttaactatgatagcttgatgatgttaaaatctatcgaaattgttaaaattgtgcttgttagcttntgtattgttggacatatgacattngaaattaggttttatgctatggattgaacttcacctangagttttgttctttttgtgtgattcattttacattcnngtaatgacaatgaaaacaagtgattagagt

SEQ ID NO: 93335 - DNA, 393 bp, Glycine max
  unsure (1)..(393): unsure at all n locations
agctngagcaccatannccncatcttttccttcattgatgggtggagccttctctanggttgtatgattggtctatagtctccttccatcattttcttgtgcatgtagttggcagggctgattcctttaagatctaatatgtgccacccaattgcttccatgtgtcccttgaggacctttaccaacctattctcttcctctgctgttagctcactgtgatcaccacaggcttggtctcgctctcctccaagaacacatacttcaggtggttgggtaggatcttcaactccaccttggtcttctcggatggactcccactttttaattcttcanagctggtcccccttgcaggaatgttttcttcatgatctaagtcttccaagaaagtcctca

SEQ ID NO: 93336 - DNA, 308 bp, Glycine max
  unsure (1)..(308): unsure at all n locations
gaatactcgtgtgataaataacgcaacatacttaaaatatatgatagattaaaaaatataattctatattttgaattagaaaatgatatttctatataacataagttagacaccattcatataaaagctatgtacatttaatgtaaatattgacatctaaaagtcntttaataaaaaaatcaatgattataaaacaaataatcattccaatagatatgtcacatataaatgtactntaaagaaatataaatatggattaacatagtataaatagaaaagataatactctataaaatataatgttatat

SEQ ID NO: 93337 - DNA, 248 bp, Glycine max
  unsure (1)..(248): unsure at all n locations
aaaacctatcttcctcctcctggaccaaatatgggcaggggggggccaataaatttttctcccatcaaaaccttgattgcactgggaatctatacccatatcagctagaacttgacggtattcaaccatcctcgtcttgccttgatggtaaggaagcgttccaatcacacctgtcacaaacattnnttctcacatgcataacatcaattacatgtctaacgtcaagatcacaccaatactgaagatca

SEQ ID NO: 93338 - DNA, 372 bp, Glycine max
  unsure (1)..(372): unsure at all n locations
tatcgagacgttcgcacctcaccatacaagctctgagccaaatttaatgacaataacttttttctcggatgtccgattgtattccgtagtgtattgagacactcgaaattcagaatagaagctctgagcaaaatcaaatgacaataactttttactcagatgtccgaatgaatcccgtaatatatcgagacgctcgaaattcagaattgaagctctgagcaaaatctaacgacaataactttttactcagatggtccgatgtgtnccgtagtatatcgagacgcacgaaattcagaacagaagctctgagaaaaatgaaatgacaactactntttactcggatgtctgaatgaatctcgtaatatatcgaga

SEQ ID NO: 93339 - DNA, 413 bp, Glycine max
  unsure (1)..(413): unsure at all n locations
tcaagactgaaattgtctcctggtaaactcaaatctaaatggtctggaccatttaccatcaaggaagtcagaccatatggagcagtagaagctgtgtgatcctcaatcaaagactccagacagaanctgggtagtgaatggtcagaggttaaagctgtaccatggtggagacattgaaaggtcaaccaccgctctacacttgcaaaattcataaagtaggatgcgtcaagctaaagacgttaaacgagcgctngctgggaggcaacctagtcctttttaattctatgttcactacatttagtttgggaatacttgttgtgattggttgcattgaaaatggggttgatcaagcttctctggaagctgtgcatggaaacacttagaaaaattttntagtcatccactcgctcagt

SEQ ID NO: 93340 - DNA, 490 bp, Glycine max
  unsure (1)..(490): unsure at all n locations
agcttattgtataaacactctatgagtgattttattactatttgttncaaacatgtattatttctgaaagtcaagagtgacttantaacaaaaaatacttgggtcttaatctcagtgggagattaagtgtggtgttaggagtgacctatagagtactcattgtagtcagaagtggcatagagaatacttggttgtaataaaaaaattgattagtgaaacccttcaagtcttgagagagaactggatgtagcccaaaagttggggtgaaccaatataaaatatttgtattttcattattactcttatataactagatcttttctttaagtcacttatacactatcattatcaagtttggtgaacttattgtctaagcanctaagttttatccttcatactatntaacccttcttctagtgtgtntcaggtacttcatctcttttttttttacacacacacgcacacgcacncacacacacttacacacaaa

SEQ ID NO: 93341 - DNA, 308 bp, Glycine max
ttctagagtctaaaaccactttggaagctcttcttcttccatgctctctattttatttgtttcttctttttgttttgagtctctcatggtcatgagagactaacttacccattgttgggagcttggataccaaaatttggtatatacaaactccaaatccaagtaaagtttctgtggactcaacactcgatcttatcgtttgttactacttgtacaaattgatacgtttgtcaatgagttaacatggaagtagctgaaaaatataacatgatatatttaaacaggatgatgaagaaataaataaatat

SEQ ID NO: 93342 - DNA, 264 bp, Glycine max
  unsure (1)..(264): unsure at all n locations
tatttctaaatgcaagtccaggtcttgcttttatagactcttcaagtttggtcaagaaaaccattataagagttataaccctttaaaaaaatgaaaaccattggaagagtacatcttttgatttttgttcaaaacttgtcactggtgatcgattaccaaatccttataatcgattacacaaagcatttttgtggaaggatgtgacgtctcacaaatgaatttgaatttcaacattcaaacacactggntatcaattaccaatat

SEQ ID NO: 93343 - DNA, 355 bp, Glycine max
  unsure (1)..(355): unsure at all n locations
gaagcactggctttcaaccttctgaagggtattaataggggtagaatttgtgggttcctacttatgtgttgggcttattgggccttaaacccacctttgcttttgtacttgatctattagccaatcaatgagaaccaaatagaaatagaaatttgaccatttaccattacccaccaaaactgacagtagaatcattcatattaatctgaaaaagtggcgatattaccagtctggcaaaaacaattagcaatgagcttatcaagacagagntttgagcagattgcatgcgtttgacaagagcagcaatcangtctcgtatatgtacagncatctgtgatggtaaatgcaaaatcag

SEQ ID NO: 93344 - DNA, 344 bp, Glycine max
  unsure (1)..(344): unsure at all n locations
agaagaagatctttntctttcttggaagggaccaccaggtacggtactttcacaccttcattcacaactttttcactcctactcttctttgcaatcctattaatttttccctctttttcatttatatcgcttactatttctatttctttttcctggtccctcaatttcttaatcttgatcattatttggtcctctttttcttgattactttcacctcttacctcanttttctttccctcagtacttttcttgtcagcaagtttcttctcatgcacaacattatcctcatcctcaacctctacaaacactttactccttgtcatcacaaatttgcattccctctt

SEQ ID NO: 93345 - DNA, 378 bp, Glycine max
atagctatctgggggtcatagctcaagaaaaaatttctattgtccacatatgggatgaccattttgtatgtctacataactatctgtctatgaatatggtactttaagtgaaaatgttccatttactaattgtacataacatattctgatgcacggaaaatatgatatcctaaaagcatcgaatgccaagaaggtgatgtcattggtggccactacatggaggcaatttaagtcttccctaaccactaaatacatatatgctgacaatgagggtcaagataaacaagatccttctattaagtatggactagatccacacacttgagaggaattgcaggaagccaaaaactcataggtggtagctacatatggatgtct

SEQ ID NO: 93346 - DNA, 388 bp, Glycine max
  unsure (1)..(388): unsure at all n locations
ataccctgcttagattctaggagagcatatggttcaaggaaaaaattaccccanattttgggggagtaaagtcagttagaatgcaaagaaaaaggtaaagcatcagcacacacaacaaataagttgtatgtgtttaaaataacgaatagagaaaagaanagaaaanaaattgtgctgttacaataacgtcaaaagcaaattaaggggtaaagatagtgagaaagcaacttgtatgacacaagatcatttggataagtctaggatntatgctctcttagaatctaaacctctgaatcctagaagaaccaatgaatttctatagccaagcctcactacaagcctgagaaagtacttctgattttgttataccattttactttatggatga

SEQ ID NO: 93347 - DNA, 414 bp, Glycine max
  unsure (1)..(414): unsure at all n locations
cgtgcttgcgcacttagcgcaactctgaactggttatcgcgcattagtgaatattggcttagcgcgtgcttttctcactcaacggatggactgaagtggtgcgcttagcacgatgaaccttcgcttagtgcaaatgcattgctcatccttcttctacattcttcctcgcccttagcgaagcaatggtgcgctcagcagatggctcgctaagccagtagattggcttagcaagagggtgaaaatcaacacttcacaaacttgcctaattgacctcgaattgagagaanatgattattaaacacacacaattggaagtactaagtatttattacctatctctaacanaaagtaattacaacactacataataaccataaattggaggagtttgatacatttacacaagtttataca

SEQ ID NO: 93348 - DNA, 261 bp, Glycine max
  unsure (1)..(261): unsure at all n locations
cttataaaaccgcctttgttacaaatgttacgaagaaaccgcctttgtttgtaagcctattactatggtttttttataaaaaaanaaccgcctttgtctcatttataattattntatttcatgctttttagaactcatactggctgttcatctgccctctccctttacgctgctgtcgtgagctccgcttcaccctgtcgtgacctccgcaagctcttcattgataggggaatgaaagaacgcaaggaaggagagtggatc

SEQ ID NO: 93349 - DNA, 410 bp, Glycine max
  unsure (1)..(410): unsure at all n locations
catctgctttactgcttgtctgtctaattaagtaattaattcaaccaacaggacaaaatgtcattgaattgctctagaattacatacaggaaacacaatacaaccattgaaaaataaacttatgcctgtgggagaagaataaagagcaaagggaacacaattacaatattttaattactcttttataaattttagacttagtgaaatttagattacattaaactgcaaggtaaagaaagtggttacaatatttgactattaatccctattaattcatccaatgcatatattaaccctcttcataaatcttcaggatccacccattggagatcatagtgnggatgtatatgctgcactgcgcaatctatgacctgctattcggacacgatcatttctttatctatctgttg

SEQ ID NO: 93350 - DNA, 410 bp, Glycine max
  unsure (1)..(410): unsure at all n locations
caactgccaactggattaagtattcattatctttacattaacaaatttgtttgaatcactcaaactagttattcaaaacacttagatttaccttcatgaatgtgcatcttggtacactttgtagcctttgaacctttagaagcctcatctttgcacatacacacgcaagtgggccaatataaaatatatgagaagctcaaanaacacctgaaacatgaacagaaagatgtaatcatgttaagggttccaaaaatatataaagctancacataaaatttatatactttgggtatgtgaagagcctgctcaagatgctgaacttgaatcacttgtcattacaatgtcaccatctggatggaaagatgatagctcactatgcaggattatatctatctaccaagctataatgg

SEQ ID NO: 93351 - DNA, 195 bp, Glycine max
  unsure (1)..(195): unsure at all n locations
ccttctatactagctcacttttagatgaaagctgagctagctcacaccccttataatagcttagctcacccccatgccaaaatacatgaaaatacaaaaaaaatccctactacaaagaacactaaaaaataccctgaaatacaaggctaanaccctatattactagaatggccaaaatcttatggctctcactct

SEQ ID NO: 93352 - DNA, 211 bp, Glycine max
  unsure (1)..(211): unsure at all n locations
tcatgaaaagaaatcaagaagattctagattccagagaagtttgatttccagattccagagaagatgaattccagattcaagagaagaaattcagaagacttcacaagggaagtattgaaaagatttttcaaaaaacaaacatagcatangtttggttctcanaagagtttttctcaccaatttctaagttaccagagtttttactctctg

SEQ ID NO: 93353 - DNA, 353 bp, Glycine max
  unsure (1)..(353): unsure at all n locations
tacactttttggaacgttgatgaatgaaagtcttatgagacacacttcaatggtccacttctctcccttttttattccttcaatttcgtgttcccccccccccttctctatttcttttcctccattgaagcatcctcttcaagcttcttatccaaggcacattcttggtggtgaagcttcttcttgcatggcttattccctagtggatgtcgcctcctctcacctcttctnctttatcttccactgcatctncatggtggaaaatcaccattgaaggacctcattgaagctcanagatccagcctccatagaagccccacaagcaagctttcattataagggggcacattact

SEQ ID NO: 93354 - DNA, 306 bp, Glycine max
aactttataactgttcttttaactcctgtatgatgatgcatgatgcatatatgaaatgatatagactaagatgcaacacacaatacaacaatcaatacaaatgccactcaagagagttgggcctgtaaaagaaaaaacttttagagctcttcttgaagcttcaaggctaagtcttcatgtcgctccccctatctctaatagtaacctttggaaagaagccaacaactagaatgattgttgtcacgttcattgtagaaagttctcattgtcctataaagccatattggcataccatctttgaacaca

SEQ ID NO: 93355 - DNA, 382 bp, Glycine max
  unsure (1)..(382): unsure at all n locations
tgctcttccttgcgagccctcttggtttcttgttcaacgggtcttgcggtagctgcattttcttctcgtaacccagcacactttttccagacgtctgtagcgaccaacttgaattattctttggcaagtcttgcttttcctaaatcgatttttagagctaggacttcttcatcctcttccanagcttcgaagctctcctcattgataattttcaatttggagagtcaatctaaccctcgtgtacgaactttcagccattcatgataaccaccgatgatgccattacgaatgcccctaagttctttatctnttcttaacgggtctttccatgccttatggactctntgtataaccttgaaactntgcgcgccganatctctca

SEQ ID NO: 93356 - DNA, 389 bp, Glycine max
  unsure (1)..(389): unsure at all n locations
atgacttggaaaccattttttttgtttttatttttatctcaagaggaggaccacggcaagaaattactgccaccagagctgcgggagggttcacatgcttatgaatacctgctgtgaccaaaatctatagatagatggattaaggaaggtgatagctatacaacattattttcacacagctataaatgtcagaaaaaactataatgctnctcagggnctctacattgatgggaactggggtcaacagcctgaccgaaataagaatgaagctcttaatttcttccttcatacattctctgaagataagagttgtacacccacccttgatggggtttcctctcactccatcgatcacaatcaaagagagggactcactgcccgcttttctg

SEQ ID NO: 93357 - DNA, 377 bp, Glycine max
tcatgatgcccaccaccacataacgtgaaagggaatcaagcatgactatggcttctttggtttaacctaaccgctatggaactattgtatctgattcttccaatcaatcaaacaatcactatggtactaattaaaaggacgaccatgattgattatgagacaggccaactgtgacatgaccactaagaaagtatgtaagtgccttaatttccatttgagtgggacggacagtgacatatatctattacaggctcaacctatcgggtgggtgtgggcttaatgatatcgcataatcatataatcagagacttacgcaatagatttaccttgatatatcatgccttctaaatgtgatattaatgatggtcatcttgtgt

SEQ ID NO: 93358 - DNA, 403 bp, Glycine max
  unsure (1)..(403): unsure at all n locations
catgcaagcttccatcacatataacctcttatgtaggttccctgattttatcnanggngnnaaaanaggaaatattataataaactccccacacctatcgtgagctaccctgcggattcctcgtcatgtcacttgaagattcctttttgtccttgctcgttgattccactcaagcctctaccatgccaaaacgaaggagacttattatggaatttagaaagctagtgacagtgctctgggtcaaacacccacatcactacatgaaagagctgagagcatttctggttttacaaaggaacatcatttggaaattccgaccatgccaatgtgacccgggttcagtgtaggttacgataataacatgtatttcatgaaaggataacgtntacaaagtctctttctc

SEQ ID NO: 93359 - DNA, 425 bp, Glycine max
  unsure (1)..(425): unsure at all n locations
gagagtaaatgcttggaacaacatcgtatgatagaaactcacttggccaatcatttgtgcttttaaaatcttttctaagagtctatctaaaaccgatcttaattcttatcttgagatctttgcttttgcttgacatcttgcgttattcatcctcgaaatccatctgaatgtgtagaagcaagcttcatgatgttgaatcaagaatgattcaacgagttttgatgataacacagatgatgacacaaagcccaagagaatgagttcaagatngaatcaagaacacttcaagaatcacgaggagatctgatttgaagattcaagactcaagacaagactctatcaagataagtactatacaagttcttcaaaacattgagtagcacatgaattttctcacataaacctttaccacagagtcctactct

SEQ ID NO: 93360 - DNA, 419 bp, Glycine max
  unsure (1)..(419): unsure at all n locations
tgcagcttgacgattttttttttttaagttcacccgaacaacattttaaaatttttttctctctccgttattttttacgtggacactgtaaacacacaaggctttgtgaatattgtaattangaccgtgttgttcaagggagggcttgtcgaaaagacaagattactgctatctatttcaacattagcaatcaatgattttttggacaaatatcaagcaaattgagaacaaaattgttcaataaaagaggactttaatccttttttagtcttcattatttgtggcactatgcgttggacctaaataaaaagtttaattttagtatggcctaccaagattagtatcacatattcccattgacaataatgccactactcaattatttctctaatgcagntttcctttcatgcagggaccgg

SEQ ID NO: 93361 - DNA, 246 bp, Glycine max
tattacttatctaatagatgaaatgacatctacaaataactaatggaaaactcattttaactaattgagaatcttattcattctttctttttattatcttctttataagtgcttctagagaagcttacctccaaacagataaaaagatactataccaacatgggaaaaactaaaacctaacaaaccatggattggattatatcacatcgggtttgaaaaaactatgaaacacagcccataaaaaat

SEQ ID NO: 93362 - DNA, 174 bp, Glycine max
gcgcattgtttagaaatttttttttttctccacggagtggtacctacctagttagagatcacattacctaaatgtgaaaaacagttcacgtctcgataaaaacacaaatcttctgtggaacttcctaggatgcaataacaagagaaaagcctctagtgatgtgggcacttggct

SEQ ID NO: 93363 - DNA, 414 bp, Glycine max
  unsure (1)..(414): unsure at all n locations
cacttgttgtaactttgatgaatgagaagtctgtgagacacaaattanagttcaacttctcttcctttttcttccttcaatattgtgctcccccctctttctttctctccctctatcttttcctccattgaagcatcctctccaagctttttatccaaggctcatcttggtggcgaagctccttcttccatggcttattccttagtggatggcgcctcctctcacctcttctcctttgtcttccgctgcatctccatggtggaaaatcaccattgaaggacctcattttaagctcanagatccatcctccatagaagctccacaagcaagctttcatcaagtggtaatcagagcacaagagcttcaagtaggtgctccttaaacctncattgattttcagttntaccttctctt

SEQ ID NO: 93364 - DNA, 430 bp, Glycine max
  unsure (1)..(430): unsure at all n locations
agcntcctatacaaaaaaggtgtcttcacatttctttgttcttacacaagaacaaantctgccaccatagccataagaattctgattgacctgtctttcactacaggagagaaaacttcattgaagtcaattcccttcttttgagtgaatcctcgagcaacaaagtctagctttaaatctgtctggttcaactccttggatgccttctttcttcttgaagaaccatttgcagctgaccactctagaaccaggtggtttnnttaataattcccatgtatggttgtcatggagagacttaatctcttcattcatgacacttagccatttttctttctccttactagctaagacaacttaatagtttttgatcttcctccaaactcactagagctaccgagtaatgcttagatcacatatcatacctctagtg

SEQ ID NO: 93365 - DNA, 379 bp, Glycine max
ggataattcctttcatgtatcttaagctggtgagaagcataaggcactacctgtccccgttgcataagcactctcaccccaacccatcttggacgcattacaattcaccacaaaagattcactcggattaggtaacactaaaactggtgcagtggtctacctttccttaagggtacgaaaaactactctacattgtgcattccacacacaaactttacctttacgaataagcttattcaaaggtaaggctttcttaaaaaaccctcttgaatctaccgagtattctgttaaccaaaaaagctctaatttaacactgcttaagacttcccactcatactgctctccttgaagatcaccgtatcctccttaaaataagtgc

SEQ ID NO: 93366 - DNA, 344 bp, Glycine max
  unsure (1)..(344): unsure at all n locations
cagacccttgctacatgtggcacgaaaaaaattgttccaacaagagcaacaactatcttactggttctttcacatacgagacttggnatgggaaataacccaactttaagttaaaaaaacaataacttcttccccattgccacaagctcttgctatgcaaagtatggggagggatgttgtcgcaccttaccttgctatcaaagagctgttccgattcaaccataccacagtcaccagccaacttccgtgcccagctgcctcattaaaaaaaaaaaacaagaaataaaagatcctggggtgataaagaagttaagcgctctttttttttaatgtccaattttata

SEQ ID NO: 93367 - DNA, 348 bp, Glycine max
  unsure (1)..(348): unsure at all n locations
acattactctctaagcaagaanggcatataacctcctccataaaacaaacattaatgtaaaattatagcaaggctatgcgcatggtttcttacgaacgttcacttgcggaagacatctataaccgaaaaatgccccatatacaatcaaagcagctntgtgacctagattatttacacgtatttccaaggtgtatatgttacttacatcacacacatccccttggctaaattcacatacatgcatactcccagcatctttgggtacccataaattgcacatgtgcacatcttggtatttctaatacctatacatacaccaacctcatgatgaatcttgactatctacac

SEQ ID NO: 93368 - DNA, 368 bp, Glycine max
  unsure (1)..(368): unsure at all n locations
gcacaatgattggtacctccacaccttcatccacaatttttcacttctactcttctctgcaccntattaatgtttcttcttatcattttctatgtcttattctacatctttttcttcttcttggccttcaattctttattcttgaccattatttgttcctcattgtcttgattactttcacctgtcacctcatttctcttgcaatcagtacctttcttgtcagccagtttcttcttatgcacaacactatngtcataccctaatttcgtccggggattattacttgatgacatgcaacctttggttagccgctttgagattacatggcgtccttagttgcacagaagatgaagtctcgagacgtgtca

SEQ ID NO: 93369 - DNA, 342 bp, Glycine max
  unsure (1)..(342): unsure at all n locations
gcaaaaatggcatattacctccctccataaatacaaacatcaattgtaaattagagcaagcttatgcgcatattttcttaacaacgttctccgaagaaaatgcacccatatacaatcaaggcagcttcgttacctagaatatntacacgtacttccaacgtgtatttgttacttacatcacacacatctccttggctaaattcacatacatgcatacccaaagcgatttgtggtaccaaatactgcacatgtgcacatcttggtatctctaatacctatacatacacaaactttatgatgaatcttgctatctacacaataaggtggctacattcatgctct

SEQ ID NO: 93370 - DNA, 437 bp, Glycine max
gctttttctcacacccgaacgcccatggctactgttaattaatggaacatgctatcatggtcatgagtgttatgccctctctttcactccctacaatgattccacagcttttgaatgactgctatggtgcctctgtaccatggaagctacatacaggtgccggcctttcaaattccacatctaacgtgctaaacgttgctacgcataatatgcatgtcataccctacatacgcgtggggactgacattcattgatggttgtgattctcactacccaaaatgcatggtgtgacactagctccacacaaaatgaaggatcactcaatgttgtgatcaagaatgcgaaagataccaaaaggaggggcagaagggagtgtcattgagttactggccctactcgcccagctgcctctggctgctggccaaaaagactcatgt

SEQ ID NO: 93371 - DNA, 311 bp, Glycine max
  unsure (1)..(311): unsure at all n locations
atctaagtgctctgatcattcattancatattcatgatttggtggaatgctcaccactatttgtttctttatggaactcaccataactaaaaaagtgcaaaggcacccctataacacccgatccaaaagtaaaatggataacgaagagggagtgccagaacacatgaaggccgacatgttggccttaaaagatcagatggcttctatcacggaagccatgctaaaaattcaaaatcaatagaagaccatgctacngcagccgcttctgatacatctggggaagcggaactggtgctacagcctgcaatgaa

SEQ ID NO: 93372 - DNA, 306 bp, Glycine max
  unsure (1)..(306): unsure at all n locations
tctagaatatttcccttggaattaatgatgaaatctgtgcattttcaggtgaaaaaagagactaagtttgaattgccaaaaggagcagttgggctatgcacttattcaccgctaagcgcagcttcagagcacttagcacanaggagaatctggcagagcatcagtatcaaagccacgtgctaagcacgagatcagtgtgctaagcacagcaggtgccttcagccaaactaagcacgagactggcgctaagctcaattccatttactcgtgctaagcgcgaaagtggcgctaagcgcaacatcgcga

SEQ ID NO: 93373 - DNA, 384 bp, Glycine max
taagtatactaaattcaaatattattattattattattatatataaaggctacactgagaatatcagaatgaagactcgtctattcatacaatagaaaaataatcttacaaatattagtaataagatattgtgtcatatatatacttttatatacgggtctgtgatagaaaaacttcatctatggttctacgagccattaatgcaaaaacctcctttcattttctttcaagttgtgactttttattatgcatattatattaaatatatctggcatgttatatcaataaattaagcagatcaactaaatgcactataccttaaacaaactaaatacactactagatcatatttattattgagtgctgagaagaggagtatataat

SEQ ID NO: 93374 - DNA, 402 bp, Glycine max
  unsure (1)..(402): unsure at all n locations
gtatacgaaaacctagttggtgaggaagacaagatgtatagcccaactctcaattcagctgctccaaccatcctcaatgaggatgggtcctatatagagcacccagtagggtgattattcatggaacaatgtagattagtaaggagttctgaaattgaaatcaagtttaaagtgaaagaaggaataaacaacacatcagtaaggtaaaactggtcattaacatgtatagtgcctgctaaaattggttgaatttgacgtccatcangtaatttaacaaggataggtttgatatgtntaaggcattgaaactgagtttgggaaaaacanacatgatcagtagcttcactatcaagaactcaagagtttatgttggaactagaagcatgaagagtgcacagaata

SEQ ID NO: 93375 - DNA, 222 bp, Glycine max
attttacacaccatctgtattttctttcacggatcttgctgagaacactcacatataatgtagcaacaaagcgaaccctatccatacaattaaaattaatgagaaaagaataatactgaaaatgattacctggatgcaaccaggaaaagaaagagacgatgatatcggagcaccaagaaaatttgagacagccacacgatggaggaaaagaagagaatttta

SEQ ID NO: 93376 - DNA, 441 bp, Glycine max
gagaacccgcgacgtacctaaacatgcgaactcctggcagtcaaccaataaaagaacaaagtccaccaagcaaggaggcttgtgtggcggctggcccactatttgtcttgggtgttatctgaaaaataccctctggtaatcgattaccatcgtgggtaatcgattacacggtttaaaaatggagacaggatgttaagtagcttctagtaatcgattaccaattgtgtgtaatcgattaccaattgtgtgtaatcgattacacagtatgatagggcactagtaatcgattaccaagtgtgtgtaatcgattacatagtgctacctgctatgggtaatcaattaccatttatgtgtaatcgattacacagtgtaacttttagattcactgtacaaggctgtgaattcgattttggcactggtatcgacacatactttggtatc

SEQ ID NO: 93377 - DNA, 261 bp, Glycine max
tttatagaagacgattaagatagaaaattgcctctcataatgccagatgaaatcttcgagcatcttttagaggttccttctattgcacaaatcctctaaacttcttctaagtggataggggatggagttggacactgttttggtgtagaaaatggacgcttgccgagaggggagacatgagaaccttctaaggactcattgcctgaagatgatgaggcaacactctcctctgttctataaaagtgatagactagtctttgt

SEQ ID NO: 93378 - DNA, 285 bp, Glycine max
  unsure (1)..(285): unsure at all n locations
caggaagatacactctacctcctcacacacacgaaaataatagtagaaacatatactttcatatatatgaaatcaactgacagaaaaaaatgatcaacatgcaccttgcgaacacagatacaaaaccaagcttaattacctgaacagcacatgtcatggaagatgtcnctgagccagcagaaagcagtgttcttgtggcagcttgagagaagctagacttggtatgtgatgatgtgttcaacctgacggcatgattccttgaagaagttcataacaaggccatta

SEQ ID NO: 93379 - DNA, 426 bp, Glycine max
  unsure (1)..(426): unsure at all n locations
agggaaggactttgtgaatgttctatttagcttcttaacacttccttctggaaacatcgctatacaaatggaaaaacagtcaattgaagtttgatcactgagctcactttattgaagtgtggcaaatattgacaaagtttgtctgtccaaagaaatgctactgcaactcaagaactcatcaaaagcttatatgaataatctgaaggtgaacattgatgacattttgctcacagactcatttgtatgtaatgacttgctcaagtgtcgacacanaagccatgtcttatgaagaaccctcagaaatggaagatgcagatgtggaaatgtgttggctaaccaaattctcctaagagtgaaagttgtaatgtctatgatggtgatgggttctgtaagaagaatgtcacgtttattatcacagatgattcg

SEQ ID NO: 93380 - DNA, 425 bp, Glycine max
  unsure (1)..(425): unsure at all n locations
attttcagggttgagaaagaaaatgacaatggggcaatatggagcaaactcttacctcacacaagtctataacatcaatttaaacttgttcaaactggatctacacctaaaattccaccgaaccaaaatttgactcctcaacacccaaatttaccctagaaatggctctttgttcactttggtcatttgtttttctctctagcacagcccaaactttctcataagtcctgaatgacatttcaagctaggattaactcactctcacttcctataccactaaatccagatttggtcttccaactctcaaaacctcactctttttccactcataacaccatattctcactttctaaccctaggttaactctacccttcatctctaacaattggtcataagcgaattcagcacatanacatcacaagca

SEQ ID NO: 93381 - DNA, 335 bp, Glycine max
  unsure (1)..(335): unsure at all n locations
aaaagactatgtgtgcactacaaacccaaacatactcagcctccacctcttaatcaatgcacaataatgcccttaatgccaatccaacttagacaaagatgatcaactagccttcatatctaacaagataaaataaagatgtgaaggacgagaggcagatcaaactggaggggctcaatcaagaagcaatcttgagacagaaaggacaaaaagaagagcttcataatttgttacgagtgtcagaagcctaaacacttcangtctgaatatccatactacgatacgacgaacgactataagaatcacttcaagtcggcaggcataatggttctcat

SEQ ID NO: 93382 - DNA, 427 bp, Glycine max
  unsure (1)..(427): unsure at all n locations
cccgcggcatgcaagcnngcacccattctttcattcgagtttgntttnccnccagaacaacagcctgggggaggaatatgacggagggcccaaccgggcctgggtgctatttgcacccccattattactaaagacacaccccgccatttttggagattctcttttcgaaagttaccgaaacttaacaaactcgcgacgagacttgattaatttcataatgttctgaaacttgcgaaacaaaaacaccccttttcgattaacgaagggcggaacctcactattcgcaacaagatccatttgattccgagtgcacggaacccacgagtgtgataaaattttttgtttttgatgcccgaatcaaaatgcaaagagggggcagaccccaagacaaaaaagtgattttttacaaaggccgacaatatgataa

SEQ ID NO: 93383 - DNA, 353 bp, Glycine max
  unsure (1)..(353): unsure at all n locations
tatcatttcttgcactgaattggtgggagttgaaagccatcttcttcattcaaattctaacctcagcaagaagtatatcaccaanggcttcaccactggcagcatcaatcatactcttcttcatgttgctaagtccctcataaaaatattgaagaaggagttgcttaagaaatctgggtggtgaggacaaacttgcacatanatttcttgaatctttcgcagtactcatacaagctctctccactaagttgcctgatgcctgaaatgtcttttctgatggcagtggtcctagaggcagggaagaaattctccaagaacaccctcttaaggtcatcctagtngaaaatggacct

SEQ ID NO: 93384 - DNA, 255 bp, Glycine max
  unsure (1)..(255): unsure at all n locations
atggcatacaactgattccaacacanacatcaatttcaatttagggcangctcacatacatacntttatgatcatacatgcacgaagatgcttcgctacctaaaaactatattcatgcacattncaagcatcttgctacccaaattacatacatgcatttctttgctaaacttatacacatacatancttgaagtatttgctacccaaagatcatatacacgcatgcctttgctaaacangtacacacgcatatt

SEQ ID NO: 93385 - DNA, 480 bp, Glycine max
  unsure (1)..(480): unsure at all n locations
ctgcagctgaggatatggggacncatcacatgtggatctatgtggcggtcggtctatggtgcacaacanagtttncacatacacagatcgcgcataaacccgccatccnctgttgcccacctgcaactgagctcatgtacatccacgtagcccatatcctcatttttctcaacacacgggtgcgcatcaatcctctcaagctgtcccaacattcaagtaaaacaacattcaaacagcacatactattacagtcaagaaaacagagcanaggcagaaaactctgccaaaacaccaaccacaatcacagcttntctcactgaaagacaccagtaacaaatccttcgttcaatatgttacgcgtggatcgactcaaaatantactggatgctctagacataaccctacatttgaccgttggatctactacaacatcagaactatctgactacctgtcacaccagcaaagcatacatatctgac

SEQ ID NO: 93386 - DNA, 407 bp, Glycine max
  unsure (1)..(407): unsure at all n locations
attcactactaatctccttggacaatagttctccctaacaaagaacaatcaatctctatatgtttggttctttcattaaatactgtgatggaagcaatgcaaagagctgtctagttgtcaatataccaacttcattgttaacttcacaaaactgtaactcttgaagaagttgttggatccatattaactcacaagtggttatggccatagccctgtatttggttatgcattagatnagcaacaatgtntgnttcttgtcttcaagagataatattgtctccatgatatgtaatatcattgagaccagccaacaacatataataccatagataggatgtcttgtctatatacactactggatggatacaatttcaggacaactgagagtgtcgatactacacctactc

SEQ ID NO: 93387 - DNA, 406 bp, Glycine max
  unsure (1)..(406): unsure at all n locations
ttaattattctagatgtggtttcaactttctatctctcgcagatccctatctgaacactgatgcagggacaatgtccccttttgagcatggggaagtgttntgtttatatgatggcggtgaggtaaatagattactttgtctttnttntaatggtcatgggatgcaagttacttgtttcttctgaaattttattggattaagtntaatgacatggcatcaactattatcatgtgaattntcaatcttgtgaatggnttctggtattggaacatggtaactntctattcatgtcttattnttaantcttggtgagggtgacctngatcttganactatgaacgttcttggacctcanataactcgtgacataatatacaactgggaaatatatanggtgatatctgc

SEQ ID NO: 93388 - DNA, 376 bp, Glycine max
  unsure (1)..(376): unsure at all n locations
atctcagagtcacctgacgccgcaagctatgganagctcgacaggntctanacaattttctaatgtgatatctccagcaacgatatttgacctatgactagattcaacctatttctttggacttttctatgaatcctaaatggataatgatgtcataaaattaaggtaatgttttagttggaagtttaacataagaacattgtcttattactattaaacaacaataaatacctcatgggatacaagtttcacgtgatgtgttggccatgcaacanaactgtctagggtctgcctcacatattgaatcttggacgtcngaaatggaacttcagcattaccgtcataaactttngtaacactcaccatcaccacatca

SEQ ID NO: 93389 - DNA, 243 bp, Glycine max
  unsure (1)..(243): unsure at all n locations
ggagtacgacagtcaccgctttatgagcgttgtacaccagcagcgcttcgaagccatcaagaggatggtcgttctccgggagcgacgcgtccagctcagggacgacgagtatactgatttccaggaggaaataaggcgccggcggtgggcaccactggttactcccatggccaagtttgatccagagatagtccttgagntttatgccaatgcttggcaacagaggagggcgtgcgtgacatg

SEQ ID NO: 93390 - DNA, 380 bp, Glycine max
  unsure (1)..(380): unsure at all n locations
ctgcagcttcttgagaaacttcctgagaagcttagcttatctcacacacncctctcataactaagctcacctccttgagaagctttcttaagaagattcctaaagaagctagagcttagctacacatacctctctaatagctaagctcacctccttgagatgagaagctagaacttagctacacaccctctataataactaagctcacccccatgacaaagaacatgataatacaaataagaaagtctttactacaaagactactcaaaatgccccgaaatacaaggctaaaaccctatactattagaatggtcaaaatacaaggcccaaacgaaggataaacctattcttaatattacaaagataagcgggcttatact

SEQ ID NO: 93391 - DNA, 376 bp, Glycine max
  unsure (1)..(376): unsure at all n locations
ggccacccagctcgcccaggcgagctagggtgcttcctccagattcttctggcttctggagggattttctggaaggcccaagtgggcctggttgctatctgcacccccattattactaagtgcacccnctgcctttttgggtgantacttttccataacgttacgaaactttacgaattttgtaatgatgctcggtttctttccggaatgttacgaaaccttacggattacgtaatcatcccttntttgccttccggagcgttacggaactttatggattgcancactaacacttcttttaatttccggcatgtcacggaacttcacggattgtgctacaatgctttcttttgacttcctgcatatcacgaaactt

SEQ ID NO: 93392 - DNA, 375 bp, Glycine max
  unsure (1)..(375): unsure at all n locations
cgactcgctcctgagacaanaagtagatcgtaatgagctccattattctatacggttagcattgttaaatgactgaaatacaatatgctgatcaagttctctatcggcatgcgttaaggatcgctgattgatggttttttgtatatcaacccgcgcctcgaagtatattataaaatcgatcgagtggataattcgctctctcaaagcaaccttctcgcttatgaagttatttttgtataaccaaacatgtgttaaagctattctatctgagtggcttttggatagaccttttatcttttttgctgaatngncgcctggatagtcctaagcatacgcctatgacactttagtgtatgtcaaatataaactctaaaa

SEQ ID NO: 93393 - DNA, 428 bp, Glycine max
  unsure (1)..(428): unsure at all n locations
agctgagcaccttttnctcacttctttcttcatagatgtggtgagccttctctaggggtggatgaatgggctatagtctccttccatcattatcttgggcatgtagttggcagggctgattcctttaagatctaatatgtgccacccaattgcttccatgtgttccttgaggacctttaccaacctattctcttcctctgctgttagctcactgtgatcaccacaggcttggtctcgctctcctccaagaacacatactttatgtgtgtgggtaggatcttcaactccaccttgggcttctcggatggactcccactctataattcttcaaagctggtcccccttgcaggaatgtnttcttcatgatctaagtcttccaagaaagtcctcagatcctttttcttcttaatagttagataatccacaac

SEQ ID NO: 93394 - DNA, 320 bp, Glycine max
gatcatcctactatgacgactgagaaaactggggcaaataaagagggtgatgatgaaggagaaacccatgctgtgactgccattcctgtacggccaagattcccaccaacccaacaatatctttactcagccaataacaaactttcttcttacccaccacccagttatccacataaggcatccctaaatctaccaccaagtctgtctaccgcactttcaatgacgaacaccacctttatctacaaccagataacaccaaccaagaagtgaatttgcagcgagaagcctgttaattcaccccagtccagtgtctatgctac

SEQ ID NO: 93395 - DNA, 381 bp, Glycine max
  unsure (1)..(381): unsure at all n locations
acatagaacatcataagatgaatcatagttgatggagagagagagaaagagagacaatgtatcgagaatttattgtcgcaagtcacaaaaatgaactataagctcttttacaatgatgttacaagctcttatgtagaaagatgaaatcgcattatgttttttatgctcaaatgaatttcattggagcagagaaacatttcactacaacgaatttacaatattcacaaaggacttctncactgaatcttcatggttctattcctgctcgttgggtgagagatgactactgtacaagttctactaacttaaaacggtggcaatctcacaattcacttgcactagcctcttcatgtgcactatacattatgattacataccgat

SEQ ID NO: 93396 - DNA, 359 bp, Glycine max
atataacctaagatttattttttacctcagcaccgagatgacctgtgagtcattgagggaaaaaagaactactgatgcccccataaaattttacttaggggtggtccacagataaatgaacacacgttgaaaaaaggcattctggtcatccttattaggttggcagcatagcatactactagcgaactacatgagaatctatgctcacattggggggtcctacacatggatattgtggtactgtggcaccttaagtaagcctacttatggaaagcaaaggttgagtccaagtcacgtcccctgcactcacaatacttcttgctttcattaggagaatcttgccttcaaatcagaagtag

SEQ ID NO: 93397 - DNA, 266 bp, Glycine max
  unsure (1)..(266): unsure at all n locations
tattcaagctcgccagactgctatacatggattctggtattgtgccattctagttattatgatagatgtcaagggttgtcaagttatggtactcaagtatgaaactaggcaatccgccagtgaagacattgagatctaaagcaagatgagttaaggcaaggcattccanaaacatattcttacatgcgaatccaactaccgaatagttcagccaggttntgttgatattaggcatagaggtaaatgtaatatatgaaaaatataac

SEQ ID NO: 93398 - DNA, 417 bp, Glycine max
  unsure (1)..(417): unsure at all n locations
aagctngacgggccgtttaacttctactaagcacatgagcttgctttattttgttcgctaagcgcaacactcatgggctaagcacgaggaagactctggaagaagattatctgttcaggttagctaagcgcaccgcatcatctcactgagcgcaccacttctgttcatccggtaagcgagaaatgcacgcgcctagccaaaatgcattgatgtgcgctgagcaggccataattgtcctaagcgcacgagcatgaacaatggccaccatttaaacctgcaatcagattttagacggagttgggctggattacatcttgcatatcaagatgcttaagacaacgccagttccaaagtatagagatttgtgttaagatctcgaacttagctgatccgacttgtgaagctagataattagat

SEQ ID NO: 93399 - DNA, 306 bp, Glycine max
cacatcatggtgacagcgcccgcagcacatcgaagcaatcctcttcgagtgcattcactgagctagtaccattatcatgaacaggtactgtatcttacccttcactatgttcacttgcaccaccacccccacacaaccattagtgttaatcctctcttagtcatcaagattaaatgtgtattggcgtttagtagaatataactaatcattactcacactcatacatttggtatatctaaatcactagactttgtaactcgaattgttaattaactactataacatatatcatatggcatatcatcg

SEQ ID NO: 93400 - DNA, 167 bp, Glycine max
gtgatttcgattatctgcacttttatgcacgaaattgctgttgaaatgtgcaacagaaattagtgcttgtgcagaaaatgcttatgcattgctcgttgtggaaagggttgtacatattgacgtctggacatttttagcatacccaacggcataatgtatatttatgt

SEQ ID NO: 93401 - DNA, 262 bp, Glycine max
  unsure (1)..(262): unsure at all n locations
ctaagctcaacctatcgctctacagnnttannattggagccaatttatctttgtgttggactcttaacaattatgatagccgccgatgattccattactcgcttcacctaagctaattggactgttttcacgccgcatcccatgtcttgcgaactccttggaatacactcgtgtttggggcactgcaacctcgtgcgatgaaatgcgtgtggctctcgactgagtggactcctctcatgggacatccagtgcatgaagatag

SEQ ID NO: 93402 - DNA, 285 bp, Glycine max
taatgactatggcatcatttctggcgctaaactgctgggagttggaggccatcctttcaatataatttctggcttcatcaagagtcatgtatccaagggctccaccactggcagcatctatcatacttctctccatattactgagtccttcataaaaatattggagaagaagcctgtctgaaatctgactgtggtggcaactggcacataagttcttaaatctctccaagtcttatacaagctctctccactgagttgtctaatacctgagatattcttcttgat

SEQ ID NO: 93403 - DNA, 340 bp, Glycine max
  unsure (1)..(340): unsure at all n locations
tttttttgtttaagggtagcatttcttggtaaaactaactttccaaatggttgccttcgcangaaatggccctgaggaagctcgcctcaaagatgtccaggaaggacaaggcggccgaaagaactagttccgcttctgagtatgacagtcaccgctntaggagcgctgtacaccagcagcgctgcgaggccatcaagggatggtcgcttctccgagagcgacgcgtccaactcatggacgacgagtatactgatttccaagaggaaatagggcgccggcggtggacatcactggttactcccatggccaagttcgatccacaaatagtccttgagtttat

SEQ ID NO: 93404 - DNA, 333 bp, Glycine max
  unsure (1)..(333): unsure at all n locations
gatgaatgcaaaaactggggcanatgaagagagtgagaatgaaggagaaacccatgctgtgactaccagtcttatacgaccaagtttcccactaacccaacaatgtcattactcatccaataacaacccttctccttacccaccacccagttatccacagaggccatccctaaatcaaccacaaaaccctcctaccacacaaccaatgctaaacaccacctttagcacgaaccacaacaccaaccaaggaagggaatttgcagcaaaaagcctatagaattcaccccaattctggtgtcctatngctaacttgctccttatctacttgatact

SEQ ID NO: 93405 - DNA, 225 bp, Glycine max
  unsure (1)..(225): unsure at all n locations
gaatgacnaaatcctgggataaaggagtgttgccatactttcaaagcccatactaaggcatacaactccttatcataaggtgaatagttaagggtaggaccacttacaatttcactaacataagcaattggatgaccctctngcatcaacacagccccaatcccaacattagaagcatcacactcaacttcacaagattattgaaagtttggcaacgcaagtatg

SEQ ID NO: 93406 - DNA, 253 bp, Glycine max
agtgcgtgagcctcaattagaggtgtgcaactgtggatggtgtgcttatgcctgacttgtggaaatgggagagatgatttgcaccattgcccgatcgctacctagtaccacatacgacgggtgttccataatccaataagcttgatgtgagaaaatggggaagagtcagtcttcctactttttgttgttgaccatagagtggtacctagagatatgtcgcggcggtcaggagacctttgggatgtcacgtggg

SEQ ID NO: 93407 - DNA, 403 bp, Glycine max
  unsure (1)..(403): unsure at all n locations
agccttcacctttggtcctcctcatagntgttgcatgagtaaacatgctctatntncatctcccactccaagtaggccttcggatcanttctttcctttaagggaggaatgttgagtntaataccatcaattcggttttgtctaagaacaccatcattccctcttctcctcctttcttcttcattatgagctctattcttcatttgatccaacttctcatggagcacatcatctcggtgtntcattaacctctccanatgtngcatcanagctgacattnggaattacgaaagccccactccatcattaggatntgttcctgccatctcaaacanacaaatcaaacgtaacaagacnaatatagntgttgtttgaatacctcacccactcaagtgtatcacac

SEQ ID NO: 93408 - DNA, 247 bp, Glycine max
  unsure (1)..(247): unsure at all n locations
tggatcaatgtatataccacaaggttagtgggagtaaaatatattntcttggtttatatgtagatgatattttacttgtagtcaatgatcanggtttgctacatgaggtgaaacaatttctctctaaaattttgacatgaaggatatgggtgatgcatcttatgtcattggcattaagattcatagagatagacctcgaggtatttatgtctatcatangagacctatattaacaaaatttagagag

SEQ ID NO: 93409 - DNA, 311 bp, Glycine max
cacgcgtctcacgtcttctggtatggtatctgccaggtatattttggcgtaattcaagggatggtccaaggcctgtcgaatggacttggatatcttgttgcggaccctgttggagtcaaaccgataaatcttcatcttaaggtaaaagaaggtggaattgatgctggagaagagtactggagcgtcgtcatgggcggagaggaagtggaatgctacgttctcggtgcatgtcgaatggtgaagcatggagaacaccgtggccatggtgctgcggaggtagttggtgtccacggtcatggctacattaatgg

SEQ ID NO: 93410 - DNA, 368 bp, Glycine max
  unsure (1)..(368): unsure at all n locations
actcagctatatatgcctattccgacacgatcttggattnttttnctcctcaanacaatttattatttatatatttaactganaagtgtaaaagcaactacttagccgtagaaaagatatagtggcgagtggccacagaatttcacggcatctnccatagagtttatgctttgcccttcgttaccaacggaacacaacaacatgaaacagacgataaaggtcgtcgtcgttcgttggtatgccataatgtagacacccatgttgtttcattgccacgtcacattaattcctcattgattacagtgattaggatttactcttacttacgtagttaacgttacaacccanagaagttcctctctctttat

SEQ ID NO: 93411 - DNA, 292 bp, Glycine max
  unsure (1)..(292): unsure at all n locations
gctcctgagnatgacagtcaccgctttaggagcgcagtacaccagcagcgcttctaggccatcaagggatggtcgtttctccttgagcgacgcgtccagctcatagacgacgagtatactgatttcctggatgagatatggcgccggcggtggacatcactggttactctcatggtcaatgttgatacaggagaagttctcgaattttatgcaatgcttggccaacagaggagggcgtgcgtgacatgacggcctgcgtaatgggtcagtggatcctcgtcgatgcagatgc

SEQ ID NO: 93412 - DNA, 404 bp, Glycine max
  unsure (1)..(404): unsure at all n locations
atgaaaattgggacatgcttgtgagagattctacttgaatttggctgccccatgaagggtactttgcacctatgtagcatggaaaataaatttcaatggtatgtaaatatgtgtataaatataagtagcatggaaaacacctttcaatggtgtggatatatgtgaatatatggcataaaattccttgcgaggtgtgaatgagtagcagaaaaatgtctttcaacatatgcataattgaggaaaggtagcattatgagccttttataaaatgtactcatgtcaaanaagggcctaggacacttcctaaatgaatatatgatggcatggaattttcctttcaaatgcaagtatgtgcatgatgtaaactagcgtcccaatgtgcatactaataatgtgagtgaaac

SEQ ID NO: 93413 - DNA, 219 bp, Glycine max
  unsure (1)..(219): unsure at all n locations
atgcatntacacttgtaaatcattattacactgatttttatgagacttttatgattattatactgaatgtgacgtttaagatagntacatgtaanaatcaacacactatctaccacatattatgaattgtgagatattatactgncgcattattcttctgataggattggtatactcattattgtgaaacaaatgaatatttatatgttactctgttta

SEQ ID NO: 93414 - DNA, 233 bp, Glycine max
  unsure (1)..(233): unsure at all n locations
atcaacacacgtgcatataactntatcacatatttaaagaactatgttnggtctgattttctcaccgcaattgagaatacgtaggagcaaaaactccgcttttgtcgaccctcaaaagggagagattggtaaaggtcgaacgccttaacatttctcttcttccataaaaatcaagagatcattaaaggtccgacgccttaatgattctcttctttaaaatcaagagatagtaa

SEQ ID NO: 93415 - DNA, 396 bp, Glycine max
  unsure (1)..(396): unsure at all n locations
gcttctcgggccattctgcaaggcaaacattgttaagtagtttacattatatataacaatcattacaaacaagggccaaacaacacttctcatggcacgagtgtcaacatgcactttataaaataatcatattgtggtcgtgctattntatgacacatacgtatttgcacacataannaatttgtgtgaaacaatttacaacacctatccatgtacatanttttttgacaaacctnttcaatgctacatcctatatatatacacacnattnntttggaanggcttctnnnttgtacctactcacaaatacaccatantntngannaaaacactnttacnngctacccatccaacactnttgtaaggcacttcatgctatatatattcatattatgc

SEQ ID NO: 93416 - DNA, 294 bp, Glycine max
  unsure (1)..(294): unsure at all n locations
ctaagctataacaccacagntgccctcaatcattccaatatgcatgtgtattattcttatctacaagaatcaagccaaggctattggtgcagcaatcaatggggcanaacacaccacatgattatgatgatggatggctcaaattctcacaaagggaaaatcatcactttcaaattgagctttcgaaactatcatgacatgtagagaagaatcaagggattcaagtcacaaaatgtcaagaactcttattttcaaaacaattacccatttcttgaacatatnctataattcaaa

SEQ ID NO: 93417 - DNA, 307 bp, Glycine max
tagatgtggagaggtaggagccttcgtatagagacacacaactcccaccgcatatagaatatctgaccttgtattggctagataccttatactccccacaagactcttgaagatcgtggagtctaccttctgtccttcatcaaactttgataacttcaacccacctttcataggcgtgttcacaggatagcaatcaagcatattaatattcttcaacacttcttttgtgacctttcttgtgagacaaagataccatactccgtttgcttcactttcattctccagtaatatgacataagtcccatat

SEQ ID NO: 93418 - DNA, 127 bp, Glycine max
ggcggcatagagatatagcccccgaattcatttgtcattaatcaaaatccattgtggatgaattggaatgtgaggtgttataggctgatcaaacctttacacctctttttcacatgaacaagggcct

SEQ ID NO: 93419 - DNA, 395 bp, Glycine max
  unsure (1)..(395): unsure at all n locations
tctgatcatcatgctntgataaatgcaataaaaatatactagggctaatgaagagggcgagaatgaatgataggaccatgctgtgactgccattcctatacagccaatgtttccaccaacccaactatgtcattactcagccaataaacacaccttctacttactcaccgctcagatatccacaaaggccatcccttaaatcaaccacaatgtctacctaccgcagcttcaatgacaaacaccatctgtagcgtataccataacaccaaccaagatatgaattttgcagcgagagagccctagaattcactccaatccagtgtgctatgctgacttgctccatatctacttgaaattcaatggaggcatatacctaaccagggtcatcacactca

SEQ ID NO: 93420 - DNA, 406 bp, Glycine max
tgagaagcgaaatttataacgaggttaatttgaagcaaactctcacctcacacaagtgcataacatcaatctaaacttgctcaaactgaatttacacctaaaatttcaccggatcacaatttgactcctcaacacccaattttgccctaaaaatggctcttggttcactttgggcatttggttttctctctaactcagcctaacctttcttacatgttctaaatgacatttcaagcctggattaacccattttaacccttctttaccacagaatccagaattagcctctccaactctcaagccttactctttttcactcatacaccacattcttactttctaccctatgttattctaccttatctctacaggttcatcagcattcagctttaacatacaacatata

SEQ ID NO: 93421 - DNA, 232 bp, Glycine max
  unsure (1)..(232): unsure at all n locations
gcttaaccaatcgctctacagtcttagatgtgtatgccattctatccttgngtccggactctcagccacttatgatagccaccgatgatcccattactgcttccnctaagctctctgttctttcttcacgccgcatcccatgccttgcaaactccttggagtaccctcgcgttgtggtcactacaaccacatgcgatgaaaggcgtgatgctttcgtctaatggcgctcctc

SEQ ID NO: 93422 - DNA, 386 bp, Glycine max
  unsure (1)..(386): unsure at all n locations
tcgcctgaatcgggcatccgaattanaacttatgaccattntaatttctcgagagcttccgttggtcaatttcgagcgtctcgatatatgattcgcctcaatcggacatccgagttaaaagatatgaccattttaatttcccgagagcttccggtgttcaatttcgagcgtctcgatatattaagcgcttgaatatgacctccgtgtgaaaagttatgaccatttgaatttttcgagagctttcgttggtcaatttcgagcgtctcgatgtgtgatacacctgaatcggacatccgagtgataagttatgactantttataatctcgagagctctcattgatcatttcgagcgtctcgatatatgattcgcctgaatcggacatct

SEQ ID NO: 93423 - DNA, 265 bp, Glycine max
  unsure (1)..(265): unsure at all n locations
atggatacaatgtgcttgtntcgattangcgtagatggcctaatacgggcctaagtggaggggtgagaagcctctatttntctagatatcgcgatgagcgcgctaagcgccttgctgcactaagcgagatcatcgtntctgttgaacatctggattgacagatgaacatgctaatcacggccctgtctcgctaagtgcgctcatcttctctgattgaaatttaattgcttatgaagtcgcttagcgcgactatgcattaagcgag

SEQ ID NO: 93424 - DNA, 451 bp, Glycine max
actcagctcgattcctttagtagggaatctatccttcctaagatggagctctacccagttatcctcattaagaactagctactttcttcctctattgcctttagcagaatacacgccttgattggctctctatttggttcttaaccctcttatgcaacttctttacaaattctgacctacattccccttctttatgtataaaacaagtgtccagtgggaggggaatgaggtctaaccgcgttaggggattgaactcatatatcacctcaaaggcgactgcttggtggtctataacccccctattgatgcaattctactaggaagtactcatcccagactatggtgctttcaaagaccctaaaggtggtaagactatcctccttgttgcatagttgggtgacaggtaagaaaaattattctactaccatggttttaaatgtaagactacatt

SEQ ID NO: 93425 - DNA, 380 bp, Glycine max
  unsure (1)..(380): unsure at all n locations
tgccacatcagatggttatatactgtatcatattatggagatcgngatatggcattgtaagtgatattcttggccaaagtggatttgattgggatggcactaagcacatgatcacagttgagaatgaatatgcntggaatgaatattgcattcgcagtattctataatatgttgctatttgtatacacagtagattggatttgactttttcattttttccagtcgcataaattgactataccgtttcgagtcaagatgcttcataactggaatgatatatcggatatgtgtgttaaagataaagccattggtcatggagcatacactgctatggatgctgatgaagcgatgagtagggaaacacatgaagtgtattcatg

SEQ ID NO: 93426 - DNA, 292 bp, Glycine max
  unsure (1)..(292): unsure at all n locations
tctcagctggcaatanatactccgctttatcttagctgctttttgtgggctcgcctttgcacgggaagccggaaggtccatatcaccttcttaatngtacacatggtgcactgcgcccccaaatgcgcgagtaagaagagataattttccgggctctcgtgtccgtaaaatgcattcatatcatgcatcgcataagcatctcttcataacatcataatggacatatcctgcatttgtcggtatcatattccagcctcacattntgcatgagtcattgcatcatcatgcatat

SEQ ID NO: 93427 - DNA, 351 bp, Glycine max
  unsure (1)..(351): unsure at all n locations
ctctgagtcacctgacgcatgcaagcttatgggagagtnggttcacgacatgttataacctcttatacttactatncattgccttcacctaacaacttaagcttttgagagagttgtctanactttcatttcatctccaagtttgagtaacaatatagtcagattccttagttgatattattcgtcagctttagtgtgataaacaattaattgcaattatacttggagattnttagtgcatggtttgattagcatattctcctttctttaacaagattataatacacatgtggacgtttaaattgcaagatctttnttatcatgtaaaataagctaattctgacattcact

SEQ ID NO: 93428 - DNA, 386 bp, Glycine max
  unsure (1)..(386): unsure at all n locations
acgtagccnctctggaaccacattgaacaagaaaggagcaagntngtccctctgtcaaagacctcttngaactatgaattttgaagtcaaactccagttcaccaacaccaaactggagtaacattagagatgctttaatccatcccactcatgcttcaccagagcccaatctcctatacatacgaaggaggaattcccaattgatggagttgtagtctttttcatatcactttgaaanagaagcattcttctttttttttttgctcctaataaggttatttgaatcaagtgtatgaaaaatatctatacccagaatgactagactttggcaatactcatgcacatttttttaattattgatgaattgatagacttggcatgctcca

SEQ ID NO: 93429 - DNA, 456 bp, Glycine max
  unsure (1)..(456): unsure at all n locations
atctctaagtcacctgangcatgcaagctngaaacctctcaactaanaatggtacatctctcataatngtacaagttagaaatcctatgaaaaacctctatattcaacanaacattagaaaacagcaacagcaaaatctttaattttttaatttntgaatgtaaaaacagtaaaatagtatagcaacaaaacacaataaatataacaaggcagaaaatatgaaacagaaaacaacaacaaataatggaacaacatacaaatatagaaaaacaaacagaacataatacaactaagcagagacaaaaaatagatagaaacacaaaaactaatacataatatagaaacaaaaataacaacagttaaacaaatacaacatatagaatatagagaagacagagaacactgntttaaaccctccctacacttganatgcacatgtctcaatgtgacatgtac

SEQ ID NO: 93430 - DNA, 381 bp, Glycine max
  unsure (1)..(381): unsure at all n locations
cgagatgaggaagtgttgaagggtgaaacttcctggctttattgttgaccacagagtggtacctggagatatgtcgcggtggtcatgagaccttggggacgtcacgtggggtgctattgcccacaaccaagcttgaccaatcccgacctaaccccggcatagtcggtcagtgagaacctgtgatgtacctaaacaggcgagctcctggcagtctacagataaaatgaaccaagaccactaagccaggaggcttgtggtggctggccagctgtgaattatgtgtgacatgtggattgtggcctctggtaatcgattaccaagggtgggtatggattacaacgcttanaaatgaagataggaggctaagatggtctctggtaa

SEQ ID NO: 93431 - DNA, 192 bp, Glycine max
aactcagctcagcccagagagtgtctggatagaagctagggttgttctttatgtgtgaatagaatgagagagagatatgcgtgagcacgactttgtaggagacaacacagggagagaagttgtactctgaatgatgtagctccatgtggagcttgcaagccttggatgttcatcatcaatggagatctttgc

SEQ ID NO: 93432 - DNA, 147 bp, Glycine max
  unsure (1)..(147): unsure at all n locations
atacatctctacagaagttaataatgttataatcaccacccctatngttcaactccctaacttctccttacatgttgatccaaagaccaacgcttcatcctctaccatcaagcctattctctcttagcaatgtcacctagtcgcata

SEQ ID NO: 93433 - DNA, 376 bp, Glycine max
tatgaaactcagctcgcctacttgaatgagatacggtattttattattttcattgatataactcggccaagaatgttcctctttaattacctggtgtatattctttggactctatattttcaagcatggaattaaactttatatacaggatcaatttgacactaggcgtaacactttaacacttgcatcacttaataatttacacgaaattaactaaattcaccattgattaagtctaaacaattccatacaaaacaagaactaattgatacttaatcaatatgccttattctgatagaaatatattatgtcttttatgtgaaataagtaaaatagttaggtagatgaaatttcaggaatatgtttactttatgtg

SEQ ID NO: 93434 - DNA, 407 bp, Glycine max
  unsure (1)..(407): unsure at all n locations
agcacctgacgctgcaagctttactgaattgaacgtttannatattnttatatggtgtaatcgactacaatatattggtaatggattacctgtgtatctgaacattgaaattcaaattcaattgtgaagagtcatatcttttcataaagtgcattgtgtaatcgattacatggttatgataatcgattaccagtgacaagntttgaataaaaggtcaagagatgtaactcttccaatgtgtntttcacagattatctcaaggggataactcttccaatggtgttctcgaccagacatgaagagtctatanaagcaagatcttgacttgcattcanacaactcttagaaatttttcagaacctcttgaacaactcttgagacatctngaaaaccttccttcttatctt

SEQ ID NO: 93435 - DNA, 146 bp, Glycine max
atatgttatacaatctgggatatatctcccttacaggttcctgtcccatgagccagtagtcccatttaacccatgcaactttcttctgatcaacgccccaccccatatgaacctcctctatattagccccgattggtatttccaaa

SEQ ID NO: 93436 - DNA, 302 bp, Glycine max
aatctattttcaatacttttgccgctatcaaatactaaacttttaccctcgtgattagtctttgcacgaaagcattcaactataaattaactcttacgtgtagggcactttcacattaaataatcagggaagtcttcatgccataaaaaatagggaatggtactttcctctttaggacaatttccaagttacattttacactggactagggacacatcacatcttactaataatacatattgcagcatgacaaagacacaaaaccctagcataagtttctgtcttatgatcaccttgcatct

SEQ ID NO: 93437 - DNA, 226 bp, Glycine max
  unsure (1)..(226): unsure at all n locations
tccccaatctatttgaacactttnttttatttgagtatcaaactgaagntcacgcatggttttaaatggttggatcaagtggcctccgattaattaaaacggggacggtgattgattaattatgaacgcgtcttgactaattaaanaattatccttcttaatattactagattcaattaggctttactactaagttatgccgaagtaaataacagataccataact

SEQ ID NO: 93438 - DNA, 411 bp, Glycine max
  unsure (1)..(411): unsure at all n locations
atctcgagcacctgagctgcagctgtgacacattaaaatcttggtatacagtattacacgtattattattaactcatacccttaagatataattgaaggacanaacttatagtatccagtaggtgcttgtagtgttctccaattaaatgttagagcttcatctcagtcatttctttaataaatgtctgcatacaaattacgaagatgaaactctaattatgagtagagaacaaaataacaaatacctatagaaatcctttcacacacagacttaatgccattcaatagaacacanaaagtctagatattgtggcttatctaacatcctcaacatgtctcttatcttgttcaataatctctgaaaacactttgtaattggtcttgtgaatgaaaaggttgcctgtttcgggt

SEQ ID NO: 93439 - DNA, 368 bp, Glycine max
  unsure (1)..(368): unsure at all n locations
tactaagctcgtncttggttagacatgattggacatgattgggacttgtttgattcaattgngcaanantggatgagggaaagagtggntttcgaaatctgcactctatgcagaatcttgctgttggaatgtgcagcagaattttgcataagtgcaaaaaaatgctattgttttgcttggtgtggaaagagtactacaaaatgagttctggatgttgttagcagatcccaacggtcaatatgtagacttatgtactagagacttccagtaacattntcgagtcgatccaacggttagcgaattggaatgaaggaaatgttactacggtatttgtatgtganaagctgtgattctgagctgtgttttgg

SEQ ID NO: 93440 - DNA, 385 bp, Glycine max
  unsure (1)..(385): unsure at all n locations
tatcgagatgctcgtgattgacaacagaagcccagagccatattcaacgacaataactntntactcggatgttcgatagagtcctcgtatatatcgagacgctcgcaattgaaaacggaagctcttataaaatcaaacgactataactgtttaatcggatgtgcgaatgagtcccgtaatatatctagacgcttcgtaatgaaaacagaacactgtgcaattcaacgacctaacttttactcggatcgcgaggagcctgtatatatcgagacctcgtaatgaagatgagcttgagcaattcaacgacataactttgctcgatgccgttgtgccgtgatatcaacctcgagatgaacagagaccgaccaaataacgacaaacttta

SEQ ID NO: 93441 - DNA, 360 bp, Glycine max
  unsure (1)..(360): unsure at all n locations
cctagggaattaaaacaaacttaatggctgagtgtaactgaaaatgtggcaaccaaaagtcaccccattcggtcttccanaaggctgatgcctacgttgccaattgggcccttattacaacttgaactaaagcccttttaattgattaacccaaaacatatttttggtcagccatctttacaaggattgggccattatttagacaaactaaacactctaaaattgaaacaaagnggtgtcatttagtcctccttcatttgggccatgatacaactcacaaccttggacttttctccttgaaactngtgcttgattcaaatatatggacacacttgtgagagcttcttggctttcttgtct

SEQ ID NO: 93442 - DNA, 287 bp, Glycine max
  unsure (1)..(287): unsure at all n locations
tctcagtcagaagtacttacatctagtatattatacggtctccaataaaatgtcttaaaaaaaagaagaaagaaaaatgtgattcatgatgcagtgagtcggtgacagaaatttcacgctgatccatatcgaaatgaaatgactacacaggagaaattgtgtgaatgaantttgtactgcatagatagatatgacctggctnttaacatggtccattntcttttnctgggtagaatttgtaggtcaaagcaaacgtgaactttgccttttacttanaatctatttga

SEQ ID NO: 93443 - DNA, 89 bp, Glycine max
gtcatataaattgttaccggaagatgtggaagtcactgatctaatcctggttgatactgttggaccaacacgtgatttggatggtagtg

SEQ ID NO: 93444 - DNA, 415 bp, Glycine max
  unsure (1)..(415): unsure at all n locations
agcttatgcgcatatntncttacgaacgttttcttgctttatacattctattaactaagaaaaatgcacccatatacaatcaaggcagcttcgttacctagattatatacatgtacttccaaggtgtatttgttacttacatcacacacatctccttggctaaatntacatacatgcatactcaaagcattntgnggtaccaaaaattgcacatgtgcacatcttggtatttctaatacctatacatacacaaacttcatgatgaatcttgactatctacacaataaggcgctacatntcatgctctttttaagtntttgctacctaaagccgcatgcanattcaagtatattntcctttgctgactaanattgtatcanactaanaggatatattnntttgaatgtatttctta

SEQ ID NO: 93445 - DNA, 364 bp, Glycine max
  unsure (1)..(364): unsure at all n locations
tcagcctctgagtttctggtttctanacctttgaaacttgttctattcatctctttcattctcttcttcctttgccaaaaagaattcgccaaggactaaccgcctgaattctttntgtgtctctcttcttccttttccaaaagaacaaaggactaaccgcctgaattctttgtgtctcccttcgtccttgtcaaagaattcaaaacgacacagtctgagaattcttntgattctttccattccctaatacanaagcgttcaaagggttaacccgcttgagaattctttgtatccccattcacaaagtatcaaagggttaacagcctgagatctttgtcttaacacattggagggtgcattcttt

SEQ ID NO: 93446 - DNA, 418 bp, Glycine max
  unsure (1)..(418): unsure at all n locations
aagctnntggaggaggtncaattggtgttctatgcctcttgaatgtggtagttcatgaggaatctccttgcgaaagacatctntaaatntctacaataagagttcaacactaagagaagcanaaatagttaatttattagaattatcagcagaaactttactgtctttgcagtacagtagataaagtgactcacgagcaagttgcactttcctcacttcgctctgccttgctaaacaattaaattttctctcatgtgtatcactntntctctcatgtgtataactctttctctcatgtgtatcactatttctctcacgtgtatcactcttctttntcctactcctctgtggggcttcactctnttctttctcttggtctatctttnntctcattctgatgtagccatcacatacttct

SEQ ID NO: 93447 - DNA, 335 bp, Glycine max
  unsure (1)..(335): unsure at all n locations
agagaagttgaactntgtgttgtgtctcacacgactctcattcatcanagttacaacaaatgttacacatgcttctatttatagactaggtagcttccttgagaagctntcttaagaaaactgtcttgagaagcttctttgggaaaactttcttgagaagctagagcttagctacacacacccatctaanaactaagctcacctccttgagaagtttccttgagaagctagagcttagctacacacatncatctnaaacctaagctcacttacttgacaaatacataaaataccaaaaaatgtcctactacaagactactcaaatgcctgaatac

SEQ ID NO: 93448 - DNA, 403 bp, Glycine max
  unsure (1)..(403): unsure at all n locations
agctcgttgacacgcagatgactaacgtgtcttctgcttctattgtcatccagagacggcgagnctgatgacatgcgacggtaccttatggttatccgtcacctttgtcatccagagacggcgtgtccgatgacattcggtggtaccatatggttattcgcacctttcgtcaaccaaggcgaatgagtccgatgatatcgggatgatgttggtcgtccgattctgattantttttataaatttttcagcttttactgttatcnatcagagacattcaatcccgacgacgcataagattcttctctgctangcagggacgatcgagttcgatagcatgtggaaacgtcgttggtatcccgttntatcgctttcaaggcactgatagtttgctgacacccctgac

SEQ ID NO: 93449 - DNA, 393 bp, Glycine max
  unsure (1)..(393): unsure at all n locations
atatactntcntatttacttattaatgtgaaattttttagaatttaattatatgaattgaataatataaaatatatcattgactaaatctttaaattgtatatattaattggattaaattaaatcatacattatgaaggaaaagtccctatagcacagcgtattttttttaaatcaaccactcctctcgtattacaaatgtgtgtatgagggcggttacgtgtattgcttattacacgagtatgaggatgtttactattgtgctcttcctagatcctaactatngtcatccttattgatgatccatctatgtgttagagttcctcatgaagatgatntctttatactagtaataaccataatctagattttgcatacatactcatatagtgta

SEQ ID NO: 93450 - DNA, 377 bp, Glycine max
  unsure (1)..(377): unsure at all n locations
ctctgagtcacctgacgcatgcaagcttattactgcttcttagatggatactctatgtacatttatatnngtgnggaccccaacgataaggaaaagatggccttcacgtgcccttttggtgtantttcctacagacggatagccattgggttatgtaatgcacctaccacatttcagaggtgcatgttggccatcttttgtagatatggtggacaaaagtattgaggtattcatggatgacttctccatatttgggccttcatttgaatgctgcttgaagaattagagatgatgctcaaagatgtggnaaacaaacctaattctgaactgggagaagtgtcattttatgtgttgagaaggcatagtcttgggacaca

SEQ ID NO: 93451 - DNA, 355 bp, Glycine max
  unsure (1)..(355): unsure at all n locations
tctgtgtgagtagtttagtccacctaaatagtcttagtcaatgatatagagacctctctttattgcttcccttatcacctncttttactgcttgacatggatggattaatagtcgatttatatatgattgtataaatttctgtgtttggcattcgaatagggtgtagcaagaggactaaaagatccttcttttcgtgtgattcanaaccactctgcaatttcaagaaatctaggagaggcaacaacaaaggtatactaacttgggaaacttatcttagagtagaaatgtgtgattngtcttatcctaatgcatttcatattgaaagatgcttttcactttaatanaatgggatac

SEQ ID NO: 93452 - DNA, 342 bp, Glycine max
  unsure (1)..(342): unsure at all n locations
cataatcgagaatcaatngaagcanataataatgtctgtataaatagaagacaccatntganaagaatattgaattcaaacaaagccataccatttatcacaaggcttacaccagagaggaacacacaaaactaataaacaaacaagaacgccataagcctcatataaccttcactttacaaatacatacaatgaatcaatcaatcatcaacatataaccacgaacaacaaaatcaaaccctctnttctaaattgcattggtgaaaatgaaacaaatcagtgagagtgagcgagagagaggcacctcgagttatcagatatcataacgatggngatgtatat

SEQ ID NO: 93453 - DNA, 133 bp, Glycine max
  unsure (1)..(133): unsure at all n locations
cactaccgcagctccggccaagctattcttgattaagtgtatcaatagctnttcatctttagagtgggcgcccatcttaccgcagtacattntgagatggttnttgggacaagtcgtccctttatacttgtcg

SEQ ID NO: 93454 - DNA, 345 bp, Glycine max
  unsure (1)..(345): unsure at all n locations
atcctctgagtcacctgcggcatggcagctgccgccagctcgcncaagcgagcaatggtgctttctccagaagcaacaaccttctggaggaatcttctagagggcccaagtgggcctgggtgctatttgcacccctcctttatactaaatgcacctccttctattatatggtaattctttttccgtaatgttacgaaactttacgaatttcgtaacgatacttatttttcttccgcaagattacgaatccttacggattatgtatttacctctttttagctttcgaagaaatacggaaacttacggattgcgcgaacacctcttttcaatntccgtcacattacg

SEQ ID NO: 93455 - DNA, 354 bp, Glycine max
  unsure (1)..(354): unsure at all n locations
atcccacacgcagaatcattctatgagcttactctctcttcgatgngttcaacgccattaccattaacacaacagagcttaggtaccctctcaacaactaaaaccattatgatttcatcgntggctcttgtgacgacattctctgtttcacgagtgatcaatgatctgctctcttatggaacccttccattgggaaattcacgaaattgccgcctctagataatgaacggcgcanaggtagttatatgatacatggatttcggtataattgttctcctgatagatacacagtggtggcagtttcttctatgaatgtgatggtggatacaaaactcaagtgaaggttctcatgct

SEQ ID NO: 93456 - DNA, 412 bp, Glycine max
  unsure (1)..(412): unsure at all n locations
agtgcacaagttntaataatactatanagtgtatcgaaattcatatccacaatcanttttcattagttgataatataatgtcttttcacacaaataatatacaaaagttaagttcataaaataataatattaattatattggaaagacaattatactcacataatattattggtgtcgaataatattacttgtgaacgctaattaatatatctcgcacatatgggattggaaaagacagtaggagaatttggatataggaaagaattgttcaatggataaagctgattatggcaagtaccgttctgttctcttctatatatngcgaatatgaattgttattagtacagatttcgtagagatggaatncatttcctattttcctaatgaaatataggaaccacataaacaacg

SEQ ID NO: 93457 - DNA, 414 bp, Glycine max
  unsure (1)..(414): unsure at all n locations
actaagctggtatttgaagtgagagctattaaactacgatacaacttatttctttcanatctcttaagcctggaatcccaacgacacgccgggtaaattgatacccaagtagttagtttcatggggagcgtacagacagaanaacatacattatgttgcacttagtataataattntaaaggaaacctcctcatttgacgtcttctgctatagttatgtacaccaagtacagctaaaagtagatcaattacccacacccagaaaaactcgattgatagcccaaccccaaatccctctggatcaagactttcatgttaacaccaactccggcccaacattgtcacccaggaanttaaataatagagaacagtatacctangaataccatangcatatttatttgtctgatcaatt

SEQ ID NO: 93458 - DNA, 281 bp, Glycine max
  unsure (1)..(281): unsure at all n locations
agagaagntgacccttgagttgtgtctcacaagactctcattcatcagaagtacaacaagtgttacacatgctttctattatagactangtagcttccttgagaagctttcttgagaanacttccttgagaagcttctttgagaaaacttccttgagaagctagagcttagctacacacacccctctcataactaagctcacctccttgagaagcttccttaagaagaatcctaaagaagctagagcttagctacacatacctctctaatagcttaagtca

SEQ ID NO: 93459 - DNA, 320 bp, Glycine max
tactaagctcggatgggaagtgtgaaggggaaacttctgctttattgttgatccagagtggtacctggagatatgtcgcgggggtcaggagaccttgtggacgtcatgtggggtgctatttgccaaaaccaagcttgatcaatcccgacccaactccggcataatcggtcagtgagaacctgtgatgtacctaagcatgcgagctcctggcagtcaacagattaaaggaaaacaagaccacaaagcaaggacgcttgtggtggctggccagctgtgaatattgtgtaatatgtggattgtggcctctggtaatccattac

SEQ ID NO: 93460 - DNA, 381 bp, Glycine max
  unsure (1)..(381): unsure at all n locations
gtctgggntagtctgttactagcagtcaagttaattagaatataactganaggcaactgtgttagtctggtacaagcagtcaaactcaacaactaagacatcttcacccattttgtgatcagttnttgacataccttaatggtaagtctgattacatattattaataatattcattgttgcatttaaagaaaacaaatcaacacccgtttgtgaccaaaacctttcaccaccatagcaatgagaaaagtatactaaaatttagtgccactagcacagtaaaggagggtacgtngaataggtacaacanaattaccacattacaatgaagtatagtaattatcctctanaaatgtctcgantaaagcattatgtcatgcatg

SEQ ID NO: 93461 - DNA, 324 bp, Glycine max
  unsure (1)..(324): unsure at all n locations
aagcattaacaaagtgagaaaatataactggaaaanagcacttaagtatctataatatcagtataatatgtactatagtattatgtgtatctgaatggtaattaatcaacgttggtagattaacagttgagagaaacaattaaagaatttagacctatggctatattgggggtgagagatcgggatctttgaactttttaaaatatataaaaacaatgacacgaattgatcaacatggtggtactgatgcaagatgagaaaggtggaatggtacctatactagataaagctcaaatagacaagcaggtagaacatgattaactc

SEQ ID NO: 93462 - DNA, 395 bp, Glycine max
  unsure (1)..(395): unsure at all n locations
caacttctcatatactagaagatngctcaactcagaattcatctgctgaaaccacagctgctgaagcagctcatctgatngataaccaaattaaagatgcaattgagggtacaatatcgtccatagtggaaaaatcaaatcatgctatagaaagggctctatntgtggcagagaaagcagaggaacttgcanagaagtccacggaaacatttatagatggtacatccncatntactgaaatagctgctgttgaggcagannatatcaagttacagggaataataatggatatagaatctgagttgatgatggcaagaagtcacgctgataaactgatgttagaattggagaacaccagacagcagctacaggcatttgacanagagcttatgatg

SEQ ID NO: 93463 - DNA, 175 bp, Glycine max
gaatgggagggactggggagtctctttgttcccaaataacttctctgactctttctcacccactttggaaggaatgagaaatgcccgcctaacaattccacaattgagaatcagtgattattgagggggaggcatgggtggtggcattgctagcctaatttcaaatcacaaaatg

SEQ ID NO: 93464 - DNA, 113 bp, Glycine max
  unsure (1)..(113): unsure at all n locations
gatactgatggtgttatactaanaggaacactgctgagatttataattattgattagttttgctacatatatgaaacaagacgatatgtgtgctttttagtgctcaatgtttg

SEQ ID NO: 93465 - DNA, 75 bp, Glycine max
aaaagaggctctttgatataacctttgctgcacaagagtatacctttaacaatcttcttggaagaatccctttcc

SEQ ID NO: 93466 - DNA, 181 bp, Glycine max
  unsure (1)..(181): unsure at all n locations
gtacctggagatatgttgcgggggtcaggagacctctgtgacgtcaggtggtgtgctattgcccataaccaagcttgaccaattccgacccaacccgggcatagtctgtcagtgagaacctgtgatgtacctaagcatgcgagctcctggcagtcaacagataaaagganaacaagaccac

SEQ ID NO: 93467 - DNA, 374 bp, Glycine max
  unsure (1)..(374): unsure at all n locations
tctcggctcatgctgngaacgcctctagtcaacacctgttcattctaangcacccacccagagggaagctccccaagttccaactccgaacacgactcgaccgggcggtaattgctacacgacaaggaacttctctccgaggccattgccggaattcaccccgctctcaatgacgtacgaagatcttctaccatccctcatcgccaatcatttgggcgtggtaactcccggaagggtactcgaaccccctctcccgaagtggtatgaccctaacgcaacctgcaagtaccatgggggtgttccggtgcattccgtccagaaatgcttggccctatatacaaggtccaacatttaatggatgctggatggctgac

SEQ ID NO: 93468 - DNA, 463 bp, Glycine max
  unsure (1)..(463): unsure at all n locations
tagtctctctcattatttgtataagtggtgttataatctgtgatgactttgtactatcaatattttaatttagtttcttttaaatgatctatgataattcaaaatagtatataaaatatcgtgacaattctacatctatatatattnttntataaccaacctaataaatgactatcacaccatatgagctaaatattgtggtgatctacaataattagaaatatatttttacaagaaaatgttaaataaatttgacatgataaatcatacacattgtaaatcataatacctgaataagaaaactacagaactcttcaaaattgaagactataaagcaatatttgttaagactatagatattatctaattaagaatagaatatattcatcattatttattttaaatgacataatntctcttttctattttcttaacctctctctctctcctcgtgacacatatt

SEQ ID NO: 93469 - DNA, 387 bp, Glycine max
  unsure (1)..(387): unsure at all n locations
tcttaacatcctcacttatttaactgtccacaacactgttgtaatttttacataccatattaggttacatctaatttaatattgagaatgtggaattgcacgtatataacattgtagcttatgttatttgtgttggatttctatattctatttagacatacaagntagtaacaaataaattattttgaacttcaacaacatgcaacactntatttgtaggcttgtagcctttattgcctcatcaaaagcatgataatttagtagtcttagcatctatctaactaaagaaaatgagacaacacaactaatataangtatttcgatttaatcaaaacaatttcacatgaagtataactcagactttgacangtcgaggtattataaact

SEQ ID NO: 93470 - DNA, 256 bp, Glycine max
  unsure (1)..(256): unsure at all n locations
atgatgagtcagagtagaagagccagccctgcacattcatntatatatttgtcagctacaagtcactggataaaggcaccaaaatattcatgaaaagaaatggaaaaagaggataattgtaactcttcagctatttaaagcaacttcaacagtacagcataagaacatccacagcagaagagacgacaagagattcaatcatttgattgtgttgaaaatgaagtgtatcatgcctgtgaatacggtacagagagta

SEQ ID NO: 93471 - DNA, 373 bp, Glycine max
acctagcacgcgctcagctgtttcttataatggtttgtcttctataagctcctaaacctcctatggtgatgaataatgtgagtcattcatacagagggagttgggcttataataaaacgagctctggggaaatggtcttattgtctttatagaggttgactggtgaagcgagtttctttacaccgatctattgccaaaaatgcttcttgcttatgtttccatttcatgtaggttaagaggtgacgtacttctctaatatgaagaatgagatggttcatcacttgacatgcaaacttaagtgtctgaattgaacttactgtttggtgagaacacctctgaatatgcaaccactagctttatggtaattaacgat

SEQ ID NO: 93472 - DNA, 357 bp, Glycine max
  unsure (1)..(357): unsure at all n locations
taagctctctccctaagttgcctgatgcctganatgaccattctgatgtgtttggtcctagatgcagggaagaatttctccaagaacaccctcttaaggtcattctanctgacaatagatctgggagcaaagtagtatatccaatcttttgccactctctctagagaatgangaaaagcctctataaagatatgaactttcttggacattcggtggcttcatggtggaacgaacaatatataactccttaagatgcttataaggatcttcacctgcaagaccatgaaactttggaagcagatcgatcagtcctagtttaagaacatatgggacatcctcatcagggtattggatgca

SEQ ID NO: 93473 - DNA, 283 bp, Glycine max
  unsure (1)..(283): unsure at all n locations
atgacattagcagtttaattttattttgtaatgnggngagaacataactgaggatcataagtaatcatttatgcctacccttattatcttgtctcttgaaccttgcatctcttcatgttcaccacaatcccatcttacttcaaccatttggagtttccttgccaagacctgtgactggatacttactattgactccaagcactctatagtattcaaagcttggcgtctcacagctcttccacgaaggatagcttgaagcttaactattnccttccatgctctc

SEQ ID NO: 93474 - DNA, 355 bp, Glycine max
  unsure (1)..(355): unsure at all n locations
gcataaatatattcatcacgataacatcatagtggaacgacactgcagtgctgtgatccanaagatccttccacccaagcataaagatcctgtgagtgtaactattccttgctcgattggagaagtcaatgtgggaaaagatcttattgacctgtgagccagtattaatttgatgtcactctccatgtgcataagattgagagagatggaaataatgcccactcgaatgactttacaattagctgaccgctccattaccaggccatatggagtaattgaagatgtgttggcagagtgtaacatttatcttcctggcagacttngtggtgatggatatctctgaaatactaacatc

SEQ ID NO: 93475 - DNA, 379 bp, Glycine max
  unsure (1)..(379): unsure at all n locations
ggtctgatgataatggngatgtgccttccatggatatgcgttcaaaganaaataagttcctctctcttttttttcatctgtggatgttgtctttgagtttctgacaatttctctgttatggcagtaccgagtcccctttattatggattagagcagatcctgatatggagtacctcgctgaggttcattttaactcaaccagntcagaatgtgggtatagataataantgtggtagactggtaggggggcagccagntgattctgctggagtgttatcgtgatatagtatttcgccaccctatgagaggcactgcatatgttcaattattcaggtcctcctttctgggttatgtatacaactagnntacttatcatatg

SEQ ID NO: 93476 - DNA, 310 bp, Glycine max
  unsure (1)..(310): unsure at all n locations
ctcttcactttacattacaagtagtgactgaagaaactctacatgttcaacaatngtgccaattggaaaacgaatatcatcacataggttcctgaggtaataacggtgacaccacatttcatctctcagctctgggtatgtcactggaggcatgggggcgtagtcatataaaacatggcaatgctgngacagtttctgcggaaaatcaccaagatgcctgcaaacctgataaaaagcgaaggagaatggattcaattatactatgtaaatatcatattagtaacccagtgaatgtaatattactaaaaat

SEQ ID NO: 93477 - DNA, 457 bp, Glycine max
  unsure (1)..(457): unsure at all n locations
attaaatactaatgctantttatattgactgcctaactggtatctaattagtggggaacagtgtctgatggtagtgcactactgttatatgatattatgctcttcacaattgagagctcatatccgtgtactggtatgtgatatgtttcatacanaaattggataatntngtcaaaagcattttaccaaaattataagcaatattntttatggtcgttttgacacaatacttctgtacttctaacccattatgattgcatgagtttaaattgataagcatatcagctttagttaatttgatcaatattgtatntgatgggtatatctggcttggcatttgagaacagactactgccttaattgcatgaatagtaataagccaccattaagcttgagaatatgaactatattactctgccataaagataataatcaagacattacagcaaatattatg

SEQ ID NO: 93478 - DNA, 333 bp, Glycine max
  unsure (1)..(333): unsure at all n locations
ttatatcgaaaggggtcgggatgtatgatcttgctgctcacaacggatgctcaatttcttttggtttatttcactcaaaactccacaaaactttgctggtgattcttttttttcgctctntctttttctggaaactgattgatgctgcatggtgcatgtgcagtacactacntaatagtataagtcaatgcttatgatgctaattaatctgcccatctttattcctgtggtgtggtccctcactattaatgattttaattataatatgctatctntgaaagttaaccaccacaaagcatctntcttttgctatctcanttctactttttataa

SEQ ID NO: 93479 - DNA, 425 bp, Glycine max
  unsure (1)..(425): unsure at all n locations
agtcacctgaggcatgcaagcttacaaggcccaacgaatgtctgtcttaagccttcttccacatccttctccttgcaacnacgctnttagtatgaaaaaatcccaanagattggttgttccaagatgaggccttgcccttgaaggaagaaacaacctcatcccaacaaaggcgccctcccaagcatctctgacaatatcattgaaggagttatcaactagccagttagtcatgaacttganatccctcttaccataatanatgtgatgatgctntaaagagaccaacacaagtttgtgatctaatttgaaaagagaaagatgagtaacttatatcaactntattcactacctaaggaatcatctnttctaactcaagtatgtatctgcacaccaaaataagtatgcttttgttagataaataaat

SEQ ID NO: 93480 - DNA, 175 bp, Glycine max
atgagtggtaaagttcttttaaaactaagtttggattatatgagtggatggtggtgccttttgtgctaaccaatgcacctagcactttcatgagacttatgaatcatggtttaagacacttcattggaagattgcgtttgctactttgatgatatttgattatagcaagcctcga

SEQ ID NO: 93481 - DNA, 327 bp, Glycine max
  unsure (1)..(327): unsure at all n locations
aagattgatatctcatttgatattgttatgcggaagacaccagagctaaactcttgtcgnctatagaataattgtagattatataaacgacaacctaaacaccaagaaatagaggatatcttcaaatttaataggttatatcgactgcatttacataaaagtgatatttaattatttttacttaaaaataaatagagcttttattatttctgaagaaacatcttctgaaaatgtctctatttttagtgtccaatttcttgtgtgaagtagaatctactatctttgtttttacacaaaaaaataaccgacagtgtgttttattacacc

SEQ ID NO: 93482 - DNA, 301 bp, Glycine max
  unsure (1)..(301): unsure at all n locations
acacagaantcaccgccgacatactccaggccccattttattttgatgaatgttccattgtggtgcaaaataagaatgattgcattatacatcccacagagaaacatataaaacattaatggtatgtttacaaacatagaacacaaaatggtttagaatatagaagagataaaaagtttcttaacaaagaagagaagagaacaagtttgagaataaagaagagaagacaagagaaggtgtttgacaatataggccagatagacaacgaccaccacagncaatgcgacgacaacgatgccat

SEQ ID NO: 93483 - DNA, 355 bp, Glycine max
  unsure (1)..(355): unsure at all n locations
taatggaaaacaagggcgtattatcatacaatataactatataccttacactgaaagtgattctcatatgttaaatgaaatgcttctaccaatactgaaaattcatgatgtcaaacttctttcttgatattcattgtgtcctacatcgtgatttgcacattactgaaaattgcaaaggaatcggtcgactataaaagaatgagtatgtttcaaaaacaaagtagataaatgaagaacaaactttgcttnatcacaacggttatttcaacaatgtctagtagatggtacactatgattgagtcagagaggttgtctnttataagatacaaccaatctaaactacgagtggacatat

SEQ ID NO: 93484 - DNA, 149 bp, Glycine max
ctccgtcaagtagtccgtgatggagccgcgctgcaagagcttaaacaaagccccatggtggtcatcatatatagagggcgcgaatctatactccagcacctgtaacatcacagtccacgaagtgagaaagccattgcgcatcatccatt

SEQ ID NO: 93485 - DNA, 245 bp, Glycine max
  unsure (1)..(245): unsure at all n locations
gaatgctccgaaaattcctaaaccctgcgtaacatattcacttaaantggtgaaaggaagagaaacaagatgatatgaaatccaaacacttctgaaggctttcgaacttttcgtaagacgaaagggggtgaacttataatgtgtacctagaaatcttctcaaaagccctagctgtagcatctccttattccttaatagggaaggggtgttcaaaattctgaccctgctataataggagggggctg

SEQ ID NO: 93486 - DNA, 403 bp, Glycine max
tttggcacttctgtgtgtttcgaatttgcttatgaacatcatttccgcgaagaaaatccaagccgaggtgcttccgtaacccttacgagatgttttcgtaagcaaatccgtgaaggttttcgttcgtcctttaccgatcttcatctgttacttcgtcttcaatgggtaagatttcgaatccgagactctcaattcatttcttggttttttaagctttcatctttatttcgacattttttatttctttctttcatctttaacgcgctttaccgtctattaagccatttctcactaataatgataaatgaattcaaccgatcattgtgttggatctattaatcactttaaacgaaactaccgacgtcacctatacctctgtaaccaaaaagtaaatatataaata

SEQ ID NO: 93487 - DNA, 167 bp, Glycine max
tgatctttagatgtgtaagaataagtaaagtacgaataatattgacgagataagggaagagagaatttcacaatctatttatattgtgtcgatcactctccgtgactacatccatgcctcaagtaacccacttgagactattcactatcctttaaatgcattacaat

SEQ ID NO: 93488 - DNA, 350 bp, Glycine max
  unsure (1)..(350): unsure at all n locations
ctctagcttctcaaggaagnttctcacagaagcttctcatgagagtttctccaggaagcttctcactcaatgaagctacctatgctataaatagaagcatgtgtaacacttgttgtaactttgatgaatgagagccttgtgagacacacttcanagntcaacttctctccctcgtttccttcttcaatttcgtgcgtcgccagccgccccacacctctatctttatttatctccattgaaacttcctctctaagcttcttatccaaggcattctctnggtggtgaaactcttatccatggctattcctaatggatgcgcctctctacctctctctttatcttcgtacatc

SEQ ID NO: 93489 - DNA, 216 bp, Glycine max
tatcacagagagacgggagaattacttttacatgctcttcaatgatggtccagattccagtactaatattgaggggttagaaatcccagaggaggaatgaaattggtattgttatggcataatttgcattggcgaggttaaaaaaaagtcttaaaagaatggaaagggtaaagttgctggtccaaatggtatccatattgaaagttggaagtgtat

SEQ ID NO: 93490 - DNA, 388 bp, Glycine max
  unsure (1)..(388): unsure at all n locations
gctttatgtgaaggatgngctctcacatttgatttgaatttcacattccaagcactggaatcgataccaaacattgaatcgattacagctntttgaatcaatggaacattgtaatcatttgaaacttttcaaatcattttgtactggaatcgatacacaatctgggatcgatacccagagtaaaactctnggtaacatgtctgagaanatccatgngctctcattnttgagaaacctgtcatacttatttaataagccttctcttgattttgaatctgagtcttgatcttaactcttgatcttgatcttgaaatctgatctcttgatcttgatcttgaaacactttctcttgatctgagtgttttgatctattgatatctgactcatc

SEQ ID NO: 93491 - DNA, 209 bp, Glycine max
  unsure (1)..(209): unsure at all n locations
ctaagctttctccanttcttctcaaacaattgcaccacaatgttttcctcactttgtacgtntcctaattattcaatcttgctgttcaaatggcacataattgcagctatagtctatatggataatccgaactctctggccgttttgacatgagacgttattgtatttagatgcgggctgctgctaatacttattaatgtggtatttac

SEQ ID NO: 93492 - DNA, 323 bp, Glycine max
  unsure (1)..(323): unsure at all n locations
gactggacataagcgcagaagcactcagagattacggctgtctatgagagtaggcgccacacttattatcaaatgtttagattgagtgtgagagcgcacactcaacgcgcacttgctcatgttccgcatactattacgtacataatgtgtctcatactagtaagacacaccacatgaggtaatgaagattcagcacttataaagatgttggaccgctccaagtggtatgatgctctactacaacagnattgtgacgctcagatagtctaatgcgattgcattatatatcgacacgcgtcacatcatgtagagagcatgagaga

SEQ ID NO: 93493 - DNA, 75 bp, Glycine max
acacccttcatcattgacattaaagcagatcaacacaggtcactttgattacactaacatagttacaagcatccc

SEQ ID NO: 93494 - DNA, 384 bp, Glycine max
  unsure (1)..(384): unsure at all n locations
cttatctcattcttctgaacaattatattngatattaatcatgtttttgcttcaaccaatgccatgctacaacatacacattttcaacatatcattacaaaattttattagcttggatgggatttaatctatttaaaacaccaccaacagattaaattattaatacaataagatgtttataggcaacctacctgctgatactaatacattatgttaacaaatcagggaaaatgatagtaagtataatttgaaaagcattngccatgtgctacactgaataccatgaatgaccattactcattnggcatgaaggtaccatagggacgaaaatgaagcacaaatagtactagtgacctatagaagaacctagcgaatgaacagtat

SEQ ID NO: 93495 - DNA, 459 bp, Glycine max
  unsure (1)..(459): unsure at all n locations
agacacactcgtgtctctgaagatagataatacaattgattgttgcattgntaagcattgcacacagaatttgattaacaagcaatacctcttggtgtggcaagaggcatgatattgacaatgtgcagatgggttactgtatattatatatggaggtacaatcagagctaanaccaaattttaggtgtggtgaggggcgttgacgatttttttnttgagaggggctttgaggattaatcttgttcatacgacataaaacanaattgtacaacacatttatgaatgcgttctttattgaaaatttctttccagggacaacatcagcctgctaactacagttttctagccttttggataatctacatttgtatcttcaaagtattgcctcaatacttactgaacactgattgtantatgcatgatctnttttatcatcaacgtaattatttaatgtagttt

SEQ ID NO: 93496 - DNA, 406 bp, Glycine max
  unsure (1)..(406): unsure at all n locations
agaagtgaaattgagaatgatgtaaatttggagcanactctcacctcacacaagtctataacatcaatttatacttgttcanactggatttacacctaaaattccaccgaaccaaaatttgactcctcaacacccaattttaccctagaaatggctctttgntcactttggtcatttgtttttctctctagcacagcccaaactttctcataagtcctaaatgacatttcaagctaggattaactcactttaacctccaaataccactatatccagatgttggccttccaactctcanaacctcactcttttccactcataacaccatattctcactgtctaaccctangntaactctactcttcatctcttaacaatttccataagcagtctcagcacataaaca

SEQ ID NO: 93497 - DNA, 419 bp, Glycine max
  unsure (1)..(419): unsure at all n locations
ctcaaaatatgcaacaaacactagacctaaatcagtgtcacagaaattggaagaaaatattttatccaagcacaaacttcaagccttattccatgtattggggggaagttatggctggccatatgggtagaggtgtcatacaggaacangtatggaggaatggaccctggactgctgaagaggacaggttgcttggtgagtatgtcatgttgcatggtgaaggcagatggaactctgttgctatgcttgcaagaaacaccaaacttttntcactggtttggtttctaatatatatgattggatcttcacatntataagtgacaatataacatagaaacaactgaaatttgtttcaacttctactggtcatgtnggctacatatcatgtcaccggaagctcttcatttttgaaatatact

SEQ ID NO: 93498 - DNA, 339 bp, Glycine max
  unsure (1)..(339): unsure at all n locations
ttgctctcatcatttgtgcataaaagaaataaaaccatctttacataaattccttgcaataacgctaaccttctcttcaactctagcatcccatcatcaagacttttctccttaggtccaaggcaaaagccttttgattcactgagtgtgtcgnctggctaccttctgaatccatccaatgatttctttctaggtccacaaacggggtagccctcccttgtgcatatcanatctcttataaaaatattcatctaaagagggcatatactttcaatcttgttatttggcaccatgggattctgtcacgggaatttctcattaccctcatattaacaacta

SEQ ID NO: 93499 - DNA, 401 bp, Glycine max
ctaagctggctgattacattctccccattctaaccaaactattcttgacttcttataaatcttcatgagttacaaatggtaaaaccaaaagaataacataaatttgcaaactcaaaatatagtttttacattactaacgcgaatagaattttcaatgtattattaaagggataaaaaattacacttagtgataatcataaaattcatccattggcgcaatgaataagaaagagatattacaaatttcactatgtctttagacattggactaataattgtttacgttttagagatatgatacaaaaggctaataatgaaagaaggctgaagtttgaagaaaaacctatgcaagtggatattaatcctttccaagtccagaccaattatgtcgaacctatcta

SEQ ID NO: 93500 - DNA, 360 bp, Glycine max
  unsure (1)..(360): unsure at all n locations
gcaagctcttctttcacaatcagtctggctactgactaacatttctaaatgcaagttcacattctgggtctttctttggctaacatacacaattgctcatactcatgaaaagaaacacaacattcatcanaatcatgcactcaattcanaataaagacatacacccatttttcacaaagagataaaagtgttcactgccatgtcatcaaaatcaagtcacactgttcaaaacgcttctgaataagcaaaccaactattcatcaaataaactagcagtgtatattaacataatagaaaatttgactctaaccataattaanataataataaacaaagaagcaataagtgtcacgaggaatc

SEQ ID NO: 93501 - DNA, 403 bp, Glycine max
  unsure (1)..(403): unsure at all n locations
cacttattatacccgctgttgacgtgcttaagcccatttacttaagtcatttctcgcttaacttaagaataagataaatttccaccgaaacgttgaattgtattatccattaacttcggttaaaatcaattccgaccgatcggtcatgccgcaaccacgttgggaaatatatataagacgtccgaattcatataaaattatctaaagaacatctcttattaaaataaagcggataatcaatcggaccgtttctctctgggatttctcattcttaatcgaatcgattaataactaaagtgaaactaagggctaaatcaactctgctagtcaagctcgctcacaaaatatgctnttgaagttcgtcattcaattcctcactatgtaaatgatcattttagggcca

SEQ ID NO: 93502 - DNA, 443 bp, Glycine max
  unsure (1)..(443): unsure at all n locations
agcaccgcagctgcagctgacgttattatattaaatatttttatttctcatacanaacaaggagttatctacttataccaatgttgtaacgtaacatgattaaccactttataaaaaaagagaattttgtagagactcgttaatacattatttgggtaaatagagtcttgaatataaccaacacgtaaattacctgtgcagtgatataggctatagagtactattataacataatgaatgaagtgaattacacgcaagcttttatatagaantctatgtcaataaattattaaaagagtacaattataaagctaaacagataaagtatctaacgaaatggaaccttgcaataataacaggtaatggtaaaagcttatttaacagaaattcatttttgtaagggtaaagtaaatgtgtatgtgcctgtgangaaactttctatg

SEQ ID NO: 93503 - DNA, 404 bp, Glycine max
  unsure (1)..(404): unsure at all n locations
gttaatacctcgagctnttaagtgggaaagcggtagttaagaatcctttcttcttctttcaaacaaataaaaggcttaaaaataataataaaaatattaataacatccttgntgttaatactaataaaaaagtcattaattgtaaactagtaataacatttaataaaataaaaatttcacaactcacactggatttgattgaaagtttgcccctaaatttgagataattcgatttatcattaatttttattcatttaacatctaattttatgttctatatctgactccaaattgactttatttagccagtgaatatgaaattttatatgtaatcgaattaacattaaaaatctctcggcatcttatatcgtgaagagaatgaactaataaataagacaaatggt

SEQ ID NO: 93504 - DNA, 260 bp, Glycine max
tactatgtcggaccataaatgctagggaaggactcattggctctatctagtgcacactagagtactagacgacatatacagtgaccttatttgattatcatgtctcagacagaatacaagaggaactataatggagatctacacgtgtcctttagaaacacataattatgtcactgatatatttgtacaaaccccactgtacgtacatgtcatgtaattattcgtctcgaacaaagcatgcatatgcatattttacacta

SEQ ID NO: 93505 - DNA, 374 bp, Glycine max
  unsure (1)..(374): unsure at all n locations
gagaacttcatatgcttgaagtacatgcacgttacctttccttgtctactgtgtgaatggattttatttacttatngtatacatntactgttgcagaccattgatctaacactaacactcggtagtgctttcctctctgcggattaaagttgtcgagggttattgtntgtgatcaacgacgcttactgaagatggaacctcatactgtatgngtgcttgcattgtactctgaattgaattacattacgagcctctttagacaataatttatctctgtaatctgaatcatatcattatatactggattatctattatctgtttgatatacaaattaactctttagaattgtgtttaataaatagttatatctaac

SEQ ID NO: 93506 - DNA, 347 bp, Glycine max
  unsure (1)..(347): unsure at all n locations
gtgttggtttcagatgggtggcttgaactatgtccttatttctctcaacataaccttgagaggaactattctgaccattgccctattatcctcacatcgaagatttctaactggggccccaagcctttcaagggtttagatggctggttgcagataaaggagtacaatcaagtagtcaaagattggtggtctgtttatcgacccatgggatggnggggtcttggcttaaagaacaagcttaagaaccttaaacaaaggctgatattgtggagtaaggagaactcagcagacatttgcactcaaatagagcagcttcagcagcatatgaatgagctggaaactctatg

SEQ ID NO: 93507 - DNA, 339 bp, Glycine max
atttgattatgacaaataacaagggctatactgcacaatcaagatatattatgattaggctgaacctatactcttgaccatatgcatgctcattcttaattatcctaataagtgcaatcgtatccaaaatctataataatgagggaaattattagcaaaatgaaacttggcttatgctaatatgatatgacatgcttaataactacatactaagtaatagaataaaagaggctaaatcacgttttgggctattacttatttttacgttcgagttggcctctacttttttcaagttaatgtgatctctaagtttaaaatcactcaattgtgctccatcta

SEQ ID NO: 93508 - DNA, 334 bp, Glycine max
  unsure (1)..(334): unsure at all n locations
tgaaatattgcgtctatggatagatcaaacaagcattacgtggacgggttcgtctcctgttatcaggagctgctcctttgcctacgcatgtggagcgagctttgagggtcactcttggagctactatgtcacaaagatatggtatggcatctgcatctttngctaaaaagagctggcgtattgctttatgacatgtttatgacagctcttcaatagtaaactataattactgtaatctgctagagcatgaatctggcagtccttgattagatctactatgtttgtcttaaatgcattctatagacgattagttacatgctaatcatatttctaa

SEQ ID NO: 93509 - DNA, 267 bp, Glycine max
atgagaaactcaagattcagtagatgtgacatggaccattgctgctatgttaagaaatatactaatagctatgttatccttgtagtgtatgttgatgagatagtgattgcaagatctagtatggcagaaattaacaagttgaagcagcagttggcaaacacctatgaaatgaaagatcgtggtccacctatacaaattcttggtatgagaattcttacaaacacgtcagaaagaattgtacagttctctcacgagaaatatatacac

SEQ ID NO: 93510 - DNA, 252 bp, Glycine max
  unsure (1)..(252): unsure at all n locations
agagtgtatctctcttatcttagtgagagagattctcctaaaatcttgagagagtcaagaacaccttggctgtatcaaaggactttcacaacctttgtgtgtcgccctcgctggaaaaggagaatctttcctttctttcatcatcacccattgttgttcacaccacaattccagaanaatcacctctgcccagaattatctcgtggccataacttccattctacgcactcaaattaagtgattcttgagcct

SEQ ID NO: 93511 - DNA, 271 bp, Glycine max
  unsure (1)..(271): unsure at all n locations
ttctgacataccgcagccgnctatgcctcttccattcncacctagagcaattccaaacacaanaatggaagaagcggaanaggagatcttgaagaccttcattaaagtagaggtgaacatacctctgctagatgccatcaagcagattccaagatatgccaactttctaaaggagatgtgcacccacaaaacgaagttcagggctatgataggattagcatgtgcagaaacgcgtcaacattgataggtaaatctgttcctcacattcctg

SEQ ID NO: 93512 - DNA, 331 bp, Glycine max
aagatagaacctaaataagaagccaagcctgcctattggtagaaaaaatgtatgtatgggttctgggtctattataatcaaaaagggggagaacggtatttgggatgtgtctatcccacaacctggtgaaatgtaagaccacctacataacctatcccaacagagtgtaagcgagggattaaaaacctagttgatcacttataaagcctagtagaaaatattattctattttgattcccaacatgcagaagtacataaccaatttacatataaattagagtgagttggatggaacctgatgatcttctatgtaaaatggagctatagtgga

SEQ ID NO: 93513 - DNA, 279 bp, Glycine max
  unsure (1)..(279): unsure at all n locations
ttcacttgcactttcattcttctccagtcttattttcatgcaacctaagtttcctcacgaagcctggttttggttgtcagatcccactnttttcatccttctatccatttcttggttccttcattggaaactcaatgaaacatgtacaacctggacctattgatggctcattggtgcgcttacaagacaaccatatttcaaatcaagtgtgggaaggtcaagagagaatgattcgtccaaggtataattctgtttgggctttacacacttggatcaaac

SEQ ID NO: 93514 - DNA, 61 bp, Glycine max
tcatttggaccattggaatgctgtcatgcgtattctgaagtatgtatagaaagctcctgga

SEQ ID NO: 93515 - DNA, 346 bp, Glycine max
  unsure (1)..(346): unsure at all n locations
tgccacccagctcgcacaggcgagctcagctcgcccaggcgagctgggtttgttcctccagagcaacagccttctggaggaatcttctggagggcccaagtgggcctggttgctattngtacccccacttttactaagtacaccccctgccttttattttggagattcttttttcttaaagttacggaaacttatgaatttcgtaacgatacttggtgtctttccgtaatggtatagaaccttgtggattacataatcatccctctttgacttacggaatgttatggaacctcactaattgtgcaacgatgcttccatttgatttccggtgtgtcacggaacctta

SEQ ID NO: 93516 - DNA, 373 bp, Glycine max
tcttactttttgttattatcagcttgacaccgctctcttccggagctttcttatattgctgaggggttataccaaacatcttcccgattcttttgattataagctagtatgccgcttgcttgtcaaaccactatggtcaaaccgtcccacataatcggcatatactgtgatatgacagcagtgccagaaagatcacgagaaagctaccctcaagatggaagggtctatgatcttgcgctcacatagataagagggagtaccaatgctctcctaacagacaatgcctctacattaattgggaggtgagcactcatgggacacgccccaaacacgtagggtaatctattgaggatgagggagcacgatgaacacc

SEQ ID NO: 93517 - DNA, 230 bp, Glycine max
aagaaaaaacaattaatgacccagaacaagaactagaaaactaacaacttccaaagatgaataaaatggaaatgaagagaagagcagaagtgattaagctgttaacgaacgtaacgaagtaccatatcctatggtaccttacaagaaagagaaggaccgtcatttggcgagacttttggatatctttacgaaactagaaataaccatgcccttctgagaagctttacagc

SEQ ID NO: 93518 - DNA, 493 bp, Glycine max
  unsure (1)..(493): unsure at all n locations
tgcagcttctcccccaattttataatagggggagaagttttgtatattttgatncatccccttaggcacttctctctctttcgaatatgcttagacaaaattgntctcgcgaagaaaatccaagccgaggcgcttccgtaacgtntccgtgagtgatatcgcgaaggttttcgaccgttcttcgacgttcttcattcgttcttcatcgntcttcagtcttcaacgggttagtacctcacaccaagccttttaatttcatctatgtacccgtggtgcgccacatttggtttcatgtattattattctccgtttcaattacttattatacccncctttgacgtcctaagccatgtatttaagcatttctcgctaacctagaataaataaattccaccgatcgttgaatcgatcatccgtactntggtgaaatgattctgaccgacggcatgcgcacccgttgaattataaaagagtaatattcttataataaaaa

SEQ ID NO: 93519 - DNA, 381 bp, Glycine max
  unsure (1)..(381): unsure at all n locations
acacacacttggagataggttctccttggatgtctctacagaagaacgattaacatagagaattgccttcaataaatgccagatgaaatctccgagcatctgttaaaggttccttctatcgcacagatcttctaaacttctttaagtggatatgggatggagtcggacaatgtctttgtgtataaaatggacgcttgcggagaggtgatacatgacagccctcaaaggactcattgcctgatgatgatgaagcaccactcttccttgtgctacgtaaagtgatagactattctctgtcaccacacttangattggctttactggctggtgtttgacacgctatggatgaggacacaatagcggcttgtgccataccttcac

SEQ ID NO: 93520 - DNA, 362 bp, Glycine max
tctctacaattgcatcacctctcattgttttgtgaagaagaatgaggcatttacctgcggtgaaaaacaagagcacgcccctgctctgcttacagaaaagcttactaaggcacctattctagctcttactgactgttctaaaacttttgagctacaatgtgatgcctctagagtgggagttggagctatattgttacaaggtgggcaccctattgcttattttagtgaaaaacttcatagtgccactctcaactaccccacttatgataaagagctttatgccttaataagagccctccacacttgggaacattaccttgtttgcatggaatttgtcatcatagtgacatcaatcacttaag

SEQ ID NO: 93521 - DNA, 159 bp, Glycine max
  unsure (1)..(159): unsure at all n locations
tcggagtatgattggctaatgtgcaatgttatgtgtgatagatnggaaatattatatgagcctcacttgatattacgacatcgattcttgtgaaccaacgtagaatgcgagaggatatgcgaactgcctctctcagtcctagcccttatttaatcactc

SEQ ID NO: 93522 - DNA, 156 bp, Glycine max
  unsure (1)..(156): unsure at all n locations
tctgaatggagagagagaatatgtgctcttatttataatagatttctctttcctttntctaagagcaatgccgcatgtctcattttgagtggagcaaaaggggcccacctcttccccttgatgtgacttcatactcagccacaaggagagaaaaaa

SEQ ID NO: 93523 - DNA, 352 bp, Glycine max
  unsure (1)..(352): unsure at all n locations
tgacaacatgcataaccattccgagggagttatttaagggtccctctttgaggaacctttctgattggctctttgaagtaccaacatacactacatagtcattctaatgtgtgatgagaatgaatctatactngatagattatgctgatgaagttcacattgatatctcattttgaagtagcacaatttcatcactcttaacactatgtcacaactncccgcatctggaatgtgatgactntagagnaactaagtagaagttcactattggtgtgttctgccatggtagacaagtggtatcttactctttaatatgatgctctcatagtgtttcatgcacagttcacttcac

SEQ ID NO: 93524 - DNA, 429 bp, Glycine max
  unsure (1)..(429): unsure at all n locations
actaagcttacatggagctacatcatgtggtatcagagcattncatctatttgatgttcttnngctcctctggctttntgttcggtcaattaactctaattccatgttattcatcttattctccatgtatatccttccatgnttagagtagattaaaaaaataaaccgattaaatcttagatctacacttgttcttgcatttctatggntcaaaatttatagatctactcttgaatcatgtctctgtgttgattttacgttctatcattttccagtcataatcttcttgtgctgaacctttagatctaaatnttcttccaaaatattgattagaagaaaaaacacaaaaatctaagtgtaaatcacttaatccatgttgtcttagaagtcatgttagtcataatagttgtcacattatgttctaagttt

SEQ ID NO: 93525 - DNA, 292 bp, Glycine max
ctcgaatatttgtgtgagtatcatttattatcttatcagttatctgcatacactcatctgtttgtccttcagaggctcaacgtctccactcgtttactctgatcccgacggcgataaagccatacacagacacattttcaagctacgacttttatcaaccaggatagcgttaaaagaacataactgtcaggtagtggatcgattcccacgtattcttgagagagaaatagtcttctcacaaatagatagtctgacacaataggaaagaaagaaagaaagacgaactgagagt

SEQ ID NO: 93526 - DNA, 420 bp, Glycine max
  unsure (1)..(420): unsure at all n locations
tctagaantaaggagaatgacgattcacctgataatgcggagagatgacgacgagaatggagaatatagcgcaagtttgcattttgattgagattgaaaaaaggcgctgcagaggaagaagcacaggcaagtaccctccttacagttacagccataagcatagtcatcggcacttggctctagttgtacacatgaccaagagtagtcactgcctagatcggtgctccgaccaactttggtctatatatacggcagatctaatgggccactgccatcgtctggacatggcccatacatctttggtgttcgcccacttatttcaagaccccctctcacattcactcaaaagactataaaaacaacatccgtctctaattagtgattactatattacacttattttgcactaattccccactc

SEQ ID NO: 93527 - DNA, 439 bp, Glycine max
  unsure (1)..(439): unsure at all n locations
tgacgctgcaagctattattgaagagaaactcgagtgttagatantattctaacaaatacgacacaacaaaaattaagatctttacaactcttattattctaaaacctacgtaagatgcctatgttacaattaaatcacaccatttctggggtttcagagaggaggctacatgtccaaggcaaaacttctcatcagataaatagaaacgatagaacacaccataatcgttctcttttcgatgaatggtcaccatgaaattttagccacccagacaataatgatcaatttntactngagccaaaagtctgtagcataaaagatatcaacatcatcaccccgtagaagataaacacatgctttagtacaaccatgtatttttacaagttcacgaagaaaatntccaggacaagatcatcacttatataagacagcatgcat

SEQ ID NO: 93528 - DNA, 211 bp, Glycine max
tctccagatttacctgcgtcaactttatcagagagaaatcagacaccttttgaagattaaggagttgagtctaagacttcaaagagaaaaagactgtgtcatcaagagaatcatgagtgaccatggccgagagtttgaaaacagcaggtttactgaattctgcacatctgaacgcatcactcatgagttctctgcagccattacaccacaa

SEQ ID NO: 93529 - DNA, 268 bp, Glycine max
gcatgtgtattatgacgcatcaacaagaatcaagccaaggctattgtgcaagcaatcaatggggcaaaacacaccaaatgattataatgatggatggctcaaagtctcacacaggcaaaatcatcactttcaaattgagctttcaaaactatcatgacatgtagagaagaatcaaggattcaagtcacaaaatgtcaagaacttctattttcaaaacaattacccatttcttgaacatatcctataattcaaagaaatacatgcaaag

SEQ ID NO: 93530 - DNA, 315 bp, Glycine max
ttcttcataatcctactatccgctgagttattataggggctggagcacatatcttcaatgacctcgatggcatcaataacggtttaacatgaggttacccctacgagcaacatccaaacttgtccttttatgtgcgaacactctaccatggaaaatgtgaattagcctttgtagggagaaacgatgatgtggatagcttctgatcatctcttggaactttcccaggcttcaggtagactctcttgatctctctgcacacacgttacaatggctctgatataatgatatgtattcatgggagataaataccttcat

SEQ ID NO: 93531 - DNA, 381 bp, Glycine max
  unsure (1)..(381): unsure at all n locations
gacgctgcagctttngcttatcttgtatacttgacaccttttttgagncttcattagaccaccttgtttcatatccttggactctatgaaaaacgaagtcatctcatagagcttcgccaattcttcattaaggaatatcactttacggtttgatgacttctcagacttgtctctgacgatgggcttttgtctttgatgagagaccaacactctttcttggcctcgcctatgatgtctgtcattacctgaggaccacaagtctcaaggacagaatcagattcttaactctagttcgtactcgcgtctctttctagacaatttcaaatttgcaaatatcaagtatatagtttgctaagactattcatagatgttgaaacatta

SEQ ID NO: 93532 - DNA, 274 bp, Glycine max
aagacactggaaattatcttatctctcctttctggacaaagtatgagaagctgggggcaagttaattttcttcccatcagaccttggatgccactatgatcgtatccccatcttagctagatcttgacgcgtatttgtcgcaaatgccttttgccggcgtgtgaagcgacgctcacttgtgcgcttttcatatgaggaaagatgcgcggagccgcaccaacgtctatgtgtggaaacgtcggaataaccaaagaagaccggcaaatgaaaatct

SEQ ID NO: 93533 - DNA, 479 bp, Glycine max
  unsure (1)..(479): unsure at all n locations
gtatgtctcgtatcggtntaatcaattatctttatctcataatcgattagtctgttgtttgagacaatgactaatntatccaggagtctttgcttcaatcgattaccaagtgggttaatcaatcacttctctctcgtttaggtgttcagaagtgaacaaaaacactttaattgattactttgagtatctaatcgagtacatcattcttgatttatttccaaatggtgggaagaacactttaattcgatataaaagataatctaatcaattactttcgttaataattggattatttgtagattaatcgatggcagcagtataactgtttctcttagatactagcttgtgctccttcatatacataagagaaactcatatctcgaaatacacataacattgaatagataaaacttgagtgtatagtgaaaagagaaanaggactcatatactacaactctaatcgtgatatgagaatttct

SEQ ID NO: 93534 - DNA, 380 bp, Glycine max
  unsure (1)..(380): unsure at all n locations
tcccgcctacaactgccttttggggaggccatggatccacgcactatgagtggccncctcgacgcttcaccaaaaactaaaaatcgtagttggaggactcttggtcatagcgtcgggcaaagaggatatgttggtaagctgcccctgctctgcaccatatgtaaaggcagcacaggaatcatngganataactttccaatccttcgaggtggaagttgtgcctctctggaacaagtccattgctacctctgttctctaatgcacccctgatggtggncangtaatgctcangcactgttgtgagcccgaatgggtctggcaatgacaccacggaatgccgatgtggtgacatatgggtaaccccacaaatatggtgggga

SEQ ID NO: 93535 - DNA, 396 bp, Glycine max
  unsure (1)..(396): unsure at all n locations
gctttacgtgtagagaaatcagaccttaatgtatatatcttattggactggggcattctgatttgttgaaatatcaaattaaaatatacatacaattgcagggataaatgatagccagaagtatatattcagacctgcaaatttagaaacttatatatcgaggaagttaagcaaaaacactaactatatacaaaacttcaattctgaagagaagataccatggatgttcacgaagatgcagactatggtcataatccaaagcggccagctgcaaaattgaaataaagaaaaaaggttattcagctctaaagttcttcattgtttttttcttaatacaccttngattagacnaaaaaaacatctggtattttctacaataactctggagtttctcac

SEQ ID NO: 93536 - DNA, 225 bp, Glycine max
  unsure (1)..(225): unsure at all n locations
gcagcttcttgagaaacttccttggaagctatagcttatctcacacacncctctcataactaagctcaccttcttgagaagcttccttaagaagattcctaaagaagctagagcttagctacacatacctctctaatagctaagctcacctccttgagatgagaagctagaacttagctacacaccccctataataactaagctcacccccatgacaagaaacat

SEQ ID NO: 93537 - DNA, 446 bp, Glycine max
  unsure (1)..(446): unsure at all n locations
gtcttctggaggaattttctggaaggcccaagtgggcctggttgctatctgcacccccattattactaagtgcaccccctgcctttttgggtgattctttttccataacgttacgaaactttacgaaatttgtaatgatgcttgttttctttccgtaatgttacgaaaccttacggattacgtaatcatcccttttttgccttccggagcgttacggaactntatggattgcacactaacacttccttttaatttccggcatgtcacggaacttcacggattgtgctacaatgctttcttttgacttccggcatatcacgaaacttcacgaatngcctaacgatgggtgccaagtacctcggagtggtaaatgaaggtcgcacctaacaacggatggtccccggacgaaatanggtatgacaanccggcctctcaatgagtcaatc

SEQ ID NO: 93538 - DNA, 344 bp, Glycine max
  unsure (1)..(344): unsure at all n locations
agtcttcatgttatatatgttgctttctctatctctaacaggttctaccaaaaccgatgttgtataatacttataacattggctttcccataactgatgtcataattgcctttttttgtctatttgctactataccacattggttntggagagaattgatattgtataatggatttcaacatcgatttttataatcgatgttaaaaataacctacttttaacaatggtcatttcaacatcgactcanaattgatgttgaatgtgaanaanaatcgatgttaaatgtcaatttngtagtagtacaccaacaatgtaaataagacagacaatagtgaaacagtaat

SEQ ID NO: 93539 - DNA, 462 bp, Glycine max
  unsure (1)..(462): unsure at all n locations
gtctcacgaatgtcacgtgctcatgcaacaattgttattcgtggctatacgagacatcttgccaaacaaagtcaggttagccataactcgcctatgctntttcttccatgctatatgtagcaaagtcattgatcctatgaagtttgatgagctggaaaatgaagctgcaattatactgtgccagttggagatgtattttccncctgctttctttgacatcatgattcacttaattgtgcatatggtaagagaaatcaaatgttgtggtcctgtttatctacggtggatgtacccggttgagcgatacatgaagatcttaaaagggtatacaaaaaatctatatcattcaaaagcatctattgttgagaggtacattgcagaagaagccattgaattttgttcagaatacattgagaagggctaaacctgtggccttcctttgtctcggcatgatgacagggt

SEQ ID NO: 93540 - DNA, 390 bp, Glycine max
  unsure (1)..(390): unsure at all n locations
cctcacttcttccttcattgttgggttgagccttctctagggttggatgagtggtctatagtctccttccatcattntcttgtgcatgtagntggcagggctgattcctttaagatctaatatgtgcgcacccaatgcttccatgtgtcccttgaggacctttaccaacctattctcttcctctgctgttagctcactgtgatcaccacaggcttgggtctcgctctctccaagaacacatactttaggtggttgggtaggatcttcaactccaccttgtnctctcggatggactcccactttntaattcttcanagctggtcccccttgaggaatgtntcttatgatctaagtctccaagaaagcctcagatccttttctcttcatagt

SEQ ID NO: 93541 - DNA, 453 bp, Glycine max
  unsure (1)..(453): unsure at all n locations
ctgcagaattggtcttcgccagtgaaaggatcaatgttggtccttatagagagcaaattgatcatcctactatgacgactgagaaaactggngcaaataaagagggtgaggatgagggagaaacccatgctgtgactgccattcctgtacggccaagtttcccaccaacccaacaatatctttactcagccaataacaaactgtctccttacccaccacccagttatccacaaaggtcatccctaaatctaccacaaagtctgtctaccgcactttcaatgacgaacaccacctttagcacaaaccaaaaaacaccaaccaagaagttgaatttgcagcgagaaagcctgtagaattcaccccaattccagtgtcctatgctaacttgctcccatatctacttgataattcaatggtagccataaccctagccaagggtcatcaacctccatt

SEQ ID NO: 93542 - DNA, 370 bp, Glycine max
  unsure (1)..(370): unsure at all n locations
atcgagcgtttcgttatatnatagtactcaatcagacatccgagtgaaaactgattgacgtatgaattggcttaaagcttacacattcagntgtgcacagctcgatatattatggcactcactcacacatccgagtactacgttattggcagtggaattggttcacaggtatataatccactctctagcgtcccgatatatatcgggactcgatcacacttccgagtcacaaggattgccgctcgcatcggcttgatggtcaacaatttaattaccagcgtcttcatatacttctggactgaatctcacatccgagtaacaaatattgtccccagattcggttacatgttccacaatctattccgagcgc

SEQ ID NO: 93543 - DNA, 366 bp, Glycine max
  unsure (1)..(366): unsure at all n locations
gagactcagcttgagccattctacgaaataacttttactcggatgccgatttagtctcgaagaaatcgacacgctcgaaatagaatgttgtagctctaagcctattcaaacaagagtaacgtctcactctgaagctcgagtgagcgacgtcatatatttggacgctcgatattgaatgtcgaccctttggagccacgcagacgacaactcacttctactccgatgtctgattgagtcccgactatatcgagacgctcgacattgaatggtgaaccactgagccaattcaaacgacaataactatctactcggatgtttgattgaatcccatagtatatcgagacgctcganattgaatgctgaacc

SEQ ID NO: 93544 - DNA, 433 bp, Glycine max
  unsure (1)..(433): unsure at all n locations
cctgctattaatctagttatgtgtgctatatatatatatatatattattgagatgtcttcaatttctattcagtgttaaaattgtgtcatttttctttccatctacattacgtaattattnttatatgcatataaatggcaaataatcataatatgagtggtagacgaagaggtactggtatagggattactacacgtatgggaagagggagaagtacaggtactattctgcaccaccttctacttctccactgacacatcctatgngcaaccaattcctcctacacttgagcactgttccacattccaaacacctgcacnctcccaacttagacgatctacatgtaactctcattttgatgcacacatctttcatatccaaacactaccgctctcacatatctgttattatatacttattcaccacatatcc

SEQ ID NO: 93545 - DNA, 381 bp, Glycine max
  unsure (1)..(381): unsure at all n locations
ctcagcttatctagttcgncgaccatccaaaacagattgtctacttgtgtngcgaatcgaattttggagcagtatctacgggctttcgttcactgcaagccatctgccgtggtggcatntcttatggtgggccgagtggtcttatagcacttcatgccgctccggtaccgggataacgcttgtcgagatcatctactaccggaaaccactagctattccggagtatttgagggggaacttcgtctgtcaaagcggtggatgagatgcttcgccaacgggatgaggtttaaagttgcttcgtcgatactgctttggcacagcagcagatcatatagaccgcggatgctcgacgactactctcagagttcaatatcggtgact

SEQ ID NO: 93546 - DNA, 292 bp, Glycine max
tggtcttcaccagtgaaaggatcgatgtgtgtccgataagagggcaaattgatcatcctactatgacgactgagaaaactggggcaaataaaaagggtgagaaagagggagaaacccatgctgtgactgccattcctatacagccaagtttcccaccaacccaacaatgtcattactcagccaataaccaaccctctccttacccaccacctagttatccacaatggccatccctaaatcaaccacaaggtctgtctaccgcactttcaatgacgaagaccacctttagcac

SEQ ID NO: 93547 - DNA, 303 bp, Glycine max
  unsure (1)..(303): unsure at all n locations
ctctcanagctttggtaagaaagaagagatcaccattntcatctttcttccaagtccatagtagtgtcttaagactctttctctcagagctttggtaagaaactnttaaatcttttcttttctactcatttcttcatcattnntgnngtaaacccttatgttnggttcaaaattngttntcatctttgagctaagactcaagactgaactttcttctgacattctgaaactcattaagtangaagcntttactctaacctacatgtgcttggactagctatctgtggagttaaatcgattctg

SEQ ID NO: 93548 - DNA, 351 bp, Glycine max
  unsure (1)..(351): unsure at all n locations
tcatgtctattctctatatttatacgaccaaggcgctgccaagacgctcaaaggcatangcgaagcattgacattatcggcaaaggcttgggcacttgtggcactttctcacatggatacaacaatcgttntccatagtgcgccaatagtaccctaccctcagaatattttgagccgtggcatgtttgtcggcatgtgttccanaggatccctcatgcacttncactagcatctacttcagctccctgcattcacacatcggaggaaaaccataccatggttcctcttgtacaggatatttccactaaggaaaaagccagctggcaacctctgcaacattctctttgtcgt

SEQ ID NO: 93549 - DNA, 246 bp, Glycine max
actggtttcctcttcttccaacacgactatatttttttgcccatatgcactctgctgctgaactctctctcatgccggtcatgtgatatggaactttctatatgctctcttaaataatagccactatgtgtttgttgctgaaagaggaaatgaggataatagtcccttctaatgggtactgggcgtgttgctggatatggctgaatcgtatgaaggtacaatctttctatgctcttaggactgggc

SEQ ID NO: 93550 - DNA, 431 bp, Glycine max
  unsure (1)..(431): unsure at all n locations
actcttaccacttatgatagccgccgatgatcccattactgccttccctaagctctcttgtctttcttcacgccggcatccatgcctttgcgaacttctggagtaccctcgcgttgtggcactgaaacctcgtgcgatgaaaggcgtggtgctttcgtctgatgggcactctctcatgggacatnncttgcatgaagatagaatcctgattcttcctttcttctagcgagggaaccatntaacagacgcccctccatgctagccaagagttggtgcacaacanacaattcttgcgtcgctcttttcacatccccggtcgaacgtgtcatacatgtgccaaatggaacgaaaacggcttcttgcatgatgaaagggaggaaagcgtcatcgctgtaggtcactaacccttcatatcngaaagagacaactca

SEQ ID NO: 93551 - DNA, 94 bp, Glycine max
tgataggagtttttccttttgttagaaagtccctaactacttcaatgtgcttcagatgccagactgctaaagccataggaagcgcagacattcc

SEQ ID NO: 93552 - DNA, 373 bp, Glycine max
  unsure (1)..(373): unsure at all n locations
ctcgaactagctcaagatccggcatatcttgaagtgtgagtttgctatcatatgccatcttggatatagggtgatccagctatgctttaccaaagggttataagtcagttgaatattgagtaccgtttgcaaatgtggcaaaatgaatcagtacatactgttctctatgcaacatttagattatgagnctgtactcagttcacttgcaaatgtatggcctgtgaaattaatgatcaccctatttggtaaattccaacttactgcatattgatgctcatgtttatggtgattgtgtgctcttctgaaaaaaaaagactatttgttaaaaaaggaccttcatgcctacatggtaacaatatgggatagaatcaaa

SEQ ID NO: 93553 - DNA, 267 bp, Glycine max
agggccaacaagttccatcacaatgccataaccacatcctgtgccactcaatgactacgtctccacgaccatatcttgttttcaaacgggcccataatcctccagcttccaacatcagaaacaaattaacagccaactatacagcagaaacaggcaagcaaaacttgccaaaacaacaaatacagtttcactaagacccgacattcttgttaattgtaccgtgacaaccaaatttcggagcttatcaaacctctttacgtggactgt

SEQ ID NO: 93554 - DNA, 523 bp, Glycine max
  unsure (1)..(523): unsure at all n locations
cctgcacgcatgcaagctacacattaataatctgtaagagtaagtttactgtttcttaatccataagagacttacaagtgtgtagtctgttatataatttgtatacaaattgtcaatctgtatgttcggattgccaatccatatgaaagaatttcaatttctttctatatatattaanaaatatatcttacaaattaatggcccatgtagaatttgaacactaaagtcatatacgggatcttattatgtttcaattacattaacgtgatattaagccttacttgagtcttattgggttcaatcaatattattgatatgtacactaatgcatattggaagtgggaatgcataaatacacatggaactaatgttcatgcacctaacattctctcggccccacaattattgtaattcacagtcctctgtaataactaggattctaatcagagaataattangattgaatcttaaagactcaagtcatatcctacacatattgttatgaattcatcatatgtcaata

SEQ ID NO: 93555 - DNA, 424 bp, Glycine max
  unsure (1)..(424): unsure at all n locations
gcttctaaagactgcgtgccgataggatactttcttgtttaacaaaagttatgcactgaaaagttttaactntagaaacaatcttnctatctctaaatgatgatggatgatgtacacatagatagattaagaggcaacaatcaatacaaatgtcactcaatgagttgcgcatgntaaaagacaaaactcttcaagaattcanagcctaatcttcatgttgctgcccctatctctaacaatctcccttttttttggctttgatgatgccaaactctaattaccattgagtgcatatggaaaggctttagagtagaaacttntcttgaaatatacttgaaaaaagtgaacactatggccaagaaaactcgcaaantatatcatcatcatcataatagagttgagtaaatgactaaatatatgtatg

SEQ ID NO: 93556 - DNA, 465 bp, Glycine max
  unsure (1)..(465): unsure at all n locations
tcttaagtgacgccgctgcagctttcattatgccccgagtggcccattgttttttgcattttattctcgntntggttactttttatacccactgttgacgtgctctaagccatttacttaagtcgtttctcgcttaacttaaanataaaataaatntccaccgaacgtttgaatggtattatccattaacttcggntaaaatcaattccgaccgttcggtcatgccgtaaccacgttggaaatcaaaaagagggtaaanataatataataatcanacaaatatctttttagtanaataaagcgganaatcaatcggacgtttttctctttgggaattctcatttcgaattggataataactaaagtgaaactaaggctaanatcaactcgcctagtcaagctcgtncacannaataggcttttgaagttggcatttcaattctcactacgtagatggatcatttt

SEQ ID NO: 93557 - DNA, 408 bp, Glycine max
  unsure (1)..(408): unsure at all n locations
ccttgaatctgattctntattcttganatcttatttcctcttgaaccttgaagtgttcttgattcaatcttgaacatcttaaattcattctttgattcttttatcatgaagtgttcttgacttttgagctttntgtcatcacctttggtatcatcaaaacttctttgaatcaatcttgattcatcatgaagcttgcttctacagtgtggaggggacgactcccactgaatggatccatggacgcnccanaagacaactgtaggccgggttgatatccatcacttggaatgtagcttggcaggtatgaggccctatctgtactgggagatcgatctctccccttacctctcggcagctaccgtcgaatgcacagaccaccatggaacttggccttagatggggaagcgt

SEQ ID NO: 93558 - DNA, 229 bp, Glycine max
  unsure (1)..(229): unsure at all n locations
gcttagtgtcatngatgaagagatcacattctatgtgtttgtgtctatgaatcacctataagatgaganatcttattttcggatggatgttcttgatgagggctttgttcattccaagaagcaattatctaatgcttcacctcttgagaaagcccttatagatgcatttgaaagtcttaatgaggaggaggaaaaagaaattgaagaatgtttgaagagcttggagaca

SEQ ID NO: 93559 - DNA, 515 bp, Glycine max
  unsure (1)..(515): unsure at all n locations
ctgagaaaattctaacgacaataacattntactcggatgctcgatngagtcccgtaatatatcgagaggctcanaattgataacagaagctcctacccaattcaaatgacaataacttttaacccggatgtccaattgagtcccgtagtatatcgagaccgctcaaaatgaaaatagaagctctaagaaaattctaacgacaataactntntactctcccgatagagtcccgtaatatatcgagaggttcaaaattgaaaatagagtctcctagcanattcaaaccacaataagttntgactcgatggtccgattgagtcccgtaatatgtcgagacgctcanaatttaaaatgaaagcttgtagcanattcaaacgaacaataacttttacttggatgcccgatggagtcccgtaatatattaagatgctcgaaattngaaacagacccttctagccaattcanatgacaataactntntacttanatgtncaatngagtatcgtaatatatca

SEQ ID NO: 93560 - DNA, 423 bp, Glycine max
  unsure (1)..(423): unsure at all n locations
cttcgcgagtatatttgcgcctgaatcggacttgcatctganaagtatgattacnttgaattctcgagagcttgcattgttcaatatcaagcttctcgttatattacgcgcctgaatcgtactttcacttgaaaagttatgaccatttgaatttctcgagagcttccgttgttcaatttcgagcgtctcgatatactctgcgcctgaatcggacttccgtgtgtcaagttatgaaccatttcaattctcgagagctttcgctgttcaatttcgagcgtctcggtatattatccgccttaattggacttccatgtgacaagttctgaccatttgaatatcttgagaccttcgttgttcaatttcgagtgtctcgatatagtatgcaactgaatctgacttccgtgtgacaaggtatgaccatta

SEQ ID NO: 93561 - DNA, 451 bp, Glycine max
  unsure (1)..(451): unsure at all n locations
ccttggaagagctcctaatacanaggagactctgtccaatctttcttaagatttntaaacaaactctggatttcacaattcgtggctatgagaacggagaggtgattgagcatnntttagttactcattttatattnttcttagcttattttacctttctttgactcttatnttctcaccttaactttagtttagtcttacgccaataattgcgcttaattgacanttgtgcttatttatggatgttgngctacttgacctattgtcttcatcttcttctctctcaactcagtctccttttcttgcaaaattgttgtcttcactgtgagacatggaagtaacatcataatcacgaccatccgcaagtgattagtatcttaggtcatatgggatgctctctcatccatttcattatgattatgctagataaagaatagttatcttcctatta

SEQ ID NO: 93562 - DNA, 486 bp, Glycine max
  unsure (1)..(486): unsure at all n locations
catgagataacatgctctattntcatctcccactccaagtaggcctccggatcattctttnctttaaatggaggaatgtngagtttaataccatcaattcggttttgtctaggaacaccatcattccctcttctcctcctttcttcttcattatgatctctattctccatttgatccaacctctcatggagcgcatcatctcgttggttcattaacctctccaaatgttgcatcaaagcttgcatttggaattgcgaaagccccactccatcattaggattagtacctgacatctcanacaaacaaatcanacgtaacaagacaattattagtgctggttgaatacctcacccactcaagtgtatcacacaattatggcttttctctaatgaaacactcttngccttttaccactctaatcccctngagttcttangcaattcaagagaaatatggccacacacagaacaattcaccaatatgtgt

SEQ ID NO: 93563 - DNA, 389 bp, Glycine max
  unsure (1)..(389): unsure at all n locations
ctgcngcatgcaagctaggaaggacttgatattttattattttatgcacactcctctactagggtatgataacttattatttaattccaccctctgaatcactgaacgtccaccgcgcgtgccctaacaaccatcctagacccaagttgaaattatgaaaatactggccatattcatattctaccatataattaaacttaacctggaatatttattctataaatagctataccctcctcacaaaattctgtcttcccaactttgtaatacgaccggcactggatgttgtcataaagttaaccttaaataaagacctgctatgtgagtccggaatacttctacatgtgaacacaaacatatccgaattgaagtacttaccgcgaaaaaac

SEQ ID NO: 93564 - DNA, 389 bp, Glycine max
  unsure (1)..(389): unsure at all n locations
ctcagctaagagagtatactagagacattctgatttatagctttttcttttaagaagcgcctgcatgattcaactatgtgaccaccccatcatggcaaaaataccattcgtctgagaaatgcgaaattcttgtgaacattcttgtctagtgcttgttctagagattcagaagcatattgaacgaagctagttcatacagtanatccagctttgttagaatatgaagtccacaaccacaatgtagcagaagaatgtgtacttgttcagacctcaaatagtgcattcactaccaaagattgtaatgcacacccaagtaactgtctcctgcatattctgtgcaataatccaaatcagagctcagataatttgaagaatgatggatacaggtg

SEQ ID NO: 93565 - DNA, 268 bp, Glycine max
  unsure (1)..(268): unsure at all n locations
agagcacctgccgcatgcaagcttatgcgtaccaagtactatactacacttttcctttctttccacatagcacaatatagnaattgagattataataactgttctattttgcttggacttgcttgctaattcagagatggtaagagtncgccaattgcgcttatcggatatcgtactgaagatgaagctcaggaagccattcgatanttcaatagaaatttccttcggacatctagannatattgcganggctggtatatatatgtat

SEQ ID NO: 93566 - DNA, 508 bp, Glycine max
  unsure (1)..(508): unsure at all n locations
ctccatcactatntctcaagatattgttgccaattcacagataccatccaaatctaccttcattnntgtcctttgaaactcaactgtggaacctgctctccatgatagacctaattataacaattcccctaagcattntgaggccacatgttcttcccttttgagctcagaaataacactcaacagtgactatatcatcactaaatcagaggcccaagcaggtgccaagaagcatagaacctcgtctgagatcaaagatcacataatggctgagaagaaaaggagacnggaactcactgagagaatcattgcactctctgccaccatacccggattgaagaaagtgtgtctacaattcacaattcatgtgtanataagtctagctagattcataattatcaagaanaattaatcctccctatatttatacatttttctcgcaacacaatatttctcatctccaatgcttatttctaaattattatagtaaataataataataataata

SEQ ID NO: 93567 - DNA, 361 bp, Glycine max
  unsure (1)..(361): unsure at all n locations
gttgattacatggatcacatagcatcattgagctcgattaaagactaaattctcaaggatattattcaccataagatgcctcttaataatttatctaatgtccttggttttctctccccctttcacatgtctaagagcattcaatctactatctaaatnggtgtttctagtgacctttcacgtgtccaaaacccatcttaaccagtttatgccttttntttctcaatcggtgtcaccaacatcttatcatatacaaccacttcttatccttcactttcttatgtagcanaacatatgacttgccanatacaagccanaaaacataacttcaaagttaaatacatgatcatcaacgttatac

SEQ ID NO: 93568 - DNA, 429 bp, Glycine max
  unsure (1)..(429): unsure at all n locations
atggacttgatggggcctatgcaagtggaagccttgaggaaagaggatgcctatgttggtgtggatgatatctccagatttacctgcgtcaactctatcagagagagatcagacacctttgaagtattcaaagagtngagtctaagacttcaaagagaaaaagactgtgtcttcaagagaatcatgagtgatcatggcggagagtttgaaaacagccaggttactgaatactgcacatctggaagatcactcatgagttctctgcgccattacaccacaacataatggcatagttgaaaggataacaggactntgccagaggctgttgggtcatgttcatggccaagaccttcctatatctctgggctgaagcatgaacacagatgctcatcacaacagagtcacactatagagggactctacacactg

SEQ ID NO: 93569 - DNA, 360 bp, Glycine max
  unsure (1)..(360): unsure at all n locations
aaatatccaacctcagacataattactaagaatatatatatatatatatatatatatatatatatatatatatatcagggtggtacaggtaccgtgccccacattgctatctacaaacaacaccttttagtcttaggacatatagtcacaaacactgacactggacagtatagtagcacgcanggtgcccttgccgaaagccttgcagggggtgtttgtttgtcactatataaagtcttgtctctttcttaccctaccctacatgtcactaacttcaaaagcccaacaacanagagtgacaaccaaccaatgaagctaccttgcaccaacaacaatatatcatgacctgctgcgagtgga

SEQ ID NO: 93570 - DNA, 312 bp, Glycine max
  unsure (1)..(312): unsure at all n locations
tgtctgcctgagcgggctcatagcctaaccatacttccacgatttcttgagtattatatgctagtatgccaccgtgttttctctaaaccatcccggtttaaaaccctcccaacataactcnggccatcattaccgctgcttcgacagacaacgttgcccaagagggagttcacggaggaaatgctgaccacctcaaaagactggaaagcagatcttaacgattcttctgcgggtttcacataacgcatggaggatgggcagcgtaccaagatattttccttgcctgaaacgacgaccaagtgcgcctccact

SEQ ID NO: 93571 - DNA, 139 bp, Glycine max
ctgcactgagatctggcatggatttattaacctattcctattgtgctggaactataacacagaacattgattgcggaaactatatccttacaacacacttgatattgtgctagaaagtcccatgtccacaagaaggaca

SEQ ID NO: 93572 - DNA, 389 bp, Glycine max
atcatattcctttatcatatattgcttgatatctatctaacaatcaattctaactcatagaggagaaagtagaacttgaacaacaggaaacaagaagattaatgaaagagcttgagagcgaacaggtagatatgagaatctcatgtcattgaatacaattttctttatacaaaggtgttgttataagaatgttgtctgctgtacatccaggtgccatgctaatgttatattgacaagactgcagaataagttattgatatgacaaatgtcatgactctaactgactaatgctcttggtccaaagaatgaagaagaacttatagtttatatgctgctcggctgtctaattagtgtttattttctctgtgcgatctatatcatatcctcat

SEQ ID NO: 93573 - DNA, 201 bp, Glycine max
  unsure (1)..(201): unsure at all n locations
gcactcagctcgcttagcgagtngngagaattttgttgataatctatcattcatgcacacgcncaacgtgccatcagctcgctcagcgagtcattngtctcttctcgcgctcagtgcgcccagctcgctaagcganaattcactaactcacacttagcgagaaaatggcgctaagcgagccttcaggatcaaaaagccctt

SEQ ID NO: 93574 - DNA, 398 bp, Glycine max
  unsure (1)..(398): unsure at all n locations
cttcagtgactgccannacaaagctaacacattaataaactcgnttacctttggttttctcactcttatntaaatcactttttaaaagaagaacaaatacatgaatatgaatgacccagcggccaagtgggcaacacgtaacaagtattggaatatgtagcttttttatcatganaacaganaacaaactatgtttnaaaattttcaataacctttataaaaaaagctttcaataacaaanaanaaatcaataaaatgaaggtatattatttttaatattatgacactatttgttntaattaaataaactaatataaaantaaaattatatattatattntatttcattctaaccctttntttcatcanatacctatttattattttattattttatc

SEQ ID NO: 93575 - DNA, 422 bp, Glycine max
  unsure (1)..(422): unsure at all n locations
gctgtgctagagagagctanactctntcttggttttttactaataacacaatngattctcatcaaggaagctatcctttatggagaatcctcttcgcttatcgattctttgggatatggcgccgtctgtcatattctcatctatcctatntctattttctcgtctgagtctcggaagcacaatggggtcttgattgcatccgaagatcacaccaaggccatggctgattcatccatgtatanagctgaatcgggagcattacaaaatatcctcattgggcagtatcattcattttgattttcaaaaagaaaactatttgttgatctgttattgggttcttgggtttagtaactgctgccttgattctactttgtgattgaggactgcatactattggtgtatctactctacctgtgaaatga

SEQ ID NO: 93576 - DNA, 380 bp, Glycine max
  unsure (1)..(380): unsure at all n locations
tcttctggagggcccaagtgggcctgattgctatctgcacccccatctttactaagtacacccccttgcctttntntggtgaaatgctttttcgtanagttacggaaacttacgaatntcgtaacgatacttgttntctttccgtaatgttacggaaccttgtggattacactaatcatcccctttttgacttacgggatgttacggaacctcactaattgtgcaatgatgcttccatttgatttccggtgtgtcacggaaccttatggatggtgcatcaatattttctttttgtttccggcatgtcccggaatttcacacattggctaatgatgggtgccaagcacctcacatggaccacacaaaagtcgcatgtcatc

SEQ ID NO: 93577 - DNA, 135 bp, Glycine max
  unsure (1)..(135): unsure at all n locations
aattctattataatacaatgatcatggatggatctaagcttctttttcttctttcattttaagcattgccanacactgcctaagatatactttatcattgctacccctaagctaccacatgattttattgacact

SEQ ID NO: 93578 - DNA, 115 bp, Glycine max
agtcataagccaaactacattatggtatgcttaattccgcgctatgatagcaacgccgcgaaaagacaaccggaacaatctataatcaactaaattcactcttatcagaatgtct

SEQ ID NO: 93579 - DNA, 425 bp, Glycine max
  unsure (1)..(425): unsure at all n locations
atcttaagagacctgccgcatgcaagctgaaaatggccgacatgaacatgtttggtttggntttttcaanggganaagggaagcgccacattatttccatgacacacacgcaaaaatgatgatttggaaactttatgcataactggtcatgcatgcacctatgtggacactcaagtgtcaaattattatggtcatgtgatgctagggctcangattcatttcctctattcttattcgacccaatgtttccaaaatatgttcttttaccaattngtgcattcatcctagtccattgtgggtactcgggaaaatttcacagcattcacccttcaggtgtatacacactttgtcaaaaactaggtatgatcagtgattctcttcacagaaaagttggaagtcatctcttttcataagcatgttggttt

SEQ ID NO: 93580 - DNA, 494 bp, Glycine max
  unsure (1)..(494): unsure at all n locations
acctatgacactcagctctgatgctctancaatggagttgcaagaatatcttatactgttcaacactngcacagnggccaaggatgcgtgggagatcctgaaaaccactcatgaaggaacctccaaggtaaagatgtccagactgcaactatnggctacaaaattcgaatatctgaagatgaaggaggaagaatgcattcatgacttccacatgaacattcttgacattgccaatgcttgcactgccttgngagagaagatgacagatganaagctggtgagaaagatcctcagatccttgcctaagagattngacatgaaagtcactgcaatagaggaggcccaagacatttgcaacatgagagtggatgaactcatcggttcccttcacaccttngagctangactctcggatagggctgaaaagaagagcaagaacttggcgttcgtgtccaatgatgaaggagaagaagatgagtatgaccttgatactg

SEQ ID NO: 93581 - DNA, 426 bp, Glycine max
  unsure (1)..(426): unsure at all n locations
ctaagctaaaaattctagcttcagctaattntcgtcagaattgtgtttgcacaaatttangtcacgctataaatttttgctaagctaaatctgtagctgagctaaattttctagcttaagcaatattaaatcataatggttcattttaccttgaactttntcctgagaagtttaaatcaattccaaatgtgtatataactgtcttatgaaccatatagaagtacgaaatttacttttatgaggattattcttttgttcgagatatcacctttaaaagatgcatgtggataattatgaatcctatanatgttgaattaaatgtagtgtgttcttctataagatacgtactctattatngaaatgactggatgactattgaaatgttattcttgcgaaagaacttgatgaatatctaaagancatgta

SEQ ID NO: 93582 - DNA, 475 bp, Glycine max
  unsure (1)..(475): unsure at all n locations
gctccttcaactgcacaaggctcttaatattngaagagtattcttgtggaaccttcacccgacgaagacactgacaaaaacttatcttctccttcttggacaaagtatggcanggctggggcaagtaaattttcttcccatcagaccttggatgcaactatgatcttatacccatatcagctagatcttgacgggtattcaagccatccttcgtcttgccttgaatgttaaggagcgttccaatcacactgtcacaaacatttttctccacatgcataacatcaagacaatgtctaacgtcaagatcacaccagtatggaagatcaaagaaaatggacctcttcttccatatgcaactctgactnttatccttctttngggtcatcccanatacagtgttcaggtgttgaacccgctgatatacctgctcaccagtgaacggtatcggcgcaatatcatgctctttgacttcatt

SEQ ID NO: 93583 - DNA, 498 bp, Glycine max
  unsure (1)..(498): unsure at all n locations
tacccatcacatgtggtactatgtggctgtcgggcgatggtgcacaacaagttttccacatccacaatgcgcgcataaacccaccatcccctgttgcccacctccaactgagctcacgtactcccacgtagcccatatcctcgtttctctcaacaccgggtccccatcaatcctctcaagcttccacaacatccaagcaaaacaacattcaaacagcacaagctatcacagccaagcaaaagcagagcanaggcagaaaactctgctcanacaccaaccaaaatcacagcttttctcacttaaagaccacagtaacaatttcttcgatccaattcgttaaccggtggatcgactccaaaattntactggaagtctatagtgcataagcctacattgtgaaccgtgggatctactagcanacatcaagaactcattctgtactactctntccacagccaaccacacatnaagcattttctgcacttgtgcanaatcatg

SEQ ID NO: 93584 - DNA, 147 bp, Glycine max
gtaataacaacaagtgactcttaatggttaatttactcttattcgaatttaattcacagataatattaaaatcacttaagttaagatactaatacgagtgctgcttatcatagaaaaaagtgtactcagtacgagtatgagtgacat

SEQ ID NO: 93585 - DNA, 123 bp, Glycine max
  unsure (1)..(123): unsure at all n locations
gctcctgaatatgacagccaccgttttatgagtgttgagcatcagcagcgcttcgaggccatcaagggatggtcatttctccgggagtgacccgtccagctcanggacgacgagtataccgac

SEQ ID NO: 93586 - DNA, 410 bp, Glycine max
taagtgtccacatgggtgcatgcatgatcaatattgcataagtttctaaatcatcggtgatatatgcgtgtcatggaaataatgtggagcattcccttttatccctgaaccgttgaccaaagcaagtaccctcacatacatcatgtcttgccttctgtaaagcctctgtgggccaaaacctcaatccttcagccctaagcctcaacccaaggtaggaatatttacccttatcctcgaagaaagaagagcaggaggatctctagacaaacgagaggaagacaaagcttcatttactgttaagttatgaatgtgcctaataaggaaaagaaacagagaaaatccatgatcaaagattagaggaaagcaaaagacaaagaagaagagaaaattcccgatcaaagatcggaaga

SEQ ID NO: 93587 - DNA, 311 bp, Glycine max
  unsure (1)..(311): unsure at all n locations
agcttgagaacttgagaacacgacttaattgttgtcttttatatccaagatatacaaatgggtgttggtcaatgtaccacatctaatagtacaaactaatagaacaagacnaacagaccaatttctacgcgtctcagaaaatactttaaacaagacagctcacctaatcaagttttggattagtagtaatcatatttgtgtaaataaatagcttaccacagttcattggactccatcgctggaaccgaaaagagatggtatgttgagatcagaagcaccagaaacactggtatgcctgtaaatgggaagat

SEQ ID NO: 93588 - DNA, 424 bp, Glycine max
  unsure (1)..(424): unsure at all n locations
atgcacataaacaatattataacaaaataagcaccttttagaacatcaaattctatcttaaaattttcagaacgtgaattagatctcagagaagccttttgaggtttgatcatagagatagataaaagttatataggttttttttttaaaaaaattcactaaagattctcttgtgtttaatgcactctgaatcattcatganattaatcaccacttgtaagagttgttttattaaaatgattnttctctanagatgctattatgtactattgaatatgcatgtgcatggnctatctctttgattattcaattatctntagacacattctaagtgaatttgacagttggtcaggttgttatacaatagaaataacaaatcctgcaactagagagacatatngtttaagttactgaattgagtaac

SEQ ID NO: 93589 - DNA, 298 bp, Glycine max
  unsure (1)..(298): unsure at all n locations
tgaatcaataacaaccnctctcatacacatcatcaaaggcatcaagtactctcagatttctggaacacaaactagaagttgagccattcgtgccattaatatgatgaaaactcgtttctgccgcaagaatatgttggccaactgaactgatgacagctttatcagcccaagtaaatttattcgaggcttcgttgttcttcgaaataaccctgaaattgaagatgagatagtattacaacccgggcaccaatatagcaaaatgtcagttctagatacaccttaatgaaacanaacacat

SEQ ID NO: 93590 - DNA, 461 bp, Glycine max
  unsure (1)..(461): unsure at all n locations
ctaagctaagcttnttatttgtgatataattataagagcctataanggatgattttatcttacataaancacccggggaataaattgtnnctatcatttcatatgacaactcaatntcagctttacaaagaagtgcatatagcatttgctcgacctggtaaaaatatcaccaaatacatatacaaaccaatgaacttatgattaaggataataatgcacacacttgaggatgaatgtcacaacaaacaattttataacaacacttacatatatagaatggcgatggtcattataaaanaatgtatatctacataaattgggttttattacgtggatctgaacaaaacactatttatgtatattgaaaacatgaatagcaattacgcttaccttgacgcttataacccgatgctaatcgagagctaatgaactgagaaatccaaaattacccggatagtatt

SEQ ID NO: 93591 - DNA, 208 bp, Glycine max
  unsure (1)..(208): unsure at all n locations
catgacactcctgcngtgtgggatgccnaagagggcaatcacatgatcgaagagtccatgatggctcgtttgaatgcacgccaccgacatgctatgccaggaaatcctaagagcagtatactggctaccaggaagtgatgtgtgtcatggagaatgcccaatgtcacattctaatatgtcatgccacccacccttgatgcatgtctcc

SEQ ID NO: 93592 - DNA, 378 bp, Glycine max
  unsure (1)..(378): unsure at all n locations
gaatgagacatcccacaaagaaaatgtccggttggatttccgctctattttactaaaagatgttntctctattattatattattctttacctctttgtttgatttccaacgtggttacggttgacgaacggtcggaattcattttaaccgaagtttacagataatacaattcanacgatcgctggaaatttaatttatttttatgttaagcgagacatgacttaagtaaaatggcttaagcacgtcaagagggggtataaaaagtaaatgaaatgagaataaaaatacacgacacacaatgtggaccaccacgggtacatagaatgaatcgaanagcttggttcaaggtactttacccgtgaagatcgaagaacgatg

SEQ ID NO: 93593 - DNA, 395 bp, Glycine max
  unsure (1)..(395): unsure at all n locations
ctttccctaccatgcttttaatngattggctttatctatnnttttaattaattttagctctgaattgaaccttactttttttgttgtctggaacattttaaaccaatcttgtttgcgtcactgctttacgactttaccattaagatgggtgatattaaattaaaaaaaggacatatatagtatcaacatcagaatntttatatgtactgaanaaaatttcaacaattttagacattatgacagacctggaagagagggactaaagagtatgtcgatgctgatgtgaaaantatttgattcttgcaagcagttgacaggttcaaaaccccatttcactaatgccacaaaacccatccaanaacaaaatatatgaactcaatcctacattntaacac

SEQ ID NO: 93594 - DNA, 251 bp, Glycine max
  unsure (1)..(251): unsure at all n locations
tgcagcttgtcatcttcactgtcttgtaggtagcttctgttttgattanatatattagtggaagtagaagattgagatgcatattctacgcaatatgttatatgctggcgatatagagcttatgcggatagaatgaatataacaatatattaatagactcttatcaatatgatatttagatcgatagatataatacaattcctaacctaatggtcctaattttatactaataattagaatcgaatcgtaca

SEQ ID NO: 93595 - DNA, 408 bp, Glycine max
  unsure (1)..(408): unsure at all n locations
aagccttacgtattcaactcaagccgagcttcaagcctagaattcttggcttgacttgactcatttccacccctagtcaccanatataaatagataagtatcgtgtgccataaagagttagcaaaacatgtaagtctcagtgaaacctgtgagtaacatatacagtcccaaataagtaatgtaaagtagtaatgactaattgagtacaaaatgtctgagcctangtctactcatcccanaatacacattaggacaaaaacctaagactcaaagcagtcacctatacccaagctcaaagtcaatcatatccacaaaaaaggaataagtatagtcagaattaaagaggcctcctggcaagactcctcagatgaatcctgctaagaatcctcctccataacctctcgctct

SEQ ID NO: 93596 - DNA, 454 bp, Glycine max
  unsure (1)..(454): unsure at all n locations
ttattgttgaccacagagtcggacctgtagatatgtcgctggggtcacgagaccttcgtgacgtcaagtggggtgctattgcccataaccaagcttgatcaatcccgagccaacccgggcatagtcggtcagagagaacctgtgatgtatctaagcaggcgagctcctggcagtcaacatataataggaaaatcagaccacaaagcaacgacgcttgtggtggctggccatctgtgaatttagagaatatgtggattgtggcctttggaatcgattaccagggggggaatcgatacaacgcttaaatgaaacaggagctaaatggctctggatcgataccagctgaaacaggcacgacttagaagctctgtatcatacancggtgatcatacagctaaaaagactggagtatgcaccttgtatcatacatctggtatcataccaagacggcact

SEQ ID NO: 93597 - DNA, 425 bp, Glycine max
  unsure (1)..(425): unsure at all n locations
tctcggctcgtgctgtgaacgcctctagttcaaccctcgtgctgtctattgcacccacccagagggaagctctccaagttccaactccgaacacgactcgaccggccggtaattccaacacgacaaggaacttccctccgaggccattgccggaattcagcccgctcccaatgacgtacgaagatcttctaccatccctcatcgccaatgcattggccgtggtaactcccggaagggtcctcgaaccccctttcccgaagtggtatgaccctaacgcaacctgcaagtaccatggcggtgtcccggcgcattccgtcgagaaatgcttggcccttatatacaacgtccaacatctaatggatgctggatggctgactctccaagaggatcggcccantgtgagaaccaacccgctcgtccatcat

SEQ ID NO: 93598 - DNA, 397 bp, Glycine max
  unsure (1)..(397): unsure at all n locations
agccttctatcaataactttcactcggatgctcgatattgctaataatatatcgagacacncgatattgactataggaagttgactagaaattcaaatggtcacaactcttcactcggatattcgattcatgcgcataatatatcgacacgctctaaattgatcaacggaagctctctacgagatctaaatggagacaactctttactcggacgtcctatgttggcatataatctttctatactctcgaattttatacctgaagctcttcggaaatcagatggctatacatatccgacatatgtatgattcacgcccacaatatatctacactctcggatataacaacggatgctcactaacaattcgatggtcatactttctcacggaagaccatt

SEQ ID NO: 93599 - DNA, 324 bp, Glycine max
  unsure (1)..(324): unsure at all n locations
gggttggtttcttgcttgattacgttgaattangggtgtgtatgggatggccctangcctataatgcattttggaacaatgggacatgccacattgtccccgttctcttgctattgacgcctagacgcgcgcccaccaagtgttcggtgaaatgcctcaatggcattagcgcgtgacttttgtaaggaaacaacccatggtgcattttggtttgacacattntctattnntggaatatgtattcattctccgaaaaggctagagtaattgccccgcatatatcctangcctanngaactaaaatttatgcanaaagaacacaag

SEQ ID NO: 93600 - DNA, 339 bp, Glycine max
cttctcaactttcatggtaaggtatgtattacttgagtaattgctctgtcaagcaattaatccatatacagaaaattatacatgttataacttatatgttaaggcagacaggagatgctatagtccatgagggctcttattgtcatcatagtcacaatgatggctatgttcctactcaaccctatggatataccagccagtatcctaatcagagtcagtcttagacctctggctaacccaatcaaaatagtacaaaagtcagagtccgaaccctaattactatgagacgcatctgtctgaattatgtttgggcaaatctcatgtctctaaagacgtgct

SEQ ID NO: 93601 - DNA, 509 bp, Glycine max
  unsure (1)..(509): unsure at all n locations
cgcatgcacgtatcgccagtgtcataagcgatntgttcattgtcttcctactcgccactggnnttggcagtttgggtcctgcatgcatggttntcacattcaaaagtgcccnctcttggaaataacttataaacaaccccatatggngaaatagtttctaaaactaccccagatggggagaattgccggcacaagtcttctctctgaacacactactatttctctctctctattatacaaacacaaaaaatgaagtaccaccaatttccatttcgtatttggtttggtcgacgttcggagagagccanatcttcttcttttgtttgtgttcttttgaaggtgccttcaaactttccattcaatcaaccaggtatgagtattanngttatatatttttatntcaccttgcacatccactttacagatccgctgtatttagtctctttagtgtttntcatggtctcttatctatgttctatcaccttatatatgatattcgcacatgtact

SEQ ID NO: 93602 - DNA, 346 bp, Glycine max
  unsure (1)..(346): unsure at all n locations
catcttgcactagccgccttggtgcaactccctccatcaattatccaagaatataactgatgcaatcctaccacccaagggtattagatagaagactccaagacgattgggctagagctgctanagaacgccctacggttctcatgaacctcaaggtaaattttatgagctcatgggccatagttgggtccactcttctttgaattattagaaaaggttctccttcttttgggcttgtattnggccattctagtaaatacggtttagccttgatttaatgcatttgagtagctttgagtacgacattcttgtattttatgtattcggatggggtgaactactatat

SEQ ID NO: 93603 - DNA, 378 bp, Glycine max
  unsure (1)..(378): unsure at all n locations
taagagtagtgtcccactggtaaaactaactttccaaatgtttgccttcgcaggaaatggccccgaggaagcttgcctcaaagaagtccaggaaggacaaggcagccgaagaaactagttccgctccggagtatgacagtcaccgctttatgagcgctgtacaccagcagcgcttcgaggccatcaagggatggtcgtttctccgggagcgacgcgtccagctcanggacgacaagtatactgatttccaggaggaaatanggcgccggcggtgggcaccactggntactcccatggccaagttcgatccananatagtccttgagttntatgccaatgcttggccaacagaggagggcgtgcgtgacatgagatcct

SEQ ID NO: 93604 - DNA, 421 bp, Glycine max
  unsure (1)..(421): unsure at all n locations
tgcacactgataagcgtacccgtgaatgtaattgaaagatgaaagatggagactgtatgtgattgaaactctatgaatgctggttatatagtttcaaaatttcctgcacaataccttttcaatctatttgatgaccactacatgcatggattaaaaatttgcctatctaagcttttcattttgacactgcattttcgttatgcacactgataacttacccggatgtattgaagatgaagatggaactgatgtgatgaacttataatgctctttatnatgtaaaaatatctgtggcaataaataataactaatacttggggctggatataatgtctttttgtagtctgaactatggttgctgtgtgcatggttgtanttcataatgtggtgtgaatctgcgcaaaaatgtatctgtttagtt

SEQ ID NO: 93605 - DNA, 508 bp, Glycine max
  unsure (1)..(508): unsure at all n locations
cgtaatcctgcgtgttggttgacaacgagagtaaactgaacttgtatctcgtccaccanacaatgaataaaacaacacgtgagatcaaaaggacaccgaataccacccatgctataacaattatcagttttccaatgttgttttttcccttttggacaaacatgtttttctgcgggttatgcccggngagattattagactcgttgaagatctcaagacagttcaagaacgggtgattggcactttagtgaggatgcatttggagtgagatattaaccttctttttatgagtatcattcttgggattaaaatcgcatagtctttgtacacagctagacctttctatttttggctccaacttataacatcagcgtggtccttagccaactcgctccctatgtaagtgaagaacaccatgtctcanatgttagtatatattggatcaagctcgcacaattggaaccttgccatgttagtgaaaccagagtcaacagggaacttccaagtc

SEQ ID NO: 93606 - DNA, 510 bp, Glycine max
  unsure (1)..(510): unsure at all n locations
acatgcatgttcacaccatatntactatacttcgatcaacttatgcaatctatttgattgaaaagataatttatattactcttctaatgtagtcgacaacaaacaaaaaaatataacaaaaaatattgttgttcttttaaagggaagtcaaatggcagatgcacaaaaaataataaaattaaatgtcttttattttaataatatttattctatagaacaattatttcaaatcanatatataatgtatggaattntaatacttagttggccttcagccaacagtgcctaattctaagagtcatttcaagcacaggttacaggtctttgctttaaagtaacatggngatcaatgctctcaacaaanacattattgcaaaataataacacatgaaaaaggatatagtaagcatggaaattaactaaacttggttattcattaatcanaacanaatngacttcaagaaaataagctcttccacaaggccagacgtaactacctttaacatctac

SEQ ID NO: 93607 - DNA, 502 bp, Glycine max
  unsure (1)..(502): unsure at all n locations
tcatgctntaagtatgatggcanaacttcattacttgtgntcaatacatacaagngagcnnngaacaaatgttctacacttggagtgatcacatgcagtcctcttgaacccttacaacccactctgtcatcatgccgagactcaggaaggccaacaggtttagccttctctaagtattctgaacaaaattcaatggcttcttctgcaatgtacctttcaacaatagatgcttctggacgatatagattctnntgtataccctttaagatcttcatgtatcgctcaaccgggtacatccaccgtagataaacaggaccacaacattngatttctctgaccagatgcacaatcaagtgaatcatgatgtcaaagaaagcagggggaaaatacatctncaactggcacagtataatggcggcctcattntccaactcatcaaacttgacaggatcaacgactntgctacatatagcatggaagaaaagcacagngcgagtatcgc

SEQ ID NO: 93608 - DNA, 362 bp, Glycine max
  unsure (1)..(362): unsure at all n locations
gatatgtcgcgggggtcaggagaaccttgggacgtcaggtggngtgctattgcccanaaccaagcttgaccaatcccgacccaacccgggcatagtcggtcagtgagaacctgtgatgtacctaaacaggcgagctcctggcagtcaacagataaaaggaacaaagaccacanagcaaggaggcttgtggtagctggccagctgtgaaactcgattgatatgtgagatatggtctctggtaatcgattaccaagggtgggtaatcgattacaaggcttaaaaatgaagacagggggctaagatggtctctggtaatcgattaccangggatgtaatcgattaccaggcttganaacggagtc

SEQ ID NO: 93609 - DNA, 342 bp, Glycine max
  unsure (1)..(342): unsure at all n locations
tactaatgctattntatattgactgcctaactggctatctaattagtgggaacagtgtctgatggtagtgcactactgttatatgatattatgctcttcacaattgagagctcatatccgtgtactggtatgtgatatgtttcatacaaaattggatatattgtcaaagcatttctaccaaaaatataagcaatattntttatggtcgatttgtacacaatacttctgtacttctaacccatttngattgccatgagtaaatttgataagcatatcagctttatgttatttgtatcaatattggatttgatgggtgatatctggcttggtcattngagtaac

SEQ ID NO: 93610 - DNA, 320 bp, Glycine max
  unsure (1)..(320): unsure at all n locations
attctttggttaattactcaaactccacaaaactggctcgcgatactttttttcgctctttcttntcttgaaactgattgatgctgcatggtgcatgtgcagtacactactnaatagtataagtcaatgcttatgatgctaattaatctgcccattttattcctgtgtgtggccctcctataatgattttaatataaatgcattttgaagttaccccacaacatcttcttggctattcattctacttttataaaaataataacgtgcgatatggacgagggtntatttcacaatatacatgaactctcaaaagttaattc

SEQ ID NO: 93611 - DNA, 494 bp, Glycine max
  unsure (1)..(494): unsure at all n locations
agtgatatagatgcatccatttcaaaagtttaaatgttgcatgtatgtaagtaattgaaggattgtcagctatgacgcaccggtatttcaacttgcatcacttatccgcatccagtaccgatatacttcatctatatgtgtcgaaagcatccaagtcttttaaaaaatttataaaaattcaacgcagtatgagacatagaagcatgtataatataataganaaaaataaagtggtgtagagggaccactctggatcatttaatggtgccagtgacggaaggacgaanagggagttggttgataactcattcacggagtcgaggactactntcttcttggagaaagagcatgcagattatggtggatgcaaagaagatcctttctatgatattcttggtgggagtggtgatgagtagtaaagtgtggttctaaacttcatatatgatggactnggctcactctatctctggctagttntagaaactctatgacta

SEQ ID NO: 93612 - DNA, 496 bp, Glycine max
  unsure (1)..(496): unsure at all n locations
gagtatgctcgatagtatatcgatactttcttatttaatcgatngaagaatcgcgtgcaagacaatgactgatttattcaggagtctccgctttaatcaaatataatcgattacttctctttctataagtgtnccagaagtaaacaagaacactttattcgattacttacagtatctaatcgattgcatcgttcttaagttgcttccattttttgggaagaacactctaatcgattagaaagataattcaattgattacttcattgaattaatcgattaccttgtagatttaatcgattacaggcggttataattattttctctataaatagccaccttgtgttctctctaataacacaaccttttaagcttctgaagagccaggatcacgtgttcgtatttgttaaagaaagaacgaagaaaagtgctcagatatagtaactcacaacttcnatctcttgatatgaaatgttcgtgaaagtgagtgtgtactttc

SEQ ID NO: 93613 - DNA, 422 bp, Glycine max
  unsure (1)..(422): unsure at all n locations
gaatggattcaagattaagtcaacaagaagaaatcaagacgattcaagaatcaagagaagtttgatttcaagattcaagacaagatgaattcaagattcaagagaagaaatcaagaagacttcacaagggaagtattgaatagttctttcaaaaaactaacatagcacagttttgtttttcagaagagtntttctcanaattttctaagttcccagagtgtttactctctcgtaatcaattaccagtttcctgtaatcgattaccagtggcaaagtttgatttcaaaagcttttaactgaatttgcaacattccaattgatttcaaaatggtgtaatcgattacaagatattggtaatcgattaccagtgtatctgaatattgaaattcacaatcaatcgtgaaaagtcatatcttttcata

SEQ ID NO: 93614 - DNA, 126 bp, Glycine max
  unsure (1)..(126): unsure at all n locations
attaccattaaaataaacgagataagggaagagagaattcanattcgattatattggttcatcactatccgtgtctcattcangcctcaagtacccacttgagattttcactatcctntaaattct

SEQ ID NO: 93615 - DNA, 511 bp, Glycine max
  unsure (1)..(511): unsure at all n locations
tatactctcatttccatttatcatagtacattcttatcttcctatatatatatatatatatatatatggcagntcattatcctattctttgatgttataagtaaaattacaagattaatactccttagggtgttacaaaaagcctacaattgtgagattggacgtaacctangttgagtgaaccaatataaatccttcgtgatcaatgatttttttatgaaactattntatcattgagaagcaacttgtactgttaactaatngacaagtgcaccaatntgtccaagtagtattctataacggtaaaactaagtatcgtttccacattggatttgtttgtgcttaactagtgcgtattcaatttgtatgcaattaatgaataaattggggaaatgctaagtaaataattttttgatcgcaatntagacgatgatgtggttntagactanaactgagtaagagaacaaacactgagaattgatgacgaaaatgaatataggagttgattatg

SEQ ID NO: 93616 - DNA, 503 bp, Glycine max
  unsure (1)..(503): unsure at all n locations
ctaagcttctcggggcctntnctgtgagaacaaacattgatatagtagttttacaagattatgcttatcgtaacgcanagaatgttatgctaatccctccggtttagaacgaactcatgcgcacgtttaaagtaacacatntatgcacatgcgtatgtgtggaatatcctactatcaacatagaggccatccaacacattctaattgtcatacatatatgcatttgaaaagaacatacattctcacgcccaaggcattgtgtcaaaactcacacttaatttatatcctaaacacttgctatgtacaaactacctacatatgtntgaaatatatatcatacaaattcttattggttcactcacatttattcatattggcaagctatatacattatgcacacacttgcattcaaaagggaattccgtgctatcatacattcatttangaaaacaatcattaacactttgctatggaattcatgctgcttatnattatatatatat

SEQ ID NO: 93617 - DNA, 448 bp, Glycine max
  unsure (1)..(448): unsure at all n locations
acttcaacggnaanntaagtgtcggcttaattcaagactctatctacccaaacaaattattaacaagactaacaaaatatattgtgtccttttctttcctgcagatatatattntgaaatctctgatgatgcaaaccatttggcggattgtggagctaacaatcccgtggtaggaattatgtatccgatttcaaagggattctttngtatacatgctaagagaatggccaactatacttacctgatctgctggtgagctttctttctttatttctcttctctaatgaatattccatatacttagatcttttacttcgctgacatcccatctgcatttgttataatgataaacatcactatagtatactttctattcacctaaaacaatgtacccttgatatgaagaattacggtctgactttgacgtccatnttctatcactgatcat

SEQ ID NO: 93618 - DNA, 473 bp, Glycine max
  unsure (1)..(473): unsure at all n locations
tatacacatgagtatgatantatgatcctcaatactaagacgttgataaacacacacttcctcttcaatgtatatgtntagaatagcactcttcacatccatgtggcacaatttacagttcataatccacacaacaatgtcacaacttctgatctaactactagagcatatgattaccaaagtctatgccctctttgtggctataacctttggccattagccttgctttgctcctacgtatcaagccatgatcatcttgcttatgtgtgaaaacccattgtgacctataatgtttgtcttactaagactaggtactaggtcccatatttcatttcttttacactgattaagttcatcatgcatagacataacccaatgttcatcaacaagtgcctgttcaacacgtgaaggttctatcatacacataagtgcataaangtcacaaangaaatttaatgagtgttgagtagaac

SEQ ID NO: 93619 - DNA, 273 bp, Glycine max
tgagctcaaggcagccaggttcactcacttataagaacgagtgagagggcaaatcaatatacttcatgtttcaatagcctagttggattgactggaatgataatataatcattagtgtaactattcatctatattgggtatagaatcatatgcatttgttcatactgcttgattactgtatgtatggacgactaactctactttatatcttagtggttacaagagatcataataacctctgtataactatgaatcttttagtgtaaacaattc

SEQ ID NO: 93620 - DNA, 416 bp, Glycine max
  unsure (1)..(416): unsure at all n locations
aactacgctactaaactgatgtaggacatttcatctcatgttcttgctgaccttccacagggaagacaatttaaatgctaaagagcangggtgcatcanggttgttcttcttggagcacaagaagatccacgaccagaatcaaaagttaccataaagccaacaagcaaagtcagacactngngctacctctcaaatatggcttcaccacaaaccacttgggaatcctcagtttagtcttcttaagtccttatttccttacttgtttacaaaagagtctatngagtcatttaattgtgatatttgtcagttgccaaagcaccatcgtgcatctnttcctgttagtaataatataagttcctctcctttttgattaatacattctgatgtgtgaggaccagttgtggaatntatatct

SEQ ID NO: 93621 - DNA, 319 bp, Glycine max
acagctgaggaggcaaggatatatgtgcgtattgttttttatgaaactagggagtgatgatggcttttaatagctgacccttaggatacacaacagtaaatggttataacttctcaggataagcctattggagctgggaggccagactatagctatgatatgtcttgatgctagatgttaacttatgagtataatcttccagagatgcagctttttacaataactgctaaatagttgaataacgcagtgttttggatcactgatcctatattttaaggaccttataagagttttttttgttggcgaagctgaagatttg

SEQ ID NO: 93622 - DNA, 286 bp, Glycine max
  unsure (1)..(286): unsure at all n locations
tattgtagccgatgctctttcttcgcgtcatgcattactctctatgcttganacaaaattgattggtcttgaatggttgaaaagcatgtatgaaaatgatgaaactcttggagaaacttttaaaaattgtgaaaaatattcagaaaatggtttctttagacatgaaggctttcttttcaagaanacanattgtgtgtgcctaaatgttctactagaaatatgcttgtttgtgaagcacatgaaggaggtttaatggcgcattttggggtccaaagactcttaaaca

SEQ ID NO: 93623 - DNA, 382 bp, Glycine max
  unsure (1)..(382): unsure at all n locations
tcggtggcagactcaagaataatggaatgtgtagtgtctttgtctcatacctccactacacttcatttgtacctgagctagctntcctatntntattaactttgttcatgtttatgtgtgagttgaatcttccccgcgaggaccanaagataaaangataatgtaaatataataaccaaaatgaatgtcttatactatatggactaaagaaaattatcacaactataaggactaacagtgtaatttaatcataatacaataaactagagcaaaataatggtggtgtggattcaaccttattcgttttccttgttcttcatggcagagctatatgcaactcatgttcttctctcgatattgtccactgcaacaactcttcact

SEQ ID NO: 93624 - DNA, 200 bp, Glycine max
accatcaaataaaaaagagaatttttttttaatacagggggggtttaagggtccccaccccaaaagaattccattttccaaccaatttgacaaagcaaagtgtggtttgtacacttatatgactaaacaatcatacttcgtcaaaacaataatagatattctttgtaaatttagcagctatatagataaaaaccaaaaat

SEQ ID NO: 93625 - DNA, 397 bp, Glycine max
  unsure (1)..(397): unsure at all n locations
tgattttaaggagtatctgctntaaccgattaccaggtgatataatcaattatatttctcttaanaagtatttcacaagtgatcaaggacactctaatcgattacattgttcttgaaagttttctactttttgggaagaacacttttatcgatgganatgataacatattctcgtaccttcttgaaataatcgactacgttgtatatttaatcgattacaggtgggtataattggtttctctataaatagccaccttgtgttctcactttctaacaagtttaacaacttctgaatgagctatgaatacgagccaatattagtataagatagacgagaagaaaaagtgcttanaaacagtgtgactcataatttctagtctttgattatgagatcata

SEQ ID NO: 93626 - DNA, 512 bp, Glycine max
  unsure (1)..(512): unsure at all n locations
tactcagctttagccaatggacttacctgattaattccttngatagctcttttgagccttgtttccctttccttattntgaagctcactaccagccttaaatgaaaaaccatgatatcaccatatccttaagggaatttggagctttggaattngtttgggaataagtgtggggggttttttgttcatttggataactngttttgtggctatgcttcatgatgtattntgggccatacttgatgtacattgtatattggttaaatgttggacatgctgaatgaaatgttgtttctcanaggctatataaaanaaaaatcgaanaaaaaagaaaaagcaataaagttgagtgaataagatcttaaatggcacaagaatgatgaaactctttggtctactctttatgtttaanatttatcnttacttattnttattntcttatttnttcttaatatgcacttattccccattngctctctattcctttgnngattaccacttattcatattttt

SEQ ID NO: 93627 - DNA, 411 bp, Glycine max
  unsure (1)..(411): unsure at all n locations
cgcatcatacaccatacactgggagatcctgagcatttattcttatccnctagactaaaanctatagcactctgttgaatgatctactctctgtgtgcgttatacaggaagacggaggtggtttcagctgccttataagatatatgaacactagtaactcataagagcctacatgatgtaattccaacaacgctcctccgcccacccaaaaaaatgatgtttgagccacttatactaaagatgaattaagaagcctccatgaagacctctaatattgaactcagaatcttatagaagatattgcatgttaaatgtaactgcatgtaacagaattgagtgagactagatagattatccttcttcaacaccattcacgactatatgaatcactagagagaagacaagcaactc

SEQ ID NO: 93628 - DNA, 465 bp, Glycine max
  unsure (1)..(465): unsure at all n locations
tgtgttngatcacgtattctattgtactctgagattctcgttcttatactctttctgaaaaatgaaatagtggtgttatggatagataaaacaagcattaggtggaccggttcgtctcctgttatcaggagctgctcctttgcctatgcatgtggaggagttcttgagggtcacttttggagctactatgtcacacggatatggtatggtatctgcatcttctgctaaaaagagctggcgtattggtttatgtcattcttatgacagctcttcaataagaaatgttaattcctgtaatctgttgtagcatgattctggcattccttgatatgactctactctctttgttcctaaatgcattctatagaagtattagctacatcgtaatcatatctctaatccacttgcttatgaaggtgngtagccattaaatatgccacgttatttattatcattctgatgtga

SEQ ID NO: 93629 - DNA, 197 bp, Glycine max
  unsure (1)..(197): unsure at all n locations
ttaagcgacgcggctgcagctatccaaatctcaaattttttattttctttactaagaatactccacccagtttaattgacacagtcagtttttttgtaaagttatataatgctgcgatatgattcactgctcattgcaggattttaccttcnaaaacatacaaactggactgcaccgcatttaataccttgctacac

SEQ ID NO: 93630 - DNA, 310 bp, Glycine max
  unsure (1)..(310): unsure at all n locations
agccttgagaagtgaanaacaagaacttatatactgtttattatacctcagtaagacaactcactncagactaatgatatataagtcattactctttcactttataaagctgttcactgtaaaagagtagaatccgtctcacataataattgatcttatgaacggtaataattatttcttttagataattgaattattattgctgatgtatagaatagatagtgttaaatcatatctacnggtcatcaatctgacacacttcttttggttcaatcccgcacatcttgcaatcgaagtgactgataccaca

SEQ ID NO: 93631 - DNA, 417 bp, Glycine max
  unsure (1)..(417): unsure at all n locations
actcagcttatctaagcttgatgggagttggaaattgttccgaatgtgtacgngcgtcgccacattatgagtaccttctattcacgacaatgctcctagttaagatcaagaaggcaccatantatgcggagtatttcatatggtgggtacaacccacatcgttctactactattatgccaaacctatggagatcatagatatttagtctttgttggcttcttcagacatgtctgagtatgtgccaaagccaccttatgtcggagaggactctcctcagtatatgtgatggccacactatgtccgtgaggactcctagcatacagtgataacctctgttgccccaacacccattctgagggacgaacagatcgaggaggacccatagatgttagagaaggaacagtcagatgtgacag

SEQ ID NO: 93632 - DNA, 391 bp, Glycine max
  unsure (1)..(391): unsure at all n locations
cgacaataactttttactcggatgnntgtttttagtnccgcaacatatcgagacccgtcgaaatgaatgttgaagctttcagccaattccaacgacaataacgttatacttggatgtctgattgagtcccgttatatatcgagacgctccaaattgaatgttgaagctcctgacccattcaaacgacaataaccttttactcggatggctgattgagtcccatcatatatcgagacgctcgaaattgaatgttgaaggtctgagccaattcaaacgacacataacttttactcggatgtctgattgagtcccgctatatatcgagacgctcgaaattgaatgttgaactctgagccaatcgaacgaccataacttttactcggatgttgat

SEQ ID NO: 93633 - DNA, 393 bp, Glycine max
  unsure (1)..(393): unsure at all n locations
ttgttttaaaaatttcctgcacttttattattaaatggagcatcttatttatacattgagtattaattggtttacatatngagataagttaatacacacgagtggtattcaaataacatagtggaagtgnggatgggagacaatatatctggaagacaatgattatcacagaatgatatanaaagtccccagctgttatttatctccagcgaatccaccttagcgatggattacatacaggctggatggaatttatggaaaactgtttacatgaatgatcacctcatttttaggggtgaagacaactcacacacaactgcttggagggtagaatcatcggatactactccaccttcattatattagaatgtgtgtcaagagatgagatgactt

SEQ ID NO: 93634 - DNA, 364 bp, Glycine max
  unsure (1)..(364): unsure at all n locations
tttggacatccctattcctgtacaattgtccagaatctatcattaatcaaggtaatatgaccaatcaactttttttggtaattaaataagtcagntatatttttcctctattggcctttaataacagaactgtaacaatgactagtaattaagtttggagaatacaggctagcaataggcttcatatagagccactttgtcaaaaatcanggtactgtagtctttattaagttggtatacagccaaatcacaacatanagggacaggccacttctattaacaaatggcaggctagacaactganagcaaacatacaanggtggagtcaaagataccatactttacagttaaaaaataaataaat

SEQ ID NO: 93635 - DNA, 76 bp, Glycine max
gctgtacagatagttatcctaaccagaccactttaaaatactcatttgatattagctctgctcctattgcatctgg

SEQ ID NO: 93636 - DNA, 443 bp, Glycine max
  unsure (1)..(443): unsure at all n locations
taccatacatctttgcagctaaattatcacgtgctagaatgaaagatctatccgactatgaataanatgtatatgaaattcccagttcttatggcaatggatgacctatacctttatgtaccaaatttctaaggcactggtatttaactctttcttaatgttaacctgcttagaaactgatattacacatgacttttcataacttcaactttgtaattttgtttgaggacattaagctttaaagttagtcagcaattaaatnttcagggattttattttactgtccaactcctaaaaaatggttgtgcanagggttttgcattcttaaactgagatttaaagaaatgtgtagttggccaagttagtggtttcctaagatagctctcangtacttcggagcatattgaagtgtggtgatttcccgtggagtataaacttcacct

SEQ ID NO: 93637 - DNA, 263 bp, Glycine max
  unsure (1)..(263): unsure at all n locations
tactagcttatttcagttgtgactctaatgtggatgttccaatctttgaaaagctgcatgtttgtaaaaagcaatcgattgaagcagtccatgatattcaattcatatggttgaatntctctatgaagcaaacacaatccttgagtgatcactatagcttgtcactcgaggacaagtgaattagtctttctttgcttgatgacatgcaaaaatgtaaatttgggggagtatgttagtcgcttatacgactnaactttggatag

SEQ ID NO: 93638 - DNA, 272 bp, Glycine max
  unsure (1)..(272): unsure at all n locations
ttctctagaggatggtgcctcctctcacctcttcctctttatcttctgctgcaactgcatgactgaaaataccattgaacgactttattgaagctcacagatccaacctccatacaagcttctcaagaaatatttcatcaagaaacacgttgaataagaagaccaagaggaaaagtggagccgaggcactatagagttgngaccataaagcacttccttcgtcatttctcttgttagtcttgtgctctgcacaatgatcgtgtaagttttct

SEQ ID NO: 93639 - DNA, 198 bp, Glycine max
  unsure (1)..(198): unsure at all n locations
catgcataaccattccgaggtagttatttaaggttccctttctgaggaacctttctgattggctntntgaagtaccaacataccctagatagtcattctaatgttngatgagaatgaatctatacttgatagattatgctgatgaaggtcacattgatatctcattttgaagancacaatttcatcactcttaacact

SEQ ID NO: 93640 - DNA, 521 bp, Glycine max
  unsure (1)..(521): unsure at all n locations
tcacatggagctacatcatgtggtatcagagcattttcatctatgtgatngttctttgcttcctctgtctttttgttcggtcaattaactttaattccatgttattcatcttattctccatgtatatccttccatgtntagagtagattaaaaaaataaaccgattaaatcttagatctacacttgntcttgcatttctatggttcaaaatttatagatctactctttgaatcatgttttgtgttgattttatgttctatcattttccagtcataatcttcttgtgctgaacctttagatctaaattttcttccanaatattgattagaaaaaaaaacacanaaatctaagtgtaaatcacttaatccatgttgtcttagagtcatgtttagtcataatagttgtcacattatgttctaagtttgtctttgaattttattntgttgattaaattctagataccatttttcatgtattcttgtaattcttagcttatctnttgaattntgagtgtaattcat

SEQ ID NO: 93641 - DNA, 324 bp, Glycine max
  unsure (1)..(324): unsure at all n locations
acaatatatnnggaatcgattaccaatgtatatgaatgttgaaattcacattcaattgtgaagagtcacatcttttcatanaatacttngtgtaatcgattacatggctntggtaatcgattactagtgaccaagtttgaataaaaatcaagagatgntaactcttccaatggtttcagatttttctcaaaggtataactcttccaatggttttcttgaccagacatgaagagtgataaaagcaagactttgacttgcatttcaataactnntgtaacnaatctttagaacaacttttgagaaacctttgctactttattcttc

SEQ ID NO: 93642 - DNA, 473 bp, Glycine max
  unsure (1)..(473): unsure at all n locations
gtcagtcttcctacttttgtttgttgaccatatagtggtacctagagatatgtcgcggnggtcaggagaccttgtggacgtcaagtggtgtgctattgcccaaaaccaagcttgaccaatcccgacccaatccgggcatagtcagtcagtgagaacctgtgacgtacctaaataggcgaagctctggcagtcaaccaataaaagaacaaaatccacacagcaaagaggcttgtgtggcggctggccagctatgaatcttgagtggtatatggaatatggcctctggtaatcgattaccaagggtgtgtaatcgattacaaggcttanaaatggaggcaggatattaatatggcctccggtaatcaattaccaagggggtgtaatcgattacaaggcttaanaatggagacaggatgtaaaaatgatctctggtaatccattaccaatcgtgtgtaatcgatacacagagtaat

SEQ ID NO: 93643 - DNA, 436 bp, Glycine max
  unsure (1)..(436): unsure at all n locations
aattggtactctcactggcagaaaagaatcagtataaaaatctttatgtctgatctttcatgctttccttcaagccttttctaaccaagggcgtgactttctttttagacttaagtagatatcttggtgtttctaanacaattntacatcatctaatagtgttcttaacaaaattatctactctttacaaagtttatcagtcaagaaccttgntaacgaggaaaaggtctttaaattccataacataatcaacccaatcctgtatattgctttcaataataaaccttactttaagaccaaataaatgatataattaattacattattcaaatctatgatgttacatatttatggacatttcaatatttttatattatttacctgaaatagaatatattattcacaatatacataatttatattttattttattttt

SEQ ID NO: 93644 - DNA, 522 bp, Glycine max
  unsure (1)..(522): unsure at all n locations
aagagaaagaacatgtgattagaattatgaattaatatgttagtcagnttgtcagattgattgtgaaggaatgcattaaccgtaacccggtgagagtgtgatccttatttttgggagaaaacgattatcattaagtactaacttttgcatgaatctctgaattatggactgaatgcatgaatttgaggataatgaaggccatgttttgatagtgatagccacttagccaaaaagctgaccatgtgcatgaatgaattatcccttgcaccccagttntgagctgaatgaatgttngattgattgaaccttgagcctatacagttttatctncttctaccttgtgttaggttgtaggagagcatcatccatagaaaagcttggttcaagggcaaattgtcccanatttgggggagttatatgtcaaaacacacttgtcccannattgggggagacactggatanaggaataatatggttaaagcagagtagcatacacacacacgtctatgtgntaaaaaaact

SEQ ID NO: 93645 - DNA, 215 bp, Glycine max
  unsure (1)..(215): unsure at all n locations
agctntagcctgatcgctaagcgacagcttatccgtgtctaagcgtgacctatgggcgccaagcgcaattccttacagccataactgaggtcgatgaagctaagcgccagtcatggcagctaagcaagaatcattgcgacaatatgagcgctaagcgagtccttctcagctaagcgcatgctcctctgtacttaagatgcatcattttagctaag

SEQ ID NO: 93646 - DNA, 516 bp, Glycine max
  unsure (1)..(516): unsure at all n locations
ngcatctgttntccaattcagtttgggaatcatttttctccacctggttggngcctttcttcataatcctcctatcccctgagttattataggggttggagcacatatcttcaatgaccttgatggcatcaataagggttntaacatgaggttacccctacaagcaacatccaaacttgtccttttatgtgcgaacactctaccatggaaaatgtgaattagcctttgtagggagaaacgatgatgtggatagcttctgatcatctcttggaactntcccangcttcangtagactctcttgttccctctgcacannagttccaatggctctgatatattgatttgtattcatggtagataaatacctccataagaaggcacttgtgcactggtttcatgtagtgatgttgttctcaagtagtaaacacagtcggtcccatgccttcccattaagaaagaaaggaaaggcataaagtctgatatactctactagttcacgggtntgtctcatcgtg

SEQ ID NO: 93647 - DNA, 329 bp, Glycine max
  unsure (1)..(329): unsure at all n locations
ctcccatgatgcattatcatcccnccatagatattggcataattttttatcaatggactcccttttggcttcctggatacanagaatatcgacattatgagccaagggtagcttcctaatagctgaccttttgacccaactctccaagcctctagagtngaatgacagaatattcatgtgctcatggacttcatacccatcactcctgctgatgtagaagttantctactgttaatatctgcagaggcattgntgtcttcagtagtggtgatctcagcaaaggaaactcccaggtccctaatgatctctctatgtagtgtctcctcatt

SEQ ID NO: 93648 - DNA, 516 bp, Glycine max
  unsure (1)..(516): unsure at all n locations
ctcagcttctggtggacatcttgactggctntccaatctgacattcaccacagattctgccctcttctattntcagaatgggaatgcctctaacagcatctttgtcaatgattntcttcatgcctcttaagtgcagatgtccanatctttgatgccatattctgacttcatcttctctggagaatagacatgtggaggagtaactggnttcttgaggtgtccatangtaacaagtgtcctttgatctgctgcccttcattaggacttcactcttctcatttgtcaccaagcattctgactnntgtgaagttacattgaatccttcatcacacagctgactgatgctgatcaagtttgcagtcagtcccttcaccagcagtactttgtccagactaagaagtccatcatggactagctntcccattccagtgatctttcctttagagccatctncacatgtcacatagctagtggagcaaggttcaatgttcaccaggaattctttaacttctgtca

SEQ ID NO: 93649 - DNA, 241 bp, Glycine max
  unsure (1)..(241): unsure at all n locations
aagaagntggctaacctatatcagaattcagcataatcggtacacttgaacaaataatgaatatgcttacctctgcaggatatgattacttacgtctaaaaggattaataaagctttccaacccaatttagccctaattacctaagaaaagtctcaactctcagccattaacaagggatatatgtaattctgcatacacaaagtaatacatcaaacatggagaataaaaggtaaagaaatc

SEQ ID NO: 93650 - DNA, 202 bp, Glycine max
ctattaatatttataaaaataagccaaaagttagtagacctttttttaatattaggacccaatatatcctccacctaaagaaaaactaaggattggattaatggctaataaacgaatagaaaacatttgaatatattctaaggacatatgcacctggagcctacctgtaggtaaatagtcattacttaaaaccccctaagca

SEQ ID NO: 93651 - DNA, 281 bp, Glycine max
  unsure (1)..(281): unsure at all n locations
tctgtttggtgnngcggagaggagcataaactacagagtctcgcgacaggtgcagacttttgattcatggccagttggggtaccagagtaaccaaagcatctagtttaccttcaagctccttagtctcgggtgatgaagatgaatgcgtagctacttcatgcactcctctaatgactatagctacactcttggcactaaattgctgggagctggaagctatcttctcaattaaattcctggcttcagtaggggttatgtctccaagggctccaccactggc

SEQ ID NO: 93652 - DNA, 374 bp, Glycine max
  unsure (1)..(374): unsure at all n locations
ctcttaccttatttttcattttagangatttttagatgaaaggatagtatggatcttctattccaaatatccaatgttgatatctcccatattggattcaacattaaattattcatgacttatcaagccttgagtactttccctaacatcttctagaatgtaatatttgattgtatggttgtgaatggatgggcttaatctgaatgattttgtctgcttgtatgtcttcttaatcgtttgtggtttatatctctaagtgctacaactgttgcaaatctccttatgttatagtgatgatgacgaccaattgatctattttgagtgacttgtaatctggctcaaattctgataattgtttttgacatccaatcgta

SEQ ID NO: 93653 - DNA, 371 bp, Glycine max
  unsure (1)..(371): unsure at all n locations
agcctggctcactttannatagagataganattgttgcatctntatatactctatacannnncncaccttagagaatgcanatcccatgcanagcggatatatagaatgcactatggacataatctatttactttggatactaggtaattcaggtttcnggtaagttaaaaagaacacagccacgctatactagataatttgactaaactacggattgaatgaaatgtgaatgttagataagctatagctccggccggcgactacttatatatctagaagttaataatgataccaccgacttctggctgtatgttatatatctttttcaaacctactattagccatcattggagaattgacagatcttcat

SEQ ID NO: 93654 - DNA, 350 bp, Glycine max
tatttatgtctctcttggttatgtaaataaaatattatcctatgaatgttagtaaacgtaacattctactatttcaacgaaattaaatgaattggaatcaagtatttaaaataaccttaaacgtaacactaatattataataaaatactttaatacacaaatgtaagtaaaacaaaatgtgtcagtcaaaaattattacattgaataattgaatggtaaaactcagctgactatcacccacgtgaacctcctccatgcgctggtacctctacatcttagctctcatactatgtcatggctgcgacaccctagtgtgccactcacttcggaagctcagctcttaataaaaa

SEQ ID NO: 93655 - DNA, 323 bp, Glycine max
tatgacctttttagctacagatacaaccctggatggaggaatcaccccaacctcacatggtccacccttcagcaacaacaacagcaggctgctacttctcttcaaaatgctgctggcccaagcagaccatacattccttcaccaatccaacaacagcaacaaccccagaaacagccaacagttgaggcccctccacaaccttccctcgaagaaactgtgaggcgaatgactatgcagaacatgcagtttcagcaagagactagagcctccattcagagcttaaccaatcagatggggacaatagctacccaattgaatcaaca

SEQ ID NO: 93656 - DNA, 327 bp, Glycine max
  unsure (1)..(327): unsure at all n locations
taaattattcaaccctttataatcaatcaaaatccctaaatgactactaagtaaaaacacaaaatcacaaacaaatactcctgatatcaaatcacaataatattgtatcgggacattaattggtccgtcaaacacagtcaatntgcaaataaaaaaaaaaacattaaaatagaattgaattcataaacaactcaaataactnccaaatgatctttagggattctacacatgtaattctaatttccagcgtgataactcatccctacctcatatancgctaagagtatctgtagtatggggcgttctgggtctctaaatcctcgatac

SEQ ID NO: 93657 - DNA, 255 bp, Glycine max
  unsure (1)..(255): unsure at all n locations
gttccatcattgtgcaccaagcanagacactatgcagatatcaaaaatttctaatacgaaaaagccttgtactatcctctttgaaaacctacacaagctgctgatcctaagtgctataacctttggctaaacccatactcaggcttgccatagcacttcagtccacttgctgtaaatattatctttgctaacctaattaccttcactcagctgcaaagtagaatttcctcatattacatctgcatcattaccaga

SEQ ID NO: 93658 - DNA, 359 bp, Glycine max
tatagtctgcgtacatgataatgcttaactcttgtatgtagtggtgagacacatactttacatttatacatccttaaacacatatacacgttacataatgacgcattactagaaacacatcagaggattgcatcatcatctctgttacttatttatcaagtaacaagatgggtgatccacatttgcaaattacaaaataagagtcaaatttgtgaaagtagtataacagacacacaacaatctaatatcatcaaagttttggtgtgtcaagtcataattgcacgcagactatcatgtacagagaaacattataccgccaatattcaattgacagagtaatgggtagcccattgcaaaat

SEQ ID NO: 93659 - DNA, 199 bp, Glycine max
atacattactgtatgtcattgaaaatacaacaactccagataccttttatactcttatgaaatcttatcagtgcacctaaattatgtttgactctttatttctaaagctctgaaatcatattataacctttcttaaaaaaataacagaacattggtgatcctaacgctttatgacatatagttgatgatagggatctgc

SEQ ID NO: 93660 - DNA, 127 bp, Glycine max
acgacaccattcacgttaataagaacttactcttaccataccatgaccttaacctaactaatacaacttgctatgacgagaatataaagcaacccaaacttaaaaagacagtattttaagcaaagaa

SEQ ID NO: 93661 - DNA, 437 bp, Glycine max
  unsure (1)..(437): unsure at all n locations
accacttcgcggggagcatctacgtagccaattctatgttgcctcctagtagcactttcttaacgtcttaagccaaacgcgtgatgacttgtcaatcacggacctagtacttttgcttacctttggctctggacttggtcgcctgctggtcggccatgagtcgtangcaacactccatccttagtagatgagctgacgggctctggacgtggcggtggtgtgtctgttgcccgctaccggccatcctctgtctgctgtggtgtctcgccctgggcctgcctaanggcgcaatactttctgatgaaagctcgattantaggaggcctgatgacctttgtatgggcaatgggcactccgtagaactgacataagcttcgtatcagagctcgagaccccaagaccctattgtactttctcgggttcactgagtgtcttat

SEQ ID NO: 93662 - DNA, 268 bp, Glycine max
agaatctcttactaaaattggaactttgtaaaaaaaggcgtgctggttgaatcattacattcctgtagctgctgggctttaatctcttgaactgactctgtgcttctgattgaacactgcctgactgtactaactgaactattgggcttggctttgacacactctgcctctgatcttcgactgtcacaactcctttgcagaccctgacaaacctccttttctacaactctatctcttccccttgttagatccctgatagttaatttat

SEQ ID NO: 93663 - DNA, 219 bp, Glycine max
gaagctcactaccagccttaagtgagagaccatgatatttccatatccttaaagaattatggagctttggaattgttttgggaataagtgtggtgggtcgttgattcataggacaacttgttctgctggctatgcttcatgatgtattttgtgccatacttgatgtacattggatattgggtaaatgttggacatgctgaatgaaatgtgtgttctcaa

SEQ ID NO: 93664 - DNA, 315 bp, Glycine max
agaatatctactttcccaccaaatcgtttggagagccgaaaaagaggaactcacctaagacatagtaaagggccattcaagataaattcttcaaaaaaatctagtaggttatcgaaggacaaccactgcacaccattaaacgttagctaagcacgattattggaggaagcattcaacacaaaaatgttgtctctacctcctccaaccaagcccggcaactcaacagacagattcaagcaatgttgacattaacaaaacctctgccataccatagaggagtgtgtggccctgagagacataatagaagagttcata

SEQ ID NO: 93665 - DNA, 227 bp, Glycine max
  unsure (1)..(227): unsure at all n locations
tgatgtcatccacctcataatgaatgatggaaaccttacccaatacaaccgtaaactcgacaacataatcacccctattgttacatatattttcaacacaggctaccctattatcaatagctctaattgcaccattcatattcaccttgtgccaacctaaactcacggacctccatatattgaaaatactaccttctctagagcttaagtgaagaccanaatccaca

SEQ ID NO: 93666 - DNA, 403 bp, Glycine max
  unsure (1)..(403): unsure at all n locations
ctgcagctttncaattttaatttctttgtaagaatggtaaaacttttgttaaatattattgaatggggcaattcatatcaatgatatgaatagttgggtagtcaaatcacatccgaattgtgttattcgaattgtgaatagtaagaatctaataattattatatctcacaacataatcttgaattggacatcttataagagcaagtaatttatggcatactgtgctcctcaacatttgtctcggtgtctcccttagattgttcccanatcgactgaggtataatatgaagcaaacattatnnttcacttctanagtcctcttaagctatagatngcattaccttaacccatctcagtatttgaagggtttgactgatacacatcctatagtccagtcagttgg

SEQ ID NO: 93667 - DNA, 398 bp, Glycine max
tctcatggatgttcaagatgagatatgatctcatggattgttgcctgacaatggtgaagagaggatagatcatggctgcttgacaataacctacaacctgtgaaaatatgatggatggcgagtaatctcagtgtccactatgtggctttcttcgcatttgtgatgtagctcactggacttgtagcctaggtattcttctcaatgattcatgctttgggaaataatggcacgatggaaagaaaaaagagaaccccttaagaaattgattaagaactaccactagagcatgataaactggagaaatgtttatgatgaaggaagaaacacaattttctcaatacttaatctagtatttcagatcaatcaaatgcccctacttttatacatgtcacaatgag

SEQ ID NO: 93668 - DNA, 281 bp, Glycine max
  unsure (1)..(281): unsure at all n locations
tgatccaagctcatgcttttacaaaaaggttcatcaagtcaagttgaaatatggaagaaaccgtcttgcaaaattggggccaaaaatgaatcgagtcacatcactgcttcgtctactgccaaacataattaggattattgatgtccttgttactttccagttcacctttgacaagatgtcatggaccatgtngaaaatctaaattgattcaaccccatatcttgcgtataaattcgcaatacttcaactgtacatcattcgcatgcaatccatgctttcat

SEQ ID NO: 93669 - DNA, 236 bp, Glycine max
gcaacaatacattaatcctgagcccgccatatcctttatcatatatgttagcccaaccatctaccaagctaaccaacaaataactgcattactggcctaaccgcttcagtatgaaccttctgaactctgagtgaaccatctacaagaaatcgcttatctagatactgttgctgtcaccaggaagatgctcctgacatctaccagggacagtattgatctcatacctgtcaacatat

SEQ ID NO: 93670 - DNA, 492 bp, Glycine max
  unsure (1)..(492): unsure at all n locations
tcaagcaccgcggctgcagctgcttctacancnccttatttgatgattttcacttctgaaancaagaaacacacacacacacacacacacacacacactttttcctagtcgatcacacacttctacaatctccccattttgatgatgtcaagaaacgcattcatacaacattcatggaagaatataaaccanatcatgaagcaagaaccatgaatataaaaaccacatagtcaaataacataattaatatttggtcaaacatatcatgcaaataaagaaatagtaaattgttcaaatgtcataataatatagattatttggataagtcactaacatctatcagtcctaattctcttctaatgttggtaaaggtatctntacttagtggtttttaaaatgtctgcaagttgattnttagtatctacaaattctaanacaacatcaccttntagaacatgatgtctaatanaatgatgcctaaattctatatgc

SEQ ID NO: 93671 - DNA, 427 bp, Glycine max
  unsure (1)..(427): unsure at all n locations
gcttaatcccttgaaattgatgtgtatgagattgtcctggattctactanggactactttccttagcacccttatgttcaatatgttggataaataaaaatagttnttttttcctatatgcatgagagnttcaatgctagttgtcacacaaatgtattacacaaaagtacctatcacataaagagtgngctatgcaattagaatgcatcaagaagttttagattgtgtggctacanttcttggaaccaaaggcattgcaaggaanaattactacatacccatatttaacgggaatttctattttcctgcttggcttttttgagggagatgtcaccacacgttatgcaggatggtggaagcagtcaatattgtatcattatcatgattttgcaaagaatattactcgtgnacagcagtctatgcaatg

SEQ ID NO: 93672 - DNA, 429 bp, Glycine max
  unsure (1)..(429): unsure at all n locations
agctnggtcccaactgagaatgtccctttcggtaattcanacctcgacagnggagtatatctactactagacctggattggtaaacaatcccacaaacatggaatgccacccacctgatgttctacttcaaatgacatacactctgaacccaatgttgattgttttcctactcaagtctttgtcccaaaatacaaaatcagggtttgtcttggatggttttaacaggcacatctgggtaacgaagggaattntacttaatacatacattgaataaaatctacatctcttgcttctacatctctcttataaaacaagacatccatagntgtaccttcgaggctcttaaacctattgtcgtccttgggaagccttttctgatctagtgtgtgccccacagtgagtgcacatatgcagaacgtatacgatgg

SEQ ID NO: 93673 - DNA, 265 bp, Glycine max
  unsure (1)..(265): unsure at all n locations
cggataccattctttaacagtgtatgctcatttggtgcattnggtgcatgcttgtcaaaccttaagtcagtgttgaagaagtgtactgaaaccagcttggtactcaatggggcaaaatgccattctatggtgatgaaagtatattacttgggaataaaatctcagcctatggaatgaaggtggacaatntgataaacactttnttgagtggtattntgtacgaagtttttgagtcgtttatatgcattttcttggcagaacacat

SEQ ID NO: 93674 - DNA, 474 bp, Glycine max
  unsure (1)..(474): unsure at all n locations
tgcaagctngngcctctggagatactctattgcagccttctgngacttgtgaaanatgaaaacaaagactgctctttcanttctcagtacaagctccaacttttattattccagttatctntaattctgttaattgattagtagggtctatttcctagtaattgatgacatgtgtgatgttggtaaatattanaccgtgtttctcactcacaaagtagcagaatacgcatctaaagcatcattaggcaaacanaatcaatacgtgatatttattggcaaaattctaggatagatagattcattatgcttgtcagcacacaagaaactcanaacactcctctattatgttatttctttgccattaacaaacaatgcatgtatgattataaactcaatggtggtgtaagcatgtatcatactatttatccttcacccataggtgtcagatggtaatcagtcactatcaattatatt

SEQ ID NO: 93675 - DNA, 341 bp, Glycine max
  unsure (1)..(341): unsure at all n locations
agctntaactcggatgtccgatttatgcgcataattttattgtgacacnnngaganngaataacgagaagctctcgagtaattcgaatggtcattactcttctcacggatgtccgattcgggcgcataatatgtctagacgctctgaaattaacaacggaagctctcgagcatttcaatggtcatatacttttcacttggaggaccgattcatgcgcataatatatcgagacgctcgatattgacaacggtagctcccgagaattcaaatggtcataacttttaactcagaggtccgatttcggcgcataatatatcgagacgctcgatattgaacatcga

SEQ ID NO: 93676 - DNA, 374 bp, Glycine max
  unsure (1)..(374): unsure at all n locations
cctttcttttctcatgtgcactctaacccaaactccgggntcgaagacaaccttctttctccctttgttggcttgtttagcatcagctttattttttctctcaatatgatctttgactctctcatgaagcttcttcacatagtccgcctttgcttgaccttctttatgcttaacaacagaaacattaggcatatgcaaaagatcaagaggagttagtgggttaaaaccataaaccaacttcaaaggagaacaattagtggtgctatgaacagctctattgtaagaaaattcaacatggtgtaaacaagcttctccaagttttaagttcttcctcataactgtcctaagcanagttcccaaagtcctattaacaa

SEQ ID NO: 93677 - DNA, 314 bp, Glycine max
  unsure (1)..(314): unsure at all n locations
tctataagcttttgagagaatcgatgattagatanaagttcattgatagctnnttctagagactcaacgtcatcaaaaattacctaatcgtcttggtatgatttggatccttcaaanagtgtgtctgccatcaggcatatgtttgcttcttcatcgtcttcatcatacgaggtgtcttccaagtcttcctatgtgcctcgtagccccttcttttctttagtcttaaagaaattcttcttatcttgacttttctttagatttggacatctgacttgaagtgtccaggaatttacactcatagtagactatggaaa

SEQ ID NO: 93678 - DNA, 284 bp, Glycine max
  unsure (1)..(284): unsure at all n locations
ataaacgacgagaggctcgaaattganaaaccgaagctcatgagaatttcagaaggtcataacttttcacacgaatggtcgagtctggcttataatatatcgagatgctcgaaattgaataacggaagctcttgagaatttcaaatggtcataacttgtcacactcggttgcgagtcaggcttataatatatctagacgctcaaaattaaacatcggaagctctcgagagatacataaggccataagttatcacactgatctcgcatccgggcgcataatttgt

SEQ ID NO: 93679 - DNA, 352 bp, Glycine max
  unsure (1)..(352): unsure at all n locations
agtggagagttctagaaggcttctctttgntggtgcatatgtgcgatcacgaagaatggcgtgatcactagctgccatgtnttctatgagttccattacctcctccggtgtctttagtttgatcatccctcatgtagttgcatctagtaattgttttgattggtgtcgtatgccatctatgaagatgtttagttgcaccagttcactgtatccatgtgtaggtgttttccttagcagtccgcggaagcggtcaagtgcctcgttganggattcatcgagaaattgatggaaggaagaagattccatcttccattcacagtcgttgattctagaaagtatttctttaagaatt

SEQ ID NO: 93680 - DNA, 334 bp, Glycine max
  unsure (1)..(334): unsure at all n locations
aaaacatcntttttggcttcatgcaaaagatgcattattattcattacatatnnttttttctagaagatgttagatcctccggacttttagtgtatactccagaaaaagcgtgtggggtaaggcgagggagaaatgaaatacgaattattgtacatgatgttcattaatataaggaagatagatagaacgtaccggattctaaatgacgggatggcaaggaattgggttgaaaggaggtcgcacctttcaaagcctgtttatcggccttcaatttctgtatagttccttgaactatcatttctcattgtacatctatacagtggaggacgagtt

SEQ ID NO: 93681 - DNA, 208 bp, Glycine max
  unsure (1)..(208): unsure at all n locations
caactttatcagagagaaacacacacctttgaagtattcaaagagttgagtctaagacttcatagagaaaaagactgtgtcatcaagagaatcaggagtgatcatggcagagagtttgaatacagcaagtttactgaatnctgcacatctgaatgcatcactcatgagttctctgcagccattacaccacaacaaaatggcatagttg

SEQ ID NO: 93682 - DNA, 276 bp, Glycine max
  unsure (1)..(276): unsure at all n locations
caacattattactaatatatatatatatttatatatatatatatatatatatatatatatcaaggtgttacaggtaccgtgcctcataatgcttcaaacaaacacaccttttattctatgacataaagcacatacactgacacttgacagtatagtancacgcatggtgcccttgccgaatgccttgcaaggggttgtttgttgtgcactatataaaagcttgtctctcctttccctacctacatgtactaacttaaagcccaacacaaaatgaca

SEQ ID NO: 93683 - DNA, 331 bp, Glycine max
agctggctaagcatgcatgtcgcgttaaacctataacatcgttgtgtagaatatctcaaattgtgctaagcgtgcatgcatcagctatacgagtcatgcattcccggtaagcctgtggagctcgctaagcggattttgcaggaaaatttccttctgctaaactctctaagccctatgtggcatgctaagcccaataatatctctgaagtcgcaatatcatttttgagcttaacgcacaagtgtgggcttagtgcgcaaaataaaaaatcagaatttcttggacttctattttggttagttgctacgcagcatagctagtgcgcacttacac

SEQ ID NO: 93684 - DNA, 206 bp, Glycine max
tatatacataggatgacttggcatggacaatagacatagcgggtattatgcactcgtgtgaaccaaccactataggtggcattcgtgttccaaaccacatttggagaaatgtgctcaatccaaaaacaaacaacaagatatgtatcaccttggccttctcagtctacattgaattaatgattatcagttgactcacaacatttaaa

SEQ ID NO: 93685 - DNA, 290 bp, Glycine max
aacatcttttattgaatctctctcgtggacaaggctgcacttgttcaccacccctgtgtgttagatatctgctagcaagcaagtggactatggcgatccacagacgcggaacaatcttggctgtgtcccttcccaatgaatacgactcaatggtggactcttcctcctgtgtcagagtttcattctttatccatttctccacagctgtggtgacatcttgtatccacttaccgttggtgccttcatagatgactatgtaacagtcccttacgatcttatctgcggacatg

SEQ ID NO: 93686 - DNA, 458 bp, Glycine max
  unsure (1)..(458): unsure at all n locations
tggcagcagctgcgccacgactgataccaacgtttaccatcaccggaaatagggttgccatcagcaaaacacccanaccggntgcggaagagacggccagagacatcagacaggcgacaaaataggcggcaatcatcagcaggtaaggagagttaatatactgcaatggttttgacgccagcttgaccaccatatcattcgcgccgatatgggtcatgtaagcggcaaatccacacagcatcataatcatcatgccgaggtcgccgccgcggctcattagtaatatnttaacgtattcaacgatatccgtggcgctgtagcctgttgaagcctggctggacagtnacactttgtgccccataatggcactgataatcagcaataacaggccacccgactaatacacaccagtggcggataccctttatgatgagcgagctcacccacataccacaccc

SEQ ID NO: 93687 - DNA, 355 bp, Glycine max
tttatattacttgggccgaacagattttatctgcattattgagctctatgggttgggtattgtggtgtactcctacatcattaaggattcgcactgtgtgtatttgcgtgcctgtattgtgatatcatgcatatgggcacaagtgtacgtcaccagcttaacagctacacgcacgattcgtgaaacttaaaatactaatgaccgcgcggcactcgatgagatatatctggggattgcgtacatacaatcgccaataatgtggcaactggctaaacatgagatatactccctactgtgagatgcgcatttgcgctgtgagcttgccgtttccaccgctgggttgtatgcactattc

SEQ ID NO: 93688 - DNA, 403 bp, Glycine max
  unsure (1)..(403): unsure at all n locations
catctatctcatccatgatgagctgtcctctgntctaacttttaagtgtggccttcaagagcacgccttccacatgaaagaaacagacccactntgctttcattatgaaagccagtgattaagtaataatgagccagctgctctcatcttctggggcccgcctctcaatttttccaactggcacatcttcatatgcaagttgagtctaacatagtgtaatgacacaactatcccccactcaagtgtatatgtgatagattacaaaacatagtgatgcacgatttttatatgtttagaattccacacacgaaacaattatttagaatgtataaaatgttcatataaaggaaacacttgacatcctgtcatanatcaaacatcctacttattatattataaaaag

SEQ ID NO: 93689 - DNA, 274 bp, Glycine max
  unsure (1)..(274): unsure at all n locations
cgcgtcgaacgtttcgtgcttgatttcgtgaagaatattccggcgctttcgntcgttcttcgtcggtctttcgtcttcaaccggtaagttcccgagatcaaacttctcaattgattctatgtacccttggtggtcccagttgtttcgcgtacttttattatcatttcatttactttctggacccgcttctgacgtgtttagtcatttattaggtcatgttctcgtctaatcaaggataaaataatttcactgatcattgaattgtccatctgta

SEQ ID NO: 93690 - DNA, 421 bp, Glycine max
cagctgcagcttcaaactctgaacaatttatcatgttatactgatgtaatagcctttataagaccattgctgatgttcttatataaaaccgttctcacaaactaataaaattgtggcatctacagtcttaatgggactattaagcaacaaacaaactggccaaggatattatgactccccctttcctcatgagttgaacatgacctccaaagtccggtctttgggacctctgtgaagacataaatatggtgtatatatatttggaataaacctgactataataacaatgggctgcaaatttgaaatagagtactccggactggcaattcatctctataccataaatgattagatgagctataaaatacgtccatgctgctaaatacgaacctagcaattcatataccacccattcttgagt

SEQ ID NO: 93691 - DNA, 265 bp, Glycine max
  unsure (1)..(265): unsure at all n locations
gttatgactttgccgagcttccggagcttgcaacctcttttgccacagggtgccatattataagcacaaactgaagcagccaaacttgttggatcgtcgcatacattggattctggttggaggtactacttgcgggatacaggcagcaataatggcaacctgttctcctgaggaattactcattcttccaaggaatgctcatatatcagctatatnctgcttggtattatctagggcagtgcctaagtacatcggtcctgactat

SEQ ID NO: 93692 - DNA, 428 bp, Glycine max
  unsure (1)..(428): unsure at all n locations
tataaagtattttagnagtgtggtattttcgtttatattntgttaatatttattgcatactaatagatgaatgtttagtcatccagttataagcgaacttcaatccaaaaagttgaaccaaataagtaataattttattctgcatagntagaatgttttataggtgcaaaaataaatactaagagcataaattctaattaataagagatggtaaaacaagactaagatattcaggcaaaacacctggcatgccaaatgttagtaacttctcacataatataccaccatccattgnttgatgttagatagcacctgtcttaggcctcttttanattattttaattttatatatatttaacatattcttcaaatattagataataaactttattatattatctgtattgtaattattatttaaaaaatta

SEQ ID NO: 93693 - DNA, 391 bp, Glycine max
  unsure (1)..(391): unsure at all n locations
acctgcggcatgccaagcttgcagaattggtcttctccagtgaaaggttctatgtgttccgaaaagaggcannattgatcatcctactacgacgactgagaatactggggcaaatgaagatggtgagaaagagggagaaacccatgctgtgactgccattcctatacagccaagttgtccaccaacccaacaatgtcattactcagccaataaccaaccttctccttacccaccacccagttatccacaaaggccatccctaaatcaaccacaaagtctgtctaccgcactttcaatgacgaagaccacctttagcacaaaccataatacaccaacaataaggaattntgcagcaaaaagctcgtanggttcacccaaattccgttgcata

SEQ ID NO: 93694 - DNA, 375 bp, Glycine max
  unsure (1)..(375): unsure at all n locations
acgagcaacggccttgtcgatgttgccgtaagccatgacgacaaactatcacaccaattgttaagggaagaacctatatctggcttctatggcagcggtctttcaaatgaataanagaaacgggataaacaccaacgttagaagggaatattatgtttctcatatcctgctagattattcacatagctatatatagaagaattccccttaacatatttgtataatttctatccaagaggaatctaataacgggtttgatatgcttgactgcctatgaaggagcaaccactacaagcgggattgtgggctgatttcgctattcgatcttacaattgtgcctcttacacgtaatcaaccgagtatgcaggcttcact

SEQ ID NO: 93695 - DNA, 490 bp, Glycine max
  unsure (1)..(490): unsure at all n locations
gcggatntggtcttcgccagtgaatgtatctatatgggtcatatattaggcacanntaatcatcctgctttgatgaatgaganaactgnggcacatgaagaggttgaggatgaaggagaaacccatgctatgactgccattcctatatggccaagtttcccaccaacccaacaatgtcattacttatccaataacaacccttctccttacctaccacccagttatccataaaggccatccctaaatcaaccacaaagccctccttccacacaaccaatgctaaacaccacctttagcacaaaccataacaccaaccaagaaatgaattttgcagcgaaaaagcctatagaattcaccccaattccggtgtcctatgctgacttgctcccatatccacttgataattcaatggtagacataacctcaacccaggttcatcaacctncatttttctgaggatactacttgaacacaacatgagcatatcatg

SEQ ID NO: 93696 - DNA, 183 bp, Glycine max
  unsure (1)..(183): unsure at all n locations
actcatcatgctccaggatatgagacatatactgctggatcgatgacatcacagcattgtgataggcttgggtcggatcagatggatcgccacagagctgagcatgtggcactgaggcattngcatcaaactattcatgattaccgccatatgtgacttgctaagtttatcatacgacgatga

SEQ ID NO: 93697 - DNA, 397 bp, Glycine max
  unsure (1)..(397): unsure at all n locations
tgcactcagctcgcttagcgagtngngataatctggaagatatatctatatttcatgcacacgcncaacgngccatcagctcgctcagcgagtcaattgtctcttctcgcgctcagtgcgctcagctcgctaagcgaaaattcactaactcacacttagcgagaaaatggcgctaagcgagccttcaggatcaaaaagcccttanaagattgaagttggcgaanaatgagggaaaagacgtaacagggccgaataacaaagcaagagagaagagcttggacgaaaagcctcagcctttgagagattctgagtttaggagtgattattatggttttagaggtggaggagacatccnncaccaacttgtatcttaattatccttcanaaaccctgtctt

SEQ ID NO: 93698 - DNA, 352 bp, Glycine max
  unsure (1)..(352): unsure at all n locations
tcttcagtgactgccaaacaaagcttaacacatntataaactcggttacctttggtgttctcactcttatttaaatcactttgtaaaagaagaacaaatacatgaatatgaatgacccagcggccaagtgggcaacacgtaacaagtattgaattatgtaagctttttatcatgaanacagaaaacanactatgtntaaaaattttcaataacctttataaaaaaagctttcaataacaaagaagaaatcaattaaatgaaggtatattatttntaatattatgacatatttnggtttaattaaataaactattatagaaataaaattatatattatattgtatgtcattct

SEQ ID NO: 93699 - DNA, 386 bp, Glycine max
  unsure (1)..(386): unsure at all n locations
gctngtgcttagagagagcctagactcttctttggttnnttgactataaacacaactgattctcatcaaggaagctattcctttatggagaatcctccttctgcttatcgactctttgnggattatggcgtcgntctgttcatattcttcatcttatccatattttctatttttctgttcttgagttctcggaaggtcaacaatggtggttcttgaatttgcatccggaatgattcanaccaagtgtccatggcttggatcgcatcacatggtatcagagcttgaattcggagagcaattacaaaatatattctcaattatgtgcagtttatcattttcagttttgagtttttcagaaaaatgagaaaactaatttagtttgattc

SEQ ID NO: 93700 - DNA, 219 bp, Glycine max
  unsure (1)..(219): unsure at all n locations
ctgctttttgggatcttttcgaagtacgaactacaattcgacaactgttcttcgaatgtacngaccttgtgatacatatcatcccttttactacggatgtacgaactactaatggcatgatcttcattgattccggggcacgaactatgatggcataaatttctttgtttcgctgtccgattacaatgctagatgtgcagccctcatgacaacaatcca

SEQ ID NO: 93701 - DNA, 359 bp, Glycine max
  unsure (1)..(359): unsure at all n locations
gcatgcaagcttctccccaatttctataatatggggatatatgaagtgaataanggtttatcctcttaagcacttctctctncttcgaatgtgcttggaaaaatagtttccgtgaagaatatccaagccgatgcgcttccgaaatgttactgaaacagtttcgtgatgaattacgcgaaagtgtcgaccgttcttcaacgatcttcatacgtacttcatcgatcttcgatcttctacgggtaagtacctctaaccatagcttttctatttattcttatgcacccgcggtggtccacattgggtgtcgtgtatgtttattcttcgttcatatactttgtatacctcctcttgacgtgctt

SEQ ID NO: 93702 - DNA, 329 bp, Glycine max
  unsure (1)..(329): unsure at all n locations
gacaatggtgatgacaaaaagctcanagatcaatcaaagaacaactcaagtgaatcanagatcaatcaaagaacaactcaagtgaatcaagaacaattcaagagttcaagataagaatcaagaagaattcaagactcaagaagaaagttgagagtcaagattcaaggttcaagatctcaaaaatcaagatcaagattcaagactcaagttcaagaatcaagagaaggcttaatcaagataagtataaaatggtttttctcacaacattgagtagcacatgatgtttctcagaacatgtttaccaaagaggttttactctctgggtatcg

SEQ ID NO: 93703 - DNA, 335 bp, Glycine max
  unsure (1)..(335): unsure at all n locations
tgcagctcaactcaacgctgctactaaatctcttgntgtgatgccagnaaacgcagcagaacctcctacttgcttgtatatatcaatcctagtcaaattatcattgttgatatacacatcaaacactctttcccccacccttctcaccctttcttcaatctctgcaaaatgcagccacaccaaataatcgagcttcgcgtccacgctcaattcgtacttcagaacaccatcaccctcctccgccgtcaccgacgacatcgccgcgctctggtacagcttctccgggaagtaatatggcttctgctcggtcccgctgataccgctccgcgatgaca

SEQ ID NO: 93704 - DNA, 336 bp, Glycine max
  unsure (1)..(336): unsure at all n locations
aaattgtggcagacgtggagtttggttcgcatattgattctagtcactagaacttanactggtgatcattttaatttcacttcaggaaagataaaatgaatcaaagatgaaccaaaatacttgagcctttatcttgaattgctttaggaaagtaaactcttgaacctttaacgcttctgaaaattaattnttggaagtgttaatatntaacattnntttggagtttattttctggcatgcttagacatttaggtgagaacatgctctagaaagttntcagatagaggattntngggcagaaaagtgcataataaaatgcaaatgggagtatattta

SEQ ID NO: 93705 - DNA, 208 bp, Glycine max
catttgttaaagagtgccacgcaaccacttcaaagttccctccggaacggcccaagaactgctcaaaggtcagaggcaaggcaccaagactattcgctcggattgatagcccgctaagagtgtgacaccacgcgctctagccacagggaggcgttctcggagcaccgtcactaggacacagagctgatccagagaaatggcccgcggg

SEQ ID NO: 93706 - DNA, 229 bp, Glycine max
  unsure (1)..(229): unsure at all n locations
atgaacaatatcttgcagnttatgagaagatttacatacgactctggagccaatatttcatcgcacgtgctattagaaatgaaggagtttcgaaaccaaaacaatataattcacgtggaaataaaatttgaaatttaggtcaatactcaacacatgtatcatgtatgtgagctgtgacgtgagatcaatttgttatatgaggaccaaatattgggaatataaaatatac

SEQ ID NO: 93707 - DNA, 358 bp, Glycine max
  unsure (1)..(358): unsure at all n locations
accagcgccatataggaacgaatttttctcaaggatctgtatngagggacctatgagcactcaaaataaagttacccagttaaccaactatttttgatcgagttaactatatgattaatgatattactgacacacccttgccatacattaacaaatatcttgggtatagagacaccttccaagctcggactattatcaccatgtttaaataaccacagctcattgttatgataaataaaaagtaccaagctgtccctgcacatgagctctacgactaaaatcggaaggggtttaaatcttttctttctacgaaaagttatggaatatattaagtctattatttaacaaatctcttcca

SEQ ID NO: 93708 - DNA, 285 bp, Glycine max
tgatgaatgagagtcttgtggatacacttacacacacttccttctctttttttcttcatttcggctcccctcctcttttttcttcccttgttcttttctcaatgaagcatcctctccaagcttcttatacaacgctaatcttggcggtgacgctccttcttctatgagctattctctagtggaaggcgccttctctcacctcttctcctttggcttccgcttgatcttcttggtagaagtcaccatttaagacctctatgatctcatagatcagctcataaattc

SEQ ID NO: 93709 - DNA, 429 bp, Glycine max
gatccaagtgctctgatcatacattaacatattcatgttgtggcggcatactcaccactgtatagttctctagggaactcaccataactaataaagcgcagaggcacccctataacacccgatccataagtaagatggataacgaagagggagtgcaataacagatgaatgtcgacctatcgaccttagaagatcagatggctgttatcactgaggccatgcttaagcttcacaaactataaaaaatatgctacggcggcgcttcaataagctatggagcggaaccgtgctacacccacataacttggacgaacaaaacgcacgggtttaatcaaggatagtctcagcctacctatggttgctccgacttactcccgtccgtcaacgattgagcaacctacttcagggagtcctcctatggacatcttg

SEQ ID NO: 93710 - DNA, 240 bp, Glycine max
  unsure (1)..(240): unsure at all n locations
atgctgcctgtggagctgcatatcttatgctctatctcctttagacnngggggccctaggctcttgaccttgacttgatagaaccatctctctaagtgaaggcatttgactcgatcccatgttcttactaaagtgaacaaaatatagtgcgaatcaaaacttcaacatctatcatggatgggatggatgaaggcatgaagatatgcatatgacacagatgcgatttatgaatacgggaac

SEQ ID NO: 93711 - DNA, 415 bp, Glycine max
  unsure (1)..(415): unsure at all n locations
gcagcccccccatcgacaaactttgtccttggcttgaagccatgcattgctctattgaatgccccaacaccctcgtgatagcgcangcccattgtggttgaccatctagggaagggagactggtatatcttcccagtgttcactacaaccatctggttgctgatcaaggatggtagcaggtcaacatatggcattggtatcggggtgaattctacaggcttctttgctggataattcattccctgattagtgctcgtgatgggattggtgtaacggtgagacgatattgtgcggaaatgagtttgtgtggaaggccttgtggctgcccgaccatctttgtggatggcaccggaatggggggttccgatcaattgttgggatggaaattgcaatgggttgtagggttgtggattag

SEQ ID NO: 93712 - DNA, 284 bp, Glycine max
ctcctgaaatgacagcaccgtttatgaggttgagcatccctacgcttctagccataatggatggtcattctccgggagtgacccgtccagctcatggacgacgagtataccgactttcacgaggaggtagttcgccggcggtgggcatcactggttacctccatggccaagttcgacccagacatattcctcgaattttatgctaatgcttggtctacagaggagggcgtgcgagatatgcgatcctgcgtgaggggtcagtggattctgttcgatgcggatgc

SEQ ID NO: 93713 - DNA, 321 bp, Glycine max
  unsure (1)..(321): unsure at all n locations
taagtgtccacatgggtgcatgcatgatctantttgcataagtttctatatcatcgntgttatatgcgtgtcatggaaataatgtggggcattcccttttatccctgaaccgttgaccaaagcaggtaccctcacatacatcatgtcttgccttctgtaaagcctctntgggccaaaacctcaatccttcagccctaagcctcaacccaaggtaggaatgnttacccttatcctcgnaaaaagaagagcaggaggatctcaagaaaaacgagaggaagaanaagcttcatttactgttaagttatgaatggtgcctaaaag

SEQ ID NO: 93714 - DNA, 289 bp, Glycine max
tttttctttaccttctctttcattgttggttcttcagttttctgcatgtatctcctcacatgtcttgttcttaatgttgttaacatgatttcttatagtttccaccgattaaactttctatagaagctagatttattttctatggatcacatttcttgttcttgttcttgaaccatgaattgtgttgagttacgttccttcgagtttgtcttgttatttttgttgctgaacctaaaccataaattcttacataaatattaagttaaagaaacctcaaaatctagaggac

SEQ ID NO: 93715 - DNA, 172 bp, Glycine max
ccacagagtggtacctggagatatgtcgcgggggtcaagagaccttggggacgtcaagtggggtgctattgcccaaaaccaagcttgaccaatcccgacccaacccgggcatagtcggtcagtgagaacatgtgacgtacctaatcaggcgagctcctggcaggccacagat

SEQ ID NO: 93716 - DNA, 505 bp, Glycine max
  unsure (1)..(505): unsure at all n locations
actcagctcgagaatggtatacatgaacatgtatgtgctggttgtgttaatggtaaaaaggatgccccacattatntccatgacacacatgctaaaatgatgatctggaaattntatgtcaaactggtcatgcatgcacctatgcggacactcaagtgtcaaaattttatggtcatgtgatgctatggcttangatatatttcctctattntaaatcaacccaatgtttccaaaatatgttcttttatcaatgtgtgcattcattcgagtccatttcgggcgtccggngaaatttcacagcattcacccttcaggtgtagacacgatttttttctcttcataaatcggtcatgatcaatgaatttttntttcgaagaagagtaggaaatcatctcctttcaaaagcatgtccgtgtttagctagacaacttatattctcttatccaccttnttccttactgccttcatctttattcttattgctctctcttcttactcgcctctc

SEQ ID NO: 93717 - DNA, 299 bp, Glycine max
  unsure (1)..(299): unsure at all n locations
acactatgcagaaatttgctggtcaaataggtgcagcagaattttgtcttgtgcagaaaaatgcatgtgtgtggttggctgtggaaagtctagtgcagaatgagttttggatgtttgctagtatatcccaacggtcacaatgtaggcttatgtactatagacttccagtaaaatnttggagtcgatccaactggtaacgaattggatcgaaggaattgttactgtggtctttaagtgagacaagctgtgattttggttggtgtgctgagcagagttattctgcctctgccctattttgc

SEQ ID NO: 93718 - DNA, 419 bp, Glycine max
aatcttgtttgaacacaaccaaacatatactaaaattcctcaaccacggttgtagtctgctaactggcgatacttaagaacctaatgggaaaatcaactcggaatgacaaaaggcttacaacaataagaagcaacgagatcaaggattcatagcttatatgagctaaaaaggttatactttacaagaataatagcttatgtgtgtgtaattaaacattagcaactggttgaaaaataattgcatatgggtgagactgtgagagtttccaatattgattccacaacttaattttgaagaatgaaagagtatttatcatacaattgatgtaaactaatgtaattgtcaccaatgaaagctctctatcactttattaaataagtaaggcaatcatttattgttgacagagttacatttctat

SEQ ID NO: 93719 - DNA, 362 bp, Glycine max
ctccactagttatggacattgacactgcccgattttgctcacatcatttgctaccgcccaaacgggactgactcttgtaccgaaggtctccaagcacttaagttttagctgtcttaaccatatttgattcctaccaagcttcttcaccatttacaatctgacccagctaagtggtatcacactttaccatgtgactatggaggattaagtgatcaccgggattgagcagaaatagtacaactgatttagtctgtatgatattggtgtatattactgacctcatttggatggattcatttaaaatacactctagttatgtcattcttcaactacataaagatttaaagtcttaaaatggaact

SEQ ID NO: 93720 - DNA, 442 bp, Glycine max
  unsure (1)..(442): unsure at all n locations
caagcttcatggagcttacatcatgtggtatcaagatgcatcttcatctagggnngatgttcttcnngctcctctaatcttattgggcggcgaagttctctctaattccctaggtcttcatcttaattctccatgtatatccctccattgtcttgtggcttgctgctgtttagagtatattaacaaatatgagattaataaatcttagatctacacttcttcttgcatttctatgggtcaaatttgtagatctactctcgaatcatagttgtgtgttgattttaggttctatcattntcgattcataatattcttgtgctgaacctcagatctaaattttcttccaaaatattgattagaaaaaaaacacataaattctagtgtaatcacttaatccatgtttgctacagncatgttaggcatagtagtgtacattatgttc

SEQ ID NO: 93721 - DNA, 239 bp, Glycine max
  unsure (1)..(239): unsure at all n locations
gtgaactcacacccacaattgtctgtgagaggagaaaaccatagcaattcttgttgcctctattgatagcttgtttccttataagttaattttgatgtatggaatctgtgctgatgaaatattgggtgtgtagaatttgagttggagaatgcatctacccttttccttacatttgtggctctggaatatcttagaanaactccaaatacaaaggatacttaatttctatgtataaaaaa

SEQ ID NO: 93722 - DNA, 351 bp, Glycine max
  unsure (1)..(351): unsure at all n locations
tgttagaacatataatgtttgatttcttacacgnccttctacatgctataagaacactttngatggtgtctgaatcagagcatgtctatcatagcagagtatgccttttgatgttgtttggctactccagagagctngaacttcatttattcttcatgagattctatagatcctaggagaactttttatgagacggttcttgcaaaataatctcaaacacagtattaaatgaaatcttaaatattatctttaagatcgtaccaggtcatgaattaaacctactctngtatgaaacttcatacacaagactatgatacataatatgatatcacacaagatgccaactttaat

SEQ ID NO: 93723 - DNA, 499 bp, Glycine max
  unsure (1)..(499): unsure at all n locations
acctatgaaactaagcctaagaatatggcctcataaactatttgtttnccganggaatttctataaatagacctcccatcttaatggagtgggttaccactactggagaacccgcatgcaaatctntatagaggcaatagatntaatatattgggaagccatagaacaaggaccttatgttccctctatagtggccggaagtgcaacaatagaaaaacctatagcagattggactgaggaagaaagaagattactacaatataatttaaaggccaaaaatattattacatctgttctaagaatagatgaatactttangatttcaaattgttaaagtgctaaggatatgtgggatacactacaagtaacacatgaatgcacaacagatgctaaaaatctatgataatacattaactcggaatatgaacatntggatgaatgtaatgaaagttacaagacactgcaaagaggtcacacacatagttaatcatcttgcatc

SEQ ID NO: 93724 - DNA, 328 bp, Glycine max
atggaagaaccctcattctttctcttgctttgtaggaaaatttatttatcacgcgctgacacactatatttgttttgtgaatctacgaagtcttctgactgaattatggaatcaccatttgtggaatccaatctcattaatgactttttattaaaacggaaacacccaactgtgatgctaataattctccatccagaagtgtggagagtgtcctacacccctcttgtgaattataattatgagcatttgactattcttctgaaaataaattttacatggatgccgaattgctttgttgaccaaaaactatggcaatcctcttgaattg

SEQ ID NO: 93725 - DNA, 381 bp, Glycine max
ggacctaagcaccgagctcagctgagaggcccttttgtaaattaattagaaagagagggggctgcatgaattgaagaagaataggagacatgtgaactattggttgtgtctcacaagactcttattcttcaaagttaccacaaggttacacatgcttctactactaagactactcaagatgcctcgatatacaaggtgcctactacatagactactcgaaatgcctcgaaatcaaggctaaactctatctactagaatggcaaatagaagcctaagcgatgagaaacctatctaatattacaatgatagcggctcatacttaccatgggctaaattaccctaggccatagaacctaaggcttccttggtctctgcccatca

SEQ ID NO: 93726 - DNA, 367 bp, Glycine max
  unsure (1)..(367): unsure at all n locations
tgtaatactacgcctacgaacccacatttntaatttcaatgcaaggaatcatgacttatgcctatgaatctaattcttggttctgaatgtaaaaatggcatgaatattacgacatgtttgagggtcttttatcaaactttaaatttggctgccccacgatgaataccttgaacctatgtagcatggaaaatacctttcaacggtatatatatgtgtgaatatatgacatgaaaataccttgccaaatgagagaatagtaataatgcctctccatatgcatatctgtgataggagcactaagacctttataaaaatgtccctgccaagatgcacagaatcttccaaataatcatgatgtgatggccct

SEQ ID NO: 93727 - DNA, 293 bp, Glycine max
acccactgccaccgctgggcactcctcctcatatccaaaataaactgtgcattctccccctaggatatatagaaactccagagattggcttagctgctaaaaagcctagggtctcatgaccttaagtaaattttttagcccatgagctcagggggcgccactcttctttgtaatattaaataagtttcttcttttgggctgatatggccattagaagaagggttagcctgattcaggcatttaagagtcttgcatacgacttttggatttcatgtcctgccaaggggaactac

SEQ ID NO: 93728 - DNA, 342 bp, Glycine max
  unsure (1)..(342): unsure at all n locations
cgctctanattacatcgatgttatgtatttatgggaggaggttgtatgccattcctgtantttagtagaggcccactggtaaaactaactttccatatgtttgccttcgcatgacatggccccgatgaagcttgcctcacagaggtccatgaaggacaatgcagccgaagagactagctccgctccggagtatgacagtcaccgttttaggagcgctgtacaccatcagcgcttctaggccatcaagggatggtctcttctccgggagcgactcgtccagctcanggacgacatatttactgatttccatgaggaaatagggcgccggcggtgtgcaccact

SEQ ID NO: 93729 - DNA, 473 bp, Glycine max
  unsure (1)..(473): unsure at all n locations
agctnganaccttngngggacagcaatcttgagttctttccaagaatggctgggattccaagattcccaccattggaaccaacccagagcttccccatccatcgcaaccattacagcctacagcttttaatctttgtcaaccaaaccataggatcatcaccatcgaatatgggcatttccaaattcctccaccgattgctgtcatgcgctgcaatgccctcatctcctccgctcacgtcaactgtgtgaacgttcatagcaggagattntttctcccatgccgccgccaaccattgtatcatcccttcgatcgaactcaatcgcaactccactgcttcgcgattctcttctatcgctttctccatgagctccatccgcatctncattctcgcgttggccttcgtcaccattaacgattccacactccaagatcgaagctctgataccagttgatagaactggaccagaaacag

SEQ ID NO: 93730 - DNA, 354 bp, Glycine max
  unsure (1)..(354): unsure at all n locations
tatttgtgtctatgttgaaggcacaaataccaaacaccaatgtctcccgagtttggcctaattcaagtaaaacttgttcttagatgtctcttggtgaacttacgctaaccgaacagcattacaattacagcatgataaaaactaaattaccacacttctgtgtcggcagntcgataacctagccctaccctatccagttctaaggatgcagtacattttgcaatactaaagctcctaaccttacacacaaatgggtgatcaagccacgagcatgcataacataagcacagatagaanaattgaacacataaaaaccaacttcaatagatagtaataatatttacatcaagcaat

SEQ ID NO: 93731 - DNA, 266 bp, Glycine max
  unsure (1)..(266): unsure at all n locations
ctgcaagcttcatattaaagagaaagtgttngcctaatacncctcctgccaagaacacggagcatgtcttctatactaacaccaacttcttcgtcaactggagcagtaagaaggcttgatgacatttgtggtaattcaccatgccaaaatcatttcgtataatttggactgataccatcacatataagatgtgtgttattgtcattcaaagattgtgcgcgtcattctaacagataacacatggacataagtatagtccaccaatg

SEQ ID NO: 93732 - DNA, 524 bp, Glycine max
  unsure (1)..(524): unsure at all n locations
acctatgaaactcagcttctaatgaagcttctcaaggaagcctcatgaagcaatctctttatatacgnctgcccagccttcgtaaccggtggatcttcccaaattggtctggagcttcacaaaacaattgtccatgatctgnaccgtaggatctctgagaaaacgtctggagtgtgtgccacgtttccattcctgagagcattagtcatttgtgcgttntgagctntgaagtccatgtagttttggaaaaatgccatttccttctcctcctttcttctaaaaccatttccaacgtcccanaattnttctccatcacccacaaccaccattagccaccacaaaccaccattggtctccgttgaaaccccacaccgagaggaacccttcaaccgaagcggaatcttccaacttggctcgcggttcagcagagaatgagaccctaatcntgacctttcatttccttcgaggtaaccatggttctatgcctatnntcttgtagtttcatcttaaaactttcatcatta

SEQ ID NO: 93733 - DNA, 244 bp, Glycine max
  unsure (1)..(244): unsure at all n locations
aggcgagctcctggcngtcaacatataaaaggaacaaagaccacaaagcaaggaagcttgtggtggctggcccactgtgaattttgtgtgatatatgggttgtggtctctggtaatccattaccaacggtgggtaatcgattacaatgcttannnnnaaacacaggaggctaagatggtctttggtaactcgataccaacggggtgttatctattaccaggcttgaaacgaggtcatgaagcca

SEQ ID NO: 93734 - DNA, 271 bp, Glycine max
gatatgtttctggggtcaagagaccattgggacgtcaggtggtgtgctattgcccataaccaagctggaccaattccgacccaacccgggcatagtcgggcagtgagaacctgtgatgtacctaaacaggcgagctccgtgcagtctacagatcaaaggatcatataccacaaagcaaggaggcttgtggtagctggccagctgtgaaacttgagtgatatgtgagatatggtctctggtcatcgattaccaacggtgggtaatctgatac

SEQ ID NO: 93735 - DNA, 306 bp, Glycine max
  unsure (1)..(306): unsure at all n locations
aaatactcaagctattntatattgactgcctaactggcatctgattagaggggaacagngtctgatggtagtgcactactggtatatgatattatgctcttcacaattgatagctcatattcgtgtactggtatgtgatatgtttcatacaaaattggataatttgtcaaagcattnttaccaaaattataagcaatatttaatatggacattttgtacacaatacttctgtacttctaacccattttgagtgcatgacgtaaatntgataagcatatcagctttagtctatctgtatcaatattg

SEQ ID NO: 93736 - DNA, 108 bp, Glycine max
cactattaatgatatgttattataatatgctactattgaaagttaaccaccacaagcatcttcttgtgcagtcattctactttataaataatataacgacgatatgga

SEQ ID NO: 93737 - DNA, 396 bp, Glycine max
  unsure (1)..(396): unsure at all n locations
accgcagctgcagcttgagaggattggccttaaataattttttaagagcctatttggtgcaattggccaatctgaggagtggagtagtcttgctgctgactacactgaattagaggcacccctgcagttatccattcatctacctagggatgcctataggtattaaccctataaggaaggtggtgtgggagcctttattcataaaatttgaggccaaattgaacaaatggaaccagagaagtatttctatggctggcagaattactttaattaatgctgtcttgacagctttgcccttgttttatatgtctattttcagggcccgctcagcagtcattaagaggctcactggcattcaaagacaatttctcttgggtgggaatgtanaaagaaaaa

SEQ ID NO: 93738 - DNA, 423 bp, Glycine max
  unsure (1)..(423): unsure at all n locations
gtgatgaactggtcatcaatagctcaagcaagtctcataccttntcatgttggtcgacagaaccatgtatcccaaccaacattttggtcttaatgaacatcatatagagcccgttggattgctctcactgctcatatagcgtaacatcagctgagctactttcattagtgaatgcaggtgggttgtctttccctatagcatagtctatgtccatccaccctatgttgtgaagaaatctctcattccatatcttatagttatnatctttgagttcggaagtatcactttgaatataaaaaaactaacagtttgaggaactacaaanatccaaaggcttatgtncaaaattgaggcatattaatcttaattgtatgttttgcaatgtaacataccagaaaatgaatcttgtacataaaatacctg

SEQ ID NO: 93739 - DNA, 464 bp, Glycine max
  unsure (1)..(464): unsure at all n locations
accgcagcatgcaagcttctccctattttctataatagggggtgtagtgttatgtataatggtcagcctcttaagcacttctctctctctcgaaattggtgaggaagattatttccgtgaagatnatccaagccgaggcacgttctgtaacattttcgtaacgtttccgtgagtaattacacgaagattctcgaccgttcttcaagattcatcattcgntcttcggtttcttcagtcttcaacgggtaagtacctcaaaccaagcttttcaattcattctatgtacccgtggaggtccacattttgtttcatgtaattttattctcgttntcatttgctttttatacccccttntgacgtgcttaagccatttatttaagtcatttctcgcttaatctaaaaataaaataaatntnccaccgatcattngaattggatcatccctgtaatttgggtaaaataat

SEQ ID NO: 93740 - DNA, 358 bp, Glycine max
  unsure (1)..(358): unsure at all n locations
gaccagatgatcatgaatatgacaggaactcactctcatggaaatcatgtccacaacaagcttggagtcatattcacaaaagatgcataggacactcttattccacacaatctgctacccttgagcattggcaagcaacttcgcatcctgactcattgtgaagcggcgacaaccaaaaagactgagaaatcaattacccaaattattacgaatcaatctgtcaattccagcctgactcggattgcctaatgagctactatcagtgttgagtttgtnatcaaaatctaccggaggagaccaacacaccatacgactangaagacttgagatattgngatgagttagttctgcaagaatg

SEQ ID NO: 93741 - DNA, 365 bp, Glycine max
  unsure (1)..(365): unsure at all n locations
tagatgaaataaaatctagataggataagataagatctagacgaaataatatctagattagaataaatctagataagataagatttgataaaatgtctgctctcttcaagccaagcccaattctggattcaagcccaattacttataattctcctgaaattaaattaaaaacacaaaatcagtctaataggcccaaatgataaaactgcttaattaattngacaattaagactaatcagtaattaaaatggtgcaaaaaggggtaagaaatangagaatataatggcacatcagtcgcttagccgcgatgttcataatgaagatgaacattcaacaaccttgttgaactcgctagcncatacatg

SEQ ID NO: 93742 - DNA, 243 bp, Glycine max
  unsure (1)..(243): unsure at all n locations
cagcgagttttttgttttgcaaaaacacaacaactaaaattgttttggcttttgatttaatatttttaacgtttatatgacattttctataactttntttanatatatattgccatactactttaatttattttttaataaacttaatatatgtcttatcttgacttgttatgtccattcgatttgatttatatttagaatgaacagataaatatactatgttaatgtattaattgtatataa

SEQ ID NO: 93743 - DNA, 341 bp, Glycine max
actcacttatcaacgatatccaaattctttatggcgtgttagctacaacttctggatggtaagaacatctgcaagaaatgtcatacataaaaactacaatggcctaaaatgtatacctgcaggatacactaacacatctttaccaaaccaaatgacaaagacaatgcaacaggggcacctaggctgattaacattgcaggtaatacccatcctggacttcatcctacttgggtatgagaattggactatatggaattacgatggtttaatgaatggtgaacacaccgggccacgtattagatacctgtaactaaaacttgtacatataccttatatgcaac

SEQ ID NO: 93744 - DNA, 448 bp, Glycine max
  unsure (1)..(448): unsure at all n locations
ctctaagcacctgcngctgcagcttgaaatccttacaagcaaagatccacttaggatgcactcttcctagntctctntgaacaaccaagtggatgtacgctccacttgaactgatccacaagagatgtaccctttcttgttctcagtatcacaacccaagtagatgtacgctctacttgtaccacanaggatgtacgctccaatgtgttaagacaaagaattcttaggcggttagtcccttgaatctttgtaagggtaaaaaaaagatatctcaggaggttagtcttttgaaatctnttngttaaagggaaagggaagaatcanaagaattctcaggcggttagtccttngaatcttttgcaagagggagaagggagaatcanaagaattctcanggcggtagtcctttgaatcttttgcaagagggagaaggatganaagatacaca

SEQ ID NO: 93745 - DNA, 480 bp, Glycine max
  unsure (1)..(480): unsure at all n locations
tgatggtgtcgagaataaatcacatgtttgtcatcatcaaatttgggagaatgtgaatgtatgtatacatgatnttgatgatgtcaaagaagaatctaacaaggctgcttcanatgataagcattngcttcaagaataattcaagaatgcttcaacaaacaaagccttgtttcaagattcactaaagaccaagtcttgccttaaaacatagtgctttcaagacatgcaaggctctggtaatcgattaccaggaagtgtaatcgattaccagaagacanggctgaganatagntnngtgaaaagggtttgaatttgaattttcaacatgtaatcgattaccatatngattgtaatcgataccagcaacgaaacctttgaaattcannatcaaaagtcataacccttcannatataattgtgcaaaaagtatatcaagtttttaaatgcaagtcanggtctactttatagaatcttatgtct

SEQ ID NO: 93746 - DNA, 334 bp, Glycine max
  unsure (1)..(334): unsure at all n locations
agctgcagcttaatccctnnaattatttgaatattaaagtgaagagaaccatttcatttatcatgtcttaaatggtaagataagtaatacaataaataacgagataggagagagaattaatcaattatttggtcgaccttccggttacttcagcctaagacccatgagattcactatcttaatcttacatcttacaccctggatnctaccctggtcagtttacatccgaccaacaagctgaacactgtgattataagacaaagatttttttaacaggaacatgagtctaaaatctatattgaagtgacaatgtaaagttaagaagcttaatact

SEQ ID NO: 93747 - DNA, 379 bp, Glycine max
  unsure (1)..(379): unsure at all n locations
tatactctcatttccatttatcatagtacattcttacatcctatatatatatatatatatatatatggcagctcattatcctattctttgatgttataagtaaaattacaagattaatactccttacggtgttacataagcctacaatngtgagattggacgtaacctangttgagtgaaccaatataaatccttcgtgatcaatgaattttntatgacactatnntatcattgagaagcaactggtactgttaactaatngacaagtgcaccaatttgtccaagtagtattctataacggtaaaactaagtatcgtttccacatggattttgtatgtgcttaactagtgcgtattcaatntgtatgcaatgaatgaat

SEQ ID NO: 93748 - DNA, 356 bp, Glycine max
  unsure (1)..(356): unsure at all n locations
agcttgatgaatctntngcatatattatactgtatgatggcnttggaccactaacagaacaatctacaagagcacatgcttctaatcaagtgacaagacaacctcaagaagaaagagaacctattggacagattctaaggaagaaccatccagagagctaaatcattgaagatccctcaaccaaagttcaaacaagaggatttctcatacaacaactgtacatatctctcatttagaaatggaacccacacatattgatgatgtagtggaagatgagaactgcgtaaaagccatgttagaggaacttgaacaattccaacaaaaaatgagttctagaagctcgtagaactaccact

SEQ ID NO: 93749 - DNA, 512 bp, Glycine max
  unsure (1)..(512): unsure at all n locations
tactcagctatctctggtctgttaagtattatatattggtttaagcctttgtttangctatgtttttatgacattcgaacacttagtatctcttttattatttgattagcatgactgaacatgatgattatatttacttgctcttgctngcntatgagtatgtgttctaaacttaattactttaatgatatatggctagtggtatgtactgacatttgcgattgagtgtatgtatattctttctaactattcatatggtttatntgaatattgtggatgattctctagtctgtttgatgttatgaatgaagtattggctttctaagtntgatgaatggttaagttatcttggttgactgtntctattatgtcgattgactatcatgcttctgctcatgatggtgatatcttcatgatgcatgtgatgatatatgttgtctgtcttgtaccactttgcttttgtgatgcaaatggagagaattggagtaatcagactccatgagtatcactat

SEQ ID NO: 93750 - DNA, 483 bp, Glycine max
  unsure (1)..(483): unsure at all n locations
agcaagctttactatccnctaanttctcacccatactatctagggtaataatgcaacactcaatgtctgcaccctaagacaccaaaacttaaacacactgcatgagctngaaattaattatggtaaaatggagaggggtaagatcaaccagatcatctaatgagtgaaacttttcaatacccaaccctacattcctaggatgcaaactntaatccgggatagttagntttatttggtttatcagaccattgaaagaatggtcccaaacaaaggattagttaattatagatgcaagacacccaatggacttttggcaagaacatgacactgaacactataataaagaataacttggtcagcttatattaatttcataatcatgacagtcagatatagttntgatcttatgatgtctttagttaacactgaactctttgtgaaaagtttggtgagagacaagagtacaaagcagaatgaagttga

SEQ ID NO: 93751 - DNA, 416 bp, Glycine max
  unsure (1)..(416): unsure at all n locations
gaccttaatactcagctgctttactaagtaactatcgtttggtgngcaatgattattatgaancattattgttcatgattaanaactatgaaatatcttagtcttggttgggtgtgtgaccatttcatttatgatgtctagaanatactacttctctaaatatttactttatnntggttatctttagcaccattacattatatgtgttccttatttatgctatcttatttcttgtgccttaagatatgagagttgttaccaaagttcctactattcttttgttgtaagtccttccttgtaagaaatccaacactattctttggtgtgttgataagggcatgaatcatttggaatcatgtattctttcaccatgtgaatngagtatcttttcttttcactaannagtcaattacttc

SEQ ID NO: 93752 - DNA, 475 bp, Glycine max
  unsure (1)..(475): unsure at all n locations
agcttcaataactacattcacgattcacacaaattattggagnnaagnagncatgcgtttacacatcaagaaagacacactcatccaagatatatatatgggtccaaacgttcttgcaacactaatccacgcatcaaaggagagataagctaactaacaacatacacacaggacgatagaggttcgttaacacattatcaatcaatatcaagactacttgcatcacccaatggcttgccataatgttcaaccgcacttcgcanattatagagatggccagtcttataacttatgactcaacagtggatntatgggatagcagacattaaggatgcaaggcacatacaagcattattattaagtcttatttaatcatctaggagaaaatacaaataataattcaagcatgctcaacataagtactcatatagtaccacatagagtgcacaccagaatatggtaagcacataacaca

SEQ ID NO: 93753 - DNA, 454 bp, Glycine max
  unsure (1)..(454): unsure at all n locations
tctaagcacctgcngctgcaactattaatattggaaatatatcttttatgttattttcaaacttcaattttgttcatataacaaatttattttatttaatcatttacatcttcataattttcagacttcgttggggagcaaacttaaatagtgttgacaaaatttataaaataagtattatcgatatctttcccattattttaattatattgttatacttaacattaatttagtaaagaagaaattacttcattttattcatattgacaagcatgtatattatatgtgattggcctcaaaaagttgtgaaattgaccattaatctcatagactaaacgaatatctntccacaggtcgtgcatgcgaaacagtacttatcatatatatcttaatattatcttataaaaaattatctagaataaaacatcaaatataccaagttacatattatcct

SEQ ID NO: 93754 - DNA, 371 bp, Glycine max
  unsure (1)..(371): unsure at all n locations
gcattaaacatgttatctaaatccaaataataactcggtcctgctttaacaaatttaaatgatttaatttgttaaattagtttgggtggagtttgttttcacatacctaagtcaagttgacaagaaaatgacatgagtaaacgacaaggctatcaatggaggttggccaaaattctgtcataaagatgccattctgccatatggcgctgccatagcatgccttcttttacaaatnggctatggcgaatgggtgaanaaatgttacattatactattatagtggtatggcgacattatagttattatgtaacaacattggtaaacacttagcaatcatcctagttcttacaataaaacggtctatgacatta

SEQ ID NO: 93755 - DNA, 185 bp, Glycine max
  unsure (1)..(185): unsure at all n locations
attacattntccaatggcttctacatataaagcatctcatgtatttagggaattttgaacatgtgatcgtttcgaatgaatctatgatattctatattagatcgtaaaactaatgtcgaattctcatatctgcgcgcattataggctaactcatttattgcctgttttgctattcctcaacttgc

SEQ ID NO: 93756 - DNA, 359 bp, Glycine max
  unsure (1)..(359): unsure at all n locations
ttttaatggagagggttaccactactggaaactcaatgcaattttatgaagcatagagtaaacattgggaagcctagaagtggaccttatgtacccccatggtgactggaatgcacaatagaaaacctaaaaaaatggctgaaatgnagaagatagtgcgacaattaaagctaaacatatactttgcctagaaggagaatatttaagttaattgtaaaggctagatatgggacacttcaattcactgaggacactgagctaacactagataatacttactctgattgatattagataaacaagaagttcaaattgcaaaaatcctctatgtaatattactgctatagagatttcaacag

SEQ ID NO: 93757 - DNA, 108 bp, Glycine max
tgcatgttattaggcgtttttgatagatagtacctacaaaacaaacaggtgcagactctcactacttgactatgttggcgtgacaccgacgaggatgacattctctac

SEQ ID NO: 93758 - DNA, 225 bp, Glycine max
  unsure (1)..(225): unsure at all n locations
atcactatgttgtgaatataaaccactgctattatctgatatanaacaatcactagatgcccttcatcttatgataaccaaggcagatattgcaacataggaatgcaggatgaagaatgtctttgtgattattagtagtcaagaacaaaactttgaagatgctgcataccgtcacgttctcgctgtgtctgttcaccaagctctcaacgcagtgctcaatagatt

SEQ ID NO: 93759 - DNA, 199 bp, Glycine max
  unsure (1)..(199): unsure at all n locations
accatgatatcaccatattcttaaggaataatggagcnttggaattgnnttgggaataagtgtggagggcttttgttcaattgataacttgaattgatggctatgcttcatgatgtattctgggccatactcgatgtacattgtatatcgcgtaaatgttggacatgctgaatgagatgttgtttctcaaaggctatat

SEQ ID NO: 93760 - DNA, 436 bp, Glycine max
  unsure (1)..(436): unsure at all n locations
cctgagctgcagctgnggaatgacttttaggattgtgaattgctanacnagattagcacttcttatctaaccttagaatggttccacaaagagaaagttaatattagaaagatggttatttctgatgaatggatcttaagcaagttatctaaggagcctaaggggagagaagctgcagaggtagtgcttatgccttctttntgaatagtgtggtnacactcttaagtcatgactccttgcaaaggcttcgtctctgatgggaaaggaaatcacctggctatattatgaacaagacaggcaaagaacactatagttttaacacacgaagcaagtcaagattgttgcattatgataagatagattgtatctcatagcgtgctgcactgctcttttaatcaagtatttatacacctgattgattgattgagcacatgat

SEQ ID NO: 93761 - DNA, 394 bp, Glycine max
  unsure (1)..(394): unsure at all n locations
ctattatgagaaaaaactttaaagtatntttttttcacgtccatgtaaaacaanaagagaaacaatantggatataatatttttctaaagagtcttgcttattgataattttggagacatattaagaactaaataagaaatatgattataatatcatatgagtataaatagtcacaaatacataattttgatctgaatattttttagtcctttaataattaaaatccaaaatgctgatagtattttattttgaaaatataaaatcatattgaantaaataactattattaattataaatagttattaatctatacaaatgaaggtaatgagctattttgtgtaggaacatgatatttctttgcatcatatctatcatactcctgaatcatatcg

SEQ ID NO: 93762 - DNA, 442 bp, Glycine max
  unsure (1)..(442): unsure at all n locations
agcttcttatccaatgctcatcttgttggagaattctccttcttccatggctnattccttaatggaaggcgcctcctctcacctattatcctttgtcttccgctgcatctncatggtggagaatcaccattaaaagaccccattgaagctcaaagatccagcctccatagaagccccacaagcaagcttccatcaagtggtaatcatagcacaagagcttcaaggaggtgctccttaaacctccattaattgtttttctttaccttctcttccatagtagattcttcattnttctccatgtatctcctcacatgtcgtggtctaaattatgttaacatgattctttagagtttccaccgattaaacttgctatagaagttagatttgattntctatggttcaaatttcttgttcttggtcttgaaccatgaatagagttgag

SEQ ID NO: 93763 - DNA, 276 bp, Glycine max
  unsure (1)..(276): unsure at all n locations
gctagagcgtagctacacacacncctctcattactaagctcacctccttgagaaagcttcttaagaagatcctanagaaagctagagctagctacacatacctctctaatagctaagctcacctccttgagatgagaagctagagcgtagctacacaccccttataatagctaagctcacccccatgacaaanaacatganaatacaaaaaagaagtccttactacaaagactactcanaatgccccgaaatacaaggctaanaccttatactact

SEQ ID NO: 93764 - DNA, 210 bp, Glycine max
  unsure (1)..(210): unsure at all n locations
agctttcgagtcaaaatnagaatctcagtgtggtttgtcacttgatctatgacgtgacgcctatgacgatctcttttatattcagtccttcccctgtagcaacaaattaatagtaagaaacggagagtgagatcatgttacctacataataagagagtctgcatacctgagtttagaccttttgacagactactatgatgcctacttcta

SEQ ID NO: 93765 - DNA, 431 bp, Glycine max
  unsure (1)..(431): unsure at all n locations
agcnnagaagttttcttcaagatatatttnggtgtcattagacncccgcgccacttataggctcgctatggataactaattgcaaacctgagntatgttattatgatgattatgatatgatgaatagcattgttatattaacgtcttgctttaacttataagttagtttggaggcctgtcttggttctcttcttcgcttaaattttttttgatgtcgagaatataagggggaaatggaaaatgtggaatcgctttgctggtggaggaggttgtaaatgggtgattaggagttttctctcttgcaaaaagtataggcttaaagtttccgtggagaacctgtttgcaatttagtgtgcttgattttgcagcttgttgactaccttgaatggtgcaacttaaccagtctctatgtcagtgtatcaatggaggac

SEQ ID NO: 93766 - DNA, 513 bp, Glycine max
  unsure (1)..(513): unsure at all n locations
tacagtcacctgccgcatgcaagctnngggggcatatgtactgtctaagacccatatagtctacgatgtattctatttgacactcagagacatgngccaaccttccacgtcaatcctggtacaagagcgtggaaacctgaccactattagtgggcctacccaacaaacaggttatgtgtaacctaactaatattcaaatgagggtgaatatttcatctattggcatatattaaaatatctataatggcacattatctacaagggatgaatatcttctacctttatctataattcaaatgtttatctctaacattatctagtaactcccagctattatctatcagccgagaattatctacaagggtacnataatccctaaagacagtctcgctcactaatataagacaggtccattgacaatctaacgactgctaccactaacacaaacacaacctgagtcttttctcgtatacagctcattcacaatattgcttactacttaacatatttatt

SEQ ID NO: 93767 - DNA, 282 bp, Glycine max
tgtctcacaagactctcattcatcaaagttacaacaagtggtacacatgcttctatctatagcctatgtagcatccttgagacactctcttgagaacattcttgagaagcttaacttaactacacacccccctctaataactaagcatacctccttgagaagcttccttgagaaacttccttgataagattcctagagaagctagagcttggctacacacgtacctctaataactaagctcaccttctttagatgagaagctagagcttatgatgcaatcct

SEQ ID NO: 93768 - DNA, 367 bp, Glycine max
  unsure (1)..(367): unsure at all n locations
atcttttccttctggaaggaccatgngatatggtacttccacacctttatccacagctttttcactggtggatcaagtggccttggaataattaagaaagggggttgaattaattattaatgtaccttgactaattaaaacttatccttcttaatgttactagattcaatcatgctttactactaagttatgtaactnaaactaaagtatagcgtaaaagtaaagtacacaacggaaattataaagtgtatggaagaagaagacagacacaaaaaatttatactggtttggcaacaacctgtgcctacattcagtccccaagaaaccactgtgntcttgagaattatttcaaccttgtaaaatcctt

SEQ ID NO: 93769 - DNA, 374 bp, Glycine max
  unsure (1)..(374): unsure at all n locations
agcttgagtgaatctatgactgtgatgtgtggttgtatattcttccntgatttctgtcatccttactagcttatttcagntgtgactctaatgcggattgttcaatctcttgaaaagctgcatgtttgtaacaagcaattgattgaagccagccatgatatcagttcatatggttgaatttctctatgaagcacacaccaattttgagtgatcactatagcttgtcactccaagacaagtgaatagttctttctctgcttgaggacacagcaaaatgtaaattcggcggagtgtgctagtcgtcttatacgactaacttttgtatagacgatattntccaaaactgggatagttccaccaattatggatatttt

SEQ ID NO: 93770 - DNA, 266 bp, Glycine max
  unsure (1)..(266): unsure at all n locations
atggcttattctctagaggatggtgcctactctcacctcttcctcgttatcttctgctgcaactccatgactgagaatcaccattgaacgactttattgaagctcaaagatccaacctccatacaagcttctcaagaaatatatcatcaagaaacacgtntaataagaacaacaagaggagaagtggagccgatgcactatagagttgtgaccataaagcacttccttcgtcatttctctatgtagtcttgtgctctgcacaacga

SEQ ID NO: 93771 - DNA, 462 bp, Glycine max
  unsure (1)..(462): unsure at all n locations
gcaagcttcaacatcagaccactattatagtgctgttttcttttcacacggaccggagggcgcctatgcaagttgaaagccttggacgaaagacgtatgcctatgctattgcggatgatttctccagatttacctgggtcaactctatcagagaanaatcagacacctttgaagtattcatagagttgagtctaagacttcacagagaaaaagactgtgtcatcaagagaatcacgagtgaccatggcagagagtttgaaaacagcaggtttactgaattctgcacatctgaaggcatcactcatgagttctctgcagccattacaccacaacagaatggcatagttgagaggataaacaggactttgcaagaggctgttaaggtcatgcttcatgcacagggaacttcctataatctctgggctgaagccatgacacagcatgctacttcacacagatcac

SEQ ID NO: 93772 - DNA, 381 bp, Glycine max
cacatagacacaaccactaccctcgcacaggtcagattctggttaaagctgctgggtaccaataaccaagcatccatttccttcaacttttattttatagatgcgctgatttgtactacctatgcacttctctaatgactataacatcatttctggacttaactgctgtgattggaagacacttctcaattaaattttggttcagcatgagcatgtctccatgcgtcacacttgcgcattatatactttctctattctgatccttataaatattgaaacaccgcttaatctatgtgacgaactatccaattttaatctttctattatcagacttcccgatgttataccgaaatcttctatgctagtctgacacgaattttt

SEQ ID NO: 93773 - DNA, 419 bp, Glycine max
  unsure (1)..(419): unsure at all n locations
acctgcggcatgcaatctttaactgaatnngcttatttcatttgttttaanggtgtancagcacaagataggggaatctataccatgtatatgaacgtagaacttaaattcaattgtgaagagtcgcatctctccataaaatactttgtgtaatcgattacatggctctggacatcgattactattgactagttctgaataaaatcaagagatgtactcttccatggtatcaatttctctaaggtataactctccaatggtttcttgaccaacatgagagtgataaagcagacttgactgcattaatacttgtacattcttaaacactttggaaccttgtactattttcttgcaaacttctaattctggttcaacttgctttacaaataaacgggcctatttcatttctctccttgcaa

SEQ ID NO: 93774 - DNA, 298 bp, Glycine max
  unsure (1)..(298): unsure at all n locations
acgtcaagtggggtgctattgcccaaaccaagcttgtaccaatccgacccaatccnggcatagtcagtcantgagaacctgtgacgtacctaaatatgcgagcttctgtcagtcgaccaataataaaacaaaatccacaaagcanagaggcttgtgtggcggctggccagctatgaatcttgagtggtatatggaatatggcctctggaatccataccaacggtggtaatcgatacaatgcttaaaatggaggacgatataatatgtgctccggaacaattacaacggcggtaatcga

SEQ ID NO: 93775 - DNA, 240 bp, Glycine max
gagagtggaccttattttgggaaaacgataatattaatgcttacttctgctgaatctctggaatatggactgaatgcttgatttgggataatgaggccatgttctgatagtgatagccatctatccataaagctgaccatgtgcatgaatgatttatcccttgcatcccacttttgagctgaatgaatgtttgattgttgaaccttgagcctatacagtttatctactcttccctgtgtt

SEQ ID NO: 93776 - DNA, 279 bp, Glycine max
  unsure (1)..(279): unsure at all n locations
acctcanatgaatttgataaattttgtgataaataaaggtgtcataggcaactgactgttggctatacacctcaacaaaacaatgtatcttataggaagaatctaaccatgatggagatagctaagtccatgctatttgagaaaggaataccataanaattctagcctgatgctattaatacaagcatgtacctgctgaacagatgctcaacanaagcggtatggaatatgacaccatttgaagcatggaatggaagaaagccttcagtgaaccaccta

SEQ ID NO: 93777 - DNA, 249 bp, Glycine max
aagggaccgaaatgcgcgggcagaacctgggacgcaggggtgcatgccaaacaactgaccatccaccccccgcatatcgcaggaaaccggatgaccaacagcagcccggcgcacaataaggaacagacccaacacgagctgggggcggcacgaataggaaatgggaggggcttggacatacagggggatcatacagctaaatagcggagaaaggcctgtacatacaaggggacatacgctaaacaacag

SEQ ID NO: 93778 - DNA, 407 bp, Glycine max
gatcatactcgcccgggaccttgaatcacctacatgcttgcagcttaggtctagagaagagcctcatttgtactcctaccatgagctgatgaaagctacataggggttcttggacatatatctgcttgtactaggcgggtttgggagtgtttacaaatgatcattggcaaattccaatacccaggttggtgttaagagaatttcacatgactccaatcaaagcctgagggaatttgtatcataaataaccagcataggccggcttcaccaccagaatttggttcagtttctgaggtggtgtcgccgcctgggtaacctcctccttgggtatgatttcatggataataggagcttagacaagtacttgttaaccgacccgaaactattcttagttggaaacaaaggtt

SEQ ID NO: 93779 - DNA, 430 bp, Glycine max
  unsure (1)..(430): unsure at all n locations
gctttacatatcttgtcatataaaccannaaagcctctgatgactatatataacttgtttctcaatgcgtatataaatntcacagtacaaaaaagtatgacccttcacaagtatgtctatatccaaaaagtgatccaataccctaataaataattaatagccaatcatgcatcctgcatccttgtcttccttttagctctaagtatttgcctttatctaggtcttgctcctgtatcctctgtagtgttcactcctccgcttgaagattcaacgggcatntgtgaatgtatttgtgtttgatgaaattgaaagagaanaaagtcagttatgaaaaggtgatgatgttngcttgaaattaactacaagaagaatcaattacataanaatatatacctgagtggtgactttcaaattttgtgaacatgcaaca

SEQ ID NO: 93780 - DNA, 394 bp, Glycine max
  unsure (1)..(394): unsure at all n locations
actcggatgtctgattgtgtgccgtaatatatctagacgctcgaaatagaataccgaagctcttagaaaattcacacgacaataactnnttattcggatgtctgattgagtcccgtaatatatcgaaacgctcgaaattgaatgttgaagctctgagcatattcaaacgacaataacgtnttactcggatgtctgattgagtctcgtaatatatcgagacgctcgaaatggaataccgatgctctgagcanattcaaacgacaataacttattactcggatgtctgattgagttccgtaatatatcgagacgctcgaaattgaatgttgaagctctgagcaaatcaaacgacaataacattttacttcgatgtctgatngagtcccgtaatata

SEQ ID NO: 93781 - DNA, 339 bp, Glycine max
gatccacagagacgacgctgcggcatgcaagcttgatatgtataagtattagtaataccaagatgtgcacatgggcaattttggatatcccaaaatgctatgtgtatgcatgcatgtaaatctagccaaggagatgtgtgtgatgtatgtaacaaatacaccttggaagtacgtgtgaataatctaggtaacgaaactgccgtgatcgtatatgggtgcatcttcttagataaagaatggctgagcaaaagaacgtgcggaggaaataagcgcataatctttgttctaaatattcattgatgattgtatttatgggaagaaggtatatgccatttttgc

SEQ ID NO: 93782 - DNA, 306 bp, Glycine max
  unsure (1)..(306): unsure at all n locations
ccggttcatgggaatataaggagtggaggtgaatctatcatcatgctaggtcttcgacttgctagataatagtgaaacctcgtctagagctttctctctctataatgtgttgtcgctggcattccataccgccacaatattattatcttgagtgatgatacctctagacaacaaccgtgtgagttatgaattgtcggngagtacgtattagagacctctatatattgtcctacgttcccacataggggcaaagagcagacacgctccgtgccattctctctcatgcatttatngatagatagcact

SEQ ID NO: 93783 - DNA, 295 bp, Glycine max
  unsure (1)..(295): unsure at all n locations
ccttttttggnacaagctccactggggaatgattcaccgccttggtcggtaaactttacgcttaagtgccttgcccttggggactttcaagaatcacccacggaggaataatatgcagtgatcctaaggtgcccttgggggggaagaactcatacctcttccaagaaattttatactccttaccttaaagtatcaagataggactcacctcggaccagcatgtctacgctctgaagaacttacatatggggtggctggaatccccagaatatatttgcatgcacagccagaatct

SEQ ID NO: 93784 - DNA, 394 bp, Glycine max
  unsure (1)..(394): unsure at all n locations
gcctctctacctgtcacttgcttcgtgacacatgggaataccataacgacctatgagctaagatcacctcataagccccaacaggttctcagtgaattaagccaaaactcagtatggctcctaacctcattagtgtttgcttaccactctccaatgtgtgctcatntattctacagatctctacatgtttggctaacgtcttacaagatcttatagtcaccgataacttgcttaagctgattgattctatgtctaattcttgtctgtctgaacagaatgagtagttatgtcttagatatgcttgtattttgggtgaaccaatataaatctcgaaataaatgagaaacctaatttatgatgtaccatgagttgctaagctgttactgactgcata

SEQ ID NO: 93785 - DNA, 353 bp, Glycine max
tagcttgctcactgggagatgaagccatctcttctggaaagaaggagggagacaaggagagaggggggggcacccatatgcgtgaagaaaaatggagagaatctgaaccttgagtgtggaccgacaagactcccattcgttaaaagtaccacaagtgtgacacatgctgctatttatagactacggagcttgcctgaaaagctttcttgagaaaacattcttgagaagccgctttgagaaaacctccttgagaagctagagcttaactacacacacccctctcaattactaagctcacctacttgagaagcttccttaagaagatggccaacgtaggctgagcttaactacac

SEQ ID NO: 93786 - DNA, 495 bp, Glycine max
  unsure (1)..(495): unsure at all n locations
gactaagtatntattacctatacttaacagaaaatacttgtaacactacataataaccataaattggaagagtctgatacaatttatactagttttatacacaatagttagctgtattcaccgactaacaactccnccaaatatacagttttgcttgtcctcaagcanaaagagaacaactcacttgtcctcatgcaaaaagagcacaactcacttgtcctcaagtgacaatgacatgcagtgactatgtacaaaggtgtatgtaacaaaagttactgattgcatgataagagaatggactnatatgccttcatcacttgtgtctcacgaagtatgcaattatcccaagagaagaatataatgttacctaaacaattagatgggagtaggcataagacagacatcatggaanatagctaatacacagtctcacagtactggttactcaacacaagtgttatgtatcattataacactagcagaagtccatctttg

SEQ ID NO: 93787 - DNA, 182 bp, Glycine max
atatgcaaccccccttaatgtaggagaaaaccccccccattcactatcttatagtctacttggataacatatgattcgaacatccattaaatatgttaataacccgttaatatatataaagtctttaaaaaaggttgttttttgtatactgtaacgtttttattttatgttgtgttattttt

SEQ ID NO: 93788 - DNA, 388 bp, Glycine max
agcttaacaagtactgcttgtgattatttaaatacccctttcttcatatatgtcctgcactaccccagcagcaacttcaaatatttctgcagcacattcaataactttagcaatgtctgatctgatgacttgaaaacatgaaacacagtggcatatatatttcttctagctgcctcacagttccatagcagatcgcagaagtagaagatgcacacttgagagaagtggaaattgggttggcaaagaagaggggtaaggaaataaggcatagtttcattgttttctttactttaacagctggctatttatcacaaaccttgcttcttgatgaaggcatagaacaaagaaattttactaaatgcattcccattcattgccataaatctac

SEQ ID NO: 93789 - DNA, 354 bp, Glycine max
  unsure (1)..(354): unsure at all n locations
tgccctctgaagtaacctgccttctcccacttgtgttataaaccttctttgcccaccatcttttgcctccaaagtgatggtgtacaaagtaccagaaaccactttgctgtttgcacttactaccttntcaaactccaaaagggcattctgcataaccattaacaattcaatataaataaaatagaagtcatatttaaattccctctaccacacaatgaaagataatagaaacccactagtgtttctataactacaaagaataaaaaataacttcattatcgaaatnggcgccaccaacctatntattccttgacataatgaacatgcanatntgtcgcaacaatcaattgattt

SEQ ID NO: 93790 - DNA, 259 bp, Glycine max
atattcagaccactctggggaacaataatagcggaagctaccctttacacttctattcaagctgtcgatatgggatcatacatgtggactaagggcggcggcgaggtcaaatgatctccacatcacaatacgataaccacctctctgtgccacctcaactgactacgacttcacgagccttatctgttctctaacgcggtcccataatcttcagcttcaacattcagtatcccaccatatatgactacaaacaacaaat

SEQ ID NO: 93791 - DNA, 363 bp, Glycine max
  unsure (1)..(363): unsure at all n locations
agcctgacagtttaagtgcagattttgtttctgaccgaagcactttaattggcatgccaaaccctaagaagatgacacctccattttgtagactctacgcagtttgngaacgcaaattagcacgaactgtgggataaagccttgggtcaactaaaaaaggcatctgccccatctgattagtaagactctgaaaggaggctcttgtctcgctgaaatggcataatccggataggcactttcctcactaacttcgctaaggaagggtgagaaggagccttaagtgcttgtaagctttgctgatgttattgcatacgctaccgcattggaagaggaacatatggctagcttggaccagcaacattc

SEQ ID NO: 93792 - DNA, 342 bp, Glycine max
  unsure (1)..(342): unsure at all n locations
taccatgttcaattattttttaaagtgaaacgggtttatgatcccaacatggttggctcgtggtgcctaacacatganactaagaatgtagtgtgaagtttcacgcttcccccttnntttgttttgntntgtagagganaacgcaaggatgagcaaacatganaacaaatggtatgcaattntgcagatcanaaagtttgttgaacgcatatgcatgatgatgccatgactcatgcaaaatgtgaggctggaatatgataacggacanatgcangatatgtccattatgatgttatgacgagatgcttatgcgatgcatgatatgaatgcattntacggaca

SEQ ID NO: 93793 - DNA, 289 bp, Glycine max
aacttgcaacattagatttcctttctatgaccaacaaaaattcaattatgggatctggagatagcatatcttgagcatgtgactggattacataattttgtacttgcggagatcataataagtacaacctgaattttagtaaatcatatcattattaaacatttattaaacattgtgtgttacacacttctccagatctatgatagggtgggttccatataagaagagcaactggagcttccatgggttaggccttgggtctaacgtcaagaagtttaatgagggattt

SEQ ID NO: 93794 - DNA, 284 bp, Glycine max
  unsure (1)..(284): unsure at all n locations
gctagcagcttcaccaattcttcacaatacttcaaaggcatatttctatttattntcncatcatatctnccagagcccaatacccatgatcatntatgtgagaagaagtctacgccaacctgaaatctgaagtcccactatgtagaggtgcactntacgactcacgaaatggcttctctccgcgatttggagcacaaatggcgagcaaacgttggagctntnnngganctncaatggtgaggaagaagaagggaatagcaaccgtagagagagatggagagaag

SEQ ID NO: 93795 - DNA, 363 bp, Glycine max
  unsure (1)..(363): unsure at all n locations
agcttantttcttcccattacttatctatagcaatgttagtcattttgatggtgttggattaaaaaaaatagtttatgttaatgtcttatcagcttaaaatttgtttttgtgaataatatttatatgaatctataatatatttggcacacataattgacaaatcgattaaatgctaatcaatcaaatatttgacacatatattaaaaaatatttttaaataatgtaaaaacaatttaaataaattatcacaattaaaatttatttttaaatttagtagataaaatttaaaatagcgatgagtgtactaaatttaggttgataaaaagaattaagtttattaattcaaatttggataatcattt

SEQ ID NO: 93796 - DNA, 314 bp, Glycine max
  unsure (1)..(314): unsure at all n locations
gcattgtcgattcttgtctcttcatgatggctcccacatgccaccaccttctgcttgccattcatattctggcaaagaatgtttcggtcacctatcctgccatcatcacttttcagagtgtnttctgaccaccactcatnttccagcgaagaactttctgggtcgcttatcttgacgctgtccttctatggcatgtctcttggtggctcttctgtgcttcgctggttgtccatatctgccattgtttccttgcccatgactatttgtgatgattttctcttacacagttaataatcttgngtctccactaatat

SEQ ID NO: 93797 - DNA, 317 bp, Glycine max
  unsure (1)..(317): unsure at all n locations
agctnggatggagagctttggctttcattaagttgcctccatggagttggttctagtgcaaaccgcgaacatggagtcacatttgcaattgaatcagcccttctaaactgaggcaagctgaatcttcgaggtagcttttcatcacttggactagatcttgccaagagctcattctttttggaagaacaactagacagtgcccattggactcccacaagtttgagtacactcagggagggcttcaagtaccatcaacttagctacaacacaggaagaccttttggaaagtttcctgttcttgcaaatggataatcatt

SEQ ID NO: 93798 - DNA, 333 bp, Glycine max
  unsure (1)..(333): unsure at all n locations
acttataaattgatntattcttatatattatggaggtaaggttacagtatctaattagaactataattaatttcaaattcatacaaggtatctgtatctatttagacaggcatttgggctaagaaatgtaaggctttttacaaatttaagaacttattatatataaaatcaatttattaatcttacttttactgcaaacattatagagttatatcaatattctacacttacttcataataatactactatcattattgaaatgtgattaatatattaacatttatttgaaactttcgcaacatgtcggatgcataatcttatcatgaacttga

SEQ ID NO: 93799 - DNA, 373 bp, Glycine max
agcttctgtgttacagatagggcttttgtaatcactattgtttgcaaagcacatggtgggggaaaacgctgtatagtaccatggtgcaccaaatgtgctgtggggaccacaccactttgtaaaggccatggtggaggaaaatgctgtgcaaaccacgggggtggaatttgtactaaaagtgtgcatggaggtaccaacttctgtgtggcacatgggggtggaatgaggtgttctgtacctgactgcatgaagagtgccatgcatcaaagcgattattgtatatttcatggaggaggcatgagatgcaagtttgaagggtgtggaaagagtgcaccaggtggcactgacttttgtaatgcacatgggggaagga

SEQ ID NO: 93800 - DNA, 458 bp, Glycine max
  unsure (1)..(458): unsure at all n locations
atattcacgcagcaatggtgtatatttgttaattgacttganggatccgctttttattattaaaataataatttctatataaaataagtaatttcttttgcttcaaccttcgtacttgaacaatctccatttaagtgtgtatttcccttagagcttctagatattagtactgcttctccacaatgaacccganggaaaggtgatgntgngttcattntctaacgacgatacaagtatttagaagtaatntgtgaatnnttntacttatatattattcaatctattcatgtctaatgaatgtagaatttacctcacacttacttcncatatataataatgatgaactaatagagccgcaaatcgcttatatatatcaatacaatacagtgggggtggtttgcatctacgactgatatacagcaagcttgcacttatatcggttatcatttgacaatgat

SEQ ID NO: 93801 - DNA, 335 bp, Glycine max
  unsure (1)..(335): unsure at all n locations
agtacttatcttgattgagtcttttcatgattcttgagtcttcaaccttgaatcttgaaacttgattcttgattcttgaaatcaaaattccctcttgatccttgaagtgttcttgactcaatcttgaactcattcttgaatgtcatcatctttgttatcatgaagngatcttgacttttaagctctttgtaatcatctttgttatcatcaaaactccttgaatcaatcttgattcatcatgaagcatggtctacaaacagtaaccatgtctattattaatacagcacttatgggtaaacaagccctacgggtggttgaaaattacgtaatctatt

SEQ ID NO: 93802 - DNA, 312 bp, Glycine max
  unsure (1)..(312): unsure at all n locations
ctcaatgcctcaccagacatgccaatggtttctgaatgtcattgcatccaaccttggtcacgttcaccaataattctcattacccagatccatctaggtaagagccactattggacacacaatatgtactacctgtagtggcagttcatgtgttacattntacttgtatatatacagtgtacaataaatgtataggtagtaaggtctacaagatgacattactgaagtacaaattgtcccaaaccctacagatgccattntcaacgtntgatagtgatagaggatagtgatagagatagagatactaagcat

SEQ ID NO: 93803 - DNA, 377 bp, Glycine max
agcttgaagaagcgccaaatagcttactggatgacccttctgcaaaaggtttgccaaccgtttccgcctgcaacttcatcttttgcttgtagccttgatgaagatgatcctcggtatcggtaattggaataaaattgcctacaaaaaccaatgatatgctttagataatataataggtgagacaacaacacgaaagtaaaaatcaaagagcacatacatatataatcccttataacaacctcatcactatgaagtttcaacaaagcactgcataagaatttggaagaatgtaaggtgtcaagcttggcaatcaattcctttttggatgactccatgaagtgttcttctacaacaactgtcacaaagggatttcgatt

SEQ ID NO: 93804 - DNA, 370 bp, Glycine max
agctttaataatgaaattatttttaataataataattatagccatggattataattaaaattatattatcgttttcaccgctcattatcaaattgataatttcattttctatataaatcctacttcaaaggaatgtaaatatccacccattttcttaccatgtgctttctaccttcttttgtcttttttccattattataatatcatttctttcattctttatttttattcttatatatgaaaaaagatacttaaatgggttattgatcatcatcaaaattgaaaatttaagtcttttagatccgataaagtataagggagaacctatttcatacttgataaaaattcaattgtttaaatttttattttc

SEQ ID NO: 93805 - DNA, 478 bp, Glycine max
  unsure (1)..(478): unsure at all n locations
ctcattaatgcaagcataacactntctcacaccatagactcanagaaaatngatagatatcaatttaagtgttaacataactgacaaatgactcgntgttacccatatgaaccttcttcatgggatctctaatcacncaggtagggtaccatcacttgtttgtctgtaagcgactgatagttcattccccttgatgtttctaatatcatattcctcactaaaggttttgtcaaaggattaagtttccttctaacttcacataatctatgagaaatgtgcatctttatcagttgttaaccacattatgttcaatagatatgttactttctattgatgtttattttagcacaacattctgactggatctgaatgtagctaaaattatcacactagctcgtacaaccatttgagcacaacttgactcatgtcattacatatagttgctaatgactcaactacgacactacacagaacacta

SEQ ID NO: 93806 - DNA, 381 bp, Glycine max
agcttggtcgaggtactttccctttgaagatcgaagaacgatgaagaacgaatgaagaacgtcgaagaacgggtgaaacctttgcgaaattcttcacggaaaacgttacgaaaacgtttcggaagcgcctcgacttatattttcttcacggaaacaatttttctcagcaaattcggaagagagagaagtgcctaatgggctgaaccctttcttcttcacttcctcccctatttatagcaaaataggggagatgcttgccgcccagctcgcccaggcgagctcatgcgagccaggttgcttcctccaaaagcaacagccttctggaggaatcttctggagggcccaagtgggcctgggtgctatttgcacccccatttttac

SEQ ID NO: 93807 - DNA, 149 bp, Glycine max
  unsure (1)..(149): unsure at all n locations
ctcagctccaacatcatcagcgantgatcattgggctctattctctctatcgaatacactcggcgatcttatgatactactaccatgctataaccatatgttggagtcttttccaatttctaaatctcagcattactggaagcaaatct

SEQ ID NO: 93808 - DNA, 145 bp, Glycine max
  unsure (1)..(145): unsure at all n locations
accccccataattttnnatggtgggcgaaagaaaattgatctactgatactgaactcaagcgatcgaagctcaacgttactaaacagatgagctcgaaccactggagacaagggctcaattcttaaaatgggggggggggggtgt

SEQ ID NO: 93809 - DNA, 338 bp, Glycine max
tagctgcgactttgctctaataaacaggagaatcactttttagatgcctttggatacatttgagtattttattgcaataaataattgaaagagatattttccagaatttgagaataattaattattaaaagagatggcttcgaataagagcgagataaaaaaggaaaaaaacgaatagtatgattagtctttaatgtccgcaataactgataagaatagtccgtgcatggggtacgataaccattaagtatggggtctgttataagaattaatgattgctgatgaagtcgatgatatggggggcatgtgaacgtcttggagtagggctgggtaaaata

SEQ ID NO: 93810 - DNA, 233 bp, Glycine max
cttactaaaaaggttactagtattaatagatttacccttttgattccaactggtaccgcacgaccgaacggagggaattcattttaaccaaaatgaacggatgatacaattcaaacgatcagaggaaaattattttatttttagattaagccagaaatggactaaaataatggcttaaacacgtcaaaagggggtttaaaagcgaatgaaaacgagaattaaaatgcatggaa

SEQ ID NO: 93811 - DNA, 403 bp, Glycine max
  unsure (1)..(403): unsure at all n locations
agaaagagtccccgctatgtctntagattgagacatatgccaatgataaagctacttttcttagaactntcaggagttgganaacanaaggatctaaatgagctgaatgaacttcataatcaccaaaaagaagaaagatatgatctntggagagaatgtgcacaagcacacaaagattatgaagacctcaaaatgagtaaacataatctttgggtggaatatgaagaacacaagaaatctatgagtttcttgaataataagcttctgaagaatcaagaaattaaggggcaaccttaagatgttgtaaacttcatgagagaataagaaccttaaagactacattatccannattgtcaatggaacagataatcttaacanattattatgatactgtagaagttc

SEQ ID NO: 93812 - DNA, 460 bp, Glycine max
  unsure (1)..(460): unsure at all n locations
atgtcatgaatcagggaaaccactanattcctgttcanaggtgaaagacaattctactagtggtggtcctcttcgttatgctctccacctacgctntatntgccctatttctaanaagaccatcagatcagctcanataagcacaaataattcacttcaagagatatctatattggacatggaaggggaacgaagattctacttatgtaatgatctgagggttgtgttccctcaacgtcattctgatgccgatgagggcaaggtatgtncctatgttgtggnnttgtactggatagctttntctcagcgcatactaaacagactatacaatatggcttagactgatatcttgaaaacaatattatgggtgttggctggtatttactttattgaacaatacatgataaatgtgttgtggttctaaacttcttgaatgaaccgacaccgaaagaacataatc

SEQ ID NO: 93813 - DNA, 327 bp, Glycine max
agcttattaagttatgacttggtttttgttttgggtggccttgtgctgtgggttataagtgggactggtagacttgaattgtgatcaatttgaggttgaagacaaaaagaaggtgggtctgtctaggaatcttcaatcgggaggaggttggattcttgtttgatcatttagaataatgttgtcaatttaggtacctattacatgcttggcttcctgtggaggatatgatcttgtgtttttccccaccccaaatagattttaggtgataggtactccattttttactactcaactgggtttataactaaaacatttattgcattaaaa

SEQ ID NO: 93814 - DNA, 355 bp, Glycine max
tagtcaatccacgctttgcatacaaattgttgtcttcgctttatgtatactagtgtcttgcaacaccgttgatattaacataatcacactacagacaactgacagttatactatcaacttctgataatacatagagatggaaaattattatttaaaaccgagttacacactagagttctaaaaaaacatggacgtagatatagctagcatcaataatgaccaatattattgagagagttacatgttttctaaataatcttaaataattacatgtacttatcctacttactgattatattttccttgactgcgttatcaacaaagtcgatatattataataaatcaaggttgttgt

SEQ ID NO: 93815 - DNA, 335 bp, Glycine max
agcttctaccaaatggacttactttgatttaattcctttgatagcccttttgagccttgtttccctttccttgttttgaagctcactacaagccttaaatgaaaaaccatgatatcaccatatccttaaggaattttggagctttggaattgttttgggaataaaggggggggggtttttgtttcattggataacttagtttggtggctatgccttcggatggattttgggccatacttgatgtacattgtatattggtttaatagtggacatgctgaatgaaatggtgtttctcaaaggctattgagttaaaaaaaatttccaaaaaaatgaag

SEQ ID NO: 93816 - DNA, 327 bp, Glycine max
  unsure (1)..(327): unsure at all n locations
tatcttctactgcaactccatggctaatatcaccatttaaggaccttatcgaagctcatagatcaagcctccatagaagcttctcaagcaagctaccatcactattatatgaaacacaagaaccttaatgcagagagattcacttntactccttattaaactcttgaaattaatgtaattaatgaaaatacgtataattcttttgtgacaaccaacatatcatatggacatcataccaaaggttctcaagacatataacataaaggtacatgtgcnccaatgccttacatcatcanaacatcataaccaaatcttcaacaaatctct

SEQ ID NO: 93817 - DNA, 228 bp, Glycine max
ttattttgaaattttatccccaggtatttgccttctggtataatttatttctgccaaaaaacttttgtattttccatataaatcttacttattcatatttacaactcacatatttaaatctccttaaaccactgacttaacatctaagatctattatccatcatcttctagatgcacttcttattggctcaaatctttttaaaaaggcagattttctcttaccctcac

SEQ ID NO: 93818 - DNA, 365 bp, Glycine max
  unsure (1)..(365): unsure at all n locations
ctcagcttcaaagacctacggtccttatcgncgntntcctttatcttctcttacaagatcctcagccacatcaacctcgcccaaactcgcagaagagtatatcatattagagtaaatggagtattcagagatccctctcttagtcatctctctaaagtaatcaagtgcttcagaagctcttccacacctcgctaatgactcacacagaatctcatatatctgagctaaacatgttggacctcttaacttcctactctcaaattcacgaaacaactgaaccactgtctcacactcattaagtttagagtaagcttccataatgtgtaaataacctctcgaattcagaacaacattactcgacctaa

SEQ ID NO: 93819 - DNA, 247 bp, Glycine max
gcaacctcattcgatgaaaatgaggcgttaccgaatatagatgctccataatttataatgaatagcagaaggagaggatgactcctcacaaaaataaaggtgcaccctatgtttattatggcagcgcttaacaattcttgcgataatgttttaacgcagaccccataatggatggggccaaccaatattaagcatcaccatttcaaaaacaaggggcagtggactttatgtgaagcctttggaagga

SEQ ID NO: 93820 - DNA, 326 bp, Glycine max
  unsure (1)..(326): unsure at all n locations
gcgctagcgcttctatggactgcttagtgcgctttanngaatatcaacttaacgcgcgtcttctcgctcagcggatggactcaagcggtgcgcttagtgtgataagctctcgctcagcgaacatgcacaactgatccttcttacagattcttcctcgcgttcagccaagggagtggtgcgctccgcgaatggctcgccaagccagcatattggcttancgagtggatgaatatcagcacttcacagactngcctacattacttgatattgagaggaaatggttattacatacacaaaatgagagtactaagtatttattacctatc

SEQ ID NO: 93821 - DNA, 366 bp, Glycine max
  unsure (1)..(366): unsure at all n locations
acctgcagcatgcaatcttgagccaatcnaattttcttttactatctacccagaaggcaggttgagtcccggaatatatcgagaccgtcagaaatgaatggtgatactctgaaccaattgaaacgacaataacttgttacttggatggcatgattgagtcccgttatatatccgagaccctcgataatgaatggtgaagcttcgaacctttttgaacgacagttactttttgcatcgataggtgaatgaattcccgaacttaatccagacgctcaaaagaggatgttggattcctgagccagtgcaaacgacaaggactttttacctcgatgtttgatggaagcccgacacttatcgagacgctcg

SEQ ID NO: 93822 - DNA, 404 bp, Glycine max
  unsure (1)..(404): unsure at all n locations
tcagctaacttacttcagccttcattatacngactcatcaactttctgtataaagtattggttgttgaatttgctcagatgttcaacattcaatatcgagcgtctcgatatattacgggactcaatcagatatccgagtaaaacgttatttgtcgttgaattggctcagaggttcaacattcaatttcgagcgtctcgatatattacggtactcaatcagacattcgagtaataattattgtcgtctgaataggctcagagcttcaacattcaatttcgagcgtctcgatatatgacgggacacactcagacatccgagtaatacttattgacgctngaatttgctcagagcttcaacattcaatatctaaggtctctatatatgacgggactcaatcacacat

SEQ ID NO: 93823 - DNA, 331 bp, Glycine max
agctagaaataaagcccttttctattaattgtccgacgcaagagaagataacttgtcttacctggaactaaaagtacatcaccgatgcaagactgaccgacaatcttcgttctgataaagagctttccttttactttggacagtcaagatcctatcatcagcgaagtgagacttggctttctccaaattgatcaacggtgagaaaccactctcttgttcctgtcatatgaacgggactccctgtgtctatggacccgcaattatatcttgcccctttaattggagtagttaccattaccagtgccatattgatgtcataatctatttctga

SEQ ID NO: 93824 - DNA, 311 bp, Glycine max
  unsure (1)..(311): unsure at all n locations
gatgcacataataactttcttttttatgaatgtaacaanattattcttatgctgcagtgattttggagcagatatagtgcccgcacaaataatattgaatatgcttccagaactctttgatcatcaagatcaaaatggtcgtgcattctctatagggttgactcttgtaccttgccgctggattggtaaagatagtgttaaatcaattttgtgtgagatcatgagagacacaatggcaagctacactagttgtctatattcggtgatgttatgatgtgtcatgttctcctccatatccacatcttagagta

SEQ ID NO: 93825 - DNA, 294 bp, Glycine max
ggtattcacgtacagaataagggtgcaaaggaataacaaactttattgcaagtgattgagaatattattgtatcaatttgatcttaacctcaaactaaagaaacacattctcacgagttaggatgatataataaggttatctctatcttacactaactagttctttggtttctactttaaacggcaccttctgaactgttcaaactttacattggcacacatgtactatttgggacttatttatatgacatttgacctattcaagctgtatctatgaaatactattcaaagtta

SEQ ID NO: 93826 - DNA, 338 bp, Glycine max
ggagagtgatcgtgcttgaaccttacacgcccggggacctaagaggcactgaacctgcaaactttcacttaatggaaaaattagggatataagccaaccgttgtgaccccgcaaaacgtgccataattgaatataccgagagatgtgggacgaccacctccacaaaacgcccaagctccccaacgaagattcactaactcacgctcatcgagaaaatggggctaaacgagccttcaggatctaacagcccataaaagatagacgctgacgaaaaaggaaggaatagactcttccaggccgataaacgggccaatagacataagcttggacgaaaagcc

SEQ ID NO: 93827 - DNA, 247 bp, Glycine max
  unsure (1)..(247): unsure at all n locations
tcaatcttgtaagacgatcatcatgaccatctaagaacgtatagactctgtcttcttgcanaaatacattatatctctgaatatcagcatcacacaacatacgaattggtcgacgagaatcgatctctctccatagtccttgtanggtggtataatacgtttcaatagatctgtcaccttgcttgagtctggtcactcttcttttgaatcatatacttgtgatgtatcaccgctatcacagtatgtt

SEQ ID NO: 93828 - DNA, 321 bp, Glycine max
  unsure (1)..(321): unsure at all n locations
agcttcttcttcagtgtcgntctttaattctttattatgctgataaggtcgagttaagtatattttatatatgtgctgcaagaggtacttgggtcataaacattcgcccaaatgcaaagaaagtgaacatgttattcacgaacaaaaataataggacgtgggagaaatttgcttcttgacttcgaactttctaggtaggcattatatgagaacaaaatgagttgaggctcgacagtggtgaagttaacgagaattcatcctctagtatatgtcaaaactcatcaaagttagagttgaagtattataactcatttcaagctc

SEQ ID NO: 93829 - DNA, 413 bp, Glycine max
  unsure (1)..(413): unsure at all n locations
tgactggtcacanaatgattatgggccttttcttcagtgactggcaaacaaagcttaacacattaataaaactcgtttactttggttttctcactcttatttanatcactttttaaaagaagaacanatacatgaatatgaatgacccagcgggcaagtgggcaacacgtaacaagtattgaattatgtagcttttttatcatgaaaacagaaaacanactatgtnntaanattttcaataacctttattaaaaaagctnntcataacananaaaaaatcaataaaatgaagggatattatntttaatattatgacatatttttgtntaaataaatanactaatataaaataaaattatatattatatttattcattctaacctttttttatcnatactatttattatattat

SEQ ID NO: 93830 - DNA, 199 bp, Glycine max
tgaaccaaagaaaccagaggggagagaaaaaggataggaaagagggaagaggaagaataaaaggcggaaaaaaagaaggaaggaggagagaaaacgaaaaagaaaaagagggaagaaggagaaggagggggaaggaagaaggagaaaagggaaggaaagaagaaaaaaggaaagaagaaagagggggaaggaagggaaa

SEQ ID NO: 93831 - DNA, 467 bp, Glycine max
  unsure (1)..(467): unsure at all n locations
tatattatttttaatatgatatataatggttataattatttactaaaattataacattagttgagtggattggtggtctanatcantttaatgttnggaataagttaattcctataagcatgatcataggtctatggatgaatccaatccatntaaagtggtccacatcaatctagtccgttcaaagtgatccacggataaatagattgtatgtgggtccaaactttntatatggtagaattatattnttaaaanaagtaaanaataatgtataagaatagaagaagaaaagatttacttcatttttaaattnaatctatatactaaatacaccatattttaacataacacataacaatacaatctacacattaattatganctagcattgactatgcggtacgtgttatctcgagctcgagtaagttctaagtcaggactaatggcccactccaactcatatagtt

SEQ ID NO: 93832 - DNA, 472 bp, Glycine max
  unsure (1)..(472): unsure at all n locations
ctattcctcttttcacttctgttcttaccatttctttgcacaaaatttgnggctttccattggtgatgatcatggacggctaaacaattaatcaattcaaggatccactccaagcaaggctgaatttgagntttattgtagtatttataatctctatgaatgtttatctttctcttcaatcataattttgctttcatgactacgattgaaaatggattatgntatgtattcatttcctaatttcacaatttaatcacagattgtctggatgatcttccaacataatctgtgattcaaacagttaaaagatgattctgtgaactttcttaagcatttactgaacttacattaacatattctagtactggatatcaattcatggttgggattgataatgtataactgactgatctgtctgtctgttgttctaatntgttgctgttacatactatacacacaatgtcacatttcc

SEQ ID NO: 93833 - DNA, 477 bp, Glycine max
  unsure (1)..(477): unsure at all n locations
acttagtctctcattttgtcatctagagtactgcagtccgatgacacgcagcgaccaacatggtcatctgcaccctttgtcggagaccttagtgtctttcgactgagactactntagtctcaccctcgtcatcccgagacgacaactttgatgacacacggagacacctcacggntatctgcaccctcgacatcaggagacgacaagtccgatgacacgcggagacacctcacgcttatccgcaccatcgtcatccagagacgacaagtncgatgacacgcagtgaccaacatagttgtctgcactctttgttggagacctcagtgtctntcgactaagagtactntagtctcaccctcgtcatccggagacgacangtccaatgacacgcagagaccaatatggtcatctgctttcgttttcggagaccttactatctttcaaccgacactactntagtctcaccctcgtcatccg

SEQ ID NO: 93834 - DNA, 314 bp, Glycine max
  unsure (1)..(314): unsure at all n locations
gagctncttaaaacatacataaactctgtgtgtcttttttactccgtcaccgtgggagaatactggtacgccatattttactccgattggttcctacgccctttggaggtcagctcatcaattaagtaataattgaatgaattattaatttggtctcagacattcatggatctctctcctacagatcaatcaattagatatccaatcataccgaggggtgtgtcatatatatttaaattttaacaaagattgacacgaataatgttaggaaatattaatataattttactatatataaaatgggtttggaaaac

SEQ ID NO: 93835 - DNA, 212 bp, Glycine max
ctagtatgtgctattaatgaagtcgtgtgtgaacactatgctatcacaacttcatactagcatgctgttgtcttgatgcatgtgttgtaatgaacattctacaagaggaacaggtctgcttcttagaacgcgacaggacacggctggctactacgttctctcgagggattatggtgccgttcctcatagtagatgcatgcttaatgtggtct

SEQ ID NO: 93836 - DNA, 379 bp, Glycine max
agctcccgtcagttgtaccttatttttcatgggataatttcttcatttggttttgatgaaaaccccatggatcaatgcatataccacaaggtcagtgggagtaaaatatgttttcttgttttatatgtagatgatattttacttgcagccaacgatcggggtttgctacatgaggtgaaacaatttctctctaagaattttgacatgaaggatatgggtgatgcatcttatgtcatcggcattaagattcatagagatagatctcgaggtattttgggtctatcacaggaaacctatattaacaaaattctagagagatttcggatgaaagattgttcaccaagtgttgctcccattgtgaaaggtgataggtttaatt

SEQ ID NO: 93837 - DNA, 381 bp, Glycine max
agctcatgaaaaaaccatttttttatcattttagctctgtttctggatctaacaaataaccatcaaaacctacaaaatcatgaatgaatctttcatatgtaaacaacaatattagtaaatgtacaatatatagttgcaactagttttaagggtagtttataagaaaactattacaattaaaggataatgctaacaatttaatcgcaaaaataactaaaatttggcacttgtcaactcccccaacctagaatcttgcttgtcctcaagcaaagtaaagaaaaattaaaaattaaaaatagtacaagtaagcttcaaaaaaatatgaacatgctttgtaaaaaatcaattcccaaactcatcataataacatttttcaaaatg

SEQ ID NO: 93838 - DNA, 356 bp, Glycine max
aagcgcctgcagctgcaacttccaagtactattgttttttcgattgcctacaactccaggaccaaatttacaaaagaaccacagttatactcaaatgagcttcacaattgattatttaacagaaaatatattttttcacataagaaaaaccgaaatgtatatataccttggtgacaaaacaagacaatcgcgcgttggattttatagtcataacactcagaatcagctaaagccatttccacagcattcttcagcaaaaaaaaaaaaaaaaatgtaacacgttgactcatactctaaccaaatgccggggcgtatgttttcaaagagagaaaatctgaccctcaaaatgggggctg

SEQ ID NO: 93839 - DNA, 195 bp, Glycine max
  unsure (1)..(195): unsure at all n locations
tctgggagctttgggcagatgggtctgctanagctggaagtggggctgaagtacaagatgcacggatgctagctattggtgcanatgaagaaggaacatcaactgctctgagctnggtcttccttgcctctcggaaagtaactgtgtggtcattcgcattccaacagttctttatgatataagctaagtcaatga

SEQ ID NO: 93840 - DNA, 343 bp, Glycine max
agctgcaaacttagccctgtttattaagtgtactctcatcactactagaaaagcgagattcttcattggctattcgaacattactacatcgagttatgaccgtcatcgtatgaaacggcgggaaaaggggaaactctctcacgacggatgcagacgaccgtcttaaaatgcaaacgacgggtgatttgcattctacgacggtcgttaacacattagaaaggtaatcattctacatcggctccatacaatacactacattgtaagacgggccttaacacaagaatcgcatataatgattagcattgtacatcagcgcctaaaacccgaccacaatgaacttttt

SEQ ID NO: 93841 - DNA, 248 bp, Glycine max
tttaattccccaatttcttttatctgtattaaaatctttaaaataacggagctttccacaatcaaatcttttccttcaccctggtatttttccttttttgagcaaaatctgcttgcttcttgcttataaaaccgtatcgcaaactgagtatctatcaaatacagttgggtgaacctactcaccatttcactacacaaagttggagcgtaatatctctttttatatcaatattctctcaaactacaata

SEQ ID NO: 93842 - DNA, 365 bp, Glycine max
agcttgttagcccttgagcctgttctgtgttgttcgggctgttgttgttaagttattcagggtggacatgcttttggttttgcaggcgaagactatcctgtcaagtgagggaagtttctgaattttccaactctgccattttctgatcgttagagagtgcattgatgacaccatttttgctcttgctagttaccgaagagtcatgcctccactttaaatggagtggaagtttgatttgtgatcaacatcacttcaaatttctacattctttctcttaaaatctcttcgctttcgtgcttttcttcttgggatcctctttcttcttcattccttttctttaaggaatcccttctttgacaatgtct

SEQ ID NO: 93843 - DNA, 367 bp, Glycine max
  unsure (1)..(367): unsure at all n locations
agctagctcacacacncctctataactaagctcacctccttgagaagcttgcttaagaagattcctaaagaagctagagnctagctacacatacctctctaatagctaagctcacctccttgagatgagaagctagaacttagctacacaccccctcatagctaagctcacccncatgacagataacatgaaaatacaaanaanaattccatactacanagactactcaaaatgccccgaaatacaagggctanaccctatactactagaatggccaaaatacaatgcccatatgaagggaaacctatttaatatatacaagatagcggctctacttagcctaggtcaaatctaccctaggctatga

SEQ ID NO: 93844 - DNA, 375 bp, Glycine max
agcttatatataggccaaacttttttggtagataacacagcgagcatgtacaacccaaagatacaatacatagagattgtgagaatgtttgagaccacaacattactaagtcctaaaacagtagcatctagagttgctttgaggctagatcggagtactgtgagccgcgctcgttcaagtataacacggaattaatggctgtaactattaaataactggaatgagaaagggtgagggctattccaatggcagcgcaataggcttgcactggaattgccatatatctcccagccttgatcaaaaaacgtcgacggctccaagtccctgaccttacagaaaaagaatgtgacattatagacaggggagggccccaca

SEQ ID NO: 93845 - DNA, 424 bp, Glycine max
  unsure (1)..(424): unsure at all n locations
gaacatataattcgctcatgagcatgtgagttacaanacatctcatctgttcgatagctacaagaaagcagatgatcaaataataagaaatagtttctatgacatccatcaagttcaaaacttattaaccatacagattcttatgtggtgcaatattgtaatgcaaacacattttatatttgcatctcatcagcataaatgaaatagatatcaataccaacttttgtcttgtcctccactgagtcttagtatgaggagagatacagagttcagattcactagtactacatgaacatgaatggggaataattctgccgatggacctgacatatgaatgcacgatgaagatagaatgtctagagcgaatggctcatatctttcatgcacataacatggntaacatttgccatatttgcttctttaa

SEQ ID NO: 93846 - DNA, 380 bp, Glycine max
agctttgctccacaaggtgacttttttgctgtcttgctaagaaggcttgacaatttttccctcatagtaatgctgttacgcatatcctaatagaaggaacaccaacttatgggaggataaggaaggaaatgaaactcagcttcgacttagacctagacatgtgtttaaaaattgaacaaaagcaaggcaaatttctgacagggtttgtgagattaggattgattcacaaagcaattcttagatagtaaaaacaaaattaaagatagtatggataacaaaaatatatttaagcatatatatatttatcaacaattttggacaaaaaaacaagccaactcttttgtttagtcagagaggtaacctggttgttgtttagtgta

SEQ ID NO: 93847 - DNA, 211 bp, Glycine max
  unsure (1)..(211): unsure at all n locations
atgatattagaagagatgttggtgctatgtgccctcctaccttattgcgtgcgagttctttagctaaactctttgaagaaaatggtcctatttctaagcgaattcgaaattcctatagtcacaaatattcccagaattcttctacctcagtctctataatgctcaactaanacacacatangatcagtatacctccgctgtacctactcca

SEQ ID NO: 93848 - DNA, 386 bp, Glycine max
agcttgccaactacaaaagcattttattctagcagtaagacattagaagctacacatgacttaaaagcatgatctagaggtagcattagtcaaggggtaaacattaaaagctacacatgacttaaaattcatcagaagatgcaatgtaaaaacaacaatgaagacatttgtgtctacatagtcaagaagcacacaccagaagttgtgaggaacaaagtcatgcactagtgtactaatgcaatatcatgacaaactcctctaaaatcaatgatcaaatatgaagaaaagaactagtcacgtactactattcctatattaataagttaaccgtgagaaacaaaaatgaatctctaacatctgcaatgttaacaaaaagatctacacca

SEQ ID NO: 93849 - DNA, 244 bp, Glycine max
  unsure (1)..(244): unsure at all n locations
actaactntgctatcattctttgtctctctttgtcagaagagcggaatattaaatattagcagtattgacgctgcagntntatatatttgtataacttatccctatacccatgagaaatttgtatcaccattgccatccctcttcgcacccattattattctctgccaggcatctgccaaatctatcagtatgtgtagtggttctaattaagcatacaagcaatagctatggcttccctcttac

SEQ ID NO: 93850 - DNA, 391 bp, Glycine max
  unsure (1)..(391): unsure at all n locations
agcttgttacaccactattatttattctaccaagtcactgctggctctaacacaaataagaagaattgtttattttgattgcacaatgactaacactcaatcgtcttacatggataaataatttcaacacttagttttttctctcaagaaaatcaaagtattttgagagcttttctaaacattacaagaatttacatagagagctttttacaaaaagaatttgaatagtgagtgctttaattcatactccatgtcttcaaagcttttggtatttataggcttctttcaaccaagtatttgttgtctataaacgagcatatntcctctcttaagcttgcttttgaagaatgtgatcattgggtattaaatgtgtgcattaaatgcacgtacc

SEQ ID NO: 93851 - DNA, 348 bp, Glycine max
  unsure (1)..(348): unsure at all n locations
tctctcctctcgctctctctctcttggggcttggaacctacgtaaggggagttctttcttgtgaactcaaacccacaattgtctttgggaggagaaaaccatagcaattcttggtgcctctattgatagcttngttctttagaagttaattntgatgtattggaattgtgttgatgaaattctggttgtgtatgaattgagttggagaatgcatnntaccctttcctttacattttggctctgtaattctttagaanaactccaaatacaaaggatacttaatttctatgtattaaannatgtgttaaaataattttgctattctaattggagccatgttatgtcata

SEQ ID NO: 93852 - DNA, 323 bp, Glycine max
  unsure (1)..(323): unsure at all n locations
caaataatacatctaaatataagtgtgttgtcgatagtcacatatcttatcacatggtggaagggaaagaactcagaatgaatttgagaacttgtgcaacagctntggcttgtccatagtttatgttccatgtagtggcatcctacggntgtagtgatgataattatatatagaaattattgacaagtaattctagatttcagtgtatgtaagttgcaagcaatcttgactataatataatggagaaactaatgtatcatggataaagggacattatgtaatctctcgatgcatacaactatctagcacgtgtgatgtgtatg

SEQ ID NO: 93853 - DNA, 286 bp, Glycine max
  unsure (1)..(286): unsure at all n locations
gtttatgggtattcgcttcgaagaaaaattgactttcgagtgctataactttgctcaactattctaatgcctatttgcgttctttactggtttagtccaacgacccatcaactattcacaaatcttatttgcaggattatgtccactaacctctaagcattgtgtcaacaaaagatgagtcaggcggactaaacctaagcatggtgaaatataaaataaatcagggtncaattttaatttaataataaattaaaattagattctttaattaatgattaaaatgagg

SEQ ID NO: 93854 - DNA, 255 bp, Glycine max
  unsure (1)..(255): unsure at all n locations
tattcttcacagtcacatctttttatttggttcttgaatggctatcanaagcctatatatatgtgacttgagacatgaattaaagaatagtttntttataacaaaaaggtcttatcctcttataaagcaaaatcattttatccttttacacattccttggccaaaacactcgtgattcaataaagaattatttgagtgctcacattgtcaatctatctctttcaagaaaatacttcttctcttcttctttattct

SEQ ID NO: 93855 - DNA, 378 bp, Glycine max
  unsure (1)..(378): unsure at all n locations
ctctactcganattatctttgtgttctatgtcgaaggcacagataccaaacaccaatggtctccgagtttggcctaattcaagttaaactntgntcttagatgtctcttgttgaacttagcctaaccgaacagcattacaattacagcatgataaanactaaattaccacactctgtgttcggcagttcgataacctagccctaccctatccagttctaaggatgcagtacattttgcaatactaaagctcctaaccttacacacaaatgggtgatcaagccacgagcatgcataacataagcacagatagatnaattgaacacataanaacaacttcaatagatagtataatattacatcaagcaatcagcggaatt

SEQ ID NO: 93856 - DNA, 367 bp, Glycine max
  unsure (1)..(367): unsure at all n locations
atgcagactatgcttgtgacttctactttagacaagctcaacctgaatagctatatcgagcacgacaaattatttgtgacctctgcgagtccaggtacaattccggatagaggaattataccgaccttatatgggggaatacttgtcaacaacaacaacaactacaacagacttattttcaaaatgctggtgacccaagcaaaacatacgtttctgcaccagattgaggaggacaacaacaacaaccccataaacagcatacagatgaggcccctccgcaacctccccctgaagaacttgtgaggaaaatgactatgnaaaaaatggagttttaaaaagagaccaatgcctcccttcaccccccccc

SEQ ID NO: 93857 - DNA, 342 bp, Glycine max
  unsure (1)..(342): unsure at all n locations
actactgtgaaactcgaatgcganatttcattgaggcaatagactttaacatttgagaagccatagaangtggaccttatgtacccaccatggtggctggtgatacaacaatagagaaacatagataagagtggtctgaagaagaaagaagaatagttcaatacaatntataggctaanaacatcattacttctgcttangaatggtgaatatatanggtgtcaaatgaagagtgctaggtatgtggacactctacagttcacatagggaacactgatgcaaagactngataatctctactctgagttaatattagggaaacaatgaagttcatattacaaa

SEQ ID NO: 93858 - DNA, 327 bp, Glycine max
gcaagcttctcaaatatgtgagcttatttattagaggggtgtgtgtagctaagctctaacttctcaaagaagttttctcaaagaagcttctcaaggatgttttctcaagaaagcctctcaaggaagctacctactctataaatagaaacatgtgaaacacttgtggtaactttgatgaatgagagtcttgtgagacacaactcaaagttcaacttctctccctttttcttccttcaatttcgtgctcccccctctctctgtctctccctctttcttttccttcattgaagcatcctctccaagccttttatccaaagctcatctttg

SEQ ID NO: 93859 - DNA, 371 bp, Glycine max
  unsure (1)..(371): unsure at all n locations
agcttattcattccagccaaattttgccttctagtttaccaaagctaataccactgacaaccttgtgaaagctgtgcaccctggattcaaaagcatcttcaaatcattttctattttgtcattcaaaggaacatgtgcttggtgaaatccgtcttgtcccagatcgcgaatcatgccttctatacggttgcccatgtccacatcaactgggtttatctgagagattgatgggttctctatcaataccccatgccatatccaccttgtgtaagttggagtgatcccgagacatataaaatgggttcgtatctcagctattacnnggagtgtcccattcgcacatttctcacatggacaaaaatatttacccc

SEQ ID NO: 93860 - DNA, 416 bp, Glycine max
  unsure (1)..(416): unsure at all n locations
tcctggatacannagctagcggccaactcctgaggatctngcctcangagtgcanatctgtaatatgtacacaagttctctccctcctccaanattatnngggtcttcagaaatgtattaagagtatcttcatcaaacttcactaagtgacctctcaccctcacctgcttatgtgaaattatcctcgggtcatagaggttcgcataaaactcattcataatagcaatgtctatgctactgtcagaaaaatcagtcaacttctcatcccaatggcgtctctcgagttcctccttgaactcgtcaaactatgtgtaatagactaccatattcctctctggtagtagcttttgaggcaccacaatgtcagtgtatctctcacaagcctcttgtgatgtgaacctggatctatcanatct

SEQ ID NO: 93861 - DNA, 275 bp, Glycine max
  unsure (1)..(275): unsure at all n locations
agcttgagaggatgcttngatgtgtttttagttgaggggagaggaagagagaggggggaggaagatattggagggggaaatagggagagtagtttaactttgagtagtgtattagaagaatttatttataaaaggtaaacaagtagtaaaagacttgtatttatagattaagtaaattgcttgagaagttttcttataagatattctttgataagctggatggtaactatataaacctatattggaaataatattaggtgcttgagaaggtaaag

SEQ ID NO: 93862 - DNA, 383 bp, Glycine max
agcttcagtgctgacatagatctttaatctcatgaggcacagactacaggattacaaactttgacaatgcaatcatagtcaacagataaaaccaaaaaaactgacatgtcattgatatattgtggacagagatggagcaacaaacacaacctgacttgacaagcagattaatgcaggaaaacaatgagtggctatggcacggagtagagagaaaaacttgagccgatgctctgggtaatcttcaaaatttcttgtaatcatctgtgaaacagaataaaaaggaaaatataattcagtgtatgtttacctgcagatacctaatatttatttgtcttcacagttgttagaactcacaagttataagatgtatcatttgcagaaca

SEQ ID NO: 93863 - DNA, 326 bp, Glycine max
  unsure (1)..(326): unsure at all n locations
tgacttcacttactctattctactccatcacaacttgccgcacagcttctgcattgacgacactaacgaagccttggctgttaacttcatgctccagttgtataaccttctcgacgagcctcccaccgctgntgacactgcgctcacgttggccaagtctttgaaccccataattgtcaccctcggcgagtacgaagcaagcgtcacacgtntcggctttgtcaaccgcttcaagactgcgtttaagtacttctctgctgcgtttgagtctctggagcctaatatggccgcggactcaccggagaggtttcatgtggagagtcttc

SEQ ID NO: 93864 - DNA, 386 bp, Glycine max
agcttgccaaaaggaaaacaagtttaaatttcttttaaagccaaaaatgttgtttctacttctaggcctttagagctcctacaccttgacctatttataccaactaggacaacatccttctatggacgcagatatggtctggtcatagtggatgattacactagatggacatgggttaggttcctaacccacaaggatgagtcttttgataccttctataaattttgtaaaaagatttaaaatgaaaaaggtatttgtatctcttcaatcagaagtgaccatgagggagagtttaaaaatgatatttttgaaaaaatttgtcaagagaatggtattcaccacaatttttcactccaagaacaccacaacagaatggagattttgag

SEQ ID NO: 93865 - DNA, 506 bp, Glycine max
  unsure (1)..(506): unsure at all n locations
atactacataaagtaaagctgttaagaatgggtcattgacgtgataagcgaatatgcctgtattttcttatttaaatattcacagagaaaatcaaaaacccttctcgtcttcccaccattgcatattgntatttattgngtatagaataacatatgtntttttctatctctacaaatatgattggttcatcttacgagaaaatttaatgaaaggctagagtctataatataannttttcaagtgcaataaagttacataatgtctattctttttgttgatagaacgggtatttcatgggtattgacacgtcancgtagttttcattcatattataaaatgacatgtgaataatatgatatgttctattactaaatcctcttatgtaatgcacaaccatctgtttatatacacatgacttaatanaaattagccacaataacttctgttctctcacaacgttagtggaatcctattatctttatatatatataacatactgtaatat

SEQ ID NO: 93866 - DNA, 370 bp, Glycine max
gagctccaagaaaaaacagggcctttctaatttcttatttccagaacggaatattgttgacagacctccaatccttcatggagagggttaccaatactggacaaccctaatgcacatttttatcgaggcaatataacctaatatctgcgaagccatagaaatatggccttatatacccaccacagcaaaaagagtctccatagatggtagtccctaaatgaaaccatatccattcaataacctaaagatagatggcctgaataggatggaaatctatttccttacacctaccaaccaaaaacatattaccatctgccctatgaatggatgaatatcttataggtgcaaattgtaagactgcttacgaaat

SEQ ID NO: 93867 - DNA, 306 bp, Glycine max
  unsure (1)..(306): unsure at all n locations
gtttctcaaagaagcttctcaaggaagtgttctttataaagcttctcaaggaagctacctagtctataaatagaagcatgagtaacactcgttgtaactntgatgaatgacagtctaatgagatacacttcacagttccacttctctccctcttttattccttcaatatcctgctccccccttctctctttcttttcctccattaaagaatactcttcaagcttcttatccaaggcaattcttggtggtgaagctgcttcttccttggctcattccctagtggatggtgcctccactctcctcttc

SEQ ID NO: 93868 - DNA, 317 bp, Glycine max
cctgagcatgcaactcctattggaccatatgcatttttcttacgcctttgtcaagaccatgctctgtgctcgtgattgggctctctcttcccttccaagctggagctcgctgttgctggcccgcgaaactccacgagaagtgtcacgggcatgctcttccttgcgagccctcttgtctcttgttccacaggcttggggggaggctatatcaatatcttttagtttggcattctcctttcggatcttaagaaccgctgattagaacctttctttgaccggttgggcttgctcgagatctgccctaaggggctggacct

SEQ ID NO: 93869 - DNA, 346 bp, Glycine max
  unsure (1)..(346): unsure at all n locations
acttagacgaccttgnttgagcttagatgactttattatnnatntggacaagtttgaatatgatgtaaaagaaagtgaatgtgagccttttacccctttgaaaggcttggatttaaaaatgtgttaaaaatattgttaattaatatttgaatttttattcctttattaatatatatgtgaagagtagatggtgtcacagtcactatgaaccacgaacctccacatgccacctcccttaaatgtatttattacggattgcttaatcccgcatacattttaagagtgcccaggaaagttcatggggcatattgatgtgtgtggccggggtgggtatttggggggatgc

SEQ ID NO: 93870 - DNA, 354 bp, Glycine max
  unsure (1)..(354): unsure at all n locations
acaattatgtgcagcatgtagntttctttttttgcaaatatatattgttcttggtcctttgcatgacatgtagtgaatcctaatgtgtgatgtggtcatgcgcctgtattattatngtgtataaattttatccagttggaagacatgaatatggacgaggaatcagagaaagtggcagtggagttggctgcacaaggagttatcggaaagagagttgatgagatggaatccgatttcatgatggcccttgactacatgatccaacttgctgagaatgaccaggatgataaggtatgaatttcanacatatgagaaatataactcgggtagtaaangtagaaatcaacatgttct

SEQ ID NO: 93871 - DNA, 131 bp, Glycine max
  unsure (1)..(131): unsure at all n locations
gcccgggatcttcagcgaccgcagcatgcagcttgcaagtctttttgtttttcgaaaaacgtgtttgcgggatccgcggaaaaacttctgcggcttntcccggaccagcgaaaatattttttttcacgggt

SEQ ID NO: 93872 - DNA, 333 bp, Glycine max
  unsure (1)..(333): unsure at all n locations
tctatatatcntatatttagaattggcattgcctgccacacttatgctacagngaagaataaaacttagcatcatttggtgctttccaaatatataaataaagtcatcattatcatactctgtggacatttctagctaggaactggtatagtagtagtaatcttatcagcatcatgacccagaatcctggactctacataagtaattaacataatatcaaaggcaaagagcaactcattctctagttgaagacatttagctctttactagcattgaatcacatgtttccaacagaaaaaaaaactaaacagaaggaagttaaacaacaaaatt

SEQ ID NO: 93873 - DNA, 398 bp, Glycine max
  unsure (1)..(398): unsure at all n locations
cccggatcttaagtccacctgcagctgcaagctagaatatggcctatttattttttgttcccgaaaggaaatgcaataaatacgcctcctattattcatggagaggtgttccactacaggaaaacccgaatgcagaattatnattgaagcgattgactttaacatttgggaagccatagaagttggaccttatgtacccaccatggtggctggaaatacaacgatatataaacctatagaatactgggcttaagatgaaagaagaataccgtacttcaatttaagggcttaaaacatcattacctgggccctacgaatggatgaatattttatggtgtcacatagaaaaaagagttatgatgtgtgggacacctttccatatacacatgagggaacaa

SEQ ID NO: 93874 - DNA, 393 bp, Glycine max
  unsure (1)..(393): unsure at all n locations
gcatgcaagctctacttttccctaatatcttttctattccaacgagggtaataatgcaacactcaatgtctgcacccttagacaccaaaactaaaacacactggatgagcttgaaattaattatgtttaaatggagagggtgaagatcaaccacatcatcaaatgagggaaacttctcaatacccaaccctacattcctaagatgcaaactttaatccggatagtttagtttttatttggtttatcagaccattgaaagaatggtcccaaacaaaagattagttaattatagatgcaagacacccaatggactttttggcaagaacatgacactgtacacttaaaaaaagaagtaacttggtcagctttaaattaatntcatgattcatgaca

SEQ ID NO: 93875 - DNA, 458 bp, Glycine max
  unsure (1)..(458): unsure at all n locations
atgatatatttatgaactcattattgtntcatgaataaaaagctatgannatatcttantcttgtctggtggtgntgaccatttcatttatgatgtctagaanatactacttctctacatatttactntatntggnttatctttagcaccattacattatatgtgctccttatttatgctatcttattcttgctgccttaagatatgagagttgtaccaaagttctactattcttttgttgtaagtccttccttgtagtaatccacactattcttggtgtgngatanggcatgaatcattggatcatgtttcttcacattgaatgagatctttcttcactaagtaattactcctcatataatacaaaaggtattgactcatatatttaatgtgcatattgcattcccatctttacattatcttagttgttataggtactcagagttcattttatgcat

SEQ ID NO: 93876 - DNA, 222 bp, Glycine max
gggagactaaaagggattgcattttagtttggaagggagaagggaatgaatttggcttaggttcagcaagaaaaatatggacagatgtgttgggtactacgtagaatggaaaaaactggcttttactttatgattttatgcaaaaaggaagaagggaaaccttataacaaggaatgactttgaatacaaatatgtacggataagaaaggatgtggcagcatt

SEQ ID NO: 93877 - DNA, 386 bp, Glycine max
  unsure (1)..(386): unsure at all n locations
agctgcaagcttcaagggtaagtcttcatgtttctgcccctatctctaacatactaatcttaattgtatgttngaccaatgtaaacatactaaaaaattgaatcttgtgacatataaattatctgcggactaaatttttaattcaataagatacaattagactttatgatagaataatcaaattacatactcaaattcatgctttacaaatacaacatgaaaataatttaattttctatcacaaatatttactttatgataaaactaccaaattatacatcacatcatgatgcctgtgggtaaatcatgaaaaataatatgatattttatcctaattaattatacatatataataaaaattcttgtgggataaaattcattatata

SEQ ID NO: 93878 - DNA, 415 bp, Glycine max
  unsure (1)..(415): unsure at all n locations
cttcacccgacgaagtatctgacaaaaacttatattatccttctttgacanagtatggcaggaatagggacaagtaaatttcttcccatcagaccttggatgcaactgtgatcgtatacccatatcagctagatcttgacgggtattcaagccatccttcgtcttgccttgaatgttaaggagcgtcccaatcacactgtcacaaacatttttcttcacatgcataacatcaatacaatgtctaacgtcaagatcacaccagtactgaagatncaaagaaatggacctcttcttccatatgcaactctgacttttatccttcttgtgggtcttcccanatacagtattcaggtgttgaacccgctgatatacctgctcactagtcaacgatatcggtgcaatatcatgctcttga

SEQ ID NO: 93879 - DNA, 300 bp, Glycine max
tttgaggaccacaaagatgatgccaaaatgctccaaagttcggtacactttatgtggacacagagaatgactgtgaagaggataggatgtggttctgattgaatcaggaactcgtcatgggtcatgaggaaatttgatatggtgatttaagttacaagattcattgttcttgaatcaagatcaggattcacgactcaaaatttaattatcatgagatgactctttcgggataatgttggaaagtttcttccaaagatgggttacacctgaatttttgctacaacccttaacccaaaaagt

SEQ ID NO: 93880 - DNA, 370 bp, Glycine max
agcttattggatatggggcacctctcatatgtggcattaggcgccaatcgggcgatggcacaaatcaactatcccatttccacaagtcaagcataagcacaccattcccagtagcccacctttaaattgagctcacgcactcctacgttgcccttatcctcgttcctctcaacaccgggtccccatcaacccctccaagatttcacaatatccaaacaattcaattccatttgtcatgaaactaccctaaaccaagaaaaacagagtgcacgcagaaaactctgcacaaaactcattcgattggcacagtttttcctactcacatagctcaataacatttcttttgttccaatttgcccacccccggatc

SEQ ID NO: 93881 - DNA, 323 bp, Glycine max
agcttgagataggaagtgtcgaatgtgttttcttcctgcttttataggggaccacagagtggtacctggagatatgtcgcgggggtcaagagaccttggggacgtcaagtggggtgctattgcccaaaaccaaacttgaccaatcccgacccaacccgggcatagtcggtcagtgagaacctgtgatgtacctaaacaagcgagctcctggcagtcaacagattaaaggaacatagaccactaagcaaggttgcttgtggttgttggccagctgtgaaacttgactgatatgtgagatatgtgctctggtaatccattaccaa

SEQ ID NO: 93882 - DNA, 181 bp, Glycine max
ttacagaaaatacatattcaaacaggccaacaacacttttatggacgaggtaacatgccttataaatatatatggggtcatgctatttatgacacatactattgccacaaaaaattggtgaaatttaaacacctatcatgtcatatttttgacaaacctttaagtcatctatattatacac

SEQ ID NO: 93883 - DNA, 282 bp, Glycine max
  unsure (1)..(282): unsure at all n locations
cacagatgtccgacttcgggacataactcatctatacgctcgatattgacaacggaagctctgcagagattcgaatgcgtcatacatgtcactaggagttgcgattccgggacataatatatcgagacgctagaaattaacaacgagagctctcgagcaagtcgaatgggcataacttcttacacgaatgntcgattctgggacataactcatncagacgctcgaaatngaactacgganactctcgagagatcgaattgcataacatttcactcagatgtc

SEQ ID NO: 93884 - DNA, 196 bp, Glycine max
  unsure (1)..(196): unsure at all n locations
tattcnatcatagcatcactatgttgtgaatataaacccgggctattatctgatataanacaagcactatatgccctntatcttatgataacaagggcagatattgcaacattggaaggcatgatgaagaatgtctttgtgaaattagtagtaaagaacataactttgagatgctgcataccgtctgattctcgct

SEQ ID NO: 93885 - DNA, 234 bp, Glycine max
acatgataaaaaccagattaatctgttgtttttatacatgacgcacgattcttgagggcattttcattgggtggtcatattggattgtccgaacttatccctatcataatctttgggcgtcatgcatcatatataagaatgactagaaagattctcaaggtattaaatttctttaaaagggaaactttctatttttatccgattaccaatccctcttcatatatcggattatca

SEQ ID NO: 93886 - DNA, 271 bp, Glycine max
  unsure (1)..(271): unsure at all n locations
gcatcaagaatgcaatccatgattcatgattcaagagaagaaatcaagaagcaacaagtcaagacttcatatatgataagtgttaaaagaatttttcaataaccaaatagcacacgtttggtttagaaaagaattttctcannatttctaagttaccagagtgattactctctggtaatcggttaccagtgaccagtttggttttcanaatgttnntcaatgatttgtaacgttccacaatgatttcatatagtgtaatcgattacactat

SEQ ID NO: 93887 - DNA, 383 bp, Glycine max
agctacttgaggcagaaattttttttttctcatcaatgaatggcaactcggcaactccctgaaagttttccaacagtaaccttaatccccagttcattataaaacggtaataaaacatttaaaacacacagaccataatacaaaattatattacctgccatgctaatcgttttccattcatgtcaatctcaaaatctgtcaaaaagtgatacaagtaattctagaaactatataagatataacaaaatatgtcgataccagacaagtgatctcaccagcagggtggaattgaagaatagatgatgaaggatcaatcatcaaatccctatattttctatgcagtgcacttgaactgtaacaagaacttaacaagcattagcaca

SEQ ID NO: 93888 - DNA, 239 bp, Glycine max
  unsure (1)..(239): unsure at all n locations
attctcanaggtgntcctctaaatctgcacacgtttgcacaaatgggtatatatagcaactaactttcaaccaactaaactaacttccaactaactaactaattatcattagtggcaacatgcaaccaactaaactaacttccatataactaactaacactaagatattacttatgcatatgattcgcctatggccaaatgaactacgtaataccggtggaagagaaactcataagcag

SEQ ID NO: 93889 - DNA, 381 bp, Glycine max
agcttgtgagaaattgtacaaactatagggttttggtgagacatgctattactagatttgccacttcttatctaaccttagaatgggtccacaaagagaaagttaatattagaaagatgtttatttctgatgaatggatcttaagcaagttatctaaggagcctaaggggaaagaagctgcaaaggtagtgcttatgccttctttttggaatagtgtggtttacactcttaaagacatgactccacttgtcaaagtgcttcgtcttctggatggtgaaaggaaatcaaccatgggctatatttatgaagcaaaggactaggcgaaagatactactataagtctttctacaacaacgaaagcaagtacaaagatttgtttgc

SEQ ID NO: 93890 - DNA, 412 bp, Glycine max
  unsure (1)..(412): unsure at all n locations
acgtccatgtaanacaaaaagagaaacaataatgatgataatatctttttaaagagtcttgctaatttgatattttggagacatcattaagaaactaacataagaaaatatgtattataaatatcatatgagtataaaataagtcacaaataacataattttttgatctgaatatttctttagtcctttaataattaaattccaaacatgctgttagtattttattttgaaaatatataaatcatattgtaataaataactattattatttataatagtaataaatctatacatataacgataatgcgctatnttggtaggaacatgatattttttgcattctatctatcatcctcctgaaacatatcgcccgcagcgctgttttattatattgcatccgtgcgctatctcc

SEQ ID NO: 93891 - DNA, 379 bp, Glycine max
caagcttaagctgtttacttcaaattattctaagagaaaggtttatctgtgtgctgagcccacatgcgtccaccatgacccttctagggctcttggagacctcacagggattaagaaacactactctcgcatacacggtgagaaaaagtggaagtgtgacaagtgctccaagaagtatgctggtcaatctgattggaaagcccattctaagacctgtggcaccagagaatatagatgtgattggggcaccctcttctccaggtactaacactaacatttcatgcgtgcgatttaattaacatacatatattctattattgctatataatggtactttgttgccctttttcccacaccaagcttttttgttatatgcaaa

SEQ ID NO: 93892 - DNA, 296 bp, Glycine max
tactcagctcagtctgtatgattacatatctgtagtagttgattgtttgtcaagtggaaacggatttcaaaataaaagaatatgctaaacaacatatattctcaaatataacatggatggtggataaaggaacagaccacaatggccacaatctattatctcacaacaaatgatcgtattctaaacgaaagaaaagaaacgtgcctgtcctatcacacacatcttgcctgctgcttgtctttacctgtgtatgtttcaacttccttccatttgaccaaccatgatcttcacgtaaa

SEQ ID NO: 93893 - DNA, 358 bp, Glycine max
atgctagcttatagaatatatttttaaatttcaatgacaattggagagtctatacatgtttcctttgatgagtctaatgccattcttccaaggaaggattttttagatgatatttcacattccttaaaagatacacatattcatggaaatgactctaaagaaaaagatgaaggaagcagtgaggattctcaagataatggggctagaggaaataatgaacttcccagagaatgaaaagcctcaagagatcatcccctcgacaacattattggtgatatatcaaaaggggtaacaactagacattctcttaaagatttatgcaataataaggctttttgtttctatgattgaacctaca

SEQ ID NO: 93894 - DNA, 313 bp, Glycine max
gttagactcccgtgccttttattggctcgctatggataactatttgcaaacttgggttttgttattatgatgattatgatatgaggaatagcattgttatattaaggtcttgctttaacttataagtttgttttgtggcctttcttgtttctcttcttcgcttagattttttttgatgtcgcgataaaaaaggggaaatggaaaatgtggaatcgtcttgctggtggaggagtttgtaaatgggtgattatggtttttctttctcgcaaaaattataagctttaaggtttcgtggtgaacctggttgcaattt

SEQ ID NO: 93895 - DNA, 369 bp, Glycine max
  unsure (1)..(369): unsure at all n locations
agctttgagaaccaagccaatctttattctagacgaaatatagatgggaatagaggtaacaatggcggtaatgacggaccgaggcagaaccgggttgagggagttaagctcaatgttcctcccttcaatggtagaagtgatccatatgcctacctgcaatgactacactgatgcgcagaaagtcaagctagcaacaactgaattctccgactatgcccttgtttggtggcataaataccaaacataaatgttgagagaggaacagngagaggtagatacttggactgagatgaaaagggtgatgagaaaaaggtatgtgcccactagctataacagaaccatgcgacaaaaactccaaaggctgtccca

SEQ ID NO: 93896 - DNA, 454 bp, Glycine max
  unsure (1)..(454): unsure at all n locations
ctcctttnggtggctctaaatgtgtgaagatgctcaaatatgtgaggcaattgtggtttgttttctcgcgtgattgcgttgaatagcggggttgtatgggatggccctacgcctataatgcatnttgaagcaatgggacatgccacattgtccgcgttctcttgctattgatgcctatacgcgcgcgcaccaagtgttctgtgaaatgcctcaatggcattatcgcgtgattgttgaaggaaacaacccatggggcagtttggtttgccatatttccattattttgggaatgcatcatntccgaagggcagagtaatgccccattatctaggctaggacccaagtttatgtaaagacacaaagtggtgatattgtgtaagtacccttntggcggcatcagtatgaccacctcaatatatcctatgctaatgttaggagtttgccatataatgat

SEQ ID NO: 93897 - DNA, 370 bp, Glycine max
agcttggaatgatgctccattgtttgtttataaacagggaaagaccaagggaggggggagctccaaactgatgacctacctagggatacaagttgaactgtatgctcgtctcacagtactctcattgatcaaaattacaacaagtgtgtcacatgcttctatttcttgactaagtagctgtcttgagattctttcttgagaagacttccttgatatacttctttgaaaaaacttccttgataagcgcaaccttatctagacacacctctctcattactatactcacctgcttgagaagctcccttaagatgattgctaaagattctacctgctatctacacttacctttataataactagactctcctcc

SEQ ID NO: 93898 - DNA, 402 bp, Glycine max
  unsure (1)..(402): unsure at all n locations
ctgcaagcatgcaagcttgcttgaaagctnccatggttgttggatctttaagcttcaaagaggtgcttcaatggtgattttccaccatggagatgcgacgaaagataaaggaaaagaggtgagaggaggcgtcatccactagggaataagccatggaaggagaaacttcacccccaagagaatgtcttggataaaaagcttagagagaaaacttcaatgaaggaagagaatgagagagagagagaaagagagagaaagtgacatggaaaattgaaggaagaaagggagagaagttgaactttgaagtgtgtctcacaagactctcattcatcaaaaataccacaagtgttacacatgcttctatttatagcctaagtagcttccttgagaaaataaaactta

SEQ ID NO: 93899 - DNA, 362 bp, Glycine max
ccatataagccccactagcaagcctccatcaacttctatccatttctctctattaatatttgttggagaatatggaatttgattcatcatcttcagctacaattatatactctaatgcgctatcttgcaattaattgaacaagtattgttcaaatgtaatggtctcttgctggttgcgttatttcatttgcaattaccacgtactcatgtgatatggtcatagttaatactatatcatgactagaactattgattgatgcacctgattagtccttgagcaaatgtaccatgttgagtggtctcttcatttaaggacattgtttcgccaatattattgttaaacaatgactgtactctctatt

SEQ ID NO: 93900 - DNA, 365 bp, Glycine max
agcttatttaatgcaggggaatttttattggtaaatctcgacggctagcttagttacaaaaccaagtacattctggttgtaatgtccaatggaaattaaaaagacacggaaggaggagctgttgttatgtcactaactattgaacccttagatatggtccacaagcttatccacacagttggcaagtgtatcagctgcttcctgtgtggatgcctcagcatacacacgaacaacattttcagtgccagatggtcgcacaaagcatcgaccttgggggttcttagctgtgaatgcaaaagaggaaagagtctcaagctgccatattagaaaactgaaattctgcgctttaatctttcacactaaaa

SEQ ID NO: 93901 - DNA, 350 bp, Glycine max
tctgagtataatacgtgctaaaatacatcacttgataatggttaaatccgtctatgcatgatgacttcctttgacaactctagcctgtttaactttctaagtacctctaaactgtttaacatatttctaatcacttgaatttgtggacttacttaagtagcacattaatttaggatattactgcactctaaaatggtgcaaagttgcttttactgaattaaaagtggttgcactcgggtccaaaacttagcttgacattgaggggattcctggatactactgtgtaaactacttgtggttgcaatcaatttggctgtgtggctattgaatagctactcgttgactcagtg

SEQ ID NO: 93902 - DNA, 312 bp, Glycine max
aagctttaacgaattatttattgttttgttggttcataaaatggtggatggaaatgccattacaaagccacatgagtggtgggatggaaacctataagctcattaaatatttcttgcatctgaaggcctggatataggaagggggcgcaaccatgtttaagataatattacatataagcacaatttcttgcttatcctatccatataaagggtgaggtcttctggaggtcaataaatgacgcataaatggtagaccctttatgcgcatgctatcaatatattaatcttaggggaggtcgaaataatcaatta

SEQ ID NO: 93903 - DNA, 366 bp, Glycine max
agcttaacatcagaccacttctttgtgctggaactacttcacatggacttgatggggcctatgcaaattgaaagccttggaggaaagaggtatgcctatgttattgtggatgatttctccagatttacctgcgtcaactttatcaaaaaaaaatcagacacctttgaagtattcaaagagttgagtctaagacttcaaagagaaaaagactgtgtcatcaagagaatcaggagtgaccatggcagagagtttgaaaacagcaggtttactgaattctgcacatctgatagcatcactcatgagttctctgctgccattacaccacaacagaatggcttatgtgagatgaaaaacaggactttgcaa

SEQ ID NO: 93904 - DNA, 259 bp, Glycine max
  unsure (1)..(259): unsure at all n locations
acagatttctgggttaaagctagctnggttaccaagttaaccaatgcatccagtntgccttcaagcttcttagtttcagatgatgcagctgagtntgtagctacctcatgcactcctctaatgactataacatcatttctggcgctaaactgctgggagttggaagccatcttctcaatataaattctggcttcncaggagtcatgtttccaagggctccaccactggcagcatctatcatacttctctccatattact

SEQ ID NO: 93905 - DNA, 362 bp, Glycine max
  unsure (1)..(362): unsure at all n locations
agtagccacccagctcgctcagtctagctaggttgcttcctccaaaagcaacagccttctggaggaatcttctggagggcccaagtgggtctggttgctatttgcacccccatttttactaaatacacccccttgcctttttttggtgattcttttttcgtaaagttacggaaacttacgaatttcgtaacgatacttgttttctttccgtaatgttacggaaccttgcggattacataatcatccccttttttgacttacggaatgttacggaacctcacttattagtgcaagatgcttccatttgatttccggggtgtcacggaaccttacggattgngcatcaatattttctttgattc

SEQ ID NO: 93906 - DNA, 546 bp, Glycine max
  unsure (1)..(546): unsure at all n locations
tcagctgctgtgggctcttggggctgatcttgagcttagtgggtccttcatggtaatttacaccatggagatgcagcggaagacanaggaaaagaggtgagaggangcgccatccattaaggaataagccatggaagaaggagcttcaccaccaagatgagccttggataagaagcttggagatgatgcttcaatggaggcaaagaaagagagaatggnggagcacanaattgaatgaataaaagagggagagaagtggaactttgaagtgtgtctcataagactntcattcatcaaagttacaacaagtgttacacatgcttctatttatatgactatgtagcttcttgagaagcttcttgagaaaacttcttgagagcttcttgagaaactctctgagaactaagctagctccacaccctctatactagccacctctggaacttctagagttctaagactaactactccatactttatctactactctgaatagactgactacttccccttatctactaccctgcaaactaaatcacaatctct

SEQ ID NO: 93907 - DNA, 350 bp, Glycine max
agcttacaagacgagaagttgtttggtgattttttccgcccaatcgcgaccgctgaaggtacctgcaatatgtccggaggattaacaccttggggacctgtggtggggtgctatatgacaaaaccaatcttgacctttctcgacccatcccaggcatattcggtctttgagaacctgagatgtacctaaacaggcgagctaattggccctctacagataatgggaacatggaccacctcgcttggttgcttgtggtggcttgccagctgtcaatacttattgatatgatatacatgggctcttggtatcgcctaccaaggagggttaaccgttacgctggtttaaaatct

SEQ ID NO: 93908 - DNA, 377 bp, Glycine max
  unsure (1)..(377): unsure at all n locations
ctgatgtgcgcccccttcttttagagtctcgaacatntggtgtcatatgatgaatggagaatgccacgtgactggtggtgttatgacggataacctaaccctcggttcaatgaaacatgattgtgtggtctgtggggatctttcttgattatgtccgcgacttgttatggagatatactctatattgtgcttatcttgaaactcccgctgcgaatgtatggttagcgtcatgactgagtcaatcgcgtggctgagaataacaccattctttgatggaatgcttgccttgagcaggactgcttcttgtgagatcacaactgtatctgggagtgagcgctatcactatttgttaaatatttcagttgtagtccaattga

SEQ ID NO: 93909 - DNA, 386 bp, Glycine max
aagcttgggtcgaggtacttacccgttgaagatcgaagaacgatgaagaacgaatgaagaacgtcgaagaacggttgaaacctttgcgaaattcttcacagaaaatgttacggaaacgtttcggaagcgcctcggcttacattttcttcacggaaacaatttttccaagcaaattcgaaagagagagaagtgcctaaggggttgaacccttttcttcttcacttcctcccctatttatagccaaaataggggagatggttgccgcccagctcgcccaggcgagcaggggtgcttcctccagaagcaacagccttctggagggcccaagtgggcctggttgctatttgcacccccatttttactaagtacaccccctctggtatttt

SEQ ID NO: 93910 - DNA, 372 bp, Glycine max
  unsure (1)..(372): unsure at all n locations
agatgcaagctttgaggatttggtctttgttttgaaaggatcgatgtgggtctgaaaagaggcaaatttattcatcctgcttggacaaatgagaaaactagggcaaatgaagagggtgaggatgcaagataagcccgtgctgtgactgccattcctatacagccaagtttcccaccaacccaacaatgtcattactcagccaataacaaaccttctccttacccaccgcccagctatccacaaaggccatccctaaaacaaccacaaagtctgtctaccgcacttccaatgatgaacatcacctttagcacaatccaaaaacaccaaccaagatatgaatnttgcagcaagaaatcctgtagaattcacccc

SEQ ID NO: 93911 - DNA, 381 bp, Glycine max
caagcttgaattaagactagtattctttgttctaccaagccaccactggctctaaacaaatcaacaagatttgttggaagatttcacactaactaaaatttgtgatcattttatagatgaatatatcactcaacgcttttagtcgtttctctcaaggtatacaaggtgttttgaaagcttagtatctttacaagaatattaagaaatccttacaagaaagaatgaaagaatgattcacgtagattgttcatgtcttgtttcttcaaagctttctctatatataatcttcatctccaagtatcagttgtctctcaacgggtgaattcttcactctattcttcatctgaggtcttgagtccattggagcatttaatgcttgca

SEQ ID NO: 93912 - DNA, 212 bp, Glycine max
tgccagctttcttgagaagctagagcttaacttcacacttttctctttatctaagctcatcgtcttgagaagagaagctggagcttagctagacacccttataatagttaagctcaccctcatgacataatatatgtaaatacacaataaagtccctactacaaagactactcaaaatgccctgaaatacaaagctaaaaccctattcttat

SEQ ID NO: 93913 - DNA, 239 bp, Glycine max
ttcaatgtaggtcggctaggtcttttcgtgtgagctcaacggaagttgtgtttcggccgacaccggcatgttttcatttattcggcaagaaaaacattagccgatcgaggtctaaaaaagaagaaatcactgggtgacgccgaacgaaccatttctaatagacatcatccaaatattattcagggattgaattgaaaataaaatacccggcctcggccgttgtaaagccgagacttata

SEQ ID NO: 93914 - DNA, 453 bp, Glycine max
  unsure (1)..(453): unsure at all n locations
acactcgcatatatgcatatgtatatttntgaactacacaatagtagtaatgtataagatcatatggcacagtaattggtgtgttgggttggagttaactggagctgggtttcttgagaggtgagtgggtgttatggctgacggatgaagaaagataatgtgtctctccgactcacaataatgggaagaagctaaaggacacgagcgatgtttgacgcgacgcattaattctactntgcttcttttgtctttccattacaaaacagacaatgatcctgcttgagaacattaagtattaaacagaccataattagtcatattatgtccttcggcgtctataatagaagatacctgatgacttcgataaacaagatattagtatgatgtatcatatgtgattgtgaattcgttagagctaaaaagaactatttatataaacaattatatttatat

SEQ ID NO: 93915 - DNA, 453 bp, Glycine max
caacggtgaagggcactgataatcgattaccacaatattgtcatcgattacagctttttgaacacaattggaacgttgtaaattcaatttgaaaacttttttcaaaacattttgctactggtaatcgaatacaacaatctggtaattgattaccagagagtaaaaactctttggtaacatgttttgagaaacatcatgtgctactcaatctttgagagaaactatctatacttatcttgattaagccttctcttgattcttgaattatgagtcttgaatcttgatcttgattcttacgatcttgaaccttgaatcttgatccttgactcttaactttcttcttgagtctcgaattcttcttgattcttatcttgaactcttgaattgtcttgatcacttgagttgtctttgatgatcttgagcttttgcataccttcgcatatctttgtatat

SEQ ID NO: 93916 - DNA, 328 bp, Glycine max
  unsure (1)..(328): unsure at all n locations
caacagccttctggaggaatcttctggaaggcccaagtgggcctggttgctatttgcaccccctgtttactaaatgcacccactcttctatttattgtaattctttntccgtaacgttacgaaactttacgaatatcgtaacgatacttatgttccttccgcaagggtacgaatctttacgggatatgtatttactctcttctggctctcaaagaagttacggaaactcacggattgtgcaaaaacacctcttttcgatntctgccacattacggagatttacggattacgcaagcttgcttccttnggattctgagacactcgggac

SEQ ID NO: 93917 - DNA, 406 bp, Glycine max
  unsure (1)..(406): unsure at all n locations
gctcatgcttaagtatgnatggcaatactncatattgttgttcaagacatacaagcgagcttgtaacatatcttctaggcttggagcgatgacatgaagtcctcttgaacccttaccacctactctggcatcatgcccagactcatgaaggccatttggtttagccttctcaatgtatattgaacaaaaatcaatggcttcttctgcaatgtacctcctaacaatagatgcttttggataatacagattctttgtgtatccttttaagatcttcatgtatcactcaaccgggtacatccaccacaaataaacatgaacacaacattngatttctctgaccagatgcacaatcaagtgaatcatgatgtcaaagaanggcacgcgacaatacatcttccactggcac

SEQ ID NO: 93918 - DNA, 284 bp, Glycine max
  unsure (1)..(284): unsure at all n locations
acgcttcttttgtgagcatgataagataactcttgttgttattcgtcacagcacctaagnnccattctttgttctgtgcttctgaatattattctcttttagctatgcgctatcgtttttctcgtcttattttgatcatatcttttccttattgtcaggtgggaatttcagcgcagagtttctttcgtgatgagaacgaagcggtaagagtattaaatctttattctgatatttcatatgctgagtatgcctttatccggatccagttcgatacatctaatatt

SEQ ID NO: 93919 - DNA, 388 bp, Glycine max
  unsure (1)..(388): unsure at all n locations
acaaaaagcttctcacatatgatgttttcattcttactagatccaaagaatctattctgttaaagaaaaaaattgactaacttgcatggtgtcatggtgtatatatttgcgcgtgtgtttntaaatttatgtatctttgtttatggcttgttcacatattcagaaattccctaaactntattaaggggaaaaagtactatgaagtgatagatctnttattgatatactcattgtacaattaaccttgaccactactgctctagcattntagagcttcttgaagaaaatgttgttaaccataaaaatcatctgtaatgtaactggtctctatatgaaagagatgtccacagactgatctttattcctgttcacaatgcttagtcatgga

SEQ ID NO: 93920 - DNA, 366 bp, Glycine max
  unsure (1)..(366): unsure at all n locations
agcttgtaggaaaanggngttcttatcacatgtgtgtctaggnggcggncgggcgatggtgcacaacaagttttccacatccacaaagcatgcataaacccaccatcccctgttgcccacctccaacagagctcacgtactcccacgtagcccatatgctcggttctctcaacaccgggtccccatcaatactcccaagcttccccaacatcaaagtaataccacattcaaacagcacaaggtatcacagccaagcaaaacagggcaaaggcagaaaactctgccaaaacaccaccaaaatacagcttttacatacaatacccanaaacattcctttgtccattcgtaaccgcggatcgactcaaa

SEQ ID NO: 93921 - DNA, 181 bp, Glycine max
  unsure (1)..(181): unsure at all n locations
agatgatgacactcacattgtttggattctgcacaggttgtgaaggaaatttgtcagaattttgggagtgagcttggttcaactaaatagccatctgccccatctgatntgttagactctgaatggaggctctcgtctcgctgaanatgcatattctggatagtcattttcctcactaact

SEQ ID NO: 93922 - DNA, 356 bp, Glycine max
  unsure (1)..(356): unsure at all n locations
cctgacatcncanacaaacaaatcaaacgtaacaagacaattatagttgttgtttgaatacctcacccactcaagtgtatcacacaattatggctnttctctaatgaaacactcttgccttntaccactctaattccccttgagttcttaagcaattcaagagattatggccacaacaaagaacaattcaccaatatgtgtaaggtaaggctagagagacaaggaaaaggttaaccaagatnaaggctaacaatgtctttatgcacaaatgaaggaaataaattcagaattaggaatcaagtacaatccttctgcaccaaatataccttaagagatnttttaaagtcttcagcatg

SEQ ID NO: 93923 - DNA, 240 bp, Glycine max
  unsure (1)..(240): unsure at all n locations
taaatgtaaatctttttttaacattatatatagnncgcattgtcattacatattagcacacacgtattacattactatttctttacgagtgatcttgattaattcgatgcgatttggtaaatgtgaaaagtttatattcatatatccaaggtattaaacaaacatagttgaaatcttgagctaatataataccatctatattaccaagaaagaaatgtttttatcttttacaagataaaa

SEQ ID NO: 93924 - DNA, 462 bp, Glycine max
  unsure (1)..(462): unsure at all n locations
atccttaagtcacctgcggcatgcaagctngctagaaataaaggggttaaccgttaacagttatatgatagttcaataataacaggggtgcgctcatgtatttttttttattattttgctttcccattagcgcataatttcttctcatgagtgtgagatgttatatctatttcttggccataaaataaatatacagataatcgtgaggttagtgcagatcaggagtttatcgtgatgataaacaaaaccagctatatacttttgttattgtacaagttgtatggatgaatgaaattgtattgttctttagtactggatttaaatattattggttcctttacttaatttcatacttgcttctttctcttacttcaattagctagttccttaggaataattgaacacaagaaaatattgacatataattacgactcaattctaaaataagacttgttgtgaagt

SEQ ID NO: 93925 - DNA, 413 bp, Glycine max
  unsure (1)..(413): unsure at all n locations
catataagagaattggagtggctatgggcttttactatccatctaagtgattgtcctatacataccccttcttacatgtgccaacgcccaaattcaagttcaataaccattaaagatcccccaaatacaaaacacatggaatttcatgcaatttttctattagtgagcctattaaataatctaaaatttattttcttttgtattttaatcaaacacttagccacgcaaataagaaacactatgacattacagtactcaccatcatattatgactttgcccaaggttntaatatatctccatatataatcatggtactaggtcttaaacttataattattaagataatctttattaatttgttatgagaatatgcgaatcttaattagaaaattatacccatgtcagacctttt

SEQ ID NO: 93926 - DNA, 447 bp, Glycine max
  unsure (1)..(447): unsure at all n locations
aagatttatcgtagcattgatattatattatcatgaaagggtttatattttattaccctatactcatattccaaaagttaacgggacaaaaatttcttaataagtggaagtgaattttctaaacaagtgaaatttgagaaattaagtgggagtatgtaatacccttaagaactacattaaggaaaaaaaattattgaatgttatgatattattcacatgcataaattttttggtctgtaaagtgtcaatttcattaaaggccaataaaaaataattcaggctaagtattatttntaanaaataataaaggtgagagatgagacaagcatattgacataagatagacattanagaanagtaatctctcttgagatatagacacataatcaatggtccaataaaaagttgtaactatagtatttanggtcatatgatcatatggggact

SEQ ID NO: 93927 - DNA, 462 bp, Glycine max
  unsure (1)..(462): unsure at all n locations
gcaagctgggtcgaggtacttacccgttgttgatcttatatcgatgaagaacgaatgaagaacgtcgaagaacggttgaaacctttgcgaaattcttcacggaaaacgttacgaaaacgtttcggaagcgcctcgacttatattttcttcacggaaacaatttttccaagcaaattcggaagagagagaagtgcctaaggggctgaaccctttcttcttcacttcctcccctatttatagcaaaataggggagatgcttgccgcccagctcgcccaggcgagctcaggcgagccaggttgcttcctccagaagcaacagccttctggaggaatcttctggagggcccaagtgggcctgggtgctatntgcacccncatttttactaagtcccaccccctctgctnntttttggtgattctttnttcgtanaggtacgggaaactacgactttcgtaatgtac

SEQ ID NO: 93928 - DNA, 386 bp, Glycine max
  unsure (1)..(386): unsure at all n locations
agctntanancttataaattgctttcacatttgttcttcttcaaactcaaaaacttcacttgctcgtgaattcggttttgtacatgacaaacctttacttggtttcagcatcctttagccctaaaaatcatccatcatggtcaaagataccttctctgtctacaacctaaagatagagatatcaacatgtattattttggtgagattgaaaagtaagtgggtaaagtcctttactatagatattaatataatgtatgtttctctagaagataagtgaaataatctataaatttaccattagggtaaagcctcttcttaactacacgagggaaaatgtaatggttagagtggtccccataanagccttactcattattagtaatgta

SEQ ID NO: 93929 - DNA, 288 bp, Glycine max
  unsure (1)..(288): unsure at all n locations
gaaagctatgatctaaattattgttaaacaagacaatatangggacattaaaatgcaaaaaagcaacaggcaatctatttatcaagtatattgttgtagtgaaggaaaaatcccacaactcgagagtcagggaagcttgtttaagaagagtgagtcctaattccacaatatggttgtggttcctttcaactacaccactttggtgatgagtgagaggacaaatcaatctgactgatacctcggcttgctaaaaattaaggagcagtctgaactcccctctccaatctg

SEQ ID NO: 93930 - DNA, 375 bp, Glycine max
  unsure (1)..(375): unsure at all n locations
cctgcggcatgcacgctnttgacggactataccaagctctangaaccatggacggttaaagatctatatatangctggctaagggtagagagaggaagactatagatttggatcaagtaaagtgtgttaaggatgaagaaggcaaagtcttagtgcatgaaaaagatatcaaggaaaggtggaaggtgtatttccacaacttaattaatgatggatatggatatgactctagcagtctagacacaagagaagaggaccggaactataagtactatcgtcggattcagaaacaggaagtaaaggaagcgtngaaaagaatgagtaatggtaaggcggtggngccagacaacatacctattgaagtgtggaaaactc

SEQ ID NO: 93931 - DNA, 356 bp, Glycine max
catgcacgcctcactgcgataagacttatccgtccactcttcttcactacgcttttgtcaaaaccgactctcaggtctctctcctttattatattttccttcactctctactattctgccttcgcaatactcttatattattttattatattgctattatgactccacatcctgcttccgggaatttgtattcatttctaaggattctcaattggtttgaccactttaagcgatttataggtttatttcttgagagtgtgttattcagatcctctggctcagttattgttatctaagtagctattttgtagaatcaatcttaatgaacgcatggcaggtacatctatttattaatt

SEQ ID NO: 93932 - DNA, 445 bp, Glycine max
  unsure (1)..(445): unsure at all n locations
gatgtagatattgaanagcaacttatgattaattggaataaaacttagtgtaaataaaatgaatgtgatataatgatgtgtttgccaataaatttggatacaaagatagtttataatatgtggaatagctataacaattttagaggataaaactaataggacagacaatagaaattgctatagcaacattnggtgtcttgaacattaatttagatctaaaggggtacatgaataaactntanagattattgagattgtataaatatctcaatatgatcattctagagcttcgatccattaatttagaaaatataaatcgtgctatttaatcaataaatattagtgattatgagatcacntaattcatatgcacgtcactaaaacttagactactctatgttgatgaatatatttctttatagctcacactaacatattacaatat

SEQ ID NO: 93933 - DNA, 460 bp, Glycine max
  unsure (1)..(460): unsure at all n locations
agctcagagatgattatggagaagaatcggagtttgtctatatatattctttatcagntntaacaattggtcttgatcaactaatagctatattggattgctctgctacgattcttatgtgatgcaggttgttaataaaggaggaattgtctaacacggatgaatctaacaagataaacaaacttgatagagtaagcaattatgaaattgtttgggtaagcttatccaacaacacttcttcctatgaaaagaaaataagaaatataaaaaaaagaccttttccataagctcatagaagaattatacgagacaacttctacacattaacttatgtataattaaactttaatttatggagaaattcattttaatttntatttcttattttcttctactgtgagataggcttactaaacaagccctacgtgacattaaaaaagtgtatttcatcccatggaaa

SEQ ID NO: 93934 - DNA, 441 bp, Glycine max
  unsure (1)..(441): unsure at all n locations
cggatccttaagcacctcggctgcagctgttgaatgcctggtggtttattatattcccatctnnnttaggtttggatgattttgtgatgtttatatgctgagaatgcttatggaaaactggtagagatgaatggtagagttaacctacggttagaaagtgagaatgtgatgttatgagtggaaaaggagtgaggctttgagagttggaaggttaagtctgaattctgtggtatatggaggtaaagtgagctaatcatagcttggaatgtcatttaagacttatgagaaagcttggactgtgctagagagaaaaatanatgaccaaagtgaacacagagccatttctagggataaattgggtgttgaagagtcaaatttgattcggtgagattttatgtgtaaattcagttggaacaagtctaaattgatgttatggactgg

SEQ ID NO: 93935 - DNA, 393 bp, Glycine max
gcttgccacccagctcgcccaggcgttcatggttgtcttttccataagcaacagccttctggaggaatcttctagagggcccaagtgggcctggttgctatttgcacccccattattactaagtacacccctgccttgtttatggtgagtctgttttcggaaagttacggaaacttacgtaattcttaacgatacttgtttcttttcgtaatgtacagaaccttgcgattacataatcaccccttcttactacggaatgtactgaacctcactaattgggacgatgcttcatttgattccgggtgcacggacctacggttggcataatattttttgatacggctatcgggacttacaactgctaatatggtccaacccttacaggacaaaaaa

SEQ ID NO: 93936 - DNA, 357 bp, Glycine max
  unsure (1)..(357): unsure at all n locations
gcttgtagaatggccagacatgatatattgtcatgtgttnggttnggntcaagggtaaaaaggatgccccacattatttccatgacacaaatgcaaaaatgatgatttggaaactntatgcacaactggtcatgcatgcacctatgtggacactcaagtgtcaaaattttatgggcatgtgatgctagggctcaggatacattccctctattttagtcaacccaatgtttccaaaatatgttcttttatccatgtgtgcattcattcgagtccattttgggcgtccggtgaaatttcacagcgctcaccctttcggtgtacacacatttttttcagtaaccagctatgatcggtgaa

SEQ ID NO: 93937 - DNA, 309 bp, Glycine max
  unsure (1)..(309): unsure at all n locations
tacatgcccaactcctttgagtggcattagtattggntgctaactcgaatgttggatcttaatacatctgatatctatgttgcattttgcctcaccatagagtgactgaagaaaatttctataagttaaaaaaatttcttagacgcaaaaactcactggtttaataagttacaatgttgtcgtaatcgattacaaccaagtgtctatagcttaaaaaagtaactctcgtatcagtttaatcgattatgggaggactttaatcgattacactattgnttgagacaatgacgtaatttttcatgagtctct

SEQ ID NO: 93938 - DNA, 377 bp, Glycine max
  unsure (1)..(377): unsure at all n locations
ctcacatatatgtttttcattcttactagatccaaagaatctagtttgttaaagaaacaaattgactaacttgcatggcgtcatggtgtatatatttgcgcgtgtgttcttaattttatgtatttttgtatatggcttgttcacatattcagaaattccctaaactttattaaggggaaaaagtactatgaagtgatagatcttttatcgtatactcattgtacaattaaccttgaccactactgctctagcantttagagcttcttgaagaacatgcttgtaaccatacaaatcatctgtaatgtaactgttctctatatgaaagagatgtccacagactgatctttattcctgctcaacatgcgtagtcatggat

SEQ ID NO: 93939 - DNA, 457 bp, Glycine max
  unsure (1)..(457): unsure at all n locations
aagctntcatcttagggatattagatggctttttgtctaactattgatccttccattaattnntttaattgaatatgctagaagtagtggaatgacaacctccacaatagttaaagtttcacccattatgtttattatgtacaggcacttaagcaatacttgcaagaaatgtttttagctaagtaccctataattagtatgttcccaaaaccaatatataaagcattcactatttccagaaatcaattgggcagttggactctgatgttgatgcattttgttangcaccactaaccttaacattaattaatcacttcatcgacttattaattgatgtaattntaaaaacatcagtgaagttactttggataccaaacagatatgcataacaacttcaaactctacaaaatctcaaccatgatatacatgcacatatatattcctctttganaatata

SEQ ID NO: 93940 - DNA, 377 bp, Glycine max
  unsure (1)..(377): unsure at all n locations
agcttgtagccattagaatagaatgagcatgtgttttgttttatgactganaatgttagttagctcgtcagattgattatgaaggaatgcattaactgtatcctggtgagagtgtgatccttactatttgagagaaacgactatcatttagtactgatttttgcatgaatctttgaagtatggactgaatgcatgaaattgaggatgatgaangccatgttngattgtgatagccacttaaccaaaatgttgaccatgtgcttgaatgaattatcccttgtacccagtttgagctgaatgcattattgattgattgaaccctgagcctatacagnngtatcttctactaccttgacttcgtgtgtaggagagcatca

SEQ ID NO: 93941 - DNA, 91 bp, Glycine max
  unsure (1)..(91): unsure at all n locations
agcttgtcctcggtgacgaagacaatagaataagctttcttctatgcttttcacanggcgacaaccgattctcaaatatgataaggtctgt

SEQ ID NO: 93942 - DNA, 327 bp, Glycine max
  unsure (1)..(327): unsure at all n locations
cttcactcaagntaagatcagagaaagtttgcctcaaagcatcaccataattctgactatccaccatcttagtaaccaacttagcatcaaaagcttgtcaaattgctagaactcgcaaccacttcaatcacattgcttctggaagcaactgangagtcgactcccctactccacctcttctatatngtgaactgttcacatgcacatctgctggctcaactctcctcacagaaccagactggtccccaggaaccctcagtttatgctcagcanaaagcttntcaagctcatcagccttcattttcagctcatcatgcatcccttgat

SEQ ID NO: 93943 - DNA, 420 bp, Glycine max
  unsure (1)..(420): unsure at all n locations
attattctttntaaacgttagcttaaaaacttaagagcttaaccatgcttaggtatcatacggtaacatctcattttctaccatttcaataatctaaaacactactcatcacacaagaaagcaataataatgtctactcatcacacacaaggaanattgaaatgttacaataatgcattaaataaattgaatatcatataatataaaactttcttaatcaatttaaaatgtaataaatcaatttggtctataattctttnttaatcacatacatcatntaaattataattgttctcaaatagaaaaaatggatcacttaatagtattatgatcaattaatgagatacgaaccactcaaatgaattaatggaattggataatactattataatcttgatggatgaaataagatgcacatga

SEQ ID NO: 93944 - DNA, 437 bp, Glycine max
  unsure (1)..(437): unsure at all n locations
tgggtcatatagatgtcttcctctaaatccccatgcaagaatgcagttttaacatctaactgctccaagtgaagattctctgcagctactatgctcagaataactctgatggtagtcatctttacaactggagagaagatctctgtgaaatcaattccttggttctgctgaaaccctttcaccacaagtctcgccttgtatcttcttctaccgtcagattctttctttagcctatagacccacctattctgtaatgccttctttccttctggcaatntagttaaagaccacgtcttattcttttgaagggatgtcatctcatctttcatcgctagctcccactcaatagtgtcattcccctgtgtagccctcattgaacattcttgctcaccagcatcaagtaacaacanataatgcaatgaaggggaatacctatc

SEQ ID NO: 93945 - DNA, 443 bp, Glycine max
  unsure (1)..(443): unsure at all n locations
agcttgtacagcgctaggcaatcaattcatgagactccgaataagatttgagggtggaggatagacaaacagtgcttggcaatcaattcgtggggctacggataagattntagggtggaggaagcatgaatagcgctaggtgtcataccctaatttcgtccggggacctttgcttgatgacatgcgacctttgtttggtccctgtaaggtgcttggcacccatcattatggcaattgtgaaattccaggacatggccgaaaacaaaagataatattgatgcacaatccgtaagggtccgtgacacaccgaanatcannatggaagcatcgtgcataattagtgaggttccgtaacattccgtaagtcaaaaaggtgatgattatgtaatccngcaggttctgtaacattacggaaagaaaacaagtatcgttacgaaattcgt

SEQ ID NO: 93946 - DNA, 468 bp, Glycine max
  unsure (1)..(468): unsure at all n locations
agcttcgggctgctcaattgctccagttttctgcatggaanggcaaaggtctgtatggtggtcagtagaggagcacaaaccacaaacccttgcaagaggacaaatttctggttcaaggccagctgggttaccaagttagccaatgcatccagtttgccttcaagcttcttaatttcagaggatgctgctgaatttgtagctacctcatgcactcctctaatgactatagcatcatttctggcgctaaactgctgggagttggaagccatcttctcaattaaatttctggcttcagcaggagtcatgtctccaagggctccaccactggcaacatctatcatacttctctccatattactgagtccttcatanaaaatatggagaagaagctgctccganatctgatggtgagggcaactcgcacatagntnttaaatctttccagtactatacatgctctctcactga

SEQ ID NO: 93947 - DNA, 343 bp, Glycine max
  unsure (1)..(343): unsure at all n locations
tgagatgagaagctagagcttagctacacacnccctataatagctaagctcacccccatgacaaaaaacatgaaaataccaaataaaagttcttactacaaagaatactcaanatgccccgaaatacaaggctataaccctatactactagaatgtgccaaataccaagcccaaacgaatgaaaagctatttaatattacaaagaagagagatccaaccttacccatgggctcaaaattaccctaaggtcatgagaatctatgcctttcttatactctagccaagcctttgagtctttatccatacccttgggggaggattgatcatccctccagctgaaaga

SEQ ID NO: 93948 - DNA, 332 bp, Glycine max
  unsure (1)..(332): unsure at all n locations
agctacacccgctgattggttggagaaatggcaacccaatgaacaataatttggcttcctaagatgatattcacgagggaagaggtcttccaaatctgtaacgagacaatgtattgcagaaatttactgacccaaataaagtggaaatttttattcattgtccttgcattatatttccaaggatttctggattggaaatacgtcataatagagctattagttnttagatagtgttctgtcttgcttacgcgatgaattcgtgtctgtgataaagaagttaactagtgaaggagaattaaaacgggtggctgatggttntactattaaatata

SEQ ID NO: 93949 - DNA, 375 bp, Glycine max
  unsure (1)..(375): unsure at all n locations
tgcagcttcaagtgtcatgactccaattgctgtataaaggacatagatctgaatggngatctgtagaataatatagaccacaaactcttgaacaggtgtagaatttttattcatggcaagctgggttactatgttgaccaaggcatcaagttttccttcaagctttttattttcagtagatgaagatgaatccgtggccacctcatggactcctataagaacaatagaatcatttcttgcactgaatngttgggagttggaagccatcttctcaatcaaatttctagcctcagcaggggtcatatcaccaagagctccaccactggcagcatcaatcatactcctctccatgttgctaagtccctcatagaaata

SEQ ID NO: 93950 - DNA, 252 bp, Glycine max
  unsure (1)..(252): unsure at all n locations
gggtaggcaacatagcctaattatattccattgctacgtataatacaaaagaactctttttcaagaagattctttggtgccctgattagtatagtataagaggcttacccaatatctttttcattaaaggaaggtgtctactaacatgggagacacgataggtctcctactgtaagacagataccatgttcattagatataatgtgttnttaatcacgtgacacacctttnttacgggtatttgctaacaat

SEQ ID NO: 93951 - DNA, 488 bp, Glycine max
  unsure (1)..(488): unsure at all n locations
gcttcttcttattccctggtctaaatatggtatactcaattgttttgttgcggcttgagctttcactccataaattccattgcgttatttatgcttgaatcggattggattttacatgtaataagaacttatctataaaatatataagatctgctagaaaacagcatgtggtccattctatgtaagtatgtaataaactggttgttgttgcttttgagaaactgcagtaacatgttcatggcagcataattggaaggttgtcaaatacacaggtccatgcagcacaaatcatcttaatggtaatatctgttgttcacaaataatcatcttctacactacaancattgatggaagcttaancttatgaggagttgccaatacattggatactatgattgttaagcacaagattcttattttttggacgaaggttactttagaatatataatatcacacggaagtgaaggaacatgtcctcaaactatac

SEQ ID NO: 93952 - DNA, 374 bp, Glycine max
  unsure (1)..(374): unsure at all n locations
agcttaagnagcatctccaacattatcgatggtgaggatgccaataaacttgttcttccttagaagggccattgttcacaaaatgttttttgaaagaagagaataaatagaagttttgaagttctcagatagtgatttcgcacaagcataaatacttctaagagttcaaaaatnttaggaacttctccaagtgcctacattngccttttatagtttttcaaaaagacaaggagatagagattgatgtaatgactcaaatatnctctaatataatttgaaaattggntttcaatcctggcaagattatgaaacacgtttctcaataaanatatgaacatttttttcattgtgacatgtttcctcttcaattcgta

SEQ ID NO: 93953 - DNA, 374 bp, Glycine max
  unsure (1)..(374): unsure at all n locations
atccgcgcttatatcgcgtgattcatctattctattatatactcacgccagagacgtgataagctggcggattcacttntaatttctaatattcatttgaacctgtcttcgaccttaggtgtgggaacagactcattagcgtctttagacttttctcttatttggaagtaattatagataatacactcgtgcatatgttatgtttatacataaagaatactattactatttctaataaagctcgtttactgtctgatttcgttctaaatatagcggtgaaaatcgctctattttatacgttgacttaacacactataataagaagatcattatttgatacgtcttactatacagatggaaccattaattataat

SEQ ID NO: 93954 - DNA, 399 bp, Glycine max
cttcttcctctattcacttctgttccttcattatcttgcacaaaatctcatggctgttccattggtgatgaacatggaaggccaaacactttcattatccaacgatccactccaagcagggtgaatctgagttctagttaagaattcctgatctttgtgaatgtccatctgtctcttcaatcctcatttcgatctttctgactatgactatgcttaggaatgaaaatggattatgctatggattcatttcctaaatatgaaatttattcacagactggttggatgatttcctacctaattgcgatctcaacaattaagactaattgattgaatttctctaagcattggctgaacttccattgaaacaatcatcataaactggataatgatgcatgtttg

SEQ ID NO: 93955 - DNA, 399 bp, Glycine max
  unsure (1)..(399): unsure at all n locations
tcaacaattccatttcgtgttcctgtcactctccaaataatgtagcaagagacatgntagttaaatctcatgactcaagaatggttgttaccttaagttgccattctctgcttaaacatctcaatactttatttatgagatcttcatttggaataactttccctaaagatgcaagatgaactatgatatgtgtaaacctctcttacatgtcttgtatactttcaattgaattcattctatataatncatactcatgagagtatttatcctagatctttctacatctgttgtgccctcatgtgttactagtanggtatcccaccatttttcttgcactttacaatgtgatacccttaagtcctcatccatctctaaggcagatgtaatatatttttgctt

SEQ ID NO: 93956 - DNA, 344 bp, Glycine max
acccaagcgacgcagcagcacatacccatgcggcacagtttaatttgttcttaccaacctgggcccgacctagcccttatgaatccgcgcagacccatactggtccacaagctctcaggctttttcagccgcatccatgcttgcaactcctatagaccctccaatgtggcactaaaccccggcgatgaaagacgatgcttccttgaggcactccctatggcgagccaactgctatggcgagacggataaattaagacaaccctgtcccacaggaacattggaatcttcgggaaaaaaacctgtcttcttctttacgaggaccatacaaccccccctgctaccaa

SEQ ID NO: 93957 - DNA, 418 bp, Glycine max
  unsure (1)..(418): unsure at all n locations
acagcattcttgagtctcttctaagaatggctnggattccaagattcccaccattggaaccaacccagagcttncccatccatcgcaaccattacagcctacagcgtttaatctttgtcaaccaaaccataggatcatcaccatcgaatatgggcatttccaaattcctccaccgattgctgtcatgcgctgcaatgccctcatcttctccgctcacagtaactgtgtgaacgttcataacaggagattttttctcccatgccgccgccaaccattgtatcatccattcgatcgaactcaatcgcaactccactgcttcgcgattctattctatcgctttcttcatggatgccatccgcatctccattctcgcgtgtgccttcgtaccattaacgatcacactccagatcgaactctg

SEQ ID NO: 93958 - DNA, 366 bp, Glycine max
  unsure (1)..(366): unsure at all n locations
agctggccacccagctcgctcttgcgagtatggtttcttcctccacaagcaacaaccttctggtgggcgcaagtgggcctggttgctatttgcactctcattnttactaagtacaccccctgccttcttattggtgattcttttttcgtaaagctacggaaacttactgaattcgtaacgatacttgttttctttccgtaatgttacggaaccttgcggattacataatcatccccttttttgacttacggaatgttacggaacctcactaattgtgcaacgatgcttccatttatttctggtgtgcacggaaccttacggattgtgcatcaatatnttcttttgattccggcatgtcccggaact

SEQ ID NO: 93959 - DNA, 425 bp, Glycine max
  unsure (1)..(425): unsure at all n locations
caagcttctcaaagaggtgagcttatttattagaggtttgtgtgtagctaagctctagcttctcaaggaagttttctcaaagaagcttctcaaggatgttntctcaagatagcttctcaaggaagctacctagtctataaatagaaacatgtgaaacacttgtggtaactttgatgaatgagagtcttgtgagacacaactcanagntcaacttctctccctttntcttccttcaatttcgtgctcccccctctctctttctctccctctttctattcctccattgaagcatcctctccaagcttcttatccaaggctcatcttggtggtgaagctccttcttccatggcttattccctaatggatggcgcctnctctcacctcttcttctttgtcttccgctgcatctccatggtggaaaatca

SEQ ID NO: 93960 - DNA, 388 bp, Glycine max
  unsure (1)..(388): unsure at all n locations
accactgacaaccttgtgaaagctgtgcaccctggatacaaaggcatcttcaaatcattttctattttgtcatacaaaggagcatgtgcttgttgaaatccgtcttgtcccagatcgcgaatcatgccttctatacggtttcccatgtccacatcaactgggttagtctgagagaatgatgnggtctctangcaatccccatgccatatccaccttgtgtaagttggagtgatcccgcgacatataagatgatgtcgtatctcagctattacatggtgtctcccattcgcacatntcacacatggacaaaaatatttaccccgcacagatggtgcattcaattcacgtaatgggaggaattgtcaactccattctcatactcatcact

SEQ ID NO: 93961 - DNA, 307 bp, Glycine max
  unsure (1)..(307): unsure at all n locations
agaataaaaaaaacaacctttatcttacatctagtttcaaacagagattnttaggattagaacagaagtttcaattaaaaagaatacaaattatcaatggttctatttttaggattagatgttttttttactgcaaccaaatcagaagctcgaggaaaaccaatagaattcctagctagagtatgagttactccattgatctgtctcttaacaaaattaatagtgtatgcaggatacactatttttaggatgagatgntggagaataatacatcataacagggaaagataaattaaactagtatttt

SEQ ID NO: 93962 - DNA, 419 bp, Glycine max
  unsure (1)..(419): unsure at all n locations
gtgaaatgtattgagggcacaaagtgctctacctatatctttataaattgtngtgcacaaacttcacatcacatcacatcactacatatgctntagtaaactacaacaaattgtttctaggtacctagtgttgtcaagtgacaatgtcgatttctttagagggcttggcgatggcaggcgcaagtaatgtccaatntgccatggatattgaagaatgggaacttatagattcggagcagaatccaccaccccatttgctgactgaagaatattacaacgaagaatactttgtcaccttcacaaatcatcaagaaaaggtagataggaactgggaaacgaggaaacgaaaatgcatgatgtcaataaaaacagcactgcangcactttgtacatcatgcgtgacatgagtgaatatgcgt

SEQ ID NO: 93963 - DNA, 331 bp, Glycine max
  unsure (1)..(331): unsure at all n locations
tactttagtgttagatattccatatgttggaatggcatttgacgatccttgatagctgttgatattgcagagaaggtgactcttcgacaagtctaacataatcgtacaagctgccaaacaatataatnggtggaaatcatgaattcaaaatttcggccgtggaaaggaatgcacactgtgtggtagaaaaagacacattgtggacgtatgctatatgctagctacgatataatggccttcccacctacgcgcaaattcataaaatcaagagccttgctaaagaagtgcttattaatttagttaagatccatttttcctcgtgacgacaaat

SEQ ID NO: 93964 - DNA, 470 bp, Glycine max
  unsure (1)..(470): unsure at all n locations
agcttgagccaattaaacgacaattactnnnattcttatgnnnganannagcctggaatataacgagacgctcgaaattgaatggtgaagctgtgagccaattcaaacgacaataactttttacacggatgtgtgattgagtcccgtcatatatcgagacgctcgaaattgaatgttgaatctctgagccaatccaaacgacaataacgtgttactcggatgtctgtatgaggcccgtaatatatcgagacgctcgaaattgaatgtggaagctctgagctaattcaaacgaacaataacttttactcggatgtctggatgagtcctgttatataacgagacgctcgaaattgaatgttgaacctctgagcaattcaaacgacaatactttntactcggatgtttgatgagacccgaatatatcgagacctcgagttgatgttaaccttgaccaatcaaacgacatactt

SEQ ID NO: 93965 - DNA, 394 bp, Glycine max
  unsure (1)..(394): unsure at all n locations
aagtcacctgcggcatgcagcttatttgtattggtaggcggaatttgatattctatatgcttctaacagnaggacgaaaaagaagttccttcagactatcaacgagagatggaggcagtntaaatcatacctcacgaggaaatgggcccttgcagctgatcacgaccgtgtggacaacactgtctgtgagaaatacgacataagcaaggaaagatgggcccagctttgcaagactcgcatagacccttctcgcgaggtatgttccttgccatttaagatgttcttaaacaaacattaacttgttatacttcattctagccatttgaaagattattgttttatttttgtacgatgtgcgtcaaaaggcacacgccatccaaaaacagaacactgc

SEQ ID NO: 93966 - DNA, 287 bp, Glycine max
caaattcctccatctacatctatatatttcgacactaggggtaggatcttcatatcaagggaatcttctttcaaatgataataatggaacccttcttaatgtaagatacccatgtaaaaggcctaattagagacctcaaattaggggattagaattgttctaagtacaacctttaattaaatggaccttcatgacaaaattcaattacttctcaaccaagaaattaattatataatcgaagttgtaatgaccatagtaatggatattcatttcattaatgtctctat

SEQ ID NO: 93967 - DNA, 211 bp, Glycine max
gatgatcatacttacgctgatggtttgtgctagccagtgcatatgatacattggagacggcttatgtcggtaagactgtacaacctacacctcactagattgaacgacaggctagtcatttaaacaatgctacattcggacagctgacattttgtaacggtgataatgcctatggttgaatatatctcatattcagattggagtcatgttc

SEQ ID NO: 93968 - DNA, 378 bp, Glycine max
  unsure (1)..(378): unsure at all n locations
agctttcaaggccacanagaatggcttgtatgtcttagttcaacacanactcttaatttgttntctaactgcttggtcttgctaggtgttgactaattttcttccatttttgtttgcaggcagaagtcaattatcttggctagcttcaccacgaaaatatggtcaaatctattggttactacatagatggtaaaaacaggcttctactttatgattttatgcagaaaggaagtntggaaaccttttaacaacaaatcactttgaagacaaatttttccccactagcacagcatgtcccagtattacagggaatgtgaaatgctctaccctacaaaccagagtcatgaagcataatttctatttcaatgtaactaattg

SEQ ID NO: 93969 - DNA, 384 bp, Glycine max
  unsure (1)..(384): unsure at all n locations
tgcagctatactacaatattttattttatttttataccgancaacctcattcatataattcatacggatcaagttgatccgtatgtgaaaaatctacttacggatcaccacctcgccataaatttaaaggaacaacaagccgaggacattttgggcattaatcaaaaatgttgggtgcacctagcaacaccctattatgggtggccacaagtgagattggttagcgaataaaaaatactctgatgtaaaccaatcatactttttctatctacacctagcatttgttcttgtaaacctagcatttatggtgaaaaacaaacaatacccttacgtataacctattcggattatcaatccgtaaagtcattatgaattcgcagtcca

SEQ ID NO: 93970 - DNA, 262 bp, Glycine max
cacaacaagattgcacattcacaaagcgcgcataaacccaccatcccctgttgcccaccttcaactgagctcacgtactcccacgtagcccatatcctcgtttctctcaacaccgggtccccatcaattctcccaagcttgcacaacatccaagcaaaacaacattcaaacagcacaagctatcacagccaagcaaaacagagcaaaggcagaaaactctgccaaaacaccaaccatatcacagctgttctcacttaaagac

SEQ ID NO: 93971 - DNA, 266 bp, Glycine max
tcacccccatgaccaaatacatgaaaataccaaaaaaaaatccctactacaaagactactcaaaatgccctcaaatacaaggctaaaaccctatactactagaatgtgcaaaatacaagggctaaaagaaggaaaaacctattcttatatttacaaagataagcgggctcatacttaacccatgggctcgaaatctaccctaaggctcatgagaaccctagggccttcccttggatctctggctcaatctactaggattcttctat

SEQ ID NO: 93972 - DNA, 384 bp, Glycine max
  unsure (1)..(384): unsure at all n locations
cctgcggcatgcagcttataaatatcgtacgctcgaaaaaatttttaactttttgagatcaaanagncataactattcacacggatgtccgatacgggcgcataatatgtcgagaggatcgaaattgaacaacggaagctcttgagaaattcaactggtataacttttcacaccgatgtccgattcaagcagatcacatatcgagacgctcaaaattgaaccacggaagctctngagatattcacatgggcataacatttaactcgaatgccaatgtacgcgcatcacaatagtgacactcgaattgaacacggaagctctcgngaaatcaaatgggcataactttcacactgaggttcgattcatgtttataatgtatcgata

SEQ ID NO: 93973 - DNA, 258 bp, Glycine max
  unsure (1)..(258): unsure at all n locations
caccgcagatgcaggtgagatgaggaagagcaaagggaaacttctgcntttttttgacccagagcggacctggagatatgtcgtggnggtcaagagacctcgcggacgtcacgtggggagctatggcccaaaaccatacttgaccaattccgacccaacccgggcatagtcggtcagtgagaacctgtgatagacctaaacaggcgagctcctggcacgccacagagaaaaggaacgaagaccacaaagcaaggaggc

SEQ ID NO: 93974 - DNA, 504 bp, Glycine max
  unsure (1)..(504): unsure at all n locations
gcttctcggggccattcctgcgaaggcaaactttttgttatgtatgttacaagaaatataacaatcattacaaacaagggccaaacaacacttctcatggcacgagtgtcaacatgcactttataaaataatcatattggggtcatgctattttatgacacatacgtatttgcacacataaaaatatttgtgtgaaacattntacaacacctatccatgtacatattttttgacaaccttntcaatgctacatcctatatatatacacacanttttttggaaggcttcttttgtacctactcacanatacacatattttgaaaaacacctttacgctacccatccaacactttgtaaggcacttcatgctatatatattcatattatgccaggcattttatcaaccatttgcacgcatttcatgcttatatatatcacatatatacatactgtgaaaggattttcatgctcctangtgaaagattcctatggtgcagcaattaa

SEQ ID NO: 93975 - DNA, 320 bp, Glycine max
  unsure (1)..(320): unsure at all n locations
ctcttgaccttgacttgatagaacctctttttaagcgaaggcgtgtgacttgatcccatgntttactaaagtgaaacaaaatctagtgcaaatcaaaactccgacatctatcatgggtggaatggatgaatgtatgaagaaatgcatatgacacaaatgcaatttatgaatacaggagcccgggaaattgtctccttcttatatacaacgtcttggggcagcacaatgtccgacgtatgtatttaagaaggtgacacggacccttcgttgtgttgccaaagagaggggatcaagacngaacccacgcatgatgcatatgc

SEQ ID NO: 93976 - DNA, 321 bp, Glycine max
  unsure (1)..(321): unsure at all n locations
tctattgaatggtgcatcatattccatatcatatcttatgngcatcatgcctcatatgaaaggagcgacacaacatttcctaagatattaaaagtcttccaaaggcaaagaattacatttttatcgattacaaccctttcataatcgactacacacgttattttaagcttgcagagttatgtcttatatagtgtcaatcaattacaactgtattataatcgattacctacctgtgttgaagttatgactgatttattccggagtctgtacattaatcgataccatccgatataatnaatacttgctttctataactttcaa

SEQ ID NO: 93977 - DNA, 394 bp, Glycine max
  unsure (1)..(394): unsure at all n locations
tagagatctcttgtagattatgatatttctacaacacaatgagttggagaaacttcactcacttgataattgtcacacatatatgaaaaaattgaactatcctccacaataaaagtgaaaaagaaaaagaaaactatggagagtatgtaacagtaaaatgaataaattacttgggctaataggaatgatctaaaaaactggtcattatctgttccaattaagttaactgtgaaaatgttgcttattttgaaagaanaatgagcaagcaaacaaaaagaaagaagaananaatgcttaactgcacctctgaaaagctttcaggcttggcatggtgaatatgccccacaaaaaaggtccacagaatgtcacctaaaatatgaatggagagatgata

SEQ ID NO: 93978 - DNA, 351 bp, Glycine max
tcatcttaattgcacttggttgcagcgaccctttcctttctaaattatttcctagaagatcccgcaagaaaaaaactataacacgaaagaaagaagaatgaatactgggattaatttcgacattgtggcattttcgtcattgcggagcaccgtagctatcattaattttaatttagaccatagtggcgtgaaagctcattcctacgtaattagagagaaatcattacatagttggactaccacatatttattaatgtagggattaattaatctctatacgatatagagcaaagaacttatattaccacaaatatcgatagaaattaactatacatcatataaagactacta

SEQ ID NO: 93979 - DNA, 147 bp, Glycine max
aatcattgctacatttgtcaagatcttttactatcagaacatgtcaaactggactgccccgacctgtaaaccttgctaacacgaatatataagcttcacaatgctgaacagaacaactatatcacttaatacccgcagtacgcctga

SEQ ID NO: 93980 - DNA, 297 bp, Glycine max
  unsure (1)..(297): unsure at all n locations
ttattaattttgcatattatcccttttcttaaccaacgcggaaattgaatcattctctggtttctcgtcttatattatgtatttataccactaaacctacttacataaatntattatatgaccttaacactaagcctcgagtaatttaaccactacactaatcagcataataaaaatatgacatctactttagagnatgttaatctatttcatattagacattggtatggaagattctaagactaaatataatattgatagtgaaatatataataaaaatatgtatatatataaaac

SEQ ID NO: 93981 - DNA, 190 bp, Glycine max
ttcacatatgggggaagatgtaagccatctgttcgcggatgtggtccgtcatatcaagtgtggaccaaatattgtgtgtgcgggggttgtgacagcatgtaataatgatattggtagaggatgtttcagcagtttcaggggttgttctggacactattatggaaactaaagggagcccagttgtctgttt

SEQ ID NO: 93982 - DNA, 449 bp, Glycine max
  unsure (1)..(449): unsure at all n locations
ccaccatggagatgcaacgaaagataaaggaaaagaggtgagaggaggcgtcatccactatggaataagccatggaaggagaagcttcacccgcaagagaatgtcttggataagaagcttacagagaaaacttcaatgaaggaagagaatgagagagagagagagagagagagaaagtgacatggacaattgaaggaagaaagggagagaagntgaactctgaagtgtgtctcacaagactctcattcatcaaaattaccacacgtgttacacatgcttctatttatagcctacgtagcttccttgagaagttagagcttacctacacacacccctctaaagttaagctcaactctctgagaagctagagcttagctagacaccccctctaatagctaagctcacctccttaagatgataaggnagctacacacaaccctctatatcta

SEQ ID NO: 93983 - DNA, 370 bp, Glycine max
  unsure (1)..(370): unsure at all n locations
aactcttaaaanataataaatatattatattatcacttaattacaaatggccatacatgataagnttaataatatataactgtctgtttatcttaaaaggcatattaaacatgatttcaaattggttgagagagtggaaaacaacaatagtgacagttcatattcattcagttctcttattaaaatataaaaatataactaatttaattaaacttgtgtaactgatatgcatagtgtaagaacagcacaaaagcatacatgtatgactgtgtatgtggnggggttggtttattttgactaacatggcaacgagtcattctgttcgtgtctcnagtcccaatgctgaaaggtatacattacattctacgtg

SEQ ID NO: 93984 - DNA, 423 bp, Glycine max
  unsure (1)..(423): unsure at all n locations
agcttataccaantatggatattttgttgctttatcagttgcgggatggaaacgccatcactatgccaaatgagtggtgggatggaaactaaaagctcattaaatatttcttgcattgatggcctggattatggatggtggcacaagcatgttaatgctaatattacaataagcacacattcttgcatatcctttcgatagaagggtagaggtattcgtgagtgcaataaatgaggcagaaatgttagaccatatatgcgcatgctatcaagataatagtcatagcgagtggcagagataatcaattacaaactacatcactngctacgactatcactattgctacgacatcttgttctacttctgctaattgtaactctaaattggtacctacactcaccanaaaagaagctaacatgaaca

SEQ ID NO: 93985 - DNA, 309 bp, Glycine max
  unsure (1)..(309): unsure at all n locations
agaatgtcaatccttaccctcggaagcanaaaagaatagaagggaaattttcaatcaaataagaatagaaggaaaatttccaatgaaagcaaaaaaagaaaagaaggaaaattccccaatcaaagagtgggagaaagcaaaaagaaaagaaaggaaattcccaatcaaagaatgggagaaagttaaaaaggaagaagaagaaggaaagaaagcttctgatcagggatcgaaggaaaaacagaagaaatgtgcagagaggtctttagaccggacaatatctgaacaatacagaattgtcaccaaatgaac

SEQ ID NO: 93986 - DNA, 416 bp, Glycine max
  unsure (1)..(416): unsure at all n locations
aagcttacaagggtgtctgcggagttatgtttggtgatcttgaaggcaagaattgggtggagcgataaaagctctactaaattgttggtgttattgaagaaaatgcttcctgaacaagacacattgccgaaaaatcactacgaggcacaaaagattttatgtcctataggaatagagtatcggaagatccatgcatgccctaatgatttcatattatataaaaatcagtttgcagaaatgcgttagtgtcccacttgtggggtatcatgatacaaagtccagcatgatgaattcagtgatgatgcaagcaaaaagaatagtcatccagcanaggtctgctcgtatcttccaataataccaagggttaagcgattggttgtaatagacataatgaanaaaaccttacatggcataca

SEQ ID NO: 93987 - DNA, 396 bp, Glycine max
  unsure (1)..(396): unsure at all n locations
agcttgagatgaggaagcgcngaatggtgaaactttctgtttttattgncgaccacagagcggtacctggagatatgtcgcgcgggtcatgagaccttgtggacgtcaggtgtggtgctattagccaaaaccaagcttgaccaatcccgacccaacccgggcatagtcggtcagcgagaacctgtgatgtacctaaacaggcgagctcctgtcagtcaacagataaaaggaacaaagaccacaaagcatggaggcttgtggtggctggccagctgtgaaacttgattgatatgtgagatatgggctctggtaatcgattacccacgtgggtaattgattactaggcttaaaaatgaagacaggacgctaagatggtctctggtaatctattaccac

SEQ ID NO: 93988 - DNA, 478 bp, Glycine max
  unsure (1)..(478): unsure at all n locations
agctngggtcgagggacttactctcgtgaagatcttataacgangaagaacgaatgaagaacgtcgaagaacgggtgaaacctttgcgaaattcttcacagaaaatgttacggaaacgtttcggaagcgcctcggcttacattntcttcacggaaacaattgttccaagcaaattctaaagagagagaagagcctaaggcgttgaaccctcttcttcttcacttccttccctatttatagccaanataggggagatggttgccgcccagctcgcccaggcgagcagggttgcttcctccagaagcaacagccttctggagggcccaagtgggcctggttgctatttgcacccccattatactaagtacacaccctctgctttntgttggtgattcttttttcgagaagtacggaacctacgaatttgtacgatacttgtgtcttccgaatgtacggaactgtggtacatatatacctt

SEQ ID NO: 93989 - DNA, 235 bp, Glycine max
aatgataaaactccggcagatgaagagggtgaggatgctagaaaaacccgtgctgtgactgccattcctatacagtcaagctttccaccaacccaacaatgtcattactcaaacaataacaaaccttgttcttacccaccggccagctatccacaaaggccatccctaaaacaaccacgaagtctgtctaccgcactttcaatgatgaacatcacctctagcacaagtccaaaac

SEQ ID NO: 93990 - DNA, 328 bp, Glycine max
  unsure (1)..(328): unsure at all n locations
agcttcttgccactagngaaatgctctatccaatcttgaaagcaccttcaattgccttgcttgtgttgtagaggtttccatcattgaatttaatgaaatctctctgtgcaattatgaaatcaatgaattgggttgggaagcatccttgtttaaaaaggaatttcaagggcatgtaagccatcaactaatggccttcgtatttcctcttaagaaaaagtaaaaagggtaaaggcacttgtgccatgaaaagtgtaatcctcaacattntgcatgtttgtggcatcttatgccactaatgccatgagagagtcatggatgacactgaccc

SEQ ID NO: 93991 - DNA, 257 bp, Glycine max
  unsure (1)..(257): unsure at all n locations
ccaaaacttaccccagggaaacaagggggttgaggagtatttcaagggaaatggatgtgctcatgantcaagcaaagattgaagagatgangagtaactatggctcaattcttaatggtttgataatgatatctgtgatatttgtgagctgcangagtttgttaaatggatgatttgttcacaaagcaatccaagtagagcaacaattaanaaggaaaggagtggctaanaggagttttaccaagtttggttcttct

SEQ ID NO: 93992 - DNA, 277 bp, Glycine max
aaattggatttaatcccccctcgatagaatattcccccctttatggaaccatagaatagtcattgtgataaaggaaggaaagggatcctttacttgcgtactccgctattatcagttcaacttgaccatttacctatttatagactactatttaggtgggggctacacaaactcaagggtacactatcatcagacattgttacaagcagttgctaactcgtggctttttcagcctagacaagcctgtctggagtaagagtgaaagagtgtatttatg

SEQ ID NO: 93993 - DNA, 362 bp, Glycine max
gtcacctgcggctgcagcttcatttcattggagcatctcgaatattacgtttctttctggcatcccagaaaacgtggtgtatttgaatttctacgacttccttttcaattggagggtctaatatatactcgactcatcagacttccgagaaaaactatggtgctgaattggctacacttccgtttcaattggagcaatcgatatttacggactcattcgacatgcgagaagaagctattgtggaaattagctcgacctccgtttcaatgtgagcattcatatatacccactaattgactccgatataagctattgtcgtgaatgctcaactttgtctaattaaaattcatcatacgactatc

SEQ ID NO: 93994 - DNA, 287 bp, Glycine max
aacaagttaacgttatgaagggagtaatgaaactcatctctatgtgaacctaatttatttgtagccatttacctaccgtcatatgtgtgtaattcacacataatcacttttttcttttaccgaaagggtcaacattcttgaggggtgagatcttttcctaatactaacttgcaggatgaaaaattagtggataacacagagattgggcttctacggagttgattttgaagaaatcagctccagaagagtaggaaatggctgatgggtaacatgtcaccactgattta

SEQ ID NO: 93995 - DNA, 412 bp, Glycine max
  unsure (1)..(412): unsure at all n locations
agtggagtcgccaactgtcgcaacgtgcccttttgcgggcgagcgagggcgaggctcacgggtgcgctttccaaaggaggaaagatgcgcggagtcgccaccaacatttatttgtggaaaaacgtcgggaaaaccgaaggaaaccggtcgaaatgaaaattctaaattcgggagttgtatttacgtttgaggaaggtattagcacctcttatgtttgtctcanaggacaacagcctatttttcagaattgtggaaattgtgttatcttaacttttatttctttntattntntgaggtcgacaaaagcggggctctttgctctacataccctccatcaaagaggaaatcagacctacgtagttctnttaagcgtgaatcaagcgattctttntacttgaaagggtgatcattt

SEQ ID NO: 93996 - DNA, 443 bp, Glycine max
cgcttgagggtgcgcagcccaccatcttttatagtagagttcttataatgtgtctaccatcacgattatcgtctccctttccattattgggggtaccacctgtgccgccagatccctccaccttttgggcgtgttctttgaatgatccgtccccctttttgcacatgttctgtagttgcatcctatccggaaccatatcaaaattgtactgatactgcctaacaaaggcaaccattatgtccttccaagaatggactcgggaaggttccaagttagtgtaccaggtaacagctaccccagtaagactttcttggaaggaatgtatcagcaattcctcatcttttgcgtattcccccatcttctgacaatacatctttatatggttcttgagacaagtagtcccctttgtcttgtaaagtccaacaccttgaactttggaatga

SEQ ID NO: 93997 - DNA, 420 bp, Glycine max
  unsure (1)..(420): unsure at all n locations
ctttgcggatttggtcttcgccagtgaattgatctaattggatctgaaaagaagcaaatntaatcatcctgcttagacgaatgagaaaactggngccaatnaagagggtgaggatgagggagaaacccatgatgtgactgccattcctatacggccaaagttnccaccaaacccaacaatgtcattactcagtcaataacaaaccaccttcttacccaccacccagttatccacaaaggccatccctaaatcaaccacaaagcctgtctaccgcactttcaatgacgaagaccacctttagcacaaaccanaaaaaacaccaaccaagaaatgaatnttgcagcgaanagncctgangattcaccccanattccggtgtcatatgctaactngctcccatatctacttgataacgcaatg

SEQ ID NO: 93998 - DNA, 401 bp, Glycine max
  unsure (1)..(401): unsure at all n locations
taatgacccactaacctataatttaaataacttaatgccattaacctagggaattaaaacaaactaaatggctgagtgtaactgaaattgttggcaaccaaaagtcacccccaacagccaacaagtcagccaccatttggtctcccaaaaggctgatgcctaggttgccaattgggcccttattacaacttgaactaaagcccttttagttgattaacccaaaacatanttttggtcagccaactttacaaggattgggccattatttagacaaactaaacactctaaaattgaaataaagtggtgtcatttagtcctccatttgggccatgatacaactcacaaccttggacttttctccttgaaacttgggcttgtattcaaatagtatggacagcact

SEQ ID NO: 93999 - DNA, 393 bp, Glycine max
  unsure (1)..(393): unsure at all n locations
gtagtaggttctccattgtggtacaacagaggcaagggacaatgatcctttaaaaaaaagattcattatcatatcatatatacaaaagacaaagttagcaaaaaagtcaatattagcttacaaaggtaaatggtatggttagtagatattatatacctgcacaaagtgatntccattgacaagtccaatggaaatgagatggggctntgctgacacaagaccnctaagtggaaagaaggtccaactctacaacctagataagtggaccaatacaacattataccgactagcaatgacataaccatgtcaggaatgttcatccacttctcataaggctatggaccatgttcgacatacaaagaangtattgtcgcaacctacccatcggcggga

SEQ ID NO: 94000 - DNA, 381 bp, Glycine max
  unsure (1)..(381): unsure at all n locations
tcctcaatcacctcattaagggctaaaacaccatgaatgatgtgntctgttttgatgaaagctgtctgcctctcatctatgagaccagatatcacttgtctcaatctatttgctaataacttagctatcaccttgtacatacatccaatcaaggagatgggtctgtagtcgtcaaaagactggggatgattaatcttggaaattagagctatgaaggaagcattactgcctctagggaagctaccatgcacatggaattcatcaataaatcttctgaagtcagttttcagcatatcccaaaattctttaatgaatttgaagttgaagccatcangtccagggcatttgtccccatcacaactccacactgcttctttaatc

SEQ ID NO: 94001 - DNA, 523 bp, Glycine max
  unsure (1)..(523): unsure at all n locations
agctntacaagtctatattgatgacgccatagactgtcgtcatgaatcacgagtcaagcaagctgtgagaatcagagagtcgctcactcaacactcaagatacgagccgtattcatacagtgttcagactgttgagtagcacgattgtgctcaacagaattaatcagagaagaactctctgccaagagttctactctctggtcatcgattaccacagaggagtagatcgatacaagtcgacaacattcttttcaaactgatctacaaagctgtaatcgattaccataatcatgtaatcgattaccactgttntacaacattagatttcaaatttcgcgagtcacaacttgtgataaaacattctcaaatcatctcanacttgtgtagttgattacacactacttgtaattgactaccattggttctaaatgctttgattntcaaagttacacatgatgagtcacatatgttgatgtgtaatcgactacactatgatggtaatcaattaccagtgacttattct

SEQ ID NO: 94002 - DNA, 437 bp, Glycine max
  unsure (1)..(437): unsure at all n locations
tgtatgtaggctggatctctgagcatgaatgctgtccttctatggcgattntccaccacggagatgtagcatacaataaacgagacgacgtgatacgacgcgccacccactaaggaataagccatggaagaatgagctttaccaccaagagagtgccttgtataagaagcttataaaggaagctatgatggacgagaacaaacatagagacagaaagacagacgagggagcacataattgcaggaacagagggagagaaattcaactttgatgtgtgtctcacacgactctcattcgtcatagttacaacaagtgttacacatgcttctatttatagcctagtgtagcaacctgcccttccgctggagggagacgcgtgactcgcgggtgtgtcttccaagaaaggaatacgcgcggagtcaccaccaacgtttatt

SEQ ID NO: 94003 - DNA, 480 bp, Glycine max
  unsure (1)..(480): unsure at all n locations
agcttaacaatgtntcggtgtcgtgtttaagacatggcttctacctcattcttaaagggttttatactntcaacgtctaaattntcttcatcacacttcaactntntaacagcaaatatttgacctnctttcatctctgctttataaacttttcccaacgctccttccccaatgcaatactggttgtcaaagttcttggtagcttcgattatgtctccatacacaactctcccattaaagtaccaaattgaaaantggattggtcttttaattgaacttttctgtcttcgagttcttgactntctcttgtagcanaagaaaacaatcccaacacacaacatagaaataaaaagagcaccttccaaggaagcagcaattgggatcagaaccttctttttgtacttgatcaccattangttagtgagaaaacatacatggacgccaccttgaatattcccataaattttgtgtgctcaatca

SEQ ID NO: 94004 - DNA, 440 bp, Glycine max
  unsure (1)..(440): unsure at all n locations
cgtgaagtctgcagtttgaccaatcacctctctggctagtggctagtggcccaagccctcattagtgaggcagcataaatctaaggggcccaccgtatccaaacctgaaaagctgcatcaccccaaagaagttcttgccttgtaagatcatactccacgagggagataattcaacaagaaaactatctttcacggacccagttgcagttctttacacctgccaacttcattggagcaacatcacgtgcttcatgctcttgaactcttgatgcagttgctgcctctatctggcgcctgngactttgcgaccataacttagttttcctaatgtgctcagtggccttttacttgctagtcgctattcttcatatatattctgtatctagttaaattcaatgaagtcatatgggagaatatgagatatcaatcatatcatgatg

SEQ ID NO: 94005 - DNA, 427 bp, Glycine max
  unsure (1)..(427): unsure at all n locations
cagcttcggtctttaatntcaagcttctcgacatanatcngtactcaatcagacatccgagtaaaaaagtgattgtcgtttgaatttgctcatagcttcaacattcaattttgagcgttttgatatattacgatactcaatcggacatccgagtaaaaagttattgtncgttgaatttgctcagagcttcggcattcaagtccgagcctctcgatatactacgggactcaatcagaccttcgagtaaagggttattgtcgtttgaatttgctcagagcttcgacattcaagtccgagcgtctcgatatattacgggactcaatcagacatccgagtaaaaagttattgtcgtttgaatttgttcagagcttcaacattcaatttcgagcatctcgatatattacgggacccaatcagacattcgagt

SEQ ID NO: 94006 - DNA, 395 bp, Glycine max
  unsure (1)..(395): unsure at all n locations
ntgagcaaattcaagcaaanatcacttttttactcggatgtctgattgagtcccgtaatatatcgagacgctcgaaatggaacaccgaatctctgagcaaattcaaacgacaataactttttactcggatgtcagattgagtccagaaatttgtcgagatgcttgaaattgaagaccaaagctctgagcgaattcaaacgacaataactttttactcggatgtgtgactgagtcccgtaatatatcgagacgctcggaattgattatcgaagctctgagcaaattcaaacgacaataagtttttactcggatgtctgattgagtcccgtaatatatcgagacgcttgaaattgaataccgaagctctgagcaaattcaaacgagcataacttttt

SEQ ID NO: 94007 - DNA, 383 bp, Glycine max
tctagagaaagctacatggagctgcctcggtaaaaacgatgcccaacggttggtaacccgtggatcttctcaaaatttggtctgcaactccacaagacacttttacatgatctgaccgttgggatctttgagaagatgtctggagtgtgctagaagcctcttaatgaagcttctggaggaagcctcttaatgaagcttctagagaaaactacatgaagctgcctcggtagaaacgctgcccagccttcgttaaccgttggatcttctcgaaattttgtttgcaacttcacaagaaactttaccatgatttaaccgttgggatctttgaaaaaatatctggattatgctagaagcttccgttcccgagagcatctcttattaag

SEQ ID NO: 94008 - DNA, 141 bp, Glycine max
tcacatgaagtatggtaataacaattctcgagtattatatattagctacccatttcttcttgactttttaaaatggcatttgctagtaaaaaatcctttgaaagggaatctattcagtaaatgatatatttttaaaaaagg

SEQ ID NO: 94009 - DNA, 384 bp, Glycine max
  unsure (1)..(384): unsure at all n locations
aatacactgatagctcagtcaacatcatattcttcactcaattaggatattcttcagcaccagcattttttgctaatactatacaacaaaatgcctatctcctcatatgcttcagctatactcaaagatcatgcaaaatcagtactaaataatangttgtgctctcaaaatttaaagatcacactctcatcgggatgtggttaatgcattccttcacaatcaatctgacaaactaactaacattttctgtcatatttctaatcacatgttctttctcttctaatagctgcaagcttgatcaagaaaaaagaatctcaacatttcaatccactcaattcatacantngatccattcangtcattcaaaacanaccactgaaacat

SEQ ID NO: 94010 - DNA, 156 bp, Glycine max
ggattacttgggatatgacacatatttactaatgggatacttaactttggcttggaaggctgggtcatatttaactggagggtgaccacaattaaagcaaggtgggagattatattggacaatagtagactcaattgttggattgctggtgatctc

SEQ ID NO: 94011 - DNA, 454 bp, Glycine max
  unsure (1)..(454): unsure at all n locations
agctntgaaggtgcgtagcccaccattntccctagtagaatactggtaatgtgtctactatcattgggcaatcgtttttcgtcattgaggtgccacttgagctggcangtcttcacctttgggcgtaattctttgaagatacgtcccccttttttgcacatggtcttgtagtgcattctattncgagccattataccgacactgcctaatgaaggcaaccataggtcctccaggaatggactcggaggttccaagtagtgaccaggtacaactacccagtagactttttggaggaatgatcaacaattctatcttttgcgatgccccatcttcgacatcatcttaatggtcttgggcagaatccctgtactgcaagtcacacctgactgagaggtgatgattggtatggaacacttttagtagcaagatatctcactcttatgcctgagcttct

SEQ ID NO: 94012 - DNA, 169 bp, Glycine max
ttctaactcgcttttgagagcctggacttcttcgtcctcttccggtgcttcaaaattctcttcgctgacgacttttaacttggcgagccaatctaaacctcgtatgcgaactttcaaccattcgtggtacccaccaatgatgccattacgaatgcctctaagctcttga

SEQ ID NO: 94013 - DNA, 508 bp, Glycine max
  unsure (1)..(508): unsure at all n locations
ctgctgttgttatcatgaaccatgtctatctcgntgttattctcatggaagnggnatgtttctattctcttactctagtgtcacaaaggctntgtggacaccatttangtgtctaccctgtagagagaaaagaaggataatgttccaacgtacacgtatgggtggaaagaagagattcttagaaaaaagttaacggaagagactacaactgattgatataatagatgatgtggaccgtagaaaatgaagagatataacaataatgataaatgtgactaatatgatgttgcaagacaaggatagaaagaaactgagagttaaatgcatgtgtacactcttatggtgttaaataattgcaagtgttctatgctatctatctatgctgtggatctaaaataagttatttctgtggactttgacatttgatttctttgttctttttagaaccaatggctcacagtgttctcttgtatagtctcaacagccatgactctataaatgtatctac

SEQ ID NO: 94014 - DNA, 396 bp, Glycine max
  unsure (1)..(396): unsure at all n locations
actaagcttatattgatttccacagctgaagttataagatactctctatgatgcactcgaaaagaatacgtaaaacatgtttttataaaaataaaaaaactgaataataaatctagatatattgtcaattgattaattgataggttttctatcacaaagatagacaaaaaatcagaattatgaacagaggcacaaaatctaggcttatacaaaaactccaagcatttggatcataggagttgtctgcagtatagtagcatacctgagtggcaacaaccaaagtaaattgagaaaagaatgatggattngtctcaatcaatggttctggagactcttcctacaaattttgcttaactgcatcattcagctcttgaagaaatgagcatacacattttg

SEQ ID NO: 94015 - DNA, 501 bp, Glycine max
  unsure (1)..(501): unsure at all n locations
gtcacctgcggcatgcaagcttctaagtgtagacataggtgacgtaatgtctttntaattacttcactcacatcagctctttcaataaagtagttctccaagagtggcttctcatttattaaggaacacaaattaagtcttttcgtgttttcccctaaaatctagcaccaacagttcccttaactgctttagctttcctacctctntaatgaccactccatcatcatctataatcactggaggtatctcttgtagggatgtcatgcctccaatatccttccattgaatngaagatatatagccactcagaagatgacgtagctntntaagcttattaatctaataaaaattgaccgaatgggtgagcttcctatacttccactaaaatcatcggttgcaattntcaagcatcgaacagattgatcacgcncgtcaatatacntgacaaaccctgtatccttgactnttctaaggatcatgtcgtgtattaagtcatgaaca

SEQ ID NO: 94016 - DNA, 335 bp, Glycine max
tgtacgatgatggggtatccatcacatgtggttctttgttgctgtcgggcgatggtgcaaaacaagttctccacatccacaaatcacgtataaatccaccatcccctgttgcccaccttcaactgagctcacgtactcccacgtagctcttatcctcgttcctctcaacgccgggtccccatcaattctcccaagctttcacaacatccaagtagttccacatccaattgtcatgaactcacaaaaccaagcaaaacagggcaaaagcagaaaactctgcccaaaacacaaaccaaaatcacagcttttcacatacaaataccccagtaacattc

SEQ ID NO: 94017 - DNA, 487 bp, Glycine max
  unsure (1)..(487): unsure at all n locations
gtctgaaattgaaaaatgagactaaaatcatagatttcttttagatacacacaaacacaattaanaataatattatagaattatataaatttatttattatgatctaanatacaattgatatgattaaaggtattcatttattataaacttcggttattaaaataattatatatttgagaatatcaattttntaanaattaattatatataaagaacatctgtccaataaaatataaataaataaaataatgataattattggtattataaacgtcaccacaaatatatatttttagttttttttttatctgaatagtgataacaattcttatcangcccgctttattattatgatctanaatacaattgatatgtttaaaggtattcatttattataaacttcggttataaaataatntatatatntaannaatatcaatttttaaaaattaattatatataaagaaacatctgtccatacaatat

SEQ ID NO: 94018 - DNA, 511 bp, Glycine max
  unsure (1)..(511): unsure at all n locations
agctggtacaatgcacaggctcacctatcatgtgttgaannattgacatttattaaaagagtgggagcaacaaggatcaaactctagagtctagatgactcagtcaaagactcatgaaccaacttaataagcttaagctattaagaaagatgcatgattggccttctattacatccctaacagtggtgtattttagctgcaaaacaaaatgaaaaatgtntgtctggcatcactttnttttacactttatttgtatctcctagtaaaatgtctactcatatggacacacagataagggagagagtaaaagaagccttttttcagagggtgtaaatgtgagactcataanatggtgatggtgatggctaggttaggcaagacatttcaggtagtttctaacttttnttactagtcgaaaaactcattttacttgtcgatanataagttttntaataatntctagtagttctaatattttggaatgtacttgagtagtgtnttttttaaatgt

SEQ ID NO: 94019 - DNA, 440 bp, Glycine max
ctgtgtaatcgattaccagtgtttgtttctgaaaaatctatatgatgtaactcttcaaaaaggttttgactctttcaaatgggttttaagcttttctaaaagatataactcttctgaatggctttcttgaccagacatgaagagtctataaaagcaaggctttgttttgcattttaaaatcaattattccaagtctttctaacaaatctcttacaatcctttacaagccttgaatctctttgaacttcttcttcttctttgtaccaaaagttttctgaagttttctggttttctaaactttgaaaacttatgctattcatccttttcatgctcttctccctttgccaaaaagaattcaccatggactaatcgcctgaattctttttgtgtctctcttctcccttttccaaaagatggaaggactaaccgcctgaattctt

SEQ ID NO: 94020 - DNA, 142 bp, Glycine max
agcttcacaagcaagcttccatcacaaggagtgcattgtaattcgcccaggcgagctgtagctcgctcatgcgagtttcttgctcagggttgacgttacattttagcccaagccagttggatgctagcctaggcaaatttag

SEQ ID NO: 94021 - DNA, 431 bp, Glycine max
ctggatctttgagcttcaatgaggttctttaatggtgattttccaccatggagatgcagcggaagaataaggaaaagagggtataagagggaccatccactaagaaataagccatgggaggggaaacttcaccactaaagagagtgccttggattaaaagcttaaaaagaaagcttttatggaagaaaaaaatgaaaaaaaaaagaggggcgggaggcacgaaattgaaggagaaaaagagggagagaaagtgaactttgaagtgtttctcacaagtttctcattcatcaaagttatgacaagtgttacacatgtttctatttatagcctaggtcactaactaaatgaaagcttccttgagaaacttccttcagaagctagagcttagttacacacacccttctaatagctaagctcacttccttgagaag

SEQ ID NO: 94022 - DNA, 361 bp, Glycine max
  unsure (1)..(361): unsure at all n locations
tgaacacgatacatgaagacgaaggtatangtgttgctctatttattcacgtaacgggatacgactcgggcgaatcttatgatgctatctaccatgctcataaccatatgctggagactgttgtcgaatgtcttaagatgcatcattactggaatgatatctctgcacttggccatcatacaaagctatctatcactcaagcacttgaaatagttgaagaaaggtccaaaatgaatcaaacaccctatgccagtggtgttggaagcataatgtatggattggtttgcagcagacctgacttggctcatgctgtaagtattataagcagaatcataggagatcctggcagcgcacactggga

SEQ ID NO: 94023 - DNA, 390 bp, Glycine max
  unsure (1)..(390): unsure at all n locations
ccacaagttctttagatgcaagttctttttacactttggtttgggtctttttcttctttgaatttattngcagttcaatgtagtagttggtcctttgaattatgaaactcgatacatatttatattaggtctgtagaatgtaagaatatactaagaagattcaataggttcacatacactttgataccatgctaataattagagaaatattagagagacatgataaaagagtggtctattattnggtaatgaaaaagggtacccaggggtatgtgagtngtcttcatcctctattcctttacaagtttatcatgnngtactctggaggacctggactatngatgatgtncttcaaagagganagactctactaactcacatctacttttt

SEQ ID NO: 94024 - DNA, 431 bp, Glycine max
  unsure (1)..(431): unsure at all n locations
tttaaacaaagaacttttcttgggaaagaaagtgtttgtacataactttntgaaagatgaagagaaatgaattgaaagatggatgagagatgatgttgaaaaagaatgaaagatagatgatttaaagattattgataattggtgaaattcatgccatggtcacatatttataatctcttgatgactcaagtcaaagcttatgactcttggcaatttctttaaaactagtcacttaaaaaaaagttgtgacttttgaaaaaatatttagaaacaagtcacttgaagaattgtgacttttggaaatgtatttttcaaaatcagtcactggtaatcgattaccattaaggtgtaatcgattacacatcaatagatgtcactcttcattttgaatttttgaaattaaaatgtttagaagctctggtaatcgatta

SEQ ID NO: 94025 - DNA, 494 bp, Glycine max
  unsure (1)..(494): unsure at all n locations
agcttcctagatgtctaccccggatacaactagattcataatgcatcccctctagacgagggagaannacgacattntatcanctaaagatgccaaccttttgcttacaggtcatgccattcggcctcaaaaacacaagtgtgtcataccaaacaactaatagaccgagtcttcanacaacaaatcagacgaaatgtncaggtatatgtggacgacatttgtgtcaagtctcaaagcataccccaacatgtgccaaacttggaagaagtcttctgggaactactcanatacgacatgcgcctcaaccctgaanaatgtactttctgggtaggcggcaacaagttccacatcanggaattgaaccaaccttgacaatatactgcaatgagagatgccaccctacaacgtcaagagtcagaactcacggtagtacctcctatcaagtcgcgaagaggatgcatttacaactgtcaaaagatgacccgtctatggac

SEQ ID NO: 94026 - DNA, 428 bp, Glycine max
  unsure (1)..(428): unsure at all n locations
nttcactngcctactattttcccttggcatctntgcagtttatggtgaaattatttattttattttttgtaaaaatatagntttggttgtttctcgtgtttatagggaagggaacaacacttatgcaggcaaattagtcactcataagcttcatctaggtttgacttccaatggttgaatgcttctcccctttttgttaaggatgagtttcttatgaatagaaataagccaaatgacctatttggtcctttatcgtatatgattagttcaatttgatcctttatctttttaaaaattaattttggtcctttatgtattaaaaaagaactaaaatggtcattccgtcagtacaaccttagcgccattaatgtaactaagatagtgatgactaaaaaccacctcaaagtgtaagctttttccccttcatc

SEQ ID NO: 94027 - DNA, 537 bp, Glycine max
  unsure (1)..(537): unsure at all n locations
taagcgacgcggctgcagctataagactacgtttaaactaagttatgtatatgatttgttatagtacatnaangngatggtaatcgatcgaatatctatcaattattcataatattacgaccctaatttaacattagggttatcaacattatattaatctgagtgtaatggcactcaaaacttgagtaaaatattatatctgagtttataaataaataaaagatataattaaaagaaatgagtctattaaaattcacaagtaatcaatcagatttgtaattaacattaatcattaatatataaatctgacaaatccttatttaaaatatgattngattatgctctaataaataaaaaataagagaaaaatttcactaaatctcacacatcgttctttccagtttattttaaatatctttattctatgttattaattnttattctcaaccaaatttatcctaagttcttaatacaccagtccggactggcaagaagttgagccttttcttttgtgctgttganaatgactacactatc

SEQ ID NO: 94028 - DNA, 463 bp, Glycine max
  unsure (1)..(463): unsure at all n locations
tttgatctccttttggtgctctaaaatgtgggaatgtgctcaaatatgtggggcacatttgtnnttgtttcttgcttgaatgggttggaatggnggttngtatgggatggccctangcctataatgcattntgaagcaatgggacatgctacattgtccccattctcttgctattgatacctaaacgcgccgcccaccaagtgtcggtgaaatgcctcaatggcattagcgcgtgacctttgaaggaaacaacccatggnngcatttggtttgcacatattttctatttgttgggacatgcattcattcccaaanaaggttagagtaattgccccacatatatcctangcctanngaaccaaagtttatgtaaaagagcacaagaggaggtgcatattgngtaaagttaccttntttggcagcaatcagctatgggccacgttacaataatttccctacgtct

SEQ ID NO: 94029 - DNA, 377 bp, Glycine max
cgcgaacttgaaactaagctaagctccttaattgacaagactcttatatttgaagagttcctttgggaaccttcacccgacgaagacactggacaaaacttattttcttctttttggaccaagtatggcaagttgatggcaagtaaattttctttccatcagaccttggatgccactgtgatccgatccccatatcagctagatcttgacgggtattcaaagtcatccttcgtcttgccttgaatgttaaggagcatcccaatcaaaacattttctccacatgcataacatcaatacaatatctaacgtctagattagaccagtatggaagatcaaagaaattgaacatcttcttccatatgcaactcttactttta

SEQ ID NO: 94030 - DNA, 370 bp, Glycine max
  unsure (1)..(370): unsure at all n locations
ttcccttatgttatcaaacataaaaaggganaaggtaatattgtagccgatgctctttctcggcgtcatgcattactttctatgcttgaaacaaaattgattggtcttgaatggttgaaaagcatgtatgacaatgatgaaacttttggagaaattcttaaaaattgtgaaaaactttcagaaaatgggttctttagacatgaaggctttcttttcaaagaanacaaattgtgtgtgcctaaatgttctactagaaatctgcttggttgtgaagcacatgaaggagggttaatggcgcattttgnggtccaaaagactctagaaacattacaagaaccattttattggcctcatatgananaggatgtgc

SEQ ID NO: 94031 - DNA, 443 bp, Glycine max
  unsure (1)..(443): unsure at all n locations
gtcgcgcacatacatactcagctatcccttctgaccctgatcctgcaaacaattacgtctttctatctcccggaggggcctttttggaaagcagcctcccctatttacccttacctagtgatttgggtcggggactacattgtcctttttgacaaaaaaggccgcaaaaactgtacgcatggttctgcagaaatttgaaagtagacaaaacacatacacctcaaaatggttgttgtgaaagctagtacagtatatgaaaatgcgtaaagttaaggaagtagacctacaatcttgctagtggtagctgaatctttagtcaaacgttgtctgaattctatcatctaagcaacaccaaattttttgaactaaactcaaattcactanattgcttaatgtggaacataactaaaataaatggaaccacttcattacgataaataagt

SEQ ID NO: 94032 - DNA, 512 bp, Glycine max
  unsure (1)..(512): unsure at all n locations
agtcacctgcgggcatgcaagcttggaccttgtgagagatatgcatgttatgagagtgtatcctagtgaaattgcaatgataagcatcacacatgtcttggcagaaatttgctgattgaaattggggaaagccacacatgcttatgtaatgagaaattggaagtgtggaaaatcaggagttcctctaagtactgctttgattgatatgtatgctaaatgtaaaaatttagcttatgcaagaagggtttttgatggcatgtctgagactagtatcatttcatggactgctatgatngcaacctacattcattgcaataattngaatgaaggtgtangactgtttgtcaaaatgctangagaaggtatgtctccaaatgaaattacaatgcttatgtttgtcaaagagtgtggcacagcaggagctctggaattaggaaaatngttacatgctttcacattaagaagtggattaccatgtctttggttctaccactgcttttattgatatgtat

SEQ ID NO: 94033 - DNA, 247 bp, Glycine max
  unsure (1)..(247): unsure at all n locations
aaaaaagccaaaaaaggtgaacctatggcttcgaaatcctcaattccctgggtattggtttttaaaagggggaaaagaagttttttgatgttaaaacccccccccttccttatttttataatttggtgccaaagggggttgcccaacttccccaagccaacttaactgcactttttttttttttanttttttttttttttgaggggaacaataaccatgtccccttccttcttatggaataacattt

SEQ ID NO: 94034 - DNA, 481 bp, Glycine max
  unsure (1)..(481): unsure at all n locations
agcnttgcttcccaatctcnncccttttgatgatgactacttctgaaatcattatacacacacacactatttcctagtcgatcactcttataagtgcagagaacagaggaaaagctgagcaaggaagcaaaggccctacttttaggtagattctaggttaaagagtgattcctacgttcctagaggtggaggaggaattcccattgctttgtaatatggtattttctcagaaacccttctcctatntgtgaaagttgctcccttgtaatggagggctaaaatcctttattgngaatccctgctgaatactcgatgtaaatattattattattattattatctatttgaagntattttcatgtgttcaatgtttccatctacgcttattgtatgcatgcttgtggtttgatcacccatnnggtgtgtgctgtaggaactntagcattggaaaatgtacttgtttcttagaacttgatagagt

SEQ ID NO: 94035 - DNA, 437 bp, Glycine max
actcaagccttcacctttggtcctcctcatagttgttgcatgagaaaacatgctctattgttatctcccactccaagtaggcctccggatcattctttcctttaaatggaggaatgttgagtttaataccatcaattcggttttgtctaggaacaccatcattccctcttctcctcctttcttcttcattatgatctctattctccatttgatccaacctctcatggagcgcatcatctctttgtttcattaacctctccaaatgttgcatcaaagcttgcatttggaattgcgaaagccccactccatcattatgattagtacctgacatctcaaacaaacaaatcaaacgtaacatgacaattatagtttgctggttgaatacctcacccactcagtgtatcacacaattatggcttttctctaatgaaacactc

SEQ ID NO: 94036 - DNA, 425 bp, Glycine max
  unsure (1)..(425): unsure at all n locations
cattctgtntanggttttgtgatgattttgtgatgttatatgctgagatngcttatggaaaactgttagagatgaatggtagagttaacctacggttagaaagtgagaatgtgatgttatgagtggaaaaggagtgaggctctgagagttggaaggttaagtctgaattctgtggtaaatggagggtaaagtgagttaatcatagctcggaatgtcatttangacttatgagaaagcttggactgtgctagagaganaaataaatgaccaaagtgaacaaagagccatttctagggaaaatttgggtgttgaagagtcaaattttgattcggtgagaatttaggtgtaaatccagtttgaacaagtcttaattgatgttatggactggtgtgaggtgagagtttgcttcanatttacctcattct

SEQ ID NO: 94037 - DNA, 433 bp, Glycine max
  unsure (1)..(433): unsure at all n locations
gcttaacctaactaattaactcactaaccttatttctttgaagtgatcgaccaatatctttcttcacgaactgcgagttcgagtcgggaagttcgcgccattcangaagtcaacctcgtcgggttgtagaagaacaagcttaaggaagtggctagctagggttcacaagagtgaactaagggcgcttcatatgcgaaagggagaatgaaggttacggttcagaacagtcaagaggctatgggcgcttcanatgcgatagggagcgagaaggttanggttcataacacagtcaagaggctaggtgcttcaaatgcgaaagtagtgagaaggtggatggtcagaacantaaaattattttctcttcttatntatncttgattacaaaggtttcttttaatagaaactagcatannatttattacacanaacattc

SEQ ID NO: 94038 - DNA, 316 bp, Glycine max
aaaccgcaattcttcctctttctttcttcccaaaccaattctaaaggtcccatcactttcttcattacccacaggcaccattagccaccacaaaacatcattgttctccattggaaccccacaccgagaggacccttcactgaagggaatcttccaacttggcttgggggtttagtagagaacgaaaccctaatttgacctttcgttttctttcaagggaaccatggttctaccgctggttcttgttagtttcatcttggctttgcatcttttctgactttggaaccgtcattgcatgtcttatgcctccctttga

SEQ ID NO: 94039 - DNA, 491 bp, Glycine max
  unsure (1)..(491): unsure at all n locations
agcttacaccagaatcggatgtatattcgtttgatgtatactgttacaacttctaactggaagaccctttttggggctagttagaggtaccccgttgatatgaaggatagaacaccattgactggttaaaggtaaatttataggaatgtttgtgactaanagatctctattgttaaacattagtcatttgtgctagttgttgattttgcttgtatgtgaaattcatggacaaattagatggtgattgtaataaaattaacccctgggtaagcaagatacttgtgctcattaatggatttagattgatattgtgaatntatatttaattattacaggtgggaatgtattataatttaaaattggttggttgtaggtactagtagatctcgttattgatcacccatttttggttgatgtagcaagaatggaaaatactatgcangttagcaatattcgagatgtgttgctcttcattgggtgtagtgatatgt

SEQ ID NO: 94040 - DNA, 439 bp, Glycine max
  unsure (1)..(439): unsure at all n locations
cggccttagtcttaagctaggttcatttatggctggtgttatgatttccacaacataatttggaccaggtatcattcataatcgatagcttctgacatgtgtatacacttatttttctttgcatacatgtagtaaattatgaactatgttttagttgtcagaacattaaagaaaaatgttctcttgaaagtttaattttttgtaggaggaaccaattcgttgtaggtggaaccaatttgtaacctatttgcagctctctttctctcaagtattggaatgttcatacatgtttacatctgttagtgcttagctttactgagctttaaaagattggctaaaattttgttaaaacataagcacttatacattgaagganagctggagttgctgcacatgatgtccaacgttatgtcaaggaatcagatcgggctgcacaatg

SEQ ID NO: 94041 - DNA, 472 bp, Glycine max
  unsure (1)..(472): unsure at all n locations
agctnganactcanggaanagctngaagaagctttataagaagttttggcttttacatgcccaactcctttgagtggcattagtattggttgttaacttgattgttgtatcttagtacatctgatatctatgttgcattntgcatcaccatagagtgactgaagaaaatttttataagttaaaaaaatttcttagacgcaaaaactcactgttttaataagttacaatgttgtcgtaatcgattacaacaagttgtctaaagcttaaaaagttaactctcgtatcagtttaatcgattatggtagtactttaatcgattacactattgtttgagacaatngactaatttttcatgagtctctactnntaattgatactagatggatcaatcgattacttctctctagttcaagttgttcaaaggtgaacaagaacactttaatctattacttanngtcatctaatngataca

SEQ ID NO: 94042 - DNA, 437 bp, Glycine max
tggactgtgctagagagaaaaacaaatgatcaaagtgaactctatagccatttctagggcaaaattgggtgttgaagagtcaaattttgattcggtggaattttaggtgtaaatccagtttgggcaagtttaaattgatgttatggactggtgtgaggtgagagtttgcttcatagttacctcattctaaatttcacttttcaaacctagaaaacccattgaattgaggggttttggacacctaaattttgtgttgctgtggtttgaagcttggctttggtttaaacaggtttgatacctgatttgggacttgtaggatttgatttgagcaagattggatgaggggaagtgtgattttcgaaatctgcacttatgcagaattttgctgtcaaaataggtgcagcaggaatttagcttagtgcagaaaatgcttgtgt

SEQ ID NO: 94043 - DNA, 428 bp, Glycine max
  unsure (1)..(428): unsure at all n locations
agcttctatataagctgaaccatgttatcaataaactcttgtngagtgttattcagacaattagagtttatctcttttatcttagtgagagcgattctcctaaattcttgagtgattcaagaacaccctggctgtatcaaaggactttcacaacctttgtgtgttgccctcgctggagagagtgattctttccttcctatcatctccacccttgttctttcaaaccacaattccagataatccacctctgcccaaaattatctcgtgaccataactcccatttcacacactcaaattaagtgattcttgatcctaaattgaatttcaaaacgagatctttcacctcgttntggaatcacctcatttggagccctgtagcttccgttatttccatttctatatttctgtccagccaccacttaacctac

SEQ ID NO: 94044 - DNA, 278 bp, Glycine max
ccccccaccgagatttttcatcccacattgcgccattttttttggaaaatactcgctggccgggaatggtttttttaccggcgaaggaagtttcttggtttggtggtggataaaaaaattacaaaggaaggtccgtaaggttttttgagcgagctcaaccgacgttttttttccggccgaaactggcatggttccatttattcggccacaaaatattagcccatctcagccaaaaaataatattcaccgattttgttgaaaaaaatgacagtcgacat

SEQ ID NO: 94045 - DNA, 508 bp, Glycine max
  unsure (1)..(508): unsure at all n locations
agctntccatctntaggggaatatatatggcttntgtctaactattcgatccttccattaattnttttaattgaatatgctagaagtagtggaatgacaacctccacaatagttaaaggttcacccattatgtttattatgtacaggcacttaagcaatacttgcaagtaatgtttttagctaagtaccctataattagtatgttcccaaaaccaatatataaagcatccactatttccagaaatcaattgggcagttggactntgatgttgatgcattntggttaggcaccactaaccttaacattaattaatcacttcatcgatntattnaatggattaatttaaaaacatcagtgaagttactttggataccaaacagatatgcataacaacttcaaactctacaaaatctcaaccatgatatacatgcacatatatnattctctntgcaaatatagaaggtgaagtgataacataaagtgaaatctctaaatctcatcagcatt

SEQ ID NO: 94046 - DNA, 407 bp, Glycine max
  unsure (1)..(407): unsure at all n locations
tgttccaccattgngaatggttgcatctgaagtacatctgctcgaatcttgttaagacgatcatcaagaccatctaagaagtatagactctgtcttcttgcaaaattaaattatatctctgaatatcagcatcacacaacataggatttggtcgacgaaaatcgatctctctccatagtccttgtaggttgttataatacgtttcaatagatctgtcaccttgcttgagtctggtcactcttcttttgagatcatatacttgtgatgtatcaccgctatcaaagtatgttgtagcaatactatcccaaacaaccttagccgtcagaaatctaataaagtttctcaccaactttagatccatagaattgatgagccatcccttcaccactgcattntttgttctctat

SEQ ID NO: 94047 - DNA, 485 bp, Glycine max
  unsure (1)..(485): unsure at all n locations
agctgatgggttttttgttntcttgtgtngtgttgtgtangtatggagacagaagagaggaaccagaaagggtgcaaggcttcngagccagagtttttcttgcagtgggggaacaggaagaggctgagatgtgtgagggtgaanggaccctcgatttcagcgagactcaacggtggaatcagaaggaaacttggttctgcactggatcatcatcgctctgggttcactgtgcccgagaaagaaatctctcatcaccaccaccaccatcaacaacctaatcgccttacaaggtgctgaaaataaacaacatcaactaaagggttntcttcatgattntctttcccctcttttgttacccccctttttctgggtatggttttcccccgagaaatgtgattgggttatggagggaatgatgctgtcctcttagtgggacatagaactctaggaagaaaactatagcacagtatcaggagaactttttt

SEQ ID NO: 94048 - DNA, 414 bp, Glycine max
  unsure (1)..(414): unsure at all n locations
ctagaacttgattaactaanaaacaaagttgctcatagttgatatgaaccaaanatagtttccacttcagtgaaagatattcatgatttgcacaagcttccactttttcttttcattctgcctcttatatatctctttttctacagtcaaattcaatacacgggtttttttttcttccactttactaaagcaggatcccttttcttaaaagagagaaaaagacagaacaaacacaggtgtcttattaaaactcaatcctgattacagatatttctatctctggtcttcatatttacagttcaatcaagtcttgctcctgctctcttgacagtagtaatctgtgccattaatagcaaatattccaaagacatcagaactaacaagataaacttcatgacacactactagtcacac

SEQ ID NO: 94049 - DNA, 469 bp, Glycine max
  unsure (1)..(469): unsure at all n locations
agctatgccaattctgacatttctagggttaaattgtgatttggagtcagaatctttgcacttgaataattgggctgcgaatttgggctttgctttgtgtaattaagttaattaagcaaaatagatgggcctaatcaaggcccatacctttctttcaaagaataatttgatatattaatggaaagtatttaattacatcatttttgaccaaaaatagatttaagtactttgtgtccaagctttangatcaaactcctttctctcttctctcaagtggtcttcattcttcttcctcttttcacttntggtcttcattnttcttggaaaaaattcgtggatcttccattgatgatgatcatagaanggctaaacattaattaatccaaggatccactccaagtaagactgaatntgagttctggtttagtatttctaattngtgtgaatggtcatctntntcttcaatcct

SEQ ID NO: 94050 - DNA, 190 bp, Glycine max
tatgtttgcgtcttcatcgtcttcattagacgaggtgtaatccaaatctttccacgtgttcataatctccttctttgctttagtcttaaagaatttcttcttgttttgacttttcaccaaatatgggcatttcgacttgaagtgtcgaggctttttgtactcataacagactatggagcttttgtctttg

SEQ ID NO: 94051 - DNA, 510 bp, Glycine max
  unsure (1)..(510): unsure at all n locations
gtcacctgcggcatgcaagcttaggcacgagatgacgaacttanggcttgcagagtattttgttggcatatagntattctaagaacattgaagaaattttatttctcaagaaaattgaagtatggtgtgaatctattggaaaaagtttattatacaaacttgcccaatattttaattaatggtactaagaagcttttgaaatgatatgaccaggagaagggtaataagacttcatatagaaaacttgtagaatcactaatangaaccctaccnatacaaaggggtaaatttgcctatgacaagccactaaggtcaatttaattttaggtccctaaaagaaatttaatttatgtgttatataactaanaagaaaaatttttaagtgtaaaattaaacactcttaaatataaattataaaagacttttcaatgcattattaaatatcttattataattcatgtacttagtgaaagagtttaaataaataataatttgttgttctaatggcta

SEQ ID NO: 94052 - DNA, 452 bp, Glycine max
  unsure (1)..(452): unsure at all n locations
gcacctgaggcatgcaagcttctngatgggtctctctgcttggatggcgtggtcatatggatgtttccacagaaaccccacggctcttgtgctttacttcacggtgcctctgggcaacacggctnggcttgtttctgaccctgtttggctgcatgcgcttctttcgccctgtcaatcccatcgctgctgatttcattaagccttgtttggcatgggttgcttttctctctattnctaaatctaagctcctttttgtctgaatgaaccaatctgctgcatgtggactggaattaaagctataatccaaacagtgtgttgccttgcgaagaattggttgtcctctatatcacggattagacacgcgtgttgtaaatactagtcttcttttttctagctnggaaccacgatgaattgtgctcttntactttgttccatanagattgagatgtctt

SEQ ID NO: 94053 - DNA, 406 bp, Glycine max
  unsure (1)..(406): unsure at all n locations
gcttgtctcagcgtntatgcaagacagagaccaacatgttagccatcatcagcaattaccaagaagaattaaatctagccatgacccacaagcacaaagtggcggacgactatgcccgagtgtacacggaaaaggaggctaggggaagggtgatcgactcgttacatcaagaggcatcaatgtggataaacctatntgctcttactttgaatgagagccaagaaacttcccgattgctggccaaggccaaagcaatggcggacacctactccgcccncgaggagatccacagacttctcagctattgtcagcatatgatagacttaatgacccatataattaggaaccgctcaggaagttgtattggcactcagatcttgactagttataactttctgaataaaat

SEQ ID NO: 94054 - DNA, 390 bp, Glycine max
  unsure (1)..(390): unsure at all n locations
atcctgactcaccatanaccttgacccagtgtgagaatgtcaatccttaccctcggaagcgaaaagaataagaaggaaatttcccatccaagaaaaggaaagaaagaagatttccaatccaagagaaagcaaaaaaagaaaagaaggaaaattcccaatcaaagagtgggagaaagccaaaagaaaagaaagaaaattcccaatcaaagaatgggagaaagtaaaaaaagaagaagaaggaggaaagaaagcccctgatcggtgatctaatgaaaaacataaggaatatgcagagaggtctttggatcggacaatatctgaacaatacagaattgtcaccaaatgaacgaaaaaagaaggaaagggaaccacgacctaaaatagtcttct

SEQ ID NO: 94055 - DNA, 473 bp, Glycine max
  unsure (1)..(473): unsure at all n locations
gatcttaagtcaccgcggctgcagctacccnatgacanaaacatganaatacaatttataagtccttactacaaagactactcanaatgcctcgaaatacaaggctaaaaccctatactactagaattgcaaaatacaggcccaaacgaaggaaaaacctattctaatatttacaaagataagcgggctcatacttagcccatgggctcgaaatctaccctaaggctcatgagaaccctagggccttcccttggatctctagcccaatctacttggagtctgctacccaatgcccttgcgggataggatngcatcanaaaagagcaatagtgagtgtgctagagagaaaaaagaaagaagcatctncagctgaagggagagaagtactatatcccttggtaccttntaggaaggacaaaaaaagaaatctggcacattntcttgacatcttcaagaagctagagatcaccatg

SEQ ID NO: 94056 - DNA, 451 bp, Glycine max
  unsure (1)..(451): unsure at all n locations
gacacttgaaactaagcttctcccgttggtcttatgaacctcggaaatgaatttgctatctcttcctctagnggtgcccctcacatagggtagccaagttgtcttatagcaagaacgagattgtaactgatgcaacccctcgtccccatcaagggaacattcggaaaccttccgcacgaaataagaactctgactcttccttctttccatcgagggaaccagttgatagacgctccttctttgtttgctaagagttggtcccaatttgcgcctcctttctttgtgcatgagcgatgactntctagcgggcaagcatgccttacctcttggcgaanaacgtgcgaaacaaaccatacataaagagctggagtacagcanacaatcctcgtactgctcttctcacatcttcggtcanaggtgtcatatangtcggctagcatagcgacaaccg

SEQ ID NO: 94057 - DNA, 437 bp, Glycine max
  unsure (1)..(437): unsure at all n locations
actcgtctggaaattgatgatatgatgagatgacagctnttccttcagcagncttagactctgggaagtacttctttcagaaattttcaaccacttcattccaagttctaagactattacctttaaatgaatggagccatctaatggagccatccttttgcttctccagacaaacaaaatgaaaacaagctcaatctaatagcatcctcaggcacaccagctactctaatagtgttgcaaatctcaatataagcggctagatgtgcatatgggtcttcattgggcaaaccatgtaacanattattctgaatcaattgaattaatgaatgtggataggttatgttgtgtgctttgaacctctgatgcaagctccattggagcttgtangcctangatcttcttcatcaatggattcctttgcttcttggaagaataat

SEQ ID NO: 94058 - DNA, 312 bp, Glycine max
gtccgactctcaggcacttatgataggcggcgatgaacccattactggtttccctaagctctctggcctttctttacgccgcattccatgccttgcgaacttcttggagtaccctcgcggttgggtcacttgaacctcgtgcgatgaaaggcgtgatgctttcgtctcatggtactcctctcatgggacagccaagctgtcttatggcgaggacgggattataattaatacaaccccttgttccatcaagggaacatttggacatccttcgcatgaagatagaatcctgattcttccttccttctagcgagg

SEQ ID NO: 94059 - DNA, 421 bp, Glycine max
  unsure (1)..(421): unsure at all n locations
agctntataagtgcgagtntaagacacgaaggccatgtctctgctatatgcgaggatgactccccgaggagatcggatntggtacggctatgtcctcccggtttccgacttatgaaatggcgagtggaggaatgcccaagcatttgcacgacgagcttaatgtaaccttttgtagctttaaaactctatggtttggcctaggctttagagtttccttttattaaggcattatgtcttttgttcttgaagttataatataaagatctttcttcatttgttcctacgcctctacccattctcattcattagcatgtttatttctttacgcttaanacgccagatacgacgatgagtccctcanaggtactaatacccgggacccggccgtcaatttcgagcaagtagcggatcggatggagag

SEQ ID NO: 94060 - DNA, 402 bp, Glycine max
tttggtttgatgaatttaccatgcccaaccagttttataaatggggcatttgtattgaatggtttaatctaagcatgatggttgatataggttaaggttctttcttatattcatgcttaatatgaatcaaagatggtagaaaaatggattgatctctaaatttcttatgagcaatgagttcaacaatgtaattgattattacaaggttttgtaatcaattacaaagcattagaacaagtaacaaaactctcttctacttgaaatttggcaagaagtgatgaattaatcgattagcagtttttataatcaattacaatagtcaaatttagatgaaggaagacttgatagcttgagataatcaattgtcatttattgtaattgattagattgcgtctagaaact

SEQ ID NO: 94061 - DNA, 402 bp, Glycine max
  unsure (1)..(402): unsure at all n locations
agctngcctntatgtatngagaatattgccacagatgttctgacattgcttagnntttacttcccgggttgctttctggtaatctcaatttctatattaattacatttgtgtgatatttatttatttcatataactgtttctataaagtactgcaatgtcgagtagtgctctagaaaaattatgaaagtacttgacattgaccagttgcgttttttaggagtaatttgagatttgagaagccttttgagggaaaagaatgtcaatctccgaacttggcttcagcttttctatttttgaaatttcctttagaccctttggaagactttcttatataaacccctgcagaaaggggaagtaagggaatttaatcatcgctcgcatcactttgtattacttgcttg

SEQ ID NO: 94062 - DNA, 404 bp, Glycine max
  unsure (1)..(404): unsure at all n locations
ntatctgaagaactcgccaagcgcacttactgtgctaagctagttcatcctttgaggatgaacattcatcctcttgctgaactacctgtggctaagcgaggctgaatcgctaagcctaagtgaactacctgtggctaaacgaagctgaatcgctaagcctaggtaacttaaccatattttttgtgatagccacacgctaagctgagcattcctgagccaagcgcaattggttgcggcatccgctaagctaagcgagcttcactcgctaagctcccataacttagtaaactttttgctcagtttagtgctgctaagcgcagcttattcttggctaaactcaaatccatgcagctaaccttaggcttagcgggctcctcgccagctaagcccaatttgaaaacact

SEQ ID NO: 94063 - DNA, 459 bp, Glycine max
  unsure (1)..(459): unsure at all n locations
atccttaagcacctgcggctgcagctttgttgtggataggtctatatggataacttttaatggctntcgagatcatccattacctgagatgcaagagaagtggtaatcggtgagctagataatgttatgtgtggagaatgtgcagtactcagtcaagttaaaccataaattgatngagcctattattcttgggagagggttgaagcaaggagaccctntgtctccttacctattcctcatttgtgttgaagggttgagtgcccttattaaaagtgctcaacaagagggaaaggtgcatggtatatcaatttgtcatggtgccctaaacatcgcacaattcattattttcgatgactgttatctcttttgtagggctacttcanatgaggcaatggagctcaagaaaaatgtggtgatgtatgagttgngcctcggacaagcaataaatttaagtaaatc

SEQ ID NO: 94064 - DNA, 372 bp, Glycine max
  unsure (1)..(372): unsure at all n locations
tattccanagaaatacagggcatccttggcttatataagtataggtcaaaacagaaaaaataacagaataaatatccatatagatttaggtcacaacccaacaattcaccaccttgaactaacatccatataagacacaaattgcaccctccaaacacacatgatcttaaccccaacaacctacattgaacaagcttaagcagtaatcaaacttgctctttggaactggctttgtaaacatatcagcaggattgtgcagagtgctaatcttatgaaccttaattcttctttcttaccgaatgaagtgatatctaacatctatatgcttggttctgtcatgatgaacctgatcctcaaccaagcatatagcac

SEQ ID NO: 94065 - DNA, 359 bp, Glycine max
  unsure (1)..(359): unsure at all n locations
gtattttttaactacacccgttgattgtgttgagaaatggccactcaatgaacaataatttggtcttctaaggtgatattcacgagggaagagttcttccaaatctgtaacgagacaatgtattgcagaaatttactgacccaaataaatggaaattttttattcattgcccattgcttatatntccaacgatntctggattgaagatntgcataatagagttattagttttagatagtgtctgtcttgctatgcgatgaattcggtctgtgaaacaaagtaactagtgaggagattcaaacgggtgctaataatttactattaaaatatcttcttttataaagatatagtaaataaat

SEQ ID NO: 94066 - DNA, 382 bp, Glycine max
  unsure (1)..(382): unsure at all n locations
ttgatcaggactaggctagagtgaaggaagtgtagcacaattcaacacaaccgagcaataacacaacaagttacaaatggaaaccgccaccacaaggagcttggaagtgcaacgatgatgctagctgatgcaatcctaccccgcatgggcattggatagaaaactccaagtataatgggccagagatgcaagagaaggccctagggttcttatgagccttanggtagatttcgggcccatgggctaagtacgagcccgcttatctttgtaaatattagattaagggctcattatttttgggccttgtatttaaggctccataatgtacgtagggtaccctagaaatataggatttttcagccctcgtattttagggcaccta

SEQ ID NO: 94067 - DNA, 513 bp, Glycine max
  unsure (1)..(513): unsure at all n locations
agcttcagatcgttctatagatatgataatgcgagcattgaatgatagactaatgctngcggaaagaggcttcttggacgttgatgggcttcaaggaaggcaatggttcaagcatcttgtgagtgtgttcgccttctatgcctttgaatntctagttaaagcttttcattaaccaagttgacaaatgtgatccctctagntccaatgggatgattaatgaanatgctagaactagcanaatttcacgtttgtggattcttgctctntagccttaccaacatccaagttcagagctgaatagtatttgatgttatgtttcaccaaaatgtgaattttatagtgctagtgtatgcctatatntctattggatcttatatgagaattggtgcccttaatattctagttgtatgttgaaacacatgaaatgtagttanngtaagcaacctgctagatccncaactnntagttatatttcatcatttcatggtataagtatttaattctgccatactg

SEQ ID NO: 94068 - DNA, 436 bp, Glycine max
  unsure (1)..(436): unsure at all n locations
tgtctcagcgtttatgcgagacagagaccaacatgttatctatcatcgccaagtaccaagaagagttgggtctagccacggcccacgagcatagaatcgcggatgagtatgcccaagtatatgcggaaaaagaggctagaggaagggtgatcgactctttacaccaagaggcaaccatgtggatggatcggtttgctcttaccttgaacgggagtcaagaacttccccgattgttagccaaggccaaagcgatggcagacacctactccgcccccgaagagattcacgggcttctcggctattgtcagcatatgatagacttaatggcccacataattagaaatcgttaggaaacttgtatggtctctcagaccttgactagatatgacnttccttttgaaataaaatgagttggtcccaggtttctactccaaaa

SEQ ID NO: 94069 - DNA, 446 bp, Glycine max
  unsure (1)..(446): unsure at all n locations
gctatcanttactacatcatcgttcgaacattggaagtacttaagtgattgaatgctttgcaatggtatcgaggatccatatactataaaacatggatatatacaaatcattctttctgacattcgctcaaccaatatagaaggctatccggtaattttattaacccgggtgatggtgtaaggaccgcgggctggggatcaaagctaagccgatgaatcgctttcatttgtaaagaggccttgcaataatacttagagtttaatttatatatatatatatattacttgtgcannaataattcatacaaacatgtaaatgaaattgatatttaattatattttggatntatggataatatnttntttccggatcataatatcatanatcatagatatttctcaatctgtctcatatatataaagataacgacatcttacatcattac

SEQ ID NO: 94070 - DNA, 385 bp, Glycine max
  unsure (1)..(385): unsure at all n locations
aattaaaaaattaaaaaaatcaatgctattatagaaacaaaatagtatgtgtggcatgcttaatgttttggagaggcgagtagtgcttatcagatgctacaatttgatgatgcagctcgtgcacatggtcccctcaataccaatatattaattaattaattaaaggatagcttatgttgttccattgaatcttaatttctgccacacaagtctgtaccaattattcttgcccccaagagtctttttttcttatgacatccaaaactatgagtagataaacatgtgtcagaaaataaaatgaactaataaagcgaaatgaattaaaaacaaattatgggaacattagttgaagggttttttntntaaaaaaaaaaggggtaaaatc

SEQ ID NO: 94071 - DNA, 245 bp, Glycine max
  unsure (1)..(245): unsure at all n locations
cggaagccatgaaatggatgaatatattcgctcacactctgaatgagagtcaagagcttccganggtgttagctagagccaaggcagtggctgacacgtactcngctctcgacanagttcattgatctttttattactgccaacacatggtcgaactaatgacccatataattcagagtcattgaggcgttagtattgtacttatgctttgactntgacaagatgtgatanaccatgttgtttaa

SEQ ID NO: 94072 - DNA, 380 bp, Glycine max
ttatctcttttatcctaatgggaggggatcttcctagctcttgagtggttcaagaacatcctggctatatcaaaggactttcacaacctttgtggggtggcctcgcccgaaagagtgaatctttccttcctttcaccttcaaccttttttctttcaaaccacaattccagaaaatccacttctgcccagaattatcttgtggccatgactctcgttttacgtgctcaaattaagtgattcttgagcctaaattgaatttcaaaacaagatctttcacctcgttttggaatcacctcatatggagccctgtagctggagttattgccatttctatattttggtctagccaccacttaacctatgttttatcatctcattct

SEQ ID NO: 94073 - DNA, 462 bp, Glycine max
  unsure (1)..(462): unsure at all n locations
atccttaagcaccgcggctgcagctctaaggggtntctaagaagcttctatgttgtttctatgaaagttctcaaggaagctacctagtctataaatagaagtatgtgtnacactcgtagtaactttgatgaatgagagtcctgtgagacacaactcaaagtcaacttctctccttttctccttcatttcggctccccctctctcttctctcctcttctttcctcattgaacatcctctcagcttttatcaaggctatctggtgggaagctcttcttcatggttattccctagggagggcctctctcaccttttccttgcttcactgatctcatggtggaaataccttaaggacctatggagctaagaccacctcataaagcccacagcagcttcatcagctgccgccagtactcctcttaacacccacttcaaatgtctaagggcctaatcaattcattatg

SEQ ID NO: 94074 - DNA, 204 bp, Glycine max
ttattttcaaaacaattacccatttcttgaacatatcctataattcaaagaaaaacatgaaaagtcgtacgcgtacacaaaattgacccaaaatattaaactaaaaatccgacgaaacttacaacattaacaaattaacacaactaacaaattaacataacccacaaaactagctaaacccaagaacactccccctcccccccc

SEQ ID NO: 94075 - DNA, 250 bp, Glycine max
  unsure (1)..(250): unsure at all n locations
tgcagcttaagcatgcactatcttcttataagcattcttattatgtgtcttcttggaattaggggatgtggcaactnttttcagtaatgctgggtttggtgtggcaagcatctttgctacttcaacgaatgctncttcagatgaaacatttaagcatgcactatcttctttataatcattctcacttntttctttatcagggcgaggtgcatcatcttcctttacagtagtcacactctgtggggttata

SEQ ID NO: 94076 - DNA, 308 bp, Glycine max
ttggaaaaccattattccaacctttccaatttaatgagaagggttaaagaaaaattatgggacttaaaaaaacttaattcttaattggaagggtaggccaatattattggggattacttaaccaaaatggtttgttacttaagggtcatccagaaacctccccaacttcagaatatactttccaaatggtaacaagaagtacttccaaattaattaatgttattaatgaagatagtgaccagaactcaaaaaatacaactgagataggatcagtatcaaaaaagaatataaatccaattaatttcaaa

SEQ ID NO: 94077 - DNA, 439 bp, Glycine max
  unsure (1)..(439): unsure at all n locations
gcttactaacacccaatcaccttcctgaaaactctcttctcgtctatgatggtctacgaagtgcttcattctctgttgggacttagtcaacttcttcgttaagctagcaagtattgtttctcgattggtcaaccaatcatctacatctttgacattcaatgcaccgatcaagtattggggaatcctgngaggtttattaccaaaagtggcttcatacagggatatcccagttgctgagtgaatgaatgtattataagaccactcaacccatatcacgaaacgccctcatgttgatggtcaacgatgaacgaaaaccctcaaatattgctcaacaacgcgattcatcacttcagtatggtcattagattgaggatgatacacgaagctcatttgctagttgtccactgaggtaaacaactcttgccaaacgactgacaat

SEQ ID NO: 94078 - DNA, 355 bp, Glycine max
gattctaaaccaccattcaaattactaattcttttcatagtaacttataagcataagataatggaaaaaaaataaataaatgtggcataatagaaaaaggtaaatacctttcaaagcctaacttgggtgtggaaattaacgccttaatgggggttttggttggaatggtcaataaataaaaaccttgaacatctattctcttttctttttcttggctgatatattattattattattattatgtaaggtttgttcttctatagattcttagtttggtttgaaacaagtgtttatccctaaatttcaatttttttaaaacaagtgcagaaaataaattgtgctttgttaatggatg

SEQ ID NO: 94079 - DNA, 460 bp, Glycine max
  unsure (1)..(460): unsure at all n locations
taccctgcaatgagacacacacagatacacaaacacacacacatagagacaaacacacgcagacacaaacacaaacacacacacacataaagatacacacacacacacacacagagtcacacacacgtaaagacacagaacaagacacaaacacactgagccacagacacacacagagacccacacacaaagacacacacactgagtcataaacacacacatacacaaacacactcacaaacatggacagacacacacacacacataaagagacaaacacacacacacacagataaagagacaanccacaacacncacactcacacacacacagataaagagacaaacacacacacacacacacaaagacacacgcactgagtcacagacacacacatacacaaacacactcacacacatagactaacacacacacacacacatagagagaacaacacaa

SEQ ID NO: 94080 - DNA, 451 bp, Glycine max
  unsure (1)..(451): unsure at all n locations
actacgcttgaactncatcatttttagttgaaatgtcaattttacttatgcaatcttaattctcaacacactttttggatgagtcttccaaggattgtgttgccttctctaacttttcttccttttccagcaataaagtaaagctacaaaattgagtctcccaatgtttgatataagttttgtaagaccatctttaatttgaacaagtggcttaaaggtgtaaatgcacagtccttccaagcgagcaactcaaaggtgtaacaccatcttagaatttcgtatgagcatcttcattaaaaatggaagacttgaacgaaaatgtgtggcttgctcctcattgttctgggaatagataacgatctatataatgagcacaatgtatgaaggatggaaaaactccaatttatgtaatcccaggttaagacttgtagttcacactaatcaatgacta

SEQ ID NO: 94081 - DNA, 519 bp, Glycine max
  unsure (1)..(519): unsure at all n locations
agctntctctnttctctctntgtcttccanatgttcttcattcttcttnctctnttcacttctggtctttcattntcttgcacaaaatntcatggcttttccattggtgatgatcatggaaggcaaaacacttcattaatccaaggatccactccaagcaaggttgaatttgagttctagttaagtatttctgatctttgtgaatgttcatctttctcttcaatcctattttcgattntaatgattatgattatgcttangattgaaaatggattaagctatggattcatttcctaattctgaaatntattcacagattgtttggatgattntccctacctaattgcgatctcaaacaatntaagaaattattgatngaatnttctctaatgcatttgactgaactntcacattgaanatcatatcattcataataactgtgataatttgatttgcatttggttggtgaattgaattggcgctattaaactngaatngatntcgttnntgtctattcta

SEQ ID NO: 94082 - DNA, 128 bp, Glycine max
tgcataatttagatatactcaaacatctatttaattaatatttgattctggtatgaaatttcagaagtttacaatgagatgtatttatattttagttagaggcaacttaggtttctaagatgatgtag

SEQ ID NO: 94083 - DNA, 510 bp, Glycine max
  unsure (1)..(510): unsure at all n locations
agctntcttaaaatagaggtaaaatatgtcaaattataaatgtaaaaataaaattcatcanaaattaaaaaaattatacaattaaaccttaattttatggatagcttatgcatcagctggcaatgatgaggactntattattntcaattaagaatacattgttaaaaggttntgttatcatcaagtagagactagatcaacttactggtttaaatagtaaacgatcgagtatatcatggtactatcatcatcaccataattaaatgtccatgaacctatactaaaaaaaacaagtcctccaaatactgtcggattaaggccacttgaaacaaatcattaattgtagatggatactcttatcctcatgaatattaaatanngtggttaaaatggctcccataactggagtaataaanaacaataattggtttcaacaacaacacaaattacaatagttattcaatttaaaaaatatggttatcttaattttcgtggataatttgaaaagta

SEQ ID NO: 94084 - DNA, 398 bp, Glycine max
acgctttataaaaaagaatgaaagtatttcgcacaagtattgtttatgtcttatttttcaaagattcttctatttataactttcatcttccactgtgtggtgtctctcaacgaattgattcttcactcaagatctctttctggtgaattgtggttgttgaagcatttaattcttgcattaaatgtatgttccttcttcatgcagagaatccatgcttataagttgacatgacaaacacttcaatagaaagtcacttcttccatcagcaagtctacgcactatagcatatcttttgatgaaaatcaacactttcagacataagaacttatttattctttctaccactctgattaattctacgagaaccgttatgcgcacataatctcattagaagaata

SEQ ID NO: 94085 - DNA, 390 bp, Glycine max
ccttgatactacgcttagtggagaaaagaaatgagagagagagagaataagcatcttgggaatgaaagaaagatagggagagaagttaaactttgaagtgtgtctcacaagactctcattcatcaaagttaccacaagtcttacacatgcttctatttatagcctagatagcttccttgagaagctagtgttacacccatccaatagctaagctcacccgcatgccaaaatacatgaaggaacaaagcttccttgagaagcttccctaagaagcttccttggggagcaagtgttacacccgtccaatagctcacccccatgggaacacacacccctccaatagctaaagtcaccccccaaaatacatgggagatagaaaaaagtccccac

SEQ ID NO: 94086 - DNA, 460 bp, Glycine max
  unsure (1)..(460): unsure at all n locations
agctggaggttngacanacttggnngaacttggatctttacatgattgacattgnggctgaaacagtgaatctatagttgtagacagaattttgaaaccttgatctgctgacttttttcattttaatttaattcattttactaagcctggtattattaaaatttaaaactaaaactcttacaagttaattataaactttctctagtttactttgaagtggtaatgctctatcatacaacccctatactttcatgtttgtccttctgtgtcatcattntgcttagcgaaattcttgcttagttgatattagtcactggattaagattgcatgccttcaaagatcatatttattactcccgtggctagaagaagcaaacttgtgtgacatggaatgtttgggctatgaattgatnntacctttattatgaagccttgtctaactaaaatggcttctttggtc

SEQ ID NO: 94087 - DNA, 350 bp, Glycine max
acccagctcgcccaggcgagcaggggtgcttcctctataatcaatagccttctggaggaatcttctggagggcccaagtgggcctggttgctatttgcacccccatttttactaagtacacccccctaccttttttttggtgattcttttttcgtaaagttacggaaacttacgaatttcgtaacgatacttgttttctttccgcaatgttacggaaccttgcggattacataatcatccccttttttgacttacggaatgttacagaacctcactaattgtgcaacgatgcttccatttgatttccggtgtgtcacggaaccttacggattgtgcatcaatattttctt

SEQ ID NO: 94088 - DNA, 499 bp, Glycine max
  unsure (1)..(499): unsure at all n locations
agcttcttacatagtccgtctttgcttgaccttctttatgcttaanaacagaaacattangcatangcaaaagatcaagaggagttagtgggttaaaaccataaacaacttcaaaaggagaacaattagtggtgctatgaacagctctattgtaagcaaattcaacatggngtaaacaagctttccaagtttttaagttcttcctcaaaactgtcctaagcaaagttcccaaagtcctatttaacaacttccgttgcccatcggtttgtgggtgacaagtggttgaaaataacaatntagtgcccaacttgctccacanagtcctccaaaaatggcttaagaacttagagtccctatcactaacaatgcttcttgcaaaccatggagtctcacaatctccttgaaaaacanatcagccacatgggaagcatcnatcaatttnttacatggaatagaatgagccattttagaaaacctatcaacaaccacanaaatggaa

SEQ ID NO: 94089 - DNA, 348 bp, Glycine max
  unsure (1)..(348): unsure at all n locations
gaaaaccaatggaaaaatgagagtgtgtaatgaattttggtttttggcttggctgagccatccttaataaaatgaacatttctctctatattattaactttggaatttgagtcataccttatcccaaactagacagacatgactttttatattggtaatatttataaaatttttgttatatgataagtataagttatgcaatagttttataaatactctatagaagaaaaaaaatgtatttatgcaatagttatgcaatagttttaatcagataaaaatatttatgtataaatttgggttgggttggattagattgaattntaaaatgaaatccaaaatcttatttta

SEQ ID NO: 94090 - DNA, 469 bp, Glycine max
  unsure (1)..(469): unsure at all n locations
gctatgactggggataatggggattatattcagagattaactgtactgactngagttgacccaaattatgatgagtcattaaaacactgctatttttacggatccacactcatcccaaataatatcctttcttttcctttcatggggggcaatcaggtaacaatagcaggcagtacttactttgattagctcttcccaaatggaaatcttaattgctaaatggtcggaccaaaatctttatttggctgaattgagtaatatcanttggatgtgctgtanaatgatacagtgagaagaatgatacttttcatattggtatctggtgaactcgttaaagtgttgcatatctgctaagtcataattattntttctctagtcattgactggtacttgccttacgccttacggtgcaagaacaacggaatgggtggtgtggaaatatgcttctaaagcacagaatgagaagtat

SEQ ID NO: 94091 - DNA, 447 bp, Glycine max
  unsure (1)..(447): unsure at all n locations
ggcaatatttgtgttcttctgctctattcacgagcctcatttggcgttttggggtcctttacaccaacctcatttaccttcccatatttcacaccaatttaaaggcataacacataaggcaactttaaaggcgaccataactttccaacactggagtcatgcctatagccacgaacctagggtttaataagtgttgggagaaatcgtgacttaaggcacgagtttaaagtcgtgattagggattagttggttatttaaaaatgttataagttataagttaacattatttataacaaaaatattttagggttntagttagtattatcatttatctaanaatgttataagttaaaagttntaattatttataacaaaaaactttagggttttaattattattattatntaattaanaatgttataagttataattatttataacagaaa

SEQ ID NO: 94092 - DNA, 453 bp, Glycine max
  unsure (1)..(453): unsure at all n locations
tcactcctacatctcatctctagcatgcattntctttctttacccactcctcacgtttggttttttagggaaaacaccataactaaacgcgccggaagggatccctatcgcaccagaacccaatctagaaccattggtgaacaagaagagacacangaacagatgaaaacccgacttgtcggctctgaaagaacanatgccttcatgatggaggcatgtangtatgaacagctcatgagaagaacgcgccacttgccgcgtgtcagtcggctgccgaagcgacccgactctttggcactaccaccatctccccaacatatngacgggaaggaccactgggccgatggagcctcactggatcaacgacggctacctatgatgcgccaatatcacaccatctgaagagatgcgcccgtgcttccgtcatgaaaacctctacacccacaatcataa

SEQ ID NO: 94093 - DNA, 167 bp, Glycine max
  unsure (1)..(167): unsure at all n locations
aactttgaagtgtgtctcacaagactctcattcatcaaagttacaacaagtgttacacatgcttctatntatagactangtagctttcttgggaagaattcttgagaaaaaatccttgagaagcttctttgagaaaacttcgagaagctagagcttagctacacaca

SEQ ID NO: 94094 - DNA, 482 bp, Glycine max
  unsure (1)..(482): unsure at all n locations
cgagtctgtcagaataanatttcatactntaaattgcccgttctttataaaaggtagaagccttgtaatagaccaaagttccatgattaaataggaaccatcgggacctaccaggtttttgagaatcagcatgagagcgctnttttctgctccactgatcagcataggccatatgagctagaggagtcactgcatcacgcacatttcttggtcttgccaagttatcattatttgttcaccatccanagtccacttgaagncacatcaaccccctcatctaattcttgatgggatgcaacactggcattacttttcttttcaaatgaccgaggaagaacatcagccacctttannncgtttgtgccaatngattntcttctattcctattaaatgataattanatcataatcgccattctaatgaactaanagtaatggatataagtctaagaaactcctttgtgactctcaactgtctcatc

SEQ ID NO: 94095 - DNA, 325 bp, Glycine max
  unsure (1)..(325): unsure at all n locations
acccctattatagcttagctcacccccatgacaaatacatgaaatacaaaaaaattctactacaaagactactcanaatggcctcgaaatacaagggctaaaccctatactactagaattgcaaaatacacgccaaacgaagaaaaactatttaatattacaaagatagcggctcatactagccatgggctcaattacctaagctatgaaacctaggcttacttggatttggccattactggagttttatcatgccttgcggaggatacatcatcctcactggaggattgactcaattgagtctatacttggctctcctacactg

SEQ ID NO: 94096 - DNA, 368 bp, Glycine max
  unsure (1)..(368): unsure at all n locations
gaagtatgaaacaatgcaattcctttggatgacgtcctgcattgtcaccgttggagcctgcaatgcactatctgagaagatgccaatactatatgtggagatatcttacgaaaacaaacaggtagactgtgatgtggatgatggccagactgtagagaagatgtacttatatataacacttgctgggagaacgaaagatgcaccanaactcgtatggactctcgangtgcgcactctggctatggaagttcttgtaactaaactgttcactagactgtaccacttaaaggaactattgattgcgtccttgcgcgtgctagcttaaacatgtgagttattgaggaaccaattaaagattaccatataac

SEQ ID NO: 94097 - DNA, 522 bp, Glycine max
  unsure (1)..(522): unsure at all n locations
gtcccctgcggcatgcaagcttagctagcttatcttggtaggttaagtttatttgtgagtntatanaatagtggctttcataagatcaaataaattcttccatgtgctccctttgtgaattatgctgagaggaaatttcaaacaacacatgagtctgagcgggttttaaggttgagactgttaagtgctcanatgtcagcttcaagatgtgggaggataggacatgatacaacctgtgattcatgggcctcaaccctcaataggtatagtaagaccaccacatgtctgtgcttccaaccaatgtctacgtggcatgtattcaagtttttcaatttatgataaataattaataacacttaactatatgtcatcatgtaaagattaatgcagacatattagtctagaaccacttaataatttctcgtatttgngatgtagntgtgtatttttttccaagtatctaagctctgcttgtagtgcggtattngctgacttatgtcgaagtattacatagattcatga

SEQ ID NO: 94098 - DNA, 452 bp, Glycine max
  unsure (1)..(452): unsure at all n locations
gcncgctggcaagtgaaatcgaattacttgacttaagttttcaacttttataataattnacactagaatcataaggtacggtcaaaagagtattctatatgaaatatatctcgatacgagtcctcgaactatagagtatcaacattgctaagaacaagaaatcacgaacaaccatactatttatgcaattaaggcaaaacaccatattactaacatacccagaattataaggttcttataataagtatacaacgtacatataagaagtaagaatttaatagttattaaggatgtattaaagaatcacaaacttcaactactacattcacgactacacacaanataaagtgagttaagtagtcatgcgtttacacatcaagaaagacatactcatccaagacatatatatggttcataaggttntcacaacactaatccacacatcaagatag

SEQ ID NO: 94099 - DNA, 516 bp, Glycine max
  unsure (1)..(516): unsure at all n locations
agctngatcttctggatattgtacatgaataactgattcatttaatctcattacctngcctgttgagtggttntctaaagatccatcataaccttgaccctcttgatattgcacatnaatacccgaggcatttaagccattattttgaaactcactaccaggctttacctcagtacttaaattatcatacacattcccccgtaaaatccccagactgatctcccaactcactgaaaaagtcagaatatgatcccaacccgccaactccattcanatcagcgtgaaaagaatccaacccacctccttaatcccagaataccgactgtatcgctcgtgcctacagctaaagcggatgtgacttctgatcccaccccactcccatcctcaccgggatccaccttactatcaaacccaactgaactcatggcgggcactgaatntcccttctgttcaagtcctacatcggattccacattacctanatccnctntgactntaacaccactctcagcagca

SEQ ID NO: 94100 - DNA, 454 bp, Glycine max
ggaccttgaatctagctctgtccgttttatttttcctttggctctaattgctggcagattctctaattccgggtaaattatgttgcaagttgtaacaagtgtggtgtatggagtctgtgataaagataatgcatggccatatagaaaagaaagggaagcatcagaagagctttattttggcctgaaaactgcacaaggtcttctagaatttaagtgccagaacaaactccacaagcaaaaatgggttgatggaatagaatttttacttcgtagggtcaactctgtcgaagcaacagagcattctctagaatttttaagtattagtaccagtacatgatttgtttggattgtatatgccgataggatttagaagagtgaaacataaaaaattttgtcaaacaaatgctacctctacattacataagcaaagaaacaatactgttcactgtatggg

SEQ ID NO: 94101 - DNA, 446 bp, Glycine max
  unsure (1)..(446): unsure at all n locations
acaaacattctntanattaaagtggcaaccatgtctctatttgcatcacacacaatggttgattggttgcatacttgtccaaggctacatganctccaactntagcacgaataagtgtttcataatatntataatatttcacactagcattggctttcacatcatgcaacaagtatgtaggctgtggattcttcaacatgatgcacagattggataaaagttgtcatgcattggctgacaaagaagacatcatatgtgcaactctcanagatatattgtgcgttactttctatcttggataaaacatagtttagaacaatatgtcatatagcataatacaaaacaatctattttaacgagagagaatacatagttcgaatagtattaaaacaatgttgctatacataacacataaagattttgtgaaaatagtagtcaacttcatg

SEQ ID NO: 94102 - DNA, 419 bp, Glycine max
ggtctctactaccgccattatactttatgctttatgccttctccaccaaatgaggctcgtgctcatccttatcaacaaaagctggagaacattgggttttcattcttgtttggtgctcttgctggttttctcataaccattgccaggagttttgcttttggatgggtattttcataaacaaacaatggatgcatgaactgatgaccctgtcaccgagcaaactacgaataaattgtaaaatatgtgtcttatgtatgagcaataatatgctatttatactatgaataatttgtaaaatacatgccttatcctcccataagaaaaacaaagttattattcattttgtctctatacaacacaaactttatgtttattacttgaattaaacaatgcatgctttatttctccatgagcacttt

SEQ ID NO: 94103 - DNA, 511 bp, Glycine max
  unsure (1)..(511): unsure at all n locations
agctntannaattgaattanaacgttcagatactgctggtaatcgattaccatatatgtgtaatcgattacatagggaaaattntgaattcaaattntaatagctgttgtaaatcagttttggacactggtaatcgattacatccgctggtaatcgaataccagagagntaaattcttgtaaaagactttttaacttaattttcttggccaaacctttttctacttcaattggaattcccttcctatntaatataccctttctaagactctatagactgtcttgatcatccatcttgaatatctttaattgctttgtcttgaataaagctttgagacgcatttgatcttttggcatcatcaaaacatcggcttgantctttgtctacaaatctcccctttttgatgatgacannatcctgaaatcaagacaaactatatacangatgatagcacgttcacacaacccttactccncctatctttcgcatgtatgcttaactntacttaatg

SEQ ID NO: 94104 - DNA, 435 bp, Glycine max
  unsure (1)..(435): unsure at all n locations
atgcgcatatttccttacaacgttctcttgcacaagatatttaaccgaanaaatgcacccatatacaatcaaggcaacttccttacctaaaatatttacacgtaccctccagggggatttgttacttacatcacacacatctctttggcttaaatcacattcatgcctacctaaaacaatttggggcaccaaaaaatgcacatgtgcacatcttggtggttctaatacctatacatacgcaaacttcatgatgaatcttgactatccacacaataaggtgctacatttcatgctctttttttcaagtttttgctacctaaagccgcatgcaaattcaagcatattttcctttgctgactaaaattgtattcaaaataaaaggtatatnttttgtaataatgtttcttcacataacatgcaacgtatttatatata

SEQ ID NO: 94105 - DNA, 434 bp, Glycine max
  unsure (1)..(434): unsure at all n locations
agcttcaataacaagttaagtattaaattatacactatttagtcntatttggaatttcaaacatacataaattgatgatcatatntacgttgatgttttttcctaaccagtgcaattaagacattaaaaactacttatgtcggtaaatctgaacaacctacacctcactagattgaagtaaaggttagtcatttaaacaatgctactttcggacttctgacattttgtaactctggaaatgtctatggttaaatatatntcatattcaatttggagtcatgttcaaaccggaggctataagtgtggctattatgtcatgcattggatgtggaacatagtcagtggcggtttgaaaaatgaatggaccaaggtatatatactntaacaaaattcaatggttaccaactgatatcagtttttaatcatttaacatg

SEQ ID NO: 94106 - DNA, 390 bp, Glycine max
  unsure (1)..(390): unsure at all n locations
ctatgtttttatgacatttgaacacttaatatttcttttattatttgattagtatgactgaacatgatgattatatttacttgctcttggttgtttatgattatgtgttgtaaacttaattactttaatgatatatgactagtgatatgtacttacattcggtatggggttttatgtatatatatnttttaattattcatatatgttttatttgaatattgtggatgattttctagtttgtttgatgttatgaatgaagtattgtctttctaagtttgatgaatggttaagttatcttgtttgatcgttttctattcttttgtatggaagtnttatatatttgatctattcatgtttctggcttcatgattcggttatatacttcaatgt

SEQ ID NO: 94107 - DNA, 223 bp, Glycine max
  unsure (1)..(223): unsure at all n locations
agctttatgcatggcttgctatggtggtgagcttcttctagactcagcctcttgatgaagtggcgtactctcccaactcttcttcttctgcattccgctgccattaaaantgaagaagcacaggactccattgatgataaagatccaaggcctacaagctccacatggagctacgtcaccaattcatcacggatgttcgtggacatgccgatgccaaccttga

SEQ ID NO: 94108 - DNA, 432 bp, Glycine max
acctatgaatactcagcttgtcgtactacgaaaaccccacatgagctgactctatgctcgcagacctggctcgctccaagcaacacacccaatccctcaaactctttgtccacgcccactcctccttcacccccgagcactacatgctctacacggacataagcgtcgacgccaacgcgcgccgcgccgccttcggggcccagcttcacaccctcaccgtccggaccgggctcggtgcccactcccacgtggtcaactccctactctcgctctacgccaaggcccatcgcgaccatccctccgtcaaactcacgtatcatgaaatctaatgccccgacgcgtattcctggaccacgctgctctccgcttgcgccaaactagatagcgatgaacatgccctgaaagtgttcgatggaaatcccaagggacaca

SEQ ID NO: 94109 - DNA, 411 bp, Glycine max
  unsure (1)..(411): unsure at all n locations
agcttcatacttacgaatcaactntattcgtataattcatacggatcaacttcattcatataattcatacggatcangttgatccgtatgtgaaaaatctacttacggatcaccacttcaccagaanataaaaggaacaacaagccagggacatttttngcattaatcaaaaatgtggggtgcacctagcaacacccttttangggtggccacaagtgagaatggttagcgaatagaaaatactctgattanaccaatcaaactttntcttcctacacctagcatttgttcttggtaaacctagcattanggtgaaaaacanaaaatacccttacgtataacctattcggaatatcaatccgtanagtcattatgaattcgcagtccataaggccatggacctccgcgaca

SEQ ID NO: 94110 - DNA, 332 bp, Glycine max
  unsure (1)..(332): unsure at all n locations
tgacatttggctgccaagttttaagcctactataggacttcaaaaagggaatcccttctctccatacttgtttgtcatttgcatggaaagagtgattctagtgtgaagtttgtagtttaatggcacatgtggagggttttttttttaccaacgcgtatatgtttggtacttgatttatttagaaaactatcccaagtcactttatagattactactacaatctattgtacatttganatacagccccaaactaaatatcaatatctttttctctatgacctttgaacccaccccagtagacactccctttttctaatctacaccttcctaac

SEQ ID NO: 94111 - DNA, 494 bp, Glycine max
  unsure (1)..(494): unsure at all n locations
tgaacaacttcaaactcaataacttcacttgcttggtgaatcngnttgtacatgaaaaacttttacttggtttcagcatcctttagccctaaaaatcattcatcatggtcaaagataccttctctgtctacaacctaaagatagagatatcaacatgtattagtctggtgagaatgaanagtaagtgggtaaagtcctttactatagatattaatataatgtatgtttctctagaagataagtgaaataatctataaatntacaattagggtaaagccttttcttaactacacgaggtaaaatgtaatggttagagtgttccccataaaagccttactcattattagtaatgttaaaacaatatcttattgtagctattaataagtgaaacaatctattaaaaaagtaactttcttggtctggtgcattaatagaatatttacctataactacctcttagaatgttaattagaacaacttcttctaagaaatat

SEQ ID NO: 94112 - DNA, 444 bp, Glycine max
tgagggtaactagatgccctgggtaacctgggaacccaactggccttggattaaaaaattggacctggcgcaagaagttgtgggttatgcttctctggtgaccaccataccgaactttggccttctatgcagcaacctggagcaattgagcagcctgaagcttatgctggcaacatttacaatagaccttctcatcctcaatagcaaaatcaaccacaacaaaacaattatggcctctccagcaacagatacaatcccggatggaggaatcaccctaatctcatatggtctagccctcaacaacaacaacaacaacctgctccttccttccaaaatgttgttagcccaagcagaccatacattcctccaccaatccaacaacagcaacatccccagaaacaacaaacagttgagcctcctccgcaaccttccctcgaagaactt

SEQ ID NO: 94113 - DNA, 469 bp, Glycine max
  unsure (1)..(469): unsure at all n locations
agaagctagagcttagcttcacacccnctataatagctaagctcacccccatgaccaaatacctgaaaataccaaaaaaaaatccctactacaaagactactcaaaatgccttcaaatacaaagcttaaaccctatactactaaaatggcccaaatacaagggctaaaagaaggaaaaacctattctaatatttaccanagataaagcggctcatacttagcccattggctcgaaatctaccctaaggctcatgagaaccctagggccttcccttggatctctggctcaatctacttggattcttctatccaatgcccttgcggngtaggatngcatcaagaaggtccacctgcatgaaaatntttgttagctccctgatcangaagcctcctcttttgtgcaactatcttatcttcttntttangtgtagaatgaagcttgacaggttcangtgtangtgctactact

SEQ ID NO: 94114 - DNA, 400 bp, Glycine max
  unsure (1)..(400): unsure at all n locations
ttttttatctaaggaagcccagaaatgggtgccttcattctatggccacagtttaaagactacggattaaggtggtgaaaagtttctaaaaaaatatttcccaaagtctaaaactgccaagggaaaagctgcaatttcttcattccattagtttcccgatgaatctttgagtgaagcattagaaagattccatagcttgctgcggaaaactcccactcatggtttttcagagcctatacagctgaacatcttcattgatgggttacgaccgcttgtcaagcagttactcgacgcttctgcatgaggaaaaattaagttgaagacacctgaagaagccattgacttaatngaaaatatgggttctagtgaccacacaantttgcatgagagagttcatatt

SEQ ID NO: 94115 - DNA, 261 bp, Glycine max
  unsure (1)..(261): unsure at all n locations
gaatgtatgctaatgtaaaatttacctatgcagaagggttttgatgcatgtctgagctagtatcatttatggactgtatgattgaacctacattcattgaataatttgatgaagtgaggactgttgtaaaatgctngagaaggatgtctncaatgaaatacatgcttattttgcaagagtgggcacaccgagcttggatangaaatttacatgtttacataagagggattacatgtttggtctaccatgtttatgtatgat

SEQ ID NO: 94116 - DNA, 393 bp, Glycine max
  unsure (1)..(393): unsure at all n locations
tactaagctagggatggaacacttactttgtggtgatgaacaaaagctctaaactgtatctaaaaaagccaaaaagggtgaccctcaggctggaaattcctcaattccgtgggtattggtttttgaaagggggaaaaaaaattttttaatggtaaaaccccccccctttctcaattttataaattggtgccaaaggtggttcgccacactcgcccangcgagcttaacctgcactttttttttttttttttttttttttttttgagggaacaatanaccatggtccctccctctcattgaataacatttttcctaacctgaacttacttangttagaattaggcgttgaatacctaaatttatattactcttttcctttttttaaaacaaaca

SEQ ID NO: 94117 - DNA, 508 bp, Glycine max
agtgagcatgcaagcttcattagaagcttcttccagaagcttcctcgtggtttctttgtaagctttctcaagagacttatgtgagaaactaaattctcataggctacacacattatgagtatttgactgatacgctacattctctcttcggtgaagcgaacacaacacacatttggactatgagtatctgactcatatactacattatctcttctgtgtaacagacttgactcataggctacattttctcttagttcgaccaacacaaaacatatttgtgctattagtattcgactcatacactacattatcttttcgttgaacgaatgagaataatcataaactcacataaataaaataaaaatataactcaatgtccgcttgtaaataccttatcaaacatcttaaagaataaatctcaatcacgcgaaaataaacgattttacttcattttcaagtactcctagaatttaaagatcaccaaaacaatatatattgtggagtttac

SEQ ID NO: 94118 - DNA, 432 bp, Glycine max
  unsure (1)..(432): unsure at all n locations
acagggagaagagaatgagaagatatagcacacttttgttttctgtgaaagaacatggctgggaaccaganaacttantnagcctttgggcaagggaagaagaagaatagaagttcaaggagatgttcaaagctaataaattttgtttatttcgaatgcacgtcagcgattgttttatagactcttcatgtctggtcaagacaacccaacggaagagtgataaccttgagaaataactgagaaccattggaagagttacatctcttgattttcattcagaacttgtcactggtaagtcgttaccaaaaccatgtaatcgattacacaagcattttatgataagatgtgactcttcacaatgaatttgaattcaacattcagatcactggtaatcgataccagtatattgaatcgatacacctttaaaaacat

SEQ ID NO: 94119 - DNA, 407 bp, Glycine max
  unsure (1)..(407): unsure at all n locations
agctntgagccaattatgacgacaataactctctactctgatgtttgatatagacccgtgatataacgagacgcttggaattgaatgttgaagctctgagcgaattcgaacgacaatcactgtttactcggatgactgattgagtcctgtcatatatcgagacgctcgatattgaatgttgaagctctgagccaattcaaacgacgatatctttctattccgatgtctgattgaatcccgtcatatatcgagacgctcgatatagactgctgaatctcgtgagccaatcaaacaacaataactttatactcggatgtctgattgacgcccgtaatatatcgagacgctggaaatagagtgtggaagctctgagcatatgcgacgacactaactctgtactcggatgt

SEQ ID NO: 94120 - DNA, 177 bp, Glycine max
  unsure (1)..(177): unsure at all n locations
gctattgtcgctagaattggatcatagctatcacattccacttcgagcgtctcgatatattacagngctcactcatacatgcgcgtatatagttctcgtcgttagaattggctcagagctacaacatacaatctcgagcgtctctatatgtgacgaaagtcagtccgacatccgagt

SEQ ID NO: 94121 - DNA, 480 bp, Glycine max
  unsure (1)..(480): unsure at all n locations
agctnggacaggagtganaccaagtgtgtctcacctcagagtgtttggatctannttgtatagacatgtacctgaccaactgagaactaaacttgatgataaaggagaaatgatgatattgattggatatcactcaactggaggttataaattggtgaatccagtgaacaacaagatagtgataagcanggatgtagtggtggatgaaagcaaggattgggagtggaatgtcacaccagagatagaanaacagaatcaagttgaattgcaacttgaagacagtgacactgtggctgtgcaagaaaatgaaactggagaaggcagtgctgangggccaagaagatctttgagacagagacaagtcccttaaagataaatgatntgaattgtgaatgatggtgcaataatgatgaaggnactactagctgaatctgaccactcacagtggaagagcaatgcagaataagaaatggatacagc

SEQ ID NO: 94122 - DNA, 437 bp, Glycine max
tccatcactctccctctccctccactcatcttctcctactcttcagctcttatctatggcttcctatggcggtgagcttcttcttgactcatcttctccttgaagtggcgtctccaatcatctttcttccgtctccattctgatgacattgatcttcaagaagcaaaggactccattgatgaagaagatgcatggcctggaagcttcacatggagctacgtcatgtggtatcaagagcatcttcgtctaagtgatgttcttttgcttcctctatctttttgttcggtcaattcactttaattccttgttattcatcttattctgcatgtatatcctccattgtcttgtgggttggttttggttagagtagattaaaaaaaaccaattaaatcttatatctacacttgttcttgcatttctatggggtcaaatttata

SEQ ID NO: 94123 - DNA, 219 bp, Glycine max
  unsure (1)..(219): unsure at all n locations
ccagatgatccaacggttaacaaatgcggtgctgcatttttaccgaagcagcttcatgtagntttctctataagctctattaagaggcttcctccaaaagcttcattaagaggcttctagcacactccagacatattctctaagatcccaacggtcagatcatggaccagtgtcttgtgaagtttcataccaaatttcgagaagatcctacggttaatg

SEQ ID NO: 94124 - DNA, 358 bp, Glycine max
  unsure (1)..(358): unsure at all n locations
tcttagtctcacctgaggaattcanggctacttcatgcttttctctaatgacaatagcatcacttctggcactaaacgtgtgggaacttgaatccaacttcttaattaaaattcttgcttcagcaagggtcatgtctacaaaggctccaccactaccagcatctatcatacctctctccatgttgctgagtccttcataaaaatattggagaagaagctgctttgaaatcttgtggtgaaggcaatcggcacataattttctaaatctcttccctattcatataagctctctccactgagttgtctgatacctgaaatatactttctgatggctgtggaactggaagcagggaaattt

SEQ ID NO: 94125 - DNA, 379 bp, Glycine max
cactaagctttccagtgttcttgaacctttcttccatcaagcttatgtattgacctcattttcaattctaagcctgaatttcacttcattttcttggtccattctcacttataatttcaaaatcctatctttgaactcttaaagggtggaaacttgaatctaaactccctcattcttctttctaaaattcgtggagtatcaataaaggtagatcgggtctctccaactcttgaaccctattggtggtggtagacttccctaaaaaatgtgtcttaaaaaattcgtactgctaccctgttctagaattttgtgctaagcttttttttttcttgagatttgatgccaaaatgaattcttggtataaaacctaggtatactt

SEQ ID NO: 94126 - DNA, 358 bp, Glycine max
  unsure (1)..(358): unsure at all n locations
agcttataagaacgaaactgtctatatcatntccatatatgcatgngaagtagaaaacatcaacaagaatcaagccaaggctattgtgcaagcaatcaatggggcaaaacacaccaaaagattatgatgatggatggctcaaattctcacaaaggtaaacttatcactttcaaattgagctttcaaaactatcatgacatgtaaaggaaaaacaaggatttcaagtcacataatgtcaagagacttttattttcagaacaattactccttcaaacaaagaaaggggaaaatacgctcaaatgggctatcaaaggaattaattcaaggtaagtccattttgctagaaacttataagaaa

SEQ ID NO: 94127 - DNA, 350 bp, Glycine max
  unsure (1)..(350): unsure at all n locations
tatttgactagatgaagatgaatctgtggtcaccttatggactccnctaaggacaataacatcatttcttgcactgaattgttgggagtcggaagccatcttctcaatcaaattcctaaccttaacaggggtcatattaccaaaaactccaccattggtaccatcaatcatacttctcttcatggtggtaagtcccttctagaaatatttaaaaaagaagttgccaaaaatatgatggtaagggcagcttgcacataatttcttgaatctttcccagtactcatacaagctctctccactaagttgactgatgcctgaaatgtcttttcagatggcagtggtcctagatg

SEQ ID NO: 94128 - DNA, 362 bp, Glycine max
  unsure (1)..(362): unsure at all n locations
agcttatagaatatataatagaagaactatgaccatttaagagtctatacatgtntcctttgatgagtctaatggccattcttcccaaggaaggattttttagatgatatttcagattccttagaagatacacatattcatggaaatgactctaaagaanaagatgaaggaagcaatgaggattctcaagataatggggctagaggaaataatgaacttccaagagaatgaaaagcctcaagagatcattccctcgacaacattattggtgatatatcaaaaggggtaacaactagacattctcttaaagaattactgcataataaggcttttgtatctatgattgaacctacaaatataaa

SEQ ID NO: 94129 - DNA, 421 bp, Glycine max
  unsure (1)..(421): unsure at all n locations
tatgatactngtaatattttcttactaattgtggttattttattnnttgaataantgcttttataataaactcacccctcgcaatttttgtaccgtgtggttggtacctgtgatgatcgctaacctttgttcgttagagcagaatgacaacagtagtggacaagaagtgagattcttttgtggagccggcgagctgacatgatgacgttgagattattttgggagagagttgtattttgttaatcaactcctccatagctggttccgtaattctttttgttgatttgaagatgtaaatcacatatttaattatatgtatgaacaaatttattttccattatgtgaatgatgtgtactacggtactatatatatatatatatatatatgtatgtatgcatgtatgtattcactcaagtaatg

SEQ ID NO: 94130 - DNA, 339 bp, Glycine max
  unsure (1)..(339): unsure at all n locations
ggctgcaacaccggctccgcttacctaactgtactggagcggtgccgtgctttacctatatggtntctagagttctacatgacttccaagatggaagccatttgatcttttaaggccgataaatcggccttcatctgctgctgcacgctctcttgattatccatttttctggatcgagtgttataagagtgccttggtgatttcttacttatgatgaanatccagaagatatagacaacggtgagtatgccaccaaaacatgagtatgaatacggatgatccgagcacttatatccaccccgaggtttctagataacgtaatgagtccagagcttctca

SEQ ID NO: 94131 - DNA, 323 bp, Glycine max
  unsure (1)..(323): unsure at all n locations
caaacaagaactcccacattgtgcaagaactcatacgtcatgacctaatagcatcactaagtgccataatgaatatgaatgttgactggtggaggaataatcatgtggacaggctatgtttgttcattgtgtataaanttaagcttctccctattctntttctctcgatcaacatatctttgttgacatatcactttgacatacatcttaatatccttcaaacttttcagaaaaccaaanactataaatgccttatgcagtaccaagcaccagaatgctttcaataatcgacttctgagtatcacaacttggtcaatctatat

SEQ ID NO: 94132 - DNA, 229 bp, Glycine max
cccaaaaattaccaaaggtgacttaaagacacgtgcttaccagcttcaattctttgccaaatgtgtgccggaaaaaaggttttggcagggattttgtccactaaatgaatctaaataaccccttggaaaaataaataaagatcaatagcctaccctaccggtagaaggactcaaacagtgatccatgaaacccatgagaagctactgggaatgtgtgttataaaaaatg

SEQ ID NO: 94133 - DNA, 349 bp, Glycine max
  unsure (1)..(349): unsure at all n locations
atacaagactcacacatacctcttgcaaganagtggattttcttatgactcttcctggccctgtactgctgctagctaatgcccctgtcccccgtgtctgatcatcatctagcctagcattgctatcagctatgagcaaattgcccttaacaaagtaatgtcaatcatgttatcaatcttacacggngaatnntttaatattgcgagcttgatactatggttgtgtccaatttcttggcttagtaagaattaatttctgttacattatgatgaaaggaaaacaaatataatgcattggtgagtttaaattgaagagtgaggtagaggtctaaaccccatttgcagtaaa

SEQ ID NO: 94134 - DNA, 349 bp, Glycine max
gaaactaagctttcacgatattttctagatgccttcccacagcttcagttgtggatctttttcctaaaagggacgtgatatatgcctggttgaataagtgctacatttaaaccaaagcttcttcaagaacagtattttgttatcaaagtaccagggacctccaacatatattctttgccaatccaatcttgggaaaaactggaagagatacacacccccttctccttcatgatattatggcttcgtataatactattggtttcatcagttaggctgaaaacaaaaccatcatcttcttcatctatcaacatgaaaccctacattaccttcttcatgtttgcactctctc

SEQ ID NO: 94135 - DNA, 409 bp, Glycine max
  unsure (1)..(409): unsure at all n locations
agcttgctaacaccatggagctcctattatctnctatactntgctggggggggccattcttggatggcctcgattntctcagggtccactcggaccccatntctaccaactataaaccctaagaaaactatattatcacacacaaagccacttctctatattagcatagagggtgcaattcctaaggactgcaaaaacttgattgagatgtcctaantgatcatctatgctcctactgtacactagaatataatctaaatcaacacctacaaatctacctatgaaatgccttaagacatgatgcatatacctcataatggtgctcggtgcattagtgagcccataaggcatcactacccattcatacaaaccaaacttggtcttgagaacggatatccactcatcaccc

SEQ ID NO: 94136 - DNA, 227 bp, Glycine max
  unsure (1)..(227): unsure at all n locations
gcacatttctctggtctcaagcattactgagcaaaccccatctgactgccgtgggctatgaaagaggtccttcctccaactctttatgactgtatattcagcacgattaacacacatagttatctaattaaatggataaacttattttaattcaccttcacatatngcagtatatggaaaacgttatgtatatgcatcccatgacacttgtgccctaatttagaaac

SEQ ID NO: 94137 - DNA, 347 bp, Glycine max
  unsure (1)..(347): unsure at all n locations
agctntgagccataatcctgactcaccatttctcttatctatngtgagaatgtaatccttaccctggagcgacaagatagaaggatatttcaatcacaaaagaatagaaggagatattccaatgtacgctaacaaagacaagaatgaaatattcccaatcagagagtgagagaaagcaggaagaagagaatggatattcccaatctatgaatgggagagagtggatgcgaacactaagaacgaaagaaagctcctgatctgggatcgaatgacaaacagaataaatgtgcagagaggtctttagaccggacaatatctgaacaatacagaattgtcaccacatgaac

SEQ ID NO: 94138 - DNA, 412 bp, Glycine max
  unsure (1)..(412): unsure at all n locations
ntgaaggctatgcacgagtatggcctgccccctgtgtattctctagagcatagaatgaagcatctgtggagtaaacaacaaatcttgcggtccaaaagatgattgagttggaagtggcatctgagtaaatgaaggataaaaaaaatgtactataagagtggattgaaaaagtgcgactatctctagtgctactgaagtaatatgggcctctgatctcttgcccctggtcttcttacgccctctgaatgctactgttggatcatctatattcccatagttcttcttaatgtacgcgaagttaatgacagggctgatgctctccacggatctacaatctgatgtgactcctctagctatacacaaagttgtgattaaggctggatatactagcctacaggggtcatgctgtgct

SEQ ID NO: 94139 - DNA, 491 bp, Glycine max
  unsure (1)..(491): unsure at all n locations
gcttctgtatgaatntcgagcgtctcgacatactatctgngcctctatcaacatccgagtaaaaggttattatcattttgaattgctacgagcatctggtttcaattacgagcatctcgatatattacacgacacaatcggacatccgagtaaaaagttattgtcgttggaatttgcttagagcttctgttttaaatttcgagagtctcgatattctacagggcacaatcggacatccgagtaaaaagttattgtcgtttgaatntgttcagagcatttgttntcgatttcgagcgtcacgatatatcgcgagacttaattggacatccgagtaaaaagttattgtncgttggaattgttcagagattctgttttcgatnttgagtgtcacgatatattacgagacttaatnggacatcagagtaaaaagtattgtcgtttggaattgtcagagctttggtttcnatttcgagcgtcacgatatattacga

SEQ ID NO: 94140 - DNA, 364 bp, Glycine max
ctgtgcaaataaatcactcctacatttcatctctagcatgctttttttctttacccactcctcacgtttggttttttaaggaaaaacaccataactaaacgcgccacaaggcattcctatcgcaccagatccaaatctagaatgatgggtgatcaagaagagacacaggaacagatgaaagccgacatgtcggctctgaaagaacaaatggcctccatgatggaggccatgttaagtatgaagcagctcatagagaagaacgcgaccaccgctgccgctgtcagttcggctgccgaagcaaacccgactctcttggcaactgcgcaccatcctccctcaaacatagtatgacggggaagggaca

SEQ ID NO: 94141 - DNA, 432 bp, Glycine max
  unsure (1)..(432): unsure at all n locations
agctngctctanattacatagatgttngtatgatgggaggaggttacatgccatttttgctntaagagtaacgtcccactggtaaaactaactttccaaatgtttgccttcgcaggaatggccccgaggaagcttgcctcatagaggtccaggaaggacaaggcggccgaaggaactagttccgccccggagtacgacagtcaccactttaggagcgttgtacaccagcagcgcttcgaagccatcaagggatggtcgtttctccgggagcgacgcgtccagctcagggacgacgagtatactgattttcaggaggaaatagggcgccggcggtgggcaccactggttactcctatggccaagtttgatccagaaatagtcctttgaatttatgccaatgcttggccaacagagganggcgtgcgtgacatg

SEQ ID NO: 94142 - DNA, 404 bp, Glycine max
  unsure (1)..(404): unsure at all n locations
ttacgagcgtctcgataatttatggactttatcggacatncgagtaaaaagatattgtcgtttgattattcttacagcctcagttttcaatttcgagtatctcgatatactacgggacacaatcggacatccgagtcaaaagttattgtcgcttgaattttcttaaagcttcccgtttcaattacgagcgtctcgatatactacgagacacaatcggacacccgagttaaaagttattgtcgtttgaattttctcagagcttctattttcaattacgaacgtctctatataatacgggactcaatcggacatcccagtaaaaagttattgtcggttgaatattgtcagagcttctgttttcaatacgagcgtctcgatatattacgggactcaatcggacatcc

SEQ ID NO: 94143 - DNA, 145 bp, Glycine max
gacggcacacaactctttctcaaaccatcaatatgccttggcatggattaatcgaaggccttattgtacgtattaacaatatactcacttgattgtaccatgcttgagcgtttatgacataatctaacttcaccccgggacaata

SEQ ID NO: 94144 - DNA, 366 bp, Glycine max
  unsure (1)..(366): unsure at all n locations
agcttcanggatatcaaattccacctgacaaacaatatattangttntattgctagcaaattataaagattggctaataaagaanatcaaagatgaaaactaanatacttgaatatcctgccatatcacatccttctgaggagcagggacttccttctatgtctcgtatgtcacgtcgaccttatcacgagggacaatccccaaatatgttcttaatttcttcttgtggagaccgtcgaccttccaggtcgtatgatcgacgtggaccactagtctctttgccccaggtggtctagtggccaaggattgtagctgtgtggctttgcgtgtccgcttcaaggtagacgaagacgttgatgctactac

SEQ ID NO: 94145 - DNA, 281 bp, Glycine max
tgccgaagaacatataccacagactcttgccataagtgtagatttctgattcatggcgagctgagttaccaggttgaccaaggcatcaagttttccttcaagatttttattttcagtagatgaagatgaattcgcggccacctcatggactcctctaagaacaatagcattatttcttgcactgaattggtgggagttagaagccatcttctcaatcaaatttctagcctcagtaggggtcatatcaccaagagcttcaccactgacagcatcaatcatac

SEQ ID NO: 94146 - DNA, 397 bp, Glycine max
  unsure (1)..(397): unsure at all n locations
aagagttattttgtgaagtttgtgactttgagtgtttgtgagccaccttgatgttaccctaacatcaagtggtggacctgagtgtgcagagttgatctctattgttcagagagcaatctctggtgtgtctttgatttgttggaaacacgggtgagtgattgaaagggagtgagaggggttctcatatctaagagtggctcttangtagaagttgcatgggtagtgattaggtgagaaggtngtatacagtggctgttagatcttcgaactaatactattttagtggattcctccctggctgggtagccccagatgtangtgacgttgcaccgaactgggtaacacatctcttgtggtattacttgttaatctgtcatactgcatatacaacctgatg

SEQ ID NO: 94147 - DNA, 426 bp, Glycine max
  unsure (1)..(426): unsure at all n locations
cttgggaaaccaataattctaatctccaatcaagaattgttttgttttgtggtatatttggaaaagacaaaacgaaaaactttggaatgaggtagatactactccaaacatcttaatctctctcactatgcaattcctccatgaatgaagtcatgctcaaaagacctctcaaccattaagagcaattcagacaattgatgcatactcatgatagacaaaaccacaaaagaagtaccgaaagatcaatatagatgcaacacttttcattgatgagaacaaagttggtattagtcactgtctacacagtgaggaaggaacattntttaaggcaaaaactatgcatgattcatgaagatcagaagcagaggaagtgaaagcatgggccttgctccatgctataaaataggcacaagagttaaacatctc

SEQ ID NO: 94148 - DNA, 366 bp, Glycine max
  unsure (1)..(366): unsure at all n locations
agcttcttgccactagtgaaatgctctatccaatctttgaaagcaccttcaattgccttgcttgtgttgtagaggtttccatcatcgaacttaatgaaatctctctgtgcaattatgaaatcaatgaattgggttgggaagcatccttgtttaaaaaggaatttcaagggcatgtaagccatcaactaatggccttcgtatttcctcttaagaaaaagtaaaaagggtaaaggcactcgtgccatgaaaagtgtaatcctcaacatattgcatgtttgtggcatcttatgccactaatgccatgagagagtcatggatgacactgacccttttggctngagaaaaaagggattaagaagatctgaa

SEQ ID NO: 94149 - DNA, 319 bp, Glycine max
acccagctttaataaaaatcagattttgaatttcaaacttgggctaagcgcgcagctccgctaagtgaacctcattgagaaaccaaacgtctttctggctcacttaacgcggtggttcgctaagaaagagggtcgaaaattgcttaagcaagtgtaacatcagttacacttacctttaccaaaaaaatttctgaacattgcctgcatcttctctctcacacccaaactcgcgcatgcttactgtctttgtgcatcttcgcgcattttcagcaatcaacaatccaaggaagtgtctcattccctttgctcttttattttt

SEQ ID NO: 94150 - DNA, 437 bp, Glycine max
  unsure (1)..(437): unsure at all n locations
tacctatcgtccctcacagtctttagatntgggagcctatccattttngtgttcggactctcagccacttatgatagccgccgatgatcccattactgcttcccctaagctctctgtcctttcttcacgccgcatcccatgccttgcgaactccttggagtaccctcgcgttgtggtcactaaaaccccgtgcgatgaaaggcgtgatgctttcgtctaatggcgctcctctcatggggtagccaagctgtcttatggtgagaacgggattataattaatacaaccccttgttcccatcaagggaaacattggacatccttcgcatgaagatagaatcctgattcttccttccttctagcgagggaaccaattaacagacacccccccatgctagccaagagttggtcccaattcgcctttcctatttcgacgcacg

SEQ ID NO: 94151 - DNA, 184 bp, Glycine max
  unsure (1)..(184): unsure at all n locations
agtatatcattgcttatctattcaatcaaccctagaaaaaatcaccttaactgcggaattttgtctttgccatttatgtatctgggcatccccattgtggataatccaacgcgtaacgtgtatagagatcctatattcagaatatgcgacggaaagntacctacatggaaacatctacacatat

SEQ ID NO: 94152 - DNA, 328 bp, Glycine max
attgttgaagtaaatgatgaagtgggatgttaagtcggtattccattaaatttatgcatttctaaatcaaactaaacaaaatttatgttttcgtgaaacttcacttctaataccttggctaacaaggaaacatagtttattatagttagttgaccttactgtagaatttcgccacgggtagttcattttgccctatctgtgttttcttttcttaccagttttaatttcaacacaaaatttagttatgaatggtatgcaatatatatgctctattacctaccatgctttaatttattctacaattttctagggcagacagatccttatg

SEQ ID NO: 94153 - DNA, 405 bp, Glycine max
tataaatagacctcctatctttaatggagagggttaccactactggaaaacccgaatgcaaatttttatcgaggcaatagatctaaatatctgggaagccattgaaatatggccttatatacccaccacagtaaaaagaagttcaatagatggtagttcatcaagtgaaagcataaccatagaaaaacctagagatagatggtctgaagaggatagaaaacgtgtacaatacaacctaaaagccaaaaacataataacatctgccctaggaatggatgaatatttcagagtttcaaattgcaagagtgctaatgaaatgtgggacactcttttattaacacatgaaggaactacagatgttaaaagatctatgataaatgcactcactcatgagtatgaattatt

SEQ ID NO: 94154 - DNA, 341 bp, Glycine max
  unsure (1)..(341): unsure at all n locations
aatacaaaactacccctaatacaaaaaactagtctaggtgccctaaaatacaagggctgaaaaatcctacatttctagggtaccttacctatattatggagccctatatacaaggcccacaaaataatgaaaaaaatgtctgatggagcattcattatagtggttcattaacataagttggtcatctagtccaacactcttgtcttctgtattagtcgtccaatcttctataatctggtggagcattcattatagtggttcattaacataagttgtgtcgtaactataactantttatgtttttttttgtggaactattttcagttagataattgttatat

SEQ ID NO: 94155 - DNA, 468 bp, Glycine max
  unsure (1)..(468): unsure at all n locations
ttcatttggaaatgtccaaatnncctacttatatgacattcgncatttttattttagatcttagtagaggactcgacaatccttaatgatcctttgtcctttccatgtttcttattgactttctttccaactccctgattattcacataatgaatggagtggtttccttgattcttaagtctggtttcctcctgaactaacatactatgcaattcatgcacatttcatttgtctttcatggtattatagttcatttggaatggaccatactcagacaataatgaattcaaaatgaactgcacaaggaaattttcatccaccaccattccaagagacttaagttntgctgcaatatttgtcatctcaatgacatgttcatgcatagtacgagaaccatcaaacttcatggtggttaaagtactcattaatgtccccgcaagagacttatcagcagtttgggagtggttc

SEQ ID NO: 94156 - DNA, 394 bp, Glycine max
cctacatctatcttcttgctactacctcttgttatttttgataaacataagctcattccatctgcattcatcccaatcactatttcaaactataccaaatttaatttcaggagcaagttaactgtctatatgcatcaggactgcatactactatccacatcaaaaagttaaacccatatacaacaaaaagtgtactaaggcataattaaataatcataattgcatcaaacaaagcggaattaaaattctgtgacggtcctggatgagatctcatctgatgcctctcattgtaaagtacacagattgtcgagagggtatcatccagactatgaaaggccttgaaataaaatggtaacggctacgctctatcctatgagaggctctgctctaaaaa

SEQ ID NO: 94157 - DNA, 375 bp, Glycine max
gatgaaggaaagagtggatttccaatatctgcacttcatgcagaattgtgctgttgaaatgcgcagcacaattcttcgtaagcgcagaaaaatgctctgtatctgctggttgtggaaagagtagcacagaatgagttctggatgttcgctattagatcccacccgttaatgaatcgcaacgaacgaaatgttactggcgtctttaagtgagaaaaagctgcgattttcggttgagtgttgtgcagagcatcctgcctttgcccatgtatgcttggttcgccattttgtgatgaatcggatgctgaattactcggatgtcggtgaagcttgggaggatcgatggggaccctgtgtctaataaaccacgatctggct

SEQ ID NO: 94158 - DNA, 397 bp, Glycine max
  unsure (1)..(397): unsure at all n locations
tcaccggatgacgccgatcgaacatttcctaactgatcgtttgctatatntcgnncacggatngaaangagaactcgttaggcgacatctgtcgtgaaatancgaccgatatttttcaaccgacattgcacaatttcttttagaaaagctcgctggtcgataatggtctttttacggcagagtaagtgttcttgttttggtgttgcatataaaagttacaatgtacttcggctaggtttttcgtgcgagttcaaccgacatttttgttcgggcacgaaaacattagcccacctcttgcaaaaaaatatttgctaaccgtcttcatgcatatttcattcaacgattgaatagaaaactcaatagccgacaacggtcgtgaaatagtcccgactgatat

SEQ ID NO: 94159 - DNA, 369 bp, Glycine max
  unsure (1)..(369): unsure at all n locations
tgtgaagtctgcacgttgaccaatcacctctcttgctttttcgtgtggccaaagccctcatagtgagcagcataatcctatgcgccactgttacaacgtaaagctcttcccgatagagtttttgcctgtaagatcatactccacganggagagtattcatcaagcaaactatctttcacggacccagttgcagttctttacacctgccaacttcattggagcaacatcacgtgcttcatgctcttgaactctagatgcagttgctgcctctatctggcgcctgtgactatgcgaccataacttagttgtactactgtgctcagtggccatttacttgctagtcgctatacttcatatatattctggatc

SEQ ID NO: 94160 - DNA, 258 bp, Glycine max
ataaaatatcttgcttattttctcacatattcttattgagcgtgaagtctttgtttgaggtcctctcctgtaaaggccctatctatcgacgtggaagttcagaccccactaacacgtccacctaacatgtgacagtttgatttggtaaaacattgggcccaccggggactaggaaaaatacccacgctatgtaatcttcaattgccgggtacatcatgggcctaaatgaactcgcatgatcatctattcgagtatgaa

SEQ ID NO: 94161 - DNA, 469 bp, Glycine max
  unsure (1)..(469): unsure at all n locations
cctcatcgtctntcacagtctttagaatttgtatctctttcagtcctngngttcggactcttagccacttatgatagccgccgatgatctcattactgcttcccctaagctctctgtcctttcttcacgccgcatcccatgccttgcgaactccttggagtaccctcgcgttgtggtcactgaaacctcgtgcgatgaaaggcgtgatgctttcgtctgatggcattcctctcatgggacatccttcgccgctcttttcacatccccggtcgaacgtgtcatacatggccaaaatggcgacgaccgggctntccttgccatgatgaaaggcgaggaaagcgtcaatcgctgctaggtccactaacccttccatattcggaaagaggacaactccaaagatcaaaagcgccaagatgtcaatanaagaaagcccattcgccttggattgccaaggcctttgccctttcct

SEQ ID NO: 94162 - DNA, 340 bp, Glycine max
agaacggttcagatgcaccgaaggagcgcggcccgggattttttctataccaagcgcgagaagacaaacacggccgtggattgagcagaagcgaatctatcatacatccggacagtgactatgaccatgccagaaaggtgaatgcgagcctgcgacccgctcgaagtgccgatatccaaacgtgatggaagagcttccaataacgcgggatttctgaagtgacaccacaaataatacagagaagtatggggcacagggtgtcacaaggaacatcacaggatccaaacacaaaccacacacagggagtgagtcatcacattcgtgacgaagggagagaaac

SEQ ID NO: 94163 - DNA, 472 bp, Glycine max
  unsure (1)..(472): unsure at all n locations
atcttatgctcgtgagagcagatgaataggtgtgattaatatcatgaacctcangctagaagacacggtttcacaatgctctgagaggatgtgacattanggtatatgttctatattaattgtatgaagttttagacggtcttgttttgagcagaagtgaatttattatttatttggacagtttttattattatgttagaaaggtgaatgtgagccttctaccctcttgaaatgcttatattcaaatgtgtttttaaatttttttaattaagtttgatttcttatttattttattattagtacatatatgtatggngtacagggtgtcacaaggatcatcacaggatccaaacacaaacaatacacagggagtgagttatcacattcgtaactaatggagagaaacangataacatgtcgatataaatatcatataaaaaaaataaagcttacttaaatataacttacatca

SEQ ID NO: 94164 - DNA, 397 bp, Glycine max
  unsure (1)..(397): unsure at all n locations
gcattgtttgattgtgtgctttgtcattcctgcaagcttgtttggcttgattacctgttcaaaaacagatattttaatgtatgattatgaggacagtgattttggaggcgtgcttagttcaaatttttgtttttgaaatctttattgaagctgttcaaaaacatatattttaatgtttgattttgtgtttatcttgaagctatttttgttctccctcagttgcgggtcgtgcaaaacactaaggtctcaaagatatacatttctgccttttaccttttctttattatcttttgaatggtttaaatggtgaatatgatgtggttattatatattctnnttgctagtagtcttcactcttcataaatacaattatcattcaactnttgcctgtagtctt

SEQ ID NO: 94165 - DNA, 300 bp, Glycine max
  unsure (1)..(300): unsure at all n locations
aaagtagacggagaagaacatntgtttaacgaagtgggtgttcactactatcattttggctaatgtgtcattggcacagcaacccatgttaaacatgccagagtttgtatgataatggaacatgcatgtgggggaatttactaatctatgtggttcaattaagtgtgaaagtcccattttacaaaaagcaacaaacaagcaccacatacaatgcaacactgtcantttgccctaaatgtccatgcagaatcataaaagtacgtactacggaacgttggaattattcactcctttctctac

SEQ ID NO: 94166 - DNA, 328 bp, Glycine max
  unsure (1)..(328): unsure at all n locations
gaaactaagctggttaactcttctccanatggtcctttcannatttctacattatatgttaaataaaacccaagatcaagcataaaaagtagaaaattagaaaattctaaacaaactaagcttttattcaaaacttaagaggaacacanagctcaaaaacataaaagatagttcataattgcccccaaaataacaacaaaatgtaggaatatatgacaattatcactctccattctcatatagcatttatcagttcagaaattggcttaaagacataataatgataaaaaaaaaaccattttccctcatttataacgaattagctttt

SEQ ID NO: 94167 - DNA, 342 bp, Glycine max
  unsure (1)..(342): unsure at all n locations
tattacgacaaaaagcttaagtgagactagaagtctcattccaaactcttaataacaangtgagtctggtcacacgctacacttacttcaagttctatctcacttaatagatgcatgactcaatcacgcagattaattacgagactccaaatattataggtggatggatggttcttgtgggctacttctcatatctcataatattnnctctttatatattatgaattacacaaatcatgataaaatacttatatatctgtaacacgaaaattaatttgatgagaagaatgagagtatactcggaactctatttacatatttgatatagatatatatatatat

SEQ ID NO: 94168 - DNA, 467 bp, Glycine max
  unsure (1)..(467): unsure at all n locations
agcttagcgagttcatcaaanacccatannaattatgaagaatatanttattcattatgtgctttctccaagcttagcgagttcatcagaaacgcagacaagttatgaagaatagcatgaactccctaagcacatatgtcaggcttatcgaattcatgaccaaacccagaaaagatctccaaatgtacaaacttgttaagccataatgataggcttagcggttcaaacacatgctagagaggtagaagaactactcaacatgacaggacaaaaagacccatctgtaacaaatatgagaccaaacatcataaattgggtttaccctacaacacccaaataaccaactaatgatttatgagagagatgaacatcaaatatggaatgaagaagctaagaagacaaagatgcttatatcctcggaaggtagaaatatgagtatgtttggaggatggagaaaagatgaacgt

SEQ ID NO: 94169 - DNA, 317 bp, Glycine max
aagacggaaggagggacataggattgtttttgtaataggtgaagttgagacggacttgactgaccagaattgaaccatgggcatttggaagaataatgagaccgtatagagagaagtgagccttctaccatctgaaacgttataacagagtgatctgataagaaagcaacatgaggcttaaaagggaataaacggtcaggtgtgaccgggaccatgccatgcagatcctggaagaaggacagggtgatatttatggaacccgccccaacaaaacatttatgcctcggcaaaaacccccccccccccccccccccccc

SEQ ID NO: 94170 - DNA, 430 bp, Glycine max
  unsure (1)..(430): unsure at all n locations
acgaaccctttatgtgctgtcagtgtgggacctatttattcttgtgttcaccgatacgngcgggagaagggccttaatacttagagggagggcgaattaagtttaaaattcttctcgattactcaaggcctaattccctttttaaaattatatgttcacaccattgtagatgcagatgaagatgcaaactatttctacaatattcttctagtatgcaagataaaaatatgctagatataatatccaagatagggaagagaaatgcaaactttgtttatcctggttcggccacttcccgtgcctacgtccagtactcaagcaacccacttgagactntgcactcaacttataaaactcttccaacatttgaaaaccctggatcctctccttgtgtcaggatctcatagcaaagacaacatctttgttacac

SEQ ID NO: 94171 - DNA, 282 bp, Glycine max
aatggtcgtccatcttgttccataaagcctatgaactgccaatagcctatcttatttatcttttgtaaatggaactttcttaacctgaggatcaagatgattgagtcaccttactctacaacttttaccatgacaaaagtattgaaataccattattcaaagaacattttacgaaaataaaattacataaatataggtactacagattgatatatattgatagtatatattaatgcatctaaaattatatactcaagccactggtctctaatactattacta

SEQ ID NO: 94172 - DNA, 352 bp, Glycine max
  unsure (1)..(352): unsure at all n locations
gaggaaagacgatgccaatcgtgtggtggatgatacactccatagtgtacctgcgtcacattttatcagagagaaatcagacacctctgaagtattcaaagattgagtctagactcaaagagagaaagactgtgtcatcaagagaatcaggagtgaccatggcagagaatntgaaaacagcaggctcactgaattctgcacatctgaaggcatcactcatgagttctctgcagccattacaccacaacagaatgggatagttgagaggaaatacaggactctgcaagacgctgctcgggtcatgcatcatgccaaagaacttccctataatctctgggctggagccatgaac

SEQ ID NO: 94173 - DNA, 386 bp, Glycine max
  unsure (1)..(386): unsure at all n locations
gacggccagaacngatatcacccattgatgtatgtgcgtcaacctaatgacgtttaaagagcgcgttctgagacgcaacctaattatgattctttttcatatcgttcttcatgcattgcataaggtggaatatgctttatgatcattgaaaaaggggatatcagcttattgtgagtcatacatattggggggtggttcaatatgttttgaggaaatggactgaaaatcacttaataacattttcatgaaaatagtccactcgctaagtgcatagcacctcgctgagtgcatcttctccgtgtgctaagcgagtatatccagctgttatccctcaaacccttacttcttagctgattggctccttaaatcggcctgggtgaactaac

SEQ ID NO: 94174 - DNA, 468 bp, Glycine max
gaactatgacactcagcttgtcgaatataaaacatcttcttcaccttttgatatttgtctccatctcattgaagcgcatgtccacttgttattccaaagtatcaaacctttcaccaacaaaggtttgaagaccatcgaacctatccaaaatcttttgaagagaagaatcttctctaccatgtccttcttcatcaacaggtcgagcagcctttttcacccaagagccatcatgctctttttgataaccaaaggatgcaatgacagttgcgcctattagaaaagatctcttgattggaacataaggttcagaatcaagaaggatgttaaagtgttgaaggaagagggtgactagatgtggatatggcactggagcatttaatcacgatgccttatgcatgtgatatcggactaagtgtgcccaactcaattgtcggcctttatgaaaagcccacataacaataagatctt

SEQ ID NO: 94175 - DNA, 150 bp, Glycine max
tatccctgtgggcttatacatcgaacaaggatggacaagatagtgataaactcaagaagggtacttgaggtctggacgtatgcacacggcgtatccgaacatgtatgaaactgcagttgcatttctcccttccctaaaatccttaattta

SEQ ID NO: 94176 - DNA, 355 bp, Glycine max
  unsure (1)..(355): unsure at all n locations
gaagcacntctattgagaatctgagtctgcgtaaagttatgttgttccctgaccttgagaagtggctagtatttttcttgattattcgaaaattcggctactatttttcaataactttgaaaatctgatcttctggccactgagatgtttatttattagaaaaatcgtttaagatttgagcctctggaaaaatatatatggcatgagaaatgtcaaaggtgatctctgtaaaatatcacgaacaacagatgttttactattttcaaaaaatgcaacacattgaatttaataactcaccgccactgtctctaattttaaaaaaactataatgaattttgagtgtaaaattatgaaa

SEQ ID NO: 94177 - DNA, 348 bp, Glycine max
ttgagaactatttaaacctatatagttttaatgttttctcctaagggcttcttatgtctacattttaccttttagaatgaatggggatccatatgatcctccattgtcaatttaactcttattggtcttttaatcacatgactaaaccatgctaaaagaggttctataggtttctcttcaagtagtgctactgcaaatttctatctgacaagtgattgaatcgttttctatgttattggacgacttatctatctcagcattcttatctctgccacactaatgtgtatccctagatgggacttcactccgtaatattcactgcctcagagtgtttggtgaggggagggg

SEQ ID NO: 94178 - DNA, 383 bp, Glycine max
  unsure (1)..(383): unsure at all n locations
gaaactaacctgcgtatgacgcccttggaaatccagagtttagttgttttgatnatgnatctgggagggcactaacattgcanatccacgttagtataaatactttgtgtctttcatagacatataaagaaaattccttagtatctatgacttgacagtcgaatggttaatgatggtaattatacttgttctactaacaggaaaaggtgaagaatnctggtcgttttggggttcatgctctcagtgaagttgcttcagacttagctccagattatcttgagcgtcatggacttaaatctgctcctaaatctgtggcttatggttatactgcttcaggatatggatttattcaagacatgccttatgcttacattcatgaatta

SEQ ID NO: 94179 - DNA, 339 bp, Glycine max
  unsure (1)..(339): unsure at all n locations
tggacacccgncgatgtggactacgtttctattttttttggngcanatcaacncgcccagggacacaagtcaggcgtaagcacaccatccccagccgcccaccgctaaaatgagctcacgcactcctacgaagcccttaaccatcgagcctgtcaggaccgggtccacatcaaaccactgcaagcatttcacaatatccaaaaaactcattaacatttgtcgtgaagctaccctaagccaagaaaaacagagtggaggcagaaaacacaccgtaaaactcatgcaaatcccacagtttttcctactcacatacctcagaaacatcctcttggtctgatt

SEQ ID NO: 94180 - DNA, 372 bp, Glycine max
ccatgatactagcttgagggaaacccctaagcaagcttttaatgatatagacttgtggaaagctacggaatcatttaagctgagacaggactaagacagtctcaagagaaacaacaactggaatggtccaacctggaagttgtcataccaaacttggtaatagctttacttaacaagccttatattcattcaatcaagaaaagaatgtggaactcatggatgcctcaaaacgatcttgatctaaaatatcatggacattgagacaagacagccctttccatgggcttacaatcttactaattaaactcgtttgttggaaaaacttgcctgtaagtcataccctactcaagatgatgaaaaagacaaagtttg

SEQ ID NO: 94181 - DNA, 303 bp, Glycine max
cttcaagcttatagatgttacatatggcaaatatatataacaaatcactatacatatatagaattaaaagtgatacacaagcaagatactcaaactcatgaattttcagattgggtcctaaagtatacttaagcaaatacatatattttatatatgaaattgaaatctaaaacaaaatcactacatatggatccttatatatatatatatatatatatatatatatatatatatatatcacacatcagaatcttatatacatataatcatataatcttatatatggaacacaaatatacatat

SEQ ID NO: 94182 - DNA, 401 bp, Glycine max
caaagtcaaacctagtcttcttataagttacactaacacttcttttacactaacaacctttgtgtataggtacgctccaatacgtgtctaaaaatttgattgcactgagctcagctatccatgactagcttacttcatgtagtttctttgaaccccttatgtatgcttgagtaatgataatagatgtgacatattcaaactttagttgcttcatttgatattattgacagtaaatgggaaaatgcagtttataagtaagcgcctttcttgattgtagtatccatgtaatgcaactatgatagttattcgaagcattaaacatttttgagaccataatttattctatacacagacgatatgttgttctaatttcggatataagctaccaaatattcatgctc

SEQ ID NO: 94183 - DNA, 126 bp, Glycine max
tgcaattctcaatccggggtatggttttaaagggggaaaaaattttgatgtaaaacccccccttcgcattttataattgggcagggtgctccccaagcactacctgactttttttttttttttttt

SEQ ID NO: 94184 - DNA, 424 bp, Glycine max
  unsure (1)..(424): unsure at all n locations
cgcttgagcccaaattctgactcaccatanacctngtcctttttgttaatgtcaatctttaccctcggaagcaaanaaagaatagaggggaaatttccaatcaaagaaaaagagaaggaaaatttccaatgaaagctaaaaaagaaaagaaggaaaattccccaatcaaagagtgggagaaagcaaaaagaaaagaaaggaaaattcccaatcaaagaatgggagaaagttaaaaaatgaagaagaagaatgaaagaaagctcctgatcaatgatcgaaagataacagaataaatgtgcagagaggtctttggaccggacaatatctgaacaatacagaattgccaccaaatgaacgaaaaaagaatgaaagggaaccacgaacctaaatagtcttctccctttgattaccaaccaaaatcccg

SEQ ID NO: 94185 - DNA, 366 bp, Glycine max
  unsure (1)..(366): unsure at all n locations
gctgagcgctcctctactccttcttttttctatataagnggacggatgatatgggagaacatatatcggacatatgtcgtgaagttactcccaactgctataatatcaccgtaattgcactgtttttttagttacaacagctcggtaagaaacgatgataacacagaaagaaaacaatgtagacatgctgtagacttgaaaatatgacacaaaatgaagataagggagcatgttcacactcaacagacaaagcataacatgtcttctcagagatgacagctcctatgattaaacctttgtacacacccagagcaatcatctgatagttgatgagatatgagaatcaatatgcgatcacacatcgtc

SEQ ID NO: 94186 - DNA, 187 bp, Glycine max
tattctgattgaacacctgtaagaagacagttgattcttatcagacctgtaaacaaatgcccaatcccatttttactgcttgcaaagttagaaatgtcacactttgaaaccattcttcccaagtggatggatccaacacgaacctgaagccatggtttcctctccactctccaaaaaactgtgcacc

SEQ ID NO: 94187 - DNA, 385 bp, Glycine max
  unsure (1)..(385): unsure at all n locations
tgatctaccattatcaatatgtaacatanaatcatacataaagcctaagtcttagaatccacataaccaagaatatcataacaataattagttcatcaatcatcatttcaagattcaattatcatacatcattaccatcagccagtcactcaatcatcaacacaaaaaacaaactcaattccatgaagattttaccttttgggcaattaacttaagtacatatcttaacataatcacaccttaatcattcgagaagactcanattaatccaatggaagaagttgaggtttgtcgaaaatggatgaacatgggtagtgacactactacaagttttagatataacatcgaacggttaacatcgggtgttcacaaaaccgaagttaac

SEQ ID NO: 94188 - DNA, 422 bp, Glycine max
  unsure (1)..(422): unsure at all n locations
atcttatngcgccatgaagttcctcaactttgacttgacaccatgtagagcgaggaggaagggtaagcttcaggaacttaaagagatgcgcctcaacgcatatgtttcatccaagctctacaaagaaagaaccaattggtaccatgaaaaatgtagaagcaagcttcatgatgatgaatcaaatttgattcaagttgttgtgatgataacaaagatgatgaaaaaaagcccaagagaatgattcgagattgagtcaagaacaattcaagaatcaagagaagattgatctcaagaatcaagtttcaagtttcaagaatcaagagtcaagaatcatcgagagtcaagactcacgattcaagagtcaagagataactcaatcaagataacgcctaaagttgtcttcaaaacattgagtagcacat

SEQ ID NO: 94189 - DNA, 481 bp, Glycine max
  unsure (1)..(481): unsure at all n locations
ttcaatactaagcttttatccaggcactctctnggtggtgaagctcctccttttatggcttattctctagtgtgatgacgcttcctctctcctctgcttctttatcttccactgcaacaccatggctaaaaatcactattgaaggatctcattgaagctcaaagatccagcctccatagaagcttcacaagcaagcttccatcaagtggtatcagagcacaagagcttcaagtaggtgctccttaaacctccattaattntcagctntgccttctcctccattggtgnttcttcatttntctccatgtatctcctcacgtgtcttgtgctanatgttattaacatgattctttagaatttccaccaattaaacttgctatagaagctagatctgaatttctatggttcacatatctcgtttttgttctgaaccatgaattgtgttgagtntaaggtccctcgagatttgccttctattttt

SEQ ID NO: 94190 - DNA, 254 bp, Glycine max
cgaaaaacattgctacaggggtggcactactatatttggctaatggcattggcacagcaccctgttaacatgccaaagttgatgatatggacatcatgtgggaattactatctatgggtcaattaaggggaagtccattttacaaagcacaaacaaccccatacatgcacactgctttgcctaatgtctgcgatctaaagactactacgacgtgaatatcactctttcacattcctgttgccattttaattatt

SEQ ID NO: 94191 - DNA, 354 bp, Glycine max
  unsure (1)..(354): unsure at all n locations
aactctttccaatggccttcanatttcacttttatgtttaaaaaccctgatcaagctaaaagtagaaatagaaattctaaacaactaagctttattcaaactaagaggaacacaagctcaaaacataaagatagttcataattgccccaaataacaacaaaatgtggaattatgacaatatactctccattctatatacattatagttcaaaatggttaagacataatatgataaaaaaaaccatttcctcattaaacgaattactttattcaagggtcgtggaagtgcagaagaaacattagatgactgattactcataccaccaatgaatactaaatggaaatctttatatt

SEQ ID NO: 94192 - DNA, 212 bp, Glycine max
  unsure (1)..(212): unsure at all n locations
aagtaacacaactagaacatgggtgctgcattttgtggacgtgctttagtatggctatgattgatatggccttngcttcaaatttaaagtctgccctgctttctgttttacatcttctttgaaattaatttgaggaacgccttgaataagctaataagactgctttcttaatgtagcacatgaagtaagtaaatattaaaaaacttatacct

SEQ ID NO: 94193 - DNA, 458 bp, Glycine max
  unsure (1)..(458): unsure at all n locations
gatgcatctcccatcatgtgtntggaggaaccgctatctatgttcttactctgctngatttattccttcattcatagaatcatattttgattttggtacccaaattttcttgggtccttgaatgttaattttgactaaggatcctcttggaacccataccatttttccaatgctactaccattctttttaatataacatgttgatgcctttcttaccacagtaaaagcatgttaagaaggtagaactagtcttttaagtggaggcaaagaaatntttatacatcttttgttgattntcaggattatatcctaatccagctttatcaaaaacacatctttgtttgcccaatataatatctaaattatttttaccaagagtaaacttggcaagagcaattttaaatctacacattcttctttaatttatacaacattcacataatgacatctttaatgtt

SEQ ID NO: 94194 - DNA, 382 bp, Glycine max
caccttatagatccacgagaatcttctgtcatgtttccaattcagcattgaatactgaaggtagtggtattactacccactaaggtcataatggtcaaggcagatcatagtcaatatggaaaggtcagaaaaatattcaaagtgatgttacttgctagaattgtgacaagaaaggtcactttagcaatcagtgcaaggcaccaaagaagaaaaattcgcacaaaaacaagaagcgtgatgatgatgaatccgcaaatgcaacaattgatgaactcgatgatgcattaatttgcagtttggatagtcctattgattcatggatcatggactcaagtgcgtctgtccacaccactccttctaaagattattgtctaacttattc

SEQ ID NO: 94195 - DNA, 385 bp, Glycine max
  unsure (1)..(385): unsure at all n locations
tctcaggaagtttctcaagaaagcttctcaaggaagctatctatgttataaatagaagcatgtgtaacacttgttgtaagcttctcaagaaagcttctcaaggaagctacctangatatcaaggaagtttctcaagaaagcttctcaaggactaagttcttcaaagttcaacttctcttcctcttttctttcttcaatttcgtgctcccccctttttctttctctctctctttattttcctccattgaagcaccctctccaaacttcttatccaaggcactctcttagtggcgaagctccttcttccatggcttattccctagtggatggcgcctcctctcaccttntctncttttgtcttcactacatctccatggtggaaaat

SEQ ID NO: 94196 - DNA, 476 bp, Glycine max
  unsure (1)..(476): unsure at all n locations
gcagcttatttaaagaggatagatcctgctgtgttgcacgtctataccancagatcgaggtccttatttcacagctcaattttggagatctttccagtaggtcttanggactagattggatntgagtagtgcttttcaccctcatattgatggtcaatcagaaagaacaattcaaatcctataagatatgttgcatgcttgattntggaggtagttaggatcaatacttgcctttggcagagtttgcttataataataattattagtctagtattcaaatgacttttgaggccttgtatgagaggcatngtagatcactgatngngtggtttgaagttggagaacctangttggtaggcccaaatctaatntaagaggttgttgagaaggtcaagataatccgagatcacttgctgacggctcanagtagaaaanagtcttattaagatcatagatgtcaacctttagagttcaat

SEQ ID NO: 94197 - DNA, 484 bp, Glycine max
  unsure (1)..(484): unsure at all n locations
tatgctgcaaacatctacaacagacctcctcaacctcagtttatttacaaccacaacagaacaattatgacctctccagcaacaggtacaatcccgggtggaggaatcatcccaaccttagatggtcgaatccttcacgacagtagcaacaacaaccttattttcaaaatgttgctggcccaagcagaccatacgtccctccaccaatccagctgcaacaacagcaacagccccagaaacagcaaacagttgaggcccctccgcaaccttcccttgaagaacttgtgaggcaaatgactatgcaaaacatgcagtttcaacaagagaccagagcctccattcagagcttaaccaatcagatgggacaattggctacacagttaaatcaacaacagtcctagaattctgacagattaccttctcaatctgtccagaatcccanaaatgtgagtgtcattacattgaggtcgggaaagcaatgtca

SEQ ID NO: 94198 - DNA, 411 bp, Glycine max
  unsure (1)..(411): unsure at all n locations
caaaggaccatgagaaagctntgttagagatcaatataaatgcaaacgtacctctaataatccaaaaaatagaagctttagtgtgttctttgagcttctctgtgaaacgaataagctgcaaaaaaagaaacatcgaagcaacaacgaaaacgcccccgttctcatcaaaatcgcagctttattgtgtgcatccaccttctctgccaaacaaagaacacaggaagcgaaatgtgctaaaacaaaaagaaaatacgccgaatacgagtgggcaaatgaagagatgtcatgttataaattgcatctttatcataagactgggtctgtttatgtgtctatgtacctaggtgaatgaatgtcgtggtgagataaataaaacatgaacatagtcccacactttgtcttcatgttttt

SEQ ID NO: 94199 - DNA, 185 bp, Glycine max
taaatattgggatgagtatcttcctcatgtagaatttgcctacaataggaggggggggggggtcattaaaccaccacacaaccccactttgaagttgtctttgggtcaatcacctaactccctaaaaccacatttccttcccacatgagacttcttttatacataaataaggggaatctacgtca

SEQ ID NO: 94200 - DNA, 192 bp, Glycine max
tattagcgcctctatgtatatccgtgtcttccagatctttgaagaagatgagactgagagcatacaagtattgatgatgctgaccgaacacgatggcttcaaggctagagttactgccagttttgattctcgatgaagataacaagaccgacaaagataaggctgtcgtttatacagttaaagaatcacaca

SEQ ID NO: 94201 - DNA, 252 bp, Glycine max
ccccaacattattgcattttatttcaatcttagacattcaaattgttggtatttttcctgttatcttttcctttgccttagctaaatttcaaacttacaatttccgtatctctttcttcttttgtgtctcctcatttcttaataataggatttgcatcacttaattacaaccaaagtccctcttggatttatttttgaacttcaatttctatctttactacctttgataaaaatacgacacttgtctatcta

SEQ ID NO: 94202 - DNA, 440 bp, Glycine max
  unsure (1)..(440): unsure at all n locations
aattacgggtctctgtcagttctacagagtgtctgtcttccttatcaagggttttatgccccctactaattgagctttcatcaagaagtactgcgtccccaggcaggcgcagggtgaaacaccacaacaacctgtggatggccggcagcgggaaacagacgcaccgccatcacctctagagttcacctcagctcatccacaaaaaggttagagcgttgcttacgacccatggtcgaccaatatgcgaccaagtccaaagccaaaggtaagcaaagtactatgtccgtgaccgacaagccatcaagcgtccagctcaagacgttaaagaagcgctactangagacaacctagtaccttttaaatctctgcttgtatatgatcacttntgtttctcaagtcatagcatgacacacctagttgctcatgatcctagggattta

SEQ ID NO: 94203 - DNA, 206 bp, Glycine max
ccttgtctcactgcatatgcgagacaataaccaacatgttattttattttagctgactccatgaagaatataatctattctctgccgactagctcaaattggctgtatatattgcccaattgtacactcaaaatgctgctatgggaatggtgatctacactcttcattttatgcgagcatgtgagtggaccaattcgctcttactt

SEQ ID NO: 94204 - DNA, 263 bp, Glycine max
tgagctcttggggggctacggttacctcatcttaattatcgagcaactgggatggctaaccagaatgtcgcaggccaactaacactcttcttatggaacgatatactctcttcctataacagggagcgaatatatggaaactttctttatcaatagcatatttaattgatgcaagcttaatctggggggcacgatgtggaaatgggtgttctaccgtcccctaaaaagagagatataattctgaactgtagtttttattaaaa

SEQ ID NO: 94205 - DNA, 427 bp, Glycine max
tcttatgcatggctcatcttattggtgaagctccttcttttatgcttattgcctaatggattgggccggctctcacctattctcctttgtcttccactgcatctccatgatggcgaatcaccgctcaaggatctcatagaagctcaaagatccagcctgcatataatccccacgagcaagcttccatcaagtggtaatcagagcacaagagcttcaagtaggtgctccttaaacctccattaattctttgctttaccttctcttccattgatgatttcttcattttttctccatgtatctcctcaaatgtcttgtgctaaatgttgttaacatgattctttagagtcttcaccgattaaacttgctatagaagctagattttatgttccatggctcaaatttcttgttcttgttcttgaaccatcaa

SEQ ID NO: 94206 - DNA, 463 bp, Glycine max
  unsure (1)..(463): unsure at all n locations
tacatatgtntattctctgccccacttatatctgagtgatttattattangttaggtcagntacctctaaaaagagccaattaaggagctacttaacttcatcacactctgagttntcatatttaaaggtaacttgactgtgcaagcccaaaacgtacgtaagtggtggcctaactacagggaccactacgaaagtgatgggaaatattgggagaatgcaaacaaaaccaataaattgatacttgaacgtatacatgcttaaaggtagaaaagcttagaatttaaccaactttgtaccagataagtttggtctagagttttcaattcaagatggttgatgttgaaaattccacttctatgtctggaataaaaaagacaacaaaataccacatcagttntttctgatatgtcattctaataacagttatntgtatatattaatttttcattttgaaattcttaa

SEQ ID NO: 94207 - DNA, 456 bp, Glycine max
gactacgtcgtcttctggccatttatattcttgtcgacaagttctttgacacgtggagaattacgttatcttccgcgctcacaagatctgtcatactgacttttgagtcacgctgacggccggaaatacccgagtggttatccatataaaatctttggtgtctgtaatacaaaaagcctgatagcacgcagagactaacgttgtcttctgcgaccttcgtcaatcgcggccgacaagcccgttgacacatggagatttacgttatcttccgcgctcacaagatcatgtcatacttacttttgagtcacgctgacgggcggaaatacccgagtggttatccgtataaacctttttgctttctgcaagacgaaaagcctgataacacgcagagactaacgtcgtcttctgcctatttatcaatcgctggcgacaagcccgttgacacgtggagaatta

SEQ ID NO: 94208 - DNA, 421 bp, Glycine max
  unsure (1)..(421): unsure at all n locations
taaatagacctcctttctttaatggagnggagtaccactactggaanacccgcttgcaaatctctatagaggcaatacatttaatatttgtgaagccatagaacaaggaccttatgttccctctaaatggccggaagtgcaacaatagaaaaatctatagcagattggactgacgaagaaagaagattattacaatataatttataggccaaacatattattacatctgccctaagaatagaagaatactgtagaggtttaaattgcaaaagagctaaagatatatacgatacactacaagtaacacatgaaggcacaacagatgttaaaagatctaggataaacactttaactcatgaatatgaacatcttaggatgaatgctaatgacaatatacaagacgtggaagagaacgtcacac

SEQ ID NO: 94209 - DNA, 473 bp, Glycine max
gtaacgggaaagatatgaatttgtggagttatttgctttttcacacacagattatgaggatcttcatcagagtgaacgtgatctttgtgtagaatgtgaagggtacaacaggtcatctaaaaccttatatgagaaacttttgaagaaagaagatgtaaaggatcagcctcatgatgttataaaacattgagaggcgattgacaccttaaaatctacattgaccacgcttgttagtagaagtgaaagtcttgacaatctaataagatattatagatgtcctcatagacagatctatcaatgtgtatgaaggaataatttatgttcacgatgaacatattgctgtatgttaccgttgtggcatagttgaacatatgacctccaagttcatgaatcgatccagaaagggtgcattccatgcatcttaaactcctaaaaaggaccctaaagatttggtacctatgaaagataatcat

SEQ ID NO: 94210 - DNA, 362 bp, Glycine max
  unsure (1)..(362): unsure at all n locations
aaactaagctaaactcatatttatttcttgggaaagctacactttttatgttttctgtcaatncatgtnnngagcctggactntctaaatattttattgaaggtctttacccaatcatggagtgggaagcaactgcctttggccgtccagttcttgcccttgtacttgttgcttctctggctttattcccagtattttttatcctttctggcccttccatgtggttggctgggatgaattttgggtatggcccttggctttgttaatataatgggtggaacaaccattggaatggccctccttacttaattggacctaatttccgtgaccgcattcatgtaagacatttttgttctaatatg

SEQ ID NO: 94211 - DNA, 391 bp, Glycine max
  unsure (1)..(391): unsure at all n locations
gatacatgctaattgttgttagacaagngncaatctatctatgttgaattctatgtatgaatgctcgtcgaagcttgaatactttagatttgagttaccttgagattccaacagctgaatttgaggctgtacagtgtatggagagctacataaaccaatggggctgccatttggagttggttgtgaagcaactgctcgagactgagtgcaggctctcggctattgtctttgagaaaatcggtccagaagcatggatggngtgttttgcanagattgccatggaatcaagaattctttcttttattcgatgtggaaagattatcaccgataggaaaaatgatcccctncaagtgttgaacctgctgtccatattccaagtcttaaatggtct

SEQ ID NO: 94212 - DNA, 410 bp, Glycine max
  unsure (1)..(410): unsure at all n locations
actgatggccacaagctataatagctatttatgttcttctaaaaanaatcgannagnatatcataaaattgcaatcttatcacaaggaaaagggttgtaaattacctcttcaagagtcgactgaatctgtngtagaggagttgcaagctggttctgacttgtggcaccacttgactttttcttgtcccttttcatgaaaaggtggaatgtaaggatagaactttcaattatcctgataagatcaggagcaagaactctcgtctctgaatcatcagtcaattcatgatctgaacctgaatagattcataaagttgagcacatagtcattcatttaagcataagcccaagagccagagaagcataattacattcagtgcaccaataattttttaattattaacttcgtgatt

SEQ ID NO: 94213 - DNA, 183 bp, Glycine max
ataagatcgatatgtcaatcccaatataatttatctcatatgaaaaggagaaggcgaatattaaatttctagactaataaaatatctcttcaacccatgtaaacttttaccaccaaagggacactattttgctgatattttggttgcaaaataacatgaacttttctctcacctaccctgtgg

SEQ ID NO: 94214 - DNA, 357 bp, Glycine max
ctcccaggaaactagggaagagaatgctttttcaaaaaacacttattccgttattctagcatatagttacattataaaactctatgactgtaatcaataattgttaaaacattaatcgattattaagtcagatatcaattttgatttaatcattatgctaaaaatgaactatgaaagaactttaaatataatttcggtgtgttaaatactaaatggaggttcaagagtcaagtaccttcttatgttcttgaagtttggttacggtggaaaacccatcaccacgaaaccatgaatgcagatacaggcattgttcaccatgtacacaattgttgttgatccagtatttgcatatccttg

SEQ ID NO: 94215 - DNA, 407 bp, Glycine max
  unsure (1)..(407): unsure at all n locations
aagaatcaagccaaggctattgtgcaagccatcaatggggcaaaacacaccatcatgatatgatgatggatggctcaaattctcacataagtnaactcatcactttcaaattgagctttcaaaactatcatgacatgtagaggagaatcaaggagttcaagtcacaaaatgtcaaaaacttttattttcaaaacaattacccatttcttgaacatatcctatgattcaaagaaaaacatgcaaagtcgtacatgcacacaaaattgacccaaaatattaaactaaaaatctgacgaaactaacaacattaacaaattaacacaactaacaaattaacaaaaccaacaaaactatcataaccatagaacactctccgcccccatacttaaacaacacattgtcctcaa

SEQ ID NO: 94216 - DNA, 325 bp, Glycine max
atcctatcaatcatggctacggtctctccacttcgcttgataattagtgaaacactcgtcttagaagcatctcttctcatttatacataatgtttgtccgcttggtatatccattaccagccacacatatttattatccttgagtgatgatacctctagaaaacggctatgtgagttatgaatcattgtgaatacttattacagacccctaaatactatcctatatgtccttaaaaaagggcacggagcaaacaccctgcgtcccatttaaacactgccatgcttgagtcctaaatgtcatatacgcctttgctttgtataattt

SEQ ID NO: 94217 - DNA, 312 bp, Glycine max
ctgatattgaataaacgttacatgttcaacattatcggttccgaattcaaaggactaacaacaatttcaatgttgagatactcaagcgcttgttcatgagcaaggttaacaagcctctaatctctttgtcacggctaaattagtattcaaaggggaaactatgtctcactctatctttatatatcccaacactaatcgctaatttacttaaaatttgattatattgtaagttactttgacttttattaatgtataacgatataatcgctgtagtagttaagatcgccattgatgattatacagtatataaag

SEQ ID NO: 94218 - DNA, 465 bp, Glycine max
tgccacccagctcgcccagagcgagcaggggtgttttctctgatatcaaagccttctggaggaatattctggagggcccaagtgggcctggttgctatttgcacccccattattactaagaacacccacctacctctttgttggtgattctgttttcataaagttacggaaacttacgaatttcgtaacgatacttgatttctttccgcaatgttacggaaccttgcggatacataatcatccccttttttgacttacggaatgttacagaacctcactaattgtgcaacgatgcttccatttgatttccggtgtgtcacggaaccttacggattgtgcatcaatattttcttttgttttccggcatgtcccggaatttacacattgcctaatgacgggtgccaagcactctataaggaccaaacaaaatttgcttgtcatcaagcaaaggtccccggacaaaat

SEQ ID NO: 94219 - DNA, 415 bp, Glycine max
  unsure (1)..(415): unsure at all n locations
agccctcctggtaattcagaatcacttaatattagngaacaaacatggtcttgtgaagaagatccaagccgaggcgcttccgtaacgtttccgtgggtgaattcgcgaaggttttcgatcgttcttcgacgttcttcattcggtcttcatcgttcttcggtcttcaaccggtaagttccctatatcaaacttttcaattcattctatgcacccttagtggtcctcattgtttttacgtgctttcatttacatttcatttactttccgtacccctttttgacatgcttaagccatctatttaagtcatttctcgcttaatctataaataaaataaatttccaccgattcgttgaattgtatcatccgttaatctcgattataatgaattccgaccgttcggtcgtgccgtaccacg

SEQ ID NO: 94220 - DNA, 450 bp, Glycine max
  unsure (1)..(450): unsure at all n locations
agaagcctctatttatagttgttctntgagcntttatgatgtccttcaatggttattttcaaccatggagatgcgaacggaagataaaggagaagaggtgaaaggacgtgtcatccactangaaataagccatggaaggaagaatttcaccaccacaagtgtcttggattaagttagagaggatactccaatggaggataataatgagagaaaggggggacacaaaattgaatgagacaaagaaagagaaaagttgaacctttgaaaatctgaggagaaagctcaaattgaaggatttttgctttgcctatacaacaaccaagatcaatgctttgcaacattacccactgagtggagcttccgttagacattccacaaactttctttccaatttggtatttttttttttcttaaattttaaaaaaaagtttacgggtttcggagtttcat

SEQ ID NO: 94221 - DNA, 365 bp, Glycine max
  unsure (1)..(365): unsure at all n locations
ctagccacggcccacgagcatagaatcgcttatgagtatgctcaaatatatgcggaaaaagaagctagaggaagggtgatcgactctttacaccaagaggcaaccatgtggatggaccggtttgctcttaccttgaacgggagtcaagaacttccccgcttgttagccaaaggccaaggcaatggcagacacctactccacccccgaagagattcatgggcttctcggctattgtcagcatatgatagacttaatggcccacataattagaaatcgttaggaaacttgtatggtctctcagaccttgactggatacgacttctttnttgaataaaantgagtggcccatgttctactccaaaagc

SEQ ID NO: 94222 - DNA, 441 bp, Glycine max
  unsure (1)..(441): unsure at all n locations
caacagtgagctcaagcttcgaagggaatttatagttcaatcacgagctcataacatggttntgaaagaggagttagctgcttgctcaaggtccaaaagaaacttgtctcagcgtttatgcgagacagagaccaacatgttagccatcatcagcaagtaccaagaagaattaaatctagccacggcccacgagcacaaagtggcagacgagtatgcccgagtgtacacggaaaaggaggctagaggaagggtgatcgactcgttacgtcaagaggcaataatgtggatggaccgatttgctcttaccttgaacgagagtcaagaacttccccgatttctagccaaggccaaagcaatggcagacacctactccgcccncgaggagatccacaaacttctcagctattgtctgcatatgatagacttaatggcccatataat

SEQ ID NO: 94223 - DNA, 381 bp, Glycine max
  unsure (1)..(381): unsure at all n locations
tggcactcacaaacnngtttttttttctgttctgccgcaattaatcagctattgttatttctcttaagagatactccaagctcaaaagcccacattattcgagttttatgtcatgttcttactatggcttcgcagaatgatctccttgatcagggttctgtatctaataaaggcttgagatctctagttcaggtcctcaattcatcaaatgaggaaacccaagaatatgcagcttcagttctagctgatatatttattgcaagacaagacatctgtgatagtcttgcgactgatgagattgtacttccttgcatgaaacttttgactagcncaactcaagttgttgccactcaatcagctcgagtgttaagtgctctgtct

SEQ ID NO: 94224 - DNA, 379 bp, Glycine max
  unsure (1)..(379): unsure at all n locations
gctccttgagaagctagaagctagctactctatcttctctcataactaagctcacctccttgagaagcttccttaagaagattcctaaagaagctagagcgtagctacacatacctctctaatagctaagctcacctccttgagatgagaagctagagcttagctacacacccnctataatagctaagctcacccccatgacaaanaacatganaatacaaaaaaaaaagtccttactacaaagactactcanaatgccccgaaatacaaggctaaaaccctatactactagaatggccaaaatacaaggcccaaacgaagaaaaaacctattctaatanttacaaagataagcgggctcatgcttggnccatgggctc

SEQ ID NO: 94225 - DNA, 374 bp, Glycine max
  unsure (1)..(374): unsure at all n locations
ttagcatggcctccgngatataagccattagatcttcnattgctttttttgttgcctncatcngnncttacactcccntcttattatccattcttctggatcaagtgttataggggtgcctttgcgctttcttagttatggtgagttccctaaagatacaaacgatggtgagtatgccaccaaaacatgaatatgctaatgaatgatcagagcacttggatccacctcaacgccctttttatataacgtgatgagtttcagaacttctcgctttataaaaaagaacaaagcctttatctatccaaaatcatactaaagtcgtacaatagaacctaacggtttctaattttattggccatcaaatctatcctgtg

SEQ ID NO: 94226 - DNA, 187 bp, Glycine max
  unsure (1)..(187): unsure at all n locations
ttgaccaaatcctactaccaanaccttgacccagtttatattctctatcctaccctcggaagcaaaaaaagaagagaacggagaattccaatcaaaggaacggaaattcccaatcatagagtgggcgaaagccccatagaatagaatgaacattccccatcctagaatgggaaaaagaaaaaaagag

SEQ ID NO: 94227 - DNA, 484 bp, Glycine max
gagccatcattggatactcgtagagtaaaattatttttttgttcgaaggagagaataccatatgagagaaactcacactaaagaagagattgttggagtacacatgtaatgtgaagcttcacattgggtagaaatgagaacgatgaattccatatctgtgaaagaaagaccataaacctatgccttaaggttgagttaaagtttgatgtcaagttcacttatatggttgttcatgactcattggtgtaaatctctccattgttaaccctcttggatttaacaaccaatgtatatgtcacatctataagtaattcttgaatttctcatattttatacatgtaaaaatagtgataaagttgcaaccacacacttcttgttatgtgttttggcctgcatggattatgagcgttagtattaaatcctacatttacaatgcttaaactaatgtattgtctacacagatgtgtgtcacgtgaccatttct

SEQ ID NO: 94228 - DNA, 388 bp, Glycine max
  unsure (1)..(388): unsure at all n locations
taacatgaaaataaatccccactagtctttaaataacttagcattctagaaaacatttagtaagctaagagaatataagaagtcaccagaaaatttaggccaaaaaattattacgaaaattacaaataaaataacaaaaattgaacttagttattatctaatgagcccaatattaatagtccaccaaaattgatcaactcagctcatgagtgcttcttatcttgtaaattgggcttctcaaagtgattcatgaagttgacgtcaaaacatcttcatcaatttgcaggaaagtgacctaattaggtgcaacccttaattcaaattgattttctttctctttgatctttaatatcaggccntgcaatgctcgcttcatcctcttagtctt

SEQ ID NO: 94229 - DNA, 422 bp, Glycine max
  unsure (1)..(422): unsure at all n locations
ggtcggcacaggagcataaaccacagagtctggcgacaagtgcagatattttattcatggccagttgggttaccaagttaaccaaggcatctagtataccttcaagcttcttagtctcacctgatgaatatgtggctacttcatgcactcctctaatgacaatagcatcacttctggcactaaattgctaggagtttgaagccattgtctcaattaaatttttggcttcagtaggggtcatgtctctaagggctccaccactggcagcatctatcatacttctctccatgttgctgagtccttcataaaaatattgcacgagaagctgctctgaaatctggtggtgagggcaactagcacataatttnttgaatctctcccagtattcatataggctctcttcacataggctctctccactg

SEQ ID NO: 94230 - DNA, 269 bp, Glycine max
  unsure (1)..(269): unsure at all n locations
tctttcaaccgacattgcgcaatttcttttacaaacgctggccgataatgtttttttattaaccgaagaagaaggttcttgttttggtgttgcctaanaaatttacaacgtatgacggctatggtttttcgtgcgagctcaaccgagggttcgttcccacccacattggcatgtgttcttctcattaagaggataaaatacgttcgccaccccgcaaaacaaaaaaaaacatatttacggaatgacaaaaaatgatacggcgtcgcatg

SEQ ID NO: 94231 - DNA, 407 bp, Glycine max
atatgtcatgtgcctgaatcggacctccgatagaaaatttatgaccatttgaacttctctagagcttccgttgcttaattacgagcttctcgatatctgatgtgcctgaatcggacatccgattgaaaaggtgggaacaatttaatttctccagagcttccgctgctcaatattgagcgtctcagaatgtgatgttcctgaatcggacctccgtgtgataacttatgaccatctgaattgctctaaatctttcgtgagtcaatttcgggcggctccatatgtgatgtgcttgatcggaacctcgtgtgaaaaggtatgaccatttgacattcttgagatcttccgtggatcaattacggccggttccatactgtatgtgcttgaatccgacctcgagagaaaagtat

SEQ ID NO: 94232 - DNA, 318 bp, Glycine max
ggttaatagatgtttacattcaatgctatctcctttcagatgcagctttatgccgtatcaagtcactcctttgtatgaaacacatgggatgctgagcttcactagcgaaatggtaggttaagaataatgacttgtgatacatatgtgataggtattctacctatacgattaagaagaacggcacatatctggcattttcctacataaaggataaaaacatatgttctgaatgttctccctcatgaaaactattgaccatcgccatttccaacatagtaatacctcctgtttctcctcatgttctgatcaatatgtctt

SEQ ID NO: 94233 - DNA, 333 bp, Glycine max
  unsure (1)..(333): unsure at all n locations
gaccttgaaactaactataccaatgtaaatcactacagaaattgcttattttttgaagtgtcctattgatgcaagcacnggtcgttgctcttcttcaataaaagagatcatgagaaaagatagaaactaaaaagaaggttgtgcacagagcatgagaagatatattcaaataaccctaccaagtgaagtgagcttcttcaaccaacacatgtgacaacctctgtacaccggagaatgaatcttacatgcattnttaaagtgtntctatgttactttccaatctanatagagggtttaacacaataatctatgtggatccagtgcaaagattat

SEQ ID NO: 94234 - DNA, 324 bp, Glycine max
  unsure (1)..(324): unsure at all n locations
gagtccactggtattattgcatanggtacactgagtatgtaaagggataatattactcangtatttggccaggccagatacctgagtatgtaaggctcacttgtttataaggtgaccttangtatttggcaaggtcatatacttgaatatgtaaggatcacttgtttataaggtgactagagtactcangtatgtggcaaggtcgaatacttgaatatgtaaggatcaccttatgtgatccttacaaacttaagtattcaaatggctagccttatacctaagtgtagaggagtcacctctgtgtataaggtgacaagagtactc

SEQ ID NO: 94235 - DNA, 460 bp, Glycine max
  unsure (1)..(460): unsure at all n locations
gcttaggctgctcaattgctccaggttgctgcatggaagggtttatgtttgtatagnnggcatcagaggagcataaaccacagactcttgcgacaggtacaaatttctgattcaggccagctgggttaccaagttaaccaatgcatctagtttgccttcaagcttcttagcttcagatgagtttacagctacctcatgcactcctttaatgactatggcatcatttctggcgctaaactgctgggagttggaagccatcttctcaatcaagtttcttgcttcagcaggagtcatgtctccaagggctccaccactggcagcatctatgatacttctctccatattactgagtccttcataaaaatattggagaagaagctgctctgaaatctgatggtgagggcaactggcacantatgttttaaatctcttccaatattcatatangctctcttcactg

SEQ ID NO: 94236 - DNA, 296 bp, Glycine max
ggagggagggttatacttgatttgtggatgtggagaattgttttgcaccatcgcccgactgccacctagtaccacatgtgatggataccccataatcctactagctctaaatgaggaagagtggaaaggtgagacttcctacttttattcgttgaccacagagtggtacctggagatatgtcacagtggtcacgagaccttgtggacctaaggtggggtgctattgcccagagccagctggaccaatcgcgacccaacccgggcatagtcagacagtgagaacctgtgatgtacct

SEQ ID NO: 94237 - DNA, 196 bp, Glycine max
tattagattaagggatcattatcttttgggccttgtatttagggctccatagtgaaaggaggatatgctagtaatgcaagattttacaactcttgaattttatggcacctagactattctttgtattgggggtaagtttataatttcacatacattaagtgcattatttgatgttagagatgaacgatatatttaa

SEQ ID NO: 94238 - DNA, 182 bp, Glycine max
aattcacagaaaagggcctcatgagagacacttgacacgcaaagaaaaaggctctcagaggcagccaccatcatagaggcgagggacaatcgcaaacctctatgcaagggaaccagacactgggcgtgtataactccccccccaccaacccataactcatatatgggcttctacagagcact

SEQ ID NO: 94239 - DNA, 344 bp, Glycine max
  unsure (1)..(344): unsure at all n locations
acacaacttaaagaagcccgcngaagctccttttatttgaatcttgatcagagtgagttcgtgacctaacactgttgctcatgtttgtctcctttcctaatcttccaaggcgcactgaatcagaagctttagttcttatatggatatcttgaggtagaagtgattatccatagattttcagtatgcttaattgaagaatgtgctgatctccttttcttattctttttatgacattgaggtaactgttctatcaaagtttgtttttacgccatattcggcattgacaaagtgaanatgatagtggaggtaattattcaatcaatctgctgatgaagggtactttg

SEQ ID NO: 94240 - DNA, 342 bp, Glycine max
  unsure (1)..(342): unsure at all n locations
acgagacgctcgatatcgaatattgaacctctgaggagattcaaacgacaataacttntttctcggatgtttgattgagactcgtattatatccagacgctcgaaattgaatgttgaagctctgagctaattcagacgacaataacgttttactcggatgtctgaatgagtcccgtaatatatcgagacgctcgaaattgaatgttgaatctctgagccaatccaaacgacaataacattttactcggatgtctgattgaggcccgtaatatatctagacgctctgaattgaatgtggaggctctgagcatattcaaacgacaataactttttactcggatg

SEQ ID NO: 94241 - DNA, 415 bp, Glycine max
  unsure (1)..(415): unsure at all n locations
gaagctcagtgtgaagtatgcaattctgcacttgattgtagctgcttactgggnccccaccagacatactttcactgttgccacaggtttgggtaaatatctgtatgctgctggaaccaagtccaaatttaattttggaaactatattattgatcaaactgttaagcattcagaatcatttgctgtcgaattacccattgccttccctactgtattgtgtggcattatgttgagtcaacatccaaatattttaaacaacattgactctgtaatgaagagagaatatactatatccctgcattacaaactgtttgaagggacacatgtcccatacattgtctcgacatcatggaaagctgctagcttaagagctgtgtccaatgatgctcttattgctgaactcacggacacatgc

SEQ ID NO: 94242 - DNA, 427 bp, Glycine max
  unsure (1)..(427): unsure at all n locations
tgacaatagcancactcccggcactaaatgagagggagatngaagccatcttcttaattaaatttcttgcttcaacaagggtcatgtcttcaatggctccaccactagcatcatctatcatacttctctccatgttgctgagtccttcataaaaatattggagaagaaactgctttgaaatcttgtggtgagggcaatctgcacataattttttaaatctctcccagtatgcatataagctctcttcactgattttgctaatacctgaaaaatactttctgaaggctgtggtcctggaagcatggaaattttttttctaagaatactctcttgacgtcattccagctcatgatggaccttggagcaacgtaatatatcccatcctttgccactctctctaaagaatgatgaaacaccttcataaata

SEQ ID NO: 94243 - DNA, 266 bp, Glycine max
ttcttaaaacaccatttctctaatgatgcaatctttccccacaaggctttgtatataagactcaagaatattgggccagagatgctagagatggccctaaggttctcatgagccttatggttgatttcagacccatggacgaagtatgagcccgcttatctttgttcatatttaattaagggatcattatatttttatccttgggttgacggctccataatataagtaaggtaccctatacatgtaggatatttcatcccttgtat

SEQ ID NO: 94244 - DNA, 421 bp, Glycine max
  unsure (1)..(421): unsure at all n locations
tcacgctttgggcatatggatgccctatggagacttttctctcnattatcgacctttatcngggngaattcacaacgtctgttgtcaaattgctaacactattatgaagggatttatcattatattgtgctcgtgctatttaccgcagtcgtggttaatataccacgaccatgatcaagtgtagagtcttcaaatctaaatataattgtgcaatttccaactatatcactcaattgagcaattgtacatctgtaatacagaactagtatcccaacgtgagtcttgccaagaaaatgcatgcaaaaaaacttacataatatcattcaaaaagtggtttatcatgaatgatgcacaatgattgcttttacaaagtctatagacccatctataccttcataaacatatcagtcccaaaatgcac

SEQ ID NO: 94245 - DNA, 345 bp, Glycine max
tgactacatgtatatgaatctgtggccacctcttggactcctctaaggacaataacatcatttcttgcactgaattgttgggagtcagaagccatcttctcaatcaaattcctagcctcaacaggggtcatatcaccaagagctccaccattggtaccatcaatcatactcctctccatgttgctaagtccctcatagaaatatttaagaatgagttgcccagacatatgatggttagggcagcttgcacataatttcttgaatctttcccagtactcatacaagctctctccactaaattgactgatgcctgaaatgtcttttcacatggcagcggtcctagat

SEQ ID NO: 94246 - DNA, 346 bp, Glycine max
  unsure (1)..(346): unsure at all n locations
aatgtatgttggatagaaaaaaaaaaataacggtggatgtaatattacacaatgatgcacaaatatgatgtgtacccagtacataaatgtggtctgacaagcaagattattctaaaaatatatagaattcagtatatctatcataactcataanacatatgcaattgcaactcttcaaatccaacttaagaaaacatcatggatattattaaaaacaaaattaaatatataaatcattgtcatcataaatcacttcctattgtctacaaataggaatagtatcaatctcatttttttctcgaatcatccataagaacatcttaaacacaacgtcggatgtcacaat

SEQ ID NO: 94247 - DNA, 417 bp, Glycine max
  unsure (1)..(417): unsure at all n locations
tcgnaagatatagaacataagtaagactcccactaaactaaggtactatcaggaattacacccatatgagcagtgtgctcatgaaaaactntaagtgtcatacctttagtaagtggatcagctagcatgcaatgagttcctatatgttctatgcaaatctgtattttctgaagtttttatttaacaaccaaatactttatgtcaacaaacttttacttggttgaatccttaataatactgctaagatattgtcccaataaacacccgatgactacttaatgttgacgacaacaggtaaatcagttataataatttagcaatcataaatcttagtatgatgtttcatagcaaaatattaaatccaccaacatggctaaatgtggatccttatgtggagtgatcgctatcaagacattc

SEQ ID NO: 94248 - DNA, 348 bp, Glycine max
tcttggatggtctttattttctcacggtccactgggaccgcctttctaccttcttccaaacctaagaatactatgtgatgtacacaagaagacccacttctctatatgcgcatagagggagatcctcctaatgactgacagaacttcgcgagagatgtcctaagtgaccatctgcgctcctactatccactaagatatcgtcagaagaaacaacgacgaatatacctgtgaactcccttaagacatgatgcataagcctcataaaggtgctgggtgcgttagtgagcccaaaaagcattactttgccttcatactaaccagacttggtcttgaaagccagttttcact

SEQ ID NO: 94249 - DNA, 286 bp, Glycine max
  unsure (1)..(286): unsure at all n locations
atggctaaaagtcaccactcgaaggacccattggagctcagagatccagcctccatagaagcttctcaagcaagcttccatcacttngtctataactcttgatagtgtgctcaagagatacactcaaaattgggtgaggctttggttgattaaaatacaatggtgcttctaggatgaataacctctaagactaaaaaatctctctttaagcagtgcaccgatctcctcttccagtccttattgtaggtcctcttaaacgctactgaagaatattatgactatcaag

SEQ ID NO: 94250 - DNA, 476 bp, Glycine max
  unsure (1)..(476): unsure at all n locations
atctttcaccaaatcatataagataaaggcattcangttatccgcttanataccctcccaaacgtcaaattctccgcctatatattcaacctttccatcactggcactttgagtgaatcttcctccatggtgcaatactaaagttatattgtcattcattctacacaattagaaaccgcaaacatggtcagatattangaaataaaaaaacctacctcanaaagcgcgaagacattgacattgtcaaaaaccgcgaagacacaatcaaaaaccaaaaacattgtcatctataaaaacagagcatcataaacgaaaataataaacgatcataaacctccctacgaagcgcgaagacaatgccgcagatgaaacccctcgaacatgtaaaaccccaaattaaaccaccaaaacaatgcacacgaatttgatgaaaccaccaacctgacanaaagcgcgaaccctcaatcacgagaatg

SEQ ID NO: 94251 - DNA, 330 bp, Glycine max
tcccgtatccgtacttggaaggatctgattaccgccttcctaatgcattatcattacaattctgatatggctccggaccgtactcaactgcagaatatgttcaagaaagagggtgaaacctttatagaatatgcgcagcgatggagggatttggcggcacaagtagctcctcccatggttgagagagagatgatcaccatgatggtagacactctgccagtgttctactatgagaagctagtgggttacatgccgtccagctttgcggatctggtgtttgccggggaaagaatcgaggttggattgaagaaaggaaagtttgatcacgtt

SEQ ID NO: 94252 - DNA, 340 bp, Glycine max
agatgaaggacaagagaaaggtactacacgagtggatgaagaatgtgccactatctctagtgctactgaagtataatgggcctctgatctcttgcccctggtcttcttacgccctctgaatgctactgatggatcatctatattccaatagttcttcttaatgtacgcgaagttaatgacagggctgaggctctccatggatctacaatctgatgtgactcctctagctctacacaaagttgtgattaacgcctgaaattccagcctagaggggccatgctgtgccgtatatagatctgtgagagatgacgtacccacttcatgtccttcttatattatt

SEQ ID NO: 94253 - DNA, 234 bp, Glycine max
tatatcaacacgggctaaataaaaactctatacacggtcaaagattactttttctgttatcagcatacactcggggttatacaaaaatctctttatataccctcatgacccaagaatttcatttgtacaccttatctacacacacacaaaagcctgccatacatgttgtacatataaaaacgtctttcttttgtttatatatagacacaacatgtgttcacaacgcctcttttt

SEQ ID NO: 94254 - DNA, 363 bp, Glycine max
attgaattggtcaatcgaatgatcatgcgaatagttcatgttgccattacaatttacaagacatctctctatgttgaaccagaaagttgtaaggtcatattcatatatatggcactaataagggaaatgagcaagtgaatctccacttcaacagaaaaaggatggggaagcaaggtgcccatttctccatcatcaacaccagatgatgctgatatcccagagagctgaatctccacccagcccatgaatcttggcacactggatatctacacattgtccatagtgaactggtattttcattgagctttgtcatcaaatttgaagcatcctaattcctaatcattactattatgcagaaacatt

SEQ ID NO: 94255 - DNA, 420 bp, Glycine max
  unsure (1)..(420): unsure at all n locations
cattcttcttngggcatgctttcttatgctactactacacatcctatgactcttcctttcggtaaactcactcctcgagggctataggaaaagcgaccttgataatgccggaagtggcgaacaagtaataggaggaggcgtggcacaagaagtcaatctaatctttaataaagcaaggacttcttcttctatacccggtcatccttatataggatgaatgtgcagctaggggactaaaaggactaatggatcatcatanaatacttttcaatacgaggatataaaggatagagaatntgcataataggtcttgtgcgttgcaagtcgggtgtcttccttcgctcagtcattccattcagtgcaggcattcctgcttttcttttatgagggacgttgggaccttaccttgaacgtcacaca

SEQ ID NO: 94256 - DNA, 377 bp, Glycine max
  unsure (1)..(377): unsure at all n locations
tccanagatgggaattgcctggtatcgtactgttctacagttctataatcagtgctcttccgcttcctggaggccatctacaataaaaagaacccatcggtttattagaccacaagttatcaaaattgaaatagaaaataaaaactgaaattggcaatgtgcgctaagtgagacgcagcttgcttagcgcgccttatgaaaaacaacacactggcttagcgcaattggggtgcgcttagccagtcatgacaggaaatttttctctgcataattggcttatcgagatagtccctcacttagcttggagcacttttatttcaaacaatggcttacaagcagcgctggcttggtcttatgcatgccacaatgaatagcac

SEQ ID NO: 94257 - DNA, 471 bp, Glycine max
tcatgctgctcattgactttctattgttttactgaaagactttgatctgtctcgtgatatgcagaagaacatagaccacagactcttgccatctgtgtagatctctgattcatggcaagctgaattaccaggttgaccaaggcatcaaagtttccttcaacatttttatttccagtagatgaatatgaattcgcggccacctcatggactcctctaagaacaatagcattatctcttgcactgaattgacgggagttagaagccatcttctcaatcaaatctctagcctcagtatgggtcatatcaccaagagctccaccactgacagcatcaatcatactcctctccatgttgctgagtccctcatagaaatattgaacaacgagttgctcataaatctgagtggtgaggacaactcgcacacaatttcttgaatctttcatagtactcatacaagctttctccactaag

SEQ ID NO: 94258 - DNA, 417 bp, Glycine max
  unsure (1)..(417): unsure at all n locations
agatgtaaatataagtctacttttttgtagggcttgattttgatataaatgaaaaaagaatttctctatttggtgaatttttgtgaaaggtctatggtaaagatgtgattctgtttaactgctaataaggtgtcttcctataattcttaattngcaattttggtttttttttggctcatgatgttgattcttttattctaaaaaatctgtaattttgattaatctttaatcttacatatatttattaattataaaatttcaaaacagctaaaaatcatattccaaaatgctatttcaaattaaggtgacaaatttccctatacccctctacttcctccaatcttgacaagttcactaccatctgtggcataacttattcgcgatccctcaaaaattatctctgttcttcaaccaccc

SEQ ID NO: 94259 - DNA, 231 bp, Glycine max
  unsure (1)..(231): unsure at all n locations
cctcacgaatccttctntagtggacgtagtggtggaagagacttncctactccaccctactcttcctccaccatgacttanggagttntntcttttcctatctccttctttgcttntattacacttgtccgcttctctttgatgaattaattgtttttaatcttttaattgtgctacattgaggacaatgtgttgtttaagtatggggggggggggagtgtgctatagcat

SEQ ID NO: 94260 - DNA, 312 bp, Glycine max
  unsure (1)..(312): unsure at all n locations
ccttcacccgacgaagacactgacaaaaacttatcttctccttcttggacaaagtatggcaggctgnnggcaagtaaattntcttcccatcagaccttggatgcaactgtgatcttatacccatatcagctagatcttgacgggtattcaagccatccttcgtcttgccttgaatgttaaggagcgttccaatcacactgtcacaaacattnttctccacatgcataacatcaatacaatgtctaacttcaagatcacaccagtacggaagatcaaagaatatggacctcttcttccatatgcaactctgac

SEQ ID NO: 94261 - DNA, 379 bp, Glycine max
  unsure (1)..(379): unsure at all n locations
acttgaagagccatangtgatagtgtacaatactcgtagctcgtgtgaagctagtgaaacttggtgcgttttcaagaattgaacgtagtctctgtagtagagactaaccaatataaagcttcttgcgctggatctttcttgattttctctaagctttatctgactaaagggtgcgaatatgttttagattcaaatagacatcttgtgtttggtagaatcaattctacatagtctgatacgttgctagaagaatctatcatatgctccgagaacgtttatcatatgaaatgttactcttcgcnagtgtaccactcctctaatagtaatttcggagtccagtatatttcataggattattacctttattgatactctcatt

SEQ ID NO: 94262 - DNA, 270 bp, Glycine max
ttgggatcttattcaaccatgagttttgactcgtagccacttatgatatccggcgttatcccagtactgctctgctaagacttttgtgctttctttacgccgattccttgccttgggaactacttggagtaccctacgcgatggtggtcactacaaaccccgtgcgatgaaaggcgtgatgctttcgtttaatggcgctcctctaaggggtagccaagctgtcttatggtgagaacgagattataatttatacaatcccttgttcccttc

SEQ ID NO: 94263 - DNA, 387 bp, Glycine max
  unsure (1)..(387): unsure at all n locations
atcctgagcaactatgtgtgtcctactatgacttgaganacaaaggtgatcaaataacaagcagagatntataaggtactaggttgcctcctagtagcgcttctttaacgtcttgagctgngcgctcgatgacttgtcggtcacggacctantactttgcttacctttggctntggacttggtcgcctattggtcgaccatgtgtcgtaggcaatactcanacctttntgtggatgagcagaggtgaactctagaggtggtggtgtctcgccctacgcctgtctggtggcgcagtacttcttgatganagcccgtgtaatgcggggcctaatgaccttgttgtggcgaccgacactccgtagaactgacagaggcccattatcagag

SEQ ID NO: 94264 - DNA, 415 bp, Glycine max
  unsure (1)..(415): unsure at all n locations
cacatgcacgcactctcacagtaatcagactctggccattggatatagatcagatgattcatactttatgtntataaatcagatattaaacaaacttaagatctgaaccattcaatcttcatcaaaaaattataaagcagtacctgcatgaatgtgtgtgatatgcaagtgcaccgaatctatgtgccctcaacacaatcaacctaccaataacaataacaagttcaacaacaaaagntgcaaaaccgagccttcctttcctactcacctcacaacatcacatttccaacacacacaatctctgaaccctccttagtggtcctatattccaacacccatcaacacgtcctcagagtctactttagggactcctctcatcttttcacccatccttaactcacccacaattcacttt

SEQ ID NO: 94265 - DNA, 149 bp, Glycine max
  unsure (1)..(149): unsure at all n locations
ccgacgaagacactgacatagacttatcttctccttcttggacatagtatggcaggctgtgggcaagtaaattatctgtccatcagaccgtggatgcaactgggatcttatacccatatcanctagatcttgacgggtattcatgccat

SEQ ID NO: 94266 - DNA, 244 bp, Glycine max
  unsure (1)..(244): unsure at all n locations
tctcaagtggactgttggtgtcttgtangggattntaattgtattaaacatccctctgagagaatgggtagccatcacagtaattcagactctaacctgataattgaattcaatgattggctacatgatatggaggttgatgacattccctgtgtgggtaagctttttacctagtttaggccaaatggatcctgtcgcaacctacccttctgcgggagggcgacacgtgactcgcgggatgcgt

SEQ ID NO: 94267 - DNA, 319 bp, Glycine max
tctgcactttatgcagaaattgtgctgttgaaatgggcagcagaatttttgcttagtgtggaaaaatgctatgtatctgctggttgcggaaagaatagtacaagaatgagttctggatgtttgctagtagatcccaacggtttatggattggaacgatagagatgttactggggtcttttagcgagaaaaaattgtgattttggtttgagttgtgggcaaagtatcctgcctttgccctggtttgcctggtttggtaatttgtggagattaggattctaatcacttggatagttggggaagcttgagagattgattggg

SEQ ID NO: 94268 - DNA, 307 bp, Glycine max
  unsure (1)..(307): unsure at all n locations
actcgatctgcgacatctgccgtgaactaacgactgatgttattcatccgacattgcacaatcttctttagataagctcgctggtcgataatgagctttttactgcagagtaaattntcttgtattggtgtcgcataaataaagcacaatgtacttctgctaccgttttcgtgcgacgtcaaccgacattatgtgtccgccgggataacattatcacccctctgctaaaacatatttgctacgcgcttcatgcatattccatcacgattgatgagaactaactccgacaccgcgtgaatagtccact

SEQ ID NO: 94269 - DNA, 123 bp, Glycine max
tttaccactgaaaatttaaaaaccggcaatggtttacgaagagatgtggagggtgtaaagtcaagactcgtggtttggcagatacacatatgtcgcggaacttacccttgaaaaaatgtacgg

SEQ ID NO: 94270 - DNA, 323 bp, Glycine max
  unsure (1)..(323): unsure at all n locations
ctacttcacaacctcttaatagtctacacatagatttatgtggtccctctaaactgagtngngtggtattactatggcctacgtatagtaaatgattactcaaagctcacatggactctgttttcgaaaaccaaaaatgaagcatttgatgctcttcacaaactcttcaatgtgattcaaaatacatataaaaggtctcaacacngtttcacttagaagtgatcatggagcttgagttacaaatgagtcttttgaaaacttttgtgaagaaaatggacttcaccatactatttctaccctaagaacaccctcatataatggtg

SEQ ID NO: 94271 - DNA, 392 bp, Glycine max
cttgaggagacactgaattaatttatgcaaatgtccatgttctactatatgagcacaaattcatccatcaagaacctatagatacaaatgggacaattagccaaacaaatggcttaaagacccactaacaactttagatccaacaccgagaaaaattccaaagagtagtgtaagggaattttcactatgagggaaagtgctaagaaggaaaagagaattgaggaggatgtgcatgatgaggaaggagaaaagaaagaagagggagaaaaagattagagcaatgaaagtggtgatgaagtctcaaccactaacacctagaccaatagccagttagcttatgaggctttaagagaaataccttcaacctcatcataagagacattttaccctct

SEQ ID NO: 94272 - DNA, 188 bp, Glycine max
  unsure (1)..(188): unsure at all n locations
tttaatggagactttccaccatggagatgcagcggaagacacaggagaagaggtgagaggaggcgccatccactanggaataagccatagaagaaggagcttcaccaccaagatgagccttggataagaagcttggagagcatgcttcaatggaggataagaaagaaggagagaaagagagagggggg

SEQ ID NO: 94273 - DNA, 331 bp, Glycine max
agctgtagttacagtggtaatgattggcctggctagatatgaaggtgatccacaaagtactagtagatttgtgtttttcatggggaacacaaccttcgttaggatgtaaaatagtagtcgatagtcactctttcgactcgtgacgtagaatatgtaacaactacttcatgtgtgtgccaagcagtctgtctcaagaatattttataacagtcgggcatgtcacgagaagagttaaccaagatctttgtggataataagtcagtcattgctctagcaaaaaatccagtgtttcatgatcgaatatacatattgtactcattcccactacata

SEQ ID NO: 94274 - DNA, 293 bp, Glycine max
  unsure (1)..(293): unsure at all n locations
gcttgcccncagctcgctcaggcgagcannnggtggtttcttcataatcaacaaccttatggagggcccaagtgggcctggttgctatntgcaccactcattttactaagtacacccnctgctcttttttggtgattcntttttcgtagagttacggatacttacgaatntcgtaacgatacttgttttctttccgtaatgttacagaaccttgtggatacataatcatcctctctttgacttacggaatattacngaaacctattaattatgcaacgatgctttcatttgat

SEQ ID NO: 94275 - DNA, 214 bp, Glycine max
tgaacatcgtctgttatatatactgctaatgggcacacacgtcatctacttgatacgcgatcctgactacttctcagtcgtacaacagatgactccttgcaaatatattgtttgataaattgcaatacttctacccaaattaacagaatactgaagcactgagatgatttcttagaaaaataaaaacctggtgagctcatctcctagcttgtga

SEQ ID NO: 94276 - DNA, 165 bp, Glycine max
  unsure (1)..(165): unsure at all n locations
atgttctctatactggactaatacacttgctgcccacagttcatggtcttgcaagtgaagatcctcttaagcatcttaaggagattcatatatgttgntccaccatgaagccccctgatgttcaagaagattatatctttctaaaggcttntcttcattctttgg

SEQ ID NO: 94277 - DNA, 242 bp, Glycine max
acgggtggaggtcgaagccgcacgagaagcagtggtagaggaaccccttcaccggcttctcgcacgcgttgcagtagcgcgaagtgtcgccggggggctgggagaggaagtggaatgagcatttgtggtagaaagggtggaacaaagaaggagaatgaatggaacagtgtgtgtgaagatcaaagtcacagatggagcacttgtagcgtgaccctatgcctagttccttgcacccgtcacat

SEQ ID NO: 94278 - DNA, 223 bp, Glycine max
  unsure (1)..(223): unsure at all n locations
tggataaagttgacctcttaatggattgtatagaagagctcatatcatatatggacacaacgaccacattacatcttatatctatcacataaataataaactttccctgcttctagacataatnggtattgcaggaagcaccaatctacattnaattttcactgtgtgaatgttttccagcaagctatctgcatgctattgttaagaaatatatgattaaaaa

SEQ ID NO: 94279 - DNA, 263 bp, Glycine max
  unsure (1)..(263): unsure at all n locations
aatctgtacctgtcgcaagggtntgtggtttgtgctcctctgctgaccaccatacagacctttgcccttccatgcagcaacctggagcaatngagcagcctgaagcttatgctgcagatatatacaatagacctcctcaacctcagcagcaaaatcaaccacagcagagcaattatgacctttccagcaacagatacaaccctggatggaggaatcactctaacctcagatggtccagtcctcagcaacaacaacagcagcct

SEQ ID NO: 94280 - DNA, 324 bp, Glycine max
ttgcgggtaaaggttgttttacatgaaggtcttgaatgtgagggccatatattatatcacccattgtagtttgtgcttttacctatatacgttaaatgagcgctttctgtgacgcaacctagttcttgattattttcattttgtttatcatgcatcgcataagattgaatctgctttatgatcaatgaaaaaggggatatcagcttatcgtgagtcataaatattggggggtggtcaacttggtttgggtagcgtactgttaataagtgaaaactattcattatatattcatctcttagtgcatatacttttcgtgtcatatta

SEQ ID NO: 94281 - DNA, 188 bp, Glycine max
  unsure (1)..(188): unsure at all n locations
gagtggtacctgtagatatgttcgcggggtcaagagaccttgtggacgtcatgtggggtgctattgcccaaaaccaagcttgaccaatcccgacccaacccgggcatagtcngtcagtgagaacctgtgatgtacctaaacatgcgagcttctggcagtcaacatatataaggaaaacaagaccacac

SEQ ID NO: 94282 - DNA, 387 bp, Glycine max
gaatataagatacatcttcttcgaccttggttattcttgactccatctcattgaagcgcatgtccacttgtaattccaaagtatcaaacctttcaccaacaaaggtttgaagaccatcgaacctatccaaaatcttttgaagagaagaatcttctctaccatgtccttcttcatcaacaggtcgagcagcctttttcacccaagatccatcatgctctttttgataaccaaatgatgcaatgacagttgcgcctattagaaaagatctcttgattggaacataaggttcagaatcaagaatgatgttaaagtgttgaaggaagagggtgactagatgtggatatggcaatggagcatctaatcacgatgccttatgcatgtgatatc

SEQ ID NO: 94283 - DNA, 203 bp, Glycine max
  unsure (1)..(203): unsure at all n locations
gatcaaataacaagcagagattataaggtactaggttccctcctagtagcgcttctttaccgcttgagctggacaccttatgacttgtcggtcacgggcctagtactttgcttacctctggctttggacttggtcgcctattggttgaccatgtgtcatangcaacgctctaaccttattgtggatgagctgaggtgaactct

SEQ ID NO: 94284 - DNA, 296 bp, Glycine max
tcttagtcacctgccgcatgcagcttcagaaatggtaaaaactcattgattcttatatatcgtatgatcacgaaactatatgatacattatgttcatagttcgatctgaaatcatccaatttttgtagacatttgtgaaatcgacttatggaagcaaacttggcataacctagagatatatactgtttgagaggactcttctaatcttcctttcttcagttccatactctataacatgtgcaagggtttttctgttcacctctgatagctatagataactgacatcggactgtttt

SEQ ID NO: 94285 - DNA, 387 bp, Glycine max
  unsure (1)..(387): unsure at all n locations
ctgcagctagatatgatgtggcacctatntcgaatcctctatgntgtccctatgtatataannacagcccacaatcacaatctntacaaactatattcatatgtcattgnggcatttcaccgagcacttggtgggcgccgtgttaggcatatattgcaagagaataggggcaatgtggcatgccccatcgcttcagaatacaacataggcctaaggccatccgctacaatgcctcaactctaacaaattaagcatataatacccataactgctccacanatatgagcacattctcacaatctatagcaccaaatgatgaacanatagcaccaatggaaagctaaaagctcatggattgagtcttacttgttggatgagtaggaatac

SEQ ID NO: 94286 - DNA, 322 bp, Glycine max
  unsure (1)..(322): unsure at all n locations
gcatcaacaagaatcaagccaaggctattgtgcaagcaatcaatggtgcanaacacaccanatgattatgatgatggatggctcanattctcacaaaggtaaactcatcactttcanattgagctttcanaactatcatgacatgtagaggagaatcaatgatttcaagtcacaaaatgtcaagaacctttatttcaaaacanatacccatttcttgaacatatctataattcanagaaaacatgcaaagtcgtacatgcacacaaaattgacccataatattaaactaaaaatccgacgagactaacaacattaacaaatt

SEQ ID NO: 94287 - DNA, 375 bp, Glycine max
tataaaatttgctttatggtgacagtgtcttttgaaaatttccattggatctagtgatgaaatctgttcattttcatgtgaaaaaaaggctaagttttgaaattcaaaaagtgagcaattctgcttagcgcataaccaccgcttagcgcaacttcaacgcacttggcgcaaaagagaatctggcagaacattagcattaagcttagctcaacaagtgccttcagccatgctaagcgcgagactagcgcttagcccaatttcactaactcacgctaagcgcgatggtggcactaagtgcaatgtcgcgaattcagagcctatttaaagctgccttgtcactatatggtgcaccttttagattgcttttcacacttg

SEQ ID NO: 94288 - DNA, 325 bp, Glycine max
  unsure (1)..(325): unsure at all n locations
atctctgagtcacctgcggcatgcaagcttctagccaaatggacttacctnngaataattcctttgatagcctctntgagcctatgttcccctttctttgttttgaagctcattacatgccttaagtgaaaaaccatgatatcaccttactccttaaagaatttggagccttggaattgtttgggaataagctgggaataagtatggggggtatgtttcattggaagatatgattcttggccatgcttaatgttttattttggccatgcttgatgtatatatatatngcctagnntcttcttttatatcaatttcctactggtca

SEQ ID NO: 94289 - DNA, 217 bp, Glycine max
  unsure (1)..(217): unsure at all n locations
tagcacctgcgctcgctggagtgtgggacccgctttagtctagatagctctnggaaacgtgagctcattggaggtggcaacaggcgatggtgggtatcacttgattgtggatgtggagaatcgttntgcaccatcgccctgaccgccacctagaccacatgtgatgggtaccccataatcctacaagcttgaaatgaggaagtgtagaagggtgaga

SEQ ID NO: 94290 - DNA, 324 bp, Glycine max
ggaaggttttggggggttttatgtttagaaagataaaaacaaatggagataaggtataaattacatgcaagctgagtgctgttaattcaattgaagataattgcttatagctattttagtagctctgtcctttatgataaattgattagaaattattcgtatctattctatattaagagataagtgaaaagcatgtatcattatgggtacttttagaaaatatgtatgtatataatatttcatctttatcggaggtaattgtattttttttgacagggttaattttaatttactaatatttgtgaaaataatttaatttttttt

SEQ ID NO: 94291 - DNA, 242 bp, Glycine max
ggactcctagcacagccacctggctaaggaactcctccatgctcatcataagctgcagacctgagctctgtaagctctgcatgatgatcacatgtcctctgtgcatgctctgcaacatagcatataatgtctttgaagtaaaggaagatggtcctatagaaggagttgtaataagagctattatcggtgcagatgcagatgaagtagaagatactagaactgtattggaaggagctgctgat

SEQ ID NO: 94292 - DNA, 371 bp, Glycine max
  unsure (1)..(371): unsure at all n locations
gttatctcttcactcatactttcaaaactcattttgtgtattaatactctagctgaaatatatcacaatcatcaacaagatgtcctaactacatgcaagatattaaaataaagatacagaagggaaagataagctgggttgcctcccagtaagcgcttctttaacgtcactagcttgacgcatcatcctattatccaggatccataaaagatcccacttcaagcaccttcttctcaagtcttcttntctccatcacatgaactgtaaaatagacattccagtcaggtggctctttatcttcatgagatagatcanagactgatttttatcttctattccattngcacatcttctttcatattactacacac

SEQ ID NO: 94293 - DNA, 269 bp, Glycine max
gatacatgggtagatatgaaaaagatcatgaggaagccgtatgtgccggctagttactcaagggatttgaaattcaagctccaaaaactaacccaatgcaacaagggggttgaggagtatttcaaggaaatgaatgtgctcatgattcaagcaaagattgaagaagatgaggaggtaactatggctcgatttcttaatggtttgactaatgatatctgcgattttgttgagctgcacgagtttgttgaaatggatgatttgcttcacaa

SEQ ID NO: 94294 - DNA, 326 bp, Glycine max
  unsure (1)..(326): unsure at all n locations
acttcctaagaagcttctntgatattaacttcttgagaagctagagcttagctacacacactcatctaataactaagttcaccctcctgagaagcttccttgagaagctagagcttagctacacacacccatctaaaaactaagctcacctccttgacaaaatacatgagaataagnaaaaagtccctactacaaagactactcanaatgccctgagatacaaaggctaaaccctatactaatagaatggncaaaatacaaggcccaaaagaaaggaaaacctattctaatatctacaaagaagagtggatccaaccttgacccat

SEQ ID NO: 94295 - DNA, 281 bp, Glycine max
ttagttgttctctgagtgcatactcgtatgatgaggagttaatctcactgctctcatgtcgcgtccttggagatcaatgcaaaatgctaccgaaatttcttgacaataacaaaagagacttaaccttgacgtatgaatctaccataaaaatatgtcttcttgaatgggatagggccacacctttaataagagtagtgagagtctcatgcattcaataactctgtgagtatcaccgagtacttattagatggatcaacattggatgaacaaaagtcacatga

SEQ ID NO: 94296 - DNA, 268 bp, Glycine max
caaagtgcatgaagaacaaggtgaaggcatccaaaatagtatcatctagagcaagatctctaagtgagaaatcaatatttttgcttcaaccctctctgtgagagcaacccacttttgtattgtgcttacaaatctggaatattctttgatagaagtgagagatttaataccagagtggaattcctctttcaaggtgaagattatgattctgtgcagtaaagcatatatcctcttctttattgtagtacagtactagatggcaaagctg

SEQ ID NO: 94297 - DNA, 222 bp, Glycine max
  unsure (1)..(222): unsure at all n locations
atacatgtggactatgtggcggtcgggcgatgtgtgcacaacaagtttccacatccacaatgcgcgcataaacccaccatcctctatttgccacctncaactgagctcacgtactctcacgtagcccatattctcgtttctctcaacaccgggtccccatcaattctcccaagctgtcccaacatcaaagtaatacaacattcacacagcacaagctatcac

SEQ ID NO: 94298 - DNA, 284 bp, Glycine max
atgctatgtgctcgcgactggtcccttttccccttccaacatgagttcattattgctaaccccataggctccgcgaaatttgttccggccatacttttccttgcgagccctcttggtctctcgttcaagggctcttgcggtaattgcattctcttcccgtaacccggcacactcctttcgaacgtgtgttgcagccaacttgaacttctccttggcgagatttgcctttcctaactcgcttttgagagctttggacttctcgtcctcttccggggcttcaacat

SEQ ID NO: 94299 - DNA, 296 bp, Glycine max
  unsure (1)..(296): unsure at all n locations
atctctgagtcacctgcggcatgcaagctacatatctgttaagtccaagcccataataatattaatctagacaagataagataagaattgatataatanaactagatgacataaaatctagataagataagataagaataaatctagatgaaataatatctaggtgagatataatctggataagataagaattggtagaataaaattgtctgctcttntcaagtccaagcccaactgcttataatttcctganataaattaaaacacaaattagtccagtaggccaaatgataaat

SEQ ID NO: 94300 - DNA, 344 bp, Glycine max
  unsure (1)..(344): unsure at all n locations
gtgagaaagtgtggaagagtcactcttcctacttntattcgttgaccatagagtggtacctgaagatatgtcacggnggtcaggagaaccttgggacgtcagggtgggtgctattgcccanaaccaagctngaccaatcccgacccaacccgggcatcgattacacagtgtaaatggcaggtttccatgttctgaagctgtgtaactcgagtntggcctctggtaatcgattaccaatgttgtgtaatcgattaccagagaagaaaacccttgaggcatacctcntaactacatgtagcggttatgggactcattgtgtngtacacgtaattagaattctcatg

SEQ ID NO: 94301 - DNA, 134 bp, Glycine max
aagcttttagatgcaaagaggctgtaaataaaataaaacaacgaagataagaaataggtaagagtaaaaaggaaaaaagctatgatccaaacgacttataaggaaaaaaaaaaaattaaaggggtccaaacaaa

SEQ ID NO: 94302 - DNA, 426 bp, Glycine max
gatgaataatattgtattcaaggtggtcttgtttataacaatgatgacttcaaaagatgaggacatatgtgataaacaaaaagctcaaaagatcacagaacaactcacgtgaatcaaagaataactcaagtgaatcaaataacatctcaagtgaatcaagaacaagtcaagagttcaagaatcaagaagaattcaagactcaagaagaaagcctacaatcaagaatcatgattcaagattcaagatctcaagaatcaagatcaagattcaagactcaagattcaagaatgaagaaaagactcaatcaagataagttttaaaaagttctttcaaatctttgaatagcacatgagtttgtgacataaccttttaccaaagagtttttactctctagtaatcaattaccatagttgggcaatcgattac

SEQ ID NO: 94303 - DNA, 548 bp, Glycine max
  unsure (1)..(548): unsure at all n locations
gagtcacctgcccgcatgcaagctggtacctctttcgcactacaacaagaatcattgtgttgagtcttctctgtggttgtcttactgggttagcctcatcctctacatttatctgatgcatacatgtggatgggctaataccaggaatgtcggccagcgtccagcctatagccttcttatgcttcttgtgaactgatgatagcttctcctctcgctcatcaacaagggaggcagatataactattgganaactttggctatcatccagataagccatatttagatttgatggcagacgcttcaattctggtgtgggcgactggatagtggtagaatgtggtggttctccacctgaccccatanagaaagtaagaggatatgaactccctgagctggtagtctatctactctaaaatcatctaagaggtaaacatacaaacatgcatcatatcaatcagaccctctcacatcaatcgactatgacaatcaatcagttcatgccaagatacagctgtgatagatgaacagctgttcatcacatatgcata

SEQ ID NO: 94304 - DNA, 188 bp, Glycine max
  unsure (1)..(188): unsure at all n locations
tctttcttcanaatcttatggctttcactctattctaaggaagaaccaagccaaaggagatttgtgggttgcaccttcaaaacccaagaaagataagggtaagaccatatagaaatacacccctaagactagttcccaagcaaggactagccacattaaatgcttcaaatgtctngggagaggtcaca

SEQ ID NO: 94305 - DNA, 356 bp, Glycine max
aaggggagaatgtgaatgtatgaatacctgaactttgatgatgcccaaataagaattaaacaaggtgcttcaaggataagctggcttcagattatacaagattgcttcaaaaaacaagccttgcttcaagattaactcatgatcaagccttgccttataacaaagtgctttcaagacatgcaaggctttgggtatcgattactatgcagtgtaatcaattaccagaagacaaggttgagaaatagctgttgaaaagggttttgaatttgaattttcaacatgtaatcaattaccatattgtttgtatcgaataccagcaacgaaacctcctatattcaatattaaaagtcatgacc

SEQ ID NO: 94306 - DNA, 305 bp, Glycine max
  unsure (1)..(305): unsure at all n locations
agcttcagtacttgcaagaatgccacatgtnatatatatataaactaacacanattagttgcatgaatgtactataagtaaacagagacatagtagaatcgaacaggttatttcatcagattngattccagtaaagcaaagagatgtctgaagtgaccaagtaaaggttatcacttatcaacctttgatntaaagtgntgtaagatcatgaggtgctctnttcacatccacagtatgtatatnttacttttccactttacacatctcgcttgtcaggatccanatcctacatccatgaacctttg

SEQ ID NO: 94307 - DNA, 330 bp, Glycine max
  unsure (1)..(330): unsure at all n locations
agctcgaatcggatatccgtgtganaagttatgaccatgtttatatctcaagagcttccgttgtcaattacggcttgtcgcatatangcgcccgaatcgacatccgtgtgaaagctataccattgaatatcagaagtgacttgttagttcgactgatcgctatatataacctgatcaacctcatggtaatgttgactttttcttctagactccgtgaaatttacgttagaggatcgctcatcgactccggaaacatgcattgattctagacttcgtgcagtgaactctttcttatgcccgatcgacatcgggagagtatggcatcgattt

SEQ ID NO: 94308 - DNA, 399 bp, Glycine max
  unsure (1)..(399): unsure at all n locations
atctctgagtcacctgcggcatgcaagcttatangcgcgggtctgtgagacanaggtcaagcgttctcgatatgcgaggatgatattccgagtaccttggatttggtacgaccatgctctcctgatttccagctgggaaattggcgagtggaggaacgccccggcatttacgcaacgagcataatgtaaacctttacgggtttaaaagctctatagttgggcctaggctntagaagttttcctcttggtaaggcttagtgtctnttgggtttgaatntataatacaaggatatttcttcatctgttcctggtctctacccattctcattcatttgcatgtntatttcttnttctgagacggcagatccgatgacgagtccctcgaatgtactaatacct

SEQ ID NO: 94309 - DNA, 402 bp, Glycine max
  unsure (1)..(402): unsure at all n locations
tgacttgtgagtgatttatccttgtttcacttttttattagtcaattctattaagaaagagaaatcccaaagagaaacgtccgattgattttttttggtttattttacaaaaagatattttttgattattatattattattttacctctttntggtttccaatgtggttacggcacgaccgatcggtcggatttcattttaacatatattaacggatattacaattcaaatgatcagtggaaatttattntattttttgattaggtgagaaaatgacttaagtaaatgactacagcacgtctaaagggggtacggaaagtaaatgaaacgaaaataaaagttcgcgaaacttatggtgaccaccaatggtacatagaatgaattgataatttcgatttcggg

SEQ ID NO: 94310 - DNA, 201 bp, Glycine max
  unsure (1)..(201): unsure at all n locations
atatgcatgtgaattaggaagcatcaacgagaatcaagccaaggctattgtgcaagctatcaatgtggcaaaacacaccaaatgattatgatgatggatggctcagattctcacaaaggtaaactcatcactttcanatcgatgctttcaaactatcatgacatgtagaggagaatcatagatntctagtcacaaaatgtc

SEQ ID NO: 94311 - DNA, 475 bp, Glycine max
  unsure (1)..(475): unsure at all n locations
agtcacctgangcatgcaagcttaacaaaaggccatactcncttctctctctaaaaataccctacatgcagaagctccttcagaaaaatggccaaactctccttccaaaatctgatttcacgcttaaataggtggctttgttcgtgctcgtgcacttagcgcaattctgaaccccttagtgcgcattagtgaatntcggcttagcataggctcttctcgctcagcgaatggactggagcggtgcgcttagcgggatggcccttcgctcagcgaacatgcacagctcatccttcttccagaatctttctcgcgctcagccgaggagtgtngcgctcagtggatggctcgctaagccaacaggttggcttatcgagagggtgaanatcaacactattcaaactcacctatttaatctgaaatttgagaataaatgatattacacacacagaatggaagtctaagtattattacctat

SEQ ID NO: 94312 - DNA, 183 bp, Glycine max
  unsure (1)..(183): unsure at all n locations
ccacagagcggtacctggagatatgtcgcggtggtcaagagacctctgggacgtcaggtggagtgctatngtccagaaccaagctggaccaatcccgacccaacccgtgcatagtcggtcagtgagaacctgtgatgtacctaaacaggcgagctcctgtccgtctacagataataggaacaa

SEQ ID NO: 94313 - DNA, 268 bp, Glycine max
tccgttttttctcaatctttcttatgagcgtttacattactggccgtcgttacaactctgactgtataacctgtcgtctcacttatcgctgcagccatccctttctcatctggcgtatagcgaaaagtctcccgatcgccttccaacattgccgcctgatggcaatggtcctgatgcgtattctactaccattgtgctgacctacacgatatggtgtcttattcaatctgcttgtgccgatttttaccatcccgcatccgccacaccc

SEQ ID NO: 94314 - DNA, 285 bp, Glycine max
  unsure (1)..(285): unsure at all n locations
tatgtcatgtatgatgtgtctgtttttatgaaagctgtctgcctctcatcaataagaccagatatcacttgtctcaatctatttgctaataacttagctatcaccttgtacatacatccaatcaaggagaatggtctgtagtcatcanatgactcggggtgtttggttttgggaattatagctatgaaagaagcattattgcctctatggaagctgccatgcacatggaattcatctacaaatcttctgaagtcagttntcagcacttcccaaaattctttaatg

SEQ ID NO: 94315 - DNA, 412 bp, Glycine max
  unsure (1)..(412): unsure at all n locations
agtcacctgcggcatgcaagctcgntgctngtgtgctaagtgtgtgatgggatgtgttatggttctatggaacctatacttatagtatntgagcgtgactattggtcctttgttgtatgggctattatagttcttgtagataattcctaactcgcagataatagctgggagcttacagataatgttagagataaacattcgcttgtagataaaaggagaagataatcgtaccttgtggataatgtgtgagcttatagataattaattacgtgccaatagataagatattcaaacacatttgaatattagtatgttagagataacctgttagtttgggagcacaacttgctaaggctaagtgtactctctcttgtggcatggttgacgttgagggttgacatgtgtctttgag

SEQ ID NO: 94316 - DNA, 205 bp, Glycine max
  unsure (1)..(205): unsure at all n locations
ggggagcggctcaattataggcaatttggntggtttctagcttgactaagtagaattaggggtgtgtatgggatggccctatgcctataatgcatttcggaacaatgggacatgccacatttgccccgttctcttgctattgacgcctaaactcgtgcccaccaagtgtttggtgaaatgcctcaatggcattagcgcgtgactt

SEQ ID NO: 94317 - DNA, 177 bp, Glycine max
taaagctttgtgactccaaagagggttccacgtaaacatgattattcttgagtgaatattgagagagaatatatgagtaatccttaaggaaggtggcatccctagtggcgcataacctatcaagctcaagatggttagtgttaaagcaggttataacctaggaatttactatagaag

SEQ ID NO: 94318 - DNA, 291 bp, Glycine max
  unsure (1)..(291): unsure at all n locations
gtttgctgctacanatgatcttgattcactatatagacagggaactcttcgaaagaattcaatataatgctaatatacatctatttcttaataaatgaatgtggtggtttcgtgagacagcaatatatattctcaatanaattcactcttgctctagaaaataaaattagttagtgattaagtgtgtcgtaagtgtatcatttgatgccaagaagttaaatntggagaattggttaatgctaattgataagtgtatatatgcttgctatgaatcgatctactttctatgtg

SEQ ID NO: 94319 - DNA, 128 bp, Glycine max
actggctgggatgtttcctgttttgctatgatatgtggcttgtagaaataatggggcgtattcgggagccgtgacactaatttaaggtcaaatcatttgcaactttgtaagcatgaaacatgattgta

SEQ ID NO: 94320 - DNA, 347 bp, Glycine max
ctgtatgtacacgccttctacaagacagaaagaatgcccactcgcggcagattatagtctttagagtcttaagaaaaccaatattatcttggaagacgcaaaatgttctaagtggggaacatatagtagcaagtctggtacgcaatggtgcaacattagtatttaaatacacatttttacataccttagtaaatattacaaactcctgtagtgtaaataagcacaagcggtcttataaagattaaaagaaacatttgcccgaacaaattgcttgagttttttccctacaaatgcggatgataccacgatacagctctatgtttcctacaatataagccttctatttt

SEQ ID NO: 94321 - DNA, 216 bp, Glycine max
atgctgaatcacgtaactagaaaagatcatcttctcctgccttttattgatcaaatgcttgagcgcttggcaagttagtcacattactatattctcgatgggtttactggttatctacaaattcatattgctctcgacgatcaagaagagaccacattcacctgtcccttcggcagtgtagcctataggaggatgccctctggtctatgcatatgc

SEQ ID NO: 94322 - DNA, 247 bp, Glycine max
  unsure (1)..(247): unsure at all n locations
gctatatagacaataatagacagctcgttgaaagctgatttcatttgcgaagtgaattacaccaattggttagccaatgtggtcatggtaaagaaagcaactggataatggaagatgtgcatggattacaccaacctcaacatagtgtgtcccaatgatgcctaccctttgttagcattgacagactaattgatggggcatgtgggtcanggtgctcaatttctacatgccttctcaagctataatc

SEQ ID NO: 94323 - DNA, 246 bp, Glycine max
  unsure (1)..(246): unsure at all n locations
aaatgtaaggatctatgtacattttcataccttgtattataggagaacaataagttgacaatgccatgctagatttaggagcttctgttagtgttatgccagaataaattagaggatggngctaaaccagttagacagccacaaagaagactcaacccgatgattcttgatgtagtgaagaaggaggtaaccaagaatttgcaagttggaatcatttatcctatcttcgacagccaatgggtgagt

SEQ ID NO: 94324 - DNA, 200 bp, Glycine max
gctccatttgtggtaagaaaaaataggtaattaattgccagatcccaatagttcccgtcaaagtggtgagcataaatctaaaaagtaaatcatatttcttaatataacttgtatcaatgtaataactaaaaactgcggtttttaacaaataaacttaataggagataacacttcttgcaaaaagaagatagtcttttttc

SEQ ID NO: 94325 - DNA, 360 bp, Glycine max
tcttcatcactgttgcatggtgttcgtgtgagaaaatgtttttcatagattagattcacacagagacatatatgcatcaaaattgtgagagaacatacagttcataaaagaatattcaacacctagagaattttaatttacaaaacatacagtacactgcatcaacataactctgaagcaatttaatagcttatcatcaagccaaggtacttgcactcgtgctcaaaaagaattataaaattccgccactaagatagtgtatttaaaatcctagatatatatttacaagacatttagaatataaccctattaccccatatttatttcatataacccacaccatgtactcacccattagtt

SEQ ID NO: 94326 - DNA, 337 bp, Glycine max
tctttaccctgcgaatagagagtctgtgttcaagaattgtatgacatctaaataccagggatctatgcttatcattggatcaagggtgggcctcccaaatgtatggtggatagagaaacaaaactaagggtatattaaatattacacaatgatgcacaaaatatgatgtgtacctcgagtacaaacattgtggtattgacaagttagaattattcctacaaatatatagaaatcaatatatctattataactcattaaacatatgcaattgcaactcttcaaatacaacttaagaaaacatacttgatattattaaaaacaagattaaaattaataa

SEQ ID NO: 94327 - DNA, 465 bp, Glycine max
  unsure (1)..(465): unsure at all n locations
aacagaatacgtaattgaagctaaaggcagaaacgtaaatgatactgganataataacgcacttganactaatgcagaaacgtgaatgaaactaaaggcagcagaagatatataacganattgcaattagaagtagagaatggaaaagtgcattacgtgaacagtgacaatatgcttagaaaatatgtataaccctaaacctatgctctaaatactagtctaacagagtagccttgcacgaataccaggatgctatttaaagaagcactcaagtcactgggcctatacattatttggccaaacgaataacactgaccactgaatagatacatctctattaaattaactagagcgctgtttttgcctttagtcacacaaatccgatagccaagttattaatctgaataatanatctaaatactgatgagccatataaacgctataatgacatagatatttataaat

SEQ ID NO: 94328 - DNA, 340 bp, Glycine max
attactctattcttacaatattatgttgatgatattaaacgaaatcaattttactagtttcaaacatttgataatattgtggtaccgattgatatttgatgaatcatgatatgaaataatagttctaagaagaaaagatcaaatttaaatgggttacccgttggcccgaaccgaatctaaccgttcatgaatgggttggattgggttaagtttcaaaaaagggtattgctatgggcacccaacaacattgttggtgcacccaacaatttttcatataccccaaattccccttaacgtattttgtgtacaaaagctggtttgtttgtattttgttacattc

SEQ ID NO: 94329 - DNA, 243 bp, Glycine max
ggaatgtaaaagaggaaagaagggagaaaaggaaaagggggggaaaaaagagaggaaaaaaagaagggaaagaaaagaagagaggaggaagggaggaaggagggaaaaagggaaagaggaagaaagaagagaagaggagagggaagaagaaaaaaaaagggaaagggaggaggaagaaaggaaaagagggggaaaagaaaaagagaaaaaggaaggagagaagaaggaaaagagagggaaaga

SEQ ID NO: 94330 - DNA, 212 bp, Glycine max
  unsure (1)..(212): unsure at all n locations
cacacgtatcanaactctgtctctntatatcaacacggtctatataacaactctattcctgctcagagatgtctctttcttatctcagcatacactcgcggttcatacaaacagttgtatatataccctcattacccaagagttacttttcacaccttatctacacacacacaaaatctttgcatacattttatacatgtgaaaactctttt

SEQ ID NO: 94331 - DNA, 373 bp, Glycine max
ttgggcatgctttcttatgctactactacacatcctatgactctttctttcggtaaactcactccctgagggctataagaaaagcgaccttgataatgccggaagtggcgaacaagtaataagaggaggcgtggcacaagaagtcaatctaatctttaataaagcaaggaactcttcttctatacccggtcatccctatataggatgaatgtgcagctaggggactagaaagactaatggatcatcataaaatacttttcaatacgaggatattaaggatagagaatttgcataataggtctgttgcgttgcaagtcgggtgtctaccttcgctcaatcattccattcaatgcatgcattcctgcttttcttt

SEQ ID NO: 94332 - DNA, 75 bp, Glycine max
ttaaataccccccctccccaaaaaaccccccaacataaactttttaatggctgaaccatttttcctttttttttt

SEQ ID NO: 94333 - DNA, 401 bp, Glycine max
atatatgcataatcatgtttagaggcgtgctcttgagatgaatgtcacgaccattgatctatggtccgttattcaaaaaaaagataactggagagatgtttgcttcaaggtagtttatatgctctcatgtgttcctcaactgaaaatggttcatatctgcatataccattcatttggattaagcgcttaattcgattttatttcttagcgatggaattcatctttcaactgatggaagcatgattgttacaaatgagatattgaaggtgcttaatgaatcagagtggaaaacctatttatattggatgtcaatgccaagtgtacttgtggaagaatcaccatatgatccacttggacctgttggaaaaacaactattatattttccaactttgctttccca

SEQ ID NO: 94334 - DNA, 340 bp, Glycine max
ccatgatcttgataggcttatgaccccaatcaacactattggatcttataacgatacggcaatgatctgaaaaatctctgtcaatacaaactggtagtgtatgccctgaatgatctttgtccctgatgaacacaccgatcaccacctccccttgaactacctcgcgcctacccaccatcccactcccccctctccccagtcccctctaaaattacaagacaaccctggccaacctcccagactccctgtacacctctccacccgccctgcgcgccccctataaaccccccccccgttgaccccacccccccccccataacactccccccccctagacacc

SEQ ID NO: 94335 - DNA, 416 bp, Glycine max
tgccttatgatgaatcaagattgattcaaggagtttgattattacaaagacgatgacaataagctcataagtcaagatcacttcatgataacaaagatgatgacattcaagaatgagttccagattgagtcaagaacacctcaaagatcaagatgaaatttgatttcaagaatcaagaatcatgattcaagattcaagaataatcaagatcaagattcaagactcatagattcaagaatcaagagaagacttaatcaagataagtattaaaaaggttttcaaaacattgagtagcacaaaaagttttcacataatcattaccaacgagttttactctctagtaatcgattaccatgatatagttatcgattaccaatggttttaaaacggttaggatttcaaaactcataatgaag

SEQ ID NO: 94336 - DNA, 273 bp, Glycine max
agcttaagctccttcatttacacaaggctcttaatatttgaagagtatccttgtggaaccttcacccgacgaagacactgacaaaaacttatcttctccttcttggacaaagtatggcaggctgggggcaagtaaattttcttcccatcagaccttggatgcaactgtgatcttatacccatatcagctagatcttgacgggtattcaagccatccttcgtcttgccttgaatgttaaggagcgtcccaatcacactgtcacaaacatttttc

SEQ ID NO: 94337 - DNA, 314 bp, Glycine max
tctataagtcacaggtcgataatgtttttgttcaaacctctgacaaaaagtgggctaacataacaccttgtggtgacaaggaggctgttgtctaatcgagtgacaatgttgtccactctgtcaaactccatcctacctatgggtttatatgggagagggaggaaattgatgctgttccctctgaagatggagtcattccaccaactgggtggaatatatatgaagattaatatgactgaggccactgcatgggccagaattacggcttatatggccgaaaatagactaaatacggcctttgaagctgaatttca

SEQ ID NO: 94338 - DNA, 268 bp, Glycine max
agcttatggctataaattttgactgaacggtccggattaagcggggaggaagtccattaagattcaccatcttggtgagggaagcactgtgtgcacatgatgcggggaggaattccattaacaatatctgggttattttatgagtggtttgaaggcacaaattcatcgtagggttcacactctcaatcccctgagtcatatgcagatgatgcgtatcgcataagacctggaggaagagtcgagagaagatgatgatgacccaagctaa

SEQ ID NO: 94339 - DNA, 302 bp, Glycine max
tattaaggacataaaatcttaatcgcttgtttgtttgactcaaatgtgccatacttatataagccaatatatgtgcaggtaccatggcgaaggctggtcacaaccttcagtcttcttttctagtttcaaatgacgttcccctgctatgttgtctttattgtcaaatgacgttccacaggatgttttttctcctagaccgatgtaacacattgttcatttgaccactattgatcttttaaaaaaatgcttgtattcataatcattaccaactattaatttcgcccaattatccgaaggtaaaa

SEQ ID NO: 94340 - DNA, 273 bp, Glycine max
agctttgcgagtaacgggcttgtaagtactgctacgctggcggcatcctgtcgcgggagaaattcccccggatgccttcattaactttgccgaatcgcaaaagatgattgtgccgctgactcagcacctgtttgagttaattgcccgcgatgccgcagaattagaaaaagtgctgccggtaggcgtcaaatttggtattaacattgcgccggaccatctgcacagcgaaagcttaacgcggaaaaaacgatcaccagataggagacgttggcg

SEQ ID NO: 94341 - DNA, 274 bp, Glycine max
agcttgtactctgttcttgttcgggaaaaggggctccactgattccaagtgatgaagtgacaataacggagataatggatgagcagccagcatcccgaacaagttcccccgcatatctaactggtgtgaaaaataaatgaccaaattattatttccatagagactatcattttacttgcacaagttttagacctgaactataaagataaaagagtgcccctgaactatagaagtcaagcagccttgacgagatccagcaaaagtatcaaactca

SEQ ID NO: 94342 - DNA, 309 bp, Glycine max
tcacaaagtagacgaaagtcccaccatatgggtgacaagacctttaactaggttgaaataaaacctgagatgattttgtgtcatctactttttatatgaccaccacggtcctacctatacatcgacaaggtcttgtttcctgcactgtcaaagattccacacttatcatcacgacgggctattcatactaccacaagtatggagcgttgcatagacaaaggcaacatacatgaaatacacataacacatacataaactgtgcaaaatttgtaatcaaaggaaaacatgtgcattgaagaaaaataaaat

SEQ ID NO: 94343 - DNA, 129 bp, Glycine max
agctttaaaattagattatcaattaatagagaggtcaaattcgctcaaggcaaaattttattcatttaaaaaatgtctcattgattcattagcatttaaacgattcattgattcacatattacacaaga

SEQ ID NO: 94344 - DNA, 132 bp, Glycine max
  unsure (1)..(132): unsure at all n locations
gcttnttgtgtaatatgtgaaacaatgttttttttaaatgctaacgaatcaatgagacattttttaaatgaataaaatttcgccttaaacgaatttgacctctctattgattgttattctaattttaaagct

SEQ ID NO: 94345 - DNA, 308 bp, Glycine max
cccagggatccactatagacaacctagctgcatgcaagctaactcgcccactatttttattggcagtaaccaattttgagagggttctttttgtaacacatgccaaataagacaccgagcaaaagccatactagacttatgcgagaacaaataacaagctcaacgcatgctaaaaatttttaaaatcataacgaagaatcataaccgtaaggattaaactatccacttcgtcataaacctgtacctatcccaaacatcttatttcattgcccatgaaagaacgtaccaatcacactgtcacaaacatt

SEQ ID NO: 94346 - DNA, 269 bp, Glycine max
agcttgttccaccttattagtttaggttcttcattggtaatcagcctaggctatggttgctaatttgttaatctctcacacacccaagtttggatcaagtagtaaaagggtgaccaaagagttaactacaattccaatttttcattaccagtcaaataaactattgttttcttcgatagaccaaaatcattttatatgttggataaaactgttggtcacaaagctgattctcaccagcaagatgaacaacaataaagaaaacaactttc

SEQ ID NO: 94347 - DNA, 314 bp, Glycine max
cttaatcaattgaaaattgacggtttgatatttttccaggactctactaggggcaattttccttggcacccttaatgatgttcaatttgttggtaagtttaggtcttttaatccagaaaaggaaacttggttaccatgtgagagtaatttggataaatgaaaatagttttggttgttatatgcatgagtatttcgatgcttgtttgcaacaatgtattataaaaagtacctaccacatatagagtggctatgcaatttggaatgcatcaagaagtttcagattgtgtgattgcattctctggcaccaaagctat

SEQ ID NO: 94348 - DNA, 306 bp, Glycine max
tatcctgaaagatatattttatttttattgaattcaacttctctcattcttgttttatgatcaatctatgcatcggtattttaaaattaaaattataaaaacatatccttttcagattgaagaatgaaattcaactaacctgcacgaagaataaatgattctcatttacaataaattaaaggtattactctttttaacaataatacatcttttaagttcatatttcttataattagaatcaaaataataactctttgttttttttttatgagagagtgtgttattaacccatacatccaataacat

SEQ ID NO: 94349 - DNA, 218 bp, Glycine max
ttgctttacaggattttttttttatctcggaagcgtctagggtactatttactatcgaagcacccatgaaaacagtcaccacatttacttggccaaattatataattggcgatatcttgtcggaagacatgctcatggggatcataatgttttttcttggagactatggtgccacagtcacagtttggaaaattaattttgaataattatctagtccc

SEQ ID NO: 94350 - DNA, 313 bp, Glycine max
atctcaacaccactcttgtcttggttccacggcaacaccacctttttgtgtcctagacccctcacttgggtggaatttactccgcttgcgatgtgtgagtcacaacgattcatatgagcaacaaacgtttctacctacacatggaccatggcatcgatttcagcactgtcaaactggactcactcctaatagccacccgcatttcatactgactccatcatgcataattgtgtcctaaaaagggccctaggttaacttcggatatcagatactctctctgggccaaacttgcctttcaaggaaaacctgcgcg

SEQ ID NO: 94351 - DNA, 312 bp, Glycine max
ctcaagctttagctattccaagacaaattttttttcttgttggccagtctagttttgttttgtttggatccctccctgtatgtgattgggagaaggacaatcagttagttgattatatcaaatatttgattcaaatggcaagtatggctaaagtttattcatcatgaagcttaccaaaaagaatgcgagatagacaattattttccatgtactcatatatcagtattagctggttgccctccacacaacatccataaagcttaacaagattgggatgttgaagtccagatatcagtcccatctcattcacaa

SEQ ID NO: 94352 - DNA, 257 bp, Glycine max
agcttgcgctgctaactttgataagagaccccctcagcagcgcaaccaacaacaaccgactaagtatgatctttcaagcaccatatacaattcacgttgcaggaatcatccaaatgagagatgggcaagtcctccacaagaaaaacaacctgtccctcctttcgagaatgctgctagaccaaacaaaccatatgtttctcctacaatgcatcaacgacagctttcaacaacacagacaactagaacctgaggctgct

SEQ ID NO: 94353 - DNA, 273 bp, Glycine max
agcttgagttaagctatcctaatgagggatcgaggtttagtactttaggctacaacatagaacacaaaagcatgattgattagagacatatccttatttgcatcagcttgtttgttagaaagacccaacacttttacctactactgtcaatcttacttgcatttttactgtttttagcctagacttagattaattttgttctaaaccatcaattatcaatgtttcttttaacaatgccttatttctgaatttaaccccgtctaatactagttc

SEQ ID NO: 94354 - DNA, 315 bp, Glycine max
tgccacccagctcgcccaggcgagcttggttgcttcctctagaagcaacagccttctggaggaatcttctggagggcccaagttggcctggttgctatttgcacccccattttaactaagtacaccccctgcctttttttggtgattcttttttcgtaaagttatggaaacttacgaatttcgtaacgatacttgttttctttccgtaatgttacggaaccttgtggattacataatcatcccctttttgacttacggaatgttacggatcctcactaattgtgcaacgatgcttccatttgatttccggtgtgt

SEQ ID NO: 94355 - DNA, 265 bp, Glycine max
agcttccattgttcaattttgagcgtctcgatatcttatgcgcctgaatttgacctccgggggaaaagttttgaccatttgaatttctggagagcattcgttgtccaattccgagggtctcgatatataatccgcctgaatcggacctccgagtgaaacattatgaccttttaaatttcttaagagcttccgttgttcaatttcgagcgtctctatatgtgatgcgccggaatatgacctccgcgagaaaagttatgaccttttt

SEQ ID NO: 94356 - DNA, 97 bp, Glycine max
gaccaaaaagaaatcggaagctcttgatcattcaaatgaacataactttcccactaggtggccaaagcaagccccctgcaatcgagaagtccctaat

SEQ ID NO: 94357 - DNA, 274 bp, Glycine max
agcttatgctgcaaacttttataatagaccccctcagcagcaaaaccaacaacaccagaataattatgatctttcaagcaacagatacaatccaggttggagaaatcatccaaatctgacatgggcaagtcctccacaacaacaacagcctatccctcctttccagaatgttgctggtccaagcaagccatatgttccttctccaatacagcagcagcagtcacaacaaagacaacaagcagctgaggccccttctcaaccttccttagaggag

SEQ ID NO: 94358 - DNA, 262 bp, Glycine max
tttatcggcgccacagattgtacctggaatatgtccgggggcatgagaccttgggacgtcaggtggggtgctattgcccaaaaccaatcttgaccaatcccgacccaacccgggcatagtcggtcagtgagaacctgtgatgtacctaagcaggcgagctcctggcaatcaacagattataggaataaagacctctaagcaaggaggcttgtggtggctggccagctgtgaactttgattgatatgtgggttatggtctctg

SEQ ID NO: 94359 - DNA, 273 bp, Glycine max
agcttgtgcattcaatatcctgatgagggtgttccatatgttctcaagactggactaatacatttgctgcccaggtttcatggtcttgcaggtgaagatcctcttaagcatcttaaggagtttcatattgtttgttccaccatgaagccccctgatgttcaggaagattatatctttctaaaggcttttcttcattctttggagggagtggcaaaagattggctatactaccttgctcccaggtccatttttagctgggatgaccttaagagg

SEQ ID NO: 94360 - DNA, 308 bp, Glycine max
tacttagatcgctgaaattggatgctatattttaaagcaaggagagcaagcaaagagtgagagcactgtgcatagaaaaagcaccaatgaaatttcaaaatgcagtttaaaagcacaaatgaaaatgtaactgccaaaggcagttatgccttattttttgcggtttcgaatgcctagcttatcgcgtcaacttgctaagcaagcatgcatgatgtttaagtttccaaacacacgtgcttagcgggcaaactcgcttagcccaatgcaaaaattcaaattttccaaagaagactttgggcttagcgcga

SEQ ID NO: 94361 - DNA, 274 bp, Glycine max
agcttctggtgggacatcttgacttgctttccaatctgacattcaccacagattctgccttcttctattttcagattgggaatgcctctaacagcacctttgtcaatgattttcttcatgcctcttaagtgcagatgtccaaatctttgatgccatattttgacttcatcttctttggaggatagacatgtggaggagtaactggtttcttgaggtgtccataggtaacagttgtcctttgatctgctgcccttcattagaacttcagtcttct

SEQ ID NO: 94362 - DNA, 308 bp, Glycine max
ttaacctcattgtctctcacagtctttatatttggttttaaacacaatccttgtgtccggactctcagccacttatggtagccgtcgatgatcccgatactgcttcccctaaactctatgacctttcttcacaccacatcacctgccttgcgaactccttggaggacctttgcattggggtcactgaaaccccgtgtcatgaaaggcgtgatgctttcgtctaatggcgctcctctcatggggtagccaagctgtcttatggcgaggacgggattataattaatacaaccccttgttccatcaaggga

SEQ ID NO: 94363 - DNA, 263 bp, Glycine max
agcttaaacacatttttttcgagaggctcgatatattacgggactcaatcatacatccgagaaaaaagctattgtcgtatgaatcggcttaaaacataaacattcaactttgatcctatcaacctattacgggacttaatcatacatccgagtaaaacgttattgccgtttgaatttgctcagaggttcaaaattcaatttcgagcgtcacgatatatttcgggactcaaacagacatccgagtaaaaagatattgcctcttg

SEQ ID NO: 94364 - DNA, 304 bp, Glycine max
tagctttgaacctattctaacgaaactttttttttaccccgatgaaccaacgagccttgttataatttacacgcgggaccaatagtgctgaagtctctatgccaatcccatatataataacgtctcactcggacgtttttttgtgagacttattaacttaggacgcgcgaacttgcaagtttaacctctgatccaacttatattacaataagtttttataccatatgtgattgaaatccatcccatttgacacactcgaaagtgaatgtttcatcctttatagccttccgaacgtccttacttt

SEQ ID NO: 94365 - DNA, 272 bp, Glycine max
agcttccttaagatgattcctaaagaagctagagcttagctacacatacctctctaatagctaagctcacctccttgagacgagaagctagaacttagctacccacccccttaaaaagctaagctcacccccttggccaaaaacttgaaattcccaaaaaaggccttacttcaaagacttcctaaaagggcttgaataccagcctaaaaccctattctactagaaaggggaaaaatccagggccaaacgaaggaaaaacctattctaatatt

SEQ ID NO: 94366 - DNA, 314 bp, Glycine max
tttcaaggaggtgagcttagtttttatatgggtgtgtgtagctaagctctagcttctcaaggaagcttctcaaggaggtgagcttagtttttagatgggtgtgtgtagctaaactctagcttctcaaggaagttttctcaaagaaacttctcaaggaagttttcttaagaaagcttctcaaggaagttttcttaagaaagcttctcaaggaagctacctagtctataaatagaagcatgtgtaacacttgttgtaactttgatgaatgagagtcttgtgagacatacttcaaagttccacttctatacctcttt

SEQ ID NO: 94367 - DNA, 271 bp, Glycine max
agcttgtggagctttacgggcccagaaactggtcgctcatcagcaagtccattccgggccggtctgggaagtcatgcaggcttcggtggtgcaaccagctgtcgccccaggtcgagcaccgggccttcacaccggaagaggacgagaccattattcgggcccatgcccggtttggtaacaagtgggccaccattgcgcgcctcctctcgggccgcaccgataacgccatcaagaatcactggaactcaaccctaaaacgcaagtgcgcgtc

SEQ ID NO: 94368 - DNA, 313 bp, Glycine max
actcaagcttggacaatcctcaccttacaagttgattttgtgggtgtgaggtagggtcttaagtccaaattctaaaataatatcagagcttatcttagatctattctttggtcacctgcatcttaaccctggatgtaacagggggtgttggaaagccgccttttttttttttgaagggcagaaaatatatatatatattaataagaaaaaactacagtaccaggggtactgatgataaacatacaaaggcagctgtgctgccagcctcccaaaaagagaacaaaaacccttcacaaagcccaactacaaggta

SEQ ID NO: 94369 - DNA, 271 bp, Glycine max
agcttgttgtagttgttgacctttatttgaagaacctccatgcaagttgttagaaggacctgcaaaagaagtgttatttggaccatagttggcattattatgtggtctctaaccataaggctgatttgaacttgagccacccctatagccttggtagcttccttgaaagttttattgaggtctggcatggttatgtagataatgggcatcctcttcttgttatctatcaccaggtgctaaatagtggccattctgatggttaccaccacag

SEQ ID NO: 94370 - DNA, 274 bp, Glycine max
agcttagccgaattctttatcaaattaaagttggcttagctcatcctctgccatcttagcggaccaaatcagcctcagatgcaacggttgggcgctaagcgcttgagactcacggcatagtgcatgaacaaatatgagcttagcgcgaggcttgcgcttagctaaaggactgattttttagaaaatattttctgagttatttttcagtcccttcctcaacaaattgaaacccttatatctaacattcaaagataggctgatatactcctatgta

SEQ ID NO: 94371 - DNA, 315 bp, Glycine max
actcatgcttgaaagagcccgggcagacaaattatattttcatgtccatagccatcaaagtctgaagagagtatgatgaactaagggacgtcaatatggccatttatgaagccttggaacgagaaaccaataaggcccgaaaggaagaacacgaccaaaacaaagttttgaggggctttatagggcagcaatagtgagctcaaactccaaagaggtgaaaggaatcatcacgggtcaaaggcatgatctggaaggacgagctaaaggcttgccttaggtcgaaaagaaatttgtcccaacagttaaagtgagact

SEQ ID NO: 94372 - DNA, 241 bp, Glycine max
  unsure (1)..(241): unsure at all n locations
agcttgngctttgtttattaaaaaccccaagatcctgaacagctccgtgtgtaaaacgggaaccaactcacttgccagacatttaaataggacctaggtgccctacccacaacgcttttttaacgtcctcgagctgggcacctttagaattgtccgtaacaggccctaaaacttggatacctttggattccgacttggacccccattggacccaccagttgcataagggaagctattacct

SEQ ID NO: 94373 - DNA, 308 bp, Glycine max
tttgtaggtgaaattgggtgcatccatttcccttaaagtcctctcatggggtggaggttgtgccatgttctcagaatgttcacaatcagaatgttcaaaattataatgctcaaaatcacgatgttcaaaatcaccaataatagaatgcacagactctccagtaacagaatgctcaggatgctcaaaaggtataaaatgatgtctaactaatctatgaaatgtcctatctatctcaggatcaaagggttgtaagtcagatggattgcctctagtcatacactacattcaacatgcacacaactagttgc

SEQ ID NO: 94374 - DNA, 268 bp, Glycine max
agcttatattattttttttcagtaaagatattataaactatttatttgccctcattaaagaaaatttttggatctatcactattgctaatatactccatttggaaaacaagtgaatatatgttaataaatcccacaagtatttctgtcctgcacactttttttttagaatgagtattttaacaagttatacatgaatatattttaagattagttatagttataatttactcacatactctttttaaaaaacaagtcactgaaccttac

SEQ ID NO: 94375 - DNA, 301 bp, Glycine max
tctgtatccgttcttctaagaacattttagatagggctagtgaaagaaagaatataatcaaccttatcccaccatttatcatccaacaaagtatctttcacaaatttagcctttgcaacatcatcttccttataagaagaccattggtcactaatgatcatctcttggagtcctttcttcaattgtttgaatctcttgagcattacaatagtggaggcaaattttgttggagcaatggaaagcaatttcaatgaattgaatgaattgaaaattgatagtctcatagagtgactcatgacaa

SEQ ID NO: 94376 - DNA, 273 bp, Glycine max
agcttagttaattcagatatttttccagaaaacgaaatctcagatacttcttcagtataggtttaactggggcactccaatacccccattggtaccaataatggaaaatccacatacttgtacagagaaaaaaagaaagttgttttcagtttttttcttacaaatctttgaaaacatgaaacagatagaaaacaaagtgtgacagttttataattaaaaagtgaaaacaaaaaatgaaagcagaaaacaaaagtgtaagtaaacacccctaac

SEQ ID NO: 94377 - DNA, 263 bp, Glycine max
tggtgtggaatttataacataaattattattttgttatgttataaaattatattaattgtggcggatagaatgattgaaaattgttatatatgaattatgttgatggatgttttttataaaaagaaagcgttggatgatcaaaaaagtgttatatgaggccataatagtggtttattagaaagcataaagctctagatttaaatagtgtttttgttaaatggattggggttaattttgtgttatagttcaagggagctaacaa

SEQ ID NO: 94378 - DNA, 285 bp, Glycine max
  unsure (1)..(285): unsure at all n locations
ggtgatcctctcgagcccacctgtaagcgtccgtgtttatgccccaaatttttttatgactccaactgggatctcggaaaaagacgactatcttcgtgtgataatgggcagaatgtcaaaaattgccaaagctcacagaaaacgccgtcacattttgtgagttttaaagctttaaggcattttgataggcaaacttaaattttcctcttttcccccgaaaaaagtaaacggctctctgaaaaaaccaaagtttcttnnaactccaatttggggcgcggtaaaaga

SEQ ID NO: 94379 - DNA, 238 bp, Glycine max
agctattcggccggctgtatgacaaatttttttttatgactaatacaaggatcgccggaggtcacggccttcatcgccggataacatgagcagtgtcggaaaaggggaaatgtcacagactaccacgttacgctttttgagtttcaaagccttaagacatattgagaggcagaaagaatgtagacgcggtgccgcccaaaagggttcacggccccctgtgtgacacatagggggttat

SEQ ID NO: 94380 - DNA, 272 bp, Glycine max
agcttctatataagcttaaccattttatcaataaacacaagttgagttttattcagaaaattagaatttatctcttttatcttagtgagagtgattatcctaaattcttgagtgattcaagaacaccctggctgtatcaaaggactttcacaacctttgtgtgttgccctcgacggaaagagtgattttttccttcctttcatcttcaaccttgttctttcaaaccacaattccagaaaatccacttctgcccagaattatctcgtggccat

SEQ ID NO: 94381 - DNA, 306 bp, Glycine max
cccttgttttggtgttgcataaaaaatttacaatgtttgtcggctaggtttttttgagcgagcttaaccgacgttttgttttggccgaaactggcatgttcccatttattcggccacgaaaacattagcatatcatggcaaaaaaatatttttcaccgatattgattgaaaaaaatgcctgtcgacgtccgccaagaaagaatgaccgatcgaggtctaaaaaaaaagcatttaccgtatgacgccgatcgaacatttccttaccgacatcataaatatttcattaagggattgaatagaaaactc

SEQ ID NO: 94382 - DNA, 273 bp, Glycine max
agcttagcctacagaataattattattctaattcccaaatgaccatgcacttttttttctatctttctttgttatttttattagtttctaagggtaaagtgcatccttatttatcaattctactgcggttcacatttggaatccttgtgaatcatgagttggcgactttagatccctatagaagaatatttcggccacagtaccacactttttttttgtagaaattaaattcgactactgcaccttttcatatagagaatgataaatctatag

SEQ ID NO: 94383 - DNA, 310 bp, Glycine max
tagattgagaataacataatccttagttacaatttatctcatgtacaatttgaattatcctacaaccaggaaccagaatcttgatatttcttttctaacctcagataactctttttccccgtccttcaagaaacttttaatcaacaaaaaaaagaagctagagtttcagaattctggcttcatttgatcaagagcacaaactgccttagaatctgaatcttgcattagctttgctcgaattagcaactaaagcacgttcagcattcaatttaaagctttcatgcagcagaggatagcacttgatgtgcag

SEQ ID NO: 94384 - DNA, 276 bp, Glycine max
agcttgattaaaacaattatctattcattccaatccactcaaatcatacaattgctcattcaaatcattcgcagacactcatttcatacaaaataatccactgcatatcattttcaaccagttcactgttcaaacaagcttttttgtacaaacaatcactcaaagtattgaaatttaaagaactaaaacataaaaactaaaatttaaatgactgaacataaatcataaaataactaaaaataaactaaaatgttcaaaatgcataaatttaaatgt

SEQ ID NO: 94385 - DNA, 308 bp, Glycine max
  unsure (1)..(308): unsure at all n locations
tctacttatgtggcagggcgggctttttttatttttttgtntnnnctgtttgttttgaccaccgcctttcctttccgngatgnttnttttnatgttngnntgagtgggcttatagcctaaaccatacttcccacgatttccttgggtttttatcaggctagttatgccgccattgtctttgcctaaacccattctgggttcataaccgttccccaacataactcgggccatcattaccgccggatcggacaggcaagggtgtccaaagagggaagttaaggaggaaatgctgaccacctcaaaagact

SEQ ID NO: 94386 - DNA, 271 bp, Glycine max
agcttgtgcaaagttttatcaacaaagggatctaaaaaatataaactaaaaattaataatcaaatagtattgataaaaaaaaatgtgcataaattaagtacaaatccttcaaaacaaagtaagatcaaatagtaattttagcagaaaagaaaaagaagcagaaaaaaaaggataagcaactaaagttagaagctaaacgtaagaacaaaaccaaaaccattgaaatttaaggtgtgtgtgagagaactgaaccgaaggaattgtgtcctat

SEQ ID NO: 94387 - DNA, 318 bp, Glycine max
taagcttgtgggattttgtgatagcgattttttcggagatgttgatgatagaaaaagtactaccggatttgtattttttatgggtgattgtgtttttacatggagttctaagaagcaaggcattgtgacactttctacttgtgaagccgagtatgtagttgcaacttcttgtacatgtcatgccatttggctaagaagattgttggaggaacttcagttgttgcaaaaggaaagcacaaagatctatgttgataatagatctgcacaagagcttgccaagaatccggtgttccatgaacgaagtaagcatatagatac

SEQ ID NO: 94388 - DNA, 267 bp, Glycine max
  unsure (1)..(267): unsure at all n locations
agcttccgaggattttttgttatggggggttatatgctcgnctgctggcaatcatgctcaaggagttgcattggctgccaagaggttgaattgcagtgcggtgattgctatgcctgtcaccactccggaaatcaaggtgtgttttgtttatatgtttagttttgcttgtttgtctgtttctttaattatatccgaggaaaagagaatttgttcaatttagttatgtgtttttgtttcttgtgacattgcagtggaaatccgtggagg

SEQ ID NO: 94389 - DNA, 260 bp, Glycine max
  unsure (1)..(260): unsure at all n locations
attggaatgaatatgtaatttttctttgnccatgacttggatgattgtatttttgtgcccatgcattgaacgtattatataatatttgccctaatctgtgtgcttctattcttttcaacgtatttcaaaaatgcttttgaacatgctctctgtctatatacaaaacagaaataaaacttgaagttggaataaatgaggtctttgtttttgaggacttatgactggtctgaggacttggttgattttattgatattagagg

SEQ ID NO: 94390 - DNA, 266 bp, Glycine max
agcttcagatctctatttttagcgcctagatatattacgggattcaatcggacatccaagttaaaaggtaatgtcaatggaattaactcagagctctggatttcaattacgagcgtctagatctcttacgagactcaatccgacatccgaattaaaagtgattgccttttgacttttattaaagctttcgtgttcaaattccagcgtctcgatatattaaacggcttaatcggatatcccatttaaaagttatagacgttccactt

SEQ ID NO: 94391 - DNA, 272 bp, Glycine max
agcttctaaactttattctttaatgaagctctgataccacttgttagacaagtggcctcagatatcttaagaagggggggggggttgaattaagatattccaaactacttccccaattaaaaatctatttcactttttattcaagttataaattcccttaataatgaacttcttaaatattgattcaaataaaaaaatttgaatatgaatataaagcaataataaacaaaggagattaagggaagagaaagtgcaaactcagatttatactg

SEQ ID NO: 94392 - DNA, 313 bp, Glycine max
ctcacgcttccatcacttcaccaccaagattagctttggataagaagcttggaaggatgcttcaatggaggaaaagaaagagggagagaaagagagagaggggagcacgaaattgaaggaataaaagaggcaaagaagtggaactttgaagtatgtctcacaagactctcattcatcaaagttacaacaagtgttacacatgcttctatttataaactaggtagcttccttgagaagctttcttgagaaaacttccttgaaaagcttctttgagaaaacttccttgagaagctagagcttatctacacacacc

SEQ ID NO: 94393 - DNA, 272 bp, Glycine max
agcttcttcccgttcttttaaaaccccaattttttttatcaccagccaatggggttaccactggcagtcctgttccttacttgagcacccctcctagacccccaatttttacgtcgccggttcgtccagctgttgttctatttcgtacgtcgcttgcctcacctcagccacttgcattttctttcacctcttctttgccaacatcatcatcgctgctgcaattttcaaatggatcgtttgagtcgaacaccaagtttctgatagagacttgc

SEQ ID NO: 94394 - DNA, 306 bp, Glycine max
  unsure (1)..(306): unsure at all n locations
tctatataaaggttcattcctattttttctataattgcctcacctctcaatgagctggttaagaagaatgtgtcatttacttggggtgaaagacaagagcaagcctttgctttgctcaaagaaaagcttactaaggcacccgttctagctcttcctgacttttctaaaacttttgagctagaatgtgatgcctttatagtgggattcggagctatattgttacaaggttggnaccctattggttattttagtgaaaaactttatggtgccaccctcaactaccccaccgatgataaagagctttat

SEQ ID NO: 94395 - DNA, 266 bp, Glycine max
agcttctcttttttttaattccagagggaactgttttgagttgggggaggtcttgtaaaacaatttcttccacagaacacagtgctccttcgataaggatgcacttcaattgatacaaatatctgagttgcagctgctttagtttctgaaaccctccactttgaaaattcaaagtttcaccttcataagcattgtcacttaaaacgaggaacaacaaccttggcatattttttagtgatttcaatgcatcattagtcaacctggag

SEQ ID NO: 94396 - DNA, 306 bp, Glycine max
ttcaagatttcattaatgatgctgattaagtggctgaagctgaacaagatgatggaaggcgtcatagaataaaagaaagggtgatgcggctgagagaagcagcttttcgcatggaagatgtcatcgatgaatataacatctcctgtgaggataagcaacctgatgatcctcgatgtgcagatttactatgtgaggctgttgccttcatcaaaactcaaatccttctccttcaaagtgcatataagattcaggatgttaaatcgcttgttcgtgctgaaagagatggtttccaaagccattttcctt

SEQ ID NO: 94397 - DNA, 273 bp, Glycine max
  unsure (1)..(273): unsure at all n locations
agcttaagagaatngttttcaatttgatgaaancttggtacaatgcatttctagatgtgctttgagtgcatacttgattgttgaggagttaatctcactgctttcatgtcgtgtacttggagatcaatgcaaaatgctaccgaaatttcttgaaatttaacaaaagagacttaaccttgacgtatgaatctaccataaaaatatgtcttcttgaatgggataaggccacacctttaataagaaaagtgagattttcatgcatcgaataacttt

SEQ ID NO: 94398 - DNA, 314 bp, Glycine max
cgtgaaggatatgatgatgggagaaatgggtatggaaatgagacaaaaatccttaaagtggaagaagagagcaatcaaagctactgatgttggaggatcatcttacaatgatttctataagataataaagcgaggattgtcattacagatgctctttaagtccttattttataatcaggtgtattaaggcttattatttctataaaaatacctttcttaaattataatgtgatgacaagcatgatgcaattggctcggcctaattactgctagtctaaaaagtactcatacatatttatcatgtcacgtgtact

SEQ ID NO: 94399 - DNA, 261 bp, Glycine max
agctttgaatggaggctctattctattgctgaaactgcatgttctgcatagtcatttgcctcacaagttcttctagggaaggttgtggaggggcctcaactgttggttgtttctggggttgttgctgttgttggattggtggaggaatgtatggtctgcttgggccagcagcattttggaaggaaggagcaagctgctgttggtgttgctgagggctggaccatcttaggttagggtgattcctccatccaaggttatatc

SEQ ID NO: 94400 - DNA, 320 bp, Glycine max
ccagcttgtgtctgatgcttatagctgttggttcacttattgcatgtcgttcttcatgcagcaaaaccactctgtttggcttttgtgtagaataatttagcaaaaagccacttcctttaagttagagcaagtttgtcactagtaatgtgtgtcttttgatggtgtttggaaacttctagaacttaggcttcatttattcttcataggattcgatagatcctaggagaatacctttgcaaaatgatctcagacacaaagaaataaatgaagtttcacatgccattctttaatgttgaaataggttatgacttgatcctttt

SEQ ID NO: 94401 - DNA, 274 bp, Glycine max
agctttaattaataattttttagttctgaaacaaccaagagtgagacaatttcatgcaatttctttggtttacatcatcatagaaatggaagacaaagaacacattgactcatttaattaagtttataactgttctcacactaactatgaaaatgggataaaggtgtttcaaaagtatatacaatttaggagtatttacttctccattttttttgacatcgactcaattataatagtttgattttttttttaagtgtttggatagaatatgaaa

SEQ ID NO: 94402 - DNA, 282 bp, Glycine max
  unsure (1)..(282): unsure at all n locations
gttgagctttctaccctttctctgntaataacataacaaactcctctatggacatgcaacgtgtcaacaaaagcaactcttatgcacaatgaagctacaaaacgtaaaatgtccaaattagtgctccctgccacataagttgttggaaactgctgaagctaataatgttgaatatgggtgcatagacttacaccagaaaatgataattatttacttataaataaacaaagcatattgaataaatatgctactctttgtaactctagggggaatcacatgtat

SEQ ID NO: 94403 - DNA, 272 bp, Glycine max
agcttcaataacatgattattatagactgcaagtgtctttccttctgctgtctatagatggatcctatcagtctagtacagggtctgcttatataagaatttggggatttgtaatgttgttgtgacaaaagtttgggacttatctttaggggtctaagtggctaagcaatttcagcttacaagggtgcttttcaagttgtcccatatttatagggaggctaatacatgtgttgaattccctgcgaattatgatcaacactctctctttgagt

SEQ ID NO: 94404 - DNA, 310 bp, Glycine max
taatgaaacaaacaaaagcataaccctaattcataacaatattgagaagaaaaagaaattaatgaagaacctgtgatgctaacaaaggaagaagaaaaaatgacgaaggatgatcggaagagatgaccaaggatgatcggaagagatgatgaaggagattggaagcatgggagaaaaattccgaggaaggcacagcaccgcaagttctcaggaacaagagaaaattttagggttcagagaaaaatgaggagggtatgcttgtcattttgaaattttcttgaggacattattgtccaagccttattttggg

SEQ ID NO: 94405 - DNA, 270 bp, Glycine max
agcttccattgttgagtttttgcttcccttttcacgctttaattcactccccacaagtaagtgcaatttcccttggttatttggctctccattgatgtgttttggtgctttagttgctcattttttgcaaaattcgtgaagcaatttgcatctgaatccatgcttgatttcttgagttaaggatttgaatgagaaggccttaggcctatgttgtattctgaagcaatggggcatgccacattgtccccattctcttgcaatttgtgtcca

SEQ ID NO: 94406 - DNA, 309 bp, Glycine max
tcaagcttcccttttgttgtaagacacatgcttttttaggtcctccaatgactgaatggttcgttcagtttggccatcaatctgaggatggtatgctgaactcagtctaagcttggttcccaatgctttgttcaagctctcccaaaacctagaggcaaatctaggatctctatcagatactatgctagatggcacaccatgtaacctgacaacctcacttatatacaaggtggtcaacttctccaaggaaaatctgatattaatgggaatgaagtgagcagacttagtcaatctgtcaacaataacccc

SEQ ID NO: 94407 - DNA, 239 bp, Glycine max
aaaccaaggctcaaagtggtttcaaatatgacacaggatgcatacccgcttatgcaagagccctacgagactgaagcatggacaataaacaagccacaactagggctgagctctctaaatttattgtgattaatgagaacaaaatggattaagccaaccactttgacaaaaaccttatacctctcctaaaacaggtatatgaaggcccatgaggaaatctatacctctgaaacattaat

SEQ ID NO: 94408 - DNA, 295 bp, Glycine max
gacgctttttttttaaattctctttctagggggcttttatagataacaccttttcattttaatatggcttagatacccatatattctttagtaaatttcatggactgcccccgatttaagtatgtctttattagactcgattatccactttgttctaatcttatagaagactaattttttgggattacgacgaactgatcccctttctattggtcacttatgttgcactttcgtgagttccgacaaacttggcagtctatgactttcacggtgatttttgaagaggaggaaatca

SEQ ID NO: 94409 - DNA, 266 bp, Glycine max
  unsure (1)..(266): unsure at all n locations
agcttgaggtatattttgattgagtactcgtttgtgacttcaatttcttctcgataaagagttctctattttgtttttaattgacttaggaattgcaattgtgatgtttgtaatatggtgcattctgcaggtaatgacttgtaggccaaggtcagatcttttaatgaatcttccaactctgcgcanacttgacagcatgcttcttgttagtgaaggatcttactttcattgtgtgctaataagagtagtactttggtagagaaata

SEQ ID NO: 94410 - DNA, 309 bp, Glycine max
tttattattgacatcagggttgaagctaattaaattctatttgtttgtagaggggtatatggctacacctttgagcatgatgtatttatttttttaacttggtgttatttttttagttttactatgttagcagtttttgttgttcttgattgatgcccctttgtcaccttatgaattcttgtattataattgtcacaacctacctcacgacaggatggcgaagaccaaatagataagccaaagcgttcgtctccaagggagaaaatgagcggagtcgccaccaacgtttattcgagaaaaaaatgttag

SEQ ID NO: 94411 - DNA, 218 bp, Glycine max
acctgagctgcacttgactttttttttggcctctattgtgatggacacttaattgaaatggacaaagtctcaaatttactcaccacacatcaggttgccaagatgaagaatgattggaatgacaaatggcatcttgggtgactttgttcttgcccaattctttgactaaataaatccaccaggacgtgctagatctgctgagtatgctccaacatttg

SEQ ID NO: 94412 - DNA, 290 bp, Glycine max
ctacgctttgacgatcatacccatggcatttcttctctcaaatcaagggacgagcactttcttattgggtctctagcaggaccgcgaatcggctattggagaggaacgatggtataatggaacgaatgatgtagcccctacacgttcgataatacaatcacatctttacctttggggtgtcttggatttgagcgacgttttaccgcgagatttaactggccctaggacatgctagtgatcaccttttccagtcgggcaatgaccggctgcttggaaatatgcttggaggg

SEQ ID NO: 94413 - DNA, 270 bp, Glycine max
tgcttggattaattgctattattcgcccactcacctaagtgtgattttaaagaaggatatcagttttaaaaacacatcatcattatttgattttgaagagagagaaaatcctcattattgccataataataaaactaaaaaattcttcacattgaaagaattccaaaattgtttgcctccgggacgtctaaaaataaaaaaccacgcatcctataaaaccgttccgaaaataatgaacagaaaatatgtaccctgcattaaccgcagcct

SEQ ID NO: 94414 - DNA, 240 bp, Glycine max
attataaggctgctctgtatatctcgcaagacgcacagttggcaatttgtccatgtcacctagatgatttgtccagttgtcctgggatgaatggatgtggatatttaaaggaaccacaacgattctagaaaaatctcagggaacggcccatctctttatatctaatggccaagacaatgtattagggtgaaaactacaattaagtgggtatgcctgacattattaattatacaagaggag

SEQ ID NO: 94415 - DNA, 269 bp, Glycine max
agctttctagcttttttttttgtatttagatctccttttggtgctctaaattgtgggaatgtgctcaaatatgtggggcaattttggtttgttttcttgcttgattaggttgaattgggggtttgtatgagatggccctaggcctataatgcattttgaagtaatggggcatgccacattgtccctgttctcttgctattgatgcctaaacgcgcgcccaccaagtgttcggtgaaatgcctcaatggcattagcgcgtgatttttgta

SEQ ID NO: 94416 - DNA, 305 bp, Glycine max
tcacgatgaataaaaaatgattttatgtgttttgatgataacaatgatgacaacaaaagatgatgacaaaggtgataaacaaaaagctcaaaagatcaaagaacaacttaagtgaatcaaagaataactcaagtgaatcaaagaacatctcaagtgaatcaagaacaagtcaagagttcaagaatcaagaagaattcaagactcaagaagaaagcctacaatcaagaatcaagattcaagattcaagatctcaagaatcaagatcaagattcaagactcaagattcaagaatgaataaaagactc

SEQ ID NO: 94417 - DNA, 272 bp, Glycine max
  unsure (1)..(272): unsure at all n locations
gcaagcattgttcannatttttttttttttttcgctnagcagttcactgttgcgctatatgatgggaatgcccccgctggtgcctacaatttaagttgatttattaattatctatctggatgaaaagggcgctctgagaatttagactatatttgggctgcaagggccattgaaacttttcgggtgggttttacttgtgctgaagagaagataattgaagaagaaaaagaataaattttttgatttgcaattgaaaaaaagaggggagatcc

SEQ ID NO: 94418 - DNA, 329 bp, Glycine max
  unsure (1)..(329): unsure at all n locations
cactatanactacccaagctttncgnaaattctatggtaagatttttgatttatctatggtagaagcgctccatggaaccgattgcatccctttcccagtattatgaccagcccctaatgtgcttcacatttgaggacttccagctagtgccgactgtgaaagagtttgaagaaattcctgggatgcccactgggaggaaggaagccatatcttttctctgggttctatccctccacgacaagagttgccaaggcagtgaaaatctcacctcaagagttggaccgtgtaaagcaaaacaggaatggggtagtctgagtaccaaggaatt

SEQ ID NO: 94419 - DNA, 273 bp, Glycine max
agcttggaacagatttttatggaagaacgataagcagtacactgttgcgctatatgatggcaatgcgcgcgcggttgcgacgattcaagtttatttatttattattatttgtatgaaaagtaggctcaaagaaatcagtcaatatatgggctgcaagtgcaagtgaaactttacggtgggtttacttgtgcagaagagaaaaaaatagaagaaaaataagaaaaaatatttgaattaaaatagagaaaaagaggtgagatccaacataatttt

SEQ ID NO: 94420 - DNA, 316 bp, Glycine max
ttccgcaaagcctatggtaagatttgtatacctagctagggtagaagtctccatggaaccgattgcatccctttcccagtattatgaccagcccctaaggtgcttcacatttgaggacttccagctagtgccgactgtgaaagagtttgaagaaatcctgggatgcccactgggaggaaggaagccatatcttttctctgggttctatccctccacgacaagagttgccaaggtagtgaaaatctcagcacaagagttggaccgtgtaaagcaaaacaggaatggggtagtcggagtaccaaggaagtgtttggag

SEQ ID NO: 94421 - DNA, 269 bp, Glycine max
agcttctagagaaagcttttttaagctgcctcggtaaaaatactgcccagccttcgttaaccattggatcttctcgaaatttggtttgcaactttacaagaccgttgggatctttgagaagatgtctggagtgggctagaagcttccgttcccgagagcatcttttatttaagcattttcagcctttgctttcgtgtagcttaggaaaaatgccatttcttcttctttctttcttccaaagccatttgtaaagtttccagttctttctt

SEQ ID NO: 94422 - DNA, 344 bp, Glycine max
ccccagtcttgacctaatcagtttctcacacgacttttttttttgtggagccacatccagtcccgttgtgattctggactacttcagccatcttattgatatgcccgccggatgatctccattacttgcattccccttaagactgtattggcgcttttcttcactgccgtcatactcatgcactgtgcgatactccttgcgagtacctctcacgtttgtgggcacatgaaaccctcgttgcgatgataaagccgtgaagcttatatgtctgatggtagctcctctcatgggacaattcttccatgaagatacaatcctgattcttccttccttcttgcgaggga

SEQ ID NO: 94423 - DNA, 273 bp, Glycine max
agcttgtaggattattttgtacccatcacatgtggtactaggtggcggtcgggcgatggtgcacaacaagtttttccacatccacaatgcgcgcataaacccaccatcccctgtagcccacctccaactgagctcacgtactcccacgtagcccatatcctcgtttgtctcaacaccgggtccccatcaatcctcccaagcttccccaacatcaaagtaatacaacattcaaacagcacaaactatcacagccaagaaaacagagcaaaggca

SEQ ID NO: 94424 - DNA, 309 bp, Glycine max
catatagttttttaataagcctaagcctgttctatttaatttaatagacttttaaaaaagcccgagtctaactttttaattaaataagtcagttcagaccagactttatgtaggccaagtcgtaggtccttgtaagccgacctggcctattctcaccctatctatgaatagtgatttatatcataaatataaataattgttaacttgtatcatttggataaatattttttttattattggtgttaaaaagtctactaatctcctcatttgttttatctatgtttttaaaattaaatctatcattgaatg

SEQ ID NO: 94425 - DNA, 274 bp, Glycine max
agctttataagcgcggtttctgggagacaaaggtcaagcgttcgcgatatgcgaggatgatattccgagtactttggatttggtacgaccatgccctcctgatttccagctgggaaattggcgagtggaggaacgccccggcatttacgcaacgagcataatgtaaacctttacggttttaaaagctctatagttgggcctaggctttagagtttttccttttgttaaggcttagtgtcttttgtttttgaatttataatacaaggatatttct

SEQ ID NO: 94426 - DNA, 310 bp, Glycine max
gcttcaagctgttcaattgcttcagattgttgcatataagggcaaaggtctgtgtggtggtcagcagaggagcataaaccacagagtttggcgacaggtgcaaattttttatccaaggccagttgggttaccaggttaaccaaggcatctagtttaccttcaagcttcttagtctccgctgatgaagatgaattcatggctacttcatgcactcttctaatgacaatagcatcacttctggcactaaattgttgggagtttgaagcaatcttcttaattaaatttctggcttcaataggggtcatgtctc

SEQ ID NO: 94427 - DNA, 277 bp, Glycine max
agctactatataagcttttcctttttatcaataaacacaagtggagtgcttattcagagaatcacagtgcatctcttttatctgtaagagagcggagctcctaaattcttgagggattcaagaacaccttggctgtatcaaaggactctcacaaaacgtatgtgtgaagccctggcgcgagcagagtgattccttccttcctttcattatcacccttgctccttcacaccacaatttcagaaaaaccacctctgcccaaaattatctcgcggccata

SEQ ID NO: 94428 - DNA, 310 bp, Glycine max
cccagctttactcttattgtctctcacagcctttttttttgggtgccaatccaacccttgggttctgatactcaaccacttatgatatccaccaataatcccattactgcttcccctatactctctgtcctttcttaatgccgaatgccatgccttgcgaactccttggaatacccccacatagcggtcactgaaaccccgttcgatgaaaacgcgtgatgctttcctctgatggcactcctctcatggggtagcccaattgtcttatggcgaggacgggattattattcatacaaccccttgattcatc

SEQ ID NO: 94429 - DNA, 300 bp, Glycine max
gctttaatgattgtgtacaaccatttattttttctttgagcgtccttattgatatgttctacagctggtcttgcatgaatttctaactcgcataccatatgattcatggatatgatctaagcatatctttcttctttacattgtaagccactggccaatctactgtcccaatggatattattttaccatttgcatagccctttgagccaaacactcgatattttgttggaacactaacctaggataaaagttcctaccttaccttaggattacgagagcaagggtgttttgatgggaatt

SEQ ID NO: 94430 - DNA, 270 bp, Glycine max
agcttgagccagtccttattttatggagaaataggcccagcaccaacatggacaacatttacgaaaacctagcaatatataatgtgttagcaacaaatagtaaatgttattacaatgaaattttaaagttcataaacttatagtatgccggcgtcacaaagctggttcacatgtatgccacacccggttataattaaaagcaaacaatttcgggtcatcaaagatatatagtgaatatgatgaacaggaactgactagtgattacattat

SEQ ID NO: 94431 - DNA, 330 bp, Glycine max
  unsure (1)..(330): unsure at all n locations
actatanaccactcaagctttgccagtatagcaccccaaattttctttatggtttcccaaccattcattctggaccctttaacccaaactcgggaaatctctccagctccacctatgttgcttataaacaccaatccgaaatagactataccattgatggtaaatctgatgcctccacttattttgcacccaactctgcataatataaatgttactagttagcctaatttttttaagaccacgatgtgtcctttacgagaaacaaaaaaaaaggtttaagacatatggcaattgacataacataaagatacttacttcctgtacaaaatt

SEQ ID NO: 94432 - DNA, 300 bp, Glycine max
agcttatgaactgtgtttgtcaccttaggccatacctattgtgtgtggcgcttcattagctaaccaataacatggcgaacaatgtcgattccctcacatctagtttggtctactggggagatccatggtagtggattgagacgaaactggcttttccctggggctgcatctaagaggacagcgattttcgggtttttgagcccagtgtattaattgcagacctaagcttctataggaagattcgttagggcaaggacacattgggcttgcagatttccgacactcttaaaagaaaggaga

SEQ ID NO: 94433 - DNA, 298 bp, Glycine max
tgacataacctattattaattatttctttcaagtcaccactaagctctaaacaaattaaaagatttgtaatttgtttgcacactagctaactcttaatcgttctttacagacggatataaaatctaagcacttagtcttttttctcaatgtgttcaaggagctttgagagcctttacaaactttaaaagaatttgcaaagagctttttacaaaagaatttgaatgttaacatgtaggtttgtgtcccatgtctttaaagcttctggagtgtataggcattcatcttcaagtgttcggt

SEQ ID NO: 94434 - DNA, 271 bp, Glycine max
agcttatagagctttgttgtgtgttgtaaatgaaataatgatttatatagtaaaattaatatattcttaattgaaagagattaaaatagcacatatttattgaaataacacactcgacaaatagtacatacaatttattaatgaaaaaataattattttattcaaatataaaatttcaaaaaaatgcatttgactattttattaaaataagaaattttgaaaataaagaaattcaatttctttatccaaatacaaaattctgaaaataatg

SEQ ID NO: 94435 - DNA, 272 bp, Glycine max
  unsure (1)..(272): unsure at all n locations
agcttctatgatttattttttttatgattatataagaatcctaagaaggtttttcaaaagcctaaaaaaaatacaaaggccaaaaggaaatgctccaattataggtatctaagatcttactactttagaaagaggaaggttcttttnaaaaaggtgactaacacacaaggacccaataaactatgggtatctaaaatcttactactttctaatgcaagaatgnctgctccaaaacaataggaaaatggtttggtttttggatagtggatgct

SEQ ID NO: 94436 - DNA, 305 bp, Glycine max
tgtgcattcaatatctcgatgattattttccatatgttctcaagactggactaatacatttgctgcccaagattcatggtcttgcaggtgaagatcctcataagaatcttaaggagctccatattttctgttccaccatgaagccccctgatgtccagaaagatcatatttttctaaaggcttttcctcattctctacagggagtggtgaaagattggctgtactaccttgctcctaggtccattactagctgggatgaccttaagagggtgttcttgaagaaattcttccctgcatctaggacc

SEQ ID NO: 94437 - DNA, 314 bp, Glycine max
cgccgcccagctctgccagccaagcattgttgctttttttagaagcaacaaacgtacggagggcccacatgggtctgagtgctatctgaacgcgactttttactaaaggcaccccttctattttattggtaaatatctctccgtagcgtaacgaagctttactaattccaatactatccttattatcctcctgcaaggtgaccaatccttaccgcaaaacggataagtccttttgaactttagaataacttacgggaacttacagaacgcacataaacacctcttttcaacttatgacccataagggaatttct

SEQ ID NO: 94438 - DNA, 273 bp, Glycine max
agcttcaagaaaaggccttactcccttctctctctaaaaaaaccctcacatgcagaagctccttcagaaaaatggccaaactccccttccaaaatctgatttcaggcttaaataggtggctttgttcgtgctcgtgcacttagcgcaattctgaaccccttagggcgcattagtgaatttcggcttagcataggcttttctcgctcaacgaatggactggaccggtgcgcttaccgggatggcccttcgctcagcgaacatgcacagctcatc

SEQ ID NO: 94439 - DNA, 312 bp, Glycine max
cgccgcccagctcgcccaggcgagctttgttgcttcttctagaagcaacagccttgtggagggcccaagtgggtctgattgctatttgcaccccctttttactaaatgcaccccttctatttttttggtaattctctttccgtaacgttacgaagctttacaaatttcgttacgatacttattttccttctgcaaggttacgaatccttacggattatgtatttactcttttttagctttcgaagaagttacggaaacttactgattgcgcaaaaacacctcttttcgacttctgccacattagggaatttc

SEQ ID NO: 94440 - DNA, 274 bp, Glycine max
agcttatgaaacctactgtttacaagaaataagatgtcaaaataagacaattgtatgattttcgaaaaggaaattaaaaaaaaaaaaaaaaaaactaaccatgttggatggcatgtgcttaaatctgtgataactgtagtaaaaacaatcttctttaaaagaccctttgaccttaaaattcgaagtggaacgtgctgcatcagtggatgcacactgattattatatctggctgatatttcattaggcctttggcaacctcgctgtaaaaagaga

SEQ ID NO: 94441 - DNA, 311 bp, Glycine max
gcttataccttttttgaagaagtgtttgtttttttcacatatgtgaatctagctaggcaccgtggtttctaaaattggcaaatattatactttcaatgtcaaatcagacgtaggattcaaagacggttattatcaaataaccgtatttgaatgtccaatcagaaggaggattcaaagacggttatttgataataaccgtctttgaatgtcaaagcatacaaagcattcaaagacggttatttgttaataaccgtcttttgaataattatattttttaaagacggttattaaaataaccgtcataaaaagca

SEQ ID NO: 94442 - DNA, 269 bp, Glycine max
agctttacaaaacactttattattgacccacttgcctagaatgaagagaacgtaatgccataaacctaggggactaataataaacttaacggctgatcgctactgacattgtagcagccaataacgaccccctacccttgaccatacatccaccatttggtatcgcaaaaggctgatgcctaggctgccgatggggcccttattacaacttgaactataactgactgatttacgccaatatggaaccgggacctctgatggaagacatg

SEQ ID NO: 94443 - DNA, 238 bp, Glycine max
tgccttgcaccttgatctatcagagttactcatggtcactaccaagcactgagccctcgggaggaatgtctcgtccccatgctaccagagcccactctagcgcctccatctacctatcataaattgaatactgacaggctggaccacttaacccctctctgaaatatgcaaatggacggccgtcttgcatgaacacagtccccatcccaacattcgaagcatcacactcaatttcaaa

SEQ ID NO: 94444 - DNA, 274 bp, Glycine max
agcttgatcaaaacaattatctaatcattccaatccactcaaatcatacaattgctcattcaaatcattctcaaacactcatttcattattaaattcaatggaaatattctagagacaactctaaccataaaacaagatttatttacacaatcactacaaaatgaccataaattgggggaactatacaagttttggaaaatgttttctatacaaaagttagtcgtgtaagatgactaacagtgggattatccatgtttccttcacatagtcaac

SEQ ID NO: 94445 - DNA, 306 bp, Glycine max
tcatagaagatccaacccataagtgtttttttgctgtaaaatcccctttaacacattcttcttgtatgtaatttgtttgtatctcaaattaaccatgtgggttaagttttggaaaagtgataatgagaacccataaagtgtttgtagcttacaaatagtctctaaaagtgtagcctgaaaaaggctacagtgaaataatacttatgtagcttgaagaggtgaaggtaaatacttgtattgtctctcccatgacaaaatgggtgtcgttgtaatgactcgtcttgccgctacgatattactactcta

SEQ ID NO: 94446 - DNA, 273 bp, Glycine max
agctttctagcttttctttgttgtattttgatctccttttggtgctctaaattgtgggagtgtgctcaaatatatagggcaattttggtttgttttcttgcttgattaggttgaattaggggtgtgtatgggatggccctaggcctataatgcattttggaacaatgggacatgccacattgtccccgttctcttgctattgacgcctaaacgcgtgcccaccaagtgttcggtgaaatgcctcaatggcattagcgcgtgacttttgaaatg

SEQ ID NO: 94447 - DNA, 309 bp, Glycine max
tagccctagaggggatggacctttttagattttggagatgatcaataacaatgcctataggttggacctcccataagagtatggagtcagcaccacttttaacatttctgatttaattccttttgcaggtggagctgatattgaggaggaggaattaatagatttgaggtcaaatcctcttcaaggggaaagggatggtgcaatcctccctaggaagggaccagtcactagagccatgagcaagaggctccaagaggattgggctagagctgttgaagaaggccctagggttctcatgaacctcagggt

SEQ ID NO: 94448 - DNA, 311 bp, Glycine max
tgcttgcctgtattttaaaaacaggtttttttttctactgacataccaatagaaagtataaaaaaactcaccacttgtcggtgaatgccacacttttattacactcgtactcaaggttagcacgcagggagattatttgtgctaaatacaaaacgtcttcttccctctatggatggattatgttcttgaggacagttattgtgaatttttgatgtctatatatactcatttctatatatatattaactccaaccaatgagagcttcatgtttcacttttattactgagctcttaatccactctcgactgac

SEQ ID NO: 94449 - DNA, 231 bp, Glycine max
gcagcagcaaacgacaacgattacttctttgtaacgcaagcaaaaccgggagtttcgttataagcccacggccggaaacgaaacgcacagaggcaacaccggccactgaaggaacgcacgggcttaaacccgcgacaccggacaagaaaaataacaaacgaacggagcccgacaacgggcaaatcacggaagaaaccgcccaccccgacggggggcccccaaaaaaagaaa

SEQ ID NO: 94450 - DNA, 270 bp, Glycine max
agcttgaacagattgttttctgctaagcaaagtgagtatatcattccattttctgattctttcatttttttaatcactggttatctgtcaaatttatgtagtcaagcttgagcagattttttttttgtttcatcttgcttctgctcatgttggcttcttaaaatatgtctatgcagatatctaaggtttccttgacaagaaactaagaaaataatttaaaatgaatatgaaactgtgttttctatttgactttgttaaactggatgaaac

SEQ ID NO: 94451 - DNA, 304 bp, Glycine max
tataggcagcctatctcacccttctttccacctgaaatagggcatcgaatcatggattcagattctcatgtttttttggctaacactagtagtctacatagatggagtttgagaaagacccaatgtccaacttgataatgccgcgccaaatggactttattagcttgagccttcaagcgatttcaggccttcacaacagtagcttgcaactgctaataacacaactttctggtgtcatttggttgacttgctccacataagatggaactgttattccctaaagcaagggtagaggattccatcc

SEQ ID NO: 94452 - DNA, 270 bp, Glycine max
agcttgatctaactatttttttcaaccttccaaacaacatggaaatcacttgaatatgcttggcctttccatgctaaacatgattcttaacgatgacgatggcttatttactggcacattaaatttcaataacgtccatcttctccactccctaagcaaacataattttcttcaaccaaatggctggggttgatgctgcatctgctgctacatatttagcttcagcagtagattgagatacaacgtcctgtttttttgagttacaagaaa

SEQ ID NO: 94453 - DNA, 302 bp, Glycine max
ctttgcattgtaatgctgagtcaatgcttccactttcttgcataatgggaggatcagtgtttactacaactgttctcactcccagaccttctggtttgagattcttgacatcaagaaaacttaaatgcttgatcccaattactacccctataatttaagtgtgaaataactactgtcttccattcattttcataaattctcacaaattataatcaaaagatatattcactacaaattacccttacctttcgttaagttatcatgtattattcatgatagtgaacacttaattaaaaacgatt

SEQ ID NO: 94454 - DNA, 271 bp, Glycine max
agcttgccaccctactttcccaggcgagctaggttgcttcctccagaagcaaccgccttctggaggaatactcaggaaggcccaagtggccctggttgctatttgcacccccatttttactaaatacaccccttgctcttttttggtgatttttttcgtaacgttacgaaactttacgaatttcgtaacgatgcttgttttctttccgtaatgttacgaaaccttatgaattacgtaatcatcccttttttgccttccggaatgttacgga

SEQ ID NO: 94455 - DNA, 302 bp, Glycine max
ttatatggttatgaaactaacatgttctttagtttttcacttattgcttcaattttcagaattgtattggaaagctagaatttgatgctcatgcattctggttttgttttgccatcctttttcattttttttagaagaatatttttgggcaaattgaagagaatataatgaaggcttcttctgatttttgtgcttcttggagctaattctcaaactggtgataccatcaattgtgttgggcaatgtttttataacataaaagatgtataagggctgataatatacatgttatagttcgctgt

SEQ ID NO: 94456 - DNA, 268 bp, Glycine max
  unsure (1)..(268): unsure at all n locations
agctggacttttttattttggtnnaaggggagaaagccggccatgttgaaagaatgcctataaccagcatgctctgcagcatgggcggaacaaatgccgcgggctgagaacgacaccattttggcccttctgttctataagagccatcgccatgtgagcacatgtactgaggtgaaagacccttatcaacacgtcccaaaattgtccagatcctgaataacaaaagcaaccattaagaccatacaaaaatggacttgagaagggacct

SEQ ID NO: 94457 - DNA, 223 bp, Glycine max
gcgccacactagctgtaactcagtcaaatgagagacctgcgagacacaccctcaaagatcaactcgccaccctttaatatacttcaataccgagctcccctaactctctttctctccatatattccatatctacattgaaccaacatccccaaacgtcttatccaaagctcaactaggaagcgaaactaccatattccaagagctcatacccaaccgggaggc

SEQ ID NO: 94458 - DNA, 251 bp, Glycine max
agcttcactttttgctttaaaggaccatcaaggacacggcagacttgattcacactaggccttactaaattatcaaatgacctattgataaaaaggcgaataggtagcacgcaaccagtaatattgcatcttttgcactattggcggcatagcaagaacagttactactaagtctatgagatggatatattatacgaggctacataaacagtatgcaaatgacacgtaatctatgcatcaaaaggcctaat

SEQ ID NO: 94459 - DNA, 266 bp, Glycine max
tgactacactgtatataggcccatctatggaagaacgaagggatagttgatgtgccttgcaaattgacatcgttgatcaatgggaattagctgagtctcactcctgaagcttatgatgctaggaccttgaggaattcaattgggaggttggactcttgaaaaacctacatgtttggttatgatggaaacctttactagagactagatgataactgaacataactcacttttgacggatctgtataaaacaaatttttccagttctc

SEQ ID NO: 94460 - DNA, 273 bp, Glycine max
agctttgagggtgcgcttcccaccatcttttcatagtagagtaccgataatgtgtctaccatcacgattatcgtctccctttccattattgggggtaccacctgggccgctagatccctccaccttttgggcgtgttctttgaatgatccgtccccctttttgcacatgttctgtagttgcatcctatccggaaccatatcaaaattgtactgatactgcctaacaaaggcaaccattaggtccttccaagaatggactcgggaaggttccaa

SEQ ID NO: 94461 - DNA, 312 bp, Glycine max
tctcaaggaagctaccaagtctataattagaagcatgtgtaacacttgttgtaactttgatgaatgagagtcttgtgagacacaactcaaagttcaacttctctccctttttcttccttcaatttcgtgctcccctatctctctttctctccattttttcttttcctccattgaagcatcatctccaagcttcttatccaaggctcatcttggtggtgaagctccttcttccatggcttattccctagtggttggcgcctcctctcacctcttctcctttgtcttccactgcatctccatggtggaaaatca

SEQ ID NO: 94462 - DNA, 271 bp, Glycine max
agcttgccgcccaactttcctatgcgagcaaggttgcttcctccagaagcaacaaccttctggaggaatcttctggagggcccaagtgggcctggttgctatttacaccccccgtttactaaatgcaccccctttctatttttttgtaattctttttccgtaatgttacgaaactttacgaatttcgtaacgatacctattttccttccgcaaggttacgaatccttacggattatttatttactcttttttagctttcgaagaagttacg

SEQ ID NO: 94463 - DNA, 313 bp, Glycine max
taagcttcaaagggccgagagagactttttttttaatcgaaggcatgatattggaagacaagttgaaggcttgtcaaaggtcaaagagaagtttgtccgaccaattgagcaagacggaagaaaccatgtgggccatcattgaccaatacaaggagaagctaagtcttgcagcaacccatgcataaaggctagaggatgagtatgcaaaggtgtcggtcatgtaagcagaaagagaagtgagagaaagagtaatcgattcattacacagagaagcaatgatgtggatgggtaggttcactttcaccttgaatgg

SEQ ID NO: 94464 - DNA, 274 bp, Glycine max
agcttgttattttcctttaagcaaaagctatagctcagagaaaacacaagcttgggaagaaaggagaaaagctataaagacaaaaatagacagcttgttgaaggctgatttcatttgcgaagtgaattacaccaattggttagccaatgtggtcatggtaaagaaagcaactggaaaatggaagatgtgcatggattacaccaacctcaacaaagtgtgtcccaatgatgcctaccctttgcttagcattgacagactagttgatggggcatgt

SEQ ID NO: 94465 - DNA, 308 bp, Glycine max
cgcctttatgctttttttataattgtgtgttttggtttcctctacgatattatttttgttgttggttgtggaaaatacatgtataattgagtgggattcgaattggaattggattgaaagaaatttgaggtccttatttagaaattgatggttctatagatcttgtggtgcttaagcgagggtattttgttcttaagtgcaacaagttgcagtgaaaatttggttgttgattttagggcttaagcataactgaatccaggcttaagcgtggattgacccaaccttatgctatcagaacaaggaaagtt

SEQ ID NO: 94466 - DNA, 274 bp, Glycine max
agcttccgttgttcattttttagcgtctcgatatattaagtgcctgattcggacattcgagtgaaaagttatgaccatttgaatttcacaagagcttcctttgttcaatttctagcgtctcgatatgtgatgctcctgaatcggacatccgagtgcaaaattatgaccctattaatttcacgagagcttccgttgttcaatttcgagcatctcgatatattaagcgcctgaatcggacatccgactgaaaagttatgaccatttgaatttttgg

SEQ ID NO: 94467 - DNA, 309 bp, Glycine max
ttttggagtagaaacatgggaccaatttattttatttcaaaaagaaagtcgtatctagtcaaggtctgagagaccatacaagtttcctaacgatttctaattatgtgggccattaagtctatcatatgctgacaatagccgagaagcccatgaatctcttcgggggcggagtaggtgtctgccatcgccttggccttggctaacaagcggggaagttcttgactcccgttcaaggtaagagcaaaccgatccatccacatggttgcctcttggtgtaaagagtcgatcacccttcctctagcctctttt

SEQ ID NO: 94468 - DNA, 308 bp, Glycine max
tatccgtagaggtgatggaccttttttgttcttggagaggatcaataacaatgtctatatgttggacctcccataagagtatgcagttagaactttataggtggagctaatactgaggagcatgaaccaacagatttgaggtcaaatcctcttcaaaggggagtgggtgatgcaatcctccctaggaagggactagtcaccaaagccatgagcaagaggctccaagaggattgggctagagctgttgtagaaggccctaggattctcatgaaccttagggtagatttctgagcccatgggccgtgttg

SEQ ID NO: 94469 - DNA, 255 bp, Glycine max
agcttaaaggaacgtgttttttattagtatgggcagaaatgtttgcgcattgattggtaaatctgttccccaaatccctaaaaaatgtaaggatctaggtacattttcataccttgtattatagggaacaataagtttgacaatgccatgctagatttaggagcttctgttagtgttatgccacataaatttacaggatggggctaaaccagttagacagtcacaaagaagactcaacccgatgattcttgatgt

SEQ ID NO: 94470 - DNA, 308 bp, Glycine max
tctctttcttttccctataaatatggtaaggagggaagaacaaaaatgttcaaccctcctggtaattgagaatcacttaaaattagtgagaaaaattgtttccgtgaagagaatccaagctgaggcgcttccgtaacacttccgaaacgtttccgtgggtgatttcgcgaagattttctgccgttcttcgtcgttcttcgtcattcttcggtcttcaaccagtaagttcccgaaattgaacttttcaattcattctatgtacccttagtggtccccatttgtttcgcatgcctttatccttatttcat

SEQ ID NO: 94471 - DNA, 275 bp, Glycine max
  unsure (1)..(275): unsure at all n locations
agcttgaagacatttttttttttcgcccccnccnnggggaaaactttatttttaatggctaccgtgtctcccacttgccaactaanattctcgtatttaaacttttaagttggaggttaatgggnattactccttgttgttgaacttatgaatttttgttccaattaaccttcttagttgcaaatcagtaaccctcaatgcacgtaactgacgaagaagggccatgataatctacctttgactttctgccccattgggagatccaaacctgccat

SEQ ID NO: 94472 - DNA, 332 bp, Glycine max
cactataaaccactcacagcttttcttgccatacaatcaagcattcgttgtcattcaaggaacggggaagcggggatttctgaggggggctcattaactcttcctataatcaacacacatatgcctctaagcggcacccctaacaatcattaagtccatttttctcaccctccatggtaagatctgaccttttttttaaggacaccatatatgctactttaaccacgggcctcccgtgattgggctgataacactgatacacatttctaaataccctcccttttttccacagaaaaccaaagaggaagagcgtccgcatactttttccctga

SEQ ID NO: 94473 - DNA, 267 bp, Glycine max
agcttctggtttattgtctcatcttcaagtatatgttgtctcacaatggtaaatcttcatttgattttcgtctaataaaaaatggtcgttggtacatttaatgtgcatcatttcctcatgcagagaaatatttgtttaaggcttgcatgtatgagaaattgcaacaaaaagtaacatctttgtgtcagagtaggttctacatagcagagcttttcttttgatagtgaagatgacatattagatcttgacttcatttattcttcataa

SEQ ID NO: 94474 - DNA, 303 bp, Glycine max
tctcttggaccttgagcaagcttttttctcctcttttaagaccatgctatgtgctcgagattggtctctctcttcccttcgaatcttgagctcattgttgctgccccacaaagctccacggaatttgtctcggccgtgctcttccttgcgagccctcttggtttcttgttcaagggctcttgcggtatctgcatttccttctcgtaactcgacacactctttccgaacgtctgtagcgactaacttgaatttttctttggcaagtcttgcttttactagttctatttctagagctcagacttc

SEQ ID NO: 94475 - DNA, 271 bp, Glycine max
agcttgcatttgtgtaatttcgaaagccccactccatcattaggattagtacctgacatctcaaacaaacaaatcaaacgtaacaagacaattatagttgttgtttgaatacctcacccactcaagtgtatcacacaattatggcttttctctaatgaaacactcttgccttttaccactctaattccccttgagttcttaggcaattcaagagattatggccacaacaaagaacaattcaccaatatgtgtaaggtaaggctagagagac

SEQ ID NO: 94476 - DNA, 301 bp, Glycine max
tccatcacttttgcatgtagttcgttttagaaaatgtcatccaaagattagattcacaaagagacataaatgcaacaaaattgtgagagaacatacagttcagaaaagaaaattcaacacctagagaattttaattaacaaaacatacagtacactgcatcaacataactcgaaagcaattaaaaagcttatcatcaagccaaggaacttgcactcgtgctcaaaaaagaattagaaaattcccccactaagatagtatatttaaaatcctagatatatattaacaagacatttagaaata

SEQ ID NO: 94477 - DNA, 269 bp, Glycine max
agcttctccgttgttttatgtaacaattttgaaatgtctaattgatagaccacaaccaggagaacccacaattcccaccaaccattcaaagattcaaacttttcattgatgttaaaaggaaagagcaaaacttggaaaacctttgagttcttttcctattagcttccatgttgtaatttgaaacctaaatgaggtaacgaacatagtaggccatgatcatgacgttgcattagtgccccaatgggagctccgaccatgcgaatggagta

SEQ ID NO: 94478 - DNA, 304 bp, Glycine max
tgtaggattatggggtacctttcatatgtggtactaggtagcgattgggcgatggtgaaagtcaactctccacatccacaaatcacacataaatccaccatccccagttgcccaccttcaactgagctcacgtactcccacgtagcccttatcctcgttcctctcaacaccgggtccccatcaattcctccaagcttccacaacatccaaacatcatgaactatccaaaaccaagaaaacatggcagaggcataaaactctacccaaaacacattcaaataccacagttttcttcactcaaata

SEQ ID NO: 94479 - DNA, 268 bp, Glycine max
agcttggattttttttttttagggaatctatccttcctaagatggagccaaacccagtcaccctcattaagaactagctcttttcttcctctattgcctttagttgaatacacctttgtttggttctctatttggttcttaaccctctcatgcatcttctttacaaattctgacctagattccccttctttatgtataaaagaagtgtccagtgggaggggaatgaggtctaacggtgttaggggattaaacccatagacaacctcaa

SEQ ID NO: 94480 - DNA, 323 bp, Glycine max
  unsure (1)..(323): unsure at all n locations
agtgacccatanaatacttaagcttggaagtatttgacgttattatttgcctgtgccattaagctcttaatgcctttacaagttacttcctcattgacatcttttgtcttgaatggaattgccatgacaggtttattgttactggctttgacgtttggaaaaatgatattgtgttgcgggagggaattccgattggataaactcaccatccttcacttgccagtttgatatgacatttgttgttggatcacctatgatgtcttgtttccaagggtaatctatatcctttctgatggcataagcatgaaaccaatcaaagaaaa

SEQ ID NO: 94481 - DNA, 273 bp, Glycine max
agctttcttatcttgttttcttttttgtatcaatgaccatgatgttgagcaaccatttctcctcatatccatttttaatttttgttgggttaccttgttctatagcaaaaggatcaggaatttttgaggttgttcctcgtgattatactccaaatccccaataatgtggaagaatgccaccattacatgtgcctttgtttctttggaaaaaagcattctcaggacgacgaagcttaagattaggtgacatggtaatattttggtggtacttta

SEQ ID NO: 94482 - DNA, 310 bp, Glycine max
tttattcatgacttccaatggtgatgaacttgtgcttgactcatcttctccttgaagtgatatcttcaatcatctttcttccatctccattccgttgccattgatcttcaagaagcaaatgactccattgatgaagaagattcaaggcctacaagctccatatggagctaaatcatgtggtattagagcttgtaggccttggatcttcttcatcaaggagaagatgagtcaagaagaaacttaccaccataagaagccatggataagagcttgaatgtatgagaaaaagagtggagggagacggagagaa

SEQ ID NO: 94483 - DNA, 273 bp, Glycine max
agcttgaaggaaaattttattcattggttaacttggtaacccagctggccttgaaccaaaaatttgtacctgttgcaagggtctgtggtttgtgctcctctgctaaccactatacagacctttgcccttccatgcagcaacctggagcaattgagcagcccgaagcttatgctgctaatatttacaatagacctcctcaacctcagcagcaaaatcaaccacaacagcacaattatgacctcttcagcaacagatacaaccctggatggagga

SEQ ID NO: 94484 - DNA, 311 bp, Glycine max
tcagaccaaagcaactcaaaatctatttattttatacccctcaatttagtggattttcaaggtttgagaagtgaaaatgagaatggggtaaatttggagcaaactctcacctcacacaagtctataaccttaatctaaacttgctcaaactggttttacgcctaaaattccaccgaatcaaaatttgactcctcaacacccaatttaccctagaaatggctcttgccttcactttggtcattcatttttcccctttgcacagcccaagctttcccacagtcctaaatgacatttcaaactaggattaactc

SEQ ID NO: 94485 - DNA, 274 bp, Glycine max
agcttgacacttaaagtattactccatgcaaaacctcgggctgagtgcaccattgccatgtccacttcatacttgacaacattctgaatattgccatcacaatagccactatgttgatctgaagaactgcttttttccttgatcttaatcaatgctggctccaaatatttaatgtagtttctggcaaatgctgcttgttccactttgtagggttcaagagagtacacacgtttgcattaaacacgttgaccctccatgtaacaatccaaacaaa

SEQ ID NO: 94486 - DNA, 317 bp, Glycine max
tggccaatccaaaaatacaacacacttttatgtattcttctctgctgccccaaaagcaatattttcctgttccgatgccataccggatcatactttgtccgcaatctgacagcaagtatgccaagcctcctgccgtcccaacagctattttatgaagctttccctatcctagggtctagttttcatgaaacaaataattgtcacaagaaccattccctatggactcataaaccaatgctctgaggtttctatcaaagcgaaatccccacaactgtactacattgaactgaagacttttcacaaatgtacctatccct

SEQ ID NO: 94487 - DNA, 262 bp, Glycine max
agcttcatgatgatgattcttgtagttttgatgatgacaaaacgcccatttaaatgatctcaagattgagtctacaagttcaagaagaaggcgatttcttgattccacagcttacctcttgatgaattaagattcaagagaagatgaattcacgattccaagagaagaaatcaagaagcagcaagaccagacttctcaagggaagtattgataaggatttttcaaaaagccaaacatagcacagtttttgtggtacaaaaga

SEQ ID NO: 94488 - DNA, 310 bp, Glycine max
ttcataagtgaaattaggtgcagccttttttttaagagtcctgtcacgaggtggaggttgagccatgttctttgtataaaaatttgtagtggaattgctcaaaatcagaatattcagaatcaccctcaagagaatgcacaaaatgcacagaatgaccaggatgcacactatgcctaactaatctatttcaggatcaaagggttgtaaatcacctggattgcccctagtcatgcgctatatgcagcaaataatgtgtttctcaacaagcacctaacaagggggtaaaactacaactatacctaaacgatat

SEQ ID NO: 94489 - DNA, 266 bp, Glycine max
agctcgcctactttcttttacgagcaaggaaaaaacgcggatgaacaaaccacacccaaagagacaatacaaagaaagcgacaaagaggactagtagactaaagcgaacccaaactatcggaaaggacaccatcggccaagcaggaaaaataagccataacgcgaccaaacttaacaaaatgcgaaacaatggccagaactcccccggaaggggaccaaaccctatgcacgacccgagcatcccttcaaagacttccggaaaggaa

SEQ ID NO: 94490 - DNA, 271 bp, Glycine max
  unsure (1)..(271): unsure at all n locations
agctttnggnatttaattttcttcttcaacaaatgtttgttgtctctaaataacaagatttcttttctttatcttgcggctgaagaatatggccattggagcatttaatgtttgcattaaatacacatacttcttcatactagaactcgactcttcttggatatcatgttgaacaccccagtaggaaatcgcttccttttgcgttaaagcagatttgcatagtagagtgcttcttttgatggaaattagcgaatttgaggacttggacttt

SEQ ID NO: 94491 - DNA, 295 bp, Glycine max
tctcaaggaagttttctcaagtttgttttcatggaagctacctaggctataaatagaagcatgtgtaacacttgttgtaactttgatgaatgagagtcttgtgagacacaactcaaagttcaacttttctccctttttcttccttcaatttcgtgctcccccttctctctttctctccctctttcttttcctccattgaagcatcctctccaagcttcttatccaaggcttatcttggtggtgaagctcattctttcatggcttattccctaggggatgacgcctcctctcacct

SEQ ID NO: 94492 - DNA, 267 bp, Glycine max
agcttgtaaggatttgttgctcaatcatacaagttgacgacacacatttatacgagaaataccgagggaccttgttaatggccacatcacaagatggaaatggtggtgttcttcctatagcattcaccgtggtcgaaggtgaaacgttaacagcatggcaatgggttttggcccacttgcgtgaacatgtcacagataataatgaaatttgtctaatatctgatcgtcacgcgagtataaagtctgatgttgctaacgaaacacttg

SEQ ID NO: 94493 - DNA, 306 bp, Glycine max
ttgctaccaatgcacaaatactaaatatttttttgaacccttcggccaattgcaattatgaggttaactatgtaaatgatatataggagcctaaacagcaggaaaaagagataatacaacatttatatctctctctaaatcactgctttatctgatcgatccatattaatttgaaaaagttctcgatttgttgggtttacgcttatcacacttgcatatgaatttcgtatcaattgggctggtcaacatatataatttattgtgccattataaggaaaagatgaaaattgcaataacacttcaaac

SEQ ID NO: 94494 - DNA, 281 bp, Glycine max
  unsure (1)..(281): unsure at all n locations
agcttcacaaggtttgttctctgtggtagggncggcgaacacgcatggcagaattgggggcaaccaaaaaaagctttacttacttgggggtgggattgaacaaaacggctccctgaatatgacaccaaagcccgaaaaatcactgacaggccctataagatcttatggccctataggaataaaggactcggaagaattcttgcatggccccaatgatgctcttatcataataaactcaggtcgtctaaattcctttacgtcccccatgtggggggtaaaaa

SEQ ID NO: 94495 - DNA, 270 bp, Glycine max
agctttataagtgtggtctttggagacaaaggtcaagcgttcgcgatatgcgaagatgatattccgagtactttggatttggtacgaccatgctctcctgatttccagctgggaaattggcgagtggaggaacgccccggcatttacgcaacaagcataatgtaaacctttacggttttaaaagctctatagttgggcctaggctttagagttttcattttgttaaggctttgtgtcttttgtttttgaatttataatacaaggatcttt

SEQ ID NO: 94496 - DNA, 309 bp, Glycine max
cttcaggctgctcaagtgctccttttttttgcatggaacggcaaaggtgtatatggttgtcaacagaggagcactaaccacaaaccctggcgacaggtacagatatcttattcaaagccagctctgttactaagttaaccaatgcatccagtgtgccttacaagcttcttagccttcacatgatgcagatgggtttgtagctacctcatgcactcctctaatgactatggcatcatttctggcgctaaactgctgggagttggaggccatcttctcaagtaaatttctggcttcagcaggagtcatgtc

SEQ ID NO: 94497 - DNA, 236 bp, Glycine max
tcccaccctcctactaacataaaaaaactaaccacacaacaccacacaacaaccaaacaacaacacaaacaacaccaaaaccaacatacacaacaacctaaccaaacaaaaaaacaaattcaaacaaacaaacactcaaagaattgaaataaaaaaaactaaaacacaaaaaccaaaaatcaaaatacaaaaacaaaaaccaataaatcaacaaaaaaaaaaacaaaaaacaaaaa

SEQ ID NO: 94498 - DNA, 107 bp, Glycine max
aaaaaccccggtgccttatgaacttgccaaaggtaaaaggatggcccccactcgcccctgtttgaataagtgcccgagcccctaattgaaaaatgctgccggacgcg

SEQ ID NO: 94499 - DNA, 290 bp, Glycine max
  unsure (1)..(290): unsure at all n locations
gacatgatgcataacatacgatgtctcatgctataaaactaattccttctagttatatttaatttaaaatctgtgaatatttctcgctccttctgtgtggatgcagatgctaaatcaatttngccaagaactctgttacagcgaccaaataataccattgagcttgaactggttttatatacactttctgtgcttatgatatacaacgcatgctgaatgacttacgaatcacattgtttgcctgattaacttcaacaattcatgcttaatttgtgattctattgcagtat

SEQ ID NO: 94500 - DNA, 383 bp, Glycine max
  unsure (1)..(383): unsure at all n locations
ggaatcggtaccagngattgtttctgaataaatcaaaagatgtaactcgtcanatggttattgacattntcaaattggttttaagtttttctaaaagtcataactcttctaaatggtcctcttgaccagacatgaagagtctataaaagcaaggctttgttttgcattntatatcaatccaatcaatctaatacaatcctntacaagccttgaatctctntgaacttcttcttctctgtgccaaaggctntccaaagttntctggttntctaaaccttgaagacttgggctattcattcttttcatctcttctccctttgcaaaaagaattcgcaaagactaactcgctgaatttntatgtgtctctcttctcccttttcaaa

SEQ ID NO: 94501 - DNA, 279 bp, Glycine max
  unsure (1)..(279): unsure at all n locations
gttaaaaaatgtttaaaaactttaataatattgatnttttattcttattatattanggagggagagggtacaatttagcataactattatactgttatcgaaatgattactgatatatgtatcgagaataatgattgaggcatgatgttatatatgtgataaaagagtgtatgagatacttatatatgaaagaacatgtgggtatgaaaataataagaatgtatgtatattattagagagtgtttatatatgtattaatatgtgtgtatgtatcatgat

SEQ ID NO: 94502 - DNA, 463 bp, Glycine max
  unsure (1)..(463): unsure at all n locations
ctaagctcgcaaagtctacanagttctagcgccgctgtgtgggattgtatagctaagtctcatacttgcctggtaattctcctagagtgttttgttttctttgcacacgatgttgggtcttggactcgcctcgcgcactcgaagatatttgtcatattcataataggtggatatgaaggatatccaaccaataaacaaaaccaaataaaaaaatcaattcaacacacaattttttttcctagagaactatgtangtctgatttcctcattgcacctgngagtacataggagcaagggcaacacccttgtcgattcaagaaaaaaacacaaaaaattcgccgctcttgggaaaataaataattntgaagacatattatttntattgcatactcgattataggctgccattctttgtgatgggcgcgtgggttgtagcaccttcctatgcgatacaactccaaac

SEQ ID NO: 94503 - DNA, 201 bp, Glycine max
  unsure (1)..(201): unsure at all n locations
aacagcaaggactattttgctacacttatgcaaagatagagactantttttacatttcaaaaggatagggaataatatgcagaatggttactaagacagggaccagaattcctattcacttaatacacacacattcacacccatattgttggtgtaatggcctataacaaccacactctcaacgaatgggctacaccagat

SEQ ID NO: 94504 - DNA, 265 bp, Glycine max
  unsure (1)..(265): unsure at all n locations
acccccatttttactaagtacaccccttgctcttntttggtgatntcttttccgtaacgttacgaatatcgtaacgatgcttggtttctttccgtaatgttacgaaaccttatgggatacgtaatcatcccttttttgccnttccgaacnattattgaacttatggattgcgcactaacacttccttntaatnttcggcatgtcacgaaacttcacgaatggtgctacaatgctttctttntacttncggcatatcacggatctt

SEQ ID NO: 94505 - DNA, 535 bp, Glycine max
  unsure (1)..(535): unsure at all n locations
catgcagcttgatggcaagaaatggcaacanaatttctaattttaatcaaacttttttcatatctgctgagatggaaatcttaagatatgacgacgatgaaataaacaatccgatgctttgtaataaaattnagtatcttttggaataatatagatattataatgatagggatgaaatcaaaaactagatgattgctaaaaacaattaaaactttttttttcttcatagaatttattctcttttattntaaaatttcatagncttttctcccaataacaataacaagtaccctgataagaattacaattcagatggggaggataaaaattacaatcgtcgtctctaacacatgtataatctatctcttttacctttatattntggtttttgtgaagatggaagacctagaaaataagtctataattctatatatgatatgagtaaacatcaaatgttcacaaagaataatataaacaatagtaattaaacgtagatacaacaaaaactattgatgttctctgactattctaatac

SEQ ID NO: 94506 - DNA, 160 bp, Glycine max
cgcaacaatatctaacgacaataacatttcactcggaagttcgattgagtgccgtaatatatcgagacgctcgaaattagtaccagagctcgttgaaattcgaacgacaataacatttcactcggaagttcgattgagtccggcaatatatcgagacgct

SEQ ID NO: 94507 - DNA, 262 bp, Glycine max
  unsure (1)..(262): unsure at all n locations
agttatgtcctactcaaatatggcaattntttgtgtactgctctatagcctttcaaatggcaaaacatactgtattagtgtattttatttntaatgatatttgctggtgctgatgtttntctatatttatctcaaaatactagcagagattcagagaatgtctgtatgacaaaatctctttcaaatgctacattngtaacatatccgnttacttccctctatgcatcaactatcgagtcttgtttgtcaaatagataatact

SEQ ID NO: 94508 - DNA, 443 bp, Glycine max
  unsure (1)..(443): unsure at all n locations
ctcaagctctcaacttccgacagaatctntcgaagagccagtgctagagacatctagatatatctacaggacatgatcacattggttaaccagggcagaaacttgccacacacaattgcgctgaatgttcaaaacctcaagaatgctggaacacatggtggcttgaggccacgcgaaatctgtgaacccattaaaccctaactaaaccatacaaagctagcgatggtgttntgagcaagacattgtcaaaaaacataagtgggaaccacataaattggttcgtgtgagggacaacacacttgaagcttggagagaccaaaaaggtcaacgcacttcacatgaagaggaagatctcggggatttcctccgatggatcattgccaatgatgttgagaaaatgacgattgagcgagcggggtacagaacttctatggagtctgaca

SEQ ID NO: 94509 - DNA, 394 bp, Glycine max
  unsure (1)..(394): unsure at all n locations
gctgcgccagtcgccggcagcaagtgttctcaaacacagctttggtgaattttggaggccaaggggctgatgctattgcaccccttttactaatgcctcccttctattnnttgaattttttccgaacgtacaaacttacaattcgaacaactatttcttcgaggtacaatctacgatatgattactcttttagcttcgagaagtacggaactacggatgccaaaaccctttttgattctgcacatacggaattacgaacaccagctgttctttcatctgacgctagattttatgattataagatatcccgacaataggagaagtgcctttactacttatcgaataagaagcaaaagaatgttcgcgctgctttggagaacctgtcatctttttt

SEQ ID NO: 94510 - DNA, 507 bp, Glycine max
  unsure (1)..(507): unsure at all n locations
ttttagaaaataatntccaagagtcacatctattctaatggtntatgaatggccatcaaaagtgacttggaaacacgaatttaaagagatgtttcattgcccaaacagttttatgctctcaaaagattaagaagttttctgaactgaaatgtcttatcctctcaaaaagattccttggtcaaccacttgcatattcaataangggaatttgattgatcttcactgtacaatctatctctcttaagagagatttcttcttctcttcttcttatntctgaaanaagatataagagaccgtgggtctcttggttgagagaattcttgaacacaagggaaggggtgcccctgtggggtcagantttgagaaggagtttacaagagaagggaaatctcaagtgggttgcttgagctagacgttgcacgaaagtgccgacacatataataagttgcattcctctctctaacttctttttatggattatctttgttaagaagtatttgattgct

SEQ ID NO: 94511 - DNA, 319 bp, Glycine max
ttggggttaaaaatagaaaagcatgagaatatggacttgcttgtaagaattcgggctgccccatgattggtactttgcacctaagtaacgtgggaaatgcttttcaatggtatgtagatatatgtgtaaatataaggggcataaaattcctcgccaagtatgaataattcttttcttaaatgaatgtatgatagcgtggaatgcctcttttaatgcaaatatgtgcacgatgtaattagctttccaatatgcatataaataaatatgagtgaaacaagaaaaattcgtatggtgtgcttcaaatgtatgtcagcagttt

SEQ ID NO: 94512 - DNA, 343 bp, Glycine max
  unsure (1)..(343): unsure at all n locations
acctagactntntttttgttgtgaatatttatacttataaaanggcatgtaatctntgttagaggttcatctttaacttatatttaaataatttaaaanaaaaccttatttcaacaaatttcataattaaattgtcttgtatattgtaaatcatggatccttttgtacgtcataagacaacgtttatgtcaaggggcagcgtgtgtcctaaaccaaagaatggataacattcaaccggacttcatcgttaaaagcattttgaaggaactaaacttttgttgtgaaccaaatttaattagtattcgaactattaaattgagatgaatctgtttgatttagttta

SEQ ID NO: 94513 - DNA, 422 bp, Glycine max
  unsure (1)..(422): unsure at all n locations
gctggatatgaatgcggtgacatggtgcatggactttatcactagtgctggttggttccctttctggaacagtgctactggaaactaattaaaaaattctctatcttacaaagaagatacaccggacatatctggactntgtgcaatgtcgcgctgctttccttttccaccaccaggatatgaaaagaaggctacagcacaggacgtggatgtactgacaaaggttaacgtactctccttatattcacaatatgcattgtgtttcattatcaagatctgggatgcaaaaatgaatcttcctgtcagctgtatatgtgttaaatgtgcatcgataatataagatgcttctttgtgaatggaccatcaaattggttggtaaaccattaagagtaataatctttaccacatccctatcattctac

SEQ ID NO: 94514 - DNA, 447 bp, Glycine max
  unsure (1)..(447): unsure at all n locations
cttctattttcagattgagaatgcctctaacagcaccttcgtcaatgatattcttcatgctctcttaagcgcagatgttcaaatctttgatgccatattttgacttcatcttctttggaggatagacatgtggaggagtatactggttcttgaggtgtcataggtaacagttggtctttgatctgctgcctttaatagaacttcagtcttctcatttgcaccaggcattctgacgttgtgaagtttacattgaatccttcatcacacaactgactgatgctgatcaagtttgcagtcagtcccttcaccagcagtactttgttcagactatgaagtccatcatggactagctntcccattctatngatcttttcattatagccatctccatatgtcacatagctagtggagcaaggtctatgtcaccagaattcttatactctgtat

SEQ ID NO: 94515 - DNA, 363 bp, Glycine max
  unsure (1)..(363): unsure at all n locations
ggattttttcgcaacttgacttggtctttctatggatgatttagagccacctcatgcatgcttaattttgttattattgaactntactatctctgngcatgtnttagtccattaaattactagaacctttttctttcctttcactctattttgtgcaggcattntgtccccaaaattaactattgcgctccagttattgaaagttgagaaacacacanagaacaatctttcttttcactgatgagatgatttatgaagatttttgtttttttttctatctgataatatatggggcttttagtcataaccataaccattaacctgcagggatttggattgtacctatggtacaaatctctgata

SEQ ID NO: 94516 - DNA, 435 bp, Glycine max
gcaatagtaacgagatgagaactcatcagcaaaagagtggctgaaagatactaaagagctacatatactgttttgaccatgtttgtaccatatctggtaacatataaaattctagacaggaagatactaaagagccataaatcttgcgccagaataagatgatattattattgactcttggataaatgagtagacacagccatatgtctcacttgctgcaccacaataacactttgttttctccattcaggaggaacattattattataggtgctagtacatgatatagttacttatatatagagacggaagagacctcaatgcttaattcttacaagtgcataagaagagctttcatagtctgaaacattgatacatgaatttaccttggactgaagcatccaaaaacagctacagatgcttgtccgatataaa

SEQ ID NO: 94517 - DNA, 458 bp, Glycine max
  unsure (1)..(458): unsure at all n locations
tgctgtgtatgtattcacagccattgttgtcatatatgcactacattcatcctctatctgtgattcagcaagacagtctcaggcatcaagcaatccagaatgtgtcaatgaggctgagccgggctgagccaccactgaggagagaggtggtggaatacatgctagatgtggattcacacatgtggagtatgagaaggagcaaagctaatttcttcagaattaccaaagtcctttgggggttgatagcctttggaaggtggtttgatcagatatgcaattggaaaaaccctctcacatccatactcattcatatncttttcataatactggttctttatccagagctaatacttccaacanatntncttttaccttttatgggtggaatttgggacttccgatganggcaagacaccctctcatatggcacaagactatacatgctgatgctgtcatct

SEQ ID NO: 94518 - DNA, 274 bp, Glycine max
  unsure (1)..(274): unsure at all n locations
attcgctgaccatagagtggtacctggagatatgtcgcggtggtcacgagacctctgggacgtcacgtggtgtgctatngtccanaaccaagcttgaccaatcccgacccaacccgggcatattcagtcagtgagaacctgtgatgtacctaaacaggcgagctcctgtcagtacacagattaaacgaacaaagaccacaaagctaggaggcttgtgtggtggctggccaactgtgaaccttgatttatatgtgagatatggcctctggtaatc

SEQ ID NO: 94519 - DNA, 286 bp, Glycine max
  unsure (1)..(286): unsure at all n locations
ctcaaaatggcacacacacgctgacattctatggttgagatatttaatgtagtgggtctaaatcccacttggattaaggtgccattaggttaagttgcttaatcataaccctagacccctattaagttcatgacacttaatcctagcctcaatgctttttaactattaattctaactctaactaagtctttntattaattaaattctcttcttaataagtattggtcatatttacccatatgtcattaatgaagtgactgagtcaactcctttccattgactctac

SEQ ID NO: 94520 - DNA, 284 bp, Glycine max
  unsure (1)..(284): unsure at all n locations
ttcaacaggcttcttttgtgtgggatgtgtgctctatcacgcaagattgcatggtcactaacagccatattctcaatcaattccatggcttcttcaggggtcttcaattttattttttcccctgcagaagcatctaaaaggttgttggattgtggccttaacccgtcaatgaaaatattaagctggaatggttctgaacatccatgagtaagcgtctttcttattaacccacgaaatctttccaagcctcactcaaggactcgtctggannatgatgaaaggat

SEQ ID NO: 94521 - DNA, 456 bp, Glycine max
  unsure (1)..(456): unsure at all n locations
cttgagacacctgccgcatgcagctttcagctntatttgatgatgccaaatactcttgtcatgaatcaagattcaagcaagtttcaagaatcaaagagtcattctatctagaatcaagattcaagtgaagattcaagagaagactcaagatatgcaagaacttcaagaaaagcatcaagtataaaaagaattttcaaagataagattgaatagcacaatttgtccaaaagaattttcaaggataatctgtataatgcaagttcatggtgagtcataggtgattcaaaggtgttntgatgataacaatgatgataacaaaagatgatgacagaggtgatgacaaatagctcatagatcaatcaagaacaattcaagagttcaagataagaatcaagaagaattcaagactcaagaagaaagtctagagacaagaatcaagattcacgggtcaagatc

SEQ ID NO: 94522 - DNA, 452 bp, Glycine max
  unsure (1)..(452): unsure at all n locations
tattccttctaactactacacttctctaatataattctgttatgtgtaatggtagtagagctggatgctgatcaaataactaaaataaacaaaaagtttcaaaagctggaagatgtatgtcctgccatggaaaanaaattactaagtgactaaagttcttctaagcagtgaaaaggagctccgtgaaaggcttgtgggttttagtttttctgctttccgaactagcatgtccaatcaagaagcanatcccaaatctggttgttggtatcctgttggactagcacagatggaacaatngatnggtttagatcaggaacatttacgtgaccagttgaaagtcattgcaccagaagttaagcatgagaaaagggacttcttagaatntagatcttggttctttttcctatgtcttactggacaannatattntcatagcttcgtttatgcacaaa

SEQ ID NO: 94523 - DNA, 482 bp, Glycine max
  unsure (1)..(482): unsure at all n locations
gcttacttnttggatgataacccattacaagagctttcatatcgctattgtgaacgaaacaatgagtgcacatactatctatccaaaaacaaaggctaatggagcttttgttggagttgttgatcttgttaaggaaaatattatcttgcgggagatcttcgtggactccatggtagtggcaagagaaaggatgagggactcgaattgagaggtgaagcttctcagcggagagataacactatgatataatacacaataatttatgatgtatatatcacttttcacagaaaattgttatctatacgtggaatatatatacatcgcttattctaaanaaagcaatgtccatatctatntaaatatataacacttgtttgaagaagtggtatttgatnttttaatctaattcagttcattacaatanttttcaattggataaanaaataccattaatttcaagtccatacaattcaagctatcca

SEQ ID NO: 94524 - DNA, 386 bp, Glycine max
  unsure (1)..(386): unsure at all n locations
catgctacaccaggatttatcacctacattctggtttatgttaatgatatcattataacaggcagctccacctctgcagtccaatatgtgatttctaaacttcactctctgtatcctctcaaagacctagacaccttacatttctttctaggcatcgaagccaaatacaccactactggggctcttctcctatctcaatccaaatatatcactgatattttaaccaaagccaatatgcataatgccaaacccataaagactcatcttgcccttggttcanaactgcatatggatggtacaaatgccttttctgacccaactctctacaaatatgtagttggagcccaacaatatgccaccatcattcgtccagatatagcttatgc

SEQ ID NO: 94525 - DNA, 434 bp, Glycine max
  unsure (1)..(434): unsure at all n locations
acacganggtggggtgagcgtcacgacgcccacggcaacctgagcgtggctatgcgagactcagcgttggnggtcatggacaatgccagtgacgacggcgacctganggtgcctttgcaagagtgagcattgngggttagggagaagcaagagggtgggtttgcaacagactgatgagcgcaagaangtttggcttttgaagttgtaaattaagtaaaacgacaacaactgttnttataaaaaaccgatgtaacatatgatcgttaaccatcggtttttgaaaaatcaatgttaacatagaattcttatacatcggtttgacataatcgatgttacctacgtaatgtaacatcgatttcacaaactgatgtacctantcatgtaacantcagtttaaaaactgatgttacatcntgatgtatatactggtctta

SEQ ID NO: 94526 - DNA, 370 bp, Glycine max
  unsure (1)..(370): unsure at all n locations
agagtggatgaagagccttaattgttatttaatagtaaagaatgtaatgattgaccagtaatctacaagtaataatagattacgtgtaaaatgcgtcggaaactcaataaagcagataagttttttagttctccaataaagcagatnttgtcatgaagctatttagtaagaattacccaacaagagcaaaaagttaggacatactctgaataaaggacaaaagttgcatgtattttcataagcaaaatcggtcttgttctctagtaataattgaagttttacttcaataatttgtataataaaagataacattaattagaaatatagagcttcaatataaaagaaaaagaaagactcatgctaatgaccg

SEQ ID NO: 94527 - DNA, 297 bp, Glycine max
  unsure (1)..(297): unsure at all n locations
gtctatacatgattccttngatgagtctaatgccattctttcaggaaggattctttagatgatatttcagattccttagaagatacacatattcatgtgaatgactcttaagaaatagatgaaggaagcaatgaggattctcaagataatggagctagaggaaataatgaactttcaagagaatggatagcctcaagagatcatcccctcgacaacattattggtgatatatcaaaaggggtaacaactagacattatctttaagaattatgcaataatatggcttttgtatctatg

SEQ ID NO: 94528 - DNA, 201 bp, Glycine max
aacttatgcatgacaataatgggacaatcttcgctggagatttatgggatgaatctcacatagctgtcgacaagttacagtgccagaagaatgacttgatacaagtcctgtcaccaatcgagggtctatcttctattgtgcatataaacatggctcgccatcttggatgctgaattgatctggcacactctagtagttatg

SEQ ID NO: 94529 - DNA, 332 bp, Glycine max
cgaagaccaccacgaagcgatgatcatgtttaaagacatgccggctgagccaaactggtaccaacggaagtggaggagggcaaggcacaatgggaacaatgaggagctcaaatgagagaataataacaacaacaacggagttcatagatacagaaccattgccttatcatggcctttggatgggaatggaagaataattcatgagaagatggtgaacaacaacaaggtgatgaaactctctggtcctccttgatggaaaatgaatggtggaacaatgagagagtgaatgtgtatgcacatgcacatagaagcccattgatgggtgctactac

SEQ ID NO: 94530 - DNA, 244 bp, Glycine max
ttttattaaaccccctgccttttgggatcattcctactataactacaattgtacagctgtttttctagtacaactccgattcatatctcttttgctcgacgttcgactacgattccataccttcttattcgctgacgaatccaatgctacgtgtgcataccaatgtcacaggtctctacacgtgcccgcaaatagatacatccccttcgtttttgataaggagagaaccctattttgacgacca

SEQ ID NO: 94531 - DNA, 359 bp, Glycine max
  unsure (1)..(359): unsure at all n locations
acctagaacttaaaccttcgagtctcactctattcttcaccaaatcacgtcccgtaaagcccaatcttnctctntntcactcctctttcacttccaccgatcaaaatccagaaaaacttcatctaatggcagagccatcaaagaagagaaagggatcatcttccaccgccaccgctgctggccatcgccgtcacggcccatccggagcacccacagcacctattactccttctttgtcatctccaagatcatcaacactggtttcatccgatgatcaacgtctacggtacctttctcagttntcttctagaataatcttagaccctaagtacctagacgtagaagtctttaatgatgaa

SEQ ID NO: 94532 - DNA, 325 bp, Glycine max
acacttgtcagttcaccttctacactatcttgacaactgttatcagagattagacactcttacacttagatatatgaatttggattaccttcaagaattatcactctttatgaacttctgcctgttgactgattataagagtggcgatagaattagccggacacatgatcatttggagcttctgcctcaaaactatcataacctcgtcggagatgctaaaaatggctatattagaggggggtgaattggtcacctttcaaaaatgctgtgactccaagttactctcttgtgcggactgaatctggaattttcattactgacatct

SEQ ID NO: 94533 - DNA, 405 bp, Glycine max
  unsure (1)..(405): unsure at all n locations
caacacatatgtgcatacatagtttacttcttatcactgcntataaaccgctggacgacaatctttgtgaacttataattattcataaaatcatctccattgcaaaaatatntcacagattatctaccatactattcaaccccccttctagtatgagttattgtattttagatggcatcaaagcctctangattgagtattctataagatatagaggaagaatctgataacgaaagaaattgaagaaaggtacttcaccgacaagcctttcctatttaaaggagcacaatatgattactagaaggaatgtgtgatcactcactttgagtctattcatatcaacccttcgcgatgtggtagaaaacggaaactacattccactcgatgaaaaactcactgaaattc

SEQ ID NO: 94534 - DNA, 260 bp, Glycine max
  unsure (1)..(260): unsure at all n locations
tctatcactaacatccacaccaagaaattgcaagaggataatngacacaacacttcaacttaattcatattaatcgagtaatttaataatacaagagaattatcacacatttactctcagttattgaaggtctaaggcaatatacaacgttctgaaatgtgtgtaagcccaaacttcctaagacgtggcactgtatgatgctaaggaaaatacatacagtgagtgaaacctgattgataacaacctttatgacacaagat

SEQ ID NO: 94535 - DNA, 392 bp, Glycine max
cgccgctgcagctgtaactatgtagagatgattgtgtagtttcagattgttgaatgactaataacatgcaaacgaaccttgctttatagactcttctgtctggtcaaaagaccattattacaggtatacttgtagaaaatctatgaccgatttgaaaagctataacctttgaagagtacacctttgattattcaaaacgtactggaatcgattcctataatgttatctatccctagcttttatgaaggagtgctttccatagatttacattcaagctcggtatcgatccaaacttgaatgaaacactttgagataatggcatgtaatcatttgtctttcaaacattctttggattgtacacatctgttcgttcttaagaatccttgggactt

SEQ ID NO: 94536 - DNA, 327 bp, Glycine max
  unsure (1)..(327): unsure at all n locations
cttcacaagtactaggagagaagaatnatttaagattagatcttccaagtcaacttctattntactactntagaacatgctcttaaaatctcttattctattaaatgactaattcttgntntgatgtttgctgcttagagtacgcgttgcttttgaataataaaatcgttttatgaaagaaatctgattaataattagagttataatttcacaacaacatttttaaaaacaaactttatggattagaaatgaagataacaagagcaatatagatgaaacaacatactaatgattatattggtcaccctacttggctacaccactact

SEQ ID NO: 94537 - DNA, 293 bp, Glycine max
cttaatttcaaagacttttccttgtaacatggctagaatctaaaagggggggtgataaaattcaactcttccaaaaaacattcctttatcggtataatccttatatgactctaaattgttaaaaacatcgatataattaacatatcacaagaataaggagagaagtcaactctattatctggtggccaccttggctctcagcccagcaccgctggagtcacttcttgaatcctttacagtctaaccacaagacatccttcttggttaaattcttcacaaagaccacgctttat

SEQ ID NO: 94538 - DNA, 451 bp, Glycine max
  unsure (1)..(451): unsure at all n locations
taccaccaagatgagccctggatagaagcttgttatgatgcttcaatggaggaaaagatagagggagagaaagagagagaggggagcacgatattgaacgaataaaagaggcagagaagtggaactttgaagtatgtctcacaagactctcattcatcaaagttacaacaagtgttacacatgcttctatttataaactaggtagcttccttgagaagctctcttgagaaaacttccttganaagcttctttgagaaaacttccttgagaagctagagcttagctacacacacccctctcataactaagctcacctgcttgagaagcttccttaagatgaattcctaagaagctagagcttagctacacatacctctctaatagctaagctcacctncttaagatgagaagctagagcttagctacacacctnctattataactaagctca

SEQ ID NO: 94539 - DNA, 344 bp, Glycine max
  unsure (1)..(344): unsure at all n locations
tcataagacgctgtggactaacacggttgtgagtccctccactctcccaccagcagtaactnttggctcaccatttgtattctgcggaggccaacatataatcaatgagctaggcctggatgagagccaaatccactgtgtgatgatgcatagagatattgttcccagagccttctactgcaactacccaaaccatgancttgagggcctagcgcttaacagctcatttcggcacatccatgtctgctgaacatgtctcatcactttctattgtgctagttttacagaaactaatatatttctaatgataaacatattttgcggcacgtattattatgattata

SEQ ID NO: 94540 - DNA, 418 bp, Glycine max
  unsure (1)..(418): unsure at all n locations
cccgtaaaaatacctcatattttacattcatgctngccgcaagcaaagcgtgaacatacaatttcgtgaccgtagtggtaaaactatgtatataccaaaaaatttctgaacaaaattaagtgttgggtcgtttcccaacacggaaaanatgatgtgccaaaaattatgataacacaagaatgagcattgtaatttcatttagtgtgaattccatgtaatgtgagtaacanaaagcgttaatccagtaacataacttctttccataaaacattagtggcggtttgaacattagacaaattaattccatccacctaattntggtaccaattcgtgtcattgtcgttggtaatatcatttcccaacaagaacattcatttcagcagaaaatgcctaccgtatgtctaaaaatattatatat

SEQ ID NO: 94541 - DNA, 434 bp, Glycine max
tcttccacaaacacagtgcttcttcgattacgatgctcttcaattgatacaaatatcttgagttgtcagttgctttatgtttctgataaccctacactctcgagaaattcagagtttcacacttcataagcaattgtcacttataaacgaagaacaacaaaccttggcatattgtttagttgagttcaatgcatcattattcaacctggagtaatcaaatacagctcacaagattgcgaactgtgaaatcaattggcaaccttgtaacgttccactaggacaagctctaagtgttacataagtgacgaatgacaagtcaatacttcactacacagctcttcaataatagttctacagagtgctgtcattataatgacaccattagtctttgtgtttcctagactagacaacgtcctactgttacttctacttta

SEQ ID NO: 94542 - DNA, 345 bp, Glycine max
  unsure (1)..(345): unsure at all n locations
cgagctcgtcgntgacacaagcagcaagctgccaagcttctcttgagctcattgtgttcgagggtgggacttgcggcttncaacaaaaccagtctaccaccgcaccgcgctgccatgtcgcatgtgttctggtctcgcgtcgnttggtctcgcatcgtctgaacagcttcaactcgccgtgaatgaagaacagggacaaacaccaaatgaaagaagcataattccttaagcatagtggagcagtgggcacacaatgatgtcgtatagtggaaaaaaaatttccaactgaactcgtgtgattcgggctagactcgcgagttacacgtgttaccgcgagccaccgag

SEQ ID NO: 94543 - DNA, 294 bp, Glycine max
  unsure (1)..(294): unsure at all n locations
atcttacctatctatcttccaaatgtctntgcatagattcaatggataanaaacatgaagttctaattcaagatggtnntctttgtgcatgggcataatgcaatcactctatgtctagcaatgattntattaagatgtccctacctttgagttctactaanaattatcctctctcgagcgactaatccctaagactgatgcatataaaaccttcaatgtatttctactaaggattaccctctttcagcgccaaacccctaaagatgatgcaaggatgaagcatataatacattt

SEQ ID NO: 94544 - DNA, 362 bp, Glycine max
  unsure (1)..(362): unsure at all n locations
tcattagtcttgatgcgctataacaagcagcaacaaataattntgtcgaataaatatcttctgcaggctcttacaggctctattatagagggtgctgaaaatatacaaaacaactacaagagaacaaaattcaacttcatcacaggtagatntaatttactgatttatatgtggtagtatttcctatgttttataaacatggctnttataaacaactgtagttntatcattaatggactctatatatatttacttgtgcaattatcaccacattattttctagactcaaacttaaccactactgagttgagcaaaaacattaagcatgcatatatatagagaaagagagagacagactcagc

SEQ ID NO: 94545 - DNA, 383 bp, Glycine max
  unsure (1)..(383): unsure at all n locations
gctaacgcacatgatatatatgctctagcttgactgtaaatgttgaactactgtacataactcgngaagataaattgatgattagaatttgcttgaatatttcctacatagaataattctaattccataaacttatttactgtacaattatcattgaaatacaacacatgttattcggtccaatcaatggagagagtgttggtttttctaggtcatagtcatagctgacccatgcattagctgccttaaccaacatatactaaagggctaaattgatttgggtcatcttggtcttttatttagaggacggtcaatgctatgtgggttgaaaacacggctatggttgtgtatccctttggcaaaacccacatctactactctac

SEQ ID NO: 94546 - DNA, 388 bp, Glycine max
  unsure (1)..(388): unsure at all n locations
atgcccgagccattcatccctatgagatgttgntgaagtataggcgatcataatttccattccttggattacggggttgaaccaagctcaagctnttacaaaaaggttcatcaagtcaagttgaaatatggaagtaaccatcctgcaaaatttgggcacaagatgaatcgagtcacatcactgcttcgtctactgccaaacatatttaagattatggatgtccttgttacttccagtttcaccttgacaaagatgtcatggaccatgttgaaaatctaaattgattcaacctcatatcctgcgtaaaaaatcgcaatacttcgactggacatcattcgcatgcatncatgcttttcattggttgcattgctcattgcattctttcctt

SEQ ID NO: 94547 - DNA, 242 bp, Glycine max
  unsure (1)..(242): unsure at all n locations
tcaacacatgatttaactaagcatcctatggcacatggctagagtatacatattgaaacccaagctgcatttcctgcatgatcaagtgagtaaggagaagcttgaactggagttttgtaagctaaagatcaagtcgcagacatattaacttagcccttgaagtctatcaagttcaatgaatcgagagacaagttangagtgacatctctgacaaatctgaattaatgagggatgctgatgta

SEQ ID NO: 94548 - DNA, 418 bp, Glycine max
  unsure (1)..(418): unsure at all n locations
atttatggaccaatcataagatatttgtgtaagttcttctaaacactctcataaatatctttaacataaagtaactgtgaataacttattgatgtgtttccaaactgtcctaataagaatgaaattttatagtggaatgatagaaaatgttaaaatcaaattgtcattaactaagacgcgtggcttgagacttgagagtntatgcnaacagactattagattatcaagaaaaaggaaacaaacttatgacatagaaaggtgaaacatgtcaaaataaaaaataaaaaggtgcaacacataaggaaatgaataataatgacaagacactctcacanatgttctccatatggttatgcaacaattacaaatcattntntntatatttcaaaacgaattgatcttacatacatactgtata

SEQ ID NO: 94549 - DNA, 460 bp, Glycine max
  unsure (1)..(460): unsure at all n locations
aagctgcataaataccaaaaccaatgcaagaagcacgagaaatntgtcagggatcatcgaaaaccaaatatctatggaacatggtgaaatacaaacaaaaaccaatctaactgaaatcacctcaaccactgagtntttttctgacttattcttcacattgacatctctaactaaattggcactggatgggaggcaaataacacgctcagcatgtctcaactcaatagggagcggattaactggaaaactcatcttanatatttttgatatgttaattgcttcttcttttgacagatttccatggcatagaccctccacgtatatctgtacaaagttaagatataaaagaataaatctccaacaatgtcacaccaatatattaaagaacaaactaaactaatcataaaagggggtgcagtaacctatgttgacttatcatatcataacaaactcatgttac

SEQ ID NO: 94550 - DNA, 381 bp, Glycine max
gctaaacagagcaatgcagaatactctgtccaacacctaccaacaatcacagcttttctcactcaaagaccccaggaacaactccttcgaccaactcgttatcgtggatcgactcaaattcactggaagacgtagtcatagctcacttttgaccgtggatctacagcaacattcaaactaatctgactgtctttcacaacagcaaagcctagatatctgacttggcaaaatctgtgacaattacagcaaatcagactaagcgatttgaaccaacttcctatcatctgccaataatctaagtccaaatgttatatgctaacagcacttcacacaacaaaaatagtgcaaacccatcagggtttagtgaaggaataaaggaat

SEQ ID NO: 94551 - DNA, 401 bp, Glycine max
  unsure (1)..(401): unsure at all n locations
tctntcttctttctcatcgcactctctcttggaagaagctctaccacctcgaatgtaccagaggacataatcaaccaaacatgccaaaaatgtgccaaccaatccatcatcttgagctacaacctatgctccacttctcttccggcggttccggtgagtcactccgcanatctcgaagggttggcgttgggtgcaatggagctagcactagagaatgtcactagcactttggcaatcatagagaagctattagatagcacaagtttggataattcttgcttggggtgcttagcagattgcttggaactgtactctgatgcagcatggacaatactgaattccgtaggtggtttcttgtctgggaattatgatgtaactaggatttggatgagttcagttat

SEQ ID NO: 94552 - DNA, 260 bp, Glycine max
cgtaatctcacttaatcaatgttaagatgaacttcaaccgactatgttgcattgtaatctcatgcaatcgcctttaaaataaaaatcagccgagcatttatgctgttacctgctggtattcatcataagggcaagtctcaaccgaacatttacattgtaagttctctttaaatgaggtgagagatacctagcgacactaacgctcaaatcaacttacatagcaagattgtgcctgcatataggtcatttgacaccatttc

SEQ ID NO: 94553 - DNA, 497 bp, Glycine max
  unsure (1)..(497): unsure at all n locations
gcttaagtatgtatggcanaatntcattactgttgttcaatacatacaagtgatcttgtaacanatcttctccacttgaagtgatcacatgcagtcctctagaacccttaccacccactctgtcatcatgccgagactcaggaaggccaacaggtttttccttctgaatgtattctgaacaaaattcaatggcttcttctacaatgtagctctcaacaatagatgcttctggacgatatagattctttgtatcccctnttaagatcttcatgtatcgctcaaccgggtacatccaccgtagataaacaggaccataaaanttgatttctctgaccagatgcataatcaagtgaatcatgatgtctaagaaagcaagggaaaatacatctccaactggcacagtataattgtggcctcattttcagctcataaacttgcaggataatgactttgtacatatacatggaaaaaaacacangcagtcatggtaactgact

SEQ ID NO: 94554 - DNA, 297 bp, Glycine max
  unsure (1)..(297): unsure at all n locations
ggagatcctgaaaaccactcatgaacgaaccctcaaagtgaagatgtccagattgcgactattggccacaaaattcgaaaatctgtagatgaaggaggaagaatgtattcatgactttcacatgaacattcttgaaattgccaatgctngcactgccttgggagagaagatgacagatgacaagctggtgagaaagatcctcagatccttgcctaagagaattgacatgaaagtcactgcaatagaggaggcccaagacattcgcaacatgagagtagatgaactcatttggttcct

SEQ ID NO: 94555 - DNA, 276 bp, Glycine max
  unsure (1)..(276): unsure at all n locations
atctcttttatcttagtgagagtgattctcctaaattcttgagtgattcaagaacaccctggctgtatcaaaggactttcacaacctttgtgtggtgcccttgcaggaaagagngagttgttccttcctttcatcttcacccttgttatttgaaaccacaattccagaaaatccacctctgcacagaantatctcgtggccataactcctgtttacgcactcaaattaagtgattcttgagcctaaattgaattcaaaacaagacctntcacctcg

SEQ ID NO: 94556 - DNA, 382 bp, Glycine max
  unsure (1)..(382): unsure at all n locations
ggggggagcaccacattgaaggaataagagagggggagaagtagaactttgaagtgtgtctcataagactntcattcatcatagatacaacaagtggtacacatgcttctatttatagactaggtagcttccttgagaagctttcttgagaaaacttccttgagaagcttctctgagaaaacttccttgagaagctagagcttagctacacacacccctctcataactaagctcacctccttgagaagcttccttaagaagattcctaaagaagctagagctgagctacacacacatctctaatagctaagctcacctgcttgagatgagaagctagagcttatctacacaccccctataatagctaagctcacccccatga

SEQ ID NO: 94557 - DNA, 344 bp, Glycine max
  unsure (1)..(344): unsure at all n locations
tttcccactcacttctttttgtttctcagccacttgactaatcagattggtaacagtttcgattatataagtgctgagagtatatttatatcttgatactatggaatcattcttatgatggagtagaatcgatataatatatatatatatatatatattatatatagccctagtctaaacacattagacaataatatccattccatctagagtgagtgtgctatagactaaaagtattcctcgcaattgaaactatgagtgctgctgtcaaantcatttgctatatcatggaaagagctaagaccggagattattaacctaattaaagtaaatatacttttatc

SEQ ID NO: 94558 - DNA, 426 bp, Glycine max
  unsure (1)..(426): unsure at all n locations
atgcaattgaaagactactaagatattcgagaggtaccatggattatgatattgaatatgatggaattcctttgtctagaagggtatacaatgtaattggatctgtgtttggatgagacaacatcactagtggttatatatttacacttggtggtggtatgattgcctgaagcttanctcatataactattataactagattaaaaatggagtaatagttcgttgctctagatatgtgttgcagagagagactaagtggttgaaacattcttggttaacatccttgggatgaaacaacactatactgttatgcattggattctaatcgcatagcttggtagaacaacttcatgaaaatgacattcatgaacatgagggaaacatgtaagataacatttatttatggagttagaactgaatcttgca

SEQ ID NO: 94559 - DNA, 217 bp, Glycine max
gatacgaaggaagaccaacaataaagttaagagagagatcctcccaaggttacaccgaaatcggaaggggagacaagatgccatgggcacgaccgtgatctgtcttatttgctgacaagtggcacagctcgtgacgaattgatggatgcctcgtttcatagagggccatacagaattctctctaatacgggctaacgtctttattacttccatatgt

SEQ ID NO: 94560 - DNA, 315 bp, Glycine max
cacatgtggtactatgtggcggtcgggcgatggtgcacaacacagttttccacatccacaatgcgcgcataaactcaccatacgctgtagcccacctccaactgagctcacgtactcccacgtagcccatatactcggtggtctcaacaccgggtccccatcaatccttccaagctgtcccaacatcatagtaatacaacattcaaacagcacaaactatctcagccaagaaaacagagcataggcagaaaactcttgtcaaacaccaaccaatatcacagcgtttctcacttaaagaccccagtaacaattcct

SEQ ID NO: 94561 - DNA, 454 bp, Glycine max
  unsure (1)..(454): unsure at all n locations
gccaagcctgtctattaattaatatactnttaaaaaagcccgagtctaactctgtaattaaataagtcagttcagaccagactntatgtaggccaagtcgtaggtccttgtaagccgacctggcctattctcaccctatctatgaatagtgatgtatatcataaatataaataattgttaacttgtatcatttggataaatattttttttattattggtggtaaaaagactactaatctcctcatttggtntatctatgtttttaaaattaaatctatcattgaatggctcaagatataatagtttaattatacttgaatcttattgtagttgaatcctggatgaataaataataattacaataatatatattttaagtaaaatatgtaaaataatataatacttataattctcataatatttataagtaaatntcacttaanaatatcaaaat

SEQ ID NO: 94562 - DNA, 385 bp, Glycine max
  unsure (1)..(385): unsure at all n locations
ttaatgagctnttccaacatagaattggaaaatcagtcaaaattaagaaaccttaagaaattggttcacgacgactcattataaatgctttggtataacatcattatgattnttaaaacttaaaaatcaaccaaaggaacttttattattatattttaaaaagtaattatggtatggctaattaacaataacaagctcacatttagacatanatattatgatatatttgattggaactattatatgtattttgaatgttaagacttaacctataaaaatattctcttaatgtataaagtataatactataggttaatatatttattaatatattaatatcatggcattattatgcagctcactattctacatcatatctcattat

SEQ ID NO: 94563 - DNA, 367 bp, Glycine max
  unsure (1)..(367): unsure at all n locations
cgaccacgatcaacacaaccgtagaaattactacctaatactataatttaaagtgctttcttgtaggcatcaacatatntatattggtgcttcctattatacagaagcaaacttgcataacttcgatgctagattccaatatacataccccagaaaccctatataaatcaatccccacaaagcaagctataaacatcattgaggcattgtctgccacattcataatcagaatgttgccaaagtcacaaacagtacctgagacaaagtctccaaaggttacaaaaatatacagatacagtcgggaaagggtgcagagatacaaacgaaaaagaagagagtgcgagcaaaatanggctcgcgttctaat

SEQ ID NO: 94564 - DNA, 269 bp, Glycine max
  unsure (1)..(269): unsure at all n locations
agaatcttccaatcatgttcgctattcagcattgaatactgaacgcaggggaagtactacccaaaatgatgcaatcctaccccgcaagggcattggctagaagactccaagtagattgggctagagatccaaggaaaggccctatggttctcatgagccttagggtagatttctagcccatgggctangtttgagacagcttatttttgtatatatagaatangttattccttcgtctacgccttgtattctggctattctagtagtat

SEQ ID NO: 94565 - DNA, 417 bp, Glycine max
  unsure (1)..(417): unsure at all n locations
ctgcnaggctgctctggaggtgggtgcatcattgtcttctacaactcaagggttgctactctgatcaaagaatgtgataagctcattgcacgtaaactttattctttctagtggtaaaattctttttatttgatgaaacttatttgtcttttggatttacttttcatgttttagaatgttttatatgaccaatgattgtatcttgactgttggaaggggaaaatgtggattatgccaattttggcttgaactgaatgagcttgcggcatatgtgttgacagaaaatttatcccccctatattaggaaaagcccacagaaatgtctccaaagatgtacacaaatgactttaaaaccacagtacaggctacctaaatagcaacctgtttacttacgtggcttcatgtagaaatatatta

SEQ ID NO: 94566 - DNA, 194 bp, Glycine max
  unsure (1)..(194): unsure at all n locations
gacgtgtgtcatgattgacaacaccttgtaaatataaccgggcagactctcacttgtttgatnttgttcgngtgacacccactgggatgacattctctaccggttttgcatatgtggagggtgaacacgttaataatttgggttgtgctatacaacgcttctgaagcctctttttaaagcgtgatgcccttcct

SEQ ID NO: 94567 - DNA, 355 bp, Glycine max
  unsure (1)..(355): unsure at all n locations
atttctagccgtgtatntggctatattattatgacatttgaacaatttagtatttcttttatttgcatagtatgattgaacaattatgaattatgttatatgactatgtggnttttatatatttgatctattcatgtttcttgcttcatgattggtttagaatttctcaatgaatgtctcgtgaatgattagtaatgtatgtatgttctatatttgctgcgcactttggcttttgntgatgccaagcgggagaaaattgaatcnatcaagaactcacataagtattaacttaatttctagtagcataaactcaaaacanagggggagaatatggagaataaagtgagtgatcgac

SEQ ID NO: 94568 - DNA, 324 bp, Glycine max
taacatatgcttaactgaaagagagtataatagtacatatttattgaaataacacactcgacaaatagtacatagaatttattaatgataaaataagtattttatttaaatataaaaattcaaaaaaatgcatttgactactttatcaaaataagaaatcttgaaaataaagaaattcaatttctttatccagatacaaaattctgataataatgaaatttatattgctatccaaacatagaatttgaaaatgaaagaattcacatgaagcatctgacattttaaattctaaattagaatttaaattgctcatccacaaactct

SEQ ID NO: 94569 - DNA, 362 bp, Glycine max
  unsure (1)..(362): unsure at all n locations
tcacagcagaacaattatgacctcttcagcaacagatacaaccctggatggaggaatcaccctaacctcagatggttcagccctcatgaacaacaacaacagactgctccttccttccaaaatgctgctgtgccaagcagaccatacattccttcaccaatccaacaacaacaacaaccccagaaacaaccaacagttgatgcccctccacaaccttccctcgaagaacttgtgaggcagatgactatgcagaacatgcagtttcagcaagagaccagagcctccattcagagcttaaccaatcagatgggacaatnggctacccaattgaatcaacaacagtccccagaatctgacaagct

SEQ ID NO: 94570 - DNA, 182 bp, Glycine max
aaagaaggaaggaattttatgacaggaggggggataagaaaaacggagggaagagtaagggaaaaagagaggaaagaaaggagaagagagaaactgtaggataagggagaagcgagaagagggggaaagggaggaagaagagaggcggtaaagaaagaaaagatgaaaagaaagaaaacaga

SEQ ID NO: 94571 - DNA, 369 bp, Glycine max
  unsure (1)..(369): unsure at all n locations
aggaatcttctggagggcccaagtgggcctggttgctatatgcacccccatttntactaaatacacccactgcctttnttttggtgatgtctttttcgtaaagatacggaaacttacgaatttcgtaaggatacttgttttctttccgtaatggtacgaaaccttgcggattacataatcantcctctttttgacttacggaatgttacgaaacctcactatntgtgcaacgatgcttncttttgatttccggtgtgtcacggaaccttacggattgtgcatcaatattttcttttgatatccggcacgtcacgaaatatcacatattggctaatgatgggtgccaagcacctnacaatgaccaaacac

SEQ ID NO: 94572 - DNA, 356 bp, Glycine max
  unsure (1)..(356): unsure at all n locations
catctatacctacttatgttatgcaagaatatnggatgcctactgatatntgtgaaatggataaaatggtgaggggatnntattgggtaatatctacttcgcattgaatatagtgtcattaaaaacaaaagaggaattaggtatccattctaacgtgtcattaaaaacaaaagaggaatatgtattcattcagcccaatgcggtctttttcaattttaaggatgattctaaataatgtagtagtnatcctccaacacaatgttgnaataatatattggatcttttaaaatgttagatctaatgaactctaattaatataaatgaaatgaacacataataaatgtgggacaaaatgt

SEQ ID NO: 94573 - DNA, 422 bp, Glycine max
  unsure (1)..(422): unsure at all n locations
catatagggctacagatgtcttggaattaatacatacagacatgtgtgggccatttcatacatcttcatggaatggtcaacaatattgtatatcattcatagacgattactctagatatgcatacttgtttcttatacatganaattcacaatctcttgatgtgttcaaaaaaattaaagttgaagttgaaaatcaactcaacaaaagaataaattgtgtcagatctgaccatggtggtaaatactatcgcagatatgacggttcaagtganaaatgtttggggccttttgccaagtgcctagaggaaacataactcttaagacgaaacataactcttaaggatatagtangaaacatgangtgtcattctaacttaccaaattcacttttgggagaggaactagagaatacaacttacatt

SEQ ID NO: 94574 - DNA, 249 bp, Glycine max
  unsure (1)..(249): unsure at all n locations
tcttctgcctcaatcctcctcatcatcttataaggtgaattgatatcctcntttgattggcgctcctgcttgagaagttgttcaagcttgtctcttccaagtgaatgacctgtaagcaccattggtacacttatagcacctgaaagaataacagcagtatctccagcatcagcgtaatgtccatgaattacatatggccagacaggtcggcctccaccaactctgtcacccaatacttttgacatattg

SEQ ID NO: 94575 - DNA, 224 bp, Glycine max
  unsure (1)..(224): unsure at all n locations
gtgtagacaatgcacaaacccaatttactgtatcctaaaatttactttaattatgaagaacggtggtgacaaggattgaattcttgaccacttggtcgtaaaatccttggtaagagccaactcttctaaagtttaagctcttangtagaggtttattcatttgtagcactaaatgatgtntataagtcttaattatggtgcatatncgatgtggtaactacata

SEQ ID NO: 94576 - DNA, 376 bp, Glycine max
  unsure (1)..(376): unsure at all n locations
gcttcaccggatgacgccgatcgaacattttctatctgacgtcatgcatatttcgtcacggattgaattgaaaactcgttacgcgacatctgtcgtgaagtancgaccagatattttcatccgacattgcacaattctttttataaaagctcgctggtcgataataggctttatacggcagaagaagatttcttgcttcggtgtggcataacaaagttacaatgtacttctgctatgttgttcgtgcgagttccactcgacatttggttcggcctggaaaacattatctcacctctgcaaaaaaatatttgctaaccgtcttcatgcatatttcattcaacgatgtgatatgagaactctatatccgacaacggtc

SEQ ID NO: 94577 - DNA, 277 bp, Glycine max
  unsure (1)..(277): unsure at all n locations
aatgttgaagaaccgttgagaatcttctcgtaattactcacggaagacgtacagaagcacctctgcttgaattgtcttcatgaaaataatatttctcagcaatttctagagaatgagatatgccaagaaggctgaacccttttcttcttcactcctccccctatttatagcataataagggaggagttngtcccccagctcgcccagtcgagctcagatcgtccaggcgagcgatgttgctttctccacaagcaacaagcttctggaggaaggatct

SEQ ID NO: 94578 - DNA, 369 bp, Glycine max
  unsure (1)..(369): unsure at all n locations
tatgcangttgaaagccttggaggaaagaggtatgcctatgttggtgtggatgatttctccagacttacctgtgtcaactttatcagagagaaatcagacacctctgcaactgtcaagcacttccacatctttggaagtccatgttacatnttggcagatagagagcaaaggagaaagatggatcccaagagtgatgcaggaatattcctgggatactctacaaacagcagagcatatagagtattcaattccagaaccagaacagtgatggaatccatcaatatggttggtgatgatctgtctccagccagaaagaacgatgtcgaagaagatgtcagaacatcgtgagacaatgtagcagatgccgc

SEQ ID NO: 94579 - DNA, 318 bp, Glycine max
  unsure (1)..(318): unsure at all n locations
tgacttatcatcannatntcctaaggtatcttttccattattcaatacggcacatttacaaccaaagatataaagatgtgagatgtttgggtctctgccatcgaacaatacatatggagttttctctaaaatgggtcttattaagccctattaanatgtgcatgcagtgtaacggcttcacccaaaagtttttggaagaggagttcattaataaagtctagcatctcttccaagactatttttcttcaacacaccattttgtgaggggtcttaccgcgaaagtatgctcatccatgctatacaaatattcaattctta

SEQ ID NO: 94580 - DNA, 442 bp, Glycine max
  unsure (1)..(442): unsure at all n locations
tttctaggtttgaaaggtggaagttataatgaggtataattggagcaaattctcacctcacacaagtctataacatcaatctaaacttgctcaaactggatttacacctaaatttccaccgaatcaaaatgtgactcctcaacnacccaatttgccctaaaaatggctcttggttcactttggtcatatgtttttctctctaactcagcctaacctntctcacatgtcctaaatgacatttcaagctagtattaactcactttaaccttcatttaccacagaattcagacttagcctgtcaactctcaaagtctcactctgtntccactcataacatcacattctcactttctaaccctaaggtagntctaccccttgtctctaacagaattctatcnagcatttagcatataacatcacaacatatcacaaaaccctaaac

SEQ ID NO: 94581 - DNA, 314 bp, Glycine max
  unsure (1)..(314): unsure at all n locations
tagcctcacatctcaagctaagcgcatattgtatatatatttgtgttgtataaagcactaagtgcaacctgttgcgctaagccccagatgctcactagactntacaacttcaagttgggcttagcgcgaggctaagctaagcacttgggttctaaactcaaatgtcatgtgggcacgctaagcgtaactgtgcgcatactgggccatacgaattttaatttttaaaaatcaaaggcaaaggcactctgggtgctacctttgcacctaaacctctacaccttcctaagcttgagcaattgtgtactttatgctac

SEQ ID NO: 94582 - DNA, 300 bp, Glycine max
ctcatgcactcctctaatgactatggcatcatttctggcgctcaactgctgggagttggaggccatcttctcaattaaatttctggcttcagcaggagtcatgtctccaagggctccaccactggcagcatctatcatacttctctccatattactgagtccttcataataaatatggagaagaagctgttctgaaatctgatggtgagggcaactggcacatagtttcttaaatcgctcccagtactcatacaggctctctccactgaggtgtctaatacctgagatatctctcctgat

SEQ ID NO: 94583 - DNA, 331 bp, Glycine max
ccctcacacattttgtaccgcgcgcgtggtacttgtgattatcgcaaacctttgttcgtgggagtagaatgaccgttgtagaggacgagacgtgagattcttttgtggagccactgatccgtcgcgatgacgttgggattatcttgggagagatatcgtgtttgttaatcaattccaccatagttggttccataattctttgttgagttaaagatgtaaatcacacatttaattatatgtatgaacaaattactctccattatgtgaataatgtgtacgtgagtgccatatatatatatatatatatatatatatcttcattcacttatga

SEQ ID NO: 94584 - DNA, 162 bp, Glycine max
agcttgtacgcatgctcatattgtacaacatgtacatggtgctctagatgcacactctgcctaactaatgtatgagatgtcctatctaatcaggcgcaaagggctgagattcacctggattgactctagtcttgcactatatgcagtacttcatgtgtatct

SEQ ID NO: 94585 - DNA, 365 bp, Glycine max
atcatgtgtacgcattggtgaaaaagctcgattcacactctctgatgcttatgatgctacgatccttgttgaattagattgggaggatggactcttgataaatctccatgtttggttatgatggaaccctttactactgagttagggagaactggacataactcacgttgagtggatcaatatatatgaagcatttctagttctctcctcattgatattgagcatcttataacacatgcataccttgataaccaagtgttattggagaccgttctgaactcttttttatctaaactaacaacttattgatctcttgacatacgtgagcttagggcaacttgccacccacacattttgttctttcc

SEQ ID NO: 94586 - DNA, 282 bp, Glycine max
gatattgcactaccagacttgattaactgtcttaagccttattgataaataagttgggttgcatgccaacatgacagaaattcttccaaatactctatctcagaagaagaaccccaaatgagagaattggtttatgagtgcttactgaattacttctacaataaccgagaactttcatcatggtaatggagctacggtatatagaaaactctatatgggcaggaatcccatctggtttcatggtcaccccttaatgaagaagcttgaatatttagtattcat

SEQ ID NO: 94587 - DNA, 234 bp, Glycine max
tcttattttgctctttcttttgccccgccttcttccggggctttttatgtcgctgagggctttacctaacatattccacattcttggtttatagctatttgcgcttgcttgctaacccatccgggtatacgttccacatactgggcctattccgccatcgacaaaagtgccaaaggagtcacgagaatgtacccctaaaacggaagggtctaacaatttgcgttccatagatga

SEQ ID NO: 94588 - DNA, 103 bp, Glycine max
gtgctcttagccataacgaatcttgaccaatcccgacccaacccgggcatagtcaggcgatgataacctgtgacgtacctaaacaggcgagctcctggcagtc

SEQ ID NO: 94589 - DNA, 254 bp, Glycine max
cgtggaattcaacgctcaattttttgcttgttcgcttcagtaaagggtgactttgattacaagaactcttggtcattctacgctcgaatggagctctgatcgcatccaggcaaatatgacctttatttacagacttcgtgtcaattcacattcgattttagcgctgatcgacatcgatgaaagtagacattgattttggagttcgtgtcattcactctcagtggagcgcgacgactccaggaagtatacctgat

SEQ ID NO: 94590 - DNA, 325 bp, Glycine max
cactcatttatttaaaaagtaagtcgtatctattcaaggtctgagagaccatacaagtttcctaacgatttctaattatgtgggccattaagtctatcatatgctgacaatagccgagaagcccatgaatctcttcggcggcggagtatgtgtctgccatcgccttggccttggctaacaagcggggaagttcttgactcccgttcaaggtaagagcaaaccgatccatccacatggttgcctcttggtgtaaagagacgatcacccttcctctagcctctatttccgcgtatacttgagcatactcgtccgcgatcctatgctc

SEQ ID NO: 94591 - DNA, 510 bp, Glycine max
agcttccgatccgacctagaaggattgattactttcttcttatgcagtatcagtacaactctgacatggctcccgaccggactcagctgcaaaacatgattaaacgggaaagctagtcctttaaagaatacgcttagcgttggagggaccaggcaaaacaagtagcctctcccatggtcgagagggaaatggttactatgatggtggataccttgcctgtatttactatgagaaatagtggctacatgccttccacttcgcggacttggtcttcccggagaaggatcgaggtgggttgaaaggggaaagttgatatgtctcctgattgtgccacagtggatgacggatactgggcaagaaaagaggaatgctatacgcacttaaacctgctggccaagcaccgcaaccccacggcccacatatccacataccgagttttgctaacgagctttcgatcgactaccacaaggtgcccaccccaggggagttcgatcagtcattactacggca

SEQ ID NO: 94592 - DNA, 453 bp, Glycine max
  unsure (1)..(453): unsure at all n locations
tctgacattcaccacagattctgtcttcttctattntcagaatgggaatgcctctaacagcacctttgtcaatgatattcttcatgcctcttaagtgcagatgtccaaatctttgatgccactatttgacttcatcttctttggaggatggacatgtggaggagtaactggtttcttgaggtgtacataggtggcagntgtcctttgatctgctgcccttcattagaacttcattcttctcattngtcaccaagcattctgactntgtgaagtttacattgaatccttcatcacacaactgactgatngctgatcaagttgcagtcagtcccttcaccagtagtactttgttagactangaagtcatcatggactacttcccattcagtgactttcttagagccattcaatgcacatactagtgagcaggtcatgtcacagaatcttactctg

SEQ ID NO: 94593 - DNA, 313 bp, Glycine max
ttagagcctttcaatattctcatttatccatagagcttcttcttgtggtatgtatcacctcgtggtggagagagaaatagaacaaggcataatataatccttttctggagtgatgtccatcttatctctactagtactaaaatgatgtgcgagagaatatgtagattgtgcctttgtcatgccatatatacaacaacaacaacaacgccttattccactaagtggggccgctacatggatcaacttcgcataatgttctatcaagtccatacttctatccaaccattaattcgagatccttttcgataacctc

SEQ ID NO: 94594 - DNA, 299 bp, Glycine max
  unsure (1)..(299): unsure at all n locations
ctatacgagacatcttgccgtacaaagtcatgttaacgataacttgcctgtgctttntcttccattctatatgtagcaaagtcattgatccaatcatgtttcatgagttggaaaatgaaggccgcaattatactgtgccaggtggagatgtattttccccctgctgtctttgacatcatgattcactngattgtgcatctggtcagataaatcaaatgtcgtgggcctggttatctatggtggatgtacccggttgagcgatacatgaagatcttaaaagggtatacaaagaatctata

SEQ ID NO: 94595 - DNA, 399 bp, Glycine max
  unsure (1)..(399): unsure at all n locations
gcaatatctctaagggctagcgtgtctacaacttggcaactaagaaactcatcatcagtcgagatgttgaagttaatgagtatgcttcttggaattgggatgaagaaaaagtggagaagaacgttcttatacccgctcaactacctcaagcagaagctgaggaagaagacccatgtgaactatcttcacctccaccacaataacaagatcaagaactatcatcaccagagtctactccaagacgagtaagatctttggtggacatatatgacacctgtaacttggccatacttgaacctagaagctttgaagaagcgtctaagcatgaagtatgggtcatggcaatggaagaagagatacacatgatcgagatanacaacacatatggagtagtaaatc

SEQ ID NO: 94596 - DNA, 403 bp, Glycine max
  unsure (1)..(403): unsure at all n locations
ttctgggtggccctcattaagtttctataatcaacacacatatgccactacgtggnttcctaacaataatcaattcatttttctcattctccataatagtagngccctcctttttatggacacattgaataggacttacccaagggctaccaaaaatagggtagataatactgagatccaataacttaattacctttcccttcactacttccatcatgttgggggtgagcctcttttggactagtctgatagttgtgaatccctatctagtggttatctttttggtgcatatggtaggggcaagacctattatgccatgaatggtccacccaaagacatctttattgtctttgagaaccctanaacatttctactttttcatttcatgtagacttacaaaaag

SEQ ID NO: 94597 - DNA, 276 bp, Glycine max
tcaggaactcgggtttgtaaaaaaggccggcattaggctattctatcaaaaattgttagtgctgatgaaatcacaaatactttggcatagctctcaacttcttgttgaaacttaactgctctatctctgacaaaacctaaatttcacaattaacccgataagattaattttctcacacacgtttgccttcgaattccatgtagataagtatgtaccttcatctgttggatctatattgattatttacgactaggtttagctatatcgttccctaag

SEQ ID NO: 94598 - DNA, 472 bp, Glycine max
  unsure (1)..(472): unsure at all n locations
accttgagcaagcagctaacctcctctttaagaccatgctatgtgctcgngataggtctctctcttcccttcgaatcttgagctcattggtgctgccccacaaagctccacggaatttgtctcggccgtgctcttccttgcgagccctcttggtttcttgttcaagggctcttgcggtatctgcattttcttctcgtaactcgacacactctttccgaacgtctgtagcgactaactnngaattttctttggcaagtcttgcttttactagttctatttctagagctcagacttcttcatcctcttccggagcttcgaagttctcctcgttgataactttcaatttggagagccaatctaacccttgtgtatgaactntcagccattcatgataaccaccgatgatgccttacagatgccctaagttcttatctttcttaacggctttccatgcttgtggactttgataatc

SEQ ID NO: 94599 - DNA, 421 bp, Glycine max
tgcagctagaaacaaaacaagtcacactttatactttcgaattgattaacatgggtgactaatacatgctgaattcactcaaatcaaagatggatagaatgacagaatcaagaaaaatgttctaaagtcagtaaaaaatcaaattctcacaaacttaaacatatggacaatatatgactaacatgactctaaacacaggataaatattccactagattttggttctttctaaaaatttggaaaaattgatctaggtcagccagaaatatactgaaagatgacctaatcccaaactgatagagagacttaattaacctaaatcaaacaggtgactaattaacgtattttgaaccctaacagacaaccaaatgagttctggataagaaaagataggatgtgacaaaaagacaaactcctataa

SEQ ID NO: 94600 - DNA, 427 bp, Glycine max
  unsure (1)..(427): unsure at all n locations
tggagagctanatcctcaatngggtctttctacgatgtactttatgtaaatactcttatatctatctaatgatgttgcatgtgttctctgtgatatcagtacttcatttntagtatgcttttgccttgatcatgtagatgcatgtttatttagggtcattcaacattggngaaatggttaatcattanaacttgatangacggngctagttgtcggtgcacttgtcggccgtcgaataacatatncaataaccttatctccttcttcattctactgccattgatcttcaagaagcaaagaactccattgatgaagaggatctaaggcctacaagctccacaagaagctaaatcacgtggagttatgcagatcanatgaaaaaagtagtttgtggtaatgcanggaaccaaacacggaanatattaca

SEQ ID NO: 94601 - DNA, 279 bp, Glycine max
agacacaaacttataatgaccacattcatatttaagcctaaattatttatttcatatactctaatttattcaaatataccgctaagcataagagaagtccacaataaattaatttttttaaaggaacaatatgttaggttagaaaaaggatgaggtctactatgcgttagtgatcttatgggttttatgccgtcttacacatagcatgttagaacctttgattcatggaagcttcttctatgtgttcacctccactacaaccacatcaaagaaccaaat

SEQ ID NO: 94602 - DNA, 421 bp, Glycine max
  unsure (1)..(421): unsure at all n locations
gcctgaatagtggtttagagaagtgagggtgacaagcctcatattgtaggtttgcgatgaactcactaagcgagccagccttgctaagtgagttcatccattntgatgaatatctgggtttcaagatgaactcgctaagcgtgctctactccactaagcgagttcatcaaatttggttaaatttctggcatttgtatgaactcgctaagccactacactacggcttagagagtctttgaattntgcttttatanttatgggtttgtatgaactcgctaagccgaccatccgcacatagcaagcacaattagttagttctgaaacttagaggctntntgcattccctctatggcttagcgaccatggctcgctaagcccanatacgcatatggaataaaaatgggataagcgagacatgctc

SEQ ID NO: 94603 - DNA, 366 bp, Glycine max
  unsure (1)..(366): unsure at all n locations
gcaccgcagtagagactaaccaccaacttccggatggatcggtgtgggtactctacgcctatgacaccacaatatcgaaccatgaactaagaaaggcttgagatacaagcacatatataggctattcattgtgaggccctaattctcgactggaggggacaccgaatgcctctgccttccataccttggatagatagagaggacgggcatagtttntcgggttttcatgtcgtctaacacttgaacactgaagatggatgactagtgccagatcgaatngatcggatcatgtatgaacaatgatcatgactactcggctggtatgatgccacagatgcatcatcactgtcgttcacttgaccctat

SEQ ID NO: 94604 - DNA, 295 bp, Glycine max
  unsure (1)..(295): unsure at all n locations
gcatacggctatctggatggatatgatgatatctatatagatggatctgatatatctatatatctatagatagatatatagatatagatatatagatatagatcataccatgaagtaccgcacgagtgggtatatatgaatccaaatctgccgaatcactcatgttatgatcttctacatcctanggtcttccgttccttcatctggcttatgttcttcatgtagcattcagactgaatgactctatgaaattacgtcgctactttcacatggtacgggtaacgtaagagacatc

SEQ ID NO: 94605 - DNA, 317 bp, Glycine max
cggtaaagaaagtgcttttctgatgaaacagatcaaactagatctcttgatcatccatgcccatttccagaatactcctctccatatacaccacacaactgacggataacatgaagggacgatccaaaatctaaggaatcacaacgacctcttcaatatcgatcacaacaaaatgcgaaaggaaagtaacatgatgcaccttgactagaacatcttcaatcacaccataatgtccagtcatagaccgatctacatgctgcagcggtattctacgtggcataatctccaactcttcaatctttttgcacatggagaga

SEQ ID NO: 94606 - DNA, 437 bp, Glycine max
  unsure (1)..(437): unsure at all n locations
tctctntgaaagagcgcaacaagcgaattgatgacatatttcttgatctcggtcgatcattaagcatgctgcttgtggccagccttgaagtgtccatagattttatagaaaagattggcacattgcaaaaacagctgatgaatgcgagatttggtgggaatatgagtccaacttcaagttcgatatcaagatttgtcaatgaagcgaaggagggaggggaaatagaagaggagataattgatgttactagtgatgatgtttactacagcttaagaatggtgatgccgaggaatttgcagttgcactcttaacgtaaaaaagtcatcangggtggaaaactggactagcggttaattaatgtggaagctgctgtttccattctttntaaccgcccattttcgtctacggaggcaataggttgacaatcattcaattgc

SEQ ID NO: 94607 - DNA, 298 bp, Glycine max
gaagaatatggccactggagcatttaatgttagcattaaatacacatacttcttcatactagaactcgactcttctgggatatcatgtagaacaccccagtatgaaatcgctttcttttgcgtaaagcagaattgcatagtagagtgcttcttttgatggaaagtagcgaatttgaggacttggactctatttattcttcataggagttgacagatcctagagaatatctctgtagacaaatctcaacacagagattaaattaagtcttatatatattctttaatgttgatcagacat

SEQ ID NO: 94608 - DNA, 270 bp, Glycine max
  unsure (1)..(270): unsure at all n locations
cacttgttgtgactgtgatgaatgagagtcttgtgagacacaactcaaagatcaacttgtcttcctttttcttccttcaatttcgcgctcccgcttctctgtttgtcttcctctttcttttcctccattgaagcatcctctccaagcttcttatccaaggcttatcttggaggtgaagctcattctttcatggcttattccctangggatgacgcctcctctcacctattctactttgtcttccgctgcatctccatggcggaaaatcac

SEQ ID NO: 94609 - DNA, 410 bp, Glycine max
  unsure (1)..(410): unsure at all n locations
atgctatgtgctcgcgactggtccctttcttcctttcgcaacttgagttcactattgctaccccatagagctccgcgaaaattgttccggccatactcttccttgcgagccctcttggtctcttgntcaagggctctngcggtaattgcattctcttcccgtaacccggcacactccttccgaacgtgtgtagcggacaacttgaactttctcttggcaagnttgccttcctaactcgctttgagagcttggacttttcgcctcttccggtgcttcaaactctcttgctgacgactttaactggcgagcaatcaaacctcgtatataacttcagcatcgtggacccaccatgatgcttacgatgccctagctctgacttcttaacgcgttccacgctatgattttgatag

SEQ ID NO: 94610 - DNA, 285 bp, Glycine max
ggcacaattgggtgttgaggagtcaaattatgattcggtggaattttatgtgtaaattcagtttgagcaagtttagattgatgttatggacttgtgtgaggtgagagtttgcttcaaatttacctcattctaaatttcacttttcaaacctagaaaacccattgaattgaggggtgttggacacctagattctgtgttgctgtgctttaaagcttgaatttggtttagacatgattgatacatgaattgggacttgtaggaattgacttgggcaagattggatga

SEQ ID NO: 94611 - DNA, 363 bp, Glycine max
  unsure (1)..(363): unsure at all n locations
tgaaaaactaagatgtaactcttcaagaagttccgactatctcaaatgggtgttaagttnttctaataggtattactcttctgaatggtcttcttgaccagagatgaagagcctattaaagcaacgctttgttttgcattttgaatcaaacatcttccaatctttctaanaatcttctacaatcctttacacgtcttgaatcacttgaaaactctatgaacttcttcttcttctgtgtaccaaaagcatttctgaagtttctggttgttcaaccctgagactcggctattcatcttacatctctctcccttgccaaaagaatctcaaggctaccgctgaatctttgtgcttcttcttctttca

SEQ ID NO: 94612 - DNA, 428 bp, Glycine max
  unsure (1)..(428): unsure at all n locations
ctatataaactcaagctcgcctgtccgatgcancagtaacgatggctcgagtgtgttggttattgttctancccggaatgggtgtaggcaatgacaacgacggcatatctagcctgataaacgccaaagganatcgtgggaagtatgggttatgctataaacccactcaggcagatataaagagaagtattgtggaaaggaaaagcggaagtcaaggttcgcggttgagacaagaaggcgaacgaagcccaccctgccacataagtatgagctctataagcgcgggtctaggggacgaatgtcaagtcattgaatatacgaagatgatgttccgagtgcattgaatttggtacgactgtgccctcccgattcctactangaaattggcgagtggaggagcgcccggacatctacgcaacaagcataat

SEQ ID NO: 94613 - DNA, 344 bp, Glycine max
  unsure (1)..(344): unsure at all n locations
cgatattgcaagatatattccgagtactttggatttggtacgaccatgctctnctgatttccagctgggaaaatggcgagtggaggaacgctccggcatttacgcaacaagcataatgtaaacctttacgggtttaaaagctctatagttgggcctacgctntagagttntcatcttcgtaagggcttgtgtctctcggtttcgatttataatacaaggatctgtcttcatctgttcctgggctctacccattctcattcatttgcatggttacttctttntctgagacggcagatccgatgacgagtcctccgaaggtactaatacctgggacccgtctatcg

SEQ ID NO: 94614 - DNA, 429 bp, Glycine max
  unsure (1)..(429): unsure at all n locations
tgtcagcagaggagcacaaaccacagacccttgcgacaggtacagacttcttattcaaggccagctaggttactaagttaaccaatgcatccagtttgccttcaagcttcttattttcagatgatgcagatgggtttgtagctacctcatgcactcctctaatgactatggcatcatttctggcgctaaactgctgggagttggaggccatcttctcaattaaatttctggcttcagcaggagtcatgtctccaagggctccaccactggcagcatctatcatactnttctccatattactgagtccttcataaaaatattggagaagaagctgttctgaaatctgatggtnggggcaactggcacatagtttcttatatctcttccagtactcatacangctctcttcactgagttgtctaatacctg

SEQ ID NO: 94615 - DNA, 321 bp, Glycine max
  unsure (1)..(321): unsure at all n locations
acagtactcttgagggagagatgtggtataatctcctgcgccccatacaaacatcaatgtacatatatagcaagcgtatgcgcatagtttcttactaacgatctcgtgcacaagacattatattatccggagaaaaaaaaaaangcacccatgtacgatcaaggcagcttcggtagctagagcatatacacgcactctcaaggtggtatttgtacatcacacacatctcctttggcttatcacatacatgcatactctaaagcatttgtggtaccacaaatcgcacatgtgcacctactcgcttgtgtagaacctatacat

SEQ ID NO: 94616 - DNA, 204 bp, Glycine max
  unsure (1)..(204): unsure at all n locations
ataagcagacttagtggtatacaccccactatggtcagctnttcataatatggcatctttaacatatctctgaatgtacatggaattgacctncttcatataagtcacagcttgaacactctcataatcaaacagattcctcctgcacttgtaaatccaactccacctcgtcttggcaaaagtccccatcatataaatgagatc

SEQ ID NO: 94617 - DNA, 138 bp, Glycine max
  unsure (1)..(138): unsure at all n locations
gtgatgaaaccttttggtgaaatctttaaaattgnaaatattttcagaaaatggtttctttagacatgaaggctttcttgtcaaagaaaacaaattgtgtgtgcctaaatgttctacaagaaacttgcttgtttgtga

SEQ ID NO: 94618 - DNA, 441 bp, Glycine max
  unsure (1)..(441): unsure at all n locations
ttgcctattgaactaagcttccctgcatctgtttattattngagtttatgttgaattatgtaagtgggttctgaaccttgccatttgatgtgtggacaggacagagagtntgaatagttttggtgggtccttagtttgattactttgttggatgattctattgcctattgctaattgtgtgtctgctttggtttggctgcattttcttttcttgtgtgataccttattcacantaattgtttgatcttttctgttntatgcttccaagggtgcataccactatactaggttcttggttttcatgttgagggtgaagcatgtgtttacataagtcttcttctgttntgtagacatcgaattaagtaaatatattgttcagctaatcattgagaagcatgcaaatggttgcaaataagtttaactcattttcttccttgtcat

SEQ ID NO: 94619 - DNA, 183 bp, Glycine max
ataactgctattttagtctcagacccaatcatggtggatcttcttgtcctggtcgatctgaaaatttaaatttataagttcaaagttcaaaaaatgcaggatgactaatgaaaccaataggtaagacaaataacaatttgtaaacatttatcagttgcacttgcattgcatcagtgaatattg

SEQ ID NO: 94620 - DNA, 324 bp, Glycine max
  unsure (1)..(324): unsure at all n locations
aaatcctcagcctaaaaaccggatcacattaaattaaatggtttttttttattctgggccaaagaaagccctaatttctaaaactcgccaaccacatgtcctataaaaatgtacgtntataaataaagttttttatttaccgtattattaattttaaattgatataaatttactgtattattaaccgaggcttaacgcgtgcttaaattaataattattttaatagaaataataatctttaaaggaacttttgaaaatacttattaaaagaaaacaaatatatgtctatttgaaggagcttaattttgtaataaactacagttt

SEQ ID NO: 94621 - DNA, 294 bp, Glycine max
tttttaagctccacttttttagcacggacatgctctttcttgcgagcccttttggtttcttgttccaaggccttggaggtagctatatttatatctcttaattcggcattctccttttggatcttaagagttgttgattagaacctttctttgactgtttgggcttgctcgagatctgcccttaaaggcctcgcaccgtctatcgactttctccgttgccttaacttcctcccttttagcagttctgaaactcgggagccaatccaaaccttgcacgtgggctttcaactactt

SEQ ID NO: 94622 - DNA, 308 bp, Glycine max
ttctgatgaatcacgattgattcaggaggtttctttttggttcagggggtttgatgataacaaagatgatgacaaaaagctcataagtcaagatcacttcatgaatacaaagatgatgacattcaagaatgagttcaagattcagtccagaacacatcaagaatcaagaatcaagtttcaagattcaagtttcgagaatcaagaatcaagtttcaagattcaagattcaagtttcaagaatcaagaatcaagaataaacaagttgaagattcaagaatcaagaaaagactcaatcaagataagttcta

SEQ ID NO: 94623 - DNA, 219 bp, Glycine max
gacatgatgcataaaatacgatgtttcatgctataaaacttaaatcctttttaggttatattttaattttaaattctgttgaatattttctcgctcccttcttgtgtggatgcagatgctgaaatcaatttcggccaggaactctgttaacagtgaccaaattaataccattgagcttgaactgcttttcatatacactttctgtgcttaagatataca

SEQ ID NO: 94624 - DNA, 297 bp, Glycine max
ttgtgtaatcgattacactgattcgcgaatctttttccatcgattggtcctgacaaaatcaaaagatgtaactcttcaaatggtttttgacattttcaaattggtttaagtttttctaaaagtcataactcttctaaatggccctcttgaccagacatgaagagtctataaaagcaaggctttgttttgcattttatatcaatccaatcaatctaatacaatcctttacaagccttgaatctctttgaacttcttcttctttgtgccaaaaactttccaaagttttctggttttcta

SEQ ID NO: 94625 - DNA, 232 bp, Glycine max
ttctagtttaaggtaattaaattcatgtgggctgggggaaaaatgggttaccttacagtttacattgttgggtaaaaaaaaacaatgacatttatattatgggttatttaaagcttatttaaagttaagcatagggtttggttatctactgaaataatgctctactgaaataatgctctgttgctagtgacaatattgtgaagcttgtgctttgaaaattatgtgtatggaa

SEQ ID NO: 94626 - DNA, 321 bp, Glycine max
ctttaaattactcaggctggagaaagtccttctgattttgttatacatttcttacttgatggcatgaaaagaaatgcaaagaatggacctcttgttagttgttatcaatgaatagcttaaacacttgtgcttgagtgaaacagtagccgcgaaattgtggtttgagctactttccttgatatttgtcttatgattaacttcatataactgtatagttcacattttgttctcctatttgtctagctgcatgttctgtgaaaacaagtgataggtacacatttcttcatctttctcatcatgcaatcaataaattttgatgca

SEQ ID NO: 94627 - DNA, 208 bp, Glycine max
  unsure (1)..(208): unsure at all n locations
tttagatcccaaatataccctatacataagcagttatcaatggatttcaaaatgccagaagaaatgatgaagaaaaagttaaagatgattgattaccactgcacacctgaagatgaaggagaaatcgggtcanattgtttaactaaacaagatatggatgaaatatgtgatggctccatcattgaaaatgcttttgggtaccaaaaaa

SEQ ID NO: 94628 - DNA, 308 bp, Glycine max
ttaactgaaaaaccatgatatcaccatatcttttttttattttggagctttggaattgcttttggaataagtgtgggggatttttgtttcactggataacatgttttgctggctatgattcatgatgtattttgggccacacttgatgtacattttatattggttaaatgtcggacatgctaaatgagatgctatttctccaaggctacagagcaccaacaaaatgtcgattgattgagacaagccattgaggggagtgaataatatcttacatggcggaagaacgattacactcttggtgctattct

SEQ ID NO: 94629 - DNA, 258 bp, Glycine max
ggagtgcctgtagggcacaacccacgttggtttatggtatcccatacgtacctccgtagatctaataggctattgagatatgactttgcacgatgcaagctagataagaaaatcacaagtgggacagcgccatctcttatgaagctgacttatatctgggaataacaatcatgatgcatgtgcccacttttccctataaaacctaagatattgcttctagagatggggggctcagagtctttggatgaaacagcagct

SEQ ID NO: 94630 - DNA, 287 bp, Glycine max
gaatgggtttacaaaaacactaatttgaatcaaacctttaacatatctcctaaaatgaaaatctttagatatgacgaccaagaaataaaaaatcccatgcttggtaataaaatttagtatcttttggaataatatagatattataatgatagggatgaaatcaaaaactagatgattgctaaaaacaattaacttttttttttccttcatagaatttattttcttttattttaatttttatactttttctcccaataacaataacaagtaccctgataagaattaca

SEQ ID NO: 94631 - DNA, 320 bp, Glycine max
  unsure (1)..(320): unsure at all n locations
atactgaagcttgcataggcatcatataactattagctttatttttctaagnnnctnggaaaacatagaaggtaaagagttaggtcttcattaagaactgtctgaccgacaaaacaaacagctagttcatcagcatgtaacttgatgccatgcaagtgtattcagtaaaaggctttgtacttttgactctttgatggccgtgatgcgagattgtgacttgttggcatagaatctctaagatataccaaacagtgaggttttggctcttgaaatggtgttttgaatgccggaaggatcttgtggtgctagaaagaatgctt

SEQ ID NO: 94632 - DNA, 296 bp, Glycine max
tcagttttaaatttcgagcgtctcgatttatttctcgactcaatccgactctcgagtgaaaagttattgtcgttacaatttgctaccaacttcgattctaaattccgagcgtctcaacaagttacgggactcaatctaacttccgagtgaaaagctattgtcgttcgaatttgctaccagcttccaatttaaatcttcagcgtttcgatatattacaggactcaatcggacttccgagcgaaaagttattgtcccccaaatatgctaccagctcccagtttaaatttccagcgcct

SEQ ID NO: 94633 - DNA, 307 bp, Glycine max
ccgggatccttaaagccacctgcaggatgcaactttgtttgacaggtattttctttgattacacaccctgggagcaaatcttgccaattacaagtttgaggagaaaaaccgccgaggagctcaaacggaccttaaggggcaagctctggatgcctggtcaatctaagaatgtggcgtgtgaaataccctatatgatacgcatgtgtattgttacttatgaccttgcgttaacaacctataactctgctatataaaaaagggccattaggttgtttgcatgttataatggaaaaacttgttatttgcc

SEQ ID NO: 94634 - DNA, 302 bp, Glycine max
tcactaaaccacacacacacatactatttcttttatatgctgattaaaaacatataagcattgtaattaaatacatacatgcacaaatgacataacacaaaattttctttattgagttgtaattttatagtgtgttacatcatcaatgcattgttgttggcggcggtgataagaaggttgttgtcgtttggtgagatgacaattctagccgtgtacagaatttatggaagcgagggtggggcaacagtcctttatggtcgatgtccagaggcagagcgacgaaatgagaaggaaccctttgt

SEQ ID NO: 94635 - DNA, 312 bp, Glycine max
  unsure (1)..(312): unsure at all n locations
agcctggtttgggaagtggattttttcctaagttaacttgggtaattcttcacctaattaaaaaccacctttcaaggtaaaggcccagtggaaattttccttttgaaggataaaccgaggttacacatgaacgaacggttgaattttatttaaagggcgattaacgagattgcaacatanatgatcagttgaaattcattttaatattgattaagtgagattacaactcaaacgatcggtcgaaactcgcttaaaacgaagaaaaagaataccgaaagtagatgagatgaagatgaaaacatacaaagcaag

SEQ ID NO: 94636 - DNA, 302 bp, Glycine max
gaggcttagtagaattagatgagtcctttttttttattatactagaagaagggagtagccatatcaaaacattctacaaaatctaaaattaactataatcgttatattctttcaatgaacgattgtaggtgcactacacaaggatttagatgttaatgtctttttttttcctttggggcgactctcttactatggaggatgattttataatcctgtattacgcttaaaggttaactttttttacagacaaaattgaacttcttgaggatatcatacggaaagaaaatgatgagatggcttaa

SEQ ID NO: 94637 - DNA, 300 bp, Glycine max
tgcacgaaagagggccacgcatgtctttgtgtgtgcacgaactgccatcgaccttggtacgacactgaccgcactctgagcggtttatagcccctatcgacttccaatacataaacggatggtcgttttgttcgggatccactcgtctcttttccaggacaacgactttgctgattttaatgacgatacaagctccctgatgtgggcaccaaaggatactcctatgtgccaattgtgacctctaaattgatcggcaaactcttgccggggcgaggcctaccaacaatggcttgcgtcatt

SEQ ID NO: 94638 - DNA, 156 bp, Glycine max
  unsure (1)..(156): unsure at all n locations
aacctgacttaacaacagctgcaacgacgtcgntgttcttttgccatgtacagataggtccagtcaccaactgacacgtgtcttctaatcatttagtttttcagtctagtttgtccttttgatacacaaaccctttttcttttatcaactcacagg

SEQ ID NO: 94639 - DNA, 214 bp, Glycine max
accatgattttcgaggaagcattcaacatgaagggacccatctggttaccccatacgaatcctcccaagttggggtcaaatgcaacactgaaaactgttaggccctaaaagacaagataaaagaacttatacaagctgggtacttagcccaatttgttaagagaccaggcaacccccaagcaggagcgagacttgaaggacatccagaggagca

SEQ ID NO: 94640 - DNA, 188 bp, Glycine max
aagagctccaatactgtttgaccatgtttgtcccaatctggtaacataaaaaattttagacaggaagatactaaagagccaaaaatcttgtgccagaataagttgatattattattgactcttggataaatgagtagacacagccaattgtctgcacttgctgtcaccacaataacactcttgttttc

SEQ ID NO: 94641 - DNA, 259 bp, Glycine max
acccaaaattgggtttaaaattagaaaagcctgaaaataaggacttgcttggaagaattccggctgccccatgattggtactttgcacctaaataacgtgggaaatgcttttcaatggtatgtagatatatgtgtaaatataaggggcataaaattcctcgccaagtatgaataatttttttcttaaatgaatgtatgatagcgtggaatgcctttttgaatgcaaatatgtgcaggatgtaattagctttccaatatg

SEQ ID NO: 94642 - DNA, 288 bp, Glycine max
ccttaggtggcccatggctttttaatgcacaaaatttggccaaagattggtttggggactgcaaaaaacataacccccaactcttgcacagggcaaattctgatcatggcagtgaatactaggtgaccaggcatcaagtttccttcaacctctatatttttagtagatgaagatgaatccgtggccacctcatggactcctctaagaacaatagcatcatttcttttactgaattgttgggagttggaagccatcttctcaatcaaattcctagcctcagcaggggtc

SEQ ID NO: 94643 - DNA, 306 bp, Glycine max
tcatcctcagatccctcttattggactgggctttatttagacagacctcctaggtttagactaacttaaactaagtttcatcctcagatccctcttgttggactagacttagcttaaatagtttacgaaagtttagcctaatttagcctaagctttatcctcagatccctcttgttggactagagttagacaaaacaacattattgtaacaacatacttaaaaccaaaacttaatctgtagattcctcttgtaagactaggtttcaattctgcttcattcaagtattaaggcaacaatacatttcc

SEQ ID NO: 94644 - DNA, 252 bp, Glycine max
gtaccattttccaattgctaaaagtcaccctaaactaatgccacacaaaatggaatgattcagaaccacaatggcatacaaaacattaagcattgaaagaaacattgaacacaaaaaacataatcaattagatattaagtatttacatcagttgttcattagaaatccccaactagggtgtttagccatccattacagaagaaaccctaacaaaaataataagtttacaaaacttaggtatctctacaaaag

SEQ ID NO: 94645 - DNA, 304 bp, Glycine max
ttataagtgtgggtttaagacacgaaggccttttctttgcgatatgcaaggatgactccccgaggagatcggatttggtacagccatgtcctcctggttttcgactaggaaattggcgagtggaggagcgcccagacgtttatgcggttgggcctaggctttagagtttccgactaggtaatgtaaccctttgtagctttaaaactctacggttgggcctaggctttagagtttccttttgttaaggcattatgtcttttgttcttgaatttataatataaagatctttcttcatctgttcctg

SEQ ID NO: 94646 - DNA, 256 bp, Glycine max
ggcacgcttaacgaaaatgtctcacttagccccaattaattaaatccacatccatataagggtttgggcttaacgcgtgggctcgctcagcgaggaagcctctgccactggatgaagggttggtgcacttagggagaagtatcagttgctcagcgcgtagcatatgtctcacttagtgcgggtgttgcgctgagtgatgcaagctccattggagcttgtaggcctaggatcttttttattaatggattcctttgct

SEQ ID NO: 94647 - DNA, 309 bp, Glycine max
tctagccgccatctcactatggctacctctgtctcatctggtgaggatgattctactccaccaccaccaccttccttcattgatcccagtcaaaacccagccagccctttctatatccatcccagtgagaatcccacatctgttattgttactcctccacttactgccaataatttccaatcttggtcccgttcatttcaaatggctcttatctccaagcacaaaatgggttttctcaatggaactattccaattccttagcccacagactcgatttattattcgtgggagcgatgcaatacgcttctc

SEQ ID NO: 94648 - DNA, 289 bp, Glycine max
tttttttatccaggaccttaggggattataaaaaaatatttcccagaagcacatctattcaatgttttataatggccatcaaaagggacttggaaacacgaatttaaagagaattttcattgcccaaacagttttatgcttttaaaaaaataaaagttttctgaactgaaatgtcttatcctctcaaaaagaatccttggtcaaccacttgcatattcaataaggaattttgattgatcttcattgtacaatctatctcttttaagagagatttcttcttctcttcttc

SEQ ID NO: 94649 - DNA, 309 bp, Glycine max
  unsure (1)..(309): unsure at all n locations
tagagggaacataaagagcctcaactttggtgtattgggatgcagngcaggcctcatttcaattgatcttgctaaggaccttctccaagtccaccccaattcttatgcattggttgttagcaccgagaacatcactttgaattggtactctgggaatgacctatcgaagcttgtttccaattgtttgttccgtatgggaggggctgccattctgctttctaacaaaggctctgataggaggagatcaaaataccagctggttgacaccgttcgcactaataagggttctgatgacaagtgctttggctg

SEQ ID NO: 94650 - DNA, 262 bp, Glycine max
catggaatcatgtaccattttaagaacatcatgcttggattttgcactctggaactgtgtcacttttatttatgctaattttttctgaaatcggttatttttggtatgttcagagactcagatgatcaaatggaaacgagctgtactctacaaatcacagaagaggagtgagatggagaaagatggatccaggattcttggaaattctggtgaccagtggagcgatttattaggttcttcagtatctggtcggtccttcaag

SEQ ID NO: 94651 - DNA, 309 bp, Glycine max
  unsure (1)..(309): unsure at all n locations
tatctttgataaacatgctgngtatgtattctctttcattgnngccaaagatgcactacattcatcctctatctgcgattcagcaagacagtctcaggcatcaagcaatccagattgtgtcaatgaggctgagccgggctgagccaccactgaggagagaggtggtggaatacatgctagatgtggattcacacatgtggagtatgagaaggagcaaagctaatttcttcagaattaccaaagtccttggtgggttgatagcctttggaaggtggtttgatcacatatgcaattggaaaaaccctctca

SEQ ID NO: 94652 - DNA, 304 bp, Glycine max
  unsure (1)..(304): unsure at all n locations
ttaagcgactgagctgcagcttttatgaggagtgtttttggtgaaacttcctgcttttattcggtgaccataaaagggtacctggaaatatgtcgcggggtcacgagaccttggggacgtcaggtggggtgctattgcccanaaccaagcttgaccaatcccgacccaacccgggcatagtcagtcagtgagaacctgtgatgtacctaaacaggcgagctcctggcagtacacagataaaacgaacaaagaccacaaagcaaggaggcttgtgtggtggctggccaactgtgaactttgattt

SEQ ID NO: 94653 - DNA, 301 bp, Glycine max
tgagctcattactgctgccccatagattctttctgaacttgttcctgctccattcttcctttcgggcccttttggtttcttgctctaatgcttcgatcatagtcatgttgacatccctcagctcatcacactctttcctgaccctagtgactgtcgtctttagcttctccttgaccactctcattttttgagctctattttcaaagcttgcacttcttcgctttcctcagggacttcagcttctttgccacttaggccttttagctttgggaaccaagttatcccttgcatcctagacttc

SEQ ID NO: 94654 - DNA, 292 bp, Glycine max
tgcaacttttgaacatgctcgattttgttataataataattacttattatatgcctaatgaattttggatgggtcatgcaataatgggttgtgggtgggtgtgtgtgtgtatatatatggttggatgatcttgtgatagtactatacttaagtaatcggttaatagtggtgccattttgtttggtttggtcagttattcagtctgtgctggtgatgatatgattcagtaattggaaaattatgtacgatattcagcttttggagggggcaatatcaataatgtgacactggc

SEQ ID NO: 94655 - DNA, 302 bp, Glycine max
ttaaaacaaagaaaacaaaaagtattcaaaatataaacagtacttacatggacaaatgcagtgtaatgaccacctcccatgcttccataatggttactgacagcataaagtgtgtaattgtatgactcaccattcccatgggtaatataagctgacaaatcgagattatctacagggaaatcaacatatgtctccagcttgtttttcaagtaacgactgtattgaaacctcttaagatgaatgaccaaaatttcaggaagtctccaaagatctaacttcttactagcttgacgatgttcttt

SEQ ID NO: 94656 - DNA, 299 bp, Glycine max
cagcttcctagcttatattgatgatgcccaagactcaagtccagaatcacgattcaagcaagtttcaagaatcaaagagtcattccatcaagaatccagattcaagtgaagattcaagagaagactcaagatatgcaagaacttctagaaaagcatcaagtataaaaagatttttcaaagataagattgaatagcacaatttgtccaaaagaatttttcaaggaaaaatctgtagaagcaaagcttcatggtgaatcaaaggtgattcacaggtgttttgatgataacaatgatgataa

SEQ ID NO: 94657 - DNA, 307 bp, Glycine max
tgtcagatattccttctcaactactattcttttctcaatataatacgtagatgtgtaatgttagtagagctggatgctgatcaaataactaaaataaacaaaaagtttcaaaagctggaagatgtatgtcctgccatggaaaaaaaattactaagtgactaaagttcttctaagcagagaaaaggagctccgtgaaaggcttgtgggttttagtttttctgcttttcgaactagcatgtccaatcaagaagcaaatcccaaatctggttgttggtatcctgttggactagcacagatggaacaattg

SEQ ID NO: 94658 - DNA, 290 bp, Glycine max
taaggggttgcaaaaaaaaacccccgggttacaatatgccatggtcttatgcaaaaatgtccctaagaaaacagccataaccttgttactgaaggcataactattttactagccatgatattaaaatagaattgaattggacccactttctcattatcaatagcctggtttctaaatttaagttgaaaagatttttattgatgatttttgcacatcacaaagggaagggtgaagacagtgctctgaaggcttcatgtcatagcagcagaaataatgtgtgtgtgtgtgtg

SEQ ID NO: 94659 - DNA, 305 bp, Glycine max
tccatgaaaagatttctaaagatgctttagtttatctacacacacctctctaatagctaagctcacctccctgagatgagaagctagaacttagctacacaccccctataatagctaagctcacccccatgacaaaatacatgaaaatacaaaaaaaaaagtccctgctacaaagactactcaaaatgcctcgaaatacaaggctaaaaccctatactactagaatggccaaaatacaaggcctaaacgaaggagaaaacctattctaatatttacaaacataagcaggctcatacttagcccat

SEQ ID NO: 94660 - DNA, 284 bp, Glycine max
agcttgaatggctcaatgagctttgggaagtgatcgtcaatccataagtaatgattccctttttgtatacgaaactactgcgatgaaaatctatgtgatataatccctatgtgaacaaagcatattttgttgggtagaccatggcaacttgacaagaaagcgatcctcaatgatctcaccaatgaaataaccctcatccatggaagcgaaaaggtcacactcggtcccttgacaccttcacaagtggttggggatcaagtacaaataaaactgacatggaatga

SEQ ID NO: 94661 - DNA, 300 bp, Glycine max
tgagcaacacagggagaaagaatctcattctttctcgacaaactttaaaaatcggacaaaaaaggacatgaacctgacggcgagttgggcacgaagaactagtgacaacaagctagtgatggagaaagcctgcgacaacgagttgatgacggggcctccacgatggtgaactgggcatgactcaatagtgagtgaggtgagagtgaacgctgagtgaaaaatgacagtaattgaaatgatgctaaggttgctcggctttgattggaacggtaatttctgacaaaacctaatacatgggcc

SEQ ID NO: 94662 - DNA, 279 bp, Glycine max
gtttgcgctccaccctggttagccaggcttttttctttttttttcaagaccttgagcgcttaaacaccttattttcatcccatctggtgcgtaacaaacttggcaagaacactaccaatcttgggaaggcattggtggttcaacttcacagcttcaacaaaggcgacagtggcattagctattttagggggctccactctctaaactgtgcgagcagtagccctccatttggtaaccttagcctcaaaggatgccaccttgtttagcgcctcttggtgc

SEQ ID NO: 94663 - DNA, 313 bp, Glycine max
ttcaatttttccatagattgcttgccccaaaaattatattgttatccgcgttttgaaaaaacttatgtcaatctttttagatcccactgaataacctttgtacatggttttcagctattgcctttctcaacaatccagataacgcttccatcaccaaattaaacaagatgggtgctaacggatccccctgtctaatacctttttgaggtatgaactcatttgtgggacttccattcaccaagaccgacattgacatagacttgaggcttccttcgatccattggatccaccgggagttaaaaccaaatcttct

SEQ ID NO: 94664 - DNA, 312 bp, Glycine max
tgagaggtaagacaatagattgattgcatgttttttataaaaatacctaaataaaaacccatgtaaattttcattggggaaagaatgaaaatgatggatgtgaaatgatcaaataagtaactaattagactaagagaaactagacattcctttaaattatatgttagtcctaggctaatttactccatagaactctcatttgtgtggttgtggcaaaaaaagaatgtgaataaaataaaccacatttctgcaacaaaagaaacaccacatttaaatttcatgtggagacattttgcttatttcatattctcc

SEQ ID NO: 94665 - DNA, 241 bp, Glycine max
aaattaggagccattttcccaaataaacactttacaaaagggttataaaatagaaaactattatctaccttgaccaatatatttataatatatttaaacacaccctccacagtcgtagtgggaagcttttcgacgctgagactgtctcgaaaatcttcaaataaaattagcggaagacctttggtaaaatatccgctagctgatatcatgatggcacatgaagaacccgtacgtgtccgcg

SEQ ID NO: 94666 - DNA, 304 bp, Glycine max
tgtgcctcttcatgtctagaatatgaatgtttcatatagatccaaagacccttaggtgctttgttgatggcttcttcccgttccaagcttcaattggagtcttgtcttttacagacttagttggacatctgttgagtatgtaaacagcaaggtagactgcttcagcccagaatgtgttaggtagtcccttctccatgagcatcgatctagccatttccataactatgcgattctttctctcggacactccattttgttgaggagaatatgtgactgtaagttgtcgctcaatgccttcatcctc

SEQ ID NO: 94667 - DNA, 275 bp, Glycine max
cccaggaaatgccacattctttttcaccaactcattgaaaagtgaagcaattgtagagaaaataggaacgaaaccctctattgaaacttgcctacacattggaagctcctaattttctcccacaactttttttggggtggggcccattacttcggatggcccttgaaatttctaaggggtccaccatggaaccccatttctaaccaacttacaaaaccctaagaaaaactatcattattctacacaaaaaggtacacctcctctatattttgcat

SEQ ID NO: 94668 - DNA, 304 bp, Glycine max
tcaggctgctcaattgctccaggttgctgcatgggatggcaaaggtctgtatggcggtcagcagaggagcacaaaccacaaactcttgcgacaggtacagatttctgattcaaggccagctgggttaccaagttgaccaacgcatccaatttgccttcaagcttcttagtttcagatcatgccgatgggtttgtagctacctcatgcactcctttaatgactatggcatcatttctggcgcttaactgctgggagttggaggccatcttctcaaataaatttctggcttcaacaagagtcatgt

SEQ ID NO: 94669 - DNA, 282 bp, Glycine max
ccccaaatggaattgaaaaccttttttcgaaccctagagccctacctcactttgggggggctttaaatttcaggaaaaaggggacctctttcacttgaaaattggggggggtggggttttgggacctataaggggaagtcctactaggtattgcccttagggaagtgtttgggaaggaaattgttgaaattatgctaacttgacatgtttgatgtaagcaaaactacccatgttgaattaaggtttaaaaatgatgctttttgatatatgtatgcttaaaat

SEQ ID NO: 94670 - DNA, 300 bp, Glycine max
accaaacgagaaagacagaaaattatgtattttgtgatggcactaccaacaaatcgaaaaagagcacaatgcactaagtcgaacgagaatgaagaggtggtgaaagagaaggcaacggagaaagaagaagagagggagaggagggaaaaaagaatttgaaatgcatcataccaggtttagaagggcaaacaggatcaccattaatgctttagaagagccttatctacaacttggatggatcaagtctaacactgaagcgcaaggtccttaaggtctcctctatctgatatcatagacaat

SEQ ID NO: 94671 - DNA, 299 bp, Glycine max
cgccgccacggagttgtccgactatgttcttttgtggtggaacaagctacaaaaggagagagcattaaatgaagagccaatggttgattcatggacggagattgtaaaagatcatgaggaagccggatgtgccggcaagttactcaagggactagatattcaagcgtccaaaactaacccaaggcaacaagggggttttggagtatcctaaggaaaggggtgtgctcctgattcaagcgactctttgagaacatgaagaggtaacctttgatcgaattgtttaaggcttgacgaatgat

SEQ ID NO: 94672 - DNA, 255 bp, Glycine max
tatggttttgcctttttgagtattcataacaacatatgacttccttcactagcaaatttttcatttttgggatccttttagtgcttccctgacagctaaagcacgttcaataaatagggctcattaacatcttacgatagatgtaaagacagtaacccttgaacctcctatttggaaggcaaaactccaattccattcttgcataaagttatggtgattactctcttggatgattggcctccccctattgacgaa

SEQ ID NO: 94673 - DNA, 305 bp, Glycine max
  unsure (1)..(305): unsure at all n locations
tcctctattagtgcacagctccattttgtttttggcccatcncggaaactatctctagtgcattcagcaaaggtctgtgtacctctactttgctgaatggttccaagaatctcttactttacctcttccatatttatgttggaaactgttcttacagggaatggaacatgaggaatgtgttgcttctacaaatcatatatgcaaggggaagattcacctgcataaaaaatgataggtaaaattttggcgctacctttatctggattattaccgaatttgtcaagaacatttgcatattaagaatg

SEQ ID NO: 94674 - DNA, 251 bp, Glycine max
aaaaccttcatggtgcttcatataaaccctccttctttaatcacctttaaaaaagttgttttcacatccatttgttgcactcaaggccaaatgagcaactaatgccaagattatacgaaaagaatctttttagataccggagaaaagactctttgtaatatattccttccttttgagtaaatcccttaacaacaagtcttgccttgtatctctcaatgttgcctaatgaatcccttttggtcttaaagacc

SEQ ID NO: 94675 - DNA, 293 bp, Glycine max
tataaactcagcgtggggattttcgaaatgaatctgtcttttttttgcagatagaaaaagtgctgccggattaagaatatccaatgggtgaaaccggtatttacaaggaagtttttaaaagcaaggcattgtgacacttcatgcttgataagcccacgtttgtagctggaacttcttgcacaatttatgcccattggcctaaaaaatactctgggggaaacttaaatcgtgcaaaacgagtacccccagatctatttggtttatttaattgcccaaaagcttgccaaaattct

SEQ ID NO: 94676 - DNA, 247 bp, Glycine max
cggaatactcaactaggatacaccgggtctttttgttttgtaacctgcaaagctagcctccacctgccgtgaaataatatatgcggcaaaatcgatctaagaggaagagcactgttacttttagggggcattccactattgtcgcaaaaatcaccactttccctccaaaaactgcattggaggggtttttcggggctgcgggcgcattttccaaaagtaaaccccggctcttgttctacaaaacggg

SEQ ID NO: 94677 - DNA, 267 bp, Glycine max
  unsure (1)..(267): unsure at all n locations
tttgccatgtttatgtttgagcctgctaaaacacatttgctgggaagggtgacctcaattttttaaacaacatttgtcttaacccttaaaaggggcatgtacttggaaatgattttttcccaatattcttacactttacggaggaaggttggctccattcctaaggctgagcaatntaggaatatgttgccatattaaatgtctaaaatacttattcgtgccatgttataaaaaaacaatcgttttatcaatgttcatggtgaaatg

SEQ ID NO: 94678 - DNA, 233 bp, Glycine max
agaaaagggaggctaaaaaaaacaaagaggcaagacatgcaaagctcagaacacaaggaggataaggaaaaggctcgaaaagaggataaaacgatgtttcaaggtggagaagaccttacaataggaaaatagcaaccgcaaagagcccaaaaaggacaccccaaggctcaaaaaacaaaccacaaaaaagccctaatataaaaattacgaccaaaggctacccaaacagtgac

SEQ ID NO: 94679 - DNA, 275 bp, Glycine max
aatttttttaactatgcctcttggggggggaacaagcttcaaaaggggaaaaccagaatgaagaacccatgggtgatacatggggcgagatgaaaaggatcatgatgaaacggtatgtgccgactagttactcaagggatttgaaattcaagctccaaaaactaacccaaggcaacaagggggttgaggagtatttcaaggaaatggatgtgctcatgattcaagcaaagattgaagaagatgaggaggtaactatggctcgaattcttaatggt

SEQ ID NO: 94680 - DNA, 267 bp, Glycine max
gaactataaaactcaagctagctcaaacattcaacatatttttttcctcggcgcaaaatcggcgcccagaattataggacctccccagcacaggtacatttccggagggaagatcatccaacctaagagtgtgaagacttcaaaactgccagctcatcaactaatggcctcgaaacagaaattgttgaagtccccccggaacctttccgggataacacgtgaggcagaaatactttctaaacatgcagttcccaaaaatactaaagc

SEQ ID NO: 94681 - DNA, 186 bp, Glycine max
agcttctagcccaatggacttatcttgaattaattcctttgatagcccttttgagccttggttcccttttccttggttttgaagctcactacaagccttaaatggaaaaccatgatatcaccatatctttaaggaaattttggagctttggaattgttttgggaataagtgtgggggggggggggg

SEQ ID NO: 94682 - DNA, 302 bp, Glycine max
tttgtggagtaaaaacatggcgactttttctttttatttcaaaaagtcgtccccaaatcaatgtctgagataccatacaagtttcctatcgaattctaattatgtggggtcataatgctaatcatatgcttgacaatatccgcaaagcccattaaatttcttccggggccgggtaaattgtcccccattgccttggccttggctaaaaaacggggaaaaaccttgactccccttcaagggaatagcaaaacccatccatccacatggtagcctcttggtgtaaaaaaaacaaccaccctttc

SEQ ID NO: 94683 - DNA, 300 bp, Glycine max
  unsure (1)..(300): unsure at all n locations
ttagttaatttttattttataaaagtttattttcttttcaaactttggataatatattttggaaaaatggaaaaaaaattccttgaaagggggagttttttttaatattttttttcaaaaattttctttcattttattaatatcttaccttattattntttaaaatttattaatgttttataaatgtaaaggttcactatttttttctacctatatccatgtttaatagttattactaatacaatgaatgacataatattaaataaaatattcttagtttaaattacaataatataatat

SEQ ID NO: 94684 - DNA, 309 bp, Glycine max
tgaatggtgcgatattaatgtacaataacatttagtataaatgcctttataaaatgaaatgttgtttaaaatttttgtttgatctatgcagcacattattagaggtcctgaggttctgatcatatgctcttatctctgattaactggacaataggactaagtggtatctcaccctttcagaaagttaaagaatcgagactctttttggtctttgagccttaaaattgctaataacatgtgcacttctttgaagttgttcgtaggagtaaaagattgaacagtaatttcagaaattccgtgctagtgaaa

SEQ ID NO: 94685 - DNA, 295 bp, Glycine max
aattttttttataagcaattgttaaccctacccagaattttcatattatttcaagcccaaagaaagtcaattgcagaagtatttcccttggtcaagggccatgttaaagagtcaattttatataaatacttggaaacataaaaaccgcaccacataaaccaaccctataggcctatacagttgcttttataattgtgctaatctgtcatgcggctgagtggtcgccgctaagattttgatagaattaacatcaaccaaacctattagggtagggtttgctacatggcttcaattc

SEQ ID NO: 94686 - DNA, 311 bp, Glycine max
  unsure (1)..(311): unsure at all n locations
tatccaaacttaggtccaaatctatctgaatgtgattcagatnctcnaacccnccaaaggcatttacaagtataattgatataggaaacgttattctatagcctatgtagacgttcctccttctttcattgctacctctcttccctcacactacacgctaatcacacaaattagggattacagatctgaacaatcaatatccttaattcatccctaataaattcctacactgtcgattttgtggcaaatcaataaagtaattaaactttagattatgcaacaagtagtaacaccatcgacaaatttcaaat

SEQ ID NO: 94687 - DNA, 295 bp, Glycine max
aaccttccaagttttaagttcttcttaaactgccttaccaaagttccaaaagcccaataacaacctccggttggccatccggttggggggggacaaggggtgaaaaaaacaaattaagggccccacttggtccacaaagtcctccaaaaatggcttaggaacttagagtccctaacactaacaatgctccttgcaaaccatggagtttcacaatctccttgaaaaacacatcagccacatggggaaacatcaataattttttacaggaataaatgagccattttagaaaacctat

SEQ ID NO: 94688 - DNA, 307 bp, Glycine max
tcgagaaaattcaaacaacattaactctttattttgatgtcttatcgagtcacgttatatatcgagacgctcgaaatttaaaacagatgctctgagcaaattcaaacgacaataactttttactccgatgtccacttgagtcccataatatatcgagacgctcgaaatttaaaatagaaactctgagccaattcaaacgacaataacatcttactcagatgtccgactgagtcccgtaacatattgagacactgcaaattgaaaacagaagctctgagcaaaatcaaacgacaatatcctttttact

SEQ ID NO: 94689 - DNA, 308 bp, Glycine max
cttacttttttcggaatttttctataccttcaccttattatagaaggggccaagaaaaaccaaaattttgtcataaggaatcgatcttggtaccacgtactcatgtgttggaatgtggctggagcaacacaatagagtaaaaataattcacaaccaacaaggccccaaaaccacaccttcttttgttgctttcacagacaatcagagattgattggtgatgctgctaagaatcaagctgtcaccaacccagaaaacactgtttttggtattttttctatttagttagtactgccttcctttttatgat

SEQ ID NO: 94690 - DNA, 305 bp, Glycine max
ttgactgagatttcccatgagaaaaagtgtttttatttatgaagctagcgagttctgtagtgcatattacctaaagcagggaatgaatgaattatggatgtgaaagcccccagattgaagattaacgggaattccaatgggtggttgaggcttttgaaacgataataataaagggagaaaaaggagagtggagatcgatcaattcttcactccctatgtcaaagtttaagacttgttgaaagatgggatcaatttgcgggttatatgtaacatattgctgtcctatctatactttttcataacat

SEQ ID NO: 94691 - DNA, 293 bp, Glycine max
catacattacactccttgctactttaaatgtaccttgtatcaccaagatgagttattgcttgcagcgttactccttgtaactatagatgtaccttgtatcaccaagaagaggagcgatatcaaacttctttcccgctcttctacatgtagaacctgaatgacaacattggcgaagaactagcaaaatatccttcgcggaaggcctaattgagggtaaagaactagtgcaaaggagagctaatttgaagacactcgtcatttggaccgcataacattcatctttgatatcctca

SEQ ID NO: 94692 - DNA, 250 bp, Glycine max
tgcctcatcaaaaaaggggaaaatgggaatgtatgtacccatgatttgaatatgtccaaagaaaaaatctaacaaggctacttcaaatgaatagcattcgcttcaagaataattcaagattgcttcaaataacaaagccttgtttcaagattcactaaagaccaagccttgccttaaaacaaagtgctttcaagacatgcaaggctctggtaatagattaccaggaagtgtaatcgattaccagaagaca

SEQ ID NO: 94693 - DNA, 307 bp, Glycine max
tcttagtttcagatgatgcagatgtgtttgtttttacctcatgcactcctctaatgactatggcatcatttctggcgctaaattgctgggagttggaggccatcttctcaattaaatttctggcttcagcaggggtcatgtctccaagggctccaccactggcagcatctatcatacttctctccatattactgagtccttcataaaaatattggagaagaagttgttctgaaatctgatggtgggggcaactggcacatagtttcttaaatctctcccagtactcatacaggctctcttcactgag

SEQ ID NO: 94694 - DNA, 206 bp, Glycine max
aatttggggatctcaaacaatttaaggattgattcgattaaactatctttaatgcatttgactaaacttttacactctgaatatcattcatagtaactatgataattttatttgcattactttggtgaattggattgatgatattaaacttgattcgcattttgtttttttctgttctatttcttcatctttgtttttgcgttttt

SEQ ID NO: 94695 - DNA, 309 bp, Glycine max
  unsure (1)..(309): unsure at all n locations
tccttaagaagattcgtaaagaagcttgtagtttatctacacatacctctctaatagctaagctcacctccttgagatgagaagctagagcttanctacacaccccctataatagctaagctcacccccatgacaaaaaacatgaaaataaaaaaaaagtccttattacaaagacaactcaaaatgccccgaaatacaaggctaaaaccctatactactagaatggccaaaatacaagaccttgacgaaggaaaaacctattctaatatttacaaagataagcgggctcatacttagcccatgggctcg

SEQ ID NO: 94696 - DNA, 293 bp, Glycine max
tctaacgttgaccatgaagagacattttttttttttccatcatgaattcctcgggtatgtactgatgattacgcgtcattctttagggacgaggaatggtattaccgaaaagaatccctcagggttctttgacaaactggggtgctatcgcactattctgttctccctcttcgactgacccaattataaattttttatgaaggagtcgacttctacgatgatcaaccttgttgcaaggggaaaatccctttgggcttgacttaatttatcttgttgcacaaaccctgggatcc

SEQ ID NO: 94697 - DNA, 321 bp, Glycine max
agctttgtgcaattcaatattccttgttgaagggatgttccactatggttctcaaagaactgggactaattacattttccttgcccaaggttttcattggtctttgtagggtgaaagaatcctcataatgcattcttaaaggagtctccatatttttctgttccaccattgaaacccccctgatgtggcaggaagatcataggctttctaaaagcttttcctcattctctggagggagtggcaaaagattggttgtactaccttgctcccaagtccattactagctgggatgaccttaagagggtgttcttggagaaattc

SEQ ID NO: 94698 - DNA, 299 bp, Glycine max
tatgtaaattgtatcaaactcttcctttttattgttattctgcagagttataagtattttttgttaagtataggtaataaatacttagtacttccattttgtgtgtatcataatcattttctctaaatttcaggttaattatgcaagctttgaaaagtgttgtttttcaccttctcgctaaaacaatctgccttggtgtgggcggcccaccgtctaaggcaatacatgctgagccatactacctggttggtgtccaatatggatccagttaagtatatgtttgagaagcctgcccttac

SEQ ID NO: 94699 - DNA, 290 bp, Glycine max
  unsure (1)..(290): unsure at all n locations
caactttatatggcgggctatttataacaaggttaagcttattttttgggtaccaaaatataatattattttttggatacaattaatttttttttaaactatgagactttgattacacattactatttcataacttctattcctataatcaaagactttaattacaatttaggggtgagtcatgtgcccttttatatttttcattattttgattgactttcctttttttttaactntcctattacgttcttactccataaaatattaaatatttattgttaagaagacta

SEQ ID NO: 94700 - DNA, 303 bp, Glycine max
tcctcggggccatttcctgcgaaggctaacttttttttaggtaggtttaccaagaaatgctacccttaaaacaaaaatggcgtacaacctcctccaataaatacaaacactcttgtaaatttagagtaaacttatgcacatacttctttacgaatgttcacttgcacaagacattcttataactaagaaaaaaaatgtacccatgtacaatcaagacacatccattacctagattatttatatgtacttccaaggggtatttgctacctacattacatgcacttccttggctaaatttacata

SEQ ID NO: 94701 - DNA, 256 bp, Glycine max
attaaagaagccttgatgatgacgaaggggatgactaaaagctcataggtcaagaacacttcatataaccacatgatgatctctacaatcacagaatgagttcatgattgattcacgaacacttcatggttcaagaggaaatttcatgttgagaatcatgttgcaagattaaagttgcctgaatcgagatcaagattcatgaatcaagagaagactcacttaagattagtattaaaaagttttttcaaaaattgag

SEQ ID NO: 94702 - DNA, 278 bp, Glycine max
ttgaatgctctattcactggagttgatttattttatcggggactgatcaacacatgctcagcggccaaggatgcatgggagatcctgaaaaccactcatgagagagcctcctgagtgaaaatgtgcaaattgcagctattggccacaaaaatctgaaatctgaagatgaaggatgaagaaggtattcatgactttcacatgaacattcttgaaattgacaatgcttgtactgcctggtgagagaggatgacagatgaaaagctgttgagaaagatcct

SEQ ID NO: 94703 - DNA, 300 bp, Glycine max
taacaagaggcatgccaagtggtttgtttttttagagcaattcccttatggtatctaacctaaaaaggggacatgtcattttgtagcccgacgctctttgtaggcgtcaaccattactttttatgcttgaaacacacatcaaagggctcgaatgttttaaaagcctgtctgaaaatgatgaaactttaggataattggttcaaccctgcgaaaaatgtttataaaaaggtttctttatacatgaatgctttcttttaagaaaaaacaaattgtgtgggcctaaatggtctacaataaaat

SEQ ID NO: 94704 - DNA, 280 bp, Glycine max
accacagaactcacattttcaaaaaaaaagcctctacaaatccggtaatcctataaacattcaattaatccttcaatcaacatcagccccattataattggcaaaaattacattcattttttttatcggcaaatgttagttttgttagcagaggggatggaaccagtgacctttccccctttccttctcatttaatcatcaaacccaccttatatttccacgaaaattacattcatagtccccgaacatgaacttaatcgtctaactagaagcttcattc

SEQ ID NO: 94705 - DNA, 308 bp, Glycine max
tcactgatctctttatgggttgaagcaatcttctctagcttggtttggtaaatttagtcatgttgttcaactttttggactgaaacgaagtgaagctgatcactctattttttactgtcatacatctcctggaaaatgtgtttatcttatggtttatgttgatgatatagtgattacaaggaatgatactactaagatcacccagctaaaagagtacttattcagtcatttccagaccaaaaatttgggatattttgaaaaatttccttggtattgaagtggctcaatcaggagatggtgttgtgatc

SEQ ID NO: 94706 - DNA, 319 bp, Glycine max
cttccagcttggtttaaattacattttttttggatctaagggttggaggtggatgccattcctggtttaaagagtaagggtccccacctgggtaaaaactaacctttccaaaattttgccttcacaggaaatggcccccgaagaaagcttggcctcaaagaagtccaggaaggacaaggcaaccgaaggaactagttccgctccggagtatgacagtcaccgctttaggagcgctgtacaccagcagcgcttcgaggccatcaagggatggtcgtttctccgggagcgacgcgttcagctcagggacgacgagtatact

SEQ ID NO: 94707 - DNA, 309 bp, Glycine max
tccttttagtgcgtcacatttaaagccgagctctatggtggtgcgagcctttgatggcactcggcgggaagtaatgggggaaatcgacattcccattcagataggccctcacacttgcaatgtggtgtttcaagtgatggatataaatcctgcctatagctgcctcttgggaagaccttggattcatgccctgggagtagtcccatcaacgcttcaccagaaattgaagtttgcagtggatggacttttagtgatagtgtcgggtgaagaggatatgttagtgagctgcccttcctccgcaccatacgt

SEQ ID NO: 94708 - DNA, 263 bp, Glycine max
tggaaagccctgaaccttttataccctttagaaatattaaaaccctggtgaaaaaaaaaggggggcctttatttccgtcggcctaccctaacaacaataagaagggtgggaagaaattccaatgtctcctttgaagttcaacaaattttttgcagagttaatgggtattagcagacaactcactgtggccttcactccccagcaaaatggagtagcggaacgtagaaatacaaccatcatgaatatggtcagaagcatgctat

SEQ ID NO: 94709 - DNA, 308 bp, Glycine max
tagcaggtgaagtaccatgaagagcaagagtttgtttggtacaaccaccttatcatcaaagtttacagcagaaagagaatatatgcgaaaatggtacccaaaaaagctactgttaaaaaactatacaaaaagtgaagaaaaaaaggagaatatcttcacatctcgatctacatatgcaacaccaaactcagagatctcctgagccaaaatccaccctccataaataatcaacaacaaaaaaaaagagaaggatcttttgggagggagagagagagagagagattgggaatgcaacagaaaaaagagtt

SEQ ID NO: 94710 - DNA, 224 bp, Glycine max
atggattaaaatagagaggttttaacttccgaaagaatttttttaccttaaaaaatttcttctacattatgaagcatgatgcacatatgaaaagatagatactaagatgcaacacacaatataacactttaatacatatgccattcaagagagtcggacatgtaaaagacaaaacttcttctttttccctcagaaacctcactgcaccttaacctattcttctc

SEQ ID NO: 94711 - DNA, 306 bp, Glycine max
taactacacacacccctttaagaactaagctttcctttttgagaagattcctagagaagctagagcttagctacacacacctttctaataactaggctcacctccttgagaagagaagctagagcttagctacacatcccctataatagctaagctcacccccatgctaaaatacctgaaaatacaaaaaaagtccctactgcaaggactactcaaaatgccttgaaatacaaggctaaaatcctatattactagaatggccaaaatacaagcccaaaaagaaggaaaaacctattctaacattta

SEQ ID NO: 94712 - DNA, 159 bp, Glycine max
ccaagttagattggggctagaagatccaaaggaaaaggccctacgggttcttcatgagcccttagggtaaatttctatccccatggggctaagtatgaaccccgctttatcttttgtaatattaaaaaatgttattccttcgtctaggccttggatttt

SEQ ID NO: 94713 - DNA, 322 bp, Glycine max
caaaccgagaggaacacggggccacaaagggcgaaaggtaagttgttgcaagaacagccaacagacaacaggaaggccgcgcaacacctgaacagagagaacgggacacagcccaaagcacagaaacacacaacggaaaccaaagggggaaaacacgacgcaacaaaacccacgaaaccaaaagtcgccaaccgggaaagaacccccccacgccgcaagaaaagacgaagcacgaccaagcgaaggcaccacagaccgcaggaacgggaaaaagaaggaccacgccaacgtgggccccgaaacagaaaagagcgcgccggac

SEQ ID NO: 94714 - DNA, 237 bp, Glycine max
  unsure (1)..(237): unsure at all n locations
nnnaaaaagaaaaggcaaagnccgaatttctgttacaaaccatcaaaacttaggggaaacaaatacatacctcgaggaaacgaaaacagccttttaaaatcaaagacgaaactggtaaaaccggcaagaaaaaaaatcgaggccggggaaccgaacacaacctcgggtaaccaagcagagagaaaataacacaatcttgaaatcacaaaaagctaccgaaaaatatcctttagccaa

SEQ ID NO: 94715 - DNA, 323 bp, Glycine max
ccccgggaccttaagtcacctgcggcatgcagctttgatttccctttaagttgtggatcatccttcctaagatggggcccaacccagtccccctcattaagaactagctcttttcttcctctatcgcctttagttgaatacacctttgtttgattctctatttggttcttaaccctctcatgcatctttctttacaaattctgacctagattccccttctttatgtataaaagaagtgtccagtgggaggggaatgaggtctaacggtgttaggggattgaacccatagacaacctcaaaaggggactgcttggtggttctat

SEQ ID NO: 94716 - DNA, 307 bp, Glycine max
tatgctgcaaacacttataaaagacctatttttcagttaaaaccaacaacaatagaataattatgacccttcaagcaataaacacaatccacgttggaggaatcatccaaatctgagattaacaagtcctccacaacaacatcagcctgtccctactttacaaaaagctactggctcaagcaagccatatgtccctcctccaatgcaacaacaacagtagcaggcacaacaaagacaacaagcaactgaggctcctcctcaaccttccttagaggatttagtgaggccaatgaccattcacaatatg

SEQ ID NO: 94717 - DNA, 238 bp, Glycine max
gggtttctaaaatctatgggtcctggtaaaaccttggcacaactggccttataaaaaggaaaatacccgtgtattttgaatggcaatcgccattattttttgtctttcagcctagatgcctagaagatttgataaatttctttctaattctgtgtcacagagattgtggggcagcctactttctttggtgagttttgggtcgaccaatgattaacatcaaatgggtgatccttttcac

SEQ ID NO: 94718 - DNA, 300 bp, Glycine max
tgcgaaatctataattttaatgatctttttttattatatgcattgtaagacatttttcgaaggatttactgatccttgttttgtttttaactaatggagcaggttatagagttccataaaaaagatggttttgaggtagcaagtgctgacaagatggctaaaccatgcatggtttattttgaaatgcatctatccctaaggaaaaaaataattacaaaagcttttaatggtagttatagtatctacaaggaaactttttgttaccaggactattgcctttttgtttgagtaactggacat

SEQ ID NO: 94719 - DNA, 292 bp, Glycine max
agctttgtaccacaatggaattttcctatcttaatagacttgaggggcctccagacagtccttaatattagcctataattttgaacttggtgataacgttctttaaaaaaaattcaaaaatacaacataataatcaaatcacaactgttaggtttgcaaatcaaagcatttcaccaagatgtcagtgattttttgaatcacatttgaacaaaacaacgactgatcttctgacctatgacttataccaagcatgcattcttaacacaagcctaatagtaatgtaatttcgttg

SEQ ID NO: 94720 - DNA, 303 bp, Glycine max
ttaaccattaaaaattaaatgccgattttatttttttgtaaagcgaatttttaaactaaaactgtactcctatttccgattagtttatttttataagaaaaaaactttttataaaatttttagaatgtttttaaaatattacccgtgaatcaagcatcctctcatattgggacaccaatagcaaattgggaagtcggaaccaacacgagcgtctcccctttccagataaaaagcgaaccaaacacccaaaagcctaaatatgcatatgaaacgaatcgtttcaacctttcttgatccccaagt

SEQ ID NO: 94721 - DNA, 237 bp, Glycine max
aaggaacaggcttaatttttctaaacagacagatgcgcagaagatacgacaccaaagagggacaagcccacaaaagggctacaacccaaagaaaagcgccagcatcaggaacagccagactctcccgagacaaacacaaaagaaacgagaaaaacggcacgaaaaaaaacagaacgcgcgcaacgcaccaaagaacgcaaaaccggacgccaagccaagaaacagaaccaaaaaggc

SEQ ID NO: 94722 - DNA, 277 bp, Glycine max
gtgacaaaaatgtttaattttttctcagcttttcaaagactactcacacattccatttgaatttttgtagtgtcctctaagctctgcacaaggaaaataggtcaagtaagcacaaaatctgaaatttagcaacaattctaaattaagctcaatcatttgccttacaccaaaactgagttaaagtgagaaaataagggtcaaagagatgtcaattgagcttataagaatagaaaaatattaaactacaaatgctcaatcaattatctcagaaagtaat

SEQ ID NO: 94723 - DNA, 303 bp, Glycine max
tcctagctcgacgacgtgaccttttttccctggtagctcagacgtgtagagctattgttggtaggtagcgcaggaagaagaagaaagtgtgaattcaagattttgaaaaaatgaaaaaacataaggatgtaaaccaaaaacgcagcgtaagaagaaaaaaaatgcaactaaccaaatgcaatttgaaaggaaaaaaaaaaataaccggtcgaaaatcatgaagctgacacttatgcggtttcacggttcttttattataaggtagtagatagtagacgagatgttttaagaacttgggactat

SEQ ID NO: 94724 - DNA, 253 bp, Glycine max
tccttgggcctcaatgacggcctttcatgggggatttcaaccatgggaatggcagcgaaaagataaaaggaaaagaagggggaggaggcaccatctactatggaataagccatggaaggagaaagcttcatcaccaagagagtgtcttgtataagaagcttagggaggaagctccaatggaggaaaagaatgagagagagaaaggggggagcacgacattgaaggagaaaagagagggagagaagttgaactt

SEQ ID NO: 94725 - DNA, 281 bp, Glycine max
tccatcaactttgcttgctttattggtgttgtagaaaaaaccatacggttttaggtcttagagacttaatttcttcttgttctttggtaagggagtattgtatcttcatcttcttccaccaatcttcatctcttaagctcatttttctcactactttcttgttttggtaaaaaaatggtggtttaggtgttgctacacactaaatgaagctttcttgatccacttctcattccatttccacttccaatccctacgtatggagaagattctactctttccca

SEQ ID NO: 94726 - DNA, 301 bp, Glycine max
ctggcatttccataatggtttttcaaacccaaccagtttggtttggttttccttcctttttttggacctttcattttaaatgaaataatggtccccacatagaaaaaatttttccgacctgttccctgtttgggatataagaaagaaagaaagttagttaagatagttagactattaatatgttagttattactgttaggatattgattagttagttaaggggttagttagttagggatatttcttttctttctcatttcaattgttggttcctaacagttcctaactcttggactctggt

SEQ ID NO: 94727 - DNA, 308 bp, Glycine max
cttggcaaattaagggtttacgagggaaagattttatttaggcctgaaaaaaggcaaattggttacttggtttgataaatcttgggaaaggaagcctggggaaaatgaaaggaataaaaagggaggagaaacccatgttgtggttgccattcctacatggccaaatttcccattagcccaacaatatcaatactcagccaatatcagtccttctcattacccatcacccaaccagccaagaatgcccaatcatccacaaaggccacccccaaatcagccacaaaatccacccaatgcacatccaagtc

SEQ ID NO: 94728 - DNA, 271 bp, Glycine max
tatttatggttaaggagtggaaataccttagatatgcattgttgtaacaaaaaaatacttcacgaaatatatatatgtatggttaaggaaaaagaaaccttggatatgcatggttgtagcaaaaatacttcacaaaatatatatatgtatgtttaggtagcaatataccttggatatgcatgtatgtagcaaaaagatatctcacaatatatatatatatatatgtatgtttaggtagcaagataccttggacacgcatgtatatagcaaa

SEQ ID NO: 94729 - DNA, 307 bp, Glycine max
tgagatgagaaagtgtagaagggtgaaactttctgcttttattcgttgaccacagagtggtacctggagatatgtcgcgggggtcaagagaccttggggacgtcaggtggggtgctattgcccaaaaccaagcttgaccaatcccgacccaacccggacatagtcagtcagtgagaacctgtgatgtacctaaacaggcgagctcctggcagtcaacagataaaaggaacaaagaccacaaagcaaggaggcttgtgtggtggctggccagctgtgaactttgattgatatatgggatatgggctct

SEQ ID NO: 94730 - DNA, 303 bp, Glycine max
ttccaaccttggtccttttaataaatttaaaggtcttgacctcttaccgtatcttaaaatcctggggggggatccaagtgcttccaacaatccttttgctactcctgtttgggggccttactcaccgtggtcaattctttaagaaatcccatcctacctaagaaacacccaaggcccccccttataaccacttcgatcccagaaaaaatggataatgaaaaagggcgtgcacgaacagaatgaagccgatctatcggccttaaaagatcaaatggcttccatctcggaggtcatgttaaaact

SEQ ID NO: 94731 - DNA, 309 bp, Glycine max
ttggaaaatgatttctatacaaaagttagtctgtatgaagcgactaatagtgggtaatgagaaagactgatattggttgagtattgatattattaggctaatgggaaatttggccatgtaggaatggcatccacaacatgggtttctccctccttcttattccctccatttggcccagggttcctatcaccagaattcatcgaagcagcgtaatcaaatctgccttttcttaggcctacttcgatcttttcgccgacaaaaactaaatcggcaaagcttgaaggcgtgtaacccaccatcttctcatag

SEQ ID NO: 94732 - DNA, 268 bp, Glycine max
tttttgggtaaaaaaaaggtttggcttcatgggatcaaaagggtttggacccttggaattctaaaccttctttccaaaaaaaaaagaagtaaaatatgagaaaaatggggccacacatgagacccttcaaaatatcatttttatagccacaaaacataaataatcaattactcgatagagataatcaatttatttgttcttcgcatcacctgggcaacatgaagaacacataagcaattatattatcatttaatcgattaagtgcaat

SEQ ID NO: 94733 - DNA, 306 bp, Glycine max
tctggtgggacatcttgacttgctttccaatctgacattcaccacagattctgccttcttctattttcagattgggaatgcctctaacagcacctttgtcaatgattttcttcatgcctcttaagtgcagatgtccaaatctttgatgccatattctgacttcatcttctttggaggatagacatgtggaggagtaactggtttcttgaggtgtccataggtagcagttgtcctttgatctgctgcccttcattagaacttcactcttctcatttgtcactaagcattctgactttgtgaagttta

SEQ ID NO: 94734 - DNA, 318 bp, Glycine max
tctttcttttttttctttcccaacttttttcactttctttttctctttccctttaacttacagaaattaatacttgtaattattttttcgaatttaattccctttgggtttacgggcggtaaaattaacaaatagcgggttcccttagaaataccataatctaacctgttttccgatgaaagccagaccctttccttaataatgtaatcacatcacagctcgccgtattggggtttttgggaatatgccttggaataattgaattatattattattattattattaatttattataagctaaagtaattaattagtag

SEQ ID NO: 94735 - DNA, 309 bp, Glycine max
tattaattcgtcatgatgaattaaacaaattttgtttcttaactcccttttcaatttgagatttatttacctgagaaaaaaaaattgaacttttatatcttgcatcttggctttttttaccattttaaaactgttagtggatgtgcaaatatgtgaaaatatgcataaatgaagccacatgtaaagttgtgaagagttgtaaataaagaagttgtgcaggtagcattcatgtatatacaaccttatttccattaaggtacggggaataccagggataagataaacaaagcaatatggatttaaattagt

SEQ ID NO: 94736 - DNA, 293 bp, Glycine max
  unsure (1)..(293): unsure at all n locations
cagttttttttggnggaaatttcatttgaagaacaatcaacaaaaaataaagttgatttccttaacctggactaccactggcaagaataaaggacttgcattctaaaggattatgggtattgggaggaaatcaataacgtaacatcatcaaaattcattctattttatgggaaacttacgtgaatagatttttctttctgatagctcctattatgcttacattttttttgttcacactaaccaagtaaacattgtaggagaacgtgtataactatcaccaaattattagatta

SEQ ID NO: 94737 - DNA, 301 bp, Glycine max
ttaaaatttaaattcagatttctaatttgtttcttaaaacatttaaaacttctggtaatcgattacaggccttgtgtaatcgattacaggctttaaattttaaattcaaaatttgcaaatttgtttcagaaatgaatttggccactggtaacgattacatcccctggtaatcgattactagagagaaaataccatatatttgaaatcgcaaaatgcttttgtaaaatatcctttgatcaaacctgggcatcatcaattaaggaatgctttctaaaattctagggactaagttcatcatttt

SEQ ID NO: 94738 - DNA, 251 bp, Glycine max
gccaaatatgggttaccttctcttgtaccccatcgacttattggagggtgtacagaaatcattgaaacagttgatccacaaaaactaatgatgaatctaacacttgctgtctgggaaatttcattcaacatgttcaagatatggatgcttctcggcttattgaatctattaagcgagatgaatttggcctatattcaagtctttctgatattgatagttgcatgttgaagaaacaacatgctcggttaggt

SEQ ID NO: 94739 - DNA, 303 bp, Glycine max
tgtacctctcccctccccctccctcttcattttctgttcaaattctctgtagtctaaatgaattactatgatgcacaaggtgagaactgagaactgcacccccaatctggcagcaccaagcatgcaacttgtgacagatgttccccttccaatcagtaagaaaatcaagacaatcagtcgacacgagtcaccatccaaatagtttttaagatagcaaccaatcaatcactcgctactcgctgtcagtgtgcaagtaacaaaagaatgcatcaagaaatttggaatcattttctggcccatgat

SEQ ID NO: 94740 - DNA, 292 bp, Glycine max
  unsure (1)..(292): unsure at all n locations
cagctttgtttgangtacttatttttttgagattgaagaaaacgaagaaccgcccgataaatggtgaaaaacggttgagaatcttcccgtaattactcacggaaacgttacggaagcacctcggcttgaattttcttcatgaaaataattttcctgcancaatttctagaagaatgagcaatgccaagaaggctgaacccttttcttcttcactcctccccctatttatagcaaaatatgggaggaggttgccccccagctcgcccaggcgagcctaacttgtccaggcgag

SEQ ID NO: 94741 - DNA, 303 bp, Glycine max
tcaacatcagaccacttccagggtgctttttctatcatcacatggatttgatggggcctatgcaggttgaaagccttggaggaaagaggtatgcctatgttggtgtggatgatttctccagatttacctgggtcaactttatcagagagaaatcagacacctctgcaactgtcaagcacttccacatctttggaagtccatgttacattttggcagatagagagcaaaggagaaagatggatcccaagagtgatgcaggaatattcctgggatactctacaaacagcagagcatatagagtat

SEQ ID NO: 94742 - DNA, 263 bp, Glycine max
aaaaaccttcatctgacttagcataaaatttccctaagtatccttttcattattcaatacaaaacatttacaaccaaagatataaagatgtgagatgtttggttttctgccattgaacaattcatatggagttttctttaaaatgggtcttattaaagccctatttaaaatgtaacatgccgtgttaacggttttagcccaaaagtattttggaagaggagtctcatttaataaagttctaacaatctctttcaaagatctat

SEQ ID NO: 94743 - DNA, 302 bp, Glycine max
tcaaaccacagcaacacaaaatctatgtgttttttacccctcaattcaatggcttttctaggtttgaaaggtggaattaaaatgaagtaaatttggagcaaattcttacctcacacaagtctataacatcaatctaaacttgctcaaactggatttacacctaaatttccaccgaatcaaaatttgactcctcaacacccaattttgccctagaaatggctcttggttcactttggtcatttgtttttctctctaactcagcctaacctttctcacatgtcctaaatgacatttcaagctag

SEQ ID NO: 94744 - DNA, 308 bp, Glycine max
  unsure (1)..(308): unsure at all n locations
tgatggtattctaagcctcacatcttatgctttgcgcatattgcagaaaattttgtgttgtagaaagcactaagtgcaacctgctgcgctaagccccagatgctcactagactntacaacttcaagatgggcttatcgcgaggctaggctaagcacttgggttttaaactcaaatgtcatgtgggcacgctaagcgtaactgtgcgcatagggggccatacgaattttagtttttaaaaatcaaaggcaaaggcactttgggtgctaccttttgacctaaacctctacacctttctagccttgagcaa

SEQ ID NO: 94745 - DNA, 283 bp, Glycine max
agctttggaagtggcgtaccctccattttccatagtaaaaaactggtgatgtgtctaatatcattggcatcggttttttgtcattgaggtgccactttgaacttccaggttcttcacctttgggcgtattctttgaaagatttgtgcccccctttttgcacatgtgctgtagttgcatcctatccgaagacattatactgacactgcctaacgaaagaaaccactaggtccttccaagaatggactcgggaaggttccaagttagtgtaccaggtaacagcta

SEQ ID NO: 94746 - DNA, 298 bp, Glycine max
tctggtgggacatcttgacttgtttttcaatctgacattcaccacagattctgccttcttctattttcagattgggaatgcctctaacagcacctttgtcaatgattttcttcatgcctcttaagtgcagatgtccaaatctttgatgccatattttgacttcatcttctttggaggatagacatgtggaggagtaactggtttcttgaggtgtccataggtaacagatgtcctttgatctgctgcccttcattacaacttcactcttctcatttgtcaccaagcattctgactttgt

SEQ ID NO: 94747 - DNA, 215 bp, Glycine max
cttcttccccgttccaagcttaaattggagtctgtcttttatagacttagttggacatctgttgaatatgtaaaaccagtagtggtagactgctttcagccccagaatgtgttaggtagtcccttttccttgagcatcgatctagccatctctataactgtgggattctttctcttggacactccattttgttgaggagaatatgcgactgtaag

SEQ ID NO: 94748 - DNA, 301 bp, Glycine max
tgaccgaacagttgagtagggcgtttgtattttatgtggacaatcattgaccagtaagagaagctaaatctagctgctagccatgagcaaagactagaggacgagcatgcaaaagtatcggctctgcaagtagaaagggaagcaagagagagagtgatagattcattacacggagaagctatgatgtggatggataggttttctttcactctgaataggagtcaagagctttcaaggctgttagccaaagccaaggcaatggcggacgtgtactcaactcccgaggaagttcatgggcttt

SEQ ID NO: 94749 - DNA, 212 bp, Glycine max
ttttaaggtggtaaaattccagttttgagccaagtttaaattgatgttatggacttgtgtgacgggagagttttgctttaaaattacctcattctaaatttcactttttcaaacctaagaaaaccccattgaattgaggggtgttggacacctaaattctgtgttgctgtgctttaaagcttgaatttgggttagacatgattgatacatga

SEQ ID NO: 94750 - DNA, 331 bp, Glycine max
agggaccacataaattcctcaacctaatgcccatatttccttacaaacgttcacttttccaaaaacatccaataaccaaaaaaaaaggccccatttacaatcaaaggaacttcattacctaaaatatttacatggactttcaaagtggatttggtatttacatcacacacgcctccttggctaaatttacatacatgcatactcaaagcatttcggggtaccaaaaattgcacatgcgctcatcttggtatttctaatacctatacatatacaaacttcatgatgaatcttgactacctacgcaataaggtgctacatttcatgctctttt

SEQ ID NO: 94751 - DNA, 233 bp, Glycine max
ccctaagggctgcaaacctcgtcaatcccgggggtatggcttttgaaaggggggaaaaaaaatttttgaaatgttaaaacgccccccttttgtcattcttataatttggtgcaggggtggctcgcccaggcgaacccagctcgcccaagcgagctaacctgcacatttttttatttttttcttgaggggaaaattaaccatgtcccctcccttctcatggattaccatcttgc

SEQ ID NO: 94752 - DNA, 306 bp, Glycine max
  unsure (1)..(306): unsure at all n locations
tgaattctaagagagcacaaatcctagacttttcctttttgntgatncaatccacttagctcactcactagcctttcacttgactttgttctaacaaaacacacacttatttgaactcctctccccccccccccggcgtggcccattttttaacacataaaacattttattaatttgttgtgcgtgttgttgtttcttacctttaaaattaaccacctaacaaactcccccaaaattaggacaaatttgtcttaaaccaatgggctctcctaaaacctaagcaaggtaaatggagatgacaattca

SEQ ID NO: 94753 - DNA, 298 bp, Glycine max
ttaaactttattttttttttaaacttagtttaatcccaccaaaagggtttgggggagaaaccttatttaaagtaagctaaacctaagaaggctggctattatgaacccagtcccacaataaggaatctgaagaaaaacttggaaggattattccaaatggggaacgaagtttataatttaggctaccacataaaacacaaaagcctgattgattagagaaacatccttatatgcatcagctggtctgctagaaagacccaacacttctacctattgctatcaattttacttacttaca

SEQ ID NO: 94754 - DNA, 309 bp, Glycine max
tgtcagttataataataccgtgttgagacatttttactaacaatataccataataacaaggttttttttccaaacatcagtcacttggaagatatttctagtgcaatcaaatagggtcaaaagtcacaacaacaataatctctcaaccaaaacatcaagataaaacaataggataatgcataataattttaagataaaagcttctcataaactagatacttaagtcaagagtggatcccgtcatgcagtatgtagtaaattccaattaacactaggtggatttattaaacatcatcatacattctgttt

SEQ ID NO: 94755 - DNA, 305 bp, Glycine max
tttcaatgggaatcactcaatctaatctttttttcctaacaaggtgcccagtgggcaaaggtttgattttttaattgggggggaaccctggaatacccacccaaaaaaacgttggaaaaattaaaggctgctttcaaagtaccaaaaactttgtgcgggaaaataggcatattttttgtgtttgtatatttgatttttttttaaacactcaagctctaatggcctatcttcctgttcctgcctatcttctaatgtgaggtctgctaacacacttaaatacaaaagagaacactacaacaccttga

SEQ ID NO: 94756 - DNA, 307 bp, Glycine max
ttttggagtaaaaacatgggaccaactcattttatttcaaaaagaaatcatatctaatcaaaggctgaaagacccatcaagttcctaacgatttctaattatgggggcccttaaatctattatatgctgacaataacccgaaaacccatgaatctctttcggggcggaataagtgtctgccatcgccttggccttggctaacaatcggggaagttcttgactcccgttcaaggtaagggcaaaccgatccatccacatggttgcctcttggtgtaaagagtcgatcacccttcctctagcctctttt

SEQ ID NO: 94757 - DNA, 281 bp, Glycine max
ccgcatccgccctatttatgattgaataccattctttcttacgcaggaataagacaactctgacatggctcccgaccggacttagcttgcaaacatgattaaacgggaaaggctagtcctttaaaaaatacgcttatcgttggagggaccaggcaaaacaagtagcccctcccatggtcgagagggaaatggttactatgatggtggataccttgcctgtatttgactatgagaaattagtgggctacatgcctttcaacttaccggacttggtcttcgcc

SEQ ID NO: 94758 - DNA, 310 bp, Glycine max
tctggtgggacatcttgacttgctttccaatttgatattcaccacagattctgccttcttctattttcaaattgggaatgcctctaacagcacctttgtcaatgatattcttcatgcctcttaagtgcagatgtccaaatctttgatgccatattttgacttcatcttctttggaggatggacatgtggaggagtaactggtttcttgaggtgtccataggtggcagttgtcctttgatctgctgcccttcattagaacttcattcttctcatttggcaccaagcattctgactttgtgaagtttacatc

SEQ ID NO: 94759 - DNA, 262 bp, Glycine max
tttggcaaaaatggttgcgccttgattggtaaatctgttcccccaatccctaaaaatgtaggatctaagtacattttcataccttgtattataaggaaacaataaatttgacaatgccatgctaaatttaggagcttctgttagtgttatgccagataaatttagaggatggtgctaaaccagttagacagccacaaagaagactcaacccgatgattcttgatgtagtgaaaaaagaggtaaccaaaattttgcaagttgg

SEQ ID NO: 94760 - DNA, 304 bp, Glycine max
tctctttcttttccctataaataggggttggttggaagaacaaaaatgttcaaccctcctggtaattgagaatcacttaaaattagtgagaaaaattgtttccgtgaagagaatccaagctgaggcgcttccgtaacacttccgaaacgtttccgtgggtgatttcgcgaagattttctgccgttcttcgtcgttcttcgtcattcttcggtcttcaaccagtaagttcccgaaattgaacttttcaattcattctatgtacccttagtggtccccatttgtttcgcatgcttttatttttatt

SEQ ID NO: 94761 - DNA, 257 bp, Glycine max
ggtgggccaaaaatttttaacttggaacggctaatatgctggttacaggcttaacttcttatgaatataataatgatggcaaccaaaaaataagcccaccttgatacgtttctcagcatgaagaccctgagtggctttaactcagaaagtctccatttgaagaacttctgaccccaattatgtagcacgttgacaggtgtgactataagcacagttcttaaccccaaatcaacacatctcattgcagtgtacaaaaa

SEQ ID NO: 94762 - DNA, 304 bp, Glycine max
tcaggagacgagttcacagtatcgccttagtttcttctccgacttagctttggtgatttcggccgtgtcagtggcagctgtcactcaccaaaccaaattcaatgagtcatttttccaatcaaaaagaaaaaaactcttcaatattggaaagaaccaaaaatgatgttatgcatgacaacaaatgcataccttctttagttcggtcttagggggaggcccttcatagtaaaaacttggtactggatttgctttaattaccaagttctttctcaactgcttgatggctgcttcttgctcttcctat

SEQ ID NO: 94763 - DNA, 319 bp, Glycine max
ccgggatcttaagcgacggggctgcagctttttttgcatcagaatttgtgccaagtctggacacgtcggggtccactttatcttaaaacgcatgtatttcacaatggccttgcaattctgacaacacatgcatcatacatgcccaatttattttaattgcaccaggtaatttattcttaaaggcccaggttaataataattaatgatagacgaatgacaataatttatatcacattaaaattaaataaacaagtgtcactgtccataaataagtataccaaataaataaaatatccaaaataaattaatataccaaaat

SEQ ID NO: 94764 - DNA, 304 bp, Glycine max
tgcttctacaaaacgggtcaatccggttcttcctgttaagcaaaacgggctacctttcctagcttagcccgtttcaagttagcccgcgggccacccaccaatttatttttatttttttccaaatttttgtattgtcctttatcgctgttggtaacatcaatttagcattgtcctttatcgttgttgataacatcaattttgaatctaactcttgtctctttataagtttttataactaaaaataataatatactagtagtaagcaataaaagaataaaacctatcacaaacttcaatatctaga

SEQ ID NO: 94765 - DNA, 295 bp, Glycine max
agctttataaatttcatatgtattatagcctacaaaaaaaggtttaagagtcatcattttccacaatgccagaactttatctcattacaaaagaacataagaaaaccactttctaaggtttttaataaaatctcacaaacaaaaaattactaagagaaaacatcgttggaaagagaaaaaaaaatcttgttaatattaatttaatctataggttatttaaaaaaatgtgttcggtgtccaggcaatgtctccgctgtgtccaagcataaaagaaaaaaaaaatggacactgcaaa

SEQ ID NO: 94766 - DNA, 305 bp, Glycine max
tgcaggagaaacctataatcaacaccttatgtttagagttctgagtgacgctttaaaaaaaaagaggtatacaaatcataagcttcaagtaatcaggggtcttgtctccctgcatacataaatcataccacaagtttacaacgtctccataacaataccacttacagattaatttggcttgacagtctatattccatctaaatgttcacaatcacattaagcctttaagttaatgaacaagaaactatcacccatcccctgcccatcccaacggacttaccaacattattttttaacctgcatat

SEQ ID NO: 94767 - DNA, 292 bp, Glycine max
agcttatgaacttacaagtactataaagaaaaaatttcatgaaccaaagttgaaaagacacaaacttataaggaccaatttcatatttaagcctaaattatttatttcatatcctttaatttatccaaatataccgttaagcaaaagaaaagtccaaaataaattaatttttttaaaggaaaaatatgttaggttagaaaaaggatgaggtctactagggtttagtgatcttaaggtttttatgcggcctacacgtagccatgttagaacctttgattccatggagcttttt

SEQ ID NO: 94768 - DNA, 305 bp, Glycine max
  unsure (1)..(305): unsure at all n locations
tccaagcctgaatagtggnttatagagttgttgttgacaagccccaatttgtaggttttgcgatgaactcactaagcgagccagccttgctaagtgagttcatccattttgatgaatttctgggtttcaagatgaactcgctaagcgtgctctactccactaagcgagttcatcaaatttgtttaaatttctgcattttgtatgaactcgctaagccactacactacggcttagagagtctttgaattttgcttttatatttatgggtttgtatgaactcgctaagccgaccatccgcacatagg

SEQ ID NO: 94769 - DNA, 262 bp, Glycine max
accttggattggtcctatttgtttgcaatctgctgcagcataatggttgatacttaaagcaaaaagactattttcttttctctcttggtaatcacattttgtattattaacaatgaaggaaaaactcctctcagtatttcctgagcattttagttctcccctctatccttgcagaagaatggatcttattggtgcaaatgcattttaattctgcagaaaaaagaaagagtgtaatttcgaatgtatttgttttacaagactg

SEQ ID NO: 94770 - DNA, 301 bp, Glycine max
tcagaattaaatccttggcttgttttttctttaccattaactcgttcactcctaaaggttaaagttgtttggttatggccatttatgacaacatgatgatatttggatcattgtgccgaatgactaaatatattaaaattgtaatgtttttttgggttacacaaatatttcttatcacggtatttacaagttgttttttattcctataattcattttcaagaaaaaagttgaagtgggtccaagctgcaaaagttttccttttttcactatgcatttggcttctgctttttggatggattt

SEQ ID NO: 94771 - DNA, 287 bp, Glycine max
tctatataagctgaaccatcttatctttttttacaagaggaggatcattcagaaaattcgagatcatctcttgtatcttagcgagagtgattctcctaaattctcgagtgattcaagaacaccctgactgttttaaaggactttcacaaccttggtgtgccgccctcactggaaagagggattcttttcttacgttcatctacacccttgttctttcaaaccacaattcccaaaaattcacctctgaccataattatctcgaggccttaactcccattttacgcact

SEQ ID NO: 94772 - DNA, 309 bp, Glycine max
  unsure (1)..(309): unsure at all n locations
agcctgggggttggcggtcccttgtcagaagggggggttagaagggacctatggaaccggcttaaaaactatagtagaataagaatcttttgctattttttaaggaaaaaaaaagtcatggtggctggatagataaagccagttttggatccctattctctaggcatgatctgttagtggtgttatctttttgttagcagttactatattttccatgtttttaaatatgttgcttcatatcagaataaaacaagcttttgcagnctcaatttctttctttatgctccctttcattctttaatatttatg

SEQ ID NO: 94773 - DNA, 309 bp, Glycine max
ccttaatctttggggttaaataatatacataacttatccttggtgcatcatcaattaaaggtacaagaaattttttatgacctaatgatggagtagcatgcaaatcacacaaatcactatgaataaagtctaagactttagtctcacttttaacatccttaaaaggtttcctagtgatcttggtcaacatgcaagttttgcatttttcaatgttcatatcaaaaggaggaatcatacttgtttttgacatatcttttaatcttttgtaatgaacatgtcctaatctagcatgccaaatttctgattttg

SEQ ID NO: 94774 - DNA, 260 bp, Glycine max
aaacggaatcaaaaaatgcgaaaaagggagaccctaaggctgcaaatttcgtcaaatcccgggggtatggcttttgaaaagggggaaaaaaagtttttgaatgtaaaaacgccccccctttcgtcatttttataatttggtgcaggggtggctcgcccaagcgagctaacctgcacttttttttttttttttttttttgaggggaacattaaccatgtcccctccccttctatggaataacaatttgcctaacttgaact

SEQ ID NO: 94775 - DNA, 302 bp, Glycine max
tgagatgaggaagtgttgaacggtgaaacttcctgtttttattgatgaccacaaaggggtacctgtagatatgtcgcgggggtcaagaaaccttggggacctcaggtggggtgctattgcccaaaaccaagcttgaccaatcccgacccaacccgggcatattcggtcagtgagaacctgtgatgtacctaagcaggcgagctcctggcagtcaacagataaaaggaaaacaagaccacaaagcatggaggcttgtggtggctggccacctgtgaaacttgattgatatgtgagatatggtc

SEQ ID NO: 94776 - DNA, 310 bp, Glycine max
tgggatgacatcatttgactatcaaataaatttctttgttatataataagctgctttcagtttattccgctaaatactctacataatggttgaatatgtgcctcctttaattttttgtattatgatgatactaactaaccacaaatatcgtagtcaaacgcaaaatatatatatttatatatatatatatatgtataaatataaagggctagacaatgtaatataatgtctttgacgtgtaaataataccttctgccgattgcactaactaagtggagctaacttcaactacaatcacttttgacattta

SEQ ID NO: 94777 - DNA, 312 bp, Glycine max
gcagctttatgggcctaccaatttttttttgttggaccattttatattaaatattaaaaattaaaaagaaaattttggacaggttataaagtatatgggtggtatttggatgcctaaaacttaaagagtcactagagagggtctctctctctatctctctcccgccattgaagtaaagtaactatctatcgttctgagaatgagaatcaacgcattctgtgtctccgcctctgcttctatatattctccttttcctaatccacatgtactttttcggtttttccattcttctgttatgtatttacacttaat

SEQ ID NO: 94778 - DNA, 329 bp, Glycine max
ggataaatacccagccttgcttcgaaacctctttttggaagaaccgcttcattcttattggcggccattgcgccagaatcctcggcgaacaataaggatgctggttgggggccgccttgaaaaggccctaaattttaaaaaaaagagtggcacattgcaaaaacagctgatgaatgcgagatttggtgggaatatgagtccaacttcaaggtcgatatctagatttgtcaatgaagccaaggagggaggggaaatagaagaggagataattgatgttactagggatgatgttttactacagcttaagaatggtgatgccgaggaatttg

SEQ ID NO: 94779 - DNA, 288 bp, Glycine max
agcttttgcatgtttaaagatttttagagaaaaaaagggtcaagttcttgaaaagggtgaaaacttttgctgtgtgaaaaatggcacaaaactgaacttgaagaggaagcccatctgagagcatgacatgagtttgggagtgattgtgacgttctagaggtggaggagacatccccactacttgtatttattcaatacttcatttttctcttctatttgttggaaagaaaggttccatgataaggagagctaaatcccagataggctcttccttgtacgtatttgatg

SEQ ID NO: 94780 - DNA, 265 bp, Glycine max
aatttggggggttgagggcttctcaaacacccctgaacatttcgcggttcgcttttggggagagattttctcccaaaatggggcgggcgccccccggtggggtactttttcataaaagggggggggggaaaaaggcctctgcgataagcattgtttacctagggtaatataaggggcctgaaattcctcaccaagtgtgaatgattggctccccaaatgaaaggatgaaaccctggaatgccctttttgaatgcaaaatgtgtgc

SEQ ID NO: 94781 - DNA, 279 bp, Glycine max
aattaccacaatttcctttacaaaccactaccctaaaacaataacctagtagaactacccattatagctcccaagaacccgacacccacagatttcaagtgagaagaagtccacccttacctgaaattgaaggtcccacgaggtagaggtaggctcctagactccaaaaatagctatatcttgcaatttggtgtagaaatgaaaaggaatttggagcttcaagagagacaacaatggtggagaagaaaagggagaatgcaacgtggaggaagaaagaga

SEQ ID NO: 94782 - DNA, 300 bp, Glycine max
tgcttggtagatgatcagggctctaactagttacccttcatccatgctaatgacttgagtttccctactcgttgtggggtgaggcttggcagactccctggtgggaggatagggtgtcacttttaagctttcagcgtagcactattgtgcctacttttgatctaccttgacagtcataatctctcctattaaggtggggaacttcatctttagatgcgtggtggagacgaaggctctgagctcgttgagcgtttttctaccaatcatagcaaaatacaaggtatttgtgttaaccattaa

SEQ ID NO: 94783 - DNA, 297 bp, Glycine max
tgtactgcgcaaattcgaaaaacttatgtgttcttgtggtcaatgccaattatgagattaactttttagattatgtataaaaacctgatccgcaggaaaaagagaagatacttcatcaatatctctctctaaatgactcctttatttcatcaattcgtattaattagaaaaagaactccatttgtagggttcacgctcaacacactagcatatcactttcatatcaagtggtctgtccaacatatataattgattgtgataattataacgataaaatgaaaattgcaaaaacacttc

SEQ ID NO: 94784 - DNA, 290 bp, Glycine max
ttcatgttcaatttcgtttgtctcgaaatcttatgggcgggaatcggatatccgagtgaaaaggtatagccctttgatttctaagagcttaggtggttaatttagagggcctcgatatatcatgggcgtcgatcatacatttgagtccaaggttatggcagttttgaatttgcccaagagcttttgggttcaatttcgagggactcgatatatgatgcacgtgaatcggacatccgagtgaaaagttatagccatttgaatatctcacgagcttctgttgttcaattttg

SEQ ID NO: 94785 - DNA, 304 bp, Glycine max
tgttgtgcaccatcgcccgaccgccatctatttctacatgtgatgggtaccccataatcctacaagcttgagatgaggaagtgttgaagggtgaaacttcctgcttttattgttgaccacagagtggtacctggagatatgtcgcgggggtcaagagaccttggggacgtcaggtggggtgctattgcccaaaaccaagcttgaccaatcccgacccaacccgggcatagtcggtcagtgagaacatgtgacgtacctaagcaggcgagctcctggcagtcaacagataaaaggaaaacaagac

SEQ ID NO: 94786 - DNA, 301 bp, Glycine max
tcgggctgttcgatcgctccagggtgctgtttgtacaggctgacgtacatatgctggccaacgaaggagcacggaccacaaacggatgcgacatgtactaacttcttattttgagcccacttggttactaaaagaaccaatgcatccagttagccttaaaccttcttagatacagacgacgcagatgggtttgttaatacctcacgctctgctgtaatgactatggcttaatggccggcactaaaatgccgggagtggtaagccaaatcttcactcaattatcctgcttgagcacgagaca

SEQ ID NO: 94787 - DNA, 301 bp, Glycine max
agcttaattctataataactttgtgtaaaagcggagaagcaataccactttgtaaaaggactaccgacttacgacgtatgatcaaccgcaacctgtaattccaccatataataggtatacatatatatggcaaaaagtaaaaatattgcgaaaaggaactttatttatcacttaccattcttctgattcgtggaagattcatcatgccctgttggataagacctatttaactgtgctataaaaataatattcggacgcctatcaatgatacacactagtgatgcatataatctatctctaa

SEQ ID NO: 94788 - DNA, 305 bp, Glycine max
tggagatgatgcttcaatggagggaaagaatttgagaaggggggagcaccaaagtgacggaattatagagggagagaaggggtactttgaagtgcgtctcatacgactttcattgatcaaagttaccacacgtgtgacacatgcttctatctatcgactacgtagcctcctcgagaagctttcttgagaaaacttccttagcacgcttctttgagaaaacttccttgagaagctagagcttaactacacacatccctgtgataactaagctcacctccttgagaagcttccttaagaagattcct

SEQ ID NO: 94789 - DNA, 260 bp, Glycine max
aatttttcaatattcccacaagtaacttgtgaatgtttttcctatcccaagctggggtaaaaggagttatcaataatttataagcagacttaagtggtatacaccccactaaggtcagctttccataatatggcatctttaacatatctctgaatgtacatggaattgacctcctccataaaattcacagcttgaacactctcataatcaaacagattcctccgccacttgaaattccaactccacctgtcttggtcaaa

SEQ ID NO: 94790 - DNA, 300 bp, Glycine max
taataaaaggtatgccaagtgggtggatcttctttagcaattcccttatgttatcaaacataaaaagggaaaaggttatattgtggctgatgctctttctcgccgtcatgcactactttctatgcttgaaacaaaattgattggtcttgaatgtttgaaaagaatgtatgaaagtgatgaaacttttggtgaaatttttaaaaattgtgaaattttttcagaaaatggtttctttagacatgaaggctgtcttttcaaagaaaacaaattgtgtgtgcctaaatgttctacaagaaactt

SEQ ID NO: 94791 - DNA, 290 bp, Glycine max
cggatcttaagcacctgagctgcagcttttgtttcttggctttgaaaaaataacggaatcaaacattgtaggggcgttgggcctgctgcaatataaaggaaatgagaaatgaggcttatgatgggcgaaaatgacttccacattctaataatatctgccttgagcttgatgtatgataagccatatatagtgatctgccttgttatcatgggctatgatgtttgcctatttaaaaaatgaataagctgcgaaaccaattggagaaagtcaagactcttactcaagatctt

SEQ ID NO: 94792 - DNA, 480 bp, Glycine max
  unsure (1)..(480): unsure at all n locations
agaagctgatacaattaattaaattgataatagtatattctgtgcaaatgaaagcactagtttctagatctcgcagaccacatgtcctatagaatgtacgtttataaataaagntctttatttaccgcattattaatattaaattgatataaatttactgtattattaaccgaggcttaacgcgtgcttaaattaataattattttaatagaaataataatctttaaaggaactgttgaaaatacttattaaaagaccacacatatatgtctatttgaaggagcttaattctgtaataaactaacagttttttaattattcggaattttaaaccaaacatgtcataagtacaagtttaactaagttcatatcatttattaagatattgacttgaaatcttacaaataaaaaaacattattagaagagagnaattattacaattggtcaattaaatnttctaacaaagaataattattaat

SEQ ID NO: 94793 - DNA, 396 bp, Glycine max
ctaagctgagataggaagtgtgaagggtgaaacttcctgcttttattgttgaccacatagtggtacctggagatatgtcgcgggggtcacgagaccttggggacgtcatgtggggtgctattgcccaaaaccaagcttgaccaatcccgacccaacccgggcatagtcggtcagtgagaacctgtgatgtacctaaacaggcgagctcctggcagtcaacagataataggaacaaagaccacatagcaaggaggcttgtggtggctggccagctgtgaactatgattgatatgtgggttatggcctctggtaatcgaataccaagggtgggtaatcgattacaaggcttaaaaatgaagacaagaggctaagatggtctctggtaatcgaatacca

SEQ ID NO: 94794 - DNA, 475 bp, Glycine max
  unsure (1)..(475): unsure at all n locations
tcatacctctgacanagaagaagacaaagtaaagaaggtgtgtctccaaactctaagaagtgagctcaaatccttacatatgaaagagtcaaagtccattnttgactatttttcaagaattctcactatttcaaatcaactaaaaaaaatggtgagaagttagaagatgtaagaattatggagaagatactacactcatgagatcccaaatttgagcacattgttgtgacaatagaggaaaccaaatatttagaaactatgacgatggaacaacttcaaggatcactacaagcttattatgagaagaataagaagaagcaagagatcactgaganattcttcatgatgtaactgaaggagaaggaagaaagtcaaggaaatgagagaagtcaacgatgtcgatgcagaggtcgaggacagcttgtgctgatcaactctgtgaagggtgtttacttggcaaacaaattagaacgag

SEQ ID NO: 94795 - DNA, 484 bp, Glycine max
gtgaagaaccatgatatcaccatatccttaaggaatattgtgagcttggaattgttatgggaataagtgtgggggatgtttgtttcactggataacatgttttgttggctatgattcatgatgtattatgggccatacttgatgtacattttatattggttaaatgttggacatgctaaatgatatgctatttctcaaaggctacagagcaaaaaaaaaatatctaaagataaagacaagcaatagagttgagtgaataagatcttaaatggcaaaagaatgattagactcttggttctattctctatgtttaaattttatctttagttctttgtattgttttttcatttttttcttaatatgcacttattccccattgctcctttattcctttgggatttagccacttattccatatttttccataccttgtccttcgtcccattacaaccttataagaccttttgatcctcatgtgcttgtg

SEQ ID NO: 94796 - DNA, 201 bp, Glycine max
ttctcaagctatgcgtgtgttatttagacttttacgaatagttcgtatgctcgcaaccttttcacaaatcgatctcgctggcatttcttgatcgatctaagacacctgtgcattcttagaatgactctccgacacattgatttgcaatgccacatttggatgtctggttctgcaactccagtcataattctctctccttgt

SEQ ID NO: 94797 - DNA, 441 bp, Glycine max
  unsure (1)..(441): unsure at all n locations
tgggcttcaccattgcttgtggttggctgtgtgttgtgcttgcttgcttctgttggttgcaacctttcatttcattttctcttccgttntcgatgtgttgtgcttgcttgcttctgttggttgcttcgttgtgttgttgcttgcttctattggttgcaacctttcatttcattattgttgtgttgtgcttgcttgcttctgttggtttcatgtgttttgccatctcactgtcgtttatacatacatgtttatctcctatttacttttttagggtctctgcttttcagttttttttgctctaatatggatttaacttgatggaatagtctcttgatttgaatctgaaatgtgattggtttggttgtttcgttagagcttacatatggatgtgtgggantggtgtttcatttttttgacaaaatgcctgagaaagacaatttt

SEQ ID NO: 94798 - DNA, 481 bp, Glycine max
  unsure (1)..(481): unsure at all n locations
gacacttaaaactaagctngtagagaactgtgganaaatcaagaacaagcttgtacgcacatcgttcgcgtgtatgatatccactccacaaggtttgaagtagaggagagcttcaaccctataacgcaacgtggcggacaaaagtgggcaataaacttgaatggttgtcattgtcaatgcggaaagtattctgcgcttcactatccatgttcacacattattgcagcttgtggttatatgagcatgaactactaccaatatatagatgttgtttatacaaacgagcacatcctaaaagcttactctgcacaatggtggcctcttgggaatgaagcggttattcctccttctgatgatgcatggacacttatccctgacccaactacaattcgtgcgatagtttggccaatatcaacaatgataagaaatgagatggattgtgtcgaaccatctgagcaccgaacataatgtattatatgtg

SEQ ID NO: 94799 - DNA, 449 bp, Glycine max
  unsure (1)..(449): unsure at all n locations
ctaagctactagccctatctaaactgattctacaacatataaccctaaaatctaaagctacaattaaagtattctacccttgagttaagacaagataaggagtaaaaggatcaaggaacttacttggatggtgtatgattgatgcttcaaagtcaataatgcacaaagagcgtacagatgcataatgtgcaaatatttggagagagagaatgcataggcgaggtatctgtaatctggaaaatgtgagtgtaactgctgttccactcacttaagcagtntttcgataccttcgcttagcgaaccgttgcgctaatcgagcaagatagacgtttggtttctcaaccatgctcgcttaacgagcatgtgcgcttattcgacgtttcaaattcgaaaacaagttttaattttatctttatttattttatttattttatgtttgaacagaactc

SEQ ID NO: 94800 - DNA, 132 bp, Glycine max
acccagactaacgcctagggcactggtctgcaactagtgggggaaacctttacatggatgtctagactgttacatatcttgtttaatgcctagtgtgtgttagaaaatgtttgcatggtatagatgtaaatt

SEQ ID NO: 94801 - DNA, 455 bp, Glycine max
  unsure (1)..(455): unsure at all n locations
acacacacatactaagctgaataatgtcgatttataacatataatcattgcaacttactacagacatgctcaaatgacataacacacaattttctttattgagttgcaattttatagtgtgttacatcatcaatgcattggtgttggcggcggtgataagaaggttgttgtcgcttggtgagatgaccattctagccgcgtacatagtttatggaagcgaaggtggngcaacagtcctttatggtcgatgtcgagaggcagagcgactaaatgataatgaaccctttgtggttgagaataattggtgaatgagaatattatcgttattaaatgattaaattgaataataatgacgatgatgatatgaatacaacggtgtctttggttgtggcttcaactttcaaatccatctattcatatattacttgatgattgttaatttttaaataacaatg

SEQ ID NO: 94802 - DNA, 236 bp, Glycine max
  unsure (1)..(236): unsure at all n locations
cggatcttagcacggctgcactattcgacgcgaaatgtatgcggggcgctcagaccagcctatgcgtcgacgtgtttcacctatgcccgctgccatgcaacgcttcttgggtacccagtccacgacgtcaagtttacgctgcgagtgtgtgaagatcacatctgcaccacatatggggaantccgcttcaaaacgtgaactgggctatcacaacgacaggtttggaccctgtacgg

SEQ ID NO: 94803 - DNA, 251 bp, Glycine max
aatctctatattctttcaatgaacgactgtaagtgtactacacaagccttgagatgataacgcctttttctttcattatggtggcactctttactatgtatcattgattcatatatctgtattacgccgaaagtgcaactttgtttacagacaaaatatgacttcttgatgatatcatacgtggagatattgatgagatgtatagaattgtcattcataaaacatatgtgttcaatgaaaataatattaaa

SEQ ID NO: 94804 - DNA, 444 bp, Glycine max
  unsure (1)..(444): unsure at all n locations
tactaagctgatcaagattggagacaagttatgtactttactggtgcatccaaaaatacgtgaatcaacatgaaacaacggttctttatgaaataaaatggaatgtgatattttattcttaatagaggaaaaaggcatctgatttatcaaaaaacaggctgtcaaaattgcatcaccccaatgccggacaagtacattggcatgaagtaataatgtctgagcagtcttaacaagatgcctattcttcctttcggcaatgccattctgttgaggagtatggngacaagaggactgatggagaatgccctgcactgacaaaaaagaagaaatagcagaaaaaagtattctttcgcattatcactcctaaggatcttaattgtcttaaccaaactgagtttaattcattaacaaaagaagtgagaatgaacacaatatcatattgtc

SEQ ID NO: 94805 - DNA, 427 bp, Glycine max
  unsure (1)..(427): unsure at all n locations
agacaagttctgaaactcatcacgttgtcttataaggccttgaggtggatccaagtgctctgatcattcattagcatattcatgtttcggtggcatgcacaccactgtttgtttctttagggaactcaccataactaataaagcacaaaggcacccctataacacccgatctagaagtaagatggataacgaagagggagtgaaagaacagatgaaggccgacctatcggccttaaaagatcagatggcttctatcacggaggccatgctaaagattcaaaaaactatagaagataatgctacggcggccgcttccaatacagctatggaagcggaaccggtgctacagcccgcaataaacttgggtcgagacanaaacgcgacgggttttaatcggaggtatagtccttaagcctaccccttatgg

SEQ ID NO: 94806 - DNA, 90 bp, Glycine max
aataagttttgacgatgcttcttaaaatctgcacctctatatagattgtgctctgcacattttaaaatctttttttcttttaaaataaac

SEQ ID NO: 94807 - DNA, 460 bp, Glycine max
  unsure (1)..(460): unsure at all n locations
agcttcaatgcaagaaaacatactcatgactatgtaacccaaatttggttttaaaattagaaaagcatgaaaatagggacttgcttgtaagaattcgggctgccccatgattggtactttgcacctaagtaacgtgggaaatgcttttcaatggtatgtagatatatgtgtaaatataaggggcataaaattcctcgccaagtatgaataatttttttcttaaatgaatgtatgatagcgtggaatgcctttttgaatgcaaatatgtgcaggatgtaattagctttccaatatgcatataaataaatatgagtgaaacagtaaaaatttgtatggtgtgcttcaaatgtatgtcagtagtttgtgatagcaaatgtttaggatataaattanngtgtaaagttgacgcaacactttgagcatgaaagtgtgtttctttttataatgatatangtgatgg

SEQ ID NO: 94808 - DNA, 468 bp, Glycine max
  unsure (1)..(468): unsure at all n locations
ttgtctntgtacttgtcagcaagaaattttttcatcacanactgaaggacatgataattttggtctggtcagagatcacccaactaatatatattgagatgatgaatgatctagaatttggatttctttacattggttgaagtaaaattttaacttgtaatcactattgtatatcaattttagaaaagagaaactatttaccattactttcccaatcagtttgatgctgaccaaagtttagataactcactttagaacctttattntcgtgaagcttgggcaagcatttgtggctcactgactcctgtttatgcttctagttagcttgattgtgtacaatcatgctangacctatgtttcagtatgtatgataatgaatatgataagaggataacatttgaggaactaaactacctatcatntgtttgtacatatattataggctcttcgttgttcaacctatatacc

SEQ ID NO: 94809 - DNA, 342 bp, Glycine max
  unsure (1)..(342): unsure at all n locations
gtttgagctctctgcctcgttactttcagtggagcattagtgatggaatttgctatgagcaactgtccgaagaccctttataacaaacttaanacatggtggctcnagtaacttcacattattgattgggtccatgaagatcatatagtatagattgattcatgttgacctataaatgagattgacaattactatccatactgaaatacctggtgctgtgacgtgaactgcccgtcttctttacatgtacttaccacatggatagaggaggaactggtatgtaacagggtacgctgaacctttctgaatgctatgactaatatttgtaattgaaattttttt

SEQ ID NO: 94810 - DNA, 467 bp, Glycine max
  unsure (1)..(467): unsure at all n locations
tactcagctgactataccatatgttgtcctccagccatgctggccctgcaatcaacaaaattgtggaagtttcacactaactaatatcagatcgtcttgcagatggatatatcttttagtcttttctctcaaggttaaaaagtgttttgagagcctattttctatacaaagatttacaaaatgctttacaagaaagaatgaaagaatgttttcacacgagatgattcgtgtcttgtttcttcaatgtttcttctatttgtaacctttatctacaagtatttgttgtctcacaatgggcgaattcttcactatgttcttcgtctaaagtcttgaagtcgttggagcatttaacttgcattaaatgcacatcccttcttcatgcaaagtccatgctaatatgttggcgtgtcttacactgtagtangaaagtcgcttctgtcattattgtagatctacatttgcagagt

SEQ ID NO: 94811 - DNA, 70 bp, Glycine max
aggttatttcgtatgttatctattggagtcttcttgatgatatgtggattgttgagggtttacttgtatg

SEQ ID NO: 94812 - DNA, 477 bp, Glycine max
  unsure (1)..(477): unsure at all n locations
gtatcaatcttgtgcaataaacattcattattctttctgcacacatttttttgtatattcttataaagttagataaaactctcanaacatcttgaacatattaagagaaaaaagactaagtattgattgtatatctgtttgtaagaagattctatatttagtctctatgtaaactcaaactaaaaatatcttctaatttgtttagagtcaatagtgacttgatagaacaaagaatactaggtgttaatcaaacttgggataaagcttgatttgtagagccagaagttttcatgactcaatacttgtaattttatgagaagttagtgaaacttggtgatttgccaataattaggcgtagtctaaatggtagagataaatcagtataactctttgtggttgatatttacttgcttttcttctactttcaactgatctaaggtanntggattgttttagacatttgaaaacatctagtgc

SEQ ID NO: 94813 - DNA, 438 bp, Glycine max
  unsure (1)..(438): unsure at all n locations
tcagctaataatatgcacccacttttgggttctcttgcacttctataacaagcttggttcctaggcctaaggtatcattcaagtcctcatgaaaactgcctacatgctaaaaaaatggcaaacattcgcataccaaattgtgtcataggttattcctcacaaaatcatgcgcaaatgccattgaggcatttcaccaagcacttggtgggagcatgtttaggcatgaatagcaagggaatggnggcaatgtggcatgcccagtcttttcagaatacaacttatgcctaaggccattgcctacaaccctccaactcaacaagaacaagcaacaattcaaggataaatccctcacattntttagcaaatacatgtaacttagagcaccaaaatacatcaatggaaagctagagagcccaagaatgaagtacttacttgttg

SEQ ID NO: 94814 - DNA, 197 bp, Glycine max
gagtgttctctacactcttgagatttgagcatggcgtgtttacccattataacacccacttttggatttttgagacaactaaatcacacctgttttcgatgtcaactagcaaaacacctttgttcgagccaaatacgttgcctcctcttaaaaaataaaaactcgtggacagtttttatcgggtcaatttaatttaa

SEQ ID NO: 94815 - DNA, 448 bp, Glycine max
  unsure (1)..(448): unsure at all n locations
cgccacccagctcacccaagcgagcaagggtgcttcctccataagcaacaaccttctggaggaatcttctggagggcccaagtgggcctggttgctatttgcacccccattcttactaaatacaccccctgcccttctttggtgagtcttttttcgtaaagatacggaaacttacgaatttcgtaacgatacttgctttctttctgtaatgttatggaaccttgcggattacataatcatccnctttttgacttacggaatgttacggaacttcactaattgtgcaacgatgcttccttttgatttccggtgtgtcacggaaccttacggattgtgcatcaatattttcttttgatttttggcacgtcacggaatttcacaaattgcctaatgatgggtgccaagcacctcaaaatgaccaaaaacaagttgcatgccaccaagcaca

SEQ ID NO: 94816 - DNA, 197 bp, Glycine max
gcctgttcttataaaacttctttaatgccaattttccctatagaattctcttttcttatgcctagtaaacaccttgtggtcttattatgctaacctctagcactcttacaacttgactaattccttctttgataagagtgcaggggaggaatgagctaggtgtaggatgacctaacacctaaaggatgtggtgttat

SEQ ID NO: 94817 - DNA, 486 bp, Glycine max
  unsure (1)..(486): unsure at all n locations
cttgccgatttagttntcaccagcgaaaggatcgaattgtgtctgagaaaaggcaaaatttgattatcctgctttgatgaatangaagcctgnggcaaatggagaaataagaatgagggaagaacccatgtggtaactaccgttcctacatggccaaatttcccaccagctcaacaatatcaatactcagccaatatcagcccttctcattacccaccaccctatcatccaagaacacccaatcatctacaaaggccacccctaaatcggccacgaaacccgcctgctgcacatccgataccaaataccacccttaacacgaaccataacaccaaccagtgaaggaattttccagaaaaaagcctgtagaattcaccccaatttcggtgtcgtatgctaacttactcctatatctactcaataatgcaatggtagccataatcccaacaaaggttcctcaacctccattttcccgaggatacaact

SEQ ID NO: 94818 - DNA, 351 bp, Glycine max
ggacaaatgcagtgtaaggaccacctgccatgcatgcatgatggataccgacagaatgaagtgtgtcattgtatgactcaccattcccatgggttatataagctgacagatcgcgattatatacatgcgaaatcacatacgtctacagcttgtttttcatgtgaccactgcattgcaacctcttaatatgaatgaccagaatctcaggaagcctccatagatctaactccttactagcttgacgatgttctctacagccagcacagtgcctaatatttgagaagactgcacgttgaataatacccagactggatgacaagtcatgcatctagaagaatggatatgttacta

SEQ ID NO: 94819 - DNA, 469 bp, Glycine max
  unsure (1)..(469): unsure at all n locations
ctttcanatgggtaaaaggctcgcattcactttcttctacgttatattcaaacttgtccaaataaataataaagtcatctcgactcatagaaggtcatctaagtctcatacaattaatatagaacctatatcctaatgtcacatcctatcagagcgcggtgttcccgtgtcctctagcatgaggttctttatagtcatccacctattcatctgctcccccgaacacaaagttcaagatcatcacatgatccaaacacaaacaacaaaccgggaatgagttatcacatttctaactactagagagaaacaacacaacatatagtagccaaatacaatttacttagcatatctcacattatttcatcactgtgtcattcatcaatcacacttttcatccattaatcacacctttcaatcatcaatcactatacacaggaatcacacactccgatcaagacataataacaca

SEQ ID NO: 94820 - DNA, 331 bp, Glycine max
gacactatgaaactcagcttgatgaaatagtgacccaagcatgaggttctatgtgcctgccgctcgatagcgaacaacacgcactctgacatgacaaactcgagcatagctccaccatcccttgatgagcaactctcactgagctgacgtactacatcataatacatatactagagtctctgctacaaagactactcataatgcttccaagctctacgctacatccctgtactacaacatatggacaaaacaaactgtctaagccaatgagaaaaggcataggcatataactatgatcagcacagctacaattatcacatgggctcaactt

SEQ ID NO: 94821 - DNA, 89 bp, Glycine max
ggatgaagagcctgagatgccattcaatataactaactgtcacgaatgaccagtgccactaaagctatcatatactgcctgtagactgc

SEQ ID NO: 94822 - DNA, 460 bp, Glycine max
  unsure (1)..(460): unsure at all n locations
acaattntataaagatgtaaaaagacccattaaggactgattttatatatataattataaggaccaaaatgattagatatatgttatacaaccgtaaaatataatacaaactgcgaaatatatttaagtctttttaaaaaatagcatatactatttgcaccaataactcattaatactaactcactgtttagattaaaaggaaaagcaaagataaaaaatagtggaaaataaaatgaagaaatatggagtaaatgttcatttcattccatgtcatcttgttccaaacagtttaaataatgcgtctctagaaaaagaaatatgcaacattgcatgctttttacctatttctatcttttccaattaattgaaacttaatgtatattttgtttatgttttttttaagaaataaatagatgcacaattgaccttctctaataaattataagactgctatttata

SEQ ID NO: 94823 - DNA, 377 bp, Glycine max
  unsure (1)..(377): unsure at all n locations
tttagaatattacctatataagaacccatgtaaattttcattggtgaaggaatgaaaatgatggatgtgaaatgatcaaataagtaactagttagactaagagaaactagacattcctttaaattatatgttagtcctaggctaatntactccatagaactctcatttgtgtggttgtggcaaaaaaagaatgtgaataaaataaaccacatttctgcaacaaaagaaacaccacatttaaatttcatgtggagacantttgcttatttcatattctccaaaaggtcattaggaaatgaaaaaaaaaaactatcctaaaatcattagcatttttggtggaggaaagacatagaacaatagaagataaacaaaactta

SEQ ID NO: 94824 - DNA, 458 bp, Glycine max
  unsure (1)..(458): unsure at all n locations
atgcactattctgactaagtattttattaatatgtggagagacatgtgcaagggactctaattgttgtcctatttgaacatgtgttagacaagcgatttgttccttcgtgtagcgatcttgtgatgatgagtaacatcattttcaacgcattatagaggttctgccgctgctatcatcgtctatgagatcactagctcagtatgacatctctgcctctggatatctctgaatacctattgaatatanaggacgatatatagtatcgctatgtcgtttgatattactagctcggtatgacatcactcgcagtatatgacgcgatggtcaagcttgatatatatgatcgatatgctcgttggtattcaacaatgtgcatatgaagtgttagtgataatatctattgtgacatgtctcacanaatagaatgatgtgacttactaagacttcgtttataaca

SEQ ID NO: 94825 - DNA, 473 bp, Glycine max
  unsure (1)..(473): unsure at all n locations
actaagcttcatcatgacctgaagtcattactctatcagttntatgaccttgaagtccccataatccatggcctagtgcattggacgtgccgtcaaaccacacaatccattngtccccatcctcatcttccacctcttcctcaaacaaggtcatgatgtcttcatttgggaattctagatacataggttggtagttcttgatgggctactgagccaggtaatctgccaaggcgtttccctttatagcactttgagtgacataaacaatgtcgaattctaatagcagaacctgccaccgagcgatccgtccggtgagagcgggctnttcaaatatgtacttgactgggtccatcttggacaccaaccaagtggtgtagctcaacatgtgttgtcttagccggtgggctgcccacaccagggcacaacatgtcccttcgagcaaagagtagttcatttcacatgccgtgaacttc

SEQ ID NO: 94826 - DNA, 428 bp, Glycine max
  unsure (1)..(428): unsure at all n locations
ctaagcttgcttctacggatggtgacgtgccactgtgtgcgttatgtctgtcctcgctgaatgggtaataaatttntggaaccatagacaaatttcgaagctgctgctggaagaaactgtatgaacacttaaagggagcctatgttgtatcatctcctttgtgacatcagttgtaaaaatatgtctcttggttgatataacgggctttacacgcacctgcctgtgtataggtccgatgacatcaatggagaaagtagtatttttgtgaaaagcaacaaaatgaagaatgacactctcatttagatcgtgtgctcttctgaattcctttatgccatcggcaaataaacatttgctaccatacgtcctcactcgaatgaaatgtntgttgccatcatagtggaataaaacatgctttgggtatctgtaca

SEQ ID NO: 94827 - DNA, 403 bp, Glycine max
taggcagatgtatatacaattttcattttatggctcacagacaccccataaaggtgcccagattgatcagcccttaagaagtaagctataaacatgcactatatctgctagctcaacttcacaatcctatttagctagcgctagcccctctgattggggcattgtttgctacactcatgatcatatatactcgagataaagatggagaatagaactaagaccatgtatggctcgcacaaaggatgccaagatacagtgatgcagagactaataagaagagagcgcgagcaaaatagggttcacgtcttataatatgtcacaaatctatatcttctagagagaggccggtacatcaaattgcataagatgtgttatcataattcaaagttttcaaaggaaaaaa

SEQ ID NO: 94828 - DNA, 107 bp, Glycine max
accaatttttttagctcaactctgttgttggataaaaatctctcatgattcattgaattaggtctcagagagctaatgtcatcattgaaagcaacgacctttcttat

SEQ ID NO: 94829 - DNA, 480 bp, Glycine max
  unsure (1)..(480): unsure at all n locations
gtcctcttattagtgcacagctccttcaagagattggcatatcttgtaattctctttattgcatccagcagaggtatgtttacctctacttttctgaatgtgtccaagatctctttctctacctcttccatttttttgtcggaaactgctcttatagggaatggaagaggaggaatgtgttgcttctacaaatcagaattacaagtggaagattcacctgcataaaaattgttaggtaaatttttgtcgttacctttctctggagtagagtgaagtttagcaagttcatttgcagataaagaaggtgttacaggttgaggtccttgacattgctttcccgacctcaatgaaatggcactgacatttttgggattttggatagcttgggaaggcagcttgtcagaattctgggactgttgntgattcaattgtgtagccaactgtcccatctgattggataagctctgaatggaggctctg

SEQ ID NO: 94830 - DNA, 437 bp, Glycine max
  unsure (1)..(437): unsure at all n locations
atctataatattaggccattaaccaaccagttgtggtctctgaattggtcctctatctctatagctctataacacttaacgtctttgacggtatagggaccactccatcttaactttaattttccaggatacaactttaatcttgagtngtagagtaatacttgctgtccacgcctgaattctctgcggaggatcttttagtcatggtacctcttggttctttctttgtagagcttaaatgattcatatgcgttacagcgaatctcttaacgttcttgtagttgaaccttcctcttctctcttgatgttgtagagtcaaagttcctgtagttgtgtcatacatcaaagtggtttaggaccttcgagagttgaggattacaaatgtgtgtaccttcatcactaatcaaatgtctaggcactccataactatcaaaaat

SEQ ID NO: 94831 - DNA, 83 bp, Glycine max
tctacctgacaaaagataaggaattcatcaaaaaagaattcatagcaaaatagaatccttaaatggaaacaaaaggaaaagaa

SEQ ID NO: 94832 - DNA, 373 bp, Glycine max
aatccatggtctagtgcagtggacgtgccgttaaaccacacaatccatttgtccacatcctcatcttcacacctattccttaaacaaggacatgatgtcttcatttgtgaattctatatacatatgtaggtaattctcgatgggcttctgatccatgtatctgccatgcgttcccttatagcctttgaggcataacatgtgaatctaaagctgatcctgcaccgttcattccttccgtgaatacgaactttttaaatatgtacttgactgggtacatcttgcacactgaccaagtggtgtatctcaacatgtgttgtctatccgggggcttgccacccagggacacttgtctttgagcacgaaatatctttac

SEQ ID NO: 94833 - DNA, 248 bp, Glycine max
ccggacttagcacgagctcagctatcattgtgatggcttgcagttatgttgacctctaaccattgtggaagggacctattctaatcacattgtttacctgaaggggatgtctggaatgatttttcaattcccacttacgagatgtggtcatcctagtacattagatgtgcttaatgtaattatttcagttaacacatcttatatgtagggaagttaaaactatcggctgtataaaaaatgtgatatgt

SEQ ID NO: 94834 - DNA, 480 bp, Glycine max
  unsure (1)..(480): unsure at all n locations
taactactntcttagtgtctgctgccatttatttgttttattgtctgagaagggtgtcaaagtataatgagagtaaagacattcagagttcagaacacaccgaggatgaggaaatggctcaaacagaggatgtaatgatctttcanggtggagaggaccttacaataggtcaatagcatccacaatgagtccaattatgacatccatagcttcagaatatcatcttttaagtttgctatatataaatttcactatcatagcttacccaaacagtgacaaagtatagacaaacattgactctatcatattttggtatttgtttcagttctactatctctttattgctttcttctttttctattcttgttaatcaatgattgcatgtactttcaactgtaataatgggaaaataattttcctttctgggtctcttcgaatttaaacattccttgttgatttattcacacaatngatcacaat

SEQ ID NO: 94835 - DNA, 461 bp, Glycine max
tctacttatgttaaagaattggccgccatcactgccgtcgtgaagaaatggagacaatacctccttggccatcactttacaattcttacagaccatcgaagcctcaaggagttaattactcaggttatgcaaacccctgaacaacaattatatttatccagactcattgggtatgattattctatccaatttctttccgggaacactaatgtcatcactgatgccctatcatgaattcccacaacttagactagtgcctttctcttattatcaatgcctaattttgtgttcctggaggaactcaagagtgaactggccaaacaccctgtattcatagagctccaacagaaccttctgcaccaccctaagaattatcctgactacaacattactccggatttgattatgcaccaagggcgtatttgttacccgcagaattcaaatcattcctttaaaaatac

SEQ ID NO: 94836 - DNA, 346 bp, Glycine max
  unsure (1)..(346): unsure at all n locations
cttntggagtatgaacatgggaccaactcattttatttcatatatgtgtacctagtcaaggtctgagagaccatacaatttatctagcgattactaattatgtgggtcattaagtctatcatatgctgacaatagccgataagcccatgaatttcttctggggcggggtaagtgtccgccattgcctttgccatggctaacaatcggggaagttcttgactcccgttcaaggtaagagcataccgatccatccacatggtcgcctcttggtgtaaagagtcaatcacacatcccctagcctctgttatcgcgtgttcctgggcgtactcatgcaccaccctatgct

SEQ ID NO: 94837 - DNA, 392 bp, Glycine max
  unsure (1)..(392): unsure at all n locations
gaccataaccatgccttatgctntaaacctattagagatcccattatccgctaatgggccaaactgatttccgctcattaagcctatatcaattcttctggcagtctaatgggctcacttaaatagatcactctatattgaactcatttaaatgtaaataactaatataaatgctataatataatacgtagcctatatcatggcatattactttcacatatattcgtggacatcatgcatttagtcataatatcaatcatgggaacattcattcatttacacaacaatatcatcatattacttcattgtcaaatcataaattatagctttttttagcaagttttccaatgacacatacaatacctcatacggacaactataactcaagatat

SEQ ID NO: 94838 - DNA, 308 bp, Glycine max
gctggagggatgtctatgtgtgtaatatcagccatacaggataaactgcatttagaatctcatccctcagtttctctttctttattcggtgtgccacgaggacagtaagatgatagcttcttgacctcatgaaaactactcttacctttccactaagacaatcctattaggtaattaaaagcctccgacagcaatgttttctgttatcctaactcatgagaacattggagcgcggatattaattatggaactatatatatatatgcatatacatctatggatatatctctggacatctactgtatata

SEQ ID NO: 94839 - DNA, 219 bp, Glycine max
acactgttccgaggaatcataatgactccttttatgagtggtacactatgaaaccgctcaatttataagcataattaatattgagcctagacaggactatgtccttatatagcgagtcacatgaaacaagcatgatggagagaatatcattattaagccaatatatacttgctagatataacttaggtaatgtaatgctagttgtgatcctcagacctg

SEQ ID NO: 94840 - DNA, 446 bp, Glycine max
  unsure (1)..(446): unsure at all n locations
gagaatggaactcttcgtaacttctctactattagaacaccttaacaaaatggagctgttgatagacagaatagatcattgcatgacgtggtcacgaccatgcttaatgatgactctacacctagacactcctatgctgaagcgatatagctcatctgttatttacacgacaaagtctatctatgacccattctagaaggactccttatggactgtggaaaggacgaacacgcaacatatcatatttacatccttttggatacaaatgtctcattcttaacactacggacaacctgggatagtgtgattcttactgcgataatggaacattacttgtgttatctgaagcatccaagtcatatatagtntatatctctagagcctcatttgtgaaacaagctattcatgtaagaacctgatacatacatatcataggctgatgaatc

SEQ ID NO: 94841 - DNA, 228 bp, Glycine max
catcttttttaggtaagacaaccttatgtctgagttacatttgttgctgttatctgaaactttcataaaaaacacatactgatacatcacgttagtttttatacctgttttaacctactgagacgaagtgttaaaaaaagtacgtccttctttaattgtgggctttgtaaccttaacgtgagtcggcttcttttggtcttgtcatgagcaggttgtgtttgttcgctt

SEQ ID NO: 94842 - DNA, 386 bp, Glycine max
  unsure (1)..(386): unsure at all n locations
gtaagagatatttgcattgacgattaaatacccaattgtaaagatcttggagaagtggccttgaccaanagtggtcattaggtcaacatagcctctagtctctactcgctcccctactaagccgaggagttgatcagcgtgagattggatggtgttaggcaaaactttagtttagatggtcattangtcaacatagcctataggtacccagcttgtatgagctcttctattttcaccttaagggcccaacaatctttggtgttgtgaccgatactgcaatggtatctgtagtatttggttgcatctaaccttggcctgtgaggacacgatggaggtagctngatgggtacctncaagttgaaagcttcctcgaggattgtagtatg

SEQ ID NO: 94843 - DNA, 436 bp, Glycine max
  unsure (1)..(436): unsure at all n locations
aatatctatctctggacctgtatcanagatataaaataaaacagacactgaagtgtgaaaatagactgctcaagctctntgagatctggtctctccctctaaattctgctccaaaaccaaagactgctcccactctattctcctttctcctagtacaaacttaccactctaacctactaattgataatccagctgtcagactaactacaactgtctaatcagaacagttactgttattagttacttactgattcaagccccattgaggcatctaacaaccttctgtggagatttaattgttatgaagtatggngagtgacatggatacctcttttgactagttgttcagttctgttatcatgtcaagaaccagttatcctaattntgaaagaatcaattgttagattgaagtctagaatctaataatattgtttct

SEQ ID NO: 94844 - DNA, 383 bp, Glycine max
  unsure (1)..(383): unsure at all n locations
ntgactngagtcatcaagagattataaatatgtgactcatggcatgagtttaaaacaaaatcaatcaagaatcatcaatcatctttgaatcatctatctctcaatcttttttcatcatcatccttcaacaatctttcaatatcttctttcatctctatcaacactttcaatagaactttctaattcatttctcttcatctgtctaaaagtttttgatcaacactttctcttccaagaaaattctttgttcaaaaacttgtgttattaatcttttttattctcttctcccttttccaaaagaacgaaggactaaccgcctgaattcttttgattcttcccttccccttaagccaaagattcaaaggactaaccgcctgagatat

SEQ ID NO: 94845 - DNA, 413 bp, Glycine max
  unsure (1)..(413): unsure at all n locations
tcgtttacagaatgcanaaagttgataaggataaccactcgtgtatttccgcccgtcagcgtgactcataagtcagtatgacagatcttgtgagcgcggaagatgacgtatatctccacgtgtcaacgagcttgtcggccgcgattggcgaatggcgcagaagacgacgttagtctctgcgtgctatcaggcttttcggcttacagacatcaaaaagtttatatgaataaccactcaggtatttccgcccgtcagcgtgactcacaagtcagtatgacagatcttgtgagcgcggaagatgacgtaaatcttcgcgtgtcaacgggcttgtcgagcgctattgacgaatggcgcataagacgacgttagtctctgcgtgctatcaggcttttcgtcttacagactgcataaag

SEQ ID NO: 94846 - DNA, 380 bp, Glycine max
  unsure (1)..(380): unsure at all n locations
tgtgattctacaaaccatttcaccaaacgtgaagctagcaaggttggatctgaactacctctccctattatagaaatgggaggttgcgccaagctctgagaaatttgacccccaatactagtacccttttgtcttacaanagtacaagcctacgaaggtcaattgattcattttttcttcctcaccaataggaaatctaccaggttcgaattacgacatacgaccaagagccgaacatttattactgagactaagacacttcaaagtctgggccaataattttttcccctttgaatacccacttggttatgttttcaactcaacttcatcctatagtacttgacacaaagccgtaatatgacatatccaccctttacctc

SEQ ID NO: 94847 - DNA, 470 bp, Glycine max
  unsure (1)..(470): unsure at all n locations
ggcttctacataacataacataataaccctgaaaatctatagctacagttaaagtcttctaccctaaagttaagacaagaaaaagagaaaaaggatcaaggaacttacttggacggtgtatgattgatgcttcatagtcgaaaatgcacaaagagagtacaaatgcaaaatgtgcaaatttttggagaaagagaatgcagaggcgaggtttctgtaatctggcaaatgtgagtgtaactactgttacactcacttaagcaatttcaatactttttcttatcggactgttgcgctaagcgagcaagagaaacgtttggtttctaaatcangattgcttagtgaacgtgcgcttagtcgacgtttcaaattcgaaaacgaatnntttttttaatagaaacttggcttagcgtgagagtaagtccgcttagcgaggtctgcagattataatagctacaactctcgctaagcct

SEQ ID NO: 94848 - DNA, 153 bp, Glycine max
cttttttttgataaacttcagtgttactcgtaataatctttatggttatgatcatcattagtatcttataatctatatcaacgaatataaccaagctgccattcaccctctacaccaaacacttaactctccaaaaaaagggttatttatgtt

SEQ ID NO: 94849 - DNA, 458 bp, Glycine max
  unsure (1)..(458): unsure at all n locations
ctaactcctctttcaaaccatgccatgtgctcgcgactggtccctttcttcccttcgcaacttgagttcactattgctaccccatagagctccgcgaaatttgttccggccatactcttccttgcgagccctcttggtctcttgttcaagggctcttgcggtaattgcattctcttcccgtaacccggcgcactccttccgaacgtgtgtagcagccaacttgaacttctcctcggcgagttttgcctttcctaactcgcttttgagagcttggacttcttcgtcctcttccggtgcttcaaaattctctttgctgacgacttttaacttggcgagccaatctaaacctcgtatgcgaaccttcatccattcgtggtacccaccaatgatgccattacgaatgcctctaagctcttgatcttttcttaacggngttcccatgccttatggattctttg

SEQ ID NO: 94850 - DNA, 286 bp, Glycine max
aaatgcctctgggcagatgaacacttctaccttaaaacatacctcctcctaacaccttaatcagatgcacagaactgtttgaaacaataaaactaggtgactaacaaacaactaaatgtcgacaaaactgcccctccttgaaggcactatacggcgtcaaagacccggccacactttagaggctgaccgaaacgtccatctgaagtaagtttcccaaattacccccgcgcaaaccctataagcaaaccatttctcttcgctgttttctttgtattggccaggtctc

SEQ ID NO: 94851 - DNA, 433 bp, Glycine max
  unsure (1)..(433): unsure at all n locations
agctacacatacctctctaatagctaagctcacctccgtgagatgagaagctagagcttagctacacacccnctataatagctaagctcacccccatgagaaaaaacatgagaataacaaaaaaagtccttattacaaagacaactcaaaatgccccaaaatacaaggctaaaaccctatactactagaatggccaaaatacaaagcctagacgaaggaaaaacctattctaatatttacaaagataagtgggctcatacttagcccatgggctcgaaatctaccctaaggctcatgagaaccctatggcctttccttggatctctagcccaatctacttggagtcttctagccaatgcccttgcggggtaggatggcatcagaaaatttttgagaaaaactctttgtaaactaaatgtgcttgtggatcgag

SEQ ID NO: 94852 - DNA, 381 bp, Glycine max
  unsure (1)..(381): unsure at all n locations
gtgggtggaatttctagagcaattaccttatgttatcacacatataaagggagaaggtaatattgtagccgatgctctttctccgcgtcattcattactttatatgcttgaaacacaattgattggacttgaatgtttgaaaagcatgtatgaaaatgatgaaacttttggagaaatgtttaagaatcgtgaaaaatgtttatagaatggtttctctagacatgaaggctgtattttcaaagaaaacatattgtgtgtgcctaaatgttctactaaagatttgcttgttcgtgaagcacatgaaggatgtttaatggtgcattttggggtccaaaatactctatacacattacaagaacatttntattggcctcatatgaa

SEQ ID NO: 94853 - DNA, 472 bp, Glycine max
  unsure (1)..(472): unsure at all n locations
tcctgatgaatggcgagaatgatctcacaataagtttattttttattgctgtattaatgaataatgattaatctcaaaataatttatgcagatttaacaaaaatgttgaaatttggaaattaagtttaagcacttaccaaagaagagaaagagacttgagacttcaagatactacaatcaagttcattttcttgacaaccagaatcaggttttattgttttagctcattcttattttatatactcatctttgtagtgttgtatatattataacttttaatttcatacgaaaatatatataataagtatgtcaaccagaaaatatgaatcaggcaattcaaaacttcagagaaaaaagaagagtcgaggctttaattacatcacaaaaggagctatggataaatttataaaaatagatgagaaaaataaattatagaatacacgtgggtactctntgaatgaacaagaataca

SEQ ID NO: 94854 - DNA, 415 bp, Glycine max
  unsure (1)..(415): unsure at all n locations
ctaagctngagactctaactctcgtgtaacactatagagcatcactgttctcaagtccaaaaatgcctaaacactatattacaacttttgcttgttgcatcacaccaatgatcaaaggcctttgtgcttcatcaagcactcttgtattaacatacacacacttttatacttctgtatcaaaaccagtacactgtgtgttttatttattatcgcttccttccatgagtgtacactatgtgatgacacacggtctcatatataaatgtccacactccacacctccttatatatatctattactatatctttattatactcttataaagcacaatgaccacttcaaaccttagcatatgctactgtattggcacaaccccatcatcatcgtcatccatggattggttcccttggctat

SEQ ID NO: 94855 - DNA, 482 bp, Glycine max
  unsure (1)..(482): unsure at all n locations
agatgaggaagtgttgaagggtgaaacttcctggctttattgttgaccacagagtggtacctggagatatgtcgcggcggtcaggagacactgcggacgtcaagtggngtgctattgcccaaaaccaagcttgaccaatcccgacccaacccgggcatagtcggtcagtgagaacctgtgatgtacctaaacaggcgagctcctggcagtcaacagataaaaggaacaaagaccacaaagcaaggaggcttgtggtggctggccagctgtgaattttgtgtgatatgtggattatggcctctggtaatcgattaccaagggtgggtaatcgattacaaggcttaaaattgaagacaggaggctaagatggtctctggtaatcgattaccacagggtgtaatctgatacaggctcgaaaacgaagtcaggaaactaatggagcctctggtaatcgattaccagcctgtgtaatcgattacaca

SEQ ID NO: 94856 - DNA, 107 bp, Glycine max
tgaacgctactgcttaatttggggttacagcggttcacatgctaataaagtcctgagtttgaaattcaagggaattttacttcaaatagcctttcaagggaactgag

SEQ ID NO: 94857 - DNA, 489 bp, Glycine max
  unsure (1)..(489): unsure at all n locations
actaagcttaagacgtagttaagagctactggcatggaagccccattactttgtctccaccacacttggaaccaaacatggatgaaaatttcccccttattggaactgaggctcagagtgaccctcaaactagtcctgatgatgtttcaatctcccctgaagtaactatcaactcacctgagttgtgctatgatgcattgatgaatgaagagtttaaccaagtttgcaaccagttatgcttagatggcctatccttccaacaagactcattgaccaaccaatctattgaccattttttggcatatcagaatcttgagtcactactgcttgatgttgaaccaaatcccttgtacagctgttatgaacagatggtgcagccagatgtcagcatatatgattatgagttgtcaggaatactatgagcatgtctatcttttttaaggaagatcaaccatgatgttgtttntngatttacttttctagttcatg

SEQ ID NO: 94858 - DNA, 127 bp, Glycine max
  unsure (1)..(127): unsure at all n locations
tgatgagtataatgagagtactacatctaatgtgtctgacttaacttttatatatgtagatggagaagccgattgatgacatatncttctgaatagggagagagtgatgaggacatggcaatgacta

SEQ ID NO: 94859 - DNA, 462 bp, Glycine max
  unsure (1)..(462): unsure at all n locations
atgttgctgtagctngagtgcatgaaaggatatgtggatcttatcattctggtgaaaagatgaagtagaccttgtttcagttaggtgttcattggtcaaccattctgaaagattgtattgattatgaaaaatcttgtgaagaatgccaaaaacatggtcctatacaacaaattccaattagtgaattgcattcattttaaagtcttggcctttttgaggatggacaatggatttgattggccaaattcaccttccttatacataataacataaatatatactatttgcagtggactattttaccaagtgggtgaaagcgattcctttgaaaaatgtggaacaaaatgacattattgatttcattgaagaacacatcatacatatgtctggaattcctgagactaccataacatataatggaactgtgtttactagtcgaaatatggttcaatgtgctgaaac

SEQ ID NO: 94860 - DNA, 308 bp, Glycine max
gtctagtcttactaattctgtagccttgatattacatggttatatatttcttatcaagttattgttcaaaataaaaaaatggtgttccaatttgcatggtcctggttttcttttctcttcgattatatgcatatatatgtgtgtgtgtgtgcgtgtgtgcgtgcgtatatatatatatatatatatatatatatatatatattaaaaatatttcacatactagaagcaataaaataatatatcgaataaacttatataaattattaagtcatacaaattattgcttcatagtgggtactttcgctaca

SEQ ID NO: 94861 - DNA, 459 bp, Glycine max
  unsure (1)..(459): unsure at all n locations
tatgctgcanacacttataatagacctcctcaacttctaaactaacaacaatagaataattatgacctttcaagcaatagatacaatccacgttggaggaatcatccaaatctgagatagacaagtcctccacaacaacatcagcctgtccctcctttccaaaatgctactggtccaagcaagccatatgttcctcctccaatgcaacaacaacagtagcagtcacaacaaagacaacaagcaactgaggctcctcctcaaccttccttagaggatttagtgaggcaaatgaccatccagaatatgcaatttcagcaagagacaagagcctccattcagagtctgacaaattatatggggcagatggctactcagttgaaccaagctcaatcccaaaattctgacaaattgccttcacaaactatgcagaatccgaaaaatatgagtgccatcaccttg

SEQ ID NO: 94862 - DNA, 410 bp, Glycine max
aatatacgtgttaatacatgaattacacatatgcatgtatatataacaagtagtaacaatgtgctctacctggacttgatataatgaaacagcttccacaagaacaccaatggacaaaccaacttcaactacaacaaagtaattcagcttcacctggagttcatataacgagtaatggcattagaagaactcaaagccaaaccaagttcaagtacaacaaactaattcagctttttctcaaccaaactatgtcaaactgcttggtggctattaaaagtggttgttattcatgtgacaggcatactattttagtttctattcatgattaagattcaccaagcagatatagtgttctgatagcaataccacacagagagaggtgtgcagatagcatgcacatgcccacaatc

SEQ ID NO: 94863 - DNA, 59 bp, Glycine max
atattatttaaatatataaaaatatccataattatattataatcattttttttatataa

SEQ ID NO: 94864 - DNA, 480 bp, Glycine max
  unsure (1)..(480): unsure at all n locations
tcagcttctgatgatgaatcaagttgattcaagtcgttcttgatgatgacacggatgatgacaaaaagcccaaagaatgatttcaagattaagtcaacacgttcaagatcaagattaatttcgagtttcatacgaagaaatcaagaagaatcaagaatcaagagaagtttgatttcaagattcaagagaagatgaattcaagattaaagagaagatatcatgaagacttcacaaggggagtattgaaaagatttttcataaaacaaacatagcacaattttgttttttcaaaagagtttttctcanaattttctaagttaccagagttcttactctctggtaatcgattaccagtttcctgtaatcgattaccagtggcaaagtttgatttcataagcgtttaactaaatttgcaacgctccaatctgtttttaaatggtgtnatcgattacaatatattggtnatcgattaccagagta

SEQ ID NO: 94865 - DNA, 327 bp, Glycine max
  unsure (1)..(327): unsure at all n locations
tgctagctcgacgacgagagctcatagccctgctngcttagtcgtgtcgagctattgcatgtatgcagcgcacgaataataacaaagtgcgaatcccagtactctgaaaaatgacaaaacatatggatgataacctcatgcgcactgtatgaataaaaataatgcatctctccaaatgcactttgtatggattaaatgaactaaccggtctaaaatgatgattctgacacttatgcggattcacggttcttttattatcacgttttatatagtgaacgagacgctgtacaaacttgggactataatatagatgatgcttgggccctt

SEQ ID NO: 94866 - DNA, 442 bp, Glycine max
  unsure (1)..(442): unsure at all n locations
tccatcaatcttgctggctttattggtgttggagaataaaccatacggctgtaggtcttagagacttaatttcttcttgttctttggtaacggagtattgtatcttcatcttcttccaccaatcttcatctcttaagctcatttttctcactactttcttgttctggtaaataaatggtggtttaggtgttgctacacactaaatgaagctgtcttgatccacttctcattccatttgcacttacaatccctacgtatggagaggtttctactctttcccataagccatgttgttttctatctactttgggttagaatgggttattgggattactattgagccattgggctcttgaacttcctacaaaatgggaaaatgatgaattttcaagtgtggcctacacatatgttaatggttgatttctccttatntattttcatg

SEQ ID NO: 94867 - DNA, 431 bp, Glycine max
  unsure (1)..(431): unsure at all n locations
acgagtgagagaatcgaagtaggcctgaatagaggcatatttgattacatcgcttcgatgaattctggtgataggaggcctgnggaaaatgataggaataagaatgagggagaaacccatgttgtggttgccattcctacatggccaaatttcccattagcccaacaatatcaatactcagccaatatcagtccttctcattacccatcacccaaccagccgagaatgcccaatcatccacaaaggccacccccaaatcagccacaaaatccacccaatgcacatccaagtccaaacaccaaccctaatacaaatcataacaccaaccagggaaggaactntctatgaaagaagcctgtagaattcaccccaattccaatgccatatgctaacttactcccctattngctcgataatgcaatngtagtcat

SEQ ID NO: 94868 - DNA, 397 bp, Glycine max
  unsure (1)..(397): unsure at all n locations
ggagatgaganagtgtagaagggtgaaacttcctgctnttattcgttgtccacagagtggtacctggagatatgtcgcgggggtcaggagaccttgtggacgtcaggtggggtgctattgcccaaaaccaagcttgaccaatcccgacccaacccggacatagtcagtcagtgagaacctgtgatgtacctaaacaggcgagctcctggcagtcaacagataaaaggaacaaagaccacatagcaaggaggcttgtgtggtggctggccagctgtgaactntgattgatatatgggatatgggctctggtaatcgattaccaagggtgggtaatcgattacaaggcttnataatgaagacaggaggctaagatggtctctggtaatcgattaccacg

SEQ ID NO: 94869 - DNA, 374 bp, Glycine max
  unsure (1)..(374): unsure at all n locations
cttacatggctgcacttatcaaatctttgagcttcatatcaaactaagaaattggaactttggattgtgatgatggactatggatgaaactgatctgcccagaccactttgacatctagctgctacagtatgagataaagaccttccatataaatcaaatgtattgagctgagagagaaatttattatccagcctagcgttctagaaagtaatttacccngagaaatgagtactttgtatacacgttttgaaaaagagacgtggattactggttcgaaaaaaacagtactggtttttaaaccagaacgcactaacttttggatcttataactgttaaacgtggattcaaacggtacaatttaccgcttctgcaa

SEQ ID NO: 94870 - DNA, 493 bp, Glycine max
  unsure (1)..(493): unsure at all n locations
actaagcttctaggaaggacctcactagtctcgcccagactnggagtgtgttatcatactccaacctcgctccctcctctcatacgtctgatcttaacatggacagggcgaggttagtctatggactagtcatgaagatggaaatgggcttgggctccctcatctcaggccagatctcacagatggcccagtctaatttctccagccttgcattttcgacgctcatctctgctttatgcatcgtctggggagttgttctagattcattgacaattgagtccttgagcccagccattaacttggcgtatatccagaagaattgttggaacccggatgatccttctgtcacatttctggggacccgcatggcacggtctcgaggacctgaggcctcttcttcttctactccttcttcttccactcctccagctccagctccaccacttctagtaccctccaccatctccgttcagagcgtatagatcctagtgct

SEQ ID NO: 94871 - DNA, 467 bp, Glycine max
tctgatggaaatctcctggttatcatttgatcctgtggcctataatcactactcttatgtttcctagaggccatctgcatacaaaggaaccaaacaattaatcaagacacaagttattctaatttcaaaaactgaaaaattaaactaaaaaagacactggccgcttatcgagacatggtccgcttatctggcctttgcaaaaaaaacactaccgcttatcgacatgtggagccgcaaagcggaagttgcagaaatttagcttctgtagaattggcttagctggacagtgcccgctaagctgaacatccgccgtaaggatatgcgctaagctccttaaaggctacgcttagcggcaccaattcttcaaattttccattaagtgttgggagcttagcaagcaaagctcgcttatctcatcagatgccgcaacatatcacgcttgacccatgatagctcgacttatcgcg

SEQ ID NO: 94872 - DNA, 440 bp, Glycine max
  unsure (1)..(440): unsure at all n locations
ctaaggagggcgatcatggcagctcccgtttggcattacctatctntaaaatcccatttatcatcgagaccgacgcgttatggtcaggtataggagcagtgcttacacaagaaggccatcctatctccttcttcagtaagcaattctgcccgaagttgatgaacgcgtcaacctatgtccgtgagctcgtcgccataaccgcgaccgtcaaaaaatggatgcagtacctgttgggtcacaagttcatcatcgtaaccgatcatcggagcttaagggagctcatagaccaaacggtgcagacaccggagcaacaccgttacctagcacgattattatgttacgacttcacgaatcagtatatggtaggatgagccaacatagtggcagatgccttgtccagaatccatgaggactcacctgcatcactctctttaatctcg

SEQ ID NO: 94873 - DNA, 435 bp, Glycine max
tataccaccatcacaatggccatgagaagcacatatgaagtatctatgtccgccagtctagagggtgaatgtcggggtgccacagctgtctgtgcttaccgaattgcctgtggcgcaactcttgtaatcactatctttcactccctccactgcgtgaccagccccataattgaaaactgtcacacatgactataaatgaggtgcctctatggaatcatctgagtgcttcaaagcgcgctgaaagtatgcatatacacgaatactacagcatgaaattatgaatttttgtgtgagacgtgatgcaagttgctcaacacatcatttattgtgtcttctttgtcaccacattgacatattccaacaaattatttcatacaacagacctgacaattatcttataagttatgtataagaacaatatatgcattatcatac

SEQ ID NO: 94874 - DNA, 148 bp, Glycine max
tcggctgaaagatatctatgtgaatataaaattcaaataataattcactaatacaaatgctcacaataataaagtgtcttatcatcatatgactctgcactgctgtaatgagatgggacagtatttctctgaatcattcttctcaatg

SEQ ID NO: 94875 - DNA, 221 bp, Glycine max
tgccactttgttcctagctatttttttctacgaaccttctccaggtactcgagtggggtcgccatagcataagaatgtacgggtttctacaatcggctattagcctgttaagtgggagctcgtaatcgtcaacactgttatcgagagataaattaaagggctgacattttgcaaagttgatctcacgcccgtttgtgcgtttgtacgtagctatctcatgc

SEQ ID NO: 94876 - DNA, 252 bp, Glycine max
  unsure (1)..(252): unsure at all n locations
gacgtanattaggagcatactctcacctcacacaattgcctctcatctatgcttgcttgctcaaactgtgtgtacaccttcatttccgccgcatctttgttttactactctacacccatcattgccctgtaggagtctcttggatcagtatgaccattatgggttaatcttatatgaaacgacacatgtctctcatgggcatggtgacattacaagcattgcttatactgatgtatcctgcatataccacat

SEQ ID NO: 94877 - DNA, 472 bp, Glycine max
  unsure (1)..(472): unsure at all n locations
tctggtgggacatgctgactggctntccaatctgacattctctcacagattctgccttcttctattttcagattgggaatgcctctaacagcacctttgtcaatgattntcttcatgcctcttaagtgcagatgtccaaatctttgatggccatatttgacttcatcttctttggaggatagacatgtggaggagtaactggtttcttgaggtgtccataggtaacagatgtcctttgatctgctgcccttcattagaacttcactcttctcatttgtcaccaagcattctgactttgtgaagtttacattgaatccttcatcacacaactgactgatgctgatcaagtttgcagtcagtcccttcaccagcagtactttgttcagactaggaagtccatcatggactagctntcccattccagtgatctttcctttagagccatctccaaatgtcacatagctagtggagc

SEQ ID NO: 94878 - DNA, 406 bp, Glycine max
tgaccgaacagttgagtatggcggaagagaacatgtggactatcattgaccagtaagagaagctgaatctagctgctagccatgagcaaagactataggacgagcatgcaaaagtatcggctctgcaagtagaaagggaagcacgagagagagtgatagattcattacacggagaagctatgatgtggatggataggttttctttcactctgaatatgagtcaagagcttccaaggctgttagccatatccaatgcaatggcggacgtgtactcaactcccgaggaagttcatgggcttttcgattattgttagcatatgatcaagttgatgtctcacataattatgaaccgctgaggcacttgtatttatgctctgactttgagaagataacaatatcgtctctt

SEQ ID NO: 94879 - DNA, 481 bp, Glycine max
  unsure (1)..(481): unsure at all n locations
tctaactgaatcatacataattcaactgtcataagtaactggcagctggcatagctaacctgagagcttactcaacatgtttgtacttggttacacaaaatgtagcctaaattactgactaactacatacaccatcaacatcttatgacaaagaaaattattggtaaaggtcatgaatttggcgatctctatgttcttgatgcagaaagtattcctaaatgtcctaaaaataattataaaaattatggaaaaatataattaaaatgaaacacttcaaaacacaaggtatatttccttgacatggtgattntttgcatcgaatgtattcatccagatctacttgctagaagaatgcagattttttttcataaaactcttgaggagttgcaaaagaaagagttaaaatattccatgttacgaaatgaaacaattntcaagtattgatgaatggtgaaatgaaaaacattttcaattctctttt

SEQ ID NO: 94880 - DNA, 480 bp, Glycine max
  unsure (1)..(480): unsure at all n locations
tggaggttgttcagtatatcaaggagaataagcatggatgtttatgctatgtggcaacaataggtctgaatataacactactttttttggtgcttattcctgttntgtgagggaagatgttgcaaatcataattgtactattgtataggatggaaaatttgttggtgattctgatgtgggtgaattctggagtttatttggtggttacgctcccattcctcgagattcgccttgtgttcatgaatctgagactcctcctgtaaagctattttggtgaggttcatacatctatgtgcgtaatgtttgtgtgttgatgaaccgtacttgccgaaccttatttctatgttaaacatacaagtttgttntgaatcaataattaacagattcatattgatagttcaatgatcaacttaatggcatcacagtttattgactaacccgaattattttattatgtgtgttcaatgcgaaccaatatgc

SEQ ID NO: 94881 - DNA, 459 bp, Glycine max
  unsure (1)..(459): unsure at all n locations
gagcatttcttatttaagaatntcagcccttgctttcgtgtagcttaggaaaaacgtcatttcttctcctttctttcttccaaagccatttctaacgtcccaagcactttctccatcactcacagccaccattagccaccacaaatcgtcattgttctccattgaaactccacaccaagaggaacccttcaactgaagcagaatcttccaacttggcttgcggtttcgatagagaacgaaaccctaatctgacctttcgttttcttatgttgtctaaagaccaggggattgtgaatcccatgcatgaaattatatgtatatatgtggaatgcaataccaatgatgttaatgtttatgataatattgatatgagatgatgttgatgatgatattgagataaggtgacattaatgttgatgataatactaatatgaaatgatgttgatgttgatgatgata

SEQ ID NO: 94882 - DNA, 477 bp, Glycine max
  unsure (1)..(477): unsure at all n locations
tatgtctatgaacgtaattntcttcttctttacctttcttttttgttttttttttcaggagaattccatgtcctatttatttggtttttttgaatttttttaatttgtagaatacacacttccgaagctgtatgctaagatgcagtattgtgtttcacgtgttatccactctcatgttgtgagggttcaatcctgcattgatagaagaaagtgtgagcctccacaacgattcatcaggagcagggtaaatttattggattcaatcttattatctgaatctttcacttctatatttttatatttttttgtacacatgaatcttaaaaaatattcaaaatcaaagaagacaacttggttttttgtgtatagatgattcccattgtgcaattactttgatattgatgcccatgaaacattnnttgtaattaaacactgcctggcctttnttgttccttgatggagggagttagtctctta

SEQ ID NO: 94883 - DNA, 361 bp, Glycine max
  unsure (1)..(361): unsure at all n locations
acagcagatttagtaatgacccactaacctagaattaatataacttattgccattaacctatggaattaanaagaacttaatggctgagtgtaactgaaattgtggcaaccaaaagtcacccccaacaaccaacaagtcagccaccatttggtctcccaaaaggctgatgcctatgttgccaattgggcccttattacaacttgaactaaacctaactaaagcccttttagttgattaacccataacatatttttggtcagccaactttacaaggattgggccattatttatacaaactaaacactctaaaattgaaacatagtggtgtcatttagtcctcctccatttgggccatgatac

SEQ ID NO: 94884 - DNA, 364 bp, Glycine max
ctatcacaatcaagatgcgctctagacattcaagttgttttctgactatcttgaccaaatagcaaaatgatgtccctcgaccttggcatgccgattgaactactttaggacgcatagtctcgtgaatcgcttactatcatgacacaatgcaagccttgctgataaatatttgtcctccgtatccaaattcctaatatgaagctgaactcatatagagtgaccaatgtgtgatacacactctctcggtagctgcttattgcggctaggcttatactcggtccaactacatttttgaaatattaccacgtttcatgagtgtgattcataaccatcaagtcctaatgagagcgctcgacttctgtat

SEQ ID NO: 94885 - DNA, 481 bp, Glycine max
  unsure (1)..(481): unsure at all n locations
tcctcggngccatttcctgcgaaggcaaacatttggaaagtatttttaccaagaaatgctactcttaaaacaaaaatggcatacaacctcctccaataaacacaaacatcaatgtaaatttagaacaaactcatgcaatacttccttatgaacattcactcgcacaagatattctcctacctaagaaaaatgcacccatgcacaatcgaggcacctttgttacctagattatttatatgtactttcaaggagtatttgctacctacatcacatgcacttccttggctaaatttacatacatgcatactcaaagcattntggctaccaaaaattgcacacgtgcacattctggtattgcatatacctatgcatatacaaactttgtgatgaatcttggctatctacacaataaggtgctacatttcatgctttattcaagtgtttntgctacctaaagccacatgcaaattcaaatatattt

SEQ ID NO: 94886 - DNA, 336 bp, Glycine max
cagcatgactggctagacttgctagcttacatcgcttcaagtacacgcgcgtgccacccggcggtcattttttgtctcattccaagctgatgcatagcactttatactctgtggccacactccatctcagacattgctcatttacacgctgatcgatgacactaacgtgtgaatgtaactctagtctcttcttggggcattattaccaagatcgatatcatacgagatcctagctataaatgaataggacctatcgcaaacgttacatatctgaaatagaaaggacctcgtcaccatgggtgactctagtccacgtgaacaacattggatgcaccc

SEQ ID NO: 94887 - DNA, 318 bp, Glycine max
atgcagacttatctattcaaagacatagagcccttctagtttataagctccaaaaaaatactaaaaaacatctgaaagagaaaaaatctgtatattattaactatcgtattaaaaatgtgtcgggccagcatgctcgtggtcagcataaaataaaaatgacactgaaacggtcgcgctgcaatgcgaagcacctcttacactgcggttaagaatcactctctccccttaattaaaacggccagcctttgccctctgctgcaaaaatcacgcagaaaaaaaacttttcctcactatacttgatttacgagcgaaaattg

SEQ ID NO: 94888 - DNA, 376 bp, Glycine max
cccgttgtacgcaaatctgtcttcacaatccaagaatacgcagatggctctatcatcaagacaaagcctgattatttgcgaaaggatttaatcaagtgcgctactccactaagcgagatcatcaaatctgttgaaatttccgcattttgtatgaactcgctaagccactacactactgactagagagtctttgaatcttgctcttatatttatgggtttgtatgaactcgcttagccgaccatccgcacatagcaagcacaattagttagttctgaaacttataggctctttgcattccctctatggcttagcgaccatggctcgctaagcccaaatacgcatatggaataaaattgtgataagcgagacatgctc

SEQ ID NO: 94889 - DNA, 464 bp, Glycine max
  unsure (1)..(464): unsure at all n locations
gtaggattaaactctttactctcaactgtttntcattcttcttgctctctacactcttattcctctatttagttgcacacaattatgtggcttttacattggtgatgaccatgagaggctacacacttaatcaatccaaggattcactgcatgcaaggctaaaattatagtttggtttagtatttctaatttttgtgaatgttcatctttttcttcaatcctatattcgattttcatgattatgagtatgcttangattgaaaaccgattacgttatggattaatttcataatttcacaatctaatcacagatttcttggatgatattgcaacctaatttgtgatctcaaacaatatacggatcgatttgattgatctatctctaatgcatctaactgaactttcatactatgaacatcatttgtaataactatgattattcgatctgcattcgattggtgaat

SEQ ID NO: 94890 - DNA, 112 bp, Glycine max
ttgggacctctctgtatcaggaggctcctctttcttgctctgttctggaaatacatgagacttaactaaatcgctctaactccacactctaaggataaccaactagaggtct

SEQ ID NO: 94891 - DNA, 316 bp, Glycine max
  unsure (1)..(316): unsure at all n locations
acagtggtttattaaaattaagtatcttttatttacgagaggatctctaattttgaggattaagaacaccctgctgttcaaagatttacaccttgtgtgttgcctcgctggaagagtgatttttcttctttatcttcacccttgtctttaaaccacattccgaaaattcacctctgccagaatatctcgtggcataactcccatntacgcactcaaattaagtgattttgagcctaattgaatttaaaacagacctttacctcgtctggaatacctatttggagtctgtacttagtattgcattttatattttgtc

SEQ ID NO: 94892 - DNA, 466 bp, Glycine max
  unsure (1)..(466): unsure at all n locations
ctaagctcatctttngtgntaataaatatacataacaataccttgatgcatcatcaataaaagtaacaagatattttttatgacctaatgatggagtagcatgcaaatcacacaaatcactatgaataaggtctaagactttagtctcacttttaacatccttaaaaggtttcctagtgatcttggtcaacatgccaagtttgcatttttcaatgttcatatcaaaaggaggaatcatacttgtttttgacatatcttttaatctnttgtaatgaacatgtcctaatctagcatgccaaatttctgattttgtcatattagttatagaactacacgaggccatacaaacagattcatgaacaaaaagaacagcaatgtttaatttaaacatttcattacaacgataaccaaatccaacaaacgaaccatgtnttgacaagatgtactngtcactttcaagtacttg

SEQ ID NO: 94893 - DNA, 449 bp, Glycine max
  unsure (1)..(449): unsure at all n locations
ccctcnaagtaataattgattntctntntaagataaatcatccaatanaactcatccaacattntaaaatggacaacaaaaatctttcaagtactcaattagccaaacctggactgctataaatctatctctactaacttcatacatgagaaaaagttccaggcaatggccaaactgaacccaacaattgttcaccttgatatctattgagttactgtcaaaatatattggtaccttgataaaggaatgaagatcattatgcttcctaacagggtactggcaataatagtattttgtaatgaatcaacatttgtcttgtggccatttccaccttccaaaacatcatcagctggaagtctgtatgaatatgagccctgtaataaaataaaaaacataaattacatctaaattacacaatgaagcagattaaagggggagagggaatgagt

SEQ ID NO: 94894 - DNA, 456 bp, Glycine max
  unsure (1)..(456): unsure at all n locations
accttatgattcttttcctccattgtaccagatgatttaccccaatatgcatctnttggcttctggtttttctcctttcttgttgtctcaataaatatgttaacaatgctatcattggggtccttgcagattgatgaaaagatgaaagatgctcttcaagttgactgcactcgctatgctccaggaattgagatcttaagtgtccgtgtcacaaagccaactattccatatagcataagacgcaatttctaacaaatggaagaggagcgtactaaggtatatttccattaagaagagctgtcatgttaatatgtgtggagctacatatgtaaaacttagttgagaattttatttgaaggaaccagggttattaaacatgggtgagcacatgcacatatcagtgcatttttcacccttatngattgattgcattgtcatttctctgagatgtgtgcc

SEQ ID NO: 94895 - DNA, 364 bp, Glycine max
  unsure (1)..(364): unsure at all n locations
ntgatcagaagctcctctttgaatgagcgctgcacgcgaacttcggtcatgtcgcatgatctcggtcgatcattatgcatgctgcctgtggccagacatgaaatgccatatgatttatagaacagattggcacattgctataacagctgatgaatgcgagatctcgtgggaatatgagtccgactccaagtgcgacatcaatatttgtcaatgaagcgacagacggaggggaaatagaagaagagataattgctgttactacgcgatgatgtcttactacagcttaataccggtgatgccgatgcaattgcacctgcacttctaaggctataaaagtccatcatgggtggaaaactggatagcg

SEQ ID NO: 94896 - DNA, 315 bp, Glycine max
  unsure (1)..(315): unsure at all n locations
cgtaacaaaaaggaaaatatataaaaatcaattctgaaaaatatataaatatcaaaaatcatcgacgttttctaagttcttgataatgctataccagtaactatgtaaatactccaatatcttgtccaaaatataaaccgttaagtcaccctaatggctttttttttggtttaggcgccaaactaatcactgacttcgtttcaactctggctatttatcatgaattacaaaagccgttgcacatcaaatctatgcacgtacttttcttcacaaactatgcaactactttcttnaattaactatgcacctatactt

SEQ ID NO: 94897 - DNA, 466 bp, Glycine max
  unsure (1)..(466): unsure at all n locations
ctgtatatcatcagtaatacaggccacgaactatggttgttgcttaagttaccataaggattcattccatcagaagcaagagcaacccttatgttccttggctcgtccctaaactctggatacaaacaatcaattgtcttccattatggagaatcggtaggatgtcgtagtaagccatcactttttctgtccactgaatgccatgaaaggttttttgaatcatgtctattatcaagcaatcgcttataccttggtatgattggaagataccatcaaacctttgcatgacgacaattnttggttcttgcatcatcagttaattcgtcagactacactgtgtatcgtgataccccacacgtggggcattgccgtagttttgcatacttatttctatacaatatgcaatcattatggcatgcatggatcattctgtactccattcctactggacacaaaatcttttttt

SEQ ID NO: 94898 - DNA, 386 bp, Glycine max
  unsure (1)..(386): unsure at all n locations
cctgctggtagatgatcagggctctaactacagaccacttcttcatgctcatgacttgagtgtccctactcgatgtggggtgaggctggacagactccctgctgggaggatagggcgtcacttttaagctttcaccgtagcactattgtgactactatntatctaccttgacagtcatgatctctcctattaaggtggggaactatatgtttacatgcgtggcggatactaacgctctgagctcgttgagcgattttctaccaatcatagcccaatacacggtatttgagttaaccattatatacctgactattaatctcctcgagagcagtctttgaccgaatgtggtcattatgtacacatatcctatggtccacatcgtaact

SEQ ID NO: 94899 - DNA, 481 bp, Glycine max
  unsure (1)..(481): unsure at all n locations
ggtcactggttgcaaggttaanattagcacttgcttagatgccttgatgagtatgagctcaagcacatttttagagaaaacaataacagagcatatgtgctatcaaatttgtcgagtttcaataagttggggcaacataaaacattcatacaagacacacttgttacatctagcatagataaatctgatatctctgcaagtcaaattggtagtgactcttggatgaacctgatatggaattatttagtgaatgatcaattactagaggacgaaattaagcccaagaaagtaaagttgaagttgccccattatgcttatcattgatagagagattatcatatagtgaatctatgccccattggctgaaattttgaatgatgatgaagcccaatatgtcatgaacaagattcatagaggcatatatggcatgcgctcaggaggaaggaatatggcaacttatggttctccaagctggtattat

SEQ ID NO: 94900 - DNA, 446 bp, Glycine max
  unsure (1)..(446): unsure at all n locations
tgntgtgcaccatcgcccgaccgccacctattacgacatgttatgggtaccccataatcctacaagcttgagatgaggaatgtgttgaaggtgaaacttcctgcttttattgttgaccacagagtggtacctggagatatgtcgcgggggtcaggagaccttgtggacgtcatgtggtgtgctattgcccataaccaatcttgaccaatcccgacccatcccgggcatattcggtcagtgagaacatgtgacgtacctaatcatgcgagctcctggcagtctacatattaaatgataacttgaccacatatcatggaggcttgtggtggctggccagctgtgaattttgtgtaatatgtggattgtggcctctggtaatcgattaccaagggtgggtaatcgattacaatgcttaaaattgaagacaggtggctaagatggtctct

SEQ ID NO: 94901 - DNA, 226 bp, Glycine max
  unsure (1)..(226): unsure at all n locations
ctgcagctggtcagtctaccgtgagacgaaacataaaacaatgaaaacgtcaaactttgaaccttgcagattctacgnacgtacgaacattcgagccctcgctatatttctccggaacatntttcagcaatcaagaaaaaggcctaggtgcctttttttgttctccttttacaataggagtgtgcgccctgcagcactagtgccagcagcaggtgttctcaaacac

SEQ ID NO: 94902 - DNA, 453 bp, Glycine max
attacggacactttaatactcaagcttgagcatatgaacctaaattagtgagccttgtacatcctgtcctacagttactgacaaaggagttggagtggatgacgaatggatgtcttctattctagctctttttcttgattccatctgtaactaataagaactcaaaattccttataccaaaatcgttcaagtgaaacaacaacaataaaggctaaaattaacaatagacgcttggcgggatacatctcgctcagtgcgccatgagcaacataacatgtctgcttagctgaagctaagctcgcttagcctaaaggttgtcgtgatgaaatgcgcttagctcagttaaactcaacttatcacaaggcttacaacacgatatttggttaagttacctgtgcttagcgattcatcctcgcttatccacatgtagttcaacaagaggatgagtgttca

SEQ ID NO: 94903 - DNA, 123 bp, Glycine max
gtgtgaaatgacactgctattcatcgataggacaccatgtgttacgcagccaaatcttgatcaaccaaggagattgcttgagaccctatctttatatagatctcgtatgattgatctttgata

SEQ ID NO: 94904 - DNA, 397 bp, Glycine max
taatataaggtatgccaagtgggtggaattcctagagcaatttccttatgttatcaaacataataagggaaaaggtaatattgtggctgatgctctatctcgccgtcatgcactactatctatgcttgaaacaaaattgattggtcttgaatgtttgaaaagaatgtatgaaagtgatgaaactttcggtgaaatttttaataatggtgaaattctttcagaacatggtttctttagacatgaaggctctcttttcaaagaaaacaaattgtgtgtgcctaaatgttctacaagaaacttgcttgtttgtgaagcacatgaaagatgattaatggtgcattgtggggtccaaaagactctagaaacattacaagaacatttttattggcctcatatg

SEQ ID NO: 94905 - DNA, 358 bp, Glycine max
  unsure (1)..(358): unsure at all n locations
gcacctatcttgaatctcctatgctgtacctacatataagaaacagtcccactctgccaattntacaaaatcatattcatatatcattggggcatttcaccgagcacttggtgaacgcatgtttggacataaattgcaagaggatggggacaatgtggcatgccccattgcttcataatacagcatanncctaaggccttctcattcaaatccttaactcaagaaatcaagcataaaaaacagaccataactgccccacaaatataagcacgttctcacaatttatagcaccanaaagatgaagataatactccaatgggaagcaaaaaactcaacgattgaatacttacttgctgga

SEQ ID NO: 94906 - DNA, 321 bp, Glycine max
  unsure (1)..(321): unsure at all n locations
tgtatgctatccctccgtttagaacaactcatcgcacgttatagtaacaattttgcacatgcgtatgtgagaaatcctactattatatcacatagaagacatncacatattctaattggctaccctatatacttctgaaaaaaaaaaacactttatgctcaagtgttgcgcacacttacacctaattatatctaaaatctgctatacaaactattacaacattgaagacaccataccaattttattgttcactctatttattatatgatattggaagctaatacatttgccacattgcttcaaaggcttcctatatatcat

SEQ ID NO: 94907 - DNA, 278 bp, Glycine max
taaggctttgatcttcatgcacttagaacaaaacatgtgggggacatatattatttgtttaccttctgtaactgtcaagcgtaaaaaatacagttttgcgtatccataaaatcggttaagatccattcttggtttgtgtaaacaaaggtgtccaaatttcgctccttcaaataaaagtgcggaaattcctctggtcaaagcttggtatggatgtttccacaactcctgagcaatttacaaatttatattgcaatatgcaatttttgaatattaaaaat

SEQ ID NO: 94908 - DNA, 171 bp, Glycine max
tgtattgttagccaacatggaacaataatcaaattgacgcccgactgtaagcggatgtacgtgtgcatcatgaatgtcaacttctgccgaggatatcgatattatattgatctctctcctatgtctgtcgcccaagtacaattggtgataaaatagttaaatattgcgctg

SEQ ID NO: 94909 - DNA, 287 bp, Glycine max
cctgaagttattcttaggtttatattttttccagcaaaggttatagaaaatttttctgtgacagtggacattggtgtcttgcgttggataaaatggctccactcctggagggaggggttaatttgtctttcaaatttttttataaagagttctttttttttttaaaaaacattttttttttttctctcacactttattttacataaaatcatgctttgcttagattctattttttatatcttttgaattgatgtttactaagggcttttttaaaatttgtttctatt

SEQ ID NO: 94910 - DNA, 472 bp, Glycine max
  unsure (1)..(472): unsure at all n locations
tgcttaatggagganaagattgagggagatatatgagagaggtgggagcacgaaattcaatgaataaaagagggagagaagtggacactttaagaatgtctcacaagactctcattcatcatagttacaacaagtgtgacacatgcttctatttatagactacgtagctttcttgagaaggattcttagagaaaaattccttgagaacctcgtntgagaaaaacttcctgagaagctagagcttatctacacacacccctcctataactaagctcacctcctcgagaagctttcttaagaagattcctaaagagactagagcctagctacacataccttctctataactaaacccacctccttgagatgagaagctagagcgtatctacacaccctcctataatagctagctcacccccatgacagaatacatgagaatacacataaaaatccctactacaaagactactca

SEQ ID NO: 94911 - DNA, 337 bp, Glycine max
tttttttgtcgaaaatagcgtgtggttgttcacaatcttgtgcttgtaaccctggtcaaaaacatgacgttatgtaaagaactctaactcactcattggttctcaacaaaaattaaaaattactacagcggtgatcatagcttctattaatcttcgcatgacataattgaaggatttaattatatgtactgactgaataaaatttattttatatagtgatcggttggtaatataaaaaactttgcactttttttaatatattataataataaccactaacatattaaaattagtccaaccgctgtattttacatcctacaataatatttttcacaaa

SEQ ID NO: 94912 - DNA, 375 bp, Glycine max
atgaacttaccttagtgtcaaaacagctattagttaatttgaacattctttagatggcgagctgggtgaaatcaagcttaacgaggtggatatagataaataataggaggaagaaagttttataatattaaattctattaaaactcttaaattataaaaagatatttaaagttaataaaatacaaaaaagcatcatttaatgtataaatgcacacacttgtgtaaacaaaagtgtgatttgtcttggctaataaatgcgtgagttgcaccttatataactatctcattccatatatggctatatgctagaggatttgacccaccctcctaacataatctatatttattcagccgacccatgtttaatacggaaag

SEQ ID NO: 94913 - DNA, 326 bp, Glycine max
gaaactaagctcagaagaagtgataggacaagctctattgaatactttagaccccaatggcgagatagttaaggtcatagtcctcaaagcttgaaagaggttgtttacctaaggcggttatatggcccccgttgagccctgggaccagaaaaccaaaaaggccctaagggagaacaccttccagccaagttttgagggggtttttttggcaacaataggtaactcaagctcctaagaggtgaaaggaatatttaccggtcaaaggcatgatcttgacggacaagctataagggtttccttagggggaaagaaatttttcccccatt

SEQ ID NO: 94914 - DNA, 337 bp, Glycine max
aagtgacttccggcaaactcaaactattttattaaatatggcccactgaacttaagcttgtctaccccttttcctgtggatatcttcgttgaatattcaatccttaacgcaatgagttgtcttccgcaatggatttgtatcacccatgcaaggacaataatgaattatgatctcttttcagactcttttcgttcttctcaacctcaatagtaaaaacgacctcttttatatcacaatgcactttgtttactcgaattaataagggaatattctacatctactgtttcttttaattcatgatcacgagcataccaaatgtttgattacagatgcaaac

SEQ ID NO: 94915 - DNA, 397 bp, Glycine max
  unsure (1)..(397): unsure at all n locations
gcaagcttcttgagaaactagagcnttgccatactcactcctcttataactaagctcacctccttgagaggtttccttgagaagattcctggagaagattccttgatacgctagagcttagttacacatgcccctctaatagtttagctcaccttcttgagatgaaaagctaaagccttatctacacacaccccctagaatagctaagctcatcccatgccaagatacatgaaaatacaaaaagttcctattcaaagactactcataatgcccttgaatacaaagcggaaaccctatactacttgaatgggccaaatacaaggtccaaaagaagggaaaacctattctaatatttacaaagaagagcgcaccaaaccttggcccatgggctcagaaa

SEQ ID NO: 94916 - DNA, 387 bp, Glycine max
  unsure (1)..(387): unsure at all n locations
aactgaagcggctaaactttatacaagaatgaagttctgactccacttgnncgacaagnggcctcagatatcttaagaaggggggttgaattaatatattacaaactatttccccaattaaaattctatttcactttctattcaagttacaaattcccttaacaatgaactcttaaataatgaatcaaatagaacaatctgaatataaatataaaacaataataaataaaagagtttaagggaagagaaagtgcaaactcggatttatactggttcggccacacccttgtgcctacgtccagtccccaagcaacccacttgagagttccactatcttgtaaaatccttttacaagttctgaacacacaaggacaatccttcctttgt

SEQ ID NO: 94917 - DNA, 358 bp, Glycine max
  unsure (1)..(358): unsure at all n locations
tgcggcatgcaagcttgtgacagcgtgtggcaattcatggttactacatngaatcctcgtgcacccctacctcgagtcgtggagtcatgatgactttgacgagccccgactggtgtagtggtattatatacattgaacacaattcaatagcttcttcaacaatgtattctttaacaatgcttgcttctggtcgatattgattctttgtttattctgtcaaacatatttattgaccgcttaatcggatacattcaacgtatatatacaggcccacaaaaactaaacttctgcacaagatgaactattaaatgaattattatgtctacaaatgatgatgacaacatcattttcaattcac

SEQ ID NO: 94918 - DNA, 279 bp, Glycine max
  unsure (1)..(279): unsure at all n locations
aagaaacccaagctggcagaatgtttgtgaaccttttacattttttggatatctactccctcttccatattgactagaacatccctaagtgttacaaggctcaatgatgcaaccctaccccgtaagggcgttggattgaacacttcaagaagattggactctagatgtctgagaaggcctctaggttctcatgagccttatgtatactttgggctcatgggcttagtatgagcccacttttccttgtcaatcttggtataggaantctttctttcgggc

SEQ ID NO: 94919 - DNA, 470 bp, Glycine max
  unsure (1)..(470): unsure at all n locations
agctntatagcccaggcacctcaacagttgatacccgacgaggctgctcctcctgagcccacacctacacaggtcgaactagagccagctgatccaccatctccagtggcggatccattccttccattgagcaatttctggagagggtagcctggcctgaggcccaaccttctcttcatagggaagatgaaggtcccataacccaggaacccccgacaggtacaggatgcttcctctgggaccaccattccagagccatttacttttcaacaggatgtaggtgaagagcaggttaaaccaaagactactactactcctgagagatctctggagggcacatcagagcctcctactccagtagcagacctctcctcaccacagcctgcggctgacccttccactcctgtacttaacatactagaggaccagaccacaccagtcttgacactgaacacctctccttcaactac

SEQ ID NO: 94920 - DNA, 369 bp, Glycine max
agatgtggaagtgttgaagggtgaaacctttcgtttttatagctgaccacagagtggtacctggagatatgtcacgggggtcaggagaccttggggacgtcaagcggggtgctattgcccaacaccaatcttgaccaatcccgacccaacccgggcatattccgtcagggagaacctgtgatgtacctaaacaagcgagctcctggcagtcaacagataaaaggaacaaagaccacaaatcaaggaagcttgatgtggctggccagctgtgaattatgagtgatatgtggataatggcctctggcaatcgattaccctgggtgatgaatctattacaaggcttaaaacattgacacttgacgctaatat

SEQ ID NO: 94921 - DNA, 439 bp, Glycine max
  unsure (1)..(439): unsure at all n locations
gtgcaagcttncacaatatccaagcaattcatattctatatatcatgaactaccctaaaccaagaaagtagggcagaggcagaaaactctgcccaaaacacattcacatattacagctntccttactcatatatgccagtaacactttcttcgttccgatttgttaactattggatcgacttaaaaatattactggaggttcctagtacataagtcttacatctgaccgttgggatctgctagaaaatgtctaaaacacaatatgcactacctttcccataaccagcaatgcacaagcatttgtttgcacacaatcaaaaatctgctgcacaattcaacaacatttctgtacataatacggaagatttctaaatccatcttgcccacatccaatattgctcaaantggatcctacaagttcctaatcatggtttaatta

SEQ ID NO: 94922 - DNA, 325 bp, Glycine max
  unsure (1)..(325): unsure at all n locations
agaaacccaagcggtgcatgccccaaggatccatnattttttttatttttttaagagagccaagagggcgggctcattggccacttttggatataccagacccctgtcgtcctcaacaaaaagtttcattggccctctctgaacaaagatgtccccttcgcattgctctacgtgtgtgtcttgttaacaagccctcgccctggtcattcctcatggggtttcctctccctttcccttcccatcttcacgctggtagaccttaaaatggacttatgccttgggcttcctagaacccaacgaagcggactcctcatctctgtggtgg

SEQ ID NO: 94923 - DNA, 397 bp, Glycine max
  unsure (1)..(397): unsure at all n locations
gacattctattaactaagaaaaatgcacccatatacaatcaaggcaccttcgttacctagattatttatatgtacttccaaggcgtatttgctacctacatcacatgcacttccttgtgctaaattacatacatgcatactcaaagcatttggggtaccaaaaattgcacatgtggacattccggtatttctaatatttatgcatatacaaacttcatgatgaatcntgactatctacacaataaggtgctacatttcatgctctttttcaagttttgctacctaaagccgcatgcaaaatcaagtatattttcttttgctgaactaaaatgattcaaaataaaaggatatattttttgaatgtatntctttactacaaggaaatgatattattttt

SEQ ID NO: 94924 - DNA, 320 bp, Glycine max
aaaagaagaatttgacgtgtgaggtaataacccgctccaacttttcacttaattaatgattaagtaaaaaatgttattatgttactacaatagcatttacctcaattagaataattaaatttgtaatattgaacgtttaaatgtctaaatataaatatcatagataaaatatgtgatttgaatcccatatgaaatgtgctagtagccaaagtttacttgttcgatttctaaaactacttcattattttgaactgtggataatcaacataatgtttaatagtatataaaattatttacattttgttgagattggattctat

SEQ ID NO: 94925 - DNA, 321 bp, Glycine max
  unsure (1)..(321): unsure at all n locations
ggaagggctcgacatgattcatgttatgtcttggnacggaccaaggataaaagggatgccccacattatctctatgacacaaatgcaaaaatgatgatttggaaactctatgcaaaacgggtcatgcatgcacctatgtggacactcaagtgctaaatttttatggacatgtgatgctacggctcaggattcattttctctattttagccatcccaacgttttcaaaatatgttcttatatcactaagtgcatgcatacgagtgcattctgggcgtatgggaaagatttctcagtactcacccttcatgtgtgttcacatt

SEQ ID NO: 94926 - DNA, 351 bp, Glycine max
  unsure (1)..(351): unsure at all n locations
ttaaagaagntagagcttatctactcatacctnnngaagagcggggctcacctcgttgagatgacaacctacaacttanctacacaccccctataatagctaagctcacccccatgacaaaaaccatgaaaatacaaaaaaaggtccttactacaaagactactcataatgcccccgaaatacaaggctaanaccctatactactagaatggccaaaatataaggccccaacgaaggaaaaacctattctaatatttacaaagaatagcgggctcatacttaacccatgggctcgaaatctaccctaaggctcatgagaaccctaaggcctacccttgtatctctagccca

SEQ ID NO: 94927 - DNA, 474 bp, Glycine max
  unsure (1)..(474): unsure at all n locations
atgcacgctgtgcatccataccctgtgaggatgtttattgttttanactgactgaccattgctccaaagttcatggccttgcaggtgaagacccacacaaacatttgaaagaatntcacattgtctgctccaccatgaaacccccagatgtccaagaggatcacatatttctgaaggcttttcgtcactcattatagggagtggcaaaggactggctgtattaccttgctccaaggtccatcacgagctgggatgaccttaagagagtattcttagaanaaattttccctgcttccaggaccacagccatcaggaaggatatctcangtattagacaactcagtggagagagcctgtatgagtactatgagagaattaagaaactatgtgccagttgcccncaccatcagaattcagaacagcttcttctccaatacttttatgaaggactcagtaatatggagagaagtatga

SEQ ID NO: 94928 - DNA, 385 bp, Glycine max
ctaaccaattgacttggagaaatccctaaaatttggcactgtacagcaatacaacgcagtgctctaaattcatccacatgaaacattcagaccccaccaatacaccacacagcactcccaatacagaatcagccacacaatcatattgcaaaccgatacaaatttccgcacataaaaaatcaacaaacagattcaccattcaaacaaaatcagcaaaaacttgcctcacgaagctgatgtgcacgccgagactgcggtgaacggcggagcaatcgatgcagaggaagatcccatacgtgacggacgcccaggtagggttcttcgcattgcaatcgaaacacatctgaaattaaaaaaaaaaaaaagccatacaaattcaaaaatc

SEQ ID NO: 94929 - DNA, 458 bp, Glycine max
  unsure (1)..(458): unsure at all n locations
atgagctataaaagaggcgtgagatgatttattcattatagattcttgggcgcatacgcacacagcatcccncttcaactctgaacacattcttgaatcanatcaaagtgattcaatacaagtactatgtccaacaagagtctatcattttgatgatacaaatgaaagctttgtaaaggacctagatganaaatttattaagaggatgangaaactatcaatcatttccagccacgttgtgttcgacttaaccacaatgattgagggtaagctcgaatctcgtgtaatgtgtgttcttgaactctacacaaaaaaatagagctagatataaatagtagtggaagaatanactaaacactgaaaagaagaaaaaatgttgaatcagacagttagtaaaaaggatgtggcaatgtcaacagtcctattgacctgaaaattagccaaagaaatgaacagag

SEQ ID NO: 94930 - DNA, 387 bp, Glycine max
  unsure (1)..(387): unsure at all n locations
actaagcttgcattcggagaggttccatcaaccgccctaattccttgatgctggtggnatctaggcctttaaccttgacttggtaaaacctcttgccggtttgatttgtccccatgcttactaaagtgagacaaaaagctggtgcaaatcaaaacttcgatatctcatgggtgggatggatgaatgcatgaaggaatgcatatgacacagttgtattttaagaatgcgggtgcccgggacattgtcttctttttagacacaacgtataggggtagcaaagtgccccaacgtatgtatttaaaacggtgacccggaccttccattgatttgtctatagaggggatcaagacagaacccctatgcatatgcaaaaggcgcaatagcatg

SEQ ID NO: 94931 - DNA, 377 bp, Glycine max
accaagccttcctcctgaagccgcgagcccggggtttactttgtcatgggctggagggcctgtacctcgcgacgaatatcaagcgcaaggccagacacgaaacatttcaagaggaacagggtcggaagtccaacgatgcgattagccaaatctttaaactccgacaggtaattggcgactgaacctctttgtgtaagtttaaataatgagcctgttgggtcctcatattgaaacgggacaaaccttatttgcaaagcttgaagaaaaacaggccaggaagtgaactggtcgttgcttgtcatccattggaaccaagcaagggcccttccttccatgtagaacccgcaatggtgagtctgtcgtgggcactggtgcca

SEQ ID NO: 94932 - DNA, 469 bp, Glycine max
  unsure (1)..(469): unsure at all n locations
cgatgagctggacttgatcctgattcctcctatccaatgtacttgtaaaatcaagatccccaatgctagtgttagaaaaaagaaaaaaagcacgcggtttgaanatggtgaaacggaagcttccggcaattagtttatggaatcttcagaaaatttgtttctggaattatttaacacttcctaaaattaatttctggaagaataagtttggaaaaaaaattcaaaaaacggcggctaaataaaatagagggtacaaatagcaatttcctaactagaagttctcttaccgtttaggccattccttcttgcacccctctntggcttctgcatctccattatattttatatccccatactactctnttattataacttctttctcctaacccttggtttttctaattcgacttcataactcttctttctaanaacattttatgaatgatngagagagtatttatataatctg

SEQ ID NO: 94933 - DNA, 379 bp, Glycine max
tctttttttttttttttgaaaggacgagacttttttcttatatactcaaatccaggtcctgttgtataaatcaatccgattaatcagctgaaaacaaaaatagactatgagatgagcgtgtctcattgatttaatctcccccctccctccccccagttacactaatctaaaaaattacacgcatatcctttggtttttatattacttttacacatatatacagcagttgttttttctataataaaaaaaaactacacattcctcccttacaaattatacacacaataccctgaaaaaataatggtattatgctaagtataattttttaatcaaagagtgcaagtacaattaataccattatgctaactctgtgacagat

SEQ ID NO: 94934 - DNA, 330 bp, Glycine max
gaatttctttttacatatttagaacaatacatacgactttctaagaattgtgattttattcaatctaaaagatactcaacatttataatattgaagttttcagtatttctttataattatttttttttttgaaaaatatgtgttgttcaactttcttttttaaaaaaaagaagttaaaatagtttaattaaatgctatttaagttagatgtgtagaaaaataatttataaaaggaaaacaaaatactgtccatatataatataaagcaagaaaaaaatatattctgccaaaagagagtacatgaatacccaattcatttttaagtagagt

SEQ ID NO: 94935 - DNA, 320 bp, Glycine max
  unsure (1)..(320): unsure at all n locations
actaagttcagnttttatcatgtccaactggcgaagggagtagcttagccccacaaatttttcttttagatctcttatttccatgtccttctctctgcaaatcacttacttattatctcgtaatgaacacctgtgataaagaaaatccggaggaaaaaatctcaatcatattacgacatggaaaattttggattacttgtgatctaacacctattttaacttcgcaaggtatataatcattgaccaaaacatataatacctggacgaagatacaattttgaacaaataattcatcacattcttggcatcagcaagggacc

SEQ ID NO: 94936 - DNA, 232 bp, Glycine max
  unsure (1)..(232): unsure at all n locations
tcgatttacaatcaccagcgccacgttatattttgtattatgtcanacagccgaggcagagctttggtggctagacctgtcttccaccttccgattttcacttacagcaactcgagctactacagagctcaatggggcatccgagccaaaaggaaatgtcgtttgagantactgagagcctccatatatattgactagcgctgtgacatgctatgggacaaaatcagacatc

SEQ ID NO: 94937 - DNA, 359 bp, Glycine max
tttgtcttccgctgcatctccatggtggaaaatcaccattaaaggaccttattgaagcgtaaagattcagccttcatagaagttccacaagcaagcttcgatcattgaatatgttggtaaaagaaattttttctatgtgcataacatcaagactgtgtcgcaacaaattatctttctaatatggaagatcccaaaagatacttcttttgtccaatgatgccactcaccatattaatgtattgttggtggaggaagacagtttttgtgacttttggcagtccctaaccccacgccaaagttgtgagtgtgcagcatatgtaatgactcatacctttctacttccactttttgaagaattt

SEQ ID NO: 94938 - DNA, 378 bp, Glycine max
aggaacataaaactcagcttggaattctatgaagaaccttttagtttaccctttccccatatatatctaagtgatcccctctaactaattactctagtccccaactaatttttcctttacttctatctaacacaaaactaggttagtcattatagttattgctaataatagcggctcatatatatatatatatatatatatatatatatatatatatatatatatataagaatttacactactagaaaaatgcaatttagcaatcaaaattgcgactgaacagtttctatcgctacttgcgaccaaatttaatcgtagtagctaacttgcaccagcgaccgaaataaagagtcgctgaaaaatttggtcgctatttca

SEQ ID NO: 94939 - DNA, 374 bp, Glycine max
ttgacttgagtcatcaagagattatttatatgttaccatggcatgagtttcaactatcatcaatcatccttgaataatctatctttcaatcttctctcaacatcattcaatatctttcaactctttctacagaatttttctgactcatcttctcttcatctttctaaaagtttttgttcaatactttctctttcaagaaaagttctttaatcaaaaacttgtgatattcatctttttcattctcttcttcctttgccaaaagaacgaaggactgaccacctgaattcttttgtgtctctcttctccctttgccaaaagaacgaaggactaaccgcctgaattctttcgtgtctctcttctcccttacaaaagaa

SEQ ID NO: 94940 - DNA, 450 bp, Glycine max
  unsure (1)..(450): unsure at all n locations
agcttctcttagaaatacctattatcataggcacatacatattaaaaggatcacaacacattntattacaaaaattacacaaacatgatgatcatgagtttacttgaacaaaatgagtttcaagcacatgaccgatgcatataacttgatgtacaaaataatctcttggtggttgacttctaagaggacaaaatgtcattctttgttggagaaaaagagaaacaaggatgacattataccttgatgcaaccacataactcatgtcggttatattcatccacttatccatggtaacctacacgtaacaatcttaattagatttatttaaagcaaaattaatccatcaaaacttaataaaaaaactaatataccatcgatatgttaaccaggcccaagccacttagtgctttttttttataaaataanaattgaacttgaacacgtcgtttt

SEQ ID NO: 94941 - DNA, 374 bp, Glycine max
  unsure (1)..(374): unsure at all n locations
tgtaggattatggggtacccgacatatgtggtactaggtggcggncgggcgatggtgcaagccaactctccacgtccaccaatcacacataaatccaccatccccagtttcccaccttcaattgagctcacgtactcccacgtagcccttatcctcgttcttctcaacaccgggtccccatcaatccctccaagcttccacaacatccaagcaattcaacattcaaacatcataaactatcaaaaccaagaaaacagggcagaggcagaaaactctgcccaaaacacaaaccaataccgcaactttccttactcaaataccccagtaacattctcttcgttccaatttgttcaccgttggatcgactcgaaaat

SEQ ID NO: 94942 - DNA, 368 bp, Glycine max
  unsure (1)..(368): unsure at all n locations
agctttcaagacctatgtatctctgcngaagcttcttctctatgttgcttctagggctcttgtcccaaaatggacactgacgttgatgtgtgattctgtgcactgtgtcttgtctaaagtgtgtaaaagttataccctaattctgcacacgacaggatttaaatatgctctganatcgcgacgctgtgcttagcgccaccctcgcgcttaccgcggttaagtggtttgagcttagcaccaatcgagcgctgagcctggctgaagacacctgctgcgcttaacgcactgatctcgtgcatagcacgcgggcatgatattgatgccctgccagaatcttctatcgcgctaagcacgctgaagctgcactt

SEQ ID NO: 94943 - DNA, 370 bp, Glycine max
  unsure (1)..(370): unsure at all n locations
tgggaaaaataactacggtttcgacataattattgactaaanncgngaataaatttaaagaaggattattatcgaaattaaagacaactaggaggaccaaaaatataattttgactaattttaacttaacttactttgaagaccaccaaggctattgaccgccacaacaaattgttcatgaaaatctttggtccattttattctgtttttcctagttggaaccatgccataagtagcacaaacaaccttaacctgagaacaaaaagccaatagagaatttataattctcattcaaaaatcaaaattaaaacaccaaatagcaacattaaacaccatttacaccaacctcattaactgtggcagaataatt

SEQ ID NO: 94944 - DNA, 383 bp, Glycine max
  unsure (1)..(383): unsure at all n locations
nngcttggtctctgtatatcttcacagaacatattctcttataactctctggaacttagacctttctctctctagaaaccctagacatgcaaagctctgaatcccactccaaactccccttctaaaatctgatttcatacttaaataggtggcctcgttcatactcgtgcgcttagcacacttatggaccgcttagcgcacattaatgaattttggctaaacgcgtgcctttctcgcttagcggatgaactgaagtggtgcgcttagtgagatgaagtggtgtgcttagcaaacctgtacaactcattttctccagagtctttctcgcgcttagcccatgagtgttgcgcttaacgaacgctcgctaaccagcagattggctt

SEQ ID NO: 94945 - DNA, 365 bp, Glycine max
tgagataacagttccatatgcatactaactgtttattaccactcacggtgaaggaaggcgacgcacggcgatcggaaatcgcctcacggtagcggagaccaaaaaagacagaggggttttgttgcaaatgtaaaatgacaattgaaaatcattgtcacggcggagtattgtggccagaaatgcgatggtagtgacaaatgtttaggggttctattgtgaatgtagagaggaatatattggcggtggtggtttcacgaatcacgacttagattggccagaaatcagaggcaaggaaaaatgctagggttttgtgttttgaagaaattttaggaaaatgtaatcgaaaaattgaaagggaaatatga

SEQ ID NO: 94946 - DNA, 392 bp, Glycine max
  unsure (1)..(392): unsure at all n locations
agacatactcctatgaatcacgacaccaccctagtaccctattcttgcacagttgcactcttatttcactatatatattcaagaaatgaagccagccaagtagaaaacatacaaacaaggggctaaaagacaaggatgaatttgaggaacaagaagacacatttcattgagtcaaaaagattattttgggcatgacaaaaatgagcaattgaacagtcgactgcaaataattttaattgcagtcttgtgccaagcagaacttgtatgcccatagttgtgcctcantaaatggatatatagttgctacagatatctaaagagttattgacgaatgcttatctcttctaaaatcaaaggatgtattattactaacataatttgaagataaattt

SEQ ID NO: 94947 - DNA, 438 bp, Glycine max
  unsure (1)..(438): unsure at all n locations
tctacactgtcagacaaagagaagtatgtattgcttatntaaagctcacagcacaatcattcattctcttggtgatgaggttcttcgagaggtagctgaggagaaatctgcagtacggatttggctgaaacttgagagcctgtatatgaccaaatccctaactaacaagttgtacctgaagaaaagactacatcagctgatgatggaagatggtcttctatcaaagacatgttctttgttcacaaggcagttcttgatctgaaagtgtagatgtgaggatagacgaggaagatcaagcagtaatgctattatgttctcttccatcatcctttcgaaaattggtggacactactgcttttgtgagagatacactcacctcggaggaggttaaagctacccttgaatctcaagacttaaagaaaaagataactgaaaata

SEQ ID NO: 94948 - DNA, 429 bp, Glycine max
  unsure (1)..(429): unsure at all n locations
ctgcagctttgcctgaaaaatctatataaattgtatagtatatctctacgttggacanagaagaaaaagatcttagattaattattgaagccgtagaataaaataatcgagataaaagagaagaaatggaaagctatagatgaaaggaatggtactatcgaaaagaggcagaaatcggagactaactaaagtcggttggccttctttccttcaaagctccacatgtaaaagaagaaagctttatagaaagagaaggcggtcccttcaagagacctggaaactcatgagaagaaatnatcaaattactttcttctgttaatttaatatgtaattttttatttgccgctacttcgtggcttcgacattttattttttatggacaagtatttggattccctaatagcgggtaaaaaccttatgattttcatt

SEQ ID NO: 94949 - DNA, 342 bp, Glycine max
  unsure (1)..(342): unsure at all n locations
tctctagaaaactatggatctttttttatccttattttctctaaccattcttcttgaggagtatctctacttgcacccttcttctaattcatcatcagatgaatcatcgactntaagtgctttggatgaacttctcaagacttgctctctggatgatgatgccttcttgctcttctggctattgaaagtcaaggactttnttcttttgagtccttcatcctactggaagttatgaaccttgagggatatagaatcaagattctttaagttctcagtgttgttacctgtggtctccacttcttagatagaggtcttataatttcgtcaatgtcatcataatta

SEQ ID NO: 94950 - DNA, 458 bp, Glycine max
  unsure (1)..(458): unsure at all n locations
gaagtgctaccaggatgtttacagttttctaactcgtactntttacattgcattcatttaggagtaattttagctttgagtttggagttaaaaaaaacttatcacttagtagcataacagtaactcacattttttagttntgttcatcatgtgcagccttattaatggccaactcatttagaggaccacatactcattgtttanggaggtagtgaggctacaatggataagaggagatgttaagagctcttcaaccctaagtgaagccttctctacccctctcttttacttnttggtaatttccctttattagttttgttgtttagtatatttgtgggagtttaggagtatgtttattattatgaagataacgaaacacaagtgattaagaagcatcaccattttcttgcaaacccaccataaaatataacaatatttttatgcttanatcattcttt

SEQ ID NO: 94951 - DNA, 337 bp, Glycine max
  unsure (1)..(337): unsure at all n locations
agcttatgagggtatcaagagtgtattaacgttgttatcgatctaacacaccgctaacctatgagcgtgccaaactcaagggcattctatggatgtgttcctgacgtcctggagagagtcaccacctcttaatattccataggcatgttgaagtcatgagtccagaatcacgantccagccatcacggctcattacttcagactcttcactttagggcagtgctatggtcaatcaaacataacacttattcnggtatatagttgtangaggttgtatcacaatactgagtagcacccgatattatctctcaacatgatcctctgagggttcctactc

SEQ ID NO: 94952 - DNA, 447 bp, Glycine max
  unsure (1)..(447): unsure at all n locations
agctgggttggaggtacttacctgttgaagactgaagaatacgaagaacgaacgatgaatcttgaagaacggtcgaaaatcttcgcgtaattactcacggaaacgttacggaagcgcctcggcttggattttcttcacggaaataattntcctcagcaaattcgaaagagagagaagtgcctaaggggctgaccctttttctcttcacttctccccctattatagcaaaaaggggagaagcttgccgcccagcttgcccaggcgagctcagcttgcccaggcgagcaaggttgctttctctagaagcaacagccttctggagggccgaagtgggcctgggtgctatttgcacccccatttttactaaatacacccnctggccctcttttggtgattctttttccgtaacattacgaaactttacgaatttcgtaacgatacttattt

SEQ ID NO: 94953 - DNA, 412 bp, Glycine max
caggtgatagcaagcacatgaagctgatcatgtgctcttggatgaaaatgttgaggtctcttgagtgaatgaggtcactggcctacacgtctctcatacgttattaacacaagctttcattcttgtctctgacattggaagttcattattttagcaaaatcattggcccgaactgatgaaaagcacggggctctcaaagatgcgtttcatgtgtgttgaataaccatatcatctctgtggtcagggatcaaacaattatggaacacagtctcgtcattggttgatttgaaatggcataaaacatcttttggaggattaaagaactctaacctattgccaagccctgaatttcccctaatctccaataatctgaaccacagtgagattcatcagctgacatggtatagccgat

SEQ ID NO: 94954 - DNA, 463 bp, Glycine max
  unsure (1)..(463): unsure at all n locations
agctnggagcatagagctgntgtcttgaaggaatatgtttgtagttctttttacctcccaatgtatagaagtaagtttacgatcatgtactcttggttatgctttgtaaggcacataagtaccataaagctttgtgtaagttatattcatatgtattcattaagttttgtttccgcatagctaactttgatattattatattctgagttccaaaaattagtaatataaataggaaaaatgtatcattctttagggtgttacgatgcaaattaaatggaatattagttattgatgtgttgaagtttcatgcgttcacacttttattatattcactactagaaaatacactgtcaacatcggttatttagaacattctacatcggttctaaaaccgatgttgaagtgacgatgttgtatgtatgaaatgttacattggttctccaaatactcgatgttaaacaca

SEQ ID NO: 94955 - DNA, 340 bp, Glycine max
  unsure (1)..(340): unsure at all n locations
gtaagccttataaaacatcttatttaatttatttatcgatntttaaatttatatactttcttaaaaggggaatggtcttcttaaaaaatgttctaaaaatttatttaaaatcaaaatgtgcaataatatattctaattaaataaaatgacaactctaaaacaagaaaataaatttaaatttaaagttaagacataaggtgtgtaatcatttaaataaatcaatatattttttatttcaaagttttgttattaaatctaaaataaccgccatattgggttttatgtagataatgtaatttattaaatataaaaatatttttgaaatactttaatctttccc

SEQ ID NO: 94956 - DNA, 429 bp, Glycine max
  unsure (1)..(429): unsure at all n locations
cttatccagggctaaatgtttatctttatggaggtcatttagtaagtcatgagcggtctgaagaggtataatttgcatatatgtaatatatgcttgataattcgagttaatagcacacaggcaatttgcatcctgtactttgcctctcaggatgcattggttatggactaaagcatttcacaaattcaggttaatcaagcactatttgacttgatcaaggcatcanaagtgaatatgagcccacatgattggactaatttgccaaagaaagagtcttgtaagtattccccattgaatgttttagattttcttgcacttggcaattcagcatgagctcacactactcatgccatgactgttttctgtagcttggtgggctgccaatgcgtggtaataatctctatgctccaagcagagacatacacacat

SEQ ID NO: 94957 - DNA, 286 bp, Glycine max
accaaggggtttgaatttaaacattttattttatatagggcagcccacttggctttttatctatttcatttgcaaacagaatatgaaaagccgtttattaagaggtaccttggaaccacaaacctcattgttggctcttagatcttggtgatcctcttacacattaagtagatgcttagatggtatggttctgccatgacaatgctactgatttcggtctatgttttgataaaaaaggtccatcggcctcattttgattatcacgattcctttctctagtaagata

SEQ ID NO: 94958 - DNA, 385 bp, Glycine max
  unsure (1)..(385): unsure at all n locations
tgatattatacgcttccttgaaaaaccctagagaaagagactttgtacaagttatctttttatgaaacgggtgttattttcgtgaccttcattgaaccccgatcacattggcgtgatcggaaatttaaaatgattgttcttttgtagaatcctgaaatgcccttagccttttacatgtagtgacatgagtatttgactcagaatattgtcgctaaccttatttctgaaatccatagtaatttccttggttttggcgtaatagaaactcgcgttggatcgacaagcgtgaatgaanaagaggcctctaagtgaggcatagaggaaccgacggggagctcacgatatgtgagggggagttattataaanattaccatcttgacacta

SEQ ID NO: 94959 - DNA, 382 bp, Glycine max
  unsure (1)..(382): unsure at all n locations
agctcagcacatggacctgggtgttgcccagntctttatatcttccgtaatactcatcacctctatcatatctaataattttcacatttatgtctaattgtccttttacttcattgtagtaaatttctaaggaatccattgcctaagaaatctcgggcagtaagtagacataaccgtaacgtaaataatcatcaataatggtgataaagtatcattcctttccgaaagaactaacatcaaaaggtcaacaaatatcagtatgcacaatttcaagaagctgagtgcttcttgaagctcctttctttgtatgttttgcttgttttcccttaatacaacccacacaaatatttagatccgtacaatctagataaggaataatttc

SEQ ID NO: 94960 - DNA, 406 bp, Glycine max
  unsure (1)..(406): unsure at all n locations
ctgaggcatgcaagcttgaagaatggacgagatatgcatggctttctctcttgtgttctacaaagatcatgctatcacctgcanagaaaagatgtgatatcattggggcagagtgtgacacctttataccatanagcactccttattccactaatcttcttaacatggctgagagggccttcacataaaataaaggagacagatgatctcgttgtctgagtcccctacgaggaaagaactgtctgtgggaaaagctattcaccattgctgaaaaagaaacagatgtcacacattccatgatcaaagacacccataagtttggaaaactggatcatgaactntatataggtttatatgcacatattatacttgtaaaattagttttatatacacacacatggagtcc

SEQ ID NO: 94961 - DNA, 385 bp, Glycine max
  unsure (1)..(385): unsure at all n locations
aactcaagctccaccataattttctatatgtctgtgtaggctttttaattatccaagnattcttatgaaaagcctctctaggctttgaaccctcagtagcacttactacttaactcacacaactacattttgtgggtacacacaaccttaagaagcaacaatctcctaactagtctcctgaggttccctatcctaaatggattctatttaggggcaggtacctaatacatctcacaggaaaaacccatcaataagcctccctcccccaaaagatgtttatagactcattaaggctagatagatttttctctaaagttctagagagtccgagctaaggaaattagtataaaaaactaatgatatatatttacaattgttgagaaaa

SEQ ID NO: 94962 - DNA, 368 bp, Glycine max
  unsure (1)..(368): unsure at all n locations
agcttcatagccgcggctgtgggagaaaacagaattgttttttattgtcnagaggatgcaccgagaggccggatctgagacaaacgtgccctcctgcataacagctgtgcatagggtgaggggcaggcacaccctgcatgtctcctggttgaagcaagtatgccagtacggtcataaattccacatcattaggcgggaactctggagcttttgcatacgtgtaagctgtgtggctcacgacctggaattgatgcgagaacgctcaacagtgataagaccctggagtgcaagcgaagtaaattaactgcaaggttacagcttataatggaacggcagaatctctgaccaggatctcttgacgagactat

SEQ ID NO: 94963 - DNA, 450 bp, Glycine max
  unsure (1)..(450): unsure at all n locations
agtcacctgcggcatgcaagcttaagacaacttatgtaatcgatttatgatattgatgtaattgattaaaacagagttntgccttctgaagaaactnttctaacttagaaatttttcttctcacttactcatgatgatgcacgatacacaaaagatatgatatggactaagatgcaacattcaatataacaaccaatacaaatgccactcaagggaagtgggcaactaaaagacaaaacattttcaagattttctccaagcttcaagctttagtcttcatgttggtcatggtgctaccccatctctaacaataattgctatgcatacgtaatttgtgtatttaaatcacatagcgattacctaattttcctctcttttatttctttttttggatctaatcattagaaaattaacttcttctgagttntatccagtagatgctaaagtttg

SEQ ID NO: 94964 - DNA, 335 bp, Glycine max
cccttttagtggcgtacgaacacaaactgagctttatggttttacgagcctttgatgggactcggcgggaagtaatgggggaaatcgacattcccattcagataggctcccacacttgtaatgtgttgtttcaagtgatggatataaatcccgcctatagctgcctcttaggaagaccttggattcatgccctgggagtggtcccttcaacgcttcaccagaaattgaagttcgcagtgggtggacttttagtgatagtgtcaggtgaagaggatatgttagtgagctgcccctcctcacaccatacgtaaaagctgcgaaagaatcattggaaa

SEQ ID NO: 94965 - DNA, 424 bp, Glycine max
gaagatccgtttgttctctctttgagggccaggttggaaacttacatcctcggtcaacgttatggccaaaagtcaatgtttggctcaaaaggcctacgaatggcaagacataatgtatgtcgggatatttgcttataaagtggctcacgaataagggaatgcaccaaatcatttccatgacacgcatatgacgatgatgattagaaatttatgcaaaactaatcatgcacacattcatgtggacactcatacataaagctttgtggccatgtgaacactaaggcttagggtttgttttcccccattcaaatcaacccagtgtttccaaacaatgcttttttatcaagttacgcacacatccgactccatttaggccttcgggaaaaatctttcattgcattcacccttcaagcgcacccccaca

SEQ ID NO: 94966 - DNA, 382 bp, Glycine max
tatgcgcgtgtttccttacgaacgttcatttgttgaagacatcttattaaccgaaaaaaatgcacccatatacaatcaaggcagctttgttacctagattatttacacgtacttccaaggtgtatttgttacttacatcacacacatctccttggctaaattcacatacatgcatactcaaagcattttggggtaccaaaaattgcacatgtgcacatcttggcatttctaatacctattcatacgcaaacttcatgatgaaccttgactacccacacattaaggtgctacattttcatgctctcttttttttcaagtttttgctacctaaagccgcatgcaaattcaagcatattttcttttgctgactaaaattgtattc

SEQ ID NO: 94967 - DNA, 440 bp, Glycine max
  unsure (1)..(440): unsure at all n locations
agcttaagcgtctcttnggatctattattatatttaatcttgacaggaatcctcgccatagaattacatagacctgccaattctatatgagaaatgtaataaattcataacgatgcaaatgctatgtanagaatgatggtcaatctagaatagaaaattatgctaacaaaaaatagaataccaacacagacttatatgacacatgcaataacatttcaatcagtgactaaataccataataactatgatactatttgttgaactactaatgcaatacatgcaacaacctgaaccaaataagaatagccatatcatcaaatatctgagaagcataaacaaacaattatatctctgaacaaataatattgcaaccatcaacaaacaaatagaagggccgaaaacatacacaacagagttttactttttggaaaactgaatac

SEQ ID NO: 94968 - DNA, 366 bp, Glycine max
  unsure (1)..(366): unsure at all n locations
tattccagatgctactgacaaaggttcttcgtttttgngaaccaagagcggtccattctgttgccccggggtaacatgtgctgatggccacaacagtaggactaacatgcttaacagttaacagaacacagtcaggtgatgttggagcacaagagaaggcaactatttggtatgacatatcaaaccttggcagcttgataatctccatagtaaagggattgaagaagaacacacggtgagttctgggtcggtatagtagttaccaaccatctttggtgtaacaaactctagatcccctcaactctggcaactcgatggaatatgttttgcggtgcgcggtgtcatagaattcataccagttcccaa

SEQ ID NO: 94969 - DNA, 374 bp, Glycine max
  unsure (1)..(374): unsure at all n locations
tatcggcaatcgattaccacagtgtttgaacgttgatattcaaattgaaatgcgaagagtcacatctctttcacaaaaatgatttgtgtgatcgattacaataatttggtaatcgattaccagtgatatgtttgaacaaaaatataaaagtactcttccatggttttcaatttttcaaaggtataacccttctaatggttttcttgactagacatgaagagtctatgaaagcaaggtcttaacttgcattttttaaacattgataacatagtttnatcctttaatctctttaacatctctgaattcttctcttctcctttccaaaagatataaagtttctagttttaaacctgaaacaaggtgcattatctttc

SEQ ID NO: 94970 - DNA, 366 bp, Glycine max
tgagaagctgagctaccttttcctttcttttataactaagctcagctccttgagaagctagagcttagctaaacccacccctctcataactaagctcacctccttgagaagcttgcttacaaagattcctaaagaagctagagcttagcttcacatacctctctaatagctaagctcacctccttgagatgagaagctagagcttatctacacaccccctataatagctaagctcacccccatgacaaaaaacatgaaaataacataaaaagtccgtattacaaagacaactcaaaatgccccgaaatacaaggctaaaaccctatactacaagaatggccaaaatacatggcctatacgaaggaa

SEQ ID NO: 94971 - DNA, 206 bp, Glycine max
ggagagggacccgacagcaaaacagaacaccgaaacgaaggaacaaaagggaaaaagaccagagacaagaccccccaggcacgccgagaaaaacaaacccaggaccaaaaaggcgaggagaaaaaaagagaaagacacaaacgacagccccagagaggagaagacagaaagaggctagccaaaacaaaaccccagaaccaggaaag

SEQ ID NO: 94972 - DNA, 471 bp, Glycine max
  unsure (1)..(471): unsure at all n locations
agcttagcccagataggctcggtttagcgcgctattttcaacaaaaaaattgactaagttacctgtgcttagcgattcagccttgcttagccactggtatctcaacaagaggatgagtgttcatcctcacaagatgaactcgcttagcgcagtaggtgcagtttgtctggaaacacacatattcaatgaatattgatgaacttgcttagctcaacatgctcgcttagcgagttcatcgcattttccagaaaaaacatagaaaatgcagtttgttttcttccatttttgagcctctaaaggcatatcatacatacaaaccagtcaaaactatctacatagcacaatcattcacaaaatcctaattcttaactaatctaatatcatttaaaccctatcaaataaaagctacatttatgagtttgtaacctaaggttcaacanaataacagagaaagaaacggaatgaggaact

SEQ ID NO: 94973 - DNA, 371 bp, Glycine max
ttgctactacaatctccccctttttgatgatgtcaaatcccgaaatcaagagaatatatgcaatatttgatctatcgttcactcatctctttctccccctttctttttgaatttatgcttaatttaaaagttagtaaataattttatgtcttaatttctaaaatacccattttctctccccttttggtaacatcaaaaagccaaagtgagtgaaaatgaaataaaataacaaacatatatcagatgctaacagacatagcaacaagacaaaaaaaaaacacaatgaacacaatgaacgtatatcagatgctaacagacaaaaaaaaaaaacataatgaacacctatttatctaagtcactagcatctaaaa

SEQ ID NO: 94974 - DNA, 448 bp, Glycine max
  unsure (1)..(448): unsure at all n locations
agctngtgcattcaatatcctgatgagggtgtttcatatgttctcaagaatggactaatacatttgctgcccaagtttcatggtctcgcaggtgaagatcctcataagcatcttaaggagttccatattgtttgttccaccatgaagcaccctgatgtccaagaagatcatatctttctaaaggctttttctcattctctggagggagtgacaaaagaatgggtatattaccttgctcctagacccattttcagctgggatgaccttaagagggtgttcttggagaaattattccctgcatctaggaccactgccatcaaaaaggacatttcaggcatcatgcaacttagtggagagagcttgtatgagtactgggaaagattcaagaaattgtgtgcaagctgccctgaccaccagatttatgagcaactccttcttcaatatttct

SEQ ID NO: 94975 - DNA, 371 bp, Glycine max
tgtttctgtcgttcctattaaggaatcttcgtattttttgtgcctaatatctctaagacacattaaaattgcagtatctatgcccatgtctatcaaaggtttgatggctacctggacacatcctatatgtaggtatctgtattttcaactgtgtccataaattgaattttttgaaagtaaatgaaattcgtcccctatgtcttgtcctagaggaataatattttctacaggtttgattatataatctgtcataccctaatttcgtccggggattattacttgatgacatgcaacctttggttagccgctttgaggtatttggcgtcctttgttgcacaataaatgaagtcctgagacgtctcggaaatcaa

SEQ ID NO: 94976 - DNA, 390 bp, Glycine max
taccgtgcaagcatgagagttgatctctaatactactttctgtaataatatctaacagtaatattgtggtcttctttgtaaaatgagttctttctcttcgttcttatatgtgctttttcttaatgatggcgaccccaaacaacataaaataaatagcccaggggacactttattgtggaaaacgcagatgagtctctttccatgcactaatatactcactgctatctatgaatatgtaagatctccttcatatatttattaattggtgactacttgcacttatccaaactgttgtagttttcctttgtgtgttgtataacttctggatagctacatgtgctcaactttagtttcatgtgcgttgtgcccaacttttctttgtctataata

SEQ ID NO: 94977 - DNA, 359 bp, Glycine max
tgtgaacatgcggtgctaatagtcgtttgttcttttctttatatggatttatatatattattaagagtcactaatattatcgtcttaaactaaaaatagaaattttaaattctgaaggattggattatcagtaaacttgatactaggcaagttatgcaatggattatgtggaaacactttttcaagcttctagttatgtaagttagtaggtgctaaatcgatactacgtgggtgttaaattgggtattcctgcagcctaattgtacttgtatatgtgaaattttatttatctaatcagattattatacttactaacttgtaagttataacaaataaattgtagaagcatcgtatgaaaa

SEQ ID NO: 94978 - DNA, 463 bp, Glycine max
  unsure (1)..(463): unsure at all n locations
agcttangctgctcaattgctctcaggtgctgcatggaagggcaaaggtctgtatgatggtcagcagaggagcacaaaccacaaacccttgcgacaggtacagatttctgattcaaggccagctgggttaccaagttaaccaatgcatccagtttgccttcaagcttcttagtttcagatgatgcagatgggcttgtagctacctcatgcactcctctaatgactatggcatcatttctggcgctaaactgttgggagttggaagccatcttctcaattaaatttctggcttcagcaagattcatgtctccaagggctccaccactggcaacatctatcatacttctctccatattgctgagtccttcatanaaatattgnggaagaagctgctccgaaatctgatggtgagggcaactggcacatagtttcttaaatcgctcccagtattcatacaggctct

SEQ ID NO: 94979 - DNA, 365 bp, Glycine max
  unsure (1)..(365): unsure at all n locations
tcatcgagcacaccgncgacaatattgagaacttcattacaaaagagttgcaggttcagattaagagcaccaaaaatggtctcactctcactctcgtactgcgcaggattcataatcggtagctcaaacagcggagctctggcagaggaggtggcggcgcggcgaaggagcatgacattctccgggcgaggatgatggttattcttctttgcggcgtcctttccattcccatttccgcttcctggtaccgtttgagagatggtgattcttcaaatggtaccatcttctcctccaccttcgcgggattggggctcagggtttcctccctgtgacagaagatgcgtgagtgagagagacgatgcacg

SEQ ID NO: 94980 - DNA, 411 bp, Glycine max
  unsure (1)..(411): unsure at all n locations
ctgaatcaagaaggacgttagcatctgacacttggctccgatttaccctttctgtttcagcatcctcctctgtattctctgagccaccaactccatccatcacgcctttactttctgctggngatcagcaccangtaaaaagaggatctacttgactgtcatatagttttggtctgaaaaagtccagtccagcagtagttntttccttcccttctacaagtaatactgctattcagaatgaagctggagacataaagtttaactttggttcaactaagaagccaaggttatcgttctcatttggaaaaatgctgtctgctgttaaaaataaaatggcaaaacaatgttccanaagtcatccaactttntttttcttgtgatagtgtattttagccctttaataactctgat

SEQ ID NO: 94981 - DNA, 382 bp, Glycine max
  unsure (1)..(382): unsure at all n locations
aacccaagcgnngaaagctgagctcgaaaagacaagagtggctattgatttattttaggcggcagncactacggttaggaaagaatgttatgagctgtaagatatcaacatgatcgcggttgaagcactagatcatgaaatgaacaatgtcataatagaagagtggagcacaaataagttctgacgggttttgcttggcagcaattatgagcttatacttaaaaaggccgatagggacaaattaaggatgtgaaagtctgatgttagaggatcatttaaagaggtttcataggttgaagagaagttcgatagaaaattgttcttaacggaataaaatatgttgattatcattgaccaatataaagagagggtggatctttct

SEQ ID NO: 94982 - DNA, 446 bp, Glycine max
  unsure (1)..(446): unsure at all n locations
gatgcagctgcttgttttctcttcccggagtatatcttgttcaacgcangagcacccttacaacccaacacttttattttgagaataaaaaattcaattctattcttgacctgtacaaagcagtaacactttggagttttgcttgctgactttaaatgaagataaattatgggcttacttcttcattgaattcaagggctttatttagacaatggttctcggatcttgaatatattngcgttgaatgacaaaaacgcccttctgctgaaagtgtatttctaatcccaagaaataagtgagttggccaacgtctttcacgtggaaagttgaatgccacagcctattgattgtactgatagcctcttgatctaatccgatgaccaaactatcatgcgcataaacacgaagtatgacaattccttttagctcttttgataaaaaagtga

SEQ ID NO: 94983 - DNA, 370 bp, Glycine max
  unsure (1)..(370): unsure at all n locations
atgccttcgaataatnnnntacttttttttgactcaatnctaaaacttgatttgagttctattcaacttgaccatcaacacattggtaaatattttacttaaatgggttaagtagatttttagtctttaaatttttcaaaatttaaattttaatccttgaataaaagcttaactagtcaagtctcaacttcttttttgttaaaattttagtctttcaacaaaagcttgaccagatccttaaactttttaaaaattttattttaaatttttaaataaaagtttaaatttcattattttatttatttatttatttaataagattttagaaattaaaaattaaaattttaaaaaccttgatgaatactttttg

SEQ ID NO: 94984 - DNA, 427 bp, Glycine max
  unsure (1)..(427): unsure at all n locations
ttcgataatatgtatatatgtaaatgtgtagcataaaatgccttgcaaaatgttgaataaaatgcctttgcaaatatgaatatatatagcatgaaaatgccttgcataatatgaatatatatagtatgaagtgccttacaagtgttgatggatagcgaaaagtgtttttcaaaatatgtgtatatgtgagtaggtagcaaaaagaagccttccaaaaaaaatgtgtgtatatatataggatgtagcgtgaaaaggtttgtcaaaaaatatgtacatggatgtgtgtcgtaaagtgcctttcaccaaaattttatgtgtgcaaatgcatatgtgtcatanaatagcatggccacaatatgatgattatataaagtgcatgttgacactcgcgccacatgaagtgttgtttggctcttggttgtaatga

SEQ ID NO: 94985 - DNA, 384 bp, Glycine max
  unsure (1)..(384): unsure at all n locations
aactcaagcttatgagaagaaggtggattcaccattggagattgtggatcatctggcactggntcaacccgtgtaggtgtgggctcaggaggagcagcctcgctgggtctcaccaatgaaagttgagcttcaagccaagctacttgcttaagaaaatgctccataggtatgattggcctgttgtgagccaactctcacaggctgtgcatgataataaactgtcccctgaataagctttgtagcatagggactaccgtttgtgagctttggacatccggtcctatggttgcttacggaggagctgtagtggatgatgaagggacatcatctgttctagccctttttctcgatgccatctgttactagaaagaactcaaaatttct

SEQ ID NO: 94986 - DNA, 388 bp, Glycine max
acatattatagcagataatacactttatttaatcatagtctagataaacgaggtttctagcttatagtatatataaacgaaattacatgtctgaattatacacaatcacagtagtatgaggtcgtctctaacatttaacgattatgcttaaccagctcaatcgaatttcttgattgaaatatagtaatttgcaatcagatatcataatgattaattttcttttgtggacaatatatgactttgatagctttatgttcacatcttgggttgaattcacttattcactcgtgatatggccatatgagtgtggaaaacaaacatatgaagcataatatatccctgggcttttgatctctaatgtgtatttgactgagtttctacgtactat

SEQ ID NO: 94987 - DNA, 455 bp, Glycine max
  unsure (1)..(455): unsure at all n locations
atgatgctgtgaagactgtgaaacctcagaatatctagagatattgaaaccttcttgaaccttctggaagagtatgaaaggatatggaagggagtacaagagtgtatagactcctagaatgtgtggagcattctgagaataatctcaccattatgtggggggagtatataatatggaggagcttcattttaaccatccagacaagagtgaatccacttcttatagtgagaaagctagtaagttagagagcctctttgagagagaagataaatagcttgtgaagtctctattctcaagcttgagtgagccaccgtagagtgagtcaatttgtaaacacatccttgtaaccctactattcttttgtatagtggaagaaatctcgcatcgggagaatataatcgcgtactctcattactatctntaattactaagtgcctatcttaacttcatgaagc

SEQ ID NO: 94988 - DNA, 365 bp, Glycine max
  unsure (1)..(365): unsure at all n locations
atactaagctcgccacccagctcgcccaggcgagcagggntgttttcttataacaacagccttctggaggaatcttctggagggcccaagagggcctggctgctatttgcacccccatttttactaagtacaccccctgccttttttggagattcttttttcgaaaaagtacggaaacttatgaatttcgtaacgatacttgtgttcttttcgtaatgttacagaaccttgcggattacataaacatccctttttttgacttacggaatgttacggaacctcactaattgtgcaatgatgactccatttgattttcgtgtgtcacggaaccttaccgatcgtggatgaacattttatttatgttt

SEQ ID NO: 94989 - DNA, 471 bp, Glycine max
  unsure (1)..(471): unsure at all n locations
acctgangcatgcangctggantcaatccatacatatatcgttgcttcttgcaaacttcattacaaccaaccaacgatgtgaatccttcaggttgtgtcatgtacactgtaacgacccgcctcgtcgttatgatatcaccactttaaaccgcgagaaacttcaatttttcaatgagaactctgttaatttgcttatgaaaaatgagaataattttttttctcaacatacattcatccaacaacgcaccatatactcaagtgaatatatatatataggaatagtgactcaatacacatcatacacataatggagagtaaatttgtgatttacatcttctaatcaacaaaaagaattacggaaccagctatggaggagttgattaacaaaacacaactctcttccaaaataatcccaacgtcatcacgtctgctcggtgatttcacaaaagaatttaacttctcgtccttact

SEQ ID NO: 94990 - DNA, 381 bp, Glycine max
  unsure (1)..(381): unsure at all n locations
actgaagcttatcgtgccatcaccattccggccttatatcttgccgggctcanacccatccctcaacataactcaggccaccatcaaggaggcaccagatagacacagttgcaccagaggagcctccccataagcattgttcacaatttctagtgcttgaaaagatgtttccaatgactcttttgcagcttccacatagggtgtagaggatggacaactcactagtatatcttcttcccctgccactataaccagctatccttccaccacaaactttaatttttggtgcaacattgacgggaccaccccaatagaatggatctaaggccgacttagcaggcaactgtaggcgaggttgatgtccattacttggaaggttat

SEQ ID NO: 94991 - DNA, 488 bp, Glycine max
  unsure (1)..(488): unsure at all n locations
tcagagacacctgaggcatgcaagctggggctcttgcctcactcatcgcctatattgnttcatttctagctatcttgcacttatcccaagttgtataatttctacacctagaccactccttgaaacactccntttttactctaacattgctctgaacaatttcattccaccaccacgattctttacccctaggtccaaaacctctagattcacccaacgtctctttagccactttaataatctcttgggacatctcgttccacatatcatttgcactttcttgtgattgtccacaccaaccctcccatatcttttgttggaagaatatttgtttctcaccctacaagtgccaccatttgatccttggtgctaccagaggacatcttctctttggcctatctctaattcttacatccataaccaaaactctatgttgggtggtcaagctctctcccaggataactntacagttcaagcaatacttccta

SEQ ID NO: 94992 - DNA, 364 bp, Glycine max
  unsure (1)..(364): unsure at all n locations
actaagctttagattgactcagtaagaagaatattgatattgctttcntaaannncgcgaatcnaaaatcactaagatggtgattaattttattgttcctctcatacatgagtagctgcagccatgttggaacaaataattgaccccttcttgcttctactccatgctttagaggtgggaaacttcttagtctccgctgctatctcttcttctttattttatcttctaaggaaaaataattccaatatattatatagtcttaaagacattgaaatgctttgttttagaccgctcaagcaacaagtttataagctttgctgaccttaaaattctcaaagaaatcatatacgcgcgttgctaactt

SEQ ID NO: 94993 - DNA, 463 bp, Glycine max
ggatcttaagtgacgcggctgcagcttttatccaggctcatcttgtggtgaatctccttcttccatggcttattccttaatggatggcgcctcctctcacctcctttcctttgtcttccgctgcatctccatggtggaaaatcaccattaaaggaccccattgaagctcaaagatccagcctccatagaagccccacaagcaagcttccatcagcatggctcctcactaaactaatgtgtggtgctacaagtatagaacaatataggacaaaccttttgtaaaattctgttaagtcatgaaagccccaaatttcccttatacttggtggagtaagccactaaggaatgacctttattctcttaaggttcgtgtgaaccccgtgatcactatttaaaaaattaaggaatgtaatgtaataaaacatacgtttttctatattttcatgtttgatacttctatcaa

SEQ ID NO: 94994 - DNA, 381 bp, Glycine max
  unsure (1)..(381): unsure at all n locations
atactaagctccgggaaaccacaagtaatagncattgtcatttatcccccaatgaaaaccggccagtggacttaaccttgggtgctttccctaaaaaggcccccaaaacaacatcatactaaaactatatatgcatgattatctatatcttaatatgcacaaaggcattagtgtatcctaaccccaaaaccttaaggactgaaaatcatgagaaatacattaccttaagcaaggtggtcaaaatattaaagcaatagactagtcaaatacaatgaaaaaaaatataccttaactttgagtagcttgcaacaagtttattggggttacatgaagaattacctacttaccaatgaaatatttaaaatgtatgcattatttatc

SEQ ID NO: 94995 - DNA, 182 bp, Glycine max
  unsure (1)..(182): unsure at all n locations
ngctngattgtacgtacncgactctatttctctttattcctctttccctacagcagacattgtattcctgccaaatgcttgacaatgaatccgtaggagagcatgggagcttctcgaggatcatgatcctgtactactgcagatatggagtgacttattgttgatggggacccagctatgtt

SEQ ID NO: 94996 - DNA, 490 bp, Glycine max
gatcctgagagatgcatgaggctgcaagctttataagtgaaatcatgtgcaaccatctccctaagagtcctctcacaaggtagaggttgagccatgttctcaatatgaaaattagtaattgaatgctcaaaaatcagaatattcagaatcgtcagcaatagaatactcaaaatgcacacaatgctcgaaatgcacagaatgatcaggatgcacactatgcctaactaatttatgaaaggttctatttatttcaggatcaaaggattgtaaatcacctggatttcccctagtcatacactatatgcagcaaataatgtgttctcaaacaagcaccaggggaggggtaaaactacaactatagtcaaacgatatccatatgagctgaaattttgtgagcaacaccctaaaatcatgagaagatagcacaacaattttcaaacaaaaattcaaagtctaactatgaaagctgcctatggaaagtatataaaaa

SEQ ID NO: 94997 - DNA, 374 bp, Glycine max
  unsure (1)..(374): unsure at all n locations
ttataagcgcgggtctggnanactaatgtcttttgttcgcaatatacgaagatgatgttccgagtacattggatttggtacgaccttgccctcctgatttccagttggggaattggcgagtggaggagcgccccgacatttacgcagcgagcataatgtaaacctttaccggcttaaaagctctatagttgggcctaggctttagagttttttcttttgggtaaggctttgtgtattttgtttttcaaatttataatacaaggatctttcttcatctgttcctacgtctctacccattctcatccatttgcatgtttacttcctttctgaaatggcagatccgatgacgagtcccccgaaggtactaataccta

SEQ ID NO: 94998 - DNA, 399 bp, Glycine max
  unsure (1)..(399): unsure at all n locations
tgcttnganggattatgtctcactattgtcacatgttcatgcagcaggtgttagccgtggctatacgagatatcttgccaaacaaagtcaggttcaccataactcgcctgtgctttttctttcatgctatatgtagcaaagtgatcgatccagtaatgtttgatgagttggaaaatgaggccgcaattatactgcgccaagtggaggatgaatttcccccttgctttgctttgacatcatgattcacttgattgtgcatcttggcagagaaatcaaatgttgtggtcctgtttagctacggtggatgtacccggttgagcgatacatgaagatcttaatagggtatacaaagaatctatatcgttcggaagcatctattgttgagaggtacattgtaga

SEQ ID NO: 94999 - DNA, 390 bp, Glycine max
  unsure (1)..(390): unsure at all n locations
cacaggacactatagaaactaagctttacggaggcgctgacatctttatgttttacgagngagagagggcacaaagagaccctgagagggtgcgagctactgagacaaagtgagacactgagaaagggcgcgagtatacaagccaaaacactcgaccttcaaagactattttcgaaaaccgcctttcaattagagagttcaacaacaattctccaaagaatcgtattctattataggcttcaaagtcatttttttaaaaatcatcgttgtaattgtactaatacttacaaaaataccaccaagttggtaacatcgatggttatggtaaaaccgtcatcaattcatcgtcattgtttcttcgcgttttagtagtgaaaatcgaacttattt

SEQ ID NO: 95000 - DNA, 445 bp, Glycine max
  unsure (1)..(445): unsure at all n locations
agcttncaaccgtacaacattaggtaacgttattgtagttgatgttgtgtttaatattcactctattagttactaataactgaattcgctcttctattattaaggatgaagcttcgccttccatatcgacaatgcacgggattaattatgttggtgatantgtaagttatttgttgttgccattcattgagatgtttattaaagtgtcaagcagctcgtatgccttgaactttggttttgactactcgatgtganngttgtcgttaactacttatagattttgaatgtgttttattttttccaataaaacaactttctcttaatgttgaagaactgtgacctgagatgcaatatttggagggggcgaggggagtctttaatgcataaaatcaatgttcaggcctaatttaagagaggtcattatccaagaagaaaaattattatt

SEQ ID NO: 95001 - DNA, 363 bp, Glycine max
tgcacaacaagcaactaaatttgtttttgtactaaatgaagtaactgggctcactaactaaataaattctactaatatatatagttactactcagaaggaagggatgggttttgattaggctcatctaatctacctaattaaactaattacacaaagcacagtccaaattcgcaacctaattattcaagtgtagaggttctgacttccaaacttaatttgaccctcgaaatagtagaattggcccaagcttatttctgacaaaattgaatctctctttcttagctttctagggactactcacatgctccatttggagttatgtagtgcctgatagaccttgcacaagatagataggtcaagta

SEQ ID NO: 95002 - DNA, 445 bp, Glycine max
  unsure (1)..(445): unsure at all n locations
aatatctatgtagacattttcaataccaattttaacagagataattttttaatatttcataattcaaaatattgaattgatttttcattttccatgttataaaaaaaattagaaagatccatgataaantaaaaatctctcttttatctcttaaatttttacaatcatttanaacattatcttatgagacaatgctaacttttttatcacgataaaaataaaaattattaaatatattcatataaaaaccaaaatcctgtgggcgccccatttccttaagtgtagatccgtcaatgtctacaacacgcagtggaaaaaatactttctattctgtgtatgaagaaaagggatatgcaatcaaaatcataatacaaccataaaaatattntntattntatgtaaaataattttacataataatctcatcacatcttatcatatatat

SEQ ID NO: 95003 - DNA, 381 bp, Glycine max
  unsure (1)..(381): unsure at all n locations
ttcaaaagaaaaaaaaaaggtctatgaagncttttatttatagatatgatccttgcctctttaactggttgttagacatgacaaataacttgagatatgtagatatttatttcaacttaatttgattttaaggaagaatattcaatctgattggttataaatatgaatatagatattatttgaatttttaaacacaaatagagatgaaaatgaatatataagggtgagtttggtttgtgtttgtattcttattttctgattttattttctgaaaattgtttttattttcaaaagattagaattctgaaaacatgtttgatttgatcatccccgtttaaaaaaattcttattatggtggctgaacacgaataagacaatcct

SEQ ID NO: 95004 - DNA, 242 bp, Glycine max
  unsure (1)..(242): unsure at all n locations
cacatgaactaaaatgtagtgtgaagtttacgcttcccctttnnttgtttgtttgtagaggaaaacgcaaggatgagcaaacatgaaaacanatggtatgcaattttgcagatcaaanagttttgttgaacgcatatgcatgatgatgccatgtgagggccgaatatgataacggcaaatgcacgatatgtcattatgatgttgtgagagatgcttatgcatgcatgatatgaatgcattta

SEQ ID NO: 95005 - DNA, 379 bp, Glycine max
  unsure (1)..(379): unsure at all n locations
agctcgataacacgcagagactaacgtcgnctttggtggtctttgtcaatcgcggccgacaagcccgttgacacgcagagattcatgtcatcttccgcgcttacaagatctgtaatactgacttttgagtcacgctgacggccggaaatacccgagtggttatccgtataaactttctgttgtctgtaagacgaaaagcgtgatagcacgcagagactaacgtcgtcttctgcgaccttcgtcaatcgagcctgatgacacgtggagatctacgttatctaccgcgctttcaagatctgtcatactgacttttgagtcacgctgacgggcgggaatacccgagaggttatacggataaactttttgatgtctgtgagac

SEQ ID NO: 95006 - DNA, 474 bp, Glycine max
  unsure (1)..(474): unsure at all n locations
agtcacctgcggcatgcagctatcaattcttaacatccatggtaactctatccaacaacactctaannaaaataaaagataaggatcgaatacacttgaaatgtgcnaatctttgatttgcaatatttcttcacaagttgatcaattcatgttcgtaaaatgagtgacttttagatcaactctaatctttagacgtattatagttctattcttctttaagactctctcgaaatgtttttcacaaattctgaacgaatcaagagtctgttaacaagaaaacacataggggtctttantaaatttgactattaanataaatctaatcgattataaaacaagtaatcgactaattcatcacaatctcctttgcttctccttgtttccaagagttgggtaatcgattatcctaagctgtagaaccttccttcttctaanactggcttgagcatttgattaccaaatgaggcaatcaat

SEQ ID NO: 95007 - DNA, 387 bp, Glycine max
taaaacccagcttctcaagaaagcttctcaaagaagccacgatgtacttctcgaggaagcctcttaatgaagcttctcaaggaagctacatgaagctgcttcggtaaaaatgcatttcagcctttgttaatcgttcgatcttctcgaaatttggtctggagctatacggaacacttgtccatgatctgaccgttgggatctttgagaagatgtctggagtgtgcacgacgtttcggcttccgagagcattagtcacttgtgcgttttgagccttgtagtccaagtagctttggaaaaacgtcatttcttctccttctttcttccaaaaccatttccaatgctccaaggtctttctccatcacccacagacaccattagccaccataa

SEQ ID NO: 95008 - DNA, 307 bp, Glycine max
  unsure (1)..(307): unsure at all n locations
agagtggagagcactacagggtgttaatgttacaatggnatagaaaacttagtgaaaaatagacaatcccacgaatatagaaaaaaacacagacagatatattagagtgaaactctcatccacaaaggatcccgccaaaaggttggcacttatgtaacagggaccttgatagccatgaccaaaaaggccacgtgcattaaaatataataaccataaactcacaaagaacttagatattattcggttaattatggcagacactacaagaagaaatactcgaagagggactgattgccataaaatatct

SEQ ID NO: 95009 - DNA, 267 bp, Glycine max
  unsure (1)..(267): unsure at all n locations
agggacagtaggaaatatctttgcgnagaaacaggcagacacgcaatagcgtttacgcacttactagaaaatatagggacagcagagtactcttttgcagaaactccacctatggagacaacatagctattgagcctcaaaccgagtgtttacccaaggctaattgaaaaccgtaggtctcacctttattcagtcacccctaaacactttgccacagacctaccagattaacaaccccgactacacttgttcaaatttacaatggct

SEQ ID NO: 95010 - DNA, 470 bp, Glycine max
  unsure (1)..(470): unsure at all n locations
gctgaggtggtattttactattccacatttgattagcttgtactcagatgctttgtccttcccataagtaggtgtcagtaatgcactttcacccatctccattaaaagcctttcttcttgctgaacacacatggtcaataattcattgatagaccatntgtccttatgtgtgtggtgtaaaaaatcttaaacgacccatattctgacggaagggtgtcanaatgaagtgcaccaggaaggattcaaacatgtcaacctctagtttcttaagttgagctaaaatatatcgcatttgcattatgtactcatgcacacctttcacactggtgagccgaagaanaaagaacttcatgatcagggtgcttgctaaaaccttatccgaagtgatgaactagtcatcaataaccttaagcaagtatcgaaccttttcatgctagtcgacagaaccacatatcccagtcgagattttg

SEQ ID NO: 95011 - DNA, 382 bp, Glycine max
  unsure (1)..(382): unsure at all n locations
cgattagtttgagtcaattctcaaaacaatattattaatattctntttcttagtaaacaagtctagatacatacatgacttaaggaaaaaaggatacaaccaagtaaagggaagctacaacttactacatacatggatagtacggatacgctacaagctaaaccatatgctaaaaaaatggtatgtcaaaatattaattattaaatttcaactcacctctagttgggattgtttgtagcttgatgatttttactagtagaaccatttgtaggtacctaaattaaaagaatgctttttctttgtaaattatcatatcatagttaaatatttgaataggttgaattataaattcatacctcttgatctatagcttctaagactt

SEQ ID NO: 95012 - DNA, 278 bp, Glycine max
  unsure (1)..(278): unsure at all n locations
catgagtacaaatacatctaatactattgacatccacgcagtggatcataacttgaatatatcatatgccaatctctctagtcgatgcgaaaaagcatatgcattaaantgcaaatcanagacgataggtaataaataactttattgcttgagagaagatttcaaacatatatacatgacctctcccgtactttactctaaccaccatgtgaatcttataattactactaaaaaaggcatataatagtcacacgcatcaaagacgacatctcacgaac

SEQ ID NO: 95013 - DNA, 324 bp, Glycine max
  unsure (1)..(324): unsure at all n locations
cgagaaaggagctccaacgatagtctgttccttttcattngccnncngngtgcattagcctgatatgatctaacaacaaccaacatcctcacagaatcgtaggctgaactctgcatacacccactccgataatggaagcatgaacagaaggcggaaggagtgcatacacctgtgaggatagtaagctatgcagaaattactattaggcctaacatgatgcatgtgagctccatacgctgaaggggcagtgactaagacaccctgctatgacacaagagaccatggtagacatgtgtaaactcactcaggataggcacactgatg

SEQ ID NO: 95014 - DNA, 420 bp, Glycine max
  unsure (1)..(420): unsure at all n locations
agcttcatgatgaatcanaggtgtattanaggtgttttgatgataacaacgataataacaaaatatgatgacaaatagctcatagagatcaatcaaagaacaactcaagtgaatctagaacaattcaagagttcaagataagaatcacgaagaaatctagactcaagaagaaagtttagagtccagaatcaagattcaaggttcaaggattttagaatcaagatcaagattcaaggttcaagatctcaagaatcaagatcacgattcaagactcacgattcaagaataaagagaaggcttaatcaagataagtatgaaaagtttttctcaaaaattgagtagcatatgatttttctcaaaacatgtttaccaaagagnttttactctctggtaatcgattaccacattgttgtgatcgat

SEQ ID NO: 95015 - DNA, 373 bp, Glycine max
ttaacctcatcgtctctcacagactttatatttgtgagccaatccaatccttgtgttcggactctcagccacttatgatagccgccgatgatcccattactgcttcccctaagctctctgtcctttcttcacgccgcatcacatgccttgcgaactccttggagtacctttgcattggggtcactgaaaccccgtgttatgaaaggcgtgatgctttcatctaatggcgctcctttcatggggtagccaagctgtcttatggcgaggacaggattataatttatacaaccccttgttccgattaagggaacatttggaaatccttcgcatgaagatagaatcccgattcttccttccttctaccaagggaacc

SEQ ID NO: 95016 - DNA, 420 bp, Glycine max
tgcttgttaaagtgatcaggcctcactttattcatataaacattaaaatgtagtaactacgaagtgatcctaggtcgtttcccaacgagcagtgacaagccaaatgttcataatatacttgcagtaacagtaacatgaacgatggtgggggggggttgtatattttacttactatacatgcatgttttacttattcgtattttaatttatatttactaattcttttataaattattcttactctctaattattattatctctcgttattctctttctatattattattatttttattgtatctttctatgtaacccattatataatatgtttgttctgtatctttatttaattagtgatatatatatatgtatctcttattatcattactattatatctattattatttcttcttactta

SEQ ID NO: 95017 - DNA, 395 bp, Glycine max
ctaggaattccaatctaagctaatttacaacatatagactctatgttgtttttcgaattataaaattcctaaggaatttatatggactacatattatattctaacatttatattaattatttacattcagatgggttcaatataaagtgatctaattcaatgagcccattagactgccaacagaaaattgatatgggcttaatgagcggaaaccagtttggcccattacggataataggaatcctaatacgttaaaacttaaggcatggttatggtccccaagacaccaaatcaagaaatagtttctcctccccccatctgaagagaaaacgaaggtcccataatgatgaaagtgatctgcgtgaggaaggtcattaaatcaattgtttatgacc

SEQ ID NO: 95018 - DNA, 168 bp, Glycine max
  unsure (1)..(168): unsure at all n locations
agcttgaagcacactaanggttattgaaatgattattatcacaacagaagagctctcgattaacaaaagtctatgccaatgggctcatacattttactgtatcccggtaattgacttgtgtgactttcatttcatgttggagacttgggcctgtacccggcgaaatgc

SEQ ID NO: 95019 - DNA, 364 bp, Glycine max
tttgtgtagccaagaccatacaaatttttattacttaacctaacgggatctaattatatgggccattaaatctatcatgtgtcgacagtaattgataaaaccgagaatctcctctgagggtgaacacactcgagtgaaggccattgctttatctagtaaccgtgggaggcctagacttccatttaaggtcaaggcgaacctatacactcacaaggccgctttttgacgcaaagcatcaatcaccctccctattggttccatatacaagtacacttgggcgaaggtctccactagttatcgctcatgggacaaaaaccgcgttaacactatcttttacatacctttataaccgcatgcttctctt

SEQ ID NO: 95020 - DNA, 480 bp, Glycine max
  unsure (1)..(480): unsure at all n locations
atgcagctgatgaagctgtggaagagtgcgcattcaggattgatcccacatgttacctgaaacccgcacggtatataaaaatttttagagctcatttaaatagcacagcatttagtccggtccgttttacccatgggctttgggggtcccacaggctttntataatttaatataaaaatatagaatactactaaataagggacataaacttagtaaaaatagaattaaaaaaatatataaaatctatgtaatttgtatatggttcaatgcgtgatgaatggtcataaaatattttgatttggtataaaattaaagattaagtaaacatgatgtaaaaaaaatgttttttaggtggcttaagaagtgaatttccttattattttgggcaaataatatttttattagacatttcatttgtaggttttaagatgggtcaaattttatattttaannattcnaatttgttattaattattttta

SEQ ID NO: 95021 - DNA, 373 bp, Glycine max
  unsure (1)..(373): unsure at all n locations
tggaagtttgacaaacttggcgaacttggatctttacttgaatgacatcgnggctgaaacagtgaatctatatttgttgatagatttttgaaaccttgatctgttgactttttgcattttaatttaattcattttactaagccttgtattattaaaatttaaaactaaaactcttacaagttaattataaactttctctagtttactttgaagtggtaatgctctatcatgcaacccctttactttcatttatgtccttttgcgacatcactttgcttagcgaaattcttgcttagttgatattagtcactggattaagattgcatgccttcaaagatcatgtttattattccagtggctaaaagaagcaaac

SEQ ID NO: 95022 - DNA, 302 bp, Glycine max
  unsure (1)..(302): unsure at all n locations
agctngagtttgagttatacatgattgacacattatctgtgacttgtangaactgatctggcgcagattggatgagaggaagtgtgatattccaaatctgcactgtgtgcagattcttactgtgaaattgcgcagcatgattttgcacaagtgcagaaaaatgctatgtatctgatggctgtggaaagagtaatagcaaatgagttctggatggttgctagtagatcccaacggtcaaaatgtacgcttatgtactaacgacttccagtaaaactttacagtccatccaacggcttatgaag

SEQ ID NO: 95023 - DNA, 376 bp, Glycine max
  unsure (1)..(376): unsure at all n locations
agcttctgngctctctgtatgaacacgctaagttcccacctggcggcttagtgcgtgcttgaatntataagaaaataagatgaacgcgctaagtgcctctgctgcgctaagcacgttaatgagtctgatgcattgttgggttgaatttcatgcatgggctaaccgcgcagtctcgcactaagccccactaagtcttttaatctgcatgcatggacttaccacccagtttcgcactaagccacagtgttaggggtgggcttaacatgcttcctcgctctaagccccagtagcgcattggcgctaagcacccactggcagcttagcgcctaattaattttcattcttgtgtttgacaagntaatggtttgctaagtac

SEQ ID NO: 95024 - DNA, 369 bp, Glycine max
ttactctttatctccggcatctcactttaattttaagaaacccccttctctgccactcctacagattgctttcttcatattttagtctttttttttcctttttctgctgttattcgttttccctccacttccatatcttccacatatattttccattttctgttgtcctctctctctttcacccactttcaaaaaaaattctcactgtcaacttttcttttttttttcctttaatatccagatgctgaccagcagcagctacttgtatgttttgtttaggcactttttattatcaattatgaattgagtatttcttctattttttaactcttattatatattaagagagcgctaaataatattacaata

SEQ ID NO: 95025 - DNA, 440 bp, Glycine max
  unsure (1)..(440): unsure at all n locations
ctcgttgagcgagctcatgatgcattaagcgcgtgtctacgtgacagacttccttncagattccttctatccactaaacgcattgatgcctcgcttagcggatgacactcgctaaacgcattgagctcgctttgcgagacatcaactttagcacttctcaaaaaactcatttttctgaattgagagaaatgacattaattctatacacaaggcttctactgagcacagataaaagcaaagcaaaattatttacaatcctacaaaaagaaccatanattgggggaaaatatatacattttgtaaaagttttctatacaaaatctagtcgtataagatgactaacagtgggcttcacacaactgaaacacttttggagcaagcagncttgctntccaactgtcattatgtgacagctggccaactcattcggaggacttact

SEQ ID NO: 95026 - DNA, 377 bp, Glycine max
tcttaaggaagtttctcaaggaagctacctattctataaatagaagcatgtgtaatacttgttgtaactttgatgaatgtgaaacttgtgagacatacttcaaagtttaacttttgtccctctttttctccttcaatttcgtgctcccccctttctctcattcttttcctccattgaagcttcctctctaagcttcttatccaaagcactctcttggtggagaagcaactccttccatggcttatttcctagtggatagctcctcctctcacctcttctcatttatcttccacaacatctccatggctgaaaatcatcattgaaggacctcattgaagctcaaagatccagcatccatagaagcctctaaagcaagc

SEQ ID NO: 95027 - DNA, 413 bp, Glycine max
tattggcgccaagcgcaattccttacggacataattgaggtccatgatgctaagtgccagtcatggcagctaaaagagattcattgcggaatatgagcgctagcgagtcctctcactagcgcatgctcttatcttagatgcataatttactagctgtcagcacctggcttagtgagagttgcagcttttctaatctgcagacctcgctaagcagacgtacccttgcactaagccgagtttctattaaataaaaaactaattttgaatttgaaacgtctgctaagcgcacaggtccgttaagagagccttgctgagaaaccaaatgtctctcttgctcgcttagcgcagcgatccgctaaacgaaagtatcgaaaaattgcttaagtgagtgtaacaacagttacactcacatt

SEQ ID NO: 95028 - DNA, 392 bp, Glycine max
gacacatgaaactaagcttgatcaaggagaagaggtccttcaatgatgtttttgcactcatggagatgcagcggaaggcataggagaagaggagaggggaggcaccatccactagggaataagccatggaagaagaagcttcaccaccaagaatgtgtcttggataataagcttgaagaggatgctttaatggaggaaaagaaagagagcggggggagaatgaaattgacggaataaaagagggagagaagcggaactttgcagtgtgtctcataagactttcattcatcaaagctacaacaggtgttacacatgcttctatttatagactatgtagcttccttgagaagttgtcttgagaaccttctttgagaaaactttcttgagaaact

SEQ ID NO: 95029 - DNA, 440 bp, Glycine max
  unsure (1)..(440): unsure at all n locations
gatacaagagagtcttctaatatatggcatgttccacttgggcttttcctatctagtttgcaccctgtaaaatcagaatctgaaaggtcaattatatttatgtaggtacctttgggataccgcagaccaacattggttgtgcccttaaggtacttaatgatccttttaacaactgttaagtgagattccttaagattagcctagtacctttacacaagcaaacactaagaataatatctagttgacttgcagttaagtaaaaaactgaacaaatcatacctctataccttaactcatcaattgatttacctttctcatctaagtcaagataaatngatgttgccattggagatgatgtttctttgcacttttccatgtcgaatatcttaattagttctgtacaacatttggtttgacataagaaggttccatgtttcatt

SEQ ID NO: 95030 - DNA, 375 bp, Glycine max
  unsure (1)..(375): unsure at all n locations
tctcgaacgtgatcaatacattcattggcatttattgattgatgaagttgnggngcgtgatctgttttggtgtcacccacatgcagtaaagttatgcaatgcatgtcatctggtgttttttatagacagcacctacaaaacaaacaggtacagactcccactacttgactttgttggagtgacaccaacggcgatgacattctctgctgggtttgcatatctggaggctgagcgtgttaataatattgtatgggctttggaacgattttgaggcctatttttaagacacgatcgcctccctcttgttattgtcactgacagagacctagcactgatgaatgcagtgaaaactgtgtttcccgagtctactaattt

SEQ ID NO: 95031 - DNA, 375 bp, Glycine max
  unsure (1)..(375): unsure at all n locations
acaatgaangtattcatgtgtggggatgtgtttttgactgtaaatatacttggcacttgttctttgaatgcaattcgttttgctagagtctggtgcggttactttacgttgtggggtattcattttgcacaatataatgacttctcctctaaattcaacaactcgtgggttgccaagttgcaatgattacaatgagttactgtgataacaatttggtttgtagtgttttgtgcacaatggaggactcgtatttttcttgttttaaaccatagaatgagtttgactaatcgttaacggtacgatcacccttgcaattaatagactatagtgtttttttgactgtcctactcatgtggttgaaactcaaagttatta

SEQ ID NO: 95032 - DNA, 384 bp, Glycine max
  unsure (1)..(384): unsure at all n locations
agctcatctacaaacacccntntaatagttaagcttatctccttgctcaaatacatgaaaaggcgttagctacacacacccctccatagctaagctcaccccatgctaaaatacatgaaaatacaaaaaggtccctactacaaagactactcataatgccctgaaatacaaggctaaaaccttatactactagaatggccaaaatacaaggccaaaaagaaggaaaacctattctaatatttacaaagaagagtggacctaaccttggcccatgggctcataaatccaccatgaggttcatgagaaccctacggccttctttagccgctctagcccaatcctcttggagtcttctagccaaaacccttgggggggggtaggatt

SEQ ID NO: 95033 - DNA, 423 bp, Glycine max
  unsure (1)..(423): unsure at all n locations
ctgagagactgctgcaggagcggcactctttcatgccatattcatcntgtgtagagcggaacgatccactcacatataagatgagatcttatgtcatttactacttggcgtctcgcgtattcacatttgacacatggatagatacatgtcctccgcaaagatggtgcattacatttagttgagcataggaactcttcaacaccattctcatattctgtagtaatacattatgctttcgtccaagatcgatccatgtttcccctttgatgcgacacttgattaagttatctgacatgcatgacaacctcactcttttaattagaggtgtggccctatcccattccgaagacatcgcgtagagtagattataataatgatatttcgttgatttgactaaatttagatgcaattcgcattggtgtc

SEQ ID NO: 95034 - DNA, 380 bp, Glycine max
cgagaagagacaagtttccatatttgcccttttataatttttattactaaaaatcctcctcttaactcagacgcatgcctctcttgtatacctcaatctattttagttcgagggccattccgtcattagttttatagcagcctaagaaggaaacaaaggaaaagagggtcttcataagtggaatgagtgagggagagaaaaggaaatgaaacgtaatgacttatggcattgactcttgaaacaatgattataacattatagtggagggacgaaaagataacttaaatagaacgtggcctacgtgaggtcatcatatcaaatgccgagatcaggttcttaattattaacctttgtgtaatgatatatatcatatagataat

SEQ ID NO: 95035 - DNA, 466 bp, Glycine max
  unsure (1)..(466): unsure at all n locations
agcttaattcaatagtggtacttatcatttttgctgactaacctgnggacgtctgcaacttgaagtggtcttaattgtagaaatatctaatttgtcattgtgaaattagaatgaaaatgcatggtctcgagttccggtgtaaactcaatttgtatacttggaagctgtgacagatctacattgataaggacacatgtctccactcaatttcaaaccttttactattataggaataaattgtctctaaaaaaaagcattatattgtcgttcaagtttcaccatcttcaactttgtcttcatattttgtgaaataatagatttatttattctcagtagccaaaatcgttggtccgtcgtctcagtatggaagagttatataacgctaggttgtattgctgacggacctcaaataaaggaagactaaagaatgaataacataggatataggaaaataaaacagtataaa

SEQ ID NO: 95036 - DNA, 374 bp, Glycine max
tgcatcaagtggtaatcagagcacttgtagctttaagtaggtgctccttaaacctccattaatttttttctttaccgtctcttccattgttgtttcttcatttttttctccatgtatctcctcacatgtcttgtgataaatgtttttaacatgattctttagagtttccaccgattaaaattgctatagaagctacatttgattttctatggttcaaatttcttgttcttgttcttgaaccatgaattgtgttaagtttaggttcctttgagttttgtcttgttatatttttgtggttgaaacctaaaccataaaattcttacataaatattaaagtagaagaaaacctcaaaaatctagagtgacttgttcac

SEQ ID NO: 95037 - DNA, 390 bp, Glycine max
  unsure (1)..(390): unsure at all n locations
aagaggatagccaagatagctgctgaataatgtactgcggatgtacccaaatagtggtattgaaaattgctacttatgtttttgagtcttaattagactacacgtgctgagttctgctttggatatagcatgctaacggatgngttttatcacaaccaaaaaacgtatggcgctaacatttgttttctgatacatggtggagctttggcttttggtatttcgccgattcgttcccttcttttatatatcccttacatgaatattgaaaccactaaacatgcacttgcacatttcatagatgtcaactgagctaatagttaccctttgctagattctgatatcgagcaagatataagtggacttgattattctttacatgtgatgaatatt

SEQ ID NO: 95038 - DNA, 374 bp, Glycine max
tgtctacaaaaactgaccgaacacgttggccttgatgttttactagccaatgggggaaagtaatatttgagggcgactactattccctaattaaactttgcagccttttgatcacgtacatttccttttgtccaagaatttattggagattacgatgggcatatttatttctttatgtataaatttaaaattttatttaaaataatgaaacggataatgatgaccaaaaattagatttcttaatcataaatttttttatattataccatgaattaattctcttgaaagtttaaattttattaatattttttagcataaaaattactataagtaaagattcataaattatttgttattaatacattttaaacatc

SEQ ID NO: 95039 - DNA, 464 bp, Glycine max
  unsure (1)..(464): unsure at all n locations
gcttactatgagctagcatttgtnntgttgctcattatcccctctgagaaacccataaaggtccaccactggtgcttggagctcgtgttgtgcatccaccaagtactcctttggccaaatgaaattggatggcacgtggtgtataacctcaagttcagaacacaagagacctgaattcatctcgcgttaattgtggttgtttcaattaaactaaggtaggaagcaaggaactctatcttaacacgtacaaacactagtgattattgaatagcagttagcttagacaaggaaaagacagggcacgttatattgggcaatgcatatgctgtgtatttatagaattgggagttagacagagaataaccagttgcttatcagaaacaaacacaaaaacctttcggaatcaactcttttaattactcaatatttttacatgcatgtaaaaaatatactttaaaatcaca

SEQ ID NO: 95040 - DNA, 372 bp, Glycine max
  unsure (1)..(372): unsure at all n locations
gggagctagactgtttttaggaatgttattttatcttattgnccgangngtggatctcctttatgcattgcagtttcccaggagtcaacttttacccatattttgaccaatgaatttctgcatcgtagccataaaactcagactattgatgaggtcctggattggtctagtttggaatccattacaaatgattatcatattacataatgtgatagatatgtatatgttttagtgtactaatgacgatgttggattagtgtgtacttaaatgtgaaactggtcatgatgcgttcctcctatgactttagaccttcggtgtgccgatgcgcatatgtacttttctttcttaagttcatatgcattatgttatat

SEQ ID NO: 95041 - DNA, 398 bp, Glycine max
  unsure (1)..(398): unsure at all n locations
aagccacttcacggtttactactatancccactgttcgcgacctgtgagatattttatctcagcaataattactgactggctggttactgatagaattagctgttaccttttttcggttgtttttaaaatgaagaatgtatttaaaaaatttaatttgaaacatacttttaaatgatatcatttaaagagatagttcaaaaaataacaatagaataaccaattttattcatattacgggcacctttcaacattcctcaaaacactgatgtataggttctatatttatatccgcttacgtaatagcaattatgttaatcaatatcaatatttatatattaaaactcaaatatgtgataataataaaatatttataactgagaagcttgtagttgatcaa

SEQ ID NO: 95042 - DNA, 375 bp, Glycine max
  unsure (1)..(375): unsure at all n locations
ctaagcttaccactctcgagtgggaaaagattgttttttggtgnnnnggagaaagcggctcagcatatgagctcttggaaaggcaggtagttgtcgttggctaagtttatctaaatcaatcatggtctctctcccaacattactacataaaatggctttaacataagttatttaggagttttaacattggttttaaaattaatgttgaaaatcattatttacatcggttatagctgaaactgatgtagaaatttggataatattgtgtaatttgaagcgttttctatatgttgaatgtgcttaccacattgattttggcgaaaataaacgctggatgtgcctttataacattgattttggtcataaccgatgttg

SEQ ID NO: 95043 - DNA, 330 bp, Glycine max
gtcaagtaactaatcatgtttgtgttgaaacctaccacatccagcttcttactaacctgattacctgcaccacatacaaattaatccacattaagtgtatacatcaatccacaaccatatattataagaaaaaccattgtttggaggagctacgtagtcaaggatttgcattctaatagtggatataataaggcttctatatattcttcagcttaccaaagatgaagggcattgtgatgagccctccctttgtccttctagcatgatatactatctgctccatcttttaaaacacacctttagtccattcgtatactatgacataacatg

SEQ ID NO: 95044 - DNA, 368 bp, Glycine max
tcttagtttcagatgacgcttatgggtttgtttctacctcatgcactcctctaatgactatggcatcatttctggcgctcaactgctgggagttggaggccatcttttcaatcaaatttctagcttcaacaggagtcatgtcttcaagggctccaccactggcagcatctatcatacttctctccatattactgagtccttcataaaaatattggagaagaagctgttatgaaatctgatggtgggggcaactggcacatagtttcttaaatctctcccagtactcatataggctctctccactgagttgcctaatacctgagatatccttcctgatggctgtggtcctggaagtagggaaatttttt

SEQ ID NO: 95045 - DNA, 326 bp, Glycine max
gattgatttaagacttcgagatcccgcatccagaatccaatctcagagttaagattccacagatgaaatccagatgctacaagtcaagacttcatatatgataagtattaaatagattttttctaaaaccgaatagcacagattggcttacaaaggaatattgtcaaactatctacaagttccacagtgagtactctttgataattgaataccaattggcggtgttcgattaccagtgaccagaatggtttgcaaatagtcttctatgattggttacgtgccacaaggatattaaaagtctaatcgactcactattttgttaacga

SEQ ID NO: 95046 - DNA, 343 bp, Glycine max
ttgaaggtgtagcgaagatatcacatgtttgttttcatcaaaaagggggagaatgtgactgtatgtatacatgactttgatgatgtcaaagaagaatctaacaaggctgcttcaaatgataagcatttgctgcatgaataattcaagattgcctcaacaaacacagccttgtttcaagattcactaaagaccatgccttgccttaaaacaaagtgctttcaagacatgctaggctctggtaatcgattaccaggaagagtcatcgattaccaaaagacagggttgagaaatagctgtcgaaacaagtcttgaaattgaatttccaacatgtaatcgattacca

SEQ ID NO: 95047 - DNA, 320 bp, Glycine max
ctgggcattatccttgattacaagcgccaaccagggggacattcgcctatctattagacaaaaagatatctccaaggactcacctgacaaacattttatgggtcgtttttctctcatttgcaaaacaaaaaaggatctactcggctgatttcttgtgagtcggccttctccctctgaaattaattcgcaacgacccagtctgagaattatatgattcgtgctagcgcttatacataagggtttgaaatgactaaccgtcttcgaattcttttgttgcgccatgcaccttgtttttaaggccgaagtacttgatatctttg

SEQ ID NO: 95048 - DNA, 428 bp, Glycine max
  unsure (1)..(428): unsure at all n locations
ttaatggatttcaaggcttgagaagtgaaattgagaatgggataatattgaagcaaactctcacctcacacaagtctataacatcatattaaacttgctcaaactggatttacaccttaaaatccaccgaatcaaaatttgactcctcaacacccaaatntaccctagaaatggctcttggttcactttggtgatttgattttctctcttgtacagccctagctttctcataagtcctaaatgacatttcaaggtaggaataactcactctaaccttcaaatgccactaaatccagatttggccttccaactctcaaagtctcactctttttccactcacaacactatactctcaccttctaaccctaggttaactctaccccttctctctaacaagtttccataagcaatttcagcacataaacatc

SEQ ID NO: 95049 - DNA, 380 bp, Glycine max
gggattgatttagtctaactaaggatcaaggtttattaatttatgctacaacatataacacaaaagcatgattaattagagaaacatctttatatacatcagcgggtttgttagaaagacccaacacctttacctactgctgtcaatcttacttacttgcatttttattgtttttagcctagacttagtttaattttgttctaaatcatcaattatcaatgtttctttcaagaatgccttatttctaaatttgaccttgtctaagactagttccctgagtttgatactcggattcatccattttaattttaaatacttgacgatccggtgctctttccaacaaaccggatttcccttgaaaatatttgcataaagaaaaa

SEQ ID NO: 95050 - DNA, 477 bp, Glycine max
  unsure (1)..(477): unsure at all n locations
agcacctgaggcatgcangctggtacaaccaatattctttggcctaccatgtcactactattcttaacaganataagaagatatattgcggtaatcgcataatgactaatactatatcctcttatatacaaagaaacaaattcactacttagtatttgctcagcacgatatcacttcctttcttgttagagcaggtttgtacaacaacagcttttctattgatggcatatggatgaatattaaacttgngttcattcattcttcatcggattcaatagatcctaggagagtgtctctgctacatagatgtcaaacacagcgttaaacgaagtcttaaatgtcatctttaatgtcatatcaaatcatgattccatttgttatcgtctagaacacaatatgccactattaaccgtctgattcgttttatcgaatcagaagacttaaaagtattgaaacatgtcaagacataaatgtctc

SEQ ID NO: 95051 - DNA, 380 bp, Glycine max
  unsure (1)..(380): unsure at all n locations
tgtgatgctctagcctattccttctttntgaatggatatgttcaaatatactccaatttctttcataacccgaagcactacaagtttggcttaaaacacaaatagccaaattttgcaattgtagagcactacatccataacaatcccatcattgatctagaataaaacatataaagaaataaatcaaatgtaatgcatatattatgactcactaaaataaatcacaaattaataatgttatcagagtatcaaacactcttttatgaaagccgattgcctttcatcaataaggtcagccatcactttgctaagtctgtttgccaataatttggctattactttgtacatacagccaatgagggagatgggtctatagtcat

SEQ ID NO: 95052 - DNA, 395 bp, Glycine max
  unsure (1)..(395): unsure at all n locations
aggaccatgaaactaagctntataagtgaagtcaggtgcagccatctcctttagagttctctcacgagggggaggttgagccatgttctcagtatgaaaattagcagtcgaatgctcaaaatcagaatgttcagaatcaccagcaacaaaatgctcaaaatgcacagaataatcaggatgcacactatgcctaactaatctatgaaaggttctatctatttcaagatcaaaggattgtaaatcacctggattgcccctagtcatgcactatatggagcaatcatgtatttctcaaacaagcaccaggggtaaaaagggggtaaaaagaaaaaaggtaaaactaggggtaaaactagaactatactcaaacaatatccaaatgagctgaaaatttg

SEQ ID NO: 95053 - DNA, 421 bp, Glycine max
  unsure (1)..(421): unsure at all n locations
cacattcttggnggggaagcttcttcttccatggcttattccctagnggatggtgcctcccctctcctgttctcctttgccttccgctgcatctccatggtggaaaatcaccattgaaggacctcattgaagctcaaagatccagcctccatagaagctccacaagcaagctttcatcaagtggtaatcagagcacaagaagctcaagtaggtgctccttaaacctctcattaatttttactttaccttctcttccattggtgtttcttcatttttctccatgtatctcctcacatgtcttgtgctaaatgtntttaacatgatattttagagtttccaccgattaaacttgctatagaagccagatttgattttctatgggtcaaatttcttgttccggttcttgaaccatgaattgtgt

SEQ ID NO: 95054 - DNA, 379 bp, Glycine max
tatctattgcatttgctaggttgcactctttttgctaacatgagtgcaacacacatgcatgtcgtgttcttggacgcctttcgagacctcacccaaagtgaaagctatgcatgaggagttgccgccctagtgcatatgtacaacaatttaaatgatgcgtctaagagcagcaacaaacaacttgccagatgtatcacactattacaggtaattataattgaattggattttttttttgttctttgatattgactattgtattgatttattttttttgttttaaaaatatgtgtagtgttggatttataagcattttccatttattgctgaggctattattgctaaagactatcatgaaacgaaaccatgtgcctgtcac

SEQ ID NO: 95055 - DNA, 439 bp, Glycine max
agcttcaagggacatcaccctatgatcagcttttgtttgacacctctgatcccttctctggcttgttgttgttcacaataggattccttctcttgatggttgctcttgttaaggacatatactatcagagtttctttgtcctagggtgtggatgcttcacattttcattgcagtgtggagattcttctttgagaggaagctcggggatctcgcacatgaatggcctacgcatgctgttggggacatagcattggcaatttcatgggtctttattcttgtgtacacatggagagagaaatatgattacttaatttattttataattctgtaagttttttgtgctcgtggttgtagaaacaacatggcccaacatggccttgtgaatgctcagaatcttgacatatatggagaaccatgatatgagttctgctcttcttca

SEQ ID NO: 95056 - DNA, 365 bp, Glycine max
tcaatagaattagggaccagttactgatcaatttcacctattgaccaaaacatggtcgcttaatgcatatcttcaaccacatcaaggcatcttggacactaggcatccacctcaatccctcggtgagagattacacccttgattgggagagcaagatgaaacacttgccatatgaaaaattgaatgttagcatgaaaatgtaattttcatatccagccccaagagcttgtagccccaatctccctcgtttaaccatgacaccatttagatgtggtccttgatgtgtactctaccaacatatcatttccccaaacccaaagatcattgaccccctacacaaaagtaagtgagtttaccatgatagc

SEQ ID NO: 95057 - DNA, 455 bp, Glycine max
  unsure (1)..(455): unsure at all n locations
agctngaaggtgtgtaccccacctatttctcatttataacactgctaacgcggccactatcattgatatcatcttcttcttcaccattgtgggcgctacttgagctgccagatccctccacctttgggtgtattctgtgaaagattcatgctcctataggtgaagaatgaagatgaagatgcaaaaatcatgaagggacctcttagggggcatagagtgaattcaaaacttcaaaataaaaactaatcagtcgaagaacaaagaatgaaagaagaacgaatgaagaacagtgaagaacgatgtaggaatcgatcacggaagcgattcagaagtgcctcaacctcgnttttcttcttctttctctgtcttctcaactaattcactagaacgctctcaatatatgaagttgaacccccttcttcagccacctcacacctatttatatgaaatgaggg

SEQ ID NO: 95058 - DNA, 374 bp, Glycine max
ttcatcaagtgtgagaaaacatactttcaccatatattcctctcaaggatatataaccagtgatatgcagctttgttgatgtccttaatctgcttcattttatgttcccacaactgttcataagtagctttagcagcccccatcattagatctttgaacattaccccaccaccaaatgttttcttaaaattgttgttaagatgtcgcaagcagaacctgtgctctatatgggttggaaattccaaaaaaaacttgttgcaatccctacacataaagtaactcatgaaaataatccaaaaaatattagcaacatattaatgtacaatccaaaaattagttctttaccttatgttgatcactaatgaacacctatt

SEQ ID NO: 95059 - DNA, 455 bp, Glycine max
  unsure (1)..(455): unsure at all n locations
agcttacccncatgacanaanacatganaatacttatatatgtccttactacaaagactactcagaatgccccgaaatacaaggctaaaaccctatactactagaatggccagaatacaaggcccatacgaaggaaaaacctattctaatatttacaaagataagcgggctcatacttagcccatgggctcgaaatctaccctaaggttaatgagaaccctagggccttcccttggatctctagcccaatctacttggagtctgctacccaatgcccttgcgggataggattgcatcattacctattcctgaaaatacttttgaaaaacaaagaatctaaagacgccattaatcttgaagtggtcaaactttctacaagatacctgctctgataccacttgttggatcaagtggcctcagaataattaagaagggaaaatgaattaattattcct

SEQ ID NO: 95060 - DNA, 374 bp, Glycine max
tagggatggaatacttacttggtggtgataatctaaagcgcaaaacagaatcaaaaaatgtaaaaaatgatgaccctagggctgcaaactcgtaaatcccgtgggtatgaattttgaaagggggaaaaggggtttttgaatgcaaaaacgtcccccctttcgtcattcttataatttggtgcagaggtggctcgccctagcgagctcagcttgcccaggcgagctaacctgcactctttttttttttttttttttgaggggaacattaaccatgtcccctcctttcttatgcattagcgtcttgcctaacttgaacttacttaagctagaattaggcattgaatacttatttttatttttaaaacaaacaaata

SEQ ID NO: 95061 - DNA, 488 bp, Glycine max
  unsure (1)..(488): unsure at all n locations
atccttaagtcacctgcggcatgcaagctggtccacanaaataggttgtttttgaaagtttatcatttcagtctcttactaagtaaaatggatcatatttaaggtccaacgccttataatgatcacccttcaagtaaaaagaatcacttgattcatgtataagaaagaactacgtaggtctgatttcctctttgatggagggtacgtaggagcaagagccccgcttttgtcgacccctaaaaataaaaagaaataaagttaagggaacacaatttctgcaattctaaaaaatagttgttgtcatttgagacaaacgtgagaggtgctaataccttcctcaagcgtaaatacaactccggaacttagaattttcattttgactcggttccttcgggttttccgaacgtttccacacataaacattggtggcgactccgcacacctttcttccttggaaagcgcacccgtagccatcgctccacgcccgc

SEQ ID NO: 95062 - DNA, 376 bp, Glycine max
tgtaggattatggggtacccatcacatgtggttctaggtggcggtcgggcgatggtgcacaacaagttttccacatccacaatgcgcgcataaacccaccatcccctgttgcccacctccaactgagctcacgtactcccacgtagcccttatcctcgtttctctcaacaccgggtccccatcaatcctcccaagcttccacaacatccaagcaaaacaacattcaaacagcacaagctatcacagccaagcaaaacagggcaaaggcagaaaactctgcccaaaacaccaaccaaatcacagcatttctcacttaaagaccccagtaacaattccttcgatccaattcgttaaccgttggatcgactccaaaatt

SEQ ID NO: 95063 - DNA, 434 bp, Glycine max
  unsure (1)..(434): unsure at all n locations
agcttgcttgagaaagctgcgtatataaactctcttgagaatcttctctgagaggatgtgcttgagaagctagaggttatctacacacacccatctaaaaactaacctcacctacttgagaagcttccttgagaagctagagcttagctacacacacccatataaaaactaagctcacctccttgacaaaatacatgaaaatacaagnaaaaagtcctgactatatagactactcaaaatgccccgaaatacaaggctaaaaccctatactactaaaatgaccataatacaaggcccaaacgaaggaaaaacctattctaatatttacaaagataagcgggctcatacttaacccatgggctcgaaatctaccctaaggctcatgagaaccctagggccttccctcggatctcttgcacaatctacttggagtc

SEQ ID NO: 95064 - DNA, 369 bp, Glycine max
  unsure (1)..(369): unsure at all n locations
ttccgctgccagtgctaggaacttctggttattgaaagacatacaaattatgagtgggggagaaagcatataatcaactccttcctagtttgcgaaaagataaatgataaaaacatttattaatgtagatgtcaatgatgaccaacctgcttaatcttcttttctccatatgagctagctgntgacctgagcaattctttctccaattccctacacttcattgcaatttcttctgaattagccctctccttatgaagctcgttcttctaacaagtcaacctttgcagactttctttctagcttttcctccaggaccttacacttcattgaaatttcatctgacacagccctctcattgtcaacttctgc

SEQ ID NO: 95065 - DNA, 315 bp, Glycine max
  unsure (1)..(315): unsure at all n locations
tnacatggattggtccctcatttttctttgtttttcttacagcaacctgcaaatatttgcgccgacggaattatggttacatcccctggagatgtgaggcacgtacgcagcattggtgttatttttttataagaccatggatgctcctgaactgcttatgatgatcttgcctcacctcatatgaacactgaaggatcgagtgggagatattatttgtggcatagggatatgtgaagaaaagatagtttgtagctgggttagtgctttagcttttgattgtattaggcgaaaatataggccaacccaagatggaga

SEQ ID NO: 95066 - DNA, 397 bp, Glycine max
  unsure (1)..(397): unsure at all n locations
gactggnttgtgcaatagcacctcacctgtctttctcaaggtctcctgacccccgcgacatatcttcaggtaccactctgtggtcaacaatataagcacgaagtttcacccttcaacactatctcatctcaagcttgtaggattatggggtacccatcacatgtggtactacgtggcggtcgggcgatggtgcacaacaaagtttttcacatccacaatgcgcgcataaacccaccatcccctgtagcccacctccaactgagctcacgtactcccacgtagcccatatcctcgtttctctcaacaccgggtccccatcaatcctgccaagcttccccaacatcaaaagtatacaacattctaacagcacaaactatacaggcaagaaaacagagca

SEQ ID NO: 95067 - DNA, 370 bp, Glycine max
ttggctgcgcagcagctctgatttcgtgagtatttatagaagatgacgcattgtaatcgattacaagtattggtaatcgattacaggcccaataagccttctggtaatcgattacaggctgcctgttcatgtgtaatcgattacaccggatggtaatcgattaccagagcctatcctaggctagtttctaagagaatatctatatttatgctcaaatacatcctatatgactaattttcactactaatacactaaattcaatcattcaattactatatacacaagaaatcataaattctatcataaaaacaagaattcaaacaagatcaaacaaaataatctacaatcaaaaggtaaaagtaaatcaacc

SEQ ID NO: 95068 - DNA, 454 bp, Glycine max
  unsure (1)..(454): unsure at all n locations
agctngagttaagctagcctaatgagggatcgttgtctagtactttaggctacaacatagaacacaaaagcatgaatgattagagaaatatccttatatgcatcaacttgtttgttagagagacctaacacttttacctaatgttgtcaatcttacttacttgcgtttttactattttttttagcctagaattagtttaattctgttctaaaccaatcaattatcaatgtttctttcaacaatgccttatttctgaatttaaccttgtctagtactagttccctgagttcgatactcggattcatccattttaattttaaatacttgacgatccggtgcgctttctggcgaatcagatttcccttgaacatatttgtataaataaaaattggataaaaaagtaactacaggggaaatccaacaccactcccaactcaagaattcatatgtgttc

SEQ ID NO: 95069 - DNA, 365 bp, Glycine max
tctcccctattttgctataaataggggaagttttgaagaagaaaagggttcagccccttagacacttctctctctttcgaatttgctgaggaaaattatttccgtgaagaaaatccaagccgaggcgctttcgtaacgtttccgtgagtaattacgcgaagattctcgaccgttcttcaaagattcatagttcgctcttcgttttcttcagtcttcaatgggtaagtacctcaaaccaagcttttcaattcattatatgtacccgcggtggtccacattttgtttcatgcatttttattctcgttttcatttactttttatacccccttttgacgtgcttaagccatttatataagtcatttctc

SEQ ID NO: 95070 - DNA, 255 bp, Glycine max
  unsure (1)..(255): unsure at all n locations
tgaaccaagaagtgcatgaaccatggtgcatggcaagacaataatgagtagtgaacaacttgcaatgtccttaaatnttcttaatatataaacttagtactctatnttgaaactcacatgtnttcttgngtttttctagagttatcctgtcatgcaactgcaatatctntagaatatagttggtacatcatggcttaatacatacgatggtattttccactcacatatgattaangtctaaatcatgttaagtac

SEQ ID NO: 95071 - DNA, 291 bp, Glycine max
  unsure (1)..(291): unsure at all n locations
ctcatgcactcctctaatgactatggcatcatttctggcgctaaacttctgggagttggaggccatcttcacaattaaatttctggcttcagcangagtcatgtctccaagggctccaccactggcagcatctatcatacttctctccatattactgagtccttcataanaatattggagaagaagctgttctgaaatctgatggtgagggcaactggcacatagtttcttaaatcgctcccagtactcatacangctctctccactgagttgtctaatacctgagatatc

SEQ ID NO: 95072 - DNA, 169 bp, Glycine max
gctacctagtgtaaactctgtagtaagtgaacatcttaatgtacttgtgaatcagctacgaggggttaataatatagagaaaagttaaaataaatcattaactttaatataaagatttaaggtataaatacaaaatgcacttttatgtttatgccatctgttaacaatg

SEQ ID NO: 95073 - DNA, 81 bp, Glycine max
ctctggtaattttccaaactctttatctaagtgaagaaatattttgaaatatatactgcccagtctatgatgggtgcagat

SEQ ID NO: 95074 - DNA, 95 bp, Glycine max
cttcggacctctaaaagctctagggagctcctggctgtaatagaacatgtgaatacatcgtgtaactttatgaatgagagtctcgtgagacacac

SEQ ID NO: 95075 - DNA, 371 bp, Glycine max
  unsure (1)..(371): unsure at all n locations
gctgcagctatgttgctaatgacctgacttaatgatatctctatccttgttaatctngagagcttggtcaaggaattactctaattgggaaaagtganaaatgaaagaaaagtagcttcacccacacaatagtgttgtaataaagaaaatagtttatgtcattagcaaacacttgaaaagatatagaggctttgcaacagaaaatctggatagtagactgctttatactacttgatcaaaacatgatttgtcccactctcacctgaagcttgattgttttttactgtactgataagcaatgactcgtgttatatctaacttctataaatactaatggtgctctctattgtcatacatatgtgacatgtctt

SEQ ID NO: 95076 - DNA, 258 bp, Glycine max
  unsure (1)..(258): unsure at all n locations
atatttatattcattttcttaaaangtatataataataacctcatttctattttgtgaatgtnnttatatgatatatganaacaatcggtgaaatttatattaaggcatcatgcanntagatatatattntatattataaatttgctttacctatattaatttatagaagaagatcaattcagataatgaccgatctatcatatttttagtgtacatgctagataataaacatattgataattcattcatattaaaat

SEQ ID NO: 95077 - DNA, 254 bp, Glycine max
  unsure (1)..(254): unsure at all n locations
agagcgcgagagaatcactgagaagaatatatgctgcgagcaaatanggtgcgtcanatataatntanaatgtaatntcaacatcggnntttcaataaaaaactgatgttaacaaattgatgttaaatgatcatacgtttacatcggttttctacaaaactgatgtaacggatacacattatttacaattatgccaccgcgtgtatgttaacatcgatgttgtcaanaccaatgttaatctgtcgatgttaaaa

SEQ ID NO: 95078 - DNA, 240 bp, Glycine max
gcactgcgctgcgctctgaactaagctcctccccttatactactctctgagtctgaaatctgaaatctgtccaactatccagccttaagtactactctaagaacagctatcccactaatatattctgcactaacaagcttcaatttagccgacacaacctcatgagcaacagcaaagaacattattacaaaacgcaactgcatgtaaaccctgatagaacgagctctacattgcatcttg

SEQ ID NO: 95079 - DNA, 239 bp, Glycine max
  unsure (1)..(239): unsure at all n locations
tatctaagcttgtcattcagtgcagattattatgactcatggacatctatgtaagttatgccgcttgaaattgctacgagcatcntgtttcaattacgagcgtctcgacatactacgggacacaaacagacatccgagtaaatattttatgtcgttagaatttgctataccttttgtgttaatatcgagcgtctcaatatattacgcgattcattcacacatccgagtaaaaagttatt

SEQ ID NO: 95080 - DNA, 230 bp, Glycine max
  unsure (1)..(230): unsure at all n locations
ccctgtgacgtgctaaccatttacttaagcatntctcgctaacttaaaataaataattacacaacggtgattgatatccatcacttcgataaataattcaccgtcgtctccgtacccttggaatcatagagataatattctatcaaaattcttagtaaatagcgaaataagggcatcctcttggattctatctatcaatgaaatactaaggaactaagctaatcattgct

SEQ ID NO: 95081 - DNA, 66 bp, Glycine max
ctctctcaatgacatccaaagatttaatacttacaaataccttgctttgtatatcttctgaataag

SEQ ID NO: 95082 - DNA, 65 bp, Glycine max
  unsure (1)..(65): unsure at all n locations
tagaagtgatcataaatggacanataaatatcctcacactaacactctctcacgtgtntacactc

SEQ ID NO: 95083 - DNA, 257 bp, Glycine max
gcttcactcgaatgactctgaagtccagcttctctgcaattacgctaggctctggatcgttcccggaagtaaacaatcttgagagacactttggtttctttcaattaaatcaccccgataccacacaatgggggtcagagtgacacaactgcgagctgcttctctcccttatgggcctcatgaggggcaccaccttcttatggaccgtttcattactcaataaaccgtttgtcctctgggtcttcagaattctagct

SEQ ID NO: 95084 - DNA, 250 bp, Glycine max
  unsure (1)..(250): unsure at all n locations
agagcttgtgtctatacaattcatgaccttcatcatgttcttgagtatacanatcattctagaattcaaagaattatgcanagatcattattcacagttagtcattcactcacagaggtaggcaaactctcaccggttnttgntcaagctcttctttcacaatagtctatctagtgactaaccattctattataagttcacactcttggtctttctttgctaacatacacattngctcaactcatgaaaa

SEQ ID NO: 95085 - DNA, 166 bp, Glycine max
  unsure (1)..(166): unsure at all n locations
gagctctcgtgtccgtaaaatgcattcatatcatgcatcgcataagcatctcttcataacatcataatggacatatcctgcatttgtccgttatcatattccggcctcacattntgcatgagtcatggcatcatcatgcatatgcgttcaacaaactttttgatct

SEQ ID NO: 95086 - DNA, 277 bp, Glycine max
  unsure (1)..(277): unsure at all n locations
tatgggtatactctcaattatntaatccaacttttaattaaagaatntnntaaagtaaaaaatactaaataataaacaacttcttcttattttttattntaacttaagtaaactttaagaaagaaaaaaaaataaagctgtaatattaaatatggaaggagttataaatgcatgtnggtatttgacaaggataggtcaaattccatanaaataagaaccgagtgaaaacaactataaaatatgttccgtctaaggaagagaatgacattctctttgt

SEQ ID NO: 95087 - DNA, 259 bp, Glycine max
  unsure (1)..(259): unsure at all n locations
ttatgctataattacaaacaagttaatacaaatggtgatattgtatcatatatatataaccttgtggagcaggctcataagaaagcanggaatctatggataccaagaaccactctagtatgtattattttaacagaaaaataataatgttgcatgtggcttccaactagagaacagacattagtcagttatctcaaagcanagcaaggcagtatttccatttggttctaaagtagcatanaccactatgcaacaagta

SEQ ID NO: 95088 - DNA, 471 bp, Glycine max
  unsure (1)..(471): unsure at all n locations
cttaatgtctntataggttacttcctcgttgacatcttttgtcttgaaaggaatngccatgacacngttatcgttactatctatgatatttggtagttgatatcgtgtngcgggaggtaattccgatcggattaactcaccatccttcaccttgccaattgttatgaacattttgtgntggatcacctatgatgtcttgtttccaagggtaatctatatcctttctgatggcataagcatganaccaatcgaagaaaacgacatttaatttgactctttcgacannatcgtagaacttgtcttggatntgtnntctgttgacncttgtaatgtggaaaacccatctcttaacgtcattcttcgaaataaaatctttctacgggttctatcatgctaagtgtagatacatatanggtcatagagagatgttgggatgatcgacttgtcgctctgtcttgtgatgtgtctaga

SEQ ID NO: 95089 - DNA, 243 bp, Glycine max
ttctatcttacctgtagatatgggtcccatccatgtgtacaagtgcggccgtgatgtcacacagtttcacatcaaagcgcctaaccccatcctgtgccactcattactattctcactgccttcttttttaaacggtccatatctccacttccacatcattcttaactttacatcaacttacaacagaacatgaatgaaaactttcaatcaaacaattaatttttacttatacccgaaattctt

SEQ ID NO: 95090 - DNA, 170 bp, Glycine max
cccactttatactactactctggagctctagagtctagagtgagtctcctcctttatctactactctggtagagtgactactcccccttatgtaactccctgcaaaactgaaccaaaagctttcaaactccatgcgatcagctacctcttgatgcaatcagcaacagaac

SEQ ID NO: 95091 - DNA, 277 bp, Glycine max
agctcactctggcattctgcagcacttgaagtattctttttctcttaacaaatgctcactctcataccaactatgaattaacaacttgcttctcttcaactcactccaacttttactaaaatccccttcaataagactcgtccaatattttgtcttcaggtttgtcccatactcactctgctaatactctgctacaacttgggtcaaaatgcattccatcgatttatctatcttcaactgatatctgtttccatagctcttatctataatgttctct

SEQ ID NO: 95092 - DNA, 78 bp, Glycine max
gtattgtttgaatgagggaacatttgatgcaaacttccctctcttttatatttgtcagggttgtgcctatttcaaact

SEQ ID NO: 95093 - DNA, 315 bp, Glycine max
caagcaccgagctgcgcttgtgtagtgtgtgctctatcacacatctgatcgtctgtccaggattgaaaaccagaatcaaatcatgacctccatttttctgaggcaacttgagaatgtgtgaaaaaacaaaataattgagtcaaaatcaccatgcataacctcatcccatgcagacacctatgaaatgtaaacaacaatatgccaatgacttgaacactcacaatcttacaaatgagtaatacccttggcaataagaatgtttatcacttactgattggatttgtggtataagacaaccacagcttgtcctgcaac

SEQ ID NO: 95094 - DNA, 317 bp, Glycine max
  unsure (1)..(317): unsure at all n locations
gtcctgcactatntcagaaaggtgcactccatctgnttggtgaataaccttttcattgtttcattgaaatatggtctgttttggcttattgttntcagccttttagcatgttttgatgaattttagctttggcatgagttgttaagtcttggttattggtggttcacaaagtgtttgtcaaaagtcctcatagaagacaaattntgcgaattttctattntgttgatgtaaagctttgtccatggtgattaagcattgattaagctttngtcatggatggttaagcattgaaatgtngttttgctctactcttaatg

SEQ ID NO: 95095 - DNA, 211 bp, Glycine max
cctattcactccacgggcctcattaagagatttctatcttggctcctctatggataacctcctttgaacttctgaattagaaggtcacaccttaaacttacgggtttgaaaggacttatagattgatccttttactactcatagctttttatccatgatgtcttaagttgccctgttactgggatgatatgcaatgcgctccaatccttgt

SEQ ID NO: 95096 - DNA, 170 bp, Glycine max
acattctcccttttgagagacttcactgtagttgaccacaacaagaaaaattctatttgatatagttactccccttggtttaatgttgctatatagacattgaaattcataatttattaaaaagttctataaaaagaaacttctatatttatcttacttcttcccttgca

SEQ ID NO: 95097 - DNA, 287 bp, Glycine max
  unsure (1)..(287): unsure at all n locations
cttaatggctgagtgtaactgannatgtggcaaccaanagtcacccncaacagccaacaagtcagccaccatttggtcttccaaaaggctgatgcctangttgccaatngngcccttattacanattgaactanacctaactaaatcccttttagttgaataacccacaacatatttttggtcagccaactatacaaggatcgngccattatntagacatactaaacactctaaaattgaacanagtggtgtcatttagtctcctccatttggccatgaacaactac

SEQ ID NO: 95098 - DNA, 287 bp, Glycine max
  unsure (1)..(287): unsure at all n locations
ttgtatggactctttctcattcgttccgaatccattatatccattggttcggngttggatntaacccanatttcactaagaagaataaaacntnnatttgatattaatctatntctttgatccaatagcatgttcttcgaacaaacatcaaanataatgatgggtctgatagaaataaatgcaaatgtaaataaggatgcataataataatatgtcatggcttaaatataactcacaanaaggctaactatcttctcgtccatatagtcccgaagaaaaaatggctc

SEQ ID NO: 95099 - DNA, 446 bp, Glycine max
  unsure (1)..(446): unsure at all n locations
ttatatatttattcatttttaatggtactttttttntaagataaatacccggttaataattttctaatactntatatattatggtactctaataactaaatttactaaatacaagctgattttttcatcttcgaactaacacttaattntatcagacatanacaaaataacttntattgatgaaaatgtgtgaaatgcttccaagaaaggatgatccagaatgctagctacgtttattttattaatagtacatattatgtatgataaattataattctataaatatattaaatcatcaatcgtgatatactaataatatataaactatttacacaatgatacatcatcataacattttatatttatagatttaatatatgactataatcgcatgctgttatgacatcctnttatgtatataatgcatatgatgatcacctacctgc

SEQ ID NO: 95100 - DNA, 373 bp, Glycine max
  unsure (1)..(373): unsure at all n locations
tgcagctgctgatacatctccccttctaagcaatctaatcttctgactcatcaatctatgattacatctcccctttgagatacaccactgtagtagacccaacaangaaaatattatttgcttagttactcccctggttgcatgatgttattgaacagtgagattctattttctatgtaacatttctataacaatgacattttctacatttatcttatcttctctcccttgcacatcaaacaatatgatgaaggaaagagtccactgtgcatgatagatcagtgtacaaaggataaacatctcatatatgagcaacagtcatacctcatcaccatcatcatcatctaaattaatcaatatcatctagacgcta

SEQ ID NO: 95101 - DNA, 271 bp, Glycine max
agaaaagtgagagcctcctggatacctgaaagcttccacaataccttgtaaactggagtgctatggaaaaaaaggaagaagaagaggggagccaatgagataaaggagaagacttattgttacgattttctcagtgcctgtcctgtttttactgactctggacttttgaactctggagcttttaaaactcttgtagcttttgaactctggactgactactccccccttatactactcaccttgcaaatctgaatcaaaagtctctcagctc

SEQ ID NO: 95102 - DNA, 343 bp, Glycine max
  unsure (1)..(343): unsure at all n locations
tctgagtcacctgcggcatgcaagctctgtnttcaatttgagcatctcgatatatacgggactctatcnacatttctattaaaagtattatggcagaattgccagagctttgtagcaattcggcgtctgattttacgactcatcgacatcaaaaaaagtattgtcgttgaattgcttagagctttgtctcatttcagtgtctgataatttgagactcatctacatcgcttanagtatttcgttacttgcacgacatcttttaatacagcgctcgattatacnggactcatctgacatcagtanaataatatcgtagaattggctcaagctttgtttcattttg

SEQ ID NO: 95103 - DNA, 137 bp, Glycine max
  unsure (1)..(137): unsure at all n locations
tgacccactaacctataattaannataactaatgtcattaacctannggaataatataacttaatggctgagtgtaactganattgtggcaaccaaaagtcacccccaacagccaacaagtcagccaccatttggtc

SEQ ID NO: 95104 - DNA, 383 bp, Glycine max
  unsure (1)..(383): unsure at all n locations
gctgtcagtaagtctcgactggttaatctattacnggtagtaattaatcgattacattgtnggntgagacaatgatngattntttcaagagtctctactntaattgattaccaagtagattaatcgattacttctctcttgttaagttggtcagaagtgaacaagaacattntaatcgattacctgcgtcatctaatcaattacattgatcttgagtggttntcagaatgtggacggacactttaattgattacttcattgaaatatttgattactnntatagatttatcgatggcangcggttataactattttctctataaataaccagcttgtgttcacatctatacatcatgagatcattagtgaacactcaatacatc

SEQ ID NO: 95105 - DNA, 340 bp, Glycine max
gtctgattctcttataatatcgagatacaattaagcttgtacatactgtgtattacaacttactatcacttgatatattttttctagctcttacttgctgtatggtgggtgatagctattacaggcacaaatggaataattatggttggtgaatatgattatgtactaagtaagtttggggagactggtcaagttgagattagatatgtacatctaactacctgcacaataaatgtatggagaattgtaaaattatgatattggccactttgtgacccttgatgatttgagtcttatatcatatcatgcgccgttcataatgggtcaacacttattattt

SEQ ID NO: 95106 - DNA, 246 bp, Glycine max
  unsure (1)..(246): unsure at all n locations
atgttatatgctgaaantgctgatggaaaactgntagagatgaagggtagaactaacctatggttagaaagtgagaatgtgatgttatgagtggaataagagtgacgctttgagagttggaacgttaagtctgaattctgtgataaatggaagttaaagtgagttaatactagctngaaatgtcatntangacttgngagaaagcttggactgtgctatagagannaacaaatgatcatagtgaac

SEQ ID NO: 95107 - DNA, 434 bp, Glycine max
  unsure (1)..(434): unsure at all n locations
cgtagctacttgagctgagtctggtcttatatgtggatngaaactcagttaagttagtctaaacctaagaaggttgtctaaattaggcctagtcttacatgaaggatctacnngatgaagcctgatattcngcctggcgagggatcgatggtttagtaatttaggctacaacatataacacaagagcacaattgattacagaaatatatttccatgcattagcttgtttgttagaaagacccaacaattctacctactgctgtcatnnttattaccttgcanntttatagttntagcatanaagtnntagttannatttgtctganattatcacttacacatgttatctcaacaatccttcaattctgaacttaatcangctaacactagttctcggtgttcgatacttggattcatccatttaaatttaaata

SEQ ID NO: 95108 - DNA, 156 bp, Glycine max
tctcatcctctcccacccccttaatgtatggacctgataagttatgcaagtactggcgctacggtctcttatattactaaatttcctgttcagactactcctgtggactgcttgtaaagtgtggtatttttctctactttcgatatagactagtta

SEQ ID NO: 95109 - DNA, 323 bp, Glycine max
tgacttagttatttcaagacaagtcaaatgcccctgacttatttgctaggtacacagatgaggaatgatttttaattactgattgaatgattttgaccaattgagccaatcctatatatatgatttgttgttacccatatcaaatcagtcaaatctcctatggctttgctggctgtagctaagctccaatggatttatggatagggacagcacctacttccttaattatgatagcttcatcataattttcacccctaaatctatgtgaatcaataccatcaaaactgtctaacacgtaaactctttagctcttttgcaaacgt

SEQ ID NO: 95110 - DNA, 330 bp, Glycine max
attggggactctttctgttatctatgtgcctctttcttttgtgttcgtgttctatgaacacttagacatgactaaacactctaactctacatttctactatgccatcatgtacatgtatggcatggcataatccaacacaggcagccaaaatggtcttattatttaaaataacaacttacgtaatcttatgagcatatttttttgaataatacaatgtttcactgtttaaaaaaaatcaaatgatcttctgataaaaagcatgccattcgataattacagactggtctcttgtgaaacccttgcttatatggatgaaattttagcaatta

SEQ ID NO: 95111 - DNA, 92 bp, Glycine max
  unsure (1)..(92): unsure at all n locations
taaaatattacngataaaaattacgcacaatattatcagcctatatatatatatatatatatattatatatatatatcagggtgtacattat

SEQ ID NO: 95112 - DNA, 228 bp, Glycine max
tgtcccttgatgctggatgtaactacctctgttaggttttggagatgttgtgatgttatatgctgagattcttatggaaactgtagagtgaaggttagtaacttacggtagaaagtgaaatgtgatgtatgagtgaaaaagaggaggctttgagagtggaaggttagtctgattctgtggaaatggacgtaaagtgagttaatctagctgaaatgcatttgggactat

SEQ ID NO: 95113 - DNA, 169 bp, Glycine max
  unsure (1)..(169): unsure at all n locations
ctttgaacaatatngggctcgtctctcttgttgcagtttacctccccctcgcacaagtgtatctctcatcagatttaatagaaaatggatatccgcatatttaccagctctcatcagagcatatatgtgttcttttcaaataggctctataagctcacatttatctgca

SEQ ID NO: 95114 - DNA, 215 bp, Glycine max
cgtggacatcaaattatgagcataactacctctttgacgtggacactgaaaatcgactatttgctaacttccagcacccccaacattttgcaagcaatctgtgactattgcacaatctgctatcgattcaataactcctatcactgcaataatctcagcaatatgtatctgtaacaagactcaccaaccaattaggcaacctattatgatttgtg

SEQ ID NO: 95115 - DNA, 336 bp, Glycine max
  unsure (1)..(336): unsure at all n locations
gctccttcttccatggcttattccttaatggatggcgcctnctctcacctncttntcttngtcttccgctgcatctncatggtggaaaatcaccattaaaggaccccattgaagctcaaagatccagcctncatagaagccccacaagcaagcttccatcagcatggctcctcactaactcaatgtgtggtgctacaagtatagaacaatatangaacaaaccttttgtaaatttgttaagtcatgagagccncanatntcccttatacttggtggagtaagccactaacgaatgacctttattctcttaaggtccgtgtgaaccccgtgatcact

SEQ ID NO: 95116 - DNA, 369 bp, Glycine max
  unsure (1)..(369): unsure at all n locations
acatcatactanaactatatatgccatgatatctatatcttaatatgcaccaaggcattagtgtattctaaccccaaaaccttaaggactgaanatcatgagaaatacattaccttaagcangtngctcaaaatattnangcaatagactagtcaaatacaatgaaaaanaatataccttaactttgagtagcttgaacaagttattggtgtacatgatgattacctactaccaatgaatattaaatggaggcttattattagttgttgattggacacacatcattctgacctatatgatcatatacagtcaaacttgcatcatntcatgctaattgtatgatgtttgatgtgtgatgcatatgacttc

SEQ ID NO: 95117 - DNA, 234 bp, Glycine max
gttatctctacaattcctgccaacactggatcataggatattgatgctaatgtcatttctttcaaagatttttttcttcttaaagataaacgagcttgtggaaatcaaacagagatgctgggtaactgaagaatctatcgacttacgtgtggacgctgcaagggcacagtatcagtgctcttttacccttatatgtattcatatgcatgaactagatcttagattctatagaat

SEQ ID NO: 95118 - DNA, 129 bp, Glycine max
  unsure (1)..(129): unsure at all n locations
cttcagtcacctgcggctgcagctnntatgcataagataaacatgcaagaagtnggcccactgcanngagtgctaatacanatngatattcatagactacattatcttgtccaataaagtgtgtgtcta

SEQ ID NO: 95119 - DNA, 132 bp, Glycine max
actagcctacacgcaacattagttaagtagatttggtagaacatttttgattgaatcatattttagggtggataccaccttgtagaccctttttgtttcagcaatgttcaccttcaatgtgtcgaaagaggc

SEQ ID NO: 95120 - DNA, 230 bp, Glycine max
  unsure (1)..(230): unsure at all n locations
acgatgtctaactctctatttangacactggtcacatcanaggtttcatactcaagctcaaactactaagctagctctaacgttgaaactaaactcacaacaaaattcttaagaatttacccatctcttctaccttgaattcaactcctaagggtctcacaacgtatcagactaacgataatgcctccataacatgaaggcgaacaccatggctaccaactctagatcat

SEQ ID NO: 95121 - DNA, 166 bp, Glycine max
  unsure (1)..(166): unsure at all n locations
cacttccacatatcagacatgaacccaccatcctcagttgcccaccttcaactaagctcacgtactcctacgtagcccttatnctgattcctctcagtacgggtccccatcaaacccctcaagcttncataatattcaagcaattcaattccaactatcatgaact

SEQ ID NO: 95122 - DNA, 51 bp, Glycine max
actcccactttgaaataacattgacgactgatgcattaacctgcatctata

SEQ ID NO: 95123 - DNA, 166 bp, Glycine max
  unsure (1)..(166): unsure at all n locations
tactcaactcaacattgcacatacacaacacatgcatgtcttataaaatgagcatatcatgaaatataaggacataacctcctacaacgcgtgacatgcaataaaccctgacattaaacccaatgatcaccnacatgaaatgaatgatgcaaaaacaccactgctg

SEQ ID NO: 95124 - DNA, 292 bp, Glycine max
atctacttcttggagcgctctacttgtcaccattactgtctctcccagcttttatgtgcgaggtatgcaactctccacatctgtatatagcgtatcccggtttctaacctccggtaaacgtccactactgcctatacgtgatgactcagtgccaaagatcacggaagtacctaaacgaagcgttacatcttggtcatagagagagcctacaaattctgcgacaacagcctctcattacttggacgacgcatcatatgacagcccacgatgagggtaacattgagatgcggag

SEQ ID NO: 95125 - DNA, 101 bp, Glycine max
tgcccaatttactgtattgcaactacacttacaataccactacaatacaaccacaactcaaccagacctcccctctaacccttgctatgtccataaaataa

SEQ ID NO: 95126 - DNA, 172 bp, Glycine max
gctgtgatactgtataactttatacatgttcccaatcacataaagacactacatcttcgagcttgggtatgctgctctctggggggttgtaataatttctttgcttcaaaaatagacggactttcataacaattgatgaatggtaaaccaggttcactgctcatctctctct

SEQ ID NO: 95127 - DNA, 393 bp, Glycine max
  unsure (1)..(393): unsure at all n locations
gtggtcttcggcattacatntaaactctatccgttgtcgataagtacctttgcgacaacgtggtccatacatctcaccgacacatgtatgagccttgtgtgtactttcccctcaacgggaatctcttcttncataaacacgatgtagttgttggtggttatatgattaacgatgcctttcacaaccctcactgagatatcatgtgctacatgggccatcgtaagaaccttcatcaacagcgcacgatgaggctcggagtttatgagtagttcaagcaaagagatccttgctagagttntattcagttgctcgactaccttaaactcgctttgttggatgaagcggaggaactcatcggcctcttccaaagtcacggnttttccttgaagtccc

SEQ ID NO: 95128 - DNA, 88 bp, Glycine max
gggtttgttcccaattacccccacaataatttctccattttattctcccctcatgtgggtttaaactttccgtcctcctctctcaatc

SEQ ID NO: 95129 - DNA, 202 bp, Glycine max
  unsure (1)..(202): unsure at all n locations
tctcctagcccaactctcaaaaggagtagttccatttggtgcctatactcttcaacactcctactcccctgtctaagcctttggagcttgtccataagccccatttcatagtaggaggggatgtgcctcttcctaagggcactnttcaagtcaatccaatactctactagaggaatcccatgaatccttctttcccctaact

SEQ ID NO: 95130 - DNA, 187 bp, Glycine max
tatcatggcagtcagtactatgtgaccaggatcagtttccttaactttatttagtgataaataattgtgcactatgactcttaggacatactcatattgactgattgtggagtggagcctctctcatcaaatctacctcacagagtatatactaaggctcacactgcacataatatctctctcatgt

SEQ ID NO: 95131 - DNA, 300 bp, Glycine max
cctctttcttcaatgcagaatgttctgagaatcaccagccttctacttcgacgttctatattccaagttcacgtctcactcttctctctatgtttatctacggtatcctaacactttatcttctttccctgggcccattgtcatgttatccgtattgtgcacttttattatagcatccctaccaataatattcccacttaatgttcgtcttgtgatatcacacgctccaccttgacaaaagtatattttataatttaaaaccctttataaaatatgcttcttgattttatatctatcata

SEQ ID NO: 95132 - DNA, 253 bp, Glycine max
ttcttcgatgtgaatcatttactactaaacattcttatataaacacttggactatacttaagtatcataaaggatcttcttcctaccacacagaacatggaagggaatatatcatgatggcaagtgggttgattaaaagtatttatataattatcaaattatataggtggcctttctcgttagtaagactcccagctacgtaattatgacatgttaacataataatataattttagaaggtggactttatctc

SEQ ID NO: 95133 - DNA, 208 bp, Glycine max
  unsure (1)..(208): unsure at all n locations
ttgactaaagatgtctaatgattgtttacaactttccgtcagttgtgagagagtgatgcatgatggtacaaaagatttggttgagaaccaccacgtttctctcatcttagcagggagactgatgatcataacgtgtgcngtgcataactgaacagcatctcccagcccctgattacttcttgatttaggcaagctctgtttactgaaa

SEQ ID NO: 95134 - DNA, 304 bp, Glycine max
ccttaactcagctcgtaatcagcgtatatcgactacgctctataagtatgcttactgtcactcgttaaatcacgtcatttacgatatcactcaggaatgttgcgtcattgacactcgttaattagcgtctttacgatctagactcagaagatgctcgattgtcactcgttaatcacgacattttcgacatcactcatgaagatgctcatgtcacttgtaatcacttattacgatatgctcagaagttgcgcattccactcgtaatcgcccatatcgacatgctcataagttgcgcattccactg

SEQ ID NO: 95135 - DNA, 229 bp, Glycine max
  unsure (1)..(229): unsure at all n locations
catcttgatgggatatgtttgggagaagctgggacatatcttgccagatcaccatgatgcagtctatttgtgctttttatctcanacactcgacatcatgctcatcacaagaggtgaaacattgatgagaccgtntactaatcaagtaatcatatagtggtacagatattgataccgtagtggtacatttgaaaaaaaattgagtagtctgcctacaagatcacatggg

SEQ ID NO: 95136 - DNA, 224 bp, Glycine max
gcctgactccaatatcccgaatacctttgcttgtgcatatgactgtccctctcttcagtattaatactaactttaattaagcgactcattccctacttgctaaattctagtagtgctagtctttaaatgaaagtttctagctcaaactgcattgttaataacacatttgaattaatattaacactgttaacttctagtattactataaagtattatttatattt

SEQ ID NO: 95137 - DNA, 275 bp, Glycine max
ataaatgtcgatattagaagtcatcagatacccaataaacactaattagaagtattactataatgttcaaactaccaatcacgctgaataaatctatatatatatgtaaatgatggggggggagtaataaacatcataataagtactctcttaccttcatctgatcattctcaaatggtcatgcttcaggataacttaccctagtgagcataactgcaatcttgagaaaaatcttaaccgaggctatatttgtaccctttacaacctcacttcga

SEQ ID NO: 95138 - DNA, 162 bp, Glycine max
gcacactttatctcagcttgattttgttaactcactgcttgactttttattacctgacaacatcgcagataaactaaactttggaatctgtgtgatcaaaacaagatacgcgcatattgttcctttcgtgtaaaataataaccacttcaatctatatctcct

SEQ ID NO: 95139 - DNA, 210 bp, Glycine max
gctaaataggtctttttttttttatatatccatgttggttatttcttgaaaatttaacacataatattttcctttttgtcagcggcactgaaacaaagctttttgtgatcactaaggtagtctccaacctgatctctgactttgtcactatagtgcactgccgataagagagatacatacaaaccgcttaggattagagataccatcaca

SEQ ID NO: 95140 - DNA, 212 bp, Glycine max
gatttactaatcaccccctgctttttttgtaatttttttcgaaagtacgaaactacaatttgtacgatactgtttctttcgtatgtacgaacctgggatacataatcatcctttgactacgatatacgacctactaatggcacatgctcatttgattcggtgtacgaactacgatgtcatatattttttgttccgctgtccgaatacaatgc

SEQ ID NO: 95141 - DNA, 282 bp, Glycine max
aactactcccttttcttcaggtttaccatgattgcgttgtgatgctaacgctatttgttccactgtctatacttaccccctataatttactaccccacatgtttaatgtgtaagtcagcaacttctattggtggaatcaaaaactgtgatcctcctaagactatgaatatcaaattacacttatgcatcaaaatatttactatgtatactatgacctttgtgttcactccaatctacacaatcaaccttctgttctgctttttcaccaacatgctgcgtatc

SEQ ID NO: 95142 - DNA, 230 bp, Glycine max
aatgggccatgagaaaagggggtactggtggctcaattttctcatccaggtcctgtttttgaagggtctggactttgaactctgaagtgactctcccccctttacagtactctggagctctaaaatctagactgatactcccctttatctgctccctgagaactagctaccccttatctactccttgaatctgatcaaaagctccagcgtaagccgtcagtaacttctta

SEQ ID NO: 95143 - DNA, 240 bp, Glycine max
gcctctgagttttttttacttcagacgtcaataagattctgtctacacgtgtgaggtgtgaacacgagtagctatagtcaaagaaaagaaaagcttgatgacggtttcagaaaaataacttcttgactattatctctgaagttgctttgcgaaagaatatagatatatcttgctattataactaaaatctcaatgtttcaataatgttttatttctgtcaggtggaacaacacataatac

SEQ ID NO: 95144 - DNA, 237 bp, Glycine max
tatcgataccaaatattgtatcgatacacattcaaataatggaacgtgaattagtgaagctttgaaaccatttgtctggaatgatacatatctgtatcataccaaagaaaactttggtaaagttgaaaaatctgtctctagtttgaaaactttaaacttattgatgagctactgatctgatctgagctgatctgactgatcttgactgatctgactgatctgtcttgacaaattctt

SEQ ID NO: 95145 - DNA, 340 bp, Glycine max
  unsure (1)..(340): unsure at all n locations
gcttacctatcgcctacagcttaattggaccatcatctgtgtcgacctaccctttatccacgtgacctctgttcctactttgtcttctacccgatccatgctgcaactcttggagacctccatgtggcataaaccctgctaaagcggagctcttaagcctctctatggagcactgctatgcaaacgatatatatcaccctgtccatanggacttgcatctcctaaatgattgatttctcttacaggacatacaaccccctgcaccaagtgtcatgcttctttacacacgactgacgatacgctacttgaaaaggaacaccactaactgtcaaacactgtg

SEQ ID NO: 95146 - DNA, 211 bp, Glycine max
  unsure (1)..(211): unsure at all n locations
aactacccaactagagcttggttgacttgttaaaaaactaagcttgacttgactattagtcttataactaatatttttatttgggtaaaaatntcttataaagntttaactttattaatntagtatttaacacaacatcttaatactatgtgtaataatctaattataaaaatatgggtaaacaagtagtatgatattatggaatctatgt

SEQ ID NO: 95147 - DNA, 296 bp, Glycine max
  unsure (1)..(296): unsure at all n locations
ctcagcttccaccttgaccacgaccatttataataacgatcgtaattataatagtctatacaagaaaacataacacaacccctatacaaaacgtgtcccctacgactaactatagtacatanatatgttgttatcacataactgatcagaaacgacnggagtcgccgaagaagtatcanggatagaagcatgtcatccgaacctcgggtgggcangaatataacctcgcaccagcacaaagccctaacggcccgcgtaaactcaacgacataccaacacacaccggaacaccccgt

SEQ ID NO: 95148 - DNA, 499 bp, Glycine max
  unsure (1)..(499): unsure at all n locations
tgcaagcttctagccaaatggacttaccttgaatttattccttngattttcctttgagccttgtgccctttccttgttntgaagctcactacaagccttaagtgaaaaaaccatgatattaccatatccttaaggaattttggagctttggaattattttgggaataagtgtggggggtttttgtttcattggacaacttgttttggtggctatgcttcatgatgtattntgggccatacttgatgtacattgtatattggttaaatgttggacatgctgaatgaaatgttgnttctcataggctaaagagttaaaataaaaaaattcgaaaaaaaaaatcgacaaaaaaatcgaaaaagaaaaagacagcaataagttgagtgaatagatcttanatggcacagaatgatanactctcggtctactcttatgttaattntatcttactttctttatttcttattttntctaaatgcactatccctttgctcttattct

SEQ ID NO: 95149 - DNA, 157 bp, Glycine max
tcagacaagtatgtcttattattattaaatcgggaggagaggaatgtgacttataatcccaccaaagagcacggatttttctgctttttatatagggatgatgatgcttacaggggggactggttagcgctactgacggaacagacttcgtaacact

SEQ ID NO: 95150 - DNA, 353 bp, Glycine max
aggcttatgtgctgacgctcatgcttgaggctgcaatgactttatttgttgatcatactacttcttctgactcttagagaagctattgaatgctatttgctaacatgatctacatgaatgacctgtgtcacaaacggtctttttgtcattcaacttatatttctgacaaactgatactgacacacagtctcttgtttgcctgtgaccactctgtttaacacagaagatcgacaagaacataccaggctttgataacactgcacattaaatcggactaatataatgagctatctactaagcttcaattatactgtgcctgaagactctccagctactgagtctcgacaagcgtg

SEQ ID NO: 95151 - DNA, 429 bp, Glycine max
  unsure (1)..(429): unsure at all n locations
cgtgcaagctntcttggagaaacttgcttgagaagcttctntgaganaacttccttgagatgctagagcttagctacacacacccctctcataactaagctcacctccttgagaagcttccttaagaagattcctaaagaagctagagcttagctacacatacctctctaatagctaagctcacctncttgagatgagaagctagaacttagctacacaccccctataataactaagctcgcccccatgacaaanaacatganaatacaaaaaaaaaaagtccttactacaaagactactcaaaatgccccgaaatacaaggctaaaaccctatactactagaatggccaaaatacaaggcccaaacgaagggaaacctatttaatatttacaagatagcgggctatacttacccatggctcgaatcta

SEQ ID NO: 95152 - DNA, 379 bp, Glycine max
  unsure (1)..(379): unsure at all n locations
caatcacgcgtggttcatagcacagaaactttctttctcgctcttngtnntggctngcnncttgcatagactcgcaattnnnttcttttcaaatttgaaagccttcacttagctcatgcannacttcttcacaaatactcaagctntagcgctgtnngcatccttattgcttaaacatagcaatgttanggcatanngcaacannatcaagaaggagtcaaaggattaaatccatacactatctcaaatggtgaacaattagttgtgctgtggacagcccgattataagcaaactcaacatgaggcaaacagggcttccaagaattaagaattttctttaaaacagtcctaagaagtgtgcctaaagtcctattgagta

SEQ ID NO: 95153 - DNA, 204 bp, Glycine max
gttccaaagctgtgctagtgcattggccctatacactgacaaacactaagcttagtataaccaaacatttatggtagcaacttacaggattggccgtattagacaactaacactcttaactgaaaaagtgggccattagtctcctcatttgtgcatatacaactacaaccttgactttctcctgaactgggttgatcaatatat

SEQ ID NO: 95154 - DNA, 454 bp, Glycine max
  unsure (1)..(454): unsure at all n locations
ttacattcacctgaggcatgcaagctnttatacaatgagtttaacanactctatcatctgtttcgtaactactgcatctaactacccaacgacctaaccaactaacccttggtccatacaaggcatgactcaacctatccatgcatgcagctntacgtgagagatgtcttcctgctgcatcttcttcctaacattccctaccccatcaaaaacaccttgtcctcaaggtgttggatgcagaanaatagaacatgagtaaaatggaagctcagcctgtgccagccatgattgtggttgaggcggtggcttcngnggtggtggtggtggatgtggtggcgggtgtcgtcnccgatgacagactgagcaaggccaagtcttgacggcgaatagaatccaaaccaagcacggaggaatttgatgcttgatgtgcattgtgcggagcaagatggtgtca

SEQ ID NO: 95155 - DNA, 348 bp, Glycine max
  unsure (1)..(348): unsure at all n locations
gttagtgggttaacaccattataaaacttcaaaggagaactattagtagtgctatgaatagctctatggtaagaaaactcaacatggnggtaaacaagcttcccaagttttatagtcttcctcccaatatcctattaacaactttcgtttgcccatcggtttgtgggtgacaagtggttganaataacaatttagtgcccaacttgccccacaaagtcctccaaaaatggcttaggaactcagagtgcctatcactaacaatgctccttgccaaaccatggagtctcacaatctccttgaaaacaaatcagccacatgggaagcatcatncaactttttacatggaat

SEQ ID NO: 95156 - DNA, 385 bp, Glycine max
  unsure (1)..(385): unsure at all n locations
agctntatactgcanaaagaacttttcccagatgatatttgcattntcattcttagcaacttgaatttctattctgagctcaaaacgattcttcattntgaactatcattagaaacctttntgtttaaaaaggaagcttaatagttttcaaaaccccaattcaaccccccttcttgtggtattttagtcacttcaaatgatttagttagcctctctccctccttcctatgagaatnttgtgagttctgttagtggtggcaaggactccattacanttgaagaagtcaagtccaatctctattccatagggcttcgactaanagcatctagcaatggtgatgaagcctctacgtctagaatatcaatgactaattctactaaatga

SEQ ID NO: 95157 - DNA, 469 bp, Glycine max
  unsure (1)..(469): unsure at all n locations
atcctcggagtcgacctcgcngcatgcaagcttgcttgaatggcattcttctggctntgtataatggngaggagtcttgtgcgtcttgaaagggaccttcgccttgagatggatgaaatcctcctccaggaagagttcttatgattccaaaaatcaaaggagaattgggtttgtttaggggatagaaatacaaagttttttcatgcccaaaccatgataaggcatagacgtaataataagggccatgaacnatncttaaatgatgggtcttggagtaatgattctgtagctctgaaagaggaggccaacagatactttcaggagttatttgctgatgatggaatggtgaggcacacttcgacttatggtggtgcttttcctanacttgatgaggaaggtataaattccttacttgcactggtgacgtgagaatatgtcatgatgagagctgtgatgagcatgcnatcgt

SEQ ID NO: 95158 - DNA, 428 bp, Glycine max
  unsure (1)..(428): unsure at all n locations
ctacagactgagaaagagtttgtnaggagcttgtatgagaattcctatgaaaagcactgggaaattgaagaccagattacacaaatgcagaaaatggtttgcagctcgcaagatgagtntggaattaatacattcatagaagataacgatgcacgagctctgatggctgcaacagctctgaagtcatgcanagagaccctgtctaagttgcaagaggcacaggcacaatcatctgaagaggctaaagaatcataccaaatggttaaggaagctcacagcaagtttgaaaccctcagatacctattcatttctaaacatatgagtcaacaagaccaagtaacagaaccaataagcattgatgaagaagacatgtctagcttggaagaaaaatctatgaacatgatgtgtggcggttgcnagacacaatt

SEQ ID NO: 95159 - DNA, 433 bp, Glycine max
  unsure (1)..(433): unsure at all n locations
agtataaggctacacaacatgcttttaaaattaactttgtgaaagcaaccaaaattacggcccacataatacttgaaatacctgagacaatgtataatttcacaatgtttgataccattgtaaatggctatgccagacctgattatttaatangtataatttnttaaaaatngaagaaatagattgataacatggtaatgttgntatgtctttttactttggatttttgttgaagatgttattggtgaggttgttgaaattggtcaatgaaatctgcatggcaagccaaagaaagtggttttcaaaatgaaagatgaatggtattcattaagttattattattagaatcagaaagtgtactaacattattagtttcagaagttntaatgtacttgatttatgtaacacaggaaagatcatcaattgtacttga

SEQ ID NO: 95160 - DNA, 512 bp, Glycine max
  unsure (1)..(512): unsure at all n locations
agcttgacacacctgcttcatagacaagctctaaagagctagtggtatttttcaaggaacaaagaggaattgtaatatattaattcgggatgggattaatgaaagattntatgctttntgtatcacactatctcctaaaaattaaaattcattgtcctaatggtacaccttttactaaaatagatgaattatcaaataatagtgccacatgaacatgtatatctggtacatctcaatctgtgagttgtacaatggaagtcttatatcaattgacctttatattgtgtcttttgttgtgatgatattgagttatagttgcaccttntattttttcaagagccctacacttagctctgtaagcttgatgtgtagataacttacaatcccatctctcaagtgccatanaaatcanagctntactcttcatatctagtgtattccttaataatgacatgaatnnttcagtngactactctatagtcacttgtctatttctagttgtcttgaagcat

SEQ ID NO: 95161 - DNA, 501 bp, Glycine max
  unsure (1)..(501): unsure at all n locations
gcaagcttctggaaggcccaagtgggcctgattgcttttacaccctcttttactaaatgcacccnctttctattnttntgtaattattttcccgtaacgttacgaaactttacgaatttcgtaacgatacttattttccttccgcaaggttacgaatacttacggattatgtatttactccttttttacctttcgaagaagtcacagaaacttacggatngcgcanaaacacctcttttcgacttccgccacattacggaatttcacggattgcacaagcctgcttccttttgatttctgagacgtctcggaacttcatttattgcatgtcatcaagtaataatccccggacgaaaatagggtatgacagttgcccctctttacttacctctcatcggagataagaggaaagcanagataggacactgattntgtccattctgcccttttcgcgatgacgactctcatctctacttcttctttttttcttctgcacaaaac

SEQ ID NO: 95162 - DNA, 473 bp, Glycine max
  unsure (1)..(473): unsure at all n locations
cttacagcacctgagctgcagctactggtaacatagggctagacttagaccctnttccacgctcatgatctgagtggtaccatccactacggtgtgaggcttggtagactcccaggagggaggctaaggttccattttcaagctttccgtgtagcattggtgtgtatgcttttgattatccttgacagttatgatctctactgtcaggtggggaacttcatcttcagatgcagtatggagacgaaggctctgagctcgttgagtgttttcctaccaatcaaagaaaagtaaaacgtatttgcattggtgattaaatacttgattgtaaagctcctcgagaactagccttgatcgaagggtggtattaggtcgacatatgctttggtgtctactctttctnctgcgaagccaaaagtggactatcatgaggctggatggtgtcaggtgaaactntaagtctctggaatgcttct

SEQ ID NO: 95163 - DNA, 522 bp, Glycine max
  unsure (1)..(522): unsure at all n locations
cctcacagtcacctgcggcatgcaatgcttcctcaaagctcatcactaanagaatgtgatattgaagagagataaataggaacaggggatacaagactgcctaaaggagtangacttcatggaggctttcatccaatggtcttnttgtaacagtagtccccaataagatgccacttcataggtcctttctcagcataatcactatcttcataagcctgagcaagtgcttcattagccctaagtaactcaacctctattaatctgacattgaggatgaaggatcatatacttcaataaccataacatcaagaattgtggcttcaacatcaaaatccacttcttcaatgataggttacacatggtgagtgaaatgaatctggagtaaagcaaatgcacaacaaaggagaatgtgcgataagacacaatagagaactcctttgtccatgggcagaccatgtggaaaggagtttcctgagtaatgcatgtatggntcaanggttgataacaacactctatcccatg

SEQ ID NO: 95164 - DNA, 222 bp, Glycine max
ttgcggaatgtgtagctctaacctattgcgttgacataaaactacgtaactcatacttttggttctagggcaaagtgtgctgcttgtggacttgtaactttatcccgtttattgagggagtaataaacttcttcattataaagacactattttactaacctataactttgctactagagaaaacaaacgaggaattccatatggaaggtatcttcacttact

SEQ ID NO: 95165 - DNA, 506 bp, Glycine max
  unsure (1)..(506): unsure at all n locations
gctgcannaattccttttggttgatgttntggttcttgctaaaggtggtgtttagcattggttgtgtggtaaacagactntgtggttgatttaaggatggcctttgtggataactgggtggtgggtaaggagaaggtttgtcattggctgagtaatgacattgttgggttggtgggaaacttgattgtataggatatggcagcacaacatgggtttctccctcattctcaccttcttcatttgcccagttttctcattcatcanagcaggatgattaaatttgcctcttttcagacccacttcgatcctttcgctggcaaagacctaatctgtaaaacttgaaggtgtgtaacccaccatttttcatagtagaacaccggtaacgtgtctactattattgngataatctctntctcttgtattgggggttctacttgagctgccagatcccttcacctcttngcatattccttngaggattcatgctctttttttgcacatgtact

SEQ ID NO: 95166 - DNA, 324 bp, Glycine max
tatctcttaagctggagatgcatatatgcatctgataaggtgaccctaccttacaaagtatagtcatgaaatgagtccgctgcaatgggaaaatatcagtacatactgttgttctgcaactattagatatgagcctgtcttcgtcactgcaaagctgcctggaattatgacccctttgtaaatctattctgctatcctctctcttatgtgctgtcaaaaataatactatctgttcaagaagcccttcagctacacttctactatatgggacaaagcaaaatagcctggctaaacatgccattggctaacctagccatggtcctt

SEQ ID NO: 95167 - DNA, 464 bp, Glycine max
  unsure (1)..(464): unsure at all n locations
tcttcagcactgatgctcgcagctcgcttggttagatatgatcgatagtatgattgngacttgtanggattgatttgngcaagattggatgaggggaagtgtggttttcgaaatctgcactttgtgcagatntttgctgtgaaattgtgcagcagaattttgcacaagtgcagaaaaatgcttgtgtgtgattggctgtggaaagagtagtgtagaatgagttctgtatgtttactagtagatcccaacggtcaaaatgtaggcttatctactagagacttccagtaaaattttcgagtcgatccaacggttaatgaaccggaacgaaggaattgttactggggtctntaagtgagaaaaagctgtgattggttggtggtttgggcagagttttctgcctttgcccttgtttgcttggctgtgatagcttgtgctggttgaatnttgtattactttgatgttgg

SEQ ID NO: 95168 - DNA, 173 bp, Glycine max
  unsure (1)..(173): unsure at all n locations
cacatatgatatgttctctagatgccccacaccaagataacaaccaatacaaatgtctcttctaggagtttgacatgtgtaagacaaaacattttcaagcttttccccaagcttcaagctttagtcttcatgttatttgtgttgcccnccttatctctaacattaattgtcta

SEQ ID NO: 95169 - DNA, 419 bp, Glycine max
  unsure (1)..(419): unsure at all n locations
tgggactggtatattgnggagttctctggtaatcgattaccagtctgtgtaattgattacacagaggaatgggtcactggtaatcgattaccaggtatgtgtaatcgattacacagtgcctttttcaggttctcaggtcttgaagctgtgtaattcgagtttagcctctggtaatcgattaccaaggctgtgtaatcgattaccagagataaaaagcctaaagataccccttttacttgcatgtagtggttatgagacgcattgtgttgcggcgtagttagattctcgtgaaagagtctacccgtttcttttctttcttgtagatcgtgatggcggcgcagctaatccatgatcgagtggagatggagtgcctagagggagctggggagaccctcgaaggcaacacgaggtgtcgattt

SEQ ID NO: 95170 - DNA, 512 bp, Glycine max
  unsure (1)..(512): unsure at all n locations
agcttcttatccaaggctcatctnggtggtgttactccttcttccatggcttattccctagtggatggcgcctcctctcccctcttctcctttgtcttccgctgcatctccatggtggaaaaccaccattaaaggacctcattgaagctcaaagatccagcctccatagaagcctcacaagcaagcttccatcattaggggtcccagactccttcctcaatagccaccaccaagtttcttaatttgttatagaaaatgcttagtgcccaccacacattangtacagctctaaggggatgtaaagagaanataaataaaaaattggcgtatccttcaactgtatngtcatgtgtcagttacactctatngttcgttntcttataaatgaaaggttagttggtaaatagctaagaaatctncttgtttatgtgattctttttatatgggctctncatatcgacattgatacgcacaattactaanactntaacntctaaagtataatatatata

SEQ ID NO: 95171 - DNA, 481 bp, Glycine max
  unsure (1)..(481): unsure at all n locations
agcttacaaccacttggcatatatggccatatataacaaacgcagtctgatagaaccataagccttgcagtgctatagcaatgccattgcataaatccactggaaagcttgttggcaaaagggcaccagcaattgaagataaaatgcagagtccaaccacgaagacaaggagggtgtggtaatagccctcaaagcccttgtgtgttgttgaatggaagtagaanagaaggtactctgcagtgaatgctgaggcagcaagcaaacaaagagcaccttctggcaagggaagaaatctgtgcaacaaatagtcacaaaggggaaatggttangaagatgtataataagatgcttgnagggtaatggagttgtttaattatgtttcatgcctataaactacgaatatgaaaaaaatatatatcaatacagaagcaaaatgaagaaaaattgtgtaaagatcagactagaagaatatatgattcga

SEQ ID NO: 95172 - DNA, 450 bp, Glycine max
  unsure (1)..(450): unsure at all n locations
nagcttgaaggtgcgcagcttaccatctntttatagtagagtaccgataatgtgtctaccatcacgattatcgtctccctttccattattgngggtaccacctgngccgccagatccctccaccttttgggcgtgttctttgaaagatccgtccccctttttgcacatgttctgtagttgcatcctattcagaaccatatcaaaattgtactgatactgcctaacacangcaaccattaggtccttccaagaatggactcgggaaggttccaagttagtgtaccaggtaacagctaccccagtaagactntcttggaaggaatgtatcagcaattcctcatcttttgcgtattcccccatcttctgacaatacatctttagatggtccttggagcgagtagtccccttgtacttgccaaagtccggcaccttgaacttgggaatgaccat

SEQ ID NO: 95173 - DNA, 352 bp, Glycine max
  unsure (1)..(352): unsure at all n locations
agcttgtctgatagaggccctggaacgacattgtgtnccatagaactatatccgctccggaggacgacagccaccgctgtaggagcgctgtacaccaacggcgctcctatccctcaatggatggactgttctccgggagcgacgcgtacacctcagggacgacgagtatactgcttatcctgatgattatcgtgcgccgcggagagcaccagtgcgtactcctatggccgactctgatacagaactagcgcgtgactcttatgccgatgctgaggcaacagatgagggcgagcgagacacgacatcctgtgttacgagtctgtggatgccgattgatgcctgcgctatcaga

SEQ ID NO: 95174 - DNA, 492 bp, Glycine max
  unsure (1)..(492): unsure at all n locations
agcttagattctaggagagcattcatccatattatcaaccttttttcattntattcccaaccctattacttgcccnncttttacactcagctnntcttttaatcaatagcagcacacacacactntntattntatacttatagngttttttttaatacatttgactgtgtggtgtgctctgctcttaccattccattcctttttacccagtagctccccccaaattgggacaaacttgctntgagatgtgactcccgcanattcggngcgaaatttgccttgaaccaagtcattctatgaatgatgctatcctacaacctaagacaaggtagtaggananaaactgtgcaggctcaatgttcaatcaatcaaacattcattcagctcanactgggtgcaagggatanatcattcatgcacatggtcagctntttggctaagtggctattacaataaacatgccttcatcatctcaaatcatgcatcattcat

SEQ ID NO: 95175 - DNA, 369 bp, Glycine max
  unsure (1)..(369): unsure at all n locations
cgaagaacgaacgatgaatattgaagaacggtcgagaatcttcgcgtaattactcacggaaacgttacggaagcgcctcgtcttggattntcttcacggaaataattttcctcagcaaattcgagagagagagaagtgcctaaggggctgaacccttttcttcttcacttcttccnctatntatagcaaaataggggagaagcttgccgcccagctcgcccaagcgagcaaggttgcttcctccagaagcaacagccttctggagggcccaagtgggcctggttgctatttacacccnccttttctattttttttgtaattctttttcccgaaccgtacgaaactntacgaatttcgtaacaatactta

SEQ ID NO: 95176 - DNA, 68 bp, Glycine max
  unsure (1)..(68): unsure at all n locations
gtctgacaagagtatgatgaactaanggatgtcaatatggccaccgatgaagccttggaatgagaaac

SEQ ID NO: 95177 - DNA, 447 bp, Glycine max
  unsure (1)..(447): unsure at all n locations
agctggttcttggagttttctaagttctntaataagcttagaacaatatacttgtccttcatttaattntctttgggctgggcgaccacaatcaacaaagtacntttggcacctactatatgttgacttgaccaacgctgttatcgatatgctgtgacaatccttcaacaccttattcacacattctgagaggttggttgtcatgtgaccatatcttcngccagatgtatcttaagtcatgctccatttttcctttgatatgcgatcaatccatgttgctatggctggactcaattgacaaactttttctaagttntgatcaaacacatgcttgcaaggagtgtacgctgcatcaaatnntgttaccatcaaaagtgtaggtagatatgaaacttanattaacttcatgtataaaataaaccttacccaatttcttgaacatctctt

SEQ ID NO: 95178 - DNA, 273 bp, Glycine max
caacttgtgtgaatggtcttccaatctccctgtggtcagactattttacttgggtgcttattccagaaaaactctgtggttggtccctgaaattaattcataacatgcaggcttttagtcttgaacttctcaattctatgtgcaagctcatagtaattcggaggtgcattcacctttgtgaatatttgagctattttgcgatagtatgtttcatagcatacattgatttgctatcttaaataacaacacactttgagtgtttttacataaaag

SEQ ID NO: 95179 - DNA, 502 bp, Glycine max
  unsure (1)..(502): unsure at all n locations
atcctctcagtcacctgaggcatgcaagcttgagactgacaatggaccattactntatgtgggaccaagctatgcagcagttntagcccatgcaaatcgctctagagacttgttaggctcaaatatgttggctagctgctgctataaagtaagaaaataggagagtttcgttgctcaacccaaaccctctagtcttgcttccgtgtaccacctaatatacacatgctgttgcaaatattggatgtttatttggttgttgctttcatcaaagtagcatataaagtagcatataagttagtacgaaaatgaaggggttccatactaatcattcattcaaaacaaaatgcatgtgattattttagaacagggacatgaattaatagttatgttttccaaaagcatcacttgcaatcctcacttaagttattacttactttctatatattccaaacanaatgcatgtgattattattttattgaaagctaattatgttatagtctt

SEQ ID NO: 95180 - DNA, 171 bp, Glycine max
  unsure (1)..(171): unsure at all n locations
ataactaataaaactgtctaaaacaagaggtaaatggaatctgtcatcatcatctgtgtggtggaccatgatccaggtccttgnctgaatgacgctgtactaatagtgtcacatcgctctgtgacttgatcttctagctctgagcttaggtatctacagctctcatctcta

SEQ ID NO: 95181 - DNA, 523 bp, Glycine max
  unsure (1)..(523): unsure at all n locations
tcttcagtcacctgatgctgcagcttccctcttgaacaaatacccctcagtcaaatagtatccatcttgngcctttntcccacaactcttgtaaatgggagagaaatgttcatctaaagcatacaagtccctaatgttatcaaatcctaaaatttgagctcctagggagcaaaacaatgtgtgtctcctagagagggcatcagctaccacantttgttttccctttttgtatttgataacatatggaaatngctctatgtactctacccattntgcatgccttttgtttaacttgctntgccctctaatgaacttaagtgattgatgatcactatgaatgacaaattccttggaaacaaggtaatgttcccaagttcggagtgctcttattaaggcataaagctctntatcatangtggngtagttaagggtggcaccatgaagtttttcactaaaataagcaatanggtgcccaccttgcaacaaaacagcttcaacnntccactcagaagcatcacattct

SEQ ID NO: 95182 - DNA, 179 bp, Glycine max
cttgctgggtctatgcctttttaataagaagattcgattctctgacatttattgactcctagatttacatccatggtcttgattataggaccttactatcaacatggcacaataccgtcgaccttgcgccatatgagccttcacactctctatttgtgcgcaaacagctaaggtttttt

SEQ ID NO: 95183 - DNA, 473 bp, Glycine max
  unsure (1)..(473): unsure at all n locations
gcttaacctattctgcattataatgataccttntttgtaggccttggacacacttggcaacaccttatggcgagtaaatagaagattacttaatgttgtggagtccctttgggctggaggaagaacattgctggtctgattgatcgtaaagatgtaagcataaacagtaacaacttttgaagttatctttatataagntctnttggctattttttttctggtcatctattggctttgaaaattagatggcaaagctaaataaataaataaaagaaagttaagcataaactaattaaatntattcacctgtatatttccacctttttttcataaaatgcttgaagtgtgatgagttctcagcattacctatcgtatgcaattcatcttacctacatatattcttaattngacttgaggttcctataccagagaggcacctttagggattaaaacaaatcaggatggagtggagt

SEQ ID NO: 95184 - DNA, 207 bp, Glycine max
aatagctagcgaagaaataatacactataaatttactgaaaaattaactttgaagtaaagtagacatacaacctgatccaagaacattaatcttagacaacatgttagttaattctatgctgtataccatagtgaattaatgaacaaaccaaggttttaataagttcttttgaaactcagaaaatagtgtaaagtacattatttttc

SEQ ID NO: 95185 - DNA, 453 bp, Glycine max
  unsure (1)..(453): unsure at all n locations
agcttcctcaaccacctcattaataatcaaagtgccatgaagaatatgtctgtctttaatgaaagctgnttgtctttcatcaattaaggcaggtataacctgtctcaacctgcttgctagaagcttagctatcactntgtacatgcagcctatcaaggatatngnnctataatcatttatggactgaggatggttaactntgtggataaaagccaagatagaggcattgctgcctctagggaaacaaccgttgacatggaactcatccacaaatcttctgaactctggttntagcacactccagaattccttaataaaattgaaattaaaaccgtccggcccagggcacttatcntccaccacaactccacactgcttcttaagctcctggtctgagaaagggtaaaataaaccctccctctgcctttatcaanaaanggaattgaactcatc

SEQ ID NO: 95186 - DNA, 399 bp, Glycine max
  unsure (1)..(399): unsure at all n locations
agcctttgaatactaaaaatccatgatntgtttgcagcctaatcccattacaagcctagaaagttcttcggattcaatnttgtgtgttcattgttgtatgatatgagatgaaatgcaaaggttggaacttgtgttggttttttatgatggaataagcctaaacacttgagcttgagtgaaacaatgattgtgaggttttggttgaggatccccccctgannnnnngccttcttactagcttatttcagttgtcaccctattgcgtatgctcttatctttgaaaagatgcatgcttgtgagaagtgattaatttaagcattccatgatattcagttcatatggttgaattcctttatgaatcagaacaccatttcttttgattgaccactgtctttgtca

SEQ ID NO: 95187 - DNA, 286 bp, Glycine max
ccctctttgaacatgcaccagcgttagtggtgctatgatgctattatgatagcaatcgtaagtcataaataatctttagtttaactatcgactaccctacatatcattactacttatcataatttttatatcactttacattcatagatcaacgccacttcttactagatgtacttgcttgtttttatactaagatttcaatcattttactaatcaatcaatagattctattttctttccgcttttactatatttgtcaccatatttaaattgcttttcctttttt

SEQ ID NO: 95188 - DNA, 444 bp, Glycine max
  unsure (1)..(444): unsure at all n locations
agcttggtggctcattgctgtttatgtgatgttatcttgnagagggttcgatggaacctgtatttatagtagttgagtgtgactgttggtccttgtttgtaggggctgntatagcctntgcaaataattctcggcttgtagataatagccagggagctttaagataatgttagagataaacatttggttatagatcaaaggtagaagataatcgnatcttgtagataatgtgtggctctatagataattaattacctgccaacagataaagttattcaaatacatttgaatattaataggttaaggataacctatttgtagggagcccgactgctaagggtcgagcattcgcgctcctataacangattgcttggaggattgacacgtgccatatagtgccattgtggatgccacgtgtgttttgtgggtcctggacagtacat

SEQ ID NO: 95189 - DNA, 512 bp, Glycine max
  unsure (1)..(512): unsure at all n locations
agctntntggagtaganacatgggaccaactcattntatttcataaagaaagtcgtatctagtcaaggtctgagagaccatacaagtttcctaatgatttctaattatgtgggccattaagtctatcatatgctgacaatagacgataagcccatgaatctcttcgggggcggagtaggtgtctgccatcgccttggccttggctaacaagcggngaagttcttgactcccattcaaggtaagagcaaaccgatccatccacatggttgcctcttggtgtaaagagtcgatcacccttcctctagcctctntttccgcgtatacttgagcatactcgtccgcgattctatgctcgtgggccgtggctagacctaactcttcttggtacttggcgattatagctagcatgtnggtctccgtctcgcataaacgctgagaacagcttcttttggaccttgaacaagtaactaaactctctttcagaaccatgctatgtgctcgcgactggtccc

SEQ ID NO: 95190 - DNA, 204 bp, Glycine max
aggcttatctactgtggactttggcgtctactatggctatgggttccctgacacgaaaagaaggaaggccccagatactgaagactacacaatactgtaactgagtctatggaaaaagaaaaaaagggccaatagaaagggaatgattaagttcaatttctcatcaaggccatgtattactgctctgagcttaatctgacttta

SEQ ID NO: 95191 - DNA, 455 bp, Glycine max
gctaggagttgagaacttattaaattataaattaaccgattgaaggttaattgaactattttgtaaactggtcaaaataatttatataagctacgtactagagtgacttatcagccacatttttgtatcatattgatgtcttttattaattaaaatccatatgattctcaataattaaaatgggaattagacctatcaaataagatattgaaaccacatgtttaattaaattcacgtaataagagagaatatattgaaaagagagagcaagagagtattttgatataccatcatttctcatgcaggaacaaaattttaaaggtgcaggaagttttactcccgtgcatgacactcttctcctccagagtcaagactaataacaatcttggattcagattacttaaaaaatatttattataataatatttcttaatttttctttaaaacaagtgaac

SEQ ID NO: 95192 - DNA, 501 bp, Glycine max
  unsure (1)..(501): unsure at all n locations
agcttctatatgcgtangaatcaattatggtgatgcangaagcaattgtctctaaataagggtgaaatccanatacaccttcaaaattcaaggtggattgacatgcctcttttttgccccagttgcacgtcaaaaacaaaaggcaagttcaatgagggtgttactaggtgcacccaacaccattgcttgtacatccaacaattcaagtgaagnggaaaaatatccttcacttaaanttaaaacccctccctcctaccttgcatttgtatgccgcaccagctccgttcttgcccttcttcctttcgttatgcgtttgagccatgctgccacagttaaggccagctccaccactgttatgtcatttttgtcgtcgaggtaagttnttntatttttatgaatttaatggctattgctttggcgtttaatccgataacaacacggatttgtaatccgatgtttattnttattataataaataattttttaaagtaatgttttatt

SEQ ID NO: 95193 - DNA, 477 bp, Glycine max
  unsure (1)..(477): unsure at all n locations
agcttattagactnttctttntatagaagatgatttangtcattgaacaaaagatttatggcgccagatgcacaaataccatatttctatactctaaatctctaattcaagttacgagtgtttgacaaaagagtttttgaaataattttaaaactaatgatataaaaaaattaatatttcttgtggaactataattgctagaaaattcacatgaaactntatcctaattctcctaccacattattantaatattaataaatttacctacaaatacatgtccacaagaaaatcgtaggtatttcctggaaattatatatccaataaaatccgcaagtatttcctatggattntcttcaataaaaatttgcaggaatttcttgtggattanttttcacaaataaattcgcaagaaatatcactnttctagtagtgtaacttgatttccctcttcatttctatatatatcattacaatgc

SEQ ID NO: 95194 - DNA, 391 bp, Glycine max
  unsure (1)..(391): unsure at all n locations
gcaagctntagatacanatacaacgtgtatttttatccagccactggagacaaaaaatgatagttttttttatcattgagaataaaagggactacaacctaaggaaaaagacttgtgcaaatatgacagggattggtttaatgcaagtgcaatcattcacatctcatcattcaatgaaccaagaattgaaatcaccaaaatctaataaaactacaataatgccatcagtgtgaatctacaagtttacacttctattattaatttcttatcttataacaaaatgtttaggttggcattttactataacaatgcacaattntggtaccctaatcatgtcttatggcaatcaattccagtgtttaagggttttgacttttatgcctcatgtaac

SEQ ID NO: 95195 - DNA, 391 bp, Glycine max
  unsure (1)..(391): unsure at all n locations
gaactgatgagagatcaagattcttcttgtactcacatcgnncgcgtgtatgatatccactccacaaggtttgaagtagatgagagcttcaaccctataacgcaacgtggcggacaaaagtgggcagttaacttgaatggtcgtcattgtcaatgcggaaggtattctgcgcttcactatccatgttcacacaataattgcagcttgtggntacgtgagcatgaactactaccaatatatagaatgtgtttatacaaacgagcacatcttanaagcttactccgcacaatggtggcctcttgagaatgaagcggctattccttcttctgatgacgcatggacacttatccctgacccaactacaattcgtgcanagggcgggcaaatcaac

SEQ ID NO: 95196 - DNA, 530 bp, Glycine max
  unsure (1)..(530): unsure at all n locations
atcctcacagtcacctgaggcatgcaagctntacagcagatgttagtgatgacccactatcctagaattatnataacttaatgccattaacctagggaattaaaaaaacttaatggctgagtgtaactgaaattgtggcaaccaaaagtcacccccaacagccaacaagtcagccaccatttggtctcccaaaaggctgatgcctatgttgccaattgggcccttattacaacttgaactaaacctaactaaagcccttgtagttgattaacccagaacatatttttggtcagccaactntacaaggattgggccattatttagacaaactaaacactctaaaattgaaacaaagtggtgtcatttagtcctcctccattngggccatgatacaactcacaaccttggactnttctccttgaaacttgngcttgtattcaaacagtatggacagcacttgttgaagagcttccttggatttccttgctctagcccttgtcatatgtcctccaagtccttcaagtggatcc

SEQ ID NO: 95197 - DNA, 254 bp, Glycine max
tattgttggaaactatgtttatctaagctcaaaatatgtggttgacaaattaaaacgtggtttcactgtttcaaaatttatagcaaatatactacatcaagattaagccgaaaacatctggataaagataggcattatcacgttataacatcatttaaatgtggctcaccctcatatatacaattgctgttattctagttctcttctggagtctacatgcgctgctcttgaatagtgtcagctcaatgttactc

SEQ ID NO: 95198 - DNA, 533 bp, Glycine max
  unsure (1)..(533): unsure at all n locations
atcctctcagtcacctgcggcatgcaagcttgggggaagccattgaacctccttgatgatagaagctatcggagggtgaaactccagagagttgatctcataatgtagagttctaagcaaagctagatttgttttagactatttaattattcaattatgcttaattatatcgtatagggtccttcaaaaaaaaaaaattatatcgtatatggtaacatacatagttttctgtatgatgggacatgctctcgctagctcctacgatagcaaattttnttttcttttgctgaatattaagatagcaaattattacagattagatctgtttactctgggtaaatgtttaaataaggttataagttaatttcaagtgcttttcataattattagcttttgaaactaaatcccattattagaaactgccctgatttatngtgatatgggaataagntcacggaactcattgattatatacatgtgcgtgcgtgtacattntgatatagataagtggataatacatgtcccanacatac

SEQ ID NO: 95199 - DNA, 297 bp, Glycine max
acccaaacactgctgagtaacatatcatgatgattgacctttcttatcatatctgtctcagcaggctaagactaagatcacatcactgctcaacatggtcattgatcctgtgagaatgttcatggatacatgtatactttgcgtgagtaaacacgctacattgtgagatgtgtgcgtggtgtgtatctttgaaaaacactatgttggtactgttatgatgaactgccgaatattggaaaattttttctgtcatcagacagtattctctacatttattatgctagattgataatggaa

SEQ ID NO: 95200 - DNA, 466 bp, Glycine max
  unsure (1)..(466): unsure at all n locations
gctaagcctgaacgttatgcgacatcttattcgtggctaagcgggatctattgtcgccaagcgcaattccttacggccttaattgatgtccatgacgctaagcgccagtcatggcagctaagcgagattctttgcagcaatatgagcgctaagcgagtacctctcagctaagcgcgtgctcctctgtacttaagatgcatcattttagctacattggctanggccaggcttagcgagagttgcagctnttctaatctgcaggtctcgctaagcggacgtactcttgtgctatgccgagtttctgttcaaaaaaaaaattcaaatttgaaacgtcggctaagcgcacgtgttcgctaagtgagcctggttgagaaaccaaatgtctctcttgctcgcttagcgcaacggtccgctaagcgaaggtatcgaanaactacttaagtgagtgtaacagcagttacactca

SEQ ID NO: 95201 - DNA, 432 bp, Glycine max
  unsure (1)..(432): unsure at all n locations
ctgcagctttaaggagcttatttttcttccgtcttaactgacttctctccagtcttgaggcaacaaaatctctattatgcagatgatctcaattctaaaggtgaactcttaggataactaacagttcatcccatgagaaagttntcaaatntctagcttcttggatggttgttgttnttggttcccataccttgngaaagctgcctagaatggttcaatntatttaagctttggtgaaggtgtgcccaagagcttcaagaccatttagaagcacttgaagtctaccaaacatgtatccacaaattctccttctttcatggagaagcttttataatgtcacgtcaaaatggcagcctttcttagttgaacatctctntagttgtcttaagtctgaatattttgttcactcattcctcgcaatgagtatatctc

SEQ ID NO: 95202 - DNA, 290 bp, Glycine max
  unsure (1)..(290): unsure at all n locations
tccatgtttactaaataacatctgcaagcccagtggcctggttctatttcacaccatttttactaatacatcccttgcctttnttgctattcttttctgaacgtacgaactacaattgaacatctatntcttctatataccacctatgatacgtatcatctttttgcttcgaattacgacttacaatgtcattcactctttactcgcttacgaatacgtttcacatctttttacttccctacaactacatactacatgtcaacctgatgcacagtcatcaacgtgtccac

SEQ ID NO: 95203 - DNA, 505 bp, Glycine max
  unsure (1)..(505): unsure at all n locations
agctntatgtngaagaatacttatatataaatttttgttgaacattngcttcttttatgtgagaatgataaattacatgatccgttctttgctcaaattcttatgcaaataattntataaacctgtctaagagaagacaagtatcaattgttaatgtatttttgcatattttttttacatangaaatttgggattggcatatgtcgattaatctggtgtttcttcctcataaaaggggcgatttgttttctaaacattacaattgataaacatgaatcttattttaaaacatanaatttaaaatgactaaatgttatttaaatcaagatttgtcatatagtaacaaaagatattttctgttaaatataagtttacgtctaacgcgatttttataagcatttgtcgaaacttgaaaattcataatatatttataaaatnaaattcattatttaactagannattnattatcactactactatctntaccaaaaaaataatactact

SEQ ID NO: 95204 - DNA, 265 bp, Glycine max
  unsure (1)..(265): unsure at all n locations
ctcatcattcaattactctattttaataaaaatcccacattcaagcatgtcatactatactctatctgatctcttcctattttacctctaaattaatactaatccanatattatccatctctttaacactcttattctctctacaatcttttattcttgaacaactctcaatatactttatcccttatcaaactacttttacagtntttccctgcangcatgcacctatacttatgtccctttactcctactccactattttctc

SEQ ID NO: 95205 - DNA, 488 bp, Glycine max
  unsure (1)..(488): unsure at all n locations
agcttcaggctgctcaattgttccaggttgctgcatggaagggcaaaggtctgtatggtggtcagcagatgagcacaaaccacaaacccttgcgacaggtacagatttctgattcaaggccagctgggttaccaagttgaccaacgcatccagtttgccttcaagcttcttagtttcagatgatgcagatgggtttgtagctacctcatgcactcctctaatgactatggcatcatttctggcgctaaactgctgggagttggaggccatcttctcaattaaatttctggcttcagcaggagtcatgtctccaagggctccaccactggcagcatctatcatacttctctccatattactgagtccttcataaaaatattggagaagaagctgntctgaaatctgatggtgggggcaactggcacatagtttcttaaatctctcccagtactcatacaggctctctccactgagttntctaatacctg

SEQ ID NO: 95206 - DNA, 477 bp, Glycine max
  unsure (1)..(477): unsure at all n locations
agcttgtagcanattcaaactacaataactttttactcgggtggtccgatgagttcagtaatatatcgagacacttgaaatagaanacgaanacttgtagcaagtgcataccacaatcaattntaactcgtcgcgaaatatgttgagatgctcgaaattgaaaaagaaatttcatagcaaattcaaacgacaataactntntacacggatgttcgattgagtcccgtaatatatcgagatgctccaaattgaaaacggatgctcaaatcatattcaaacgacaataactntctacacggatgtctgattgagtcccgtaatatatcgagacgctccaaattgaaaacgaaagcccctaacaaattcaaacgacaataactttttactcggatgtccgacagatgttcgtaatatatcgagacgctccatattgtaacagaagctcgaatcatattcaaacgacaatatctttttact

SEQ ID NO: 95207 - DNA, 263 bp, Glycine max
  unsure (1)..(263): unsure at all n locations
gctcataataccgactatccgacatcgtgttaagtantgcattcatnnttagagctttagctaattggacgttgattataccgatcatcgactcagaaagtatgcgtgattcagactcgttcattgacgctgaatatcagaccaccgactcggataaagtttgcactaatttctagagctcgttaatttgacgctgattatacgggctcatccacatccagtaaaagtatgtcgtcgaattatacgacttcatttcaattgag

SEQ ID NO: 95208 - DNA, 403 bp, Glycine max
  unsure (1)..(403): unsure at all n locations
acctgcacgcactgcagcttcataatgtgaaagtctaagataatntttcttgacaatcacttgcgtgtaagaaatttggtaacctgcttgacatttttttggggttctttgtccaactcgacctcataggatctagtcgtggctgttgataagattaattcaagcctaagcaagaagaccaatggatgcagctacttccaccaagatgaaattccttcatttgaattaggtagttcttatcctttntcttattcgaatccattgcaaaatagtaatttttcccataacaagatcactccaccaaagccaatattattntataacatttcataagaacacctaatatttttttaccagaccaacaatgcttcatgtatcaccaaatacttattgatgctgtctc

SEQ ID NO: 95209 - DNA, 442 bp, Glycine max
  unsure (1)..(442): unsure at all n locations
atttgtntaattaattaatttcttcctaactcgattcaatgaccacacccacgttgcctactngatgttntacggtcattntttattntctaaacatatgctgtctgcataatatnttgaaaggcaaaagggaaaacctttgcatanggtgtgggtggataaaaagtttggatattacacattcaannttttatttataccataagagaacacaaaacaaagctaattaanatgatacattcataaaaaaattacactttttcatttctacgtacaatatttcatttcttcgcatcccgaagaatctganagtagaatctgatgcaagcatgacaaccggaacaccganacttataattacanatgtagacaactcaatgggataattcctttcatggctacttcataaatagttaacagttctatggcaagtcaattttta

SEQ ID NO: 95210 - DNA, 509 bp, Glycine max
  unsure (1)..(509): unsure at all n locations
agcttcttcgaatggcatggttatntccagttttcctgaaatatctaanaatctcgccaaataacgatctttntccttcttggaaggtaccatangatatggtacttccacagctttttcacttgtactcttctttgcattcttattatttttttcttctttttcattnntttcattttctatatctttntgnttttcttgggccttcaattctttattcttgaaccattattgttcctctttttcttgattactttcacctctcaacttatttttcttgccatcagtacctttcttgtcagcaattttcttcttatgcacaacattatcctcatcctcagcctccataaaccttntactccttgngattatgttctgtatntgccacanaactgttggatgacttgtcaactatctgcttggccaattgtcccacctggacctcaaggttcttcaatgctgactcagtgcttatatgatttgacattngtacctacatanactgagtc

SEQ ID NO: 95211 - DNA, 370 bp, Glycine max
  unsure (1)..(370): unsure at all n locations
accggatccttaagcacctgcagctgcaagcttgtatgaggaagtgtagaaggatgattcttcctgcttttattcgttgaccacagagtggtacctggagatatgtcgcgggggtcaagagaccttgtggacgtcaggtggtgtgctattgcccataaccaagcttgaccaatcccgacccaacccgggcatagtcagtcagtgagaacctatgatgtacctaagcaggcgagctcctggcagtcaacagataaaagaaacaaaaccacatagcaaggaggcttgtgtggtggctggccagctgtgaactntgattgatatgtgagatatgacctctggtaatcaattaccaagggtgggtaatcgatta

SEQ ID NO: 95212 - DNA, 447 bp, Glycine max
  unsure (1)..(447): unsure at all n locations
tagattaacaatnatatgaaaccaataagatcttgaaatatatgattctcacaaataatagataaatagtgcatctctntgtccatagtatgacttgtctccgatgcactntaattcctaggaagatgagagaaccaagattttgctntcatgattattctttctgtctctcccacgttgtgataggtagggattagagagaacatttttttgtcaagaagaggaccttatttcacgttagtgtgtattagtcccttttataaccactactcacatcaagtagcagttatctttagaaacttgtcctattcaaccaaatacaatntagtccttaattattatnntatttattattagtccctacataagtcacatgtctctcacataagacattaattntaacattctctcacttgacttatgtgacattactaaacattatggact

SEQ ID NO: 95213 - DNA, 130 bp, Glycine max
ttttgaaaataatataagactatttcgaagaatttactaagaaaatattcggatgagatgtggattcggagacttttcagatgtcatataacaatttttaatctgttacaccatatatatttatttattt

SEQ ID NO: 95214 - DNA, 496 bp, Glycine max
  unsure (1)..(496): unsure at all n locations
ttacagtcacctgcagcatgcaagctcatgctaactatgatggaaaacttattactgttgttcaagacatacaagtgagcttgtaacanatcttctacacttggagtgatcacctgcagtcctcttgaacccttaccacccactctgtcatcatgccgacactcatgaagcccaacagctntagccttctctaagtattctgaacaaaattcaatggcttcttctgcaatgtacctctcaacaatagatgcttccggacgatatagattctttgtataccctcttaagatcttcatttatcgctcaaccgggtacatccaccgtagataaacaggaccacagcatttgatttctctgaccagatgcacaatcaagtgaatcatgatgtcaaagaaagcaggggaaaatacatctccaactggcacagtataattgcgggctcattttccaactcatcanacattactggatcaatcactntgctacatatagcatg

SEQ ID NO: 95215 - DNA, 445 bp, Glycine max
  unsure (1)..(445): unsure at all n locations
actcacagtcacctgatgcatgcaagcttaccttgaatgatgagacgccatttaatattgtgcaatatcatttcataccacgagagggtagaaaaaaacaagagtaagaatctgttccaagaaaaaactactaaactaaaattccaaattgctaagaatgtaaaggaatagacattggaggaagatgcagccataacttcaatttcgcgttgattgttcacataataagtcacccncggcaacctgtttgctacaatgaagatagtgtaactatggtaataatattctaaaacattntaaacaaaataacagaattttgtcaacatacctttacagacaagatgtcggcaacagattacacaatcttctgcttgttaactctcacgttgagggcactcattatctntgagaggtgactngctcggactgttacaagaatcctcat

SEQ ID NO: 95216 - DNA, 377 bp, Glycine max
  unsure (1)..(377): unsure at all n locations
aacgacccaatgttttcatggcgggcataatgtaattctttagctctaaccctacaactgggcctaggctatagagnttttctccctgttaaagcgttatgtttttgctatcgagatatataatataagatctttccttcatctgttcttgcaccttcacccattctcattcatccgcatgtntatttctggtgcgattaaatggtatagatccgacgatgagtcctgcgaaggtactaataccgagggccctgactgtgattntgaacgagtagcaaaccaagttgatgatgaagaagatgaagatgcggtggttctcccggagctagaaaggatggtcacttatgaagaccgagaaatgaagtcacaccaagaag

SEQ ID NO: 95217 - DNA, 498 bp, Glycine max
  unsure (1)..(498): unsure at all n locations
agcttcttgttgactcgtgttttgatattcatgtaataaactatnttngggtatatctatttaaaaccctaaactagacaataacatcttgcaccgatatcaagcacgtcgttgatntgtgttctgcaactttcttcagctccaagaacactgcatgccaatgggggagttggtgttggtttgatcccttcatcttgnttggtctatgtngctggtttggtctatgttcttttaaatacgactgcgcatgcatctattatttttcaattaattgagtntacttttactaatccttgaccaataattaataaataaaagttaattcttttaatagctaggcacgtatcatgtaaaagttnttatgttatcaatccaacaaaagttaactttaatataatctttaatatagtaattataaaagttaataaacttattaattatagaagtttatgaattacacaactatactattanataatataatttatcattcattat

SEQ ID NO: 95218 - DNA, 194 bp, Glycine max
ctaatatattgattagcaccaagcactatttaggaaaatacttatataattactactctatttagcaagagactcatttctataaaacattaatagccttctgatacattccatcatactgcaatgtatctgtcttacacatatgaataaaatcagttcacatgaacctttatggttagcccttatatattact

SEQ ID NO: 95219 - DNA, 475 bp, Glycine max
  unsure (1)..(475): unsure at all n locations
agcttcatacagatataattcacaacaatacgtcatcgacatccagaaacaaacctttggcagtgccaacattcgcagacagagcaacacatcctcccttcccgtcggatcactaccttggctatcctctccttcccatcatcagaatccgatgagtaagccgtgtcaataggaacaatacgcaactccttcctcggtgtggccaaactcgacacaacctcactaacaactccaaccgcttcctccatttcattagaaggaatcggcagcacggtactctcattaataaacacaactccaacaccaaaaaccggcaacgaccgatccctactcgcatcaaagttcctctgagccctctcttgcatgtcatgcacaaattgcaaagctaccctaaacaaaataaagcacactntntcaccctctatataaatggaataaccaaaattggaataacccaacatttcanatcacgaat

SEQ ID NO: 95220 - DNA, 336 bp, Glycine max
cttaataatttcacgaaattttagtagtttatagcatacaaaaatatttatataaaaatatataagaaatttcactattttaatatttattaactaacaaatatcttcttaaaaatactttttaagaaacctatataccactccatgattacaccacatccttaccaatgattctacaattctaatataatctgaagggatcagacttttctacaccaccatatactatattgctatgaagaatagttcatctactatataacaatggtaatattgagctagtatatattaaagtcatttactattgcctgacaatcacatcatatgacagctgac

SEQ ID NO: 95221 - DNA, 475 bp, Glycine max
  unsure (1)..(475): unsure at all n locations
cctcttagtcacctgcngcatgcaagcttgatgccaaatcctgtctcaccatattccttgacccagggtgagaatgccaatccttaccctcggaagcaaaaaaagaatagaggggaaatttccgatcaaagaataagagaaggataatttccaatgaaagcaaaaaagaaatgaaggaaaattccccaatcaaagagtgggagaaagcaaaaaaaggaaaagaaggaaaattccncaatcaaagagtgggagaaagcaaaaagaatagataggaaaattcccaatcaaagaatgggagaaagtaaaaaaggaagaagaagaaggaaagaaagctcctgatcaaggatcgaaagaaaccagaagatatgtgcagagaggtctttggaccagacaatatctgaacagtacagaattgtcaccaaatgaacgataaaagaatgaaagggaaccacgacctataatagtcttcttcctt

SEQ ID NO: 95222 - DNA, 253 bp, Glycine max
catctgctatatgtcgattcatctcaataagattgcagactatcgtgctcctcttgagcccttccgattgtacttttccacactgtggcacctcatatatcccttgtttcttgtccgcctgctcattaagacccttatctactctcttaacagtcactttcaaaatacattctctcatcagagtacgacagtagaacattctttccaatcaagcttgctctacttcttatcaaccaaaatccgataaacggtg

SEQ ID NO: 95223 - DNA, 477 bp, Glycine max
  unsure (1)..(477): unsure at all n locations
agcttaagttaaattagtctaaactttcatattctatntaagatgagtctagtcctacaagaaggatctgaggaagaagcttagtttaagttagtctaaaccaaggtgagctgtctatattgagcctagtccaaaaagagggatctgaggatgaagcttggattgattcancctaactagggatcgaggtatagtagtttatgctacatcagagaacacaaacttatgattgattagagaaacatctttatatacatcagcttatttgttacaaagacccaacacttttacctactgctgtcaatcttatntacttgcatttttattgtgtntagcctagacttagtttaattctgttctaaaccatcaattatcaatgtttctttcaacaatgccttatttctgaacttaactctgtctaatactagttccttgagttcgatactcagaattcatccgtntaaatttaatacttga

SEQ ID NO: 95224 - DNA, 509 bp, Glycine max
  unsure (1)..(509): unsure at all n locations
agctngcttgctataccttcgaccgaacactgtcgtgtttctgtctaggcccggattcaaagcgggctgcagcaccggctccgcttccctaactgtactggatgcggttgtcgtggctntatcctctatggttttctggagttttaacatgacctccgagatggaagccatttgatcttttaaggccgatagatcggccttcatctgttcctgcacacccgcttcattatccatttttctggatcgagtgttataggggtgccttggtgttttcttagttatgatgaaattcctaaagaaataaacaacggtgagtatgccaccaaaacatgagtatgcaaatggatgatcggagcacttggatccaccccaatgttttagataacgtaatgagtccagaacttctcantttataaaaagaacaaagctttcacctatccaagattatacanaanggtgtacaagagaacctaacgattcctaattatatgggccatcaaatctatcat

SEQ ID NO: 95225 - DNA, 311 bp, Glycine max
  unsure (1)..(311): unsure at all n locations
tcggccagactgtaattgcatccacatcggctagcatngtctgcaacttcgctcagcaaccattgattgcgatcatatcaccaccacgacccgtgattaacaactcatcatgagtgtcacacaggcgcttctatccatcttccatacaccactcgcagatcaacataaacatgaaagaactaggctctgtgatgaatacacacacgcgagctgtttcaacgcgttttcagctcccctgatgcatattcacacctttaagtatgcccgaaccactatcggncgcaaagggtgggatgaatttctcaaatccc

SEQ ID NO: 95226 - DNA, 158 bp, Glycine max
  unsure (1)..(158): unsure at all n locations
agcttggatttctatnntattggtaaggaatattttatagttgatttaattaggtgatgttntagaagacaaaaaaatcttntttattattatgtaacaaccaaagactctgtgctggaaaattgtgtttatggatgatatattgacttatgcttact

SEQ ID NO: 95227 - DNA, 448 bp, Glycine max
  unsure (1)..(448): unsure at all n locations
tgcagctagctccaaagtaatacnactagtctgtattaatctatanattcatttagaaagtgaaatggaatatattattntttgactaacccattatagcccangacttggattgaatcctctgcatgtctaatgaaatgcanggcacaagnctttgaattttagcctaaattaaatatggattgtttaaacccatncgatcatgatctaaatggctaagattcanaagttcataaaaaacttatatatttgtgttcttttttctctcactccatatcctcttatcacaactntatgtcaagagtgtgacatctttctaatgaacttgntaaanaaattgtaagattgataacaaatttaacttttataactagaaatagaacgagaaactaatntaatgttaattttggtaaatntaaaaactntaaacaataaactacaccgaaca

SEQ ID NO: 95228 - DNA, 503 bp, Glycine max
  unsure (1)..(503): unsure at all n locations
tccttgagtcacctgcggcatcaagcttacacaacatcactcacttttcactctctttgngaaagtaaggtacgaatagtgttgcagacttgcagcgtgctcctgtgcgtggaagaggtggcggcgcttccccgatgtgtagcatcgccggggtcgcagcctcgcatgtgtgcagagcagcaacgcgctatgggtttcagaaattccacggcttcagtgtagcggcgcanaaatccggtccagatcccgtgccgctccgncgtgatagcggtcatgccaaccgcgacgttgaaccgcgccgctacgtccatgcctgtcgcggatgggggccgcgccgctttgctctgccgcgatagcggccgcgacgcccacgattganaacatagaactcaaattattctattttgctgatattcatagaataaactaatcatgatactgacattgaagaagaacaagtaaaactatgtaatanattgagagaaatgaatataaataatttc

SEQ ID NO: 95229 - DNA, 355 bp, Glycine max
  unsure (1)..(355): unsure at all n locations
tatcacatattccatataaagccacatatactgagggctcatcagaagaattgacgtgaagcatttccaaatgccaaccaagtgaanactaaanatgtccattgaaagaattgatgtgcaacatcanaatggaagatngaagtcattatgtagtctaactcttggaccaaaactcctatggaaaaaattgcatcagtgtcactacttctcgtggatggtcatgcttccttcaacacgacccgtgctgacttagcttggcttgtgtagctcttatggaanaatcaacaataacgtcactgcttctcaagaaatggcatgcaaacttagcatgacccttgttgacttcacccctgtg

SEQ ID NO: 95230 - DNA, 473 bp, Glycine max
  unsure (1)..(473): unsure at all n locations
tcttcagtcacctgcggcatgcaagctntcttgagaaaacttctntgagaagcttctttgaganatcttncttgagaagctagagcttagctacacacacccctctaataactaagctcacctccttgagaagcttccttgagaagatttctaaagaagttagagcttagctacacataccccctataatagctaagctcacccccatgccaaagtacatgaaaatataaaaaaaaatctctattacaaagactactcanaatgccctgaaatacaaggctaaaatcctatactactagaatggccaaaatacaaggcccaaaagaaggaaaagccaattctaacatttacaaagaagagtgaatccaaccttgacccatgggctcaaaaatctaccctaaggttcatgagaaccctatggccttctttggtagctctagtccaatcctcttggagtcttctatccaataccc

SEQ ID NO: 95231 - DNA, 509 bp, Glycine max
  unsure (1)..(509): unsure at all n locations
cacctgangcatgcaagcttcaacaacaactaaggttgaaacacgtttcattcacacatactatcgttcaataggctacttttatacgctntgttgagactattaaatcaaanaagatgaatgaaatccaaaaaaatcaaaactaacattattatattaacaagactgaaaaccaaaggcattggactcaatattatattgagtcagtttatttaaacatatttgttaaaataagggtttattntaataaaataaatataatttttttagtatgtttgtttaaacgattcctgtttaaaaaaataatttttttgtttattntaagaaagaaatcatatcttcttcttaaaaaatatttatataaaaaatacttattntanaattatttgtttaagtttgaagaaactcatccattatgttatgtcctaacatcgtgtagaatcggttcaaatcagagtatgatntttaatctctacaatacataatccnngtagtcgtgctgaatatgt

SEQ ID NO: 95232 - DNA, 226 bp, Glycine max
tcttgacgctagcatctttttgggcggtaatttttgagtatgctgtttcttgtggttggaaaatggatctaaccatagtatagaaaacgaaacttactgacttgtggacccccatggaaaatcaaaacatcaggtctgtggtctactggtcaactctatattgaaacggtcttgttttgtgctttaagctgataggaacatgcctttgataatctgccttgaaaac

SEQ ID NO: 95233 - DNA, 474 bp, Glycine max
  unsure (1)..(474): unsure at all n locations
agcttcagcctgatcgctaatcaacagcttattcttggctaagcgtgacctattgtcaccaagcgcaattccttacggccataactgaggtcaatgaagctaagcgccagtcatggcagctaagcgagattcattgcggcaatgtgcacgctaagcgaatccttatcagctaagcgcaggctcctctgtacttaagatgcatcattttagctaagacagccagagtctgtgatgtgtcatcattttctcatatttcttaaccctttntgtcaccattntaattactaattaaccttaattatcaaattaattatgcagttntatcattngggcctactggattaattnntgtgttttaatttaatttcaggagaaaatataagtaattgggctntgacttgaagagagcagacaattntattctaccaaatcttatnctatctaanatntatntcatctagattttaatcatct

SEQ ID NO: 95234 - DNA, 483 bp, Glycine max
  unsure (1)..(483): unsure at all n locations
agcttgtcattganactggttcgatataagcttatagcacactattaataaacagaattggagagatccaggactcctagccacaatactaactccctactgaataactcctctcagcctctcttcctatntataggcaacatgccttatctatttcttctaactcagcttaactaaggctctcaactaacagacctatcagtactccccccctaaacattcaacttgtactcaaggtgatggcttgtggatgttgaaataaagtcccttttgtgttctagacttctagttatttgaaacaggatgtcctaatagaaccgtaatntattcagtattttcctctgcttcccttgacataaatatgtctgcaacgtctcttatgatgatgtctttcacatcaatggttcagaagttcacagataagagtcattntgaagtttgaacgactaagtatgctatanatatccaatctagtacttaatg

SEQ ID NO: 95235 - DNA, 150 bp, Glycine max
  unsure (1)..(150): unsure at all n locations
aatatactcttaattgtattcataaaatatnttctactatatcatgaattgtatcactaaaaatggtaatatatttgctctaagataacgctcaaattcgttaaaataaatcaattagcccgaaggaaaggcacaatcatcttctaatta

SEQ ID NO: 95236 - DNA, 426 bp, Glycine max
  unsure (1)..(426): unsure at all n locations
agcttcaaccaaggagagatgtgccatttcttgtgcttgaaagaatcaatgacaatgcttacaaagttgagctgcccagtgagtataatgttagttccaccttcaatgtctttgacttatctctttttgatgtagatggagaatccgatttgaggacaaatccttctcaagagggagagaatgatgaggacatgaccaagagcaagggcaaggatccacttgaaggacttggaggacctatgacaagggctagagcaaggaaagccaaggaagctcttcaccaagtgttgtccatactatttgaatacaagcccaagttttaaggagaaaagtccaaggttgtgagttgtatcatggcccanatggaggaagactaaatggcaccactntgtctcaantttagagtngttagttngtctaaataat

SEQ ID NO: 95237 - DNA, 95 bp, Glycine max
tggcttgaagattcaacgcctgatcatacctaggatcatccacatgaggcctctttattgaactacttaacctgatcatctgttgaacatcactg

SEQ ID NO: 95238 - DNA, 455 bp, Glycine max
  unsure (1)..(455): unsure at all n locations
gattcatgtcttgtagaggattgattgaatgaatgtgaaaagtgtaagtgtgaaagaatgaattgattcacaatgcaaaacataaccttgcttttatagactcttcatgtctggtcaagaagaccatttagaagagttataacttttagaataacttataaccaattntganaaagtcaaaaccttnntgaagagttacatcttttgatttatcagaaacagtcactgttaatcgattaccaaataagtgtaatcgattacactaagcttttgtgtgaaaggatgtgactcttcacatttgaatntgaatntcaacgttcataggcactggtaatcgattaccanaacatttgtatcgattacgcgcttttaaaaataattggaacattgaaattncaattgaaaccttttcaaacaatttgtactggtatcgatacatcatatggtatcattac

SEQ ID NO: 95239 - DNA, 408 bp, Glycine max
  unsure (1)..(408): unsure at all n locations
agcttacgttttagttaactttcattcattgttatttctaacatttaattactaacttttctgggggaatgtacaaacattgtattgttattaagataatctatctataatatacaaaaattgagtttttgttcaacacacaggtaagacttttgatattgttgatttttatttngttggtttttattttcactattgtgatatatttgtttttttatgggtagnttttctgttaanaaataattctgctaaaaaatattcaaaaaatagatacaaaaatataaaanaagaatagacacggtaaaagtacaatataacttatacaatataacttgaatagaagaaggagattaataaagaggtacatccaaatgatggtatataaaccaattatatntcttcatatgc

SEQ ID NO: 95240 - DNA, 143 bp, Glycine max
  unsure (1)..(143): unsure at all n locations
atcaacannagactttcgacacctactatatgttgatttcactaatgctcgtatgggtatgttgcgacaatccttcaataccttatctacacattctgaaagggtggntgtcatgtggccatatctacgtccttctgtatcat

SEQ ID NO: 95241 - DNA, 505 bp, Glycine max
  unsure (1)..(505): unsure at all n locations
agcttcatccacatatctgctatggcatngtcatatttaatagccaanaatagagcantttccatggtttacctcaacatgtggctgtccagcaagaaggtttggtactgcagtacctactacagcatgactagcttcatgccgtgcaactagagcgttctcacttcctttcagcttggcagtcttctcttctattccctgaagcaagtaactnggtaccattatccagaatagataaactagactcaaatttacataactaannatttcaatttaacatttgtgatcgacactccaaagctacacctacctttaagcaaggcctggtcatatattttaagacatttcccccaacataagggtgtggcagtatttttccataatgtacacatacatgcatgaagtattttatatacagactnntgtgtgaaaactcgactntcccgctcgtgaagtaagataggcactagtaataaaagtagtaatgggacacacgatataattc

SEQ ID NO: 95242 - DNA, 463 bp, Glycine max
  unsure (1)..(463): unsure at all n locations
agcttgtacccgcaccatatgcttaatntattcatgattcattcgtggatggagggttttaaatagggagcatgcatttcccagacaacactggcgaaatgtccccctgcacatgtatcgctcctccttctggcgaattagactgctacgcgtttcgctggttgccttgtcgaaacgtccaggtatgccatttcgccagcattaatgtgaaatcctattaaaaataaactctctccgaaaatagttntaaaagaaacccaaatgggaaattagtttgtaaaactaatcccaactgcgcaatttgccaatcttggttcatcacatcttttatgagattcactntacagggttgtctttggataaacttatatataaatacttggagaggaanaaaaaatcaatgtgcgcctctaattttatagtattactcattatctttttttataaaatgaagtcttaatga

SEQ ID NO: 95243 - DNA, 522 bp, Glycine max
  unsure (1)..(522): unsure at all n locations
agctntagtcaaggaaagtaacccanaaatgttcaagaataatgtcttgaaagagcacaacaagactnttgtaaatnggtttaaagatacaatctttggtgaggataatgcttctgcaatgttaaggaagttaccagatgggcctaaaataaatattataacttggcaaggatacgatatcaacaagtatttattctacacgaaatcacaagacgacaagagtacgctacanaacagtagtgtaagtctaagggttgaatctcaacactttgctattgtacataatgacaaaccccgtgtagcttccatgccttactttgggtcattgaagaaatctgggaggttaattatgtaaaattcagtgtatgtgttttcaattgtaagtgggtngataataaatatgggtgtgcgaatcgatgatttcngattcacacacacacacacattgcttaaagtccntaatggtgtngcatnttctatgtctctggggtgnntttgtatcttcattgtgtcaatcttcat

SEQ ID NO: 95244 - DNA, 481 bp, Glycine max
  unsure (1)..(481): unsure at all n locations
gcttctgcaagtgccatatacgattccncattcanaagaacattcttccacaacttatgatccaacttggatgttggaagccattctcggatgtcacaaacttcaatacagtcagcatctccacaggcacaaacagaaacattaaaagatgatggtctatcacgattttcattgaattgatccatcacctccggttcagtgctctgaagctgacgcatccatctcagagacttaatggcctgtgaaacatgatgtacggcagctaacttggatgagattggatcagcaactgtctgaaccacaggtgtggaaactggacatacttcacaagccaaagagctatcatcaggatacaagcttggtgcatccncttcttggtgctcaattctgtgctactgacagctataagttccccagatgtgggtttgtatgcttcagagaccatctttgcaggacattctgattctaagtgctcaatcat

SEQ ID NO: 95245 - DNA, 301 bp, Glycine max
  unsure (1)..(301): unsure at all n locations
atttatgtatatgtcctgatggcactgagattccttcctttcttttatgntgtctttgttgattcatactgctacatgagacatgtgctttagtatggggaggttaaaaantgttctgttttatttcttatgttcatttgtgaattgtttgtggtgtactgtttactaaggaaaaatattctgaaggtaaaggtacaattatcaattatagaatggctatatatattgaaattatttgtgcgaatatatatggaaatttatgcttgcatctctcttcttactataaaacatcttatgtact

SEQ ID NO: 95246 - DNA, 496 bp, Glycine max
  unsure (1)..(496): unsure at all n locations
atcctctacagcacctgcggcatgcaagcttatcggagatggatcgttggtggagagattagtccttgtctggctgatntaaagcanttgaattacttggacttgagcgccaatgtatttcttggagaaggtatgtcaattccttctttcctttggacaatgacttccttgactcacctcaacctcgctcttacttcattcatggggaagattcctcctcagatcgggaatctctctaagcttcgatatcttgacttgagcttcaattatttccttggagaaggtatggcaattccttctttcctttgtgcaatgagctccttgactcacctagacctctctggtactgtattccatgggaagattcctcctcagattgngaatctctcanatttggtgtatcttgacctgagttctgttgttgccaacggaacagtaccctctcagatcgggaatctctctaagcttcgatatctngacttgagcggcaatgaat

SEQ ID NO: 95247 - DNA, 277 bp, Glycine max
  unsure (1)..(277): unsure at all n locations
ggtctctctgagcttgttagtgttcgtgtgcatcactgatcgagcttgagctacacattttgcaggatgcttgcactatgtgggtgctagaattattggaactgcttcgtgaggtctaggtgctctcaactggggggtgangttggggtatggttgagtggatatctgtagaatgatctgactcactgagcacaaagatgtgtgaattgtctaactgtgtgcanggtagtctgattttgtgagtggctatgtagttcataaaagatatctgtgtact

SEQ ID NO: 95248 - DNA, 406 bp, Glycine max
  unsure (1)..(406): unsure at all n locations
ggatcttctgtgagatatttataggtgagattgagttcagttatggatgccatgcccttaaactgaaccgggtcaggattctccaaataatttgcccctagatcaagaaaccataaattctgcaaattgctaagttgaactggtatttgatttaggagtgaattattattgagagaaagaacttgaagttgtaggatgtttcccatttctggngggattggaaaggtgaaattgttgctacttaaataaagtattttcagctttgttgcatttccaattccagctggtatctctccaacaaggttattcatactgacattgaagttactgagattagagcangctgagaagtcaacctgttaagggtccatctangcctgaattgtgaagctntatctcaacaaca

SEQ ID NO: 95249 - DNA, 534 bp, Glycine max
  unsure (1)..(534): unsure at all n locations
ttcagtcacctgcggcatgcaagccttagtcgaaatggaggcataactgttatatgagtaggggttntatggataaaggttctctctaatggtaagctnttagcaaggtcaaatgagggtattaagaaggtgaatgcaaggtgactatggtgtggtgtggcagctctggttcttaattatggagagaaagggatattggctaactatagatatttttcattcttttcctgaatcaaaacaatgtgtctaaaggtccagcacatggaaaaaccaaaatttacatttcaaataaaattgtaatgcttccgaagatacaaaggtaaaccaaaaatgaaatacagcagaactacaattaatttcattgagctatctatttgaagttggaactctntctgcctctcattntgtttgataacttgaattcctgaggcgattgcgattccnctcatcctgcagaaataaccaaggatcatntatcattcatttngcacacttagctaaagacgccagttcaccaacaaaacggccaacatc

SEQ ID NO: 95250 - DNA, 232 bp, Glycine max
agataaataggaaaacctgtgggtgcatctttaccagttccacaccacatgattatagcatacaccattctaccacaccgtatcacaagctcctaataacaaaaccctacaacacatgtaacacacttaccaacaacaccccgaagagttgcggaaaactgaactacccatcggtcatgtatgtccttcatattgcagggctacctgtgtctactctttcagtcatcaccac

SEQ ID NO: 95251 - DNA, 170 bp, Glycine max
ggacacactaccgagtatgggctgacagacctctttcgactgcgtggtgcgaatgactacagaagcgctataccatatttaacctagagagaggtcatacccaggggacttttttcctgtacacggatttaacctttgcgcaatcttcacatgtatatccgcttgatagt

SEQ ID NO: 95252 - DNA, 369 bp, Glycine max
  unsure (1)..(369): unsure at all n locations
agctggtgaagtgtgaatactatatgtcaagtataactngngttatgtcccanagaggaacccaagaactccccattatggtatatatttgccttgaaaacttgtgaaacaacagcatcctggtcagaagctagcttccatccttgcttccctaggatagccaaattaaaagtgaaaagatgttgaaaacccataccttcattctcctttctaatagttagacgtttgcaactaaaccaacgtatatctttgcttgaatttatgttacttccccaccaaaatgaattcataatcttctggatttcatcctggagagttgatggtggaagaagaanagcactcatgcagtatgagggaatagcttgagcc

SEQ ID NO: 95253 - DNA, 408 bp, Glycine max
  unsure (1)..(408): unsure at all n locations
atgcttggaagcacatgcactttgttttctggtttctgctacanccgctaaacacgagagaaaggcacgagcacgatgacgaatgaagatatatgtgtagcgattatagcgagtgtgtggactaccgccgtgaaaatcatggtgaagggcgacaagacaggggtggtgacccataacgtgataatgtcgatgaaccccttctgcgagatcgcgctggaagatgccctccgcatcatggagtctggcttggcctccgatgttgtcgccgtcaccatgggaccctctcaatctgtagacactctccgaaccggtcttgccatgggagccgacagaggcatccatgtcgagtcaactgcttctctctaccctctctctgttgccaagatnttgagaaaactcgtcgagatt

SEQ ID NO: 95254 - DNA, 151 bp, Glycine max
  unsure (1)..(151): unsure at all n locations
cgtgaatgtaacggacaagagatagaatgtggcatataaacaacaattatgataatatntgagactccagggaaagtagtgactccaaactcgcctaatcacgactctcanatcagaactgcatacttgatatatatatcttgatgtctat

SEQ ID NO: 95255 - DNA, 429 bp, Glycine max
  unsure (1)..(429): unsure at all n locations
agcttatggcggcaaagggtaagcaatcaatctctatgcatgttgatgttggtgcttgtgaatattgtatccttggaaagcagaanaaggtcagcttctcaagggcagggaagactcttaaagttgaaaagctagaatttgtgcacacatatgtttggtggccagccccaatgaaatctgttggaaactcacgctattatgtcacttttatcgatgactctaccaganaggtatgagtgtattttcttaanaataaatctgatgtgttttctatgtttaaaagatggaaaacagaagttgaaaatcagacaggtctaaaggttaaaagtctganatctgacaatggcggtgagtatgatagtcaagagnttaaagacttctgttcagaacatganatcagaatgatcaagacaataccaggaacacctg

SEQ ID NO: 95256 - DNA, 448 bp, Glycine max
  unsure (1)..(448): unsure at all n locations
agctatgtatacaatctgtattgcccaactctcattctcacaatggctattagcaccccccgccgcattttgataagttcacccatctttcgtagttcacggacaagttacgaacgctataccgaagcctattggacttgattntcttcttttatatctttcttctcactcgcattaagagaaatatgcttatttaggtgtatgaggagttatacggaagcattacgggcgtcccggaagcccatatgttaacagaacgggcgaggtggttgccacctatctcgcctaagcgagctaggtgtgcttcaccttaggctagagaatgcccagacacctctagaagtgcccagatttgaaattactatgtgccccctcatttactattacacccctttgccctttttgctgatcttcttcgtacgtacgaactcacattatgaacgatctg

SEQ ID NO: 95257 - DNA, 401 bp, Glycine max
  unsure (1)..(401): unsure at all n locations
agcttgttggtatgtgttcttctctgcaatgtttccgcattagggtttctctccgattgaagacaatgggtcactntacactaaagttgtttgctttcacttctcaccaatctgatgcattataggattatatttgctatctcaagtttgctgctcctaatgtgtatgagtggtttcagaattcatcgtgaaggaatgtgtaatgggtctttatgaagaaaatcttttctctttttttggtaataagtcatagacgctgttcaagcttatgcttattacagtctgattgactttaacacaaggaagtcttcctttcctgttggtatgttccaacaacatacgtgtgccttccatatagcaaattttatgacttccatatcattacataaatattgatcatg

SEQ ID NO: 95258 - DNA, 506 bp, Glycine max
  unsure (1)..(506): unsure at all n locations
gcaagcttcatgagtgacattcgtggntgatgatgtgagataatgttgagaataaggatatctcttattaaacgaggaataggttaaaatcaaaataagttatttcttctagaaagttatgcttatgcatttgtgagttatttgccaacaccttttatttataagtagaaggtaattgctactcaatctaattaagaccaactttgtcgtgactatacatatcaggtggttccaaaagttattagcttgattctctacttcctacatgacgacattctcaatcatattcaatcttcatgagtgacanttcgtggtgatgatgtgagagaatgtcaagaataactatatctcttattaaatgtggagtagggtaagattcagaataagttatttcttctagaaaagtgtgctcacacatntngtaaatatgcatcaacaccttttttttataggtaggagaaagtantactactcaatcaaagtaaaataactntgtcatgaatata

SEQ ID NO: 95259 - DNA, 484 bp, Glycine max
  unsure (1)..(484): unsure at all n locations
tcttcagtcacctgcggcatgcaagctntntgannaaacattntgcttctggttattgattacaactggctgtaatcgattaccagagagaaatacataattttcaagatgtaatatttacttaaaaactttataagatatttgaaaacttaagtcttttaaggccaaacctttgntaaccttttaagagattcttttaacatataaaggactatnngaaattggttctattgatntcttgatcttgacttgaatcaacgttgaatagctntaatctnttggcatcatcaaaatcttcatacaacatatgcacttacaatctccccctttntgatgatgacaacaatctgaaaacaagataaacgatattcgatttgcaatgcatgcactcacccttactcccccttaaatntgcaatntattgcctatgtttagataagatccacccttagtttctctacccttatgaaacatcaaaaagctg

SEQ ID NO: 95260 - DNA, 206 bp, Glycine max
ttgatgacaactacctaacttactcacttgagccagacaactccaaaataatctcaaccaactagacccaaacgttttagtcatataacaacgagacgcgaaaccgcaacataccaaactatgcaatgtgaactaccaccatacaatcgacctagaccactaagagacacaaaacactaaactacccccttgcaatagcacccact

SEQ ID NO: 95261 - DNA, 408 bp, Glycine max
  unsure (1)..(408): unsure at all n locations
agctntctagctntntattggtagtatttgattctcctttggtgctctaaaatgtgggaatgtgctcaaatatgtggggccaatttggtttgttttcttgcttgattgggttgaattgagggtttgtatgagatggccctatgcctataatgcattttgaagcaatggggcatgccacattgtccccgttctcttactattaatgcctaaacacgcgcccaccaagtgttcggtgaaatgcctcaatggcattagcgcgtggttttcatagggaaacaacccgtgcggcattttggtttgcacatattttctatttttttgggacatgcattcattcccgaanaggctagagtaattgccccacatatatcctagacctaggagccaaagttttatacaaaagaacac

SEQ ID NO: 95262 - DNA, 182 bp, Glycine max
cctggtgtattgcccccatttactatcaccctgctttttggatctttcgaagtcgaactacattgacatctgttcttcgatgtacgactgcgatctatcatcctttactacaagtacgacctatatgtcacatctcattattcgggcacgactcgatggctatattcttgtttcgtgctgat

SEQ ID NO: 95263 - DNA, 548 bp, Glycine max
  unsure (1)..(548): unsure at all n locations
tctcagtcacctgaggcatgcaagcttctatggcacgaggagcaaagaaagagtatggaattctcatcgtcaaagtaaaaaggtgagaaaaattcanagacgattntattaaagacatgtctttgaatattntgaatacttaatttctagaatagttttcaatgaccgtcattgtataacttttattatttacaaaattgtcaccgtgtgatattctaagacggtttcatataaccgtcttagaatgtgtgtcgtaaaaaatagtttttttaatagtggtggtttttcaattagaagtgatcatgttttcaaatgtagtaaaagtgagaatgagaagaacccatcatgtgtttataaaagggagtttgtttgccatcgtgcangcaatgctaaacatcacanagttattgaattagaaagaaaaaggaaacananaagtntataatgtaattgtagtgcanaaatgtggattgctaaaagaaaaattggtntgaggaataatggatagttcatgtntaataattctcatacccatgagtgtggatgat

SEQ ID NO: 95264 - DNA, 306 bp, Glycine max
tacttttatgtttgaaaaaataatttttatggaaacagacactttactttaaaagtaatgtttattaagcataatattgaaatattataaagtaacagaaaagcggctcttgtggttaatatttctgattgtgttcgcccccccttttttttaaagcatttttttatagttatcatttcaaatctaattaagtaggtgtttactaaatttatataataggatacgattttgacatgcgtatctaagtatacttgtaaacgagtaatggttataactactgtactcaatattattgtatatgtgaca

SEQ ID NO: 95265 - DNA, 404 bp, Glycine max
  unsure (1)..(404): unsure at all n locations
agcttattctgacnagatataaagatattcttgatggatgatcaagacagnctctagagtcttaggagaggtatattaaataggaacggaattcctaattgaagtagcaaaaggtttggccaagaaatggaagttaaaaagtctttttcaagagatttactctctggttatcgattaccagaggatgtaatcgattaccaatggccaaaaatgattacaacagctattaaaatttgaattcaaatntgcactgtgtaatcgattacacatatatggtaatcaattaccagcagttattgaacgttttaattcaaattttaaagcttgtaaatcgatacacacatactgtaatcgattaccagaggagattttcagaagatattctcaacagtcgcatcttttca

SEQ ID NO: 95266 - DNA, 181 bp, Glycine max
ctccttaatctccctattcaagctttacgatcatgacatcggcgcagatatcaaagagacactctggttatattatcaccctttttcaccttcatttttctacatcttacagccagcaatattttttttacgtgataagtcaaggactaaaccagtctatacacgccagtagccatctcat

SEQ ID NO: 95267 - DNA, 453 bp, Glycine max
  unsure (1)..(453): unsure at all n locations
atcctctaagtcacctgctgcatgcaagcttgttcagaaaggcatctgtgagctgtctctgtcactgcccttctctctctctcttgtattctctatatatatgntaacctttgaatntaataaagctaagagggaaaaggagggtgtttttcactcctttagtttcaagttggtaccagagcaggtttgtccaccgtccgctgtccgccgtcgcgcccgctgccggccgccgncatctccggccagttttcactggcgagaccagggttaggatcgcctcgaanagcgcgacctacccctggaagttgtgcctccaaaggagccttcacgcgctgccacgcgccgtctttctcacgcacgtttttcggcgcgtgaagtccacgcgccgccgtgcagtcgccggaatgccgccgcgtcgccgccaatctgctcgtcagcttcttataagtttgt

SEQ ID NO: 95268 - DNA, 527 bp, Glycine max
  unsure (1)..(527): unsure at all n locations
atcttaagtcacctgcggcatgcaagctggtcanaatgagaaacattgttaaaattcttttcanagtttaaatattgtttatactataaaaccccttgaactacttcatatggatttatggatttatttggaccatcaagaactatgagtttagatggcaactactatggcttagtaattgttgatgattattctaggtacacttggaatttgttcttgagaaccaaaaatgatgtttttgaggctntcaacacacttgccaaagttattcaaaatgagaaaggtttgaatattgtttcaattagaggtgatcatggaggtgaatttcanaatgcgttttttgaaaagttctctgaagaaaatggaattcaccatatatttctgtcccaagaacacctcaacanaatggtgttgtggagaggaataataaatctctcgaagaatgagctagaacacttctanatgaaacanatctacccanatatttttgggctgatactgtgagtactaatgtgtacanctctcat

SEQ ID NO: 95269 - DNA, 331 bp, Glycine max
ttgacggactttatgccgataaatgagaggtctatttttggccctatatgataccctgctggttatacgccaacacgtactctgtattgtggaccatgatactttgcgttgctttgagggaccgtatattgatgcttcaccttcagcttttaacggagctctgagtatgcctgcgaaccactgtaagctgagagatcctatgcattgtggctttcctacaatggagtatgtatctatgcaaatgtggattgctgatgtggacttactgtgctcacacgtgtatctgaatcatactccctgcattgtgcttgagactgtatcccagaatgtc

SEQ ID NO: 95270 - DNA, 443 bp, Glycine max
  unsure (1)..(443): unsure at all n locations
agcttcatcaagtcntttatctttacacagtctatcgatcataatatntacgggtatgatattagagaataagccagcctctttcgtggagtcccgaactttcagagcaacttcaagttctcctgccttacaaagcctgtcaattaaaatattgtaggatgtaagattgggaagctgcatccatttcattgcttcaaggattctcaatgcttnctcaactnttccctttcttctaaggcaagtcaggatgcaattatatgcaattacattaggtatacatccctttctcttttgcctctcaagtaagttgtatgcttcattccccactaaaccataacccattatcatggtattataaggctaaacacaaggaacacntgtgttgntgtcgagttcttgaaacaactctatagcttcatccaactctacagcttcattcacct

SEQ ID NO: 95271 - DNA, 269 bp, Glycine max
ggccttaactcagcttgtcttccactgcgccctattagtttatattatatctaacttgtttaccggattgctttatacttgaattaatcttttctgtgatgacattatattataacatggttttaatgacatctgtctgctctgatgttatttctatgatgctggagagaagtagtgcttctgtcccttgttgtgtgcaggaaaagaataactccaatctatcagactactaacaggaatgaatttatacctgaaagggggggggtctg

SEQ ID NO: 95272 - DNA, 450 bp, Glycine max
  unsure (1)..(450): unsure at all n locations
cctctcagtcacctgcggcatgcaagcttcatgatgatgaatcttgttgattcatgtttgtttgataatgacgaagtggatgacaaaaagcccaaagaatgatttcaagtatcataagaagaaatcaagaagattcaagaatcaagagaagtttgatttcaagattcaagagaagaaattaagaagacttccaagggaagtattgaaaagactnttcanaaaacaaacatagcataatgtttgttttcanaagagttnttctcaaaattgtctaagttaccagagtttttactctctggtaatcatttaccagtttcctgtaatcgattaccagtggcaaagtttgatttcaaaagttttcaacttaaattgcaacattccaattatattcaaaatggtggtaatcgatacaagatattggtaatcgattaccagtgtatctgaacgttg

SEQ ID NO: 95273 - DNA, 194 bp, Glycine max
  unsure (1)..(194): unsure at all n locations
agcttagtgaagtggttgtgaggtttatntctctcattcacctcttctatgcacactntcaacataatctcagtatttttatcacaccattctgctntctttcttttcacaggatcttgattgagagacatttcacanaattaatgaaacaaacaaaagcataaccctaatccataacaattcaaaattaatga

SEQ ID NO: 95274 - DNA, 214 bp, Glycine max
aggtgagcacctagcactgaaccgtgtaaaaatagtctcctaagtgaaattgaactagctattgccgtacctgataaacaaagccaagaaccacaaagttaggtttggccattactacttgaggagatattgtaagctatgagcactagctctgtaaaattcacgtagaatagatttgcattatagcaaactattcgcatcacagctaaatcca

SEQ ID NO: 95275 - DNA, 411 bp, Glycine max
  unsure (1)..(411): unsure at all n locations
agctntagtttcanagatagttgcttaataattatactcttggtaaactaaaatntagatctattgttaagatgaaaagataacatatttaatgatttggtcaaaactagttaaagaatttgtgcaaagaanagtaaagaanaagaaaatggaagagtgcacaaaggtttttatattggttcaccctaaccttaggccacgttcaatcgtcacccttaaagatgagatttcactaacacaactagtgcacaactaaaccagcaaaccactggatttcagcaacttgctgtagacaaatgatcaagctgaatgttttgatgatgccaaatgatcacatgcttctcanagctttattcaagacanagaaattaaagatattcaagatggatgatcaagacagtctctagagtc

SEQ ID NO: 95276 - DNA, 421 bp, Glycine max
  unsure (1)..(421): unsure at all n locations
agctntacatttattctctatgccactactgtttcaacccttagactccttatggatctaagaacactgaaatattgttgtggcactaatccactcctggctttcacaaacaaatagtttgaagaaccatagattctaacactngaagggtgcatntacaattaagtaagagtcagtacaagaactntgttaagcaaaggatagactctattagcattgagnctcactcaacagtatgtggctcagattctttcttatctctccttaatatatgaatggtgtttatcaaccttgacaattgctgtaacgtgccttctaaagaataaggataatccaatcaatgaggaatcttgacattcaatntttgaacattattgattngattcttctggtgccaactangaacaaatgtatgtggtac

SEQ ID NO: 95277 - DNA, 140 bp, Glycine max
ggttgcaacactacatccaccccgctacgcataacgtagctacagactcgctccgtaagaaaaccacaggctgggtgcctgattttaatgtggctgatatcagggatacagtaatagcggtaatgttgatatcaggatat

SEQ ID NO: 95278 - DNA, 186 bp, Glycine max
ttctgtgggtaggattaaccatctgagtaggactctctactctttaaagattcttcaaacattggacactggtaactttactctttaggaaaactatgatgtcttgaggcatatgttttttatctaaaactttgatatgtgcttaacactgtttaacgccattaaagcattaatgatctagggtga

SEQ ID NO: 95279 - DNA, 211 bp, Glycine max
tacttaggagacacatcttcagatacaccaatccacacgaatctatgagttatatatgagctcctcatgaagcacttgctaacacattaaggataagaacaagacactggaatattgaaaagtgaagtctatataaacacttcatgtgctacatatgtattattctttgtaaagcgaaagtagttatatatgcgcttaattgatatatact

SEQ ID NO: 95280 - DNA, 340 bp, Glycine max
ctctgtttatgtgaccgatggcctgaattgtcgggtagaactgggcgcaggggtgttgcaaacactgacatccacccccggctatcgcaggaaaccggatgcctaacggcgactctggcgcacagataagaacgaccaacaggagtgggggtgcctgaattggatagggtgggcttggacatacaggggacatcagtaatgagcgagtaatgcttgtataacaggggacatacactgaacatcgaatagacttgatcatcactggatatccagatgcacgacatcagcgtacatccagtatgttatgcggtgatagtacctgacatcagtggacatcaag

SEQ ID NO: 95281 - DNA, 154 bp, Glycine max
ctgtctacgcgattcttctctcctaaaaaactttattgtgcgcacctttactctcttatcatgggctctgactcggtactggatggcggcctgttttctgtgcaattgcggcgctctatgagtttttgtactcgagctaccttcagcctactag

SEQ ID NO: 95282 - DNA, 174 bp, Glycine max
taatgagcgaacctttttactgctgccgcatatgtgatgggtttttaatggtagacactgtgtatggcacctgcacaagaggagtcctcttttgttgttgagaacagtgattgacaagtgtgaccttctgggctattgcagggtgaaaacgcatgcgacttattagttaaactt

SEQ ID NO: 95283 - DNA, 185 bp, Glycine max
agttcaaagtttttcttggctctcagctttggctcggaattaaggtacctcaggtaccatttttaaacagttacagattttaaaaatgagatttttaacagcgttagaacacaaaaatttcttctctttacgctttcatgcgttttatgtcttctttattattattaagaatgggaaaaaaaatt

SEQ ID NO: 95284 - DNA, 142 bp, Glycine max
aggtatcaaatcgcttattacaggaggtaggcttatcaccggaagggaataagaatctgaaaaatggtattcaaaatggcgcttcatattgaactgacaggacgcatacctggacacaaagcttcttgctaccattgtaatg

SEQ ID NO: 95285 - DNA, 273 bp, Glycine max
  unsure (1)..(273): unsure at all n locations
ccttatctagctgggagacgatgatggcatcagtagagtttgagaaatatactggagcttatctactgatacctttgaaaaaataagctggagcttatcttactgagtgagcactgagtgagcaattgtaacacatcttgtaccctctatcattntgtttgtggagaatctcatattgagagtataatgtgtctccatattacttaatacaagtgtatctacttacaacggaaagcaagtttcacctttactgccgtcatgaagcctccattt

SEQ ID NO: 95286 - DNA, 128 bp, Glycine max
tattttttaacacagcacttatcatggacagacaactcctgcccccagaaaataaaggacaatacgactgattcttgtagagccctgagagtgggaactccgcgaaatcactttctaaaaacgatgtt

SEQ ID NO: 95287 - DNA, 281 bp, Glycine max
gaggtctagcacggtcatgacgcgactatttaaacataccccgagacaattgggaaacaactttagatttgtaaaattataatatatatataataagattaaataataacaagaactgcacaatggatgtcacactacgggacgaagaaaggcatctcttatagacagccagctaaatttgtaaaggaggctatgcaaatgtaagtatactaagtgaaaaaattattttaatgttaagaatatgatgctactgatgtgtaaaactttatacgaaacttcta

SEQ ID NO: 95288 - DNA, 141 bp, Glycine max
gatatgaatttgatggtaataatatatgctggggtattattttgatatattatgttagttagatagtatttatctttagtgaatatattattagttgtaaagttgaactgctgaccaaatcattgtgcaaatgattggact

SEQ ID NO: 95289 - DNA, 276 bp, Glycine max
gaggaaaggtatcttagctttttttcaatgttgaaaattttctgagaaattagcgagcgctcaacgttctgacgtcggagattgcaagttcccgtctccgtctatcgtctatgtctcactaacggagactgacactttatcatttgaccggggcccatggttggatttatacgttatacttttaccctgcggcaccttatagattgtacaaaaaaatcacgcgtatgtatcacttgaagatcacgcgcgcgaccttgataaaagaaatattataaa

SEQ ID NO: 95290 - DNA, 320 bp, Glycine max
ttcttctgctaaaacaatgcgtgtgagcagatcttctgtgctgatttattaaagatgtgagactcttttatgtcctgagtaactatggtgtgaaatggtcttcatgcctctctatgaaaggaaagtcattgtggacgttatcggttctctagtctttctgatgcagggtggtctagcgctgaatagttgagtagacccaaaatggctctgcggaaagtatttttctgactatacagtgttgctttattcacaagatttttttaaggagttgttcgctcataatttatagtctatttttttttttagagtatttaataaag

SEQ ID NO: 95291 - DNA, 293 bp, Glycine max
ctaaaatcaaaagaagtactcccctttaagtagtactctgaagaagaactactcccactttaagtactactctggaaaagtagcaccccctataagtagatccgtaacgaaataaagctagaaatccaagctgaacagtaccttctagatgcaacagtcagagaactattattcaaaaggcaactgctgctaatactggtagaacggctttcgtaccacttgagttcacctgggagtgctcgattcatttctctgaacaccagctgtgtgctactcaacttgagaacttgctg

SEQ ID NO: 95292 - DNA, 141 bp, Glycine max
  unsure (1)..(141): unsure at all n locations
acagtatgtgcatgtgtcgcacgngctacaagatgcatttgtggtgtgctgatgggggtataataataacaattatcgaggtttacgattgattgaacatattagttaatttttatatactatgtgatctattaaaaatat

SEQ ID NO: 95293 - DNA, 73 bp, Glycine max
tacattctgtctattgtacatgtctgtaccgttggttacttgtacagtcccatcaggacaaactatataactt

SEQ ID NO: 95294 - DNA, 221 bp, Glycine max
taacatgtgcacgtgatatgtctcttgtcgctgaaaacagttatttgtaagtaactctttgcatttggaccagattgtgtattttttatgcggtcataccttgtaattacttactaaaataataagttcacaatcttccttactcttgaagctatattttttttgataacttaaaagaaactgcttttatgagctagtttaacaacacacgtagccttata

SEQ ID NO: 95295 - DNA, 158 bp, Glycine max
aggctatctacttcctttatgggagagaaggtaccagcttttttcatgttaaagtctgaaatagcacgtcaacgtcgcgtcgggatcaagtcacgctaatcttcgctgttttactacgagctaacacttatatttgccgggccatgtatgttattgtt

SEQ ID NO: 95296 - DNA, 207 bp, Glycine max
gtcactgtccgatctggtaggaatctactacagaaggtcaatgcaaaccttttaaactggattcaagatggatggttatttgaagggggatggaagtttaaataagtggatttataaatattgatgactctccaaggtggaagtactctacaggtataattactctcctatcacaaggttttgaagtaacacttcaaccctaatgct

SEQ ID NO: 95297 - DNA, 207 bp, Glycine max
  unsure (1)..(207): unsure at all n locations
atatcacttatatatatcatacatgcacatatgacaacatannatnnntctctgtagtctgagttgtattntcaaaggtgtacaacaccgatattatttaattatctacatatatatcagaccttaaatttcaccactatcaactaaattctattttgactaatatattgcattataacatgtcntcacttaactttataactaata

SEQ ID NO: 95298 - DNA, 87 bp, Glycine max
aggtccatctctttgaaggccctgaatttaaacttggagtcactgtgccctttagactcctgagtctaaatcaaactagttcgcctt

SEQ ID NO: 95299 - DNA, 281 bp, Glycine max
atactgcgattgtcatactgagagacgcaatgttcactactcgcagaccattgatttttcttcacaatcaattcaaataaggttgaatgcacacacacgaggtcagatagatattgttatctctttcacggcgtaaatagcgggcgatttggaggaaaaagtaaacgtaccactctactatgggctggtcgatggcttattcgaccatgtatggtgtcgacgactgtatatatatctgtatgggaggaaaaccaaaaaattattgatctctaaaaggtatt

SEQ ID NO: 95300 - DNA, 141 bp, Glycine max
ttaaagatgcattggtactatggaccctgctgtggagaaaaacagggttgtagtgaacaatagggctatacaaaatggtgtgcatgcaggtgtcaagaataaattgtcataacgggtgtaggattggcgactccttattat

SEQ ID NO: 95301 - DNA, 192 bp, Glycine max
  unsure (1)..(192): unsure at all n locations
ggctgccggtctggacatctggactgctatgttctgggaagttcgtcatcccactcagcgagctaatgaagctggtgctagatactatcatatgcgggctctgccttcagcggaactgcggccctgatatgatgcaccgaccctgtgnncgcggcgtgacattatgtgcagtatatcatttgctctcgtata

SEQ ID NO: 95302 - DNA, 325 bp, Glycine max
acctcagaatagacagatactcgaatgtcttacatcagatcaactacgcatgcatagaatccgtaaactcactcaacgattcacccttgctatcaagctgaactttccaaaccattaaccaccaataacgctacaaatacatttctctttagcttaagacaataaaaacagaaatgtgactgataatggatatcaaccatgtgaagactcactatgcacttctgtgattagctgcggaccaacataaccgcatataatggaaacgctgaaaaactatatccaaacgtcactctccgcattcaccagctaagacatgactacaaca

SEQ ID NO: 95303 - DNA, 282 bp, Glycine max
  unsure (1)..(282): unsure at all n locations
ggacttagcacgagatgactgcttcatcttgggagtctttagttgtgataagctatgatggtttcacaacagctatgttaactgccatctttaaaaccgngaaaacagaaccaaggctttggtaaattaatagaaaaaaggaatatctttgaaaagagaataaatactagattaggatcattctctaactttatagcagttaccaaatcatcttgtcataaaggctactatgcccagacttgtatctggcaatctactctaagatatgcgagcaaattcttg

SEQ ID NO: 95304 - DNA, 183 bp, Glycine max
tgctgtaacggattatctagaacaccctccgtgttggaagaactcttcttttacagtggcggtacacttgctgaaaacggtctctactaatttgctgaaaaccttaacagtgtgagccttctcatgtaatgtcaaagcgaaatgctttctgacttgttgagccggtgtttcgacgctctcagg

SEQ ID NO: 95305 - DNA, 96 bp, Glycine max
gccttgatctcagctacagataaatgtcaaggttgtgtcatgtgcacagtgtgcagtgtacaagtaaaataagacactagtgataagatactagga

SEQ ID NO: 95306 - DNA, 314 bp, Glycine max
ttatctttatttatcagtactaggtgacaagattttgaaaattaaactatgaataaatattaatattctgggaacaaattgctgataatacataacttatctaattctcccatatatatatataatacctccaacttccaaaatgtgattctgaatatttcataaaccagttcttgttttcaaaatgcgatctgtgttttaaataaccaaatatattttaaggactgttcttcattatttaatcagaaattttgaataatgttgtgagaataatctcctttttaaactcactctttataatataattttgctcc

SEQ ID NO: 95307 - DNA, 320 bp, Glycine max
ttatcactatgctttttagaaatttgttgccaaagtatgtctcagccaactattttcttaatttatagtacccgttaaaaagttgaaattaacatgttaaaatatttttggacaatctgaatacaaattgctattctcccttttatatattactcaactgccaaatgagattctaattctcttatccgatcttatttaaaaagggaattggtattcaaaatcaatatatttttggaggtgatgtcccttttttttttctaatttgaaaacccttaagggtaaagaaggaagtattttttttaaacaaaatttaaaaaatt

SEQ ID NO: 95308 - DNA, 233 bp, Glycine max
tatgtaccctgcatcacaaaatctatttcatgtgcaaaggctctctagctgaagatgacctatcatcttgcctcggattcttgtaagcaatcattgcgagacgtatgtcaagacatcctcttttcgggagattcgatgtcgagcgtcgtatcccactactctactaatgtgatttgtacactctgcacatctatcactcctgcatgactgcgcctctacgtacacttgtatat

SEQ ID NO: 95309 - DNA, 126 bp, Glycine max
taaactgtgttatggctactttgatttaattacaatcctttgtaaaggaggaggaagtagttaggatacctacacaaggagtggtatacccatggaattctagaacttcaatatgtgcttaactaa

SEQ ID NO: 95310 - DNA, 160 bp, Glycine max
  unsure (1)..(160): unsure at all n locations
acggaaatgtcngaacgttcgagccctcgctatatttcttacggaacaattttccagcaaatcaaagaagagaatgcctaaggctgaacctttcttttcacttcctcctattatagcaaatagngaggtggtgccgccagctcgccaggtagctcactcg

SEQ ID NO: 95311 - DNA, 157 bp, Glycine max
cttatctacttccattctatgggaggagaatgtgcctgcttttttgaaatggaatagtcggaaatcagcagctcgcgtcggagatccaaattgacgctaatatgcgtttgtttggctacggagcccacactttatattttccggggccattgtagat

SEQ ID NO: 95312 - DNA, 150 bp, Glycine max
cggtcttagcactcgctcactgcgctgccctcttggaaacttgtgattactaccattaggaacgtctggaatcacgttgagcaaaattggtggtggaagcttaaaggaagaatccagtggccgacacatttgtcagaatacagagctgta

SEQ ID NO: 95313 - DNA, 235 bp, Glycine max
tctattttaaaaactatatgtattaagtaaataggcacttcagctcaaacaaatggttagaatatgtcttccagaatttttacaacacacatatcttgtggacaatttacaagaagaacttactatagggtgtcattctcactcatcatacctgagatgctccttactggttgcctcactcaaggtatacactctggcaagtcataagttttagtcatagtgcatagtgtcttct

SEQ ID NO: 95314 - DNA, 279 bp, Glycine max
tcacaaccaccacgctattaaagtttgctagaacaatgtctcacatcacgcacacacaggggacacacaccaaacgaacgtgagtctcgcacttttgagactggagaatattgcacagcgttcacaaacgactcttcactatatcagcatgtccatatacacagcaattgcatacttatcgcaactaatgaggcttgttgcgaacggcagctacaatcatacacactcttctcaaaggcaataagaggcacattgcgattccgattctcacctacttct

SEQ ID NO: 95315 - DNA, 249 bp, Glycine max
  unsure (1)..(249): unsure at all n locations
tgtagtaataagtctgataattctaaaactcaggcatcgaattaactcatgtcctgtctaattggattcttagaagtatgctgcatcaccatatgttgcttctcatcgtctcatcagatgaggtgaattcangtcttctacgtgacatagccctttntttcttagtctaaaaattcttctatctgactttctcaatctggaatccacttgagtgcaggctttgcctctaaaactatgactttgcttatc

SEQ ID NO: 95316 - DNA, 222 bp, Glycine max
tgtaccgccactagtggcaatccagtccgaaaagttagagggacactttcccaaagacgtgtgacgtgttactacgggaaactcccatgacagcagcagcaccacccccaaatagcttcgttgccataaatatgcctataaacgtgactgtgctcactgctacatcttgaaaaatgcagttccaactgcaaagaccatattacgctgtggccctgcgacgag

SEQ ID NO: 95317 - DNA, 69 bp, Glycine max
ataatatatatatatatatatatatatatatatatatatatatatatatatatatatatattctctata

SEQ ID NO: 95318 - DNA, 121 bp, Glycine max
  unsure (1)..(121): unsure at all n locations
tacgtatataacaccactgaatatanatattaaaccgttttataacacgcttagatattatattatatcatattatctatcctatctatattatatatatattatctatctgatatatatt

SEQ ID NO: 95319 - DNA, 198 bp, Glycine max
cctatctggcgaaccccttcgtgatattgttcttgcgattatatgagctcctggaaggcttctttgttccttttgaaattttaaaatctactctgtgacaaaaatttgtacttcgtgatcgattataaaatcggtgtatgggagttgtagtgttatgaatgaaacttctaaatacattatataatgagtaaaataagc

SEQ ID NO: 95320 - DNA, 177 bp, Glycine max
aaaacctttcctttaacttggatagaagtcttattctaaaacttccttttcttcattctgttccctcgtttttcagttacgggaaaatttgctccaccggactttccctctataccctcccaaacttttaaccttcacatcctggccaaaccgttttactttttttcgacagttctc

SEQ ID NO: 95321 - DNA, 365 bp, Glycine max
aggccttactactgcggggtggctgcaactaggttctaaaaatgaaagaagctcttagtcttaaaaactctcgtttactcaggaaaatcttaagtatttcaacatataaagaggttctgctcaaattatggcaatctaagaatctctttacctggcaattcagtaaagaatacatgtatgatacccaccatatgtaagactgataaggtaagtacctctactattaatgaacttacattatttgactccctttcgatgaattttactttttatttttatgaaactattggattaaatttatactccggtccttattttttaatataataatctaaattaattttaccttctagacttttctttcc

SEQ ID NO: 95322 - DNA, 325 bp, Glycine max
ttttattcatgaataatcatttaggttataaatacgtatagtcaatattccgaattaaactttcaaaattatatatcacatacatagtaccaagacagacctgaatactagaatattgcaatattgatataaattaaatattaaacttataaatctttatactacaataagatattatgtacaactaattttaattcaaggaattgataaattatagggatgtcaacaaaaaattgctgacaatgattatcttcatgccaatcttaaaatgcttataaagcattatttattggctttatatacaaatgaagttaaggactgtaag

SEQ ID NO: 95323 - DNA, 175 bp, Glycine max
actcagtcgaataatatttttaaaatgaaacgatgcttactacaagattatcctaatttggatatggtcagggaagactttaccctaagagggaaatacctttgtgtcaaaaatcaaatttcttctaattgataaacaaagtacacactaagtagttttctttcaataaaaaata

SEQ ID NO: 95324 - DNA, 201 bp, Glycine max
actactttagcttgggaccttctacttcaggtgccgcttctttctgctcgtgcctctgtgaaaatattaaactttgactaaatcactctaactcaacactcttgatagttttatacgcaaaatgtaaatagaattaggtgttgaagactacatatataaggtgattttctcttaataactatgacatgattaacactataa

SEQ ID NO: 95325 - DNA, 66 bp, Glycine max
ttatctagctgaaggtgttatcttcgtgcatcgcgtacagctcgtacataactatggctacacaga

SEQ ID NO: 95326 - DNA, 288 bp, Glycine max
  unsure (1)..(288): unsure at all n locations
attacgtgggcattggcgtgatcaggctagggacccggggcaatacgctagatttgctacgcatgtggtcaagaccttgttctattaatgctttgttactgagaggagctgtttngcagagtcatacaaacaggcattctacttttgtgaaatctgggatctgttatagtgagcaaacagttcatcgcttttgtaaaagcgcgctgataatcagtcgaccgtggagtaaagtcagggtgaacatatcttgtgggagaataaactgtacaagatgagtactactatcat

SEQ ID NO: 95327 - DNA, 140 bp, Glycine max
  unsure (1)..(140): unsure at all n locations
tattcaactaggggatgatgggacgacgttccttgcttctgctgactgatccggatatgcattaaaagggaatgtaacaaattacttgtgttgagagctagacatangttatgctggacatggtttaagtaacaacacgt

SEQ ID NO: 95328 - DNA, 219 bp, Glycine max
aagaccctggagattgaagtaaaatgtcactcacagaagcttttttagagaacttctctcggtttaaacgtctttccttgcggtcggtcacccatggtatgttgccgccacacgatcgttttttgcatttggtagatttccgggatctatagcctttagtataacaagcataagcgcgattggtatatatgcgctctttttttctcttcgtctatgatg

SEQ ID NO: 95329 - DNA, 209 bp, Glycine max
tctggattcagtttatacagattgtctgagcttggttacacctgatcacggggcggccaggaaaaatgtgtgggctgggcagataggcatgtctgctggtggaaagcatcagactgtcatctgatgatcatgaccagagtctttgagtctctataggttaagctgagaggtcacctttaagaactgtaaaagtatgttctaatgtttag

SEQ ID NO: 95330 - DNA, 126 bp, Glycine max
  unsure (1)..(126): unsure at all n locations
acactgatgaacatgtcatttgcataagctgcaccaaatataaggaaaatgatcaattcaatcataanacatgtgtgtgtaataatatgacanaaagaaagatagagagaaatggatagtgtcaat

SEQ ID NO: 95331 - DNA, 91 bp, Glycine max
gaagattaatgagcgaacactttatactgctgactgcacgttatacactgtgtctacctaactaatgacggagttccttcctttgtttgtt

SEQ ID NO: 95332 - DNA, 148 bp, Glycine max
ttgtgtgtactatggacgtcactcttttctttagaatcatgggcacgagaacacgctgatcattagagtgagctatacaaggacaaaaaattttggtgagatacctatatcgctaccaaccttgtttgctttcagccctgtgacataa

SEQ ID NO: 95333 - DNA, 204 bp, Glycine max
cgtctattcttactggagctcttttattccgacagaactggacatatcaaaaataacaaccaattactactaaattcattacatggaccctcaactcccactacagctgctatttaactcccactagggcgttctagcctctcgagattattcactgtgaactgactcgctcgataatgctatataaggatgacccaatatctc

SEQ ID NO: 95334 - DNA, 114 bp, Glycine max
tgtgcagctgaatcctatgtacatgaaaggcactgagagagtatatgggtatcgtagattcttgtttctgcagtgacttctatgataaaaatgcttgctggatcttatatgatt

SEQ ID NO: 95335 - DNA, 344 bp, Glycine max
ccggtcttgagcactgagctcagcttagagcatcttcttttatatctctattgataatttcatcttcagtctaacttcaacaaacagaatgtgaaacttgttaaatggtgtcctggtgcatctgtaacttaaattatgtaacttatggaaatttctacgatgcagagatatatgtgggaacttttctgccgatggtcatagatcatctataatatatctgagtaagatatctaatcttacttgtcctcatagagtgatcccatgtctctgtcacttctcgtaaaatcaggaactgttccgagcccgatccaatttaataacgtgatcattcaccagacatgttc

SEQ ID NO: 95336 - DNA, 301 bp, Glycine max
agctcctgacctacggaacagaactcaacgcaactgaatctcgaactcgaactcgagcctgttatttttcgaaaattcagcatcaaaaaaggctaggcgactttcttactctccttttcaacaggaactgcgtcctgcacagcgggtctcgacacactcgagacttgagaccaatgctgtgtttgcccattctaacaccctgttttgtgcttttcaaacgactcatcgactctgttttcgatgagactcgtctacccttgctcgagtcgactcattccatcctgatcgggcaaccgtgcta

SEQ ID NO: 95337 - DNA, 161 bp, Glycine max
gtggtgagagagaaggcttagctaattggttactgcaacaaaatatcgatcaatgcacacactgagtaggatggtgacctcttttttgaaaatcaaaatgaaacccaaaaaacaagcagattttgtggtaggggttttttactttaacgacatttgagcac

SEQ ID NO: 95338 - DNA, 58 bp, Glycine max
tttaaacctattatagggataatactttttaatggctgcggttattcaaaactgctgc

SEQ ID NO: 95339 - DNA, 303 bp, Glycine max
tcacatttggcaggaggtttgcactttgtgtggtgtgagagattatctggtactgttcgttatgtctagccgctctcactgggggggtagttgggatggttagtgatatctgagaatgtctactcactgaccaaagttgggattgttaatgggcaggtgctgatttttgaggtgcgagtagtcataaaaaaatctgtgacgatgaatgagacacttggatatgcgatgcccctattgaaattgatctctccactttacattgcctcacttgacccccaccagggctttacacttcttctttac

SEQ ID NO: 95340 - DNA, 365 bp, Glycine max
  unsure (1)..(365): unsure at all n locations
aaatctaaaggtatcacacatgttgcaagtgttgtaaagctggcctatgaaccaagcgcatcactttgactggcaattctctaactatcagtgcatttatgggtaatgacctcctaaagaactattgcatgctttaatgggtgagaagacctaaagatgaacatccatatgtngaagggttgctgaccatacttaatagactccnttcacttagacagattctcttcaccttcattnttcaccttcttctccaagtaacactaagtttgataccatatggatgggcttatactgcctgctctaatgctacataaagaaaccgtgatactgcgagcaccattcatcacagagttgctatgaatatc

SEQ ID NO: 95341 - DNA, 121 bp, Glycine max
cactagtcatggtccataattaagtatctatctgtgttactaaaaaaataatcaagttatagattagcttgttactttcttaaaagaatattaaattatttttaatatgatgtttatatta

SEQ ID NO: 95342 - DNA, 86 bp, Glycine max
aagtcttgactaacttctcccccttatactaatactctaaatatccgtaaataccactataccactcaactatactatattttttt

SEQ ID NO: 95343 - DNA, 196 bp, Glycine max
atccgactgaaaacattcccttaaatcaaaacaacttaagttttggatgtgttaactttgtgtaacaaattattagaccaaattgaagcggtgcatttcactgcaaatattctctgtgtagactaaccattcttacaaaagtgctttagctgtactatccagaacatccaccttgtatatgttacgccctttctaa

SEQ ID NO: 95344 - DNA, 53 bp, Glycine max
ctaggcctaactactaaagtgctgctcctatcacctatcacggatgtcgcaca

SEQ ID NO: 95345 - DNA, 60 bp, Glycine max
aattgactacttagcacctgacttaaatttacataagtatgatgttatatctactgctga

SEQ ID NO: 95346 - DNA, 339 bp, Glycine max
  unsure (1)..(339): unsure at all n locations
ctgtacgtatcaacgacctgtcttatgcaaccaaagtagtaccgccactaatcgtaatccaatccgaaaagtaagagggacatttcacaagcactggatgacgtgtttactgacggataaaactcccatgtagcaagcangcatgaacccactcgcccgagaattatggctctcgtatgcacaataaactatggcctataaatctagaactgtgcttaactgcattcactctttgaaaatgatgtcatgtttctcaagctggcacagcctcccttatctacactgtgtgccgctgacgacgagcttacttatgcctggctgcccaagccagaaaaattc

SEQ ID NO: 95347 - DNA, 276 bp, Glycine max
tttctgcaaaaccagacaccgatttggcttttcttcaaacaagatacgcgatttggctcttctgaaaataagacgcgaatttgtttcttcttacaggtcagaacgctgattttgtccatcagtaagtacgcaactgctaccatgagctctggcagaaggcttatggtgtgacaagggctctggcattagagctcctgaaaacagagctctggactgttaagttcagtaaatagccgctggcgtagcattcacaaactgggcttcctatcggtatct

SEQ ID NO: 95348 - DNA, 186 bp, Glycine max
ggacttagacggtcctgtttttgactatctgcttctgctgtgtcggaatgttcgtccatcccactacaccgagctaaggaagcggggctagaggacatcatatggtgctctgccgttcgcgaacgcgcctgtatgatcgcacaacctggcgcgcgcacattagtgagtattaattgcttcgttttc

SEQ ID NO: 95349 - DNA, 279 bp, Glycine max
tatccttgagtgtaggcatggctcactatagcgcggtgcccttgggctgaggctacagagagatgctcttactgtaccgaagttcatttgccgggcgatattttatttgctaggcatacatcaaaactgacagtattatagtacttgaatggtaactgctactaccaactttataaactctatgtatgtcgaagccccttaatgtccctgccttgtgataataccttctctcacgatgtgagcgttacactcaaacattatactgtacgtattatcacg

SEQ ID NO: 95350 - DNA, 192 bp, Glycine max
taactattgctctgagtgtatcttaatggtgcaatactaacagatttcttgagctgttaatgaacaacaggcattaactcttggtcacttggtgggtgctttgttattttttctgactcatgattatgccataatacttggtatctatcaattggtctgcttgtttggttaggtgcacatagatgaaagaat

SEQ ID NO: 95351 - DNA, 421 bp, Glycine max
  unsure (1)..(421): unsure at all n locations
atactacgctntgacacaccacgaactccaaaggagtaaaggtgggcgtagtttttctgtgttggccttgttgaggcctgcgatgatgatgaagacaatgacaattaagtgaaagattgtggcaatgaaagttgaagatggaagagcctttggtgctgtacactgcaaggatagttatggctatgaggactccaatggctatatggtcaagatggccatagttggggttcatgttgtgggctattatacgaaagtcatcanggtgtttgccacaaagggtggcgaaataagaggtccatgaccgagccacagcagcgccgcctattacatactcgaggaggatgtttccggcagctatgtatgccacaaagtctcccagttcgactcttaagtacgcaaatgatccgcctgacacaaatgt

SEQ ID NO: 95352 - DNA, 468 bp, Glycine max
  unsure (1)..(468): unsure at all n locations
cagcagatnttagtcatgacccactaacctagaatcaaaataacttaatgcgcatattttagtgaattaaaataacttaatggctgagcgtaactgaaatagtggcaaccaaaagtcacccccaacagccaacaagtcaaccaccatttggtctcccaaaaggctgatgcctaagttgccaattgggcccttattacaacttgaactaaacctaactaaagcccttttagttgattaacccaaaacatatttttggtcagccaactttacaaggattgggccattatttagacaaactaaacactctaaaattgaaacaaagnggngtcatttagtcctcctccatttgggccatgatacaactcacaaccttggacttttctccttgaaacttgngcttgtattcaaatagtatggacaacacttagctgaagagctctcttggcttttcttgctctagcccttgtc

SEQ ID NO: 95353 - DNA, 282 bp, Glycine max
  unsure (1)..(282): unsure at all n locations
aaatgagattggacttatcaaacggtatgctgccctagtgacactaatgcaatttatgcatggagtangtagatatccttattaacccaagttcaaatgtttatattggatccccagcatttgcgcggatattacaggcaccttaggaccatttcaaacatatacaagatttttaaaagtgagtttttaaactgggtttacaacacantctttccttctctttatgaatctttcgcgtttttggttctaaagtccacacaggtttggagtacaccccttcag

SEQ ID NO: 95354 - DNA, 489 bp, Glycine max
  unsure (1)..(489): unsure at all n locations
acactttaatactcaagctctcgtatgtgaaatcaagtgcagccatntcccttaaggtcctctcacggagtggaggttgtgccatgttctcagaatgttcaaaatcagaatgctcaaaattataatgctcaaaatcaggatgttcaaaatcaccaataacagaatgcacagactcactagtaatggaatgcttatgatgatcaaaaggtacaaaatgatgccttactaatctatgaaatgtcctacctatctcaggattaaagggttgaaagtcatatggattgcctctagtcatacactacattcaacatgcacaactagttgccttctcatgtaaataaaggtgtaggtttgaactacagctaccctcaaatgatatccaaatgacttgaaattttgtgagcaacattataaaattatgagaagatagcacataataattcaagcaaaaattcaaagtctaactatggaagctaaaaatggtatgtt

SEQ ID NO: 95355 - DNA, 187 bp, Glycine max
ttgattgacactgttcgattcatggaatgcagtgagacgcccgctttccacagctatgaacttacgtttaaccatgtggctagtttaagttctttggtagttggcttgtttgattataacaggcttctattgtctgcttaccatctatattctgtactcttttaacgaatcatacagccccagctat

SEQ ID NO: 95356 - DNA, 489 bp, Glycine max
  unsure (1)..(489): unsure at all n locations
acactcttaatactcaagcttccatggcttgaggttagtaaaacgcactgtgtgacaaagcttcactttcacttatgagtttccattctttacttttattctgcgtatgcgtgtgttttgtgaatttttgtagaatgagaaagttgagaacataggtaaaggaaaatacggcgtcatttataagggtcgcgatcgtgtctccaatgagaccatcgcgttgaagaagattcaaaggggttgttatcctaacgcaaatgtttcaggttcgcgcttttgccctaagattctatttcctcttcacctcttctattttattgttattgaaaaaaaatggggatttggtgagagtgagtcactcttttgggttctttaattttttttttgcaagataagaaaaatagcctttccttttttttatttcttanggtttcgcgtcttgcatttttcatttttttcatggnntttggctggtttggtttgcgatttctc

SEQ ID NO: 95357 - DNA, 431 bp, Glycine max
  unsure (1)..(431): unsure at all n locations
tgacatgtggtatgcatccatgcaggtttatctaaagctagattggtttacatgcacttatactgcacatactatttgttggtttgaactagttacctatacagntaattgtattttgtttgatattccaatcagatgatatatgctccacatcttgaagatgctcactattcagaaccatatattgcatatggatattttctttatattcatccatcattctagagagattttatattgatatatttgtctttttatctgattcattcaatttatagttttatacaattgtcgtatgtataatgcggccatcaagtacaaaatatgattaccatttactgcgtatgatattcttggcagaaaatgatagaagattctgagatgaaacaaatagctgagtatgaanagggagataaaaatgctcttaatta

SEQ ID NO: 95358 - DNA, 396 bp, Glycine max
ggggcacaccctatttagatcagtgtagttgatggacactcaccaattttcgttagcctttttgaccatgacgaagttggcaggcaaggtggaatatctgacttttctgatgaagttgtccttggggagcttatacacttcttctcttgaccgcttgcatcaatcctatcccatcttcttcttcttctgtgatgctagtttggcctaaagacagatggcgagcttgtggtagataatgctagggtggattcctgacatgtctgatggctgccaagcaaacagatcccttttcctgtgtaggacattagctatgcgtctgtgctcatggctattgaggttcttgttgagctacatacacgagctgagtttatgactgagctgcaacttgataagctc

SEQ ID NO: 95359 - DNA, 216 bp, Glycine max
  unsure (1)..(216): unsure at all n locations
cttgaattcaactccctcaatgtgactgtgtcatatctagagatagctatattccctcaacttatcctctaataaaatngttagngcgaaaacacatcattatatgtttaactgcaaccatgatgacaataataataggaaagatgcaaccattttctgtcagcctccggctactcagactagcaccatgaattcatatttgaaatcttcaagcta

SEQ ID NO: 95360 - DNA, 398 bp, Glycine max
  unsure (1)..(398): unsure at all n locations
ctanaccttctacaagtagcacattttcaataggagtagaggttactcgtcctattntgccgactccaatgattnttccttttgtgttgtcgccgtatgtaacatatccacctttcttgggggaaatggttgtaaacttggattcatctcccgtcatatgcttggaacatccattgtcgatgtaccacttcttccttatagattcttcctcgttgccttttgagattttgtcatgagacacaagttggcttggtctttatcatgatcttgaaatgacttcagatttgatcttttcctgaaattacttttgaaaatagaaaatttaaagaggccatttatcttgaagttgtgaaacttttctcaagaaaccttctctgataccacttgttggatcaagt

SEQ ID NO: 95361 - DNA, 64 bp, Glycine max
cggatctctagcactgcgctcactgatgaagactatgcacctaatgtgatgtggttactgtcga

SEQ ID NO: 95362 - DNA, 481 bp, Glycine max
  unsure (1)..(481): unsure at all n locations
tattacggacctatgaatctcagcttggcgaattcggatataattcaatgaaacgaacacgtattttataggaaattaaatagcaaagttatagatactaggctgcctcctaggagcgcttctttaatgtctttagccggacgcgagatgatgatcaaccgatcatgggcctagcacctattcgtacttgcccctaagtttggacaaaggaagtggcgtcctgcaacaaatgtgaaacaatactacaagatgcttgcattaactntcacttacccttagtgcttatctcaaattggtgtggtgttgaccatcactcaaaatgacccttcattcatcctccgatttgcaggatcccggatgaaaagatgcaaatgcatgcatgtttatgattaaacgttaaatacaacaattaaacaggtgttatcgtgttcaattttacttaaatgcttacgacaccccattgatcgagccaaatggctct

SEQ ID NO: 95363 - DNA, 457 bp, Glycine max
  unsure (1)..(457): unsure at all n locations
ggccaaagactacatgtttcctgcanaattagctcacggaacattataagcaggttgagcatttagttccagtcagaaaaaaaatgactaaaaacaaggaaactcccactgaataataagagaggaagaccccattcagataaacagtataaacatgtactttatttgaggaaatattgaaacataagctccgttgactcaaatgcattctaaattaagccaaatggcatttgaatatatgtgtggagaaacaaagcaaaaatagaattttgacaatgcaatgacagcaatcaaattaatgaattattataagaatagctaccgcttaaactgattntaacttttacagaggtctgtgttcattaggtttaattnttagcttataaaatacggcctaaaataaggccaaaacagattatatgggtttcaagggctgttttaacatttcatccaaaca

SEQ ID NO: 95364 - DNA, 323 bp, Glycine max
ttgtgcaacaagcgtaaggtctggctcgactccattcatttagcaaaaatgtcagacttaagtgtataaaataacctctcttagtgaaatagtccacgacatatgccttaaaaaaacctttaaggtgttgatggacttggcctatcttagctctatgatttatagtaaaaatattattgttcacatgacatttaatatgatatttaatctatatgcaccccaaaattatattagtggttagcgatttgaatcatttatgaggttgaaattagttaatttctactagcacagcttattgagtagtaagaatatggggtctcttc

SEQ ID NO: 95365 - DNA, 165 bp, Glycine max
aagaaatactaatgacctagcttgatctattgtatataatactattttttccttaataattaataataattttactcgttcttgtaaataaatacatagcacatgttcaataagttaataggactttaagcatcatcaaataataatagttttttgctgtattat

SEQ ID NO: 95366 - DNA, 215 bp, Glycine max
gacctcctacacacttcttataatagctaagctcacccatggtaaaataaacatgaaaatacaaataatagagtgctttcttcaaagactactcaatagaatggccaaaatacaaggcccagacgaatgaaaaacctcttctaatatctacaaagataatcgggctctacttagcccattagctctaattctaccctcagagctatgataaccct

SEQ ID NO: 95367 - DNA, 184 bp, Glycine max
atcaccaccgcttagctgaactgattctagcgcactctgctcacaataagactaacacacatgagtggtgtgtgccctgacttatgtttgattgcttgtacatacaggtggatcatcaggtaaaagagaagactaatgcttgtatatacaaggtgacatccgctaaatgagactgtggagcttg

SEQ ID NO: 95368 - DNA, 474 bp, Glycine max
  unsure (1)..(474): unsure at all n locations
tcttatactaagctgccgctgctgccagcagcaagtgttctcagatcacagcttctgatggatcttggagggcccaggggcctgggttctatttacaaccccctttttacttaatggaccccccctttctatttttttggaaatcttttttccgaaacgttacgaactttacgaagttcgtaacgatacttattttttctttcgcaagggtacgaacccttacgaanntatgatttactcttttttagttttcgaaaaagttactgaaacttatggattgcgcaaaaacacctcttttcgacttccgccacattacggaatttcacggatcgcgcaagcctgcttcctttagatttctgagacgtctcgggacttcatttattgtgcacaaaggacgccaaagatctcaaagcggctaaccaaagattgcatgtcatcaagtaataatccccggacgaaattatggtatgacag

SEQ ID NO: 95369 - DNA, 187 bp, Glycine max
tgaactctgaactttgaactctggactactactcccccttatactactactctggagtctggaatctagagtgactactccccccttatctagtacccgcaatcagaattaaaagccttcaatctaagctgatcaggtaccttcttaatgcaatcagccaaagaaacattacttcagaatgacactg

SEQ ID NO: 95370 - DNA, 496 bp, Glycine max
acactcttaaactacgctcctccactttcctcctacctagaacttcaaaccttcgattctcactcaattcttcacctaatcacgtcccgtaaagcccaatcttcctctttttcactcctctttcacttccaccgatcaaaatccagaaaaacttcatcaaatggcagagccatcaaagaagagaaagggatcatcctccaccgctaccgctgctgcccatcgccgtcacggcccatccggagcacccacagcacctattcctccttctttgtcatctccaagatcatcaacactgttttcatccgatgatcaacgtctacggtacctttctcagttttcttctagaataatcttagaccctaagtacctaggcgtagagttctttaatgatgaaacgtttgattgctatcaagtgtttcaaaattctggtcttgttgatttcatgtcatttaaattgccatattatcctgaacttgtaaaggtcttctactgcaat

SEQ ID NO: 95371 - DNA, 178 bp, Glycine max
tgctgcatccatatgtgcagttgtggacgtcaccgaggttagcaaccggtactcttatgcagaacggagtgtagttaccccgcgtgaaacatcgagaacggcactcgtaaaaagagacccctcctatacttaccgttggacagatgccatcaaagtcatctgttgcactctcatcctg

SEQ ID NO: 95372 - DNA, 472 bp, Glycine max
  unsure (1)..(472): unsure at all n locations
tcggtgatgaggtgaatagagaaagaacttagaaaaattntcagttgttcacttgctaagcacaacacttgcgctaagtgccaagtcatcacacgctaagtgagctgttgcttgcactaagcacttggacccctgactagtggctagatggtagcgctaagtgcgcttcactacactaagctcaattacctctctggaatctgaatttcttgaattaggcttatcgaggtgatgcgctaagcgcaattccctctctgttttggaaatctttggattaagaagcatgtttatgcactaagcccaccattggtggctaagcgcagattgtaggaacaatccaagctgtaggaagcgctaagcgtgtgtcctcgcgctaagcctaaaaacctctctggaatttgaaatttggtgaatgggtttagcgcgagaagtcatgctaagcacttaggccttaaaacctaaacgtcgtatt

SEQ ID NO: 95373 - DNA, 469 bp, Glycine max
  unsure (1)..(469): unsure at all n locations
ctggcttctacgggtgacctatnggaggctcccaacttacttccaatgaaaggccttcttgttacaaaatttgaaagcaatgaaggtaagtaaattgtcaattacaaaattataaaaaggtcctcaattttggtggttgttctttctttggtgattcactcaatttggagtgcttcttagcccaatagctcttaaggtggttgaccccttgcttcttgactcaaattcttcaagggatgacatcaatcctcctttccaattccctatatggcaactcacaaacaaggaaacaaagagacaagaaataaccaaagacaaaaaaaaaaatgaaatgaaagctaaaccaatggagttttaacaagacaatttttcaaggattattcaacaattaaagcaatgaanaggacatagaagcaagctaggactcaaagagaaacttataatggctctagagtagagtaaaaaaaat

SEQ ID NO: 95374 - DNA, 202 bp, Glycine max
gcatggttgttaaagttggggtactccctttctccaattatattacgcacagataaatggtgaagggaaatcatatcttctctccaacatagaatggcaaagaggaacccctttatttgtctatgctaaccaccacctcaatacaatccaataacacttcgcgcgaacctcattgccctaaaggacctacacagcaataatg

SEQ ID NO: 95375 - DNA, 463 bp, Glycine max
tctaggacataactagccatgccaactatcttgttgtgagatcatgtggcctgtgttttactacatggtatgattaggatctttaggtccaatggatcttttctttggaataaaaaatgtccaaagaaaacaatgcttatcaacactaatgagctcttattgacacaaacaagtccatgttggttccgacattcaggtatgaagggttgcaaccagacactgaaacatctgcaaaaaagcaagaatgttctatcatctttctgtcagaaaatatgcccttaatagttagctcttacatatacacataagagatgcacatgctcgtgttatgttatttttttaaacagtgtgtagaaagtacaagtccacggaagtactgtatattaacatggacagggacgaagatacttacggtttaaatgacaactaacaacaataattatagactattagatcatatctg

SEQ ID NO: 95376 - DNA, 352 bp, Glycine max
  unsure (1)..(352): unsure at all n locations
aaaacttaatgactgagtgtaactggaatggtgggcacccaaaagcaccccccacagcccacaaggcagccaccatttggtcttcccaaaggctgatgcctaaggtgccaaatgngcccttattacatctttgactaaacctaactaaagcccttttaaatgattacccaaaacatatttttggtcagccaactctacaaggatngggccattatttagacaaactaaacactctataaattgagacaaagnggtgtcatttagtccttctccatttgtgccatgatacaactcacaaccttggactnttctccttgaaacttgngcgttgtattcaatagtatggacaaca

SEQ ID NO: 95377 - DNA, 390 bp, Glycine max
acacatgattttaaacacaattcatggggctccaaaaaaggttgagaatggagaattgcactaagcaatcactacgcatagctccaaactcgaaggtggaggacacatgaacgaaaaagcaattcatggggctccgaaaaaagttgagaatggagaaatgcactaagcaatcactacgcatagctccaaactcgaaggttgaggacacatgaacgacaacgcaattcatggggctccgaaaaaggttgagaatggagaatttcactaagcaatcactacgcatatctccgaactcgaaggtggaggacacatgaacgaaaacgcaattcatggcgctccgaaaaaggttgagaatggagaattgactaagcaatcactacgcatagctcc

SEQ ID NO: 95378 - DNA, 434 bp, Glycine max
tgaacagattaccccagttggctttgtgttggcctttgacaattatctcttctagtcatctaaggtccaacatgctatggattctgccaaggtctttcttcagctgagtttgacaatcctggaagagaatggacaaaggcaccaaaaggcgctaaacaaggtggtgtcattggaggctgagtttgccaaatggagggctactgctcgcatagtctagcaagtggagtgccctaaggtagctaatgccatcttcgtatttgttgaaattgtgaagtcgaaccaccaactatcttccaaggttggcagtgttttgaccaagttgttgtgctccaggttggatgatgatgaaatgtttgaacgttgcaagggcttgcagaaagagaaaaatgacttggcttgcagggtgaagagcattatgatggagaaggatgagc

SEQ ID NO: 95379 - DNA, 293 bp, Glycine max
ctgcttttttgggatcttttcgtaagtacaaactacaattcgaacatcttgttcttccgaatgtacagaacctgggatacaaacatccctttttactacggatgtacggacctactaatggcacatgttcattgattcggggtacgacctacaatgtcatatattctttgtttaactggccgaattacaatgccatatgggcagcccacaagccaacaaattgattataagaaggtccgacaataggataacctatgccctaatactggtatggggagtggatgacataatat

SEQ ID NO: 95380 - DNA, 409 bp, Glycine max
  unsure (1)..(409): unsure at all n locations
tggtcgaagccattatttcaacccattgtatgaacgattgattgtacaaacaagtgaaagaaggagactcacaacaataaatgataattgaaaaattaaataccaaattgtacaacagatagttttataatggctacttttgtaacagttagttccataacggctaattttataatgactagtttcataacggctagttccataacggctagtttcaaaaattttaaaaaattgaacaaattataatatgattaaaatgaaaaaacaaatcaaacatgattcctaaaatacaaattaaaagatggttacaacaaattataactacccaacaaataataactagattcttaacttcgaattattttacaaaaggcttcttggtcttttagntgagtctcagacattgtag

SEQ ID NO: 95381 - DNA, 193 bp, Glycine max
agctgatttgtaaataaaaagcctcacaggtggtttctcttagtacgtttgttggacacaaactatgctgatgaaattgggagcgctcctgtctcgtgaaaagtgtgttcgtttgaagagaactactgctccggtaagatcttgattacctaccatatgcgtctcttatacatcgctgtgggacaatctgtgt

SEQ ID NO: 95382 - DNA, 343 bp, Glycine max
  unsure (1)..(343): unsure at all n locations
acttcatgagtctgtcacttttatatttggtaacaagaatatctacaaaaacattttaatacaggtagcgtaagtcatactctaattntatagaaattatataacaaactagaattacattgcacatcattacctaattcaaaacaagtcatccacatgcaacaattatcaccttcaacattgtaaaacagacagcacatttctatatctcctagatccggaccaaatagtattccttcaaactccttcaaatttaaagtaagaaagtacatctttcaggaatataaaattaaaagccaaggtgtggattattctggcactggctttaattttattaatacat

SEQ ID NO: 95383 - DNA, 225 bp, Glycine max
tgggtttagtgatactatagcttagattcctgagccgaacagaatgaaggcctcctgatgctgaagactaccaagactgtaagtgaagttatggaaaaagaaaaaaaggaccaatagaaaagaaagtactgtggtcaattattaagtccggtcctgtttatactgctctgagtttgaacttgacttgaaatctgactactatctcctatcacacttgactctgaa

SEQ ID NO: 95384 - DNA, 379 bp, Glycine max
  unsure (1)..(379): unsure at all n locations
aacctgtgatttcaccaaacaaaaataggggtgaaagtcaaagaanattgaattacactaattaagtttttaatgataaaaggaaccaagagaatatgattgatgaaaaaagaaaaatttgggtttaaaggtgattggaaggaagttagacctatggagtttgtgttagaccctacccattacaaatggtgatctattcatctccttcaaagggtgcaagttgttgtatattctgtgagacattagtaacatggtgtgatgtccttgagtctagataccaattgcttgattgcattggtgcaacagtagcaatatgagcttgagagggaatggaagctacaagtgcaactttttgcacatagataggattatgatatgg

SEQ ID NO: 95385 - DNA, 219 bp, Glycine max
acgaaatcttctacttgttatactgatgatatagatagtagcccgtggcggcttcatgaatatttttcggctccccaaattgacaaacctcactgcataggataatgggcgcactccccccggcacccttttcaggactgatcaacgtgctctagtataacccaaagaacgcttgcggacctaatgaagttactactacttttgctagcacggtcgcac

SEQ ID NO: 95386 - DNA, 117 bp, Glycine max
  unsure (1)..(117): unsure at all n locations
gtgtgaaaacagattggctcttactcattgagtggcacanggatgtggttatgcccttgtgatgtgaaactgatgtcacatctccgaccgcacctatcacatgtgatggtcccatat

SEQ ID NO: 95387 - DNA, 344 bp, Glycine max
  unsure (1)..(344): unsure at all n locations
gagaggatcaataacaatgcctatatgttggacctcccagaagagtatggtgtctacatcacttttaacatntctgatgtaattcctcttgcacgtggagctgatattgatgaggaggaacaaacagatttgaggtctaatccgcttcaaggggaatgggatgatgcaattcctcctaggaagggaccagtcacttgagccatgagcaagaagctccaacatgattgtgcttgagctactgaacaatgccctagggttctcatgaaccttaatgtagatgtctgagcccataggccaacgttgggtgcaattatctttggacatattatactaggatgtcatta

SEQ ID NO: 95388 - DNA, 472 bp, Glycine max
  unsure (1)..(472): unsure at all n locations
cttgatgcgttatgttatgcaggatctggctctggaggataagtaagttcattcattacacacaactggaaaatgggccggtgatccagatgataaaggtagttgttgtttagtatagcttcaatatgctctngctacacataaaatgtgaaatggattattacaagctattattagtattttaacaaaaaaaataggatggggacatttgcatttagattaatgatttcaatgtttaaataaatggattctcaacatctaacgctgaactagggttggaaagaaagacatctgactacaaaacatccatgagccaatgattctgttagcatatctgttaggtatgataacatttcggagttagtttgtatctttaaaagcaaaaattaatggaaatattgtgttattttcatcatatagaggacggttgtgtggttaatgcagaatacacactataagagagtatattact

SEQ ID NO: 95389 - DNA, 478 bp, Glycine max
  unsure (1)..(478): unsure at all n locations
ttgaaactaagcttaagcctggccagactcttgtgcatccagaggcttctcaagattaaatgccaaactcccttcaataaatctaatttcaagctttaattgtgggttggtccgtgctcgcgtgcttagcacaaatcttaatcgcttagcgcgcataagtggattttggcttagcgcacttctctcgcttagcggatgagctgaaggggtgcacttgatgacctggagcggtgcgctcagcgaacctgacagctcatcttcttctggattcttcctcgcacttagccactgagtgtcgcacttaatgaatgctcgctaagccagcagattggcttagcgagaaggtgaaaacaacacttttgccaatttgcctaattaacctgaaattgagagtagattattattaaacacaaaanataaaagtataaattttctattacctatatttaacagagagtacttattatattacaaaaca

SEQ ID NO: 95390 - DNA, 442 bp, Glycine max
  unsure (1)..(442): unsure at all n locations
ctttggttggatgtgattggagccatgtcnttgccttacctgccaaggagaatgggaaatctcttatgtagacaaatntagcatcttcattagaagctcccatggtactgcagagctctgtgaaggtagacacatgcgtgtatggatcctcatgatccattctagcaaaggggtgtgaggcaatcagactgagcagtgctggcttcaattccacaaccttgttgctgaaaggaggactgactatgatgttgtaatgctttggtccttgttgataagcataatcatcaagagtcctccatggtggtctatttccttttcctcatcgatcaaccatgttatcaattacaagtgacttttcagttgaaggaaaatgagtagaagaagattcaccccgtggtttagcggtttcatgtttcttgttcttcctgttcattctttcaat

SEQ ID NO: 95391 - DNA, 384 bp, Glycine max
catcatgtatatggacttttttttaaaaatatttcacaagaatgaaagaaaaaactttaagttacatacactctacagacatttaaacctatattttaagtattgaaataaatatataagctttcaatcatcttttacatattcccaacacttgattgaagaaaataaacatgaaaatgacgttataacttcttttttgtaagcgagaatgctagatgaaatatattgttaagttttaacaagatgaaaaccatcattcttgtatgtctcttgattgagagacacagatcgcgtgtctatctgaaataggagctttgcgatttattggtatatgctccttgtcgcatatataagagaaaaattattcacattaattacatcaat

SEQ ID NO: 95392 - DNA, 196 bp, Glycine max
ctctcctaaatgaaggctaaagttatgggtagtcgaagcctctaacactatatttgttctggcataacagtcatgaccccatagttgatgtcacgtctatgatgacatgtattaatacaacatgcacagattagactgggaaggtggatgaacttctgtcattattaactataccgtgattgccgtcaagacttat

SEQ ID NO: 95393 - DNA, 461 bp, Glycine max
  unsure (1)..(461): unsure at all n locations
tagcanatggacctgggtgttgcccattttcatcatatcttcctttatacttatcacctctatcatatcttataattttcacatntatgtctaatcgccattttacttcattgtagtaaatttctaaggcatccgntgcctaagaaatctcgggtagtaagcagacataaccgtaacgtgaataatcatcaataatggtgataaagtatcattcctttccaaaagaactaacatcaaaagggccacanatatcagtatgcacaatttcaagaagctgagtgcttcttgtagctcttttctttgtacgttttgcttgtttttcccttaatacaacccacacaaatatttagatccataaaatctagataacgaagaatctcattntttattaatctttccatcctttctctagagatgtgacctaaacgtttatgccacaagaaagcagatcattcattcac

SEQ ID NO: 95394 - DNA, 455 bp, Glycine max
  unsure (1)..(455): unsure at all n locations
tatgtcagctaatttctccagccaccacttatacttgtagatacaaatggacaacatgcatgagaagacaccaaaataacacgaatgaaaatataataaatatgacataattgtaatagcatcatcaccttccatgttcttcttcttatgttccataaactggcacagttctaataagagagaatgtctcttgagctagcagtgacttcttggatcaaccttgctgcctttttctatgccacatatatcttaccaaactataagcaagttggattccaatgtagtttgattgaactttntgatatagtttatattgacttcggtctctaaatgaatttttttatttaattttagtttcttgataattattgatatatttataaaaaaatataattattttctcaatttttcaattatttgctctaaacatataactataaaattatttgttattt

SEQ ID NO: 95395 - DNA, 459 bp, Glycine max
  unsure (1)..(459): unsure at all n locations
ctgatgcctctctgtataaccctntttatctttgggatctttcctatatcttctagcaacaagtcaagacaatgtgcagcacatggagtccaaaatatttttggtctcgtgacttgtaaaattttacctaaaaagaccaaaatcaataaacttgtatgagttgtgttacaatttaaagttataactacaaaaaaaagaacttcattaagtatgattgaattctcacccgccaacacataattacttccattgtccgtcaccacttgaataacattcttgtctccaatctcctcaacaaagctatccaaaagctcaaagatcttctgaccagtcttcatgtattcagatgcatccacactcctcacaaattgtgttcccaacgaacaacttaccaaaaagttaatcagagttctattcttcctatccgtccaaccatctgacataattgaacacccatat

SEQ ID NO: 95396 - DNA, 384 bp, Glycine max
ttatacaacggaagaagctattgtctttcacagtagtaatgtcaccgttgtgtgataaggccttgtgtcgaatctgaaacactatactccattctactacccaatataaaccatcaaccacagaaaagtcgctatgtaccttagttgacaaatatcacaccagagcagatcacaggcgctaccagcactgatgaatatcgcactgcacaggcactcgaatggagtaaacgccgaaagcaaccatgaaataaaaaaaatacagccttttatataagaaaaaggttcacgggcattttctggtttgtaaaaaattgctagatgcaccaacaatgttgctgggtgcccctagcaattcctcaagtctattctcgcagacccaagatg

SEQ ID NO: 95397 - DNA, 198 bp, Glycine max
  unsure (1)..(198): unsure at all n locations
gcttctagccaaatggacttacctggaatttattgctntgatagctcttttgagccatgtatcctgtccttggttgaagctcacttccagccttgagtgaaaaaccatgatattaccatatccttaatgaatcttggagctttggaattgttttgggaaataagtgtgggggcgtttttgattcattggacaacttgc

SEQ ID NO: 95398 - DNA, 237 bp, Glycine max
agccttgtcccttgatatatgtgagggactcatggacactattaatgacatattccttgggatgaaggtagtggtgccctgttttcaaagcccgttctaatgcatacaactccttatcataagttgaatagttagaggtaggaccacttaacttttcataaaattagcaaatggatggccttcttgcattaacacagccccaatcccaacattggaagcatgacactccaattcaaa

SEQ ID NO: 95399 - DNA, 336 bp, Glycine max
  unsure (1)..(336): unsure at all n locations
tctagccaaatggacttaccttgaattaattcctttgatagttctttttgagcctgtttccctttccttgttttgaagctcactacaagccttaaatgaaaaaaccatgatatcaccatatccttaaggaattttgtgagcttggaattgttttgggaataagtgtggggggtttttgtttcattggataacttcgtttgttggctatgcttcatgatgtattttgggcgatacttgatgtatattgtatattggntaaatgttggacatgctgaatcaaatgttgtttctcaaaggctatagagcaaaaaaaaaaaaatcgaaaaagaaaaagaa

SEQ ID NO: 95400 - DNA, 449 bp, Glycine max
  unsure (1)..(449): unsure at all n locations
ngaacgatctatcactccacatgcataagattcccccagctaagttatttgcctgcggcttctcccatgaaacatcaagatctccccacattgtctgacnaccacgaatttctattgtgttcctcttgatttcctataaacatatcatatctgcattttcttttttaactagtcgccttattgctgcccacttgacccccctccctaatcctctcacgttgtaagtgataatattcatgatgtactggttttgttcccccctttctctgctaccttgctgtctctttcctccatgttcatgaatttctccaccatttcctcctaattttctattccagatacccccagctgttttgctaactcccataattctnttgcttcctgtngcttcgtttgtgcttggtttctgctgaccctgtctcctccactgcatgctggtccaatgactc

SEQ ID NO: 95401 - DNA, 115 bp, Glycine max
tcacagctatcactatctttcatatctctccgctaccatatgtggctacgagctctaccgaatgttacgaaggaaacacctttaagttctatacctgatgagaatgtttacccca

SEQ ID NO: 95402 - DNA, 473 bp, Glycine max
  unsure (1)..(473): unsure at all n locations
gactctnggcaatntctntanaactagtcacttaaaaagttgtgactnttgaaagaatctttagaaacaagtcacttaaagaattgtgacttttggaaatgtatttttcaaaatcagtcactggaaatcgattaccattaaggtgtaatcgattacacatcaatagatgtgactcttcattttgaattttgaaaattaaaacgtttagaagctctagtaatcgattacacaagtttaaaatactttaaaattgtttaaacataagttgtaactcttgaaatttgaaatcttaacgttttaaaacactggtaatcgattactatcttctgataatcgattaccaaagagaaaaactctctggtaatgattttgtgaaaacttcttgtgctactcaatgttttgaaaaacttttttagtacttatcttgattgagtcttctcttgattcttgaatcttgagtcttgaatcttgat

SEQ ID NO: 95403 - DNA, 220 bp, Glycine max
cagagtgtctcaacaagcttgagatcttgaggccagtggctgtgtattgacctatttgtaaacaccctgcctttttggatcttttcgaagtacgaactacgattacaagatctgttcttcgatgtacgacctgcgataatatatccttttgatacgatgacgaactatatggcacatgtcttgattcggggcacaactacgatggctatcttctttcgtc

SEQ ID NO: 95404 - DNA, 471 bp, Glycine max
atcgatgcggggtggctaacattccaagaagacggtccatatgtaaagacaaatttgcttgccaatcatggaggatcgatagttaacgcaatagaagagtgtggactgtagaggttgaagcaaatgaaggacgtggtaacctctaggaggatttgaggcgctgcaagaggcgggcatggtttcctttgatgggcacaaggaggattcttgtttgatgcatccgggtgcatcgcatgacatggaaacatgttcaacggccgaggagctgttacagcgaatgatggaccaaggtcggtttgaaattggtgttgcgagcaaggaagagcaacatgtgtgcatgcaatcggcagacaaaagcccaagcaaacccaaacctttggtgatccacttcaccagagatactaccttccaaaaaacccaaggctctcaacctatcccgagaagcaagcctatcacattcccttacaaaag

SEQ ID NO: 95405 - DNA, 472 bp, Glycine max
  unsure (1)..(472): unsure at all n locations
acacctataatactcacgctngcatacatccttatctatcacttccttagtctcttgaggcttagcatatctacttngttctttttcaccaattttctaattgaagcccacattaatcccctcccgagcccctttatattgtatgttatgatcttcatcaatcactttcattatttcccatcctatgagcctctcccttatccctttcatccatactaactagtttgcataccattgttccttcctggttactacaatttactcccaaattttttgccatgtcccaattaattgttgcttcttttaccagctcacaggttttaggacttcaaactaattttgatgccactgtaacataattttcacagcgcttttcctcccatccagcaattntcttcagcctactaccccttatcattgttggagaagtctaatgattgtttgggccactggtgggctcctttcctacatt

SEQ ID NO: 95406 - DNA, 310 bp, Glycine max
  unsure (1)..(310): unsure at all n locations
tgtattcatgtgcantgcttanatcanatcatgaagaatcgattatgtctcaagacttcaattaacactatctattatnntaaatttgaagcttgtggctttagtggtcatggtgaaactagtgaatcaagaaaccaagaataaactcttatcaccatacaatggatgaagtgcannagtgtattggaaaatgtccttatattccaagtacacttcacatcanactcaaaaggagatcttacatattctntctagtaaaagtaanaaccatatccatgaagaaaaatggtgatctaanagtttcattatt

SEQ ID NO: 95407 - DNA, 458 bp, Glycine max
  unsure (1)..(458): unsure at all n locations
ntgaacaataaacttgcccttcatttaactgtctctgcgcttgtcagccacactcaacaaagtactttcgacacctactgtacgttgatttgaccaatgctgttatgggaatgttgcgacaatccttcaaaaccttgttgattcattttgagaggttggttgtcatgtggccatatcgacgtccttctctatcataagccatcgtccatttttcctttgaaatgcgatcaatccatgttgctatggctggactcagttcacgaaanttttctaaattntgatcaaaaatgtgcttgcaaggagtgtaggctacattaaattagttatgaataacgtggataagtatatatgaaaggtaaataaatgggaccatcaaatatgaaatcttacccaatttcttcaacatttctttttgntttgcattattgaatttccgattgaagttgcttgctatgtgt

SEQ ID NO: 95408 - DNA, 397 bp, Glycine max
  unsure (1)..(397): unsure at all n locations
ggacgtcatccttgaccagntatccgctctcatacccactctcttttctcccaactcaattccaatagacgcaccaccacctgtggagaccttaacagcatccactccatctncatctcctcccaaaccaccaccaacaacagcacccacgttagctccgcctcccttggctgtttcccaccatcccgaactcaaaatagtcgcacccatggctctgctaccgcttntacgctttcattcgaccaaccgccacatctagcttagttgtctgttgcctccatcacttcgcaccgcccaccgttgttactgtcacggccattgccacgatatcccttacggcaatgacaccatcctgctcagcaacgctgccatcaagcatcagattcatctgcgctca

SEQ ID NO: 95409 - DNA, 245 bp, Glycine max
atgcaccgctgtctgtatggactctattcttggatggcctgggcatcgcttatacaccacctatgaagtaactttgtgtatataacatacactatgaaattgtggatggttatgtgcctggaccatttgggcttggataagataacaattgctcaaattgccctaatgagggtttgttcattgtgtgactcacgtcaagatggcctgtgggtgacaccatgatggaggcatgtctatgcgcacca

SEQ ID NO: 95410 - DNA, 463 bp, Glycine max
  unsure (1)..(463): unsure at all n locations
tatntattattctagaattagtatatttacgcaagcatggtttatattatattctaagagaaataatttattttccactacaataataatattattagaatttaatgactatcgatgatagataaaaaataattacaccatcaatcaattatagaatacaagattatatttttataactgttaaagtaatcttaaaagataataaacttattctatatcattattttttattgaataatattataaaattattttaccctattttttcatataataatagtataaaagtttaaatggtaacaaaataatattataagagaaaatggacataataaaaatatcacacattggaatataattattattcttaanatatttntataanatataaaagtttaaaattattataacaataacaataagatatagatatactatttgtgtgcgacgcacaggtactaat

SEQ ID NO: 95411 - DNA, 141 bp, Glycine max
gccaccctccgagggccatgattatcgccagaaacactacgtcccgctcactacgacttccaaccgctggacatgatgtatgttctgatctctatgtaccctactgtttagatgcatagaagtgcccttatctcttgcctg

SEQ ID NO: 95412 - DNA, 450 bp, Glycine max
taacttagcacaattcgcatcattgtatcactcattatgtaacttcacttgtcccaaggatttaatcatattatcacattccacaccttttacattaatcacgtgttcagaataacacatctcaagtacaacacaacatgttacactcacgcaattcattatccatcatcacgtaacaagtcacaatgatcattacacaggcgttatacaacatatacactaagactcaatcttatatgcaatgtggtaccatgtcagtgaaaaaccaagcccgaaggtctagcctccgaagagtctgtcagggcctctccctcctattttaggtccaacctagaaaacattttaacatgcagactctacctatgaactatacaaaacacacgactcctcaattgttctcaaaataattgtaacttgtcgtgcctcaaagtgactcaactcggcgccctt

SEQ ID NO: 95413 - DNA, 454 bp, Glycine max
  unsure (1)..(454): unsure at all n locations
tatattagtatatatattctaatccatgtgaaaatagaatttaatcggatatattatattntaaaagataatatataagcttataaaaagtataataaattaaaaaaaataaaatttaaaacgtatattaatactatgtttgcatcaaatattcaaatgaacatttagatgtaatgataaaagggtgtgcatcttatttcaaggatcatagttctactcctaatttcttcttaaagcattcttttaagtaagggcttattaacatatgattaaataatattttagggaatttaatggtttaattcatattcaaatattttcataaccattaattaattattaatttcgacatttattttaacaaagaaattattatttttgaatattttaatttgaaaaaatattctttggaaatatttatttattttacgtactcaagttgtttgaatatatg

SEQ ID NO: 95414 - DNA, 227 bp, Glycine max
accgccactaaccgtaatccatttcgaaagtagaggcatttccaagactggtgagtgttatacgacaactccatgacagcagatgacctctcccaaataggttgttgacaatatatgcccttaattgatgtgctcatttaacattttataaatgccgtcctcagtgcaaaatccttattcgcgtggcgctgcgagcgagcttacttatcctggtgccagcgaaaaat

SEQ ID NO: 95415 - DNA, 291 bp, Glycine max
attcatttttgtgtgttcattgctttatgatacgagatgaaatgcaaaggtttgaacatatgttggttggttatgatggattaagcctaaacacttgagtttgagtgaaacaatgactgtgacgctttgtttgatgatccttctttgatttttcatgcttactagcttatttagctgtgctctaatacttgtgtcctatcttttaaaactgcatgcttgtgagaagtgattgatttaacatttcatgatattcaattcatatgggtgatgtccttgatgaataaacaccat

SEQ ID NO: 95416 - DNA, 136 bp, Glycine max
actctgaagctactttcccaccttttttactactctggagttctaaaatctagaactactactcttcctttattgtactactctggagaagtaactactcccccttatatactacccttcaaaaaactgaatcaaa

SEQ ID NO: 95417 - DNA, 366 bp, Glycine max
tgcctcatagagatctcatgaaagacaaggcggctgaaggaacttttccactcccaaatatgacagccatcattttatgagcgctgagcaccaacagcgcttcgaggccatcaaaggatggtcattcctccgggagagacgtgtccagctcatggacgacgagtatactgacttccaggaagagatagttcgccggcggtgggcatcgctggttacccccatggccaagttcgacctagacgtagtcctcgagttttatgccaatgcttggcctacagaggagggtgtgcgagatatgcgatcttgggtgaggggtcagtggatccctttcgatgcggatgccctcagccaggtcttgggataccc

SEQ ID NO: 95418 - DNA, 409 bp, Glycine max
  unsure (1)..(409): unsure at all n locations
ttcttaagcctataattgcattcggactctcattntaaatcctttatgctngccctatatatataaaacagtcccacaatcccaagcttacaaaaccatgctcatatgtcattgaggcatttcaccgagcacttggtgggcgcacgtttagacataaattgcaagagaatgggagcaatgtggcatcccccattgcttcagaatacaacctangcctaaggccttttcatccaaatcctcaattcaagaaaacaagcaccaaagcaaaccaaaactgcctcacaaatataagcatgttctcacaatttaaggcaccaaaagatgaagaaagcacatcaatgggaagcaaaaacatcaaggatggaatacttacttgttggagtgaattgaaacaccaaaaatgaaagca

SEQ ID NO: 95419 - DNA, 133 bp, Glycine max
gaatgcatggtgtgttcatgcgggagaagagagagagaatggtattatttctacgtggctcagaaaaaagtgagataaacataatttctgacctctttgtttggggctatagtataaataattaaataaaaat

SEQ ID NO: 95420 - DNA, 474 bp, Glycine max
  unsure (1)..(474): unsure at all n locations
ttaaactcaagctgtaggactntggtttagatgatatccatattgacgacatgttcaatgaaattgatcattataacgtaagtatcattctatgtcttgtcattgtaagttttcttgtaatgaggcataagatcatcaaatttcatcttgtaatgtctccgtcggtgtcaaattttttgttgggggtattaatggaaggtttgtggtgcacgatgggcaaatagattatggggaatttgctgccatgatgagaaaaggcaatggaggaattgggaggcgaactatgagaaaaacactaaatttaagagatgctcttggattattagacaatgggtccaatcaagttattgagggctactttaagtaataattacttggagacaaaattgaccaaatattaatttagtaaatntctacgttgtttgtagttgcttgaccaaattttgcgtatcttttaaattatagacccatctt

SEQ ID NO: 95421 - DNA, 305 bp, Glycine max
  unsure (1)..(305): unsure at all n locations
ctacgcatagattctgtgattcttcanatgaaggaaggagaaacagtgaatgcatatttttctcgtactntaaccatagccaacttaatgaaggctcatggtgaaagtatgagtgaaacagtcattactgcaaagaatttgagatcaatgatctcaaaatttgattatgtggtatgctcaattgaagaatccaacaacttatacatgatgactattgatgagttgcaaagtagtcttcttgttcatgagcagaggatgagaagtcgtggagaagaagagcacgttctgaagatctcccacgaaga

SEQ ID NO: 95422 - DNA, 161 bp, Glycine max
agactatgaacctttatgactttggggcgactgataattcatatgcccctggttttccctctctccaggagcacaggggagctatgaagctgttactaattcgtggtttatagtagatgctccactgacttggggatgctgtatctcagcattcacacatc

SEQ ID NO: 95423 - DNA, 467 bp, Glycine max
  unsure (1)..(467): unsure at all n locations
tatatcatctaagggtcactgaaataaccatggattccacagagaagcggagtttactatatgttgaggtcgaggccttccagcatactgataccgaagtagtgttcaacttgaacaataggttctccattgatgtgaatgatggttgtgtcagtggtgataatagtggatgcaagagcagtattttcactggagtttgacatggtgagaagagactacggttttaaagaggttttcttgagagggttttgaattttcttgtaaagattatggagatagaccgttccccttatttcttggagtctataaggggaatgtgggcagttttctttgggcttttaaaaagtatttaatgtggcccgttaataaagggttgtcagcagttaaaacaccatattttaataagatataggttntcaaaatatcactcgtccacttgtagtcatctagtcatgcatttatgtatg

SEQ ID NO: 95424 - DNA, 106 bp, Glycine max
ctctcctatgatttgggaacaacagactctgtatgtaattggagcaaatgagctattaagaaagttataactgtgcaaacttgtgattatagagaactttattagc

SEQ ID NO: 95425 - DNA, 451 bp, Glycine max
ctgttggtttcaccttctcgctaagccaatctactggcttagcgagcatcctgttttgcgcaacactcatgggctaagcgcgaggaagactctggaagaagataagctgtacaggttcactaaacgcaccacttcatctcactaagcacaccgcttcagtccatccgctaagcgagaaaggcatgcgctaagccaaaattcactaatgtacgctaagcggtccataattgtgcttagcacacgagcacgaacaaagccagttatttaagccagaaatcagattttgtgaggggagtttggactgggattcaaagctttgcatgtctagagattctagagagagaaaggtccaagttccagagagtttatagagattttgctgtgtgaagatctgcaaagactaaagcttgaagcacgagccggtttgatagcttgagatgagattgtgagt

SEQ ID NO: 95426 - DNA, 215 bp, Glycine max
  unsure (1)..(215): unsure at all n locations
tatgacatctcttganatgaatagctgctntgaatctgngttgaataatcgacaacacttagatngatcactatagtcgacaaagatgccactttctnncttttcatcgagcctttcttggtctcctttggaatgtccaataagcaacacatccaacaactntaanatgatcanatactgtgtntctgttgaaccatgctttatatgctgtcata

SEQ ID NO: 95427 - DNA, 396 bp, Glycine max
  unsure (1)..(396): unsure at all n locations
ntggaatcctagannaaccaatagttattgtaacctagcctcattgcaagccaataaaagtccttctaattcaatttgtgcattttttactttatgacaagagatgaagttcaaagattggacctcttgctagtcgttattgataaaaagcttaaacacttgtgcttgagtgaaacagaagccgtgaggtttcggttatgcatctttccatganatttgtctcctgtctagctttatttagttgtgttgcttgctaacatgttcttttctctgaaaaactgcatgccttgtgaaaagcaattgataaagggaattttgtttcattttttatcatgcaactcaatatttgggagttacacanctttgtacataatcactgcatggttttttatcact

SEQ ID NO: 95428 - DNA, 162 bp, Glycine max
  unsure (1)..(162): unsure at all n locations
ctgtatcaccaggaatagaagtggtcgaactatactacctacagcaacantctacttgatgggctccaaagaatagccagntntacccttctaattccaaagcacaatgttatgggcagatagatcagtgtcatgtttcccgatcttgtggagcatagatcg

SEQ ID NO: 95429 - DNA, 387 bp, Glycine max
  unsure (1)..(387): unsure at all n locations
ngagtctggattattatagaattatattgtgaagctgctatatatgatattagaggggtatgtacagttatatttcatacagaattaggagctatcattcgtacatgcaaacataggcttagttacttttcaaactttggtacaagcttattgtgtcacttactttttggttagggcgtctcaatttcatgttagctcttagattttttttttttattaatccctgggtgtattcatcatttcattaatatagaaatgatgagttgatttcataaaaaaaaagtttgagttggacttntttgctaaacaaaggcaaacgagtaaaatatcaaattagcccctcattttagaggcactgtcaattcgaatcctgagatttaaaaaata

SEQ ID NO: 95430 - DNA, 413 bp, Glycine max
  unsure (1)..(413): unsure at all n locations
ggtagccaaaggttactcataaccagatggtatcgattatactaaaatttttggtcctattggtcgtacagaggaaatacgcattntattgtcctttgttgcccatcacgggatgatgttgcattaaatggacgtaaaaagtgtgttcctaaatagactaatcaaggaagaggtatatgtggaacaacccctaagtttgagagatctatctacgcttatcatgttttcaaaattaacaaaggcttctatggtttaaaacaagctcctcgagcttggtatgaaaagttaagttcatttttaactagaaatggctttataagaggaaatgcagatactcttttgtttcacaaagattatggtagtcaatttctaattttccaaatatatatggacaatatcattttgagtctgga

SEQ ID NO: 95431 - DNA, 205 bp, Glycine max
  unsure (1)..(205): unsure at all n locations
aacatgtagactntatctattgaactatacaaacacatgacttctcattgctctcaaataatttaactcgccggttccatagtgatccatcacatacttgcgacattaactgcactctaaaggtttacatcgtgtgatgatgactatactacaataatggcacacatctcatcacgtgcgactacattacacatctcacttgcac

SEQ ID NO: 95432 - DNA, 453 bp, Glycine max
  unsure (1)..(453): unsure at all n locations
ggctaacccatggaagctcctaatatctcccacactntntggtgtatgccattcttagatggccttgattntctcaaggtccacttggaccccatttctaccaattacaaaccctaagaaaactatattatctacacaaaaagtacacttctctatatttgcatagagggtgtttttcctaaggactgaaagaacttgcctgagatgtcctaagtgatcatctaagctcctactatacactaaaatatcatcaaaataaacacctacaaatctacccatgaaatcccttaagacatgatgcataagcctcataaaggtgcttggtgcattagtgagcccaaaaggcatcactagtcattcatacaaaccaaacttggtcttgaaagcggttttccactcatcaccctttntcatcctgatttggtgatacccacttttaagatcaatttttgg

SEQ ID NO: 95433 - DNA, 446 bp, Glycine max
  unsure (1)..(446): unsure at all n locations
tatatcccacanatngaccttaatgagaaattcattggtgaacttgcctaanattgcctacccaccgatttcacacaaattaaaactgaccataacaccattggccaaaaatggattgtgaattaccaaatgagtgacagatctgtgttatctgtccataggaaacctacttctggcaaaggacattggaaaaataccaagagtacatctaatgcttctcataaatatcaaggttcttggaaaccagacaaaggttagaaacaaaatgtagaaggtcctaagtcaactacctttaagaaggatatttggtgcttttgatgtaagaagaaagggcactataaagctgactgtangatgtccaaggtctggctagagaaaaggcagaaatcagaaggtaataacttagcttttgtgtgccttaagtctaatctagttaatgatcttat

SEQ ID NO: 95434 - DNA, 309 bp, Glycine max
  unsure (1)..(309): unsure at all n locations
ttttggtgtactgtgcaatgctacgtgttctttatactaggcttaggctatttttcctggacttacatgctgtgtgctcacctttaactatcatgatgctaagaccatggggactttataacttaacttcaccttatcngctgtaggatgtaataaaatgacttccttctgcttgattggaaattttaaacttcacactctcagttaacgtccttataaggaccccttggtttctccggaataaaaatgattatgctattgccaccgatttacggtcaattatatgtgcaagctaggtctattgatctg

SEQ ID NO: 95435 - DNA, 165 bp, Glycine max
  unsure (1)..(165): unsure at all n locations
ccttttgtgcgctgagtccaactttattaaaaagaaattcagaatttgaatntcaaacttgggctaagcacgcagttctgctaagtgaacctctctgagaaaccaaacgtctctctggctcgcttagcgctgcggntcactaaacaagagggtcgaaaattgctt

SEQ ID NO: 95436 - DNA, 255 bp, Glycine max
  unsure (1)..(255): unsure at all n locations
tcctanaatatatatttcagcacagctatcatcccagctcggttaagattagccttagtgaaaagaagcgcattatcacacatgtgagatagatgtgtcattctgagatacattggcgtggtaaccaactctttgtgggtacaaacactccanatattttgatgttgcagncgaaatcacgatcacataatattttttattaaaaacttgtattaattaaaatgagtgtgctanacaaccctgcagccatgttac

SEQ ID NO: 95437 - DNA, 444 bp, Glycine max
  unsure (1)..(444): unsure at all n locations
tactcacgcttctcccnctattntctatanataggcggagaagtgaagtggaatatggttcagccccttatgcacttctctctctttcgaatntgcttagaaaaattgtttccgtgaagaaaatccaagccgaggcgcttccgtaacgtttctgtgtgtgatttcgcgaaggttttcgaccgttcttcgacgctcttcattcgttcttcatcgtttttcggtcttcaacgggtaagtacctcgaaccaagcttttcgattcattctatgtacccgtggtggtccacattgtgtttcgtgtattttccttctcgttttcatttactttccataccccttttgacatgcttaagccattntatttaagtcatttctcgcttaacctaaaaataaaataaatttccaccgatcgtttgaattatattatccgttaacttccgttaaa

SEQ ID NO: 95438 - DNA, 418 bp, Glycine max
  unsure (1)..(418): unsure at all n locations
aatactcacgcttctagccaaatggacttaccttgaattaattccttngatagcctctttgagccttgtttccctttccttgttttgaatctcactacaagccttaagtgaaaaaccatgatatcaccatatccttaaggaattttggagctttggaattgttttgggaataagtgtggggggggtttttgtttcattggataacttgttttgttggctatacttcatgatgtattttgggccatacttgattgtcataccctaatttcgtccggggattattacttgattacatgcaatctttggttagccgctttgagatacttggcgtccttttttgcacaataaatgaagtcccgagacgtctcataaatctaaaggaagcatgcttgcgcgatccgtgaaaattccgtattgt

SEQ ID NO: 95439 - DNA, 158 bp, Glycine max
gtactttattacaatgatcgaaatgttgcttaaattgagttatgagcctctttcatgctatatttttcacaaactaaggttataattatgaggaatatgagacgaccacatttaagagatgttgctctcttaacaccttatttttcaatctaaactca

SEQ ID NO: 95440 - DNA, 466 bp, Glycine max
  unsure (1)..(466): unsure at all n locations
gaccatgtagaccaggcccatcgactactgacatgttattatccttcgatacttgtttcatgtaagctnttggggcatccaatttaatgggctgtagttatgggttcttctaaatcttaacgtgaaaataggtttaagatactacaaattaagtattataaattgttttggctcaaccaactgagcaatgtgtacgaggctttaaaaatatgactaatttagatgcttgatttgttacaaaaaaataattttctacagttcaattntttcttgcaatatctaaaatctagttttcttcgagattaattttttttacttctagcaatacaatttcatgtttccatgttaataaattaaattactaaatctttacaattgcaaaatattctaaattttgctatagcaaagtttccagttccttattnttttaatataatctcttaanactctaaatgatcaatagaaa

SEQ ID NO: 95441 - DNA, 123 bp, Glycine max
tccgctccgttcttccactacacatttgctttttcacttttgtaacatttcattttccttttctgaatatttacatctcttagaaaataagaggtttatgacgaatagtcctgtgtttaacga

SEQ ID NO: 95442 - DNA, 450 bp, Glycine max
  unsure (1)..(450): unsure at all n locations
cgctatatccacgacataggaagatagagatagaatatttcattattaatgcagttcgattccttgaatatacacaaacagctgatggttcatggcatcgaaatcgnggagggagcttcacttatggctctagggttgcacttggaggtctagcagctgctggtaagacttacaccaattgtgctgccattcgcacagccgctaaatttctacttacaacacatatagaggactgtggatggggagagagttatctttcaagcccaaaaaaggtctgtagctgaatggttattacatgaattaccattcttcaacttcattgggaattaatgataatagtaataatgtcttactaaatgaaaataatgcagatatatgtacctctacaaagaagccgatcaaatgttgtacatacagcatgggctcttatgggactaattcatgctggac

SEQ ID NO: 95443 - DNA, 90 bp, Glycine max
taaattatggcgcattccgacgaacatgaaaattattactctagggtgttcaggaggcattggactgttgttgagcaagataacacatgt

SEQ ID NO: 95444 - DNA, 448 bp, Glycine max
  unsure (1)..(448): unsure at all n locations
actcagctatataatgcctattccgcacgatctttgatttttttttccctctaaaacaatntattatttatatatttaactgaaaagtgtaaaagcaactacttagccgtagaaaagataaagtggcgagtggccacagaatttcacggcatctcccatagagtttatgctntgccctcgtttaccaacggaacacaacaacatgaaacagacgataaaggtcgtcgtcgttcgttgttatgccataatgtagacacccatgttgtttcattgccacgtcacattaattcctcattgattacagtgattaggatttactcttacttacgtagttaacgttacaacccanagaagnttcctctctctttattttcttttttggttggctttccggctaagggaattgcggaaacaaaaaccagcgatgtattattgggtggatgatcat

SEQ ID NO: 95445 - DNA, 302 bp, Glycine max
gatcaggtaagagatgattgctctttgatgcttgggatctttctttcatatatatacaatcagggaggtgatatgatgaaccaggtaatacagatacgtatatcttacgattctatattacttcgaaaaaactcatcaagatattactatttttgattcacataaagtgaaatttactttgaaaaagacagtaagtagagattttaacatatgtaaaaaaattgagaaaaaaatgaagctacatatgcaactgctactttttttaaacatacatatattttatattattttaagattttttt

SEQ ID NO: 95446 - DNA, 435 bp, Glycine max
  unsure (1)..(435): unsure at all n locations
acgaattcaaaagatatatacatactgagataggtagtatggaccctctgtcagtttgggactcaaaagagcaaggaagaagtggttgaccgtcttttgtctccggcatagcatattggtgaaccatcgatgagtattggctcctcctggaaaactcagaagcagntctgtctaatggtttccccctcaggtttcttgtggattctaaagagataaatgatgcagtagataaattgcattcactgctttggaaatctggtgaagatgagcaaacaccatgtgagctataaatgtactgtaaatgttttaaatctatggcattgtcttgtgacatagctccagcattttcatcaaaaaaatcattgcttntatctgcaagttgcaagatatctttaccaatttctgacacattaaaactatcagtctttcaaaaat

SEQ ID NO: 95447 - DNA, 142 bp, Glycine max
  unsure (1)..(142): unsure at all n locations
catccatctatctatntttttctttgtattgctaggtcgnggtttgccttgtctcgtattgcgtcttgttacatcttgnnntcgtttgttgccgcttgggtctgtattngcgtcttgtcttgcacgtccttgtcttgttctt

SEQ ID NO: 95448 - DNA, 416 bp, Glycine max
  unsure (1)..(416): unsure at all n locations
ntcttgcatactgataatgtaggtggcattcatcattntcttctgatctgcataattcagaaaccaaccatgaagcattngtgttcatatcaagcaacaccattatgcatgtgaagaacataattttgttgctcacttctttgggcagaatgagagaacttcatctttagagaatttcatgataatttacaataagatcatataaaatatataaagacataataaatacaaactgcaatcaaagcagcagatggtttattgaatctgccagttgtcagaggttattgattataaatgacacaagacatggttntcttacaaaccacaaccaaaataagacaggaataatgcaaaactatgactaatttaataatctaattagaataaaaaattccaatgcaatataagtaatgtta

SEQ ID NO: 95449 - DNA, 468 bp, Glycine max
  unsure (1)..(468): unsure at all n locations
tgactacatctgtatcttcttcaccacacaaccacaacctacacctccaccactcttgccattactcttacctcttcctatctttgaggagcctgaaatggcggaagaagaacatcctagaaggacacttggagactatattgcacatgttgtgcaaaggcacttcatattggaatgtgttattttggctattaaagggtgtagtgtcaatctataattaggattgctcccttcaattggtcttagcacatctctcaatttcatgtaaaaaaagttaatggaccggattgagtaatgctcaccactacttactaatatattcacacaaaaaaaccactacttattaatatttgaaaatgtttaactatacattntcattcaatattgttacttttaggtacactaattagattcagtaaaaaanaacactaactagaaatatttattatcattgatttatacactaat

SEQ ID NO: 95450 - DNA, 374 bp, Glycine max
  unsure (1)..(374): unsure at all n locations
taaagaatggaaagagcaattttgtcacctttaactgtatatgagtgcngtggaaattggaatgtaagatcaactaactaatcatcagatttctttccttctttgtgcagntactntttcactattaatgacctataagagagagcatttttttcattatcaatcaagnttaataattattgatagagaagatcacttcttttacactatcaactaactaaaaactactttaaatataattgataaaatactgattagataactctatacaatctcatccttatcttgacttttagagcgacgctagtatactaacctgatacattgaattcaattattncttatcagctagtttacacttaagcatttaatca

SEQ ID NO: 95451 - DNA, 140 bp, Glycine max
ggctgcactcaaaactttgaagaaaaacaggctttgagcgtcatataaatgattcactattggacaactaattcttaattgtatatgagttgtataaggtaatatttgaactaaaaaggttgatttttttttgcaattta

SEQ ID NO: 95452 - DNA, 397 bp, Glycine max
  unsure (1)..(397): unsure at all n locations
tatggctatcaactacttgtttccgagggatattctataaatagacctccatctttaatggagtgggttaccactactggaaaacccgcatgcaaatctttatagaggaatagattaaatatttgggaagccatagaacaaggaccttatgttccctctataatagtcggaagtgcaacaatagaaaaacctagagcagattggactgaggaagaaagaagattagtacaatataatttaaaggccaaaaatattattacatctggcttangaatagatgaatactttagggtttcaaattgtaaaagtgctaaggatatgtgggatacactacaagtaacacatgaaggccaacagatgtaaaagatctatgataacactttaactcatgagtatg

SEQ ID NO: 95453 - DNA, 328 bp, Glycine max
  unsure (1)..(328): unsure at all n locations
tatgcgcatatttctctacgaacgttcacttgcacaagacattttattaactaagaaaaatgcacccatatacaatccaggtagcttcattacctagattatttacatgtacttccaaagcgtattggntatttacatcatacacgccatcttgtcaaaatttacacacatgcatacgcaaagcatttcgggggaccaaaaattgcacatgcgctcatcttggnatttctaatatctatacatatacaaacttcatgatgaatcttgactacctacgcaataaggtgctacatttcatgctctttttttttttttttttttttttttt

SEQ ID NO: 95454 - DNA, 99 bp, Glycine max
taccatatacatgagtgcagattaagatcgagtataagacataagcaactatatcagaatatcaaccgaatcaatacataaatgtacaccacaaatatc

SEQ ID NO: 95455 - DNA, 487 bp, Glycine max
  unsure (1)..(487): unsure at all n locations
acactttaaactaagctagtactttggaatcgtactcactgtcgactagcctgtcgatgcataggcaaatggtatctatcttatgacacaccctattgttatttgtgtagttggtgcacattcgccatttaccgttggcctttttgactatgacaacattggtgagccaagtagagtaactaacttctctgataagttgggccttgaggaacttgtccacctcctccttgactgccttgcgttgctcttctcctatctttctcttcttctgtgacactggtttggcctangggcagatggcatgcttatggcttataatgccagggtgaatactcgacatgttagatggctaccatgcaaataggtatgcattcctgtgtgggacatcagctatgcgtttatgcttatggctagtgaggtccttgttgagttgtgtacgttgccccggtttgggtccgagctgcagcttcataaattctttaataag

SEQ ID NO: 95456 - DNA, 466 bp, Glycine max
  unsure (1)..(466): unsure at all n locations
ctcacgcttagtaaaaactgtttataaacaaatattactggtgtatttcttaagtaacttaattntcattaaatactttttctttattcattctttgactaatgtctttgagaatcattaaaaagacctataactaaaagctttgttattgtaaggttttactaacaagtgtcgagtgtcctaaaaacactaatttaaatattaatagatacaatacttttactcctttatttaaacgttttgacgttactttgacttcccttaatttatataattgcataagaaatcagaaaaaaaatagtctatgttaatagagtcaatgaaaagagtggaatatcaagtaaaatttcattaatttatcctaaaaattaattctttaactaaatatctagacacgtttaatgaaggtaacagaatttgaccatgaccaaaccacagttcctggtgaagttactacttagagtga

SEQ ID NO: 95457 - DNA, 433 bp, Glycine max
  unsure (1)..(433): unsure at all n locations
tgatattcaattatgattctttacaacttatagaagatcttatcatattttttattatataaattncactgggctctcttgtataatggatttcacaagattttttggtaaaaaatacacattaaacaatctcacataaatcttgagattttttatacttttttttcttttcttgtcaattgacatgttttcttatcttatcatacataatctcatgtctctttgttgaaagttgtagatatttataatttctttttactcttttagcccatcaacaacatgtcctagaatgtgttatttgagagatcttcacaatttttaaatttagagcttcttgattatatttttatttttaatgaactttgagaagttaaccgtgtataagtggataaatgacttttttttttgagaaagtatttgtttgatacacccc

SEQ ID NO: 95458 - DNA, 131 bp, Glycine max
ctcatttgacaatctactctgtgctgcttttttgctctgtgtgcctaacggtaatccatctatatatgtgcacgacctgaagccattaataaacacatcctatcggttctcgtgccccactgttcaagtga

SEQ ID NO: 95459 - DNA, 460 bp, Glycine max
  unsure (1)..(460): unsure at all n locations
ctttctcaacaggtcttcgttcacatctanactctttgttattgctatagtatcctcttcaaaactttcggctcatagttgcgatttattcgaacaatatctgaattttcaccactcatactgtgatcaaactccaatttttctttcggatattttttaacagattggaacacaatagctagatgattcatattttgacatgtattagagtattgtttgcaaataaactgtttcaaactgtattgcatgaatttgttgaggcattccattatcatagaaaggtgcctttggctccttcctattgctgtcacctttcacaagatcaacattgatcccttgtcattttatataatggaacgaaattggtcgctctgaaaattattctctgagagtgggattctctttagtaaggtattgaacatgaaaccatggcgataattattccttagtggtactagta

SEQ ID NO: 95460 - DNA, 441 bp, Glycine max
  unsure (1)..(441): unsure at all n locations
atacntttttcatctaccttccattatataaacaatcgttagtaagcagaaagtgtatcagaaccagaacccctcagtatacctttaaagtgtataactctcatactcttaatttttttaagaagaagaaatagaccctcagtatgccacaataaaaaattaagggaacactgagtcagcctaaattctttttctttctacaatntagcctataaaattcctgtgtatcgtgactgaaaaattaactatatcaaaacacatctttatctaaactataggagcaacattagttaactaacatgataaaggaaatcaaatcaatactttgcttctccttaatccttattccttatcgcatcagtatatattggccttggggccccactatagcaaaaaaaataaaaaaatcaatactgtgcttctccttaattctaattttat

SEQ ID NO: 95461 - DNA, 359 bp, Glycine max
ctatgattgtgacttgcgtgctttcacattaaggtggaccattgccagggacagggaatttatttacctacttactggattacaatcacttattgtggtggaagactcacaacatttgctaaaccttctgtctggtgcagatgaattgcaatactgacacttggttccggatgagtaatttagctgaactattttttattaatacatatgcctattactatacatgcaacactgcaaatcttatgttaaatttatcttgagctaatcctatagtcacactgtgctgatcttatctgcatctctaataccatgttggttgagatattggaacgttaaacacaacaaatcttgtttgtctc

SEQ ID NO: 95462 - DNA, 459 bp, Glycine max
  unsure (1)..(459): unsure at all n locations
ttacggacctataatactcagctaaagtatgcncgagtcattcatccctatgagatgttngtgaagtattggcgatcagaattccattccttggattatagggttgaaccaagctcatgcttttacaaaaaggttcatcaagtcaagttgaaatatggaagtaaccgtctcgcaaaattgggggcaaagatgaatcgagtcacatcactgcttcatctactgccaaacatatttaggattgttgatgtccttgtttcttccagtttcactttgacaaagatgtcatggaccatgttgaanatctaaattgattcaaccccatatcctgcgtaaacattcgcaatacttcaactgtacatcattcgcatacatccatgcttttcattggttgcattgctcattgcattctttccttgaaaaataaaataaaataaaaaatggacttaatcattgttatca

SEQ ID NO: 95463 - DNA, 448 bp, Glycine max
attactccgcttcttcgcagacctcgatcggacatctttacaggccgaggtcttacgtccttattttacatgcattacggagaataatatgctcttgacgcgatgggcaaatacggcttttctcacttaaagaccgccataacgactgctacgatccaattcgttaaccgttggatcgactccaaaattatactggaagtctatagtacataagcctacattttgaccggtgggatctactagatgacatccagaactaattctgcactactctgtccacagcccaccacacacaagcatttttctgcacaaagccaaaattctgctgcacctattttgacagcaaaattctgcataagtgcagatttcgaacatcacccttcctctcatccaatcttgcccagatcaaatcctacaagtcccacatcatgtatcaatcatgtctaaa

SEQ ID NO: 95464 - DNA, 442 bp, Glycine max
  unsure (1)..(442): unsure at all n locations
acctataaaactcagctaataaagttaggctggactcgacttatttacacccctaatcttctcgtgtatgtgacggacaacagatagaatgtggcatataaacaacaattatgataatatttgagactccagggaaagtagcgactccaaactcgcctaatcaggactctcacatcagaactgcatacttgtatatattatatcttggatgttctatcgtatgtcaaatctattcaaagcttctgctaatagctattcttagtgcaagtacaacataatggtatgagaatgcttaagcatattcataattaaattatgtgctaacatacaaaatcatcaacgcacaaaggtttaagcaattattccataacgctgcaacaaagaaatataataaccttttcactgaagacaaatacacatatctttntctaatctctaaact

SEQ ID NO: 95465 - DNA, 433 bp, Glycine max
caatcagaataatctatttttttttatcttaatctttcactataaaaagaaaatatctgaatctgttattagaaaatagaatggtcttgtacacaaacaaaccaataattgtgcaaaaattgaaatgtgataataatcacattactacaattgtttgacaagagtctggttcggagttatcgcattggagcacctaattatttttttaagttaaacttttattataaaaagtaacatcttatttatcattaataattaaagataacactaagaagtttataacactcatcaaccctattctatcaaatggtttacaattgacttatttggttgaaagtaacatatattggagacatacaacgagtttgacttagtgaatgaaccttaagaggctaatgaataagacacctcgcatacatgcatatgatatgcg

SEQ ID NO: 95466 - DNA, 288 bp, Glycine max
gcaccgcgctgcgctattactggtgctatatatgtctatcttgaatctgctatttatagaagctgtgtgaagctgcttgcactggtatggataatctggacaacacattgataccatgtagctgtacttgagacaggaacgtcttcttgtgagacacaactgaattgggagtgtagcgcatacactattgatgaagagatgaacgcttcccattatgtctttgaggtgcaatttagttagtatttgctcaaaaaaccatatggataagggttcattccttcagaaaga

SEQ ID NO: 95467 - DNA, 409 bp, Glycine max
ttctcgagatgaggaagtgtttaaaggtgaaacttcctgctttattcttgaccacagagtggtacctggagatatatctcgggggtcaggagacctcgaggacgtcacgtggggtgctattgcccaaaaccaagcttgaccaatcccgacccaacccaggcatagtcggtcaatgagaacctgtgatgtacctaaacatgcgagctcctggcagtccacagattaaatgaacaaagacctcaaatccagggggcttgtggtggcttgccagctttgaattttgtgtatatatgggttgtgccttctgtatctatacccacgggtggtatcgattccacgcttaaaatgaaacatgggctatatagctctgtaccaaccccgagtgaatcttttcctctttttcatgttt

SEQ ID NO: 95468 - DNA, 421 bp, Glycine max
aactcattctttcttaagctttgctcaaccttatgtggcccttggcttcatcaagagccaaaaactcggagataacacagttataacaatggagtagccagatatatagttcagaggtttaaatccaactagccacactcatactcaagataataatcaaaccagaattcaacatacataaaatgtcaacaatcacaaaatatccaagaccgaaacacacgaaaaataagccaagttcttaacataataatgtaaattcttagaaactaaaagccaacatacacggcttataatagataagatagcagaatctaaaatctaacaagacggacgatgtggtggaagatcaaaactctgacgaatgtatgcgacatcctcttcaagctgcgttagacgaatgtccataccggcaaagcgtgaa

SEQ ID NO: 95469 - DNA, 52 bp, Glycine max
ctgcaattcatatacatatatatatatatatatatatatatatatacatctc

SEQ ID NO: 95470 - DNA, 471 bp, Glycine max
  unsure (1)..(471): unsure at all n locations
gggttcgaggtacttacccgttgaagatcgaagaacgatgaagaacgaatgaagaacatcgaagaacggtcgaaacctttgtgaaattcctcacggaaaacgttacggaaacgtttcggaagcgtctcggcttagaatttcttcacggaaaanaattttccaagcaaattcgaaagagagagaagtgcctcangggctgaacctttntccttctcacttcctcccctatttatagcaaaacaggggagatgcttgccgctcagctcgcccaggcgagcagggttgcttcctccagaagcaacagccttctggaggaatcttctggaggacccaagtggatctggttgctatttgcacccccatttttactaagtacacccccctctgctttttttggtgattcttttttcgtaaagttacggaaacttacgaatttcgtaacaatactggttttctttccgtaatgttatg

SEQ ID NO: 95471 - DNA, 417 bp, Glycine max
  unsure (1)..(417): unsure at all n locations
acggagagaatggctgaggaacanaggaaagtgcctcacactgatggaatgcaggctttcttcgggtttacctcgtttaattctaatatttgtaatactacgagggttcctaagtcaaaagccatcgttgacttcattgtacctaattataagactgtcaccactagaatgaatgacgtgaaaattaaattntttttttaattacaaataaaatggctctccagcaagcaatttttcctgtttagggttcttttaaaaacaaattcccaaaatacggttgttctggagatattctctaggggtgctttttttgcacgtaccctgcatgggaagcgccagcaaaactgacgacttcatgcatgtgcgacaagtggctagttctggaggaaagcgcagacctcattggcgatttcacgt

SEQ ID NO: 95472 - DNA, 171 bp, Glycine max
tgtgttgtagggttctctttctgatagatttgccttctgctgacttgaatacctaagtgctgataacagtagaattatctccttgaaatgcctggatatgtgctgcttaacatactatgtttatcattatgctggatgatggataacttctaatccaacttatgttctgac

SEQ ID NO: 95473 - DNA, 447 bp, Glycine max
  unsure (1)..(447): unsure at all n locations
taccaaatatgtaacaccctagatgaatcacacctaaatgtcttggatccanagttgtaaaggtatgagactatacagttaatgatgacttaaaggaattaattggtattacctatatcaacaagatgcatatacttttggatagctcatcacttaagatctctatatagttatgcgttcctggcttggattatgggataggtgaccttctgggaagtttcccagaaaacgtgtgagtgaggacaaagcacgctaaaaagtcgcgtattggcttgtgggaacaatcattgatcctaanagcagccgaagcagattttcaaagtcttagaaagggctacctatggaaggttntgaccaacaaggatattgagtgaatgaagtatcattgtgtgaagtgttgttgtgtgagagatgccatggagtcaacaatctgtggtgttacaaatg

SEQ ID NO: 95474 - DNA, 473 bp, Glycine max
tactcacgctctataagcgtgggtctgcgagacaaaggtcaagtggtcgcgatatgcgaagatgatgtttcaagtacattggatgtggtacgaccatgccctcctgatttccagctgggaaattggcgagtggaggaacgccccggcatttacgcaacgagcataatgtaaacctttacagttttaaaagctctatagttgggcctaggctttagaggttttccttttgttaaagctgtgtgacttttgtttgaatttataatacaaggatctttcttcatctgttcctacgtctctacccattctcattcatttgcatgtttatttctttttctgaaaatggcagatccgatgacgagtcccccgaaggtactaatacctgtgacccacctatcaacttcgagcaagaaatgagtcaaacggaagatcaaggaaacgaggatgtgggactctccccacaattagaaagaatg

SEQ ID NO: 95475 - DNA, 358 bp, Glycine max
  unsure (1)..(358): unsure at all n locations
tctcatttaaatggccatgttntgaatcggccaatgcgacatcttattgcattangaatcgctcgcggcgtagcgnttatgcatcaatcctctcttatccacggcgacatanaaccgcagaacgttctttntgatgcagacttcgaagcccatttatcagatttcgggcttgacaagttaacagttaccaacaacaacgcagttgaagcctctacttcaagcacttgtacngatggcacgttgggctacgtgtcaccggaagctactttaaccggtgaggccaccaaggagtgtgacgtgtacagcttcngcatcgtcttgctggagcttctcacggagaagaggcccatgattgtca

SEQ ID NO: 95476 - DNA, 446 bp, Glycine max
  unsure (1)..(446): unsure at all n locations
ntgagcaaattgaaatgacaataactntatacacggatgtccttttgagtcccaaaatatatcgagacgctccaaattgaaaatggaaactcttagaaaattcaaacgacaataactttntactcggatgcccgacagagtgtcgtaatttatcgagggatgctccaaattgaaaacggaagctcgtatcanattcaaacgacaataactntttacttggatgtctgattgagttctgcaatatatcgagacgctcaaaatttagatccgaagctctgagaaaattgaaatgacaataactttatacacggatgtccggttgagtcctgtaatatatcgagacgctccaaattgaagaccgaagctcataggaaattcaaacgacaataactttttacttggatgtccgatagaatcgggtaatatatcgagacgctcaaaattga

SEQ ID NO: 95477 - DNA, 182 bp, Glycine max
tgttatggtcatgttcatattcttatatgctgctgggctgacacctatgggtctgtagggcttacatgaagatgatgctcttaactgataacagattagttcgttttgaccgaggcgaattagtttatatgcttacataagtgtcaatactagtcataaaacatctggacaagtaataaata

SEQ ID NO: 95478 - DNA, 451 bp, Glycine max
  unsure (1)..(451): unsure at all n locations
cctataaatactcagctatatgactccttggagttgntcatcttttagatgtgttgccttattgacataactagaatttttctttgagtcttgtttttaatttggcaatctaatctagtgccattctaggacttcctttgtgttccaccttggcttgtggtgttgtccttatgctttattattttttcttgaatctcattgaattaatgtcacattaaatctacttttggtttagttctcatttcatattttggtttcttgtctttgtttttgtgtttaagtgttgcctacaataaagattggaagaggaaattggtgcgttgcttgaaagaatatttttgagtcttggaggtaaaccatcctaggagcaccattggatttgaaacaaccaaagcctcaacaaattttgagtgagacacttgagaaaacagactagcattgaagacaaatt

SEQ ID NO: 95479 - DNA, 453 bp, Glycine max
  unsure (1)..(453): unsure at all n locations
ngtccttaaatttntannattttctgtgaagattatataactatgaactgtgtattggttntctgcagttatggagaatagtgaaacagtcaaagaanaggtggttttaaatggtattagacaaattgactgccatgtaagctttatgtaattntgttgatctattttattcatgaacgttgtaattattatttttaacctttaaattagaatgttaatatgaagctggttttttattgtgtcagtttggaaatgatgatggtcttattagagaaggacaatcagaggttgatgatgtcgatcttgatttgtgttacacctacgattgttggtatgcaaaattgaatagtataaactttgtcaataagtacttgtagtttcccatgagggagaatacttgtgcatggnggcatgtcactcggttttgaactcccttgagactcagtctgatca

SEQ ID NO: 95480 - DNA, 219 bp, Glycine max
tctatgtcaaacttaaaccttaaggttttttttatgggattcatgcgcatgcactaaaatatagccatggttttatactacatcgttacaatcaatacaaactatttgctcttacttcttatttattgagacaacatttatagtcgttgatagatactaagaagaccaattcctatttttgctcccatgtctttatatggacaatcataaattcaccat

SEQ ID NO: 95481 - DNA, 170 bp, Glycine max
  unsure (1)..(170): unsure at all n locations
ntgtggagtagaaacatgggaccaactcattgtatttcaaaatagaagtcgtatctagtcaaggtctgagagaccatacaagttttctaacgaattctaattatgtgggccatttagtctatcatatgctgacaatagccgagaagcccatgaatctcttccggggcgga

SEQ ID NO: 95482 - DNA, 492 bp, Glycine max
  unsure (1)..(492): unsure at all n locations
ttagaacgtgctgaaactgctggtaatcgattaccatatatgtgtagtcgagtacacatggcgaattttgaattcaaatttaatacctgttgtgaatcagttttggccactggtgatcgattacatcctctggttatcgattaccagagaggaaatttctcgtagaagactctataacttaattttcttggcctagcctattgcttcttctattaggaatgaccgttcttattaatataccctttctaagactctatagactgtcttgatcatctatcttgaatattgttaattgctctgtcttgaatacagctttgagacgcatgtgatcttttggcatcatcaaaacatcatgctgatcctttgtctacaatctcccnctttttgatgatgacaagtcctgaaatcaagactactatgttcaagatgattgcgacgtcgcacaaccgttacttcccctatcttttggcatgtgtgcgtactttacttatg

SEQ ID NO: 95483 - DNA, 325 bp, Glycine max
  unsure (1)..(325): unsure at all n locations
tcctatctatatatctgctaaatcattttcttgatctgataacttcttatcagacgttagttcatcattgaatntaacatggatggattcttctacaactaaagttcttgtactaaanacttatatgctttagatgtattagataaaccaagaaaaatccctttgtccactttggaatcaaacttagcaagttgatctttagtgttcatgataaagcactcacatccaaatggatgagagtatgaaatattgggtcttcttcctctctatggttcatagggagacatttttatcaatggtctgatcaatattctattctaaacat

SEQ ID NO: 95484 - DNA, 448 bp, Glycine max
  unsure (1)..(448): unsure at all n locations
actcacctatacctccaagaacttaagctctcaatgatggaggaagagaagaagaagaaaatgcatagaactttctgtctctttctctctcattagacaaccaacacacaacaagaggggggagggggcgaggggtgcttctctnttataaagggaatggttatgttaagtgggagccccacatgtgggttcccatacgtgttgtctttttttttcctattcaaactaactacacttaaggacttaagctctcaatgagtctctaagttatactaatctctaaataattctacagtgataagtcatttatattctctctattatcttgatgaagatattaagagaggagaaacattatcccttcttataaattaactaaagtnttgaatctaaccaacatatctaacttcatatctattaatctcttgtcgcctaaactttattctaa

SEQ ID NO: 95485 - DNA, 460 bp, Glycine max
  unsure (1)..(460): unsure at all n locations
tatctcagaacgttgagttcatgaacaagattcgaggtgcatggctagatcaactttattggctcagtctattatctttcacaacagttttgggggatccttccaaactttgaaaggttgagtggctgaataatgtcattttgccaacaaccatttcaccggtgctgatccaacttccctcgtgttgctgccgaagctcatatagttgaggttggagggaaacatatncaatggccccattccatattttatttcccataacaaattgaaatcatttagcgtagcttataatgagttgagtggccaaattcctgcctgcctatgagccatgccagtatcttactgttctgtgcngtactttatgcactcattaacatatcaattattaatatataccctatatgtcgacatgacactagagcatatttatctgcatgatattctatatatatgatgagca

SEQ ID NO: 95486 - DNA, 487 bp, Glycine max
  unsure (1)..(487): unsure at all n locations
ctaagcttgcaaggatattcattaggtgttgtatcattggtgcaaataaaccatttgaatgttggacaagatacctgagtctcagcaacatatacatccctgngaattcctttcaaagagacaaaatctatggattgaagaacttgtgaataacataaacaaaattatccgtcgaaattaaaataaggagatagaagaaatactttaaactagtaacctaaacctaaaattcttccttgctccctagtcttttccattcttccttacttccttacaagaagagttctcagagagtgagaaacaacttcagattctcaaacaagtaaaattaatctaaaatggatagttacaacatggttcaattcaagttggacaanatcatgtatgtttcacattcctatacaaagccttcaaagaagtgaactgaaagagtaaacacgctagacagatctttatatatgtgatgatccaatctaangtattctac

SEQ ID NO: 95487 - DNA, 470 bp, Glycine max
  unsure (1)..(470): unsure at all n locations
cgcagaacggccggacatgatgtatgtcagggtgttggtntggtcatcgattcacggataaaagggatgtcccacatntatttccatgacacacattcaacaataatgatttggaaatttaatgcaaaactggtcatgcatgcacccatgtggacactcaagcatcaagtttttatggtcatgtgacactacggctcaagattcatttttcctatttaagtcaacctagtgtttccaaaatatgctcatttatcaattcatgcattcatttgagtccattttgggtgttcgggaaaatattcacagcattcacccttcaggtgtatacacacttttntcanaaactagtgttatgatcagcgaatctttntcaaagaaaagctggaagttatttctttcaaaagcgtgttggctttcagttgaaagaaatattttgtcttgttgttttgtttttgctcctaacatactac

SEQ ID NO: 95488 - DNA, 386 bp, Glycine max
tgtgtctatatggggtgttctcgtctttcaaaaggttacaaatgctactctcccaccatgagacggtactatatgtcggtagatgtcaccttttttgaagacacacccttcttctcatcctctatggactactcttcttctctccaggaggatcttcctatctcttctccttgtcctttagataactcataccataatgttagtggtgtcccatctacctcaccaacttcacctgacgttatctctccacctctggttaccgatcaacccaggacaaggcagattggatctccactacctgaagcctctcctagtgattctcgttcttcttcaaccaaacctctactcatgaatccttcctcttctactactcattctgactcaca

SEQ ID NO: 95489 - DNA, 241 bp, Glycine max
tcattcgcctttatctcacttatattcacatttaaatattctctatgcttctcgagtccttttgttcacctattcatgctcactcatattgacaactttctcctggtagatcacttgtttcccattaagaggaatttgtttcctgtcacttatccaaaggaaatattagttgttatattatcacccctccaagctttagaatgattttttatgaaactatgcgataacataaggtaatcta

SEQ ID NO: 95490 - DNA, 411 bp, Glycine max
  unsure (1)..(411): unsure at all n locations
ctcagcttncagtctccttacatgtagaagacacatattatataattttggtctgtgcctcagaccaagtattcacttggtttatcaattaccatctgtattattaagaacattgatactatgtattgtttgaaagctaattcttgagttctaacaacaagcgtgcttcagaatatgtctctaaaactctaatttagatttatactaaagactgctgtattgtgttatatatcgcatgacattactcgtgaatataatacatctcgtttgtgcttgttccttcattgtgaaggtttgtatagttgcatgaatggattgtgtgtacatcaatatttttcttcttgcacgaagtgtatatcatagacgcgaagattgcctcttatttaatgaaagatatataggagtggagct

SEQ ID NO: 95491 - DNA, 313 bp, Glycine max
aactcaagctttcatgagactttgatgtctaagaaatgccagatgactggttgaagattactctggatccaagttttaagaacataggagatatccataattgagctaaatacagaggtatacaacttatgagtcacactatccatagattgttggaggttacttcgagataaattgcccactatagcatacctgattatgcggcacgtggaaatccatgaccaaacttgcccattctgcagaagcacagtggaggatgcagcacatgtattttttcagtagcagaactatacctctatggtgggaagctatg

SEQ ID NO: 95492 - DNA, 478 bp, Glycine max
  unsure (1)..(478): unsure at all n locations
ctactggaatganaatgaattagggtganttgacaaatgaagtgatgaccattaatggttaggtatgtatgatgggtggcatgctatcatgctatcttttgttcttcattggatcgaggactctcaatttgtagaaaagaggtgaagagtaattctggaaacaatggagtattaaacttcactttgtgcttcctgccttcattgttgacttgaaactctggatatagaaaattctttcaattttccccattatattccatgtaatcacttcttcatgaacacattctgttatcataccgatgcttggattgtgactgaatttactcactcttgcattgctttatgcatgttccttttcccttttatcttctcactgaatgggaacattcacatctcatgacatatctatctgtatttatggctggagtctgatattgctgtaggtaaaaatatcaatacattggcattgaactgactt

SEQ ID NO: 95493 - DNA, 262 bp, Glycine max
  unsure (1)..(262): unsure at all n locations
aagaaaagttctccggattgtattttatgggtgggtgtgtttttacatggagttcttagaagcaggcattggaacactttcaacngggaagccgagtttgnnnnngcaacttcttgcacatgtcatgcgcattggctaagaagattgttggaggaacttcagttgttgcaaaaggaaagcacaaagatctatgttgataatatatctgcacaagagcttgctaagaatgcggtgttccatgaacgaagaaagcatatagata

SEQ ID NO: 95494 - DNA, 60 bp, Glycine max
cccgggtgctgtctataattcctcgagctatatacatttttgtttttatttcagaggaac

SEQ ID NO: 95495 - DNA, 331 bp, Glycine max
tattctagcttgcttttcaaaattctgtaatgtatttaaatagtcgaaactggtaatgcattctttcgtttactgcaaaagtgctggctttgggtgagcctaattgcaatgccaatgccaaagttctgcttcatgactcggtgttcaaatgttcaagtcattgaaaccatggttgttaaactcatgattctacgtagaattgtggaggctctgtaaactcgactcgtataatcgaatcgtacactcataagaagttactcaaataaaaaaatattaatattcctttcaaattcgatcatattttattttctcttatctctctttaatggtc

SEQ ID NO: 95496 - DNA, 500 bp, Glycine max
  unsure (1)..(500): unsure at all n locations
ctaagcttaactcctaaataaattcttttatattaaatgttttcattttagtttttattatntaaacaacattataacaaatttaatggtcattgataatataaatactcttacattctcaactaatcataatgacgatataaaattattttagataactccgtgttctctattaatattatgttgattcaaatgaaactaaatgttgatatctaaaataagatattaaatttacattctatataaaaaagaaataaagaatcatattatagatagactgtggaatcactaaggccaatttttgtccatagtcaatggatgggtctttcaatccaaacttgagcattaatgagtcggtaattagatcataatatagtcaagaatctcacccatgaaaccattcatttttaagtgttaaacaaccattagccaacacacaatagttgcttagatacctatgctaacatgtaagcanaacaaanaacacgattcaatccttg

SEQ ID NO: 95497 - DNA, 249 bp, Glycine max
  unsure (1)..(249): unsure at all n locations
ccaangagcatcgggccaacattgaggatttataaaattggaggaccaaatttgtgaattaaattactgngggaccaaatgcgaaattggagctaaagtgggggaccacaagtgaaattttgccaaaattttatgctgatagtgtctttctctcacgaaaagaacatgtagcctctgcaccctattctgaggcacaactctatgacccggtgacaggatgggagtggacaagactctatgccctatttc

SEQ ID NO: 95498 - DNA, 221 bp, Glycine max
tagcaactgcgtgttgttctcccatgaaaatggagaagcaacataactctcagctaaataccactatatgctagcttgggtcactttctataatacattgacgaatactttaattataagttgagttattttatatagtaaggtagcccacatgcttgacatggcgtaagggtgattaaaaagagacaatgtgtcaataaaatttctaaatctagcttatc

SEQ ID NO: 95499 - DNA, 319 bp, Glycine max
  unsure (1)..(319): unsure at all n locations
actcggatgtccgattgtgtcccgtaatatatcacgacgctcgtaattgataacagaagctctgagaanattcaaacgacaataactnttaactcgggtgtccgattgtgtcccgtaatatatcgagacgctcgtaattgataacggaagctcttataaaaatcaaacgacaataacttttaactcggatgttcgattgaggcccgtaatatatcgagacgctcgaaattgaaaacagaaggcttgagcaaattcaaacgacaataacttttgactctgatgtcagattgtgttccgtaatatatcgagacgctcgtaa

SEQ ID NO: 95500 - DNA, 348 bp, Glycine max
gcgtgctcttattaaattctgaccacgtataccttcctgtttcttactaaaatattttcaatcatgtctcagcatggactctggtgattaattaatgtatcagtgaaagctcagttacaataatagtataaaagagggttggaagtgtattccttttcattagataccttaacagcatgttcaatttcccattcacatgacaaaatgcattgcatcatcaaagaggccaatatcaagcttataaacacagcatggaagtgtctatataatgtcagaagaagatcaaaatatgatgcattccacacatatctgagttttaatccccttagtgttgtgttgagatggcac

SEQ ID NO: 95501 - DNA, 419 bp, Glycine max
  unsure (1)..(419): unsure at all n locations
tttcattcttgagctgattaactatattgccctgttatctgaattcgatgtacggcagatccccgtgtggtgcaagttgaaacatggatgtccaggtggccaatgcatcggccatttgattctcttcccgaggtatgtggtggaaagaaatgtcgtcaaagaattcggctaacttcaagatgtgagtttgatagggtatcaacttccgatccctagtttcccattctcctttcaactggcgtatcaccaaagccgagtctccatatactttgagtagttttacatcaaaatcaatggccgcttgaaccccgagggcgcacgcttcatactcggccatattggtggtacaatcgaaacctagcctggccgtgaaaggaatacactgatcattnggggatacaaggactgccccctactca

SEQ ID NO: 95502 - DNA, 485 bp, Glycine max
  unsure (1)..(485): unsure at all n locations
ctcaagcttaggcatctaacatccaacccaactaagaaacctaagataaccttctccatctccttctccaactcaagatcattagaatgcttgaaacactaaaactcaaacctgcccaaaacttgctttcttggagagattccgcaaacgatatttcaagcacaataagtggtgcaagaaaaatgagttactgagtgagcgcatggcatgaggctacagaaagaaattactttacactcaaaccaccacagcttgaccagtaatttcatcatgaagctgaagcgagccatctttcatcaaatntaggctcaaactcttgaatctctcccttgaatattgcctagatgctttcctccagtcagttccaggtttcatcatcgccacatactcctcataactgatgcgaccatnctgtgaagtgaaaacagaatatcgataaagattggaatgacaggtaaagaagcatgcacgacatgaaccataaa

SEQ ID NO: 95503 - DNA, 470 bp, Glycine max
  unsure (1)..(470): unsure at all n locations
tagaagacttagacatgttacgctgattaactntatcatgaaataagccatatgcttgacactgtaagagaggaagagaacaaatgaattatttcactttggcattcccttattggaaaaagagtaaggggtcacanaataaatttgttaataatatgggcctataatgtagatgtaattattctcattcacccagtcaacacttctacttggatacaccttaataatagaagaatgcgttgctcgtaagcacgtcacaattcatagtaaagtatgtcaattcctgtttcaagtcattgactatacgagaagaaccacaattggtttgaaaacattaagatgataatctcctactccttaaggtggtgtggttattgaaaaaactcatgataaaatagttcacattaatgttaaggaaaataattcacctatactagtttgaatgaataactaacctctttaactgatct

SEQ ID NO: 95504 - DNA, 62 bp, Glycine max
  unsure (1)..(62): unsure at all n locations
ngtggagtcacctctggagtggctctggaactacctncgattattaatgatgatcttgggct

SEQ ID NO: 95505 - DNA, 314 bp, Glycine max
tctagtcatctaaggtccaacatgctatggattctgccaaggtctttcttcatctgagtgtgacaatcctggaagagaatggacaaaggcaccaaaaagcgctaaacaatgtggtgtcattggatgctgtatttgccaaatggagggctactgctcgcatagtctatcaagtggagtgccctaaagtagcttatgccatcttcgtatttgttgaaattgtgaagtcgaaccaccaactatcttccaaggttggcagtgttttgaccaagttgttgtgctccacgttggatgatgatgaaatgtctgaacgttgc

SEQ ID NO: 95506 - DNA, 179 bp, Glycine max
agcccctccgcggcgcaccaataggtattcttattttttgctacaacaggcaagaatatgttctatcgtccccttacgtccaaaggcgcccgatacttctatttatcacccttcagagccaattatattgcatgcatctttatggcacctgtaaaaagatacggcttaaacgaacctta

SEQ ID NO: 95507 - DNA, 67 bp, Glycine max
ccttaaactaagctatcatgtcttctaacgttatcatttgtcggggcctgtgatgggggtgttctag

SEQ ID NO: 95508 - DNA, 415 bp, Glycine max
  unsure (1)..(415): unsure at all n locations
tatacttgcccttcattaactgtctctgcgcttggcggtcactctcaacanagtactttcgacacctactgtacgttgatntgaccaatgctgttatgggaatgttgcgacaatccttcaaaaccttgttgatacattctgagagggtggttggcatgtggccatatcgacgtccttctctatcataagccatcgtcccattttcctttgaaatgcgatcaatccatgttgctatggctggactcagttcacgaaatttttctaaactttgatcaaaaatgtgcttgcaaggagtgtaggctgcataaaattagttatgaataacatggataagtatatatgaaagggtaataaacgggaccatcaaatatgaaatcttacccaatttcttcaacatttctttttgttttgatta

SEQ ID NO: 95509 - DNA, 359 bp, Glycine max
  unsure (1)..(359): unsure at all n locations
tgatttcctttcctttttttcataaagcaatgccacttgtcccattttaagtggagcaaaaagggacccaccttttccccttgatgtgacttcatactcacccacaaagagagaaaanattgaccttttggatgcagaattcctacctcggtttgcgtgccgcttctctggttccagttcctcgcgtttctctgcacccgtcggggcccattttctaaagtaggcaatatatatttcaaaacgctcagaatgagaccgtgagcgtcggtcacaggttgtgtttgttaaattntatgttacacgccaaacgataattttagactaattaattgagaattaatctataactgtccagttat

SEQ ID NO: 95510 - DNA, 277 bp, Glycine max
  unsure (1)..(277): unsure at all n locations
cctcgcctccacctctcatacgtgcgatctcaacatggatagggcgaggttagtctatgtgttggtgacgaacatggacatggatgtgggcttcgttatctctggacagatctcacagatgggccagtccaactctttcangctcggatgtcccgctcccatcactgcattgctagagaagtcgtgcctgaatcacttaactttgagttccttaggcttgccattaatttggcttacattataaagaactgctggaacccgaatgatcccacaatca

SEQ ID NO: 95511 - DNA, 186 bp, Glycine max
cgcccacgtagcccatatcctcgtgtcgctaaacaccgggtccccaacaagacgcccaagcgtgcacaacacccaagcaaaacaacaggcaaacagcacaactatcacagcgcagcacaacagagcaaaggcagaaaactctgcaaaacaccaaccaaagcacagcgtggcgcactgaaagacccc

SEQ ID NO: 95512 - DNA, 353 bp, Glycine max
  unsure (1)..(353): unsure at all n locations
ataatatgatatataggtaaaaaagttcgacatacatgtaagagaattgtacactctggtaagaacatgtacaattctaattttcctttttcctgtttgtgccttagtttatcacttgacatatgcattgttgaatactcttcacaatagtacatgccattctaagacactgtgatggtagagttgagttattttgtcttgtgagagcctatatcaacatggtgttcagagttgatcacattgcctttagcttccatctttacgtagaacgaagagccgtaagaattatattatagatacgaccattatgactatanggagtgcacaacccacctctcaccatagattttctt

SEQ ID NO: 95513 - DNA, 136 bp, Glycine max
  unsure (1)..(136): unsure at all n locations
agcttctctcctctaattccacatggtggagtcttaagtgtgtgtgtttctctctacnactataaganccgctcgctctatcttatttctacactcactccatatttcttctagtgggctttgaattctccatgtc

SEQ ID NO: 95514 - DNA, 216 bp, Glycine max
gtcttcgccagtgaaaggatcgaagtggatcttataatatgcaacattaatcatcctgcttagacgaatgagaaaactgtggcaaataaagagggtgaggatgagggagaaacccatgctgtgactgccattcctatacggccaagtttcccaccaaacccaacaatgtcattactcagtcaataacaaaccaccttcttacccaccacccagtta

SEQ ID NO: 95515 - DNA, 361 bp, Glycine max
  unsure (1)..(361): unsure at all n locations
ccacgacctacagangacgtgaatacagccactgttatatgctcacgcccgcataaagacaagtttcacagttatcttagggtggtagcgcgagacaagattcctattgtgcactctatctggaatgatgtacccgaaatgctcatgaacatgatatgggatgacatattggtatgtccctctttgtggtcacttaatttttgtacaaacattgatatctaagtaaacatgacgccaatacaaatgcgttgtaggctaaatttgacatccccgacgctgatagtgcaaaaaaaaggtcatgtctactgtggctacacgatggaggcaatttaagtcatcgctgacaataaaatatgtgtat

SEQ ID NO: 95516 - DNA, 368 bp, Glycine max
  unsure (1)..(368): unsure at all n locations
cgtaagctgcttgagcagagtctattcttacaagagggatatgcggacgaaactcagtataagttagtctaaacctaagagggccgtctaaattgggcctagtccaacaagagggatctgaggatgaagcttatattgattctgtctgacgagggatcgaggttttgtaatttaggctacaacatataacatatgagcatgattgattagagaaatatatntatatgcatcaagttgtttgttagaaagacccaacatttctacctactattgtcgcttttacttaccttgcattnntatagttttagcataaagggtctggttaaattctgtttgagattatcaatcatacatgttctctcaacaat

SEQ ID NO: 95517 - DNA, 375 bp, Glycine max
  unsure (1)..(375): unsure at all n locations
ttgagagactctctctctctccagcgaagagggaatttttgttatggtgaggcaaagtggagtgtgtcttcaaaatcgtgtgcaaggtcctttgctagttgtacccccactcaactttgacgcgtatgaagcaagagagtgaatatgtatttattatttcaagagttgttatcaatgcataatagttataaattattgaaacatattaaccactattcttagaatattattaaaaattaaaaaataaacatattaagacatgcaattgttgttatttataactctttttatgttttcttataattnttaccataaatatatgttttaattntttaatcaatacttntatcacactaagttttacacccttagaaa

SEQ ID NO: 95518 - DNA, 327 bp, Glycine max
  unsure (1)..(327): unsure at all n locations
cactctngaaactcaagctaacactacaatcctccataccatctaatgataaaagtgatgattaatgagtagaatgctccacaagcgagaatctaatattgtatgcataaaggtcattcatctaaaaattgtgtgattaggagatatggagttcctaatgggaagtatagatgggttcccaaaggaacaacaaacgttactaaccataaagaacccaaattcacttgggtacctcaatagactctctaaattgttttgtatgcatgccttgaagccaaagagcttatgtggtatatggacagtgggtgttcaaggcatattattgga

SEQ ID NO: 95519 - DNA, 422 bp, Glycine max
tttcccctcggacataaagcacgaagacctctccgaaatcgcatactgcggccaatgtctcagcatatcagtgttacagctgtggattatgtaagtctttatataaaagactttcaattacctaagaggtggctgtcaattcataaatattgtaactttacttaacataaacatgcatcgtactgaaacatgtatgcgagcggggaattctgatatctatggataccttgagccatactccattcagaggtcttggcaatcacagattgaatctgaaagttacataaagagttggatgcagagttcacaatgcgatgtgtatcttggagcctacctaaatgggtaagtcacagaactacaaaacttaattaaatgttactaatgtactaacccatattatgtccactcgcacggacactggc

SEQ ID NO: 95520 - DNA, 427 bp, Glycine max
  unsure (1)..(427): unsure at all n locations
ctcttctagctagcactgctctggttngtgtatgagagtaacttcaaagggtgcctctcataaactcctaaaatatctntttnttttctttgttcttttagaagaaatggaaacaatgaagtaacatttcacaatgttgcccaatgggtatgaaatattcaaagngagcatactcgtgaatcttataaatccacattaattaaacccatgttttccctctcattgcaatcttgttatttgcgtgtggatttcactggacctggccggcaacattgccaatttatgcatattggcttttctttttctctttctttatgtgaatgagtcaatttcaattctcttgcttatttatatgcacgaacgcattatttataatattaatatacatgccgaacgaagttgataatggtgaaaaacaataggtact

SEQ ID NO: 95521 - DNA, 420 bp, Glycine max
  unsure (1)..(420): unsure at all n locations
tttgtatgtggatgaatgaacccgcaactattcgttccctctctcctccttttaccaccaaccaaccttataactcttaaaattctaaaatgtgaattgtttccattggaggataactgtgatctcagaccaaaataataattaagcttgtgaaatgtgaattgacttgatatatgttcgctcactgtatatctagttgtgctattctttgcatttggaattttgataccactctcctatatggaacagactcgctaatagcacttgtgaaacatgacacatgtagaagttccacgtgcatgcatcatattaataggcttgtttgctcttcaacgttatggcacacacaagggtgngttcttgtatgctcccatagtatgtatatggctcttctgcatcagagccattcggatatataat

SEQ ID NO: 95522 - DNA, 306 bp, Glycine max
  unsure (1)..(306): unsure at all n locations
actttgtagaaagtgtcgcgagaaacaaatgcccagatcaacaatctctttcagtctgatggtcacaaagaacatcgagagagtggtcttgggcatttctcatttgttaacgctctctcacacattaactttctaaaagctaattattaacttataaggtaagtttaggtagaatagtatgtaattttgtcttctcattttcttctcttataaatgctgatagagaagtgtatataaacatgccccanaacgcattctgtttagtgttctttccaaataataatacagaatgtattctactccata

SEQ ID NO: 95523 - DNA, 416 bp, Glycine max
  unsure (1)..(416): unsure at all n locations
tgccgtggtaacctggaacctaattgtccatgaataaaaaattgcacctgtcgccagactctgtggtttatgctcctctgccgaccaccacacagacctttgcccttctatgcaacaatctgaagcaattgaatagcctaaagcttatgctgcaaacatatacaacagacctcctcaacctcagcagcaaaatcagccacaacagaacaattatgacctctccagcaacaggtacaatctcgggtggaggaatcatcccaaccttagatggtcgaatccttcacaacagtagcaacaacaacagccttattttcagaatgctgctagcccaagcagaaccatacgtcctncaccaatccagcaacaacaacaacaacaacagccccagaaacaacaaacagttgaggcccctccgc

SEQ ID NO: 95524 - DNA, 401 bp, Glycine max
  unsure (1)..(401): unsure at all n locations
tcgaggccatggttgactccttgngacaagctntttggtcatgttcatggnccattcctttgtgctgagctctgtaagtgagtccatgctgaattcccttttattgagcatgtgatcaattcctctaagtcaaactatttgacctggccattagtaaatttagttgttgaagcttagactatgatgatgtctatatctccaacgacacagagataagatacttaccaccactttcttccaacaatataaggaacctcctcccactatatgaggaacttaccttaaaataataggaacctctcattactatgagtagataactagtataccccctatgaaccctacaagggaacaacacacttttgaatgtcctagtcataagtcatcttcatattgtcata

SEQ ID NO: 95525 - DNA, 404 bp, Glycine max
  unsure (1)..(404): unsure at all n locations
gttgcgcgtactgatgggtaccatgaggtgtctgttgttgtttgacccatgccggtgttgaagagacagcatgggcatctccttccttcctatttgcccctgtngccccgattcttttggcgttcatgtttgtggaggaaacgtaatcaaactttcctctcttcaatcccacctcgattctttccccggcaaacaccagatccgcaaagctggacggcatgtaacccactatcttctcatagtagaacactggcagagtgtctaccatcatggtgatcatctctctctcaaccatgggaggagctacttgtgccgccaaatacctccatcgctgcgcatattctttaaagggttcaccctctctcttgaacatattctgcagtngagtacgggccggagccata

SEQ ID NO: 95526 - DNA, 165 bp, Glycine max
atgcgcttgaatgaccaattttgaacatctcgatatagtttgcaccctaatcgggcctctgagtgaaaagtgatgccatatgagttagccgagagcttcggtggtctatttccagcgtgtcgatatattattggcctgaatcggacatgcgaggccaaagatatg

SEQ ID NO: 95527 - DNA, 423 bp, Glycine max
  unsure (1)..(423): unsure at all n locations
acactttaaactcagcttcctggctggcccttagcattcaaaacatacctcttgcggtgtatacagagcctagcttcaatctcctgaggattagtcctcaacctgcaaaatctagagtaggtgggtaaaaattccccctcctccaataccattggcgtctgaaggaactcattcacgctgtctgcatctantttgatcangtgtcctcatactctaacttgcttgggtgattgctcctctgtggtgtataaattagcataaaactcctttaccacagctacatctatgcttccatcttggagaatggcgaggcgtttgtgtagattatgcctctccaattccactttaaactcgtcaaactcagtatgataaatctgcacatttctctccagaaggatatttcggccgagaatgttatcggtg

SEQ ID NO: 95528 - DNA, 267 bp, Glycine max
  unsure (1)..(267): unsure at all n locations
aactaccaatacacttctaataactaaacatcacctcttgaaaataaaacatggataaaataacacaacaaatataattaaacatcaaatataattactaataatatttcagggtgcaacacccttctctccctctatctccactcatcttctcctacccttaagctcttatccatggcttcctatggngtagaaattgntcttggctcatcttcttcttgaagtggcgtctccaatcacctttcctccctctttattccgctatca

SEQ ID NO: 95529 - DNA, 321 bp, Glycine max
  unsure (1)..(321): unsure at all n locations
ttcgatgttcaactttctgtttctttattcaggaagggatatttgttgaatacagcttgcattattcttggggaggcttatagttatcatatgaagggatctgttatttcgtgaacctggcagagagcgttgctatagactgagggtggtttgcggggtctttatttnttatgtaactgctgccacgctggtaccgatatcactccctgtgtctcggtccagacctgcggntatatttattatatgatcgggttttgccttgcanaaaaataaaccaaggtcctatcccactangtgatgtcttggcaacatggatcacac

SEQ ID NO: 95530 - DNA, 379 bp, Glycine max
  unsure (1)..(379): unsure at all n locations
tctaacgatatttcctctgatgactcttctaagtaccccatgttgcatctgcatctggttagattgtaacacgtctcctcaacaatatgtaccacgttatcaaccccgttaatggacaccaccacattgtgggtgattgttgggatcttcaacgttgtcgtcaaagtccaccacttcttccactgccaccactatcttcttgatattctncangtcccatacatgtaatgggattccccgcacatggaatgtccccttggctgtttattatagcaatcaatgtttaattacagtaataatctaatcccttaatgtagggataataatcaagcaaaatcaattacataaaaatagtaactaggaaactaaatcaataacg

SEQ ID NO: 95531 - DNA, 514 bp, Glycine max
  unsure (1)..(514): unsure at all n locations
cgtcctctcttattcagttaccgttcaccctctttnngtttattttttttattattctctttgtatgacttgcttgttatttttgaaaaagaatgcacggaacaaacaaaacagagaataagatacctcatattcacgtcgggtttttttggtacagatattcacgttggttagaatagttatagctatttcgttaacataagtttaaatgtataaataagtatttgaaaaaataaatattaacggtttcaaaaaaatgtaggtttttttagtgaagaattgnttagttgttatttcatgtgttaactctgcaatggtttgctgacactacatagtgtntatgacttgcgatagtggtgttacctaaccgattggatggatgtagtattagatanggcaatgctatttttaataatttacagtttgttgannaagtgttaatttcacgagacaatatgttactaaaatcattgaaaataagattttactacactaacatgatgacttgtataac

SEQ ID NO: 95532 - DNA, 265 bp, Glycine max
taggcattaacttccgttcaacatgaatgaggctatacactatgattcacagtggaagtgttctgaatagtgagaatgagcgtttaaacgggtaaactataacatgtaaatgcatgtttggttcaatttgaacgtacaaaaatatgttcaaaaggtgttagattaatttcatttcataggtcaaaattacattctctacactagattatctcttccacaaatttcttcctgacaaccattgatcccgatcaccgtagttgtcttt

SEQ ID NO: 95533 - DNA, 343 bp, Glycine max
  unsure (1)..(343): unsure at all n locations
cgtagtcattanaagagaaagaacatgtgattagaattatgaatgataatgctagtcagtttgtcagattgattgtgaagaaatgcattaattgtaacccggtgagagtgtgatccttatntttgagagaaaacggctatcattaagtactgacttttgcatgaatctcttaattatggactgaatgcatgaattngaggatgatgaaggccatgttttgattgtgatagccacttagccaaaaagctgaccatgtgcatgaatgaattatcccttgcacccagctntgagctgaatgaatgtttgattgattgaaccttgagcctatacnagtttatctcct

SEQ ID NO: 95534 - DNA, 448 bp, Glycine max
  unsure (1)..(448): unsure at all n locations
tgcattcataccatacttcaaagattcatgccaagatcactacttaatgataattggtgctctcaaaatataaggatcactctctcaccgggataccgttaatgcattccttcacaatcaatctgacaaaccaactaacactttcagtcatacttcaaatcacatggtcattctcttctaatggctaccagcttaatcaaaacaattatctaattcattcactccactcaaatcatacaattgctcattcagatcattcttcagcactcatttcatacaagacaatacactgcatatcactttcaatcaattcacttgtcanacaaactcttggtacaacacacaactcagagtgctgaaattaatataactgaagtataaaactgaattaaatgaatgacatactcttaaattactgaaacaacttaaagtcacatcacaatttaat

SEQ ID NO: 95535 - DNA, 349 bp, Glycine max
  unsure (1)..(349): unsure at all n locations
cgtagaaaggctagacatgatacatgtcanggtttgtgttggttcaangataaaagggatgccccacattatttccatgacacaaatgcaaaaatgatgatttggaaatnntatgcaaaactggtcatgcatgcacctatgcggacactcaagtgtcaaatttttatggttatgtgatgctaggactcaagattcatttcctctcatttaaatcaaaccaatgtttccaaaataatgttctttatcaatttgtgcattcatcctagtccttttcgggcgtccggggaaatttcacagcattcacccttcaggtgcagacacattctttcaaaaatgtttatgatcaatg

SEQ ID NO: 95536 - DNA, 246 bp, Glycine max
  unsure (1)..(246): unsure at all n locations
tctcgggtgctntacatattgttgtactctaaccttctgtccaacagagagtttgtcaaatcttttcagatgggaactcggttctacccacttttcttgctccgccacaaatccaacagaaatgctgttgtacaaagtatctacgtcataccctattccttgaacgacaccaacactacctgctccaattgagttccaattatttgcattgtcgtgcaacctcacccactctcccacttcaaacat

SEQ ID NO: 95537 - DNA, 484 bp, Glycine max
  unsure (1)..(484): unsure at all n locations
gcgtataagaacacaatngcctcaatcatatccagatatgcatgtgaatcacgacgcttttatttataatcaagccaaggctattgggcaagcaatcaatggggcaaaacacaccaaatgattatgatgatggatggctcaaattctcacaaaggtaaactcatcactttcaaattgagctttcaaaactatcatgacatgtagagaagaatcaaggatttcaagtcacaaaatgccaaaaactnttattttcaaaacaattacccatctcttgaacatatcctataattcaaagaagaacatgcaaagtcgtacatgcacacaaacatgacccaaaatattaaactaacaatccgacgagactaacaacattaacaaattaacaaaaccaacataactagcataaccaaagaacactcccccccatacttaaacaacacattgtcctaatgtagcacaattaatagatgaaaacaataaatca

SEQ ID NO: 95538 - DNA, 410 bp, Glycine max
  unsure (1)..(410): unsure at all n locations
ctgactntgagtcatcaagagattataaatatgtgaccatgacatgagtntcaatcaattatctctttcaatctctttcaactctttctacagaatttctgattcatttctcttcatctttctaaaaggtgttggtcaacactttctcttccaagaaaagttctttgataaaaaacttgtgttattcatctttttcattctcttttccctttgccaaaaagaattcaacaaggactaatcgcctgaattctctttgtgtctctcttctcccttctgtagaagcaagcttcatgatgttgaatccagaatgattcaagttggtttgatgataacaaagatgatgacataaatcccaagagaatgatttcaagattgagtcaagaacaattcaagaatcaaagagaaaattg

SEQ ID NO: 95539 - DNA, 363 bp, Glycine max
  unsure (1)..(363): unsure at all n locations
gcttctaaggaggtgagcctagatatgagaggtgtgtgcgtacctattctctatcttctcgaggaagatntctcaaagaagcttttcgacgaagttctctcatgagagcttctcaaagaagctacctactctatcaatagaagcgtgtgtaacactcgttggaaccttagaagaatgagagtcttgtaacacatacttcaaagctccacttctatacctcttttattacttcaatttcgtgctccccctctctgtgtctctcactgtttcttttcctgcatggaagcatcctctcgcagcttcttatccaaagctcatcttggtggtgaagctccttcttccatggctgattccttaatggat

SEQ ID NO: 95540 - DNA, 380 bp, Glycine max
  unsure (1)..(380): unsure at all n locations
ggatgattatttagagctgtcctattgtgctgatgaactccaacattgngggcgtaacattcactctcgacttatggtcgagattaatgagtgtaggagggagatgaatttctgtatgaatgctcttgatcctgattcaatttctcgttatttgcagcttgagaaacatttaaatgatttactggagcatgaagaataatattggaaacaaaggtcaaatatattttggcttagagagggggacgactctaattctcgtttcttccataatgctgcaaatgctanaaggaatattaataatctttcccagttagttgatgatgttacgggtattccactcgtgaccatgatgctatgtgcgatgtggcaagccctattac

SEQ ID NO: 95541 - DNA, 148 bp, Glycine max
tctactgatgctctaaaacattgttgctcatggaaggggagtaaaacttttcacaacagcaattaaaatgagataacctgccatatgtgtacgccaacgagcaatggtgagcctgaaggttacattgatccaaaccccctcagtacca

SEQ ID NO: 95542 - DNA, 368 bp, Glycine max
  unsure (1)..(368): unsure at all n locations
agcctgactcaagcaagataaatttgtcatgactcagagaactcatgcctgccatggatgagtgcaaagctaaccgagaaagcttgcaaaggaagctagagagaataaaagatataggaagcaatgaatagcatggaatgaaataagctnttaaagcttgttgttacaattgcttatatagttagttgcaagaataactaactcacaactaactctagttacatagtgattaaccaactaagctaactctagttacaagatgatctatgctaagagtccnccgccagctatgaatggatattagacattcttagcttggaataaagaaactggaaagcgccatgaagtaaagccttaatgtagatatc

SEQ ID NO: 95543 - DNA, 400 bp, Glycine max
  unsure (1)..(400): unsure at all n locations
cgaacgaatgtgagacacatcttcttcaacctgtgtgattcttgactccatttcattgaagcgcatatccacttgcgattccaaagtgtcaaacctctcaccaacaatggtttgaagaccatcaaacctgtccataatcttctaaagaagagatgaatcttctccttcatgttcttcttcaccaacatttctagcacccttcttcacccaagagccatcatgctcctttatataaccaaaggatgctatgactgaagcgcctataaggaatgatctcttgattggaacataacgttcacaatcaagccngatgttgaaatgttgaacgaaaanggttacacatatgaggataaggcaatggtgcattcaatcgcaatgccttatgcatgccatatctaac

SEQ ID NO: 95544 - DNA, 257 bp, Glycine max
  unsure (1)..(257): unsure at all n locations
cttacatgcatgtgcacaccatatntactattactagatcaactgatgcaatctcattgattgaaaagataatttatactactcttataatgtagtggtcaactaacaaaaataatataatagaaaatagtgcttaagccattcaaagtcaatcaatttgaatctcattattagtattatacatctatatgtgtcaaagagaaagagaaacactcctggttatgtcttacacgcccaaacattattagacaacatgc

SEQ ID NO: 95545 - DNA, 426 bp, Glycine max
agcatgagtgagttgagaaatatatttatattcatcagcttgtctgtttaaaatacccaacatttgtacctactactatcactattacttaccttgtatcttatactcattagcttacaggtgtagtttaaactctatttgttaatatcaatacatacatagttctctcaggcagtgcttcatttctgaacataactcacgctaacattatatccctgtgtttgatactcagattcatccattttaatttttaaatacttgacgcattggtgcgtcttccgcgtaacccccattgaatatctcttgatacataattgagaataaaataactgcaatggtgagtcaacacagttttatgtggccgcttgaatgcaacatttcattctactaacatagtagttataacatatacattgtcttttgaac

SEQ ID NO: 95546 - DNA, 302 bp, Glycine max
tttctctatccatatacgatcactatcaagacttacgaacatcttatatatttaacattgatatatgttcatagaatttactgttaaataaataacgattcattattatggggggggggtggggctctctcataagcataaatttaaatcaactcctacataatctatacgacactctgagaggcgtgacaccaactagtttattctactttcacttgaggaccatttcattctatacttccttctatataactatgtaacaacgcctatttattgcaaaaattaactaaactacacacaaa

SEQ ID NO: 95547 - DNA, 418 bp, Glycine max
  unsure (1)..(418): unsure at all n locations
aaagacttggagaacaccaagaggagtagcataggaatcacgatgtggacaanagaagagacatatcagaagatcaaggtagacagagacaccagcagcaaaggcacaagtgacaacctccacaagaacaagaatcagcctagcaaatcagaggtgtaatcaacaccattggagaggattttcctttggaggacaatctaaccagtcttgaaaggccatcttcacaccattcgggacatcgacatcaactgtgtcaacacaccattagaacgaaggttccctcctgtcactttcacgaatagagttcaaaggtatcaaccccatcaatcaggacgaccccatgtttgtgtccatcatcatcgcaaactttatggtatgcaagggcctcatcaactatggaagctccatagacattcta

SEQ ID NO: 95548 - DNA, 330 bp, Glycine max
  unsure (1)..(330): unsure at all n locations
ttctagcgtgcttattcgctgtacctggagtgcgtcattacaactaggacagattttggcagggctagtgtgaatccacactaccctccttccttttttcttttagaaaaacattggatatgtaaactttaatttaaagcaaaaatctantttcttatatataataacataattatgtttttattccccacacccggcaatcaacagactaatctcttgaatgtacgttaattttctatatgaagacatctcttgaacatttactgaatatggcaacttgctttctcctgttgaaaagctanatatcatgaaaaaaatgtcactaatagt

SEQ ID NO: 95549 - DNA, 461 bp, Glycine max
  unsure (1)..(461): unsure at all n locations
tgctctctcatagtaacaacaatttaagcagcgtttgtgaatggtttctgtgaagaagggatatttctatgggtcatctcactcagagtagacaagttctttgaaatatctgagggttatgtaaagaaagaaagagtttgaattcaagtttctcaaaactgaaaacgcaaaatcaaaattttgaaaattttcggatacgcgccgcgaaaaactttggcgggtttgcttgatgattcgtaatttcgctgtgaatgtgatgagagaattcataatactgtgcggtgaggtgtatggtagtggaatatggatcacgtaacagcctcacatttggaatttggatggagactgaattattaactactaggattntttctgtgtctggttctgcttatttatgatatattcgtttctcatcatcatctatcactgaataattttagaattatgtaattaaataagaa

SEQ ID NO: 95550 - DNA, 356 bp, Glycine max
actaagctatcagacctgagacaagtttgaacaaacaggtgcattctataatatgtggatcaacatgaagcaatagttctttatgaaaaaaatggaatgtggtattttattcttaatagaggaagaaggcattcgatttaccaaaaaacaggctgtcaaaactgcatcaccccaatgccggacaggtacattggcatgaagtaataatgttcgagcagtctcaacaagattcctattcttcctttctgcaatgccattctgttgaggagtatgaggacaagaagactgatggagaatgccctgcgctgacaaaaaagaagaaatagcagaagaaaagtattctttcgcattatcac

SEQ ID NO: 95551 - DNA, 310 bp, Glycine max
aatgtagagagattgaaatccttaatgttcattcaaaatctttgggacccagaccatattataattctgagtctacactggaagagagggtctgggcacttcatgtttcttcttcatccatagctcctctataacaaatttattcctcctccatttgtagatgggcacgcattttggtttggacctttcccttcttgtccctaaggatccttttaacctttatagcgagggccaaaagtttccaaagccttgtctatattatcaatagccttggccagtatcttctgccttctttgctgagtgtcatcct

SEQ ID NO: 95552 - DNA, 387 bp, Glycine max
  unsure (1)..(387): unsure at all n locations
tattgttggtatgatgatggagaagcaatacttcttggacctgaaatgctacaacggattaatgaacaagtgaggttgattctagagaagataaaagcatctcatgatatgcagaagagctactatgatataaggaggaagccactatattttcaggaaggagaacatgntgttttgaaggtttctcccttaaccggagtcggaagggctcttaaagctatgaagttgacacccaagtatctaggtccatatcagatattgaagaagattgggcctgtagcttatcatatcgccttacctccgagtttatcgaatttgcaccctgtgttccatgtctctcagctgagacgatacaacccggatccatcacatattcttgcagtggac

SEQ ID NO: 95553 - DNA, 359 bp, Glycine max
tctgcacctgtcgccagactctgtggattatgctcctctggcgaccaccacacagaccttttcccttctgtgcaacaatctgaagcaattgaacagcctgaagcttatgctgcaaacatctacaacagaccttctcaacctcagcagcaaaatcagccacaacagaacaattatgacctctccagcaacaggtacaatcccgggtgtaggaatcatcccaaccttagatggtcgaatccttcacaacaacagcaacaacaacaacaaccttattttcataatgttgtgggctcaagcagaccatacgtttctccaccaatccagcagcaacaactgcaacagccccaaaaatagcaaac

SEQ ID NO: 95554 - DNA, 245 bp, Glycine max
tgctacctcattgtacatgaacgtgcttccaatctcatcagtcctgcgttagaagcccgagatgctcaagaccaatctctcctgacatggcttcgattgacctcgtcgacgtcccatctattgcgctgctcaatgcgactcactcctacgacgtgtgggagacgattcatgagtatctcccactgcagacagaatgtcgtgtgcagtaactatgtactgaccttagctcgtgtaaacttgatgga

SEQ ID NO: 95555 - DNA, 341 bp, Glycine max
  unsure (1)..(341): unsure at all n locations
ccatttccccttgcgctaaagcaaacttttntttcattacatggaggagattagttcaatttaatcatacccatacaaagaatatatccaattcttactaagcacacccaactccaactgatttaaaacaagataaaccagctttactattgaattaaaactaaccaatcacgttataaaaataatcactaactaaacgaggggtgagacaatctacatgatcatctctactggaacatgctacgcactaatacatccacgccactaacaaccgttgaagctatttatcaaattcagagagggagagctttggagggactctactgctcattaaacaaggc

SEQ ID NO: 95556 - DNA, 276 bp, Glycine max
tgcagcttgcctttctacacgtactgccagaatctatactttatatgccctatcatcagagttatactaatattactgtactcacgtgtattgttaaacaatcacacacgcctcttggtgaattacatacatgcatactcaagattttgtgaccaaaactgactgcctatatgtatttaatccctctatcaactccgaaattgtcctccataggtatttgtttttagttgtctaccatgcatacattctgtataaatgtaaaagctttttgaagtt

SEQ ID NO: 95557 - DNA, 380 bp, Glycine max
  unsure (1)..(380): unsure at all n locations
cttatggagagggttccacttctggaaaactctaatgcatatntttattgacgcaatagatctaattatctgtgaagccatataaatatggccttatatacccaccacagtagagagagtttcaatatatggtagntcatcangtgagagcataactatagaaaaacctatagatagatggtctgaagaggatagataacgagtactatacatcttataagcctaaacataataacatctgccgtgtgaatggatgaatatttcacggttcaaattgtagagtgctaaaaaatgtggacactctcnattaacacatgaacgaactgtcatgttaaagatctagataaatgcctanctcatgacctgaatatttaaatgat

SEQ ID NO: 95558 - DNA, 270 bp, Glycine max
  unsure (1)..(270): unsure at all n locations
taattacttgagctctttcgtcttaaaggagaactaggataacataatntaagaaaaccaacacttacagatgcccctttctttaattaagaatttggactatatgatggagcgaatgggattctgcctcanatggatgagatggataacgcttgctaccaatcactactatatcattcttatagatggagtcctcaaagaattgctcaacaagggctgaggcagggacccttatcccgtactcttaacatgtggtgaaggttgatggat

SEQ ID NO: 95559 - DNA, 238 bp, Glycine max
ttctttatcaaatattgctattcaatatgcatgatgcattgtttgtttagctcatcgcaagattctacggagacacttatgccataatagtcaatgggtatttattgatctagaaatttacatcctaaactgatctacgttaatcaattctggttttgggcatggtttatcaatattacatctattgctgtcaccgacattgtgccgatatggtgagtatatcaagcattctttgaat

SEQ ID NO: 95560 - DNA, 271 bp, Glycine max
cctacaattactttgctaacttgaattgataccttcctctgattggcaacaaacattaatctaatctttcgactatagaacacacatcaatgtttaaaattttagtatgctctaattgatcactcgcagtttacagggactactatctcgtcgttaacctatctaagggttcagtgggatgtcatgtattccatcgagcttaatttgtccattattatattaaactcgttttgcaacctactttctcagttaactaccgactgcacccctt

SEQ ID NO: 95561 - DNA, 174 bp, Glycine max
aacaaagacaatcttggttacgacctccggagaatcaagctggctttcttagggaacctctttttagcatcccattatgtatatatcaccctttttcttacctttaagggaattctaggttgaaggtaaaccttgtgaccacaacagtcttcatgactgttttattataatgaa

SEQ ID NO: 95562 - DNA, 186 bp, Glycine max
tagattatcacatgtacttccaaagtgtatttgttacttacatcacacacatctccttggctgaatttacatacatgcatactcaaagcattttggggtaccaaaaattgcacatgcgctcatcttggtatttctaatacctatacatatacaaacttcatgatgaatcttgactacctacacaat

SEQ ID NO: 95563 - DNA, 373 bp, Glycine max
  unsure (1)..(373): unsure at all n locations
actggtcatgcatgcacctatgtggacactctttcatcaagtttntatggtcatgtgacactaaggcttatgattcatgttccctatttaagtcaacccagtgttgccaaaatatgttcttttatcaattcatgcattcatccgagtcccatttgggtgttcgggaaaattttcaaagcattcacccttcacgtgtatgacacacattntncttctaaaattggtatgatcagagaatcttttttcaaagaaagctggaaggatctcttctaaaacatgtggctttaactgaaaaatatatcggactagtcgttatgttttttcagagatctgctacaaacatggatatttgtgaggatttgcataactgtgc

SEQ ID NO: 95564 - DNA, 423 bp, Glycine max
  unsure (1)..(423): unsure at all n locations
tgcagctgctcgcgaccttcacaaatgaactaccaattcaacttgaacagagactgaatatactctaagtaaccttctgcatgctcccgtcaaatgaactctgaatcacttatgacagcttatatatatacataaccgtataacagagatcatctgtaattatctggtatatgtatgtgctaaataagaatcagtcanaatagattaccttacttacggaatcttctcttctttgtttctctttattccaactcatatcaaaaaaaacacaatattatattaacgcctatcaaagctatcttaatttcttcatcaacaaaatctaaattattttttcttaattcctttcaaacctagtcatcactgtattattaacaagataagctatttacacatcacctcaaatgtttgtttgttttgtct

SEQ ID NO: 95565 - DNA, 137 bp, Glycine max
  unsure (1)..(137): unsure at all n locations
gaagattcctagagaagcgtgagcttatctttanaccccagctctcatagctaagatcaccttcttgagatgagaagctagagcttatctacacacnccctataatagccacgtgtcaccccatgctcaaatacatg

SEQ ID NO: 95566 - DNA, 242 bp, Glycine max
acaatagcatcatttcttgcactgaattgatgagagttggaaaccatcttctcaatcaaatttctagcctcagcacgggtcatatcaccaagagctccaccactggcagcatcaatcatactcctcttcatcgtgctaagtcccttatagagatattgaacaaagagctgctcagatatctggtgatgaagacatctcgcacacaatgtcttgaatctttccagtacttaacaagctctctc

SEQ ID NO: 95567 - DNA, 278 bp, Glycine max
gagggggactttaaagggtgcatacatttcaatttcactccttgacgactggcagcacctctccattttctataatagtaaaggggcttccaaatcctaatcccttgttcattcagtatttggtgaaaaatgttcgtataaatcagtcgagtctcatacctttgaacttcggacaattggaagttcatgtctacgtcttgtttacggtattcatcaactcatctctggttacttactcttgcattcgttgtctcgttacgcttacacgtagcgtttct

SEQ ID NO: 95568 - DNA, 81 bp, Glycine max
tgacgtaaagcagaagtatggtgaaggacactgcacccttgacaaacaaggcggactgcttaagcttcaaaacaataatcg

SEQ ID NO: 95569 - DNA, 253 bp, Glycine max
  unsure (1)..(253): unsure at all n locations
taataccctttggcacctcgggtcccctttattttcatctgtcagtctttgtgtcctatcactattcttttacctatctgtccttaatcgttatttcagcctgattttaatgcattttaaagtcattttcaatcttccagtgnttgtctttgtgttctacactcatgtctttaccatgctgacgttatcgttgtttagagctgtttaacgattagaaactattattcacttgccaggtttgtgtgactatttt

SEQ ID NO: 95570 - DNA, 235 bp, Glycine max
  unsure (1)..(235): unsure at all n locations
ccggatcttagcactgngctgcgcttgctgatataaagattaattgtgccaggctggttcaaacaaactgttcttcatcattctttatctttaaagtcccgccacacttttttaagagagtttgataaacgtggcatctctttcattttttcgttgcaaaaacaagataccgctgatctttggcttctttcctacaagatcaagatactgctggatctttatcttcctccctaac

SEQ ID NO: 95571 - DNA, 197 bp, Glycine max
cactagactgcatctatggatccaacactacatcaactcctctcatgttcacaactgagcaccattcactcatgctttacatttatcacctgacacatcttcccataatatactctcttgtccgcttggtaactataactgacaacattttgcactgcaccactaacatattatcaaactcacccccacatattttc

SEQ ID NO: 95572 - DNA, 226 bp, Glycine max
  unsure (1)..(226): unsure at all n locations
tactctactgctttatactgatggggaatatacatggngagagattaatagattatagagatattttatcagagtaatagtcgcccgtagatattagatagatgtagaaattaactaatgagtgagtgacggacgaatagtcatacatatcgcagttcgaaatgtacaacctataacannnatataacacacagtccttgattttcaatagtctagcatgtggaaa

SEQ ID NO: 95573 - DNA, 211 bp, Glycine max
  unsure (1)..(211): unsure at all n locations
ttcagatcaagatctatgtgtgtcgttctctcacatagtngaaatatnggtgaagaccgcggcaaataacaataactagtgaactttgtattctgaggaacttggtatctgtacatgcatccacacgcgaattattttggttttcattcttaccccagaacttgataccatcatacagntggattgtgnttatgtatagttctcaccctta

SEQ ID NO: 95574 - DNA, 394 bp, Glycine max
  unsure (1)..(394): unsure at all n locations
gcaaacgaggattccttacacaaccttgatgaaccttcttttttaccagaagtggatttacaacactcttctatgtggatggctggcgtgtacttaatgctactaattcagattctcganaacaaagtggctatagagcttacacgagcagaatttgttgaagcacaagagggtggttatcattctattgtatattttgtcagctctaacgatgagaagacattgatagtcgcattntattccatacaatttaaatccctatcataatccacttatagctggtggctctgtgatatttttcatcctgagacttaaagtggagtattggctccatatgccacaatgaatgtaagatatactgcatttcagcttggacaatgaaattgtatgcgtt

SEQ ID NO: 95575 - DNA, 368 bp, Glycine max
  unsure (1)..(368): unsure at all n locations
taaaaagtcattaagattttaatgtgaaagatcagttggatacagnctgcacacattcgaagctttataactgctaagtatatagatacttgacggacttaaaccagtcttatcatatatcagttcaaactgctaccaggggtacacatgatatgctaaatgctggctaaaagctaggcctgtcaccacgatacatgacgcatgacatcactaattttaaatatgcatgagactgaattgttggtatacctgtattataatgtagacaaaaactctcaaacattaagaatcttatatattaaaaaaatttggcaataccttcaagattatatgatagtgcaagagtaaacaaactggtacaaataagt

SEQ ID NO: 95576 - DNA, 306 bp, Glycine max
  unsure (1)..(306): unsure at all n locations
cagatgtaagcaaagcaagatctaatatagattaagaacactcttataaatcctccaaaagcacacatgactgcgcaagtaagtttctatcttaacatataattttccacagcatttactctatggtaattcgataccagaaagttgtaatcgattaccggaagcccaaacatattttaacaacggttctcanaggtgtaatcaatcaccatggcattgtnattccataccactgcttataacgctcataaatattttgaataccttgtaatcgattaccaatggctctacatgttaaattaatat

SEQ ID NO: 95577 - DNA, 225 bp, Glycine max
tcgaaaaaggaggcgttgattgcaagactcccattaatcagccttttattagaccgaccacggcattctatagaactatgctttgaagttcaatcatcttttattcgacgctcgatttttcggactcctcagacattcagtaatgttttgtcgctgattcctatcaccgcttattcagcgctatttttgcaaccatcttctttagagaagtatgcccccatattt

SEQ ID NO: 95578 - DNA, 380 bp, Glycine max
  unsure (1)..(380): unsure at all n locations
tgctacaacagaataatgaacaagtgatgttgattcnagagaaagataactcctctcatgatatgcagaagactatatgataaagagaaccactaatttttgaagaaacatgtttttaagttctcctaccgatcaaaactttacttgaatcccatattagctccatttaaaatggctgactatatatcctactcagtatcaatgctctggtctgtttcctgaacgcaccaatctccttctcatgacagtcaggagaacctccttaccactagaaactcaagcatcttaagaagaatctggagtctggacatagtattctgattagtgtaaatgccactgttaatatcggcatctaaggggtgactcgattccgtttgaca

SEQ ID NO: 95579 - DNA, 196 bp, Glycine max
  unsure (1)..(196): unsure at all n locations
attagcttaaacacttgagcttgagtgaaacagtgacattgcactggttaggcatccttccttgaaatctgtctgctgattagtttcattcnagtgtgtngcttaataaaaatgctcttgtctctaaaaagctgcatgtcttatgaaaaaccatcgattgagtcattgtatagatgtctcatcatattggttaatg

SEQ ID NO: 95580 - DNA, 359 bp, Glycine max
  unsure (1)..(359): unsure at all n locations
ctcatattctatatcgtaatctacaattcttattctanaaagtgcaagagataaaggagcanatctcccgctagtaatcatatatactgntaaagttgtgggttgatattagtttatatctctagcttggtgtagaagcctgtagaagctcttagaagctgtcactgttattgtcatcataagctangctgtagccttcatcatgatctattttttatactcatctgtcgattctcatatatatatatatatacacacacatctctcanaaaactagggatgaagatnctctgtgtgtgcatattctcacactcaaacatatcaagttgtatcaaagcacacgatcctgtctgtcttca

SEQ ID NO: 95581 - DNA, 302 bp, Glycine max
  unsure (1)..(302): unsure at all n locations
actgcgctgcactataaaatgtccatatatggcattattaatgaacatcactctacacaaatacatagtcatactgtacagtaaattatctacnantacagcgacacaatcaacaaaatctatcacattaacccttacagacaacttattatagtacaaatgaaatagcaagctagcattattatatcataatacgctccagctcagatctccaaacanaatctgagctaactccacnttactatgtgacatcagnattaaccctccacacaatcctcaactactcatttctttataatttg

SEQ ID NO: 95582 - DNA, 281 bp, Glycine max
  unsure (1)..(281): unsure at all n locations
aacccaacaatgtcattactcagccaataacataccttctcctacncaccattcagtatccacaaaagtcatcctaaataaccactagcctgttaccgcacttcatgacnacaccactntagccanaccaaacaccaaccaagatgaatttgcagcgaaacctgagaatcacccaattccatgtctatgtgattgtcatacactgatatcacggagctaaccagcaggtataactcatttcagaacatcatgacgggctgataaacctggctcatacatga

SEQ ID NO: 95583 - DNA, 392 bp, Glycine max
ctgcagctgacgtgttagtttttcattgtataacactattagttggctacgtgctatttttactgcaaaatatgttctccctcgacattcttggtgttggcagtgactttatatttggtccacagcatcattgcttagctatgtgaggagttcttggaatccaccattcacaaaaaagtatacttatgtgtctataatatttttactgtcgcaggatcttccatctatcttgttttgcatcactgctttttaaggaatctgaacctcagcccatgtatctataccagttgtataaagtgttgtataatattgagccctcaattttagaatgtttttattagcatttttattatttttgagacagacataaaagctattctgagatcttagca

SEQ ID NO: 95584 - DNA, 187 bp, Glycine max
tgtaattcgcgccggaggagtccatcaatgttgagggatggatcgccatcaccttcccaaactgtctagggcctacattcttgtctgtcatggtgcctcgtgctctatacttctctcttaagtggttagcgttgataacaggtaattagtcttttttaccgtgttgtctagaaagcatgattctgtg

SEQ ID NO: 95585 - DNA, 121 bp, Glycine max
attaatttggagctaaattggctattcccccataaaaagttaataaggtttctaggagctctttaaactaaatatggtgaagaaaacatcatcatttagcaaactatacattcctggatga

SEQ ID NO: 95586 - DNA, 363 bp, Glycine max
  unsure (1)..(363): unsure at all n locations
tttattggcanacagtcacataacactcaatgccacaagtcagtcactttgattgtcagatctgtattntctcccaatctaatagcatgcccagatcttcagcaggctcctcttattttccttcctctaaactaaaactttctatacttcctcttaaattcatgaataattaacttcctcaacaactgtacatcaacccctcatcgtgatgtataactatttaagaggaaataacatagttatatatataagataactattacatatattgctcacgtatgagggtgtgtgaccaatcctaccagtcaagaaatttatttctcatatatactatacatctttatgtggctcacatgtaattct

SEQ ID NO: 95587 - DNA, 167 bp, Glycine max
cgataggaacgagtatcgtatcatacttttgatgaccaacccttaacttgaagactccgagaaatggtccttctagaggtgctacacaggtgaatcgaacatggaattgtattgaaagacaggatttaatcaatgcactgatggcattcaccagcaagataccttat

SEQ ID NO: 95588 - DNA, 238 bp, Glycine max
  unsure (1)..(238): unsure at all n locations
tatcgtctcccttttgcacatgttctgtagttgcatcctatccngaaccatatcagaatantactgtctacttgcttacatgaanggcaaccattanggtccttcaaagtatggactcnggaagggtcctaagttagtatatcaggcgacagttgtcctagtaagactntctcangaaaaatgtatcatgcagttctcatcttttgcgtatgcgcccatcttccgacaatacatcttt

SEQ ID NO: 95589 - DNA, 286 bp, Glycine max
  unsure (1)..(286): unsure at all n locations
cctctcacagttatcagcaatcttcaatatgcttatcgcaccaccaccattncggcccanacccactgcgaagctcatacgcatnctttagcataactcgagctaccatcanagaagtatcanananacatggntgtattggatgagactccacataagcactattcacaatntctgatgctngaaacgatgtatctagtgaccnctctactgcttcaacataaggcgtagaagatggacaacntactagtatgtcttcctcacctgatactataacaagctgacc

SEQ ID NO: 95590 - DNA, 168 bp, Glycine max
  unsure (1)..(168): unsure at all n locations
tgacattgntgatgatgatntgtgatcatatctgacacttgcagntacaagaaaattattgtaccactcatctgtaacatatgtaatctgaccttgttnntctatgtgatgggtggtccatggtggcgccactcaccgtgtgatgaccatctatagacgtggaatatg

SEQ ID NO: 95591 - DNA, 77 bp, Glycine max
tccccctttaaaacctcactctttggaacaaggtgtgatattctccctacaatgcttgcttgatactccggcgaata

SEQ ID NO: 95592 - DNA, 180 bp, Glycine max
  unsure (1)..(180): unsure at all n locations
aacatggattattatcttaaatgagcgttactgcgactatgaagatttcaagcctacanatatccttgctagcacatcatagcagtgtgtgctcgtgttaacatcaattgatactagtatgtagatctggtgacaaaattganagcatcattcaananctatttggcaatggaattccct

SEQ ID NO: 95593 - DNA, 253 bp, Glycine max
ttaatgaagtctggaacaccacaaagcaaattattttgctccctgagtggcaaattttaaactgtgcagacgtacctacctactgcgataacatcttattgctgatgtagggccacaccgccaacttttcctgctaccatcagtaagcaacccccatgaatcaaaagacatttcttcactgactatctttggctcaatcgataagtgacggatacgtccacacgtgacaattcttgatcataacttcaccgag

SEQ ID NO: 95594 - DNA, 200 bp, Glycine max
cttcacttaagctatgtgctatattttggcaatcatagggttgtctactttattcccctccacctacatgaccaggtgactatcaaatattttctctacatgatacaagtcaactggtcctacttctgttctctcactataagcatacgctgtaaacaacactttcaatcacttgggcctacactggggctaccttttta

SEQ ID NO: 95595 - DNA, 278 bp, Glycine max
  unsure (1)..(278): unsure at all n locations
attctgggaacgtcagggtctactcaagtagtgatccaagcggccaataacactgtnccccactatattatcactgaaggtacctcagtggggcctattgatcagagtgactcccctactccacgtccatgatgtggaatatgcctggctattgagcatgaagaactttcactctttgctaattcaccacctgcagagactgctacagcctcctgacgaagtaggctgtggcctctctccaggattcttttggaagaaaaacattgcgaagtgtacat

SEQ ID NO: 95596 - DNA, 255 bp, Glycine max
  unsure (1)..(255): unsure at all n locations
tgcagctgattcataggccctaagctgcgacatgttgctgtctgggaatgtatcgtccatccaacatcaccggagcaaaggaagntgggcccaatgaggagctactacataatgcgtggctactgccgttcagcggaactgcggcactgctatgatcggcaccaaccctgcgcgccgccgcgcatctatggagcgtatacgattcgcatctcgtattactataaggacacaaggtaaggccatactgctaaaata

SEQ ID NO: 95597 - DNA, 269 bp, Glycine max
  unsure (1)..(269): unsure at all n locations
gcagctatgacgagattattatatgaaacttattatcgatatctatatattacaatttttattactatntatcacaagaactattgaattattgaagtatatcagatctcatatattaatattattaatctatcattatnggtttttgattaattgaaatcattatggaaaaagtgctcagttaacatatttttatataatcattcttatattaagtttactccataagttggatatgtcatgattgtttattgataattgatgggaca

SEQ ID NO: 95598 - DNA, 208 bp, Glycine max
  unsure (1)..(208): unsure at all n locations
tctcaacacactntntggatgagtcttgcaaggattgtngtgccttctctaactcttcttccttgttcagcgataaggtaaagctacaaaattgagtcgtccaatgtttgatataagatttgtaagaccacctttaatttgaacaagtggcttaaaggtgtagatgcacagtccttccaagcgagcaactcagaggtgtaacaccatc

SEQ ID NO: 95599 - DNA, 237 bp, Glycine max
  unsure (1)..(237): unsure at all n locations
tacgcattactagtttagaagtagctcattttatttctgtgtataaggcacgggaaagcttatgacattgctattggtttacatatctcttttatataaaaattattacatttttaagctgtattaaaatgttacttgatctaaaaattatttatttaattataaagatatatttatttcnccttgaaaaagaaaaaatattaagcatgtatattgtgttgatgaaaagattaaaaa

SEQ ID NO: 95600 - DNA, 190 bp, Glycine max
  unsure (1)..(190): unsure at all n locations
gaagtganactgagaatcgggtaaatatggagcanactctcacttcgcacaagtctataacatcaattagacttgctagactggantacacctaacatgccaccgaatcanaatttgactgctcgacaccgcaatgtactctagaaatggctctatgctcactntggtcatntgtctttctctctagcac

SEQ ID NO: 95601 - DNA, 198 bp, Glycine max
caagaggcagaatttcaataaacttgaggaaacttagctagatggttggaacgcctagacaattgtaagaaggtggggatagttctgcatacaaaacttatcagtgcaaagggcgatacggaggagacggtcactgctcgatctgggaagcgacatgcaggacccgtaaggctcattttcggattcatgcggagaacc

SEQ ID NO: 95602 - DNA, 346 bp, Glycine max
  unsure (1)..(346): unsure at all n locations
gatctaatacgcgctcgctgatgaataaaacacaatctaactaaatacaacggcaaaaactatcatcaatcntgntcccccccaaatcaagaattaaattttatcaacaaatagatatgatgctatcactcactacaaaatgccactgtacacacaaattcgacttgcattaaatcaagcgtttaccaactgttactcagatcattcactttaaatgatacagtcaactaaatggagctaagataactattaccgaaaatacgtacttatatggttaagacattaacatatttaattatataactcatgtgtgtctcttactaaagaaggaatgactttgacttca

SEQ ID NO: 95603 - DNA, 297 bp, Glycine max
  unsure (1)..(297): unsure at all n locations
gatgcatgggagatcctgaanatcactcatgaagaacctncaagtgaaatgtcanaatctccctcttggctacaatattcgaaaatctgaagatgaaggaggaagagtgtattcatgaacttcacatgaacattcttgatatggccaatgcttgcactcgcttgngagagaggataacagatgaaaagctggtgagaaagatcctcatatcctcgcctaagagaattgacatgaaagtcacttgcatagaggatgcccaagacatntgcaacatgagagttgatgaactcatgggtc

SEQ ID NO: 95604 - DNA, 398 bp, Glycine max
  unsure (1)..(398): unsure at all n locations
ctgcagctgccacagatctctgttggcctcaaacctctagtggtatatnatgtcttctctcatcccatgaagaatgcagtttaacatctaactactccaagtgaagattctntgtaactacgcacactcacacataacatttgatggtagtcatctttacaactggagagaagatctctgtaaataaattccttgttttgttgaacccttcaccatagtctcgccttgatcttctttaccattagatcttctttacctatgaccccctatctgaacgtttctttctttggaattagtagaaccacgtttatctttgaggctgtatctatcttattgtactctactcaagagcattcctgcgagctactgaacatatgctaccacatcgtaacacaata

SEQ ID NO: 95605 - DNA, 208 bp, Glycine max
  unsure (1)..(208): unsure at all n locations
atctgcatgaagatacttcgtatctactaagcagtttgacctctcctagcggaccgtggctagcgagcagaagatgttggttctattgangtcgccctatcggatcagcgcgcttagtctctgtttgaaattcanaatcaagttattcttttacacatagagggcttggctacacgctcggataagaccgcttagcgagttatgcata

SEQ ID NO: 95606 - DNA, 349 bp, Glycine max
  unsure (1)..(349): unsure at all n locations
tactggaaanatatggaccaataganagtatagctgtcttngctaaatatgctgtgaaattcgaagacgaagtgactgcgacatcgctatacgactgaatgcaatgttatttttttgctttttcgttgatgtaaactttatctatttacgggtgtgttaaatcccataataaagttcaatgtgttatttcaatggtccaaagataactttttttaattgtttgaccctctaaccttacgcatactaacaatggtccgattccttattttttgatntttgcctctcttttaggctctattgatggaaccgcgaacacacttaatttttggttcttgacgtcaaacatgaa

SEQ ID NO: 95607 - DNA, 313 bp, Glycine max
gcacttggcgaggacgggcaatgtattctaaaaatgtatgttcgggaaacaagagtggactcttttgtcccctcgaccgaaggatgacatagctggaaattgagatgatcttaagctataatttttttctactcagggaagataaagaatattttttacttactcctataaacatatagttagtttgtcgctttatcacctatttggtgagcaagctcgagattcatttctgaggctttctctcttgttactgctaaataaaaatcccttgctgaaaaatacttgccttccatgcaaagtgcaaaaatcaaaa

SEQ ID NO: 95608 - DNA, 338 bp, Glycine max
ctctgttctaaactactcttcatagctttcttggaccatatctgcgctaactaacattgtacagtataccctgttctccctactccttatttcttcatgattcaattaagattttaatatttcatgcttatgaacccgcacaaagcaagactctcatggcatttatggacctatgtatgcactgatataaaacacctttcattggctcgatctaatactcatcgcctctttatcggacatatgacacactactgcaatccattgttccttgaccacagactgagaacactcgtaaaacggaaccctcacggcaaaattgcgtttcttagagtttctac

SEQ ID NO: 95609 - DNA, 309 bp, Glycine max
  unsure (1)..(309): unsure at all n locations
tcctctcacctatnntncttngtcttccgctgcatctccatggtggaaaccaccattaaggtccccattgaagctctaagatccagcctncattagaagcccacaagcaagcttccatcaataactnttcactcggatgtccgatcaggcgaataatatattgagacacccganantgactaaacgaagttgtcgagaaantcanatggtcacaactcttcactcggatgtccgattcatgcgcataatatatcgacacgctcgagattgaacaacngaagctctcaagaaatctaaatggtgataact

SEQ ID NO: 95610 - DNA, 206 bp, Glycine max
gaactcatgcctgccgtggatgagagcataactaaccgagaaagcttgcaatgaagcttgagagaatataagatatatgaagctatgaatagcatggaatgaactaagcttctaaagtttgttgctacaattgcttatatatgtagttgcaagaataactaactcacaactaacctctatttacatagtgattaaccaactaagct

SEQ ID NO: 95611 - DNA, 179 bp, Glycine max
  unsure (1)..(179): unsure at all n locations
tattatggctctatataacggtctacatctgatagatgaaatgacatatcactaagttatatcccatcatagcttatcagtccaatgacccatatgctangcaagtcgngnttgcattcctatatcaatggctaatgaggaagggtgatgtgtatatattaacgccacgtcagtntatg

SEQ ID NO: 95612 - DNA, 135 bp, Glycine max
  unsure (1)..(135): unsure at all n locations
tcctctggaatgataaaagagaaattctgtaaagactntaattaatttcttggcaaccttttgtacttcaattgaattgcgttcttatntaatataccctntctaagactctatagactgtcttgatcatctatc

SEQ ID NO: 95613 - DNA, 170 bp, Glycine max
  unsure (1)..(170): unsure at all n locations
tcttgaccagacttgaagaatctataataacaataccttgatttacatntgaagaacacttacaacacctacaacccttacaaacaactnttccacatattctgttacaacccttggaatctcttgaactnttacttcttcttcttcatcttcctcttcgtcttcttctt

SEQ ID NO: 95614 - DNA, 328 bp, Glycine max
ctgaaattgcggcgaccaatattctctcacaacaaccaacatgttagtcaccatttggtctcccaaagctgatcctaagtgccaagaggcccttatacaattgaacaaccaactaaccctttattgataaccaacaattttggcaccacttcaggatggcatataacaacaaacttaattgaaaaagggcattaacctattggcagacatacactgactttctaacagctgttcaatatgcaataggaactctgttctgcaacctgatgcccacctaaggactctgctgatgccaaagtggcaacacaaaaaaaaaatccccccaaat

SEQ ID NO: 95615 - DNA, 271 bp, Glycine max
  unsure (1)..(271): unsure at all n locations
acacagaagcatgatcgataagagaaacatacttatattcatcaactggtctgttagaaagacccaacactcttacctactggctgcaatattacttacttgcattnttactatntntatcctagacctagcttaattctgttttaaaccatcaattatcaatggttctttcaacaatgccttatttctgaatataacccggtcttagactagtttctcttgagtcaatactcggattcatcagttataattgtaaatacttgatgatccg

SEQ ID NO: 95616 - DNA, 123 bp, Glycine max
ctaactgctgcgacatcatgcaacacaccattacaaccaattccaccacgagggatttcacgaaaacctgagaatcacccatcctatgtctatgctactgctccattctactcgatattaatg

SEQ ID NO: 95617 - DNA, 67 bp, Glycine max
aaaaaaattgatcgtttaaactaccaacaatttcactgtgtcccccaaactgcggagtaggcgatcc

SEQ ID NO: 95618 - DNA, 231 bp, Glycine max
  unsure (1)..(231): unsure at all n locations
tgatattaatttgtctaagattatatatattaacctanacnacangaaaaagagaaaatacaaaatcaatatctctttctaaaattctgctttatttcatccattcatattaagtacaanaagcactccaattatagggttcacgctcaacacaataacatatcaatttcaaaataattggtctgtaaacatatataattcactgtaataattataaggataaaataaaaa

SEQ ID NO: 95619 - DNA, 158 bp, Glycine max
aatgtcaatactgcctgtaatgtctggtgttgcttctgccttatgagactacctaatccttcttaaccatatctccaaaggtcttaccgactctctaggcgtcacttgtctatattcagcagctctcttgtctgactctctattcttaacgactcttg

SEQ ID NO: 95620 - DNA, 75 bp, Glycine max
cacacgagctgtctcttaaagagtgctacagctcttctccatcacacgacgccaaacacaaagtggtctccactc

SEQ ID NO: 95621 - DNA, 59 bp, Glycine max
attgtcatttaatggtgattagatttgcttaaagcactgctctgcttttctctttactc

SEQ ID NO: 95622 - DNA, 93 bp, Glycine max
acttagctactctaaaaattttttctgcagagtcataaacagtacacggaggtcgttgtagtccaacgctagatagtgtatccagacagttcg

SEQ ID NO: 95623 - DNA, 312 bp, Glycine max
actccccctctaaatagtactctggagtctgaagtgagtatcccccctcatatactactctggaagagtgactactctcccttaattactaccctgcaatctgaatcaaaaatctctcaaacttaatgcgaatcagtaacttcttgatgcaatcagcaagagaactttatttcaaaggacactgcatgctaattccagtagaactgctttttattaccacttgagtttcatctgggagagtatactaattgtgtgataatacaacctacccagtattagtgttttgtttaacgcacggaaccgagacaacgc

SEQ ID NO: 95624 - DNA, 340 bp, Glycine max
tcttggaagtgctacttattctctttgagaagaccctctttttgaaactcgattggcttatcgctcaacctcttgtggttacactgaaactatattcctgcagaagcactgatccaggatgtttaggagtcaactagctggaggctcaactgcacctggattatttaaagtgcttctcaatttaagcgaccatccagtttagcctttttaaatccactttttttggtacacgttctttacaacacctttgaatgttcccagtctttataaattaagagagaaccctgtcttagattctctattcccaaagattttatcaaatttcttgttatggcacttt

SEQ ID NO: 95625 - DNA, 187 bp, Glycine max
ttatactcttttgctcctagctaagcgtactccatttctcttcctaacatacaatgcctcctaaattactttggatgaagacactgcgtgtccacttgggggtaatcatttgagtcctcggaggcttatgaatacttctacttggggctaagacaccctgaccgtcagggacttatgaatatcaatg

SEQ ID NO: 95626 - DNA, 233 bp, Glycine max
tgcgctcacttaatttataaacttattgaatttcgttttatactatcttttcaaagtttaagatgcactaacatcttttgcaattaagaatgaagacatgaatcttattagcaataagagacttaaaagaacttataactccttacacttgtatttaaaggaacacaacttcttatattatcatatatgtttggcttgtgactaaaactaatgaagctattatatattgatgt

SEQ ID NO: 95627 - DNA, 361 bp, Glycine max
  unsure (1)..(361): unsure at all n locations
atctgtctgcctcctcttatatcattttctggatgagtgtataggggtgccttgcgcttcttagtatggtgagtccctaagaacaacatgggagatccccaaactaaatctatgaagacaacctgatcactacgcttttaatacggagattaaacttcttataaaacaactttattgcaatatcanatgtcaaaaaccacgttctattatggcataactattggtgacaatgtagcggattctaggtgaccactacagccttgttgctaaccagagctgctcataggcagcacttctcctgcgttgtgcagtatactcttgttttggactgcagcttcattgttgcaatgtattctgtgca

SEQ ID NO: 95628 - DNA, 395 bp, Glycine max
  unsure (1)..(395): unsure at all n locations
atactctgctgtcaatattgacctaagagatgtgatgcatactgccagatttttaaaaagaagaaatagcagatgatcatatatcatgccagttgtgacttagacatacaattatactactttggtctgtcgagacaagaaaaggaatacaatttacacatcaggatctatgactcgtcatcatcaagaacaagaatgtgctaggaagaatgtaacaatgtaagaagaaaatataccctggagggatcgtnanatgcgtggatctcttctatataaaagtggcattgcttataaatatatgaccaacaatctgcaatgatgtggtaatggtggaggctatcataacaatggtacacagagcatcataaattgatacaatattttcatatctcttt

SEQ ID NO: 95629 - DNA, 156 bp, Glycine max
tcttctaattgctgcttagaaaccaaaggattggattattgtcttttggggagaaaatgtatcttgacaaagggaagccctttgcttctatggacaccgagaacatctaggcataaaacatgagccttaccttaggtatttatatcttctctggga

SEQ ID NO: 95630 - DNA, 222 bp, Glycine max
ctgttattatctatgtgaattaaattcctatattcatcacttatatatttaaataatatatattggcctttatttctaattcacagtttcggctcattattttatatgaatattaatcattatttacaataatatttaatctatgtagatataataataatggataatttttcttgagggagagtattactatataatattaaatctaattataaaacttat

SEQ ID NO: 95631 - DNA, 182 bp, Glycine max
  unsure (1)..(182): unsure at all n locations
atattaaactaatacttaatccgtagatccctcanttaagactaagtttcagtcctgcttcattcaagttctaaggcaacaatacattttctaatgctacagtcacctaaccaggcacacaaatggttgatcagaccaagagcatacagaatntatacactgatagaagcatcgtacacaat

SEQ ID NO: 95632 - DNA, 254 bp, Glycine max
cagacaatttgaacttcagtatatccaggatgctttccgcaaatcttcgaaaatgcttagagtttatctttggatgccccttttgcatcatttaagggttgggacagggccttgtctgcaatccgccctgattggagagagacgcgcatactactccttgtgcaagatatgaatcttatggctaccttcttagaacaaattttttttctggcaagagctctatgaaagaagtgacagcggtagggttgtgatag

SEQ ID NO: 95633 - DNA, 274 bp, Glycine max
tacgccttttgggtctgatcataagctttttggctgaccaatgcaagtttaacaaagcttcttaaagaacgtttcttacatgtgccaacactgatctagatttatgtaattcacacttcaaaatttttttcttatttaagaaaaacaggttgtgaaattaccagagagctgagtacgaagatcaaagactacgtgtggcgcaccagggcacaaacgatgctctctacctatttgtttcttcagctgaattaatcttagattctatatttggaat

SEQ ID NO: 95634 - DNA, 237 bp, Glycine max
accagttgatgctcattgctctgaggcatttctcaagtgtacgtactctaaatagaggacaccactattgatctctcagaaggtggcaaagggcagtatgtggctggtatcttctcaagtatggcttttggttatatgttgagcctcacgttagagtgtcaaggatatatggggtagtctctgaaggggccttaacatcatctggcactgagctgccagatggatgatgacaagaaa

SEQ ID NO: 95635 - DNA, 268 bp, Glycine max
tctttactaactatttttaatttatttttttaagaagtacgtctaatgccccatattactctgctataagattaaattatattagcattaattatacatggaagattatttatttagaaacttaaataaatatatactttgtcattggaagaaacatacagtatattcgatattatcacagtataaaaattgaaaacctctcagggtgcctttcaaaatatctctcactactggaaaaaatagggggggaacacccttcagattgatg

SEQ ID NO: 95636 - DNA, 132 bp, Glycine max
  unsure (1)..(132): unsure at all n locations
tgaaagtaagagactctgcaaccaaaagcaaagcttgcacatttacatcaatgtccctgacaaagangaagaacacactaatggtttcctatacacaaacccgcctacacttttttgcccctacaaaaatta

SEQ ID NO: 95637 - DNA, 187 bp, Glycine max
gattgtgtactgatgtcactaacatgaattggtgatggctatctagggaggaaaattttagtagaaattctcgagcaaaccttgttatgatcgagtgctatcatgacagtgctgactaagtagctcttagttatgacacgagatttatcatacttgtgttaacatgctgttttagagcttgttatca

SEQ ID NO: 95638 - DNA, 442 bp, Glycine max
  unsure (1)..(442): unsure at all n locations
tctctatcttttttgtccgtcaatncatttttaattcttngtcttcattntattctccatcgatatcctccattatcttgtggntcggtgctcgtaaaagtagattcacaaaatanactaattaaatcttagatctacactcgttattgcatttcaatggttgaaatttatagatctactctcgaatcatatntttgtgtngantctangttctatcattnttcagtcataatcttctcgtgctgacncttagaatctatgtntatttcanaatattgattagaaaaaaacacacacannatatagtgtaatcacttaatccatgttgtctagagcatgttagtataataatatcacatatgttgaagttgcgtgatctgatttgtgatgactcagaatattgtcatgttctatactctagctatcttnaatttgagctaat

SEQ ID NO: 95639 - DNA, 172 bp, Glycine max
ataattcaactgttacatcgtcttttagatcttagcaaatcatatccattctaatttgtgtctgcggtgattattcttacttataccactgcgaaaacacattttcttaccacgtactaagtacttagataaagacgatatatagtattcaaaattataagttgttcgctca

SEQ ID NO: 95640 - DNA, 246 bp, Glycine max
ctttttcgagaccactgttctatgagggagatgatataccgattcagaattacatcagatgatggagaagatactggaaactgatcatacattcagcacaagtgcacctgcaataacgcatcatggtgcccacatttttacagcattctttaattaagttcaagtttatgccttctgattcacaacaaaattcctgtggtggaaaagatgacaaagattttatatgacagggacattatttttctc

SEQ ID NO: 95641 - DNA, 57 bp, Glycine max
cagctgaaacatcagttctaacatttaatatgtggccattattatatatgctgacat

SEQ ID NO: 95642 - DNA, 147 bp, Glycine max
ctgcgggtgattaccagctctttgttcattgaactgtgatggtgctttgatgcttttgctgatgtttttaggactttgagtttattaatgcttgtaatgatctatagcctatgctctagtggtctgaaaagaaaaagtactgtttgt

SEQ ID NO: 95643 - DNA, 72 bp, Glycine max
actcccccttatatactcctctggaggtcttgaactctggagatctgagagtggctactcccactttatgta

SEQ ID NO: 95644 - DNA, 52 bp, Glycine max
atactgtggactaccaaaggtgtaactaagactttggaaataaaaagagggg

SEQ ID NO: 95645 - DNA, 204 bp, Glycine max
cttacactggtcacttgttctcagcgtatttcggtatcactctataagtatgcgtgattttaaactcctttcatacaagggcattatacggcacatcgcaccgacaaatatgcgtgatcctcacttgttatcacttattccgaaatgctcataagttgcgtgatccttactttgttcatacagcgctcatgttacggactaatc

SEQ ID NO: 95646 - DNA, 100 bp, Glycine max
acatgatcactctttcttcttacaaggatgatcaggtgtgtttcactcatacttgtgagctgaactagtttaaaacattaaacggattaacttattccat

SEQ ID NO: 95647 - DNA, 176 bp, Glycine max
  unsure (1)..(176): unsure at all n locations
aagtctatcatatgctgacaatagccgagaagcccatgatatctcttcggggcggagtangtgtctgccattgccttgcgctcggctaacaatcggggaagttcttgactcccgttcaaggtaagagcaaaccgatccatccacatgtgtacctcttggtgaaagagtcgatcacc

SEQ ID NO: 95648 - DNA, 129 bp, Glycine max
gctaccgcgccacactagatgcgcaaatcccattccgaaaagtaagagggacatttcccaagcactggtgacgtgttactacgagaaaatccatgtacagcagatgaaacactcccaaataggttgttg

SEQ ID NO: 95649 - DNA, 292 bp, Glycine max
gaattataatgataatcaccatttttataggtgaatgacccatagtgttgggcatagattggatgagcagacggtcttgggtatatatctatagcgtggatggggtctctaaggaccttcaagggctgattgaatggaattgacctattgtgtcaacttgtgaatgggtgtaggaggtgactgttgtggaataacatatgggcttggggaatatgatgtggcatccagttattttttagtaataacctatgtttgaactagggttgacatgcaatacgtgacttttgttatg

SEQ ID NO: 95650 - DNA, 297 bp, Glycine max
  unsure (1)..(297): unsure at all n locations
ctgcagctatgatttatacgacatgacatgaaatcatcatgttcttgatgattatgctttctcaagaagattttaatgatttgaaatcttaaacaatgccattctggacagatctaagganaggagaagaagcatgaagatcaccactngaagtcaagcaataatgatcttcagaagtgaaacttcagaatcatcctgacaatatgggacatctaaaggtacactaacactcttcaaattatcatactggtttgtttatatgaactaaattaatgaactataataaatggtatactt

SEQ ID NO: 95651 - DNA, 305 bp, Glycine max
tatttgaagtgagattttaactatctttctatataaaaactaataccttttgatcgtgaaagtatatttcttattttaggtcataattacaaggctagcgccatacttgtgatctgatggtttttggtcttaacatagctaacctatcacctttaacctgcaaacataacgatgctacgctagctaaaacaacaccaattctggatgataaattcacacagctttgcgtgtgcttatatgtatcgtagtacattaccgcacaccaagtctgtgctaaagaatgccttacttgacatataacttgt

SEQ ID NO: 95652 - DNA, 151 bp, Glycine max
tgtatcaaatataaaatatctatcttatcaaatagttcccaaaatatttatcattacaaaaaaaagcccccatggatggacacacaacctttacagaataattattatgtggttcgtggcaaaaaaccttatgcaatgaataccttaagtt

SEQ ID NO: 95653 - DNA, 135 bp, Glycine max
gaggaatattctccaatctagttcactcgaaaatacaaagaagggtcttataaagggcaaacaccgccactgctcaatttctcaagtgttttgagacacttgtgcggactactactgcactgggactctcttttt

SEQ ID NO: 95654 - DNA, 232 bp, Glycine max
ctctcacctcacacaagttcataacatcaattagacttgtcaactggttacactaattaccaataaatgctctacccaatactaaagatttgtattggattgtttttccacactttatagctaaaattacttgatatattactcaaacacaacattactcattaactattttactgaaccattatttacctgtattactatttacgttctacatcgctactcactttaaact

SEQ ID NO: 95655 - DNA, 228 bp, Glycine max
ttcctttttatctaataatttactatctacttaaaagatatttatatcctaatgcatatgtaacttaaaactttttaagaaaactcttattacctattttataatgaagatataaagttgaaaatatagtctaataaatttagtataatacctatcactaatagcaagaagatttgcgagtcttagcgactctaactattagaaatagcagctgaaatatcgcaatct

SEQ ID NO: 95656 - DNA, 275 bp, Glycine max
caatctggggactgatgctgtatattatgatgaggtgcaatgctcaacgactcaaagatggtcataccttccgattgcgattaatcttgattgatacctctcctgacatttggaactattatttttattatcaaataactcgatttgaaattctatattaatgacgagtaattatggcattacatattgcttttatcggaataaaatgatttagatttatactacttgtcacaccattactgcagaagcatgtccatatgttactcttataatgg

SEQ ID NO: 95657 - DNA, 178 bp, Glycine max
  unsure (1)..(178): unsure at all n locations
tgatgagtggaatatactctcctctaaccaaccaccacacatgatactgtggtgatttgtgaaatattaacaatatcctaattagaactgtgcatttttaaggcgatatcttatcaaaccttgacgatataagtgtatttttctcacacattatntgattaaaattcatttaatctat

SEQ ID NO: 95658 - DNA, 173 bp, Glycine max
gctatcaccgcttctcgtcacctggagtcgcttagatctccgtctttccatgggaggccactgttcgctcatgtgacatcaatgggtctgcctgtctctctatctgcataaatacgctgactatcggaatgtgccgttgtacatgccttaactagcaatgcgacaatgtcact

SEQ ID NO: 95659 - DNA, 79 bp, Glycine max
cttgatgggaaaggaaaattttcctctctaaaatggaaaccggacacttcctccccacaacagattttccgagtctcag

SEQ ID NO: 95660 - DNA, 373 bp, Glycine max
agcttataagtaatgggtgtaattatatttctgttgaaattggatacagagaatgaatctacttcattttctttttgtttcttaagcatccaacttgcaactcctacattcagatcagatgtatgtcataataaatgaacttgcatgagccaatagtgagagaaaaaaaactagttttgtgatctgattaacaattatagcattgttctgaggacaccgattaaagaataaaatatgaacaacttttatgaacaactgcagagttcgtgtgtgagagagattaaaccgaaatcccttcagccaaaccttcccggcaaaaggtttacccaaatctatgtcgacataaacacacacatgagcaaagtgcacacgt

SEQ ID NO: 95661 - DNA, 251 bp, Glycine max
tcacaaacggtagtttttctgcacgataaaagaagaaaatgaaatttgaggtttctaacgccttcgatagaggggtaaggggttcttaccttccacatcgcagcttagcagaacgatgatggagggaggtgggaaagtgagggggttcatgggttcaaactttctcaaaatggctttcgattgcatctaccccaacaacacacaccctctcatccggaagtaggtccccacacctcccaattgaacccaaa

SEQ ID NO: 95662 - DNA, 373 bp, Glycine max
  unsure (1)..(373): unsure at all n locations
agctttgtattttnctctttggattttcatcttttntttcagtttcactcttttttttatctccactttttttttcttttctctcctttcatgtttctctctctttttatcaattttgtttttctctcgctgttttttcactctcatttttatttgatcctcacaaacctcacttggagacaaaagtttaagggtaaccttttaccctttatgtataaatgaaaatttgtttgtgacaccattgtggacaacatccctatcatattgccaaggccttccaagtaagagatggctagcctccatagggactacatcaaagagtatatcatcaacatattttccaatgaagaagcatgtcaaaacttgtttatct

SEQ ID NO: 95663 - DNA, 363 bp, Glycine max
  unsure (1)..(363): unsure at all n locations
agcttgtaactcttggcaatttttttattatctttcacttaaaaagnggtgacttttgaaaaaatctttagaaacaagtcacttgaagaattgtgacttttggaaatgtatttttcgaaatcagtcactggtaatcgattaaatgtgactcttcattttgaattttgaaaattaaaacgcttagaatgtctggtaatcgattacaagtgttgtgtaatcgattacacaagtttataatgatttaaaactgttaaacacaagttgtaacttttgaaatttgaaatctgaacattttaaactctttggtaatgatttttgtgaaaacttcttgtggtattcaatgttttgaaaagcttttttagt

SEQ ID NO: 95664 - DNA, 250 bp, Glycine max
tttctttgtgggttttttaactctgtcgcacagaacaacatgatcgctggctgacatattctcaattagctcagttgcctcttcaggggtcttcaactttatttttccccctgctaaagcatctaacagttgcttggtttgtggtctcagtccatctataaacatattcaattgaattggcttagagaacccatgggtgggagtctttctcaataaacctctaaacctctccaacgcttcactcaaggac

SEQ ID NO: 95665 - DNA, 364 bp, Glycine max
agcttctccctcttttccctatttattttgttaggagggaagaacaaaaacgttcaaccctcctggtatctaaggatcacttgaaattagtgaaaaaaatcgtttccgtgaagaaaatccaagccgaggcgctttcgtaacacgtctgaaaggtttccgcgggtgattctgtgaagattttccaccatcgttcgttcattcttcatcgttcttaggtcttcaaccggtaagttcccgaaatcgaactttttaattcattctatgtacccttggtggtccccacttgtttcgcatacttttattttcatttcatttacttttcgtacccccttttgacgtgctttagtcatttatttaagtcatt

SEQ ID NO: 95666 - DNA, 261 bp, Glycine max
acagacttgagtacaccattagtgtcttttgagaggtgatcactagctgtagctaatgtctgcaatttgtcgattactattagataacatgcaatgatggcaattggagtttatttattatctttgtttttgctgaatattagggtcttattgttacaaatctcggatgaaaagaagaaattatgatatacattattttagcctgatattttctatggtgtgtgtggaattgttactttctttaagatatttattgattat

SEQ ID NO: 95667 - DNA, 363 bp, Glycine max
agctttaaaatttgaattaaaactttctttaactgttggtaatcgattaccatggatgtgtaatcgattacacagtgcaaattttgaattcaaattttaatagctgttgtaaatcatttttggccactggtaatcgattacatcctctggtaatcgattaccagagagtaaatctcttgaaaaagactttttaacttaaatttcttggccaaaccttttgctacttcaattaggaattcctttcctatttaatatacccttcctaagactctagagactggtttgatcatccatcttgaatatctttaatttctttgtcttgaataaagcattgagaagcatgtgatcctttggcatcatcaa

SEQ ID NO: 95668 - DNA, 251 bp, Glycine max
ttaaaatttgaatttttttcgttcagaaactgctggtaatcgattaccatatatgtgtaatggattacacagtgcaaattttgaattcaaattttaatagctgttgtaaatcagttttggccactggtaatcgattacatcctctggtaatcgattaccagagagtaaatttcttgtaaaagacgttttaacttaaatttcttggtcaaaccttttgctacttcaattggaattcccctcctatttaatat

SEQ ID NO: 95669 - DNA, 372 bp, Glycine max
  unsure (1)..(372): unsure at all n locations
agcttaccaaaagcctcttttcttcttatccctatgcttttatccgctgatccactgcacaataactcccccatttaacacatacacaacacagctatctcatgtgccttggtctcagaaaccagcttccaacaactctcaaaccccccacacccctcccaccccatcacaaacccatcagaccctcctccataaacccatttcccatcatcagaaacaacaacagcattaaaagaaacatctttatgaccctccaaaatccccttcaaagcatgcccccccttcccatctnttctcccccaagccttaatcttttcatcagcagaagcagaatacacaacccctttacacgccaccaacccattgatagca

SEQ ID NO: 95670 - DNA, 248 bp, Glycine max
  unsure (1)..(248): unsure at all n locations
tagcattagcatgtgttgacactggatcactaatcattgggtacgtgtttgttactttagtggatcctatcaaagaacctccgcttataactacaaacatagttctgtctgtttttgttgtgtattgtcatgtggacaannntccatgccatgtttgagacatctaagattggcgttatgcctttgcccagtattattttttgcaacatcttcctttcttaaccttgtcattacctcgaaattttaat

SEQ ID NO: 95671 - DNA, 369 bp, Glycine max
agcttttctttctcaattttctgtctattgcctaacaattctaattgcaagttcacattcatgttctttctttgtctaacatacatacttgctcaaacttatgaaaagaaacacaaactccatcacaatcacgcattcaatccaaaatcaaatcataacaccaattttcacaaaaggatagaagtgtttcgctgcaatatcatcaaagtcaagtcaaattgttccatatgcttcagaataagcacaccaacaaatcatagaaagtatgactatataattataagcggaaaccaaaattactcaaaacaatgtactgaaactaatatagttataatcagagagatcagtagagtctgaacatcctcctca

SEQ ID NO: 95672 - DNA, 247 bp, Glycine max
ttagccttaggttgtttcatgttgatgcttccattatctctaacaaaccttcccttacaaagatgttcgaacccggcaagtgcaccggatcgcataagtactataaaacggtaagaaccgagtatcgaactcttggggaacttgtgttacttggtaaagctatattcagtgaataagtgtctagtatgaaaagagatgtgtcaactatgcacaggtatgtacacaaactattaaaaggaaaatcacg

SEQ ID NO: 95673 - DNA, 357 bp, Glycine max
agcttatctcgctaagcccagatatcttagaaatatttttggaatgtcgtctcatgctaagcgcagccatcctgagctaagcgttattccttgcggcctgcattgggctaggcgagcctgaactcgctaagcccatataacttagacaattttttggattttgccttgtgctaagcgcctcactcctgcgctaagtgctattcgttgtggtttgtataaggctaagcgagtcttgctcgttaagcccaatagtgtctagtagtcgagtcgcgcaaagcaagaacctctcactaagcgcatgtttaaaactgttttgcttaagctaagcgagtgcctatctcgctaagccaattatgt

SEQ ID NO: 95674 - DNA, 249 bp, Glycine max
ttagttgaacatttttatccaaaaatgtcaaagaattgggtgttgaaaaagcataacaagactttctgtgattggtttaaagatacaatctttgcagatgacaatgcttcagaaacattaagaaagctagtagatgggcctaaaagaaatgttataacttggcaaggatatgacataaacaagtattcattttacacaaaagcacaagatgacaaaagtacaatgcagaacagtggggtcaccctaagg

SEQ ID NO: 95675 - DNA, 358 bp, Glycine max
agcttcccaccattcaatatgattgaacctataacttgaagacaaagatggaagctcaaatggtagctcatgtgactcagctccatgaagctcaacagaagaagagagttgaagatgttgttgttgctgctgtgattgaacaagaagttgcagccatcattcaagctgaaacatctgctaaatctttggacaacaatattgtgtgtggggtaatcattgacctcacaaacacttgtgtcatggacgagaatggtgaagcgtacaatacaactatggttgatgaagttgaaccactcattctagatcccgcgtccaagcagtcaaccacttcacttcaaataagaattttgattaaatg

SEQ ID NO: 95676 - DNA, 249 bp, Glycine max
tgaaccttgattcttgattcttgaaatcaaatttcctcttgaaccttgaagtgttcttgattcaatcttgagcatcttgaacttattctttgattcttgagatcatcatctttgttatacctttgagctttttgtcatcacctttgttatcatcaaaacttctttgaaatcaaatgttcagattaaggtgtaaggttgatgagaaaattgatcctttatttcttaatgcaattggtaactaaaatctat

SEQ ID NO: 95677 - DNA, 227 bp, Glycine max
  unsure (1)..(227): unsure at all n locations
agctttgagcaaaatcaaacgattttatctttntactcggatgtccgggggaataccgtattatattgagacactcgaacatgacaacggaggctctgagtaaatccaaacgacaataactttttactcggatgtccgtttgtgtcccgtaatatatccagaccctcgtaattgaaaccaaaagcttcgtacaaaattcaacgaccataacttttaactcagaattt

SEQ ID NO: 95678 - DNA, 249 bp, Glycine max
tttgttttcaattttgtagcgtctcgatatattacaagactcaatcggacatccgagtaaaaagttattatcgttagaatttgctcagagcttccattttcaattacgagtgtctcgatatattacgggattaattcggacatccgagtaaaaagttattgtcgtttgaatttgcttagagcttttgttctgaattttgagtgtcttgatatactatgggacacaatcggacatccgagaaaaaattta

SEQ ID NO: 95679 - DNA, 367 bp, Glycine max
agctaggttgattttttattttgttagcttagatctatgccgacataagccattatctgtcctaaagtcttgcacataaaatactaaatcagatataccacatttttcaaaaacaggaccacatgaacgaatataacaaaaaataaaactagatgcagcctcacgagaatctaaagctgtcctttccctctatttttctgggcacctctttaaacttgaaaaggaaactacaacaactatttttctgagcacctctttaatcctcatagaggaatctttaggcagtggcaagttagcaccatactttgatggcatgaaaaaagacattttccaattatcttgatcttccatctaagataatatcttt

SEQ ID NO: 95680 - DNA, 246 bp, Glycine max
ttgcctttatggcttgtacctcatcactttcttccgaagctttaacctcatcatccctcatagtctttagatttgggagccagtccaatccttgtgtccggactctcagccacttatgatagtcgccgatgctcccattactgcttcccctaagctctctgtcctttcttcacaccgcatcacatgccttgtgaactccttagagtaccctcgcattggggtcactgaaaccccgtgagatgaaag

SEQ ID NO: 95681 - DNA, 355 bp, Glycine max
agcttgggacgttttttatggtttttgaagaaagaacgagaaaggaatggttgttttccaaggctacacgaataatatgacttgaaacactcaagggattctgctctcgggaaaagaagcatttctcacacaccaaaagacatatcgcagatcgcaacggtcagatcgtgtaaatctgtccttttaacctccaaaccaaatttcaagaagatccaacggttaactaatgcaggaggatacttttaccaagacagcttcagggagcttttttgaaaagcttcctcgtgaggcttctttgagaagttagaagtttaactacccacacccctcctataacctaacctacctccttgaa

SEQ ID NO: 95682 - DNA, 174 bp, Glycine max
actatacaacactcaatcgtgccttgattttttttattcaaggaaaggagagacacggtctcaaactggactatacaacggaattacaatcatggtacattcccctaacggctagcgagcttatatagaacatcaatcagcctatgttcattccccaaaaaatgctatggcgaa

SEQ ID NO: 95683 - DNA, 360 bp, Glycine max
  unsure (1)..(360): unsure at all n locations
tgcaagcttatggatggaacacttactttttggtgatgaacaaaagcgcaaaacggaatcaaaaaatgcgaaaaaggatgaccctaaagctgcaaactcgtcaatcccgtgggtatggcttttgaaaggggggaaaagaagtttttgaatgcaaaaacgtcccctctttcgtcattcttataatttggtgcaagggtggctcgcccangcgagctaacctgcacattttttttttttttttgaggggaacattaaccatgccccctcccttctcatggattatcatcttgcctaacttgaacttacttaagttagaattaggtgttgattacttaattttactttttttaaacaaacaaa

SEQ ID NO: 95684 - DNA, 249 bp, Glycine max
tgaactcgcaagattgtttgtagcctagtctgtcaaactttcaaagtttgacattcaatacaaaccatgcggccccatgaagacacaattcatggctaactttctggtagaatttgctagaaacaacacaaccaccccagactagtggaccctttacgttgacgatgcgtccaacaaaaaaggaaacggggctgggatcatcctcgaaagccctgacaatatcactctagagcaagccctcaagctcaa

SEQ ID NO: 95685 - DNA, 376 bp, Glycine max
  unsure (1)..(376): unsure at all n locations
gcaagcttgtaacaaatatatcttttttatatttatgggncacaccagacatggatgaaatgattatcatcctaaagatctgggtagaatattgcattacgaagaaaaaagaattcatcaactcatggttcattgagacaggagaaatcaccattggtgttaaagtattgtgtatgctagtcatctcatctgtgctattgtacagtttgtttagctaaagttagttactgctgtaaagttttcagtgcaagctagctctagcctctagtatataaactgattactgatctgttctatcagattgtaaaagtttcagtgcaagcttactatgatttaagcttataacaaatataccttttaaatataatatgggtca

SEQ ID NO: 95686 - DNA, 246 bp, Glycine max
tcaagagatcatcttttttacaacattattggtgatatctcaaaaggggtaacaactagacattctcttaaagatttatgcaataatatggcttttgtgtctatgattgaacctaaaaatttaaatgaagccataatagatgatcattggatagttgctatgcaagaaaaactaaatcaatttgagagaaacaatgtgtgggaactagtagagaaacctgaaaactaccccatcataggaacaaaa

SEQ ID NO: 95687 - DNA, 366 bp, Glycine max
agcttgtaaggatatcctaggtttttgttgggaaactaaatgtcctagttaggttggttataaaagtaatcatcttaagtataatttataaaaacaattattaaaaaacaataattttattatatacatgacaattgaataataatgtttaaaaaatttagacagtatattctaagtatattcatataaatctactacatgcatgctattgaactcaaggtatatgtgaaagaaacaaaaatatcttatgagaacaaggacatattttgtaacgaataattatttaatttaaaataaaataattcaaataatagttaattttacaaaaaaataaactaagttatttttaatcttaattaaaatcat

SEQ ID NO: 95688 - DNA, 251 bp, Glycine max
taaggctttttcctttgttacttcaaaacttggtgacattatagtcactgaaagagggttaataccagaattctattatgcaacaatttatatataatgctctctttcaatgagtacaaaaaagatcaaataaaagcttgaatggactctgattcaatgccgagtttattcaagcagggcctaatgtttttgttacatgtcaggactttcaggccactactattcctcagggaagattagtattctattta

SEQ ID NO: 95689 - DNA, 365 bp, Glycine max
agcttgcttctacatgtatgaatttcatttcatgggtaaccacaacaaccccaaacttatgatcagactatgacctaactaagaagtgacaatgcaaggcaattgagaaaaagaaaattgacaaaatttttattctatcctctcttattaaaaaaacaccatatgaatctaagggactactctacatacatcacactttatatttacatatagacacacaaactcacactatttttgtatgatctcaccaaggtgaatgtgaattttactccatagttcaaaaagataaagaaattgcaaataaaaaaatctaactctaaaaaatgtaatcaacaatctattcacaatttatgtttggaaatttt

SEQ ID NO: 95690 - DNA, 251 bp, Glycine max
tatgcgcatacttttttacaaacgttcacttgcacaagacattcttataactaacaaaaatgcacccatatacactcaaggcaccttcgttacctagattatttatatgtacttccaaggtgtatttgttacctacatctcatgcacttccttggctaaatttacatacatgcgtactcaaagcatttggggtaccaaaatttgcacatatgcacattccggtatttctaatacttatgcatatacaaact

SEQ ID NO: 95691 - DNA, 362 bp, Glycine max
agcttgcttaacaagctgttctgtatcaataatatagtctgttgtactcagattcaaaataataacagatttcagactttcagttcagaaaaccttatttctctctctctctctctcacttttctcagactattctagtttctacaaaaacaaagtatgattagaattagaaatacagaatttgaaaatacaacagaacggggaggaagataaagaacaaaaaattaaaagggataggaagaaagtaaagaggttaaagatagacgaagggaaagaacagcaggtgaaacataagtaccaaacagaaacagagaaggagaaagggaaacaagttgtaaacagagaaggaagaaaagggagga

SEQ ID NO: 95692 - DNA, 249 bp, Glycine max
tgttcatgggtcattttctaggattgtatttgactgagtgctatgtgtttcataagttgtgctgaattatgactttttgcctcctacttattcccttaggttgaatcttgctcatagatcctttactacgacgtctttatttgatctgttattaaggttcaattgagttaccactagttatgacttcttactccttcccctagacaaactaagaagcaaggaaagaggagctttataagatttcagatc

SEQ ID NO: 95693 - DNA, 361 bp, Glycine max
  unsure (1)..(361): unsure at all n locations
agcttgtcgacacggagttttctgttatgctcttgnggggnggaacgagcttcaaaatgagagagcacgaaatgaagagccaatggttgatacatggacggagatgttaaagatcatgaagaagcggtatgtgccggctagttactcaagggacttgaaattcaagctccaaaaactaacccaaggcaacaagggggttgaggagtatttcaaggaaatggatgtgctcatgattcaagcaaatattgaagaagatgaggaggtaactatggctcaatttcttaatggtttgactaatgatatccgcgatattgttgagctgtaagagtttgttgaaatggatgatttgcttcacaaagca

SEQ ID NO: 95694 - DNA, 248 bp, Glycine max
tctcaaggaggtgttcttaactatgagaggggtgtgtgtaactaagttctatcttctcaaggaagttttctcaaaaaagcttctcaaggaagctacctagtctatgaatataagcatgtgtaacactagttgtaactttgatgaatgagagtcttgtgagacatacttcaaagttccacttctctccctcttttattccttcaatttcgagctcccccctctctctttctctccctctttcttttcct

SEQ ID NO: 95695 - DNA, 367 bp, Glycine max
  unsure (1)..(367): unsure at all n locations
agcttatgaataatataatttatttaatattatgnctaacatgcgataagagctttttgggctttaagcaaaggctggggcaccttaccttgggctaaaatttatcttttatttatttattttgaataatagagatagaatgtgtcaaactctctatcctgaacttggtcaagagtctctaataccatgtcaggaacctccgctaccaaaaagtcaagcagtggactgcccaaacgtttcaactattgcttgcaaatatgctacaatctttcaggaatttctgcaggacagtgatttaccagtttggaacagatttaaaaatactggattttggcgtcaattgacggcataattttgctggatatgg

SEQ ID NO: 95696 - DNA, 248 bp, Glycine max
tcaacacattatttttttgatttaataacggggttgcaatttataagaggcaacaacttaagtgttatagaggctacatgtcacatcaatttatgtttctactcaattatttttctcaattgagttttccgttccacctgacctaactcctattggtggtggtgatatttgcccggtgagagtacggtcagcactcctcattcctcactctgctatcttttatttgaatgaatttttgttttgcattt

SEQ ID NO: 95697 - DNA, 310 bp, Glycine max
  unsure (1)..(310): unsure at all n locations
atcttcatacacgctnttttttttttatgtgncacccgagatagggggggtccacgctaaaggcgtccctcgcctaaaggacactcctcctctattgtcgagaatggaagccaagggtttcatttctctccccctacgttgctcaaggaacttatttactacttaattaaaacactattgagacccttaatcttcatcttcttctgtacccatacatgatacaactagaacttttcctctcacataaaaaaaacaacatcgttttgcccatgatgccataactctaattatataatttggtcacacactt

SEQ ID NO: 95698 - DNA, 360 bp, Glycine max
agcttcttatccaaggcacattcttggtggtgaagctccatcttccatggctgattcccttgtgaatggcgcctcccctctcctcttctcctttgaagttcaaagatccagcctccatagaagctccacaagcaagctttcatcaagtggtaatcaaagcacaagagcttcaagtaggtgctccttaaacctccataaatgtttttgctttaccttctattccattgttgcttcttcatttttctccatgtatctcctcacatgtcttgtgctaaatgtttttaacatgattgcttagaggttccacctattatacttgctatagaagctagatttcattttctatagttcaaatttctt

SEQ ID NO: 95699 - DNA, 248 bp, Glycine max
ttttgtaaggatcttttatctttggttcattgggattcccggaaagactgaacaagccgaaatggtggttgttgattctgatgtacgtttttggtggtttttaaaattataaattatgttattatattaatggtcattcaatgaggtatttatatgctttctatattgtagggatatgaaatccatgttgtttgcaagcaggatcagctgaagtctcgcaaggctaatttgaaagaaaatttgactta

SEQ ID NO: 95700 - DNA, 361 bp, Glycine max
agcttcaaaagtctctctatgatttgtaacagtcacctagagcatggtttgagagatttgcccagtttattaagaagttgggtgatcgttgctcggcaagtgtaccggggcacgcaagtagtattaaaacggtaagaattctgagtatcgatctcatggaacttgttttacttggtaaaagatgttgtttggcaagcaagcattggtgatacaattaatggttgaaaagagaaataaaagtatgatctagtctaaatgaaagcgagtaaagtgagttatggtgtgtgacaacaaatatgcgaacatgttggtttctcctacagggtattttgatgaaattaaggatatttctctacttaat

SEQ ID NO: 95701 - DNA, 248 bp, Glycine max
ttttcatgttttgttatttctagagagagaaaagtccaagttccaaagagttttgagagcttttgctgtgcgaagactggtagagaactgagattgaagaggaagccatcctgagagcatgagatgagtctgtgagtgtttgtgaggttctagaggtggaggagacatccccactacttgtatttcttcaatccttcatttttctcttctctttgttgtaatgtaagcttcccagatacggagagtta

SEQ ID NO: 95702 - DNA, 365 bp, Glycine max
aggtatgcaagcaataagagtttctttttttttattttggcacgcgaggcaccaatctattttgcttacatcacataccttcgcgaaatgatgttgaatgctattttaattatgtatactaatatggagcttttgagagaagacattattccctatgattgagagattctgctgcaacaagattatgacatgggttcgagaataggaatagcatattaaagctactggagtgagccccattgaagtgcataattttagacatgacaggcacatattttcgattggacctacaacactagttatatctaatatcacgaacatagtgactcagaatattgcgttgttagccgcacattcatacacac

SEQ ID NO: 95703 - DNA, 355 bp, Glycine max
agcttgtcggattatggggtacttatcacatgtggtactaagtggcggtcgggctatggtgcacaacaagttttccacatccacaaagcgcgcataaacccaccatcccctgttgcccacctccatctgagctcacgtactcccacgtagcccatatcctcgtttctctcaacaccgggtccccatcaatcctcccaagcttccacaacatccaagcaaaacaacattcaaatagcacaaattaccacagccaagaaaatagagcaaggcagaaaactctgctcaaaacaccaaccaaaatcacagcttttctcacttaaagaccccagtaacaattccttcgatccaattcgtt

SEQ ID NO: 95704 - DNA, 247 bp, Glycine max
tgcttgctttatttatttctagctattattgggtgctaaactgaaataaaatctatctatctatttgggtaatgggtagtaattatcaatatttcttcttgttggaatgttgggtctctacctagtacctactgactactgtctactgtcttgtctttttcattcttcggccgtaatcttaatctaacaaacgaggcacgcatttaagagagggacccgctattatatatacttcaattcaaatgat

SEQ ID NO: 95705 - DNA, 371 bp, Glycine max
  unsure (1)..(371): unsure at all n locations
tgcagcttttttttacaaaaatttttttatttatcgnnnanaaacaattagatttactgatcggcagaaaccacaaagtataactaattaatatatgcagtacaaatacttaattatatttctgttgaataaatttgtttgaaaattaagtctggagagtaagaaatgaaggactaatatgaagatctaaagttctaaattagacacacctttaaattatatccttgaagcttttggaacatctctctcatatgatatggtttggtaatttcttttcgttgttatttatgcctgttattaaaaataattttggtttgaaagaaaagcttttttagattaattaattataaccatattcaattaacgataag

SEQ ID NO: 95706 - DNA, 248 bp, Glycine max
tgtcaactatatattatttgttcttattcaatatactttataaaatttatttaaaatttagagtttaaatgtaataaaatggatttatctatatgtctaatattaatagtttaatttgtttaatggtttatattttaaaaaaaatgattatacaaaggataaaaagtttttcacaatcattaattcataacatattatgtatagtaaatttgttaccttttaaaataattatattaaaataatttaat

SEQ ID NO: 95707 - DNA, 372 bp, Glycine max
agcttcttgtaaagagaataaattattgttatctacctcatattcctcttgctcattttttgagcttttgtgacttgtgtctgccattaagaatatgttgacttcttcatttccttcctcttcagaggatttatcatctaggtcttcccatgttagcatgagactcttcttttttcaatatgatcaaagttatcataatattttcctagagatctaatttcgtttaatatggtttgaaacctatattatactcttgtcaacatgatcaaagttatcataatatgtgtctaaagacctaagttcatttaatgtgatttgaaacctaagaaacgtactttgtattctttcgttttattccatattaaacaactc

SEQ ID NO: 95708 - DNA, 250 bp, Glycine max
tagaaagtccttctgtttttttttgtgtgtttatttctgaatggtatgagatgaaatgcaaaggttaggacttgtgttagttgtttataatggaatgagcctaaacacttgagcttgagtgaaacaatgactataaggctttggtcaatgatccttccttgatatctatcactctcactagcttatttcaattgtgactctaatgcatatgttcctatcttttgaaaagttgcatgtttgtgaaaagcaa

SEQ ID NO: 95709 - DNA, 353 bp, Glycine max
agcttacccattcagttttagggtttttatgatgatgctcgcgacgtttatgtgctgaaattgcttatggaaaactgttagagatgaagggtaaagtttacctatggttagaaagtgagaatatggtgttatgagtggaaaaagagtgaggttttgagagttggaaggccaaatctggatttagtggtatttggaggttaaagtgagttaatcctagcttgaaatgtcatttaagacttatgagaaagtttgggctgcgctacagagaaaaacaaatgaccaaagtgaacaaagagccatttctagggtaaaattgggtgttgaagagtcaaattttggttccgagaaatttt

SEQ ID NO: 95710 - DNA, 249 bp, Glycine max
tcaaaaaaactatttattttttatgctacggcggccgcttccaatacacctagggaagcggaatcggagctacagcccgcaataaacttgggccgagacagaaacactacgggtttgaatcggaagtttaaaccttaagcctacccttatggattgcctccatactttactccccgtaccgctccatacgaattgagccaagcccctaccttagaggggtaccttcctccttatgccgactatcctcag

SEQ ID NO: 95711 - DNA, 388 bp, Glycine max
cttatagtcacccgcggcatgcaagcttccttgagaagattcctatttaatctagagcttagctacacacacctgctataatagctaagctcacccccatgccaaaatacatgaaaatataaaaaaagtcccaattacaaagactactcaaaatgccctgaaatacaaggctaaaaccctatacaactagaatggccaaaatacaaggccgaaaagaaggaaaaaccaattctaacatttacaaagaagtgtgaatccaaccttgacccatgggctaaaaaatctaccctaaggttcatgagaaccctagagccttctttagtagctctagcccaatcctcttggagtcttctatccaatacccttggggtgtaggattgcatcatcc

SEQ ID NO: 95712 - DNA, 251 bp, Glycine max
tagtgaagttccctttttaaccatggaaggtttggtgtaggttacgagcctacacatgccgataagagaagggtctccttagaaaggaaagaaagaagcttggcccatttacaagggtggggaccacaggtggagagggtccccatttgtcacattgatgagagctttgtcagtgtaggatggatgcatgatgattaggttgctgtgctagacgacgaaacctatcaagaccaaccaaaatgtatgcagtt

SEQ ID NO: 95713 - DNA, 364 bp, Glycine max
agcttctcaaggaggtgagctttgttattataggggtgtgtgtaactaagctctagcttctcaaggaagttttctcaaagaaacttctcaaggaagttttctcaagaaagcttctcaaggaagctacctagtttataaatagaagcatgtgtaacacttgttataactttgatgaatgagagtcttgtgagacacaactcaaagttcaacttctctccctttttcttccttcaattacgtgctcccccctctctctttctctccctctttcttttcctccattgaagcatcctctccaagcttcttatccaaggctcatcttggtggtgaagctccttcttccatggcttattccttaatggat

SEQ ID NO: 95714 - DNA, 250 bp, Glycine max
tatgaagagttcttgtttatgctagttgtcaagcaccttgtgacttctgtcgaatatccctagaccaacaatcaggagaaggcagcaaacagagttatccttaaggccttgcgcacaagacatgacaagcccaagggtctatggaaggaggaactccccagcatactttgggcttatcattgttcgcctcagacaacaaccaatgaaaatcctttctgacttacatacgacacaaacaccatgatcccca

SEQ ID NO: 95715 - DNA, 366 bp, Glycine max
agtcttaaaccacagcatttcattatctatgtgtccaaaacccctcaatttaatggattttctaggcttgaggagtgaaatttaaaatgaggtaaatttgaagcaaactctcacctcacacaagtccataacatcaatctaaacttgctcaaactagatttacacctaaaattccaccgaatcaaaatttgacttctcaacacccaattttgccctaaaaatggctctttgttcactttggtcatttgtttttctctctagcacagtccaagctttcttccaagtcctaaatgacatttcaagctagtattaactcactttaaccttcatttaccacagaattcaaacttatccttccaactctca

SEQ ID NO: 95716 - DNA, 250 bp, Glycine max
tgaattaatatttattatcttagatagctttcccaaagtgtaggaacctaaaacggaaactattcaagaacgtagtattaaagtaggatctctgcagtttcgtatgtgtgaattacccctttgtgttgttttctttccgtttcatgcatacacatctgcatcataccgtcacacatgcgttgtatgtgggtctcgtcttttgtcatgggaagccgaaagattcatatcgtcttcttaactgcacacatgg

SEQ ID NO: 95717 - DNA, 370 bp, Glycine max
agcttattgacactattgatatttcttctatagaaacacctgatctgagtgatgttgaagcaaccaaggcttttcaaagtacctagatgagtgccttactgctaagtgcattatcttggcatcaatgagttcagaactccagaggcaacaacaagacatggacccatatgagatcgtcgaacatcttaagaagatgtatggtggtcaaagcaggacgactagatttcagttatctaaggccctatttagatcctcacttgctgcaaatgaaaaagttggaccccatgttcttaagacgattgatctcatagaacaacttgagtagatggggtgcactcttggggaagagctttctcaagatttgattctg

SEQ ID NO: 95718 - DNA, 247 bp, Glycine max
tggcttctgatttttttggttgctcatacttatatttaaatgggctaaattaaaagcataagcttgacctttttaaaatatgaaagtttaagattgactcatttatgacttgaatttttttctccttgaattatttttaaagtttatcaaagatgaatggagatgatagattttttttttaaaataagtttaatggtttctcatttataatatacaacaataacaacaatagttttattgcactagg

SEQ ID NO: 95719 - DNA, 332 bp, Glycine max
  unsure (1)..(332): unsure at all n locations
agcttgactagttgngattgttttttgtaccataaactgcaagtgttgcgcagaaactacagcaatggctcatattaactatgctgcgaaaaattccttatggagaaacttcaatggttaaaggcatggaaatatccttgtatatataatcccgattcttagatgatttgacgccctaaaattgtgaccatcggagttaaacttgttcacattttttaaaaaaaatatcctaacctaagactagattttcgggattaataatgcagtgctttaacttcgtctcgcgtttccaaagattttgcaagaaatggtgaagggaaaataataaaaat

SEQ ID NO: 95720 - DNA, 254 bp, Glycine max
tcgttgactaaataattttttactcttacggcatgcatgtatgacgcagtaatgaggctctgggcatgttacgtgccagcaacttattattcttaagacaaatagagcaacacgtttcacggagtttcgtataaaagggtatgaagtcatagagttatagtagcgcgtgacttgaatattgcagatttcatttatggctttctcttgcttttaccataaataatcttggtggaaattgacagggtattgttgcc

SEQ ID NO: 95721 - DNA, 357 bp, Glycine max
agctttggcatatccttacactgtatagtaaccaccaagcacatggattcacattaggtctttggtttatggttttaattattagcctgacagttcattgtgatgacaagctgtattttgtgtgttttgtcttgttagtctcgtacagtctttcattggccaagttggtaaacataaaatgagtttgaagagttgtgtcttattttcctgagtacaagccagcatcagtagaagcctagccacaacctgtctctacttcaaaagcaaaggtaatccttataacctgcagtctttaattcaaattttgagctttttattttgggaacaattcatgttaaattgttatatatcaatagc

SEQ ID NO: 95722 - DNA, 248 bp, Glycine max
tatccttacggtttttctccggacttcaccccccgtgccaccccggaagatttaagccaagcccctacttttgaggggcaactcccaccttatgaagactatcccgggcaagacgatggggaaggagatacccatcttggccccctgctccacctcaaagatcaatccccgtatgaactaccccagccgaacatagtctgccatatcccggccttacccacgcccgtaaaagaatctgttcccttcgc

SEQ ID NO: 95723 - DNA, 362 bp, Glycine max
agcttccacacatccgatcaattcaacattcaaatagcacaagctatcacagccaagcaaaacagagcaaaggcagaaaactctgctcaacacatcaaccaaaatcacagcttttctcacgtaaagaccacagtaacaattccttcgatccaattcgttaaccgttggatcgactccaaaattttactggaagtctatagtgcataagcctacattttgaccgttgggatctactagcaaacacccagaactcattctgcactagacttttcacagccaaccacacacaagcatttttctgcacaaagccaaaatcctgctgcacctattttgacagcaaaattctgcataagtgcagattt

SEQ ID NO: 95724 - DNA, 244 bp, Glycine max
tccttatagagtgtttcgttcaaaaccaagttcaatggtggtaccagcctttgatggtactcaccgggaaatgatgggggaaaccgacatccccattcaaataggcccccacactagaaatgaggtgtttcaagtgatggacataaatgccgtctacagctgcctcttggggagaccttggattcatgcgctaggagtggtccctttgacgcttcaccataaattgaagttcgcggttggggga

SEQ ID NO: 95725 - DNA, 366 bp, Glycine max
agctttaactagaaattcataggcatagaaggcgaacacactcacaagatgcttgaaccattgccttccttgaagcccatcaacgtccaagaagcctctttccgcaagcattagtctatcattcaatgctcgcattttcatatctatagaacgatctgaagcttcttgccattttaatttctgcagttcacaataaagacaagtagatgaagacataacaagtaaattcttgaataatactaatacactacaatctattgcagttttgattttacctttgattcatcattagcttctttggcagcagaagcaaattcttgaatcgaagtatttagtggatgtagagtaatctgcttgtctaacaag

SEQ ID NO: 95726 - DNA, 275 bp, Glycine max
ttaaggtgacactatcaacaactgacgctatatatctttttttattgccctatgtatcccttatggattaaactatccattttcatcctaccgggctcacacctttgcgagatacaactagatcccatatagaggtgccttgtcataaactccatcttatccctacagacattactccatatctctgagcatataactgcacatagcaagagaatatgattggatgttcccctattaaaccacatgtcatccacaatagatttggataaaacatt

SEQ ID NO: 95727 - DNA, 351 bp, Glycine max
  unsure (1)..(351): unsure at all n locations
agcttaagtttaatttgacaattttaattcagntcacagatgggtgcaaatgatattatcattaatcaacaggtaagctttttggtcaaatggctttcaaaacaataatggccttcatcatatccacatttatgcatttcattctaaaattcagagattgatacaaaaatcattgctctatgctagtcgttctctcaacacttaagttcgcactctcaccgggttatggttcaagcttttctttctcaatcaatctgtccactgactaacatttctaattgtgatcctacactcttgttctttctcatctacaaacatgctcattcaaaacttatgatttcaacacatgct

SEQ ID NO: 95728 - DNA, 247 bp, Glycine max
ttataagtgttggtttgggagacgaaggtcaagtgtttgcgatatgtgaagatgatgttccaagtacttcggatttggtccgaccatgccctcctgatttccagcggggaaattggcgagtggaggaacgccccggcatttacgcaacaagcataatgtaaacctttacggttttaaaagctctatagttgggcctaggctttagagtttccattttgttaacgctttgtgtcttttggttttgaat

SEQ ID NO: 95729 - DNA, 355 bp, Glycine max
agcttcttggcaatcctcattccatcgatcagtttggtttttgcgtaagagtttgaacaacggctcacaaatggcggtgagctgcgatatgaatctggcaatataattcaagcgtcccaggaagccccaaacttgtctgtcagtacggggttctggcatctcaaggatagccttcaccttttcggggtctacctctatccctttctggcttaaaatgaaaccaaataatttccctgatttgaccccaaaggtacacttagcggggttcaaccttaaatgatttttcttaagcctttctaacaactttcgcaggttgacaaagtgttcttcctcggatttatatttaacagttatg

SEQ ID NO: 95730 - DNA, 251 bp, Glycine max
tcctcggggccatttcctgcgaaggcaaaaatttggaaagttagttttaccagtgggacactactcttaaaacaaaaatggcatacaacctcctcccataaatacaaacatcaatgtaaatttagagcaagcttatgcgcatatttccttacgaacgttcacttgcacaagacatcctatcaactaagaaaaatgcacccatatacaatcaaggtagcttcattacctagattatttacatgtacttccaa

SEQ ID NO: 95731 - DNA, 377 bp, Glycine max
  unsure (1)..(377): unsure at all n locations
tgcaagcttgaggattatggggtacttctttcttgtggtactangtggcggtcgggcgatggtgcacaacaagttttccacatccacaaatcacgtataaacccaccatcccctgttgccctcctccaactgagctcacgtactcccacgtagcccatatcctcgttcctctcaacgccgggtccccatcaatcctcccaagcttccccaacatccaggtaattcaacatccactcatcacaaactaacaaaccaagcaaaacagagcaaaggcagaaaactctgcccaaaacccaaaccaaaatcacagctctttctcacttaaagaccccagtaacatttccttcgttccaattcgttaaccgttggatcgactt

SEQ ID NO: 95732 - DNA, 276 bp, Glycine max
atgggaaaatacacaatactcaagcttatgagaccaaaattttacaaagaacgtttccaacaatctaattctcatgctaatctagtaaatcttgtccaaaacacaaacgaattatacataaattcttctcacaacatggggagtcaaatccctcaaacaatttcacataatcatattataatcaaaggaatcaaaatggttcaaaaacacaaaacaccaagagcactcaattttatcaaccaattcgcattaaggcatcaattggttcgtcaaaca

SEQ ID NO: 95733 - DNA, 363 bp, Glycine max
agcttaagcattccactctaaccttttctccatatgcctaccaatagaaaagttgttgcaagtcctaccccaattttcttttcactgcaagtgtgtcaaagaggttgattagacatttaggcttataaaactatgcactgtagagctctatgactattaagggtggatataacctatacaattcaatttactcaggctgaaacaaactaatttgacatgtttggtgttagaaattatactccaaatgttcatagctgcgtcaggttttattttcattggctcgttgtacaatatcatctaaatctttttttttttaagagtcctatatgaatgataagacttctagacttcatggataacatt

SEQ ID NO: 95734 - DNA, 250 bp, Glycine max
tgcttctacactatctctacaggaagatgacatgccttgccaaagacaacccgataaggggacatccctatgggtgccttatgggcagtcctatgcgcccaaagagcatcatctagcctggtgctccaatcctttctgttaggctacactatcttctccaagatcctttttatctcccagtttgaaatctcagcctacccattggtttgagggtggtaaggtgtggaaattctatgaacaaccccatact

SEQ ID NO: 95735 - DNA, 322 bp, Glycine max
ccccctttcttttactttcacttcacggggcagattttttttaattgtgtcctcccaaaacaattaactttttcgacagaactaataatgtctaaggggagggatttttttagaatggacattgattttgaagacacccaagttttctatcacctcctccttttgttctgagacaaagagatagtctccgaacaaattcattcaaacattttccttcctaccaagagcccacccaaaaatctgctttataccccaccctaaattttcactgaattcctttctcaacccaatttgcctatcaccaccccccaccttttttaaa

SEQ ID NO: 95736 - DNA, 249 bp, Glycine max
tactattgatagtctcttttttggccacatatatcttattttacttatgatctcaattcgggtatgaccaaggaactcctttgcaggtaagttccaaatgaaggccatgatagaatagatgacttgaatttcaactcttttcaataccatggagtatcaccatcagaactgaatcagaaactatgtcaattgctgatagaacagcagaaaaaccagattgtggaattggaatcctaactaaacctggct

SEQ ID NO: 95737 - DNA, 351 bp, Glycine max
agcttttcttccttcagtttctctcactattgggtctagcgttttttcagcgtgtccacaactgaatcccaagaccctttatataaagaaaattgatagaataagacaaaaatcccttcagtcaagaacaataaagttattgttcatttactttgtcacagggctgtcttttacaaataaagttttgtagataagctcaatgtcatagtctatgcaacaataaagatttccgccttggattttgaatgtgtttaagcaggatgtttctgtctttaattcttggttgattttgtgatagtaacatcttcttcggcttggatattcccagaacagaagatgtcgaatgagtct

SEQ ID NO: 95738 - DNA, 250 bp, Glycine max
tggagttggagcattgattatgctgttgtgatgttattggagtatttgcttgacagatcaaagtgtcttctgttaagagtctatgaagctgtaccaaatttcctagtagcttttagtttgtttaattcagctgaatggttggttattgatgtactgttgcttcttggtacgccttgtaccttgatacttttcttattaatgaaaagtattttgctttttttaaaaaaattaacaatgttttaaacgagca

SEQ ID NO: 95739 - DNA, 359 bp, Glycine max
  unsure (1)..(359): unsure at all n locations
catgcaagctttttggagtaaaatcttttttccaactcattntattttaaaaaggaagtcgtttccaatcaaggtctgaaaaaccatacaagtttcctaacgatttctgattatgtgggccattaaatctatcatatgctgacaatagccgagaagcccatgaatctctttcggggtggagtaagtgtctgccatcgccttggccttggctaacaagcggggaagttcttgactcccattcaaggtaagagcaaaccggtccatccacatggttgcctcttggtgtaaagagtcgatcacccttcctctagcctctctttccgcatatacttgagcatactcatccacgattctatgct

SEQ ID NO: 95740 - DNA, 247 bp, Glycine max
ttacatcagatttttttaatgacccactaacctagaattaaaataacttaatgccattaacctagggaattaaaagaacttaatggctgagtgtaactgaaattgtggcaaccaaaagtcacccccaacagccaacaagttagccaccatttggtctcccaaaaggctgatgcctaggttgccaattgggcccttattacaacttgaactaaacctaactaaagcccttttagctgattaacccaaa

SEQ ID NO: 95741 - DNA, 287 bp, Glycine max
tcataagccaggcaatagaagaagattttcaagatctcttgtttgaagcaatcaattccatacctgacccccaagaaaagaaggtttttctggaaaaactcaagaaaacattagaggtaaaacctagacaaaaggattttatcacaaacaacaaatttgatgtaagtaacatactcaagagattagaaaattcttcaaccaaaccaacgacaatccaagatctccaaacagaggataacaatctaaatagaaaggtgaaagaatttcgttcacaacaagaaattcat

SEQ ID NO: 95742 - DNA, 249 bp, Glycine max
tgcctaacaacttttttgactcagatctttatagctgtacccagcacacttgtttgagcaccgtgagaagtaaattctcatgctgagaacagtcaaaacatttaagctggaacatctagaaaattataagcatttaagcatggccaggctatagattcccaatttagggatgtcacctaacatgagtgaactgaaattacagtagtgtgctgcttatagaattttgaagctgttaaaggaggaagcata

SEQ ID NO: 95743 - DNA, 360 bp, Glycine max
agcttttatgggtcagcttttcttgttcccgatcatatttcataaatggtgtgtaacaaatactatgagttatgagataagaattccaagtggcaatgtcatcaacaattttttagaaaatgtcaaacaaatactatccacatcatcctaagcaattgaaattctccttattcacaaaacaattgaacggattaagccttcagatctaacattgggggataagatattggaattaagaatatcaattagatcctaaaaaattgtagcagatataatgtgaaattataataaccctaagaaaatcagagatgcaaataggagatcatgttgattagccaaagcagtaacaacattgttttg

SEQ ID NO: 95744 - DNA, 234 bp, Glycine max
gtggtgccactttttttgttgccacagcgcctcatgggccaccatgtgagataggccacggtgggcatttcatcattttgcaaaatgcaaacacactaccgaagctcgattcctatacgtaaaacctcaaccataaccattcagcgcatctaatctaaattcgatctcaattcatagcgatccttagaatggaagtcggtaaaatcattttaaaatgaaggaatttatgaatgg

SEQ ID NO: 95745 - DNA, 356 bp, Glycine max
agcttggttcgaggtacttaccttgttgtgatcgaagaaagatgaagaacgaatgaagaacgtcgaagaacggtcgaaacctttgcgaaaatcttcacgaaaaacgttacggaaacgtttcggaagcgcctcggcttatattttcttcacggaaacaatttttccaagcaaattcgaaagagagagaaggacctcaggggctgaaccctttcccttttcacttcctcccctatttatagcaaaataggggagatggttgccgcctaactcgcccaggcgagcagggttgcttcctctagaagcaacagccttctggaggaatcttctggagggcgccagtgggcctggttactatt

SEQ ID NO: 95746 - DNA, 249 bp, Glycine max
tggtggcagtctctttctaaatggccatatccaacagtaagttcagacattagcacctacgattgcttttgtacttgatgccaccaagctttgttcaaatattaaaagaaatgtatacaacttaattatcatcatgcatatgcgtattttaaaaaagtaggtgagagtatattgaaaaacttacattactctatttgtgtcaagtcatatgtggaccatcaatgctttcaactttataatttaaatttt

SEQ ID NO: 95747 - DNA, 356 bp, Glycine max
  unsure (1)..(356): unsure at all n locations
agcttttcaagggacatattcattgttctttagagccctcaacgttgtggcatatggtctccattttctaaacaaacttctcaagattttgtcaatatgatcctagttatcataagttctacctagagaccttaattcatttagaatggtttggaaacatctttacatactttgtatgtcttcgccttcctccatagtaatgagttcatacttatgtgtgaggagacttagtttgttcctatttacctatgacattacctcatatgatatggctaaagtgtcccacattntcttggtactcttaaagctatgaactttggtgtagtcttattcaaagagagtgtaaatagaacatt

SEQ ID NO: 95748 - DNA, 249 bp, Glycine max
tcctaacatccaatttattcaacattcaaacaacacaaactatcacaacaaataaaacagggcaaaggcagaaaactctgcccaaaacaccaaccaaaatcacagcttttctcacttaaagaccccagtaacaattccttccttccaatttgttaaccgttggatcgactcgaaaattttactagaagtctctagtacttaagcctacattgtgaccgttgggatctactagcaaacgtccagaactca

SEQ ID NO: 95749 - DNA, 363 bp, Glycine max
  unsure (1)..(363): unsure at all n locations
agcttgatgtgagtaagtttggtctagtcantcttcgtacttttgtttgttgaccacagaatggtacctggagatatgtcgcagggtcaggagaccttggggacgtcaggtggggtgctattgcccaaaaccaagcttgaccaatcccaacccaactcgggcatagtcagtcagtgagaacctgtgatgtacctaaacaggcgagctcctatcagtcaaccaataaaagaacaaagaccatgaagcaaggaggcttgtgtggtggttggccagctatgaatcttgagtggtatctggaaattggcctctggtaatcgattaccaagggtgtgtaatcgattacaagacttaaaaatggagacc

SEQ ID NO: 95750 - DNA, 232 bp, Glycine max
ttcaaaattgctctatgtgttgtgtcgcttgtcaatgtcaggactcatacgcgattctcctcaaatttcagccaacccgcatcaattagactttgcaccttacgcttaaagggtcatacaatgctcaatggaatgccccggggctcctccatgataagcacacattgcgttcgagtcgtatccttggaaaaatggaggttgaggaaacttacaggggttatggctaccattg

SEQ ID NO: 95751 - DNA, 353 bp, Glycine max
  unsure (1)..(353): unsure at all n locations
agcttcaaatngaaagatattcttggtctaaagctgtagatattaaaattatattgatttgttaaatcaagggaacatgttcatagagtaagagttcagcagctacgtttttaatttttttatagattacagtctaacattgattgcagcttttgattttcttcgaaagtggaattattacttacaggaaacccaaactaattgccacaaagcagaaaaagatgtatgcgagaaattattgcaaataatgatagaccaccaacctgtgtcttattccagaatcaattccccagaaacggatatggctgggaatatcaacaaggccaacaatctctgcaggctgcatcaataac

SEQ ID NO: 95752 - DNA, 246 bp, Glycine max
tctcaatgcatattgccattcgtactggcgattccaggctaccactgcaccactgcaccacctgcgccactgctgcacctgcgcgcctagagcctagccctcagcctaggaactcgccagtcaaactggcagttccctatgcatggctatgtcgccattgcaaccagcgattccttcagaatcaccaaactcgccagtggtactggcggtttgggtgctgtatgcatgcatgccacgtaaaaaaca

SEQ ID NO: 95753 - DNA, 363 bp, Glycine max
agcttttgggcgcccaatgaattttatataaccaagatacatgaaaggaagatttaccaatgacataccaagaaaactattaatgtcccttatccctcatctaacaaaaggatttcaccccttcaaaaatcttacactttgcaagactgagaatttggcctaatgcttcacagtatattgaaaataagtccataagatgacatagactacactacatacctcctcaaaacaccataaagtcatcaacataaaaaaaatggctaataggattgaagccccttggagaagccattggaagaactactttagcttctaaaagcaaagtgatggaacaactcaacacctctttagccaagcaaaaaa

SEQ ID NO: 95754 - DNA, 186 bp, Glycine max
tctatagttgctatcttctacctttctccaccatcttctttcttcaactttccattcacaaccaatggtatatcggttggcttgtagtcaaacatcccaaacttttcaatattttttcaacatctttcttttgacaaataaaaactacatcatcctctggtgaatttctattctaagaaaatgatg

SEQ ID NO: 95755 - DNA, 367 bp, Glycine max
  unsure (1)..(367): unsure at all n locations
agcttatgctgcanacatttatattagtattccctcaacagcaaaaccaacaacagtagaataattgtgatcttttaagcaatagatacaatccaagttggaagaatcatccaaatctgagatgggcaagtcctccacaacaacaacaacttgtcccttttttccagaatgctactggtccaacagttagtaaggcaaatgaccatccagaatatgcaatttcatcaagaaacaagagtcttcattcagagtctgacaaatcagatggggcagatggctactcagttcaaccaagctcagtcccaaaattctgacaaattgccttcacaaactatgcaaaatccaaaaaatgtgagcgccatcacct

SEQ ID NO: 95756 - DNA, 143 bp, Glycine max
  unsure (1)..(143): unsure at all n locations
tgttgaaacngcttttttttcgagacctaccacatgccacctccgtgctagggcagccagcgacgatgcaagcgatggtaatacgcgcaacatcactcatctgcaaacgatgtaaagaagaaatgcccaaactgaaacggggg

SEQ ID NO: 95757 - DNA, 364 bp, Glycine max
agctttcaagagcaatttaaagatgagttattttatatcgctttattttggggtaaaaaaaaggaatggaatgtttcagcaatgatttataacttacatggaaccagaccaaagtacaattgatatgtagaaggttctttgttcctcctgataaagcactgtattggagaatcacgcggacccggcttttcatacatataccgaaaacaaacacaagaaacattaaaagttaaaaccacaatggaaaaggagaacattagaccagaaaaagagttaagagtttattacctgcttcaatgaaatgggaaatgtgatccttccacattgttcaggagtcttgacaatctctcttgtaatggacctc

SEQ ID NO: 95758 - DNA, 251 bp, Glycine max
ttgctgctatgttttttgtttcttttgcttatggaagctgctgtagctatctgaaatcgtcccttaagaaaggagacagagggcaattgcttgatgcaccccctttttgcttcctgcacctcccagaaaagacctgaacagacacaaataccctcgcctctcccaagcaagtcccacctccatctaatatcactgtcaaccaaaacaccgctgctgcaaccacccaccaccatcttcgtcgacccttatgc

SEQ ID NO: 95759 - DNA, 361 bp, Glycine max
  unsure (1)..(361): unsure at all n locations
agcttgtaagtttgggatctgctgttttttttaagctctggngcagcaagcacacactatacccaaaaggtatgccagtaggatcttttctgggtttatattttattagattatctatttcttggaacttacttgtccagtttttggtatacttttgaaggattcaagactcgagttaatttctttagcattcttgaaccaacaagaatctgtacctatatttctgaagacattgatgctggttttcttggacctcttttcaaggtatcattcctaaccttgtttctgttttaggtttgaaaaagaaacaatattgacaagtcactgtttcttgataatactggaatccatgtagtcaacc

SEQ ID NO: 95760 - DNA, 251 bp, Glycine max
tgtttttgggcaatttttaccccacctgacgtccccaaggtctcctgacccccgcgacatatcctcaggtaccactctgtggtcaactaataaaagttggaagactgactcttccacgctttctcacaccgggcttattgggttatggggcacccgtcatatgtagtactaggtggcgatcgggagatggcgcaaaacaaatatcccatttccacaagcccaagcataagcacaccatccccagttgccca

SEQ ID NO: 95761 - DNA, 378 bp, Glycine max
tcttaagtcacctggggcgtgcaagctttatcttcaaggcacaaaatgatttttcttctggctctatcaatcatctgggagttctcctttgagcttagagattcagacatcctttcttctcctttaagagcttatgcacaaccatattgaatcaagattacttccatcttgattctccataacccaaagtcattttcccttgaaaacttctcaatatcatactttgttgttcacatctttcttgatcttgatctccccgcaaacggggccacttggtggatcttgtatcagatctgcttcttctaaacttgcacaagatcaaaaaaaggaagaaaacacagcaaagcaagaacctaaagatttacaccagatttaacg

SEQ ID NO: 95762 - DNA, 252 bp, Glycine max
tgtaggattatgggtgttttcatcacatgtggtactaggtggcggtcgggcgatggtgcacaacaagttttccacatccacaaatcgcgcataaacccaccatcccctgttgcccacctccaactgagctcacgtactcccacgtagcccatatcctcgtttctctcaacaccgggtccccatcaatcctctcaagcttccccaacatccaagtaaatcaacattcaaacagcacaaactatcacagccaag

SEQ ID NO: 95763 - DNA, 361 bp, Glycine max
cctgctggcatgctatcttatagacgcccatttttttctcttcatgctgtgtaggatcaaaaagtgacctcaccacagaacgttctgctggtgctttgtccaaatgtgcaactttgtgagcaagtagtgaggatggctaacagtctctgtagagatgatggcgagacaatagttagtgtggcagccatttgtggcaaacaggtagtgattgtgcaatccttatagttatatggaatttatggtctgctcttgaattttcaatactaagaaatattttgacccatggatggccaattccggaacctgatgtcattgtgacgacacctgcggctcttctgaattatgttgaccttgacagaac

SEQ ID NO: 95764 - DNA, 363 bp, Glycine max
agctttggtgtgaaggcttagatttatactggtggccagaacttattttatgggtaaatgctttgtgctgaatgatgaaatacaatacgccaaagaaaagataggaatctaaatattagtcaacttattaagtattaataaaggtgccagtgggacagcataaacgtcattggtatatggctggacctcttttgcctgttatgcttcctctgttcacatttggataaaagttttagaactgaactgataccactatactagctaattcactgtgtcaggtaattaatcttaattattggactatttgctgattgatttgatttttttccaccaatatacgctttctctcccatattttcctaa

SEQ ID NO: 95765 - DNA, 239 bp, Glycine max
tctatataagctgtaccattttatcaataaacacaagttgagttttattcagaaaattagagtttatctcttttatcttagtgagagtgattctcctaaattcttgagtgattcaagaacaccttggctgtatcaaaggactttcacaacctttgtgtgttgccctcgctggaaagagtgattctttccttcctttcatcatcacccttgttctttcaaaccacattttccagaaaatc

SEQ ID NO: 95766 - DNA, 359 bp, Glycine max
  unsure (1)..(359): unsure at all n locations
agcttgaaggtgtgtaacccactttttttcataatagaacactggtaatgtgtctactatcattgntatcatttctttctccgtcattgagggaaccacttgggctgccagatccctccacctttgggcatattctttgaaagatttgtgccgctttttgcacatgttctgtagttgcatcctatccagagccacatcagaattgtactaatattgtctaacgaaggcaaccattatgtctttctaagaatggactcgggaaggttccaagttagtgtaccaggtaacagctaccccagtaagactttcttggaagaaatgtattagcaatttctcatcttttgtgtatgcccccatct

SEQ ID NO: 95767 - DNA, 249 bp, Glycine max
tcaccaccaattgtttgccttagataagaagcttaaagaagaatcttcaatggaggaagagaatgagagagagggggggcatgggaattgaaggagattagggatagaagttgaactttgaagtgtgtctcacaagtttctaattcatcaaagttatgaaaagtgttacacatgtttctatttatagcctagcacatgggaatctttctcgagaagcaaggaaggtagcatccttgggaggctagagga

SEQ ID NO: 95768 - DNA, 358 bp, Glycine max
agcttagctacacacacccatcttataaactaagctcacctctttgacaaaatacatgaaaatacaaaaaaaaaatccctactacaaagactactcaaaatgccctgaaatacaaggctaaaaccctatactactagaatggccaaaatacaaggcccaaaagaaggaaaaacctattctaatatttacaaagaagagtggatccaaccttgactcatgggctcaaaaatctaccttaaggttcatgagaaccctagggccttctttagtagctctagcccaagcctcttggagtcttctatccaatatccttgggggtaggattgcatcacctttggttgaatcggacaagtctttg

SEQ ID NO: 95769 - DNA, 248 bp, Glycine max
tgagatgaggatttttataagggtgaaacttccttcttttattcgttgaccacagagtggtacctggagatatgtcgcgggggtcaggagaccttgggaaggtcaggtggggtgctattgcccaaaaccaagcttgaccaatcccgacccaacccgggcatagtcggtcagtgagaacctgtgatgtacctaaacaggcgagctcctggcagtcaacagataaaaggaacaaagaccacaaagcaagg

SEQ ID NO: 95770 - DNA, 355 bp, Glycine max
  unsure (1)..(355): unsure at all n locations
agcttgggcttaacgtatatttttcaattatatttnataaaaataattgcaactccaataaaaacaatttaactatatattattattaacgtaatttctatttctactactcttaaaaacaatttaactatatattgttataaatcatgtggatacattttgtcacaatctaaacacgtcagtcgcatcaatttttccttttcccatataactccagaatttcaaccgttagtcaacttgaatctcctattatagaggcattttcattcatacaccccaaattgttggaaaaataaaataaacaataagcaagaaaaacacacacgtgcttttctcctaataatcacctcaagcg

SEQ ID NO: 95771 - DNA, 249 bp, Glycine max
ttttgaagtcattttatatttcgttctgaaggtgctatatactattgttacctgtaggaaaagcctccttttacaatgttagcagctgccaaatccaagtcagcatcttcaagaacaatgcaggcatcttttccacccaattccatttgaagaggaaccatgccggccttctttgatattgctattccagtgtccccaccagtgaaactgaagattaaggtaaattaggtggaaaaatttccagatgta

SEQ ID NO: 95772 - DNA, 341 bp, Glycine max
agctttggagttttcattttgcctttcggcctcatctttagtccagtcttattctggcttcaattcttcagtgggctctccttctgtgtccagcatcttgggatgttcccaacctttgatgacagctttccaggttctgctatccagtgatttgaggaaggccaccattcttgctttccaatattcatagttgcttccatcaagaattggcggtctgttcactggtcctccttctttctccatgtgcatcaaaatttatcttcctagatctcactcagtgatttcgagtgcctgctctgataccaattgaaattctgataccaggggacagatgtcttacc

SEQ ID NO: 95773 - DNA, 235 bp, Glycine max
tatacaaattttctttaggcgtgggaaagcccgttaaggaaagataaagaacttaggggcatccgtaatggcatcatcggaggttatcatgaatggctgaaagttcgtacaccagggttagattggctctccaaattgaatgttatcaacgaggagaacttctaagctccggaagaggatgaaaaaatatgagctctaaaaatagaactaggaaaaaccagacttgcaaaaaaaa

SEQ ID NO: 95774 - DNA, 355 bp, Glycine max
agcttggatactttattttatgtttgataactttgctcttaggcaaatacttgtatttattattaactaattattataaccattaaattttaagaaaataaataataaaaataaaaaataacttgggccattctatatatatatataccaattttagactaaattattttggcaataaatcattctaaattggcttttaataataaacaataagcataccttctacgtttcatttaatcaaggggacaaaagtccaagtgaaaccttcctttcataacagggatttatttttaaaaataatatttaaattaaaaattatatttggagcattccatgattccaaaattgaattaat

SEQ ID NO: 95775 - DNA, 247 bp, Glycine max
tgcctaattaattttgaaattgagagaaaatgattattaaacacacaaaatgaaaatactaagtatttattacctatacttaacagaaaatacttataacactacaaaataaccataaattgggagagtttgatacaatttatacaagttttatacacaaaagttagtcgttttcaccgactaacaactcccccaaatttacagttttgcttgtcctcaagcaaaaagagaacaactcacttatcct

SEQ ID NO: 95776 - DNA, 369 bp, Glycine max
agcttcaagatgaatcaagattgtttcttatatgttttgatgataacaaaggtgatgacaaaaagctcaaaggtcaattcatgataatcaaagaatgagttcaagatgttcaagattgaatcaagaacacttcaaggttcaagaggaaatttgatttcaagaatcaagaatcaagattcaaggttcaagcacatggatttttttcaaaaactgagtagcacatggattttttctcaaaacatgtttaccaaagagtttttactctttggtaatcgattaccagtagcaaaatgtttttcaaaaagttttcaaatgaatttacaatgttccaattgatttcaaaaagctgtaatcgataacaatgttttg

SEQ ID NO: 95777 - DNA, 248 bp, Glycine max
tgacccttacgagttctttttagttaaaggcagagccaacttggaaaaaccttctatgaatctccagtaatatcctgctaagcccagaaaactcttaatctcaaaaacagacttaggactctcccacttaagaatagcttctatcttagagggatccacagctatacccccttgagatatcacatgccctaggaaactgactttctctaaccagaactcacacttggacaacttagcatagagttgtc

SEQ ID NO: 95778 - DNA, 361 bp, Glycine max
  unsure (1)..(361): unsure at all n locations
agctttggagtttccaagngcctattctttctcttctttagtccagtcttcttctggcttcaattcatcagtgggctttccttctgtgtccagcatcttgggatgttcccagcctttgatgacagctttccaggttctgctatccagtgatttgaggaaggccaccattcttgctttccagtattcatagttgcttccatcaagaattggtggtctgttcactggtcctccttctttctccatgttcatcagaatttatcttcccagatctcactctgtgatttcgagtgtttgctctgataccaattgaaattctgataccacgggacagatgtcgtacaggatgtcacgacatcacgct

SEQ ID NO: 95779 - DNA, 249 bp, Glycine max
tcaagaattatggttctcatcaaactacttgtttcccgagggaaattctataaatagacctcccatctttaatggagtgggttaccactactgaagaacccgcatgcaaatctttatagaggcaatagatttaaatatttgggaagtgtcataccctaattttgtccggggattattacttgatgacatgcaacctttggttagccgctttgagatacttggcgtcctttgttgcacaatgaatgaagt

SEQ ID NO: 95780 - DNA, 360 bp, Glycine max
agctttattgttttggggaaggtttatagtgatatggcgacaatctaaacccccaaatgcttttcagtgacgcattgacatataaattcgtctatcagaaattcattttgccggggccatgaacccattttcaaactgactcgactgttttggcacccacttctccttaaactcaagctctaacaaattaagttcgtttcagtcaatacctccctcaagccgggttccttcacattttaactcttctttaatgccgaggtctttaactgtcctttgtcagcaacagaaataaatttcactcccaatacaatcccaagcaaaatttactgggagctactaacaaaagtcacccccacgata

SEQ ID NO: 95781 - DNA, 249 bp, Glycine max
tgtaggattatggttgattttcatcacatgtggtactaggtggcgcgtcggactatggtacacaacaagtttttccacatccacaatgcgcgcataaacccaccatcccctggagcccacctccaactgagataacgtactcccacgtatcccatattctagtttgtctcaaaaccgggtccccatcaatcctcccaagctttcccaacatcaaagcaatacaacattcaaacaggacaaactatcaca

SEQ ID NO: 95782 - DNA, 336 bp, Glycine max
agctttaataatgtatgtattttttacttctttcataatgtattaatttttaattgcgacataaactttgaggttcacaaatcgactatgctctatttaatgtccaccattcaacacttatgttgtttaacattcacttattcttttgttcattcggttatgcccttgaaatcacacgggcgcctatagagaaataattatgttgcttccaacctcaacaagagtacatgatacaaataaccaaaatgcttctcaacacactgaaaaatgctaacactctcttcgccttaaatttaaaggagtaatcatccatacatatatggattccaatcacaa

SEQ ID NO: 95783 - DNA, 250 bp, Glycine max
tgagaataatcaattttatataatttattttctcatcgatccctagctattctattagactactacaaaattcctgtacgtaatgcataaaaaacagtttttataagagaaatttatgtagttaaatatataataagagtacatggagactccaacccatataaattaatggaaatcacaataaagttatccataattaagagcagtcttctaattaaggatataattaacatcaaaacacattaaataa

SEQ ID NO: 95784 - DNA, 364 bp, Glycine max
agcttattaaaccaatacttacttctattatattaaagatagagttagaaaaaaaaaataaggataaggacacgtggggcatatgcaacaggatgagtacacgtgcaacacatgccactcaggcatgattataaaatctaagcaacaaaggcccacgggcactatttttccgagttctgtctcccaagcaataagaccaccattttcacttcacactacttttaaacaagtaaattatcttttagcaagaaaacaaagacactaatatgaagagtttttttttcttgataactttttagttcctaataaataaaagattttctactttagttttttaaaaaagttcttagattttaatctttta

SEQ ID NO: 95785 - DNA, 249 bp, Glycine max
tgatggcactgtttttttccacaaagctacattggtagctaagggttacacacagcaagctggtattgatttctcggatactttttctccagttgctaaacttacttcagttagagtccttttggctgttgcagctgctaaaaactggccaatcttacagcttgatgtggataatgccttcttgaatggtgatctatttgaggaagtgtatatggaactttcaaaagggtacacttcagttgataaaaa

SEQ ID NO: 95786 - DNA, 363 bp, Glycine max
agcttggaacaaatattttttatttttggtccccttagagattttgtaaaaatgtctgctagttgatcattacaactaacgaattcagtaataacttccttagaaaggactttctcccaaacaaaatgacaatctatctcaatatgtttagttctctcatggaatactggattagaagctaatgtagggctgcctgattatcacaacatagcttcatttgttgaatatttccaaacttcaattcttgaagaaggtgtttaatccaaatcagctcacatgtggctacagccatagctctatattcagcctctgaactagaccttgcaacaacattttgcttcttactcttccatgagacaagat

SEQ ID NO: 95787 - DNA, 248 bp, Glycine max
tttatgtgaattgttgtgactcttcacttttgaatttgaatttcaacgttcaaaggcactggtaatcgattacaactttttgaaattaattggaacgttgtaaattcaatttgaaaactttttcaaaacaattttgctactggtaatcgattacaacaatctggtaatcgattaccagagagtaaaaactctttgggaaacatgttttgagaaaaatcatgtgctactcaatttttgtgaaaaacatt

SEQ ID NO: 95788 - DNA, 358 bp, Glycine max
agcttatcctcatctgattcttgtttgcttaaaagaacgacatgggggattttcatgatgtttaacataatagagctcattttatattcgaacgaaaaaagcttaaagacgaaaaattagttaagaaaaccacagatttcttatattatagatggaagatgtgtctctcggattaagacatctattttaactagggtgagcactactttaacaggcctgggggctaatcactccagcgctggataaaactagttacgtgcacctacttgctccccaagggtagcggggagcaaattactcatattataaaacatataacttgtatcggttaccacaggcgtggggataaaccccattt

SEQ ID NO: 95789 - DNA, 209 bp, Glycine max
cgagatgaggttgttttgaagggcgaaacttccggcggatattgtagaccacggagtggcacctgtaaagaaggaacagggggcaagagaccaaggggacggcaagtggggtgcaagggcccaaaaccaaacttgaccaaaccggacccaccccaggcatacccgggaatagaaaacgtgggaaggaccccatcgggcgaacgcctggc

SEQ ID NO: 95790 - DNA, 355 bp, Glycine max
agcttatgggaaaattcttgacttatccatggtagaagtctccacagaggccagtgccttcctcgcccagtattatgatcagccgatgaggtgcttcacctttggggacttgcagctatcacctatgtgtcataccctaatttcgtccgtggattattacttgatgacatgcaacctttggttagccgctttgagatacttggcgtcctttgttgcacaatccgtgaaattccgtaatgtggcggaaatcgaaaagaggtgtttttgcgcaatccatgagtttccgtaactttttcgaaagctaaaaaagagtaaatacataatccataaggattcgtaaccttgcgggaggaaa

SEQ ID NO: 95791 - DNA, 254 bp, Glycine max
ctgctttcattgatgtttttaatagggacccgctccacccgtggccctcgcccttgtaaataagctaaggttttctcttccctttctgtcacaaccttcccttcggtgggagggcaaaaaggccaagagagatggacccatgtagttctttaagtctgaaattttgtgtgttacattgattttatctttttcgaaagattgattttaattgcaaaaaaagtagtttaaggggctggaccttaaaatgatgtttt

SEQ ID NO: 95792 - DNA, 366 bp, Glycine max
gcagcatgcaagctgtggcataccacgctcactgagatgacccaccacaaacgccacaatctggtagcataaataccagacccaacaaaagcaatagcaccctacaacggcgcccccatgaagatgactgcaaaaagcgactactgatgtactatcaaaaacacgggatccgcgtctccaccaactatggcaacaaaaccattgctctatatcaaaagagaccaaacgccgccccaagtcatggataaggcagacgtcaacacataacgttgcaaaaccaccatccataacaaattgaaccagccccatacccgtaagaccactaccaaaagtacccgactatgggaggaacattcacaaatcaag

SEQ ID NO: 95793 - DNA, 244 bp, Glycine max
gggtggcatgcctttatttaccaaaggggcaaccatacccatatactcccaaatatgggagaactcggaaaacaagaaaagagatataatttaaaaagcaccttgagtaccctggcatctggggaatattaagagaaccgacaaaaataaattctcaatgccattatctttgtataacatgaaaagacacactaagctaatatcacgtatgtaacaaggcctttacctgcagcatatatattag

SEQ ID NO: 95794 - DNA, 362 bp, Glycine max
agctttaactagcacttcaaaggtcatatatggcgagcacactcacaaaatgattgaaccattgcctttcttgaagcccatcaacgtccaagaagcctctttccgcaagcatcagtctatcattcaatgctcgcattttcatatctatagaacgatctgaagtttcttgcaatctcagtttctgcatttcataacaaagacaagtacatgaaaacatagcaagtaatagtaactgtggtaaacttaaattataaataatactaatactcgaaaacccattacagttttgattttacctttgattcatcattagcttgtttggcaacagaagcaaattcttgaatcgaagtattaagtggatg

SEQ ID NO: 95795 - DNA, 248 bp, Glycine max
ttctagatgtgattcattagtatatgctgataaaaattggccatcaagtgcaaggaacctagcactctgttgtgcaagcttggaggatcaatatacacgaacatcttccttgtatttaagcaaataatttttttattaaagatctttgaatgttgtaaaaaattatgactatgagtgtaagtttttggtacatgtcaattcattaatctttgagttagaaatttattgatttccaccctttgcaaact

SEQ ID NO: 95796 - DNA, 349 bp, Glycine max
agcttgtctcagcgtttatgcgatacagagaccaacatgttagctatcatcgccaagtacgaagaagagttaggtctagccacggcccacgagcatagaatcgcggatgagtatgctcaagtatatgcggaaaaagaggctagaggaagggtgatcgactctttacaccaagaggcaaccatgtggatggatcggtttgctcttaccttgaatgggagtcaagaacttccccgattgttagcaaaggccaaggcgatggcagacacctactccacccccgaagagattcatgggcttctcggctattgtcagcatatgatagacttaatggcccacataattagaaatc

SEQ ID NO: 95797 - DNA, 247 bp, Glycine max
tggaaaggatgtttttatggaggaaaaaaaagagagagagaaagagagaggggggaagcatgaaattgaaggaagaaaaagggagagaagttgaattgtgagttgtgtctcacaagactctcattcatcaaagttacaacaagtgttacacatgcttctatttatagactaggtagcttccttgagaagctttcttgagaaaacttccttgagaaacttctttgagagaacttccttgagaagctag

SEQ ID NO: 95798 - DNA, 347 bp, Glycine max
agcttatgcgcatactccacgatcgttcacttgcacaagacattcttataactaagaaaaatgcacccatatacaatcaaggcaccttcgttacctaaattatttacatgtacttccaaggtgtatttgttacctatatcacacacatttcctttgctaaattcacatacatgcatactctaagcacttttgctatcaaaaattgcatacgtgcacatcctggtatttctaatacctatacatacacaaacttcatgatgaatcttgactatctacacaataaggtgctacatttcatgctttttctttttcaagtgtttttactacctaaagccggatgcaaattc

SEQ ID NO: 95799 - DNA, 242 bp, Glycine max
ttgcaatcttttttagactcttttaacaacgatagactaatacttaactttcttattgatctttgttttcttggtcttgatttggacttaaaatacaacttgtgtttcttttgtcttggcatcatcaagaccatcatacacatacattcacaaacatcgctatattgtcgtaacaacccattgtcttttgaaccatggatccctcccactcaagttttggtgctatgcattgtaaatcgcaa

SEQ ID NO: 95800 - DNA, 357 bp, Glycine max
agcttatgcatataaatatatttctcttatcaatcatgctcttgtgttctatgttgtagcctaaattactaaacctcgatccctcgtcagactgaatcaatccaagcttcgtcctcagatctctcttgttggactaggcccaattgagacagccctcttaggtttagactaacttaaactgagttttgtccgcagatccctcttgtaagactagactcagctcaagcagcttacgaaagtttagcctaatttagcctaagcttcatccgcagatccctcttataagactaagcctagactaaacaacattattgtaacaacataattaaaaccaaaacttaatccgcagatccctct

SEQ ID NO: 95801 - DNA, 251 bp, Glycine max
tttctttctcaatttatttgtctactgtctaacaattctaattgcaagttcacattcttgttctttctttgtctaacatacacacttgctcaaactcatgataaaaaacacaaactccatcacaatcatgcactcaattcaaaatgaaagcatacaaccattttcataaaaagataaaagtgttttactgccatgtcataaaaacaagtcaaactgttcaaaatgtttcaggatatgcatactaactaccc

SEQ ID NO: 95802 - DNA, 362 bp, Glycine max
agcttttgaaatcaaactttacttttggtaatcgattacaggaaactggtaatcgattaccagagagtaaatactctggtaacttagaaaaatttggaaaaacttttcttgtaaaacaaaattgtgctatgtttggtttttgaaaaatctttttcaatacttcccttgcgaagtcttgacttgttgctttttggtttcttctcttgaatcttgattcttcttgatgtcttttctttaatcttgatcttgaacttgttgactcaatcatgacattattcttttggactttttgtcatcatcaaaactacttgaattatacttgatttatcatcatgaagcttgtttctacaatgactactata

SEQ ID NO: 95803 - DNA, 249 bp, Glycine max
tatagaaatcaaactttataataaattatcctcacattataatagaagcatatgtgcataaataacaaataagtcatcaaaacataaatcatttgtctaagtcacttgcatctagaagtcctaattatcttctaatggtgtagaaagaatctttggttagtggttttgtgaagatgtctgcaagttggtttttcgtatctgcaaattttaaaacacagttacctttttcctaagactaagtgctaattg

SEQ ID NO: 95804 - DNA, 363 bp, Glycine max
agcttggagtcttacggatagcttatgagattttttgtagtctcaaccggaagacgcctatatcttcggggaaggtgcacatgacgacgttagccactgcatgctattgggatttgagtcttacggatagtaaatgagagttttttgcagtctcggccggaagacgttgacatctctataaaaggtacagatgacgaagttagtcgctgatgctactagacttgaagtctgacggatcgcaaatgagacatttttgtagtctcggctggtagatgctgacatctccgggaaaggtgcacgtgacgacattagtcactgcatgctatcaggctttcagtctgaccgaacgcaaatgaaactttt

SEQ ID NO: 95805 - DNA, 249 bp, Glycine max
ttgaacaatatacttgtccttcatttaactgtctttgggtttggcggccatgctcaacaaagtactttcgacacctactgtacattgatttgatcaatgctgttatgggaatgttgcgacaattcttcaaaaccttattgatacattctaagaggttggttgtcatgtgaccatattgacgtccttctctatcataagtcatcgtccatttttcctttgaaatgcgatcaatccatgttgctatggctg

SEQ ID NO: 95806 - DNA, 361 bp, Glycine max
agcttgtcgtttgtaaaataaaatatatttatgatcgtatcgtttgtagatgagattaaagaaaatatgaaaccgaatcaaagtttggttaaatgtaaccattaaaaagggttatttatccactatgcaggttattcaagtcaatcataaattttttagaatttaagaggaaagaatatatttctttcaacagtagcactacttaaccaaatcccaactattactacatattcaattttgtcagctgaaaagatgaacccaattttgtcagctgaaaacaaattatacattcagatggagttaacaagttttgtatttttatgaaaataaaagattggtctattggcttgttgacgggtga

SEQ ID NO: 95807 - DNA, 249 bp, Glycine max
tttgcctgaaaattatttgtgttcaagagatcaaggctctgataatcgattaccaggcagtgtaatcgattcccagaagacagattacttcaagatcaaggctctggtaatcgattaccaggctgtgtaatcgattcccaaaagacagattaattcaagattaagcttttgcctcaaaacaaagtgtgttcaatagatcaaggctctggtaatccattatcagaagacgattttgaaaaatcatctttt

SEQ ID NO: 95808 - DNA, 302 bp, Glycine max
aggaaggcgcactcctcgcaccaaaatacgcatgacacacgaagcaacaccaaggcggaaaaccaccaagaacggaccaactagaacctcaaagatacaccctacacagaagacccacaagcaaacattaatggaagtttataagaaaacaaccaccaattcaaacaaagggatctaaaaccaaaacgccaaatagaaaactgaacgagagatgtacagaccaaaaaccaaaagatacaatacgttctaataccaaacatgcgggcgcacactaccatacagagagagggcaacacgcgaca

SEQ ID NO: 95809 - DNA, 249 bp, Glycine max
tatcattcaagaattttttgatcttttgtgttcttcccattccacccaaagattatgtttacacattttgagatctttataatctttgtgttattgtgcacattctctccatagatcatatcttttttccttttgataatcatgacgttcattcagctccttcaaattattttgaagatcttttagttttttttcaaactcctgagagttcttgagaagagtagctttttctctagcatttgtctcaat

SEQ ID NO: 95810 - DNA, 296 bp, Glycine max
agcttgacagtattacatatctttatatacgttgccaagagtgagtatggatctttcatttggtaaaccatgaaacaaattgctccgtattagctgtatcaatgaaggtgggtaagttaagttttgttcctgaacctctggcagcacaacacttgagaaatattacggcactaaaagacttgagtaatcttccaaggtcactcgacgagggtgctcttcagccatgacttcggcttcaaaatccgctgtttgagatttcctggatggacgtgaattataaaaagatgacttccaaa

SEQ ID NO: 95811 - DNA, 249 bp, Glycine max
ttagtcaaacatatttatccaaaaatatcaaagaattgggtgttgaaaaagcataacaagactttctgtgattggtttaaagatacaatctttgcagatgagaatgcttcaaaaacattaagaaagctagcagatgggcctaaaagaaatgttataacctggcaaggatacgacataaacaggtattcattttacacaaaagcacaagatgacaaaagtacaatgcaaaacagtggggtcaccctaagg

SEQ ID NO: 95812 - DNA, 353 bp, Glycine max
agcttgaaattgaacaactgttgttctctataaatacgaattttcataacttttcacacggatgtccgattccgggacataactgatctagacgctcgaaattgaacaacagaagctctcgacaaatacgaatggtcataacttttcacacggatgtccggttctgggacataacacatctagacgctcgaaatgaaccacgaaagctcttgagaaattcgaatggtcataacttattacacgaatatccgatttgggaaaataatatatcgagatgctaaaaaattaacaaccgaagctctacagagattccaatggtcataactttttacacacatgtccgattcggggat

SEQ ID NO: 95813 - DNA, 236 bp, Glycine max
tgccgccacggtgttttccgactatgctcttgtgtggtggaagtgattatgcaagttgaagtggacgtttccattgggaaatacaatgataaggtactttgtgatgttgttcctatggaggccagtcacttacttttggggagaccatggcaatttgataaaagagccaatcatgacggttacaccaactagatctctttcattacttttggtggtgcataaaaaatgtacaatgt

SEQ ID NO: 95814 - DNA, 265 bp, Glycine max
tatgccaacaccaaaagagatagctgaataccagcacagatgggaggcaaattaaaaatggcgtcatccatgaagctgcacaaatctctggaaaagacccttcaaaccaagcacaaacaaataaggagagagaggatccctttgtctaagaacccgctgaccaattgaagggggcataaaaggagacaatgagcgacacacctaaatgaagtggaagaaacacattccatgaaccaagtacagaactgggcgatgaagccaaagg

SEQ ID NO: 95815 - DNA, 360 bp, Glycine max
agcttgtcaaaaagggaagcatgtttataactcttttcaaagtaaaaacgttgtttctacttcaaaaccctttgaactacttcacatagacttatttggtgcctctagaactatgagtttgggtggtaattactatggcttagttatagtagatgattactcaagattcacatggactttgtttttgaaaaccaaagatgaagcttttgatggtttttgcaaacttgccaaggtcattcaaaatgaaaaaaggtcttaacattgtttcacttagaagttatcatggaggtgaatttcaaaatgagtctcttgaaatgttttgtgaagaaaatggaattcaccacaacttttctaccctaa

SEQ ID NO: 95816 - DNA, 242 bp, Glycine max
tgagatgaggattttttgaagggtgaaacttcctgcttttattgttgaccacagagtggtacctggagatatgtcgcgggggtcaggagaccttggggacgtcaggtggggtgctattgcccaaaaccaagcttgaccaatcccgacccaacccgggcatagtcggtcagtgagaacctgtgatgtacctaagcaggcgagctcctggcagtcaacagataaaaggaacaaagaccacaaag

SEQ ID NO: 95817 - DNA, 357 bp, Glycine max
agcttttagaaaatgttgatgcctaatgtatactatttttcttccatgtttcagttgtacgtagcttatgtcttcttcacaaatagggatgcatgatgacccttaacactgtatccactcaaattcccatatgctggaaagtcattaatgatacaaaatagcattgcatgcaacttgaatgtctcatttcgatacccatcaaacacagcaaccctctcatcccacaactttgtcaagtcttcaatcaagggactaagataaacatcgatgtcattttctagttatcttgagaccgatttcattcatagacaacatcatatatttttatttcatgcatacaaccaaggagtcaagttg

SEQ ID NO: 95818 - DNA, 247 bp, Glycine max
ttggctcttttttttcgcatggggggaaccagacggagaaaacgaggcatccattcactaccggtagcaaggaaaaaataaggaccgttagattttcttttcgctaatcggacggttcacgttgattacattgaaaaaagtgaaacttttgcacggtgcgaaagttgtttaactttcgcaccctagacatcgtctagtttgggggtgtaaagagaaaaataacttcctataggctgttataacaaac

SEQ ID NO: 95819 - DNA, 347 bp, Glycine max
agctttgcctttatggcttatacttcatcactttcttccgaagctttaacctcattgtctctcacagtctttagatttgggagccaatccaatccttgtgtccggactctcagccacttacgatagccgccgatgatcccattactgcttcccctaagctctttgtcctttcttcacgccgcatcccatgccttgcgaactccttggagtaccctcgcgttgtggtcactgaaaccccgtgcgatgaaaggtgtgatgctttcgtctgatggcactcctctcatggggtagccaagctgtcttatggcgaggacgggattataattaatacaaccccttgttcccat

SEQ ID NO: 95820 - DNA, 357 bp, Glycine max
  unsure (1)..(357): unsure at all n locations
agcttcatgatgatgaatcaagtatgaatcaagnagttttgatgatgacaaaaagccccaaagaatgtttcaagattgagtcaacaagttcaagatcaagataagatcaagattaatttcaagattcaagaaacgacatctagttgaatcaagattcaagagaagatgatttcacaagggaagtattgaaaaggatttttcaaaaaccaaacatagcacagttttgttttacaaaaaagttttctcaaaattttctaagttaccagagtatttactctctagtaatcgattaccagtttcctgtaatcgattaccaatgggtaattttgatttcaaaagattttaactgaatttgca

SEQ ID NO: 95821 - DNA, 248 bp, Glycine max
tataggcactttttttaataaggtaggtatagaaatcattgttggttcttgtaggttgcctatatttcaaaggaaacacatttttaaagaattcaacattcttagtctctactattatgtcgacatcaagcacattactttttaacactaggaacatataggcaacactatattttgcataaccggtaaacaagtaattagaagtcttaaagcctattattgttttcttagggacggttagcattact

SEQ ID NO: 95822 - DNA, 385 bp, Glycine max
agcttatcccgacaagagtgcaattactttttgtgtagtctagcattggagttatgaggagggctcgaaccagtgttaaccacgaaatagatctattttcgccgctggccatcttattagaccacaatggcttgtagcgctttgggagggtacgtctcattactattttctcgacggttcttctgggtatttacaaattcatattgctcctgacgatcaagaaaagaccgacttcacttgtccctctggcacttttgtctataagaggatgccctttggccaatgcaacgcccctggtaccttccaccggtgtatgcataacattttcaatgattttttagagagatggtacaggtgtttatggatgatttttctgtttatgaat

SEQ ID NO: 95823 - DNA, 250 bp, Glycine max
tcttgagcgatcatttttcccttctgaagcatgcctcgcatgctaatttactccaaataacttcctagcttttatttattataatgaggttttgccgggtgtatgatgccacaaatttgactggaggctcatttgatgaagctcgaatgcttcaaaatgtagaagcatgtgaatggttgaccagtgccttgcatggtcttggttttgcctaatctacatcctagttatgcaaacatgatagctttatgtt

SEQ ID NO: 95824 - DNA, 362 bp, Glycine max
agcttgcttccacttatttatattttatcactttcttcactctaaatgttcttatgttgagtgtatactgagtacatgttagattttagttctcaacgcaacatttttttctttataatttagaatgcacaatagtacacttttctaacttattaattcttaattttattttgtttttgttaggcttcctttgatcaatatattagaggataagggaagagtaatccgatctatatttccagaaaaatcaacaagccagcagctaaatgaggtacgtctactttgcagatattgatttttttggttttttcttttttgagaatgaatgccattttttatttttctcgttcaaattttaacta

SEQ ID NO: 95825 - DNA, 250 bp, Glycine max
tcttcatcataattttttatctgcagcatggccttttcccagttagggatagttgttgcttgacctgccatccacatcaactctttcatgtgtgctcccggatacttattcttccagttaccatacaaatgtttgacacacaggagatgttctacgttttcaccaagctctttgattaccttaaccaaaccctgcaaaaaacagtggacgaattaaatgaaagccacagtttataatagttctaattaaa

SEQ ID NO: 95826 - DNA, 357 bp, Glycine max
agcttatagtatgtgtttgacattgatatatgctttaaataattaaagattagatgatgatggtaaaaatataactaattgaagaaaattactattatcttaaatcctaattaaattttgaaaataaaaaatgaataaaattaaaatattctaaaaacccacaacatttaaaaaataggagactaaaaaataatagtatataatatgatgatttgcgattttaattcttcatgaaaaatgaacaaattttaacgtttaacatgtcacaaacaaaaatactttccatataccatacagttgagaaactaaataaaaatagtttcctaaaatataagaacaaatttctattctggtgta

SEQ ID NO: 95827 - DNA, 249 bp, Glycine max
tttcaaaaaattattttgtaattttcaatttcatttgaatatttagataaggaaagaataaatgacagtattattaagaaaaatcattttttgtttttgaaatgacatttaaaatgaactaataatttaaaagaaaattattatttttagccttaactatgttgttattcctaataaatatttactttttgtgtttccttttaacaaatttttatttttttagtccataacaaaataattttgtttttg

SEQ ID NO: 95828 - DNA, 352 bp, Glycine max
agcttctcgatatattatgcccctgaatctgacttccatttgaaaagttatgaccatttgaatttctcgagagcttccgttgttcaatttctagcgcttcgatatattatgcgcctgaatcggacttccgtgtgataacttctgaccatttgaatttttcaacagcttctgtagttcagtttcaagcttctcgatatatatgcaccttaatcggacttccgtttgaaaagttatgaccatttgaaattctcgagagcgtccgttgttcaatttcgagcgtctccatatattatgcgcctgaatcggactttcgtgtgaaagttatgaccctttgaatttctcggagccttcg

SEQ ID NO: 95829 - DNA, 249 bp, Glycine max
tctccatatattattctcctgaatcggacttccgtttgaaaagttatgaccatttgaatttctcgagagcattcgttgttcaatttcgagggtgtcgatgtattatgcgcctgaaccggacttccgtgtaacaagttatgaccatatgaatttctcaagagctttcgttgttcaatttcaagcgtctagatatagtttgcgcctgaatcggacttccgtgtgacaatttatgactatttgaatttctcg

SEQ ID NO: 95830 - DNA, 355 bp, Glycine max
agcttccatcattgcgctaagcctggaaagcgacagacgactcttttagcaagctgataatgctctaagcgtgtgcttgcgtagcagatgtctttcgagattcccctttactcgctaagcgcgctggtgctgggcttagccgttaatgcgcgctaagcgcattgagctcgcttagcacgatgactcctttggcacttcttcaaaataaatcctttttgcctgaaattaaagaaaatttaacattaattccatgtaaagaggcttctactgagcagagattgaaacaaagcaattttatttacaatcctaccaaaaagaaccataaattgggagatttatatacattttggaaaac

SEQ ID NO: 95831 - DNA, 245 bp, Glycine max
tctatatattctgtaccattttatgaataaagacaagttgagttttattcagaaaattagagtttatctcttttatcttagtgagagtgattctcctaaattcttgagtgactcaagaacaccctggctgtatcaaaggacttttactacctttgtgtgttgacctccccggaaagagtgattttttccttcctttcatcttcaactttgttctttcaaaccacaatttcagaaaatccacttct

SEQ ID NO: 95832 - DNA, 357 bp, Glycine max
agcttctttgagaaaactttcttgagaagctagagcttagctacacacacccctctcataactaagctcacctccttgagaagcttccttaagaagattcctaaagaagctagagcttagctacacatacctctctaatagctaagctcacctccttgagatgagaagctagagcttagctacacaccccctataatagctaagctcaccccatgacaaaaaacatgaaaatacaaaaaaaaagtccttactacaaagactactcaaaatgccccgaaatacaaggctaaaaccctatactactagaatggccaaaatacaaggcccagacgaaggaaaaaccttttctaatattta

SEQ ID NO: 95833 - DNA, 248 bp, Glycine max
tgtgcgaatctttttactcccgcatcttatctctagcatgcattctttctttctttacccactcctcacgtttggttttttagggaaaaacaccataactaaacgcgccacaaggcatccctatcgcaccagatccaaatctagaacgatgggtgatcaagaggagacacaggaacagatgaaagccgacatgtcggctttgaaagaacagatggcttccatgatggaggccatgttaggaatgaggc

SEQ ID NO: 95834 - DNA, 352 bp, Glycine max
agcttatgctgcaaatatttatctttttatttcctcaacctcaacagcaaaatcaaccacagcagaacaattatgacctttccagcaatagatacaaccctggatggaggaatcaccctaacctcagatggtccagccctcagcaacaacagcagtctgctcctttcttccaaaatgctgctggcccaagcagaccatacattccttcaccaatccaacaacagcaacaaccccagaaacagccaacagttgaggcccctccacaaccttccctcgaagaacttgtgaggcaaatgactatgcaaaacatgcagtttcaacaagagaccagagcctccattcagagcttaac

SEQ ID NO: 95835 - DNA, 356 bp, Glycine max
agcttagagattaacatttatctatcatgaccaagcttcttgagccgtaccctatgatgctctctgatcgacagcaagaatgacacttttttattggatagatcaccaagactaatcttataaagaattcctcgtctcttcatagaaaagagggaaaaaccatccttgtgtacgacgatacacatattcttctaacggggacaatatatccactgtgacataaatgacttatgcctaatagattgtgctttaacccctttacacataaaacattatccatataagcatagggaggaaaacagaccttacctgcgcgagatatcacacccttttaattccttctaaaagtgaccacc

SEQ ID NO: 95836 - DNA, 357 bp, Glycine max
  unsure (1)..(357): unsure at all n locations
agcttcattaagaggcttcctctttaagtcttattaagaggcttctagcacactacagacatattctctaagatctcaacggtcagatcatggacaagtgtcctgttaagttgcaaaccaaatttcgagaagatccaacggttaacgaagactgggaagcatttttaccaaggcagcttcatgtagctttctctagaagcttcattaagaggcttcctccagaaacttcctcgtggcttttttgagaagctttctcaagaggcttanttgagaagctagatcattatctatccacacccctctattaactaaatttactttctaaaaataattacggatgaaaaaacgcaataaaga

SEQ ID NO: 95837 - DNA, 246 bp, Glycine max
tcttcgaagggtttttttattttcagttttctgaaaatatctaaaaatctcgccagatgaccatctttttttttcttggaaggtaccacaggatatggtacttccacaccttcatccacagctttgtcactcctactcttctttgcatacgaattattatatgtcttctttttcatttttacgattttctacttctttttctttttcttggccctttaaatttttattcttgaccattatttggtc

SEQ ID NO: 95838 - DNA, 346 bp, Glycine max
agctggagcattttaattcactttcgcatctaatctctagcatgcattctttctttatttacccactcctcacggttggctcattagggaaaaacacaataactaaacgcggccacaacgcatccctatcgcaccagatccaaatctacaacgatgggtgatcaagaggagacccatgaacaaatgaaagccgacatgtccgctatgaaagaacagattgcttccatgatggaggccatgctaagaatgaggcagctcatggagataaatgtggccaccgttgccgctgtcagattggctgacgaaacagacccaactcttttggaactgcgcaacattctccctc

SEQ ID NO: 95839 - DNA, 185 bp, Glycine max
acaacggggggacaaggcaacccacaggaggaagactggaggcacacgaggacaagacaggacaagccccaaaggaccaggccaagaggaacacaccaacaaacgccgggcttaacagagctaacgacacggcagccccaacgaaaaggccgacggacatacagaaggcccaaacaacccgaaac

SEQ ID NO: 95840 - DNA, 350 bp, Glycine max
  unsure (1)..(350): unsure at all n locations
agcttcngaagatagtgatgagtgttcacgccctacaggcggagcttgtaagagccccggttgtcaaagagaagttcatgtacatatccctcgaagtctgaatatagtatgaagaacgttcggacgtcaatagggctcgctgatgacaccctgggatgacaaaccattaaggtccgaatggaaaaacacgaccattacaagttttgacgggctttattaggcagggatagtgagctccaactccgaaaaggtgaaatgaataatcactgggctaaggcctgatctggaccgacgagctcaacgcttgtcttatgtagaaaagaaatgtgtcccacacatttaagtgagac

SEQ ID NO: 95841 - DNA, 227 bp, Glycine max
ttgagccctttttttttctggccaaaggcaccgggccatgccgagactgacataacgtcccctagcccggcaaactgttaaagggacatccacttaatttatcgccctgctacagcctactgcagtaggccccgctcgatttcccagtccatctataaacatacgcaattgcattggaaaaaataacccatgggcctaagactaaaacgataacccctctgtaccgg

SEQ ID NO: 95842 - DNA, 356 bp, Glycine max
agcttggggaagattttatggcttatgaagctttaccccgccccccctttttaacgtctctggttcagacatgctcgcccaggcgagctaacctaaccattttttagtttttgcaaaaatttaaatatccccttgttatgcttgtatatttacttaattcctaggattgcaaataaactaggcatattcgaatataacttaagaaaatagacgagtgaataaaaagcagaaatttaaaaggtactaggctgcctcctagtagcgcttctttaacgtcttgagtcggacacaggatgatggttgattgaccatgggcctagcacctgcacgtacctgcccctatgcttttgaataaa

SEQ ID NO: 95843 - DNA, 247 bp, Glycine max
tctccccctattttttataaatagggggagaagtgaagtgaaaaagggttcagccccttaggcacttctctctctttcgaattcgcttggaaaaattgtttccatgaagaaaattcaagccgaggcgcttccgaaacgtttccgtgaggaatttcgcaaaggtttcgaccgttcttcgacgttcttcattcgttcttcgatcttcaacgggtaagtacctcgaaccaagcttttcgattcattctat

SEQ ID NO: 95844 - DNA, 256 bp, Glycine max
aaaaagagaggaaattccaattgtgagaagcaataattaagagaagaaatttccatcaaggaaaaagaatgaagcaattccaatcaagagaggaatagcaaagaaaaaagatattccaccaaaagtggaaaagtaaagaagaaaaagctctttcatgatcaaaaatcaagaatggcgaagtttttgaccgcatattgtcatacaatttactaatgacaaaaaaggaagaccacactacgggtttgcttataccaca

SEQ ID NO: 95845 - DNA, 452 bp, Glycine max
  unsure (1)..(452): unsure at all n locations
agccaacttgtcttacacttctctacaacgaggacataacatagccaggtcttaactttctatttcttcgatagaaattcgaccaatgattcccctgcaagtggcaaaattgactcctcttccttttcgaactcttccaaggcttgatcgacctcttcttcagataaaggagtgctcacttttggcattcctatcaaaagtcccatcatcatgatctgcatgggttcgataaaatgagccttgatgtggaatggatcagtatccatcttattggtttcgcttcaaatatcaatcttccttcatcaattaccttttggaccatatctctgaaacataaacaactatcagtccaatgtccaaaaatattatggaatctgcaatatctttttcctcttctttgttcaaaagtaggaattntatgatcatcactaaagacaagttgcttatctttc

SEQ ID NO: 95846 - DNA, 414 bp, Glycine max
  unsure (1)..(414): unsure at all n locations
tgtaatggcaatcgatgaccatcaacanaactcttgatattcaacttgaanagtcatgaaccttcaaaatataattgtgtaatcgattaccacaaacctgtattgattatcagtgaagaatttcaaaacaagctttttgaaaagacacatttcttcataccatttttgaaaaaggcacgaagggcctatatatatgtgtctgacttcaaaaagtaagagagagatattctaagagaacttcgttgtcaaatgctctctcaacaactcttgggcaaatacttacaaatctattgagagttcatttaggaacatcanattgtattatccactctaaaagagagaaatatttctgttcatctcagaaagtaagttgaatcaagagactagttgtctcttgaatgtgagtttcttgac

SEQ ID NO: 95847 - DNA, 455 bp, Glycine max
  unsure (1)..(455): unsure at all n locations
gcttggttcgaggtacttacccgttgaagatctaatatctatgaagaacgaatgaagaacgtggagaacggttgaaacctttgcgaaattcttcacggaaaacgttacggaaacgtttcggaagcgcctcggcttagatttttttcacggaaacgatttttccaagcaaattcgaaagagagagaagtgccaaaggggctgaacattttgaaacagctccctcctcccctanttatagaaaaaaagggaggtgcttgccgcccaaagacttaatgaagaagatttctaagcgcacccgaattactaagttcaccccccttctcgtattctacggaaaagttacggaagccttacggaactggtttcgaatttgattttcatcttttttctcttccctttcaccaatgttaagtggaatatgcttacccaanggttttggaaatattacggaagta

SEQ ID NO: 95848 - DNA, 385 bp, Glycine max
  unsure (1)..(385): unsure at all n locations
cccaccccgggcatagtcagccagtgagaacctatgacgtacctaagcaggcgagctgctaacagtcaaccaataaaggaacaaaactccacgaagcaaggaggcttgtgtggcagctgtccagctatctatcttgggttgttatctgaaaaattccctctagtaatcgattaccattcgtgtgtaatcgattacaagggataaaanatgaaacaggacgttcagtagcatctggtaatcgattaccaattgtgtgtaatcgattacacagtgttatatgctactggtaatcgattaccaatcgtgtgaaatcgattacatagtgttatatgctactggtaatcgattaccatttatgtgtaatcgattacacagtgtaactttt

SEQ ID NO: 95849 - DNA, 456 bp, Glycine max
  unsure (1)..(456): unsure at all n locations
gacataatgacttgcatttctttcttacattcaccacacattctgccttggtcgtggtcatattgagaatgcctctatcacctcctctgtcaatgattntcttcatgccgcttaagagcgcacgtccaaaacttcgatgccatattttgactccatcttctttggagaatagacatgtggaggagtaactgatttcttgatgtgtccatagagaacaggctgactctgatctgctgcccttcattatgactccactctactcatatgtcaccaagcattctgactttgtgaagtctacattgaatgcctcatcacacaactgactgatgctgatcaagttcgcagtcagccctttcaccagcagtgcttagtacagactacgaagtccatcatggactatctatccattccagcgatctatcgttagagccatctccaatgtctcttacgtagcgg

SEQ ID NO: 95850 - DNA, 384 bp, Glycine max
  unsure (1)..(384): unsure at all n locations
cataacacatgtgaatggatgattatgaattctgcgagngnacaaagccttgattgagtgtgtgattcatgggtcatgcgacgggcgattcgaataagaaactcaaatgattaagtggcgaaataacgcggattgaatcaacctgagtcatgttataaatagatgtataatggatttttgcttatgctgttatttatccgcattgtatgtagagatgtgataactcacttccggtgtgcgttcgtgtatgggctgattgtcattttgtttcacgtgagccaagatatgatgagtatcatgcttaagatggagagactatacctctgatagggatatgctctgataagtgtgacctcgagacatacgattttacttcatatgtta

SEQ ID NO: 95851 - DNA, 374 bp, Glycine max
  unsure (1)..(374): unsure at all n locations
tgatctttaagtcacctgcggcatgcaagcttgggcanaaatgctgggtgtatttctttatgtcagatgttggatcaagttgctcggaataattaagaagagggggttgaattaattattaatgtgtcttgactaattaaaaaattatccttcttaatgttactagattcaactaggcttttactactaagttaagaaagtaaagaacagacacaataacttaaccaaaagtaaaagcggaaattaaaagtacacagcggaaattaaagagtgtagggaagaagaagacacacaagatntatactggttcggcaataacccgtgcctaacattagttcacaagcaaccaactggtcttgagagttctttcaatc

SEQ ID NO: 95852 - DNA, 469 bp, Glycine max
  unsure (1)..(469): unsure at all n locations
ntgtatgcgcaggatccacctgctgtcatgtgttatganattagtcccacagatctggggtcagttcaagaacagctacgtgaacgtgatgctgatttgcaacaattgangnatgaattgctgaaggcacaacaatatatganaacacaagctgacaaaagaagaagggacatacagtttgaagttggagaattggtgttggtcaaactacaacccttatagaaaacactcaattgctttaaggaannacacagaagctgagcatgcgctatttggaccctttgaggttttggaaaaaattggaaacgtggcttataaattganactaccggatactgctaggattcatccggttttccacatttncttacttaanaaatttgtaggtagtccttcacaacaatatatacctttgcctttgacaactactgaatgtggtcctcaagtcaaccttttaagatttggatca

SEQ ID NO: 95853 - DNA, 427 bp, Glycine max
  unsure (1)..(427): unsure at all n locations
tcgaagagcatcatattaattttattgaaggtatctaaagaaatgggagagaggatatgactacagtctccaaacgcctcatctatngaggaagcgtaaaggaaagcttctgaagaggtcaccatgatggagataaaaggcgatccactgtctgaagatatgattgtggagacaatccaacaacagtcagaacaataaccacaaagatcatcaacggagaagcttacaagttcaatctacattgcaacacggtgtcgtactcctatatgaacacatcgcccaagacaagcaacaacagaagtggctacgattctgaagactcggaccttacatacaaagacgcttctgaagaagccatgcttcgcgctattatagcagcatgtctcccgatctctaagatgacactatagaaacagactcacgcgct

SEQ ID NO: 95854 - DNA, 463 bp, Glycine max
  unsure (1)..(463): unsure at all n locations
cttaaagcttaacggaatatatatatatattttgttcagatctgtgtcataagtggatgagaggtcagtaaacacatcgaaattctctaatttgtcggcattaatgtgtcattgtagcgactaaaattaaattcatatatcttaaataagatattaaatttaaatcttgcgaatgaactaattcaaagataagacttcactaacatcaatcaatcaactactccataaatattactcctcaataaaattaatatgacacactttgaaaacatgttttagaagtacttaatacaatcacatgttgagcttacgaatattctgtatttcgatcatcttgtatgaaatcacaatatattatacatcttaattaattctttaacatggctctataacggtcttgctaantaattaagaagacatctcacatagatagaatcatgctgtgtagtcctatatatataac

SEQ ID NO: 95855 - DNA, 454 bp, Glycine max
  unsure (1)..(454): unsure at all n locations
gctttaagctngagattggatagtttgcaatctccatttcgatctagaaatcatagacaggacttcataagaagaggaggaggagtatttatatgcaagaagtcatggaagaaggtgaagaggtgaaccaaaaagagataatcatatggggagcattaagatgacaatccctatgtctcaaggtaaaaatgatcttgaattgtatttggagtgggagagaaaggctgatatgtgtctgataccataattattctgaggagaaaaatgttaaatcagttgttgctgaattcaccgattatgctagtatctggagggatcaacttgtgactagtatgcgcatgaatggtgaaaggcctattactagatgggaggagatgaagactgtcatgcgaatgagatatgtacctagccactatcatacaaatttgcacaacacagttgctaattctaactc

SEQ ID NO: 95856 - DNA, 407 bp, Glycine max
  unsure (1)..(407): unsure at all n locations
tctggatgcatnggttaacttgtgtnacccatctggcctngaatcagaaatctgtacctgtcgcaagggtttgaggttagtgctcctctactgaccaccaaacagacctttgcccttccatgcagcaacctggagcaattaagcagcctgaagcttatgctgcaaatatgtacaatagacctcctcaacctcagccgcaaaatcaaccacaacaaagcaattatgacctctccagcaatagatacaaccctggatggaggaatcaccctaaccttagatggtccagccctcagcaacaacgacagcagccttgctcttccttccaaaatgctgttggcccaagcagaccatacattcctccaccaatccaacaacagcaacaacctcagagacagtcaacagttgag

SEQ ID NO: 95857 - DNA, 283 bp, Glycine max
cctttgcgacaacgtggtccatacatctcaccgacacatgtagagccttggtgtgtcctcttccctcaacgggaatctcttcttccgcaaacgcgatgtagttgatgggggttatatgattaatgatgccttccaaacccttcaccgagatatcacgtgctacatgggcatcgttaagaaccttcatcaatagcgcacgatgaggctcggaggtaatgagtagttcaagcaaagagatccttgctggagttttattcaggtgttcgactaccttatactcgct

SEQ ID NO: 95858 - DNA, 391 bp, Glycine max
  unsure (1)..(391): unsure at all n locations
atacacacatccctccacgtaatgaggtaatnctcagtaaactaataaagctaacttacaccaaaaggctatcggataactaatatgaataagaaacttaattctcaaaagtgaaccatttactcatacaattaagctggaataacaatgctacatcacacatgctaaataaccgtctcctgaaaaagaagacacacactttgaatataccttctcaccgccactcaatagtgaaacttttcggtcaagcatatcagttctaatattacaacgcccaaggagccctttaatatcatcaatcctccagtcctctgcagctacctctactgtctcaagcacagttgttttcagatcaagtgcctcagcctgtaaataaatgaagtcatcacta

SEQ ID NO: 95859 - DNA, 289 bp, Glycine max
  unsure (1)..(289): unsure at all n locations
ctaaatgcttaccactactagaggagatacctntttgntgnntcatatgaacctcttgctctaggtcaccattaagaatagccgtcttcacatccattnttttgcaattcaaggtcaaaatgagttggtacacaattcaatatatacattgtcggctttagtgctttaaccacaacgattatcgaagattgatgctgctaagtatattcctgattcattgtccaataattatgtattccttctttctgtcacactattctgagttggagaatcatgcatagggtaatat

SEQ ID NO: 95860 - DNA, 414 bp, Glycine max
tggagaacaaagagactagactgcttagatggacaacacaaccgcgagaacgagaagatatcgcataggagatgaaacatacctaggtatggtggcgaatgagaacaagcagagacttgagacgatgctcgagtgcgacgaacacgattgctctgatgcagatagagaccttcaaggtagactgagattagaagaagaagagagcgcgaagcttatatggagaataagacagcgggagcttcatatggctcaccatattttttaaatataaggccacatcggtttttaaaaaaatcgatgtaacaacatgacgttaggttaacatcgcgttactggaaaaaactgatgtaacatatcaaacgttatcatcggtgttctcagaacccgatgctgagatacttatgtaacatctgt

SEQ ID NO: 95861 - DNA, 376 bp, Glycine max
  unsure (1)..(376): unsure at all n locations
atcttttctgttgatgttgtgttttactttaagctagnggggctgaaaaaaagaatggattntgtgtggactaactgcttttctggttctgttggtattatttttttctatctttttttctccaataggtgctctatactgtgtatgcaaagatggtgtgggtgatcaagctcttcagaaagcaatagactatgcatgtggtgctggagctgactgtacccctattctccaaaatggagcctgttttcaacccaacactgtgaaggatcactgcaactatgctgttaatagctatttccagagaaagggtcaagctcaaggaagctgtgattattctggtgctgccacccctagtcaaactccacctagtaagtgt

SEQ ID NO: 95862 - DNA, 248 bp, Glycine max
gagatatatgtaagttttttatacaaaaagactggggttgtagacatctgccccaccagatctaaaataagatggctaatgacagaccttaggatcaagacgtgatcagatagatccgtaagttcaggccaaatcgatcaatccactcaatcagatcccaaaattctcaaaagctatttttttaaaaactgatacctgattctcaccttccaaatttctcctggatcatacaatatgatcatcctaca

SEQ ID NO: 95863 - DNA, 288 bp, Glycine max
gactgaaaaggatatctctcgcacctagataacacacttctcgtgaatcaagggaagcaacgtgtttaattctgataatttctaagtccatatattcgctgtttaatttacaaaagcatacgaccccccgccccctccccatcgtactgttactgttacaggaagcatattatgaacatccggttgtcactgcttgttggaaacgacctacgatcacttcctaatactacattatcatgtgtatatgattcgggtacggcctcatcaatggcaatgctaaaagtgtct

SEQ ID NO: 95864 - DNA, 339 bp, Glycine max
accgtggagatgcagcggaaggcaatggagaattggagaggggaggcaccatccactatggaataagccatggaagaaggagcgtcaccaccaagatgagccttggataataagctaggagaggatgcattaatggacgtaaagaataagggagagaatgatagaggggggagcactaaattgtaggaagaaagatggatacaagttgaactttgagttatgcttcacaagactctcattcattaaagttacatcaagtgttacacattgctctatttatagactaggtatcttccttgagaagctttcttgagataacttgcttgataagcttctttg

SEQ ID NO: 95865 - DNA, 399 bp, Glycine max
gatatgaaacctgctccttcaaccacagacaatcaattacacgtgaaaaggtaattcttcttaattcttatatacatggcccttatggtgtagaagaatcagtatttactagctactctacttttgctatatatgcctcgttctcttaacataagatcattaagctcggagaaggactcttgaatgaaccataagatgttggtgtacataaagaagggactctctatacatctactcgagatggtgggattaaaagattgctcctgagtaatggataatgggagaattggaagcatatagatagtcatactgtgctaggaatcggcacagcacaagaaagtggtctcattgtttgtgtactttcaacgtaaataaactcttgacacaacaaaagtaaac

SEQ ID NO: 95866 - DNA, 384 bp, Glycine max
gcagcagctttggtccattccgctactttctcttatatgtgggccaaaacctcatatggggactaccacggcataattgaatatagcatacggaaaaggagaaaccctgaacagtgcaaccacttgaaattgacgagaccagttcccctccccagcaagcctaatcattgcagcattttggggccatctctttaaccattgctggagaatatagaaacaacaatcacaaacaaaagtcaaaacctactcagaacaaatacaacacaaaatttgagaagagtgttgatcatataagaaataaaatgacttacatgaatgcggtcacggaacagtagcccaattaagtaaggcaggaccatcccaatggttgtctcaccattatta

SEQ ID NO: 95867 - DNA, 480 bp, Glycine max
  unsure (1)..(480): unsure at all n locations
taagcgttaggtntatggttgaactgcaacttaatctctaaatcattattattcaatctggatggggggtgaatacaaacttttctctactctcttaacctcttatggcatctctcgcagactaatttgtccccacagtcatcaccaaaatggtgtggttgaaagaaaatacagacatatagttgacttgngccttacatctgtgtatcatgcttctttacccttacagttttgggattatgcttttactacaactgtatctgattagcagacttcctactgcttccctcaactttgccattccttttgttacactttttaataaggatcttgattatctttttcttaacacctttggttgtaccgatcttcccttggtgagaccttaccatacacacaaactaaattttcgatcttatgaatgcttattntntggggtattcctcttgccacanaggttacaaatgtttgtcctcatct

SEQ ID NO: 95868 - DNA, 388 bp, Glycine max
gcagcttagttactgggctctactttttttgtgtattcatatctccgtatgggggttctcaattgaattatggcggcctcaccccatacaattatcatactatcaattcctttagatctgcaccacgcaacgatgcctgctctccaaatcatttttaaagataataattggatcattttatcatcacttcctgaagaataagggagagagacatcgtgtttgctcattcaatcgccatgctagtgtcatttgtgacacataatagagcccctacctgcaataacatgccatgtttacagatcatgccagttggttgaacaaactctaaatggagattacacaggatttctacatgtcatgcgctatggatctatttaaggacatatac

SEQ ID NO: 95869 - DNA, 436 bp, Glycine max
  unsure (1)..(436): unsure at all n locations
ctaagcttgaactcataagcatanggtatcaatatgcggcgactatgaatggcaatcccatatntaatttattccctttatgtaagcctacttttgggacacaatactcagcacttgtaatgctatatagttatataagtgttagtaatcttgtggttagattatatactatctntgctatgataggttaaagagagaataactactctcattgntattaatctnngcttaattatactaagttgcaacccgtgcgtacgcacagattgttagagttttttattcagcaagnattgaaatnttttattatacataaacacattacattntggccttattgtgtgagaataatatataatggtctgtactcaatatagtgaacaattatggctatgcgagagatatcttatattgcatgatgtatataataacaaca

SEQ ID NO: 95870 - DNA, 460 bp, Glycine max
agcttcgttgcaagccagtggctggatggagatggctagatggtgaagttgatttgtggaggcataatcatgaattggccaagtcattagttggacatccatatgcggggcgattgactaaagctgataaaacacttattgctgatatgacgaagtccatggtgaagccaagaaacattctgctaactctgaaggaacacaatgccaatagttgtacgactattaaacagatatacaatgcaagaagtgcattccattcttccataagaggaagcgatcttgaaatgcaacatctgatgaagcttcttgaacgtgatcaatatatttattggcatggaataaaggatgaagacgtggttcatgatatcttttggtgtcaccctgattcatgtgaagtagtcaacgcatgcaatttggtgtttttgatagacaacacctacaaaacaaaccggtatagact

SEQ ID NO: 95871 - DNA, 474 bp, Glycine max
  unsure (1)..(474): unsure at all n locations
taaaaataatggcatcatcaaattatatatttctcgaatgtaattctataaataggcctcctattttaatggcgtgggttaccattattggaaaacccgcatgccaaattttatagaggcaatagatctgaatatctgggaagctatagaaattggaccctacattcctactatggtgacaggaaatacaaccatagaaaaatctatggaagaatggagtaaggaagaaaatagattagttcaatacaatttaaaagccaaaaatataattacatcttctttaggaatggatgagtactttagggtatcaaattgtaaaagtgcaaaagatatgtgggatactntacaagtaacacatgaaggtaaaaagatccaggataaatacattgactcatgaatatgaattatntagaatgaatncaaatgagagcatacaagacatgcanaagagggtcactcatataantaatcatc

SEQ ID NO: 95872 - DNA, 302 bp, Glycine max
cgcagctttctgatagactagagttcctttttgagggccaggccgctcccggtggatatcccatttcaagacgctcgcaccattgcgttctaggcctaaagattgtttttacaacagaactcgccgctatgacggtgataccttttttcagaggaatgcttgcgacttggacgcgttggcactctcatggttagtggaccctgttattctgagtttatgctatgcggcccaacaataggatgcggaatgcggcttgtgagggcattgacttcttgccagatgcctacccatctggtgacccg

SEQ ID NO: 95873 - DNA, 418 bp, Glycine max
  unsure (1)..(418): unsure at all n locations
tggatnctcaaggtttgaaggtgaaaatgagaatggagtaactttggagcaaactctcatctcacacaagtctataacattaatctaaactctctcaaacttggtattacgatgaaaactctatcgaatcaaaatttgactcctcaacacccaatttaccctataaatggctctcgccctcactttggtcattcatttacctcctttgtacagcccaagctgttccacaatcctaaatgacatttcaaactacgattaactcactctaacctccaattaccactaaatccagaattggcttttcaaatcctcacagcatcacacctttccactcatataactacattctcactttttaaccctacgtgactctaccctcatcttaacagttttccatcagccatttagcacacaagca

SEQ ID NO: 95874 - DNA, 473 bp, Glycine max
  unsure (1)..(473): unsure at all n locations
tgcaagcttctgcatgtctagggttttctatagagataaaggtccaagttacagagagttgagaattttgctgtgtgaagacctgcagagaaccgagcttgaagaggaagccgtcctgagagcttgagatgattttgtgagtgattgtgaggttctagaggtggaggagacatccccaccacttctatttcttcaatccttcatcttttcttctctttgttgtaaaggaagcttcgtagttatggagagctaaatcctttgttagttcttccttgtaggtacttgatgtaaatacctgtatatctatttaatgatgttttatgtgttcactatgctataagaacttcattctaccatgcttttgccttgaccatgtagatgcatgtgttnttagaatcattaaacagtgganactggtctgattcttataacttgataggacggggctagtttatcgtattatcacgagggat

SEQ ID NO: 95875 - DNA, 369 bp, Glycine max
  unsure (1)..(369): unsure at all n locations
tctcggctcatactgtgaacgcctctagttcaacacccgtgcagcctaaggcacccacccagagggaagctccccaagttccaactccgaacacgactcgaccggccggcaattccaacacgacaaggaacttccctccgaggccatttccagaattcaccccactcccaatgacgtacgaagatcttctgccatccctcatcgccaatcatttggccgtggtaactcccggaagggtcctcgaaccccctttaccaaagtggtatgaccctaacgcaacttgcaagtaccatgggggtgtcccggngcattccgtcgaaaaatgcttggcccttaaatacaagggccaacatttaatggatgctggat

SEQ ID NO: 95876 - DNA, 417 bp, Glycine max
  unsure (1)..(417): unsure at all n locations
agcttgaattanaacanaatactcataagcattaagaagcattccatggcatgacaaccaaaacaatgtcatacataaataaaagcacatacaaaattgtcttagaatttgggcttaggacctaactcaatcccacaaaaccagcttgattgatgtggaactaaacaccaagcaattaacacagcccccaaagaggccgcatataaggtaggttaggggtgaccgcaattaaggtgactntccaacattttctgaaaacagtatctttaatggatttgacactcaatgtactactgccttgatccttaccaccaaattaaataaaccacatagtcatcatttaagttaagaatttaaaatcatatcaaacaggagatnntattataaaattccacaatgaagctagtcttacacaaa

SEQ ID NO: 95877 - DNA, 390 bp, Glycine max
  unsure (1)..(390): unsure at all n locations
cttacaacaaggntcatcaagtctagttgaaatatggaagtatccgtcctgcaagaatggggcacaagatgaatcgagtcacatcactgcttcatctactgccaaacatatttaagattgttgatgtccttggtacttccagtttcacctttgcaaagatgtcatggaccatgttgaanatctaaattgattcaaccccatatcctgcgtagaaattcgcaatacttcgactgtacatcattcgcatgcatccatgcttctcattaggtgcattgctcattgcattctttccttgagaaataacatacaataaaataaaatgaacttatctaaaagaaaaggacacgctttacggcgcccttaccgaactcgtactatagctatagtaat

SEQ ID NO: 95878 - DNA, 438 bp, Glycine max
agcttgcttctacaaagttgacacgatccttgactgcctgaacgacctcgccacctacagacctcttctaattccccctctcccccaacctaacctcacgtcaagctcaaaatcctcatattcgatggacacgatcctatgggttaaatcttcaaggctacacaattttttgattaccaagggacatcggaagaggaacgaatcacacttccgtaacagattcatcacatcttggaatgaccttcttcaggctttggaatcatggtttgcaccgtcattctatgaccacccgaatggggtactctttaaactctctcaacacggttctatcaatgattatatgacagagttcataaggcttgccaatcgaatcatcggcctaccaccttcattcctgctgagttgtttatttttggcttattgcaaacttacgctgcg

SEQ ID NO: 95879 - DNA, 407 bp, Glycine max
  unsure (1)..(407): unsure at all n locations
tcagacatgccanaaaaggaaccagaataacgaatttgttctagttgccacaactagacactactaatgtacaaatgaaagcttntgtaccagtcactataggtcctaacatcccatgcaaccccagagcagacttttatgaggggaaaagaagtaaattttgcataatattatttaagaataaaaggaattcttagtataaatatgtatagtttagcaacaaccaatcagctggttaacatagtataaagagtggttaatgggtaaccacttattatcttattgataagaaaaactcaaactntatacttcttaaaatgaaaatcaaaacctggttttgatataacctaagcagccaggaaatcctactgcagattaagaatgttcaccacaattttattgaatat

SEQ ID NO: 95880 - DNA, 307 bp, Glycine max
agatgaaattaatgatgtcttaaaataaatagcgaagctaattattcagcatcgtatgagcttggaaattttgaatctttgctaagtatgactattcggtatgatatattatttgttataaactccattagtaaaaagttacaattaaaagatatggatatggatgttgctttaatccaatgacagtcttatttctttttaaagaaatataaaaagatggattaaaaaactttatcttgccaagaaattttctgaatggtataaacctagttcctgcaaaatggtattatggaaaaatattttagaa

SEQ ID NO: 95881 - DNA, 459 bp, Glycine max
gctcgtatggatcaacactaactggctattttattatttattattgcatacatttggtcgtgtgatattcatgacttaagtccacacctgcttggagatagagactaaatagattgaattggataatgtttcatccttgtaaattgacattaattaagcatatctatctatctatctttatatgcatgctaatagaagttgaatttcgcatacattattacaatcaactactgtttgcttagaagagaggacggtgaaaagaactgatacataacaatggatgcatcacaggcaactacctacagaactaagagaaactgtgcgagattatgaccaatacaaatggttggctacacgaggagtcgatgaagaagctcttcatataggactatccgtggatcttcgagagacataagcgccatctctgtttgatctaatccgatgagatagtcttatgag

SEQ ID NO: 95882 - DNA, 361 bp, Glycine max
  unsure (1)..(361): unsure at all n locations
ctggtaactggagccttatagnttctaactacaccaatattcctaattgcatttgattctttatctgactataatttgagtaaactttagaatggttatcttatatgttttcaggggtgaccatgtcatattatttagggctgtaagcattaagactgatcgcacacctttcccttgtaataggttttttttttcatggaaactttgttcatttaaagttttgctcaggtggttttcttgtaaaggaccaattacttggctgcattactgccagaaaaccttataaatactaggtggagttggacttattatggcagcatattggttgaagctgatgtccaaaaaaatggttgctggtgtt

SEQ ID NO: 95883 - DNA, 374 bp, Glycine max
atttgagcttctattattctgtctttttttatttgctgcagatatatggcagtcaaaccatagtgaaaagctacttgccaatcaaagatgctcatgttcgtcctggtatatatggtcttttggatatcctgagaaacatgctgtcttatggtgaaatatcagaggacttacagtcatagtatatcagcttcacagacctatattctttaaataatgaatatgaaaattggcagattttctccttttcatttcaaataggttctggggttcatatactgtgtactcatttatgccctcttgcagctcagttgataacgcccatttgagcttgcttctgcaaagcatttcttttttatcaaggctttggatcacaa

SEQ ID NO: 95884 - DNA, 443 bp, Glycine max
  unsure (1)..(443): unsure at all n locations
catgcaagcttgcctcatagaggtccaggaatgtcatgtgtttctaatgaactatttccgctccgagtatgacagtcaccgctttaggagcgctgtacaccagcagcgcttcgaggccatcaagggatggtcgtttctctgggagcgacgcgtccagctcagggacgacgagtatactgatttccaggaggaaatacggcgccggcggtgggcatcactgtttacttccatggccaagtttgatccagatatagcccttgagttntatgccaatgcttggccaacagaggagggcgtgcgtgacatgagatcctgggtaaggtgtcagtggatcctcgttgatgccgacgctatcggccaactcctatgatatccgctggtgttggaagacggccagaaatgtgagtatggccagatgacgaaccggtctgatgggtttcatg

SEQ ID NO: 95885 - DNA, 323 bp, Glycine max
  unsure (1)..(323): unsure at all n locations
actgnnacacaatgcattttccattctctacttctattgcaatnncgtttattcttctactgcatttagttcatgtacgtcctgcttagttcattctcgtttctatttccaatntcaattaatcgaacacaatgcattttggttgatattatggaaggctaaatttctggtgttgtttccttctgaggacgaagacgaagcttaactctcttcgaggttctgtttataatgaacttcctggcagtattcccttcaccaattaacccacatgcggtcgattaatctgtgcacgcttcgcagtcgattaattgtctctgggctta

SEQ ID NO: 95886 - DNA, 467 bp, Glycine max
  unsure (1)..(467): unsure at all n locations
ccaagagatgcgatataaaatgaattatttactcttgtaacagccatgtcacgaagggggaaacaatatcaaaaactctcatatttgcaagcaataaacttttattctctcacctctaagacgagacttgtaagctattatcatatatnngattagatgtgggtctaacctaagnnnacaatttcttgcccagtgtgaaaagaagatattgtgcttgggtatgtaggtgggattgaactctctctgaagattggaacatnngggttgttgttccttcttctcaacaagaaatgaagttacttgtgagaatctcttaaatctcttgtaataaggattcatacatgaaaatgggagtatgcattacttcaatcataagtgatcatggtggagagtttgaaaatgagagctttcatctattctatgaagaanatggaattcttcataacttgtctactatagaaaaccac

SEQ ID NO: 95887 - DNA, 371 bp, Glycine max
ccttatgaatcctcccgtgcttatgccaccaatacctggaaggcctttcatgttgtacatgacaatcttggacgagtcaatggggtgtatgctgcggcagcatgacgaatccgggaagaaagagcgcgctgtttactacctaagtaagaagttcacgacctgtgagatgaattactccttgctcgaaagaacgtgctgtgctttagtatgggcatcccatcgcctaaggcagtacatgctgagccatactacctggttgatatccaagatggacccggttaagtacatctttgaaaagccagctctcacgggacgaatcgcccggtggcaagtcctgctatctcgagttgatatagtctacgtcacccaaa

SEQ ID NO: 95888 - DNA, 467 bp, Glycine max
  unsure (1)..(467): unsure at all n locations
agcttggcatatccttacactgaatattatctcttcatgcacatggattcacattaggtcttggtttatggttttaattattagcctgacagttcattgtgatgacaagctgtattttgtgtgtattgtcttgttagtctcgtacagtctttcattggccaagttggtaaacataaaatgagtttgaagagttgtgttttatntttctgagtacaagccagcatcagtagaagcctagccacaacctgtctctacttcaaaagcaaaggtaatccttataacctgcagtctttaattcaaattttgagctttttattttgagaacaattcatgttaaattgttatatatcaatagcatatgtcacttctgttttaggtcatggtggctcatgatcatctattatattagtcttatagtataagtgacttgaacacgtgtggctattgatgttcactaatcatgctca

SEQ ID NO: 95889 - DNA, 393 bp, Glycine max
  unsure (1)..(393): unsure at all n locations
ggacttcactccccgtgccttcccggtagaattaagccaagcccctactttngaggggcaactcccaccttatgaagactatcccgggcaagacgatggggaaggagatacccatcttggccccctgctccacctcanagatcaatccccgtatgaactaccccagccgaacatagtctgccatatcccggcctcacccacgcccgtaaaagaatctgttcccttcgcggaagatatgggaaagattgaggcgcttgaagagaggttgagggcagtcgagggcctcggcaattacctattctcggatttggtagatttatgtgttgtgcccaacatcgtcatccctcccaagttcaaagtaccatactttgataagtacacatggacgacatg

SEQ ID NO: 95890 - DNA, 319 bp, Glycine max
  unsure (1)..(319): unsure at all n locations
acctgcacgctgcagctagaaaaaacaggccatgatgtgtactgttctntgcttgtcatccattggaaccaacaagggcccttccttccatgtagaacccgcaatggtgagtctgtcgtggtcactggtgccatgatactcaaaaaatcggttgatcttaaagatccaaccaagtgggtcggtgccatcgaatcttggcacttctaatttcattttgtggttgggtgcacgtgcatggtgacggtgagggaatgtattatcttttacatctatctctaatactttattgacctatgtattctctcgtctaatttttcca

SEQ ID NO: 95891 - DNA, 444 bp, Glycine max
  unsure (1)..(444): unsure at all n locations
tgatgatttcttagatgatgacaaaaagctcactagtcaagatcacttcatgataacaaagatcatgacattcaagaatgagttcaagattgagtcaagaacacttcaagaatcacgggaaatttgaattcaagaatcaagaatcaagtttcatgattcaggtttcaagattcaagaatcaagaataatcaagttgaagattcaagaatcatgaaaagactcaatcaagataagtactacaaagtttttcaaaacattgaatagcacatgatttnttcacaaaaccttttaccaaatagttttcactctctggtaatcgattaccagtagcaaagttgatttcaaaaagctttcaactgaatttacaacgctccaattgatttcaaaatggtgtaaccgatacaatgattggtaatcgataccagngtgttgaacgttgaattc

SEQ ID NO: 95892 - DNA, 490 bp, Glycine max
tctcagagtcacctgcggcatgcaatgctttgaagaggtcaccatgatggttatttatggtgatccagtgtctgaagattgattgttgagacaatccaagaacagtcagaacataagccaaaaagattagaagtggagaagcttaagagttcaatctacattggaacatggcgttgtacttctatttgaagatattgctgaaagacaagcaaaaatagaagtggctaggtttctgaagacttggaccttacatagaaagatgcttttgaagaagctatgctatggtctattattgaagcatgtcttcacgatcttgaagatgatattattgaaacagactcaggtgttgaactagtcagaccaaggccagtatctgaaacagacaaacaagcactctttggtgtactggttgaagaaatggatgaagacatgatcatacattctgaaagtatatattggtcttttgcatctgtcaacatgatagagatgc

SEQ ID NO: 95893 - DNA, 308 bp, Glycine max
  unsure (1)..(308): unsure at all n locations
cacgctactgtatcgagtttctatgttttttcagcaacattctcaacagtgacatcttttgtgggtcttgatggcatcaangccatatatgtggcttgagacccaatctttatagctttcaaacaaaatgcttatctctattaacacaaaggctatcaattgtctatttgatcattttaagaagtcatattaaggatttatactgaataacagtaatagaatttcagtaggaataagtgtattatatttaccccccccttttaaaatatagcccttgccacacctaatcaacaaaacgactgaacatg

SEQ ID NO: 95894 - DNA, 432 bp, Glycine max
  unsure (1)..(432): unsure at all n locations
agcttcgactgatcgtntaagccgntatctctcataataaatgataaaatgaatttaaccgatcatttgtgttgtaatctcgcttaatcactgttaaaataaatatcaaccgatcattcacactgtaacctcggttaataaaaaaaagggtaaataagctccaatcggacactttactttaaaagttcttataaatgagttgataaataatcaatgtttagtacttaaagaactacgtatgtctgatttcctcaccgcaattgaggatacgtaggaacaaaagccccgcttttgtcgaccccaaaaaaggagagattgttaaaggtccaacgccttaacatttctctccttccataaaaatcaagagatcgataaaggtccgacgccataatgattctctcctttcataatcaagtgattattaacagtcta

SEQ ID NO: 95895 - DNA, 453 bp, Glycine max
  unsure (1)..(453): unsure at all n locations
tatacagaaaatacaagtatttaacatatcataanatttcagtatgtgtatttcctgaacacagaaaataagaagtcaaaccacacatgtgttcagaattgtaatcttttgaaaatgaaaacggttttcagaaaatgaacatataaaccaaacacaccctatgagatttagttttcttaacacttaatttgagacattcaatatttagtataactttaagaacaatgttagaattaaaataatcatttttacaaagattgtaaacatgcccttggaaagcatacaatctctgaaagtgaagatcactttgtgacgtggaagctaaggacacatagacgaatgcgagtgagccacgttagggattgcattgctacattctttagaaagaatgcacanaagaaaanaccaaaataatagtcactctagtcaaagtgattaaaccatgcatgacat

SEQ ID NO: 95896 - DNA, 469 bp, Glycine max
  unsure (1)..(469): unsure at all n locations
gctgtaggattatggggtacccgtcatatgttgtactatgtggcgatcgggcgatggcgcaaacaactctcccacatccacaaatcaaacatgaacccaccatccccagttgcctaccttcaactgagctcacgtacccncatgtagcccttatcctcgttcctctcagcaccgggtccccatcaaccccttcaagctttcacaacatccaagaaaatcaatatccaaacattatgaactatcccaaactaagaaaacagggcagaggcagaaaactctgcccaaaacacattccaataccacaactttccctactcagataccccagtaacattctcttcgttccgattcgttaattggtggatcgactcaaaaattttactggaggtccctagtacataagtctacantttgactgttgcgatctgctagaaaatgtctagaacccaatatgtattaccctttccac

SEQ ID NO: 95897 - DNA, 393 bp, Glycine max
  unsure (1)..(393): unsure at all n locations
actaagcttanatactctattagcagatctgcctggtccagctntccatccacattggtaccttcactttcagacacccactcagcagttcgaaatccagcanagagagctggattntctagcagggtctcagcggaaagaaccccttcgaccccagtctcttctaagcagtctctaacatcatcaatatgccttatgttcccattcgcaaggacagggattctgactgcattcttcacagccctgatagctttccagtctgctcgaaatttcttcccatccttctcatctcttgtcctgccatgaacagctaanagcatacaaccagcctnctcaagcatcctagcatacttcaaagtgtcctctaaatttggaaagagcctaatcttgcat

SEQ ID NO: 95898 - DNA, 326 bp, Glycine max
gactaatgaagttatctttttttttttgaagatattactgttgatcttttatatttcacagctcgaactcatcattcacatgccagccctagtacgaagacctatttcccagggaacttgaactctgtcttcatttgaaatcaacaaatcactggattggacagatattcattatacatattgggtgaacggggactcaatcagatctcttcatttgaactaacagtcggcattgtcctcacatacacaagtgttgagcaatctcacaaagccaaatcggtgaactttgatttgcatctggataaaagaaggagaagaaacctatt

SEQ ID NO: 95899 - DNA, 299 bp, Glycine max
cttcttcgcgaatatttcttataacacacgcaagacaagctaatgcaattgcccatccaaccgtctcacttgatgatacaagacagagcaactagtgagttaaaggcattctttatagatatgatgagaaagctaaaaaactttcagtgtagtttggttcatacgactttgacctgttacttgtgatgctaaatgaattcgacaaagaagatgttataacagactactcttgtcatccagtaaatgaagccagcgatataagattacgttgcatacgtaaatgctcacatcctacatta

SEQ ID NO: 95900 - DNA, 454 bp, Glycine max
  unsure (1)..(454): unsure at all n locations
gcttaagagcatatactacgactgctaacttattatttgtgtgggataattcctttcatgtatctaagttgtcgagaagcatatgccacaacctgtccccattgcataagcactccacccaaacccatcttggacgcatcacagtacaccacaaaagattcactcggattaggtaacactaagactggtgcagtggtcaacctttccttatgggtacggaaactactctcacattgngcattccacacgaaaacctgaccttacgagtaagcttattcaaaggtaaggctagcttagaataaccctctatgaatctacggtagtatcctgctaagccaagatagctcctaatctcaaacactgacttaagactctctctactcatcactgagacaccctctacccctcacatatatactaattaggaatataaaaattcatatattaattaaaa

SEQ ID NO: 95901 - DNA, 419 bp, Glycine max
  unsure (1)..(419): unsure at all n locations
atcgggacacaattacccanaatttaataagtacttacatacccaacaagcaaaggaagttgcttataatttaaataagcattgaagcaacatgaatctccaccaattntcacgaattattatgcttgccatattgactggacttgtcattntcatacatcaaaatatcagaatcaaaacataatgtgttagaatggatcaaaagccttatgttcctaactattaatttcaataataaagctaatagttgcatggtaaaaaatagataagttccagttaaacataatagccaatgaatgcatagaaaaccaacaaacacaaaaatatgaatgattagagtaaaaaataaaattgattacacacatatttagcatcaaagatataataataatctattaataccaacctttgctgaatgc

SEQ ID NO: 95902 - DNA, 478 bp, Glycine max
acggattggtcttcaccggtgatattatctttttgtgtctggaaagaggtaaatctgacatctcgctttgataaatgcaaaaaaaaaactggcgcaaatgaagagggtgagaatgaatgagaaacccatgctgcaactgccattcctatacaaccaagtttcccactgacccaacaacccttctccttacccaccacccagttatccaacaaggtcatacctaaatcaaccacaaaactcacctaccacacaaccaacacgaacaccacctttatcccaaaccaaaacaccaaccaaaaatgaattttgcagcgaaaaagcctgtagaattcaccccaatattggtgacctatgctgacttgctcccatatctacttgataattcaatggtatccataaccccaaccaaggttctcaacctccatttatctgaggataccactcaaatgcaacatgtgcttatcatggaggagccccc

SEQ ID NO: 95903 - DNA, 423 bp, Glycine max
  unsure (1)..(423): unsure at all n locations
actacctgaataattccttgatatcctttgagtctngttccctatccttggtgtgaagctcactacaagccttaagtgaataaccatgatattaccatatccttaaggaattttggagctttggaattgttttgggaataagtgtgggggggtttttgtttcattggacaacttgttttgttggctatgcttcatgatgaattttgggccatacttgatgtacattgtatattggctaaatgttggacatgctgaatgaaatgttgtttctcaaaggccaaagagtgaaataaaataaattatagaggtattctcctttaataaattctataaaaaaaaacgaaaacaataaagttgagtgaataatatcttatatggcaaaagaatgatgacactcttggttctactcctcacgtgtaaatt

SEQ ID NO: 95904 - DNA, 468 bp, Glycine max
  unsure (1)..(468): unsure at all n locations
gctttatttcagatgctgatgatgctcgattatatgaataaaatatacttgtcaagacttggatgaactattcaagtctgcattataataagtatgtattggcaatataagatttgtcaatgcatttgatacctctcaacgagtctctcattttttatcacttctagtgaggcaattgcaactgcactggccagtggatttccaccgaaggtactgtgaacaataacagagaagaagaaagcttcaacattattagtcttagctttcatactttaataacattgaattgtattgactaaatgacattattggctaattacataaacaagaaatgaatgccaaacaaaaagcataattttcagagtacacaaaggatggaattntttatattaaaaaaatagcaattgaaagttcttaaacgaagaattcagtttaataagaaaactganggctcttgaatatgttcgt

SEQ ID NO: 95905 - DNA, 449 bp, Glycine max
  unsure (1)..(449): unsure at all n locations
ttcacccnctcagaatgttctatatatgtccaatgctagttactaccctcaagttgatgagtgcactcccctccagaatgttctagatggtcccagatgggcccaatgctagttacacccctcagtttgatgagtgcagcccccctccagaatattctagatgggcccaatgctagttacaccccccagtttgatgagtgcagtgcccctctacaatgttctagatgggcccaatgctagttacaccctctagttggatgagtgcagccccccattttgtgttttttggctgatttctttcagaaacatcgtgaaactntacggattacgtcgaaacgactgttaagcatcttanatcggtcagccaaagtccgtacgttgacgaacaattatccccaaacgaaattatggtatgaaaacaacaacaaacttgacgatattttctattt

SEQ ID NO: 95906 - DNA, 388 bp, Glycine max
  unsure (1)..(388): unsure at all n locations
gcaagcttgtaatcgattacacacatactgtaattgtctatcagaggagtntttcagataagagctcaacagtcacatctttgtgtgtggctcttgaatggctaccaaaggcctatatataaagtcttatcctcttaaaaagctaaatcgatttatcctcttacagattccttggccaaaactcttgtgattcaataaggaattatttgagtgctcaaattgttcaatctatctctatcaagagagatttcttctttacttcttcttcattctgaaaagggattaagagaccgagggtctcttgttgtgaaagaattctaaacacaaaggaagggttgtccttgtgtgtttagaacttgtaaaaagaatttacaagatagtggactct

SEQ ID NO: 95907 - DNA, 445 bp, Glycine max
  unsure (1)..(445): unsure at all n locations
tcaatggtctaggatggttaanatactgtatgatgaaatatatgataataagttaataatgtaatacaaattataaaaaaatcaaatttgtttgaaataaacgtaccgcttcccagttattcctaaaaattcctaaaatgatggtggacatccagtgcatgacataatagctgcactcagtgcttcctttttgtctattacactaaatacataatggaaattggatattaattaaacaactagtgtacagacacataagaagtatatataaatggaagttttatgtaaatgacgtaccttgatgacaatccacctagcaggagcctttgattangctgtagagcatcatcaagacctattaaagcactgttccagacaaagtaacaataanaattggtgtattgaggtatttgaatgccaatgcattgaaaagaacactgacctg

SEQ ID NO: 95908 - DNA, 451 bp, Glycine max
tgcaagcttactagatttttgcatctctactttttatttagtaagctcttctagaagaccaatgatggatcgatctgcttgagttgtatacatccttcaagatttatggtctctcctaaatttggcaccttaattagatttttggagaaagagagatccaaacgtctcaaattgtgtagaggctgcagttaatggataatagtatgagacataattaataatgacacttgggcttccttttgtttctttcattaatcagaaatatgacatatcataatgagagactgtttttatcggttcattattagacagaatattcaaactgacacgataaaaatttgcagtacctttatatctttccatagttgtgtgatgttgctcagaggtatatacaactcaacatgtttgtccaactgaaaatctggtggtgaaattcaaaaggatatttttt

SEQ ID NO: 95909 - DNA, 443 bp, Glycine max
  unsure (1)..(443): unsure at all n locations
tgtattcctacatgctgtctaatggttattagtaatattagatgacngcngngttaatgggaggaaccttgatgatgacctctcttatttttgctactctatgtggatgaatatgctaattctagtaaccatttatgtgatgtgaatgagtcaaaatctatgttgggcaaagagattgaaatttatgacttgngtcctaccaagaagattcttgggatggatattcacaaggatagaagatccaaaaaaactatggctctcacaacagggcaatgttgagaaaatgttagacaggtttggcatgagcattactaagccagtgagtactccacttgcanactacttcaagctttntatagattagtgccataagatagatgaagtggcggaatacatattaaagggtcgctattatagtgcaactttgtgcttaacgtatgtta

SEQ ID NO: 95910 - DNA, 398 bp, Glycine max
accacccccgctgcagctataataactcagatggaattgtttttacttcttgaaatatatatagaaaacaggagtgtagaaatagaggcactgcacatctgcttgaaacttaaattgttgcaaaaaatatcttaccaccacagcaaaattataaatgataaataaaatatatatgttgttaactcacacacattctgaaatataattctgatgtaatacttgtggtgcgcaatatgatatctcctcatattagagacctcctactctacagtataaaaatgtattctacctttactcttatgcgagacatgattagttaaacgtccctattatattatcttcataaacacttagataatattaactgggaaagattgcttaatgttattagatatgtt

SEQ ID NO: 95911 - DNA, 482 bp, Glycine max
  unsure (1)..(482): unsure at all n locations
catgcaagcttataataagtcctgatggaattgctcttacatctgaatatatttaaagaatacaggagtgaataaatagaggcaatgcacagtagcttgaaacttatattgttgacaaaaaatatcttaccaccacagcagaatcataaatgataaataaaataaatatgttgttagttcaaacacattctgaaatataattctgaagtaatacatgtgttgcgtaataggatttctccttatattagagacctcctactctagagtataaaaatgtattctacctttactcttaggtgagacatgatatgtataaagttctctaattatattatctccataaatcacagagataagatataactgggaaaagatatgctcaaatgtaanngagaaatgtcgtatacatgataagatatggtgataagataacatacattngtaatgatcggtccaatgcctagtgtgctagatgtgattgc

SEQ ID NO: 95912 - DNA, 388 bp, Glycine max
  unsure (1)..(388): unsure at all n locations
catcgacttgttgggttagacttatataacacaatctaancttataaaactctacaatactcgaatttatattttaaatttattcggatgtgataaggtacaattgtatgattattgttttgtaaatcattatattttagttattacaatgaattttgcaattgtaatattcttatcagggatgttaatgggcttgaaaaattaaaggttttcaacaataaagaaggtgaaaatatgcttttcattttttatttctttaaaaagtgccatgtgaactttagagcggtcgttaacaagacttgattaataatcaaatccacaaactctagcgcaataaatagttgtgctaacaataacaactaaatcagtaaatctagttgtgaatcta

SEQ ID NO: 95913 - DNA, 476 bp, Glycine max
aagtcacccgcggcatgcaagctacatactcttattatttatcattatattatattataattctaataggctgaccatgtaaatctaagtgtgtgtgtattattctgacacatcatatagtaagtcatataatatgagaaatgaggtgacatagaaaatccaatctatttatgaatataatgtacactaattgataaaatatattacacaatttattaacttgcttaaattttcagggcttattttgccatggactctgggccatcactcctctgaactagcacaagagtggtctagctttgaccttgtggctatgttagaaatatgttattctttttgataggatttatgagaatacaacgtattatatgaaaatgaattttcatgtggagaatgtgaataatcaacatctattcttatgtttaaataacatagtgagattaataaattcacttaatagattgcccaagtgatga

SEQ ID NO: 95914 - DNA, 464 bp, Glycine max
  unsure (1)..(464): unsure at all n locations
ttaagacgtgctcatntgtataaacaacatctatatatatgtangtagtcaggctcacgtagccacaagctgcaataatatgtgaacatggatagtgaagcgcacaataccttccgcattgacaataatgaccattcaagttaactgctcacttttgatcgccacgttgcgtaataggattgaaggtctcctctacttcaaaccttgtggagtggatgtcatacacgcgaacgatgtgcgaacaagcttgttcttgatttttttctaagttctttaacaagagcaatatacttgcccttcatttaactgtctctgggcttggcggccacactcaacaaagtactttcgacacctactgtacgttgatntgaccaatgctgttatgggaatgttgcgacaatcccttcaaaccttattgatacattctgagaggatggttgcatgtggcatatcgacgtcctctc

SEQ ID NO: 95915 - DNA, 449 bp, Glycine max
  unsure (1)..(449): unsure at all n locations
agcttctcatagnaggcgtcgttgacgtcatcatcatccgangacgactcagactcgattcttcctcaccttcagaatgcgagggtgaaggtgaatcaataacacccttctttttcaattcctcaaatcgctggaggttctcccgcctcttgttgtgctcaaacctacgagcatactcctcatctaccttgatgttcgaaacgtcgtaatattctgaatcaccgccatcaaaaagttgcagaggcatcctactaactgctgcacactaactaatcctccaaaaacacagattccacaaagatataatgtgtataatctgaaatgcacgaaacaatatacgaattcattgtagcaaaagcaaacaacataacagaactcaccagctgggataagaagatcaactttgaagaacattttcttctacagagatacttctatttgtcgagatt

SEQ ID NO: 95916 - DNA, 379 bp, Glycine max
  unsure (1)..(379): unsure at all n locations
cattcattggtcgaccacctgttctgccatggtctaccaatttcacaatgngcaacatgagggagtngtgtgganagctaccttttacttcctaagcacagaattgtaacagacgagtttctatcaaagagagaagccatagatttgatgccctaaagcagatacctttgcttagccaagttgtcagcaaaatgaatttgctctctaaatctanagacataaactatactaccacacaaattactatttcatggaaagcagctatgaagttgaaagtgttaagcaatttccatggcttaatggttcgattattcacccgtccaacaactagagtagaatcaaattcttacattatgcttaaggaaaaatatcacaacac

SEQ ID NO: 95917 - DNA, 390 bp, Glycine max
ggagagtgtatcaacgattttggattctctaatggaacacacacatatgttgtactttggagccatggaatgccagatcttctcgactataacaacataatccatctgtgtaccatggaatcacatttatttgcaatgcatggtcttgcaaataggtggttaccgattcatcattcttcatgtgtagcatttcaaattcctttcttatggcttgaagctgcgcacgctatatactattagagcctccatatattatcttgattgaatcccacagatctatggaagttccttgcataaattgtttccaaatacagcgatcaatgacctgaacaagtatattttaccttaaatcttcaacatcagccctccactcctttgttgtggtctgga

SEQ ID NO: 95918 - DNA, 400 bp, Glycine max
aatattcaagctctatatctcgagactttgcttctgctaatcactgttgcacagatgcattctttgctatattttttttccttttcctttgttgcactttcatattgctcaatttattttgtggatatcaagatcaccactgtctttttgattggagaccttactaagcaaaccaccatccaatgttagaccaaccactatcaacctatctctggcaacctgcttatgcattgatgaacccctgtatgtattagtcacacccctcttctgactgcctgaggaagtgtgtctgaccactattcatcccactgccaatcccatgtgtctcatattttgactctcttccagtttttgtcttatactcccttgtacaattgtacacacgacaacctcgtatcat

SEQ ID NO: 95919 - DNA, 369 bp, Glycine max
acttgatgaccgagccgcagctgaaacagaaacacacaacctttactttttttgagaactaagtacattaagaaagaaaagcagcagattagcatgagattgagacataaaggcaagtaaaaaaaatgaaggagaaggaaagaaggacctgggaacgagagaaaagaacatgaaagagtaagaggttttcttttgttaggtaaaaatgaaaatgaaatgaaagaaagctgtggggacgaattctaatacagtgaacaaagccagggtgatactacttaccgtttggcacctcgcggaaccaatcgcggattttttttttcattatgtaaaaataaaaattatgtaaaatgtgtaaggaaccaccatttt

SEQ ID NO: 95920 - DNA, 333 bp, Glycine max
  unsure (1)..(333): unsure at all n locations
cggctggacatgatatatgtcaaggtgtnggtgtggccagcggttcaaggataaaggaatgtcccgcattatttccatggcaagcatgcaacaatgatgattcagaaatttatgcaaaactggtcatgcatgcacctatatggagactcaagcatctagttattatggtcatgtgacactagggcttaagattcacttctccttattaagtcaacccagtgtttccaaaacatgctcttttatcaattcatgcctttatctgagtccattctgggcattcggaaaaaatttgcacagcattcacccttcatgtgtacacacatttttttcaaa

SEQ ID NO: 95921 - DNA, 451 bp, Glycine max
ctttgcattctcatacaacggggactgctcatcttgttcgaagaatgtcgcggatagtcggcatgcgttttcgaaagccctcttgccccacatcacgtatcatgtctatcatgagatctacggtttgtctctcaaccggatgaggtggacatgttgtagtatgaccagccaactcaccatgccatatctcctttgtgtacgtgaggcttatgccttcacagatcagatgcgatctattgttttacaaccaatgactccttccgttgaacattttacacaagggcacaaaaaggtggcatctgatgttgctgaatgtattctggtcaatgacataaactcttcaaccccgtgttgatactgcttccttatgcatggcgctgcgatccaaggtcgtgccatggccagtgttgtgtaatacacatcacaatgatttgaggcagaataataacat

SEQ ID NO: 95922 - DNA, 285 bp, Glycine max
atatagctccatcttctaaatttattctatgcatacctgcggatgggctaataccagtaatgtacgtcaggggctaacctagtaccatattatgcttcttgagaactgatagcagcttctcctcttgctcatcgacaatggagccagatgattgaggccgtactcgaatcaaataaacatgagaatgcaacaactaggaagcgatcctatgtccgttcccaacgagcagtgacaaaccaaatgttcgtaatatacttgtagtaacattaacgattgtgggggggg

SEQ ID NO: 95923 - DNA, 354 bp, Glycine max
  unsure (1)..(354): unsure at all n locations
accttgacttggtagaactctctaccggtttgatttgttcccatgcttactaaagtgagagacaagctgttgcaataaaactcgatatatatgggtggatggatgaatgcatgatggaatgcatatgacacagatgcaatctaagaattgaggtgtgccggcgaagttgtcctcttcttagatataatgtctaggggttgcgaaatgccccacgcacgtntttaagaaagcgacacggactctccgttggcttatttacagcatggattacgacagaacccctatgcaatgcctttgcaaacaactcatgccggaatgtgcgctttatgacatatttactcgacataatcctaa

SEQ ID NO: 95924 - DNA, 420 bp, Glycine max
cttatccaagctcatctgttgtggtatctctcttctcatggcttattccttatggaggggacctcctctcacctctcaccctttgtctttcgctgcatctacatggtggaaaaccaccattaaaggatcccattgatgctcaaagatccagcctcgatagaaaccccactagcaagatagcatcactaggggtaagcctgctgactataccttcaaccaaccactggcgagattctgtcacggcccccatctaagcggtctgttgcaccagctacccttccctaacatgtactggaggcggttgccgaggcttcatcctctatagaactccggagtctctacatgacctgcgagatggaatccatttgatcttttaaggccgagacatccgcctatagtagtcctacacgcctgtcatac

SEQ ID NO: 95925 - DNA, 414 bp, Glycine max
tgtgatggttgtaaatataccacagaagaacgctctggaagttggaaccttgctggaaccactataataagataatgcatcaagctagtgacgttaaaagagcgcttactgggaggcaacccaactcttctttcccttgtctctttatcattcttatctcttgcatgtagttaggataattgcttgtgattgtgattaattcttcagcttgtttagtagacaacataggggtctttaatcctatgtgaagagatggacacaagaaaacttacaaaattttttcagttgtccatctgctaagcgcaacccttgcgctaagtgctatgtcttcatgcgctaagcctgagcttactcgcactaagcgcttagacccctgactagttggctgaatatttcggctaagcgcacgtcact

SEQ ID NO: 95926 - DNA, 387 bp, Glycine max
  unsure (1)..(387): unsure at all n locations
atctagaggaggagctgctanngttcatgaatgaagccatggagcaacacagatagggcttatacaaaggtcatcatgttggtcaagctcttcaacaaagatcttgactatgggctctgtgatccatttaatgacgtgaaggacgatgaattgcttgatgaacaaaaagtggttgtctcggatgaggatgtcagcgaggagcaagatgtgtgggccaatgttcacgctgctccttctttgtacatttatatactacagttcgggccataatggctttgtaactcttgacaattatttccttctatatttaatgtattagccttgtttctactgacactatgtttgagctatatgtagatgccttttctgcacaatgctctgttgctt

SEQ ID NO: 95927 - DNA, 383 bp, Glycine max
  unsure (1)..(383): unsure at all n locations
ctagaagtgggtgtgatgaaatgcgcttancttatgtaactcggcttaacgcgacgtttacaacacatagatgtctaagttactttggcttagcgattcagcctcgcttagccacaggtagttcatcaagaggacaagtgttcatcctcaaaggatgaactcgcttaacgcggtaagcgcgcttagtgagttcttcagagaatgcttacgttcaatgagtattgatgaactcgcttatcgtagcatgcttgcttagcgagttcatcgcgttccccataaaatgcagaacctcacttcgttctcttgcactattcaagcctcttaaaggcatatcagacatgcaatgtgggcagcatactcaatacagtgtacatgcgtatata

SEQ ID NO: 95928 - DNA, 250 bp, Glycine max
  unsure (1)..(250): unsure at all n locations
acaatgcatacacataaatagtgaaaacacaacattatccttcaccaacatgttctctaactgattgaaagaaaactaaatttagagtttcttaatatccacaggtatagnccatatacataaaaatatgtgcataactaccaaataaaaataagactgcaaataaagggccatcaagcaactcttacttatcacgggataaacaaataaacaaaaccctctggaaatataaattttctttgcacaacaa

SEQ ID NO: 95929 - DNA, 354 bp, Glycine max
cctcctccttaagcatgatgtcggagtgttctcctcgatcctcaatgtcctacacggatgtactaacttgaatctacaaatgaggacatcacctctctcattaaacctcacaggggtcactacaaattcttgaccatcgtgagacacttcaaactactccagttgacggcaagacataaatttccaaagaatgtaatagtaccgacagtgaactatctactggctccatgtgcactagagtgtgacacatgtacaccgacatgtctgtctctcaacacagccacactctttctatctacctactacgccaagctcacaaagagcacgggtccctcaacatctcctgaccctgaa

SEQ ID NO: 95930 - DNA, 392 bp, Glycine max
agcttgctgtggagctttatggaagttggatctttgttcttcaatgaggtccttcaatggtggtgtccaccatggagatgctgcggaatgaataggagaataggatataggatgcaccatcctctatggaatacgccatggaagaatgagctttaccacctagactgcgccgtggataacaagtttggagaggattattctctgtacgaaaacagagacgataaaacataggtgggatcacaaaatgaataatgaaatgcggagagaagttacacttgatttgtgtctccaagatcttttttatctaacttctactgtgttcgcatgcattgtttatgactaagaacttcttcaaaatcttttgaaacactccttgaaagcttttgaaaaac

SEQ ID NO: 95931 - DNA, 425 bp, Glycine max
  unsure (1)..(425): unsure at all n locations
ctgcgagaacaaagcattagaagttatttntacaatataatgcttatcttaacgcagaanatgtcatgctaatccctctgatttagaccaaactgatatgattcattcatgcacacgcgcatgtgtagaaaatatcctattactcatgtcaacatacaagaacattcaacatattctaattgccatacacctatatacattctgaaaaagagaaacacactttcatgctcaaagtgttgcgtcaaactttacacctaatttatatcctaaacattttgctatcacaaactacctatatacatttgaagtacaccatgcaaatttttattgcttctctcatatttatttatatgcatatcggagagcctattacatcctgcaatcattttgcattaaaagggcaattcatgctatcatacattcat

SEQ ID NO: 95932 - DNA, 453 bp, Glycine max
caaccactattgttgccatatatttcaaggcttgtaaggtcgtcatacaacatcacattcacaattacagccgcattttctgcagtaccaggatcacaagaaaacaaaaaccgcaaccacaatttaaaaacatgcccatcatatgaatccgtaaactcttacctgaactttaactcattgctagcttccaacaagcaggagtgttccacgctgattccatccaatcgaacaaacgaggtcatcaatccccaacgcacataatttagtaacctgcacaatcacatcatgacagagcaaattacaaaagactaatctctcaattcgcataaacacgacaccagcttactcacatcactaccacagaggaattaaagtttctaattaatcctatgcattacattcctcaaatcaaataatatataacgaaaaaactcacttgctgtcacaagcatt

SEQ ID NO: 95933 - DNA, 350 bp, Glycine max
  unsure (1)..(350): unsure at all n locations
tcgncacaagctcantcacaggcacaggtgatgtattccccatattaattaccctaaattgcgcacgccctttcttctttctcccactcccagtactcttcttcgcggtatccaaagcccccaaacaccccttcacaatgtcgtcaatgtaggtgaaatccctcgccacggttcccccatcgggagattcgaatatcgcaatctgcttccccttgagaatgtccttcgtgaagaagaagtacgccatgtctggcctgccccacggcccgtaaacagtgaagaagcgaagcccggtaatggagagcccgtagatgtnggtatagctgtgagcgatntcttcccctgctttc

SEQ ID NO: 95934 - DNA, 297 bp, Glycine max
acttgaaaaaccgccgcaccgcgataggagaagctggtttaatttaaaaccctcaaagggtagagtaaaagttcagaatgctgcaaatggaaaaaagccggctacagaattaaagcagaaagcctaaaaagctggagggagccaaagggtaccaaatatggatcgtagaggagcaaaaacttcctaaatggttttgttaaaagagcagaaagttgcaaaaaagtacaggtagggcgtggcactcctggtaagtgaccgaaagacaagttaccaagctggcacgggaaggggcggaag

SEQ ID NO: 95935 - DNA, 388 bp, Glycine max
  unsure (1)..(388): unsure at all n locations
atatgcagactnttctgatgatgaccgatgatcaattanggatcaacttgaaacttatgtgcttcaagtgagaagaaatgcttctttntccacttgtgaagatgttcacagcttggctatgaagatggttcacactgagaaacatttggtatttccattggtttataaacttaatgagctagncttgatattgccggtgtcgacagcatccgttgaaagagctttttcagcaatgaagattatcaagtctaaattgcgcaataagatcaacgatgtgtggctcaatgacttgatggtatgttacaccgagcgggagatattcaagtcacttgatgatattgatattattcgaacatttaccgcanagaagtctcggaaaggacacttg

SEQ ID NO: 95936 - DNA, 79 bp, Glycine max
agggagaagtatgatacatcccgcacgctgattgacacagcgagaactgtgacataatacccgatcttcgctcgaagac

SEQ ID NO: 95937 - DNA, 484 bp, Glycine max
  unsure (1)..(484): unsure at all n locations
gcacgcatacttccttcagagaagagttcttctgctgatgttctctntgacgtctattcaacggatcacttagaagtatgaaccccctccggatctgtgaaaaaatgcttcaccattaattaagcatgcaagggaattaaatcagacaataatttaaaaaagatacagctctccaaatatattctaacccaaatagaaagtatctgcaacagccgctgataattgaaaccagtttactacgctacatcggacaggatgngacaagataactactcaatgaaccattgcgtagtaaacatgacctgacacgactgagccgtagaagaccttcaattctcatagttatgaccacatggtgcatccggatatgctctcaatcctcatcatcattaatatctactaccctgctatataaaatacgcgtaacaacactaaccactctagtttatcaaataactaaacacttatttcctccaaattgact

SEQ ID NO: 95938 - DNA, 396 bp, Glycine max
cctgtttagtgaagctcacttactactacaattctacagataatcaaattaagacacacatctgtaccaagaacaacaatattatatattgaatagataaacttgccgatttgaaaatgagataattcattgacgtcatacttccctgtgttccacagtttagaatcctggatagcctacagaagaagtccgagcaataatgagtatttagaaagaaaacactcaactctcaatcatatacttatgaaacaatgcacttatgcatatatgtaactgtactacatacgaagccaatatacctgtgtgaggaactatatacttttcataactgagagcccttagctagtgcaatacattattgactgatgactatattgcagttaattattaatatac

SEQ ID NO: 95939 - DNA, 470 bp, Glycine max
  unsure (1)..(470): unsure at all n locations
agcttatcctcatctgatgcatggaagccatattgaatgacatgaaggattctcatgatgttaagttaatagagtttattttatattttaaagaaaaaagcttatagattaaaaattagttaagaaaacaacaaatttcttatattataaatntaatatgtgtcactcggattaagtcatctattttaactattgtattcactactttaacaggtctcttggctaatcctaccagtgcaggaaaaactcagttacttgcacctacttgctccccaagggtagcggtaagcaaattactaatattataaaacatatatacttgtagtggttaccaaaggtatggtgataaaccccatttggccttctatcggttgaactctgttaagcattcctgttgtagtcgtatttggcaagaccaaaagtttcgattctacctacattggctcaatcagatgtggaggatcaagatt

SEQ ID NO: 95940 - DNA, 419 bp, Glycine max
tgcaagcttgagcaagcccaaccagtcaaataattgttcatatcatctgctcttaagatccgaaagagaatgccgaactaagatatataaatacagctaccagcgctgttgctaaggtgaacctgatgcccccatctgacctcaaccaaatgaatcattcaaccttagatatggtacgcaaagatttgggaagtatggacggtcccatgatgtgtaaattcaaaatgagcacttccttcccaccatatggcttgcctcccaacttacaccagccaatgtggcgtacactcctaaggaggatgtcaataactccgctcccatactcattgaaagccaacaacctcaatctgatcatgcacatgtttcttacaccgtggaggagacacatgatatgcaccaccacaatctagcgaactttg

SEQ ID NO: 95941 - DNA, 205 bp, Glycine max
gtgctcagacgggaatcggaacttagcactacttaactttaatgaacacgctctatattgagagatccttggacttacccactaacacaccaaactctatttcttttaaacaagatgacagcggagctaaatatttctacctcgacctggagaactaggtgaccccacttactgaattgcgatttcaacatttttgctgcttgat

SEQ ID NO: 95942 - DNA, 372 bp, Glycine max
  unsure (1)..(372): unsure at all n locations
atggatccatatacacggaacgatgagtcaaacataaatcgacatacaatattaataatatggtgttaagggaacacaaactttnttcatgaatcatactatataatcaacacgtctagagaagatatattcgctcattatatttattagggtggttttcatggagggacataacattgtgagagagaacgaacgtactcgctatgttccaaaatatataacgtccaaggttgttacaccagtcttaaacaatatacctaacttgttgaatcttagagaaaatattagacaatcttctaatatatcttttatatctctaatcaataatatagttattgattcttctatgcactactctcactcagaatatat

SEQ ID NO: 95943 - DNA, 324 bp, Glycine max
atctctggaccagttgtatgttgattcaggagttttaaatgcacataaacattataaaaacgttactgtaacacatggtgaaaattttccttgtgaaccacaatattgttctcaacaagtgatcatcctctgaattacagaatccagattgctaacatactataaattactgaatctagatagatgttattaactacacaaatacttgataacgaatagactaattgctacacgcaatctaaacagtatctatgcaccatacatctagtactgcacaaaattctagacagtgaaatgaagtctacctcatatgagaacatgcat

SEQ ID NO: 95944 - DNA, 452 bp, Glycine max
  unsure (1)..(452): unsure at all n locations
agctttatcttagattaggaatattgtgttatgggcctttgttgggcttttgtgtttcttctattattgtgtaactagaaccttgcctgacgaggaatggtgaattttctgtagagtaagcttatgagtctctcagtctctcaggccttttaatgcacagcctactcacccagtttttagtgatagtcactggtggaaaggagccaagagaattcatggatttctttggcgggtaagtcacaaaggccgcttacaaatgctagaagattgagattgggattatctaaaagtgatttgtgcattgagtgtgaatcccatagtgaaagtctcatatgacaccaattcggaaccattctttggntggtcaaaatttggagctgctcctttgattacatgattggcttgaatcggatcactataacttccacaatgttgctctgttgggatagttg

SEQ ID NO: 95945 - DNA, 222 bp, Glycine max
gcagcacgctagctattaaccaaatggacttactctttactattttccttgatagccctcttgagcttggtttcctatccttgatctgaagctcactacgagccttatgagaaaaaccatgatatcaccatatcctctacgaaatgtggagcattggaattgtcttgggaataggtgcgggggttatgtgtcattgaataacactgctagatagccatgctt

SEQ ID NO: 95946 - DNA, 420 bp, Glycine max
  unsure (1)..(420): unsure at all n locations
atgaccagactacttttttatgtcagtatacataaataaattgtatcttgcgagagaactgacaaaacttattctcattaaaccatgagagaacagagagtgatttatacaacacttagtggaataaaaccactacaaacattgtatggaatgagaatattatattattataacgataaacgaaacgacttactaaattgaaagaattataaaagacttaaaatgtgatgttattcttattttgttctcacaagtcacaataccctttgaattacaagcccattaatattgtttcatataatataattagatgtatancttgctgaaacacttgtcttgaattaataatcttatgtaaaatatctcaaaacatattatataattttattggtgaactataaagtttaatgaaaaatgtat

SEQ ID NO: 95947 - DNA, 453 bp, Glycine max
gccgcagcttgcttctacaatagacgcgcgggatttacttgttcatacatacattaacacacatctgtctttggtgaacgacattttatgagatgcatctactttcgattgcagagaattcacttatgctacttgcaaaactatccaacatacatattatgcaaggcaccttgcctacctatctatccatacacacatatttgcaaagcattttttgccacctatcaacttattttgaacgacattcttgctatctgatcacattttattcacatatatggtcctacaccttgaaggcagcttcatgctatgacattccacatattacactcattttaaagcaatttatgtacacatcttggagagcaattttgattactattcatattttgagagcaattcatgtttaattcctatatgataacattctcggcctattacaatacatcacac

SEQ ID NO: 95948 - DNA, 315 bp, Glycine max
  unsure (1)..(315): unsure at all n locations
tggaatatgtgcatcaacaactattgatcctcagaatgcgcccacatcttgcgacaatacatattgagatggttcttatgacaagtcgtccctatgtacctatcgtaatcacgtaccttgaatttcggggggatgacgacttccgggactaaacaaagatcagccatgtctgcttacggatagtcgccaaagccttcaacagctctcaatcactctttgatgagatcgagtntcctcttttctttcgctgccggtggcggaccttctacggacaaaaatattggctgtgttagggggattcaggctctcccgtga

SEQ ID NO: 95949 - DNA, 450 bp, Glycine max
  unsure (1)..(450): unsure at all n locations
gagagcaccagaaatgcctcaattgtttatgtttaatgnctgaacgactacatcgaggtagagatgagttactcacgctcgaggattanaatgagcatgtgtagggatccctagatgatcaattatgagttattttgggctgcattatgaatcttaaatttgttcttatgttttttattatcacaaactgattgtgtttgacagactcaattatgtctttatgtgaaattgttgtgaatttgatatgttcttgtgttgagtgtgaaccctaaaaattgagttttttttcttcttattatggattgcttaaattaatattatgatttgagtgcgttaatattcatgtataggaactatccttttccaaatattcaagtttctcctcatgggttgagaattaaggtaatttaatttcttgtagactaaatttttgacttctttacttgtctt

SEQ ID NO: 95950 - DNA, 418 bp, Glycine max
cttaattcatcgaaacatattaggttcattatcttttaatgtttattcacactaagagtgcgtttgaatagagaatcttaaccgacgaaagtaatttatcagagaatttacacttctttaatctaaaattcattgtttgaatgttttttttatgaagaatatacatttttggaattttaagatacaattttaaacaactaataatgtgaaattttaatttacttctaaaatgtgagaaattgaaattctcttcttgatagaagaacctttcaaaatgtttgcgtatcttctttataaccttcatcctctcttccacctcagagttctctaaatcttattgtctaacttgcgactctttcctcacgccgatgatcctcttttctaaaaacaccgtctgactctcaaatgtctatcgggt

SEQ ID NO: 95951 - DNA, 401 bp, Glycine max
gcgggttggagacaaagttagtgttttgataacgaagagatgtggcggtgattggatttggtccaccatgcccctccgagtatcagctgggaaaatggtgagaggaggaacgccccggcatttacgcaacgagcataatgtatacctttacggagttaaaagctctatagatgggcctacgctttagagtcgttccttatgtgaaggtttgggtctattggttatgactcctaatacaaggatgcttcttcatgtgatctacggtctctacccattctaattcaactgggtgtatactactttatatctgaaacggcagatccgaggaccagtccaccgaaggtactaatacctgggaccccttattaacttgaacacgaaacgaatcatactgaatatga

SEQ ID NO: 95952 - DNA, 408 bp, Glycine max
acaccggctgaaaccatgcctcacatatacctccttattggatgtattggtggaggatacctccctacttctcttccgccatgacttaggaagtcttcttcttctgtctccttctttacttttcttgcactcgtccaaatatattgattgctttgatttggcttgatcttttgattgtgctacattgaggacaacgtgttgtttaagtgtgagggggagggggagaagatcgttctttaactttgataggtattctaagttaattttattatgttctctacgttaagtttgctaggctctaagataactctggtactctggtgttatgtttgaagtaattttgttatctagttctatggttggcatttccctctttgaatcttgggtatgtacaggtaatgggtaatt

SEQ ID NO: 95953 - DNA, 316 bp, Glycine max
  unsure (1)..(316): unsure at all n locations
ctacacacaacanacaccgcaattgagagcaatctcatcataagatatgacactcaatgaacttatatatgtgcctgactcaacattatgagttgcaagaacatagtcacccaggccattagcgactctctcaagcatgaaagaggagcagtcattgaagcacttgtgtgtgtcctccatggtgtcgtgaatggtgaagaatagcccaaagactcagccaattttgtgtcacttgacatataaacaccccctgactagtttgaagcccattgggatttccatggtgtctgcagcctctgcagccagcaagaggttc

SEQ ID NO: 95954 - DNA, 389 bp, Glycine max
tagctcaacaactgatcataaaatagccctatgtctcaacggtggcaacgagaaatcatgtaatgggaatccacagaaggataaccttcacccatagaaccaagcaatactaacatcctttagaaggatccatgatgcttctcaatgaataattgtttaaaccgagaaacctcataacatcattgagtacatataccttggctctattagctcctataaaaacatggagtggatcacactccgttatctccactaacgggcaatatggatgcatctggaccacgttgggaacaccggctacatccaaaggaaccgccaaaggactatacaccagtttgcaaaattaactcacagatgatcatgagataatcttcctcatcaaagagtgg

SEQ ID NO: 95955 - DNA, 409 bp, Glycine max
  unsure (1)..(409): unsure at all n locations
atctgancatcacgactngataaatgccaaaacaaatatggcaaatgaagagggtgagaatgagggagaagcccatgctgtgactgccattcctatacagccaagtttcccaccaacccaacaatgtcattactcagccaataacaaaccttttccttacccaccgcccatntgtcccctaaggccatccctatatcaaccacaaagattgtctaccgcacttccaatgacgaacaccacctttagcacaaaccgaaaacaccaaccaagagatgaattttgcagcgagaaagcctgtagaattcaccccaattctagtgtcctatgctaacatgctctcatatctacttgataatcaattgtagccataacccagccaaggtcatcacctccattctccgagatacac

SEQ ID NO: 95956 - DNA, 388 bp, Glycine max
tgggtctaaaaagaggctaactgatcataatgcgttgacaaacgcaacaaaactggggcaaatgaagaaggtgagactgatggagaaacccatgtagtcactgccattcctatacagccaagtttcccaccaacccaacaatgtcattactcagccaatgacaaaccttctccttacccaccacccagttatccacagaggccatccctgaatcaaccacaaaatccacctaccacccaaccaatgctaaacaccacctttagcacgaaccaaaacaccaaccataaatgagtgttgcagcataaaagcctgtagaattcacccccattctggtgtgctatgctgacctgctcccatatctacttgataattcaatggtaaccataac

SEQ ID NO: 95957 - DNA, 211 bp, Glycine max
ccgttcttcgacgtgcttcattcgttcttcatcgttcttcgatcttcaatgggtaagtacctcgaaccaagcttttcgattcattctatgtacccgtagtggtccacattgtgtttcgagcatttttattctcgttatgtttactttttatacaccctgttgacgtgcttaagccattttacttaaggcatttctcgcttaacttaaaaat

SEQ ID NO: 95958 - DNA, 355 bp, Glycine max
tatgactgatattatctttatttgcatacaatattgacgtattggtttgatgactcaagatctattaccaccctccgaccaccatggcattatgtagtataggctgcgcatttattctaagactatccaagctgctcttttttggaattctcccacattattcatgttttatcactatttattgaatggcttgaactattacatggcgagtatgttcgcgtaaggacactctactctaatggtaagccacgattcctaacattgaagcaagatttgcattactggccaacgtgggaatagagatttactcctaatagtgcgatgcggcatacaatataatcaagggactgaactg

SEQ ID NO: 95959 - DNA, 278 bp, Glycine max
ttggacactaatgaactttatttcatgtagtacttcttttaatataattgctcatgattgtattacttcttctactactcttaatgtttgttctacactgatcacctattgcatgatcatatgaaccattaatttagataacacacactctttttgttcttgaaccgagaagaatacctaatcgtgattggactataacttgacaataccgattatgtataagccaataccaattaagctcctctaattctttaacgctaatgttgagtattataata

SEQ ID NO: 95960 - DNA, 394 bp, Glycine max
gctagcaagactatagttggtgtgattgagtcttgtcactcccttggagtgatgcataggatgttaagcctgagacttatctctctgctaatcagcaagaagaattccctcttatggcaataaataatggactgactgcttctttcaaaccaggttcagcaaaatgttccattctctctccccctcgtgcaataaacatgtatgttcaggtgcctactcttcgattctattaagagagtcgttatggcatccaaagaaatctaaagggtttgataaatttgttttatgggccaatagttgaatgagtttgacacaccaaatgatagatgggggggagagagagagagatagagagagatagacagagatatagacagatagattctcactaaca

SEQ ID NO: 95961 - DNA, 445 bp, Glycine max
tccttagtctattaacaattatttattcacttactaaacgtaaaacttaagttaatctcctctttttaatataagttaatctcctcttataaggatataaaactcgaatatgcaattgctttatctaaagacgattcttcttctttgtgtttaagattttgtcagtgaaactaaagcctggattataggattatattttatattactctgaatattgtgtttaatgccttaaaggcggaccttgctaggattggtttccaacaagcaattagttattttgtttttatctatgatggtaattccacacacaaaaaaagggctaatcctctatcccttgatttagggttttttttgtacattcatacacttggcgcaacaactatgtattgtatctttaccgtctaaacataaaaatgtgtgccaagggcacgagttatttctattt

SEQ ID NO: 95962 - DNA, 473 bp, Glycine max
  unsure (1)..(473): unsure at all n locations
agcttatgcgcatatatccttattattcgtctcttgcacanaacatcctattaactagaaaaatgcacccatatacaatcaaggtagcttcattacctatattatttacatgtacttccaaggtgtatttgttatttacatcacacacgcctccttggctgaagttacacacatgcatactcaaagcattttggggtaccaaaaattgcacacgcgctcaccttggtatttctaatacctatacatatacaaacttcacgatgaatcttgactatctacacaatacggtgctacatttcatgcctttatatttcaagtttttgctacctaaagccgcatgcaaattcaagcatatttttctttgctgactaaaattgtattcaatataaaaggtatatatattgtttttgcaatatgggttcttcacataacatgcaacatattcatatatatatttcgtgagacatttcgac

SEQ ID NO: 95963 - DNA, 420 bp, Glycine max
  unsure (1)..(420): unsure at all n locations
aatcttanggaactgttatagacaccgctatcattgtcanactacacacatgagtccacttataggtaaacgatgaatntatcgcactcggggttacaatgaaatgtgtatgattccttatgggatcaaattgagatttattttgggatgcttattgtattataattctttctgtatgactatgcgaactgttcgagggattttactccctgtgttgtgagaaacatatttgtatgatttgtttgtgtttggataagatttagcatgatnnataattatattacgatcgtaaaattgtgatcgaaattgtgtataagtgatcaattaaatatgtgatacactgtgaaataacatgttgctctgagattataacatttgtattgaaatgagtatatctgcacagttgaatgtgtttattta

SEQ ID NO: 95964 - DNA, 419 bp, Glycine max
  unsure (1)..(419): unsure at all n locations
ngcttgaactaaattgagtattggatctcattttatatctgactactgacgacttacacatggtatggattctgacaacaaatcctgttcaaaatgacacacatgctgttattctggtacaacagttattcatctatggcttatactattataacattccgtcttaacataatattagagcgattggctcacatatatagcatggcttccaatctgattagagagagctcaaactctgttctagtagatttagtagctctcacagcgctaatctcttacttctcacccatagatccagttttgctggatataaaacctgcgtctttataccatatacatcaatatacgggtgaatagtaaaacctctgataaagttctatctatggtgttaaagaattactatttactagcaacttctc

SEQ ID NO: 95965 - DNA, 458 bp, Glycine max
  unsure (1)..(458): unsure at all n locations
tagcttgatataaagaaaaaattatgatttgatctataaactnatnccaaaagggtgatggtgttattaatacttcacataacattcgaacatattcttatcaatcaaattttaaagttgattcataaattaaatatgttctctctatattttattcttataattactaattatatgatacgaaacatgaatttgcatttatagctcaatacatactgcctagaaaaaatattgtcaactaaaaaatactaataaaaaaatgaaatatactggctgatcatcttcatattacattattagagaatcttagacattttattaaaaaagactacatgatgaatgaaataacttttaaaatatacaaattctaatcatagaattgtttgcatctaatacaataatactatagctctcatagatnggataagtaaataaaatccttttactaatagaataat

SEQ ID NO: 95966 - DNA, 274 bp, Glycine max
tgcaagctctataagtgcgggtctgggagacgaatgtctattgttttctatatgtgaagatgatagtccagtactatggatctggtccgaccatgccctcctgattctcagctgggaaattggcgagtggaggaacgcccctgcaattacgcgacaagcataagtaaaccttacggctttaaagctctaagtgggccacgcttagagttatccttcgtaatgcttaggtcttctgctttgaataataaacaggatctgtttcttaggtccggtc

SEQ ID NO: 95967 - DNA, 435 bp, Glycine max
  unsure (1)..(435): unsure at all n locations
tggcgcaagtgagagagtcgaaatctgaatggatnttatcttatagatgccatgtgaacttgcaaccaatcactctngtaagcatttcaccagaaataatagattgatcttgttcccaatcaagataggcttcagagacattgccagcatcttgatcaatgttataaaaactggtcaaactggttggaccagaaactggagctatggccggatcaagtatgctcgcgaatcggttatgcagttgactcggtcagaaccaatcaacttggcttgaaccagtaaaaaccagtaatgactcagtcatttgactcggcccggtctcatganaatttgaaagaaatgcaatgttacttgtctaaaagtcttaattctgaaatgcactacacacatttgcaatcaatattattactttgctgcttcacttctacacacatt

SEQ ID NO: 95968 - DNA, 421 bp, Glycine max
  unsure (1)..(421): unsure at all n locations
ctattcattccatgtacccatggtgtttcatattgtgtntcgtgtattcttattgtgatgcatgtacttattatacccccttttgacgagcttaagccatattacttaagacatttctcgcttaacttaaaaataaaataaatttccaccgatcgtttgaattgtattatccgttgacttcagttaaaataaaatccaactgttcggacgtgccgtaaccacgtgtaaattattaagaggtaaattatattataatacacacagtacctttagtaaaaaatacggaaaataatcagacgttactcttgagatactcatcctaacgaacgactaatactaaagaaactaatgctatatcactgctagacagtagccaaaaataagttaagagttgcattaattctactagaaatgatcattt

SEQ ID NO: 95969 - DNA, 310 bp, Glycine max
  unsure (1)..(310): unsure at all n locations
ctcttctaatgagtctcttgaccagacatgaagagtctataaaagcaaggctttgttttgcatttcaattatcttgaacaactcttacaatacaattctttacaactnttgaatttctttgaacttcttcttcttccttgtgcaaaagctttcaaagtttctggtttccaaaccttgaaaacttgtgctattcatccttttcattctcttctccctttgccaaaaagaatttgccaaggactaaccgcctgaattacttgtgtgtctctcttctaccttttcaaaagaacaaggactaactgcaaattct

SEQ ID NO: 95970 - DNA, 328 bp, Glycine max
  unsure (1)..(328): unsure at all n locations
ctatttaattcgcatatagatactgtcaaagtggtaaacattcatcancaccaccaaataatactctcttccataacttctcctggctaagaaaagcatcacacagataccattgtggctaactcattatgaaaatatggcacaggctaacgttcacattcaccaatgtaccctaatgggcgcataacactatgagtggcgtggcagactcatacagttttcttcttgacatgtggaagcactgctatgcacaatacacgaataatcaattaactctcagcaaccacgtctgttgtacaagacaagtaattcaatcgaaacaataaat

SEQ ID NO: 95971 - DNA, 449 bp, Glycine max
  unsure (1)..(449): unsure at all n locations
ggcaatagcaccccacctgttgttcttaatgtctcctgacccctgcgacatatcgcaggtaccactctgtggtcaacaataaaagcaggaagtatcacccttcaacacttcctcatctcaagcttgtaggattatggggtacccatcacatgtggtactaagtggcggtcgggcgatggtgcacaacaagctttccacattcacaatgcgcgcagaaacccaccatcccctgttgcccacctccaactgagctcacgtactcccacgtagcccatatcctcgtttctctcaacaccgggtccccatcaatcctctcaagcttccacaacatccaagcaaaacaacattcaaacagcataagctatcacaaccaagaaaaacagagcaaaggcagaaaactctgctcaacacatcaaccaaaatcacagcttntctcacgtacagaccac

SEQ ID NO: 95972 - DNA, 309 bp, Glycine max
  unsure (1)..(309): unsure at all n locations
tgagtatgacagtcaccgctttatgagcgctgtacaccagcagcgcttcgaggccatcaaggggtggtcgtttctccgggagcgacgcgtccagctcagggacgacgagtatactgatttcctggaggaaatagggcgccggcggtggacatcactggttactcccatggccaagttcgatccagaaatagtccttgagttttatgccaatgcttggccaacagaggagggcgtgcgtgacatgagatcctgngtaagggtttagtggatcccgtttgatgccgacactatcggccagctcctgtgata

SEQ ID NO: 95973 - DNA, 453 bp, Glycine max
  unsure (1)..(453): unsure at all n locations
cagcttattccgaggacagtttattatcttgcatatcctacatgagctggctcatataggccaatcataactatggagcatnttcttgagcaagtaccctgaactgaagctcaacttccattggtgagacccaacgaggctgcttcgcctgagcccacacctgtgcaggttgttacagagccagctgacccacaatctatagtggagaattcaccgtcttcttctgatcatgaagtagctcccacatcttcacctctgattgtcatctccgatgcatcatcagatgaagcgcgcgcccctcctgattcaccatctagagaaacatctgaccctactacttcatcagttggaggaatcgtctatctttctgaatcgacatttgagaagtagctgctctcaccgactcctcacattatacaatgaagacattgtagataccttaagacactatta

SEQ ID NO: 95974 - DNA, 382 bp, Glycine max
  unsure (1)..(382): unsure at all n locations
aatacgagactacttcatgctctcctctaatgacaatagcatcatgtctggcactaaattgctgggagtctgaagccatctcctcaattaaatttctggcttcagcaggggtcatgtctccaagggctccaccactggcagcatctatcatacttctctccatgttactaagtccttcataaaaatattggaggagaagatgcttataaatctaatggtgaggacaactggcacatagtttcttgaatctctctcatattcatataagctctctccactgagttgtctaatgcctgaaatatactttctgatggccgtggtcttggaagcaagaaattattntttctaacaatactctcttgangtcatcccaactcgtgat

SEQ ID NO: 95975 - DNA, 401 bp, Glycine max
agctaccatcaagtggtaatcagatcataatatctacttgtacgtgctccttatacctccttaatattatagctgtaccttcacttccattgatgattcctcattattctccatgtatctcctcacatgtcttgtgataaatgtatctaacatgaatctttagattttccaccaattaaacttgctataaaagctaaatctgaatttctatggatcaaaattctagttcttgttcttgaaccatgaatatcgtgagtttaagttcctttcagtttcgcatgatatttttgtggctgagacctataccatatatatcttacgaaagtattaatgtacaagacaacctcaaaaattagaatgacttgctcacctattgtagctttgtcatataagtcatgtct

SEQ ID NO: 95976 - DNA, 367 bp, Glycine max
atgccaatccttaccctcttatagcaaataatagaagagatggagaatttccaatctaggaggacactataaggagagaaggaaaattttcaattctttgaaaaaagagaggataggaaattcccaatcatagagttggagaaagcaaatataagagaaagataattcccattctaagaatgggagaaagaaaaaatgagaagtatcaatgaataaagcttctggtcaaagaaaccataataaatgtgccgagaggtccttggaccatacgatatctgaacaatacagatttgtcaccaaatgatcaaaagatatataaggagaccatgacctataagtggttttttcctttattaccaacaaaatc

SEQ ID NO: 95977 - DNA, 437 bp, Glycine max
ggatccttaagccaccgcggctgcagcttaaattgaattaaacgttcagaatctgctggttatcgactactatatatgtggatcgattacacagtgcaaattttgaatttaaattataatatctgttgtaaatcagttttggccaccgtgaatcgattacatcctctggtaatcgattaccagagagtaaatatgttgaacaagactattctaacttaccattcttggccaaaccttttgcaatttcaattggaatacccttcctatttaatatcctttctaagactctatagactgtcttgatcatccatctagaatatctttaatttctctgtctagaataaagctttgagactcatgtgaaactttggcatcatcaatacattcagtcttatcctttgtctacaaattcgtggagcctacatttggagccaaaa

SEQ ID NO: 95978 - DNA, 444 bp, Glycine max
  unsure (1)..(444): unsure at all n locations
tncacatcaagcangttcatctcaatactcttatacaaactatagaattcanaagttggagaatntgcttggaaaccttgtagctgtgcttaaagtacgaattgcagaagatccacatattaatcaagtcttagaagctatagatcaagaggtatgaatctataattctacttattcaacgatgtaactatgatatgatactttacanagaaaaaacgttcttttaatttaggtacctacaaatgattctaccggtaaagatcatcaaactacaaacaatcttagctagaggtgagttgaaatatagtactatattttaactatatatatatatagaatatatcatcattatgttatcttaatagcaatcgaatgttataatttatgcttcagtcttgttcctttacttgatgatgatttggaaagcctcgttgcatggaccct

SEQ ID NO: 95979 - DNA, 466 bp, Glycine max
gcatgcaaactgctataaatagttcctacctattatctcttctattgcatcacctctcaaagagctgggaagaagaatgtggcattcacctgaggcgataaacaagatcatgcctttgctttgctcaaagaaaagctcactaaggcaccaggtctagcatttcctgacatttctaaaacatttgagcaaaaatgtgacgcctctggagtgggagtaggagctgtattgatacaaggtggccaccctatttcttattttagtgaaaaacttgatagtgtcaccctcaacaaccccacctatgataaagagctttacgccttaataacagccctcccaactagagaacatcacctagtcttcaaggaatctgatcttcatagcgatcatcaatcactcaagcacattagagggctaagcagctcaacaacacgcatgcatcatgggtagagaacctacagcaattccc

SEQ ID NO: 95980 - DNA, 436 bp, Glycine max
  unsure (1)..(436): unsure at all n locations
caattatctttaataacacaantcacgagaggctataacttattgtgatatacaaatccagccacaactcatcaccataactcaacttcatcataggcatcgcataggaaacttacaaaacataaaaagagtgcaacaacaagactatttctatgaatcgatttagaacatgttaagaactaaataatatgcatgaactagactcacattcaaaagataggctaagaatgacaagaatacatgaacaaatgtatctagaattcaatcaacaaagataaaaattcatcacaaacttataacataatgtgacaattactatgactaaacatgactctaagacaacatggattaagcgattacacttacattttggtgcttcttttctatcaatatttggaagaaattagatctaggtcagccaagatatatgatgaaa

SEQ ID NO: 95981 - DNA, 456 bp, Glycine max
atcttacacataaacgacatgcttattctttctacttataatgaactactgtacgttgtgatgtaaaagatttatgcacatgcgcatgctgaaaatatcccactatttatgccaacgtacaaagacatccaacacattctacccgccatacatatatatcttagaaaagaacacacattctcatgctctatgcactgcgtcaaaactcacacctaatcacatcctaaatatgtagctctcacaaactaccaacacatatttgaaacatatatcatacaggctgtcattgtgccactcacatctatgtatttgcactattggagagctaattacgctatgcacatacttgcattcaatatagaattccatgccatcatacattcatctaagaagcgacctctatcttcattcatgaagatactcattcacactttgtaaagaataccacgccatatg

SEQ ID NO: 95982 - DNA, 468 bp, Glycine max
  unsure (1)..(468): unsure at all n locations
agcttgaccggcaaagcggaccatggaattgtttcagngntattgcttttatctttccacgagacaacaaattcatgttcaaattctcctgtttagtagaactgtgtttggcagaagtgcgcttagaaggtgctatgacagtctcccggatgttacactgagggatgtcttgctttggtgaaagtgcttcaagtcgagtaccagttggagtaattgtgagcacctgtggtgctaaaatagattattgtcaccgcattattttctttattagcaagtaaataaaatcagcattgaagttgtttgtgtcctttaatttcaattcttaaatatattccatatctattggtttcgggtaatgaaattgaaccattttcaacttcatgtttaccatacagaaatagtgacactacataatttcttctgatgaatatcctttgtggtaagatacaactgattgtatctaataag

SEQ ID NO: 95983 - DNA, 414 bp, Glycine max
  unsure (1)..(414): unsure at all n locations
ctgagacgttcgttggaaccaatgttgctgatatggtttgatccanccatagccaggaatgaaaggaaccttggagtaatctccactgtcaagaaagtacagattgagcactgatttattntcaaaatcagtgccttcaactccttcaacctctaagttatagttcccaaaaccatcaattatgtgtacttgcggaggattgactacagataaagtgtttttcattccagcaatatatttcatcaccccttccctagagagggatccttcctggtcatggttgcccaaaacagctacccaaggaatgtatgatgcaattgcaggtgcaaatgccgcacccattgatttagctggatccgaagcatcatatccaaatatattatcccgtatcacaccaaaatgattacacaacat

SEQ ID NO: 95984 - DNA, 444 bp, Glycine max
  unsure (1)..(444): unsure at all n locations
agctntaacctcattgtctctctcagtctttatattngggagccaatccaatcctatgtcgcggactcttagccacttatgatagcctccgatgatcccattactgcttcccctaagctcaatgtcctttcttcacgccgcatcccatgccttgcgaactccttggagtacccttgcgttgtggtcactgaaaccccgtgtgatgaaaggcgtgatgctttcgactgatggcactcctctcatggggtagccaagctgtcttatggcgaggacgggattataattaatacaaccccttgttcccatcaagggaacatttggacatccttcgcatgaagatagaatcctgattcttccttccttctagcgagggaaccaattaacagacgcccctccatgctaaccaagagattggcccaattcgtctattctttttcgacgcac

SEQ ID NO: 95985 - DNA, 433 bp, Glycine max
  unsure (1)..(433): unsure at all n locations
agctntaggaattgaattagaacgttcatattctgctggtaatcgactaccatatagtgtggtcgataactcagcgcacattttgaattcaaattttaatagctgttgtaaatcattattggccactggtaatcgattacatgctctggtaatcgattaccagagaggaaatctctcgaagaacacttttaaacatgcattacttggccacacctttagctacttcaaatggaaatcccgctctatgtaatataccctttctaagactagagacttgtcttgatcatacatcttgaatatctatagattctttgtcttgaataaagctttgacacgcatgtgaaactgtggcatcatcaaaacattcagcttgatcttttgactacacaatgcatcttgcttccttctacattccgctaccattgaactttaa

SEQ ID NO: 95986 - DNA, 431 bp, Glycine max
  unsure (1)..(431): unsure at all n locations
gacactatgaaactaacctcgacgtaactatatgccttgtgtgaccagttacccatctagccgtgaatcacacatctgcacttgtcgccaaactctgtggtgtatgctcctctgccgaccaccacacagaccttntccattctgtgcaacaatctgaagcaatggaacagcctgaagcttatgctcganacatctacaatatacctcctcaacctcagcagcaaagataggcacaatagaacaagtatgacctctccagctacaggcacaaccccgggcggaggaagtatcccaaccttatatggtcgagtccttcacaacagcagcaacaactacaactgtatttccacaatgctgctggcccatgcagaccatacgttnctactaccatacagcatccaacgacagcaacaaccgcagaaacaacaaac

SEQ ID NO: 95987 - DNA, 53 bp, Glycine max
cttcatctgcaatgataagaatgagtatgattctaaaatttcttttttaagta

SEQ ID NO: 95988 - DNA, 259 bp, Glycine max
cctgaataataaaatcactaacacttattgtgtcttaaaaaattattgcctacactggcttgcaaaatactatttacttcatcactctaattcaataagttatccatgcaccgaaaattactttatggaagctggagagactatttcacgtattgtgaaatgacacaaactagttgcataagcataactttggaatttgccgcctggctaataaaatatataaaatatattattcttttatcaatggatcttggtaaat

SEQ ID NO: 95989 - DNA, 138 bp, Glycine max
atttaatcacaataatataggcacatcctgggccacttaactgacacacgactccacgagccttatctcgttcttcaacacggtcccataattctccagcttcacacatcaaggattaacatcactcttcacaactac

SEQ ID NO: 95990 - DNA, 331 bp, Glycine max
aataacccctccagtgccactcctgctactatctacgaccttcttgtctctacatggtccatatcttcagttacaatcagcataactccaactatgacttttaccagaacaggcgagcgaacttgcaccaacatatcactttactaaaccaacattctttcatcgtacgtgacaccaaattatgaagttccaagtcatggacggactgtaacgcaacatcgcatttcacacatccactttgcaccaatttgctttcaaattgtaggcattaacctcttcatccatactcgcattgtattgacagcctgcacacaatgttactattgtagtg

SEQ ID NO: 95991 - DNA, 238 bp, Glycine max
  unsure (1)..(238): unsure at all n locations
atatcatatcaatggcttgcctctaanatcattctttttccncaggaaaagatagctgatgctgtatcagataccatatctgatcttgacannattgagcanggaatcanggattgccttganacctaactctaaggatagcctagcctacntttttatgtggaaagttggccatanatatcatgcaagtatgtgctcctgtctatatnnctttgaatcagcattccgttccattata

SEQ ID NO: 95992 - DNA, 200 bp, Glycine max
  unsure (1)..(200): unsure at all n locations
gaggtacacttcctttctttgtcttatctgagcagctcttgtcgggacttaagaatccaacaagcttnagagtcatcaaatcaagaatcttgattgctcttaagtgtacatgtggctgacagtctcacttttaggtaacttcgtagaattatcacatgacatattatataatgttaccttagagcgagctcgtcaaatga

SEQ ID NO: 95993 - DNA, 353 bp, Glycine max
  unsure (1)..(353): unsure at all n locations
tacatagcatcaccatctatgtgntttaacttaatctcataaagtagccgtgtatgcttgagagagttccttgtctagaccttgtncttangatcaccaatgatctgagattctggatgaatgttcctcaacanatgacccaatggtactntgacttctntangtngatngtccatnnggtgagtggatgcaagttggtcttcattggacgtagcaataaacttggcgatattntctantttcatctctacanagaaactcatctagcttgacattgtggtgcaagcattttgtcattanatcttanatgaatggtctcttccacagtcaaggggtctggagtatacactcta

SEQ ID NO: 95994 - DNA, 223 bp, Glycine max
gctaaaatctataggaactcctaatcagaagccttgattttttcacacgggccactgaggccgcagtacatcaatagcgaccctgctcctgatgaggtaaccttgtggtgatcagatacattatagatcttatggcgtatttcacaacttgaggcaagaatcctggaacttaagatttatttcgattgtggaaccttaatccaagataaaggtagaacgtatt

SEQ ID NO: 95995 - DNA, 188 bp, Glycine max
  unsure (1)..(188): unsure at all n locations
ttaaaaattatcgaggcgccaataataaaatatggagtcagaatattttataaccctgatgnatgaacatangtctgcacggaaaatacattaggcactttcaaacattactagatgtgctgtcattctattacctgcgtgtgtctgtgatgaagccttcctatgaaccacacatgcttgtgcacggt

SEQ ID NO: 95996 - DNA, 91 bp, Glycine max
  unsure (1)..(91): unsure at all n locations
gataacatatnntgtgtggtagcccctactgccgcaatatgtttgtcgaatgggatgatacctctagaaaccatcaagagagatatgacca

SEQ ID NO: 95997 - DNA, 224 bp, Glycine max
acctccttttcagaatatgttctttcctgttagtactttgatagatcaatggattgatatctattcttccttgctccaaaacaagggacaattaaatctaagactactctacatatggaactaacatctggaaaactatatccttaccctatctaatatctaaatcgctctacaaataaaaaactaagtaaattataataatattgtagcctacattacagcta

SEQ ID NO: 95998 - DNA, 145 bp, Glycine max
  unsure (1)..(145): unsure at all n locations
tttgacagacgcgactaatctgtaaccacagtgtcgctggcccactggcngtattaagcacgcccattcggggatcactctacgctgacgtccttctcttagattgccttaagacgtcctctgtacatgaaaactccctgtccat

SEQ ID NO: 95999 - DNA, 341 bp, Glycine max
actaagtatcagatagtcagatttagatgatcagacactcagatcaagagaagtgtttcagatcagatccgatcagaatcagattcagactcaaatcagaataagagaggcttataaatagttgaaagttttcaaatgataccatgatttctaacatgtccaaagtttactttgtatcataccaatgtgaccgatccatacaaatgattgaaagttcaataattcacattattgtacaaagtgaatgatcatgttgtatcatacctgcttgactaattaatcaatgggagccatctcctaaacttggatcatcctgatgatcatacatgctcctattctcg

SEQ ID NO: 96000 - DNA, 130 bp, Glycine max
  unsure (1)..(130): unsure at all n locations
tactatctcagccttgcatgtcaccttttatatcattcttanatcttgacgtcacatatacttgtctgtgagagtacgagctaagacaagtatctagtcatctatgcttcacatgtatgtgactgtgtca

SEQ ID NO: 96001 - DNA, 342 bp, Glycine max
tcaaagtttttattttgtgaatctgcaaccaactgaagaatctctgaagtgaagattggatatggagtcctaagggagaactccctactgatttgatcttatatcttttttgtgaagaactccgtatgagctatcttgtgactctgagactgagaaatccttattataagagttgggtactgcttaaactattactatttctgaaataactggttagactctatgacattatctaactgtgacgctgtgttttacagacggcgaccatggagtgcagcgctgtgtatcactaattcgtactgcgatgtatttagacggtcttcgacctactactttaaaatt

SEQ ID NO: 96002 - DNA, 173 bp, Glycine max
  unsure (1)..(173): unsure at all n locations
gtatatacagttntattaaaaatgtaaatgctaatatatatacaaattttcatgagaaanaacctatatgcagattttagcttcttaaatacaatagagcttcttaacttactttcactcgtactatatataataagttgagtgtataaattatggaagacatgaaaaaatat

SEQ ID NO: 96003 - DNA, 123 bp, Glycine max
ccctagacttaatactttgtaactgaaattattagaatatatggaatacctatcttttgaatagctcatgctatagaatctttattcactgaatttgaaattaaccctataccctggcactca

SEQ ID NO: 96004 - DNA, 115 bp, Glycine max
  unsure (1)..(115): unsure at all n locations
agcaccgagctgcgctatctcagtaagtgaataccatgctagctactgtttactttatntactttaaagtgattaactatgcgtactatttttctctctataggctatgataatt

SEQ ID NO: 96005 - DNA, 193 bp, Glycine max
tttttaaccctgcatactgtataatgatagatgagacattttattcacgcgcatacacagctggtaagacatccgaataagactttattctaactcttcttccttgctccttctaaccaacaactacaaattattttttcatttatttatgcttaaacaaaacctattcactattcatcatttctagctacat

SEQ ID NO: 96006 - DNA, 337 bp, Glycine max
tcgtcttagcatggctcctgtgcttcctgtgtgaactgtatagtttaaactgagttggcagaaaatttagggctgcgacctctgtgtacctaactggcttctttcttatcttcctcttatgcatacacaaacatgcggatcagaaattaatcctgattgtgaactatgggaatagatttacactctggatacacaagtggtattactttgctactggtataaaaggggggggaggattcggttctttaataaggagtggggtcagtaacttgaacaccaataggccggtggttgggattgtttgtagtaggtaacccttctcattccttacctatta

SEQ ID NO: 96007 - DNA, 160 bp, Glycine max
gctctattttttaaacttacatctcaactaagttccataacgacacctgttattttaccactgtggcttaatccactctctactcttattctagaatgctactaaccctctgatctaatatattatacaacaattttcaatatctcccacaggctgcttt

SEQ ID NO: 96008 - DNA, 125 bp, Glycine max
gctcagctcacttgatgcctttcttgtgctgcgatggttggtggtaaggaattggaccggttggaaaatgttgggaatggtgaatggaaaaggtcctttgtttggtgggtgtcctttgtgtggga

SEQ ID NO: 96009 - DNA, 231 bp, Glycine max
catcataaacatctccatatagaccaatccactgcgcaaactatatagtatattatgctagtctgataatggcaaggatcttctaatgcacgatctatgagtattagtaaaactccagctgtgatgaattatgaaaaccactgtttattaaagataagaacagtgttggcatacgtggctgagatatagtctgcaagatatcacttaaccttagtacacgttctaaaaaat

SEQ ID NO: 96010 - DNA, 242 bp, Glycine max
  unsure (1)..(242): unsure at all n locations
gggctgggatatttagagaaagtcttaatgaacctncgatagaaacttgcatgtccgagaaagcccctgatacccttagtatttactggcaatggtaacttctctatgacattatattntngcttttgtccacctcaatgcctcggtcgagattttgtggtcaacactatctcttcttgcaccatgaagtgacacttcttctaattcagcaccagaatttccttaacacatcatcgcaacac

SEQ ID NO: 96011 - DNA, 123 bp, Glycine max
ctaactttgtcccttgtatgaaacagaacactctcatgcttagaaatgaggtgggatgtcaagcaagagaatctctggatggaatatcctgctgttttttttcagataccttgcagggtggac

SEQ ID NO: 96012 - DNA, 365 bp, Glycine max
  unsure (1)..(365): unsure at all n locations
catgcaccagtattccaccatctaattattattnttgaaagggtcanataacatgattcactcgtggaccacttataacttctccttcgagtntattagaaaatatcntattaatattcattatataagtctcaatttcanataataccacctggtcatatgacagattacgtgataggaaatatcggcgccatgtattctagacgtgcactaaaggaatgtccatngacncacagtagttcattcacacatgtaatnaatgagtacttaattataaataataagaatggactataatttgtacagaatgtaaagatatanctatataataatgatattaataacgttgattactgggtatatat

SEQ ID NO: 96013 - DNA, 267 bp, Glycine max
atgttgctgttttgttaattcagtgtgtaaacaaagaactagtgctgtttgataaggttgcgcttacattggcatataacactttccatagggttccttagacgcgaggatttacatagaggactggttggatcatattgacatgaaagattcatcataaagcttatgtgatattgctgtgactggcatgacttgtgataagacagtgagtgatgcctatggtgggatgtgtgagaaagattgtcactatatgagttgagggtcttt

SEQ ID NO: 96014 - DNA, 277 bp, Glycine max
  unsure (1)..(277): unsure at all n locations
gtctgtcagtggggtcgtagtttgagcataacccacatccctnaattggtaataacgtcacagtgtcgagtatctggcgtgtggttcattaaagcctgngccttgatcagcttcttttagatgtaggtgaagntgtctttcctatgggccaatattgcatcgacgacaagcaacgntngaagntcctattccngggaaataaaaggcttatggacanacattatntcatatggtgtagtgtcggtgccgacattccacgaggtattatacgaacact

SEQ ID NO: 96015 - DNA, 289 bp, Glycine max
  unsure (1)..(289): unsure at all n locations
tagcttatctccgagtgaacacagattgtacacctaattactgacttatattccaacctaaaaagggtactcgtctattcatctaattaccttacctatatatctcagacatgggcttcttctttggcttctgtgcgtggcttactctgcaacctttttattgaacactcctctcttcaatacacctgtctcaagtgtgaagactgagctgacattctccacaagcttctgatggaatcttcatgaatagacatcgcgangtcttttcaacgatagttgacgcatatgc

SEQ ID NO: 96016 - DNA, 186 bp, Glycine max
tataatctaatgactttaacatgataactattacctcattaccagatcagataactcacttaagctattttccttaaccattctttactagtacttctatttacgttctacatcgctactcactttaactacatgagtattcacgagtatgtacattcaacttacaactcatcttttcactccata

SEQ ID NO: 96017 - DNA, 299 bp, Glycine max
caacaaggaatagccacatctttttttttcaccacgcaccacaaaacgactccttttagaacccatgagggaacactaatgcatttaccaatctaaaacaacttaggctctgacgaaccaaaaataaccctcctgattcaaggacactgcgaggtctagcattaactctgtcaacactcacacatactcttttgtggccaatatcatcattgacactgagcacgggactacttcatgccttttaacactcagacgcacggaccaaactaaacaaacacaccatagttatcctactggca

SEQ ID NO: 96018 - DNA, 396 bp, Glycine max
  unsure (1)..(396): unsure at all n locations
gcacgagagcacttgggtagagagaaagagtnaaagcttttattattgaatatgncggnaagacgaacggacaataatgcaagatgaagacgatcgaggaaatcaaactacctgtttaagacctctgcggcagaaccataaaagtatgatttaaaaactaaccattgaaaggaaaccttgagaaactctttgatataaacatactggacatacaataggatcattcgaagttttggagagaggacctcagtattgaatccgtcaagacggaacgtacaaaactggcaagtaccttgaatagggacgtgaaatatgaactttcaacattgtacggaaatcacacggagcaacgaagaaccttgtacagttgaaactgcactatttaaaattctctac

SEQ ID NO: 96019 - DNA, 298 bp, Glycine max
ggtgtggactgttgggaacactagctatctttttttactttattacataaggagtcgaaatgactgtttcagcaaatggcatacttggctattaattactgcacagcactgccaacttggtaaaaaaaaaatgtgacaatggctacacttggagttaattacctgcacgcaatagcccactaaccgactgtttttcgttatatttgacagtcccacctgtctcaccctccatcatattgatttagaactttaaaacatgtatcttcttgatcttgactcgagttaaagctctctttta

SEQ ID NO: 96020 - DNA, 290 bp, Glycine max
gatgaatgtactgcccagcaatgtgctattttttacagttctatactccttgtacagcacctacgagcttgcgtggttaagcaacctaccgtgtctactataaaaacattaaatttggaatgaaattcctaccatcggttatgcatacttttacagcagcgttacataatgtctaatgatgatgccctacgcaaagcccgtcgtatcaaataatcaaaggttgctactatcaaataattaaacttggtacataatcctacaacgtactgataggatgctaccagcaactc

SEQ ID NO: 96021 - DNA, 338 bp, Glycine max
  unsure (1)..(338): unsure at all n locations
aattggagcanactatcacctcaaacaagtctatatcatcaatctatacttgctcanactggttntatgcctaanattncaccgaatcaaaattnggctcctcaacaccccaattttaccctagaaatggttcttgccttcactntggtcannttgtntcctctctngcacagcccaagggttctcataagtcctaaatgacatntcaaactangaataactcactntaacnnctcattaccactgaatccagatttggcctccaaccctcatacatcacacttttcactcacangactacattctacttctaacctangttaactctacctcatccc

SEQ ID NO: 96022 - DNA, 233 bp, Glycine max
agcacgcgtgcactatatgcggatctaattggatttacaaacatgtatcgatgaatcgcttatgaacacaaagttgtaccgctcatgcataaaaacatctggtaggctgatgcatcatccatcagttagagaaatcataaacttcattgagacaactcagctataatgtgctggatgcctgacaacctgatacagacatgaaatttctatagatcaacattgcattgtaatat

SEQ ID NO: 96023 - DNA, 251 bp, Glycine max
  unsure (1)..(251): unsure at all n locations
cacctgagctgcagctatcggtgctttggtgatcgcggctagcngctctctcgttattcgttatttagtatggcgnagcgctgtgccctaggccgggctccttacgctggttcggccgctacgatgaacgcctgagggggatgggtgacacctcaattctctttcttaaatttctgacttttgctgtacactccatttatattgcgcaaataacaacatagtcttatattagcgaaatactctaatatatt

SEQ ID NO: 96024 - DNA, 307 bp, Glycine max
tccaaccatgggggctatgcctggcgcttttatcgggtaacattaagaacttctagttcaacacttgcattggtcactagtactctgattgctattgcgaatattactgactttattgatgcaggcacctctggcacttattctattgaactctaattttgatcacaacttggattgggacaaactaattctatatctactctttgatgtcctgattactttccgcctgaattcatgtggcataagatacattgttgtgcgaatggacagatggctaacccaaaggagactgtattcatccaaaact

SEQ ID NO: 96025 - DNA, 223 bp, Glycine max
gagcctgcttattaaacatgagtgtgatgtttttgcttggaaattgccggacatgcaagtgttgtgaatcatactaatggaccgactttaaggaatggtaaggactactcatactcttctcactacacgaacatgtttcaggtttgaatgctacttgctattacatggaaactccaaattgatgctcgactaacgctcattaactccctgcgactctactttc

SEQ ID NO: 96026 - DNA, 149 bp, Glycine max
agaatcgtaattttgcgtaatatgagtggtgtaaacgatttgcgtacatttggattttcgacgaccagctgacttatcaaccgaagaagggcttcaagccgcaggttaacatttaggggaagcgtcccaaacgaacattgcacgattcc

SEQ ID NO: 96027 - DNA, 236 bp, Glycine max
  unsure (1)..(236): unsure at all n locations
tataccaagtggtatctactcaacccatgcanaggaaccacgtgtncagtgattagcctaacgaagggtatcactcttggataaagcaacgagtgaatccttctcttgcncaagnggcacctcatactccgtttcaataatatatattccactcacctcatgatatataacaagggatattntgtggagagctctcacccgtcaccctcttggacttggcttacatattaagatat

SEQ ID NO: 96028 - DNA, 102 bp, Glycine max
  unsure (1)..(102): unsure at all n locations
ggtgtctaggtacacatgtttgatgggctgaangtctacagacatcaagaactgctgctcctccacaggtaactttatgtcttagtatatgatgtatctgcg

SEQ ID NO: 96029 - DNA, 188 bp, Glycine max
  unsure (1)..(188): unsure at all n locations
atcgtttcgaacgttccgtgggaattcgcgaaggttcgaccgttcttcgacgttcttcaattcgtcttcatcgntcttcgatcttcaacgggtaagtacctcgaaccaagctnttcgattcattcaatgtacccgtggtggccacattgngttcgagtatttaatctcgttcattacttattataccc

SEQ ID NO: 96030 - DNA, 130 bp, Glycine max
tctgtataggcgaaaggcagcgctttttttactgatttgacccggtcttactcaattagcccacgatcaaaaatgcttgtctgagtcttgtcaatcaggttattatcccgacgctcaggaatttacatga

SEQ ID NO: 96031 - DNA, 165 bp, Glycine max
tctcctgactagtgagctgggggcctcatttgagctacgtagttgaatatggaaactttagtggattgagagagaatagaaatctaaactgtgagttactattgtacactaagtgaatggagaatcttcgccctttttttggggtaattctgattatgacctact

SEQ ID NO: 96032 - DNA, 222 bp, Glycine max
aactagcttaaggaagtatattttctataactgcatatatagcttgctcaaagattagtatcataataacttcagcatcttaacgggtcggcttctagttttgatcctttttgtccgccagtagaatcgacaccacgcacgagggttacatgtctcaaaaaccccttggcatcattatactattcattatattgattaacctttctatcttattatttccga

SEQ ID NO: 96033 - DNA, 110 bp, Glycine max
ctacgtctaactactcagacgggtacattttctgccaaaacatatggcacatccatgtattttaccaaatttgaaacatctcccttcgaaatttaaatttattaaattag

SEQ ID NO: 96034 - DNA, 220 bp, Glycine max
tcacgtgcttacgttctctgattggcatacccgcactgatctcgatctttacatccagatctaccattcctaacgacacgccaagataccatactggctgtgtgagccagtaaagcccttatataacactgcagctgcgcagatactcgcatacaaaacatgcacaactggtctgccgctttatactgagacgtcaaaaaaaagggctgaaccggagttc

SEQ ID NO: 96035 - DNA, 207 bp, Glycine max
  unsure (1)..(207): unsure at all n locations
cggcttacccgctaaatagcgcctcatgctactagcgagactatttttgtgtagacgcataatactggatgtataacattgtggatggaacccaccagtgatacagatgtgcgttctcttctaattangtgatgggactgggacagtngaataatcgctacactgtacattgtataacttatttagttaaactgctaaacgacttag

SEQ ID NO: 96036 - DNA, 299 bp, Glycine max
  unsure (1)..(299): unsure at all n locations
cccacatatgctttgatcatcttgacatcaantgtgttattttctgtatcttccttgctagctaattcaactacatcgatccttctcttgtctctatctatatggatgaactagacacaagtcttgatcacagtgacttattcatctacactggaaaatagacctgcaacatacaagtttggctgtgagggacttggttnacttgtgtcaaacccagagacattttttttcttatttttaaaagcgaatctttcccttattttttaaaaatgaagaaataaataatagtattatgaacg

SEQ ID NO: 96037 - DNA, 200 bp, Glycine max
acaaaggtataatctggattgtgatgcgattgccaaaactgagagaaaactgttaatcgctcactttccaggtgagtttatggaggatgggctgtttgctactgtatgaaaggaagcttgggagacacttcacatctcgtagagcgccatagactgatatgtcatgaaggagacaatatgtgatggatcctatgatcatt

SEQ ID NO: 96038 - DNA, 143 bp, Glycine max
tttttttctttcttctatgacacttcactttacagtattggggactctctctgtatccatgaggcccttactttctgttcgtgattctggaaacataagacttgctaaacactctaaccacactcatataaaattcgatcaag

SEQ ID NO: 96039 - DNA, 395 bp, Glycine max
  unsure (1)..(395): unsure at all n locations
agcaccgagctgcagcttatgagtgctttgacttaagggccttatgtatttcactggaatcacggagaaagaaaaggaagagcgtcataggaacctgaaagactccacaaaggctgataaactggaagatctcatggagaaagaagaagaaagaagaagaggggggctgaatgaagaggaaagggaagagtgacttgattgtgctacaagatctattcataagtacacagtgtcacagctcattataacaagaactcttggaacttttgaaaacttctgaaactttnataaaatttttaaactttttgaaatttttaagattaattataccccccttaaactactactctgaaactctgaagatctaaactaactactcccactttatatactac

SEQ ID NO: 96040 - DNA, 233 bp, Glycine max
  unsure (1)..(233): unsure at all n locations
gaaactctgcccaaacacanaccaatatcacaacttttcacattcanatatcccagtaacattctcttttgtctangttcgtaaccggtggagtcgactcgaaattntactggacgtctctagtacataagtctacattnttgaccgtgggatctgctagaanatgtcgagaaccccatatgtactaccctnttcacaaccagccatacacaagcatttttctgcacatatac

SEQ ID NO: 96041 - DNA, 217 bp, Glycine max
  unsure (1)..(217): unsure at all n locations
tggaacatatatctacatggngataaataacanattcaatacaagtnggtacatgcaagaataatattcnggttatggttttttggttacatgtgtaagatatacaatcggatgcatccagtcagtgtggtatttgtctataaagtcctttattatcaagccacaattcacatcaacacaattgaataagagctcactggttaagcaaagaaaccac

SEQ ID NO: 96042 - DNA, 363 bp, Glycine max
  unsure (1)..(363): unsure at all n locations
ttatgttctttcaattagaaatcgaacatatagttgagttctctagatcctcaccgacccttaagaatgtattactgtagactctatcaatccatttttggcctgacaccgtacttatccacataaactttaatcaatacaatctttgcatcctcaataatacctaagctgataatacgaccaaacagcactgcaggcatactntgatatctttctctagctgaaactacaatttatatcagctcatctgactttgtactctatgcatcaatcgcatctacttctagtctggttgtattatacatcaaaaaaatcaatcaaataataatgcattgtacatcaattggctacgacaaatatttt

SEQ ID NO: 96043 - DNA, 285 bp, Glycine max
gacatcacattgaacatggacgtgaattcatgaacttctgaaatattgctctgtatcatacatatctgtatgatacaaagaaacttttgtaaagttgaaattatacctattctcggatatatggaatgcactgacgcattaatctgctcttgtacaaattagccaactgtgaataatgaaagctctgcataatcgatggcgaataagaggttccatctattctacctcagtaaaagaaatacgagtctactataaaatgtttcaattagtcactcgaaatctaat

SEQ ID NO: 96044 - DNA, 116 bp, Glycine max
gctgtctgtcaacatctcaaatcatttacataccgaagttcaaactctgtcacaagaattttagcagtgagccccgatacttaaaatagatcttatacccacagctattttaaacc

SEQ ID NO: 96045 - DNA, 113 bp, Glycine max
  unsure (1)..(113): unsure at all n locations
tatctctttcaaagatcgagtatctgttttttcgaatttacctatctcactgaaatacaaggtcatggtctactanggagtttattatatatatatattaaagaaataatgat

SEQ ID NO: 96046 - DNA, 124 bp, Glycine max
tctgcattccattatattattcatacatgtaataatattattacaatatcatagacatcttatctgtaaccatattatttgattggaaacagggtcaaagctgactatattaatcatattctat

SEQ ID NO: 96047 - DNA, 163 bp, Glycine max
atcctggtgccacctcactgactacgactccacgtagccaatctattttctaacacgggtccatcatctccagcttccacattagtaacacataacaacagcatcagcaaaacggaagcgaattgcaaacacaaacgttttatagaccaaatctgtcatgtac

SEQ ID NO: 96048 - DNA, 281 bp, Glycine max
tcgacacctcactaggcacagatctattcagagatagggccgcgggctatgtctcctgcagttgatcaaatatctgatttatccatgctggcacagagaggcgtcgtgacataatctggtagggtcaggatccgttgtgcaccttcgcacttagattcgtgtgtgagagcagatgagatacaagagacgctacgtcaagagctccatgttgtcgacgttccgcttgtgagaggatatcccactaccctccattgtaatgtctaactctcacgctatcactc

SEQ ID NO: 96049 - DNA, 363 bp, Glycine max
  unsure (1)..(363): unsure at all n locations
tagcttaccgtctcacgtctattcgtcttatcgtcttcgatctcatgggtagttctcgaccaagctttcgatcattctatgacccgagtggccacattgtgttcgtgcattntattctcngtttgttacttttataccccctggtgacgtgctaaagcatgttactaagtcattctcgctaacttaaaataaaataattccaccgacgtttgaatgattatccataacttccgtaaaatagatccgaccgtcggcgtgcgaaccacgtggaataaaagaggtaaaatatatataacaaaaactctttagaaataagcgagatcatcgacgttctcttggattctatctatcgatgatatacta

SEQ ID NO: 96050 - DNA, 181 bp, Glycine max
  unsure (1)..(181): unsure at all n locations
tatgattggtgctatattagaagcaatcttttcatataccagctgctggaaatgcatttgatatgagtatataaaatattgagtaagataggacagacccacctagaaaagattaataatataaagaggagatagacaagagtcaaganagtaaccatttaataaaaatctataattctac

SEQ ID NO: 96051 - DNA, 422 bp, Glycine max
  unsure (1)..(422): unsure at all n locations
ctctatatttgatcatatagaatctctctctactttatttcctaactaagtgacaaatagttatataatatgatttgaatatatatatgttnggaataaataagataatactctctacttcaataatcatataatctatacgatcatgttgtgtactactctataagatctttagaatctatanaaagtgngatgcttatatatgggtacanacgaagaatatggaggtaaatcattaatatcgcatgaccattgnaccaagcagctatcccattgactgctttagccatagaaagtctgctggccatgtcatgctatctctagacgtaagtatctatgtgcctcaccacatttatctttatacttatcagctcatcatacgtaagttatatctctggaagctttgctattacttctaatat

SEQ ID NO: 96052 - DNA, 272 bp, Glycine max
  unsure (1)..(272): unsure at all n locations
atgtgcccgacaagtttatattgattttccaggcgctgtgaaattgcagacattatctcacactccattctacgtgatggcatttgtgattacgaatctggtattttatctaacacacttgtgatcaattggctcgtcacatgtcnagcatattttcttttcgtgactttaacaagaatatccgcctctattgggtaaatattccatcacctagaactgctcttagttcactaactctttatagggcttctcgaacgtttgattctagtatt

SEQ ID NO: 96053 - DNA, 299 bp, Glycine max
  unsure (1)..(299): unsure at all n locations
cttatgaatatggctagaggannattcananatcaaatgagtctaagacagactttaaaggtgagactggtagtgctcatatgtcagcttcaatatgtggaagtggaaggataggacangatacaacttgtcagtcatgggcctcaacctcgatagtagtcaagacacctagttctatgcttatatctcgtgcacatgattcagttttaattacataaaataatatattactattgtatgtaagatatgagactaatgtcaagctctatattctatataggtcagtgtgtatttgcaag

SEQ ID NO: 96054 - DNA, 68 bp, Glycine max
ctgctatacgaatgaaaattataacccatatgtatctagattatactatctaaagaaaactatacact

SEQ ID NO: 96055 - DNA, 219 bp, Glycine max
gctataatgattaatcaactcattcttattaatttctatatatatataccaacgtattattattatttataagaacattaatggaattaataactaaacacatacttataatcattaattatacataatatattttgattaaataatatatatatgaagaaatccctcaaaaacatattataaaataacactctctacattatagtctacaacacatga

SEQ ID NO: 96056 - DNA, 294 bp, Glycine max
  unsure (1)..(294): unsure at all n locations
gtatcacatcaacacacaactatacagccagaaacagggttatgttgaaactctgccaaacaccaccaaatcacagtttctacttaagacccagtacaattcttcgtccagtnntgtaaccgtggatcgactcanaaantcactggaagtctcttgtacatanacctacanttttgaccgtgggatctanctagaaacacncataactcattctgcatcactctntccacaaccagcanatacatagcatntttttctgcacttatgcannaatctgctgcacaatntcacagc

SEQ ID NO: 96057 - DNA, 331 bp, Glycine max
  unsure (1)..(331): unsure at all n locations
ttttttttaggaggagtttttttttttatnaacgccccggaaaaanaaanngaccctcacccggccacatggagttgtcaatagagtgaagacatttcccgcatatgacaagctgagctgcgaaatcacacattctgtggtttggatggcaacaatgtctagatagaaaacaatacgcctctacttgcaagagagcttgcgtaagcctggcctccgaggggttattattctataaaaagccgggcggagctctttttcccttggggcacacgaagctaatcttacaccccttataatgatctgtgaagatttccctttaaggcggaatcaa

SEQ ID NO: 96058 - DNA, 182 bp, Glycine max
  unsure (1)..(182): unsure at all n locations
aataactctttgaagttatatctataatagttaaatgttttgtgcggggacaccatgtggngtaatacacatgggatggtgtcccatgtcactgtgcattgtggtgcaataatgatacnattgtggttttcggangatggagtctttctatgtgtgatcgtgtagtatgccggcatatgtat

SEQ ID NO: 96059 - DNA, 232 bp, Glycine max
  unsure (1)..(232): unsure at all n locations
tctttgatgccatatactgactctatcttctcttgagaatagacatgtggatgaganactattgtcgtgatgtgtgcatacgatacaattgtcctctgatctgctgcncttcaatagaacatcactcttctcattcgcaccaagcattctgactatgtgaagctacattgattcttctcacacactgactgtgctgatcatgtttgcagctatcgttcacaacagtctctgt

SEQ ID NO: 96060 - DNA, 313 bp, Glycine max
  unsure (1)..(313): unsure at all n locations
atttgattcacaaatccagccacaactcagcaccataactcaacttcatcatatgcatcgtataggaaacttagaaannacaaaaagagttcaacaacangactatttctaggaatngatttagaacattgtaagaactaaataatatgcatgaactagactcatnattcaaagataggcttagaatgacangaatacatgaacaaatgtatctagaatncaatcatacaaaataataattcaacacatacttagaacataatgtgacagtactatgacaaacatgacttagacacatggatagtgatacact

SEQ ID NO: 96061 - DNA, 215 bp, Glycine max
  unsure (1)..(215): unsure at all n locations
gagatgccctaccactactatnnttctcttttcaacatcttttcaccttctctacccgccctacccaaaactcagtccctgactccacaagaccggatgagggaatcaattgtgcgttcgaggacaacctactgacttattttttgagaactatcctttgtctgagtcactgcttgatcctctgacttgaaccccatggagttaccttcttgaaa

SEQ ID NO: 96062 - DNA, 213 bp, Glycine max
gcaccgcgctgcagctctcgactaaaagagagggggggtgtctctctttcgaggacgaatatggtggctaagaaagtggcagatttgtcccgccacatgtagcactttccaatagaatacaaaatctctcaaacataaggcctgtcaggtaaccttctaagaccttttgtggaagccttacctaatactaacagccaaagaacttttattgca

SEQ ID NO: 96063 - DNA, 55 bp, Glycine max
cgatcttgatacgaagaacttgcacctaaattaaggaactcggatcacgctagtt

SEQ ID NO: 96064 - DNA, 415 bp, Glycine max
  unsure (1)..(415): unsure at all n locations
tgcaagcttctttgaggcaatactgatttcttatcccttctcctagntagtgtgagttcctcttaatgtctcttgtgtggtggttactgtaataaggtgtttttacacttcctttgaaaaacccttgaaaatgagacattgtaaaagctatctttctatagcattgatgttattttcatgaccttcactgaaccccggtcacattggcatgagcggaatttcaaatgatgtctccttttagtagaatccgaatcacccctcagccctttacattttgacaggggtatttgactctgaatgttgtcattaaccttgattctaaaatctatattaaatttccttcaatttggcatatagaaccttgcatttggactgacgagcgtgaacgagggagacctttaagcgatgcaaagaa

SEQ ID NO: 96065 - DNA, 409 bp, Glycine max
  unsure (1)..(409): unsure at all n locations
cactcctttcagacctcgatgtttgttgcttgaactttaccttgactgcgggcgccctttcaagatctgctcttanggcttgcacctactnactattctnaagaatttcatacctttcctcgcttgaaacttttagcttttgaatccaatccaactcttgcgcctgaaccttcaaccacctatgatagtctgcgatgataccattggcgcttcccctaagctctttatctttcctttgcactgcaccccatgccctgtggactccttgaagtatcctcgcattgtggtcactgaaaccccgcgcgatcaaaggcgtgatgctttcctctgatggngctcctctcatggngtagccaagttgtcctatggcgacgacgggattataattgatacaacccctcattcccac

SEQ ID NO: 96066 - DNA, 409 bp, Glycine max
agcttcagccttaataatatgttatgctccccactgtcactaaaatctatagtctaaaatagttccaatctcttacatcatgttccatagattcatggttgaatttgaaggagaaatttaggtttgcctttgcaactagtaaagaaataccaaagatagagtccaacctaaaactaatctggcaagggcaagagaaatttcatagaggatacatctcatgattcaataaagaagtgagagttgcagacaacctgcaatggggagtcatactgatgttggctaaggctggtgtgagggaatgatctcctttcttcatatccatttcaaaaatgccacctaacactttggaggagttcctgaaaaaagtggaaaatacatcaactatgaaaataccctataagccagaaaa

SEQ ID NO: 96067 - DNA, 339 bp, Glycine max
  unsure (1)..(339): unsure at all n locations
tttgcatggtctcaatagggagatacaagacactgtagagttacaccattatgcctctttggaggatctcattcattaagctatcaaggtggagcagcaattaaagaggaagcaaatatacaagaagtccccctatgaatcttcaacttggaaggataaggatacattcaagaagaagggaggatcttcattcaaatctcatgaaanaggtgttacccttggtaaaaataattctaaccctactcttacttctttaaaaatgaattctattataatatttaagtggttangaaagggtcatattgccttccaatgtcctaacaaaaggattatgcccta

SEQ ID NO: 96068 - DNA, 358 bp, Glycine max
tttgaagggaccacaactgttgttgagctcaagatagcgtcttgagtggtgagatctacaatgtgtctttttgtaggcgcatatgtgtgatcacaaagaatggagtgatcactagctgccccgatttttatgagtaccattgccctccctccgagtcattagcatgacattccctcccgcggatgcatttagcacatgctttgattgtggtcgcacgccatctatgaagatgtttagtcgcaccgcgtctctgtacccatgcgtaagtgatattcctaccattgccgggaaaccgtcaagccgccttctgtagtgattatcgaaaacatgacggaaggaacagatttcccttttccct

SEQ ID NO: 96069 - DNA, 379 bp, Glycine max
atactctgcaagtttttgaagtgttagaattctctcctggatctctgcttcacacctgctccaacttgggagtccttctacatcaacaacctgcagatttgtgtctatcccaccagatgcatctacttgctgagaatctttgatttcaaaatacacttccactgactcacatcagaaaccttcaagctgttcaaactcgcaaaccatccttgcatgtcactcggataaattttgtctagtttattgcaaccatgaatgttcatataagtgagactagaaaaggatatagcactcacttcagcttgccatatgtctgttaactcatccatatcgttgaggtggattctctcaccttatgaaagacgtagacctgctcttt

SEQ ID NO: 96070 - DNA, 157 bp, Glycine max
cctactgaacgaacttgtcaatgctactgcctatgtcaccacattccattgtcgagtatgtagactttataaggaacattatcacggcatgactcacaacactcatcgtcgtctgtcttacgataagaacacgagaccggttttgcactgacaacca

SEQ ID NO: 96071 - DNA, 368 bp, Glycine max
  unsure (1)..(368): unsure at all n locations
gcttctactatgggctgtttgtncttcttcactntcttggctccaacgcgagctntgaccactgttcttccttcccgcgatgcttcttttcatgtccgcctgagtgggcttatagccttaaccatacttcccacggtttccttgagtatttatcaggctagttatgccgccgttgtctttgcctaaacccatcctgggttcataaccgttccccaacataactcgggccatcattacagctgcatcggacagacaaggcttgccaaagagggatgtcacggaggaaatgctgaccacctcaaaagactggatagcangttctaacgattcttctgcggcttccacataatgcatggaggaggggcagc

SEQ ID NO: 96072 - DNA, 333 bp, Glycine max
  unsure (1)..(333): unsure at all n locations
gctacctcatgcactcctctaatgactatagcatcatttgtggcgctaagctgctggttgttggaagccatcttctcaattaaatatctggcttcagcaggagtcatgtctccaagggcttcaccactggcagcatctatcatacttctctccatattaatgagtccttcataagaaatatggagaagaagctgctccgaaaactgatggtgagggcaactggcacatatgattttaaatccttcccagcattcatacaggctctctccacggtagtgtcttatacctgacataatctttctaatggtagggnccttgaaacaacgaaaaatt

SEQ ID NO: 96073 - DNA, 367 bp, Glycine max
  unsure (1)..(367): unsure at all n locations
agcttgaactagcagtagagattgtctctcaacccaaattntgctcaattgcctgttgacaacaatctcaattgctaaaatagcgtacatcagctttgaaaaaatcaatttccgaagaggataagtcataagtgagtggctaattagctcaatctagggtatagagagagctttcaaaaaaggataaatcaaacaacatcggttcacaacgtgagaccagtatatgtcaaattgacttggacatgagagattttggatgtgtccttagctatggcattgttaggagtccaaagtacacaataacaaaaattaaatgaacggtagcgaagttaataacattttattggagtattcttaaaaaaaacac

SEQ ID NO: 96074 - DNA, 376 bp, Glycine max
  unsure (1)..(376): unsure at all n locations
tgtctactatcattgttatcatcggtctccncatcattgtgggtgctacttgagctgccagatccctccacctttgggcgtattctttgaaagattcatgctccttcttacacatgtttggtagatgcattctatttggagccatatcagaattgtacttttatttcctaacgaaggcaaccattatgtccttccaggaatggacccgagaaggttacagattagtataccatgtgatggctaccctagtaagactttcttggaagaaatgaatcaacaattntcattttttgagtatgcccctattttcttgttgtacatctttaggtgattcttggngcaagtaatccccttgtactttatcaaaattggaacc

SEQ ID NO: 96075 - DNA, 397 bp, Glycine max
agcttcacataggcaagtgttttcttcttaattccaaatcatagatatgtcataaattgattttgcaggtcatttcccatcaaatcaaggataatatgcataatcatcatggatcaataggactttctaaggtcagacttcgtaggaaattggttttggttgccctggcctttcccctctctcttcccctttgttttgtgaggaataggagagtagacccaaagatttggttagtaacttaaatgggcgatcacttcctatcccttcatgtcttaaccaagttactattacccccctcctttttctccttttgacaactctgtacatggttcagccattgtttggtccaaagaacttgttttccttttctattttcctttgctcttttctatcttta

SEQ ID NO: 96076 - DNA, 455 bp, Glycine max
  unsure (1)..(455): unsure at all n locations
tcttgaagctgaaataatatatgtcattttcgacagttcatttgtaagcctaatgcaagtagtccccaaaaaaggtggcataacagtgataaagaatgataagaatgagatgattctcacaaggaccatgaccggttggagaatgtgtatcgattaccaccttctcaactagcaaacaaggaaataccactttcctcttcccttcatggatcaaatacttgagaggttagccagtcaagccttctattgctntctagatggatacttggggtataatcaaattcttggatcaagagaaaatagccttcacttacccatttggagtctttgcctatcaaagaatgcccgttagactntgcaatgcaccagccacattccaaggtgtatgaatgccattntttctaacatggtataaaaatgcatagagggtattatggatgatttctctgtatctg

SEQ ID NO: 96077 - DNA, 398 bp, Glycine max
agcttaagatgaggaagtgttgtatggtgaaacttcctgcttttattgttgaccacagagtggtacctggagatatgtcgcgggggtcaggagaccttggggacgtcaggtggggtgctattgcccaaaaccaagcttgaccaatcccgaaccaacccgggcatagtcggtcagtgagaacctgtgatgtacctaaacaggcgagctcctggcagtcaacagataaaaggaacaaagaccacaaagcaaagaggcttgtggtggctggccagctgtgaactttgattgatatgtgagatatggtctctggtaatcgattaccaagggtgggtaatcgattacaaggcttaaaaatgaagacaggaggctaagatggtctcttgtaatcgattaccacg

SEQ ID NO: 96078 - DNA, 433 bp, Glycine max
  unsure (1)..(433): unsure at all n locations
tcagatcanagcaactcanaatctatgtatctaaacccctcatattagtggatttcaagggtngagaagngaaaatgagaatggggtaaatttggagcaaactcttacctcacacaagtctataaccttaatctaaacttgctcaaactgtgtttacgcctaaaattccaccgaatcaaaatttgactcctcaacatccaattttaccctagaaatggctcttgttttcactttggtcactcatattcctcatttgcacagtctaagctttctcataagtcctaaatgacatttcaaactaggattaactccctttaacccccaaataccactaaatccagatttggccttccaactctcaaagcctcactctntntccactcataacaccacattctcactttctaaccctaggttaactctacccttcatc

SEQ ID NO: 96079 - DNA, 343 bp, Glycine max
  unsure (1)..(343): unsure at all n locations
agctntgtgtagagcttgctgttttataaccagaactgacaatgaataatacttgcaagaaatggacgtagtctcaggtttgagacgaacaagtagaattctttgtgtgctttcttgtttcttgaactaggaaagggttttcaatttttttagatcttatatctcattttgttttacaaagaaaattttttctcattatatgataaagtttgaatcaaacctttctaagtgggttcggtttatctggatcaaagataacatgtttcagtctgtaaaaaagtttattttctaaaacacaaatcacccccatcttatgtatttgttctacatatttctcctattt

SEQ ID NO: 96080 - DNA, 440 bp, Glycine max
  unsure (1)..(440): unsure at all n locations
ngagtncagatttataatgtaagcttcaatactaaatatcatattacttccaacaatccgtgatgcctctgttccatattagactngtgtagctaatcccccataaactgaaaattttgtgatcaattcagattatagacattgatggtgatgaagaaaaattaagagtcaaaattttagtgataaactaaatgaaactgaaaatcaagtcagtcattagagtacaaaaaggtatataagtaaacataatttaagaagtttaaacatcaaaaaagccatttgaaaacatctataatttctttacattgagaaaaataatcgntcttggagaagtaactaccatcagtaaattcacaaactaaagaaacatgaaattcagacaatggttaaatgatataatgaagtagaacaatacttcttggagctagcattatttaagt

SEQ ID NO: 96081 - DNA, 402 bp, Glycine max
  unsure (1)..(402): unsure at all n locations
agcttctatataagctgaaccattttatcaataaacacaagttgagttttattcagaaaattagagtttatctcttttatcttagtgagagtgattctcctaaattcttgagtgattcaagaacaccctggctgtatcaaaggactttcacaacctttgtgtgttgccctcgctggaaagagtgagtctttccttcctttcatcttcacccttgttctttcaaaccataattctagaaaatccacctctgcccagaattatctagtggccataactcccattttacgcactcaaattaagtgattcttgaggctaaattgaatntcaaaacgagacctttcacctcgttttggaatcacctcatttggatccctgtagcttcagttattaccatcccattca

SEQ ID NO: 96082 - DNA, 399 bp, Glycine max
  unsure (1)..(399): unsure at all n locations
gtgtatataagctgttttcatttatcaatatatcacaagtgatgtttatnncagaaatgagagattatctcttgtatcttagtgagagtgattctgctaaattcttgagtgattcaagaacaccctggctgtattaaaggtcattcacaacctttgtgtgttgccctcgctgganagagagattctttccttcctttcatcttcacacttgtgctttcaaaccaacaatttcagaaaattcacctctgcccagaattatctcgtggccataactgccattttacgcactcaaaataagtgattcttgagcctaaattgactcttcaaacgagaccttctacctcgtttctgaatcacctgatttggagccctgtagcttcagctattgccatttctata

SEQ ID NO: 96083 - DNA, 400 bp, Glycine max
agctttgctctataagtactatgtcaatataggctcaaatgtggtagctaactaacatggcttaccaactaaaaataattgaattaaatagtaagcctaaaaaaatagtttccaaattattgttatgttttacaatcacaaagactataccaatagtcttcatctgaatgggaacactaatcacaaacataaaagaaactaatacaatttttacttgtattagggttcgcctgtttagaaatttcttctattaatttactatctatcaatactatattgtaaattaacatcaataaatagtactatgttgaaaattaatataataaatagaagaaaaagaaaaaataatatgaaaataaattcccaacactgtttttatactgtttcttgcttcattttt

SEQ ID NO: 96084 - DNA, 382 bp, Glycine max
  unsure (1)..(382): unsure at all n locations
ctaagctgctctatagtctatgtatgtcactatgcatactctgccataagttctatgcctgcattctttttcatatcaaagcaaatgagcgtgaaagttcaccacatctagttgcatgtgtggtacatggaataactataaccacatattgggttgacgtttctcttccaatgatgatngaagcacaagacatggacccgatgcatgtaataaagagggggctttcagcgtttgtgtagttgaaaatacgttgcatgcatacataactatgcctgacattatatgtctctctatgataaggtgaagatggcatcaaatttattttcaacagggtggacccagagctttaaaaaagtcatatgcaagcaaattagagggcact

SEQ ID NO: 96085 - DNA, 273 bp, Glycine max
  unsure (1)..(273): unsure at all n locations
agctggttatgggttgattttatctttggttntagntatnntactttaaactcattaaaagaagacttgcgaagcanatgatcagttcaaactttattttacattgatanaatcgagaattacgggcacaaaacgaaccaatggaaatttattttaccgggagtaagggagaataccggaccaaccaatgggtggaaatgcttttccccaagaaatggaaaccattatggtgttaggatgagatgaagatgtgaaaagccaatagagggaccc

SEQ ID NO: 96086 - DNA, 425 bp, Glycine max
  unsure (1)..(425): unsure at all n locations
aattatgaagaatttgatgatatcaagaagaattgctcgagaaagagggagatgtaaatcatgcaagctttgatggtgtcgagaagaaatcacatgtttgtcatcatcaaaaagggggagaatgtgaatgtatgtataccatgatttgatgatgtcaaagaagaatctaacaaggctacttcanatgataagcattcgcttcaagaataattcaagaatgcttcaacaaacaaagccttggttcaagattcactaaagaccaagccttgccttataacaaagtgctttcaagacatgcaaggctctgggtatcgataccaagaagtgtgatcgattacccgaagacagggttgagaaatagcttgtgaaaaagggtttgaatttgaaatttcaacatgtaatcgattaccatatgtctgtaatcg

SEQ ID NO: 96087 - DNA, 399 bp, Glycine max
agcttgcccagagaaggagtcctcttttatatgcttaccacctcaaaagactggaaagcggtttctaatgactcctctgcggcctccacataaggcatagaggatgggcagctcaccaagatgtcttcctcgcctgatatgatgaccagatgcccttccactacgaatttcaacttttggtggagtgtagagggaacaactcccactgagtggatccacgtccgccccaacagacagctgtagggggggttaatatccattatttggaaggtaacttgacaggtgtgagggcctatctgtaccgggagatcgatctcccccctaacctctcggcgggtgccgtcgaaggcacgaaccaccattgaactcggctttaggtgggaagcattgaatggtaat

SEQ ID NO: 96088 - DNA, 385 bp, Glycine max
  unsure (1)..(385): unsure at all n locations
catgataaaaaaagagtcattcnagttgtgctgcgttagttttgttgcaacagaggaggattcataatcgaanaacattgggatcgagtagatcggattcgagatccctggcctatgattcgaacaaaatgtccagcaaggtttcgtgtaattacgttacaatacctcaaagtggaaagtttctatgtttcataactcccagaatcatgagtagactcctttagaatntgttcacttgtatctcgaatattgttcaatgaatgatggtgacaaagcgcaaagtgatagcttacacttatatagtgtgagaacatgccatataatgggattaatgttangatagaaaggtgggcatgctgatcttgggttntgtaagaaagatctt

SEQ ID NO: 96089 - DNA, 403 bp, Glycine max
agcttcacggaccttggtgcttattatgttggacttgaatgtaatttttatgatgatttgagttgcacaagttaacaacaagctgctattagttttttctgttatactgttttacttgatttttctttttgatattgagttactacagaatttctaattagttatttaaaagttttaaggcattctgaatgtttggttaatatatacatatggtgaatgatgcaatagcataaaatgcatagatttcatagatttaagttacatttattttaagtttcgcataaaatgcaatttttacaacaaacaaaaggctatggtaactgtaaattaatggttcatttttaaaaacaagaatttttgctattgcaatggacttttaatccaaagctcattgtaatagcaa

SEQ ID NO: 96090 - DNA, 439 bp, Glycine max
  unsure (1)..(439): unsure at all n locations
tgatccatggagtngcagtggaggataaaggagaagaggtgagaggaggcgtcatccactanggaacaagccatggaaggagaagcttcaccaccaagagtgtctaggataagaaacttagaaaggaagcttccatggaggaatagaatgggagagaaagagagagagtggtgtggaaattgaaggagaatatggagacaagttgaactttgaagtgtatcacacaagtttctctttcatcaaagttacaacaagtgttacacatgcttctatntatagcctaggtagcttccttgagaagcttccttaggaagctagtgttacacccctctaatagctaagctcatcctcatgccaaaatccatgaaggaagaaagctttcttgtgaagcaagtggtacacccctccaatagctaagctcaccccccttattacatgg

SEQ ID NO: 96091 - DNA, 408 bp, Glycine max
agcttgcacgataatgctcagttgactattgaacttagatctagatattcccaagcttcgaaggatgaaaattttttgcacataaaagatgaagaaatgagttgaaaagaagagatttaagataccaaagcttcgggcaagaagaagaaaatgaatgttcaagttttagtttttggagagaaaatggtaagaaatgatgataaatgatacaaagctatgcctaatgttattgataagctcacttgacaagcttgaaagaccctttgatggccatgttggacgtgccaaagggtgccataagtaggtagctttggtttttaatttttaactaaaataggctaaagtaggcttaagcaaaaatgataaaaaattattattgctaaaactggtaaatcttatcctaatctt

SEQ ID NO: 96092 - DNA, 409 bp, Glycine max
  unsure (1)..(409): unsure at all n locations
gagtcgaccagcagccacgcaagcttctcccgcattttgctatttatttgggagaagtgaagaagaaaagggttcagggccttaggcacttctctctctctcgaaatagctgaggaaaattggttccgtgaagaaaatccaagccgaagcgcttccgtaacgtttccgtgagtaattacgcgaagattctcgaccgttcttcaagattcatcggtcgttcttcattttcttcagtcttcaaggggtaagtacctcaaaccaagcttttcaattcattctatgtacccatggtggtccacattatgattcatgtattnttattctcggtttcatttggttttatacccccttttgacgggctaagaaatctcttgttaatctaagaataaataatttccccggtcgttga

SEQ ID NO: 96093 - DNA, 384 bp, Glycine max
  unsure (1)..(384): unsure at all n locations
ttcattcatacaccttagaaaccattatcagcttctatcttatataaaatcagctccacagtaggctacttgatcatgagaaatgttataagtctcagatattgcaattttagtgagtaaaggttaagttggcagaattatgcggccaatctgatatttcttaattttaggtttctaaatgattgaaagagattctaaggtcaacattgagttatagataactttcctatctttctaacgagatacaaaccgacttaataggatttgtacaactctagacatgattaatactctatgaaagtcatcataatgtangaggaataatgagtgtgaaatattgatatcataatgagtggtagcccgacgcatgatggttatacttat

SEQ ID NO: 96094 - DNA, 383 bp, Glycine max
  unsure (1)..(383): unsure at all n locations
agcttgcaaagggntctttcctatctttagtgcccatgaaaagttgcagctntggcctcattcaccgccttcttggcatcttttttaacaaccacatattttttccattttcaatattcttacacaaatccacgctttataacattctcttttaaccctaacctaattttgcacactatcatttctccaacaagagtatataaacttatgggccccatctcttaattcatcaacaatctatattgctacccttttaaacccttcagacatttgtgccatatatatgcgctctccacgccccttttcaaaacagcgcatcttgggtttccttactctcttctcaacaactattataatgaccagccctgactctgtggtgggga

SEQ ID NO: 96095 - DNA, 322 bp, Glycine max
  unsure (1)..(322): unsure at all n locations
gaatgatttcaagattaagtcaacaagttcaagatcaagattaatntcaagtntcattagaagaaatcaagaagaatcaagattcctgagaagatgaattcttgattcacgagaagaaatctagaagccacaagtcaagacttcacaagggaagtattgaaaagatattttcaaataccaaacatagcacaattttgttttacaaaagagttttctctaatttttctaagttaccagagtatttactctctgataatcaattaccaagttcctataatcgattaccagtgagtaaattggatttcaaaagcttaactgattt

SEQ ID NO: 96096 - DNA, 170 bp, Glycine max
cgcgcgcacaacgccacgcaacatacgacgccggaagcaacaaagcagcaaagccctgccgccgcccaaaagagtgagccaactcacacaaactgcagggcaacgcacggcccgatgtccaggcgggaaacccgcccagccagccgcacgaacgaaccggccaacgcgag

SEQ ID NO: 96097 - DNA, 405 bp, Glycine max
agcttcaggctgctcaattgctctatgttgctgcatggaagggcaaaggtctgtatggtggtcagcagaggagcacaaaccacaaacccttgcgacaggtacagatttctgattcaaggccagctgagttaccaagttgaccaacgcatccagtttgccttcaagcttcttagtttcaaatgatgcagatgggtttgttgtagctacctcatgcactcctctaatgactatggcatcatttctggcgctaaactgctgggagttggaggccatcttctcaattaaatttctggcttcagcaggagtcatgtctccaagggctccaccactggcagcatctatcatacttctatccatattactgagtccttcataaaaatattggagaagaagctgttctgaaat

SEQ ID NO: 96098 - DNA, 369 bp, Glycine max
  unsure (1)..(369): unsure at all n locations
gagttagacccacttactctggactcattcagaaggggactctctacttgaatctggggtgttgggtcttgggagctataatggataattctactangttatttgcttanggtagctgtttgtgaaaggaaattgttgaaattatgctaaacttgacatgtttaatgtaagcaaaactgcccatgttgatttaggattcaataatgatgtnttgagttatatgtgtgcttaaaatgtagatagaanactggtagagaggatggcgagagttagcttagagttaaatgtgagaatagtagtgttgtaggtggaaaagtgtgagattctgacgtttataaagcccaattggtgtagtggaaatttgagtta

SEQ ID NO: 96099 - DNA, 404 bp, Glycine max
agcttgcttgtggggcttctatgtatgctggatctttgagcttcaatgggattctttaatggtgattttccaccatggagatgcagcggaagacaaaggaaaagaggtgagaggaggcgccatccattaaggaataagccatggaagaaggagcttcaccaccaagatgagccttggataagaagcttggagaggatgcttcaatggaggaaaagaaagagggagagaaagagagaggggggagcacgaaattgaaggaataaaagaggtatagaagtggaactttgaagtatgtctcacaagactctcattcatcaaagttacaacaagtgttacacatgcttctatttatagactaggtagcttccttgagaagctttcttgagaaaacttccttgagaagc

SEQ ID NO: 96100 - DNA, 485 bp, Glycine max
  unsure (1)..(485): unsure at all n locations
ggtaggattatggngtacccgtcatatgtggtactaggtgttgatcgggcgatggtgcanatcaactctccacatccacaaatcacacatgaacccaccatcctcagttgcccaccttcaactaagctcacgtactcccatgtagcccttatcctcgttcctctcagcaccgggtccccattaatccctccaagcttcaacaacatccaagcaattcaatatccaaacatcatgaaccatccaaaaccaaaaaaacagggcagaggcagaaaactctgcccaaaacacattccaataccacagctttccttacccaaataccccagtaacattctctttattccgattcgttcaccgttggatcgactcgaacattccactagaggtccctagtacataaatctacatttggaccgttgggatctgctagaaaacgtttagaaccanatatgtactactctnttcacaaccagcaatacacaaac

SEQ ID NO: 96101 - DNA, 404 bp, Glycine max
agcttatcttgacatcatttcttacaagtgtttgcttgaaaaaactttttgaaaatacccttttaattagatgttaacaaatacaaaggttaaaaactatgtcttatgcgctatcaaaacatgttttgcgaagtctgcgtctgatgttgtagaccatagcaagatggaatcatgatctaatatgacattaaaggttacacttaaggcttcatttaatattatgtgtctgagatctattttgtagagacattctccaaggatctctcgaattctatgaagaataaatgaagccgagctctaaaattcctcaattgtcatcacaagaaaagctctgttgtatagacctactttgatgaaaaaggaagtaatttcctgctgtagtgttcaacatgccagcgatgaaa

SEQ ID NO: 96102 - DNA, 466 bp, Glycine max
  unsure (1)..(466): unsure at all n locations
ctaagctgagacctgccgtgatgaatatatttggctggngatattctgtgcattatggnttagcaagnctgtttcangcaaatagggcaggaattcttccaagcccagatggagatggtgttattgttaacatatttttccaggaagcacttatgcagcttttcaaaaagttgttctacgaggatttgtatgtatcctcattatagcacatatggagctatgaaatattctggtagctactatcatgtgtttaaactgtggttgcantcacgatcgtgatgagtcaaaatctttacattatggataattacggaaaaatatgactgatgccatatcaattccggtcataatatgactgtgaagtgtaaaataccttggcgttacgatcacaatttcagtcgtggatcagaatttataaccatgactactgtgtaattgaggacttctactatgnttgcagttctat

SEQ ID NO: 96103 - DNA, 339 bp, Glycine max
agcttgtctacgatcgggttgttctcttgcaacatgtgagaccaaacaaaaactcctcccttgagctcaaactcattaatgttcttgatcaacatgaaacaaggatgagtatcaggacattccttaataagctcgatggtacttttggaatctgactcaactatgaactccttgaatacatgactcttatcaaacctccaacccaaaaaaaatggcccaaagttaacctgccaaaccaaaccagtacccattttctccttcaaaggaaattaaactggacccatgggaacactaaagggctcctccaactgttgccttcttcgaacttttataaccatt

SEQ ID NO: 96104 - DNA, 427 bp, Glycine max
  unsure (1)..(427): unsure at all n locations
ggctcgngaatgtatatattctgctgggtttatatatatgtatgatgataacttcccacatacaatgccaatgttgtgatgcaatcatgatggaaaagattctctagacatggtggagaacacggnggttcctagtgatcctcaacaagtaactctgatggtgacacatgtagaaactctgacgctcaagttagaatgttattagagaggagtcaatggatgaagttgtccatcccacacacatgtgtacacacatttattcttatttataagattcaagtttaaaatgatatttattntttttataagattcaacctataatgttccttggattaattatttttagactaacaatattcacaattaaaaggagaaaaaatttattgactaacaattataagagaaatgaatattaatgataaataa

SEQ ID NO: 96105 - DNA, 401 bp, Glycine max
agcttgactctgctatatactttattactgtctctcacctgggaatacatggaccctactattgtgcctagccatattctaaacgcgaacacgaacaataacctgattacacataaacctacccaattgaaatcatgggcggctagggaccaagccatggacaccattaactatctatgcaacggataagctgatgacttgatgcatatcaataacactcatttacggattagttactgtaccagataaacacaactttatgccatataagagcacatagggatctaacattacactctttggacactgagtaaacatactagccatttaacaccgcgaccccatcgcgtgttaatagaggtatatagagactacacttaatactttttcatacagagact

SEQ ID NO: 96106 - DNA, 421 bp, Glycine max
  unsure (1)..(421): unsure at all n locations
ggacccaagcgacgcagctgcagctttattaatattaatttattttactttatgatgnnagaagatgacaaaacaatagaagctacttcacacatatgttggcatagattaattacatttttaatctctataatattacattaataaggaattaaaaatacaataaaatcacattaacatgtgttacatgacatatcatttccacatcatcatcaagtataatttgagtggagtttgtgaaatttatttaatatatttaacaaaaaactaatggaagaaaaagaaaccctaaacttacaatatcttgaagatcctatttatgcaattgaaattctaggtaccacacgtgcacaatgtaatgcataaaagactataagtataattaactctacatattgttagcacatgaaaatgaagcact

SEQ ID NO: 96107 - DNA, 443 bp, Glycine max
  unsure (1)..(443): unsure at all n locations
tcatgtaatatagacaaaatctacagcagaatgcggagtagaagtgtttgaagacataacattagcatcagtcaatctcggccactatattataatnactctctcaagtattataacagtatggtattctgccacaaactaccaatagtcaccacaggaaccaactccatctttaaaatgatggaagcgatcacatctttaacaagaatctctctattagcaaatctagatataaattttggaacggcatgacagtcctcacataatctcaagatttctctgatccttatgggttcaccttctacagtattaatgagtccaaaagcaactgcaagcttttcgctatgcccaatacaatattttctttgtcttcttcgtcaagatcatagagaacaacgttcgtttggggacataacctgtgcctcattcattgacaattaact

SEQ ID NO: 96108 - DNA, 365 bp, Glycine max
  unsure (1)..(365): unsure at all n locations
agcttatagtacgcccgagtcatttattctctatgagatgttgntgaagtattggcgatcagaattgtcattccttggattataggggtgaaccaagctcatgcttttataaaaaggtgcatcaagtcaagttgaaatatggaagtaaccgccttgcaaaattggggcaaaagatgaatcgagtcacatcactgcttcgtctactgccaaacatatttaggattattgatgtccttgttacttccaggttcaccttgacaaaaatgtcatggaccatgttgaaaatctaaattgattcaaccccatatcctgcataaatattcgcaatacttcgacttggcatcattcgcatgcattcatgcttt

SEQ ID NO: 96109 - DNA, 54 bp, Glycine max
agcttcttttctggaatattccttccctagttggtggtttggctcgagataagg

SEQ ID NO: 96110 - DNA, 401 bp, Glycine max
agcttgagatgattaagtgttgtatggtgaaacttcctacttttattgttgaccacagagtggtacctggagatatgtcgcgagggtcaggagaccttggggacgtcaggtggggtgctattgcccaaaaccaagcttgaccaatcccgacccaacccgggcatagtcggtcagtgagaacctgtgatgtacctaagcaggcgagctcctggcagtcaacagataaaaggaacaaagaccacaaagcaaggaggcttgtggtagctggccaactgtgaattttgtgtgatatatgggttgtggcttctggtaatcgattaccaagggggggtaatcgattacaaggcttaaaattgaagacaggaggctaagatggtctctggtaatcgattaccaagggg

SEQ ID NO: 96111 - DNA, 393 bp, Glycine max
  unsure (1)..(393): unsure at all n locations
agctntgcaagaggcgggcatgttttcctttgatgggcccaaaggggactcctgtttgatgcatctgggtgcatcacatgacatggaaacatgtttgacggtggaggagctgttacaacaactgatgaaccaaggccggtttgagatcaatgaagggaacaagggagaacaacacgtgtgcatgtagtcagtggacaaagaaagcctcgctaaacccaagcctttggtgatacacttaaccagggatgtggcctctcagaaacctcaagattcttgacctatcccaggtaccaaacctatccccttcccttaccaaagcgacaaggcaatcccgtggagatacacccatcaaaagccaagcgaaaagaaagaggaggccgccgacattgactt

SEQ ID NO: 96112 - DNA, 314 bp, Glycine max
  unsure (1)..(314): unsure at all n locations
gattgtaaaatagaatattaaaatannagaaaaatattagaatggtaaaatttaaaaatgaaaatgataggatganantatgttaaaaattatgaaggttgattatttaggataagggtagaaatatntgattgtnntagtatgantatatgagaatatgttttttaaaagantagggagggtaaaataagtatgnaaagaatnaaaaagtgaaattggagaaatttatatatggaatatagaagaattaaaaaaattaagttaattaaaatantagaaagttaagaataagaatatattgaaattaaaaaaat

SEQ ID NO: 96113 - DNA, 399 bp, Glycine max
agcttagaatgcagaagaagattattatattaagaacaagcaatcaatttaacaatattcttttaaatgcccaagacaaagtaaactgcagtaaaataactaagataagggaagagagaaatgcaaacttgatttgtactggttcggccacttcccatgcctacatccaatcctcaagcaacccacttgagattttcactaactttgcaaaaaccctttttacaacttctgaacaccaaaggaatccctttcccttgtgttcaggaaactcacaattcaagagacaaccagtctcttgatgacaacttactttctgagatgaacaaaaagatttctctcctttagagtggataacacaatttgatgttcctggataaactctcaataaatttgcaagtg

SEQ ID NO: 96114 - DNA, 413 bp, Glycine max
  unsure (1)..(413): unsure at all n locations
aacctttatccgacgaagacactgacaaaaacttatgttctccttcttggacaaagtatggcaggctgggggcaagtaaatattcttcccatcagaccttggatgcaactgtgatcttatacccatatcagctagatcttgacgggtattcaagccatccttcatcttgccttgaatgttaaggagcgatccaatcacactgtcacaatacattttctccacatgcataacatcaatacaatgtctaacgtcaagatcacaccagtacggaagatcaaagaaaatggacctcttcttccatatgcaactctgactnttatccttcttttgggtcttgccaaatacagtgttcacgtgttgaacacgctgatatacctgctcaccagtgaacgagatcggatcaatatcatgct

SEQ ID NO: 96115 - DNA, 406 bp, Glycine max
agcttttctcatagatagcaatgtttgtatatgttttgcaaacatgcataagaaaaatgaaacaaaaaggaaagagaaagaaagacctcgaaggtcggcatgttatggtcataggaagcacaaatcattcgtagagagcaaacatatctattggaaacaagaaactgacgctaagagtttattttccaaaataaccgagataagaacggatggattcgttgaaccaatgaaagaacataatttggaaacgttgggtctacctgcataaatcccaagccttagtatcacaatgccataaactggatgcttgagtacccacctagctgtatgcgtgactaattttgcacgttgtttccaaatcatcattgttgcgtgtgcctcgtggaaatgatatggaagtttaacc

SEQ ID NO: 96116 - DNA, 142 bp, Glycine max
gggtttgatgattgttaagagaaaaaagtgtgaatgggtagtaagagttgtaaaaaattgaggtttgaaattgttaattgaaatgtaaggtagttgagaatattggtagagtagttattaattagaattgggtattaagttt

SEQ ID NO: 96117 - DNA, 403 bp, Glycine max
agcttatggattcttcgaggtgttctctcagttgtcgcatgatttcacgggcaatcacaacccctgaagcacccttatgggttcgtttcttgttcttcgctgcctggttcgtttctttaaggaaaatcgctaaccttctaggttgtggaaatcacaaacccgtaagctttttgcctcgctgttgttgtctagttggtttttagaagcaagagtgttgttctgtttgggtgtcagaggtggtggttgaaaaacatggttgtcgcctgaaacatgtcatcatcaacattattcccatggaaaggagttcctcatcgtacacctcaaagccctgaattcccgtgatgtgtttgtgtaacgtagaggctccgttggtgacatcgcggactgaggataattcatggaa

SEQ ID NO: 96118 - DNA, 401 bp, Glycine max
agcttgggtgatgttgcgcgttctgatgggtaccatgaggtgtttgctgggttttgacccacgcaggtgttgaagagacggcatgggcatctccctccttcctttttgcccctgttgccccgattcttttggcattcgcgtttgtggaggaaacgtaatcaaactttcctcttttcaatccaacctcgattctttccccggcaaacaccagatccgcaaagctggacggcatgtaacctactagcttctcatagtagaacactggcagagtgtccaccatcatggtgatcatctctctctcaaccatgggaggagctacttgtgccgccaaatccctccatcgctgcgcatattctttaaaggtttcaccctcttttttgaacatattctgcagttgagta

SEQ ID NO: 96119 - DNA, 357 bp, Glycine max
  unsure (1)..(357): unsure at all n locations
ctggagatgtatattgatatatatatatccctggattcttaagaagttattaaggtgcaagaggggatccaacctcattacttttcttaatcttagaaagtatatcctttgtcgcacctccatatcttctaacaacgttggatattggaatgtccattctcctctccagtgaaagacttatttcaaatgagccatgtatctggcaacatgatatcactcttcactaatgcaatccacatcttaatgaccatattagtgcttatcaaatccaagagtcacttcatacttgtctcatgttagggtggtnttggttgaggtntattaactggtgtatcacatccaagagttactntatac

SEQ ID NO: 96120 - DNA, 371 bp, Glycine max
agcttagggtgacagtcttatgtttcctaccatgtgctctagcagataaaattctcatggattttattttcagctcccttacattttccctaggaagcggggtgcatatttaagagcgaagtaatcttcacgaaacatcattgtcttataccataacattgcatattgggaagactacaaatacttcatcacaaatgcagtcaatggtagacttattaagcctttcaattcaagataaccaatcagatattagatatatgtgaaactacacctgagtctttttattctagtgagtgttcttatgacaaaaagttgtggaaaaaattatttaaaatcagcctttgtgattcaccatgttatcagtcaggtca

SEQ ID NO: 96121 - DNA, 408 bp, Glycine max
agcttggcttagcacacgactatcaacaaaaaattgtctaagttacctgggcttagcgattcagcctcgcttagccacaggtagttcagcaagaggatgagtattcatcctcaaaggatgaactcgcttagcgcggtaggcacgcttagcgagttcttcagagaacgcctctatacaatgagaactgatgaactcacttagtgcagcatgctcgcctagcgagttcattgtgttttccaaaaaacacagaaaatgcagttcgttttcttgcacttttcaagcctctaaaaggcgtattagacatgcactgtgtgcatcatactcaatacagtatacaagtgtaaatagtcctaatcttaaactaattctaacaaaacattaaaaccctaaaaatctaaaactacaagt

SEQ ID NO: 96122 - DNA, 417 bp, Glycine max
  unsure (1)..(417): unsure at all n locations
ctcgtangtgaaatcaggtgcagttatttcccttagagtcctctcacggngtggaggttgtgccatgttctcaaaatgttcaaaatcagaatgctcagaatcagaatgctcaaaattataatgctccatatcaggatgttcaaaatcaccaataacagaatgcacagattcaccagtaatggaatgctcaggatgatcaaaaggtataaaatgatgcctaactaatctatgaaatgtcctatctatctcangatcaaagggttgtaagtcagatggattgcctctagtcatacactacattcagcatgcacaactagttgccttgtcatggaaataaaagtgcaagtttgaactacagctaccctcanatgatattcatatgactttgaaatttgtgagcaaccttataaaatgatg

SEQ ID NO: 96123 - DNA, 402 bp, Glycine max
  unsure (1)..(402): unsure at all n locations
agcttctagtctcaatttttagtgtctcgatatagtacccgattcaatcggacattcgagtaaaaagctattgtcgtttgaatttcctacgaacttccattttcaattcggagcgtgtcgatatattacgggactcaactggacatccgtgtataaagttattgtcaactcaatttgctcagagcatcgaatctaaattttgagcgtcttgatatattacgagactcaatcaaacatccgtgtaaaaagttatcatcgtttgaattggctacgagcatccgttngcaatttggagcatctcgatatattacgagactctgtcgaacatccgagtaaaatgttattgtcgtttcaattttctaagagctcccattttctatttgtagtgtctcgatatattac

SEQ ID NO: 96124 - DNA, 404 bp, Glycine max
agcttaagcttgatccatcattctattgttaactatatcagctatttaaagcctacacaaatgctgagttgcaatcaagttgtaattgcaagttgagagacagactaagtaacaacgagttagtgatatacaaatgctaatatatcaattatggtcaattaattgtctttagtcctttaaaagtgaaaatactataatatagtagatgtatcttgacactcttcgaatccctcgcatatataaaagaaaaaaaatagtagatgtatcctagtttggtttctgtttgacacccacattgaggaaatataagattagtgagtcaataaagcttaaatgtatccatatgtaatattttgttgtgttgtcccttaaatttatacaaatcaaatggatcctaattgtct

SEQ ID NO: 96125 - DNA, 406 bp, Glycine max
  unsure (1)..(406): unsure at all n locations
agctttgcggatatggtcttcactcgactaaaggatcaaagtgggtctaaaaagaggcaaatctgatcatcatgctttgataaatgcaaaaaaactggggcaaatgaagagggtgagaatgagggagaaacccatgatgtgaccgccattcctatacaaccaagtttcccaccgacccaacaatgtcattactcagccaataacaaaccttctccttacccaccacctagttatccataaaggccatccctaaatcaaccacaaaacctgtctaccgcacttccaatgatgaacaccacctttagcacaaaccaaaacaccaaccaagaaatgaantttgtagcgaaaaagcctgtagaattcaccccgattccggtgtcctatgctgacttgctcccatatctac

SEQ ID NO: 96126 - DNA, 426 bp, Glycine max
  unsure (1)..(426): unsure at all n locations
gtgtattataaagcaaatcatatcctngctnttatagactcttcatgtttggccaagaggaccatttaaaagagttataacttctagaanaacttaaaaccaatttgaaaaagtcaaaaaaccatttgaagagttacatcttttgatttattcagaaacaatcactggtaatcgattaccaaatcaatgtaatcgattacacaaagcttttatgtgaaaggatgtgagtcttcacatttgaattngaatttcaacgttcaaaggcactggtaatcgaataccaaaacattgtaatcaattaccagctcttgaaatcaatggaaccgtgaaattcatttgaaaatttttcaaatccatttgctacttgtatcgatacaacatctagnatcgataccnagagtaaaactcttgtaacattgttgaaaa

SEQ ID NO: 96127 - DNA, 397 bp, Glycine max
agcttggtgcatatgatttatatgctccagcttgagggggagtgttgaatattttagtatttatctatgtttgatagcttagttggtaagctttattcagaaggcagcaatgaattgtcactgtcatagtccttctctctctcttatgtattgtatatatatgtatcattttgaaatcaataaaggttaagagagaaagtgagaacattactcaactcacctcagtcttcaagtatatatataaaggagtaccagaggtactaaattacagaaataggaaaaaccatacgaatggtgcctgaagacagactgaacatagtctgagaaggaatcaaactatggctacactttagaatctacccctagtgctattggtattgttctgtcttctaccgat

SEQ ID NO: 96128 - DNA, 441 bp, Glycine max
  unsure (1)..(441): unsure at all n locations
gaaactcaagcttataacanagagtatcaattatagccttactcanaaccttttagctttgtcatactgacagattaactacttttccggattaaaaaaactacaagtttcattaacttgaacttgaatcataatatcgtgcaatcacatacatattcaagcaaaagccccgagatatagactgtgaatgatgcttgaaagattaattgcacaagataagtttaaagattctattagagcatcaattgtgaatatgtattaatctttaaaaggttcttggtaacaagcggagggcttgacattgagatatcttctgaataagaaagacagacacatactgtggggaagaagatataatagagatagccccttctttcacagcaaataacttatgcagcatgagttctcaagcctgaattcatatcctcaactagatataac

SEQ ID NO: 96129 - DNA, 408 bp, Glycine max
agctttaaaggtaaaattagagagtggtaaccaaatggtggtttcaaatagaagaaactctgttggaaacatttgttcttcctttcaaactagaaaaaggtttaaaagaacattgctgttcttacagacaatacataatcagatatatatgaaatcagcagctgtctaataaggtcatgcatttgtcaccgcttttgatatatcggatatgatgccgcatggcagaacatttgtcattatgatattgaagtagcaaacaaattgcaatcagcttgcatgactcttaatgctgactttttaaaatgttcaatattaatttttagctttctttatctgtttaaaagtttcgttctatttttttttggagggggcatgcttacatcacatttatatgtccaacaataaaat

SEQ ID NO: 96130 - DNA, 407 bp, Glycine max
agcttaagctccttcaactgcacagtgctcttaatatttgaagagtatccttgtggaaccttcacccaacgaagacactgacaaaaacttatcttctttttcttggacaaagtatggcaggctggaggcaagtaaattttcttcccatcagaccttggatgcaactgtgaacatatatgtggcgtccctaaattaatgactggtttaatagtaataatttaaataacaaaaaccatggtaaaaatttttttttctcctttttctttttcatttctttctcttttcaccataactaggtttagaaggaaagtcctcactatagagtcctgaatggccagttcacaactctattcggagtcatttctttcttaccgctcataatctctaaactatattgctgtttcaaa

SEQ ID NO: 96131 - DNA, 267 bp, Glycine max
  unsure (1)..(267): unsure at all n locations
tcccttctgctttcaattgtattattatgatcacctgaggtaagctatcacttaagtgaagtaccagacgtacttaatatttcattaaggaccatacaaatggttgcacaatgagacattgatattctgaaccggaaccacgaggacggatatatattngctatgacacttacaataaaaaggctgcgagcaatgcatgctactactgatacaaaaagctgtgtgtgtacctggttggacattgactgtaatggactgtgaaatctt

SEQ ID NO: 96132 - DNA, 404 bp, Glycine max
  unsure (1)..(404): unsure at all n locations
agctntntggagtagaaacatgtttacctactcatnttatttcaaaaaggaagtcatctctagtcaaggtctgagagaccatacaagtttcctaacgatttctaattatgtgggccattaagtctatcatatgctgacaatagccgagaagcccatgaatctcttcgggggcggagtaggtgtctgccatcgccttggccttggctaacaatcggggaagttcttgactcccgttcaaggtaagggcaaaccgatccatccacatggttgcctcttggtgtaaagagtcgatcacccttcctctagcctctttttccgcgtatacttgggcatactcatccgcgattctatgctcgtgggccgtggctagacctaactcttcttggtacttggcgatgatagct

SEQ ID NO: 96133 - DNA, 412 bp, Glycine max
gatcttaagcacctgagctgcagcttgatcaattaaacgatttttttatttacttggatgtctgattgagtcccatattataacgagtcgctcgaaattgaattttgaacctcatagccaattcaaacgacaataactttttactcggtagtccgatttagtgacgtaatatatcgggacgctcgaaattgaatgttgaagctctgagccaattcaaacgacaataaccttttactcggatgtctgattgagtcccgtattataacgagacgctcgaaattgagttttgaacctcagagccaattcaaacggcaataactttttactcggatgtctgattgagtccctgtaaattatcgagacgctagaaattgaatgttgaagctcatagctatattcaacgacaataact

SEQ ID NO: 96134 - DNA, 192 bp, Glycine max
tggtgtgcggggcaattattagtgattaggataaaaaagaaagttggtgaggtaattaatattaggatgtttttgatataaatcagaagtttgtgagtaagtaatattaggtgtttagattataaaggaaattggtgagtaattaatattaggtataatgattaaatataatttgggagtaagtattattgg

SEQ ID NO: 96135 - DNA, 395 bp, Glycine max
  unsure (1)..(395): unsure at all n locations
gataagtgaactgaggcgtgcaagcttatnttcgatgaacatctttctttattggaagggccactggtcattactaatgcttgctaccatggtgcaactgatattaaaaatgaaaatactggcaaagtctttaaagtgaacggtcaccaattcaagctttttcatgacagcccccatgtaaaggaggaatttgtggccgacctctctttggtcttgccaatattatgtgaagatgtgccttacatggcactttagaaggtccctggcctttctttgatatgttcatatctctggttgcatgtcactacatggtcacattgaggacaatgagaatctcaagcgcgcggcgagaatttagaaaaaaaaaaggtttgcttctaattttctgctaacta

SEQ ID NO: 96136 - DNA, 250 bp, Glycine max
  unsure (1)..(250): unsure at all n locations
actccccgtgaattaattcctttgatagtctctttgagccttgattatctttccttgtgttgaagctcactccgagccttcagtgcaaaaccatgatatcaccatatccttaaagaattttggagctttggaattgttttgagaataagtgtgttggggggggggggtgtatatcaatattttgtggtggggagatacaaaatattgtctccttttngttccaaaaggtatataagtaaacataatttaa

SEQ ID NO: 96137 - DNA, 404 bp, Glycine max
agctatattagtgtgggttctttatacaaaggtcaagcgttcgcgatatgcgaagatgatattccgagtactttggatttggtacgaccatgctctcctgattttcagctgggaaattggcgagtggaggaacgccccggtatttacgcaacaagcataatgtaaacctttacggttttaaaagctctatagttgggcctaggctttagagttttcattttgttaaggctttgtgtcttttgtttttgaatttataatacaaggatctttcttcatctgttcctggtctctacccattctcattcatttgcatgtttacttctttttctaaaacggcagattcgatgacgagtcccccgaaggtactaatacctgggacccgtctatcaactctgagcaagaaa

SEQ ID NO: 96138 - DNA, 446 bp, Glycine max
  unsure (1)..(446): unsure at all n locations
tgccacccagctcacccaggcgagtattggttgcttcctcataacaacagncttctggaggaatcttctggagggcccaagtgggcctggttgctattngcacccccatttttactaaatacaccccccttttctatttatttcgaactctatttctgtaacgttacaaaactttacgaacttcgtaacgatacttattttttcttctgcaaggttacgaacccttacgacttatgtatttactctcttttagctttcagagaagttacagaaacttacggattgcgcaaaaacacctctttttgacttccgccacattaccgaaagtcacggatcgcacaagcctgcttccttttgatttctgagacatctcgaaacttcattttatgcatgttattaagtaataattccccgacgaaattaggggatgacactttcacaaacac

SEQ ID NO: 96139 - DNA, 364 bp, Glycine max
agctttgtctctaggcttgttttcatcactttcatacgaagctctaaccacattgtctctcacaatctttagatttgggagccaatccaatccttgtgtccgtactctcagccacttatgatagccgccgatgatcccattactgcttcccctaagctctctgtcatttcatcacaccgcatcacatgccttgtgaacttcttggagtaccctcccattggggacactgaaaccccgtgcgatgaaaggcgtgatgctctcgtctgatggcactcctctcatgggacatccttcgcatgaagatacaatcctgattcttccttccttctagcgagggaaccaattaacagacgcccctccatgc

SEQ ID NO: 96140 - DNA, 274 bp, Glycine max
tcattttcttctagaagactgcagtcatgtaattcttatattattcgacgcaatcctatcctcaaggtcataggatagaaaactctcaattaattgtgccatagatgctagaagatagtcctatgtgtcctatgatccctcaagtagataatggtcccatgggctaagtacaagcccacttattttttgtaatattagattaaggtctcattatttttcggccttgtatctatggctccataatgtaggtaggataccctacaaatatagcatt

SEQ ID NO: 96141 - DNA, 402 bp, Glycine max
  unsure (1)..(402): unsure at all n locations
agcttgcacggcaagagttatttttacactggncgtctatgaacagcgattcccatgagaagaaactgatgaaggggaccgaagctgacttgtcataggtgatttatgtcattattttcttcaatttgtttcttacagattgctaaacttcaagatgataacaaagctttagatcgtcttaccaaatctaaagaagcagcacttattgaagctgagaagactgtacagattgccttggctaaagcctccatggtggatgatctccaaaataaaaatcaagagctaattaaacagattgagatttgccaggtatttgcaatttcgtatggtgtttccctctccaagtatgccagccttaataatgtaatttcttatatttggttttggtatcatcatcacctc

SEQ ID NO: 96142 - DNA, 255 bp, Glycine max
  unsure (1)..(255): unsure at all n locations
tttaaagcanttatgtaattgtgnaaagataaggtttgagnaaatgtntatttgtatggatntatgttgnaaaataatattaattgtgttaaaaaaatattgaaaaaaaaaaatatggttatggaaataatagaagattagtaatgttaaattgatatagttatggtgatatgatatagatgttaaggattgagaaaaataaaaattgatgtaagttaaaaaatgatatgattgtctgaagaatataagaaagtg

SEQ ID NO: 96143 - DNA, 386 bp, Glycine max
  unsure (1)..(386): unsure at all n locations
agcttggactaganagatgatttatacatggaaccttgttgtagagtgatcaagtcatgcttaagttgaaaaattaaaggaccatttcgctgctcgaaacgttcttgaagattatcccaaattgctttggcagaagaacaatgtaaaatacttacttgtatttctttggataaagaattaaggagccaggaagaaacgatactattgttgcgatgccacaaagcatgagttgagtgacccaaagcagggtcaggaattgaaccatcgacaaacccatatttgttcttcccatgaagagctatgcgcattgctttcttccaagaattgtagttttcactggtaagaggatgagaaactaatgcaatgccaggattgtcggaagaatg

SEQ ID NO: 96144 - DNA, 271 bp, Glycine max
  unsure (1)..(271): unsure at all n locations
tgtgaaattacttncttggttaaatcccagcggtcctccttggttgtagccttagaatccttggcgattctgagctcccatgtagtttaccttcctcgaagaatcttcttgngctaagcattgccctggctcgtgttctccaccgcagatgtggcatcctcctatttgcatgattgaagagtgagagtggactaccacttgtagttgttgagggaacttgttgagggtctccgtcaaggcctctatctgtcgggccaatagcttgttttgg

SEQ ID NO: 96145 - DNA, 401 bp, Glycine max
  unsure (1)..(401): unsure at all n locations
agctntgcatatcctttgataaaccttcgatagtaaccagtgaggcctaagaaacctctcaactgcttgatattgagtggggtaagccactctagaactacctgcaccttagtagcatccgtagcaactccttcacctgaaactatatgtcccaagtagtctatctccaatacaccaaaagaggatttagataacttagcaaacaaaacattttctttcaacactttcaatacagcctctagatggcataagtgttcatgctgtgtggaactataaaccaatatatcatcaaaaaacactaacacatattttcttaaagcatgttggaaaatatggttcatcaaacactgaaaagaagccggagcattggttaaaccaaatggcattaccaaccactcata

SEQ ID NO: 96146 - DNA, 385 bp, Glycine max
gctcttgtgtcctggctggaatagaactattcccacattttgtataatatctggctgcagcttgaacacctacatgaagaaagaaatatgtctgagcttattcctaacagattagagtcattaattgtagttattattcaattgataccattgtttttgtttcataaagggactcagaatttattcttaacatatcatcataaaagtcttatactttgtagcttcataacattaaagaaaataaatagtaatgtgcttaacaacaaacaattaaatattgttatatgattggggatatgattagaagagtataaatcagaaatttgaacctgagtgaacaagcttcttattgtggttgaattaattcgtacattttcagaggagt

SEQ ID NO: 96147 - DNA, 401 bp, Glycine max
  unsure (1)..(401): unsure at all n locations
caagcttgaccaatttgtatgatatttttcttgtaacaagctaaattttagtggataactctaataaaatagtttcaactcaaggcaaattgtagacatagctaaaaagtgaaaatgatcatgtaggctgagaatgatggctctgaacttaatagtaggatttattagcttatagatggaggaaaagactaggtagatgctgagaactatttccctttggatgatctcctttctaaacttactcttttttcctctattatgaatgttgtttttcctctattcatttagatcattctttgctttcataattaatagttttgtcctttgtggatttttataatatatatgaccgagaatgaattttntgcattgacctattcaaaaatcatactaccatcttc

SEQ ID NO: 96148 - DNA, 331 bp, Glycine max
tgaccacagagtggtacctggagatatgttgtgggggtcacgagaccttgttgacgtcaggtggggtgctattgctcataaccaatctggaccaatcccgacccaacccgggcatagtcagtcagagagaacctttgatgtacctaagcaggcaagctcctggcgtcaacagattaaaggaacaaagaccactaagcaaggaggcctctggtaatcgattaccagtctgtgtaatcgattacatagaggaataggtcactggtaatcgattaccaggtatgtgtaatatattacacagtgcctatctcagggtttcatgttctgaagctgt

SEQ ID NO: 96149 - DNA, 397 bp, Glycine max
agcttagaatgccagatttacttgatgcaccaacatcaatggtgcagagaggagaagggaccaagagaagagtagtgaagcctgcatacctggttgattacgtgtaaggggcaaaattggaagatcgaactagcgaaatcagcccaaaatcccgcttgtagtggttgctccctcataggcagtcatgcatatcaaaaccgttattagattccttttggatagaaattatacaaatatgttaaggggaattcttctatatatagctatgtaaataatcaagcaggatatgagaaaaataatattcccttcttaccttggtgtttttcccctttcttttcttcattctggaggccgctgccctcgaagccagctctaggttcttaccctaacaattggt

SEQ ID NO: 96150 - DNA, 416 bp, Glycine max
  unsure (1)..(416): unsure at all n locations
gggaccttaancacctgcggctgcagcttctaaggaagctacctattctataaatagaagcatgtgttacactcgttgtaactntgatgaatgagagtcttgtgagacacaactcaaagttcaacttctctccctttttcttacttcaatttcgtgctcccccctctctctttctctccctctttctttatctccattgaagcatccttccaagcttcttatgcaaagcttatcttggtggtgaagctccttcttccatggcttattccctagtggatggcgcctcctctcacctcttctcctttgtcttccgctgcatctccatgggggaaaatcaccattaaaggacctcattgaagctcaaagatccagcctccatagaagctccacaagcaagtttcatcatctaaccctca

SEQ ID NO: 96151 - DNA, 432 bp, Glycine max
  unsure (1)..(432): unsure at all n locations
cgatggtgcttatcaactcttccacatccacaaatcaaacatgagcccaccattcccagttgcccaccttcaactgagctcacgtactcctacgtagcccttatcctcgtttctctcagcactgtgtcctcatcaacccctccaagcttccacaatatccaagcaattcaattccaactatcatgaactaccctaaaccaagaaaacagggcagaggcagaaaactctgcccaaaacacattcacatattacagctttccttactcaaataccccagtaacattcccttcgttctgaattcgtaaccgttggatcgacttgaaaattgactagaggttcctagtacataagtctacatttngaccgttgggatctgccagaaaatgtccagaacccaatatgtactatctttcccataaccagcaatgcaca

SEQ ID NO: 96152 - DNA, 404 bp, Glycine max
agctggccgctggagctgacctatttactgccctaactcctttagactgggtggccctaagctcttgaccttaacttgatagaacctctttttaagcgaaggcatttgacttgatcccatgttttactaaagtgaacaaaaatcggcgcgaatcaaaactccaacatctatcatgggtggaatggatgaatgcatgaggaaatatgacacatatgcaatttattaacacgggagcccgggaaattgtctccttcttagatacaacatcttggggtagcaaagtgcctgacgtatgtattaaagaaggtgactcggaacgtccgttggttttccaatgtgcgtgatgcatatgcgaaaggtgcaacacgggaatgtacagtatgacaatattcacaaaatacaag

SEQ ID NO: 96153 - DNA, 408 bp, Glycine max
  unsure (1)..(408): unsure at all n locations
tacaatatagagagtaagcttgaatatgagagctttacaacttaagataattacaaagagatagaagtgccctaagtgcaattctaacctgagaagaaatgcggtaagcgtgaaaagttgtgcttaatgccaaaagtggactccattctaacgagacacgctcgtcaagcgagatctgcagattataaatatgtntttcagcctggaaaatacaatttcacgcctctctctctcanaactctgtccaaccaccctagaaacttctcctccaccacccacgaccaccggtggccaccacgagctgccattggttgccgctaaaccaccacactgagaggaacattntaatcggagcggaatcctcataatccacctcaaggattcggtggagaaaaatcctcaatcctt

SEQ ID NO: 96154 - DNA, 401 bp, Glycine max
agctttaagtagctcattgacttcatattgctgcaaagaaagacaaagatctgtatggtgatctgcagaagaacatagaccacagactcttgcaacaggtgtagatttctgattcatggcaaactgagttactaggttgaccaaggcatcaagttttccttcaagctttttattctctgtagatgaagatgaatttgtggccacctcatagactcctctaaggacaataacatcatttcatgcactgaattgtagggagttggaagccatcttctcaatcaaattcctagcctcagcaggggtcatatcaccaagagctccaccactgtcagcatcaatcatactcctctccatgttgctaagtccctcataaaaatattgaagaagaagttgctcagaaa

SEQ ID NO: 96155 - DNA, 406 bp, Glycine max
agcttattcatatgtgtagatctgcactaaaatttcagaaacacacgtcataaacattacaacaaatctgcggttaaaacccagaaaaacacacgcaccataaacactacaaaacaacagatctgccatcttcatcttcgagggcgcaaggacgcaacgttcacacttgccccaggtgttcgtcgatgttgcagatatgggctgaaagggatgacgaatgcgattgcgagagacaagttatgaagagagagggataggagcgcagatatcggccgaggcactaaaattaaattaccgaaatgaaggaaagaagaaagagagggttaattagggaaatgggtaattttaaaatgaaattatcataataggtattgtttttaaaaaaattacgataatgagtaaatgg

SEQ ID NO: 96156 - DNA, 499 bp, Glycine max
  unsure (1)..(499): unsure at all n locations
taactgcttatgtaacacttcattgctgatcatctccttttcctatcaacatattgcacataagaattacttcaactgaaaaccaaagtcacaaggagcctcgcaaaaatataagattgtagcaaccagcacttaatgggaaattgcaaactgaatagaagtcaaacaacaggaaataggcatgctatttaacccagttatgagtttaataggttcggtctcttgagagcatgaataggtattagttttgatctgggatgcaagtgaactcctatatggctgccatagtaaagatataacatattgggtacacttgngaatttcttcctttcagtgcccncattgtaatttaggtctctttaaattgcttgatgtatgtattttaattttttcatgttacattttacatatacccaccctaagctttanaaactctgttgcaatccatgccattaaaatataattggaagaggaatatattcattttcaagactctact

SEQ ID NO: 96157 - DNA, 370 bp, Glycine max
  unsure (1)..(370): unsure at all n locations
cagccnagcggatgaggacctctccagttataggaacgatgcgggtccgaaaagaggcaaaattgatcatcctactaagacgactgagaaaactggggcaaacaaagagggtgaggatgagggagaagcccatgctgtgactgccattcctatacggccaagtttcccaccaccccaacaatgtcattactcagccaataacaaaccttctgcttacccaccacccaggtatccacaaaggccatccctaaaacaaccacaaagggctgtctaccgcactttcaacgacgaagaccacctttagcacaaaccaaaataaaacacccaccaaaaggaattttgcagcgagaaagcctggagaatacacccc

SEQ ID NO: 96158 - DNA, 399 bp, Glycine max
agctttacagcagatttttttttgaaccactaacctataattaatataacttattgccattaacctagggaattaaaaaaaacttaatggttgagtgtaactgaaattgtggcaaccaaaagttacccccaacagccaacaagttagccaccatttggtctcccaaaaggctgatgcctaagttgccaattgggcccttattacaacttgaactaaacctaactaatgcccttttagttgattaacccagaacatatttttggtcagccaactttacaaggattgggccattatttagacaaactaaacactcttaaattgaaacaaagcggtgtcatttagtcctcctccatttgggccatgatacaacttacaaccttggacttttctccttgaaac

SEQ ID NO: 96159 - DNA, 361 bp, Glycine max
  unsure (1)..(361): unsure at all n locations
ctgagagaccatacaagtttcctaacgatttctaattatgtgggccattaagtctatcatatgctgacaatagccgagaagcccatgaatctcttcgggggtggagtaagcgtttgccatcgccttggccttggctaacaagcggngaagttcttgactcccgttcaaggtaagagcaaaccggtccatccacatggttgcctcttggtgtaaagagtcgatcacccttcctctagcctctntttccgcatatacttgagcatactcatccgcgattctatgctcgtggcgcgtggctagacctaactcttcttggtacttggcgatgatagctagcatgttggtcttcgtctcacataaa

SEQ ID NO: 96160 - DNA, 389 bp, Glycine max
tagcttctatattatgatatttatattgtaaagaatttgtgcatttccaggactctcagcttggggagactggtataagtttgccccattgtcatcacatatttcacctaccttgcattgatatgtggctgatgaaacatggttcctgcccattatgcagaagggatctgggtaattttgtaaatgcaaagtacaaaccgtaaaaatagctaggttctttcatttttatttttttttatataagggaatttacttttaggaatgtatagtatggttaaatgtagtatgaactatgaaccatccatgccactcatgagtgtcataattgttataagttactacaaagaatattttgacatatatcagctgccatttcttgtataaacaaa

SEQ ID NO: 96161 - DNA, 414 bp, Glycine max
  unsure (1)..(414): unsure at all n locations
tgaataacaccaccactagtcanattgtgtttcanataccttacacttaaactccacacactcanaacactcaatcagaagagaagagaagaatgtgtatttggtattgtaggtgctaagactcatatttaaaggcaaaggaaaaactttccttacaatgtaaaacatacattaaagcctgttatttctgaaatcctatttaatattttcttcgttatttctgaaaagcctatgaaccctagcaaaaagacacagccatgcatgaactgaaacctaccctcatggtattggtggaacagtntagcctacaccaatatcgcaaatggcattgacggaactagcctgcatcaatactgccactttgactggcggaataaacacatggatgatggatggatgcatggacggatgcgt

SEQ ID NO: 96162 - DNA, 353 bp, Glycine max
tgcttgttcatagtagtttctttcatacttcacaccggcttagtttaaacatgaaatttattttaatctaaaattagttttgctctcgcttattttaatagttgaaatatgtcttgcttttgcttattttaattgttgaaatatgtttagcttatgaggtgtttgacaaaatgtctgatatagaatcaaggtcttttttggtataattttttagatccaacttttgcatattgttcctttttcgggattaggcttgactagattgtcttttctacgttccgttgaataagatcttattatacttgaaggacccttaaagcttttgacaataatctctttcagacttcacacca

SEQ ID NO: 96163 - DNA, 381 bp, Glycine max
agctatataaaccacccctattttttaattcagcactttcttacactgggattatccatcatttaatactgtaggcacaacttatgttatgagagtatgatatatgtattgtttatgatcagacatatcttctaccacagactcttacatatgaaagcctctttctttttgacttatctttacttgatatcttgagccaatatggaatttacaatagtccttgcgctaaataatgtcgactaaatcataaagaatttgagtatattcaagaacaatgatcttttttatgattctttttattactagctttgaatatagtctaatatcttaagaatgcttgtgcatgcatccccttagcacctatatggataaggttaaaaa

SEQ ID NO: 96164 - DNA, 398 bp, Glycine max
  unsure (1)..(398): unsure at all n locations
agccttacatggagctatatcatgtgttttcaagagcatntccatctaggtgatgtccttatgattcctctatctctctgattggccaactcactttaattccttgttcttcatcttcttctccatgtatctcctcaattttcttgtagtttggtgttgctttagtgtaaatcaaaaaaaataaaccgattaaatcttagatctacacttgctcttgcatttctatggttcaaattttatagataaactcttgaatcatgtttttgtgttgattttaggtactatcattctttagtcataatattcttggtttgaacctttagatctcaattctcttgcaaaatattgattataaaagataacaaaaaaatccaagtgtaaatcacttcattcatgtt

SEQ ID NO: 96165 - DNA, 415 bp, Glycine max
  unsure (1)..(415): unsure at all n locations
ggtacctcaatcggtgccaggcaccatttccactatctgatgacctactcggttcaaaaacaaaatatagnntttggtttcaattataattacaaaatatttcactctagtttcagtttttcattccaattcctatttccaaacattcatgaaaaaaattgcaccagccacctgcgataaactntaaacaaaagaaaaaactaaactcgcgtataataataaaataaattcaatagaagtttacacgatctattactgagtctccgacaacaagcattaccgaaattaacaattaccttccatagggtgaggaccttctggcaagtcagagcgaggaaccagcatcttattgggctctggtgatgttgttgttgctgacacaacacacaaaattgaacatcaaaaccctagaatc

SEQ ID NO: 96166 - DNA, 361 bp, Glycine max
ctatgctcatttggatctgcattgactgactttgtttaatgatatataaaattgactgcttttcttctttctagataggcttgctttttgtcatccaaaacgttatattgcactagatttcctcctaatgaagctagtacaaaaaaaagttcttttttttatattggcattttacatattgatatcttgaaaattgttatagaatatgacatatgatatttttgtaatattgggatgaatattactcgatactactattataaatctatgactctgcatagagtggcctaatgctactaagaaattggcctaatgccttcatatattggcattttacagaagggtcagtctcattgttact

SEQ ID NO: 96167 - DNA, 367 bp, Glycine max
ctctgcctgtcataatttctctgttgtttctgttgttgccattcttagaacatgactttggacttaacttatccccaaaagctagcttatatggtgagggctgccctccacttatatactgtattttggcactatctctggccaatgcgagacttgcgtcttttccaatagtaaataggttgtggattgtatgaagcactctgctctggttgcatttgtagattcggccctccgagctcttattctctgaacagacagttgtcttcgaatgttcgcacctttgcagagcatgattccggaacttgcttgataatctattcatgggtctaccctgtcccctggagccaggtttgttatattgtgaatg

SEQ ID NO: 96168 - DNA, 371 bp, Glycine max
  unsure (1)..(371): unsure at all n locations
agcttgaacggtttattctnatttttaatatccacactcttttaactagttgatgtgatgcctccaacatgaagcatctcatatttaatctgttgtctttttattagtgacaaataatattattcaaagttcagtcaatctattataatctaaatgtaaaatttaaattttatcgcaccatatcaaattaataaacatgtgagccaacatatgtatgtatatcattctgcaaaatgaaatttgcagaaataacaaaattattatctaaaatttattaaaacttatattctaaataatgctatagccagatctcgtaactttgacaatatatatctgctagagaattgggcaccaacccactaaagaggact

SEQ ID NO: 96169 - DNA, 430 bp, Glycine max
  unsure (1)..(430): unsure at all n locations
cggacctatgaaactcaagctggcgcatatgttctgcctaaggttctcgctctctgcagtacgcaaccaacgccctatttatctctctctctcttgatgtaacatgcacttgtagtactgttggtgacagcatgatatatatgatattgtgcagccaaagccaaagttcagcggactaaagctnttctacgagatttatagcattccaacggaggagttcttgagggaattaatggcctccactgcaggtgttggcatatttctattggtataaaataaaatttattgtgttgctgcagcctgctaagntatacaagctgaagcacctctcataaatggatagtgcaacaaaagatcccagaggatgtacatttacactgctaagtttctggaacagaagcaaatcaggatgtaaccatcttctgctatg

SEQ ID NO: 96170 - DNA, 371 bp, Glycine max
  unsure (1)..(371): unsure at all n locations
agcttggacaacaccacncgcctattatcaccgcacgctccaacgagcgggggtgtataatactggaccgacagcccttccgaagtaatgattggaggggcgtagagaaccagtctgcactatgcacgccacattcgagagctgatccccttcttttagagaacggaatcctgttgcacctacggcaatgaactgttcggaatatccaaggggagcttcaatgcattcctcgaggatacgactacgtagggctgggatagttactccaatacagcgggagcacaagtcgcagctgcaatcccgcccgacccctcgcacatcatatgcgtggttcatcgacatttcatgcatttcacggatcgcgcgcgcct

SEQ ID NO: 96171 - DNA, 407 bp, Glycine max
  unsure (1)..(407): unsure at all n locations
agctttatatggacgaaagtgctttctcctatttggtggnatgatgatggagaagcaatacttcttggacctgaaatgctacaacagattaacgaacaagtaaagttgattcgagagaagataaaagcatctcaggataggcagaagagctattatgatagaaggaggaaaccactagattttcaggaaggagaacatgtgtttttgaaggtttctcccgtaaccggagtcggaagagctcttaaggctaggaagttgacacccaagtatctaggtccgtatcagattttgaagaagattgggcctgtagcttatcatatcgccttacctccgagtttatcgaatttgcatcctgtgtttcatgtctctcaactgagacggtacaacccagatccatcacatatact

SEQ ID NO: 96172 - DNA, 306 bp, Glycine max
  unsure (1)..(306): unsure at all n locations
cacagcccccgtattagcaacttctaaacttgatataccttttgtggtagagacagatgcatcaagcaccggcgtcngagcagtcctctcacagaatggacatcctatagtgttcttcagtaagggaatttgcccaaagcttcgcccctcctccacctacattcgagaacttgcagccatcaccatggccgttaagaagtggcgccattatttgttaggtcaccctttcgtgatcctcactaatcaccagagttntagggaccttatgactcatgcagtgcagacgccggagcaacatcgatacct

SEQ ID NO: 96173 - DNA, 375 bp, Glycine max
  unsure (1)..(375): unsure at all n locations
actangtggcggtcatgcgatggtgcaaaacaattcttcacattcacaaatcacatataaacccaccatcccctgttgcccaccttcaactgagctcacgtactcccacgtagcccttatcctcgtttttctcaacactgggtccccatcaatcctcctaagcttccacaacatccatgtaattcaacattcaatcatcacaaactaacacagccaagaaaacagggcaaaggcagaaatctctgcccaaaacacaaaccaataccacagcttttcacattcaaataccccagtaacattctcttcgtttcagtttgttaaccgttggatcgactcgaaaattttactgaaagtctctagtacataaatctacat

SEQ ID NO: 96174 - DNA, 370 bp, Glycine max
  unsure (1)..(370): unsure at all n locations
cccaatgcgcgagtaagaagagataattttccgggctctcgtgtccgtaaaatgcattcatatcatgcatcgcataagcatctcttcataacatcataatggacatatcctgcattngtccgttatcatattccagcctcacattntgcatgagtcatggcatcatcatgcatatgcgttcaacaaactttttgatctgcaaaantgcataccatttgttttcatggttgctcatccttgcgttntcctctacaaaacaaaaacaaagaagggggaagcgtgaaacttcacactacattcttagtttcatgtgttaggcaccacgagccaaccatgttgggatcatataacccgttcacaacaacaaaac

SEQ ID NO: 96175 - DNA, 401 bp, Glycine max
agcttcggcattcaagacttattgtctcgatatattacgggactcaatcagacatccgagtataacgttattggcgtttgaatttgctcagagcttccataatcaattttgagcgtctcgatatattacgggactcattcagacaaccgagtgaaaagctattgtcgtttgaatttgctcagggcttcaacattcaatttctaacatctcgatatattacatgactcaatcaaacatccgagtaaagagttattgtcgtttgaatttgctcagagcttcaacattcaattttggtccgcttgatatatgacgggattcaatcggacatccgagtaaaaagttattggcgtttgaatttgctcagagattttgcattatgctccagcctctcgatattctac

SEQ ID NO: 96176 - DNA, 217 bp, Glycine max
  unsure (1)..(217): unsure at all n locations
gagtctttaatatatncgagattctcaatattgcatactgaagctctgagaaattcanacgacaataactttttactcggatgtctgattgagtcccgaataatgtcgagacgctcgatattgaataccgaagctctgagtaaaatcaaacgacatttacattctactcggatgtctgattgagttccgttataaatcgagatgctcagaattgatt

SEQ ID NO: 96177 - DNA, 422 bp, Glycine max
  unsure (1)..(422): unsure at all n locations
atcttaagcgacgcagctgcagcttaaagtgcagaggtgagtctgataactcacataatagttctgagggatccacaaatgatgaagtgactcttatgtacagaaagttcaaataaacgatgaagaagaaaggaaagttcatgcattcctctagacaaaaagatacaatattcaaaaataaacacaagggggaaagtaatgagatcatctgtttgaaatgcaaaaagcctggacatatgaaggtggagtgtcctcagttaaaaagaaagatacactctggtgataagaaaaagaaaagtctgatggtcacttgggatgactcatacagtgagaagagtaggagttcagatgatgagcaaaccaacatctgcttgatggtagatactgatgataaagntgaggtaaaaaaacatgctctaaat

SEQ ID NO: 96178 - DNA, 402 bp, Glycine max
  unsure (1)..(402): unsure at all n locations
cactntatgctagtgtcaaanatntcatgaggcacatattaatttcaaactaactaaatcatacataatgacttgaatataccaatatgcacccttaaatccatcgactgatacttccatgccgatgatactggaagatttaaacattgtggtgaagaaagtagttgcttcataccctccacatccgcttgaacggataccaacaatgagtcataatcataaccctctatagtttcgagggttgcttgtccattggttgggaagcccgtcaagcaagcctacacttttcttggatacatgtacctacaaaaatttatctttaaaagttctatatgattatgtgcataaagtaagaattctcgactgtcgatgctattcatcgacacccatgcaatcttattt

SEQ ID NO: 96179 - DNA, 404 bp, Glycine max
agcttgtattattctcacagatttgactctcatgatgccttttcacactgtatccacttaaatttccatatgctggaaaatcattaacagtacaaaacaccattgtgcgtaacctgaacgtctgctgcacatttgcatcccacacatctaccccttcttcccacaattttttcaagtcttcgattaacggcgtaagatacacatcaatatcattccatggctgccttggacccgcgatcatcatacacaggataatgtatttacgcaaaatgcacaaccacggtggaaggttgtaaatcatcagtaaaataggccacgaactgtggttgctacttaagctaccataaggattcattccatcagaagcaagagcaagccttatgttccttggctcatccccaaac

SEQ ID NO: 96180 - DNA, 305 bp, Glycine max
  unsure (1)..(305): unsure at all n locations
cgatgtgggttctaaaagacgcanattttatcatcctactatgacgactgatacagctgtggcaaacgaatatggtgagaaacacggagaaacccatgctgtgactaccattcctatacgggcaagttttccaccaaactcaactatgtcattactcagtcataaacaaaccttctgcttacccaccacccagntattcactaaggtcatgccttaaataaccacaaagcctgtctaccgtacttcctatgactaagaccacctttatcacacaccaaaataaacaccatccaagatatgaattt

SEQ ID NO: 96181 - DNA, 405 bp, Glycine max
  unsure (1)..(405): unsure at all n locations
agctttaagagaaagagtatcttttatttnncttcttcttccaaattctaccaagtgttcttgagcccttcttccatcaagcttaggtgagtgacctccattttcaactctaagcttgattttcacttcattttctttctatattctcgcttgtagtttcaaaaccttatttcgcactcttgaagggttaaaaactgaatctaaactccctcattcttcattctaaatttcatggagactaccaaagataaggggagtctctccaactcttgaaccatatgcttgttgttgaacttccttaaacatggtgttgctttgaaattttcaagcttgctatcatgtcctgaatgtgtgctgagatgttttccttgagtttctgatgccaaaaatgacttctttgcatgt

SEQ ID NO: 96182 - DNA, 251 bp, Glycine max
  unsure (1)..(251): unsure at all n locations
tgaaaagatcatactgagtaatatttgagaaacaatgaatgtcttcgatggggacaacttcataaacacacatcttaacaacataaaccattattaagtatatttgcttcaataagtttaagcaaaaggtaccaatactcggtgtattagtattctatccaacgttacgctatgtcaagctcttagtactttattcacttctcaaagacagattcaacttgatntcatcttttaatggagtttgcattcac

SEQ ID NO: 96183 - DNA, 405 bp, Glycine max
agcttttatgtgaaaggatgtgttttcttcacatttgaatttgaatttcgacgttcaaaggcactggtaatcgattaccaaaacattgtaattgattacagctttttgaaatcaattggaacgttgtaaattcagttgaaaactttttcaaatccattttgctattggtaatcgattacaataatctagtaatcgattaccagagagtaaaaactctttggtaaacatgttttgagaaaaatccatgtgctactcagtttttgaaaaaaccttttcatacttatcttgattaagtcttctcttgattcttgaatcttgatcttgattcttggaagcttgatccttgaatcttgattcttgattcttgaaatcaaatttcctcttgaatcttgaagtgttcttgat

SEQ ID NO: 96184 - DNA, 291 bp, Glycine max
  unsure (1)..(291): unsure at all n locations
caaaaccaagcatgaccaatcccgacccaacccgggcatagtcagtcagtgagaacctgtgacgtacctaaacaagcgagctcctggcagtcaaccaataaaagaacaaagttcacaaagcaaggaggcttgtgtggcggctggccagctatgtatcttgngtggtatctggaaattaacctctggtaatcgattacaattcgtaggtaatcaattgtgtgtaatcgattacacagagtaacatggcactggtaatcgataccagttgggtgtaatcgaatacacagggag

SEQ ID NO: 96185 - DNA, 398 bp, Glycine max
agcattgatttcctttgttttttatactttcctttactcatgtgcacccaaactccaatctttgggttcaaagacaaccttctttctccctttgttggcttgtctagcatagcttttatttttcatctcaatttgatctttgactctcacatgaagcttcttcacatagtcttcatttgcttgaccttctttatgcttaaaaacagaaacattttgcctaggcaaaatatcaagaggagttagtgggttaaaaccatatacaacttcaaaaggagaacaattagggctaggatcgacttatctttgtattgaaagcaaaaagccttggagctgaagtcaaaggcttatgggaagatgttaaagccaaaaacaaattacactttaactgtagaccaaac

SEQ ID NO: 96186 - DNA, 381 bp, Glycine max
  unsure (1)..(381): unsure at all n locations
agctntcataagtgaaattatgtgcattcatctccctaagagtcctctcacgaggtggaggttgagatatgttctcagtatgaaaattagtagtcgaatgctcaaaatgcacaaaataatcaagatgcacactatgcctaactaatctatgaaaggttctatgtattttaggatcaaagggttgtaaatcacctggattacccctagtcatgcactatatgcagcaaatcatgtatctcttaacaagcacctagcaagggggtaaaactatagttatactcaaacgatatccaaatgagctgaaattttgtgagaaacaccctaaaatcatgaaaagatatcaaacaataattcacagaaaaattcaaagtttaactatga

SEQ ID NO: 96187 - DNA, 337 bp, Glycine max
  unsure (1)..(337): unsure at all n locations
tcgagttgggagccatggcgagtgattgcttagtgcaatatttcattctcaccctttttcggagccccatgaattgcgttntcgctcatgtgtcctccaccttcgaatcttgagctatacgtagtgataattagtgcaattcttcattctcacgcttcttcggaaccccaagaaatgcgtttttgttcatgcgtcctccaccttcgagtttatagctatgcgtagtgattgcttagtgcaaatctcgatactcaatcttattggaggcccatgaattgcgatttcagtcatgttgtcttcaccttcgagtctggagctatgcgtatagattgcttac

SEQ ID NO: 96188 - DNA, 398 bp, Glycine max
  unsure (1)..(398): unsure at all n locations
agctttgcaatgtttgtgttttttgactatggncgctactcaaacaggggccgtgtttgagggaggagaaatcataccgggcaaaagaatgcttaaacgtgtcttttggtcatttggtccatgcattaattggtttgcatattgtaaactcatagtacaagtagatggtacatggctttatgggaagtatactgacacattattgatagctacaacacaagatggagctaaccatatcttcccgattgcctatgccattgtaaaaggggagacaacttcagcttgcggttttttttttatttaaagaatctgagaagacatgtttcttcgcaaattaacaattctcttattttagatagacacccctcgattgtaactacctacaacaacccaagtac

SEQ ID NO: 96189 - DNA, 124 bp, Glycine max
ttgaattttagactgaaatgtttgaatgataacatgatgaacgccatgattgtttatacaagccaattgattaaaatactacttaaatattaaagggcttctgactcttttatgacttttactt

SEQ ID NO: 96190 - DNA, 401 bp, Glycine max
agcttatgtgcatgttttctttttccaccgacagagaaagcaacgtctgatccctccttattctctaacagcatccccaaatgtgccccaatatcggattcaggaacctgacattgtgtttaacttggaacattcaatggaagacaccacaacaccaacagcgcagtttattttcttgccgtcctccttgaggaaagttgacgcctatagctgagcccgcttgaaaaatctgttataccccctaacatacacaaccaatgcatcatgatagccatatcacaacacataagcggataagacagctatataactcaggatgacatcctatttcctatgcatataggaaatcagggtctctcactgacttgttagaaaaaacataccatctactaatagcatta

SEQ ID NO: 96191 - DNA, 400 bp, Glycine max
agcttgtagtgtacatgtctccttctaataaggaggatatgcctgtactttacaagtttcctagggctcttcattccaagacccttgtagacattcctttctctgagactctaagagtggattcgggtcatgagcatcctttattccaagacccttgtagacatgcctttctcactctgcttttctttcctttttcatgtaatatggctaagtacgattaccaatccatcaaaagaaaaaaaagttgtcaatgttgaagtggcagaagattgggctcctcctcctcccatcaacactgagtccgacgagaggaaggatcttagtttttcttctcaagatgttacaaggaagaagcaaagagtggctactccatcatcgattatcgctctctctcccatcg

SEQ ID NO: 96192 - DNA, 452 bp, Glycine max
  unsure (1)..(452): unsure at all n locations
taagctccttcatctgcacaaggctcttaatatntgaagagtattctngtggaaccttcacccgacgaagacactgacnaaaactcatcttctnctttttggaataagtatgacaagctgtgggcaagtaaaatttcttcccatcagaccttggatgcaactgtgatcgtatccccatctcaactagatcttgacgggtattcaagccattcttcaccttgccttgaatgttaaggagcattccaatcacactgtcacatacatttttctccacatgcataacatcaatacaatgtctaatgtctatatcagaccagtacaaaagatcaaagaaaatggacctcttcttccatatgcaagtcttacttttatgcttgctttgggttgttcaaatacagtattcaggtgttgaacccactggtatacctgctcaccagtcaacggtatcgacg

SEQ ID NO: 96193 - DNA, 371 bp, Glycine max
aacatgcttatggctaggaatccaaaatttggttttagagttagaaaaacatgaaaattatgatttgcttgtgagagtttttgctcgaatttgggctgccccatgtttgatactttacatagaggtagcgtggaaaacaccttgcaatagtgtgtatacataggtaaatataaggagtatgaaattcctagcaaagtgtgaattattgtcttcctaaatgaatgtatgatagtgtggaatgccttttttgaatgcgaatatgtgcaggatgtgattagctttccaatatgcatataaataaatatgagtgaaacagtaaaaatttgtatggtgtacttcaaatgtatgtaagtagtttgtgatagcagatg

SEQ ID NO: 96194 - DNA, 437 bp, Glycine max
  unsure (1)..(437): unsure at all n locations
tcacccttgcttaacaagcttttttatgctgcaagaanaagagactaacacagagtggaaagaaatggaaaaaacaatgaattatgatgaaatatttaaattaaagtagaatgtgaaagtatgaatcctatattatcttaatggatatttctcatattattcactctctttctatgtaaagtggcacaccctaaatctgtaaaaagcaaagggacaaaaccatagtgaaagccagcactttttgttcaatattcaaaccaaaaaaaaatgtattaaaaagttctcaaaattgttagagggcctacgcagatcactaaatctcaagcctacatcacctttttaggcggttttgatatccngaaattctatattcaaaaatggtaaaagtattcaaaatggtgaatattaaacgagtgcttcaaatcataagaagttat

SEQ ID NO: 96195 - DNA, 359 bp, Glycine max
  unsure (1)..(359): unsure at all n locations
gcatgaaaaaaccctgcgattatatgtatgtatgtaaatatgcagcttgaaatgccttgcaaaatgtngaataaaaggccttgcaaaatatgaatatatatagcatgaacatgcctcgcataggatgaatatatatatagcatgaagtgccttacaaagggttttggatgggtagcgtaaaagtgtttttcaaaatatttgtatttatgagtaggtagcaaaagaagccttccaaaaaaatgtgtatatatataggatgcagcatgaaaaggcttgtcaaaaaatgtgtacatggatgtgtgtcgtaaagtgcctttcaccaaatttttatgtgtgcaaatgcatatgtgtcataaaat

SEQ ID NO: 96196 - DNA, 255 bp, Glycine max
ccatttctttttagttgatttgaaacaacaagaattctttgaaaataatttgaaatggactctgactctttcatatgtaaggaatcgaactcacctcttagagtttggagacgcaccttctttactttgacttctcctttgtgaaaggtttgaagcttatcccatgcctctttagtcggatgtgcattaaaattcttctcgaatgcatcatcatgtaatgcttgatagatgaggaagagagctttcttgtgtctc

SEQ ID NO: 96197 - DNA, 405 bp, Glycine max
agcttcatctttagaattaagtatattttcatatatcatgaataatcgtctataaaagtgataaagtatttcggaccacttgagtccatgtctggacaacaaatatctgtgtgtatgatttctaataggtttgagctcctctttgcacccttcttagatttattagtttacttacccttaatgcaatctgcacaagtttcacaatcagcaaaatctaaagcactaagtaccccttcatttaccaatctcttaattctctcgatagagatgtgttctaatcttcgatgtcacaacatagagattcctcattcacaacacatcgttttaacttcaagtaacatgcatagaattataagtagcatcattttgcaattcaataaagtaaagcccatcaagtaatgcacc

SEQ ID NO: 96198 - DNA, 470 bp, Glycine max
  unsure (1)..(470): unsure at all n locations
ggtctttctgganagataagaggattctctgcaattgtctctatctaaagcttgagnctgattgaaggtttaggggtcagactaaagctaaaaagtctcggtcttgcgctttgaattggtgttntgcatatgcgtttgaaagattagaaagaagcaaacaaatgttaagctatgataagcatttaagacttcattaatgctttgtgtctgagatctattttgctgagaatgtcttgaaatnttttttctacgaattttcgaagtccaagaaagtaagaggatattcaagtcttataagaacaacatctttcttcatctcaaaaaacgtggtctacacctgttgtgattagaactgttctaagcgaaaacatgttgaccttgctgaagtgggttcaaaaagctaagaaagggcgttaacatgggagaatggcattaagctacattaagcccaagaatcatttcaatgtatc

SEQ ID NO: 96199 - DNA, 354 bp, Glycine max
agcttgttaaaaacggaagatattaatttcgtatatgaacgaaatgaatatgaaagctaaaaaaaaacaagaaatgaattgaaagtctcagattcgaaaacttacccgttgaagaacgaagaacggatgaagaacggtgaacaacgacggaaaaccttcacggatttgctcacggaaacgtcttggaagcgttacgaaagcacctcggcttggattttcttcacggaaacaatttttttcacccaaaatagctgaaatgcataaccaaggggggggggggttagggatatttggaacagtcacccttctgctatttataggaaaatgggggaggaggtctcctcccatctctct

SEQ ID NO: 96200 - DNA, 448 bp, Glycine max
  unsure (1)..(448): unsure at all n locations
ccggtgagagtgtgaccttaaatngtgagtgatcgactagctgtgagttataatctntgcatgaatctcataattttagaatgaaatgtataaataaggacatgatgaaggccatgattgtacatatacaagctccttngaccaaacagcttaccttgaatgataattgcatcctctgctccctttttgagctaaatgatattgtataaaatttgaaccctgaacttaaataattatctcatgataccttgtttagaatttaggagagcatatggttcaatgcaaatctactctaaacttggcggaggaaagtcaattagagtgaaaagataatggtcatgcatcagcacacacaacaaataagttgtatgttaaatataaagaataaattatgttattacaataaggtcaaaagcaacttaagaggaaaagatagtgagagagctac

SEQ ID NO: 96201 - DNA, 392 bp, Glycine max
agctttagcttcatcagtgtcatccataagtttctgaacatcttcaatgtttatctcactttgtatggctttcattgcatcattaccagccttcaaactttcaaacacagccttctgcttgctagccagttcaatatctgctaactgaaaatgtgcatgtatttgttttaggtgtacaattgagttaagagaaagaaaggtcaatgcacaattatctcctctaaacatgagtacaagacaccagatgggaaaagaactgaattaggacatataaacagacagttgtaaagccatcaaaagatgcagacaggtaacaatacaattattactactggacagaaagaaacaaaacaaggaagcaaagtaaaaatatgacaggttaatacgataaa

SEQ ID NO: 96202 - DNA, 443 bp, Glycine max
atgtaatatattaagactatcctcctctcacttgctgtatagtattactttggaggacagtatgatctggtcaagttatgccagactgttcaccaggctgggatgtacttgattcttcgaatacgcccatttgttgctgcagaatggaatattgggtgagtcccatcatcatctttgctattattttttggcaacattaggagaggtggtatgtaagagactaaactgagctataagtttagtagggtatgttggaggaattaattcatattaaccacttttactaagttgatcgcgattcataattcttaccatagcttatgttcagtggtgaccggatggctgattatgttcatgcacggtttccggcttacatcacctttatggatgatttgacttgaatatgactgtactcaacacagataatgcatttattattattg

SEQ ID NO: 96203 - DNA, 406 bp, Glycine max
agcttgcctcgaagaggttcattatttacaaggcagctgaaggaactagttccgctccggagtatgatagtcaccgctttaggagtgctgtacaccagcagcgcttcgaggccatcaagggatggtcgtttctccgggagcgacgcgtccagctcagggacgacgagtatactgatttccaggaggaaatagggcgccggcggtgggcatcactggttactcccatggccaagtttgatccagaaatagtccttgagttttatgccaatgcttggccaacagaggagggcgtgcgtgacatgagatcctgggtaaggggtcagtggatcccgtttgatgccgacgctatcggccaactcttaagatatccgttggtgttggaagagggccaggaatgtgagtatga

SEQ ID NO: 96204 - DNA, 394 bp, Glycine max
  unsure (1)..(394): unsure at all n locations
taagtctgcatggtttgactgttgagaagtctanaacacatttttggatagttcacttagcgagacaagcacgctaagtgaaattctcaacctgagagggaaattctttagccagaaagcgcgcttgccgcaaatcccaatcgagaggaaactcgctcagtgcgaggggttgcgctcagtgccaaaagtggatttctgcttagtgagacgagctcgctaagagagatctacagantataaatacatccaacaacgtaaaattacgcatgttgaactccctctttctaagacttctgctcaaaaaccctaaacactccgtctccaccacccatgaccaccggtgggcaccatgagctgccgntgcttaccgccaaaccaccacacggagaggaac

SEQ ID NO: 96205 - DNA, 58 bp, Glycine max
cgtggacgtacgagccgttaaacaaaaatgaggtatgactcataataactcaaacaca

SEQ ID NO: 96206 - DNA, 393 bp, Glycine max
agcttattcacatataatattattcctttttattggagtatatgaggataatacttgtgcataaaggacccctatctattgtttgctgggcccataaaatgtcatgactaaacttggttcactctttaaccaaaagctacatctagaccctataccaaaaggatttctactactagcacattttacaagcagtattctatgtagcgtgtttaagcctttacaacacactaatctcaatccaatattactaacccaaacattctttgtcactaagcctctttaggctttcacaaagatcatacttttcttttacataaatatctcaccaaagcaaggaactcgaacttacgttcaaatattacataactctgtgactacaacaaaggatgagag

SEQ ID NO: 96207 - DNA, 391 bp, Glycine max
agcttggtttgaggtacttaccctttgaagactgaagaacgatgaagaacgaatgaagaacgtcgaagaagggtcgaaatccttcgcgaaatcactcacggaaacgttacggaaacgttacggaagcgcctcggcttggattttcttcacggaaacaattttcctaagcaaattcgaaagagagagaagtgcctaaggggctgaacccttttctacttcacttctccccctatttatagaaaattgggggagaagcttgccacccagctcgcccaggcgagcagggttgcttcctccagaagcaacagccttctggaggaatcttctggagggcccaactgggcctggttgctatttgcacacccatttttactaagtacaccccctgcct

SEQ ID NO: 96208 - DNA, 489 bp, Glycine max
  unsure (1)..(489): unsure at all n locations
tcagaccanagcaattcaaaatctatgtatctaaaaccccttatttagcggattttaaggnttgagaagtgaaaatgagaatggagtaaatttggagcaaactctcacctcacacaagtctatatcatcaatctaaacttgctcaaactggttttacgacgaaaattctaccgaatcaaaatttgactcctcaagcacccaatttaccctagaaatggctcttgccttcacttttggcatttgtttttctctcttgcacaacccaagctttctcataagtcctaaatgacatttcanactatgaataactccctttaacctccaaataccactaaatccagatttggccttccaactctcatagcctcactctnttttcactcataacactacattctcactttctaaccctatggtaactctacccttcatccgtagcgagtttcccatcaacaattcagcacataaacatcacaagcattatcttaa

SEQ ID NO: 96209 - DNA, 390 bp, Glycine max
agcttccatcaagtggtatcattgcacaagagcttcaagtaggtgctccttaaacctctattaattttttgctttaccttctcttccattggtgtttcatcatttttctccatgtatctcctcacatgtcttgtgctaaatgtttttaacatgattctttagagtttccaccaattaaacttgctatagaagctagatttgattttctatggttcaaatttcttgttcttattcttgaatcatgaattgtgttgagtttaagttcctttcagtcttgtcttgttattttttgtgactgaaactactgtaagctccattggagcttgaaggcctaagatcgtcttcatcaatggattcctttgcttcttggaagatgaatggccacccaat

SEQ ID NO: 96210 - DNA, 430 bp, Glycine max
aactaagctgttctgactgtgtcttactcagctattctttggctcgcttgggacaccaaataaggtgatggtgaagtaaccagctcgcccacgcaaacacggttactttaagatgaagtaacgagaactcggctaggcgagtcgtcaaaccctaactgccttgtttgctaaaactaacatgaaagggggtacgagggaggttctgaagtccacacgtgaaggatatgagaataatatgagaaaagatgacgaagaagagataaagaagctaattgctgtcgaattgagaccatatgtcttatcctgtagggcttgctttaagattgacatgcacaggaccctagggacttttatgattggatataatcttctctctatatagaccgatactttgaaaatggttaccaatatagacacaatttttgtaaag

SEQ ID NO: 96211 - DNA, 367 bp, Glycine max
  unsure (1)..(367): unsure at all n locations
gttatgcgtaagcgcgacaaccgagtatgtccaatgtgattatcaacgatgtccagtatactatttgactgtgtcaagaggtatagtcagaggtgctaagcattattatagtcatttatgtcaagtgtgatagttatgtgttctacggcattgagagtgttgtttgtcaagagaaaccatatgtcatggttatgtaagttgcatggcttgtgtgttgcttgtggcgcttaaggagtgtaggactcacccctacaaccaacaaccttcatggtcaggatatgtcgagggagtcgggctccctgcgagcttggcatagtatccaaacaganagagtgtggtcgtgtttggaacacacaagttgtttaca

SEQ ID NO: 96212 - DNA, 416 bp, Glycine max
  unsure (1)..(416): unsure at all n locations
gtaatgggacatctgtattctatgcatgacattgtcncatgatggcatattctgaacatgaacgatagagtggcaagagcatcattccatttgcgtgattctcctttaggaactgcgatgacaatgaatatatctactccaagaagcttcatcaattttcttgatgtatgcctaataacgtatcaacttatggtctttagtttctcattcacctttcaactgatgaattaccaacgttgaattcctatacactttgacaacttatctctaaagtcaattcctactctatatccctaggcgcatgcgtttgactctgccatattatttgtacaatccatacacaatctattcatgtgaggcaaacatagtttatttggttgaaacaacactaaaccaatgtcttgccccaacccatt

SEQ ID NO: 96213 - DNA, 400 bp, Glycine max
agcttgtagaatggttagacatgatacatgtcagggcttggtttggttcaagggtaaaagggatgccccacattatttccatgacacaaatgcaaaaatgatgatttggaaattttatgcaaaactggtcatgcatgcacctatgcggacgctcaagtgtcaaatttttatggtcatgtgatgctagggctcaggattcatttcctctattttaaatcaacccaatgtttccaaaatatgttcttttatcaatttgtgcattcctccaagtccatttcgggcgtccggggaaattttcacagcattcacccttcaggtgtagacacgttttttcttcaaaaatcggttatgatcaatgaatttttttttcaaagaaaagttggagatcatctcttttcaa

SEQ ID NO: 96214 - DNA, 424 bp, Glycine max
  unsure (1)..(424): unsure at all n locations
gataatgcttaccanagtgagcttnccggtgagtataatgttagttccaccttcaatgtctctgaattatctctttttgatgcagatggagaatccgatttgaggacaaatccttctcaagagggagagaatgatgaggacatgaccaagagcaaggggcaggatccacttgaaggacttggaggacctatgacaagggctagagcaaggaaaaccaaggaagctntcanaaagtgttgtccatactatntgaatacaagcccaagtttcaaggagaaaggtccaaggttgtgagttgtatcatggcccanatggaggaggactaaatgacaccactnntgtttcaatttagagtggttagttggtctaaataatggcccaatccttggtaaagtggctgaccaaaaatatgttttgggtaatc

SEQ ID NO: 96215 - DNA, 359 bp, Glycine max
gctcttcaaaatgcatgagtagcatcattggtcttttctcatgtgtatcatcatttaatcaagactggcgccaagaaagatcagagcactaccttctatatactcaacataaaagaatatgtaacttcagtttcgtccatgcatgttgtctgtatcagacataatactgttaagctattctgtgaacaagaaaatgtggggcgagtgattcaatatagctttaaaacatttagacagggttacaatggatacaagtcacttgtatcaggagattgtggtatattctgggatcacgtaacaatgaaatatatatatagaattagatatctagcggcaaccttctgaatgatattattact

SEQ ID NO: 96216 - DNA, 239 bp, Glycine max
ttgataaaaactggggcacatgaacaagatgaaaatgagggataaacccatgcttgtgttgccatccctatataacccagtttcccagcaacccaacattgtcattactgaaccaatatcaacccatcttcttacccaccacccattcattcatataggccattcctaagtcaaaccacataacccaccctccattgcctgaccccacctttttcactaaacagaacacccctctggat

SEQ ID NO: 96217 - DNA, 332 bp, Glycine max
gaaaaatctaaagatgtaactcttcaaaaatgttttgactctttcaaatgggttttaagtttttctaaaagatataactcttctaaatggccttcttgaccagacatgaagattctataaaagcaaggctctgctttgcttttcaatcaaatctttctaacaacaatcttgaatacttttgcttttccaatcaatcctttacaagccttgaaatctctttgaagatcttcttcttcttcttttgtaccaaaagctttctgaagttttctggttttctaaaccttaaaacttgtgctattcatcatttcattctctctctccttcgccaaaaa

SEQ ID NO: 96218 - DNA, 410 bp, Glycine max
  unsure (1)..(410): unsure at all n locations
agcttgatcaanacaattatctaatcattctcatctactcaaatcatacaattgctcattcaaatcattctcaaacactcatttcatgcaaaacaatccactacatatcattttcaatcaattcattgttcaaacacgcttttggtacaaacaaacaactcaaagtgctgaaatntatataattgaaatgtaaaaaaattgaaatataaaatctgaaattaaaatgactgaacataaatcataaaataatcgaaaataaactaaaatgttcgagatgcacaaatttaaatgtcctgctcctgtggttgctcctatgcatgctcattaaggtccaacacctgagcagctggtgcagatggtgtggcataatcaagtatgggtgctatggatggctttgggatctggtttgt

SEQ ID NO: 96219 - DNA, 318 bp, Glycine max
  unsure (1)..(318): unsure at all n locations
gcctccattactttttcgagttgtttggnggagggaggaacgaatatgatgggtaattctatcccacttctgagactctacttatttgggcttggtcgagatagaaattctgatagagaaatacttaagacgattaccgtgaatgatcactaatatgattggtttttgaccatgccttttatactgaaacanaaacaaatttcttgcgattcagcatccaatccattcttttctattccgggagttggaagatgctctctcccttgccgggaatggaatttccgtcactattcttaaaccactagtgtacccatttat

SEQ ID NO: 96220 - DNA, 401 bp, Glycine max
tctcatcatagattcatgcttaccacctggcttggtgtcattttaaaatacaccatgacaatgctgacttattgaaaggttaaccttgacattgcctatttaacttatttatttattgtgcaaataaattccaagatgcccaacacttttcttttataccatttatctaatagcaatcaagattgggtaatttaaaggaagcacataatgggatgtctagtttctgctcatttatatcgagggttaaaattgccaatttggcatctctagtattttctaattgcttatgtaaaatggtcattttcaatttatattctaaaaggctcaacagtttaattggccaacatgcacgagtcaaaccatatatacaccactaaccagacataaaatgtggatttatt

SEQ ID NO: 96221 - DNA, 464 bp, Glycine max
  unsure (1)..(464): unsure at all n locations
ttaatttttttttaacctaatgacgatgcacaatctgaggaagaccttgctgatgatggagatggtgatgaaactgatgatattcatgaaaatgatctattcaaggattggacatggttctttgaagatattngtgatattttagttatttaaatattttaatcttgagaagttatgttttgtaataaactaatagtatgaacgcattgtcattcttttgcaaaatgatgtattttgaacatatttacttattattcatacgtattttttatgaaataaaattttacaattttataagtcgagtttacgaaattctcatgagtttcataaaaacttgattttaataaccttgacaataactataatacttgtgcatgatacaagtacaaaaagtagttgtctaaccctatcattcttaaattaatgttctaatcttgtaaccaaatcattagaaacttatcatc

SEQ ID NO: 96222 - DNA, 361 bp, Glycine max
  unsure (1)..(361): unsure at all n locations
cgcttgaccttggagttatcacatgtttgtntcccaaaatcccttttgggcgactttaaattttggaagtattagaggacacaaacaaaaatcccgcaaagcttaagcgcaattcaacagcgatggcgtgactngggttgtgccttgctgcatgtgctgcgtgcgttttcttgtgctcgtaagaggcaacaccacctctattatatcctatgtactgtaccatattcctcagccacaaggaccagctatatggctggccaaatgcttttggccattgattgagggagcatcaatcagctttttccatatttttttatagccacgttattttgtcatcatatcccatcactgtacaaaaact

SEQ ID NO: 96223 - DNA, 421 bp, Glycine max
gcttatctattgctattcagaactaagtgttttgagtggctaagcaagaaaattgtgatccaagcatgaaaggcagacaagcgttgatcctttctattcttgtcaaaaattctgtcttgatatggtttcttatcttctgtgtaggtagataacttcattcttatcttatgttcatagattgactgctcatagtctttgaaactttttctctctttatgtgccttcacattgatgtctttagtttggaaagtctctccaaacaaagtgtgatcccaaggaagaacaaaattgagggaacaaaggtgactcatcaattgttatatgtctaaaagagtgtagaaaggcataacacaaggctctgcctctctagctttccagactgtggcaccaagaggatataccatctttctgtggacttgtg

SEQ ID NO: 96224 - DNA, 401 bp, Glycine max
  unsure (1)..(401): unsure at all n locations
caagaaacacctacgaactctatgttctaatcgatcactcactgaattccccccctttggtttttgagtttaaacttcacttgaagttaagttatttaattatatgagttcttgattcagtcccaattttttctccccctttggcatcaacaaaaagccaaagtgcgtatagagacattaaatcatacacaaactcataatcattcaagcattttaatccatacaacaagcaaggaggacaataattcatacataaactaagcaaggaagataataatncatccattaactataataaaatgtcagattattagaaagtcatccaagataaccaaattataacaactaaagttagaaagtgatatactaataagtgtatcacataagtcataagacatcat

SEQ ID NO: 96225 - DNA, 324 bp, Glycine max
  unsure (1)..(324): unsure at all n locations
gctttgatacagttgcaccacatttgtttgtgtacggatgtcttgtgcccaagtacgcgatatatgggcaacgatgaccaactcatgatacagccgtatgttcatcacatatagcatgttgtcccagtacatcatgatctgcatctaaaaattcaagtcgagataacaaattcagtgaaatgttagtctgatgaanaggaggctagtctgcaggaaaaaggatcttacacgcagttgaaaaaaaatccccttccctggaaaaataaaagaacaaaacgagtgacaatttcatcttaaagtttttttcttatctggggggggggg

SEQ ID NO: 96226 - DNA, 325 bp, Glycine max
tgtggcagcgcgaactatgacaaaacactatgattctctcttcgtacacaagctgacatcccaacaaaagaaagtgctagtcataagccgaagcattaacctctaagagggcagaggaccttttaaactaaactcccttgattgctatactatacagctttgactaacagtttaaaatcggtgactcaaacaaatccttaatatctcaatcaacctatacaacagccatcccttgataaattacacacataggaaccctaacgacccatcaaatcggtatatatagaaaggagcacttacccacataccatcggttcaaaaatgc

SEQ ID NO: 96227 - DNA, 458 bp, Glycine max
agctttaaagttatgttgtagttattaattatgctcattacatcatgcaattatggcacagatgccgaaagtctttgatctataaaatcttaaatggtgtttgtttcgccacgagtaaccttagcgacctaatattatttgaacattgtaattcttaaaccttttgtccattttgttaaaatattgtttatgttttcattggctgaaggaaaattttttgcaaactacgaattgcagcttcttatctgataataagctattgttgttcatcctcccatcatcgcactgctagcatattggcatgtatctttgtaggtatgtatgtcatacttatgttcgtaacgtatctaaatagttatagcattaactatgttgtggattggaagttctaatgctgcatagataccctttgttccattcagaatcaaaaaagattatacggcagcttggataacact

SEQ ID NO: 96228 - DNA, 319 bp, Glycine max
ctattcggaccttaaaactccctcgagcggccaaaaaatccatgtatgtcatcatcctcaatgtagagaatgtgaatggttggatacatgattatgatgatggcgaagaataatctcacactgctacctcacacgagtagcattcgcttctcgaataatgctcgaacggttcaacacaccaagccttgtttcgagattcactatagaccacgccctgccttattaccccttgctttgcggacatgctacgctctggtcatcgattaccctcaagtgcactccactacccgaatactaggttgtgaaagacctgttgaac

SEQ ID NO: 96229 - DNA, 449 bp, Glycine max
  unsure (1)..(449): unsure at all n locations
agctntgtacaattttacaagagaatgctgtgtgattattaaaacaaaaaaaaagttccaataattgaagcaatggcaatgtttttacatttccttgctcacaaccttaagtgcagtgtagggcattttgattattacagatctcaagaaacaataagtagataattcaataatgacttgagagctaagtctaattcattcatcactcgcatgaaaaaagtccatggatcccacattcattgtagaagctccccacgcttatntctaagaggtcaaagaacaagttatttccttcttgtttgaggcttagcactagaacatgttatgcttaacaacaaatttggtgcttattgctatggtttgtgaggattaatgtcaagaggtcagaaaactcccatgctctatacctcttctaagcttggatcaaaattaatgcttatcatctatat

SEQ ID NO: 96230 - DNA, 384 bp, Glycine max
  unsure (1)..(384): unsure at all n locations
tgaagcccanagagagaaaggagagaggatatggtgtttctcttcaaagttgcgaccgcggattgcatcctttgtcattctctcctattgactacgcatggcaatggggcctgaacccgaggggtccaccctggacccgccctaattttgatggggaaaacccaaattgaccatggatgggttcggtgtttcctaaacaaccaaagttgggaatggggtcttggatggggttattaatactcgcctcaaacccgccccactattaattaattgacaaaaatatccctacatatatattagacactaaagcctaaaccctaaacctaatctctcatgacctattcagattttatctatgtttgngcctattcncctgactcctgg

SEQ ID NO: 96231 - DNA, 282 bp, Glycine max
attccaaataccctgtcctgatgaagcatattaatctgctatagtcttaaatgttggttgcttattatattatacttgatacttctttggactgtactatataactaagattgatgacagtgattttgattatctacaaaacagcttcacaaaacgatgtgagttgttaaatactagggtttcattcctttggtggataatgggcttttattgagatgtctctggtggcaatatacttatgccagatgccccacgatcgtactggtacacctttatttctaa

SEQ ID NO: 96232 - DNA, 386 bp, Glycine max
agcttcttaagaagatcgtctctgttaatttaagaggacgtggaaccaatagagattctcaaaggttttaatactgttctcaatttgcaggtatttggtgtatctaactggaaagaaatgctacaacttttactggctgattgacgcctcttgagttcatttgggatcaattagctcacttaactttcttgtaggttcctgctaatggtccttcttgggagtgtctttggtagatatagagagagattgacatgttgtattacatatatcatgttcatagaattttttttatttcctttcgttcttggtgtattttttgaggattgcttgtcgtcttgcatttgcatctctccttttctttgcgaatcctttgtatatcagaaaaa

SEQ ID NO: 96233 - DNA, 344 bp, Glycine max
tgcttgagaagctagatggaggcaactctctcacctcctataactaaactcactcccatgcctaaatatatgaatacaatgggaagcttcctttgtaagctatagtggggggggggggtgcttatttaaatattttccgatccttgtttactactataaacctaccataattcagttttaactcattctttgccttttatcacattacattataacatcctagtatctggttaatcgttaattacatattgtttaccttacacttacacatgtttctcaaataaattctttaataaggcttaactttcctatatctccgatatatcctatatccctacttttga

SEQ ID NO: 96234 - DNA, 114 bp, Glycine max
  unsure (1)..(114): unsure at all n locations
cttatncttatggcttgtctctggacttcactctttctgccgctccggaagatgtgagccgagcccctaccttcgaggggcaacttcctccttatgccgattaccccctgcaag

SEQ ID NO: 96235 - DNA, 416 bp, Glycine max
agcttgtctcctgaaagtaaagcagctgcacctaagtggattgaagttaaggttagtgatatgtaccatgtgttattgttgtctagttatgtcatgtaattatgtaatgtataggatattcaaatctttttcatatgtagagtcacgttcaaaccggatgttatgaatgtggatattacgtaatgcattggatgtggaacatcataaccagcgagataaagagtgactggtccatggtatgcataaacttgagtttctaacattgttgactgcaattggaactgaattttgttatttgcagtactagcttttaaatattaatacttgtagtggtttgctgatgcgacatcgttggacatcgacaacatcacaaaaattctaaacacatgggcgagatatttttaaagacttcgtgt

SEQ ID NO: 96236 - DNA, 351 bp, Glycine max
  unsure (1)..(351): unsure at all n locations
gagatgacgaagtgtanaagggtgaaacttcctgcttttattcgttgaccacacagtggtacctggagatatgtcgcgggggtcacgagaccttggggacgtcaggtggcgtgctattgcccaaaaccaagcttgaccaatcccgacccaacccgggcatagtcagtcagtgagaacctgtgatgtacctatacaggcgagctcctggcagtcaacagataaaaggaacaaagaccacaaagcaaggaggcttgtgtggtggttggccacctgtgaatcttgtgtgatatatgggttatggcctctggtaatctattacttaaggggggttatcgattacaaacttaaaaa

SEQ ID NO: 96237 - DNA, 391 bp, Glycine max
  unsure (1)..(391): unsure at all n locations
actgacgctgcaagcttaataccatcctagttgaattattgtatttccatanacacattacataacctgcgtagtgtatttctttgtaagtgaaatgacccggaagcaaaatctcatatctgattggtcagcatctactttaattgttgatgttagctagtacacagtgtgatgagcgacaaatctctcatcatgtactccaccgtgatgacgagaagacagccatcgacttataatccataaccaagctcagaactatccctctggccagaatgttgactacttgacccctacacatgataaataaccacacaaatgaggtgaaatttgttataaagatgcaattattttttacagaacacttcttacagatgatttgctgcactgttta

SEQ ID NO: 96238 - DNA, 308 bp, Glycine max
aaaattatattctcacacaatgcaccttgttcattagattgatcatgtaattatgtaaataatctaatgtgatatgacgacacaatagagtttattattaaaaccaacatattctattctctttaaacttattgtaatcaaaattttttattgtttgggaaacttcccaattttttaaaaatacaaaacaaaaatgtgcttcctcaaaaactaaagaaagacctacaactttttattaaataaactgatccttaattatcataattaatattaaacttatttccagtaatacatatacttatatttat

SEQ ID NO: 96239 - DNA, 467 bp, Glycine max
  unsure (1)..(467): unsure at all n locations
gcttgcaagtgaaatcgaattacttgacttatgttctcatcacanagaatagtttaggctggaatcagaaggtatggtcaaaacagtattctatatgaaatatatctcgatacaagtcctcgaactatagagtatcaacattgctaagaacaagaaatcacgaacaaccatactatctatgcaattaaggcaaaacaccatactactaacatacccagaattataaggttcttataataagtatacaacgtacatataagaagtaagaatttaatagttgataggggatgtattaaagaatgacaaacttcaactactacattcacgacacaaaataaagtgagttaactagtcatgcgtgtacacatcaagaaagacatactcatnctagacatatatatgggttaaaaagttgtcacaacattaatccacacatcaagatagaaataagttattaacaacataca

SEQ ID NO: 96240 - DNA, 436 bp, Glycine max
  unsure (1)..(436): unsure at all n locations
caacctgacacaagaganattctaattatttggatgtaagcttcaccgagaatgagaaatggagctggaacgatgaaaaaaatagttaactaatgatttgaatcaagaacagttagttgatcatcctcctgttcgcgacactagattaattgctgacatatattaaaggtgcaatgttattgtgcttgaaccaacagaataccaggaagcagaaaaagatcctaaatggagggatgctatgcagaaagagcttgctatgatcgaaaaaaaaatcagacttgtgaattagttgaaagacctaaacattagaagttaattggagtaaagtgggtgttcagaaaaaaagagaatgcgaatgactcaattaacaaatataaagcaagggttatgggtaaacggtatgctcaagctcttggagtaaattattttgatacta

SEQ ID NO: 96241 - DNA, 450 bp, Glycine max
  unsure (1)..(450): unsure at all n locations
tgcaagcttgcacaaccagttntctttaatctttctgctacttttggctctaacacaaagcagaagatttgttgatttgattgcacaccgagtaacactatcatcttataaacagataagcaatttcagcacttagtcttttctctcaagatgaacaaagtgttttgagagattttctaaactttacaagaatttacacaaagagatttttacacacagaatgaaataatgagtgcttcatatcttcaaagcttctggtacatataaaccttcttcagtcaagtatttgttatctctaaatggatatatttcatctcttaagcttgcgttggaagaaaatgggtcgtgaggaattaaatgcacatacttcttcatgttaagaaaccactattcatcgctagcatgttgaacactatagcaagagaccacttnnctttacatcaaagcaag

SEQ ID NO: 96242 - DNA, 436 bp, Glycine max
  unsure (1)..(436): unsure at all n locations
atgcgttttactgggtgaaatgattaatgggtttttcttanttttctctggctgaagattgcatggtgttttattactcaaataggtatgttttattaattagattttttgtatatatgttcaaccttgctcatatacagctgaatcttaccttgacatggggattgttatgatgataactaaatttatctggtcctttaatcccttctagaagttagtgtagaagcctaactttagtgaaattttaattataatggttgattcaagtcagagccaaatattattgttgctagatctgccagaatttacttttcattcattntgaaacaaagtggatgccatacgagtgctaacaaattgaattcanatgctagaccaaactgtgtgctatgcttaatggtatgtaagagtcacggccaaatattattgttgttgt

SEQ ID NO: 96243 - DNA, 390 bp, Glycine max
taaatagcttatgaaaggttagactaatttagcctaagctttgtccttaaatccatcttggtggactagacttagaccaaacaacattattgtaacagcatacttaaaaccaaaacttaatccgcagatccctcttgtaagactatgtgtcaattctacttcattcaagttctaaggcaacaatacatttcccaatgctaaagtcacctaactatgcacacaaatgggtgatccgaccaagagcatacaaaatttaagcactgaaagaagcattgaacacaagaaacacaatcaatttgatattaaaataattacattagttgttattagaaatcccaacagaggtgtttagcaagccatacagaagaaccctaacataataacttacaa

SEQ ID NO: 96244 - DNA, 418 bp, Glycine max
  unsure (1)..(418): unsure at all n locations
tgcatgtttcgagaattctagagagataatggttcatgttccanagagctctgagagcttttgctgtgcgaagactggcaaacaagtgagcttgaagaggaagccatcctaagagcatgagatgagtctatgagtgattgtgaggttctagaggtggaggagacatccccactacttgtatttcttcaatccttcatttttctcttctctttgttggaaaggaagcttcccacatatggagagctaaatcctctattggttcttccttgtaggtactcgatgtaaatacctttttatgtatttattgatgntttgtgtgttctctgtgctatcaatacgtcattttagtatgcttttgctttgatcacgtaaatgcatgctttgttaggatcatttatacattggaacctgggctaat

SEQ ID NO: 96245 - DNA, 367 bp, Glycine max
  unsure (1)..(367): unsure at all n locations
gcttaaagatggaatacttacttgttggttatgatataaaagcgcaaaacggaatcgaanaatgcgaataacagtgaccctacggctgcaaactcgtaaattccgtgggtattgcttttgaatggggggaaaagaagtttttgaatgcaaaaacgtcccccttcttcaatttttatattttggtgcaggggttgctcgcccaggagagctaacctgcactttnttttttgaggggaacattaaccatgtcccctccttccttatgggttagcgttttgcctatttgagcctacttaagttagaattatgctgtaattacttaaaaaacaaacaatagtagtaaaatactgcgaattcaaaggatact

SEQ ID NO: 96246 - DNA, 367 bp, Glycine max
acattcttaccccattccggagccccatgagttgtgaaccatttgctgagtcgttcaccttacaagcctgagctgtacgtacagaaaagctgcgctaatctccattactacacttcttcggaacccggagaattgcaatatagtgatgcgatcatcatcttcaagatgagaacaatgcgtatggattgactattgcagttgagtattatgcaccatattcgagccccatgaattacgatgttgtcttatgagtccatctccttcccgcttggaactatgcagagtgagagactagtgcactactccatacatattatatcaacaaccccaagaaagaggaatcctacatcactcttccacttttttt

SEQ ID NO: 96247 - DNA, 251 bp, Glycine max
gcagcttcttgtgatagataacatttcttattcttatattatggtgtaaatagaagagatcttggagtgcttggagttccactccgactaagcacagaagtggtgcttgagcaaaactgcgtagcatctattgctccgttttacagagatttagttaagccaacctcaagatggtgaacttctgtggcggattatgttcccaatgccgactctaaaaaagatgctcttgtggaggggtgaacatctgctta

SEQ ID NO: 96248 - DNA, 409 bp, Glycine max
  unsure (1)..(409): unsure at all n locations
agctntagtggcccttaatttgaagcaatatttgacattcccataatgtattccatgacattntctttgccttgatacgtcatgtaaattaagttctgaagaaaaatacttgttttcgccttatcgctttttgcaaagagcttttcaatttcagcaaagaattctttggcactagttatatcatctgaaacagtgccctagagtatgtaaattagttaaatgctaactttcctttggcccaatcacatcacacgtttaacatcacaagtgtgcatgtaaattagttaaatgctaactttcctttggcccaatcaccattcatataaataatcacacacgttaacatttctcatgaacaatctacacaagagaggtcactntggtgatattttgattcaattaactcatt

SEQ ID NO: 96249 - DNA, 435 bp, Glycine max
  unsure (1)..(435): unsure at all n locations
tcaaatgacccttttgccctcccttgtgggtattttccgtattcttcagagaaacgtcaaaaaacctttcgtattgcgcgacaactggtgtcaagcagctcaattcgtctagcaagaataaaaaatttagcaactgatcgtccccgaatgaaattagggtctgacagttgcccctctttacttatcttttattgaaaatgaaaaggtaagtaaagataaggacactaatttcatcctagcgatcttgccatccgacttgctactagagaaaacccaagtagtgaaacctgtaaaaagacaaaatgtaagaggcatcaggtacatcaaataaaagaccttgaagtcttgcaatgtaaagaagactctgatagtattgaagacnaaagactttgatagtctttgaaaagtaaagggggcagaagacattaatagtct

SEQ ID NO: 96250 - DNA, 465 bp, Glycine max
  unsure (1)..(465): unsure at all n locations
agcttctcatgatgctgcttctgaatatccgtatctanttgcattgtcagcacccttggttcatccaaatcaataccaccatgttgttgcctcaatggctctacttgtacttgatcactttggacaaaacacattacggtaaggctaatctcgtgatgttccaccattctccatccatagcacaatgcttctctatcatctggtcctccaaagaacaacactgctacttgataaggtacttgatttcccgctagacggttagagccactatagggtttttacccgctgtggaatgcaagaggtgtggttgtgggtgatactaanaggccctccaaagtgtttgcaggggtacaccaccaactgcttgcccttcagcggcatatccgaggcaaggctcanagtcagctagaatatggtggngtatntcatgtgtctcccccatgggttgagagacatgtgcatcat

SEQ ID NO: 96251 - DNA, 421 bp, Glycine max
taaagtatgcccgagtcattcatccctatgagatgttgttgaagtattggcgatcagaattgccattccttggattataaggttgaaccaagctcatgcttttacaaaaaggttcatcaagtcaagttgaaatatggaagtaaccgtcttgcaaaattggggcaaaagatgaatcgagtcacatcactgcttcatctactgccaaacatatttaggattattgatgtccttgttacttccagtttcaccttgacaaagatgtcatggaccatgttgaaaatctaaattgattcaaccccatatcttgcgtaaaaattcgcaatacttcaattgtacatcattcgcatgcatccatgcttttcattgttgcattgctcgttgcattctttcctttgaaaataaaataaatgacttaatcatt

SEQ ID NO: 96252 - DNA, 440 bp, Glycine max
ctttggactttgaacaagcaatctacttctcttttttaccatgctatgtgcgtcgcgactggtccctttctttccttcgcaacttgagttcactattgctaccccatagagctccgcgaaatttgttccggccatactcttacttgcgagccctcttggtatctcgttcaagggcttttgctgtcattgcattctcttcccgtaacccggcacactccttccgaacgtgtgtagcatccaacttgaacttctccttggcgagtattgcctttcctaacttgcttttgagagcgtggactttctcgtgctcttccggcgcttcaaaatactattcgctgacgactttttacttggcgagccaatctacacctcgtgtatgaactgtcagtcattcgtggggcccaccaatgatgccgttacgaatgcctctaagctcttga

SEQ ID NO: 96253 - DNA, 442 bp, Glycine max
  unsure (1)..(442): unsure at all n locations
agcttactaccatttccttcatgcgaattgctgtctttattggcttacttagagcgatgaattcaggatacttgtggaccaagaaaccacatgctgaagattgcatttctatctaacagtggtaccacaaaacttaaacacataactcgtcgaagaccctcaagtctctagacatccaaaataatctgaatcgacatacgccaatgcgatcagtggtgcgtttcatatatgtgaagatgcattataaagcctgccaacgcagttttcctggtttccccgtatatctattgaccaaactaataatatatgctaagtctggcctgctgcagatgatgacatacatgagatggcctataacattngcgtatggtgccttcttcttataagtaacttcgatctatgttttgggtcgatcttgatcagagagttagtgatgtcgagc

SEQ ID NO: 96254 - DNA, 394 bp, Glycine max
gcgagctcattgaatgtcatgcatcaagatattcatgtgtgttgataattacccttcttctaaaagctgagataaatagctcacgccctctaaggtgtgggaaaagctgctaactccgcttgattaactatctgaggcctgatatctagagagggaatttcacactcgatgaacaagaaactatcatttaaccgcgtgagatgctcgggaacaaagttattcactgatcattttcttccttgaacccatatgacattaatcatgcctattaacttatcatcgaagaagctctacaagacaaagcatcatgcatatatgccacccatccaattcctgggttacacgtgatgctgttatagattgtttatttaatttgctgaaattatatgaatgt

SEQ ID NO: 96255 - DNA, 343 bp, Glycine max
tactctaattgaaagctttactgattgttaaatcacgattacaggaataggggtagatggggcgttctcttagcatattatcctaccattgcattaaatggtcttttatgcataatttttaaattattggttgattacatgatttgctaaatatatgtgggtgggtcaatggtcataaatattttacctttcaaaatgtaattgctctccaatattagcaacgactcactccaatatttatttatcccttaacggttacttgaataattgatactatctcattttttattcaacagataacccttcacatgcttcttttctttttactccattattatttata

SEQ ID NO: 96256 - DNA, 476 bp, Glycine max
  unsure (1)..(476): unsure at all n locations
tgcagctgctacatgtatactacgctttataagggaggtgtttgtttcttttttccactttgtattcnggaggtgagcaccaattgtgcactctaaactaatcaaaattcaataataataaaaaattacaagtttaataataaaactctatactttttaaaaaaattagtgcccttagtactgagatgtacaaggatttaccaaaacctagtactgtgatgagagcataaatacaaggattttcccttccaagtgaatggtaaaagaatttgtacaacgtagattgtattcataatctcatatntgtgcacctacaatgtggatatatattcaatacaaaatgtgaaatagacaactaaattgggaaatataactcatcctatctagagatgggttgatgaattgtaaaatgatgcgttccaagcatatatatttgtgaaatttcatcacctcagtatcagctttgtcgttagtct

SEQ ID NO: 96257 - DNA, 425 bp, Glycine max
ttacaattaattaaaaatgtcatttcataaaatatatttgttttattggaactaataactcttattttagaatgtttgaaatattatttcacgataattatttaaattactgtcttacataagctaactaaattttacttctatcattcattgtattttaaaaatcttagttaaaaatttatacaatcaactatatattgataatggacaacagtaattaataattagaaatattatactttaactgtaaataactattaatgcaaatttaaaaagaatatttgacccgtgcatgacatgggtcaccccatctattatatagataagttgtacaataacttatctaccctttgaggcttaacccttatttagaacctcacttcttaaataaggggtggtgtttgaaatgacattatataccttta

SEQ ID NO: 96258 - DNA, 394 bp, Glycine max
agcttacataattagaagcttagaatattattatctaaaaggaaaccgaattcctttctgtacacaaacacttgacttgaactggtccaagcacacacatggtgcatataaacacaaatttcaagcagcactagaagctttggtatatattgatacgggagtacatggttaatttccatacagttctctcagtttggcatcagaaaatatatgataccacctatgttgacttggcaggatagtgagctcttaagccttatttattatattatccacacgtcaatatataatgatggcactcatatagacattggatgttatatcactacaccaaaagtgacttttaatgggaatcattttatcttttagcggcgataaatatatgcactaatat

SEQ ID NO: 96259 - DNA, 385 bp, Glycine max
tatatgaatactatactctataataagaaggaaacctcgtaaagcttttaatgacttaatagtggggggttaaaaaaaataaaagaaaagattgattgattaaatacattatcacattcctattttgaactaagaagttgaaggaagggcttacttactgctctaatatttacacgaagtgatgctgcacgcccagaactaagtaaataccggcagagggcaaagtggggttcctcatcctctaatgttttttctgtagtggcagaaagaacagccttagtaagtaaactttatattaccttcaagttattattgctgctaaacatgtcacatgaacacctatagcttaataataataatagcgagattaaatggagaagaatga

SEQ ID NO: 96260 - DNA, 472 bp, Glycine max
ccggatcttaagtcacctgcggcatgcaagcttcaagaataatggcctcaacaagctttttattcacagaaggaaattcaataaataggcttcctatttttaatggagaggggttaccactactggaaaacacaaatgcaaatcgtcattgaggcaattgacttaaacatttgggaagccatagaaataagaccttatgtacccactgtggtggctggaaatacaacaatataaaagcctacggaaaattggagtgaggaagaaagaagacgagtacaatatatcttcaaagccaaaaacataattacttcttggataaatactttaactcatgagtatgaattgtttaggatgaagacaaatgaaagtatataagatatgcagaaaagatcacacatatagttaatcatcttgcatcattaggaagaatattcccaaacgaagatctcataaataaagtggtaagatgtct

SEQ ID NO: 96261 - DNA, 431 bp, Glycine max
  unsure (1)..(431): unsure at all n locations
gctaccccatagagcccctcagaacttgttcttgccgngttcttccctacaagccctcttggtttctcgttccaaggctttggtggtagccacatttatatctctcagttcggtattcttttttcagattttcagaactgctgatttgaacctttctttaactgtttgggcttgctcgagttccaccataagggcatgcacttgttcgtcttcctccggtgcctcaacttcctctcttttagcggttctcaaacttggaagccaatccaaaccttgcacgtgggcttttaaccacttacgatagccaccgatgggcccattgttactgcccctgagttccttgtcattcttttgcaacaccttccatgccttgcagaccttctgaagtgtctccacgttggtcttattgaacctcgtgaaatacaggcata

SEQ ID NO: 96262 - DNA, 351 bp, Glycine max
tacttacttgttggtgatgaataaaagcgcaaaacggaatcgaaaaatgcgaaaaacagtgaccctatggctgcaaactcataaattccgtgggtattgcttttgaatggggggaaaagaagtttttgaatgcaaaaacgtcccccttcttcaatttttatattttggtgcaggggttgctcgcccaagagagctaacctgcacttttttttttgaggggaacattaaccatgtgccctccttgcttatgggttatgcgtctgcctatctgagcctacttaagttagaattaggctgtaaatacttatataacacaccatagttgtacaatactgcgaattcgaatgatac

SEQ ID NO: 96263 - DNA, 446 bp, Glycine max
  unsure (1)..(446): unsure at all n locations
attacgcgacacttcgaaactaacgctcttatgagctgaacgcatttatcaattatacacaagtttagtnttattcagaaaattagagtttatctcttttatcttagtgagagtgatactcctaaattcttgagtgattcaagaacaccctgactgtatcaaaggactttcacaacctttgtgtgttgctctcgctggaaagagggattcttaccttcctttcatcttcacccttgttctttcaaaccacaattccagaaaatccacctctgcccaaaattatgtaagggccataactcccattttacgcactcaaatgaagtgattcttgagcctatattgactttcaaaacgagacccattacctccttttggaatacctcattagagccctgtactccaatattgccattctatattttgtccgccacacttaactacattta

SEQ ID NO: 96264 - DNA, 435 bp, Glycine max
gcttcaagattagtgtaccagatgactgtttccttatccaagctatcttgaaagaaatgcatcaataacttctcgtccctggaatatgcacccatctttcgatagtacatttttaggtgtgtcataccctaatttcgtccgaggacctttgcttgatgacatgcaacttttgtttggtccttgtgaggtgcttggcacccatcattatgcaatttgtgaaattccgggacatgccggaaaacaaaagaaaatattgatgcataatccgtaaggttccgtgacacatcggaaatcaaatggaagcatcgttgcacaattcgtgaggttccgtaacattccgtaagtcaaaaaagggatgattatgtgatccgcaacgttccgtaacattatggaaagaaaacaagtctcggtacgaaattcgtaagtttccgtaac

SEQ ID NO: 96265 - DNA, 373 bp, Glycine max
agtctccttggtttctagtctctgcatccttgagatattaactcttcttttcattaagataattatcataaaaaataataaatttatcatggttaataacatgttattagataatacaattaaaaatctgttcatagtgtattctaatacaatttataaagatagagtgaaaaaaatatttattctaagtaaacgtacacaccaaagaacaactgataaaagaggggagataaattactcataaatatgtactagtctaatatacggtaagaatgtgacaaattaaataaaaaatattatgtggctatatcgcaatttggaatataaagatatcaacattcaacactcaatcataaagtctttcatctttcat

SEQ ID NO: 96266 - DNA, 457 bp, Glycine max
  unsure (1)..(457): unsure at all n locations
agcttggttcgaggtacttacccgttgattatcgataaacgatgaagaacgaatgaagaacgtctaagaacggtcgaaaaccttcgcgaaattcctcacggaaacgtttcggaagcgcctcggcttagattttcttcacggaaacaatatttccaaggaaattcgaaagagagagaagtgcctaatgggctgaaccctttttcacttcacttctccccctatttatagaaaattgggggagaagcttgccacccagctcgcccaggcgagcagggttgcttcctccaaagcaacagccttctggaggattcttctggagggcccaagtgggcctgattgctattcgcacccacatttttactaagtatacccctgcctcttctttggtgattctttgttcgtaaagttacagaaacttacgaatttgtaacgatactnggtttctttccgctatgta

SEQ ID NO: 96267 - DNA, 384 bp, Glycine max
agcttgccacccagctcgcccactctagcatggttgcttcctccacaagcaacagccttctggatgaatcttctggagggcccacgtgggcctggttgctatttgcaccaccatctttactaagtacacccccctgcctctttttggtgattctttttttcttaagttatggaaacttacgaatttcgtaacgaaacttgttttctttccgtaatgttacagaaccttgtggattacataatcatccccttcttgacttacggaatgttacggaacctcactaattgtgcaacgatgcctccatttgatttccggtgtgtcacagaacactacagattgtgcatcaactatattcttttgttttctgcatgtcccggaatttca

SEQ ID NO: 96268 - DNA, 229 bp, Glycine max
ttccacccctctatatattatggacggttgtacgcctattactagctgagacttttctttgtgcactctgcgcatttccgggagcgccgtggttactctccaacatgataagttatgatctattcactcctcgctactcatgcgtgtgaagcaactactatacttacagacggcgctatacaggatctcgggagtttatacggttttaccagagagttattataggata

SEQ ID NO: 96269 - DNA, 398 bp, Glycine max
  unsure (1)..(398): unsure at all n locations
agcttgccacctagctcgcccattctagtctggttgcttcctccagaagcaacagccttctggaggaatcttctggagggcccaagtgggcctggttgctatttccacccccatttttactaagtacaccccctgcctttntttggagattctttttttgtaaagttacagaaacttacgaatttcgtaacgatacttgttttctttccgtaatgttacagaaccttgtggattacatagtcatgccctttttgacttacagaatgttacggaacctcactaattgtgcaacgatgcttccatttgatttacggtgtgtcacggaaccttacggagtgtgcatcaatattttctttagctttccggcatgtgccagaatttcaaatattgtctaatga

SEQ ID NO: 96270 - DNA, 182 bp, Glycine max
tttctaattatgtgggccattaaatttattattttctgactattaccgagtagcccattgaatttcttcgggggcagagtaggtgtctgccatttcctgtgcccttggctacatatcggggaagttcttgattcccgtttatgggtagagcatagcgatccatccacatggtcgcctttttg

SEQ ID NO: 96271 - DNA, 444 bp, Glycine max
  unsure (1)..(444): unsure at all n locations
ggatcttaagtcacctgcngcatgcaagcttgagcctgttgctgctgccccatagagcccctcagaacttgttcctgctccattcttcctttcaaggccttttggtttctcgctctaatgcttcgaccgtagtcatgttgacatctctcagcacatcacactctttcctggccctagtgactgtcgtctttagcttctccttgaccactctcattttttcgagctctactttcaaagcttgaacttctttgctttcctcagggacttcaacttctttcccacttaggccttttagctttgggagccaagttatcccttgcgtcctagacttcaaccacttgtgatagtcgctgatgacgccatttctactaccctaagctccttatctntcctttcccttgtattccaagaattacaaattctctgaagtatctttgcattggc

SEQ ID NO: 96272 - DNA, 422 bp, Glycine max
tatgcatgtgaattatgttgcatcaacaagaatcaagccaagactattgtgcaagcaatcaatggggcaaaacacaccaaatgattatgatgatggatggctcaaattctcacaaaggtaaactcatcactttcaaattgagctttcaaaactatcatgacatgtagaggagaatcaaggatttcaagtcacaaaatgtcaagaacttttattttcaaaacaattacccatttcttgaacatatcctataattcaaagaaaaacatgcaaagtcgtacatgcacacaaaattgacccaaaatattaaactaaaaatccgacgaaactaacaacattaacaaattaacacaactaacaaagtaacaaaaccaacaaaactagctaaaccaaagaacactccctcccatacttaaacaacacat

SEQ ID NO: 96273 - DNA, 449 bp, Glycine max
  unsure (1)..(449): unsure at all n locations
tgacgctgcagcttgggagtataatagtgggcaaggacacatttattnccagactcaattcaagcttctaaaatgatgcccaagccagatgaaagcccaattttttcgtccaaagccggaatcaggtttgattgaattgcgctaaaaatgacccagatttaactcaaattttaaagctcaagccttaactttcatgtgacaggcccattttgccacctctacagtctacacaaccaagtaaccaaccactcctaacccaacaaagcatgaactaacattagaattaatcattaataaggagatataagattgatcaatcggtgaaggaaggggagaagtcgcaggttcgaatcttcccaaataacatttctagcaaaactaacaaacacgaacatttgctgattaaaaaaaacattagaattaataatccacagagaagaagagctttg

SEQ ID NO: 96274 - DNA, 420 bp, Glycine max
  unsure (1)..(420): unsure at all n locations
atcggaatgtttaagcagttttgtgttacccctgaaagcgctggcgtgctcatggactccgcgttgatcccaatctcaagaggatcggatctgattatgggttntgttaaaacaacaaacaaataaaaatgggcgaagaaagtgagcacctgaaatggtagaagatgatgatctgatcttcatagacccactttacactaacagtgatgatccaaattaaatactactgttttttattttaagaaaaatgttctttttatttaaatctataagtaattaaaggtgtgaaatgttttcaattagaatttattttaaaaattgagaggttctctaccccaaaatattctatatttttggtagaagagctctcaaaaactttctaacacgaactgcgttgaaaataaagttataaataacatc

SEQ ID NO: 96275 - DNA, 382 bp, Glycine max
agcttgagcagccttatccaatcttcaatgctctgatcctctcaccctccttccttccacatgctttcctttatggtctcaagaattaaaacataaatggctagcataaccacgacaataagatcagttattcaaactgccatggaaactcctctgaggcccatggtccttgagagcactatgtttattggtatgtggaaagctagtgccacagcataactaaacatggtgggaagagttatgctctgacaactcaagtatgcttttaatggacagaacagtgaggcaacaaacaagtcacgaatgagacatgaaacatacgtcctggcaacagtggagatgtcttgttgctggccaaaaaagatcaaaatcttgtcaacat

SEQ ID NO: 96276 - DNA, 315 bp, Glycine max
tgtgggatactccccttgttgatgaagtgaagcgcccatttagaatgcgattcacaaacaagaacaccattccttcgagccccgccatattgacaccatgggagattgcttgaagctctatataggaattggtaagatcaacaaaaagaaactagctcatgattatattataagcactcgcgttaattaattaagcgtgctaagatcgattaagcgttattgtaactaggttttattgccaagtgaccaccttgtggaaagatgaacttaattcattggaacccttaagcttgccaacccaccaaaggacaattt

SEQ ID NO: 96277 - DNA, 461 bp, Glycine max
  unsure (1)..(461): unsure at all n locations
gcaagctctaccatggcctctgagatagaagttcttttatcttttaaagccgatagctcggccttcatctgttcttgcactccctcttcattatccatctatctggatcgagtgttataggggtgcctttgcgctttnttagttatggtgagttccctaaagaaacaaacaatggtgagtatgccaccgaaacatgaatatgctaatgaatgatcagaacacttggatccacctcaaagcctgttttagagaacgagatgagtttcataacttctctttttataaaaaggaacaaatcttttatctagcctagatcatacaaaagtgttacaacagaacctaacagatgttaattatatgggccatcatatctatcatgtgttgacagtaattgatttgcccatgaatattctcgggggctgaacacactctatcgatggcctttgcttggctagtattct

SEQ ID NO: 96278 - DNA, 343 bp, Glycine max
gatacccttggatctgatagttcacccagcttgatcttggaaaggttactgttcatcttatcagaaaatagtagagacccatccttgttctaaacgacacactcatccttgttaaaagaaacacaatatccattatctgataactgacttatgctcaacatattgtgtttgagacctttaacaaataatacaatatcaatatagggataaagatgtatacctatctcacccactcttgttatttgcccatcttgattgtctctaaaagtgacagttccaccgtgataaagagctaggcattggaacatacacatttctcttatcatgtgccataggcaaccat

SEQ ID NO: 96279 - DNA, 225 bp, Glycine max
ctcataagcaccttcctttacaacccttggacaataattgcattgaatccttctagtttcctttaccgaaataccacggtttcatgccacgccacccgtgttttcaggagcattccttggcattctaaaagacactaattgccgaacttttcccgaagtgcaagcctaaagctgatgttgaactaacaacctgaccctcaccactcacttatgaagcaaatttta

SEQ ID NO: 96280 - DNA, 235 bp, Glycine max
tactatcgcatagagttttataggtcatttggaaattcattgatcacatgtagagtgcccttcttagagaaaggaacatgtcacatggggtctgtattgcacatgtggtggtggtcggaggaggcgaattcacgtgggaaagataatatgcgattaacgtgtgcttcagaaagccctcactgaaaaatgcaatggaactaaccaaaccaatatggggggggggggggttcctcct

SEQ ID NO: 96281 - DNA, 417 bp, Glycine max
aatcaatataccagcaatcatcaaagcaaagtttttcttactaaaggtttataaatgctactgtattcaattccatgaataataaaataactcaactaatctaacagcctgaatattgtattatattcctcttctctagttctacgttgtgttaagtaatgttttaatagttaatacagtagtactgtactatgttggctatactagacaagtgtactgactatataaatcagcacaaccatgaaactatgttcagccagttctagtattggcaacagggagaagaggaaaccaatatggtacctgatcacctcggcgaagttgccttatcatatgcaacaaaatattaaaatccacatatatgctgatatagctatcacagggatgaacaatctctatgtgatgacaaatggtgag

SEQ ID NO: 96282 - DNA, 368 bp, Glycine max
ccacgaagggtgtggatcattttattcgcacgaaactacgcggccaaaaacgcatggggatctacttttccctactgccgatcatatcaatcctaacctacaccaccttcggaagacctaaatgcctatgcggatcaatactagcctacactacaataccagaaatgccatagaaacaacatataagaagaagaatgcacttacctcagttttggccaacaatggtgagcagcagaatgaagaataagaacgcgccacaatgtgaacactaacgaatgtcgaggtcgcgaaggaggagaaagaagcaacactcggaagtggaagaaggaagaataagctgaatgaacgcgcacaacatgtgttgggtg

SEQ ID NO: 96283 - DNA, 485 bp, Glycine max
  unsure (1)..(485): unsure at all n locations
agcttataattacaagatatggggagcactagtctttgctacatcaaataaaataaagatgactaccaacaatttcttagtgcccccttagtgttaaaagaaaatctaacggctagactgctagagtgccattttaagtttagtaagtgactcatgcatctagtacttgtgaatgataaagggacattcaagaagatgacactttttcttgggtcccagagatgacaaaatttatgcacagcaatattggccgacctaaaaaaaaatattggcctgttgtctgatgatatgacaatttattcgccaatggactggtttaatcaggcatgatctctctacccctttaatgaagatgatgagcatgaagaacataaattatagatagcatccttctaaatttctagtctgagaagcatatcaatttcataaaacattttntgtaatcagtgtgaaatttatctatccgttattctatgatatgttat

SEQ ID NO: 96284 - DNA, 369 bp, Glycine max
ctctaaccctgaggtatactaaatattgggttaacactggaccaaaagcatcagaatcttcttctaaaataatgttgtcctttcgcttctacagagagaataatctataacccaattgattgtcagtggtggtgtaagtgctattttatgttgcctttatgtccttttgttccacctgactgaacaaaatggagaagagcactatacataggaacatgacgagcacgatgaacaaaatggagaacaacgataccaacaggaggcagttgtagtggatgccgattctactgatggtgcactccttgtcaatggaactacgccatgaagagtaggtaaagtaataatgtcccccccgctggaagatttggt

SEQ ID NO: 96285 - DNA, 473 bp, Glycine max
  unsure (1)..(473): unsure at all n locations
agcttgactcaccaaacatgacatgtttatcatgctttcaacaaattccttcacaaataactaccataaggcataaacctagtaaaactacccatcatatctcccaaacacccaatacccacgaaattatgggagaaagaagtctacccaaacctgaaatttgaagtctcacaacgtagaggtgcgcttcacgactccaaaaacggcttcctttcgcgatttggagcagaaatggtgagcaaaggatggagctntgatggagcttcaatggtggaggagaaagggataaaaagcaacatgagggtgagggaaaaagctcctgaacattntggctgagtgagtgaggagagagagaacctggctttgtgttttaagaaaaggctnttctctttctttntttttatagttgtgccacatgtcttcttttgagtggagcaaaaaagggtgcactttttctcttgatgtgactcata

SEQ ID NO: 96286 - DNA, 281 bp, Glycine max
  unsure (1)..(281): unsure at all n locations
gaaaaataggaaaaggattttataaggtcttatcctcaantattctcaccaagctaaaatgggtcattttaaggtccaacgccttaaaaggaccccctttcaagtaaaaaaaatcgcttgatttctcatttaaaaagaactacgtaggtctgattttttcatcacaattgacgaatacctaggagcaaagggaaacgcccttattgaccacaaaaatataataacgttaaaagggaaaagaatataaattgaagtcatatctgcacatttgaataaaggct

SEQ ID NO: 96287 - DNA, 420 bp, Glycine max
agcttccattattcatttacgagcatctctattatgatgcgcctgaatcggaccttcgagtcaaaagttatgaccatttgaatttctcgagagcttccgttgttcaatttcgagtttctcgatatataatgcgcctgaatctgacctccgtgcgaaaactaatgaccatttgaataactcaagagcttccattgttcattttcgagcgtctctgtatgttattcgccagaatcggacctccgtgtgaaaagttatgaccatttgaatttgtcgagagctttccttgttcaattttgatcgtctcgatatcttatgttcctgaatcggacctccgtgtgaaaagttatgaccatttgaatttctcgagagcttccgctgttctatatcgagcgtctcgatatcttatgcgcctgaatcgga

SEQ ID NO: 96288 - DNA, 363 bp, Glycine max
tatgccgacctcatggttgaacattctctcaaaaatattattgacattgactggtcttgtcatgtacttctaagcgtccgacgagatctttcactgaaaatggtatcacattgcatgtaagcttgagtctagcgtatctgttgcataacgtttgtgtttgattttcattgacctaacaattgagggtttggtgttattttctatagtgcgtgaacttgaataagtgtgaataatgagtgtgattttgttaagtgatgtttcaccaccaaggattatatatttcgcatgctctagcgttttattatataccaatgtgataactcattcccgattggggttcttgttttggccgaatgccatttt

SEQ ID NO: 96289 - DNA, 418 bp, Glycine max
  unsure (1)..(418): unsure at all n locations
agcttccttctacacctaanaaagaggatgagatagttgcacaagagagaaagcttcctaacaaaaatgttcatgcaggtggaccttcttctagtgattctgacttacagcagcctcctatccctcttccattcccacctagagcaattccaaacaaaaagatggaagaagcggaaaaggagatcttggagaccttcagagaagtagaggtgaaaatacctctgctagatgccatcaagcagattccaaggtatgccaagtttctaaaggagttgtgcacccacaaaaggaagctcanaggcaatgaaaggattatcatgggcagaaatgtgtcagcattgataggtaaattttttcctcacattcctgagaaatgtaaggacccangtactttctgtataccttgcattattgggaa

SEQ ID NO: 96290 - DNA, 366 bp, Glycine max
attctttcctagtgagtgctgttccttatcttatttaagagaatgatatagaaaccaaaatggcattatcattagctattttagtaagcaagtagccatggtgtgtataactcatgatatttccattttagtgagcaaaggtcaagctatcaagattgttcaatcaatttgagttcttcctaattttaggcatagtatacgattgaactagatcttgaggtaaacatagaagttgtagataattgtattataacagcaaggttggaatcgattatagaagtctcgactataaaaatttgtaatcgattaccactaggctccaatagttacaggttactcctggtattgattacaatggtctgtaat

SEQ ID NO: 96291 - DNA, 421 bp, Glycine max
  unsure (1)..(421): unsure at all n locations
gcttggctttgtaggtccttactctctcttgataaccctctatcactaacatccacaccaagcagttgcacaaggataattcacataacacttcaacttaatccaaattaatcaagtnattaaataatacaagaaatacatcaaacatctattttcaattatcaaaattgtagggcattacaatttacatctcaccgaaaactagggtgatttgaagacatncaattttatctgggtatggaattgcctcacgaatctcaagaattcgaagtgaccctagtgaggtttgatgcgagagttaatgtgcttagttggagattcaacttagtacatctaattcacgtcactgangaccatggagatcacatcgatatgatgctcgangaagatgaagtgtatcatgaacctctacaagatgtat

SEQ ID NO: 96292 - DNA, 418 bp, Glycine max
  unsure (1)..(418): unsure at all n locations
tggctagacatgatacatgtcatggcttggtttggttcaaggataaaagggatgccccacattatttccatgacacaaatgcaaaaaatgatgatttggaaactttatgcaaaactggtcatgcatgcacctatgcggacactcaagtgtcaaatttttatggtcatgtgatgctagggctcaggattcatttcctctattttagtcaacccaacgtttccaaaatatgttcttttatcaatttgtgcattcatccgagtccattttgggcgtccgggaaaattttcacagcattcacccttcaggtgtatacacattttttttcaaaaattggttatgatcnagtgaatttttttcaaagaaaagttggaagttatctctntttaaaagcatgttggtttttcagctagacaactta

SEQ ID NO: 96293 - DNA, 340 bp, Glycine max
  unsure (1)..(340): unsure at all n locations
agcttgcctcaaagaagtccaagatagactttgcggccgaaagaactatttccgctccggagtacgacagtcaccgctttatgagcgctgtacaccagcagcgcttcgaagccatcaagggatggtcgtttctccaagagcgacgcgtccagctcatggacgacgagtatactgatttccacgaagaaatatggcgccggcggtgggcatcactggttactcccatggccaagtttgatccagaaatagtccttgagttttatgccaatgcttggccaacagaagagggcgtgcgtgacatgagatcctgngtaaagggtcagtggatcccgtttgatgc

SEQ ID NO: 96294 - DNA, 390 bp, Glycine max
  unsure (1)..(390): unsure at all n locations
ccttcttctaataattctgacttaccgcaacctcttatccctctttcattcccatctagagcaattccaaacaaaaagatggaagaagcagaaaatgagatcttggagacctttcagaaagtagaggtgaacatacctctgctggatgccatcaagcaaattccaagatatgccaagtttctaaaggagctgtgcacccacaaaaggaagctcaaaggcaatgaaaggattagcatgggcagaaatgtgtcagcattgataggtaaatttgttcctcacattcctgagaaatgtaaggacccaagtactttctgtataccttgcattattgggaacagtanatntgagaatgccatgctagatcaaggagcatcagttagtgtcatgcct

SEQ ID NO: 96295 - DNA, 156 bp, Glycine max
accaccgaggaagacgctcacggagacatgttgctatagaagtaggcacgttgacctggatagcatgcagaagataccgccattgacaatggcgaggcaagtgacctggagctagaatcgcccctcccaatggggagagatgcacagcaccggcag

SEQ ID NO: 96296 - DNA, 369 bp, Glycine max
agctctttttatgaaactctcgaatgtttatttgcagaaatcttcctgatgaaagaacaattactcttatatccaaatgaagttgcatgctaaaaaatgagcctcactgcaagctttccgagggatttaaactccctgaggcaagtttcccaaacaagtctactgcttgagtggattagcaaccttcatctttccggtaaccggcgctcgttgtttcatctgcacagcctgtgcatatagaaggtcaagcccttctgatctccacttcatgagctccatcaacacaacatgagcttcttctctggaagccagcctttcaataattatctacatctttctcttgttacgagtcaagcaatgaacggagga

SEQ ID NO: 96297 - DNA, 317 bp, Glycine max
  unsure (1)..(317): unsure at all n locations
atgatgacctgccagctcaaaagtcactaacacttcatgacaacaaacgcgatgacctcaagaatcacagaatgagctcaagattgaatcaataaccactctaaggttcaagaagaaatttgatttccaaaatagaacaaccaancttccagatccagtcccagaatcaagatcacgattcaagactcaagattcaagaatcaagagaagactcactcaggataagtattaaaaagttttttcataaactaagtagcacatgagattttctcacaacctttctaccaaagagtatttaccttctagtaatcgattac

SEQ ID NO: 96298 - DNA, 392 bp, Glycine max
taaaactagtgtgagattctaggatttttttaaatatgttgtctatttttttaataaccccacattaatctataaatttaaaagcagaaccacatcatataattttcattttggtttgaaatagtgtttaccagaaaatccattcaaaattgcctaaacactaattggttcatttttaacttttaaataataggttgcccactggatgggaagcgtcttcaatctccctacttctaatggtctagtatcattgaaatattgcatgatataataaaacataagtcaataatatataataccaattataacaaaatgaaatatggtcgaattaaacaattatcgttttctaatcattcttgaacctgtggaagcaatgcctttcaagataaatt

SEQ ID NO: 96299 - DNA, 181 bp, Glycine max
tcaagaatcatcaatcatcgtttaagaatccatctctcaatcatttttcatcatcaccctagggaaagctttcaatatctactctcatctctttcaacactgtcaatagaactttctaattcatttctgtatatcggtctaagagatggtgatcaacgctttctctcccggcgaaattctt

SEQ ID NO: 96300 - DNA, 352 bp, Glycine max
ttcacgatgtggaagttttatccacggcccacatgaaaattaatagtggatagctcaaactcaaaatattcagaatcaccctcaatataatgctcaaaatgcacaatatgacccctcatgcacactatgtgtgaaccaatccatgaaaggttctctctatcttatgattcaaaggttgaaaattacctggatcgtccccctctcacaccaacactgtagtaaaacacggctattctcaaacattatctaatagcttatattttgtgatgacccccctatttcatgaaagatagcactcaagttttttctgaattctaagtttactttgaaaaattcttaccatattcttaaa

SEQ ID NO: 96301 - DNA, 421 bp, Glycine max
  unsure (1)..(421): unsure at all n locations
gcttcttcactgaacagagaagatacttatgttgtacacatgggaccccccttttgggtacgtatcccatgtcatgacagttggatagctaattttcttgccataaaaatggtataaaaccactaaacgtttgtattgtaaataactctactcaattaactccactttgagctcttactaactataatgttgaagactatgcagacaccccaatgccaccgtgcaatcccctcgctgtcgtcatgttctaccactagaatcaccatcgcagaccaattctagctcaagatctttcactaaactgaatcttctttagatgaatcgaataaatgcaagttttcttgtgtaaaataataataataaatctgaatgtcaatgagaacaaattaactcttattntgctctctcctaacttaatcta

SEQ ID NO: 96302 - DNA, 351 bp, Glycine max
tcccatgaagagctttggtttctttatatttattcaagagcatcatgaagacaagctgaagcattctaatgagagcaactcgtgctaaatccctgtgtgagaaatctacatttatgtttcaaccatctctgttgagagggacccattttttgtaaaagcttggtatctattttagatctaagatagatattagaaacttgtgatttttgagtggaaaccctttgtgaagtgaagatctgtatctgtgctatccaaacacataaacctctttgttgtgaaagtccatcacggctggaaaggttacaatccatggtgttgcgggttatcctaagtatgttaatgaaatttcct

SEQ ID NO: 96303 - DNA, 401 bp, Glycine max
  unsure (1)..(401): unsure at all n locations
cgataaacttcaatctagatgggatggtcctcttgttattactaatgttntttcccatggtgcaactgagattaaaaatgaagttactggcaaagtcttcaaagtgaacggtcaccaattcaagctntttcatgaaagcccccaagtagaggagggaattgtggcagacctctctttggtcttgccaatnttatgtgatgatgtgccttanatggcactttataagtttccttcccttttcttttatatgttttctctttgtttgcatttcattacatgttcacattgaggacaatgtgaatttcaagtgtgtggggagaatttagaaaaaaaaatgttngtctctatctttctgttttctatatttgtgctgttgcttgttgttttctctatctatttat

SEQ ID NO: 96304 - DNA, 366 bp, Glycine max
tgtcgcacacatggacacaaatattttctaacaactatagatgattacagccgaaccactttctatattcttttaaaaacaaaatggctagctagggaacaagttcaaaatcttactaaaatgcttgcaatgcaaaatgatgctaaaatataaactataatgactgaccaatggtcctgaattttctatggattaatattataaccctaatgggataattcatccaacaacttgctgtttaatccccctactcaatgggatagttgagatgaaacataacatttcctcaatgttggaaggctctcttgttcattctatataccaaacaaattacgcttatctatttacatctacctcacattatca

SEQ ID NO: 96305 - DNA, 337 bp, Glycine max
  unsure (1)..(337): unsure at all n locations
gtcagtgcacatgtgccatttcccattggcgctgtctcaacatgacaacattggctagccaggtcgagtatttgacctatctaataaattggacaacttgtcgatcttttcattgagccaccttacgtantttttctcccatctttctcttcttttgtgagactggcttggccagtgggcagatagccaatntatggcatatgatctaggatggatgaatggcatatcagatggatgcctagcatattggatgggttccangcaaacaaatttgtgttcctatgttggacttcaactatatgtctatgttcgtgtatggtgaggtctctgctaagct

SEQ ID NO: 96306 - DNA, 394 bp, Glycine max
  unsure (1)..(394): unsure at all n locations
gatgggttccgtcttatatagtggtttgatcattggctgacatatcctcaattagctcaattgcttctttcgggggcgtcacntatatctttccccctgtataagcatctaacagttgctcgggttgtggtcttagcccatctataaacatattcaattgaatcggctcacacaacccatgggggggagttcttctctgtaaacctctgaacctctccaatgcttctcttatacattcatcagggaattgaccaaatgaagatattgcagctttcccttccacagtcttggactcttgggaagattctttatgaacttttaacaacttcttccacgtttcagaatgtacccttgaatgagaggagcacctcttggcttctttgcaatgaaatga

SEQ ID NO: 96307 - DNA, 347 bp, Glycine max
  unsure (1)..(347): unsure at all n locations
agcttcagccaatgaagatgggtgtccaatattgtatcaatntggaaccgaccttaagcctccaaatagccttccaattactagggatatagtactgggccacatntgtcaagtgctccataatattgaagtaggcggacttaacaaaagaacactttatccctactcaacttccaaatcatcctatcatcttctatatctttgcaaataggaattttcataatttactatatatctctatcttgcatgtaagtattaacaagatcaaagttccatcctcctctatcgtggtggatcaaaccagtaacacataagtcatgcataccataaaggtggaagactataga

SEQ ID NO: 96308 - DNA, 332 bp, Glycine max
gaaatagaacaatggagaacttgtgaggtattaaatgggtataacttttcactccgagggcctgattaagcgcataagatatcgagatgctctaaattgaacaacggaagctcttgagaaattcaaatggtcataacttttatcacggaggttcgattctggcacataagatatcgagacgctcgaaattgaacaatggaaactcttgagttattcaaatggtcataactttttcactctgaggtctgattcaagcgcataatatatcgagacgctccaaatcgaacaacggaagctgttgagacattcaaatggtcataacttttcactct

SEQ ID NO: 96309 - DNA, 471 bp, Glycine max
  unsure (1)..(471): unsure at all n locations
gcaagctngcacttaagtgtgatagtagatctatgagtattctatatgacacgctcgtactggtctcataacgatgccataaactcacagacctcaagctctacgtgtgtcatggacttgccgacatcgaaatggaagagttcacgaagaactgcgagggaatgaataagctctcatgtagatcatgcacgttcagatccaacggcatgaacctagtgctcaacaatcacactacgctaaagaagctctctatctctagaggtgggtatgcagacctattcgacctatttaaggcgagtctataagtccacattttataccaaccgattaaacccgctagataaatggtcttattttgttggtcctatttggtgtgcagagtctgcagacaaacaaattacttcacaggcccagagtatatctgaaaaataaacaaaactacccaatagaaaagtttttcttttttcttta

SEQ ID NO: 96310 - DNA, 428 bp, Glycine max
  unsure (1)..(428): unsure at all n locations
tcgaattacttgacttatgcacgaaacttctttaatatgttgcnctagaagcaaaaggtacagtctaaagagtattcttcttgaaatatatctcgatgtgagtcatagaactatagagtatcagcattgcttagaataagaaaccacaaacaaccatactatctatgcaatagagatagaacaccctactacaagcatacttagaataataagggtcctatcacaagtatataacgtacatataagaagtaagaattaaatagtcactaaggatgtatttaatgaatcacaagtctcaacaatcacgttttttatcacacacaacaaaaagaacggattagccaacacaagttaacacatagattaaacacacctattcacagcacaccctgaaattcaatgttcttgacgacattaatacacacatc

SEQ ID NO: 96311 - DNA, 480 bp, Glycine max
  unsure (1)..(480): unsure at all n locations
agcttgaccaattatgtattattattntcttgtaaccagctaaattntagtggataactctaataaaatagtttcaactcaaggcatgttgttgacatagctaaaaagtgaaaatgatcatgtaagctgagaatgatggctctgaacttaatagtaggatatattatcttatagatggaggaaaagactatgtagatgctgagaactatttcccttaggatgatctcctttctaaacttactcttttttcctctattatgaatgttgtgtttcctctattcatatagttcattctttgctttcataattaataagcttgtcctttgtggatctttataatatatatgaccgagaatgatatttttgcattgacctattcgaatatcatactaccattttcagctaccactattacgccttgatttattaatgtcatgtgaagtattaatttggatgatgattatatatgtctctactcta

SEQ ID NO: 96312 - DNA, 315 bp, Glycine max
  unsure (1)..(315): unsure at all n locations
gcttctacttatgtggcaaggcgggctttcttcactntctngtctccaacgcgagctttgaccaccgctcttccttctcgcaatgcttctcttcatatccgcctgagtgggcttatagcctaaaccatacttcccacgatttcctttggcatttatcatgctagttatgccgccggtgtctttgcctaaacccattccgggttcgtaaccgttccccaacataactcgggccatcattactgctgcatcggacaggcaagcctgcccagagaaagagtccacggaggaaatgcttaccacctcaaaagactggaa

SEQ ID NO: 96313 - DNA, 281 bp, Glycine max
tgaatgaacacagaagctgtcagaattcaatggtctaacttagacacgaggtctgattaggcgcataatcatccacaccctctataatggacatcgaccgctttcctgaattgtggggggcgttacttttctatctgacgcctattcaggtgcgtattctctcgttaacgcttggcattgacacccgaaactttctagaaatgtcccgggcataacttattgcatagatgtcctaatacgcgcctagtcacccacacgcttaaattatgcaacgacggcat

SEQ ID NO: 96314 - DNA, 430 bp, Glycine max
gcttgtagcaccacttcaccctaccttgtcttttgagagcggcaacaacatccatcgtggtacctgtcttccatttaacatgctcagtgtaggtaacaaagtaccgcagaccatccctgagaaagttctctaagactctacgagccaaacaacgaatcccgagtttcgtaatgttctgcatgttgtcgcacaacaccaccttgtgccccttggctcctcccctgcatccctcccatgaccaccgtatcggccgctgtcacctccaccaccaccaccgaagccattcgctccaccaccaccacggtcaatgcgggtttgcacttcatgggtagtgatgtttggccatcaaagtcttcgccgtgcaaactgctgttcacaactctcgctccctcttgtggcttcttctttataccatgccacaacaatatct

SEQ ID NO: 96315 - DNA, 410 bp, Glycine max
tgatgacaaaaagtccaaagaataatttcaagattgagtcaacaagttcaagattaagattaatttccagtttcatgagaagaaatcaagaagatttaagaatccagagaagtttgatttcaagattcaagagaagatgaattcaggtttaatagaagaaatcaagaagacttcacaagggaagtattgaaaagatttttcaaaaaaacaaacatagcacaattatgtttttcaaaagagtttttctcaaaattttctaagttaccagagtttttactctctggtaatcgattaccagtttcctgtaattgagtactagtggcaaagtttgatttcaaaagcttttaactgaatatgctacgctccaattggtgttaaatggtggtaatcgatacaatatattggtaatt

SEQ ID NO: 96316 - DNA, 447 bp, Glycine max
  unsure (1)..(447): unsure at all n locations
agcttacaaagtgtctctatatataacactaatgatacacaagtnttacaaaccaagcaatgtgggacaaaggaactaagaccataaaactctaacaaactgggtccaatgttctgaagattgtgggctcctctttcatgatcaaacaactgtcacctcctcccttgaactcaagtgatgtcctatataaatatgtgttgntcctctttctccttcaatctatgtgtctcatcctcctcatctttccatttcaattgaagcatattgttctcttctttcccatgtagattttctccctcactgttctattcattgaatttctactagttgcctcaattcaccaagctactctctccttctctcttttataaagtttaatgactaaaatacaagatataaaagtttggagactatatcaagaattaacagactanacatantttatct

SEQ ID NO: 96317 - DNA, 376 bp, Glycine max
cgttcctaatttctctacaattgcatcacctctcaatgagctagtgaagaagaatgtggcatttacctggggtgaaaaacaagagcaagcctttgctttgctcaaagaaaagcttactaaggcacttgttctagctcttcctgacttttctaaaacttttgagctaaaatgtgatgcctctggagtgggagttggagctgttttgttgcaaggtgggcaccctattgcttattttagtgaaaaacttcatggtgccacccttaactaccccacctatgataaagagacttatgccttaataaaagcactccgaacttgggaacattacccttgttccaaggaatttgcattcatagggatcatcaatcactaagtt

SEQ ID NO: 96318 - DNA, 297 bp, Glycine max
  unsure (1)..(297): unsure at all n locations
cttctacacctgagaaagaagatgacatattctctcaaaagagaaagcttcctaacaaaaaatttcatgcacgtggaccttcttgtnaatcatgaataatntgatgatataaagaagaantttcttgagaaagggggagatgtaaatcatgcaagctttgatggtgtcgagaagaaatcacatgtttgtcatcatcaaaaagggggagaatgtgaatgtatgtatacatgattttgatgatgtcaaagaagaatctaacaaggctgcttcaaatgataagcatttgcttcaagaata

SEQ ID NO: 96319 - DNA, 439 bp, Glycine max
  unsure (1)..(439): unsure at all n locations
ctcagcttcaaattgaagagtgtgaattatatcagacgggagcattntgtaagaattatatttgaagttaatcatctatttagacaaatcaattcgtgaccaagatgcttacttaagatcatgtacttaacacgcttctattatttgtggattgttttaattattcttgtatcggttagataagtagctatctcttgtctcgaaagtacacacttaacacaatttcagctgaatattttccacaatttatattattcataaatactcttaaaaacatttattttcctctctttgttatctttattgcatcgctcatcacaaacttttctttcttttcttctcatctctcttttcttttatacagaagttgtacaaaaacaaactacggttaccatttctcattttcagcatatccgtgttactgtggtgtgatgcaact

SEQ ID NO: 96320 - DNA, 372 bp, Glycine max
  unsure (1)..(372): unsure at all n locations
ctgcagcttgctgtntagtttcacttacatagttctattgggtctgaaaagaggcaagattaatcaacttgcttggacaaatgagaaaactgcggcaaattaagagggtgaggatgagggagaaacccatgttgtgactgtcattactatactgccaagtttaccaacaacccaacaatgttattgcttgacctttcttcttatctaccacccagttatccacaaaggccatccctaaatcaaccaccgaacccacctaccacacaatctatgctaaacaccaccattagcacgaaccataacaccatccaatgaatgaatcttgcagcaaaaagcctatagaattcaccctaattctggtgtcctatgctg

SEQ ID NO: 96321 - DNA, 369 bp, Glycine max
  unsure (1)..(369): unsure at all n locations
catgacgctttattggcatagaataagttgctttctatgaaacttgagaatttaatagaaacacttggttagttgccaactaaactgtctattggtcaacctatacattcttctgttttgcatgttacaagttgtacaatctgtggtaaggcttatgaaacatgccaatgtattcccattgaggaaaacactcaagaagttcactatatgggaaataaatagagacaaggatatactcaaggaggattctcaggcttccagtanggtccttttaaccaacaaggacagtggagatcacaccctggcaatcaattcaacaaggaccaaggtggaccttccaataggccaattcaacaaatgcctaacatc

SEQ ID NO: 96322 - DNA, 450 bp, Glycine max
agcttatcctggtttaggtgcgacaaattatttgtctggctcaaagggcttacaaaaaatatcaaaaaataatgtgcattgggacatctatttggacaatgacttataatgtaaagaaacaaagaatgcccggatcacttccatgaatcatatgttaggacacttaaaaattcatgcagaaccaaatgtagaacatatccatgtagacactcaacataaaatatgtggtcacacataggcttggggcctatttccgcatttagatcaaatcaatgcttcaacaattgttcctttatcaagtccatgcaaaaacatctgagtccatttggtattcaagaaagaccttcattaatttcatcctcaagatacacattattttttcaaaaaaaacctttttgtgttgtttcgatctacaaaaattatgaagagtactggtggttgattctttta

SEQ ID NO: 96323 - DNA, 413 bp, Glycine max
aagtaccatatcctgtggtacctttctagaaagtatatgacctccatctggcgagaattcttgatattttcaagaaattggaaataactatgccttttggggaagctttgcaaaaaatgccactctactcgaaattcttgaaagatatgttgacgaagaaatatagatacatccaccaggagaatattgttgtggaaggaaactgcagtgctgtaatacagagaattcttctccccaaacataaggaccctggaagtgtactatttcttgttcatcggtgaagtaatgtgggaaagctctcttgatttgggagcagttcaacctaataccgctctccatggtagaagttggagagtggaatcatgccccaaagacttacacttgtgaccgtcctcacaaactacgggtattga

SEQ ID NO: 96324 - DNA, 365 bp, Glycine max
  unsure (1)..(365): unsure at all n locations
tttattttttcgattatctaccagggtaagaattctcctattagactagatattctgtagttcaatgaaaaaaataaagtaaataattctaaatttctaattagtaaatgacctaccttttgaacaagttcagccaccttatctggagtagcaaaagcctgatccttcagaggtttggccataactgactctagcttttgattctgaccacctgatgataatgcaactttaactgctgtaacctacaaaatcaatatgagagaactgggtaaaatatttctctttatgaagatgatagaaaaagttaaatcttcatagtgactggtgtgaagaaatgaaatatntcaaatatggttatgacatga

SEQ ID NO: 96325 - DNA, 373 bp, Glycine max
aaacacctttgctttttctcattgggtgagaatcatgttgatctcactaattggagaacacgacctacccaatgggaaatgaaacttacatataattagtggacctacatgaatttcacgggataaaagagtatattagataatgtgttgccagcatttctcttgttatacttataatgcctatactaaagttttgtttggaaaatgtccaggaacaccttgcaagatcccttatggccatggacacgttcctggcttcatcagccaagataatttaagagttggggatatcatcatcaaagatcaagtcactattatgactctaattataatgagattgttgggtttatgtcttcaaaatgttacctttgat

SEQ ID NO: 96326 - DNA, 401 bp, Glycine max
  unsure (1)..(401): unsure at all n locations
agctntgtggattaggtcttcgccactgtattgatctaagcggatctgacaagatgcagatttaattattctgcttggacgaatgagaaaactggggcatatgaagagggtgagaaagagggagaaccccatgctgtggctgccattcctatacggccaagtntcccaccaacccaacaatgtcattactcagccaataacagacctcctccttacgcaccacccatttatccacaaaggccatcccttaatcaaccacaaagtctgtctaccgcacttgcaatgacgaagaccacctttagcacaaactcagaaacaccaacataaaggaattntgcagcaacaagcctgtccgtgtcacccccaattccgttgtgatatgctaaacttgatcccatatt

SEQ ID NO: 96327 - DNA, 370 bp, Glycine max
cttcttttttgctggctgactggaaaggaatcttcccccatcattatgtagttcatatagtacacagggttgattccttttagacttgatatgtgccaccttattgctccccctatgtcttttgaggacctctaccaacctattttcttcttctatagtgagctcattgctaatcaccataagcttggtcccattctcctccataaacacatactttatgtggttgggtaggatctttatctcaccttggtcttctcggatgggctcccgcttttcaattcttcacaattgggccctcttgctggaagattctcgtcacgatctaagtctttcagcaagcccttaaatccttctcctcttcactggttga

SEQ ID NO: 96328 - DNA, 379 bp, Glycine max
gtcacctgcggcatgcaagcttgtcccagttatgttgcaacgctatatagtttataatattccctggattcattaccatgaagtgccaggttctggacacttgtttccatacatggaggaagtgagtgccactatcatcaaaacacaattagtggattaaaaataattcgctggatattaattaattgttgattttggcatgtcaaattcaaagacatgaaccagaaatcgtgcaattaatcatttctttttttgataaagttcaatcttattaaagactaattatgtttttgggtctgagttttttgaaatttttatttttaattgctgaataaaaaatatatcaatcttagttattttttattcatcaaacactttt

SEQ ID NO: 96329 - DNA, 384 bp, Glycine max
tggaatccaagaatttgtttgacccaatttcttcaattcttttcttagaaatgtgaactaagcgcttgtgccataatgctcctgagtttgtatcatcaattctacgcttagtaccacacaattctgtattaaaggattcaccatatgaagctacactatcaagtaaatatagattattattgaccaagagtgaagcagttccaacaatatctgaattaaaaggtaacctaaacacattgtttccaaatgaacacaaataacccaatttatccaaataagagactgaaaccaaatttcgtctgaatgacagttcaacaaaagtgtctgtcaaatgccaatataaaccaatacataataatcatctaaagtgccttatgagcttca

SEQ ID NO: 96330 - DNA, 405 bp, Glycine max
gtcacctgcggcatgcaagcttcaaccaagagggagatggaccatttctagtgcttgaaagaatcaatgacaatgcttacaaagttgagctgcccggtgagtataatgttagttccaccttcaatgtctctgatttatctctttttgatgcagaaggagaatccgatttgaggacaaatccttctcaagagggagagaatgatgatgacatgaccaagagcaagggcaaggatccacttgaaggacttggaggacctatgacaagggctagagcaaggaaagccaaggaagctcttcaacaagtgctgtccatactgtttgaatacaagcccaagtttcaaggagaaaagtccaaggttgtgagttgtatcatggcccaaatggaggaagactaaatgacaccac

SEQ ID NO: 96331 - DNA, 216 bp, Glycine max
  unsure (1)..(216): unsure at all n locations
caacattcaacttcgagcgtngcggtatattatacgactcaattagacatccgagtgaaaagttattgtcgtttgaatttgctcagagcttccacattcaatttcgagcgtctcgatatatgacgggactcaatcggacatccgagtaaaacgatattatcgtcttaattggctcagagcttctacattcaattttgagcgtcttgatatgtttac

SEQ ID NO: 96332 - DNA, 362 bp, Glycine max
agcctgaacgagaagatacttatttgcttatatccagactctgttaaatagttgatgtgattcctccaacatgaagcatctcatattctatcttttgtcgatttattagtgccaaataatattattcacatctcagtccatctattataatctaaatgtaaaatttaaattttatcgcaccatatcaaattaataaacatgtgaaccaacatatgtatgtatatcattctgcaaaatgaaatttgcaaaaataacaaaattattatctaaaatttattaaaacttaaattctaaataaggctatagccagatctcgtaactttgacaatataattctgcaagagaattggcgccaacccact

SEQ ID NO: 96333 - DNA, 280 bp, Glycine max
  unsure (1)..(280): unsure at all n locations
cgctggacggaaatggccaagcctanggtttcttctctcttctttacacaaccaacgccctatttctctctctctctcttgatgtatcatgtatttgcagtaccgcaggagacaacatgttatatattattttgggcagccaaagccaaagtacagcggactaaaacttttctaccagttttaaagtattcctacggatgagatcttgaggtaatcaatgtcctccactggaagcttcgcatatttctattggctactaaataaaacttattgtgttgct

SEQ ID NO: 96334 - DNA, 331 bp, Glycine max
  unsure (1)..(331): unsure at all n locations
agcttgtaagcctaagatcttcttcatctatggattcctttgcttcttggaaaatgaatggcaacggaatggagaaggaagagagagagagaggagacgccccttccaggagaagatgagtctagaagaagctcaccaccataagaggccatggataatagcttgggggaagaaggagatgactgaagggagagagagagaagagcacgaaattntgtgctccaaatgagctttgaaatctgaagtttgatattcaaatgatcaaagttgaaaaaaattcacacacatgacctctatttatagcctaagtgtcacacaaaattggagggaa

SEQ ID NO: 96335 - DNA, 373 bp, Glycine max
tctaagcttttatgaaaggatatgactcttcacaattgtatttgtatttcaacatttagatacattggtaatcgatttccaatatcttgtaatcgattacaccattttaaaatcaattggaatgttgcaaattcagttagaaacttttgaaatcaattggaacgttgcaaattcagttaaaagcttttgaaatcaaactttgccactggtaatcgattataggaaactggtaattgattactatagaagcaaagactttgtcgttgatgttttgatgatgccacatgatcatgatgatttgactccttatgaaaatgcgcttctcaagtttaattcaagaaaacaagacacaacatcaagaagatctctagtg

SEQ ID NO: 96336 - DNA, 457 bp, Glycine max
  unsure (1)..(457): unsure at all n locations
tggctagacatgatacatgtctttgtttggtttggttcaaagataaaagggatgccccacattatttccatgacacaaatgcaaaaatgatgaattggaaactttaggcaaaactggtcatgcatgcacctatgtggacactctagtgtcaactttntatggtcatgtgatgctaagagtcgcaagattcatttcctctattttagtcaacccaacgtttccaaaatatgttcttttatccatttgtgcattcatccaagtccatttcgggcgtccgagaaaatnttcacagcattcacccttcaggtgtatacacattttttttaanaatcggttatgatcaatgagatttttcaaagaatagttggaagtcatctcttttaaaagcatgttggttgttagctagacaacatatattcttttctctctttttctacatgcttcttatacattttta

SEQ ID NO: 96337 - DNA, 381 bp, Glycine max
  unsure (1)..(381): unsure at all n locations
aataggggaagaagtgaagaagaaaggggtttatttctcttaggcacttctctctctctcgaaattgctgaggaaaattatttctgtgaagaaaatccaagccgaggcgcttccgtaacatttccgtgagaaattacacgaagattctcgaccggtcttcaagatatcatcgtcgttcttcgttttcttcagtcttcaacgggtaagtacctcaaaccaagcttttcaattcattctatgtacccgtggtggtccacattctgnttcatgtatttntattctcgctttcatttgctttttatacccccttttgacgtgctttagccatttatttaagtcatttctcgcttaatctaaaaataaaataaatttctaccgatc

SEQ ID NO: 96338 - DNA, 400 bp, Glycine max
ggagttccaagtgccaattcgtcttcttctttattccagtcttcttctggcttcaattcatcagtgggctttccttctgtgtccagcatcttgggatgttcccagcctttgatgacagctttccaggttctgctatccagtgatttgagaaaggccaccatccttgctttccagtattcatagttggtcccatccacaattggtggtctgttcactggtcctccttctttctccatgttcatcagaatttatctccctagatctcactcagtgatttcgagtgcctgctctgataccaattgaaattctgatactggggacagatgtcgtacaggatgtcacgacatcacgcttcagaacatgcagatagtctttgactgtatgaacagattaaacaagt

SEQ ID NO: 96339 - DNA, 425 bp, Glycine max
  unsure (1)..(425): unsure at all n locations
tcatactactatcccactttaattattaaatcttacctgtggaaggatttgcttctttnttgttaattatattggcagggatagtggaatcaaatttgaaatttgtaatttggttctttagctatttacatcttatagctaattggctatacatttttgtctgactgtcttagtggttcaatgataattgataaccttgtttatgcagacaaatgaactctatcaattggcattanttgcattgtgcttgctagtagcttgggtttgttctcttctagatttttatgtttttatttgaaatgctctgttttcatttgttgttataagcagacaaatgtttacaagtagttattatttgttggagtttaccttactttcacaggttatgataatgagcattgaacaaaatctttcacatattattt

SEQ ID NO: 96340 - DNA, 360 bp, Glycine max
  unsure (1)..(360): unsure at all n locations
cgaccaacatatgtctttactaccattcctctgtaacacccttaagatttgacccggttagtaaacacataagcaatttgattacgacttatttgaactttaattgtttttaatgagaanaacgtgtcttgagtaattgcatgtgactagtaattaatcaagttatttaagaaaagaatggacaatagaggaaattaaaacttcttacttagggttaagttcaagaatttacaatatacatatattttttgtgattaatttctttaattgttgtttgtaactaaattcgtctatgattgaattatttgtagtatcttaattagatatttattatagtgttcgaaattaattgttttgttg

SEQ ID NO: 96341 - DNA, 357 bp, Glycine max
tttcttatatttcaccaacgccaggcgataattgttttattaccatcaagctaattttccttgttgatttcgctctatgataggtttaccatctaggtcgcctcttggattttatgggaactcaaccgccgttgtgtttcagtcgacattggcctgccctggttgaaaaggccaagaaaaatatagcataccttggcagcaaaaaaaaaatacctcgacaaactctgataaaaaacaattttagccgacatctgccaagaaatattaccggtcgctgttttcctaaagaatcaccgatgaaccaatcgcacatttcttatcgacatcttccaaaatatttacggattgacacaaaac

SEQ ID NO: 96342 - DNA, 352 bp, Glycine max
gctctgaacgtgatgaactttaattaatggtctatcaacaccatcatgcattctgattggtacagaagctacactgatatacttacaaggagcattgttacccatgaggacgtcaccaccttgtgcaaaatgttgttgtagttgttcaccaacattcagaaccaaatcactttttgataaagagtcattctatacaagagcaacaaaaataaaattctttgtgttctttggacaatctcgcttccaatgacctgattctgtgcagtaattacaagtgtccttaggaaccactttgctcttcttgccaccttagcctttcttcttcttctaccctatagcaaaatcattcacc

SEQ ID NO: 96343 - DNA, 406 bp, Glycine max
atcccgcatcacagttgctacaataaatgtctcgtttttctgctagccgaacatatgcccatctggtttgcaatgtctcatttttttcttcttgtgtactgacttcaagcaacttaactatcaagtccacaactttgtctacatcaagagcatcaaaggtatggaaagcacctataatgggcagatgtaacaacgatgctacatcatcaagggtgtagtgacctttcctatcggaagatggaaactactagtttccttgtgccacctctctgcaaaagcaaatataaatcccctctcactagtgttcaaggaacatggaatcagaggacttaatcttatggtagccattatgccttcaatctctagtgcaggccttccaaatttttgaactttctgttagacatgt

SEQ ID NO: 96344 - DNA, 416 bp, Glycine max
gcttgaccgttcttcgacgttcttcattcgttcttcatcgttcttcgatcttcaacgggtgagtacctcgaaccaagcttttcgattcattctatgtacccatggtggtgcacattgtgttttgtgtatttctattctccggtcatttactttttataccccctcttgacgtgctaaagccattttatttaagtcatttctcgcttaacctaaaaataaaataaatttacaccgatcgattgaattgtatgatccatcaacttcagttaaaatgaattccgaccgttcggtcgtgccgttaccacgttggaaatcaaaaaagaggtgagaaaaataatatgtttatcgaagaaacgtctcttattagaataaagcggcaaatcaatcggactgtttctctttgggatttctcattc

SEQ ID NO: 96345 - DNA, 489 bp, Glycine max
  unsure (1)..(489): unsure at all n locations
agcttaatacccagaatcacatctacacttctcttgtctttcatataaaaatttctagacaagataaacttcacatcatttatgaaattcatttactaccaaatatcaatatgttatccagatacaaacataaaatgacacgttcattattattaaattgtttcacatacacacatttatcactatcattaatttgaaaatcatacaaaagaataacttaatcaaacttttgtgtcaatgctttggagcttgtttcacaccatacaaagatttaacaatttattttttaaggaaaaagattttcaaagaaagtcacatctctagactccataatagtaccattagaaaattcagatacttctgaattaataactaagaatctataagtagtattatgtaaaaaatatccaacaaaantacaataatatttttntgtcaattttccttttcttattaatagggatatttaaccttactagacaccccaca

SEQ ID NO: 96346 - DNA, 382 bp, Glycine max
  unsure (1)..(382): unsure at all n locations
gtgaatacaagttattagagcattcttttaggaaattacacgacacaagaaatacctccattattatgaattaacggtacaaaagagtcttctagtcaagtgcacatgccgggcatacaataatcaaaatcaagccaagcacaaaacatgcaaaaagtgcacaagcatatacaatgagaaacaagaacattaaaaaacccaaaaacagcctgtaccgcgaacaggtgttctcgctctcccaacctcaaaacaactattcaagcaggcaattgattggtattggcggacgaacttgattgggctaagaatggctatgcggaacatgttgagtgaaatttggttggacttgcanagcctgctttgcctgagcataacacaactg

SEQ ID NO: 96347 - DNA, 336 bp, Glycine max
  unsure (1)..(336): unsure at all n locations
gcttgactttgtgagtagattntagccttattttcactttagttattagttaattcatttcagaaagagaaatcccaaagagaaacgtccgattgatttttttggtttattttactaaaatatattttttgattattatattattattttacctctttttggtttccaacgtgattacggcatgaccgaacggtcagatttcattttaacagaaattaacggatataacaattcaaatgatcggtgtaaatttattttattttttgattaggcgagaaaatgacttaagtaaatgactaaagcatgtcaaaagggggtacagaaagtaaatgaaac

SEQ ID NO: 96348 - DNA, 428 bp, Glycine max
  unsure (1)..(428): unsure at all n locations
cgggggatcctcatatgtngacgattcttaatgggaatgtaacgaatggagaaacgctgaccacgangagagctgcgcattgcggtgcatccattggaaccacgcaagggctggcccttccatgtaaaaggaagctatcgtcaatcgttcctgatctggcggagagtggtactcaaagaattgcgtgatcttgaaggtccaaccagttggatcagaaccatcaaaccttgggacgtcgagcttcatacgatgcactggattgtgcgatggcggcgtctgtcctgtcgatgaaaaatggtggcgttgcggtggttgctggttcacttcgagttgcgacatacgatgaaggagatcatcaatcttcgaattcatggtgagctgcgaagctgtgagtttcgcaatcgtgtcttccaggcgttctgatgaca

SEQ ID NO: 96349 - DNA, 371 bp, Glycine max
  unsure (1)..(371): unsure at all n locations
tgcaagcttttgtataaagaagaagaagaagttcttagagattcaaagcttgtaaaggattgtattanattaatttgaaaatgcaaaacaacgccttgcttttatagactcttcatgtctggtcaagaaggccattcagaagagttattacttttagaaaaacttaaaacccatttgaaaaagtcaaaacctttttgaagagttacatctttagatttttcagaaacaaacactggtaatcgattaccaaataagtgtaatcgattacacaaagcttttgagtgaaacaatgtgactcttcacttttaaatttgaatttcaacgctcaaggacactggtaatcgattaccaaaacattgtaatcgattaca

SEQ ID NO: 96350 - DNA, 410 bp, Glycine max
  unsure (1)..(410): unsure at all n locations
agaattgatggcctcataaactactagttgcctgttctcttttcaactaatctgcctcccattgttaatggagtgggttaccattattggaaaacccgcatgcaaatcttcatagaggctatagatttaaacatttgggaagccatagaaataaggccttgtattcccaccatggttgctggaaatacaacaatatagaagcctatggaagattggagtgaggaacaaagaacactagtacaatataacttaaaatccaaaaacataattacatatgccctaggaatgaatgaatactttatggtatcaaactataaaaatgcaaagggtatgtgggataccctacaagtaacacatgatagcacaacanatgttaaaagatctatgataaacacattaactcgtgaata

SEQ ID NO: 96351 - DNA, 429 bp, Glycine max
cgcttctatataagctgaaccatcttatcaatatacacaagttgttttttattcacaaaattagagcttatctcttttatcttagtgagagtgattctcctaaattcttgagtgattcaagaacaccctgactgtatcaaaggactttcacaacctttgtgtgttgctctcgctggaaagagtgattctttccttcctttcatcttcacccttgttcttttaaaccacaattccagaaaatccacctctgcccagaattatctcgtggccataactcccattttacgcactcaaatgaagtgattcttgagcctaaattgactttcaaaacgagacctttcacctcgttttggaatcacctcatttggagccctgtagcttcaattatttgcatttctatatttctgtccagccaccacttaacctaca

SEQ ID NO: 96352 - DNA, 416 bp, Glycine max
  unsure (1)..(416): unsure at all n locations
ctggatctttgagcatcaatgaggtcctttaatggtaattttccaccatggagatgctacagaagacaaaggagaagaggtgagaggaggcgccatccactatgaaataagccatggaagaaggagcttcaccaccaagatgagccttggataagaagcttggagaggatgcttcaatggaggaaaagaaagagggagtgaaagagagagaggggagcacgaaattgaaggaagaaaaagggagagaagttgaactttgagttgtgtctcacaagactctcattcatcaaagttacaacaagtgttacacatgcttctatttatagactatgtagcttccttgagaagatntcttgagaanactttcttgagaagctagagcttagctacacacacccctctcataactaagctca

SEQ ID NO: 96353 - DNA, 377 bp, Glycine max
ttacctggttacccaactggtcatgaatcaaaaatctgcacctgtcgccaaactctgtggtttatgctcctctgccgaccaccacacagacctatgcccttctatgcaacaatctgaagcaattgaacagcctgaagcttatgctgcaaatatctacaataaacggcctaaacctcagcagcaaagtcagccacaacagaacaattatgacctctccaacaacaagtacaatcccaggtggaggaaccatctcatccttagatggtcgaatccttcacaacaacagcagcaacaacaacacttatttcaaaatgttgctggcccaagcagaccatacgttcttcgatcaatccagcagctacaacagcaacagccct

SEQ ID NO: 96354 - DNA, 431 bp, Glycine max
  unsure (1)..(431): unsure at all n locations
tctgtgtggtggtcggcaaaagagcataaaccacatagtctggcgataggtgcaaattnttgattcatggccagttgggttaccaggttaaccaaagcatctagtttaccttcaagcttcttagtgtcacctgatgaattcgtggctacttcatgcacccctctaatgacaatagcatcacctctggcactaaattgctgggagtttgaagccatcttctcaattaaatttctggcttcagcaagggtcatgtctccaagggctccaccactggcagcatttatcatacttctctccatgtngctgagtccttcataaaaatattggagaagctgctctgaaatctggtggtgagggcaacttgcacataatttcttaaatctctcccagtattcatataagctctctccactaagttgtctatacctgga

SEQ ID NO: 96355 - DNA, 396 bp, Glycine max
  unsure (1)..(396): unsure at all n locations
atttatccttaatttcactttggttattaatcaattcatgcaagaaaactctcaaagaaaaaaacgtctgattgatttttttgattattttattcaaagatattttgattattttattattattttgccccttttttggtttaaccgcgattacagtgtgaacgatcggatatattttattttaatggtgtttaaatgagattataacataaatgatcggttgaaattcattttatcatttattaggtgagaaaacagcttatataaacggctaaagcacgttaaaaggaggttccaaaaacatatgaaatgaaaataaaagtacccgaaacaagtagggaccactactggtgcatagaatgaattgaaagatcaatntcgagaacttaccggttg

SEQ ID NO: 96356 - DNA, 325 bp, Glycine max
  unsure (1)..(325): unsure at all n locations
gctagctctaaatatacattgatgtttgtattgatgggaggaggttacatgccatnnttgctttaatagtaatgtcccactaaaactaactctccaaatgtttgccttcgcaggaatggcaccgaggaagcttgcctcanagaggtccaggatagacaaggcggccgaaagaactatttccgccccggagtacgacagtcaccgctttaggagcgttgtacaccagcagcgtttcgaagccatcaagggatggtcgtgtctccgagagcgacgcgtccagctcatggaggacgagtatactgatttccatgaggaaatatggcgc

SEQ ID NO: 96357 - DNA, 323 bp, Glycine max
accacaaatcttatattgaatgtcctcatggatatgcgctctgattggttttgcatgaatatctaattgtcataacatatgaatcatggaaatgaaccgggcattctttctttctatgacattggccaaacaactgtcccaatatacattattttttgccatgtgcaaagccctttgaggcagacacttgatttttatcagaacactaacctatgatgaaagtttcctaccttaccttacgataagagaggaggagtgctttcaagggagatttctatcatttttatggctagtcctggattctgtaggaagttagatattta

SEQ ID NO: 96358 - DNA, 433 bp, Glycine max
  unsure (1)..(433): unsure at all n locations
agcttaagaacccatacttgtagcttcaatgcaatgtttcatgcttatggctaggaatccaaaatgtggttttagagttagaaaaacatgaagattatgatttgcttgtgagagtttttgctcgaatttgggctgccccatgtttgatactttacatagaggtagcgcggaaaacaccttgcaatagtgtgtgtacataggtaaatattaggagtatgaaattcctatcaaagtgtgaattattgtcttcctaaatgaatgtatgatagtgtggaatgcctttnttgaatgcgaatatgtgcaggatgtgattagctgtccaatatgcatataaataaatatgagtgaaacacgtaacatctgtatggtgcacttacaatgtatggaagcaatttgtgatagcagatgttagggatataattatgtgtatagt

SEQ ID NO: 96359 - DNA, 411 bp, Glycine max
  unsure (1)..(411): unsure at all n locations
ttaaaaagccatggagacagaatctatacagggttctcaccctgcttaacaagcntttaatgctgcgagataagagactaacacagagtggaaagaaatgataaaaacaatgaattaagatgaaaattctaaattataggagagtgtaaaagtttgaatcctatattattttattggatatttctcatatttttcactctctttctatgtaaagtggcacaccctacatctgtaaaaagcaaagggacaaaaccaagttgaaagccagcactttttggtcaatatttcaaccaaaaaaaaatgtattaaaaagttctcataattgttaaagggcctcaccagatcactaaatttaagcctacatacctttttatggggtttgatattttgaattcttatcccaaatgttaa

SEQ ID NO: 96360 - DNA, 460 bp, Glycine max
  unsure (1)..(460): unsure at all n locations
gcgagctcgctgtctatgaagaatgccttgcgcttttatagtcatgaaaaacccttcgattatgtgtgtgtatgtaaatatgcagcttgaaatgccttgcataatgttgaataaaaggccttgccaaatatgaatatatatagcatgaacatgccttgcatagtatgaatatatatatagcatgaagtgccttacaaagtgttttggatgggtagcgtaaaagtgtttttcaaaatatttgtatttatgagtaggtagcaaaagaagccttccaaaaaaatgtgtatatatatatgatgcagcatgaaaaggtttgtcagaaaatgtgtacatggatgtgtgtcgtaaagtgcctttcaccaaatatttatgtgtgcaaatgcatatgtgtcataaaataacacggcccccatatgattattntataaattgcatgttgacactcgcaccatatgaaatg

SEQ ID NO: 96361 - DNA, 346 bp, Glycine max
  unsure (1)..(346): unsure at all n locations
tttctcganaggcacaacaatgtgctcaaatttgggatctaatgagtgtagtatcttcttcataattcttacatcttctaacttctcaccatttctttttagttgatttgaaacaacaagaattcttgaaaaataattgaaaatggactctgactctttcatatgtaaggattcgaactcacctcttagaagttggagacgcaccttctttactttgtcttctcctttgtgaaaggtttgaagcttatcccatgcctctttagtggatgttgcattaaaattctttctcaatgcatcatcatgtaatgcttgatacatgaagaagagagctttctgtgtctctttc

SEQ ID NO: 96362 - DNA, 340 bp, Glycine max
  unsure (1)..(340): unsure at all n locations
ctctgcacaatgcagcctagcttgtgttaactaaataaacatatttaacaaagagtacttaatttaccctgtttgaagcatgaataaattgaagtcagacggattgggcaggacactcgtgcatttactgtcaaagataatatttatgttaggcattaaccaacgtgattctctttcacttttttctattgaaagaatttcaaattgcatgttggctaaggggaatacaggtaattggattctgatatctatgggcaaaaatggaccaaaaatctctttttattttttgctgatgctaaaatattggtgccagaggctgtgacctnatgtgaatgtgatt

SEQ ID NO: 96363 - DNA, 429 bp, Glycine max
aaagcttggctgcattgcacaagaattaaaggtagtcttaaaagctactaatgaaaaatacaagtccatggttgatgaggcatgacatgagacagcttcaaggcaaagtgaaagcttagtgtgctgtttgttgtccaaacagacagcttcatgacatgagacagctttcagaaaaaataactagtctacttcccactcagttctactactagtcaacacttactttgtttgctgtccaaattcttaggtgaataaaataataattaccatcttgtagaatgttatgttaataataaatactaattggactgcaatattagagttggataaatacctcaatgaacttttgaaaccatggcctttaggagatccatgataccaagcatgagtgcaccccatagaaatcatcaatattctgtaaatggcatt

SEQ ID NO: 96364 - DNA, 447 bp, Glycine max
  unsure (1)..(447): unsure at all n locations
aacaagaccattaaaaaagattaccaaagataacaagtggtcgaataacataaagaaacatgttcagaatattatgaaaataataacgaaattcatgctcttatgttacacactatcacaacattgtgtctcagcgttctctagcatgatgatctttatagtcattcacctaaccatttattcccatgaacataatgttcgatatcatcacaggagttaaacacaaacaacacacaataagtgagttatctcattcctaaataggtaaaaatatacgaacacacacacacacatataatataagtataacacgttcaacttaacacgatatttatcatcttatcattcattgtgaacatcactagtccgaaagatttaattgccaaatcatattctacaccttcacatcaatcacatgtgtagaacaacacattncaagtataacac

SEQ ID NO: 96365 - DNA, 407 bp, Glycine max
ctatgccataatgctcctgagttggattataattctacgcttaatgccacgtaattccgcattagaggattcaccataagaagctacactatcaagtaaatatagattatcataagccaagacaggtccaacaatatttgaattaaaagacaacctagacacattattttcaaatgaacataaataatccaatttgtccaagtaagaaattgaaaccaaatgccgtctaaatgaagatacaacaaaagggtctttcacatcaaaataaaaacccgtacataataataatctaaaatgccctatagcttccaccgatttaccatcttcaacatatatccatctttcagaacaattggcttctgatagcttagacaacccttcattgaaacatgatgttagatggacac

SEQ ID NO: 96366 - DNA, 432 bp, Glycine max
cttgatatcatcaaaatcttcatgatttacacatatacactaactcataaactcactttcttcaggtctcatatatccattttaacttcttcttaatgttactaccaaacctaagccatggattctacaagtgctcctcttctttggaaaaaacacattagatttggagaagtatgtaataaattgtttaattgaacattaattatgttatgatttacaaatattaggggtgttattattctgatttttgtagataactgatgatgtaatccagtcatatgctcaagctatgccttgtttagatcccagaattgaatctttgttgattcatactgcgttttaagatgatgcaaagctcacgcagattaaagtctatgacactctattggggtgttgatgctagataagtcagggaaatagagtcacttgatg

SEQ ID NO: 96367 - DNA, 368 bp, Glycine max
ccaatggagacgtcctattatagacttcactgaaggttccataatgggatcaacgtcattttctggagacgactgttgtcgcatactgtaaaacaagacatgtcatgctctaaatgaagaggaacgatacataattatagagtacaaacaacatcgtgtgcacttccttttctaaattcaaaagttacaagttcaaagtaatataggaaaatagaagttgaatgaaacaatacacatgcacttccttttttcatcatattactctattaactagaccctgaatctcccttagaaaagagtatactgattactccgggtgaacactcctgatatatcatgtggacactgatagaacaatgcttctttta

SEQ ID NO: 96368 - DNA, 417 bp, Glycine max
  unsure (1)..(417): unsure at all n locations
agctntcatgcatttccctctgtgcagtgttatatacatnccaggttggtccatatgctgttgaagatatgattgagatgggtaaggatgctggcaaggagcttctgtctcgggctggacctaacttcttcagtagttagcagcagatgattaaagtgtgatcaggtacacacaagtttcatggtcagctttcggctattgcttcctaagttaattcattctttgacctgttgtaactttagagtagattaaatgttcaattgagtttgggaaagtggacctctcattanggtcaaattgttgtattttgaggatattagaatgccaattttttaagtagtttgtataattaccacgatagtggacttttgagatntcacgctaaatacacctgggtgtttctcaaattctcttatt

SEQ ID NO: 96369 - DNA, 425 bp, Glycine max
  unsure (1)..(425): unsure at all n locations
gtactttaagacaagatagtctttttggtcattctttggtgaacagcacaaaattcctttgaggtgagttgatgttcataaggattggatgccttcactgtcccaatattntcatctgtcttctctgtgtctacttttcttacaacattacatcaatataattgatcactctcaaagcaaaagaaactattagaggacctgcagaacagcaaagcataaatcctccagttcagctttcaatgcccataggcccaatcttgaagcaagtgaacaccaaatgattaaggtctcctctgcaacagcttgagcttttgcaatggcagagcataactgcaaagagagattgtcacccaataaaatgacccatgcaacatacctaanacttataatctgtttanccaaaaagtcaaaaagcacggtatgga

SEQ ID NO: 96370 - DNA, 448 bp, Glycine max
  unsure (1)..(448): unsure at all n locations
agctttcaccatggcagaacaagccagacaggtgttttacgtccaagatctgtgtgactcaagatggttagtggttctacaatgaataacaagtggtatcaatcaccaaaatgatgcttcaacacttgatattaatgagacacatgttttctcccaacaaatgccttccataaatgcagaacatgaggatgatgatgtacatgcaaatngtaatgatcataatgaaggtttatgggagagtatccgtacataactacggtataccaaagtaatgtatatcatatcacattaattgcaataaatttttttaatgtcaatattttttatttcatacttatatgttgnttcaattgctttttctttaatgaatttgttttatttgcacagagtcatggcaatacccccaaaggccccttcgcattcagatgctcctttggaggctatgtct

SEQ ID NO: 96371 - DNA, 377 bp, Glycine max
  unsure (1)..(377): unsure at all n locations
tccatcacttagcaacatggagcggagtatgattgatgctgtcagcggttgagctcttggtgatatgacccttgcagaagctacgaatttgattgataagatggctttcaactcccaacaattaagtgcaagaaataatgctattgttcttaaaggagtccatgaggtggccatggattcatcttcatctattgaaaataaaaagcttgaaggaaaacttgatgccttggtcaacctagtaacctaccttgccatgaattanaaatctacacctattgaagagtttgtggtctatgttcttctgcagatcaccatacagatctctgtccttctttgcagccatttggagtcaatgagcaacctgaaacttatgctgc

SEQ ID NO: 96372 - DNA, 405 bp, Glycine max
  unsure (1)..(405): unsure at all n locations
gtgcaagctgaatcggacctcagtgtgataagttgtgaccattngaatntctcgagagcttccgttcttcaatttcgtgcgtctctatatgtgagtcgcccgaatcggacatccgagttaaaagtgatgtgcatttaaatatgtcaagagcttccgttgttcaattacgagcatctcgatatgcgatgcgtctgaattggagattcgtgtaaaaagttatgaccatttgaatttctccagagcttccgttgttcaatttcgagcgtgtcgacatattatgcgcccaaatcggacatccatgtgaaaagtgataaccaattgaatttctcgagagcttccgattattaatttctagcgtctggatatattataattctgaatcagacctccgagtgaaaaagtatg

SEQ ID NO: 96373 - DNA, 393 bp, Glycine max
agaccctgctattcgtgaccttagaaactcacggtatactatatcgagacgctcaatattaaactatcaagactctctagaaattcaaatgggcataaccttttacacggatgtccgattctggcgcataatatgtcgagagtcttgaaattgaacaaccgaagctcttgagaaattcaaatggtcataacttttcacacggatgtccgaatcaagcttataatatatcaatacgctcgaaattaaacaacggaaactctcgcgaaattcaaatagtcataactattcacacggatgtccggttcgggcgcttaacatttctagaggctcgaaattgaacaacggaagctcttgagaaagtcaaatggtatatctttttacaccggtgttcca

SEQ ID NO: 96374 - DNA, 489 bp, Glycine max
  unsure (1)..(489): unsure at all n locations
agctngtggtgctgatcttacgcatcttgtactgcctatagataagcacacaatggaactaattgcatcaatgtcaatgcatctaattttagacttattgacatcaacttcatgcattaatattgaaaaatttcaattttgtatgggcaccatgggcacaacatatctgccaatgaaacacataagaaacttgctcctgagcgcaacgctcctataactaactttataaattctagctagagaattaaagggtgtgaactaccaactattgagaacaacgatgagttgggaattgtattcctacttcacaataccaattgaacatgcaacacaggacaataaaatcctgaacaaaacacacaatcaacatttgcttacgttctagcgctgccatctccaaagacttctccccagatggttcacattgcacaactcgaacataatactgngactgttgcacttcaccatacangagatgacgacaacgat

SEQ ID NO: 96375 - DNA, 409 bp, Glycine max
ctaacattctccacactagcattaaagttcacacaattcttcattatttatcaactccaaatgacaccaaaattgacattgataggaatgctccataatatgtataccctaacaacaaaaaatctttataccaaaaatcaatcaaaaaatattttatgtacattccatattagaattgaatagcatgacaaaattacatatataacctatattaaatttgtgaccatgtgtgtacttggatttgtgttcttttaatcttatcttcatctttttttatatccttttcttttattctatgaaagttacacaaatatttttttctctcttttgttcacccatctcttttctctctctcacacactgtttgtctcttttctctctctaacataatttcccattcttttacttt

SEQ ID NO: 96376 - DNA, 164 bp, Glycine max
agcttgtgaagaataactctcacggctgtctctttgctcacgccacaacctctagtgaacattctacgacacatggtgccacacagacaccggataaagacatcctgcctgcgctactcaccacattctacttgtatcagagtctttggaccgatgatcttccc

SEQ ID NO: 96377 - DNA, 371 bp, Glycine max
  unsure (1)..(371): unsure at all n locations
agctttcaaatccctcttcactaagtaattatggatataaacatctaacctgaaaatctcacagagcaagcaagcacatatgagaaccaaagtttggatctttacatcaagtacatcacacacagaacagatgacaaanaaacccacatcaaaatagcaacacccaaatgcaggaaccaacgagttcaatttcattcaatctaaagataccccttacacttgcagaggctaaaaaaccctaacatacccataagaacattctcacacattcaccaaaacacaaccaaaccaagggaaataaaccaactcagatcaacccataaagagacaaaaagcaagagaaagacccagaacccacatcaatagaaaaa

SEQ ID NO: 96378 - DNA, 438 bp, Glycine max
  unsure (1)..(438): unsure at all n locations
cgacactatggaatacatacgcttatgcgcatatatccttacatacgtactcttgcacaagacatttaaccgaaacaaatgcacccatatacaatcaaggcagcttcgatacctagattatctacacgtacctccaaggtgtatttgttacttacatcacacacatctctntggctaaatacacatacatgcatactcaaagcatttttgggtaccaaaaattgcacatgagcacatcttggcatttctaatacctattcatacgcaaacttcatgatgaatcttgactacccacacaataaggtgctacatttcatgctccttttttcaagtttttgctacctaaagccgcatgcatattcaagcatattctcctttgctgactaaaattgtattcaaattaaaacggatatattcttttttgtaataatgtttctt

SEQ ID NO: 96379 - DNA, 363 bp, Glycine max
  unsure (1)..(363): unsure at all n locations
agcttgttgcatgcattcatacgtgtactatgtgtgtgtgcgcaagtccaggggctatatggagaatgagaagagtttccatacccacgttgctgacttgctatantataagaacatggagaacaattcttggggtatggagcatagcactgtcctagtattctttgatcatattagggcttctgggccttggatgacatcctcctcccttaaacagaagatgtgtctccgagatggtggaacacgaagctagtgctaacctgtgagatcagaataagcgcctgaggatgcataatctggcaccacattttcttctctgacagcacgaatttattaatgtgcaacatagatcaatgacattat

SEQ ID NO: 96380 - DNA, 407 bp, Glycine max
tcctacgggtagactttcttatactaagctctaccctcggattcctcttgttggactagacttagcttaaatagcttacgagagtgtatactaatttatcctaagctgtgtactcggatcgcttttgctggactagacttagaccaaacaacattattgtgacaatatacttaaaaccaaaacttaatccgcagatccctcttgttagactaagttgcagttctgcttcattcaacttctaaggctacagtacgtatcgcaatgctaaagacacctaactatgcacacaaatgggtgatcagaccaagagcatacaaaatttaagcacttgaagaagcattgaacacaagaagcatagaaccctcacactagtgagattaccaaacctaggtatctttgcataagct

SEQ ID NO: 96381 - DNA, 458 bp, Glycine max
ctggagatgcgtctcaccccttctttttatgatgatcctcgaggagcccttttcaagctcatgcaacacgactcattcaatgcatacctatcggaattcaaagctctggctaaccgaactatgggccttccacctccgtttctcctcagttgtttcatctttgaattatcacttgatatcctctgtgaagtccaggctctgccaccattatcgcttgttcaagctgccgcactggcgaaacttcaggaggataagcttttttatgctcgtcatggcttgcgcttctggctacctgtttctcctataacggtctcacccttcagctcgttgcctctatcttaattactggcactgctttcagctcctcagaaaaccaccttcaaaaagcttactcccgccgagatggcatcgcaccgtgagaagggattatgttataactgcgatgaatgctacggtcc

SEQ ID NO: 96382 - DNA, 471 bp, Glycine max
ctaagctatcccgtccacaggacacaatcagggccaatagtcatctttcttatgttagatcaacgtgatagcccaaatacgagagcatcgaaccccgaaatgcctttcggtcataacgaacacatagatttcgtataaaaaaggtactgcgcctgcaactcttcaccccgctaaatgcaattgtcgtgccatgtttagacgcatcaattatatcgtcataaagttattaccattctaaaatcggcggatgctaagacttaaaggtactacacctttttttttttttttatggcaatctttagaccatacatgctaaactattcacaccaaagctacacgctatttctatttgtgtcatgccacaatattttatgaatctttaatttgaattcaattgcctcataaataatatcgttatgtgtgctaaaatgcaaatgagtatttacttggaaaaaagtaacgtgtgcatgg

SEQ ID NO: 96383 - DNA, 375 bp, Glycine max
gcacattacttctcaatgccccaccaagataaccatgattatgaggtgccaagacatttatagtagccaagatgaggctactacttcaccttcctctagtgaaagtgaagaagcaaaagggaaagaatctagtgaagaaatctacccccaagaagaaggacaacctttaatggttacggaggagtgtaaggaggtaagtgtctcctccaagaggttagctaagaagaaaagtcattttgaaataaagacaaatattaaagaaacttcccctcttagacaacctccacatcttcttctttgtaaaaagacacttgttagcactgccacacctcttgggcttgaggttattcctcgagtaaaggagttgttggatga

SEQ ID NO: 96384 - DNA, 348 bp, Glycine max
tctaactttcctttttagaagattgcatacatttaattatgagtgcttgtaattagaactgcatacacaatcataggagttcaatatttatatgtgatttgttaaatctctagctagcgtcaatatgattcatttattctatttgctctgcagattggcgtctattatggaaatccagaagtgactagtggtggaattgcattgaagttctttgcgtcacttcggctagaagttcgtcctacacggaagataaagtctgttagctcaataacactgtcacaacataatcttttatatcatcttcaaccttgctgtttccagtatcacatctactaaaaagtatcagca

SEQ ID NO: 96385 - DNA, 219 bp, Glycine max
ttaggatacaagtaatctccaccattcatcgtggaggtggagtagtttaaataagggtaggagccttcatttttagcaatccaagtagagaccctctttgagagagaatataaatatctgggaaagtctttatcctcaagcatgagagagcctctgtgagagagaagataaataggtgtggaagtctctatccttaagcttgagtaagcttctctgaga

SEQ ID NO: 96386 - DNA, 355 bp, Glycine max
  unsure (1)..(355): unsure at all n locations
tgtgttatcacaacgaggatgacggacgtacattaatcacttgagttcacgcatcacactangtgtgcatgaccagaagtgtacaaccataaatagttctaaataaaataatttggtaacataaataacactaaattttgtgaatatttttttatgataaatattaaatagtttttatatttataaactattaaataaagttgtcatttattattttctttataaaagagaatatgtttagaatatatnttgttaacatataccttaaaaaacactaaagtgaccatcaagtgcatgaatccattggcagtagattcaaaaataaagagtgctactaagaattttaatttggaat

SEQ ID NO: 96387 - DNA, 409 bp, Glycine max
  unsure (1)..(409): unsure at all n locations
ctttgcatgtttagagaattttagagaaagaaagactggcagagaactgagtgagaagaggaagtcattntgagagcatgagatgagtttgtgagtgattgtgaggttctagaggtggaggagacatccccactacttgtatttcttcaatacttcatttttctcttctctttgttgtaaaggaagcttcccaaatatggagagctaaatcctctgttggttcttccttgtaggtacttgatgtaaatacttgtatatctatttaatgatgttttatgtgttctctgtgctatcannacatcatttcagtgtgcttttgccttgatcaagtagatgcatgctttgttaggatcattcaatagtgaaaactggtctgattcttagaacttgataggacggggctagctta

SEQ ID NO: 96388 - DNA, 352 bp, Glycine max
  unsure (1)..(352): unsure at all n locations
ggcttgtggggcttctatggatgctggatcnttgagctttattgaggtcctttaatggtgattttccaccatggagatgcagcggaagacaaaggagaataggtgagaggaggcgccatccactaaggaataagccatggaagaaagagcttcaccactgagatgagccttggataagaagcttggagaggatgcttcaatggaggaaaagaaagagggagagaaagagagataggggagcacgaaattgaaggaagaaaaagggagagaagttgaactttgagttgtgtctcacaaaactctcattcatcaaagttacaacaagtgttacacatgtttctatttatagact

SEQ ID NO: 96389 - DNA, 205 bp, Glycine max
tgcatatgagagaagggacacagccaatgtggagaaaggtgaatacctaggaaagttatttgtaccactgtttaaacagtactttatcatattaaacattatatattactcattgatacggtacttaactaccgtttaacggtacaatggtatggttaaaaggattcttattttaacggttactattcaagtcgcttgattgtta

SEQ ID NO: 96390 - DNA, 441 bp, Glycine max
  unsure (1)..(441): unsure at all n locations
actcagctttaccctggtgttngtattggaagtttgaaggctgaatgtngctttattcataacannngatagttgtangtttacgaggtggagaattttagtgatcaactatttggtttgctcagctaangaatcattcaaggatccacctgaccaagtccaaggagaatgggacctttcataggtcatatattgccagggaccttgtttcttctagttgggacatggcatatatggcgctctgtgatgagatatgtgtcaaaccctaacacattcagagtccaggtgtgaaatcctgccccggtgttaaatgagacgctcacactctgagagctctatgtcattacaatgggcgctttcatagatttgtgtgaggagctcttacttgcaaccctcctcatgtttttttgtggaggagccttgaacaccacttacttcaac

SEQ ID NO: 96391 - DNA, 226 bp, Glycine max
ctccggcctagcacggctccgcgtagttaactacttgactactgggcacgacttggactgcccaaatcattacagtatttttggattacttggacaagatagatgcgatatctgggaacatgtaatgaacgaattaatgatttcggtatgcttatatgctgatagtgagatacctgacagcatggtaattctgaggaagtagtatggagttgtgactagtgaatat

SEQ ID NO: 96392 - DNA, 424 bp, Glycine max
  unsure (1)..(424): unsure at all n locations
taatatatggtccacaaatatctggatgtatcaattctaagacatcataaattggatgggaacctattttcttagctttggtttgcttacctttgatacagtcaataaaaacattaaaagtttgaaagtctatatcattcnaaatccctttagacacaagtcttacaattctttgttagaaatgtgacctaatcgtttgtgccataattatcatgaattctcatgatgaatcttatgcttagtaccgcatgaagatgtatgcaaggtttcatgataagatgcaattgtcttaagtaagaatcaattatcataatgtaacatctttcattacaataataaatcatatattaaattggtaaagaataaaattccaaagctaaaaaggtctcaaatcacacttcaagcatnataaaataaccaatat

SEQ ID NO: 96393 - DNA, 440 bp, Glycine max
  unsure (1)..(440): unsure at all n locations
caccaatggccctgcaattcttaatgttttagatcctcgagccttcctatctngccaagatattcaagccattccacactgctgacattaaggcatctgataaggtgaaagctggagaggttcttgcagcccacaacaagagacagaatgccacagtcagtgatccttggtgtgaaattcaacctcacagatgagagcttggaagaagaaaccaagttacggagaccaacatcagtgatgaatgtgcagttgctcaaagagagatcacagagtctagggcattgattagccagaatgagaagacccttgtcatccaattngtttcccacgttggacatccatccagagtatgtaatctccactttggacaaattctgaaaccttgtgcatagacaggtcaaagcttcatctgcatgatccattccacacccaacccttac

SEQ ID NO: 96394 - DNA, 417 bp, Glycine max
  unsure (1)..(417): unsure at all n locations
gctctcaggatgttgaattcaatgttgttggagtgggttntggtttgttggatcagagttctgcgcttttccctattcctagtgtgaactttgtgagcagcagcagcagcattgacccttctggtactgggaattgttctgatttccctttcaattctcaaactaatgttagccccaatgttcctacggttggttctggtgtgaatccaaacactactgggttccctgcttcagctagcaatctctcaccagtttcactccctcagggtgtgtttctgcctcaacaacaacaacagcatcatccaccaatagagcctctggatgagaagctacaagttctcaatcctcagctcattttgaaccaaaatcaatctcagtttatgccaaacgcgggtttggttttgcctctgacatatg

SEQ ID NO: 96395 - DNA, 448 bp, Glycine max
  unsure (1)..(448): unsure at all n locations
tttactcggtgtaaaaatcatgttctaatgcaattctaattcctacttttcttatcatataaaataacatatgtataattgaaaattntaaattaactacttgagttaaattctcattgtaattaattttcaatgtcaattatatttctatagatcacacaacgcaaaactttctataatatgagttctaattntcagggtgttacactatgcaagttgtaacactgtgttttttcataatgcttaattaagtgtctttaattagattgcaagagtaattaaatttaatttaagtgcattatgagatgatggtctgttatgtttatgtatatgacatattgtatgagtgttttgatgagttttaaagtgtttgaacttatgtggatgggtcttgtgtcatgaaaaaaggttggtgagtcataaaaatatgtgatgtgatgaaagggaa

SEQ ID NO: 96396 - DNA, 384 bp, Glycine max
  unsure (1)..(384): unsure at all n locations
atcgctgagagtgtgaccttactctatgagattattattagttgtgagcgataatctntgcataaatctctgaatttagaatgaaatgtataaatgaggacatgatgaacgccatgattgtacatacacaagctctgttgaccaaacaacttaccttgaatgataattgcatcctttgctccctttttgagctgaatgatattgtcaaaaatttgaaccctgaacttaaataattatctcctgatactttgcttagattttacgagcgcatatggttcaaggcaaatttactctaaatttgggggagggaagtcaattacaatgaaaagaataaggtgtaacatcagccacacaacaaattatttgtgtgtataaaaaaaaaaa

SEQ ID NO: 96397 - DNA, 294 bp, Glycine max
  unsure (1)..(294): unsure at all n locations
cacctagagactccgatgactcgagcctctacaatacagtattcatgggtcaattcttggaagagttcaccactctacccacagaagatgctacatgaccgatacctgcataaacacatattacattttgaccctgttgattgagaatangatctgcggctactgctgatttaccctgatgtctgtctacaataattaattctcgttggccacggcctatggggatcatcgaatcaatagcaataagctctgtttggagaggctcatatacggaacgtcctcgaataatacccg

SEQ ID NO: 96398 - DNA, 215 bp, Glycine max
gcttaaatagggatctgtggtagggaatagtatgactgctaaacaataatgtgtttaatgcaggtaagaagtgcatgtatagatttggataaagttaaatggaaagatccattacaatcccaaggggagaaatctaaggcacttagaaatcatcttgaggcttttcctacacttactgaaacttacgtagaagctcgatgtagtttaagaattga

SEQ ID NO: 96399 - DNA, 413 bp, Glycine max
  unsure (1)..(413): unsure at all n locations
ngaagagagttcttccacgccagcacgcacttagcgcgtatgcatcttgctaagcgaggcgattgtctcttctgcgctaagcacaagattgacgctaagccaaatattacttacctgtgctaagcacgagaatggtgctaagcgcgccttcaaggtcagaaagccctttttaagcctgatttgcacagaaaaaaagaaagagggtgacaacgtgaaaaaggtcagaattgactacgaattatgtgcagagaacagaggaaaagttgagcaaggaagcaaaggccttaacttttaggtagattctaggttttaaagttattttctaggttcttagaggtggaggagacatccccactgctttgtaacctgatattttctctgaaacccttctcctatttgtgaaagctaccccc

SEQ ID NO: 96400 - DNA, 282 bp, Glycine max
ttacggtttaagtatctattattatagactagattttactgtactctaaaatccttgagcctatggtgtatttactaacatgtttgctagtgaacagtgaatttttactaatgtgacatctatgacatgaatggaatctattacatacaaaatgccaccctttgaaggattactggtcaaaacatagaacaaatttttgaacttgatctatatatgccctttgtcaaagcttatataatagaatatcgtggtaatgcgctctacgcggctctaatgatgtgg

SEQ ID NO: 96401 - DNA, 386 bp, Glycine max
  unsure (1)..(386): unsure at all n locations
tctagcacactccagacagtntttaatagatcccaacggttagatcatggagacgtgtcttatgaagttgaagaccaaatttcgagaagatccaacggttaacgaaggctgggaagcngtttcaccgaggtagcttcatgtagctttctctagaagcttcattaggaggcttcctccagaagcttcattaagaggcttctagaacactccagatatcttctcgaagatctcaacggtcagatcatagacaagtgtcttgtgaagtcgaagaccaaatttcgagaagatctaacggttaacgaaggctgggcagcattcttaccgaggcagctgcatgtagctttctctagaagcttcattaagaggctttcctccaaagctttctc

SEQ ID NO: 96402 - DNA, 141 bp, Glycine max
cctgctctagacaccggagaaatacgtctttttaatttctgcttctacattatctatggcctaaattgatttacaacagggcaccacacaaaacttaaattcaaagtaaaaatgtgctgacaattactgttaggtgaaact

SEQ ID NO: 96403 - DNA, 216 bp, Glycine max
  unsure (1)..(216): unsure at all n locations
tgtcgagtacgtgagagctntaacataagttgaatagtgattgctatattanagaagcttgttttgaccaagtttatanagcttactgaaagagcttataaaatataagaacgccatgatactntcatatgctaataattaaaaagagcttctacataaatatgtaccaaaaaataaaaccctctaaataaatggtgatcgatggttacctgaact

SEQ ID NO: 96404 - DNA, 411 bp, Glycine max
  unsure (1)..(411): unsure at all n locations
ngttaattgtctgaatgaatctcttcatagtttcaccctttccccatatttatctaattgatcccctccaactaattactctagtacccaactaattntcccttcacttctatctaacacataacaaagctggttgttagagttattactagtagaagtgtttcatattcaaatactgaatttaggggttaaaaacttatacgtgtcaagttctttccatatgtagtgatgattccatacccatataggtgtgacaacaacaacaaatgttgcatttgagcatgttagtcaccgagactagggactttttagataccatatttttggaaccaaatatacttgtgtgttatattatctatcccttaaacatgtcaattgttagntataggacattctatatgtgatagaaaa

SEQ ID NO: 96405 - DNA, 300 bp, Glycine max
  unsure (1)..(300): unsure at all n locations
agcactgaggctgcagctgaggtaaccagacgcctggtacctgtaaccaactggcatgaatanaatctgacctgcgcaagactctatggttatgctctctgaaaccactatatagactttgccttctgtgcagaatcttgncaatngaacagcttaacttatgtgcaacatcacaataacctctcaacttacagcaaatcaccacagaaacaatatgactctcagcacaatacatcccgaggggaatanctaatctaatggctagcctaacaacacacagagctgctctcttcaaatgtg

SEQ ID NO: 96406 - DNA, 369 bp, Glycine max
  unsure (1)..(369): unsure at all n locations
tggtggagttcactgagaatcgtggaatgttcgggttgggttacgaggctgcacatgccgacaagaggaaggttgccctagaaaggaaggagagaagcctggcccatctacaagggcgaggactataagtggaaagggtccccatttgtcacatcagtgaaagctntatcagtgcaggatgggtgcatgaggattatgttgcagtgatagatgaagaaacccctcaagaccgaccaaattgggtgcagccatgttgttgcaacctacccttcagagggagggcgacgcgaggctcatgggtgtgtcttctaagggaggaaaatgcacagagtcaccaccaatgtttatttgaggaaaacattataaaaa

SEQ ID NO: 96407 - DNA, 376 bp, Glycine max
  unsure (1)..(376): unsure at all n locations
tgaccaatcccgacccagcccgggcatagtcggtcagtgagaacctgngatgtacctaaacaggcgagttcctggcagtcaacagataaaaggaacaaagaccacaaagcaaggaggcttgtggtggctggccaactgtgaaatttgtgtgatatatgggttgtggcctctggtaatcgattaccaagggtgggtaatcgattacaaggcttaaaaatgaagacaggaggctaagatggtctctggtaatcgattaccacggngtgtaatcgattaccaggcttgaaaatgaggtcaggaagccatgagggcttctggtaatcgattaccaagggggtgtaatcgattaccangcttataaaggggactggaacat

SEQ ID NO: 96408 - DNA, 426 bp, Glycine max
gtgctcgagtcattcatccctatgagatgttgttgtagtattggcgatcagaattgccattccttgtattatagggttgaaccaagctcatgcttttacaaaaaggttcatcaagtcaagttgaaatatggaagtaaccgtcttgcaaaattggggcaaaagatgaatcgagtcacatcactgcttcatctactgccaaacatatttaggattattgatgtccttgttacttccagttttaccttgacaaagatgtcatggaccatgttgaaaatctaaattgattcaaccccatatcttgcgttaaaattcgcaatacttcaattgttcataattcgcatgcatccatgcttttaattggttgcattgtttcgtgcattctttcccttaaaaatatataatgatgaacttattatttattaaaaa

SEQ ID NO: 96409 - DNA, 170 bp, Glycine max
gatgcaacatatggagaggttaatgacataacaagatgatgcgctccatgagaggttggatcaaatggagaatagagatcataatgaagaagaaaggatgagaagagggaatgatcgtgttcctagacaaaaccgaattgatggtattaaactcaacattccttcattta

SEQ ID NO: 96410 - DNA, 426 bp, Glycine max
acaacaatactcactaactgtaatgttaccgacaaatattgctgagaatacctcatcactacaatgtggatacaaatgcgatccacaattggctcaatacttctcattcgatgacaatggccctggtgcatctgatggtttctgagcatcttgtgaaagcccgatcttgaccatcaatgtggaactaatcatgaaacatatgaacatctgagaaatgttgctgaatgtagccataattcgatgatgatcaaaggtcctattgttggtaatgactaataagcattgatggctttgaaatgggtggtatgaagctatatccatagttcaaaagtcgatttaacgtctaaatgtgaaccgcccggtcttaattgagtttaatgaagaaataaagacggtagttaattaatttatgttttcaaactaaaa

SEQ ID NO: 96411 - DNA, 381 bp, Glycine max
taccctgatgaggatgtcccatatgtgcttataactggactgattcattttcttccaaagtttcatggccttgcaggtgaagacccgcacaaacatttgaaagaatttcacattgtctgctccaccatgaaacccccagatgtccaagaggatcacatatttctgaaggcttttcctcattcattaaagggagtggcaaaggactggctgtattaccttgctccaaggtccatcacgagctgggatgaccttaatagagtattcttagaaaaaaattttcctgctttcaggaccacaaccatcaggaaggatatttctgtgttagacaacttactggagagagcctgtttgagtactgggagagattttaaaaactatgtg

SEQ ID NO: 96412 - DNA, 78 bp, Glycine max
  unsure (1)..(78): unsure at all n locations
gcaccgagctgcacttaccatgactacctgataatcttgttctctttatctttgtcnctttcttgtttgagctcattc

SEQ ID NO: 96413 - DNA, 332 bp, Glycine max
  unsure (1)..(332): unsure at all n locations
ctgagatngagtagtatagaaattgtgaaacttcctgcctttatttcgttgaccacatagtggtacactggagatatgtcgcgggggtcaggagaccatggggacgtcacgtggggtgctattgcccaaaaccaagcttgaccaatcccgacccaacctcggcatagtcggtcagtgagaacctgtgatgtacctaagcaggcgagctcctggcagtcaacagataaaaggaacatagaccccaaagcaaagaggcttgtgttgtggctggccaactgtgaatcttgtgtgatatatggattgtggcctctggttatccaattccaacggtg

SEQ ID NO: 96414 - DNA, 226 bp, Glycine max
taattgcgctcactcgttaacttacttaagcctccgaaatttgtaggtagcctcatcaccacctgtattcaataaaggtgacttctcattttcttaagtctcttagagacccggaatacatatgctcgcctgtgtagatggttgtccaatttcggtctaaatcctggatgaagattaccttttaaatctgaacctagattgaaggtcatagttcaccctttcctac

SEQ ID NO: 96415 - DNA, 442 bp, Glycine max
  unsure (1)..(442): unsure at all n locations
gctattcgtgacactatgaatctcagcttatcctaaagaagaagattctgttctgttgaagaatactaagaagatccctnttaccaaaacgaagatgattgttttggtattctgttagattaaatntaatttcggtcacaaaaccgtctgtttgtaactaatgtgtaattaatgctggacaatactacctgttctgtagtcattaaagtcccggtcaaaactacttgtcttgtacatacagtcaaatagttccggtcaaaactaccggcaactaccggtcttagatatttggctatataaagagtccttcagcatgttgtgaggcaccctttcatctagtcaattttctggtttctgaagataggggnnnntgagacatgatttttgttgcgctccttcctagattcaataatttctgtgttcattcttctctcttcttcct

SEQ ID NO: 96416 - DNA, 316 bp, Glycine max
  unsure (1)..(316): unsure at all n locations
tgtgtgatggctgtatcggattatntcgtaccatccgacttgtacactgatgcatgagatatcactaccgaagcactactgacgcaacaatgacgagccatagtcatcttcactacaccgataccacaaaaatgcgatgtgcatgctattacatacgagacatcgccgtcattagattcttactaatcataagactctataggatctaatgcttcaagttatgcatatgatggaacaacagacacatcgtgcccaactactcgcttattagcctaacctaacttcttacagctactatccgatcgctgatcttttg

SEQ ID NO: 96417 - DNA, 321 bp, Glycine max
  unsure (1)..(321): unsure at all n locations
ggtaggattatggcgtacccatcacatgtggtactaggttgttgtcgggcgatggtgcacaacaagtngtgcacatccacaaagcgcgcatgaacccaccatcccctgttgcccacctccaactgagctcacgtactcccacgtagcccatatactcctttctcttaacacacggtccccatgaattctcccaagctgttccaacatcaaagtaaaacgacattcaaacagcacaagctatcacagccaagctatacagagcaaatgcagaagactctggctatacaccaaccaaatcacagctgtttttacttaaagact

SEQ ID NO: 96418 - DNA, 111 bp, Glycine max
ggctcgctgtctgtcgacttttttgcccatcttcgtaaaacttttcttggtgtacagttattcttaatgacttctttaaactctacaatcgcttttgacttttgtaaacac

SEQ ID NO: 96419 - DNA, 348 bp, Glycine max
  unsure (1)..(348): unsure at all n locations
tctgtgttagacctcgatcgatcatctntcctggccgaagtctactgtcanntttttcgatccatttcggtgaataatatatttttgccgagatgggcaaatgttttcctagccgaataaatgggaaaatgccagtttctgccgaaacaaaacgtcgattgagctcgcacaaaataacctagccgacctacattgtaaatntgttatgcaacaccaaaacaagaaaacttcctgcgccgtaaaataacattatctgccaacgagggcttttaaataaaaattgtgctaaggccgttgagaaattttagtcgcggctatttcacgaccgaatgttgctattgagtattt

SEQ ID NO: 96420 - DNA, 246 bp, Glycine max
cccacgacatgaatatgcactgagtctacaccagacgttattcgatgaaaacatcagaaaaccggataagacgcgatctacaaacgatttattgaaatgataaggagttgtatctacgcgcggggaatgtattaacacctgaaacgtgcgtaacaacggacggcaatctataatctaatgttcaaacatgactacgattttaatgtggcgctattaagggataatatcccttatactccttttata

SEQ ID NO: 96421 - DNA, 372 bp, Glycine max
  unsure (1)..(372): unsure at all n locations
aagctctcgagaaattcanatggtcttaacttgtcacacggaagtccgattctgacgcataatataccgagacgctcgaaattgaacaacggaatctgtcgagaaattcaaatggtcataacttttcaaacggaagtctgattcacgtgcataatatatcgagacgcttgaaattgaacaacggaagctctcgagaaattcaaatggtcataacttatcacacggaagtccgattcaggtgcataatatatcgagacgctcgaaattgaacaccgaatgctctcgagaaattaaaatggtcataacctgtcacacggaagtccaaatcaggtgcataatatatcgagaagcttgaaattgaacaaccgaagc

SEQ ID NO: 96422 - DNA, 439 bp, Glycine max
gcctctataatgttgcattctactaatatatggagttggtcactgcttcgcctaaggatgacaattgctagaccataacaatgctactggcggtaaaggacaacagtcttttaaataaatttgtcgtacatgcaaaaaaaaatattaactcaatcgtacacaattgatttcataaatataaaaaaaaacttgatatctacaatacacttgaaaaaaatgattgacatagatgtgaccgatacaaattatgtgatgcaccgaagaatctctcggtctcatgtcggttatatccatccacttatccatagtgacctgaatgaaacaaatatagacgttaaagttaattttaaagttaagttttataaatcaaaaacataaattaaataccttgattaacccatcaacatgtaatgacatccttaaatccttaaatctgtct

SEQ ID NO: 96423 - DNA, 462 bp, Glycine max
  unsure (1)..(462): unsure at all n locations
atgtcttcatgctntngtatctaaaagtnggattgacaataatgaatntattggagcgtcactcatagagttgtatgcaaaatgtagtagcatagataatgctaacaaggttttcaaaggaatgagacgtaaagatgttgttacctggagctcaataattgcagcttacggattccatgggcaaggagaagaggctttgaaattattttatcagatgtctaatcattcagatgttaagcctaacgatgtaacctttgtctcaattctatctgcctgtagtcatgcaggtttgattgaagaagggataaagatgtttcatgtcatggtgaatgaataccaattgatgcccaatacagagcattacgggataatggttgatcttcttggtcgaatgggagagttggataaggccttggacatgattaatgagatgcccatgcaagctgggcctcatgtatgggg

SEQ ID NO: 96424 - DNA, 256 bp, Glycine max
ggtgtttacttgtagcatcgtgtacagctcgtagccacatcatgtagtgcagagattgaaaatacttccgtccttaccacgttatccataccacgttttctcgtacagaagcccctagcgaatctatgcctaggcaaaggtacccactacagcatttccctaaaattggggagtggcaactagttctgtagatctaaaaagcagtcaattaagattcggaatcaacaattaaaacttgaactaaatggggtgaaca

SEQ ID NO: 96425 - DNA, 410 bp, Glycine max
  unsure (1)..(410): unsure at all n locations
ggacccgttgctganaggaacgaggataagggctacgtangagtgcgtgagctcaatttataggtgggcaactggggatggtgtgcttatgcctgacttgtggaaatgggagagttgatttgcaccatcgcccgatcgccacctagtaccacatatgacgggtgccccataatccaataagcttgatgtgagaaagcgtgggtcttcctacttttgtttgttgaccacagagtggtacctggagatatgtcgcaggggtcaggagaccttggggacgtcaggtggggtgctactgcccaaaagcaagcttggccaatcccgacccaacccaggcatagtcagtcagtgagaacctgtgacgtacctaagcaggcgagctcctgtgagtcaaccaataaaagaacaaagtc

SEQ ID NO: 96426 - DNA, 402 bp, Glycine max
  unsure (1)..(402): unsure at all n locations
ntaagtgcgaggattaattatattgagcgaagaagagaggtcatatcatctaattcttctcatggagaagtgaggggtctgaagagaatgatggacgaaggaggaatgagacgtatagagagagaagaaatcatcacagatatagaggtacgccacgagaggaagggattgagggactgaatgtgaagatccctacttttaaagggacttgtgatccataagtgtatcttgagtggaagatgaaggttgagcaagtcttttcttggagtttgagggatatgccttagtgtggtggaaccaagtgaggagtgatgttgagatgatgagaagacctttgattaatacttggcaagacatgaagaatgttttgagagagagatttatgtcgtcctattatgggag

SEQ ID NO: 96427 - DNA, 328 bp, Glycine max
  unsure (1)..(328): unsure at all n locations
tcagcttcttagtttccggtttttcaaccttgaagacaaaagtgtgttattcatctttttctttctcttctccctttgccaaaaagaattcgccaagaactaaccgtctgaattctttttgtgtctctcttctcccttntcctaaagaacaaaggactaaccgcctaaattcttttgtgtttcccttctcccttttcaaagaattcaaaacaacacagtctgagaattcttttgattcttccatttccctaanacaaaagatttcaaaggactaaccgcctgagaattcttttgttttctcatcacaaagtttcaaaggacttaccgg

SEQ ID NO: 96428 - DNA, 415 bp, Glycine max
  unsure (1)..(415): unsure at all n locations
ntntacaagaatgaagtattgtttcattatttacccttactaaaatacaataagtatctatttgttcttatttaagtgatgtctaatgctcttagactttattttttttacatcaccgaaaataagttaatgattactaacaagggtaaaattggtatattaataaaaaaattaaagccccatcaaaccaactagtttagaaatttttattaattggtccatgtaattttgttacaaatgtcttatcctaatatattaaaaaaaaggaaaagtaacaattaaaaaaaaagtaatcgaaagagcctttattttgggaagaaaaagagtgcgccaaaactttcttactttatatttcatccatttcatattatatgaagtataaggtttagacacatgtgtatttaacaagaagaat

SEQ ID NO: 96429 - DNA, 241 bp, Glycine max
gcactgtgcgaaaaagagccagctgtgtcgctgattttgatggtgacgtcatggcctatttatggggaactactcgatcttgtgagggtgttagcttggaatattcaacttaatatacttgtgcgtgagatatgtagaatatatgtattagagataaagcaaaaatattgacctgtaatatgtgtgcctgtaatattacttctgcataataagaatcaatttataggtaaatacctgctga

SEQ ID NO: 96430 - DNA, 397 bp, Glycine max
  unsure (1)..(397): unsure at all n locations
ctacggttagttaccgcaaagatcaagtgtctgaaaaatttanattgatatccttctttgatanatgagaaagttgcgcaaatgaagagaatgagaaagagggaggaacctatgttgtgactgccattcctacatggccaaatctcccaccagctccacaatatcaatactccgccaatatcatcccctctcattacccaccactcaatcaaccacaaaggtcatccctaaatcagccacaaagctcgcctgccacacatccaataccaaacacaaaccanaacaccaaccagggaaggaattttctagcgaagaaacctgtagaattcaccccaatttcggtgtcctatgctaactttgctccatatctgctcgataatcaatggagccataaccc

SEQ ID NO: 96431 - DNA, 372 bp, Glycine max
  unsure (1)..(372): unsure at all n locations
gtcagaacccaaggcanacatgttctcggtccaaggcttatttaacccaacattcacccttggtgagcccttcttttgctaagttccatctctacaggaactcaaggtacgcaaggtctacccttgacaatcttttttattcttaacttttatcagtgtaggaatacaagaacaacaaaaacccaaggtccacccttgctacacactcttacaaaacccaaggcacccccttggttcgctcacttgcagcaactacgacgactatagtctaaggtccaggcttcacaagtcaatgatgacctacccccagactaattggcgagacctccaaccaggggcaagccaaacatatttcttataaccattagtgga

SEQ ID NO: 96432 - DNA, 389 bp, Glycine max
  unsure (1)..(389): unsure at all n locations
tcggaggaccaagctgagactatctgtcatattctgagtttantttgtaaaagctcgaaacaaagattcaagataaaaaccagcatttatttctccaaaaatntgggtggcagaggagacaatngagccagcggctgggcttcagtttcacagatgatcttgggaagtaccgctcggtatcctcattccgcataacaaagtctctaccagcacgtttcagtgtattatttcgaaagtggatcagaggctctctgcctagaaatctcgccaactttcctctgcggngagaatcactctagccaaatcgattatccaggccctgccaaattatgcaatgcaatctggtgtcctttctaaatcggtgtgcaaagaaatggacaaaaagtgca

SEQ ID NO: 96433 - DNA, 430 bp, Glycine max
  unsure (1)..(430): unsure at all n locations
agtccccatcgctgctacgaatcacaactccacacgatgcaatattatntaccatagaatatgctccatcacagttgatttttgcaaagccctcccaagctctcctccgttctcatgtattatcagcattgctagcatttgcagggttcatcacagtatacatccgatccgcttcctttgattaatgtccatgaccaaagcttttacactcaataatactccaacctcattcgtccatttatttctaaaaacaaaatcatttctcctccaccaaattctgtccaaggttgcaccaaacacaatgttccatctaacatcctccacaagttccttgcgttggatgttagaattcctcagattgtgccaaatattcctgacccacctgcaatcccttagtgcatgtaaaaagctttcttcctctccctacaca

SEQ ID NO: 96434 - DNA, 452 bp, Glycine max
  unsure (1)..(452): unsure at all n locations
atataattataaattagtcaaagctaaatcatattccatcaccaacaaagtctgcaagcaagctaataaanaatggaaacaacataactgtagataactaattaaatttaatctcaagaagatgcggtcacgaatcaagatataaacaagtaaaatatttcattggaaaaatcacaagtattcacacgtaggactctctttgtatggcacctgtcttaatttcttaactatactctcgaaattgaaataagcattttgtagctgtaaattacggaaaacttgtgcataccttctattattgtttttgtcagcttcagtgactcgtggtgttggggcatagtcaatctgataaccaactttgcccttagaagtgatatgactttcatgagaatgtatggaaagaagaaattattgaaaatgaaaaattaaattaaggcgattgaatcttactt

SEQ ID NO: 96435 - DNA, 363 bp, Glycine max
  unsure (1)..(363): unsure at all n locations
tggatgagttaaacatacccattctgttttanggnntttgggatgatagttgtgatgtttatatgctgaaattgctgatggaaatctgttagagatgaagggtagaactaacctatggttataaagtgagagtgtgatgttatgagtggaaaaagagtgaggctttgagggttggaaggctaagtctgaattctgtggtaaatggagggtaaagtgagttaatactagcttgaaatgtcatttatgacttatgagaaagcttggactgtgctagagagaaaaataaatgaccaaagtgaacaaagagccatttctagggcaaatttgggtgttgaagagtcaaattttgattcggtgagattt

SEQ ID NO: 96436 - DNA, 465 bp, Glycine max
  unsure (1)..(465): unsure at all n locations
gcagtgcagcttatcaatctttatgtgataagctggccttggattaaggatccttaagttctatgctaatccttttctagaagtctccagccagctcataccagatgattgaccatgctaaattatttaacacaacaatcctgttttcattgtatttttgtagttttaagtaattttattagatgatcatggaaatattatgtatgctattttacaattacaattgcatttgtaccatttattatctcagctgattcatttcagaatctcgtattggtgttcaaataataaattgtaagagttgcctttttgcaacatttgagtacgagtgttcgtaaactaaacaagtccaatttaaattgcaaaaatcgaattgaaaaagtttataaaagaanaatacaaaatctaacagggtaagactaaagagggctcgtactcttgttagctagagttttatgaatatta

SEQ ID NO: 96437 - DNA, 452 bp, Glycine max
  unsure (1)..(452): unsure at all n locations
tccaatccanagaaggacccctctntagctggagatccggtctaacaaaatccatataccttttagtttccacaaacctgtgcaagtaaaagtgatgaagtcatacgtacaggccactgaattctcgaggataatgaaattatgaaagccccagttcaagacaaaagttctaccccatcagaactagttgaacaaggaagagtgtctttgtattggcaaagtcgtattttaccgcaccagcttcaaaccaaaccggtatcttactaattcctgtgacgcgaagtagctgcatagattttaccaagaagttcaggcaaggacttcaatagtaaaaaaaaaaaaaaaagcagcttaacttatgaagcttgattactgttatcaatggtggaaagccaaaattccaccatataaacatgttatggcgatggtagcacccccatttaacaatggtc

SEQ ID NO: 96438 - DNA, 413 bp, Glycine max
  unsure (1)..(413): unsure at all n locations
ggcagttgcagttctgttggaattcgacggaaggaaggatctatcaacccttgataatgttcggatntgatgacatgatcaatatgcattttcaaaatcgaatgaagaaaacaaactatntctcttactcattatagncttattctaaactgagctcgtggctcattctcataattttaatgcatttttcagtagacattttaaattaccaatagtaagttaagattaattgttaatcaagtccacttccacttcaatatagggctcttacgcacagngggggattcgttccctatctcactcggtcatcacttcgtgtctctataatttttttttttaaaaaaaatgaaaaagaaagaaaagaataggtgcagattatacacaaaatgggaaggagttngtaattatttaca

SEQ ID NO: 96439 - DNA, 502 bp, Glycine max
  unsure (1)..(502): unsure at all n locations
ctgacattcaccacagattctgtcttcttctnatttcagataggggatgcctctaacangcaccttgtcaatgattntcttcatgcctcttaagtgcagatgtacaaatctttgatgccatattctgacttcatcttctttggaggatagacatgtggaggaagtagctggttcttggagtgtcataagaacaattgcctttgactgctgccttattagaacttactcttctattagcaccaacattctgatctggaagttacattgaatctcatcacacactgactgtgctgataagttgcagcagtccttaccacagtactttgtcgacatgaagacatatgaatacgttcccttcagagatttctttaagccttcaatgcacaactatgagcggctatgtcacagaatcttactctgcatggctgacagcgttctagccacttctactgagttaggagatacacaactacgctggtggaccatattcttctggtcttat

SEQ ID NO: 96440 - DNA, 423 bp, Glycine max
  unsure (1)..(423): unsure at all n locations
tcctattcacttcttccaatgaatcagctacaaggaactttctcagttcttccacggcagcccgagccttacccacatgagcaatcatgtcatgacttggttgcttgagggctataaccttcatggttgcatcaaacaagctttggatatcattggcaaagatttcctgcgctttcttccaaaaagagcgacacgatttanatgatcggaggatctccaagatatccggctcaactgattaccataacacgacacatagttgatagtcaagcttctcccattcaggtcttttatcaactgaaacagaatccgaggttttctccaagtggtcatggtgtccttgaccaaggaaccacaactccacggaagcagaccacgaaggatatgttttccagttcaagcttgcagtggtgatagttggag

SEQ ID NO: 96441 - DNA, 127 bp, Glycine max
acatactttctcttgttttggtccgagaatcagattgaatgaaacgaactgacaatcaacaaaaactttactaagtcgattgtccgagtatcatacctcgatgaacaaactgacaatcaacacacac

SEQ ID NO: 96442 - DNA, 389 bp, Glycine max
  unsure (1)..(389): unsure at all n locations
atacaagcggggtagatatatactagacacaatcggacatttgagtaaaaagtttggttgtttgaattggtacgagcattcgtttcatttaccagcgtcttgatatacttcgggacacaatcggcattcgaagtaaaagtattgtcgttggaatttgctcagagcatcttttttcaatttcgagggcctcaatatattacgggactcaattcgacatccgagatataagtcattgtcttctgaatttactcagagcttctgttntcaatgtcgagcatctcgatatattagaacactcaatccgacatctatgctaaaagttattgccgtttgaaattgctacgagcttctattttacatacgagccgctcgatatactacgggacaca

SEQ ID NO: 96443 - DNA, 367 bp, Glycine max
cgtacggaagaagtgaactttttactggtgtacacaacttttataatttaagtgaagggcattttcgctcattcacttaaaatgttgggtgcacttatgttagtcgatggaaacgactaacttttgtgtctacaacttgtgtaaattgtatcaaactttcccaatttatggttgttttgtagtattacaagtacttcttgttaagtattgactatagatacttaatgcatctgttttgtatgtttaataatcaaattctctcaatttcatgttaattaggcaatttggcaaagctcgaacagcatccactaagcgcaacactcctatgctaagcgcgaggaagactctggaagaagatgagttgtat

SEQ ID NO: 96444 - DNA, 168 bp, Glycine max
ggatcttaagcacctgggctgcagcttcctcttgacaataccgtaccaataaaccatctaacctttgccatacttataatagaagaatgtcattgaaggtatcctattcgcaggacgcttatgattccaccaatggtgtcaccagtccgataataagacttagttaat

SEQ ID NO: 96445 - DNA, 420 bp, Glycine max
  unsure (1)..(420): unsure at all n locations
ntataatgagtaattgtgccaatgcaccctgaatatacatcttatcatccctctcacacctctaattatttccaccgcacaaaatctgcactataaagtccatcaccttctcttgtattcaccaaatagactattagacccagaggtccaagactgaccctaatcacactttataattatttttttttcgtgttggcatatttcctttntctaaactatttgttctctttttgtttgtggtagatccatgagccagaaaacaaaatcacattcatgggccttctttgcagatctacttgngtggaattcattgatcgtgtcttatatttctttgccctctcttttatgctttgtcttaccctttgcgggaaccatggccaatanacatcttcaacgaccatgatttcattgataattaaa

SEQ ID NO: 96446 - DNA, 347 bp, Glycine max
  unsure (1)..(347): unsure at all n locations
actcagctgaaatgaacaacagaactgcgagaattanatggttattatctacgacacagcaagccgattcaggcgcattatatatcgagacactcgaaaatgaacatcgacagctctcgagaaattgcaagtggacataactattcatacggacagtacgattaccggtgcgtaatatctctaagacgcttgaaaactgaacaacagtaagctctcgagaaaataaacggtcataacttatcacacgtgagtccgattcaggcgcattatgtatcgagacgctcgaaattgtacatcggacgctctccatagaaagcaacggtgattgatttgcatactgacctccg

SEQ ID NO: 96447 - DNA, 415 bp, Glycine max
  unsure (1)..(415): unsure at all n locations
atataactagaanattctgaagtacaagattaatctangtcgacttagaaatatgattcaatttggttcctacattcattcacttataaacagcaaggagggaattacatcaaacagtttgtaggcgactgtaaaggaatgcaaaaatacagaaatagagatgaataaacaaaatagaacaaaaacaaaacacaaatcaagtttaatagaatcaatccaattcaccaaaaggatgcaaatcaaattatcacagttactataaatgttgtttagtgtgaaagttcattcaaatgcattagagatagttcaatcgaatcaattcctaaattgtttgagatcgcaaattaggttcgaaaatcatccaaaaaatttgtgaattaaatttgaaattaggaaatgaattcataacctaata

SEQ ID NO: 96448 - DNA, 153 bp, Glycine max
cgctgttcggcgtgcacatatttttgtcatgtcggataatttttaccaatggtatgttctgcgataatggactgctttcgccaacaaagcgtgactcccaaaactaccactcttgaatttttgacacaacaaaattcttcagaaaaacttttg

SEQ ID NO: 96449 - DNA, 400 bp, Glycine max
tcaccggatgacgccgatcgaacatttcctaaccgacgtttgcaaatttcgttcagggattgaattgaaaactcgttaggcgacatctgtcgtgaagtagcgaccgatatttttcagccgacattgcacaattctttttagaaaagctcgctggtcgataatggtctttttacggcagagtaagttttcttgttttggtgttgcataaaaaagttacaatgtacttcggctaggtttttcgtgcgagttcaaccgacattttgtttcggccaggaaaacattatcccacctctgcaaaaaaaatatttgctaaccgtcttcatgcatatttcattcaacgattgaatagaaaactcaatagccgacaacggtcgtgaaatagtcccgactgatatttttc

SEQ ID NO: 96450 - DNA, 332 bp, Glycine max
  unsure (1)..(332): unsure at all n locations
ctctcactctagactacatactacaaatcattaacttcagacgttcttcacttggcttgaatctaccacaaacttaactttgactgccttttttaactttaacgaactaaaaacactttcaacttcactatagggtgtgcttcctccattaacgtaccctggatcgtaccctttctcagtgccttgtaaacaacaatatcttttaaatntcttggcttcagaatgtcctaggaggtctacccaatcttaccaggtaaacacctcaacttgctatacggatgagaatgtttacccaatgagctagttatctttacaagatcacctcaactatg

SEQ ID NO: 96451 - DNA, 441 bp, Glycine max
  unsure (1)..(441): unsure at all n locations
tctntaaatctagaacagagttgttgttcattatgcacacttatatcccataaattgtcgntgataaatttgaaatgaataatcacatctaaaacattctcacanccattattgtccagttgaaaatgcaaattacgcccctcaataggcctatgataaaagctggagtttatacctgcagatggcttgctacgttttctcttgtaagtccttcgccattcatcaagtcgagtattctcttggggaaagcctttgcaataacagttgaaacctcatgttaggagctacaaaatccacattaaggtgtcaaataaacatactttaatgtttcatgttctcaagtcaagcaaaattagaaaaaagtaaatattctttatcacaaactcactgtcgattcccagatcattaacaacaacaagaaatttcctatgcaactcgaca

SEQ ID NO: 96452 - DNA, 352 bp, Glycine max
  unsure (1)..(352): unsure at all n locations
atgtgaaatgccctttaacactatatccactcaaattctcatatgnnggaaagtcattaatgatacacaataccattgcatggaacttgacagtttgtgcttgacccattaacacatcaaccccgtcttcccacaactttcttaaatcttcaattaagggacttaaataaacttgatgtcatttcctaattgtcttaaacctgaaatcaccatagacaacataacgtattctcactttatgcataaccaaagatgaaggttgtaaatcattagcaaaacatgcaatgaattctggttagtgcttaagttaccaataggattcattccatccgaagcaaatccaagcctaagg

SEQ ID NO: 96453 - DNA, 445 bp, Glycine max
acactaacccgctttacatgacatactgtcgaactccagctcgtaaacccttgtccgcccttggtgaatctcacaagttggttctccaaatgcaaaacctaaggtacacccttggagagtcctatagggtcacatattacatctccagtatgtgccgctccacgagtgagacatatgcaagagcacgacattacgtctctaggacgtaccattccatgagtgacatgtatgtaagagctcaacattaagtctccaagatgtgccactccatgagtgacacatatgcaagagcacaacattacgtctccagtatgtgccactccacgagtgacacgtatgcaagaacacgacattacgtctctagtacgtgccacttcacaagtgcacatattgcagagcatgactttacgttttagtacataccactccacgagtgacacgtatg

SEQ ID NO: 96454 - DNA, 291 bp, Glycine max
tgcacgctccatatacagcgtgatgcactatcatacgactgtattatacgagttgatagcccaatattgatgtatgaattgtgccaacagttccacatgtactgtgtgtggacacattttatgaaacaagctaatgaaactattcgatttaaagcggtcaattatcacagtgaagttctaactttattttcaatgcatatctatggggatcaaccgaggaagtccatttcacatgcgtgtacaaaaagcgtgagtgaatgtaaacctgctaatatccgccttccatttcta

SEQ ID NO: 96455 - DNA, 74 bp, Glycine max
tagggttctcgctctctgttttacgcacccacgcccctattctctctgtctctcttgatggatcatggatttgg

SEQ ID NO: 96456 - DNA, 190 bp, Glycine max
tttcttttcatgatgaattgattgattttgattgatctcatggagccgcggtggttttgatcaattgcgatacttggttaacttactcttgcttccgtcttctctgtttgtctatgacatcaacgatgactttaatcgcctcttcctgacggacgagaactttatttccgggatctaataccagtactta

SEQ ID NO: 96457 - DNA, 319 bp, Glycine max
  unsure (1)..(319): unsure at all n locations
tcgcgaccaggtggtcttcgtaatagaagagacatttggtgatagcctgtgcttggttggagagatcgtcataaatgattaaagtgtgacgttcacggtacataaaatattcagccagagctgctcctgtataaggggcgaggtattgtaatgtagctggagaatccgctgtttcagctactacaatagtgtattccattgctcctctntcttgaaggtattcaccacttgagccacagaagatgctttttgaccaatagctacataaacacatattacattttgtccctgttgattgagaatagtatctgtggctact

SEQ ID NO: 96458 - DNA, 340 bp, Glycine max
  unsure (1)..(340): unsure at all n locations
tgaccaattactattttcctatttgcatggtatgttttgaacaaaattaaatatgctatttgactatatgggttttatagataatttatttatgattgttgcttcatgattcttgcttcatggtttggttgntagtttctcaataaatgttgtatgggtctttagtgatatttgattatttcaaatttgttacgcactttggctttttgttgatgccaaagggggagagaaatgggattaaaatcaagaactcacatgagtaatcaatttaattttaagatatgcacaaattcaaaaacaaagggggagaatttatgtgagtgatcgactatgaaaaagt

SEQ ID NO: 96459 - DNA, 460 bp, Glycine max
  unsure (1)..(460): unsure at all n locations
gtgcttgcagtatataatgatgagggaaatacctcttattttcattcacaacatatgcaccaacacccactcggtgtgtgggcattgcaatagtatttgcggagtcnggaatccaatatactagcattaaatatnttggttccgcatggtgataccaaaaacctttctgcacagaaataacggttaaacaaaaatttagtgcataaggatataggttgaattttcatcaaccattaaataatcaaaccgcaaaagtgtcaccattattaaactgtaagcaaaaaagtcaccttaactagagcttcaactagactgactagatgaataggcgattttatccaaacacccatatttgcctaccagaaaacgtcgagtcaataactcaaataacaaagatagtgacatattctatattcccagtagtagtgaagataaaaaaatatgtcagaataataaatcc

SEQ ID NO: 96460 - DNA, 116 bp, Glycine max
taccccaaaaatttatttttcttttacaagctttttcaaactaggagtgtcatccgtttcaatacgattctaaagtatcaacagcctttttactaggatcataccgtgccctgtga

SEQ ID NO: 96461 - DNA, 202 bp, Glycine max
  unsure (1)..(202): unsure at all n locations
atttacatttacatgcgcgtaanaaaggtattacaaatattagtcataattatgttcacttacaataatttatgtataataatattatttattntataacttaatttatttattaaaatcaaataattaggaaaatacaacatttaaaaaaaaaaaactttcggaacaaccttctttcggaagaagaaggaagtattccgga

SEQ ID NO: 96462 - DNA, 445 bp, Glycine max
  unsure (1)..(445): unsure at all n locations
ctgtacaaaagagaccttgttgactcacatgatgagtgagaatgtaccttcgcttattngttatgttaaataaaaacttgttggttatttgaaaaaaaattgttgcaactaaaataaagtatgcatgtatgataaatcggtgtctgagttgacaatacattgggaaatgcaagcgtgttaacataaagcgtgacatggcactggaagacttgactacacattgggaaatgcaagtgtgttaacataaactgcgttaccatgtgattggtgtggttgacaacacaaacagaaaccatgtgcatgcgtatgtatttattctaaaaaattgaatcaatagtactaaaactcatctatatatatcacacagccgaacacgggtaaaaatcaaacattcattcctaactcaactcttttgacaaagtatgacatttttgggagaaacaag

SEQ ID NO: 96463 - DNA, 473 bp, Glycine max
  unsure (1)..(473): unsure at all n locations
ctattacgtgaccttagatactaagcttcaataacgaagtgcttcatgatgtgaatacaagttattagagcattcttttatgaaattacacgacacaagaaataccttcattattatgaattaacggtacaaaagagtcttcaagtcaagtgcacatgcagtgcatacaataatcaaaatcaagccaagcacaaaacatgcaaaaagtgcacaagcatatacaatgagaaacaagaacattaaaaaacccaaaaacagcctgtaccgcgaacaggtgttctcgctctcccaacctcaaaacaactattcaagcaggcaattgattggtattggcggacgaacttgattgggctaagaatggctatgcggaacatgtttgagtgaaattggttggacttgcanagcctgctttgcctgagcataacacnaactgaatggtgtttgccttacttgaatcatatgggctgaaccat

SEQ ID NO: 96464 - DNA, 428 bp, Glycine max
  unsure (1)..(428): unsure at all n locations
gatatcanagtaatccaggaatgaaacattgtatagctgcaaagaaagttcttagatacttatagggaacaaaagatcacatgcttacatataggaggtctaatcaccttgaggtaatcgagtattcagactcatactttgctggatgtgtggatacaagaaaatccactcttggcttttgaattttcttagctggaggagcaatatcgtggaagagtgcaaaacaatcagttgttgctgcatctaccatgcaagctgaatttgtagcatgttttgaggctacaattcaggctaattggctgtggaactntatttcangatttggaattgtcgatagtattgtcaggcccgctaaaatgtattgtgataactccataatagtatttttctctaagaacgacaagactctaanggtgctagcatatgga

SEQ ID NO: 96465 - DNA, 422 bp, Glycine max
  unsure (1)..(422): unsure at all n locations
tcgactntggagccatgcgtagtgatggcttagttcaattcttcattctcaatcttcttaggagccccatgaattgcgttttcgttcatgtgtcctcgtccttcgagtttggagctttgcgtagtgattgcttagttcaattctccatcctcaaccctttttcaaagcccatgaattgcgttttcattcatgtgtcctccaccttcgagtttggagctatgcgtagtgattgcttagtgcaattctccattcttaacctatttcggagccccatgaatttcattttcgttcatgtgtcctccacctacgagtttggagctatgcgtagtgattgcttaatgcaatattccattctcaacctttttcggagccccatgaattgcggttccttcatgtgtcctccaccttcgagtttggagcta

SEQ ID NO: 96466 - DNA, 317 bp, Glycine max
atgaattgcgcattgcgtcatgagtcctacaccatgccactatgagcgatacggagcgataactaacgcaagtgctcgttctcacgccttttaagggccccaagaattgcgttactgatcatgacgcctccaccatctagtctagagctatgcgtattgattgcttagggcgaatcgcgagtctcaatactgttaggaccccaaggattgcgttctctttatgatgtctccaccttatagttaggagcaatgcgccctgaatgccttttgctacctatatatactcacaaatttgcgagcaaaaagaatagcggtat

SEQ ID NO: 96467 - DNA, 300 bp, Glycine max
  unsure (1)..(300): unsure at all n locations
ctctatgtgttttagaatagtcgattatcaaatgtggcaattgattatttcgaaacatggaaagctcctaaagttccatacaaaatctaatcgattaccatatgagataatcaattatttcaaggtacaatatcacaatcaatatgagaaatagtgtagaaaactcttaccaattcanggtagatgtgcccttcatcttcacaagcttcttcaagccatgatactcgaagagttcttgaaaaacaaaacccttagtctttagccattccaagtttagaaacatgaagtgaatcaactcct

SEQ ID NO: 96468 - DNA, 453 bp, Glycine max
  unsure (1)..(453): unsure at all n locations
aagcacgagctcagctgcgcacgagtttccacttgctctggtgtaacatctcttatgaaacagaagaaaccatggtgtcatgacgaataaaaacatagacgttgccgctatctaaggactgaatcagctcaaactacccaatgcacaaagggttgngagtatttcaaggaatggatgtctcatgatcaagcaatattgaaaagatangangtactaggctcgattcttatggttgactatgattcgcatatgtgactgagagttgtgaatgatattgttacaacattcaatgacacattaaaagaaggcaggtaagaagtacaattttcctttgttgaaacaagtaataatggctctctttgattccacttcataaactctaaacaaagaccttaagaaaattatgtcattcaagctgattcttatcctcaagctgttaaatgatatatattt

SEQ ID NO: 96469 - DNA, 393 bp, Glycine max
  unsure (1)..(393): unsure at all n locations
tganagtttcattgaggaggacaagggtgattgcacaatgttcatgcaagattgtggggtgcttaangggttgtgtgccacacaagacctgacatttcatataatgtgggaatggtgagtaggttcatgagtgatcctagaanatctcacttggttgtagccaaaaggatactgaggtatctacaaggcacttgccagtttggaattctattcccatatcaaaaagagaaggtttgtctacagcttgtagcctattcagactcagactggtgtggggacaaggtggataggaggagtacaatgggttatgtattctttctttctggggttccaatctgtggtgctcanagaagcanngacgtgatgctctttccacatgtgaagccgaatata

SEQ ID NO: 96470 - DNA, 424 bp, Glycine max
  unsure (1)..(424): unsure at all n locations
agtgactgtgtngaccacatatttatattgaatgtccttatggatatgtgctatgattggttttgcatgaatttctaattgtcataacatatgattcatggaaatgatccgggcattctttctttctatgacattggccaaacaactgtcccaatatacattattttttgccatgtgcaagccctttgaggcagacacttgatttttatcagaacactaacctaggatgaaagtttcctaccttaccttacgataagagaggaggagtgctttcaagggagatttctatcatttttatggcttagtcgtggatttgtaggaagttagatatttatcaacaaagaaaggaaaaaatagaacagaanagaatagaaaaatcacaatgggaaagagaaaaaaggaaactagaaagacaatgagttct

SEQ ID NO: 96471 - DNA, 52 bp, Glycine max
ttttgggaatttcccccctgaccaggaagaatagggtttttttttttttttt

SEQ ID NO: 96472 - DNA, 465 bp, Glycine max
  unsure (1)..(465): unsure at all n locations
ctaagcttacatggcanaactacttgtgatgcaatgttaatgattttctctttctaatgatctccattcacatttactattacactntatatttgatttcccgtatgaagagtctaatttatctatttttttttctccaaaatttctttccaaagataaaaataataaatggcattaagactagagatgcatgaaataggttaaacgaatatcaatctatttctagtaatgatttcatttagataccattttataatcctttagaaaataaatatttttaatgcattatttcttaaaatactatatggatggcagaccatgataaacaattaaacaagaaaataaccatagaaacaaaattgtattaaatagataacacgaaagagttacattacaagagttggcctattagcctctccanacaatggggttagcctctcattgtattgagagggcttacacttt

SEQ ID NO: 96473 - DNA, 376 bp, Glycine max
acgttcagaaactgctggtaatcgattaccatatatgtgtaatatatcacacagtgcacattatgaattcaaattttaataactgttgtaaatcagttatggccactggtaatcgattacatcctctggtaatcgattaccagagagtacatgtgtttgaaaaagactttttaacttaagattctgtggccaaaccttttgctgcttcaattggaattcccttcctatttaatataccctttctaagactctagagactgtcttgatcatccatcttgaatatctttaattcttttgtcttgaataaagctttgagacgcatgtgaagccttggcatcatcgaaacatttagcttgatcctatgtctacaactcct

SEQ ID NO: 96474 - DNA, 313 bp, Glycine max
tcttaatcccggctgttatgatgtatacaactttcgttagttgtatatagaagaacgagacatattaatctaactacatgtgtgacttttggatcttagtaagctaatatgttacgggaaacaaacttggactgtagggaagagatgcatctgttctgttatatgacacttagacctttactggagagaaaacatcttgagcaaatgtgaacactttgagaggttttgaagtaaacgatgacatcaaaactaaagaggaggctgcttgatccggagttgattcttttgcagatattatacctattgctggccg

SEQ ID NO: 96475 - DNA, 461 bp, Glycine max
  unsure (1)..(461): unsure at all n locations
acgagtggaacatgcgcttactggagcctggaagaccatgaaaccaaactgcattatctctaattccttcaccagattgcaacatgcagtaaagatgcagttagtttcgacattgaggcgctgtcaggttctttgggttgaaatcaatcacttcatttcaaacttgcaatattatataatgtttgaagtgttggaggtatcatggtcaaattttttggctgagatggaactagccaaggaccttgatgatctacttgctgctcatgaaaaatatctgcattctattgtagagaaatctctccttggagagctntcccagtctctttacaagtcactatttgtaattnttgatcttatattacgttttccgagctgtgcagatcggctgtatgaaggtattcatgagttgcaagctacggattgatcttactttctcgtttggatacctatccacccctaga

SEQ ID NO: 96476 - DNA, 108 bp, Glycine max
  unsure (1)..(108): unsure at all n locations
agagttacttgtttaagccttaattattttatgttatagntgggatataatgttcatgatgataagattctaaactgtctttctaatattttggtcttttatctattt

SEQ ID NO: 96477 - DNA, 434 bp, Glycine max
  unsure (1)..(434): unsure at all n locations
tactcagctttaattgattaatgtcccaataagctatttctttatctgtactcataantctacaccacataaacaattttttatgaatcgattgttggttcttactntttccatcctattaaacctatggttaaggggcataagacaaggggttaatcttacacttcatcctaatgtgcaaggggaacaaagagaatcattcccaactagatacaatggcttttgatggtcaaaggaatacccaaaccgcaacattatgcaaagaatattgcaacttcacaactttgacatgttctaacattatattagtcaaatattctatggatgttaaatattatgtagaggactaccaaagggtttaatctgattcggtccaagtcactatcttgtttaatttgatacaatatatttttttagataggatcaacatactc

SEQ ID NO: 96478 - DNA, 214 bp, Glycine max
ctccgtctcttaacaccatgtatccgacgtttggtgatgctgttcctggcggtgctctcggtgatatgaccattgcttaactcggagttttattgaaagattgaattcgcatccgacgtctgttgcaaaaacaaaggtttgtacttaatagaatcaacacgcggcatgaatacattggatcacatgaccctacaagcttgactgagcactgatg

SEQ ID NO: 96479 - DNA, 403 bp, Glycine max
cttgatggtgtcgagaagaaatcacatgtttgtcatcatcataatggggagaatgtgaatgtatgtatacatgaatttgatgatgtcaaagaagaatctaacaaggctacttcaaatgataagcatttgcttcaagaataattcaagattgcttcaacaaacaaagccttgtttcaagattcactaaagaccaagccttgccttaaaacaaagtgctttcaagacatgcaaggctctggtaatcgattaccaagaagtgtaatcgattacccgaagacagggttgagaaatagctgttgaaaaaggttttgaatttgaattttcaacatgtaatcgattaccatatgtctggtatcgaataccagcaaccaaactttggaaattaaattcaaaagtcataacc

SEQ ID NO: 96480 - DNA, 392 bp, Glycine max
  unsure (1)..(392): unsure at all n locations
ntatattctgcatgtcgtattcttaatagagtaccttatataaaaattaanaacaaaaaaaaaatctttatgagctatggagaaaaagagaatcaaatctgaaatatcttaaagtgtgggggtgtctagtaaaggttaatatccctattaataagaaaaggaaaattgaaaaaaaatactaattatantttgttggatattttttacataatactacttatggattcttagttattaattcagaagtatcttgaaattctaatggtactattatggagtctaaagatgtgactctctttgaaaatattntttcttgaaaataaattgtaaatcttgtatggtttgaacaagctccaaacatgacacaaagttgataagtattctttgatgat

SEQ ID NO: 96481 - DNA, 263 bp, Glycine max
catcgtacaggcaagacttgtataccttagggcattggttagagatctgttactgagatgatgtcaccatccatgagctatgtagtactaattcggaggaaatatctcattaactttactcatacgttctcgatcgtggagaaaagatagacatgcttgtggataaactgacaacctctcctacaggactcatcatcttatttatagttcacttagtggacataatttgaatctataaaatatacatgacatttcatttactc

SEQ ID NO: 96482 - DNA, 465 bp, Glycine max
  unsure (1)..(465): unsure at all n locations
cttcgaaactcaaaagtatgaatattaatatngaccaacttatacctctactatgacatcataaaanaaggtgtataatgtttatttataatcacgcaaagtgttacttataaaagaatatttaaaaaaacatactgtatattatatcccttaattaaaatgttagtaatacagttttgaatactttaaaaagtgaagaatacagcttaggaagcatcaaatacacatattaatgtgcatatgtatcaatatatgtaacgaatctgtttggttcagagaaaaattacgaatgaatgaataaggaatcgattctgcaagagtttatgcagacacgatatgtgaaggatttcctgcatgcgaataattaaactagaccanagtatnttttatttttttgacgaagaccaatgtattatttattcacaaataaacggtaatgcagccataataaaataaacacaaata

SEQ ID NO: 96483 - DNA, 418 bp, Glycine max
ttacgagcgtctcgatatattactgtacttaatcggacatccgagtaaaaagttattgtctttagaatttgctcataacctttgttttcaattttgagtgtctcgatatattacgcgactcaatcaaacatccaagtaaaaagttattgtcatttgaatatgctatgaccttcttttctcaatttcgagcgtctcgatatattacgggactctatcggacatccgagtatagagatattgtcgcttgaatttgctaagagcgattgtgttccacttttatcctttcatactattcacggactaccccggtgatacgaaactaatctgtagaggcttgtactagcatagaacttacattgtcaattccgagcgtgtggatatattacgggactcaatcggacatctgaattaaaagtta

SEQ ID NO: 96484 - DNA, 321 bp, Glycine max
  unsure (1)..(321): unsure at all n locations
caccaatcattcctcttctcctcctttcttcttcattatgatctctattctccatctgatccaacctctcatggagcgcatcatctcgttgtttcattaacctctccaaatgttgcatcaaagcttgcatttggaattgcgaaagccccactccatcattaggattagtacctgacatctcaaacaaacaaatcaaacgtaacaagacaattatagttggtgtttgaatacctcacccactcaagtgtatcacacanatatggcttttctctaatgaaacactcttgccttttaccactctaattccccttgagttcttag

SEQ ID NO: 96485 - DNA, 389 bp, Glycine max
  unsure (1)..(389): unsure at all n locations
acttaaggaattcgaaggaaagaagttggtctctgctaccaaggaaggcctaaaacaggaaaatgttcgaagatatccatcacaaaatcataaccaagaaaatataattaacaaattaaaaaattgacatcatcaaatttaaaccatggaatttataatgatcaaacagaanaatgtctttcttacacaacatcctttattttctctgaaagtgtatgtggcagatgccaaggctcactgaaagtattatgtcccataaagtacattctgtgaacatgactctangactcctcaactctgtttgtttcaacacctatgaaaaggaaagagtggtctatttgagaaccatgttgggtgggtgctgggccctgtaattcatcaaccccaac

SEQ ID NO: 96486 - DNA, 427 bp, Glycine max
  unsure (1)..(427): unsure at all n locations
gcttgcaagagatgccactgagtctcagttctgatgtctgctgaatctgggagcaagaggagcttgaatgaaacttgtgtcatatgtttggaggaaactgatgccagtcagattttttcagttgatggctgtcaacaccgctattgcttctcgtgcatgaaacaacatgtggaggtgaagttacttcatggaatggtgccaaagtgccctcacgaggggtgcaagtatgagcttctagtcaacagctgccagaagttcttgactcanaagttaactgagaccatgcagcaacgaaaattggaagcttcaattcctgttgctgaanaaatttattgcccttatcctagatgctctgcattaatgtcaaaaactaaggtnttagagtactcgagaaatatcatcgatcaatctgaacaatctggagtca

SEQ ID NO: 96487 - DNA, 368 bp, Glycine max
  unsure (1)..(368): unsure at all n locations
agatattttcatggattttggtctttaatttgatttacggattactactcgtaggtcttttatcaaaagaaaacctcctgctgtgcaccgccgacatctatgggtgggggggtatattggtgtgttgtgtgtgtgtgctgctgctggacagngnccattccaatatgggcgaataaaaagagaaggggaatccatattattatcgtccaagtttgacctttgcggagacgtggggaagctgtctatttcagagcggtagtatcggaagaggtgcaccggcgacaagttatgacttggggttgtgggcctgctcgacgtcngagtccccgacaacgacagctgtcccacacggttctgtcttatgtgct

SEQ ID NO: 96488 - DNA, 271 bp, Glycine max
  unsure (1)..(271): unsure at all n locations
agcttgtctaaacagagagtgaaccanaattttccattttgttcatggtcactggaacacaactttcattatgaacgatggttgatccacatggtccaagtttgatttgattttattccagtnnnncgccctctctctatttgtgagtcacatcagaaaattgcagatgggctccgatcagaatattgggtggtggacaagagcacacctattctataaagcgatgtaaacaaaacgctggcctagaggggtgatatngtgacgatctcca

SEQ ID NO: 96489 - DNA, 351 bp, Glycine max
  unsure (1)..(351): unsure at all n locations
ggggttgacataagatatcgcaaacaatttccccaattaaaattctatttcactttctatgcaagtttcaaattcccttaaaaaatgaactcttaaataatgattcacatagaacaatctgaatataaatattaagcaataataaataaaagagtttaagggaagagaaagtgcaaactccgatttatactggttcggccacacccttgtgcctacgtccaattcccaagcaacccgcttgagagttccactatcttgtaaaatccttttacaagntctgaacagacaaggacaaaccttcctttgtgttcaaatactttacaacagagccctctatctcttatccccttg

SEQ ID NO: 96490 - DNA, 405 bp, Glycine max
  unsure (1)..(405): unsure at all n locations
aacatatttaatagatgaggcatttgtattaaatgttttagactaggcatgtgtgtgatatagtctaagtctttttcatgcttagtgattgatcaaatatgaagtgaatgaagtattcttattctctaagtttcttaagaacttacttctacttgaaatttggttagaagcatcaaattaattgattgtctaacttggtaatcgaatgcccaagccaatttcaaaagaaggaaggatctgtagcttaggataatcgattacccaacacctgtaaacaaagaanagctctctgtgtgattntataatcgattaccacacatgataattaattaccaagacaacacanaagaaatggaaaataattagattgaaatgaattaatcgattacccctttgtataatcaa

SEQ ID NO: 96491 - DNA, 463 bp, Glycine max
  unsure (1)..(463): unsure at all n locations
cagcttcaagatcagntgacgactattcaattaagatttctactctccaacctgttctcggagaggctgtaactatggtgaataattataatgataagagggtggaattctacgagcaagggaatcagctgataaggatatcgcctacaagattttgacttataacgaagagcctttcctagggaggcgatcatttccctaacttaagatccttgaaacccaaaggcaacattgttttctaaactaggtcgccttcttcgaatcctttgtttcaaacatgcttgttataatatcgngctactttntccttgttttgcttaatattctcataagtcattaagcgatcttcgtcagtcgattctagaggttgaacgacatcttgcctatatgttagttgaaaaggcattgcattngtagcattgctcttagtatgtctacaagcccataatactttatacaacat

SEQ ID NO: 96492 - DNA, 460 bp, Glycine max
  unsure (1)..(460): unsure at all n locations
ctattacttaacttcatattntcttccctcaatcgnttaactcttcctaacgcccaaacatatcaaaacaactataggcttaaggtaaagctctaagatcaaatacatccaacacaatacaaaaatatcgaggctttcatgtataagaaaattattagattaaaaccttttaatcattctttatgtctaaggtattaccatttttttaattacttttggtatgcctatattgaggaaaaagaacaagcaaacattcacataaacacaatataaaattaaaaaagaaaaaaaaatcaatttcacctccactgaattcaagaccatatgcttcagctntgtcatcaacttcttctccaataccatatcttggagcctcttatgttcccctcattctctatcccaatatataagattgaattccttgattaatgttgctcaatgccatcttgagcttctctag

SEQ ID NO: 96493 - DNA, 446 bp, Glycine max
  unsure (1)..(446): unsure at all n locations
agcttctacttatgtggcagggtgggctttcttcactttcttggctccaacgcaagctttgaccactattcttccttcccgcgatgcttcttttcatgtccgcctgagtgggcttatagcctaaaccatacttcccacgatttccttgggtatttatcaagctagttatgccgccgttgtctttgcctaaacccatcccgggttcataaccgttccccaacataactcgggccatcattaccgctgcatcggacagacaaggctgcccaaagagggagtccatggaggaaatgctgaccacctcanaagactggaaagcagtttctaacgattcttctgcggcttccacataaggcatggaggatgggcagcttaccaagatatcttnctcgcctgacacgatgaccaagtgcccctccactacgaatttcagcttttggtggagt

SEQ ID NO: 96494 - DNA, 455 bp, Glycine max
  unsure (1)..(455): unsure at all n locations
ngaccaatcccgaccncacccgggcatagtctgtcagtgttattctatgatgtacctaagcaggcgagctcctggcagtcaacagatataaggaactgtgaccacaaagcaaggaggcttgtgtggtggctggccagctgtgaatcttgtgtgatatatgggttatggcttctggtaatcgattaccaagggtgggtaattgattacaaggcttaaaaatgaagagaggaggctaagatggtctctggtaatcgattaccaaggggtgtaatcgattaccaggcttgaaaacgaggtcaggaagctaggagagcttctggtaatcgattaccaaggggtgtaatcgattaccaggcttataaagggaacttgaagattgtggaggcctctggtaatcgattaccagtctgtgtaatcgattacacagaggaatgggtcactggtaatcgattact

SEQ ID NO: 96495 - DNA, 352 bp, Glycine max
  unsure (1)..(352): unsure at all n locations
ctgcaagctgggtatgctagcttcttattatctatgggcagtcttgatgagggctagatgtttgtgatctgggaagcccaaaacaacttatatgtgttcctcaatttacctaggagtatgttcttgcgagaagattgtgatagagaactcgaactgacaacttggtgatggaaacttgatctctttttggcagatccatggattagcaaacccatttctaatattntacatattcccctccatctctgtaagcttcttaaggcgcatgtggctgacttcattntccaatccacatggagaattcctagttctttaatttaatggaccattttcttgtagcggtcaatgaaat

SEQ ID NO: 96496 - DNA, 415 bp, Glycine max
  unsure (1)..(415): unsure at all n locations
gctgttagagattttagagaaagaaagactggcttataactgagtgagaagaggaagtcattttgagagcatgagatgagtttgtgagtgattgtgaggttctagaggtggaggaaacatccccactacttggatttcttcaatacttcatttttctcttctctttgttgtaaaggaagcttcccaaatatggagagctaaatcctctgttggttcttccttgtaggtacttgatgtaaatacttgtatatctatttaatgatgttttatgtgttctctgtgctatcagtacatcatttcagtgtgcttttgccttgatcaagtagatgcatgctttgttaggatcattcaatagtgaaaactggtctgattcttagaacttgataggacggngctagcttatcgtattttcacg

SEQ ID NO: 96497 - DNA, 462 bp, Glycine max
  unsure (1)..(462): unsure at all n locations
agctagagacgttggaaatggtgttggaatatagaaagagaaagaaaatggtgtttttttccaaggctacacaaatcacaaaggccgaaacactccattgcttcttctctcgggaaaggaagattgtctcacacgccagacatcaaatcaaagatcgcaacagtcagatcgtggacatcggtcctgtgaatctgcaaaccaaatttcgagaagatccaatggttaacaaaagtaggagggcactttgaacgagacagcttccttgagaagcttcattgagaggcttcctcgagaagcttcctcgtgaggcttctttgagaagctttcttgagaggcttctttgagaagctttcttgagaggcttctttgagaagttaatgctttaactaccaatatccttctaataactaaactcacctccttgaaaataaaacacggataanataacacaacaaatataat

SEQ ID NO: 96498 - DNA, 456 bp, Glycine max
  unsure (1)..(456): unsure at all n locations
ggcttgtggggcttctatggaggctggatcnttgagcttcaatgaggtcctttaatggtgattttccaccatggagatgcagcggaagacaaaggagaataggtgagaggaggcgccatccactaaggaataagccatggaagaaagagcttcaccactgagatgagccttggataagaagcttggagaggatgcttcaatggaggaaaagaaagagggagagaaagagagataggggagcacgaaattgaaggaagaaaaagggagagaagttgaactttgagttgtgtctcacaaaactctcattcatcaaagttacaacaagtgttacacatgtttctatttatagactaggtagcttccttgagaagctttcttgagaaaacttccttgagaagcttctttgagaaaacttccttgagaagctagangttagctacacacacccctctcata

SEQ ID NO: 96499 - DNA, 384 bp, Glycine max
  unsure (1)..(384): unsure at all n locations
agcttaatactaaggaagtatgatagcatttcttatctaacatctcgaattcatatttgagattgtccttcaaattttctatctcagttggattactccttgtaataagcaaatcatccacatagaggcatattagcaggactccaccatccttagttgccttcacatagataccatgctctatagtacatttcttaaagtcttcaccatgtagaaaggagtctattcttttattccaggcccttggagctggtttcagtctatacatagcctttntaagtcagtacatcttgtcttcactgcctatgacttcatatccagggggttgctgaatataacttcttcatctaaagggccattaaggaatgcaaatttgacatctaa

SEQ ID NO: 96500 - DNA, 380 bp, Glycine max
  unsure (1)..(380): unsure at all n locations
tcctatatggatgttagttcaaggtggtgaattgttatgctgtgaccaaaatccatttggaagnttattctgttatttttttgttttggcctctacctatataaggcaaggatgcactgtattttccatataagagaagcttccacttgtatactgcgaccataataaaaagctttttgtttttcccttccatggacgtagccttacccaaggtgaaccacgtaaatcntgttgggcgttctttctctcatctctttctctttcaattctattacaatctgtgtgtatgatatttttgttctgctgcatctcctgctggtggtcttgtttggtcttcatcacttccataacactttttatggtaattgcagagattataa

SEQ ID NO: 96501 - DNA, 437 bp, Glycine max
  unsure (1)..(437): unsure at all n locations
agctaggcgagattattgtaatttttagatcattactcactaggggagcctaacctttgtgggcgagtccngtgaccctatatgggatctatgtaacaccctanaatattactaattaataatcgatgtttaattatatttatncgtgtattcgactatatgggtgacttgaatgagttgaggtatggcctgaattagtcatgtgtgaatcgatgtttaattgtaaatcgatatttaattgtatttatcgtgtaatttgactatatgattgacttgaatgagttgaggattagcctgaatcagtcatgtgtgaatttcttgatgtgaatgttgagtatgtggagttttgtgagctaagttgaaatatgatattctaaattacgacttggattcgtaaccggtgaacgcttcaatttttctgaagttctagactctca

SEQ ID NO: 96502 - DNA, 435 bp, Glycine max
  unsure (1)..(435): unsure at all n locations
aatggtcttatatatcttgttgtatcaattctaatacatcataaatttgatgggaacctattttcttagctntggttggcttacctttgatacagtcaataaaaacattaaagtttgtaaagtctatatcattcaaaatccctttagacacaagtcttacaattntttgtttagaaatgtgacctaatcgtttgtgccataattatcatgaattctcatgatgaatcttatgcttagtaccgcatgaagatgtatgcaaggtttcatgataagatgcaattgtcttaagtaagaatcaattatcataatgtaacatctttcattacaataataaatcatatataaatttggtaaagattaaatttccaaagctaaaaaggtctcanatcacacttcaagcatattanaataaccaatataatccatttttgtata

SEQ ID NO: 96503 - DNA, 406 bp, Glycine max
aaaagttattgccggttgaattagctcagaggttcaaaattcaatttcgagcgtctcgttatattacgggactcaatcagacatccgagtaagaagttattgtcgtttgaattggctcaaagggtcaacattcaattttgagagtctcaatatattatgggactcaatcagacatccgagtaaaaagttattgtcgtttaaattggctcataggatcaacattcaatttcgagcgtctcgatatattacgggactcaatcagacatccgagtaagaagttattgtcgttagcattggctcagaggctcaacatacaatttcgagcgtctcgatatatgacgggactcaatcagacattccagtaaaaagttattgtcggttgaattggctcatatgttcaacattt

SEQ ID NO: 96504 - DNA, 365 bp, Glycine max
  unsure (1)..(365): unsure at all n locations
gagacgctcgaaatggaatgttgaacctatgagccaattccaacgacaataactttntactcggatgattgattgagtcccgtaatataacgagacgctcganattgaatgttgaaactttgagccaattcaaacgactaataacttttactcggatgtctgattgagtcccgtaatatatcgagacgctcgaaattgaatgttgaacctatgagccaattcaaacgacaataacttttaactcggatgtctgattgagtcccataatatatcgagacgctcagaaatgaatgttgaacctctgagccaattcaaacgacaataactctttactcggatgtctgattgagtcccgtaatatatcg

SEQ ID NO: 96505 - DNA, 438 bp, Glycine max
  unsure (1)..(438): unsure at all n locations
taatgtgttggcttcagtttattatgaagaaataaatcaaagagntttaggaaaaacaacaattatttcccaaaattaatcatatgcaaacatgcacttgtgttctttatgaccctgacattataccatacttgtatctggcataagcaagcagcacatgctaccatagcttttaggctttaccttcgagacaaactatatctaaattattactaataagtaataatatgatttgcaggctgcttcaacactgtatggtcctcacattatcagcatacatccaagaattcaagaaactagcacaggcaatggctaaaggagagaacatcactataaaaggtccttctccacttgatctctcatctgtacaaatcagcttcttactcatgtaagacaaagccttaccaaaaagaggctattntacaaagggagatacac

SEQ ID NO: 96506 - DNA, 408 bp, Glycine max
  unsure (1)..(408): unsure at all n locations
taaattttggttttgaatatggaaaggcatgaatattangacatgcttgagagggtttttactagaatttggcttgcccatgaggaatactttgcagctaagtagcatggaaaatacctttcaatggtatgtatatgtatgtgaatataggtagcatggaaaacacctttcaatggtatgtatatatgtgaatgtagggcgtaaagataccttgcaaagtgtgaatgagtggcaaaaaaatgcctttcaacatatgcatatttgaggataggtagcattagaagccttttagaaaatgtacccctatcaaaaaatggcctgaggacgcttcccaaatgaatatatgatgtnggaatgtccctcagatgtatatggatggcatgaaagttccttttcaaatgcaagtat

SEQ ID NO: 96507 - DNA, 419 bp, Glycine max
  unsure (1)..(419): unsure at all n locations
gattctaaacatgtcaacatttagtacaaatgacatcatctctctctatcattacatataattggtttggacaactcaaacttgttgtttagtatgggagtgatgcttcgagccaagaaaacatgtgatttttcgtagccaacattgtgaatatatttttaggcaaatgccaagttacaaaatccccctcttttccatgtcggagttgatgtttttgtatcaaaaacttatgatggcgaaaacatactactcaaatatcttatttgtgacaagaaaaataatttaacaatttctaatgttagagcatatggcatagctattgagtgtacatctttgtcagagcttcaaccaaactgatgcaacaaagaatggtgtaacacaggaattggcttgatgaattacacatcacanatttgggt

SEQ ID NO: 96508 - DNA, 405 bp, Glycine max
  unsure (1)..(405): unsure at all n locations
tacctggccttctggacttaacttatctttttcttaaatagcaacacacacacttttattttatacttacaagtttggtttaaataagtgggtgccagggaataaataatcatgcacaaagtaagctttttagctaagtggctatcttcaatcaaaacatggccttcatcatcttcaatttcacgcattcatttcatactcagagattcatgcaaaaatcattactcaatgttacttgttctctcacaattaaagatcacactctcaccgggttgcggctaatgagtaccttcacaatcaacctgacaaaccaactaacattntcagtcatgatcctaattccatgttctttctttctaatgactgcatgctcattcaaggcatatgatctacgcatttcaattc

SEQ ID NO: 96509 - DNA, 421 bp, Glycine max
  unsure (1)..(421): unsure at all n locations
tgttcgagctgtctctgttcatgttatacactgatgtgttnggtttagaagatacaaataaaagagaaatttttgaattaaaatacaatagaaaaaggtgtgggagcggcataatattttctctatttctcttctccttaattaaaagtctaaagattcttttggtagaggtggaagatggtagaaaaggaatgaaataaacaggaagacttacacttttattttttcctttaatttaaaaatttcatcttatttcttttcactctccaaaacatataccacaagttgattntgaaatagatactcaatttcaagctttcctaattacaatcattggcctgatcttatttttggcgaatgtcattgacttaatatatgcttataacaaatatcataatcattgtctntctcatttattatc

SEQ ID NO: 96510 - DNA, 458 bp, Glycine max
  unsure (1)..(458): unsure at all n locations
attccataggtcttgacatagtctggaaacagtgtatattatcattaccacttgtactaatcttattattataatacatattaattttgcggacaaaaaaaaactaattgttccaacctgtcaactcaaactaaccagtaaacacctctttaattggagacctatcatcaatttttagtttataaaatctcttcaagggacatggaaaaagttataggtaagcatatgatgaaatggtgtctatgacacaaaaagcacaaagtccagtatgaacacgtgggttaggagagggcaaagtagagaaaatatacaaaaagaataaattacctcgtcacccccagcaaacataaatggaactacatctccatgcagggccaaaatccaatggataggcctgctaaacacaacctatatattaaaagtatggaaacatgttaattntatgtaacaagttattt

SEQ ID NO: 96511 - DNA, 485 bp, Glycine max
accggatccttaagcacctgggctgcagcttgatgatttacatctcccctttcttatgcaaattcttcttgatatcatcaaaatcttcatgatttacaaaacctagtcaaattctaaaaaaccctaactgacataagctaaaaaaccctagtcggcatcaacttaaaaatagcactgaccgatgttgatcgaaaaaaccctagctaacatcgactaaaaatagcctggctgatgtcggcaaaaaaaccttagtcgacgtcaaccgaaaatctgtagccgacattggctaaaatatcctagccaaggttgaccgaaaaatcactagctaatattgactaaaaagtagctctaactaatgtcggttgaaaaagcctagttggcatcagccaaaaaaaccatggatgtcggtcgaaaaaacctacctgaagtaagaaaaaacaacctacccggcattggccaaaaaacaaccttggttgacatcatgc

SEQ ID NO: 96512 - DNA, 434 bp, Glycine max
  unsure (1)..(434): unsure at all n locations
tactagtacctaagggctatacgtttatccttaataatcactttcttaattntataaagggtgtttaagggtgtgacaaaaaaaattataactaatgttcttgtaaaattacttttaataattgcatacataagaggatattttaaaggatttacataaatattacttaaatttatcaatgttatatttttattaacatttaatatatttcaataaatttatgataaatcttatcaaattatattttaaattattttatttaatttaaaatcaattttatgatatagactctcattataaatttattgaataaatatttagttaaactatttcttcaaacaagtctaaatatataaaaactagtaattttgttactaataagttaatatataaaaatgaagagggtttactatctttttaatccttaaactctt

SEQ ID NO: 96513 - DNA, 464 bp, Glycine max
  unsure (1)..(464): unsure at all n locations
agcttcacgctaagcgtacaagaaagntctagagctctgaccgatccatttcactccatttctgaaggagaggaaacaagaagcagatgaaagcaaaaaagccattgttgaaagaaatcactttctagagctctggccgatccatttcactccatttctcttcatttcattccaccttttatatttgtaagtttctcatgacaataagaagctaaaaccacccattgttgggagctctgcaatccaaactctctttgatgtaatgattctaaactatctattaatatgatgttgatattattattctttcctttgctcattcacatgtttgtggtctgatcatccattttcatgaactattttaggatttagacattggaaaatgtttatgtgctaagaacttggaaagaacatttaggtgatccatgtctagggatagagtgatatggtttaacatggttatg

SEQ ID NO: 96514 - DNA, 425 bp, Glycine max
cagcttcatctttattgctgaatttctccttttgattcattagcggtgcaattggcttgcattcctccatcttgaactttctaagaatttcctttgcatatttttcttgacttacaaagacttcacctctatcttgttgcacctgcataccaaggaaataagacatttttccaagatcagtaatttcaaaggcttctttcattcctcctttaaactctttactcatctcctttgaacttcttgtaataagtaagtcatcaacatacaaggagacaatgactattccaacatccgtcttcttgacatacaaggtaaactcacttagactttttttcgaagcctaagcttatcaaatgtgcatcaattctgacgtaccaagaccttggggcttgctttaagccatacaaggcctttttcagccgata

SEQ ID NO: 96515 - DNA, 426 bp, Glycine max
  unsure (1)..(426): unsure at all n locations
agcttccatcattggtcattgcccagaattattgacatgctntattgctatcatatgccttggtctagctatatttaattcctgtgtggccagaataattatctccgtgtctgttatgttggtttaagattcatagctttcngaatttgacatatgtgtgagatgtaatatgcttgaaagatcaagcttccttgatttttgtcttgaaaaaacatacacagtaacttttattactgcatggcataacttttatttcaatttaattattgaattttaaatggatattaagtgtgctaatatatggcaagtcaagcttgcaggttttgggttggcaaggtagcctttaacaaccttgaatttatctattcagcttcttatcatacacaatcataatgctagttgcttataattcatatttttttggat

SEQ ID NO: 96516 - DNA, 457 bp, Glycine max
  unsure (1)..(457): unsure at all n locations
ttcactaaagaatntattggaataagctaaaaagagctaacttattagtcataagctacttcaataaacctaattaaatacttgttaagtgtttatatgataagataagcccaaataagctttgtaataaatcttccaaacatcctctaagaaatgtcgttttcctcggtgtattggtctttacttgtagtgagttcattaatttctcatttgtctgtgactatgtcttttcgttctgttttaattttaaggtcttatttttctgctcctgttgtcatttcaggttgcacttgtgatcactcagtttagaagagccaaagcgcagtttgatccgcctggttttcagctntacgagcatctgttgtttgtttacaaccagagctatgatgtgaatactgaaactgctgaactacgtgtaatctgtgaaaagctacaatntctcaatgtggatgacatc

SEQ ID NO: 96517 - DNA, 462 bp, Glycine max
  unsure (1)..(462): unsure at all n locations
agcttatngcacannattntgtaaccaatcttgcatggactcatcctccannattgcctatccaaaggtccattgatatcgagtttctacctaacaaagtatgtccaaggttaccagttctagaccttggtaagaagaaaggattcaaggcctatgggccaattgaaatgaccagaaaggacaaggtatggttggtcattgatactttgaagtgggacaccttgtttaataataaaggcatggtaacatgatccttggacaaatatgatgcanagagggtttggaatgatgctatatgtagagactccaagacaacctcctcatccaactgcatatatcctanagctatgacttctctcgatgcccttcattntttgtgtccaactagactgtatcacttcagtgacacatgtgttggctttctagttgatcctacttatgatgaattcctcgctcatctta

SEQ ID NO: 96518 - DNA, 459 bp, Glycine max
  unsure (1)..(459): unsure at all n locations
ntgagggtgcgtagcccaccatcttttcatagtagagtatctataatgtgtctaccatcacgattatcgtctccctttccatcattgggggtaccacttgggccgccagatccctccaccttttgggtgtgttctttgaaagatccgtccccctttttgcaaatgttctgtagttgcatcctatccagaaccatatcaaaattgtactaatactgcctaacaaaggcaaccattangtccttccaagaatggactcgggaaggttccaagttagtgtaccaggtaacagctaccccagtaagactttcatggaaggaatgtatcaacaattcctcatcttttgcgtattcccccatcttctgacaatacatctttagatggttcttgggacaagtagtccccttgtacttgtcaaagtccagcaccttgaacttgggaggggtgatgatattgggtact

SEQ ID NO: 96519 - DNA, 461 bp, Glycine max
  unsure (1)..(461): unsure at all n locations
agcttgaacactntaatctttatccttacttaataattatnntaatacctaaatttacaaattatcatttactcttaatagtaaacaatgtggttgaaaaaaaataaaaggaataacaatttgtaaaattagatgctaaacaataatttttataaagtcaagaatagaaatgaacagtttttaccaatttcaggaattaatgtgagagttatttaaggttaccaataggtttgttctgcttacaatcttaagaattaatatcgncatttattataatatntgctgagcttgacttatatatatatatatatatatatatatatatatatacacatacttatttttgaagtagcaacctaatttttgtttcttaatgaanatatgaaagcctagtctaatttgtatgcctacttcggttcttaaaatggataagggccttaaaataaaaaataatagtatat

SEQ ID NO: 96520 - DNA, 411 bp, Glycine max
  unsure (1)..(411): unsure at all n locations
tgttcctgttccaccaactgtgacagnntttacagttaatattaccctngagcaaggtgcaaccaagcttcttcatagatggcaagaagtggcaccctttctcgatgaaaacctctttatcagagtccgcattcaaagagcacagagtactgtgacaacttcttacgaaggtctcttcctaggtggggcaagaaaactccttaaaatcatgaaaacaagctttcctgagttgggtgtgacaagaaaggattgcatggaaactagctggatcaaatcagtgctctatattgcaggctttccaagtggcacccctcctgaagttctgcttaaaggaaagccaatagctaagttcttcttcaagggcaagtcagattntgtaagaaaaccgataccggaaaccgggctagaggg

SEQ ID NO: 96521 - DNA, 438 bp, Glycine max
  unsure (1)..(438): unsure at all n locations
tgcaagcttncattagtgtgtctgcttcgtaatatattcttgacagctactcgttatttaacgccttctcaaaattcctagtattcaatatgaaggcacctatactatgaagaagatgactgaataccagatgttagctcatttgactcaactccatgaaactcatcaaaataagaaggctaaagaggaaaaagttgttgttggtgtgaaagaagatgctgcctccatccaagctgaagcatctgctaaagctatagatgacaccattgtatgtgggatcatcattgatcttaccaacactggtgtcatggataaaacttctgaggcatctaatgcagccatagctgatgaagttgaccataatgctntagaacctggtccaagcagtctacaacttcaaatgatgctactaataaaggcaaacatgctccatctact

SEQ ID NO: 96522 - DNA, 280 bp, Glycine max
  unsure (1)..(280): unsure at all n locations
tcttattcaaggctcatcttggttgtgaagctccttcttttatggcttattccctagnggatggcgcctcctctcacctcttcttctttgtcttccactgcatctccatggtggaaaatcaccattaaagaacctcattgaagctcaaagatccagccttcatagatgccccacaagcaagcttccatcaagacgtgtaatcctctgaaggtgagggcatgtatccctctgaaggcaaggatgtgtagtcctctaaaggcgagggcgtgtagccctttaa

SEQ ID NO: 96523 - DNA, 364 bp, Glycine max
agcttcgggttgctcaatagctccaggtttctgcatggaaaggcaaaggtctgtatggtggtcagcagaggagcacaaaccacagacccttgcaacaggtacagatttctcgttcaaggccagctgggttaccaagttaaccaatgcatccagtttgccttcaagcttcttagtttcagatgatgcagttgagtttgttgctacctcatgcactcctctaatgactatagcatcatttctggcgctaagctgctggttgttggaagccatcttctcaattaaatttctggcttcagcaggagtcatgtctccaagggctccaccactggcagcatctatcatacttctctccatattactgagt

SEQ ID NO: 96524 - DNA, 415 bp, Glycine max
  unsure (1)..(415): unsure at all n locations
atagtcggtcagtgttaacctgngatgtacctaaacaggcgaggtcctggcagtcaacagataaaaggaaccaagaccacaaagcaaggaggcttgtggtggctggccaactgtgaattttgtgtgatatatgggttgtggcctctggtaatcgattaccaagggtgggtaatcgattacaaggcttaaaaatgaagacaggaggctaagatggtctctggtaatcgattaccacggggtgtaatcgattaccaggcttgaaaatgaggtcaggaagccatgagggcttctggtaatcgattaccaagggggtgtaatcgattaccangcttataaaggggactggaacattgtggaggcctctggtaatcgattaccagcctgtgtaatcgattacacagagggatgggtcact

SEQ ID NO: 96525 - DNA, 438 bp, Glycine max
  unsure (1)..(438): unsure at all n locations
agctgtattatagaaatgtganggattaacgcttctttgttttattatcatctaagcggcttctcacttcgtaatttttatatttttgtgatgggagtcaacaatttcgtacttaaccatgtgcatgaagtgaagttagaaagaccagacaatgcatttttgtattcattgttggtggaaataatcagatctgacattttttctctctttatatatattagcaattcaattcttagacatgcatcaagtgactttatgaagatggggcaacaacttttttatattcactttggtggagcaatcagatctgagggttgattttatatgtgtgtgtgagagagacacagagatntagtattcaaggccataatgagattttattattcaataactangaattgtcataatcattcttccatgcatcccaagacccaaatg

SEQ ID NO: 96526 - DNA, 444 bp, Glycine max
  unsure (1)..(444): unsure at all n locations
accattttcctttttctctcatggatcatatgttggagaggcttgcgagacangcctattacggcttcctagatggatactccggatataatcagattgttgtggaccccaaggatcaagagaagatggcttttacatgcccttttggtgtctttgcctatagacgaatgccatttgggttatgtaatgcacttgccatattccaaaggtgcatgttggccatttttgcagatatggtggagaaaagcatcgaagtattcatggataacttttcaatgtttgggacctcatttgaaagctgcttaaagaacttggaaatggtactacaaagatgcatagaaacaaacttggtggctaaatgggagaagtgccacttcatggttcgaanaggcatagtcttgggccataaaaaattggcttgaggaattgagggtgatcgggaaa

SEQ ID NO: 96527 - DNA, 224 bp, Glycine max
  unsure (1)..(224): unsure at all n locations
agctcgcaatctactgcanatgcatgccatgaggcaagtaaagtgttatgaccaattggctacatacggcaagtctggttcttggctctttttatttagtcttcaatctgtatgatcatttggtttaacatatgacaaagtcatacaatatatatatatagaactatgatcatatgaaatttggtaccaaagttacatgaatatctctcagcttcaggcctctt

SEQ ID NO: 96528 - DNA, 410 bp, Glycine max
  unsure (1)..(410): unsure at all n locations
cactggtaaattcattccatcctttcatcataatccatcggattaatcacagtattactccctcattaggatcagttctacgtgtcttggtgtgcaataaatagttattgtagtcaagagagggtatagctcaagttgaacaaagcacacgagttattgtaaactccttgacattgtttttgagcggataaaaattaataattattataagcatgtcataattgtaatgctgattaggcaaaacaatgtatatactatatactctctggaatatgcagtccaaagtcaaaaagaatggttattagagtatgcttaacgtaaagccagcaattactaattaaagtatcctttanaagttgcttcatgaccaagcctaacaagttctatcaagttcgcttcgcagataaacg

SEQ ID NO: 96529 - DNA, 406 bp, Glycine max
tgacggactataccaagctctaagaaccactgtcggtttaagatctatatataggcttgctaagggtagagagaggaagactagagatttggatcaagtcaagtgtgttaaggatgaagaaggcaaagtcttaatgcatgaaaaagatatcaaggaaaggtggaaggcgtatttccacaacttatttaatgatggatatggatatgactctagcagtctagacacaagagaagaggaccagaactataagtactatcgtcggattcagaaacaggaagtaaaggaagcgttgaaaagaatgagtaatggtaaggcggtggggccagacaacatacctattgaagtgtggaaaactctcggagatagaggtcttgagtggctcaccgaactctttaacgaaattatg

SEQ ID NO: 96530 - DNA, 444 bp, Glycine max
  unsure (1)..(444): unsure at all n locations
cccaccatcttctcatagtagaacattggtaacgtgtctactatcaatggtatcatctcccttctcatcatcgggggcgctacttgagctaccagatccctccaccattgggtgtattctttgaaagattcatgctccctcttaaacatgttatgtagctacactctatctggagtcatatgagaattgaactcatactacctaatgaaggaaaccattangtctttccaggaacggacctgggaaggctctagattggtgtaccaggtgatggatgccccaataagactttattggaagaaatgcatcanaattttttcatcttatgcatatgcccccattntcttgcagtacatcttcaggtgattcttggggcaagtagtccccttgtacttatcaaaatctggcaccttgaactttggaaggatgacgacgtcaggcact

SEQ ID NO: 96531 - DNA, 360 bp, Glycine max
  unsure (1)..(360): unsure at all n locations
aaaaagcacatgcgatgactaatactcaaaatacggagcagcgtttatatattaaaaggaccgttcacattacgataggatttgtcgcgctgttaacttagtgatgcttaattattattgttaaacaaatggtaagcatcacggatgtatgatgcatgctatgatcagtgataaactgtgaaaacaaaagatttggattgggttatagagaacagcgagagtattgtttttatctaccctccctctcaagataatgaaaacggntcattattaataacttttaaatcgatgttggtttctgctcagcaacatttgtttctagacgaaccgatgttgtcgtgcattacaacatcatttttc

SEQ ID NO: 96532 - DNA, 436 bp, Glycine max
  unsure (1)..(436): unsure at all n locations
tatgagagatcctacccctaacttcatttnctttctgagagatcccaaccttgtctcacccacccatcatggaaacacccgatattgagaacctaaatctaagagatgatgaagctgagatggaaattaacatttcgtagaatgaggaaacccacaacgatcaatctctgagtctggtagaacgtttcctcacggaccacattatcagaacaccaatcatgaaggaacgaattgaatgtccaatgtatggagacaccattggcaggaatgacaatttcagaaatcaacacatgctctatttttattccagttctatcaccaacaagatttctagagagtcttgcgtggtaggccatacagtttcgataagaacatgttaattntgggagccgtanaaaatgaagaccctgatcgtgtaccgctctaaaacatcctt

SEQ ID NO: 96533 - DNA, 221 bp, Glycine max
  unsure (1)..(221): unsure at all n locations
ctatggatcttcttaacggcacatactctaccatatagagttgcgaccgaaaccacgctaatacattgtgtactacctagagtagtttgcacactncattgcgctacaagattactaaccgaacgacgcagtcttgaaggaatgaacgaatatgcgctgctgctaatactggaacatgagtcgatgtatctgagttacaggccctcctgggacagcaatgt

SEQ ID NO: 96534 - DNA, 332 bp, Glycine max
agattttatacccaagtatgataacaaggataatggggtgaatcatttcaagaaggaaacaacaatcttgactcaagagagggatgtattcgctattggagagattatttctatacccaactatgctggacttgacaaggggagaattgaaaagaatttggcaaataccatacataccacaactatgtcctacccaagagcatgctctaatccatgtactaaccagagtagctactctgtgagaaggaatcaccagtgtcctataatcgatcaccaccgatggaatacgatgttcgaaaagctataactgagttcgcagcgcaccacatgag

SEQ ID NO: 96535 - DNA, 448 bp, Glycine max
  unsure (1)..(448): unsure at all n locations
ggatccttaagcacgcggctgcagcttataattataaacagtattgactttatgaatacaatcagttaaacaacagntagtgtgacactgaatgtgcctaaataggcacaagaaagaggtgtcaaaacacggaaaaaaaaatagtataaatgaacaaattaatagcacgtttggttaaatataaagaaatagcttcttttcaaaagctctctgacaactggcaaacataagcaattatttcttcaaaatatgttgaaccaaacttacactaatagttgtcttttagttcatgcgatgctgacttcttgcctcatctgttttaagtaacttcaattgtgaactaacttaacttcaatagctggcctttttgctaaatgatattgcaacagctatcaagacattagctgatgctattaatcatcatccttcagaccaagtgatattaacc

SEQ ID NO: 96536 - DNA, 432 bp, Glycine max
  unsure (1)..(432): unsure at all n locations
tgagatgagtaagtatagaagggcgaaacttcctgctcttattcgttgaccacagagtggtacctggagatatgtcgcggngggcatgagaccttggggacgtcatgtggggtgctattgcccaaaaccaagcttgaccaataccgacccaacccgggcatagtctgtcagtgagaacctgcgatgtacctaagcaggcgagctcctggcagtcaacagataaaaggaacaaagaccacaaagcatggaggcttgtgtggtggctggccacctgcgaatcttgtgtgatatatggattgcggcctctggtaatcgattaccaagggtgggtaacggtaatcgattacaatgcttaaaaatgaagacaggaggctaagatggtctctggtaatcgattaccacggngtgtaatcgattaccacgcttgaaaac

SEQ ID NO: 96537 - DNA, 461 bp, Glycine max
agcttcaagatgaatcaagattgattcatttatgtttgatgataacaaagatgatgaccaaaagccaagctcaaaagtcaagaacacttcatgataacaaagatgatgatctcaagaatcaaagaatgagttccagattgaatcaagaacacttcaaggttcaagaggaaatttgatttcaagaatcaagtttcaagattcaagttccaagaatcaagatcaagattcaagactaaagattcaagaatcaagagaagactcaatcaagataagtattaaaaagtttttttaaaaaactgagtggcacatgaatttttctcaaaaaccttttaccaaagagtttttactctctggtaatcgattaccagattattgtaatcgattaccaatagcaaaatggttttcaaaaagctttcaacttgaattacaacgttccaattgattttcaaatggttgtatcg

SEQ ID NO: 96538 - DNA, 463 bp, Glycine max
  unsure (1)..(463): unsure at all n locations
cgcttgtccgcanaagtcactcannaaccgtttattgtccatctccttanaacggntctctttgcttttattggttaaaatgaaccattcaaagcataaaatcaacacataactttatcgcttttgcaagaactacgtaggtccgagttcctcatcgcaattgagggtacgtaagagcaaaagccctacttttgtcgaccaccccaagagatcgttaatggttcaacgccttaacgtttctctcctttaaaaaaaacaagagatcgttaatggtccaatgccttaacgtttctcttctttcaccccaatagatcgttaatggtccaacgccttaacgtttctctcctttaaaaaaaaaaatcaaaagatcgtttaatggtccaatgccttaaacgactnttgttcggtgtaaatcaatcttgcggaaaaagatcaaaacaacttaacgaacgtttagttctga

SEQ ID NO: 96539 - DNA, 431 bp, Glycine max
  unsure (1)..(431): unsure at all n locations
agctntntattntcagtagatgaagatgaatctgtggtcacctcatagactcgtctaagaacaatagcatcatttcttgcactgaattgttgggagttggaagtcatcttctcaatcaaattcctagctttagcaggggtcatatcaccaagagctccaccattggtagcatcaatcatactcctctccatgttgctaaatccctcatagaaatattgaagaaggagttgctcagaaatctagtggtgaggacagcttgcacataatttcttgaatctttctcagtactcatacaagctctctccactaagtttcctgatgcctgaaatgtcttttctgatggcagtggtcctagatgcagggaagaatttctccaagaacaccctcttaaggtcatcccaactgaaaatgaacctgggagcaaggtagta

SEQ ID NO: 96540 - DNA, 441 bp, Glycine max
  unsure (1)..(441): unsure at all n locations
ntagctcaggctatagggaatcagaataagggaaaagctgttggagctactgagtatcaaaggatggaccacttccaacaaaacaattgatgcaatcctaccccccaagatcattggatagaagactccaagaagattgggccaaagatgcaagagaaggccctagggttctcatgagccttagggtagatttctaagcacatgggccaaggttgggtccaattatctttgtacatattagactaggatgtcattatatttggtccttgtatttagggctccatattgtaggtagggtatcctagaaatataggatttttcagcccttgtattttagggcacctagactagtttttgtattaggggtagttntgtaatttcacatgcactaagtggatatttgatgtantgtggtggaaataaatntaattgaattggtag

SEQ ID NO: 96541 - DNA, 414 bp, Glycine max
  unsure (1)..(414): unsure at all n locations
caaacagcacatgcaatgactaagactcgaaataccgagcggcgaaaaattatcagagatgaatgttcacattacgatacgatntgtcccgctgttaagctagtgatgcataattattagtgttaaacaaatggtaagcatcaccgatgtatgtgtcaagctatgattagtgataaaggtgcaaattaaaagatttggtttgggttaagtgtaataggatagttattgtttttttctaccctccctctcaagataagggagaaaagctcatgatggtcccatggtacgaggtccccccttgcatatatataaaatcatgcactcacactatgtggggtctccaatcctaagaaaatctattcccatcacaagtcacagccgtgacctcagtaatagtatcattacataattatt

SEQ ID NO: 96542 - DNA, 457 bp, Glycine max
  unsure (1)..(457): unsure at all n locations
taggattatggggtacccatcacatgtggtactatgtgttggtcgggcgaaggtgcacaacaagttttccacatccacaaagcgcgcataaacccaccatcccctgttgcccacctccaactgagctcacgtactcccacgtagcccatatcctcttttctctcaacaccgggtccccatcaatcctcccaagctgtcccaacatcaaagtaaaacgacattcaaacagcacaagctatcacagccaagcaaaacagagcaaaggcagaaaactctgccaaaacaccaaccaaatcacagcttttctcacttaaagactccaataacaattccttcgttccggttcaattaaccgtggatcgactcgaaaattttactggaagtctttagtacataagcctacattntgaccgttgggatctactagcaaacatccagaactcattntacattactc

SEQ ID NO: 96543 - DNA, 376 bp, Glycine max
agcttctagagaaagctacatgaagctgtctcggtaaaaacgcttcccaaccttcgttaaccgttggatcttctctataattggtctgcaacttcacaagacacttttccatgatctgaccgttgggatctttgagaagatttctgaagtgtgctagaagcttccgttcccgagagcatctcttatttaagcattttagcctttacttttgtgtagcttaggaaaaacgccatttcttcttctttctttcttccaaatccatttctaaagttccaagtactttctccatcacccacatccaccattagccaccacaaaccatcattgttctccattgaaaacccacaccgagaggaacccttcaaccgaagcagaa

SEQ ID NO: 96544 - DNA, 439 bp, Glycine max
  unsure (1)..(439): unsure at all n locations
tcagacagcttggtgtaatcgattacaatgaggggtgtaatcgattaaaacaaagagtttttgcctctgaagaaaattttctaatcttagaaactttccttcataccaaccatgatgatgcatgatgcaaaacagatatcaaatgtactaagatgcatcaaccaagataacaaccaatgcaaatgccactcaaaggaattgtttatgaaaaagccaaaacttcttcaaaaaatttcttcaagcttttccttaagctttagccttaggttgttccatgttgctcatgttgctccccttatctccaacacactttaatcgattaaaaagataattaaattgattacttcattgaattaatcaactaccttgtagatttaattgattacatgcggntataactattntctctataaataatcagcttgtgttctcttaaaaa

SEQ ID NO: 96545 - DNA, 374 bp, Glycine max
  unsure (1)..(374): unsure at all n locations
agcttggctaatcccgacccaacctaagcttagtcagtcagtgagaacctgtgacgtacctaaacaggcgagctcctggcagtcaaccaataaaagaacaaagtccacgaagcaaggtggcttgtgtggcggctggccagctatttattttgggtgttatcttgcaaattgcctctggtaatcgattaccattcgtgggtaatcgattacaggggttaaaaatggagacaggatgttaagtagcttctggtaatcgattaccaattgtgtgtaatcggttacatactttggtaatcaattaccagcgaggaaatcccttgaaaagacattttactatgcgtagccgntatgagacgcaatgattgtacctgtgt

SEQ ID NO: 96546 - DNA, 437 bp, Glycine max
  unsure (1)..(437): unsure at all n locations
tattacaacttcttgtatggatactctggatataatcaaattacggtggaccccaaggatcaggagaagacgaccttcacatgaccctttggtgtctttgctttagaggtgcatgttggcaatttttgtagatatggtggagaaaagtatcgaggtattcatggatgatttctcggtatatgggccttcttttgaatcctgcttgaagaacttggagatggtgctacaaagatgcatggaaacaaacctagttctaaactgggagaaccacttcatggtttgagaaggcataatcttgggcaaaaaatttcagcccgagagattgaggtagaccgggccaagatngatgtcattgagaagtttccaccaccatcgaatgttaaaggcattatgagcttcctatgacatgccggattttacatgagatttatcaaata

SEQ ID NO: 96547 - DNA, 391 bp, Glycine max
  unsure (1)..(391): unsure at all n locations
gcttagcggatagacaatnggcaaaataatatttcttctcacaagcttaaaaccccttggtcattactaaacaagctgaaattaatcacaatcacaagcaaggtatcctaactacatgcaagagataagaatgaaaaataggaaagggaaagaaaagttgggttgccttccagtaagcgctcttttaacgtcactagcttgacgcatcatcctattatccaggatcgaacaaagttccaacttcaaggactntcttctcaggtctcctttcctccatcacatgcactttaagacagacattntggttgggtggatctttgtcctcatggaacaaatcanagctgatcttctatgcccatctgcagcatcttcttccccatgtctaccatgc

SEQ ID NO: 96548 - DNA, 274 bp, Glycine max
gtccttgttccatcgtgaaaatgaatagttatccatgatgcaagacatcttattacagaactatcatgattcagaaacataatataaggtcgctcctaatgattagaaagtgatcaacgagttacaggatcacctcaatgaagaaaaggttgatctttagagaaactatgcttttctactaaaaagacaagaaaggtttcaagattcactatggaccgagcctggcctcaatacaacaggtttcacgtcatccaaggcacatgtcatcgattac

SEQ ID NO: 96549 - DNA, 447 bp, Glycine max
  unsure (1)..(447): unsure at all n locations
gctntattagtggaaaataattcaccccttcttaagttattgaggtcgctggtccaacatttgcaatatctaattctacttttaagttaagtaaaatgtagttttcaatacgtgagattatttgttttgtttgatgcaggctgatgataatggagatggaaagttgacactcttcccttatctcatttattntgttgcaatcaattttgtcttgtatgtttaaagaacattattaaattgattgctgcttcttctgcattcagagtctatcatttagaagggggttaaaagcttattagtggaaaaataattcaccccttcttaagttattgaggtcgctggtccaacatttgcaatatctaattctacttttaagttaagtaaaatgtagttttcaatacgtgagattatttgttntgtttgatgcacgctgatgataatggagat

SEQ ID NO: 96550 - DNA, 411 bp, Glycine max
  unsure (1)..(411): unsure at all n locations
ggatatttccatnggaaagtacaatgataaggtgctttgtgatgttgttcctatggagcccagccacttactcttggggagaccatggcaatttgataagagagctaatcatgatggtttcaccaacaagatctctttcacatatcaaggcaaaaagatagtgctcagaccattgagtccacaagaagtgtgtgaggatcaaagaanaatgagagagaaaattcttcaagaaaagagagaaaaagaaaaagagagccaaacacttgagagttcanaaagtaaggacaaaaagagggaaacacaagagaggaaaaagatgagtgaaacacttgaagtgagggagaattttctagctataaaaggagaggtcaaagggttgtttcattcaaaacaacccctatacttgttgat

SEQ ID NO: 96551 - DNA, 336 bp, Glycine max
  unsure (1)..(336): unsure at all n locations
gctcgtgactctnggcaatttctttaaaacaagttacttaaaatgttgtgactcttaaaagaatcttcaaaaacaagtcacttgaagaaatgtgacttttagaaatgtatattcaaaatcagtcactagttatcacatacccataaagtgtaatcgaatacacatcaacatatatgactcttcattttgaattttgaaattaaaaccgttaaaaagatctggggaatcgattaccaggatttgtgttatcgaatacacacagttaaaatactttaaactggtaacctagtatactttaaatcgaatctaacattttaaacactcgggatcgattac

SEQ ID NO: 96552 - DNA, 338 bp, Glycine max
  unsure (1)..(338): unsure at all n locations
aagtctaacccatatgtctaaaactggattggggtaattactaatgtttttgnaggaaatagtaatatattatttgacacacatttttcagcacacatttattattattattattattattattattattattattattattattattattattattattattattattattattatcacataatttaaaacaaattatactagcaacatggttttatttaaattatgctactagtatctcatgtatcacataagaacattgaataaggagtcaatcactcacagttgtttgtcaaatgccaattgattntccaagtaattcatgctctttcaagaac

SEQ ID NO: 96553 - DNA, 92 bp, Glycine max
ctgcagctgctctaattacattgatgtttgtatttatgggaagaggttgtatgccattttttaagagtagtgtcccactggtaaaactaact

SEQ ID NO: 96554 - DNA, 473 bp, Glycine max
  unsure (1)..(473): unsure at all n locations
acttcaaactatgcttaggtagcactgaaaaattactatataatgggtttatttgaattgttcaaagaatgtggttagcattaggtgttattgtcaaaaaatatatctcgtaaaagcttatactctttggtggagacccaaaaatggntnttttttcttcatcttttggttcttgacagntatcattgcttggtacatttggaaatgattatatttctctcttttcttcttacctaaaacacagtgaaaagaaagtgatacttttgtgattattagtgaaagtaaaatatggaaatagaaaattttcctcaaagcaaatagacctttaattttttattttaagaaaagatgttggcaccttcaagtggaaattttctaatatataagactatttgccaagtaacatcagctacaaagaagacagacttttacttntctggtagctctgaattggttacttcttattcttctct

SEQ ID NO: 96555 - DNA, 450 bp, Glycine max
agcttataatatatcgatacgctcgaaattttacatcggaaactctcgggatattcaaatagtcataactattcacacggttgtccgattcgggcgcataatatgtcgagaggctcggaattgaacaacggaagctcttgagaaattcaattggtataacttttcactcggatgtccgattcaggcaaatcacatatcgagacgctcaaaattgaacaacggaagctcctgagaaattcaaatggtcataacttttcacacggatgtccgattcaggcttataatatatcgatacgctcgaaattaaacatcggaaactctcgcgaaatgcaaatagtcataactcttcacactgaggtccgattcaggtttataatatatcgatacactcgaaattaaacatcggaaactctctagaaattcaaatggtcataacttttcacacggatg

SEQ ID NO: 96556 - DNA, 469 bp, Glycine max
tactaagctcggagaaggataggtcaagcccttaggcagagcttgatagagcccgagtagtcgaagagaagttcaaatccatagccatcaaagtctgaaaagagtatgatgaactaagggacgtcaatatggccaccgctgaagccttggaacgagaaaccaagaaggcccgaaaggaagaacacgtgccagcaaagttttgaagggctttatagggcagcaatagtaagctcaagctccgaagaggtgaaaggaatcatcatgggtcaaaggcatgatcttgaaggacgagctaaaggcttaccttatgtcgaaaagaaatttgtcccaacagttaagcgagactgaagggaatatgtgggccgtcatcgatgagtgcaaagagaagctaaatctagcggcgactcacgagcaaaggctagaggatgagtacgccaagatatcagcagaaagcgaagcaagggagagg

SEQ ID NO: 96557 - DNA, 452 bp, Glycine max
  unsure (1)..(452): unsure at all n locations
gctgcaagctggtaagaataatgttcttttctcttcaatttaggcaaaaaggagttatnttgaagaagtgctaaagttgacgtctcactaagcgagctcaatgcgcttagcgagtgtcatccgcaaagagaggcatcaacgcgcatagctgataggaggaatcaagaagggaatctgtcatgctggcatgcactcagggcgtcattagctggctccgtgagtcgtttgtcaccttccaggcttagcgcgagtttcgcgctgagcgattattcacttactcgcaccaagcgcgagaatggcattaagtgtgacgtcgaggtcagtgagcccttttttatgcctgacttgtggagaatgtaaggggggtgaagagagtggtgactagctgtaagagcttgaagagtgaaatacacagaggcaaagaatagagcanagaagccatggtttgatct

SEQ ID NO: 96558 - DNA, 443 bp, Glycine max
  unsure (1)..(443): unsure at all n locations
tgcaagagatgcatatngnacttctataataggtagtaatactgaaacgcaacaactaataaaacttcttgaatgagatcagtatattcattggcatggattaaaggataaagatgttgtacgcgatatattttggagtcatcctgatgcaatcaaataatccaatacatgtaatttggtatttctcatagatagtacctacaaaaaaaacaggtatagattgtcgttacttgacattgttggtgtgacaccaacagggatgacattttcagctgctttttcctacttggagggagaacgtgtaaacaatgttgtttgagctcaagaatggtttcgaagtatttttttgagacgtgatgcacacactctggagtcattgtttctgacaaagaattagcattgatgaatgcagtgaaaactatttttcctgagtctaccaattt

SEQ ID NO: 96559 - DNA, 408 bp, Glycine max
  unsure (1)..(408): unsure at all n locations
gcttcagcctcagcaccatctcttttccgttccancctttccaactctccgccgaggatgccaccaccatcaccccgagcaccgctcagaaggccaactcctccggcggcgacggcgcgaccatcgaggttgttcggcgtcccatgggacgtccgcccgggtccaaaaacaagcccaagccaccggttatcataacccgtgacccggaacccgctatgagtccctacattttagaagtgtctggcggaaacgacgtcgtcgaggccatcgcgcagttcagtcaccgcaagaacatgggaatctgcgtcctcacgggttctggaaccgtcgctaacgtcacgctccgtcaaccttccaccacgcccggcaccaccgttacttttcacgggcgtttcgacatcctttctg

SEQ ID NO: 96560 - DNA, 439 bp, Glycine max
  unsure (1)..(439): unsure at all n locations
tgaaagaaatcgagagcgaagaanatagagagatttattatatgtgattctaactcaattttattcacattaatgaattggtggcatcataatattaatataatttcatattaaaaaagataaaggatcaatttattccaagactaactgtaaaagaactattctttatcctaatcattaattttcttgaaatttaatggttaagccaacttctcataaaaccattagatttaaaaaaaaatgacaagcaactctaaaagagttacttttgaaataagtttatccctcaatttctaatcatatattagtaggataaagttatctgatgacaaattatggaatattgtaaaattaaatttgttttatactctgtgcaaatgtaaattgattcgtattctttctaatttttttttatcaatttatctataatatgctaata

SEQ ID NO: 96561 - DNA, 398 bp, Glycine max
  unsure (1)..(398): unsure at all n locations
agctnttaaccttgacttggtataacctcttgccagtttgttntgttcccatgcttactaaagtgagacaaanagctagtgcaaatcaaaactccgatatctcatgggtgggatggatgaatgcatgatggaatgcatatgacacagatgcaatctataatagcggnggtccggngaatctgtccccatcttagacacaacgtctaggggtagcaaaatgccccaacgtacgtttttaagaaggcgacacgaaccctccgttgttttgtttacaaaagggatcaagacagaacccatatgtgatgcctatgcaaaagacacaatgcgggaatgtacacagtatgacaatattcactgaacatcagcaaaagggtatatgatacttatgcatggcagtg

SEQ ID NO: 96562 - DNA, 446 bp, Glycine max
  unsure (1)..(446): unsure at all n locations
tattaaacagatctcttagttaaattaagtggctataatgattntcttataagctttcttcaaaacaagtattttaattatatgtagttntttaaaagaaaactctctaatttctagctttttccacacaatacatactcacacttaacatatagaaccctttcacttaatttcttcttcacggatagcttgttttactcacacctctcaaattgatcaccttcattatgcttgcaacctccacagatcatctaccaccacccaacataaaccaacctctctttttcttttctcctcaatataacccttcaattagccaaaccatccacaagctgacatgcatgaacattttccttctttntattccctaagccaagttcttcaatagcttaagcaggtgttcttaactcgtcaacagagcatctccttctcgtaatataagaagc

SEQ ID NO: 96563 - DNA, 431 bp, Glycine max
  unsure (1)..(431): unsure at all n locations
agctntanaagagaggagtgctagtgatatattatttatacattctatctaatacattcttaatgattaactgaaaattaactgaaatttattataaaaaatgagaaaactatgagtgaaatctattcattggaatgcacttgtataattctattttttaaataaatttgaattaataataaagaatgaaaaaattactcanaagaatacattcattatattgtgtaattggtcaagtatagaatgcatctataataggtgattcgcctataattggtcaagtatagaatgcaacttgacttttgacttttgtcaagatcaataaatgtttcatgttgtgctagacttatatataccttcttgcaagaagatgatagccgaataaaacaagttcagattttataagagcacgtgaggaagattcttgtttc

SEQ ID NO: 96564 - DNA, 448 bp, Glycine max
  unsure (1)..(448): unsure at all n locations
cgaatcttgaagaaggatagcanataaatgggtaaggctgttaagattgaattaatgagggttattctaccccccattgatagatttctttgcttccattttgtaagtttagcctcgcatttgctaataatgggctgccacacagacctatttttagagctgacccctacaggaattccaaggtaagagaatggaatatccatttaactacaattgagagaagatgctgcctccctacaccagtcctcggatttgcccaaacacccaaattttctcttattgtagtttatcttaagaccagagaccaattcaaagcttttcaggatacactntagaattttccccatatcttctccatatgcaatggccaccttcacgatttgaaatcaaataaagaatggttggtggtgctntctcttgtgtccagcaatttctttggaagaacatg

SEQ ID NO: 96565 - DNA, 422 bp, Glycine max
agcttatcctgacattgtttcattagcctttacagtccaacttgctcaactcactcaaattactagacaatttaaaataaatacagtgactatatgcatgtttaatattaaagtatattttctttatattattagtttacatgtagataagatttaataaatagtcattaataatcacaatcttcaaatcaggattaccactaaactaattaattgttacaaatcaaatcaggatcattaattttcgtgaccttgtttgaacctattgtaacagagaatggcaagtatatgagttgtctcattcctttcacgcagtttgtttttgtcttgccttggcattttctcgggctgttcagtgaccaccatcacttggatgtcttgttattcgtttggcactgcgcttttgggttagttagccacac

SEQ ID NO: 96566 - DNA, 456 bp, Glycine max
  unsure (1)..(456): unsure at all n locations
tgtggatggtggtcaatcccagaggactnttgtgtatattaatgatgctattgaagccgtcttattgatgattgtaggttcccatatgaaactttatatattttaagtactgatctgattgtagaagttcatcttttgactattattcttgtttcatggttcaactaaatgtgaacgataatttttaacaggaaaatcctgccagggccaatggacatatttttaatgttggaaacccaaacaatgaggttacagttaggcagcttgctgaaatgatgacacaggttagaggattaagtttgattgtttgacccttttagaatttcaacatggtatttgggaccgttcaacatttatttttgttcaattatgcaggtttattcaaaggttagcggagaagcacctctggaaaaacctactattgatgtgagttcccaaagaatttatggtgaggga

SEQ ID NO: 96567 - DNA, 432 bp, Glycine max
agcttggtggatcaaatggccttcaaataattaagaaagggggggtgaattaattattaatgagcctttactaattaaaaaacttatccttcttaatgttactagatttaattaggcttttactactaagttaagaaagtaaagaacataaatagaaacttaatcaaaagtaaaagtgataattaaagtgcacagcggaaattaaagagtgtagggaagaagaagacaaacacaagaattttatactggtttggcaacaacccgtgcctacatccagtccccaagcaacctgcgattcttgagatttctttcaaccttgtaaaatcctttacaagccaaagatccacaagggatgtaccctcccttgttctctttgaaaacccaagtggatgtaccctccacttgaactggtccacaagagatgtaccctct

SEQ ID NO: 96568 - DNA, 440 bp, Glycine max
  unsure (1)..(440): unsure at all n locations
tagccatagaggggatggacatttccaggttttggagatgatcaataacaatgcctataggttggacctcctagaagagtatggagtcagcaccacttttaacatttctgatttaattccttttgcaggtggagctgatattcaggaggaagaactaacaaatttgaggtcaaatcttcttcaagggggaggggatgatgcaatcctccctaggaagggaccagtcactagagccatgagcaagaggttccaagtggattgggctagagttactaaagaaggccctagggttctcatgaaccttanggtagatttcaaagcccatgggccaaggttgggtccaattatctttgtacatattagattaggatgtcattatatgtggtccttgtatttagggctccataatgtaggtagggtaccctagaaatataggattt

SEQ ID NO: 96569 - DNA, 155 bp, Glycine max
agcttgcacacgatgtctatgtacagatgtgccggcgggagaaccaagaacgtgctacgctgctggcctcaatgggtgcctttaaaaaagcgagacacgaccgtcctgagaacacgatgccctctgaagctgtgacataccgctgctcgaacact

SEQ ID NO: 96570 - DNA, 308 bp, Glycine max
cttgaggaccaagctgagactatcttgcttaatctgagcttattaggtaatagggcgagacaaagatatctgatatataccttctattatatctgagtaatatcagtgtggcacacgagactattgagccatcggctgggcttaataaaccctgatgaccatgggaaatatacttcagaacttctcattctgcatatctatagttttatcgaagcgttccatagaacaagaatcaatgtggatcagaggctctctgtctagaagtcatgactactaatatctgcggcgagaatgactctaaacataac

SEQ ID NO: 96571 - DNA, 445 bp, Glycine max
  unsure (1)..(445): unsure at all n locations
agctnggagagattgatggngacccggtgttgagaggaacgaggataatggctacgtgggagtacgtgagctcagtgaaggtgggcaactgaggatggtgggtttatgtgtgatctgtggatgtggagagttgacttgcaccatcgcccgaccgccacctagtaccacatgtgatgggtaccccataatcctacaagcttgaaatgaggaagtgtggaagggtgagacttcctacttttattcgttgaccacagagtggtacctggagatatgtcgcggnggttaggagaccttggggacgtcaggtggggtgctatttgccaaaaccaagcttgaccaatcccgacccaacctgtgcatagtcagtcagtgagaacctgtgatgtacctaaacaggcgaactcctggcagtcaaccgattaaagaacaaagaccacaaagcaag

SEQ ID NO: 96572 - DNA, 475 bp, Glycine max
  unsure (1)..(475): unsure at all n locations
agcttncctcaccatattcatgcattgcantttgcataagtcatttcatcaccatgcatatgcatctaataggttttttgcataccatttgttttcatgtttagtcatgcatgatccttgcattttcctctgcaaaacaaaagcaaaaaaggaagcatgaaaattcatgctgcattcttagttgcatatgttcggtaccatgaaccaaccatgttgggatcataaacctatttcacttaaaaacaaaatgattgaacatggtacctaatgcatggttgactaaaaaatgatgtttcttcaggcatctcaatctcataattacattttccatgcataacatgcgtattcccgagtctttcatctctgtgaaatgttgtcaatntattggcaattgaaaatgccattccttgaattaccgggttgaaccaagctcatgcttttatganaagggttatcaagtcaagttgaagcatgg

SEQ ID NO: 96573 - DNA, 396 bp, Glycine max
  unsure (1)..(396): unsure at all n locations
tggtggcaggggttggtggttggggctcttcggtggacaacattacaaactttggcctttcattgcacacccggaaccattcaaccagccggaacctaaggctgaaataattaacattaaacctcttcaacctcaccggcaaaatcaaccacaagagaacaaatatgacctctccagcaacagatacaaccctggatggaggaatcaccctaacctcagatggtccagccctcagcaacaacaacagcagcctgctccttccttccaaaatgctgctggcccaagcagaccatacatttctccaccaatccaacaacagcaacaaccccagaaacaaccaatagttganggccctccacaaccttccctcgaagaacttgtgaggcanatgactat

SEQ ID NO: 96574 - DNA, 463 bp, Glycine max
agctcgttagataaaataagtacaactagatgttattctctaagttacaacaaagactacaagaagacaaaaaaaaaaaaaaggcaacatgtatttatgtagaacaatattggaagttaggaatatcacatttgagaatctaaaataacatttaaaaaaaaaagcgatgttgccaaactggttagaagaaatggtgcgctatatccaaatttaaacaataattaaatttggtttaaaaaccattttaaatggtttggtctttctagattaagttcaatttggtattttgtttggtttggttttgtaaaaaaaaaaaagaaaaaagatgaagaagaagatatcgagggatgcatgttttttggttgttgaatatgattgcaagagtatatattggttaatcactaagaattttaaactccttatgtgttggtactcatagatatgttatcctctcacaataata

SEQ ID NO: 96575 - DNA, 382 bp, Glycine max
  unsure (1)..(382): unsure at all n locations
acaagagcttatttgtactangatattcatataaattccacaattaggcaaagataataatgattttgtgaaaatagtgtaaggcctaaaaacaaactatcaaaattaacaactaaaataaaataaagttcttagaggcaatttatcgaacaatttgtgggcaaaactaagtttactgcagatataaaagagatgttgggtgtttcgcatcctatactaacccttgacgtaagactaatggtatttcacaattcaatgttatgttaagtgtcactctaatccactattatactgtaaccaagatttctcatgtgagagggctaaaattacttaactcaactcttaatctcatagtaagctaagctaacttatttggatcaaa

SEQ ID NO: 96576 - DNA, 420 bp, Glycine max
  unsure (1)..(420): unsure at all n locations
agctntgctccatccctagacataaaacctattatgtgttcctctccatttctaagntcaaaagtatnttccaatgacaattcaaatcacaacatcaagcaaagagtgattaagccaaaacaagtataaatgcatagaagagaacacttaataatgaacaataaacagattaataatcaaaatgtaaacataagaacgggttcactacatcaaccncaaaataactacatgactacaagaagaaaagaagacaatagatgaaaaagatgatgaaaaacagtaggaaagccatgaagggcaagagagagctttcccgctgcaacctataaccataaatagtttccctaaccaaatatgccttctatntgcatccttggtgattaaatagagctaatgcactgcactattgtttctgcataa

SEQ ID NO: 96577 - DNA, 444 bp, Glycine max
  unsure (1)..(444): unsure at all n locations
agaagctagagcttagctactcacacccctctaatgactaagctcacctncttgagaagcttcctaaagaagctagagcttagcaacacacacctctctaatagttaagctcactgtggcgtccctaaattaatgactggtttaatagtaataatttaaataacaaaaaccatggggaaattttttttcttcttttcccttttcatatctttctctttttcacaataactaggtgtagaaggaaaatcctcactataaagtcctgaatggccagttcacaactctattcggagtcagttctttcttaccgttcataattctctaaattattntgctgtttcaaaaggaagaatataccagccattactttaggtcgtcacgtgaaaataaaaggataaaatacagtcaataaactcttttacaaataaagttgctaatgctttc

SEQ ID NO: 96578 - DNA, 473 bp, Glycine max
  unsure (1)..(473): unsure at all n locations
agctntcaacaagttccttcacaaataatcttcacacatcaganaactgacaaaaccacccatcatatctcccaaaaccccatacccacgaaatttaagagagaaagaagtccacccaaacctggattttcgaagtcccactcgtagccacgcacttcacgaccccgaaaatgctctcatttcacgatttggggcagaaatgatggccaaaggttgaagctttgtgtggagcttcaatggagaatgagggagaagaaaggcaacgtgagggagagggagagagaaggcttctgcaatgtttactgctgagtgaagagagagagagttgctttttggtttttaaaaggctttttcctcttttcttattantttattcaagctctgccacatgtccctatttgattggagcanaaagggcccactttctctntttgactgtgacccatactcagtcacaaaagtgagaanaatct

SEQ ID NO: 96579 - DNA, 439 bp, Glycine max
  unsure (1)..(439): unsure at all n locations
actcagcttctaaggaagttntctcaagaaagcttctcaaggaagctacctagtctataaatagaagcatgtgtaacacttgttgtaactttgatgaatgagagtcttgtgagacacaactcaaagttcaacttctctctctttttcttccttcaatttcatactcccccctctctctttctctcattttcctccattgaagcatcctctccaagcttcttatccaaggctcatcttggtggtgaagctccttcttccatggcttattccctagtggatggcgcctcctctcacctcttctcctttgtcttccgctgcatctccatggtggaaaatcaccattaaaggacctcattgaagctcaaagatccagcctccatagaagccccacaagcaaacttccatcaagtggtaatcagagcacaagagcttcaagtag

SEQ ID NO: 96580 - DNA, 434 bp, Glycine max
  unsure (1)..(434): unsure at all n locations
agctntcaaccttggtgctcatttctgctccanatcgcgaaaggagggcattnttggagtcgtgaagtgcgtggctacgagtgggacttcgaaatttcatgtttgggtggacttctttctctcttaaatttcgtgggtatggggttttgggagatatgatgggtagttntgttagttttctgcttcatgatggttatttgtaaagactcttgttgaaagcttgttgaaattgccatgttggatgagttaaacatacccattctgttttagggttnttgtgatgatgtttgtgatgtttatatactgaaattgctgatggaaaactgttagagatgaaaggtagaactaacctacggttagaaagtgagaatgtgattgtatgagtggaaaaagagtgacgcttttgagggtggaacggctaatctgaattctat

SEQ ID NO: 96581 - DNA, 413 bp, Glycine max
  unsure (1)..(413): unsure at all n locations
tcctagaaaaccatgaatgggtggctgcctaacttcgttacaagcctagaaagtcctacttgtgcttactagcttatttcagctgtgactctaatacttgtgctcttatcattgaaaaactgcatgcttgtgagaattaattgatttaagcattccatggtattcagttcatatggttgatgcccttgatgaatcaaacaccattttcttttgattggccactgtctttgtcacttgaggacaagtgaactgttctttctttgcttaaggacaagcaaaactgtaaatttgggggagtttgttagtcgctttatatgactaaattntgtatagaaatcattttccaaagcttgtatagttccccaatttatggttattttggagtaaattntgtaaataaatcttggtttatg

SEQ ID NO: 96582 - DNA, 452 bp, Glycine max
  unsure (1)..(452): unsure at all n locations
agcttcaacaaataggttcggtgtcggattattacctttagtttatgtctctaactaatagatctctgggattatgtaatgaagctttccttaattgtttcattagtggtttaaatcctgatattagacgagatgttgttgctatgtgccctcctaccttattgcatgcagtttctttagctaaactntttgaagaaaaatatggtcctgtttctaagccattttgaaattcttatactcacaaatatttccaaatttctgcttcccatgctcaaccaaaacacaaatcaaatctagtttacctccacttttatccactccaccagatcctccacttcgacccttgaatgtgaagaggattgctcatgctaaaatgcaattgagaagganaaatgattgtgttatttctatgatgagaagttctctcttaatcatagatgtcctaatagaca

SEQ ID NO: 96583 - DNA, 380 bp, Glycine max
  unsure (1)..(380): unsure at all n locations
tcgatttaactgccccacttcattaagcaaatgatattcactttccacggagtacatcccatttgcatcccccttccaatccattatctgcgataagctgaatcttcaaccccttaatgtcctccattaaatatatggtaactagttccattcttcccttccaacatcatcctctgcaactcaaaattccattcccacgattctcccacctgaacgcccatctgctgaatagtgtgatgttgctgttgagatatacagtaaagtctctggtacttttccatcaaagacaaccacccattctccctccatntaccttctccaaactttacgctcgacccacaaccaatatttcacttcacaaccttaatgagccactcacc

SEQ ID NO: 96584 - DNA, 418 bp, Glycine max
  unsure (1)..(418): unsure at all n locations
agcttgactcacaccaaacattattagtttatcatgctttcaacaaattccttcacaaataactaccataaggcataaacctagtaaaactacccatcatatctcccaaacacccaatacccacataatcatgtgagaaagaagtctacccaaacctgaaatttgaagtctcacaagtagaggtgcgcttcacaactccgaaaatggcttcctttcacgatttggagcaaaaatggngaacaaagggtggagccttgatggagcttcaatggtggaggagaaagggagaaaaagcaacgtgagggagaggaaaaagcttctacacttttggctgaatgagtgaggagagagagaacgtggctttgtgttttaagaacacgctttctctctttntttttaaaaatagctgtgcacatgt

SEQ ID NO: 96585 - DNA, 456 bp, Glycine max
  unsure (1)..(456): unsure at all n locations
tcaagaattatggcctcatcaaactacttgtttcccgatggaaattctataaacagacctcccatctttaatggagtgggttaccactactggaaaacccgcatgcaaatcattatagaggcaatagatttaaatatttgggaagccatagaacaaggaccttatgttncctctataatagccggaagtgcaacaatagaaaaacctagagcagattggactgaggaagaaagaagattagtacaatataatttaaaggccaaaaatattattacatctgccttaggaatagatgaatactttagggtttcaaattgtaaaagtgctaaagatatgtgggatacaatacaagtaacacatgaaggcgcaacagatgttaaaagatctaggataaacactctaactcgtgaatatgaactttctatgatgaatgtaaataaaagtatacaagacatg

SEQ ID NO: 96586 - DNA, 424 bp, Glycine max
  unsure (1)..(424): unsure at all n locations
agcttcacacaatttaattttctcaaacttattgtttggaagaccaattactaagtctttcctaactagatgattaagatgatgcatatttatgtgtgcaatcctaagatgccataaaccagtcttatctgtagtatgcttttgcacgttgagcaagtgattaaaatcactctttcctttgtttaattttccaaacatatctttaagatagaaaaaatcaatttgcaacttcatacgttcagcatagggatccttttttatattntaaaatntagtttgcaaagacttgtaatcatccatgttaaaagaaatagaggtacaatcacaactagtggctntatagtttgaaacaagttnttcattttcttgcttcaatttatctatctcactttgtgttgaagccaatttagtgtaagcacattga

SEQ ID NO: 96587 - DNA, 450 bp, Glycine max
  unsure (1)..(450): unsure at all n locations
tagaacttttaaagcacaagttagcatcctttctagatatttcgattcagttcaatatgtaaattttggatagcttcatcgttggatggaaattagaactacggtgcagaattttctttcttaattataatatttgacatttgaggaatggttcgtatattttgatttctagataaaccagaggctacatcataattatntttttgaagttaatgtcttcgtaaattttaggtttggaagggagtctgcaagaggttagactggtattgtagaatagggattagaaagtgtagatttggagttatatatgtttagaagattaaataacaatgcagtgccttaaactaaataacaaaacaatagcggcaaaataattttagtttacagaacataatcaataatataatatatcatacaataagcacaaaggaaaataatttaagggagaaa

SEQ ID NO: 96588 - DNA, 393 bp, Glycine max
  unsure (1)..(393): unsure at all n locations
cgagaaaagctataaactcataccgncttggactccttgtactcattcactgccttgtgggaagcataagtgaaattcacatcatgtcccaattcggggacaagtaagtggctggatcaatgcacatacacatcaggtcagtaatgaaatctttaccaccatggcatcacaagtacaatcaatacaacaaaaacctgagctgccacttactagttggtgtcaaaccacttcgtcatctccatggcaggcacagaggcattacctctggccatggagaagtatgtatcgaattctatctccccattgttcaacccatatctgtgtggaacagcaccaagcatggcggtagtatcaagcatttgatcatagtacgagaaagtgttgttgggatat

SEQ ID NO: 96589 - DNA, 448 bp, Glycine max
  unsure (1)..(448): unsure at all n locations
taaggttcaagagttggagacacccncattatcttttgttgtcttcactaaatntagaaggaagaatgagggagtttatgttctagtttgcaaccttcaagagtgcaaaaataagaattgaaactacaagtgagaaagagcaagaaaatgaagtgaaaatcaagcttagagttgaaaatggaggtcatttacctaagcttgatgaaagaagggctcaacaacacttggaaaagcttggaagaagagtggaaatggtgcctccttccctcttgaccagcttgtgaagaagaggaagaatgagcaactttggtgagttttggagtctaaatgaacttatagaagaagcttagagcatgttccattgaattattgtgtaggcttatcttaatcactcaattctgaaccatgaatgacccatgatcagccatgggaaatgtgtacatcacta

SEQ ID NO: 96590 - DNA, 433 bp, Glycine max
  unsure (1)..(433): unsure at all n locations
agcttagccaacatgtgcgcttagcgcacttctaagaattcaaaacccataagagattggagcttatcacctcttggcccgctaagcccagcttaaaaactcaagttacagaatggatctggggcttagcgcangatagcgtgcttagcggtgctacaataaaatttttcccgagaagaagtggcgcttagtgcatcatccatgctaagcccactagttaaagttcaattaccgtaaagatgcagggcttagcatagtgatgtgcgcttagctgaactattcagccaaccaatcaggggtctctgcgtttagcacgagaaagctcggcttattgcgtgaagactgagcgcttagcgcaaggtctgcgcttagcggataaacaattgcaaaaaaaattatgagtctntttctgtctatctcttcacacaagctt

SEQ ID NO: 96591 - DNA, 433 bp, Glycine max
  unsure (1)..(433): unsure at all n locations
ctttaaccttgacttggtagaacctcttgccggnttgatttgttcccatgcttgctaaagtgagacaaaagctggtgcaaatcaaaactccgatatctcatgggtggaatggatgaatgcatgaaggaatgcatataacacagatgcaatctangaatgcgggggtccggggaattcgtccccttcttagacacaacgtctaggggtagcaaagtgccccaacgtacgtttttaagaaggcgacacggaccctccgttggtttgtttacaaaagggatcaagacagaacccatatgcgatgcctatgcaaaagacacaatgcgggaatgtacacagtatgacaatattcactgaacataagcaaaagggtatatgatacttatgcatggcagtgtgaaaaatggcacgcagcgtgtttgctcgtgcccctatt

SEQ ID NO: 96592 - DNA, 55 bp, Glycine max
tctatggtgacatgcatagcacaatcgcggatttaaaccttctggatgcaaagaa

SEQ ID NO: 96593 - DNA, 395 bp, Glycine max
  unsure (1)..(395): unsure at all n locations
gcgcctctaccgttcatttaaggcgcattctcacctaataaacgataaaatgaatttcaaccgatcatttgtgatgccatctgatttaatcacttttaaaacgaaacctatccgagcgttcacgctataacctcgggtaaaccgaaaacagtgagatattaataatataatcagaatatctctgaaaataataataacataatcagaatatctctgaataaaataaccaaaaaaaatcaatcggacgctcttctttgaaagtatcggtgaatgaatngattaataaccaacgtgaaactaagactaaaatagactcacatatcaagtgttgtccgaaaaatcactaaaaaccgtattagggccaacgccttaaacggacctctctgcttttatcg

SEQ ID NO: 96594 - DNA, 441 bp, Glycine max
agcttcaattcacggagcttcttcttgatctgcacgtacttctcgccgccgggaacggcctccttcatccacttcggcttcggaagcggcttcttcttagtcccgacctccaccgagtacgcgctctccgattttaacgcgaggaagtccgacagcgacggcgactcctccgccagccgcgcccggagccccgccagagtctgcgggaactgcaacggcgcagccggcggcgtggtcgtcgaagatgaacagaagagtctcgctgcgcatttgatgtttccggcgacgcttctgacccgtgaatgcatcaccatctctctctctctctctctctcttacggacaatcacagatcgcgtaacggagatagagaaaaacataaggatgaagatgcacgcgacacgcaacgcccacaccaaccaccctcaatatgggcctgagc

SEQ ID NO: 96595 - DNA, 469 bp, Glycine max
  unsure (1)..(469): unsure at all n locations
gcttataagaacaaaattgcctcaatcattttcaaatatgcatgttaattaagacgcatcaacaagaatcaagccaaggctattgtgcaagcaatcaatggggcaaaacacaccaaatgattatgatgatggatggctcaaattctcacaaaggtaaactcatcactttcaaattgagctttcaaaactatcatgacatgtagagaagaatcaaagatttcaagtcacaaaatgtcaagaacttttattttcaaaacaattacccatttcttgaacatatcctataattcaaagaanaacatgcaaattcgtacgtgcacacaanaatgacccaaaatattaaactgaaaatccgacgaaactaacaacattaacaaattaacacaactaacaaattaacaaaacccacataactagcataaccaatgaacactccctctcatacttaaacaacacatngtcctcaatg

SEQ ID NO: 96596 - DNA, 449 bp, Glycine max
tttcgcctgacacacaatatattagggtttattgttagtaaattataaattttggctactaaagaaaatcaaataagaaaactaaaatacctgaatatccatggttctttaaagaggaaaaagttgagttagttaacattatcaaaaagcactgtatgagttatgtaaatgaatgtaccgaaatgaaatacataattagaaaattacgttagacaatgttaattaattctccttcatcatgaccattacgattaacatgaacgtcatcagcttcttcttctccaacgacattaggagtcatttgtgtggacaaaggactaacataagtgtccatgtatgaatcatcatcttctacattaacaccaattgttttcccgtgtagaaccacagaccacctttcatcacaagggtcttgcacataaattacttgcttagcttgttctgccatg

SEQ ID NO: 96597 - DNA, 407 bp, Glycine max
  unsure (1)..(407): unsure at all n locations
agctctttccacaagcaaaaaatagcttgtgtgcaagtttaaatattcttattggagaagctaaattttggagccaaaaggctgattttaacatatgcatagctaattttagactatgggagaaagtttatttcattgttccttctaatttttttttctcttgcgggtgaatatagagaaacttatccaaccaggacctttgagaagaacaatacagtgtgaccaattccacaacttaagcaaaataacagaaacaccctacagtcctttgttgaattgcatcatcaatttctcacagcaaaacctccccacgcccacaaaagtttctaatcgaagaatgcaaccacaagcacaattcatacaaatacactcacgataacgaagaanaaaaaacagaatttgaaaag

SEQ ID NO: 96598 - DNA, 452 bp, Glycine max
  unsure (1)..(452): unsure at all n locations
tcttatggatcaagttgatccataagtcacttgcagatcatcttgatctatattaagcttgnggatcatctatatcaactgcggatcaattaaaacctatgtagattaactcattgcatatgtggatcaacctgaatgagttgggtgcacaaaaatattttaaaaaatatacatggatatttttgtcttttcacgttaagtgctgggtacatcaacaataataatgggtgcacctagcaacacccaatatacttatgttaataaagaggaatagtggggtgaataaaaaaaattaaaaggaataattgggtaaaaaaataccagaaccacaagggaagtgacagctattctttgttcaaagttcaaagcatcaacaacctatgcttttcgtctgcacaataccccaacatgccaattaagtttatgaggtttagccttccattatgcttact

SEQ ID NO: 96599 - DNA, 456 bp, Glycine max
  unsure (1)..(456): unsure at all n locations
agctngctgtatttatagaaacttcttctgttataaagtcaggatattnggnctcaaaattgagagcactgaccccagatagagtcttggcatatcaaaaagagctaaaggaggttagtagtgctggcataatttatttttgcaataaagtctgggggtgttattactacttctgtctttcactccacctgttgcatgttttaatctcttggaaagtatgacgcaatcactatatagaattatactcggtggactttgattgacattgctacttatcatagccactagcccaatagtattcctttttctccctcattcatatacatgttatattggtgggaaaacaagtcccttcattgtgatcttttaactgaagtaattaattggttaatttcattagtaagagtgtactaatttctgngtgttttcctgctatagtatntataatatgtgaaa

SEQ ID NO: 96600 - DNA, 460 bp, Glycine max
  unsure (1)..(460): unsure at all n locations
atatggaaagttaaatcctctggtggntcttccttgtatgtactttatgtaaatacccgnatatctatttaatgatgttttatgtgttctctgtgttatcaatacgtcattttagtgtgcttttgcctcgatcacgtaaatgcatgctttgttaggatcattcaacaatgggaactggtttgattcttataacttgataggacaaggctagtttatcgtattatcatgagggatcggngtacgggaacctagttgtttgtatgtttgtcttaatgcggttctggtcgagtttagtccaacaagaggaatatgggaatgatgcttgatcaagagtaggctagactatcacgagggatcggngtttagcatttcaggagataccatagaacacatggaagtcaatgtgttnttagaaaaaaaaaattccgcatgattntattttcttttattcgntatttgg

SEQ ID NO: 96601 - DNA, 467 bp, Glycine max
  unsure (1)..(467): unsure at all n locations
agcttcctttacaacanagagaagagcaagatgaaagattgcagaaatacaagtagtggggatgtctcctccacctctaggaccttacaatcactcacaaaatcatctcaagctctcaggacagcttcctcttcaagctctggtctctgcagatcttcacacaacaaaatctctcaaactctttggaacttggacctttctctctctagaactctctagacatgtagaagcttcaagaaaagaccaaactctcatcagaaatctgatttcaagcttaaataggtggctttgttcgtgctcgtgcgcatagcgcaattctaaaccgcttagcgcgcattggtgaatatcggcttagcgcaactnttctcgctcaacggatggccctttgctcagcgaacaagcacaactcatccttcnttcagaatcttcctcgtgctttgccgaggaatgttgcactcagtggatgg

SEQ ID NO: 96602 - DNA, 423 bp, Glycine max
  unsure (1)..(423): unsure at all n locations
gcacacttatatcccataaattgtcggtgataaatttgaaatgaataatcacatctaaaacattctcacaccattatttgtccagttgaaaatgcaaattacgcccctcaataggcctatgataaaagctggagtttatacctgcagatggcttgctacgttttctcttgtaagtccttcgccattcatcaagtcgagtattctcttggggaaagcctttgcaataacagttgaaacctcatgttaggagctacaaaatccacattaaggtgtcaaataaacatactttaatgtttcatgttctcaagtcaagcaaaattagaaaaaagtaaatattctttatcacanactcactgtcgattcccagatcattaacaacaacaagaaatttcctatgcaactcgacatcccatactaaacgag

SEQ ID NO: 96603 - DNA, 462 bp, Glycine max
agcttccttgagaagctagagcttatctacacacccctctaataactaagctcacctccttgaaaagcttccttgataagcttccttgagaaacttccttgagaagctagagcttagctagacacgcctctctaatagctaagctcacctccttgagatgagaagctagagcttagctacacatacctctctaatagctaagctcacttccttgagatgagaatgctagagctgagctacacaccctcaataatagctaagctcacccccatgccaaaatacatgaaaatattaaaaaagtccctactacaaagactactcaaaatgacctgaaatacaaggctaataccctatactacaagaatggacaaaatacaaggcccaaaataaagaaaaacctattctaatatttacaaagaagaatggacctaaccttggcccatgggctcaaaaatctaccct

SEQ ID NO: 96604 - DNA, 360 bp, Glycine max
  unsure (1)..(360): unsure at all n locations
cttgactagatatttctttctgatataaacgagcttatcctacgttattactccaaaaatcagcgcgaatcaagtcactcccgcaatttatctttagcacgcattgtatgttggtctccgtctttgtcacgggaagccggaaggttcacgtnaccccaaatgtgcaagtaagaagagataatcttccgggctctcatgtctgtaaatgcattcatatcatgcatcgcataagtatctcttcatggcatcataatgaacatatcattcctgcattcgtccgttatcatattccagcctcacattttgtatgagctattgcatcatcatgcaaatgcggtcaacaaacttttttgatctaca

SEQ ID NO: 96605 - DNA, 52 bp, Glycine max
  unsure (1)..(52): unsure at all n locations
agctngagtgcacgctgagccttgcacctttctctctacgcatgttacagac

SEQ ID NO: 96606 - DNA, 202 bp, Glycine max
  unsure (1)..(202): unsure at all n locations
tganatgcacgagctcacgggcgcttgcgagtcatcttgttttaacccggacacgagacgaagaccggatggactgtcttctcatatgccacacgagatgtacatatgatactttacgccttgacctggatcacatagggcatgctaccaatggttaatatatggtatatacgcgtcgtaccctacttgcataccatgacca

SEQ ID NO: 96607 - DNA, 243 bp, Glycine max
  unsure (1)..(243): unsure at all n locations
agangcacgcnagcttgcttgagcacggcatgataacttccttcntgttgtattcattgagctccccgaaagatcaagggaatgattcttgatacgaaatacagatagatccgacacatctctattgaatacatattgcgagaagaactgccatgtctccaaccgccatggactaatctaggcggaacatgagatggtccatttgggcgataccatgagaaccgccttcctatgagacgaatg

SEQ ID NO: 96608 - DNA, 452 bp, Glycine max
  unsure (1)..(452): unsure at all n locations
tacaatgtacctcactggtcgcaactccacaggctcgtcaaacccaaggctcgttctnggtgaatctcacaagttggntctccaaatgcaaaacctaaggtacacccttggagagtcctatagggtcacatattacatctccagtatgtgccgctccacgagtgagacatatgcaagagcacgacattacgtctctaggacgtaccattccatgagtgacatgtatgtaagagctcaacattaagtctccaagatgtgccactccatgagtgacacatatgcaagagcacaacattacgtctccagtatgtgccactccacgagtgacacgtatgcaagaacacgacattacgtctctagtacgtgccacttcacaagtgcacatatgcaagagcatgacattacgtctctagtacataccactccacgagtgacacgtatgtaagagcacg

SEQ ID NO: 96609 - DNA, 415 bp, Glycine max
gatatgcgaggatgacttcctgaggagatcagatttggtacggccatgtcctcctggtttccgactaagaaattggcgagtggaggagcgcccagacgtttacgccacaagcataatgtaaccctttgtagctgtaaaactctacagctgggcctagactttagagtttccttttgataaggctttatgccttttggttcttgaaattataatataaagagctttcttcatctgtttctgcgcctcttctcattctcattcatttgcatatttatttctttacgcttaaaaacaccaaatctgacgatgagttcatcgaggtactaatacccgggacccaaccatcatattcgagcaagaagcgggtcatatggagagtgataggactaagatgtggggcttcccccgagctgga

SEQ ID NO: 96610 - DNA, 458 bp, Glycine max
tctagaggaagcttctagaggaggcctcttattgaagcttctatagaaagctacatgaagctgcctcggtaaaaacactgcccagccttcattaaccagtggatcttctctaaatttggtctacaactttgcaaaacaattttccaagatctgaccgttgggatctttgagaagatgtctggagtgtgctagaagcctcttaatgaagcttctggaggaagcctcttaatgaagcttctagagaaaactacctgtagctgcctcggtagaaacgctacccagcctttgttaaccgttggatcttctcgaaatctggtttgcaacttcacaagacactttaccatgatttaaccgttgggatctttgagaaaatatctggagtgtgctagaagcttccgttcccaagagcatcccttatttaagcatttcagcctttgctttcttgtagcttatgaaaa

SEQ ID NO: 96611 - DNA, 458 bp, Glycine max
  unsure (1)..(458): unsure at all n locations
agcttgcccagagtatgagtccacggaggttatgcttaccacctcanaagactggaaagcggtttctaatgactcctctgcggcctccacataaggcatagaggatgggcagctcaccaagatgtcttcttcgcctgatacgatgaccagatgcccttccactacgaatttcaacttttggtggagtgtagagggaacaacccccactgagtggatccatgggcaccccaacagacagctgtagggggggttgatatccatttttggaaggtgacttgacaggtgtgagggcctatctgtactgggagatcgacctctcccctaacctctcggcgggtgccgtcgaaggcacgaaccaccattgaacttggctttaagtgggaggcattgaatggtaatttctccanagtgctctntggcattacgttcaaactggaaccattatcgatgagcacttt

SEQ ID NO: 96612 - DNA, 440 bp, Glycine max
  unsure (1)..(440): unsure at all n locations
tatgcgcatgttttcttacgaacgttcacttgcggaagacattctattaaccgaanaaatgcacccatatacaatcaaggcagctttgttacctaaattatttacacgtacttccaaggtgtatttgttacttacatcacacacatctccttggctaaattcacatacatgcatactccaagcattttggggtaccaaaaattgcacatgtgtacatcttggtatttctaatacctatacatacacaaacttcatgatgaatcttgactatctacacaataaggtgctacatttcatgccctttttttcaagtttttgctacctaaagccgcatgcaaatttaagcatattttcctttgcttgactaaaatgtattcaaattatatatatatattttggaatatggttttttcatacaacattcaacatatttatatata

SEQ ID NO: 96613 - DNA, 382 bp, Glycine max
agcttgtaagcctaagatctgcttcattattgtatttctttgcttcttgcaagatgaatggcatctgaatggatattgaagagagagatagaggagacgcctacttaaggagaggatgagtctagaagaagctcaccaccataataagccatggataagagcttgcgggaagatagagatgactgattggagagagagagaatagcacgacattttgtgctccaaatgagctatgaaatctgaagtttgatattcatatgatcaaagttgaaaataattcacacacatgacctctatttatagactaagtgtacacataattggagggaaactcaaatttcactcgaatttgatatcgaatttgcggtgcccaacttggagc

SEQ ID NO: 96614 - DNA, 383 bp, Glycine max
tgactcttcacaatagactatgaatttcaacattgagatacattgggaagcagagtccaatatcttgtagtcgatcacaccatgttcaaatcaattggaatgttgcctactcaggtataaacttttgagatcaattgggacgctgcagattcagctgaaagcttttgaaatcaaactttgccactggctatcgattataggaaagtggtaatcgattactatagaagcaaagactttggcgctgatgcttcgatgacgccacatgatcatgatgattggactccttatgaaaatgcgcttgttacggttgattcacgagaacgagacacaacatcaagaagatctctagtgcttttaggaagggaattccaaattgaaactgc

SEQ ID NO: 96615 - DNA, 434 bp, Glycine max
gcagcttgagccaattagaacgacatatctttttactctgatgactgattgagtcctggcatatatcgagacgctcaaaattgaatggtgaagctctgagcccattcagacgacaatatctttttacttggatgtctgattgaggtccggcatatatcgagacgctcgaaattgaatggtgatgctctgagcaaattcaaacgacaataactttttactcggatgtctgattgagtcccgtcacatatcaagatgcttgaaattgaatgttgaagctctgagcaaattcaaacgacaatatctttttactcggatgtctgattgagtcccggaacatatcgagacgctcgaaattgaatggtgaagctctgagcctattcaaacgacaataacttttttctcggatgtctgattgaggcccgtgatatatcgag

SEQ ID NO: 96616 - DNA, 451 bp, Glycine max
  unsure (1)..(451): unsure at all n locations
ttcgagcgtctcgatatatgacnggactctatcagacatccgagntaaaaggtattgggcgtttgaatttgctcagagcatcaacattcaatttcgagcgtctcgatatattacgggactcaatcaaacatccgagtaaaaagttattgtcgtttgaatttgcatagagggtcaacattcaatttcgagcgtctcgatatattacgggactcaatcagacatccgagtaaaaagttattgtcgtttgaattggctgagagcatcaacattcaatttcgagcgtctcgatatatgacgggactcaatcagacatccgagtaaaaagttattgtcgttngaattggctgagagcgtcaacattcaatttcgagcgtctcgatatatgacgggactcaatcagacatccgagtaaaaagttattgtcgtttgaattggctcagagcatcaacat

SEQ ID NO: 96617 - DNA, 465 bp, Glycine max
agcttcaatggtcgaagagaatgagagagatatatagtttggcgtgacaattgaaggagaatagggagagaaagtgaaatttgaagtgagtctcacaagtttctcattcatcaaagttatgacaagtggtacacatgcttctatttatagcctagggcactaactaaatgaaagcttcattgagaagcttccttaagaagctaaaagttagctacacacccactctaataactaaactcacctcattgagaagcttccttgagaagatagagcttatctacacacaaccctctggatgcaatcctactccctaagggcattggatagaacactccaagaagattgggctatagatgcacgagaaggccctatggttctaatgagccttaaggtagattatgggcccacaagctaagtatgagcccacttatctttgtacataccttgcataccttaatatcgtct

SEQ ID NO: 96618 - DNA, 437 bp, Glycine max
  unsure (1)..(437): unsure at all n locations
nagcttcagaattcaatntcgatcgnctcatatattacaggtctcaatcagacatctgaggaacaaagntattgtcgttctgaattgctgagagcttcaacattcaattttgagcgtctcgatgtattacgggacttaatcagacatccgagctaaaagttattgttggttgaatttgctgagagcttcaacattcaatttcgagcgtctcgatattttacgggactcaatcagacatccgagttaaaaagtattgttgtttgaatttgctgagagcttcaacattcaatttcgagcgtctcgatattttacgggactcaatcatacatccgagtaaaaagttattgtcgtttgaattagctgagaagcttaacattcaatttcgagcgtctcgatgtattacgtgactcaatcctacatccgagcgaaacattatt

SEQ ID NO: 96619 - DNA, 337 bp, Glycine max
  unsure (1)..(337): unsure at all n locations
acaatcaacgacatactttactcgatgctgatggtccgttaatcaccgctaaatgatgtgatgccaaacctcgaattgatgttaagctctcagcaaatcaaacgacnatacttttttactcagatgtctgattgagtgacgtaatatattgagacgatcaaaattgaattctgaagctctaagctaatacaaacgatgaataacttttgctcggatttctgattgagacccgtaatatatcgagacgatcgaaattgaattctgaagctctgagctaattcaaacgacaataacgttttgctcggatgtctaatngactcccgtaatctattgagac

SEQ ID NO: 96620 - DNA, 367 bp, Glycine max
agctagtgaaacacctgacatcaagcatgtatgttgtctttcgtcctgtaaaggtgtggattcctcaatagttgaaatgcattctatataacgtatgcgtgcacttaatttataacgctctaaacatgcctcctccatgtgaatattgcccacttgactctattttgtgtattctatacgaatcagaattactcctcttaccttctattgatgtttatgttcatgatactagggagcaacgttcgaagacttgcatatatatataagcattgtgattaaagtctggaaggttgactctgaagatgagttgacacacaggtggtgctctaaagccaaccgatgttgacacaatatgggttcatgttac

SEQ ID NO: 96621 - DNA, 462 bp, Glycine max
  unsure (1)..(462): unsure at all n locations
ntgagccacaatcctgactcaccataatccttaccctcggaagcaaaaaaagaatagaagggaaatttccaatcaaagaaaaagagaaggaaaatttccaatgaaagcaaaaaaagaatagaagggaaatttccaatcaaagaaaaaaaagaaggaaaattccccaatcaaagagtgggagaaagcaaaaagaaaagaaaggaaattcccaatcaaagagtgggagaaagcaaaaaggaaagaaagaaaattcccaaccaaagaatgggagaaagtaaaaaagggaaggaaagaaagttcttgatcaaagaaactagaagaaatatgcagagaggtctttggaccggacaatatctgaacaatacaaaattgtcaccaaatgaacaaaaaaggaaggaaaggaaaccacaacctanaatggtcttctccctttaattaccaaccaaaatcccgtgcgctagc

SEQ ID NO: 96622 - DNA, 336 bp, Glycine max
  unsure (1)..(336): unsure at all n locations
acaagctacaaaaggagagagcaagaaatgaagagccaatggttgatacatggacggagatgaaaaagatcatgatgaagcggtatgtgccggctagttactcaagggacttgaaattcaagctccaaaaactaacccaaggcaacaagggggttgaggagtatttcaaggaaatggatgtgctcatgattcaagcaaatattgaagaagatgaggagggaactatggctcgatttcttaatggtttgactaatgatatccgtgatattgttgagtngcacgagtttgttgaaatggatgatttgcttcacaaagcaatccaagtggagcaacaat

SEQ ID NO: 96623 - DNA, 410 bp, Glycine max
catgagcccacttaaggtgaggggtgagtttaccgcaattgcggttataatgaacgtgtaaggatccttataagatcaaattggggtttattttggaatgttttgtaacatcccatttttctgaagaaaatttaaaggattatttaaaatgaatagagttctaggaaaataatgagatttctgtaattaaataaataaggagaaataattctattgattaaaataatggttttaagggaaataaaataaatatatgttcttaaaaaataaaaaggatgttttatttattcattcgataaggagtaaaatagagttcatttttataaaataaagaacaacatagtaaataatagattgagagtactctaattataaatagagacatagtagatcatgttttttttttacat

SEQ ID NO: 96624 - DNA, 451 bp, Glycine max
  unsure (1)..(451): unsure at all n locations
agcttgtaccgccattgacatctgttgtgtctttgatcccgccattggcaactgcggcactcagcttaacccgccagtacgaacggcgggacgcggagagagagagctgtaccgctgatagcaacggcgggacgaggagagagagagttgtaccgctgatagcaacggcgggacgaggagagagagagcctatgccgccattcctcctggcgggacatgccaacgtggcagtcccgccactgcctcctgcggaacaccttgacgggacaagggccagcgttcacatgcatgctgaatcatttntatgcaggctaggcatgctgaatcatttntatgcagtttatgcaggctaggctagggttaacatgcaagaatcaattttttttgtgatcaggctagttacatgcaccacctcttgtttacactattgattggtaggaccgccctttgt

SEQ ID NO: 96625 - DNA, 445 bp, Glycine max
  unsure (1)..(445): unsure at all n locations
ngactctngactctnnttactttattcttcgtattctttctctnttatttctttcttatctattntatttctaaatataaataaaaacactgaccatggtgattaagagagaaggaggggaggaaaatgttgtaagtttgaatccttccaactaagaaattaacaactaatattgatctttaaaataattaatcattgatgagtgtatttttttttttgttgatagctcaataaattcatctactttcatacgataatgagcgtatatcttttttttaggttattgagtgtatataattattaaacctcataattaattaggagtcaaaaggaaattaatttaacaataaattagtcctagcttcttaagggtgaaaccaagaaaatgttgtgttttatttcttatatataagattgaatgtagtattatattttatggagtaca

SEQ ID NO: 96626 - DNA, 459 bp, Glycine max
  unsure (1)..(459): unsure at all n locations
agcttatccagcctngtggagtcgggtatatntctggtgacaaaattctaaaagggtgggagaattctaacaccctaaaattttgttaactataaatcgatgtttaaatgtatttctcgtgttatttgattatgtgattgacttggatgggttgatgtattgtatgaattagtcatgtgtgatttgcttgatgtggatgttgagttatattaagttttattgacttaagtcgaaattatgagatttcaaattttacttaaacctgttctagtaaaaccacaatcttagattcgctaaccgttggattgtcttcaaatttggactgtagattcataacccaagtattccaattttgaccgttgggatttgcaaagtaacaactttttacatctcccacccatggataatcttgacttttatgtctntctcctagttagttcgagtntccctaatgtctct

SEQ ID NO: 96627 - DNA, 449 bp, Glycine max
  unsure (1)..(449): unsure at all n locations
tatgcgcatatttccctacgaacgttcacttgcacaagattttctattaactaagaanaatgcacccatatacaatcaaggtagcttcattacctagagtatttacatgtacttccaaagtgtatttgttatttacatcatacacgccatcttgtcaaaatttacacacatgcatactcaaagcatttcggggtaccaaaaattgcacatgcgctcatcttggtatttctaatatctatacatatacaaacttcatgatgaatcttgactacctacgcaataaggtgctacatttcatgctctcttttttttttttcaagtttttgctacctaaagccatatgcaaattcaagcatatcttcctttgctgactaaaatcgtattcaaattagaaggtatatattttttgtaatatgtttccttcacataacatgcaacacatctatata

SEQ ID NO: 96628 - DNA, 169 bp, Glycine max
  unsure (1)..(169): unsure at all n locations
agcttntagcacaacagctcaatgtcacatgtcagctccccattgaatagcgtccctgcctttagcgcaatgcaaataaaaacagacttcattggtaaatagtttaaaaacagtccccttttggttaatagtttggaaaagaacacctaaatggtgcgttttgccaatg

SEQ ID NO: 96629 - DNA, 441 bp, Glycine max
  unsure (1)..(441): unsure at all n locations
cttaagcataaaanaagcattgcagtgatttctatagaaaagctaaaatgagtagtttatgaactctagaagaaaactatatcatacccctccccctcaaagcttatcctaattcactctaagcttatgtcctcctgattccagaaatccttcttggttaatgtaggtttggatgtctgtgaacaatttatggatatcagtgatgtaataagagatgaagatcttatggcatccaaatcagactcacatctgaatgggatagatcgtagactttttacatcttgttcttcacataacatccagaaaatggtttcaaacatggttcctagtgtcaaatctaagtggccaagtgcaagagaattgaatcttttaaagcgtaaagcaaaaataaactctaaggaccaaacaaaaagctggtgtgaagatggaagtacagaggta

SEQ ID NO: 96630 - DNA, 192 bp, Glycine max
  unsure (1)..(192): unsure at all n locations
agctnttctattggatgctctgctaaggctcccacctgttagagagaaggagaatgagaagggatttgagccttaattttactgttggtgtgcgagggatatttctccctccatagacattattatgaacatcccaatggtggggatgtgtgaaaataaatgtggaacttggttatcgaatttcacgatgat

SEQ ID NO: 96631 - DNA, 451 bp, Glycine max
  unsure (1)..(451): unsure at all n locations
taagatctgccaaagatgttnggggaaactcanatgtggttctgaaacttaactttgttttgattgtcaacttttgaacattgtgcatagaagcatatttcatgaccctatttaggagtttgggctcaaccaaaccatggcgcttgaaatcaagactaagaagggaaatcgagtcatctcgactgaacagaacccaagatacaaattttctaaatttgttcagcttactaaagtgtgaagaattgaatgcaaaattagtgagacgtttccaaaggtctgtctcctctttactatctcttcctcttcatcttcatcaccaacttcccctctcttccttttcctacctatatatagcccaaaatagtttctaaaatatttcatctatagatattatcgagaaatttgcttagagaccagatccgtgagtgaaaatctagaagtacttagcata

SEQ ID NO: 96632 - DNA, 425 bp, Glycine max
  unsure (1)..(425): unsure at all n locations
agcttgtactagtcatatatatgttacaaaacaacgaaagcaaaaattgaatcgattattgcagatacagaaatacttaaacaaacctgccaattaggagttgtgtggctttntgcaaattccgcccatgtttctggatcaaggccatacttgattgcaggatcaaatatttgctgaccttcattgtcagcaaagacaaattttgaagtcaatgaagacttaaattgtctccatcttgctgcaactattgacnatcaccttttttttgcattttcaccttcagggatatcaaatttgcgctgcacaacataaggagttatgtaacagtatgtaaatgaatcctttaaaattaacttaacaacaaaatcatgaatacaagtgtatttagaattacttaccaaaatatctttccatattaagctctt

SEQ ID NO: 96633 - DNA, 427 bp, Glycine max
tctatggtttctagaatagtcgattatcaaatgtggtaattgattatttcgaaacatggaaagctcctaaggttccatacaaaatctaatcgattacaatatgagataatcaattatttcaaggtacaatatcacaatcaatatgagaaatagtgtagaaaactcttaccaattcagggtagatgtgcccttcatctccacaagcttcttcaacccatgatactcgaagagttctgaaaaaacaaaacctttagtctttagccattccaagtttagaaacatgaagtgaatcaactccttctaagcataattgtacacgtaggacacttcataatgttcctttgaaaaccatgaagtgacctttggagagggtggtggtgatggagaccatgttgtccttttgcccttattggaagagtgacccttt

SEQ ID NO: 96634 - DNA, 355 bp, Glycine max
  unsure (1)..(355): unsure at all n locations
agctngacgccactgagtatttttactattctcttgagtggngaaacaagctatcaaaggagagagctaaaaatgaagagccaatggttgattcatggacggagatgaaaaagatcatgaagaatcggtatgtgccggctacttactcacaggacttgatattcatgctctagatactaacccatagcaacaaggtggctgaggagtatttcaaggaaatggatgagctcatgattcacgcaatattgaagaagatgacgagagcactatggctcgacttcttaatggattgacttatgatatccgagatattgtatagctggaggaatatggtgaaatggatgatttgctgcac

SEQ ID NO: 96635 - DNA, 317 bp, Glycine max
  unsure (1)..(317): unsure at all n locations
cganagattcattgatgaggacattggtgattgcacaatgttcaggcagaatgtggggtgcttaaagattgtgtgccacactagacctgacatttcatatactgtgggaatggcgagtaagttcatgagtgatcctataaaatctcactagggtgtaaccaaaaggatactggcgtatctacaaggcactgccagttctggaattctattgccatatcaaagagagaaggcttgtctacagcttgcactctattcaaactcagactggtgtggggacaacgtggataggaggagcacaatggggtatgtattctttc

SEQ ID NO: 96636 - DNA, 425 bp, Glycine max
agctagctgtgctcaatgtttatgacctctacattcttcaatcctgacaagttaagaagagtccctataaacccattatggctagcatccataacagttacactttctaacattccaatctcttgtggcaagcaacctccaaggtcattgcccgtgaacacaatctcattcatgtgttttatgttcacaatagactttggaatgcaacctgtgaatttgttgttagcaaaggtcacaaccgaggccttggattctccaagagtatctgggatgatagatgtgaaacgattgttgttcataaatattgcatcaagatcattctcaaatagctttggaggtaaaggtccttcaaagtcattgaatctgatatccaagtacttcaagtttggcaatttgagaaccacagatggaaaaccaccaacaaa

SEQ ID NO: 96637 - DNA, 222 bp, Glycine max
acttacaacacttttatgtatggattttccagtcatggaaaggaggaatgggttttgcacgttttggggagaatgttcgtaatggagtgaagccggatgcccttactgttaatgtaattatttatgcctactctaagttgggttacgttagaactgccatccaattttttggagagaattacagcaggaaaggaattgtgtcctgacataatatcacacact

SEQ ID NO: 96638 - DNA, 399 bp, Glycine max
  unsure (1)..(399): unsure at all n locations
tcccatgntaaggatcattagatgggcttcttgcacctccatcaaatntgtgcgcacaantaccttcatttcactctgtcgctaacacactacaccaacatcaacaaccttcacctccactgacctataatacccaaatntgacctataaccccaatctcgtcaccaagcataacaaccaagcaatatacacatgggaccttaacccaaaccctttgcacacatgcgacattgccacctaagccccatagtcgacacaacccctatctaagctgttcatgatgggggttggtggttgtttgagaatggtggaatttgggtgtagggaaataaaggtgatgagaaacaattggtgagtggacaaaatagaaatttcacataatttggtaatgtcaatagt

SEQ ID NO: 96639 - DNA, 466 bp, Glycine max
  unsure (1)..(466): unsure at all n locations
tcaaactcagctttacccacgtgttgtattggaagttgaaggctgaatgttcttttattcataacaggattagtttgtaggtttacgaggtggagaattttagtgatcaactatttggtttgctcagctaaaagaatcattcaaggatccagctgagcaagtacgaagaagatgggatctttcataggtcatatattgccagggaccttgtttcttctagttgggacatggcatatatggngctctgtgatgagatatgtgtcaaaccctaagacattcagagtccaggtgtggaatcctgtaccggcgtttaatgggaggctcaagcacttggagctctatgtcatttcaattggtgctttcatagatttgtgtgtggagctcttacttgcaacccgcctcangttttttgttgggggagccttgaacaccacttacttcaacaactttgagcactcgggaatgc

SEQ ID NO: 96640 - DNA, 495 bp, Glycine max
gatccttaagtcacctgcggcatgcaagcttctagccaaatggacttaccttgaattaattcctttgatagcccttttgagccttgtttccctttccttgttttgaagctcactacaagccttaagtgaaaaaccatgatattaccatatccttaaggaattttggagctttggaattgttttgggaataagtgtggggggtttttgtttcattggacaacttgttttgttggctatgcttcatgatgtattttgggccatacttgatgtacattgtatattggttaaatgttggacatgctgaatgaaatgttgtttctcaaaggccaaagagtaaaaaaaaaaaaaaaaaaaaaatcgaaaaaaaattcgaaaaaaaaaaaaaagaaaagcaataaagttgagtgaataagatcttaaatggcacaagaatgatgaaactcttggctctactcttcatgttaaattttatctttacttcttatattttctttt

SEQ ID NO: 96641 - DNA, 476 bp, Glycine max
  unsure (1)..(476): unsure at all n locations
tatcaaactcatgcttaaattcaattanaacgttcagaaactgctggtaatcgattaccatatatgtgtaatagattacacagnngcaaatttgaattcaaattttaataactgttgtaaatcagttttggccactggtaatcgattacatcctctggtaatcgattaccagagagtaaatttgtttgaaaaagactttttaacttaaatttcttggccaaaccttntgctacttcaattggaattcccttcctatttaatataccctttctaagactctagagactgtcttgatcatccatcttgaatatctttaattnttttgtcttgaataaagctttgagacgcatgtgaacctttggcatcatcaaaacatttagcttgatcctttgtctacaactcctccatagctgattctgtaattcttttgatttgggcatgaaaacctcanatttagatatatatatatatatgtg

SEQ ID NO: 96642 - DNA, 459 bp, Glycine max
  unsure (1)..(459): unsure at all n locations
agctngatcaaaacaattatctaaccattcctatccattcaaatcatacaattgctcattcaaatcattctcaaacactcatttcataccaaacaatccactgcatatcattgtcaaacaattcactgttcaaacacacttttggtacaagcaaacaacttaaagcgctaaaattttaaataactgaaatttaaaataactgaaacataaaataattgaacatcaatcataaaataactgaaaataaaataaaatgttcaagatgcacacaattaaatgtcctgctcatcatgtggatgatcttcattaagatccagtgctggagctgctgatgaatcttggataggctgctttggctccatgactggtgtagatggctgggtctcctcacgagcacgtgtagaggatggctcacgtatctgatctgtggaggtaccctccttctgagccatgtgtgca

SEQ ID NO: 96643 - DNA, 454 bp, Glycine max
  unsure (1)..(454): unsure at all n locations
accttgatcaagcaatcaactcctctntcagaaccatgctatgtgctcgcgactggtttctttcttcccttcgcaacttgagttcattattgctaccccatagagctccgcgaaatttgttccggccatactcttccttgcgagccctcttggtctcttgttcaagggctcttgcggtaattgcattctcttcccgtaacccggcacactccttccgaacgtgtgtagcagccaacttgaacttctccttggcgagttttgcctttcctaactcgcttttgagagcttggacttcttcgtcctcttccggtgcttcaaaattctcttcgctgacgacttttaacttggcgagccaatctaaacctcgtatgcgaactttcagccattcgtggtacccaccaatgatgccattacgaatgcctctaagctcttgatctttccttaacggggtttc

SEQ ID NO: 96644 - DNA, 428 bp, Glycine max
  unsure (1)..(428): unsure at all n locations
agcttgagatgaggaagtgttgaaaggtgaaacttcctgcttttattgntgaccacagagaggtacctggagatatgtcgcggnggtcaagagaccttggggacgtcaggtggggtgctattgcccaaaaccaagcttgaccaatcccgacccaacccgggcatagtcggtcagtgagaacctgtgatgtacctaagcaggcgagctcctggcagtcaacagataaaaggaaaacaagaccacaaagcaaggaggcttgtggtggctggccagctgtgaaacttgattgatatgtgagatatggtctctggtaatcgattaccaagggtgggtaatcgattacaaggcttaaaaatgaagacagggggctaagatggtctctggtaatcgattaccacgggatgtaatcgattaccaggcttgaaaac

SEQ ID NO: 96645 - DNA, 421 bp, Glycine max
  unsure (1)..(421): unsure at all n locations
ctaacaagagtttttgatgaatttaaaagagccatacatctggctagaataacatggaatttatttcaacctttctttgttgcattaagagtatgttggatgaacttatagttgtagctcttgaagaccacgttttgaagttggagttgttgttgtatccaaattagagtttgatgaaatgcaaatgcttcatcttcatgtggttgaggcatacctgggtgtaactcagatcttgctctaataagcacaccattttggtctcacaaacataatctgacgccaaaggaagattgatccttcaagattgcagcgtcaacaaagaagcattatgaattcattagctatccaatttctctctggatngagaagactactgaaaatgagatttctgatgataaggatgaggaagagaacaaggatg

SEQ ID NO: 96646 - DNA, 420 bp, Glycine max
  unsure (1)..(420): unsure at all n locations
agcttgttgacatgtctgtgtacatnaaaccctacccataatgaataggcaaagtctctcctttgccaagaggttacaaaatcctagattttacgaccttntcaagcaaagatgaaaagtccaccgtggaacacgttagccattctatggctcaatgtggggaagccagccaaaatgacttctactgattatagttggttcctggtcactgaccagcacgaatttcacttgatatagagcgatgtttcatgataggttatatactcctcaacaagatatttcggtaaccgatttgatgaacactgagcaatcggttaacaagtcagtcactgaattctctgagagaatcatgcacacgagaagtggaatgtgtagttcctaaagtcagattacgctagtattatagtagggaatatgaat

SEQ ID NO: 96647 - DNA, 407 bp, Glycine max
  unsure (1)..(407): unsure at all n locations
ctacaaatcttatttctgaaaagattctctacggtcttaccaactatttcaacttgcatatcctaacacccacccaacanaaccattatcctaaaattattctaacttccatatccttagttaacaaaccattatcttgaaaaggtattgagtactattacagaaggaaatttgcatacatcatgctcataaaacaatttgctagaagatcaaagtatcataaaaaggcctacaacaacaaaaaagaaaccccatttctcaattttcagcaagttcaacttgaacataagtctgatagtataaatccaaatgcagactagctaccatagacactatagaggaggtaagaggactgaaantcttatgtcataagttcgtataaccttacatagttaccccttttcata

SEQ ID NO: 96648 - DNA, 464 bp, Glycine max
  unsure (1)..(464): unsure at all n locations
agctntaacctccatcagcatgtgacgcagttctatagttatatgnatgaggcggtctctctaagaagaagaatcggtcacgacagccaacaattgtgtgaatgattcagtggatggatccacctctttggggaagagtcagtcgcactgtccaaaatataatgaagatttatctctattaaatgtttcttaatttatgtgtattaatccttaacaactaaccttggctccttaaaatgagaagaatgcacttttaaaaaattaagttcaatagtaatcattagttaaaaacaacaactaatcacactctacctagnntaatttatgtcttggtaaatatgtatttaattttattatatgttttaataattgagtntgtaatcaaaaattgtgagtatatattatcctcctagntatcgttagggggcgttggttcatgattaattatttattctcgggaatat

SEQ ID NO: 96649 - DNA, 454 bp, Glycine max
  unsure (1)..(454): unsure at all n locations
tataactataggtgtcctgtctctctctctctctctctctctcttgttgggnttctcaggacaatattggacttattgtgagagtagtcatggaggggatggctcccaattcatgtgcaaggccagttctagagaaaaaaacaaggccacaagagcaactgaattgtccaaggtgcaattcaaccaacacaaagttctgttattacaacaactacagcctcacacagccaagatacttctgcaagacttgtataaggtattggacagaaggagggtctctgagaaacgttccagttggaggtggttcaagaaagaacaagaaggtctctgtgacagcttcatcatcatcatcaccaaaggttccagacctaaacccaccaattaacctctcatcagtctcagctatctcctcacaaaaccctataataatgcatggtggccatgatctcaacct

SEQ ID NO: 96650 - DNA, 243 bp, Glycine max
agctttcagatgctacggagtctggtgatttaaagactatgtttcaagatcgtccactatcaaccagccatgctcatggtcgacaccattcatgtgatcagtgtgactgcattacatcctatttccaacttgtgaaggacactgcattaaactggatactaccatgctcaaggaatgactatgtttgaggagtctcattgaaccgaagaagactgtctctcatacgaactggagagctcttta

SEQ ID NO: 96651 - DNA, 461 bp, Glycine max
  unsure (1)..(461): unsure at all n locations
agctttgagtgctattcccttcttccttttgtcgttntcttcatgttgatttagtctttgcaactccatctcatgttcctgtaatttccaaatagtgtggcaagagacacagtagacaaatctgtagattccgtgatggctgttacctttggttgccaatctctacttagacatctaaacactttatttatgagatccttgtttggaaatattcttcctaatgatgcaagatgattaactgtatgtgtgaatcttttctgcatatcttgtatgtgttcatcctaaaaagatcatattcatgggttagagtagtaatcctagatctcttaaaatcagttgtgccctcatgtgtgaagtgaagggtgtcccacatctccttggcaatagtaccagttgagactctaatatattcatctattcctacggcagaagtaatgatgtttctagctttaagattatat

SEQ ID NO: 96652 - DNA, 475 bp, Glycine max
  unsure (1)..(475): unsure at all n locations
ttacggacctatgaaactcagcttctaaggaagctacctaggctataaatagaagcacgtgtaacacttgtggcaactntgatgaatgagaatcttgagagacaaacttcaaagttcaacttctctccctgtttttccttcattcccatgccactttttctctttctctttctctctcattctcttcctccattgaagcttcctctttaagcttcttatccaagacactctcttggtggtgaagtttcttcttccatggcttattccctagtggatggtgcctcttctcacttcttctccttttatcttccactacaactccatggctaaaaatcaccattgaaggaccccattgaagctcanagatccaacctccatagaagcttctcaagcaagcttccatcataattcccaagntccactaacttgaacaaattacaagtattntgtcactgtcacttttggctcttacaac

SEQ ID NO: 96653 - DNA, 447 bp, Glycine max
  unsure (1)..(447): unsure at all n locations
agcttncagctagtaataatttaacgatatatagtacttggacactcctgttatagcaaggcaaggttgagaagggcagattccaatgccaaggtgcatccctagttaccaaacaggtcaaagcctttctagttaggctcttaaattgacaccctagaattgtcttcttatcagaggtgttcatgttaaacatatttacctacagttgaagatgataggtacatattaaagacatttacctacagttaggagatgtaagtagaagttaatgacttttacctacacactatacatagtaggtaaaacctatagtgatagacaattagtcatcattatatgcctcctcaatgttgacagaagaaacgtccgtaggacaaagtctattatacatttacctacnggattttttatttatagtgacagtttttgtccgtacgtataggtcat

SEQ ID NO: 96654 - DNA, 454 bp, Glycine max
  unsure (1)..(454): unsure at all n locations
tagtcaaagttctatttgttntcgggcttccttccnccctgtcatgcaatcatccaaaactatcctaagaagattgaagagagataacatttatttcacttagatagcttgaaagaaataaaattaggttgaatgtaagaagcatattgtagatataccatcaaggaagcacaaatgaccacatatgcaaaaaaaaaaagcctcagaactatatatgtaatgttntataatataattaaaatggaataatgtgtgcatatgcatgtatattctttggtgaaatggaatcatatgcccatagacatatgtaattgcagccaaaagactgcaccgaaaattggataaaatcagttctaacggctacaaagagagaaaagacactttccatggagtgcatggtgcttgatgctaatgctctngcatcatgatcatgagatagaagtgaatatgttcc

SEQ ID NO: 96655 - DNA, 443 bp, Glycine max
  unsure (1)..(443): unsure at all n locations
agcttattctaaatacagagcattcttgccttatataagcagaggacaaaacanaaaagataatagaataaacttccatatggattttagtcacaactcaacactaacaatgaacataaaaaataaggtgaaattgtacaagttgacattatntttttattttcactgttaacaaaattaactaaatattgagatacattcataaaccgcacaacacctgngtaaacatctagttattaactaaatatagagatacacttgattgtaaatggaatcgctactagaaaatagtcttttaaaatcggttaattattaataactnttaaaatcgatgttgntttctgctcagcaacatttgtttctagaagaaccgatagtgtcgtgcatttacaacatcatttttctaaaaaccaatgtnngtttttggggaattatttaatatc

SEQ ID NO: 96656 - DNA, 373 bp, Glycine max
cattacggccttaaaactagctggatgcttttctccttttgatccctagctgacctacatcataaacagccccatccatttacaaatcatattcataccattggggctttaccgaacactgggagcgcatgttggacatgaattgcggagaaaggacaatgtggatgcccattgcttagaaacaacctagcctaagccttttcattcaaatcctaattcaagaaacaagcaccaaagcaaaccaaactacctacaatataagcatgttctcacaattaggaccaaagatgaaaaaccataatgggaacaaaactcaggatggaactacttgtggaggataaaacaccaaacaagcaaatgcacaaaagggtta

SEQ ID NO: 96657 - DNA, 424 bp, Glycine max
  unsure (1)..(424): unsure at all n locations
agcnancgttttatcttgtaattnatttttatcttacgaaaagataatccatcacactaattatccatcattaattatgttgttttcattgacattgtgtttttttcctctctttttacagagttcatgtaagctcacggcaaaggggagaattgttcaattcaaaggatggatgcttggaagtttcttcttgaaataaggaaataaaacggcttgctgaatttatgtggtggaacaacccgttcatgttgctaataatgaggaatgaatattgtctgcgtggcttatccatgcatctcatcacatagattaattatgttaatttacttgtgttaatgcttgaattaggataaagatcnccagccaaacaaatgtgtaaaaaaaacatgcaacggttatatctatgatatggatgaaccatgtg

SEQ ID NO: 96658 - DNA, 395 bp, Glycine max
  unsure (1)..(395): unsure at all n locations
ctatnnttttgtctattaaaaatatttttccgctagaaattaatctttaacttaaatatgtttcatttgatccctgataattttttttttaaatttagtttgtaatatttcaaaaatttagccttcaactccatggcctcccatctccagccatcgacttgttctctagcgattgcgactccgaggacaaccacttcatcttcgccacgtcgatgccgccgccgcgagatacaacttcaccctcgaaatgatttctttttccagatttgagatccactctccttcctcctttttccatggnttgtttttcctgatctgacatggtggcttcgtcctcttcttctctttgcatcgactcttcttccnccacattctgtcctcattggtaactccta

SEQ ID NO: 96659 - DNA, 444 bp, Glycine max
  unsure (1)..(444): unsure at all n locations
agctnnttggagtagaaacatgggaccaactctttntatttcaaaaaggaagtcatatctagtcaaggtctaagagaccttacaagtttcctaacgatttctaattatgtgggccattaagtctatcatatgctgacaatagccgagaagcccgtgaatctcttcaggggcggagtaggtgtctgccatcgctttggccttgactaacaatcggggaagttcttgactcccgttcaaggtaagagcaaaccgatccatccacatggttgcctcttggtgtaaagagtcgatcacccttcctctagcctctttttccgcgtatacttgggcatattcgtccgccatcctatgctcgtgggccgcggctagatctaactcttcttggtacttggcgatgatagctagcatggtggtctccgtctcgcataaacgctgagacaaact

SEQ ID NO: 96660 - DNA, 461 bp, Glycine max
  unsure (1)..(461): unsure at all n locations
acgtgacctatgaatactaagctttgcatgtntagagatttctatagagagaaagggccaagttccagagggttntgagagcttttgttgtgagaagacttgtagagaactgagtgagaagaggaagccatcttgagagcatgagatgagtctatgagtgattgtgaggttctagaggtggaggagacatccccactacttgtatttctttaatccttcatttttctcttctctctgntgtaaaggaagcttcccagatatggagagctaaatcctctgttggtttttccttgtaggtactttatgtaaatacttgtatatctatttaatgatgttttatgtgttctatgtgctatcagtacgtcattccagtgtgcttttgccttgatcatgtagatgcatgctttgttaggatcattcaacagtgaaaactggtctgattcttagaacttgataggaca

SEQ ID NO: 96661 - DNA, 286 bp, Glycine max
ggacctataatctaacctggactatccttcaccgacacgccggttctgttatgtccgatacaagcggctgcacacctgctccttcctaactgactggagcggctgggttgcttatcctctaggtttctgagtttaacatgacctctggatggaaccattaatctttaaggccgataatcggcttatgtgaactgcacccctcttattaccattttttggatgattgtttaagggagcccgggtttcttattatgataaatcctaagaataaacaacgggagttgcc

SEQ ID NO: 96662 - DNA, 291 bp, Glycine max
  unsure (1)..(291): unsure at all n locations
cctgcggcatgcaagcttatcctacatgacactccttataccaccttattgctatcttattncacttaacagtcgtggagaatagtacaaagtgactcgcagcagtgtgatgagtaactcaacacgtgttataatcagtacaaaaacacctgtgcttgtcaaaggttaaaatcatctacatagtgtagacgaaattaacgatgattttaggatgtgccgactaccatgtactcatttatgaaatgtgcgagattgacccatctgaatgtggaaaggattactaaatgctag

SEQ ID NO: 96663 - DNA, 456 bp, Glycine max
  unsure (1)..(456): unsure at all n locations
aactcaagcttaacttatcaggagacggagcctctacacacaanatataactattataggtnactataaatcctccacatatgctcatattgcaatcatacacgcgcttgaaggaggtttattctattcatcccatgaaaaaacccattcacagcaatttctttgcactcaacagaatgatgaccagtaacatgtcagagttcataccaagaggagttattctcaatgctgcgatagtgtcatgctctggctctttcctcagaatgtcacctgctattggaacatgctgcacaccatgcagggcaccagaaacactatgagagcggatcatacctacgcgtaattgccatctgctctctattggcattaacatgaggaagtagagcctcagaagggattgtaccttctggaccctgcatacaggtgagttcaatgatccactcacagatcattcaa

SEQ ID NO: 96664 - DNA, 352 bp, Glycine max
  unsure (1)..(352): unsure at all n locations
attactaacttgatgctcacctcgggctgagataatccttggnctataaaaccgagtctccaccagaacatatggatngaatccaatgggatgcaaccaacatcatatttggatagctcacaagcacaaggaagatcgtgcgcggctctcatcacactgtgaatgtatgcatacatgagtttgatgatgttaaaagaagaatcacaccatgctcactttgctctaagattaatacaagactgtttcaacaaacaaagccttgatgtaagatttcttcaagatcaagccttgcctcaaaatgaaagattcatgcactccaggccatgttatcattaccatcatgtattctata

SEQ ID NO: 96665 - DNA, 437 bp, Glycine max
  unsure (1)..(437): unsure at all n locations
tatccgacctcccattaacaggaccttcatagaaaagttctgttgttgttctttttcccatatggttcctttntctccaattttcaacaaatatattaaagggaaatgaaacaccagaaagagcaccgggtcgtcaagtatttaaaattaaaacggagtgattcgagtatcgaactccgggaacttgcttattagacagagttttattcagaagtaaggcattgttagaaaaacattgataatcgatggttaaaaacataaataaactacttctatggtaaaaacagtaaatgcaagtgagtaaaagttgatagcagtaggtaaaaagcgttgggtctttctaacaaacaagttgatgcatgtgaggatatttgtctaatcaatcatgcttttgtgttctatgttgtagcctanaatactaaaccttgatccctcat

SEQ ID NO: 96666 - DNA, 412 bp, Glycine max
  unsure (1)..(412): unsure at all n locations
tagagacattgaacacatgaaaatattctcatttatataataaatttattacatcaagtactcattagaaattccaaacaaaggattctagccctccattaccaaggagcagctttcacaaataggacaagggttttagagaaaataccaaattaaaaagcagtggggatgtctccttcacctctaagaacctacataataactctaaaacctataatctacttaatagataggacctttgcttccatgctcagcttttcctctgttctctgcacacatttcgcaatcaatactgacctctttcacgtcgtcacactcttttnttttcatgtgcatatcatgctctaaaaggactttctgacctcgaaggcgcgcttagcgccattctcgcacttagcacaaggaagtgata

SEQ ID NO: 96667 - DNA, 465 bp, Glycine max
  unsure (1)..(465): unsure at all n locations
tgtgtctgtnntttttagaaggggattntattntatttttgaatatgaataacataagatttgcacgaattcaaacataaaatcattccaaacataaaaataacattaaattaacttcagcagagtcgaaagaaatagaattagcatcaaatacgacaactaagtgatgctaattttgtgacaaggacatattatcttccatttcgatgacatgcttactaaaaacaggtaaaatttctattggcccaaattttttccagtagttagaatacactaacaccttcaacacatcatncgtggttttcagttcaataatttcgaatttgataattttttctaaatactcatagtgacttggttgcaaaaaaacaatcgccttaccgtttgtgtttaatgaataccataagggggaatcccatganggcgcaattgcttgatcaaatccttcgggtcatccatggtaca

SEQ ID NO: 96668 - DNA, 295 bp, Glycine max
  unsure (1)..(295): unsure at all n locations
tagaattatggcaaatctcgcctctcctccagagtcaatagttgatatacctgagactcgaatctttgatcttcgtcttgccaataaagaggaaacctccttgtcacctcatctggtttgtaaaagagntttttgtggtcaaggtatatagggtttggcctatctctaaacaaacgggtcttaaattttttccaagattggttgaaaagtgtaaacagagctccatgagaactagtcatggatacccgaccaactttacgggcctcggtcgcttatacctaatagaagtataaaa

SEQ ID NO: 96669 - DNA, 239 bp, Glycine max
ctaagcttgtaaggatggtgaatcatcgcttaaccgacgcatgtttgggaccggtcgttacaatgatgagaaagcaccttatcagacacacgacagaggcgaagctctctctctctattatacatagagttacgagcatccgccgactctctttgttttactacaatacaaccatctcattgagagccttattcataatacatccttggtagcgaagcatgttctgccagagattataa

SEQ ID NO: 96670 - DNA, 342 bp, Glycine max
  unsure (1)..(342): unsure at all n locations
agcttgtcaacgaaggtntcccaccatagcctctctatgttgctacatgctctgtaatgtgatagatgtgaacactagtcgccccctgatgatggagagtcatgcgacacacatcgtgaagtggctgttctctctctcgatatctcaccagactctacggactccaccgtgatgagtggtaatccttcttatgcggtcttgaagcatcctctcacagctttatagcctaggcttatattgtcgcgcaacctgcttcgttcatgacactcccgctatcgcgtggcgcctggcttgactcaaacattcgcgcccgacgaatttcctggcggaggtgaccacatt

SEQ ID NO: 96671 - DNA, 508 bp, Glycine max
  unsure (1)..(508): unsure at all n locations
acatttaaactcagcttacaattatgagatttatgttcttacaagattattnatttttgacgaaaagntgngacgtgatcagtggctcctaagtcgagtatccattcacttgaacctgtcttacttacactacaagtaatggataagacattacctttgtttgcattgctagaaccagtgattgtaccaatttgattcacatgtttattgttgtgaatttagctctagtgctgcaatagtgccattagcgatgcatattgttgaggagtcaccttcatttcagcattctatacatcnttgatttgttctgtagtagaacccgctccctcttctttcaacacattcatattactgatgtttgagctttgagacttatggtacttgttcaggaggataacatgtttcgtgtagcattcatcaactttgtgggtagtgaaaccacaatatgtacaaagctagcttcctttcccattggttacaagagtaactaacttgtactaacttacta

SEQ ID NO: 96672 - DNA, 402 bp, Glycine max
  unsure (1)..(402): unsure at all n locations
gctttgtgtatcgctacactcattggttatctttaccagtgactggttctcaaaaatcaaaagatgtaactcttcacaaaggttctgactttctcaaattgtgttttaagttctctaaaagatataactcttctgaatggtcttcttgaccagacatggagagtctataaaagcaaggctttgttttacatttccaacaatcttaaacacttatttcatacaatcccttacaagccttgaatctctgtgaacttcttcttcttctttgtaccaaaagctttctgaagtgttctggttttccaaacctttgaaacttgtgctattcatcttttcattctcttctccctttgccaaanagaattcgccaaggactaactgcctgaattctttntgtgtctctct

SEQ ID NO: 96673 - DNA, 494 bp, Glycine max
  unsure (1)..(494): unsure at all n locations
ntcggatattagagagctgttttgggatttttttttcttatttcctccacagnncataggggttaacgcaaaaaataaaaaaaaaataaaaatctgtagcaatttgaattctcaagttcatgattaggggggaaatatcttctatttataaaagcatacagtgttgcttgcggagaggacagcgacatctagttatctacatattaatttaacttcaaaaataagaaaagaaatttaatgagaaaatgacaaactattatatataataaatgtattaatttttataataatcatcttaaaagtcatataaatattaatttctgattgggtaatacttaataataacatagaaaaattacactaaaaagtatataacgattaaactcaatttatattntaattaatattcacttcgatggctgttgtattacaaggtggggttaaataaaaggtgtaaaataatatgcaataataacttcntgtgaatacatata

SEQ ID NO: 96674 - DNA, 449 bp, Glycine max
  unsure (1)..(449): unsure at all n locations
cctgaggcatgcaagcttaagcactcgggcgagaactattaagatgttattanatatctgtaacatgctatttaacatagtaaatttaatattccattcccactcatcaaaaaaatattaaatttaatacaaacaaaagaacaagtatctatcctaaaagtacttacagttttactaaactggaaaagtttgcataggtagaaagaatcccactcccactgaaattattgttatcaagttgactgcaatgggaaaaagtcaatatgaaaatcataaatggtagctaaagtgcctattctagccaagttaatgtacacataaaagcacttaaagtgatagcatacagtgacatcaatgcttatacatttaggattttgatatctctctctggttttggagactctatttttgggaagatatttgtttcatgggaaattagataggatata

SEQ ID NO: 96675 - DNA, 392 bp, Glycine max
  unsure (1)..(392): unsure at all n locations
tctaatttctatttctagattaaaattcaattatttacttctatgccattaatgagtttactttgaccagataatttttttttgaactatccttattctttctaaactttagcttaaaaactgaagagtttaaccatgctaatatcttatcttctaccattttaataatataaaaatactttccaatcacccaataaagaaataacactatctaccccacacatatgaaaaattggaatgatacaatttgcatctccctctttgaaccatgtcaccctagttntttgttggagtagagattcatgcctcctagatttcctccaaaattcccctattaggatcctcctcctccaagccatcctcttcaccaattagatccataacattatatt

SEQ ID NO: 96676 - DNA, 356 bp, Glycine max
  unsure (1)..(356): unsure at all n locations
agcttgttgatgaaatttatatttaaatctatgttgttatctagagaagaattgagaggaaatattttgcnaatataattgtggttnttaatgtagtactaacaagaaaatggttgcagtggatttctataaagtgagaatagttgtagagattattgtaagggtgaagttagatcatttgtgtcaattggttgagtcatgtaaatgctctctnttagctcgaagcatggacaaaggcgcaggctcacccaaaccttgttcttaattttattgttgcaaatatagttcttggtgacagatatagatgttaaatgattaatgttggctgcatcaccttgaagtgtgtatgtttagtg

SEQ ID NO: 96677 - DNA, 342 bp, Glycine max
  unsure (1)..(342): unsure at all n locations
ttgaatgtgtctattacaatccattcatagagctacaatagcgcagccatgcgtctattatagactaaagaactatcttgagaagctntttgagaaaacttcttcacaactagagcttagctcacatacccctctataactaagctcacctccttgagatgctcccttacgaagattgctaaagaagctaaagcttatgtactcacacctgtctaatagctaagatcacctgcttgagatgagaagctagagcttagctacacacnccctataatagctatgctcacccttatgccccagaacatgtttatgcagaacaagtccgtactaccaagactactc

SEQ ID NO: 96678 - DNA, 387 bp, Glycine max
  unsure (1)..(387): unsure at all n locations
agcttgaagctcaagaaatagctagatgatgttttagaagacgttctggctgttagatgttattagcagcttcaactaccccattcatcttgggcctgtatggcgtggaattatggtgttggatcctgaaatcctcacacatttcctatatcattntgatgttcagattggtggcattattagtgataatcttgttgggcaacccataccggcagattatctctttcttaatgaacttgaccaccacactccttgtcacactggcgtatgaagcagcttcaacccattcggtgaagtcttcgatcgcagctcaaatgaagcgacgtctattccaagccttggcctgagtagcctcaatcacatctcattcccacatagagaatgcct

SEQ ID NO: 96679 - DNA, 491 bp, Glycine max
  unsure (1)..(491): unsure at all n locations
tgagatgaggaagtgttgaagggtgttactttctgcttttattgntgaccacagagtggtacctggagatatgtcgcggnggtcaggagaccttgtggacatcatgtggggtgctattgcccaaaaccaagcttgaccaatcccgacccaacccgggcatagtcggtcagtgagaacctgtgatgtacctaagcaggcgagctcctggcagtctacagatataaggaaaacaagaccacaaagcaaggatgcttgtggtggctggccagctgagaattttgtgtaatatgtgggttatggcctctggtaatcgattaccaagggtgggtaatcgattacaaggcttaacaatgaagacagggggctaagatggtctctggtgatcgattaccaggggatgtaatcgattaccaggcttgaanacggagtcaggaagctaagggagcctctggtaatcgattaccagcctgtgtaatcgaccacacagaggg

SEQ ID NO: 96680 - DNA, 385 bp, Glycine max
  unsure (1)..(385): unsure at all n locations
agcttctatattatctgaactcatttatcaatatacacaagctgagttntattcagaaaattagagtttatctctcttatcttagcgagagtgagtctcctaaattcttgagtgattcaagaacaccttggctgtatcaaaggactttcacaacctttgtgtgttgccctcgctggaaagagtgattctttccttcctttcatcatcacccttgttctttcaaaccacaattccagaaaatccacctctgcccagaattatctccgggccataactcccattttatgcactcaaattaagtgattcttgagcctacactggaattcanaatgagaccttcacctcgtttaggaatcacctcatttgaagccctgtacttcaggta

SEQ ID NO: 96681 - DNA, 297 bp, Glycine max
  unsure (1)..(297): unsure at all n locations
ngaccagagaatgattccacgcgtgataggttttccttctctctggactggggagcgggatcgaatgagtcctttgcgtcctgcacgtgaggcgttgatgatgggcacatcaccaagatgtcttgctactctgaatatacgacgacatgcccttccactacgaatgtgatgtttgggtggtgtgttgagggaacatctacgactgatcgtacccacagacgccgaatgcgactactggctggtagatcatgtccgatttctccttaggaactagagatgtggacaggctttcttctc

SEQ ID NO: 96682 - DNA, 295 bp, Glycine max
agcttagccctaacgcatgttgtgttgtgcatgtctctagtgacggacagaaagcgcttactgggaggcttgcctgctatgttttcctttattttatcaagctctgcacatattgaggtcttgacttgggtgcgagagcgataattagtctcttgcctgttgtgcacgagaatatgggcgcgctctagcgttcctgcacctgtggatgaagaataactggtatagattgtcgtcatccctcgctcacgcactctggcgctgaagaatcatcctcatgccgagcgagaaccctcgc

SEQ ID NO: 96683 - DNA, 449 bp, Glycine max
  unsure (1)..(449): unsure at all n locations
cttgatggtgtaaagaagaancacatgtttgcatcatctatatgtggagaatgtgaatgtatgtatacatgattntgatgatgtcaaagaagaatctaacaaggctacttcagatgataagcatttgcttcaagaataattcaagattgcttcaacaaacaaagccttgtttcaagattcactaaagaccaagcctttccttaaaacaaagttctttcaagacatgcaaggctctggtaatcgattaccaagaagtgtaatcgattactagaagacggngttgagaaatagttgttgaaaaaggttttgaatttgaattttcaacatgtaattgattaccatatgtctgtaatcgattaccagcaaccgaaacttggaattcanattcaaaagtcataactaatgcaatcctatcccacaagggcattgggtagaagactccaagtaga

SEQ ID NO: 96684 - DNA, 464 bp, Glycine max
  unsure (1)..(464): unsure at all n locations
agctgcagcttctgtggaaagctgttaggccactttntgaggtgatgattacacaatacttcaagcccttntcagccttgacatggtgattcttttcttagccacaatttgtggacttggtggtaccctcactgtgtcaaataacttaagccagattggcacatctttagggtattcggcacatagtataaccacatttgtgtcccttatggccatttggatctatatgggtaagattgtacagggagtggtctcagaaattatcatagcaaaattcacagtccctaggcctatgatattcacattaattcttgtattaccttgtgctggttaccttctaattgctttcgatgtcccaaatggtctctatgcggcctcaattataattgngttctgctntggggctaactggccactactatntaccatcatatctgaactttntggtcttaaatttactcact

SEQ ID NO: 96685 - DNA, 500 bp, Glycine max
  unsure (1)..(500): unsure at all n locations
tcttagtttcagatgatgcagatgggtttgtagctacctcatgctctcctctaatgactatggcatcatttctggcgctaaactgctgggagttggaggccatcttttcaattaaatttctggcttcagcaggagtcatgtctccaagggctccaccactggcagcatctatcatacttctctccatattactgagtccttcataaaaatattggagaagaagctgttctgaaatctgatggtgggggcaactggcacatagtttcttaaatctctcccagtactcatacaggctctctccactgagttgtctaatacctgagatatccttcctgatggctgtggtcctggaaacagnggaaattttttctaagaatactctcttaaggtcatcccagctcgtgatggaccttggagcaaggtaatatatccagtccttttccactccctctaatgaatgangaaaagccttcagaaatatgtgatcctcttggacatct

SEQ ID NO: 96686 - DNA, 326 bp, Glycine max
  unsure (1)..(326): unsure at all n locations
taagcgacctgggctgcagcttgtcctcttgcttttattggtagactgtggactttcgaaagcataaaatcaacatgtaaccttgtcgctactttcaaaaaacaagagatcattaatggtccaacaccttaatgtttctctcctttcaaaagaatcaaaagatcgtttaaatggtccaacgcccttaaaacgacgtttgttcgatatacacatattcttgcctaaagggatgataacaacttaaccaacgttctattcctcaagaactacgttggcgtgatttccttatcacacttgacgaatacgttngagcaagggatacaccc

SEQ ID NO: 96687 - DNA, 481 bp, Glycine max
  unsure (1)..(481): unsure at all n locations
tgtctcagcatttatgcgagacagagaccaacatgttatccatcttcagcaagtaccaagaagatttaaatctcgccacggcccacgagcacaaagtggcggacgagtatgcccgagtatacacggaaaaagaggttagaggaagggtgatcgactcattacaccgagaggcaacaatgtggatggaccgatttgctcttactttgaatgggagtcaagaacttccccgattgctagccaaggccaaagcaatggcggacacctactccgcccccgaggagatccatggacttctcagctattgtcagcatatgatagacttaatggcccatataatcagaaaccgctaggaaatttgtattgtcactcagatcttgactagttataactntctgagtaaaatgagaattatcccgcgttttacttcanagataagtgcgaatcaaatcactcccgcattntatctctagcatgcattcat

SEQ ID NO: 96688 - DNA, 452 bp, Glycine max
ctgcggcatgcaagctggcttgcggagcttctatggaggctggatctttgagcttcaatgaggtccttcaatggtgattttccaccatggagatgcagcagaagacaaaggagaagaggtgagaggaggcgccatccactagggaataagccatggaagaaggagcttcaccaccaagatgagccttggataagaagctcggagaggatgcttcaatggaggaaaagaaagagagaaggggggagcacgaaattgaatgaataaaagagggaaagaagtggaactttgaagtgtatctcataagactttcattcatcaaagttacaacaagtgttacacatgtttctatttatagactacgtagcttccttgagaagctctcttgagaaaacttccttgagaagcttcttagagaaaacttccttgagaagctagagcttatctacacacac

SEQ ID NO: 96689 - DNA, 182 bp, Glycine max
atttttcattttttgtattaattagttcaatttctttgtttttcttttctttttattttattttttttatctatcattttttttttttttattttttttttcttattttttttttttttttttcttttttttttatttttttgttttttttcttttctttttttttttttttatttttattt

SEQ ID NO: 96690 - DNA, 252 bp, Glycine max
ctggtaaataactaacccaacggacatttatggatacggccatatatacccatagtgtcctatgccattgactatatgtaaatcgtccggagtggctaaaacttatactaaatcaagccctagcatgaattacacaatctgataccttggcggtcctctattgttcatgccaaatgcttatgcgctaataaatggtctgttgggcaatggcctctattcataattgaattggcaaaatatcactgacaagtg

SEQ ID NO: 96691 - DNA, 453 bp, Glycine max
  unsure (1)..(453): unsure at all n locations
tggctaagtactctgcacgtgagagataatgatgatgttgctctatgtaccaccaacatgtgtacaaacacatattttgttaaactttaaggatgcgcgtctaatatgttgtagccaaacttacaacaagtcttattaatgtagccattgaattgcatagcaatgccataatgatcgaaatatatcaaatttaagataaattatctggatgtgacaattttaaacaatataaatatttgtcaatgtatatttcgataatataattctttttctggctgataatataaaatcattcatattttaaatagtatattaaacattaaagtaaaataatatgaaaatgatgattaataaaatataaaaaatattgtagtataaaaagatattgtaatacattaaatagtatattatactttcataaaanaaataattaaattcaacaattatattaat

SEQ ID NO: 96692 - DNA, 378 bp, Glycine max
agcttatactctgagagctacatctttattttgttgctgaacaatatattttactcagacatctctggaaattatatatacgcacacatacatacataggttaatccacatgacaaccttaggctgctttaaggcattgtacatgaaagtcctctgctggataaatatcatgattctttatacctatcctttctgtgtctagacagctggtgatattatgataatattacatcactctcgattactgtagaggcttcactaaaatatgttgatctgtcttctatgggattgctgctctgtttcttgtaacctgttttaggacatgcctactaaaagaggtcaggtatggatacttaatgctgaaatggtctatgtatc

SEQ ID NO: 96693 - DNA, 487 bp, Glycine max
  unsure (1)..(487): unsure at all n locations
ngattacaactgatattactttactccaattttattgtttctagcaaatgctacagggcattntatggatttgcttaatggcaaaatgtccctaacaagtgtgtatatttggaggtggatggttatcattttttgggtggttttctgactgtaagatgcaaaatctggcctatttgtttgcagtattttttgtgacaataagaatgaggtgaaacaaaagagccatttgagttctatgatctgttggacattgtgtaaaatgttgcagatctcttccgacaaatgtccaaaccaattactcttattgggtttgagatattttagagaatgattctcgtcctgcagagctaantatttcaaattaagatgcaacctccctttgccaacttgttctctaagttcctattgatggtctggtcttgtgggatccatatcgtagatcatcttagaanagaatctcttctagatgacttgatattgaacatta

SEQ ID NO: 96694 - DNA, 430 bp, Glycine max
  unsure (1)..(430): unsure at all n locations
agcttagctagccttgccctcgcccttctagctcctcagatagaaactattagatcctcggtgttctaacagatcttcctgatgtaggccaaattaatgaccgggatcaagcgctcaaaagtgaggctatcagagacaacccatctggctctacataatgtggtgattagagcanggaacccaagtctaaaagtattagactgggctataaggtcatctggccagagatcaatgcccctatgttcatatccaagcgagagactaggccaaagatcaacctatctctatccactgtcaagtcagaagtgtgtgatgtgggggccaatttggagtatgagacgacactccacacctgagctattgtagtcagaatcttcctaagaaccttccaggatggcttttgagttaagatgaaccttggcaggatgca

SEQ ID NO: 96695 - DNA, 429 bp, Glycine max
tactcagcttcttccagatgcatcatacctcgactcaccttgtcatagatcatttactatatctcgctcaacagactcagacttctgattggacttcttctctggaacatgagaaatgaatgtctcataaactgtattgctataaacaaacttctcccgtgcgcggtcggtggcctacgatttgtatgcacctgcgatggttaacaaaacatactatgtgctccacaaaccaacccatgtgtactctacatcctccgcatggagactcatgatcataaagtgacatggccattactgaatatcgatctaccaccacctgctgactttttgtattgatgccactccgtttactgaaatcatgtcttcaagccgatcccatgcgaaatatatgcacacctaactgatggaatacggccccatgtatatctg

SEQ ID NO: 96696 - DNA, 438 bp, Glycine max
  unsure (1)..(438): unsure at all n locations
agctntgagaggtactganaatactcttcgggataagacacacacatacattgttgaacccctctgtttcatctctctttgtgctcgatctgcttgcacaatnatggacactatatgctccacacggactcttcaacaatcagatacatccatctcttccctagctgaccttggaactctgatgtgcacagactcttcctgacattgcttacaggatcgaccacaacaagctgcatgtataaagaactgaaagattagactatgaatgtagctatggatatatatccatacatatctctgcatatgtatctagagatgtatgcgtaccatatccagactgctaatagtgattatgctgcgagaatatctttggtgactatatctagatcacgccagagaactaacaacctgtcactggtctctctgtggatgccatat

SEQ ID NO: 96697 - DNA, 348 bp, Glycine max
  unsure (1)..(348): unsure at all n locations
tgtanatgaggcttatgtgaggaaacagagtttgaatttcanagagcatggcctgaggtattcaaatgctaaagactaagaccactcaaagggttctgtgtccccattatttatcaatataaaaaaatcgatgaacgtgtatatataatccatgctcatatntaatactcatgttcaattcaaactattactagacagagattaatggcgatatattcaatatcggaggaccaatacacaatgaatatttaagtgcctatattattgaggcaacaaaaagtcgtatgagctaaacttatttctaacgaaacacattctactattcctgacaatgacaaaaaagttaat

SEQ ID NO: 96698 - DNA, 440 bp, Glycine max
  unsure (1)..(440): unsure at all n locations
agcttgaagatagagacatagatgcttgtatntaatctataatntatggcttgtaaatgcagtaagcattattgagctcatcacctcacgaacgaatgctatgaattatattaatgcggttaattcttaggacataacacataataactagcatttgaaggatcaaatcagtgtaaagttaaataaaggaggtaaatgacgagaaatagcttacctttgaatggcataatgagaaattgatcacaacataatcaaatactactgcccagttagatactttgacttggtgcccagacagcaattagagtgcatcgacaataactatcttgacttagagtgcatgtgcaacagcgattatagctttcaactgtcaaagatctcactggcacattaactattgttgaccaagtggcgcttatatatctacaatattattaatc

SEQ ID NO: 96699 - DNA, 354 bp, Glycine max
  unsure (1)..(354): unsure at all n locations
nggctatgggcactagcacgccacctgacttcctccatgtctcccgaaccccgccacatatctacgagtaccactgtgtggtccacggatgacaaaaggaagtgtcacccttccacacttcctcattacaagcttgtaggaatatggggtatccatcacatgtggtactatgtggcggtcgggcgatggtgcaaaacaatactccacatccacaaatcacgtgtaaacccaccatgccttgttgcccacctcaactaatctcacgtactcccacgtagcccttatcctcattcctctcaatgcctggtccacatcaatcctcccaagcttccaaagaatccatgtaattcaaca

SEQ ID NO: 96700 - DNA, 305 bp, Glycine max
agcttgcaaacatgcaagtcagtgaatatactaacatgatgaactatgcagaaccaagacaatagggcaaaagcggaagactctgcccacaacacattacaataccgcagctctccttactcacatacccacgtcacattctctttgttccgattagtgcaccgttggatcgactcataactcttactggaggtctctatgacataactgtacattttgagcgttgcgatctactataaaacggtcagaaccccatatgtactacgactgtcacaaccagctatacacctgctttttctgcacat

SEQ ID NO: 96701 - DNA, 506 bp, Glycine max
  unsure (1)..(506): unsure at all n locations
ctattacggacctatgaaactaagcttacaaattgatgttgngcccaatttgtctggcggtccaattacaaaaatacagcccanaaacgaaataaaaaataaaactggacaacgaataaaattgtctgctctcttcaagtctaagccggttcaactcttccggagccaaacccaattgcttataattctcctgaaattaaattaaaacacataattagtcaagcaggcccaaatgataaaactgcataattaatttgacaatcaaggctaatcagtaattaaaatggtggcaaaaaggggtaagaaataagagaaaataatgacacgtcaaattcccccacacttagccttttgcactcctgcgcanaatcaaaaagcaaatcaaggaataaatccagagacattaaagagagacaaacaaacacaaaaacatttacatatttctcaatgaatctcaagtaatgaaaggaataggcaacatccaatacgtanagagttaaagaatc

SEQ ID NO: 96702 - DNA, 354 bp, Glycine max
  unsure (1)..(354): unsure at all n locations
agcttctttggaccttgaacaagcaatcaacttctctntcagaaccatgctatgtgctcgcgactggtccctttcttcccttcgcaacttgagttcactattgctaccccatagagctccgcgaaatttgttccggccatactcttccttgcgagccctcttggtctcttgttcaagggctcttgcggtaattgcattctcttcccgtaacccggcacactccttccgaacgtgtgtagcagccaacttgaacttctccttggcgagtnttgcctttcctaactcgctcttgagagcttggacttcttcgtcctcttccggtgcttcanaattctcttcgctgacgactttaac

SEQ ID NO: 96703 - DNA, 504 bp, Glycine max
  unsure (1)..(504): unsure at all n locations
actaagcttacatagtttatctttttcacacttaagttgtgaagatctcattaccaagtctttcgtaactagatgatttaaatgatgcatattaatgtgtgtagatgatgtgtcattattttctcctatttcttaaccctttttatcaccactttaattactaattagccttaattgtcaaattaattatgtagttttatcatttgggcctacttgactaattttgtgttgttaatttaattctaggataattataagcaattgggcttggatccgaaattgggctgaaccggcttggacttgaagagaatagacaattnntattttttcatctttgggcttggacttanaacatattcgtaagctatggggctgaggacctttataacaacacgagggttntagtagaaggagactcgtgagataggagaaaaatcttatggttttgcaatttcagntcagtgttactattcacgcgcactattcacatagcaataaaatttt

SEQ ID NO: 96704 - DNA, 471 bp, Glycine max
  unsure (1)..(471): unsure at all n locations
tcaagctttaagatgggctgattngtgtaaacaacatctatatattggtagtagtttatgctcacgcaaccacaagctgcaataatgtgtgaacatggatagtgaagcgcacaataccttccgcattgacaataatgaccattcaagttaactgcccacttttgtccgccacgttgcataataggattgaaggtctcctctacttcaaaccttgtggagtggatatcatacatgcgaacgatgtgcgaacaagcttcttctggaatttttctaagttctttaacaagcttagaacaatatactttgccttcatttaactatctttaggcttggcggccacgatcaacagagtactcttggcacctactatatgttgatntgaccaacgctgttatcggtatgttgcggcaatccttcaataccttatttatacattctgagaggatcgctggcatgtggtcatatcgacgt

SEQ ID NO: 96705 - DNA, 489 bp, Glycine max
  unsure (1)..(489): unsure at all n locations
tgcctaattaacctggaaatgagagaaaatgattattttacacacaaaatggaagtatttagtatttattacctatacttaatagaaaatacttataacactacaaaataaccataaattggaagattttgatacaatttacacaagttttatacacaaaagttagtcctgttcaccgactaacactagggtgtttagttagctattacagaagaaaccttaacaataataagcttacaaaacctatgtatctctgtaaaagtagctcctcttgcttcctccagagcttttttgccgaaataggcactgtggtttgttctatagtatccaacacaaaaaaaaaattacttttggaattnttttttctttaattntagatgttttacttttaattggcaaacttaaccatttgaaatgaacaccacttcctgaaatccatttaaggggtngaatatagggcttggggtatagatagctatcattntctat

SEQ ID NO: 96706 - DNA, 421 bp, Glycine max
  unsure (1)..(421): unsure at all n locations
agctntaacctcatcgtccctcacagtctttagtattgggagccaatccaatccttgtgttcggactctcagccacttatgatagccgccgatgatcccattactgcttcccctaagctctctgtcctttcttcacgccgcatcccatgccttgcaaactccttggagtaccctcgcgttgtggtcactaaaaccctgtgcgatgaaaggcgtgatgctttcgtctaatggcgctcctctcatggggtagccaagctgtcttatggtgagaacgggattataattaatacaaccccttgttcccatcaagggaacatttggacatccttcgcatgaagatagaatcctgattcttccttccttctagcgagggaaccaattaacagatngccccccatgctagccaagagttggtcccaat

SEQ ID NO: 96707 - DNA, 473 bp, Glycine max
  unsure (1)..(473): unsure at all n locations
tgctcaagaggaatctgttatcattcttccaggcacaatgngtatagatcatgttacactttacatactatcttgcatctttgaaatcaatacctcgatcgtgacataaattttattatttaatgtaaattcttttactgaaattaattaatttactcatatatgtctcaattacgttcaataattcaaaataaattatccatataaatattacatactcaactttaaaacaaaaaggacgatcctatttcgatgttcatctatcaataaatattcctccttccgaagatccaataggaagataaggaaattctgataacaaagaatgctgacctttgaacaaaagctatgagaagggaaatgtcggaactctctttttactaacatggagtggcttgctttaataattaccataatattatatcttgttttatacaattacccatatgatacaagtcagatttctgatagtc

SEQ ID NO: 96708 - DNA, 483 bp, Glycine max
  unsure (1)..(483): unsure at all n locations
agcttaggacaatgcatgatgctgtctctctctgtgtggctccattgtgaattatttggactgaacaagcagtctcacctaacttttacttcacttatccgctgccattctgcattcatagatcctctcagaagaaacgatagccaatggaatgaaatatcaatcataaaataccgatttagcgcggaaacaattttcacaaagggaaaagccacggtgattatatgtaatctggaagccttttacagcaataaatatttatagatgagctcttacaccaagatttattcatctacataaatggcgaggaaattggttgtgtaagatgccagacgtctgacgtgttaccctcagagaaccaaaactgtaatttatcatcacacctaaactaaatgctaccctggctctatatgactccctacaattccctttcattgagagnttcgctctatatagtagatgtctctctaatattaggcccta

SEQ ID NO: 96709 - DNA, 437 bp, Glycine max
tgtgtggtttccattccagaatccaaacattacaagcttatattagtcattcattgatccacatgggctttattgggcttgtaacgtggtcaggggtaagagggctatgaaagaaaagattagagaggcttaaagagtgtttaagggtgtcataccctaatttcatccggggaccatccgttgttgggatgcgaccctcgtttgaccacttcgaggtatttggcacccatcgttaggcaattagtgaagttctgagacatgccggaagccaaaagaaaagggttgtagcacaatccgtgaagttctgtgacatgccggaaattaaaaggaagtgtgagtgcacaatccgtaaagttccgtaacgttccggaaggcaaaaaagggatgattacgtaatccgtacagttccgcaacattacagaaataaaacaagtatc

SEQ ID NO: 96710 - DNA, 503 bp, Glycine max
  unsure (1)..(503): unsure at all n locations
agtcacctgcggcatgcaagctttcttgagataacttccttgagaagcttgtctgagattacttccttgagaagctagagcttagctacacacacccctctcataaataagctcacctgcttgagaagctttcttaagaagattcctaaagaagctagagcttagctacacatacctctctaatagctaagctcaccttcttgagatgagaagctagagcttagctacacaccccctataatagctaagctcacccgcatgacaaaaaacatgaaaataaaaaaagagtccttattacaaagacaactcaaaatgccccgaaatacaaggctaaaaccctatactactagaatggccaatatacaaggcctagacgaaggataaacctattctaatatttacaaagatgagcgggctcatacttagcccatgggctcgaaatctaccctaaagctcatgagaacgctanggcctttccttggatctctagcccaatctacttg

SEQ ID NO: 96711 - DNA, 246 bp, Glycine max
taaacctaagctatcggtttctaaaacaattggctgagcgagttttcttgcactctatgaataaacctgaaaactaaacatcctgatgcagcatacaagtaattaactttcgtcaccccaactgacaaaaaaaacataactcctgaggagaacttatgcacaatatataccccttacttaattttgcccctgggaatcctgcactgcctcaacttcttttgctctagcctcatttctcctaatcct

SEQ ID NO: 96712 - DNA, 457 bp, Glycine max
catgcaatgcttaacactatccatactgtgcgagagtatttcttgtgatactaccctacaccaacaaaacagagttgaggcagcaaactctgccgagcactcattcgaataacagagctgtccctactcacctaccctattgcatgcgctttgttacgatcagacaccataggatcgactcgcacatgtgactggaggttcctagtacataaatctatattgtgaccactgtgatctgctagaacattcctgcaacacgacatgtactaccatttcggtgactagcaatgcgcaaccattcttctgcactatgagaaaaatctgatgccaatcctacagatctatccgcataatatggcagacttcagaagacaacctgcccacatactcatgtactgagactggatcctacataggctagatcaagtatgatatatagtgaaaccaaaaacatact

SEQ ID NO: 96713 - DNA, 250 bp, Glycine max
  unsure (1)..(250): unsure at all n locations
aacctgtgacgtacctaaacaggcgagctcctggaagtcaacagacttaatgaacgaagacctcatacaaggaggctcgtgtgcgtgctggccacctgtgtactatgatcgatatctgggatttcggctctagtaatccattaccacaggtggggcttccacgaaaaagcctgtgtctgtaataaggttgctaatatattctatgcgaatggactnccatcgtgtgtcttccattaccactcttgtaaac

SEQ ID NO: 96714 - DNA, 394 bp, Glycine max
  unsure (1)..(394): unsure at all n locations
agctngaatgtgtataacccaccatcttctcacagtagaacactggtaatgtgtctactatcattgttatcatctccctttccgtcattgtgggcgcaacttgaactgccatatccctccacctttgggcgtatcctttgaaggattcatgctcctttgtgcacatgttatgtagctgcattctgtggcgttcctaaattaatgactggggtaatagtaatgatgtaaataacanaaaccatggcagattctggttttctttatctttttcattcctttctctattcacgataattacgttcagaaggaaaatcctcactatagagtcctgaatggctagttcacaactctattcggagtcatgtgtctcttaccactcgtgatctctaaacta

SEQ ID NO: 96715 - DNA, 343 bp, Glycine max
tactcaagcttctaacaacgatataagatgatgctacggctgtttctttcaatatatgctgggaagaggaacacggcgctacagctcgtagtaacttgggccgagacaaaaacgctactggttttaatcggaggtatagtcctcaagcctacccttatggtttgcctcctgacttcactccccgcaccgcgccagacgatttgagccaagcccttaccttagaggggcagctcccttctcacgccggctatactttgcaagatgatgatgaaggagatgcccatttaggtactctacttccccataatgaaccagccgctaatgagttagtccaacacaacat

SEQ ID NO: 96716 - DNA, 485 bp, Glycine max
  unsure (1)..(485): unsure at all n locations
agcttactcggggccatatcctgcgaatgcaaacattgggagagttagtattaccaagaaatgctactcttaaaacaaaaatggcatacaacctcctccaataaacacaaacatcaatgtaaatttagagcaaactcatgcacatacttccttacgaacattcactcgcacaagatattcttctaactaagaaaaatgcacccatgcacaatcaaggcaccttcgttacctagattatttatatgtacttccaaggtgtattcgttacctacatcacattcacttccttggctaaatntacatacatgcatactcaaagcattttggctaccaaaaattgcacacgtgcacattctggtatntctaatacctatgcatatacaaactntgtgatgaatcttggctatctacacaataaggtgctacattncatgctntattcaagtgttnttgtacctacagccgcatgcagattaaatatattt

SEQ ID NO: 96717 - DNA, 405 bp, Glycine max
  unsure (1)..(405): unsure at all n locations
aagggaccctaaagaagggacaaataagagcaatcacaccttccactgtaaagtctagtaatagcttcatgccaatagaaaaccaaaaagccttctcaagcattgtgtttttacaaatcacaaataaattattagggatgagaggggtattctataatacctgtaaccacttaattgtagacactggaagaaaaagatatcacaatcttctccagtgaaagcagatcattcaattaatatgaacatcactatatcttcatagacaaaaatgaagaaaagatactaattcatntcagtccatgctagaaatccaccaaaacatgcagacaaaatttggttcaaaacaaaaatacaggcctgcagacaagatatactagataccaacgtaaaccaacccaacacaca

SEQ ID NO: 96718 - DNA, 420 bp, Glycine max
  unsure (1)..(420): unsure at all n locations
agctntataagcgcgggtctgcgggacgaagctttatagtttttcttttggttaagggcttgtatattttgttttttttaatttataatacaaggatctttcttcatctgttcctacgtctctacccattctcatccatttgcatgtttacttctttatttctgaaacggcagatccgatgacgagtcccccgaaggtactaatacctgtgacccgcctatcaacttcgagcaagaaacgaatcaaacggaagatgaagggaacgaggatgtaggacttcccccaaaattagataggatggtcgcccatgaggaccaagaaatggggtctcatcaagaagaaacagaactattatacttgggaattggcagtggaaaaagggaagtaaagataggcacaggtattaccgcacctatccgt

SEQ ID NO: 96719 - DNA, 500 bp, Glycine max
ctcggaccttaaaactaagctttacgaggttgatcttgagcttcaaaatgtccttcaatggttgattttagccatggagttgcagcaaaagataaaggagaagaggtgaaaggaggtgccatccactagtgaataagccatggaagtaggagcttcaccaccaagagaatatcttggataagaagcttagagggaagcttcaatggaggaaaagagaagttgaactttgaagtgtgtctcacaagactctcattcatcaaagttatgacaagtgttacacatgtttctatttatagcctagatcactaactaaatgaaagcttccttgagaagctagagcttatctacacacacccctctaatagctaagttcacttccttgagaagcttccgtgacaagctagagcttagctacacacacccctctaatagctaagctcagctccatgagatgagaagctagaacttatctacacacacccctctaatagctaagctca

SEQ ID NO: 96720 - DNA, 438 bp, Glycine max
  unsure (1)..(438): unsure at all n locations
agcttgctggagaatattntcattccagattcacaagagatcacctactattgaaaggttgtactttcattttcccgatgagaattcaataatacttgaagatggtgataacattgatgccttgctgtccaagccaaccgttaaatagtccatgtttacctcttggctgcaagttaatggcattttccaacaagaaaaagatcttacatatttgcaattcataacaaaatttacatacattgccaataaaagatgttggaagccacgtaaaggaggctatacaattggaaggcttaactgggtgcctccaactactagagaattatattatcttangatgatgttggctttggttaaaggaccaacaacttatgggcaaatattgtaagtcaatgatcaactgtattctacatttagagaagcttgctttgctatggg

SEQ ID NO: 96721 - DNA, 473 bp, Glycine max
  unsure (1)..(473): unsure at all n locations
tctntggagaaacttccttgagatgctagagcttagctacacacacccctctaataactattctcacctccttgagaagcttccttgaaaagattcctaaagaagctagagcttagctacacacacctctctaatagctaagctcacctccttgagatgagaagctagaacttagctacatgccccctataacagctaagctcacccccatgacaaaatacatgaaaatacaaaaaaaagtccctactacaaagactactcaaaatgcctcgaaatacaaggctaaaaccctatactactagaatggccaaaatacaaggcctaaacgaagganaaaaacttattctaatatttacaaagataagcgagctcatacttagcccatgggctcaaaatctaccctaaggctcatgagaaccctanggccttccccttgatctttggcccaatctacttggagtcttctatccaat

SEQ ID NO: 96722 - DNA, 455 bp, Glycine max
  unsure (1)..(455): unsure at all n locations
agctttcaatcttgtccanaagtttctcatgttactgcaactaaaagaatnttaagatatcttattggaactactaatcatggcctacggtttgagaaaagggtctgagtttaatcttgaaggctattgtgatgttcatttttatggtgataaagtagaaaggaagagcaccagttgtgcttgttaatttcttggaaaatcactagtttcttggtcatctaagaaacaaagcacaattgccccgtcaacctcaaaagctgagtatgtctcagcagctgtttgttgctgtcaaatcatcttgatcaagcaacanatgttagattattcactagaataggctaaaatatgcatttggtgtgacaacacgagtgccatataaccatcgaagaatccaatccaacattcaaggtccaagcacattgacataaaacaccacctcaacagagatcattctc

SEQ ID NO: 96723 - DNA, 450 bp, Glycine max
tggtaccttatgacgaatgctcctttctttcatagcattactcagcccttcccttgcatgcatatatgtaaactcgtacatatttctgccttgcattatatgtgtatttatctaccatgaaaacgccgtggataccatgaacccatatggcctgaagcgccttactctgtgcttgaatgggtagcacaaaaccgtatcatacatatgtgtctccatgagtaagtaggacgagaatcctgacaccgacatgcgtgtctatacataagatgttgcctgcaagagattgtcctcaaacatcaaagttgcctctatatatatatagtagacagtgtgcgcggagtgtgagcgctaacttcaatccatcttccattgagtcagtgtgtgccaacgcgggtgcttcactcacaagcatcatcaaagaagacaacttggatggaattgcatggacta

SEQ ID NO: 96724 - DNA, 327 bp, Glycine max
ctcgtccaggatccttaagcacctgcggctgcagcttgttgtgggcttatatggaagcaggatctctgcgccacattgaggaccgtcaatggagattgtccgccctggagatgccgcgaaagacaattgcgtcttagtcagatgagctgccgtcgtcttgctctttattcatggatcatagatctcgccctccgatactttccctgtttaatgagactgcaaaagatgtccacatgcttgaattttttaaggcagatatgagacaggggagcctctattagatgataataatctatacattttaccttgtttggttaccagatctca

SEQ ID NO: 96725 - DNA, 480 bp, Glycine max
  unsure (1)..(480): unsure at all n locations
ggccctagtgcataggggactgtgctaagcctaaattcttgcactgagtgcaagaagtggactttggcttatcgcaacaggctcgctaagcgtgatttgcaggttataaatacgtttttagcatgaaaaacacgatttttcactctcctcttctccaaaatgccacccaaaccctataacctcattttccaccacccaagaccatcggtggccgccgttgcttgccgttggacccccacaccaagagaaacactntaatcgaagcggaatcctcagaatcctcctcaaagattcggtgaagaaaatccctcaatcctttatttcaaagtttctctaaggtaatcttgacttctaaaccttctcttagctagtttgagttcctcttagtgtctnttatgtgttggtactgaatagggtgttntacacttcctatgaaaaccctagagaatgagacattgtaaaagtatcttttataacatc

SEQ ID NO: 96726 - DNA, 351 bp, Glycine max
  unsure (1)..(351): unsure at all n locations
agctntccctctttgacaaatacccctcagtcatatagaatccatctctgggcctttttccacaactctcataaatgggagagaaatgttcatctaaagcatacaagtccctaatattatcaaatcctaaaatttgagctcctacggagcaaaacaatgtgtgtctcctagagagggcatcagctaccacatttgtttttccctttttgtatttgataacatatggaaattgctctaggtactctacccattttgcatgcctcttgtttaacttgctttgccctctaatgtacttaagtgattgatgatcactatgaatgacaaattccttggaaacaatgtaatgttccc

SEQ ID NO: 96727 - DNA, 497 bp, Glycine max
  unsure (1)..(497): unsure at all n locations
cgccattctctnggtgttatgcacagagaccttaactttgtaactttctcttcatcaatcagcacgaggattcacttctcaaaaccattgactntggattatctgtcttctttaagccaggtatttccggatggtcttactatatattattgtgattagataaatggttttgttaacattagtctttaaggatggttntaagcaactaaaagtaaaactggtttattgagaaataaaaccattattatgttagaaataccaaaaatttggattaaaacttcccaatttagttcattataattagtccttagtgctaatgttaacgatgcccttanataaatacagagaangctaccatttggtccctannagtntagtttatctcaatntagtctgactgcaaatttatggtgtaagatctatatgaagagtangannattatatgaacatgggcaagatgagatgaattgaaacattaagattcaagtaatacgac

SEQ ID NO: 96728 - DNA, 451 bp, Glycine max
  unsure (1)..(451): unsure at all n locations
gccggatcttcaagcacgcagctgcagcttgagtgtggggctcactccacaatcttctttggagctataagagggtattcaaagagcattataaagttaagttgaatcattccaagtaagagaaactcaagccaagacatttgtgtgagaaatctacattattgcatcaaccgtctctgctaagagtggtccacttctataaaagcttgtaatttgtaatagatcaaagataaaagtgagaaattgcactttccagagtgaaaatccttntatgaggagagatctatatttgtgcaatccaaaaacacaaaaacctctntattgtttaaaggccagcaatggctatcaaaggttgtaactagtggtgttgttgatctacttgaggctaggtgtgaagtccattgcgagtgttgtcacgttattgaaatctagtaaattttgtcaactatga

SEQ ID NO: 96729 - DNA, 486 bp, Glycine max
  unsure (1)..(486): unsure at all n locations
ggaagaagcactcaaaccaagtgtatntacccncaatgtctatactccgaggagtccatcaaggcctccccctcctgattcagaaaatattttaacacacagactctacctatgaattatgcagtacacacaactactcaattgttttcaaaatctcaattattttccaaaattattttaagtcatcgcgcttcaagtgattaaacttgccgggttcccaccgtggaacccatcataacttatcgcgcattaactcgtcgcccttaaagggtgttacagttgtgtgattgtataattcatagctcacaactcaattcatacaaaatctcaacacccatgtatttcacaattcattacatactaaatgtttgtcacttacacacaatctcaatcacaatttcataatcccaataaaacaatntatcacacctcatgaatgatacccatatcactcagtagtaatatttacatggcacanaacacgta

SEQ ID NO: 96730 - DNA, 489 bp, Glycine max
  unsure (1)..(489): unsure at all n locations
agcttgccaaagtgaaggctcaagtttctgaagtcaagggcgttatgatggaaaacattgaaaaggcaagacttatatacaaaatggcattgcttagagttctttaactgagttgatgtcaccattcatcaaatatgtagtactaatttggattaaatatttcattaacttttctcataggttcttgatcgtggagaaaagattgagatgcttgtggataagactgacaaccttcgctcacaggtctcattttcttctttatattttatttcttaaatatatttttaatctttaaaatatacatgattttttatttactctttcttatttntgttaaaatagtatctacaatattttcttttgtgttaattagttcctgccaacgtcgttacctagctacttacttttaattactctattatcaataanaatattgggtttaattgtcatgcgatgacatattnatttatataattcttgtacatacta

SEQ ID NO: 96731 - DNA, 494 bp, Glycine max
  unsure (1)..(494): unsure at all n locations
ntggggcttagcgcaacanatgggcttagcgagaacgttcagctaatgatcaagggtcaatgcgcttagcgtgtgaagaaaatggcacttagcacgagtgctgcgcttagcaagtggacaacaaaaaaaaaattaagttatttttctatcgacaacttcacaaaaactattttaacccctttttccaatgctaaacatgctgaattcatacaatcataaacaatcaacttaactaaatgcaataaagacaaaattaaaaaagggttgggttgcttcccaataagcgctcatttaacgtcattagcttgacgcatagttctttgttatcctggatcactcttggttctctccttcagaaccttctcatcaaactccttcacctgtaaacaaatattctggtccaacaattttctttcttcattaaatagataaaagatgatctgttggtcttcaatacccatnntctaacttttcttcccatgtccactacacag

SEQ ID NO: 96732 - DNA, 464 bp, Glycine max
  unsure (1)..(464): unsure at all n locations
agcttggtaatcgattacacaatgtaatgatacatgtattgtgtaatcgattacacaagtttaaaatactttaaaactgtttaaacataagttgtaactattgaaatttgaaatcttaacattntaaaacactagtaatcgattactaccttctggtgatcgattactagagagtaaaactctntggtaatgattntgtgaaaacctcttgtgctactcaatgttntggaaaacttttttagtacttatcttgattgaatcttgaatcttgatcttgattatccttcaatcttgattcttgagaacttgattcttgaatcttttgaatttgcttaactcttgattctttggcatcatcaaaataaccttggaaggattttcaggaggagcgttagtactggccaacatggatgatgaagaattgccttcgcccgtgaaatttgatgttgtcaaacaatattatg

SEQ ID NO: 96733 - DNA, 439 bp, Glycine max
  unsure (1)..(439): unsure at all n locations
tagctccttgagatgagaagctagagcttagctacacacccnctataatagctaagctcacccncatgacaaaaattcatgaaaatacaaaaaaaaaatccctactacaaagactactcaaaatgccttgaaatacaaggctaaaaccctatactactagaatggccaaaatacaaggcccaaacgaaggaaaaacctattcaaatatttacaatgataagcgggctgaaacttagcccatgggctcaaaatctaccctaagactcatgagaaccctagggccttcccttggatctctggcccaatctacttggagtcttctatccaatgcccttgcggngtaggattgcatcacgtcctcacctttagagggctgcacgccttcgcctttagaggactacacgtnctcaccttcaaagggcctcatgccctcgccttt

SEQ ID NO: 96734 - DNA, 471 bp, Glycine max
  unsure (1)..(471): unsure at all n locations
agcttctactgatgtggcaaggtgggacctctcttgcttgtggtcttggctgcgagccctgacccttgttcctcctttccaagatgtttttcctcacatcagcctgtgtgggtttatagcctaacctgaatctctcgtggtttcccttgatgtctactacgccggccatgccatcattattcttgcccaaacccattccgggctcatagtcatgcactaacattacccagaccaccatcattgtcgtgccaaacatgcggagctgcattgggagggattntatggaagcattgcttaccacctcanaggactggaaaatcgtttccaatgactcttccgtggcttccacatatggcatagaggaggggcagctcaccagaacatcttcttcccccgaaacaatgatcaaatgcccttccaccacgaatttcnagttttggtggaatattgaggggacaactcccaccgagt

SEQ ID NO: 96735 - DNA, 499 bp, Glycine max
  unsure (1)..(499): unsure at all n locations
tatctaagctcgaacatgcactcaacgctcatcttggtggcgaagcgtcttctttcatggcttattccctagtggatggcacctcctctcacctcttctcctttgtcttccgctgcatctacatggtggaaaatcaccattaaaggacctcattgaagctcaaagatccagcctctattgaagccccacaagcaagcttccatcagtgtttactttgtgaaggtgcgttgagcggaccacgatccgctaagccgcatgtcttatttttctatttttcaatttgaataacttgtggtctaactaactttttgggttcctttgtgttgcagatggcctccaagaagcgtaagagcattggggcaaggccaactacttagtatgatactagacggntccattcgcttgatgcttggaaccgttatacagataacattttgcgaaggagcattttgccagagagaaaggttgagatataccacatagagtttgatgacttcaa

SEQ ID NO: 96736 - DNA, 404 bp, Glycine max
  unsure (1)..(404): unsure at all n locations
ctcgacccggatccttaagtcacctgcgcatgcaacttgaaagtaccagcaaatgtattctagtgctaatcctangagtgtttggatggccacatataatgttcccaacaaaacactcacaatcctaatggaaaattgcataaatatattacacacaagtggaagtatggtgacctattggaggctcccaacttacttccaatgaaaggcctttgtgttacaaagtttgaaagcaaagaaaattgccaattacacattacanaaagaaaatgatgatgtcctgagaacacgtagtgaccacttctcaataatacacaaagctcgtatgtgcaagctgccaccaccagtgatttcaacttagaaatcaagaggagtgtttatgctgcttaatgcttggatagata

SEQ ID NO: 96737 - DNA, 468 bp, Glycine max
  unsure (1)..(468): unsure at all n locations
tcaagttgctcattgactccagattgctacatataaatacagagatttgtatggtgatccacagaagaacatagaccacagactcttgcagcaggtgtagatttctgattcatggcaagctgggttactaggttgaccaaggcattaagttttccctcaagctttttatttttagtagatgaagatgaatctgtggccacctcatggactcctctaaggataatagcatcatttcttgcactgaattgttgggagttggaagccatcttctcaatcaaattcctagcttcagcaggggtcatatcaccaagagctccaccattggcagcatcaatcatattcctatccatgttgntaagtccctcatagaaatatngaagaaggagttgctcagaaatctggtggtaggatagcttgacacaatttcttgaatctttcctagtactcatacaagctntctccactaag

SEQ ID NO: 96738 - DNA, 396 bp, Glycine max
  unsure (1)..(396): unsure at all n locations
agctntgcctttagcgcttngcacctcatctttaacctcattgtctctcacagtctttagatttgggagccaatccaatccttgtgttcggactctcagccacttatgatagccgccgatgatcccattactgcttcccctaagctatctgtcctttcttcacgctgcatcccacgccttgcgaactccttggagtactctcgcgttgtggtcactaaaaccccgtgcgatgaaaggcgtgatgcttttgtctaatggcgctcctctcatggggtagccaagttgtcttatggcgagaacgggattataattaatacaaccccttgttcccatcaaggagaacattggacatccttcgcatgaagatagaatcctgantctttcttccttctagcg

SEQ ID NO: 96739 - DNA, 409 bp, Glycine max
  unsure (1)..(409): unsure at all n locations
ctattaaactacgctttccacaagacgatcatatgcaattgttattgtatactggcacctcctgctgtcctactaaataactgatgcacagaccttaggatagagctcgcctcatcatgccagtcaagccttcagccacaatattgaaaaggaaaggggctaaggggtccccttgcctcaaacctatagtgggggcaaattcatttgaggggctgccatttatgagaatggatatacaagctgattgattgcaagcattgatccatttcctccatataggacanaaccccattctgaccatcatataatccagatatttccatgatacagagtcatatgcctttgcggaggacaccttagacaccatagccggcttcttactccctttagctaactctatggcttcatt

SEQ ID NO: 96740 - DNA, 442 bp, Glycine max
agcttggaacatacaatctgaatcttatgtcctcttatagacttaatcaaaatatgtactggctgatcattataaccaatgaactctgtgaccatcttcttggacagaagcttctctctaatgaaatgacaatcaatctctatgtgcttagtcctttcatgaaaaactgggtttgaggcaatgtgaagagcagcctgattatcacaatacaacttcattggcagctcttcacataaccttcattcctgcagaaactgtctaatccacatgagctcacaagtaactatagccatagatcgttattcagcttctgcactggaccgagcaacaactgtctgttcttgcttttcaaaaataagatttctccatgaaacacatagttgatgagaccttatcatggacaccagccaacagctcacatatccgatagtggataccctgc

SEQ ID NO: 96741 - DNA, 492 bp, Glycine max
  unsure (1)..(492): unsure at all n locations
ggccaccaaatatgttccaaacaccatttggactctgttacaagtgaaagttgttaatttctataacagccactcaatggcatgcattatgaactgtgcctttgaaaagattgccccaactggagtttcatatgctagtgttggatataaaaaaataaataataccatgagtcaaagataaaaaaacaatcatcagagaacatgtatgtacagacacagactgcccataaataattaacaaatttctgcacattttacaatagagtgaatgtaaggactagtgcataggtcataggtgttaatcttggtttattggcaatgaaatagtgaatgaaaaactntaagagcatgtttgcatcagcgtttcaacatccaccaatggcatttcatgctttccaaggcaatggctattgagggaagctttgaaatgaacatctgttacgttccattcaaagttttcgtatacacacacttagtcaatgcatagagctg

SEQ ID NO: 96742 - DNA, 447 bp, Glycine max
  unsure (1)..(447): unsure at all n locations
agcttagagagctaggcatttacaatgatgcatgcattggaaatgactgaaaaataattaaaattgggttaaatatcacttttggttttttatatatctttttaatgatttttgttctcatacatatgaaaatatttaatatttattactgtaaaattttagtaatattttatcctaataaatttaaaaatgtgtcactttttttaaaaaataggttcaagtaaatttaaatttatgataatcatataattaatattaatatgtcattctttatattaattatgtatattattgatgtaaaataaaatataaattcagatatcttaaacgtattntaagcttaaaaataatatattttaattctatgagaagtaaaaatatattctaatattattctctaaacagttattttaatggtttatatttntagaattattaaatataata

SEQ ID NO: 96743 - DNA, 434 bp, Glycine max
  unsure (1)..(434): unsure at all n locations
tctnnccctatttgctataaatagggggagaagtgaagaagataagggttcagccccttaggcacttctctctctttcgaatttgcttaggaaaattgtttccgtaaagaaaatccaagctgaggctcttccgtaacgtttccgtgagaaattacgcgaagatcctcaaccgttcttcaagattcatcgatcgttcttcgttttcttcagtcttcaacgggtaagtacctcaaactaagcttttcaattcattatatgtacccgtggtggtccatattttgtttcatgtattttcattctcgttttcatttactttntatacccccttttgacgtgcttaagccatttatttaagtcatttctcgcctaatctaaaaataaaataaatttccaccgatcgttngaattgtatcatccccgtactttggtaaaat

SEQ ID NO: 96744 - DNA, 436 bp, Glycine max
  unsure (1)..(436): unsure at all n locations
agcttattgttatcattattgtgacaaagttgacaattgataagctcagagaatatttcagtatttcactggtcatgatacataatcaataattaaaaaataataacatgaaagtatcaatcaaatccaggattaattattttaatgtgtggggacaaaatctacgtaacaaaaatattcggcaaatcacggngctaatcaatacaattaataggacaaccgtgtagattggtcttattatttattataaattagattntaaactcgtgcatcgcacggtttcattaaattattntatttttatttagtatttatataaaaatatatatattaataaaatatattttaaaaatatttagtagtatattaaatataatatattaaaattgagtacgataggacatataagatttgtggataggaaaatatggtgagt

SEQ ID NO: 96745 - DNA, 479 bp, Glycine max
  unsure (1)..(479): unsure at all n locations
ggaagacaagactatacgagggatcttccttgggtattacaatatctctaagggctaccatgtntacaacttgcaaactaagaaactcgtcatcagtcaagatgttgaagttgatgagtacgcttcttggaattgggatgaagaaaaattggagaagaacgttcttatacccgcttaactacctcaagaagaagctgaggaagaagaccgaggtgaaccaccttcacctccaccacaacaacaagatcaagaactatcatcaccagagtctactccaagacgagtaagatctttggtggacatatatgaaacctgtaactgggccatacttgaacctggaagctttgaagaagcgtcaaagcaggaagtatgggtcaaggcaatggaagaagagatacagatgatcgagataaacaacacatgggagttagtaaatcgtccccatggaaaagatatcatttgtggtaagtgggtctata

SEQ ID NO: 96746 - DNA, 467 bp, Glycine max
  unsure (1)..(467): unsure at all n locations
agctntatacaagggagcataagatacaagtatcattcaaggtaagctatttggtcaaaagagcttgtgtctatacaattcatggccttcatcatgttctgagttatacaaatcattctagaattcagagatttaagcaaagatcattattcatagttagtcgttcactcacagagtaaggtcacactctcactggtttttggttcaagcttttctttcacaatcagtttgtctagtgactaaccattctattataagttcacactctcgttctttctctgttcaacatgcacatttgctcaaattcatgaaaggaaacacacatttcatcataagcatgcattcaatttagaacaaggcataaccattttcacaaaataaataaactacttcactggtcgaccatcaacagttaagttaaactgttcatgatgcttcaagatgagcaactatactactcatgcaca

SEQ ID NO: 96747 - DNA, 404 bp, Glycine max
  unsure (1)..(404): unsure at all n locations
tgagccaaaatcctgactcaccatataccttgacccatggtgagaatgtcaatccttaccctcggaagcaaaaaaagaatagaggggaaatttccaatcaaagaanaagagaaggaaaatttccaatgaaagcaaaaaaagaaaagaaggaaaattccccaatcaaagagtgggagatagcaaaataagaaaagaaggaaaattccccaatcaaagagtgggagaaagcaaaaagaaaagaaaggaaaattcccaatcaaagaatgggagaaagtaaaaaaggaagaagaagaaggaaagatagctcctgatcagggatcgaatgataaacagaagatatgtgcagagaggtctttggaccggacaatatctgaacaatacagaattgtcaccaaatgaacaaa

SEQ ID NO: 96748 - DNA, 331 bp, Glycine max
  unsure (1)..(331): unsure at all n locations
agcttgatcttgattggaacacataggcaaaatggaagacatgtatttggtttgcctctcacgttttgngcattgcaaaaagaagtaaagttcagcacaagctcaagacgataaaagactntgatgaagactgatacaattccaaccactatgcctaaactgggagggatagctgcaaattagttaggagttaggagagtagcgttcttatggttgcatatttatgtttatctcttatggttaagcaatgtagtaacaaattgtgcaatttgatataggtgtggaggtatattctgtaggggcattggtgaattttgcaacctcgatcttt

SEQ ID NO: 96749 - DNA, 430 bp, Glycine max
  unsure (1)..(430): unsure at all n locations
tggagtatgaaacatattcagaagatgatggcggntatgggtgaaatggttgacatggacgatgatgcggaggataaacgacggctggatagagcaagggtgctcattaataccccatggaggccgacaatacaacacaccattaacgtgcatgttgtataggagtgcgggagtgtctatcacgaccgtaatgggagggatcgaagcatangaggatcgttggaggaaatcaactccgatgatatccacctggacttgaacacgccagcctcgacggagaaagggaggttcgaagaggttccgcaccgttggacggagaagatgtcggggacgatgataaccgaaaaccagtggagaaacgaattacccaatagtcaaagaatatgctcttacccactggttatcgatgctgaccgggagtcgtttggtg

SEQ ID NO: 96750 - DNA, 443 bp, Glycine max
agctttttggagaaataaatcgtagctttagaataaacaatgaacatgtagtgaaaaaacaaaaaaccgaaataaaaaacgcatacaaatgccaaaagaggtgaaaagaaaacacagaagaagacggtgagggaaaacgaacttgtaatctatccaacataccatgatctgtggcttttgtcttgcaaaggaagaagaatactcaaccacggtcaaataagattgaggaacacaaaaaaataatcttttgtacaaacagaacccagatatcaaaaggagaaatgaaatacatcacaaacctgtcctccaaatgccagagactatttgttgtcttcgttattgttgtcggtcacaaagatactcaatgctacagatctgaacccaaaatgcatgaatatgaagagaaagcaacgtcaaagaatgctcatgaacacaaaaatatt

SEQ ID NO: 96751 - DNA, 479 bp, Glycine max
  unsure (1)..(479): unsure at all n locations
ntngaccgtttatttaagccgttatctcgccaaataattgataaaatgaatttcaaccgattatttgtgttgtaatatcgtttaatcattgtcaaaataaaatccaaccgatcattcgcgttgtaaccttggttaaatcaaaaaaggcaaaaataataataaaattatcaaagtatctttgaaaaaaatataataaaataatcaaaatatctttgaaaaaatatagtaaaataatcaaaatatcttaaaaaaataataataaaataataaaaaaatcaatcggacgtttttctttgaaagtttccttgaatgaattgactaataaccaaagtgaaactaaggctaaaatcaactcacaaaccacgctntnttccgcanaaagtcacttaaaactgttttaaggtccaacgccttatacggtcctctntgcttttatttggtaacatggaccgttcanaaacataatatcaacacataac

SEQ ID NO: 96752 - DNA, 488 bp, Glycine max
  unsure (1)..(488): unsure at all n locations
agcttgtaggattatggtgtacccatcacatgttgtactatgtggcggtcgggcgatggtgcacaacaagttttccacatccacaatgcgcgcataaacccaccatcccctgttgcccacctccatctgagctcacgtactcccacgtagcccatatcctcgtttctctcaacaccgggtccccatcaatcctcccaagcttccaaaacatacaagcaaaacaacattcaaacagcacaagctatcacagccaagcataacagagcaaaggcagaaaactctgctgaacacatcaaccaaaatcacagcttttctcacttaaagaccacagtaacaattccttcgatccaattcgttaaccgttggatcgactccaaaattntactggaagtctatagtgcataagcctacattgtgaccgttgtgatctactagcanacacccagaactcattctgcactactcttttcacagccaaccacacacaa

SEQ ID NO: 96753 - DNA, 454 bp, Glycine max
  unsure (1)..(454): unsure at all n locations
ntagattcatcaagcaacaatcaatagaatgtctcatgattgtgaaatcgtccatgaagacctctatgcacttctctaccatgtcagcaaagatggctagcgtgtacctttggaaagtggcgggtgcgtttcataacccatattggatccttctgtaagaagagacacgcaaaggacatgtaaagaccatcttctcctggaccttgggatgcactgcgatctgactataccctgagtatctgttcaaaagataataaagagactgtcctgctagacgctccaacatttgatcgatgaacatcaaaggagaatgatcactccttatagcctcattgagcttatgataatcgacgcacatcctncatctagtgacagttcgagtatgaatatggtagatgatgtcacgacgagcttaagaacctgaggacttgctatttacttctttcttatggat

SEQ ID NO: 96754 - DNA, 456 bp, Glycine max
  unsure (1)..(456): unsure at all n locations
tcttaagtcacgcggctgcagcttttgaacgcggtgccatgattttatggtctgtanagcctttctcgaaactcgtatgcgcagacctaagtagaaacatcgcaatcttcaaataaggaaatagccgtgatggatgcattagagaacactatattatgtctaagcttccatattaacgcatttgaggctaacgaccgagaattgccatactgttgtgtccttaattcatgcaaatgacacctacatgcataagaaagtgctgctttggacgatacgagaatacacctttaatctgagaccatgacatggtgtcccaccacattgtgtggatttacagcaatggaaaaacatatgggatgcattcttctctgaattcctgcagagaagacattgcatagacgtgatctgcacctgcttctnctctattatgactgtaggaatctatctgttataatc

SEQ ID NO: 96755 - DNA, 383 bp, Glycine max
taagtcaattaggccaaggctcatgagaagggagagttcttttttccttactctgagctgatattctatatctatgtagaataatgggggtggcgacgatcacactcatgattgatcgggcatagctctatataccatgtgacgaagcaacttttccaaaatgtattgagagaaggcttatccacgattgtaaagctaacacaatggatgataactaagcaaacatcttccctatgcgtttgcacatagaaaagtacaacagacaattttccttataaataataaccagggaaactgttagtggacatacgaatgaatgtccaataaataaactgcatgtttaactccacccagaaaaaaatgaatcttatatcatttatttt

SEQ ID NO: 96756 - DNA, 360 bp, Glycine max
atgcaagcttgtctatcagacacacatcttcaatccattctgtatttgcacgacgggcctatacatatgagtgcgtgacttcacaaagcatgagagagatgtctcaattgaacttctatgtcacatggtcttatagcaactctagggcgaacactagccaatatattacgagctcatactacaacttaaaattgtcttatgcatctcttaaagacataatgctctctacgaacttcaacaatgtattgatacgtctataggagagaaagacttactgtttatctcataaagtgagatagaatccagagactgggtgtctctggaattctaagtaccttaacacaacggaaacggatccct

SEQ ID NO: 96757 - DNA, 408 bp, Glycine max
  unsure (1)..(408): unsure at all n locations
tgcagagagattctagttctagtttaattgattaccaattatccatgatcgattacacaattcagttgagaccatgtctggttttcatgagtctctactttaatcgattacctggtgatcgtaatgaattactttgctcttgaaaatgttcccttgagtgatcaagaatactttaattgattagatcaagaatttaatcgattacattattcttganagctttcgaggttttgggaagaaaattttaatcgattgaaataggaatctaatcgattacttctttgagatactcgattacattggcaatttaatcgattacagtcggttattattgttttctcaacaaataatcaccttgtgttctcactttcaatgaattagaatgagcttttgcgacccactcaatct

SEQ ID NO: 96758 - DNA, 366 bp, Glycine max
agagcaccagacgctgcagcttgccttggttagacatgattgatacatgatttgtttcttgtaagattcaatttgggaaaaattggatgagggaaagtgtgatttctaaaatctgcactgtatgcagaattttgctgtcaaataggtgcagcaaaattctggctttgtgcagaaagcgttgtgtatttgctggttgtggaaagagtagtaatgttttggttctggccgttttctagaagatcccatcggtcataatgtagatttatctactacagacttccagtaaaattgtcgagtcgatccaacggttgatgaattggaacgaacagaatcttactgtggtatttgagtgtgaaaagctgtgat

SEQ ID NO: 96759 - DNA, 438 bp, Glycine max
  unsure (1)..(438): unsure at all n locations
tatacacagatgctcatgttggagagagatttttttttatgagagcagctccataagttagcactagtttatacataaattaatttatacaagggctctgtcatatatttttctgaagactgagagaacttctatcaattaatccgtgtataagttaatttgcgcttatagaaaaatctgccgtattgtttcttctcctaaagtgattctagataagcttactgaaacaatccctaaagtcatagctagcataaaactatattgctgttacgataataggtagtaattatatcatacaatataaagttctaatattactctaaaattagtgaatagcttttggcaatgattattcatctacacacttaaataatgataaagaanagagcacaagataagcttccacccctaaattgtgggatccgtacctgagtacat

SEQ ID NO: 96760 - DNA, 400 bp, Glycine max
  unsure (1)..(400): unsure at all n locations
atcctctgagncacctgcggcagcaagcttgtgccatatcgcgctcatcttattctgtacaggccagcgctacgactagaactacgataagcatacaaatataaaggatagcaaagcccgacatctaatgatttgcgtctagataatgtatattgaaatggatggcatctatgaaaacttttgtgggttcgcttttctcttcctatttttctggggtaagaatactgttctgttatgaggggatagggaagggcagtgtcttattctgataaaaaaaataactatgtttaacaaccactgttntatcatgatgtgaacgcatgaacaagatgttgcttgtgtcatgactgcggtgtaccttactctatgaagtaatgtacaaatagtcatatgttttaaa

SEQ ID NO: 96761 - DNA, 412 bp, Glycine max
  unsure (1)..(412): unsure at all n locations
agcttccanattntccatcctcagcttttcatatgcatacttcgagtataacaacaatacctatgttctagtatgatgaggagaaacatgcattcatgactgatacaacttactattgctactcgattatgccatctggtcttaaaaatgttatggataagatatctgttcaccaactcgggagaaacttagaagtctatgttaatgacatggtggtcaaaanaacaaacaccacctatcatgcagaagagttggtggagatctttgcagagataagaaagcccaacattacgctaaagcctaagaaatgtgtattcagagtattatgtagaaaattccttggattcattcttacccatacaaaaattaatgctaacccaaagaaatgtgtggctatcatcgagatgagatg

SEQ ID NO: 96762 - DNA, 483 bp, Glycine max
  unsure (1)..(483): unsure at all n locations
ntattgctattcatcattcatgcatgatgccttcttttgtataaantatgattcattcttcttcatgcttgcatatctatagttggcctcttgtactatgaaattttcttttggtgattttgatccacttggattatataagctttgtgaatttgttgtggttatatcattgcaatttagtaacatttcacaacttttggcattatttagctgtaatatttaaaatttatggttatgtgtgatgtgatttgaatggataattattagtagcgctacatatctgcactcttttattcattgtctcagatggagccttgttttctgattgttttttttatcaagagcttataaagttatatgaatattctgttgattatattactgtactgattaataggttatctgatagtcatactagctatgtcattcttggattgggtgaatagccatttatgtacttcctcctctcactacaacattaaa

SEQ ID NO: 96763 - DNA, 395 bp, Glycine max
  unsure (1)..(395): unsure at all n locations
agctttgtggttgatttaaggatgtgtctttgtggattactgggcggcgggtaaagaggagggttgttattggctgagtaatgacattgttgggttggtgggaaacttggccgtatacgaatggcagtcacagcatgggtttctccctctttctcaccctcttcatttgccctatgttttttttttggcattcatcaaagcatgatgatcagacttgcctctttttaaacccactttgatcctttcgtcggtgaagaccaaatccgcaaagctttgagggtgcgtagcccaccatctntacataggagagtattgataatgtgtctaccatcacgatcatcgtctccctttccatcattgggggtaccacctgngccgtcagatccctccacctt

SEQ ID NO: 96764 - DNA, 484 bp, Glycine max
  unsure (1)..(484): unsure at all n locations
cttgaaggtgcgtagcccaccattatccatagtataatgttggtaatgtgttaactatcattggcatcattnttttcgtcattaaggtgccacttgagctgccatgttctccacctttgggcatattctttgaaagatccgtgccccttttttgcacatattttgtagttgcatcctatccgaagccattataccgacactgcctaacgaaggcaaccattatgtcctcccaggaatggactcgggaaggttccaagttagtgtgccaggtaacaactaccccagtaagactttcttggaaggaatgtatcaacaattcctcatcttttgcgtatgcccccatcttccgacaatacatctttagatggttcttgggtcaagaatccccttgtacttgtcaaagtccagcaccctgaacttgagaggggtgatgatatcgtgtattgtgaacaactcttctatgttagcaaaggactaatcttca

SEQ ID NO: 96765 - DNA, 395 bp, Glycine max
  unsure (1)..(395): unsure at all n locations
agcttgttggtctccattgcgctaaagaccgtgacatctcgcctttaggttgttcatctccaacttacctaggtacgttttgtgtacatgtgtttgtttcgagaacccgtggttaacccaagtaggttttttgtgttctgctgccagtgtcgtggtgacctgaggtatngttcactgccagtgccatagtgacctaaggtacattccactgccagtgtcgctaccattgtcgctgttgggttcgaggtaagattgatgtcttcattgtctaatagtcagcgtatttttctcttaattagtcgctggataggtttgttcactggaatctcttaattagtcacaggaattttctgattctgcttcctggctagtttttgggttctgctgccaatgtc

SEQ ID NO: 96766 - DNA, 493 bp, Glycine max
  unsure (1)..(493): unsure at all n locations
ntaaggctaagtcttcatgttgctcatgttgtttccctatctctaacagtccatcatcaatcactttcaagatcccttggatttataaaggcgcataataatatcatgtacccttccttattataacatctcctcatttttgtctcttcctctcccaacgcccttaatggaagctctaatgacgactccaatgacacctccaacatgagcaatccccaactgccaccgcacacttctccttcctcctccgtccaaaaacaaagttaacacaaaagcatagtgacattgctaaactcaccaaaccaacaaatccacaatgcatgataacaaatagaatatattatatttcataacgcatgaacacatgaaggttgggcattaatggagtacataagtgttcacaataccatattaccaaattatctgaagaaccagtagatacgcattacacgccaagntcatnatatttaatacactcatatgagatttcaac

SEQ ID NO: 96767 - DNA, 437 bp, Glycine max
  unsure (1)..(437): unsure at all n locations
agcttctagagaaacgccttgacctgaaatggtcattaagtcgatgtagcctgtggtctctactcattcccctacgaagctgagtggaacaacgcgaggctggatagtgacaagcgaaacttctagtctctagaaagtcttctagtataagacgtgagtggagcttcactggtcgataaggaccttggaaaccatgaagttagcgattatgatggaagcaaccatagggtcatcttagttgatgaggatgataccctcgaagtctctattagcgaatgtgatacgaggatgacttctgggggatggtgtatcgacatagttgatgtcgatgtctatgctccggatggcatggaggtggcgcttgtatgactggctgggttgtnctccataacaataaaaaaccaagtattgctcatatacatgagttcgtctaaaca

SEQ ID NO: 96768 - DNA, 460 bp, Glycine max
  unsure (1)..(460): unsure at all n locations
ntagaaccacacacaagaaattatttgttattagctgtttgtaaaacanaacacatgacatatgttaatagaaacgatgtcatacactctgcaaaagcatctcatacagtatttgtagtgtactgtcaagggagatacacttatgagataacctctaatctttttttatcatggaaagactctataataaaagcgtgtaccaaaagatagaagctccaaggaccttatatgtgcaatcagctgagcccactgagcatcaacagtactccattgatccctcttaataaccaaaacaatatgaaatacggcatgtgagaatatggtcaaagaggataacattagcataaaccatgatatcaaagatggttgacagacgcgaaatcttgtctgcttaacaagacaaaagattcactacataaataagagacataactgagtatattagcatctaacatactag

SEQ ID NO: 96769 - DNA, 407 bp, Glycine max
  unsure (1)..(407): unsure at all n locations
gcaagcttgataatgaataactacataactacatggtcgtgcaccaacaaggaataatggactcacactgcttctgtgtatctataccagcagcacaaatacagtttaaccatgaaacccaaccatcatctgctgtagacccttcgtgcgcatatttctaagtagaaagcagataagcaagctatacaaaaaggccaacccttaccaactccttcaacattcacgtaagtcctgtatcaacatatcaattgatcttctttccttcacaaagagaccgaaacaatcatatcgataaacaattcaaacaagccctgtgaatcatctgccattcacaataagagaatatttttcttttccatcagattaatccatgccaagcttatgttttgcnaatccatgcggccaca

SEQ ID NO: 96770 - DNA, 483 bp, Glycine max
tattattgttagggtttcttctgtaatggctatctaatcacccttgttggggatttctactgaacatctgatgtaattattttcatatctaattgattgtgtttcttgtgttcaatggttctttcattgcttaaactctatatgcttttggtcttatcagccatttgtgtgcctagttaggtgattttaacattggataatgtattgttgccttataacttgaatgaagcataattgaaacttagttttacaagagggatctgcagattaagttttggttttaagtatgttgttgcaataatgctgcttggtctaagtctagtccaacaagagggatctgaggacaaagcttatgctaacttattctaaactttcgtaagctatttaagctgagtatagtccaacaagagggatctgaggatgaagcttagtttaagttagtctaaacctacgagcgctgtctaaattgagcctagtccaaca

SEQ ID NO: 96771 - DNA, 416 bp, Glycine max
  unsure (1)..(416): unsure at all n locations
gcttacccctatggctggcctccggacttctctccccgtgccgccctggaagatgtgagccaagcccctaccttcgaggggcaacttcctccttatgccgattatcccgtgcaagacgatgaggaaggagatacccatctcggccccctgctccacctcaaagatccatccccccatgaactaccccaaccaaacatagtccgccacgtcccatcttcacccgcacccataatcgaatccattcccttcgcagaggatcagggaaagattgatgcgcttgaggataggctgagagtggtagagggcctcggcaattacccattctcggatctagcggacctatgtctcgtgcccaacatcatcatccctcccaaattcaaagtaccagactnttgatagtacaaagggatgacatg

SEQ ID NO: 96772 - DNA, 491 bp, Glycine max
  unsure (1)..(491): unsure at all n locations
cttacggaagcgtataagactagattatcttctttnttctcttctcttgcaccaatatcaagcgaaatatgcttactcaaggttttcagaaattttacggaagcattacagaagtcccggaagccctggaagcctttttttaacaaaacggcggaggtggttgccgcccatctcttccaggcgagctcagtttcttcaaccttaagcaaggaaatgcctagaatcctctagaagggccaagatttgataattgctatttgcacccccattttactaaatacacccccttttgggtttttttagttgatttctttccgaaacgttgcggaactttacaaattatgtaacaacacctattttcttcccagaatgttgtaaaccttacggattacgcaacaatgcgtcgtttccttctggaatgttgcgaaactttacggattacgcaacgacgcttgtttcgagggtatgacagttgcccctctttacttatc

SEQ ID NO: 96773 - DNA, 461 bp, Glycine max
  unsure (1)..(461): unsure at all n locations
cttaaaactaagctctcttggctaagctctctcttcgagtccataggttctattctcgtctcctttagagctgcgcatttctttgtgctcaaggacaagtataagaacattctattccccgtttatattgctacttgtttgcctgtgactttctatgctgtggtccagtttccgctgtatgccgatctacttaaagccattttcaagaaggtgccacaaccaagtattagcagcagccaattttagaggggattcttttgttctttctgcttcatcctacttattaataattttatttgggtaatttgcacctgaatatataatgcatgtcttgtactatgctacatataccatgttttggtctcttttggatnttgtacagaataataatatgttgacactcatatatattatatatatttctatgcgctcacatataatataataataattatatctca

SEQ ID NO: 96774 - DNA, 484 bp, Glycine max
  unsure (1)..(484): unsure at all n locations
gtcacctgcggcatgcaagctntaaaatacttttcgcacaggtaatgatttcttccttttccttataagacctcaggctgtgatagtatcaattccatggtcatctacatgaataataaattaacagacagtaaacctatgctatgtcgaacaaataaaacaagtcaaggctgatcactaaatctatcgttaaaaataaaataatggcaaatatagtgttcctttaccatttatataatagaatttgtcatccaacagacaggagtgataatacattgacctcccctgagcattatgattccaatgcaaacatcccaatatacatttcataactacattgaaaaataactcttgaataagcaatattcctatttaattnttcaaacatatataccactatgcatcatttttctggaaactgattaatgtactgaggaacaccacacactacttattttctttaatcttttggactatgtatttc

SEQ ID NO: 96775 - DNA, 446 bp, Glycine max
  unsure (1)..(446): unsure at all n locations
cttgatggtgtcgagaagatatcacatgtttgtcatcatctaaatgggggagaatgtgaatgtatgtatacatgattttgatgatgtcaaagaagaatctaacaaggctgcttcaaatgataagcatttgcttcaagaataatttaagattgcttcaacaaacaaagccttgtttcaagattcactaaagaccaagccttgccttaaaacaaagtgctttcaagacatgtaaggctctggtaatcgattaccaggaactgtaatcgattaccagaagacagggttgagaaatagttgttgaaaaaggttttgaatnntgaatttcaacatgtaattgattaccatatgtctgtaatcgattaccagcaacgaaactntggaaatcaaattcaaaagcataacccttcaattataattgtgaatcgatacacaacattgtatcgata

SEQ ID NO: 96776 - DNA, 484 bp, Glycine max
  unsure (1)..(484): unsure at all n locations
agcttctatattagtgtaccaaatgattgtggctccagccaagctatcttagaaaaagtgcatcaacagcttttcatccctagaatgcgcccccatcttgcgacaatacatcttgagatggttcttaggacaagtcgtccctttgtacctgtcgaaatcaggtaccttgaattttggggggatgacgacgtccggtactaagcaaagatccgccatgtctgtgaacggatagtcgccaaagccttcaacaactctcaatctctcttcgaagagatcaagtttccttttttctatcgctgccgagggcggtccttctgaggacaagaatattggttgtgatgggaggtttcgaggttctcccgtgaggttgggatgaggcagtgtgttgggtgctgacccctcgacagggactggagggtagaaatcgatgtctccttgngcatactctctacgatcctcgtgaacctcgtccgactatcgagga

SEQ ID NO: 96777 - DNA, 485 bp, Glycine max
  unsure (1)..(485): unsure at all n locations
tgtagaatgggtagacatgatacatgtcaaggtttggtttggttcaaggataaaagggatgccccacattatctgcatgacacaaatgcaaaaatgatgatttggaaacttcatgcaaaactggtcatgcatgcacctatgcggacactcaagcgtcaaatttttatggtcatgtgatgctagggctcaggattcatttcctctattttagtcaacccaatgtttccaaaatatgctcttttatcaatttgtgcattcatcctagtccatttcgggtgtccggngaaatttcacagcattcacccttcaggtgtagacacatttttcaaaaattggttatgatcaatgaattnttttcatagaanagtttggaaatcatctcttttcaaaagcatgtcggnntttagctagacaacttattttctttnttccacctttntttacatgcttcttttcttttctctttggtctcttctcatttcatt

SEQ ID NO: 96778 - DNA, 453 bp, Glycine max
agcttcaggctgctcaatagctccatgttgctgcatggaagggcaaaggtctgtatggtggtcagcagaggagcacaaaccacaaacccttgcgacaggtacagatttctgattcaaggccagctgggttaccaagttgaccaacgcatccagtttgccttcaagcttcttagtttcagatgatgcagatgggtttgtagctacctcatgcactcctctaatgactatggcatcatttctggcgctaaactgctgggagttggaggccatcttctcaattaaatttctggcttcggcaggagtcatgtctccaagggctccaccactggcagcatctatcatacttctctccatattactgagtccttcataaaaatataggagaagaagctgttttgaaatctgatggtgggggaactggacatagtttttaaatctctcccagactcatat

SEQ ID NO: 96779 - DNA, 369 bp, Glycine max
  unsure (1)..(369): unsure at all n locations
agcttcctcaatttttgtggattgatgctcttaatacggntgcgtatatattaaactgagttccaaccaatgctgtctcaaagacaccttttgagttattcaagggttggaaaccaagtttgcgacatatacgcgtttggggatgcccgtctgaagtaagaatttataatccacaagaaaagaaactagaccctaagactattactgggtatttcattggatatactgaaaggtctaaagggtataggttctattgtccatcccacaacactaagattgtggaatcaaggaatgcaaagtttcttgaaaatgacttgatcagtgggagtgatcaatttcagaacatttcttctaaaagggattactatg

SEQ ID NO: 96780 - DNA, 488 bp, Glycine max
ggaaatcacatttattagggagttgggcattttttcttttattatcctctgcatgcacgagagtttggccttagcttgaagcttttgcttgtttaggaagttctagagagagaaaggtccaggttccaaagagttctgagagattttgttgtgttaagatctgcagagatgagagctcgaagcggaagccattctgagaacttgagatgagtttgtgagtgattgtgagatcctagaggtgaaggagacatcctcaccacttgtatttttgcaatctttcatcttgttcttctctgtattggaaaggaggtttccggaccatggaaagctaaatcctctgttggatcttccctgtaggtacctgatgtaaatatatttctatctatgtaatggatgtttgtgtgttctctatgctatctgcttttcattcgagcatgcctctaccttgatcacatagatgcatggctttgtacggtcattcaacagtg

SEQ ID NO: 96781 - DNA, 460 bp, Glycine max
  unsure (1)..(460): unsure at all n locations
agcttatcaattcttcaacatccatggttactctaaccaacaacactctaaaanaaattaaaagataaggatcgaatacacttgaaatgtgcaattctttgatttgcaatatttcttcacaagttgatcaattcatgtttgtaaaatgagtgacttttagatcaactttaatctttagacgtattatagttctattcttctttaagactctcttgaaatgtttttcacaaattctgaacgaatcaagagtctgttaacaagaaaacacataggggtctttataaattttgactattaaaataaatctaatcgattataaaacaagtaatcgactaattcatcaaaatctnctttgcttctccttgtttccaagaagtgggtaatcgattatcctaagctgtagaaccttccttcttctanaactggcttgagcatttgattaccaaatgaggcaatcaat

SEQ ID NO: 96782 - DNA, 398 bp, Glycine max
gaagcaactggtgcataggtaacttgtgttacttatctggccttgaatcagaaatctgtacctgttgcaagggtttgtggattgtgctcctctgctgaccaccatacagacctttgcccttccatgcagcaacctggagcaattgagcagcctgaagcttatgctgcaaatatttacaatagacctcctcaacctcagtagcaaaatcaaccacagcagaacaattatgacctctccagcaacagatacaaccctggatggaggaatcaccctaacctcagatggtccagccctcagcaacaacaacagcaacctgctccttcctttcaaaatgctgctggcccaagcagaccatacattcctgcaccaatccaacaacaacaacaaccccagaaaca

SEQ ID NO: 96783 - DNA, 393 bp, Glycine max
  unsure (1)..(393): unsure at all n locations
agcnttgagccacaatcctgactcactcatacatcttgacccactgtgagaatgccaatccttaccctcggaagcaaataaagaatacatgggacatttccaatcaaagaaaaagagaaggaaaatttccaatgaacgcanaatagaaatgaaggaaaattccccaatcaaagagtgggagaaagcacaataaggagaagaaggaacattccctaatctaagagtgggagaaagccataagaaacgagaggagaattcccaatcaaagaatgggagaacgtacaaaaggaagaagatgacggagagaaagctcctgatcaaggatcgaaagaaaccagaagagatgtgcagagaggtctttggaccagacaatatctgaacagtacagaattg

SEQ ID NO: 96784 - DNA, 449 bp, Glycine max
  unsure (1)..(449): unsure at all n locations
taacatatatgacaatcaagataagtaattaatatcatatttagagactgaaataagaagattacaacatgtcaaactaaattcatgaattaaattataagattatcaaaattgaattggtagacaaataggggaccaaatttataattttgctcttaaattactttaaaataattatttttaaaattaaaaaattaatgactctaaaataattatttttaaaatcaataaataaataaagaagattgcattacaactntntacaaatgttacatcacctcttttctatatatttaatgtagntaaattgaatgtttattattttgaagcccaactgaaaactgtccaccataacataataaanttggatataaaatcattccacaacaagttttaaataatataaatacatttaactctaaaaaatatagatacatttaagtttaaat

SEQ ID NO: 96785 - DNA, 413 bp, Glycine max
agcttcttgaacgagatcaatatattcattggcataaattaaaggatgaagatatggtatgtgatatctcttggtgtcaccctgatgtaatgaagttatgcaatgcatgtaatttggtatttttgatagatagtacctacaaaacaagcaggtacagactctcactacttgattgtgttggtgtgacaccaacgaagatgacattctttgctggttttgcatatctggagggtgaacatgttaataatgtggcatgggctttagaacggtttcgagatttttttctaagacgtgatgcactccctggagttattgtgactaacagagacctaacattgatgaatgcaatgaaaattgtattccctgagtgtacaaacttgttgtgcacgtttcacatcaacaagaatgtcaag

SEQ ID NO: 96786 - DNA, 293 bp, Glycine max
  unsure (1)..(293): unsure at all n locations
tgagaggaagaatgacgacatgctctaactgctggctattctngaccatatatgcgaaatcgaatacgcaccgcgtactgtggattgagattgtaatatatgttgtacatcatatctgcacactggtcatcgttctcatcctctgctaaccgatgaccatgaacaaactctctcgtatgagactttcaatcttaatgaacccggccaaccctttagctactacaattaagaattcgcttattattcaatctaccgttgctatcactgtagagagagtcatgcacatccgtctt

SEQ ID NO: 96787 - DNA, 489 bp, Glycine max
  unsure (1)..(489): unsure at all n locations
tcctttacttgacattgttggtatgacaccaattaggatgacattntcagctgcattntcctatttggagggaaaacgtataaacaatgttgtttgggctctaaaatggttttgaggtatttttctgagacgtgatgcaatccctcaagttattgttactgatagagattcaacattgatgaatgcaatgaaaactattttccccaagtcaaccaacttgttgtgttggtttcacattgataagaatgtgaaggcaaaatataaaacctttgtgggtaaaaaaaatgcatgggattatgtcatggaagcatggaggagtctcgtggattgccttctgagcaagggttcgatgagttaagaagtttgaaattgcttgctcaccatggtcaatatttgttgactatgtcaaacaaacaaggttgattccctataaacaaagatatgtaaagcttggacgaataaggtgatgcatctangaaacacaacaac

SEQ ID NO: 96788 - DNA, 475 bp, Glycine max
  unsure (1)..(475): unsure at all n locations
atctctaagcaccgcngctgcagctttacccaataactccccaaatatgggcaaattgctttgaaccaaaattttcctttcatgaatgatgctctcctacaacctaagacaaggtagaaggagataaactgtacatgctcaaggttcaatcaaacaatcatacttttagctcatactgggtgcaagggataaatcattcatacacaatgntaaacatttggctaagtggctactttcaattacaacatggccttcatcatcttcaaactcatgcattcattccatattcatagattcatgcaaaaaccattacttactgctagtcattctctaacaattaaagatcacactctcaccgggttgtggttaacatgttccttcataatcaacctaacannaccaactaacatttcaatcatgatccctaatccatgttctttctcttctaatgattgcatgctcattcacagcatat

SEQ ID NO: 96789 - DNA, 472 bp, Glycine max
  unsure (1)..(472): unsure at all n locations
nggactcatgagtggtcagctgaggtctaagcggattgttcattctattgttactaatgattttccttatggcacagttgagatcaaaagcgactccacaaacaagagcttcaaggtcaatggacaccgacttaagccattcctcacaaacccttctttagtggacgtagaggtggaagagacttccttactccaccctactcttcctccaccatgacttaaggagcttcttttttcctatctccttctttaattgtattacatttgtgcgattctatttgatggcttacttgcctttaatctttaaattgcgctacattgaggacaatgtgttgtttaagtatggagggaggggggagttacttgctggagtgagtangaataccaaaaatgaaagcaaaatgcaaccaatagtggcttggggaagcaaataccgcaagcctcgtgagttctctctttttgaatgagaggg

SEQ ID NO: 96790 - DNA, 256 bp, Glycine max
gaggggaggcaccattcactatggaattagccatggaagaaggagcttcaccacccagaactgccttggataacaagctcgaagatgatgcctttatggatgaaaagacagagagattggggggagcacgaaattgaaggaataacagagggagagaagtggaacctttgaagtgtatctgcatagaccttcattcatccgagcttcaacaagtgttacacatgcttctatatataaaccatagagcttgcttgag

SEQ ID NO: 96791 - DNA, 489 bp, Glycine max
  unsure (1)..(489): unsure at all n locations
taaagatacagacactagcaccctatttatagcttcctaaagataattattccaattatgtgcactacgaaaatgatgaaatccaccagagcagtgattagaaactagtggcgctaaagctcaagggtgtagtggaacttactgatgaaagcttgcttgtggagcttctatggtggctggatctttgagcttcaatgaggtcctttaatggtgattttccacaatggagatgcagcggaagacaaaggagaagaggtgagaggaggcaccatccactatggaataagccatggaagaaggagcttcaccaccaagatgagccttggataagaagcttggagagggtgcttcaatggaggaaaagaaagagggagagaaagagagaggggggagcacgaaattgaaggaaaaaaagggagagaagttgaactttgagttgtgtctcacaagactctcattcatcaaagntacaacaagtggtacacatgc

SEQ ID NO: 96792 - DNA, 454 bp, Glycine max
  unsure (1)..(454): unsure at all n locations
agcttcctagcggnttctaattatatgggccattagatctatcatatgctgacaatagccgagaagtccgtggatctcctcgggagcagagtaggtgtctgccatcactttggccttagctagcaatcggggaagttcatgactcccgttcaaggtaagagcaaatcggtccatccatattgttacctcttgatgtaacgagtcgatcacccttcctctagcctccttttccgcgtacacttgggcatactcgtccgccactctatgctcgtgggtcatggcaagatttagttcttcttgttacctactgacgatggctagcatgttggtatttgttttgcataaccgctgagacaagtntcttttggaccttgagcaaaccttcaactcatctttcaagatcaaactgtctactcatgattggtccctttcctctctccggagcataagctcg

SEQ ID NO: 96793 - DNA, 292 bp, Glycine max
  unsure (1)..(292): unsure at all n locations
ntcaagagggaaaagggtgttgtagattctctgatgttacatggagagtgcgaatgaaaatgatgaagcagcatagccagtggtggagtctgagccacatattactttcactgtggctccaacgtttatgattggtaaaactgtgatacagtgccaagtatacctctcacagcaccaagtaaaaaatttcacatctactaagcaaaggaggtagttaaaaaaaagtacagctagtaagtagtgctctttgatcagatactgacccccgcatgcaataggttgttatattgtg

SEQ ID NO: 96794 - DNA, 466 bp, Glycine max
  unsure (1)..(466): unsure at all n locations
ctatcagcggcatgcaagcttaagctccttctattgcacaaagctcttattatttgaagagtatccttgtggaaccttcacccgacgaagacactgacaaaaagtgatgcaatcctccctatgaagggaccagtcactagagccatgagcaagaggctccaagtggattgggctatagctgctgaagaaggtcctatggttctcgcgaacctcacggtagatttctgagcccatgggccaaggttgggtccaattatctctgtacatattagactagaatgtcaatatatttggtccttgtatttagagctccataatgtangtagggaaccctagaaatataagaatttctatcccttgtatnttaaggcacctagactagtctttgtattaggggtagctgtgtaatttcgctcgcactaagtgaatatttgatgtgtgtgctgggaaataaatctaattgaat

SEQ ID NO: 96795 - DNA, 458 bp, Glycine max
  unsure (1)..(458): unsure at all n locations
cttttcttaagactttgctacaacctttntctttccctttggcaacatcaaaaagccaaagaactcggaaatcaacacagttataacaatggagtagcaagatataagtatcagagtattaaatacaataagccaaactcataatcaagaaataatcaaaccagaattcaaataacataaaatgtcaacaaccacaaaatatccaagactgaaatttaaaaacacaagataaataagcaaagtacttagcataataatgtaaattctaagaaactaaaagccaaaatacacggcttataaaagataaataatcagaatctaaaatctaagaagacggaggaggtggtggaagatcgaaactctgacgaatgtatccgacatcctcttcaagctgtgtaagacgaatgtccataccggcaaagcgtgaatctaacgagtcatagcggtcaccaacatac

SEQ ID NO: 96796 - DNA, 371 bp, Glycine max
agcttctatggtttctagaatagtcgattatcatatgtggtaattgattatttcgaaacatggaaagctcctatagttccatacaaaatctaatcgattacaatatgagataatcaattatttcaaggtacaatatcacaatcaatatgagaaatagtgtagaaaactcttaccaattcacggtagatgtgcccttcatctccacaagcttcttcaacccatgatactcgaagagttctgagaaaacaaaacctttagtctttagccattccaagtttagaaacatgaagtgaatcaactccttctaagcataattgtacacgtaggacacttcataatgttgctttgaaaaccatgaagtgacctttgga

SEQ ID NO: 96797 - DNA, 472 bp, Glycine max
tccttgagaagctagagcttagctacacacacctctctaatagctaagctcacccctatgccaaaatacatgaaaatgcttagctacacacactactttaatagctaagcttacccccattccaaaatacatgaaaatacaaaaaattccctactacaaacactagtcataatgccctgaaatacaaggctaaaactctatactactagaatggccaaaatacaaggcccaaaagaatgaaaacctattctaatatttacaaagaatagtggacccaaccttggctcatgggcttagaaatctaccctgaggttcatgagaaccctatgtagggccttctttaaccgctctagctcaatcctcttggagtcttttatccaatacccttgtgggtaggattgcatcaaagaccatagagaaacccacccctaagactagttcccaagcaaggactagcaacaataaatgcttc

SEQ ID NO: 96798 - DNA, 430 bp, Glycine max
  unsure (1)..(430): unsure at all n locations
agcttccaagtctttcattatgcagcgtgctcacttgaatcctgttccgacatggagactgttggataggataaaatagcttcatatgtctatatcactccattgtttgcttggttaaaattatgtgatttaccacgatacatgtactgtcttaccgtgttgacaaattcatattcccatttaccttgttgtgatgttgactgataatctatagtatgcataaattattgttttggtggagtcattccatgttaatctgntggtgaatattgacagattgtcatgtaccctcacggtccctgcatttgtattaatttcttgaccttggagggttctgcgtatactttgtatcctattcaaccacaaaatactatgtacttaataaacttgatttatgattgatgccctgcacccaattttcacaacgacg

SEQ ID NO: 96799 - DNA, 382 bp, Glycine max
gacctatgaaactcagcttactactgccgtgtcttctgaccaaagtcttctcattctctccatccatgatgcattgtcataactcattcatctcattcgatcaccatgtttatgacatctacactcttgaaccttgcagttgttgaacatcgcggagtatcatctccacttttagaagccatacctacagcgaaagatactgcacaagtagaacatagattaagagctgaccactcaactgagcgttgcgctcaaggtcactctagcatcactctttcgagacttttttctttgataataggcctctgtgccttgtaccactcttgctccaatatcccatgtcttcaatgtggaatatgtcacacatcaccactcaactcac

SEQ ID NO: 96800 - DNA, 409 bp, Glycine max
agcttgtctcttgcatgacctcactattactatgtgacgacgcggatctaagaaaaatttgtaactccggcaataatctcagacgctatgcatagtcaagacatagcacacacgcacacgtatacatatcgtgagcctactagtacattcaaatcttgtgaaagactaagtccgacagagagaaggaaaacattgttgtggttaagaaaactaataaacaaaaacacctctttttgtcatagcgcaatagtgagcatatcaagaaccgtcataatggttgtaacatgatacgttgtcataatcttatgctctctgaactctaccaatggagatttagctgcatataattaacattgaacgacttaacatcggatcggagcagatcaacccagatcataagatataaatg

SEQ ID NO: 96801 - DNA, 411 bp, Glycine max
  unsure (1)..(411): unsure at all n locations
tgtagagcaagtagacagacttgacagctgttgtgaattgatagataataggacgaggttccaattntgaggaaccttctgatgagcattctgaagtaacattataatggtcaatgccaagaacaagtacttagagagaagcattcttcatacagatggacttcaaggaatcttttgagttctcaacacttgacagatgttttgagacaacctttctgatcataattataagtatttcataatgaaagaacatctttgcttcttaatagatataacactaaaacacttaagctaaatgttagtaatcacataaacccatcatccttacaatattcattgctaatggtttgtcataattaanacaagggatgcggattcaacaatcttgccctttctaatgatgacaaacac

SEQ ID NO: 96802 - DNA, 379 bp, Glycine max
  unsure (1)..(379): unsure at all n locations
agcttccatggtgtagtgggaatggaagcaatgcaagtatgtgtgagagatgttgggctntgcatatatacctagctattctcatgaattaagggaaataaagcatacaagtgcctgtttttcacgtgcggtacaattgattgttgtggggttactattgacgtgaatggttgaagtgatatactgcaacaaaatgttatttgaaaccgggattagagtttaatttgtgtataagaaatatagccttaatgcccaaatcacatcttttgcatctgtgcagattattggtgaaagctcttcctttgttaaggtacgaaggtggaataagcatctcatggtttcaattcaaaaagtaagtactattgtagaaactgtgacg

SEQ ID NO: 96803 - DNA, 441 bp, Glycine max
  unsure (1)..(441): unsure at all n locations
tgccacccagctcgcccaggcgagctcagctagcccattcgagcagggttgcttcctccagaagtaacagccttctggagggcccaagtgggcctggttgctatttgcacccccattgttactaagtacaccccattgcctttttttttgcgattcttttttcgtaaagttacggaaacttatgaatttcgtaacgatacttgttttctttccgtaatgttacggaaccttgcggattacataatcatcccctttttgacttacggaatgttacggaacctcactaatcatccccttttttgatttccggtgtgtcacggaaccttacggattgtgcatcaatattttctctttgtttccggcatgtcccggaatttcacanattgcctaatgatgggtgccaagcacctcacaaggaccatacaaaagttgcatgtcatc

SEQ ID NO: 96804 - DNA, 310 bp, Glycine max
  unsure (1)..(310): unsure at all n locations
tgcgggctgtctgacatttgaggagaatagcgtgttaatcctgacattgacaagagatgccacacatggggcaattntgaaagctgctgttaggtgtccctaatgactcatcatggtgttcaagtatatgccattattgtaaaccacagctacaatgtttaatgaaatggataaagttgatatctttgtcccttatcctctcacaaacgcatgtttgcttattcaactttcatcggaatgtgagtgcaagccattggtctgtttgctcaagcgacctgcgctcctgattgttgcttccaagactgttcta

SEQ ID NO: 96805 - DNA, 440 bp, Glycine max
  unsure (1)..(440): unsure at all n locations
tgtgcanatcaagtcactcccgcattntatctctagcacgcattgtatgttggtctcgtcctttgtcacgggaagccggaaggtccatatcaccttcttaattgtacacatggggcactgcgcccccaaatgcgcaagtaagaagagataattttccgggctctcgtgtccgtaaaatgcattcatatcatgcatcgcataagcatctcttcataacatcataatggacatatcctgcatttgtccgttatcatattccggcctcacatcttgcatgagtcattgcatcatcatatgcgttcaacatactntntgttngctcatacatgatccttgtattttcctctacaaaacaaaaacaaaaaaaaaggggaaaagtacgaaatcacgttgcatcttagttgatatattcggtacatgagccaaccatgttggatcat

SEQ ID NO: 96806 - DNA, 361 bp, Glycine max
  unsure (1)..(361): unsure at all n locations
agctntataagtgcgggtttaagacataaaggccaagtcgccgcgatatgcgaggatgattacccgaggagatcggatttggtacggccctgtcctcctggtttccgactaggaaattggcgagtggaggaacgcccagacgtttacgcgacaaacatagtgtaaccctttgtagctntaaaactctacggtcgggcctaggctntagagtttcctttgggtaatgcattatgtcttttgttcttgaagttataatataaagatctttcttcatctgttcctgtgcctctacccattctgattcatttgcatggttatttctttacgcttaaaaacgccaaatcaatgacgagtccctcga

SEQ ID NO: 96807 - DNA, 480 bp, Glycine max
  unsure (1)..(480): unsure at all n locations
tcctctccnanacactaccctcgagaaaatcctattgttccatgatcgtacgtttgatctttgattcgataggaaatcgtgtgcaaaataaagtcatggtgcagttatggtgtcggaatagggtgaaacacttgcctgtgtgagttttatacactatgagtgatttattttcagcttagcccgatgtttcccccgcatgttcatttaaaagctaaatgttgacatcctgcccttcattntcggttacaaggaagattacccttggcacaagtatattgtttctctaagatatggtgctctcgcnaatgatttatttttctttgcaaaaagcatgtnntgcctttttatgtggaaaaatcccggtggaccattcggtactagcaacattntattcggagccccatgaattgcgttttcgttcatgcatcctccactcanagaagttggagctattcttcacgattgactagtgaggaccct

SEQ ID NO: 96808 - DNA, 496 bp, Glycine max
  unsure (1)..(496): unsure at all n locations
tactaagcttaagatnaagatggcctcagcaaattccttatttccagaagggaattctatcaatagacctccaatctttaatggagagggttaccactactggaaaacccgaatgcaaatttttatcgaggcaatagatctaaatatctgggaagccattgaaatagggccttatatacccaccacagtagaaagagtttcaatagatggtagttcatcaagtgaaagcataaccatagaaaaacctagagatagatggtctgaagaggatagaaaacgagtacaatacaacctataagccaaaaacataataacatctgccctaggaatggatgaatatttcagagtttcaaattgcaagagtgctaaggaaatgtgggacactcttcgattaacacatgaaggaactacagatgttaaaagatctangataaatgcactaactcatgagtatgatatatntagaatgaatacaaatgaaaatattcagagtatg

SEQ ID NO: 96809 - DNA, 489 bp, Glycine max
  unsure (1)..(489): unsure at all n locations
gggagagggtgcttcaatggagganaaganatagagagtgattgagagaggggggagcacgaaattgaaggaaaaaaaagaggaagagaagttgaactttgaagtttgtctcacaagactctcattcatcaaagttacagcaagtgatacacacgcttctatttccttgagaagcttctttgagaaaacttccttgaaagcttagctacacacacccctctaaaaactaaactcacctcctttagaagcttccttgagaagattcctaaagaagctagagcttagctacacatacctctctaatagctaagctcacctccttgagatgagaaactagagcttagctacacaccacctataatagctaagctcacccncattccgaanatgcatgataatacaaaaaanaataagtccctactacaaagactactcanaatgccctgaaatacaaggctaaaaccctatacttctagaatgggcaaaata

SEQ ID NO: 96810 - DNA, 484 bp, Glycine max
  unsure (1)..(484): unsure at all n locations
agcttatgcgcatatntncttacgaacgttctcttgcacaagacattctattaactaagaaaatgcacccatatacaatcaaggcagcttcgttacctatattatttacacgtacttccaaggtgtatttgttacttacatcacacacatctccttggctaaatttacatacatgcatactcaaagcattttgggatatcaaaaattgcacatgtgcacatccttggtattttaatacctatacatacacaagcttcatgatgaatcttgactatctacacaataaggtgctacattccatgcgtctttcaaggttttgctacctaaagccgcatgccaattcaagtatattttcctttgctgactaaaattgtattcaaattaaagggtatacatctttttgtaatgtattttctttacataacatgcaacatatttatgtatattntntttgtgagacattntgactaccacaaaatatatg

SEQ ID NO: 96811 - DNA, 156 bp, Glycine max
tgcgtgctctaccttctagcgaacactgacgtgattctgtctgatacaggatatacagggtgcagcaggaccggatccgctactataactgaactgaaggcgattgccttggctcatatatcagtaaagttgtggaccattatcatgacctacgac

SEQ ID NO: 96812 - DNA, 334 bp, Glycine max
agcttattgaaacgttgaggtgcttcacgcggatacctgccgctagactactatgggaatcattctccaagttgctactaatcgctctaacccgtagtgttctaactggacatgatgagtcaatgaacgctgtattcttaaagacccagaatgttgcgatactttgtcaaacatactattccttatctaggagggctctgctcattcaatgtcagaagagaaccgtttgcaggactacaaaggcggcgggcatgctttgtcgttgtgacatatagcgggacggatatgttgaaagcttagtatgcgaacacattcctggcatgaatcatacaca

SEQ ID NO: 96813 - DNA, 487 bp, Glycine max
  unsure (1)..(487): unsure at all n locations
ntctttggaccttgaacaagcaatcaactcctctntcataaccatgctatgtgctcgcgactggtccctttcttcccttcgcaacttgagttcattattgctaccccatagagctccgcgaaatttgttccggccatactcttccttgcgagccctcttggtctctcgttcaagggctcttgcggtaattgcattctcttcccgtaacccggcacactccttccgaacgtgtgtagcagccaacttgaacttctccttggcgagttttgcctttcctaactcgctcttgagagcttggacttcctcgtcctcttccggtgcttcgcaattctcttcgctgacgacttttaacttggcgagccaatctaaacctcgtatgcgaactttcagccattcgtggtacccaccaatgatgccattacgaatgcctctaagctcttgatctttccttaacgggggttcccatgccttatggattctttgtata

SEQ ID NO: 96814 - DNA, 400 bp, Glycine max
agctggacaggttcaagtgcaggtgctgctactgtgggaggcacttcaatttggatgccagacctcaaggtgatgacactcacatttttcggattctgcacagtctatgaaggcaatttgtcagaattttgggactgagctcggttcaactgagtagccatctgccccatctaatttgttagactcttaatggaggcttttgtctcttgctgaaattgaatattctggatggtcatttgcctcactaactcttctaaggaaggtcgaggaggggcctcagttgcttgttgtctttgttgtgactggctgctattgtgcttcattggaggaggaacatatggcttgcttggaccaacaacattctggaaagaagggacaggctgctgttgttgtggaggac

SEQ ID NO: 96815 - DNA, 483 bp, Glycine max
  unsure (1)..(483): unsure at all n locations
ntcaacaagttccttcacaaataatcatcacacagcagataactaacaaaaccacccatcatatctcccaaaaccccatacccacgaaatttaagagtgattgaagtccacccaaacctgaaatttcgaagtcccactcgtagccacgcacttcacgaccccgaaaatgctctcctttcgtgatttggagcagaaatgagtaccaaaggttggagctttgttggggtttcaatggagaatgagggaggagaaaatggcaacgtgagggagagagagagctgtctgaaaaagtgtgggggctgagtgaagagagagataagctttgtggttnttaaataaaaagggtttttctctntttctagttatttattcaagcaatgccacatgtctncatttgagtggagcaagaagggcccactttctctttttgactgtgacccatactcagtcacaaaagtgagaaaaatctgacctttgaacact

SEQ ID NO: 96816 - DNA, 424 bp, Glycine max
  unsure (1)..(424): unsure at all n locations
ttatagtcacctgcggcgtgcgagctagagatgatgatgtgtataagggcgatactttctgctgtgtattggtgaccacagagcggtacctggagatatgtcgcgggggtcaggagaccttgnggacgtcaggaggggtgctattgcccacaaccaagcttgaccaatcccgacccaacccgggcatagtcagttagtgagaacctgtgatgtacctaaacatgcaagctcctggcagtcaacagataaaaggaacatggaccacaaagcatggaggctggtggtggctggccagctatgaacttgattgatatatgagatatggcctctggtaatcgattaccaagggtgggtaatcgattacaaggcttaagaatgaagacaggaggctaagatagtctctggtaatcgattaccaggcttg

SEQ ID NO: 96817 - DNA, 500 bp, Glycine max
  unsure (1)..(500): unsure at all n locations
tactaagcttatataagggtatggaagtgccatatcccgtggtccatccaaganagataaggaccaccatctggcgagattcctagacattntcaggaaactggaaataactatgccttttggagaagctntgcagcagatgccactttactcaaagtttttgaaagatatgttgacaaggaagcacaaatacattcaccaagagaatatcgttatggaaggcaagtgtagtgttgtgatacagaagatccttccaccaaaacacaaggaccctggaagtgtgactattccttgttcaataggtgaagtcacagtgggaaaggctctcattgacttgngagccagtatcaacttaatgtcactctccatgtgtagaaggttgggagagttggaaatcatgcccaccagaatgactntacagcttgctgattgatccatcacaaagccttatggtgtaattgaagacgttctgataagagttaagcagatgttctttccag

SEQ ID NO: 96818 - DNA, 352 bp, Glycine max
  unsure (1)..(352): unsure at all n locations
agctngcagccattagaagaaaaaaacatgtgattagaagtatgactgaaaatggtagtcagtttgtcagattgattgtgaaggaatgcattgaccgtatcccaatgagagtgtgatccttaaattttgagagaaatgactatcctttagtactgatttttgcatgaatctctgaagtatggactgaatgcatgaaattgaggatgatgaaggccatgtctgattgtgatagccacttaaacaaaaagctgaccacgtgcttgaatgatttatccctttgccctagtttgagcggaatgaattattgattgattgaacctctagcgtatacagnggtatctcctactacctt

SEQ ID NO: 96819 - DNA, 453 bp, Glycine max
  unsure (1)..(453): unsure at all n locations
tctctgagagcactttcttgagaggcctgagtttacttgcacactctcctctcataactagncgtacctacttgagaagcctcattgcgaagatccctgacgaagctagagcttttgtacacatacctatggaatagctcagctcacctacctgtgatgagaagcgcgtgcttacctacacacaccgtagagtagctgatctcacgcccatgacgaagaagatgggactgcagattatgaagtggttactacagacactactgaaagaggcctggaatacactgctgggaccgtatactactagatgggcganaacggggcccagacgagggaggaacctattctaatattgacaatagtcagtgggctgatagttaggccatgggctgcgaatctaccctaaggctcatgagaaccctatggccttcccttggatctctagcccaatctact

SEQ ID NO: 96820 - DNA, 337 bp, Glycine max
agcttgagagagagtaaagatgttcgctgacatctcgaggattcacgtggagtttaactatcgagatctcgcgttctcgaagatacagccatacgagctatactcctaggtggatacatactttgacaagctatgtgcgatgcattgtggactctacgctgttctcgtatggatgtggatagtagcatacaaatcggagctttctgcctacacgaggattcacaaagtattctatgtgtcattcatccaaaggagcatccggtgaccactgcgactcacaacatttaccatgactggatgtggatggagacttatgaccttaccagaggtcatattg

SEQ ID NO: 96821 - DNA, 493 bp, Glycine max
ctacagatttggtcttctccggtgaaagggtttaagctgatctgaaaagaggcaaatttaatcatcatgcttggatgaatgagaaaatcggggcaaatgaagattgtgatgataagggagaaacccatgttgtgactgtcattcctatacggccaagtttcccaccaacccaacaatgtcattacttagccaataacaacccttctccttacctaccacccagttatccaccaaggccatccctaaatcaacaacaaaacccacctaccacacaaccaatgcttaacaccacctttatcacaaaccataacaccaatcaagaaatgaattttgcagcgaaaagcttgcatgattcaccccaaattccggtgtcatatgctaacttgctcccatatttacttgataatgcaatggtagccataacccctactaggtttcctcaacctcccattttctaatgatacgactcgaatgcaacgtgtgcttatcatgg

SEQ ID NO: 96822 - DNA, 467 bp, Glycine max
  unsure (1)..(467): unsure at all n locations
agcttcacttgaaattaagttattttattatgtgagcttctagatttaatccttattntctctccccctntggcatcaacaaaaagccaaagtgcgtaacaaatataaaacaaacacaaatgactaatcatacacaagacattcattgaaaaatctaatccaatcatgaagcataaacatgaataacccaaatataaaccacatagtcatataacataattcataaatgttcagtcaaaaagaaatactanatgttcaaatgtcataataatctatatcatttggataggtcactagcatctagcagtcctaattctcttctaatgttgtagcacaaatctttggttaatgggtttgtgaagatgtctgcaagttgattnttactatctacaaaatttgaaacaacatcaccttttagaacatgatctctaataaaatgatgcctaatntctatatgctnggttcta

SEQ ID NO: 96823 - DNA, 436 bp, Glycine max
  unsure (1)..(436): unsure at all n locations
tgcttaagaagattcctaaagaagctagagcttaacttctcatacctctctaatagctaagctcacctccttgagatgagaagctagagctaagctacacaccccctataatagctaagctcaccccatgacaaaatacatgataatacaaaaaagattcctactacaaagtgatgcaatccactactcaaaatgcctcgaaagacaaggctaaaaccctatactactagaatggccaaaatacaaggcccaaacgaaggaaacacctattctaatatttacaaagataagcgggctcatacttagcccatgggctcgaaatctaccctaaggctcatgagaaccctacggccttcccttggatctctggcccaatctacttggagtcttctatccaatgcccttgcggngtaagattacatcattccctccacct

SEQ ID NO: 96824 - DNA, 473 bp, Glycine max
  unsure (1)..(473): unsure at all n locations
agcttagagaggaagcctcagtggaggaagagattgagagagagaagaggngggcacggaaagcgaatgagaagagggagagaagttgaactctgaagtgtgtctcacaagtttctcattcatcaaagttatgacaagtggtacacatgtttctatntatagcttatcacgcatgaagctttcttgagaagcaaggaaggtagcttcctactgaagctagaggaagaaagcttccttgagaagctaaagggggcctattcacacccctccaatagctaagctcacccccatgccaaaatacatgaaaatacaatggtgaagctctcttgataagcaaggaagatagcttacttgagaagctagaggggggctacttacacccctccaatagctaatctcacctgcgtgctcacatacatgagaatatcaaaaaagaagttcttattacagagaatacttcaaataccgctgaa

SEQ ID NO: 96825 - DNA, 471 bp, Glycine max
  unsure (1)..(471): unsure at all n locations
tgangganaacttgatgccttggtcaacctattaacttatctngccataaatcagaaatctgcatctgcacctgttactgttgcaagagtttgtggtctatattcttctgctgatcaccatacagatctctatccttctttgtagcaatctggagtcaatgagcaacctgaagcctatgctgcaaacatttataatgaaccccctcaacagcaaaaccaacaacagcaaaataactatgatctttcaagcaacagatgtaatccaggttggaggaatcatccaaatctgagatgggcaaatcctccacaacaacaacagcagcaacaacagcctgtccctcccttccagaatgttgttggtccaagcaggccatatgttcctcctccaatgcagcaacaacaacaaagacaacaagcaactgaggccctgttctcaaccttcctttagaggagtagtgaggcanatgacta

SEQ ID NO: 96826 - DNA, 386 bp, Glycine max
  unsure (1)..(386): unsure at all n locations
cgacccggaccttaagtcacctgcagctgcagctgagaaatcctttcattcttttatacatttctgattngatggcatgagatgaaatgcanagatcggaccttctgttagttgttatcaatgaatagattaaacacttgtgcttgagtgaaatagtagccatgagactgtggtttgagcaactctccttgatatctgtcttatgattaacttcatctaactgtgtagttcacattttgttctcctctttgtctagctgcatattctgtgtaaacaagtgataggtacactttgcttcatctttctcatcatgcaatcaattaattttgatgcatacacctttgtacataaacacntgcatgtttaccacttgaggacaagtgagt

SEQ ID NO: 96827 - DNA, 450 bp, Glycine max
tgctgcctcatgaggaatgccttgctcttagatagcatgaaaaagccctttgataatatgtatgtatgtaaatatgtagcatgaaatgccttgcaaaatgttgaatgaaatgccttgcaaaatgttgaataaaatgccttgcaaaatgttgaataaaatgccttgcaaaatatgaatatatatagcatgaaaatgccttgcataatatgaatatatatagcatgaagtgccttacaaagtgtttgaatgggtagcgtacaagtgtttttcacaatatgtgcatttatgagtaggtaggacaagaagccttgcaaacaaatgtgtgtatatatataggatgtagcatgacaaggtttgccaacaacatatatgtgtacatggatgtctcgtagtaagtgcctctcaccaaatatttatgtgtgcacatgcatatgtgtcatataatatcac

SEQ ID NO: 96828 - DNA, 330 bp, Glycine max
agcttcattagttgttgcatttcactattgctgactcttatggaagaacgtgatgaacttcttgcatttcaacttgcttgattggtgataactattggcagcgtgctccttcaatgctagaagaatatatattggtttcatcattgactttgtcatatcatgaataataatattctcatccttactcaatggaccaacatatggatgatcaaccaatgacttggccaattcatgattctgactcccacacattaactacattatcctatcttccactgccaccactaatttcgcacgcatcttaaagggacactcacattttctactcct

SEQ ID NO: 96829 - DNA, 117 bp, Glycine max
tattactgcgctcctgacaacataacatatactaacgtaacttcaatctacgaactcgaacttcgaacctcctaattttcgacattcacaacaaaaaatctaggtacctctttctct

SEQ ID NO: 96830 - DNA, 303 bp, Glycine max
ataccatctacagaagctttgcactcaaataccaaatacagagttgatcaattcgcagtttatcacaaagtagtcgattacgatacagctgcatctatatcatgcttggattcctacttgggagatttttaagcagggaccagattttttttttttttaacatcacggcggtcatcgataaattagcaatgcatctgtccaggtttggtgactgcaggaaggacactcccaggtgataatcaaatggcaagaaagctagtctactagaattactgtaataccttgctagtaaagcggggttta

SEQ ID NO: 96831 - DNA, 145 bp, Glycine max
  unsure (1)..(145): unsure at all n locations
acttagtggacctgaatactatctatgatnggacttgatgttggatatgtgggcttgttatgatacagttgtgcagctagaaattgacaactgtgtgtgctatgtaagtgacatgtattagtgttcaacacagaaaaatgaaaaa

SEQ ID NO: 96832 - DNA, 343 bp, Glycine max
gcatctgatgtctgatttaggcactgaccatttacactcaatctagaactattttaccaaagacctttttatgcataaaggtttctagacggagactgctaatgctaagacattagtctacggcctaaatataaaacacacaataccataatctaaactagctacctaaaggctggctatagcaagctatacctctcaccactgctgaaagttcactctcctttattgctggaaccttaatattgaaaatgcctcatatacaaatagtagaagtcatctacaaggtgtgctgatgccattatactttagcaactgcacaactgtttgaacttccatctacgat

SEQ ID NO: 96833 - DNA, 313 bp, Glycine max
  unsure (1)..(313): unsure at all n locations
taccatgctgctanacatctaacactttgtaatgagatctntattangaaatattnttacaatgatgcaagatgaataactatataagtaaatctcttctgcatatcttggatgatatcatatngatacattctanacaattcatattcatgtgtgagagtgttaatctagatttcttgacatagntgtgccttatgggtacttgaatgtatccacattctttgcattntacattgagacttaaatatcatcatcctatgcgaaggatatattttggcttttaatgatataccttctcttcatatcatccatc

SEQ ID NO: 96834 - DNA, 159 bp, Glycine max
  unsure (1)..(159): unsure at all n locations
accggattgcttatataattacattatatttttttgcaggtgatgacatatgatatgttatacatgggttttaattgacattagttctgctatatggtaatctcatgatgctggggatagangaggagtatatgatgatgtaactgtccactgatttgt

SEQ ID NO: 96835 - DNA, 395 bp, Glycine max
cactcatgcatacaagcaatcactactatcatttcaataattctttgtcaacatgctttgtacagcaacactcagtgtgaatttaatactaaattaaaatattgaactacaattgaataaatactgacatcatcataaataatggaataactaaatgtcaaatgcacaattaatgtctgctatatgtgttctctggcatgctataagccacactgagactgtaatctgaaatagtgttactagcctgtgaatgtggatatagacaggcaaatgtatattgctggaaattctctacatggtctgtaataaagtagagggatattcctttgtggtccaaagtcggtgagcaccttagaagtgtcgcacctctaaatctttagtgagcactagtttaa

SEQ ID NO: 96836 - DNA, 349 bp, Glycine max
  unsure (1)..(349): unsure at all n locations
aagctatgacagtatggagccagtcaaccttacgtatcaactcagccagtaagcttgctgattgtcattcacctagactgaaaatccaattattgatttacatgattaaatctccccatgaaagatattnttgcttaataatgacctctcttatttatccatttttagttcatatgattcacctacatgagataggaccataagactcattataatgtgcttataaattgtcagttcaatgaactactgactaaacatataattctagagaagaatagctatattgatttacttacaactgttatcattgcaggctaactaaggggggatactcaattcacattactta

SEQ ID NO: 96837 - DNA, 290 bp, Glycine max
  unsure (1)..(290): unsure at all n locations
actatcatgaaatcatatatctggctattgtcttgtgtataatctattaatggctccaaccttatgacanctngttcacttgatactcaaggcttaacacctgtgactcgttaaaatccgcatttatgttatccagaatagactttatactttatctctcctgcataagtcgttcttttgccctattatcgaacaactatgctgcacatctgtctagaatccaacacagctgcatttgatactaattcactacaatcactatgttccgttcatcctaacttagtcacttc

SEQ ID NO: 96838 - DNA, 346 bp, Glycine max
  unsure (1)..(346): unsure at all n locations
agacactagacgatccacactggatgacctanacatcttttcggtntgatgaaacaaagatataattatgtaaccaccttgtgcatgtagtcaacaagttaatgactagaagcaacatcgggagggacatatncattattggataactagtctactggaagcatgaagtactcatccagtccattcanacaactagtggaataaacacttttattgaaatatctatttattcccagttatangattctatttanaagggaacatnattgtgaaactatcttttattttctttttatatgttaacgatcatatngaantatgaatgacatatatgganactcatggg

SEQ ID NO: 96839 - DNA, 285 bp, Glycine max
tcccagtaacacgagactaatatacatcatggattactattttcactaaatacaaagatacatatactctacttttgttaatttggcaaccaatatgaaattatatcatgctcgataagggtatgcatctaatattgtaagacctcatttcgaataataaacgctttataaaataattacaataaagttaaaaatgagagtttatattaatatagggaatatttcattaaaatggtgacgaaataaagatttattatattgatgaaaaaagatctttttaataat

SEQ ID NO: 96840 - DNA, 282 bp, Glycine max
  unsure (1)..(282): unsure at all n locations
gcttgtgtctataccaatcatggccttaatcatgttctgagttatacanatcattctacaattcanagatttattcaaagatcattattcacagttagtcgttcactcacagagtaaggtcacactctcaccgattntnnggtcaagcttctctttcataatcagtctatctagtgactaaccattctattataagntcacactcttgttctttctttgttcaacatgcacatgtgctcanantcatgaaaggaaacacacatctcatcatatgcatgcatt

SEQ ID NO: 96841 - DNA, 358 bp, Glycine max
  unsure (1)..(358): unsure at all n locations
gacccatgggcaagggtggatccattcttctttgtaatgtagaatggttttcttcttttagcttgtatttggcatctagtagatagggtttagcctgtattcangcatttgagtagcttgaatanggactcttttatatttcatgatttgcatggggtgactactatataggggtggtgagctactctactattacaatctctaggagctttcaagaggactagtatagaggtgggagctacttactctaggagttctaagactctaggagtttagaagcttagactctaatgaaaaactggacctgtgactgtgagagtataaaactaagtcactttctttatctattgcgcccttt

SEQ ID NO: 96842 - DNA, 175 bp, Glycine max
  unsure (1)..(175): unsure at all n locations
ctggaaactaacttcaattttgcttccagaatggccgagaactgcctcaaagtcagaagcaagcnccgaagaacattccctcggagatgacagcaccgttatgacctgacaccacaccttcaggcatcaagatggcgttctcggagcaccgtcactcaggacacagatctgattc

SEQ ID NO: 96843 - DNA, 206 bp, Glycine max
gttacttttacacgtgtacaaggtgtacgtcctctgctacgcagagattgaaaagacttcagtcgtaggacctattataccacctttatacccgtcgttgtgcgaagcccaaaatcttgcgacgcttggacgccccagccttatcaaaattagggtgcagacactgtgtagttaggagagcagtagtgagtgttgaattgaaaact

SEQ ID NO: 96844 - DNA, 75 bp, Glycine max
  unsure (1)..(75): unsure at all n locations
tgtcctaagtgatcatctangcttctactatacactataatatcattcaaataaacaactaccaatctacctatg

SEQ ID NO: 96845 - DNA, 375 bp, Glycine max
  unsure (1)..(375): unsure at all n locations
tctgtatcaaatctgaatatgaaaatggttggaaaaatcgaccgagccttcgtaacgttcgtgggatttcgcgaagatttcagctgtcttcgacgtcttcngtcgtcttcatcgtcttcggcttcaccggaagtctcaactgactttcattatttatgacccttagggcctcatttgttcatagctntatttcattcattacttccgaccctttgcggcttagcattgctaacatttctacctaacaaataaaaattcccgcatgagtgaatcgtatcgtaaagaatcacgtcgatgctgactgtgaacaaagaggaatatattatataaattttataatagcaaatcacgcgttttgattctttatatactaac

SEQ ID NO: 96846 - DNA, 339 bp, Glycine max
  unsure (1)..(339): unsure at all n locations
ttagtatggccgcgcttatattatgccgggggcacatngtatgattgatctgttcatactttaaccccttgcggctagtcatattagcattctactattaaaaaataattcacgacgtgatgacatcgtcttcgtgaatgaatcacgtcgctgcgacccgtgaataaaaaagagaatatattattaaaatcttagaaaaacgagacataacgtttttagattatctatgatgctaactaggaatagtaatctgctacagtgccagaagtttgagtattggtttaagaaagaattagcacctaatgacctagaagatatgtactaaaacactgtgtcttc

SEQ ID NO: 96847 - DNA, 237 bp, Glycine max
tgactttcacaaattcaacttacacaacatttatgcctttaaaacattttggagtcttaaagcaacataagttagctgatgctagactaaaaatgaaaccttgggtgcactacagatgaggcatttatgcaatcttctttttgaacacgtacagcggttgacactgaatttatgtggacactatttggaagcttacatacatcttattttttttatccgcgacacacaagcttgggc

SEQ ID NO: 96848 - DNA, 343 bp, Glycine max
ctgtgctgtaacagactactgctataaattactgtgagagtggcatgtttgaatacatcaattgctttacgattgagcatgacactatgtttgtgaacatttataactctcgacaaacacacgagatatatgacttagccattcatcagtgagatatcaattgaatggcagtctcacacacacagctgtcttctcagatgtgtggcaacagcttgtctcttagccacgaaggacaaaaaacatggtttacttaaatgggaagctcaatattgaaaaactctcagtgcaaatgcgagtcttgacatatcaatacatgtcaaggcataagagctctggtgacata

SEQ ID NO: 96849 - DNA, 309 bp, Glycine max
  unsure (1)..(309): unsure at all n locations
tctctgtctactctctatactgaacatctttagtactctgaaganacttganaaaatgatatctcttctctcagattcaagtcatagaggaggggctctcactctaacctatctgtgtaacttctgactgtgtgttgaatttgactgcttctgcgacatgctgcttttctgattttatccaaagatttgtctaactagtactaattactataatttacaagtcaaaacattagccttaaatagattgccattgtgagacaaatgcattatctttctnatatttagtaatgggacttaatcaatcctcac

SEQ ID NO: 96850 - DNA, 131 bp, Glycine max
agcacactttgactgttagctacaagggaaagtggtgtatctccttactgacatacttacaatacaaattctaatattaaactcataatctattgcaaccaaatcataaagactctaatggtgagcaatca

SEQ ID NO: 96851 - DNA, 242 bp, Glycine max
tactcattttatttattaaaacagaagaatcattttatttatctaactaaaaaagaaaaaaaatgctggtgcctttgtcaccactgttttataagaatcccagtgtgaaaggaacaaaaatcactacctatgaagactatgcgttgaagatataaacaagactataagaagatctttggggcttaaggctaaatatctacttccatttttatttttatttatattttattcttctaaaataa

SEQ ID NO: 96852 - DNA, 236 bp, Glycine max
  unsure (1)..(236): unsure at all n locations
gcttgtagagccnggtagttaagagaagtcaagttatatccatcanagtctgaagagagtatgatgaactaatggacgtcaatatggccaccgatgaagccttggaatgagaaaaccaagaaggcccgaaggaagaacacgaccaaanacaagtttgaggggcttatanggcagcaatagtgagctcacactccgaagaagtgaaaggaatcatcacgggtcanaggcatgatctg

SEQ ID NO: 96853 - DNA, 243 bp, Glycine max
cataaaagaaagtaattgagcgagctttctcggcatgcatacttctatgtgaacaaatgatggctgaatgcttgaaagctgataaatataacttggaaattaaaatggcaattttcaaaggttttaactaagttcttaaaaacatggggctatgttcaaattgtgtggacatcgcgtagggattggtaaaacctacatcaacatttgctttaaagagcaattgactgtgttaagaactatatc

SEQ ID NO: 96854 - DNA, 144 bp, Glycine max
  unsure (1)..(144): unsure at all n locations
cttatctactacagctgcaggggatctacatctttttctnaggaagattggcgcttttgttctactttcgcaatatgctagtgaactgtaataacttgaaattaatgaaattaaagtttactagtcttaaacaagggctagcca

SEQ ID NO: 96855 - DNA, 395 bp, Glycine max
  unsure (1)..(395): unsure at all n locations
gctctattctatctcatgacgcccagcttctattttatgaatacttatatgacanatagatcttagtattatgtaaaaaatgttattatagaatacatatcatctatatcaaacaaatataaaaattggatagatctatgaatctcaaanatcccgtattcaatatttcattaacatatngaatatagtgccatcatatttatcgattagaataaatagattatctatatatatagatagatatttatttgaatgcttcattccgatagcagatccacgttcancacctaccagcacatatctattcattttacgatacagcacggtcgacactacaaaggacagtccctaaatagctaaatgcatntaatcatatgttcatctaaatctcatta

SEQ ID NO: 96856 - DNA, 287 bp, Glycine max
tcaaattctggggcttgaacgaactgcctcaagacatgactcatgactaagctaatccacgtggtctatccaaactgccctgagttgagaatctaaagcccattgaaaacatcctgagtggtgctcataacgctaatatatatacaacgccatgatatgtcactttttaggcttgatttactgaccgttacaattgcacacaagcaagataaaatgtacttcactagaaactcttttattggtatgaggtgcatttgttctcagtcaggctttattcggacttcttc

SEQ ID NO: 96857 - DNA, 332 bp, Glycine max
  unsure (1)..(332): unsure at all n locations
taagttttgtgacagcanacaccatccccaatgcatgttgaagatatattcttccttctctcgcattnnggtgactcannaatactctaatggccacttgttgctttatcatatgnnttagttattagagagaaacttgctgagctgtatgaatctgagaaacaatggtcaaaagcagctcanatgcttagtggtattgaccttgcatcatgaatgaagtctcanaatntcntacctcccatatntattgtcctgtgtanactattatgatgtatattcaccccanattgaananggctctcttctacttcattgactttcattaatttatc

SEQ ID NO: 96858 - DNA, 101 bp, Glycine max
  unsure (1)..(101): unsure at all n locations
atcaattacaagaacaatcgtactaatatagatctatacacttactaccaaaatatatagtaacatacataantagatatgggaatattacanatagaccg

SEQ ID NO: 96859 - DNA, 444 bp, Glycine max
  unsure (1)..(444): unsure at all n locations
ctgacgctgctgctgtagttggatctgtgttatggaagctctgtgcagtatccacactatccaaaggatgccgttgatctttctggttatatttatagatatctattcttgaactacttgtcagtnttggatacttttgaaggatcagactcgagtaattcttagcatcttgatcacagatctgaccatattttgagcatgatgtggtttctggaccttttcagggatattctaccttgtttgtttaggttaaaggaacaaatgacagcactgttctgatatactgatcatgagcaccaccgatatgtgttgtgtgtgtgcatttagtgccaatcattcaatgcttactgatataatacaacagtctgctcatgaatcactgagattttaatatgctgctttttaagctataaaaatatgtgctacagagctgagttgcaatct

SEQ ID NO: 96860 - DNA, 246 bp, Glycine max
  unsure (1)..(246): unsure at all n locations
tcatgaaagactactaacctgctctttttatctggctattagacgatgtgagaccattcattatgaggaatgatgacagtatagatggtttgataaaaaacagtctttggatcatggcatgcngtatagagacgtgtgtatcatgaaatgtacggatgactgtgtagctatnttttgtgtgctagatttgccaattagtgatatgaatcacaccttctgtgataggagggcgatgttttccttttt

SEQ ID NO: 96861 - DNA, 135 bp, Glycine max
  unsure (1)..(135): unsure at all n locations
catgtgttcttccttaagagaggggtgtatcccctgtgaagatcctgcatactacctgcaccanaaggaacataacacagtcattaagaatcagtgttctgagtatattcaatgaatttgtgtccacaagcctgt

SEQ ID NO: 96862 - DNA, 268 bp, Glycine max
cttctgtgcgtggcgtttttcccaataaacgacctgaataagcatctttctgtgcatggccgatttagactcaagaacaggctgaatcaagcatctttctgagcatggcgagttggcctcatgaaaagtcgcatcacaatacttacgtgggagtcgaaatgatctaatgagcagttacaacagcatactttctgggcatagccatttggactaagacgagttcatcacactcttctgtgcatgtcgatttgctgataacactgcataa

SEQ ID NO: 96863 - DNA, 309 bp, Glycine max
  unsure (1)..(309): unsure at all n locations
gggtgactacctacgatgataccctagccatgagtcgctacgcaaagcatttgacttcagaatagctcattactgaatgtcgatttacatattcataaaaacctatgcgaatcaaccacaagttattcatctcaaaacttaatgngaacatctattgaaagttcttcaaatatcgtaacatacacacgctaaaggattttaacggcttgacacgcttaatgcgtttaaacggtctatcctgaagtacttacctaattcaataccctttgtgtgtacggaaaattttgaggtaatctgtgtgtgcagtgt

SEQ ID NO: 96864 - DNA, 306 bp, Glycine max
  unsure (1)..(306): unsure at all n locations
gctcatatcatgaatactantctatgtttagccacataataattgctggctaaataaggctttaatatctaaacaggtaacatacatactgatataagtttaaacataagtccttaacctataagaattacacttgtatatntattgtagttcctagctcacatatatggattgaaaattatttagtgcctagataaaaaatggggaagcccattactaacatgacattcaatgtgaacagactatctaaattgccacacaacagtcacagtctacaaatatcgcaatattaggacttgaagtatg

SEQ ID NO: 96865 - DNA, 255 bp, Glycine max
  unsure (1)..(255): unsure at all n locations
acagagttgtacctggagatatgtcgcgggggtcatgagaccttggtgacgtcacgtgtggtgctatngcccataaccaaacttgaccaatcccgacccaacccgggcatagtcggtcagtgagaacctgtgatgtacctaagcatgcgagctcctggcngtcaacagtataaaggaacaaagaccaccaagcantgaggctngtggtagttggccagctgtgaaactngactgatatgtgagatatggtctctg

SEQ ID NO: 96866 - DNA, 368 bp, Glycine max
  unsure (1)..(368): unsure at all n locations
acaatcatcatatatccatttaattngataacaggaaaaataaagagtagagcttatgagcatacattagttaagccacccgtgaaaagtgcanatgaaaagtcagatctctgnataatcaactgaagcttcacggaacctttgtctgtgctcttgtaaccatgactggagaaaatggcatattgatactganattagaaacagaaaagaggaaagttaacattaacatttaacttcaagcttcttaactangggtgtggctgacaaaccttgtaggcgcgaacacagaatggggattgccatatgtttctgcaggcangagaacactgganatgtgaacatttgactccatcatgcacaacacttta

SEQ ID NO: 96867 - DNA, 309 bp, Glycine max
cttgtctctagactagatggctaccattcatgtttccatgtgctgatttctatacctatctacacatagaggtcagttgtgacataactccatgcactatgactctactctgccttttagaggtgacatttctctaagtatcacactcagaatactattgatatctgttattttaataatcagctaatggaagcacacttaacttttatactttctaaataggtttcaatctctgaatgttgtgcaactgtctgatgtgtgcttcatgatagctcactactaaaatgctcctactttacctgttctcat

SEQ ID NO: 96868 - DNA, 375 bp, Glycine max
tctttgtggttttttggttggctaagtggctcgcatgaaggcggaacaacttgtgtgattaggaggcttgggatacgggggggaagagaagtgtatgctagaatgacatgtggtggtgaaactggcgatagaaggagccacagggtctccttttaccttattgccagtttagcgctatagagacaattgctcttcgatcactcactttgtggaaacaactgaaactgaaggtgaccacatttttatagagacacggcacggctactatatatatatccttcttgtttgggggcactgagtgcagcttcattttgcgatcttgagatctgcccttttgcactttgagtgatctatcgactatagatgctgcctgta

SEQ ID NO: 96869 - DNA, 238 bp, Glycine max
cttcttccctctcttccttttaaccactatggtatgggcggctattttttgctcatagtcctccaatgggaatgctgacttcttcaattaacagttgaatatatagtcgtatgtcaaatccttaggcagcattatagacttgcaagtggtccactgctttgctattctattattaatgcaaatatcatggtctcgtagtcacttcatgtagctttcacacatttgtacattatgagtt

SEQ ID NO: 96870 - DNA, 317 bp, Glycine max
  unsure (1)..(317): unsure at all n locations
tcctacccatctcatatgattactacttcagtctgggaagggataaaatatcattcatggattaatttgctttcttttcatggacaatttttataactatattactattatactttatgcaaatattatattaacataataagaaactganaaataattcatatgagatggagatgtatattcttgagctcatctatatgaatgcatatatagttatatatgaatttattactatatattgtaagatgaattatttacaaaatgtttgttctagtacgttttttatttgccttaatttatatagcatgacttattat

SEQ ID NO: 96871 - DNA, 290 bp, Glycine max
cataaaccaacatctcattatgtacgtgatcgctcaaattatgagctacggctaactcattgacgtggacacacaactcaactattcatatttcacacacaatctgattttgctggcaattgtgcattaccaaatgcaaagctttgaaccctctttcattgcaatattccagtcatatgtatctgtaccaatactcaacccaccaatttggcaacctatatggtttagtgaggataagagaatgacattctccagttatataatgtaacgtcctatccgaaatgttaaca

SEQ ID NO: 96872 - DNA, 253 bp, Glycine max
ccggtcaaaggtgaaaagaacactataatgataacaatgaggtaatacaccgggatgattgacaataatgaatttcggtcaacagaccgaaacactatactacagtctgagctgactcttattaatgttttaaaaagctttgcatttcactatattagtgcgtgttctatcaaccatatattatattatgggatgatgtggctatttgtcaaagccttatttctgtcacgataaggaatataatctttgttgc

SEQ ID NO: 96873 - DNA, 130 bp, Glycine max
agcaacctctgaacaatatactaatcaaatggtcaatgatctcctcagtaaagaatgattaaacaatcattatatcgtcaaatcaacaatcagataaatcagatcaagaactatcaatagataaagtttt

SEQ ID NO: 96874 - DNA, 269 bp, Glycine max
tactgttagaaagtagtgcccttctagaatggaactcccctcggctctaaatcaatccgcagaaaaagaagctaatgtgattgatattacaaatgaaaacattatgtgctttactcacatctttttatgtgatggatactcactatgagaaaagtctttatgacattcatgtataaagcattattgcttagagtatgccattgttcgtatgaaactcttactatgtttgttaagagttataacacttctatgatatgtgtctacacaac

SEQ ID NO: 96875 - DNA, 287 bp, Glycine max
  unsure (1)..(287): unsure at all n locations
atttcaaatattaaatattgataagctataactgcacctatngtcacactaatgatagattactaaaatacattctctgcactatttcaggaataccataaacaacttttaactttgatatgtagcatggcttgtgtgaagtctcataactaaagcatgatgaacccagaataataaattgaataatgtgctcatagtaggtctatgaaggtgtctgagaaaactgaagtaaagcgcacttatgcattgttaacaatgtgactgcatatagtctcgtagaatgaagt

SEQ ID NO: 96876 - DNA, 319 bp, Glycine max
actcatgttgatcaaggttgacgagttgctctttgtcttttcagtcacgacctatgtcttactacattaaaatcataatttttttcataagaaaaggaggccgaggaagtcacacatacttctgattctggatgatggatcatttggttaaagcattgcccgtaatctatcatcactttgttaatttatctaaacatttaatacgttcttctattaaaactaaagatattaagatttagaaaaactaacaatactttgtagaataaataatgtaggcaaatgaaaaaatactatcaaaatctcaaccactagcttttct

SEQ ID NO: 96877 - DNA, 326 bp, Glycine max
acttctctcctttcttcttcattcggctcccctcttttcttcctttcttctcattgacatcttcagctctatcacctattggggaagctcttcctggtatcctagggaggcctcttaccttttcttgcttcgtgattctgggaaatacataagactatgactcaaatcacctctaaaccccaacacttctaatggtaacataactaattggtctaactctatttgttactcttcactctaaccccagcactctatacgagaggtgtctcagaaaatcacaacgttatgttcaatccatactcttctcaaatagaaacctattattc

SEQ ID NO: 96878 - DNA, 208 bp, Glycine max
tattatgaagctatataccaatatcaaagtatcccatacaacataagatgaccattattatatcaattgttccatacacacattatactatataattgaaatatacaaaacactgataaatttggtatgtttgacagttcaccttaaattacagtgaactttttctaccgtcacaagcttagtagtcatataatttttctttaataca

SEQ ID NO: 96879 - DNA, 135 bp, Glycine max
  unsure (1)..(135): unsure at all n locations
acacgtctaatcatatttcacatggcagagaggtaataatcgctttcaccattagagcctnccaactaattaatatattaatatattaatactttcaccattaccacagctaataattagtcttaccattataaa

SEQ ID NO: 96880 - DNA, 238 bp, Glycine max
ctctttgcaaaagatcgcaggactacgctgatctttggtttctctctttcaaaacaagatacactgatcttggctcttctctgcaagataaatactagtgagatcttgatctccttctaacaaaattaagatacgcgaatcttgttcctacaagtcaggacacgctaacttgctaccatgagtcatcttgtgcaaaaggtcattctggtgtgcgaacagagagtctcctgtgtaaaac

SEQ ID NO: 96881 - DNA, 261 bp, Glycine max
atgtcgtgtgatgagcatgtttgtgtaaagaccaaacactccagcaatttatagcatggtacatacatgtcttgcttacttactaagacctgatgactctatcctcttagatatgatatttgctaagtgagtgagcttttataatttgttaagtatgttcaggtcactgcgttatatctttctatatggctttaaatgaaaatgttaatgtgggcaggcatttaattcacttcgtttctgatgaacgatctctggggcgac

SEQ ID NO: 96882 - DNA, 286 bp, Glycine max
gatgagacaacttgatataatgagtgagcaacgatgacactggtcacccttcatctaaatataggaaacctgcttgtgtaccatgcgaataagcgtcagatgcttataggagcttttgctatactaagaaataagctctggatagttagaatgtcttacatctatttgaaactgcgcctctctctagtggactaaattaatttgattcacatctctaacatatattgatattttgttgtcacacttttgttttgccgtttcacccttatcttttttttacctatta

SEQ ID NO: 96883 - DNA, 285 bp, Glycine max
caaaattacatctttttattaaactaccaagggcatttgtttatgcagcctaaacacaacaagatttgttatttcaccatgaattaaacaccgaacttaataactaatgtgttgaaatgcttgtgcagttttgcaacctggttcattagaaacagatgtcctctatacgaatcaaacttaacttttctaattaggggcctttaattccttatcactaaaatcttgaaaaaaaaaatactttcttctaaaaccccctcactctatatcaataacactttttaattc

SEQ ID NO: 96884 - DNA, 318 bp, Glycine max
aactacaccagcgatctacgctggatcagattgcacttgcaccaaataaaatttaaaggaatgatatggagacgtcccctataagtgctcctggacgccggggtatactcttggaacatcgacctacttaatgaacttttattttacttctatactggggatatttctctgaaaacttgtaatattgctacgcgcgagagtgacaggatctggctaaagacatacagcagtatgatttataccctcttattgtgcatggtactgtgtcgtggggtgatatcagaaaaatggctcatgctattccctaatgctctgtgg

SEQ ID NO: 96885 - DNA, 144 bp, Glycine max
aagagaagaattcataagaagaatcatcaaggggagcaagaagagaatccacagatggagagaaagaataaaaaagctcgcaaaacaaaaggcaagctgacacatttgacatcaatgcaatacaaaaaagacccacaatgttcc

SEQ ID NO: 96886 - DNA, 313 bp, Glycine max
gtggtctgttcggtgctctcaagggaatgtaacactctgtatacagtatcaagttgtatgcaattgcaaagccagatgatcgatataacaatagatagaagttgtcaatcgaaagaactcaggagtgaaatttaaacactccattgttaaaagttcaatttatccagttctttgatcaacgtcggacatacggcagtgttcagttatattcactcatgtaaaggatatcaaatgatctctagttactgatcatatgaagctctttaactggacacagtgatatcagcgtgacaaaaagcctatgttgttagta

SEQ ID NO: 96887 - DNA, 148 bp, Glycine max
ctattcttgtgacctctcttacggaactcttatgatgggggggcttccttttacctacttttcttgagcagctcatgctgtgattgagtaattcgattgcgctgatggacaataatgcttttataatttaggtaaaagagtttgagtt

SEQ ID NO: 96888 - DNA, 349 bp, Glycine max
tttgagaaacaggacactattattcaatgattgatccgcagtgaaacatcagttctacatttatattggcataagctttttctgcaagcagagccatatcttcgggcgagtaggctgcatgcttgcttgtacatcggagtctgatccgtcaggagacaacgacatccatgtgcttgtgaagacataccttctgttctttgtgaattggctatcttacttgtggagatgtatatttttgctacatacgcactatctactctatgggacatttcacagtacttatgctaaatctgacaaatctacttgatataatggcttagctaacttgcgttctgcttgttgtcagtag

SEQ ID NO: 96889 - DNA, 98 bp, Glycine max
gctggataatccattctactgatagtgccaggtattatctacatgaccttagtataaatatctccttctaatgaaactctagcctaaataaaaatgtg

SEQ ID NO: 96890 - DNA, 233 bp, Glycine max
  unsure (1)..(233): unsure at all n locations
tatggcatctctgacatctggtggtttgtatatgtccgcttattttgtgtngattctgatcttcatcnaacttcttggtctaccagctgcacgtttgtaattaggaagcaatatctcaggatcattagtcttaagcccatttttctaccatcgantgctgtaatactatgactataacatagcttgtaagtatccctatggtaatatttgtcatcacagtcttctgcatgctc

SEQ ID NO: 96891 - DNA, 78 bp, Glycine max
gtgatatgagagtattcctttgttaagacgtcactgtaaatacttcaatgtgcttcagaaggcccagaactgctcaaa

SEQ ID NO: 96892 - DNA, 172 bp, Glycine max
ttcgagtgtgcgattatacggactcatcaactacagtaaagtatgcgttgattgtcaacttacatcatttacgttgttatacggactaataacatcacaacgtatgcgtgaatgctaacttaatcattcacgttcattatacgctatcactcacaacgttgcgtgaactaac

SEQ ID NO: 96893 - DNA, 245 bp, Glycine max
cctgaatccgaacagaaagggaggcctccagatactgaaaactaccaatggtgtaactaaagtctatggaaaaaaagggccaatagaaaagaaagtactgtgtcaattattaaggacggcctgtattgctgacattgattatttcttataagatcagttcagttatttaattcagttatatcaaatcagttacttttaccagaggcttctgaatccatcagactatcacttcttctatcgggggg

SEQ ID NO: 96894 - DNA, 145 bp, Glycine max
catccttaacagcctcttttaatgctgcatcgccacgtattaaaaaaatgctgagtccacacttattgaaaaacacttgacagagatgtttgatcagtctggatttctcactcacaattcgtaagacatatagattcgttaaaaa

SEQ ID NO: 96895 - DNA, 407 bp, Glycine max
  unsure (1)..(407): unsure at all n locations
gcttgangactgatggagcctcacacagtgctgttctatataagttatcatcgcattcaacaatggctactagctgataaacttgtgatgtgtcatggaactctccatctcatttgagtgatcaactcatcttaacangcgatggtaatgattgaccataaattctcagcttctcccaagccttttggtgtctcttcacacatgtgtttatctaagacaatgataatgatcggctacaccctctttgatctagtcacttggttattataaaatcgactttatctttacgactatcaaacattgtgcacaaaaggcttgatagtatntgcaaatataaattaattttatannacacgatctcgaccttggcgttctcgcgagcttatacactgtgatatcacgctcta

SEQ ID NO: 96896 - DNA, 304 bp, Glycine max
  unsure (1)..(304): unsure at all n locations
ctcggatagactanatatacactcacaggangcaagatagccatgattcgtactatcgtcaatctgtaatatatacaactgctgtgcatcaaaaagccctgggactataatgtgacaattgatcaactgagatgcgtagagaataccatgcgtatcatgacctaacctgactctataagactcggacttgtgcgtacctgagcaaatgtgattaaacccatgactccatgacggacgactatattgtggagggcggtagcttcgaggtaggatggtttaaacnaggtngcaatcctggttggtc

SEQ ID NO: 96897 - DNA, 240 bp, Glycine max
ttcatcgaatgaggatcagatctgctgtcgtcattaattgcaacaattgtacattataaataatgaaaaagtgtccttatttatattgtgggaacttgcacaatctgaaagatttattgcgattaacaatcagatataattatatttcacggcgtccatgatgacgtggcctcatcaccttaaaagaattgtcgcatagatttgaaagacatgcgcacaaatgtatgcgtatgatgcaat

SEQ ID NO: 96898 - DNA, 105 bp, Glycine max
tcccaatctgagaataatcgtaaaaaccatccagcgctctacgttcggatataccaaaattgacgtttcaatatgtcgtttctccttaactcacgggagacctca

SEQ ID NO: 96899 - DNA, 353 bp, Glycine max
  unsure (1)..(353): unsure at all n locations
ttgctacgagagcttatccacctttgggtttctcagagatcaanaagagactgcagtcgtagccacgttcactatcgcagcaacaaccctagcaaattatatgtcctagaactaatcacctacgccacacacangcacattagctgaatcaattgagggagtgcatttctaagagcttgctgccaagcgactgctgagcttgctatagaattaaagaaagtcagtcaaagtcaaaattgtggtaactgaaaccagtcacgaactattaacttgagattggaggatgaattaaggagaactctcactggttgcactattgctactgtgaagagtcgcatgaacaactttgactc

SEQ ID NO: 96900 - DNA, 301 bp, Glycine max
  unsure (1)..(301): unsure at all n locations
ctgagctcacgtactcccacgtagcccatatcctcgtttctctcaacaccgggtccncatcaatccttccaagcttncacaacatccaagaaaaacaacattcanacatcacaagctatcacaggccagcataacagagcagaggcagaatactctgccaaacacaaccaatacagctttctactaaagactagaacaatcctcatcaatcgtaccgtggacgctcaaattacggagtatgactaccacattgcgtggctatgaactcgactatctcatactttcacacagcaaactgatt

SEQ ID NO: 96901 - DNA, 255 bp, Glycine max
ctctcagctacatctaactgtgtaaattttcttgtggctaaggacaccaatcttttgtgcatgtggtgacgtatacctgagaatttctttatctgaatgagatgtaaatgcattggatctgcttccatgtgagccatcagagagatctaaaccgtgtgtaagggctacatgactatggactaatatgcaggaggaggttgtaataatcgatttcctttctctgttcagcctcttaaacccatggtggtgaaaaat

SEQ ID NO: 96902 - DNA, 75 bp, Glycine max
catctccctttgtatatatgccaatcatatagttttatgttcttcacgactgccacactctacatactagacact

SEQ ID NO: 96903 - DNA, 263 bp, Glycine max
gatatgtttcataacgccatagaaatattatatttcacatacagtatatatttagcttaagaaacatcacatgtacgcccaaaatatatttgatttacgacaagcatatgtttcatagagaaacaaccgatgtagctcatcatgatatagttcccggacagcacatgttacaatagaacaacgatgtagcctatataagatgaataaacggcaatgaaactcatagggtcatagtatctcaaaaactgcaaaaacaattcatg

SEQ ID NO: 96904 - DNA, 211 bp, Glycine max
tctaggccttactactctggggggtctgcgcagctacatgtgctatttatattactcttttcggcttacttattttcctgaaacattacattgtgttatgctagcctcttacatacaatgatggttgaaccatggggagtttcataacttgacttcatgtactcaatatagacgaaataaatgcgttcttctactgcttggagattttaaa

SEQ ID NO: 96905 - DNA, 219 bp, Glycine max
aaattcaaatatcacaccattgtagcactacgttgtacttttcacatgtagcacattatgagtaatctgtttctgtcctgcctgtaatataacaccaatcataatatctcattaacaagctacccatttacaaagaaaaggtactctgctcaataatacataatgtagaactctcttctttactcatttactagaattcaacaatttatatacaacgag

SEQ ID NO: 96906 - DNA, 155 bp, Glycine max
caactccatcgtgcattactgaagagacaactgccgtctctctgtctcagcaattcatatgcgaaaaccacctactggaagtcctactaagaggattattttataccggtgactactgttaatgatacaattttttttgtagctgtaaaatatac

SEQ ID NO: 96907 - DNA, 261 bp, Glycine max
agatggtcacaactatcttgactactttattttctaattttgaacatatggataagcataattgtctttttgttcttctttcgccaatactttgctaatattatttggtagagacaatgaactactaagaaatattatgcctattagatataaaatagaaaatggaccacaacagactaaatatatttctttatgaaatatatagttttattcacaaggagcctcccaaaaataattatttttgtttgtagttaatatact

SEQ ID NO: 96908 - DNA, 360 bp, Glycine max
  unsure (1)..(360): unsure at all n locations
cgtcaactgcagatctacganacgtacgaacgttcgagcgctcgctatatntctcacgaacnnatttcagcanatcgaagaagagagtgcaaggggctgacccctcttctcattctccctattatacaaatagggaggtggtgccgcactcgccagcagctcactcgcagcgagcgggtgttctcaaacaccgctttgagatctctgaggccaatgcctgggctttgccccatttatagacccncttgtgtttggtatttttcgaagtacanctacaatctacatctgttttcgatgtcgactggatctacatccttgctcgagacgactctattgccactcttgtcgtggcgactcgtg

SEQ ID NO: 96909 - DNA, 317 bp, Glycine max
  unsure (1)..(317): unsure at all n locations
accacatctgtgcactcacgactacgactccgagccatatctgttttacacggtcctaatctccagcttccacatcagatcacatcaacagcaatatcagcacaaacggaagagaaattgcaaacaccaaacagtttataaaccagacatcttgtcatcgtacgtgacactcaattacgaagttgactagcactggacgtgacacacaacacaatattgctatttccagcaccccaacatttgcagcaattgtgcatgcaaattgtaggcatnaataatcttatcactgcatatccagcaaatgtattgtacagcac

SEQ ID NO: 96910 - DNA, 185 bp, Glycine max
cacagaactgggaacccctgtatcaggaggcccactttctgctcggaccaggaaccagagacagacaaacaccaaacccacactcacaggaaaccaaccagaggccaaccaatttctaccctcatggctatccagccacagtgcaaggacagacaatcacaacgaaaaaatatcagcaacgctgc

SEQ ID NO: 96911 - DNA, 309 bp, Glycine max
atgccttaaacatacgtagtatactattgattccgcgaagatagtttgtatgcagcgtataggaactgataaccggctacgcagttatgagaagttataaatgtgtgatataagcgactcccaatgttggtgatgtgccgctgactacaataaatcttttcacggtgataccctactttgttagataaggtggctaacggaccagaatcatgatgactctactctatgtgctatttatggaaactttgaatacatagtcaatttcaactagcatcggggttaacctgtatcaatctgtggacctcgatt

SEQ ID NO: 96912 - DNA, 194 bp, Glycine max
gtgctcgggtgctggaaaggaagtctccgggcacggaacccttttgagtcatgttactggagaccgcacttttcaggacattgctgttggttttctgaatgtgtgacccatgtgagtatatgtgattatatgggccaaggaatggttactccaaccctgttggtttagtgtatagagcgaaagatgtattgtgc

SEQ ID NO: 96913 - DNA, 405 bp, Glycine max
aaaaattcgcagctatactgacaagaatactactggctgatatatcttaatgctattgctgctctgtctttcagcacctgaccaaactctttattatttagggagagtactgctgcatggagaacactttctactacttatttataagctccaagaagacattacacatattgataagctgggtacaacttaaaccacaagacactaatttgagaaagagctgggtgattaaatctctggtgaacttgatgcatgtactacatacagtggacttatgatgatgatgggaatactcatattacatatgctatcttctctctacaatctcgtattccctacagatcactacaagatatgaatgctagtgctttttatttcagttgcggctagactctatggtgactg

SEQ ID NO: 96914 - DNA, 270 bp, Glycine max
tatattcaaaaagggtcaactgacctggtaaattcctaagtataaactaggctctatacttacccaccttgatcttattatacgtgggagattgtattgatatggtaacaactagcttatgaagttgcagtaatgaaatgatactctgaatattggcaaagacagtctcctcttgtaacaccatagcatgttctgtctcagtactgcaaatctgacagtaataatgtaccctctggaaatcactaagctatctaccaccatgtgtgtatg

SEQ ID NO: 96915 - DNA, 408 bp, Glycine max
tatgacctatgcagggttgtggtgtgctccttgtgacaccaacagaccttgtcttcatgcacatactggagcatcgagcagctgaagctatgctgagatattacatagacctctcacctcgcagcatataaccacgagacaatatacctctcaacacagatcaacctgatggtgaatcacctacctagatggctagcctaacacacaacagagctgctctcttcaaatgtgtgccaacaacatacatctcacaatcacacagtacacccagaacaacacagtgggccctcacaccttctcgagactggaggaatacatgcaactgagttagttagacaagctcatcgagttacatcaatgacatcctccattgatacacgtccaaattgcagtgctctagtgcaaacc

SEQ ID NO: 96916 - DNA, 403 bp, Glycine max
  unsure (1)..(403): unsure at all n locations
tatttttctatattntgcagctttccatacatantactgntcacatcanaagaatagcagacaagacggaccacaacaactgcaacatcaaaattcgcaaaataacanattcatttaatctcccaattgaagtangaaatacagaagaaaatgaagctntcagccttacanataggacananatgcagcatatacaagagatacagacctgtacttgagctgaactgttaaggattcatacttatcagcatgagcttattgctgcaacgctcacactatacacagacactatactatactcaatctccgtaacaagtgagcatgagaactggactgtagaatgatagttgcagctcatttgtgacaccttcgtgtactgcaacaacnacccagaatctatact

SEQ ID NO: 96917 - DNA, 256 bp, Glycine max
cttaacttcaacaacttttttttatgcagtgttctctcttcaatctcatatattaagtagcatcgtataacgcttttcttttgcacaagtggaaggaccacataggcgaaggatgagttcaaaagaaatgagtgttttagaaagaaaggtgtcaatctgggataagagaaaaaaaaggacaatgcaaacacaatgtggactgagaccccacaattcgagcagcgccccagcgggggacctcccatgggatgagacg

SEQ ID NO: 96918 - DNA, 472 bp, Glycine max
  unsure (1)..(472): unsure at all n locations
gctcgagatgacgaagtgctgaaaggtgattcttcctgcntttatcgttgaccacaaagtgtacctggagatatgtcgcggtggtcacgagaccttgtggacgtcaggtggggtgctattgcccaaaaccaagcttgaccaatcccgacccaacccgggcatagtcggtcagtgagaacctgtgatgtacctaaacaggcgagcttctggcagtcaacatataaaaggaacacagaccacaaagcaaggtggcttgtggtggctggccagctgtgaaacttgattgatatgtgagatatggtctctggtaatcgattaccaagggtgggtaatcgattacaaggcttaaaaatgaagacagggggctaagatggtctctggtaatcgattaccaggggatgttatcgattaccacgcttgaaacaaagtcaggaagctatgggagctctggtaatcgataccagcctgtgta

SEQ ID NO: 96919 - DNA, 475 bp, Glycine max
agctcagctgtccaacatgctaaaacgaaattgtgggaattacaatttgtgatgttttatatcatgtgtgtcctctttggcatatgataaaaactttacgttgtgaagcttgtgatatagtctagctaaaggcataagtgtgatactcttttctgtccactggctgcctatcttctatacccttcttgtttttgtgtaaagttgcttttatataaggacacttagtgcaatgacagctgctcattcgtgcatctgcatggtgatagattagactcatagaatgttagaagtgagcaacttccatggcttattagtcatatgttctctaatgttggaacatgagcacagttgtttaatgaaatcgtagttttaaacaaccagactgaaagtgttaatatgctccttcacttttgtgagttccggtgcttacagaccttgatgttatctttgatatggctattcatcatgtgtatct

SEQ ID NO: 96920 - DNA, 88 bp, Glycine max
actctgcacctgctggaccgctcgccaccatggcctgcataaacatcacaaccctctgttacgagatcattatatagaaatattcttt

SEQ ID NO: 96921 - DNA, 474 bp, Glycine max
  unsure (1)..(474): unsure at all n locations
gctttaagaaagctcttgggccaagccatgctttcatgtaagccaatcgagccttataaanagcctatgacaggtaatgagccaagttcaagccttacgtattcaactcaagccgagtaaagcttggcttgacttggctcattttcacccctagttacttgtaatatatcccacatttattttgcatttttacaatttgagactctaaatattcattcacgcctaatgcagaagtaattatattttttgcctttaaattatattgaacccttcttctttcatctttataccattcttctctaggtttntctatagttgcatttcccacactaccattgtangaatgaagggaccaatttcaatgacttcccatatatttaaattggtggcttctataaatatctgcatacagggtttccaatagtgataaccctcaccattgaacataagagacctattaatagaattttcctc

SEQ ID NO: 96922 - DNA, 455 bp, Glycine max
  unsure (1)..(455): unsure at all n locations
atcttaagtcacctgcagctgcagcttcagcttgttcttaggcttcatgtatactcgtccaatatcggaagtgaacctcggatccctgtcagatacaatactagaaggaatntcatgcaaccttactacttccttgatgtacaactccacgagtctctccattctatacttcatattcactgggataaaatgagcagatttggtgagtcgatctactatgacccacacagcatcatgtccacgactagtcttgggtaaactagatacaaaatccatagatatgctctcccatttccattccggaatctccaatggcttcaattctcccgatnggtcgtggtgctcaaccttatgcctttgacaggtcanacatcttgctacatattcngctacatctttcttcatgccatgccgaccaaaacttctcttcaaatcttggtacatcttagtcattc

SEQ ID NO: 96923 - DNA, 477 bp, Glycine max
taatctactgcagctgcaacacagtatcatctttattctaacatacttattgaaccaacacagtgactcttgaatggtgcaatacactagacgatccacactggatgacctatacatctctatcggttgtgatgaacacacacatataaatatatgttcaccagcttgtagcctgtaagtcatcacagttatatgacttaaatgcagcattggggagggacattatccgttattggaataactaggctactggaagcatgaagtactcattcagtccatccaaacaactaggggaataaacactgtatttgacatatctatttataccagattataggattctattcataagggagcaaatatgtgagactatctcttatctcctcttatatgcgtaacgaccatattgaattatcaatgacatatatggaaactcctggtcctatcaacaaacacacatagtatctgtcaattcat

SEQ ID NO: 96924 - DNA, 393 bp, Glycine max
  unsure (1)..(393): unsure at all n locations
agcatgcagcttataacacgccctgangggagtattttatatcattctctggtatcaaccctgaggattgtttaagacgccctctcgggttctacacctaccatgtgagaaactttgatctaccccttggttcgttagaagatgatgcacagcgcctatcattgccctaaaagaaggtacggaggtatctcatagctgacttgacgtcatgacctctgcaacacaggaaaaaagaaaaaagctgcgcagagtctcgaatattaatcttcaaggagaagaagacattatagaatcctcaattgacaaattaagtcaaatgactcctattcttgataactcacttttgtcttactaagacacctgtatagaatgataagaagacgtcacatgaat

SEQ ID NO: 96925 - DNA, 445 bp, Glycine max
  unsure (1)..(445): unsure at all n locations
gcttcttntaccctcgggttataaacgcgcttctaaatgaaaganattgaaagagaataggaatcaaccaatcaaagattggaagatagcaaaataaaatagaaaagaaagaaataaagaatacataaaagttcttaggaccagacaatgtatgaacaatgtgcaaaattgtcaaaaagaaaaagaaaaaatcaacatagtttggtttgaaacctgagggatgcctaaagcagtcacctccctagttaccaaccaagcctttgtgcccgtgcttgtttcgcgttgaaccaaagggaaaataaaaaacagacaaaggaaaggccagaacacccaaaagccaaattccccaccaaaatccaacttcctaaaagtcctattgatccatgactacgcatgttatctnntaattgataggaaatgaattgaaaagtcaagtcatgacata

SEQ ID NO: 96926 - DNA, 316 bp, Glycine max
  unsure (1)..(316): unsure at all n locations
tgagcgtgtatatgatgtaggtgacatttattaagagaatgagatggtcaagnaagtttgtnatgtcgcgtgttgtggtgtaatgggagtggcaactgtgggagttctcatttgttcccaaattagcttctctgactctttctcacccattttggaaggaatgagaaatgcatgcctaaaaatcccaaaattgagattcattgattattgagggggaggcatgggtggtggcattgctagcctantatcaaattcacaaaatgcaggatcgtaacggcagaagagtgagtgacatgggtttctggttgatcgagaa

SEQ ID NO: 96927 - DNA, 435 bp, Glycine max
  unsure (1)..(435): unsure at all n locations
catgcaagcctagatctatattgagcacatntacttgtttttcagaacattattattcacttangttgtaatcttctagctgttgataatctcagtaataatgtcattggtcactcaaagatggatcatactctgaccacttataaacatcatcttgatagttatccagaactccgatcctttggtaactttttgtaggatgcgagtgaattaataatcgcagcttataggaatatttgctctttgctaacaatcatacttttgattgatactgcataaaaaaaacttctaatgtatccctcttctattatttcgtattagaaaaaacaaaatctcttttctccacaaaatgcttatatcatcagtattgtaattaaaatttatataatttaatatctttatttctacaaataaagtgataatttatgataaaaa

SEQ ID NO: 96928 - DNA, 358 bp, Glycine max
  unsure (1)..(358): unsure at all n locations
agcttgaaattgaacttctgaagctcttgagttattcanatggncatagcttccacaccgacgcccgatctggcaaataacatattangacactcgaaattgaacaatggaagctcttgagaatttcaaatggtcataacttttcacacggatgttagattaaggcgcatcacatatagagacgctcgaaattgaacaacggagcttctggggaattaaaatggtcataacttttcacactgatgtcctattctggcttataatatattgatatgctcgaaattaaacatcggaagctctcgagaaattcaaatggtcataacttttcacacngatgtccgattcgggcgcataatat

SEQ ID NO: 96929 - DNA, 319 bp, Glycine max
  unsure (1)..(319): unsure at all n locations
tcttgcgctttgaatagatgttttgcatatgcgtttgaaagattagaaagaagcaaacaaatgttaagctatgataagcatttaagacttcattaatggtttgtgtgtgagatctattttgctgagaatgtgttgaaatttttttttaaagatttttntagtccacgacagcacacgatctcacccctcaccttattttttttttttatgtaagagaagtggntacacctgttggattagaatgtttaaggaaacatatgactttgtgagtgggttaagatgtattaaccgcgttacatgaagaatggattaatgtaat

SEQ ID NO: 96930 - DNA, 462 bp, Glycine max
  unsure (1)..(462): unsure at all n locations
agcttatcccaagaggagatggaccttctcatgtctggagaggatcaataacatgcctataggtttaacctcctagaagagtatggagtcagcaacaccacttttaacatttctaatttaatttcttttgcaggtggagctgatattgaggaggaggaaccaatagaattgaggtaaaatcgtcttcaagggggaggggatgatacaattactcctaggaaggaactattcaccacagccatgagcaagagactccaagaggattgtgctagagttgctgaagaaggccctatgattctcatgaaccccagggtagatttttgagccaatgggccaaggttgggtccacttatatttgtacatattagaattggatttcattatttntgggctttgtatttacggctccataatgtacgcagggtaccctagaaatgtaggaattttcagcccttgtatatt

SEQ ID NO: 96931 - DNA, 458 bp, Glycine max
  unsure (1)..(458): unsure at all n locations
gacctatagcacctgggctgcagcttcatggtggcagttctaangaatttgttagggattttattattgnggcagcactcttactgagatttccaagaaaaatgtagcatttaaatgggggaaaaaacaagaacgtgcattcactacacttaaggaaaaattgataacaagaacatgcattcactacactcaaggaaaaattgatgcatgcaccaaatctcgcattacctaatttgacaaatcctttgaaattgagtgtgatgcatctggggttgggataggagttgttntaatgcaagagggatatcccattgcctaatttagtgaaaaaatgaatggngttgtccttgattattccacatatgacaaggagttgtatgcgttgccctcgcaccacaccaccgcaccccaccctcacccaaacaattgcatacatagganatgaatnttgagcattt

SEQ ID NO: 96932 - DNA, 463 bp, Glycine max
  unsure (1)..(463): unsure at all n locations
acattactcctcatacttctcaccatgtctaataaggnttgatttcttcattctgcccaccattctgatccggagaactaggcatagtgtactgggtaataatcccatgttcttgaagaaattttgcaaatggacctggtgctcgtccatcctcggtgtatctaccatagtactctccacctctatctgatctcacgaatcttaattcgtttatcacattgtttctcaccttcagccttaataactttaaagacatctaaagcttcattcttagaatgaagtaagtagagatacatatatcgtgaatgatcgtctataaaggttatgaagtatttcagactatttgcattcatgtctggacaacatatgtctgtatgtatgatttctaataaattagaactcctttgtgcacccttattagacttggtagtttgcttacccttaatgcactctacacaagtct

SEQ ID NO: 96933 - DNA, 449 bp, Glycine max
  unsure (1)..(449): unsure at all n locations
gcaagcttgtccatgttaataaccaacaccaagtttcnatatattttacaatagcactttcaggccggtttttggtaaattcattgtcaagttgggaattattaacatctattcgccaacttgaggtgtatcacaattaagcaatggcagttagttacaataaggtatttgagtagttagttgattatggcagttagttagttactaaaagctattcgaatagttagttagttatggcagttagttagttgctagaagttatttgagtatgttagttagttactcaagttagttattttttgtctttgtataaataagcccactttgtaatactttgataaataaatcctaaaactggttttcatctatctttcatttctgatacaaccataatgcactacatcgttcctgcagaaacacaatcacgaacgcaccataagtcttgaatt

SEQ ID NO: 96934 - DNA, 465 bp, Glycine max
  unsure (1)..(465): unsure at all n locations
gaccttaagcaccgcggctgcagctattgcaagctacggaaaatctgtttctatccatggtagaagtctccacagagccattgcctccctcacccagtattatgatcaaccatngaggtgcttcacctttggggacttccagctatcacccatggtagaagaatttgaaaagatactatgatgtcctctagggggaaggagaccatacctcttctcacggttctatccctcattagctagaaattataagatagtccanatctcggcgcaggaattagaccagagaaagcaagtcgaaaatggggtggttggaataccgagataatatttggaggcaaaagcaagaatcttggcaagtaaaggcaaatgggccccgttcatagacattctcgcactgttgatcttcagaggagtccttttatccgaatgtggatgggttggtggacctagcagcgatcgatgctt

SEQ ID NO: 96935 - DNA, 372 bp, Glycine max
  unsure (1)..(372): unsure at all n locations
gcaganaccagcaagactacncatcatatntccccaaaccccatacccacgataataaaggagaaagaagtccacccaaacctgaattttcgaagtcccactcgtagccacgcacttcacgactccaaaaatgctctcctttcgcgacttggagcaaaaatgatgggcaaagggtggaagctttgtgtggagcttcaatggtgaatgaagaagaagaaagctacgtgagagagggagagataaggcttctcgaattctctcttttggctgaccgaccgagagagaacagcttttggttnttaaatagaaaggggttttctcttttctattatattattcaagctctgccacatgttcctatttgagtggagc

SEQ ID NO: 96936 - DNA, 411 bp, Glycine max
  unsure (1)..(411): unsure at all n locations
agctntaataatatttatcagagcactntgtttatattgccatttaagcattctgctgttttactagcccactaagtntgcccattaactcattcaatctatcattgctgggtaagtggaaatggaacctgtttcatagccaaggagagctgtgggctagggtactagaatcgaagtatgtgggctggaggggnttaagcgaaaatacctagacgggaagggtgaaatttgtatggtggagggatctaaagctcgtgcttaatcactcgcatcatggagcgataatgaagaatacaacagcatggatggttggttgtggggataaatctaaattttgtgaggacgtatggatggggggagaggagtcctatcttgcaacagtctctatgttgtttagcatatttacttcaa

SEQ ID NO: 96937 - DNA, 195 bp, Glycine max
tgtgggcctatcattgaccaatacatgagagaagctaagtcttgcctcaacccatgcatataggctacaagatgagtattcatatgttgtcgtcttgtaagctcacatagaagtgagagagagagtaatctattcattactccgagaagcaatgatgaggatggtgttgttcactatcaccttgaatgggattca

SEQ ID NO: 96938 - DNA, 357 bp, Glycine max
tcctacagcttttctctcgcgcgcattttctatctgtactccgcctcacgcttggttatttaaggagaacactctatctacacgcgctgtaagggatccgtatgtgaccagagccctatatacaacgatgggtgatctcaaggtgacaccagatcaccacaaagccgacatgtctgcctctgaaaaactaaatggtcttcatgaaggaaggcatgttcggaatgaagcaactaatagacaccaacgcagcctcccactgccctgtcagttcggctgacgaatcagaccctactgcattggaactactgaccatcctgcctcatacataataagacggtgaagggactcactgagaca

SEQ ID NO: 96939 - DNA, 497 bp, Glycine max
  unsure (1)..(497): unsure at all n locations
gctngcttgcttatatgagtaagctcgtgtctatagactctgatcttatcttctcaaaactctacattgttgcataacaaatttcttttgaacaagagtgatgttgtttttgccaccattatcttgcaggggcgtattggactattgatatggataaaacaattagttataatttaaattctagttatagataatttagaaatttgtaatattccataatgctatatatattattccttctacattcacaattaacttgaataaaattttagttattccatctttcaatcatcacaacaaaatacacacaactcgtgatgctccacagatacattttattttattaaatgaggtatatctggtagagagtttgtctaggatcacttgttgagagagagcaagaccttcatatatagaaatgaacatgttccgacatatgagaaaaaatcactattttatgttcaactgcttttggcgtattcaaatccaatataata

SEQ ID NO: 96940 - DNA, 224 bp, Glycine max
cgaaccaagcaacaagcaggcagagaagcagcagaaaacagcgggattgtaggaccgaaggagcaaccgagacggagaggaggacccgcgtaataaagaagcgccaagaccggaagaggcatcaacaggggggaaaggcctggtgcaagaaaccaaactgcgagggggagtatcggggacaagacaagaaaggaggacagagaacggagcgggcaccagaagga

SEQ ID NO: 96941 - DNA, 504 bp, Glycine max
  unsure (1)..(504): unsure at all n locations
taagtcaccgcggctgcagctgcctagcaatttgggcagaggcaatattattgcatgttatttggtgaacatatctcttctacaactattaattgcaagacactagaggaaatgtggtcaggctctanaataaattattcaattctgtgtgtatttgggtgtctagcttatactcatgttaataaaggaaaatcggagccaagagccaagaaatgcacatntttgggttatcaagatggtgtaaaagggtacaggctataggaccctaaggaatcaaagctcttgattggtagagatgtgatctttgatgagacaatcatacttaatccaagaccacatgaggaccataataataaatttgaagttcatggtgtttgcaaaaaggtggagcatgaaactgaagctcttaaaccaaaaatcggagtagacacatgatgaagtcgcaataatagagtctgggtataatggctagagatggctaagatatagatccaccacctaaag

SEQ ID NO: 96942 - DNA, 442 bp, Glycine max
  unsure (1)..(442): unsure at all n locations
actatgcnagaataaccaaggaatatttcttcttgacttagcatcaaactttctaagttctcctttccattgattaatacatatcattcgcaaccaaaaacatgaaggtgtgaaatgttatgctttctaccattacacacatcatatggagtcctctctaaaatgggccttatataagccttattcatgatatatcatgccgcattaatcggttcaacccaataatgttttggaagaggagtgctatttaatacggttctagctatttcttccaaagatctcttcttgcttttaacaacttcattttgtcgatgggttctaggtgcatacaatgtatgtcatcggcctgattatcacaaatatattcaattctttattgtccgattcaccctcctgatcactcctcatagatataattttgagactcttcttgatttgaatc

SEQ ID NO: 96943 - DNA, 407 bp, Glycine max
  unsure (1)..(407): unsure at all n locations
agcttcatgatgatgaatcaagttgattcatgtatgtttgattatanaaagatgatgacaaaaagcccaagagaatgatttcaagattgagtcaacaagattcaagaatcaagagaagcttgatttcaagattcaagagaagaaataaagaagacttcacaagggaagtattgaaaagatctttcaaaaaataaacatagcacagtttttgttttcaaaagagtctttctcaaaattttctaagatacctgagtttctactctctggtaatcgattatcagtttcctgtaatcgattaccagtagcaaagtttgatttcaaaagcttttaactgaatttgcagacgtctaattgtttttaaatggtgtaatcgatacaatatattggaatcgattaccagggtattg

SEQ ID NO: 96944 - DNA, 277 bp, Glycine max
tccgatatgatgtcaccgctttagacgcggtcaccacatctaaaaaaatcattacgggtggtattggtcaggacgacacctcagctatggaaacgagttactgatttcatgatgattagggccctgcgggggcaccatggttctcccatgccaagtttgaccataaatattcttggttttatgccatgttgccaacagagatggcgtcgtacatgaatcctggtaggggcagtggatccgtcgatgccgacgcttcggcacttctggatatcgttgt

SEQ ID NO: 96945 - DNA, 469 bp, Glycine max
  unsure (1)..(469): unsure at all n locations
agttttactatgattgaacacattacctncatttccaaggcaatatccttaacattgtgccaaggcacacaaaataaagtgggataaaagtttcttgaaatgatgccaaaagaatgactttacctgctcagaaaggaagagtgatgacacaaaattcagtgaataagaacttaattggtagtctctttgcataaccagtaaattaaaacataacaaaggaacctattaagcaataaactcagtgtgtcgaagcacaaggtagttaaagcaaaacaatatggatagaagctgaagtaaatcaaactgaactctcccttctactgtaacttctttactttccctggtcccataccacctaccaaaccatcaattaagtattgataaggtagatagtcgaatgatgganaagtcaaaanataaaagcatacacanagtaattcacttagaaaatgcttagaatatacagtgc

SEQ ID NO: 96946 - DNA, 335 bp, Glycine max
caggagcatttcttctcaatcacagctttgagaagacaaagccaggaccaatgtttgcccccctttcaaatgccccccttatttggaatttttcgacatacaacttacaacttgacgaactatttctctcgcaaggtaccaaagctttcggattaagtatatactctcttttagcttccgaagaaggttaggaaacccacggattgcgcaaaaacacctctattcgacttccgccacattacggaatttcacggatcgcgcaagcctgcttccttttgattttcgagacggctcgggacttcatttattgcgcaacaaaggatgccaagtatctc

SEQ ID NO: 96947 - DNA, 469 bp, Glycine max
  unsure (1)..(469): unsure at all n locations
agcttcatgagagagtcaagatcaaatgattggaagaataanagctatgctaaacaagccacaaagggagaaagaagggtgtcttcgaaccctgagattgggtttgggtgcacatgagaaaagaaaggtttccggaacaaaggaaatcaaagctcctaccaaggggagatggaccatttcaagtgcttgaaagaatctatgacaatgctaacaaagttgacctgcccggtgagtataatgttagttccaccttcaatgtctctgatttatgtctctttgatgcagatggagaatccgatttgaggacaaatccttctcaagagggagatgatgaggacatgaccaagagcaatggcatagatccacttgaatgacttggaggacctatgacaagggctatagcaaggaaagcctaggaagctcttcaacaagtgctgtccatactatgtgaatacaagcgcaagtttca

SEQ ID NO: 96948 - DNA, 447 bp, Glycine max
gcagctcacttaagaaggggattttccattacttgaaccttaaccttttgactagcaagattatgtataaaacaagtttaaggtcttttgtaagattaaagctactttggatatgttggatcaagtggcctctgaataattaagaaggggggttgaattaattattactgaacctttactaattaaaaatgtacccttcttaggcttttactatattgttaagaaagttaataacagaaatggaaacttaaccaaaagtaaaagcaataattaaagtgcacaacggaaaataaagagtgtagggaagaagaaaacaaacacaagagttttatactggttcggcaacaacccgtgcctacatccaatccgcaagcgacttgcggtccttgagatttcttttcaaccttgtaaagatccttttacaagcaaagatccacaaaggatgta

SEQ ID NO: 96949 - DNA, 372 bp, Glycine max
  unsure (1)..(372): unsure at all n locations
acgcatagctccaactcgaaggtggaggacacatgaacgaaaacacaatncatggggctcctgaaaaggggttgagaatggagaattacactaagcaatcactactcatagctccaaactcgaaggtggaggacacatgaacgataacgcaattcatggtgctccaaaaagattgagaatggataattgcactacacaatcactacgcatagctccaaacgcgaaggtggaggacacatgaatgaatacgcatttcatggtgctccgacaagattgataatggagaattgcactaagcaatcactacgcatatctccaaactcgaaggtggaggactcctgtctnnaaatgcaattcatgcggctcccaaag

SEQ ID NO: 96950 - DNA, 125 bp, Glycine max
ctggtccgaactcaagtgagctactacaatctccccccatgatcgacatagcaccttatcgtcgacctctcaggacaaaagagttgctaacatcacggcggggagcagggtttaaatatgggaaa

SEQ ID NO: 96951 - DNA, 143 bp, Glycine max
actcttattggcgtataacgataacgtcttaaaagttggtgatttaagtgttaatcacgtctatacgacaatgcatcaaaaagagcttgatgaagactcttaatgaccctgtttacgcctaactcgcaaagctgataattgta

SEQ ID NO: 96952 - DNA, 502 bp, Glycine max
  unsure (1)..(502): unsure at all n locations
ctgcggcatgcaagcttgaagacaagactatatgagggatctttcttgtgtatagcaatttctctaanggctacctgtctacaacttgcaaactaagagactcgtcatcagtcgagatgctgaagttgatgagtacgctccttggatctggggtaaagaaaaagtggagaagaacattcttatacccgctcaactacctcaagatgaagctgatgaagaagacccggttgattcacctttaccttcacctccaccacaacaacaaaatcaagaactatcatcaccagagtctactccaagacgagtaagatctttggtggacatatatgatacctgtaacttggccatacttgaacctggaagctttgaagaagcgtcatagtaagaagtatgggtcaaggcaatggaagaagagatacagatgatcgagaataacaacgcatgggagttagtacatcattcgcatggataagatatcattgtggtaagatggtctatgatc

SEQ ID NO: 96953 - DNA, 493 bp, Glycine max
  unsure (1)..(493): unsure at all n locations
gcttctaaactttatacaagaatgaagctctgttaccacttgttatacaagtggcctcagattcttaagaagggggggttgaattaagatattacaaactatttccccaattaaaattctatttcactttctattcaagttacaaattcccttaataatgaacttcttaaatattgattcaaatagaacaatctgaatataaatattaaacaatattaattaaaggagtttaagggaagagaaagtgcaaactcagatctatactggttcggccacacccttgtgcctacgtccagtccccaagcaacccgcttgagagttccactatcttgtaaaatccttttacaagttctaaacacacaaggacaatccttcctttgtgtttagaattcttttacaacaagagaccctcggtctcttaatcccttagagatatanaaagagaagaagaatgaatctctctctgaagagatagattttacaatctgagcac

SEQ ID NO: 96954 - DNA, 513 bp, Glycine max
  unsure (1)..(513): unsure at all n locations
aagtcacctgcggcatgcaagcttgtggtgcataagaatacatctatacatttgtatttttgatggngcagcctccaagactcattaagattccttgggtgaggtgggacatagtctgcctacctaagagtaaaggtgggttagggatcaaagatttgattaaattcaacgaggctttgcttgctaaatgggggtgggagttggcaaataatcaaaatcagttgtgggccacaattctattgtgtagatatggtggttggagggatttgatttctcataggaactgcagtttaaactcttcttggtggaaagacctcaaggttatcttcaagcagcagcaaagcaacacaatntgtaaaaatagctttannnnggtcatatgtaatgacggtccatggtatacaaaccaagtacttatttgttgacaacaaaacaaacactcattggagatatatatgtttagcaattagcatanactcgctgaacaggaatggagaaatatgacataattag

SEQ ID NO: 96955 - DNA, 421 bp, Glycine max
gcagctgcacctctccctatttctataatagggttttcgtatgaattggtcaaccccaggcactttctctcttcgaaatgcttagaagattgtctcgagaagaaaaacaagccgaggcgcttctaaacgtgtccgtacatttccggaggaatatccgaaagttcgaccgtctttgacgtcttcaatcgttcttatcggccttcgaccttcacgggaagtacctcgaccaagcttgttgattcattcttgtacccgcggtggccacattgtggttcgtgtatttttattctctggcagatacttttataccacttttgacgtgcttaagccatttatttaatcatctctgctttacctaaatatagatagcttccccgttcgttgaatgtctatccgtctctccggtaaatgaataccaccg

SEQ ID NO: 96956 - DNA, 407 bp, Glycine max
agtcgatctatataatccatagatgttaaagaattggtgtgtaacaagcataacaagactttctgtgattggtctacagatacaatccttgcagatgagaatgcttcttaaacattaagaaagctagcagagtggcctaaaagaattgtataacctgcaaggaacaacataaacaagtttcatttacataaaggcgcagggacatatgacaatgccaacagcggggcaccctagggctgatctctcacttccaagcggaatgatccagccctggtacttcatccctactttgggtcattgagaaaatggagctaacttgcaaattatgatggtttcaatgtatgggtgcagcacttgaggccacgagatatgattagctggaacctaaaactgtacacatgccttct

SEQ ID NO: 96957 - DNA, 332 bp, Glycine max
tgaatgctcgaattattacgaaacgaactcttgcgatctgccactattaataagccatgattgcaagacattaactaccataatgtaatgaaactcaataacttaaaatacaaccttataaacccatatcagcttattttagtgatgaaataaaaagcatcctaattactaaattcagcacctcaaaagccatattaataactcaaattcgagcatccttcatgtaattcacaatcacaatatcacttctcacaggataattttcattctaattcggtattatcctataagataatcctctttaattccttggttggcaagcaacttgcatc

SEQ ID NO: 96958 - DNA, 467 bp, Glycine max
  unsure (1)..(467): unsure at all n locations
agaccagatccttaagtcacctgagcatgcacttattctgcaacatctatatagacctcttgacctcagcagcaaaatcaaccacaacagaacaattatgacctccccagcatcaggtacaaccccatgtggaggaatcatcccaaccttagatggtctagttctttacaacagtaacatcaacaatattcttattatcagaatgctgctatcccatacagaccatatctttccttcaccatccagcatcaacaacaacaacagcaacagccccagaaacagcatacagttgaggcccctccgcaaccttcccttgaagaacttgtgaggcanatgactatgcaaaacatgcagtgtcaacaagagaccagagcctttattcatagcctaactaatcagatgggacaagtggctatacaggttagtcaacaacagtcccagaagtctaacagaataccttctcaatc

SEQ ID NO: 96959 - DNA, 305 bp, Glycine max
gtggtcgaggcccctaatatatcgagacactccaaactgataccgacgctcctagaaaattctaacgacacataccttttactccgatgctcgacaaagagcttcatttatctgaggatgcttccaattgaaaactggagctctgataagatccaaaacaccactacttcttaacccggatgcctgattgaagccccgaaaataactacaccctcaaaatttagatctcgaagctctgagaaaatggaactgactatgacttatacacggatgtcgagttgagtcctgactatatcgagacgatg

SEQ ID NO: 96960 - DNA, 491 bp, Glycine max
  unsure (1)..(491): unsure at all n locations
gcaagcttactcgtgttttaaattgaaaaaggctttatatggcttanaacattcccctngggcttgaatgaacatctgagtaagttccttttagaaaaggatttttctagaggtaaagtagatactactctttntattaaaaagaagttaaatgatatattattagttcaaatatatgttgatgatattatctttggatccactaatgactatgcaaataattctcttaagacatgcaaagtgaatttgaaatgtcaatgatgggtgaactaaatttctttcttgggctgcaaatcaaccaaaccaataatggaatatttgttaatcaatcaaaatattgaaaagacttgattcacagatttgggatggaaaatgctaagcatatggctacaccaatgagtattgcttgcttattggataaagatgaaaccgaccagtcaatatacattaagaaatatcgaggtatgatcggatctcttctttatttatct

SEQ ID NO: 96961 - DNA, 441 bp, Glycine max
agaccataatcagatattaagtacatatagagccacatacgtcatggaattgatacatacaaacatgtgtgggccactttatacacccacaagaaatggtcaacaatatttcatatcatatatagatgaatactccagatatgcatactccttatctaatacatcgaaaagtcacaactcttcggtccgtggtcacaacatttaaagctgatgatggagaacatggctgacatgacgggccacgagaacaacgactggggccgtttgccaagtacctagaggaacgtggaatcgttctacagatcaccatgcccggagtcacctagcatgaatggtggggctaaaagacataacagatcgtcttaatgataaggtaagacgcatgaagttgcattctaactttacagagtcacgtctgggagaggcactaatgactgtaac

SEQ ID NO: 96962 - DNA, 433 bp, Glycine max
atataagaagatgatggtccgagtacattgcgattggtacgaccttgccctcctgatttcagctggggaattggcgagtggaggaactccccggcttgtacgcaactagcataattgtaaactccttacgtgtgtttacaaggctcctatagcgtggcgcgtacggcttcacaaggttgttctctctggataagggccttcgtggattttgttttttaaattcaataatacaagggattttcttgatctgtgtctacgtctctacccattcttatccacttgcatgctaacttctttcatgaaacggctgatgcgatgacgagtcccccgaatgtactaatacctgggatattccgcactgatcacaagaatctgccagtcggtcggagttctcgtggatctaccaaggtgatcggccgccatcaacgggctt

SEQ ID NO: 96963 - DNA, 402 bp, Glycine max
cttgctcttgctctttaccctagtgtatatgcccattctcttcacaagctcattgataggtgatgcaattgtacacaaattaggaatgaaccttctatagaagcttgataacccatggaagctcttaatatctcccacactttttggggtgggccattcttggatggccatgaatttctcaaggtccacttggaccccatttctaccaactacaaaacctaagataactatattatctacacaaaaggtacacttctctatattttcatagagggtgtttcttctaaggactgaaagaacttgtctgagatgtcctaagtgatcatctaggctcctactatacactataatatcatctacataaacatcctcagatctacctatgagatcccttaagacatg

SEQ ID NO: 96964 - DNA, 460 bp, Glycine max
  unsure (1)..(460): unsure at all n locations
agcttaataatagggtaagcactacaacattttaatttcaaagcaaagcacataataatagcaattgtacatagggttgatcacacataacacactatagaatattattcgtcataattaacaaacaattctaaaagctatagcgtcatggtactttaagatgacatatagagttgtaggtttatcaaagagatttccataacaaatccaggactatatcccaacattgcaaatagtacaagagcaagcaatcaatatactttagaatctcacacccatattccatttcaagcattatattttttcatatttagacataacttggcttatgttctacgccaatattggactttattntaaaccagcttattggactgtaagaatacatcccgcaacatcaaatgaatnanatccattactgcaaaatacatatacccagaggaactacaacacaacatat

SEQ ID NO: 96965 - DNA, 442 bp, Glycine max
  unsure (1)..(442): unsure at all n locations
gtctaaatctgaatgagttcaaaattaaaagctttatttccattacgtcacttatcttatntactcaatttttcccttctcttgttttatttttttatgtttacttgttgaggatatttaatgtacataacgttactccttttacaataacattaatttatcaaatttacaaatgtaagaatatttgatagacatcttgtagtaactattaaaaaaaattcagaaatatttattaatttaaaataaattaatcatttctagaaaagatgtttaaatttacttataaaaatgattatatctcggacaaacttaaaccggttaccatttattcctaattcatcttaggaccgatctanaagtaaaataattcaagcttaaactttagatccatcattaanaannacatttgtaataattttataaagagaaaatgccacatatg

SEQ ID NO: 96966 - DNA, 476 bp, Glycine max
  unsure (1)..(476): unsure at all n locations
agctngaggtataacttgcaagtgtaagaagttgatatgacggtaaatatacttataactctgataagttaatgaatcttggtggttgccaagaactggacgtagtttcgaggttgagacgaattaatataaattctgtgttttctttcttaactaccaaagggttttgaatttatttttagatcctacttcttttgcttttttaaagagnnattgtttctcatcttttcaatctatttatattcattagacgataaacatattttcagtcttaagagaagttttaaatttctaanaacacaatccacctctcattcttgtgttatttgcttctacagttggatatcaaagccgcaacctaagggttgagcacttaaagtgtgcagaggaaaatatccagatggcaaataaccaacaccatttcatcactgagggagcatttccacaagaccactaggcttctgtggagaatacta

SEQ ID NO: 96967 - DNA, 405 bp, Glycine max
agtctttcgaatcattctatgtacccgtagtggtccattgtgtgtcgcgcatatatgattttcgttgttgattacgtttatatacgcaccctgtgtgactgtgcattaagaccatatttactataagtacatttctctgcttaacttcataaataaaagtaaattctccactgaacgtttgaattgtattatccgttaacttctgataaataaattccgccgcttgtcgggccgtatccacgttggaaattaaggagaggtcaaaattaatataatattcaaatagacatcttttagtaaaataaagtggaacatcaatcggacgttgtctctgtgggattcctcaatcttaatcgaattgattaatagctaaagtgaaactgaaggctaaaatcaattcgccta

SEQ ID NO: 96968 - DNA, 318 bp, Glycine max
  unsure (1)..(318): unsure at all n locations
agcttanatgttntaagaaagaactgttggtgaatcttaacaatggattcataggaaaagaacttagacttaaattacaaacagtattgtattccttccatgatcaaataaattaataaaaaaatataatgagtctaattgaatgttgtcatcaagaaaaactggattcatttagatacatcatgttatgaaatggaacatgtaatacataaggctaattcagcttcaaaaatagaatcaattgaaacatataagtaataaatattaattcattagtcctcattgagtgaacacgacactgaacaattaattgtgaac

SEQ ID NO: 96969 - DNA, 453 bp, Glycine max
  unsure (1)..(453): unsure at all n locations
ctactccgcgcgatatgaattcgctctttctgagatcccttatttattgttaggctttatcactaatttcgaatggtttgaacacacggcctctatgggaatattggatggagattcctcactcgttctatgtgcgacgaatattttcggtgtgatggattctcctaanactcgtaaatatttataggtgtaatttgctcgctccattaagcttttaatatctttggaggttacttcctcattgacatcttttgttttaaatggactggccatgacagagttatcataagtgtctttgaccttangtatgtgatattgcattggggaggcaatctcgattgcgataactcaccatccttaatttgctaattcgntatcacatttggtgtcggatcacctatcatgtcttgctttcacgggtgatctatatccttttgatgatatatcataaac

SEQ ID NO: 96970 - DNA, 253 bp, Glycine max
actcaaatgtgagtatgacagatcttgtgagcgcggtagaagacgttaatctccccgtgccaacaggcttgtccggtgagattgactaagggctcacaagacgacgctaggctttgcgtgctatcaggcttttcgtcttaccgacagcaaaaaaaaacgggtgtacggatgaaccatccggtatttccgtctgtcagcgcgacatataagtcacatgacagaccttgtgagcgcggaagatgacgaaaatctc

SEQ ID NO: 96971 - DNA, 384 bp, Glycine max
  unsure (1)..(384): unsure at all n locations
ccatggtgtgaccgccattcctatacagccaagtttgccaccaacccaaaaatgttattacgtaacctcttttcttacctaccgcccatctatccacaatgccgatctctaatcgaccacaaagtatgtctaccgcactatcaatgacgaacaccacctttagcacaaaccaaaaacaccaactcaaaaataatatttgcagcgaagagcctgcatgattcaccccaaattctggagcatatgctaacttgctccctatctacttgataatgcaatggtagccataacccctgctatgttccctcatacccncatttttctgatgatacgactcaaacgcaacatgtgcatatcgtggaggagccctgcggcattccattgatc

SEQ ID NO: 96972 - DNA, 328 bp, Glycine max
  unsure (1)..(328): unsure at all n locations
gcttatgctacagacatttataatatacctnctcagtatcaaaaccttttacagcaaaataattatgatctttcaagcaacagatacgatctaggttggaggaatcatccaaatctaacatgggcaagtcctccataacaacaatagcctgtccctcctttccagagtgatgttggtccaagcaggccatatgttcctcctccaatgcagcaacagcagcaacaacaaaaacaacaagcaactgaggccccttctcaaccttccttagaggagttagtgaggcaaatgaccatccaaaatatccaatttcagcaagagacaagagcct

SEQ ID NO: 96973 - DNA, 451 bp, Glycine max
  unsure (1)..(451): unsure at all n locations
atgcacccatacacaatcaaggcagcttcgttacctagattatntacacgtacttccaagtgtatttgttacttacatcacacacatctccttggctaaatttacatacaggcatactcaaagcatttcggggtaccataaattgcacatgtgcaccatctggtatttctatacctatacatacgcaaacttcatgatgaatcttgactatcttcacaaagaggtgctacatttcatgctnttattntttcaagttgttgctacttaaagccgcatgcaaattcaagcatatatttctttgctgactaatatcgtattcaaattaaaaggtatatttgttgtaatatgatttcttcacataacatgcaacacatntatatacatttcttgtgagaacattttgactaccanatattgtatatgcatacattcaagtattnngctattcata

SEQ ID NO: 96974 - DNA, 325 bp, Glycine max
agcttcacattacataatcggaagtttatacatgcctggaagcgatcgcatgttgctctttctattcattataagcttcctctacttattgatgtcttcactcaaattgtaacgtaccatatggcacagtgaaatgaaaaagactctgctgttgttatagcaatagaagaactggtgatatcggcttttcatatccacttttaccctgtctgtagttctttatttggggttgaaagcatagcatgctcacaatttatcagcgcgagattaacttttatgacacgaaatatcagaggggattgtctcttccaataaagtctttttc

SEQ ID NO: 96975 - DNA, 297 bp, Glycine max
gctgacggactgcccaaagagtgagttcctgattgtgtcatcgagccctagagcatgttgggcttcaagttcatgagaagaaatctcgaagacttctagaatcacgtagaggttctatttctccattcatgagaacatgtgttggttattccatagaagaattgcagactactttaccagaaaagtattgtctagattgttcacaagctatacatagcgcagttttatctttgctaagagtgtatctctatattatctatgttacccagtgttttactgtctgataatctgattacc

SEQ ID NO: 96976 - DNA, 332 bp, Glycine max
  unsure (1)..(332): unsure at all n locations
catgcaagctnctccgctattttgctataaatatggggagaagtgtttaacattatggtgcagccccttaggcacttctctctctctcaaaattgctgaggaaaattatttccgagaagaatatccaaacccgaggcgcttccataacgtttccgtgagaaattacacgaagattctcggacgttcttcaagattcatcggtcgatcttcattttcttcagtcttcaacgggtaagtacctcaaaccaagcttttcaattcattctatggacccgtggcggtcccattctcgttcatgttatttattctccgtttcatataccctttatacc

SEQ ID NO: 96977 - DNA, 375 bp, Glycine max
cccactcagggctgttatattgtgttgctattgttctctattcgcgactttagaaaacaacatgtttggctcggatggggtatcataggataaactagagttcgtgatattgtaacatagccatgtgtcatttcagatcttgactagatcttctctgtagttaggattttgggacaaaaccttaataacatgcctccgatcgatatttgttatctttctttgtctttcaaccctaatttttgcttatgccgtcctttcgggttatcaacctaatgggtgagagaatttgatcttcctctaggaacgcttgaagctcatgcatggtgcctctcattgccctagtgtagggctctaagattcatgccttttgctatg

SEQ ID NO: 96978 - DNA, 277 bp, Glycine max
  unsure (1)..(277): unsure at all n locations
aacactgcatgnngnatttgggagatgatgaaaaaagtttggatgcttgtaagcattgtggtacatctagatggaaacccaacaagaagaagaaaatagctgcaaaggttttacgctactttccattgaaaccaagattgcaaagattgttcacatgtcgtaagactacaaaagatatgagatggcatgttttggaagacaataaagatgggttgttaaggcatccaagagatggagagacatggaagacatttgatttaatccatcctgagttttc

SEQ ID NO: 96979 - DNA, 264 bp, Glycine max
  unsure (1)..(264): unsure at all n locations
ttctaaaactactcccacaaagctagagcttactgagcttgaaacgtctcaaatatgggagggaataagccacgtcacgccaatctttaaagacctgagcctaacctacgatatnatttttacgcctgagcctggcctatggcctatcaaagggtnttattatggctcgaactggcctctataaaagcctagactggcctgatagccttattaaaagtctttttcacattaaatcttttatattctagagtacgaacgcactac

SEQ ID NO: 96980 - DNA, 262 bp, Glycine max
  unsure (1)..(262): unsure at all n locations
taatagcttgggcgctttacacaagacactttactgtgcaaagagagagtgtggggaccacaaacatcttctgcaacatatcttcagagaagtacaacttgtcagtgtcaccttgtgctcaaagctgactntcagtgttcaattcaaatataacgtttatagcagaggacaaaagaaattaagaatgtccagacaagagaatttaaaacttcccttttgtgtgatatggcacgaattgcctactgaaccatggacattactt

SEQ ID NO: 96981 - DNA, 262 bp, Glycine max
  unsure (1)..(262): unsure at all n locations
agaagttagaacatataagaatggttggtgcactttatcttangttggattcaatactnttcgagcttcaaaattggaacatagtgactcccatggctcagtttcgtgacaaggttgaacgttatttcaataaggtgattcaggatcctcatatatattatcccctcaacgatgctattgtttttttagtgtgtgcacattcatttctaactcacaagaccaacatacagataaaagcagaattagatggtatggagcgaac

SEQ ID NO: 96982 - DNA, 317 bp, Glycine max
  unsure (1)..(317): unsure at all n locations
acctaggagtgacactaatggtgatgtactgaattgtggaaccaaagtaccccaacagcaacaagtaccacattggtctcccaaaagctgatgcctaggttgcaattgngccttttacacttgactaaccctttagtgataacccaaacatattttgcgcagccaactttacaaggattgggccattatctatacaaactaaacactctacaatcgaagaaaagtggtgtcatatagtcctccatttgngccatgatacaactgacaaccttggactcttctcctcgaaacttgggcttgtattcaaatagtatgga

SEQ ID NO: 96983 - DNA, 317 bp, Glycine max
  unsure (1)..(317): unsure at all n locations
agcttctaaactctatacaagaatgtttctctgatgccacttgntagacaagnggccttagatatcttaataacgggggttggattaagatatagcaaactatttccccaattaaaattctatttcaatttcaatgcaagtagcaagttcccttacaaatgaactcttaaataatgattcaaatagaacaatctgaatacaaatataaatcaataataaataaatgagtttaagggaagagaaagtgcaaactcagatttatactggttccgccacacccttgtgcctatttccagtccccaaacaacccgcttgag

SEQ ID NO: 96984 - DNA, 467 bp, Glycine max
  unsure (1)..(467): unsure at all n locations
gctatccctgccacccagctcgcncaggcgagctaagttgcttcctacttaagcaaccgccttctggaggaattatctggaaggccaagtgggtctggttgctatttgcacccncatatttactaaatacacccccttgctcttttgtggtgattcttttccgtaacgttatgaaactttacgaatntcgtaacgatgcttgttttctttccgtaatgttatgaaaccttatggattacgtaatattcccttctatgccttccggaacattacggaactctatggattgcgcactaacacttccttataattntcagcatgtcacggaacctcacagattgtgctacaacgctnttcttttggcttccggcatgtctcagaacttcacaaattgcctaacgatgggtgccaaataccttgaagtgtgcaaacgagggtcgcattccaacaacggatggtctccggac

SEQ ID NO: 96985 - DNA, 116 bp, Glycine max
actagaggacaatgccgcaggggtaaagaagagggctggttctaaagagacatcagagtcttcgggacagcacacggacatcatggggaatacggagcctaatttaaagtgaacct

SEQ ID NO: 96986 - DNA, 311 bp, Glycine max
  unsure (1)..(311): unsure at all n locations
agcttcatggacctaagtcacatgttttttcatcngaacttcagtcatcctctacaaattataggtgccttcatattgaattgtaggaagtttgagatgttgaataaacaagtagctgtcaacatcctttttgaagtagacacaagcatcatcaaagtggtacttcctaacaagacgtagcacttgaatgacatcgngatgctcagtattatcacttccatcatagccagtagtgaaggcttttttagagtccatccatacaatttgattccataatgtcctggcatcataaacatcaggagtgcgaatca

SEQ ID NO: 96987 - DNA, 261 bp, Glycine max
gtttagaactgggtgtctatagtcattcttatgacgtcgactagttaagacatatagaattcctatcaaggataggataacaggagataacaacatgatctctacacgtgtttctaatgaaacactagcaatctctacataaaaaataaaccacaataatcatgaaatgtttaatactttaacagaccatatgacctcaatcttaaatcctacgtttaagactaccaacgacagttatcaatagatgaatggtatcttaac

SEQ ID NO: 96988 - DNA, 285 bp, Glycine max
tttttgaccaaaaaatgctacccttaaaacaaaaatggcatacaaccccctccaatatatacaaacatcaatgtaagatttagagcaagcttatgcgcacacttctttacgaacgttcacttgcacaagacattcttataactaagaaaaatgcacccatatacaatcaaggcaccttcgctacctagattattcacatgtacttccaaggtgtatttgttacctacatcacacacatttcctttgctaaattcacatacatgcatactctaaacactttggcta

SEQ ID NO: 96989 - DNA, 249 bp, Glycine max
gatgaacgcaacgaaaactgtatttccggatgctaccaactttgggtgtcaagttcactttgataaagatgcgaaagacaagtgcataaccctggctgttcaaaagaatgcatgggattatgtgatgaatgcttatggaaatatcgttgactgttcatgtgagagttcttttgatgagtaccttaaaaactttgaaataacttgctcttcgtggactatgtttgtggactatgagagtcaaacatgggt

SEQ ID NO: 96990 - DNA, 342 bp, Glycine max
gctacaagccccaccatgaaagaaacattttagatagacgtgagtcaattacaggagataaaacatatacgactaagacattagtgtgaaatacataaaccacatgactagccaaatatgttatatcatgtggactatatgattgcatggtgtcaatcaaacataattatcgtgatacacacgagaagatacatcatatgggaggctggcatatgaagggatctgagcaccgagacacataacataatgcatgtgcagagcatgagatgaggagaaatgagtcgacaacgtgggaaaatgtggaacgttggggaggatctgacagtacacaaataatgatat

SEQ ID NO: 96991 - DNA, 328 bp, Glycine max
  unsure (1)..(328): unsure at all n locations
gcttagcccacacacctntctaatatctaagttcacctcctggagatgagaagctagagcttagctacacaccccctataatagctaagctcacccatatgccaaaaaacaagaaaatacaaaaaatgtccctactacaaagaccactcaaaatgcctcgaaatacaaggctaaaaccctatactactaaaatggccaaaatacaaggcccaaacgaaggaaaaacctattctaatatttacaaagataagcgggctcatacttagcccatgggctcgaaatctaccctaaggctcatgagaatcctaggtccttcccttggatctct

SEQ ID NO: 96992 - DNA, 333 bp, Glycine max
  unsure (1)..(333): unsure at all n locations
ttctctctctctcgaaattgttgaggaaattacttccgcgtataananccgnccgaggcgcttccgtaacgtttccgcgagaaaatactcaaagattctcgaccgtgtgtcaagattcatagctcgttctttgttttcttcaatcttcaacgcgtaagtacctcaaaccgagctttttaatttactctatgtacccgtggtggtcccatattgtttatgtatgttaatctcgtgtcattttctttaatacccccttttgacgtgtgaagttattattaagtcattgtcgcttaaataagaatagatataataccccgatcggttgattgtata

SEQ ID NO: 96993 - DNA, 325 bp, Glycine max
agcttatgggaaaataacatgcaacttgctcaaagatatgggaaatagcaaaacatttgggggcaacgggagctgcagatcaggggagaattattgggaaaatcatgacaatggaggaaagagataggaaagaggcaaagagattggggaatagaagtgataacccataaacattatcagatacaatgttagagggttagcgaggggttgaaatggacagcaataaggagattggttaaaaaagagaatgtagatatgatatgtgtccagaaaattaagaaagagacaattgagaagtcaatgtgccaaacattgtgggggggac

SEQ ID NO: 96994 - DNA, 368 bp, Glycine max
  unsure (1)..(368): unsure at all n locations
attgagagaagaataacagctctgtncgngatacgagttattaaattcgcaaaagattcagttaatgccatcaacatgaagctatttgaggtactgctgcaatcaaaccattatctactcttgcagatggtgcattcccccatgttttatggtcacagtgcgatattatagacataataaagacgttgaattaggctttagactcggtcagagtgacgaaacaggatggtttacatgtattggaagaacagaagatgacgttaatttttaccgtttttaataaactattattacatttaaggaatggataacattgcaaactgcactgacatgtcatgatataaggacttggtactaccttttattta

SEQ ID NO: 96995 - DNA, 274 bp, Glycine max
  unsure (1)..(274): unsure at all n locations
accacaacaagcaggaggcacaaaacacagcagcagggggcacaaaaccaaggcaaagcnggaggggcacaaaanggccaaaaagcccaaaaaggggacagccgacaagccatcaggcatgggcataatagtaattttcctggccttctctcttaatatatagtatatagaagtctagaattgagagtggtaagatttttaaaggtatagttataaaattacattaatacaatatattaaaattctaagtattttaacaaatatctttaaggac

SEQ ID NO: 96996 - DNA, 415 bp, Glycine max
  unsure (1)..(415): unsure at all n locations
ggacactactcttaanacanaaacgcatacaacctcctcccataaatacaaacatcaatgtaaatttagagcaagcttatgcgcatattaccttacgaacgttcacttgcacaagacatcctatcaactaagaaaaatgcacccatatacaatcaaggtagcttcattacctagattattaacatgtactctcaaggtgtatatgttatttacatcacacacgcctncttggctgaatttacatacatacatactcaaagcattttgtggtaccaaaaactgcacatgcgctcatcttggtatttctaatacccatacatatacaaacttcacgatgaatcttgactacctacacaataaggtgctacgattcatgcttgttgtattcaagttcttgctacctaaagccacatgc

SEQ ID NO: 96997 - DNA, 308 bp, Glycine max
gttttttggtcgttttacccagaaaacttgggccattgatcatttcattctctactgcctctgccaaaaagaattctcctgaattctttgtgtgtccctcttgtcccttttccaccagaacaaaggactaaccgcctgaatactttggagcctcccttcttcctctgcgaagaattccaaatgacacagtctgagaagtcttttgattgttccctttacctacaacaaaagggtttagaggactaaccgcctgagacatattctgtatccccattcacagagtgtcaaaggtttaacagcctgagatc

SEQ ID NO: 96998 - DNA, 322 bp, Glycine max
  unsure (1)..(322): unsure at all n locations
agcttcncaaagtgttgatcttagttatgagaggggngngggcagcttatctctttgctttcaaggaagttttcccaaagaagctcctcaaagaagttttctcataagaagcttctctaggaagctacctactctataaatagaatcatgtgtaacacttgttgtaactttgatgaatgagagtcttgttagacatacttcaaagttccacttctctccctcttttattccttcaattttgtgctcccccctctctctttccctccctctttctgttcctccattgaagcatcctctccaagcttcttatccaaggatcatt

SEQ ID NO: 96999 - DNA, 354 bp, Glycine max
cttctctctctttcgaattgcttagacaaattgtttccgtgaagaaaatccaagccgaggcgcttccataacgtttccgtgagtgatttcgcgaagggtttcgaccgttcttcgacgctcttcattcgttcttcatcgatcttcggacttcaacgggtaaggtcctcggaccaagcttttcgattcattctatgtacccgtggtggccacagtgtgtttcgagtatttccttctcggttcattactatccgtacacctcagacgtgctaagccatatacttaagctttctcgctgacctaaaatagaaaaatctccctgatcgttgaattgattatccgtaacttcggtaaatg

SEQ ID NO: 97000 - DNA, 250 bp, Glycine max
  unsure (1)..(250): unsure at all n locations
aaagggtttatgttggactaatgagaggaaaanttaatctttctgagcggacgaacgagaaaactggggcgattaaaaaaggcgaagagggaagaaaaacccttgctggactgggaatcctattaccccgagtttcccaccaacccaacaacggcattacttagcctagaacaagacctgtctcttacccaccaaccagatatccacaagagccatccctaatacaagcacaaggtctgtctaccgcact

SEQ ID NO: 97001 - DNA, 317 bp, Glycine max
agcttaccctaattttaacgatactttatgatcaggaccccaacgccttcatcggtgatccctagcccatgattttgcggcataagagcttcaaaaatcttacaaccgaatacgcccatgtccttgacgacatataacatatctcctctgacaaataaagatgccttgctcaaagtaggatacttctatcccagcgaaacacttgagcttgacccactccttgctcttaagctgagtcgctaaactatctctcaaacttattttctgagctcagcattacttgtcataacacttcactctacatataccgggcgtac

SEQ ID NO: 97002 - DNA, 172 bp, Glycine max
gcattaaaggattcaccatgagaggctacagaatcaagctaatatatgactatcattaaccgatagtggacccgctccaacaatatctgaagtgacagacaacctagacacactgtttgcaaatgagcacaaataaccccatttgtccccattagaaactgaaacccacttc

SEQ ID NO: 97003 - DNA, 328 bp, Glycine max
  unsure (1)..(328): unsure at all n locations
ttagtggacccctacattggctgcccaaccatccttgtcttgcatgtgaagagcctcataggcatcttaacgagtacataattgactgttgcaccatgaaacatcctgacgtccagtaagatcataactgtctaacaggttatcctcaatgtctggagggagtggcaaaagacaggctgtgctacctngctctcatgatcaataacagttgggatgaccataagacggtgttcttggagagatgtgtgcctgcatatatgaccactgcgatcatagcacacattctatgcataatgcggcttagtgcatagagcgtcgatgagtactg

SEQ ID NO: 97004 - DNA, 231 bp, Glycine max
cgggtgctagaggagtattaagcttgttgcctacagcccttgagtgggaactgtgttcacttcttatgaatggcacgcgaacccttgtgcatctgccgccataatttatgttgcagctatatcgattttgcttatcctatatacttataggcgagtaccagctttaggcccatactgcttaaaattccccccctgcctcatccagatgtggatattactctgcactgaacc

SEQ ID NO: 97005 - DNA, 347 bp, Glycine max
gggattcttagtgtcgacctcgcggcatgcagcttctcctgcacatagaaccttatgcggctgccacaaccatttttagcgctgcgctatcgcgctgctcttcaacttcaagatcatcacgagttccttgctcaacaacacctccggcctgcgagctccacttggtacctcgtcgtgtggcattacagcacaatagccttcatgtagagctgcttaaacctcgcttatgcatagctcacccttctctccactgtggcatcctcaattctctccatagttcttctgacatgtacacgagaatcccgcgctcccatcgagatttataacgcctctgatcatacctgcca

SEQ ID NO: 97006 - DNA, 243 bp, Glycine max
agcttgctataaagttacatcgacgtttgtattgatggtgggagagaatatgccattcttgctataagagtaatgtcccactaaaactaacttgtcaaatgatcgccttctcatgaatggccctgatgaaacttgcctcattgaggtccttaaacgacaccgtggtccaaagaactagatccgccccggagtacgacattcaccgttttatgagcgatgtacaccaacggcgcttgtgaacca

SEQ ID NO: 97007 - DNA, 314 bp, Glycine max
  unsure (1)..(314): unsure at all n locations
agctttatacttttgtcaaggctcntcttcccttagagacctctctcaaggtggatgttgcgccatgttctcagaatgtgcaaaatcagaatgctcagaagccgattgctcaatattataatgctcaagatcaggatgttcagaatcactcgtaacatattgcacagattcaccatttctggcatgcttacaacgatcagaatgtgtataatgatgcctaactactctatgagatgtcctatctatctcaggatcgaagggttgtaagtcatatggattgcctctagtcatacactacattcagcatgcacact

SEQ ID NO: 97008 - DNA, 449 bp, Glycine max
  unsure (1)..(449): unsure at all n locations
tatcttgtgctatactanggactggttctaagccgagttggttattctgtagtgatgaaagacaccacacgccagccctcactccatgcctaacacactcacacatacactgagagagacacactcacacctaatatatttatgcatgggcattctcgaaccctacaatccgaatgagtgacataaagaagagtcgatgtcgctattagnctgtaggtgaaagttacatattgagtgtgctcgtatgaaggatcatggatagtacgcctacctctcactcgtatcttccatcaaccatacctattgtgcctttgatttctcgaccttagtcttacacatactatatagnatcatcatatcactccctcactctcaccaaactctcttcattcattctttatggatcaagaaacaacaagaagaaacaccatgcaagaatgtcatgtgat

SEQ ID NO: 97009 - DNA, 306 bp, Glycine max
  unsure (1)..(306): unsure at all n locations
tacacatttttatganaaaagagacagacatcctgctgcttatagacattagacgcagctctactctcagggggaatattagaacaacacagcatacataacactttctatgcattgagcaaatgtattcaaaaaataatgatggattagaactaagctttcacaaatcttaagcaagcatcagtaacatctttacctgcagcactagaaagaacccaattgtcatcataaggaacttgccacacagcatagccaagtaacttattttcccttgcataagagaccttcattatgacaacctcaaca

SEQ ID NO: 97010 - DNA, 393 bp, Glycine max
  unsure (1)..(393): unsure at all n locations
gaatgagacagcccanagaaagatgttctgtcgatcttgcgctctattatactaaaaggtatattnctgttatgatattattattttatcgctttattatttccaacgtgggtacggctcgacagaacggtcggaattcatgttaaccgaagttatcggataatacaattcaaacgttcggcggaaatgtattgtattgttaacttaagcgagaaatgacttaagtgaaatggattaagcacgtcacaaggtggtgtgataagtcattgagacgagaatagatatacactaaacacaatgtggaccaccatgggtacacagaatgaatcgaatagctcggttcgaggtacttaccctgtgaagatcgaagaaggatgaagaacgaatatagaa

SEQ ID NO: 97011 - DNA, 264 bp, Glycine max
gttatttggtcacaaagctagagtttgtacaactcagggctttatcatgtccacatttatacatttgattttaaaattcatagatcgtgcctagatcattactcacagctattctttcactcatagtttaaggtcacaactctcaccggttattggctcaagtctttctttcacaatcagtctgtctactgattaacaattataatttcaagctcacactcttgttctttttttgttcgacatgcacatttgctcaaactcatg

SEQ ID NO: 97012 - DNA, 232 bp, Glycine max
taatgtctcctataggagagtgatcgatcctactgactggaaagaaactacacattttgctgatgactaccaatgccaaagcaactacacactaatctcgacttgcctgttggggataaaccaaagaaagtaagagacgcagagaatctgacgaataaaggatgaaaaagttgcccctactatacaaactcacaaactcatggtgccaagaattaccggaaaaatataaaat

SEQ ID NO: 97013 - DNA, 181 bp, Glycine max
tatcctacttttaacttacatgcacatatctaaacacactcatgcgtaacctttgaaaaactaaaatataattgatgtagaataaacaacatttattaactaatatcacatttcatactcggacccctcatatgggagtctctggcttcgttccctgaatgcatctcaacaataattgttc

SEQ ID NO: 97014 - DNA, 312 bp, Glycine max
  unsure (1)..(312): unsure at all n locations
attcgcacattgtctcttaacatttgtagactatgcatggggagccttaaccctacgaagacgctaacaaaaacattatactctccgtccaggactaagattagcgagctggcggcaagtgaataatacatcccatccaaccgctggatgctactgagaacgtntacccatatcaactcgaactagaccagtattcattctgatcctcgggttgccacgtatgctcaagaacgcaccaatcacactggcacaaacgttgctctcgccgagagaaacattaataccatgtctacccccactaacagaccacca

SEQ ID NO: 97015 - DNA, 300 bp, Glycine max
  unsure (1)..(300): unsure at all n locations
agcttgaanactcgagacacgaaattgtttgagccattacaactatctcataatgcgattacattggtgtgatgagagaatgacttgatttatgcangactctaggctactatcgactaccacgaggacatatcgattacttctacttgcttaaacggtaaaaagagaacaaaaacactctaatcgattactgacggcatccaacccattgcgtcgtacaagagtgatttgcagaagctgggacaaactgtttaatctataacacagacaatccaatctaacacgtcatagaaggaatcg

SEQ ID NO: 97016 - DNA, 319 bp, Glycine max
  unsure (1)..(319): unsure at all n locations
agcttgacgcgagaggtaaagaagagtactatnaggactaaataggtttacggacacgaaacctcttagattgcttatatgccttgagtgtccccacattggttcacaaatacttccataccctcgcctacttaatgagctcaggtcacagggacacctttaaagaaggtggtcgtatggtggaaggcaatacaaagtaacggctaatgatagacaccttgaggatcagaaacttcacctgcatcacaattcgacttaattgcacaagagatcgctccacaaatactacaaacagtctcaaactcatctgaattatcac

SEQ ID NO: 97017 - DNA, 329 bp, Glycine max
  unsure (1)..(329): unsure at all n locations
agcttgtagatgtgaagaaatagagttgctgganaattcttactgagaagaatggggtctaaaattaggtttagtagctttgataggactaatcgaagcaggagatgaagtaagggcttgctttcaagatatttgagtttcatgagctaaaagctaggttgcaacctcattgataaaaaaaaattcgaactttctacaaacaaaagtgataaaggacttaaactcatcaggcaaaccatcgagaactatatcaagatgttcagattctgaaacatgttctctaatcaaagaaagtgaactgattagattgttacaaagttgacacttca

SEQ ID NO: 97018 - DNA, 375 bp, Glycine max
  unsure (1)..(375): unsure at all n locations
taagattgctgggcgtcataccctattttcttccggngacctttgcttgatgacatgcgcctttgtttggtccttgtaaggtgcttggcacccatcattagacaatttgtgagattccgggacatgccgataaacaaaagagaatattgatgcacaattccgaacaggtttcgtgacacactcggacatcatatggaagcatcgttgcataattagtgagggtccgtaacattccgtaagtcaaataggggatgattatgtaatccgcaaagttccgtaacattacggaaagaatacaagtatcgttacgatattcgtaagtttccgcaactctacgaaaaaagaatcaccanataatgcagagggggtgtactt

SEQ ID NO: 97019 - DNA, 219 bp, Glycine max
  unsure (1)..(219): unsure at all n locations
taaagcgtatttgatggccaactctatcgtctagaacattatcattggatttaatgatgaacactgtgcattttcaggtgaaaaagaggctaattttttacttgcataatgtaaccattgggcttagctcatatccaccgctaagctcaccttttgctcgcttatcacanaggagaatctggcacaacatccgcattatagtcgcgcgctaagcgcgag

SEQ ID NO: 97020 - DNA, 360 bp, Glycine max
catgatacatgtcaaggtttgagttgtttcaaggtgtaaatggatgcctcacattatttccatgacacaactgctaaaatgatgattaggaaactctatgaaaactggtcatgcatgcacctatgtggacactcatgtgacaaatttatatggtcatgtgatgctcaggctcatgacatgatctattatattcaccccacagttcccagatatgtgctctatacattgagcattcatccgactcatattggcatgcggggaaattccagcgttcaccctcaggtgacacacgttttatctataccatctatgacgggattccaaaaaagtgaaggattacttaaagctgtccgttcacta

SEQ ID NO: 97021 - DNA, 315 bp, Glycine max
  unsure (1)..(315): unsure at all n locations
agcttnactacacttatcatatacgttcatacataaatagacgcactgacacagacgcacacacaacacagaattctatgattaaaaacatataattactaagactcgacaggataaaatcagaaacgaagctattacagagagggttggagtatcgcctattgtacagaagatggtggaaaatagacttacgtggtttggacatgtatagagaagaccggtagactctgtaatgaggagagtagaccatatggagagaagacaaacaatctcgggcagaggaagacccaaaaagactataagagaggttataaa

SEQ ID NO: 97022 - DNA, 320 bp, Glycine max
  unsure (1)..(320): unsure at all n locations
agctnantagaggtgtttcattgnattctagcactttttaacatcaaagaactccattaatgctagatattccgacacagagatgcagttgtaacctttggtagtgggggagagatgacaactaacgatttgactattgcattagtacaagagtggatgcccaatattatacccggtggttgaatttctttataggcttctattatggaagaaactaactactgaaagataaatattagcgtgtgctcaataatgaatgttgaaaaagtatgaattaatgtacatgaaaatgagaattgatgattattcatttgatacaa

SEQ ID NO: 97023 - DNA, 316 bp, Glycine max
  unsure (1)..(316): unsure at all n locations
agctngactatgttatgcaaaatgtttcatatggccacgactaacaattgttgcatcaagacatagcaatcatgagactttaagcctaccaacttaagatctttaaactacacaaggattttaatatttgaagagtatccttgtgggactttgacctgacacagacactgacaaaaattgatcttctcctttttggacaaagtatgacaagctggaggcaagtatattttttttaccatcaaaccttggatgtaactgcgattgtatacccatctcagctagatcttgacgagtatntaaaccatctttcatcttg

SEQ ID NO: 97024 - DNA, 355 bp, Glycine max
  unsure (1)..(355): unsure at all n locations
ttctatcaagggaggtacaaatanaactgaaagcgattacataaaatccagttttatcgaaatgagataacaaataaaaactgaaagcgattacatatagtctatgtctatccaaatgagataacataatgaaaataaaagcgataacatcaaattagggacgaaantcttagttttttaagcaattcccagccatgcaactgcgccttctacatgaagtatccaaccattagcatatcatatctctgactctacctatctcagggccctagggcttgcctatctgaaataagctcattcaggcatgccactgtgtcataactgctcaggtagcatggaaaggctgggcttgctt

SEQ ID NO: 97025 - DNA, 317 bp, Glycine max
  unsure (1)..(317): unsure at all n locations
agctntctaaggtttctggatgccattccttgttctttcacagaaaacaaaggggcgctatatcttttcattctcttctccctttgccaaaaagaatttgacaaggactaatcacctgaattctttttgtgtctctcttctcccttttccaaaagaacaaaggactaaccgccttaattcttttgtgtctcccttctcccttttcaaagaattcaaaaagacacagtctgagaattcttttgattcttccctttcccttaaacaaaagatttcaaaggactaacagcctgagatatcttttgtttcccctttacaaa

SEQ ID NO: 97026 - DNA, 387 bp, Glycine max
atggatcatggtcacttgatgatttctgtgagtacatataaatctccgagctttgtccatccagccagtatagttgggttcaccagatctttgttgcatataacatagtgcatgctgtcattactatctaacagatgccatgtatcttctagttaatcctttcattttacagcaaaggacctacttacttcaccataaggctacatttaaagtaaactattataagcaatactgatgtgttatatcatgtcatgtttatatgagaatagtcttgaaatttctaacctgatccttaatatgaattgagttgaatatttactctgtgttattgttaatcttcatcattgtcatagccatatcattccaatattgttttgtatttcattc

SEQ ID NO: 97027 - DNA, 296 bp, Glycine max
agcttgatgcgagatagcgtggaagtgtcagtcttccaactttagtttgttgaccacaaagtgggacctggagatatgtcgcggcggtcaagaaaccttgcggatgtcaggtggggtgctattgcccacaaccaagcttgactaatcccgacccaacccgggcattgtccgttagagagaacctgtgacgcacctatacaggcgagctcgtggcggtctgcctataacagaacaatgtccacgacacaacgaggcttgtgtgggatctgaaatttagactctggtaatcgcatacc

SEQ ID NO: 97028 - DNA, 444 bp, Glycine max
  unsure (1)..(444): unsure at all n locations
tatacanaaggtcgtgcggtgangctactaatagtcatccatcgagaggtcttctatagctcttattctctaataaatactgtatgcattgtcatagagatttctatgctctgttcaagctcttcttatccttgatgtcatcttcaagagtagaagccttttcctaaaaacctatatcttcttctacagaactatcttaagccataaagttagtttcatcacacactacatgtaccaattcttcaacatatagagttcgctgattgaatactctatatgctcaagaggttatactctagtccaaccacatatagaacatttatatatgagctttgtactgactactaatatatccttctcccattatatgatcttctgacaagcatctactttntgttagcctactacatacgaactacacagttaagtgtcttatcttgaagt

SEQ ID NO: 97029 - DNA, 129 bp, Glycine max
gcccattctccgcggaacggaagaccattctcacaatatcataattcaacctttcataaaggtgttggttaagacactgggaatggcctatcagcgacacatggatttgctattggaggtcaagaatca

SEQ ID NO: 97030 - DNA, 250 bp, Glycine max
ctaatggttgttcttatggtacatgttgacatccaaagcgactctactaacatgagcttctaggtcaatggacaccgacttaagccattcctcatatacccttatttagtggacgtagcggtggaagagacttccttactccaccctactcttactacaccatgacttaaggatgtagctccatgtacaaggagtatgccatggatcttcttcatcaatggagtcctttgcttcttgaagatcaatggca

SEQ ID NO: 97031 - DNA, 275 bp, Glycine max
  unsure (1)..(275): unsure at all n locations
gtgtctgtgctactggagtcngcgccacgatcaaacattactttggattggcttccaggagctcttattcatctatgttcatggctcccgaagatcttgaacaggtgcaccacacattagggaccaactagaggattcggatcttgaaaaagtgaagcgacaacttatgatgctcttaaaccatatgtagtcccagatgcagccacaaatgctatcatacgggctcgcactgcctcctgagtttgacgttggtgcttctactgaacgtgttagca

SEQ ID NO: 97032 - DNA, 296 bp, Glycine max
  unsure (1)..(296): unsure at all n locations
catccaaataccaccccatgtccttatatgactacatctgcaacagagacttcgcccttcnctcacagcagaggcgagatatgtgcgcttatattcatcacgcgctcttaagagaggagcaacttcgcatcatctatggggattactgcacatgcgagagatgcgtggagctgcaacccttaatattcgtagaccaccaagtgtcggaaagagatccatgataccgcctatgctcccagaggtatttgcgccctactcggtgcaggtaaatgatcttagatatagtttgtacctgt

SEQ ID NO: 97033 - DNA, 327 bp, Glycine max
agcttctagccgaatggacttaccttgtattaattcctttgatagcccttttgagccttgtttccctttccttgttttgaagctcactacaagccttaagtggaaaaccatgatattaccatatccttaaggaattttggagctttggaattgttttgggaataagtgtggggggtttttgtttcattggacaacttgttttgttggctatgcttcatgatgtattttgggccatacttgatgtacattgtatattggttaaatgttggacatgctgaatgaaatgttgtttctcaaaggccaaagagtaaaaaaaaaaaaaaaatt

SEQ ID NO: 97034 - DNA, 449 bp, Glycine max
  unsure (1)..(449): unsure at all n locations
ctccctaagagtcctctcacgaggcggaggttgagctatgttctcagtataaaattattagtggaatgctcacaatgtactaaatgatgtcaactaatctatgaaatgtcctatctatctcaggatcaaagggttgtaagttagaaggatttcctctagtcatacactaaattcaacatgcacaattagttgcctttttatgcaaagaacaatgtatgtttgaactacaactaccatcaaatgatgtccaaatgacttgataatttgtgagcagtcttacaaaatgatgagaagatncacataaaatctcaacaaaaattcatagtgaactaaaaatctaaaatggtagttaaagaaataagagaaaaaacttgaaaataaaaactttnacagaacaccatnttggacatggtacctcaccggcgangaaattctacccggttcatacg

SEQ ID NO: 97035 - DNA, 322 bp, Glycine max
  unsure (1)..(322): unsure at all n locations
agcttcactcttcagctttagaatatataaccacaactttctagtaaactcatctacaaaagtgataaagtacttgctgccacctaaggagggcacttcaaagggaccacagatgtcagagtgtaccacttgtaatgcagcactggctctcttaggtgcttcagtcacaaatggtaacctactctgcttgctcttcacacaaatttcacagatttcccttccagcgttcaacttaggcaggccataaaataaatctttagaattcaattcactcagacttctaaagtttagatgaccatacctcatatgccacanagcctca

SEQ ID NO: 97036 - DNA, 471 bp, Glycine max
catcacaatcttcatgatttacacgtgagacttctattatgggcaaattcatttgaggggctgccatttagagaatggatatagaagctgattgattgcaagcattgatccatttcctccatataggacagaaccccattctgaccatcatataatccaaaaagttccatgaaacagagtcataagcctttgcatagtccaccttaaacaccaaagtatggtacttacttcttttagcttcctctattgcttcattgagaatcaaagatccatgaaggatgtgtctatcctttatgaaagttagttgtctctcatcaatgagtccaggcaataattgtcttaacctattggccagtaatttatcaatgatcttatacatacagccaatgagggagatgggcctatagtcatcaaaagactgtgggtgattgatttaggaattataccaagaaagatcattactactcttag

SEQ ID NO: 97037 - DNA, 246 bp, Glycine max
  unsure (1)..(246): unsure at all n locations
tcgagctatcaaaagacttgcttttatntccaaattttcttttctccctgcacagacgaggcgacttaagatctcgcataactgccaacaggagaagagatctccactcgactcatttagactgtgggtcgcaagatgaaacgcggagggcaacaaatgactgacactgctcacgttataaactcctctaaagacatcggcaaaagaaaagagagctgatgagcccaagaaagaagctggtaatgt

SEQ ID NO: 97038 - DNA, 337 bp, Glycine max
tatactccggcgaatcaaaaaacacacacgtatggttatggccttaagtcactcacggctttcacaaacggtcagttcgaagaatataaacatttacacttactgagtgtgtttaacgctatggtagactcaggacatgaactctgctacacaattgattagctctacgggtataatttccattcagaagaattgtgtaactctactcagtctatcattaatgtatgaatttcctggcaaccttggcgatcttgacatgtctttaaagagaaaacgacaaagatattgattgattttaagcgccacgagggaagaggacttgaatactcataacaag

SEQ ID NO: 97039 - DNA, 318 bp, Glycine max
agcttattgatgtttaataaggatttttgacttggttattgtgcataatatcagcctgctagatattggagcaaaccagaacagcaagtaatgcattgactagcaataagtattgctagtcagagggaatgattgtctttgtcaataaagaacattctagattggatgcattgaacttggcttattcacatgtttattccattctacctcatatgttcctatgattggaaacactgaaagtgttctctcatctatatgtcagtcatttatatagaaacatactagaccctgattcgctacagcttaagttcagagacc

SEQ ID NO: 97040 - DNA, 215 bp, Glycine max
tgcattcggaccttaaatactctctttgactcaacccatggggagaatcgacgagtatagttgtcttagctcctctatcccacatcagtagagcttgggaaacatagtatctcgttatgggatatattatacagacacacttgtaagctttcaaagaagtgcatgattataacacagatattcttattagtatatagatgacgtcaactatatat

SEQ ID NO: 97041 - DNA, 283 bp, Glycine max
agcttgaaggtgtggcaccatttttacggttttacactggcaatgggactactatcacagcttcatctctctttccatcacagggggagccacttgcgctgccatgtcgtgtacaccgttctagcgattctttggaagatgtgtgccactttttgcacatgatctcgtattgcatgcctttttgaaccatattactgacattgcccaactggcgcaaccattaagtccttccaacaatggactcaagaggggtcctagttagagaccagagaacagctacccc

SEQ ID NO: 97042 - DNA, 320 bp, Glycine max
  unsure (1)..(320): unsure at all n locations
agctntaagaaatttatggcctcagtttacttcctgtttccagaacggaattctataaatagacctcccatctttaatggagagggttaccactactggaaaacccgaatgcaaattattatcgaggcaatagatctaaatatctgggaagccattaaaatagggccttatctacccaccacagtagacagagtctcaatacatggtagttcatcaagtgaaagcataaccatagataaacctatagatagatggtctgaagaagatagaaaacgtgtacaatacaacctaaaagctcaaaacataataacatctgccct

SEQ ID NO: 97043 - DNA, 411 bp, Glycine max
  unsure (1)..(411): unsure at all n locations
aatgagacttcaagcacgtgctatcttcacacactgcaaccacatgttccacacacaaaggtaaagataccaatataaaactacatgtctacaaatatataaattcacaggtagaaaaagaaggaagagaactacatattatatactttgaagataccgcgaataatggtctgaaaaatatatgacgactaagtttatatgagagacatctatagacatgaagcgctaacacatcatagttcaatgaatacatctacaccatgctacataaggttcatagcccttatatatcattatgcatcaattatcataaatcctcacatagctcaatcaacaggtatcctcgtcatacaccaaaaaatgatatgggacanagtttattcattaactagcatacactctcatcataac

SEQ ID NO: 97044 - DNA, 213 bp, Glycine max
agcttatgttagtttgttgatgaacttcttagcttttaagggcaagagcactggctagacatattgctagatgactcagttgcctcttgcggggtctaacactatattattccccctactgaagcatctaacagatgcttggcctgtggactcaacccatctataacatattcagagaatctgctagcaaacccatgggagggagtctgactc

SEQ ID NO: 97045 - DNA, 392 bp, Glycine max
  unsure (1)..(392): unsure at all n locations
tttctgtacgtcactcatngtctccagatggcagagaagaaagacttatatctgtatagcgatctgcacaataacattcacccagactactgcgacaggtgcatatgcagattaatgattcatggcaagctctgtcactatgctgaccagagcatcacgtattccatcaagctattaattttcaccggatgaagatgaatctcgggcctccttatggactcctctgaggacaataccaacattccttgcctgaaatgtcgtgagctggaagccatcttctcaatcaaattcctagcctcatcaagggttatatcaccaagagctccaccactggcagcactaatcatactactctacatgatgctaaggccctcatagaaatattgaagaac

SEQ ID NO: 97046 - DNA, 116 bp, Glycine max
agcttctgactgatgcacagagatgttacatctgcctactgcgggccaacgggaacggcctttggaacccatttgaattcggaatgggcccctgcgggccaccaagaacaattcga

SEQ ID NO: 97047 - DNA, 75 bp, Glycine max
aaacggtcccaaaggttgccttgaaaaacctcaaacaagctttgagaaatggacttggaatggttttaaaacatc

SEQ ID NO: 97048 - DNA, 308 bp, Glycine max
  unsure (1)..(308): unsure at all n locations
agaaactcacgctcgaaggatgcttcttggaggaaagaagagggagagattagagaggggagcacgaaattgaaggaataatagagggagagaagtggaactctgaagtgtgtctcacaagactctcattcatcaaagttacaacaagtgttacacatgcttctatttatagactangaagcttccttgagaagctttcttgagaaaacttccttgagaagcttcttttgagaaaacttcttgagaagctagagcttagctacacacacccctctcataactaagctcaccttctgacaaaaaacatg

SEQ ID NO: 97049 - DNA, 329 bp, Glycine max
  unsure (1)..(329): unsure at all n locations
agcttntctaagtgatgttgggccaatttntggccatgtctcacagtatattgtactaaaccttcttctttccatttgtgtcctttaagttcttcccatagagagcttttgggatatggctctcatangtcttctcccagtcttcctgacacatgctttcttccctgatgcacccagagacttgtgtaatggtgtccatggaaaacatgacttcttttccaagaactttggacacattggtcttccaatcctttagttgagcgttcctccaaagttctgatcagtttgtgggtatatcatctatgagtcattgaaatagccatggattc

SEQ ID NO: 97050 - DNA, 456 bp, Glycine max
  unsure (1)..(456): unsure at all n locations
ttcaatatacactgttgagttttatatcagccagnaattcagtcaccaccactgaaattcacaatagacacaatcataaggaaacttaaaagttcaaaaaaggttcacaatcaaagactctctaagaattatacatgaacatgttaaggactaattaacatgcaagatttgactcatatcaaataatatgctaaaaaatttcatccactcatgaataaatgaagtagacaaagaaacaagaaatataaaattctacacaacataaggaatcttatgtgacaagtttcatgactagacattacttctatgacanaactacaataggtgaacatgtcattctagatntttgagggtttcttctactntaatatatntttaagaaatntatggtttaagttttggccagaaaaaatagcaagatataactcataggaacctatactcaacacaattcat

SEQ ID NO: 97051 - DNA, 331 bp, Glycine max
  unsure (1)..(331): unsure at all n locations
agcttctattgatagacagagaattttgtgtatgagctctatgagagttacttacaccatanccgctgtgaagaaattagaatctatattgcatgtattgaattcccccgtaatctatagtcaacttatgcacgttgctccctggagctcgttctattagcttctatccctaacccgagagctgactgtgaataaaacggagatatattatgggagcaagctcctctaagatgactggaaccactaacagctactattagtatctctggaaaagttttacacacgagactatcttaaattatgtgcgaagggggcatattgtctctgatgc

SEQ ID NO: 97052 - DNA, 298 bp, Glycine max
agcttggatagacgctatattggagttatattaagcagtttaggatcttagaggacggagcaccaaaatgctcgttcagacagagagagggggtgactttctcttgtgtatacttggatttgattcgtcaaaggtacttctagagtgacatctactttcattcataccctgagtatcttccttgcgatgctgtgtggggattgctgtctcgaaaagctcctatcagatactttccatgagaaactagtgctgatctccacacacacatattgtaccttgacttaccttccgtatagac

SEQ ID NO: 97053 - DNA, 331 bp, Glycine max
  unsure (1)..(331): unsure at all n locations
agcttgtaggattatggggtacccattacatgtggtactatgtggcggtcgggcgatggtgcacaacaagttttccacatccacaatgcgcgcataaacccaccatcccctgttgcccacctccatctgagctcacgtactcccacgtagcccatatcctcgtttctctcaacaccgggtccccatcaatcctcccaagcttccacaacatccaagcaaaacaacattcaaatagcacaatctatcacagccaagcaaaacagagcaaaggcagaaaactctgccaaaacaccaacgaaaatcacagctnttctcacttaaagaccccagt

SEQ ID NO: 97054 - DNA, 464 bp, Glycine max
  unsure (1)..(464): unsure at all n locations
atggaggctggatctttgtgcttcaatctaggtccttcaatggtgaattttcaccatggagatgcattggaaggcaaaggagaagaggagaagggaggcgcatccactatggaataagccatggaagaaggagcttcaccaccaagatgagccttggataagaagcttggaaggatgcttcaatggaggaaaagaaagagggagagaaagagagagggggggagcatganatngaaggaataaaagagggggagaagtagaactttgaagtgtgtctcataagactttcattcatcanagttaccacaagtgttacacatgcttctatntatagactangtagcttccttgagaagttttcttgagaaaacttccttgagaagcttctttgagaaaacttccttgagaagctagagcttagctacacacacccctctcataactaagctcacctccttgagaag

SEQ ID NO: 97055 - DNA, 305 bp, Glycine max
  unsure (1)..(305): unsure at all n locations
tgcaagctnncgttcgcgagagcattatttatttaagcaatttttgtcttgctnacgggnagcttaggaaaaatgtcatttcttctgctttctttcttccaaagccatttctaacgtcccaagcactttctccatcacccacagccaccattagccaccacaaaccatcgttgttctccattgaaaccccacaccgagaggaacccttcaaccgaagcggaatctttcaacttggctcgcggtttctgtagagaacgaaaccctaatctgaccttttgttttctttcgaggtaaccatgggtcta

SEQ ID NO: 97056 - DNA, 359 bp, Glycine max
  unsure (1)..(359): unsure at all n locations
gaacattactcacagctaggcgttccacagaaggtgagatcacactctcaccgatattaggttcacgctaatttttctcaatcgatgtgtctactgacgaacaattctaaatgcgagttgacattgttgatctgtatttgagtaacatacacacttgtttngactgatgaaaagaaacacctgttccatcataatcatgcatgcaatccggataaaatgcatacagccatggacatatgtcagtaggaatgctacactgccatatcagtaataaccaagttaaactgctcattagtgcttcataagtagcgcaccacctatgcatagtaaagactagcagtgtgtataaacataacaga

SEQ ID NO: 97057 - DNA, 319 bp, Glycine max
agcttgcatcaatattagcctacactatctatgtagagtctccataaatgacgaatcggtctatagatcttcttaagtacttaagtatggccttaaccactttccaatgttcctcaccacggtttgcttgatatagactagttacacctagtgcataagcgacatcaagacatgtacaatcatggtgtacatgatagctcccactgcactatcatatggtactccactcatgcgttctctttcttcaagaattgttggacaattctctctactaagagtgattccaacacctacaggccaataacctcgtttggaatta

SEQ ID NO: 97058 - DNA, 470 bp, Glycine max
  unsure (1)..(470): unsure at all n locations
tccctataggtgtgtcagtaactaaaccctgaacgttaaatgattatcttctaatacctcgtntagattctaggagagcatatgtttaagacgaacttactctacatctgggggagaaaagttgaaaagaatgaaatgaaaaaagttaagcatgagcacacacaacaaataagtttgttgttaaatacaataatatataagttgtggtgttacaatagcgtcaaaagcgaattaataagagggaatagtgagaaggctatntgtagctaacaagaaaagatcattgtgactagtctacgacttgtgctctcttagaatatataccttcgaatcctagaaacaccaatgaattcttgtagccaagcctcactacaagtccttctgcttatgtgtatacatttctgacttgacggcatgagatgaaatgcaagattgacctcctgtcattgtatcatgaaacataacacttg

SEQ ID NO: 97059 - DNA, 320 bp, Glycine max
  unsure (1)..(320): unsure at all n locations
agcttatngcgagtgtgtggatgaattgactagcattttttaacgangaggaggagattaacggtgaaattaattataataaatgagtaatccgactttaaatttatcaagattaaaaaaatgacgatattatgatttgtgatcatctagatccctagacatatgtccctaaattaattacttataatcttcttagaaccggaacatatattaatattatgacttaagacagatgttgttgcatgtaactttaaactagagggggtgatgataaattacagactgcagtgacatttttaattttagaaatgtctatcata

SEQ ID NO: 97060 - DNA, 304 bp, Glycine max
  unsure (1)..(304): unsure at all n locations
agcnngnaaacaatctcaananatatttttananantgaagacgcctatgcatgcaaatcgtgtgaactttgaccactggtatactggactttaactgcacgacttctggatgtgggagactaacaaaattgaatttcatgtgttgtaaacacataatgctcacatctgatttggaactttcctcagattagattaataacattgctatagatagagagtgccttaggaccaagacattacacgatattatatttacttgtccacaacatggataccagctaaaataatatttactttgtacga

SEQ ID NO: 97061 - DNA, 245 bp, Glycine max
agcttgagaatcttttacgagcgtttctatagattatgagacgcaagcggacatcccagtaacaagtttttgagcttagaattatctcaaagcttttgtggttaaggtcgacagtctcgatgtattacaggactcaatccgacatcctaataaaaaatgattgtcggacgaatttgctacatgcttgcgattacaataaccagcgtgtgatgtaataccggactcagatggtcattcgaatagaa

SEQ ID NO: 97062 - DNA, 319 bp, Glycine max
agcattaagagttgtgttagagcgttctattaccgttagtgaacggataccatgtatttgtagactagtagacagtacaagatcttgagatcgttgttagttgctaggagctcatcagttttggacagtggtaatccgttacatcctctacgtattgatctccctagattgcttttcttgtgagagacatttgaacgatcatgtcgtggcgaaagcttgccgcacttagatgggtaggccatacctgttgaatagaccctatcgaacactcatataactatctagacttccattttgaacactcttggaacagctgtga

SEQ ID NO: 97063 - DNA, 307 bp, Glycine max
agctttcatacagacacaagggcagttgatacacacgccaaaagagggggtgcaatgaaacaactcaggccagaagaagaattacaacaccttcttacctcatcgactacgttagaggaacaaaggtgagaccagttgaggctaccttctagaattaacttgctcgatattgactactcctacgggacaatgtggagaaattatgctatggccaaatattcctaggatctttctgtgactaggaagcttataaatactaatgtgaataacacgcgcggcatgagtaaaatttccaattacctcactc

SEQ ID NO: 97064 - DNA, 337 bp, Glycine max
  unsure (1)..(337): unsure at all n locations
acccgcgctttctcttatgtgttatacgaactatcttctagaatatatgtcttaaaatcttaaactatgtgtaggaatgttggagaatattagcgctttaatgcaaaagtgataaatatatattacttatatcaatcctatcgtatagaatataatatgtacattagatctcttagcatcccgttcaacgagtcaatctagttgttacgcttatcttgacaacctgagatgggtttcaacgatcatatatcaaccgcatattctgtgatgcaaatgcctaatatatcttntcctcattctaaaaagacacaggcgacgatagctcgtcctttctcca

SEQ ID NO: 97065 - DNA, 315 bp, Glycine max
  unsure (1)..(315): unsure at all n locations
agcttcaacattgaatntcgagcgtctctatataatactggacccagtctgacctgcgaataaaaagatattgtcgttcgaatagcctcggaggctcaacattgaacttcgagcgactcaatgtatttcgggactcaactctacatccgaggcaaaagatattggcgttcaattggctcagacgatcaacattcaattttgagcgtaccgatatattacgtgcctgaatccgacatccgagataaaagtgattgccgcttgactttgactaaatcttaaacattcaatatcgagggactcgacatattacgggac

SEQ ID NO: 97066 - DNA, 244 bp, Glycine max
aaattcccaacccaagagtgggagacagcgaaacgaaaagaacgagcattctcaatcaaagaatgggagagagacgaaacgatatctatcaaagaagaaagctcctgtgcaaagaaaccacaagaaatgtgccgagaggtgcttggactagacgatatctgaacaatacagaactgtcaccagatgaactaaagacagaaaaggacaccatgacctaaaagtgcgcatctccctttgattacca

SEQ ID NO: 97067 - DNA, 273 bp, Glycine max
  unsure (1)..(273): unsure at all n locations
agctntatatgcacgggtgagggagttaaaggccgcgttgttgctatctgcgatgaagatgtggcgagtacattggatatggtgcgaccctgccctcctgatttctagatctgagattggcgagaggaggagcacccccgcttttgcgctacgagcatcttgcaaacctttacgggattcacagctctattattgggcctatgctttagagatgctgcttttggtaaagcctcgtgacatgtgcatatgaatctataaggcaacgatctttat

SEQ ID NO: 97068 - DNA, 280 bp, Glycine max
  unsure (1)..(280): unsure at all n locations
agcttattggtgagtagtcaaagcttatgacctgcgtttctaacaatatcagcanagagcaccggtggcgcaacaaaagtcctatacatatgatgccatcgaaccagctaagggtagagaacaattgtccttgaaaatataggcatattatatcgaataaaatagtcttgcgccctccattagttaccaatttataacgcatctttgacggtaatattttgaaagttacctatggttaacattcaatttcgaagcattacaaaaactgtgatgagcttta

SEQ ID NO: 97069 - DNA, 333 bp, Glycine max
taagcatggagagcgtgtgactgttttgaacttcttcatgctcacatatgtggcccaggatagcagactcactcggcagaaggaagtatatcttgctcgtcacatatgagtatagtacaatgagctggtgttattatcttagagctaagtctgatacatatgaacgctttacgatattcaaggctatggatgaagaataacctggctagtatgttatagctttgagaatagatagaggtggtgaattcttatcaaatgagattatgactatttgtgaggagcgaggaataagaacagacatgactgcttcgtctactcctaatataaatggag

SEQ ID NO: 97070 - DNA, 254 bp, Glycine max
ctgctgcatgcacgcttcatgatgtagaatcaagattgtgtctggagtttttatgatagcgaagatgatgactagaagccccatagaatgaggtcaagattgaatcaagagcacttcatgaatcccgaggaaatttgatgtcaagattctagaatcaagtttcccgatttaagtttctagaatcatgactcccgactagtcgagttaaagattcaagaatcaagaaaagactcaatcgagatacgttctaaaaa

SEQ ID NO: 97071 - DNA, 437 bp, Glycine max
atgaatcaaaaggctgtacctgtcaccagactctgttgtttatgctcctttgccgaccaccgcacagactctgcccgtttatgcaacaatctgaagcaattgaacagcctgaagcttatgctacaaacatctacgacagaccttctcagcctgtacagcgaattcagccacaacagaacgagtatgacctctccagcaataggtacaatcccgggtggaggaatcatcccaagcttagatggtcaaattcttcacacagcagcaacaacaaccttatattataatgttgctgcccaagagaccatacttcctcaccaatccagaacaaaacagtaccaccccagaacagcaacagctgtgcccctgcgcaccttcctgaagacttgtaggcaatgacatgcaaacatgcatttcactagagacagacctcattcaac

SEQ ID NO: 97072 - DNA, 266 bp, Glycine max
agcttgtatgaatcttattcaacagtgtctcccagcagaaacaactaacgcgaagcctgctaacctgcaccactctaggggggatgagtctcaacaacaccttcacaacctggagtgcacacactctctccccgcgtcttatcgggagcggcaggaaccaacagaccatcttttacgcaaataccacagtgtagaaaatatggggacctgcccagataaccctcttcagaagacatccttgtacgacagccactacccattatgag

SEQ ID NO: 97073 - DNA, 321 bp, Glycine max
agcttattttgtatttgtatacgagttcttcgcagtcatagcccacttgcactccatgcttttagtgatctaatcctacagcaccaattcttaagctgttgggtgaagaacgaatacacattgcttgctcctactttgagctgatgacattttcatacccatgactttatccccctgttttattccatactatgatactattgaaggaatttatgttcacttgcagtatgcacccttttgaattgtaaagctagtactgcttcctaagattcagtcaaggacgcctataatatatcaacagggatgtcctcttcttgcttg

SEQ ID NO: 97074 - DNA, 396 bp, Glycine max
  unsure (1)..(396): unsure at all n locations
gcttctcaaggaaactacattagctgcctcgtaaaaacactgtgctgccttcattaaccgttggatcttctcgaaatttggtgtgctgcttcacaagacacgtgtccacgatctgaccgctggaatctatgagaagatatctggagtgggcgcgaagcgctctgttagtgcatagccttactgagtattaaaagattggctacattttgtcatacatgacactttacaatgaatgaaactggaggtctgccatatgtcaacgtatgtcaggaatagattngctgacaatgccatggccagatctatgtacatgacgaattgagctgcaggaccacgatgtcgatacgatgccaggacatctgcccgaaatactggcacataatgtgtatatcttac

SEQ ID NO: 97075 - DNA, 317 bp, Glycine max
  unsure (1)..(317): unsure at all n locations
agctagcacaagggcatttttaccttttgcaanagnaacagnagacacgaaaggtcagatatcgaagccagaggaacaattatattctcagattgtcaagtttattaaactaacaggaaagatgactaaaaagaggattaaatattcttatgattgagatttttatcagaaagaaaataaataaatataaagaaaggttttgagttataataagagtgactacgggttatgaatcattagtatcatttttccccaatcttagtcctaatgaaattccttccctggctaattatcgattcctaaaataaactaaagcc

SEQ ID NO: 97076 - DNA, 324 bp, Glycine max
  unsure (1)..(324): unsure at all n locations
ataactattgacattgtgctccttcacgtaaaagaaatatcttggctcacctttgactntacatataaatccttntcatattaatatcactttcaaactacaactttcacatgaacattcatactatatctatttaaaaaattcaattaacaattctatnttttctaattgaacacataaataaattgataaaaataacaacaaaacttacaacaaaattagagatggagaatccgtcagaagcatacgaattgttaatcccgatggtttttacagaatgccaatccgtacagttctacgaactatcaatccgcaacgtatata

SEQ ID NO: 97077 - DNA, 185 bp, Glycine max
tatttgttacttacattacacacatctccttggctgaatttacatacatgcatactcaaagcattttgggatatcaaaaattgcacatgtgcacatcttggtatttctaataccttatacatacactagcttcatgatgaatgctgactatctacacaataaggtgctacattccatgccttttt

SEQ ID NO: 97078 - DNA, 173 bp, Glycine max
  unsure (1)..(173): unsure at all n locations
ntcaagctgggcttattgagagacgatgcgttaagcgccatcatcattctggctgaagtcattgggagtgcacttagcgcagggagtggtgctaagcccgaatcattcattgtaacttgaagcttgatggacgcctagcctcaaatctaaggctaaactgcatgtgcagaaag

SEQ ID NO: 97079 - DNA, 246 bp, Glycine max
gtgcgtcatcgtaggcactgcatacaaccgctagatccctcctcctccgggcgtgctgctataaatatttatgcttcctcttacacatattctgtagctgaattctatccgaaaccatgttataagcgtactacttctgcctcatctaagcaagcattagggcttttctataaccgaccctacaaaacttctcattggactaccactttactgttgccccaggcttacttttctgttagaaatgca

SEQ ID NO: 97080 - DNA, 269 bp, Glycine max
gaagttccctttttatgaaactgattgggattctctatcaaaaaaaaatttgagtgtgttgtggatgtttcaattgagcttttgcaaatagaagtattgcatgtaggatttggttatgtggttattgtcaggcttgatattttgatggatgacaagtacatttttttgtgttctctgtttgaagtgtctggccacactcaaatgatgttgaatagtgtgaatgataaaaattgtctttcaaaaactatttagaaaaattctcccataga

SEQ ID NO: 97081 - DNA, 409 bp, Glycine max
attcaccacctctatgatatacagatagttccacttttctgactgactgccttgttacatcggtctagtaatttctaatgcatccattgtctgagaaatctcatgcagctaccacacatcacctgtttgtgaataaccatctataacagtgataaagtatccttactttctgaaagaactaacatcaaaaggctcagagatatatacttgctcactttaataaactgagtgtttcctgttggcaaaatattcagtggacaagctgaattatatgcactttgataagtcttagtaatttaaaagattttaaataatgataagctttgaaaatcaacacatattatcatgactgttaagatttaaaagatctttaaaccttttagagtaatttattagataatattgaacc

SEQ ID NO: 97082 - DNA, 259 bp, Glycine max
agcttcacactctgagctccaccatttcttttcgacgactaccgcgttattttctggcccgccaaagtgtcctcgctcgattccttgtttccagcccttgagctttcaaagctcaatgagaggaagaagaacaaaaatgtttatcgctccaagctcgattacttgaacgtcttgaacggggtacgaatctagatgatgctatgatgccttatgaatagcttgttgctgatcctaggaagaaagggtgctgacaaacatg

SEQ ID NO: 97083 - DNA, 280 bp, Glycine max
gtacctgtagatatgtcactgtttcacgataccatgaggacaacaggtggggtgctttgcccaaaaccaagcttgaccaatgccgacccaacccacgcatattcagtaatgagaaccatgtatgtacctaaacaagcgagctcctcgacagtcaaccctctacaagaacatagacctcaaagcatcaatgcttgtgtggtggctggccatctgtcaatcttgagtgatatacgggatatggactctggtaatcgattaccaagggtgggtgatcgactac

SEQ ID NO: 97084 - DNA, 294 bp, Glycine max
ctctttttctgcaagggacaatgactatgctgagcgcgtttttacctgttatgtgccgaatactttgatacttgatggtgggacgctgcataaaaatacaaaattcctctctatatcaaattctaacctctctagattgaccataagtggtagctttgaaggaagagcttacaaaattgcgctttctactccaaaccttagttctctcacagtcacgggtcatagataatcacacaatctcctccgcatgcaatctttctttccttgaagaagtaaccattgacacccttggtt

SEQ ID NO: 97085 - DNA, 310 bp, Glycine max
  unsure (1)..(310): unsure at all n locations
tgttaatgctggtttgttcagagatcctggaagagctacaatcgaggtgtccaagatataagtgagagcttcatatatgtcaaggactcacaggaacagatgtaggggcgaaactcgaaactctgtctgaagcttaaatttagagatactgtanactgctgaacattgtgcagcacagcatattccatcaacctattgaagagcttgggcttctgtcataccgcgacgcgtgaattcaagattgagcatggaaactgaaccatctcggccagacagaacgccagacacatatgttgtgaatttgacaaca

SEQ ID NO: 97086 - DNA, 273 bp, Glycine max
  unsure (1)..(273): unsure at all n locations
cccgangaaacaccatggtttagttaaccatgcattacgtaccatgtacaataattttggttttaagcgaaacttgtgacaggatgtatacatgaaatagatgatgtcaacgaagactctaacatggctgcatcagatgataagcatctgctataagaataatacaagagtgcttcaacatacaactccctgtcacaagattcactaaagaccaagcgcttgccttataacattgtgctttcaagacatgcaatgctctggtaatagattacc

SEQ ID NO: 97087 - DNA, 403 bp, Glycine max
  unsure (1)..(403): unsure at all n locations
atgatcggctngcgacacgagcaggtgcatcatcggtgatggtggtgaataacctagaacgcatgcgcattttctaacaatagtgagatgtgtataggaatatataacttattcgaatacaaaaagacattaaatactgaaacttgatgaaacactcttcancttagcctgcacataaccatggcctagacaatccaattttctattcttaaccagtgacatgagaaaactccatagtattgagcaatgtgacacttattaagactatgagtatgttgagagtgatggtactttatatagttaagtagacaaactacttagtgttcagctagtaggtcgtacttgtaatacacatggagcatgtatgatgaacgtttagcgtatatactatagatatatatat

SEQ ID NO: 97088 - DNA, 321 bp, Glycine max
  unsure (1)..(321): unsure at all n locations
agcttgtagaatggctagacatgagttttgtcantgtttggatcggttcaaagataaaaagggatgccccacattatttccatgacacacaatgcaaaaaaatgatgatttggaaactttatgcaaaactggtcatgcatgcacctatgcggacactcaagtgtcaaatttttatggtcatgtgatgctagggctcaggattcatttactctattttaatcaacccaatgtttccaaaatatgttcttttatcaatttgtgcattcatccgagtccatttcgggcgtccggggaaatttcacagcattcacccttcatgtg

SEQ ID NO: 97089 - DNA, 373 bp, Glycine max
  unsure (1)..(373): unsure at all n locations
ctcgnccaggcgagcaaggatgctttcttcataagcaacagccttctggaggaaggatctggaaggccagtgggccatattgctatgtgcaccctctttttactaaatgcacccccttccatttttttggtaattctttttccgtaacgttacgaaactttacgaatttcgtaacgatactgattttgcttgcgcgaggctaccaatccttatgggatatcgtattactctttnttagctttcgaagaagttacggaaactcacggattgcgcataaacacctcttttcgattccgcccatacggaattcacggatcgcgcaggctgcttcttttgatactgagacgtctcgggacttcatttattgtgcaac

SEQ ID NO: 97090 - DNA, 107 bp, Glycine max
tattgaatggtactaaatgtcaattaactaagcacgtttattatttgggcccattcagctaatttgatgattttaatctaatttcaagaattaatgaaacattgggc

SEQ ID NO: 97091 - DNA, 250 bp, Glycine max
gatcttaagcaccgcggctgcagcttatagtttagctgaggtattgttgattgtcgacattatgatgcgagatctattaacgattgtagcttataagaacataagctctgatttagaggacacagatgtactctatatatgtgtaattaaggcaattaacctatatcatcacacatatgttgagtagctaatacacaggattcaacctattatacctttgatttctcctactttaacagatgataaggat

SEQ ID NO: 97092 - DNA, 257 bp, Glycine max
  unsure (1)..(257): unsure at all n locations
agcttgtttaccccctgttgaatcttcttatacncnagcngnncagagcaccgctaattgatgtccttttggaaccgtctgtgtgtttgacccactgactcctcttgatccttgggctatgcctaaagagtctcgctttaagcgtgaggagagccacgctcctgcggactatgcgaataagcttcttgagagagctgaagatcaaatagagaggaaaactactaagctctgctgcacaatcccacaaaaggagaaag

SEQ ID NO: 97093 - DNA, 283 bp, Glycine max
agcttgcttggggggcttctatagtttcttgatctacggacagcgaagaagtccctgaatggtgatttttcaccatggaggatgcggcacatgacataagataagaagtgggaggaggggccatcgccttgggaatacgccatggaacattgagctccaccacctaaacgagccttggataaaaagcttgggaagactctccgatggaggagattaacgaaggaaataaacacagaaggtgggagaacgatattggcctacttagatagagtctaaaagagcc

SEQ ID NO: 97094 - DNA, 157 bp, Glycine max
atcatagtccaactacttcacaaagatcacccacttgagcaccgacatctcattgaatttccactggtgacctctacaacctgtagagtcccttaatggcatccgtgttcactcctacctcgaagactcttgctctttctactttttcatcgttgtt

SEQ ID NO: 97095 - DNA, 236 bp, Glycine max
atggcaatagaacacggtacatgatattgcccttgcacgatctatttaccttaatctatttgatactgtggaactggaggcatatcatatatagccttttcaaatcctatgccatagcttatacataactgtcacttatatgaaattcattctgtatgactagaaatagttatctaccaccaataactgaatgtttggctttctgccatcttgagagcacagatacttgatggcta

SEQ ID NO: 97096 - DNA, 389 bp, Glycine max
cgactgcagcatcaatctgtcaaaaggaacaagttatatatgtttcaaagtaaaaacgtggtttctacttcaaaaccccttgaactacttcacattgacttattttggccctcgaaaactatgggttttggtggtaattactatgtcctagttataatagatgattactcaaggttcacatggactttatttttgaaaaccaaaagtgaagcttatgatgcttttcgcaaacttgccaaggtgattcaaaatgaaaaaggtctcaacatttgtttcacttataagtgatcatggaggggaatttcaaaatgagtatttgaaaacttttgtgaagaaaatgaaattcaccataatgtttctacctcaagaacacctcacacaatggtgtt

SEQ ID NO: 97097 - DNA, 299 bp, Glycine max
tgcatagctacgaccatgtttgttcttgtcttgaagacacaagaatattataaaaatgaagggatgtacaattttattcaatgtatttgattgagtacaaattccccttgttatcccaaatgtgcctcgttaaaacctctccagctaaaatcctaaattttctcctttaggacaaaagacttgagtaggaaaaagtgtacaacatttggtcttgcattaggtcaacagaagtagaacttcgggtgggtggtgttccatgttcttggaattgcttttccattcggttcctgtagttttgt

SEQ ID NO: 97098 - DNA, 380 bp, Glycine max
agcttgtggtacacatattatctgtttttactaagtgctagctgataaggattctgatccaccggccgagcaagcgtctagctattttcacacgttgaatatcacagcaataattgattacacaattagaaattcgatccaatgacttactgagggtccaaggtatcattgtagactagtatagtggagcattaatcggatatcgagcatgtcctgtccatatgcacctaaaacaatgtgttgaaccctaaaatagagaaactacttatatatcaatataatgcctgtcagtagttatgagacacacaatgactcatttcaaggtttgtaggggagtatggtaaggcttaactacattgtacattgtgaaatgggctcga

SEQ ID NO: 97099 - DNA, 302 bp, Glycine max
tgtacaggatgcttcagtgttgttattcttaagagggatagaaagagggagggcggagcccaatgttgatggatcaaaaaaggatagattttgtgctctgattagtgggttactagactctcatttatttacctccatcaagttggacacatatctagtatttatataccacgtatctttcttgataaactcttttgagaaaacttacttgacaaccttttttgtgaaaacttccttgccaatctatagctcagatacagacacccatataataactacactgacgtacttgtgaacctttc

SEQ ID NO: 97100 - DNA, 393 bp, Glycine max
agcttgttggcaatcctcattcctatttcattttggctcttgcgtaagagcttgtacaactgctcacaaatggcgaagagctgcgatttgaatatggaaatatagtgcaagcgtaccatgaagccatggacttgcctgtcagtacgtggttacggcatcttaaggatagccttcaccttttcggggtgtacctatattcctttgtggcttacaatgaaagcaagctattttcctgatttgaccccaatagtcacttggcggggttcaaccttaattgatatttgttaagcctttcgaacaacttgcatacgtagactaggcgttcttccttggatttaaatttggcaattatgtcgtccacgtagacgtcgaactcttgatgcatcatatcat

SEQ ID NO: 97101 - DNA, 301 bp, Glycine max
ttcgctacaaccttactcttccctttgggcaacatcaaaaagccaagcaaacgcctcatggtacccatcaatacgcgcatcatcacccgagcttctcggttcataccgggaatgcctttagctcaacacccgtgcatcctaaggcacccacccagagggaagctccgcaagttccaactctgaacacgactcgcctggccggtaattccaacacgacaaggaacttccctccgaggccattacaagaattcaccccactcccaatagacgtacgaatacctcttgccatccctcatcgcca

SEQ ID NO: 97102 - DNA, 103 bp, Glycine max
agctttatgtgtaagccttagattctttcggtagaagtgagaagacaaaatgtgcatgtctcccggcactatattagcgacagggtatcggaaaaaaaattgg

SEQ ID NO: 97103 - DNA, 285 bp, Glycine max
tggctttgacgaacaaatttatctcttcttgaacaagttcatattgggcgtcttgcacaatgctctcatatctggtccagaaatgaacttttatatcaaacaagtgcctaaaggcatgtctaacccttatgagctctactatgcagatgcacatcgagtgttgacgtatcatggcgtcaccttgacatttgcactacgtatctggaaaggatggcatattgtacattgatggacgcctttgcccatgaaatatgactgacagctaactgacgaaggactaaaaat

SEQ ID NO: 97104 - DNA, 217 bp, Glycine max
atttacgttactcgagaagaggctctcgcagaatcagacctcgtactgattgtatctgcccgaacctcgggctacgtcaaccggatgccgatgataccaagaagatcagggctcagagtgaatagaggcacacaaatcaaacgacatactgcgactcgaggacgaggagcaccaaaaaggaggagcacggactgtaaggagcctggcgtggcaacca

SEQ ID NO: 97105 - DNA, 298 bp, Glycine max
ttgagccaattcaaatttcatatttcttccgtactcgaatgtctgattgagtcccataatatatcgagacggtcgaaattgaatgttgaatctctgagcaaattcaaacgacaatagctttttactcggacgtctgattgagtcccgtaacatatcgagacgctcgaaattgaatgttgaacctctgaaacaattcaaacgacaataacttttatctcggatgtctgattgattcccgcaatatatcgagaccctcgaaattgaatgttgaagctctgagccaattctaacgacaata

SEQ ID NO: 97106 - DNA, 321 bp, Glycine max
agctttgacttatgaggctctgtttctattcctacaccttgttagttaaaccatcatcttatactagcaccactagcttcccgtgatactaaataatataatccgccctgagcgggcttgtatctcataaccactcttaccaatatgttcactgggcatccatcacgtctgtgtatgcttgacgtgggttatgtctaaagccagctcgggttggtcaccggtcaccaacaaaatataagctcatctttactgctgaataagacaagctaagctgcccactaaaggagtccgctgatgagattttaccaactaagataaatg

SEQ ID NO: 97107 - DNA, 288 bp, Glycine max
tatcgcaaaaccaacttttttctttctgacctaaccatgggggaattttccacagaggccattgcctctctcgcccataattattatcacatcgagacgagctttacctcagaggactttcatctatcaccctattagtgacattttgaagagatcctatgaaggcctctatggggaatgataccatacattttctcacggttctaccacttattacccatagatgctaaaataaatcaaatctcgtcacatgaattgaaccaccaaagacaatcctcaaaatgagtg

SEQ ID NO: 97108 - DNA, 381 bp, Glycine max
  unsure (1)..(381): unsure at all n locations
agctttatgatgatgaatttaattttatttgattcaagaggttgtgagcatgacaaatatgttaacaaaaagcccaaagaatgatntcaagattaaatcagtaactaattcaagaatcaagagaagtttgatttctagattcaagaatagatgaattccagttctaagtgaagaaatcaagaagacttcacagaggaagtattgaaaagattattcaaaaaacaaacttagcacagtgttgaccttcaaaaaagttgacacagacttttctaagtaccagagttttactctctggaatcgataccacttcatgcagtcaatactttggaaaattggatttaaaagctgtatcttaatttacactgtccaaggtcttcaaat

SEQ ID NO: 97109 - DNA, 295 bp, Glycine max
tgaaccttgaatgtttatttttgattcttgaaatcaaatttcttcttgaaccttgaagtgttcttgattcaatcttgaacatcttgaactcattctttgattattatgaattgacctttgagctttttgtcatcacctttgttatcatcaaaacatctttgaatcaatcttgattcatcatgaagctttgcttctacaatctccccctttttgatgatgacaacttctgaaatcaagaaacacacacacacacactttttcctagtcgatcactcacataaatttccattctccc

SEQ ID NO: 97110 - DNA, 318 bp, Glycine max
agcttgactcaagaccttgtctttggaccctgcgactcatgaaggattcttaggcccccacgcgctatggaccaccctctatcagtagaagcttgtaggaatattgagaggctccactacgaacccaaaggtgcgaataacagtggtaaaaaaaaaaataaccgctggcgttattatacagactaagaagacaagtggaattattaaattaactgacgcttgagagacgaagaactaatgagaagtattaccatgcctatctctaaggagcttggggaatatccaagggtctgaaaacaatgaagcaacacttgaatt

SEQ ID NO: 97111 - DNA, 304 bp, Glycine max
ctcagcttgaaacatcggacaatttgtatttttggctacgcaaagaccgagagggaaagatgggaaaacaccctttcctatgggaattttgcgatccgctccgagtatattgggtcatggatgcatgcatcatctgtctataccaatcttcgttccccagtgtaatccaatgctcttagttaagcttcatgttcggtttgattaacttggtttcacttaaatgaaatgtacttttttggttaccacgatgtgattttcatcatgccatgtgtaatctacacattatgtttcatccttaattcga

SEQ ID NO: 97112 - DNA, 362 bp, Glycine max
agcttcttccggaagtttttttttctttctaatgcgtatgtaatgacgattttgcccttgtgtaaattcctttaaattaacgtcttcaggctgtgttttactgcgctctctttctttcttcttccgtctgctttgtatcttcttccgtttgctttgtttcttcttccgattgctgtcgattccgaggcggtcccttaaacaatctgttggcggaccactcaactaaatcatttgaagatttggggtgcccgtgttccgtatttgaagttaattactggctgttgcttctattttgtcgatgtaccctttatttcctttccggctagctttttaaagaaaacattaaaattgttccggtcaaa

SEQ ID NO: 97113 - DNA, 298 bp, Glycine max
ttatatccatgacatttttttcccttaactttttttcaatactcttcactaatttctaatgttggtagtccatgacttgcaacatcgtcaatgagtctaataagataaatgcatgttttttttttgttaaattgtatttttaaattcttatcttttcgaaatagttaatgatgtcaaactaattgatgagagactaaaaacacaatttaccaaaaaaaatacacatcatggaactaatttcgcatatgaaagactaaaagcacatgggtaaaggaaaaagtccttggcttattgatga

SEQ ID NO: 97114 - DNA, 293 bp, Glycine max
tctccctcttttccttatatatagggggaggagggcagaacaaaaatgttcaaccctcctggtatctgagaatcacttaaaattagtgagaaaaattgtttcagtgatgaaaatccatgccgaggcgcttccgtaacgcttccgagacgtttccgtgggcgatttctcgaaggttttccaccgttcttcatcgttcttcgccgctcgtcggtcttcaaccggtaagttcccgaaatcgaactttttaattcattctatgtatccttagtggtccccacttgttttgcgtgctt

SEQ ID NO: 97115 - DNA, 295 bp, Glycine max
ttataagcgcgggtctggggtacgaaggtcaagtggtcgcgatatactaagatgatgttctgagtacattggatttggtacgaccatgccctcctgatttccagctgggaaattggcgagtggaggaacgccccgacatttacgcaacgagcataatgcaaacctttatgggtttagaaactctatagttgggcctaggctttagagtttttcttttgttaaggctttgtgtcttttgttttgaatttataatacaaggatctttctttatctgttcctacgtctttacccattc

SEQ ID NO: 97116 - DNA, 405 bp, Glycine max
  unsure (1)..(405): unsure at all n locations
agctnttccaagtgttcttgagtctttctttcatgaagcttangtaaatgacctttgttttcaactctaagcttgattttcacttcattttgttgccctgttctcacttgtagtttcaaatcttatttttgtactcttgaaggttggaaactagaacctaaactccctcattctttcttctaaatattatggagactacaagaggtagggggtctctccaactcttgaaccctatgcttgctgttaaacttccttgaacatgttgntgtcttgattctggatctgtgtcctgagttgttttccttgagttttttatggcaaaaataagttctttgagtgttaaaacatagccttaaatntcattaaatcatatttttcttgcaaaagttatgaataaaacaagtt

SEQ ID NO: 97117 - DNA, 300 bp, Glycine max
  unsure (1)..(300): unsure at all n locations
tttagtgtagcactgntggtcttgcttttaatctaccttgacagttatgatttctcctgttaaggtagggaacttcattttaaggtgtggtgtagagactactatagctccaagcttatttaatgttttcctaccaatcaaagttaaataagaagtatctgcatcaataattaagaatcttacagtgaaactccgtgagagcttgccctgaccaaaggtggtccttaggtctacataacctctggtttccactctctccggtgaaaccagggagtggtccataatgtggttgaatcgtgg

SEQ ID NO: 97118 - DNA, 405 bp, Glycine max
  unsure (1)..(405): unsure at all n locations
agctngagtggagataggtgatttattgcattgaacatatttctaggggtctttcactagatttaaatttgctacctcacattaacgtctagttttgctccaccaataaaataatgatacatcatttaagttttcattttcatttttcaatcaatttataaaatatcactctcaaatccttaatcccattttaatagagagtgaggcacaataatgcttctaagtactgaaaaacatttcttctcatggatacacgatcaaggcattaagcgtgcatacaaagaatacaattaatgttgaagtgcatgataaaaaagtagcaacactacaaattaatatctcttattgttgcaccatcaatttgaagcatgagatcaatttataaaggtaatatgcttttgttta

SEQ ID NO: 97119 - DNA, 300 bp, Glycine max
ttgatacaaactgaaatatttactttcacactagaagggggacttgaatattgtgtatatcaaagataataactttttataacttttagaacaaatatagatagaaaaatatatgtacggtaagatatccactaaaaagaaaataggttttaataaagacatgtttgatcgttcaatgacttaataagagagtctttaacgcaatttttcaaataaatacttagtattaaagaagtgacaaagaatgctaatagaacacttaataaaccattaataagagaaataaaaacacttggttta

SEQ ID NO: 97120 - DNA, 409 bp, Glycine max
  unsure (1)..(409): unsure at all n locations
ncaagctttgtcactccacccaatttttgttttcaaattcaccaaacctaagaccgctgataaccgtgtgtactttgcgcatcccatatacaatggagtcgttgaatcagtatctaagctttcatagtaaggtgaatgtgcttgcctaaaaccctcttgtccaagatcacgtagcatgtcttctatatgatcaccaacttcttcgtcaactggagcagtcgaagggcttgatgaaatttgtggtaattcaccatgccaaatccatttcgtataatttggactaataccatcacatataagatgtgttctaatgtcatccaaagattgtcggcgtccattcaaacaattaacacatggacataagtatagtccaccaatgggtgctgcattatgtttggcaaatagcaag

SEQ ID NO: 97121 - DNA, 300 bp, Glycine max
tatacagcttaacaagtaatttttcttcgaattctaatattcatagttacattaaatatttaaaaagatattattgtttataatgatcgatcatatatgttgctcgagcaagattaactttgatgaagaatatatatagtaaaaaaagtattttcaccttactgaaattttctaaaggtaaatgattaatttataatcaattttcacgtcagtaccatattggttccgttttactaatattaacaatatcttgaatatgaaaggcagtgacacgaatctttttgaaaagggtcattttca

SEQ ID NO: 97122 - DNA, 154 bp, Glycine max
tgcattagtgaaactttgtttttttacgacttcaaccgagggcgttaattaaatgtatgcggtgtgaccatgttattgagttgtagaaaattagggaattggaatggctcgaaaatctgagtctttctcatacaacctctcatattcattactt

SEQ ID NO: 97123 - DNA, 402 bp, Glycine max
  unsure (1)..(402): unsure at all n locations
agctnggcttttccgtatccaaattaagttattctgcattggcttatttgaatctatgtataatcatgtaagtggtttcaaaaccttgtatactaaatgtatggacgggaccaagagaatgaataattttggtggttctttgcttgattactttgtcagatgattatattggctattgcaaatggttgaatgtctttggcttgaatgaatttattttaatttatatctatagtagtaagctagtacatgatcttaccgaaacaaaattgattctgaaatattatattctttcgtttgtaatatttttttttttaaaagaaaagacaggtattttaatacttcacttgataatattgtcatttggttcgcaattttntttttgtatggaacggattaccaaaa

SEQ ID NO: 97124 - DNA, 298 bp, Glycine max
tctggtgggacatcttgacttgcttttttttctgacattcaccacagattctgccttcttctattttcagattgggaatgcctctaacagcacctttgtcaatgattttcttcatgcctcttaagtgcagatgtccaaatctttgatgccatattctgacttcatcttctttggaggatagacatgtggaggagtaactggtttcttgaggtgtccataggtaatagttgtcctttgatctgctgcccttcattagaacttcactcttctcatttgtcaccaagcattctgactttgt

SEQ ID NO: 97125 - DNA, 387 bp, Glycine max
agcttcggaagaggatgattaattccaagcttcaaaatcagagctaggaaaggcatgactcaccaaagaaaaattcaagttagtcgctacagacatccggaaagagtgtgccggattacgagaggaaaatgcggctactggaagagccctcgaacgagaaacctatagggctcgcatggaagagcatggccgatataaattccgaggagctttgtggggcagcaacaatgagctcatgctccggagagaggaaagagaccagtcacgagtacatggcatggtcttaaaggaggagttagctgcttgctcaagatccaagaggagtgtgggccaacacttagaagccacagagcaaagcatgatagccacagagcacagcatgatagc

SEQ ID NO: 97126 - DNA, 297 bp, Glycine max
tgagatgaggaacttgtgtttggttaaactttttgcgtatattgttgaccacagagtggtccctggagatatgtctcgggggtcaggagaccttggggacgttaagtggggtgctattgcccaaaaccaagcttgaccaattccgacccaacccaggcatagtctgttcatatagaacctgtgatataccctagcaggctatcttctggcaattaacttgataaaggaacacacacctcaaagcatggatgctttgtgtggctggccatctttgaattatgtgtgatatgtggatta

SEQ ID NO: 97127 - DNA, 275 bp, Glycine max
tgatacccgccgctattctttaatcttgacgcgcatgcacaaggggctaatactaacttacaaggacctcgaacttgccattaccacgccatgcggaacttcagctgggaaatgggccagtggaggaacgcctcggcatttacgcaacaagcataatgtaaaccttctacggttttaaaaagctctatatgtgggcctaggcttttgagtgtcaccttttgttaatgcttctggccctttgactttgaattcataagccaaggatctttcttcat

SEQ ID NO: 97128 - DNA, 405 bp, Glycine max
  unsure (1)..(405): unsure at all n locations
agctttcaacgcgtntctttacttattgtatcaggaagcagacaacgcgcaagactacccatcatatctcgcaaaaccccatgcgcgcgagattttggagagatacgacagtacgacccgatcactgaccatttctaatttgccctcgtagccccgcacttcacgactgcagaaccgctctcctttcacgatttggggcataaaagagggccggcggatggagcttagttggggtctctatggatagtgaaagacaaggagagtgctgcgtgaggaacatcagagaaccggcgtgaaagcgcggggctgaatggagagagagagagacgctttttaattctgaaaaggcttttgccatcatctcttgttatattattagtaaggatgccacatgtcttcatttga

SEQ ID NO: 97129 - DNA, 300 bp, Glycine max
  unsure (1)..(300): unsure at all n locations
tggnntatcgagcactttgtttagatcaaccgcttgttggaacctgtctttccctaaactcttaccaacacccccaaccgagctctgcaccacccacgaccaccgagggccgccgggaactgccgttatttgccgatgaacccccacacctaaaggaacactataatccgaacattaatctacgaaactcatctcacggatgtggcaaagaacgaagcctccaatcctaccttcgaggctttccttaaggcaaccgtgattgtcagcctactcctctgaagatgaagcctatctatacat

SEQ ID NO: 97130 - DNA, 296 bp, Glycine max
tgcataagtgagatctttttttttcatacccctcaaagtcgtttctctaggaggaggctgaaccatgttttcagtgtcgaaaattagtcatggaatgctcatactctgaatattaacaaccacccttcatagattgctcaaaatgcacagaatgatcaagatgctcactatccctaactaatcaatgatagggtctatctatatcatgatcaaagggattgaaatcacctggattgcccctagttatgcactatacgtggcaaataatgagtattttacccagcacctaacacggg

SEQ ID NO: 97131 - DNA, 401 bp, Glycine max
agctttatgctcatttgcttacttttatttcgcaggtcgaatgattgtgagtttccatgcagaactaatccgcatttaccagacatgcctactgtttatgctagcgatacctggttgaatttgacaggtgttaaagtcgttaccttatataaattagatcaagttcaaatgaacttattaatattctcccataggtcatagcgtgaattgtattgaacatattcaactaatgttattcttcttttttgtatctgacaagagggaattgtacatccttacgtggaattgaacatgatagagagagagagagagagagagacagagcttctgttttaaaatgttcttgcatacattgctgttttttgggcaaaacatacaccttgcatacattgctttttttt

SEQ ID NO: 97132 - DNA, 296 bp, Glycine max
tgaagacgcgtagggtcattttgaagcgctcggtcgcaatccctaatcacgtgcttgtggagctctaatttgctgtaacagaaggcgcggttgctggaagcgaacatcggaacaagatcgggcgtcacaattagcgaatgagagagcaaaggaagcattgagaataatgaatgaaagtgaaataggaaggcacgtaccataggtcttgaattgcgttggaatgagaaatgagggaatcgaggactcgaatggctttggaccaatccttggaggcgcaaaacctggccaatttcacc

SEQ ID NO: 97133 - DNA, 297 bp, Glycine max
  unsure (1)..(297): unsure at all n locations
tttaaagagaccaacaaattttttggatgnatatacgggactcatggcgtcttatcacaatagaaattcctctgactccaattaaacattgcttctcaactccttctctctttttcttaaattttcgacctcatggattacactcttgacttgctagttttatttattgtcttacccattgatccacaagtttttgttgtatcttgagggacttgcaaggacatttaatatgacaccatgaaaaatatcaattgctaacaaattttcaacacctcacatacaaaggttcattactaa

SEQ ID NO: 97134 - DNA, 307 bp, Glycine max
agcttgatagagtttgttgttcttatcacaggaggtactacggggcggtcgggcgaatgtgcacgtcaacgtatacacaaccaaaaatctggcataaacccaccataccctgatgtccaccttcgactgagcataacttctcccacgtagaacatggtctcgctacgataaacaccgcgacccaataagtgatccctaactgccccatcatccaagaaaaacagccttgtgatagaacatgctatctctgactataatgacgggcagatgcagataactatgccgcatacaccgaccatgattacag

SEQ ID NO: 97135 - DNA, 295 bp, Glycine max
tgatgagggcacccttaattctttcttgaaaaccccgattattgaggaagaaggggaaccactctgtgcgtatgggatattgaccctgatgaggccggatcctaaggagacggctgctaagcttagggtcccagtgaggggattcaagcgtaatgcttatgggcttcccttgaacattctaaagtataacatgaccaccctgactctcacggggagcgagccttccttcgctaaccacatttttacttcccatacttacgatgtcaccctagacatagcctaactcatttatggc

SEQ ID NO: 97136 - DNA, 389 bp, Glycine max
agcttgttgaaggtgaggacaaattaccttgttattatatgcaacggggtgcgaattttgaagaagaacaacacccaaggttgtgcctgaagtgcctatttccaccgcgaaaggaagagaaaaattatgtgtggctatcacaggggcttgtgtcatgaaatgcttcatctgatcaaaagcttggtgcaatgcgagttgccaactaaattggtcctttctaaggaaggttgtcagtggggaaataatggctgcatacgcccgaatgagtttctggtaaaaaccggtcaagtgaaggaatccgcgtaactctgagggagaagaaagaacaagccaatcaagcatagctagaactttggatgggtctggagcaatgccacttactaacacaa

SEQ ID NO: 97137 - DNA, 301 bp, Glycine max
tttaaagtgaccagcagttttggtggtttagactgggtctcatgggtctttcacaatgaaatccgctgactcagttttacattgctctcaacccttctcttttttctaaattttcgactcgtgggtttattcttgacttgctagttttatttattgtcttagccattgatccagaagtttttgttgtatctcgagggacttgcagggacatttaatatgacaccatgaaaaatatcaattgctaacaaattttcaacacctcacatacaaaggttcattactaatctgtcttataaaaata

SEQ ID NO: 97138 - DNA, 402 bp, Glycine max
agcttctagccaaatggacttactctttgtataattcctttgatagcccctttgagcctatgttcccctttctttgttttgaagctcattacaagccttaagtgaaaaaccatgatatcaccttacccttaaggaattttggagctttggaattgttttgggaataagctgggaataagtgtgggggggtatgtttcattggaagatatgatttttggccatgcttaatagcttatattggtcatgcttgatgtatttgtatattgcctagttcttgctgtaatcttcaaattcggtcttcaaaaaatatatgaagaatgttaaaaaaaaattctaaaaaagaaaattcaattgttgcaaattcttactgttgaaaataaacaaagtgaagtttatatatga

SEQ ID NO: 97139 - DNA, 299 bp, Glycine max
tctgcatgtctagggtttttttttgagtgaaaggtcaaagttccagagagttttgagattttgctgtgtgaagacctgcagagaaccgagcttgaagaggaagccgtcctgagagcttgagatgagtttgtgagtgattgtgaggtcctagaggtggaggagacatccccaccacttgtatttcttcaatccttcatctttttcttctctttgttgtaaaggaagcttcccagttttggagagctacatcctctgttggttcttccttgaatgtacttgatgtaaatatctgtatatct

SEQ ID NO: 97140 - DNA, 407 bp, Glycine max
agcttgtgtaatttacatcgagttataatgcattaaattttccctataatagatgattggtacaattcttttctgtacttcaagttggtaaaaaaaatttagttactccaatcatttagaatgaagttggtccaccccatttttactcgagcaagttagacaaattcgtatcataaatatactcacaaaactaatgtaaaatgtctattatgtaattatctgttgcatgttatatatcataagtttgttgagttcatctttagttttgttagctcacaccaatatttatgtcaatttacatattgttatatataataagtgtgtaagattttataataaatatctcaaaaattatttgtgagtgattaatagtgcaaaaaatttataacggtaatgcatgaaaatta

SEQ ID NO: 97141 - DNA, 300 bp, Glycine max
tgtaggattatggggtaccttcttcatgtggtactaggtggcggtcgggcgatggtgcacaacaagttttccacattcacaatgcgcgcataaaccccaccatcccctgttgcccacctccaactgagctcacgtactcccacgtagcccatatcctcgtttctctcaataccgggtccccatcaatcctcccaagcttccacaacatccaagcaaaacaacattcaaacagcacaagctatcacagccaagcaaaacagagcaaaggcagaaaactctgctcaacacattaaccaaaat

SEQ ID NO: 97142 - DNA, 297 bp, Glycine max
agctcgctacatcgatgaagtgttatttatagagacgcacactatgacgggtcacacaacaatcatatgatgcccgaaaccggtagccgatcatgttctaatcacgagccgagtgtacaattcaaatgacacgccacccttggctcaacttattctatacttatcacgcacactctttaagttatccatgtataccaaactgcaatccatattcgttccctcgcataacctttatctatgtcttcccccacatcacttgctttattaatgcctcaacgcatctctctttttataatt

SEQ ID NO: 97143 - DNA, 296 bp, Glycine max
tggacactttctacagttttttcttatcctgaaacatcagcggatgctatgcatacaccttttactttatcactccatacagaaaggcactattgacagccatctaatagagaccgatgtatgaaagtgttacagacgcttaaagcatgatgatggctttaatcctagctattgttgcacatgtttctttacctacaattccatccatgggactatacccttgagcaactacacaagccttgtgaattacaaccttatcttcttgattaacctcgaataggaaacctcatctgggt

SEQ ID NO: 97144 - DNA, 339 bp, Glycine max
ccgcagcatgcaagcttaggcagggcgatcttgtctgacaacaaagcaaggagtagtgacagacaccaaccgcacgagcacgatgggaccagattaagcacaagatcggagcagacagaatagcaaaaccacataaaagcaccccgtagcagcaaggaagagcacacaagaagcaaacgtccaatcaaccgtaggacgaacgataaggcaccacaaagtgcaagagcacagacagggggacaagcagggcaagagacaccaaaatccacgctgataacagggaacaccccccaacgggcaagagcccaagaccgcacgagaactacaaaccaaccccca

SEQ ID NO: 97145 - DNA, 113 bp, Glycine max
ctcatagcttgtatgatgtctaggaatgattttcattatcatttacatcctcatgttcgggtcaatgtagtccttatcggtaggctcttgtcgcacatctgttatcccgcact

SEQ ID NO: 97146 - DNA, 390 bp, Glycine max
agcctgaggctctaatctatttttttctcttgcagcgcccgctatctgctacaaaaattgtatcttactcctgaaacgcgaacatgtctttttgcctaattgaatcatccttcactatatcatttgctgaaccaatgaacgtttaacgatgagacatataatccacttctcgatcggaagtccgctttaatccaacaaatcagtacataatcttcaacttatcacagaattgtctagtacctaatatatatatttatgaaaatttccaccagaatgttcatagataattatcgtggatctttatacaacttgaatctactttgtaactatatcttatgatatgagcttcctataaaaagttcattccaacaaccgtgatactctgatgat

SEQ ID NO: 97147 - DNA, 296 bp, Glycine max
ttgtcagcacaagtttgatgtgtgtagggcgggtcgccatgatccacgatgaagtcccccaagagtagccaaattgggtgcggtcgtgccctcccaaattcgaattagggaactggcaagttgtcgagcaacccaaaatttccatggcgaacataatgtaatttgttagtcttaaccctatcgctaggcctaggcttcagggttttccccctgtttaggcttgtcttttgctatcaaatatatataaaaataatcttttgtcatttggtcttgcactttcatccattcttattcgt

SEQ ID NO: 97148 - DNA, 395 bp, Glycine max
agcttgggagatgaccagtttttattcttctgaaacgttaattcaagctgcttacggctacaattcttcagcgggctatccttctgtgttcagcatcatgggatgaacccagcctttgatgacagctacccacgttctgctatccagcgagtgtaggaaggccaccattcttgcattccaagattcataaatgcttccatcgagaattgcgggtatgttcactggttcgacttctatttgcatgtccatcagaatttatctccataaatctcactctgtgatcaagagtgtcggctctgactccaaatgtaaatctcacaccagtggacagatgttatacatgatgttactacatctcgcttcctaacctgcagatcatattcggacgtatgaac

SEQ ID NO: 97149 - DNA, 297 bp, Glycine max
tgatcaatcccgaccttacttgttcatagacaatcacggagaacctgtgatgtacctaaacaggcgagctcctgctagtcaaccgataaaaggaacaaaaaccactgagcaaggaggcttgtgtggtggctggccaaatgtgaaactttgatagatatatgggatatggcctatggtaatcgaataccaaggggtgtaatcgattacagggcttaaatttataacactggagactaaaatggtctctgggaatatattaccactgcttgaaaacgaaagcaagaggctaggagggct

SEQ ID NO: 97150 - DNA, 405 bp, Glycine max
agcttttcgcagagcttactgtattatctgggacctagccatggcagaagtctccacagaggccattgcctccctcgcccaatattatgatcagccattgaggtgctttacctttggggactatcagctatcacccatggtggaagaattcgaagagatccttggatgtcctctatggggaaggaaaccatacctcttctcaaggttctacccttcattaactagaatttctaaaatatggcaaatctcggcgcaagaattagaccgtcaatagcaagtacaatatggggtggttggaaaacccatacaatatttggatgctaaagcaagaatcttggcaggtaaaggcatgtggtccccgttcatatatatactcgcactggagatcttcggaggagacctctt

SEQ ID NO: 97151 - DNA, 296 bp, Glycine max
ttagcaaatccaatcttattgttgttgtcttcaattgccttgagttgtttcatttctggatcaaatccggcaatccaccgtgaggtccaagttctgcacccagtttcattgagtcaagcactagcatatgcttgattgcaagaagaaaagtataatgacgcacgaaggacatttcaaccttcgtcagatgtaggagcttcttcaagctctcgacatccgcttttacccattccatccaccaattcaccactgttaccaacacctgcacgaacaacgtcttccagcgttccattcaa

SEQ ID NO: 97152 - DNA, 194 bp, Glycine max
ccccggatccttaagtccaccgcggctgcaagcttgtacagtttttttttttctcgcaccgtctcggcgagtatgtagtgcttaaggtagcgaataacgattttgacttcacctttgcgcccgtaactcttttgatgagctattttaaagagggtgctatgagactacattcagttagctgggacattatagat

SEQ ID NO: 97153 - DNA, 364 bp, Glycine max
agcttaacatcggtattttaatttatcgatggccatatatacatacaacatcaatgtctatcaaaactcgcagctgctctgtggaatatgtattactgcgccgtctgtctttgtaataacccccacttggcctccatattgaacatgagatcctttggctccgcctattttgtaataacctccgttccatatgcatatttaatatacaggacaatccaagcgtgatgcatgtggctttatcttaattttgaatctttttaactctgatcaacccaagttttataatggaaaacatttaaggatgttgctgttcctaattatagttgacaaaacttctgagatttaaaagtgatcttctacatcc

SEQ ID NO: 97154 - DNA, 295 bp, Glycine max
tgcctgagggttttttatttatgctggatctttgagcttctattaggtcctttaatggttattttcctccatgggcatgcgacggaacacaaacgataaaaggtgataggaagcaccatccactacggaataaaggagctattccaccaagatgagccttggataataagcttggataggatgcttcaatggatgaaaagaaatatggatacaaagaaaaaggggggagcacgaaattgaacggaagaaaaacggagagaacttgaactttgagtttgagtctcacaaaactctc

SEQ ID NO: 97155 - DNA, 402 bp, Glycine max
agcttaatatggatataatgatttgattgtctgaaataccataactgtgccgttgatgaacgaagagcatatgaagaacggtgaatttttacggttgactaatgcagggacgccaactttgattttttaatttggataccatatgttttgagtcgattctgtatcactatttttttctttagttattgcaaggattaaaattgatgctgaaactgttctgttgaaagatgaattttatattactactccaatgcttaatgtatatgtacgagtctttcaaatatttctgtttgtaatgcttttgctattgttcacgatcatgctgctattaaaccaaagtatgggcataccctattctttatcattttttattaccattagcagctgccttgtctgctgaat

SEQ ID NO: 97156 - DNA, 298 bp, Glycine max
tcgaccgaactgttacaacttataaacgtcacatttcattgcttgcacatatctagctcatattgtctctctgggatatgcgaccatgatttagctaactcactcgacatcaatagacgtgactgcaatcctccttagtgatagcctcagaaagtaaaggatggatgtctgcatgactgtgggcacatggttctaacgccttgttgctacatgggccaaaggattactggatcctacaatggctgtttctaggctaactgtaatatacaggaactgtatgctcaaattcactcttgac

SEQ ID NO: 97157 - DNA, 404 bp, Glycine max
agctttagtgtcttgaattcagtaattattacctatctgaaccagtcaagtcatggcttaaggcccgtatgctcagggagttgttggtgctatgctccagatggtgccatggaacaatcttaaacactttgccatcagctgactgcaccctcgcttcctcctccttttgccctggaagatcagctttacacgcataaatatgagctttctggtgtcacgtcaaagttgaattcttatccattgacaggtgcagtttctacaggacaatctatcatctctgaaaaacaaagtacacccaattacactttgaacactgacagagaatgttacaagatgaaacaaccaccatgattgccgatatattgagaaagttcaaatacaatggcattgattaataacatttc

SEQ ID NO: 97158 - DNA, 302 bp, Glycine max
tcttattctatgagggtaataccaaatatttgtgaaccaaattaacaataacaccttatatgatttgaaataacaaaaaacaaaattacagttccagtctagtatctctatgaaaattgtcaaaatataactttaacagggaataaaaaaaagaaaggacaaataagataatgtttgttttcttcttaatcttaatattttatttttcctcccattctttacctcaattttgtaagctatgtgaaacttgtatgatttagaacactataaaaacaatgacaaaggaataggaaatagagggt

SEQ ID NO: 97159 - DNA, 391 bp, Glycine max
agcttcttatccaagacactctctttgtggtgaagctcctccttctatggcttattcccttgtggatggtgcctcctctaacctcttctcctctatctttcgctgcatctccatggttgaaaatcaccattgaaggacctcactgaggctcaaagatccaacctccatagaagcttctcaagcaagcttccatcatttaataattttagctattgggcaacataattgatctcttgggtacgatatccaaagttaggtccactgatactactatgtagggtacacttgtccttgcacatacatattttacagaacaatgagcgattcatgagacaacatgttgtgttgattgccttaccctataaaattttattcatgccttaattgaata

SEQ ID NO: 97160 - DNA, 307 bp, Glycine max
acctatgaaactcagcttcccatctaaagccagtttttggttgtccgtgccttcgatggcacccgccgagaggttaaaatagcatttccttataaattaactttccaaatgtttgtcctcgtaggaaatggctccaaaaaagctttccgcgaagaggtctaggagagacgttgcggttgaagggaccagtgctgcccccgagtttaatagccaccgtttccggagcgctgagcaccaacagtgcttttatgccatcataggatgagagaggcgcgacctgctcaaggatgatgagtacataaatttt

SEQ ID NO: 97161 - DNA, 398 bp, Glycine max
  unsure (1)..(398): unsure at all n locations
gcagcttggattactttaagatttattctcctctctaagnagacccacacccactgcccttcattaagaactacctcctttctacctctattgtctttactaccatacacaattgtttggttcctaaccctttgatgcaacttctttacaaaacttgacctagattgtcattctttatgtataaaacaagtgtcaagtgggaggggaattatgtctaacggagctaaatgattgaacccatacacaaccttcaaaggggattgcttggtggttctatgaacccccactgttgtaggaaaattattcatgatgaagatactcatgccaaaacttttataatggcccttaaaagggtggatgaaacctattcactacctctgttgcccataagttatgga

SEQ ID NO: 97162 - DNA, 303 bp, Glycine max
ccgcgtgattaacatctactttttttttcagcaactggttagaggtgtcaacaggatgatcctgatttacaatctcccactgttggacgatgagaaccgcctgtacgtgttgtgccgcatcggatacaatctctatttgcctatgaaacactcccggttgggttaacattgattgcacatccgagacacttgaagacttcatatcacacatatatattcagatgactcgtacaacaatacattgatgatgttactgatggagtctatacctttttctctccgtataagacatcgtccaacaca

SEQ ID NO: 97163 - DNA, 377 bp, Glycine max
agctttggtgacagatattacatttacgcccttatatacgcaattactgggtacagatgacttctgttgtgacacacgtactatctaagggacatacatttttattaagagttagatgcataccttgcagacacttcaagtacccatctcatgttcatcatgtgcatagctggagggaatttgacttatgcacagatatctatgcttagcctatctgctgcaccgtacacaagctgcaccttatctctaactttcattggagaactctaattaatagggggttggtaagactaagaacaccacggcgatagggttgcctagttgtgaagttctcacccattaggcctatgataggaggcttctccattatatctttt

SEQ ID NO: 97164 - DNA, 299 bp, Glycine max
tggatcatgtgagacatatgccctagatcgagggatagcaccactactagaatcaatacattcaacatcatacagttaacatcgattattggaacaactggtgttaacaaacacgaagtggcattatcataaaaaagtttgggtaacataacaaccgtttttaagacagaccgaagctataccgtacgctttctttataaaacccaaaggccaaaaaccctttttcccccgcgcgctctgttgactgacaaaccaaagctttcgcttctccctttgcgttcatcactaccatgactgtg

SEQ ID NO: 97165 - DNA, 392 bp, Glycine max
  unsure (1)..(392): unsure at all n locations
agcttgcttctacactnattgttatttcgcaccttttgtcaaccagaggcaagcgatcctgttgacacgcatagactaacttcgttatctgcacctcttgtcaaccaggggcaagcgagcctgttgacacgcagagactaacatcgtcttctgcaccttttgtcatccagagactgcaagtccgatgacatgcgggggtaccttatcgttattcacacctttcgtcaaccaatgcgaacgagtccgatgatatctagaagatggtgggcgtctgatttagagttttggtaaattattgcagggtttacgtttcgcatgtagagacattctagccctacgacgcacaatattctttctgttatgcagaacgatcaagttcgatagctgtggaa

SEQ ID NO: 97166 - DNA, 155 bp, Glycine max
ccaagcggacgcataggcacttcaaggaaggacaccccacccggagagcccgacgagaagctagacaaacactcatcacaaacgaaaccggtagctaactacacaggaccaatcagggttaggcaattgcatacaaaaccgagcctacaggctaa

SEQ ID NO: 97167 - DNA, 387 bp, Glycine max
  unsure (1)..(387): unsure at all n locations
anctttattctatgtatcttctttttatacaccaccaaaatagtataactttaccattttaaccacctattggacaaaaattcaaatggtgtcaaattcctaacaatttacacaaatagaagcaattaaagaggcaaaatcttgtatatgcaattgctcttgatgttatgatgatgatcatgatgatatgaagtaaatgaacttttcaagattaaattcaagacaatactttaagatacttcaagattacaagtcacagcatcaagatgatcactagtatattaagaatggaatttcttaatgaattaacaaaacgcttggcctattattttagttaaaaagtttttacaaaggttgcactctctggtaatctattatcataggatg

SEQ ID NO: 97168 - DNA, 276 bp, Glycine max
  unsure (1)..(276): unsure at all n locations
agctagaaggggcatgcttcttttattgtgctggnaaagcataggctatgagggtcctagtattgggagcatatccctcctcttcttagacagggccaagagaactgacaggcttctactcctggaagcgctagcttatgaaccgacaagcccttgatgcccatgtataaaaattacaaactatacgcggccaaatataaatagtacattcactgatcatcgaaagctaccttaaagatgcatcctagaatggacttaggaaagttatgacctact

SEQ ID NO: 97169 - DNA, 295 bp, Glycine max
tcatctcatcggattttctcttctggtcgctgttttgaaacttccaggctggggaaatggctcgcaacatatataggttctcaactctgctttgggtcctgccgctcatactgatgaggatatatgtccatgtaccttccttggggatcatgtctcttgtactctgcaccctgatgggtatctaactagaaacaacctcatgctctgcgttctaattctatattcttatactgctcataatctttatgcatgcatgatcatatgcgagtgcatgcgttacacaagcaatacttta

SEQ ID NO: 97170 - DNA, 398 bp, Glycine max
agcttggacttcctgtgttttgtgaacttctccttcctcaggcgtacccaaacccaatcacttggttcaagcacgactttctttctgcttttgttggcttgccttgcatagctcgcatttttcttttcaatttgaaccttcacttgctcatgcaacttcttcatatactcagctttagcctgtgcatccttatgcttaaacatagcaatgttaggcataggcaacaaatcaagaggagtcaaaggattaaatccatacactatctcaaatggtgaacaattagttgtgctatggacagcccgattataagcaaactcaacatgaggcaaacaggcttcccaagattaagatttttcttaaaacagtcctagcagtgtgcctaaagtcctattgactac

SEQ ID NO: 97171 - DNA, 298 bp, Glycine max
tcattgcctaacaagttattttacaacaacgagccccaagagactcagcataaggatgcacaggtcaaagttgagtatgtgaaaagattgtatgaccaagtgaaggtgcaaattgcaaagaagaatgaaagttatactaagcaagccaacaagaaaaggaaggaagtggtacttgaacctggtgatgatcctggacatttgagggcaaatgtttttcaagaaggagggaatgatgatcttgaaattggccaaatacaagctaatggccttattggagaagggcgaacgccccattgga

SEQ ID NO: 97172 - DNA, 387 bp, Glycine max
agcttgcacgtgatagattaatgtattttttacttgtgctctcagaatgttgggctagtcttactaattctgtagccttgagataacatggttatatatttcttatcaagctattgatcaaaataaaaaaatggtgttccaatttgcatgggactggttttcttttctcttctattatatgcatatatatgtgtgtgagcgcgtgtgtgtgcgtggaatatatatatatctaaaactatacatatatatatattaaaaatatttctcctttggaagtaatcaaaagactaatcgactgaaactattgagatctctcgttttccaaattattgattaaaagagcgtacttttgctaatttttatataattgcgtccacttattctaat

SEQ ID NO: 97173 - DNA, 292 bp, Glycine max
tgaacgtatgtaacatacatttttttcaaccttggtgattcttgactccatttcattaaagcgcatatccacttgtagttccaaagtgtcaaacctttcaccaacaaaggtttgaagaccatcaaacctatccaaaatctttgaaagaagagatgaatcttctccgtcatgtccttctacaccaacatgtctagcacccttcttcacccaagagccatcatgctctttttgataaccaaaggaggctatgactgaagcgcctataaggaaggatctcttgattggaacatag

SEQ ID NO: 97174 - DNA, 332 bp, Glycine max
agcttatagcgttttatatggttcaatactggacgaaagtggacgccttattcgtttcttgcctcttcaacaggcagacatgctaatgcatacacatgttgatgaaagctatacatctgctaactataggaaagctgtggctaaaaaaagtttcaagtctcttataaattctaatggggcaaaacattcttcacggaactgaaaaccatcttcagaacatcctaatccaacctttcataatggtgttgggttagacaatgggaatggtctatctaggaagcatggaatagctatcggaggacaagagtctctatgatcacgaaagggtacct

SEQ ID NO: 97175 - DNA, 294 bp, Glycine max
tatatctgcttgttctttgttgatgaatcaataatgggagatgatggattatgacctattccacggagattaaaagagagtgtcacatatcattcagatctagctcattaaacatataacctggtcttgtcttaacagccttacaagattggagcagtggccaagcatccaccaatgtcatcatgctggttctttctataaagttgcatccgagaaagatcttagatgcattatcaaacttttttttcccttcttttgtctgaggaatgaatgtcattgaacttcatagtgccc

SEQ ID NO: 97176 - DNA, 327 bp, Glycine max
  unsure (1)..(327): unsure at all n locations
tatntatgcgacactcctcaatacttaagctgatgaccctgttttatttttttttagaacaacccacttaaacttaagttgtgactttccaaaaaatatttaaaaactagtcacttgaagaattgtgacttttggaaatgtatttttcaaaatcagacactggtaatcgattaccattaaggtgaaatcgagtacacatcaatctatgtcactcttaattttgaattttgaaaattaaaatgtttacaatactctggtaatcgattacaagtattgtgttatcgaatacacaagcttataatactataagactatataaacttaagt

SEQ ID NO: 97177 - DNA, 386 bp, Glycine max
agcttgcaataataatatagctttcattctggatgctacaatcaaaaaatggagcctttcaagtgcagctcaatcaagaaccgcatacaggcttatctaatcaacaaccaatatgtatacaccaagatcccactgaccttgcaaaaattacaataagaacatataaaatctaactatatctgccttatcataataacaaaatgcctatagatgtggagctacaatggccctgcatatgcatatacaaatgatataaggctataaaaaaatcactaaaacatgcgacagtgcattctcaccatttgataaggatcgacgagataaatgattctaaaaaccacatctagtctgttacagaaatataaccgttagtctattagagcatt

SEQ ID NO: 97178 - DNA, 301 bp, Glycine max
tattatcaatatcataagtttctattttccgtaaaccaccaccttaagggtcatggatctatctatttaagtgagaggaaaaaatcctgtctaaggatgtataattaaagattaactagttcatagaagattgcccgttcagcctgatcatgtaatttggggcaaaacatggtctacctacatctaccaattacttgcttattatcactactctgcgatggattgagtatgacaacgaccgattccatattatcatttaagagcggaagagaatcaatatccattcaatactgagaaattc

SEQ ID NO: 97179 - DNA, 379 bp, Glycine max
tgcttcttctatgacagactcttgttatctttgggacgagagtgtcaccctgaatgtgttgatgaactactaaacggatctgtgaggaatcttgacatcggtactacagttaaagattgcctactgccacacaaggaaggagagcatgaacttaactcacctgtcttcaagagaagagatgcccaagccggattctcaatttctagaggaaaacacctgccatctacgaagcaggtgaaaaaagcaatttcgaaagccttaagaaacttgaacggattcaataaagaacttctattagctttctctaacaaacacaaccaaacattgacatgcttagcttcttaaaagaattgaactaggaaccgtgagctcattaaaa

SEQ ID NO: 97180 - DNA, 298 bp, Glycine max
tgtagaacgattatcgaataatgtccttgaagcccacctcaccgcggaagccataatgcttgaacccccgctctcgctaaacttggaaatactaaaaccctacactacaaaactcactaactaactcttcttttgctattgggccggcccaacccaagtaatgtggcccaatattagcgaacctatctaagatctatcttattgcgaagatggttctaaacgctgagtcttcgactgagcagtgcggccaagcaatggcggaagatacagtactgggatacctagataagaacgatga

SEQ ID NO: 97181 - DNA, 423 bp, Glycine max
ttaagtcacctgcagcatgcaagcttaccgccaaaatactttatataattcatttcataggtcacaaaaccaacatcaatcgttgtctattaagatgcagacatactattctaacgtcttatagatacacaatattaggctcattgtctttttctctcaggatttacaagatattgtgaaagctttttacagacttaaaaattgtgaattcagagacttagaagatgaaaaatgaatttgacaaagaaaaaatactaataatttcatcgcaacaaaattcacaacataggttgtttgacggaattgtcaaacaagtatggaaaggtagaacttgcaaaagtctttgacactcatcgtttctaaacttttatgttatactttccaaagtcattcattatgtttccctcaaacaattgcaaacaa

SEQ ID NO: 97182 - DNA, 295 bp, Glycine max
tattaaggtctcattatgttttaaatattcgtagaaggaaaaccataatttgaaacaacttagtttaactcaaccaaagatcttagaaaagtagtactgacattgacagacttgatccctctccagcgctgttgtggatattttctttttggtaaatcatttttagttttatacatacctttaaaaaaacaacacacgatacaagtatgaaaaatctagttatgtaaataggcatgtaactgaaaaggaaaaagtaaatcagatttcaacatatttttaagtgaatttcaaaaca

SEQ ID NO: 97183 - DNA, 341 bp, Glycine max
agcttgaacaagacaaaactcgtttttgttgtggcaacaccaaccatctatacgtccttcttcagttcgctatcactgatctccaagaagcaaaaaactccattgatgatgaacatctaagacctacaagctccacatggaactacaacacgatgagcctattgatcacctctacgcgactgttctcttctcacgatgtgactgctgactctgaagtgctgcatgcaagacttgatgaatgagcgaagcattcatcttcacctaccatcgactgaaaatattcatatcaccatacgaatttttgatctccattcctgcaagagcacgggatatttcctttt

SEQ ID NO: 97184 - DNA, 301 bp, Glycine max
tggaaaagtgttgctattatctttctcgctaagccaatctgctagcttaacgagcgtttgctaagcacaacacttatgggctgatagcgaggaacactctggaagaagatgagctgtacaggcttgctaagcgtaccgcttcatctcactaagcgcactgttttagttcatccactaagagagaaaggcacgcccttagccagaattcactaatgtgcgctaagcggaccataattgcgcttaacgcacaagcacaaacaagggcactctatttaagcctacaatctgattttataaaggg

SEQ ID NO: 97185 - DNA, 406 bp, Glycine max
agcttattacaatgtctttgcattattatctacttcctcatgcatgcagagagtgtcacaatcttgcttcatttttccctacttgtgacctccaccaccaaggaatgttacgagaaataatgaactcccttccatcgaaaattctgaaaatcctcctgcgtttgtttcctacttgccaccaccaccaccaatgatgtttatacaaaataatcaaatccctcccactgaatattctcgaatgtgcaagcaagcttcatgatgatgaatcaaggggctttgatgatgacaaaaatcccaaaagaatgattgtgagagtaagggcacacttgcgagatcgagagttatttcaggattcgttttaagaaatcaagaagaatcaagattcatgagaagatgattctagatt

SEQ ID NO: 97186 - DNA, 298 bp, Glycine max
ttgtgtcatctattacacttattttgttatcgaccaccagtgactgtctctgaataaatcacatgatttaactcttcgaaaggtttatgactttttcaaattggtttccaaatttttttaaaacttataactcttctaaatggtcttcttgaccagacatgaacagtatctaatagcccggtttcgcttcgcattttcaattaattcattctttaaatcttgaatacttttccaatcaatctcttacaatcctttactagccttgaatttctatgaacttcttcttcttctttgtacc

SEQ ID NO: 97187 - DNA, 259 bp, Glycine max
agcttgttgaagagcaaattgattctttgttagcacatggatccactcaaaccgaatacttgatgacgagcaaaatacatgaccaatcatctcattccttaacagcggatcatcgagattcatatgcggaccatctaaagacaacactacctccactgcggatgacccactaaagccctatgcaccctaaaaactccactacacccgcagacaatggaacacagatgcgatggaaaagaacacgggaatacgaaaggca

SEQ ID NO: 97188 - DNA, 305 bp, Glycine max
tctggtgaactacgaaactaagcttgttatccaggcctttttttggccaagctcctgcttacatgggttattccctagaggatggcgcctgaattaacctattctgcttcgtcttccaatacatcgccatggtgtacattgaccaatgaacgacctaaagcaaactcatatacccacccaccttataaaccctacaagcaggcttgcatgaaatgtaagacgaaacacattagcttctagaacgaactgattgaacccccaagaattataagctttacctaacttcccattgaagaaactcacta

SEQ ID NO: 97189 - DNA, 403 bp, Glycine max
agcttgagatgaggaagtgttgttggtttaaacttcctgcttttattgttgaccacagagtggtacctggagatatgtcgcgggggtcatgagaccttggggacgtcaggtggggtgctattgcccaaaaccaagcttgaccaatcccgacccaacccgggcatagtcggtcagtgagaacctgtgatgtacctaagcaggcgagctcctggcagtccacagataaaaggaaaacaagaccacaaagcatggaggcttgtggtggctggccagctgtgaatattgtgtaatatgtgagatatggcctctggtaatctattactaagggtgggtaatcgaatacaaggcttataaatgatgacaggaggctaatatggactctggtaatcgattaccacggggc

SEQ ID NO: 97190 - DNA, 272 bp, Glycine max
ctctctaccctcttctacactttatactcaccgcctgcgaaactcctatgggttgtaaaaatcaccacttcgaagtgacctttatcagtcagcttcaatagatcctatcagtgtcatactaaccgttactcaacgcaatgcttcctatttaagcggttaattcagattcacaagtagctttcaagttaggtgcttacttaaacccttcattatattttcagcatttaccttactcctccattggtgtacactccattgtttctctactgtct

SEQ ID NO: 97191 - DNA, 399 bp, Glycine max
agcttctacaatgggcatttcttttctcttgcttcttgcaaatatacagaaatcttgctccatgtctctctttatgtttcctagaaggtacctaagtgatagtggcactctcttttcccgttcagctaggaaatacttctctccttttgtctctcgcacactcactattgccttttctcttctccgtttgactctcttgtcatttttctgtgcatatttctatattcttcacctcaataatttcttgctcactcacttttattgttgcctcacttttattttcatcatctaccctcccctattcttgttattcactcaaagactttaccacacggtcacgtgtatggtcagacactatcttgttgattctctatacctatttccactcttactctcatt

SEQ ID NO: 97192 - DNA, 290 bp, Glycine max
tgatggatcttacctttatttcaaacaaacaatcgacatgctgtaccaccacattgccattccatccttgcttactcacatccaacattgtgatttgtggccctcaatcacctatttttactgactcgtccactatattcatcgacatctcttgctctggagctctgtctttgaacattgctatacacatcgtaacactgtacttgaaactagttcatttaatatttcggtattgttttttaatggaataaattggtatacacctaatatacgttatactaaacacattt

SEQ ID NO: 97193 - DNA, 398 bp, Glycine max
agcttcttttggaccttgttcattctttaactcctctttcagaaccatgctatgtgctcgcgactggtccctttctttccttcgcaacttgagttcattattgctaccccataaagctccgcaaaatttgttccgaccatactctttcttgcgagccctcttggtctctcgttcaatggctcttgcggatattgcattctcttcccgtaacccggcacactcctttcaaacgtgtgtagcagccaacttgaacttctccttggcgagttttgcctttcctaactcgctttagagagcttggacttcctcgtcctcttccggtgcttcaaaattctctgtgctgacgacttttaacttggcgagccaatctatacctcgtatgcgaactttcagccatt

SEQ ID NO: 97194 - DNA, 296 bp, Glycine max
ttagatgcctttaatttttttaatgctgaagttgagaaacaatgtggaaaacaaattaaaatcgtgagattagatagaggtggggagtactatggtagatacacaaaggatggacaagcaccaggttcatttgcgaaatttcttcaagaacatgggattgttgcccaatatactatgcctggttctccagatcagaatggtgtggcagaacgaagaaatcgaaccttattaaacatggtgagaaacatgaggagtaatgtaaagcttcctcaatttttgtggattgatgctcttaa

SEQ ID NO: 97195 - DNA, 339 bp, Glycine max
agctatctgatgatgattattactttacttgacaagttgtgtggctgacctcgcacatgccaagaagctctaaacattcctttgactgatgagccaacgcgttctggatctatagccaatgaatatttacttcaagttaagagagaagcatcgagaagattattgattcattagacaataaatctccaatggagattgtcagggaatcctttacttttaccaggcgtagtcaccttctctttctgattaaaaatgcctctgaaaatgtggaaagtaccagatatccactttgtgtactggctcactattttgtgaaaccatatctataggtcaggccca

SEQ ID NO: 97196 - DNA, 223 bp, Glycine max
tgcataagcgtgtattcttttcatggggctccaggctagctatcatggacaaggtgcattaatagctgggtatacccacagtgtacgcccatattgtcacagatcattttgccatggtttttgcggcaagttaggctttagtactggtgatcgactctttcttccaacatgcgacggatagcatcgatcggttcgctcttaccatgcacggtgtttgcgaact

SEQ ID NO: 97197 - DNA, 357 bp, Glycine max
  unsure (1)..(357): unsure at all n locations
agcttcgngcggtttatttcgtatgacacccctcactcggcgacagcccggagaatacctcaccttaggacttcatatggcacaacaaaccactgagagggccaagttgattcatgataagctgaggactgatcatattaagcaagacagctatcatgactagaagatgaataacctcgactgagaagctggagatcatgtattcttgatacacactctgtagaacaatgtcgttatagcatggacttcatagaaagaacacctaattatatcggttctttacaaattataatagagacggtcctgtgcataaggattgcttatgcaagacttttctaatcttataatgttttgtgt

SEQ ID NO: 97198 - DNA, 296 bp, Glycine max
tcgcgcatatgttcttcggctgcgaaaagatccacgtgggcctgaacaaaggctaatttgctcatcctactacgacgactgataaaagtgcggcctataaataaggggaggatgaggtataaaccaatgctgagactgccattacgactcggtcaagtttcccaccaaacccaacaatgtcattactcagtcaataacaaacctcctccttacccaccacccagttatccacaaaggccatccctaaatctaccacaaagtctgtctaccgcacttccaatgacgaacaccacctt

SEQ ID NO: 97199 - DNA, 374 bp, Glycine max
agcttgtaatcgtttattcatattctgtaatcgattaccagagaagatttaaaaaataaaattctcaatagtcacatgtttttacttggttcttgaatggccatcaaaggcttatatatatgtgacttgagacacgaatttgctaagagtttttcaaaacaaaaaggtcttatcctcttaaaaagcaaaatcattttatcctcttacaaattccttggccaaaacacttgtgattcaataaggaattatttgagtgctcaaattgttcaatctatctctttcaagggagatcacttcctttcttcttctttattctgaaaaaggattaagagaccgagggtctctttgtgtaaagaaatatgaacacaaaggaa

SEQ ID NO: 97200 - DNA, 295 bp, Glycine max
tgcctcaaagatgtccaggtaggacaaggcagccgaaggaactagttccgctccggagtatgacagtcaccgctttaggagcgctgtacaccagcagcgcttcgaggccatcaagggatggtcgtttctccgggagcgacgcgtccagctaaagacgttaaagaagcgctactaggaggcaacctagtaccttttgaatctatgcttgttatttgatcactttttatagtaggacgcacctagttgctcatgatcctggggatttaaataaaacaagcgcaagctcggaaggtag

SEQ ID NO: 97201 - DNA, 68 bp, Glycine max
agcgaattaaaactcagctcttgctgggccaattgtcaccttggaggacgggggcgttacctaatgag

SEQ ID NO: 97202 - DNA, 356 bp, Glycine max
agcttgcaatcgaatgtacccattttctttcacatgctcagaacaatcttcttggctgactcttcaccgtttttgggcttggcctccactcatgccatatttctgccgccatccactgttcatatgattcaccaatgctgcatatggagggttgtgacgatcattcttaaccttttagacacactcttggatgcagtacggactgctgccatatatacatgcatgtgtgtcatcagccatcagcccttatttctcttaaaggctatccatccatgttgcctgggctgtactcacttgacgaatactttctaaaacttgataaagaaatgatcttgccaagagcgtatgcttcttag

SEQ ID NO: 97203 - DNA, 265 bp, Glycine max
tgccaggagcgtaaccaattcatgtggaccggctgccgcagacactgactacttggcctctattatccctttgacattccccacgctaccagccatagtctccacgctggattagacgatgaaggacatttcgtaaacatgggagactataactgtgaacgctgctctgatgtaagcactataacgctttgcaaaaagcgcgaaggttataccgagatccttgcattcaggagccggccctgcctcgccccgcagggattaacgg

SEQ ID NO: 97204 - DNA, 393 bp, Glycine max
agcttgttaataaccggaaggtttttttctttcatgagggctgtggctgttgacacttgacacgcttatctttgatggagagagaacttcaactcacctgtatggttaatgctgtctccatcacttattttatgcacagtgtttaacagagaatagaataaatgtggagagaatcaggcatctacttttgacattattataatttttgtaattatattaaaactagttcaaaatgaaatggtgtgcaaaccattatcaataagctagcggtcatatacttactcttatgggggaaatattccctagactttcttatataacacacaaaaacaatggggtctgtgcccacccttttccttaggggctgcttgtataaaaacaactttgtacata

SEQ ID NO: 97205 - DNA, 301 bp, Glycine max
tgataagagcaggaggctatttttgattcatcacgaacgtactatggaggatccatagatgaataagcctgtttcatgatcgatatgatttaggcatttgagcaaaatagcatatgttttttggattcctccctaataagatacgctaggatcaaaatttatattggggagaatcaagggatcgtaggtctagaatgcaaaaagcctctgctcataaaaggttaatgatccctgttgaagaacataattctaatggtttcctgggttgactcttagaataaagtgctgggacatactatta

SEQ ID NO: 97206 - DNA, 353 bp, Glycine max
agcttggcgcgtataaatattctagacatcacaataagggtttacataaagcgtcgatggccactaattctatgtacaagttcctactagagcgcttatctatgatttactggacgcatgagcgtagatgccaccgaccttactctctgttcaccttaggcttaggactatgctacttgctgacccggcatgtgtaggatgctatactcatacccttctgtcgatgaacagaggtgaactctataggtggtggcggtgcgtttattaatcactacctaccactactacattgctgttgcgcacaacctgcgcgagtctggagacgctgcgctttctgatgaaaactcaaatac

SEQ ID NO: 97207 - DNA, 259 bp, Glycine max
tttagccgaaagcctgacttattttaaagcctgaccgtagggcgatactgttcatccttcccctcggaagcgaactaggacagtgtgaaaatttccccgcttttgaataaatgagaggaaaggattttcccttatcagtattggcatgagcattggtatatagatatgtaaagaacttaataaagctactggcctgaggaaccaaaaaatatgagcgtagaggtctttataccatactgtttctgaatactacacaatt

SEQ ID NO: 97208 - DNA, 95 bp, Glycine max
taaagggtttccacccgataggttatcgacaaggtgactaaatatgtctgtggcggcacaggccgagataaactcagctacggagtaaccaatct

SEQ ID NO: 97209 - DNA, 293 bp, Glycine max
ttcatcaagacagctgatttgttccttgcgcttcaacaccaatactatgctgatgatggcatgtggatggagactcaggctcagcagcatggctattccttccacgaatagtcctctgggagctctgataagcgattcccagccatgcacatgaacaatcttgctgcttttgctgtggactctgacctttgaacgtcaaaacagtatgccatggtaggagccatgcacatgaacaagctaagtgcttttgggacggacctccatatcttgatgtcacaaacaccatgtcaagt

SEQ ID NO: 97210 - DNA, 61 bp, Glycine max
aaaaagagacgaagaagacacacggaaaagcaataagaaaaggcggaaaaggaaaaaagaa

SEQ ID NO: 97211 - DNA, 282 bp, Glycine max
ctaggagcaagaccccctttttttttttgtcagccgcagataccgaattcttgggccttgccagccttctgacattcatgtgtcgccatgccatgaaccccacgccggagttggcggtgatggcgccctcgtaaccttgggagaatgtaactgtgaacgttgctctgatggaagcacgacagcgctatgcaaagagcgctgaaggttctcaacggatcgtgcattcacgataccggatctgctcggacccgacagggattacagtgcgtcaaaatgtggcag

SEQ ID NO: 97212 - DNA, 365 bp, Glycine max
cggatctctaagcaccgcagcagcaacttgggacaacgaattgttaccggaccaggaacacagagatgaccccaaacacgaatcccaccaaagacgaagcccacactaagaagaaaagaaagcgaggaaatgacccctcctcgaaggcgtaaccctaggagagaagaacatgaccaccagaagcatagcctggataccaaaccggaacagagaaaccccgccggtcgatgacagtgagccaaaaaccagccgggggggggtgacgaccgaaagactggccggcacactgggaccaagcaaaaaactcaagatccgggggaacaagaaacaaccatagtcacctgcccacacggcaccacagccaa

SEQ ID NO: 97213 - DNA, 232 bp, Glycine max
tgagtatgcaatagattttttaggatcaggattgggtacttgaaaaagggctgttgcacatgatcgtaatggatgatgggcttatttgcgaatacctgtgccaatcgtctgacagaattctctatagtgcgctccaaacgctaaccctctgactgtctgtgggattagatatgcttgaaaggattctgactgtttgttaaaagattcgacgggagacatgtgtatgtttatg

SEQ ID NO: 97214 - DNA, 332 bp, Glycine max
agctttataaactggaagcttgcgtctttctctccacaagaatgcacccgtgaagaggacgccaaaccccgctctcacgaaaatcttcatggaacgacggctcgcaatgtgaaacctcacaagaaaaatctaaataggctccgaaggcccaaacagcactaaaagaccattccgcacgccattcctgaccattctctaaacggtgctttcaatttcacgtgcgacaggctggaaatcaaccggattgtgcgcaaaatgcaccaaatgcagctgataatgcggtactccacccacaccaacacagggtcaaactacagcgactgtgaaagata

SEQ ID NO: 97215 - DNA, 287 bp, Glycine max
tgtacattcgcatactggtcttaggataatcgactcgggaacctcacattcttgcgttgcacgtgctcaaccagaagggccactggtccatttccatgcagtttcatactaaataccagtgtcttcgaagctacaaccatcaaagctatggtacaacacgcataatgatgcccctgataaagaagaccttataattacgcggagacgtggtcattgaatttgcgaacatctataacagattgtactatgcgtaagacaccaagagcggagctacatgacaattggac

SEQ ID NO: 97216 - DNA, 293 bp, Glycine max
tttaaatctattttggcattttcaaacataaagatccctataatacatggtgcgctgaatgtacctgtatctttacattattcatggattaggggaaccgatttaccaagcaatgcggagaccttactacccgtgctaatactttcacttgctttaagcttccgcttattagatgcacaattacttcaagaatttaacttatcttggaatttgctttattgcattccaactgaggactgttcacctactactttctaacagtttcaaaaaacttcatttctgactattgcatt

SEQ ID NO: 97217 - DNA, 173 bp, Glycine max
  unsure (1)..(173): unsure at all n locations
agcatgacaagaattttcctactaaacaccnaaaaggatccgccaatgctaaatacaaaatcacggcggacacaccgagggacatgcaacaaagaaaggctcgcgaaacacaaaccagacatccactgcactcccttgaggatactccaattatatcgcggcccccgaaatct

SEQ ID NO: 97218 - DNA, 295 bp, Glycine max
tgccatgcactttttttttttgatgaccacatggcccggatgctatgtcttatatactccccccacaatgaggtctgatgaactccttctcatttcctaaactatactttttcttttatattctccatcaagggaattacttgtaaacaatacatcagatgtccttatgagacttgttcattaaatagggaattataataacttttttgaacttgacaggcacttgtgtatgtgcactgtgatgggtaaatgggggtgaagccttacaaaagggaattgaatcctcaggggagcc

SEQ ID NO: 97219 - DNA, 390 bp, Glycine max
agcttctggagaaagcctcttaatgaatcttctagagaaagctacatgaagcttcctcgataaaaatgctgcccagccttcattaaccgttggatcttctccaaatttggtcttcaacttcacaagacaccatgccatgatctgaccgttgggatctttaagaagatgtctggagtgtactagaagcctcttaatgaagcttctggagggagcctcttaatgaagcttctagagaaaactacatgaagctgcctcggcacaaacgctttccagccttttttaaccgttggatcttttctaaatatggttagcaacttctcaagaaattttccatgatctcaccgctgggatctctgagaagatatctggagtgtgctaaaagctttcgtt

SEQ ID NO: 97220 - DNA, 299 bp, Glycine max
taacaaacttagaaatcatgtgatcattaattccgaaatatagggggagtaaacgaatgcacattttatctatatacaattgtttgttgcttgcttgaatcttgatttcaggtattgtattgtcatcatcaaaaagggggagattgtagatgcaattggctttgatgttttgatgatgatcatgatgatgtgttgcaattgatgcaaatgggtttttcaagattaaaattcaagacaatacttcaagattacaagtcacaacatcaagatgatcactagaatattacgaagggaattcc

SEQ ID NO: 97221 - DNA, 369 bp, Glycine max
  unsure (1)..(369): unsure at all n locations
agcttnggctacacatataagtattttttgtggtgcccgcccgtgccaactcacgacgatgagctgccactatctccacatactctctggcgacttctgcattcagcgatgaaaccatgtgggatagtagtccaaacgaattgacactacctggtctatcttttagaacacctgaaccagacagaacacccgatgctgcctgggatgcaatcccacatgtggaagcacgcccttcactggaaccccaataccctaatctcttgggagtgactgtatgaaaacctctcgcacttgagcctagagttccattttccctctcacgttgataaacatttgcacaaccatcaatactgagcctttcttatagaa

SEQ ID NO: 97222 - DNA, 296 bp, Glycine max
ttacttgtggagacaatcatttattcttctggtccacattgtctgcgtgtggtatggatatatctattatttccacctctaatcatcaatttaagtggtcccccccaacccctgaaaaaaattttgaaaagattaaaattatatcccctttggattaatttcattttattagagtatttgatgtctatgaccctttaatctaccggcttgtgattagatgcactacagtaccatcatgaatacgactacactgtattcggtggattatgggggatatactattctatactagataa

SEQ ID NO: 97223 - DNA, 256 bp, Glycine max
agcttgatacatgcgacgccttgttgtcattgccgaaagcctacttccctaaccacgctaactaatctgactgctactgttttcccctccggaggaacgactactacaaaggcgtccgacttgccgaggaaagaccctaccctgcgagtgttgaaacgtgacgccaatgcacaagagatagtgcagaatcgacacctctatgcatatgaagctcatatcttacatgtgattacgcatcatggttgaatgattgact

SEQ ID NO: 97224 - DNA, 300 bp, Glycine max
tgaatggaagagtgcaaatttatttttatacgggaagagagaggggggagcaccaatttgactggagatcacatggagagaaaacgaactctcggatgtgtctgcacagaactctcatctttcccatttacctacagtgatacacatgcttctattactagcctatgcagcttccttgaaaaacttgcttgagaagcttcttgaataaccttccttgagaagcatatatcctagctatgcacatgccatcaatgctaatctcacctacttgagaagcttacttgataaaatcccttgaaa

SEQ ID NO: 97225 - DNA, 316 bp, Glycine max
agcttcgagcgtgctccgaatattctttctgtatgtgctcatcaactacggggttaatgtgcacgtctgatttcactggtttgatgatgtcatactaaaccccttcaaggccgctaacctgatcttcctcttgcttctacatttatgctcctagagcttaacggactattcactcagtatgctgacaactgaataccacacctttgggtacagcacattgctttcagtaccagcaacgctctctacaccaataatcaaaagtggtcctcgtgctccctaataaaccctcgacatacaccgggagagcttagatttg

SEQ ID NO: 97226 - DNA, 304 bp, Glycine max
tttgatgcctcaaccaatctttttgttaaacgaaagatatatgggatatctggtttcatatggcggctgttaatggatcgagtcaaactattatagttggacactagccaaatgatctatacacttataagttaaatttcaacttatgcctaccttatactgttaaaacatatactgatcacttttcaagcctgattatcatactaattttctcagacatattcgcaataagctacttagaactactactaggaaaattaatggcggcattaattccatgtaccaaagaatctaaattaactta

SEQ ID NO: 97227 - DNA, 405 bp, Glycine max
  unsure (1)..(405): unsure at all n locations
agcttgtaagattatggggtacctatttcatgtggtactaaggggcggtcgggcgaaggtgcacaacaagctttccacatccataatgcgcgcataaacccaccattccctggtgcccacctccaactgagctcacgtactcccacgctgcccatatcctagtttctatgaacaccgggtccgcaataatcctgttaagcttccacaacatccaaccaaaacaacattcgaacagcacaagctatcacagccaagctaaaacagagcaaaagcagaaaactctgctcaaacaccaaccaaaatcacagctcttctcacttaaagaccacagtaacaattccttcgaggcaattcgttaaccgttggatggactccaacatnatactggaagtctatagtgcataa

SEQ ID NO: 97228 - DNA, 290 bp, Glycine max
tgcataagtgaaatcaagtgcatttatctccctaagaatcctctcatgtggtggaggttgagccatgttctcagaatgaaaattaaaaggtgaatgcttaaaatcagaatattcagaatcaccagcaacatagtactcaaaatgaacaggatgctcaaatgctcacaatgcacagaatgaccaggatgcacactatgcctaactaaactattaaaagttctatctatttcaagatcaaagggttggaaaacacctggattgtgcctaatcatgcactatatgtagcaaat

SEQ ID NO: 97229 - DNA, 316 bp, Glycine max
agcttgtctgacaactcttctttttagctaggttgctacctacagaagcaacagtcttatagaggaatcttctggagggcccaagtgggtctgagtgccatttacaccccctcgttttaactatatgcccccccttttctattgtttgggaattatttttccgtaacgttacaaagcaatacgaattgcttaacaatacttatgttccttccagatggttaccaaccgcttacagacatgtatctactcttttttacctatcggagaagctattggaaactcacgtattgcgctaaaagacctcttttgtattttc

SEQ ID NO: 97230 - DNA, 296 bp, Glycine max
tcgcatgacactagttttttttctgaccgctgggattgatgagaagatcttcggtgtgtgcgctatgtttaacgctcctataccagctatcactcgagcttattaagcgctctgctgtgtgtgacttacgagagacaacatggcttattccttcattattgctgagccctttttaatgacccaagctctttatacttgacccaaagccaccattatccaccacaaaccgccggtgttctacgctgccacctcacagctaaaagaaccctttactgaagcagaatcttgcaacttgg

SEQ ID NO: 97231 - DNA, 365 bp, Glycine max
agcttgttaaagaactgatgatttttctagaacaagcttggtcgcacaatcctcacgtgtttgatatccactttacatggtttaaagttaatgagaccttcaacgctataacgcaacggggcagacacatacgcgcaatgaacttgaatggccattattgtcaatgcggaacggattctgcgcttcactatacaagttcacgcgttattgcagtttgtggttacatgagcatgaactactaccagatatattgatgttgtttacgcaaatgatcacatgtttaaagcatacatccgcacagtggtggtctatagggaatgaagcgggaattactccttcttatgatgctgggaccttattcctga

SEQ ID NO: 97232 - DNA, 296 bp, Glycine max
tgtccaagccttgcatggtttgattcaagctccaagaactcgatgtgtaagactaagctcattcttaggtcagaatggcttctctagagaagaagtggacaccacactattgaataccagataaaccaaaagatctattgattgttcatatctatatagatggcataatctttagagcaaactcaaaaaagatgtttagtgagaatcttctaagctgatgaaaggagaacttgaaattattatgatgggtgagctaaatatcttcctagggcttcaaatcattccaaaagattatg

SEQ ID NO: 97233 - DNA, 316 bp, Glycine max
ccttaagtcaccgcggctgcagcttatgaattgcctattttttttaacagcctggacaatcctagagagtctatcatattcgctgcatgatacttcacctgctttctgtatccaagatttggcttggatatatcaaacttgtgaggctcatttgaaacctatcggagatagcctatcatcactgtatgatttgccctaatatactcctgaacgtgctctattccataagtatatattagagatgtgaatcagaggaaatccgcttggccagtctgtatgactatgacaacctattacattttcaacaagaatttca

SEQ ID NO: 97234 - DNA, 185 bp, Glycine max
tatcttccaaaatattcaaacatttcaacaacaaaggtttgaataccatctccactatccaaatcctttaaaacatgagattaatatttagtgacttgaacttcaacacctacatgtccatcacccttctctcgccaacagccatcttgcacttttggttaccaaaggatgctcttactgaagcc

SEQ ID NO: 97235 - DNA, 325 bp, Glycine max
agcttactagcacatatttccttatgggaaagaccgataccgggtgcgtggttccattgcgagatgacctccgtctatcgctatatattgtgaaccggtattataatggtaataaacgacaacgtcaggggcataacactgttaaagaattactctatacaggagctgataggagtggttcacgtacgcgcatgagatagtttacccgacctttgacgaaaggattagctaatgagaaggttcattactcttttaaaagaatgggactattgcccttattgcgatgattatatatgtagggaaccctacgtatatgactggagat

SEQ ID NO: 97236 - DNA, 58 bp, Glycine max
atgctgcactactaatctatatgcatgggtaccttccaagtaagcctagtggtcacaa

SEQ ID NO: 97237 - DNA, 318 bp, Glycine max
agcttgagatggagaggggattatcggtgactctctcggctttaacagttgagcactaaatggcaccatgagatatcttgcggcgggcaagatacctcttgagagcctgtgatgtcgtgcccacgtcctagagcagagttgcccaatccctacccctacctgtcatatgttgtcatagacaacctgtgatgcacctatacaggcgagcgacaaggcttcatcaaacttgatgtacacttacttgttcccaacgatgcttgagaacgttggacagctcttatacaccaatgatttgctagagacggttttgagctatgc

SEQ ID NO: 97238 - DNA, 298 bp, Glycine max
tgaaaagacgaagagccgtttggtgaaatttcctgcttctattggagaccacagataggcccctgcacatatgttgggggggacatgacacctccagacctctgctaagtgctatcgccctataacgagattgacctatacctacccagcccggacatattccgtcatcgttaacctgtgatgggcctcaacgggcgaactcctgacacacagcagattaaatgaacacaagaccactaagcatggaagcttgggctggatgaccatctgtgaaatacgtgttatacgtggatggaga

SEQ ID NO: 97239 - DNA, 402 bp, Glycine max
agcttctcaaggaagctacctattctattaatagaagcatgtgtcacacttgtggtaactttgatgaatgagagtcttgtgagacacaactcagagttcaactgctctccctttttcttccttcaatttcgtgctcccccctctatatttctctccctctttcttttcctccattgaagcatcctctccaagcttcttatccaaagctcatctgggcggtgaagcttcttcttccatggcttatcccctagaggatggcgccgactattacctcttctcctttgtcttccgctgcatctccatggtgaaaaatcaccattaaaggacctcattgaagctcatagatccaacctccataaaagcttcacatgccagctttcatcacaagtcgacgaatttgac

SEQ ID NO: 97240 - DNA, 301 bp, Glycine max
ttataagtgcggggctgggtgactaaggtcaagtgttcgcgatatgtgaagatgatgtcccaagtactttggatttggtccgaccatgccctcctgatttccagctgggaaattggcgagtggaggaacgccccggcatttacgcaacaagcataatgtaaacctttacggttttaaaagctctataattgggcctaggctttatagttttctttttaaggctttgtgtcttttgttttgaattcataatacaaggatctttcttcatctgttcctaggctctacccattctcattcattt

SEQ ID NO: 97241 - DNA, 219 bp, Glycine max
aactcaagccgggacgaagaaagtgagcttttttttttacacctggcgaccggaacctcggtctcaaaggcaagatttgccaattgggatacacagaattggattacgatgatcgagtgcgggtaccaaaagccaggctttgctcattccaacctcctaaaggggaccacgggccgtaagcctcaatgaacaaatccgtgcctaaaaaaccatgaacct

SEQ ID NO: 97242 - DNA, 222 bp, Glycine max
agcttactcttatggcaggccttctgttttaagcctccgagccaccgcggaagagttactcacggcccatgccttctaggggcaactcttactttatgactaatatcccgggcaacacgatcttgatggataatccacatttggcattatgctccacctacaataatcgttctcccttgaactaccacacctggacgtaatccttcatatgcgcggattatt

SEQ ID NO: 97243 - DNA, 296 bp, Glycine max
tcacaatcctagaaaaactctgatttggagggaacaaaaccgctgagacaatcgtggaaaaggtctactccagcctgtccaccctaaaactacctaatacgaaagaacaaagctcaacttctgctctctatcatgactctaattgaacctacaccaactttcttgatttaaacgctcacggacacttcaagttctaaaagccctcccagctagccctctgtcgcaacctacccttcagcgggagggcctacacgaagctcacctatctttgaaccgctggatgataacacaaagag

SEQ ID NO: 97244 - DNA, 392 bp, Glycine max
agcattgagaagaaattcctattatgccaaaggcacgggaattagagacatcattcgggcgaagaactgcaccctatagtcttttgttgaataccccctgcatttactatttggtccaattctcctttatacaaatatgttcgagggaaatccaattcgccggaaagcgcaccgggccgccgagaatttaaaataaaaacggagtgatctgagtatcgaactcaaggaacttgctcatgatatagagctgtattcaaacataaggcattggaggaataacattgatcatagacggtgaacacaaataaactatttctatgcgaaaaacattagatgcaactatgtacaagctgacaaaaatatgtaataagcggtgggtctttctaataaac

SEQ ID NO: 97245 - DNA, 330 bp, Glycine max
agctatagaagggacagtttctttgcccttgactgagacgaaatcagcatggccaatatttactgcggaaacaatggctctggcaagtttttaaagagactccggtcattggtcatatggtgtgcgcagccgctgtctatcaaccatgaaccactggatctattgctgtggcaaaacatgtcgcaacatagagacgctcatcttctcggtcctccacaaccaccttcgcttgctatgactaggacatgcagatgcggcctacatgccccatattgccacactttcagcacttgacatcgggcctacaccaacatatacgttcatgatgat

SEQ ID NO: 97246 - DNA, 289 bp, Glycine max
tttgtgaaaactccattttctactcaatgctgtgcaaaagttgttattacttatcttgattgactcttttcttgatgcttgaagcttgagttcggaatcttgatcttgattcttgaaacttaaatcttgaaactcgattcttgaatcttgaaatcaaatttcctctttattcttgaagtgtttttgattcaatcttgaactcattctcttgggatttttgccatcatatttgctatcatcaaaactccttgaatcaatcttgattgaacatcatgaagcttgcttctac

SEQ ID NO: 97247 - DNA, 312 bp, Glycine max
agcttgtacagaggctgaactttatgcatgtcagggttcggcctggttcaacgataaagagggatgtcctgaattatttgcatgactcatatagcgcataaatgatgatttggaaactttaagctaaactgggcatgcatgcaccaatgcaggcactctagtgtcaaatttctatggtcatgggatgctagagctcacgactcatattctctgtattcatcaacccaccgacagcaaaatgtgtgggggataaattcgtgcattcatacgagaccatttcgggcgtacggcgtattttcacagcgtataccc

SEQ ID NO: 97248 - DNA, 294 bp, Glycine max
tgccacgcagctcgcccatacgatcatggccgcttcctccagaaaccccatccttctgcaggaaggatctggaaagacccagagggccatattgctatatgcaccgcctttttactatttgcacccccttccatttatttggtggacctttgtccggagcgatactagactttactaatctcgtaacgatacttattttccttactcgaggctcccaatccttatgggttatgtatacactcttttttagctttgcaagaatttacagaaactctcggattgcgccaagacacc

SEQ ID NO: 97249 - DNA, 339 bp, Glycine max
agagtaactaatgaatagtgaagcgtgattagagaggggatttattttatggataagagaaaatgggagagagaagttatggaaaagggagagaattggaatgtttgtatgatcagaagagagggatataaagaaagtaatgagtgatgaaagaacaccgtggctggaatgaaggagaagaattaaacttgagagagtggatataagagaggaaaaagggaagttggaatgaagaaaattgagagaaattgagtgaacagataataaagataagaaaatagaaggatagagagaaataatgagtggggtaaagatacgggatgaaagaagaaaaggaaa

SEQ ID NO: 97250 - DNA, 344 bp, Glycine max
agcttactggagacttcttcatattatagtaagcccgcgcattacgtctagtttaactacctatatgcttctggttaaaaatcatacatgtattgcttcacgcaaaaaaggttcgtactcctaaactaccatacgatcattaatatttcttgtttctgtatatctagaagaacaattacattagactgttatatttttgtggaaagagaaattattaataggcctaaactaccatatgtttttctatcgaaaaataaataccgtatgttcctggattctaacgcatttctacgtgatcatacaaaattaggtgctattgagattttttttattgtacattaaaa

SEQ ID NO: 97251 - DNA, 295 bp, Glycine max
tgactagcctgcagtgctttcacctatcgaggataccgctctcaacatcagacaatactcgtccatacttgggggctccaaaaactcgcggccctcttacttgtccaggatactaccccaaacattacacaatttcccttgatactgaataacctatttcgcccataaaccaacttaaaactcgtggggcttatgtactatccggggtccacaagatacatgtgtcaagcttcgtggcactctgatgcacacatcaaccctctatgtcagccctggcataagtgtacaaacattt

SEQ ID NO: 97252 - DNA, 282 bp, Glycine max
agcttaagcaccgtgaatattgttttcgaaagacccgggatggaagaggaatttacattaaaagcatacggctagcttctactattataacatcatgactgaacaagaagtcacaaccaatcctgaaagaaccatacgatgggagaaatatatacatagattgaaaacttttctattctaaagtcagtggtaaaagaaaacgaccatactctctcaaagttacagatagcttgtcgctaacaaaaaaagaacaagtcgattatcctggaagtgacaaaactc

SEQ ID NO: 97253 - DNA, 390 bp, Glycine max
  unsure (1)..(390): unsure at all n locations
agcttagaagataaaaacttatttatcaagtgatcattaattctcaaacatagggggagtgaatgcaatatattatgcatatacattgcttgcttgtatcttgatttcaggacttaaattgtcatcatcaaaaagggggagattgtagaagcaaatgactttgatgtttcgatgatgatcatgatgatttgatgcaaatgcgcttttcaatnttaattcaagacaatgattcaagaatacaagacacaacatcaagatgattgctagtattctaggaagggaactcctaattgaaatagcaaaaggtttggccaagtaatttaagttaaaaagtctttttcaagagatttactctctggtaatcgattaccagaggatgttattgattac

SEQ ID NO: 97254 - DNA, 293 bp, Glycine max
tgaggcaaggtatgataaatgtagattcattgggtatcccaaagaaattatgggatattgtttacaccaaccttctggccataaagtgtttttggcaagatgagtaacctttctgaaaaggaaacttcttgtagaagctagtcatgtaaaaacaattaaatttgatgaagctcaagtttcaaatgaaataataaatcatgaacattggatgaacactgaaagacattcctttgatgttttgaagttacaaaaaggttatctcctccaatgattatggcttaagaaccagttgt

SEQ ID NO: 97255 - DNA, 290 bp, Glycine max
tctactaatgtgttttttttttctcccttcaccatgcttggttcaacgctaattttgcccattgggatttcctcccacaaagcttatttgaatgtccgcctgaatgtgcttgtaacctaagccatacttcccacgatttactagagcatattatacgctcattttgctaaaacctccatttcgaaaacctatccctgtctcaaaatcagttcccaacataacatgggccactattaccgaggccttccacacaccatgttgcccaaacagggaatgcaccaatgaactgc

SEQ ID NO: 97256 - DNA, 136 bp, Glycine max
agctttaacgcatgtacgttgaaaacaagaagctgatagagacgctcaaccatgtctccggtaactacactgtcttacagatgcatcttgtgacattaatgcaacagaaaccatgacaggggaatcagcaaaaccc

SEQ ID NO: 97257 - DNA, 315 bp, Glycine max
tcagctactttaggaatctttttatagaagcatctcacggaagggagccacacaatgaaagagggagtgagtgactaacataatagccttaaaacgaagacattcaactgaagcccctccccaaatgtaaccggactcaaaccaacatccgaagacaaaagttattgcccatagaaaaaggctcaaaaactaaaaaaaaattgacgagacgatagatttgtgagaaagaacttcacagtcccacttctctccctcttttattcccccaaaagcgcgcacccccccacactcctactttaccttcataaaagcaac

SEQ ID NO: 97258 - DNA, 261 bp, Glycine max
agcttggttcgaggtacttacccgttgaagatcgaagaacgatgaagaacgaatgaagaacgtcgaagaacggttgaaatctttgcgaaattcctcacggaaaacgttacggaaacgtttcggaagcgcctcggcttagattttcttcacagaaacaatttttccaagcaaattcgaaagagagagaagtgcctaaggggctgaaccccttccttcttgccttcctcccctatttatagcaaaataggggaggtggttgcc

SEQ ID NO: 97259 - DNA, 310 bp, Glycine max
tgtaggattatggggtacccatcacatgtggtactaggtggcggtcgggcgatggtgcacaacaagttttccacatccacaaatcacgtataaacccaccatcccttgttgcccacctccaactgagctcacgtactcccacgtagcccatatcctcgtttctctcatcaccgagtccccataaatcctcacaagcttccccaacatccaggtaattcaacatccaaatcatcacaaactaaaaaaccaagcaaaacagggcaaaggtagaaaactctgcccaaaactcaaaccaaaatcacagcttttt

SEQ ID NO: 97260 - DNA, 238 bp, Glycine max
  unsure (1)..(238): unsure at all n locations
agcnnggagtagtaggagcaaacaacaggagggggaagaagagcaagcacaacaccgaacgcgggagcaaggggaaccaggaccaggacggggaccaaacaccacgaaagagaaagaccagaggagcagcgcgacaagagacgagggaagaacacaaaccccaccagaaagaaagaaccngccagacaggagaaaccagacagaaagacgacaccacgaaaacaaaacaaaggcacag

SEQ ID NO: 97261 - DNA, 306 bp, Glycine max
tgaagcagtatcacgaagagtcttcttttttcgttgatgcttccacatcttttagactttcactaccattgagagtgccattaacccgacttcatttttgatttatgtgtagctgcagcggcaatagtcacaccactttgaaccgctgagttgtcgacttctatacaatttatattttcaaatccttgactagctagcttgacacattaaggttttatgacgtctaattggtgattcgatgtttataactatgtaaaaaacttacctagggagaactcgatattaacttaaagtatctaaaaagca

SEQ ID NO: 97262 - DNA, 256 bp, Glycine max
  unsure (1)..(256): unsure at all n locations
agcnnnnatgattgganangacncnncacaantgtagangaagnccaacgcccagaaacacgggnaancgannaccaanancngggaancgcacacaccannnngaaancaangggaacgnngcaanaaaagcnaaaaacggnncgaaancaaagngggccacgggnaancgannanaggaaacgggnaancgancaccagagggnaacaacncnggnaaccnagaaaannnngagaaaaacncnnnngaaaaaca

SEQ ID NO: 97263 - DNA, 305 bp, Glycine max
tgatttatgaattgattttatccttagtttcactttggttattagtcaattcgattaagaaagaaaatcccaaagaaaaaacgttcgattgattttttttattattttatttaaagatatttttattattattatattattattttccctctttttggttttaaatgtggttatggcgtgaaagattggtcggattttattctaacaaaaattaaaagatgttacaactcaaatgatcggtgtaaatttattttattttttattaggcgagaaaatgacttaaataaatgactaaagcatgtcaa

SEQ ID NO: 97264 - DNA, 258 bp, Glycine max
agctttattgtattgccatacagctattctctggtactgatggtaaatgttgggtttttaaagggataacaggaataaaggcgagcgtagcattagtgagaatgttaaaatgaatgtgtggccacacaaaaaaggaaatgataaaaaatgtttacatacaaggagatattggtgtaacactggctaaggtggtttgtacacatacaaagaagactactggaagcactagtgaggagagtagattggtcttgtgaaaag

SEQ ID NO: 97265 - DNA, 307 bp, Glycine max
tgtcagtttttataagatttgtaaatgattttatttaaaatgaattttttaccacgataattattacaaaaatgattcataaaccccaatgcgtaatctagagataaaaactgaaatcaagattgtcaattagacatatatgcactatacaaatgcccacctgtcactactctaagtattaaagtatcccgagcacaggcaccaaaccataccatatacaatatacaggaatcagttgggatgaaatttttcaaaatccaatatcagtttgctattttgttcggacctatttctttattatttgatg

SEQ ID NO: 97266 - DNA, 256 bp, Glycine max
tttctttgagccaattctaacgataataactttttactcggatgtccgattgagtctcgtaatatatcgacacgctcgaaattgaatgttgaagctctaagcctattcaaacaacaataacgttttactcggatgtccgattcattgacgtaatatatcgggacgctcgaaattgaaagttgaacctctgagccaactcaaacgacaataactttttacttggatgtctgattgagtaccgaaatatatgaagacg

SEQ ID NO: 97267 - DNA, 303 bp, Glycine max
tgaacattcaatttctattttctggggatattacgggactcaatcacacatgcgagcaaaaagttattgtcgtatgaattggatgtaaaaatccaccttcccttgtgggccacctcctattgaactgaactacttccaacatgcccatataaaggtatttctgattgacgaggcccataggttcctaataaaatttcgagcgtctcggtatatttcgggactcaatctgacatccgagtaaaacgttattagtctttgaaatggttcaaaggttgaacattaaattttcagcgcccccagata

SEQ ID NO: 97268 - DNA, 256 bp, Glycine max
tttcttggaattttgacaaacttggtgaacttggatccttacatgaatgacattgtggctgaaacagtgaatctatagttgtagacagatttttgaaacgttgatctgttgacttttttcattttaatttaattcattttactaagcctggtattattaaaatttaaaactaaaactcttacaagctaatcataaactttctctagtttactttgaaatggtaatgctctatcatacaacccctttactttcattt

SEQ ID NO: 97269 - DNA, 306 bp, Glycine max
tggtcgtataccatttttattttcaattaggatttgtaccatttgggattaaacctgtttttgggtaagggaatacgtataatttttcttacaatttagtgaatttaccaatgtgaagaagaacaaaattaaagaactagcagattttaacacacatgaccaactaccaaaccatattaattaatcgattgaaattcatttcaaaggacataattattattgaaaatccacgaccaactaccagactaaccacgacctatcaccaacttgaattagcttggactaaattcacaaggccttgtgaaa

SEQ ID NO: 97270 - DNA, 304 bp, Glycine max
tgaaggtgtgtagtccaccatcttttcatagtagaatactggtaatgtgtctactatcattatcattttttctccgtcattgaggtgccacttgagctgccaggtctctccatctttgggtgtattctttgaaagatctgtgcccttttttgcacatgttctgttgttgcatcctatctggaaccatatcaaaactgtactgatactgcctaatgaaggcaacaattaggtacttccaagagtggactcgagaaggttccaggttagtgtaccaggtaacagctaccccagtaagattttcttg

SEQ ID NO: 97271 - DNA, 240 bp, Glycine max
  unsure (1)..(240): unsure at all n locations
agcttagcctgannnagnnnnngccggngataggancgaagcgggcccgagaagagacaaannngannanccngcnangangaanaggaagccnggagcaaanggagagaacaagaagaagggagaaacccagggggnggncaccacnccnananggccaaannncccannagcccaacaanancaanacccaaccaancncagncccccgcannacccaccacccnaccagcnaagaac

SEQ ID NO: 97272 - DNA, 304 bp, Glycine max
taaaggaagtgaaagaatttttatgggcagaaatgtctctgcattgattggcaaatctgttccccaaatccttgaaaaatgtaaagatgcaagtacattcaacataccttgtattatagggaacaataagtttgataatgccatgctagatttaggagcttctgttagtgtgatgcctctgtctatttttaattctctatctcttggtcctttgcagtcaactgatgtggtaattcatttagctaatagaagtgttacctatcccgctggtttcatagaggatgtcctagttagagttggtgaa

SEQ ID NO: 97273 - DNA, 254 bp, Glycine max
tttcttataatgcaggggcgtcacttcatgatcttcaacagcaacccttcttagtgaggcggtgaagaaaaatgtggcatccacctgacgtgaacctcaaaagcgctccggatcctggctaaagaatacgctcacaaaaggctctataccatgtggcccgcacgtttcctagtgttcctagctataatgtgatgcccttggagtgggataaggaaccgcatggctaccttgtggtaaccttaacgctattgaaa

SEQ ID NO: 97274 - DNA, 271 bp, Glycine max
tgctaaactgtggaatctcttatgacctcccacactaattggcgtggtccattctcagatggccttgaatgtttcagggaccacttttaccctcttgctgccctataccaaccctcacaaaacaatactatgctctccaacagtaccctcctctatatcaagactatagggtgattttatctcagaactgaaagaacttgactcagatggactatggaaccatctaggaatcctactgctcactaaaatctcaatctatccatacaccgta

SEQ ID NO: 97275 - DNA, 260 bp, Glycine max
tttgctagcttgaggataagaatacgagagtgtttttgaactcaaaccaaaaaaggatgaggtgataattaattgtgacggggtcgtgggtggtggtagttgggataatatgcgtttttacataatcaatataatgttaatatcttcaagttctataatttaattcctaatttgatgattccaaatttcaactttccaactattgagcatttaatttttattaagcattacagaatttccaccattttctatgactatgg

SEQ ID NO: 97276 - DNA, 334 bp, Glycine max
cgagacacgagacactactcaagtctctcgcgaagaatatagaatcttctctgtctagttggcattgatccatataccaccatatgatatccccctgtgactatgtaacatattcgttgctgacctcggagactctgactataagagaaaaatgctaccaaactcacttcttggatgggcgcagagagctcataccaccgcgtgctcacaacatatagtaccacattttacacactacatcgtgagtctagacgcaacgggagtccatatgaggctggctactggacataaaaagcttcatttatggtgacctgacttttacgggcgtctttga

SEQ ID NO: 97277 - DNA, 254 bp, Glycine max
  unsure (1)..(254): unsure at all n locations
tttgcttgagaggaagagcactagnggtaattgtcacttcattgctggcaacttggtaaattggatatgtaagaagcaaggtttgactgcattgtccactactaaagcctaatgcatatcaactacaagttgttgtgctctacttctttggataaagaactaggttgaagactacaccatctataatagtaaaaatttctatcttctgtgataataaagttgctaccaatctttcaaaaaacctaaattgcatt

SEQ ID NO: 97278 - DNA, 303 bp, Glycine max
tgtaatgtggctgggttatcaaagaaatcatggtttttcttggaattcaaagcacttaagggtattatgagagcactcactatatccctttttacttatgaggcaaccaatctttcatagatttcccaaatttttatttacgataaaagaacaacaacacaaaggatctttttgtgggttctcattctatttccactttcattttcaattgttttttccaacaattttcaactgtgtgctgcttgtttttacaagaaatccctgcataagatatttacaaacatttctctcccccaaatttgg

SEQ ID NO: 97279 - DNA, 261 bp, Glycine max
agctttcatcaagtggtaatcagagcataaaagcttcaagtaggtgctccttaaacctccattaatttttttttctttaccttctcttccattgttgtttcttcatttttctccatgtatctcctcacatgtcttgctctaaatgttgttaacatgattctttagagtttccaccgattaaacttgctatagaagttagatttgattttctatggttcaaatttcttgttcttgttcttgaaccatgaattatgttgagtt

SEQ ID NO: 97280 - DNA, 295 bp, Glycine max
  unsure (1)..(295): unsure at all n locations
gaaaaaacacaagccnccagaagaatagagaaattcttcggttaagcaagggggcacagacataccaccctatgaaaataggcaaagaccaggcaaaataaccgatgcagacacggggaggctctgaccataataaaaaagtagggacccaacccaacccttttaagggcgaagaaacctcaaccaaccccgcaaacacaagaaagaggtccacaagctacaccccacatgcaaagactagccacaactggaagccatatgaggctgggaaccacacttagaaactcacagttag

SEQ ID NO: 97281 - DNA, 255 bp, Glycine max
  unsure (1)..(255): unsure at all n locations
agcttagttatgnnaaagcacaaaacaggacataaaaaaaccagccacgccccnganggagagcgcgccgcaaccaaaacccccagagcgaacagggaaaaacaacaggaaaaaagcaaaggggaggccaccgcgaagagagccgggacacggangcagcaaacagcgagngcccacccncgggcccgcagcanaagggccggagacgcngcggcnagagcnagaagagcaaccccgggagacaaaanaaccgga

SEQ ID NO: 97282 - DNA, 342 bp, Glycine max
gtgacgctatctaacactcacgcttcctaaggctctttatggattctttttcggagcactctcggggcctgcgcttagattgcgagtaaattactttatctttcttacaacagtggactttctttcagtgaatacaagcatggatccatggcttatatatttggcactcagatgatggatcaccacatgtttttctttatgtataccatatacccctcacacgatacgatggcgctctaacgaggactccctcataagatacaatggggatgactcatgagggactaggccctgttacatatctgccatcgcattgaaatactccacacaactgacgatctt

SEQ ID NO: 97283 - DNA, 258 bp, Glycine max
agcttgattttgacccatgaatagtccaaattagcctaagctcaagataagaatcacttgaatctaagctctgtgtaaaaaggtatgacatgtataataaaatagtgtcaataatacaaaaatgttcaaaaattaataaaaatcaacacttggcctaatgaagcacaatattagaaaaatcaactaaaatggttaaaagcaatcattaaaacatgtcaattattcacaaaatgaacaactaatgaatcctaaataatg

SEQ ID NO: 97284 - DNA, 306 bp, Glycine max
tggaatgtgccacacccgatactgttgtttgtcgatatggccagagtttaaccaagacccagtctccgatatgaaactcgtgatctcggcgatgaccatccatgatagctttcatacattcttgagctttaagcaacttttgacgtaataacgcgaatacggcttctctttgactcaacaattcatctactacttctacttttgcagtgccttccacatagtgaggataatttggtggtttatgaccaaaggttacctcgaacggagtcaatcccgttgccgagtgaacgaaagtgttgtacgacc

SEQ ID NO: 97285 - DNA, 249 bp, Glycine max
agcttgcttgtcagaatatatggggagatgctaatgtgtcttgggacagtgctccttcaattcacactgctggaggtcttctatgcatgtggaataatctatcctttgaggtagataggagggtgaaaggcacgaatttcctaatgtttgtagggagatggattaaggaaaatatgaagctgtacattgtaaatgtctatgccccatgtgatattgctgggaagagagaattgtgggaacaattgaagc

SEQ ID NO: 97286 - DNA, 307 bp, Glycine max
tatttcgatgtatattgaatagaacaaaagctggttatttatagaaaaaacaattataattgcctgtaatcgattaaatctacaaggtaatcgattaattcaatgaagtaatctattagattatctttttaatcaactaaagtgttcttcccaaaacctagaaatagctcaagaacaatgtaattgattagatactaaaagtaattgattaaattgtttttgttcgcttctgaaacacttatagaaagagaattaatcgattatatcacatagtaatcgattaaagcagagactcctgaataaatca

SEQ ID NO: 97287 - DNA, 259 bp, Glycine max
agcttgatttttttatccatgaaaaaaatatttgtttttagtttttataaaacaaaaaaaaaaagaagttatatattgacaaaagaacacaatatatttctcatttaaaataaaatatttctcttaaaatttactttatgtcttactaatgtgtccgtggtctgtggatagcatgtcattaaccatcactctcgacaacataataattgttattaaaagatacataaataatgtttgattaaaatatttttcaatctat

SEQ ID NO: 97288 - DNA, 306 bp, Glycine max
tcagtatgtttacaaatcatttttgtttctctttcattttcatttgttataaaacagttatgctttatgaattcaaaacttacggtggcttgctgaaaacccttgagatgactccttgttgaagatctccttgggcagtaacctcactcaaacttcctagtcgcacttcaaatttatcatcaagtagtatactgctagcttggatatctcttcaaaaatcaagactaaaatttcagtaatttgcaaatctgcaaaagttctttcaaacctcctcactttacacattgttaacagtgataatgaact

SEQ ID NO: 97289 - DNA, 259 bp, Glycine max
ttgctttatatatagacctgtcaattgtctccttctttgtttcctggatacacaacatatctatgtgttgtgtgttgaccatccttctaattgctggccacttgatccctttccctaaccctcttacattgtaggtgatgatattcatgggttgtcctcctgttccccagtctttcgacctctttggtgtctctatcttccattttcattagcttctgcacataccccttttgcatagacccagaagtcacacctaaat

SEQ ID NO: 97290 - DNA, 277 bp, Glycine max
gaggaatactttggaaaccaaggggctccgcttaagcaagagcaagaaaaaaactacgcaccgcgcttttagccagagacaacacgattgcggcccggaagtaaaattgagagaagatgccccaccacaggcttctaagtctaaataccacagaaccatcccaccagacgacggagaaagtaacgaagacgaccctcataagatacaagggggacgactcagaaggagcaaagcagcgggagacatctgtgatcgcaaagcgtttaccacacccaaa

SEQ ID NO: 97291 - DNA, 257 bp, Glycine max
  unsure (1)..(257): unsure at all n locations
agcttgataagngcnannnnncaccttctagcgaagccaatctgccggcttagcgagcatctgctaagcacaacactcatgggctaagcgcgaggaagactctggaagaagatgagttgtacaggttcgctaagcgcaccgcttcagtccatccactaagcgaggaaggcatacgctaagccaaaattcactaatgtgcgctaagcggtctataattgcgctaagcgcacaagcacgaacaaggccacctatttaag

SEQ ID NO: 97292 - DNA, 300 bp, Glycine max
tggatgattcatatgtttttatgcgcatctcttcaggttcctatagttgtaccttcctcttctcttcagatggtgtagactcaaagttgaggaacttcatggcccaatgagcctttgtttctaacttcactggtagggtgcatgctttttcgtacaccatttaaaacgaggaaaggccaatgagtgttttgaaggatgttatatatgcccataggcaatcatcaagatttgcaacccaatccttccttaatgtagctacagtcttttccagtatcctcttgatctccctatttgaaactt

SEQ ID NO: 97293 - DNA, 254 bp, Glycine max
agcttatatcaaggggtaatcagagcacaagagctggaagtgcgtgctccttaaacctccattactctggttctataccttctcttccatattttgtgacttcatctttctccatgaatctcctcacatgttatgtgctaaatgtagctaacatgattctttagagattccaccacttaaacttgctatctaagctagatttgattttctatggatgagataacctgatcttgttcttgaaccatgaattgtgt

SEQ ID NO: 97294 - DNA, 304 bp, Glycine max
tgcttgtggagctcctatgttagctggatcttctaccttcgatgagggccttcaatggggatcctgcaccttggtcatgcgggtcaagacacctgagaacaggtgataggaggctccatccactagggaatatgccctggtacaaagcgcttcaccacctagatgagccttggataccaagctcggacaggatgcttcaatggctgaaaagacagacagaaggggggcgcaccacttttaacgaataaactagggagagaagtggacctctgaagcgtctctcatgagactttcattcatcact

SEQ ID NO: 97295 - DNA, 252 bp, Glycine max
agcttgaatctcaaggaaaagtttgaaggagctttagaagatattttggctcttacatatccgactcctttgagtgacatttgtattggttgttaacttgattgtttcatcttagtacatttgatatctattttgcattgtggatcatcatagtgtgtgaaggaaattttctaagttagaaaaatttcttaagaggtaaaaactctttatttttatcgattacaaagttgttgtaatcgattacaataagtt

SEQ ID NO: 97296 - DNA, 305 bp, Glycine max
tctataccaccccatttcttttcaccttttgcaacatcaaaaagccaaagtgtgtggcaatcaacacaagatgatacaagtttacataattaatcataagtctcaaccaaatataagacaatcatccaaaagttaaaaccaaacataatccaagcataaataagtcataaccaaatataatccaagcataaaagactaagtgccaattatcgaaagataacgaaagttcagaaaatgataacgtagaaagcatagccaaatacacggctttaaagataataacatcctaaaaactgagacggtgg

SEQ ID NO: 97297 - DNA, 258 bp, Glycine max
tttcttctcaaggaggtgagcttagttattagaggggtgtgtgtagctaagctctagcttctcaaggaagctacctaggctataaatagaagtatgtgtaacacttgtggtaactttgatgaatgagagtcttgtgagacacaactcaaagttcaacatctctccctcgtttactccttcaatttcgtgctccccctctctctttctttttcctccattgaagaatcctctccaaggttcttatccaagacacattct

SEQ ID NO: 97298 - DNA, 302 bp, Glycine max
tgtagaatggctagacatgatacatgtcagggtttggtttggttcaaggataaaagggatgccccacattatttccatgacacaaatgcaaaaatgatgatttggaaactttatgcaaaactggtcatgcatgcacctatgcggacactcaagtgtcaaatttttatggtcatgtgatgctagggctcaggattcatttcctctattttaatcaacccaatgtttccaaaatatgttcttttatcaatttgggcattcacccgagtccatttcgggcgtctgggaaaatcttcacagcattc

SEQ ID NO: 97299 - DNA, 254 bp, Glycine max
  unsure (1)..(254): unsure at all n locations
ttgctttaaggngagactcaggactgtcaccaagttctgctatgcaatgagcaatcccatcttttatagacaccagaccaacatgactaagtggattctgatcaaagaattccctgataaatgcctcaacttgtttccccatcacaaccatcctacttggtcgaaagtctctctctgaagctgccttcacatgataacagaaactgagttatatacaaggactagagattaaaaggatatgcatgtgtcatgta

SEQ ID NO: 97300 - DNA, 301 bp, Glycine max
tataaaataagattcatgttacttaaaagctaattactacatacttttatatttacaccacttaattagtaactttctgaacttataagaactttctgaatccatatatagaattttataaacaacaaatgagtgaaataaattagtactgtattaaatatcttagtttagttaatcaaaataacaagttatgtatttaaagcagataaaaattgatttcgctaatacgtcaaaaaaactcaatagcttgaaaatgccacaacagaaattaagattttttaggtcatacttagaatgtgtc

SEQ ID NO: 97301 - DNA, 250 bp, Glycine max
agcttccttaaagaaccctttcgcttctttgatggttctgccatttgagggatttttggaagttttgattggtggaaaagaaagagaatgaaaaaatgatgaattttgggctttgtgggacttgatttggacaagaattaagggatagctcgctttttgaaatttaggaatttaggggttgcgtcactgtagaaatcgcgttccagcgatttctggaaaattcgaatttataggctgagacgctctgtaa

SEQ ID NO: 97302 - DNA, 302 bp, Glycine max
tttcgattcattctatgtttccatggtggtccacattgtgtttcgtgtatctttattctcatttcatttactttttataccccctgttgacgtgcttaagccattttacttaagtcatttctcgcttaacttaaaaataaaataaatttccaccgaacgtttgaattgtatgatccgtaaactttggttaagataaattccgactgttcggtcgtgccgtaaccacgttgaaaataaaaaaaagagataaaaaataatataataataaaaaaaacatcttttagtaaaataaagcggaaaat

SEQ ID NO: 97303 - DNA, 261 bp, Glycine max
agcttgtatttttaaagtctcacgattgtcacgtgctcatgcaacaattgttaaccgtggctatacgagacatcttgccaaacaaagtcaggttagcgataactcgcctgtgctttttcttccatgctatatgtagcaaagtcattgatccagtcaagtttgatgagttggaaaatgaggccacaattatattgtgtcagttggagatgtattttccccttgctttctttgacatcatgattcacttgattgtgcatctgg

SEQ ID NO: 97304 - DNA, 309 bp, Glycine max
tctaaactttatacaagaataaagctctggtaccgcttgttaaacaagtggcctcaattatcttaagaaagggggttgaattaaaatacaaaaactatccccttaattaaaaatttaacttttttatattaaaaatgcaacccttattatgagttactctaagaacaattcaaaacaaacttctttaaagcgaaatataaacaataataaataaaagaagtttaagggaagagagaatacaaactcaatttttatactggttcagtcacgccctatgcctacgtccagtccccaagcaacatgcttgag

SEQ ID NO: 97305 - DNA, 259 bp, Glycine max
agcttctgttgggacatcttgacttgctttccaatctgacattcaccacagattctgccttcttctattttcagattgggaatgcctctaacagcacctttgtcaatgattttcttcatgcctcttaagtgcagatgtccaaatctttgatgccatattttgacttcatcttctttggagaatagacatgtggaggagtaactggtttcttgaggtgtccataggtaacagttgtcctttgatctgctgcccttcatta

SEQ ID NO: 97306 - DNA, 308 bp, Glycine max
tgcacaacaagttttgtactaaatgaaattctagtgtagtgctttctccaacatgaagtttagttcttaactaactatctaacactaatatatagagtgctagtaactaactaactacgtacctaactaacaagctgattaactaactaagctagttatacaaaacaaaagcccaaactcgtaaccctattcttcaagtacagaggttctgacttccaagatcaatttgaccttcaagatagaagaattggccaaagcttatctctaaacaaattaaagatatttttcttagctttccagtgactact

SEQ ID NO: 97307 - DNA, 255 bp, Glycine max
agcttactactatttcttggatgggtactctagatacaatcagattgttgtggaccccaatgatcaggagaagatgactttcgcatgcccttttggtgtctttgcctacagacaaatgtcatttgggttatataatgcacccgccacatttcaaatatgcatgttggccattttttcagatatggtggagaaaagtatcgaagtattcatggacgaattctcagtatttgggccctcttttgaatgttgcttgaa

SEQ ID NO: 97308 - DNA, 306 bp, Glycine max
ttgaccaaacccaagctgctattgtttccttagaaacttgacttagcaccttgtcttcaaaactgacgataatagcactgtgagccttctgcaataaatgctttcttatccccgtctgacatcatctttttccagtaaggcttattcatcaagagcttccaccagaccctgatgaacaagaagagctcttatcatcaattgacataccccacaatcattttgccctgagattttatcaaccttatactaggtcgagcccattttttgaaaccaactcattatattccacgctcaccgaactaggat

SEQ ID NO: 97309 - DNA, 256 bp, Glycine max
agcttaatcattatactttgagcgtctcgatatattacgggactcaatcagacatccgagtaaaaagttattggcgtttgaattggctcagaggttcaaaattcaatttcgagcgtctcgatatatttcgggactcaatcagacatccgagtaaagagttattgtcgtttgagttggctcagaggttcaacattcaatttcgagcgtcccgatatattacgtcactgaatcggacatccgagtaaaaagttatagt

SEQ ID NO: 97310 - DNA, 306 bp, Glycine max
ttaagccaattcatacgactatttctttttactcggatgtctgattgagtcccgtaatatatcgagacgcacaaagttgaatgtttaagctttaagccaattcatacgacaataactttttactcggatgtctgattgagtcccgtaatataacgaaacgctcgaaattgaatgtttaagctttgagccaattctaacgataataactttttactcggatgtccgattgagtctcgtaatatatcgacacgctcgaaattgaatgttgaagctctgagcctattcaaacaacaataacgttttact

SEQ ID NO: 97311 - DNA, 257 bp, Glycine max
agcttctttccatttggacttaccttgaattaattcctttgatagcccttttgagccttgtttccctttccttgatttgaagctcactacaagccttaagtgaaaaaccatgatattaccatatccttaaggaattttggagctttggaattgttttgggaataagtgtggggggtttttgtttcattggacaacttgttttgttggctatgcttcatgatgtattttgggccgtacttgatgtacattgtatactg

SEQ ID NO: 97312 - DNA, 305 bp, Glycine max
tgtcctttgtttagacatgtttgtttcatgatttgggacttgtaggattcaatttgggcaaaattggatgagggaaatagtggttttcgaaatctgcactttatgcagaattttgttgttgaaatgtgcagcagaattttgtataagtgcagaaaaatgcttgtgtatggctggttgtgaaaaggatagtacatatggggttctggacatttgctagcagatcccaacgggcataatgtagacttatgtactagagacttccagtaaaattttcgagtcgatccaatggttaacgaattggaacc

SEQ ID NO: 97313 - DNA, 256 bp, Glycine max
tttgcttattgctcaacgcttaactattgtactaggctactgttcttcttttttactttttgtatctgctctgttctgagttttctgtaaaagcttcctttgatatatataagagaagctgagtgttgagaaaacacttaagcatttcacccaaaaatatctctcattacattcaagtaccaccaaacaagcactctttaaaggaaacaaaattgtgattaaccaattaatatgaagtatttataaggaaacaata

SEQ ID NO: 97314 - DNA, 305 bp, Glycine max
tctctgcttttgtctgttttttaactaacaaaaatcagagtcctcttcaaaaggctgtgtgggccacaaaccgtccaaccctacaacacgcaatactaggcctattttaattaaataatcgctgtcacattattttttatcgaataatatatagtatctttcatcattatactgacacgtattccagccatataacagatagcataatataattgatgcgaatgtactacttgttacaggagtacgtatatgcatgtggtttatgatgtcatggcgttttctatatatcataattagattcttaa

SEQ ID NO: 97315 - DNA, 256 bp, Glycine max
agctttgaaatccaaagatctaatccaaggtagatgtttcataaatgggattcctttgcttgtgttgtttgattctggtgccacccattcctttatatcttgtttgtgtgtagaaaaacttaagctttctatgtcttctttaaataaagatctagtagtagagacccctactagtggttctgtgttaacttctgatgtgtgtttgaattgttctgtggagatttctggtaggatattcttgattgatttaatttgt

SEQ ID NO: 97316 - DNA, 304 bp, Glycine max
tgagatgaggaagtgtagattggtgaaacttcctgcttttattcgttgaccacagagtggtaccaggagatatgtcgcgggggtcaagagaccttggggacgtcaagtggggtgctattgcccaaaaccaagcttgaccaatcccgacccaacccgggcatagtcagtcagtgagaacctgtgatgtacctaaacaggcgagctcctggcagtcaacagataaaaggaacaaagaccacaaagcaaggaggctggtgtggtggctggccagctttgaatcttgtgtgatatatgggttatggcc

SEQ ID NO: 97317 - DNA, 254 bp, Glycine max
ttgctttaataaatttctatagaaaagatgtggtagtttttatatcttttaattaactattgtttagctgatgggatttctgttttatttttagtgttagaaggaaccttatatcaccttcatattttgaattagtttgttagacttatatcacattaggcggtttcaacttaagtttaaacaacaaaaccaattcataattaaaagaccgaaatttattgattcagttataaattaatatgaatttttgaaac

SEQ ID NO: 97318 - DNA, 304 bp, Glycine max
tcttatccaaggctcatcttggtggtgaagctctttcttccatggcttattccctagtggatgacgcctcctctcacctcttctcatttgtcttcctctgcatctccatggtggaaaatcaccattaaaggacctcattgaagctcaaagatccagcctccatagaagccccataagcaagcttccatcaagtggtaatcagagcacaagagcttcaagtaggtgctccttaaacctccattaattttttgctttaccttctcttccattgttttttattcattttttctccatgtatctcctc

SEQ ID NO: 97319 - DNA, 256 bp, Glycine max
ttgctttatgatgatgaatcaagttgattcaagtagttttgatgatgacaaagatgatgacaaaaagtccaaagaatgatttcaagattgagtcaacaagttcaagatcacgattaattccaagtttcatgagaagaaatcaagaagattcaagaatcaagagaagtttgatttcaagattcaagagaagatgaattcaagattcaagagaagaaatcaagaagacttcacaagggaggtattgaaaagttttttc

SEQ ID NO: 97320 - DNA, 301 bp, Glycine max
tcaaaataaaaaactaaccggtcaatgaacgatgaatggtgaagaacggacgaagaatgatgaagaacggtcacggaaacgctacggaagcgactcggccttgatttttcttcttctttctccttcttatgactaatttcactcaaatcttgttgatttcgggtgctggaccctttcttcagcccctttcacgcctatttataggatatgaggggtggaggttgcacagaagctcgcccaggtgagctacttgcttcttcctgaagtaacttgctcgcctaggcgagctggttacttcatc

SEQ ID NO: 97321 - DNA, 256 bp, Glycine max
agcttgtgcccttaccactttgtagtaattcaataccctgaccaagagcttttgtggatgtgggaatggaaacaaccatgggagaagcagaaagaaataattaatttgaaaaattaattttgaaaaacttgaggtacttactcttttaacccttgggagaaggggaaagaaatccccacatatgtgcatttattgacaaatgcctctttatgccctttaaatacaactactgatacttgatttagaagtctccaaa

SEQ ID NO: 97322 - DNA, 303 bp, Glycine max
tttaaagagcaagagttgataaacaaatcaccgtagaagaaactagaaccaatttaagcaaaaactattaacttaaaatctcaactaggaaacaagaagcaacaaaattccatgccattagttaagcatcaaatatgaatttcaaaattatatataacacaagttcaatcaattaaactctagacaggggaaaaaaatttatatataacacaagttcaattaattaaatgaagaatttatgttcagtcatgcgctcaaactaacatagtgtaagtcttccatatcttaatttagcaatgcatg

SEQ ID NO: 97323 - DNA, 255 bp, Glycine max
ttgcttgtaggattatggggtacccatcacatgtggtactaggtggcggtcgggcgatggtgcacaacaagttttccacatccacaaagcgcgcataaacccaccatcccctgttgcccacctccaactgagctcacgtactcccacgtagcccatatcctcgtttctctcaacaccgggtccccatcaatcctcccaagctttcccaacatcaaagcaaaacaacattcaaacagcacaagctatcacagccaa

SEQ ID NO: 97324 - DNA, 302 bp, Glycine max
tgaggaaggtattttcacctctcacgtttgtctcaaaggacaacagcctattttttagatttgtggaaattgtgttaccttaactttatttctttttattttttttgaggtcgacaaaagcggggcttttgctcctacgtaccctccttaggaaagaaaatcacacctacgtagttctttcttgagcgtgaatcaggcgattctttttacttgagaggtgatcattttaaggcgttggaccttaaaaatgatccattttacttggtaagaaactgaaataataaattttcaaaaccctattt

SEQ ID NO: 97325 - DNA, 251 bp, Glycine max
agcttgcttgagaatatgttgaatcaattttactcacatgtaattttataatttttgataaattttgactaaagtaaaaaaatgtgttagaatgtatgactataatttttaggacaaaatatttttttcctcaacttttgatgttttttgtttttagtctttaaacaaaatttggtctagtctttatttttatatttttctttatttatgtttttagtctttattgttaagtatcattgttaggtgatgat

SEQ ID NO: 97326 - DNA, 302 bp, Glycine max
tgagccacgtgagtttgtctttgttattttgaaattcaagagcgtaatcggatattcttgtttttttttttttttaatgtgacacattttgatttggcattgtccttgccagttttgtagcctcttcacaacgctcatacacgtctcaaaaatacattgtttgtgatctacagtatcacttccaacacacacttaaatagataaaggcaaaatttgtcaagagtcacaatttatcccccttctagtgactctcaggtccacttcaccattttccacttttgctgagcagaagcaacaaatag

SEQ ID NO: 97327 - DNA, 258 bp, Glycine max
agcttttatcaaagagtttttactctctgataatcgattaccagtttactgtaatcgattaccagtggcaaagtttgttttcaaaagctttcaaactgaatttacaacgttccaattaatttcaaaatggtgtaatcaattacaagattttggtaattgattaccagtgtgtttgaacgttgaaattcaaattcatttttgaagagtcacatcctttcacaaaaatgctttgtgtaatcgattacaatgatttggtaa

SEQ ID NO: 97328 - DNA, 307 bp, Glycine max
tttattgagaagtattgctttcttagacaggtccagggtgatgcaccacaggccgcggacgcgccgccacctcatcaggctggtccagccggatcgtttgatacggagcagtatttgtggcatttggttcgccagcaggcggccaaccaccgggctcatgtacagacccatgattgtctttattagatgagtctcagcctgcagagccagggctttacatcttttccatgccctactccggaccagttcagggcagagatcgtatggcctggaaattggcctgaggcccgggcaggagaggcaccat

SEQ ID NO: 97329 - DNA, 258 bp, Glycine max
agcttgattatgagctcctaggggtattctattttagggttgaaacttgagtatattcttttgagttgttactggtttcaatcccaattgatgaagctgttgtaaaatttatatttttgccttgataccctactcagattagttttgtcttttatttgttaaaaatattagagtattcagtagtaaatagtattaacaatgttattgaacatcatttatactagtaatagaacactagtaattgacctagattattat

SEQ ID NO: 97330 - DNA, 308 bp, Glycine max
tcaaggtaagataagatgattggttggagagggagagaaggggcatgaaatttatgcctcaaatgaggtttgaactttgaagtataatttctcaaatgaacaaagttcaaaaaatacacacacaaggcctctatttatagcctaagtgtcacacaaaattggagggaaatttgaatttctattcaaatttcacttgaatttgaatttgaatttgtggagccaaaatttcactaattatgattagtgaattttagatatggttcaacccactactccaagatcaagtccaatattctccactaagtgcg

SEQ ID NO: 97331 - DNA, 256 bp, Glycine max
agcttcatataagtttatatggcttgaaacaagcaccgaggcaatggtacaagaagtttaatgagtttatgagcaactcaagattcaacagatgtgacatggaccattgttgctacattaagaaatatactaatagctatgttatccttatcatatatgttgatgacatgttgattacaggatctagtatggcagaaattaacaggttgaagcagtagttggcaaaaaactttgaaatgaaggatcttgttccagc

SEQ ID NO: 97332 - DNA, 306 bp, Glycine max
tctgcatgtctagagagttctaaagagagaaaggtccaagttccagagagtttgagagatttttttgtgtgaagatctgcagagaccagagcttgaagaggaagtcgtcctgagagcttgagatgagtttgtgagtgattgtgaggtcctagaggtggaggagacatccccactacttgtatttctacaatctttcatctttcttttctctttgttgtaaaggaagcttcccagttatggaaagctaaatcctctattggatcttccttgtaggtacttgatgtaaatatctttttatctatctaa

SEQ ID NO: 97333 - DNA, 256 bp, Glycine max
agcttgttttcgattacacatatactgtaatcgattaccagagcagatttttagaaaatattctcaacagtcacatctttttatgtggttcttgaatgactatcaaaggcctatatatatgtgacttgagacacgaatttgcgaagagtttttcagaacaaaaaggtcttatcctcttataaagcaaaatcggtttatcctcttacaaattccttggccaaattacttgtgattcaataaggaattatttgagtgc

SEQ ID NO: 97334 - DNA, 305 bp, Glycine max
tggagaggatgcttcaatgtgtggaaaagaaagagggagagaaagagagaggggggagcacgaaattgaaggaataaaagaggtatagaagtggaactttgaagtatgtctcacaagactctcattcatcaaagttacaacaagtgttacacatgcttctatttatagactaggtagcttccttgagaagctttcttgagaaaacttccttgagaagcttctttgagaaaacttccttgagaagctagagcttagctacacacacccctctcataactaagctcacctccttgagaagcttcctt

SEQ ID NO: 97335 - DNA, 260 bp, Glycine max
agcttgacaaaccataaataatttttttataggagagcattcaccccttccccattttcttgacaaaccataaataatttttttatagtcgtaaccttattgtattgccaacttaacagcacacaacaatcacttgataaataagtgcttccagctcctatttcttagtttttttaattaccataacccacagttgacaataatgctaaagcacaataccatataatgagattcgaatcaactgtgtgctattatttata

SEQ ID NO: 97336 - DNA, 305 bp, Glycine max
tcatcgtagaccatggtatgttcatcatggtgtgaatcacgtaggtttcaggttttgatgatgccgaaaagaattcacttgataatgattgtcatcataaaaaagggggagaatgtgaatgtatgaatacaaggttttgatgatgccaaaagaaaaatcaaacaaggttgcttcaacaaacattcgaaggttaaacattgcttcaagattaatacaaggttacttcaacaaacattcaaaggttaagcattgcttcaagattaattcaaggtcaagcaaacaagatcaaggaaaagataatgcct

SEQ ID NO: 97337 - DNA, 256 bp, Glycine max
tgctttgatactttgtgaatggggatacaaaagaattctcaggcaattagtcctttgaaaacttttgtataagggaaagggaagaatcaaaagaattctcagactgtgtcattttgaattctttgacaagggagaagggagacacaaaagaattcaggcggttggtcctttgtttttttggaaaagggagaagagagacacaaaaagaattcagacggttagtccttggtgaattctttttgcaaagggagaagag

SEQ ID NO: 97338 - DNA, 303 bp, Glycine max
tgtgcccccttctctttttcgctcatacaagctttattaagcatatacttgattttctttcctcaaacatattcttacttgagcgtcagagtcctttgttttgaaggtcccctctctttcaaaggtacccctccaagccaacgcgctaagtttgggaccccactcaaccatgtccaccttgatgtgtgacgattccggattttggtaagaacatttggcgtccaccatggggtgcgataaaacatgccccgcggcctctcgtcaatcttttcatactcatccatggttagcagtcgatctggc

SEQ ID NO: 97339 - DNA, 257 bp, Glycine max
tttcttgggtgatcaagtgaattctcacaaatggtcatatcaagaatgctataataaatgttcttagaccatgattttggctgcaacatcaaggtttttagaccgattgcgaccacaatcggtagcagttgtcagtgatttaccgcaatgtcaagaatcatgacaaaaccgtgtgagtgagaccacaagtaaaaaccttggactatatatataacactagaaatatcaagttcaccacagaaatttttaaacaatga

SEQ ID NO: 97340 - DNA, 304 bp, Glycine max
taaagtatgcccgagtcattcatccctatgagatgttgttgaagtattggcgatcagaattgccattccttggattatagggttgaaccaagctcatgcttttacaaaaaggttcatcaagtcaagttgaaatatggaagtaaccgtcctacaaaatcggggcaaaagatgaattgagtcacatcactgcttcgtctactgccaaacatatttaggattgttgatgtccttgttacttccagtttcaccttgacaaagatgtcatggaccatgttgaaaatctaaattgattcaaccccatatc

SEQ ID NO: 97341 - DNA, 255 bp, Glycine max
  unsure (1)..(255): unsure at all n locations
ttgcttgcaatggnttgttatttttaaatcataatagtagctggtttgatacctcttcatcatttgaaaagtttggaacagcaggtagtgtggaagaagagtaagaatatctatctttccaaaatcttggagggcaattaggcatttgttctggattttattcacgatcctgacatgtaagtgtatcgtgtttgagctccaattataagttcaacaagttttgctgtaacattcattagaaaaacagatcagatg

SEQ ID NO: 97342 - DNA, 296 bp, Glycine max
tagtgcgaaggacattttttttcaccatagacattatttttcaaattccaatggtgggtgtgttcagaaataacctcccaattacatgttcaaatttcataatgatccaactattataaagtctgagatcgtcattttactgagacaaatttgagtgtttacaggaaaagaaaggattttagagaatgaagaatggatttgagaggaagagatggcatagaataatgtcgtaaaagtaaaaagtgacatattacgtctaccttgagttctttacgcccattatttactcctatttt

SEQ ID NO: 97343 - DNA, 253 bp, Glycine max
agcttatataaaactaaataaaccctttcaacatcttgaatgagagcatgtggatctcaagaaagctcatcaagttcacttagttgaatttgtcctggaaaccacttcgcctggtagtgtacaagatgcctttgtttgtgaggatgtcaaagcactactagacgaaaaggtgtctagtggatacaaaactcttaaggattttcaagacttggaagagagggtaaaatccttaaccatagctcttgaagattca

SEQ ID NO: 97344 - DNA, 303 bp, Glycine max
tatccttatggcttgccttctgatttcactccccgtgccaccccggaagatttaagccaagcccctacttttgaggggcaactcccgccttatgacgactatcccggacaagacgatgaggaaggagatacccatcttggccccctactccacctcaaagatccgtccccacatgaactaccccaaccgagcatagtccgccatatcccggcctcacccacacccgtaaaagaatctgtccccttcgcggaagataagggaaagattgaggcgcttgaagagaggttaagagcagtcgagggc

SEQ ID NO: 97345 - DNA, 255 bp, Glycine max
agcttccttgaacctgtcaaggaggaatccaaatcctttaatacaatagctggcaattgatcaatgtcccaaccaacaactttgcagatgacttgtgcacaggccctgtgagctctcttcctttttgtccttagtatggcagtggagtgatgaattagtgtcttacaattcttaaacctcttccatactttcttccttatacctccacaaaccaaacaatgaaaatccccttccttttgattgctctcataatat

SEQ ID NO: 97346 - DNA, 302 bp, Glycine max
ttctccactaagttgcctgattcctgaaatgtcctttttgatgacaatggtcctagatgcagggaagaatttctccaagaacaccttcttaaggtcatcccagctgaaaatggacctgggagcaaggtagtatgaccaatcttttgccactccctctagagaatgaggaaaagcctttagaaagatatgatcttcttggacatcagggggcttcatggtggaacaaacaatatgaaactccttaagatgcttataaggatcttcacttggaacaccctcatcaggatattgaatgcacaagc

SEQ ID NO: 97347 - DNA, 253 bp, Glycine max
agcttcacccaagtaataattactactatactcacaataactagtatgttcactcaaactctagatgcaacaatcccctaattgctcttttgagttttttccctttcctaaaaggttctttttaagaacatacttctatgacaccttcgtatgctctctttagtaaggatccttgagtggagatgattacaaacactctatgggttcgaataattttgcttcaaatcctagagtgtttgggctaaagaagact

SEQ ID NO: 97348 - DNA, 302 bp, Glycine max
ttgacaagaccatttctctgctgtcttctacaacaagataaaacagggaaatctattctaaagatacatctaataataacccataatcataacactaactctttcaaaaatcttgactcttatttcactcttaatcctaatctatctacaccttcagtagtcactacacccgaattgtctcaaccgtcttgctctcattctacttctgcacctcttgttcctcctggtttttccactaatccagatcattcacctacaattcttcttcttgaatataattcactcaccctctctgaatccac

SEQ ID NO: 97349 - DNA, 251 bp, Glycine max
agcttcacaagcaagcttccatcaagtggtaatcatagcataagagcttcaagtaggtgctccttaaacctccattaattttcagctttaccttctcctccattgttgtttcttcatttttctccatgtatctcctcacatgtcttgtgctaaatgttgttaacatgattctttagaatttcaaccgattaatcttgctatagaagctagatttgattttctatggttcaaatttcttgtttatgttcttg

SEQ ID NO: 97350 - DNA, 300 bp, Glycine max
tgtgattcagtaatacaccattaatgacagcttgattcttatttcttatatgcatgttatatgcttgtggtaggaatctataagtctatgtatgtttgttgtatggatgtttgtgattccttgtttgtatcgatgttaatgccttatagtttgatgacatgtattaagatatatttcataaggaatattattttgattgtacctttcaattctagtgcaacctattatttgtgttgcgtgcttaagtcaaatagtttgattacacttgcaagtccgagtataattcattctttatgttat

SEQ ID NO: 97351 - DNA, 258 bp, Glycine max
agcttgataatttccaaagtttgtaggagtgagacaaagggcttcagggaaatgggcagcagagatcaaacacacatcaaagaagattaggctacaactattagtttgtgttaaaagcaattcaaatgatggcattttgatattctttgttaaactagtagcttgaaaaatacaatagaaacatgggcaccgagagacatttatcaaaatagtatataagtataccttgaatgattaacaattttcttgacttttact

SEQ ID NO: 97352 - DNA, 297 bp, Glycine max
tgtctcaacgtttatgcgatacagagaccaacatgttagctatcatcgccaagtaccaagaagagttaggtctagccacggcccacgagcatagaatcgtggatgagtatgcccaagtatacgcggaaaaaaaggctagaggaagggtgatcgactctttacaccaagaggcaaccatgtggatggatcggtttgctcttaccttgaacgggagtcaagaacttccccgattgttagccaaggccaaggcgatggcagacacctactccgcccccgaagagattcatgggcttctcg

SEQ ID NO: 97353 - DNA, 259 bp, Glycine max
agcttgataattaccaaagtttgtaggagtgagacaaagggcttcagggaaatgggcagcagagatcaaacacacatcaaagaagattaggctacaactattagtttgtgttaaaagcaattcaaatgatggcattttgatattctttgttaaactagtagcttgaaaaatacaatagaaacatgggcaccgagagacatttatcaaaatagtatataagtataccttgaatgattaacaattttcttgacttttactt

SEQ ID NO: 97354 - DNA, 306 bp, Glycine max
tgtctcaacgtttatgcgatacatagaccaacatgttagctatcatcgccaagtaccaagaagagttaggtctagccacggcccacgagcatagaatcgtggatgagtatgcccaagtatacgcggaaaaaaaggctagaggaagggtgatcgactctttacaccaagaggcaaccatgtggatggatcggtttgctcttaccttgaacgggagtcaagaacttccccgattgttagccaaggccaaggcgatggcagacacctactccgcccccgaagagattcatgggcttctcggctattgtc
